United States Patent Application Publication US 2007/0042381 A1 - sequence listing, part 84

SEQ ID NO: 3848139 - RNA, 16 nt, Human
ucugaauagaaauggg

SEQ ID NO: 3848140 - RNA, 13 nt, Human
ucugaaugcugcc

SEQ ID NO: 3848141 - RNA, 20 nt, Human
ucugaaugcugccacaacca

SEQ ID NO: 3848142 - RNA, 13 nt, Human
ucugaaugcugcu

SEQ ID NO: 3848143 - RNA, 14 nt, Human
ucugaauguaauuu

SEQ ID NO: 3848144 - RNA, 20 nt, Human
ucugaauguaauuuguguaa

SEQ ID NO: 3848145 - RNA, 13 nt, Human
ucugaauguucug

SEQ ID NO: 3848146 - RNA, 19 nt, Human
ucugaauguucugacauua

SEQ ID NO: 3848147 - RNA, 22 nt, Human
ucugaauguucugacauuaaca

SEQ ID NO: 3848148 - RNA, 23 nt, Human
ucugaauguucugacauuaacag

SEQ ID NO: 3848149 - RNA, 18 nt, Human
ucugaauuaguccuugcu

SEQ ID NO: 3848150 - RNA, 15 nt, Human
ucugaauuauuuucu

SEQ ID NO: 3848151 - RNA, 20 nt, Human
ucugaauuuacuuccuugca

SEQ ID NO: 3848152 - RNA, 15 nt, Human
ucugaauuugcaaag

SEQ ID NO: 3848153 - RNA, 17 nt, Human
ucugaauuugcaaagua

SEQ ID NO: 3848154 - RNA, 19 nt, Human
ucugaauuugcaaaguacu

SEQ ID NO: 3848155 - RNA, 21 nt, Human
ucugaauuugcaaaguacugu

SEQ ID NO: 3848156 - RNA, 18 nt, Human
ucugaauuugcccuggga

SEQ ID NO: 3848157 - RNA, 19 nt, Human
ucugaauuuuuaaacaagu

SEQ ID NO: 3848158 - RNA, 15 nt, Human
ucugacaacagacuu

SEQ ID NO: 3848159 - RNA, 13 nt, Human
ucugacacaaaaa

SEQ ID NO: 3848160 - RNA, 13 nt, Human
ucugacacacagc

SEQ ID NO: 3848161 - RNA, 19 nt, Human
ucugacacacagcucuguc

SEQ ID NO: 3848162 - RNA, 21 nt, Human
ucugacaccuauuuuagacaa

SEQ ID NO: 3848163 - RNA, 17 nt, Human
ucugacagcagcaucuc

SEQ ID NO: 3848164 - RNA, 13 nt, Human
ucugacagccuca

SEQ ID NO: 3848165 - RNA, 12 nt, Human
ucugacaggcaa

SEQ ID NO: 3848166 - RNA, 21 nt, Human
ucugacaggcaaugcuggcug

SEQ ID NO: 3848167 - RNA, 20 nt, Human
ucugacaguuuuucuguuuu

SEQ ID NO: 3848168 - RNA, 23 nt, Human
ucugacauaauccaguaaaauaa

SEQ ID NO: 3848169 - RNA, 15 nt, Human
ucugacaucucugca

SEQ ID NO: 3848170 - RNA, 18 nt, Human
ucugacaugauuccuucc

SEQ ID NO: 3848171 - RNA, 23 nt, Human
ucugacauuaacaguuuuccaug

SEQ ID NO: 3848172 - RNA, 22 nt, Human
ucugacauuaugugguuuuaga

SEQ ID NO: 3848173 - RNA, 23 nt, Human
ucugacauuaugugguuuuagau

SEQ ID NO: 3848174 - RNA, 22 nt, Human
ucugacauucucaggaagcccc

SEQ ID NO: 3848175 - RNA, 17 nt, Human
ucugacauucugauucg

SEQ ID NO: 3848176 - RNA, 18 nt, Human
ucugaccacacuuccugu

SEQ ID NO: 3848177 - RNA, 22 nt, Human
ucugaccacacuuccuguccag

SEQ ID NO: 3848178 - RNA, 19 nt, Human
ucugaccacuugaggccug

SEQ ID NO: 3848179 - RNA, 13 nt, Human
ucugaccagcagc

SEQ ID NO: 3848180 - RNA, 16 nt, Human
ucugaccagcagcgcc

SEQ ID NO: 3848181 - RNA, 14 nt, Human
ucugaccauuucag

SEQ ID NO: 3848182 - RNA, 18 nt, Human
ucugaccauuucaggggu

SEQ ID NO: 3848183 - RNA, 14 nt, Human
ucugacccagugcc

SEQ ID NO: 3848184 - RNA, 19 nt, Human
ucugacccugcuucaaaua

SEQ ID NO: 3848185 - RNA, 23 nt, Human
ucugacccuuacagccucugacu

SEQ ID NO: 3848186 - RNA, 21 nt, Human
ucugaccgaaacagcgcuggg

SEQ ID NO: 3848187 - RNA, 14 nt, Human
ucugaccuccauga

SEQ ID NO: 3848188 - RNA, 16 nt, Human
ucugaccucuuggcca

SEQ ID NO: 3848189 - RNA, 23 nt, Human
ucugaccuggcaucuaauucuga

SEQ ID NO: 3848190 - RNA, 21 nt, Human
ucugaccuucagcucacgcuu

SEQ ID NO: 3848191 - RNA, 14 nt, Human
ucugacggcccugc

SEQ ID NO: 3848192 - RNA, 15 nt, Human
ucugacggcccugca

SEQ ID NO: 3848193 - RNA, 13 nt, Human
ucugacuaauuag

SEQ ID NO: 3848194 - RNA, 15 nt, Human
ucugacuaauuaggc

SEQ ID NO: 3848195 - RNA, 23 nt, Human
ucugacuacugggcaaagagugu

SEQ ID NO: 3848196 - RNA, 12 nt, Human
ucugacuauaac

SEQ ID NO: 3848197 - RNA, 12 nt, Human
ucugacucccaa

SEQ ID NO: 3848198 - RNA, 15 nt, Human
ucugacucucaaauc

SEQ ID NO: 3848199 - RNA, 16 nt, Human
ucugacugaugcuuuc

SEQ ID NO: 3848200 - RNA, 14 nt, Human
ucugacugcacgug

SEQ ID NO: 3848201 - RNA, 20 nt, Human
ucugacuuaagcugccucaa

SEQ ID NO: 3848202 - RNA, 14 nt, Human
ucugacuuuacacu

SEQ ID NO: 3848203 - RNA, 19 nt, Human
ucugacuuuagccuaccua

SEQ ID NO: 3848204 - RNA, 23 nt, Human
ucugacuuucuuuuuugauauag

SEQ ID NO: 3848205 - RNA, 17 nt, Human
ugaacauuucauggugu

SEQ ID NO: 3848206 - RNA, 14 nt, Human
ugaacauuugugau

SEQ ID NO: 3848207 - RNA, 13 nt, Human
ugaaccaaugcaa

SEQ ID NO: 3848208 - RNA, 20 nt, Human
ugaaccacaucuugcucugc

SEQ ID NO: 3848209 - RNA, 20 nt, Human
ugaaccaccacacccagccc

SEQ ID NO: 3848210 - RNA, 12 nt, Human
ugaaccaccgcg

SEQ ID NO: 3848211 - RNA, 16 nt, Human
ugaaccacgcgggggc

SEQ ID NO: 3848212 - RNA, 13 nt, Human
ugaaccacuugua

SEQ ID NO: 3848213 - RNA, 20 nt, Human
ugaaccacuuguagauuuga

SEQ ID NO: 3848214 - RNA, 23 nt, Human
ugaaccacuuguagauuugauuu

SEQ ID NO: 3848215 - RNA, 18 nt, Human
ugaaccagaaccagucuu

SEQ ID NO: 3848216 - RNA, 15 nt, Human
ugaaccauaaaaugu

SEQ ID NO: 3848217 - RNA, 16 nt, Human
ugaaccauaaaauguc

SEQ ID NO: 3848218 - RNA, 18 nt, Human
ugaaccauaaaaugucca

SEQ ID NO: 3848219 - RNA, 19 nt, Human
ugaaccauaguuacuguaa

SEQ ID NO: 3848220 - RNA, 22 nt, Human
ugaaccauccacuuacauauau

SEQ ID NO: 3848221 - RNA, 22 nt, Human
ugaaccauggugaagugcuugg

SEQ ID NO: 3848222 - RNA, 17 nt, Human
ugaaccauuaaccagau

SEQ ID NO: 3848223 - RNA, 12 nt, Human
ugaacccaggac

SEQ ID NO: 3848224 - RNA, 19 nt, Human
ugaacccauuuugagugac

SEQ ID NO: 3848225 - RNA, 22 nt, Human
ugaacccgggacgcagggguug

SEQ ID NO: 3848226 - RNA, 17 nt, Human
ugaacccgggaggcaga

SEQ ID NO: 3848227 - RNA, 13 nt, Human
ugaacccuccagg

SEQ ID NO: 3848228 - RNA, 14 nt, Human
ugaacccuggggcc

SEQ ID NO: 3848229 - RNA, 15 nt, Human
ugaacccuugcuugc

SEQ ID NO: 3848230 - RNA, 22 nt, Human
ugaaccgaggggcucaggaaaa

SEQ ID NO: 3848231 - RNA, 22 nt, Human
ugaaccgaugagaaauaaaguu

SEQ ID NO: 3848232 - RNA, 21 nt, Human
ugaaccuaggagugccccauu

SEQ ID NO: 3848233 - RNA, 12 nt, Human
ugaaccugaaua

SEQ ID NO: 3848234 - RNA, 18 nt, Human
ugaaccugaugaaaauaa

SEQ ID NO: 3848235 - RNA, 23 nt, Human
ugaaccugaugaaaauaaagaau

SEQ ID NO: 3848236 - RNA, 21 nt, Human
ugaaccuuugugcccuaucac

SEQ ID NO: 3848237 - RNA, 20 nt, Human
ugaacgauauguagcagaaa

SEQ ID NO: 3848238 - RNA, 20 nt, Human
ugaacgauccuucaaagucu

SEQ ID NO: 3848239 - RNA, 13 nt, Human
ugaacggccuugc

SEQ ID NO: 3848240 - RNA, 19 nt, Human
ugaacguuugguucaaaug

SEQ ID NO: 3848241 - RNA, 21 nt, Human
ugaacguuugguucaaaugug

SEQ ID NO: 3848242 - RNA, 19 nt, Human
ugaacuaaacuuucacacc

SEQ ID NO: 3848243 - RNA, 17 nt, Human
ugaacuaggcugagcaa

SEQ ID NO: 3848244 - RNA, 18 nt, Human
ugaacuaggcugagcaau

SEQ ID NO: 3848245 - RNA, 16 nt, Human
ugaacucaaacugagg

SEQ ID NO: 3848246 - RNA, 17 nt, Human
ugaacucaaacugagga

SEQ ID NO: 3848247 - RNA, 20 nt, Human
ugaacucacuuuccuccuga

SEQ ID NO: 3848248 - RNA, 18 nt, Human
ugaacucagaucugucug

SEQ ID NO: 3848249 - RNA, 15 nt, Human
ugaacucagccaagc

SEQ ID NO: 3848250 - RNA, 17 nt, Human
ugaacucagccaagcac

SEQ ID NO: 3848251 - RNA, 21 nt, Human
ugaacucagccaagcacagug

SEQ ID NO: 3848252 - RNA, 23 nt, Human
ugaacucagccaagcacaguggu

SEQ ID NO: 3848253 - RNA, 14 nt, Human
ugaacuccugccau

SEQ ID NO: 3848254 - RNA, 12 nt, Human
ugaacuccuggc

SEQ ID NO: 3848255 - RNA, 16 nt, Human
ugaacuccuggccuca

SEQ ID NO: 3848256 - RNA, 14 nt, Human
ugaacuccugggcu

SEQ ID NO: 3848257 - RNA, 18 nt, Human
ugaacucugaacuuugga

SEQ ID NO: 3848258 - RNA, 16 nt, Human
ugaacucugggcucaa

SEQ ID NO: 3848259 - RNA, 21 nt, Human
ugaacucuucucauuacuugu

SEQ ID NO: 3848260 - RNA, 19 nt, Human
ugaacucuucugcaaaaau

SEQ ID NO: 3848261 - RNA, 12 nt, Human
ugaacugaaagu

SEQ ID NO: 3848262 - RNA, 13 nt, Human
ugaacugaacacc

SEQ ID NO: 3848263 - RNA, 22 nt, Human
ugaacugaacaccauugaaggc

SEQ ID NO: 3848264 - RNA, 17 nt, Human
ugaacugaacucugaca

SEQ ID NO: 3848265 - RNA, 13 nt, Human
ugaacugacaggc

SEQ ID NO: 3848266 - RNA, 12 nt, Human
ugaacugagcuu

SEQ ID NO: 3848267 - RNA, 16 nt, Human
ugaacugagcuuggaa

SEQ ID NO: 3848268 - RNA, 18 nt, Human
ugaacugauaguuacugu

SEQ ID NO: 3848269 - RNA, 20 nt, Human
ugaacugaucauguuuauga

SEQ ID NO: 3848270 - RNA, 17 nt, Human
ugaacugauucacaucu

SEQ ID NO: 3848271 - RNA, 18 nt, Human
ugaacugcauguauaaau

SEQ ID NO: 3848272 - RNA, 17 nt, Human
ugaacuggacccuguug

SEQ ID NO: 3848273 - RNA, 23 nt, Human
ugaacuggacccuguugcuaagc

SEQ ID NO: 3848274 - RNA, 15 nt, Human
ugaacuuaaaaugaa

SEQ ID NO: 3848275 - RNA, 17 nt, Human
ugaacuuaacaugcugu

SEQ ID NO: 3848276 - RNA, 21 nt, Human
ugaacuuaacaugcuguguaa

SEQ ID NO: 3848277 - RNA, 18 nt, Human
ugaacuuaauaacugugu

SEQ ID NO: 3848278 - RNA, 22 nt, Human
ugaacuuaauaacuguguacug

SEQ ID NO: 3848279 - RNA, 21 nt, Human
ugaacuuauuuacacauaguu

SEQ ID NO: 3848280 - RNA, 18 nt, Human
ugaacuucgcaucaaaag

SEQ ID NO: 3848281 - RNA, 19 nt, Human
ugaacuucgcaucaaaaga

SEQ ID NO: 3848282 - RNA, 21 nt, Human
ugaacuugaaauauccugcuu

SEQ ID NO: 3848283 - RNA, 16 nt, Human
ugaacuugaggacaca

SEQ ID NO: 3848284 - RNA, 19 nt, Human
ugaacuugaggacacaugu

SEQ ID NO: 3848285 - RNA, 21 nt, Human
ugaacuugaggacacaugucc

SEQ ID NO: 3848286 - RNA, 14 nt, Human
ugaacuuguagcug

SEQ ID NO: 3848287 - RNA, 21 nt, Human
ugaacuuguagcuguaaaacg

SEQ ID NO: 3848288 - RNA, 13 nt, Human
ugaacuuuccugg

SEQ ID NO: 3848289 - RNA, 17 nt, Human
ugaacuuugaccucugc

SEQ ID NO: 3848290 - RNA, 19 nt, Human
ugaacuuugaccucugcag

SEQ ID NO: 3848291 - RNA, 11 nt, Human
ugaacuuugcu

SEQ ID NO: 3848292 - RNA, 18 nt, Human
ugaacuuugggaagccuu

SEQ ID NO: 3848293 - RNA, 13 nt, Human
ugaacuuuuguac

SEQ ID NO: 3848294 - RNA, 15 nt, Human
ugaacuuuuguacug

SEQ ID NO: 3848295 - RNA, 17 nt, Human
ugaagaaaacuccuuua

SEQ ID NO: 3848296 - RNA, 24 nt, Human
ugaagaaaauacuuaaauguuaug

SEQ ID NO: 3848297 - RNA, 21 nt, Human
ugaagaaaccuucagauuugu

SEQ ID NO: 3848298 - RNA, 20 nt, Human
ugaagaaaggguguuuuucu

SEQ ID NO: 3848299 - RNA, 20 nt, Human
ugaagaaauacugcacuuac

SEQ ID NO: 3848300 - RNA, 13 nt, Human
ugaagaacaguaa

SEQ ID NO: 3848301 - RNA, 15 nt, Human
ugaagaacaguaacu

SEQ ID NO: 3848302 - RNA, 19 nt, Human
ugaagaacugaggaggaaa

SEQ ID NO: 3848303 - RNA, 14 nt, Human
ugaagaacugcagg

SEQ ID NO: 3848304 - RNA, 17 nt, Human
ugaagaacugcaggccc

SEQ ID NO: 3848305 - RNA, 16 nt, Human
gggacagcuccuucug

SEQ ID NO: 3848306 - RNA, 11 nt, Human
gggacagcugu

SEQ ID NO: 3848307 - RNA, 13 nt, Human
gggacaggccuca

SEQ ID NO: 3848308 - RNA, 13 nt, Human
gggacagggcugg

SEQ ID NO: 3848309 - RNA, 18 nt, Human
gggacaggggcaggagga

SEQ ID NO: 3848310 - RNA, 21 nt, Human
gggacagggugucuccugaag

SEQ ID NO: 3848311 - RNA, 20 nt, Human
gggacaguuuaucaugaagc

SEQ ID NO: 3848312 - RNA, 22 nt, Human
gggacauccugucaucugagaa

SEQ ID NO: 3848313 - RNA, 19 nt, Human
gggacaugcuuagcagucc

SEQ ID NO: 3848314 - RNA, 19 nt, Human
gggacauuugcucauggaa

SEQ ID NO: 3848315 - RNA, 20 nt, Human
gggacauuugcucauggaau

SEQ ID NO: 3848316 - RNA, 18 nt, Human
gggaccaacccuggggaa

SEQ ID NO: 3848317 - RNA, 17 nt, Human
gggaccaaggaccccuc

SEQ ID NO: 3848318 - RNA, 19 nt, Human
gggaccacagcaaggcacc

SEQ ID NO: 3848319 - RNA, 14 nt, Human
gggaccagccaaga

SEQ ID NO: 3848320 - RNA, 12 nt, Human
gggaccaggagu

SEQ ID NO: 3848321 - RNA, 23 nt, Human
gggaccaggaguggguggggagu

SEQ ID NO: 3848322 - RNA, 17 nt, Human
gggaccaugugucacuu

SEQ ID NO: 3848323 - RNA, 21 nt, Human
gggacccaauguaggagcugc

SEQ ID NO: 3848324 - RNA, 19 nt, Human
gggacccaggcuccgcccu

SEQ ID NO: 3848325 - RNA, 12 nt, Human
gggacccagugc

SEQ ID NO: 3848326 - RNA, 16 nt, Human
gggacccagugcagaa

SEQ ID NO: 3848327 - RNA, 15 nt, Human
gggaccccaggccca

SEQ ID NO: 3848328 - RNA, 20 nt, Human
gggaccccgagccuggcucc

SEQ ID NO: 3848329 - RNA, 12 nt, Human
gggacccugcuu

SEQ ID NO: 3848330 - RNA, 16 nt, Human
gggacccuuuccuucc

SEQ ID NO: 3848331 - RNA, 21 nt, Human
gggaccgcuacaccacucugg

SEQ ID NO: 3848332 - RNA, 19 nt, Human
gggaccuauaacugcccag

SEQ ID NO: 3848333 - RNA, 12 nt, Human
gggaccucaggc

SEQ ID NO: 3848334 - RNA, 17 nt, Human
gggaccugccaggcagg

SEQ ID NO: 3848335 - RNA, 18 nt, Human
gggaccugguacccuccu

SEQ ID NO: 3848336 - RNA, 17 nt, Human
gggacgaagaagagcca

SEQ ID NO: 3848337 - RNA, 20 nt, Human
gggacgaagaagagccacag

SEQ ID NO: 3848338 - RNA, 22 nt, Human
gggacgccugggggugccagga

SEQ ID NO: 3848339 - RNA, 20 nt, Human
gggacggucaguuugguguc

SEQ ID NO: 3848340 - RNA, 17 nt, Human
gggacggugcccaagcc

SEQ ID NO: 3848341 - RNA, 23 nt, Human
gggacguccugccaccuggggca

SEQ ID NO: 3848342 - RNA, 17 nt, Human
gggacuacaggcaccca

SEQ ID NO: 3848343 - RNA, 19 nt, Human
gggacuacaggcgugagcc

SEQ ID NO: 3848344 - RNA, 20 nt, Human
gggacuacaggcgugagcca

SEQ ID NO: 3848345 - RNA, 17 nt, Human
gggacucaaugcacuga

SEQ ID NO: 3848346 - RNA, 19 nt, Human
gggacucaucuuucccucc

SEQ ID NO: 3848347 - RNA, 17 nt, Human
gggacuccggcugugcu

SEQ ID NO: 3848348 - RNA, 20 nt, Human
gggacucugaagccucuggg

SEQ ID NO: 3848349 - RNA, 13 nt, Human
ucuguccucagcc

SEQ ID NO: 3848350 - RNA, 14 nt, Human
ucuguccucagccu

SEQ ID NO: 3848351 - RNA, 21 nt, Human
ucuguccucagccuugccaga

SEQ ID NO: 3848352 - RNA, 21 nt, Human
ucuguccugggagugagcugg

SEQ ID NO: 3848353 - RNA, 13 nt, Human
ucuguccugugac

SEQ ID NO: 3848354 - RNA, 22 nt, Human
ucuguccugugagguuucccaa

SEQ ID NO: 3848355 - RNA, 18 nt, Human
ucuguccuugaaggacua

SEQ ID NO: 3848356 - RNA, 21 nt, Human
ucuguccuuuuggcacugaga

SEQ ID NO: 3848357 - RNA, 19 nt, Human
ucugucgcccaggcuggag

SEQ ID NO: 3848358 - RNA, 16 nt, Human
ucugucgccuuagcau

SEQ ID NO: 3848359 - RNA, 23 nt, Human
ucugucgccuuagcauguuugcu

SEQ ID NO: 3848360 - RNA, 14 nt, Human
ucugucuaaaaaac

SEQ ID NO: 3848361 - RNA, 16 nt, Human
ucugucuaccaucucc

SEQ ID NO: 3848362 - RNA, 15 nt, Human
ucugucuacuugcuc

SEQ ID NO: 3848363 - RNA, 18 nt, Human
ucugucuacuugcucagg

SEQ ID NO: 3848364 - RNA, 15 nt, Human
ucugucuccagcuuc

SEQ ID NO: 3848365 - RNA, 22 nt, Human
ucugucucccuauaaugcugga

SEQ ID NO: 3848366 - RNA, 14 nt, Human
ucugucucugccuc

SEQ ID NO: 3848367 - RNA, 13 nt, Human
ucugucugcccuu

SEQ ID NO: 3848368 - RNA, 22 nt, Human
ucugucugcccuucaccccagu

SEQ ID NO: 3848369 - RNA, 12 nt, Human
ucugucugcugg

SEQ ID NO: 3848370 - RNA, 19 nt, Human
ucugucuggaagaugggga

SEQ ID NO: 3848371 - RNA, 13 nt, Human
ucugucuggucca

SEQ ID NO: 3848372 - RNA, 16 nt, Human
ucugucugguggcccc

SEQ ID NO: 3848373 - RNA, 18 nt, Human
ucugucugucugucccaa

SEQ ID NO: 3848374 - RNA, 17 nt, Human
ucugucuucaagggcuu

SEQ ID NO: 3848375 - RNA, 15 nt, Human
ucugucuucaccuga

SEQ ID NO: 3848376 - RNA, 15 nt, Human
ucugucuucuguaua

SEQ ID NO: 3848377 - RNA, 12 nt, Human
ucugucuuguaa

SEQ ID NO: 3848378 - RNA, 13 nt, Human
ucugucuuguaau

SEQ ID NO: 3848379 - RNA, 17 nt, Human
ucugucuuuccacucug

SEQ ID NO: 3848380 - RNA, 12 nt, Human
ucugucuuuuaa

SEQ ID NO: 3848381 - RNA, 16 nt, Human
ucugucuuuuaaacuc

SEQ ID NO: 3848382 - RNA, 15 nt, Human
ucugugaaaggaaag

SEQ ID NO: 3848383 - RNA, 19 nt, Human
ucugugaacaagcuucagu

SEQ ID NO: 3848384 - RNA, 17 nt, Human
ucugugaacagagagac

SEQ ID NO: 3848385 - RNA, 17 nt, Human
ucugugaacuugaaauu

SEQ ID NO: 3848386 - RNA, 11 nt, Human
ucugugaauaa

SEQ ID NO: 3848387 - RNA, 13 nt, Human
ucugugaauaagc

SEQ ID NO: 3848388 - RNA, 13 nt, Human
ucugugacccacu

SEQ ID NO: 3848389 - RNA, 13 nt, Human
ucugugaccucag

SEQ ID NO: 3848390 - RNA, 23 nt, Human
ucugugaccucaggcacuagccu

SEQ ID NO: 3848391 - RNA, 19 nt, Human
ucugugacuuaguggacag

SEQ ID NO: 3848392 - RNA, 23 nt, Human
ucugugagaagguuuauuguuaa

SEQ ID NO: 3848393 - RNA, 17 nt, Human
ucugugagacucgagaa

SEQ ID NO: 3848394 - RNA, 21 nt, Human
ucugugagacucgagaacuuu

SEQ ID NO: 3848395 - RNA, 14 nt, Human
ucugugagaugcua

SEQ ID NO: 3848396 - RNA, 17 nt, Human
ucugugagaugcuagaa

SEQ ID NO: 3848397 - RNA, 22 nt, Human
ucugugagaugcuagaacuccc

SEQ ID NO: 3848398 - RNA, 17 nt, Human
ucugugagauucauuca

SEQ ID NO: 3848399 - RNA, 19 nt, Human
ucugugagauucauucaug

SEQ ID NO: 3848400 - RNA, 17 nt, Human
ucugugaggaaagcaca

SEQ ID NO: 3848401 - RNA, 21 nt, Human
ucugugagggugcugacuggc

SEQ ID NO: 3848402 - RNA, 14 nt, Human
ucugugaugagcug

SEQ ID NO: 3848403 - RNA, 17 nt, Human
ucugugaugagcugauc

SEQ ID NO: 3848404 - RNA, 16 nt, Human
ucugugaugauccuca

SEQ ID NO: 3848405 - RNA, 14 nt, Human
ucugugcaccuggg

SEQ ID NO: 3848406 - RNA, 21 nt, Human
ucugugcacgcaguggccuuc

SEQ ID NO: 3848407 - RNA, 18 nt, Human
ucugugccagagccuggg

SEQ ID NO: 3848408 - RNA, 14 nt, Human
ucugugcccagcuc

SEQ ID NO: 3848409 - RNA, 16 nt, Human
ucugugcccagcucag

SEQ ID NO: 3848410 - RNA, 19 nt, Human
ucugugcccaugggcacug

SEQ ID NO: 3848411 - RNA, 21 nt, Human
ucugugcccaugggcacugcu

SEQ ID NO: 3848412 - RNA, 22 nt, Human
ucugugcccaugggcacugcug

SEQ ID NO: 3848413 - RNA, 14 nt, Human
ucugugccccaugc

SEQ ID NO: 3848414 - RNA, 15 nt, Human
ucugugcccuccuga

SEQ ID NO: 3848415 - RNA, 20 nt, Human
ucugugccucccuccccagu

SEQ ID NO: 3848416 - RNA, 20 nt, Human
ucugugccuuuuuuauaucu

SEQ ID NO: 3848417 - RNA, 22 nt, Human
ucugugcgugaaacacaccagg

SEQ ID NO: 3848418 - RNA, 21 nt, Human
ucugugcuagggaaacuuccc

SEQ ID NO: 3848419 - RNA, 21 nt, Human
ucugugcuggagauguuuuag

SEQ ID NO: 3848420 - RNA, 20 nt, Human
ucugugcuuugacucaccug

SEQ ID NO: 3848421 - RNA, 15 nt, Human
ucuguggccuuguuc

SEQ ID NO: 3848422 - RNA, 19 nt, Human
ucugugggcgggcccagca

SEQ ID NO: 3848423 - RNA, 20 nt, Human
ucugugggcgggcccagcac

SEQ ID NO: 3848424 - RNA, 20 nt, Human
ucugugggcuacaugcuggg

SEQ ID NO: 3848425 - RNA, 15 nt, Human
ucugugggcugcacu

SEQ ID NO: 3848426 - RNA, 12 nt, Human
ucuguggggccc

SEQ ID NO: 3848427 - RNA, 19 nt, Human
ucugugggugacccagguc

SEQ ID NO: 3848428 - RNA, 21 nt, Human
ucugugggugacccagguccu

SEQ ID NO: 3848429 - RNA, 22 nt, Human
ucuguggguuucuaaagcugcc

SEQ ID NO: 3848430 - RNA, 17 nt, Human
ucuguggugucugccug

SEQ ID NO: 3848431 - RNA, 16 nt, Human
ucugugguuccucugc

SEQ ID NO: 3848432 - RNA, 12 nt, Human
ucugugguuggc

SEQ ID NO: 3848433 - RNA, 22 nt, Human
ucugugguuuuccccucccugg

SEQ ID NO: 3848434 - RNA, 19 nt, Human
ucuguguaaccauuuuaua

SEQ ID NO: 3848435 - RNA, 20 nt, Human
ucuguguauuuaauuguaaa

SEQ ID NO: 3848436 - RNA, 22 nt, Human
ucuguguauuuaauuguaaacu

SEQ ID NO: 3848437 - RNA, 17 nt, Human
ucuguguccuucccugc

SEQ ID NO: 3848438 - RNA, 16 nt, Human
ucugugucuaagauuc

SEQ ID NO: 3848439 - RNA, 22 nt, Human
ucugugucuaagauucuagauc

SEQ ID NO: 3848440 - RNA, 16 nt, Human
ucugugucugaguggc

SEQ ID NO: 3848441 - RNA, 13 nt, Human
ucugugucugugu

SEQ ID NO: 3848442 - RNA, 12 nt, Human
ucugugucuugu

SEQ ID NO: 3848443 - RNA, 11 nt, Human
ucugugucuuu

SEQ ID NO: 3848444 - RNA, 22 nt, Human
ucugugugaaugugggcacugg

SEQ ID NO: 3848445 - RNA, 19 nt, Human
ucugugugcaccuuaccaa

SEQ ID NO: 3848446 - RNA, 14 nt, Human
ucugugugcugugg

SEQ ID NO: 3848447 - RNA, 20 nt, Human
ucugugugggacuguacaca

SEQ ID NO: 3848448 - RNA, 21 nt, Human
ucugugugggacuguacacac

SEQ ID NO: 3848449 - RNA, 19 nt, Human
ucugugugucaguuuucau

SEQ ID NO: 3848450 - RNA, 15 nt, Human
ucuguguguguguau

SEQ ID NO: 3848451 - RNA, 21 nt, Human
ucuguguguguguaugugggg

SEQ ID NO: 3848452 - RNA, 20 nt, Human
ucugugugugugugugugcg

SEQ ID NO: 3848453 - RNA, 16 nt, Human
ucuguguguuccuggc

SEQ ID NO: 3848454 - RNA, 19 nt, Human
ucuguguguuuaugugugu

SEQ ID NO: 3848455 - RNA, 19 nt, Human
ucuguguuuaauuucuuca

SEQ ID NO: 3848456 - RNA, 13 nt, Human
ucuguguuuuaau

SEQ ID NO: 3848457 - RNA, 15 nt, Human
ucuguguuuuugaaa

SEQ ID NO: 3848458 - RNA, 20 nt, Human
ucuguuaaaaucuauucugu

SEQ ID NO: 3848459 - RNA, 13 nt, Human
ucuguuaacugaa

SEQ ID NO: 3848460 - RNA, 20 nt, Human
ugaagaacugcaggcccugg

SEQ ID NO: 3848461 - RNA, 11 nt, Human
ugaagaagaga

SEQ ID NO: 3848462 - RNA, 22 nt, Human
ugaagaagcaccaaucaugaau

SEQ ID NO: 3848463 - RNA, 21 nt, Human
ugaagaagguggaccuuuuaa

SEQ ID NO: 3848464 - RNA, 23 nt, Human
ugaagaagguggaccuuuuaaag

SEQ ID NO: 3848465 - RNA, 15 nt, Human
ugaagaauacaguua

SEQ ID NO: 3848466 - RNA, 20 nt, Human
ugaagaauacaguuaggcac

SEQ ID NO: 3848467 - RNA, 16 nt, Human
ugaagaauacuucuca

SEQ ID NO: 3848468 - RNA, 16 nt, Human
ugaagaauccuuuugu

SEQ ID NO: 3848469 - RNA, 21 nt, Human
ugaagaaucuguuucccagca

SEQ ID NO: 3848470 - RNA, 21 nt, Human
ugaagaauuauuuuuuuucuu

SEQ ID NO: 3848471 - RNA, 16 nt, Human
ugaagaauuuaaagaa

SEQ ID NO: 3848472 - RNA, 16 nt, Human
ugaagacaaaaauacu

SEQ ID NO: 3848473 - RNA, 21 nt, Human
ugaagacaaaaauacucuaau

SEQ ID NO: 3848474 - RNA, 22 nt, Human
ugaagacaaaaauacucuaauu

SEQ ID NO: 3848475 - RNA, 21 nt, Human
ugaagacaaugacuuacugua

SEQ ID NO: 3848476 - RNA, 21 nt, Human
ugaagacaauuugauacauaa

SEQ ID NO: 3848477 - RNA, 14 nt, Human
ugaagacagaggga

SEQ ID NO: 3848478 - RNA, 22 nt, Human
ugaagaccuaaccagggccaga

SEQ ID NO: 3848479 - RNA, 19 nt, Human
ugaagaccuuuuucugcac

SEQ ID NO: 3848480 - RNA, 17 nt, Human
ugaagacuaugaaaaug

SEQ ID NO: 3848481 - RNA, 14 nt, Human
ugaagacuccagaa

SEQ ID NO: 3848482 - RNA, 14 nt, Human
ugaagacugaggac

SEQ ID NO: 3848483 - RNA, 13 nt, Human
ugaagacuugccc

SEQ ID NO: 3848484 - RNA, 22 nt, Human
ugaagacuuuucuuucagccaa

SEQ ID NO: 3848485 - RNA, 24 nt, Human
ugaagagaaccgagcaaagaucaa

SEQ ID NO: 3848486 - RNA, 19 nt, Human
ugaagagacagagacaagu

SEQ ID NO: 3848487 - RNA, 23 nt, Human
ugaagagaccaagacucugaaau

SEQ ID NO: 3848488 - RNA, 15 nt, Human
ugaagagauuuuuca

SEQ ID NO: 3848489 - RNA, 16 nt, Human
ugaagagauuuuucau

SEQ ID NO: 3848490 - RNA, 14 nt, Human
ugaagagcuugcuu

SEQ ID NO: 3848491 - RNA, 19 nt, Human
ugaagaggaaaaugaauaa

SEQ ID NO: 3848492 - RNA, 20 nt, Human
ugaagaggaaaaugaauaau

SEQ ID NO: 3848493 - RNA, 19 nt, Human
ugaccccaaagagccugga

SEQ ID NO: 3848494 - RNA, 20 nt, Human
ugaccccagggcacaggagc

SEQ ID NO: 3848495 - RNA, 22 nt, Human
ugacccccaaccaaguggcucc

SEQ ID NO: 3848496 - RNA, 21 nt, Human
ugaccccgacgccacagccca

SEQ ID NO: 3848497 - RNA, 22 nt, Human
ugaccccgacgccacagcccag

SEQ ID NO: 3848498 - RNA, 17 nt, Human
ugaccccucauagcccu

SEQ ID NO: 3848499 - RNA, 21 nt, Human
ugaccccuccucacuggccau

SEQ ID NO: 3848500 - RNA, 20 nt, Human
ugaccccuccuggggccagg

SEQ ID NO: 3848501 - RNA, 13 nt, Human
ugaccccugccca

SEQ ID NO: 3848502 - RNA, 22 nt, Human
ugacccggcacccccugcagcu

SEQ ID NO: 3848503 - RNA, 16 nt, Human
ugacccuacucccuug

SEQ ID NO: 3848504 - RNA, 19 nt, Human
ugacccucaauucauauuu

SEQ ID NO: 3848505 - RNA, 13 nt, Human
ugacccuccuguu

SEQ ID NO: 3848506 - RNA, 21 nt, Human
ugacccuccuguugcacccag

SEQ ID NO: 3848507 - RNA, 23 nt, Human
ugacccucugaaugguccagggu

SEQ ID NO: 3848508 - RNA, 21 nt, Human
ugacccucugcugaagacuug

SEQ ID NO: 3848509 - RNA, 15 nt, Human
ugacccugaagugag

SEQ ID NO: 3848510 - RNA, 14 nt, Human
ugacccugagcuga

SEQ ID NO: 3848511 - RNA, 15 nt, Human
ugacccugaugaaaa

SEQ ID NO: 3848512 - RNA, 14 nt, Human
ugacccugcacccu

SEQ ID NO: 3848513 - RNA, 16 nt, Human
ugacccugcagagaug

SEQ ID NO: 3848514 - RNA, 18 nt, Human
ugacccuguauauagccc

SEQ ID NO: 3848515 - RNA, 15 nt, Human
gggcugcuccuccag

SEQ ID NO: 3848516 - RNA, 16 nt, Human
gggcugcuccuccagg

SEQ ID NO: 3848517 - RNA, 21 nt, Human
gggcugcugcugggcucagug

SEQ ID NO: 3848518 - RNA, 12 nt, Human
gggcugcuuccu

SEQ ID NO: 3848519 - RNA, 18 nt, Human
gggcugcuuccuccugga

SEQ ID NO: 3848520 - RNA, 20 nt, Human
gggcugcuuccuccuggaaa

SEQ ID NO: 3848521 - RNA, 18 nt, Human
gggcuggaaucuggagag

SEQ ID NO: 3848522 - RNA, 17 nt, Human
gggcuggacuggcuguc

SEQ ID NO: 3848523 - RNA, 16 nt, Human
gggcuggaggcccagg

SEQ ID NO: 3848524 - RNA, 12 nt, Human
gggcuggcccag

SEQ ID NO: 3848525 - RNA, 14 nt, Human
gggcuggcccagcc

SEQ ID NO: 3848526 - RNA, 13 nt, Human
gggcuggccuagg

SEQ ID NO: 3848527 - RNA, 19 nt, Human
gggcuggccucuggcucuc

SEQ ID NO: 3848528 - RNA, 15 nt, Human
gggcuggccuuccug

SEQ ID NO: 3848529 - RNA, 19 nt, Human
gggcuggcggcuacucagc

SEQ ID NO: 3848530 - RNA, 15 nt, Human
gggcuggcucccucu

SEQ ID NO: 3848531 - RNA, 13 nt, Human
gggcugggaaguc

SEQ ID NO: 3848532 - RNA, 18 nt, Human
gggcugggagcucugcag

SEQ ID NO: 3848533 - RNA, 21 nt, Human
gggcugggcaaggaaaaagaa

SEQ ID NO: 3848534 - RNA, 20 nt, Human
gggcugggcacugcucucac

SEQ ID NO: 3848535 - RNA, 22 nt, Human
gggcugggcacugcucucaccu

SEQ ID NO: 3848536 - RNA, 19 nt, Human
gggcugggggaugggccug

SEQ ID NO: 3848537 - RNA, 22 nt, Human
gggcugggugcgaccccaucug

SEQ ID NO: 3848538 - RNA, 23 nt, Human
gggcuggguuggcgcacccuccc

SEQ ID NO: 3848539 - RNA, 14 nt, Human
gggcugguucugua

SEQ ID NO: 3848540 - RNA, 18 nt, Human
gggcuguaaaaugcauga

SEQ ID NO: 3848541 - RNA, 18 nt, Human
gggcuguaacugccaggc

SEQ ID NO: 3848542 - RNA, 19 nt, Human
gggcuguccaguucccaga

SEQ ID NO: 3848543 - RNA, 22 nt, Human
gggcuguccugccacccagccc

SEQ ID NO: 3848544 - RNA, 22 nt, Human
gggcugugcacccagaagaaga

SEQ ID NO: 3848545 - RNA, 15 nt, Human
gggcuguuuagggga

SEQ ID NO: 3848546 - RNA, 13 nt, Human
gggcuuagagcag

SEQ ID NO: 3848547 - RNA, 19 nt, Human
gggcuucagccuaguggcu

SEQ ID NO: 3848548 - RNA, 15 nt, Human
gggcuucagggcagg

SEQ ID NO: 3848549 - RNA, 17 nt, Human
gggcuucagguccaggc

SEQ ID NO: 3848550 - RNA, 14 nt, Human
gggcuucaguggca

SEQ ID NO: 3848551 - RNA, 15 nt, Human
gggcuucaguggcag

SEQ ID NO: 3848552 - RNA, 19 nt, Human
gggcuucauacacaugaga

SEQ ID NO: 3848553 - RNA, 13 nt, Human
gggcuucccaagg

SEQ ID NO: 3848554 - RNA, 21 nt, Human
gggcuucccaguggcugcugc

SEQ ID NO: 3848555 - RNA, 18 nt, Human
gggcuuccugaggggaga

SEQ ID NO: 3848556 - RNA, 15 nt, Human
gggcuuccuggagca

SEQ ID NO: 3848557 - RNA, 16 nt, Human
gggcuuccuggagcag

SEQ ID NO: 3848558 - RNA, 15 nt, Human
gggcuuccuggugcu

SEQ ID NO: 3848559 - RNA, 13 nt, Human
gggcuucuccuga

SEQ ID NO: 3848560 - RNA, 14 nt, Human
gggcuucugcaccc

SEQ ID NO: 3848561 - RNA, 15 nt, Human
gggcuucugcacccu

SEQ ID NO: 3848562 - RNA, 18 nt, Human
gggcuucugcacccucca

SEQ ID NO: 3848563 - RNA, 19 nt, Human
gggcuucugcacccuccac

SEQ ID NO: 3848564 - RNA, 19 nt, Human
gggcuugcaaguauguuuu

SEQ ID NO: 3848565 - RNA, 14 nt, Human
gggcuugccuucug

SEQ ID NO: 3848566 - RNA, 17 nt, Human
gggcuuggccugcugug

SEQ ID NO: 3848567 - RNA, 16 nt, Human
gggcuuguggggccug

SEQ ID NO: 3848568 - RNA, 23 nt, Human
gggcuuguugcuguugauguuuu

SEQ ID NO: 3848569 - RNA, 17 nt, Human
gggcuuuccugugccag

SEQ ID NO: 3848570 - RNA, 15 nt, Human
ggggaaaagagauga

SEQ ID NO: 3848571 - RNA, 16 nt, Human
ggggaaaaucagccug

SEQ ID NO: 3848572 - RNA, 21 nt, Human
ggggaaaaucagccugcucca

SEQ ID NO: 3848573 - RNA, 22 nt, Human
ggggaaagacacugccugggcu

SEQ ID NO: 3848574 - RNA, 13 nt, Human
ggggaaagcacag

SEQ ID NO: 3848575 - RNA, 23 nt, Human
ggggaacauuucuguaaauacca

SEQ ID NO: 3848576 - RNA, 17 nt, Human
ggggaagaagcagagag

SEQ ID NO: 3848577 - RNA, 18 nt, Human
ggggaagaagcagagaga

SEQ ID NO: 3848578 - RNA, 15 nt, Human
ggggaagaauaauuu

SEQ ID NO: 3848579 - RNA, 12 nt, Human
ggggaagacagu

SEQ ID NO: 3848580 - RNA, 20 nt, Human
ggggaagagagccugcagga

SEQ ID NO: 3848581 - RNA, 15 nt, Human
ggggaagcugcagcu

SEQ ID NO: 3848582 - RNA, 22 nt, Human
ggggaagggccagucugggcug

SEQ ID NO: 3848583 - RNA, 19 nt, Human
ggggaaugagcccagagaa

SEQ ID NO: 3848584 - RNA, 15 nt, Human
ggggaauucaucucu

SEQ ID NO: 3848585 - RNA, 19 nt, Human
ggggaauugaggacacuga

SEQ ID NO: 3848586 - RNA, 13 nt, Human
ggggacagauuca

SEQ ID NO: 3848587 - RNA, 12 nt, Human
ggggacagcucc

SEQ ID NO: 3848588 - RNA, 14 nt, Human
ggggacagcuccuu

SEQ ID NO: 3848589 - RNA, 14 nt, Human
ggggacagcugugu

SEQ ID NO: 3848590 - RNA, 19 nt, Human
ggggacaggccucaccucu

SEQ ID NO: 3848591 - RNA, 13 nt, Human
ggggacagggaug

SEQ ID NO: 3848592 - RNA, 22 nt, Human
ggggacagggcuggcccagccc

SEQ ID NO: 3848593 - RNA, 14 nt, Human
ggggaccagagcug

SEQ ID NO: 3848594 - RNA, 15 nt, Human
ggggaccagagcugc

SEQ ID NO: 3848595 - RNA, 16 nt, Human
ggggaccagagcugcc

SEQ ID NO: 3848596 - RNA, 21 nt, Human
ggggacccagugcagaaugua

SEQ ID NO: 3848597 - RNA, 13 nt, Human
ggggacccccgcc

SEQ ID NO: 3848598 - RNA, 18 nt, Human
ggggacccccgcccccug

SEQ ID NO: 3848599 - RNA, 15 nt, Human
ggggaccucaggccu

SEQ ID NO: 3848600 - RNA, 21 nt, Human
ggggacgcugguagagaugga

SEQ ID NO: 3848601 - RNA, 13 nt, Human
ggggacucagccc

SEQ ID NO: 3848602 - RNA, 14 nt, Human
ggggacucagcccu

SEQ ID NO: 3848603 - RNA, 18 nt, Human
ggggacuccggcugugcu

SEQ ID NO: 3848604 - RNA, 22 nt, Human
ggggacuccggcugugcuggga

SEQ ID NO: 3848605 - RNA, 20 nt, Human
ggggacucugagcgggaggc

SEQ ID NO: 3848606 - RNA, 15 nt, Human
ggggacugccaccuc

SEQ ID NO: 3848607 - RNA, 11 nt, Human
ggggagaaagu

SEQ ID NO: 3848608 - RNA, 14 nt, Human
ggggagagccugcu

SEQ ID NO: 3848609 - RNA, 16 nt, Human
ggggagagccugcugg

SEQ ID NO: 3848610 - RNA, 19 nt, Human
ggggagaucggggccagag

SEQ ID NO: 3848611 - RNA, 11 nt, Human
ggggagcaggg

SEQ ID NO: 3848612 - RNA, 18 nt, Human
ggggagccaaaaucucaa

SEQ ID NO: 3848613 - RNA, 22 nt, Human
ggggagcuuggcugagggucug

SEQ ID NO: 3848614 - RNA, 14 nt, Human
ggggaggcagccgg

SEQ ID NO: 3848615 - RNA, 14 nt, Human
ggggagggaaggga

SEQ ID NO: 3848616 - RNA, 17 nt, Human
ggggagggaagggagcc

SEQ ID NO: 3848617 - RNA, 15 nt, Human
ggggagggauucugg

SEQ ID NO: 3848618 - RNA, 19 nt, Human
ggggagguuuucuccccca

SEQ ID NO: 3848619 - RNA, 16 nt, Human
ggggagucugaagcag

SEQ ID NO: 3848620 - RNA, 13 nt, Human
ggggaguggccac

SEQ ID NO: 3848621 - RNA, 20 nt, Human
ggggagugggacagagucug

SEQ ID NO: 3848622 - RNA, 13 nt, Human
ggggaucacagag

SEQ ID NO: 3848623 - RNA, 15 nt, Human
ggggaucauaaaguu

SEQ ID NO: 3848624 - RNA, 23 nt, Human
ggggauccccgccuggccaggag

SEQ ID NO: 3848625 - RNA, 21 nt, Human
ggggaucccucccccccaugc

SEQ ID NO: 3848626 - RNA, 21 nt, Human
ggggaugacuagaggcaggga

SEQ ID NO: 3848627 - RNA, 13 nt, Human
ggggaugcuucau

SEQ ID NO: 3848628 - RNA, 14 nt, Human
ggggauuucuccca

SEQ ID NO: 3848629 - RNA, 15 nt, Human
ggggcaacuguauga

SEQ ID NO: 3848630 - RNA, 19 nt, Human
ggggcacaguccaggaaca

SEQ ID NO: 3848631 - RNA, 17 nt, Human
ggggcacugcaggggcc

SEQ ID NO: 3848632 - RNA, 17 nt, Human
ggggcagaacagccgcu

SEQ ID NO: 3848633 - RNA, 16 nt, Human
ggggcagagggcagag

SEQ ID NO: 3848634 - RNA, 20 nt, Human
ggggcagaucuuggacucau

SEQ ID NO: 3848635 - RNA, 18 nt, Human
ggggcagcagcagcccug

SEQ ID NO: 3848636 - RNA, 19 nt, Human
ggggcagccugccuugccc

SEQ ID NO: 3848637 - RNA, 17 nt, Human
ggggcaggaguagcuga

SEQ ID NO: 3848638 - RNA, 22 nt, Human
ggggucacucaauucugcagua

SEQ ID NO: 3848639 - RNA, 13 nt, Human
ggggucaggcagc

SEQ ID NO: 3848640 - RNA, 22 nt, Human
ggggucaggccgggcagagcac

SEQ ID NO: 3848641 - RNA, 19 nt, Human
ggggucaugcccuccucuc

SEQ ID NO: 3848642 - RNA, 18 nt, Human
gggguccacccagcaaag

SEQ ID NO: 3848643 - RNA, 17 nt, Human
gggguccagggagcagg

SEQ ID NO: 3848644 - RNA, 18 nt, Human
ggggucccagcagcugcc

SEQ ID NO: 3848645 - RNA, 23 nt, Human
gggguccuccuccagggacagca

SEQ ID NO: 3848646 - RNA, 18 nt, Human
gggguccugccggagagg

SEQ ID NO: 3848647 - RNA, 19 nt, Human
gggguccuggagcagacca

SEQ ID NO: 3848648 - RNA, 18 nt, Human
ggggucguggagagcuag

SEQ ID NO: 3848649 - RNA, 19 nt, Human
ggggucguggagagcuagg

SEQ ID NO: 3848650 - RNA, 17 nt, Human
ggggucucacccaugca

SEQ ID NO: 3848651 - RNA, 19 nt, Human
ggggucucccucuccugcc

SEQ ID NO: 3848652 - RNA, 22 nt, Human
ggggucucccucuccugccuac

SEQ ID NO: 3848653 - RNA, 14 nt, Human
ggggucucccuggc

SEQ ID NO: 3848654 - RNA, 17 nt, Human
ggggucucucacagaca

SEQ ID NO: 3848655 - RNA, 23 nt, Human
ggggucucucacagacaggaccc

SEQ ID NO: 3848656 - RNA, 19 nt, Human
ggggucucuuuuguaaauu

SEQ ID NO: 3848657 - RNA, 20 nt, Human
ggggucuggaguugaucugg

SEQ ID NO: 3848658 - RNA, 21 nt, Human
ggggucuggaguugaucugga

SEQ ID NO: 3848659 - RNA, 23 nt, Human
ggggugacccggcacccccugca

SEQ ID NO: 3848660 - RNA, 15 nt, Human
ggggugaggagcugg

SEQ ID NO: 3848661 - RNA, 17 nt, Human
ggggugaugagggcagc

SEQ ID NO: 3848662 - RNA, 13 nt, Human
ggggugcacagga

SEQ ID NO: 3848663 - RNA, 14 nt, Human
ggggugcacaggag

SEQ ID NO: 3848664 - RNA, 15 nt, Human
ggggugcacaggagg

SEQ ID NO: 3848665 - RNA, 16 nt, Human
ggggugcagaggcugu

SEQ ID NO: 3848666 - RNA, 15 nt, Human
ggggugcagcaguga

SEQ ID NO: 3848667 - RNA, 13 nt, Human
ggggugcagggau

SEQ ID NO: 3848668 - RNA, 19 nt, Human
ggggugcggcggucccagc

SEQ ID NO: 3848669 - RNA, 11 nt, Human
ggggugcugcc

SEQ ID NO: 3848670 - RNA, 15 nt, Human
gggguggccugugug

SEQ ID NO: 3848671 - RNA, 14 nt, Human
ggggugggccaggc

SEQ ID NO: 3848672 - RNA, 17 nt, Human
ggggugggccaggcuga

SEQ ID NO: 3848673 - RNA, 15 nt, Human
ggggugggccucugg

SEQ ID NO: 3848674 - RNA, 13 nt, Human
ggggugggcuggu

SEQ ID NO: 3848675 - RNA, 17 nt, Human
gggguggggaccucagg

SEQ ID NO: 3848676 - RNA, 16 nt, Human
gggguggggucaugcc

SEQ ID NO: 3848677 - RNA, 14 nt, Human
gggguggugucaga

SEQ ID NO: 3848678 - RNA, 13 nt, Human
ggggugucuuuuu

SEQ ID NO: 3848679 - RNA, 20 nt, Human
gggguucauaggucacuggc

SEQ ID NO: 3848680 - RNA, 22 nt, Human
gggguucccuugagggcugcag

SEQ ID NO: 3848681 - RNA, 17 nt, Human
gggguugugaggccugg

SEQ ID NO: 3848682 - RNA, 23 nt, Human
gggguuuucgaagcucagcccac

SEQ ID NO: 3848683 - RNA, 21 nt, Human
ggguaaaauacuuuuacucug

SEQ ID NO: 3848684 - RNA, 16 nt, Human
ucuuuaaaagagagag

SEQ ID NO: 3848685 - RNA, 23 nt, Human
ucuuuaaaagagagagagagaaa

SEQ ID NO: 3848686 - RNA, 19 nt, Human
ucuuuaaaagaugcuuuua

SEQ ID NO: 3848687 - RNA, 20 nt, Human
ucuuuaaaauguaaagccau

SEQ ID NO: 3848688 - RNA, 20 nt, Human
ucuuuaaaauuacaacuaag

SEQ ID NO: 3848689 - RNA, 21 nt, Human
ucuuuaaaggcccagccccua

SEQ ID NO: 3848690 - RNA, 21 nt, Human
ucuuuaaagggauggcaagau

SEQ ID NO: 3848691 - RNA, 14 nt, Human
ucuuuaaaguucuu

SEQ ID NO: 3848692 - RNA, 23 nt, Human
ucuuuaaaucauuuuaggaaagg

SEQ ID NO: 3848693 - RNA, 16 nt, Human
ucuuuaaaugcugcuu

SEQ ID NO: 3848694 - RNA, 19 nt, Human
ucuuuaaauguuuuauaag

SEQ ID NO: 3848695 - RNA, 16 nt, Human
ucuuuaacaucuucuu

SEQ ID NO: 3848696 - RNA, 20 nt, Human
ucuuuaacucaggacuccag

SEQ ID NO: 3848697 - RNA, 21 nt, Human
ucuuuaacucaggacuccagc

SEQ ID NO: 3848698 - RNA, 15 nt, Human
ucuuuaacucauaaa

SEQ ID NO: 3848699 - RNA, 11 nt, Human
ucuuuaacugc

SEQ ID NO: 3848700 - RNA, 22 nt, Human
ucuuuaacugccguaauuuaac

SEQ ID NO: 3848701 - RNA, 12 nt, Human
ucuuuaacuugu

SEQ ID NO: 3848702 - RNA, 20 nt, Human
ucuuuaagggcaugccuugu

SEQ ID NO: 3848703 - RNA, 18 nt, Human
ucuuuaaucacuuaacau

SEQ ID NO: 3848704 - RNA, 23 nt, Human
ucuuuaaucauuuugccucuuuu

SEQ ID NO: 3848705 - RNA, 18 nt, Human
ucuuuaaugauuccuaua

SEQ ID NO: 3848706 - RNA, 17 nt, Human
ucuuuaaugcaauauac

SEQ ID NO: 3848707 - RNA, 14 nt, Human
ucuuuaauuaaaac

SEQ ID NO: 3848708 - RNA, 13 nt, Human
ucuuuaauucugu

SEQ ID NO: 3848709 - RNA, 22 nt, Human
ucuuuaauuucugucagaaugc

SEQ ID NO: 3848710 - RNA, 14 nt, Human
ucuuuaauuuuaca

SEQ ID NO: 3848711 - RNA, 14 nt, Human
ucuuuaauuuugga

SEQ ID NO: 3848712 - RNA, 17 nt, Human
ucuuuaauuuuggaauu

SEQ ID NO: 3848713 - RNA, 18 nt, Human
ucuuuaccuuuauugaua

SEQ ID NO: 3848714 - RNA, 16 nt, Human
ucuuuacucccaagac

SEQ ID NO: 3848715 - RNA, 15 nt, Human
ucuuuacuucaugga

SEQ ID NO: 3848716 - RNA, 12 nt, Human
ucuuuacuuuua

SEQ ID NO: 3848717 - RNA, 14 nt, Human
ucuuuagagaacug

SEQ ID NO: 3848718 - RNA, 13 nt, Human
ucuuuagagcauu

SEQ ID NO: 3848719 - RNA, 14 nt, Human
ucuuuagagcauug

SEQ ID NO: 3848720 - RNA, 19 nt, Human
ucuuuagagcauugccauu

SEQ ID NO: 3848721 - RNA, 12 nt, Human
ucuuuagaguua

SEQ ID NO: 3848722 - RNA, 14 nt, Human
ucuuuagaguuaga

SEQ ID NO: 3848723 - RNA, 15 nt, Human
ucuuuaggagauuua

SEQ ID NO: 3848724 - RNA, 16 nt, Human
ucuuuaggucuuugua

SEQ ID NO: 3848725 - RNA, 21 nt, Human
ucuuuaggucuuuguaagaac

SEQ ID NO: 3848726 - RNA, 23 nt, Human
ucuuuaguuuuugguugggaaug

SEQ ID NO: 3848727 - RNA, 17 nt, Human
ucuuuauacaacagugc

SEQ ID NO: 3848728 - RNA, 21 nt, Human
ucuuuauagugcacaaaauga

SEQ ID NO: 3848729 - RNA, 17 nt, Human
ucuuuauauacaauaau

SEQ ID NO: 3848730 - RNA, 11 nt, Human
ucuuuauauga

SEQ ID NO: 3848731 - RNA, 12 nt, Human
ucuuuauaugaa

SEQ ID NO: 3848732 - RNA, 16 nt, Human
ucuuuauaugaacaua

SEQ ID NO: 3848733 - RNA, 15 nt, Human
ucuuuauaugaagaa

SEQ ID NO: 3848734 - RNA, 16 nt, Human
ucuuuaugauuuuuaa

SEQ ID NO: 3848735 - RNA, 13 nt, Human
ucuuuauuccuag

SEQ ID NO: 3848736 - RNA, 14 nt, Human
ucuuuauuccuagu

SEQ ID NO: 3848737 - RNA, 13 nt, Human
ucuuuauugucug

SEQ ID NO: 3848738 - RNA, 23 nt, Human
ucuuuauuuuaaccuuugauaga

SEQ ID NO: 3848739 - RNA, 18 nt, Human
ucuuucaaaccagcuuca

SEQ ID NO: 3848740 - RNA, 19 nt, Human
ucuuucaaauugagagaau

SEQ ID NO: 3848741 - RNA, 20 nt, Human
ucuuucaacaguuucaaaau

SEQ ID NO: 3848742 - RNA, 20 nt, Human
ucuuucaagcagucgugccu

SEQ ID NO: 3848743 - RNA, 21 nt, Human
ucuuucaagcagucgugccug

SEQ ID NO: 3848744 - RNA, 16 nt, Human
ucuuucaagugaaucu

SEQ ID NO: 3848745 - RNA, 19 nt, Human
ucuuucaagugaaucuaaa

SEQ ID NO: 3848746 - RNA, 16 nt, Human
ucuuucaauacagaua

SEQ ID NO: 3848747 - RNA, 20 nt, Human
ucuuucacacuuccaccagc

SEQ ID NO: 3848748 - RNA, 19 nt, Human
ucuuucacagcuccuccca

SEQ ID NO: 3848749 - RNA, 20 nt, Human
ucuuucacagcuccucccac

SEQ ID NO: 3848750 - RNA, 10 nt, Human
ucuuucacau

SEQ ID NO: 3848751 - RNA, 22 nt, Human
ucuuucacauuguuugcugcua

SEQ ID NO: 3848752 - RNA, 23 nt, Human
ucuuucacauuguuugcugcuau

SEQ ID NO: 3848753 - RNA, 20 nt, Human
ucuuucacccacagaaagag

SEQ ID NO: 3848754 - RNA, 18 nt, Human
ucuuucacucacaucuuu

SEQ ID NO: 3848755 - RNA, 20 nt, Human
ucuuucagaaaacagaaaaa

SEQ ID NO: 3848756 - RNA, 14 nt, Human
ucuuucagaaagcu

SEQ ID NO: 3848757 - RNA, 19 nt, Human
ucuuucagccaagaauucu

SEQ ID NO: 3848758 - RNA, 23 nt, Human
ucuuucaucaaucauuguacagu

SEQ ID NO: 3848759 - RNA, 21 nt, Human
ucuuucauccacuagugcaaa

SEQ ID NO: 3848760 - RNA, 10 nt, Human
ucuuucaugg

SEQ ID NO: 3848761 - RNA, 17 nt, Human
ucuuuccaaauaaaaug

SEQ ID NO: 3848762 - RNA, 19 nt, Human
ucuuuccacagaagcucca

SEQ ID NO: 3848763 - RNA, 19 nt, Human
ucuuuccacggagccacuc

SEQ ID NO: 3848764 - RNA, 23 nt, Human
ucuuuccacggagccacuccucu

SEQ ID NO: 3848765 - RNA, 14 nt, Human
ucuuuccacucugg

SEQ ID NO: 3848766 - RNA, 16 nt, Human
ucuuuccacucuggau

SEQ ID NO: 3848767 - RNA, 17 nt, Human
ucuuuccacucuggauu

SEQ ID NO: 3848768 - RNA, 10 nt, Human
ucuuuccaga

SEQ ID NO: 3848769 - RNA, 15 nt, Human
ucuuuccauuucucu

SEQ ID NO: 3848770 - RNA, 24 nt, Human
ucuuuccauuucucucuccagucu

SEQ ID NO: 3848771 - RNA, 16 nt, Human
ucuuuccauuugcauu

SEQ ID NO: 3848772 - RNA, 22 nt, Human
ucuuucccacccuguucccagu

SEQ ID NO: 3848773 - RNA, 13 nt, Human
ucuuucccucccu

SEQ ID NO: 3848774 - RNA, 13 nt, Human
ucuuucccuccuu

SEQ ID NO: 3848775 - RNA, 16 nt, Human
ucuuucccuccuuggu

SEQ ID NO: 3848776 - RNA, 20 nt, Human
ucuuucccugcuuaaugaaa

SEQ ID NO: 3848777 - RNA, 15 nt, Human
ucuuucccuuccagu

SEQ ID NO: 3848778 - RNA, 16 nt, Human
ucuuucccuuccaguu

SEQ ID NO: 3848779 - RNA, 17 nt, Human
ucuuucccuuccuccau

SEQ ID NO: 3848780 - RNA, 22 nt, Human
ucuuuccucuuccccuugcccu

SEQ ID NO: 3848781 - RNA, 16 nt, Human
ucuuuccugccuucuu

SEQ ID NO: 3848782 - RNA, 18 nt, Human
ucuuuccuguuguuguua

SEQ ID NO: 3848783 - RNA, 16 nt, Human
ugaggggcuaccagga

SEQ ID NO: 3848784 - RNA, 14 nt, Human
ugaggggcuccugg

SEQ ID NO: 3848785 - RNA, 22 nt, Human
ugaggggcuggccuuccugccc

SEQ ID NO: 3848786 - RNA, 22 nt, Human
ugaggggggccgugcccagggg

SEQ ID NO: 3848787 - RNA, 15 nt, Human
ugagggguuccuccc

SEQ ID NO: 3848788 - RNA, 18 nt, Human
ugagggguuccuccccuc

SEQ ID NO: 3848789 - RNA, 22 nt, Human
ugagggguuccuccccuccagc

SEQ ID NO: 3848790 - RNA, 22 nt, Human
ugaggguaauaaacuuagaaua

SEQ ID NO: 3848791 - RNA, 18 nt, Human
ugaggguaucaaauaaaa

SEQ ID NO: 3848792 - RNA, 15 nt, Human
ugaggguccugcagc

SEQ ID NO: 3848793 - RNA, 22 nt, Human
ugagggugacuauggagcugag

SEQ ID NO: 3848794 - RNA, 21 nt, Human
ugagggugcuuguucccucuc

SEQ ID NO: 3848795 - RNA, 14 nt, Human
ugaggguguuucuu

SEQ ID NO: 3848796 - RNA, 16 nt, Human
ugaggguuugagagag

SEQ ID NO: 3848797 - RNA, 15 nt, Human
ugagguaaguuuuuu

SEQ ID NO: 3848798 - RNA, 16 nt, Human
ugagguauuuuuuccu

SEQ ID NO: 3848799 - RNA, 18 nt, Human
ugaggucagggagugcug

SEQ ID NO: 3848800 - RNA, 18 nt, Human
ugaggucauagcagugcu

SEQ ID NO: 3848801 - RNA, 20 nt, Human
ugagguccagcccuggcuga

SEQ ID NO: 3848802 - RNA, 19 nt, Human
ugaggucccaggcagagaa

SEQ ID NO: 3848803 - RNA, 13 nt, Human
ugagguccugagc

SEQ ID NO: 3848804 - RNA, 14 nt, Human
ugagguccugagca

SEQ ID NO: 3848805 - RNA, 15 nt, Human
ugagguccugagcac

SEQ ID NO: 3848806 - RNA, 17 nt, Human
ugagguccugagcacug

SEQ ID NO: 3848807 - RNA, 21 nt, Human
ugagguccugagcacugccag

SEQ ID NO: 3848808 - RNA, 22 nt, Human
ugagguccugagcacugccagg

SEQ ID NO: 3848809 - RNA, 23 nt, Human
ugagguccugagcacugccagga

SEQ ID NO: 3848810 - RNA, 14 nt, Human
ugaggucucagccc

SEQ ID NO: 3848811 - RNA, 16 nt, Human
ugaggucucagccccu

SEQ ID NO: 3848812 - RNA, 17 nt, Human
ugaggucucagccccuu

SEQ ID NO: 3848813 - RNA, 18 nt, Human
ugaggucucgcugaugcu

SEQ ID NO: 3848814 - RNA, 23 nt, Human
ugaggucugcucggccgucuuca

SEQ ID NO: 3848815 - RNA, 14 nt, Human
ugaggucuguuccu

SEQ ID NO: 3848816 - RNA, 17 nt, Human
ugaggucuguuuaaagu

SEQ ID NO: 3848817 - RNA, 16 nt, Human
ugaggugaaagggagc

SEQ ID NO: 3848818 - RNA, 20 nt, Human
ugaggugcagagugcccaga

SEQ ID NO: 3848819 - RNA, 15 nt, Human
ugaggugcccaggag

SEQ ID NO: 3848820 - RNA, 16 nt, Human
ugaggugcccaggaga

SEQ ID NO: 3848821 - RNA, 14 nt, Human
ugaggugccugucc

SEQ ID NO: 3848822 - RNA, 15 nt, Human
ugaggugccuguccc

SEQ ID NO: 3848823 - RNA, 16 nt, Human
ugaggugcuauguucu

SEQ ID NO: 3848824 - RNA, 19 nt, Human
ugagguggaagagggcugc

SEQ ID NO: 3848825 - RNA, 17 nt, Human
ugagguggaagcccucc

SEQ ID NO: 3848826 - RNA, 20 nt, Human
ugagguggaagcccuccuuc

SEQ ID NO: 3848827 - RNA, 22 nt, Human
ugagguggaagcccuccuucca

SEQ ID NO: 3848828 - RNA, 14 nt, Human
ugagguggcacuuu

SEQ ID NO: 3848829 - RNA, 16 nt, Human
ugagguggcacuuuuu

SEQ ID NO: 3848830 - RNA, 20 nt, Human
ugagguggcacuuuuucauu

SEQ ID NO: 3848831 - RNA, 21 nt, Human
ugagguggccuccuugcuugu

SEQ ID NO: 3848832 - RNA, 14 nt, Human
ugaggugggagaug

SEQ ID NO: 3848833 - RNA, 13 nt, Human
ugaggugggaggu

SEQ ID NO: 3848834 - RNA, 22 nt, Human
ugaggugggagguggaagaagg

SEQ ID NO: 3848835 - RNA, 20 nt, Human
ugaggugggcagaucacgag

SEQ ID NO: 3848836 - RNA, 13 nt, Human
ugaggugggccca

SEQ ID NO: 3848837 - RNA, 14 nt, Human
ugaggugggcccag

SEQ ID NO: 3848838 - RNA, 21 nt, Human
ugagguggguuuucuucccau

SEQ ID NO: 3848839 - RNA, 13 nt, Human
ugagguggucuga

SEQ ID NO: 3848840 - RNA, 14 nt, Human
ugagguggucugaa

SEQ ID NO: 3848841 - RNA, 21 nt, Human
ugagguggucugaauguucug

SEQ ID NO: 3848842 - RNA, 18 nt, Human
ugaggugucuuaagccuu

SEQ ID NO: 3848843 - RNA, 14 nt, Human
ugaggugugggggc

SEQ ID NO: 3848844 - RNA, 14 nt, Human
ugagguuacuggaa

SEQ ID NO: 3848845 - RNA, 15 nt, Human
ugagguugcuuuguu

SEQ ID NO: 3848846 - RNA, 19 nt, Human
ugagguuucaaaccucccu

SEQ ID NO: 3848847 - RNA, 13 nt, Human
ugagguuucccaa

SEQ ID NO: 3848848 - RNA, 22 nt, Human
ugaguaaaauaaauauugucuu

SEQ ID NO: 3848849 - RNA, 20 nt, Human
ugaguaaauauugaggcuuu

SEQ ID NO: 3848850 - RNA, 23 nt, Human
ugaguaaauauugaggcuuugug

SEQ ID NO: 3848851 - RNA, 10 nt, Human
ugaguaacau

SEQ ID NO: 3848852 - RNA, 15 nt, Human
ugaguaacauuugcu

SEQ ID NO: 3848853 - RNA, 17 nt, Human
ugaguaacauuugcugu

SEQ ID NO: 3848854 - RNA, 15 nt, Human
ugaguaaugguguag

SEQ ID NO: 3848855 - RNA, 17 nt, Human
ugaguaaugguguagaa

SEQ ID NO: 3848856 - RNA, 19 nt, Human
ugaguaaugguguagaaca

SEQ ID NO: 3848857 - RNA, 21 nt, Human
ugaguacaaaugccuuaaaau

SEQ ID NO: 3848858 - RNA, 21 nt, Human
ugaguaccccugcuuugggcu

SEQ ID NO: 3848859 - RNA, 17 nt, Human
ugaguacguugugcauu

SEQ ID NO: 3848860 - RNA, 19 nt, Human
ugaguacguugugcauuug

SEQ ID NO: 3848861 - RNA, 14 nt, Human
ugaguacuacaguc

SEQ ID NO: 3848862 - RNA, 23 nt, Human
ugaguacuacaguccucccaucu

SEQ ID NO: 3848863 - RNA, 20 nt, Human
ugaguacuccacacugcaca

SEQ ID NO: 3848864 - RNA, 14 nt, Human
ugaguagaggcuua

SEQ ID NO: 3848865 - RNA, 14 nt, Human
ugaguagauauuac

SEQ ID NO: 3848866 - RNA, 20 nt, Human
ugaguagauauuacuuuauc

SEQ ID NO: 3848867 - RNA, 14 nt, Human
ugaguagcucugcc

SEQ ID NO: 3848868 - RNA, 22 nt, Human
ugaguagcucugccuuugcucu

SEQ ID NO: 3848869 - RNA, 19 nt, Human
ugaguauaaaaacuugaaa

SEQ ID NO: 3848870 - RNA, 14 nt, Human
ugaguauauuauaa

SEQ ID NO: 3848871 - RNA, 16 nt, Human
ugaguauauuauaaua

SEQ ID NO: 3848872 - RNA, 13 nt, Human
ugaguaucagaau

SEQ ID NO: 3848873 - RNA, 22 nt, Human
ugaguaucagaauugaaacacu

SEQ ID NO: 3848874 - RNA, 12 nt, Human
ugaguauuguuu

SEQ ID NO: 3848875 - RNA, 19 nt, Human
ugaguauuguuuaaaaugu

SEQ ID NO: 3848876 - RNA, 17 nt, Human
ugagucaccaagcccag

SEQ ID NO: 3848877 - RNA, 20 nt, Human
ugagucacccuaccugugcc

SEQ ID NO: 3848878 - RNA, 16 nt, Human
ugagucagggcccaga

SEQ ID NO: 3848879 - RNA, 18 nt, Human
ugagucauaucuuaauau

SEQ ID NO: 3848880 - RNA, 21 nt, Human
ugagucaucuguuagggccuu

SEQ ID NO: 3848881 - RNA, 13 nt, Human
ugagucauuuaaa

SEQ ID NO: 3848882 - RNA, 19 nt, Human
ugaguccagaaguuugaga

SEQ ID NO: 3848883 - RNA, 13 nt, Human
ugagucccagugg

SEQ ID NO: 3848884 - RNA, 15 nt, Human
ugagucccaguggga

SEQ ID NO: 3848885 - RNA, 18 nt, Human
ugagucccccagagaugu

SEQ ID NO: 3848886 - RNA, 20 nt, Human
ugaguccccuguuuguuucu

SEQ ID NO: 3848887 - RNA, 14 nt, Human
ugaguccuccagaa

SEQ ID NO: 3848888 - RNA, 21 nt, Human
ugaguccuggaugauacuaau

SEQ ID NO: 3848889 - RNA, 14 nt, Human
ugaguccuggccca

SEQ ID NO: 3848890 - RNA, 14 nt, Human
ugaguccuuaaaca

SEQ ID NO: 3848891 - RNA, 15 nt, Human
ugaguccuugaaaau

SEQ ID NO: 3848892 - RNA, 16 nt, Human
ugaguccuugaaaaua

SEQ ID NO: 3848893 - RNA, 14 nt, Human
ugagucgaggacag

SEQ ID NO: 3848894 - RNA, 15 nt, Human
ugagucucccaaggc

SEQ ID NO: 3848895 - RNA, 16 nt, Human
ugagucucccaaggcu

SEQ ID NO: 3848896 - RNA, 14 nt, Human
ugagucucuucaga

SEQ ID NO: 3848897 - RNA, 17 nt, Human
ugagucugaaggcuggg

SEQ ID NO: 3848898 - RNA, 16 nt, Human
ugagucuguucuggua

SEQ ID NO: 3848899 - RNA, 15 nt, Human
ugagucuuggcggca

SEQ ID NO: 3848900 - RNA, 20 nt, Human
ugagucuuugguucuaagga

SEQ ID NO: 3848901 - RNA, 12 nt, Human
ugagucuuuuuu

SEQ ID NO: 3848902 - RNA, 17 nt, Human
ugagugaaccuguauaa

SEQ ID NO: 3848903 - RNA, 23 nt, Human
ugagugagaggcgacaggaguau

SEQ ID NO: 3848904 - RNA, 14 nt, Human
ugagugauagagcu

SEQ ID NO: 3848905 - RNA, 20 nt, Human
ugagugauccuccaacuuca

SEQ ID NO: 3848906 - RNA, 20 nt, Human
ugagugauuauuuguuauuu

SEQ ID NO: 3848907 - RNA, 13 nt, Human
ugagugcagaccc

SEQ ID NO: 3848908 - RNA, 21 nt, Human
ugagugcagaccccuuggcca

SEQ ID NO: 3848909 - RNA, 19 nt, Human
ugagugcagccguuugaga

SEQ ID NO: 3848910 - RNA, 15 nt, Human
ugagugcaggcccac

SEQ ID NO: 3848911 - RNA, 18 nt, Human
ugagugcaggcccacccu

SEQ ID NO: 3848912 - RNA, 12 nt, Human
ugagugccuggc

SEQ ID NO: 3848913 - RNA, 13 nt, Human
ugagugccuuaca

SEQ ID NO: 3848914 - RNA, 20 nt, Human
ugagugccuuacacaauggu

SEQ ID NO: 3848915 - RNA, 21 nt, Human
ugagugccuucuguggggacu

SEQ ID NO: 3848916 - RNA, 15 nt, Human
ugagugccuuuugca

SEQ ID NO: 3848917 - RNA, 17 nt, Human
ugagugccuuuugcaga

SEQ ID NO: 3848918 - RNA, 22 nt, Human
ugagugccuuuugcagaagagg

SEQ ID NO: 3848919 - RNA, 12 nt, Human
ugagugcucuga

SEQ ID NO: 3848920 - RNA, 15 nt, Human
ugaguggcauggcca

SEQ ID NO: 3848921 - RNA, 15 nt, Human
ugaguggccagggaa

SEQ ID NO: 3848922 - RNA, 13 nt, Human
ugagugggaagcc

SEQ ID NO: 3848923 - RNA, 12 nt, Human
ugagugggagaa

SEQ ID NO: 3848924 - RNA, 17 nt, Human
ugagugggagaaggcag

SEQ ID NO: 3848925 - RNA, 22 nt, Human
ugaguggggagacaccucagag

SEQ ID NO: 3848926 - RNA, 23 nt, Human
ugagugggggaucacagccucug

SEQ ID NO: 3848927 - RNA, 19 nt, Human
ugaguguaacaagaaagga

SEQ ID NO: 3848928 - RNA, 11 nt, Human
ugauaugaaaa

SEQ ID NO: 3848929 - RNA, 19 nt, Human
ugauaugcauauuuguuua

SEQ ID NO: 3848930 - RNA, 16 nt, Human
ugauauggagcaagag

SEQ ID NO: 3848931 - RNA, 16 nt, Human
ugauauggcagaagac

SEQ ID NO: 3848932 - RNA, 19 nt, Human
ugauauggcagaagacacc

SEQ ID NO: 3848933 - RNA, 15 nt, Human
ugauauguaaacaua

SEQ ID NO: 3848934 - RNA, 15 nt, Human
ugauaugugaacagu

SEQ ID NO: 3848935 - RNA, 16 nt, Human
ugauauguuuuauuuc

SEQ ID NO: 3848936 - RNA, 17 nt, Human
ugauauuacauuuauuu

SEQ ID NO: 3848937 - RNA, 12 nt, Human
ugauauucagaa

SEQ ID NO: 3848938 - RNA, 16 nt, Human
ugauauuccauaguau

SEQ ID NO: 3848939 - RNA, 18 nt, Human
ugauauuccaugaaugua

SEQ ID NO: 3848940 - RNA, 19 nt, Human
ugauauuccaugaauguau

SEQ ID NO: 3848941 - RNA, 22 nt, Human
ugauauuccaugaauguaucag

SEQ ID NO: 3848942 - RNA, 17 nt, Human
ugauauucuaagacuua

SEQ ID NO: 3848943 - RNA, 17 nt, Human
ugauauugcauaugcau

SEQ ID NO: 3848944 - RNA, 21 nt, Human
ugauauugugaacauuuguga

SEQ ID NO: 3848945 - RNA, 19 nt, Human
ugauauuguuauauacaua

SEQ ID NO: 3848946 - RNA, 14 nt, Human
ugauauuucagaaa

SEQ ID NO: 3848947 - RNA, 15 nt, Human
ugauauuucagaaau

SEQ ID NO: 3848948 - RNA, 16 nt, Human
ugauauuucagaaaua

SEQ ID NO: 3848949 - RNA, 15 nt, Human
ugauauuucucuagu

SEQ ID NO: 3848950 - RNA, 16 nt, Human
ugauauuucucuagua

SEQ ID NO: 3848951 - RNA, 19 nt, Human
ugauauuucucuaguaguu

SEQ ID NO: 3848952 - RNA, 16 nt, Human
ugauauuugugcauuu

SEQ ID NO: 3848953 - RNA, 19 nt, Human
ugauauuugugcauuuucu

SEQ ID NO: 3848954 - RNA, 19 nt, Human
ugauauuuuaccucuuauu

SEQ ID NO: 3848955 - RNA, 14 nt, Human
ugauauuuucucua

SEQ ID NO: 3848956 - RNA, 19 nt, Human
ugauauuuuuuaucauaaa

SEQ ID NO: 3848957 - RNA, 18 nt, Human
ugaucaaaaauaaugcau

SEQ ID NO: 3848958 - RNA, 13 nt, Human
ugaucaaauguuu

SEQ ID NO: 3848959 - RNA, 18 nt, Human
ugaucaaauguuuaauca

SEQ ID NO: 3848960 - RNA, 19 nt, Human
ugaucaaauguuuaaucau

SEQ ID NO: 3848961 - RNA, 20 nt, Human
ugaucaagggaauguaacug

SEQ ID NO: 3848962 - RNA, 21 nt, Human
ugaucaauauuuuuauaucau

SEQ ID NO: 3848963 - RNA, 18 nt, Human
ugaucaauuauaguuucu

SEQ ID NO: 3848964 - RNA, 16 nt, Human
ugaucaauuuugacuu

SEQ ID NO: 3848965 - RNA, 14 nt, Human
ugaucacagcagcu

SEQ ID NO: 3848966 - RNA, 19 nt, Human
ugaucaccgacugaaaaua

SEQ ID NO: 3848967 - RNA, 14 nt, Human
ugaucacggcucac

SEQ ID NO: 3848968 - RNA, 16 nt, Human
ugaucacugaaauaaa

SEQ ID NO: 3848969 - RNA, 21 nt, Human
ugaucagagccgugguccuuu

SEQ ID NO: 3848970 - RNA, 17 nt, Human
ugaucagaucugacaug

SEQ ID NO: 3848971 - RNA, 18 nt, Human
ugaucagcuguuugucau

SEQ ID NO: 3848972 - RNA, 17 nt, Human
ugaucagcuuauugucu

SEQ ID NO: 3848973 - RNA, 24 nt, Human
ugaucagcuuauugucuagugaaa

SEQ ID NO: 3848974 - RNA, 21 nt, Human
ugaucaguaguuugcauuuca

SEQ ID NO: 3848975 - RNA, 23 nt, Human
ugaucaguaguuugcauuucaga

SEQ ID NO: 3848976 - RNA, 19 nt, Human
ugaucaguggacagucugc

SEQ ID NO: 3848977 - RNA, 11 nt, Human
ugaucaguguu

SEQ ID NO: 3848978 - RNA, 18 nt, Human
ugaucaguguuguugcuc

SEQ ID NO: 3848979 - RNA, 15 nt, Human
ugaucauaagucuaa

SEQ ID NO: 3848980 - RNA, 17 nt, Human
ugaucauaagugaauuu

SEQ ID NO: 3848981 - RNA, 20 nt, Human
ugaucauagguauuucaaaa

SEQ ID NO: 3848982 - RNA, 13 nt, Human
ugaucauccacug

SEQ ID NO: 3848983 - RNA, 20 nt, Human
ugaucaucgccagaggugcu

SEQ ID NO: 3848984 - RNA, 14 nt, Human
ugaucaugcauugu

SEQ ID NO: 3848985 - RNA, 14 nt, Human
ugaucauucuggag

SEQ ID NO: 3848986 - RNA, 18 nt, Human
ugaucauuuuccccccac

SEQ ID NO: 3848987 - RNA, 20 nt, Human
ugaucauuuuccccccacuc

SEQ ID NO: 3848988 - RNA, 13 nt, Human
ugauccaacuaau

SEQ ID NO: 3848989 - RNA, 16 nt, Human
ugauccacccaacccu

SEQ ID NO: 3848990 - RNA, 16 nt, Human
ugauccacccaccuca

SEQ ID NO: 3848991 - RNA, 18 nt, Human
ugauccacccaccucagc

SEQ ID NO: 3848992 - RNA, 23 nt, Human
ugauccacuuugggggaggagaa

SEQ ID NO: 3848993 - RNA, 13 nt, Human
ugauccagaaaga

SEQ ID NO: 3848994 - RNA, 15 nt, Human
ugauccagagcacag

SEQ ID NO: 3848995 - RNA, 18 nt, Human
ugauccagccucuccccu

SEQ ID NO: 3848996 - RNA, 19 nt, Human
ugauccagccucuccccug

SEQ ID NO: 3848997 - RNA, 13 nt, Human
ugauccauccagc

SEQ ID NO: 3848998 - RNA, 16 nt, Human
ugauccauccagcuug

SEQ ID NO: 3848999 - RNA, 19 nt, Human
ugaucccaagugccagucu

SEQ ID NO: 3849000 - RNA, 13 nt, Human
ugaucccagcacu

SEQ ID NO: 3849001 - RNA, 13 nt, Human
ugauccccacgcc

SEQ ID NO: 3849002 - RNA, 20 nt, Human
ugaucccguuuuccccauga

SEQ ID NO: 3849003 - RNA, 22 nt, Human
ugaucccguuuuccccaugaca

SEQ ID NO: 3849004 - RNA, 20 nt, Human
ugaucccuuccaccugcucu

SEQ ID NO: 3849005 - RNA, 17 nt, Human
ugaucccuugagauaug

SEQ ID NO: 3849006 - RNA, 20 nt, Human
ugauccuaacugaagagaca

SEQ ID NO: 3849007 - RNA, 12 nt, Human
ugauccucccac

SEQ ID NO: 3849008 - RNA, 17 nt, Human
ugauccuggaggcccag

SEQ ID NO: 3849009 - RNA, 18 nt, Human
ugauccuggaggcccagu

SEQ ID NO: 3849010 - RNA, 20 nt, Human
ugauccuguauucagacaga

SEQ ID NO: 3849011 - RNA, 15 nt, Human
ugaucgccuuuccca

SEQ ID NO: 3849012 - RNA, 15 nt, Human
ugaucgugacgcuga

SEQ ID NO: 3849013 - RNA, 23 nt, Human
ugaucgugacgcugaauaaaugu

SEQ ID NO: 3849014 - RNA, 15 nt, Human
ugaucgugcuaaauu

SEQ ID NO: 3849015 - RNA, 17 nt, Human
ugaucguucuuucuagc

SEQ ID NO: 3849016 - RNA, 13 nt, Human
ugaucuaggaaga

SEQ ID NO: 3849017 - RNA, 13 nt, Human
ugaucuagguuua

SEQ ID NO: 3849018 - RNA, 15 nt, Human
ugaucuagguuuaac

SEQ ID NO: 3849019 - RNA, 19 nt, Human
ugaucuagguuuaacucag

SEQ ID NO: 3849020 - RNA, 22 nt, Human
ugaucuagguuuaacucagauc

SEQ ID NO: 3849021 - RNA, 12 nt, Human
ugaucucaggga

SEQ ID NO: 3849022 - RNA, 19 nt, Human
ugaucucagggaagcccag

SEQ ID NO: 3849023 - RNA, 21 nt, Human
ugaucucagggaagcccagcu

SEQ ID NO: 3849024 - RNA, 14 nt, Human
ugaucucauuguuc

SEQ ID NO: 3849025 - RNA, 12 nt, Human
ugaucucuuccu

SEQ ID NO: 3849026 - RNA, 17 nt, Human
ugaucugacauccccac

SEQ ID NO: 3849027 - RNA, 20 nt, Human
ugaucugauaggguuuguga

SEQ ID NO: 3849028 - RNA, 15 nt, Human
ugaucugcucagccc

SEQ ID NO: 3849029 - RNA, 21 nt, Human
ugaucugcucagcccuggagg

SEQ ID NO: 3849030 - RNA, 14 nt, Human
ugaucuggaaccca

SEQ ID NO: 3849031 - RNA, 11 nt, Human
ugaucugggaa

SEQ ID NO: 3849032 - RNA, 13 nt, Human
ugaucuguauaua

SEQ ID NO: 3849033 - RNA, 14 nt, Human
ugaucugucugugg

SEQ ID NO: 3849034 - RNA, 20 nt, Human
ugaucugugcuuuccagcuc

SEQ ID NO: 3849035 - RNA, 15 nt, Human
ugaucugugggcaca

SEQ ID NO: 3849036 - RNA, 15 nt, Human
ugaucuguuauaggu

SEQ ID NO: 3849037 - RNA, 15 nt, Human
ugaucuguuuuucac

SEQ ID NO: 3849038 - RNA, 15 nt, Human
ugaucuuauuuuucu

SEQ ID NO: 3849039 - RNA, 21 nt, Human
ugaucuucaacaaauugcccu

SEQ ID NO: 3849040 - RNA, 18 nt, Human
ugaucuuccucugcuaaa

SEQ ID NO: 3849041 - RNA, 21 nt, Human
ugaucuuccucugcuaaauug

SEQ ID NO: 3849042 - RNA, 19 nt, Human
ugaucuucugggagcagga

SEQ ID NO: 3849043 - RNA, 20 nt, Human
ugaucuucugggagcaggaa

SEQ ID NO: 3849044 - RNA, 20 nt, Human
ugaucuucuuuauaauucua

SEQ ID NO: 3849045 - RNA, 20 nt, Human
ugaucuugcucuaucucaca

SEQ ID NO: 3849046 - RNA, 14 nt, Human
ugaucuugugacau

SEQ ID NO: 3849047 - RNA, 19 nt, Human
ugaucuuugcagacaggca

SEQ ID NO: 3849048 - RNA, 20 nt, Human
ugaucuuugcagacaggcaa

SEQ ID NO: 3849049 - RNA, 17 nt, Human
ugaucuuuuaaaguguu

SEQ ID NO: 3849050 - RNA, 18 nt, Human
ugaucuuuuaaaguguua

SEQ ID NO: 3849051 - RNA, 14 nt, Human
ugaugaaaagcuuu

SEQ ID NO: 3849052 - RNA, 22 nt, Human
ugaugaaaagcuuuguuuguuc

SEQ ID NO: 3849053 - RNA, 11 nt, Human
ugaugaaagcu

SEQ ID NO: 3849054 - RNA, 19 nt, Human
ugaugaaauaacacagcag

SEQ ID NO: 3849055 - RNA, 22 nt, Human
ugaugaaaugaggucagagccu

SEQ ID NO: 3849056 - RNA, 17 nt, Human
ugaugaacuuauucugu

SEQ ID NO: 3849057 - RNA, 14 nt, Human
ugaugaagagagag

SEQ ID NO: 3849058 - RNA, 16 nt, Human
ugaugaagcaaggaag

SEQ ID NO: 3849059 - RNA, 14 nt, Human
ugaugaaucacugu

SEQ ID NO: 3849060 - RNA, 12 nt, Human
ugaugaaucuug

SEQ ID NO: 3849061 - RNA, 22 nt, Human
ugaugacccaggcugccugagc

SEQ ID NO: 3849062 - RNA, 16 nt, Human
ugaugacccuuuucau

SEQ ID NO: 3849063 - RNA, 19 nt, Human
ugaugacguacaaguaguu

SEQ ID NO: 3849064 - RNA, 14 nt, Human
ugaugacucaagau

SEQ ID NO: 3849065 - RNA, 23 nt, Human
ugaugacucaagauucccaggag

SEQ ID NO: 3849066 - RNA, 15 nt, Human
ugaugacuggaauuu

SEQ ID NO: 3849067 - RNA, 23 nt, Human
ugaugacuggaauuuuuauuaug

SEQ ID NO: 3849068 - RNA, 15 nt, Human
ugaugacuggcauuu

SEQ ID NO: 3849069 - RNA, 17 nt, Human
ugaugacuggcauuuua

SEQ ID NO: 3849070 - RNA, 21 nt, Human
ugaugacuuaguacaaaguuu

SEQ ID NO: 3849071 - RNA, 15 nt, Human
ugaugagaauuucua

SEQ ID NO: 3849072 - RNA, 13 nt, Human
ugaugagaggaaa

SEQ ID NO: 3849073 - RNA, 18 nt, Human
ugaccaagaacugcaugg

SEQ ID NO: 3849074 - RNA, 16 nt, Human
ugaccaagagagaaag

SEQ ID NO: 3849075 - RNA, 18 nt, Human
ugaccaagagagaaagaa

SEQ ID NO: 3849076 - RNA, 17 nt, Human
ugaccaagcaggaagcu

SEQ ID NO: 3849077 - RNA, 18 nt, Human
ugaccaaguauaaacuuu

SEQ ID NO: 3849078 - RNA, 13 nt, Human
ugaccaaguuaua

SEQ ID NO: 3849079 - RNA, 23 nt, Human
ugaccaauauuauacuaagaaaa

SEQ ID NO: 3849080 - RNA, 19 nt, Human
ugaccaauauuguacaguu

SEQ ID NO: 3849081 - RNA, 18 nt, Human
ugaccaaugauggucacc

SEQ ID NO: 3849082 - RNA, 16 nt, Human
ugaccaauugugcugc

SEQ ID NO: 3849083 - RNA, 17 nt, Human
ugaccacaccugccucu

SEQ ID NO: 3849084 - RNA, 17 nt, Human
ugaccacacuccagcug

SEQ ID NO: 3849085 - RNA, 20 nt, Human
ugaccacacuuccuguccag

SEQ ID NO: 3849086 - RNA, 14 nt, Human
ugaccacagcacag

SEQ ID NO: 3849087 - RNA, 17 nt, Human
ugaccacagcacagcca

SEQ ID NO: 3849088 - RNA, 13 nt, Human
ugaccacaggcag

SEQ ID NO: 3849089 - RNA, 16 nt, Human
ugaccacccuccccuc

SEQ ID NO: 3849090 - RNA, 17 nt, Human
ugaccacugcagaagac

SEQ ID NO: 3849091 - RNA, 23 nt, Human
ugaccacuuuuuagaaagauaau

SEQ ID NO: 3849092 - RNA, 15 nt, Human
ugaccagaagggaaa

SEQ ID NO: 3849093 - RNA, 19 nt, Human
ugaccagcaccaucucucc

SEQ ID NO: 3849094 - RNA, 21 nt, Human
ugaccagccuccaugcugccu

SEQ ID NO: 3849095 - RNA, 22 nt, Human
ugaccagccuccaugcugccuc

SEQ ID NO: 3849096 - RNA, 13 nt, Human
ugaccagcucccc

SEQ ID NO: 3849097 - RNA, 16 nt, Human
ugaccagcucccccuc

SEQ ID NO: 3849098 - RNA, 19 nt, Human
ugaccagcucccccucccu

SEQ ID NO: 3849099 - RNA, 16 nt, Human
ugaccaggaucccaag

SEQ ID NO: 3849100 - RNA, 22 nt, Human
ugaccaggcaccuccccucccg

SEQ ID NO: 3849101 - RNA, 12 nt, Human
ugaccaggccug

SEQ ID NO: 3849102 - RNA, 13 nt, Human
ugaccaggccugg

SEQ ID NO: 3849103 - RNA, 15 nt, Human
ugaccaggccugggc

SEQ ID NO: 3849104 - RNA, 16 nt, Human
ugaccaggcugccucc

SEQ ID NO: 3849105 - RNA, 16 nt, Human
ugaccagucugacccu

SEQ ID NO: 3849106 - RNA, 20 nt, Human
ugaccaguugcacuuggccu

SEQ ID NO: 3849107 - RNA, 20 nt, Human
ugaccaguuuaaccugaugc

SEQ ID NO: 3849108 - RNA, 13 nt, Human
ugaccauaaaauu

SEQ ID NO: 3849109 - RNA, 23 nt, Human
ugaccauccacucuacccuccca

SEQ ID NO: 3849110 - RNA, 15 nt, Human
ugaccaugcauuuua

SEQ ID NO: 3849111 - RNA, 16 nt, Human
ugaccaugcucaucug

SEQ ID NO: 3849112 - RNA, 18 nt, Human
guaaaucccauuauucaa

SEQ ID NO: 3849113 - RNA, 20 nt, Human
guaaaucccauuauucaaag

SEQ ID NO: 3849114 - RNA, 16 nt, Human
guaaauccugccauuu

SEQ ID NO: 3849115 - RNA, 17 nt, Human
guaaauccugccauuua

SEQ ID NO: 3849116 - RNA, 16 nt, Human
guaaauccuuuuucuu

SEQ ID NO: 3849117 - RNA, 18 nt, Human
guaaaucucuucuguguu

SEQ ID NO: 3849118 - RNA, 14 nt, Human
guaaaucuuuuaca

SEQ ID NO: 3849119 - RNA, 23 nt, Human
guaaaugaaguaacuugucuuaa

SEQ ID NO: 3849120 - RNA, 12 nt, Human
guaaaugaugug

SEQ ID NO: 3849121 - RNA, 17 nt, Human
guaaaugcaaaguucug

SEQ ID NO: 3849122 - RNA, 24 nt, Human
guaaaugcaucuguccucaugugu

SEQ ID NO: 3849123 - RNA, 15 nt, Human
guaaaugcuguguug

SEQ ID NO: 3849124 - RNA, 18 nt, Human
guaaaugggggugcauuu

SEQ ID NO: 3849125 - RNA, 19 nt, Human
guaaaugggggugcauuug

SEQ ID NO: 3849126 - RNA, 19 nt, Human
guaaaugucucacugagca

SEQ ID NO: 3849127 - RNA, 21 nt, Human
guaaaugucuguggccuuguu

SEQ ID NO: 3849128 - RNA, 22 nt, Human
guaaaugucuguggccuuguuc

SEQ ID NO: 3849129 - RNA, 13 nt, Human
guaaaugucuuug

SEQ ID NO: 3849130 - RNA, 18 nt, Human
guaaaugucuuuguaagu

SEQ ID NO: 3849131 - RNA, 19 nt, Human
guaaauguguuggacaaau

SEQ ID NO: 3849132 - RNA, 19 nt, Human
guaaauguuaguuucuugg

SEQ ID NO: 3849133 - RNA, 22 nt, Human
guaaauguuaucuuauacugua

SEQ ID NO: 3849134 - RNA, 13 nt, Human
guaaauguuauuu

SEQ ID NO: 3849135 - RNA, 19 nt, Human
guaaauuaaacauaaaaca

SEQ ID NO: 3849136 - RNA, 22 nt, Human
guaaauuaacuuuuauaaacuu

SEQ ID NO: 3849137 - RNA, 14 nt, Human
guaaauuaggaggc

SEQ ID NO: 3849138 - RNA, 14 nt, Human
guaaauuauauuug

SEQ ID NO: 3849139 - RNA, 15 nt, Human
guaaauuauauuugu

SEQ ID NO: 3849140 - RNA, 20 nt, Human
guaaauuauucaguuaagaa

SEQ ID NO: 3849141 - RNA, 12 nt, Human
guaaauuauuuu

SEQ ID NO: 3849142 - RNA, 15 nt, Human
guaaauuauuuuaaa

SEQ ID NO: 3849143 - RNA, 18 nt, Human
guaaauuauuuuaaauua

SEQ ID NO: 3849144 - RNA, 22 nt, Human
guaaauuuaguguuuuuuuauu

SEQ ID NO: 3849145 - RNA, 16 nt, Human
guaaauuuaugugaug

SEQ ID NO: 3849146 - RNA, 18 nt, Human
guaaauuuccccaacagu

SEQ ID NO: 3849147 - RNA, 21 nt, Human
guaaauuuccccaacagugug

SEQ ID NO: 3849148 - RNA, 13 nt, Human
guaaauuuggcuu

SEQ ID NO: 3849149 - RNA, 20 nt, Human
guaaauuuguacuauuuaac

SEQ ID NO: 3849150 - RNA, 22 nt, Human
guaaauuuguacuauuuaacug

SEQ ID NO: 3849151 - RNA, 13 nt, Human
guaacaagccaga

SEQ ID NO: 3849152 - RNA, 23 nt, Human
guaacaagccagauuuuuuaaaa

SEQ ID NO: 3849153 - RNA, 19 nt, Human
guaacacaagccacagaag

SEQ ID NO: 3849154 - RNA, 17 nt, Human
guaacacuaauauauuu

SEQ ID NO: 3849155 - RNA, 20 nt, Human
guaacacuaauauauuuaaa

SEQ ID NO: 3849156 - RNA, 11 nt, Human
guaacagaaag

SEQ ID NO: 3849157 - RNA, 23 nt, Human
guaacagaaagggcaacaauaaa

SEQ ID NO: 3849158 - RNA, 18 nt, Human
guaacagaacagcuucag

SEQ ID NO: 3849159 - RNA, 22 nt, Human
guaacagaacagcuucagguua

SEQ ID NO: 3849160 - RNA, 12 nt, Human
guaacagacauu

SEQ ID NO: 3849161 - RNA, 15 nt, Human
guaacagacauuguu

SEQ ID NO: 3849162 - RNA, 23 nt, Human
guaacagcuccuugggaggaagc

SEQ ID NO: 3849163 - RNA, 12 nt, Human
guaacaggcaga

SEQ ID NO: 3849164 - RNA, 22 nt, Human
guaacagguauuuuguuucuuu

SEQ ID NO: 3849165 - RNA, 16 nt, Human
guaacaggucuccucu

SEQ ID NO: 3849166 - RNA, 20 nt, Human
guaacaggucuccucuuaaa

SEQ ID NO: 3849167 - RNA, 21 nt, Human
guaacaggucuccucuuaaaa

SEQ ID NO: 3849168 - RNA, 17 nt, Human
guaacauagcugugauu

SEQ ID NO: 3849169 - RNA, 15 nt, Human
guaacaucagggacc

SEQ ID NO: 3849170 - RNA, 11 nt, Human
guaacauccuu

SEQ ID NO: 3849171 - RNA, 12 nt, Human
guaacauguuua

SEQ ID NO: 3849172 - RNA, 13 nt, Human
guaacauucaugu

SEQ ID NO: 3849173 - RNA, 17 nt, Human
guaacauucuauuucaa

SEQ ID NO: 3849174 - RNA, 18 nt, Human
guaacauuggguccuggg

SEQ ID NO: 3849175 - RNA, 15 nt, Human
guaacauuuuucaau

SEQ ID NO: 3849176 - RNA, 17 nt, Human
guaacccaacucuccug

SEQ ID NO: 3849177 - RNA, 18 nt, Human
guaacccaacucuccugg

SEQ ID NO: 3849178 - RNA, 23 nt, Human
guaacccagauuuugcuguauau

SEQ ID NO: 3849179 - RNA, 14 nt, Human
guaacccugguggu

SEQ ID NO: 3849180 - RNA, 18 nt, Human
guaaccucuucagaggcc

SEQ ID NO: 3849181 - RNA, 17 nt, Human
guaacguugcuguggga

SEQ ID NO: 3849182 - RNA, 13 nt, Human
guaacuaaaauaa

SEQ ID NO: 3849183 - RNA, 17 nt, Human
guaacuaacuaaaacaa

SEQ ID NO: 3849184 - RNA, 19 nt, Human
guaacuaacugcauacacu

SEQ ID NO: 3849185 - RNA, 17 nt, Human
guaacuaggcucagaga

SEQ ID NO: 3849186 - RNA, 19 nt, Human
guaacucuaauucccauuu

SEQ ID NO: 3849187 - RNA, 15 nt, Human
guaacuguccugucc

SEQ ID NO: 3849188 - RNA, 16 nt, Human
guaacuguuuuuuaag

SEQ ID NO: 3849189 - RNA, 16 nt, Human
guaacuuauguagaua

SEQ ID NO: 3849190 - RNA, 22 nt, Human
guaacuuauguagauauuuggc

SEQ ID NO: 3849191 - RNA, 22 nt, Human
guaacuugauccauuucuaauu

SEQ ID NO: 3849192 - RNA, 23 nt, Human
guaacuugauccauuucuaauua

SEQ ID NO: 3849193 - RNA, 20 nt, Human
guaacuugcuuaaauuucuu

SEQ ID NO: 3849194 - RNA, 21 nt, Human
guaacuugcuuaaauuucuua

SEQ ID NO: 3849195 - RNA, 16 nt, Human
guaacuugguuauaca

SEQ ID NO: 3849196 - RNA, 14 nt, Human
guaacuugucuuaa

SEQ ID NO: 3849197 - RNA, 14 nt, Human
guaacuuuaugugu

SEQ ID NO: 3849198 - RNA, 15 nt, Human
guaacuuuuguaaga

SEQ ID NO: 3849199 - RNA, 20 nt, Human
guaagaaaccuacugcccag

SEQ ID NO: 3849200 - RNA, 13 nt, Human
guaagaaauacug

SEQ ID NO: 3849201 - RNA, 17 nt, Human
guaagaaauacuguaca

SEQ ID NO: 3849202 - RNA, 23 nt, Human
guaagaacaacuaccugagcuaa

SEQ ID NO: 3849203 - RNA, 15 nt, Human
guaagaaccuugccu

SEQ ID NO: 3849204 - RNA, 16 nt, Human
guaagaaccuugccug

SEQ ID NO: 3849205 - RNA, 16 nt, Human
guaagaagacaaacug

SEQ ID NO: 3849206 - RNA, 11 nt, Human
guaagaaggca

SEQ ID NO: 3849207 - RNA, 16 nt, Human
guaagacaauccaugu

SEQ ID NO: 3849208 - RNA, 13 nt, Human
guaagagaauguu

SEQ ID NO: 3849209 - RNA, 15 nt, Human
guaagagaauguuau

SEQ ID NO: 3849210 - RNA, 21 nt, Human
guaagagcaccuuccucacuu

SEQ ID NO: 3849211 - RNA, 14 nt, Human
guaagaguguagaa

SEQ ID NO: 3849212 - RNA, 15 nt, Human
guaagaguguagaag

SEQ ID NO: 3849213 - RNA, 18 nt, Human
guaagaguguagaagcau

SEQ ID NO: 3849214 - RNA, 22 nt, Human
guaagaguguagaagcauuccu

SEQ ID NO: 3849215 - RNA, 13 nt, Human
guaagauauuugc

SEQ ID NO: 3849216 - RNA, 19 nt, Human
guaagaucguucucugccu

SEQ ID NO: 3849217 - RNA, 16 nt, Human
guaagaugcuggguug

SEQ ID NO: 3849218 - RNA, 13 nt, Human
ugcacuguccugc

SEQ ID NO: 3849219 - RNA, 23 nt, Human
ugcacuguccugcuccacagugu

SEQ ID NO: 3849220 - RNA, 18 nt, Human
ugcacugugaaggacccu

SEQ ID NO: 3849221 - RNA, 14 nt, Human
ugcacuguuccccc

SEQ ID NO: 3849222 - RNA, 12 nt, Human
ugcacuguuuaa

SEQ ID NO: 3849223 - RNA, 21 nt, Human
ugcacuuaaggcacucuguua

SEQ ID NO: 3849224 - RNA, 20 nt, Human
ugcacuuaaguuagccucca

SEQ ID NO: 3849225 - RNA, 21 nt, Human
ugcacuuauaagguguuuucu

SEQ ID NO: 3849226 - RNA, 16 nt, Human
ugcacuuggcugcaua

SEQ ID NO: 3849227 - RNA, 20 nt, Human
ugcacuugugauuauuuauu

SEQ ID NO: 3849228 - RNA, 21 nt, Human
ugcacuugugauuauuuauua

SEQ ID NO: 3849229 - RNA, 19 nt, Human
ugcacuuucuaauguuucu

SEQ ID NO: 3849230 - RNA, 22 nt, Human
ugcacuuucucaugauuuacag

SEQ ID NO: 3849231 - RNA, 15 nt, Human
ugcacuuuguucugg

SEQ ID NO: 3849232 - RNA, 18 nt, Human
ugcacuuuguucuggcuc

SEQ ID NO: 3849233 - RNA, 14 nt, Human
ugcacuuuuucuua

SEQ ID NO: 3849234 - RNA, 20 nt, Human
ugcacuuuuucuuaaucauu

SEQ ID NO: 3849235 - RNA, 12 nt, Human
ugcagaaaacau

SEQ ID NO: 3849236 - RNA, 14 nt, Human
ugcagaaaacauug

SEQ ID NO: 3849237 - RNA, 18 nt, Human
ugcagaaaauucugugcc

SEQ ID NO: 3849238 - RNA, 14 nt, Human
ugcagaaacagauu

SEQ ID NO: 3849239 - RNA, 17 nt, Human
ugcagaaacagauuugg

SEQ ID NO: 3849240 - RNA, 13 nt, Human
ugcagaaagcauc

SEQ ID NO: 3849241 - RNA, 16 nt, Human
ugcagaaauagacaaa

SEQ ID NO: 3849242 - RNA, 20 nt, Human
ugcagaaauagacaaaaagu

SEQ ID NO: 3849243 - RNA, 21 nt, Human
ugcagaaauagacaaaaagua

SEQ ID NO: 3849244 - RNA, 15 nt, Human
ugcagaacaaaugaa

SEQ ID NO: 3849245 - RNA, 21 nt, Human
ugcagaaccggagagccagcu

SEQ ID NO: 3849246 - RNA, 14 nt, Human
ugcagaacuaaacu

SEQ ID NO: 3849247 - RNA, 14 nt, Human
ugcagaacucccaa

SEQ ID NO: 3849248 - RNA, 12 nt, Human
ugcagaacugcc

SEQ ID NO: 3849249 - RNA, 21 nt, Human
ugcagaacugccauuauuuuc

SEQ ID NO: 3849250 - RNA, 23 nt, Human
ugcagaacugccauuauuuucug

SEQ ID NO: 3849251 - RNA, 16 nt, Human
ugcagaagaaggcauc

SEQ ID NO: 3849252 - RNA, 15 nt, Human
ugcagaagagggugu

SEQ ID NO: 3849253 - RNA, 20 nt, Human
ugcagaagaggguguguuug

SEQ ID NO: 3849254 - RNA, 16 nt, Human
ugcagaaggaaaaaug

SEQ ID NO: 3849255 - RNA, 19 nt, Human
ugcagaaggaaaaaugugu

SEQ ID NO: 3849256 - RNA, 21 nt, Human
ugcagaauggcauuugcaaua

SEQ ID NO: 3849257 - RNA, 22 nt, Human
ugcagaauggcauuugcaauaa

SEQ ID NO: 3849258 - RNA, 14 nt, Human
ugcagaauuguuua

SEQ ID NO: 3849259 - RNA, 21 nt, Human
ugcagacagaagucuccucaa

SEQ ID NO: 3849260 - RNA, 12 nt, Human
ugcagacaggca

SEQ ID NO: 3849261 - RNA, 21 nt, Human
ugcagacaggcaagcaccucc

SEQ ID NO: 3849262 - RNA, 21 nt, Human
ugcagacagggggccagaaca

SEQ ID NO: 3849263 - RNA, 17 nt, Human
ugcagaccccuuggcca

SEQ ID NO: 3849264 - RNA, 14 nt, Human
ugcagaccuguccu

SEQ ID NO: 3849265 - RNA, 14 nt, Human
ugcagacgcccaga

SEQ ID NO: 3849266 - RNA, 14 nt, Human
ugcagacuagaauu

SEQ ID NO: 3849267 - RNA, 15 nt, Human
ugcagacucaguuug

SEQ ID NO: 3849268 - RNA, 19 nt, Human
ugaccauucuccaccugcc

SEQ ID NO: 3849269 - RNA, 14 nt, Human
ugacccacaugcca

SEQ ID NO: 3849270 - RNA, 11 nt, Human
ugacccacccc

SEQ ID NO: 3849271 - RNA, 13 nt, Human
ugacccaccccug

SEQ ID NO: 3849272 - RNA, 18 nt, Human
ugacccaccccugugcuc

SEQ ID NO: 3849273 - RNA, 18 nt, Human
ugacccacuucucaucac

SEQ ID NO: 3849274 - RNA, 22 nt, Human
ugacccacuucucaucacacac

SEQ ID NO: 3849275 - RNA, 13 nt, Human
ugacccaggccgc

SEQ ID NO: 3849276 - RNA, 19 nt, Human
ugacccaggccgcagcucu

SEQ ID NO: 3849277 - RNA, 19 nt, Human
ugacccaggcugccugagc

SEQ ID NO: 3849278 - RNA, 14 nt, Human
ugacccaggcuggg

SEQ ID NO: 3849279 - RNA, 17 nt, Human
ugacccaggcugggcaa

SEQ ID NO: 3849280 - RNA, 19 nt, Human
ugacccaggcugggcaagg

SEQ ID NO: 3849281 - RNA, 15 nt, Human
ugacccagucccugg

SEQ ID NO: 3849282 - RNA, 16 nt, Human
ugacccagucccuggg

SEQ ID NO: 3849283 - RNA, 13 nt, Human
ugacccagugaga

SEQ ID NO: 3849284 - RNA, 19 nt, Human
ugacccaugcugcccugug

SEQ ID NO: 3849285 - RNA, 21 nt, Human
ugacccaugcugcccugugag

SEQ ID NO: 3849286 - RNA, 20 nt, Human
ugaccccaggagggaggcag

SEQ ID NO: 3849287 - RNA, 22 nt, Human
ugaccccaggagggaggcaggg

SEQ ID NO: 3849288 - RNA, 18 nt, Human
ugaccccagggcacagga

SEQ ID NO: 3849289 - RNA, 21 nt, Human
ugaccccagggcacaggagcu

SEQ ID NO: 3849290 - RNA, 14 nt, Human
ugacccccagcucc

SEQ ID NO: 3849291 - RNA, 14 nt, Human
ugaccccccucagg

SEQ ID NO: 3849292 - RNA, 23 nt, Human
ugaccccgguggcggccccagca

SEQ ID NO: 3849293 - RNA, 11 nt, Human
ugaccccuccu

SEQ ID NO: 3849294 - RNA, 12 nt, Human
ugaccccuccug

SEQ ID NO: 3849295 - RNA, 15 nt, Human
ugaccccuccugggg

SEQ ID NO: 3849296 - RNA, 16 nt, Human
ugaccccuccuggggc

SEQ ID NO: 3849297 - RNA, 17 nt, Human
ugaccccuccuggggcc

SEQ ID NO: 3849298 - RNA, 13 nt, Human
ugaccccugcuca

SEQ ID NO: 3849299 - RNA, 22 nt, Human
ugaccccuuuucagcuucugcu

SEQ ID NO: 3849300 - RNA, 17 nt, Human
ugacccuacucccuugc

SEQ ID NO: 3849301 - RNA, 21 nt, Human
ugacccucaucuuucuuccaa

SEQ ID NO: 3849302 - RNA, 13 nt, Human
ugacccuccaaau

SEQ ID NO: 3849303 - RNA, 14 nt, Human
ugacccuccccaaa

SEQ ID NO: 3849304 - RNA, 16 nt, Human
ugacccuccuguugca

SEQ ID NO: 3849305 - RNA, 17 nt, Human
ugacccugagcugacca

SEQ ID NO: 3849306 - RNA, 12 nt, Human
ugacccugcaga

SEQ ID NO: 3849307 - RNA, 12 nt, Human
ugacccugccuc

SEQ ID NO: 3849308 - RNA, 22 nt, Human
ugacccugccucucccaggcag

SEQ ID NO: 3849309 - RNA, 20 nt, Human
ugacccugcgaaggggcccu

SEQ ID NO: 3849310 - RNA, 13 nt, Human
ugacccuggcucc

SEQ ID NO: 3849311 - RNA, 17 nt, Human
ugacccuggggcuggcu

SEQ ID NO: 3849312 - RNA, 18 nt, Human
ugacccuggggcuggcuu

SEQ ID NO: 3849313 - RNA, 21 nt, Human
ugacccuuccagacauacgaa

SEQ ID NO: 3849314 - RNA, 21 nt, Human
ugacccuucccaaucagcacu

SEQ ID NO: 3849315 - RNA, 23 nt, Human
ugacccuucccaaucagcacuga

SEQ ID NO: 3849316 - RNA, 20 nt, Human
ugaccgacagcuuuccagua

SEQ ID NO: 3849317 - RNA, 19 nt, Human
ugaccgcgacuaauuucaa

SEQ ID NO: 3849318 - RNA, 21 nt, Human
ugaccguguuggucuguacug

SEQ ID NO: 3849319 - RNA, 21 nt, Human
ugaccuaagauuuauuuuguu

SEQ ID NO: 3849320 - RNA, 17 nt, Human
ugaccuaguuuuccaug

SEQ ID NO: 3849321 - RNA, 17 nt, Human
ugaccuauaccuguguu

SEQ ID NO: 3849322 - RNA, 23 nt, Human
ugaccuauaccuguguuucuugc

SEQ ID NO: 3849323 - RNA, 18 nt, Human
ugaccucaaccugugaug

SEQ ID NO: 3849324 - RNA, 21 nt, Human
ugaccucaagauguccuccuu

SEQ ID NO: 3849325 - RNA, 20 nt, Human
ugaccucaagugaucugccc

SEQ ID NO: 3849326 - RNA, 19 nt, Human
ugaccucaggcacuagccu

SEQ ID NO: 3849327 - RNA, 22 nt, Human
ugaccucaggugauccacccac

SEQ ID NO: 3849328 - RNA, 22 nt, Human
ugaccucauuaaccgaugcuuu

SEQ ID NO: 3849329 - RNA, 12 nt, Human
ugaccucccagc

SEQ ID NO: 3849330 - RNA, 21 nt, Human
ugaccucccagugaccccuga

SEQ ID NO: 3849331 - RNA, 16 nt, Human
ugaccucccccuccuu

SEQ ID NO: 3849332 - RNA, 19 nt, Human
ugaccucccccuccuuccc

SEQ ID NO: 3849333 - RNA, 14 nt, Human
ugaccucccucuaa

SEQ ID NO: 3849334 - RNA, 15 nt, Human
ugaccuccggccagg

SEQ ID NO: 3849335 - RNA, 19 nt, Human
ugaccuccggccaggugcc

SEQ ID NO: 3849336 - RNA, 24 nt, Human
ugaccuccggccaggugccuccug

SEQ ID NO: 3849337 - RNA, 20 nt, Human
ugaccucucucucugggacu

SEQ ID NO: 3849338 - RNA, 16 nt, Human
ugaccucugcagcaau

SEQ ID NO: 3849339 - RNA, 18 nt, Human
ugaccucugcagcaauaa

SEQ ID NO: 3849340 - RNA, 23 nt, Human
ugaccucugcagcaauaaagcag

SEQ ID NO: 3849341 - RNA, 14 nt, Human
ugaccucugccuga

SEQ ID NO: 3849342 - RNA, 14 nt, Human
ugaccucuugcugu

SEQ ID NO: 3849343 - RNA, 19 nt, Human
ugaccucuugcugucucug

SEQ ID NO: 3849344 - RNA, 22 nt, Human
ugaccucuugcugucucugcuc

SEQ ID NO: 3849345 - RNA, 15 nt, Human
ugaccugaggaagcg

SEQ ID NO: 3849346 - RNA, 14 nt, Human
ugaccugaggcccu

SEQ ID NO: 3849347 - RNA, 15 nt, Human
ugaccugaggcugug

SEQ ID NO: 3849348 - RNA, 20 nt, Human
ugaccugcaggccaagagca

SEQ ID NO: 3849349 - RNA, 17 nt, Human
ugaccugcaucuaagcc

SEQ ID NO: 3849350 - RNA, 17 nt, Human
ugaccugcauuguaaau

SEQ ID NO: 3849351 - RNA, 19 nt, Human
ugaccugccaggcacacug

SEQ ID NO: 3849352 - RNA, 17 nt, Human
ugaccugccucccuuca

SEQ ID NO: 3849353 - RNA, 16 nt, Human
ugaccugcuaggccag

SEQ ID NO: 3849354 - RNA, 22 nt, Human
ugaccugcuaggccagagccca

SEQ ID NO: 3849355 - RNA, 17 nt, Human
ugaccugcuccgcugcu

SEQ ID NO: 3849356 - RNA, 19 nt, Human
ugaccugcuccgcugcucc

SEQ ID NO: 3849357 - RNA, 23 nt, Human
ugaccugcuccgcugcuccuugg

SEQ ID NO: 3849358 - RNA, 11 nt, Human
ugaccugcuga

SEQ ID NO: 3849359 - RNA, 15 nt, Human
ugaccugcugaccug

SEQ ID NO: 3849360 - RNA, 12 nt, Human
ugaccugcugag

SEQ ID NO: 3849361 - RNA, 17 nt, Human
ugaccugcugagcucug

SEQ ID NO: 3849362 - RNA, 18 nt, Human
ugccaccaccucuguggc

SEQ ID NO: 3849363 - RNA, 19 nt, Human
ugccaccaccucuguggca

SEQ ID NO: 3849364 - RNA, 15 nt, Human
ugccaccacgcccgg

SEQ ID NO: 3849365 - RNA, 13 nt, Human
ugccaccagagac

SEQ ID NO: 3849366 - RNA, 14 nt, Human
ugccaccagagacc

SEQ ID NO: 3849367 - RNA, 21 nt, Human
ugccaccagagaccguccuca

SEQ ID NO: 3849368 - RNA, 23 nt, Human
ugccaccagagaccguccucacc

SEQ ID NO: 3849369 - RNA, 14 nt, Human
ugccaccaggagaa

SEQ ID NO: 3849370 - RNA, 14 nt, Human
ugccaccaggccac

SEQ ID NO: 3849371 - RNA, 15 nt, Human
ugccaccauccugcu

SEQ ID NO: 3849372 - RNA, 19 nt, Human
ugccacccaccucccugcc

SEQ ID NO: 3849373 - RNA, 20 nt, Human
ugccacccaccucccugccu

SEQ ID NO: 3849374 - RNA, 22 nt, Human
ugccacccaccucccugccucc

SEQ ID NO: 3849375 - RNA, 17 nt, Human
ugccacccagccccagc

SEQ ID NO: 3849376 - RNA, 15 nt, Human
ugccaccccacccuc

SEQ ID NO: 3849377 - RNA, 14 nt, Human
ugccacccuaccug

SEQ ID NO: 3849378 - RNA, 14 nt, Human
ugccacccugggcu

SEQ ID NO: 3849379 - RNA, 19 nt, Human
ugccacccugggcucugug

SEQ ID NO: 3849380 - RNA, 22 nt, Human
ugccacccugggcucugugggc

SEQ ID NO: 3849381 - RNA, 10 nt, Human
ugccaccucc

SEQ ID NO: 3849382 - RNA, 17 nt, Human
ugccaccuccccccaca

SEQ ID NO: 3849383 - RNA, 13 nt, Human
ugccaccuccccu

SEQ ID NO: 3849384 - RNA, 21 nt, Human
ugccaccuccccuauccaccc

SEQ ID NO: 3849385 - RNA, 10 nt, Human
ugccaccugc

SEQ ID NO: 3849386 - RNA, 16 nt, Human
ugccaccuggggcagu

SEQ ID NO: 3849387 - RNA, 22 nt, Human
ugccacuacggaauaguuggcu

SEQ ID NO: 3849388 - RNA, 22 nt, Human
ugccacuaggcugggugcccac

SEQ ID NO: 3849389 - RNA, 23 nt, Human
ugccacuaggcugggugcccaca

SEQ ID NO: 3849390 - RNA, 11 nt, Human
ugccacucaca

SEQ ID NO: 3849391 - RNA, 22 nt, Human
ugccacucacacagccaggugc

SEQ ID NO: 3849392 - RNA, 14 nt, Human
ugccacucacuagg

SEQ ID NO: 3849393 - RNA, 17 nt, Human
ugccacucacuaggccc

SEQ ID NO: 3849394 - RNA, 21 nt, Human
ugccacucacuaggcccccac

SEQ ID NO: 3849395 - RNA, 22 nt, Human
ugccacucacuaggcccccacu

SEQ ID NO: 3849396 - RNA, 18 nt, Human
ugccacucauuccuguag

SEQ ID NO: 3849397 - RNA, 14 nt, Human
ugccacuccucccu

SEQ ID NO: 3849398 - RNA, 14 nt, Human
ugccacugcacucc

SEQ ID NO: 3849399 - RNA, 18 nt, Human
ugccacugcccgagcugg

SEQ ID NO: 3849400 - RNA, 19 nt, Human
ugccacugcccgagcuggu

SEQ ID NO: 3849401 - RNA, 21 nt, Human
ugccacugcccgagcuggugc

SEQ ID NO: 3849402 - RNA, 17 nt, Human
ugccacugccucuuccu

SEQ ID NO: 3849403 - RNA, 21 nt, Human
ugccacugccuucgcuucuug

SEQ ID NO: 3849404 - RNA, 14 nt, Human
ugccacuuaaugua

SEQ ID NO: 3849405 - RNA, 18 nt, Human
ugccacuuaauguauguu

SEQ ID NO: 3849406 - RNA, 20 nt, Human
ugccacuucacuccagccug

SEQ ID NO: 3849407 - RNA, 13 nt, Human
ugccacuuuccaa

SEQ ID NO: 3849408 - RNA, 15 nt, Human
ugccacuuugcacau

SEQ ID NO: 3849409 - RNA, 23 nt, Human
ugccacuuugguacauggccagu

SEQ ID NO: 3849410 - RNA, 12 nt, Human
ugccacuuuuua

SEQ ID NO: 3849411 - RNA, 14 nt, Human
ugccagaacaguuu

SEQ ID NO: 3849412 - RNA, 18 nt, Human
ugccagaacaguuuguac

SEQ ID NO: 3849413 - RNA, 18 nt, Human
ugccagaagauccccuca

SEQ ID NO: 3849414 - RNA, 20 nt, Human
ugccagaagauccccucagg

SEQ ID NO: 3849415 - RNA, 21 nt, Human
ugccagaagauccccucagga

SEQ ID NO: 3849416 - RNA, 22 nt, Human
ugccagaaguuguggauuucag

SEQ ID NO: 3849417 - RNA, 12 nt, Human
ugccagacaugu

SEQ ID NO: 3849418 - RNA, 17 nt, Human
ugccagacccccuggag

SEQ ID NO: 3849419 - RNA, 22 nt, Human
ugccagacgcucauucagcauc

SEQ ID NO: 3849420 - RNA, 21 nt, Human
ugccagacggcacccacccag

SEQ ID NO: 3849421 - RNA, 17 nt, Human
ugccagagauaaacuaa

SEQ ID NO: 3849422 - RNA, 19 nt, Human
ugccagagcaaagggccag

SEQ ID NO: 3849423 - RNA, 23 nt, Human
ugccagagcaaagggccaggaag

SEQ ID NO: 3849424 - RNA, 14 nt, Human
ugccagagccuggg

SEQ ID NO: 3849425 - RNA, 15 nt, Human
ugccagagccugggg

SEQ ID NO: 3849426 - RNA, 16 nt, Human
ugccagagccuggggc

SEQ ID NO: 3849427 - RNA, 18 nt, Human
ugccagagccuggggcuc

SEQ ID NO: 3849428 - RNA, 20 nt, Human
ugccagaggaauccuggcag

SEQ ID NO: 3849429 - RNA, 23 nt, Human
ugccagaggaauccuggcagccc

SEQ ID NO: 3849430 - RNA, 15 nt, Human
ugccagaggugggca

SEQ ID NO: 3849431 - RNA, 16 nt, Human
ugccagaggugggcag

SEQ ID NO: 3849432 - RNA, 17 nt, Human
ugccagaggugggcagg

SEQ ID NO: 3849433 - RNA, 11 nt, Human
ugccagaugcu

SEQ ID NO: 3849434 - RNA, 21 nt, Human
ugccagaugcugauguucagu

SEQ ID NO: 3849435 - RNA, 14 nt, Human
ugccagcaaagccc

SEQ ID NO: 3849436 - RNA, 11 nt, Human
ugccagcaacu

SEQ ID NO: 3849437 - RNA, 15 nt, Human
ugccagcaacugaau

SEQ ID NO: 3849438 - RNA, 18 nt, Human
ugccagcagcagcaggug

SEQ ID NO: 3849439 - RNA, 13 nt, Human
ugccagccaagcu

SEQ ID NO: 3849440 - RNA, 11 nt, Human
ugccagccagc

SEQ ID NO: 3849441 - RNA, 17 nt, Human
ugccagccagcagccag

SEQ ID NO: 3849442 - RNA, 19 nt, Human
ugccagcccccuaaaagca

SEQ ID NO: 3849443 - RNA, 22 nt, Human
ugccagccgagauagccaaggc

SEQ ID NO: 3849444 - RNA, 19 nt, Human
ugccagccgugaugcucag

SEQ ID NO: 3849445 - RNA, 16 nt, Human
ugccagccuggcuucu

SEQ ID NO: 3849446 - RNA, 17 nt, Human
ugccagccuggcuucug

SEQ ID NO: 3849447 - RNA, 18 nt, Human
ugccagccuggcuucugg

SEQ ID NO: 3849448 - RNA, 22 nt, Human
ugccagccuggcuucuggagcc

SEQ ID NO: 3849449 - RNA, 23 nt, Human
ugccagccuggcuucuggagccc

SEQ ID NO: 3849450 - RNA, 19 nt, Human
ugccagcuacuuccuccuc

SEQ ID NO: 3849451 - RNA, 13 nt, Human
ugccagcuauuuu

SEQ ID NO: 3849452 - RNA, 23 nt, Human
ugccagcugacaucuugaauccu

SEQ ID NO: 3849453 - RNA, 19 nt, Human
ugccagcugcugagccgca

SEQ ID NO: 3849454 - RNA, 12 nt, Human
ugccagcuggcc

SEQ ID NO: 3849455 - RNA, 16 nt, Human
ugccagcuggccuuug

SEQ ID NO: 3849456 - RNA, 19 nt, Human
ugccagcuggccuuuguaa

SEQ ID NO: 3849457 - RNA, 20 nt, Human
ugccagcuuuuccucccuug

SEQ ID NO: 3849458 - RNA, 19 nt, Human
ugccaggaaacucuugcua

SEQ ID NO: 3849459 - RNA, 19 nt, Human
ugccaggaagccagcaggc

SEQ ID NO: 3849460 - RNA, 22 nt, Human
ugccaggaagccagcaggcucu

SEQ ID NO: 3849461 - RNA, 20 nt, Human
ugccaggaccagucaaccug

SEQ ID NO: 3849462 - RNA, 16 nt, Human
ugccaggacuccccag

SEQ ID NO: 3849463 - RNA, 19 nt, Human
ugccaggagcacggcucug

SEQ ID NO: 3849464 - RNA, 22 nt, Human
ugccaggaggacccagggcucu

SEQ ID NO: 3849465 - RNA, 23 nt, Human
ugccaggaggacccagggcucug

SEQ ID NO: 3849466 - RNA, 24 nt, Human
ugccaggagggacaaaggagccug

SEQ ID NO: 3849467 - RNA, 14 nt, Human
ugccaggcacaggc

SEQ ID NO: 3849468 - RNA, 17 nt, Human
ugccaggcacaggcagg

SEQ ID NO: 3849469 - RNA, 19 nt, Human
ugccaggcacaggcagggc

SEQ ID NO: 3849470 - RNA, 16 nt, Human
ugccaggcaggggugg

SEQ ID NO: 3849471 - RNA, 14 nt, Human
ugccaggccagccu

SEQ ID NO: 3849472 - RNA, 15 nt, Human
guaggcuacagagaa

SEQ ID NO: 3849473 - RNA, 18 nt, Human
guaggcuacagagaagcc

SEQ ID NO: 3849474 - RNA, 20 nt, Human
guaggcuacagagaagccuu

SEQ ID NO: 3849475 - RNA, 21 nt, Human
guaggcuauuccugagagcug

SEQ ID NO: 3849476 - RNA, 19 nt, Human
guaggcucaacuagggagu

SEQ ID NO: 3849477 - RNA, 16 nt, Human
guagggaggaccacag

SEQ ID NO: 3849478 - RNA, 16 nt, Human
guagggaggcagccuc

SEQ ID NO: 3849479 - RNA, 21 nt, Human
guagggcgggaggauguucug

SEQ ID NO: 3849480 - RNA, 22 nt, Human
guagggcgggaggauguucugg

SEQ ID NO: 3849481 - RNA, 18 nt, Human
guagggcucugacaaagc

SEQ ID NO: 3849482 - RNA, 16 nt, Human
guagggggcuggagga

SEQ ID NO: 3849483 - RNA, 21 nt, Human
guagggggcuggaggagccca

SEQ ID NO: 3849484 - RNA, 20 nt, Human
guaggggucaaagaaaugcu

SEQ ID NO: 3849485 - RNA, 15 nt, Human
guaggggugugugug

SEQ ID NO: 3849486 - RNA, 22 nt, Human
guaggguaaaucaguaagaggu

SEQ ID NO: 3849487 - RNA, 17 nt, Human
guaggguaaggugccuu

SEQ ID NO: 3849488 - RNA, 23 nt, Human
guaggguuuaauccccaguaaaa

SEQ ID NO: 3849489 - RNA, 13 nt, Human
guagguacuuuug

SEQ ID NO: 3849490 - RNA, 22 nt, Human
guagguacuuuuugugaagacg

SEQ ID NO: 3849491 - RNA, 24 nt, Human
guagguggaagcuagacacaugaa

SEQ ID NO: 3849492 - RNA, 13 nt, Human
guagguugcacac

SEQ ID NO: 3849493 - RNA, 14 nt, Human
guagguugcacacu

SEQ ID NO: 3849494 - RNA, 20 nt, Human
guagguuggaagcuagcucc

SEQ ID NO: 3849495 - RNA, 19 nt, Human
guagguugggacaccaggg

SEQ ID NO: 3849496 - RNA, 14 nt, Human
guagguugggagaa

SEQ ID NO: 3849497 - RNA, 13 nt, Human
guaguaacacuaa

SEQ ID NO: 3849498 - RNA, 22 nt, Human
guaguacuccugcaaaauuuua

SEQ ID NO: 3849499 - RNA, 19 nt, Human
guaguacuucuucuguaau

SEQ ID NO: 3849500 - RNA, 21 nt, Human
guaguacuucuucuguaauau

SEQ ID NO: 3849501 - RNA, 22 nt, Human
guaguagcguuuuuuaaaugua

SEQ ID NO: 3849502 - RNA, 18 nt, Human
guaguagggucaggccac

SEQ ID NO: 3849503 - RNA, 22 nt, Human
guaguagucucauuacuuuuga

SEQ ID NO: 3849504 - RNA, 13 nt, Human
guaguaugauggg

SEQ ID NO: 3849505 - RNA, 21 nt, Human
guaucaaauacauuuaaaaca

SEQ ID NO: 3849506 - RNA, 20 nt, Human
guaucaaauauuagauguga

SEQ ID NO: 3849507 - RNA, 13 nt, Human
guaucaaauguaa

SEQ ID NO: 3849508 - RNA, 18 nt, Human
guaucaacccagaaacac

SEQ ID NO: 3849509 - RNA, 19 nt, Human
guaucaaguggcaugugcu

SEQ ID NO: 3849510 - RNA, 17 nt, Human
guaucacugucuuuccu

SEQ ID NO: 3849511 - RNA, 12 nt, Human
guaucagaggcc

SEQ ID NO: 3849512 - RNA, 14 nt, Human
guaucagaggccua

SEQ ID NO: 3849513 - RNA, 16 nt, Human
guaucagaggccuaua

SEQ ID NO: 3849514 - RNA, 14 nt, Human
guaucaggacccag

SEQ ID NO: 3849515 - RNA, 21 nt, Human
guaucaggacccagaggaagg

SEQ ID NO: 3849516 - RNA, 17 nt, Human
guaucaggacgagaaug

SEQ ID NO: 3849517 - RNA, 15 nt, Human
guaucaggucuccca

SEQ ID NO: 3849518 - RNA, 16 nt, Human
guaucaggugcugcca

SEQ ID NO: 3849519 - RNA, 22 nt, Human
guaucaggugcugccauccagg

SEQ ID NO: 3849520 - RNA, 22 nt, Human
guaucaguguuuuaaauucuga

SEQ ID NO: 3849521 - RNA, 16 nt, Human
guaucauauauuuaau

SEQ ID NO: 3849522 - RNA, 16 nt, Human
guaucauggaaauauu

SEQ ID NO: 3849523 - RNA, 19 nt, Human
guauccaaccaacuugguu

SEQ ID NO: 3849524 - RNA, 15 nt, Human
guauccaaugaaaua

SEQ ID NO: 3849525 - RNA, 17 nt, Human
guauccaguacauuuaa

SEQ ID NO: 3849526 - RNA, 18 nt, Human
guauccaguacauuuaau

SEQ ID NO: 3849527 - RNA, 14 nt, Human
guauccauauuuua

SEQ ID NO: 3849528 - RNA, 21 nt, Human
guauccauauuuuauuacugu

SEQ ID NO: 3849529 - RNA, 21 nt, Human
guauccauuaucauguguaau

SEQ ID NO: 3849530 - RNA, 19 nt, Human
guaucccaacuccuauaau

SEQ ID NO: 3849531 - RNA, 21 nt, Human
guaucccaugagccucagcau

SEQ ID NO: 3849532 - RNA, 20 nt, Human
guaucccgagucugggacac

SEQ ID NO: 3849533 - RNA, 18 nt, Human
guaucccuguuacugaua

SEQ ID NO: 3849534 - RNA, 13 nt, Human
guaucccuucuca

SEQ ID NO: 3849535 - RNA, 22 nt, Human
guauccucauuugggguagcua

SEQ ID NO: 3849536 - RNA, 21 nt, Human
guauccuccagguuuuucaau

SEQ ID NO: 3849537 - RNA, 18 nt, Human
guauccugcccaguguug

SEQ ID NO: 3849538 - RNA, 22 nt, Human
guauccuuaucuaguguuugau

SEQ ID NO: 3849539 - RNA, 19 nt, Human
guauccuuccaauuuggaa

SEQ ID NO: 3849540 - RNA, 15 nt, Human
guaucgauguuuuau

SEQ ID NO: 3849541 - RNA, 14 nt, Human
guaucggagacagu

SEQ ID NO: 3849542 - RNA, 15 nt, Human
guaucggagacagug

SEQ ID NO: 3849543 - RNA, 13 nt, Human
guaucggcacugu

SEQ ID NO: 3849544 - RNA, 16 nt, Human
guaucggcacuguaca

SEQ ID NO: 3849545 - RNA, 11 nt, Human
guaucgggggc

SEQ ID NO: 3849546 - RNA, 20 nt, Human
guaucgggggcuggggcagg

SEQ ID NO: 3849547 - RNA, 18 nt, Human
guaucuaagaauaauaaa

SEQ ID NO: 3849548 - RNA, 15 nt, Human
guaucuagugcagcu

SEQ ID NO: 3849549 - RNA, 17 nt, Human
guaucuaugcauuuucu

SEQ ID NO: 3849550 - RNA, 18 nt, Human
guaucuccggcucccagc

SEQ ID NO: 3849551 - RNA, 21 nt, Human
guaucuccggcucccagccuc

SEQ ID NO: 3849552 - RNA, 22 nt, Human
guaucuccggcucccagccuca

SEQ ID NO: 3849553 - RNA, 11 nt, Human
guaucucuuug

SEQ ID NO: 3849554 - RNA, 14 nt, Human
guaucugaguugcc

SEQ ID NO: 3849555 - RNA, 18 nt, Human
guaucugaguugccaaga

SEQ ID NO: 3849556 - RNA, 20 nt, Human
guaucugaguugccaagaca

SEQ ID NO: 3849557 - RNA, 17 nt, Human
guaucugcaggcagaca

SEQ ID NO: 3849558 - RNA, 19 nt, Human
guaucuuccauauuuggaa

SEQ ID NO: 3849559 - RNA, 21 nt, Human
guaucuuccauauuuggaaga

SEQ ID NO: 3849560 - RNA, 22 nt, Human
guaucuuccauauuuggaagaa

SEQ ID NO: 3849561 - RNA, 14 nt, Human
guaucuugcaguau

SEQ ID NO: 3849562 - RNA, 17 nt, Human
guaucuuucuaugcugc

SEQ ID NO: 3849563 - RNA, 20 nt, Human
guaucuuucuaugcugcuuu

SEQ ID NO: 3849564 - RNA, 14 nt, Human
guaugaaaaugagu

SEQ ID NO: 3849565 - RNA, 17 nt, Human
guaugaaacuaaagccu

SEQ ID NO: 3849566 - RNA, 14 nt, Human
guaugaaagauugu

SEQ ID NO: 3849567 - RNA, 13 nt, Human
guaugaaauuaua

SEQ ID NO: 3849568 - RNA, 15 nt, Human
guaugaauacagcag

SEQ ID NO: 3849569 - RNA, 18 nt, Human
guaugaauuauucaauuu

SEQ ID NO: 3849570 - RNA, 14 nt, Human
guaugaauuugagc

SEQ ID NO: 3849571 - RNA, 15 nt, Human
guaugaggcauuugu

SEQ ID NO: 3849572 - RNA, 20 nt, Human
guaugagucaaugugcagug

SEQ ID NO: 3849573 - RNA, 24 nt, Human
guaugauagguuauuuugauguaa

SEQ ID NO: 3849574 - RNA, 22 nt, Human
guaugaucacggcucacugcag

SEQ ID NO: 3849575 - RNA, 21 nt, Human
guaugauuacuggccuuuuuc

SEQ ID NO: 3849576 - RNA, 15 nt, Human
guaugcaagcaguuu

SEQ ID NO: 3849577 - RNA, 18 nt, Human
guaugcaagcaguuucaa

SEQ ID NO: 3849578 - RNA, 15 nt, Human
guaugcaguguagau

SEQ ID NO: 3849579 - RNA, 16 nt, Human
guaugcaugugaagaa

SEQ ID NO: 3849580 - RNA, 12 nt, Human
guaugcauguug

SEQ ID NO: 3849581 - RNA, 16 nt, Human
guaugcauguugucua

SEQ ID NO: 3849582 - RNA, 17 nt, Human
guaugcauuauuaaauu

SEQ ID NO: 3849583 - RNA, 15 nt, Human
guaugcgugugugug

SEQ ID NO: 3849584 - RNA, 12 nt, Human
guaugcugcuuu

SEQ ID NO: 3849585 - RNA, 18 nt, Human
guauggagagaaaacaga

SEQ ID NO: 3849586 - RNA, 13 nt, Human
guauggagcucag

SEQ ID NO: 3849587 - RNA, 15 nt, Human
guauggagcucagag

SEQ ID NO: 3849588 - RNA, 20 nt, Human
guauggauugggggggccaa

SEQ ID NO: 3849589 - RNA, 22 nt, Human
guauggcguaaguacagagaag

SEQ ID NO: 3849590 - RNA, 21 nt, Human
guauggcucugcaccccucug

SEQ ID NO: 3849591 - RNA, 16 nt, Human
guaugggagagaagag

SEQ ID NO: 3849592 - RNA, 21 nt, Human
guauggguuagggaaaacauu

SEQ ID NO: 3849593 - RNA, 13 nt, Human
guauggucuaaca

SEQ ID NO: 3849594 - RNA, 13 nt, Human
guauguaaaugug

SEQ ID NO: 3849595 - RNA, 14 nt, Human
guauguaaaugugc

SEQ ID NO: 3849596 - RNA, 16 nt, Human
guauguaauggaacuu

SEQ ID NO: 3849597 - RNA, 16 nt, Human
guauguagaagcauga

SEQ ID NO: 3849598 - RNA, 15 nt, Human
guauguauaauucaa

SEQ ID NO: 3849599 - RNA, 23 nt, Human
guauguauauuaaaaaagagaca

SEQ ID NO: 3849600 - RNA, 13 nt, Human
guauguauuagug

SEQ ID NO: 3849601 - RNA, 17 nt, Human
guaugucauuuccuuca

SEQ ID NO: 3849602 - RNA, 13 nt, Human
guauguccuuggu

SEQ ID NO: 3849603 - RNA, 13 nt, Human
guaugucuccagu

SEQ ID NO: 3849604 - RNA, 14 nt, Human
guaugucugguucu

SEQ ID NO: 3849605 - RNA, 17 nt, Human
guaugucugguucucaa

SEQ ID NO: 3849606 - RNA, 11 nt, Human
guaugucuguc

SEQ ID NO: 3849607 - RNA, 12 nt, Human
guauguggaagg

SEQ ID NO: 3849608 - RNA, 15 nt, Human
guaugugggauauug

SEQ ID NO: 3849609 - RNA, 13 nt, Human
guauguguuuaga

SEQ ID NO: 3849610 - RNA, 18 nt, Human
guauguuaaagagaauga

SEQ ID NO: 3849611 - RNA, 13 nt, Human
guauguuauagaa

SEQ ID NO: 3849612 - RNA, 19 nt, Human
guauguucuaaccuuuaca

SEQ ID NO: 3849613 - RNA, 13 nt, Human
guauguugucaaa

SEQ ID NO: 3849614 - RNA, 16 nt, Human
guauguugucaaagag

SEQ ID NO: 3849615 - RNA, 15 nt, Human
guauguuuguacuug

SEQ ID NO: 3849616 - RNA, 20 nt, Human
guauguuuuauauagcaaga

SEQ ID NO: 3849617 - RNA, 14 nt, Human
guauguuuuucagu

SEQ ID NO: 3849618 - RNA, 22 nt, Human
guauguuuuuuauuaugcugua

SEQ ID NO: 3849619 - RNA, 23 nt, Human
guauuaaaacauuggauuauccu

SEQ ID NO: 3849620 - RNA, 18 nt, Human
guauuaaaacuaaauuuc

SEQ ID NO: 3849621 - RNA, 20 nt, Human
guauuaaaacuaaauuucac

SEQ ID NO: 3849622 - RNA, 18 nt, Human
guauuaagaaaaucuauu

SEQ ID NO: 3849623 - RNA, 16 nt, Human
guauuaagaaaggaag

SEQ ID NO: 3849624 - RNA, 16 nt, Human
guauuaagaaugaaau

SEQ ID NO: 3849625 - RNA, 15 nt, Human
guauuaagcauauau

SEQ ID NO: 3849626 - RNA, 18 nt, Human
guauuaagcauauauuuu

SEQ ID NO: 3849627 - RNA, 21 nt, Human
guauuaagcauauauuuuuau

SEQ ID NO: 3849628 - RNA, 21 nt, Human
guauuaauaaauagagcaauu

SEQ ID NO: 3849629 - RNA, 14 nt, Human
guauuaauacuaaa

SEQ ID NO: 3849630 - RNA, 14 nt, Human
guauuaauauucau

SEQ ID NO: 3849631 - RNA, 16 nt, Human
guauuaaucuuggaua

SEQ ID NO: 3849632 - RNA, 15 nt, Human
guauuacauaaauaa

SEQ ID NO: 3849633 - RNA, 21 nt, Human
guauuacuagaagaugaauac

SEQ ID NO: 3849634 - RNA, 13 nt, Human
guauuacuucugc

SEQ ID NO: 3849635 - RNA, 14 nt, Human
guauuacuucugcu

SEQ ID NO: 3849636 - RNA, 15 nt, Human
guauuacuucugcua

SEQ ID NO: 3849637 - RNA, 18 nt, Human
ugaggugugggggcugca

SEQ ID NO: 3849638 - RNA, 21 nt, Human
ugaggugugggggcugcagca

SEQ ID NO: 3849639 - RNA, 17 nt, Human
ugagguuccucugccug

SEQ ID NO: 3849640 - RNA, 18 nt, Human
ugagguuccucugccugc

SEQ ID NO: 3849641 - RNA, 16 nt, Human
ugagguugcuagagaa

SEQ ID NO: 3849642 - RNA, 12 nt, Human
ugaguaaauauu

SEQ ID NO: 3849643 - RNA, 15 nt, Human
ugaguaaauauugag

SEQ ID NO: 3849644 - RNA, 22 nt, Human
ugaguaacugauuuguaacaag

SEQ ID NO: 3849645 - RNA, 23 nt, Human
ugaguaagagcuggugucugauu

SEQ ID NO: 3849646 - RNA, 17 nt, Human
ugaguacaaaugccuua

SEQ ID NO: 3849647 - RNA, 23 nt, Human
ugaguacagaguguggacucugg

SEQ ID NO: 3849648 - RNA, 20 nt, Human
ugaguacguugugcauuugg

SEQ ID NO: 3849649 - RNA, 21 nt, Human
ugaguacuccacacugcacaa

SEQ ID NO: 3849650 - RNA, 20 nt, Human
ugccuuccacgcugucucca

SEQ ID NO: 3849651 - RNA, 12 nt, Human
ugccuuccagau

SEQ ID NO: 3849652 - RNA, 17 nt, Human
ugccuuccagauccucu

SEQ ID NO: 3849653 - RNA, 20 nt, Human
ugccuuccagauccucucug

SEQ ID NO: 3849654 - RNA, 22 nt, Human
ugccuuccagauccucucuggg

SEQ ID NO: 3849655 - RNA, 17 nt, Human
ugccuuccauaauuaug

SEQ ID NO: 3849656 - RNA, 16 nt, Human
ugccuuccuaagccug

SEQ ID NO: 3849657 - RNA, 16 nt, Human
ugccuuccuccugggc

SEQ ID NO: 3849658 - RNA, 20 nt, Human
ugccuuccuuucuccaggac

SEQ ID NO: 3849659 - RNA, 22 nt, Human
ugccuuccuuucuccaggacca

SEQ ID NO: 3849660 - RNA, 20 nt, Human
ugccuucgucuuucccaugg

SEQ ID NO: 3849661 - RNA, 22 nt, Human
ugccuucguuaacuguguaugu

SEQ ID NO: 3849662 - RNA, 15 nt, Human
ugccuucuaaaggug

SEQ ID NO: 3849663 - RNA, 13 nt, Human
ugccuucucacca

SEQ ID NO: 3849664 - RNA, 19 nt, Human
ugccuucucaccagcugca

SEQ ID NO: 3849665 - RNA, 21 nt, Human
ugccuucucaccagcugcaaa

SEQ ID NO: 3849666 - RNA, 23 nt, Human
ugccuucucaccagcugcaaagu

SEQ ID NO: 3849667 - RNA, 19 nt, Human
ugccuucugacggcccugc

SEQ ID NO: 3849668 - RNA, 12 nt, Human
ugccuucugucc

SEQ ID NO: 3849669 - RNA, 13 nt, Human
ugccuucuucacc

SEQ ID NO: 3849670 - RNA, 17 nt, Human
ugccuucuucacccagc

SEQ ID NO: 3849671 - RNA, 22 nt, Human
ugccuucuucggggaacuccug

SEQ ID NO: 3849672 - RNA, 12 nt, Human
ugccuucuuuga

SEQ ID NO: 3849673 - RNA, 16 nt, Human
ugccuucuuugaagaa

SEQ ID NO: 3849674 - RNA, 16 nt, Human
ugccuugaaaaagaca

SEQ ID NO: 3849675 - RNA, 17 nt, Human
ugccuugaaccacuucc

SEQ ID NO: 3849676 - RNA, 19 nt, Human
ugccuugaaccugugagua

SEQ ID NO: 3849677 - RNA, 15 nt, Human
ugccuugaauaauaa

SEQ ID NO: 3849678 - RNA, 23 nt, Human
ugccuugaauauccccucccagu

SEQ ID NO: 3849679 - RNA, 14 nt, Human
ugccuugcagaacu

SEQ ID NO: 3849680 - RNA, 16 nt, Human
ugccuugcagaacugc

SEQ ID NO: 3849681 - RNA, 19 nt, Human
ugccuugcagaacugccau

SEQ ID NO: 3849682 - RNA, 12 nt, Human
ugccuugccuuu

SEQ ID NO: 3849683 - RNA, 20 nt, Human
ugccuugcuguuuguccuga

SEQ ID NO: 3849684 - RNA, 18 nt, Human
ugccuuggaaguugcaug

SEQ ID NO: 3849685 - RNA, 16 nt, Human
ugccuuggcucagaca

SEQ ID NO: 3849686 - RNA, 19 nt, Human
ugccuuggcucagacaugu

SEQ ID NO: 3849687 - RNA, 11 nt, Human
ugccuugggcu

SEQ ID NO: 3849688 - RNA, 17 nt, Human
ugccuugggcugcuccu

SEQ ID NO: 3849689 - RNA, 20 nt, Human
ugccuuggggaauuuccucu

SEQ ID NO: 3849690 - RNA, 21 nt, Human
ugccuuggggaauuuccucua

SEQ ID NO: 3849691 - RNA, 12 nt, Human
gucauuaaaggu

SEQ ID NO: 3849692 - RNA, 11 nt, Human
gucauuaaaug

SEQ ID NO: 3849693 - RNA, 13 nt, Human
gucauuagccuga

SEQ ID NO: 3849694 - RNA, 19 nt, Human
gucauuauccuugcuauga

SEQ ID NO: 3849695 - RNA, 17 nt, Human
gucauuauguuaauauu

SEQ ID NO: 3849696 - RNA, 16 nt, Human
gucauucguucugugg

SEQ ID NO: 3849697 - RNA, 18 nt, Human
gucauugcaguuuaagag

SEQ ID NO: 3849698 - RNA, 12 nt, Human
gucauugcuucu

SEQ ID NO: 3849699 - RNA, 16 nt, Human
gucauugcuucuucug

SEQ ID NO: 3849700 - RNA, 12 nt, Human
gucauuguaaug

SEQ ID NO: 3849701 - RNA, 15 nt, Human
gucauuguauguuau

SEQ ID NO: 3849702 - RNA, 13 nt, Human
gucauuuaaaugu

SEQ ID NO: 3849703 - RNA, 21 nt, Human
gucauuuauuuuaaaaaauga

SEQ ID NO: 3849704 - RNA, 13 nt, Human
gucauuucauguc

SEQ ID NO: 3849705 - RNA, 21 nt, Human
gucauuucauuccauugccua

SEQ ID NO: 3849706 - RNA, 12 nt, Human
gucauuuccaug

SEQ ID NO: 3849707 - RNA, 17 nt, Human
gucauuugagucucuua

SEQ ID NO: 3849708 - RNA, 22 nt, Human
gucauuugcugugaacugaaau

SEQ ID NO: 3849709 - RNA, 16 nt, Human
gucauuuguuaaaaua

SEQ ID NO: 3849710 - RNA, 17 nt, Human
gucauuuguugugaugu

SEQ ID NO: 3849711 - RNA, 21 nt, Human
gucauuuuaacuuuaucacau

SEQ ID NO: 3849712 - RNA, 12 nt, Human
gucauuuucauu

SEQ ID NO: 3849713 - RNA, 17 nt, Human
gucauuuugaagcuaau

SEQ ID NO: 3849714 - RNA, 17 nt, Human
gucauuuuggucuaagg

SEQ ID NO: 3849715 - RNA, 20 nt, Human
gucauuuuuacaauguaauu

SEQ ID NO: 3849716 - RNA, 22 nt, Human
gucauuuuuacaauguaauuau

SEQ ID NO: 3849717 - RNA, 19 nt, Human
gucauuuuuuuuaagaaaa

SEQ ID NO: 3849718 - RNA, 17 nt, Human
guccaaaaccgccagcu

SEQ ID NO: 3849719 - RNA, 18 nt, Human
guccaaaagauugcugaa

SEQ ID NO: 3849720 - RNA, 21 nt, Human
guccaaacugccuaagcccuc

SEQ ID NO: 3849721 - RNA, 17 nt, Human
guccaaagcagggucug

SEQ ID NO: 3849722 - RNA, 20 nt, Human
guccaaaggaggcuggcagg

SEQ ID NO: 3849723 - RNA, 20 nt, Human
guccaaauaacaaguaccaa

SEQ ID NO: 3849724 - RNA, 22 nt, Human
guccaaauguccuccagaagcc

SEQ ID NO: 3849725 - RNA, 18 nt, Human
guccaaauguuuacaggg

SEQ ID NO: 3849726 - RNA, 20 nt, Human
guccaaccuaaccccuuucc

SEQ ID NO: 3849727 - RNA, 21 nt, Human
guccaaccuaaccccuuuccu

SEQ ID NO: 3849728 - RNA, 17 nt, Human
guccaagaagcccagga

SEQ ID NO: 3849729 - RNA, 18 nt, Human
guccaagaagcccaggaa

SEQ ID NO: 3849730 - RNA, 21 nt, Human
guccaagaccagacucgccaa

SEQ ID NO: 3849731 - RNA, 20 nt, Human
guccaagauuccggauccua

SEQ ID NO: 3849732 - RNA, 24 nt, Human
guccaagcauaccaacacgagcag

SEQ ID NO: 3849733 - RNA, 22 nt, Human
guccaaggaaacuugaaucaaa

SEQ ID NO: 3849734 - RNA, 21 nt, Human
guccaagguuuaaagagucua

SEQ ID NO: 3849735 - RNA, 19 nt, Human
guccaagugugugugcgug

SEQ ID NO: 3849736 - RNA, 12 nt, Human
guccaauaagac

SEQ ID NO: 3849737 - RNA, 12 nt, Human
guccaauccuau

SEQ ID NO: 3849738 - RNA, 19 nt, Human
guccaaugagcuuucugaa

SEQ ID NO: 3849739 - RNA, 20 nt, Human
guccacaaaauaaccaaucc

SEQ ID NO: 3849740 - RNA, 15 nt, Human
guccacaacacacag

SEQ ID NO: 3849741 - RNA, 16 nt, Human
guccacagaugccucc

SEQ ID NO: 3849742 - RNA, 14 nt, Human
guccacagcuuccu

SEQ ID NO: 3849743 - RNA, 21 nt, Human
guccaccaugggguccuacca

SEQ ID NO: 3849744 - RNA, 13 nt, Human
guccacccaggag

SEQ ID NO: 3849745 - RNA, 15 nt, Human
guccacccaggagcc

SEQ ID NO: 3849746 - RNA, 23 nt, Human
guccacccaggagccccgaggcc

SEQ ID NO: 3849747 - RNA, 11 nt, Human
guccacccgcc

SEQ ID NO: 3849748 - RNA, 16 nt, Human
guccacccugccugcc

SEQ ID NO: 3849749 - RNA, 15 nt, Human
guccacggcucuagg

SEQ ID NO: 3849750 - RNA, 13 nt, Human
guccacuggggug

SEQ ID NO: 3849751 - RNA, 23 nt, Human
guccacuguguauagaaguagau

SEQ ID NO: 3849752 - RNA, 19 nt, Human
guccacuucugacagccuc

SEQ ID NO: 3849753 - RNA, 18 nt, Human
guccacuuuuccaguauu

SEQ ID NO: 3849754 - RNA, 19 nt, Human
guccacuuuuccaguauuu

SEQ ID NO: 3849755 - RNA, 21 nt, Human
guccacuuuuccaguauuuua

SEQ ID NO: 3849756 - RNA, 21 nt, Human
guccagaagaauauucaggac

SEQ ID NO: 3849757 - RNA, 11 nt, Human
guccagaagga

SEQ ID NO: 3849758 - RNA, 17 nt, Human
guccagaaggagacagg

SEQ ID NO: 3849759 - RNA, 20 nt, Human
guccagaaggagacaggcag

SEQ ID NO: 3849760 - RNA, 17 nt, Human
guccagaaggagggggu

SEQ ID NO: 3849761 - RNA, 12 nt, Human
guccagacagcc

SEQ ID NO: 3849762 - RNA, 20 nt, Human
guccagagagagaagugccc

SEQ ID NO: 3849763 - RNA, 23 nt, Human
guccagagagagaagugccccug

SEQ ID NO: 3849764 - RNA, 17 nt, Human
guccagauuuacacugg

SEQ ID NO: 3849765 - RNA, 21 nt, Human
guccagauuuacacugggaga

SEQ ID NO: 3849766 - RNA, 16 nt, Human
guccagcccuggcuga

SEQ ID NO: 3849767 - RNA, 20 nt, Human
guccagcccuggcugaagga

SEQ ID NO: 3849768 - RNA, 22 nt, Human
guccagccgccauugccaccag

SEQ ID NO: 3849769 - RNA, 14 nt, Human
guccagccugcccc

SEQ ID NO: 3849770 - RNA, 14 nt, Human
guccagcucuggag

SEQ ID NO: 3849771 - RNA, 14 nt, Human
guccagcuugcucu

SEQ ID NO: 3849772 - RNA, 18 nt, Human
guccaggaaaugugcaca

SEQ ID NO: 3849773 - RNA, 18 nt, Human
guccaggaacaagcuaau

SEQ ID NO: 3849774 - RNA, 13 nt, Human
guccaggagccug

SEQ ID NO: 3849775 - RNA, 15 nt, Human
guccaggccuacucc

SEQ ID NO: 3849776 - RNA, 20 nt, Human
guccaggccuacuccugucu

SEQ ID NO: 3849777 - RNA, 23 nt, Human
guccaggccuacuccugucuucu

SEQ ID NO: 3849778 - RNA, 24 nt, Human
guccaggccuacuccugucuucug

SEQ ID NO: 3849779 - RNA, 14 nt, Human
guccaggcugccgu

SEQ ID NO: 3849780 - RNA, 16 nt, Human
guccaggcugccgugg

SEQ ID NO: 3849781 - RNA, 11 nt, Human
guccaggggau

SEQ ID NO: 3849782 - RNA, 18 nt, Human
guccaggucgggcucagc

SEQ ID NO: 3849783 - RNA, 19 nt, Human
guccaguaagaucacuguu

SEQ ID NO: 3849784 - RNA, 20 nt, Human
guccaguaagaucacuguuu

SEQ ID NO: 3849785 - RNA, 21 nt, Human
guccaguaagaucacuguuua

SEQ ID NO: 3849786 - RNA, 19 nt, Human
guccaguccuaucugggcu

SEQ ID NO: 3849787 - RNA, 16 nt, Human
guccagucucuucugc

SEQ ID NO: 3849788 - RNA, 15 nt, Human
guccauacacuuugu

SEQ ID NO: 3849789 - RNA, 14 nt, Human
guccauaucacaca

SEQ ID NO: 3849790 - RNA, 17 nt, Human
guccauaucacacacau

SEQ ID NO: 3849791 - RNA, 21 nt, Human
guccauaucagaacugugcca

SEQ ID NO: 3849792 - RNA, 16 nt, Human
guccaucugcccgccu

SEQ ID NO: 3849793 - RNA, 17 nt, Human
guccaucugcccgccug

SEQ ID NO: 3849794 - RNA, 19 nt, Human
ugcagccucaaccuccugg

SEQ ID NO: 3849795 - RNA, 20 nt, Human
ugcagccucaaccuccuggg

SEQ ID NO: 3849796 - RNA, 19 nt, Human
ugcagccucaggacuggga

SEQ ID NO: 3849797 - RNA, 20 nt, Human
ugcagccucaggacugggag

SEQ ID NO: 3849798 - RNA, 22 nt, Human
ugcagccucaggacugggagcc

SEQ ID NO: 3849799 - RNA, 18 nt, Human
ugcagccuccgcuucccu

SEQ ID NO: 3849800 - RNA, 17 nt, Human
ugcagccuccuccugac

SEQ ID NO: 3849801 - RNA, 20 nt, Human
ugcagccucgaacuccuggg

SEQ ID NO: 3849802 - RNA, 21 nt, Human
ugcagccucgaacuccugggc

SEQ ID NO: 3849803 - RNA, 17 nt, Human
ugcagccugcaggaccu

SEQ ID NO: 3849804 - RNA, 14 nt, Human
ugcagccuggaggc

SEQ ID NO: 3849805 - RNA, 17 nt, Human
ugcagcgacuggcauac

SEQ ID NO: 3849806 - RNA, 19 nt, Human
ugcagcgcagcuggacucu

SEQ ID NO: 3849807 - RNA, 21 nt, Human
ugcagcucaaggaaaggccug

SEQ ID NO: 3849808 - RNA, 19 nt, Human
ugcagcucccuggcuucug

SEQ ID NO: 3849809 - RNA, 14 nt, Human
ugcagcucuuccug

SEQ ID NO: 3849810 - RNA, 19 nt, Human
ugcagcugaaauugaaaag

SEQ ID NO: 3849811 - RNA, 21 nt, Human
ugcagcugaaauugaaaaguu

SEQ ID NO: 3849812 - RNA, 15 nt, Human
ugcagcugaccucug

SEQ ID NO: 3849813 - RNA, 20 nt, Human
ugcagcugaccucuguuguc

SEQ ID NO: 3849814 - RNA, 21 nt, Human
ugcagcugaccucuguugucc

SEQ ID NO: 3849815 - RNA, 14 nt, Human
ugcagcugauuuua

SEQ ID NO: 3849816 - RNA, 22 nt, Human
ugcagcugauuuuaacaauaac

SEQ ID NO: 3849817 - RNA, 19 nt, Human
ugcagcuggaaaagggucu

SEQ ID NO: 3849818 - RNA, 14 nt, Human
ugcagcuggacaga

SEQ ID NO: 3849819 - RNA, 16 nt, Human
ugcagcuggacagagg

SEQ ID NO: 3849820 - RNA, 18 nt, Human
ugcagcuggacagagggg

SEQ ID NO: 3849821 - RNA, 15 nt, Human
ugcagcuguuuuguu

SEQ ID NO: 3849822 - RNA, 18 nt, Human
ugcagcuguuuuguugac

SEQ ID NO: 3849823 - RNA, 11 nt, Human
ugcagcuuccu

SEQ ID NO: 3849824 - RNA, 15 nt, Human
ugcagcuucuguccu

SEQ ID NO: 3849825 - RNA, 18 nt, Human
ugcagcuugggagagccc

SEQ ID NO: 3849826 - RNA, 22 nt, Human
ugcagcuugggagagccccugg

SEQ ID NO: 3849827 - RNA, 16 nt, Human
ugcagcuuguagccag

SEQ ID NO: 3849828 - RNA, 13 nt, Human
ugcagcuuuaugu

SEQ ID NO: 3849829 - RNA, 14 nt, Human
ugcagcuuugcaaa

SEQ ID NO: 3849830 - RNA, 18 nt, Human
ugcaggaaggagcugccu

SEQ ID NO: 3849831 - RNA, 19 nt, Human
ugcaggaaggagcugccug

SEQ ID NO: 3849832 - RNA, 12 nt, Human
ugcaggaaucaa

SEQ ID NO: 3849833 - RNA, 14 nt, Human
ugcaggaccucagg

SEQ ID NO: 3849834 - RNA, 16 nt, Human
ugcaggaccucaggug

SEQ ID NO: 3849835 - RNA, 18 nt, Human
ugcaggaccucaggugag

SEQ ID NO: 3849836 - RNA, 15 nt, Human
ugcaggacuugagaa

SEQ ID NO: 3849837 - RNA, 18 nt, Human
ugcaggacuugagaagac

SEQ ID NO: 3849838 - RNA, 13 nt, Human
ugcaggagcuucu

SEQ ID NO: 3849839 - RNA, 19 nt, Human
ugcaggauuuguucucugu

SEQ ID NO: 3849840 - RNA, 21 nt, Human
ugcaggcaccuuaguggcuuu

SEQ ID NO: 3849841 - RNA, 23 nt, Human
ugcaggcacucaaugcagccaga

SEQ ID NO: 3849842 - RNA, 13 nt, Human
ugcaggcagacac

SEQ ID NO: 3849843 - RNA, 11 nt, Human
ugcaggcaggc

SEQ ID NO: 3849844 - RNA, 21 nt, Human
ugcaggcaugcaugugcuugu

SEQ ID NO: 3849845 - RNA, 13 nt, Human
ugcaggcccaccc

SEQ ID NO: 3849846 - RNA, 14 nt, Human
ugcaggcccacccu

SEQ ID NO: 3849847 - RNA, 15 nt, Human
ugcaggcccacccug

SEQ ID NO: 3849848 - RNA, 17 nt, Human
ugcaggcccacccugcu

SEQ ID NO: 3849849 - RNA, 10 nt, Human
ugcaggcccc

SEQ ID NO: 3849850 - RNA, 12 nt, Human
ugcaggcccugg

SEQ ID NO: 3849851 - RNA, 20 nt, Human
ugcaggcccuggccuccccu

SEQ ID NO: 3849852 - RNA, 19 nt, Human
ugcaggcugagccacucuc

SEQ ID NO: 3849853 - RNA, 15 nt, Human
ugcaggcuggccagc

SEQ ID NO: 3849854 - RNA, 17 nt, Human
ugcaggcuggccagccg

SEQ ID NO: 3849855 - RNA, 15 nt, Human
ugcagggaaaauuau

SEQ ID NO: 3849856 - RNA, 16 nt, Human
ugcagggacaaagagg

SEQ ID NO: 3849857 - RNA, 23 nt, Human
ugcagggagcauggcugugagga

SEQ ID NO: 3849858 - RNA, 23 nt, Human
ugcagggagcugggcuuccagaa

SEQ ID NO: 3849859 - RNA, 15 nt, Human
ugcagggaugugggu

SEQ ID NO: 3849860 - RNA, 12 nt, Human
ugcagggcagcc

SEQ ID NO: 3849861 - RNA, 14 nt, Human
ugcagggcagcccc

SEQ ID NO: 3849862 - RNA, 13 nt, Human
ugcagggcaguca

SEQ ID NO: 3849863 - RNA, 14 nt, Human
ugcagggcagucau

SEQ ID NO: 3849864 - RNA, 21 nt, Human
ugcagggcagucauuggcugu

SEQ ID NO: 3849865 - RNA, 21 nt, Human
ugcagggccagaccugccugc

SEQ ID NO: 3849866 - RNA, 12 nt, Human
ugcagggccagg

SEQ ID NO: 3849867 - RNA, 15 nt, Human
ugcagggccauggcu

SEQ ID NO: 3849868 - RNA, 14 nt, Human
ugcagggccuccau

SEQ ID NO: 3849869 - RNA, 17 nt, Human
ugcagggcuuuaaaauu

SEQ ID NO: 3849870 - RNA, 22 nt, Human
ugcaggggauugaagcccucca

SEQ ID NO: 3849871 - RNA, 22 nt, Human
ugcaggggcaaacaccugcuga

SEQ ID NO: 3849872 - RNA, 13 nt, Human
ugcaggggcucug

SEQ ID NO: 3849873 - RNA, 22 nt, Human
ugcaggggugacggcccucauc

SEQ ID NO: 3849874 - RNA, 18 nt, Human
ugcaggguggugcuggga

SEQ ID NO: 3849875 - RNA, 17 nt, Human
ugcaggucccuaauaaa

SEQ ID NO: 3849876 - RNA, 18 nt, Human
ugcaggucccuaauaaag

SEQ ID NO: 3849877 - RNA, 19 nt, Human
ugcaggucccuaauaaagc

SEQ ID NO: 3849878 - RNA, 22 nt, Human
ugcaggucuuuaaaucauuuua

SEQ ID NO: 3849879 - RNA, 16 nt, Human
ugcaggugaaacccag

SEQ ID NO: 3849880 - RNA, 22 nt, Human
ugcaggugcuauuguuacucuu

SEQ ID NO: 3849881 - RNA, 16 nt, Human
ugcaggugcugcugcg

SEQ ID NO: 3849882 - RNA, 20 nt, Human
ugcagguggugucgggcccu

SEQ ID NO: 3849883 - RNA, 18 nt, Human
ugcagguuaguuacauau

SEQ ID NO: 3849884 - RNA, 12 nt, Human
ugcagguuccca

SEQ ID NO: 3849885 - RNA, 17 nt, Human
ugcagguugaagccaug

SEQ ID NO: 3849886 - RNA, 20 nt, Human
ugcagguuggaccccagaga

SEQ ID NO: 3849887 - RNA, 16 nt, Human
ugcagguuuguuacau

SEQ ID NO: 3849888 - RNA, 14 nt, Human
ugcagguuuucugu

SEQ ID NO: 3849889 - RNA, 14 nt, Human
ugcaguaaaucuuu

SEQ ID NO: 3849890 - RNA, 21 nt, Human
ugcaguaaaucuuuuacaacu

SEQ ID NO: 3849891 - RNA, 18 nt, Human
ugcaguaacuguuuuuua

SEQ ID NO: 3849892 - RNA, 15 nt, Human
ugcaguaacuuggga

SEQ ID NO: 3849893 - RNA, 17 nt, Human
ugcaguaacuugggagu

SEQ ID NO: 3849894 - RNA, 14 nt, Human
ugcaguacuaacau

SEQ ID NO: 3849895 - RNA, 18 nt, Human
ugcaguacuuuaccuccu

SEQ ID NO: 3849896 - RNA, 18 nt, Human
ugcaguacuuugugcauu

SEQ ID NO: 3849897 - RNA, 16 nt, Human
ugcaguagagucaucu

SEQ ID NO: 3849898 - RNA, 19 nt, Human
ugcaguagagucaucucca

SEQ ID NO: 3849899 - RNA, 20 nt, Human
ugcaguagauuuucuuuaaa

SEQ ID NO: 3849900 - RNA, 13 nt, Human
ugcaguauauuuc

SEQ ID NO: 3849901 - RNA, 21 nt, Human
ugcaguaucggcacuguacaa

SEQ ID NO: 3849902 - RNA, 17 nt, Human
ugcaguaugguacauuu

SEQ ID NO: 3849903 - RNA, 15 nt, Human
ugcagucacuggagg

SEQ ID NO: 3849904 - RNA, 16 nt, Human
ugcagucaucagaagu

SEQ ID NO: 3849905 - RNA, 22 nt, Human
ugcagucauggagaaccaccua

SEQ ID NO: 3849906 - RNA, 20 nt, Human
ugcagucccaagcggugucu

SEQ ID NO: 3849907 - RNA, 17 nt, Human
ugcaguccuacucaagc

SEQ ID NO: 3849908 - RNA, 13 nt, Human
ugcaguccuggga

SEQ ID NO: 3849909 - RNA, 23 nt, Human
ugcagucuccucuuuaaaacaaa

SEQ ID NO: 3849910 - RNA, 20 nt, Human
ugcagucucuauaccaauaa

SEQ ID NO: 3849911 - RNA, 22 nt, Human
ugcagucucuauaccaauaaag

SEQ ID NO: 3849912 - RNA, 21 nt, Human
ugcagucuggcugagcccugc

SEQ ID NO: 3849913 - RNA, 15 nt, Human
ugcagugagccaaga

SEQ ID NO: 3849914 - RNA, 10 nt, Human
ugcagugcag

SEQ ID NO: 3849915 - RNA, 17 nt, Human
ugcagugcucgcuguug

SEQ ID NO: 3849916 - RNA, 19 nt, Human
ugcagugcucgcuguugcu

SEQ ID NO: 3849917 - RNA, 20 nt, Human
ugcagugcucgcuguugcug

SEQ ID NO: 3849918 - RNA, 22 nt, Human
ugcagugcucgcuguugcugaa

SEQ ID NO: 3849919 - RNA, 18 nt, Human
gucucccucuccugccua

SEQ ID NO: 3849920 - RNA, 20 nt, Human
gucucccucuccugccuacu

SEQ ID NO: 3849921 - RNA, 14 nt, Human
gucucccuggcucc

SEQ ID NO: 3849922 - RNA, 13 nt, Human
gucucccuucucc

SEQ ID NO: 3849923 - RNA, 21 nt, Human
gucuccucacucccuucuacc

SEQ ID NO: 3849924 - RNA, 14 nt, Human
gucuccuccccuuc

SEQ ID NO: 3849925 - RNA, 13 nt, Human
gucuccucuuuaa

SEQ ID NO: 3849926 - RNA, 18 nt, Human
gucuccucuuuaaaacaa

SEQ ID NO: 3849927 - RNA, 19 nt, Human
gucuccucuuuguuuuguu

SEQ ID NO: 3849928 - RNA, 19 nt, Human
gucuccugcccccacaccu

SEQ ID NO: 3849929 - RNA, 22 nt, Human
gucuccugcccccacaccuggc

SEQ ID NO: 3849930 - RNA, 23 nt, Human
gucuccugcccccacaccuggcc

SEQ ID NO: 3849931 - RNA, 21 nt, Human
gucuccugugcccacauccca

SEQ ID NO: 3849932 - RNA, 16 nt, Human
gucuccuuuaagagcu

SEQ ID NO: 3849933 - RNA, 18 nt, Human
gucuccuuucaccccagg

SEQ ID NO: 3849934 - RNA, 15 nt, Human
gucuccuuugcacug

SEQ ID NO: 3849935 - RNA, 16 nt, Human
gucuccuuugcacuga

SEQ ID NO: 3849936 - RNA, 18 nt, Human
gucuccuuugcacugagg

SEQ ID NO: 3849937 - RNA, 20 nt, Human
gucuccuuugcacugagggc

SEQ ID NO: 3849938 - RNA, 13 nt, Human
gucucgaacuccu

SEQ ID NO: 3849939 - RNA, 14 nt, Human
gucugggggcacaa

SEQ ID NO: 3849940 - RNA, 19 nt, Human
gucugggggcacaagacug

SEQ ID NO: 3849941 - RNA, 20 nt, Human
gucugggggcacaagacuga

SEQ ID NO: 3849942 - RNA, 17 nt, Human
gucugggguucagcccc

SEQ ID NO: 3849943 - RNA, 18 nt, Human
gucugggguucagccccu

SEQ ID NO: 3849944 - RNA, 15 nt, Human
gucugggugcuacug

SEQ ID NO: 3849945 - RNA, 17 nt, Human
gucuggguggcucacuc

SEQ ID NO: 3849946 - RNA, 18 nt, Human
gucuggucuccucagccu

SEQ ID NO: 3849947 - RNA, 20 nt, Human
gucugguggccccguuucug

SEQ ID NO: 3849948 - RNA, 14 nt, Human
gucugguucucaau

SEQ ID NO: 3849949 - RNA, 18 nt, Human
gucuguaaaaucuuucuu

SEQ ID NO: 3849950 - RNA, 18 nt, Human
gucuguaaugacaaauaa

SEQ ID NO: 3849951 - RNA, 19 nt, Human
gucuguacacguguccugu

SEQ ID NO: 3849952 - RNA, 16 nt, Human
gucuguacugauucaa

SEQ ID NO: 3849953 - RNA, 19 nt, Human
gucuguagagggcccuggu

SEQ ID NO: 3849954 - RNA, 22 nt, Human
gucuguagagggcccugguguu

SEQ ID NO: 3849955 - RNA, 16 nt, Human
gucuguagguugcaca

SEQ ID NO: 3849956 - RNA, 19 nt, Human
gucuguagguugcacacuu

SEQ ID NO: 3849957 - RNA, 15 nt, Human
gucuguaucagugga

SEQ ID NO: 3849958 - RNA, 20 nt, Human
gucuguaucggagacaguga

SEQ ID NO: 3849959 - RNA, 14 nt, Human
gucuguauuucaug

SEQ ID NO: 3849960 - RNA, 21 nt, Human
gucuguauuucauguggcugu

SEQ ID NO: 3849961 - RNA, 22 nt, Human
gucugucaugaacauguuccug

SEQ ID NO: 3849962 - RNA, 15 nt, Human
gucugucccaccagc

SEQ ID NO: 3849963 - RNA, 16 nt, Human
gucugucccggggucc

SEQ ID NO: 3849964 - RNA, 21 nt, Human
gucugucccgggguccugugg

SEQ ID NO: 3849965 - RNA, 24 nt, Human
gucugucccgggguccuguggcag

SEQ ID NO: 3849966 - RNA, 15 nt, Human
gucugucuucacagc

SEQ ID NO: 3849967 - RNA, 13 nt, Human
gucugucuuccuu

SEQ ID NO: 3849968 - RNA, 21 nt, Human
gucugucuuccuuugcuuccc

SEQ ID NO: 3849969 - RNA, 20 nt, Human
gucugucuuuccugaaccau

SEQ ID NO: 3849970 - RNA, 18 nt, Human
gucugugaagugagaccu

SEQ ID NO: 3849971 - RNA, 21 nt, Human
gucugugaauuggaccauccu

SEQ ID NO: 3849972 - RNA, 15 nt, Human
gucugugagaugcua

SEQ ID NO: 3849973 - RNA, 22 nt, Human
gucugugagaugcuagaacucc

SEQ ID NO: 3849974 - RNA, 23 nt, Human
gucugugccccuuccgccacugg

SEQ ID NO: 3849975 - RNA, 13 nt, Human
gucugugccugga

SEQ ID NO: 3849976 - RNA, 12 nt, Human
gucugugcugag

SEQ ID NO: 3849977 - RNA, 16 nt, Human
gucuguggauuuuuuc

SEQ ID NO: 3849978 - RNA, 16 nt, Human
gucugugugaaugugg

SEQ ID NO: 3849979 - RNA, 20 nt, Human
gucugugugaugaacuuucu

SEQ ID NO: 3849980 - RNA, 17 nt, Human
gucugugugcaagugug

SEQ ID NO: 3849981 - RNA, 20 nt, Human
gucugugugcgcucugugga

SEQ ID NO: 3849982 - RNA, 21 nt, Human
gucugugugugaccccuccug

SEQ ID NO: 3849983 - RNA, 22 nt, Human
gucugugugugaccccuccugg

SEQ ID NO: 3849984 - RNA, 23 nt, Human
gucugugugugaccccuccuggg

SEQ ID NO: 3849985 - RNA, 20 nt, Human
gucuguguguguguaugugg

SEQ ID NO: 3849986 - RNA, 20 nt, Human
gucuguguuccaaccacuga

SEQ ID NO: 3849987 - RNA, 16 nt, Human
gucuguuaacuuaaua

SEQ ID NO: 3849988 - RNA, 16 nt, Human
gucuguuaugcuguga

SEQ ID NO: 3849989 - RNA, 18 nt, Human
gucuguucuguuucaagg

SEQ ID NO: 3849990 - RNA, 13 nt, Human
gucuguucuugaa

SEQ ID NO: 3849991 - RNA, 16 nt, Human
gucuguuggcaggcug

SEQ ID NO: 3849992 - RNA, 16 nt, Human
gucuguuuaagaaaag

SEQ ID NO: 3849993 - RNA, 20 nt, Human
gucuguuuaagaaaaguauu

SEQ ID NO: 3849994 - RNA, 12 nt, Human
gucuguuuacug

SEQ ID NO: 3849995 - RNA, 13 nt, Human
gucuguuuggacu

SEQ ID NO: 3849996 - RNA, 13 nt, Human
gucuguuuuauga

SEQ ID NO: 3849997 - RNA, 14 nt, Human
gucuguuuugugua

SEQ ID NO: 3849998 - RNA, 15 nt, Human
gucuguuuuguguac

SEQ ID NO: 3849999 - RNA, 17 nt, Human
gucuuaaacuaaaugug

SEQ ID NO: 3850000 - RNA, 17 nt, Human
gucuuaagaaauguaua

SEQ ID NO: 3850001 - RNA, 21 nt, Human
gucuuaagaaauguauaaacu

SEQ ID NO: 3850002 - RNA, 23 nt, Human
gucuuaagccuuuugcucacaaa

SEQ ID NO: 3850003 - RNA, 21 nt, Human
gucuuaauuaaaagaauauuu

SEQ ID NO: 3850004 - RNA, 13 nt, Human
gucuuaauuaagu

SEQ ID NO: 3850005 - RNA, 21 nt, Human
gucuuaauuauuauuuguguu

SEQ ID NO: 3850006 - RNA, 22 nt, Human
gucuuaauuuuugaaaaaagua

SEQ ID NO: 3850007 - RNA, 20 nt, Human
gucuuacuacagaaaugagg

SEQ ID NO: 3850008 - RNA, 20 nt, Human
gucuuagaaguggaccagga

SEQ ID NO: 3850009 - RNA, 22 nt, Human
gucuuagaaguggaccaggaca

SEQ ID NO: 3850010 - RNA, 23 nt, Human
gucuuagacuugaaauacuacuu

SEQ ID NO: 3850011 - RNA, 24 nt, Human
gucuuagacuugaaauacuacuua

SEQ ID NO: 3850012 - RNA, 19 nt, Human
gucuuauauauuguagaua

SEQ ID NO: 3850013 - RNA, 20 nt, Human
gucuuaucugagcugagcca

SEQ ID NO: 3850014 - RNA, 15 nt, Human
gucuuaugcuuccag

SEQ ID NO: 3850015 - RNA, 16 nt, Human
gucuuauucccuuccu

SEQ ID NO: 3850016 - RNA, 14 nt, Human
gucuuauuuauuau

SEQ ID NO: 3850017 - RNA, 14 nt, Human
gucuuauuuccuca

SEQ ID NO: 3850018 - RNA, 14 nt, Human
gucuuauuuuuaga

SEQ ID NO: 3850019 - RNA, 17 nt, Human
gucuucaaauugucuuu

SEQ ID NO: 3850020 - RNA, 21 nt, Human
gucuucaacauccugccagcc

SEQ ID NO: 3850021 - RNA, 22 nt, Human
gucuucaacauccugccagccc

SEQ ID NO: 3850022 - RNA, 21 nt, Human
gucuucaauuuguauaaaaug

SEQ ID NO: 3850023 - RNA, 19 nt, Human
gucuucagcauucccuccc

SEQ ID NO: 3850024 - RNA, 15 nt, Human
gucuucagccuagcc

SEQ ID NO: 3850025 - RNA, 23 nt, Human
gucuucagccucuuucugucccu

SEQ ID NO: 3850026 - RNA, 16 nt, Human
gucuucaguaagccgu

SEQ ID NO: 3850027 - RNA, 16 nt, Human
gucuucaugaaaugcu

SEQ ID NO: 3850028 - RNA, 21 nt, Human
gucuucauuaagcccucuucc

SEQ ID NO: 3850029 - RNA, 16 nt, Human
gucuucauuucauugu

SEQ ID NO: 3850030 - RNA, 14 nt, Human
gucuuccacaaaga

SEQ ID NO: 3850031 - RNA, 15 nt, Human
gucuucccuaccuca

SEQ ID NO: 3850032 - RNA, 17 nt, Human
gucuucccuagggcugg

SEQ ID NO: 3850033 - RNA, 18 nt, Human
gucuucccuagggcuggg

SEQ ID NO: 3850034 - RNA, 21 nt, Human
gucuucccuagggcugggugu

SEQ ID NO: 3850035 - RNA, 17 nt, Human
gucuuccgccccugccu

SEQ ID NO: 3850036 - RNA, 23 nt, Human
gucuuccgccccugccugccaug

SEQ ID NO: 3850037 - RNA, 23 nt, Human
gucuuccucccaaguggugccua

SEQ ID NO: 3850038 - RNA, 14 nt, Human
gucuuccugugggg

SEQ ID NO: 3850039 - RNA, 15 nt, Human
gucuuccuucugccu

SEQ ID NO: 3850040 - RNA, 19 nt, Human
gucuuccuuugcuucccuu

SEQ ID NO: 3850041 - RNA, 20 nt, Human
gucuucguacaguucuucgg

SEQ ID NO: 3850042 - RNA, 23 nt, Human
gucuucuaaacuuccccaucuuc

SEQ ID NO: 3850043 - RNA, 20 nt, Human
gucuucucacaagccagcca

SEQ ID NO: 3850044 - RNA, 18 nt, Human
gucuucucaggcucugcc

SEQ ID NO: 3850045 - RNA, 20 nt, Human
gucuucucauagcauuaacu

SEQ ID NO: 3850046 - RNA, 23 nt, Human
gucuucucauagcauuaacuaau

SEQ ID NO: 3850047 - RNA, 20 nt, Human
gucuucuccaacaccaccuc

SEQ ID NO: 3850048 - RNA, 12 nt, Human
gucuucucccca

SEQ ID NO: 3850049 - RNA, 16 nt, Human
gucuucucugucucag

SEQ ID NO: 3850050 - RNA, 15 nt, Human
gucuucugccuguua

SEQ ID NO: 3850051 - RNA, 18 nt, Human
gucuucuggacaggcucu

SEQ ID NO: 3850052 - RNA, 18 nt, Human
gucuucuguauauaaaug

SEQ ID NO: 3850053 - RNA, 20 nt, Human
gucuucuguauauaaauggg

SEQ ID NO: 3850054 - RNA, 12 nt, Human
gucuucuuggcc

SEQ ID NO: 3850055 - RNA, 12 nt, Human
gucuugaaagau

SEQ ID NO: 3850056 - RNA, 20 nt, Human
gucuugaacuccuggccuca

SEQ ID NO: 3850057 - RNA, 21 nt, Human
gucuugaacuccuggccucaa

SEQ ID NO: 3850058 - RNA, 15 nt, Human
gucuugaaguccugg

SEQ ID NO: 3850059 - RNA, 18 nt, Human
gucuugauucagucacau

SEQ ID NO: 3850060 - RNA, 21 nt, Human
gucuugcaauggcagccuugg

SEQ ID NO: 3850061 - RNA, 21 nt, Human
gucuugcagugauuaaggucu

SEQ ID NO: 3850062 - RNA, 15 nt, Human
gucuugccuuuuuca

SEQ ID NO: 3850063 - RNA, 17 nt, Human
gucuugccuuuuucauu

SEQ ID NO: 3850064 - RNA, 12 nt, Human
gucuugcugugg

SEQ ID NO: 3850065 - RNA, 16 nt, Human
gucuuggaacuugccu

SEQ ID NO: 3850066 - RNA, 22 nt, Human
gucuuggaacuugccugccuuu

SEQ ID NO: 3850067 - RNA, 22 nt, Human
gucuuggaauuccauuugagga

SEQ ID NO: 3850068 - RNA, 15 nt, Human
gucuuggacacugua

SEQ ID NO: 3850069 - RNA, 18 nt, Human
gucuuggacacuguacaa

SEQ ID NO: 3850070 - RNA, 17 nt, Human
gucuuggagcugagccu

SEQ ID NO: 3850071 - RNA, 15 nt, Human
gucuuggcggcagca

SEQ ID NO: 3850072 - RNA, 18 nt, Human
gucuuggcggcagcagcc

SEQ ID NO: 3850073 - RNA, 16 nt, Human
gucuugggcagagcug

SEQ ID NO: 3850074 - RNA, 15 nt, Human
gucuugguacuugcu

SEQ ID NO: 3850075 - RNA, 15 nt, Human
gucuugguguaauuu

SEQ ID NO: 3850076 - RNA, 18 nt, Human
gucuugguuucucucuac

SEQ ID NO: 3850077 - RNA, 20 nt, Human
gucuuguaauauuuuguauu

SEQ ID NO: 3850078 - RNA, 15 nt, Human
gucuugucucagauu

SEQ ID NO: 3850079 - RNA, 21 nt, Human
gucuuguuaauauucuuucaa

SEQ ID NO: 3850080 - RNA, 22 nt, Human
gucuuguuaauauucuuucaau

SEQ ID NO: 3850081 - RNA, 16 nt, Human
gucuuguuagaaaaca

SEQ ID NO: 3850082 - RNA, 14 nt, Human
gugauguuugcucu

SEQ ID NO: 3850083 - RNA, 14 nt, Human
gugauuaaacgugc

SEQ ID NO: 3850084 - RNA, 17 nt, Human
gugauuaaagcuaagga

SEQ ID NO: 3850085 - RNA, 16 nt, Human
gugauuaccagggacu

SEQ ID NO: 3850086 - RNA, 23 nt, Human
gugauuccacuacaccuggcuga

SEQ ID NO: 3850087 - RNA, 18 nt, Human
gugauucgagcuauauuu

SEQ ID NO: 3850088 - RNA, 16 nt, Human
gugauucuaaugucuu

SEQ ID NO: 3850089 - RNA, 20 nt, Human
gugauucuccugccucagcc

SEQ ID NO: 3850090 - RNA, 13 nt, Human
gugauucugccuu

SEQ ID NO: 3850091 - RNA, 13 nt, Human
gugauugcagcuu

SEQ ID NO: 3850092 - RNA, 22 nt, Human
gugauugcagcuuuauguucau

SEQ ID NO: 3850093 - RNA, 17 nt, Human
gugauugggaauaaaua

SEQ ID NO: 3850094 - RNA, 20 nt, Human
gugauugggaauaaauaugc

SEQ ID NO: 3850095 - RNA, 18 nt, Human
gugauuuaauaguguuaa

SEQ ID NO: 3850096 - RNA, 16 nt, Human
gugauuuaauccaguu

SEQ ID NO: 3850097 - RNA, 21 nt, Human
gugauuuagaacuguauguca

SEQ ID NO: 3850098 - RNA, 15 nt, Human
gugauuugaaggucu

SEQ ID NO: 3850099 - RNA, 19 nt, Human
gugauuugacuguuuuuac

SEQ ID NO: 3850100 - RNA, 16 nt, Human
gugauuuuaaaugugu

SEQ ID NO: 3850101 - RNA, 16 nt, Human
gugauuuuaacucugu

SEQ ID NO: 3850102 - RNA, 19 nt, Human
gugauuuuaacucugucuu

SEQ ID NO: 3850103 - RNA, 18 nt, Human
gugauuuuuguaauuuuu

SEQ ID NO: 3850104 - RNA, 21 nt, Human
gugcaaaaagcugaguauggu

SEQ ID NO: 3850105 - RNA, 20 nt, Human
gugcaaaacagcguuuaaga

SEQ ID NO: 3850106 - RNA, 19 nt, Human
gugcaaaacaugcuaccug

SEQ ID NO: 3850107 - RNA, 21 nt, Human
gugcaaaaggcuugcagaacu

SEQ ID NO: 3850108 - RNA, 18 nt, Human
gugcaaacccacucagag

SEQ ID NO: 3850109 - RNA, 22 nt, Human
gugcaaaguucccuacuuccug

SEQ ID NO: 3850110 - RNA, 17 nt, Human
gugcaaauggaagacaa

SEQ ID NO: 3850111 - RNA, 18 nt, Human
gugcaaauugucacagga

SEQ ID NO: 3850112 - RNA, 22 nt, Human
gugcaacaagguccucugucag

SEQ ID NO: 3850113 - RNA, 20 nt, Human
gugcaacagcacuggcucuc

SEQ ID NO: 3850114 - RNA, 22 nt, Human
gugcaacccaaggacugaggga

SEQ ID NO: 3850115 - RNA, 19 nt, Human
gugcaaccucgcugagggc

SEQ ID NO: 3850116 - RNA, 13 nt, Human
gugcaaccucugc

SEQ ID NO: 3850117 - RNA, 17 nt, Human
gugcaaccucugcuucc

SEQ ID NO: 3850118 - RNA, 21 nt, Human
gugcaaccucugcuucccagg

SEQ ID NO: 3850119 - RNA, 19 nt, Human
gugcaagcgacgacagaug

SEQ ID NO: 3850120 - RNA, 19 nt, Human
gugcaaggaccuaaaacau

SEQ ID NO: 3850121 - RNA, 12 nt, Human
gugcaaggcagc

SEQ ID NO: 3850122 - RNA, 14 nt, Human
gugcaaggcagccg

SEQ ID NO: 3850123 - RNA, 15 nt, Human
gugcaagugugugca

SEQ ID NO: 3850124 - RNA, 20 nt, Human
gugcaagugugugcaugugu

SEQ ID NO: 3850125 - RNA, 22 nt, Human
gugcaauaaaucugacccagug

SEQ ID NO: 3850126 - RNA, 12 nt, Human
gugcaauagaag

SEQ ID NO: 3850127 - RNA, 13 nt, Human
gugcaauauauuu

SEQ ID NO: 3850128 - RNA, 15 nt, Human
gugcaauauauuuug

SEQ ID NO: 3850129 - RNA, 20 nt, Human
gugcaauauauuuuguaugc

SEQ ID NO: 3850130 - RNA, 17 nt, Human
gugcaauguaaauauuu

SEQ ID NO: 3850131 - RNA, 20 nt, Human
gugcaauguaaauauuuuaa

SEQ ID NO: 3850132 - RNA, 21 nt, Human
gugcaaugucugagugaaccu

SEQ ID NO: 3850133 - RNA, 17 nt, Human
gugcaauguguauaaac

SEQ ID NO: 3850134 - RNA, 21 nt, Human
gugcaauuuguuugugcuucu

SEQ ID NO: 3850135 - RNA, 14 nt, Human
gugcacaaaguggc

SEQ ID NO: 3850136 - RNA, 21 nt, Human
aagaggcugguuuuggcaucu

SEQ ID NO: 3850137 - RNA, 17 nt, Human
aagagggacgccugggg

SEQ ID NO: 3850138 - RNA, 17 nt, Human
aagagggagaagcauga

SEQ ID NO: 3850139 - RNA, 22 nt, Human
aagagggagggagggcuccaga

SEQ ID NO: 3850140 - RNA, 16 nt, Human
aagagggcacacacug

SEQ ID NO: 3850141 - RNA, 19 nt, Human
aagagggccugugggagcc

SEQ ID NO: 3850142 - RNA, 16 nt, Human
aagaggggguggaggg

SEQ ID NO: 3850143 - RNA, 22 nt, Human
aagagggucugaggaauccaga

SEQ ID NO: 3850144 - RNA, 23 nt, Human
aagaggguuuuagguagaaaaac

SEQ ID NO: 3850145 - RNA, 16 nt, Human
aagagguacaggguuu

SEQ ID NO: 3850146 - RNA, 17 nt, Human
aagagguacaggguuuu

SEQ ID NO: 3850147 - RNA, 13 nt, Human
aagagguguuauu

SEQ ID NO: 3850148 - RNA, 21 nt, Human
aagagguuuggcuccugccca

SEQ ID NO: 3850149 - RNA, 18 nt, Human
aagagguuuuaaaaaaau

SEQ ID NO: 3850150 - RNA, 14 nt, Human
aagagguuuuaaag

SEQ ID NO: 3850151 - RNA, 18 nt, Human
aagaguaaaggaaaugau

SEQ ID NO: 3850152 - RNA, 21 nt, Human
aagaguagcaaguucuagaga

SEQ ID NO: 3850153 - RNA, 23 nt, Human
aagaguagcaaguucuagagaag

SEQ ID NO: 3850154 - RNA, 17 nt, Human
aagaguagcauuucauu

SEQ ID NO: 3850155 - RNA, 18 nt, Human
aagaguagcauuucauuc

SEQ ID NO: 3850156 - RNA, 19 nt, Human
aagaguagcauuucauucu

SEQ ID NO: 3850157 - RNA, 12 nt, Human
aagaguaggaag

SEQ ID NO: 3850158 - RNA, 16 nt, Human
aagaguaggaagacuu

SEQ ID NO: 3850159 - RNA, 18 nt, Human
aagaguaggaagacuuug

SEQ ID NO: 3850160 - RNA, 19 nt, Human
aagaguauuuuugacagaa

SEQ ID NO: 3850161 - RNA, 13 nt, Human
aagagucuaaaga

SEQ ID NO: 3850162 - RNA, 24 nt, Human
aagagucuaaagauggaguuucua

SEQ ID NO: 3850163 - RNA, 23 nt, Human
aagagucuagauucaaagguucu

SEQ ID NO: 3850164 - RNA, 15 nt, Human
aagagucuauugucu

SEQ ID NO: 3850165 - RNA, 22 nt, Human
aagagugacaguggauugcauu

SEQ ID NO: 3850166 - RNA, 13 nt, Human
aagagugauugca

SEQ ID NO: 3850167 - RNA, 21 nt, Human
aagaguggccccaccuggccc

SEQ ID NO: 3850168 - RNA, 22 nt, Human
aagaguggccccaccuggcccu

SEQ ID NO: 3850169 - RNA, 19 nt, Human
aagagugggggagagcagg

SEQ ID NO: 3850170 - RNA, 13 nt, Human
aagaguguacugg

SEQ ID NO: 3850171 - RNA, 14 nt, Human
aagaguucaagaaa

SEQ ID NO: 3850172 - RNA, 16 nt, Human
aagaguucaagaaaua

SEQ ID NO: 3850173 - RNA, 22 nt, Human
aagaguugccccgucucuguuc

SEQ ID NO: 3850174 - RNA, 17 nt, Human
aagaguugugcacgcag

SEQ ID NO: 3850175 - RNA, 19 nt, Human
aagaguuugccuuauaaau

SEQ ID NO: 3850176 - RNA, 13 nt, Human
aagaguuuuggga

SEQ ID NO: 3850177 - RNA, 21 nt, Human
aagauaaacguggauguuacu

SEQ ID NO: 3850178 - RNA, 12 nt, Human
aagauaaagaug

SEQ ID NO: 3850179 - RNA, 17 nt, Human
aagauaaagaugaucua

SEQ ID NO: 3850180 - RNA, 19 nt, Human
aagauaacaagaucuuuca

SEQ ID NO: 3850181 - RNA, 19 nt, Human
aagauaaggucugaauaau

SEQ ID NO: 3850182 - RNA, 21 nt, Human
aagauaaguguauuuuucaau

SEQ ID NO: 3850183 - RNA, 16 nt, Human
aagauaaguuggaaac

SEQ ID NO: 3850184 - RNA, 20 nt, Human
aagauaaguuggaaacacua

SEQ ID NO: 3850185 - RNA, 22 nt, Human
aagauaaguuggaaacacuaaa

SEQ ID NO: 3850186 - RNA, 16 nt, Human
aagauaauaauauaug

SEQ ID NO: 3850187 - RNA, 19 nt, Human
aagauaauauuaaggaaga

SEQ ID NO: 3850188 - RNA, 21 nt, Human
aagauaauauuaaggaagaca

SEQ ID NO: 3850189 - RNA, 15 nt, Human
aagauaaucucagug

SEQ ID NO: 3850190 - RNA, 12 nt, Human
aagauaauuaua

SEQ ID NO: 3850191 - RNA, 15 nt, Human
aagauaauucacugu

SEQ ID NO: 3850192 - RNA, 21 nt, Human
aagauaauugcuauuuauuuu

SEQ ID NO: 3850193 - RNA, 19 nt, Human
aagauaauuguugaaauuu

SEQ ID NO: 3850194 - RNA, 20 nt, Human
aagauacaaauuaauuuuac

SEQ ID NO: 3850195 - RNA, 21 nt, Human
aagauacacucaagcaugaag

SEQ ID NO: 3850196 - RNA, 22 nt, Human
aagauacagaacucuuucaaaa

SEQ ID NO: 3850197 - RNA, 13 nt, Human
aagauacaucaca

SEQ ID NO: 3850198 - RNA, 15 nt, Human
aagauaccaucagca

SEQ ID NO: 3850199 - RNA, 14 nt, Human
aagauaccuuaaaa

SEQ ID NO: 3850200 - RNA, 17 nt, Human
aagauaccuuaaaauuu

SEQ ID NO: 3850201 - RNA, 21 nt, Human
aagauaccuuaaaauuugaaa

SEQ ID NO: 3850202 - RNA, 15 nt, Human
aagauacgacuuuau

SEQ ID NO: 3850203 - RNA, 13 nt, Human
aagauacugaaau

SEQ ID NO: 3850204 - RNA, 16 nt, Human
aagauacugaaauaaa

SEQ ID NO: 3850205 - RNA, 22 nt, Human
aagauacuuggaccgaguagag

SEQ ID NO: 3850206 - RNA, 12 nt, Human
aagauacuuugu

SEQ ID NO: 3850207 - RNA, 16 nt, Human
aagauacuuuguauug

SEQ ID NO: 3850208 - RNA, 13 nt, Human
aagauagaagaaa

SEQ ID NO: 3850209 - RNA, 16 nt, Human
aagauagacagguccu

SEQ ID NO: 3850210 - RNA, 17 nt, Human
aagauagaguaaaaaga

SEQ ID NO: 3850211 - RNA, 16 nt, Human
aagauagauccuuuua

SEQ ID NO: 3850212 - RNA, 14 nt, Human
aagauagcagggca

SEQ ID NO: 3850213 - RNA, 15 nt, Human
aagauagcugugacu

SEQ ID NO: 3850214 - RNA, 17 nt, Human
aagauagcuucacccca

SEQ ID NO: 3850215 - RNA, 14 nt, Human
aagauaggcucugc

SEQ ID NO: 3850216 - RNA, 15 nt, Human
aagauaggcucugca

SEQ ID NO: 3850217 - RNA, 18 nt, Human
aagauaggcucugcacag

SEQ ID NO: 3850218 - RNA, 21 nt, Human
aagauaguguaacuugcuuaa

SEQ ID NO: 3850219 - RNA, 21 nt, Human
aagauauacuuguuuuuguaa

SEQ ID NO: 3850220 - RNA, 19 nt, Human
aagauauauuaaaaauaua

SEQ ID NO: 3850221 - RNA, 12 nt, Human
aagauauggaca

SEQ ID NO: 3850222 - RNA, 19 nt, Human
aagauaugugaagaaaaau

SEQ ID NO: 3850223 - RNA, 15 nt, Human
aagauauuguacaua

SEQ ID NO: 3850224 - RNA, 16 nt, Human
aagauauuguacauaa

SEQ ID NO: 3850225 - RNA, 15 nt, Human
aagauauuguucaaa

SEQ ID NO: 3850226 - RNA, 21 nt, Human
gugcauuggaagaccccaccc

SEQ ID NO: 3850227 - RNA, 17 nt, Human
gugcauugggauuuuag

SEQ ID NO: 3850228 - RNA, 19 nt, Human
gugcauugggauuuuagaa

SEQ ID NO: 3850229 - RNA, 23 nt, Human
gugcauuugugcuagaaauuuuc

SEQ ID NO: 3850230 - RNA, 23 nt, Human
gugccaaaaacaacaacaaaaug

SEQ ID NO: 3850231 - RNA, 21 nt, Human
gugccaaagaaaguggucuua

SEQ ID NO: 3850232 - RNA, 13 nt, Human
gugccaacacuca

SEQ ID NO: 3850233 - RNA, 21 nt, Human
gugccaacaguguuaggccug

SEQ ID NO: 3850234 - RNA, 18 nt, Human
gugccaaguccagguccu

SEQ ID NO: 3850235 - RNA, 21 nt, Human
gugccaaguccagguccuggu

SEQ ID NO: 3850236 - RNA, 17 nt, Human
gugccaauauguauugu

SEQ ID NO: 3850237 - RNA, 14 nt, Human
gugccaauuucaag

SEQ ID NO: 3850238 - RNA, 16 nt, Human
gugccaccaugccuca

SEQ ID NO: 3850239 - RNA, 18 nt, Human
gugccacccaccagggcg

SEQ ID NO: 3850240 - RNA, 18 nt, Human
gugccaccccgagggcug

SEQ ID NO: 3850241 - RNA, 21 nt, Human
gugccacccugggcucugugg

SEQ ID NO: 3850242 - RNA, 19 nt, Human
gugccacugcacuccaggc

SEQ ID NO: 3850243 - RNA, 23 nt, Human
gugccacugcccgagcuggugca

SEQ ID NO: 3850244 - RNA, 14 nt, Human
gugccagaagcuac

SEQ ID NO: 3850245 - RNA, 14 nt, Human
gugccagagccugg

SEQ ID NO: 3850246 - RNA, 15 nt, Human
gugccagagccuggg

SEQ ID NO: 3850247 - RNA, 18 nt, Human
gugccagagccuggggcu

SEQ ID NO: 3850248 - RNA, 22 nt, Human
gugccagaggaauccuggcagc

SEQ ID NO: 3850249 - RNA, 18 nt, Human
gugccagaggugggcagg

SEQ ID NO: 3850250 - RNA, 20 nt, Human
gugccagaggugggcaggug

SEQ ID NO: 3850251 - RNA, 17 nt, Human
gugccagcaaagcccca

SEQ ID NO: 3850252 - RNA, 12 nt, Human
gugccagcaacu

SEQ ID NO: 3850253 - RNA, 21 nt, Human
gugccagcaacugaauaaaua

SEQ ID NO: 3850254 - RNA, 13 nt, Human
gugccagccuucc

SEQ ID NO: 3850255 - RNA, 19 nt, Human
gugccagccuuccucugca

SEQ ID NO: 3850256 - RNA, 16 nt, Human
gugccaggaccaguca

SEQ ID NO: 3850257 - RNA, 21 nt, Human
gugccaggacuccccaggcca

SEQ ID NO: 3850258 - RNA, 23 nt, Human
gugccaggacuccccaggccagg

SEQ ID NO: 3850259 - RNA, 17 nt, Human
gugccaggcccggggcu

SEQ ID NO: 3850260 - RNA, 20 nt, Human
gugccaggcccggggcuggc

SEQ ID NO: 3850261 - RNA, 16 nt, Human
gugccaggugagguca

SEQ ID NO: 3850262 - RNA, 15 nt, Human
gugccagucgcgcug

SEQ ID NO: 3850263 - RNA, 17 nt, Human
gugccagucgcgcugcc

SEQ ID NO: 3850264 - RNA, 18 nt, Human
gugccagucuugugucug

SEQ ID NO: 3850265 - RNA, 17 nt, Human
gugccauagucacaugg

SEQ ID NO: 3850266 - RNA, 14 nt, Human
gugccaucagugcc

SEQ ID NO: 3850267 - RNA, 22 nt, Human
gugccauguaaauccccacugg

SEQ ID NO: 3850268 - RNA, 13 nt, Human
gugccauugucuu

SEQ ID NO: 3850269 - RNA, 14 nt, Human
gugccauugucuuu

SEQ ID NO: 3850270 - RNA, 16 nt, Human
gugcccaagcucagaa

SEQ ID NO: 3850271 - RNA, 20 nt, Human
gugcccaagcucagaaggcu

SEQ ID NO: 3850272 - RNA, 14 nt, Human
gugcccacagcccg

SEQ ID NO: 3850273 - RNA, 22 nt, Human
gugcccacagcccgcaugcagc

SEQ ID NO: 3850274 - RNA, 20 nt, Human
gugcccacaucccaggcuuc

SEQ ID NO: 3850275 - RNA, 23 nt, Human
gugcccacauguguccaucccag

SEQ ID NO: 3850276 - RNA, 23 nt, Human
gugcccacccugggagacagacc

SEQ ID NO: 3850277 - RNA, 16 nt, Human
gugcccagaauaaguu

SEQ ID NO: 3850278 - RNA, 20 nt, Human
gugcccagagaugggacugg

SEQ ID NO: 3850279 - RNA, 23 nt, Human
gugcccagcuagcugcagagcca

SEQ ID NO: 3850280 - RNA, 19 nt, Human
gugcccaggggcccacagg

SEQ ID NO: 3850281 - RNA, 20 nt, Human
gugcccaugggcacugcugg

SEQ ID NO: 3850282 - RNA, 15 nt, Human
gugccccaggaccag

SEQ ID NO: 3850283 - RNA, 21 nt, Human
gugccccaggaccagcucagg

SEQ ID NO: 3850284 - RNA, 18 nt, Human
gugccccaugccugucca

SEQ ID NO: 3850285 - RNA, 13 nt, Human
gugcccccacuga

SEQ ID NO: 3850286 - RNA, 15 nt, Human
gugcccccacugacc

SEQ ID NO: 3850287 - RNA, 12 nt, Human
gugcccccagac

SEQ ID NO: 3850288 - RNA, 20 nt, Human
gugccccccauccuggccca

SEQ ID NO: 3850289 - RNA, 20 nt, Human
gugcccccuccucucccauc

SEQ ID NO: 3850290 - RNA, 13 nt, Human
gugccccugcugc

SEQ ID NO: 3850291 - RNA, 22 nt, Human
gugccccuuccgccacuggggc

SEQ ID NO: 3850292 - RNA, 15 nt, Human
gugcccgccaccaca

SEQ ID NO: 3850293 - RNA, 21 nt, Human
gugcccuccugagggaggacc

SEQ ID NO: 3850294 - RNA, 14 nt, Human
gugcccucgcugcu

SEQ ID NO: 3850295 - RNA, 15 nt, Human
gugcccucgcugcuu

SEQ ID NO: 3850296 - RNA, 21 nt, Human
gugcccucucccacccucuuc

SEQ ID NO: 3850297 - RNA, 14 nt, Human
gugcccucugggcu

SEQ ID NO: 3850298 - RNA, 16 nt, Human
gugcccucugggcucu

SEQ ID NO: 3850299 - RNA, 19 nt, Human
gugcccucugggcucugag

SEQ ID NO: 3850300 - RNA, 21 nt, Human
ugcccugcccaccuggccucu

SEQ ID NO: 3850301 - RNA, 22 nt, Human
ugcccugcccaccuggccucug

SEQ ID NO: 3850302 - RNA, 23 nt, Human
ugcccugcccaccuggccucugc

SEQ ID NO: 3850303 - RNA, 14 nt, Human
ugcccugcccugcc

SEQ ID NO: 3850304 - RNA, 17 nt, Human
ugcccugccugagggcc

SEQ ID NO: 3850305 - RNA, 12 nt, Human
ugcccugcuccc

SEQ ID NO: 3850306 - RNA, 22 nt, Human
ugcccugcugagucccaggcug

SEQ ID NO: 3850307 - RNA, 23 nt, Human
ugcccugcugagucccaggcuga

SEQ ID NO: 3850308 - RNA, 11 nt, Human
ugcccugcugc

SEQ ID NO: 3850309 - RNA, 23 nt, Human
ugcccugcugccgccucccagcc

SEQ ID NO: 3850310 - RNA, 16 nt, Human
ugcccuggagguggcu

SEQ ID NO: 3850311 - RNA, 13 nt, Human
ugcccuggcccug

SEQ ID NO: 3850312 - RNA, 18 nt, Human
ugcccuggcccugaggug

SEQ ID NO: 3850313 - RNA, 11 nt, Human
ugcccuggcug

SEQ ID NO: 3850314 - RNA, 13 nt, Human
ugcccugggaaac

SEQ ID NO: 3850315 - RNA, 13 nt, Human
ugcccugggaggc

SEQ ID NO: 3850316 - RNA, 18 nt, Human
ugcccugguccagggaag

SEQ ID NO: 3850317 - RNA, 21 nt, Human
ugcccugguccagggaagcug

SEQ ID NO: 3850318 - RNA, 14 nt, Human
ugcccuggugcugc

SEQ ID NO: 3850319 - RNA, 18 nt, Human
ugcccuggugcugccaca

SEQ ID NO: 3850320 - RNA, 14 nt, Human
ugcccugguggaga

SEQ ID NO: 3850321 - RNA, 22 nt, Human
ugcccugguggagaaagcacug

SEQ ID NO: 3850322 - RNA, 15 nt, Human
ugcccugguuucacu

SEQ ID NO: 3850323 - RNA, 22 nt, Human
ugcccugguuucacuggcccaa

SEQ ID NO: 3850324 - RNA, 19 nt, Human
ugcccugguuuccugcccu

SEQ ID NO: 3850325 - RNA, 23 nt, Human
ugcccugguuuccugcccuggga

SEQ ID NO: 3850326 - RNA, 14 nt, Human
ugcccugugggacc

SEQ ID NO: 3850327 - RNA, 18 nt, Human
ugcccugugggaccccag

SEQ ID NO: 3850328 - RNA, 15 nt, Human
ugcccuguguacuuc

SEQ ID NO: 3850329 - RNA, 15 nt, Human
ugcccuuaaaucaua

SEQ ID NO: 3850330 - RNA, 17 nt, Human
ugcccuucacaguguuu

SEQ ID NO: 3850331 - RNA, 14 nt, Human
ugcccuucacccca

SEQ ID NO: 3850332 - RNA, 14 nt, Human
ugcccuucuccuua

SEQ ID NO: 3850333 - RNA, 16 nt, Human
ugcccuucuuucuacc

SEQ ID NO: 3850334 - RNA, 14 nt, Human
ugcccuugcccuga

SEQ ID NO: 3850335 - RNA, 17 nt, Human
ugcccuugcccugaccu

SEQ ID NO: 3850336 - RNA, 17 nt, Human
ugcccuugucccacuca

SEQ ID NO: 3850337 - RNA, 15 nt, Human
ugcccuugucugaga

SEQ ID NO: 3850338 - RNA, 15 nt, Human
ugcccuuuguccucc

SEQ ID NO: 3850339 - RNA, 20 nt, Human
ugcccuuuguccuccugcug

SEQ ID NO: 3850340 - RNA, 19 nt, Human
ugcccuuuuuucugccucc

SEQ ID NO: 3850341 - RNA, 21 nt, Human
ugcccuuuuuucugccuccuu

SEQ ID NO: 3850342 - RNA, 19 nt, Human
ugccgaaugugcagguuug

SEQ ID NO: 3850343 - RNA, 22 nt, Human
ugccgaaugugcagguuuguua

SEQ ID NO: 3850344 - RNA, 14 nt, Human
ugccgacacgcucc

SEQ ID NO: 3850345 - RNA, 13 nt, Human
ugccgacacuguu

SEQ ID NO: 3850346 - RNA, 19 nt, Human
ugccgaccccuaguucccu

SEQ ID NO: 3850347 - RNA, 23 nt, Human
ugccgaccgaggcuggagcuggc

SEQ ID NO: 3850348 - RNA, 14 nt, Human
ugccgaccucgucc

SEQ ID NO: 3850349 - RNA, 22 nt, Human
ugccgaccucguccucccccug

SEQ ID NO: 3850350 - RNA, 13 nt, Human
ugccgcaccccag

SEQ ID NO: 3850351 - RNA, 15 nt, Human
ugccgcaccccagag

SEQ ID NO: 3850352 - RNA, 15 nt, Human
ugccgcagagcuggc

SEQ ID NO: 3850353 - RNA, 17 nt, Human
ugccgcagagcuggccg

SEQ ID NO: 3850354 - RNA, 16 nt, Human
ugccgccccacccaga

SEQ ID NO: 3850355 - RNA, 17 nt, Human
ugccgcccccuccugaa

SEQ ID NO: 3850356 - RNA, 18 nt, Human
ugccgcccccuccugaac

SEQ ID NO: 3850357 - RNA, 17 nt, Human
ugccgccgccucgccca

SEQ ID NO: 3850358 - RNA, 20 nt, Human
ugccgccgccucgcccaccg

SEQ ID NO: 3850359 - RNA, 18 nt, Human
ugccgccgcuagguagag

SEQ ID NO: 3850360 - RNA, 22 nt, Human
ugccgccgcuagguagagucug

SEQ ID NO: 3850361 - RNA, 14 nt, Human
ugccgccucccagc

SEQ ID NO: 3850362 - RNA, 16 nt, Human
ugccgccucccagccu

SEQ ID NO: 3850363 - RNA, 20 nt, Human
ugccgccugcacuccucagg

SEQ ID NO: 3850364 - RNA, 12 nt, Human
ugccgccugccc

SEQ ID NO: 3850365 - RNA, 16 nt, Human
ugccgcgucgcccucc

SEQ ID NO: 3850366 - RNA, 18 nt, Human
ugccgcuaccucccuccc

SEQ ID NO: 3850367 - RNA, 23 nt, Human
ugccggacccggaggccgaggcc

SEQ ID NO: 3850368 - RNA, 21 nt, Human
ugccggagaggaagagacacu

SEQ ID NO: 3850369 - RNA, 18 nt, Human
ugccggauacaaacuggu

SEQ ID NO: 3850370 - RNA, 16 nt, Human
ugggcagagcugcauc

SEQ ID NO: 3850371 - RNA, 15 nt, Human
ugggcagaggaaagc

SEQ ID NO: 3850372 - RNA, 23 nt, Human
ugggcagaggaccaggcuguagg

SEQ ID NO: 3850373 - RNA, 21 nt, Human
ugggcagccagaccagcaggc

SEQ ID NO: 3850374 - RNA, 14 nt, Human
ugggcagccaggcu

SEQ ID NO: 3850375 - RNA, 16 nt, Human
ugggcagccaggcugc

SEQ ID NO: 3850376 - RNA, 11 nt, Human
ugggcagcccg

SEQ ID NO: 3850377 - RNA, 13 nt, Human
ugggcagcgcccu

SEQ ID NO: 3850378 - RNA, 17 nt, Human
ugggcagcgcccuuccu

SEQ ID NO: 3850379 - RNA, 15 nt, Human
ugggcagcugccucc

SEQ ID NO: 3850380 - RNA, 19 nt, Human
ugggcagcuuagggcccug

SEQ ID NO: 3850381 - RNA, 21 nt, Human
ugggcagcuuagggcccugga

SEQ ID NO: 3850382 - RNA, 22 nt, Human
ugggcagcuuagggcccuggag

SEQ ID NO: 3850383 - RNA, 13 nt, Human
ugggcaggaaaag

SEQ ID NO: 3850384 - RNA, 13 nt, Human
ugggcaggaccuc

SEQ ID NO: 3850385 - RNA, 16 nt, Human
ugggcaggaccucaga

SEQ ID NO: 3850386 - RNA, 13 nt, Human
ugggcaggaggga

SEQ ID NO: 3850387 - RNA, 16 nt, Human
ugggcaggagggaggu

SEQ ID NO: 3850388 - RNA, 13 nt, Human
ugggcagggagcg

SEQ ID NO: 3850389 - RNA, 17 nt, Human
ugggcagggaggcacca

SEQ ID NO: 3850390 - RNA, 21 nt, Human
ugggcagggaggcaccauuca

SEQ ID NO: 3850391 - RNA, 15 nt, Human
ugggcaggugggagc

SEQ ID NO: 3850392 - RNA, 16 nt, Human
ugggcaguuuuuugaa

SEQ ID NO: 3850393 - RNA, 15 nt, Human
ugggcauaaacuguu

SEQ ID NO: 3850394 - RNA, 22 nt, Human
ugggcauagaugcaggugagcc

SEQ ID NO: 3850395 - RNA, 20 nt, Human
ugggcauggggugggccucu

SEQ ID NO: 3850396 - RNA, 20 nt, Human
ugggcaugguaccagcccug

SEQ ID NO: 3850397 - RNA, 21 nt, Human
ugggcaugguaccagcccugg

SEQ ID NO: 3850398 - RNA, 12 nt, Human
ugggcauggugc

SEQ ID NO: 3850399 - RNA, 20 nt, Human
ugggcaugguguucuccugc

SEQ ID NO: 3850400 - RNA, 16 nt, Human
ugggcaugugggcuuc

SEQ ID NO: 3850401 - RNA, 13 nt, Human
ugggcauucaaau

SEQ ID NO: 3850402 - RNA, 18 nt, Human
ugggcauugauggggaag

SEQ ID NO: 3850403 - RNA, 23 nt, Human
ugggcauugauggggaaggaggc

SEQ ID NO: 3850404 - RNA, 17 nt, Human
ugggccaccccuccuag

SEQ ID NO: 3850405 - RNA, 16 nt, Human
ugggccaccgccuugc

SEQ ID NO: 3850406 - RNA, 22 nt, Human
ugggccacuucuggguggggca

SEQ ID NO: 3850407 - RNA, 21 nt, Human
ugggccagaaguaccagacua

SEQ ID NO: 3850408 - RNA, 18 nt, Human
ugggccagacaugccaca

SEQ ID NO: 3850409 - RNA, 16 nt, Human
ugggccagccccuccc

SEQ ID NO: 3850410 - RNA, 14 nt, Human
ugggccaggacagg

SEQ ID NO: 3850411 - RNA, 17 nt, Human
ugggccaggacaggccc

SEQ ID NO: 3850412 - RNA, 13 nt, Human
ugggccagggcug

SEQ ID NO: 3850413 - RNA, 20 nt, Human
ugggccagucuguggaucag

SEQ ID NO: 3850414 - RNA, 17 nt, Human
ugggccauacuggccuc

SEQ ID NO: 3850415 - RNA, 14 nt, Human
ugggccauguccaa

SEQ ID NO: 3850416 - RNA, 19 nt, Human
ugggccauguccaaagagg

SEQ ID NO: 3850417 - RNA, 23 nt, Human
ugggccauguccaaagaggcugc

SEQ ID NO: 3850418 - RNA, 19 nt, Human
ugggccauucuccacagca

SEQ ID NO: 3850419 - RNA, 14 nt, Human
ugggcccaacccug

SEQ ID NO: 3850420 - RNA, 16 nt, Human
ugggcccaacccuguc

SEQ ID NO: 3850421 - RNA, 22 nt, Human
ugggcccaagacagaugcccca

SEQ ID NO: 3850422 - RNA, 16 nt, Human
ugggcccacaccuccu

SEQ ID NO: 3850423 - RNA, 14 nt, Human
ugggcccacauccg

SEQ ID NO: 3850424 - RNA, 14 nt, Human
ugggcccagcuggg

SEQ ID NO: 3850425 - RNA, 15 nt, Human
ugggcccagcugggc

SEQ ID NO: 3850426 - RNA, 17 nt, Human
ugggcccaggaccagcu

SEQ ID NO: 3850427 - RNA, 19 nt, Human
ugggcccagggacaccagc

SEQ ID NO: 3850428 - RNA, 17 nt, Human
ugggcccaucucccugc

SEQ ID NO: 3850429 - RNA, 18 nt, Human
ugggcccaucucccugcu

SEQ ID NO: 3850430 - RNA, 17 nt, Human
ugggccccaccaccuag

SEQ ID NO: 3850431 - RNA, 18 nt, Human
ugggccccaccaccuagg

SEQ ID NO: 3850432 - RNA, 23 nt, Human
ugggccccaccaccuaggccacu

SEQ ID NO: 3850433 - RNA, 14 nt, Human
ugggccccagccca

SEQ ID NO: 3850434 - RNA, 17 nt, Human
ugggccccagcccaccc

SEQ ID NO: 3850435 - RNA, 18 nt, Human
ugggccccagcccacccu

SEQ ID NO: 3850436 - RNA, 20 nt, Human
ugggccccagcccacccucc

SEQ ID NO: 3850437 - RNA, 22 nt, Human
ugggccccagcccacccuccug

SEQ ID NO: 3850438 - RNA, 21 nt, Human
ugggcccccaaauggaaaugg

SEQ ID NO: 3850439 - RNA, 11 nt, Human
ugggccccucc

SEQ ID NO: 3850440 - RNA, 18 nt, Human
ugggccccucccuaccuc

SEQ ID NO: 3850441 - RNA, 20 nt, Human
ugggccccucccuaccucaa

SEQ ID NO: 3850442 - RNA, 15 nt, Human
ugggccccucuccca

SEQ ID NO: 3850443 - RNA, 15 nt, Human
ugggccccugccaga

SEQ ID NO: 3850444 - RNA, 15 nt, Human
ugggccccugccucu

SEQ ID NO: 3850445 - RNA, 23 nt, Human
ugggccccugccucucugcaggu

SEQ ID NO: 3850446 - RNA, 13 nt, Human
ugggcccucucuu

SEQ ID NO: 3850447 - RNA, 13 nt, Human
ugggcccucuggu

SEQ ID NO: 3850448 - RNA, 22 nt, Human
ugggcccugagucugggcagcu

SEQ ID NO: 3850449 - RNA, 12 nt, Human
ugggcccugcau

SEQ ID NO: 3850450 - RNA, 14 nt, Human
ugggcccugcaugu

SEQ ID NO: 3850451 - RNA, 18 nt, Human
ugggcccugccucuguuu

SEQ ID NO: 3850452 - RNA, 19 nt, Human
ugggccgggacccagggcc

SEQ ID NO: 3850453 - RNA, 20 nt, Human
ugggccguaucuccggcucc

SEQ ID NO: 3850454 - RNA, 14 nt, Human
ugggccuaggcugc

SEQ ID NO: 3850455 - RNA, 15 nt, Human
ugggccuauggagag

SEQ ID NO: 3850456 - RNA, 17 nt, Human
ugggccuauggagagcc

SEQ ID NO: 3850457 - RNA, 21 nt, Human
ugggccuauggagagcccugg

SEQ ID NO: 3850458 - RNA, 16 nt, Human
ugggccucaaggacuu

SEQ ID NO: 3850459 - RNA, 22 nt, Human
ugggccuccugugugugcgccu

SEQ ID NO: 3850460 - RNA, 15 nt, Human
ugggccucggccccu

SEQ ID NO: 3850461 - RNA, 18 nt, Human
ugggccugcuccagaccu

SEQ ID NO: 3850462 - RNA, 17 nt, Human
ugggccugcugcugaga

SEQ ID NO: 3850463 - RNA, 12 nt, Human
ugggccuggcau

SEQ ID NO: 3850464 - RNA, 15 nt, Human
ugggccugggcuccu

SEQ ID NO: 3850465 - RNA, 17 nt, Human
ugggccugggcuccugg

SEQ ID NO: 3850466 - RNA, 22 nt, Human
ugggccuggucucacccuggag

SEQ ID NO: 3850467 - RNA, 23 nt, Human
ugggccugguuaaauaaggcagg

SEQ ID NO: 3850468 - RNA, 15 nt, Human
ugggccuuaggaaga

SEQ ID NO: 3850469 - RNA, 23 nt, Human
ugggccuuagugggccagggcug

SEQ ID NO: 3850470 - RNA, 11 nt, Human
ugggccuucag

SEQ ID NO: 3850471 - RNA, 18 nt, Human
ugggccuucagggaguga

SEQ ID NO: 3850472 - RNA, 13 nt, Human
ugggccuugcuac

SEQ ID NO: 3850473 - RNA, 13 nt, Human
ugggccuuggccu

SEQ ID NO: 3850474 - RNA, 16 nt, Human
ugggcgcccuggaagc

SEQ ID NO: 3850475 - RNA, 20 nt, Human
ugggcgcccuggaagccggc

SEQ ID NO: 3850476 - RNA, 17 nt, Human
ugggcgccgugcugggc

SEQ ID NO: 3850477 - RNA, 22 nt, Human
ugggcgcugguccuuucuuccg

SEQ ID NO: 3850478 - RNA, 15 nt, Human
ugggcggcacagccu

SEQ ID NO: 3850479 - RNA, 16 nt, Human
ugggcggcugagagcc

SEQ ID NO: 3850480 - RNA, 15 nt, Human
ugggcggggccuugc

SEQ ID NO: 3850481 - RNA, 21 nt, Human
ugggcguacgcuggugcugag

SEQ ID NO: 3850482 - RNA, 19 nt, Human
ugggcguggucacugcugu

SEQ ID NO: 3850483 - RNA, 20 nt, Human
ugggcguggucacugcuguc

SEQ ID NO: 3850484 - RNA, 13 nt, Human
ugggcuacaagga

SEQ ID NO: 3850485 - RNA, 19 nt, Human
ugggcuacaugcugggguc

SEQ ID NO: 3850486 - RNA, 16 nt, Human
ugggcuacuuuguccu

SEQ ID NO: 3850487 - RNA, 19 nt, Human
ugggcuauuuggacucagg

SEQ ID NO: 3850488 - RNA, 18 nt, Human
ugggcucaaccagaaaag

SEQ ID NO: 3850489 - RNA, 21 nt, Human
ugggcucaagcaauccuccug

SEQ ID NO: 3850490 - RNA, 13 nt, Human
ugggcuccccucu

SEQ ID NO: 3850491 - RNA, 16 nt, Human
ugggcucccguguuuu

SEQ ID NO: 3850492 - RNA, 15 nt, Human
ugggcucccuuccca

SEQ ID NO: 3850493 - RNA, 14 nt, Human
ugggcucccuuccu

SEQ ID NO: 3850494 - RNA, 23 nt, Human
ugggcuccuccagggugugugcu

SEQ ID NO: 3850495 - RNA, 11 nt, Human
ugggcuccugg

SEQ ID NO: 3850496 - RNA, 13 nt, Human
ugggcuccuggac

SEQ ID NO: 3850497 - RNA, 16 nt, Human
ugggcucgucuuugca

SEQ ID NO: 3850498 - RNA, 16 nt, Human
ugggcucuccaccuca

SEQ ID NO: 3850499 - RNA, 19 nt, Human
ugggcucuccaccucagcc

SEQ ID NO: 3850500 - RNA, 20 nt, Human
ugggcucuccaccucagccu

SEQ ID NO: 3850501 - RNA, 22 nt, Human
ugggcucugcaauuccccucug

SEQ ID NO: 3850502 - RNA, 12 nt, Human
ugggcucugccc

SEQ ID NO: 3850503 - RNA, 19 nt, Human
ugggcucugccccagcucu

SEQ ID NO: 3850504 - RNA, 13 nt, Human
ugggcucugcuga

SEQ ID NO: 3850505 - RNA, 14 nt, Human
ugggcucugggagc

SEQ ID NO: 3850506 - RNA, 12 nt, Human
ugggcucugugc

SEQ ID NO: 3850507 - RNA, 17 nt, Human
ugggcucugugggcugc

SEQ ID NO: 3850508 - RNA, 19 nt, Human
ugggcugaacacuccaauu

SEQ ID NO: 3850509 - RNA, 18 nt, Human
ugcuaccaguauuuagaa

SEQ ID NO: 3850510 - RNA, 15 nt, Human
ugcuacccucccugc

SEQ ID NO: 3850511 - RNA, 17 nt, Human
ugcuacccucccugcug

SEQ ID NO: 3850512 - RNA, 19 nt, Human
ugcuacccucccugcuguc

SEQ ID NO: 3850513 - RNA, 21 nt, Human
ugcuacccucccugcuguccc

SEQ ID NO: 3850514 - RNA, 15 nt, Human
ugcuaccguugacuu

SEQ ID NO: 3850515 - RNA, 14 nt, Human
guggucacugcugu

SEQ ID NO: 3850516 - RNA, 15 nt, Human
guggucacugcuguc

SEQ ID NO: 3850517 - RNA, 22 nt, Human
guggucaggcguagaucaccag

SEQ ID NO: 3850518 - RNA, 23 nt, Human
guggucccaacaggaggacaauu

SEQ ID NO: 3850519 - RNA, 14 nt, Human
ugcucccagcagcc

SEQ ID NO: 3850520 - RNA, 13 nt, Human
ugcuccccacagc

SEQ ID NO: 3850521 - RNA, 14 nt, Human
ugcuccccacagcg

SEQ ID NO: 3850522 - RNA, 21 nt, Human
ugcuccccacagcgucccugg

SEQ ID NO: 3850523 - RNA, 13 nt, Human
ugcuccccacguc

SEQ ID NO: 3850524 - RNA, 17 nt, Human
ugcuccccagcccuggc

SEQ ID NO: 3850525 - RNA, 18 nt, Human
ugcuccccagcccuggcu

SEQ ID NO: 3850526 - RNA, 23 nt, Human
ugcuccccagcccuggcucugca

SEQ ID NO: 3850527 - RNA, 21 nt, Human
ugcucccccacccccucccca

SEQ ID NO: 3850528 - RNA, 15 nt, Human
ugcucccccauccuc

SEQ ID NO: 3850529 - RNA, 19 nt, Human
ugcucccccauccuccccu

SEQ ID NO: 3850530 - RNA, 20 nt, Human
ugcucccccauccuccccuu

SEQ ID NO: 3850531 - RNA, 22 nt, Human
ugcucccccauccuccccuucc

SEQ ID NO: 3850532 - RNA, 13 nt, Human
ugcucccccuuuu

SEQ ID NO: 3850533 - RNA, 17 nt, Human
ugcuccccucccuccuc

SEQ ID NO: 3850534 - RNA, 16 nt, Human
ugcuccccuuccccuu

SEQ ID NO: 3850535 - RNA, 19 nt, Human
ugcucccuaagccagccug

SEQ ID NO: 3850536 - RNA, 16 nt, Human
ugcucccuaccaccuc

SEQ ID NO: 3850537 - RNA, 20 nt, Human
ugcucccuaccaccucccca

SEQ ID NO: 3850538 - RNA, 19 nt, Human
ugcucccuccccugcccug

SEQ ID NO: 3850539 - RNA, 15 nt, Human
ugcucccugaagcca

SEQ ID NO: 3850540 - RNA, 17 nt, Human
ugcucccugaagccagc

SEQ ID NO: 3850541 - RNA, 21 nt, Human
ugcucccugacugggggcaga

SEQ ID NO: 3850542 - RNA, 18 nt, Human
ugcucccugguucugaug

SEQ ID NO: 3850543 - RNA, 21 nt, Human
ugcuccgcugcuccuuggcuu

SEQ ID NO: 3850544 - RNA, 18 nt, Human
ugcuccgugccuccacca

SEQ ID NO: 3850545 - RNA, 17 nt, Human
ugcuccguggaggaggu

SEQ ID NO: 3850546 - RNA, 11 nt, Human
ugcuccuccag

SEQ ID NO: 3850547 - RNA, 21 nt, Human
ugcuccuccagggccacgugc

SEQ ID NO: 3850548 - RNA, 13 nt, Human
ugcuccucccugg

SEQ ID NO: 3850549 - RNA, 14 nt, Human
ugcuccucccuggc

SEQ ID NO: 3850550 - RNA, 23 nt, Human
ugcuccucccuggcugcccuggc

SEQ ID NO: 3850551 - RNA, 12 nt, Human
ugcuccucucca

SEQ ID NO: 3850552 - RNA, 15 nt, Human
ugcuccucuccaggc

SEQ ID NO: 3850553 - RNA, 15 nt, Human
ugcuccucuucccca

SEQ ID NO: 3850554 - RNA, 20 nt, Human
ugcuccuggagccuuugaau

SEQ ID NO: 3850555 - RNA, 18 nt, Human
ugcuccuggaucucccug

SEQ ID NO: 3850556 - RNA, 19 nt, Human
ugcuccuggcccacugcau

SEQ ID NO: 3850557 - RNA, 17 nt, Human
ugcuccuggccuugcug

SEQ ID NO: 3850558 - RNA, 20 nt, Human
ugcuccuuagcugccaagcc

SEQ ID NO: 3850559 - RNA, 13 nt, Human
ugcuccuucccca

SEQ ID NO: 3850560 - RNA, 12 nt, Human
ugcuccuugggc

SEQ ID NO: 3850561 - RNA, 19 nt, Human
ugcuccuugggcccuuuga

SEQ ID NO: 3850562 - RNA, 21 nt, Human
ugcuccuugggcccuuugagu

SEQ ID NO: 3850563 - RNA, 15 nt, Human
ugcuccuuguuccua

SEQ ID NO: 3850564 - RNA, 23 nt, Human
ugcuccuuguuccuagaguagag

SEQ ID NO: 3850565 - RNA, 23 nt, Human
ugcucgcccuccuuucugugccc

SEQ ID NO: 3850566 - RNA, 13 nt, Human
ugcucgcccugcg

SEQ ID NO: 3850567 - RNA, 14 nt, Human
ugcucgcccugcgg

SEQ ID NO: 3850568 - RNA, 22 nt, Human
ugcucgccucggaucagcugag

SEQ ID NO: 3850569 - RNA, 14 nt, Human
ugcucgcuguugcu

SEQ ID NO: 3850570 - RNA, 15 nt, Human
ugcucgcuguugcug

SEQ ID NO: 3850571 - RNA, 19 nt, Human
ugcucgcuguugcugaaua

SEQ ID NO: 3850572 - RNA, 20 nt, Human
ugcucggagaagagcgcagu

SEQ ID NO: 3850573 - RNA, 15 nt, Human
ugcucggggugcaca

SEQ ID NO: 3850574 - RNA, 17 nt, Human
ugcucggggugcacagg

SEQ ID NO: 3850575 - RNA, 18 nt, Human
ugcucggggugcacagga

SEQ ID NO: 3850576 - RNA, 20 nt, Human
ugcucggggugcacaggagg

SEQ ID NO: 3850577 - RNA, 21 nt, Human
ugcucggggugcacaggaggg

SEQ ID NO: 3850578 - RNA, 15 nt, Human
ugcucuaaaauauuu

SEQ ID NO: 3850579 - RNA, 16 nt, Human
ugcucuaacagcccuc

SEQ ID NO: 3850580 - RNA, 15 nt, Human
ugcucuaagcacacg

SEQ ID NO: 3850581 - RNA, 18 nt, Human
ugcucuagaugagcuggg

SEQ ID NO: 3850582 - RNA, 21 nt, Human
ugcucuagaugagcugggccg

SEQ ID NO: 3850583 - RNA, 14 nt, Human
ugcucuagugccuu

SEQ ID NO: 3850584 - RNA, 14 nt, Human
ugcucuagugggac

SEQ ID NO: 3850585 - RNA, 23 nt, Human
ugcucuaucucacagcacacuca

SEQ ID NO: 3850586 - RNA, 18 nt, Human
ugcucuaugcuuuccaaa

SEQ ID NO: 3850587 - RNA, 20 nt, Human
ugcucuaugugcuuguaaaa

SEQ ID NO: 3850588 - RNA, 21 nt, Human
ugcucucaaaccccugaccuc

SEQ ID NO: 3850589 - RNA, 22 nt, Human
ugcucucacuguuuguuuuuau

SEQ ID NO: 3850590 - RNA, 17 nt, Human
ugcucuccaagcccagu

SEQ ID NO: 3850591 - RNA, 14 nt, Human
ugcucuccccugcc

SEQ ID NO: 3850592 - RNA, 16 nt, Human
ugcucuccccugcccu

SEQ ID NO: 3850593 - RNA, 20 nt, Human
ugcucucccgguucuuccag

SEQ ID NO: 3850594 - RNA, 21 nt, Human
ugcucucccucuucucaagug

SEQ ID NO: 3850595 - RNA, 22 nt, Human
ugcucucccucuucucaagugc

SEQ ID NO: 3850596 - RNA, 10 nt, Human
ugcucuccuc

SEQ ID NO: 3850597 - RNA, 11 nt, Human
ugcucuccucu

SEQ ID NO: 3850598 - RNA, 15 nt, Human
ugcucuccucuucua

SEQ ID NO: 3850599 - RNA, 14 nt, Human
ugcucucuacccag

SEQ ID NO: 3850600 - RNA, 16 nt, Human
ugcucucuacccagcc

SEQ ID NO: 3850601 - RNA, 17 nt, Human
ugcucucuacccagccc

SEQ ID NO: 3850602 - RNA, 17 nt, Human
ugcucucucaaauuguc

SEQ ID NO: 3850603 - RNA, 20 nt, Human
ugcucucucaaauugucagc

SEQ ID NO: 3850604 - RNA, 17 nt, Human
ugcucucugcagccagc

SEQ ID NO: 3850605 - RNA, 12 nt, Human
ugcucucugcca

SEQ ID NO: 3850606 - RNA, 13 nt, Human
ugcucucuguguc

SEQ ID NO: 3850607 - RNA, 11 nt, Human
ugcucugagaa

SEQ ID NO: 3850608 - RNA, 18 nt, Human
ugcucugaggcuuccaga

SEQ ID NO: 3850609 - RNA, 20 nt, Human
ugcucugaggcuuccagaga

SEQ ID NO: 3850610 - RNA, 19 nt, Human
ugcucugaugaagaggagu

SEQ ID NO: 3850611 - RNA, 15 nt, Human
ugcucugcaggcacc

SEQ ID NO: 3850612 - RNA, 22 nt, Human
ugcucugcgugucaccugugcu

SEQ ID NO: 3850613 - RNA, 10 nt, Human
ugcucugcug

SEQ ID NO: 3850614 - RNA, 12 nt, Human
ugcucuggaccu

SEQ ID NO: 3850615 - RNA, 13 nt, Human
ugcucuggaccug

SEQ ID NO: 3850616 - RNA, 23 nt, Human
ugcucugguuguuucuguuccaa

SEQ ID NO: 3850617 - RNA, 16 nt, Human
ugcucuguuugugggg

SEQ ID NO: 3850618 - RNA, 15 nt, Human
ugcucuuaagccuaa

SEQ ID NO: 3850619 - RNA, 13 nt, Human
ugcucuuaauugc

SEQ ID NO: 3850620 - RNA, 15 nt, Human
ugcucuuaauugcca

SEQ ID NO: 3850621 - RNA, 21 nt, Human
ugcucuuaauugccaccucua

SEQ ID NO: 3850622 - RNA, 21 nt, Human
ugcucuuacuacacugaggag

SEQ ID NO: 3850623 - RNA, 18 nt, Human
ugcucuuagcugucugcu

SEQ ID NO: 3850624 - RNA, 17 nt, Human
ugcucuuaugccauuug

SEQ ID NO: 3850625 - RNA, 14 nt, Human
ugcucuuauuucau

SEQ ID NO: 3850626 - RNA, 23 nt, Human
ugcucuucuguggaccacugcau

SEQ ID NO: 3850627 - RNA, 15 nt, Human
ugcucuugaacuccu

SEQ ID NO: 3850628 - RNA, 20 nt, Human
ugcucuugaacuccugaccu

SEQ ID NO: 3850629 - RNA, 15 nt, Human
ugcucuuggcuggac

SEQ ID NO: 3850630 - RNA, 19 nt, Human
ugcucuugggcaauauucu

SEQ ID NO: 3850631 - RNA, 21 nt, Human
ugcucuugggcaauauucucu

SEQ ID NO: 3850632 - RNA, 14 nt, Human
ugcucuuguagccc

SEQ ID NO: 3850633 - RNA, 23 nt, Human
ugcucuugucccacgugucuucc

SEQ ID NO: 3850634 - RNA, 18 nt, Human
ugcucuuguccuagcuug

SEQ ID NO: 3850635 - RNA, 15 nt, Human
ugcucuuguuuuuau

SEQ ID NO: 3850636 - RNA, 20 nt, Human
ugcucuuucccacccagccu

SEQ ID NO: 3850637 - RNA, 23 nt, Human
ugcucuuucccccuuccaucucu

SEQ ID NO: 3850638 - RNA, 12 nt, Human
ugcucuuucucu

SEQ ID NO: 3850639 - RNA, 13 nt, Human
ugcucuuucucug

SEQ ID NO: 3850640 - RNA, 14 nt, Human
ugcucuuucucugc

SEQ ID NO: 3850641 - RNA, 16 nt, Human
ugcucuuucucugcca

SEQ ID NO: 3850642 - RNA, 18 nt, Human
ugcucuuucucugccagu

SEQ ID NO: 3850643 - RNA, 20 nt, Human
ugcucuuuguuuugugucuc

SEQ ID NO: 3850644 - RNA, 15 nt, Human
ugcucuuuuuuacuc

SEQ ID NO: 3850645 - RNA, 20 nt, Human
ugcugaaaaccaucuggccu

SEQ ID NO: 3850646 - RNA, 23 nt, Human
ugcugaaaaccaucuggccuggc

SEQ ID NO: 3850647 - RNA, 14 nt, Human
ugcugaaaauggua

SEQ ID NO: 3850648 - RNA, 16 nt, Human
ugcugaaaauguccuu

SEQ ID NO: 3850649 - RNA, 16 nt, Human
ugcugaaaccaagggg

SEQ ID NO: 3850650 - RNA, 22 nt, Human
ugcugaaagagaaaagaggggu

SEQ ID NO: 3850651 - RNA, 20 nt, Human
ugcugaaagcccaaguaggg

SEQ ID NO: 3850652 - RNA, 21 nt, Human
ugcugaacauugcauauaacu

SEQ ID NO: 3850653 - RNA, 22 nt, Human
ugcugaagcuuauuaaugcuaa

SEQ ID NO: 3850654 - RNA, 23 nt, Human
ugcugaagcuuauuaaugcuaag

SEQ ID NO: 3850655 - RNA, 22 nt, Human
ugcugaagggaccuugaagggu

SEQ ID NO: 3850656 - RNA, 20 nt, Human
ugcugaauguugggacugcu

SEQ ID NO: 3850657 - RNA, 17 nt, Human
ugcugaauuuucacaug

SEQ ID NO: 3850658 - RNA, 23 nt, Human
ugcugaauuuucacaugaacaua

SEQ ID NO: 3850659 - RNA, 19 nt, Human
ugcugcuucucccaggcaa

SEQ ID NO: 3850660 - RNA, 21 nt, Human
ugcugcuucugaauacaaauu

SEQ ID NO: 3850661 - RNA, 19 nt, Human
ugcugcuuuaauugugaau

SEQ ID NO: 3850662 - RNA, 19 nt, Human
ugcugcuuuccccuguggg

SEQ ID NO: 3850663 - RNA, 16 nt, Human
ugcugcuuugauauau

SEQ ID NO: 3850664 - RNA, 23 nt, Human
ugcugcuuuuugagguggcacuu

SEQ ID NO: 3850665 - RNA, 19 nt, Human
ugcuggaaccugcaaaaaa

SEQ ID NO: 3850666 - RNA, 15 nt, Human
ugcuggaagcccagc

SEQ ID NO: 3850667 - RNA, 20 nt, Human
ugcuggacggcauuccugcu

SEQ ID NO: 3850668 - RNA, 16 nt, Human
ugcuggacgucuuucu

SEQ ID NO: 3850669 - RNA, 19 nt, Human
ugcuggacugucauagaaa

SEQ ID NO: 3850670 - RNA, 13 nt, Human
ugcuggagaagag

SEQ ID NO: 3850671 - RNA, 18 nt, Human
ugcuggagaagagaggag

SEQ ID NO: 3850672 - RNA, 12 nt, Human
ugcuggagaggu

SEQ ID NO: 3850673 - RNA, 13 nt, Human
ugcuggagccugu

SEQ ID NO: 3850674 - RNA, 19 nt, Human
ugcuggagccuguguaaca

SEQ ID NO: 3850675 - RNA, 21 nt, Human
ugcuggagccuguguaacagc

SEQ ID NO: 3850676 - RNA, 13 nt, Human
ugcuggagcucug

SEQ ID NO: 3850677 - RNA, 13 nt, Human
ugcuggaggacug

SEQ ID NO: 3850678 - RNA, 15 nt, Human
ugcuggaggugggag

SEQ ID NO: 3850679 - RNA, 15 nt, Human
guggucggugggacc

SEQ ID NO: 3850680 - RNA, 18 nt, Human
guggucuccacuggggau

SEQ ID NO: 3850681 - RNA, 14 nt, Human
guggucugaauguu

SEQ ID NO: 3850682 - RNA, 23 nt, Human
guggucugaauguucugacauua

SEQ ID NO: 3850683 - RNA, 24 nt, Human
guggucugaauguucugacauuaa

SEQ ID NO: 3850684 - RNA, 15 nt, Human
guggucugcaggcag

SEQ ID NO: 3850685 - RNA, 19 nt, Human
guggucugcucgggcccag

SEQ ID NO: 3850686 - RNA, 13 nt, Human
guggucuguuggc

SEQ ID NO: 3850687 - RNA, 19 nt, Human
guggucuucaaauugucuu

SEQ ID NO: 3850688 - RNA, 15 nt, Human
guggucuuuguaaga

SEQ ID NO: 3850689 - RNA, 19 nt, Human
guggucuuuguaagagugu

SEQ ID NO: 3850690 - RNA, 14 nt, Human
guggucuuuuccuc

SEQ ID NO: 3850691 - RNA, 14 nt, Human
guggugaccucugc

SEQ ID NO: 3850692 - RNA, 15 nt, Human
guggugacuuuggau

SEQ ID NO: 3850693 - RNA, 21 nt, Human
guggugagaggcauccaguau

SEQ ID NO: 3850694 - RNA, 17 nt, Human
guggugcgagugcguga

SEQ ID NO: 3850695 - RNA, 18 nt, Human
guggugcucaguuguaga

SEQ ID NO: 3850696 - RNA, 15 nt, Human
guggugcugacaaag

SEQ ID NO: 3850697 - RNA, 22 nt, Human
gugguggaaacuuuucuuaaaa

SEQ ID NO: 3850698 - RNA, 22 nt, Human
gugguggagccaguaaacagag

SEQ ID NO: 3850699 - RNA, 16 nt, Human
gugguggcacaggccc

SEQ ID NO: 3850700 - RNA, 21 nt, Human
gugguggcagggccuagcugc

SEQ ID NO: 3850701 - RNA, 13 nt, Human
gugguggccucag

SEQ ID NO: 3850702 - RNA, 14 nt, Human
gugguggccucagc

SEQ ID NO: 3850703 - RNA, 18 nt, Human
gugguggccuggucccug

SEQ ID NO: 3850704 - RNA, 18 nt, Human
gugguggcucacgccugu

SEQ ID NO: 3850705 - RNA, 18 nt, Human
gugguggcucaugccugu

SEQ ID NO: 3850706 - RNA, 18 nt, Human
guggugggacagggaccc

SEQ ID NO: 3850707 - RNA, 22 nt, Human
gugguggguucuuuggaaggag

SEQ ID NO: 3850708 - RNA, 11 nt, Human
guggugucacu

SEQ ID NO: 3850709 - RNA, 14 nt, Human
gugguguggagaag

SEQ ID NO: 3850710 - RNA, 22 nt, Human
gugguguggagaagccacaggc

SEQ ID NO: 3850711 - RNA, 15 nt, Human
gugguguuuccuggc

SEQ ID NO: 3850712 - RNA, 19 nt, Human
gugguguuuccuggcacug

SEQ ID NO: 3850713 - RNA, 13 nt, Human
gugguuacacagu

SEQ ID NO: 3850714 - RNA, 18 nt, Human
gugguuauggagagggug

SEQ ID NO: 3850715 - RNA, 22 nt, Human
gugguucacucuuggagccugc

SEQ ID NO: 3850716 - RNA, 18 nt, Human
gugguuccccaccgaagu

SEQ ID NO: 3850717 - RNA, 13 nt, Human
gugguuccucugc

SEQ ID NO: 3850718 - RNA, 19 nt, Human
gugguucuacaaucuauuu

SEQ ID NO: 3850719 - RNA, 19 nt, Human
gugguugcuguuuuccucc

SEQ ID NO: 3850720 - RNA, 18 nt, Human
gugguuuaggcuauuugu

SEQ ID NO: 3850721 - RNA, 18 nt, Human
gugguuuaguguaaaaau

SEQ ID NO: 3850722 - RNA, 17 nt, Human
gugguuugaucauuucu

SEQ ID NO: 3850723 - RNA, 21 nt, Human
gugguuugguuccucucuggu

SEQ ID NO: 3850724 - RNA, 23 nt, Human
gugguuuuagauuuucugguucu

SEQ ID NO: 3850725 - RNA, 18 nt, Human
gugguuuuccccucccug

SEQ ID NO: 3850726 - RNA, 19 nt, Human
gugguuuuccccucccugg

SEQ ID NO: 3850727 - RNA, 20 nt, Human
gugguuuuccccucccuggg

SEQ ID NO: 3850728 - RNA, 12 nt, Human
gugguuuucuua

SEQ ID NO: 3850729 - RNA, 19 nt, Human
gugguuuucuuuugccaug

SEQ ID NO: 3850730 - RNA, 16 nt, Human
gugguuuuucuuuucu

SEQ ID NO: 3850731 - RNA, 15 nt, Human
guguaaaaaaaccac

SEQ ID NO: 3850732 - RNA, 12 nt, Human
guguaaaaauga

SEQ ID NO: 3850733 - RNA, 17 nt, Human
guguaaaauauuuugaa

SEQ ID NO: 3850734 - RNA, 15 nt, Human
guguaaaaugugaag

SEQ ID NO: 3850735 - RNA, 14 nt, Human
guguaaacacaucu

SEQ ID NO: 3850736 - RNA, 15 nt, Human
guguaaacacaucua

SEQ ID NO: 3850737 - RNA, 13 nt, Human
guguaaaguuagu

SEQ ID NO: 3850738 - RNA, 16 nt, Human
guguaaaguuagucua

SEQ ID NO: 3850739 - RNA, 23 nt, Human
guguaacagcuccuugggaggaa

SEQ ID NO: 3850740 - RNA, 15 nt, Human
guguaacuugcuuaa

SEQ ID NO: 3850741 - RNA, 20 nt, Human
guguaacuugcuuaaauuuc

SEQ ID NO: 3850742 - RNA, 21 nt, Human
guguaacuugcuuaaauuucu

SEQ ID NO: 3850743 - RNA, 18 nt, Human
guguaagaaauacagacu

SEQ ID NO: 3850744 - RNA, 21 nt, Human
guguaagauuuguuuuuaaac

SEQ ID NO: 3850745 - RNA, 19 nt, Human
guguaagggccagaaauau

SEQ ID NO: 3850746 - RNA, 21 nt, Human
guguaaguauucuuauuuaau

SEQ ID NO: 3850747 - RNA, 22 nt, Human
guguaagugugaguaagagcug

SEQ ID NO: 3850748 - RNA, 14 nt, Human
guguaauaaagugu

SEQ ID NO: 3850749 - RNA, 15 nt, Human
guguaauaaaguguu

SEQ ID NO: 3850750 - RNA, 13 nt, Human
guguaauaagaca

SEQ ID NO: 3850751 - RNA, 15 nt, Human
guguaauaagacaua

SEQ ID NO: 3850752 - RNA, 14 nt, Human
guguaaucaauaaa

SEQ ID NO: 3850753 - RNA, 15 nt, Human
guguaaucaauaaac

SEQ ID NO: 3850754 - RNA, 16 nt, Human
guguaaucaauaaacg

SEQ ID NO: 3850755 - RNA, 22 nt, Human
guguaauguagcguguuuacau

SEQ ID NO: 3850756 - RNA, 20 nt, Human
guguaauuuaaaauugugau

SEQ ID NO: 3850757 - RNA, 22 nt, Human
guguaauuuaaaauugugaugu

SEQ ID NO: 3850758 - RNA, 23 nt, Human
guguaauuuaaaauugugaugug

SEQ ID NO: 3850759 - RNA, 15 nt, Human
guguaauuucuuugc

SEQ ID NO: 3850760 - RNA, 23 nt, Human
guguaauuuuguucuaguuuuca

SEQ ID NO: 3850761 - RNA, 15 nt, Human
guguaauuuuucugu

SEQ ID NO: 3850762 - RNA, 16 nt, Human
guguaauuuuucugua

SEQ ID NO: 3850763 - RNA, 15 nt, Human
guguacacgggacug

SEQ ID NO: 3850764 - RNA, 21 nt, Human
guguacacgggacugacgcaa

SEQ ID NO: 3850765 - RNA, 12 nt, Human
guguacagugug

SEQ ID NO: 3850766 - RNA, 14 nt, Human
guguacauaacuga

SEQ ID NO: 3850767 - RNA, 19 nt, Human
guguacccccgcccaggcu

SEQ ID NO: 3850768 - RNA, 20 nt, Human
guguaccgcgucuacccugg

SEQ ID NO: 3850769 - RNA, 20 nt, Human
guguaccuguguacauaacu

SEQ ID NO: 3850770 - RNA, 16 nt, Human
guguacguggagaggg

SEQ ID NO: 3850771 - RNA, 20 nt, Human
guguacguggagagggauga

SEQ ID NO: 3850772 - RNA, 18 nt, Human
guguacucacugaagccu

SEQ ID NO: 3850773 - RNA, 17 nt, Human
guguacucuggccucug

SEQ ID NO: 3850774 - RNA, 18 nt, Human
guguacucuggccucugu

SEQ ID NO: 3850775 - RNA, 12 nt, Human
guguacuguaua

SEQ ID NO: 3850776 - RNA, 11 nt, Human
guguacugugu

SEQ ID NO: 3850777 - RNA, 23 nt, Human
guguagaagcauuccuucuuuga

SEQ ID NO: 3850778 - RNA, 15 nt, Human
guguagaguuaagaa

SEQ ID NO: 3850779 - RNA, 14 nt, Human
guguagccaagguc

SEQ ID NO: 3850780 - RNA, 14 nt, Human
guguagccugugca

SEQ ID NO: 3850781 - RNA, 13 nt, Human
guguagccuuuuu

SEQ ID NO: 3850782 - RNA, 15 nt, Human
guguagcuacagaga

SEQ ID NO: 3850783 - RNA, 22 nt, Human
guguagcugugaccugcugagc

SEQ ID NO: 3850784 - RNA, 15 nt, Human
guguaggcuuuacuu

SEQ ID NO: 3850785 - RNA, 20 nt, Human
guguaggcuuuacuuagcuu

SEQ ID NO: 3850786 - RNA, 15 nt, Human
guguaguucauguaa

SEQ ID NO: 3850787 - RNA, 17 nt, Human
guguaguugaacugaua

SEQ ID NO: 3850788 - RNA, 12 nt, Human
guguauaaacaa

SEQ ID NO: 3850789 - RNA, 13 nt, Human
guguauauauaca

SEQ ID NO: 3850790 - RNA, 14 nt, Human
guguauauguaugu

SEQ ID NO: 3850791 - RNA, 19 nt, Human
guguauauuauuuggcagu

SEQ ID NO: 3850792 - RNA, 16 nt, Human
guguaugacuaaagag

SEQ ID NO: 3850793 - RNA, 16 nt, Human
guguauguagaagcau

SEQ ID NO: 3850794 - RNA, 16 nt, Human
guguaugugugugugu

SEQ ID NO: 3850795 - RNA, 16 nt, Human
guguauguuuuucagu

SEQ ID NO: 3850796 - RNA, 13 nt, Human
guguauuccaaga

SEQ ID NO: 3850797 - RNA, 20 nt, Human
guguauuccaagacaugucu

SEQ ID NO: 3850798 - RNA, 18 nt, Human
guguauuuaacagggagg

SEQ ID NO: 3850799 - RNA, 17 nt, Human
guguauuuauugaagaa

SEQ ID NO: 3850800 - RNA, 20 nt, Human
guguauuuauugaagaaaca

SEQ ID NO: 3850801 - RNA, 22 nt, Human
guguauuuauuuuccuccccag

SEQ ID NO: 3850802 - RNA, 14 nt, Human
guguauuucauuua

SEQ ID NO: 3850803 - RNA, 19 nt, Human
guguauuuccagugcaauu

SEQ ID NO: 3850804 - RNA, 21 nt, Human
uggaagugugggucugugugu

SEQ ID NO: 3850805 - RNA, 23 nt, Human
uggaagugugggucugugugugu

SEQ ID NO: 3850806 - RNA, 18 nt, Human
uggaaguguguguggcag

SEQ ID NO: 3850807 - RNA, 18 nt, Human
uggaaguuaaagugaggc

SEQ ID NO: 3850808 - RNA, 20 nt, Human
uggaaguuuagcucugagaa

SEQ ID NO: 3850809 - RNA, 18 nt, Human
uggaauaaaaggcuugaa

SEQ ID NO: 3850810 - RNA, 22 nt, Human
uggaauaaaaggcuugaagcug

SEQ ID NO: 3850811 - RNA, 15 nt, Human
uggaauaacauguaa

SEQ ID NO: 3850812 - RNA, 19 nt, Human
uggaauaacauguaauuaa

SEQ ID NO: 3850813 - RNA, 18 nt, Human
uggaauaagacagagacc

SEQ ID NO: 3850814 - RNA, 22 nt, Human
uggaauacuaaaaaucaugaga

SEQ ID NO: 3850815 - RNA, 12 nt, Human
uggaauacuuuu

SEQ ID NO: 3850816 - RNA, 13 nt, Human
uggaauacuuuuu

SEQ ID NO: 3850817 - RNA, 17 nt, Human
uggaauaggaauaagcu

SEQ ID NO: 3850818 - RNA, 18 nt, Human
uggaauaguauccuccag

SEQ ID NO: 3850819 - RNA, 20 nt, Human
uggaauaguauccuccaggu

SEQ ID NO: 3850820 - RNA, 23 nt, Human
uggaauaguauccuccagguuuu

SEQ ID NO: 3850821 - RNA, 21 nt, Human
uggaauauaaggaaagcaaua

SEQ ID NO: 3850822 - RNA, 12 nt, Human
uggaauauuaaa

SEQ ID NO: 3850823 - RNA, 23 nt, Human
uggaauauuccccuaucucuaga

SEQ ID NO: 3850824 - RNA, 21 nt, Human
uggaaucaggaauauuuucca

SEQ ID NO: 3850825 - RNA, 23 nt, Human
uggaaucaggaauauuuuccaaa

SEQ ID NO: 3850826 - RNA, 20 nt, Human
uggaaucauuguccagagcu

SEQ ID NO: 3850827 - RNA, 19 nt, Human
uggaaucuaccaacuguuu

SEQ ID NO: 3850828 - RNA, 19 nt, Human
uggaaucuagaagaaauga

SEQ ID NO: 3850829 - RNA, 22 nt, Human
uggaaucuagaagaaaugaaau

SEQ ID NO: 3850830 - RNA, 17 nt, Human
uggaaugaauuaaauaa

SEQ ID NO: 3850831 - RNA, 15 nt, Human
uggaaugagaauuua

SEQ ID NO: 3850832 - RNA, 17 nt, Human
uggaaugagugugcaug

SEQ ID NO: 3850833 - RNA, 15 nt, Human
uggaaugcacucaga

SEQ ID NO: 3850834 - RNA, 16 nt, Human
uggaaugcuuccuaga

SEQ ID NO: 3850835 - RNA, 15 nt, Human
uggaauggauuuuuc

SEQ ID NO: 3850836 - RNA, 17 nt, Human
uggaaugguuauaaaag

SEQ ID NO: 3850837 - RNA, 23 nt, Human
uggaauguggccccugaacaaga

SEQ ID NO: 3850838 - RNA, 17 nt, Human
uggaauuaaaacaaugu

SEQ ID NO: 3850839 - RNA, 17 nt, Human
uggaauuaaccuggugc

SEQ ID NO: 3850840 - RNA, 18 nt, Human
uggaauuaaccuggugcu

SEQ ID NO: 3850841 - RNA, 20 nt, Human
uggaauuaaccuggugcugg

SEQ ID NO: 3850842 - RNA, 21 nt, Human
uggaauuaugcuggcuucuga

SEQ ID NO: 3850843 - RNA, 14 nt, Human
uggaauucacaaag

SEQ ID NO: 3850844 - RNA, 13 nt, Human
uggaauucuaaca

SEQ ID NO: 3850845 - RNA, 22 nt, Human
uggaauucuuagucacaaaaua

SEQ ID NO: 3850846 - RNA, 16 nt, Human
uggaauugauuugcau

SEQ ID NO: 3850847 - RNA, 17 nt, Human
uggaauugauuugcauu

SEQ ID NO: 3850848 - RNA, 19 nt, Human
uggaauugauuugcauuga

SEQ ID NO: 3850849 - RNA, 11 nt, Human
uggaauugcuu

SEQ ID NO: 3850850 - RNA, 18 nt, Human
uggaauugcuuaccaaag

SEQ ID NO: 3850851 - RNA, 17 nt, Human
uggaauugggagcuugg

SEQ ID NO: 3850852 - RNA, 14 nt, Human
uggaauuguggcua

SEQ ID NO: 3850853 - RNA, 20 nt, Human
uggaauuguggcuauccuga

SEQ ID NO: 3850854 - RNA, 18 nt, Human
uggaauuuauaauucagu

SEQ ID NO: 3850855 - RNA, 16 nt, Human
uggaauuugccugcug

SEQ ID NO: 3850856 - RNA, 14 nt, Human
uggaauuuguaagu

SEQ ID NO: 3850857 - RNA, 17 nt, Human
uggaauuuuccuccuuu

SEQ ID NO: 3850858 - RNA, 21 nt, Human
uggaauuuuccuccuuucucu

SEQ ID NO: 3850859 - RNA, 23 nt, Human
uggaauuuugcaaagauuuaauc

SEQ ID NO: 3850860 - RNA, 20 nt, Human
uggaauuuuuauuaugcaua

SEQ ID NO: 3850861 - RNA, 24 nt, Human
uggaauuuuuauuaugcauaacug

SEQ ID NO: 3850862 - RNA, 19 nt, Human
uggaauuuuugcuugacuu

SEQ ID NO: 3850863 - RNA, 21 nt, Human
uggaauuuuugcuugacuuca

SEQ ID NO: 3850864 - RNA, 15 nt, Human
uggaauuuuuuauuc

SEQ ID NO: 3850865 - RNA, 20 nt, Human
uggaauuuuuuauucuugug

SEQ ID NO: 3850866 - RNA, 19 nt, Human
uggacaaaacaagaaagac

SEQ ID NO: 3850867 - RNA, 14 nt, Human
uggacaaaauggaa

SEQ ID NO: 3850868 - RNA, 19 nt, Human
uggacaaacccuucuuuua

SEQ ID NO: 3850869 - RNA, 16 nt, Human
uggacaaacuggaguc

SEQ ID NO: 3850870 - RNA, 20 nt, Human
uggacaaaugugaagaugca

SEQ ID NO: 3850871 - RNA, 16 nt, Human
uggacaagagguacag

SEQ ID NO: 3850872 - RNA, 14 nt, Human
uggacaaggagguc

SEQ ID NO: 3850873 - RNA, 16 nt, Human
uggacaaucaugaaau

SEQ ID NO: 3850874 - RNA, 13 nt, Human
uggacacaggccu

SEQ ID NO: 3850875 - RNA, 15 nt, Human
uggacacagggugac

SEQ ID NO: 3850876 - RNA, 18 nt, Human
uggacaccaggagucccu

SEQ ID NO: 3850877 - RNA, 21 nt, Human
uggacaccaggagucccuggu

SEQ ID NO: 3850878 - RNA, 21 nt, Human
uggacaccccuuauccaggac

SEQ ID NO: 3850879 - RNA, 15 nt, Human
uggacaccggaaaca

SEQ ID NO: 3850880 - RNA, 12 nt, Human
uggacaccugcc

SEQ ID NO: 3850881 - RNA, 13 nt, Human
uggacaccugccc

SEQ ID NO: 3850882 - RNA, 15 nt, Human
uggacacgcucagug

SEQ ID NO: 3850883 - RNA, 16 nt, Human
uggacacuacacccag

SEQ ID NO: 3850884 - RNA, 18 nt, Human
uggacacuacacccagca

SEQ ID NO: 3850885 - RNA, 12 nt, Human
guuagaucuagu

SEQ ID NO: 3850886 - RNA, 11 nt, Human
guuagauguuu

SEQ ID NO: 3850887 - RNA, 16 nt, Human
guuagauuaagaaaua

SEQ ID NO: 3850888 - RNA, 14 nt, Human
guuagcacuguuga

SEQ ID NO: 3850889 - RNA, 17 nt, Human
guuagccaauauuuuuc

SEQ ID NO: 3850890 - RNA, 22 nt, Human
guuagcguuucggccuucauaa

SEQ ID NO: 3850891 - RNA, 15 nt, Human
guuagcuccuguggc

SEQ ID NO: 3850892 - RNA, 20 nt, Human
guuagcuccuguggccccac

SEQ ID NO: 3850893 - RNA, 11 nt, Human
guuagcuggag

SEQ ID NO: 3850894 - RNA, 17 nt, Human
guuaggaaauaaaaccu

SEQ ID NO: 3850895 - RNA, 18 nt, Human
guuaggaaauaaaaccuu

SEQ ID NO: 3850896 - RNA, 22 nt, Human
guuaggaaauaaaaccuuucaa

SEQ ID NO: 3850897 - RNA, 17 nt, Human
guuaggaugcucaguug

SEQ ID NO: 3850898 - RNA, 15 nt, Human
guuaggauuuaacag

SEQ ID NO: 3850899 - RNA, 18 nt, Human
guuaggcugggcccagag

SEQ ID NO: 3850900 - RNA, 20 nt, Human
guuagggaaaacauuccauc

SEQ ID NO: 3850901 - RNA, 15 nt, Human
guuagggaagagaaa

SEQ ID NO: 3850902 - RNA, 18 nt, Human
guuagggaagagaaacag

SEQ ID NO: 3850903 - RNA, 15 nt, Human
guuagguacagagac

SEQ ID NO: 3850904 - RNA, 15 nt, Human
guuaggucucaauac

SEQ ID NO: 3850905 - RNA, 23 nt, Human
guuaguaacaugaggggacauuu

SEQ ID NO: 3850906 - RNA, 20 nt, Human
guuaguaaucuguauaauac

SEQ ID NO: 3850907 - RNA, 21 nt, Human
guuaguagcauguugagccag

SEQ ID NO: 3850908 - RNA, 20 nt, Human
guuagucgugagcucuugug

SEQ ID NO: 3850909 - RNA, 22 nt, Human
guuagucucuuguauuaaacuc

SEQ ID NO: 3850910 - RNA, 17 nt, Human
guuaguguuuuaagaaa

SEQ ID NO: 3850911 - RNA, 21 nt, Human
guuaguguuuuaagaaaugua

SEQ ID NO: 3850912 - RNA, 17 nt, Human
guuaguuauagaugucu

SEQ ID NO: 3850913 - RNA, 13 nt, Human
guuaguuucuugg

SEQ ID NO: 3850914 - RNA, 16 nt, Human
guuaguuucuuuggga

SEQ ID NO: 3850915 - RNA, 16 nt, Human
guuaguuuguauauau

SEQ ID NO: 3850916 - RNA, 22 nt, Human
guuauaaaaaaugguucagaau

SEQ ID NO: 3850917 - RNA, 12 nt, Human
guuauaaaagug

SEQ ID NO: 3850918 - RNA, 14 nt, Human
guuauaaagauaca

SEQ ID NO: 3850919 - RNA, 18 nt, Human
guuauacaaccuucauuu

SEQ ID NO: 3850920 - RNA, 18 nt, Human
guuauacaguuauaaaau

SEQ ID NO: 3850921 - RNA, 20 nt, Human
guuauacaguuauaaaauua

SEQ ID NO: 3850922 - RNA, 17 nt, Human
guuauacaugacacuga

SEQ ID NO: 3850923 - RNA, 19 nt, Human
guuauacaugacacugaaa

SEQ ID NO: 3850924 - RNA, 19 nt, Human
guuauagaacuucauggau

SEQ ID NO: 3850925 - RNA, 20 nt, Human
guuauagacagucguuccca

SEQ ID NO: 3850926 - RNA, 18 nt, Human
guuauagguccuuuagaa

SEQ ID NO: 3850927 - RNA, 21 nt, Human
guuauagguccuuuagaaaca

SEQ ID NO: 3850928 - RNA, 15 nt, Human
guuauaguauaucug

SEQ ID NO: 3850929 - RNA, 16 nt, Human
guuauaguauaucugg

SEQ ID NO: 3850930 - RNA, 21 nt, Human
guuauagugaauacugcuaca

SEQ ID NO: 3850931 - RNA, 15 nt, Human
guuauagugaauuau

SEQ ID NO: 3850932 - RNA, 15 nt, Human
guuauagugcaauau

SEQ ID NO: 3850933 - RNA, 16 nt, Human
guuauauaaagagaaa

SEQ ID NO: 3850934 - RNA, 19 nt, Human
guuauauaaagagaaaauu

SEQ ID NO: 3850935 - RNA, 16 nt, Human
guuauauauaaauaua

SEQ ID NO: 3850936 - RNA, 16 nt, Human
guuauauccccugcua

SEQ ID NO: 3850937 - RNA, 21 nt, Human
guuauauuucagauguaaugu

SEQ ID NO: 3850938 - RNA, 17 nt, Human
guuaucaaaauagucua

SEQ ID NO: 3850939 - RNA, 16 nt, Human
guuaucacugugcagu

SEQ ID NO: 3850940 - RNA, 13 nt, Human
guuaucaugaauu

SEQ ID NO: 3850941 - RNA, 16 nt, Human
guuaucaugaauuuua

SEQ ID NO: 3850942 - RNA, 20 nt, Human
guuaucaugaauuuuaaagu

SEQ ID NO: 3850943 - RNA, 23 nt, Human
guuaucauguuaguaauaccucu

SEQ ID NO: 3850944 - RNA, 17 nt, Human
guuaucauuuuuuccug

SEQ ID NO: 3850945 - RNA, 20 nt, Human
guuaucauuuuuuccuguuu

SEQ ID NO: 3850946 - RNA, 20 nt, Human
guuauccaccugccuuggcu

SEQ ID NO: 3850947 - RNA, 21 nt, Human
guuaucccuuccuuuuagccu

SEQ ID NO: 3850948 - RNA, 16 nt, Human
guucauguaaauaaua

SEQ ID NO: 3850949 - RNA, 20 nt, Human
guucauguuuggugcauaga

SEQ ID NO: 3850950 - RNA, 16 nt, Human
guucauucauauuaca

SEQ ID NO: 3850951 - RNA, 18 nt, Human
guucauuugugugcucau

SEQ ID NO: 3850952 - RNA, 18 nt, Human
guucauuuguuauucuua

SEQ ID NO: 3850953 - RNA, 15 nt, Human
guucauuuguuuguu

SEQ ID NO: 3850954 - RNA, 19 nt, Human
guuccaaaagccaauggcu

SEQ ID NO: 3850955 - RNA, 15 nt, Human
guuccaaaugaaugu

SEQ ID NO: 3850956 - RNA, 17 nt, Human
guuccaaccacugaauc

SEQ ID NO: 3850957 - RNA, 13 nt, Human
guuccaagacauu

SEQ ID NO: 3850958 - RNA, 15 nt, Human
guuccaagacauugu

SEQ ID NO: 3850959 - RNA, 21 nt, Human
guuccaagacauugucaauaa

SEQ ID NO: 3850960 - RNA, 16 nt, Human
guuccaagagucuaaa

SEQ ID NO: 3850961 - RNA, 13 nt, Human
guuccaaggccag

SEQ ID NO: 3850962 - RNA, 19 nt, Human
guuccaaguccaauaagac

SEQ ID NO: 3850963 - RNA, 20 nt, Human
guuccacagaguaagacauu

SEQ ID NO: 3850964 - RNA, 14 nt, Human
guuccacaguugcc

SEQ ID NO: 3850965 - RNA, 18 nt, Human
guuccacaguugccacca

SEQ ID NO: 3850966 - RNA, 14 nt, Human
guuccacugagcuc

SEQ ID NO: 3850967 - RNA, 15 nt, Human
guuccacugagcucc

SEQ ID NO: 3850968 - RNA, 14 nt, Human
guuccagaaaguaa

SEQ ID NO: 3850969 - RNA, 23 nt, Human
guuccagcaauucuccugccuca

SEQ ID NO: 3850970 - RNA, 13 nt, Human
guuccagccugcc

SEQ ID NO: 3850971 - RNA, 20 nt, Human
guuccagggucccucugugu

SEQ ID NO: 3850972 - RNA, 23 nt, Human
guuccaucuccuauaaucuguca

SEQ ID NO: 3850973 - RNA, 21 nt, Human
guuccauuguuuggagacauu

SEQ ID NO: 3850974 - RNA, 21 nt, Human
guucccaagagcaucaugccu

SEQ ID NO: 3850975 - RNA, 22 nt, Human
guucccagugacacuucagaga

SEQ ID NO: 3850976 - RNA, 23 nt, Human
guucccauccucuucuuuuagca

SEQ ID NO: 3850977 - RNA, 14 nt, Human
guucccauguuaaa

SEQ ID NO: 3850978 - RNA, 20 nt, Human
guucccauuugcuccuuucu

SEQ ID NO: 3850979 - RNA, 17 nt, Human
guuccccacuggagcag

SEQ ID NO: 3850980 - RNA, 20 nt, Human
guuccccacuguaucuaggc

SEQ ID NO: 3850981 - RNA, 19 nt, Human
guuccccaucuggguccuu

SEQ ID NO: 3850982 - RNA, 23 nt, Human
guuccccaucuggguccuugcac

SEQ ID NO: 3850983 - RNA, 21 nt, Human
guucccccuucacaaagccca

SEQ ID NO: 3850984 - RNA, 23 nt, Human
guuccccuaguaagugccuucca

SEQ ID NO: 3850985 - RNA, 22 nt, Human
guuccccuccuccacucucccc

SEQ ID NO: 3850986 - RNA, 18 nt, Human
guucccguuucuccaccu

SEQ ID NO: 3850987 - RNA, 15 nt, Human
guucccucucccugu

SEQ ID NO: 3850988 - RNA, 17 nt, Human
guucccucugcucagcc

SEQ ID NO: 3850989 - RNA, 21 nt, Human
guucccucugcuccuggagcc

SEQ ID NO: 3850990 - RNA, 17 nt, Human
guucccugaaaacccag

SEQ ID NO: 3850991 - RNA, 15 nt, Human
guucccugaaacacg

SEQ ID NO: 3850992 - RNA, 18 nt, Human
guucccuguucuuccucc

SEQ ID NO: 3850993 - RNA, 14 nt, Human
guucccuuggccuc

SEQ ID NO: 3850994 - RNA, 19 nt, Human
guucccuuuccuuccaucc

SEQ ID NO: 3850995 - RNA, 20 nt, Human
guucccuuugacgccauccc

SEQ ID NO: 3850996 - RNA, 21 nt, Human
guucccuuugacgccauccca

SEQ ID NO: 3850997 - RNA, 17 nt, Human
guucccuuugcuccacc

SEQ ID NO: 3850998 - RNA, 20 nt, Human
guucccuuugucuuucaaac

SEQ ID NO: 3850999 - RNA, 20 nt, Human
guuccgaaaccaaagaagaa

SEQ ID NO: 3851000 - RNA, 21 nt, Human
guuccgaaaccaaagaagaaa

SEQ ID NO: 3851001 - RNA, 14 nt, Human
guuccgcacuuucc

SEQ ID NO: 3851002 - RNA, 22 nt, Human
guuccggaauccuguccucagc

SEQ ID NO: 3851003 - RNA, 21 nt, Human
guuccuaagaagcuucuaaua

SEQ ID NO: 3851004 - RNA, 15 nt, Human
guuccuacacaggac

SEQ ID NO: 3851005 - RNA, 16 nt, Human
guuccuacacaggaca

SEQ ID NO: 3851006 - RNA, 18 nt, Human
guuccuacacaggacagg

SEQ ID NO: 3851007 - RNA, 16 nt, Human
guuccuaggggaauga

SEQ ID NO: 3851008 - RNA, 22 nt, Human
guuccuaggggaaugagggggc

SEQ ID NO: 3851009 - RNA, 17 nt, Human
guuccuccccgccuucc

SEQ ID NO: 3851010 - RNA, 23 nt, Human
guuccuccccuccuccuggacuc

SEQ ID NO: 3851011 - RNA, 13 nt, Human
guuccucgcccug

SEQ ID NO: 3851012 - RNA, 22 nt, Human
guuccucucugguggcucuuug

SEQ ID NO: 3851013 - RNA, 12 nt, Human
guuccucugccu

SEQ ID NO: 3851014 - RNA, 13 nt, Human
guuccucugccug

SEQ ID NO: 3851015 - RNA, 14 nt, Human
guuccucuuugcau

SEQ ID NO: 3851016 - RNA, 21 nt, Human
guuccugaauucuauuugcug

SEQ ID NO: 3851017 - RNA, 21 nt, Human
guuccugacaucacagcagcc

SEQ ID NO: 3851018 - RNA, 12 nt, Human
guuccugcaugc

SEQ ID NO: 3851019 - RNA, 22 nt, Human
guuccugcugcugucugggugc

SEQ ID NO: 3851020 - RNA, 12 nt, Human
guuccuggcaau

SEQ ID NO: 3851021 - RNA, 14 nt, Human
guuccuggcaguuu

SEQ ID NO: 3851022 - RNA, 23 nt, Human
guuccuggcaguuuaaaaaaauu

SEQ ID NO: 3851023 - RNA, 15 nt, Human
guuccugugcacagc

SEQ ID NO: 3851024 - RNA, 16 nt, Human
guuccugugcacagcc

SEQ ID NO: 3851025 - RNA, 14 nt, Human
guuccuuacugcag

SEQ ID NO: 3851026 - RNA, 15 nt, Human
guuccuuacugcaga

SEQ ID NO: 3851027 - RNA, 13 nt, Human
guuccuuagaccu

SEQ ID NO: 3851028 - RNA, 12 nt, Human
guuccuucccaa

SEQ ID NO: 3851029 - RNA, 14 nt, Human
guuccuucccaauc

SEQ ID NO: 3851030 - RNA, 19 nt, Human
guuccuuccucugagccuu

SEQ ID NO: 3851031 - RNA, 20 nt, Human
guuccuucuggugucugcuu

SEQ ID NO: 3851032 - RNA, 18 nt, Human
guucgacagugaauauuc

SEQ ID NO: 3851033 - RNA, 13 nt, Human
guucgcagagcuu

SEQ ID NO: 3851034 - RNA, 17 nt, Human
guucgcagccacccuga

SEQ ID NO: 3851035 - RNA, 16 nt, Human
guucgccuggagcccu

SEQ ID NO: 3851036 - RNA, 12 nt, Human
guucgcuuggcu

SEQ ID NO: 3851037 - RNA, 18 nt, Human
guucggauuuggggugga

SEQ ID NO: 3851038 - RNA, 14 nt, Human
guucguucuguuua

SEQ ID NO: 3851039 - RNA, 23 nt, Human
guucguucuuguucuguuuuguu

SEQ ID NO: 3851040 - RNA, 12 nt, Human
guucuaaagcuc

SEQ ID NO: 3851041 - RNA, 12 nt, Human
guucuaaaguuc

SEQ ID NO: 3851042 - RNA, 13 nt, Human
guucuaaaguucu

SEQ ID NO: 3851043 - RNA, 22 nt, Human
guucuaacagugaaguuuuacu

SEQ ID NO: 3851044 - RNA, 13 nt, Human
guucuaaccuccu

SEQ ID NO: 3851045 - RNA, 16 nt, Human
guucuaaccuuuacau

SEQ ID NO: 3851046 - RNA, 22 nt, Human
guucuaagaugugauauucuaa

SEQ ID NO: 3851047 - RNA, 13 nt, Human
guucuaagauucu

SEQ ID NO: 3851048 - RNA, 22 nt, Human
guucuaaggccuaggauucuaa

SEQ ID NO: 3851049 - RNA, 17 nt, Human
guucuaaggcucugaga

SEQ ID NO: 3851050 - RNA, 17 nt, Human
uggagaaauuauuuaau

SEQ ID NO: 3851051 - RNA, 19 nt, Human
uggagaaauuauuuaauaa

SEQ ID NO: 3851052 - RNA, 21 nt, Human
uggagaaauuauuuaauaaaa

SEQ ID NO: 3851053 - RNA, 17 nt, Human
uggagaacuccuagggu

SEQ ID NO: 3851054 - RNA, 14 nt, Human
uggagaagaacuga

SEQ ID NO: 3851055 - RNA, 14 nt, Human
uggagaagcacacu

SEQ ID NO: 3851056 - RNA, 18 nt, Human
uggagaagccacaggccu

SEQ ID NO: 3851057 - RNA, 22 nt, Human
uggagaagccacaggccugaga

SEQ ID NO: 3851058 - RNA, 21 nt, Human
uggagaagcucccugaaguaa

SEQ ID NO: 3851059 - RNA, 15 nt, Human
uggagaagcugcagg

SEQ ID NO: 3851060 - RNA, 18 nt, Human
uggagaagcugcaggcuu

SEQ ID NO: 3851061 - RNA, 11 nt, Human
uggagaaggaa

SEQ ID NO: 3851062 - RNA, 16 nt, Human
uggagaaucacaggcu

SEQ ID NO: 3851063 - RNA, 19 nt, Human
uggagaaucacaggcuggg

SEQ ID NO: 3851064 - RNA, 21 nt, Human
uggagaaugcaccauacucau

SEQ ID NO: 3851065 - RNA, 20 nt, Human
uggagacaaugcagaugcca

SEQ ID NO: 3851066 - RNA, 18 nt, Human
uggagacaaugucugcag

SEQ ID NO: 3851067 - RNA, 22 nt, Human
uggagacaaugucugcagcccu

SEQ ID NO: 3851068 - RNA, 12 nt, Human
uggagacagccc

SEQ ID NO: 3851069 - RNA, 21 nt, Human
uggagacagccccagagcagg

SEQ ID NO: 3851070 - RNA, 19 nt, Human
uggagaccaugcagagcgc

SEQ ID NO: 3851071 - RNA, 19 nt, Human
uggagacccugcaaacaga

SEQ ID NO: 3851072 - RNA, 19 nt, Human
uggagaccucuccuuccua

SEQ ID NO: 3851073 - RNA, 14 nt, Human
uggagaccuuaccc

SEQ ID NO: 3851074 - RNA, 12 nt, Human
uggagacgugga

SEQ ID NO: 3851075 - RNA, 13 nt, Human
uggagacuccugc

SEQ ID NO: 3851076 - RNA, 14 nt, Human
uggagacuccugcc

SEQ ID NO: 3851077 - RNA, 20 nt, Human
uggagacugcuucccauccu

SEQ ID NO: 3851078 - RNA, 20 nt, Human
uggagacuggggggcuugaa

SEQ ID NO: 3851079 - RNA, 17 nt, Human
uggagacugucucaaga

SEQ ID NO: 3851080 - RNA, 20 nt, Human
uggagacugucuggcccccc

SEQ ID NO: 3851081 - RNA, 21 nt, Human
uggagacugucuggccccccu

SEQ ID NO: 3851082 - RNA, 11 nt, Human
uggagagaagu

SEQ ID NO: 3851083 - RNA, 16 nt, Human
uggagagcccugggac

SEQ ID NO: 3851084 - RNA, 18 nt, Human
uggagagcccugggaccg

SEQ ID NO: 3851085 - RNA, 20 nt, Human
uggagagcuagaaccuggag

SEQ ID NO: 3851086 - RNA, 11 nt, Human
uggagagcugg

SEQ ID NO: 3851087 - RNA, 20 nt, Human
uggagagcuggagccuggug

SEQ ID NO: 3851088 - RNA, 19 nt, Human
uggagagcuggugcccgga

SEQ ID NO: 3851089 - RNA, 21 nt, Human
uggagaggagggaugcugccu

SEQ ID NO: 3851090 - RNA, 22 nt, Human
uggagaggagggaugcugccug

SEQ ID NO: 3851091 - RNA, 16 nt, Human
uggagagggaauguga

SEQ ID NO: 3851092 - RNA, 15 nt, Human
uguauguaaaugugc

SEQ ID NO: 3851093 - RNA, 21 nt, Human
uguauguaacaauuguuuguu

SEQ ID NO: 3851094 - RNA, 15 nt, Human
uguauguagaagcau

SEQ ID NO: 3851095 - RNA, 13 nt, Human
uguauguauaauu

SEQ ID NO: 3851096 - RNA, 15 nt, Human
uguauguauaauuca

SEQ ID NO: 3851097 - RNA, 17 nt, Human
uguaugucaaagcuuug

SEQ ID NO: 3851098 - RNA, 21 nt, Human
uguaugucagacauccauguu

SEQ ID NO: 3851099 - RNA, 18 nt, Human
uguaugucucgugguagg

SEQ ID NO: 3851100 - RNA, 11 nt, Human
uguaugucugu

SEQ ID NO: 3851101 - RNA, 14 nt, Human
uguaugucuuggac

SEQ ID NO: 3851102 - RNA, 19 nt, Human
uguaugucuuggacacugu

SEQ ID NO: 3851103 - RNA, 17 nt, Human
uguaugugcgugugugc

SEQ ID NO: 3851104 - RNA, 12 nt, Human
uguaugugugaa

SEQ ID NO: 3851105 - RNA, 15 nt, Human
uguauguguguuuuu

SEQ ID NO: 3851106 - RNA, 17 nt, Human
uggccagggugagagcu

SEQ ID NO: 3851107 - RNA, 16 nt, Human
uggccagguggccacu

SEQ ID NO: 3851108 - RNA, 14 nt, Human
uggccaguccaggc

SEQ ID NO: 3851109 - RNA, 21 nt, Human
uggccaguccaggcugccgug

SEQ ID NO: 3851110 - RNA, 23 nt, Human
uggccaguccaggcugccguggg

SEQ ID NO: 3851111 - RNA, 16 nt, Human
uggccaguggcuggau

SEQ ID NO: 3851112 - RNA, 23 nt, Human
uggccaguggcuggaucugugag

SEQ ID NO: 3851113 - RNA, 14 nt, Human
uggccagugucugu

SEQ ID NO: 3851114 - RNA, 22 nt, Human
uggccauaagcaacaauuuuca

SEQ ID NO: 3851115 - RNA, 18 nt, Human
uggccauauuuaccucag

SEQ ID NO: 3851116 - RNA, 19 nt, Human
uggccauauuuaccucagc

SEQ ID NO: 3851117 - RNA, 23 nt, Human
uggccauauuuaccucagccugg

SEQ ID NO: 3851118 - RNA, 15 nt, Human
uggccaucccuguga

SEQ ID NO: 3851119 - RNA, 16 nt, Human
uggccaucuccacccc

SEQ ID NO: 3851120 - RNA, 15 nt, Human
uggccaugacccugc

SEQ ID NO: 3851121 - RNA, 15 nt, Human
uggccaugccucagc

SEQ ID NO: 3851122 - RNA, 18 nt, Human
uggccaugccucagcccu

SEQ ID NO: 3851123 - RNA, 17 nt, Human
uggccaugcuccucuuc

SEQ ID NO: 3851124 - RNA, 13 nt, Human
uggccauggccug

SEQ ID NO: 3851125 - RNA, 14 nt, Human
uggccaugggaggc

SEQ ID NO: 3851126 - RNA, 15 nt, Human
uggccaugggaggcc

SEQ ID NO: 3851127 - RNA, 16 nt, Human
uggccaugggaggccu

SEQ ID NO: 3851128 - RNA, 23 nt, Human
uggccaugggaggccuuucccua

SEQ ID NO: 3851129 - RNA, 16 nt, Human
uggccaugguaccccc

SEQ ID NO: 3851130 - RNA, 20 nt, Human
uggccaugguccccaagacc

SEQ ID NO: 3851131 - RNA, 22 nt, Human
uggccauucuuuuuuucuuggc

SEQ ID NO: 3851132 - RNA, 19 nt, Human
uggccauuuagccaccauc

SEQ ID NO: 3851133 - RNA, 19 nt, Human
uggcccaaguggcagagcu

SEQ ID NO: 3851134 - RNA, 21 nt, Human
uggcccaaguggcagagcuug

SEQ ID NO: 3851135 - RNA, 14 nt, Human
uggcccaccaggcc

SEQ ID NO: 3851136 - RNA, 23 nt, Human
uggcccaccccacccacuucugc

SEQ ID NO: 3851137 - RNA, 13 nt, Human
uggcccacugcau

SEQ ID NO: 3851138 - RNA, 10 nt, Human
uggcccagcc

SEQ ID NO: 3851139 - RNA, 22 nt, Human
uggcccagccaaacccugucug

SEQ ID NO: 3851140 - RNA, 19 nt, Human
uggcccagcccugcuggcc

SEQ ID NO: 3851141 - RNA, 20 nt, Human
uggcccagcccugcuggccg

SEQ ID NO: 3851142 - RNA, 23 nt, Human
uggcccagccggccucucuggcc

SEQ ID NO: 3851143 - RNA, 11 nt, Human
uggcccagccu

SEQ ID NO: 3851144 - RNA, 20 nt, Human
uggcccagcggccccuccca

SEQ ID NO: 3851145 - RNA, 21 nt, Human
uggcccagcggccccucccac

SEQ ID NO: 3851146 - RNA, 13 nt, Human
uggcccagcuccc

SEQ ID NO: 3851147 - RNA, 19 nt, Human
uggcccaggaguuuggcca

SEQ ID NO: 3851148 - RNA, 13 nt, Human
uggcccagggcau

SEQ ID NO: 3851149 - RNA, 17 nt, Human
uggcccagggcccagag

SEQ ID NO: 3851150 - RNA, 20 nt, Human
uggcccagggcccagagccc

SEQ ID NO: 3851151 - RNA, 23 nt, Human
uggcccagggcccagagcccagc

SEQ ID NO: 3851152 - RNA, 19 nt, Human
uggcccagggggcuuccug

SEQ ID NO: 3851153 - RNA, 18 nt, Human
uggcccaggguggccaca

SEQ ID NO: 3851154 - RNA, 17 nt, Human
uggcccaggugaguccu

SEQ ID NO: 3851155 - RNA, 13 nt, Human
uggcccaguguca

SEQ ID NO: 3851156 - RNA, 20 nt, Human
uggcccauagaaacaugaca

SEQ ID NO: 3851157 - RNA, 23 nt, Human
uggcccaucaguguacccccgcc

SEQ ID NO: 3851158 - RNA, 17 nt, Human
uggcccauccccccuca

SEQ ID NO: 3851159 - RNA, 15 nt, Human
uggcccauucuacuu

SEQ ID NO: 3851160 - RNA, 21 nt, Human
uggcccauucuacuugcucug

SEQ ID NO: 3851161 - RNA, 20 nt, Human
uggccccaagggcaaaauuc

SEQ ID NO: 3851162 - RNA, 18 nt, Human
uggccccacccugggccc

SEQ ID NO: 3851163 - RNA, 23 nt, Human
uggccccaccuggcccucucuga

SEQ ID NO: 3851164 - RNA, 18 nt, Human
uggccccagcccugcugg

SEQ ID NO: 3851165 - RNA, 20 nt, Human
uggccccagcccugcugggg

SEQ ID NO: 3851166 - RNA, 18 nt, Human
uggccccagccuggccca

SEQ ID NO: 3851167 - RNA, 15 nt, Human
uggccccaggaccug

SEQ ID NO: 3851168 - RNA, 14 nt, Human
uggccccagggcac

SEQ ID NO: 3851169 - RNA, 19 nt, Human
uggccccaugucucucaga

SEQ ID NO: 3851170 - RNA, 17 nt, Human
uggcccccacaugguga

SEQ ID NO: 3851171 - RNA, 18 nt, Human
uggcccccacuggcugug

SEQ ID NO: 3851172 - RNA, 15 nt, Human
uggccccccuggucc

SEQ ID NO: 3851173 - RNA, 21 nt, Human
uggccccccugguccccuccu

SEQ ID NO: 3851174 - RNA, 16 nt, Human
uggcccccgagcuggg

SEQ ID NO: 3851175 - RNA, 17 nt, Human
uggcccccgagcugggg

SEQ ID NO: 3851176 - RNA, 19 nt, Human
uggcccccgagcugggggc

SEQ ID NO: 3851177 - RNA, 23 nt, Human
uggcccccgggaggacgggaccc

SEQ ID NO: 3851178 - RNA, 17 nt, Human
uggcccccuuucccggg

SEQ ID NO: 3851179 - RNA, 18 nt, Human
uggcccccuuucccgggc

SEQ ID NO: 3851180 - RNA, 20 nt, Human
uggccccgccgccugguacu

SEQ ID NO: 3851181 - RNA, 21 nt, Human
uggccccucaaaucguccagc

SEQ ID NO: 3851182 - RNA, 13 nt, Human
uggccccucaggg

SEQ ID NO: 3851183 - RNA, 14 nt, Human
uggccccucugacc

SEQ ID NO: 3851184 - RNA, 16 nt, Human
uggccccucugaccug

SEQ ID NO: 3851185 - RNA, 18 nt, Human
uggccccucugaccugca

SEQ ID NO: 3851186 - RNA, 14 nt, Human
uggccccugaacaa

SEQ ID NO: 3851187 - RNA, 23 nt, Human
uggccccuuugggcccugcaugu

SEQ ID NO: 3851188 - RNA, 14 nt, Human
uggcccgacagccu

SEQ ID NO: 3851189 - RNA, 14 nt, Human
uggcccucaguuuc

SEQ ID NO: 3851190 - RNA, 17 nt, Human
uggcccucuccccugcc

SEQ ID NO: 3851191 - RNA, 19 nt, Human
uggcccucuccccugcccc

SEQ ID NO: 3851192 - RNA, 18 nt, Human
uggcccucucccuuaccc

SEQ ID NO: 3851193 - RNA, 24 nt, Human
uggcccucucugaaggaggccacc

SEQ ID NO: 3851194 - RNA, 15 nt, Human
uggcccucugguaga

SEQ ID NO: 3851195 - RNA, 14 nt, Human
uggcccucuucuua

SEQ ID NO: 3851196 - RNA, 16 nt, Human
uggcccugaggugugg

SEQ ID NO: 3851197 - RNA, 18 nt, Human
uggcccugaggugugggg

SEQ ID NO: 3851198 - RNA, 12 nt, Human
uggcccugcccu

SEQ ID NO: 3851199 - RNA, 11 nt, Human
uggcccugccu

SEQ ID NO: 3851200 - RNA, 16 nt, Human
uggcccugccuucuuc

SEQ ID NO: 3851201 - RNA, 13 nt, Human
uggcccuggcccu

SEQ ID NO: 3851202 - RNA, 14 nt, Human
uggcccuggccugc

SEQ ID NO: 3851203 - RNA, 17 nt, Human
uggcccuggccugcugg

SEQ ID NO: 3851204 - RNA, 19 nt, Human
uggcccuggcucugcuguc

SEQ ID NO: 3851205 - RNA, 22 nt, Human
uggcccugggagaaucgcuccu

SEQ ID NO: 3851206 - RNA, 12 nt, Human
uggcccugggcg

SEQ ID NO: 3851207 - RNA, 21 nt, Human
uggcccugggcggggcguggg

SEQ ID NO: 3851208 - RNA, 16 nt, Human
uggcccuggggccugu

SEQ ID NO: 3851209 - RNA, 13 nt, Human
uggcccugggguc

SEQ ID NO: 3851210 - RNA, 19 nt, Human
uggcccuggggucccacga

SEQ ID NO: 3851211 - RNA, 22 nt, Human
uggcccugucccucccaccucu

SEQ ID NO: 3851212 - RNA, 21 nt, Human
uggcccuuacuugcuucucua

SEQ ID NO: 3851213 - RNA, 18 nt, Human
uggcccuuccuccuccac

SEQ ID NO: 3851214 - RNA, 20 nt, Human
uggcccuuccuccuccacca

SEQ ID NO: 3851215 - RNA, 17 nt, Human
uggcccuuccuggacag

SEQ ID NO: 3851216 - RNA, 18 nt, Human
uggcccuuuccuuccaga

SEQ ID NO: 3851217 - RNA, 16 nt, Human
uggccgaggacuuuga

SEQ ID NO: 3851218 - RNA, 18 nt, Human
uggccgaggguccuggcu

SEQ ID NO: 3851219 - RNA, 20 nt, Human
uggccgaggguccuggcucc

SEQ ID NO: 3851220 - RNA, 19 nt, Human
uggccgaguccaagcuggg

SEQ ID NO: 3851221 - RNA, 22 nt, Human
uggccgcaccuaaagcagccag

SEQ ID NO: 3851222 - RNA, 15 nt, Human
uggccgcccccugcc

SEQ ID NO: 3851223 - RNA, 23 nt, Human
uggccgcgccaaauaaugucucu

SEQ ID NO: 3851224 - RNA, 16 nt, Human
uggccggacacccgac

SEQ ID NO: 3851225 - RNA, 22 nt, Human
uggccggagcaaacucugcugu

SEQ ID NO: 3851226 - RNA, 14 nt, Human
uggccggccagcca

SEQ ID NO: 3851227 - RNA, 17 nt, Human
uggccggccagccagcc

SEQ ID NO: 3851228 - RNA, 23 nt, Human
uggccgggaccccgagccuggcu

SEQ ID NO: 3851229 - RNA, 13 nt, Human
uggccgggcacag

SEQ ID NO: 3851230 - RNA, 16 nt, Human
uggccgggcacagcug

SEQ ID NO: 3851231 - RNA, 12 nt, Human
uggccgggcagg

SEQ ID NO: 3851232 - RNA, 22 nt, Human
uggccggucugcaagucagagg

SEQ ID NO: 3851233 - RNA, 14 nt, Human
uggccgugggccug

SEQ ID NO: 3851234 - RNA, 19 nt, Human
uggccgugggccuggggua

SEQ ID NO: 3851235 - RNA, 19 nt, Human
uggccguugauguuggcug

SEQ ID NO: 3851236 - RNA, 21 nt, Human
guuuggauauguaaaacauuu

SEQ ID NO: 3851237 - RNA, 16 nt, Human
guuuggauguaauuua

SEQ ID NO: 3851238 - RNA, 16 nt, Human
guuuggauuuuuaauu

SEQ ID NO: 3851239 - RNA, 18 nt, Human
guuuggcgggccaaggac

SEQ ID NO: 3851240 - RNA, 18 nt, Human
guuuggcugugucuaaac

SEQ ID NO: 3851241 - RNA, 22 nt, Human
guuuggcugugucuaaacugca

SEQ ID NO: 3851242 - RNA, 19 nt, Human
guuugggauccuauugaac

SEQ ID NO: 3851243 - RNA, 16 nt, Human
guuugggccccucucc

SEQ ID NO: 3851244 - RNA, 22 nt, Human
guuuggggaaugcggccgcauu

SEQ ID NO: 3851245 - RNA, 21 nt, Human
guuuggggcaggaguagcuga

SEQ ID NO: 3851246 - RNA, 23 nt, Human
guuuggggcaggaguagcugagc

SEQ ID NO: 3851247 - RNA, 17 nt, Human
guuuggggcgaggcaga

SEQ ID NO: 3851248 - RNA, 20 nt, Human
guuuggguaaaauacuuuua

SEQ ID NO: 3851249 - RNA, 17 nt, Human
guuuggguuuuuuuccu

SEQ ID NO: 3851250 - RNA, 16 nt, Human
guuuggugcaaaguau

SEQ ID NO: 3851251 - RNA, 15 nt, Human
guuugguguguuccc

SEQ ID NO: 3851252 - RNA, 13 nt, Human
guuugguuuacau

SEQ ID NO: 3851253 - RNA, 14 nt, Human
guuugguuuacauu

SEQ ID NO: 3851254 - RNA, 15 nt, Human
guuugguuuacauuu

SEQ ID NO: 3851255 - RNA, 20 nt, Human
guuugguuuacauuuaaagc

SEQ ID NO: 3851256 - RNA, 17 nt, Human
guuugguuuuaaaauac

SEQ ID NO: 3851257 - RNA, 13 nt, Human
guuugguuuuuau

SEQ ID NO: 3851258 - RNA, 22 nt, Human
guuugguuuuuauuucuccuuu

SEQ ID NO: 3851259 - RNA, 15 nt, Human
guuuguaaauaagag

SEQ ID NO: 3851260 - RNA, 17 nt, Human
guuuguaaauaagagau

SEQ ID NO: 3851261 - RNA, 18 nt, Human
guuuguaaauaagagauu

SEQ ID NO: 3851262 - RNA, 20 nt, Human
guuuguaaauguuauuucug

SEQ ID NO: 3851263 - RNA, 15 nt, Human
guuuguaacaagaaa

SEQ ID NO: 3851264 - RNA, 13 nt, Human
guuuguaugaaac

SEQ ID NO: 3851265 - RNA, 13 nt, Human
guuuguaugugug

SEQ ID NO: 3851266 - RNA, 21 nt, Human
guuugucauuagccugaguag

SEQ ID NO: 3851267 - RNA, 15 nt, Human
guuugucuauuuuaa

SEQ ID NO: 3851268 - RNA, 18 nt, Human
guuugucucaguuggaaa

SEQ ID NO: 3851269 - RNA, 14 nt, Human
guuugucucuucug

SEQ ID NO: 3851270 - RNA, 18 nt, Human
guuugucugucuucauag

SEQ ID NO: 3851271 - RNA, 11 nt, Human
guuugucuguu

SEQ ID NO: 3851272 - RNA, 18 nt, Human
guuugucuguuuguuuca

SEQ ID NO: 3851273 - RNA, 20 nt, Human
guuugucuuggauauauagg

SEQ ID NO: 3851274 - RNA, 16 nt, Human
guuugugacagggcgg

SEQ ID NO: 3851275 - RNA, 22 nt, Human
uggccucaagaucaaugaaaug

SEQ ID NO: 3851276 - RNA, 23 nt, Human
uggccucaagugauucuccugcc

SEQ ID NO: 3851277 - RNA, 12 nt, Human
uggccucagacu

SEQ ID NO: 3851278 - RNA, 24 nt, Human
uggccucagacugcacccaggagg

SEQ ID NO: 3851279 - RNA, 13 nt, Human
uggccucagcugc

SEQ ID NO: 3851280 - RNA, 18 nt, Human
uggccucagcugccucac

SEQ ID NO: 3851281 - RNA, 18 nt, Human
uggccucauguggcugga

SEQ ID NO: 3851282 - RNA, 20 nt, Human
uggccucauguggcuggaag

SEQ ID NO: 3851283 - RNA, 23 nt, Human
uggccuccaaguccacaguggaa

SEQ ID NO: 3851284 - RNA, 21 nt, Human
uggccuccacaguucgaccug

SEQ ID NO: 3851285 - RNA, 23 nt, Human
uggccuccaggcccgucugucca

SEQ ID NO: 3851286 - RNA, 14 nt, Human
uggccucccaacuc

SEQ ID NO: 3851287 - RNA, 21 nt, Human
uggccucccaacucaccccag

SEQ ID NO: 3851288 - RNA, 23 nt, Human
uggccucccaacucaccccagcc

SEQ ID NO: 3851289 - RNA, 14 nt, Human
uggccucccacccg

SEQ ID NO: 3851290 - RNA, 15 nt, Human
uggccucccccacuu

SEQ ID NO: 3851291 - RNA, 14 nt, Human
uggccuccccugcc

SEQ ID NO: 3851292 - RNA, 17 nt, Human
uggccuccccugccacc

SEQ ID NO: 3851293 - RNA, 23 nt, Human
uggccuccccugccaccaggcca

SEQ ID NO: 3851294 - RNA, 20 nt, Human
uggccuccggcgucagccuc

SEQ ID NO: 3851295 - RNA, 16 nt, Human
uggccuccugccucua

SEQ ID NO: 3851296 - RNA, 15 nt, Human
uggccucgccuggcc

SEQ ID NO: 3851297 - RNA, 16 nt, Human
uggccucgccuggccu

SEQ ID NO: 3851298 - RNA, 19 nt, Human
uggccucgggacaccugcc

SEQ ID NO: 3851299 - RNA, 23 nt, Human
uggccucgggacaccugcccugc

SEQ ID NO: 3851300 - RNA, 17 nt, Human
uggccucucuauccucu

SEQ ID NO: 3851301 - RNA, 13 nt, Human
uggccucugcacu

SEQ ID NO: 3851302 - RNA, 20 nt, Human
uggccucugcacuccccugc

SEQ ID NO: 3851303 - RNA, 14 nt, Human
uggccucugcuuuc

SEQ ID NO: 3851304 - RNA, 15 nt, Human
uggccucugucauau

SEQ ID NO: 3851305 - RNA, 14 nt, Human
uggccucuucuaga

SEQ ID NO: 3851306 - RNA, 19 nt, Human
uggccucuugagcaguggc

SEQ ID NO: 3851307 - RNA, 22 nt, Human
uggccucuuugucuaaaacaau

SEQ ID NO: 3851308 - RNA, 14 nt, Human
uggccucuuuucag

SEQ ID NO: 3851309 - RNA, 19 nt, Human
uggccugaaccacaggaga

SEQ ID NO: 3851310 - RNA, 20 nt, Human
uggccugaaccacaggagag

SEQ ID NO: 3851311 - RNA, 19 nt, Human
uggccugagagucagcucu

SEQ ID NO: 3851312 - RNA, 18 nt, Human
uggccugagcugggauga

SEQ ID NO: 3851313 - RNA, 22 nt, Human
uggccugaucagaccacggcuc

SEQ ID NO: 3851314 - RNA, 17 nt, Human
uggccugcaaacuggga

SEQ ID NO: 3851315 - RNA, 18 nt, Human
uggccugcaaacugggaa

SEQ ID NO: 3851316 - RNA, 18 nt, Human
uggccugccuugaagcca

SEQ ID NO: 3851317 - RNA, 23 nt, Human
uggccuggagcacaaagacccug

SEQ ID NO: 3851318 - RNA, 16 nt, Human
uggccuggaggugggg

SEQ ID NO: 3851319 - RNA, 22 nt, Human
uggccuggaggugggguuggga

SEQ ID NO: 3851320 - RNA, 12 nt, Human
uggccuggaucu

SEQ ID NO: 3851321 - RNA, 10 nt, Human
uggccuggcc

SEQ ID NO: 3851322 - RNA, 18 nt, Human
uggccuggccaggagcuc

SEQ ID NO: 3851323 - RNA, 21 nt, Human
uggccuggccaggagcucuuc

SEQ ID NO: 3851324 - RNA, 13 nt, Human
uggccuggccagu

SEQ ID NO: 3851325 - RNA, 14 nt, Human
uggccuggccagug

SEQ ID NO: 3851326 - RNA, 17 nt, Human
uggccuggccagugccc

SEQ ID NO: 3851327 - RNA, 15 nt, Human
uggccuggcccugcc

SEQ ID NO: 3851328 - RNA, 18 nt, Human
uggccuggcccugcccug

SEQ ID NO: 3851329 - RNA, 20 nt, Human
uggccuggcccugcccugag

SEQ ID NO: 3851330 - RNA, 16 nt, Human
uggccuggccggcaac

SEQ ID NO: 3851331 - RNA, 16 nt, Human
uggccuggccuggccc

SEQ ID NO: 3851332 - RNA, 13 nt, Human
uggccugggagag

SEQ ID NO: 3851333 - RNA, 17 nt, Human
uggccugggagagcugg

SEQ ID NO: 3851334 - RNA, 24 nt, Human
uggccugggccguaucuccggcuc

SEQ ID NO: 3851335 - RNA, 14 nt, Human
uggccugggccucc

SEQ ID NO: 3851336 - RNA, 11 nt, Human
uggccuggggc

SEQ ID NO: 3851337 - RNA, 22 nt, Human
uggccugugcgaucccacccgu

SEQ ID NO: 3851338 - RNA, 15 nt, Human
uggccuguggccugu

SEQ ID NO: 3851339 - RNA, 12 nt, Human
uggccuguggcu

SEQ ID NO: 3851340 - RNA, 17 nt, Human
uggccuguggcugucgg

SEQ ID NO: 3851341 - RNA, 16 nt, Human
uggccugugucacuca

SEQ ID NO: 3851342 - RNA, 20 nt, Human
uggccugugucccaugaccc

SEQ ID NO: 3851343 - RNA, 22 nt, Human
uggccugugucccaugacccac

SEQ ID NO: 3851344 - RNA, 23 nt, Human
uggccuguuuuagaagguucucu

SEQ ID NO: 3851345 - RNA, 13 nt, Human
uggccuuccccag

SEQ ID NO: 3851346 - RNA, 16 nt, Human
uggccuuccccagccu

SEQ ID NO: 3851347 - RNA, 15 nt, Human
uggccuucggcccca

SEQ ID NO: 3851348 - RNA, 18 nt, Human
uggccuucggccuccauc

SEQ ID NO: 3851349 - RNA, 22 nt, Human
uggccuucggccuccauccuga

SEQ ID NO: 3851350 - RNA, 23 nt, Human
uggccuucggccuccauccugag

SEQ ID NO: 3851351 - RNA, 18 nt, Human
uggccuugggauccaggc

SEQ ID NO: 3851352 - RNA, 18 nt, Human
uggccuugggcccucugg

SEQ ID NO: 3851353 - RNA, 20 nt, Human
uggccuuguccucagccagu

SEQ ID NO: 3851354 - RNA, 16 nt, Human
uggccuugugguccaa

SEQ ID NO: 3851355 - RNA, 22 nt, Human
uggccuuguucucucuauggua

SEQ ID NO: 3851356 - RNA, 14 nt, Human
uggccuuugcgcuc

SEQ ID NO: 3851357 - RNA, 19 nt, Human
uggccuuugcgcuccuggc

SEQ ID NO: 3851358 - RNA, 17 nt, Human
uggccuuuguaagugca

SEQ ID NO: 3851359 - RNA, 13 nt, Human
uggccuuuuccua

SEQ ID NO: 3851360 - RNA, 16 nt, Human
uggccuuuuccuauuu

SEQ ID NO: 3851361 - RNA, 20 nt, Human
uggccuuuuucauuuaucua

SEQ ID NO: 3851362 - RNA, 14 nt, Human
uggcgagccauuug

SEQ ID NO: 3851363 - RNA, 14 nt, Human
uggcgaugccagcc

SEQ ID NO: 3851364 - RNA, 16 nt, Human
uggcgaugccagccaa

SEQ ID NO: 3851365 - RNA, 23 nt, Human
uggcgcagcauauucaggaagcu

SEQ ID NO: 3851366 - RNA, 16 nt, Human
uggcgcagccaaggcc

SEQ ID NO: 3851367 - RNA, 14 nt, Human
uggcgcaggugggc

SEQ ID NO: 3851368 - RNA, 17 nt, Human
uggcgccuccgagggac

SEQ ID NO: 3851369 - RNA, 13 nt, Human
uggcgcuaggcau

SEQ ID NO: 3851370 - RNA, 15 nt, Human
uggcgcugccccugg

SEQ ID NO: 3851371 - RNA, 20 nt, Human
uggcgcuuagagaggacaau

SEQ ID NO: 3851372 - RNA, 14 nt, Human
uggcggagaguuuu

SEQ ID NO: 3851373 - RNA, 15 nt, Human
uggcggcagcagcca

SEQ ID NO: 3851374 - RNA, 23 nt, Human
uggcggccccaacucgggcuccc

SEQ ID NO: 3851375 - RNA, 14 nt, Human
uggcggccccagca

SEQ ID NO: 3851376 - RNA, 19 nt, Human
uggcgggaugggccaccgc

SEQ ID NO: 3851377 - RNA, 14 nt, Human
uggcgggcgccugu

SEQ ID NO: 3851378 - RNA, 17 nt, Human
uggcgggcgccuguagu

SEQ ID NO: 3851379 - RNA, 15 nt, Human
uggcguaaguacaga

SEQ ID NO: 3851380 - RNA, 19 nt, Human
uaaaaauauggaacuucua

SEQ ID NO: 3851381 - RNA, 15 nt, Human
uaaaaauauguacaa

SEQ ID NO: 3851382 - RNA, 22 nt, Human
uaaaaauauuguguugugaaug

SEQ ID NO: 3851383 - RNA, 13 nt, Human
uaaaaaucaacuu

SEQ ID NO: 3851384 - RNA, 14 nt, Human
uaaaaaucaacuuu

SEQ ID NO: 3851385 - RNA, 14 nt, Human
uaaaaaucacacug

SEQ ID NO: 3851386 - RNA, 16 nt, Human
uaaaaaucacacugua

SEQ ID NO: 3851387 - RNA, 20 nt, Human
uaaaaaucauaaacugugug

SEQ ID NO: 3851388 - RNA, 17 nt, Human
uaaaaaucauugauugu

SEQ ID NO: 3851389 - RNA, 15 nt, Human
uaaaaaucucaaauu

SEQ ID NO: 3851390 - RNA, 15 nt, Human
uaaaaaucucuuuuc

SEQ ID NO: 3851391 - RNA, 18 nt, Human
uaaaaaugaaauuauuua

SEQ ID NO: 3851392 - RNA, 14 nt, Human
uaaaaaugaaauuu

SEQ ID NO: 3851393 - RNA, 14 nt, Human
uaaaaaugaauccu

SEQ ID NO: 3851394 - RNA, 15 nt, Human
uaaaaaugagguacu

SEQ ID NO: 3851395 - RNA, 18 nt, Human
uaaaaaugagugugaagg

SEQ ID NO: 3851396 - RNA, 17 nt, Human
uaaaaaugauacugaug

SEQ ID NO: 3851397 - RNA, 20 nt, Human
uaaaaaugcaaaaaaaauua

SEQ ID NO: 3851398 - RNA, 16 nt, Human
uaaaaaugcaaauccu

SEQ ID NO: 3851399 - RNA, 15 nt, Human
uaaaaauggacaaaa

SEQ ID NO: 3851400 - RNA, 19 nt, Human
uaaaaauggcucagaugcc

SEQ ID NO: 3851401 - RNA, 20 nt, Human
uaaaaaugggacuucuuuuc

SEQ ID NO: 3851402 - RNA, 20 nt, Human
uaaaaaugguaucaaaauua

SEQ ID NO: 3851403 - RNA, 16 nt, Human
uaaaaaugguggcuuc

SEQ ID NO: 3851404 - RNA, 23 nt, Human
uaaaaaugguggcuucagcucca

SEQ ID NO: 3851405 - RNA, 19 nt, Human
uaaaaaugguuuaaauggu

SEQ ID NO: 3851406 - RNA, 19 nt, Human
uaaaaauguaaauauucua

SEQ ID NO: 3851407 - RNA, 23 nt, Human
uaaaaauguuuuuucauguguuu

SEQ ID NO: 3851408 - RNA, 23 nt, Human
uaaaaauuaaauuggaaagcagg

SEQ ID NO: 3851409 - RNA, 19 nt, Human
uaaaaauuaaggcaacuga

SEQ ID NO: 3851410 - RNA, 19 nt, Human
uaaaaauuccagaaugaag

SEQ ID NO: 3851411 - RNA, 17 nt, Human
uaaaaauugugaucaga

SEQ ID NO: 3851412 - RNA, 12 nt, Human
uaaaaauuguua

SEQ ID NO: 3851413 - RNA, 15 nt, Human
uaaaaauuuacuaca

SEQ ID NO: 3851414 - RNA, 13 nt, Human
uaaaacaaaaaac

SEQ ID NO: 3851415 - RNA, 15 nt, Human
uaaaacaaaaaacaa

SEQ ID NO: 3851416 - RNA, 21 nt, Human
uaaaacaaaaaacaauauuua

SEQ ID NO: 3851417 - RNA, 22 nt, Human
uaaaacaaaaaacaauauuuau

SEQ ID NO: 3851418 - RNA, 16 nt, Human
uaaaacaaaagcucau

SEQ ID NO: 3851419 - RNA, 14 nt, Human
uaaaacaaagccac

SEQ ID NO: 3851420 - RNA, 22 nt, Human
uaaaacaaagccacuuucaauc

SEQ ID NO: 3851421 - RNA, 15 nt, Human
uaaaacaacacucac

SEQ ID NO: 3851422 - RNA, 19 nt, Human
uaaaacaacagauguacga

SEQ ID NO: 3851423 - RNA, 16 nt, Human
uaaaacaacagcucga

SEQ ID NO: 3851424 - RNA, 18 nt, Human
uaaaacaagaaaguuucc

SEQ ID NO: 3851425 - RNA, 23 nt, Human
uaaaacaauaaaauuuuuuuuca

SEQ ID NO: 3851426 - RNA, 18 nt, Human
uaaaacaauauuguuucu

SEQ ID NO: 3851427 - RNA, 13 nt, Human
uaaaacaaugaau

SEQ ID NO: 3851428 - RNA, 14 nt, Human
uaaaacacacaggu

SEQ ID NO: 3851429 - RNA, 23 nt, Human
uaaaacaccuaaauaaccaaucu

SEQ ID NO: 3851430 - RNA, 16 nt, Human
uaaaacaccucugcuu

SEQ ID NO: 3851431 - RNA, 22 nt, Human
uaaaacaccucugcuuucugau

SEQ ID NO: 3851432 - RNA, 17 nt, Human
uaaaacacuuucaaaac

SEQ ID NO: 3851433 - RNA, 18 nt, Human
uaaaacagcugucucuaa

SEQ ID NO: 3851434 - RNA, 21 nt, Human
uaaaacagguuauaacagugu

SEQ ID NO: 3851435 - RNA, 17 nt, Human
uaaaacaguauuuauuu

SEQ ID NO: 3851436 - RNA, 22 nt, Human
uaaaacaguauuuauuuuguaa

SEQ ID NO: 3851437 - RNA, 16 nt, Human
uaaaacaucauuccuu

SEQ ID NO: 3851438 - RNA, 17 nt, Human
uaaaacaucauuccuuu

SEQ ID NO: 3851439 - RNA, 12 nt, Human
uaaaacauguaa

SEQ ID NO: 3851440 - RNA, 15 nt, Human
uaaaacauuaaaaua

SEQ ID NO: 3851441 - RNA, 19 nt, Human
uaaaacauuaaaauauaau

SEQ ID NO: 3851442 - RNA, 13 nt, Human
uaaaacauuaaga

SEQ ID NO: 3851443 - RNA, 16 nt, Human
uaaaacauuaagaaaa

SEQ ID NO: 3851444 - RNA, 20 nt, Human
uaaaacauuauagauuuuca

SEQ ID NO: 3851445 - RNA, 17 nt, Human
uaaaacauuggauuauc

SEQ ID NO: 3851446 - RNA, 16 nt, Human
uaaaacauuuuaaaug

SEQ ID NO: 3851447 - RNA, 17 nt, Human
uaaaacauuuuaaaugg

SEQ ID NO: 3851448 - RNA, 21 nt, Human
uaaaacauuuuaaauggacag

SEQ ID NO: 3851449 - RNA, 22 nt, Human
uaaaacauuuuaaauggacaga

SEQ ID NO: 3851450 - RNA, 18 nt, Human
uaaaacauuuucacacaa

SEQ ID NO: 3851451 - RNA, 13 nt, Human
uaaaaccaaagag

SEQ ID NO: 3851452 - RNA, 13 nt, Human
uaaaaccacagca

SEQ ID NO: 3851453 - RNA, 17 nt, Human
uaaaaccaggcuuucua

SEQ ID NO: 3851454 - RNA, 21 nt, Human
uaaaaccccagccaacucauu

SEQ ID NO: 3851455 - RNA, 18 nt, Human
uaaaaccccaucucuaca

SEQ ID NO: 3851456 - RNA, 17 nt, Human
uaaaaccugcuuuucaa

SEQ ID NO: 3851457 - RNA, 14 nt, Human
uaaaaccugggauu

SEQ ID NO: 3851458 - RNA, 14 nt, Human
uaaaaccuuucaaa

SEQ ID NO: 3851459 - RNA, 18 nt, Human
uaaaacgcaguugcaaac

SEQ ID NO: 3851460 - RNA, 10 nt, Human
uaaaacuaaa

SEQ ID NO: 3851461 - RNA, 17 nt, Human
uaaaacuaaauuucacu

SEQ ID NO: 3851462 - RNA, 17 nt, Human
uaaaacugaagucugaa

SEQ ID NO: 3851463 - RNA, 16 nt, Human
uaaaacuggcaucuga

SEQ ID NO: 3851464 - RNA, 22 nt, Human
uaaaacuguacuuugauucaca

SEQ ID NO: 3851465 - RNA, 22 nt, Human
uaaaacuuauccuccaugaaua

SEQ ID NO: 3851466 - RNA, 13 nt, Human
uaaaacuucuuaa

SEQ ID NO: 3851467 - RNA, 13 nt, Human
uaaaacuuuccuc

SEQ ID NO: 3851468 - RNA, 23 nt, Human
uaaaacuuuuuauauuuuauaca

SEQ ID NO: 3851469 - RNA, 15 nt, Human
uaaaagaaaaaauga

SEQ ID NO: 3851470 - RNA, 17 nt, Human
uaaaagaaaaaaugaca

SEQ ID NO: 3851471 - RNA, 21 nt, Human
uaaaagaaaauaaaaaaaaga

SEQ ID NO: 3851472 - RNA, 22 nt, Human
uaaaagaaaauaaaaaaaagaa

SEQ ID NO: 3851473 - RNA, 14 nt, Human
uaaaagaaacuuuc

SEQ ID NO: 3851474 - RNA, 22 nt, Human
uaaaagaaagccucagagaauu

SEQ ID NO: 3851475 - RNA, 15 nt, Human
uaaaagaaaggguuc

SEQ ID NO: 3851476 - RNA, 17 nt, Human
uaaaagaaaugcacaau

SEQ ID NO: 3851477 - RNA, 21 nt, Human
uaaaagaaaugcacaaugucu

SEQ ID NO: 3851478 - RNA, 22 nt, Human
uaaaagaaaugcacaaugucuu

SEQ ID NO: 3851479 - RNA, 23 nt, Human
uaaaagaauauuuuaacuuccuu

SEQ ID NO: 3851480 - RNA, 15 nt, Human
uaaaagaaugacuau

SEQ ID NO: 3851481 - RNA, 17 nt, Human
uguggaaucuggaguga

SEQ ID NO: 3851482 - RNA, 17 nt, Human
uguggaauguuggauaa

SEQ ID NO: 3851483 - RNA, 13 nt, Human
uguggacacagcu

SEQ ID NO: 3851484 - RNA, 19 nt, Human
uguggaccacugcaugagc

SEQ ID NO: 3851485 - RNA, 12 nt, Human
uguggacucugg

SEQ ID NO: 3851486 - RNA, 23 nt, Human
uguggagaaauaaaaauaccucu

SEQ ID NO: 3851487 - RNA, 12 nt, Human
uguggagaagcg

SEQ ID NO: 3851488 - RNA, 21 nt, Human
uguggagaagcggcuggcagc

SEQ ID NO: 3851489 - RNA, 18 nt, Human
uguggagacaaugucugc

SEQ ID NO: 3851490 - RNA, 22 nt, Human
uguggagacugcuccugagccc

SEQ ID NO: 3851491 - RNA, 19 nt, Human
uguggagagggaaugugaa

SEQ ID NO: 3851492 - RNA, 14 nt, Human
uguggagccaggcg

SEQ ID NO: 3851493 - RNA, 18 nt, Human
uguggagcccgcaccccc

SEQ ID NO: 3851494 - RNA, 20 nt, Human
uguggagccgaggccuaccc

SEQ ID NO: 3851495 - RNA, 21 nt, Human
uguggaggaaggauuguaaaa

SEQ ID NO: 3851496 - RNA, 20 nt, Human
uguggaggaguccaggccau

SEQ ID NO: 3851497 - RNA, 21 nt, Human
uguggagguacacucuuauag

SEQ ID NO: 3851498 - RNA, 12 nt, Human
uguggagugggg

SEQ ID NO: 3851499 - RNA, 14 nt, Human
uguggauaacaaag

SEQ ID NO: 3851500 - RNA, 15 nt, Human
uguggauauaaaaug

SEQ ID NO: 3851501 - RNA, 23 nt, Human
uguggaugagcccucagaacccu

SEQ ID NO: 3851502 - RNA, 22 nt, Human
uguggaugccgauuucuguaaa

SEQ ID NO: 3851503 - RNA, 21 nt, Human
uguggaugccuguggaagagu

SEQ ID NO: 3851504 - RNA, 22 nt, Human
uguggaugccuguggaagagug

SEQ ID NO: 3851505 - RNA, 19 nt, Human
uguggauguuuuaauucca

SEQ ID NO: 3851506 - RNA, 19 nt, Human
uguggauuuaacagaaaug

SEQ ID NO: 3851507 - RNA, 16 nt, Human
uguggauuuuuuccua

SEQ ID NO: 3851508 - RNA, 19 nt, Human
uguggcaauagugggcccu

SEQ ID NO: 3851509 - RNA, 18 nt, Human
uguggcaaucugugggcu

SEQ ID NO: 3851510 - RNA, 18 nt, Human
uguggcacuugccugggu

SEQ ID NO: 3851511 - RNA, 19 nt, Human
uguggcacuugccuggguc

SEQ ID NO: 3851512 - RNA, 19 nt, Human
uguggcagaguuacaguuc

SEQ ID NO: 3851513 - RNA, 21 nt, Human
uguggcaguaaagagaaacuu

SEQ ID NO: 3851514 - RNA, 11 nt, Human
uguggcagugg

SEQ ID NO: 3851515 - RNA, 12 nt, Human
uguggcaguggu

SEQ ID NO: 3851516 - RNA, 15 nt, Human
uguggcauugaaaug

SEQ ID NO: 3851517 - RNA, 24 nt, Human
uguggccaaaggagggucaggaag

SEQ ID NO: 3851518 - RNA, 14 nt, Human
uguggccaaggagc

SEQ ID NO: 3851519 - RNA, 17 nt, Human
uguggccaaggagcugc

SEQ ID NO: 3851520 - RNA, 20 nt, Human
uguggccaaggagcugcuau

SEQ ID NO: 3851521 - RNA, 12 nt, Human
uguggccaggcu

SEQ ID NO: 3851522 - RNA, 12 nt, Human
uguggccccacc

SEQ ID NO: 3851523 - RNA, 17 nt, Human
uguggccccacccuggg

SEQ ID NO: 3851524 - RNA, 21 nt, Human
ugguccuagaggcccuuugcu

SEQ ID NO: 3851525 - RNA, 16 nt, Human
ugguccuaggcuggaa

SEQ ID NO: 3851526 - RNA, 15 nt, Human
ugguccucuugccuc

SEQ ID NO: 3851527 - RNA, 19 nt, Human
ugguccugacucaacaugu

SEQ ID NO: 3851528 - RNA, 14 nt, Human
ugguccugagaccu

SEQ ID NO: 3851529 - RNA, 13 nt, Human
ugguccugcugca

SEQ ID NO: 3851530 - RNA, 15 nt, Human
ugguccugcugcagu

SEQ ID NO: 3851531 - RNA, 23 nt, Human
ugguccugcugcaguugccaguc

SEQ ID NO: 3851532 - RNA, 14 nt, Human
ugguccuggggcuc

SEQ ID NO: 3851533 - RNA, 15 nt, Human
ugguccuuucuuccg

SEQ ID NO: 3851534 - RNA, 20 nt, Human
uggucgaaaguuaguaggau

SEQ ID NO: 3851535 - RNA, 23 nt, Human
uggucgagaaagaggcaccagga

SEQ ID NO: 3851536 - RNA, 20 nt, Human
uggucgaggaguaacaauac

SEQ ID NO: 3851537 - RNA, 23 nt, Human
uggucuaacacuggcauguucaa

SEQ ID NO: 3851538 - RNA, 15 nt, Human
uggucuaauguuuaa

SEQ ID NO: 3851539 - RNA, 21 nt, Human
uggucuaauguuuaagcagaa

SEQ ID NO: 3851540 - RNA, 15 nt, Human
uggucuacacugugc

SEQ ID NO: 3851541 - RNA, 16 nt, Human
uggucuacacugugcu

SEQ ID NO: 3851542 - RNA, 23 nt, Human
uguugccuauaagccaaaauuaa

SEQ ID NO: 3851543 - RNA, 22 nt, Human
uguugccuugaaccacuucccu

SEQ ID NO: 3851544 - RNA, 14 nt, Human
uguugcuaacagca

SEQ ID NO: 3851545 - RNA, 16 nt, Human
uguugcuauaauaaag

SEQ ID NO: 3851546 - RNA, 21 nt, Human
uguugcucaaaucuauucaga

SEQ ID NO: 3851547 - RNA, 17 nt, Human
uguugcucucugugucu

SEQ ID NO: 3851548 - RNA, 14 nt, Human
uguugcugccaacc

SEQ ID NO: 3851549 - RNA, 16 nt, Human
uguugcuggaucagga

SEQ ID NO: 3851550 - RNA, 16 nt, Human
uguugcuguugauguu

SEQ ID NO: 3851551 - RNA, 13 nt, Human
uguugcuuacaau

SEQ ID NO: 3851552 - RNA, 20 nt, Human
uguugcuuagucacuuauuu

SEQ ID NO: 3851553 - RNA, 14 nt, Human
uguugcuuauguug

SEQ ID NO: 3851554 - RNA, 16 nt, Human
uguugcuuuguugcac

SEQ ID NO: 3851555 - RNA, 21 nt, Human
uguugcuuuugugaacuuuuu

SEQ ID NO: 3851556 - RNA, 13 nt, Human
uguuggaaaguaa

SEQ ID NO: 3851557 - RNA, 14 nt, Human
uguuggacaaaugu

SEQ ID NO: 3851558 - RNA, 16 nt, Human
uguuggacaaauguga

SEQ ID NO: 3851559 - RNA, 17 nt, Human
uguuggagaagaacuga

SEQ ID NO: 3851560 - RNA, 20 nt, Human
uguuggagaagaacugaaau

SEQ ID NO: 3851561 - RNA, 14 nt, Human
uguuggaucuucaa

SEQ ID NO: 3851562 - RNA, 20 nt, Human
uguuggauuuguuuaaaagg

SEQ ID NO: 3851563 - RNA, 20 nt, Human
uguuggauuuuugucuugug

SEQ ID NO: 3851564 - RNA, 19 nt, Human
uguuggcacauccuaugca

SEQ ID NO: 3851565 - RNA, 23 nt, Human
uguuggcagaugcagcucuuccu

SEQ ID NO: 3851566 - RNA, 11 nt, Human
uguuggccagg

SEQ ID NO: 3851567 - RNA, 18 nt, Human
uguuggccaggcugcucu

SEQ ID NO: 3851568 - RNA, 15 nt, Human
uguuggccaggcugg

SEQ ID NO: 3851569 - RNA, 15 nt, Human
uguuggccucugcaa

SEQ ID NO: 3851570 - RNA, 21 nt, Human
uguuggcguaggcuacagaga

SEQ ID NO: 3851571 - RNA, 15 nt, Human
uguuggcuaaugaag

SEQ ID NO: 3851572 - RNA, 14 nt, Human
uguugggagagggc

SEQ ID NO: 3851573 - RNA, 17 nt, Human
uguugggagagggcgca

SEQ ID NO: 3851574 - RNA, 20 nt, Human
uguugggagagggcgcaggc

SEQ ID NO: 3851575 - RNA, 18 nt, Human
uguugggauacugcaggg

SEQ ID NO: 3851576 - RNA, 17 nt, Human
uguugggauuccugacc

SEQ ID NO: 3851577 - RNA, 13 nt, Human
uguugggccagga

SEQ ID NO: 3851578 - RNA, 16 nt, Human
uguugggccaggagcc

SEQ ID NO: 3851579 - RNA, 17 nt, Human
uguugggguggguauaa

SEQ ID NO: 3851580 - RNA, 23 nt, Human
uguugggguggguauaaaagaug

SEQ ID NO: 3851581 - RNA, 15 nt, Human
uguugguauuuaucu

SEQ ID NO: 3851582 - RNA, 15 nt, Human
uguuggucuguacug

SEQ ID NO: 3851583 - RNA, 11 nt, Human
uguuggugcac

SEQ ID NO: 3851584 - RNA, 14 nt, Human
uguugguuccaagc

SEQ ID NO: 3851585 - RNA, 19 nt, Human
uguugguugcacuuuguag

SEQ ID NO: 3851586 - RNA, 15 nt, Human
uguugguugguuuuc

SEQ ID NO: 3851587 - RNA, 19 nt, Human
uguugguuguuuuuuccuu

SEQ ID NO: 3851588 - RNA, 20 nt, Human
uguugguuguuuuuuccuuu

SEQ ID NO: 3851589 - RNA, 17 nt, Human
uguugguuuacuuucaa

SEQ ID NO: 3851590 - RNA, 17 nt, Human
uguugguuuugacugga

SEQ ID NO: 3851591 - RNA, 17 nt, Human
uguuguaaaaagaaaaa

SEQ ID NO: 3851592 - RNA, 22 nt, Human
uguuguaaaacaaaauuugacu

SEQ ID NO: 3851593 - RNA, 15 nt, Human
uguuguaaauuagga

SEQ ID NO: 3851594 - RNA, 24 nt, Human
uguuguaacuuauguagauauuug

SEQ ID NO: 3851595 - RNA, 15 nt, Human
uguuguaagaauucu

SEQ ID NO: 3851596 - RNA, 16 nt, Human
uguuguaagaauucug

SEQ ID NO: 3851597 - RNA, 14 nt, Human
uguuguaagcaaca

SEQ ID NO: 3851598 - RNA, 16 nt, Human
uguuguacauuuauga

SEQ ID NO: 3851599 - RNA, 17 nt, Human
uguuguacauuuaugau

SEQ ID NO: 3851600 - RNA, 23 nt, Human
uguuguacauuuaugauuuaaua

SEQ ID NO: 3851601 - RNA, 21 nt, Human
uguuguacucaauuuuaacaa

SEQ ID NO: 3851602 - RNA, 21 nt, Human
uguuguagauacaaucagcug

SEQ ID NO: 3851603 - RNA, 14 nt, Human
uguuguauaaauuu

SEQ ID NO: 3851604 - RNA, 16 nt, Human
uguuguauuaacaaaa

SEQ ID NO: 3851605 - RNA, 14 nt, Human
uguuguauucauug

SEQ ID NO: 3851606 - RNA, 13 nt, Human
uguuguauuuuaa

SEQ ID NO: 3851607 - RNA, 20 nt, Human
uguugucaagaauagcauug

SEQ ID NO: 3851608 - RNA, 13 nt, Human
uguugucaccuuc

SEQ ID NO: 3851609 - RNA, 19 nt, Human
uguugucauugcuuuacug

SEQ ID NO: 3851610 - RNA, 20 nt, Human
uguugucauugcuuuacugg

SEQ ID NO: 3851611 - RNA, 21 nt, Human
uguugucauuguaaacaaacu

SEQ ID NO: 3851612 - RNA, 13 nt, Human
uguugucccuucu

SEQ ID NO: 3851613 - RNA, 16 nt, Human
uguuguccuuuucaua

SEQ ID NO: 3851614 - RNA, 13 nt, Human
uguugucugcaac

SEQ ID NO: 3851615 - RNA, 12 nt, Human
uguugucuugaa

SEQ ID NO: 3851616 - RNA, 19 nt, Human
uguugugaauaauuacagu

SEQ ID NO: 3851617 - RNA, 14 nt, Human
uguugugauguauu

SEQ ID NO: 3851618 - RNA, 13 nt, Human
uguugugaugucu

SEQ ID NO: 3851619 - RNA, 15 nt, Human
uguugugcuuucaag

SEQ ID NO: 3851620 - RNA, 14 nt, Human
uguugugugccucu

SEQ ID NO: 3851621 - RNA, 15 nt, Human
uguugugugccucua

SEQ ID NO: 3851622 - RNA, 21 nt, Human
uguuguuaaugaaaaugucag

SEQ ID NO: 3851623 - RNA, 21 nt, Human
uguuguuaucuguuugagaaa

SEQ ID NO: 3851624 - RNA, 17 nt, Human
uguuguuaugaugugcu

SEQ ID NO: 3851625 - RNA, 14 nt, Human
uguuguuaugcuau

SEQ ID NO: 3851626 - RNA, 13 nt, Human
uguuguuauuuaa

SEQ ID NO: 3851627 - RNA, 14 nt, Human
uguuguuccuuuug

SEQ ID NO: 3851628 - RNA, 22 nt, Human
uguuguucuguuaacugaauac

SEQ ID NO: 3851629 - RNA, 20 nt, Human
uguuguuuauaauaaaaaua

SEQ ID NO: 3851630 - RNA, 21 nt, Human
uguuguuuauaauaaaaauau

SEQ ID NO: 3851631 - RNA, 13 nt, Human
uguuguuucagug

SEQ ID NO: 3851632 - RNA, 16 nt, Human
uguuguuucuuaaaua

SEQ ID NO: 3851633 - RNA, 20 nt, Human
uguuguuucuuaauuuggaa

SEQ ID NO: 3851634 - RNA, 15 nt, Human
uguuguuucuuucua

SEQ ID NO: 3851635 - RNA, 12 nt, Human
uguuguuuguau

SEQ ID NO: 3851636 - RNA, 18 nt, Human
uguuguuuuacuaaagaa

SEQ ID NO: 3851637 - RNA, 11 nt, Human
uguuguuuugu

SEQ ID NO: 3851638 - RNA, 19 nt, Human
uguuguuuuguacagaugu

SEQ ID NO: 3851639 - RNA, 15 nt, Human
uguuguuuuuggaug

SEQ ID NO: 3851640 - RNA, 18 nt, Human
uguuuaaaaaaccacaug

SEQ ID NO: 3851641 - RNA, 19 nt, Human
uguuuaaaaaaguuuaaaa

SEQ ID NO: 3851642 - RNA, 20 nt, Human
uguuuaaaaaccgaauaaau

SEQ ID NO: 3851643 - RNA, 12 nt, Human
uguuuaaaacau

SEQ ID NO: 3851644 - RNA, 16 nt, Human
uguuuaaaacaucauu

SEQ ID NO: 3851645 - RNA, 15 nt, Human
uguuuaaaauaaaau

SEQ ID NO: 3851646 - RNA, 13 nt, Human
uguuuaaaaucau

SEQ ID NO: 3851647 - RNA, 17 nt, Human
uguuuaaaaucauuucu

SEQ ID NO: 3851648 - RNA, 14 nt, Human
uguuuaaaauguaa

SEQ ID NO: 3851649 - RNA, 22 nt, Human
uguuuaaaauguaauuuaaaug

SEQ ID NO: 3851650 - RNA, 13 nt, Human
uguuuaaaauuuc

SEQ ID NO: 3851651 - RNA, 21 nt, Human
uguuuaaaauuucuuagaaaa

SEQ ID NO: 3851652 - RNA, 14 nt, Human
uguuuaaaccuuuu

SEQ ID NO: 3851653 - RNA, 13 nt, Human
uguuuaaaguggc

SEQ ID NO: 3851654 - RNA, 12 nt, Human
uguuuaaaguuc

SEQ ID NO: 3851655 - RNA, 19 nt, Human
uguuuaacuuaaucaauua

SEQ ID NO: 3851656 - RNA, 21 nt, Human
uguuuaagaaaaguauuuuga

SEQ ID NO: 3851657 - RNA, 14 nt, Human
uguuuaagaugggc

SEQ ID NO: 3851658 - RNA, 14 nt, Human
uguuuaagauuuaa

SEQ ID NO: 3851659 - RNA, 22 nt, Human
uguuuaagauuuaauuugccaa

SEQ ID NO: 3851660 - RNA, 19 nt, Human
uguuuaagcagaauuggaa

SEQ ID NO: 3851661 - RNA, 17 nt, Human
uguuuaauaaagcgaaa

SEQ ID NO: 3851662 - RNA, 20 nt, Human
uguuuaauauugagaaagaa

SEQ ID NO: 3851663 - RNA, 20 nt, Human
uguuuaaucauauaaauaga

SEQ ID NO: 3851664 - RNA, 23 nt, Human
uguuuaaucauauaaauagaaug

SEQ ID NO: 3851665 - RNA, 24 nt, Human
uguuuaaucauauaaauagaaugu

SEQ ID NO: 3851666 - RNA, 14 nt, Human
uguuuaaucuguua

SEQ ID NO: 3851667 - RNA, 13 nt, Human
uguuuaaugugaa

SEQ ID NO: 3851668 - RNA, 14 nt, Human
uguuuaaugugaac

SEQ ID NO: 3851669 - RNA, 17 nt, Human
uguuuaaugugaacuug

SEQ ID NO: 3851670 - RNA, 21 nt, Human
uaaauguagcuucagucauua

SEQ ID NO: 3851671 - RNA, 22 nt, Human
uaaauguauaaauauacaguau

SEQ ID NO: 3851672 - RNA, 19 nt, Human
uaaauguaucuuauucaca

SEQ ID NO: 3851673 - RNA, 14 nt, Human
uaaaugucccuaau

SEQ ID NO: 3851674 - RNA, 15 nt, Human
uaaaugucuaaugua

SEQ ID NO: 3851675 - RNA, 12 nt, Human
uaaaugucuguu

SEQ ID NO: 3851676 - RNA, 20 nt, Human
uaaaugucuuuaaugcaaua

SEQ ID NO: 3851677 - RNA, 17 nt, Human
uaaaugucuuuguaagu

SEQ ID NO: 3851678 - RNA, 21 nt, Human
uaaaugucuuuuuuuuaaugu

SEQ ID NO: 3851679 - RNA, 23 nt, Human
uaaaugucuuuuuuuuaaugugc

SEQ ID NO: 3851680 - RNA, 16 nt, Human
uaaauguguguaugug

SEQ ID NO: 3851681 - RNA, 13 nt, Human
uaaauguuaaaga

SEQ ID NO: 3851682 - RNA, 17 nt, Human
uaaauguuaaagaugua

SEQ ID NO: 3851683 - RNA, 23 nt, Human
uaaauguuaauggauuucagaag

SEQ ID NO: 3851684 - RNA, 16 nt, Human
uaaauguuaccucuga

SEQ ID NO: 3851685 - RNA, 21 nt, Human
uaaauguuaguuucuugguaa

SEQ ID NO: 3851686 - RNA, 21 nt, Human
uaaauguuaugacuauguaaa

SEQ ID NO: 3851687 - RNA, 15 nt, Human
uaaauguuauguaua

SEQ ID NO: 3851688 - RNA, 16 nt, Human
uaaauguuauguauau

SEQ ID NO: 3851689 - RNA, 13 nt, Human
uaaauguucuaug

SEQ ID NO: 3851690 - RNA, 20 nt, Human
uaaauguugaaagaucaaaa

SEQ ID NO: 3851691 - RNA, 21 nt, Human
uaaauguuucuuuuaaagacc

SEQ ID NO: 3851692 - RNA, 22 nt, Human
uaaauguuuggcauguaaaugu

SEQ ID NO: 3851693 - RNA, 16 nt, Human
uaaauguuuuauaagu

SEQ ID NO: 3851694 - RNA, 17 nt, Human
uaaauguuuuauaaguu

SEQ ID NO: 3851695 - RNA, 21 nt, Human
uaaauguuuuguaaacuuuga

SEQ ID NO: 3851696 - RNA, 12 nt, Human
uaaauuaaacaa

SEQ ID NO: 3851697 - RNA, 13 nt, Human
uaaauuaaacaau

SEQ ID NO: 3851698 - RNA, 22 nt, Human
uaaauuaaacaauuuauuuuau

SEQ ID NO: 3851699 - RNA, 19 nt, Human
uaaauuaaagccuuuagua

SEQ ID NO: 3851700 - RNA, 15 nt, Human
uaaauuaaauaaaau

SEQ ID NO: 3851701 - RNA, 18 nt, Human
uaaauuaacuuuuauaaa

SEQ ID NO: 3851702 - RNA, 20 nt, Human
uaaauuaacuuuuauaaacu

SEQ ID NO: 3851703 - RNA, 13 nt, Human
uaaauuaagacau

SEQ ID NO: 3851704 - RNA, 16 nt, Human
uaaauuacagaaauuu

SEQ ID NO: 3851705 - RNA, 16 nt, Human
uaaauuacauuuguaa

SEQ ID NO: 3851706 - RNA, 13 nt, Human
uaaauuagaaaau

SEQ ID NO: 3851707 - RNA, 16 nt, Human
uaaauuagaaaauauu

SEQ ID NO: 3851708 - RNA, 18 nt, Human
uaaauuaguauuuauuua

SEQ ID NO: 3851709 - RNA, 22 nt, Human
uaaauuauaacuuaaaauauuu

SEQ ID NO: 3851710 - RNA, 15 nt, Human
uaaauuauaaggacu

SEQ ID NO: 3851711 - RNA, 15 nt, Human
uaaauuauacaaauu

SEQ ID NO: 3851712 - RNA, 19 nt, Human
uaaauuauaguguagaaaa

SEQ ID NO: 3851713 - RNA, 22 nt, Human
uguuuagucuugucucagauuu

SEQ ID NO: 3851714 - RNA, 23 nt, Human
uguuuagucuugucucagauuuu

SEQ ID NO: 3851715 - RNA, 13 nt, Human
uguuuaguggaaa

SEQ ID NO: 3851716 - RNA, 19 nt, Human
uguuuauaaaucuuaugcu

SEQ ID NO: 3851717 - RNA, 16 nt, Human
uguuuauauaaaugcu

SEQ ID NO: 3851718 - RNA, 17 nt, Human
uguuuauauggaagaaa

SEQ ID NO: 3851719 - RNA, 15 nt, Human
uguuuauauguguug

SEQ ID NO: 3851720 - RNA, 15 nt, Human
uguuuaucagauaca

SEQ ID NO: 3851721 - RNA, 17 nt, Human
uguuuauccuuucauau

SEQ ID NO: 3851722 - RNA, 22 nt, Human
uguuuauggcaauuuaacaugu

SEQ ID NO: 3851723 - RNA, 13 nt, Human
uguuuaugguaaa

SEQ ID NO: 3851724 - RNA, 15 nt, Human
uguuuauguaaacaa

SEQ ID NO: 3851725 - RNA, 14 nt, Human
uguuuauguaauuu

SEQ ID NO: 3851726 - RNA, 17 nt, Human
uguuuauguaauuucag

SEQ ID NO: 3851727 - RNA, 13 nt, Human
uguuuaugugugu

SEQ ID NO: 3851728 - RNA, 13 nt, Human
uguuuauuaaaua

SEQ ID NO: 3851729 - RNA, 13 nt, Human
uguuuauuaacaa

SEQ ID NO: 3851730 - RNA, 19 nt, Human
uguuuauuaacaaauuaug

SEQ ID NO: 3851731 - RNA, 14 nt, Human
uguuuauuacagua

SEQ ID NO: 3851732 - RNA, 15 nt, Human
uguuuauuacuucca

SEQ ID NO: 3851733 - RNA, 16 nt, Human
uguuuauucaaacuga

SEQ ID NO: 3851734 - RNA, 21 nt, Human
uguuuauucaaacugaaaagc

SEQ ID NO: 3851735 - RNA, 16 nt, Human
uguuuauucuucuaga

SEQ ID NO: 3851736 - RNA, 21 nt, Human
uguuuauucuugaugaaaagc

SEQ ID NO: 3851737 - RNA, 14 nt, Human
uguuuauugaguuu

SEQ ID NO: 3851738 - RNA, 14 nt, Human
uguuuauuucuguu

SEQ ID NO: 3851739 - RNA, 16 nt, Human
uguuuauuuuauauua

SEQ ID NO: 3851740 - RNA, 16 nt, Human
uguuuauuuuucauau

SEQ ID NO: 3851741 - RNA, 13 nt, Human
uguuucaaacaua

SEQ ID NO: 3851742 - RNA, 19 nt, Human
uguuucaaacauauauaac

SEQ ID NO: 3851743 - RNA, 17 nt, Human
uguuucaaacaugccca

SEQ ID NO: 3851744 - RNA, 21 nt, Human
uguuucaaguggggcucgcca

SEQ ID NO: 3851745 - RNA, 12 nt, Human
uguuucacaguu

SEQ ID NO: 3851746 - RNA, 17 nt, Human
uguuucacuacucagca

SEQ ID NO: 3851747 - RNA, 15 nt, Human
uguuucagauuuuuu

SEQ ID NO: 3851748 - RNA, 22 nt, Human
uguuucagguucaguauuaugu

SEQ ID NO: 3851749 - RNA, 10 nt, Human
uguuucagug

SEQ ID NO: 3851750 - RNA, 21 nt, Human
uguuucauguuuugugacuau

SEQ ID NO: 3851751 - RNA, 22 nt, Human
uguuucauguuuugugacuaua

SEQ ID NO: 3851752 - RNA, 21 nt, Human
uguuuccaauguuuagcaaau

SEQ ID NO: 3851753 - RNA, 20 nt, Human
uguuuccagacuuccuugag

SEQ ID NO: 3851754 - RNA, 23 nt, Human
uguuuccagacuuccuugagaca

SEQ ID NO: 3851755 - RNA, 18 nt, Human
uguuuccagcagaagaca

SEQ ID NO: 3851756 - RNA, 13 nt, Human
uguuuccagcauu

SEQ ID NO: 3851757 - RNA, 19 nt, Human
uguuuccauauuuuauagg

SEQ ID NO: 3851758 - RNA, 22 nt, Human
uguuucccauaauuuucuucau

SEQ ID NO: 3851759 - RNA, 22 nt, Human
uguuuccccacaaaacaaagca

SEQ ID NO: 3851760 - RNA, 20 nt, Human
uguuucccuuucacuggcau

SEQ ID NO: 3851761 - RNA, 16 nt, Human
uguuuccucuuccaaa

SEQ ID NO: 3851762 - RNA, 21 nt, Human
uguuuccugacauugucuccu

SEQ ID NO: 3851763 - RNA, 23 nt, Human
uguuuccuggcacugcuuccagu

SEQ ID NO: 3851764 - RNA, 23 nt, Human
uguuucgcggguaacugggguug

SEQ ID NO: 3851765 - RNA, 21 nt, Human
uguuucgcugauauauguguu

SEQ ID NO: 3851766 - RNA, 15 nt, Human
uguuucgugaaguau

SEQ ID NO: 3851767 - RNA, 21 nt, Human
uguuucuaauaaagaaagcag

SEQ ID NO: 3851768 - RNA, 20 nt, Human
uguuucuagagccugcugga

SEQ ID NO: 3851769 - RNA, 21 nt, Human
uguuucuagcacuggccugca

SEQ ID NO: 3851770 - RNA, 16 nt, Human
uguuucuaguugagga

SEQ ID NO: 3851771 - RNA, 24 nt, Human
uguuucuauucucuccucagacug

SEQ ID NO: 3851772 - RNA, 19 nt, Human
uguuucuauugacuucaau

SEQ ID NO: 3851773 - RNA, 15 nt, Human
uguuucucccccugg

SEQ ID NO: 3851774 - RNA, 16 nt, Human
uguuucucccccuggg

SEQ ID NO: 3851775 - RNA, 14 nt, Human
uguuucucuuuccu

SEQ ID NO: 3851776 - RNA, 22 nt, Human
uguuucucuuugauuauuugca

SEQ ID NO: 3851777 - RNA, 14 nt, Human
uguuucugaaaaga

SEQ ID NO: 3851778 - RNA, 21 nt, Human
uguuucugaaaauuccagaaa

SEQ ID NO: 3851779 - RNA, 12 nt, Human
uguuucugacuc

SEQ ID NO: 3851780 - RNA, 19 nt, Human
uguuucugacucugagcua

SEQ ID NO: 3851781 - RNA, 17 nt, Human
uguuucugagaaaagaa

SEQ ID NO: 3851782 - RNA, 21 nt, Human
uguuucugcaguagucucugu

SEQ ID NO: 3851783 - RNA, 18 nt, Human
uguuucuggcuuagaaca

SEQ ID NO: 3851784 - RNA, 20 nt, Human
uguuucuguccuguaacugu

SEQ ID NO: 3851785 - RNA, 22 nt, Human
uguuucuguccuguaacuguua

SEQ ID NO: 3851786 - RNA, 12 nt, Human
uguuucuguuau

SEQ ID NO: 3851787 - RNA, 14 nt, Human
uguuucuguuauua

SEQ ID NO: 3851788 - RNA, 19 nt, Human
uguuucuguuauuaacaaa

SEQ ID NO: 3851789 - RNA, 17 nt, Human
uguuucuguucaccuuc

SEQ ID NO: 3851790 - RNA, 13 nt, Human
uguuucuguucca

SEQ ID NO: 3851791 - RNA, 16 nt, Human
uguuucuuaauuugga

SEQ ID NO: 3851792 - RNA, 17 nt, Human
uguuucuuccaaagcac

SEQ ID NO: 3851793 - RNA, 18 nt, Human
uguuucuuccaaagcaca

SEQ ID NO: 3851794 - RNA, 21 nt, Human
uguuucuuccuguuaauguau

SEQ ID NO: 3851795 - RNA, 16 nt, Human
uguuucuugcuuguac

SEQ ID NO: 3851796 - RNA, 17 nt, Human
uguuucuuguuuauuga

SEQ ID NO: 3851797 - RNA, 12 nt, Human
uguuucuuugau

SEQ ID NO: 3851798 - RNA, 21 nt, Human
uguuucuuuuguauguaaaug

SEQ ID NO: 3851799 - RNA, 19 nt, Human
uguuugaaaauaguuuauu

SEQ ID NO: 3851800 - RNA, 16 nt, Human
uguuugaaaucaucgg

SEQ ID NO: 3851801 - RNA, 13 nt, Human
uguuugaaaucuu

SEQ ID NO: 3851802 - RNA, 22 nt, Human
uguuugaaaugaggucuguuua

SEQ ID NO: 3851803 - RNA, 21 nt, Human
uguuugacaaagaaacccaag

SEQ ID NO: 3851804 - RNA, 22 nt, Human
uguuugacaaaguuacugauuc

SEQ ID NO: 3851805 - RNA, 12 nt, Human
uguuugaugcag

SEQ ID NO: 3851806 - RNA, 19 nt, Human
uguuugaugcauuaaaaga

SEQ ID NO: 3851807 - RNA, 21 nt, Human
uguuugaugcauuaaaagaaa

SEQ ID NO: 3851808 - RNA, 22 nt, Human
uguuugauucagacagcugccu

SEQ ID NO: 3851809 - RNA, 17 nt, Human
uguuugcagccugcucu

SEQ ID NO: 3851810 - RNA, 13 nt, Human
uguuugcauauaa

SEQ ID NO: 3851811 - RNA, 22 nt, Human
uguuugcaugugaaaaucaaau

SEQ ID NO: 3851812 - RNA, 13 nt, Human
uguuugccaggac

SEQ ID NO: 3851813 - RNA, 18 nt, Human
uguuugccaggacaugca

SEQ ID NO: 3851814 - RNA, 15 nt, Human
uaacuguaucuugag

SEQ ID NO: 3851815 - RNA, 23 nt, Human
uaacuguccguaguaucagagau

SEQ ID NO: 3851816 - RNA, 17 nt, Human
uaacuguccuguccugc

SEQ ID NO: 3851817 - RNA, 13 nt, Human
uaacugugaaguu

SEQ ID NO: 3851818 - RNA, 17 nt, Human
uaacugugcugaaugcu

SEQ ID NO: 3851819 - RNA, 19 nt, Human
uaacuguguauguacauau

SEQ ID NO: 3851820 - RNA, 11 nt, Human
uaacuguuacc

SEQ ID NO: 3851821 - RNA, 14 nt, Human
uaacuguuaccauu

SEQ ID NO: 3851822 - RNA, 17 nt, Human
uaacuguuauuuauaau

SEQ ID NO: 3851823 - RNA, 19 nt, Human
uaacuguuuauauguguug

SEQ ID NO: 3851824 - RNA, 18 nt, Human
uaacuuaaaaaaaugaca

SEQ ID NO: 3851825 - RNA, 17 nt, Human
uaacuuaaaaauguaaa

SEQ ID NO: 3851826 - RNA, 19 nt, Human
uaacuuaaaaauguaaaua

SEQ ID NO: 3851827 - RNA, 16 nt, Human
uaacuuaaaauauuuu

SEQ ID NO: 3851828 - RNA, 16 nt, Human
uaacuuaaauaguauu

SEQ ID NO: 3851829 - RNA, 13 nt, Human
uaacuuaauaauc

SEQ ID NO: 3851830 - RNA, 21 nt, Human
uaacuuaauaaucaagagccu

SEQ ID NO: 3851831 - RNA, 15 nt, Human
uaacuuaaucaauua

SEQ ID NO: 3851832 - RNA, 18 nt, Human
uaacuuaaugaaaacaau

SEQ ID NO: 3851833 - RNA, 15 nt, Human
uaacuuaauugcuau

SEQ ID NO: 3851834 - RNA, 14 nt, Human
uaacuuacaaagau

SEQ ID NO: 3851835 - RNA, 17 nt, Human
uaacuuacccuguauau

SEQ ID NO: 3851836 - RNA, 18 nt, Human
uaacuuacccuuagggag

SEQ ID NO: 3851837 - RNA, 15 nt, Human
uaacuuagcaugugu

SEQ ID NO: 3851838 - RNA, 16 nt, Human
uaacuuaguuuugcau

SEQ ID NO: 3851839 - RNA, 17 nt, Human
uaacuuauguagauauu

SEQ ID NO: 3851840 - RNA, 19 nt, Human
uaacuuauguagauauuug

SEQ ID NO: 3851841 - RNA, 13 nt, Human
uaacuucacauau

SEQ ID NO: 3851842 - RNA, 15 nt, Human
uaacuuccaaauaaa

SEQ ID NO: 3851843 - RNA, 19 nt, Human
uaacuuccaaauaaauaau

SEQ ID NO: 3851844 - RNA, 17 nt, Human
uaacuuccaauuuacau

SEQ ID NO: 3851845 - RNA, 12 nt, Human
uaacuucuaaaa

SEQ ID NO: 3851846 - RNA, 14 nt, Human
uaacuucuaaaacu

SEQ ID NO: 3851847 - RNA, 16 nt, Human
uaacuucuaaaacugu

SEQ ID NO: 3851848 - RNA, 23 nt, Human
uaacuucuaaaacuguacuuuga

SEQ ID NO: 3851849 - RNA, 12 nt, Human
uaacuucuguuu

SEQ ID NO: 3851850 - RNA, 16 nt, Human
uaacuucuguuuuacc

SEQ ID NO: 3851851 - RNA, 23 nt, Human
uaacuucuuauggaauugauuug

SEQ ID NO: 3851852 - RNA, 15 nt, Human
uaacuugaguuuuau

SEQ ID NO: 3851853 - RNA, 21 nt, Human
uaacuugaguuuuauuuauuu

SEQ ID NO: 3851854 - RNA, 22 nt, Human
uaacuugauccauuucuaauua

SEQ ID NO: 3851855 - RNA, 15 nt, Human
uaacuugaugcaugu

SEQ ID NO: 3851856 - RNA, 15 nt, Human
uaacuugcaccucug

SEQ ID NO: 3851857 - RNA, 16 nt, Human
uaacuugcuuaaaugu

SEQ ID NO: 3851858 - RNA, 19 nt, Human
uaacuugcuuaaauuucuu

SEQ ID NO: 3851859 - RNA, 20 nt, Human
uaacuugcuuaaauuucuua

SEQ ID NO: 3851860 - RNA, 17 nt, Human
uaacuuggaugaguuuu

SEQ ID NO: 3851861 - RNA, 12 nt, Human
uaacuuggcuca

SEQ ID NO: 3851862 - RNA, 19 nt, Human
uaacuugggagugugguuu

SEQ ID NO: 3851863 - RNA, 19 nt, Human
uaacuugguuauacaugac

SEQ ID NO: 3851864 - RNA, 22 nt, Human
uaacuugguuauacaugacacu

SEQ ID NO: 3851865 - RNA, 16 nt, Human
uaacuugucuuuggac

SEQ ID NO: 3851866 - RNA, 20 nt, Human
uaacuugucuuuggacccug

SEQ ID NO: 3851867 - RNA, 15 nt, Human
uaacuuuaaguuuca

SEQ ID NO: 3851868 - RNA, 17 nt, Human
uaacuuuauaaauccag

SEQ ID NO: 3851869 - RNA, 20 nt, Human
uaacuuuauucuugaaagaa

SEQ ID NO: 3851870 - RNA, 13 nt, Human
uaacuuucagaag

SEQ ID NO: 3851871 - RNA, 19 nt, Human
uaacuuucauuaaagcauu

SEQ ID NO: 3851872 - RNA, 15 nt, Human
uaacuuucucuauga

SEQ ID NO: 3851873 - RNA, 15 nt, Human
uaacuuuggguuaaa

SEQ ID NO: 3851874 - RNA, 18 nt, Human
uaacuuugguuaaaaucu

SEQ ID NO: 3851875 - RNA, 21 nt, Human
uaacuuuguuuuauuuucaaa

SEQ ID NO: 3851876 - RNA, 21 nt, Human
uaacuuuuauaaacuuuaccu

SEQ ID NO: 3851877 - RNA, 20 nt, Human
uaacuuuucaaugacauuuu

SEQ ID NO: 3851878 - RNA, 13 nt, Human
uaacuuuuguaag

SEQ ID NO: 3851879 - RNA, 18 nt, Human
uaacuuuuguaagacaaa

SEQ ID NO: 3851880 - RNA, 10 nt, Human
uaagaaaaac

SEQ ID NO: 3851881 - RNA, 16 nt, Human
uaagaaaaaggaugca

SEQ ID NO: 3851882 - RNA, 18 nt, Human
uaagaaaaaggaugcaca

SEQ ID NO: 3851883 - RNA, 16 nt, Human
uaagaaaacaaucaca

SEQ ID NO: 3851884 - RNA, 14 nt, Human
uaagaaaagagaua

SEQ ID NO: 3851885 - RNA, 14 nt, Human
uaagaaaagauuuu

SEQ ID NO: 3851886 - RNA, 15 nt, Human
uaagaaaauaaaugu

SEQ ID NO: 3851887 - RNA, 19 nt, Human
uaagaaaauacaauaaacu

SEQ ID NO: 3851888 - RNA, 18 nt, Human
uaagaaaaugcuagaaga

SEQ ID NO: 3851889 - RNA, 20 nt, Human
uaagaaacaacucuuugaga

SEQ ID NO: 3851890 - RNA, 20 nt, Human
uaagaaacacacugaggcag

SEQ ID NO: 3851891 - RNA, 19 nt, Human
uaagaaaccaaucaagaua

SEQ ID NO: 3851892 - RNA, 19 nt, Human
uaagaaacuuuuuuauuua

SEQ ID NO: 3851893 - RNA, 21 nt, Human
uaagaaagacaucuuucucuu

SEQ ID NO: 3851894 - RNA, 15 nt, Human
uaagaaagugaagca

SEQ ID NO: 3851895 - RNA, 16 nt, Human
uaagaaauacuguaca

SEQ ID NO: 3851896 - RNA, 13 nt, Human
uaagaaauagaau

SEQ ID NO: 3851897 - RNA, 15 nt, Human
uaagaaauaucugug

SEQ ID NO: 3851898 - RNA, 19 nt, Human
uaagaaaucaaagagagaa

SEQ ID NO: 3851899 - RNA, 24 nt, Human
uaagaaaucuaguauuucaugcug

SEQ ID NO: 3851900 - RNA, 15 nt, Human
uaagaaauugaauac

SEQ ID NO: 3851901 - RNA, 18 nt, Human
uaagaaauugaauacuuu

SEQ ID NO: 3851902 - RNA, 18 nt, Human
uaagaacaaaagcgaccc

SEQ ID NO: 3851903 - RNA, 13 nt, Human
uaagaaccccucu

SEQ ID NO: 3851904 - RNA, 17 nt, Human
uaagaaccccucugcuu

SEQ ID NO: 3851905 - RNA, 14 nt, Human
uaagaaccuggaac

SEQ ID NO: 3851906 - RNA, 16 nt, Human
uaagaacuaaagaaga

SEQ ID NO: 3851907 - RNA, 21 nt, Human
uaagaacuacaaacaaaauuu

SEQ ID NO: 3851908 - RNA, 22 nt, Human
uaagaagaaaauugcugugccu

SEQ ID NO: 3851909 - RNA, 17 nt, Human
uaagaagaaguucaugu

SEQ ID NO: 3851910 - RNA, 21 nt, Human
uaagaagaaugcuuaaucaga

SEQ ID NO: 3851911 - RNA, 15 nt, Human
uaagaagacaugaac

SEQ ID NO: 3851912 - RNA, 14 nt, Human
uaagaagagacugg

SEQ ID NO: 3851913 - RNA, 21 nt, Human
uaagaagcuguuguacauuua

SEQ ID NO: 3851914 - RNA, 14 nt, Human
uaagaagcuucuaa

SEQ ID NO: 3851915 - RNA, 20 nt, Human
uaagaagcuucuaauaaauu

SEQ ID NO: 3851916 - RNA, 22 nt, Human
uaagaagcuucuaauaaauuau

SEQ ID NO: 3851917 - RNA, 15 nt, Human
uaagaaggcaauauu

SEQ ID NO: 3851918 - RNA, 20 nt, Human
uaagaagggauggauuccaa

SEQ ID NO: 3851919 - RNA, 13 nt, Human
uguaucugagcag

SEQ ID NO: 3851920 - RNA, 15 nt, Human
uguaucugaguugcc

SEQ ID NO: 3851921 - RNA, 19 nt, Human
uguaucugaguugccaaga

SEQ ID NO: 3851922 - RNA, 19 nt, Human
uguaucugucuuuccacuc

SEQ ID NO: 3851923 - RNA, 21 nt, Human
uguaucuugggggacagggcu

SEQ ID NO: 3851924 - RNA, 21 nt, Human
uguaugaaaaauuggggagga

SEQ ID NO: 3851925 - RNA, 13 nt, Human
uguaugaaaacau

SEQ ID NO: 3851926 - RNA, 22 nt, Human
uguaugaaagauggcugugccu

SEQ ID NO: 3851927 - RNA, 14 nt, Human
uguaugaaauauau

SEQ ID NO: 3851928 - RNA, 20 nt, Human
uguaugaacuuuaucuaaag

SEQ ID NO: 3851929 - RNA, 14 nt, Human
uguaugacuaaaga

SEQ ID NO: 3851930 - RNA, 21 nt, Human
uguaugacuaaagagagaaug

SEQ ID NO: 3851931 - RNA, 16 nt, Human
uguaugacugcacaug

SEQ ID NO: 3851932 - RNA, 17 nt, Human
uguaugaguagccaggg

SEQ ID NO: 3851933 - RNA, 22 nt, Human
uguaugauauuccauaguauau

SEQ ID NO: 3851934 - RNA, 13 nt, Human
uguaugaucaaau

SEQ ID NO: 3851935 - RNA, 18 nt, Human
uguaugaucaaauguuua

SEQ ID NO: 3851936 - RNA, 19 nt, Human
uguaugaucaaauguuuaa

SEQ ID NO: 3851937 - RNA, 17 nt, Human
uguaugaucugugccuu

SEQ ID NO: 3851938 - RNA, 13 nt, Human
uguaugauguguu

SEQ ID NO: 3851939 - RNA, 18 nt, Human
uguaugauguguugugau

SEQ ID NO: 3851940 - RNA, 15 nt, Human
uguaugauuuauaaa

SEQ ID NO: 3851941 - RNA, 17 nt, Human
uguaugcaacaggcacu

SEQ ID NO: 3851942 - RNA, 18 nt, Human
uguaugcaagcaguuuca

SEQ ID NO: 3851943 - RNA, 17 nt, Human
uguaugcacaugaacuu

SEQ ID NO: 3851944 - RNA, 18 nt, Human
uguaugcacaugaacuua

SEQ ID NO: 3851945 - RNA, 14 nt, Human
uguaugcacuuugu

SEQ ID NO: 3851946 - RNA, 18 nt, Human
uguaugcagcuaucuggu

SEQ ID NO: 3851947 - RNA, 12 nt, Human
uguaugcauaau

SEQ ID NO: 3851948 - RNA, 22 nt, Human
uguaugcauaauaauccugcaa

SEQ ID NO: 3851949 - RNA, 13 nt, Human
uguaugcauguug

SEQ ID NO: 3851950 - RNA, 15 nt, Human
uguaugcauguuguc

SEQ ID NO: 3851951 - RNA, 22 nt, Human
uguaugccuuuaaaucugugau

SEQ ID NO: 3851952 - RNA, 12 nt, Human
uguaugcugcuu

SEQ ID NO: 3851953 - RNA, 12 nt, Human
uguaugcuggac

SEQ ID NO: 3851954 - RNA, 14 nt, Human
uguaugcuucauac

SEQ ID NO: 3851955 - RNA, 18 nt, Human
uguauggaauacaguguu

SEQ ID NO: 3851956 - RNA, 19 nt, Human
uguauggaauacaguguua

SEQ ID NO: 3851957 - RNA, 17 nt, Human
uguauggagagaaaaca

SEQ ID NO: 3851958 - RNA, 21 nt, Human
uguauggauaguaaaauucua

SEQ ID NO: 3851959 - RNA, 23 nt, Human
ugucaaccagacagagggucaca

SEQ ID NO: 3851960 - RNA, 15 nt, Human
ugucaacuucaacau

SEQ ID NO: 3851961 - RNA, 19 nt, Human
ugucaagaagaugaucaga

SEQ ID NO: 3851962 - RNA, 19 nt, Human
ugucaagagggucugagga

SEQ ID NO: 3851963 - RNA, 18 nt, Human
ugucaagccauuuuuaca

SEQ ID NO: 3851964 - RNA, 16 nt, Human
ugucaagccugugcaa

SEQ ID NO: 3851965 - RNA, 18 nt, Human
ugucaagccugugcaaaa

SEQ ID NO: 3851966 - RNA, 20 nt, Human
ugucaagccugugcaaaaaa

SEQ ID NO: 3851967 - RNA, 19 nt, Human
ugucaagcugaccuugcug

SEQ ID NO: 3851968 - RNA, 17 nt, Human
ugucaagucucugcugg

SEQ ID NO: 3851969 - RNA, 18 nt, Human
ugucaagucucugcuggc

SEQ ID NO: 3851970 - RNA, 18 nt, Human
ugucaaguggcaaagcug

SEQ ID NO: 3851971 - RNA, 17 nt, Human
ugucaagugucaguaag

SEQ ID NO: 3851972 - RNA, 15 nt, Human
ugucaaguugugcuu

SEQ ID NO: 3851973 - RNA, 21 nt, Human
ugucaauaaaauccauacauu

SEQ ID NO: 3851974 - RNA, 23 nt, Human
ugucaauaaacagcuucaugccu

SEQ ID NO: 3851975 - RNA, 17 nt, Human
ugucaauauuaaauaca

SEQ ID NO: 3851976 - RNA, 17 nt, Human
ugucaauccagauggug

SEQ ID NO: 3851977 - RNA, 17 nt, Human
ugucaaugagagcauaa

SEQ ID NO: 3851978 - RNA, 17 nt, Human
ugucaaugauuauuuuc

SEQ ID NO: 3851979 - RNA, 13 nt, Human
ugucaaugugugc

SEQ ID NO: 3851980 - RNA, 15 nt, Human
ugucaauuacaggaa

SEQ ID NO: 3851981 - RNA, 19 nt, Human
ugucaauuacaggaaguac

SEQ ID NO: 3851982 - RNA, 16 nt, Human
ugucaauuaccagaaa

SEQ ID NO: 3851983 - RNA, 19 nt, Human
ugucaauuuauaaugauua

SEQ ID NO: 3851984 - RNA, 19 nt, Human
ugucaauuucccugacucc

SEQ ID NO: 3851985 - RNA, 16 nt, Human
ugucaauuucuguguu

SEQ ID NO: 3851986 - RNA, 16 nt, Human
ugucacaauaaaugua

SEQ ID NO: 3851987 - RNA, 16 nt, Human
ugucacaaugagauug

SEQ ID NO: 3851988 - RNA, 13 nt, Human
ugucacacacuuu

SEQ ID NO: 3851989 - RNA, 15 nt, Human
ugucacaggcagguc

SEQ ID NO: 3851990 - RNA, 18 nt, Human
ugucacaggguguucuuu

SEQ ID NO: 3851991 - RNA, 17 nt, Human
ugucacaguaaaaauaa

SEQ ID NO: 3851992 - RNA, 18 nt, Human
ugucacauggugccccua

SEQ ID NO: 3851993 - RNA, 20 nt, Human
ugucacauggugccccuagc

SEQ ID NO: 3851994 - RNA, 14 nt, Human
ugucacauugcauu

SEQ ID NO: 3851995 - RNA, 22 nt, Human
ugucaccacccugcucauccac

SEQ ID NO: 3851996 - RNA, 16 nt, Human
ugucaccaccuuccca

SEQ ID NO: 3851997 - RNA, 15 nt, Human
ugucaccagaucuga

SEQ ID NO: 3851998 - RNA, 23 nt, Human
ugucacccaaaccggcaggugcg

SEQ ID NO: 3851999 - RNA, 15 nt, Human
ugucaccccagagcc

SEQ ID NO: 3852000 - RNA, 16 nt, Human
ugucaccccagagcca

SEQ ID NO: 3852001 - RNA, 19 nt, Human
ugucaccggauccugggug

SEQ ID NO: 3852002 - RNA, 18 nt, Human
ugucaccguggaccuucc

SEQ ID NO: 3852003 - RNA, 13 nt, Human
ugucaccugaaga

SEQ ID NO: 3852004 - RNA, 13 nt, Human
ugucaccuuuucu

SEQ ID NO: 3852005 - RNA, 16 nt, Human
ugucaccuuuucuugc

SEQ ID NO: 3852006 - RNA, 20 nt, Human
ugucaccuuuucuugccuga

SEQ ID NO: 3852007 - RNA, 16 nt, Human
ugucacgauugucauc

SEQ ID NO: 3852008 - RNA, 13 nt, Human
ugucacguacugu

SEQ ID NO: 3852009 - RNA, 12 nt, Human
ugucacucaggc

SEQ ID NO: 3852010 - RNA, 22 nt, Human
ugucacucauugcugagccucu

SEQ ID NO: 3852011 - RNA, 18 nt, Human
ugucacugacacaaagga

SEQ ID NO: 3852012 - RNA, 20 nt, Human
ugucacugacacaaaggaag

SEQ ID NO: 3852013 - RNA, 21 nt, Human
ugucacugcuuuuggccugga

SEQ ID NO: 3852014 - RNA, 14 nt, Human
ugucacuggcugcc

SEQ ID NO: 3852015 - RNA, 17 nt, Human
ugucacuggcugccucc

SEQ ID NO: 3852016 - RNA, 23 nt, Human
ugucacugguagaccaaaauaaa

SEQ ID NO: 3852017 - RNA, 12 nt, Human
ugucacuguggu

SEQ ID NO: 3852018 - RNA, 13 nt, Human
ugucacuguuucu

SEQ ID NO: 3852019 - RNA, 13 nt, Human
ugucacuugcaug

SEQ ID NO: 3852020 - RNA, 15 nt, Human
ugucacuugugcuuu

SEQ ID NO: 3852021 - RNA, 12 nt, Human
ugucacuuuuug

SEQ ID NO: 3852022 - RNA, 15 nt, Human
ugucacuuuuugagg

SEQ ID NO: 3852023 - RNA, 19 nt, Human
ugucagaaaaacaauaaga

SEQ ID NO: 3852024 - RNA, 16 nt, Human
ugucagaaaccaguua

SEQ ID NO: 3852025 - RNA, 13 nt, Human
ugucagacacaga

SEQ ID NO: 3852026 - RNA, 23 nt, Human
ugucagacagaacuugaaugugu

SEQ ID NO: 3852027 - RNA, 15 nt, Human
ugucagacccuggag

SEQ ID NO: 3852028 - RNA, 12 nt, Human
ugucagacuuua

SEQ ID NO: 3852029 - RNA, 13 nt, Human
ugucagagcuggg

SEQ ID NO: 3852030 - RNA, 16 nt, Human
ugucagaguucugcuc

SEQ ID NO: 3852031 - RNA, 23 nt, Human
ugucagauauuuuuucagaaaua

SEQ ID NO: 3852032 - RNA, 24 nt, Human
ugucagauccaggagcuccagugu

SEQ ID NO: 3852033 - RNA, 17 nt, Human
ugucagaugagaacaaa

SEQ ID NO: 3852034 - RNA, 19 nt, Human
ugucagaugagaacaaagc

SEQ ID NO: 3852035 - RNA, 20 nt, Human
ugucagaugagaacaaagcu

SEQ ID NO: 3852036 - RNA, 23 nt, Human
ugucagaugagaacaaagcuguu

SEQ ID NO: 3852037 - RNA, 15 nt, Human
ugucagaugcccgag

SEQ ID NO: 3852038 - RNA, 23 nt, Human
ugucagcaaaaagcaaaaucauu

SEQ ID NO: 3852039 - RNA, 12 nt, Human
ugucagcaugaa

SEQ ID NO: 3852040 - RNA, 16 nt, Human
ugucagcaugaauuug

SEQ ID NO: 3852041 - RNA, 20 nt, Human
ugucagcaugaauuuguaau

SEQ ID NO: 3852042 - RNA, 20 nt, Human
ugucagccauugcacccagc

SEQ ID NO: 3852043 - RNA, 22 nt, Human
ugucagccgagccgggccuggg

SEQ ID NO: 3852044 - RNA, 23 nt, Human
ugucagccgagccgggccugggg

SEQ ID NO: 3852045 - RNA, 16 nt, Human
ugucagccgggcccug

SEQ ID NO: 3852046 - RNA, 21 nt, Human
ugucagccgggcccugaguaa

SEQ ID NO: 3852047 - RNA, 23 nt, Human
ugucagcgcagguuuaguuuacu

SEQ ID NO: 3852048 - RNA, 21 nt, Human
ugucagcuccccucggagaag

SEQ ID NO: 3852049 - RNA, 16 nt, Human
ugucagcugaaccugg

SEQ ID NO: 3852050 - RNA, 23 nt, Human
ugucagcugcaagguacucuggu

SEQ ID NO: 3852051 - RNA, 19 nt, Human
ugucaggaaaacacccagg

SEQ ID NO: 3852052 - RNA, 20 nt, Human
ugucaggaacagaaggauga

SEQ ID NO: 3852053 - RNA, 17 nt, Human
ugucaggaagaaaucac

SEQ ID NO: 3852054 - RNA, 14 nt, Human
ugucaggagagcag

SEQ ID NO: 3852055 - RNA, 19 nt, Human
ugucaggauugcgagagau

SEQ ID NO: 3852056 - RNA, 22 nt, Human
ugucaggauugcgagagaugug

SEQ ID NO: 3852057 - RNA, 19 nt, Human
ugucaggccuucaggguuc

SEQ ID NO: 3852058 - RNA, 18 nt, Human
ugucaggcugaaaacaau

SEQ ID NO: 3852059 - RNA, 17 nt, Human
ugucaggcugcuggcgc

SEQ ID NO: 3852060 - RNA, 19 nt, Human
ugucaggcugcuggcgccu

SEQ ID NO: 3852061 - RNA, 20 nt, Human
ugucaggcugcuggcgccuc

SEQ ID NO: 3852062 - RNA, 17 nt, Human
ugucagguggggcagcu

SEQ ID NO: 3852063 - RNA, 18 nt, Human
ugucagguggggcagcuu

SEQ ID NO: 3852064 - RNA, 15 nt, Human
ugucagguuauuuau

SEQ ID NO: 3852065 - RNA, 14 nt, Human
ugucaguauccagg

SEQ ID NO: 3852066 - RNA, 22 nt, Human
ugucaguauguggaaguguggg

SEQ ID NO: 3852067 - RNA, 16 nt, Human
ugucaguauuauucua

SEQ ID NO: 3852068 - RNA, 16 nt, Human
ugucagucacagccac

SEQ ID NO: 3852069 - RNA, 17 nt, Human
ugucagucacagccacc

SEQ ID NO: 3852070 - RNA, 22 nt, Human
ugucagucacagccaccccuga

SEQ ID NO: 3852071 - RNA, 23 nt, Human
ugucagugccgccgccucgccca

SEQ ID NO: 3852072 - RNA, 20 nt, Human
ugucaguggggcucucugag

SEQ ID NO: 3852073 - RNA, 20 nt, Human
ugucagugugacugaucucu

SEQ ID NO: 3852074 - RNA, 18 nt, Human
ugucaguuguuauuuauu

SEQ ID NO: 3852075 - RNA, 19 nt, Human
ugucaguuucagauccuga

SEQ ID NO: 3852076 - RNA, 23 nt, Human
ugucauaacauccagagcuuugu

SEQ ID NO: 3852077 - RNA, 12 nt, Human
ugucauacagag

SEQ ID NO: 3852078 - RNA, 18 nt, Human
ugucauacagagaaguca

SEQ ID NO: 3852079 - RNA, 23 nt, Human
ugucauaguucugagcugccagu

SEQ ID NO: 3852080 - RNA, 18 nt, Human
ugucauauauuacuagca

SEQ ID NO: 3852081 - RNA, 22 nt, Human
ugucaucaauugaauggucagc

SEQ ID NO: 3852082 - RNA, 13 nt, Human
ugucaucacucua

SEQ ID NO: 3852083 - RNA, 17 nt, Human
uuaauguauauaaaaau

SEQ ID NO: 3852084 - RNA, 13 nt, Human
uuaauguauguua

SEQ ID NO: 3852085 - RNA, 22 nt, Human
uuaaugucaauucuugccaaau

SEQ ID NO: 3852086 - RNA, 18 nt, Human
uuaaugucacaggcaggu

SEQ ID NO: 3852087 - RNA, 13 nt, Human
uuaaugugaacuu

SEQ ID NO: 3852088 - RNA, 23 nt, Human
uuaaugugaccuagcaauaggca

SEQ ID NO: 3852089 - RNA, 17 nt, Human
uuaaugugcuguguaaa

SEQ ID NO: 3852090 - RNA, 16 nt, Human
uuaaugugguugaaga

SEQ ID NO: 3852091 - RNA, 23 nt, Human
uuaauguucugaauaauuucuua

SEQ ID NO: 3852092 - RNA, 22 nt, Human
uuaauguuuccuuuaauuuuuu

SEQ ID NO: 3852093 - RNA, 16 nt, Human
uuaauguuuuaaaugu

SEQ ID NO: 3852094 - RNA, 15 nt, Human
uuaauguuuucaaaa

SEQ ID NO: 3852095 - RNA, 11 nt, Human
uuaauguuuuu

SEQ ID NO: 3852096 - RNA, 14 nt, Human
uuaauuaaaaacua

SEQ ID NO: 3852097 - RNA, 19 nt, Human
uuaauuaaaaacuaguagu

SEQ ID NO: 3852098 - RNA, 22 nt, Human
uuaauuaaaacacaacaucuuu

SEQ ID NO: 3852099 - RNA, 16 nt, Human
uuaauuaaacauugug

SEQ ID NO: 3852100 - RNA, 19 nt, Human
uuaauuaaauagcuuuugu

SEQ ID NO: 3852101 - RNA, 22 nt, Human
uuaauuaagcaaagcacccauu

SEQ ID NO: 3852102 - RNA, 20 nt, Human
uuaauuaaugaaauaucugu

SEQ ID NO: 3852103 - RNA, 15 nt, Human
ugugacaggcagcag

SEQ ID NO: 3852104 - RNA, 16 nt, Human
ugugacauacccccuc

SEQ ID NO: 3852105 - RNA, 19 nt, Human
ugugacaugcgggcugggc

SEQ ID NO: 3852106 - RNA, 16 nt, Human
ugugacauggugccug

SEQ ID NO: 3852107 - RNA, 17 nt, Human
ugugacauggugccuga

SEQ ID NO: 3852108 - RNA, 18 nt, Human
ugugacauggugccugag

SEQ ID NO: 3852109 - RNA, 22 nt, Human
ugugacauggugccugagaggc

SEQ ID NO: 3852110 - RNA, 13 nt, Human
ugugacauuccuu

SEQ ID NO: 3852111 - RNA, 18 nt, Human
ugugacauuuauauauug

SEQ ID NO: 3852112 - RNA, 21 nt, Human
ugugacauuugucauuuucau

SEQ ID NO: 3852113 - RNA, 15 nt, Human
ugugacauuuuacau

SEQ ID NO: 3852114 - RNA, 22 nt, Human
ugugaccaacuguguuguauua

SEQ ID NO: 3852115 - RNA, 15 nt, Human
ugugaccacaacaug

SEQ ID NO: 3852116 - RNA, 13 nt, Human
ugugaccaccacc

SEQ ID NO: 3852117 - RNA, 22 nt, Human
ugugacccagcacugcccaaag

SEQ ID NO: 3852118 - RNA, 15 nt, Human
ugugacccccagcuc

SEQ ID NO: 3852119 - RNA, 16 nt, Human
ugugacccccagcucc

SEQ ID NO: 3852120 - RNA, 14 nt, Human
ugugaccccuccug

SEQ ID NO: 3852121 - RNA, 17 nt, Human
ugugacccuccaaaugg

SEQ ID NO: 3852122 - RNA, 13 nt, Human
ugugaccucaggc

SEQ ID NO: 3852123 - RNA, 14 nt, Human
ugugaccugagggc

SEQ ID NO: 3852124 - RNA, 13 nt, Human
ugugaccugcuga

SEQ ID NO: 3852125 - RNA, 16 nt, Human
ugugaccugcugagcu

SEQ ID NO: 3852126 - RNA, 17 nt, Human
ugugaccugcugagcuc

SEQ ID NO: 3852127 - RNA, 16 nt, Human
ugugaccuuaguguuu

SEQ ID NO: 3852128 - RNA, 14 nt, Human
ugugaccuucucua

SEQ ID NO: 3852129 - RNA, 19 nt, Human
ugugacuaauuguauaaca

SEQ ID NO: 3852130 - RNA, 23 nt, Human
ugugacuaauuguauaacagguu

SEQ ID NO: 3852131 - RNA, 18 nt, Human
ugugacuaggaaaaaauu

SEQ ID NO: 3852132 - RNA, 20 nt, Human
ugugacuagugcugaagcuu

SEQ ID NO: 3852133 - RNA, 23 nt, Human
ugugacuagugcugaagcuuauu

SEQ ID NO: 3852134 - RNA, 16 nt, Human
ugugacucuggcuugg

SEQ ID NO: 3852135 - RNA, 17 nt, Human
ugugacucuggcuuggc

SEQ ID NO: 3852136 - RNA, 14 nt, Human
ugugacucuuucca

SEQ ID NO: 3852137 - RNA, 17 nt, Human
ugugacucuuuccaacc

SEQ ID NO: 3852138 - RNA, 22 nt, Human
ugugacugauguuacaucacag

SEQ ID NO: 3852139 - RNA, 18 nt, Human
uuagcuggccacauggcg

SEQ ID NO: 3852140 - RNA, 17 nt, Human
uuagcugucugcucaga

SEQ ID NO: 3852141 - RNA, 10 nt, Human
uuagcugugc

SEQ ID NO: 3852142 - RNA, 16 nt, Human
uuagcugugugaaaua

SEQ ID NO: 3852143 - RNA, 19 nt, Human
uuagcuguuauuucuauuu

SEQ ID NO: 3852144 - RNA, 15 nt, Human
uuagcuuaucaauuu

SEQ ID NO: 3852145 - RNA, 17 nt, Human
uuagcuuaucaauuugu

SEQ ID NO: 3852146 - RNA, 19 nt, Human
uuagcuuugcucugccaac

SEQ ID NO: 3852147 - RNA, 12 nt, Human
uuagcuuugugu

SEQ ID NO: 3852148 - RNA, 20 nt, Human
uuagcuuuuuaaaacauuag

SEQ ID NO: 3852149 - RNA, 18 nt, Human
uuaggaaaaucacuuugu

SEQ ID NO: 3852150 - RNA, 12 nt, Human
uuaggaaauaaa

SEQ ID NO: 3852151 - RNA, 18 nt, Human
uuaggaagcaagcuuaau

SEQ ID NO: 3852152 - RNA, 22 nt, Human
uuaggaaguugacuuauaguac

SEQ ID NO: 3852153 - RNA, 23 nt, Human
uuaggaauuaaguuaucuuuaaa

SEQ ID NO: 3852154 - RNA, 12 nt, Human
uuaggagaagcc

SEQ ID NO: 3852155 - RNA, 13 nt, Human
uuaggagaagcca

SEQ ID NO: 3852156 - RNA, 21 nt, Human
uuaggagagaagguagggguu

SEQ ID NO: 3852157 - RNA, 21 nt, Human
uuaggaguucgagaccagccu

SEQ ID NO: 3852158 - RNA, 19 nt, Human
uuaggaugcucaguugcua

SEQ ID NO: 3852159 - RNA, 17 nt, Human
uuaggaugguaaaguua

SEQ ID NO: 3852160 - RNA, 18 nt, Human
uuaggauguugaaaaagu

SEQ ID NO: 3852161 - RNA, 15 nt, Human
uuaggcagacucuuu

SEQ ID NO: 3852162 - RNA, 16 nt, Human
uuaggcagacucuuua

SEQ ID NO: 3852163 - RNA, 23 nt, Human
uuaggcagcagcuuuuaauacag

SEQ ID NO: 3852164 - RNA, 14 nt, Human
uuaggcagggaagu

SEQ ID NO: 3852165 - RNA, 20 nt, Human
uuaggcaguauaaagaauag

SEQ ID NO: 3852166 - RNA, 22 nt, Human
uuaggccaaaaaaauguaagau

SEQ ID NO: 3852167 - RNA, 18 nt, Human
uuaggccaaagacaaaua

SEQ ID NO: 3852168 - RNA, 14 nt, Human
uuaggccucugaga

SEQ ID NO: 3852169 - RNA, 18 nt, Human
uuaggccuggcacagugu

SEQ ID NO: 3852170 - RNA, 16 nt, Human
uuaggcuauucacaac

SEQ ID NO: 3852171 - RNA, 22 nt, Human
uuaggcuauuuguaaaucugcc

SEQ ID NO: 3852172 - RNA, 16 nt, Human
uuaggcugggcccaga

SEQ ID NO: 3852173 - RNA, 18 nt, Human
uuaggcugguggcccagg

SEQ ID NO: 3852174 - RNA, 15 nt, Human
uuagggaaaacauuc

SEQ ID NO: 3852175 - RNA, 17 nt, Human
uuagggaagagaaacag

SEQ ID NO: 3852176 - RNA, 13 nt, Human
uuagggagaaaau

SEQ ID NO: 3852177 - RNA, 14 nt, Human
uuagggagagaaga

SEQ ID NO: 3852178 - RNA, 15 nt, Human
uuagggagagaagau

SEQ ID NO: 3852179 - RNA, 18 nt, Human
uuagggagagucauauuu

SEQ ID NO: 3852180 - RNA, 17 nt, Human
uuagggaguauucuaau

SEQ ID NO: 3852181 - RNA, 12 nt, Human
uuagggcagcuu

SEQ ID NO: 3852182 - RNA, 14 nt, Human
uuagggcccuggag

SEQ ID NO: 3852183 - RNA, 15 nt, Human
uuagggcccuggagg

SEQ ID NO: 3852184 - RNA, 14 nt, Human
uuaggguacauuua

SEQ ID NO: 3852185 - RNA, 15 nt, Human
uuaggguacauuuau

SEQ ID NO: 3852186 - RNA, 15 nt, Human
uuagggugcagccac

SEQ ID NO: 3852187 - RNA, 20 nt, Human
uuaggguugguuccuuucca

SEQ ID NO: 3852188 - RNA, 23 nt, Human
uuagguaagaaguuuuaaaaagc

SEQ ID NO: 3852189 - RNA, 13 nt, Human
uuagguacuauuc

SEQ ID NO: 3852190 - RNA, 14 nt, Human
uuagguagaaaaac

SEQ ID NO: 3852191 - RNA, 16 nt, Human
uuaggucucuguugac

SEQ ID NO: 3852192 - RNA, 22 nt, Human
uuaggugcaauuucaagguucu

SEQ ID NO: 3852193 - RNA, 21 nt, Human
uuaggugugacugaauuucuu

SEQ ID NO: 3852194 - RNA, 14 nt, Human
uuagguuaggacuu

SEQ ID NO: 3852195 - RNA, 17 nt, Human
uuagguugugaaugcag

SEQ ID NO: 3852196 - RNA, 16 nt, Human
uuagguuuuguacaau

SEQ ID NO: 3852197 - RNA, 18 nt, Human
uuaguaaagucaaggaga

SEQ ID NO: 3852198 - RNA, 17 nt, Human
uuaguaaaugucuuugu

SEQ ID NO: 3852199 - RNA, 18 nt, Human
uuaguaaaugucuuugua

SEQ ID NO: 3852200 - RNA, 22 nt, Human
uuaguaacauaauaaauuaaaa

SEQ ID NO: 3852201 - RNA, 14 nt, Human
uuaguaaggcugug

SEQ ID NO: 3852202 - RNA, 13 nt, Human
uuaguaaucugua

SEQ ID NO: 3852203 - RNA, 12 nt, Human
uuaguaaugcua

SEQ ID NO: 3852204 - RNA, 17 nt, Human
uuaguaauuucuuuuuu

SEQ ID NO: 3852205 - RNA, 15 nt, Human
uuaguacccaccuga

SEQ ID NO: 3852206 - RNA, 17 nt, Human
uuaguacuuuauagaag

SEQ ID NO: 3852207 - RNA, 19 nt, Human
uuaguacuuuauagaagaa

SEQ ID NO: 3852208 - RNA, 13 nt, Human
uuaguagagacag

SEQ ID NO: 3852209 - RNA, 14 nt, Human
uuaguagagacagg

SEQ ID NO: 3852210 - RNA, 17 nt, Human
uuaguagagacaggguu

SEQ ID NO: 3852211 - RNA, 22 nt, Human
uuaguagagguacacuugugaa

SEQ ID NO: 3852212 - RNA, 13 nt, Human
uuaguagcauguu

SEQ ID NO: 3852213 - RNA, 20 nt, Human
uuaguauauuuauauaauua

SEQ ID NO: 3852214 - RNA, 17 nt, Human
uuaguaucuaacaugua

SEQ ID NO: 3852215 - RNA, 13 nt, Human
uuaguaucuuuug

SEQ ID NO: 3852216 - RNA, 13 nt, Human
uuaguauuaucuu

SEQ ID NO: 3852217 - RNA, 14 nt, Human
uuaguauucauucu

SEQ ID NO: 3852218 - RNA, 11 nt, Human
uuaguauugca

SEQ ID NO: 3852219 - RNA, 17 nt, Human
uuaguauugcaaaguca

SEQ ID NO: 3852220 - RNA, 12 nt, Human
uuaguauuguug

SEQ ID NO: 3852221 - RNA, 16 nt, Human
uuaguauuguuguccu

SEQ ID NO: 3852222 - RNA, 17 nt, Human
uuaguauuguuguccuu

SEQ ID NO: 3852223 - RNA, 20 nt, Human
uuaguauuguuguccuuuuc

SEQ ID NO: 3852224 - RNA, 23 nt, Human
uuaguauuguuguccuuuucaua

SEQ ID NO: 3852225 - RNA, 14 nt, Human
uuagucauagaaga

SEQ ID NO: 3852226 - RNA, 17 nt, Human
uuagucccucaugcaaa

SEQ ID NO: 3852227 - RNA, 13 nt, Human
uuaguccuugcuu

SEQ ID NO: 3852228 - RNA, 16 nt, Human
uuagucgugagcucuu

SEQ ID NO: 3852229 - RNA, 21 nt, Human
uuagucgugagcucuugugag

SEQ ID NO: 3852230 - RNA, 22 nt, Human
uuagucucuuguauuaaacucu

SEQ ID NO: 3852231 - RNA, 20 nt, Human
uuagucucuuuauuccuagu

SEQ ID NO: 3852232 - RNA, 15 nt, Human
uuagucugcaaaaug

SEQ ID NO: 3852233 - RNA, 14 nt, Human
uuagucuuuauacu

SEQ ID NO: 3852234 - RNA, 17 nt, Human
uuagugacuaaaccauu

SEQ ID NO: 3852235 - RNA, 16 nt, Human
uuagugauauuucucu

SEQ ID NO: 3852236 - RNA, 23 nt, Human
uuagugauauuucucuaguaguu

SEQ ID NO: 3852237 - RNA, 19 nt, Human
uuagugcuaagugugaacu

SEQ ID NO: 3852238 - RNA, 20 nt, Human
uuagugcuaagugugaacug

SEQ ID NO: 3852239 - RNA, 21 nt, Human
uuagugcuaagugugaacugg

SEQ ID NO: 3852240 - RNA, 16 nt, Human
uuaguggcucaacauu

SEQ ID NO: 3852241 - RNA, 23 nt, Human
uuaguggcucaacauuguguucc

SEQ ID NO: 3852242 - RNA, 15 nt, Human
uuagugggccagggc

SEQ ID NO: 3852243 - RNA, 13 nt, Human
uuaguguaaaaau

SEQ ID NO: 3852244 - RNA, 14 nt, Human
uuaguguaaaaaug

SEQ ID NO: 3852245 - RNA, 17 nt, Human
uuaguguaaaaaugaga

SEQ ID NO: 3852246 - RNA, 18 nt, Human
uuaguguaaaaaugagaa

SEQ ID NO: 3852247 - RNA, 13 nt, Human
uuaguguauccau

SEQ ID NO: 3852248 - RNA, 16 nt, Human
uuaguguaugcuuuga

SEQ ID NO: 3852249 - RNA, 16 nt, Human
uuauagauucuaaaga

SEQ ID NO: 3852250 - RNA, 18 nt, Human
uuauagcaacaacaauug

SEQ ID NO: 3852251 - RNA, 23 nt, Human
uuauagcacuuugaaauaccuca

SEQ ID NO: 3852252 - RNA, 16 nt, Human
uuauagccucugucug

SEQ ID NO: 3852253 - RNA, 17 nt, Human
uuauagcuauuacuguc

SEQ ID NO: 3852254 - RNA, 16 nt, Human
uuauagcucuaauguu

SEQ ID NO: 3852255 - RNA, 18 nt, Human
uuauagcucuaauguuug

SEQ ID NO: 3852256 - RNA, 20 nt, Human
uuauagcucuaauguuugca

SEQ ID NO: 3852257 - RNA, 13 nt, Human
uuauaguacauga

SEQ ID NO: 3852258 - RNA, 17 nt, Human
uuauaguacuagagaua

SEQ ID NO: 3852259 - RNA, 18 nt, Human
uuauaguacugacagaua

SEQ ID NO: 3852260 - RNA, 15 nt, Human
uuauagugaauacug

SEQ ID NO: 3852261 - RNA, 21 nt, Human
uuauagugaauacugcuacag

SEQ ID NO: 3852262 - RNA, 22 nt, Human
uuauagugcaauauauuuugua

SEQ ID NO: 3852263 - RNA, 17 nt, Human
uuauaguggaaaaacac

SEQ ID NO: 3852264 - RNA, 15 nt, Human
uuauaguuacugugu

SEQ ID NO: 3852265 - RNA, 20 nt, Human
uuauaguugugggugggaga

SEQ ID NO: 3852266 - RNA, 15 nt, Human
uuauaguuucugagg

SEQ ID NO: 3852267 - RNA, 12 nt, Human
uuauaguuugua

SEQ ID NO: 3852268 - RNA, 15 nt, Human
uuauaguuuguacau

SEQ ID NO: 3852269 - RNA, 16 nt, Human
uuauaguuuguacaug

SEQ ID NO: 3852270 - RNA, 16 nt, Human
uuauauaaaguauucu

SEQ ID NO: 3852271 - RNA, 22 nt, Human
uuauauaaaguauucuuuuucu

SEQ ID NO: 3852272 - RNA, 15 nt, Human
uuauauaaauuuuuu

SEQ ID NO: 3852273 - RNA, 16 nt, Human
uuauauaaucauuauu

SEQ ID NO: 3852274 - RNA, 20 nt, Human
uuauauaaucauuauuacuu

SEQ ID NO: 3852275 - RNA, 15 nt, Human
uuauauaauuauguu

SEQ ID NO: 3852276 - RNA, 17 nt, Human
uuauauaauuauguuau

SEQ ID NO: 3852277 - RNA, 20 nt, Human
uuauauaauugccaaaaagu

SEQ ID NO: 3852278 - RNA, 20 nt, Human
uuauauacaauaauggaaaa

SEQ ID NO: 3852279 - RNA, 23 nt, Human
uuauauacagaggaaaucuguaa

SEQ ID NO: 3852280 - RNA, 16 nt, Human
uuauauacuuguuguu

SEQ ID NO: 3852281 - RNA, 22 nt, Human
uuauauagauuauaacuugucu

SEQ ID NO: 3852282 - RNA, 13 nt, Human
uuauauagcaaga

SEQ ID NO: 3852283 - RNA, 14 nt, Human
uuauauagcuugaa

SEQ ID NO: 3852284 - RNA, 18 nt, Human
uuauauagcuugaaacau

SEQ ID NO: 3852285 - RNA, 18 nt, Human
uuauauaguuuacuauuu

SEQ ID NO: 3852286 - RNA, 23 nt, Human
uuauauauaaauauauuauuacu

SEQ ID NO: 3852287 - RNA, 16 nt, Human
uuauauaugaaaacua

SEQ ID NO: 3852288 - RNA, 18 nt, Human
uuauauaugaaaacuaua

SEQ ID NO: 3852289 - RNA, 17 nt, Human
uuauauauggacauggc

SEQ ID NO: 3852290 - RNA, 13 nt, Human
uuauauaugugaa

SEQ ID NO: 3852291 - RNA, 13 nt, Human
uuauauauuauau

SEQ ID NO: 3852292 - RNA, 13 nt, Human
uuauauauuuaua

SEQ ID NO: 3852293 - RNA, 17 nt, Human
uuauaucagacugcuuu

SEQ ID NO: 3852294 - RNA, 16 nt, Human
uuauaucauauguaua

SEQ ID NO: 3852295 - RNA, 14 nt, Human
uuauaucaugcaaa

SEQ ID NO: 3852296 - RNA, 21 nt, Human
uuauaucgaaauaguuacagg

SEQ ID NO: 3852297 - RNA, 21 nt, Human
uuauaucugaggaauucugua

SEQ ID NO: 3852298 - RNA, 23 nt, Human
uuauaucugaggaauucuguaua

SEQ ID NO: 3852299 - RNA, 15 nt, Human
uuauaucuuguagcu

SEQ ID NO: 3852300 - RNA, 15 nt, Human
uuauaugaacauaca

SEQ ID NO: 3852301 - RNA, 15 nt, Human
uuauaugaagaaaau

SEQ ID NO: 3852302 - RNA, 16 nt, Human
uuauaugaagauaagu

SEQ ID NO: 3852303 - RNA, 19 nt, Human
uuauaugcuuacugauaua

SEQ ID NO: 3852304 - RNA, 15 nt, Human
uuauauggaaauaua

SEQ ID NO: 3852305 - RNA, 18 nt, Human
uuauauggaaauauauau

SEQ ID NO: 3852306 - RNA, 14 nt, Human
ugugcauuuucuaa

SEQ ID NO: 3852307 - RNA, 17 nt, Human
ugugccaauauguauug

SEQ ID NO: 3852308 - RNA, 13 nt, Human
ugugccagagccu

SEQ ID NO: 3852309 - RNA, 14 nt, Human
ugugccagagccug

SEQ ID NO: 3852310 - RNA, 15 nt, Human
ugugccagagccugg

SEQ ID NO: 3852311 - RNA, 17 nt, Human
ugugccagagccugggg

SEQ ID NO: 3852312 - RNA, 22 nt, Human
ugugccagagccuggggcucua

SEQ ID NO: 3852313 - RNA, 19 nt, Human
ugugccaggugaaggaggc

SEQ ID NO: 3852314 - RNA, 22 nt, Human
ugugccauagaguuuaacacaa

SEQ ID NO: 3852315 - RNA, 16 nt, Human
ugugccauagucacau

SEQ ID NO: 3852316 - RNA, 22 nt, Human
ugugccauuuuaaaaaaaaagg

SEQ ID NO: 3852317 - RNA, 12 nt, Human
ugugcccaaguu

SEQ ID NO: 3852318 - RNA, 20 nt, Human
ugugcccacaucccaggcuu

SEQ ID NO: 3852319 - RNA, 21 nt, Human
ugugcccacaucccaggcuuc

SEQ ID NO: 3852320 - RNA, 14 nt, Human
ugugcccacccucc

SEQ ID NO: 3852321 - RNA, 17 nt, Human
ugugcccagaauacuga

SEQ ID NO: 3852322 - RNA, 14 nt, Human
ugugcccagcucag

SEQ ID NO: 3852323 - RNA, 16 nt, Human
ugugcccagcucaguc

SEQ ID NO: 3852324 - RNA, 12 nt, Human
ugugcccaguua

SEQ ID NO: 3852325 - RNA, 22 nt, Human
ugugcccaguuaaucuugcuuu

SEQ ID NO: 3852326 - RNA, 19 nt, Human
ugugcccaugggcacugcu

SEQ ID NO: 3852327 - RNA, 23 nt, Human
ugugccccaugccuguccagccu

SEQ ID NO: 3852328 - RNA, 16 nt, Human
ugugcccccagacgca

SEQ ID NO: 3852329 - RNA, 22 nt, Human
ugugcccccagacgcacguggg

SEQ ID NO: 3852330 - RNA, 16 nt, Human
ugugcccccagggucc

SEQ ID NO: 3852331 - RNA, 22 nt, Human
ugugcccccaggguccugggag

SEQ ID NO: 3852332 - RNA, 13 nt, Human
ugugccccccauc

SEQ ID NO: 3852333 - RNA, 21 nt, Human
ugugccccccauccuggccca

SEQ ID NO: 3852334 - RNA, 16 nt, Human
ugugccccuugacaac

SEQ ID NO: 3852335 - RNA, 20 nt, Human
ugugcccuaaaguguauuuu

SEQ ID NO: 3852336 - RNA, 13 nt, Human
ugugcccucccug

SEQ ID NO: 3852337 - RNA, 12 nt, Human
ugugcccucugg

SEQ ID NO: 3852338 - RNA, 14 nt, Human
ugugcccucugggc

SEQ ID NO: 3852339 - RNA, 17 nt, Human
ugugcccucugggcucu

SEQ ID NO: 3852340 - RNA, 18 nt, Human
ugugcccucugggcucug

SEQ ID NO: 3852341 - RNA, 14 nt, Human
ugugcccuggugga

SEQ ID NO: 3852342 - RNA, 16 nt, Human
ugugccgaaugugcag

SEQ ID NO: 3852343 - RNA, 15 nt, Human
ugugccgacagaagg

SEQ ID NO: 3852344 - RNA, 23 nt, Human
ugugccuaaauaaguuauaaaga

SEQ ID NO: 3852345 - RNA, 15 nt, Human
ugugccuaacaccag

SEQ ID NO: 3852346 - RNA, 14 nt, Human
ugugccuaaugugu

SEQ ID NO: 3852347 - RNA, 15 nt, Human
ugugccuaauguguu

SEQ ID NO: 3852348 - RNA, 17 nt, Human
ugugccuaauguguuug

SEQ ID NO: 3852349 - RNA, 17 nt, Human
ugugccuauagucccag

SEQ ID NO: 3852350 - RNA, 19 nt, Human
ugugccuauugcuagagcu

SEQ ID NO: 3852351 - RNA, 16 nt, Human
ugugccucccugguga

SEQ ID NO: 3852352 - RNA, 21 nt, Human
ugugccuccucccucccucuc

SEQ ID NO: 3852353 - RNA, 20 nt, Human
ugugccucgcuccccacucu

SEQ ID NO: 3852354 - RNA, 16 nt, Human
ugugccucuagcugaa

SEQ ID NO: 3852355 - RNA, 20 nt, Human
ugugccucuagcugaauuga

SEQ ID NO: 3852356 - RNA, 12 nt, Human
ugugccucugcc

SEQ ID NO: 3852357 - RNA, 17 nt, Human
ugugccucugggacugg

SEQ ID NO: 3852358 - RNA, 18 nt, Human
ugugccugacugcccagc

SEQ ID NO: 3852359 - RNA, 23 nt, Human
ugugccugcuucagccucccaca

SEQ ID NO: 3852360 - RNA, 15 nt, Human
ugugccuggcucaga

SEQ ID NO: 3852361 - RNA, 21 nt, Human
ugugccugggggaguuuuccu

SEQ ID NO: 3852362 - RNA, 12 nt, Human
ugugccuggggu

SEQ ID NO: 3852363 - RNA, 20 nt, Human
ugugccuggguggacauggc

SEQ ID NO: 3852364 - RNA, 13 nt, Human
ugugccugugugc

SEQ ID NO: 3852365 - RNA, 15 nt, Human
ugugccuuauguuga

SEQ ID NO: 3852366 - RNA, 23 nt, Human
ugugccuucgucuuucccauggg

SEQ ID NO: 3852367 - RNA, 21 nt, Human
ugugccuucucucucccuuuu

SEQ ID NO: 3852368 - RNA, 16 nt, Human
ugugccuucuuuugau

SEQ ID NO: 3852369 - RNA, 16 nt, Human
ugugccuuugcaaauc

SEQ ID NO: 3852370 - RNA, 18 nt, Human
ugugccuuugcaaaucag

SEQ ID NO: 3852371 - RNA, 20 nt, Human
ugugccuuugcaaaucagug

SEQ ID NO: 3852372 - RNA, 19 nt, Human
ugugcgcuaaacuuuucug

SEQ ID NO: 3852373 - RNA, 22 nt, Human
ugugcgcuaaacuuuucugaua

SEQ ID NO: 3852374 - RNA, 14 nt, Human
ugugcguccugucg

SEQ ID NO: 3852375 - RNA, 14 nt, Human
ugugcgugaaacac

SEQ ID NO: 3852376 - RNA, 16 nt, Human
ugugcgugaaacacac

SEQ ID NO: 3852377 - RNA, 15 nt, Human
ugugcgugcaugugc

SEQ ID NO: 3852378 - RNA, 19 nt, Human
ugugcgugguggucccugg

SEQ ID NO: 3852379 - RNA, 15 nt, Human
ugugcuacaggggcc

SEQ ID NO: 3852380 - RNA, 17 nt, Human
ugugcuacaggggccag

SEQ ID NO: 3852381 - RNA, 14 nt, Human
ugugcuacuuugcc

SEQ ID NO: 3852382 - RNA, 15 nt, Human
ugugcuacuuugccu

SEQ ID NO: 3852383 - RNA, 16 nt, Human
ugugcuagaauacuuu

SEQ ID NO: 3852384 - RNA, 18 nt, Human
ugugcuagaauacuuuuu

SEQ ID NO: 3852385 - RNA, 18 nt, Human
ugugcuauaguauuugau

SEQ ID NO: 3852386 - RNA, 17 nt, Human
ugugcuauuaauauuug

SEQ ID NO: 3852387 - RNA, 18 nt, Human
ugugcuauuaauauuugu

SEQ ID NO: 3852388 - RNA, 20 nt, Human
ugugcucaaaauuugaagaa

SEQ ID NO: 3852389 - RNA, 15 nt, Human
ugugcucagaagggc

SEQ ID NO: 3852390 - RNA, 14 nt, Human
ugugcucagaauua

SEQ ID NO: 3852391 - RNA, 12 nt, Human
ugugcucagaga

SEQ ID NO: 3852392 - RNA, 22 nt, Human
ugugcucagagaccugaagugu

SEQ ID NO: 3852393 - RNA, 17 nt, Human
ugugcucaggagcccug

SEQ ID NO: 3852394 - RNA, 14 nt, Human
uuauuuuuuacauu

SEQ ID NO: 3852395 - RNA, 13 nt, Human
uuauuuuuuauac

SEQ ID NO: 3852396 - RNA, 14 nt, Human
uuauuuuuuauaca

SEQ ID NO: 3852397 - RNA, 13 nt, Human
uuauuuuuuccca

SEQ ID NO: 3852398 - RNA, 17 nt, Human
uuauuuuuuucugaauu

SEQ ID NO: 3852399 - RNA, 14 nt, Human
uucaaaaaaacacu

SEQ ID NO: 3852400 - RNA, 16 nt, Human
uucaaaaaacuuguaa

SEQ ID NO: 3852401 - RNA, 15 nt, Human
uucaaaaacuguauu

SEQ ID NO: 3852402 - RNA, 13 nt, Human
uucaaaaacuguu

SEQ ID NO: 3852403 - RNA, 21 nt, Human
uucaaaaacuguuuuggguag

SEQ ID NO: 3852404 - RNA, 21 nt, Human
uucaaaaagucuacgcucucc

SEQ ID NO: 3852405 - RNA, 15 nt, Human
uucaaaaauauaacu

SEQ ID NO: 3852406 - RNA, 18 nt, Human
uucaaaaaucugaagauu

SEQ ID NO: 3852407 - RNA, 21 nt, Human
uucaaaaaucugaagauuguu

SEQ ID NO: 3852408 - RNA, 22 nt, Human
uucaaaaaucugaagauuguuu

SEQ ID NO: 3852409 - RNA, 11 nt, Human
uucaaaaaugu

SEQ ID NO: 3852410 - RNA, 13 nt, Human
uucaaaaauuugg

SEQ ID NO: 3852411 - RNA, 17 nt, Human
uucaaaaauuuggaauu

SEQ ID NO: 3852412 - RNA, 23 nt, Human
uucaaaacaaacagaugcucuga

SEQ ID NO: 3852413 - RNA, 12 nt, Human
uucaaaagaaag

SEQ ID NO: 3852414 - RNA, 21 nt, Human
uucaaaagaaucagaaacagg

SEQ ID NO: 3852415 - RNA, 20 nt, Human
uucaaaagguauuauacaug

SEQ ID NO: 3852416 - RNA, 22 nt, Human
uucaaaaguaaugccucugucu

SEQ ID NO: 3852417 - RNA, 15 nt, Human
uucaaaaguuccaag

SEQ ID NO: 3852418 - RNA, 14 nt, Human
uucaaaauaaaaac

SEQ ID NO: 3852419 - RNA, 17 nt, Human
uucaaaauaaaaaugag

SEQ ID NO: 3852420 - RNA, 17 nt, Human
uucaaaauaaaauauca

SEQ ID NO: 3852421 - RNA, 15 nt, Human
uucaaaauauuuaaa

SEQ ID NO: 3852422 - RNA, 22 nt, Human
uucaaaauauuuaaaaaugucu

SEQ ID NO: 3852423 - RNA, 19 nt, Human
uucaaaauccuuccaaaga

SEQ ID NO: 3852424 - RNA, 19 nt, Human
uucaaaaugauuuccucug

SEQ ID NO: 3852425 - RNA, 14 nt, Human
uucaaaauguauau

SEQ ID NO: 3852426 - RNA, 18 nt, Human
uucaaaaugucuguagcu

SEQ ID NO: 3852427 - RNA, 16 nt, Human
uucaaaauuaaaucug

SEQ ID NO: 3852428 - RNA, 18 nt, Human
uucaaaauucuaaaugua

SEQ ID NO: 3852429 - RNA, 21 nt, Human
uucaaaauuguuacaaauugu

SEQ ID NO: 3852430 - RNA, 17 nt, Human
uucaaacacaaaugcag

SEQ ID NO: 3852431 - RNA, 14 nt, Human
uucaaacggccuca

SEQ ID NO: 3852432 - RNA, 12 nt, Human
uucaaacuacuu

SEQ ID NO: 3852433 - RNA, 21 nt, Human
uucaaacuggggccuccagaa

SEQ ID NO: 3852434 - RNA, 13 nt, Human
uucaaacugugaa

SEQ ID NO: 3852435 - RNA, 19 nt, Human
uucaaacuuacuauuuuga

SEQ ID NO: 3852436 - RNA, 22 nt, Human
uucaaagcaauugaaaugcauu

SEQ ID NO: 3852437 - RNA, 21 nt, Human
uucaaagcaccaaaauaagaa

SEQ ID NO: 3852438 - RNA, 23 nt, Human
uucaaagcaccaaaauaagaaaa

SEQ ID NO: 3852439 - RNA, 16 nt, Human
uucaaagcaugaaaug

SEQ ID NO: 3852440 - RNA, 16 nt, Human
uucaaagccaagaccu

SEQ ID NO: 3852441 - RNA, 21 nt, Human
uucaaagccaagaccucacac

SEQ ID NO: 3852442 - RNA, 23 nt, Human
uucaaagccaaguuuauauacaa

SEQ ID NO: 3852443 - RNA, 13 nt, Human
uucaaagccacau

SEQ ID NO: 3852444 - RNA, 14 nt, Human
uucaaagccauuuu

SEQ ID NO: 3852445 - RNA, 12 nt, Human
uucaaagccuuc

SEQ ID NO: 3852446 - RNA, 20 nt, Human
uucaaagcuguguguuugga

SEQ ID NO: 3852447 - RNA, 23 nt, Human
uucaaagcuguguguuuggaaga

SEQ ID NO: 3852448 - RNA, 22 nt, Human
uucaaagcuuuuuccagaggcu

SEQ ID NO: 3852449 - RNA, 19 nt, Human
uucaaagucaugauguuuu

SEQ ID NO: 3852450 - RNA, 11 nt, Human
uucaaagucuc

SEQ ID NO: 3852451 - RNA, 20 nt, Human
uucaaagucucaaugaaaua

SEQ ID NO: 3852452 - RNA, 16 nt, Human
uucaaaguugccuaaa

SEQ ID NO: 3852453 - RNA, 17 nt, Human
uucaaaguugccuaaau

SEQ ID NO: 3852454 - RNA, 23 nt, Human
uucaaaguugccuaaauccauuu

SEQ ID NO: 3852455 - RNA, 15 nt, Human
uucaaauccuuccaa

SEQ ID NO: 3852456 - RNA, 19 nt, Human
uucaaaucguuuauuucac

SEQ ID NO: 3852457 - RNA, 22 nt, Human
uucaaaugauuuuuacaaguuu

SEQ ID NO: 3852458 - RNA, 16 nt, Human
uucaaauggguuuucc

SEQ ID NO: 3852459 - RNA, 21 nt, Human
uucaaauggguuuuccacgcu

SEQ ID NO: 3852460 - RNA, 18 nt, Human
uucaaauguauuacagug

SEQ ID NO: 3852461 - RNA, 16 nt, Human
uucaaauucuucugaa

SEQ ID NO: 3852462 - RNA, 18 nt, Human
uucaaauugagagaaugg

SEQ ID NO: 3852463 - RNA, 19 nt, Human
uucaaauuggacuuucaaa

SEQ ID NO: 3852464 - RNA, 16 nt, Human
uucaaauugucuuuug

SEQ ID NO: 3852465 - RNA, 15 nt, Human
uucaacaauucuaaa

SEQ ID NO: 3852466 - RNA, 23 nt, Human
uucaacagacccccucuagaaau

SEQ ID NO: 3852467 - RNA, 20 nt, Human
uucaacagcaagugugaaua

SEQ ID NO: 3852468 - RNA, 15 nt, Human
uucaacaucaauguu

SEQ ID NO: 3852469 - RNA, 17 nt, Human
uucaacauccugccagc

SEQ ID NO: 3852470 - RNA, 18 nt, Human
uucaaccagggauuguuu

SEQ ID NO: 3852471 - RNA, 16 nt, Human
uucaaccaugaagucu

SEQ ID NO: 3852472 - RNA, 15 nt, Human
uucaaccauucccca

SEQ ID NO: 3852473 - RNA, 17 nt, Human
uucaaccauuccccaug

SEQ ID NO: 3852474 - RNA, 20 nt, Human
uucaaccauuccccauggga

SEQ ID NO: 3852475 - RNA, 17 nt, Human
uucaacccacagcuacu

SEQ ID NO: 3852476 - RNA, 20 nt, Human
uucaacccccuuaacuguau

SEQ ID NO: 3852477 - RNA, 13 nt, Human
uucaacccuggag

SEQ ID NO: 3852478 - RNA, 23 nt, Human
uucaaccucuagaauuuuaagcc

SEQ ID NO: 3852479 - RNA, 16 nt, Human
uucaacggaaagugcu

SEQ ID NO: 3852480 - RNA, 18 nt, Human
uucaacuauuuuauuauc

SEQ ID NO: 3852481 - RNA, 12 nt, Human
uucaacucagac

SEQ ID NO: 3852482 - RNA, 17 nt, Human
uucaacugaccagccuc

SEQ ID NO: 3852483 - RNA, 21 nt, Human
uucaacugccaaaaugcucua

SEQ ID NO: 3852484 - RNA, 13 nt, Human
uucaacuuugaau

SEQ ID NO: 3852485 - RNA, 20 nt, Human
uucaacuuugaauaaagaau

SEQ ID NO: 3852486 - RNA, 13 nt, Human
uucaagaaacuga

SEQ ID NO: 3852487 - RNA, 12 nt, Human
uucaagaaauaa

SEQ ID NO: 3852488 - RNA, 17 nt, Human
uucaagaaaugaagagc

SEQ ID NO: 3852489 - RNA, 14 nt, Human
uucaagaccagccu

SEQ ID NO: 3852490 - RNA, 17 nt, Human
uucaagaccagccuggc

SEQ ID NO: 3852491 - RNA, 18 nt, Human
uucaagaccuucucccca

SEQ ID NO: 3852492 - RNA, 18 nt, Human
uucaagagauuuaauuaa

SEQ ID NO: 3852493 - RNA, 15 nt, Human
uucaagaggagcccc

SEQ ID NO: 3852494 - RNA, 13 nt, Human
uucaagaucaaaa

SEQ ID NO: 3852495 - RNA, 16 nt, Human
uucaagcaauccuccc

SEQ ID NO: 3852496 - RNA, 17 nt, Human
uucaagcagauuggaga

SEQ ID NO: 3852497 - RNA, 18 nt, Human
uucaagcagucgugccug

SEQ ID NO: 3852498 - RNA, 15 nt, Human
uucaagcauuaagaa

SEQ ID NO: 3852499 - RNA, 20 nt, Human
uucaagccugugcaaugcau

SEQ ID NO: 3852500 - RNA, 20 nt, Human
uucaagcgauucuucugccu

SEQ ID NO: 3852501 - RNA, 19 nt, Human
uucaaggaguaugcaggga

SEQ ID NO: 3852502 - RNA, 18 nt, Human
uucaaggauccugagcca

SEQ ID NO: 3852503 - RNA, 14 nt, Human
uucaaggcacucua

SEQ ID NO: 3852504 - RNA, 16 nt, Human
uucaaggcacucuaga

SEQ ID NO: 3852505 - RNA, 17 nt, Human
uucaaggcacucuagau

SEQ ID NO: 3852506 - RNA, 18 nt, Human
uucaaggcacucuagauu

SEQ ID NO: 3852507 - RNA, 21 nt, Human
uucaaggcacucuagauucca

SEQ ID NO: 3852508 - RNA, 22 nt, Human
uucaaggcacucuagauuccau

SEQ ID NO: 3852509 - RNA, 17 nt, Human
uucaaguacacugaauu

SEQ ID NO: 3852510 - RNA, 21 nt, Human
uucaaguauuagggguaauau

SEQ ID NO: 3852511 - RNA, 14 nt, Human
uucaaguauuuaag

SEQ ID NO: 3852512 - RNA, 19 nt, Human
uucaagucaguucugugau

SEQ ID NO: 3852513 - RNA, 22 nt, Human
uacacccccucuucugagcaca

SEQ ID NO: 3852514 - RNA, 16 nt, Human
uacaccgacuagccag

SEQ ID NO: 3852515 - RNA, 17 nt, Human
uacaccgacuagccagg

SEQ ID NO: 3852516 - RNA, 12 nt, Human
uacaccuaacuc

SEQ ID NO: 3852517 - RNA, 22 nt, Human
uacaccuaacucaccuaacuca

SEQ ID NO: 3852518 - RNA, 13 nt, Human
uacaccuggcuga

SEQ ID NO: 3852519 - RNA, 14 nt, Human
uacaccuggcugag

SEQ ID NO: 3852520 - RNA, 14 nt, Human
uacaccuugccuug

SEQ ID NO: 3852521 - RNA, 14 nt, Human
uacaccuugcuuuu

SEQ ID NO: 3852522 - RNA, 19 nt, Human
uacaccuugcuuuuuuacu

SEQ ID NO: 3852523 - RNA, 20 nt, Human
uacaccuuucuccuuuguac

SEQ ID NO: 3852524 - RNA, 14 nt, Human
uacacgaaagagag

SEQ ID NO: 3852525 - RNA, 16 nt, Human
uacacgaaagagagag

SEQ ID NO: 3852526 - RNA, 18 nt, Human
uacacgaauagacaucaa

SEQ ID NO: 3852527 - RNA, 21 nt, Human
uacacgaccauuugauaggga

SEQ ID NO: 3852528 - RNA, 17 nt, Human
uacacgcuuuugugaug

SEQ ID NO: 3852529 - RNA, 17 nt, Human
uacacguguccuguagu

SEQ ID NO: 3852530 - RNA, 14 nt, Human
uacacuaagagaga

SEQ ID NO: 3852531 - RNA, 14 nt, Human
uacacuaguuguuu

SEQ ID NO: 3852532 - RNA, 13 nt, Human
uacacuaucuuaa

SEQ ID NO: 3852533 - RNA, 17 nt, Human
uacacuccagccugagc

SEQ ID NO: 3852534 - RNA, 18 nt, Human
uacacuccagccugagca

SEQ ID NO: 3852535 - RNA, 14 nt, Human
uacacuccagugag

SEQ ID NO: 3852536 - RNA, 19 nt, Human
uacacucguaugauacuuc

SEQ ID NO: 3852537 - RNA, 22 nt, Human
uacacucuccugggccccuccc

SEQ ID NO: 3852538 - RNA, 13 nt, Human
uacacucuuauag

SEQ ID NO: 3852539 - RNA, 18 nt, Human
uguuggcacaugccugua

SEQ ID NO: 3852540 - RNA, 18 nt, Human
uguuggcaggcuggccag

SEQ ID NO: 3852541 - RNA, 14 nt, Human
uguuggccaggcug

SEQ ID NO: 3852542 - RNA, 16 nt, Human
uguuggccaggcuggu

SEQ ID NO: 3852543 - RNA, 17 nt, Human
uguuggccuccggccuc

SEQ ID NO: 3852544 - RNA, 23 nt, Human
uguuggcguaggcuacagagaag

SEQ ID NO: 3852545 - RNA, 23 nt, Human
uguuggcguggggccuuugucag

SEQ ID NO: 3852546 - RNA, 14 nt, Human
uguuggcuagccuc

SEQ ID NO: 3852547 - RNA, 22 nt, Human
uguuggcugggaacucaccugg

SEQ ID NO: 3852548 - RNA, 23 nt, Human
uguugggaaaaaggccucugucc

SEQ ID NO: 3852549 - RNA, 19 nt, Human
uguugggaaacuuggcucg

SEQ ID NO: 3852550 - RNA, 18 nt, Human
uguugggagugaggaugu

SEQ ID NO: 3852551 - RNA, 18 nt, Human
uguugggaucgcauugca

SEQ ID NO: 3852552 - RNA, 15 nt, Human
uguugggauuccuga

SEQ ID NO: 3852553 - RNA, 20 nt, Human
uguuggggaagggccugccc

SEQ ID NO: 3852554 - RNA, 15 nt, Human
uguuggggcaguggu

SEQ ID NO: 3852555 - RNA, 18 nt, Human
uguugggguggguauaaa

SEQ ID NO: 3852556 - RNA, 20 nt, Human
uguugggguggguauaaaag

SEQ ID NO: 3852557 - RNA, 14 nt, Human
uguuggucauuuua

SEQ ID NO: 3852558 - RNA, 19 nt, Human
uguugguuccaagcccugg

SEQ ID NO: 3852559 - RNA, 15 nt, Human
uguugguugcacuuu

SEQ ID NO: 3852560 - RNA, 13 nt, Human
uguugguuuacuu

SEQ ID NO: 3852561 - RNA, 14 nt, Human
uguugguuuugacu

SEQ ID NO: 3852562 - RNA, 21 nt, Human
uguugguuuugggggugugag

SEQ ID NO: 3852563 - RNA, 15 nt, Human
uguugguuuuuaaag

SEQ ID NO: 3852564 - RNA, 13 nt, Human
uguuguaaaaaga

SEQ ID NO: 3852565 - RNA, 15 nt, Human
uguuguaaaaagaaa

SEQ ID NO: 3852566 - RNA, 17 nt, Human
uguuguaaaacaaaauu

SEQ ID NO: 3852567 - RNA, 16 nt, Human
uguuguaaacauuucu

SEQ ID NO: 3852568 - RNA, 15 nt, Human
uguuguaaagaguug

SEQ ID NO: 3852569 - RNA, 21 nt, Human
uguuguaaauauuuauguaaa

SEQ ID NO: 3852570 - RNA, 18 nt, Human
uguuguaaccugcuguga

SEQ ID NO: 3852571 - RNA, 12 nt, Human
uguuguaacuua

SEQ ID NO: 3852572 - RNA, 19 nt, Human
uguuguaacuuauguagau

SEQ ID NO: 3852573 - RNA, 16 nt, Human
uguuguaaugcugcac

SEQ ID NO: 3852574 - RNA, 15 nt, Human
uguuguaauucuuca

SEQ ID NO: 3852575 - RNA, 19 nt, Human
uguuguaauucuucaguug

SEQ ID NO: 3852576 - RNA, 13 nt, Human
uguuguacauuua

SEQ ID NO: 3852577 - RNA, 14 nt, Human
uguuguacauuuau

SEQ ID NO: 3852578 - RNA, 15 nt, Human
uguuguacauuuaug

SEQ ID NO: 3852579 - RNA, 18 nt, Human
uguuguacauuuaugauu

SEQ ID NO: 3852580 - RNA, 23 nt, Human
uguuguagagaaaacaugcagaa

SEQ ID NO: 3852581 - RNA, 11 nt, Human
uguuguagugu

SEQ ID NO: 3852582 - RNA, 13 nt, Human
uguugucaaagag

SEQ ID NO: 3852583 - RNA, 13 nt, Human
uguugucagcuga

SEQ ID NO: 3852584 - RNA, 11 nt, Human
uguugucauug

SEQ ID NO: 3852585 - RNA, 16 nt, Human
uguugucauugcuuua

SEQ ID NO: 3852586 - RNA, 19 nt, Human
uguugucauuguaaacaaa

SEQ ID NO: 3852587 - RNA, 17 nt, Human
uguuguccaacuauuua

SEQ ID NO: 3852588 - RNA, 17 nt, Human
uguuguccgguuuacuu

SEQ ID NO: 3852589 - RNA, 17 nt, Human
uguuguccuuuugucuu

SEQ ID NO: 3852590 - RNA, 18 nt, Human
uguugucguaaagauuug

SEQ ID NO: 3852591 - RNA, 15 nt, Human
uguugucucuucucc

SEQ ID NO: 3852592 - RNA, 17 nt, Human
uguugucucuucuccuu

SEQ ID NO: 3852593 - RNA, 15 nt, Human
uguugucucuugagu

SEQ ID NO: 3852594 - RNA, 16 nt, Human
uguugucugcaacucu

SEQ ID NO: 3852595 - RNA, 20 nt, Human
uguugugaauaauuacagug

SEQ ID NO: 3852596 - RNA, 12 nt, Human
uguugugaaugu

SEQ ID NO: 3852597 - RNA, 13 nt, Human
uguugugaauguu

SEQ ID NO: 3852598 - RNA, 13 nt, Human
uguugugcuuuua

SEQ ID NO: 3852599 - RNA, 21 nt, Human
uguuguggguucuauguuuac

SEQ ID NO: 3852600 - RNA, 16 nt, Human
uguuguguacagacuu

SEQ ID NO: 3852601 - RNA, 21 nt, Human
uguugugugccucuagcugaa

SEQ ID NO: 3852602 - RNA, 13 nt, Human
uguugugugugca

SEQ ID NO: 3852603 - RNA, 15 nt, Human
uguugugugugcagg

SEQ ID NO: 3852604 - RNA, 14 nt, Human
uguuguguguggga

SEQ ID NO: 3852605 - RNA, 14 nt, Human
uguuguuaugaugu

SEQ ID NO: 3852606 - RNA, 18 nt, Human
uguuguuccuuuugaaag

SEQ ID NO: 3852607 - RNA, 18 nt, Human
uguuguucuguuaacuga

SEQ ID NO: 3852608 - RNA, 16 nt, Human
uguuguucuuacaaac

SEQ ID NO: 3852609 - RNA, 23 nt, Human
uguuguucuuggcaauaaauuuu

SEQ ID NO: 3852610 - RNA, 20 nt, Human
uguuguugcuucuugugaag

SEQ ID NO: 3852611 - RNA, 13 nt, Human
uguuguugguugu

SEQ ID NO: 3852612 - RNA, 13 nt, Human
uguuguuuaaugu

SEQ ID NO: 3852613 - RNA, 15 nt, Human
uguuguuuauaauaa

SEQ ID NO: 3852614 - RNA, 14 nt, Human
uguuguuucaguga

SEQ ID NO: 3852615 - RNA, 21 nt, Human
uguuguuucagugaauaugcc

SEQ ID NO: 3852616 - RNA, 21 nt, Human
uguuguuucuuaaauaagaaa

SEQ ID NO: 3852617 - RNA, 13 nt, Human
uguuguuucuuuc

SEQ ID NO: 3852618 - RNA, 14 nt, Human
uguuguuucuuucu

SEQ ID NO: 3852619 - RNA, 17 nt, Human
uguuguuugaaaauauu

SEQ ID NO: 3852620 - RNA, 14 nt, Human
uguuguuuguaaau

SEQ ID NO: 3852621 - RNA, 21 nt, Human
uguuguuuguaaauaagagau

SEQ ID NO: 3852622 - RNA, 16 nt, Human
uguuguuuuguacaga

SEQ ID NO: 3852623 - RNA, 17 nt, Human
uguuuaaaaaaguuuaa

SEQ ID NO: 3852624 - RNA, 18 nt, Human
uguuuaaaaaaguuuaaa

SEQ ID NO: 3852625 - RNA, 22 nt, Human
uguuuaaaaaaguuuaaaaugu

SEQ ID NO: 3852626 - RNA, 12 nt, Human
uguuuaaaacac

SEQ ID NO: 3852627 - RNA, 15 nt, Human
uguuuaaaacaucau

SEQ ID NO: 3852628 - RNA, 12 nt, Human
uguuuaaaacuu

SEQ ID NO: 3852629 - RNA, 14 nt, Human
uguuuaaaauaaaa

SEQ ID NO: 3852630 - RNA, 21 nt, Human
uguuuaaaauaaaaugaaaau

SEQ ID NO: 3852631 - RNA, 18 nt, Human
uguuuaaaaucauuucug

SEQ ID NO: 3852632 - RNA, 13 nt, Human
uguuuaaaaugua

SEQ ID NO: 3852633 - RNA, 20 nt, Human
uguuuaaaauguaauuuaaa

SEQ ID NO: 3852634 - RNA, 23 nt, Human
uguuuaaagguuucuauuuucuc

SEQ ID NO: 3852635 - RNA, 15 nt, Human
uguuuaaauaaagua

SEQ ID NO: 3852636 - RNA, 18 nt, Human
uguuuaagaaaaguauuu

SEQ ID NO: 3852637 - RNA, 17 nt, Human
uguuuaagacacuuccg

SEQ ID NO: 3852638 - RNA, 12 nt, Human
uguuuaagagac

SEQ ID NO: 3852639 - RNA, 18 nt, Human
uguuuaagauuuaauuug

SEQ ID NO: 3852640 - RNA, 20 nt, Human
uguuuaagauuuaauuugcc

SEQ ID NO: 3852641 - RNA, 14 nt, Human
uguuuaagcagaau

SEQ ID NO: 3852642 - RNA, 21 nt, Human
uguuuaaguguuguaaauauu

SEQ ID NO: 3852643 - RNA, 14 nt, Human
uguuuaauauuuaa

SEQ ID NO: 3852644 - RNA, 21 nt, Human
uguuuaaucauaguuacugug

SEQ ID NO: 3852645 - RNA, 16 nt, Human
uguuuaaucauauaaa

SEQ ID NO: 3852646 - RNA, 15 nt, Human
uguuuaaugugaacu

SEQ ID NO: 3852647 - RNA, 16 nt, Human
uguuuaaugugaacuu

SEQ ID NO: 3852648 - RNA, 19 nt, Human
uguuuaaugugaacuugua

SEQ ID NO: 3852649 - RNA, 16 nt, Human
uguuuaauguucugug

SEQ ID NO: 3852650 - RNA, 14 nt, Human
uguuuaauuucuuc

SEQ ID NO: 3852651 - RNA, 23 nt, Human
uguuuaauuucuucaaaauguau

SEQ ID NO: 3852652 - RNA, 19 nt, Human
uguuuacaaaaucagguaa

SEQ ID NO: 3852653 - RNA, 18 nt, Human
uguuuacacucuuuguaa

SEQ ID NO: 3852654 - RNA, 14 nt, Human
uguuuacagaggac

SEQ ID NO: 3852655 - RNA, 23 nt, Human
uguuuacagcacuacucugugcc

SEQ ID NO: 3852656 - RNA, 22 nt, Human
uguuuacagggagccuccugcc

SEQ ID NO: 3852657 - RNA, 13 nt, Human
uguuuacaugcuu

SEQ ID NO: 3852658 - RNA, 20 nt, Human
uguuuacauuuuauggugcc

SEQ ID NO: 3852659 - RNA, 14 nt, Human
uguuuaccauuuuu

SEQ ID NO: 3852660 - RNA, 19 nt, Human
uguuuacuugaauaguauu

SEQ ID NO: 3852661 - RNA, 22 nt, Human
uguuuagaacacugguuuaaag

SEQ ID NO: 3852662 - RNA, 23 nt, Human
uguuuagaauugaagguuuuuga

SEQ ID NO: 3852663 - RNA, 16 nt, Human
uguuuagauaauacac

SEQ ID NO: 3852664 - RNA, 12 nt, Human
uguuuagauuug

SEQ ID NO: 3852665 - RNA, 17 nt, Human
uguuuagauuuuguguu

SEQ ID NO: 3852666 - RNA, 18 nt, Human
uguuuaggggaucuggaa

SEQ ID NO: 3852667 - RNA, 19 nt, Human
uguuuaguaaacucaauaa

SEQ ID NO: 3852668 - RNA, 14 nt, Human
uguuuaguaaucau

SEQ ID NO: 3852669 - RNA, 19 nt, Human
uguuuagucuugucucaga

SEQ ID NO: 3852670 - RNA, 20 nt, Human
uguuuagucuugucucagau

SEQ ID NO: 3852671 - RNA, 15 nt, Human
uguuuagucuuuaua

SEQ ID NO: 3852672 - RNA, 16 nt, Human
uguuuaguucagcaaa

SEQ ID NO: 3852673 - RNA, 22 nt, Human
uguuuauaaaauauaaacaaag

SEQ ID NO: 3852674 - RNA, 23 nt, Human
uguuuauaaaauauaaacaaaga

SEQ ID NO: 3852675 - RNA, 20 nt, Human
uguuuauaacuauucaguug

SEQ ID NO: 3852676 - RNA, 16 nt, Human
uguuuauaauaaaaau

SEQ ID NO: 3852677 - RNA, 16 nt, Human
uguuuauaccuuugcc

SEQ ID NO: 3852678 - RNA, 13 nt, Human
uguuuauagcauu

SEQ ID NO: 3852679 - RNA, 14 nt, Human
uguuuauauaaaug

SEQ ID NO: 3852680 - RNA, 21 nt, Human
uacaguagauuuuccaaaugu

SEQ ID NO: 3852681 - RNA, 22 nt, Human
uacaguaggagcccagcucuga

SEQ ID NO: 3852682 - RNA, 18 nt, Human
uacaguagugagaagaau

SEQ ID NO: 3852683 - RNA, 15 nt, Human
uacaguaucucaggg

SEQ ID NO: 3852684 - RNA, 21 nt, Human
uacaguauggggguuguaaau

SEQ ID NO: 3852685 - RNA, 22 nt, Human
uacguuccuauugucauuaaag

SEQ ID NO: 3852686 - RNA, 13 nt, Human
uacguuucuuuaa

SEQ ID NO: 3852687 - RNA, 23 nt, Human
uacguuucuuuaaccuuguauaa

SEQ ID NO: 3852688 - RNA, 18 nt, Human
uacuaaaaaaaagaugaa

SEQ ID NO: 3852689 - RNA, 23 nt, Human
uacuaaaaagaaggaaaaugauc

SEQ ID NO: 3852690 - RNA, 15 nt, Human
uacuaaaaaguauaa

SEQ ID NO: 3852691 - RNA, 14 nt, Human
uacuaaaaaugcaa

SEQ ID NO: 3852692 - RNA, 12 nt, Human
uacuaaaauaua

SEQ ID NO: 3852693 - RNA, 14 nt, Human
uacuaaagaaagau

SEQ ID NO: 3852694 - RNA, 15 nt, Human
uacuaaagaaagauu

SEQ ID NO: 3852695 - RNA, 13 nt, Human
uacuaaauuuaaa

SEQ ID NO: 3852696 - RNA, 14 nt, Human
uacuaacacaagga

SEQ ID NO: 3852697 - RNA, 15 nt, Human
uacuaacuaaacucu

SEQ ID NO: 3852698 - RNA, 12 nt, Human
uacuaacuucua

SEQ ID NO: 3852699 - RNA, 20 nt, Human
uacuaacuucuaaaacugua

SEQ ID NO: 3852700 - RNA, 13 nt, Human
uacuaacuuuccu

SEQ ID NO: 3852701 - RNA, 19 nt, Human
uacuaaggaagauuacuca

SEQ ID NO: 3852702 - RNA, 16 nt, Human
uacuaaggacguuguu

SEQ ID NO: 3852703 - RNA, 12 nt, Human
uacuaaggauac

SEQ ID NO: 3852704 - RNA, 20 nt, Human
uacuaaggauacaggcugga

SEQ ID NO: 3852705 - RNA, 22 nt, Human
uacuaaguucacauuagaauua

SEQ ID NO: 3852706 - RNA, 16 nt, Human
uacuaauaaacuaaua

SEQ ID NO: 3852707 - RNA, 19 nt, Human
uacuaauaaucuuguuucu

SEQ ID NO: 3852708 - RNA, 16 nt, Human
uacuaaugauguuuuc

SEQ ID NO: 3852709 - RNA, 13 nt, Human
uacuaauuccaca

SEQ ID NO: 3852710 - RNA, 18 nt, Human
uacuaauuuuacacauua

SEQ ID NO: 3852711 - RNA, 12 nt, Human
uacuacaguccu

SEQ ID NO: 3852712 - RNA, 22 nt, Human
uacuacaguccucccaucucac

SEQ ID NO: 3852713 - RNA, 21 nt, Human
uacuacaguuguuuuuugaaa

SEQ ID NO: 3852714 - RNA, 14 nt, Human
uacuacaguuuuua

SEQ ID NO: 3852715 - RNA, 15 nt, Human
uacuaccaaugccaa

SEQ ID NO: 3852716 - RNA, 13 nt, Human
uacuaccugugua

SEQ ID NO: 3852717 - RNA, 13 nt, Human
uacuaccuugaaa

SEQ ID NO: 3852718 - RNA, 20 nt, Human
uacuaccuugaaaauaagaa

SEQ ID NO: 3852719 - RNA, 17 nt, Human
uacuacuagaugucuuu

SEQ ID NO: 3852720 - RNA, 16 nt, Human
uacuacugaaucucua

SEQ ID NO: 3852721 - RNA, 16 nt, Human
uacuacugaccagaca

SEQ ID NO: 3852722 - RNA, 20 nt, Human
uacuacugaccagacaagcu

SEQ ID NO: 3852723 - RNA, 14 nt, Human
uacuacuguguaag

SEQ ID NO: 3852724 - RNA, 17 nt, Human
uacuagaagaugaauac

SEQ ID NO: 3852725 - RNA, 22 nt, Human
uacuagaagaugaauacaaaca

SEQ ID NO: 3852726 - RNA, 16 nt, Human
uacuagauuugggaga

SEQ ID NO: 3852727 - RNA, 21 nt, Human
uacuagcaaaauaaaacauag

SEQ ID NO: 3852728 - RNA, 17 nt, Human
uacuagcauaugaguuu

SEQ ID NO: 3852729 - RNA, 20 nt, Human
uacuagcuuuucaaacaaga

SEQ ID NO: 3852730 - RNA, 15 nt, Human
uacuaggauacugcu

SEQ ID NO: 3852731 - RNA, 18 nt, Human
uacuaggcaguuagagau

SEQ ID NO: 3852732 - RNA, 23 nt, Human
uacuaggcuuaauaccuggguga

SEQ ID NO: 3852733 - RNA, 15 nt, Human
uacuagggaccuggg

SEQ ID NO: 3852734 - RNA, 16 nt, Human
uacuagguaacuucau

SEQ ID NO: 3852735 - RNA, 19 nt, Human
uacuagguaacuucauauu

SEQ ID NO: 3852736 - RNA, 16 nt, Human
uacuaguacuguguac

SEQ ID NO: 3852737 - RNA, 17 nt, Human
uacuaguacuguguacu

SEQ ID NO: 3852738 - RNA, 21 nt, Human
uacuagucaccagagacuuua

SEQ ID NO: 3852739 - RNA, 14 nt, Human
uuaaacuuaugaau

SEQ ID NO: 3852740 - RNA, 17 nt, Human
uuaaacuucucugaagg

SEQ ID NO: 3852741 - RNA, 18 nt, Human
uuaaacuucucugaaggg

SEQ ID NO: 3852742 - RNA, 15 nt, Human
uuaaacuugugaaug

SEQ ID NO: 3852743 - RNA, 17 nt, Human
uuaaacuuuuaauucau

SEQ ID NO: 3852744 - RNA, 18 nt, Human
uuaaacuuuuaauucauu

SEQ ID NO: 3852745 - RNA, 14 nt, Human
uuaaagaaaggaaa

SEQ ID NO: 3852746 - RNA, 16 nt, Human
uuaaagaaaggaaaag

SEQ ID NO: 3852747 - RNA, 20 nt, Human
uuaaagaaauauguauucug

SEQ ID NO: 3852748 - RNA, 12 nt, Human
uuaaagaagacc

SEQ ID NO: 3852749 - RNA, 19 nt, Human
uuaaagaauucaaauuuua

SEQ ID NO: 3852750 - RNA, 12 nt, Human
uuaaagacagag

SEQ ID NO: 3852751 - RNA, 12 nt, Human
uuaaagagucua

SEQ ID NO: 3852752 - RNA, 15 nt, Human
uuaaagagucuagau

SEQ ID NO: 3852753 - RNA, 17 nt, Human
uuaaagagucuagauuc

SEQ ID NO: 3852754 - RNA, 19 nt, Human
uuaaagagucuagauucaa

SEQ ID NO: 3852755 - RNA, 14 nt, Human
uuaaagauauuguu

SEQ ID NO: 3852756 - RNA, 17 nt, Human
uuaaagauauuguucaa

SEQ ID NO: 3852757 - RNA, 17 nt, Human
uuaaagaugaacucuga

SEQ ID NO: 3852758 - RNA, 18 nt, Human
uuaaagaugaacucugaa

SEQ ID NO: 3852759 - RNA, 15 nt, Human
uuaaagauguagcaa

SEQ ID NO: 3852760 - RNA, 21 nt, Human
uuaaagauguagcaaacccug

SEQ ID NO: 3852761 - RNA, 14 nt, Human
uuaaagauuuauca

SEQ ID NO: 3852762 - RNA, 21 nt, Human
uuaaagauuuaucaaaucagu

SEQ ID NO: 3852763 - RNA, 14 nt, Human
uuaaagcaaaggag

SEQ ID NO: 3852764 - RNA, 23 nt, Human
uuaaagcaacugucuauuucugc

SEQ ID NO: 3852765 - RNA, 22 nt, Human
uuaaagcagagggacuuuguau

SEQ ID NO: 3852766 - RNA, 20 nt, Human
uuaaagcagguucuuguugg

SEQ ID NO: 3852767 - RNA, 14 nt, Human
uuaaagcauugcug

SEQ ID NO: 3852768 - RNA, 20 nt, Human
uuaaagcauugcuguuaugu

SEQ ID NO: 3852769 - RNA, 15 nt, Human
uuaaagcauuuacuu

SEQ ID NO: 3852770 - RNA, 17 nt, Human
uuaaagcauuuacuuug

SEQ ID NO: 3852771 - RNA, 18 nt, Human
uuaaagccauguuuauua

SEQ ID NO: 3852772 - RNA, 18 nt, Human
uuaaagccauucugauua

SEQ ID NO: 3852773 - RNA, 19 nt, Human
uuaaagcuaaaguaucugu

SEQ ID NO: 3852774 - RNA, 20 nt, Human
uuaaagcuuauuaaaacuca

SEQ ID NO: 3852775 - RNA, 15 nt, Human
uuaaagcuuuugaug

SEQ ID NO: 3852776 - RNA, 17 nt, Human
uuaaaggaaaaaauguu

SEQ ID NO: 3852777 - RNA, 16 nt, Human
uuaaaggcccagcccc

SEQ ID NO: 3852778 - RNA, 17 nt, Human
uuaaaggcuaccuuauu

SEQ ID NO: 3852779 - RNA, 20 nt, Human
uuaaaggcuucucucucacc

SEQ ID NO: 3852780 - RNA, 15 nt, Human
uuaaagggaaauuga

SEQ ID NO: 3852781 - RNA, 15 nt, Human
uuaaagggaagaaaa

SEQ ID NO: 3852782 - RNA, 18 nt, Human
uuaaagggaagaaaacac

SEQ ID NO: 3852783 - RNA, 17 nt, Human
uuaaagggcccaaugaa

SEQ ID NO: 3852784 - RNA, 21 nt, Human
uuaaaggggcagaaaaacucu

SEQ ID NO: 3852785 - RNA, 17 nt, Human
uuaaaggugucuuccuc

SEQ ID NO: 3852786 - RNA, 18 nt, Human
uuaaaguaugaaucuaug

SEQ ID NO: 3852787 - RNA, 23 nt, Human
uuaaaguauguuauugcauaauu

SEQ ID NO: 3852788 - RNA, 13 nt, Human
uuaaaguauucuu

SEQ ID NO: 3852789 - RNA, 12 nt, Human
uuaaaguauuuu

SEQ ID NO: 3852790 - RNA, 12 nt, Human
uuaaagucugaa

SEQ ID NO: 3852791 - RNA, 21 nt, Human
uuaaagugacuaauggcauga

SEQ ID NO: 3852792 - RNA, 21 nt, Human
uuaaaguguccauugacaugu

SEQ ID NO: 3852793 - RNA, 22 nt, Human
uuaaaguguccauugacaugua

SEQ ID NO: 3852794 - RNA, 22 nt, Human
uuaaaguguuucagcuaaggga

SEQ ID NO: 3852795 - RNA, 11 nt, Human
uuaaaguucug

SEQ ID NO: 3852796 - RNA, 15 nt, Human
uuaaaguucugugua

SEQ ID NO: 3852797 - RNA, 21 nt, Human
uuaaaguugguauuaauaaaa

SEQ ID NO: 3852798 - RNA, 19 nt, Human
uuaaaguuucaaaaaucug

SEQ ID NO: 3852799 - RNA, 13 nt, Human
uuaaauaaaagug

SEQ ID NO: 3852800 - RNA, 14 nt, Human
uuaaauaaaaguga

SEQ ID NO: 3852801 - RNA, 20 nt, Human
uuaaauaaaagugaucaaua

SEQ ID NO: 3852802 - RNA, 12 nt, Human
uuaaauaaaaua

SEQ ID NO: 3852803 - RNA, 13 nt, Human
uuaaauaaaauca

SEQ ID NO: 3852804 - RNA, 20 nt, Human
uuaaauaaaauugaaaguaa

SEQ ID NO: 3852805 - RNA, 12 nt, Human
uuaaauaaacuu

SEQ ID NO: 3852806 - RNA, 20 nt, Human
uuaaauaaacuuuuuuucaa

SEQ ID NO: 3852807 - RNA, 21 nt, Human
uuaaauaaacuuuuuuucaau

SEQ ID NO: 3852808 - RNA, 23 nt, Human
uuaaauaaacuuuuuuucaaugu

SEQ ID NO: 3852809 - RNA, 18 nt, Human
uuaaauaaaugucauuaa

SEQ ID NO: 3852810 - RNA, 13 nt, Human
uuaaauaaauugu

SEQ ID NO: 3852811 - RNA, 15 nt, Human
uuaaauaaauuguau

SEQ ID NO: 3852812 - RNA, 20 nt, Human
uuaaauaaauuguauauuca

SEQ ID NO: 3852813 - RNA, 16 nt, Human
uuaaauaaauuugacu

SEQ ID NO: 3852814 - RNA, 17 nt, Human
uuaaauaaauuugacuu

SEQ ID NO: 3852815 - RNA, 15 nt, Human
uuaaauaagaaacuu

SEQ ID NO: 3852816 - RNA, 13 nt, Human
uuaaauaagauuc

SEQ ID NO: 3852817 - RNA, 17 nt, Human
uuaaauaagauucuaac

SEQ ID NO: 3852818 - RNA, 18 nt, Human
uuaaauaaugcuucagau

SEQ ID NO: 3852819 - RNA, 15 nt, Human
uuaaauaaugugaaa

SEQ ID NO: 3852820 - RNA, 16 nt, Human
uuaaauaaugugaaac

SEQ ID NO: 3852821 - RNA, 18 nt, Human
uuaaauaaugugaaacug

SEQ ID NO: 3852822 - RNA, 19 nt, Human
uuaaauaaugugaaacugg

SEQ ID NO: 3852823 - RNA, 22 nt, Human
uuaaauaaugugaaacuggauu

SEQ ID NO: 3852824 - RNA, 13 nt, Human
uuaaauaauuuaa

SEQ ID NO: 3852825 - RNA, 21 nt, Human
uuaaauaauuuaacuacccuu

SEQ ID NO: 3852826 - RNA, 15 nt, Human
uuaaauacaaaacuu

SEQ ID NO: 3852827 - RNA, 18 nt, Human
uuaaauacagacacuaag

SEQ ID NO: 3852828 - RNA, 14 nt, Human
uuaaauacaggaaa

SEQ ID NO: 3852829 - RNA, 15 nt, Human
uuaaauacaggaaac

SEQ ID NO: 3852830 - RNA, 19 nt, Human
uuaaauacaggaaacaguu

SEQ ID NO: 3852831 - RNA, 14 nt, Human
uuccuccugggccc

SEQ ID NO: 3852832 - RNA, 13 nt, Human
uuccuccugugua

SEQ ID NO: 3852833 - RNA, 21 nt, Human
uuccuccuucacuguuucauc

SEQ ID NO: 3852834 - RNA, 15 nt, Human
uuccucgcuucuuuc

SEQ ID NO: 3852835 - RNA, 18 nt, Human
uuccucucacuaaacuuu

SEQ ID NO: 3852836 - RNA, 21 nt, Human
uuccucucauccuuuucuccu

SEQ ID NO: 3852837 - RNA, 15 nt, Human
uuccucuccacacag

SEQ ID NO: 3852838 - RNA, 12 nt, Human
uuccucuccacc

SEQ ID NO: 3852839 - RNA, 17 nt, Human
uuccucuccacccuccc

SEQ ID NO: 3852840 - RNA, 18 nt, Human
uuccucuccacugccuuc

SEQ ID NO: 3852841 - RNA, 15 nt, Human
uuccucuccuuccuu

SEQ ID NO: 3852842 - RNA, 19 nt, Human
uuccucuccuucguauccc

SEQ ID NO: 3852843 - RNA, 16 nt, Human
uuccucucgcggcccu

SEQ ID NO: 3852844 - RNA, 20 nt, Human
uuccucucgcggcccucagu

SEQ ID NO: 3852845 - RNA, 21 nt, Human
uuccucucgcggcccucagua

SEQ ID NO: 3852846 - RNA, 14 nt, Human
uuccucucuaagug

SEQ ID NO: 3852847 - RNA, 14 nt, Human
uuccucucuccaga

SEQ ID NO: 3852848 - RNA, 11 nt, Human
uuccucucugg

SEQ ID NO: 3852849 - RNA, 18 nt, Human
uuccucucuuuguucuca

SEQ ID NO: 3852850 - RNA, 14 nt, Human
uuccucugagccuu

SEQ ID NO: 3852851 - RNA, 17 nt, Human
uuccucugagccuuggg

SEQ ID NO: 3852852 - RNA, 21 nt, Human
uuccucugaggcugaaauuca

SEQ ID NO: 3852853 - RNA, 21 nt, Human
uuccucugaggcuggauccua

SEQ ID NO: 3852854 - RNA, 10 nt, Human
uuccucugca

SEQ ID NO: 3852855 - RNA, 13 nt, Human
uuccucugcagcu

SEQ ID NO: 3852856 - RNA, 22 nt, Human
uuccucugcagcugaccucugu

SEQ ID NO: 3852857 - RNA, 20 nt, Human
uuccucugcccuuccugcag

SEQ ID NO: 3852858 - RNA, 16 nt, Human
uuccucugccugcccc

SEQ ID NO: 3852859 - RNA, 13 nt, Human
uuccucugcuuug

SEQ ID NO: 3852860 - RNA, 19 nt, Human
uuccucuuagaagaauauu

SEQ ID NO: 3852861 - RNA, 22 nt, Human
uuccucuuagaagaauauugua

SEQ ID NO: 3852862 - RNA, 12 nt, Human
uuccucuuccaa

SEQ ID NO: 3852863 - RNA, 15 nt, Human
uuccucuugaaccag

SEQ ID NO: 3852864 - RNA, 15 nt, Human
uuccucuugacccug

SEQ ID NO: 3852865 - RNA, 18 nt, Human
uuccucuugacccugcac

SEQ ID NO: 3852866 - RNA, 12 nt, Human
uuccucuuugca

SEQ ID NO: 3852867 - RNA, 15 nt, Human
uuccucuuugcaugg

SEQ ID NO: 3852868 - RNA, 17 nt, Human
uuccucuuugcauggaa

SEQ ID NO: 3852869 - RNA, 15 nt, Human
uuccucuuugcuuug

SEQ ID NO: 3852870 - RNA, 22 nt, Human
uuccucuuugcuuugcuuucug

SEQ ID NO: 3852871 - RNA, 14 nt, Human
uuccugaaccgaug

SEQ ID NO: 3852872 - RNA, 19 nt, Human
uuccugaagaaccaguccc

SEQ ID NO: 3852873 - RNA, 13 nt, Human
uuccugacacuuu

SEQ ID NO: 3852874 - RNA, 16 nt, Human
uuccugacaucacagc

SEQ ID NO: 3852875 - RNA, 17 nt, Human
uuccugacaucacagca

SEQ ID NO: 3852876 - RNA, 19 nt, Human
uuccugacaucacagcagc

SEQ ID NO: 3852877 - RNA, 15 nt, Human
uuccugacauugucu

SEQ ID NO: 3852878 - RNA, 23 nt, Human
uuccugacgaaacuggccccgga

SEQ ID NO: 3852879 - RNA, 19 nt, Human
uuccugacgagauaagcag

SEQ ID NO: 3852880 - RNA, 18 nt, Human
uuccugagauuuccuccu

SEQ ID NO: 3852881 - RNA, 16 nt, Human
uuccugagcuuggcca

SEQ ID NO: 3852882 - RNA, 15 nt, Human
uuccugaggcugggc

SEQ ID NO: 3852883 - RNA, 17 nt, Human
uuccugauaauaauuga

SEQ ID NO: 3852884 - RNA, 19 nt, Human
uuccugauaauaauugauc

SEQ ID NO: 3852885 - RNA, 17 nt, Human
uuccugaugacccaggc

SEQ ID NO: 3852886 - RNA, 18 nt, Human
uuccugaugcuucuucag

SEQ ID NO: 3852887 - RNA, 22 nt, Human
uuccugaugguacaggaaagcu

SEQ ID NO: 3852888 - RNA, 20 nt, Human
uuccugauugguuucucuuc

SEQ ID NO: 3852889 - RNA, 18 nt, Human
uuccugcagccuggaggc

SEQ ID NO: 3852890 - RNA, 18 nt, Human
uuccugcauuugugaaau

SEQ ID NO: 3852891 - RNA, 17 nt, Human
uuccugccaccagucac

SEQ ID NO: 3852892 - RNA, 15 nt, Human
uuccugccagccccu

SEQ ID NO: 3852893 - RNA, 13 nt, Human
uuccugccccagg

SEQ ID NO: 3852894 - RNA, 18 nt, Human
uuccugccccaggccuga

SEQ ID NO: 3852895 - RNA, 13 nt, Human
uuccugccccucu

SEQ ID NO: 3852896 - RNA, 16 nt, Human
uuccugcccugggagg

SEQ ID NO: 3852897 - RNA, 15 nt, Human
uuccugccugucucc

SEQ ID NO: 3852898 - RNA, 23 nt, Human
uuccugcggagugaagaggggca

SEQ ID NO: 3852899 - RNA, 13 nt, Human
uuccugcugcugu

SEQ ID NO: 3852900 - RNA, 18 nt, Human
uuccugcugcugucuggg

SEQ ID NO: 3852901 - RNA, 21 nt, Human
uuccugcugcugucugggugc

SEQ ID NO: 3852902 - RNA, 17 nt, Human
uuccugcuuccucagag

SEQ ID NO: 3852903 - RNA, 18 nt, Human
uuccugcuuccucagagg

SEQ ID NO: 3852904 - RNA, 13 nt, Human
uuccugcuugcca

SEQ ID NO: 3852905 - RNA, 17 nt, Human
uuccuggaauugccagc

SEQ ID NO: 3852906 - RNA, 15 nt, Human
uuccuggacagcugu

SEQ ID NO: 3852907 - RNA, 24 nt, Human
uuccuggacagcugugccucgcuc

SEQ ID NO: 3852908 - RNA, 12 nt, Human
uuccuggacauc

SEQ ID NO: 3852909 - RNA, 20 nt, Human
uuccuggacauccucuucug

SEQ ID NO: 3852910 - RNA, 13 nt, Human
uuccuggagcccg

SEQ ID NO: 3852911 - RNA, 23 nt, Human
uuccuggcaauaguguguucuga

SEQ ID NO: 3852912 - RNA, 20 nt, Human
uuccuggcacugcuuccagu

SEQ ID NO: 3852913 - RNA, 18 nt, Human
uuccuggcuuuuuaacuc

SEQ ID NO: 3852914 - RNA, 17 nt, Human
uuccugggaaauauucc

SEQ ID NO: 3852915 - RNA, 21 nt, Human
uuccugggaaauauucccuag

SEQ ID NO: 3852916 - RNA, 20 nt, Human
uuccugggcacacgcugcuc

SEQ ID NO: 3852917 - RNA, 15 nt, Human
uuccuggggugcccu

SEQ ID NO: 3852918 - RNA, 21 nt, Human
uuccuggggugcccuccacug

SEQ ID NO: 3852919 - RNA, 23 nt, Human
uuccuggguggcuacucugugcc

SEQ ID NO: 3852920 - RNA, 19 nt, Human
uuccugguacccagccauc

SEQ ID NO: 3852921 - RNA, 21 nt, Human
uuccugguacccagccaucug

SEQ ID NO: 3852922 - RNA, 11 nt, Human
uuccuguaaca

SEQ ID NO: 3852923 - RNA, 21 nt, Human
uuccuguaacacaagccacag

SEQ ID NO: 3852924 - RNA, 23 nt, Human
uuccuguaacacaagccacagaa

SEQ ID NO: 3852925 - RNA, 20 nt, Human
uuccuguauuuguucccaag

SEQ ID NO: 3852926 - RNA, 17 nt, Human
uuccugucacccugagg

SEQ ID NO: 3852927 - RNA, 16 nt, Human
uuccuguccagcucca

SEQ ID NO: 3852928 - RNA, 17 nt, Human
uuccuguccagcuccaa

SEQ ID NO: 3852929 - RNA, 11 nt, Human
uuccuguccca

SEQ ID NO: 3852930 - RNA, 18 nt, Human
uuccuguccgcccucuuc

SEQ ID NO: 3852931 - RNA, 19 nt, Human
uuccugucuuauccuccac

SEQ ID NO: 3852932 - RNA, 15 nt, Human
uuccugugcacagcc

SEQ ID NO: 3852933 - RNA, 14 nt, Human
uuccugugccaggu

SEQ ID NO: 3852934 - RNA, 16 nt, Human
uuccugugccagguga

SEQ ID NO: 3852935 - RNA, 21 nt, Human
uuccuguggauguaaagugau

SEQ ID NO: 3852936 - RNA, 11 nt, Human
uuccuguguca

SEQ ID NO: 3852937 - RNA, 18 nt, Human
uuccugugucaauccaga

SEQ ID NO: 3852938 - RNA, 14 nt, Human
uuccuguguccuga

SEQ ID NO: 3852939 - RNA, 11 nt, Human
uuccugugucu

SEQ ID NO: 3852940 - RNA, 14 nt, Human
uuccuguuaaugua

SEQ ID NO: 3852941 - RNA, 23 nt, Human
uuccuguuagguauuagaaagug

SEQ ID NO: 3852942 - RNA, 19 nt, Human
uuccuguucaguaauaaaa

SEQ ID NO: 3852943 - RNA, 15 nt, Human
uuccuguucugaacu

SEQ ID NO: 3852944 - RNA, 20 nt, Human
uuccuguuggauuuguuuaa

SEQ ID NO: 3852945 - RNA, 16 nt, Human
uuccuguuucugaaaa

SEQ ID NO: 3852946 - RNA, 17 nt, Human
uuccuguuugggaagag

SEQ ID NO: 3852947 - RNA, 17 nt, Human
uuccuguuuguugaagg

SEQ ID NO: 3852948 - RNA, 22 nt, Human
uuccuguuuuuauuauuaacaa

SEQ ID NO: 3852949 - RNA, 13 nt, Human
uuccuuaaacugu

SEQ ID NO: 3852950 - RNA, 16 nt, Human
uuccuuaaacugugug

SEQ ID NO: 3852951 - RNA, 12 nt, Human
uuccuuaaguau

SEQ ID NO: 3852952 - RNA, 19 nt, Human
uuccuuaagucagaacagc

SEQ ID NO: 3852953 - RNA, 13 nt, Human
uuccuuacauaaa

SEQ ID NO: 3852954 - RNA, 16 nt, Human
uuccuuacauaaacau

SEQ ID NO: 3852955 - RNA, 17 nt, Human
uuccuuacauaaacauc

SEQ ID NO: 3852956 - RNA, 16 nt, Human
uuccuuaccuuuaccc

SEQ ID NO: 3852957 - RNA, 13 nt, Human
uuccuuaccuuuu

SEQ ID NO: 3852958 - RNA, 20 nt, Human
uuccuuacuuuuuauauaua

SEQ ID NO: 3852959 - RNA, 21 nt, Human
uuccuuagcuuagaccucagc

SEQ ID NO: 3852960 - RNA, 20 nt, Human
uuccuuauuugcuucauugu

SEQ ID NO: 3852961 - RNA, 14 nt, Human
uuccuucagcacuu

SEQ ID NO: 3852962 - RNA, 16 nt, Human
uuccuucagcacuuua

SEQ ID NO: 3852963 - RNA, 14 nt, Human
uuccuucagugccu

SEQ ID NO: 3852964 - RNA, 19 nt, Human
uuccuucagugccuuaugg

SEQ ID NO: 3852965 - RNA, 21 nt, Human
uuccuuccaaugucuggagac

SEQ ID NO: 3852966 - RNA, 15 nt, Human
uuccuuccacuaacu

SEQ ID NO: 3852967 - RNA, 20 nt, Human
uuccuuccaucccuaccccc

SEQ ID NO: 3852968 - RNA, 13 nt, Human
uuccuucccucaa

SEQ ID NO: 3852969 - RNA, 15 nt, Human
uuccuucccugcugu

SEQ ID NO: 3852970 - RNA, 20 nt, Human
uuccuucccugggcugugcu

SEQ ID NO: 3852971 - RNA, 19 nt, Human
uuccuucccuuuucuguuc

SEQ ID NO: 3852972 - RNA, 11 nt, Human
uuccuuccuaa

SEQ ID NO: 3852973 - RNA, 20 nt, Human
uuccuucucccaucucuucc

SEQ ID NO: 3852974 - RNA, 15 nt, Human
uuccuucucugaaca

SEQ ID NO: 3852975 - RNA, 13 nt, Human
uuccuucuguaaa

SEQ ID NO: 3852976 - RNA, 19 nt, Human
uuccuucuuugauaauguu

SEQ ID NO: 3852977 - RNA, 16 nt, Human
uucugcccccagccca

SEQ ID NO: 3852978 - RNA, 15 nt, Human
uucugcccugcccac

SEQ ID NO: 3852979 - RNA, 16 nt, Human
uucugccgcagcccug

SEQ ID NO: 3852980 - RNA, 23 nt, Human
uucugccgcagcccugcagaggg

SEQ ID NO: 3852981 - RNA, 16 nt, Human
uucugccgugugcccu

SEQ ID NO: 3852982 - RNA, 12 nt, Human
uucugccuccuu

SEQ ID NO: 3852983 - RNA, 13 nt, Human
uucugccuccuuu

SEQ ID NO: 3852984 - RNA, 13 nt, Human
uucugccucucaa

SEQ ID NO: 3852985 - RNA, 16 nt, Human
uucugccucuccaggc

SEQ ID NO: 3852986 - RNA, 17 nt, Human
uucugccucucuaggac

SEQ ID NO: 3852987 - RNA, 18 nt, Human
uucugccugcccaggccc

SEQ ID NO: 3852988 - RNA, 13 nt, Human
uucugccuguuau

SEQ ID NO: 3852989 - RNA, 20 nt, Human
uucugccuguuauaacucug

SEQ ID NO: 3852990 - RNA, 14 nt, Human
uucugccuucucau

SEQ ID NO: 3852991 - RNA, 10 nt, Human
uucugccuuu

SEQ ID NO: 3852992 - RNA, 16 nt, Human
uucugccuuugauguu

SEQ ID NO: 3852993 - RNA, 14 nt, Human
uucugcgccucagg

SEQ ID NO: 3852994 - RNA, 16 nt, Human
uucugcuaccucacug

SEQ ID NO: 3852995 - RNA, 21 nt, Human
uucugcuacuuugcugcuaug

SEQ ID NO: 3852996 - RNA, 12 nt, Human
uucugcucagcu

SEQ ID NO: 3852997 - RNA, 14 nt, Human
uucugcucagcucu

SEQ ID NO: 3852998 - RNA, 20 nt, Human
uucugcucaucauucucugu

SEQ ID NO: 3852999 - RNA, 15 nt, Human
uucugcucauucuaa

SEQ ID NO: 3853000 - RNA, 13 nt, Human
uucugcuccaccc

SEQ ID NO: 3853001 - RNA, 15 nt, Human
uucugcuccacccuu

SEQ ID NO: 3853002 - RNA, 16 nt, Human
uucugcuccacccuug

SEQ ID NO: 3853003 - RNA, 14 nt, Human
uucugcuccucucc

SEQ ID NO: 3853004 - RNA, 14 nt, Human
uucugcugaauuuu

SEQ ID NO: 3853005 - RNA, 17 nt, Human
uucugcuggcaucaaga

SEQ ID NO: 3853006 - RNA, 13 nt, Human
uucugcuggccug

SEQ ID NO: 3853007 - RNA, 14 nt, Human
uucugcuggccugg

SEQ ID NO: 3853008 - RNA, 15 nt, Human
uucugcuggccugga

SEQ ID NO: 3853009 - RNA, 18 nt, Human
uucugcuggccuggaucu

SEQ ID NO: 3853010 - RNA, 14 nt, Human
uucugcuguucucu

SEQ ID NO: 3853011 - RNA, 16 nt, Human
uucugcuuaggagaga

SEQ ID NO: 3853012 - RNA, 16 nt, Human
uucugcuucagccucc

SEQ ID NO: 3853013 - RNA, 15 nt, Human
uucugcuuuaaaaau

SEQ ID NO: 3853014 - RNA, 13 nt, Human
uucugcuuuagac

SEQ ID NO: 3853015 - RNA, 15 nt, Human
uucugcuuucaucuu

SEQ ID NO: 3853016 - RNA, 23 nt, Human
uucugcuuuguugugugccucua

SEQ ID NO: 3853017 - RNA, 21 nt, Human
uucugcuuuuaccaugccccu

SEQ ID NO: 3853018 - RNA, 14 nt, Human
uucuggaauuuguu

SEQ ID NO: 3853019 - RNA, 18 nt, Human
uucuggaauuuguucaag

SEQ ID NO: 3853020 - RNA, 16 nt, Human
uucuggaccucugggu

SEQ ID NO: 3853021 - RNA, 10 nt, Human
uucuggagcc

SEQ ID NO: 3853022 - RNA, 15 nt, Human
uucuggagcccuugg

SEQ ID NO: 3853023 - RNA, 15 nt, Human
uucuggauauagcua

SEQ ID NO: 3853024 - RNA, 20 nt, Human
uucuggaugcauuucucugg

SEQ ID NO: 3853025 - RNA, 21 nt, Human
uucuggauuccccaucucagg

SEQ ID NO: 3853026 - RNA, 15 nt, Human
uucuggccaggaagc

SEQ ID NO: 3853027 - RNA, 14 nt, Human
uucuggccucccac

SEQ ID NO: 3853028 - RNA, 14 nt, Human
uucuggccugccuu

SEQ ID NO: 3853029 - RNA, 20 nt, Human
uucuggccuuuccucucucc

SEQ ID NO: 3853030 - RNA, 20 nt, Human
uucuggcuaugcauuugaaa

SEQ ID NO: 3853031 - RNA, 14 nt, Human
uucuggcucccucu

SEQ ID NO: 3853032 - RNA, 17 nt, Human
uucuggcuccucaaaca

SEQ ID NO: 3853033 - RNA, 11 nt, Human
uucuggcugcc

SEQ ID NO: 3853034 - RNA, 15 nt, Human
uucuggcuguuugag

SEQ ID NO: 3853035 - RNA, 20 nt, Human
uucuggcuuccuucucucaa

SEQ ID NO: 3853036 - RNA, 18 nt, Human
uucuggcuuuaagccuuc

SEQ ID NO: 3853037 - RNA, 13 nt, Human
uucugggaagcaa

SEQ ID NO: 3853038 - RNA, 10 nt, Human
uucugggaca

SEQ ID NO: 3853039 - RNA, 11 nt, Human
uucugggacac

SEQ ID NO: 3853040 - RNA, 15 nt, Human
uucugggccugacca

SEQ ID NO: 3853041 - RNA, 12 nt, Human
uucugggcucuu

SEQ ID NO: 3853042 - RNA, 23 nt, Human
uucuggggagcuggacaguggag

SEQ ID NO: 3853043 - RNA, 19 nt, Human
uucuggggcaggcugggcc

SEQ ID NO: 3853044 - RNA, 21 nt, Human
uucuggggcaggcugggccau

SEQ ID NO: 3853045 - RNA, 21 nt, Human
uucuggggccccuuuuuacuc

SEQ ID NO: 3853046 - RNA, 18 nt, Human
uucuggguggccucggga

SEQ ID NO: 3853047 - RNA, 16 nt, Human
uucugguaaaaagaaa

SEQ ID NO: 3853048 - RNA, 15 nt, Human
uucugguacucuccu

SEQ ID NO: 3853049 - RNA, 18 nt, Human
uucugguagauagaaaua

SEQ ID NO: 3853050 - RNA, 19 nt, Human
uucugguagauagaaauaa

SEQ ID NO: 3853051 - RNA, 14 nt, Human
uucuggugugaacu

SEQ ID NO: 3853052 - RNA, 18 nt, Human
uucugguguuggacaagc

SEQ ID NO: 3853053 - RNA, 17 nt, Human
uucugguuccagggucc

SEQ ID NO: 3853054 - RNA, 10 nt, Human
uucuguaaaa

SEQ ID NO: 3853055 - RNA, 16 nt, Human
uucuguaaaauggaaa

SEQ ID NO: 3853056 - RNA, 19 nt, Human
uucuguaaacucaaaacuu

SEQ ID NO: 3853057 - RNA, 23 nt, Human
uucuguaaacucaaaacuuaaca

SEQ ID NO: 3853058 - RNA, 15 nt, Human
uucuguaagaaaccu

SEQ ID NO: 3853059 - RNA, 20 nt, Human
uucuguaauauuuacaaugu

SEQ ID NO: 3853060 - RNA, 19 nt, Human
uucuguacauagccuauau

SEQ ID NO: 3853061 - RNA, 17 nt, Human
uucuguaccaaaguguu

SEQ ID NO: 3853062 - RNA, 11 nt, Human
uucuguaccag

SEQ ID NO: 3853063 - RNA, 14 nt, Human
uucuguaccaguua

SEQ ID NO: 3853064 - RNA, 13 nt, Human
uucuguacuuuuu

SEQ ID NO: 3853065 - RNA, 18 nt, Human
uucuguagaaaugguugu

SEQ ID NO: 3853066 - RNA, 13 nt, Human
uucuguagauucu

SEQ ID NO: 3853067 - RNA, 13 nt, Human
uucuguauaaaug

SEQ ID NO: 3853068 - RNA, 21 nt, Human
uucuguauacaacccuggcau

SEQ ID NO: 3853069 - RNA, 24 nt, Human
uucuguauacaacccuggcauuau

SEQ ID NO: 3853070 - RNA, 11 nt, Human
uucuguauaga

SEQ ID NO: 3853071 - RNA, 18 nt, Human
uucuguauagacaggaga

SEQ ID NO: 3853072 - RNA, 13 nt, Human
uucuguauagauu

SEQ ID NO: 3853073 - RNA, 17 nt, Human
uucuguauauacuuuuu

SEQ ID NO: 3853074 - RNA, 21 nt, Human
uucuguaucuacuuuaauaaa

SEQ ID NO: 3853075 - RNA, 16 nt, Human
uucuguauuugaaagu

SEQ ID NO: 3853076 - RNA, 19 nt, Human
uucuguauuugaaagugcc

SEQ ID NO: 3853077 - RNA, 11 nt, Human
uucuguauuuu

SEQ ID NO: 3853078 - RNA, 18 nt, Human
uucuguauuuuguuuuug

SEQ ID NO: 3853079 - RNA, 16 nt, Human
uucugucacucaggcu

SEQ ID NO: 3853080 - RNA, 16 nt, Human
uucugucagaugagaa

SEQ ID NO: 3853081 - RNA, 13 nt, Human
uucuguccugcug

SEQ ID NO: 3853082 - RNA, 15 nt, Human
uucuguccuguaacu

SEQ ID NO: 3853083 - RNA, 15 nt, Human
uucuguccugugagg

SEQ ID NO: 3853084 - RNA, 23 nt, Human
uucuguccugugagguuucccaa

SEQ ID NO: 3853085 - RNA, 14 nt, Human
uucuguccuucaga

SEQ ID NO: 3853086 - RNA, 14 nt, Human
uucugucguuaaaa

SEQ ID NO: 3853087 - RNA, 14 nt, Human
uucugucucucccu

SEQ ID NO: 3853088 - RNA, 17 nt, Human
uucugugaugagcugau

SEQ ID NO: 3853089 - RNA, 13 nt, Human
uucugugcccagc

SEQ ID NO: 3853090 - RNA, 13 nt, Human
uucugugcccucc

SEQ ID NO: 3853091 - RNA, 13 nt, Human
uucugugccugaa

SEQ ID NO: 3853092 - RNA, 23 nt, Human
uucugugcuguuacaguuuucuu

SEQ ID NO: 3853093 - RNA, 22 nt, Human
uucuguggaaaguguaaagcau

SEQ ID NO: 3853094 - RNA, 18 nt, Human
uucuguggggacuccggc

SEQ ID NO: 3853095 - RNA, 22 nt, Human
uucuguggguccgauaauaucu

SEQ ID NO: 3853096 - RNA, 23 nt, Human
uucuguggguuucuaaagcugcc

SEQ ID NO: 3853097 - RNA, 20 nt, Human
uucugugguuccucugcuca

SEQ ID NO: 3853098 - RNA, 22 nt, Human
uucugugguuucauguuaguua

SEQ ID NO: 3853099 - RNA, 18 nt, Human
uucugugguuuuccccuc

SEQ ID NO: 3853100 - RNA, 21 nt, Human
uucuguguaucucuuucacau

SEQ ID NO: 3853101 - RNA, 16 nt, Human
uucuguguauuuaauu

SEQ ID NO: 3853102 - RNA, 23 nt, Human
uucuguguauuuaauuguaaacu

SEQ ID NO: 3853103 - RNA, 16 nt, Human
uucugugugucaguuu

SEQ ID NO: 3853104 - RNA, 13 nt, Human
uucuguguguucc

SEQ ID NO: 3853105 - RNA, 17 nt, Human
uucuguguguuccuggc

SEQ ID NO: 3853106 - RNA, 17 nt, Human
uucuguguuuaauuucu

SEQ ID NO: 3853107 - RNA, 18 nt, Human
uucuguguuuauaaaaua

SEQ ID NO: 3853108 - RNA, 14 nt, Human
uucuguuaaaaucu

SEQ ID NO: 3853109 - RNA, 15 nt, Human
uucuguuaaaaucua

SEQ ID NO: 3853110 - RNA, 22 nt, Human
uucuguuaaaaugcaugauugc

SEQ ID NO: 3853111 - RNA, 13 nt, Human
uucuguuaacuga

SEQ ID NO: 3853112 - RNA, 16 nt, Human
uucuguuaacugaaua

SEQ ID NO: 3853113 - RNA, 17 nt, Human
uucuguuaacugaauac

SEQ ID NO: 3853114 - RNA, 21 nt, Human
uucuguuaacugaauaccacu

SEQ ID NO: 3853115 - RNA, 16 nt, Human
uucuguuacaaaaugu

SEQ ID NO: 3853116 - RNA, 17 nt, Human
uucuguuacaaaaugua

SEQ ID NO: 3853117 - RNA, 20 nt, Human
uucuguuacaaaauguaacu

SEQ ID NO: 3853118 - RNA, 22 nt, Human
uucuguuacaaaauguaacugu

SEQ ID NO: 3853119 - RNA, 20 nt, Human
uagaaauguagguccucaga

SEQ ID NO: 3853120 - RNA, 17 nt, Human
uagaaauguuugcugaa

SEQ ID NO: 3853121 - RNA, 15 nt, Human
uagaaauuuccagag

SEQ ID NO: 3853122 - RNA, 16 nt, Human
uagaaauuuccagaga

SEQ ID NO: 3853123 - RNA, 17 nt, Human
uagaaauuuuacaauag

SEQ ID NO: 3853124 - RNA, 16 nt, Human
uucuuguaaauguguu

SEQ ID NO: 3853125 - RNA, 18 nt, Human
uucuuguaaauguguugg

SEQ ID NO: 3853126 - RNA, 11 nt, Human
uucuuguaauu

SEQ ID NO: 3853127 - RNA, 23 nt, Human
uucuuguaauuuaaacaggccca

SEQ ID NO: 3853128 - RNA, 13 nt, Human
uucuuguaauuuu

SEQ ID NO: 3853129 - RNA, 12 nt, Human
uucuuguauuaa

SEQ ID NO: 3853130 - RNA, 14 nt, Human
uucuugucaaaaaa

SEQ ID NO: 3853131 - RNA, 15 nt, Human
uucuugucagacaua

SEQ ID NO: 3853132 - RNA, 17 nt, Human
uucuugucuauaaagca

SEQ ID NO: 3853133 - RNA, 14 nt, Human
uucuugucuuuauu

SEQ ID NO: 3853134 - RNA, 20 nt, Human
uagacaguuuguaaauguua

SEQ ID NO: 3853135 - RNA, 21 nt, Human
uagacaguuuguaaauguuau

SEQ ID NO: 3853136 - RNA, 18 nt, Human
uagacauggagguucuaa

SEQ ID NO: 3853137 - RNA, 13 nt, Human
uagacauucuguc

SEQ ID NO: 3853138 - RNA, 21 nt, Human
uagacauuucucuuacugcaa

SEQ ID NO: 3853139 - RNA, 23 nt, Human
uagacauuucucuuacugcaaau

SEQ ID NO: 3853140 - RNA, 19 nt, Human
uagacauuuuaacaagaag

SEQ ID NO: 3853141 - RNA, 21 nt, Human
uagacauuuuaacaagaagau

SEQ ID NO: 3853142 - RNA, 18 nt, Human
uagaccaaggaacaaaaa

SEQ ID NO: 3853143 - RNA, 17 nt, Human
uagaccaccaagccuug

SEQ ID NO: 3853144 - RNA, 17 nt, Human
uagaccaggauuucuaa

SEQ ID NO: 3853145 - RNA, 14 nt, Human
uagaccccuggcug

SEQ ID NO: 3853146 - RNA, 15 nt, Human
uagaccccuggcugg

SEQ ID NO: 3853147 - RNA, 20 nt, Human
uagacccugggugggcucug

SEQ ID NO: 3853148 - RNA, 23 nt, Human
uagaccgcucucuuuucuguacu

SEQ ID NO: 3853149 - RNA, 21 nt, Human
uagaccuauaauccuugauaa

SEQ ID NO: 3853150 - RNA, 11 nt, Human
uagaccucagc

SEQ ID NO: 3853151 - RNA, 12 nt, Human
uagaccucagcc

SEQ ID NO: 3853152 - RNA, 14 nt, Human
uagaccucagccug

SEQ ID NO: 3853153 - RNA, 16 nt, Human
uagaccucagccugug

SEQ ID NO: 3853154 - RNA, 22 nt, Human
uagaccucagccugugcugccc

SEQ ID NO: 3853155 - RNA, 16 nt, Human
uagaccuccagcuguu

SEQ ID NO: 3853156 - RNA, 19 nt, Human
uagaccuuguuacuucuga

SEQ ID NO: 3853157 - RNA, 17 nt, Human
uagaccuuuucauuugu

SEQ ID NO: 3853158 - RNA, 21 nt, Human
uagaccuuuuuuuuuuuucca

SEQ ID NO: 3853159 - RNA, 12 nt, Human
uagacuaaaaga

SEQ ID NO: 3853160 - RNA, 13 nt, Human
uagacuagagaaa

SEQ ID NO: 3853161 - RNA, 21 nt, Human
uagacuagcaaucucuucauu

SEQ ID NO: 3853162 - RNA, 14 nt, Human
uagacuauaaaugu

SEQ ID NO: 3853163 - RNA, 14 nt, Human
uagacuauauacau

SEQ ID NO: 3853164 - RNA, 18 nt, Human
uagacucaucuuacugua

SEQ ID NO: 3853165 - RNA, 21 nt, Human
uagacucaucuuacuguaccu

SEQ ID NO: 3853166 - RNA, 21 nt, Human
uagacucggggugcuuccuug

SEQ ID NO: 3853167 - RNA, 19 nt, Human
uagacucuguaacaucacu

SEQ ID NO: 3853168 - RNA, 17 nt, Human
uagacucugucuaccug

SEQ ID NO: 3853169 - RNA, 22 nt, Human
uagacucugucuaccuggucug

SEQ ID NO: 3853170 - RNA, 16 nt, Human
uagacucuuacuuuuu

SEQ ID NO: 3853171 - RNA, 16 nt, Human
uagacucuucacuguu

SEQ ID NO: 3853172 - RNA, 22 nt, Human
uagacugacuuguuugucuucc

SEQ ID NO: 3853173 - RNA, 14 nt, Human
uagacugccagcuc

SEQ ID NO: 3853174 - RNA, 16 nt, Human
uagacugccagcucuu

SEQ ID NO: 3853175 - RNA, 19 nt, Human
uagacuggaaaaaaugagc

SEQ ID NO: 3853176 - RNA, 13 nt, Human
uagacuggugacu

SEQ ID NO: 3853177 - RNA, 20 nt, Human
uagacuucgacucaggaucc

SEQ ID NO: 3853178 - RNA, 15 nt, Human
uagacuucuguuuuc

SEQ ID NO: 3853179 - RNA, 16 nt, Human
uagacuucuguuuuca

SEQ ID NO: 3853180 - RNA, 17 nt, Human
uagacuucuguuuucaa

SEQ ID NO: 3853181 - RNA, 10 nt, Human
uagacuugaa

SEQ ID NO: 3853182 - RNA, 14 nt, Human
uagacuugaaaaga

SEQ ID NO: 3853183 - RNA, 18 nt, Human
uagacuugaaaagagaca

SEQ ID NO: 3853184 - RNA, 20 nt, Human
uagacuugaaaagagacagg

SEQ ID NO: 3853185 - RNA, 18 nt, Human
uagacuugugcugaucgu

SEQ ID NO: 3853186 - RNA, 16 nt, Human
uagacuuuaggcuuuc

SEQ ID NO: 3853187 - RNA, 18 nt, Human
uagacuuuaggcuuucag

SEQ ID NO: 3853188 - RNA, 12 nt, Human
uagacuuucugu

SEQ ID NO: 3853189 - RNA, 22 nt, Human
uagacuuuuccaauaugugauu

SEQ ID NO: 3853190 - RNA, 19 nt, Human
uagagaaaccguccucuuu

SEQ ID NO: 3853191 - RNA, 21 nt, Human
uagagaaaccguccucuuuuu

SEQ ID NO: 3853192 - RNA, 20 nt, Human
uagagaacacgcguauuuac

SEQ ID NO: 3853193 - RNA, 14 nt, Human
uagagaacugaaaa

SEQ ID NO: 3853194 - RNA, 16 nt, Human
uagagaacuguggccg

SEQ ID NO: 3853195 - RNA, 13 nt, Human
uagagaagcaagu

SEQ ID NO: 3853196 - RNA, 17 nt, Human
uagagaaggaaagcuuu

SEQ ID NO: 3853197 - RNA, 13 nt, Human
uagagaaggaccc

SEQ ID NO: 3853198 - RNA, 22 nt, Human
uagagaaggacccggaggggcc

SEQ ID NO: 3853199 - RNA, 14 nt, Human
uagagaaugcacag

SEQ ID NO: 3853200 - RNA, 14 nt, Human
uagagacagaagca

SEQ ID NO: 3853201 - RNA, 22 nt, Human
uagagacagagcgacagagcag

SEQ ID NO: 3853202 - RNA, 11 nt, Human
uagagacaggg

SEQ ID NO: 3853203 - RNA, 19 nt, Human
uagagacgggguuucacca

SEQ ID NO: 3853204 - RNA, 14 nt, Human
uagagacuguagau

SEQ ID NO: 3853205 - RNA, 15 nt, Human
uagagacuguagauu

SEQ ID NO: 3853206 - RNA, 19 nt, Human
uagagacuguagauugcuu

SEQ ID NO: 3853207 - RNA, 16 nt, Human
uagagagagaccacuu

SEQ ID NO: 3853208 - RNA, 13 nt, Human
uagagaggaaaag

SEQ ID NO: 3853209 - RNA, 20 nt, Human
uagagauaugcagaaggaag

SEQ ID NO: 3853210 - RNA, 21 nt, Human
uagagauauuuuguaaaaugu

SEQ ID NO: 3853211 - RNA, 19 nt, Human
uagagaucugguuuugcua

SEQ ID NO: 3853212 - RNA, 20 nt, Human
uagagaucugguuuugcuau

SEQ ID NO: 3853213 - RNA, 21 nt, Human
uagagaucugguuuugcuauu

SEQ ID NO: 3853214 - RNA, 13 nt, Human
uagagaugccucc

SEQ ID NO: 3853215 - RNA, 15 nt, Human
uagagaugccucccu

SEQ ID NO: 3853216 - RNA, 14 nt, Human
uagagauggaggag

SEQ ID NO: 3853217 - RNA, 19 nt, Human
uagagauuaccuccugaga

SEQ ID NO: 3853218 - RNA, 21 nt, Human
uagagcaaaauugauguguuu

SEQ ID NO: 3853219 - RNA, 22 nt, Human
uagagcaaaauugauguguuua

SEQ ID NO: 3853220 - RNA, 17 nt, Human
uagagcacacuguagca

SEQ ID NO: 3853221 - RNA, 20 nt, Human
uagagcaccuaguccaguga

SEQ ID NO: 3853222 - RNA, 14 nt, Human
uagagcagcccaaa

SEQ ID NO: 3853223 - RNA, 20 nt, Human
uagagcaggcguucagcuca

SEQ ID NO: 3853224 - RNA, 23 nt, Human
uagagcagggauuaaccucugca

SEQ ID NO: 3853225 - RNA, 15 nt, Human
uagagcauugccauu

SEQ ID NO: 3853226 - RNA, 12 nt, Human
uagagccaggca

SEQ ID NO: 3853227 - RNA, 14 nt, Human
uagagccugaggga

SEQ ID NO: 3853228 - RNA, 17 nt, Human
uagagcuagucuuucac

SEQ ID NO: 3853229 - RNA, 13 nt, Human
uagagcuccuccc

SEQ ID NO: 3853230 - RNA, 14 nt, Human
uagagcugauccag

SEQ ID NO: 3853231 - RNA, 17 nt, Human
uagaggaaaaaaaugac

SEQ ID NO: 3853232 - RNA, 13 nt, Human
uagaggaaaagaa

SEQ ID NO: 3853233 - RNA, 19 nt, Human
uagaggaaauaagaaaaau

SEQ ID NO: 3853234 - RNA, 20 nt, Human
uagaggaaauaagaaaaauc

SEQ ID NO: 3853235 - RNA, 22 nt, Human
uagaggagaaacuggaacucuc

SEQ ID NO: 3853236 - RNA, 20 nt, Human
uagaggcaugggcuugcugu

SEQ ID NO: 3853237 - RNA, 15 nt, Human
uagaggccagccugg

SEQ ID NO: 3853238 - RNA, 16 nt, Human
uagaggccagccuggc

SEQ ID NO: 3853239 - RNA, 18 nt, Human
uagaggcccuuugcuguc

SEQ ID NO: 3853240 - RNA, 21 nt, Human
uagaggccugacugccaagcc

SEQ ID NO: 3853241 - RNA, 21 nt, Human
uagaggcuucuccgccagccu

SEQ ID NO: 3853242 - RNA, 20 nt, Human
uagagggaccucucccaggg

SEQ ID NO: 3853243 - RNA, 22 nt, Human
uagagggacggccaagaaugua

SEQ ID NO: 3853244 - RNA, 23 nt, Human
uagagggacggccaagaauguac

SEQ ID NO: 3853245 - RNA, 14 nt, Human
uagagggaggggcc

SEQ ID NO: 3853246 - RNA, 13 nt, Human
uagagguacacuu

SEQ ID NO: 3853247 - RNA, 18 nt, Human
uagagguacacuugugaa

SEQ ID NO: 3853248 - RNA, 19 nt, Human
uagagguacacuugugaau

SEQ ID NO: 3853249 - RNA, 17 nt, Human
uagagguauaauugugu

SEQ ID NO: 3853250 - RNA, 16 nt, Human
uagagguucaaagaua

SEQ ID NO: 3853251 - RNA, 19 nt, Human
uagagguucaaagauauuu

SEQ ID NO: 3853252 - RNA, 21 nt, Human
uagagguucaaagauauuuug

SEQ ID NO: 3853253 - RNA, 14 nt, Human
uagagguuuuauga

SEQ ID NO: 3853254 - RNA, 17 nt, Human
uagaguaaaaagaaaac

SEQ ID NO: 3853255 - RNA, 13 nt, Human
uagaguaagaaau

SEQ ID NO: 3853256 - RNA, 17 nt, Human
uagaguacacugccugc

SEQ ID NO: 3853257 - RNA, 21 nt, Human
uagaguacacugccugccuua

SEQ ID NO: 3853258 - RNA, 21 nt, Human
uagagucaacuacacaaagca

SEQ ID NO: 3853259 - RNA, 23 nt, Human
uagagucaucuccaucagcugua

SEQ ID NO: 3853260 - RNA, 14 nt, Human
uagagucauuguaa

SEQ ID NO: 3853261 - RNA, 15 nt, Human
uagagucauuguaau

SEQ ID NO: 3853262 - RNA, 13 nt, Human
uagaguccucacu

SEQ ID NO: 3853263 - RNA, 15 nt, Human
uagagucugagggcu

SEQ ID NO: 3853264 - RNA, 16 nt, Human
uagagugagggccuga

SEQ ID NO: 3853265 - RNA, 13 nt, Human
uagagugucuuaa

SEQ ID NO: 3853266 - RNA, 18 nt, Human
uagagugugauguaugug

SEQ ID NO: 3853267 - RNA, 13 nt, Human
uagaguuaagaag

SEQ ID NO: 3853268 - RNA, 13 nt, Human
uagaguuagacug

SEQ ID NO: 3853269 - RNA, 13 nt, Human
uuauuuugaugua

SEQ ID NO: 3853270 - RNA, 21 nt, Human
uuauuuuggagauuauaauaa

SEQ ID NO: 3853271 - RNA, 14 nt, Human
uuauuuuguaauua

SEQ ID NO: 3853272 - RNA, 21 nt, Human
uuauuuuguucauacauauuu

SEQ ID NO: 3853273 - RNA, 16 nt, Human
uuauuuuuaaaaagaa

SEQ ID NO: 3853274 - RNA, 13 nt, Human
uuauuuuuaaaau

SEQ ID NO: 3853275 - RNA, 18 nt, Human
uuauuuuuacauucugaa

SEQ ID NO: 3853276 - RNA, 16 nt, Human
uuauuuuuauaauugu

SEQ ID NO: 3853277 - RNA, 13 nt, Human
uuauuuuuauaca

SEQ ID NO: 3853278 - RNA, 19 nt, Human
uuauuuuuauauagcuuga

SEQ ID NO: 3853279 - RNA, 20 nt, Human
uuauuuuuauaucagccuga

SEQ ID NO: 3853280 - RNA, 19 nt, Human
uuauuuuucauauugugcc

SEQ ID NO: 3853281 - RNA, 13 nt, Human
uuauuuuucuaaa

SEQ ID NO: 3853282 - RNA, 14 nt, Human
uuauuuuucuaaac

SEQ ID NO: 3853283 - RNA, 15 nt, Human
uuauuuuucuguuac

SEQ ID NO: 3853284 - RNA, 23 nt, Human
uuauuuuugacaguguugaaaau

SEQ ID NO: 3853285 - RNA, 23 nt, Human
uuauuuuuguuucuuccaaagca

SEQ ID NO: 3853286 - RNA, 23 nt, Human
uuauuuuuuaaagaaaucuauuu

SEQ ID NO: 3853287 - RNA, 16 nt, Human
uuauuuuuuaauuauu

SEQ ID NO: 3853288 - RNA, 18 nt, Human
uuauuuuuuacauuauua

SEQ ID NO: 3853289 - RNA, 15 nt, Human
uuauuuuuuauacag

SEQ ID NO: 3853290 - RNA, 12 nt, Human
uuauuuuuucag

SEQ ID NO: 3853291 - RNA, 16 nt, Human
uuauuuuuucagaccg

SEQ ID NO: 3853292 - RNA, 20 nt, Human
uuauuuuuucagaccgaaaa

SEQ ID NO: 3853293 - RNA, 16 nt, Human
uuauuuuuuuaaaauu

SEQ ID NO: 3853294 - RNA, 20 nt, Human
uuauuuuuuuaagcuguaaa

SEQ ID NO: 3853295 - RNA, 15 nt, Human
uuauuuuuuucugau

SEQ ID NO: 3853296 - RNA, 16 nt, Human
uuauuuuuuucugauu

SEQ ID NO: 3853297 - RNA, 13 nt, Human
uuauuuuuuugaa

SEQ ID NO: 3853298 - RNA, 21 nt, Human
uucaaaaaaaaaaaaaagaga

SEQ ID NO: 3853299 - RNA, 14 nt, Human
uucaaaaaguguuu

SEQ ID NO: 3853300 - RNA, 17 nt, Human
uucaaaaaguguuuauu

SEQ ID NO: 3853301 - RNA, 13 nt, Human
uucaaaaauuuca

SEQ ID NO: 3853302 - RNA, 17 nt, Human
uucaaaaccuuuugaaa

SEQ ID NO: 3853303 - RNA, 13 nt, Human
uucaaaagaaagu

SEQ ID NO: 3853304 - RNA, 14 nt, Human
uucaaaagacaugu

SEQ ID NO: 3853305 - RNA, 15 nt, Human
uucaaaagauaauau

SEQ ID NO: 3853306 - RNA, 16 nt, Human
uucaaaaguaaugccu

SEQ ID NO: 3853307 - RNA, 21 nt, Human
uucaaaaguaaugccucuguc

SEQ ID NO: 3853308 - RNA, 14 nt, Human
uucaaaaguuccaa

SEQ ID NO: 3853309 - RNA, 17 nt, Human
uucaaaaguugaaauua

SEQ ID NO: 3853310 - RNA, 19 nt, Human
uucaaaauaggguauauuu

SEQ ID NO: 3853311 - RNA, 14 nt, Human
uucaaaauauugag

SEQ ID NO: 3853312 - RNA, 13 nt, Human
uucaaaauauuua

SEQ ID NO: 3853313 - RNA, 16 nt, Human
uucaaaauccuuccaa

SEQ ID NO: 3853314 - RNA, 22 nt, Human
uucaaaaugauuuccucuguaa

SEQ ID NO: 3853315 - RNA, 16 nt, Human
uucaaaauuguuacaa

SEQ ID NO: 3853316 - RNA, 13 nt, Human
uucaaacaagaau

SEQ ID NO: 3853317 - RNA, 14 nt, Human
uucaaacaagaaug

SEQ ID NO: 3853318 - RNA, 15 nt, Human
uucaaacauauauaa

SEQ ID NO: 3853319 - RNA, 15 nt, Human
uucaaacauuuacca

SEQ ID NO: 3853320 - RNA, 22 nt, Human
uucaaacuccaagguucccuug

SEQ ID NO: 3853321 - RNA, 13 nt, Human
uucaaacugaaaa

SEQ ID NO: 3853322 - RNA, 21 nt, Human
uucaaacuguaaaccaauuuu

SEQ ID NO: 3853323 - RNA, 16 nt, Human
uucaaacuuuggaaca

SEQ ID NO: 3853324 - RNA, 13 nt, Human
uucaaagauauuu

SEQ ID NO: 3853325 - RNA, 12 nt, Human
uucaaagaugcu

SEQ ID NO: 3853326 - RNA, 15 nt, Human
uucaaagcaaauguc

SEQ ID NO: 3853327 - RNA, 19 nt, Human
uucaaagcaauugaaaugc

SEQ ID NO: 3853328 - RNA, 13 nt, Human
uucaaagccagcg

SEQ ID NO: 3853329 - RNA, 23 nt, Human
uucaaagccagcguccuccucug

SEQ ID NO: 3853330 - RNA, 11 nt, Human
uucaaagcuga

SEQ ID NO: 3853331 - RNA, 16 nt, Human
uucaaagcuugaagau

SEQ ID NO: 3853332 - RNA, 16 nt, Human
uucaaaggaacauugu

SEQ ID NO: 3853333 - RNA, 19 nt, Human
uucaaaggagcaagaacuu

SEQ ID NO: 3853334 - RNA, 13 nt, Human
uucaaaguguuau

SEQ ID NO: 3853335 - RNA, 11 nt, Human
uucaaaguugc

SEQ ID NO: 3853336 - RNA, 14 nt, Human
uucaaaguuuaaua

SEQ ID NO: 3853337 - RNA, 21 nt, Human
uucaaaguuuuguuguacuua

SEQ ID NO: 3853338 - RNA, 22 nt, Human
uucaaaucaaucuguaaaacua

SEQ ID NO: 3853339 - RNA, 23 nt, Human
uucaaaucaaucuguaaaacuaa

SEQ ID NO: 3853340 - RNA, 22 nt, Human
uagcguuuaaggugagcauaaa

SEQ ID NO: 3853341 - RNA, 15 nt, Human
uagcuaacuguaaau

SEQ ID NO: 3853342 - RNA, 14 nt, Human
uagcuaagccaaga

SEQ ID NO: 3853343 - RNA, 20 nt, Human
uagcuaauaaaaagcuuuug

SEQ ID NO: 3853344 - RNA, 21 nt, Human
uagcuaauaaaaagcuuuugu

SEQ ID NO: 3853345 - RNA, 22 nt, Human
uagcuaauaaaaagcuuuuguc

SEQ ID NO: 3853346 - RNA, 13 nt, Human
uagcuaauggaaa

SEQ ID NO: 3853347 - RNA, 13 nt, Human
uagcuaauuauuu

SEQ ID NO: 3853348 - RNA, 11 nt, Human
uagcuacagag

SEQ ID NO: 3853349 - RNA, 14 nt, Human
uagcuacagagaaa

SEQ ID NO: 3853350 - RNA, 17 nt, Human
uagcuacagagaaacca

SEQ ID NO: 3853351 - RNA, 22 nt, Human
uagcuacagagaaaccagcuuc

SEQ ID NO: 3853352 - RNA, 24 nt, Human
uagcuacagagaaaccagcuuccu

SEQ ID NO: 3853353 - RNA, 23 nt, Human
uagcuacaggaagcaccccaugc

SEQ ID NO: 3853354 - RNA, 21 nt, Human
uagcuacccaaaagagaaaaa

SEQ ID NO: 3853355 - RNA, 16 nt, Human
uagcuacuaauuuuaa

SEQ ID NO: 3853356 - RNA, 18 nt, Human
uagcuagacuggugacug

SEQ ID NO: 3853357 - RNA, 19 nt, Human
uagcuagaggaaccaaccc

SEQ ID NO: 3853358 - RNA, 17 nt, Human
uagcuaggugacauaua

SEQ ID NO: 3853359 - RNA, 16 nt, Human
uagcuauauccaugua

SEQ ID NO: 3853360 - RNA, 17 nt, Human
uagcuauauccauguac

SEQ ID NO: 3853361 - RNA, 15 nt, Human
uagcuauuacugucu

SEQ ID NO: 3853362 - RNA, 11 nt, Human
uagcuauuuuu

SEQ ID NO: 3853363 - RNA, 18 nt, Human
uagcucaaacguggcuuu

SEQ ID NO: 3853364 - RNA, 23 nt, Human
uagcucaagagaaaaguugacac

SEQ ID NO: 3853365 - RNA, 12 nt, Human
uagcucaaugag

SEQ ID NO: 3853366 - RNA, 21 nt, Human
uagcucaaugagcauguuuag

SEQ ID NO: 3853367 - RNA, 18 nt, Human
uagcucagccccagccca

SEQ ID NO: 3853368 - RNA, 19 nt, Human
uagcucagccccagcccag

SEQ ID NO: 3853369 - RNA, 20 nt, Human
uagcucaggugucccugcac

SEQ ID NO: 3853370 - RNA, 11 nt, Human
uagcucaguuu

SEQ ID NO: 3853371 - RNA, 20 nt, Human
uagcuccacacccucuccca

SEQ ID NO: 3853372 - RNA, 13 nt, Human
uagcuccccuccu

SEQ ID NO: 3853373 - RNA, 15 nt, Human
uagcuccccuccucu

SEQ ID NO: 3853374 - RNA, 16 nt, Human
uagcuccuccccuucc

SEQ ID NO: 3853375 - RNA, 19 nt, Human
uagcuccuccccuuccucu

SEQ ID NO: 3853376 - RNA, 13 nt, Human
uagcuccuguggc

SEQ ID NO: 3853377 - RNA, 14 nt, Human
uagcuccuguggcc

SEQ ID NO: 3853378 - RNA, 14 nt, Human
uagcucuaaaaucu

SEQ ID NO: 3853379 - RNA, 14 nt, Human
uagcucucuaggcc

SEQ ID NO: 3853380 - RNA, 15 nt, Human
uagcucucuaggccu

SEQ ID NO: 3853381 - RNA, 11 nt, Human
uagcucugggg

SEQ ID NO: 3853382 - RNA, 23 nt, Human
uagcucuggggugggcaguuuuu

SEQ ID NO: 3853383 - RNA, 17 nt, Human
uagcucuguacaucuuu

SEQ ID NO: 3853384 - RNA, 13 nt, Human
uagcucuuuguca

SEQ ID NO: 3853385 - RNA, 22 nt, Human
uagcugaagaauugaaaaguuu

SEQ ID NO: 3853386 - RNA, 15 nt, Human
uagcugaauguuuuu

SEQ ID NO: 3853387 - RNA, 21 nt, Human
uagcugaugaacuuauucugu

SEQ ID NO: 3853388 - RNA, 17 nt, Human
uagcugcaaaggacaga

SEQ ID NO: 3853389 - RNA, 12 nt, Human
uagcugcagaac

SEQ ID NO: 3853390 - RNA, 23 nt, Human
uagcugcauccuccaagaaucua

SEQ ID NO: 3853391 - RNA, 14 nt, Human
uagcugccaagccc

SEQ ID NO: 3853392 - RNA, 16 nt, Human
uagcugccaagcccca

SEQ ID NO: 3853393 - RNA, 21 nt, Human
uagcugccaagccccauccug

SEQ ID NO: 3853394 - RNA, 19 nt, Human
uagcuggaacuacaggcuc

SEQ ID NO: 3853395 - RNA, 12 nt, Human
uagcuggagccu

SEQ ID NO: 3853396 - RNA, 23 nt, Human
uagcugggauuuuaaacuagaug

SEQ ID NO: 3853397 - RNA, 22 nt, Human
uagcugguuuccucauuccuga

SEQ ID NO: 3853398 - RNA, 16 nt, Human
uagcugugaccucucc

SEQ ID NO: 3853399 - RNA, 14 nt, Human
uagcugugaccugc

SEQ ID NO: 3853400 - RNA, 19 nt, Human
uagcugugaccugcugagc

SEQ ID NO: 3853401 - RNA, 20 nt, Human
uagcugugaccugcugagcu

SEQ ID NO: 3853402 - RNA, 24 nt, Human
uagcugugaccugcugagcucuga

SEQ ID NO: 3853403 - RNA, 14 nt, Human
uagcugugggggug

SEQ ID NO: 3853404 - RNA, 17 nt, Human
uagcuguuauuucuauu

SEQ ID NO: 3853405 - RNA, 16 nt, Human
uagcuguugagcuguu

SEQ ID NO: 3853406 - RNA, 17 nt, Human
uagcuguugagcuguuu

SEQ ID NO: 3853407 - RNA, 12 nt, Human
uagcuuaagaaa

SEQ ID NO: 3853408 - RNA, 15 nt, Human
uagcuuaagaaaaaa

SEQ ID NO: 3853409 - RNA, 21 nt, Human
uagcuuacaagccagcuggag

SEQ ID NO: 3853410 - RNA, 17 nt, Human
uagcuuacaugagaaca

SEQ ID NO: 3853411 - RNA, 19 nt, Human
uagcuuacaugagaacaga

SEQ ID NO: 3853412 - RNA, 12 nt, Human
uagcuuaugaaa

SEQ ID NO: 3853413 - RNA, 16 nt, Human
uagcuuaugaaaagaa

SEQ ID NO: 3853414 - RNA, 15 nt, Human
uagcuuauuauugaa

SEQ ID NO: 3853415 - RNA, 21 nt, Human
uugccccaacccccagcaccc

SEQ ID NO: 3853416 - RNA, 15 nt, Human
uugccccccuggccu

SEQ ID NO: 3853417 - RNA, 21 nt, Human
uugcccccgugagccaauccc

SEQ ID NO: 3853418 - RNA, 22 nt, Human
uugccccggccccggccccagc

SEQ ID NO: 3853419 - RNA, 23 nt, Human
uugccccuggggcuuccauccca

SEQ ID NO: 3853420 - RNA, 19 nt, Human
uugccccuuucucuuuucc

SEQ ID NO: 3853421 - RNA, 16 nt, Human
uugcccuagauaguuu

SEQ ID NO: 3853422 - RNA, 15 nt, Human
uugcccuagaugagc

SEQ ID NO: 3853423 - RNA, 12 nt, Human
uugcccugaccu

SEQ ID NO: 3853424 - RNA, 18 nt, Human
uugcccugaccucccagc

SEQ ID NO: 3853425 - RNA, 21 nt, Human
uugcccugaccucccagcccu

SEQ ID NO: 3853426 - RNA, 13 nt, Human
uugcccuguuaaa

SEQ ID NO: 3853427 - RNA, 18 nt, Human
uugcccuucacaguguuu

SEQ ID NO: 3853428 - RNA, 14 nt, Human
uugcccuugcccug

SEQ ID NO: 3853429 - RNA, 15 nt, Human
uugcccuugcccuga

SEQ ID NO: 3853430 - RNA, 17 nt, Human
uugcccuugcccugacc

SEQ ID NO: 3853431 - RNA, 20 nt, Human
uugcccuuucuguaccauuu

SEQ ID NO: 3853432 - RNA, 15 nt, Human
uugccgaaacuggaa

SEQ ID NO: 3853433 - RNA, 18 nt, Human
uugccgaaacuggaaguu

SEQ ID NO: 3853434 - RNA, 18 nt, Human
uugccgcgucgcccuccc

SEQ ID NO: 3853435 - RNA, 21 nt, Human
uugccgcgucgcccucccagg

SEQ ID NO: 3853436 - RNA, 16 nt, Human
uugccgguggugcagg

SEQ ID NO: 3853437 - RNA, 18 nt, Human
uugccgucuaccugaggg

SEQ ID NO: 3853438 - RNA, 18 nt, Human
uugccguggcaucuuaaa

SEQ ID NO: 3853439 - RNA, 22 nt, Human
uugccuaaauuuaaugcugccu

SEQ ID NO: 3853440 - RNA, 22 nt, Human
uugccuaagaauaaacauuugu

SEQ ID NO: 3853441 - RNA, 20 nt, Human
uugccuaaguauuaaaacau

SEQ ID NO: 3853442 - RNA, 20 nt, Human
uugccuaauaugaugacugu

SEQ ID NO: 3853443 - RNA, 14 nt, Human
uugccuagacagcu

SEQ ID NO: 3853444 - RNA, 17 nt, Human
uugccuauauuuuccug

SEQ ID NO: 3853445 - RNA, 18 nt, Human
uugccuauauuuuccuga

SEQ ID NO: 3853446 - RNA, 24 nt, Human
uugccuauucccacaccuccacag

SEQ ID NO: 3853447 - RNA, 18 nt, Human
uugccucagcuuccccag

SEQ ID NO: 3853448 - RNA, 17 nt, Human
uugccucaguaaaauga

SEQ ID NO: 3853449 - RNA, 21 nt, Human
uugccuccccauuucccaucu

SEQ ID NO: 3853450 - RNA, 19 nt, Human
uugccuccuguguacugug

SEQ ID NO: 3853451 - RNA, 21 nt, Human
uugccuccuguguacuguguc

SEQ ID NO: 3853452 - RNA, 14 nt, Human
uugccucggcuccu

SEQ ID NO: 3853453 - RNA, 16 nt, Human
uugccucggcuccugc

SEQ ID NO: 3853454 - RNA, 15 nt, Human
uugccucucuguuug

SEQ ID NO: 3853455 - RNA, 18 nt, Human
uugccucugccucugaca

SEQ ID NO: 3853456 - RNA, 17 nt, Human
uugccucuguccccuuc

SEQ ID NO: 3853457 - RNA, 13 nt, Human
uugccucugugcu

SEQ ID NO: 3853458 - RNA, 14 nt, Human
uugccucugugcug

SEQ ID NO: 3853459 - RNA, 21 nt, Human
uugccucuuuuaccugcugcu

SEQ ID NO: 3853460 - RNA, 22 nt, Human
uugccugaacauccuuccuucc

SEQ ID NO: 3853461 - RNA, 23 nt, Human
uugccugaacauccuuccuuccc

SEQ ID NO: 3853462 - RNA, 19 nt, Human
uugccugaacuccugccau

SEQ ID NO: 3853463 - RNA, 13 nt, Human
uugccugcagaga

SEQ ID NO: 3853464 - RNA, 23 nt, Human
uugccugccuuuccauccauggc

SEQ ID NO: 3853465 - RNA, 19 nt, Human
uugccugcggucaaggcca

SEQ ID NO: 3853466 - RNA, 22 nt, Human
uugccugcguuuuggaagcucu

SEQ ID NO: 3853467 - RNA, 13 nt, Human
uugccugguacag

SEQ ID NO: 3853468 - RNA, 14 nt, Human
uugccugguacagu

SEQ ID NO: 3853469 - RNA, 15 nt, Human
uugccugguacagua

SEQ ID NO: 3853470 - RNA, 16 nt, Human
uugccugguuuugucu

SEQ ID NO: 3853471 - RNA, 19 nt, Human
uugccuguaacaagccaga

SEQ ID NO: 3853472 - RNA, 12 nt, Human
uugccugugcca

SEQ ID NO: 3853473 - RNA, 22 nt, Human
uugccuguucaguuacagaaag

SEQ ID NO: 3853474 - RNA, 17 nt, Human
uugccuuauuaaaguuc

SEQ ID NO: 3853475 - RNA, 20 nt, Human
uugccuuccuuucuccagga

SEQ ID NO: 3853476 - RNA, 20 nt, Human
uugccuucucaccagcugca

SEQ ID NO: 3853477 - RNA, 19 nt, Human
uugccuucuucacccagcu

SEQ ID NO: 3853478 - RNA, 14 nt, Human
uugccuucuuugaa

SEQ ID NO: 3853479 - RNA, 16 nt, Human
uugccuucuuugaaga

SEQ ID NO: 3853480 - RNA, 17 nt, Human
uugccuucuuugaagaa

SEQ ID NO: 3853481 - RNA, 18 nt, Human
uugccuugaaccacuucc

SEQ ID NO: 3853482 - RNA, 13 nt, Human
uugccuuucucga

SEQ ID NO: 3853483 - RNA, 17 nt, Human
uugccuuugaauguuaa

SEQ ID NO: 3853484 - RNA, 19 nt, Human
uugccuuuuaauuuuuaau

SEQ ID NO: 3853485 - RNA, 12 nt, Human
uugccuuuuuca

SEQ ID NO: 3853486 - RNA, 15 nt, Human
uugccuuuuucauua

SEQ ID NO: 3853487 - RNA, 16 nt, Human
uugccuuuuucauuau

SEQ ID NO: 3853488 - RNA, 20 nt, Human
uugccuuuuucauuuuccaa

SEQ ID NO: 3853489 - RNA, 21 nt, Human
uugcgaauauuuuguaaauua

SEQ ID NO: 3853490 - RNA, 19 nt, Human
uugcgaauccaagcucccu

SEQ ID NO: 3853491 - RNA, 22 nt, Human
uugcgacggagagaaaaaagaa

SEQ ID NO: 3853492 - RNA, 18 nt, Human
uugcguaacuggcugugu

SEQ ID NO: 3853493 - RNA, 15 nt, Human
uugcguggacucugc

SEQ ID NO: 3853494 - RNA, 16 nt, Human
uugcguuacacccuuu

SEQ ID NO: 3853495 - RNA, 19 nt, Human
uugcguuagaaugaggagg

SEQ ID NO: 3853496 - RNA, 20 nt, Human
uugcguuggucucugcauuu

SEQ ID NO: 3853497 - RNA, 17 nt, Human
uugcuaaacacugcgcu

SEQ ID NO: 3853498 - RNA, 15 nt, Human
uugcuaaauguaaca

SEQ ID NO: 3853499 - RNA, 12 nt, Human
uugcuaacugaa

SEQ ID NO: 3853500 - RNA, 16 nt, Human
uugcuaacugaacuuu

SEQ ID NO: 3853501 - RNA, 19 nt, Human
uugcuaacugaacuuugaa

SEQ ID NO: 3853502 - RNA, 13 nt, Human
uugcuaagaaggg

SEQ ID NO: 3853503 - RNA, 13 nt, Human
uugcuaagaugcu

SEQ ID NO: 3853504 - RNA, 20 nt, Human
uugcuaagaugcucuaucuu

SEQ ID NO: 3853505 - RNA, 19 nt, Human
uugcuaaguaaaucucuuc

SEQ ID NO: 3853506 - RNA, 21 nt, Human
uugcuaaguaaaucucuucug

SEQ ID NO: 3853507 - RNA, 16 nt, Human
uugcuaagugaggaug

SEQ ID NO: 3853508 - RNA, 21 nt, Human
uugcuaaucagugucucacac

SEQ ID NO: 3853509 - RNA, 18 nt, Human
uugcuaaucggguuguca

SEQ ID NO: 3853510 - RNA, 20 nt, Human
uucacauucuuauaaauaug

SEQ ID NO: 3853511 - RNA, 19 nt, Human
uucacauuguuugcugcua

SEQ ID NO: 3853512 - RNA, 19 nt, Human
uucacauuuuccuuuucaa

SEQ ID NO: 3853513 - RNA, 17 nt, Human
uucacauuuuuguauuu

SEQ ID NO: 3853514 - RNA, 15 nt, Human
uucaccaaaauuauc

SEQ ID NO: 3853515 - RNA, 14 nt, Human
uucaccaaaucuug

SEQ ID NO: 3853516 - RNA, 22 nt, Human
uucaccaccaaaugccaagaaa

SEQ ID NO: 3853517 - RNA, 12 nt, Human
uucaccauguaa

SEQ ID NO: 3853518 - RNA, 20 nt, Human
uucaccauguaaaacaaaaa

SEQ ID NO: 3853519 - RNA, 15 nt, Human
uucaccauuauaaug

SEQ ID NO: 3853520 - RNA, 20 nt, Human
uucaccauuauaaugaauuu

SEQ ID NO: 3853521 - RNA, 14 nt, Human
uucacccacagaaa

SEQ ID NO: 3853522 - RNA, 18 nt, Human
uucacccaggccuauguu

SEQ ID NO: 3853523 - RNA, 18 nt, Human
uucacccaucuuaucaag

SEQ ID NO: 3853524 - RNA, 14 nt, Human
uucaccccacccuu

SEQ ID NO: 3853525 - RNA, 17 nt, Human
uucaccccagggccuga

SEQ ID NO: 3853526 - RNA, 22 nt, Human
uucaccccagggccugagccug

SEQ ID NO: 3853527 - RNA, 21 nt, Human
uucaccccaguggccacucag

SEQ ID NO: 3853528 - RNA, 23 nt, Human
uucaccccccacucaccaguguc

SEQ ID NO: 3853529 - RNA, 19 nt, Human
uucacccccuuuccuggac

SEQ ID NO: 3853530 - RNA, 21 nt, Human
uucaccccggcaggcccugca

SEQ ID NO: 3853531 - RNA, 17 nt, Human
uucaccccucccuuucu

SEQ ID NO: 3853532 - RNA, 18 nt, Human
uucacccuuaacccaagg

SEQ ID NO: 3853533 - RNA, 22 nt, Human
uucacccuuaacccaaggagca

SEQ ID NO: 3853534 - RNA, 20 nt, Human
uucaccuaagagauucugau

SEQ ID NO: 3853535 - RNA, 18 nt, Human
uucaccuauuucaaaaau

SEQ ID NO: 3853536 - RNA, 22 nt, Human
uucaccucacugaaaacaucug

SEQ ID NO: 3853537 - RNA, 17 nt, Human
uucaccuccuaaaacaa

SEQ ID NO: 3853538 - RNA, 12 nt, Human
uucaccugagca

SEQ ID NO: 3853539 - RNA, 17 nt, Human
uucaccuguaaaacuuu

SEQ ID NO: 3853540 - RNA, 13 nt, Human
uucaccuguaaac

SEQ ID NO: 3853541 - RNA, 18 nt, Human
uucaccuguaaaccugag

SEQ ID NO: 3853542 - RNA, 21 nt, Human
uucaccuguuuuuaagcuguu

SEQ ID NO: 3853543 - RNA, 23 nt, Human
uucaccuucguuuacuaugccug

SEQ ID NO: 3853544 - RNA, 22 nt, Human
uucaccuugggaugaugccuca

SEQ ID NO: 3853545 - RNA, 14 nt, Human
uucaccuuuguagc

SEQ ID NO: 3853546 - RNA, 14 nt, Human
uucaccuuuguccc

SEQ ID NO: 3853547 - RNA, 19 nt, Human
uucaccuuuguccccaccg

SEQ ID NO: 3853548 - RNA, 22 nt, Human
uucacggaaguuuucaaugaug

SEQ ID NO: 3853549 - RNA, 22 nt, Human
uucacgugcagcagcaacacaa

SEQ ID NO: 3853550 - RNA, 17 nt, Human
uucacuacuuuaauaaa

SEQ ID NO: 3853551 - RNA, 23 nt, Human
uucacuagugaccccuucccugu

SEQ ID NO: 3853552 - RNA, 20 nt, Human
uucacuauuuuuauuuauau

SEQ ID NO: 3853553 - RNA, 15 nt, Human
uucacucaagcacug

SEQ ID NO: 3853554 - RNA, 19 nt, Human
uucacucacugucaaugau

SEQ ID NO: 3853555 - RNA, 24 nt, Human
uucacuccggugugccugcagccc

SEQ ID NO: 3853556 - RNA, 14 nt, Human
uucacuccugcugu

SEQ ID NO: 3853557 - RNA, 14 nt, Human
uucacucuccuugg

SEQ ID NO: 3853558 - RNA, 15 nt, Human
uugucagagcuggga

SEQ ID NO: 3853559 - RNA, 23 nt, Human
uugucagggaguguucccuaucc

SEQ ID NO: 3853560 - RNA, 23 nt, Human
uugucauaucagcacauauuuuc

SEQ ID NO: 3853561 - RNA, 18 nt, Human
uugucaugguuacaaacu

SEQ ID NO: 3853562 - RNA, 12 nt, Human
uugucauuaaag

SEQ ID NO: 3853563 - RNA, 14 nt, Human
uugucauuagccug

SEQ ID NO: 3853564 - RNA, 14 nt, Human
uuccaaagaaaguu

SEQ ID NO: 3853565 - RNA, 16 nt, Human
uuccaaagaauucuua

SEQ ID NO: 3853566 - RNA, 21 nt, Human
uuccaaagaguagaauugcau

SEQ ID NO: 3853567 - RNA, 19 nt, Human
uuccaaagcacauugaaag

SEQ ID NO: 3853568 - RNA, 13 nt, Human
uuccaaaguacac

SEQ ID NO: 3853569 - RNA, 14 nt, Human
uuccaaauaaauaa

SEQ ID NO: 3853570 - RNA, 20 nt, Human
uuccaaauaauauguuuccu

SEQ ID NO: 3853571 - RNA, 17 nt, Human
uuccaaaugaauguugu

SEQ ID NO: 3853572 - RNA, 13 nt, Human
uuccaaauuauuu

SEQ ID NO: 3853573 - RNA, 19 nt, Human
uuccaaauuauuucuuaau

SEQ ID NO: 3853574 - RNA, 15 nt, Human
uuccaaauucacaag

SEQ ID NO: 3853575 - RNA, 23 nt, Human
uuccaaauucacaaguuguguuu

SEQ ID NO: 3853576 - RNA, 20 nt, Human
uuccaaauucaguuucauaa

SEQ ID NO: 3853577 - RNA, 16 nt, Human
uuccaacaaaggguuu

SEQ ID NO: 3853578 - RNA, 21 nt, Human
uuccaacaaaggguuuuaaug

SEQ ID NO: 3853579 - RNA, 17 nt, Human
uuccaacaccacagaca

SEQ ID NO: 3853580 - RNA, 17 nt, Human
uuccaaccauuuaucuu

SEQ ID NO: 3853581 - RNA, 18 nt, Human
uuccaaccauuuaucuug

SEQ ID NO: 3853582 - RNA, 19 nt, Human
uuccaacucguauagcaug

SEQ ID NO: 3853583 - RNA, 15 nt, Human
uuccaacugcugccc

SEQ ID NO: 3853584 - RNA, 22 nt, Human
uuccaacuguauauauucccaa

SEQ ID NO: 3853585 - RNA, 13 nt, Human
uuccaagaaagau

SEQ ID NO: 3853586 - RNA, 12 nt, Human
uuccaagacagu

SEQ ID NO: 3853587 - RNA, 14 nt, Human
uuccaagacaguau

SEQ ID NO: 3853588 - RNA, 12 nt, Human
uuccaagacauu

SEQ ID NO: 3853589 - RNA, 19 nt, Human
uuccaagacauugucaaua

SEQ ID NO: 3853590 - RNA, 16 nt, Human
uuccaagaccugacuc

SEQ ID NO: 3853591 - RNA, 18 nt, Human
uuccaagacuccagcccu

SEQ ID NO: 3853592 - RNA, 15 nt, Human
uuccaagacucuaga

SEQ ID NO: 3853593 - RNA, 22 nt, Human
uuccaagagccugagagugagg

SEQ ID NO: 3853594 - RNA, 14 nt, Human
uuccaagagucuaa

SEQ ID NO: 3853595 - RNA, 17 nt, Human
uuccaagagucuaaaga

SEQ ID NO: 3853596 - RNA, 18 nt, Human
uuccaaggagcugagaau

SEQ ID NO: 3853597 - RNA, 16 nt, Human
uuccaaggaguuccau

SEQ ID NO: 3853598 - RNA, 13 nt, Human
uuccaaguaauau

SEQ ID NO: 3853599 - RNA, 16 nt, Human
uuccaauaugaugacu

SEQ ID NO: 3853600 - RNA, 24 nt, Human
uuccaauauuucugcuuucuuuga

SEQ ID NO: 3853601 - RNA, 19 nt, Human
uuccaaugccucuugucuu

SEQ ID NO: 3853602 - RNA, 13 nt, Human
uuccaaugucugc

SEQ ID NO: 3853603 - RNA, 16 nt, Human
uuccaaugucuggaga

SEQ ID NO: 3853604 - RNA, 17 nt, Human
uuccaaugucuggagac

SEQ ID NO: 3853605 - RNA, 23 nt, Human
uuccaauuauuuauaauaaauca

SEQ ID NO: 3853606 - RNA, 13 nt, Human
uuccaauuuggaa

SEQ ID NO: 3853607 - RNA, 13 nt, Human
uuccaauuuuccu

SEQ ID NO: 3853608 - RNA, 14 nt, Human
uuccaauuuuccuu

SEQ ID NO: 3853609 - RNA, 16 nt, Human
uuccacaaagaaaauu

SEQ ID NO: 3853610 - RNA, 22 nt, Human
uuccacaagagcccaggccucc

SEQ ID NO: 3853611 - RNA, 22 nt, Human
uuccacacccccaccccuugcu

SEQ ID NO: 3853612 - RNA, 10 nt, Human
uuccacagac

SEQ ID NO: 3853613 - RNA, 12 nt, Human
uuccacagacgg

SEQ ID NO: 3853614 - RNA, 20 nt, Human
uuccacagaguaagacauug

SEQ ID NO: 3853615 - RNA, 12 nt, Human
uuccacagauug

SEQ ID NO: 3853616 - RNA, 19 nt, Human
uuccacagauuguuucuau

SEQ ID NO: 3853617 - RNA, 17 nt, Human
uuccacaguugccacca

SEQ ID NO: 3853618 - RNA, 16 nt, Human
uuccacaugcucugag

SEQ ID NO: 3853619 - RNA, 15 nt, Human
uuccaccacagccag

SEQ ID NO: 3853620 - RNA, 12 nt, Human
uuccacccaggg

SEQ ID NO: 3853621 - RNA, 18 nt, Human
uuccaccccaagagaacu

SEQ ID NO: 3853622 - RNA, 13 nt, Human
uuccacccccucc

SEQ ID NO: 3853623 - RNA, 11 nt, Human
uuccacccugg

SEQ ID NO: 3853624 - RNA, 15 nt, Human
uuccaccucacccca

SEQ ID NO: 3853625 - RNA, 12 nt, Human
uuccaccucccu

SEQ ID NO: 3853626 - RNA, 13 nt, Human
uuccaccucccuc

SEQ ID NO: 3853627 - RNA, 15 nt, Human
uuccaccucccuccc

SEQ ID NO: 3853628 - RNA, 17 nt, Human
uuccaccugcucugcug

SEQ ID NO: 3853629 - RNA, 17 nt, Human
uuccaccuuaaauuaaa

SEQ ID NO: 3853630 - RNA, 18 nt, Human
uuccaccuuaaauuaaac

SEQ ID NO: 3853631 - RNA, 15 nt, Human
uuccacgcugucucc

SEQ ID NO: 3853632 - RNA, 24 nt, Human
uuccacggagccacuccucugacu

SEQ ID NO: 3853633 - RNA, 19 nt, Human
uuccacguacugcagccuc

SEQ ID NO: 3853634 - RNA, 19 nt, Human
uuccacguguuuuauuccu

SEQ ID NO: 3853635 - RNA, 16 nt, Human
uuccacuacaccuggc

SEQ ID NO: 3853636 - RNA, 19 nt, Human
uuccacuacaccuggcuga

SEQ ID NO: 3853637 - RNA, 15 nt, Human
uuccacuacugcuac

SEQ ID NO: 3853638 - RNA, 23 nt, Human
uuccacucuggauucagccuucu

SEQ ID NO: 3853639 - RNA, 16 nt, Human
uuccacugaaguagug

SEQ ID NO: 3853640 - RNA, 13 nt, Human
uuccacugcaaaa

SEQ ID NO: 3853641 - RNA, 22 nt, Human
uuccacugugcagguucccacu

SEQ ID NO: 3853642 - RNA, 18 nt, Human
uuccacuuauagccucug

SEQ ID NO: 3853643 - RNA, 21 nt, Human
uuccacuucuuccuuucucuu

SEQ ID NO: 3853644 - RNA, 21 nt, Human
uuccacuugagugucaagcug

SEQ ID NO: 3853645 - RNA, 15 nt, Human
uuccacuuuguucuu

SEQ ID NO: 3853646 - RNA, 21 nt, Human
uuccagaaaaccccagcaucc

SEQ ID NO: 3853647 - RNA, 22 nt, Human
uuccagaaaggauauuuaagaa

SEQ ID NO: 3853648 - RNA, 22 nt, Human
uuccagaagaagagaagcugcu

SEQ ID NO: 3853649 - RNA, 23 nt, Human
uuccagaagaagagaagcugcug

SEQ ID NO: 3853650 - RNA, 19 nt, Human
uuccagaauaucugggauu

SEQ ID NO: 3853651 - RNA, 11 nt, Human
uuccagaaucc

SEQ ID NO: 3853652 - RNA, 14 nt, Human
uuccagaaugcugu

SEQ ID NO: 3853653 - RNA, 18 nt, Human
uuccagaaugcuguacau

SEQ ID NO: 3853654 - RNA, 14 nt, Human
uuccagaccugaag

SEQ ID NO: 3853655 - RNA, 23 nt, Human
uuccagacugcuuccaauuuucu

SEQ ID NO: 3853656 - RNA, 20 nt, Human
uuccagagacaaauauuucu

SEQ ID NO: 3853657 - RNA, 20 nt, Human
uuccagagaguccucuggau

SEQ ID NO: 3853658 - RNA, 18 nt, Human
uuccagagaguggcuccu

SEQ ID NO: 3853659 - RNA, 11 nt, Human
uuccagagcau

SEQ ID NO: 3853660 - RNA, 13 nt, Human
uuccagagcauuc

SEQ ID NO: 3853661 - RNA, 15 nt, Human
uuccagagcugccag

SEQ ID NO: 3853662 - RNA, 20 nt, Human
uuccagaggcuauuauuuuc

SEQ ID NO: 3853663 - RNA, 15 nt, Human
uuccagaucccaggc

SEQ ID NO: 3853664 - RNA, 16 nt, Human
uuccagauccucucug

SEQ ID NO: 3853665 - RNA, 19 nt, Human
uuccagauggucauccaga

SEQ ID NO: 3853666 - RNA, 21 nt, Human
uuccagcaauucuccugccuc

SEQ ID NO: 3853667 - RNA, 20 nt, Human
uuccagcacaaccuucaagc

SEQ ID NO: 3853668 - RNA, 16 nt, Human
uuccagcagaagacaa

SEQ ID NO: 3853669 - RNA, 22 nt, Human
uuccagcagaagacaaaaagac

SEQ ID NO: 3853670 - RNA, 12 nt, Human
uuccagcaggag

SEQ ID NO: 3853671 - RNA, 13 nt, Human
uuccagcaggagg

SEQ ID NO: 3853672 - RNA, 21 nt, Human
uuccagcauuuagcuggccac

SEQ ID NO: 3853673 - RNA, 15 nt, Human
uuccagccagggcug

SEQ ID NO: 3853674 - RNA, 14 nt, Human
uuccagccccucug

SEQ ID NO: 3853675 - RNA, 23 nt, Human
uuccagcuagugacccacaugcc

SEQ ID NO: 3853676 - RNA, 24 nt, Human
uuccagcuagugacccacaugcca

SEQ ID NO: 3853677 - RNA, 23 nt, Human
uuccagcucaccccccacacuca

SEQ ID NO: 3853678 - RNA, 13 nt, Human
uuccagcuccuca

SEQ ID NO: 3853679 - RNA, 14 nt, Human
uuccagcuccugua

SEQ ID NO: 3853680 - RNA, 20 nt, Human
uuccagcugcugucuucugg

SEQ ID NO: 3853681 - RNA, 21 nt, Human
uuccaggaaacuccacaucug

SEQ ID NO: 3853682 - RNA, 23 nt, Human
uuccaggaaacuccacaucugcc

SEQ ID NO: 3853683 - RNA, 13 nt, Human
uuccaggcagccu

SEQ ID NO: 3853684 - RNA, 19 nt, Human
uuccaggcagccucuguca

SEQ ID NO: 3853685 - RNA, 21 nt, Human
uuccaggcuaaacauccaaua

SEQ ID NO: 3853686 - RNA, 20 nt, Human
uuccaggcugcauagaagga

SEQ ID NO: 3853687 - RNA, 13 nt, Human
uuccaggcuggga

SEQ ID NO: 3853688 - RNA, 17 nt, Human
uuccaggcugggagagc

SEQ ID NO: 3853689 - RNA, 18 nt, Human
uuccaggcuucugcuggg

SEQ ID NO: 3853690 - RNA, 15 nt, Human
uuccagggaggggcc

SEQ ID NO: 3853691 - RNA, 17 nt, Human
uuccaggggaaccugcc

SEQ ID NO: 3853692 - RNA, 17 nt, Human
uuccaggggugggacac

SEQ ID NO: 3853693 - RNA, 16 nt, Human
uuccagggucccucug

SEQ ID NO: 3853694 - RNA, 18 nt, Human
uuccagguaucuccagga

SEQ ID NO: 3853695 - RNA, 19 nt, Human
uuccagguaucuccaggau

SEQ ID NO: 3853696 - RNA, 18 nt, Human
uuccagguuuaagcuguu

SEQ ID NO: 3853697 - RNA, 15 nt, Human
uuccagguuuaagua

SEQ ID NO: 3853698 - RNA, 12 nt, Human
uuccaguauuuu

SEQ ID NO: 3853699 - RNA, 11 nt, Human
uuccagucucc

SEQ ID NO: 3853700 - RNA, 16 nt, Human
uuccagugaggcucug

SEQ ID NO: 3853701 - RNA, 19 nt, Human
uuccagugaggcucugccc

SEQ ID NO: 3853702 - RNA, 21 nt, Human
uuccagugaggcucugcccuu

SEQ ID NO: 3853703 - RNA, 16 nt, Human
uaucaguuacucagcc

SEQ ID NO: 3853704 - RNA, 21 nt, Human
uaucaguugagcuucauauac

SEQ ID NO: 3853705 - RNA, 21 nt, Human
uaucaguuugcuagcagaaau

SEQ ID NO: 3853706 - RNA, 20 nt, Human
uaucaguuuguccuguagag

SEQ ID NO: 3853707 - RNA, 18 nt, Human
uaucaguuuuauagcuuu

SEQ ID NO: 3853708 - RNA, 18 nt, Human
uaucauagaaauguaacu

SEQ ID NO: 3853709 - RNA, 15 nt, Human
uaucauaguuaacau

SEQ ID NO: 3853710 - RNA, 19 nt, Human
uaucauauauuuaaucuua

SEQ ID NO: 3853711 - RNA, 21 nt, Human
uaucaucagcauaccuuuauu

SEQ ID NO: 3853712 - RNA, 14 nt, Human
uaucaucaguauug

SEQ ID NO: 3853713 - RNA, 15 nt, Human
uaucaucaguauuga

SEQ ID NO: 3853714 - RNA, 23 nt, Human
uaucaucaguguagaaccuaauu

SEQ ID NO: 3853715 - RNA, 17 nt, Human
uaucauccacacaugaa

SEQ ID NO: 3853716 - RNA, 22 nt, Human
uaucauccacauuguuuuaaaa

SEQ ID NO: 3853717 - RNA, 16 nt, Human
uaucaucuaccuagau

SEQ ID NO: 3853718 - RNA, 11 nt, Human
uaucaugaagc

SEQ ID NO: 3853719 - RNA, 13 nt, Human
uaucaugaagccu

SEQ ID NO: 3853720 - RNA, 16 nt, Human
uaucaugaagccugug

SEQ ID NO: 3853721 - RNA, 19 nt, Human
uaucaugaauuuuaaagua

SEQ ID NO: 3853722 - RNA, 13 nt, Human
uaucaugcaaaau

SEQ ID NO: 3853723 - RNA, 16 nt, Human
uaucaugcaaaugcug

SEQ ID NO: 3853724 - RNA, 21 nt, Human
uaucaugcuuuaaaguguaau

SEQ ID NO: 3853725 - RNA, 23 nt, Human
uaucaugcuuuaaaguguaauaa

SEQ ID NO: 3853726 - RNA, 18 nt, Human
uaucauggaaauauuaug

SEQ ID NO: 3853727 - RNA, 23 nt, Human
uaucauggaaauauuaugcaaau

SEQ ID NO: 3853728 - RNA, 12 nt, Human
uaucauggucuc

SEQ ID NO: 3853729 - RNA, 22 nt, Human
uaucauguaaagaaaugucuua

SEQ ID NO: 3853730 - RNA, 16 nt, Human
uaucaugucaaacgug

SEQ ID NO: 3853731 - RNA, 11 nt, Human
uaucaugugua

SEQ ID NO: 3853732 - RNA, 13 nt, Human
uaucauguguaau

SEQ ID NO: 3853733 - RNA, 16 nt, Human
uaucauguuaguaaua

SEQ ID NO: 3853734 - RNA, 19 nt, Human
uaucauguuaguaauaccu

SEQ ID NO: 3853735 - RNA, 13 nt, Human
uaucauuaaaguu

SEQ ID NO: 3853736 - RNA, 22 nt, Human
uaucauucaaguguaaaauauu

SEQ ID NO: 3853737 - RNA, 14 nt, Human
uaucauucagcaac

SEQ ID NO: 3853738 - RNA, 13 nt, Human
uaucauucaucuu

SEQ ID NO: 3853739 - RNA, 19 nt, Human
uaucauucaucuucuucuu

SEQ ID NO: 3853740 - RNA, 19 nt, Human
uaucauugcuuccuccucc

SEQ ID NO: 3853741 - RNA, 20 nt, Human
uaucauuuaauaauauacuu

SEQ ID NO: 3853742 - RNA, 17 nt, Human
uaucauuuuagaagacu

SEQ ID NO: 3853743 - RNA, 21 nt, Human
uaucauuuucugcauuuaacc

SEQ ID NO: 3853744 - RNA, 22 nt, Human
uaucauuuuuguacaguuugcu

SEQ ID NO: 3853745 - RNA, 15 nt, Human
uaucauuuuuuccug

SEQ ID NO: 3853746 - RNA, 13 nt, Human
uauccaaaagcuu

SEQ ID NO: 3853747 - RNA, 18 nt, Human
uauccaaaauguguauuu

SEQ ID NO: 3853748 - RNA, 17 nt, Human
uauccaaaucugaagau

SEQ ID NO: 3853749 - RNA, 15 nt, Human
uauccaaucaaucuu

SEQ ID NO: 3853750 - RNA, 23 nt, Human
uauccacagagagucccacugcc

SEQ ID NO: 3853751 - RNA, 23 nt, Human
uauccaccaaaagggcucccuga

SEQ ID NO: 3853752 - RNA, 15 nt, Human
uauccaccaccuccc

SEQ ID NO: 3853753 - RNA, 13 nt, Human
uauccacccagcc

SEQ ID NO: 3853754 - RNA, 19 nt, Human
uauccacccagcccauucu

SEQ ID NO: 3853755 - RNA, 17 nt, Human
uauccacgagagcgcag

SEQ ID NO: 3853756 - RNA, 18 nt, Human
uauccacuuugcacagcu

SEQ ID NO: 3853757 - RNA, 14 nt, Human
uauccagaaaacug

SEQ ID NO: 3853758 - RNA, 21 nt, Human
uauccagguaauccaagauau

SEQ ID NO: 3853759 - RNA, 19 nt, Human
uauccaggucaacagaaug

SEQ ID NO: 3853760 - RNA, 14 nt, Human
uauccauaaaaaaa

SEQ ID NO: 3853761 - RNA, 19 nt, Human
uauccauagugacuuuuca

SEQ ID NO: 3853762 - RNA, 22 nt, Human
uauccaugacaggccugaagau

SEQ ID NO: 3853763 - RNA, 18 nt, Human
uauccauggggaagggau

SEQ ID NO: 3853764 - RNA, 19 nt, Human
uauccaugggggcagggca

SEQ ID NO: 3853765 - RNA, 18 nt, Human
uauccauuaucaugugua

SEQ ID NO: 3853766 - RNA, 15 nt, Human
uauccauuucucaug

SEQ ID NO: 3853767 - RNA, 16 nt, Human
uaucccaagaaugcaa

SEQ ID NO: 3853768 - RNA, 18 nt, Human
uaucccaagaaugcaaga

SEQ ID NO: 3853769 - RNA, 20 nt, Human
uaucccaccuccaucccaga

SEQ ID NO: 3853770 - RNA, 16 nt, Human
uaucccacggaaaaug

SEQ ID NO: 3853771 - RNA, 21 nt, Human
uaucccacggaaaaugccaau

SEQ ID NO: 3853772 - RNA, 16 nt, Human
uaucccaucccauccc

SEQ ID NO: 3853773 - RNA, 13 nt, Human
uauccccaaauua

SEQ ID NO: 3853774 - RNA, 13 nt, Human
uauccccaucucc

SEQ ID NO: 3853775 - RNA, 15 nt, Human
uucguuuguuuguuu

SEQ ID NO: 3853776 - RNA, 13 nt, Human
uucuaaaacugua

SEQ ID NO: 3853777 - RNA, 15 nt, Human
uucuaaaacuguacu

SEQ ID NO: 3853778 - RNA, 20 nt, Human
uucuaaaacuguacuuugau

SEQ ID NO: 3853779 - RNA, 13 nt, Human
uucuaaaagaaua

SEQ ID NO: 3853780 - RNA, 22 nt, Human
uucuaaaaucuuauaguucuag

SEQ ID NO: 3853781 - RNA, 19 nt, Human
uucuaaaaugugauguucu

SEQ ID NO: 3853782 - RNA, 14 nt, Human
uucuaaacagagau

SEQ ID NO: 3853783 - RNA, 19 nt, Human
uucuaaacuaggcuccuuc

SEQ ID NO: 3853784 - RNA, 13 nt, Human
uucuaaagacagg

SEQ ID NO: 3853785 - RNA, 12 nt, Human
uucuaaagauag

SEQ ID NO: 3853786 - RNA, 15 nt, Human
uucuaaagauggaaa

SEQ ID NO: 3853787 - RNA, 13 nt, Human
uucuaaagauucu

SEQ ID NO: 3853788 - RNA, 22 nt, Human
uucuaaagauucuauaguucua

SEQ ID NO: 3853789 - RNA, 16 nt, Human
uucuaaagcucugaca

SEQ ID NO: 3853790 - RNA, 13 nt, Human
uucuaaagcugcc

SEQ ID NO: 3853791 - RNA, 17 nt, Human
uucuaaagcugccagcc

SEQ ID NO: 3853792 - RNA, 16 nt, Human
uucuaaaggcuaccuu

SEQ ID NO: 3853793 - RNA, 20 nt, Human
uucuaaaggcuaccuuugua

SEQ ID NO: 3853794 - RNA, 13 nt, Human
uucuaaaguaaaa

SEQ ID NO: 3853795 - RNA, 15 nt, Human
uucuaaaguaaaaac

SEQ ID NO: 3853796 - RNA, 17 nt, Human
uucuaaaguacugagca

SEQ ID NO: 3853797 - RNA, 12 nt, Human
uucuaaaguucu

SEQ ID NO: 3853798 - RNA, 14 nt, Human
uucuaaaguucuaa

SEQ ID NO: 3853799 - RNA, 18 nt, Human
uucuaaaguucuaagauu

SEQ ID NO: 3853800 - RNA, 21 nt, Human
uucuaaauaaaaguuuuacaa

SEQ ID NO: 3853801 - RNA, 14 nt, Human
uucuaaaugaagug

SEQ ID NO: 3853802 - RNA, 23 nt, Human
uucuaaaugcauauccugagcca

SEQ ID NO: 3853803 - RNA, 14 nt, Human
uucuaacaagucau

SEQ ID NO: 3853804 - RNA, 17 nt, Human
uucuaaccaagaggcug

SEQ ID NO: 3853805 - RNA, 18 nt, Human
uucuaaccagagcaagcu

SEQ ID NO: 3853806 - RNA, 14 nt, Human
uucuaaccuggagg

SEQ ID NO: 3853807 - RNA, 21 nt, Human
uucuaaccuugaaugcugcca

SEQ ID NO: 3853808 - RNA, 14 nt, Human
uucuaaccuuuaca

SEQ ID NO: 3853809 - RNA, 15 nt, Human
uucuaaccuuuacau

SEQ ID NO: 3853810 - RNA, 22 nt, Human
uucuaacuacaaagguuuaaau

SEQ ID NO: 3853811 - RNA, 15 nt, Human
uucuaacuccaguga

SEQ ID NO: 3853812 - RNA, 17 nt, Human
uucuaacucugauguaa

SEQ ID NO: 3853813 - RNA, 14 nt, Human
uucuaacuucauaa

SEQ ID NO: 3853814 - RNA, 20 nt, Human
uucuaagaaacauuuauauu

SEQ ID NO: 3853815 - RNA, 18 nt, Human
uucuaagaaauaucugug

SEQ ID NO: 3853816 - RNA, 19 nt, Human
uucuaagaaauaucuguga

SEQ ID NO: 3853817 - RNA, 13 nt, Human
uucuaagaaguga

SEQ ID NO: 3853818 - RNA, 12 nt, Human
uucuaagacuca

SEQ ID NO: 3853819 - RNA, 20 nt, Human
uucuaagacucaaauguucu

SEQ ID NO: 3853820 - RNA, 19 nt, Human
uucuaagaugugauauucu

SEQ ID NO: 3853821 - RNA, 12 nt, Human
uucuaagauucu

SEQ ID NO: 3853822 - RNA, 13 nt, Human
uucuaagauucua

SEQ ID NO: 3853823 - RNA, 16 nt, Human
uucuaagauucuaaug

SEQ ID NO: 3853824 - RNA, 14 nt, Human
uucuaagauucuga

SEQ ID NO: 3853825 - RNA, 13 nt, Human
uucuaaggaagac

SEQ ID NO: 3853826 - RNA, 14 nt, Human
uucuaaggaauaug

SEQ ID NO: 3853827 - RNA, 23 nt, Human
uucuaaggaccugaaauuccaaa

SEQ ID NO: 3853828 - RNA, 21 nt, Human
uucuaagguccgguguucuaa

SEQ ID NO: 3853829 - RNA, 15 nt, Human
uucuaaguaaaacca

SEQ ID NO: 3853830 - RNA, 18 nt, Human
uucuaaguaaauacaauu

SEQ ID NO: 3853831 - RNA, 20 nt, Human
uucuaaguaaauacaauuuu

SEQ ID NO: 3853832 - RNA, 21 nt, Human
uucuaaguaaauacaauuuuu

SEQ ID NO: 3853833 - RNA, 21 nt, Human
uucuaaguuucuaagauucua

SEQ ID NO: 3853834 - RNA, 16 nt, Human
uucuaauaaauuauac

SEQ ID NO: 3853835 - RNA, 20 nt, Human
uucuaauaagcuaguugaau

SEQ ID NO: 3853836 - RNA, 23 nt, Human
uucuaauaagcuaguugaauacu

SEQ ID NO: 3853837 - RNA, 15 nt, Human
uucuaauaauuucua

SEQ ID NO: 3853838 - RNA, 12 nt, Human
uucuaauagaac

SEQ ID NO: 3853839 - RNA, 19 nt, Human
uucuaauauuuauugcuuu

SEQ ID NO: 3853840 - RNA, 15 nt, Human
uucuaaucugcuaug

SEQ ID NO: 3853841 - RNA, 21 nt, Human
uucuaaugaggagagaaaaua

SEQ ID NO: 3853842 - RNA, 13 nt, Human
uucuaaugaugau

SEQ ID NO: 3853843 - RNA, 16 nt, Human
uucuaauggaaugguu

SEQ ID NO: 3853844 - RNA, 13 nt, Human
uucuaaugucuuc

SEQ ID NO: 3853845 - RNA, 14 nt, Human
uucuaaugucuuca

SEQ ID NO: 3853846 - RNA, 16 nt, Human
uucuaaugucuucauu

SEQ ID NO: 3853847 - RNA, 13 nt, Human
uucuaauguuucu

SEQ ID NO: 3853848 - RNA, 23 nt, Human
uucuaauuauguagcucuuuguc

SEQ ID NO: 3853849 - RNA, 13 nt, Human
uaucuacuugugu

SEQ ID NO: 3853850 - RNA, 16 nt, Human
uaucuagauacuguau

SEQ ID NO: 3853851 - RNA, 13 nt, Human
uaucuagauguaa

SEQ ID NO: 3853852 - RNA, 17 nt, Human
uaucuagauguaaauuu

SEQ ID NO: 3853853 - RNA, 21 nt, Human
uaucuagguuuaugacaguaa

SEQ ID NO: 3853854 - RNA, 19 nt, Human
uaucuagugcagcugauuu

SEQ ID NO: 3853855 - RNA, 18 nt, Human
uaucuauaaaauagauau

SEQ ID NO: 3853856 - RNA, 14 nt, Human
uaucuauaauuuac

SEQ ID NO: 3853857 - RNA, 19 nt, Human
uaucuauaauuuaccuaag

SEQ ID NO: 3853858 - RNA, 20 nt, Human
uaucuauacauaucuuuauu

SEQ ID NO: 3853859 - RNA, 14 nt, Human
uaucuauauaaaau

SEQ ID NO: 3853860 - RNA, 15 nt, Human
uaucuauauaaaaua

SEQ ID NO: 3853861 - RNA, 18 nt, Human
uaucuauauaaaauaacu

SEQ ID NO: 3853862 - RNA, 16 nt, Human
uaucuauauauaauuc

SEQ ID NO: 3853863 - RNA, 19 nt, Human
uaucuauauguacuuguca

SEQ ID NO: 3853864 - RNA, 15 nt, Human
uaucuauauuuuaca

SEQ ID NO: 3853865 - RNA, 14 nt, Human
uaucuauauuuuug

SEQ ID NO: 3853866 - RNA, 12 nt, Human
uaucuauuaaua

SEQ ID NO: 3853867 - RNA, 18 nt, Human
uaucuauuaauauaugua

SEQ ID NO: 3853868 - RNA, 16 nt, Human
uaucuauucugagaaa

SEQ ID NO: 3853869 - RNA, 23 nt, Human
uaucucaaacaauugaagucaau

SEQ ID NO: 3853870 - RNA, 12 nt, Human
uaucucacacuc

SEQ ID NO: 3853871 - RNA, 20 nt, Human
uaucucagaaagugccugac

SEQ ID NO: 3853872 - RNA, 16 nt, Human
uaucucagauauuugc

SEQ ID NO: 3853873 - RNA, 18 nt, Human
uaucucagauauuugcac

SEQ ID NO: 3853874 - RNA, 18 nt, Human
uaucuccagcggcccugu

SEQ ID NO: 3853875 - RNA, 13 nt, Human
uaucucccccagc

SEQ ID NO: 3853876 - RNA, 17 nt, Human
uaucucccccagcccca

SEQ ID NO: 3853877 - RNA, 13 nt, Human
uaucuccugacag

SEQ ID NO: 3853878 - RNA, 21 nt, Human
uaucuccugacagaaggugcc

SEQ ID NO: 3853879 - RNA, 21 nt, Human
uaucuccuuuguauucugucu

SEQ ID NO: 3853880 - RNA, 16 nt, Human
uaucucgaacauggaa

SEQ ID NO: 3853881 - RNA, 17 nt, Human
uaucucuauuuaauauu

SEQ ID NO: 3853882 - RNA, 16 nt, Human
uaucucuauuugagaa

SEQ ID NO: 3853883 - RNA, 20 nt, Human
uaucucucucucuuuuugga

SEQ ID NO: 3853884 - RNA, 13 nt, Human
uaucucucugugc

SEQ ID NO: 3853885 - RNA, 15 nt, Human
uaucucugaagcaug

SEQ ID NO: 3853886 - RNA, 16 nt, Human
uaucucugaagcaugu

SEQ ID NO: 3853887 - RNA, 23 nt, Human
uaucucugaagcauguuucaugu

SEQ ID NO: 3853888 - RNA, 17 nt, Human
uaucucugugugcacaa

SEQ ID NO: 3853889 - RNA, 12 nt, Human
uaucucuguguu

SEQ ID NO: 3853890 - RNA, 12 nt, Human
uaucucuucagu

SEQ ID NO: 3853891 - RNA, 16 nt, Human
uaucucuucagucucu

SEQ ID NO: 3853892 - RNA, 21 nt, Human
uaucucuuuuauauuuguagg

SEQ ID NO: 3853893 - RNA, 13 nt, Human
uaucugaaaacug

SEQ ID NO: 3853894 - RNA, 13 nt, Human
uaucugaaaguca

SEQ ID NO: 3853895 - RNA, 17 nt, Human
uaucugaacauuuacua

SEQ ID NO: 3853896 - RNA, 19 nt, Human
uaucugaacauuuacuaca

SEQ ID NO: 3853897 - RNA, 21 nt, Human
uaucugaaggagauuuuccuu

SEQ ID NO: 3853898 - RNA, 19 nt, Human
uaucugaauuuuuaaacaa

SEQ ID NO: 3853899 - RNA, 16 nt, Human
uaucugagcugagcca

SEQ ID NO: 3853900 - RNA, 19 nt, Human
uaucugaggaauucuguau

SEQ ID NO: 3853901 - RNA, 21 nt, Human
uaucugaggcacaugucagca

SEQ ID NO: 3853902 - RNA, 17 nt, Human
uaucugagggaggaggc

SEQ ID NO: 3853903 - RNA, 18 nt, Human
uaucugagggaggaggcc

SEQ ID NO: 3853904 - RNA, 23 nt, Human
uaucugagggaggaggccaccuc

SEQ ID NO: 3853905 - RNA, 17 nt, Human
uaucugaguugccaaga

SEQ ID NO: 3853906 - RNA, 19 nt, Human
uaucugaguugccaagaca

SEQ ID NO: 3853907 - RNA, 21 nt, Human
uaucugaguugccaagacaaa

SEQ ID NO: 3853908 - RNA, 23 nt, Human
uaucugaguugccaagacaaauc

SEQ ID NO: 3853909 - RNA, 22 nt, Human
uaucugcaagugagguguguca

SEQ ID NO: 3853910 - RNA, 16 nt, Human
uaucugcaggcagaca

SEQ ID NO: 3853911 - RNA, 19 nt, Human
uaucugcccaccucggccu

SEQ ID NO: 3853912 - RNA, 20 nt, Human
uaucugccucucuuguaauu

SEQ ID NO: 3853913 - RNA, 20 nt, Human
uaucugccuuuauuguguuu

SEQ ID NO: 3853914 - RNA, 11 nt, Human
uaucugcuguc

SEQ ID NO: 3853915 - RNA, 12 nt, Human
uaucugcugucc

SEQ ID NO: 3853916 - RNA, 23 nt, Human
uaucuggaggccuuccagcugcu

SEQ ID NO: 3853917 - RNA, 16 nt, Human
uaucuggauucaaauu

SEQ ID NO: 3853918 - RNA, 19 nt, Human
uaucuggauucaaauuuau

SEQ ID NO: 3853919 - RNA, 23 nt, Human
uaucuggcccucgacacucacca

SEQ ID NO: 3853920 - RNA, 19 nt, Human
uaucuggccuaaaaucuug

SEQ ID NO: 3853921 - RNA, 19 nt, Human
uaucugggauucuacuuua

SEQ ID NO: 3853922 - RNA, 11 nt, Human
uaucugggcuu

SEQ ID NO: 3853923 - RNA, 15 nt, Human
uaucugggcuuccug

SEQ ID NO: 3853924 - RNA, 16 nt, Human
uaucugggcuuccugg

SEQ ID NO: 3853925 - RNA, 20 nt, Human
uaucugggcuuccuggagca

SEQ ID NO: 3853926 - RNA, 19 nt, Human
uaucugguauuaaaugcca

SEQ ID NO: 3853927 - RNA, 18 nt, Human
uaucuguaaguuuugaau

SEQ ID NO: 3853928 - RNA, 16 nt, Human
uaucuguaucucucuc

SEQ ID NO: 3853929 - RNA, 11 nt, Human
uaucuguauuu

SEQ ID NO: 3853930 - RNA, 17 nt, Human
uaucugugcgugaaaca

SEQ ID NO: 3853931 - RNA, 14 nt, Human
uaucugugcucagg

SEQ ID NO: 3853932 - RNA, 15 nt, Human
uaucuguuagaugcu

SEQ ID NO: 3853933 - RNA, 18 nt, Human
uaucuguucauauggaua

SEQ ID NO: 3853934 - RNA, 16 nt, Human
uaucuguuuacagugu

SEQ ID NO: 3853935 - RNA, 17 nt, Human
uaucuguuuacaguguu

SEQ ID NO: 3853936 - RNA, 16 nt, Human
uaucuuacgaaaaaau

SEQ ID NO: 3853937 - RNA, 17 nt, Human
uaucuuacuauuucaca

SEQ ID NO: 3853938 - RNA, 18 nt, Human
uaucuuacuauuucacaa

SEQ ID NO: 3853939 - RNA, 23 nt, Human
uaucuuauaaaguggaaguaugu

SEQ ID NO: 3853940 - RNA, 23 nt, Human
uaucuuaucucagauauuugcac

SEQ ID NO: 3853941 - RNA, 23 nt, Human
uuuaccagcauacccacacaaau

SEQ ID NO: 3853942 - RNA, 23 nt, Human
uuuaccagccuccguauuucaga

SEQ ID NO: 3853943 - RNA, 18 nt, Human
uuuaccagggauguagau

SEQ ID NO: 3853944 - RNA, 15 nt, Human
uuuaccauacauuua

SEQ ID NO: 3853945 - RNA, 20 nt, Human
uuuaccaugccccugagcaa

SEQ ID NO: 3853946 - RNA, 14 nt, Human
uuuaccauuuguaa

SEQ ID NO: 3853947 - RNA, 21 nt, Human
uuuacccaauaagauacauca

SEQ ID NO: 3853948 - RNA, 19 nt, Human
uuuacccuaaugucuucau

SEQ ID NO: 3853949 - RNA, 22 nt, Human
uuuacccuaaugucuucauaaa

SEQ ID NO: 3853950 - RNA, 16 nt, Human
uuuacccuauaucuau

SEQ ID NO: 3853951 - RNA, 16 nt, Human
uuuacccucuuugcug

SEQ ID NO: 3853952 - RNA, 13 nt, Human
uuuacccuucagg

SEQ ID NO: 3853953 - RNA, 13 nt, Human
uuuacccuuggcu

SEQ ID NO: 3853954 - RNA, 13 nt, Human
uuuaccucagccu

SEQ ID NO: 3853955 - RNA, 22 nt, Human
uuuaccugaagucuuuguacag

SEQ ID NO: 3853956 - RNA, 16 nt, Human
uuuaccugcaaaaaau

SEQ ID NO: 3853957 - RNA, 14 nt, Human
uuuaccugcugcuu

SEQ ID NO: 3853958 - RNA, 19 nt, Human
uuuaccuuuuuuauacaua

SEQ ID NO: 3853959 - RNA, 20 nt, Human
uuuaccuuuuuuauacauaa

SEQ ID NO: 3853960 - RNA, 21 nt, Human
uuuaccuuuuuuauacauaaa

SEQ ID NO: 3853961 - RNA, 18 nt, Human
uuuacgcuuugauucaua

SEQ ID NO: 3853962 - RNA, 13 nt, Human
uuuacggacaccc

SEQ ID NO: 3853963 - RNA, 17 nt, Human
uuuacuaaaauggacug

SEQ ID NO: 3853964 - RNA, 14 nt, Human
uuuacuaauagaca

SEQ ID NO: 3853965 - RNA, 17 nt, Human
uuuacuaauagacaauu

SEQ ID NO: 3853966 - RNA, 21 nt, Human
uuuacuacaauauguacauuu

SEQ ID NO: 3853967 - RNA, 14 nt, Human
uuuacuacagcuau

SEQ ID NO: 3853968 - RNA, 23 nt, Human
uuuacuagggaucccucaucugu

SEQ ID NO: 3853969 - RNA, 13 nt, Human
uuuacuauuuuac

SEQ ID NO: 3853970 - RNA, 19 nt, Human
uuuacucauccuccaggaa

SEQ ID NO: 3853971 - RNA, 21 nt, Human
uuuacucauccuccaggaacu

SEQ ID NO: 3853972 - RNA, 13 nt, Human
uuuacuccagugg

SEQ ID NO: 3853973 - RNA, 16 nt, Human
uuuacuccucacacuu

SEQ ID NO: 3853974 - RNA, 12 nt, Human
uuuacucugccu

SEQ ID NO: 3853975 - RNA, 18 nt, Human
uuuacugacccuggggcu

SEQ ID NO: 3853976 - RNA, 17 nt, Human
uuuacugagcuucucug

SEQ ID NO: 3853977 - RNA, 18 nt, Human
uuuacugagcuucucugu

SEQ ID NO: 3853978 - RNA, 14 nt, Human
uuuacugcauucuu

SEQ ID NO: 3853979 - RNA, 11 nt, Human
uuuacugccac

SEQ ID NO: 3853980 - RNA, 22 nt, Human
uuuacugccugaauaaagagcc

SEQ ID NO: 3853981 - RNA, 17 nt, Human
uuuacugcucugagaau

SEQ ID NO: 3853982 - RNA, 19 nt, Human
uuuacuggacaaagaauuc

SEQ ID NO: 3853983 - RNA, 19 nt, Human
uuuacugguugcauggaaa

SEQ ID NO: 3853984 - RNA, 16 nt, Human
uuuacugucuuaauua

SEQ ID NO: 3853985 - RNA, 15 nt, Human
uuuacugugauguuu

SEQ ID NO: 3853986 - RNA, 19 nt, Human
uuuacuguuauccuauuua

SEQ ID NO: 3853987 - RNA, 22 nt, Human
uuuacuguuugauauaccaaau

SEQ ID NO: 3853988 - RNA, 11 nt, Human
uuuacuuaaac

SEQ ID NO: 3853989 - RNA, 15 nt, Human
uuuacuuaaagauuu

SEQ ID NO: 3853990 - RNA, 20 nt, Human
uuuacuuaaagauuuaucaa

SEQ ID NO: 3853991 - RNA, 15 nt, Human
uuuacuuaacuguuu

SEQ ID NO: 3853992 - RNA, 14 nt, Human
uuuacuuaagacuu

SEQ ID NO: 3853993 - RNA, 16 nt, Human
uuuacuuaucuuaugc

SEQ ID NO: 3853994 - RNA, 12 nt, Human
uauuaaaacauu

SEQ ID NO: 3853995 - RNA, 17 nt, Human
uauuaaaacuaaauuuc

SEQ ID NO: 3853996 - RNA, 22 nt, Human
uuucaggguuuucugagggaaa

SEQ ID NO: 3853997 - RNA, 16 nt, Human
uuucaggugcucaaaa

SEQ ID NO: 3853998 - RNA, 19 nt, Human
uuucagguuuuaguuuuua

SEQ ID NO: 3853999 - RNA, 18 nt, Human
uuucagguuuuguaaaga

SEQ ID NO: 3854000 - RNA, 19 nt, Human
uuucaguaaaccugucuga

SEQ ID NO: 3854001 - RNA, 20 nt, Human
uuucaguauuagugauguca

SEQ ID NO: 3854002 - RNA, 21 nt, Human
uuucaguauuuuggagaaauu

SEQ ID NO: 3854003 - RNA, 22 nt, Human
uuucagugucaaauaaacacug

SEQ ID NO: 3854004 - RNA, 23 nt, Human
uuucagugucaaauaaacacugu

SEQ ID NO: 3854005 - RNA, 13 nt, Human
uuucaguucaaag

SEQ ID NO: 3854006 - RNA, 17 nt, Human
uuucaguucaaagucau

SEQ ID NO: 3854007 - RNA, 12 nt, Human
uuucaguuccaa

SEQ ID NO: 3854008 - RNA, 18 nt, Human
uuucaguucuaggaaaau

SEQ ID NO: 3854009 - RNA, 21 nt, Human
uuucaguuuauuugaaccaau

SEQ ID NO: 3854010 - RNA, 15 nt, Human
uuucauaaaaggaga

SEQ ID NO: 3854011 - RNA, 12 nt, Human
uuucauaaagca

SEQ ID NO: 3854012 - RNA, 18 nt, Human
uuucauaacuuauugcug

SEQ ID NO: 3854013 - RNA, 19 nt, Human
uuucauaagauauuuuauu

SEQ ID NO: 3854014 - RNA, 19 nt, Human
uuucauaaguauuucaaau

SEQ ID NO: 3854015 - RNA, 12 nt, Human
uuucauaaucuu

SEQ ID NO: 3854016 - RNA, 13 nt, Human
uuucauaauuugu

SEQ ID NO: 3854017 - RNA, 21 nt, Human
uuucauacagcauuacaaauu

SEQ ID NO: 3854018 - RNA, 17 nt, Human
uuucauacucuagauuu

SEQ ID NO: 3854019 - RNA, 18 nt, Human
uuucauacucuagauuuu

SEQ ID NO: 3854020 - RNA, 15 nt, Human
uuucauagcuaaaaa

SEQ ID NO: 3854021 - RNA, 13 nt, Human
uuucauauaaagu

SEQ ID NO: 3854022 - RNA, 16 nt, Human
uuucauauuugcacua

SEQ ID NO: 3854023 - RNA, 13 nt, Human
uuucauauuuuag

SEQ ID NO: 3854024 - RNA, 22 nt, Human
uuucaucauucacuucacugug

SEQ ID NO: 3854025 - RNA, 20 nt, Human
uuucauccacuagugcaaau

SEQ ID NO: 3854026 - RNA, 20 nt, Human
uuucauccauaacugaacau

SEQ ID NO: 3854027 - RNA, 23 nt, Human
uuucaucccuaugggauucagug

SEQ ID NO: 3854028 - RNA, 15 nt, Human
uuucauccuugucuu

SEQ ID NO: 3854029 - RNA, 13 nt, Human
uuucaucuauuuc

SEQ ID NO: 3854030 - RNA, 16 nt, Human
uuucaucugcucuccu

SEQ ID NO: 3854031 - RNA, 17 nt, Human
uuucaucugcucuccuu

SEQ ID NO: 3854032 - RNA, 22 nt, Human
uuucaucuucaguugucucuga

SEQ ID NO: 3854033 - RNA, 19 nt, Human
uuucaugauaaugaacaga

SEQ ID NO: 3854034 - RNA, 22 nt, Human
uuucaugauaaugaacagaaca

SEQ ID NO: 3854035 - RNA, 21 nt, Human
uuucaugauuagcaaguuaca

SEQ ID NO: 3854036 - RNA, 19 nt, Human
uuucaugcucugcaaaagg

SEQ ID NO: 3854037 - RNA, 19 nt, Human
uuucaugcuguucaugaaa

SEQ ID NO: 3854038 - RNA, 13 nt, Human
uuucauggacacu

SEQ ID NO: 3854039 - RNA, 18 nt, Human
uuucauguaaacugugca

SEQ ID NO: 3854040 - RNA, 19 nt, Human
uuucauguaaacugugcac

SEQ ID NO: 3854041 - RNA, 14 nt, Human
uuucauguaaauaa

SEQ ID NO: 3854042 - RNA, 12 nt, Human
uuucauguacaa

SEQ ID NO: 3854043 - RNA, 18 nt, Human
uuucauguacaagaugaa

SEQ ID NO: 3854044 - RNA, 11 nt, Human
uuucauguacu

SEQ ID NO: 3854045 - RNA, 16 nt, Human
uuucauguacugcauu

SEQ ID NO: 3854046 - RNA, 12 nt, Human
uuucaugugcuc

SEQ ID NO: 3854047 - RNA, 17 nt, Human
uuucauguuuugugacu

SEQ ID NO: 3854048 - RNA, 13 nt, Human
uuucauuaaagca

SEQ ID NO: 3854049 - RNA, 16 nt, Human
uuucauuaaagcauuu

SEQ ID NO: 3854050 - RNA, 14 nt, Human
uuucauuaaaggcu

SEQ ID NO: 3854051 - RNA, 14 nt, Human
uuucauuacaaugg

SEQ ID NO: 3854052 - RNA, 13 nt, Human
uuucauuagcaaa

SEQ ID NO: 3854053 - RNA, 19 nt, Human
uuucauuagcaaaaaaagu

SEQ ID NO: 3854054 - RNA, 18 nt, Human
uuucauuauguaaaaugu

SEQ ID NO: 3854055 - RNA, 19 nt, Human
uuucauuauuuuauuauga

SEQ ID NO: 3854056 - RNA, 20 nt, Human
uuucauuauuuuauuaugaa

SEQ ID NO: 3854057 - RNA, 17 nt, Human
uuucauuccaaagggga

SEQ ID NO: 3854058 - RNA, 12 nt, Human
uuucauuccauu

SEQ ID NO: 3854059 - RNA, 16 nt, Human
uuucauuccauugccu

SEQ ID NO: 3854060 - RNA, 17 nt, Human
uuucauuccauugccua

SEQ ID NO: 3854061 - RNA, 13 nt, Human
uuucauucuucuc

SEQ ID NO: 3854062 - RNA, 16 nt, Human
uuucauugccaguguc

SEQ ID NO: 3854063 - RNA, 19 nt, Human
uuucauugccagugucuuu

SEQ ID NO: 3854064 - RNA, 15 nt, Human
uuucauugcugugac

SEQ ID NO: 3854065 - RNA, 14 nt, Human
uuucauuguaaaac

SEQ ID NO: 3854066 - RNA, 15 nt, Human
uuucauuguaugaug

SEQ ID NO: 3854067 - RNA, 18 nt, Human
uuucauuguaugaugugu

SEQ ID NO: 3854068 - RNA, 20 nt, Human
uuucauuguaugauguguug

SEQ ID NO: 3854069 - RNA, 21 nt, Human
uuucauuuacucuaaaaacug

SEQ ID NO: 3854070 - RNA, 14 nt, Human
uuucauuuaucuau

SEQ ID NO: 3854071 - RNA, 17 nt, Human
uuucauuuaucuauaau

SEQ ID NO: 3854072 - RNA, 13 nt, Human
uuucauuugccua

SEQ ID NO: 3854073 - RNA, 16 nt, Human
uuucauuuuaaaaagu

SEQ ID NO: 3854074 - RNA, 21 nt, Human
uuucauuuuacaguuacuuuu

SEQ ID NO: 3854075 - RNA, 17 nt, Human
uuucauuuuauuuuaau

SEQ ID NO: 3854076 - RNA, 18 nt, Human
uuucauuuucugcaagcc

SEQ ID NO: 3854077 - RNA, 20 nt, Human
uuucauuuuuugcaucagua

SEQ ID NO: 3854078 - RNA, 15 nt, Human
uuucauuuuuuucca

SEQ ID NO: 3854079 - RNA, 20 nt, Human
uuucauuuuuuuccaggcug

SEQ ID NO: 3854080 - RNA, 13 nt, Human
uuuccaaaggcau

SEQ ID NO: 3854081 - RNA, 12 nt, Human
uuuccaaaguac

SEQ ID NO: 3854082 - RNA, 15 nt, Human
uuuccaaauaaaaug

SEQ ID NO: 3854083 - RNA, 19 nt, Human
uuuccaaccggcuuugugg

SEQ ID NO: 3854084 - RNA, 16 nt, Human
uuuccaagagcugagg

SEQ ID NO: 3854085 - RNA, 12 nt, Human
uuuccaagcaaa

SEQ ID NO: 3854086 - RNA, 21 nt, Human
uuuccaaguaauauaauggaa

SEQ ID NO: 3854087 - RNA, 14 nt, Human
uuuccaauauguga

SEQ ID NO: 3854088 - RNA, 15 nt, Human
uuuccaauaugugau

SEQ ID NO: 3854089 - RNA, 20 nt, Human
uuuccacaagauucccagag

SEQ ID NO: 3854090 - RNA, 20 nt, Human
uuuccacauaaggaaacugg

SEQ ID NO: 3854091 - RNA, 19 nt, Human
uuuccaccacagccagcac

SEQ ID NO: 3854092 - RNA, 15 nt, Human
uuuccacccccuccc

SEQ ID NO: 3854093 - RNA, 23 nt, Human
uuuccacggagccacuccucuga

SEQ ID NO: 3854094 - RNA, 13 nt, Human
uuuccacuacugc

SEQ ID NO: 3854095 - RNA, 15 nt, Human
uuuccacuacugcua

SEQ ID NO: 3854096 - RNA, 16 nt, Human
uuuccacuucuuccuu

SEQ ID NO: 3854097 - RNA, 12 nt, Human
uuuccacuuugu

SEQ ID NO: 3854098 - RNA, 23 nt, Human
uuuccacuuuguucuuuaggaga

SEQ ID NO: 3854099 - RNA, 19 nt, Human
uuuccagacuuccuugaga

SEQ ID NO: 3854100 - RNA, 17 nt, Human
uuuccagagcauuccag

SEQ ID NO: 3854101 - RNA, 19 nt, Human
uuuccagaggcuauuauuu

SEQ ID NO: 3854102 - RNA, 23 nt, Human
uuuccagcagaagacaaaaagac

SEQ ID NO: 3854103 - RNA, 17 nt, Human
uuuccagcauucccagg

SEQ ID NO: 3854104 - RNA, 22 nt, Human
uuuccaggacuguuucaaacau

SEQ ID NO: 3854105 - RNA, 22 nt, Human
uuuccaggcugguucggauuug

SEQ ID NO: 3854106 - RNA, 18 nt, Human
uuuccaggcuucugcugg

SEQ ID NO: 3854107 - RNA, 13 nt, Human
uuuccagggaggg

SEQ ID NO: 3854108 - RNA, 19 nt, Human
uuuccagguuuaagcuguu

SEQ ID NO: 3854109 - RNA, 15 nt, Human
uuuccagucuccacc

SEQ ID NO: 3854110 - RNA, 20 nt, Human
uuuccagucuccaccaggaa

SEQ ID NO: 3854111 - RNA, 19 nt, Human
uuuccagugagcuuaucau

SEQ ID NO: 3854112 - RNA, 12 nt, Human
uuuccagugcaa

SEQ ID NO: 3854113 - RNA, 16 nt, Human
uuuccaguuaaggacc

SEQ ID NO: 3854114 - RNA, 15 nt, Human
uuuccauaaggaaug

SEQ ID NO: 3854115 - RNA, 22 nt, Human
uuuccauauggauuuucuauug

SEQ ID NO: 3854116 - RNA, 21 nt, Human
uuuccauauuuuuuuccuuac

SEQ ID NO: 3854117 - RNA, 13 nt, Human
uuuccaucuaaaa

SEQ ID NO: 3854118 - RNA, 16 nt, Human
uuuccaucuaaaaaua

SEQ ID NO: 3854119 - RNA, 17 nt, Human
uuuccaugaaguuugaa

SEQ ID NO: 3854120 - RNA, 15 nt, Human
uuuccauguaugcau

SEQ ID NO: 3854121 - RNA, 20 nt, Human
uuuccauguaugcauaauaa

SEQ ID NO: 3854122 - RNA, 13 nt, Human
uuuccauuauuua

SEQ ID NO: 3854123 - RNA, 21 nt, Human
uuuccauuauuuauauuaguu

SEQ ID NO: 3854124 - RNA, 13 nt, Human
uuuccauuccaga

SEQ ID NO: 3854125 - RNA, 21 nt, Human
uuuccauugguuuaccuguga

SEQ ID NO: 3854126 - RNA, 12 nt, Human
uuucccaacucu

SEQ ID NO: 3854127 - RNA, 20 nt, Human
uuucccacaccguguaaacc

SEQ ID NO: 3854128 - RNA, 22 nt, Human
uuucccaccccaaccugcucuc

SEQ ID NO: 3854129 - RNA, 16 nt, Human
uuucccaggacccuga

SEQ ID NO: 3854130 - RNA, 12 nt, Human
uuucccauaauu

SEQ ID NO: 3854131 - RNA, 15 nt, Human
uuucccaugauuuca

SEQ ID NO: 3854132 - RNA, 22 nt, Human
uuucccauuugugccagaggaa

SEQ ID NO: 3854133 - RNA, 19 nt, Human
uuuccccaacagugugaag

SEQ ID NO: 3854134 - RNA, 15 nt, Human
uuuccccagacuugu

SEQ ID NO: 3854135 - RNA, 19 nt, Human
uuuccccaggggaaaauga

SEQ ID NO: 3854136 - RNA, 12 nt, Human
uuuccccccacu

SEQ ID NO: 3854137 - RNA, 19 nt, Human
uuuccccccacucucccca

SEQ ID NO: 3854138 - RNA, 17 nt, Human
uuucccccuuggcucuc

SEQ ID NO: 3854139 - RNA, 13 nt, Human
uuucccccuuucu

SEQ ID NO: 3854140 - RNA, 18 nt, Human
uuucuagagccugcugga

SEQ ID NO: 3854141 - RNA, 17 nt, Human
uuucuagaguuccuacc

SEQ ID NO: 3854142 - RNA, 18 nt, Human
uuucuagauacaauaaau

SEQ ID NO: 3854143 - RNA, 19 nt, Human
uuucuagcauauauguguc

SEQ ID NO: 3854144 - RNA, 18 nt, Human
uuucuagcuaauggaaaa

SEQ ID NO: 3854145 - RNA, 22 nt, Human
uuucuagcuagaaauaugauuu

SEQ ID NO: 3854146 - RNA, 21 nt, Human
uuucuaggaagaauuuuaaaa

SEQ ID NO: 3854147 - RNA, 20 nt, Human
uuucuagggcugggaaacac

SEQ ID NO: 3854148 - RNA, 21 nt, Human
uuucuagguaggaaauguggu

SEQ ID NO: 3854149 - RNA, 23 nt, Human
uuucuaggucaaggccugucccu

SEQ ID NO: 3854150 - RNA, 19 nt, Human
uuucuaguggucuuuguaa

SEQ ID NO: 3854151 - RNA, 19 nt, Human
uuucuaguguaucaaaaug

SEQ ID NO: 3854152 - RNA, 16 nt, Human
uuucuaguugaggagu

SEQ ID NO: 3854153 - RNA, 16 nt, Human
uuucuauaacagauau

SEQ ID NO: 3854154 - RNA, 22 nt, Human
uuucuauagccaaaaauagcua

SEQ ID NO: 3854155 - RNA, 15 nt, Human
uuucuauauuuucau

SEQ ID NO: 3854156 - RNA, 20 nt, Human
uuucuaucauuuuuguacag

SEQ ID NO: 3854157 - RNA, 19 nt, Human
uuucuaucguucucucuuu

SEQ ID NO: 3854158 - RNA, 16 nt, Human
uuucuaucuaaaugau

SEQ ID NO: 3854159 - RNA, 13 nt, Human
uuucuaugaaaua

SEQ ID NO: 3854160 - RNA, 21 nt, Human
uuucuaugaguggaaaaagcc

SEQ ID NO: 3854161 - RNA, 20 nt, Human
uuucuaugcugcuuuuauau

SEQ ID NO: 3854162 - RNA, 22 nt, Human
uugaaucauguaguaucaaaua

SEQ ID NO: 3854163 - RNA, 21 nt, Human
uugaaucuauugggauuuucu

SEQ ID NO: 3854164 - RNA, 17 nt, Human
uugaaucuauuuaucuu

SEQ ID NO: 3854165 - RNA, 15 nt, Human
uugaaucucauaauu

SEQ ID NO: 3854166 - RNA, 22 nt, Human
uugaaucuugucucaaugcuca

SEQ ID NO: 3854167 - RNA, 23 nt, Human
uugaaucuugucucaaugcucau

SEQ ID NO: 3854168 - RNA, 13 nt, Human
uugaaucuuuaau

SEQ ID NO: 3854169 - RNA, 12 nt, Human
uugaaugaaaaa

SEQ ID NO: 3854170 - RNA, 15 nt, Human
uugaaugaaaaauuu

SEQ ID NO: 3854171 - RNA, 18 nt, Human
uugaaugaaaaauuuaag

SEQ ID NO: 3854172 - RNA, 22 nt, Human
uugaaugaaaaauuuaagcauu

SEQ ID NO: 3854173 - RNA, 21 nt, Human
uugaaugacaacagaagcuuc

SEQ ID NO: 3854174 - RNA, 12 nt, Human
uugaaugaugcc

SEQ ID NO: 3854175 - RNA, 23 nt, Human
uugaaugcauuuuguuugguauu

SEQ ID NO: 3854176 - RNA, 13 nt, Human
uugaaugcugcca

SEQ ID NO: 3854177 - RNA, 16 nt, Human
uugaaugcuuccugac

SEQ ID NO: 3854178 - RNA, 20 nt, Human
uugaaugcuuuuugaauguu

SEQ ID NO: 3854179 - RNA, 18 nt, Human
uugaauggccugccuuga

SEQ ID NO: 3854180 - RNA, 23 nt, Human
uugaauggucagcguugcauguc

SEQ ID NO: 3854181 - RNA, 12 nt, Human
uugaaugucuuu

SEQ ID NO: 3854182 - RNA, 17 nt, Human
uugaaugucuuuugaau

SEQ ID NO: 3854183 - RNA, 13 nt, Human
uugaaugugucag

SEQ ID NO: 3854184 - RNA, 14 nt, Human
uugaauguuaaagg

SEQ ID NO: 3854185 - RNA, 22 nt, Human
uugaauguuaaagggauauuuu

SEQ ID NO: 3854186 - RNA, 13 nt, Human
uugaauguuaaau

SEQ ID NO: 3854187 - RNA, 20 nt, Human
uugaauguuaaauaaauugu

SEQ ID NO: 3854188 - RNA, 17 nt, Human
uugaauuaaauuaggaa

SEQ ID NO: 3854189 - RNA, 23 nt, Human
uugaauuagaaacauaaauaaaa

SEQ ID NO: 3854190 - RNA, 20 nt, Human
uugaauuaucuugguugaaa

SEQ ID NO: 3854191 - RNA, 22 nt, Human
uugaauuccuaaaauuauggaa

SEQ ID NO: 3854192 - RNA, 23 nt, Human
uugaauugcauuuuuuaaaacaa

SEQ ID NO: 3854193 - RNA, 15 nt, Human
uugaauuguaacugu

SEQ ID NO: 3854194 - RNA, 13 nt, Human
uugaauuuaacaa

SEQ ID NO: 3854195 - RNA, 19 nt, Human
uugaauuuaacaaugcgaa

SEQ ID NO: 3854196 - RNA, 18 nt, Human
uugaauuuacuggacaua

SEQ ID NO: 3854197 - RNA, 18 nt, Human
uugaauuuauuggcuuuu

SEQ ID NO: 3854198 - RNA, 17 nt, Human
uugaauuucacugucuu

SEQ ID NO: 3854199 - RNA, 15 nt, Human
uugaauuuuaaaucu

SEQ ID NO: 3854200 - RNA, 22 nt, Human
uugaauuuucaagcaucuccug

SEQ ID NO: 3854201 - RNA, 13 nt, Human
uugaauuuucauu

SEQ ID NO: 3854202 - RNA, 16 nt, Human
uugaauuuucauuuua

SEQ ID NO: 3854203 - RNA, 17 nt, Human
uugaauuuucauuuuac

SEQ ID NO: 3854204 - RNA, 23 nt, Human
uugaauuuucauuuuacaguuac

SEQ ID NO: 3854205 - RNA, 17 nt, Human
uugaauuuuguguuaga

SEQ ID NO: 3854206 - RNA, 22 nt, Human
uugaauuuuuuuuaacauuccu

SEQ ID NO: 3854207 - RNA, 21 nt, Human
uugacaaaaccuaacuugcgc

SEQ ID NO: 3854208 - RNA, 20 nt, Human
uugacaaaauguuauuuccc

SEQ ID NO: 3854209 - RNA, 18 nt, Human
uugacaaaggcaagcacu

SEQ ID NO: 3854210 - RNA, 20 nt, Human
uugacaaagucaagccacau

SEQ ID NO: 3854211 - RNA, 13 nt, Human
uugacaaaucugu

SEQ ID NO: 3854212 - RNA, 14 nt, Human
uugacaaaucugug

SEQ ID NO: 3854213 - RNA, 20 nt, Human
uugacaaaucuguguauauu

SEQ ID NO: 3854214 - RNA, 16 nt, Human
uugacaaccaugagac

SEQ ID NO: 3854215 - RNA, 18 nt, Human
uugacaacuggcaggcag

SEQ ID NO: 3854216 - RNA, 14 nt, Human
uugacaagcuggcu

SEQ ID NO: 3854217 - RNA, 18 nt, Human
uugacaaggucaaauuua

SEQ ID NO: 3854218 - RNA, 14 nt, Human
uugacaauaaaaua

SEQ ID NO: 3854219 - RNA, 15 nt, Human
uugacaauaaaauau

SEQ ID NO: 3854220 - RNA, 18 nt, Human
uugacaauaaaugugcuu

SEQ ID NO: 3854221 - RNA, 15 nt, Human
uugacaauuccuaga

SEQ ID NO: 3854222 - RNA, 22 nt, Human
uugacaccagcuguucuguccc

SEQ ID NO: 3854223 - RNA, 23 nt, Human
uugacacuagcccaaugaaauga

SEQ ID NO: 3854224 - RNA, 18 nt, Human
uugacacuauaucuguau

SEQ ID NO: 3854225 - RNA, 11 nt, Human
uugacacugaa

SEQ ID NO: 3854226 - RNA, 12 nt, Human
uugacacugaaa

SEQ ID NO: 3854227 - RNA, 21 nt, Human
uugacacugaaaguuuuguaa

SEQ ID NO: 3854228 - RNA, 22 nt, Human
uugacacugaaaguuuuguaaa

SEQ ID NO: 3854229 - RNA, 14 nt, Human
uugacacugaacuu

SEQ ID NO: 3854230 - RNA, 15 nt, Human
uugacacugcucuaa

SEQ ID NO: 3854231 - RNA, 19 nt, Human
uugacacuuaaaaaugguu

SEQ ID NO: 3854232 - RNA, 18 nt, Human
uugacacuuuucauauca

SEQ ID NO: 3854233 - RNA, 16 nt, Human
uugacagaacacuguc

SEQ ID NO: 3854234 - RNA, 20 nt, Human
uugacagaauauguuucaaa

SEQ ID NO: 3854235 - RNA, 18 nt, Human
uugacagcuuugcugcug

SEQ ID NO: 3854236 - RNA, 19 nt, Human
uugacaggauuauuggaaa

SEQ ID NO: 3854237 - RNA, 22 nt, Human
uugacaguaacuugguuauaca

SEQ ID NO: 3854238 - RNA, 23 nt, Human
uugacaguaacuugguuauacau

SEQ ID NO: 3854239 - RNA, 19 nt, Human
uugacauaaaguugauaaa

SEQ ID NO: 3854240 - RNA, 14 nt, Human
uugacauagucugg

SEQ ID NO: 3854241 - RNA, 16 nt, Human
uugacauauuuaaugu

SEQ ID NO: 3854242 - RNA, 18 nt, Human
uugacauauuuaauguuu

SEQ ID NO: 3854243 - RNA, 22 nt, Human
uugacaucaguuccuuugugug

SEQ ID NO: 3854244 - RNA, 14 nt, Human
uugacauguggaaa

SEQ ID NO: 3854245 - RNA, 22 nt, Human
uugacauuaagaauguugguuu

SEQ ID NO: 3854246 - RNA, 20 nt, Human
uugacauucugaaugcuucu

SEQ ID NO: 3854247 - RNA, 18 nt, Human
uugacauugcguuugacc

SEQ ID NO: 3854248 - RNA, 11 nt, Human
uugacauuuaa

SEQ ID NO: 3854249 - RNA, 18 nt, Human
uugaccaagaacugcaug

SEQ ID NO: 3854250 - RNA, 21 nt, Human
uugaccagcagaucccagcuc

SEQ ID NO: 3854251 - RNA, 18 nt, Human
uugaccaguauaaaauua

SEQ ID NO: 3854252 - RNA, 19 nt, Human
uugaccaguauaaaauuac

SEQ ID NO: 3854253 - RNA, 17 nt, Human
uugaccaucugcuuuua

SEQ ID NO: 3854254 - RNA, 17 nt, Human
uugaccauucuccaccu

SEQ ID NO: 3854255 - RNA, 24 nt, Human
uugaccauucuccaccugccaggg

SEQ ID NO: 3854256 - RNA, 14 nt, Human
uugacccacaagaa

SEQ ID NO: 3854257 - RNA, 12 nt, Human
uugacccugcac

SEQ ID NO: 3854258 - RNA, 21 nt, Human
uugaccgugaggccagagaca

SEQ ID NO: 3854259 - RNA, 23 nt, Human
uugaccucacagugacccuuccc

SEQ ID NO: 3854260 - RNA, 19 nt, Human
uugaccuccucccuguuau

SEQ ID NO: 3854261 - RNA, 15 nt, Human
uugaccucugcagca

SEQ ID NO: 3854262 - RNA, 19 nt, Human
uugaccugaggcugugguc

SEQ ID NO: 3854263 - RNA, 19 nt, Human
uugaccugcauuguaaaua

SEQ ID NO: 3854264 - RNA, 22 nt, Human
uugaccugccucccuucaugca

SEQ ID NO: 3854265 - RNA, 21 nt, Human
uugaccugcuccgcugcuccu

SEQ ID NO: 3854266 - RNA, 22 nt, Human
uugaccuggauggggcaggcca

SEQ ID NO: 3854267 - RNA, 14 nt, Human
uugaccuuuguaca

SEQ ID NO: 3854268 - RNA, 15 nt, Human
uugaccuuuguacag

SEQ ID NO: 3854269 - RNA, 21 nt, Human
uugaccuuuuauguaguaauu

SEQ ID NO: 3854270 - RNA, 16 nt, Human
uugacgaagucucuuu

SEQ ID NO: 3854271 - RNA, 18 nt, Human
uugacgagucaccuucca

SEQ ID NO: 3854272 - RNA, 17 nt, Human
uugacgauuccuucucu

SEQ ID NO: 3854273 - RNA, 15 nt, Human
uugacgccaucccag

SEQ ID NO: 3854274 - RNA, 22 nt, Human
uugacuaacucaaauacacauu

SEQ ID NO: 3854275 - RNA, 14 nt, Human
uugacuaauuuuac

SEQ ID NO: 3854276 - RNA, 16 nt, Human
uugacuagaaaauuua

SEQ ID NO: 3854277 - RNA, 17 nt, Human
uugacuaucaaacugaa

SEQ ID NO: 3854278 - RNA, 19 nt, Human
uugacucaccuguuacuug

SEQ ID NO: 3854279 - RNA, 13 nt, Human
uugacucaggagc

SEQ ID NO: 3854280 - RNA, 13 nt, Human
uugacucaucuua

SEQ ID NO: 3854281 - RNA, 15 nt, Human
uugacucaucuuaua

SEQ ID NO: 3854282 - RNA, 23 nt, Human
uugacuccuugugguuuauguca

SEQ ID NO: 3854283 - RNA, 22 nt, Human
uugcuaucuggaggccuuccag

SEQ ID NO: 3854284 - RNA, 14 nt, Human
uugcuaucuuaauu

SEQ ID NO: 3854285 - RNA, 16 nt, Human
uugcuaucuuaauuuu

SEQ ID NO: 3854286 - RNA, 20 nt, Human
uugcuaugagcuggggaugu

SEQ ID NO: 3854287 - RNA, 21 nt, Human
uugcuaugugccuuauguuga

SEQ ID NO: 3854288 - RNA, 23 nt, Human
uugcuauguuacuauuuucuaca

SEQ ID NO: 3854289 - RNA, 22 nt, Human
uugcuauuagacuguaggaaga

SEQ ID NO: 3854290 - RNA, 17 nt, Human
uugcuauucugucccua

SEQ ID NO: 3854291 - RNA, 19 nt, Human
uugcuauuguaaauauguu

SEQ ID NO: 3854292 - RNA, 19 nt, Human
uugcucacaguuauuacau

SEQ ID NO: 3854293 - RNA, 13 nt, Human
uugcucacccagu

SEQ ID NO: 3854294 - RNA, 13 nt, Human
uugcucaccuggg

SEQ ID NO: 3854295 - RNA, 16 nt, Human
uugcuccaccccacuc

SEQ ID NO: 3854296 - RNA, 20 nt, Human
uugcuccaccccacucacag

SEQ ID NO: 3854297 - RNA, 22 nt, Human
uugcuccccuuccccuuccuuc

SEQ ID NO: 3854298 - RNA, 16 nt, Human
uugcuccgccuggccu

SEQ ID NO: 3854299 - RNA, 11 nt, Human
uugcuccuccu

SEQ ID NO: 3854300 - RNA, 18 nt, Human
uugcuccuggccuugcug

SEQ ID NO: 3854301 - RNA, 22 nt, Human
uugcucuaaaauauuuaugaag

SEQ ID NO: 3854302 - RNA, 23 nt, Human
uugcucuaucucacagcacacuc

SEQ ID NO: 3854303 - RNA, 18 nt, Human
uugcucuaugcuuuccaa

SEQ ID NO: 3854304 - RNA, 19 nt, Human
uugcucuaugcuuuccaaa

SEQ ID NO: 3854305 - RNA, 13 nt, Human
uugcucucccggu

SEQ ID NO: 3854306 - RNA, 20 nt, Human
uugcucucuggccuuuuccu

SEQ ID NO: 3854307 - RNA, 21 nt, Human
uugcucucuuuuauucugugc

SEQ ID NO: 3854308 - RNA, 12 nt, Human
uugcucugcacc

SEQ ID NO: 3854309 - RNA, 17 nt, Human
uugcucugcaggcaccu

SEQ ID NO: 3854310 - RNA, 14 nt, Human
uugcucuggaccug

SEQ ID NO: 3854311 - RNA, 17 nt, Human
uugcugaaaaaugggca

SEQ ID NO: 3854312 - RNA, 19 nt, Human
uugcugaaauuuuauaugc

SEQ ID NO: 3854313 - RNA, 23 nt, Human
uugcugaaggcuaaauucacagc

SEQ ID NO: 3854314 - RNA, 23 nt, Human
uugcugacaaccauuaaagucag

SEQ ID NO: 3854315 - RNA, 12 nt, Human
uugcugacuuag

SEQ ID NO: 3854316 - RNA, 11 nt, Human
uugcugagccu

SEQ ID NO: 3854317 - RNA, 22 nt, Human
uugcugagccucugcuccccag

SEQ ID NO: 3854318 - RNA, 18 nt, Human
uugcugauggugcaauga

SEQ ID NO: 3854319 - RNA, 17 nt, Human
uugcugauuuuauucuu

SEQ ID NO: 3854320 - RNA, 19 nt, Human
uugcugauuuuauucuuga

SEQ ID NO: 3854321 - RNA, 13 nt, Human
uugcugcaaaccu

SEQ ID NO: 3854322 - RNA, 18 nt, Human
uugcugccaaccauaccu

SEQ ID NO: 3854323 - RNA, 21 nt, Human
uugcugccaaccauaccuucc

SEQ ID NO: 3854324 - RNA, 16 nt, Human
uugcugccucagagca

SEQ ID NO: 3854325 - RNA, 16 nt, Human
uugcugcuaauauuuu

SEQ ID NO: 3854326 - RNA, 20 nt, Human
uugcugcuaauauuuuccuc

SEQ ID NO: 3854327 - RNA, 19 nt, Human
uugcugcuccuuagcugcc

SEQ ID NO: 3854328 - RNA, 13 nt, Human
uugcugcugaagg

SEQ ID NO: 3854329 - RNA, 17 nt, Human
uugcugcugauaaugua

SEQ ID NO: 3854330 - RNA, 21 nt, Human
uugcugcugauuuaaacacau

SEQ ID NO: 3854331 - RNA, 15 nt, Human
uugcugcugccucuu

SEQ ID NO: 3854332 - RNA, 16 nt, Human
uugcugcuugaggcaa

SEQ ID NO: 3854333 - RNA, 18 nt, Human
uugcugcuuuuccuuggg

SEQ ID NO: 3854334 - RNA, 23 nt, Human
uugcuggacggggacuggggaug

SEQ ID NO: 3854335 - RNA, 17 nt, Human
uugcuggaucaggaagc

SEQ ID NO: 3854336 - RNA, 14 nt, Human
uugcuggccccagc

SEQ ID NO: 3854337 - RNA, 23 nt, Human
uugcuggccccagcccugcuggg

SEQ ID NO: 3854338 - RNA, 22 nt, Human
uugcugggagcugaaaaaucac

SEQ ID NO: 3854339 - RNA, 20 nt, Human
uugcugggcaguuuuucugu

SEQ ID NO: 3854340 - RNA, 20 nt, Human
uugcuggggccgaaagaaca

SEQ ID NO: 3854341 - RNA, 15 nt, Human
uugcugguaaaauga

SEQ ID NO: 3854342 - RNA, 17 nt, Human
uugcuggucuuguaaga

SEQ ID NO: 3854343 - RNA, 16 nt, Human
uugcuguaagaugucu

SEQ ID NO: 3854344 - RNA, 19 nt, Human
uugcuguaagaugucuguu

SEQ ID NO: 3854345 - RNA, 20 nt, Human
uugcuguagaagauggcacu

SEQ ID NO: 3854346 - RNA, 16 nt, Human
uugcuguaggaucuaa

SEQ ID NO: 3854347 - RNA, 21 nt, Human
uugcuguaugcugaucaucgc

SEQ ID NO: 3854348 - RNA, 17 nt, Human
uugcugucaagccauuu

SEQ ID NO: 3854349 - RNA, 12 nt, Human
uugcugucucug

SEQ ID NO: 3854350 - RNA, 15 nt, Human
uugcugucucugcuc

SEQ ID NO: 3854351 - RNA, 16 nt, Human
uugcugucucugcucg

SEQ ID NO: 3854352 - RNA, 18 nt, Human
uugcugucugcagccuug

SEQ ID NO: 3854353 - RNA, 18 nt, Human
uugcugugaacaauuguc

SEQ ID NO: 3854354 - RNA, 14 nt, Human
uugcugugaacuga

SEQ ID NO: 3854355 - RNA, 15 nt, Human
uugcugugaggcugu

SEQ ID NO: 3854356 - RNA, 20 nt, Human
uugcugugaggcuguccugu

SEQ ID NO: 3854357 - RNA, 16 nt, Human
uugcugugccucccaa

SEQ ID NO: 3854358 - RNA, 20 nt, Human
uugcugugcuucaaacuacu

SEQ ID NO: 3854359 - RNA, 17 nt, Human
uugcuguggucucuuug

SEQ ID NO: 3854360 - RNA, 20 nt, Human
uugcugugucauaccaggcc

SEQ ID NO: 3854361 - RNA, 20 nt, Human
uugcuguguccaacuccagu

SEQ ID NO: 3854362 - RNA, 19 nt, Human
uugcugugugucccaggca

SEQ ID NO: 3854363 - RNA, 17 nt, Human
uugcuguguuuaauuug

SEQ ID NO: 3854364 - RNA, 18 nt, Human
uugcuguguuuaauuuga

SEQ ID NO: 3854365 - RNA, 15 nt, Human
uuugggccccucucc

SEQ ID NO: 3854366 - RNA, 13 nt, Human
uuugggcccugca

SEQ ID NO: 3854367 - RNA, 10 nt, Human
uuugggcucu

SEQ ID NO: 3854368 - RNA, 14 nt, Human
uuugggcugcccug

SEQ ID NO: 3854369 - RNA, 20 nt, Human
uuugggcuucagcugccagu

SEQ ID NO: 3854370 - RNA, 23 nt, Human
uuugggcuuguuguuuguaacaa

SEQ ID NO: 3854371 - RNA, 14 nt, Human
uuuggggauauuuu

SEQ ID NO: 3854372 - RNA, 18 nt, Human
uuugggggacguuucuca

SEQ ID NO: 3854373 - RNA, 20 nt, Human
uuugggggguuuucuugccu

SEQ ID NO: 3854374 - RNA, 21 nt, Human
uuugggguacccacugcucug

SEQ ID NO: 3854375 - RNA, 16 nt, Human
uuuggggucuuugugg

SEQ ID NO: 3854376 - RNA, 22 nt, Human
uuuggguauguuuaaucuguua

SEQ ID NO: 3854377 - RNA, 14 nt, Human
uuuggguccaggag

SEQ ID NO: 3854378 - RNA, 15 nt, Human
uuuggguccaggagg

SEQ ID NO: 3854379 - RNA, 22 nt, Human
uuuggguuaauauggcucuuca

SEQ ID NO: 3854380 - RNA, 15 nt, Human
uuuggguuacaguau

SEQ ID NO: 3854381 - RNA, 17 nt, Human
uuuggguuuauuuggaa

SEQ ID NO: 3854382 - RNA, 18 nt, Human
uuugguaaggggaauuga

SEQ ID NO: 3854383 - RNA, 16 nt, Human
uuugguacaaaaauaa

SEQ ID NO: 3854384 - RNA, 18 nt, Human
uuugguacuuauuacugc

SEQ ID NO: 3854385 - RNA, 23 nt, Human
uuugguaguggaaaaaaaaaaga

SEQ ID NO: 3854386 - RNA, 22 nt, Human
uuugguauuacacuguauuugu

SEQ ID NO: 3854387 - RNA, 15 nt, Human
uuuggucaacacuaa

SEQ ID NO: 3854388 - RNA, 23 nt, Human
uuuggucccgugcagcuucuguc

SEQ ID NO: 3854389 - RNA, 13 nt, Human
uuuggucccuggg

SEQ ID NO: 3854390 - RNA, 22 nt, Human
uuugguccuaagucccugcccc

SEQ ID NO: 3854391 - RNA, 21 nt, Human
uuugguccuucaaaggcuugu

SEQ ID NO: 3854392 - RNA, 19 nt, Human
uuuggucgaggaguaacaa

SEQ ID NO: 3854393 - RNA, 17 nt, Human
uuuggucuacacugugc

SEQ ID NO: 3854394 - RNA, 15 nt, Human
uuuggucucccuggg

SEQ ID NO: 3854395 - RNA, 21 nt, Human
uuuggucuggacugacagcau

SEQ ID NO: 3854396 - RNA, 14 nt, Human
uuuggucugggacu

SEQ ID NO: 3854397 - RNA, 20 nt, Human
uuuggucuuuaaugaaaagc

SEQ ID NO: 3854398 - RNA, 18 nt, Human
uuuggugauuacauuuua

SEQ ID NO: 3854399 - RNA, 14 nt, Human
uuuggugauucaaa

SEQ ID NO: 3854400 - RNA, 18 nt, Human
uuuggugcauagaacugg

SEQ ID NO: 3854401 - RNA, 15 nt, Human
uuuggugccuuuccu

SEQ ID NO: 3854402 - RNA, 12 nt, Human
uuuggugcuuuu

SEQ ID NO: 3854403 - RNA, 15 nt, Human
uuugguggagauaaa

SEQ ID NO: 3854404 - RNA, 20 nt, Human
uuugguggggguagagcuga

SEQ ID NO: 3854405 - RNA, 21 nt, Human
uuuggugguuuaaaaauggua

SEQ ID NO: 3854406 - RNA, 19 nt, Human
uuugguguguggagaugca

SEQ ID NO: 3854407 - RNA, 19 nt, Human
uuugguuaagucuguuuua

SEQ ID NO: 3854408 - RNA, 15 nt, Human
uuugguuaaguuggc

SEQ ID NO: 3854409 - RNA, 16 nt, Human
uuugguuauagugcaa

SEQ ID NO: 3854410 - RNA, 21 nt, Human
uuugguuauagugcaauauau

SEQ ID NO: 3854411 - RNA, 20 nt, Human
uuugguucauuaauucuaua

SEQ ID NO: 3854412 - RNA, 12 nt, Human
uuugguucugug

SEQ ID NO: 3854413 - RNA, 20 nt, Human
uuugguucuucucaaaagaa

SEQ ID NO: 3854414 - RNA, 20 nt, Human
uuugguuugcuuugguuuau

SEQ ID NO: 3854415 - RNA, 19 nt, Human
uuugguuuucacauuggaa

SEQ ID NO: 3854416 - RNA, 21 nt, Human
uuuguaaaagaacaguaaaca

SEQ ID NO: 3854417 - RNA, 23 nt, Human
uuuguaaaagaacaguaaacauu

SEQ ID NO: 3854418 - RNA, 14 nt, Human
uuuguaaaaugaca

SEQ ID NO: 3854419 - RNA, 23 nt, Human
uuuguaaaaugacaaucaugugu

SEQ ID NO: 3854420 - RNA, 15 nt, Human
uuuguaaaauguauu

SEQ ID NO: 3854421 - RNA, 16 nt, Human
uuuguaaaauguauua

SEQ ID NO: 3854422 - RNA, 13 nt, Human
uuuguaaacauuu

SEQ ID NO: 3854423 - RNA, 22 nt, Human
uuuguaaacucaaaauauuugu

SEQ ID NO: 3854424 - RNA, 22 nt, Human
uuuguaaagaaauuuacuauau

SEQ ID NO: 3854425 - RNA, 23 nt, Human
uuuguaaagaaauuuacuauaua

SEQ ID NO: 3854426 - RNA, 22 nt, Human
uuuguggcagaaguguuucaug

SEQ ID NO: 3854427 - RNA, 22 nt, Human
uuuguggccaaggagcugcuau

SEQ ID NO: 3854428 - RNA, 12 nt, Human
uuuguggcuggg

SEQ ID NO: 3854429 - RNA, 20 nt, Human
uuugugggggacuguaaguu

SEQ ID NO: 3854430 - RNA, 20 nt, Human
uuuguggguuuuuauuuccu

SEQ ID NO: 3854431 - RNA, 22 nt, Human
uuuguguaauaaaguguuuuca

SEQ ID NO: 3854432 - RNA, 13 nt, Human
uuuguguacuuuu

SEQ ID NO: 3854433 - RNA, 17 nt, Human
uuuguguacuuuuaaga

SEQ ID NO: 3854434 - RNA, 13 nt, Human
uuuguguauuuaa

SEQ ID NO: 3854435 - RNA, 20 nt, Human
uuuguguauuuaacagggag

SEQ ID NO: 3854436 - RNA, 12 nt, Human
uuuguguccucc

SEQ ID NO: 3854437 - RNA, 16 nt, Human
uuuguguccuccagga

SEQ ID NO: 3854438 - RNA, 19 nt, Human
uuuguguccuccaggagcu

SEQ ID NO: 3854439 - RNA, 15 nt, Human
uuuguguguugucuu

SEQ ID NO: 3854440 - RNA, 13 nt, Human
uuuguguuccaaa

SEQ ID NO: 3854441 - RNA, 12 nt, Human
uuuguguucugu

SEQ ID NO: 3854442 - RNA, 14 nt, Human
uuuguguucuucuu

SEQ ID NO: 3854443 - RNA, 13 nt, Human
uuuguguuguaau

SEQ ID NO: 3854444 - RNA, 14 nt, Human
uuuguguuguaauu

SEQ ID NO: 3854445 - RNA, 22 nt, Human
uuuguguuguaauucuucaguu

SEQ ID NO: 3854446 - RNA, 12 nt, Human
uuuguguuuauu

SEQ ID NO: 3854447 - RNA, 17 nt, Human
uuuguguuugguuuaca

SEQ ID NO: 3854448 - RNA, 14 nt, Human
uuuguuaaaaauaa

SEQ ID NO: 3854449 - RNA, 21 nt, Human
uuuguuaaaacuggcaucuga

SEQ ID NO: 3854450 - RNA, 17 nt, Human
uuuguuaaauauuuaca

SEQ ID NO: 3854451 - RNA, 22 nt, Human
uuuguuaaauauuuacauauga

SEQ ID NO: 3854452 - RNA, 16 nt, Human
uuuguuaacuuugggu

SEQ ID NO: 3854453 - RNA, 16 nt, Human
uuuguuaauaucacuc

SEQ ID NO: 3854454 - RNA, 13 nt, Human
uuuguuaccuuua

SEQ ID NO: 3854455 - RNA, 12 nt, Human
uuuguuacuguu

SEQ ID NO: 3854456 - RNA, 14 nt, Human
uuuguuacuguucu

SEQ ID NO: 3854457 - RNA, 18 nt, Human
uuuguuacuguucuugcu

SEQ ID NO: 3854458 - RNA, 22 nt, Human
uuuguuaguaugaggcauuugu

SEQ ID NO: 3854459 - RNA, 13 nt, Human
uuuguuauucuua

SEQ ID NO: 3854460 - RNA, 16 nt, Human
uuuguuauucuuaaga

SEQ ID NO: 3854461 - RNA, 12 nt, Human
uuuguuauuugu

SEQ ID NO: 3854462 - RNA, 20 nt, Human
uuuguuauuuucaguauuuu

SEQ ID NO: 3854463 - RNA, 15 nt, Human
uuuguuauuuugcaa

SEQ ID NO: 3854464 - RNA, 16 nt, Human
uuuguuauuuugcaac

SEQ ID NO: 3854465 - RNA, 17 nt, Human
uuuguucacugaaggug

SEQ ID NO: 3854466 - RNA, 13 nt, Human
uuuguucauacau

SEQ ID NO: 3854467 - RNA, 19 nt, Human
uuuguucauccuauuguug

SEQ ID NO: 3854468 - RNA, 13 nt, Human
uuuguucaucugu

SEQ ID NO: 3854469 - RNA, 15 nt, Human
uuuguucccaagagc

SEQ ID NO: 3854470 - RNA, 19 nt, Human
uuuguuccccacuggagca

SEQ ID NO: 3854471 - RNA, 12 nt, Human
uuuguuccccuc

SEQ ID NO: 3854472 - RNA, 13 nt, Human
uuuguuccccucc

SEQ ID NO: 3854473 - RNA, 19 nt, Human
uuuguuccccuccuccacu

SEQ ID NO: 3854474 - RNA, 12 nt, Human
uuuguucccugu

SEQ ID NO: 3854475 - RNA, 16 nt, Human
uuuguucuaguuuuca

SEQ ID NO: 3854476 - RNA, 21 nt, Human
uuuguucucugggagaaaauc

SEQ ID NO: 3854477 - RNA, 15 nt, Human
uuuguugacauucug

SEQ ID NO: 3854478 - RNA, 20 nt, Human
uuuguugacauucugaaugc

SEQ ID NO: 3854479 - RNA, 16 nt, Human
uuuguugauucucucc

SEQ ID NO: 3854480 - RNA, 23 nt, Human
uuuguugcacugaaguuugauaa

SEQ ID NO: 3854481 - RNA, 23 nt, Human
uuuguuggaagguuuggugugug

SEQ ID NO: 3854482 - RNA, 13 nt, Human
uuuguugguuggu

SEQ ID NO: 3854483 - RNA, 23 nt, Human
uuuguugugugccucuagcugaa

SEQ ID NO: 3854484 - RNA, 15 nt, Human
uuuguugugugugca

SEQ ID NO: 3854485 - RNA, 12 nt, Human
uuuguuguuugu

SEQ ID NO: 3854486 - RNA, 19 nt, Human
uuuguuguuuguuuagucu

SEQ ID NO: 3854487 - RNA, 14 nt, Human
uuuguuuaaaaagg

SEQ ID NO: 3854488 - RNA, 22 nt, Human
uuuguuucaaugagguguccaa

SEQ ID NO: 3854489 - RNA, 12 nt, Human
uuuguuuccucu

SEQ ID NO: 3854490 - RNA, 13 nt, Human
uuuguuugaugca

SEQ ID NO: 3854491 - RNA, 11 nt, Human
uuuguuuguuu

SEQ ID NO: 3854492 - RNA, 15 nt, Human
uuuguuuguuuaauu

SEQ ID NO: 3854493 - RNA, 15 nt, Human
uuuguuuguuugggu

SEQ ID NO: 3854494 - RNA, 15 nt, Human
uuuguuuguuuuccu

SEQ ID NO: 3854495 - RNA, 14 nt, Human
uuuguuuguuuugu

SEQ ID NO: 3854496 - RNA, 14 nt, Human
uuuguuuuaaaauu

SEQ ID NO: 3854497 - RNA, 20 nt, Human
uuuguuuuaaggaagaaaaa

SEQ ID NO: 3854498 - RNA, 12 nt, Human
uuuguuuugcac

SEQ ID NO: 3854499 - RNA, 11 nt, Human
uuuguuuuguu

SEQ ID NO: 3854500 - RNA, 15 nt, Human
uuuguuuuguuuaca

SEQ ID NO: 3854501 - RNA, 17 nt, Human
uuuguuuuguuuuuaca

SEQ ID NO: 3854502 - RNA, 16 nt, Human
uuuguuuuuaaacugu

SEQ ID NO: 3854503 - RNA, 14 nt, Human
uuuguuuuuaugaa

SEQ ID NO: 3854504 - RNA, 17 nt, Human
uuuguuuuuauuaaaag

SEQ ID NO: 3854505 - RNA, 18 nt, Human
uuuguuuuuauuuaaauu

SEQ ID NO: 3854506 - RNA, 13 nt, Human
uuuguuuuucuca

SEQ ID NO: 3854507 - RNA, 15 nt, Human
uuuguuuuuuaaaaa

SEQ ID NO: 3854508 - RNA, 19 nt, Human
uuuguuuuuugaaguguug

SEQ ID NO: 3854509 - RNA, 18 nt, Human
uuuguuuuuugagucuuu

SEQ ID NO: 3854510 - RNA, 13 nt, Human
uuuguuuuuuggu

SEQ ID NO: 3854511 - RNA, 15 nt, Human
uuuguuuuuuugcca

SEQ ID NO: 3854512 - RNA, 13 nt, Human
uuuuaaaaaaaua

SEQ ID NO: 3854513 - RNA, 18 nt, Human
uuuuaaaaaaauaaaaca

SEQ ID NO: 3854514 - RNA, 20 nt, Human
uuuuaaaaaaauaaaacauu

SEQ ID NO: 3854515 - RNA, 18 nt, Human
uuuuaaaaaauauuuucu

SEQ ID NO: 3854516 - RNA, 16 nt, Human
uuuuaaaaaaugguca

SEQ ID NO: 3854517 - RNA, 22 nt, Human
uuuuaaaaagaaacaagaugcu

SEQ ID NO: 3854518 - RNA, 11 nt, Human
uuuuaaaaagu

SEQ ID NO: 3854519 - RNA, 21 nt, Human
uuuuaaaaauacauaucgcug

SEQ ID NO: 3854520 - RNA, 15 nt, Human
uuuuaaaaaucauaa

SEQ ID NO: 3854521 - RNA, 23 nt, Human
uuuuaaaaaucauaaacugugug

SEQ ID NO: 3854522 - RNA, 21 nt, Human
uuuuaaaaaucuaagcagcuu

SEQ ID NO: 3854523 - RNA, 23 nt, Human
uuuuaaaaauguccugccuuuua

SEQ ID NO: 3854524 - RNA, 19 nt, Human
uuuuaaaaauuguuauuua

SEQ ID NO: 3854525 - RNA, 14 nt, Human
uuuuaaaacuacuu

SEQ ID NO: 3854526 - RNA, 15 nt, Human
uuuuaaaacuacuua

SEQ ID NO: 3854527 - RNA, 20 nt, Human
uuuuaaaacuacuuagcacu

SEQ ID NO: 3854528 - RNA, 15 nt, Human
uuuuaaaagacaaga

SEQ ID NO: 3854529 - RNA, 23 nt, Human
uuuuaaaagacaagacuucagua

SEQ ID NO: 3854530 - RNA, 23 nt, Human
uuuuaaaagagacaaacuguaaa

SEQ ID NO: 3854531 - RNA, 15 nt, Human
uauuuucuaaagacu

SEQ ID NO: 3854532 - RNA, 15 nt, Human
uauuuucuauguacu

SEQ ID NO: 3854533 - RNA, 17 nt, Human
uauuuucuauguacuag

SEQ ID NO: 3854534 - RNA, 21 nt, Human
uauuuucuauguacuaguacu

SEQ ID NO: 3854535 - RNA, 19 nt, Human
uauuuucuauuuuaagacu

SEQ ID NO: 3854536 - RNA, 17 nt, Human
uauuuucuccaaauguu

SEQ ID NO: 3854537 - RNA, 20 nt, Human
uauuuucucuguacuuuuca

SEQ ID NO: 3854538 - RNA, 22 nt, Human
uauuuucugguagauagaaaua

SEQ ID NO: 3854539 - RNA, 13 nt, Human
uauuuucugugug

SEQ ID NO: 3854540 - RNA, 15 nt, Human
uauuuucuguguguu

SEQ ID NO: 3854541 - RNA, 18 nt, Human
uauuuucuguguguuccu

SEQ ID NO: 3854542 - RNA, 21 nt, Human
uauuuucuguguguuccuggc

SEQ ID NO: 3854543 - RNA, 14 nt, Human
uauuuucuguucua

SEQ ID NO: 3854544 - RNA, 16 nt, Human
uauuuucuuuugaauu

SEQ ID NO: 3854545 - RNA, 14 nt, Human
uauuuugaaaagcu

SEQ ID NO: 3854546 - RNA, 20 nt, Human
uauuuugaaaagcuucuuaa

SEQ ID NO: 3854547 - RNA, 17 nt, Human
uauuuugaaauggaaau

SEQ ID NO: 3854548 - RNA, 12 nt, Human
uauuuugaaauu

SEQ ID NO: 3854549 - RNA, 15 nt, Human
uauuuugaaguuuac

SEQ ID NO: 3854550 - RNA, 18 nt, Human
uauuuugaaguuuacauu

SEQ ID NO: 3854551 - RNA, 13 nt, Human
uauuuugaaucaa

SEQ ID NO: 3854552 - RNA, 16 nt, Human
uauuuugaaugugaag

SEQ ID NO: 3854553 - RNA, 17 nt, Human
uauuuugacauaaaguu

SEQ ID NO: 3854554 - RNA, 17 nt, Human
uauuuugaugcagcauu

SEQ ID NO: 3854555 - RNA, 17 nt, Human
uauuuugauguaaagau

SEQ ID NO: 3854556 - RNA, 14 nt, Human
uauuuugcacaguu

SEQ ID NO: 3854557 - RNA, 23 nt, Human
uauuuugccaagggcauaaauua

SEQ ID NO: 3854558 - RNA, 16 nt, Human
uauuuugccauuuagc

SEQ ID NO: 3854559 - RNA, 15 nt, Human
uauuuugcuuuguga

SEQ ID NO: 3854560 - RNA, 23 nt, Human
uauuuuggauuguauauuguguu

SEQ ID NO: 3854561 - RNA, 14 nt, Human
uauuuugguacuuu

SEQ ID NO: 3854562 - RNA, 14 nt, Human
uauuuuguaaaaug

SEQ ID NO: 3854563 - RNA, 17 nt, Human
uauuuuguaaaauguau

SEQ ID NO: 3854564 - RNA, 19 nt, Human
uauuuuguaaaauguauua

SEQ ID NO: 3854565 - RNA, 20 nt, Human
uauuuuguaaacucaaaaua

SEQ ID NO: 3854566 - RNA, 15 nt, Human
uauuuuguauauauc

SEQ ID NO: 3854567 - RNA, 22 nt, Human
uauuuuguaugcaagcaguuuc

SEQ ID NO: 3854568 - RNA, 17 nt, Human
uauuuuguauuguggua

SEQ ID NO: 3854569 - RNA, 18 nt, Human
uauuuugucauaucaaau

SEQ ID NO: 3854570 - RNA, 14 nt, Human
uauuuugugaguuu

SEQ ID NO: 3854571 - RNA, 17 nt, Human
uauuuugugaguuuguu

SEQ ID NO: 3854572 - RNA, 23 nt, Human
uauuuugugaguuuguuucuuug

SEQ ID NO: 3854573 - RNA, 17 nt, Human
uuuugcaagguaaaauu

SEQ ID NO: 3854574 - RNA, 17 nt, Human
uuuugcaagguuccaca

SEQ ID NO: 3854575 - RNA, 10 nt, Human
uuuugcacag

SEQ ID NO: 3854576 - RNA, 21 nt, Human
uuuugcaccccaugcuguuga

SEQ ID NO: 3854577 - RNA, 21 nt, Human
uuuugcacugaggauauucag

SEQ ID NO: 3854578 - RNA, 14 nt, Human
uuuugcagcaguga

SEQ ID NO: 3854579 - RNA, 12 nt, Human
uuuugcagcuuu

SEQ ID NO: 3854580 - RNA, 13 nt, Human
uuuugcaguaacu

SEQ ID NO: 3854581 - RNA, 16 nt, Human
uuuugcaguaacuguu

SEQ ID NO: 3854582 - RNA, 15 nt, Human
uuuugcauaauuuca

SEQ ID NO: 3854583 - RNA, 19 nt, Human
uuuugcaugcaugcaaaug

SEQ ID NO: 3854584 - RNA, 21 nt, Human
uuuugcaugcaugcaaaugag

SEQ ID NO: 3854585 - RNA, 16 nt, Human
uuuugcauggcacuug

SEQ ID NO: 3854586 - RNA, 18 nt, Human
uuuugcauuuaaaacaga

SEQ ID NO: 3854587 - RNA, 13 nt, Human
uuuugcauuuaug

SEQ ID NO: 3854588 - RNA, 15 nt, Human
uuuugccaacauugc

SEQ ID NO: 3854589 - RNA, 18 nt, Human
uuuugccaauuugcacau

SEQ ID NO: 3854590 - RNA, 16 nt, Human
uuuugccacagcuuuu

SEQ ID NO: 3854591 - RNA, 16 nt, Human
ucaagcagucgugccu

SEQ ID NO: 3854592 - RNA, 17 nt, Human
ucaagcagucgugccug

SEQ ID NO: 3854593 - RNA, 18 nt, Human
ucaagcagucgugccugu

SEQ ID NO: 3854594 - RNA, 21 nt, Human
ucaagcagucgugccuguguc

SEQ ID NO: 3854595 - RNA, 22 nt, Human
ucaagcagucgugccugugucc

SEQ ID NO: 3854596 - RNA, 20 nt, Human
ucaagcagucuacccaccuc

SEQ ID NO: 3854597 - RNA, 22 nt, Human
ucaagcaucuccugaggaucag

SEQ ID NO: 3854598 - RNA, 12 nt, Human
ucaagcaugaag

SEQ ID NO: 3854599 - RNA, 17 nt, Human
ucaagccaagcagccaa

SEQ ID NO: 3854600 - RNA, 19 nt, Human
ucaagccaagcagccaagc

SEQ ID NO: 3854601 - RNA, 16 nt, Human
ucaagccauguauaaa

SEQ ID NO: 3854602 - RNA, 20 nt, Human
ucaagccauguauaaaugug

SEQ ID NO: 3854603 - RNA, 16 nt, Human
ucaagcccaggaggac

SEQ ID NO: 3854604 - RNA, 16 nt, Human
ucaagcccgcggggac

SEQ ID NO: 3854605 - RNA, 13 nt, Human
ucaagcccugcag

SEQ ID NO: 3854606 - RNA, 14 nt, Human
ucaagccugccuag

SEQ ID NO: 3854607 - RNA, 15 nt, Human
ucaagccugugcaaa

SEQ ID NO: 3854608 - RNA, 19 nt, Human
ucaagccugugcaaaaaaa

SEQ ID NO: 3854609 - RNA, 15 nt, Human
ucaagcgauucuccu

SEQ ID NO: 3854610 - RNA, 19 nt, Human
ucaagcgauucuucugcuu

SEQ ID NO: 3854611 - RNA, 16 nt, Human
ucaagcuagaaggcca

SEQ ID NO: 3854612 - RNA, 20 nt, Human
ucaagcuagaaggccacaug

SEQ ID NO: 3854613 - RNA, 13 nt, Human
ucaagcuccuccu

SEQ ID NO: 3854614 - RNA, 16 nt, Human
ucaagcuccuccuccc

SEQ ID NO: 3854615 - RNA, 18 nt, Human
ucaagcuccuccucccug

SEQ ID NO: 3854616 - RNA, 18 nt, Human
ucaagcucugagggaaag

SEQ ID NO: 3854617 - RNA, 21 nt, Human
ucaagcugaguauuaaaaugu

SEQ ID NO: 3854618 - RNA, 19 nt, Human
ucaagcuguugaagucuca

SEQ ID NO: 3854619 - RNA, 19 nt, Human
ucaaggaaaggggguccca

SEQ ID NO: 3854620 - RNA, 18 nt, Human
ucaaggaacuugaaaaau

SEQ ID NO: 3854621 - RNA, 16 nt, Human
ucaaggaauuucuuaa

SEQ ID NO: 3854622 - RNA, 19 nt, Human
ucaaggaauuucuuaacuu

SEQ ID NO: 3854623 - RNA, 21 nt, Human
ucaaggacacgggccugucca

SEQ ID NO: 3854624 - RNA, 18 nt, Human
ucaaggacuugaaagcau

SEQ ID NO: 3854625 - RNA, 19 nt, Human
ucaaggauaccuucuuauu

SEQ ID NO: 3854626 - RNA, 14 nt, Human
ucaaggauccugag

SEQ ID NO: 3854627 - RNA, 13 nt, Human
ucaaggcacucua

SEQ ID NO: 3854628 - RNA, 15 nt, Human
ucaaggcacucuaga

SEQ ID NO: 3854629 - RNA, 21 nt, Human
ucaaggcacucuagauuccau

SEQ ID NO: 3854630 - RNA, 14 nt, Human
ucaaggcacugccu

SEQ ID NO: 3854631 - RNA, 16 nt, Human
ucaaggcacugccuga

SEQ ID NO: 3854632 - RNA, 16 nt, Human
ucaaggccucccacag

SEQ ID NO: 3854633 - RNA, 19 nt, Human
ucaaggccucccacaguga

SEQ ID NO: 3854634 - RNA, 13 nt, Human
ucaaggccugcuc

SEQ ID NO: 3854635 - RNA, 18 nt, Human
ucaaggcgugaggauggg

SEQ ID NO: 3854636 - RNA, 14 nt, Human
ucaaggcuucaguc

SEQ ID NO: 3854637 - RNA, 17 nt, Human
ucaaggcuucagucuca

SEQ ID NO: 3854638 - RNA, 19 nt, Human
ucaagggcagcuuugcuca

SEQ ID NO: 3854639 - RNA, 20 nt, Human
ucaagggcagcuuugcucau

SEQ ID NO: 3854640 - RNA, 21 nt, Human
ucaagggcagcuuugcucaua

SEQ ID NO: 3854641 - RNA, 14 nt, Human
ucaagggcuguagg

SEQ ID NO: 3854642 - RNA, 15 nt, Human
ucaagggcugucauu

SEQ ID NO: 3854643 - RNA, 18 nt, Human
ucaagggcuuacuauuuc

SEQ ID NO: 3854644 - RNA, 15 nt, Human
ucaagggcuuuccug

SEQ ID NO: 3854645 - RNA, 13 nt, Human
ucaaggggucacu

SEQ ID NO: 3854646 - RNA, 13 nt, Human
ucaagggucaggc

SEQ ID NO: 3854647 - RNA, 16 nt, Human
ucaagggucaggccuu

SEQ ID NO: 3854648 - RNA, 14 nt, Human
ucaaggucugcuuu

SEQ ID NO: 3854649 - RNA, 15 nt, Human
ucaaggucugcuuuu

SEQ ID NO: 3854650 - RNA, 19 nt, Human
ucaaguaauccaccugccu

SEQ ID NO: 3854651 - RNA, 17 nt, Human
ucaaguaauucugcugu

SEQ ID NO: 3854652 - RNA, 16 nt, Human
ucaaguaauugugaaa

SEQ ID NO: 3854653 - RNA, 17 nt, Human
ucaaguagacuacuguu

SEQ ID NO: 3854654 - RNA, 19 nt, Human
ucaaguagacuacuguuca

SEQ ID NO: 3854655 - RNA, 21 nt, Human
ucaaguagacuacuguucagc

SEQ ID NO: 3854656 - RNA, 21 nt, Human
ucaaguagcugggauuuuaaa

SEQ ID NO: 3854657 - RNA, 15 nt, Human
ucaaguauagaaaau

SEQ ID NO: 3854658 - RNA, 15 nt, Human
ucaaguauccuuguu

SEQ ID NO: 3854659 - RNA, 16 nt, Human
ucaaguauuggcaaag

SEQ ID NO: 3854660 - RNA, 20 nt, Human
ucaaguauuuuguguuugga

SEQ ID NO: 3854661 - RNA, 15 nt, Human
ucaagucaccuccuu

SEQ ID NO: 3854662 - RNA, 21 nt, Human
ucaagucauggcagguacagu

SEQ ID NO: 3854663 - RNA, 22 nt, Human
ucaaguccuuaccucuuccgga

SEQ ID NO: 3854664 - RNA, 22 nt, Human
ucaagucuaccaaccuguucaa

SEQ ID NO: 3854665 - RNA, 18 nt, Human
ucaagucuaccaauuaua

SEQ ID NO: 3854666 - RNA, 17 nt, Human
ucaagucugugccugga

SEQ ID NO: 3854667 - RNA, 21 nt, Human
ucaagucugugccuggagcuc

SEQ ID NO: 3854668 - RNA, 19 nt, Human
ucaagucuguuuacugcaa

SEQ ID NO: 3854669 - RNA, 18 nt, Human
ucaagugauucuccugcc

SEQ ID NO: 3854670 - RNA, 19 nt, Human
ucaagugauucuccugccu

SEQ ID NO: 3854671 - RNA, 22 nt, Human
ucaagugauucuccugccucag

SEQ ID NO: 3854672 - RNA, 15 nt, Human
ucaagugauucucuu

SEQ ID NO: 3854673 - RNA, 19 nt, Human
ucaaguggcaaagcuguuc

SEQ ID NO: 3854674 - RNA, 18 nt, Human
ucaaguggggcucgccau

SEQ ID NO: 3854675 - RNA, 14 nt, Human
ucaaguuaaaguga

SEQ ID NO: 3854676 - RNA, 15 nt, Human
ucaaguuagcucagg

SEQ ID NO: 3854677 - RNA, 16 nt, Human
ucaaguucaaggacca

SEQ ID NO: 3854678 - RNA, 16 nt, Human
ucaaguucuaagauuc

SEQ ID NO: 3854679 - RNA, 18 nt, Human
ucaaguucuaagauucua

SEQ ID NO: 3854680 - RNA, 15 nt, Human
ucaaguugaggggcu

SEQ ID NO: 3854681 - RNA, 21 nt, Human
ucaaguugauuagaaagacca

SEQ ID NO: 3854682 - RNA, 14 nt, Human
ucaaguugugcuug

SEQ ID NO: 3854683 - RNA, 18 nt, Human
ucaaguuuccaagcaaau

SEQ ID NO: 3854684 - RNA, 19 nt, Human
ucaaguuuccaagcaaaug

SEQ ID NO: 3854685 - RNA, 23 nt, Human
ucaaguuuccaagcaaauguuac

SEQ ID NO: 3854686 - RNA, 20 nt, Human
ucaaguuugggucugugcug

SEQ ID NO: 3854687 - RNA, 16 nt, Human
ucaauaaaaaaaagaa

SEQ ID NO: 3854688 - RNA, 13 nt, Human
ucaauaaaaaauu

SEQ ID NO: 3854689 - RNA, 14 nt, Human
ucaauaaaauccau

SEQ ID NO: 3854690 - RNA, 17 nt, Human
ucaauaaaauuauagcu

SEQ ID NO: 3854691 - RNA, 17 nt, Human
ucaauaaacaacagcug

SEQ ID NO: 3854692 - RNA, 18 nt, Human
ucaauaaacaacagcuga

SEQ ID NO: 3854693 - RNA, 19 nt, Human
ucaauaaacagcaggugau

SEQ ID NO: 3854694 - RNA, 22 nt, Human
ucaauaaacgauuuaauucucu

SEQ ID NO: 3854695 - RNA, 16 nt, Human
ucaauaaaguauuuaa

SEQ ID NO: 3854696 - RNA, 21 nt, Human
ucaauaaagugcuuuaaaaag

SEQ ID NO: 3854697 - RNA, 13 nt, Human
ucaauaaaguuug

SEQ ID NO: 3854698 - RNA, 18 nt, Human
ucaauaaaguuugaucuu

SEQ ID NO: 3854699 - RNA, 12 nt, Human
ucaauaaaucuu

SEQ ID NO: 3854700 - RNA, 20 nt, Human
ucaauaagcaucaaacucuu

SEQ ID NO: 3854701 - RNA, 15 nt, Human
ucaauaauauauuuu

SEQ ID NO: 3854702 - RNA, 18 nt, Human
ucaauacacuaguuguuu

SEQ ID NO: 3854703 - RNA, 15 nt, Human
ucaauacagauauau

SEQ ID NO: 3854704 - RNA, 16 nt, Human
ucaauacagauauauu

SEQ ID NO: 3854705 - RNA, 20 nt, Human
ucaauacaguacaggcagca

SEQ ID NO: 3854706 - RNA, 16 nt, Human
ucaauagaucuccagc

SEQ ID NO: 3854707 - RNA, 12 nt, Human
ucaauagccacu

SEQ ID NO: 3854708 - RNA, 13 nt, Human
ucaauagccacua

SEQ ID NO: 3854709 - RNA, 23 nt, Human
ucaauagcccaggauauauuuua

SEQ ID NO: 3854710 - RNA, 14 nt, Human
ucaauaggaaaaac

SEQ ID NO: 3854711 - RNA, 17 nt, Human
ucaauaggaaaaacuga

SEQ ID NO: 3854712 - RNA, 18 nt, Human
ucaauaggaaaaacugau

SEQ ID NO: 3854713 - RNA, 17 nt, Human
ucaauagucaagaaaaa

SEQ ID NO: 3854714 - RNA, 19 nt, Human
ucaauaguguccuaugcaa

SEQ ID NO: 3854715 - RNA, 18 nt, Human
ucaauaguucaaggaacu

SEQ ID NO: 3854716 - RNA, 17 nt, Human
ucaauauauugaacuuu

SEQ ID NO: 3854717 - RNA, 22 nt, Human
ucaauauauugaacuuuuguac

SEQ ID NO: 3854718 - RNA, 18 nt, Human
uuguugcuguugauguuu

SEQ ID NO: 3854719 - RNA, 12 nt, Human
uuguugcuuugu

SEQ ID NO: 3854720 - RNA, 23 nt, Human
uuguuggagucaaaaagaaccac

SEQ ID NO: 3854721 - RNA, 23 nt, Human
uuguuggcuuucccuuaucaaac

SEQ ID NO: 3854722 - RNA, 20 nt, Human
uuguugggauuccugaccca

SEQ ID NO: 3854723 - RNA, 21 nt, Human
uuguugggauuccugacccag

SEQ ID NO: 3854724 - RNA, 16 nt, Human
uuguuggggcuuuaca

SEQ ID NO: 3854725 - RNA, 16 nt, Human
uuguugguugguuuuc

SEQ ID NO: 3854726 - RNA, 21 nt, Human
uuguuguaaagcaauaaaauu

SEQ ID NO: 3854727 - RNA, 12 nt, Human
uuguuguacuua

SEQ ID NO: 3854728 - RNA, 20 nt, Human
uuguuguagauugauuguau

SEQ ID NO: 3854729 - RNA, 16 nt, Human
uuguuguccuuuucau

SEQ ID NO: 3854730 - RNA, 16 nt, Human
uuguugugaugucuuu

SEQ ID NO: 3854731 - RNA, 14 nt, Human
uuguugugcuuuua

SEQ ID NO: 3854732 - RNA, 11 nt, Human
uuguugugggu

SEQ ID NO: 3854733 - RNA, 15 nt, Human
uuguugugugugcag

SEQ ID NO: 3854734 - RNA, 14 nt, Human
uuguuguucuguua

SEQ ID NO: 3854735 - RNA, 14 nt, Human
uuguuguuucagug

SEQ ID NO: 3854736 - RNA, 21 nt, Human
uuguuguuucuuaauuuggaa

SEQ ID NO: 3854737 - RNA, 14 nt, Human
uuguuguuugccau

SEQ ID NO: 3854738 - RNA, 16 nt, Human
uuguuguuuuuaagau

SEQ ID NO: 3854739 - RNA, 14 nt, Human
uuguuuaaaaucau

SEQ ID NO: 3854740 - RNA, 18 nt, Human
uuguuuaaaaucauuucu

SEQ ID NO: 3854741 - RNA, 15 nt, Human
uuguuuacaugcuua

SEQ ID NO: 3854742 - RNA, 16 nt, Human
uuguuuacuuaaagau

SEQ ID NO: 3854743 - RNA, 15 nt, Human
uuguuuagaagaagu

SEQ ID NO: 3854744 - RNA, 19 nt, Human
uuguuuagauuuuguguuu

SEQ ID NO: 3854745 - RNA, 20 nt, Human
uuguuuagauuuuguguuua

SEQ ID NO: 3854746 - RNA, 19 nt, Human
uuguuuaucuagauguaaa

SEQ ID NO: 3854747 - RNA, 20 nt, Human
uuguuuauguaaauguuugu

SEQ ID NO: 3854748 - RNA, 23 nt, Human
uuguuuauugaauucauuucacu

SEQ ID NO: 3854749 - RNA, 15 nt, Human
uuguuuauugaguuu

SEQ ID NO: 3854750 - RNA, 24 nt, Human
uuguuuauugaguuuguagguaaa

SEQ ID NO: 3854751 - RNA, 20 nt, Human
uuguuuauuuaucagugaca

SEQ ID NO: 3854752 - RNA, 11 nt, Human
uuguuucagug

SEQ ID NO: 3854753 - RNA, 22 nt, Human
uuguuucagugaauaugccugu

SEQ ID NO: 3854754 - RNA, 22 nt, Human
uuguuuccccacaaaacaaagc

SEQ ID NO: 3854755 - RNA, 23 nt, Human
uuguuuccuccccuaucuguauu

SEQ ID NO: 3854756 - RNA, 21 nt, Human
uuguuuccucuuccaaaguaa

SEQ ID NO: 3854757 - RNA, 15 nt, Human
ucaauccccucauuc

SEQ ID NO: 3854758 - RNA, 15 nt, Human
ucaauccuaccuguu

SEQ ID NO: 3854759 - RNA, 14 nt, Human
ucaauccucuaagc

SEQ ID NO: 3854760 - RNA, 20 nt, Human
ucaauccugugugguuuagu

SEQ ID NO: 3854761 - RNA, 15 nt, Human
ucaauccuuguucag

SEQ ID NO: 3854762 - RNA, 18 nt, Human
ucaaucucaauccugcag

SEQ ID NO: 3854763 - RNA, 18 nt, Human
ucaaucucaauugcuuug

SEQ ID NO: 3854764 - RNA, 24 nt, Human
ucaaucucguauagaagucuucau

SEQ ID NO: 3854765 - RNA, 16 nt, Human
ucaaucucugauucug

SEQ ID NO: 3854766 - RNA, 17 nt, Human
ucaaucuucaauccuug

SEQ ID NO: 3854767 - RNA, 15 nt, Human
ucaaucuugcaugua

SEQ ID NO: 3854768 - RNA, 17 nt, Human
ucaaucuugcauguaac

SEQ ID NO: 3854769 - RNA, 17 nt, Human
ucaaugaacaagcauuc

SEQ ID NO: 3854770 - RNA, 15 nt, Human
ucaaugaagccagcu

SEQ ID NO: 3854771 - RNA, 21 nt, Human
ucaaugaagccagcucacagu

SEQ ID NO: 3854772 - RNA, 23 nt, Human
ucaaugaaugaaugaauggcuaa

SEQ ID NO: 3854773 - RNA, 19 nt, Human
ucaaugagagcauaauuua

SEQ ID NO: 3854774 - RNA, 12 nt, Human
ucaaugaucuag

SEQ ID NO: 3854775 - RNA, 13 nt, Human
ucaaugaucuagg

SEQ ID NO: 3854776 - RNA, 20 nt, Human
ucaaugcaagagugauugca

SEQ ID NO: 3854777 - RNA, 13 nt, Human
ucaaugcagcccc

SEQ ID NO: 3854778 - RNA, 15 nt, Human
ucaaugcaguugucu

SEQ ID NO: 3854779 - RNA, 22 nt, Human
ucaaugccccugaauuuaaaua

SEQ ID NO: 3854780 - RNA, 17 nt, Human
ucaaugcgcaaaaugca

SEQ ID NO: 3854781 - RNA, 12 nt, Human
ucaaugcucaua

SEQ ID NO: 3854782 - RNA, 18 nt, Human
ucaaugcuuuauuuguaa

SEQ ID NO: 3854783 - RNA, 23 nt, Human
ucaauggccuaaaacuggccuga

SEQ ID NO: 3854784 - RNA, 18 nt, Human
ucaauggcgcagugccuc

SEQ ID NO: 3854785 - RNA, 22 nt, Human
ucaauggcugcugaagcugccu

SEQ ID NO: 3854786 - RNA, 22 nt, Human
ucaaugggaaauacuacuccug

SEQ ID NO: 3854787 - RNA, 17 nt, Human
ucaaugggcucuuccaa

SEQ ID NO: 3854788 - RNA, 18 nt, Human
ucaaugguuugcaaggaa

SEQ ID NO: 3854789 - RNA, 19 nt, Human
ucaaugguuugcaaggaag

SEQ ID NO: 3854790 - RNA, 18 nt, Human
ucaaugugauucuaaugu

SEQ ID NO: 3854791 - RNA, 22 nt, Human
ucaaugugauucuaaugucuuc

SEQ ID NO: 3854792 - RNA, 13 nt, Human
ucaaugugcagug

SEQ ID NO: 3854793 - RNA, 16 nt, Human
ucaauguguauaaauu

SEQ ID NO: 3854794 - RNA, 17 nt, Human
ucaauguguauaaauug

SEQ ID NO: 3854795 - RNA, 16 nt, Human
ucaaugugucuuucua

SEQ ID NO: 3854796 - RNA, 12 nt, Human
ucaaugugugca

SEQ ID NO: 3854797 - RNA, 20 nt, Human
ucaauguucacgcaacuuga

SEQ ID NO: 3854798 - RNA, 21 nt, Human
ucaauguucacgcaacuugaa

SEQ ID NO: 3854799 - RNA, 22 nt, Human
ucaauguucacgcaacuugaaa

SEQ ID NO: 3854800 - RNA, 11 nt, Human
ucaauguucau

SEQ ID NO: 3854801 - RNA, 14 nt, Human
ucaauguucauugu

SEQ ID NO: 3854802 - RNA, 21 nt, Human
ucaauguuuaugcaaggaagg

SEQ ID NO: 3854803 - RNA, 18 nt, Human
ucaauguuucuucuaggu

SEQ ID NO: 3854804 - RNA, 18 nt, Human
ucaauguuuuuaaaaauc

SEQ ID NO: 3854805 - RNA, 11 nt, Human
ucaauuaaacg

SEQ ID NO: 3854806 - RNA, 16 nt, Human
ucaauuaaacggauua

SEQ ID NO: 3854807 - RNA, 17 nt, Human
ucaauuaaacggauuau

SEQ ID NO: 3854808 - RNA, 20 nt, Human
ucaauuaaacggauuauuuu

SEQ ID NO: 3854809 - RNA, 14 nt, Human
ucaauuaaauguag

SEQ ID NO: 3854810 - RNA, 18 nt, Human
ucaauuacaggaaguacu

SEQ ID NO: 3854811 - RNA, 19 nt, Human
ucaauuacaggaaguacug

SEQ ID NO: 3854812 - RNA, 14 nt, Human
ucaauuacauguuu

SEQ ID NO: 3854813 - RNA, 20 nt, Human
ucaauuagcguuuaagguga

SEQ ID NO: 3854814 - RNA, 22 nt, Human
ucaauuauacuacuucuaaggu

SEQ ID NO: 3854815 - RNA, 17 nt, Human
ucaauuauuucccccau

SEQ ID NO: 3854816 - RNA, 15 nt, Human
ucaauucaaaaaugu

SEQ ID NO: 3854817 - RNA, 17 nt, Human
ucaauucaaaaauguac

SEQ ID NO: 3854818 - RNA, 15 nt, Human
ucaauucaaagcugu

SEQ ID NO: 3854819 - RNA, 17 nt, Human
ucaauucaacacucccu

SEQ ID NO: 3854820 - RNA, 15 nt, Human
ucaauucaauuugga

SEQ ID NO: 3854821 - RNA, 16 nt, Human
ucaauucauauuuaug

SEQ ID NO: 3854822 - RNA, 15 nt, Human
ucaauuccaacaguu

SEQ ID NO: 3854823 - RNA, 18 nt, Human
ucaauuccaacaguuuaa

SEQ ID NO: 3854824 - RNA, 20 nt, Human
ucaauuccaacaguuuaaug

SEQ ID NO: 3854825 - RNA, 21 nt, Human
ucaauuccaacaguuuaauga

SEQ ID NO: 3854826 - RNA, 18 nt, Human
ucaauucccaccuaugag

SEQ ID NO: 3854827 - RNA, 22 nt, Human
ucaauucccccuggccaccacc

SEQ ID NO: 3854828 - RNA, 14 nt, Human
ucaauuccucuggg

SEQ ID NO: 3854829 - RNA, 15 nt, Human
ucaauuccucuggga

SEQ ID NO: 3854830 - RNA, 16 nt, Human
ucaauuccucugggaa

SEQ ID NO: 3854831 - RNA, 20 nt, Human
ucaauucuguagguuaaaaa

SEQ ID NO: 3854832 - RNA, 17 nt, Human
ucaauucuucccuaucu

SEQ ID NO: 3854833 - RNA, 14 nt, Human
ucaauugcuuugua

SEQ ID NO: 3854834 - RNA, 18 nt, Human
ucaauuguaaauugaauc

SEQ ID NO: 3854835 - RNA, 17 nt, Human
ucaauugucacuuuuua

SEQ ID NO: 3854836 - RNA, 16 nt, Human
ucaauugugaaaaaau

SEQ ID NO: 3854837 - RNA, 20 nt, Human
ucaauugugaaaaaauuuac

SEQ ID NO: 3854838 - RNA, 19 nt, Human
ucaauuuaaacccauuuua

SEQ ID NO: 3854839 - RNA, 23 nt, Human
ucaauuuaaacccauuuuaguca

SEQ ID NO: 3854840 - RNA, 14 nt, Human
ucaauuuaaguguu

SEQ ID NO: 3854841 - RNA, 13 nt, Human
ucaauuuaugaau

SEQ ID NO: 3854842 - RNA, 19 nt, Human
ucaauuucaauuuugucug

SEQ ID NO: 3854843 - RNA, 13 nt, Human
ucaauuuccaaga

SEQ ID NO: 3854844 - RNA, 14 nt, Human
ucaauuucucccca

SEQ ID NO: 3854845 - RNA, 15 nt, Human
ucaauuucuccccag

SEQ ID NO: 3854846 - RNA, 16 nt, Human
ucaauuuguauaaaau

SEQ ID NO: 3854847 - RNA, 21 nt, Human
ucaauuuguucagucuuucau

SEQ ID NO: 3854848 - RNA, 14 nt, Human
ucaauuuuuaggaa

SEQ ID NO: 3854849 - RNA, 23 nt, Human
ucaauuuuucuuauuucauuucu

SEQ ID NO: 3854850 - RNA, 16 nt, Human
ucacaaaaauuugaac

SEQ ID NO: 3854851 - RNA, 23 nt, Human
ucacaaaaauuugaacacuggcu

SEQ ID NO: 3854852 - RNA, 17 nt, Human
ucacaaaaccuggcaca

SEQ ID NO: 3854853 - RNA, 22 nt, Human
ucacaaaauuuuauuccuauau

SEQ ID NO: 3854854 - RNA, 18 nt, Human
ucacaaagaguucuggaa

SEQ ID NO: 3854855 - RNA, 12 nt, Human
ucacaaagccca

SEQ ID NO: 3854856 - RNA, 16 nt, Human
ucacaaagcccaaggg

SEQ ID NO: 3854857 - RNA, 17 nt, Human
ucacaaaguggaacgaa

SEQ ID NO: 3854858 - RNA, 11 nt, Human
ucacaaauaaa

SEQ ID NO: 3854859 - RNA, 21 nt, Human
ucacaaauauuaaaaagucuu

SEQ ID NO: 3854860 - RNA, 14 nt, Human
ucacaaaugacuuu

SEQ ID NO: 3854861 - RNA, 19 nt, Human
ucacaaaugacuuuauuau

SEQ ID NO: 3854862 - RNA, 23 nt, Human
ucacaaaugauauuaaaaauugg

SEQ ID NO: 3854863 - RNA, 15 nt, Human
ucacuccuaccuggu

SEQ ID NO: 3854864 - RNA, 18 nt, Human
ucacuccuaccugguaau

SEQ ID NO: 3854865 - RNA, 20 nt, Human
ucacuccugagaccccuggc

SEQ ID NO: 3854866 - RNA, 20 nt, Human
ucacuccuguuacuuaccua

SEQ ID NO: 3854867 - RNA, 15 nt, Human
ucacuccuuuuaaag

SEQ ID NO: 3854868 - RNA, 16 nt, Human
ucacuccuuuuaaaga

SEQ ID NO: 3854869 - RNA, 17 nt, Human
ucacuccuuuuaaagaa

SEQ ID NO: 3854870 - RNA, 18 nt, Human
ucacucgauaauaaagua

SEQ ID NO: 3854871 - RNA, 16 nt, Human
ucacucuaagauguua

SEQ ID NO: 3854872 - RNA, 20 nt, Human
ucacucuacuuagcaugucc

SEQ ID NO: 3854873 - RNA, 18 nt, Human
ucacucuagucaaugaca

SEQ ID NO: 3854874 - RNA, 11 nt, Human
ucacucucagg

SEQ ID NO: 3854875 - RNA, 18 nt, Human
ucacucuccauuuaauaa

SEQ ID NO: 3854876 - RNA, 15 nt, Human
ucacucugaguguuu

SEQ ID NO: 3854877 - RNA, 20 nt, Human
ucacucugaguguuuuauga

SEQ ID NO: 3854878 - RNA, 13 nt, Human
ucacucugccagg

SEQ ID NO: 3854879 - RNA, 20 nt, Human
ucacucugccagggcagugc

SEQ ID NO: 3854880 - RNA, 13 nt, Human
ucacucuggcagc

SEQ ID NO: 3854881 - RNA, 16 nt, Human
ucacucuggcagcuca

SEQ ID NO: 3854882 - RNA, 18 nt, Human
ucacucuggcagcucaga

SEQ ID NO: 3854883 - RNA, 19 nt, Human
ucacucuggcagcucagag

SEQ ID NO: 3854884 - RNA, 13 nt, Human
ucacucuggccuc

SEQ ID NO: 3854885 - RNA, 21 nt, Human
ucacucugggcacacucugcc

SEQ ID NO: 3854886 - RNA, 16 nt, Human
ucacucugucaucuuu

SEQ ID NO: 3854887 - RNA, 19 nt, Human
ucacucugugucugagugg

SEQ ID NO: 3854888 - RNA, 20 nt, Human
ucacucuuaugcuguaccca

SEQ ID NO: 3854889 - RNA, 13 nt, Human
ucacucuucucag

SEQ ID NO: 3854890 - RNA, 14 nt, Human
ucacucuucucagc

SEQ ID NO: 3854891 - RNA, 13 nt, Human
ucacucuuggagc

SEQ ID NO: 3854892 - RNA, 21 nt, Human
ucacucuuuauagugcacaaa

SEQ ID NO: 3854893 - RNA, 17 nt, Human
ucacugaaaacaucugg

SEQ ID NO: 3854894 - RNA, 20 nt, Human
ucacugaaaacaucuggaag

SEQ ID NO: 3854895 - RNA, 22 nt, Human
ucacugaaaauuggacagauug

SEQ ID NO: 3854896 - RNA, 14 nt, Human
ucacugaaacaugg

SEQ ID NO: 3854897 - RNA, 23 nt, Human
ucacugaaacuucaagcaccagg

SEQ ID NO: 3854898 - RNA, 14 nt, Human
ucacugaaauaaaa

SEQ ID NO: 3854899 - RNA, 23 nt, Human
ucacugaaauaaaagcuauauaa

SEQ ID NO: 3854900 - RNA, 21 nt, Human
ucacugaacuuugcugagccu

SEQ ID NO: 3854901 - RNA, 14 nt, Human
ucacugacacaaag

SEQ ID NO: 3854902 - RNA, 15 nt, Human
ucacugagacagccc

SEQ ID NO: 3854903 - RNA, 17 nt, Human
ucacugagacagcccgg

SEQ ID NO: 3854904 - RNA, 21 nt, Human
ucacugagacagcccgggcuc

SEQ ID NO: 3854905 - RNA, 18 nt, Human
ucacugagaccaaggcuu

SEQ ID NO: 3854906 - RNA, 14 nt, Human
ucacugagcacugu

SEQ ID NO: 3854907 - RNA, 18 nt, Human
ucacugagcacuguuuuc

SEQ ID NO: 3854908 - RNA, 22 nt, Human
ucacugagcacuguuuucuagu

SEQ ID NO: 3854909 - RNA, 17 nt, Human
ucacugaguuuuccaug

SEQ ID NO: 3854910 - RNA, 17 nt, Human
ucacugauguacaauua

SEQ ID NO: 3854911 - RNA, 21 nt, Human
ucacugauguacaauuaaaaa

SEQ ID NO: 3854912 - RNA, 17 nt, Human
ucacugcaacaugauga

SEQ ID NO: 3854913 - RNA, 14 nt, Human
ucacugcaaccucc

SEQ ID NO: 3854914 - RNA, 18 nt, Human
ucacugcaaccucuaccu

SEQ ID NO: 3854915 - RNA, 19 nt, Human
ucacugcaaccucugccuc

SEQ ID NO: 3854916 - RNA, 20 nt, Human
ucacugcacagugcaucuca

SEQ ID NO: 3854917 - RNA, 22 nt, Human
ucacugcacagugcaucucagc

SEQ ID NO: 3854918 - RNA, 12 nt, Human
ucacugcagccu

SEQ ID NO: 3854919 - RNA, 13 nt, Human
ucacugcagccuc

SEQ ID NO: 3854920 - RNA, 14 nt, Human
ucacugcagccucc

SEQ ID NO: 3854921 - RNA, 22 nt, Human
ucacugcagccuccgcuucccu

SEQ ID NO: 3854922 - RNA, 23 nt, Human
ucacugcagccuccgcuucccug

SEQ ID NO: 3854923 - RNA, 14 nt, Human
ucacugcagccucg

SEQ ID NO: 3854924 - RNA, 19 nt, Human
ucacugcauccuccgccuc

SEQ ID NO: 3854925 - RNA, 18 nt, Human
ucacugcauuauucucuu

SEQ ID NO: 3854926 - RNA, 15 nt, Human
ucacugccacacucu

SEQ ID NO: 3854927 - RNA, 20 nt, Human
ucacugccacuuugcacauu

SEQ ID NO: 3854928 - RNA, 15 nt, Human
ucacugccaggccag

SEQ ID NO: 3854929 - RNA, 19 nt, Human
ucacugccaggccagccuc

SEQ ID NO: 3854930 - RNA, 18 nt, Human
ucacugcccgcacacccu

SEQ ID NO: 3854931 - RNA, 13 nt, Human
ucacugccucccc

SEQ ID NO: 3854932 - RNA, 14 nt, Human
ucacugccugcaga

SEQ ID NO: 3854933 - RNA, 15 nt, Human
ucacugccugcagag

SEQ ID NO: 3854934 - RNA, 14 nt, Human
ucacugcucccuga

SEQ ID NO: 3854935 - RNA, 18 nt, Human
ucacugcucccugaagcc

SEQ ID NO: 3854936 - RNA, 13 nt, Human
ucacugcuggcug

SEQ ID NO: 3854937 - RNA, 14 nt, Human
ucacugcuggcugc

SEQ ID NO: 3854938 - RNA, 18 nt, Human
ucacugcuggcugccuua

SEQ ID NO: 3854939 - RNA, 22 nt, Human
ucacugcuggcugccuuagaac

SEQ ID NO: 3854940 - RNA, 17 nt, Human
ucacugcuuaacuucac

SEQ ID NO: 3854941 - RNA, 17 nt, Human
ucacugcuuuuggccug

SEQ ID NO: 3854942 - RNA, 18 nt, Human
ucacugcuuuuggccugg

SEQ ID NO: 3854943 - RNA, 19 nt, Human
ucacugcuuuuggccugga

SEQ ID NO: 3854944 - RNA, 17 nt, Human
ucacuggaaaggggaga

SEQ ID NO: 3854945 - RNA, 14 nt, Human
ucacuggagcacaa

SEQ ID NO: 3854946 - RNA, 17 nt, Human
ucacuggagcaccaggc

SEQ ID NO: 3854947 - RNA, 14 nt, Human
ucacuggagcccag

SEQ ID NO: 3854948 - RNA, 11 nt, Human
ucacuggcucu

SEQ ID NO: 3854949 - RNA, 15 nt, Human
ucacuggcucuccaa

SEQ ID NO: 3854950 - RNA, 20 nt, Human
ucacuggcucuccaagugcc

SEQ ID NO: 3854951 - RNA, 18 nt, Human
ucacuggcucuccuggcc

SEQ ID NO: 3854952 - RNA, 15 nt, Human
ucacuggcugccucc

SEQ ID NO: 3854953 - RNA, 18 nt, Human
ucacuggcugccuccacu

SEQ ID NO: 3854954 - RNA, 21 nt, Human
ucacuggcugccuccacuccc

SEQ ID NO: 3854955 - RNA, 21 nt, Human
ucucacggccacacagcugcc

SEQ ID NO: 3854956 - RNA, 20 nt, Human
ucucacgggcaguagcugug

SEQ ID NO: 3854957 - RNA, 13 nt, Human
ucucacuaaacuu

SEQ ID NO: 3854958 - RNA, 16 nt, Human
ucucacuauaccagua

SEQ ID NO: 3854959 - RNA, 16 nt, Human
ucucacuauguugccc

SEQ ID NO: 3854960 - RNA, 17 nt, Human
ucucacuauguugccca

SEQ ID NO: 3854961 - RNA, 21 nt, Human
ucucacuauguugcccaggca

SEQ ID NO: 3854962 - RNA, 23 nt, Human
ucucacuauguugcccaggcagg

SEQ ID NO: 3854963 - RNA, 12 nt, Human
ucucacuccacc

SEQ ID NO: 3854964 - RNA, 13 nt, Human
ucucacuccacca

SEQ ID NO: 3854965 - RNA, 15 nt, Human
ucucacuccaccacc

SEQ ID NO: 3854966 - RNA, 18 nt, Human
ucucacuccaccacccaa

SEQ ID NO: 3854967 - RNA, 12 nt, Human
ucucacucccca

SEQ ID NO: 3854968 - RNA, 13 nt, Human
ucucacuccccau

SEQ ID NO: 3854969 - RNA, 15 nt, Human
ucucacuccccaugc

SEQ ID NO: 3854970 - RNA, 17 nt, Human
ucucacucccuucuccu

SEQ ID NO: 3854971 - RNA, 16 nt, Human
ucucacuccuaccugg

SEQ ID NO: 3854972 - RNA, 17 nt, Human
ucucacuccuaccuggu

SEQ ID NO: 3854973 - RNA, 20 nt, Human
ucucacuccuuuuggugugu

SEQ ID NO: 3854974 - RNA, 23 nt, Human
ucucacuccuuuugguguguugg

SEQ ID NO: 3854975 - RNA, 22 nt, Human
ucucacucugucgcccagucug

SEQ ID NO: 3854976 - RNA, 14 nt, Human
ucucacugcuugaa

SEQ ID NO: 3854977 - RNA, 17 nt, Human
ucucacuguguacauaa

SEQ ID NO: 3854978 - RNA, 17 nt, Human
ucucacuguucccucug

SEQ ID NO: 3854979 - RNA, 21 nt, Human
ucucacuguucccucugcucc

SEQ ID NO: 3854980 - RNA, 14 nt, Human
ucucacuguugccc

SEQ ID NO: 3854981 - RNA, 15 nt, Human
ucucacuguugccca

SEQ ID NO: 3854982 - RNA, 19 nt, Human
ucucacuguugcccaggcu

SEQ ID NO: 3854983 - RNA, 20 nt, Human
ucucacuguugcccaggcug

SEQ ID NO: 3854984 - RNA, 19 nt, Human
uccuuccaaaaauuauuau

SEQ ID NO: 3854985 - RNA, 19 nt, Human
uccuuccaaagaauucuua

SEQ ID NO: 3854986 - RNA, 20 nt, Human
uccuuccaacugcugcccca

SEQ ID NO: 3854987 - RNA, 12 nt, Human
uccuuccaccuc

SEQ ID NO: 3854988 - RNA, 16 nt, Human
uccuuccagcuaguga

SEQ ID NO: 3854989 - RNA, 18 nt, Human
uccuuccaguauaaccag

SEQ ID NO: 3854990 - RNA, 15 nt, Human
uccuuccaucaaaua

SEQ ID NO: 3854991 - RNA, 18 nt, Human
uccuucccaaaggacucc

SEQ ID NO: 3854992 - RNA, 14 nt, Human
uccuucccacucuu

SEQ ID NO: 3854993 - RNA, 18 nt, Human
uccuucccagcugccccu

SEQ ID NO: 3854994 - RNA, 12 nt, Human
uccuucccucuc

SEQ ID NO: 3854995 - RNA, 14 nt, Human
uccuucccucucug

SEQ ID NO: 3854996 - RNA, 12 nt, Human
uccuucccuggg

SEQ ID NO: 3854997 - RNA, 19 nt, Human
uccuucccugugccuccuc

SEQ ID NO: 3854998 - RNA, 15 nt, Human
uccuucccuucucca

SEQ ID NO: 3854999 - RNA, 17 nt, Human
uccuucccuuuucuguu

SEQ ID NO: 3855000 - RNA, 16 nt, Human
uccuuccgcuuggagc

SEQ ID NO: 3855001 - RNA, 23 nt, Human
uccuuccuacacccuuggacuug

SEQ ID NO: 3855002 - RNA, 21 nt, Human
uccuuccucacaccaggcuug

SEQ ID NO: 3855003 - RNA, 10 nt, Human
uccuuccugc

SEQ ID NO: 3855004 - RNA, 15 nt, Human
uccuuccuggccuga

SEQ ID NO: 3855005 - RNA, 18 nt, Human
uccuucuaguuucccaca

SEQ ID NO: 3855006 - RNA, 15 nt, Human
uccuucuauucuagc

SEQ ID NO: 3855007 - RNA, 13 nt, Human
uccuucuccuccu

SEQ ID NO: 3855008 - RNA, 20 nt, Human
uccuucucucaccuccuaaa

SEQ ID NO: 3855009 - RNA, 15 nt, Human
uccuucucugaacac

SEQ ID NO: 3855010 - RNA, 18 nt, Human
uccuucucugaacacagg

SEQ ID NO: 3855011 - RNA, 24 nt, Human
uccuucugagcccgguaagagcaa

SEQ ID NO: 3855012 - RNA, 16 nt, Human
uccuucugagcuccug

SEQ ID NO: 3855013 - RNA, 18 nt, Human
uccuucugagcuccuguc

SEQ ID NO: 3855014 - RNA, 15 nt, Human
uccuucugccuuuuu

SEQ ID NO: 3855015 - RNA, 21 nt, Human
uccuucuggcagauucaaauc

SEQ ID NO: 3855016 - RNA, 20 nt, Human
uccuucuggccuuuccucuc

SEQ ID NO: 3855017 - RNA, 19 nt, Human
uccuucuguccuacucugu

SEQ ID NO: 3855018 - RNA, 17 nt, Human
uccuucuugccuucaga

SEQ ID NO: 3855019 - RNA, 13 nt, Human
uccuucuuugaua

SEQ ID NO: 3855020 - RNA, 19 nt, Human
uccuucuuugauaauguua

SEQ ID NO: 3855021 - RNA, 13 nt, Human
uccuucuuugccc

SEQ ID NO: 3855022 - RNA, 15 nt, Human
uccuucuuugggaua

SEQ ID NO: 3855023 - RNA, 20 nt, Human
uccuugaagaacugcaggcc

SEQ ID NO: 3855024 - RNA, 12 nt, Human
uccuugaagccg

SEQ ID NO: 3855025 - RNA, 13 nt, Human
uccuugaagguau

SEQ ID NO: 3855026 - RNA, 19 nt, Human
uccuugaauaucuuucgau

SEQ ID NO: 3855027 - RNA, 20 nt, Human
uccuugaccugcauuguaaa

SEQ ID NO: 3855028 - RNA, 14 nt, Human
uccuugaccuuccu

SEQ ID NO: 3855029 - RNA, 23 nt, Human
uccuugagacacggagcccagcc

SEQ ID NO: 3855030 - RNA, 16 nt, Human
uccuugagagaccagg

SEQ ID NO: 3855031 - RNA, 16 nt, Human
uccuugagugcucuug

SEQ ID NO: 3855032 - RNA, 13 nt, Human
uccuugauaacag

SEQ ID NO: 3855033 - RNA, 16 nt, Human
uccuugaucuguauau

SEQ ID NO: 3855034 - RNA, 22 nt, Human
uccuugauuuaucacacaaagc

SEQ ID NO: 3855035 - RNA, 21 nt, Human
uccuugcaagguuaagcaagg

SEQ ID NO: 3855036 - RNA, 14 nt, Human
uccuugcaccccuc

SEQ ID NO: 3855037 - RNA, 15 nt, Human
uccuugcaccccuca

SEQ ID NO: 3855038 - RNA, 22 nt, Human
uccuugcaccccucacucuggc

SEQ ID NO: 3855039 - RNA, 22 nt, Human
uccuugcaucaaggggucacuu

SEQ ID NO: 3855040 - RNA, 17 nt, Human
uccuugcaucaauuuuu

SEQ ID NO: 3855041 - RNA, 16 nt, Human
uccuugccuccugugu

SEQ ID NO: 3855042 - RNA, 17 nt, Human
uccuugcuccuggccuu

SEQ ID NO: 3855043 - RNA, 14 nt, Human
uccuugcucugcac

SEQ ID NO: 3855044 - RNA, 19 nt, Human
uccuugcuguccuaggcca

SEQ ID NO: 3855045 - RNA, 17 nt, Human
uccuugcuuccugucuu

SEQ ID NO: 3855046 - RNA, 15 nt, Human
uccuugcuuguuaca

SEQ ID NO: 3855047 - RNA, 20 nt, Human
uccuuggaaaucaaauguaa

SEQ ID NO: 3855048 - RNA, 16 nt, Human
uccuuggaaguuucau

SEQ ID NO: 3855049 - RNA, 16 nt, Human
uccuuggacucauuuu

SEQ ID NO: 3855050 - RNA, 19 nt, Human
uccuuggagaaaugaaaac

SEQ ID NO: 3855051 - RNA, 21 nt, Human
uccuuggcaggcugauuucua

SEQ ID NO: 3855052 - RNA, 10 nt, Human
uccuuggccu

SEQ ID NO: 3855053 - RNA, 23 nt, Human
uccuuggccuagcccacccugcu

SEQ ID NO: 3855054 - RNA, 14 nt, Human
uccuugggaggaag

SEQ ID NO: 3855055 - RNA, 20 nt, Human
uccuugggaggaagcagaau

SEQ ID NO: 3855056 - RNA, 20 nt, Human
uccuugggaggccccacugg

SEQ ID NO: 3855057 - RNA, 13 nt, Human
uccuugggcacuu

SEQ ID NO: 3855058 - RNA, 14 nt, Human
ucccugggccugcu

SEQ ID NO: 3855059 - RNA, 15 nt, Human
ucccugggccugcug

SEQ ID NO: 3855060 - RNA, 17 nt, Human
ucccugggccugcugcu

SEQ ID NO: 3855061 - RNA, 20 nt, Human
ucccugggccugcugcugag

SEQ ID NO: 3855062 - RNA, 15 nt, Human
ucccugggcugugcu

SEQ ID NO: 3855063 - RNA, 20 nt, Human
ucccugggggaagcccugga

SEQ ID NO: 3855064 - RNA, 14 nt, Human
ucccuggggugggg

SEQ ID NO: 3855065 - RNA, 17 nt, Human
ucccugguaagaaaaag

SEQ ID NO: 3855066 - RNA, 19 nt, Human
ucccuggugagagggccgg

SEQ ID NO: 3855067 - RNA, 18 nt, Human
ucccugguggcagcucac

SEQ ID NO: 3855068 - RNA, 21 nt, Human
ucccugguggcagcucaccuc

SEQ ID NO: 3855069 - RNA, 22 nt, Human
ucccugguggcagcucaccucu

SEQ ID NO: 3855070 - RNA, 18 nt, Human
ucccugguucaagcgauu

SEQ ID NO: 3855071 - RNA, 12 nt, Human
ucccugguucug

SEQ ID NO: 3855072 - RNA, 15 nt, Human
ucccuguaacuugau

SEQ ID NO: 3855073 - RNA, 22 nt, Human
ucccugucaccaagcucacagu

SEQ ID NO: 3855074 - RNA, 15 nt, Human
ucccugucaccucuu

SEQ ID NO: 3855075 - RNA, 12 nt, Human
ucccuguccacc

SEQ ID NO: 3855076 - RNA, 13 nt, Human
ucccuguccaccc

SEQ ID NO: 3855077 - RNA, 14 nt, Human
ucccugucccucua

SEQ ID NO: 3855078 - RNA, 12 nt, Human
ucccuguccucc

SEQ ID NO: 3855079 - RNA, 14 nt, Human
ucccuguccuccuc

SEQ ID NO: 3855080 - RNA, 15 nt, Human
ucccuguccuccucg

SEQ ID NO: 3855081 - RNA, 17 nt, Human
ucccugucuuuccuaag

SEQ ID NO: 3855082 - RNA, 16 nt, Human
ucccugugccuccucc

SEQ ID NO: 3855083 - RNA, 19 nt, Human
ucccugugccuccucccuc

SEQ ID NO: 3855084 - RNA, 16 nt, Human
ucccugugucauuuca

SEQ ID NO: 3855085 - RNA, 20 nt, Human
ucccuguguccaccuguggg

SEQ ID NO: 3855086 - RNA, 22 nt, Human
ucccuguguccaccugugggug

SEQ ID NO: 3855087 - RNA, 15 nt, Human
ucccuguuauuuuca

SEQ ID NO: 3855088 - RNA, 21 nt, Human
ucccuguuauuuucaaguagc

SEQ ID NO: 3855089 - RNA, 23 nt, Human
ucccuguuauuuucaaguagcug

SEQ ID NO: 3855090 - RNA, 15 nt, Human
ucccuguucuuccuc

SEQ ID NO: 3855091 - RNA, 21 nt, Human
ucccuguugacgaagucucuu

SEQ ID NO: 3855092 - RNA, 18 nt, Human
ucccuguuggucgguggg

SEQ ID NO: 3855093 - RNA, 14 nt, Human
ucccuguuuaauau

SEQ ID NO: 3855094 - RNA, 15 nt, Human
ucccuguuuaauauu

SEQ ID NO: 3855095 - RNA, 21 nt, Human
ucccuguuuaauauuuaaaca

SEQ ID NO: 3855096 - RNA, 19 nt, Human
ucccuguuugaagccugcc

SEQ ID NO: 3855097 - RNA, 20 nt, Human
ucccuguuugaagccugccc

SEQ ID NO: 3855098 - RNA, 11 nt, Human
ucccuguuuuc

SEQ ID NO: 3855099 - RNA, 19 nt, Human
ucccuguuuuccccccaag

SEQ ID NO: 3855100 - RNA, 15 nt, Human
ucccuguuuucugag

SEQ ID NO: 3855101 - RNA, 18 nt, Human
ucccuuaagaaugaguuu

SEQ ID NO: 3855102 - RNA, 22 nt, Human
ucccuuaagaaugaguuucuua

SEQ ID NO: 3855103 - RNA, 20 nt, Human
ucccuuaagggguaucaugu

SEQ ID NO: 3855104 - RNA, 10 nt, Human
ucccuuaccc

SEQ ID NO: 3855105 - RNA, 22 nt, Human
ucccuuacgugaguccuggcau

SEQ ID NO: 3855106 - RNA, 21 nt, Human
ucccuucaaccauuccccaug

SEQ ID NO: 3855107 - RNA, 14 nt, Human
ucccuucagccccc

SEQ ID NO: 3855108 - RNA, 21 nt, Human
ucccuucaguacccucucagc

SEQ ID NO: 3855109 - RNA, 23 nt, Human
ucccuucaguacccucucagcuc

SEQ ID NO: 3855110 - RNA, 17 nt, Human
ucccuucaugcauggaa

SEQ ID NO: 3855111 - RNA, 18 nt, Human
ucccuucaugcauggaaa

SEQ ID NO: 3855112 - RNA, 16 nt, Human
ucccuuccacaccccc

SEQ ID NO: 3855113 - RNA, 20 nt, Human
ucccuuccaccugcucugcu

SEQ ID NO: 3855114 - RNA, 20 nt, Human
ucccuuccacugccucugcc

SEQ ID NO: 3855115 - RNA, 22 nt, Human
ucccuuccagauggucauccag

SEQ ID NO: 3855116 - RNA, 22 nt, Human
ucccuuccaguuuauuccagag

SEQ ID NO: 3855117 - RNA, 17 nt, Human
ucccuucccaccucucu

SEQ ID NO: 3855118 - RNA, 21 nt, Human
ucccuucccacuggaggcaug

SEQ ID NO: 3855119 - RNA, 22 nt, Human
ucccuucccaugacccaggcug

SEQ ID NO: 3855120 - RNA, 17 nt, Human
ucccuucccccauaagc

SEQ ID NO: 3855121 - RNA, 12 nt, Human
ucccuuccccuc

SEQ ID NO: 3855122 - RNA, 20 nt, Human
ucccuucccuaaagugaugg

SEQ ID NO: 3855123 - RNA, 13 nt, Human
ucccuucccuccu

SEQ ID NO: 3855124 - RNA, 16 nt, Human
ucccuucccuccuccc

SEQ ID NO: 3855125 - RNA, 17 nt, Human
ucccuucccuuccacug

SEQ ID NO: 3855126 - RNA, 21 nt, Human
ucccuuccgacccucugggaa

SEQ ID NO: 3855127 - RNA, 14 nt, Human
ucccuuccuauucc

SEQ ID NO: 3855128 - RNA, 12 nt, Human
ucccuuccucuu

SEQ ID NO: 3855129 - RNA, 15 nt, Human
ucccuuccugccagc

SEQ ID NO: 3855130 - RNA, 16 nt, Human
ucccuuccuuccucuc

SEQ ID NO: 3855131 - RNA, 19 nt, Human
ucccuuccuuccucuccug

SEQ ID NO: 3855132 - RNA, 19 nt, Human
ucccuuccuuuucccugcu

SEQ ID NO: 3855133 - RNA, 16 nt, Human
ucccuucucacagcac

SEQ ID NO: 3855134 - RNA, 13 nt, Human
ucccuucuccuuc

SEQ ID NO: 3855135 - RNA, 14 nt, Human
ucccuucucuucca

SEQ ID NO: 3855136 - RNA, 15 nt, Human
ucccuucugcuacug

SEQ ID NO: 3855137 - RNA, 20 nt, Human
ucccuucugcuacuggcaaa

SEQ ID NO: 3855138 - RNA, 16 nt, Human
ucccuucuucugucau

SEQ ID NO: 3855139 - RNA, 23 nt, Human
ucccuucuugcauccuuccuaua

SEQ ID NO: 3855140 - RNA, 13 nt, Human
ucccuucuugguu

SEQ ID NO: 3855141 - RNA, 17 nt, Human
ucccuucuuuuucuucu

SEQ ID NO: 3855142 - RNA, 21 nt, Human
ucccuugaccaggccugggcc

SEQ ID NO: 3855143 - RNA, 22 nt, Human
ucccuugaugcacagagaagcu

SEQ ID NO: 3855144 - RNA, 21 nt, Human
ucccuugccauccuaaaagcc

SEQ ID NO: 3855145 - RNA, 15 nt, Human
ucccuugcuggcccc

SEQ ID NO: 3855146 - RNA, 17 nt, Human
ucccuugcuggccccag

SEQ ID NO: 3855147 - RNA, 23 nt, Human
ucccuugcuggccccagcccugc

SEQ ID NO: 3855148 - RNA, 23 nt, Human
ucccuugcuugccugcagggcca

SEQ ID NO: 3855149 - RNA, 21 nt, Human
ucccuugcuuuucccucuuuu

SEQ ID NO: 3855150 - RNA, 22 nt, Human
ucccuugcuuuucccucuuuuc

SEQ ID NO: 3855151 - RNA, 19 nt, Human
ucccuuggaaaccugcccu

SEQ ID NO: 3855152 - RNA, 23 nt, Human
ucccuuggaaaccugcccugccu

SEQ ID NO: 3855153 - RNA, 15 nt, Human
ucccuuggacauuuu

SEQ ID NO: 3855154 - RNA, 19 nt, Human
ucccuuggacauuuuaugu

SEQ ID NO: 3855155 - RNA, 21 nt, Human
ucccuuggacauuuuaugucu

SEQ ID NO: 3855156 - RNA, 19 nt, Human
ucccuuggauuguccccga

SEQ ID NO: 3855157 - RNA, 12 nt, Human
ucccuuggccuc

SEQ ID NO: 3855158 - RNA, 13 nt, Human
ucccuuggccuca

SEQ ID NO: 3855159 - RNA, 16 nt, Human
ucccuuggccucagaa

SEQ ID NO: 3855160 - RNA, 14 nt, Human
ucccuugggcuccc

SEQ ID NO: 3855161 - RNA, 16 nt, Human
ucccuuguagcuccuc

SEQ ID NO: 3855162 - RNA, 16 nt, Human
ucccuuguggcccucu

SEQ ID NO: 3855163 - RNA, 13 nt, Human
ucccuuguucucu

SEQ ID NO: 3855164 - RNA, 15 nt, Human
ucccuuuccccagca

SEQ ID NO: 3855165 - RNA, 17 nt, Human
ucccuuuccuuccaucc

SEQ ID NO: 3855166 - RNA, 19 nt, Human
ucccuuuccuuccaucccu

SEQ ID NO: 3855167 - RNA, 16 nt, Human
ucccuuuccuuccuaa

SEQ ID NO: 3855168 - RNA, 17 nt, Human
ucccuuuccuuccuaau

SEQ ID NO: 3855169 - RNA, 15 nt, Human
ucccuuucuccccug

SEQ ID NO: 3855170 - RNA, 17 nt, Human
ucccuuucuccccugcc

SEQ ID NO: 3855171 - RNA, 13 nt, Human
ucccuuucuuggc

SEQ ID NO: 3855172 - RNA, 17 nt, Human
ucccuuucuuggccagu

SEQ ID NO: 3855173 - RNA, 19 nt, Human
ucccuuugacgccauccca

SEQ ID NO: 3855174 - RNA, 21 nt, Human
ucccuuugacgccaucccagc

SEQ ID NO: 3855175 - RNA, 17 nt, Human
ucccuuugcccagaaag

SEQ ID NO: 3855176 - RNA, 12 nt, Human
ucccuuugcucc

SEQ ID NO: 3855177 - RNA, 14 nt, Human
ucccuuugcuccac

SEQ ID NO: 3855178 - RNA, 20 nt, Human
ucccuuugcuccaccccacu

SEQ ID NO: 3855179 - RNA, 22 nt, Human
ucccuuugcuccaccccacuca

SEQ ID NO: 3855180 - RNA, 18 nt, Human
ucccuuugucuuucaaac

SEQ ID NO: 3855181 - RNA, 18 nt, Human
ucccuuuuaaacacauuu

SEQ ID NO: 3855182 - RNA, 13 nt, Human
ucccuuuuacaua

SEQ ID NO: 3855183 - RNA, 19 nt, Human
ucccuuuuacauacugcug

SEQ ID NO: 3855184 - RNA, 20 nt, Human
ucccuuuuacauacugcugu

SEQ ID NO: 3855185 - RNA, 13 nt, Human
ucccuuuucuguu

SEQ ID NO: 3855186 - RNA, 15 nt, Human
ucccuuuugcaucau

SEQ ID NO: 3855187 - RNA, 20 nt, Human
ucccuuuuucauaaauuauu

SEQ ID NO: 3855188 - RNA, 14 nt, Human
ucccuuuuuccuug

SEQ ID NO: 3855189 - RNA, 15 nt, Human
ucccuuuuuccuugu

SEQ ID NO: 3855190 - RNA, 21 nt, Human
ucccuuuuuccuuguccccac

SEQ ID NO: 3855191 - RNA, 22 nt, Human
ucccuuuuuuggcugcugaagg

SEQ ID NO: 3855192 - RNA, 14 nt, Human
uccgaaaucagcag

SEQ ID NO: 3855193 - RNA, 20 nt, Human
uccgaaaugcugucuuucuu

SEQ ID NO: 3855194 - RNA, 16 nt, Human
uccgaaccuccucugu

SEQ ID NO: 3855195 - RNA, 20 nt, Human
uccgaccacuaauugccaag

SEQ ID NO: 3855196 - RNA, 18 nt, Human
uccgaccacuuccagggg

SEQ ID NO: 3855197 - RNA, 13 nt, Human
uccgaccagacac

SEQ ID NO: 3855198 - RNA, 15 nt, Human
uccgacccucuggga

SEQ ID NO: 3855199 - RNA, 17 nt, Human
uccgacccucugggaac

SEQ ID NO: 3855200 - RNA, 21 nt, Human
uccgacccucugggaaccucc

SEQ ID NO: 3855201 - RNA, 21 nt, Human
ucuaaacguaagcacuguuuu

SEQ ID NO: 3855202 - RNA, 13 nt, Human
ucuaaacugcccc

SEQ ID NO: 3855203 - RNA, 19 nt, Human
ucuaaacuggagacugugu

SEQ ID NO: 3855204 - RNA, 13 nt, Human
ucuaaagaccaaa

SEQ ID NO: 3855205 - RNA, 18 nt, Human
ucuaaagaccaaacuuca

SEQ ID NO: 3855206 - RNA, 12 nt, Human
ucuaaagagcac

SEQ ID NO: 3855207 - RNA, 12 nt, Human
ucuaaagagcau

SEQ ID NO: 3855208 - RNA, 14 nt, Human
ucuaaagagcaucu

SEQ ID NO: 3855209 - RNA, 21 nt, Human
ucuaaagauggaguuucuaag

SEQ ID NO: 3855210 - RNA, 13 nt, Human
ucuaaagcugcca

SEQ ID NO: 3855211 - RNA, 15 nt, Human
ucuaaagcugccagc

SEQ ID NO: 3855212 - RNA, 17 nt, Human
ucuaaaggaguuuaugu

SEQ ID NO: 3855213 - RNA, 17 nt, Human
ucuaaaggcuaccuuug

SEQ ID NO: 3855214 - RNA, 18 nt, Human
ucuaaaggcuaccuuugu

SEQ ID NO: 3855215 - RNA, 17 nt, Human
ucuaaagguccacaggu

SEQ ID NO: 3855216 - RNA, 23 nt, Human
ucuaaagguccacaggucuagac

SEQ ID NO: 3855217 - RNA, 18 nt, Human
ucuaaagguggugaggca

SEQ ID NO: 3855218 - RNA, 17 nt, Human
ucuaaaguaauugguua

SEQ ID NO: 3855219 - RNA, 12 nt, Human
ucuaaaguuaua

SEQ ID NO: 3855220 - RNA, 15 nt, Human
ucuaaaguucuaaga

SEQ ID NO: 3855221 - RNA, 16 nt, Human
ucuaaaguucuaagau

SEQ ID NO: 3855222 - RNA, 19 nt, Human
ucuaaaguucuaagauucu

SEQ ID NO: 3855223 - RNA, 21 nt, Human
ucuaaaguucuaagauucuga

SEQ ID NO: 3855224 - RNA, 13 nt, Human
ucuaaaguuuaca

SEQ ID NO: 3855225 - RNA, 15 nt, Human
ucuaaauaaaauaua

SEQ ID NO: 3855226 - RNA, 13 nt, Human
ucuaaauagccaa

SEQ ID NO: 3855227 - RNA, 21 nt, Human
ucuaaauagccaacacccauc

SEQ ID NO: 3855228 - RNA, 20 nt, Human
ucuaaauaucccuuggacau

SEQ ID NO: 3855229 - RNA, 17 nt, Human
ucuaaauauucagaauc

SEQ ID NO: 3855230 - RNA, 13 nt, Human
ucuaaauauuucc

SEQ ID NO: 3855231 - RNA, 17 nt, Human
ucuaaaucauauauaau

SEQ ID NO: 3855232 - RNA, 16 nt, Human
ucuaaaucuauuuauu

SEQ ID NO: 3855233 - RNA, 22 nt, Human
ucuaaaucuccaaaauaaaacu

SEQ ID NO: 3855234 - RNA, 23 nt, Human
ucuaaaugggaaaguauucugua

SEQ ID NO: 3855235 - RNA, 21 nt, Human
ucuaaauguuuggcauguaaa

SEQ ID NO: 3855236 - RNA, 20 nt, Human
ucuaaauuaaagccuuuagu

SEQ ID NO: 3855237 - RNA, 20 nt, Human
ucuaaauucuuuauuucugu

SEQ ID NO: 3855238 - RNA, 14 nt, Human
ucuaaauugaauaa

SEQ ID NO: 3855239 - RNA, 22 nt, Human
ucuaaauuugaauguuaagcag

SEQ ID NO: 3855240 - RNA, 12 nt, Human
ucuaacaaguca

SEQ ID NO: 3855241 - RNA, 23 nt, Human
ucuaacaagucauagguuaauau

SEQ ID NO: 3855242 - RNA, 12 nt, Human
ucuaacagcccu

SEQ ID NO: 3855243 - RNA, 21 nt, Human
ucuaacagcccuccucugcac

SEQ ID NO: 3855244 - RNA, 17 nt, Human
ucuaacagcucaggauc

SEQ ID NO: 3855245 - RNA, 19 nt, Human
ucuaacagcucaggaucuc

SEQ ID NO: 3855246 - RNA, 16 nt, Human
ucuaacaggggcuggu

SEQ ID NO: 3855247 - RNA, 15 nt, Human
ucuaaccaaaugcau

SEQ ID NO: 3855248 - RNA, 17 nt, Human
ucuaaccacagcuccuu

SEQ ID NO: 3855249 - RNA, 18 nt, Human
ucuaaccagagcaagcuu

SEQ ID NO: 3855250 - RNA, 14 nt, Human
ucuaacccucccau

SEQ ID NO: 3855251 - RNA, 20 nt, Human
ucuaaccuugaaugcugcca

SEQ ID NO: 3855252 - RNA, 21 nt, Human
ucuaaccuugaaugcugccag

SEQ ID NO: 3855253 - RNA, 22 nt, Human
ucuaaccuuuacaugaggacuc

SEQ ID NO: 3855254 - RNA, 15 nt, Human
ucuaacgccugagcc

SEQ ID NO: 3855255 - RNA, 17 nt, Human
ucuaacuacaaagguuu

SEQ ID NO: 3855256 - RNA, 19 nt, Human
ucuaacuagaaaucugcca

SEQ ID NO: 3855257 - RNA, 13 nt, Human
ucuaacucagcaa

SEQ ID NO: 3855258 - RNA, 17 nt, Human
ucuaacucugauguaaa

SEQ ID NO: 3855259 - RNA, 17 nt, Human
ucuaacugugcucaaga

SEQ ID NO: 3855260 - RNA, 13 nt, Human
ucuaagaaacauu

SEQ ID NO: 3855261 - RNA, 23 nt, Human
ucuaagaaacauuggaagcaggu

SEQ ID NO: 3855262 - RNA, 17 nt, Human
ucuaagaaacauuuaua

SEQ ID NO: 3855263 - RNA, 18 nt, Human
ucuaagaaacauuuauau

SEQ ID NO: 3855264 - RNA, 12 nt, Human
ucuaagaaagaa

SEQ ID NO: 3855265 - RNA, 13 nt, Human
ucuaagaaagaac

SEQ ID NO: 3855266 - RNA, 13 nt, Human
ucuaagaaaucaa

SEQ ID NO: 3855267 - RNA, 19 nt, Human
ucuaagaaauugaauacuu

SEQ ID NO: 3855268 - RNA, 16 nt, Human
ucuaagacuauauaua

SEQ ID NO: 3855269 - RNA, 21 nt, Human
ucuaagacuauauauauaaau

SEQ ID NO: 3855270 - RNA, 23 nt, Human
ucuaagacuauauauauaaaugu

SEQ ID NO: 3855271 - RNA, 16 nt, Human
ucuaagacucaaaugu

SEQ ID NO: 3855272 - RNA, 19 nt, Human
ucuaagacucaaauguucu

SEQ ID NO: 3855273 - RNA, 19 nt, Human
ucuaagacuuacucuaaga

SEQ ID NO: 3855274 - RNA, 20 nt, Human
ucuaagagaacaaugugcua

SEQ ID NO: 3855275 - RNA, 17 nt, Human
ucuaagaucuuagauuc

SEQ ID NO: 3855276 - RNA, 19 nt, Human
ucuaagaugugauauucua

SEQ ID NO: 3855277 - RNA, 24 nt, Human
ucuaagaugugauauucuaagacu

SEQ ID NO: 3855278 - RNA, 12 nt, Human
ucuaagauguua

SEQ ID NO: 3855279 - RNA, 21 nt, Human
ucuaagauucauccauuuauu

SEQ ID NO: 3855280 - RNA, 12 nt, Human
ucuaagauucua

SEQ ID NO: 3855281 - RNA, 15 nt, Human
ucuaagauucuaaag

SEQ ID NO: 3855282 - RNA, 17 nt, Human
ucuaagauucuaaugau

SEQ ID NO: 3855283 - RNA, 20 nt, Human
ucuaagauucuaaugaugau

SEQ ID NO: 3855284 - RNA, 15 nt, Human
ucuaagauucuagau

SEQ ID NO: 3855285 - RNA, 16 nt, Human
ucuaagauucuagauc

SEQ ID NO: 3855286 - RNA, 19 nt, Human
ucuaagauucuagaucaga

SEQ ID NO: 3855287 - RNA, 14 nt, Human
ucuaagccugaagg

SEQ ID NO: 3855288 - RNA, 15 nt, Human
ucuaagcugcagcuu

SEQ ID NO: 3855289 - RNA, 17 nt, Human
ucuaaggaccugaaauu

SEQ ID NO: 3855290 - RNA, 23 nt, Human
ucuaaggaccugaaauuccaaag

SEQ ID NO: 3855291 - RNA, 19 nt, Human
ucuaaggaugucacagggc

SEQ ID NO: 3855292 - RNA, 18 nt, Human
ucuaaggccuaggauucu

SEQ ID NO: 3855293 - RNA, 19 nt, Human
ucuaaggccuaggauucua

SEQ ID NO: 3855294 - RNA, 13 nt, Human
ucuaaggcucuga

SEQ ID NO: 3855295 - RNA, 14 nt, Human
ucuaaguaaaacca

SEQ ID NO: 3855296 - RNA, 15 nt, Human
ucuaaguaaaaccac

SEQ ID NO: 3855297 - RNA, 22 nt, Human
ucuaaguaaaaccacagcaguu

SEQ ID NO: 3855298 - RNA, 19 nt, Human
ucuaaguaaauacaauuuu

SEQ ID NO: 3855299 - RNA, 19 nt, Human
ucuaagucaauccaagagu

SEQ ID NO: 3855300 - RNA, 15 nt, Human
ucuaagucauguaug

SEQ ID NO: 3855301 - RNA, 18 nt, Human
ucuaagugccucacauuu

SEQ ID NO: 3855302 - RNA, 14 nt, Human
ucuaaguguuugcu

SEQ ID NO: 3855303 - RNA, 14 nt, Human
ucuaaguuaauuua

SEQ ID NO: 3855304 - RNA, 17 nt, Human
ucuaaguuccacugagc

SEQ ID NO: 3855305 - RNA, 19 nt, Human
ucuaaguugaguauauuau

SEQ ID NO: 3855306 - RNA, 12 nt, Human
ucuaaguuucua

SEQ ID NO: 3855307 - RNA, 13 nt, Human
ucuaaguuucuaa

SEQ ID NO: 3855308 - RNA, 20 nt, Human
ucuaaguuucuaagauucua

SEQ ID NO: 3855309 - RNA, 22 nt, Human
ucuaaguuucuaagauucuaaa

SEQ ID NO: 3855310 - RNA, 22 nt, Human
ucuaaguuuuaggguacaugug

SEQ ID NO: 3855311 - RNA, 23 nt, Human
ucuaaguuuuaggguacaugugc

SEQ ID NO: 3855312 - RNA, 13 nt, Human
ucuaauaaauuau

SEQ ID NO: 3855313 - RNA, 14 nt, Human
ucuaauaauaaaua

SEQ ID NO: 3855314 - RNA, 15 nt, Human
ucuaauaauaaauag

SEQ ID NO: 3855315 - RNA, 15 nt, Human
ucuaauaauuucuaa

SEQ ID NO: 3855316 - RNA, 16 nt, Human
ucuaauaccucugugu

SEQ ID NO: 3855317 - RNA, 21 nt, Human
ucuaauagcggguuacuuuca

SEQ ID NO: 3855318 - RNA, 17 nt, Human
ucuaauaguauaaaccc

SEQ ID NO: 3855319 - RNA, 16 nt, Human
ucuaauauauccacac

SEQ ID NO: 3855320 - RNA, 17 nt, Human
ucuaauaucauucacua

SEQ ID NO: 3855321 - RNA, 20 nt, Human
ucuaauaucccagaaaaagu

SEQ ID NO: 3855322 - RNA, 22 nt, Human
ucuaauauuuauugcuuuauaa

SEQ ID NO: 3855323 - RNA, 12 nt, Human
ucuaaucaaaag

SEQ ID NO: 3855324 - RNA, 17 nt, Human
ucuaaucgaaagaaaau

SEQ ID NO: 3855325 - RNA, 20 nt, Human
ucuaaucgaaagaaaauggg

SEQ ID NO: 3855326 - RNA, 19 nt, Human
ucuaaugacauucaauaaa

SEQ ID NO: 3855327 - RNA, 22 nt, Human
acuaacacuauuuuaugcaaau

SEQ ID NO: 3855328 - RNA, 21 nt, Human
acuaacacucagaagccuggg

SEQ ID NO: 3855329 - RNA, 17 nt, Human
acuaacagauaagcaag

SEQ ID NO: 3855330 - RNA, 18 nt, Human
acuaacaggccaaagagu

SEQ ID NO: 3855331 - RNA, 13 nt, Human
acuaaccacgcug

SEQ ID NO: 3855332 - RNA, 16 nt, Human
acuaaccagcagaaau

SEQ ID NO: 3855333 - RNA, 13 nt, Human
acuaaccugaccg

SEQ ID NO: 3855334 - RNA, 15 nt, Human
acuaaccuggguucc

SEQ ID NO: 3855335 - RNA, 22 nt, Human
acuaaccuugccugguacagua

SEQ ID NO: 3855336 - RNA, 18 nt, Human
acuaacguugagccccug

SEQ ID NO: 3855337 - RNA, 22 nt, Human
acuaacuaaaacaaagccacuu

SEQ ID NO: 3855338 - RNA, 14 nt, Human
acuaacuaaacucu

SEQ ID NO: 3855339 - RNA, 23 nt, Human
acuaacuagagcagcccuggagu

SEQ ID NO: 3855340 - RNA, 23 nt, Human
acuaacuaugcauggugccccag

SEQ ID NO: 3855341 - RNA, 15 nt, Human
acuaacucaaauaca

SEQ ID NO: 3855342 - RNA, 18 nt, Human
acuaacuucuaaaacugu

SEQ ID NO: 3855343 - RNA, 14 nt, Human
acuaagaaaagaua

SEQ ID NO: 3855344 - RNA, 13 nt, Human
acuaagaaacuuu

SEQ ID NO: 3855345 - RNA, 14 nt, Human
acuaagaaacuuuu

SEQ ID NO: 3855346 - RNA, 13 nt, Human
acuaagaagaaaa

SEQ ID NO: 3855347 - RNA, 16 nt, Human
acuaagagaaguugua

SEQ ID NO: 3855348 - RNA, 21 nt, Human
acuaagaucgguuaacaaaua

SEQ ID NO: 3855349 - RNA, 18 nt, Human
acuaagaugacauugcua

SEQ ID NO: 3855350 - RNA, 21 nt, Human
acuaagauucuuuuaaauuag

SEQ ID NO: 3855351 - RNA, 18 nt, Human
acuaagccacaagaaauu

SEQ ID NO: 3855352 - RNA, 18 nt, Human
acuaagcccugucgagac

SEQ ID NO: 3855353 - RNA, 21 nt, Human
acuaagcuuugccagcugcug

SEQ ID NO: 3855354 - RNA, 20 nt, Human
acuaaggaguaaucugugua

SEQ ID NO: 3855355 - RNA, 21 nt, Human
acuaaggggcccggccagcca

SEQ ID NO: 3855356 - RNA, 15 nt, Human
acuaagucucuuuuu

SEQ ID NO: 3855357 - RNA, 23 nt, Human
acuaagucucuuuuuuacaaagg

SEQ ID NO: 3855358 - RNA, 18 nt, Human
acuaaguuauaguauauc

SEQ ID NO: 3855359 - RNA, 14 nt, Human
acuaauaaaauauu

SEQ ID NO: 3855360 - RNA, 16 nt, Human
acuaauaaaauauuuu

SEQ ID NO: 3855361 - RNA, 19 nt, Human
acuaauaaaauauuuucug

SEQ ID NO: 3855362 - RNA, 19 nt, Human
acuaauaaacuaauaauug

SEQ ID NO: 3855363 - RNA, 23 nt, Human
acuaauaaucuuguuucugaaaa

SEQ ID NO: 3855364 - RNA, 14 nt, Human
acuaauaauugcag

SEQ ID NO: 3855365 - RNA, 17 nt, Human
acuaauagaauaaaggc

SEQ ID NO: 3855366 - RNA, 20 nt, Human
acuaauagaauaaaggcagu

SEQ ID NO: 3855367 - RNA, 20 nt, Human
acuaauauauuuaaaaauaa

SEQ ID NO: 3855368 - RNA, 13 nt, Human
acuaauauuucug

SEQ ID NO: 3855369 - RNA, 19 nt, Human
acuaauauuuuaugugaga

SEQ ID NO: 3855370 - RNA, 22 nt, Human
acuaaugaccacaccugccucu

SEQ ID NO: 3855371 - RNA, 13 nt, Human
acuaaugauguuu

SEQ ID NO: 3855372 - RNA, 15 nt, Human
acuaaugcaaacugg

SEQ ID NO: 3855373 - RNA, 12 nt, Human
acuaauggcaug

SEQ ID NO: 3855374 - RNA, 16 nt, Human
acuaauggcaugagaa

SEQ ID NO: 3855375 - RNA, 18 nt, Human
acuaauggggcggugaga

SEQ ID NO: 3855376 - RNA, 16 nt, Human
acuaauuaacauauaa

SEQ ID NO: 3855377 - RNA, 13 nt, Human
acuaauuccacac

SEQ ID NO: 3855378 - RNA, 17 nt, Human
acuaauuguauaacagg

SEQ ID NO: 3855379 - RNA, 19 nt, Human
acuaauuguauaacagguu

SEQ ID NO: 3855380 - RNA, 22 nt, Human
acuaauuguauaacagguuauu

SEQ ID NO: 3855381 - RNA, 15 nt, Human
acuaauuuaaaaaau

SEQ ID NO: 3855382 - RNA, 20 nt, Human
acuaauuucaaaaugcuuuu

SEQ ID NO: 3855383 - RNA, 18 nt, Human
acuacaaagguuuaaaug

SEQ ID NO: 3855384 - RNA, 22 nt, Human
acuacaaagguuuaaaugaaca

SEQ ID NO: 3855385 - RNA, 23 nt, Human
acuacaaagguuuaaaugaacaa

SEQ ID NO: 3855386 - RNA, 13 nt, Human
acuacaaaucaag

SEQ ID NO: 3855387 - RNA, 13 nt, Human
acuacaagucagc

SEQ ID NO: 3855388 - RNA, 18 nt, Human
acuacaauauguacauuu

SEQ ID NO: 3855389 - RNA, 13 nt, Human
acuacacacagua

SEQ ID NO: 3855390 - RNA, 22 nt, Human
acuacacacuguguacugcagu

SEQ ID NO: 3855391 - RNA, 20 nt, Human
acuacacagucugcaagauu

SEQ ID NO: 3855392 - RNA, 19 nt, Human
acuacacauucaauaagca

SEQ ID NO: 3855393 - RNA, 13 nt, Human
acuacacauuuuu

SEQ ID NO: 3855394 - RNA, 15 nt, Human
acuacacauuuuuaa

SEQ ID NO: 3855395 - RNA, 21 nt, Human
acuacacauuuuuaaauuguu

SEQ ID NO: 3855396 - RNA, 13 nt, Human
acuacaccacaca

SEQ ID NO: 3855397 - RNA, 14 nt, Human
acuacaccacacac

SEQ ID NO: 3855398 - RNA, 13 nt, Human
acuacacccagca

SEQ ID NO: 3855399 - RNA, 14 nt, Human
acuacacccagcaa

SEQ ID NO: 3855400 - RNA, 15 nt, Human
acuacacccagcaau

SEQ ID NO: 3855401 - RNA, 16 nt, Human
acuacacccagcaaua

SEQ ID NO: 3855402 - RNA, 13 nt, Human
acuacaccuggcu

SEQ ID NO: 3855403 - RNA, 17 nt, Human
acuacacuccagccuga

SEQ ID NO: 3855404 - RNA, 18 nt, Human
acuacacuccagccugag

SEQ ID NO: 3855405 - RNA, 14 nt, Human
acuacacugaggag

SEQ ID NO: 3855406 - RNA, 17 nt, Human
acuacagcuucagugau

SEQ ID NO: 3855407 - RNA, 17 nt, Human
acuacaguauuacucuu

SEQ ID NO: 3855408 - RNA, 20 nt, Human
acuacagucaagauagaaag

SEQ ID NO: 3855409 - RNA, 13 nt, Human
acuacaguuuguu

SEQ ID NO: 3855410 - RNA, 16 nt, Human
acuacauauugaauag

SEQ ID NO: 3855411 - RNA, 19 nt, Human
acuacaucgcccuccacau

SEQ ID NO: 3855412 - RNA, 12 nt, Human
acuacaugcacu

SEQ ID NO: 3855413 - RNA, 20 nt, Human
acuacaugcagcccaugccc

SEQ ID NO: 3855414 - RNA, 17 nt, Human
acgaucacaaaugacuu

SEQ ID NO: 3855415 - RNA, 19 nt, Human
acgaucacaaaugacuuua

SEQ ID NO: 3855416 - RNA, 18 nt, Human
acgaucaggcacagguca

SEQ ID NO: 3855417 - RNA, 20 nt, Human
acgauccugccacccuguag

SEQ ID NO: 3855418 - RNA, 21 nt, Human
acgauccugccacccuguagc

SEQ ID NO: 3855419 - RNA, 14 nt, Human
acgauccuucaaag

SEQ ID NO: 3855420 - RNA, 14 nt, Human
acgaugaaaaacuu

SEQ ID NO: 3855421 - RNA, 16 nt, Human
acgauguggcccuggc

SEQ ID NO: 3855422 - RNA, 18 nt, Human
acgauguggcccuggccu

SEQ ID NO: 3855423 - RNA, 15 nt, Human
acgauuuaauucucu

SEQ ID NO: 3855424 - RNA, 18 nt, Human
acgauuuagaaagaagcc

SEQ ID NO: 3855425 - RNA, 20 nt, Human
acgauuucuguuuagauaau

SEQ ID NO: 3855426 - RNA, 23 nt, Human
acgauuucuguuuagauaauaca

SEQ ID NO: 3855427 - RNA, 16 nt, Human
acgcaaagagagauuu

SEQ ID NO: 3855428 - RNA, 17 nt, Human
acgcaaagagagauuuu

SEQ ID NO: 3855429 - RNA, 19 nt, Human
acgcacacacacacacagg

SEQ ID NO: 3855430 - RNA, 20 nt, Human
acgcacacacacacacagga

SEQ ID NO: 3855431 - RNA, 15 nt, Human
acgcaccagcccaga

SEQ ID NO: 3855432 - RNA, 14 nt, Human
acgcaccugccuca

SEQ ID NO: 3855433 - RNA, 11 nt, Human
acgcacgcaca

SEQ ID NO: 3855434 - RNA, 15 nt, Human
acgcacggcagccac

SEQ ID NO: 3855435 - RNA, 19 nt, Human
acgcacgugggucuucagg

SEQ ID NO: 3855436 - RNA, 17 nt, Human
acgcagaugauccauga

SEQ ID NO: 3855437 - RNA, 12 nt, Human
acgcagccagga

SEQ ID NO: 3855438 - RNA, 20 nt, Human
acgcagcccuagagccugcc

SEQ ID NO: 3855439 - RNA, 21 nt, Human
acgcagcccuagagccugccu

SEQ ID NO: 3855440 - RNA, 22 nt, Human
acgcagcccuagagccugccug

SEQ ID NO: 3855441 - RNA, 23 nt, Human
acgcagcccuagagccugccugg

SEQ ID NO: 3855442 - RNA, 24 nt, Human
acgcagcccuagagccugccugga

SEQ ID NO: 3855443 - RNA, 19 nt, Human
acgcaggcccccaggugcc

SEQ ID NO: 3855444 - RNA, 22 nt, Human
acgcaggcccccaggugccagu

SEQ ID NO: 3855445 - RNA, 17 nt, Human
acgcagggguugcagug

SEQ ID NO: 3855446 - RNA, 15 nt, Human
acgcauccagcaaga

SEQ ID NO: 3855447 - RNA, 22 nt, Human
acgccacagcccuuuugucucu

SEQ ID NO: 3855448 - RNA, 18 nt, Human
acgccaccauuccuggaa

SEQ ID NO: 3855449 - RNA, 20 nt, Human
acgccacucauuucaucuca

SEQ ID NO: 3855450 - RNA, 16 nt, Human
acgccagacuucccac

SEQ ID NO: 3855451 - RNA, 17 nt, Human
acgccagggaccccaga

SEQ ID NO: 3855452 - RNA, 18 nt, Human
acgccaggggaaaaucag

SEQ ID NO: 3855453 - RNA, 11 nt, Human
acgccauccca

SEQ ID NO: 3855454 - RNA, 14 nt, Human
acgccaucccagcc

SEQ ID NO: 3855455 - RNA, 16 nt, Human
acgccaucccagcccc

SEQ ID NO: 3855456 - RNA, 17 nt, Human
acgccaucccagcccca

SEQ ID NO: 3855457 - RNA, 18 nt, Human
acgccaucccagccccaa

SEQ ID NO: 3855458 - RNA, 15 nt, Human
acgcccacuucccug

SEQ ID NO: 3855459 - RNA, 14 nt, Human
acgcccccccccac

SEQ ID NO: 3855460 - RNA, 20 nt, Human
acgcccguccugccuguggc

SEQ ID NO: 3855461 - RNA, 13 nt, Human
acgcccuauuuuu

SEQ ID NO: 3855462 - RNA, 19 nt, Human
acgcccuccccuccccugc

SEQ ID NO: 3855463 - RNA, 22 nt, Human
acgcccuccccuccccugcugc

SEQ ID NO: 3855464 - RNA, 18 nt, Human
acgcccuuuccuccucag

SEQ ID NO: 3855465 - RNA, 21 nt, Human
acgcccuuuccuccucaggca

SEQ ID NO: 3855466 - RNA, 20 nt, Human
acgccgcccuaaaagcacac

SEQ ID NO: 3855467 - RNA, 22 nt, Human
acgccggggacagaggccugcc

SEQ ID NO: 3855468 - RNA, 17 nt, Human
acgccuagccucacgcu

SEQ ID NO: 3855469 - RNA, 16 nt, Human
acgccuaugaucccag

SEQ ID NO: 3855470 - RNA, 15 nt, Human
acgccucccacuggg

SEQ ID NO: 3855471 - RNA, 18 nt, Human
acgccugagcccagggag

SEQ ID NO: 3855472 - RNA, 17 nt, Human
uccagggcuggacugag

SEQ ID NO: 3855473 - RNA, 17 nt, Human
uccaggggccccuccag

SEQ ID NO: 3855474 - RNA, 22 nt, Human
uccaggggcugcuuccuccugg

SEQ ID NO: 3855475 - RNA, 14 nt, Human
uccagggguccuag

SEQ ID NO: 3855476 - RNA, 19 nt, Human
uccaggggugggacacccu

SEQ ID NO: 3855477 - RNA, 14 nt, Human
uccagggguuuaca

SEQ ID NO: 3855478 - RNA, 16 nt, Human
uccagggucccucugu

SEQ ID NO: 3855479 - RNA, 15 nt, Human
uccaggguggcagca

SEQ ID NO: 3855480 - RNA, 17 nt, Human
uccagguaccuugaccu

SEQ ID NO: 3855481 - RNA, 18 nt, Human
uccagguaccuugaccuu

SEQ ID NO: 3855482 - RNA, 17 nt, Human
uccagguacgcacagac

SEQ ID NO: 3855483 - RNA, 19 nt, Human
uccagguagagggugugua

SEQ ID NO: 3855484 - RNA, 15 nt, Human
uccagguaucuccag

SEQ ID NO: 3855485 - RNA, 18 nt, Human
uccagguaucuccaggau

SEQ ID NO: 3855486 - RNA, 21 nt, Human
uccagguccugguggggcagc

SEQ ID NO: 3855487 - RNA, 19 nt, Human
uccaggucgggcucagcuc

SEQ ID NO: 3855488 - RNA, 20 nt, Human
uccaggucgggcucagcucu

SEQ ID NO: 3855489 - RNA, 15 nt, Human
uccaggugcacaagc

SEQ ID NO: 3855490 - RNA, 18 nt, Human
uccaggugcacaagcucc

SEQ ID NO: 3855491 - RNA, 21 nt, Human
uccaggugcacaagcuccaag

SEQ ID NO: 3855492 - RNA, 14 nt, Human
uccaggugcagagg

SEQ ID NO: 3855493 - RNA, 14 nt, Human
uccagguggcauca

SEQ ID NO: 3855494 - RNA, 18 nt, Human
uccagguguuacuguaau

SEQ ID NO: 3855495 - RNA, 20 nt, Human
uccagguucaacccacagcu

SEQ ID NO: 3855496 - RNA, 17 nt, Human
uccagguucccucccag

SEQ ID NO: 3855497 - RNA, 18 nt, Human
uccagguucccucccaga

SEQ ID NO: 3855498 - RNA, 13 nt, Human
uccagguuuuuca

SEQ ID NO: 3855499 - RNA, 22 nt, Human
uccagguuuuucaauuaaacgg

SEQ ID NO: 3855500 - RNA, 18 nt, Human
uccaguaagaucacuguu

SEQ ID NO: 3855501 - RNA, 19 nt, Human
uccaguaagaucacuguuu

SEQ ID NO: 3855502 - RNA, 22 nt, Human
uccaguaagaucacuguuuaga

SEQ ID NO: 3855503 - RNA, 15 nt, Human
uccaguaccuugcuu

SEQ ID NO: 3855504 - RNA, 15 nt, Human
uccaguacuggagcu

SEQ ID NO: 3855505 - RNA, 16 nt, Human
uccaguaggauccagu

SEQ ID NO: 3855506 - RNA, 21 nt, Human
uccaguauaagacuacugaau

SEQ ID NO: 3855507 - RNA, 15 nt, Human
uccaguaucuugaag

SEQ ID NO: 3855508 - RNA, 16 nt, Human
uccaguaucuugaaga

SEQ ID NO: 3855509 - RNA, 19 nt, Human
uccaguauucuugucaaaa

SEQ ID NO: 3855510 - RNA, 16 nt, Human
uccaguccaaggaaac

SEQ ID NO: 3855511 - RNA, 14 nt, Human
uccaguccccagaa

SEQ ID NO: 3855512 - RNA, 15 nt, Human
uccaguccccagaac

SEQ ID NO: 3855513 - RNA, 21 nt, Human
uccaguccccagaacucugcc

SEQ ID NO: 3855514 - RNA, 18 nt, Human
uccaguccuaucugggcu

SEQ ID NO: 3855515 - RNA, 15 nt, Human
uccaguccugcucuc

SEQ ID NO: 3855516 - RNA, 17 nt, Human
uccaguccugcucucua

SEQ ID NO: 3855517 - RNA, 16 nt, Human
uccagucucccaacuu

SEQ ID NO: 3855518 - RNA, 22 nt, Human
uccagucucuuguacagcguuu

SEQ ID NO: 3855519 - RNA, 13 nt, Human
uccagucugcugc

SEQ ID NO: 3855520 - RNA, 15 nt, Human
uccagucugcugccc

SEQ ID NO: 3855521 - RNA, 18 nt, Human
uccagucugcugcccucc

SEQ ID NO: 3855522 - RNA, 22 nt, Human
uccagucugcugcccuccaucc

SEQ ID NO: 3855523 - RNA, 13 nt, Human
uccagucuuccac

SEQ ID NO: 3855524 - RNA, 19 nt, Human
uccagucuuccaccuggaa

SEQ ID NO: 3855525 - RNA, 17 nt, Human
uccagugaccucucucu

SEQ ID NO: 3855526 - RNA, 18 nt, Human
uccagugagacagcucug

SEQ ID NO: 3855527 - RNA, 18 nt, Human
uccagugagcuuaucaug

SEQ ID NO: 3855528 - RNA, 15 nt, Human
uccagugaggcucug

SEQ ID NO: 3855529 - RNA, 16 nt, Human
uccagugaggcucugc

SEQ ID NO: 3855530 - RNA, 18 nt, Human
uccagugaggcucugccc

SEQ ID NO: 3855531 - RNA, 23 nt, Human
uccagugaggcucugcccuuggu

SEQ ID NO: 3855532 - RNA, 18 nt, Human
uccagugcaacacugaag

SEQ ID NO: 3855533 - RNA, 17 nt, Human
uccagugccagcaauga

SEQ ID NO: 3855534 - RNA, 22 nt, Human
uccaguggaagaagaaaacacu

SEQ ID NO: 3855535 - RNA, 22 nt, Human
uccaguggagguuugucgggca

SEQ ID NO: 3855536 - RNA, 22 nt, Human
uccaguggccuggcuccgcugu

SEQ ID NO: 3855537 - RNA, 20 nt, Human
uccagugguccauggaaugc

SEQ ID NO: 3855538 - RNA, 23 nt, Human
uccagugguuugagacacugguu

SEQ ID NO: 3855539 - RNA, 15 nt, Human
uccaguguccugagc

SEQ ID NO: 3855540 - RNA, 19 nt, Human
uccaguguccugagcucag

SEQ ID NO: 3855541 - RNA, 22 nt, Human
uccaguguccugagcucagcgu

SEQ ID NO: 3855542 - RNA, 21 nt, Human
uccaguguccuuagaacauuu

SEQ ID NO: 3855543 - RNA, 18 nt, Human
uccagugugggcuugacc

SEQ ID NO: 3855544 - RNA, 19 nt, Human
uccaguuaaaaaaaauuuu

SEQ ID NO: 3855545 - RNA, 21 nt, Human
uccaguuaaaaaaaauuuuaa

SEQ ID NO: 3855546 - RNA, 22 nt, Human
uccaguuaaaaaaaauuuuaau

SEQ ID NO: 3855547 - RNA, 14 nt, Human
uccaguuaaccaag

SEQ ID NO: 3855548 - RNA, 14 nt, Human
uccaguuaguucuc

SEQ ID NO: 3855549 - RNA, 16 nt, Human
uccaguuauaagaaga

SEQ ID NO: 3855550 - RNA, 21 nt, Human
uccaguucaucgauuuucuau

SEQ ID NO: 3855551 - RNA, 13 nt, Human
uccaguucccacu

SEQ ID NO: 3855552 - RNA, 15 nt, Human
uccaguuccuuuaga

SEQ ID NO: 3855553 - RNA, 17 nt, Human
uccaguuccuuuagaaa

SEQ ID NO: 3855554 - RNA, 21 nt, Human
uccaguugaaguuaguggaaa

SEQ ID NO: 3855555 - RNA, 13 nt, Human
uccaguuuauucc

SEQ ID NO: 3855556 - RNA, 15 nt, Human
uccaguuuauuccag

SEQ ID NO: 3855557 - RNA, 19 nt, Human
uccaguuugcaccuguccc

SEQ ID NO: 3855558 - RNA, 17 nt, Human
uccaguuugucuuggau

SEQ ID NO: 3855559 - RNA, 17 nt, Human
uccaguuuuguuuggac

SEQ ID NO: 3855560 - RNA, 20 nt, Human
uccaguuuuguuuggaccaa

SEQ ID NO: 3855561 - RNA, 14 nt, Human
uccaguuuuucaua

SEQ ID NO: 3855562 - RNA, 23 nt, Human
uccauaaacagacuguuaauuau

SEQ ID NO: 3855563 - RNA, 17 nt, Human
uccauaaagaagauguu

SEQ ID NO: 3855564 - RNA, 17 nt, Human
uccauaaauccuugaug

SEQ ID NO: 3855565 - RNA, 16 nt, Human
uccauaaggaauguag

SEQ ID NO: 3855566 - RNA, 22 nt, Human
uccauaaugcauucuucucugu

SEQ ID NO: 3855567 - RNA, 12 nt, Human
uccauaauguau

SEQ ID NO: 3855568 - RNA, 16 nt, Human
uccauaauguucugcu

SEQ ID NO: 3855569 - RNA, 17 nt, Human
uuuauacaaauuagaaa

SEQ ID NO: 3855570 - RNA, 11 nt, Human
uuuauacacau

SEQ ID NO: 3855571 - RNA, 13 nt, Human
uuuauacagcugu

SEQ ID NO: 3855572 - RNA, 21 nt, Human
uuuauacagcuguauugucug

SEQ ID NO: 3855573 - RNA, 18 nt, Human
uuuauacaguagugagaa

SEQ ID NO: 3855574 - RNA, 19 nt, Human
uuuauacaguuuuaaagaa

SEQ ID NO: 3855575 - RNA, 20 nt, Human
uuuauacauaaacaagacca

SEQ ID NO: 3855576 - RNA, 21 nt, Human
uuuauacauuaguaaaugucu

SEQ ID NO: 3855577 - RNA, 16 nt, Human
uuuauaccuguuuaaa

SEQ ID NO: 3855578 - RNA, 18 nt, Human
uuuauaccuguuuaaauu

SEQ ID NO: 3855579 - RNA, 18 nt, Human
uuuauacucuuucuguau

SEQ ID NO: 3855580 - RNA, 20 nt, Human
uuuauacucuuucuguauau

SEQ ID NO: 3855581 - RNA, 21 nt, Human
uuuauagaauaaugugggaag

SEQ ID NO: 3855582 - RNA, 17 nt, Human
uuuauagcuauuacugu

SEQ ID NO: 3855583 - RNA, 12 nt, Human
uuuauaggaaaa

SEQ ID NO: 3855584 - RNA, 13 nt, Human
uuuauaguaauga

SEQ ID NO: 3855585 - RNA, 15 nt, Human
uuuauagugcacaaa

SEQ ID NO: 3855586 - RNA, 13 nt, Human
uuuauaguggaaa

SEQ ID NO: 3855587 - RNA, 14 nt, Human
uuuauaguuaaucu

SEQ ID NO: 3855588 - RNA, 17 nt, Human
uuuauaguuaaucuaua

SEQ ID NO: 3855589 - RNA, 18 nt, Human
uuuauaguuaaucuauaa

SEQ ID NO: 3855590 - RNA, 14 nt, Human
uuuauauaaaugcu

SEQ ID NO: 3855591 - RNA, 17 nt, Human
uuuauauaauaaaguau

SEQ ID NO: 3855592 - RNA, 20 nt, Human
uuuauauaauaaaguauucc

SEQ ID NO: 3855593 - RNA, 14 nt, Human
uuuauauaauaucu

SEQ ID NO: 3855594 - RNA, 22 nt, Human
uuuauauaaugguaugcuugca

SEQ ID NO: 3855595 - RNA, 14 nt, Human
uuuauauaauuaug

SEQ ID NO: 3855596 - RNA, 17 nt, Human
uuuauauaauuauguua

SEQ ID NO: 3855597 - RNA, 16 nt, Human
uuuauauacaauaaug

SEQ ID NO: 3855598 - RNA, 15 nt, Human
uuuauauauacagua

SEQ ID NO: 3855599 - RNA, 19 nt, Human
uuuauauauauauauaaag

SEQ ID NO: 3855600 - RNA, 20 nt, Human
uuuauauauauauauaaaga

SEQ ID NO: 3855601 - RNA, 14 nt, Human
uuuauauauuauau

SEQ ID NO: 3855602 - RNA, 17 nt, Human
uuuauauauuauaugga

SEQ ID NO: 3855603 - RNA, 23 nt, Human
uuuauauauugguaacauccuuu

SEQ ID NO: 3855604 - RNA, 21 nt, Human
uuuauauauuuaaaaguguca

SEQ ID NO: 3855605 - RNA, 15 nt, Human
uuuauauauuuauaa

SEQ ID NO: 3855606 - RNA, 15 nt, Human
uuuauaucacauguu

SEQ ID NO: 3855607 - RNA, 17 nt, Human
uuuauaucagccugagu

SEQ ID NO: 3855608 - RNA, 16 nt, Human
uuuauaucaugcaaaa

SEQ ID NO: 3855609 - RNA, 16 nt, Human
uuuauauccauuuuua

SEQ ID NO: 3855610 - RNA, 16 nt, Human
uuuauaucuguaugua

SEQ ID NO: 3855611 - RNA, 20 nt, Human
uuuauaugcuuacugauaua

SEQ ID NO: 3855612 - RNA, 17 nt, Human
uuuauaugcuucuguuu

SEQ ID NO: 3855613 - RNA, 19 nt, Human
uuuauaugcuucuguuuua

SEQ ID NO: 3855614 - RNA, 14 nt, Human
uuuauauguacugu

SEQ ID NO: 3855615 - RNA, 14 nt, Human
uuuauauuaaugua

SEQ ID NO: 3855616 - RNA, 16 nt, Human
uuuauauuaauguacu

SEQ ID NO: 3855617 - RNA, 16 nt, Human
uuuauauuacacuaca

SEQ ID NO: 3855618 - RNA, 20 nt, Human
uuuauauuaguugcuuuguu

SEQ ID NO: 3855619 - RNA, 18 nt, Human
uuuauauuuaauuauuaa

SEQ ID NO: 3855620 - RNA, 14 nt, Human
uuuauauuuaguga

SEQ ID NO: 3855621 - RNA, 13 nt, Human
uuuauauuucaag

SEQ ID NO: 3855622 - RNA, 22 nt, Human
uuuauauuuccuuuaugugaau

SEQ ID NO: 3855623 - RNA, 23 nt, Human
uuuauauuuucaauucaaaaaug

SEQ ID NO: 3855624 - RNA, 13 nt, Human
uuuauauuuuccc

SEQ ID NO: 3855625 - RNA, 14 nt, Human
uuuauauuuucccu

SEQ ID NO: 3855626 - RNA, 12 nt, Human
uuuauauuuuua

SEQ ID NO: 3855627 - RNA, 17 nt, Human
uuuaucaacucaagaau

SEQ ID NO: 3855628 - RNA, 20 nt, Human
uuuaucaaugugucuuucua

SEQ ID NO: 3855629 - RNA, 22 nt, Human
uuuaucacaaccaccguuacaa

SEQ ID NO: 3855630 - RNA, 13 nt, Human
uuuaucacuuuuu

SEQ ID NO: 3855631 - RNA, 20 nt, Human
uuuaucacuuuuugaacuaa

SEQ ID NO: 3855632 - RNA, 22 nt, Human
uuuaucagauacaucacugcuu

SEQ ID NO: 3855633 - RNA, 14 nt, Human
uuuaucagauugcu

SEQ ID NO: 3855634 - RNA, 15 nt, Human
uuuaucagcaaaaaa

SEQ ID NO: 3855635 - RNA, 18 nt, Human
uuuaucagugacagaguu

SEQ ID NO: 3855636 - RNA, 22 nt, Human
uuuaucaguuuccagucucaaa

SEQ ID NO: 3855637 - RNA, 15 nt, Human
uuuaucaugaagccu

SEQ ID NO: 3855638 - RNA, 16 nt, Human
uuuaucaugcaugucc

SEQ ID NO: 3855639 - RNA, 22 nt, Human
uuuaucaugcauguccuguaaa

SEQ ID NO: 3855640 - RNA, 17 nt, Human
uuuaucaugugaaauca

SEQ ID NO: 3855641 - RNA, 14 nt, Human
uuuaucauucaagu

SEQ ID NO: 3855642 - RNA, 15 nt, Human
uuuaucauucaagug

SEQ ID NO: 3855643 - RNA, 16 nt, Human
uuuauccaaaaugugu

SEQ ID NO: 3855644 - RNA, 19 nt, Human
uuuauccagaaaacuguga

SEQ ID NO: 3855645 - RNA, 21 nt, Human
uuuauccauucaacugaaaau

SEQ ID NO: 3855646 - RNA, 15 nt, Human
uuuauccauuuguaa

SEQ ID NO: 3855647 - RNA, 16 nt, Human
uuuaucccaaaguugu

SEQ ID NO: 3855648 - RNA, 16 nt, Human
uuuaucccucaccugu

SEQ ID NO: 3855649 - RNA, 18 nt, Human
uuuaucccuuaagaauga

SEQ ID NO: 3855650 - RNA, 16 nt, Human
uuuauccuaucucucc

SEQ ID NO: 3855651 - RNA, 15 nt, Human
uuuaucgcugggaaa

SEQ ID NO: 3855652 - RNA, 16 nt, Human
uuuaucgucacugcuu

SEQ ID NO: 3855653 - RNA, 21 nt, Human
uuuaucgucacugcuuaacuu

SEQ ID NO: 3855654 - RNA, 20 nt, Human
uuuaucuaauaccucugugu

SEQ ID NO: 3855655 - RNA, 22 nt, Human
uuuaucuacccaagggcagaaa

SEQ ID NO: 3855656 - RNA, 12 nt, Human
uuuaucuauaua

SEQ ID NO: 3855657 - RNA, 16 nt, Human
uuuaucuauuguaaga

SEQ ID NO: 3855658 - RNA, 20 nt, Human
uuuaucuauuguaagauaaa

SEQ ID NO: 3855659 - RNA, 21 nt, Human
uuuaucucagauguuaaaaua

SEQ ID NO: 3855660 - RNA, 19 nt, Human
uuuaucugccucucuugua

SEQ ID NO: 3855661 - RNA, 16 nt, Human
uuuaucuguaguaaac

SEQ ID NO: 3855662 - RNA, 12 nt, Human
uuuaucuuuuua

SEQ ID NO: 3855663 - RNA, 18 nt, Human
uuuaugaaaauaaauagc

SEQ ID NO: 3855664 - RNA, 12 nt, Human
uuuaugaagaaa

SEQ ID NO: 3855665 - RNA, 22 nt, Human
uuuaugaagaaaaaauacauuu

SEQ ID NO: 3855666 - RNA, 15 nt, Human
uuuaugaagaaaaua

SEQ ID NO: 3855667 - RNA, 16 nt, Human
uuuaugaagaaaauac

SEQ ID NO: 3855668 - RNA, 17 nt, Human
uuuaugaaggcaaaaaa

SEQ ID NO: 3855669 - RNA, 12 nt, Human
uuuaugaaguuu

SEQ ID NO: 3855670 - RNA, 14 nt, Human
uuuaugaauauaau

SEQ ID NO: 3855671 - RNA, 18 nt, Human
uuuaugaauuaaaguaau

SEQ ID NO: 3855672 - RNA, 17 nt, Human
uuuaugagaaagccuuc

SEQ ID NO: 3855673 - RNA, 20 nt, Human
uuuaugagaaauguaaugcg

SEQ ID NO: 3855674 - RNA, 20 nt, Human
uuuaugagaugcugguuuuc

SEQ ID NO: 3855675 - RNA, 12 nt, Human
uuuaugagccag

SEQ ID NO: 3855676 - RNA, 16 nt, Human
uuuaugagcucaugua

SEQ ID NO: 3855677 - RNA, 16 nt, Human
uuuaugaguacuuuuu

SEQ ID NO: 3855678 - RNA, 16 nt, Human
uuuaugauaucccuga

SEQ ID NO: 3855679 - RNA, 22 nt, Human
uuuaugauauuuuuuuaagucu

SEQ ID NO: 3855680 - RNA, 13 nt, Human
uuuaugauccagc

SEQ ID NO: 3855681 - RNA, 21 nt, Human
uuuaugccggaugugcuuuuc

SEQ ID NO: 3855682 - RNA, 16 nt, Human
uuuaugcuuuaaacau

SEQ ID NO: 3855683 - RNA, 20 nt, Human
uuuauggcagacauugugcu

SEQ ID NO: 3855684 - RNA, 12 nt, Human
uuuauggccuca

SEQ ID NO: 3855685 - RNA, 16 nt, Human
uuuauggcuuuugugc

SEQ ID NO: 3855686 - RNA, 20 nt, Human
uuuauggcuuuugugcauua

SEQ ID NO: 3855687 - RNA, 19 nt, Human
uuuauggugccuaguauug

SEQ ID NO: 3855688 - RNA, 24 nt, Human
uuuauggugccuaguauugacaaa

SEQ ID NO: 3855689 - RNA, 14 nt, Human
uuuauguagcacau

SEQ ID NO: 3855690 - RNA, 21 nt, Human
uuuauguauguuuacacuguc

SEQ ID NO: 3855691 - RNA, 19 nt, Human
uuuaugucuaaagagcuuu

SEQ ID NO: 3855692 - RNA, 16 nt, Human
uuuaugugaauuuuua

SEQ ID NO: 3855693 - RNA, 16 nt, Human
uuuaugugaucaauuu

SEQ ID NO: 3855694 - RNA, 12 nt, Human
uuuaugugaugg

SEQ ID NO: 3855695 - RNA, 16 nt, Human
uuuaugugcuauuaau

SEQ ID NO: 3855696 - RNA, 22 nt, Human
uuuaugugugaggagcugcugg

SEQ ID NO: 3855697 - RNA, 20 nt, Human
uuuauguuaagggaagaauu

SEQ ID NO: 3855698 - RNA, 20 nt, Human
uuuauguuacuacaugcacu

SEQ ID NO: 3855699 - RNA, 19 nt, Human
uuuauguuccauuaaacga

SEQ ID NO: 3855700 - RNA, 13 nt, Human
uuuauguugacau

SEQ ID NO: 3855701 - RNA, 20 nt, Human
uuuauguugaccuaagauuu

SEQ ID NO: 3855702 - RNA, 17 nt, Human
uuuauguuguauagauu

SEQ ID NO: 3855703 - RNA, 22 nt, Human
uuuauguuugucuuuuaaugcu

SEQ ID NO: 3855704 - RNA, 12 nt, Human
uuuauguuuugu

SEQ ID NO: 3855705 - RNA, 17 nt, Human
uuuauguuuuguuucug

SEQ ID NO: 3855706 - RNA, 13 nt, Human
uuuauuaaaaacu

SEQ ID NO: 3855707 - RNA, 14 nt, Human
uuuauuaaaauauu

SEQ ID NO: 3855708 - RNA, 19 nt, Human
uuuauuaaaauauuucagg

SEQ ID NO: 3855709 - RNA, 21 nt, Human
uuuauuaaaauauuucagguu

SEQ ID NO: 3855710 - RNA, 13 nt, Human
uuuauuaaaaucu

SEQ ID NO: 3855711 - RNA, 23 nt, Human
uuuauuaaaaugauuguaaaaua

SEQ ID NO: 3855712 - RNA, 16 nt, Human
uuuauuaaagaaaaaa

SEQ ID NO: 3855713 - RNA, 12 nt, Human
uuuauuaaauag

SEQ ID NO: 3855714 - RNA, 17 nt, Human
ucaguucccuuggccuc

SEQ ID NO: 3855715 - RNA, 16 nt, Human
ucaguucuaggaaaau

SEQ ID NO: 3855716 - RNA, 19 nt, Human
ucaguucuagucucucugg

SEQ ID NO: 3855717 - RNA, 17 nt, Human
ucaguucucuucacuca

SEQ ID NO: 3855718 - RNA, 17 nt, Human
ucaguugcaauaauacu

SEQ ID NO: 3855719 - RNA, 16 nt, Human
ucaguugcuaaacacu

SEQ ID NO: 3855720 - RNA, 18 nt, Human
ucaguugcuaaacacugc

SEQ ID NO: 3855721 - RNA, 18 nt, Human
ucaguugcucaaaaagaa

SEQ ID NO: 3855722 - RNA, 15 nt, Human
ucaguugcuugucuu

SEQ ID NO: 3855723 - RNA, 16 nt, Human
ucaguugguaagcuuc

SEQ ID NO: 3855724 - RNA, 20 nt, Human
ucaguugguguguuuuuggg

SEQ ID NO: 3855725 - RNA, 19 nt, Human
ucaguugguugugucuuuu

SEQ ID NO: 3855726 - RNA, 16 nt, Human
ucaguuguguuuuuua

SEQ ID NO: 3855727 - RNA, 15 nt, Human
ucaguuguuauuuau

SEQ ID NO: 3855728 - RNA, 19 nt, Human
ucaguuguuuguuuuugcu

SEQ ID NO: 3855729 - RNA, 16 nt, Human
ucaguuuaucuguuca

SEQ ID NO: 3855730 - RNA, 16 nt, Human
ucaguuucaacaugaa

SEQ ID NO: 3855731 - RNA, 17 nt, Human
ucaguuucacagaaaau

SEQ ID NO: 3855732 - RNA, 18 nt, Human
ucaguuucacagaaaaua

SEQ ID NO: 3855733 - RNA, 19 nt, Human
ucaguuucauaaaaggaga

SEQ ID NO: 3855734 - RNA, 16 nt, Human
ucaguuuccuggucug

SEQ ID NO: 3855735 - RNA, 22 nt, Human
ucaguuucuucugcgccucagg

SEQ ID NO: 3855736 - RNA, 15 nt, Human
ucaguuugcagagua

SEQ ID NO: 3855737 - RNA, 13 nt, Human
ucaguuuuaacua

SEQ ID NO: 3855738 - RNA, 20 nt, Human
ucaguuuuccucucaauaaa

SEQ ID NO: 3855739 - RNA, 15 nt, Human
ucaguuuuugugaaa

SEQ ID NO: 3855740 - RNA, 17 nt, Human
ucaguuuuugugaaaag

SEQ ID NO: 3855741 - RNA, 20 nt, Human
ucaguuuuuuguuuuacaau

SEQ ID NO: 3855742 - RNA, 15 nt, Human
ucauaaaaacugcuu

SEQ ID NO: 3855743 - RNA, 20 nt, Human
ucauaaaaagcaaaacaaaa

SEQ ID NO: 3855744 - RNA, 16 nt, Human
ucauaaacugugugca

SEQ ID NO: 3855745 - RNA, 14 nt, Human
ucauaaagaauugu

SEQ ID NO: 3855746 - RNA, 24 nt, Human
ucauaaagaggcguugcuuucacu

SEQ ID NO: 3855747 - RNA, 15 nt, Human
ucauaaaguacuuga

SEQ ID NO: 3855748 - RNA, 11 nt, Human
ucauaaaguca

SEQ ID NO: 3855749 - RNA, 19 nt, Human
ucauaaaguuagaaucuau

SEQ ID NO: 3855750 - RNA, 24 nt, Human
ucauaaauucaaaccuaaguugcu

SEQ ID NO: 3855751 - RNA, 16 nt, Human
ucauaaauuuacuuua

SEQ ID NO: 3855752 - RNA, 16 nt, Human
ucauaaauuuaugguu

SEQ ID NO: 3855753 - RNA, 21 nt, Human
uuugagagaaauaugaagaac

SEQ ID NO: 3855754 - RNA, 16 nt, Human
uuugagaguucuaaau

SEQ ID NO: 3855755 - RNA, 18 nt, Human
uuugagaucuaaaaauaa

SEQ ID NO: 3855756 - RNA, 15 nt, Human
uuugagcaauuuucg

SEQ ID NO: 3855757 - RNA, 20 nt, Human
uuugagcuacuggauucuua

SEQ ID NO: 3855758 - RNA, 17 nt, Human
uuugaggaaauuugcag

SEQ ID NO: 3855759 - RNA, 16 nt, Human
uuugaggagcauguuu

SEQ ID NO: 3855760 - RNA, 21 nt, Human
uuugaggauauauuuucacuu

SEQ ID NO: 3855761 - RNA, 17 nt, Human
uuugaggauuaguuuag

SEQ ID NO: 3855762 - RNA, 18 nt, Human
uuugaggauuaguuuaga

SEQ ID NO: 3855763 - RNA, 19 nt, Human
uuugaggauuaguuuagaa

SEQ ID NO: 3855764 - RNA, 22 nt, Human
uuugaggauuaguuuagaacag

SEQ ID NO: 3855765 - RNA, 23 nt, Human
uuugaggauuaguuuagaacagg

SEQ ID NO: 3855766 - RNA, 15 nt, Human
uuugaggcaaaagaa

SEQ ID NO: 3855767 - RNA, 15 nt, Human
uuugaggcugcagcg

SEQ ID NO: 3855768 - RNA, 20 nt, Human
uuugaggcuuucagguuuua

SEQ ID NO: 3855769 - RNA, 23 nt, Human
uuugagguuggaaaauaucuuug

SEQ ID NO: 3855770 - RNA, 20 nt, Human
uuugagguuuuuaagccuua

SEQ ID NO: 3855771 - RNA, 19 nt, Human
uuugaguagauauuacuuu

SEQ ID NO: 3855772 - RNA, 20 nt, Human
uuugaguagauauuacuuua

SEQ ID NO: 3855773 - RNA, 21 nt, Human
uuugaguagauauuacuuuau

SEQ ID NO: 3855774 - RNA, 19 nt, Human
uuugagucaaagacuuaaa

SEQ ID NO: 3855775 - RNA, 12 nt, Human
uuugagucuuuu

SEQ ID NO: 3855776 - RNA, 16 nt, Human
uuugagugaggguuuc

SEQ ID NO: 3855777 - RNA, 13 nt, Human
uuugaguucuaca

SEQ ID NO: 3855778 - RNA, 20 nt, Human
uuugauaaaaauuuagaaca

SEQ ID NO: 3855779 - RNA, 16 nt, Human
uuugauaaaauaaaug

SEQ ID NO: 3855780 - RNA, 14 nt, Human
uuugauaaaguagu

SEQ ID NO: 3855781 - RNA, 14 nt, Human
uuugauaaauagug

SEQ ID NO: 3855782 - RNA, 15 nt, Human
uuugauaagaaaacc

SEQ ID NO: 3855783 - RNA, 20 nt, Human
uuugauaaucaacugggcug

SEQ ID NO: 3855784 - RNA, 15 nt, Human
uuugauaaugauaaa

SEQ ID NO: 3855785 - RNA, 15 nt, Human
uuugauaauguuaaa

SEQ ID NO: 3855786 - RNA, 17 nt, Human
uuugauaauguuaaauu

SEQ ID NO: 3855787 - RNA, 23 nt, Human
uuugauaauguuaaauuuguaag

SEQ ID NO: 3855788 - RNA, 17 nt, Human
uuugauacauaauaaaa

SEQ ID NO: 3855789 - RNA, 23 nt, Human
uuugauacauaauaaaaaauuau

SEQ ID NO: 3855790 - RNA, 16 nt, Human
uuugauacauauguga

SEQ ID NO: 3855791 - RNA, 17 nt, Human
uuugauaccccugggga

SEQ ID NO: 3855792 - RNA, 17 nt, Human
uuugauacuaagcauug

SEQ ID NO: 3855793 - RNA, 12 nt, Human
uuugauacuuau

SEQ ID NO: 3855794 - RNA, 23 nt, Human
uuugauauagaaguauaaagaau

SEQ ID NO: 3855795 - RNA, 17 nt, Human
uuugauaucacagucua

SEQ ID NO: 3855796 - RNA, 19 nt, Human
uuugauaucacagucuaau

SEQ ID NO: 3855797 - RNA, 15 nt, Human
uuugauaugaguaua

SEQ ID NO: 3855798 - RNA, 15 nt, Human
uuugauauuaaauuu

SEQ ID NO: 3855799 - RNA, 21 nt, Human
uuugauauuauacaggaaagc

SEQ ID NO: 3855800 - RNA, 13 nt, Human
uuugaucaugaau

SEQ ID NO: 3855801 - RNA, 15 nt, Human
uuugaucuucaacaa

SEQ ID NO: 3855802 - RNA, 18 nt, Human
uuugaucuucaacaaauu

SEQ ID NO: 3855803 - RNA, 18 nt, Human
uuugaucuuccucugcua

SEQ ID NO: 3855804 - RNA, 16 nt, Human
uuugaugaaagcugau

SEQ ID NO: 3855805 - RNA, 19 nt, Human
uuugaugacuggcauuuua

SEQ ID NO: 3855806 - RNA, 12 nt, Human
uuugaugauaaa

SEQ ID NO: 3855807 - RNA, 16 nt, Human
uuugaugcaugucuuu

SEQ ID NO: 3855808 - RNA, 22 nt, Human
uuugaugcaugucuuuuaaaau

SEQ ID NO: 3855809 - RNA, 18 nt, Human
uuugaugcuggagagguu

SEQ ID NO: 3855810 - RNA, 16 nt, Human
uuugaugucagcaguu

SEQ ID NO: 3855811 - RNA, 16 nt, Human
uuugaugucauguguu

SEQ ID NO: 3855812 - RNA, 21 nt, Human
uuugauguguuguucuuggca

SEQ ID NO: 3855813 - RNA, 13 nt, Human
uuugauuaaauuc

SEQ ID NO: 3855814 - RNA, 16 nt, Human
uuugauuaacaaauau

SEQ ID NO: 3855815 - RNA, 18 nt, Human
uuugauuaauccagaaua

SEQ ID NO: 3855816 - RNA, 14 nt, Human
uuugauuauuguau

SEQ ID NO: 3855817 - RNA, 15 nt, Human
uuugauuauuugcau

SEQ ID NO: 3855818 - RNA, 22 nt, Human
uuugauuauuugcauguuaugu

SEQ ID NO: 3855819 - RNA, 15 nt, Human
uuugauucaaaauau

SEQ ID NO: 3855820 - RNA, 12 nt, Human
uuugauucacau

SEQ ID NO: 3855821 - RNA, 14 nt, Human
uuugauucacaugu

SEQ ID NO: 3855822 - RNA, 16 nt, Human
uuugauucacauguuu

SEQ ID NO: 3855823 - RNA, 18 nt, Human
uuugauucacauguuuuc

SEQ ID NO: 3855824 - RNA, 20 nt, Human
uuugauucacauguuuucaa

SEQ ID NO: 3855825 - RNA, 21 nt, Human
uuugauucacauguuuucaaa

SEQ ID NO: 3855826 - RNA, 18 nt, Human
uuugauuuacagcaagua

SEQ ID NO: 3855827 - RNA, 12 nt, Human
uuugauuuaugc

SEQ ID NO: 3855828 - RNA, 14 nt, Human
uuugauuucauuaa

SEQ ID NO: 3855829 - RNA, 14 nt, Human
uuugauuuguacag

SEQ ID NO: 3855830 - RNA, 18 nt, Human
uuugcaaaaaauguuuuu

SEQ ID NO: 3855831 - RNA, 22 nt, Human
uuugcaaaaauccaaauauugu

SEQ ID NO: 3855832 - RNA, 19 nt, Human
uuugcaaacuuuauuuuca

SEQ ID NO: 3855833 - RNA, 19 nt, Human
uuugcaaagaaagaaaaaa

SEQ ID NO: 3855834 - RNA, 22 nt, Human
uuugcaaaguauuguaaauuau

SEQ ID NO: 3855835 - RNA, 18 nt, Human
uuugcaaaguguauuagg

SEQ ID NO: 3855836 - RNA, 13 nt, Human
uuugcaacauuua

SEQ ID NO: 3855837 - RNA, 14 nt, Human
uuugcaagccagau

SEQ ID NO: 3855838 - RNA, 18 nt, Human
uuugcaagucauggcugu

SEQ ID NO: 3855839 - RNA, 21 nt, Human
uuugcaagucauggcugugcc

SEQ ID NO: 3855840 - RNA, 15 nt, Human
uuugcaauaacagcu

SEQ ID NO: 3855841 - RNA, 17 nt, Human
uuugcaauaaugcagua

SEQ ID NO: 3855842 - RNA, 19 nt, Human
uuugcaauggcuauauggc

SEQ ID NO: 3855843 - RNA, 19 nt, Human
uuugcacauguuuccucua

SEQ ID NO: 3855844 - RNA, 16 nt, Human
uuugcacauuaaauga

SEQ ID NO: 3855845 - RNA, 13 nt, Human
uuugcacauuuug

SEQ ID NO: 3855846 - RNA, 18 nt, Human
uuugcacauuuugauuuu

SEQ ID NO: 3855847 - RNA, 13 nt, Human
uuugcaccccucc

SEQ ID NO: 3855848 - RNA, 15 nt, Human
uuugcaccugucccc

SEQ ID NO: 3855849 - RNA, 16 nt, Human
uuugcaccuuucuagu

SEQ ID NO: 3855850 - RNA, 19 nt, Human
uuugcacgacgcccucucc

SEQ ID NO: 3855851 - RNA, 15 nt, Human
uuugcacucuuguuu

SEQ ID NO: 3855852 - RNA, 12 nt, Human
uuugcacugagg

SEQ ID NO: 3855853 - RNA, 18 nt, Human
uuugcacugaggauauuc

SEQ ID NO: 3855854 - RNA, 17 nt, Human
uuugcacugagggccac

SEQ ID NO: 3855855 - RNA, 22 nt, Human
uuugcacugagggccacacuau

SEQ ID NO: 3855856 - RNA, 14 nt, Human
uuugcacuguuuaa

SEQ ID NO: 3855857 - RNA, 19 nt, Human
uuugcagaaaagcaccugc

SEQ ID NO: 3855858 - RNA, 14 nt, Human
uuugcagaaacaga

SEQ ID NO: 3855859 - RNA, 18 nt, Human
uuuuaaaaaaagaaaaug

SEQ ID NO: 3855860 - RNA, 21 nt, Human
uuuuaaaaaaauaaaacauuu

SEQ ID NO: 3855861 - RNA, 18 nt, Human
uuuuaaaaaacugcugac

SEQ ID NO: 3855862 - RNA, 21 nt, Human
uuuuaaaaaacugcugacugu

SEQ ID NO: 3855863 - RNA, 14 nt, Human
uuuuaaaaaacuuu

SEQ ID NO: 3855864 - RNA, 17 nt, Human
uuuuaaaaaagcuuaaa

SEQ ID NO: 3855865 - RNA, 21 nt, Human
uuuuaaaaaagggaguuuuug

SEQ ID NO: 3855866 - RNA, 11 nt, Human
uuuuaaaaaca

SEQ ID NO: 3855867 - RNA, 14 nt, Human
uuuuaaaaagcaaa

SEQ ID NO: 3855868 - RNA, 14 nt, Human
uuuuaaaaauacau

SEQ ID NO: 3855869 - RNA, 12 nt, Human
uuuuaaaaauga

SEQ ID NO: 3855870 - RNA, 15 nt, Human
uuuuaaaaaugaauc

SEQ ID NO: 3855871 - RNA, 20 nt, Human
uuuuaaaacacauguuuuua

SEQ ID NO: 3855872 - RNA, 13 nt, Human
uuuuaaaacccag

SEQ ID NO: 3855873 - RNA, 18 nt, Human
uuuuaaaacuacuuagca

SEQ ID NO: 3855874 - RNA, 20 nt, Human
uuuuaaaacuggaccuguau

SEQ ID NO: 3855875 - RNA, 14 nt, Human
uuuuaaaagaauga

SEQ ID NO: 3855876 - RNA, 21 nt, Human
uuuuaaaagaaugauuaugaa

SEQ ID NO: 3855877 - RNA, 14 nt, Human
uuuuaaaagagaca

SEQ ID NO: 3855878 - RNA, 18 nt, Human
uuuuaaaaguaaauguac

SEQ ID NO: 3855879 - RNA, 15 nt, Human
uuuuaaaaguuucaa

SEQ ID NO: 3855880 - RNA, 22 nt, Human
uuuuaaaaguuucaaugugauu

SEQ ID NO: 3855881 - RNA, 12 nt, Human
uuuuaaaauacu

SEQ ID NO: 3855882 - RNA, 23 nt, Human
uuuuaaaauagaaauuuuguaag

SEQ ID NO: 3855883 - RNA, 21 nt, Human
uuuuaaaauagcguucuugua

SEQ ID NO: 3855884 - RNA, 17 nt, Human
uuuuaaaaucuuuucua

SEQ ID NO: 3855885 - RNA, 18 nt, Human
uuuuaaaaucuuuucuau

SEQ ID NO: 3855886 - RNA, 12 nt, Human
uuuuaaaaugag

SEQ ID NO: 3855887 - RNA, 22 nt, Human
uuuuaaaaugagaaaucuaaaa

SEQ ID NO: 3855888 - RNA, 23 nt, Human
uuuuaaaauuguacaugaacaug

SEQ ID NO: 3855889 - RNA, 11 nt, Human
uuuuaaaauuu

SEQ ID NO: 3855890 - RNA, 15 nt, Human
uuuuaaaauuuguuc

SEQ ID NO: 3855891 - RNA, 18 nt, Human
uuuuaaacacauuaggaa

SEQ ID NO: 3855892 - RNA, 21 nt, Human
uuuuaaacaucaaucuuuaaa

SEQ ID NO: 3855893 - RNA, 21 nt, Human
uuuuaaaccauaaaaagcuga

SEQ ID NO: 3855894 - RNA, 12 nt, Human
uuuuaaacuaga

SEQ ID NO: 3855895 - RNA, 15 nt, Human
uuuuaaacuagauga

SEQ ID NO: 3855896 - RNA, 17 nt, Human
uuuuaaacuagaugacc

SEQ ID NO: 3855897 - RNA, 13 nt, Human
uuuuaaacuguac

SEQ ID NO: 3855898 - RNA, 17 nt, Human
uuuuaaacuguacagug

SEQ ID NO: 3855899 - RNA, 20 nt, Human
uuuuaaacuguguacauaac

SEQ ID NO: 3855900 - RNA, 23 nt, Human
uuuuaaagaauaugacuuuuuau

SEQ ID NO: 3855901 - RNA, 14 nt, Human
uuuuaaagaauuuc

SEQ ID NO: 3855902 - RNA, 13 nt, Human
uuuuaaagacaug

SEQ ID NO: 3855903 - RNA, 14 nt, Human
uuuuaaagugauua

SEQ ID NO: 3855904 - RNA, 14 nt, Human
uuuuaaagugcaaa

SEQ ID NO: 3855905 - RNA, 17 nt, Human
uuuuaaaguuaguaucu

SEQ ID NO: 3855906 - RNA, 14 nt, Human
uuuuaaaguugaua

SEQ ID NO: 3855907 - RNA, 21 nt, Human
uuuuaaauaaacuuuuuuuca

SEQ ID NO: 3855908 - RNA, 21 nt, Human
uuuuaaaucuaaaucuauuua

SEQ ID NO: 3855909 - RNA, 14 nt, Human
uuuuaaauguacag

SEQ ID NO: 3855910 - RNA, 22 nt, Human
uuuuaaauguacagacauauuu

SEQ ID NO: 3855911 - RNA, 12 nt, Human
uuuuaaauguau

SEQ ID NO: 3855912 - RNA, 17 nt, Human
uuuuaaauuaauaucuu

SEQ ID NO: 3855913 - RNA, 19 nt, Human
uuuuaaauuagaaaauauu

SEQ ID NO: 3855914 - RNA, 19 nt, Human
uuuuaaauuauaaggacug

SEQ ID NO: 3855915 - RNA, 21 nt, Human
uuuuaaauuauaaggacugca

SEQ ID NO: 3855916 - RNA, 18 nt, Human
uuuuaaauuuucuucagu

SEQ ID NO: 3855917 - RNA, 19 nt, Human
uuuuaaauuuucuucaguu

SEQ ID NO: 3855918 - RNA, 18 nt, Human
uuuuaaauuuuguaauga

SEQ ID NO: 3855919 - RNA, 16 nt, Human
uuuuaacaaaagcaag

SEQ ID NO: 3855920 - RNA, 20 nt, Human
uuuuaacaaaagcaagacug

SEQ ID NO: 3855921 - RNA, 19 nt, Human
uuuuaacaauaacuacugu

SEQ ID NO: 3855922 - RNA, 18 nt, Human
uuuuaacacacauaaagg

SEQ ID NO: 3855923 - RNA, 19 nt, Human
uuuuaacacacauaaagga

SEQ ID NO: 3855924 - RNA, 19 nt, Human
uuuuaacaccugaugugua

SEQ ID NO: 3855925 - RNA, 21 nt, Human
uuuuaaccaaaggugaaggaa

SEQ ID NO: 3855926 - RNA, 18 nt, Human
uuuuaaccauggcagggu

SEQ ID NO: 3855927 - RNA, 21 nt, Human
uuuuaaccauugucuuguucu

SEQ ID NO: 3855928 - RNA, 18 nt, Human
uuuuaaccccgucaacaa

SEQ ID NO: 3855929 - RNA, 21 nt, Human
uuuuaaccccgucaacaaauc

SEQ ID NO: 3855930 - RNA, 12 nt, Human
uuuuaacuagaa

SEQ ID NO: 3855931 - RNA, 13 nt, Human
uuuuaacucaaua

SEQ ID NO: 3855932 - RNA, 12 nt, Human
uuuuaacucacc

SEQ ID NO: 3855933 - RNA, 13 nt, Human
uuuuaacuucuuu

SEQ ID NO: 3855934 - RNA, 11 nt, Human
uuuuaacuuug

SEQ ID NO: 3855935 - RNA, 19 nt, Human
ucaugggccacugcuuuuc

SEQ ID NO: 3855936 - RNA, 17 nt, Human
ucaugggccccucugac

SEQ ID NO: 3855937 - RNA, 19 nt, Human
ucauggggggagcacccug

SEQ ID NO: 3855938 - RNA, 21 nt, Human
ucauggggugaugcugggcug

SEQ ID NO: 3855939 - RNA, 23 nt, Human
ucaugguagagaccgagccucug

SEQ ID NO: 3855940 - RNA, 14 nt, Human
ucauggugaaaaug

SEQ ID NO: 3855941 - RNA, 14 nt, Human
ucauggugcucaga

SEQ ID NO: 3855942 - RNA, 15 nt, Human
ucaugguguaauaag

SEQ ID NO: 3855943 - RNA, 16 nt, Human
ucaugguguguuacac

SEQ ID NO: 3855944 - RNA, 15 nt, Human
ucauguaaaacagaa

SEQ ID NO: 3855945 - RNA, 16 nt, Human
ucauguaaacugugca

SEQ ID NO: 3855946 - RNA, 16 nt, Human
ucauguaaagaaaugu

SEQ ID NO: 3855947 - RNA, 22 nt, Human
ucauguaaagaaaugucuuaau

SEQ ID NO: 3855948 - RNA, 18 nt, Human
ucauguaaauaauacauu

SEQ ID NO: 3855949 - RNA, 20 nt, Human
ucauguaaauacuguuggug

SEQ ID NO: 3855950 - RNA, 22 nt, Human
ucauguaaauugacuguacuag

SEQ ID NO: 3855951 - RNA, 16 nt, Human
ucauguaaauuuugua

SEQ ID NO: 3855952 - RNA, 23 nt, Human
ucauguaaauuuuguaugaaaaa

SEQ ID NO: 3855953 - RNA, 15 nt, Human
ucauguaauccucaa

SEQ ID NO: 3855954 - RNA, 13 nt, Human
ucauguaauuuua

SEQ ID NO: 3855955 - RNA, 18 nt, Human
ucauguacaagaugaagg

SEQ ID NO: 3855956 - RNA, 16 nt, Human
ucauguaguaucaaau

SEQ ID NO: 3855957 - RNA, 19 nt, Human
ucauguaguaucaaauauu

SEQ ID NO: 3855958 - RNA, 12 nt, Human
ucauguauguuu

SEQ ID NO: 3855959 - RNA, 17 nt, Human
ucaugucaacuucuggc

SEQ ID NO: 3855960 - RNA, 20 nt, Human
ucauguccccaaaccugcaa

SEQ ID NO: 3855961 - RNA, 16 nt, Human
ucaugugaaaucauuc

SEQ ID NO: 3855962 - RNA, 17 nt, Human
ucaugugacucuuucca

SEQ ID NO: 3855963 - RNA, 15 nt, Human
ucaugugauccuuuu

SEQ ID NO: 3855964 - RNA, 19 nt, Human
ucauguggaauauaaagau

SEQ ID NO: 3855965 - RNA, 14 nt, Human
ucauguguauaaaa

SEQ ID NO: 3855966 - RNA, 23 nt, Human
ucauguguguccacgacugucuc

SEQ ID NO: 3855967 - RNA, 15 nt, Human
ucauguguucccuuu

SEQ ID NO: 3855968 - RNA, 20 nt, Human
ucauguuaaccucugcuuuu

SEQ ID NO: 3855969 - RNA, 19 nt, Human
ucauguuaguaauaccucu

SEQ ID NO: 3855970 - RNA, 22 nt, Human
ucauguucccacuucaaaacaa

SEQ ID NO: 3855971 - RNA, 14 nt, Human
ucauguuccuucaa

SEQ ID NO: 3855972 - RNA, 22 nt, Human
ucauguugcacacccacucagc

SEQ ID NO: 3855973 - RNA, 13 nt, Human
ucauguuguuaaa

SEQ ID NO: 3855974 - RNA, 14 nt, Human
ucauguuuaagaaa

SEQ ID NO: 3855975 - RNA, 16 nt, Human
ucauguuuaagaaauu

SEQ ID NO: 3855976 - RNA, 17 nt, Human
ucauguuuacagaggac

SEQ ID NO: 3855977 - RNA, 23 nt, Human
ucauguuuauaacuauucaguug

SEQ ID NO: 3855978 - RNA, 15 nt, Human
ucauguuuaugaaaa

SEQ ID NO: 3855979 - RNA, 22 nt, Human
ucauguuuaugaaaauaaauag

SEQ ID NO: 3855980 - RNA, 17 nt, Human
ucauguuuaugagaaac

SEQ ID NO: 3855981 - RNA, 11 nt, Human
ucauguuucuu

SEQ ID NO: 3855982 - RNA, 14 nt, Human
ucauguuugcuuca

SEQ ID NO: 3855983 - RNA, 20 nt, Human
ucauguuugcuucauaaaug

SEQ ID NO: 3855984 - RNA, 21 nt, Human
ucauguuuggugcauagaacu

SEQ ID NO: 3855985 - RNA, 17 nt, Human
uuuugcaccccaugcug

SEQ ID NO: 3855986 - RNA, 16 nt, Human
uuuugcaccccuccca

SEQ ID NO: 3855987 - RNA, 13 nt, Human
uuuugcagaagag

SEQ ID NO: 3855988 - RNA, 15 nt, Human
uuuugcaguaacugu

SEQ ID NO: 3855989 - RNA, 21 nt, Human
uuuugcauaguucuagugcag

SEQ ID NO: 3855990 - RNA, 20 nt, Human
uuuugcaucucacaaacaua

SEQ ID NO: 3855991 - RNA, 15 nt, Human
uuuugcauucaaauu

SEQ ID NO: 3855992 - RNA, 19 nt, Human
uuuugccaauuugcacauu

SEQ ID NO: 3855993 - RNA, 22 nt, Human
uuuugccacuaauuuuaguauu

SEQ ID NO: 3855994 - RNA, 23 nt, Human
uuuugccauguuggccaggcugg

SEQ ID NO: 3855995 - RNA, 15 nt, Human
uuuugccauuaaacu

SEQ ID NO: 3855996 - RNA, 18 nt, Human
uuuugcccuucacagugu

SEQ ID NO: 3855997 - RNA, 17 nt, Human
uuuugccuucauuaccu

SEQ ID NO: 3855998 - RNA, 21 nt, Human
uuuugcgguucaggaaaauug

SEQ ID NO: 3855999 - RNA, 21 nt, Human
uuuugcuauuagacuguagga

SEQ ID NO: 3856000 - RNA, 15 nt, Human
uuuugcucuaaaaua

SEQ ID NO: 3856001 - RNA, 13 nt, Human
uuuugcugagacu

SEQ ID NO: 3856002 - RNA, 19 nt, Human
uuuugcugagacuaaucuu

SEQ ID NO: 3856003 - RNA, 14 nt, Human
uuuugcugcuucug

SEQ ID NO: 3856004 - RNA, 13 nt, Human
uuuugcuggaaua

SEQ ID NO: 3856005 - RNA, 23 nt, Human
uuuugcuuguuauauuaagcaga

SEQ ID NO: 3856006 - RNA, 13 nt, Human
uuuugcuuuaauu

SEQ ID NO: 3856007 - RNA, 17 nt, Human
uuuugcuuuaauuuuag

SEQ ID NO: 3856008 - RNA, 18 nt, Human
uuuugcuuuaauuuuagc

SEQ ID NO: 3856009 - RNA, 21 nt, Human
uuuugcuuucgaacugcuagu

SEQ ID NO: 3856010 - RNA, 19 nt, Human
uuuugcuuuuaauuaaaua

SEQ ID NO: 3856011 - RNA, 17 nt, Human
uuuuggaaagucagaau

SEQ ID NO: 3856012 - RNA, 16 nt, Human
uuuuggaaucuagaag

SEQ ID NO: 3856013 - RNA, 22 nt, Human
uuuuggaaucuagaagaaauga

SEQ ID NO: 3856014 - RNA, 17 nt, Human
uuuuggacuccaucucu

SEQ ID NO: 3856015 - RNA, 15 nt, Human
uuuuggacuuuguua

SEQ ID NO: 3856016 - RNA, 16 nt, Human
uuuuggauuguauauu

SEQ ID NO: 3856017 - RNA, 19 nt, Human
uuuuggcaaaacucuacuu

SEQ ID NO: 3856018 - RNA, 22 nt, Human
uuuuggcaaugacucaaagucu

SEQ ID NO: 3856019 - RNA, 19 nt, Human
uuuuggcacugagauauuu

SEQ ID NO: 3856020 - RNA, 21 nt, Human
uuuugggaaaugcugauuuaa

SEQ ID NO: 3856021 - RNA, 18 nt, Human
uuuugggaaguuaaaggg

SEQ ID NO: 3856022 - RNA, 12 nt, Human
uuuugggauguc

SEQ ID NO: 3856023 - RNA, 16 nt, Human
uuuuggggagccagaa

SEQ ID NO: 3856024 - RNA, 17 nt, Human
uuuuggguuuauuugga

SEQ ID NO: 3856025 - RNA, 19 nt, Human
uuuugguacuuauuacugc

SEQ ID NO: 3856026 - RNA, 16 nt, Human
uuuugguuuuguuccc

SEQ ID NO: 3856027 - RNA, 20 nt, Human
uuuugguuuuguuccccucc

SEQ ID NO: 3856028 - RNA, 16 nt, Human
uuuuguaaaauguauu

SEQ ID NO: 3856029 - RNA, 18 nt, Human
uuuuguaaaauguauuau

SEQ ID NO: 3856030 - RNA, 14 nt, Human
uuuuguaaacauuu

SEQ ID NO: 3856031 - RNA, 15 nt, Human
uuuuguaaacauuua

SEQ ID NO: 3856032 - RNA, 17 nt, Human
uuuuguaaacauuuauu

SEQ ID NO: 3856033 - RNA, 14 nt, Human
uuuuguaaaguuuc

SEQ ID NO: 3856034 - RNA, 14 nt, Human
uuuuguaagacaaa

SEQ ID NO: 3856035 - RNA, 15 nt, Human
uuuuguaagaugcug

SEQ ID NO: 3856036 - RNA, 16 nt, Human
uuuuguaauaagcaau

SEQ ID NO: 3856037 - RNA, 15 nt, Human
uuuuguaauuauugu

SEQ ID NO: 3856038 - RNA, 12 nt, Human
uuuuguacaucu

SEQ ID NO: 3856039 - RNA, 11 nt, Human
uuuuguaccag

SEQ ID NO: 3856040 - RNA, 14 nt, Human
uuuuguaccaguga

SEQ ID NO: 3856041 - RNA, 17 nt, Human
uuuuguacuguaaagag

SEQ ID NO: 3856042 - RNA, 23 nt, Human
uuuuguaggggucaaagaaaugc

SEQ ID NO: 3856043 - RNA, 15 nt, Human
uuuuguagguacuuu

SEQ ID NO: 3856044 - RNA, 14 nt, Human
uuuuguauaauugg

SEQ ID NO: 3856045 - RNA, 15 nt, Human
uuuuguauaauugua

SEQ ID NO: 3856046 - RNA, 19 nt, Human
uuuuguauacaaauauauu

SEQ ID NO: 3856047 - RNA, 21 nt, Human
uuuuguauacaaauauauugu

SEQ ID NO: 3856048 - RNA, 23 nt, Human
uuuuguaugaaauauaugugaaa

SEQ ID NO: 3856049 - RNA, 14 nt, Human
uuuuguauguaaau

SEQ ID NO: 3856050 - RNA, 17 nt, Human
uuuuguauguuaaagag

SEQ ID NO: 3856051 - RNA, 22 nt, Human
uuuuguauucaauuaaagaaau

SEQ ID NO: 3856052 - RNA, 17 nt, Human
uuuuguauucucugagc

SEQ ID NO: 3856053 - RNA, 10 nt, Human
uuuuguauuu

SEQ ID NO: 3856054 - RNA, 18 nt, Human
uuuuguauuuucaugaaa

SEQ ID NO: 3856055 - RNA, 15 nt, Human
uuuuguauuuuuaau

SEQ ID NO: 3856056 - RNA, 18 nt, Human
uuuugucacuuuuucuga

SEQ ID NO: 3856057 - RNA, 15 nt, Human
uuuugucuaauuaaa

SEQ ID NO: 3856058 - RNA, 11 nt, Human
uuuugucucug

SEQ ID NO: 3856059 - RNA, 12 nt, Human
uuuugucucugc

SEQ ID NO: 3856060 - RNA, 22 nt, Human
uuuugugaaaugaaaacaugua

SEQ ID NO: 3856061 - RNA, 22 nt, Human
uuuugugaaauuuuucauauuu

SEQ ID NO: 3856062 - RNA, 16 nt, Human
uuuugugaagcccugu

SEQ ID NO: 3856063 - RNA, 13 nt, Human
uuuugugagaugu

SEQ ID NO: 3856064 - RNA, 14 nt, Human
uuuugugaguuugu

SEQ ID NO: 3856065 - RNA, 17 nt, Human
uuuugugcauuaucuag

SEQ ID NO: 3856066 - RNA, 17 nt, Human
uuuugugguuuggaaua

SEQ ID NO: 3856067 - RNA, 17 nt, Human
uuuuguguaaugaaaau

SEQ ID NO: 3856068 - RNA, 13 nt, Human
uuuuguguccucc

SEQ ID NO: 3856069 - RNA, 18 nt, Human
uuuugugugaccaacugu

SEQ ID NO: 3856070 - RNA, 16 nt, Human
uuuuguguugaagagc

SEQ ID NO: 3856071 - RNA, 16 nt, Human
uuuuguuaacugauuu

SEQ ID NO: 3856072 - RNA, 10 nt, Human
uuuuguuacu

SEQ ID NO: 3856073 - RNA, 12 nt, Human
uuuuguuacugu

SEQ ID NO: 3856074 - RNA, 13 nt, Human
uuuuguuacuguu

SEQ ID NO: 3856075 - RNA, 14 nt, Human
uuuuguuacuguuc

SEQ ID NO: 3856076 - RNA, 16 nt, Human
uuuuguuacuguucuu

SEQ ID NO: 3856077 - RNA, 18 nt, Human
uuuuguuacuguucuugc

SEQ ID NO: 3856078 - RNA, 19 nt, Human
uuuuguuacuguucuugcu

SEQ ID NO: 3856079 - RNA, 17 nt, Human
uuuuguucauacauauu

SEQ ID NO: 3856080 - RNA, 24 nt, Human
uuuuguucauuucauccuuucacu

SEQ ID NO: 3856081 - RNA, 22 nt, Human
uuuuguucccauccucuucuuu

SEQ ID NO: 3856082 - RNA, 14 nt, Human
uuuuguuccccucc

SEQ ID NO: 3856083 - RNA, 15 nt, Human
uuuuguuccccuccu

SEQ ID NO: 3856084 - RNA, 23 nt, Human
uuuuguucgcauggucacacacu

SEQ ID NO: 3856085 - RNA, 22 nt, Human
uuuuguucuuacacauacaguu

SEQ ID NO: 3856086 - RNA, 13 nt, Human
uuuuguugacauu

SEQ ID NO: 3856087 - RNA, 19 nt, Human
uuuuguugauuaaaacauu

SEQ ID NO: 3856088 - RNA, 11 nt, Human
uuuuguugcac

SEQ ID NO: 3856089 - RNA, 21 nt, Human
uuuuguuggcauagcucuggg

SEQ ID NO: 3856090 - RNA, 13 nt, Human
uuuuguugugugu

SEQ ID NO: 3856091 - RNA, 23 nt, Human
uuuuguuguuucuuaauuuggaa

SEQ ID NO: 3856092 - RNA, 13 nt, Human
uuuuguuucugua

SEQ ID NO: 3856093 - RNA, 15 nt, Human
uuuuguuucuuccaa

SEQ ID NO: 3856094 - RNA, 20 nt, Human
uuuuguuugaugcaggcacu

SEQ ID NO: 3856095 - RNA, 22 nt, Human
uuuuguuugcuaucuuaauuuu

SEQ ID NO: 3856096 - RNA, 19 nt, Human
uuuuguuuggcaaggaaag

SEQ ID NO: 3856097 - RNA, 15 nt, Human
uuuuguuugguaaau

SEQ ID NO: 3856098 - RNA, 19 nt, Human
uuuuguuugguauuguauu

SEQ ID NO: 3856099 - RNA, 13 nt, Human
uuuuguuugguua

SEQ ID NO: 3856100 - RNA, 14 nt, Human
uuuuguuuguuucu

SEQ ID NO: 3856101 - RNA, 21 nt, Human
uuuuguuuguuucuuuguguu

SEQ ID NO: 3856102 - RNA, 13 nt, Human
uuuuguuuuacaa

SEQ ID NO: 3856103 - RNA, 20 nt, Human
uuuuguuuuuauuaaaagga

SEQ ID NO: 3856104 - RNA, 16 nt, Human
uuuuguuuuugucuua

SEQ ID NO: 3856105 - RNA, 16 nt, Human
uuuuguuuuuugaguc

SEQ ID NO: 3856106 - RNA, 17 nt, Human
uuuuuaaaaaaagaaaa

SEQ ID NO: 3856107 - RNA, 17 nt, Human
uuuuuaaaaaagcuuaa

SEQ ID NO: 3856108 - RNA, 18 nt, Human
uuuuuaaaaaauauuuuc

SEQ ID NO: 3856109 - RNA, 19 nt, Human
uuuuuaaaaaauauuuucu

SEQ ID NO: 3856110 - RNA, 14 nt, Human
uuuuuaaaaagcaa

SEQ ID NO: 3856111 - RNA, 23 nt, Human
uuuuuaaaaaucauaaacugugu

SEQ ID NO: 3856112 - RNA, 20 nt, Human
uuuuuaaaaaugcaaauccu

SEQ ID NO: 3856113 - RNA, 23 nt, Human
uuuuuaaaacacauguuuuuaua

SEQ ID NO: 3856114 - RNA, 19 nt, Human
uuuuuaaaaguuucaaugu

SEQ ID NO: 3856115 - RNA, 14 nt, Human
uuuuuaaaauagaa

SEQ ID NO: 3856116 - RNA, 14 nt, Human
uuuuuaaaauggug

SEQ ID NO: 3856117 - RNA, 15 nt, Human
uuuuuaaacuguaca

SEQ ID NO: 3856118 - RNA, 18 nt, Human
uuuuuaaacuguacagug

SEQ ID NO: 3856119 - RNA, 13 nt, Human
ucucacuugugcc

SEQ ID NO: 3856120 - RNA, 13 nt, Human
ucucacuuguuuc

SEQ ID NO: 3856121 - RNA, 17 nt, Human
ucucacuuuucuccaug

SEQ ID NO: 3856122 - RNA, 15 nt, Human
ucucagaagcacaga

SEQ ID NO: 3856123 - RNA, 16 nt, Human
ucucagaagcacagaa

SEQ ID NO: 3856124 - RNA, 20 nt, Human
ucucagaaggcaaaugacuu

SEQ ID NO: 3856125 - RNA, 22 nt, Human
ucucagaaggcaaaugacuuug

SEQ ID NO: 3856126 - RNA, 13 nt, Human
ucucagaagggag

SEQ ID NO: 3856127 - RNA, 12 nt, Human
ucucagaauccc

SEQ ID NO: 3856128 - RNA, 21 nt, Human
ucucagaaucccuuaacaguu

SEQ ID NO: 3856129 - RNA, 12 nt, Human
ucucagaaucua

SEQ ID NO: 3856130 - RNA, 16 nt, Human
ucucagacugcaugua

SEQ ID NO: 3856131 - RNA, 21 nt, Human
ucucagacuuuggaaaaugca

SEQ ID NO: 3856132 - RNA, 22 nt, Human
ucucagacuuuggaaaaugcau

SEQ ID NO: 3856133 - RNA, 17 nt, Human
ucucagacuuuuguaca

SEQ ID NO: 3856134 - RNA, 19 nt, Human
ucucagagcuacuugggcc

SEQ ID NO: 3856135 - RNA, 16 nt, Human
ucucagauauuuauau

SEQ ID NO: 3856136 - RNA, 14 nt, Human
ucucagauccuugu

SEQ ID NO: 3856137 - RNA, 16 nt, Human
ucucagauccuuguuu

SEQ ID NO: 3856138 - RNA, 18 nt, Human
ucucagauguuaaaauaa

SEQ ID NO: 3856139 - RNA, 17 nt, Human
ucucagauuuuauuaug

SEQ ID NO: 3856140 - RNA, 22 nt, Human
ucucagauuuuauuauguaaau

SEQ ID NO: 3856141 - RNA, 23 nt, Human
ucucagauuuuauuauguaaauc

SEQ ID NO: 3856142 - RNA, 14 nt, Human
ucucagcaagagaa

SEQ ID NO: 3856143 - RNA, 21 nt, Human
ucucagcaaugauuacucuuu

SEQ ID NO: 3856144 - RNA, 18 nt, Human
ucucagcagcgaccaccc

SEQ ID NO: 3856145 - RNA, 11 nt, Human
ucucagccucc

SEQ ID NO: 3856146 - RNA, 20 nt, Human
ucucagccuuacauuuguga

SEQ ID NO: 3856147 - RNA, 20 nt, Human
ucucagcucaucuucacugc

SEQ ID NO: 3856148 - RNA, 17 nt, Human
ucucagcucccccuguc

SEQ ID NO: 3856149 - RNA, 19 nt, Human
ucucagcucccccuguccc

SEQ ID NO: 3856150 - RNA, 13 nt, Human
ucucagcuuugag

SEQ ID NO: 3856151 - RNA, 17 nt, Human
ucucaggacacaggccu

SEQ ID NO: 3856152 - RNA, 18 nt, Human
ucucaggacacaggccug

SEQ ID NO: 3856153 - RNA, 21 nt, Human
ucucaggacacaggccugugu

SEQ ID NO: 3856154 - RNA, 16 nt, Human
ucucaggaccuaggga

SEQ ID NO: 3856155 - RNA, 16 nt, Human
ucucaggagauuucau

SEQ ID NO: 3856156 - RNA, 14 nt, Human
ucucaggagcacag

SEQ ID NO: 3856157 - RNA, 15 nt, Human
ucucaggagcacagg

SEQ ID NO: 3856158 - RNA, 16 nt, Human
ucucaggagcacaggc

SEQ ID NO: 3856159 - RNA, 19 nt, Human
ucucaggagcacaggcagc

SEQ ID NO: 3856160 - RNA, 15 nt, Human
ucucaggagcauggg

SEQ ID NO: 3856161 - RNA, 20 nt, Human
ucucaggaucaagaaagugu

SEQ ID NO: 3856162 - RNA, 13 nt, Human
ucucaggauccaa

SEQ ID NO: 3856163 - RNA, 22 nt, Human
ucucaggauccccucucuuccu

SEQ ID NO: 3856164 - RNA, 10 nt, Human
ucucaggcca

SEQ ID NO: 3856165 - RNA, 21 nt, Human
ucucaggccaccugcccccuu

SEQ ID NO: 3856166 - RNA, 13 nt, Human
ucucaggccagcu

SEQ ID NO: 3856167 - RNA, 17 nt, Human
ucucaggccagcugcuu

SEQ ID NO: 3856168 - RNA, 18 nt, Human
ucucaggccagcugcuug

SEQ ID NO: 3856169 - RNA, 21 nt, Human
ucucaggccagcugcuugggc

SEQ ID NO: 3856170 - RNA, 20 nt, Human
ucucaggccggcagccccag

SEQ ID NO: 3856171 - RNA, 13 nt, Human
ucucaggcugccu

SEQ ID NO: 3856172 - RNA, 16 nt, Human
ucucaggcugccugag

SEQ ID NO: 3856173 - RNA, 16 nt, Human
ucucagggaagcccag

SEQ ID NO: 3856174 - RNA, 17 nt, Human
ucucagggaagcccagc

SEQ ID NO: 3856175 - RNA, 14 nt, Human
ucucagggccaggc

SEQ ID NO: 3856176 - RNA, 17 nt, Human
ucucagggccaggccuc

SEQ ID NO: 3856177 - RNA, 15 nt, Human
ucucagggccugguc

SEQ ID NO: 3856178 - RNA, 11 nt, Human
ucucagggcuc

SEQ ID NO: 3856179 - RNA, 12 nt, Human
ucucagggcucc

SEQ ID NO: 3856180 - RNA, 16 nt, Human
ucucagggcuccugcc

SEQ ID NO: 3856181 - RNA, 17 nt, Human
ucucaggggccagagga

SEQ ID NO: 3856182 - RNA, 20 nt, Human
ucucaggggccagaggaacu

SEQ ID NO: 3856183 - RNA, 18 nt, Human
ucucagggucucugcugc

SEQ ID NO: 3856184 - RNA, 19 nt, Human
ucucagggucucugcugcc

SEQ ID NO: 3856185 - RNA, 17 nt, Human
ucucaguacuuuggagg

SEQ ID NO: 3856186 - RNA, 16 nt, Human
ucucagucaugcauaa

SEQ ID NO: 3856187 - RNA, 15 nt, Human
ucucagucucugagc

SEQ ID NO: 3856188 - RNA, 17 nt, Human
ucucagucucugagcag

SEQ ID NO: 3856189 - RNA, 18 nt, Human
ucucagucucugagcagu

SEQ ID NO: 3856190 - RNA, 21 nt, Human
ucucagugccaacuguggcug

SEQ ID NO: 3856191 - RNA, 16 nt, Human
ucucagugcccuccag

SEQ ID NO: 3856192 - RNA, 22 nt, Human
ucucagugguuaagauuccuaa

SEQ ID NO: 3856193 - RNA, 18 nt, Human
ucucaguguugagccuuu

SEQ ID NO: 3856194 - RNA, 22 nt, Human
ucucaguguugagccuuuuccc

SEQ ID NO: 3856195 - RNA, 13 nt, Human
ucucaguguuggu

SEQ ID NO: 3856196 - RNA, 14 nt, Human
ucucaguguuggua

SEQ ID NO: 3856197 - RNA, 15 nt, Human
ucucaguguuuugga

SEQ ID NO: 3856198 - RNA, 21 nt, Human
ucucaguuaaaaugugaggaa

SEQ ID NO: 3856199 - RNA, 13 nt, Human
ucucaguuucacu

SEQ ID NO: 3856200 - RNA, 19 nt, Human
ucucaguuugugugucuua

SEQ ID NO: 3856201 - RNA, 12 nt, Human
ucucaguuuuuc

SEQ ID NO: 3856202 - RNA, 18 nt, Human
ucucaguuuuucuuaaua

SEQ ID NO: 3856203 - RNA, 13 nt, Human
ucucauaaauuua

SEQ ID NO: 3856204 - RNA, 23 nt, Human
ucucauaauuuauacaggucaua

SEQ ID NO: 3856205 - RNA, 15 nt, Human
ucucauacguccacc

SEQ ID NO: 3856206 - RNA, 21 nt, Human
ucucauacucccccacaguuu

SEQ ID NO: 3856207 - RNA, 18 nt, Human
ucucaucacacacaugga

SEQ ID NO: 3856208 - RNA, 19 nt, Human
ucucaucacuccccuccaa

SEQ ID NO: 3856209 - RNA, 15 nt, Human
ucucaucaguguccu

SEQ ID NO: 3856210 - RNA, 15 nt, Human
ucucaucaugucuau

SEQ ID NO: 3856211 - RNA, 19 nt, Human
ucucaucucagugaagaau

SEQ ID NO: 3856212 - RNA, 20 nt, Human
ucucaucucuuagcuccccu

SEQ ID NO: 3856213 - RNA, 18 nt, Human
ucucaucucuucuuuuaa

SEQ ID NO: 3856214 - RNA, 12 nt, Human
ucucaucuuucu

SEQ ID NO: 3856215 - RNA, 13 nt, Human
ucucaugaaccuc

SEQ ID NO: 3856216 - RNA, 14 nt, Human
ucucaugaaucugc

SEQ ID NO: 3856217 - RNA, 20 nt, Human
ucucaugaggggagaggaga

SEQ ID NO: 3856218 - RNA, 21 nt, Human
ucucaugccccuggcugggac

SEQ ID NO: 3856219 - RNA, 15 nt, Human
ucucaugcuccuuaa

SEQ ID NO: 3856220 - RNA, 13 nt, Human
ucucaugcugccc

SEQ ID NO: 3856221 - RNA, 15 nt, Human
ucucauggagaaguu

SEQ ID NO: 3856222 - RNA, 17 nt, Human
ucucaugugauccuuuu

SEQ ID NO: 3856223 - RNA, 13 nt, Human
ucugccugucccu

SEQ ID NO: 3856224 - RNA, 18 nt, Human
ucugccugucccucucag

SEQ ID NO: 3856225 - RNA, 11 nt, Human
ucugccuguga

SEQ ID NO: 3856226 - RNA, 16 nt, Human
ucugccuguggaacug

SEQ ID NO: 3856227 - RNA, 15 nt, Human
ucugccuguuauaac

SEQ ID NO: 3856228 - RNA, 22 nt, Human
ucugccuguuauaacucugcac

SEQ ID NO: 3856229 - RNA, 16 nt, Human
ucugccuguugcguga

SEQ ID NO: 3856230 - RNA, 16 nt, Human
ucugccuuagaggagc

SEQ ID NO: 3856231 - RNA, 13 nt, Human
ucugccuuccuug

SEQ ID NO: 3856232 - RNA, 16 nt, Human
ucugccuuuauugugu

SEQ ID NO: 3856233 - RNA, 14 nt, Human
ucugccuuugacau

SEQ ID NO: 3856234 - RNA, 14 nt, Human
aagcaccccuucau

SEQ ID NO: 3856235 - RNA, 15 nt, Human
aagcacgaaauguua

SEQ ID NO: 3856236 - RNA, 21 nt, Human
aagcacgugguaaaacacuug

SEQ ID NO: 3856237 - RNA, 23 nt, Human
aagcacuacaccuugccuugcug

SEQ ID NO: 3856238 - RNA, 21 nt, Human
aagcacuccucccugauguac

SEQ ID NO: 3856239 - RNA, 23 nt, Human
aagcacuccucccugauguacag

SEQ ID NO: 3856240 - RNA, 23 nt, Human
aagcacuccugcuuaaucuucaa

SEQ ID NO: 3856241 - RNA, 22 nt, Human
aagcacugacugggaccaggca

SEQ ID NO: 3856242 - RNA, 16 nt, Human
aagcacugacuucuaa

SEQ ID NO: 3856243 - RNA, 20 nt, Human
aagcacugacuucuaaguaa

SEQ ID NO: 3856244 - RNA, 12 nt, Human
aagcacugagca

SEQ ID NO: 3856245 - RNA, 20 nt, Human
aagcagaaaauaaaggaagc

SEQ ID NO: 3856246 - RNA, 17 nt, Human
aagcagaaagugccuuu

SEQ ID NO: 3856247 - RNA, 19 nt, Human
aagcagaaagugccuuuca

SEQ ID NO: 3856248 - RNA, 16 nt, Human
aagcagaaauccaagc

SEQ ID NO: 3856249 - RNA, 22 nt, Human
aagcagaaauccugcaaugaaa

SEQ ID NO: 3856250 - RNA, 11 nt, Human
aagcagaauaa

SEQ ID NO: 3856251 - RNA, 12 nt, Human
aagcagaauaaa

SEQ ID NO: 3856252 - RNA, 14 nt, Human
aagcagaauuggaa

SEQ ID NO: 3856253 - RNA, 16 nt, Human
aagcagaauuggaaaa

SEQ ID NO: 3856254 - RNA, 15 nt, Human
aagcagacagcucca

SEQ ID NO: 3856255 - RNA, 14 nt, Human
aagcagaggaagga

SEQ ID NO: 3856256 - RNA, 14 nt, Human
aagcagaggagggg

SEQ ID NO: 3856257 - RNA, 22 nt, Human
aagcagaggaggggccgcugcc

SEQ ID NO: 3856258 - RNA, 17 nt, Human
aagcagagugcacagcu

SEQ ID NO: 3856259 - RNA, 20 nt, Human
aagcagagugcacagcuguc

SEQ ID NO: 3856260 - RNA, 14 nt, Human
aagcagaguuuuca

SEQ ID NO: 3856261 - RNA, 15 nt, Human
aagcagaguuuucau

SEQ ID NO: 3856262 - RNA, 14 nt, Human
aagcagaugcaaag

SEQ ID NO: 3856263 - RNA, 16 nt, Human
aagcagaugcaaagag

SEQ ID NO: 3856264 - RNA, 18 nt, Human
aagcagaugcaaagaggc

SEQ ID NO: 3856265 - RNA, 19 nt, Human
aagcagaugcaaagaggca

SEQ ID NO: 3856266 - RNA, 21 nt, Human
aagcagaugcaaagaggcaag

SEQ ID NO: 3856267 - RNA, 20 nt, Human
aagcagauggaaugcugugu

SEQ ID NO: 3856268 - RNA, 14 nt, Human
aagcagcaacuauu

SEQ ID NO: 3856269 - RNA, 16 nt, Human
aagcagcacuuauaaa

SEQ ID NO: 3856270 - RNA, 12 nt, Human
aagcagcagccu

SEQ ID NO: 3856271 - RNA, 17 nt, Human
aagcagcauaaagaauu

SEQ ID NO: 3856272 - RNA, 21 nt, Human
aagcagccaagcuccuuggga

SEQ ID NO: 3856273 - RNA, 13 nt, Human
aagcagcccuugg

SEQ ID NO: 3856274 - RNA, 16 nt, Human
aagcagcccuuggcca

SEQ ID NO: 3856275 - RNA, 17 nt, Human
aagcagcccuuggccag

SEQ ID NO: 3856276 - RNA, 22 nt, Human
aagcagccucuccccaggucca

SEQ ID NO: 3856277 - RNA, 19 nt, Human
aagcagcgaccgcccccuc

SEQ ID NO: 3856278 - RNA, 20 nt, Human
aagcagcguuucuaugacac

SEQ ID NO: 3856279 - RNA, 21 nt, Human
aagcagcguuucuaugacaca

SEQ ID NO: 3856280 - RNA, 19 nt, Human
aagcagcucaaaggcacag

SEQ ID NO: 3856281 - RNA, 13 nt, Human
aagcagcucuccc

SEQ ID NO: 3856282 - RNA, 17 nt, Human
aagcagcucuugcuaau

SEQ ID NO: 3856283 - RNA, 18 nt, Human
aagcaggagacgacaggc

SEQ ID NO: 3856284 - RNA, 21 nt, Human
aagcaggaggaggugccaaca

SEQ ID NO: 3856285 - RNA, 22 nt, Human
aagcaggcuacacugacacugg

SEQ ID NO: 3856286 - RNA, 21 nt, Human
aagcaggcuugcccaguacau

SEQ ID NO: 3856287 - RNA, 22 nt, Human
aagcagggaauuucuaucuaaa

SEQ ID NO: 3856288 - RNA, 12 nt, Human
aagcagggagga

SEQ ID NO: 3856289 - RNA, 20 nt, Human
aagcaggggcuacaagaggg

SEQ ID NO: 3856290 - RNA, 14 nt, Human
aagcagguuaaaug

SEQ ID NO: 3856291 - RNA, 21 nt, Human
aagcagguuagagaaaauaga

SEQ ID NO: 3856292 - RNA, 15 nt, Human
aagcagguugauaaa

SEQ ID NO: 3856293 - RNA, 16 nt, Human
aagcagguuucaagga

SEQ ID NO: 3856294 - RNA, 17 nt, Human
aagcagguuucaaggaa

SEQ ID NO: 3856295 - RNA, 15 nt, Human
aagcaguauuuuggu

SEQ ID NO: 3856296 - RNA, 17 nt, Human
aagcagucgugccugug

SEQ ID NO: 3856297 - RNA, 18 nt, Human
aagcagucgugccugugu

SEQ ID NO: 3856298 - RNA, 14 nt, Human
aagcagugcaugcu

SEQ ID NO: 3856299 - RNA, 20 nt, Human
aagcagugcaugcugucccu

SEQ ID NO: 3856300 - RNA, 15 nt, Human
aagcagugccuucca

SEQ ID NO: 3856301 - RNA, 17 nt, Human
aagcagugccuuccaua

SEQ ID NO: 3856302 - RNA, 20 nt, Human
aagcagugccuuccauaauu

SEQ ID NO: 3856303 - RNA, 15 nt, Human
aagcaguugugucag

SEQ ID NO: 3856304 - RNA, 22 nt, Human
aagcauaaaaacauuuuaaaaa

SEQ ID NO: 3856305 - RNA, 22 nt, Human
aagcauaaaagaugaaagagca

SEQ ID NO: 3856306 - RNA, 23 nt, Human
aagcauaaaagaugaaagagcag

SEQ ID NO: 3856307 - RNA, 22 nt, Human
aagcauaaaauucuuaaaauau

SEQ ID NO: 3856308 - RNA, 14 nt, Human
aagcauacuuugua

SEQ ID NO: 3856309 - RNA, 21 nt, Human
aagcauagauaauauuguuug

SEQ ID NO: 3856310 - RNA, 14 nt, Human
aagcauagauguuu

SEQ ID NO: 3856311 - RNA, 15 nt, Human
aagcauauaaaaugg

SEQ ID NO: 3856312 - RNA, 22 nt, Human
aagcauauaaaauggcaacaaa

SEQ ID NO: 3856313 - RNA, 19 nt, Human
aagcauauggguuagaugu

SEQ ID NO: 3856314 - RNA, 17 nt, Human
aagcauauuguuauuau

SEQ ID NO: 3856315 - RNA, 23 nt, Human
aagcauauuguuauuauauaauu

SEQ ID NO: 3856316 - RNA, 18 nt, Human
aagcaucagggggaagaa

SEQ ID NO: 3856317 - RNA, 23 nt, Human
aagcaucagggggaagaagcaga

SEQ ID NO: 3856318 - RNA, 15 nt, Human
aagcaucauuauuua

SEQ ID NO: 3856319 - RNA, 17 nt, Human
aagcaucauuauuuaug

SEQ ID NO: 3856320 - RNA, 19 nt, Human
aagcaucauuauuuaugua

SEQ ID NO: 3856321 - RNA, 23 nt, Human
aagcaucauuauuuauguauugu

SEQ ID NO: 3856322 - RNA, 22 nt, Human
aagcaucauuauuugcagagac

SEQ ID NO: 3856323 - RNA, 13 nt, Human
aagcauccaggca

SEQ ID NO: 3856324 - RNA, 14 nt, Human
aagcauccaugugu

SEQ ID NO: 3856325 - RNA, 21 nt, Human
aagcauccauguguggacuca

SEQ ID NO: 3856326 - RNA, 18 nt, Human
aagcaucggagggaauug

SEQ ID NO: 3856327 - RNA, 15 nt, Human
aagcaucuaaggaca

SEQ ID NO: 3856328 - RNA, 18 nt, Human
aagcaucuaaguuauaag

SEQ ID NO: 3856329 - RNA, 12 nt, Human
aagcaucuccug

SEQ ID NO: 3856330 - RNA, 20 nt, Human
aagcaucuuggggggguggc

SEQ ID NO: 3856331 - RNA, 14 nt, Human
aagcaugaaaugug

SEQ ID NO: 3856332 - RNA, 20 nt, Human
aagcaugaacagugcaccug

SEQ ID NO: 3856333 - RNA, 15 nt, Human
aagcaugaagauaaa

SEQ ID NO: 3856334 - RNA, 18 nt, Human
aagcaugacagaaaauau

SEQ ID NO: 3856335 - RNA, 20 nt, Human
aagcaugacagaaaauaugu

SEQ ID NO: 3856336 - RNA, 23 nt, Human
aagcaugcacaaauucugucucu

SEQ ID NO: 3856337 - RNA, 21 nt, Human
aagcaugcuugugaaaaugug

SEQ ID NO: 3856338 - RNA, 19 nt, Human
aagcauggacauuuagaag

SEQ ID NO: 3856339 - RNA, 23 nt, Human
aagcauggucccacaucccuggg

SEQ ID NO: 3856340 - RNA, 19 nt, Human
aagcauguaacuuauauua

SEQ ID NO: 3856341 - RNA, 15 nt, Human
aagcauguacagugu

SEQ ID NO: 3856342 - RNA, 17 nt, Human
aagcauguacaguguuc

SEQ ID NO: 3856343 - RNA, 21 nt, Human
aagcauguacaguguucuguu

SEQ ID NO: 3856344 - RNA, 16 nt, Human
aagcauguaggagaau

SEQ ID NO: 3856345 - RNA, 17 nt, Human
aagcaugucucaauagu

SEQ ID NO: 3856346 - RNA, 19 nt, Human
aagcauguggcauguucau

SEQ ID NO: 3856347 - RNA, 14 nt, Human
aagcauguuucaug

SEQ ID NO: 3856348 - RNA, 16 nt, Human
aagcauguuucauguu

SEQ ID NO: 3856349 - RNA, 17 nt, Human
aagcauuaacuucucug

SEQ ID NO: 3856350 - RNA, 23 nt, Human
aagcauuacucuuguaagauuuu

SEQ ID NO: 3856351 - RNA, 21 nt, Human
aagcauucagaagaaaaagaa

SEQ ID NO: 3856352 - RNA, 18 nt, Human
aagcauuccuucuuugau

SEQ ID NO: 3856353 - RNA, 21 nt, Human
aagcauuccuucuuugauaau

SEQ ID NO: 3856354 - RNA, 22 nt, Human
aagcauucucauuggaaauuua

SEQ ID NO: 3856355 - RNA, 13 nt, Human
aagcauugccugg

SEQ ID NO: 3856356 - RNA, 21 nt, Human
aagcauugccuggccuuccug

SEQ ID NO: 3856357 - RNA, 18 nt, Human
aagcauuguaaaauaauu

SEQ ID NO: 3856358 - RNA, 14 nt, Human
aagcauuguuugcu

SEQ ID NO: 3856359 - RNA, 22 nt, Human
aagcauuguuugcuuauuguuc

SEQ ID NO: 3856360 - RNA, 23 nt, Human
aagcauuguuugcuuauuguucc

SEQ ID NO: 3856361 - RNA, 21 nt, Human
aagcauuuaaccccccuguac

SEQ ID NO: 3856362 - RNA, 19 nt, Human
aagcauuuaauguagccau

SEQ ID NO: 3856363 - RNA, 23 nt, Human
aagcauuuaauguagccauggga

SEQ ID NO: 3856364 - RNA, 18 nt, Human
aagcauuuacaagugcug

SEQ ID NO: 3856365 - RNA, 12 nt, Human
aagcauuuauaa

SEQ ID NO: 3856366 - RNA, 12 nt, Human
ucuuaauuauua

SEQ ID NO: 3856367 - RNA, 17 nt, Human
ucuuaauuauuauaaaa

SEQ ID NO: 3856368 - RNA, 18 nt, Human
ucuuaauuauuauaaaaa

SEQ ID NO: 3856369 - RNA, 22 nt, Human
ucuuaauuauuauaaaaauauu

SEQ ID NO: 3856370 - RNA, 23 nt, Human
ucuuaauuuaaucuuuuuuaugu

SEQ ID NO: 3856371 - RNA, 17 nt, Human
ucuuaauuucuaucuug

SEQ ID NO: 3856372 - RNA, 12 nt, Human
ucuuaauuugga

SEQ ID NO: 3856373 - RNA, 13 nt, Human
ucuuaauuuggaa

SEQ ID NO: 3856374 - RNA, 16 nt, Human
ucuuaauuuggaaacu

SEQ ID NO: 3856375 - RNA, 19 nt, Human
ucuuaauuuggaaacuaau

SEQ ID NO: 3856376 - RNA, 16 nt, Human
ucuuacacauacaguu

SEQ ID NO: 3856377 - RNA, 17 nt, Human
ucuuacaggcacaaaau

SEQ ID NO: 3856378 - RNA, 15 nt, Human
ucuuacauguuuucu

SEQ ID NO: 3856379 - RNA, 16 nt, Human
ucuuacccaauuuccc

SEQ ID NO: 3856380 - RNA, 21 nt, Human
ucuuacccuucugugcccagc

SEQ ID NO: 3856381 - RNA, 23 nt, Human
ucuuaccuguaugucuccaguau

SEQ ID NO: 3856382 - RNA, 20 nt, Human
ucuuaccuugaacugaaggc

SEQ ID NO: 3856383 - RNA, 15 nt, Human
ucuuacgaauauuuu

SEQ ID NO: 3856384 - RNA, 17 nt, Human
ucuuacuaaaaaguaua

SEQ ID NO: 3856385 - RNA, 16 nt, Human
ucuuacuaaacauuuu

SEQ ID NO: 3856386 - RNA, 14 nt, Human
ucuuacuaauguaa

SEQ ID NO: 3856387 - RNA, 21 nt, Human
ucuuacuaauguaaaaugauu

SEQ ID NO: 3856388 - RNA, 15 nt, Human
ucuuacuauuucaca

SEQ ID NO: 3856389 - RNA, 18 nt, Human
ucuuacuccuccucuuuc

SEQ ID NO: 3856390 - RNA, 13 nt, Human
ucuuacucuuucc

SEQ ID NO: 3856391 - RNA, 15 nt, Human
ucuuacucuuuccua

SEQ ID NO: 3856392 - RNA, 16 nt, Human
ucuuacucuuuccuau

SEQ ID NO: 3856393 - RNA, 23 nt, Human
ucuuacugaagguaaaauugaaa

SEQ ID NO: 3856394 - RNA, 16 nt, Human
ucuuacugauaauuuu

SEQ ID NO: 3856395 - RNA, 13 nt, Human
ucuuacugcaaau

SEQ ID NO: 3856396 - RNA, 22 nt, Human
ucuuacugcuuaauucaaauaa

SEQ ID NO: 3856397 - RNA, 19 nt, Human
ucuuacugucuuuuuucua

SEQ ID NO: 3856398 - RNA, 16 nt, Human
ucuuacuuuguaaauu

SEQ ID NO: 3856399 - RNA, 15 nt, Human
ucuuagaaaagguga

SEQ ID NO: 3856400 - RNA, 12 nt, Human
ucuuagaaauuu

SEQ ID NO: 3856401 - RNA, 21 nt, Human
ucuuagaacaguggaaacuau

SEQ ID NO: 3856402 - RNA, 19 nt, Human
ucuuagaaguggaccagga

SEQ ID NO: 3856403 - RNA, 14 nt, Human
ucuuagacuacauu

SEQ ID NO: 3856404 - RNA, 20 nt, Human
ucuuagacuacauuuagaga

SEQ ID NO: 3856405 - RNA, 15 nt, Human
ucuuagacuucugcu

SEQ ID NO: 3856406 - RNA, 18 nt, Human
ucuuagacuugaaauacu

SEQ ID NO: 3856407 - RNA, 17 nt, Human
ucuuagacuuuuccaau

SEQ ID NO: 3856408 - RNA, 23 nt, Human
ucuuagacuuuuccaauauguga

SEQ ID NO: 3856409 - RNA, 17 nt, Human
ucuuagauaucuuuuua

SEQ ID NO: 3856410 - RNA, 23 nt, Human
ucuuagauaucuuuuuauugaug

SEQ ID NO: 3856411 - RNA, 12 nt, Human
ucuuagauucuc

SEQ ID NO: 3856412 - RNA, 21 nt, Human
ucuuagauucucugugucuaa

SEQ ID NO: 3856413 - RNA, 15 nt, Human
ucuuagccuguggca

SEQ ID NO: 3856414 - RNA, 22 nt, Human
ucuuagccuguggcaguaaaga

SEQ ID NO: 3856415 - RNA, 15 nt, Human
ucuucagggggccag

SEQ ID NO: 3856416 - RNA, 18 nt, Human
ucuucaguugguguguuu

SEQ ID NO: 3856417 - RNA, 21 nt, Human
ucuucaguugguugugucuuu

SEQ ID NO: 3856418 - RNA, 20 nt, Human
ucuucauaacaauuuuagga

SEQ ID NO: 3856419 - RNA, 18 nt, Human
ucuucauaccuacaugua

SEQ ID NO: 3856420 - RNA, 13 nt, Human
ucuucauacuuuu

SEQ ID NO: 3856421 - RNA, 13 nt, Human
ucuucaugaaaug

SEQ ID NO: 3856422 - RNA, 14 nt, Human
ucuucaugcaauga

SEQ ID NO: 3856423 - RNA, 22 nt, Human
ucuucauggaauucacaaagua

SEQ ID NO: 3856424 - RNA, 16 nt, Human
ucuucauguucccacu

SEQ ID NO: 3856425 - RNA, 21 nt, Human
ucuucauuaagcccucuucca

SEQ ID NO: 3856426 - RNA, 17 nt, Human
ucuucauuauucucugc

SEQ ID NO: 3856427 - RNA, 17 nt, Human
ucuucauuucauuguau

SEQ ID NO: 3856428 - RNA, 21 nt, Human
ucuuccaaagcagagagcauu

SEQ ID NO: 3856429 - RNA, 20 nt, Human
ucuuccaaaguaaaauugcu

SEQ ID NO: 3856430 - RNA, 17 nt, Human
ucuuccaaccauuuauc

SEQ ID NO: 3856431 - RNA, 19 nt, Human
ucuuccaaccauuuaucuu

SEQ ID NO: 3856432 - RNA, 22 nt, Human
ucuuccaaccauuuaucuugaa

SEQ ID NO: 3856433 - RNA, 21 nt, Human
ucuuccaagacuccagcccug

SEQ ID NO: 3856434 - RNA, 24 nt, Human
ucuuccaagcaaaggugaagagac

SEQ ID NO: 3856435 - RNA, 23 nt, Human
ucuuccacaaagaaaauuccuau

SEQ ID NO: 3856436 - RNA, 16 nt, Human
ucuuccagaaguguga

SEQ ID NO: 3856437 - RNA, 19 nt, Human
ucuuccaggcccccaaccc

SEQ ID NO: 3856438 - RNA, 14 nt, Human
ucuuccagggggaa

SEQ ID NO: 3856439 - RNA, 22 nt, Human
ucuuccaguuugcuuugcccuu

SEQ ID NO: 3856440 - RNA, 19 nt, Human
ucuuccauaugaccucaug

SEQ ID NO: 3856441 - RNA, 22 nt, Human
ucuuccauauggauccacuggc

SEQ ID NO: 3856442 - RNA, 13 nt, Human
ucuuccaucaugg

SEQ ID NO: 3856443 - RNA, 19 nt, Human
ucuuccaucauguccccaa

SEQ ID NO: 3856444 - RNA, 15 nt, Human
ucuuccaugcugugc

SEQ ID NO: 3856445 - RNA, 17 nt, Human
ucuuccaugcugugcgc

SEQ ID NO: 3856446 - RNA, 13 nt, Human
ucuuccauuugca

SEQ ID NO: 3856447 - RNA, 23 nt, Human
ucuucccagcacuaugcuuuccu

SEQ ID NO: 3856448 - RNA, 21 nt, Human
ucuucccaggguagcccgccu

SEQ ID NO: 3856449 - RNA, 17 nt, Human
ucuucccaugcauucug

SEQ ID NO: 3856450 - RNA, 14 nt, Human
ucuucccauggugc

SEQ ID NO: 3856451 - RNA, 19 nt, Human
ucuucccauucuccauuug

SEQ ID NO: 3856452 - RNA, 20 nt, Human
ucuuccccaacgaaaagcac

SEQ ID NO: 3856453 - RNA, 15 nt, Human
ugaaaaguuuuuguu

SEQ ID NO: 3856454 - RNA, 15 nt, Human
ugaaaauaaagaaug

SEQ ID NO: 3856455 - RNA, 16 nt, Human
ugaaaauaaagaaugg

SEQ ID NO: 3856456 - RNA, 17 nt, Human
ugaaaauaaagaaugga

SEQ ID NO: 3856457 - RNA, 14 nt, Human
ugaaaauaagccau

SEQ ID NO: 3856458 - RNA, 18 nt, Human
ugaaaauaaucucugauu

SEQ ID NO: 3856459 - RNA, 17 nt, Human
ugaaaauaaugcuguuc

SEQ ID NO: 3856460 - RNA, 12 nt, Human
ugaaaauacaac

SEQ ID NO: 3856461 - RNA, 23 nt, Human
ugaaaauaguuuauuuuaaaaca

SEQ ID NO: 3856462 - RNA, 16 nt, Human
ugaaaauauaaccagc

SEQ ID NO: 3856463 - RNA, 17 nt, Human
ugaaaauauaugauggc

SEQ ID NO: 3856464 - RNA, 23 nt, Human
ugaaaauaucugcucaaaacuuu

SEQ ID NO: 3856465 - RNA, 20 nt, Human
ugaaaauaugauguuucaca

SEQ ID NO: 3856466 - RNA, 15 nt, Human
ugaaaauccuaccaa

SEQ ID NO: 3856467 - RNA, 14 nt, Human
ugaaaaucuaauau

SEQ ID NO: 3856468 - RNA, 15 nt, Human
ugaaaaucuaauauu

SEQ ID NO: 3856469 - RNA, 17 nt, Human
ugaaaaucuaauauuaa

SEQ ID NO: 3856470 - RNA, 21 nt, Human
ugaaaaucuaauauuaaaaau

SEQ ID NO: 3856471 - RNA, 20 nt, Human
ugaaaaucuuauaauuuaaa

SEQ ID NO: 3856472 - RNA, 14 nt, Human
ugaaaaucuuggag

SEQ ID NO: 3856473 - RNA, 17 nt, Human
ugaaaaugaguugugaa

SEQ ID NO: 3856474 - RNA, 18 nt, Human
ugaaaaugcaacaacaug

SEQ ID NO: 3856475 - RNA, 20 nt, Human
ugaaaaugcaacaacaugua

SEQ ID NO: 3856476 - RNA, 12 nt, Human
ugaaaaugcugg

SEQ ID NO: 3856477 - RNA, 21 nt, Human
ugaaaaugguauuuucccccu

SEQ ID NO: 3856478 - RNA, 20 nt, Human
ugaaaauguccaggaaagug

SEQ ID NO: 3856479 - RNA, 17 nt, Human
ugaaaauguccuuguga

SEQ ID NO: 3856480 - RNA, 23 nt, Human
ugaaaauguccuugugaugugca

SEQ ID NO: 3856481 - RNA, 14 nt, Human
ugaaaaugucuugu

SEQ ID NO: 3856482 - RNA, 20 nt, Human
ugaaaaugugcuauacugca

SEQ ID NO: 3856483 - RNA, 14 nt, Human
ugaaaauguguguu

SEQ ID NO: 3856484 - RNA, 11 nt, Human
ugaaaauguua

SEQ ID NO: 3856485 - RNA, 16 nt, Human
ugaaaauguuguuaug

SEQ ID NO: 3856486 - RNA, 14 nt, Human
ugaaaauuaacacu

SEQ ID NO: 3856487 - RNA, 18 nt, Human
ugaaaauuaacacugcuu

SEQ ID NO: 3856488 - RNA, 14 nt, Human
ugaaaauuaacaug

SEQ ID NO: 3856489 - RNA, 14 nt, Human
ugaaaauuauuuaa

SEQ ID NO: 3856490 - RNA, 19 nt, Human
ugaaaauuauuuuguucau

SEQ ID NO: 3856491 - RNA, 22 nt, Human
ugaaaauucauaguaagauuga

SEQ ID NO: 3856492 - RNA, 13 nt, Human
ugaaaauugaaaa

SEQ ID NO: 3856493 - RNA, 16 nt, Human
ugaaaauugaaaagua

SEQ ID NO: 3856494 - RNA, 18 nt, Human
ugaaaauugccuuucugu

SEQ ID NO: 3856495 - RNA, 22 nt, Human
ugaaaauuguuuagugauauua

SEQ ID NO: 3856496 - RNA, 13 nt, Human
ugaaaauuugaga

SEQ ID NO: 3856497 - RNA, 12 nt, Human
ugaaaauuuuga

SEQ ID NO: 3856498 - RNA, 14 nt, Human
ugaaacaaagaagg

SEQ ID NO: 3856499 - RNA, 23 nt, Human
ugaaacaaagaguucaagaaaua

SEQ ID NO: 3856500 - RNA, 19 nt, Human
ugaaacaacuuucucuugu

SEQ ID NO: 3856501 - RNA, 17 nt, Human
ugaaacaagaagccaca

SEQ ID NO: 3856502 - RNA, 21 nt, Human
ugaaacaagauaacugagaau

SEQ ID NO: 3856503 - RNA, 23 nt, Human
ugaaacaauacucauaaugugaa

SEQ ID NO: 3856504 - RNA, 19 nt, Human
ugaaacacaccaggcugug

SEQ ID NO: 3856505 - RNA, 15 nt, Human
ugaaacacagcuguu

SEQ ID NO: 3856506 - RNA, 19 nt, Human
ugaaacacgaaacuuguua

SEQ ID NO: 3856507 - RNA, 21 nt, Human
ugaaacacgaaacuuguuauu

SEQ ID NO: 3856508 - RNA, 20 nt, Human
ugaaacacuuugccuccugu

SEQ ID NO: 3856509 - RNA, 23 nt, Human
ugaaacacuuugccuccugugua

SEQ ID NO: 3856510 - RNA, 15 nt, Human
ugaaacacuuuuuug

SEQ ID NO: 3856511 - RNA, 13 nt, Human
ugaaacagaaaca

SEQ ID NO: 3856512 - RNA, 14 nt, Human
ugaaacagauuuca

SEQ ID NO: 3856513 - RNA, 24 nt, Human
ugaaacauguugccaaaauggugg

SEQ ID NO: 3856514 - RNA, 13 nt, Human
ugaaacauguuuc

SEQ ID NO: 3856515 - RNA, 17 nt, Human
ugaaacauugcuuuuaa

SEQ ID NO: 3856516 - RNA, 18 nt, Human
ugaaaccaaauguaacua

SEQ ID NO: 3856517 - RNA, 18 nt, Human
ugaaacccccacacacac

SEQ ID NO: 3856518 - RNA, 20 nt, Human
ugaaaccccuguaggccuca

SEQ ID NO: 3856519 - RNA, 21 nt, Human
ugaaacccuggaccagugguc

SEQ ID NO: 3856520 - RNA, 20 nt, Human
ugaaaccuacacacugucau

SEQ ID NO: 3856521 - RNA, 18 nt, Human
ugaaaccuuauuuuuucc

SEQ ID NO: 3856522 - RNA, 16 nt, Human
ugaaaccuuuuuuaag

SEQ ID NO: 3856523 - RNA, 20 nt, Human
ugaaaccuuuuuuaagauuu

SEQ ID NO: 3856524 - RNA, 17 nt, Human
ugaaaccuuuuuuuauc

SEQ ID NO: 3856525 - RNA, 17 nt, Human
ugaaacggaugauuucu

SEQ ID NO: 3856526 - RNA, 18 nt, Human
ugaaacggaugauuucua

SEQ ID NO: 3856527 - RNA, 14 nt, Human
ugaaacuaaagcaa

SEQ ID NO: 3856528 - RNA, 19 nt, Human
ugaaacuccagaugccaca

SEQ ID NO: 3856529 - RNA, 17 nt, Human
ugaaacugacuugcugu

SEQ ID NO: 3856530 - RNA, 19 nt, Human
ugaaacugcuuguuuccua

SEQ ID NO: 3856531 - RNA, 18 nt, Human
ugaaacuggcacugaauu

SEQ ID NO: 3856532 - RNA, 12 nt, Human
ugaaacuuauuu

SEQ ID NO: 3856533 - RNA, 23 nt, Human
ugaaacuuauuuuuuucugauug

SEQ ID NO: 3856534 - RNA, 14 nt, Human
ugaaacuuucauuc

SEQ ID NO: 3856535 - RNA, 22 nt, Human
ugaaacuuugagaucuaaaaau

SEQ ID NO: 3856536 - RNA, 15 nt, Human
ugaaacuuugggaaa

SEQ ID NO: 3856537 - RNA, 17 nt, Human
ugaaacuuuucuagaau

SEQ ID NO: 3856538 - RNA, 23 nt, Human
ugaaacuuuucuagaauuauuuu

SEQ ID NO: 3856539 - RNA, 12 nt, Human
ugaaacuuuugg

SEQ ID NO: 3856540 - RNA, 15 nt, Human
ugaaagaaaacuuuu

SEQ ID NO: 3856541 - RNA, 18 nt, Human
ugaaagaaaacuuuuaug

SEQ ID NO: 3856542 - RNA, 15 nt, Human
ugaaagaaaauugag

SEQ ID NO: 3856543 - RNA, 22 nt, Human
ugaaagaaaauugaguugcacu

SEQ ID NO: 3856544 - RNA, 20 nt, Human
ugaaagaaacaguuaacuuu

SEQ ID NO: 3856545 - RNA, 12 nt, Human
ugaaagaaauca

SEQ ID NO: 3856546 - RNA, 17 nt, Human
ugaaagaaaucauguua

SEQ ID NO: 3856547 - RNA, 18 nt, Human
ugaaagaauauauuuauu

SEQ ID NO: 3856548 - RNA, 13 nt, Human
ugaaagacaccau

SEQ ID NO: 3856549 - RNA, 19 nt, Human
ugaaagaccuucuccaaau

SEQ ID NO: 3856550 - RNA, 16 nt, Human
ugaaagacuguacaaa

SEQ ID NO: 3856551 - RNA, 22 nt, Human
ugaaagacuguacaaaguagaa

SEQ ID NO: 3856552 - RNA, 16 nt, Human
ugaaagagaaccaguu

SEQ ID NO: 3856553 - RNA, 18 nt, Human
ugaaagagaaccaguuuc

SEQ ID NO: 3856554 - RNA, 18 nt, Human
ugaaagaggaaugaagua

SEQ ID NO: 3856555 - RNA, 18 nt, Human
ugaaagaggcagcuugaa

SEQ ID NO: 3856556 - RNA, 21 nt, Human
ugaaagaggcugaggccugga

SEQ ID NO: 3856557 - RNA, 16 nt, Human
ugaaagaguaaaggaa

SEQ ID NO: 3856558 - RNA, 17 nt, Human
ugaaagaguaaaggaaa

SEQ ID NO: 3856559 - RNA, 16 nt, Human
ugaaagaguuaagaau

SEQ ID NO: 3856560 - RNA, 18 nt, Human
ugaaagaugauuugcaau

SEQ ID NO: 3856561 - RNA, 19 nt, Human
ugaaagauggcugugccuc

SEQ ID NO: 3856562 - RNA, 21 nt, Human
ugaaagauggcugugccucug

SEQ ID NO: 3856563 - RNA, 22 nt, Human
ugaaagauggcugugccucugc

SEQ ID NO: 3856564 - RNA, 22 nt, Human
ugaaagauugugggggaaaaau

SEQ ID NO: 3856565 - RNA, 19 nt, Human
ugaaagcaaaaaugcuaau

SEQ ID NO: 3856566 - RNA, 19 nt, Human
ugaaagcagggacuugaac

SEQ ID NO: 3856567 - RNA, 16 nt, Human
ugaaagccauggagau

SEQ ID NO: 3856568 - RNA, 16 nt, Human
ugaaagccccagaaau

SEQ ID NO: 3856569 - RNA, 15 nt, Human
ugaaagcuacucaua

SEQ ID NO: 3856570 - RNA, 17 nt, Human
ugaaggcaaaauugcaa

SEQ ID NO: 3856571 - RNA, 15 nt, Human
ugaaggccccgccca

SEQ ID NO: 3856572 - RNA, 16 nt, Human
ugaaggccccgcccag

SEQ ID NO: 3856573 - RNA, 17 nt, Human
ugaaggccccgcccagg

SEQ ID NO: 3856574 - RNA, 20 nt, Human
ugaaggccccgcccaggcuu

SEQ ID NO: 3856575 - RNA, 19 nt, Human
ugaaggccgagaagcaaga

SEQ ID NO: 3856576 - RNA, 12 nt, Human
ugaaggccugag

SEQ ID NO: 3856577 - RNA, 14 nt, Human
ugaaggccugaggu

SEQ ID NO: 3856578 - RNA, 19 nt, Human
ugaaggccuuauucuacau

SEQ ID NO: 3856579 - RNA, 18 nt, Human
ugaaggcuaaaaagcaac

SEQ ID NO: 3856580 - RNA, 20 nt, Human
ugaaggcucgagcaugccug

SEQ ID NO: 3856581 - RNA, 16 nt, Human
ugaaggcuggguucug

SEQ ID NO: 3856582 - RNA, 16 nt, Human
ugaaggcuucucucug

SEQ ID NO: 3856583 - RNA, 19 nt, Human
ugaaggcuucucucugugg

SEQ ID NO: 3856584 - RNA, 19 nt, Human
ugaaggcuuucagggccuc

SEQ ID NO: 3856585 - RNA, 17 nt, Human
ugaagggagagccagcu

SEQ ID NO: 3856586 - RNA, 21 nt, Human
ugaagggagguggggaugaga

SEQ ID NO: 3856587 - RNA, 16 nt, Human
ugaagggauaugugaa

SEQ ID NO: 3856588 - RNA, 12 nt, Human
ugaagggccaga

SEQ ID NO: 3856589 - RNA, 14 nt, Human
ugaagggccagagc

SEQ ID NO: 3856590 - RNA, 13 nt, Human
ugaagggcccagg

SEQ ID NO: 3856591 - RNA, 15 nt, Human
ugaagggggcggccu

SEQ ID NO: 3856592 - RNA, 21 nt, Human
ugaaggggguaccuuaagaga

SEQ ID NO: 3856593 - RNA, 21 nt, Human
ugaagguaaaauugaaaggca

SEQ ID NO: 3856594 - RNA, 14 nt, Human
ugaagguaaauaaa

SEQ ID NO: 3856595 - RNA, 20 nt, Human
ugaagguaaauaaaaagaaa

SEQ ID NO: 3856596 - RNA, 19 nt, Human
ugaaggucuugauuuguuu

SEQ ID NO: 3856597 - RNA, 14 nt, Human
ugaaggugucagaa

SEQ ID NO: 3856598 - RNA, 15 nt, Human
ugaaggugucagaau

SEQ ID NO: 3856599 - RNA, 15 nt, Human
ugaagguuaggauuu

SEQ ID NO: 3856600 - RNA, 16 nt, Human
ugaagguuaggauuua

SEQ ID NO: 3856601 - RNA, 14 nt, Human
ugaagguuuacaau

SEQ ID NO: 3856602 - RNA, 13 nt, Human
ugaagguuuuugu

SEQ ID NO: 3856603 - RNA, 18 nt, Human
ugaagguuuuuguaaaga

SEQ ID NO: 3856604 - RNA, 21 nt, Human
ugaagguuuuuguaaagauuu

SEQ ID NO: 3856605 - RNA, 22 nt, Human
ugaaguaaaacaaacaauaccu

SEQ ID NO: 3856606 - RNA, 18 nt, Human
ugaaguaaaauguggcag

SEQ ID NO: 3856607 - RNA, 14 nt, Human
ugaaguaaacuuuu

SEQ ID NO: 3856608 - RNA, 17 nt, Human
ugaaguaacuugucuua

SEQ ID NO: 3856609 - RNA, 19 nt, Human
ugaaguaacuugucuuaaa

SEQ ID NO: 3856610 - RNA, 15 nt, Human
ugaaguaagcaaaga

SEQ ID NO: 3856611 - RNA, 20 nt, Human
ugaaguaauaugcacacauu

SEQ ID NO: 3856612 - RNA, 21 nt, Human
ugaaguaauaugcacacauuu

SEQ ID NO: 3856613 - RNA, 22 nt, Human
ugaaguaauaugcacacauuuu

SEQ ID NO: 3856614 - RNA, 13 nt, Human
ugaaguacauauu

SEQ ID NO: 3856615 - RNA, 23 nt, Human
ugaaguacccguucacauuuuug

SEQ ID NO: 3856616 - RNA, 14 nt, Human
ugaaguaguuugua

SEQ ID NO: 3856617 - RNA, 16 nt, Human
ugaaguauauaauggu

SEQ ID NO: 3856618 - RNA, 20 nt, Human
ugaaguaucuaaaaguguca

SEQ ID NO: 3856619 - RNA, 14 nt, Human
ugaagucacacagu

SEQ ID NO: 3856620 - RNA, 14 nt, Human
ugaagucacugcac

SEQ ID NO: 3856621 - RNA, 11 nt, Human
ugaaguccaag

SEQ ID NO: 3856622 - RNA, 13 nt, Human
ugaaguccggaac

SEQ ID NO: 3856623 - RNA, 21 nt, Human
ugaagucgucuuaacucacca

SEQ ID NO: 3856624 - RNA, 17 nt, Human
ugaagucguugugaggg

SEQ ID NO: 3856625 - RNA, 13 nt, Human
ugaagucugaaau

SEQ ID NO: 3856626 - RNA, 14 nt, Human
ugaagucuuguaua

SEQ ID NO: 3856627 - RNA, 17 nt, Human
ugaagugagcacagccu

SEQ ID NO: 3856628 - RNA, 23 nt, Human
ugaagugagcugagauugcacca

SEQ ID NO: 3856629 - RNA, 16 nt, Human
ugaagugcauccaaag

SEQ ID NO: 3856630 - RNA, 18 nt, Human
ugaagugcauccaaaggu

SEQ ID NO: 3856631 - RNA, 16 nt, Human
ugaagugccuuaaaua

SEQ ID NO: 3856632 - RNA, 16 nt, Human
ugaagugcgugaaugu

SEQ ID NO: 3856633 - RNA, 16 nt, Human
ugaaguguaccugugu

SEQ ID NO: 3856634 - RNA, 17 nt, Human
ugaaguguaccugugua

SEQ ID NO: 3856635 - RNA, 18 nt, Human
ugaaguguauaauauaaa

SEQ ID NO: 3856636 - RNA, 16 nt, Human
ugaaguguguuuccuu

SEQ ID NO: 3856637 - RNA, 23 nt, Human
ugaaguguuaauacuaguuguga

SEQ ID NO: 3856638 - RNA, 10 nt, Human
ugaaguguug

SEQ ID NO: 3856639 - RNA, 15 nt, Human
ugaaguuacuuucuu

SEQ ID NO: 3856640 - RNA, 15 nt, Human
ugaaguuagaauucc

SEQ ID NO: 3856641 - RNA, 19 nt, Human
ugaaguuagguucuuaaaa

SEQ ID NO: 3856642 - RNA, 19 nt, Human
ugaauauuacuccuauuuu

SEQ ID NO: 3856643 - RNA, 16 nt, Human
ugaauauuauaguauu

SEQ ID NO: 3856644 - RNA, 15 nt, Human
ugaauauuauuccuc

SEQ ID NO: 3856645 - RNA, 17 nt, Human
ugaauauugaaguuuca

SEQ ID NO: 3856646 - RNA, 16 nt, Human
ugaauauugccauuau

SEQ ID NO: 3856647 - RNA, 17 nt, Human
ugaauauuuacguuuuu

SEQ ID NO: 3856648 - RNA, 22 nt, Human
ugaauauuuacguuuuuguaaa

SEQ ID NO: 3856649 - RNA, 18 nt, Human
ugaauauuuauaacagca

SEQ ID NO: 3856650 - RNA, 21 nt, Human
ugaauauuuccauauggauuu

SEQ ID NO: 3856651 - RNA, 13 nt, Human
ugaauauuuucaa

SEQ ID NO: 3856652 - RNA, 16 nt, Human
ugaaucaaaagugccu

SEQ ID NO: 3856653 - RNA, 13 nt, Human
ugaaucaauaaua

SEQ ID NO: 3856654 - RNA, 15 nt, Human
ugaaucaauaauaua

SEQ ID NO: 3856655 - RNA, 14 nt, Human
ugaaucacaugaau

SEQ ID NO: 3856656 - RNA, 15 nt, Human
ugaaucaccuagggg

SEQ ID NO: 3856657 - RNA, 16 nt, Human
ugaaucaccuaggggu

SEQ ID NO: 3856658 - RNA, 17 nt, Human
ugaaucagacaguggau

SEQ ID NO: 3856659 - RNA, 21 nt, Human
ugaaucagacccuaccccacc

SEQ ID NO: 3856660 - RNA, 20 nt, Human
ugaaucaguauaaacaaagu

SEQ ID NO: 3856661 - RNA, 22 nt, Human
ugaaucaguuuccaauuauuug

SEQ ID NO: 3856662 - RNA, 13 nt, Human
ugaaucaugagcc

SEQ ID NO: 3856663 - RNA, 14 nt, Human
ugaaucaugagccu

SEQ ID NO: 3856664 - RNA, 18 nt, Human
ugaaucauguaguaucaa

SEQ ID NO: 3856665 - RNA, 19 nt, Human
ugaaucauguaguaucaaa

SEQ ID NO: 3856666 - RNA, 18 nt, Human
ugaaucauuguauguggu

SEQ ID NO: 3856667 - RNA, 17 nt, Human
ugaauccaugcuugggu

SEQ ID NO: 3856668 - RNA, 21 nt, Human
ugaaucccccuugccacccca

SEQ ID NO: 3856669 - RNA, 10 nt, Human
ugaauccuac

SEQ ID NO: 3856670 - RNA, 17 nt, Human
ugaauccucuucuuuau

SEQ ID NO: 3856671 - RNA, 18 nt, Human
ugaauccuuccauuccac

SEQ ID NO: 3856672 - RNA, 23 nt, Human
ugaaucuagcuuauuuugaggcu

SEQ ID NO: 3856673 - RNA, 15 nt, Human
ugaaucuaugccaaa

SEQ ID NO: 3856674 - RNA, 16 nt, Human
ugaaucuauuuaagua

SEQ ID NO: 3856675 - RNA, 13 nt, Human
ugaaucucauaau

SEQ ID NO: 3856676 - RNA, 19 nt, Human
ugaaucugagagaugcugu

SEQ ID NO: 3856677 - RNA, 14 nt, Human
ugaaucuguacaga

SEQ ID NO: 3856678 - RNA, 14 nt, Human
ugaaucuucugaaa

SEQ ID NO: 3856679 - RNA, 13 nt, Human
ugaaucuugucuc

SEQ ID NO: 3856680 - RNA, 24 nt, Human
ugaaucuugucucaaugcucauaa

SEQ ID NO: 3856681 - RNA, 19 nt, Human
ugaaucuuuccaauaaacc

SEQ ID NO: 3856682 - RNA, 11 nt, Human
ugaaugaaaaa

SEQ ID NO: 3856683 - RNA, 16 nt, Human
ugaaugaaaaauuuaa

SEQ ID NO: 3856684 - RNA, 19 nt, Human
ugaaugaaaaauuuaagca

SEQ ID NO: 3856685 - RNA, 22 nt, Human
ugaaugaaaaauuuaagcauug

SEQ ID NO: 3856686 - RNA, 21 nt, Human
ugaaugaaacccccacacaca

SEQ ID NO: 3856687 - RNA, 19 nt, Human
ugaaugaaagauuaaacag

SEQ ID NO: 3856688 - RNA, 20 nt, Human
ugaaugaaagucuugugacu

SEQ ID NO: 3856689 - RNA, 24 nt, Human
ugaaugaagcaaaugucaugcugc

SEQ ID NO: 3856690 - RNA, 15 nt, Human
ugaaugaauggcuaa

SEQ ID NO: 3856691 - RNA, 19 nt, Human
ugaaugaggauuauuauaa

SEQ ID NO: 3856692 - RNA, 17 nt, Human
ugaaugaggucccaggc

SEQ ID NO: 3856693 - RNA, 18 nt, Human
ugaaugaggucccaggca

SEQ ID NO: 3856694 - RNA, 18 nt, Human
ugaaugagucuguugugu

SEQ ID NO: 3856695 - RNA, 18 nt, Human
ugaaugaucucucugaau

SEQ ID NO: 3856696 - RNA, 23 nt, Human
ugaaugaugauccuaggcauuug

SEQ ID NO: 3856697 - RNA, 15 nt, Human
ugaaugauuuuucuu

SEQ ID NO: 3856698 - RNA, 16 nt, Human
ugaaugauuuuucuuu

SEQ ID NO: 3856699 - RNA, 15 nt, Human
ugaaugcaaaccaua

SEQ ID NO: 3856700 - RNA, 19 nt, Human
ugaaugcaaaccauagcac

SEQ ID NO: 3856701 - RNA, 19 nt, Human
ugaaugcacacuagccucu

SEQ ID NO: 3856702 - RNA, 18 nt, Human
ugaaugcaccauggucaa

SEQ ID NO: 3856703 - RNA, 23 nt, Human
ugaaugcagucuguccaggcucg

SEQ ID NO: 3856704 - RNA, 15 nt, Human
ugaaugcauuuuguu

SEQ ID NO: 3856705 - RNA, 15 nt, Human
ugaaugccacugccu

SEQ ID NO: 3856706 - RNA, 23 nt, Human
ugaaugcccacaggcaaaugcau

SEQ ID NO: 3856707 - RNA, 20 nt, Human
ugaaugcccagugagacugu

SEQ ID NO: 3856708 - RNA, 17 nt, Human
ugaaugcccccagcugg

SEQ ID NO: 3856709 - RNA, 18 nt, Human
ugaaugcccccagcuggc

SEQ ID NO: 3856710 - RNA, 19 nt, Human
ugaaugcccccagcuggcc

SEQ ID NO: 3856711 - RNA, 19 nt, Human
ugaaugccuaugguggauc

SEQ ID NO: 3856712 - RNA, 11 nt, Human
ugaaugcugcc

SEQ ID NO: 3856713 - RNA, 12 nt, Human
ugaaugcugcca

SEQ ID NO: 3856714 - RNA, 13 nt, Human
ugaaugcugccac

SEQ ID NO: 3856715 - RNA, 18 nt, Human
ugaaugcugccacaacca

SEQ ID NO: 3856716 - RNA, 18 nt, Human
ugaaugcugccagugugg

SEQ ID NO: 3856717 - RNA, 22 nt, Human
ugaaugcugccaguguggagug

SEQ ID NO: 3856718 - RNA, 15 nt, Human
ugaaugcugggacuc

SEQ ID NO: 3856719 - RNA, 14 nt, Human
ugaaugcuuuuagu

SEQ ID NO: 3856720 - RNA, 12 nt, Human
ugaaugcuuuuu

SEQ ID NO: 3856721 - RNA, 19 nt, Human
ugaauggacuuugcacacu

SEQ ID NO: 3856722 - RNA, 20 nt, Human
ugaauggauuggauuauuua

SEQ ID NO: 3856723 - RNA, 13 nt, Human
ugaguuuuccaug

SEQ ID NO: 3856724 - RNA, 22 nt, Human
ugaguuuugggaaguuaaaggg

SEQ ID NO: 3856725 - RNA, 19 nt, Human
ugaguuuuuauggggcuga

SEQ ID NO: 3856726 - RNA, 13 nt, Human
ugauaaaaacuca

SEQ ID NO: 3856727 - RNA, 18 nt, Human
ugauaaaacaacagcucg

SEQ ID NO: 3856728 - RNA, 16 nt, Human
ugauaaaaccauguag

SEQ ID NO: 3856729 - RNA, 16 nt, Human
ugauaaaagauacauu

SEQ ID NO: 3856730 - RNA, 18 nt, Human
ugauaaaagggcaaaucu

SEQ ID NO: 3856731 - RNA, 12 nt, Human
ugauaaaaucau

SEQ ID NO: 3856732 - RNA, 14 nt, Human
ugauaaacauuuaa

SEQ ID NO: 3856733 - RNA, 14 nt, Human
ugauaaacuuugcu

SEQ ID NO: 3856734 - RNA, 19 nt, Human
ugauaaagauuuuuuaaua

SEQ ID NO: 3856735 - RNA, 20 nt, Human
ugauaaagauuuuuuaauaa

SEQ ID NO: 3856736 - RNA, 13 nt, Human
ugauaaagccuca

SEQ ID NO: 3856737 - RNA, 18 nt, Human
ugauaaaguuucucagau

SEQ ID NO: 3856738 - RNA, 17 nt, Human
ugauaaaucagucaagc

SEQ ID NO: 3856739 - RNA, 20 nt, Human
ugauaaauuugacuguuauu

SEQ ID NO: 3856740 - RNA, 21 nt, Human
ugauaacaauguuuuaacaag

SEQ ID NO: 3856741 - RNA, 15 nt, Human
ugauaacagcuacca

SEQ ID NO: 3856742 - RNA, 18 nt, Human
ugauaacuagauggugcu

SEQ ID NO: 3856743 - RNA, 22 nt, Human
ugauaacuagauggugcugaga

SEQ ID NO: 3856744 - RNA, 19 nt, Human
ugauaacugcaauuuuaau

SEQ ID NO: 3856745 - RNA, 14 nt, Human
ugauaacuuugcuu

SEQ ID NO: 3856746 - RNA, 17 nt, Human
ugauaacuuugcuugca

SEQ ID NO: 3856747 - RNA, 16 nt, Human
ugauaaguaaaugcua

SEQ ID NO: 3856748 - RNA, 17 nt, Human
ugauaaguucauacauu

SEQ ID NO: 3856749 - RNA, 15 nt, Human
ugauaauaaauugaa

SEQ ID NO: 3856750 - RNA, 18 nt, Human
ugauaauaauauuguuuu

SEQ ID NO: 3856751 - RNA, 21 nt, Human
ugauaauauauuguguugacu

SEQ ID NO: 3856752 - RNA, 24 nt, Human
ugauaaucaacugggcugaacacu

SEQ ID NO: 3856753 - RNA, 15 nt, Human
ugauaaugaacagaa

SEQ ID NO: 3856754 - RNA, 18 nt, Human
ugauaaugaacagaacau

SEQ ID NO: 3856755 - RNA, 15 nt, Human
ugauaauguuaaauu

SEQ ID NO: 3856756 - RNA, 21 nt, Human
ugauaauguuaaauuuguaag

SEQ ID NO: 3856757 - RNA, 21 nt, Human
ugauaauguugugguuuguug

SEQ ID NO: 3856758 - RNA, 15 nt, Human
ugauaauuccagugg

SEQ ID NO: 3856759 - RNA, 17 nt, Human
ugauaauuccagugguc

SEQ ID NO: 3856760 - RNA, 16 nt, Human
ugauaauucuuauuuu

SEQ ID NO: 3856761 - RNA, 14 nt, Human
ugauaauugcauuc

SEQ ID NO: 3856762 - RNA, 19 nt, Human
ugauaauugcauucaucuu

SEQ ID NO: 3856763 - RNA, 14 nt, Human
ugauaauuuuaaau

SEQ ID NO: 3856764 - RNA, 13 nt, Human
ugauaauuuuccu

SEQ ID NO: 3856765 - RNA, 14 nt, Human
ugauaauuuuccuu

SEQ ID NO: 3856766 - RNA, 23 nt, Human
ugcaauuagguuuuuccuuauuu

SEQ ID NO: 3856767 - RNA, 16 nt, Human
ugcaauucaaaaguuc

SEQ ID NO: 3856768 - RNA, 13 nt, Human
ugcaauuccccuc

SEQ ID NO: 3856769 - RNA, 14 nt, Human
ugcaauuccccucu

SEQ ID NO: 3856770 - RNA, 16 nt, Human
ugcaauugauuucuuu

SEQ ID NO: 3856771 - RNA, 21 nt, Human
ugcaauugccuuuuuucugua

SEQ ID NO: 3856772 - RNA, 15 nt, Human
ugcaauugcuuagga

SEQ ID NO: 3856773 - RNA, 21 nt, Human
ugcaauuguaggggugugugu

SEQ ID NO: 3856774 - RNA, 14 nt, Human
ugcaauuuauuaaa

SEQ ID NO: 3856775 - RNA, 15 nt, Human
ugcaauuuauuaaaa

SEQ ID NO: 3856776 - RNA, 22 nt, Human
ugcaauuuauuaaaaugauugu

SEQ ID NO: 3856777 - RNA, 12 nt, Human
ugcaauuucaag

SEQ ID NO: 3856778 - RNA, 20 nt, Human
ugcaauuucauaugcuguau

SEQ ID NO: 3856779 - RNA, 21 nt, Human
ugcaauuuguuugugcuucua

SEQ ID NO: 3856780 - RNA, 18 nt, Human
ugcacaaaacccagaccu

SEQ ID NO: 3856781 - RNA, 15 nt, Human
ugcacaaaguggcau

SEQ ID NO: 3856782 - RNA, 20 nt, Human
ugcacaaaguggcauaaaaa

SEQ ID NO: 3856783 - RNA, 21 nt, Human
ugcacaaccaucugucccugc

SEQ ID NO: 3856784 - RNA, 16 nt, Human
ugcacaagaauggauc

SEQ ID NO: 3856785 - RNA, 16 nt, Human
ugcacaagcuccaagc

SEQ ID NO: 3856786 - RNA, 21 nt, Human
aagcuauucccucaaaucuga

SEQ ID NO: 3856787 - RNA, 14 nt, Human
aagcuauuccuuuc

SEQ ID NO: 3856788 - RNA, 21 nt, Human
aagcuauuccuuucccuuccu

SEQ ID NO: 3856789 - RNA, 13 nt, Human
aagcuauuuaaag

SEQ ID NO: 3856790 - RNA, 17 nt, Human
aagcuauuuaucuguag

SEQ ID NO: 3856791 - RNA, 22 nt, Human
aagcuauuuaugggccccuggc

SEQ ID NO: 3856792 - RNA, 14 nt, Human
aagcuauuuuucua

SEQ ID NO: 3856793 - RNA, 22 nt, Human
aagcucaaagguuuggaaggag

SEQ ID NO: 3856794 - RNA, 18 nt, Human
aagcucaaaugaaaugua

SEQ ID NO: 3856795 - RNA, 15 nt, Human
aagcucacaguuccu

SEQ ID NO: 3856796 - RNA, 20 nt, Human
aagcucacaguuccucgccc

SEQ ID NO: 3856797 - RNA, 22 nt, Human
aagcucaccuguugcuuacaau

SEQ ID NO: 3856798 - RNA, 23 nt, Human
aagcucaccuguugcuuacaauu

SEQ ID NO: 3856799 - RNA, 18 nt, Human
aagcucacguccugagaa

SEQ ID NO: 3856800 - RNA, 14 nt, Human
aagcucacuucugg

SEQ ID NO: 3856801 - RNA, 23 nt, Human
aagcucacuucugggcuucaucu

SEQ ID NO: 3856802 - RNA, 13 nt, Human
aagcucagaaucc

SEQ ID NO: 3856803 - RNA, 15 nt, Human
aagcucagaauccaa

SEQ ID NO: 3856804 - RNA, 15 nt, Human
aagcucagauuauuu

SEQ ID NO: 3856805 - RNA, 16 nt, Human
aagcucagauuauuua

SEQ ID NO: 3856806 - RNA, 15 nt, Human
aagcucagccagccc

SEQ ID NO: 3856807 - RNA, 14 nt, Human
aagcucagcccacc

SEQ ID NO: 3856808 - RNA, 15 nt, Human
aagcucagcugcauu

SEQ ID NO: 3856809 - RNA, 17 nt, Human
aagcucaggaccaggca

SEQ ID NO: 3856810 - RNA, 12 nt, Human
aagcucagggcc

SEQ ID NO: 3856811 - RNA, 13 nt, Human
aagcucagggccu

SEQ ID NO: 3856812 - RNA, 19 nt, Human
aagcucagggccuggcuca

SEQ ID NO: 3856813 - RNA, 15 nt, Human
aagcuccacugucac

SEQ ID NO: 3856814 - RNA, 13 nt, Human
aagcuccagguag

SEQ ID NO: 3856815 - RNA, 18 nt, Human
aagcuccaguccugcucu

SEQ ID NO: 3856816 - RNA, 14 nt, Human
aagcuccaucucca

SEQ ID NO: 3856817 - RNA, 16 nt, Human
aagcuccaucuuauuu

SEQ ID NO: 3856818 - RNA, 18 nt, Human
aagcuccaugugccucuu

SEQ ID NO: 3856819 - RNA, 17 nt, Human
aagcucccaagggaugg

SEQ ID NO: 3856820 - RNA, 21 nt, Human
aagcucccaagggauggugcc

SEQ ID NO: 3856821 - RNA, 12 nt, Human
aagcucccaggc

SEQ ID NO: 3856822 - RNA, 23 nt, Human
aagcucccaggcauuccccagga

SEQ ID NO: 3856823 - RNA, 14 nt, Human
aagcucccaggccg

SEQ ID NO: 3856824 - RNA, 23 nt, Human
aagcucccccagcaaagccccca

SEQ ID NO: 3856825 - RNA, 15 nt, Human
aagcucccugcccca

SEQ ID NO: 3856826 - RNA, 16 nt, Human
aagcuccuagcagaga

SEQ ID NO: 3856827 - RNA, 18 nt, Human
aagcuccuagcagagaga

SEQ ID NO: 3856828 - RNA, 17 nt, Human
aagcuccuaucuguuuu

SEQ ID NO: 3856829 - RNA, 13 nt, Human
aagcuccuccucc

SEQ ID NO: 3856830 - RNA, 16 nt, Human
aagcuccuccucccug

SEQ ID NO: 3856831 - RNA, 18 nt, Human
aagcuccuccucccugca

SEQ ID NO: 3856832 - RNA, 19 nt, Human
aagcuccucuccccagccc

SEQ ID NO: 3856833 - RNA, 23 nt, Human
aagcuccugguauggguuucucc

SEQ ID NO: 3856834 - RNA, 22 nt, Human
aagcucgauguggucacagcug

SEQ ID NO: 3856835 - RNA, 16 nt, Human
aagcucuagugggaag

SEQ ID NO: 3856836 - RNA, 15 nt, Human
aagcucuauuaagau

SEQ ID NO: 3856837 - RNA, 22 nt, Human
aagcucucugcaucuacuccca

SEQ ID NO: 3856838 - RNA, 11 nt, Human
aagcucugagc

SEQ ID NO: 3856839 - RNA, 15 nt, Human
aagcucugagcuguc

SEQ ID NO: 3856840 - RNA, 13 nt, Human
aagcucugaggga

SEQ ID NO: 3856841 - RNA, 13 nt, Human
aagcucuggcuga

SEQ ID NO: 3856842 - RNA, 17 nt, Human
aagcucuugaagacacu

SEQ ID NO: 3856843 - RNA, 12 nt, Human
aagcugaaauuu

SEQ ID NO: 3856844 - RNA, 20 nt, Human
aagcugaaauuuuagaaaua

SEQ ID NO: 3856845 - RNA, 22 nt, Human
aagcugaaauuuuagaaauauu

SEQ ID NO: 3856846 - RNA, 22 nt, Human
aagcugaaguuucacuccggag

SEQ ID NO: 3856847 - RNA, 17 nt, Human
aagcugacauugccaaa

SEQ ID NO: 3856848 - RNA, 17 nt, Human
aagcugacgaacuucca

SEQ ID NO: 3856849 - RNA, 15 nt, Human
aagcugacuuggcug

SEQ ID NO: 3856850 - RNA, 16 nt, Human
aagcugacuuggcugg

SEQ ID NO: 3856851 - RNA, 19 nt, Human
aagcugagaacuccugacu

SEQ ID NO: 3856852 - RNA, 15 nt, Human
aagcugagccugcag

SEQ ID NO: 3856853 - RNA, 13 nt, Human
aagcugaggugcc

SEQ ID NO: 3856854 - RNA, 22 nt, Human
aagcugauuacugucaauaaac

SEQ ID NO: 3856855 - RNA, 20 nt, Human
aagcugcaaaucagccaugu

SEQ ID NO: 3856856 - RNA, 19 nt, Human
aagcugcaaaucugauggc

SEQ ID NO: 3856857 - RNA, 22 nt, Human
aagcugcacccucaggcaggug

SEQ ID NO: 3856858 - RNA, 17 nt, Human
aagcugcagagauuucu

SEQ ID NO: 3856859 - RNA, 18 nt, Human
aagcugcagcuuccuguc

SEQ ID NO: 3856860 - RNA, 13 nt, Human
aagcugcagcuug

SEQ ID NO: 3856861 - RNA, 22 nt, Human
aagcugccagccgagauagcca

SEQ ID NO: 3856862 - RNA, 18 nt, Human
aagcugcccacuguuucu

SEQ ID NO: 3856863 - RNA, 21 nt, Human
aagcugccgaaccaaaagaau

SEQ ID NO: 3856864 - RNA, 17 nt, Human
aagcugccugcuuuuca

SEQ ID NO: 3856865 - RNA, 20 nt, Human
aagcugccugcuuuucacug

SEQ ID NO: 3856866 - RNA, 15 nt, Human
aagcugccugguaua

SEQ ID NO: 3856867 - RNA, 20 nt, Human
aagcugccugguauauccaa

SEQ ID NO: 3856868 - RNA, 16 nt, Human
aagcugccuguaguua

SEQ ID NO: 3856869 - RNA, 15 nt, Human
aagcugcuaaaucuc

SEQ ID NO: 3856870 - RNA, 22 nt, Human
aagcugcuaaaucuccuauuuu

SEQ ID NO: 3856871 - RNA, 16 nt, Human
aagcugcucugagcca

SEQ ID NO: 3856872 - RNA, 23 nt, Human
aagcuggaggacuagaaccugga

SEQ ID NO: 3856873 - RNA, 22 nt, Human
aagcuggccucuaccacaaggg

SEQ ID NO: 3856874 - RNA, 11 nt, Human
aagcugggcag

SEQ ID NO: 3856875 - RNA, 17 nt, Human
aagcugggccccagccc

SEQ ID NO: 3856876 - RNA, 19 nt, Human
aagcugggccccagcccac

SEQ ID NO: 3856877 - RNA, 13 nt, Human
aagcuggggagga

SEQ ID NO: 3856878 - RNA, 21 nt, Human
aagcuggucccacucagucca

SEQ ID NO: 3856879 - RNA, 22 nt, Human
aagcuguaguagcccuuucugu

SEQ ID NO: 3856880 - RNA, 14 nt, Human
aagcuguauuuuga

SEQ ID NO: 3856881 - RNA, 22 nt, Human
aagcugucccucacuguugaau

SEQ ID NO: 3856882 - RNA, 16 nt, Human
aagcugugaacaggcu

SEQ ID NO: 3856883 - RNA, 14 nt, Human
aagcugugccaccc

SEQ ID NO: 3856884 - RNA, 14 nt, Human
uggcucccucacuc

SEQ ID NO: 3856885 - RNA, 21 nt, Human
uggcucccuccuccaggccug

SEQ ID NO: 3856886 - RNA, 14 nt, Human
uggcucccucuugg

SEQ ID NO: 3856887 - RNA, 16 nt, Human
uggcuccgcugugugg

SEQ ID NO: 3856888 - RNA, 15 nt, Human
uggcuccggccucug

SEQ ID NO: 3856889 - RNA, 22 nt, Human
uggcuccucaaacaguagguug

SEQ ID NO: 3856890 - RNA, 14 nt, Human
uggcuccucccagc

SEQ ID NO: 3856891 - RNA, 14 nt, Human
uggcuccucccggu

SEQ ID NO: 3856892 - RNA, 18 nt, Human
uggcuccucccggugccc

SEQ ID NO: 3856893 - RNA, 23 nt, Human
uggcuccucuguggugucugccu

SEQ ID NO: 3856894 - RNA, 15 nt, Human
uggcuccugcccacu

SEQ ID NO: 3856895 - RNA, 17 nt, Human
uggcuccuugugccaga

SEQ ID NO: 3856896 - RNA, 19 nt, Human
uggcucgaaucucugugcc

SEQ ID NO: 3856897 - RNA, 21 nt, Human
uggcucgaaucucugugccuu

SEQ ID NO: 3856898 - RNA, 15 nt, Human
uggcucgccaggcca

SEQ ID NO: 3856899 - RNA, 14 nt, Human
uggcucuacacaua

SEQ ID NO: 3856900 - RNA, 15 nt, Human
uggcucuacacauau

SEQ ID NO: 3856901 - RNA, 19 nt, Human
uggcucucauugacuuccu

SEQ ID NO: 3856902 - RNA, 13 nt, Human
uggcucuccuggc

SEQ ID NO: 3856903 - RNA, 13 nt, Human
uggcucucuccag

SEQ ID NO: 3856904 - RNA, 20 nt, Human
uggcucugaggugccugucc

SEQ ID NO: 3856905 - RNA, 17 nt, Human
uggcucugccaguccug

SEQ ID NO: 3856906 - RNA, 15 nt, Human
uggcucuucugccca

SEQ ID NO: 3856907 - RNA, 21 nt, Human
uggcucuugauaccccccucu

SEQ ID NO: 3856908 - RNA, 23 nt, Human
uggcucuugauaccccccucugu

SEQ ID NO: 3856909 - RNA, 16 nt, Human
uggcucuuugggcugg

SEQ ID NO: 3856910 - RNA, 15 nt, Human
uggcugaaaaaggcc

SEQ ID NO: 3856911 - RNA, 22 nt, Human
uggcugaaaggaagcugugcgu

SEQ ID NO: 3856912 - RNA, 16 nt, Human
uggcugaaauucuccu

SEQ ID NO: 3856913 - RNA, 18 nt, Human
uggcugaaauucuccugg

SEQ ID NO: 3856914 - RNA, 22 nt, Human
uggcugaaauucuccuggaggu

SEQ ID NO: 3856915 - RNA, 16 nt, Human
uggcugaacccugugc

SEQ ID NO: 3856916 - RNA, 20 nt, Human
uggcugaacccugugcuggu

SEQ ID NO: 3856917 - RNA, 21 nt, Human
uggcugaauagcuucuccaaa

SEQ ID NO: 3856918 - RNA, 15 nt, Human
uggcugacccagucc

SEQ ID NO: 3856919 - RNA, 20 nt, Human
uggcugacccagucccuggg

SEQ ID NO: 3856920 - RNA, 22 nt, Human
uggcugaccccaaagagccugg

SEQ ID NO: 3856921 - RNA, 23 nt, Human
uggcugacuaaauuuggggacag

SEQ ID NO: 3856922 - RNA, 20 nt, Human
uggcugacuuacaucaugug

SEQ ID NO: 3856923 - RNA, 16 nt, Human
uggcugacuuugcucu

SEQ ID NO: 3856924 - RNA, 19 nt, Human
uggcugagauaugaacaua

SEQ ID NO: 3856925 - RNA, 15 nt, Human
uggcugagggcaguu

SEQ ID NO: 3856926 - RNA, 22 nt, Human
uggcugagggcaguucgcagcc

SEQ ID NO: 3856927 - RNA, 17 nt, Human
uggcugagguuccucug

SEQ ID NO: 3856928 - RNA, 22 nt, Human
uggcugagguuccucugccugc

SEQ ID NO: 3856929 - RNA, 24 nt, Human
uggcugagguuccucugccugccc

SEQ ID NO: 3856930 - RNA, 19 nt, Human
uggcugaguagcucugccu

SEQ ID NO: 3856931 - RNA, 19 nt, Human
uggcugauaaaagauacau

SEQ ID NO: 3856932 - RNA, 18 nt, Human
uggcugcagccugcgcca

SEQ ID NO: 3856933 - RNA, 14 nt, Human
uggcugcagggagu

SEQ ID NO: 3856934 - RNA, 19 nt, Human
uggcugcaguccgugugga

SEQ ID NO: 3856935 - RNA, 19 nt, Human
uggcugcauaaauguggua

SEQ ID NO: 3856936 - RNA, 18 nt, Human
uggcugccaaugggagcu

SEQ ID NO: 3856937 - RNA, 21 nt, Human
uggcugcccagaccccucugg

SEQ ID NO: 3856938 - RNA, 23 nt, Human
uggcugcccagaccccucuggcc

SEQ ID NO: 3856939 - RNA, 22 nt, Human
uggcugcccaucauguggcccc

SEQ ID NO: 3856940 - RNA, 14 nt, Human
uggcugccuccacu

SEQ ID NO: 3856941 - RNA, 22 nt, Human
uggcugcggggcgggcacaccu

SEQ ID NO: 3856942 - RNA, 13 nt, Human
uggcugcuaacaa

SEQ ID NO: 3856943 - RNA, 14 nt, Human
uggcugcugaaggc

SEQ ID NO: 3856944 - RNA, 16 nt, Human
uggcugcugcccccac

SEQ ID NO: 3856945 - RNA, 16 nt, Human
uggcugcugugggaaa

SEQ ID NO: 3856946 - RNA, 11 nt, Human
uggcugcuuca

SEQ ID NO: 3856947 - RNA, 20 nt, Human
uggcauccagagucccugcc

SEQ ID NO: 3856948 - RNA, 21 nt, Human
uggcauccagagucccugccu

SEQ ID NO: 3856949 - RNA, 15 nt, Human
uggcaucccaguggc

SEQ ID NO: 3856950 - RNA, 13 nt, Human
uggcaucccuggg

SEQ ID NO: 3856951 - RNA, 13 nt, Human
uggcauccuguga

SEQ ID NO: 3856952 - RNA, 12 nt, Human
uggcaucucugu

SEQ ID NO: 3856953 - RNA, 18 nt, Human
uggcaucugacacaaaaa

SEQ ID NO: 3856954 - RNA, 16 nt, Human
uggcaucuuacaucug

SEQ ID NO: 3856955 - RNA, 23 nt, Human
uggcaucuucgucuucacucuua

SEQ ID NO: 3856956 - RNA, 16 nt, Human
uggcaucuuugccuug

SEQ ID NO: 3856957 - RNA, 16 nt, Human
uggcaugauccaagca

SEQ ID NO: 3856958 - RNA, 13 nt, Human
uggcaugcauccc

SEQ ID NO: 3856959 - RNA, 20 nt, Human
uggcauggaaauuuaaagca

SEQ ID NO: 3856960 - RNA, 16 nt, Human
uggcauggauuucugu

SEQ ID NO: 3856961 - RNA, 14 nt, Human
uggcauggcaccug

SEQ ID NO: 3856962 - RNA, 14 nt, Human
uggcauggccacca

SEQ ID NO: 3856963 - RNA, 15 nt, Human
uggcauggcuccagu

SEQ ID NO: 3856964 - RNA, 12 nt, Human
uggcaugggaau

SEQ ID NO: 3856965 - RNA, 16 nt, Human
uggcaugggggccuca

SEQ ID NO: 3856966 - RNA, 20 nt, Human
uggcaugggggccucagggc

SEQ ID NO: 3856967 - RNA, 19 nt, Human
uggcaugguaguauacaaa

SEQ ID NO: 3856968 - RNA, 21 nt, Human
uggcauggugguugggaccca

SEQ ID NO: 3856969 - RNA, 22 nt, Human
uggcaugguuuugugccaucug

SEQ ID NO: 3856970 - RNA, 23 nt, Human
uggcaugguuuugugccaucugu

SEQ ID NO: 3856971 - RNA, 22 nt, Human
uggcaugugcugugaccauuua

SEQ ID NO: 3856972 - RNA, 20 nt, Human
uggcauguuagcccuuccuc

SEQ ID NO: 3856973 - RNA, 22 nt, Human
uggcauguuuugugcauuugua

SEQ ID NO: 3856974 - RNA, 17 nt, Human
uggcauuagaauuauuu

SEQ ID NO: 3856975 - RNA, 13 nt, Human
uggcauuaugucc

SEQ ID NO: 3856976 - RNA, 19 nt, Human
uggcauugucccugugccu

SEQ ID NO: 3856977 - RNA, 15 nt, Human
uggcauuucccuacu

SEQ ID NO: 3856978 - RNA, 17 nt, Human
uggcauuugcaauaaaa

SEQ ID NO: 3856979 - RNA, 18 nt, Human
uggccaaaagcaguaaau

SEQ ID NO: 3856980 - RNA, 16 nt, Human
uggccaaacaaguguu

SEQ ID NO: 3856981 - RNA, 23 nt, Human
uggccaagcagggaggaagaagc

SEQ ID NO: 3856982 - RNA, 19 nt, Human
uggccaagcugaggugccc

SEQ ID NO: 3856983 - RNA, 21 nt, Human
uggccaagcugaggugcccag

SEQ ID NO: 3856984 - RNA, 22 nt, Human
uggccaagcugaggugcccagg

SEQ ID NO: 3856985 - RNA, 18 nt, Human
uggccaaggagcugcuau

SEQ ID NO: 3856986 - RNA, 16 nt, Human
uggccaaguucuuagu

SEQ ID NO: 3856987 - RNA, 14 nt, Human
uggccacaaauucu

SEQ ID NO: 3856988 - RNA, 19 nt, Human
uggccacacugugacacac

SEQ ID NO: 3856989 - RNA, 13 nt, Human
uggccacagccag

SEQ ID NO: 3856990 - RNA, 16 nt, Human
uggccacauggcggag

SEQ ID NO: 3856991 - RNA, 22 nt, Human
uggccacauuuaauaucuucag

SEQ ID NO: 3856992 - RNA, 13 nt, Human
uggccaccacccc

SEQ ID NO: 3856993 - RNA, 15 nt, Human
uggccaccacccccc

SEQ ID NO: 3856994 - RNA, 23 nt, Human
uggccaccaccccccacucugug

SEQ ID NO: 3856995 - RNA, 14 nt, Human
uggccaccaggcug

SEQ ID NO: 3856996 - RNA, 16 nt, Human
uggccaccaggcuggc

SEQ ID NO: 3856997 - RNA, 15 nt, Human
uggccaccucucucc

SEQ ID NO: 3856998 - RNA, 17 nt, Human
uggccaccugagguggg

SEQ ID NO: 3856999 - RNA, 21 nt, Human
uggccaccugaggugggccca

SEQ ID NO: 3857000 - RNA, 16 nt, Human
uggccaccuuuucagc

SEQ ID NO: 3857001 - RNA, 14 nt, Human
uggccacgcagcca

SEQ ID NO: 3857002 - RNA, 16 nt, Human
uggccacgcagccagg

SEQ ID NO: 3857003 - RNA, 18 nt, Human
uggccacugcacagagcu

SEQ ID NO: 3857004 - RNA, 20 nt, Human
uggccacugcucccuaagcc

SEQ ID NO: 3857005 - RNA, 17 nt, Human
uggccacuucuguccau

SEQ ID NO: 3857006 - RNA, 13 nt, Human
uggccagacacag

SEQ ID NO: 3857007 - RNA, 14 nt, Human
uggccagaccagag

SEQ ID NO: 3857008 - RNA, 16 nt, Human
uggccagaccagagcu

SEQ ID NO: 3857009 - RNA, 23 nt, Human
uggccagagagccuggugcugcu

SEQ ID NO: 3857010 - RNA, 14 nt, Human
uggccagagcuggg

SEQ ID NO: 3857011 - RNA, 17 nt, Human
uggccagagcugggagg

SEQ ID NO: 3857012 - RNA, 15 nt, Human
uggccagaugcacca

SEQ ID NO: 3857013 - RNA, 20 nt, Human
uggccagaugcaccagcccu

SEQ ID NO: 3857014 - RNA, 21 nt, Human
uggccagaugcaccagcccuu

SEQ ID NO: 3857015 - RNA, 20 nt, Human
uggccagcagcaccugcccu

SEQ ID NO: 3857016 - RNA, 14 nt, Human
uggccagcagcuug

SEQ ID NO: 3857017 - RNA, 16 nt, Human
uggccagccccacagc

SEQ ID NO: 3857018 - RNA, 18 nt, Human
uggccagccccacagccc

SEQ ID NO: 3857019 - RNA, 23 nt, Human
uggccagccccacagcccacguc

SEQ ID NO: 3857020 - RNA, 21 nt, Human
uggccagccccuuagacagag

SEQ ID NO: 3857021 - RNA, 11 nt, Human
uggccagcccg

SEQ ID NO: 3857022 - RNA, 16 nt, Human
uggccagcccggcugg

SEQ ID NO: 3857023 - RNA, 15 nt, Human
uggccagccuggggc

SEQ ID NO: 3857024 - RNA, 20 nt, Human
uggccagccuggggccuggc

SEQ ID NO: 3857025 - RNA, 21 nt, Human
uggccagcuggaggcaggggc

SEQ ID NO: 3857026 - RNA, 21 nt, Human
uggccaggaagcuuuggugag

SEQ ID NO: 3857027 - RNA, 22 nt, Human
uggccaggagcaggcacgggug

SEQ ID NO: 3857028 - RNA, 16 nt, Human
uggccaggaggugcca

SEQ ID NO: 3857029 - RNA, 23 nt, Human
uggccaggcagaucugugcccca

SEQ ID NO: 3857030 - RNA, 15 nt, Human
uggccaggccgggaa

SEQ ID NO: 3857031 - RNA, 19 nt, Human
uggccaggccucuuggcag

SEQ ID NO: 3857032 - RNA, 12 nt, Human
uggccaggguga

SEQ ID NO: 3857033 - RNA, 15 nt, Human
uggccagguggccac

SEQ ID NO: 3857034 - RNA, 17 nt, Human
uggccagguggccacuc

SEQ ID NO: 3857035 - RNA, 15 nt, Human
uggccaguccaggcu

SEQ ID NO: 3857036 - RNA, 18 nt, Human
uggccagugcccugaucc

SEQ ID NO: 3857037 - RNA, 18 nt, Human
uggccaguguuuaaaacu

SEQ ID NO: 3857038 - RNA, 19 nt, Human
uggccaguguuuaaaacuu

SEQ ID NO: 3857039 - RNA, 22 nt, Human
uggccauauuuaccucagccug

SEQ ID NO: 3857040 - RNA, 24 nt, Human
uggccauauuuaccucagccuggg

SEQ ID NO: 3857041 - RNA, 14 nt, Human
uggccaucauuucu

SEQ ID NO: 3857042 - RNA, 13 nt, Human
uggccaucuccac

SEQ ID NO: 3857043 - RNA, 14 nt, Human
uggccaucucugga

SEQ ID NO: 3857044 - RNA, 17 nt, Human
uggccaucucuggaugc

SEQ ID NO: 3857045 - RNA, 15 nt, Human
uggccaucugcuccu

SEQ ID NO: 3857046 - RNA, 18 nt, Human
uggccaucugcuccugga

SEQ ID NO: 3857047 - RNA, 22 nt, Human
uggccaugaagaggaugcugug

SEQ ID NO: 3857048 - RNA, 20 nt, Human
uggccaugacccugccucuc

SEQ ID NO: 3857049 - RNA, 17 nt, Human
uggccaugaugacaacu

SEQ ID NO: 3857050 - RNA, 20 nt, Human
uggccaugccucagcccuga

SEQ ID NO: 3857051 - RNA, 16 nt, Human
uggccaugcuccucuu

SEQ ID NO: 3857052 - RNA, 22 nt, Human
uggccaugcuccucuuccccag

SEQ ID NO: 3857053 - RNA, 17 nt, Human
uggccauggagaaagcu

SEQ ID NO: 3857054 - RNA, 22 nt, Human
uggccauggagaaagcugacuu

SEQ ID NO: 3857055 - RNA, 18 nt, Human
uggccaugguacccccuu

SEQ ID NO: 3857056 - RNA, 14 nt, Human
uggccauuugcuuu

SEQ ID NO: 3857057 - RNA, 15 nt, Human
uggccauuugcuuuu

SEQ ID NO: 3857058 - RNA, 16 nt, Human
uggcccaaggcuggca

SEQ ID NO: 3857059 - RNA, 18 nt, Human
uggcccaaggcuggcagg

SEQ ID NO: 3857060 - RNA, 13 nt, Human
uggcccagcccug

SEQ ID NO: 3857061 - RNA, 17 nt, Human
uggcccagcccugcugg

SEQ ID NO: 3857062 - RNA, 13 nt, Human
uggcccagccggc

SEQ ID NO: 3857063 - RNA, 17 nt, Human
uggcccagccggccucu

SEQ ID NO: 3857064 - RNA, 18 nt, Human
uggcccagccggccucuc

SEQ ID NO: 3857065 - RNA, 17 nt, Human
uggcccagcggccccuc

SEQ ID NO: 3857066 - RNA, 14 nt, Human
uggcccagcucccc

SEQ ID NO: 3857067 - RNA, 17 nt, Human
uggcccaggaccaucau

SEQ ID NO: 3857068 - RNA, 21 nt, Human
uggcccaggaguuuggccaga

SEQ ID NO: 3857069 - RNA, 22 nt, Human
uggcccaggaguuuggccagaa

SEQ ID NO: 3857070 - RNA, 18 nt, Human
uggcccagggcccagagc

SEQ ID NO: 3857071 - RNA, 21 nt, Human
uggcccagggcccagagccca

SEQ ID NO: 3857072 - RNA, 22 nt, Human
uggcccagggcccagagcccag

SEQ ID NO: 3857073 - RNA, 23 nt, Human
uggcccagggugagguggcaugg

SEQ ID NO: 3857074 - RNA, 16 nt, Human
uggcccaggguggcca

SEQ ID NO: 3857075 - RNA, 19 nt, Human
uggcccaguccucucccaa

SEQ ID NO: 3857076 - RNA, 23 nt, Human
uggcccauagaaacaugacacug

SEQ ID NO: 3857077 - RNA, 12 nt, Human
uggcccaucagg

SEQ ID NO: 3857078 - RNA, 12 nt, Human
uggcccaucagu

SEQ ID NO: 3857079 - RNA, 20 nt, Human
uggcccauccccccucacca

SEQ ID NO: 3857080 - RNA, 21 nt, Human
uggcccauccccccucaccag

SEQ ID NO: 3857081 - RNA, 17 nt, Human
uggcccauguauggcca

SEQ ID NO: 3857082 - RNA, 23 nt, Human
uggcccauucuacuugcucugga

SEQ ID NO: 3857083 - RNA, 18 nt, Human
uggccccacaccagcccc

SEQ ID NO: 3857084 - RNA, 22 nt, Human
uggccccacccucguggacacc

SEQ ID NO: 3857085 - RNA, 16 nt, Human
uggccccacccugggc

SEQ ID NO: 3857086 - RNA, 16 nt, Human
uggccccaccuggccc

SEQ ID NO: 3857087 - RNA, 12 nt, Human
uggccccagcac

SEQ ID NO: 3857088 - RNA, 14 nt, Human
uggccccagcacag

SEQ ID NO: 3857089 - RNA, 21 nt, Human
uggccccagcccugcugggga

SEQ ID NO: 3857090 - RNA, 13 nt, Human
uggccccagccug

SEQ ID NO: 3857091 - RNA, 16 nt, Human
uggccccagccuggcc

SEQ ID NO: 3857092 - RNA, 18 nt, Human
uggccccagggcacccug

SEQ ID NO: 3857093 - RNA, 21 nt, Human
uggccccaugucucucagaau

SEQ ID NO: 3857094 - RNA, 13 nt, Human
uggcccccacugg

SEQ ID NO: 3857095 - RNA, 14 nt, Human
uggcccccacuggc

SEQ ID NO: 3857096 - RNA, 13 nt, Human
ugguuagaaaagu

SEQ ID NO: 3857097 - RNA, 13 nt, Human
ugguuagaaaugc

SEQ ID NO: 3857098 - RNA, 15 nt, Human
ugguuagcucagccc

SEQ ID NO: 3857099 - RNA, 21 nt, Human
ugguuagcucagccccagccc

SEQ ID NO: 3857100 - RNA, 23 nt, Human
ugguuagcucagccccagcccag

SEQ ID NO: 3857101 - RNA, 21 nt, Human
ugguuaguagagguacacuug

SEQ ID NO: 3857102 - RNA, 20 nt, Human
ugguuauaaaagugauuguu

SEQ ID NO: 3857103 - RNA, 17 nt, Human
ugguuauaacuuaauga

SEQ ID NO: 3857104 - RNA, 18 nt, Human
ugguuauacaaguucuug

SEQ ID NO: 3857105 - RNA, 12 nt, Human
ugguuauacaug

SEQ ID NO: 3857106 - RNA, 14 nt, Human
ugguuauagugcaa

SEQ ID NO: 3857107 - RNA, 22 nt, Human
ugguuauagugcaauauauuuu

SEQ ID NO: 3857108 - RNA, 19 nt, Human
ugguuaugaaagaauauau

SEQ ID NO: 3857109 - RNA, 20 nt, Human
ugguuaugaaagaauauauu

SEQ ID NO: 3857110 - RNA, 12 nt, Human
ugguuaugaacu

SEQ ID NO: 3857111 - RNA, 17 nt, Human
ugguuaugaauacuuug

SEQ ID NO: 3857112 - RNA, 21 nt, Human
ugguucaaauguguuuugguc

SEQ ID NO: 3857113 - RNA, 21 nt, Human
ugguucacucuuggagccugc

SEQ ID NO: 3857114 - RNA, 16 nt, Human
ugguucauaaaugaau

SEQ ID NO: 3857115 - RNA, 18 nt, Human
ugguucaucaguguuaaa

SEQ ID NO: 3857116 - RNA, 17 nt, Human
ugguucauuuucagauu

SEQ ID NO: 3857117 - RNA, 13 nt, Human
ugguuccaagccc

SEQ ID NO: 3857118 - RNA, 16 nt, Human
ugguuccaagcccugg

SEQ ID NO: 3857119 - RNA, 20 nt, Human
ugguuccaagucuuugcuau

SEQ ID NO: 3857120 - RNA, 18 nt, Human
ugguuccccuguucacuc

SEQ ID NO: 3857121 - RNA, 20 nt, Human
ugguucccguuucuccaccu

SEQ ID NO: 3857122 - RNA, 14 nt, Human
ugguucccuuccua

SEQ ID NO: 3857123 - RNA, 21 nt, Human
ugguucccuuugcuccacccc

SEQ ID NO: 3857124 - RNA, 23 nt, Human
ugguucccuuugcuccaccccac

SEQ ID NO: 3857125 - RNA, 20 nt, Human
ugguuccggaauccuguccu

SEQ ID NO: 3857126 - RNA, 18 nt, Human
ugguuccuggggcaucca

SEQ ID NO: 3857127 - RNA, 17 nt, Human
ugguucuaaggaccuga

SEQ ID NO: 3857128 - RNA, 15 nt, Human
ugguucuaauagaac

SEQ ID NO: 3857129 - RNA, 18 nt, Human
ugguucugagauggcucc

SEQ ID NO: 3857130 - RNA, 20 nt, Human
ugguucugaugaugugccug

SEQ ID NO: 3857131 - RNA, 13 nt, Human
ugguucugugaac

SEQ ID NO: 3857132 - RNA, 21 nt, Human
aaggagcugcuauagccuggg

SEQ ID NO: 3857133 - RNA, 11 nt, Human
aaggaggaaaa

SEQ ID NO: 3857134 - RNA, 16 nt, Human
aaggaggaaggagccu

SEQ ID NO: 3857135 - RNA, 15 nt, Human
aaggaggacccagga

SEQ ID NO: 3857136 - RNA, 18 nt, Human
aaggaggacccaggacag

SEQ ID NO: 3857137 - RNA, 21 nt, Human
aaggaggacccaggacaggau

SEQ ID NO: 3857138 - RNA, 16 nt, Human
aaggaggcaugccucu

SEQ ID NO: 3857139 - RNA, 18 nt, Human
aaggaggcuaugcucagg

SEQ ID NO: 3857140 - RNA, 17 nt, Human
aaggaggcuccaggcag

SEQ ID NO: 3857141 - RNA, 18 nt, Human
aaggaggcuccaggcagc

SEQ ID NO: 3857142 - RNA, 14 nt, Human
aaggaggcuggcag

SEQ ID NO: 3857143 - RNA, 17 nt, Human
aaggagggaaggauuua

SEQ ID NO: 3857144 - RNA, 17 nt, Human
aaggaggggaaaaaaau

SEQ ID NO: 3857145 - RNA, 15 nt, Human
aaggaggggaagcug

SEQ ID NO: 3857146 - RNA, 15 nt, Human
aaggaguaagaaccu

SEQ ID NO: 3857147 - RNA, 20 nt, Human
aaggagucagacauuuuaag

SEQ ID NO: 3857148 - RNA, 19 nt, Human
aaggagugagaucauuuuc

SEQ ID NO: 3857149 - RNA, 12 nt, Human
aaggauaaagaa

SEQ ID NO: 3857150 - RNA, 20 nt, Human
aaggauaaaucauaaaguca

SEQ ID NO: 3857151 - RNA, 13 nt, Human
aaggauacaaaag

SEQ ID NO: 3857152 - RNA, 14 nt, Human
aaggauacauaaug

SEQ ID NO: 3857153 - RNA, 20 nt, Human
aaggauagaugcuggcccag

SEQ ID NO: 3857154 - RNA, 22 nt, Human
aaggauaggccuucauuaacaa

SEQ ID NO: 3857155 - RNA, 15 nt, Human
aaggauaguaagcau

SEQ ID NO: 3857156 - RNA, 20 nt, Human
aaggauagugcgauguuuca

SEQ ID NO: 3857157 - RNA, 19 nt, Human
aaggauauuuaagaaaaua

SEQ ID NO: 3857158 - RNA, 17 nt, Human
aaggauccggaaagaag

SEQ ID NO: 3857159 - RNA, 13 nt, Human
aaggauccugagc

SEQ ID NO: 3857160 - RNA, 14 nt, Human
aaggauccugagcc

SEQ ID NO: 3857161 - RNA, 22 nt, Human
aaggauccugagccagauuuca

SEQ ID NO: 3857162 - RNA, 20 nt, Human
aaggaucucucaggagcaca

SEQ ID NO: 3857163 - RNA, 23 nt, Human
aaggaucuguuuuuaaaaaucau

SEQ ID NO: 3857164 - RNA, 14 nt, Human
aaggaucuucaucu

SEQ ID NO: 3857165 - RNA, 23 nt, Human
aaggaucuuucacccacagaaag

SEQ ID NO: 3857166 - RNA, 20 nt, Human
aaggaucuuuguggccaagg

SEQ ID NO: 3857167 - RNA, 23 nt, Human
aaggaugaaugaggucccaggca

SEQ ID NO: 3857168 - RNA, 18 nt, Human
aaggaugcacagaguugu

SEQ ID NO: 3857169 - RNA, 22 nt, Human
aaggaugcacagaguuguuaca

SEQ ID NO: 3857170 - RNA, 22 nt, Human
aaggaugccaagaaguuuaagg

SEQ ID NO: 3857171 - RNA, 15 nt, Human
aaggaugcuuguaca

SEQ ID NO: 3857172 - RNA, 17 nt, Human
aaggaugcuuguacaua

SEQ ID NO: 3857173 - RNA, 15 nt, Human
aaggauguucuagca

SEQ ID NO: 3857174 - RNA, 15 nt, Human
aaggauguugguguu

SEQ ID NO: 3857175 - RNA, 22 nt, Human
aaggauucugcuggccucugcg

SEQ ID NO: 3857176 - RNA, 13 nt, Human
aaggauugaaaau

SEQ ID NO: 3857177 - RNA, 14 nt, Human
aaggauugaaaauu

SEQ ID NO: 3857178 - RNA, 14 nt, Human
aaggauuguaaaaa

SEQ ID NO: 3857179 - RNA, 21 nt, Human
aaggauuguaaaaaaaaaugc

SEQ ID NO: 3857180 - RNA, 12 nt, Human
aaggauuuuaug

SEQ ID NO: 3857181 - RNA, 13 nt, Human
aaggauuuuaugc

SEQ ID NO: 3857182 - RNA, 21 nt, Human
aaggauuuuaugcuuuaaaca

SEQ ID NO: 3857183 - RNA, 14 nt, Human
aaggauuuugcagu

SEQ ID NO: 3857184 - RNA, 15 nt, Human
aaggauuuugcaguu

SEQ ID NO: 3857185 - RNA, 21 nt, Human
aaggcaaaaauaguuuggaua

SEQ ID NO: 3857186 - RNA, 21 nt, Human
aaggcaaaggguccagaagga

SEQ ID NO: 3857187 - RNA, 15 nt, Human
aaggcaaaugacuuu

SEQ ID NO: 3857188 - RNA, 16 nt, Human
aaggcaaaugacuuug

SEQ ID NO: 3857189 - RNA, 22 nt, Human
aaggcaacaaaagaagcccggc

SEQ ID NO: 3857190 - RNA, 19 nt, Human
aaggcaagaggggguggag

SEQ ID NO: 3857191 - RNA, 16 nt, Human
aaggcaaggcugucaa

SEQ ID NO: 3857192 - RNA, 17 nt, Human
aaggcaaggcugucaau

SEQ ID NO: 3857193 - RNA, 21 nt, Human
aaggcaaguuaagagaaacuu

SEQ ID NO: 3857194 - RNA, 16 nt, Human
aaggcacaugucaccu

SEQ ID NO: 3857195 - RNA, 19 nt, Human
aaggcacccacaaauaaau

SEQ ID NO: 3857196 - RNA, 19 nt, Human
aaggcacccaucugucugc

SEQ ID NO: 3857197 - RNA, 16 nt, Human
aaggcacucuagauuc

SEQ ID NO: 3857198 - RNA, 19 nt, Human
aaggcacucuagauuccau

SEQ ID NO: 3857199 - RNA, 21 nt, Human
aaggcacucuguuauuuagac

SEQ ID NO: 3857200 - RNA, 17 nt, Human
aaggcagaaagcaaaau

SEQ ID NO: 3857201 - RNA, 15 nt, Human
aaggcagaggccugg

SEQ ID NO: 3857202 - RNA, 13 nt, Human
aaggcagcaggcg

SEQ ID NO: 3857203 - RNA, 18 nt, Human
aaggcagcuguugucucu

SEQ ID NO: 3857204 - RNA, 21 nt, Human
aaggcagcuguugucucuucu

SEQ ID NO: 3857205 - RNA, 19 nt, Human
aaggcaggaauguguggca

SEQ ID NO: 3857206 - RNA, 22 nt, Human
aaggcaggcagggcucuccugg

SEQ ID NO: 3857207 - RNA, 19 nt, Human
aaggcagggagggccuggg

SEQ ID NO: 3857208 - RNA, 22 nt, Human
aaggcagggagggccugggccc

SEQ ID NO: 3857209 - RNA, 15 nt, Human
aaggcaguuuucuaa

SEQ ID NO: 3857210 - RNA, 20 nt, Human
aaggcauaucagucucugag

SEQ ID NO: 3857211 - RNA, 23 nt, Human
aaggcaugccuggacaaacccuu

SEQ ID NO: 3857212 - RNA, 15 nt, Human
aaggcaugugugaaa

SEQ ID NO: 3857213 - RNA, 18 nt, Human
aaggcaugugugaaacau

SEQ ID NO: 3857214 - RNA, 15 nt, Human
aaggcauuucccacc

SEQ ID NO: 3857215 - RNA, 13 nt, Human
aaggcauuuuauu

SEQ ID NO: 3857216 - RNA, 17 nt, Human
aaggccaaacugcugga

SEQ ID NO: 3857217 - RNA, 18 nt, Human
aaggccaaaggaagcaca

SEQ ID NO: 3857218 - RNA, 19 nt, Human
aaggccaagaggcuguucc

SEQ ID NO: 3857219 - RNA, 20 nt, Human
aaggccaccucuuccuggcc

SEQ ID NO: 3857220 - RNA, 18 nt, Human
aaggccagaccugcagac

SEQ ID NO: 3857221 - RNA, 19 nt, Human
aaggccagcaagguggagu

SEQ ID NO: 3857222 - RNA, 14 nt, Human
aaggccauaaaaca

SEQ ID NO: 3857223 - RNA, 22 nt, Human
aaggccauggagagcuggagcc

SEQ ID NO: 3857224 - RNA, 15 nt, Human
aaggcccacaggagg

SEQ ID NO: 3857225 - RNA, 14 nt, Human
aaggccccagagac

SEQ ID NO: 3857226 - RNA, 15 nt, Human
aaggccccagagacu

SEQ ID NO: 3857227 - RNA, 14 nt, Human
aaggcccccuacgc

SEQ ID NO: 3857228 - RNA, 22 nt, Human
aaggcccccucucaggagccau

SEQ ID NO: 3857229 - RNA, 14 nt, Human
aaggcccccugccu

SEQ ID NO: 3857230 - RNA, 15 nt, Human
aaggcccccugccug

SEQ ID NO: 3857231 - RNA, 14 nt, Human
aaggccccgcccag

SEQ ID NO: 3857232 - RNA, 20 nt, Human
aaggcccgagcagcugagca

SEQ ID NO: 3857233 - RNA, 22 nt, Human
aaggcccuaucuguuuacagug

SEQ ID NO: 3857234 - RNA, 15 nt, Human
aaggcccugcugccc

SEQ ID NO: 3857235 - RNA, 16 nt, Human
aaggccgaagcucugg

SEQ ID NO: 3857236 - RNA, 18 nt, Human
aaggccgaagcucuggcu

SEQ ID NO: 3857237 - RNA, 22 nt, Human
aaggccgcuguucacccacagg

SEQ ID NO: 3857238 - RNA, 22 nt, Human
aaggccuaauucuaugccuguc

SEQ ID NO: 3857239 - RNA, 18 nt, Human
aaggccuaggauucuaaa

SEQ ID NO: 3857240 - RNA, 16 nt, Human
aaggccucccacagug

SEQ ID NO: 3857241 - RNA, 18 nt, Human
aaggccucgcaggaagac

SEQ ID NO: 3857242 - RNA, 13 nt, Human
aaggccucugucc

SEQ ID NO: 3857243 - RNA, 16 nt, Human
aaggccucuuccuugc

SEQ ID NO: 3857244 - RNA, 23 nt, Human
aaggccucuuggagaccuuaccc

SEQ ID NO: 3857245 - RNA, 13 nt, Human
aaggccugaauca

SEQ ID NO: 3857246 - RNA, 14 nt, Human
aaggccugcacaca

SEQ ID NO: 3857247 - RNA, 17 nt, Human
aaggccuggcccacagc

SEQ ID NO: 3857248 - RNA, 12 nt, Human
aaggccugggug

SEQ ID NO: 3857249 - RNA, 21 nt, Human
aaggccuuauucuacauuuca

SEQ ID NO: 3857250 - RNA, 18 nt, Human
aaggccuucaacccgaga

SEQ ID NO: 3857251 - RNA, 20 nt, Human
aaggccuucauggccccagc

SEQ ID NO: 3857252 - RNA, 15 nt, Human
aaggccuucuccucc

SEQ ID NO: 3857253 - RNA, 15 nt, Human
aaggccuuuaaaauu

SEQ ID NO: 3857254 - RNA, 14 nt, Human
aaggccuuucugug

SEQ ID NO: 3857255 - RNA, 23 nt, Human
aaggcgaucccaucuugauaaga

SEQ ID NO: 3857256 - RNA, 23 nt, Human
aaggcgcuaacuugcuuaaaugu

SEQ ID NO: 3857257 - RNA, 17 nt, Human
aaggcgcugagacugug

SEQ ID NO: 3857258 - RNA, 21 nt, Human
aaggcgguggacuugaacuuu

SEQ ID NO: 3857259 - RNA, 22 nt, Human
aaggcguagcaucauccugcag

SEQ ID NO: 3857260 - RNA, 15 nt, Human
aaggcuaccuuugua

SEQ ID NO: 3857261 - RNA, 15 nt, Human
aaggcuacucaccuu

SEQ ID NO: 3857262 - RNA, 16 nt, Human
aaggcucagucucagg

SEQ ID NO: 3857263 - RNA, 15 nt, Human
aaggcuccaagaccu

SEQ ID NO: 3857264 - RNA, 16 nt, Human
aaggcuccaggagcag

SEQ ID NO: 3857265 - RNA, 18 nt, Human
aaggcuccaggagcagcc

SEQ ID NO: 3857266 - RNA, 22 nt, Human
aaggcuccaggagcagccacau

SEQ ID NO: 3857267 - RNA, 16 nt, Human
aaggcuccauauauau

SEQ ID NO: 3857268 - RNA, 20 nt, Human
aaggcucgagcaugccugga

SEQ ID NO: 3857269 - RNA, 15 nt, Human
aaggcucgauuuugu

SEQ ID NO: 3857270 - RNA, 20 nt, Human
aaggcucuaugagucuagau

SEQ ID NO: 3857271 - RNA, 12 nt, Human
aaggcucugaga

SEQ ID NO: 3857272 - RNA, 13 nt, Human
aaggcucugagag

SEQ ID NO: 3857273 - RNA, 14 nt, Human
aaggcucugagagu

SEQ ID NO: 3857274 - RNA, 20 nt, Human
aaggcucugagagucuagau

SEQ ID NO: 3857275 - RNA, 23 nt, Human
aaggcucuguuccacauauauuu

SEQ ID NO: 3857276 - RNA, 17 nt, Human
aaggcucuucuccccag

SEQ ID NO: 3857277 - RNA, 19 nt, Human
aaggcucuucuccccagag

SEQ ID NO: 3857278 - RNA, 15 nt, Human
aaggcugaccaagag

SEQ ID NO: 3857279 - RNA, 20 nt, Human
aaggcugaggaaaggccagc

SEQ ID NO: 3857280 - RNA, 18 nt, Human
aaggcuggagugcagugg

SEQ ID NO: 3857281 - RNA, 17 nt, Human
uguaaucucucugcagc

SEQ ID NO: 3857282 - RNA, 19 nt, Human
uguaaucucucugcagcug

SEQ ID NO: 3857283 - RNA, 21 nt, Human
uguaaucucucugcagcugcc

SEQ ID NO: 3857284 - RNA, 11 nt, Human
uguaaugaaaa

SEQ ID NO: 3857285 - RNA, 17 nt, Human
uguaaugaaacaccuuc

SEQ ID NO: 3857286 - RNA, 19 nt, Human
uguaaugaaccgcugaaua

SEQ ID NO: 3857287 - RNA, 15 nt, Human
uguaaugaaguaaag

SEQ ID NO: 3857288 - RNA, 15 nt, Human
uguaaugaauaccuu

SEQ ID NO: 3857289 - RNA, 12 nt, Human
uguaaugacagg

SEQ ID NO: 3857290 - RNA, 14 nt, Human
uguaaugcugcacu

SEQ ID NO: 3857291 - RNA, 19 nt, Human
uguaaugguacugacuuug

SEQ ID NO: 3857292 - RNA, 22 nt, Human
uguaaugucccuuucagagaca

SEQ ID NO: 3857293 - RNA, 15 nt, Human
uguaaugucuugagc

SEQ ID NO: 3857294 - RNA, 19 nt, Human
uguaaugucuugagcucua

SEQ ID NO: 3857295 - RNA, 18 nt, Human
uguaaugugugguggccu

SEQ ID NO: 3857296 - RNA, 20 nt, Human
uguaaugugugguggccuca

SEQ ID NO: 3857297 - RNA, 14 nt, Human
uguaauguuaauau

SEQ ID NO: 3857298 - RNA, 13 nt, Human
uguaauguuacug

SEQ ID NO: 3857299 - RNA, 13 nt, Human
uguaauguuuucu

SEQ ID NO: 3857300 - RNA, 18 nt, Human
uguaauguuuucuuugca

SEQ ID NO: 3857301 - RNA, 19 nt, Human
uguaauuaaaagcaaauca

SEQ ID NO: 3857302 - RNA, 17 nt, Human
uguaauuaaauuauggu

SEQ ID NO: 3857303 - RNA, 17 nt, Human
uguaauuaaguacuaug

SEQ ID NO: 3857304 - RNA, 13 nt, Human
uguaauucagugu

SEQ ID NO: 3857305 - RNA, 13 nt, Human
uguaauucuaaau

SEQ ID NO: 3857306 - RNA, 19 nt, Human
uguaauugacgguuuuuua

SEQ ID NO: 3857307 - RNA, 13 nt, Human
uguaauugauugu

SEQ ID NO: 3857308 - RNA, 15 nt, Human
uguaauugcuuacau

SEQ ID NO: 3857309 - RNA, 17 nt, Human
uguaauugcuuacauuu

SEQ ID NO: 3857310 - RNA, 18 nt, Human
uguaauuguaauuuugaa

SEQ ID NO: 3857311 - RNA, 20 nt, Human
uguaauuguguggauucuuu

SEQ ID NO: 3857312 - RNA, 19 nt, Human
uguaauuguuguuuguaug

SEQ ID NO: 3857313 - RNA, 15 nt, Human
uguaauuguuugucu

SEQ ID NO: 3857314 - RNA, 17 nt, Human
uguaauuuaaaauugug

SEQ ID NO: 3857315 - RNA, 21 nt, Human
uguaauuuaaacaggcccagc

SEQ ID NO: 3857316 - RNA, 19 nt, Human
uguaauuugaugagguauu

SEQ ID NO: 3857317 - RNA, 17 nt, Human
uguaauuuuauuuuaaa

SEQ ID NO: 3857318 - RNA, 20 nt, Human
uguaauuuuauuuuaaaauu

SEQ ID NO: 3857319 - RNA, 15 nt, Human
uguaauuuucuugau

SEQ ID NO: 3857320 - RNA, 15 nt, Human
uguaauuuuguguaa

SEQ ID NO: 3857321 - RNA, 22 nt, Human
uguacaaaaaaaucuuccaauu

SEQ ID NO: 3857322 - RNA, 13 nt, Human
uguacaaaauuaa

SEQ ID NO: 3857323 - RNA, 19 nt, Human
uguacaaaauuaagcaaau

SEQ ID NO: 3857324 - RNA, 24 nt, Human
uguacaaaauuaagcaaauguuaa

SEQ ID NO: 3857325 - RNA, 14 nt, Human
uguacaaaggggaa

SEQ ID NO: 3857326 - RNA, 22 nt, Human
uguacaaaggggaaagaacaua

SEQ ID NO: 3857327 - RNA, 14 nt, Human
uguacaaaguauua

SEQ ID NO: 3857328 - RNA, 17 nt, Human
uguacaaaguauuaagc

SEQ ID NO: 3857329 - RNA, 20 nt, Human
uguacaaaguauuaagcaua

SEQ ID NO: 3857330 - RNA, 19 nt, Human
uguacaaauaaagucccag

SEQ ID NO: 3857331 - RNA, 18 nt, Human
uguacaaauauaagaaua

SEQ ID NO: 3857332 - RNA, 17 nt, Human
uguacaaccugugauca

SEQ ID NO: 3857333 - RNA, 18 nt, Human
uguacaaugacuuuauug

SEQ ID NO: 3857334 - RNA, 18 nt, Human
uguacaauguacacacug

SEQ ID NO: 3857335 - RNA, 16 nt, Human
uguacaauuaaaaacc

SEQ ID NO: 3857336 - RNA, 22 nt, Human
uguacaauugaacuuaaauaaa

SEQ ID NO: 3857337 - RNA, 23 nt, Human
uguacaauugaacuuaaauaaau

SEQ ID NO: 3857338 - RNA, 21 nt, Human
uguacacaacucacuccuuuu

SEQ ID NO: 3857339 - RNA, 14 nt, Human
uguacacugaauau

SEQ ID NO: 3857340 - RNA, 16 nt, Human
uguacacugaauauuu

SEQ ID NO: 3857341 - RNA, 17 nt, Human
uguacacugacuugaga

SEQ ID NO: 3857342 - RNA, 12 nt, Human
uguacacuuuuu

SEQ ID NO: 3857343 - RNA, 21 nt, Human
uguacagaaaagggcggcuuc

SEQ ID NO: 3857344 - RNA, 15 nt, Human
uguacagaauauuuc

SEQ ID NO: 3857345 - RNA, 20 nt, Human
uguacagacguaugcuuauu

SEQ ID NO: 3857346 - RNA, 21 nt, Human
uguacagagaacuaacacuau

SEQ ID NO: 3857347 - RNA, 18 nt, Human
uguacagagcccacgccc

SEQ ID NO: 3857348 - RNA, 21 nt, Human
uguacagagccguaaaaacug

SEQ ID NO: 3857349 - RNA, 19 nt, Human
uguacagagugcuuuucug

SEQ ID NO: 3857350 - RNA, 12 nt, Human
uguacagcccag

SEQ ID NO: 3857351 - RNA, 16 nt, Human
uguacaggaacugcau

SEQ ID NO: 3857352 - RNA, 18 nt, Human
uguacaguauguucaaag

SEQ ID NO: 3857353 - RNA, 13 nt, Human
uguacagucuguc

SEQ ID NO: 3857354 - RNA, 14 nt, Human
uguacagucuguca

SEQ ID NO: 3857355 - RNA, 18 nt, Human
uguacagucugucaugaa

SEQ ID NO: 3857356 - RNA, 23 nt, Human
uguacagucugucaugaacaugu

SEQ ID NO: 3857357 - RNA, 21 nt, Human
uguacagucuuguauuaaguu

SEQ ID NO: 3857358 - RNA, 15 nt, Human
uguacagugucuuuu

SEQ ID NO: 3857359 - RNA, 17 nt, Human
uguacaguguguaaagu

SEQ ID NO: 3857360 - RNA, 14 nt, Human
uguacaguguuacc

SEQ ID NO: 3857361 - RNA, 23 nt, Human
uguccaucugcccgccugcccac

SEQ ID NO: 3857362 - RNA, 13 nt, Human
uguccaugugugu

SEQ ID NO: 3857363 - RNA, 19 nt, Human
uguccauugacauguacag

SEQ ID NO: 3857364 - RNA, 20 nt, Human
uguccauugacauguacaga

SEQ ID NO: 3857365 - RNA, 22 nt, Human
uguccauugacauguacagaga

SEQ ID NO: 3857366 - RNA, 20 nt, Human
uguccauuuauccacaggaa

SEQ ID NO: 3857367 - RNA, 14 nt, Human
uguccauuuuuaca

SEQ ID NO: 3857368 - RNA, 12 nt, Human
ugucccaagugc

SEQ ID NO: 3857369 - RNA, 15 nt, Human
ugucccaagugccaa

SEQ ID NO: 3857370 - RNA, 20 nt, Human
ugucccacagcuuggggcca

SEQ ID NO: 3857371 - RNA, 23 nt, Human
ugucccacccccacccccagcuc

SEQ ID NO: 3857372 - RNA, 13 nt, Human
ugucccaccucuu

SEQ ID NO: 3857373 - RNA, 23 nt, Human
ugucccaccucuucucuuccugu

SEQ ID NO: 3857374 - RNA, 14 nt, Human
ugucccagaagaug

SEQ ID NO: 3857375 - RNA, 17 nt, Human
ugucccaggcagggaga

SEQ ID NO: 3857376 - RNA, 17 nt, Human
ugucccagguccucacu

SEQ ID NO: 3857377 - RNA, 19 nt, Human
ugucccaucuggucauuug

SEQ ID NO: 3857378 - RNA, 14 nt, Human
ugucccaugaccca

SEQ ID NO: 3857379 - RNA, 16 nt, Human
ugucccaugacccacc

SEQ ID NO: 3857380 - RNA, 22 nt, Human
ugucccaugugagcugcugcca

SEQ ID NO: 3857381 - RNA, 19 nt, Human
uguccccaaauccgaaccu

SEQ ID NO: 3857382 - RNA, 15 nt, Human
uguccccacacuccu

SEQ ID NO: 3857383 - RNA, 11 nt, Human
uguccccacca

SEQ ID NO: 3857384 - RNA, 17 nt, Human
uguccccaccaucugcu

SEQ ID NO: 3857385 - RNA, 21 nt, Human
uguccccaccaucugcugucu

SEQ ID NO: 3857386 - RNA, 22 nt, Human
uguccccacccuccacucagcu

SEQ ID NO: 3857387 - RNA, 22 nt, Human
uguccccaccgcagacaggacc

SEQ ID NO: 3857388 - RNA, 15 nt, Human
uguccccagcccacu

SEQ ID NO: 3857389 - RNA, 19 nt, Human
uguccccaguuugcagaaa

SEQ ID NO: 3857390 - RNA, 13 nt, Human
ugucccccaacuu

SEQ ID NO: 3857391 - RNA, 15 nt, Human
ugucccccaacuuca

SEQ ID NO: 3857392 - RNA, 14 nt, Human
ugucccccaacuug

SEQ ID NO: 3857393 - RNA, 16 nt, Human
ugucccccaacuugag

SEQ ID NO: 3857394 - RNA, 15 nt, Human
ugucccccagcucug

SEQ ID NO: 3857395 - RNA, 14 nt, Human
ugucccccugagau

SEQ ID NO: 3857396 - RNA, 23 nt, Human
ugucccccugagaucagaguccu

SEQ ID NO: 3857397 - RNA, 17 nt, Human
uguccccgacccuugcc

SEQ ID NO: 3857398 - RNA, 19 nt, Human
uguccccgcacugggcuug

SEQ ID NO: 3857399 - RNA, 13 nt, Human
uguccccuauccu

SEQ ID NO: 3857400 - RNA, 13 nt, Human
uguccccucagcu

SEQ ID NO: 3857401 - RNA, 13 nt, Human
uguccccucccag

SEQ ID NO: 3857402 - RNA, 21 nt, Human
uguccccuccucacucccuuc

SEQ ID NO: 3857403 - RNA, 14 nt, Human
uguccccucuugac

SEQ ID NO: 3857404 - RNA, 14 nt, Human
uguccccuucucuc

SEQ ID NO: 3857405 - RNA, 20 nt, Human
uguccccuucucucaucucu

SEQ ID NO: 3857406 - RNA, 20 nt, Human
ugucccgggguccuguggca

SEQ ID NO: 3857407 - RNA, 19 nt, Human
ugucccuacaccccucccc

SEQ ID NO: 3857408 - RNA, 13 nt, Human
ugucccuaggugu

SEQ ID NO: 3857409 - RNA, 12 nt, Human
ugucccucccac

SEQ ID NO: 3857410 - RNA, 22 nt, Human
ugucccuccuggugucacccca

SEQ ID NO: 3857411 - RNA, 15 nt, Human
ugucccucucaggca

SEQ ID NO: 3857412 - RNA, 15 nt, Human
ugucccucugcccca

SEQ ID NO: 3857413 - RNA, 16 nt, Human
ugucccucugccccau

SEQ ID NO: 3857414 - RNA, 14 nt, Human
ugucccucuucacu

SEQ ID NO: 3857415 - RNA, 16 nt, Human
ugucccucuucacucc

SEQ ID NO: 3857416 - RNA, 15 nt, Human
ugucccugaaaccua

SEQ ID NO: 3857417 - RNA, 14 nt, Human
ugucccugcacuug

SEQ ID NO: 3857418 - RNA, 22 nt, Human
ugucccuggccaucucugaacu

SEQ ID NO: 3857419 - RNA, 15 nt, Human
ugucccuggcuuccu

SEQ ID NO: 3857420 - RNA, 17 nt, Human
ugucccuggcuuccuua

SEQ ID NO: 3857421 - RNA, 15 nt, Human
ugucccugggccagg

SEQ ID NO: 3857422 - RNA, 20 nt, Human
ugucccuucugucccucaca

SEQ ID NO: 3857423 - RNA, 18 nt, Human
ugucccuugccccccugg

SEQ ID NO: 3857424 - RNA, 22 nt, Human
ugucccuugccucaaugccagu

SEQ ID NO: 3857425 - RNA, 15 nt, Human
ugucccuuucagaga

SEQ ID NO: 3857426 - RNA, 17 nt, Human
ugucccuuuuccuuuuu

SEQ ID NO: 3857427 - RNA, 13 nt, Human
uguccgagaacua

SEQ ID NO: 3857428 - RNA, 15 nt, Human
uguccgcccucuucc

SEQ ID NO: 3857429 - RNA, 22 nt, Human
uguccgcugggugguacccucu

SEQ ID NO: 3857430 - RNA, 22 nt, Human
uguccuaaaacaccugguagga

SEQ ID NO: 3857431 - RNA, 16 nt, Human
uguccuaaggaaccuu

SEQ ID NO: 3857432 - RNA, 15 nt, Human
uguccuaaggacaca

SEQ ID NO: 3857433 - RNA, 22 nt, Human
uguccuaaugcuugcugcugau

SEQ ID NO: 3857434 - RNA, 14 nt, Human
uguccuacagaaaa

SEQ ID NO: 3857435 - RNA, 22 nt, Human
uguccuagcacagauggccagc

SEQ ID NO: 3857436 - RNA, 13 nt, Human
uguccuaugaaug

SEQ ID NO: 3857437 - RNA, 21 nt, Human
uguccuaugaaugcuuugcau

SEQ ID NO: 3857438 - RNA, 13 nt, Human
uguccuaugugug

SEQ ID NO: 3857439 - RNA, 14 nt, Human
uguccucaccacau

SEQ ID NO: 3857440 - RNA, 22 nt, Human
uguccucacggugccuuuuuuc

SEQ ID NO: 3857441 - RNA, 14 nt, Human
uguccucacugcuc

SEQ ID NO: 3857442 - RNA, 15 nt, Human
uguccucagcauuuc

SEQ ID NO: 3857443 - RNA, 14 nt, Human
uguccucagccagu

SEQ ID NO: 3857444 - RNA, 13 nt, Human
uguccucagcccc

SEQ ID NO: 3857445 - RNA, 16 nt, Human
uguccucagccuugcc

SEQ ID NO: 3857446 - RNA, 17 nt, Human
uguccucagccuugcca

SEQ ID NO: 3857447 - RNA, 14 nt, Human
uguccucagggagc

SEQ ID NO: 3857448 - RNA, 23 nt, Human
uguccucagggagcagggaaggc

SEQ ID NO: 3857449 - RNA, 14 nt, Human
uguccucagguggc

SEQ ID NO: 3857450 - RNA, 16 nt, Human
uguccucauuucucca

SEQ ID NO: 3857451 - RNA, 18 nt, Human
uguccucauuucuccaga

SEQ ID NO: 3857452 - RNA, 23 nt, Human
uguccuccaacaccaagcacagc

SEQ ID NO: 3857453 - RNA, 17 nt, Human
uguccuccaagccagcg

SEQ ID NO: 3857454 - RNA, 19 nt, Human
uguccuccagaagccucug

SEQ ID NO: 3857455 - RNA, 20 nt, Human
uguccuccagaagccucugg

SEQ ID NO: 3857456 - RNA, 21 nt, Human
uguccuccagaagccucuggc

SEQ ID NO: 3857457 - RNA, 13 nt, Human
uguccucccaucc

SEQ ID NO: 3857458 - RNA, 23 nt, Human
uguccucccgagcuccucuucca

SEQ ID NO: 3857459 - RNA, 21 nt, Human
uguccuccgccuuaccaggag

SEQ ID NO: 3857460 - RNA, 14 nt, Human
uguccuccugcugc

SEQ ID NO: 3857461 - RNA, 17 nt, Human
uguccuccugcugccag

SEQ ID NO: 3857462 - RNA, 18 nt, Human
uguccuccugcugccagu

SEQ ID NO: 3857463 - RNA, 20 nt, Human
uguccucuccccuccagccu

SEQ ID NO: 3857464 - RNA, 19 nt, Human
uguccucuucugcaucuug

SEQ ID NO: 3857465 - RNA, 23 nt, Human
uguccucuucugcaucuugggga

SEQ ID NO: 3857466 - RNA, 23 nt, Human
uguccucuugcucaaaaaucugu

SEQ ID NO: 3857467 - RNA, 19 nt, Human
uguccucuuucagaaaaca

SEQ ID NO: 3857468 - RNA, 21 nt, Human
uguccucuuucagaaaacaga

SEQ ID NO: 3857469 - RNA, 20 nt, Human
uguccucuuuuguuguuucu

SEQ ID NO: 3857470 - RNA, 12 nt, Human
uguccugaaggc

SEQ ID NO: 3857471 - RNA, 15 nt, Human
uguccugaaggccug

SEQ ID NO: 3857472 - RNA, 12 nt, Human
uguccugaccac

SEQ ID NO: 3857473 - RNA, 20 nt, Human
uguccugaccacccuccccu

SEQ ID NO: 3857474 - RNA, 21 nt, Human
uguccugaccacccuccccuc

SEQ ID NO: 3857475 - RNA, 22 nt, Human
uguccugaccacccuccccucu

SEQ ID NO: 3857476 - RNA, 21 nt, Human
uguccugacuucaggggcugc

SEQ ID NO: 3857477 - RNA, 17 nt, Human
uguccugagccccaggg

SEQ ID NO: 3857478 - RNA, 21 nt, Human
ugugcuaccuggguccuuuuc

SEQ ID NO: 3857479 - RNA, 17 nt, Human
ugugcuacugauuguuu

SEQ ID NO: 3857480 - RNA, 20 nt, Human
ugugcuagaaauuuucaaga

SEQ ID NO: 3857481 - RNA, 19 nt, Human
ugugcuaguaauuggaaag

SEQ ID NO: 3857482 - RNA, 15 nt, Human
ugugcuaugaauuuu

SEQ ID NO: 3857483 - RNA, 16 nt, Human
ugugcuauuaauauuu

SEQ ID NO: 3857484 - RNA, 15 nt, Human
ugugcucagcccuga

SEQ ID NO: 3857485 - RNA, 18 nt, Human
ugugcucaggacucagaa

SEQ ID NO: 3857486 - RNA, 19 nt, Human
ugugcucuccaagcccagu

SEQ ID NO: 3857487 - RNA, 14 nt, Human
ugugcucugcuuca

SEQ ID NO: 3857488 - RNA, 15 nt, Human
ugugcucuggacagg

SEQ ID NO: 3857489 - RNA, 19 nt, Human
ugugcugaauucugcaaug

SEQ ID NO: 3857490 - RNA, 17 nt, Human
ugugcugcccugaagaa

SEQ ID NO: 3857491 - RNA, 18 nt, Human
ugugcugcccugaagaau

SEQ ID NO: 3857492 - RNA, 18 nt, Human
ugccacauuagaacuucu

SEQ ID NO: 3857493 - RNA, 16 nt, Human
ugccacauuuucuuaa

SEQ ID NO: 3857494 - RNA, 16 nt, Human
ugccaccaccucugug

SEQ ID NO: 3857495 - RNA, 22 nt, Human
ugccaccaccucuguggcauug

SEQ ID NO: 3857496 - RNA, 18 nt, Human
ugccaccacuauaaaaug

SEQ ID NO: 3857497 - RNA, 22 nt, Human
ugccaccagagaccguccucac

SEQ ID NO: 3857498 - RNA, 22 nt, Human
ugccaccaggagaaccacuaca

SEQ ID NO: 3857499 - RNA, 17 nt, Human
ugccaccaggccaccuc

SEQ ID NO: 3857500 - RNA, 17 nt, Human
ugccacccaccagggcg

SEQ ID NO: 3857501 - RNA, 21 nt, Human
ugccacccaccucccugccuc

SEQ ID NO: 3857502 - RNA, 21 nt, Human
ugccacccagccccagccagg

SEQ ID NO: 3857503 - RNA, 13 nt, Human
ugccacccaggau

SEQ ID NO: 3857504 - RNA, 14 nt, Human
ugccaccccacccu

SEQ ID NO: 3857505 - RNA, 19 nt, Human
ugccaccccacccucccug

SEQ ID NO: 3857506 - RNA, 22 nt, Human
ugccaccccacccucccuggag

SEQ ID NO: 3857507 - RNA, 19 nt, Human
ugccacccccgcuggagga

SEQ ID NO: 3857508 - RNA, 23 nt, Human
ugccacccccgcuggaggaugug

SEQ ID NO: 3857509 - RNA, 13 nt, Human
ugccacccuaccu

SEQ ID NO: 3857510 - RNA, 14 nt, Human
ugccacccuagcca

SEQ ID NO: 3857511 - RNA, 16 nt, Human
ugccacccucaugcug

SEQ ID NO: 3857512 - RNA, 17 nt, Human
ugccacccucaugcugu

SEQ ID NO: 3857513 - RNA, 15 nt, Human
ugccaccucccccca

SEQ ID NO: 3857514 - RNA, 17 nt, Human
ugccaccuccccuaucc

SEQ ID NO: 3857515 - RNA, 22 nt, Human
ugccaccuccccuauccaccca

SEQ ID NO: 3857516 - RNA, 22 nt, Human
ugccaccuccccuugccagcug

SEQ ID NO: 3857517 - RNA, 14 nt, Human
ugccaccucugcag

SEQ ID NO: 3857518 - RNA, 14 nt, Human
ugccaccuggaccc

SEQ ID NO: 3857519 - RNA, 12 nt, Human
ugccaccugucu

SEQ ID NO: 3857520 - RNA, 13 nt, Human
ugccaccugucug

SEQ ID NO: 3857521 - RNA, 15 nt, Human
ugccaccugucuguc

SEQ ID NO: 3857522 - RNA, 16 nt, Human
ugccaccugucugucu

SEQ ID NO: 3857523 - RNA, 15 nt, Human
ugccacgaauuucug

SEQ ID NO: 3857524 - RNA, 16 nt, Human
ugccacguuccacagu

SEQ ID NO: 3857525 - RNA, 19 nt, Human
ugccacuaaacuacauugu

SEQ ID NO: 3857526 - RNA, 15 nt, Human
ugccacucacacagc

SEQ ID NO: 3857527 - RNA, 18 nt, Human
ugccacucacacagccag

SEQ ID NO: 3857528 - RNA, 20 nt, Human
ugccacucacacagccaggu

SEQ ID NO: 3857529 - RNA, 13 nt, Human
ugccacucacuag

SEQ ID NO: 3857530 - RNA, 15 nt, Human
ugccacucacuaggc

SEQ ID NO: 3857531 - RNA, 19 nt, Human
ugccacucacuaggccccc

SEQ ID NO: 3857532 - RNA, 17 nt, Human
ugccacuccucccuccg

SEQ ID NO: 3857533 - RNA, 13 nt, Human
ugccacugcacuc

SEQ ID NO: 3857534 - RNA, 16 nt, Human
ugccacugcacuccag

SEQ ID NO: 3857535 - RNA, 20 nt, Human
ugccacugcccgagcuggug

SEQ ID NO: 3857536 - RNA, 22 nt, Human
ugccacugcccgagcuggugca

SEQ ID NO: 3857537 - RNA, 18 nt, Human
ugccacugccucuuccuc

SEQ ID NO: 3857538 - RNA, 20 nt, Human
ugccacugccucuuccuccc

SEQ ID NO: 3857539 - RNA, 22 nt, Human
ugccacugccuucgcuucuugc

SEQ ID NO: 3857540 - RNA, 12 nt, Human
ugccacuguugu

SEQ ID NO: 3857541 - RNA, 23 nt, Human
ugccacuuaauguauguuaccaa

SEQ ID NO: 3857542 - RNA, 22 nt, Human
ugccacuugaacaaaaucuguu

SEQ ID NO: 3857543 - RNA, 20 nt, Human
ugccacuuuacccaccuaga

SEQ ID NO: 3857544 - RNA, 19 nt, Human
ugccacuuugcaaaggagc

SEQ ID NO: 3857545 - RNA, 21 nt, Human
ugccacuuugcacauuuugau

SEQ ID NO: 3857546 - RNA, 14 nt, Human
ugccagagauccaa

SEQ ID NO: 3857547 - RNA, 12 nt, Human
ugccagagccug

SEQ ID NO: 3857548 - RNA, 20 nt, Human
ugccagagccuggggcucua

SEQ ID NO: 3857549 - RNA, 22 nt, Human
ugccagaggcugaugucaagca

SEQ ID NO: 3857550 - RNA, 21 nt, Human
ugccagaggugggcagguggu

SEQ ID NO: 3857551 - RNA, 12 nt, Human
ugccagaugcug

SEQ ID NO: 3857552 - RNA, 16 nt, Human
ugccagaugcugaugu

SEQ ID NO: 3857553 - RNA, 15 nt, Human
ugccagaugcugcag

SEQ ID NO: 3857554 - RNA, 16 nt, Human
ugccagcaaagcccca

SEQ ID NO: 3857555 - RNA, 12 nt, Human
ugccagcaacug

SEQ ID NO: 3857556 - RNA, 14 nt, Human
ugccagcaacugaa

SEQ ID NO: 3857557 - RNA, 17 nt, Human
ugccagcagcagcaggu

SEQ ID NO: 3857558 - RNA, 21 nt, Human
ugccagccaagcucugcaguc

SEQ ID NO: 3857559 - RNA, 11 nt, Human
ugccagccaca

SEQ ID NO: 3857560 - RNA, 17 nt, Human
ugccagccacugugaua

SEQ ID NO: 3857561 - RNA, 12 nt, Human
ugccagccagca

SEQ ID NO: 3857562 - RNA, 22 nt, Human
ugccagccagcagccagcucuc

SEQ ID NO: 3857563 - RNA, 18 nt, Human
ugccagccccacacagcu

SEQ ID NO: 3857564 - RNA, 21 nt, Human
ugccagcccccuaaaagcacu

SEQ ID NO: 3857565 - RNA, 17 nt, Human
ugccagccgagauagcc

SEQ ID NO: 3857566 - RNA, 20 nt, Human
ugccagccgugaugcucagg

SEQ ID NO: 3857567 - RNA, 12 nt, Human
ugccagccuggc

SEQ ID NO: 3857568 - RNA, 15 nt, Human
ugccagccuggcuuc

SEQ ID NO: 3857569 - RNA, 20 nt, Human
ugccagccuggcuucuggag

SEQ ID NO: 3857570 - RNA, 21 nt, Human
ugccagccuggcuucuggagc

SEQ ID NO: 3857571 - RNA, 22 nt, Human
ugccagcucuuccuagcuggag

SEQ ID NO: 3857572 - RNA, 18 nt, Human
ugccagcugacaucuuga

SEQ ID NO: 3857573 - RNA, 15 nt, Human
ugccagcugcacuga

SEQ ID NO: 3857574 - RNA, 17 nt, Human
ugccagcugcugagccg

SEQ ID NO: 3857575 - RNA, 20 nt, Human
ugccagcugcugagccgcag

SEQ ID NO: 3857576 - RNA, 18 nt, Human
ugccagcuggccuuugua

SEQ ID NO: 3857577 - RNA, 18 nt, Human
ugccagcuuaucucaggg

SEQ ID NO: 3857578 - RNA, 22 nt, Human
ugccaggaaaggagaguacuuu

SEQ ID NO: 3857579 - RNA, 22 nt, Human
ugccaggaaccuguccuaagga

SEQ ID NO: 3857580 - RNA, 18 nt, Human
ugccaggaagccagcagg

SEQ ID NO: 3857581 - RNA, 20 nt, Human
ugccaggaagccagcaggcu

SEQ ID NO: 3857582 - RNA, 20 nt, Human
ugccaggacaugcaauaaaa

SEQ ID NO: 3857583 - RNA, 12 nt, Human
ugccaggacucc

SEQ ID NO: 3857584 - RNA, 17 nt, Human
ugccaggaggacccagg

SEQ ID NO: 3857585 - RNA, 20 nt, Human
ugccaggaggacccagggcu

SEQ ID NO: 3857586 - RNA, 13 nt, Human
ugccaggagggac

SEQ ID NO: 3857587 - RNA, 22 nt, Human
ugccaggagggacaaaggagcc

SEQ ID NO: 3857588 - RNA, 23 nt, Human
ugccaggagggacaaaggagccu

SEQ ID NO: 3857589 - RNA, 20 nt, Human
ugccaggaucaagcaugaaa

SEQ ID NO: 3857590 - RNA, 16 nt, Human
ugccaggcacaggcag

SEQ ID NO: 3857591 - RNA, 20 nt, Human
ugccaggcacaggcagggca

SEQ ID NO: 3857592 - RNA, 10 nt, Human
ugccaggcau

SEQ ID NO: 3857593 - RNA, 14 nt, Human
ugccaggcauggug

SEQ ID NO: 3857594 - RNA, 15 nt, Human
ugccaggccagccuc

SEQ ID NO: 3857595 - RNA, 19 nt, Human
ugccaggcccccaccacac

SEQ ID NO: 3857596 - RNA, 17 nt, Human
ugccaggcuaauuuuuu

SEQ ID NO: 3857597 - RNA, 11 nt, Human
ugccagggagc

SEQ ID NO: 3857598 - RNA, 22 nt, Human
ugccagggcaaugaugaaugag

SEQ ID NO: 3857599 - RNA, 12 nt, Human
ugccagggcagg

SEQ ID NO: 3857600 - RNA, 18 nt, Human
ugccagggccccucuccc

SEQ ID NO: 3857601 - RNA, 16 nt, Human
ugccagguccuugccc

SEQ ID NO: 3857602 - RNA, 14 nt, Human
ugccaggugagaaa

SEQ ID NO: 3857603 - RNA, 17 nt, Human
ugccaggugagaaacug

SEQ ID NO: 3857604 - RNA, 19 nt, Human
ugccagguucuauuuggaa

SEQ ID NO: 3857605 - RNA, 14 nt, Human
ugccagguuuucug

SEQ ID NO: 3857606 - RNA, 18 nt, Human
ugccagguuuucugggug

SEQ ID NO: 3857607 - RNA, 14 nt, Human
ugccaguaaaaaaa

SEQ ID NO: 3857608 - RNA, 24 nt, Human
ugccaguaacacaggccacccugu

SEQ ID NO: 3857609 - RNA, 21 nt, Human
ugccaguaacgcgucuuccug

SEQ ID NO: 3857610 - RNA, 20 nt, Human
ugccaguaccagccccaccc

SEQ ID NO: 3857611 - RNA, 22 nt, Human
ugccaguaggcucaacuaggga

SEQ ID NO: 3857612 - RNA, 19 nt, Human
ugccagucccccugcccca

SEQ ID NO: 3857613 - RNA, 16 nt, Human
ugccaguccuagcugc

SEQ ID NO: 3857614 - RNA, 16 nt, Human
ugccagucgcgcugcc

SEQ ID NO: 3857615 - RNA, 17 nt, Human
ugccagucgcgcugccu

SEQ ID NO: 3857616 - RNA, 18 nt, Human
ugccagucgcgcugccug

SEQ ID NO: 3857617 - RNA, 21 nt, Human
ugccagucgcgcugccugugu

SEQ ID NO: 3857618 - RNA, 22 nt, Human
ugccagucgcgcugccugugug

SEQ ID NO: 3857619 - RNA, 16 nt, Human
ugccagugacacuucc

SEQ ID NO: 3857620 - RNA, 20 nt, Human
ugccagugacagacaggcuc

SEQ ID NO: 3857621 - RNA, 22 nt, Human
ugccagugacagacaggcucuu

SEQ ID NO: 3857622 - RNA, 15 nt, Human
ugccagugccugggu

SEQ ID NO: 3857623 - RNA, 16 nt, Human
ugccagugccugggug

SEQ ID NO: 3857624 - RNA, 13 nt, Human
ugccagugccuua

SEQ ID NO: 3857625 - RNA, 20 nt, Human
ugccagugccuuaccuccug

SEQ ID NO: 3857626 - RNA, 21 nt, Human
ugccagugccuuaccuccugc

SEQ ID NO: 3857627 - RNA, 23 nt, Human
ugccaguguccugagccccaggg

SEQ ID NO: 3857628 - RNA, 13 nt, Human
ugccagugucuuu

SEQ ID NO: 3857629 - RNA, 14 nt, Human
ugccagugucuuuc

SEQ ID NO: 3857630 - RNA, 17 nt, Human
ugccaguuacuugcuuu

SEQ ID NO: 3857631 - RNA, 17 nt, Human
ugccaguuauggcuaua

SEQ ID NO: 3857632 - RNA, 15 nt, Human
ugccaguuguccucc

SEQ ID NO: 3857633 - RNA, 22 nt, Human
ugccauacaucaguuauucauu

SEQ ID NO: 3857634 - RNA, 18 nt, Human
ugccauacuuugucugaa

SEQ ID NO: 3857635 - RNA, 13 nt, Human
ugccauagaguuu

SEQ ID NO: 3857636 - RNA, 20 nt, Human
ugccauagaguuuaacacaa

SEQ ID NO: 3857637 - RNA, 24 nt, Human
ugccauagucaaagagaguuuuua

SEQ ID NO: 3857638 - RNA, 17 nt, Human
ugccauagucuuaacug

SEQ ID NO: 3857639 - RNA, 14 nt, Human
ugccauauuaaauu

SEQ ID NO: 3857640 - RNA, 16 nt, Human
ugccauauuaaauuuu

SEQ ID NO: 3857641 - RNA, 19 nt, Human
ugcccucguggccagcccg

SEQ ID NO: 3857642 - RNA, 21 nt, Human
ugcccucguggccagcccggc

SEQ ID NO: 3857643 - RNA, 14 nt, Human
ugcccucucaggcc

SEQ ID NO: 3857644 - RNA, 14 nt, Human
ugcccucuccuggg

SEQ ID NO: 3857645 - RNA, 17 nt, Human
ugcccucuccugggcag

SEQ ID NO: 3857646 - RNA, 20 nt, Human
ugcccucuccugggcagcug

SEQ ID NO: 3857647 - RNA, 15 nt, Human
ugcccucuccuuccu

SEQ ID NO: 3857648 - RNA, 16 nt, Human
ugcccucuccuuccuu

SEQ ID NO: 3857649 - RNA, 20 nt, Human
ugcccucugcauccucugga

SEQ ID NO: 3857650 - RNA, 16 nt, Human
ugcccucugggcucug

SEQ ID NO: 3857651 - RNA, 18 nt, Human
ugcccucugggcucugag

SEQ ID NO: 3857652 - RNA, 17 nt, Human
ugcccugaccucccagc

SEQ ID NO: 3857653 - RNA, 20 nt, Human
ugcccugagaagcugcucca

SEQ ID NO: 3857654 - RNA, 22 nt, Human
ugcccugagccagggucuccag

SEQ ID NO: 3857655 - RNA, 23 nt, Human
ugcccugaguggaucuccaagga

SEQ ID NO: 3857656 - RNA, 15 nt, Human
ugcccugaucccaga

SEQ ID NO: 3857657 - RNA, 22 nt, Human
ugcccugcacgucaugggaggg

SEQ ID NO: 3857658 - RNA, 14 nt, Human
ugcccugccaccug

SEQ ID NO: 3857659 - RNA, 19 nt, Human
ugcccugccaccugucugu

SEQ ID NO: 3857660 - RNA, 22 nt, Human
ugcccugccaccugucugucug

SEQ ID NO: 3857661 - RNA, 15 nt, Human
ugcccugcccugcca

SEQ ID NO: 3857662 - RNA, 14 nt, Human
ugcccugcugcccu

SEQ ID NO: 3857663 - RNA, 17 nt, Human
ugcccugcugcccuccc

SEQ ID NO: 3857664 - RNA, 13 nt, Human
ugcccugcuguuu

SEQ ID NO: 3857665 - RNA, 19 nt, Human
ugcccuggaggaaccgaaa

SEQ ID NO: 3857666 - RNA, 12 nt, Human
ugcccuggcccu

SEQ ID NO: 3857667 - RNA, 12 nt, Human
ugcccuggcucc

SEQ ID NO: 3857668 - RNA, 14 nt, Human
ugcccuggcuccag

SEQ ID NO: 3857669 - RNA, 21 nt, Human
ugcccuggcuccagugaaacu

SEQ ID NO: 3857670 - RNA, 17 nt, Human
ugcccuggcugcugccc

SEQ ID NO: 3857671 - RNA, 18 nt, Human
ugcccuggcugcugcccc

SEQ ID NO: 3857672 - RNA, 16 nt, Human
ugcccugggaugucca

SEQ ID NO: 3857673 - RNA, 23 nt, Human
ugcccuggggcugaucucaggga

SEQ ID NO: 3857674 - RNA, 12 nt, Human
ugcccuggugcu

SEQ ID NO: 3857675 - RNA, 16 nt, Human
ugcccuggugcugcca

SEQ ID NO: 3857676 - RNA, 13 nt, Human
ugcccugguggag

SEQ ID NO: 3857677 - RNA, 17 nt, Human
ugcccugguuuccugcc

SEQ ID NO: 3857678 - RNA, 18 nt, Human
ugcccugguuuccugccc

SEQ ID NO: 3857679 - RNA, 20 nt, Human
ugcccugguuuccugcccug

SEQ ID NO: 3857680 - RNA, 16 nt, Human
ugcccugucaggaggc

SEQ ID NO: 3857681 - RNA, 19 nt, Human
ugcccugucaggaggcaga

SEQ ID NO: 3857682 - RNA, 23 nt, Human
ugcccugugaguacuacaguccu

SEQ ID NO: 3857683 - RNA, 13 nt, Human
ugcccugugggac

SEQ ID NO: 3857684 - RNA, 22 nt, Human
ugcccugugggaccccaggccc

SEQ ID NO: 3857685 - RNA, 23 nt, Human
ugcccugugggaccccaggccca

SEQ ID NO: 3857686 - RNA, 15 nt, Human
ugcccugugggcccc

SEQ ID NO: 3857687 - RNA, 19 nt, Human
ugcccuguuaaaagaugaa

SEQ ID NO: 3857688 - RNA, 20 nt, Human
ugcccuuacacuuacuguug

SEQ ID NO: 3857689 - RNA, 18 nt, Human
ugcccuuaccugccagga

SEQ ID NO: 3857690 - RNA, 23 nt, Human
ugcccuucagcauccucaguucc

SEQ ID NO: 3857691 - RNA, 13 nt, Human
ugcccuucccugu

SEQ ID NO: 3857692 - RNA, 18 nt, Human
ugcccuucccugucccuc

SEQ ID NO: 3857693 - RNA, 16 nt, Human
ugcccuuccucaguuu

SEQ ID NO: 3857694 - RNA, 13 nt, Human
ugcccuucuuucu

SEQ ID NO: 3857695 - RNA, 21 nt, Human
ugcccuucuuucuacccugcu

SEQ ID NO: 3857696 - RNA, 18 nt, Human
ugcccuugcccugaccuc

SEQ ID NO: 3857697 - RNA, 19 nt, Human
ugcccuugcccugaccucc

SEQ ID NO: 3857698 - RNA, 17 nt, Human
ugcccuuggaggccagc

SEQ ID NO: 3857699 - RNA, 16 nt, Human
ugcccuugucccacuc

SEQ ID NO: 3857700 - RNA, 14 nt, Human
ugcccuugucugag

SEQ ID NO: 3857701 - RNA, 24 nt, Human
ugcccuuguuuggggcaggaguag

SEQ ID NO: 3857702 - RNA, 15 nt, Human
ugccgaaacuggaag

SEQ ID NO: 3857703 - RNA, 15 nt, Human
ugccgaccagagccc

SEQ ID NO: 3857704 - RNA, 22 nt, Human
ugccgaccagagccccacacgg

SEQ ID NO: 3857705 - RNA, 15 nt, Human
ugccgaccgaggcug

SEQ ID NO: 3857706 - RNA, 15 nt, Human
ugccgaccucguccu

SEQ ID NO: 3857707 - RNA, 17 nt, Human
ugccgaccucguccucc

SEQ ID NO: 3857708 - RNA, 14 nt, Human
ugccgacuccuggg

SEQ ID NO: 3857709 - RNA, 15 nt, Human
ugccgacuccugggu

SEQ ID NO: 3857710 - RNA, 20 nt, Human
ugccgagcaaccguggcccu

SEQ ID NO: 3857711 - RNA, 16 nt, Human
ugccgagcccuugccc

SEQ ID NO: 3857712 - RNA, 20 nt, Human
ugccgcaagucugcagcccg

SEQ ID NO: 3857713 - RNA, 17 nt, Human
ugccgcaauacaggaac

SEQ ID NO: 3857714 - RNA, 22 nt, Human
ugccgcaauggccaugugggga

SEQ ID NO: 3857715 - RNA, 13 nt, Human
ugccgcagagcug

SEQ ID NO: 3857716 - RNA, 14 nt, Human
ugccgcagagcugg

SEQ ID NO: 3857717 - RNA, 20 nt, Human
ugccgcagcccugcagaggg

SEQ ID NO: 3857718 - RNA, 16 nt, Human
ugccgcaucucacagc

SEQ ID NO: 3857719 - RNA, 19 nt, Human
ugccgcccccuccugaacc

SEQ ID NO: 3857720 - RNA, 20 nt, Human
ugccgcccgagguggcugcc

SEQ ID NO: 3857721 - RNA, 23 nt, Human
ugccgcccgagguggcugccugg

SEQ ID NO: 3857722 - RNA, 16 nt, Human
ugccgccgccucgccc

SEQ ID NO: 3857723 - RNA, 24 nt, Human
ugccgccuccccacggccgcucca

SEQ ID NO: 3857724 - RNA, 15 nt, Human
ugccgcuaccucccu

SEQ ID NO: 3857725 - RNA, 16 nt, Human
ugccgcuaccucccuc

SEQ ID NO: 3857726 - RNA, 17 nt, Human
ugccgcuaccucccucc

SEQ ID NO: 3857727 - RNA, 14 nt, Human
ugccggagaggaag

SEQ ID NO: 3857728 - RNA, 16 nt, Human
ugccggauacaaacug

SEQ ID NO: 3857729 - RNA, 18 nt, Human
ugccgggugcagcaucug

SEQ ID NO: 3857730 - RNA, 19 nt, Human
ugccggguucuagucuccu

SEQ ID NO: 3857731 - RNA, 18 nt, Human
ugccggguuuuauauuuu

SEQ ID NO: 3857732 - RNA, 21 nt, Human
ugccggucuugacagcucagu

SEQ ID NO: 3857733 - RNA, 13 nt, Human
ugccgucaccacc

SEQ ID NO: 3857734 - RNA, 15 nt, Human
ugccgucaccaccac

SEQ ID NO: 3857735 - RNA, 17 nt, Human
ugccgucuaccugaggg

SEQ ID NO: 3857736 - RNA, 22 nt, Human
ugccguggcaccaggcgcugcc

SEQ ID NO: 3857737 - RNA, 19 nt, Human
ugccgugugagugugacag

SEQ ID NO: 3857738 - RNA, 21 nt, Human
ugccgugugagugugacaggg

SEQ ID NO: 3857739 - RNA, 20 nt, Human
ugccguugccaagaacugaa

SEQ ID NO: 3857740 - RNA, 18 nt, Human
ugccuaaauccacucugc

SEQ ID NO: 3857741 - RNA, 19 nt, Human
ugccuaaauccauuuggaa

SEQ ID NO: 3857742 - RNA, 20 nt, Human
ugccuaaauuuaaugcugcc

SEQ ID NO: 3857743 - RNA, 15 nt, Human
ugccuaacaccagcg

SEQ ID NO: 3857744 - RNA, 19 nt, Human
ugccuaagcauugccuggc

SEQ ID NO: 3857745 - RNA, 22 nt, Human
ugccuaagcauugccuggccuu

SEQ ID NO: 3857746 - RNA, 13 nt, Human
ugccuaagcccuc

SEQ ID NO: 3857747 - RNA, 15 nt, Human
ugccuaaggacuucu

SEQ ID NO: 3857748 - RNA, 20 nt, Human
ugccuaaggacuucuuuaau

SEQ ID NO: 3857749 - RNA, 21 nt, Human
ugccuaaggacuucuuuaauu

SEQ ID NO: 3857750 - RNA, 13 nt, Human
ugccuaaguauua

SEQ ID NO: 3857751 - RNA, 19 nt, Human
ugccuaaguauuaaaacau

SEQ ID NO: 3857752 - RNA, 15 nt, Human
ugccuaaguggcugc

SEQ ID NO: 3857753 - RNA, 21 nt, Human
ugccuaauacauuaaagcagu

SEQ ID NO: 3857754 - RNA, 22 nt, Human
ugccuacagaacuucagaaaga

SEQ ID NO: 3857755 - RNA, 17 nt, Human
ugccuaccaauauuuaa

SEQ ID NO: 3857756 - RNA, 18 nt, Human
ugccuagaaacaacacug

SEQ ID NO: 3857757 - RNA, 18 nt, Human
ugccuagcaagcuggccu

SEQ ID NO: 3857758 - RNA, 22 nt, Human
ugccuaggauucacaccccacc

SEQ ID NO: 3857759 - RNA, 16 nt, Human
ugccuaggccugggca

SEQ ID NO: 3857760 - RNA, 18 nt, Human
ugccuaggcugaccuuga

SEQ ID NO: 3857761 - RNA, 18 nt, Human
ugccuagggccuggucca

SEQ ID NO: 3857762 - RNA, 15 nt, Human
ugccuaguauugaca

SEQ ID NO: 3857763 - RNA, 21 nt, Human
ugccuaguauugacaaaaugu

SEQ ID NO: 3857764 - RNA, 22 nt, Human
ugccuaguauugacaaaauguu

SEQ ID NO: 3857765 - RNA, 16 nt, Human
ugccuauaagccaaaa

SEQ ID NO: 3857766 - RNA, 21 nt, Human
ugccuauaagccaaaauuaag

SEQ ID NO: 3857767 - RNA, 20 nt, Human
ugccuaucaccucuuaugca

SEQ ID NO: 3857768 - RNA, 18 nt, Human
ugccuauugcuagagcuc

SEQ ID NO: 3857769 - RNA, 20 nt, Human
ugccuauugcuagagcuccu

SEQ ID NO: 3857770 - RNA, 21 nt, Human
ugccucaaauaaaaagugcuu

SEQ ID NO: 3857771 - RNA, 17 nt, Human
ugccucaagaggaauga

SEQ ID NO: 3857772 - RNA, 15 nt, Human
ugccucaaugccagu

SEQ ID NO: 3857773 - RNA, 14 nt, Human
ugccucacagcugg

SEQ ID NO: 3857774 - RNA, 14 nt, Human
ugccucacuucagg

SEQ ID NO: 3857775 - RNA, 18 nt, Human
ugccucagaaaacaagga

SEQ ID NO: 3857776 - RNA, 14 nt, Human
ugccucagagacca

SEQ ID NO: 3857777 - RNA, 16 nt, Human
ugccucagagaccagg

SEQ ID NO: 3857778 - RNA, 19 nt, Human
ugccucagagaccagggcu

SEQ ID NO: 3857779 - RNA, 13 nt, Human
ugccucagccucc

SEQ ID NO: 3857780 - RNA, 17 nt, Human
ugccucagccucccgag

SEQ ID NO: 3857781 - RNA, 15 nt, Human
ugccucagcuucccc

SEQ ID NO: 3857782 - RNA, 18 nt, Human
ugccucaggccucugugc

SEQ ID NO: 3857783 - RNA, 18 nt, Human
ugccucaguaaaaugaac

SEQ ID NO: 3857784 - RNA, 22 nt, Human
ugccucauuuagagaggaaaag

SEQ ID NO: 3857785 - RNA, 22 nt, Human
ugccuccaagaggaaccucuga

SEQ ID NO: 3857786 - RNA, 12 nt, Human
ugccuccaccac

SEQ ID NO: 3857787 - RNA, 15 nt, Human
ugccuccaccaccac

SEQ ID NO: 3857788 - RNA, 16 nt, Human
ugccuccaccaccacu

SEQ ID NO: 3857789 - RNA, 20 nt, Human
ugccuccaccaccacuggcc

SEQ ID NO: 3857790 - RNA, 15 nt, Human
ugcuaauuaaaaagu

SEQ ID NO: 3857791 - RNA, 15 nt, Human
ugcuaauucuuugca

SEQ ID NO: 3857792 - RNA, 20 nt, Human
ugcuaauugcuguugaaagc

SEQ ID NO: 3857793 - RNA, 16 nt, Human
ugcuaauuuaaagaga

SEQ ID NO: 3857794 - RNA, 18 nt, Human
ugcuaauuuauccugaaa

SEQ ID NO: 3857795 - RNA, 22 nt, Human
ugcuaauuuucucaaaagcauu

SEQ ID NO: 3857796 - RNA, 16 nt, Human
ugcuaauuuugaaaaa

SEQ ID NO: 3857797 - RNA, 16 nt, Human
ugcuacaaaaacacag

SEQ ID NO: 3857798 - RNA, 12 nt, Human
ugcuacaaagaa

SEQ ID NO: 3857799 - RNA, 17 nt, Human
ugcuacaaagaagacau

SEQ ID NO: 3857800 - RNA, 23 nt, Human
ugcuacaaagaagacauguuuua

SEQ ID NO: 3857801 - RNA, 14 nt, Human
ugcuacaauuuuaa

SEQ ID NO: 3857802 - RNA, 22 nt, Human
ugcuacaccuauuaucccagcu

SEQ ID NO: 3857803 - RNA, 20 nt, Human
ugcuacagaugauagaggau

SEQ ID NO: 3857804 - RNA, 24 nt, Human
ugcuacaugacgacaaagcugcua

SEQ ID NO: 3857805 - RNA, 16 nt, Human
ugcuaccaccagcugu

SEQ ID NO: 3857806 - RNA, 21 nt, Human
ugcuaccaccagcugugucca

SEQ ID NO: 3857807 - RNA, 21 nt, Human
ugcuaccacggccuccuuucc

SEQ ID NO: 3857808 - RNA, 22 nt, Human
ugcuaccaguauuuagaagcca

SEQ ID NO: 3857809 - RNA, 13 nt, Human
ugcuaccucaguc

SEQ ID NO: 3857810 - RNA, 16 nt, Human
ugcuaccucagucagu

SEQ ID NO: 3857811 - RNA, 18 nt, Human
ugcuaccucccuugccuu

SEQ ID NO: 3857812 - RNA, 23 nt, Human
ugcuaccuggguccuuuucagaa

SEQ ID NO: 3857813 - RNA, 17 nt, Human
ugcuaccuuucaaagcu

SEQ ID NO: 3857814 - RNA, 18 nt, Human
ugcuaccuuucaaagcuu

SEQ ID NO: 3857815 - RNA, 20 nt, Human
ugcuacgccugcauguaaac

SEQ ID NO: 3857816 - RNA, 16 nt, Human
ugcuacucuguuccuu

SEQ ID NO: 3857817 - RNA, 15 nt, Human
ugcuacugccaaccu

SEQ ID NO: 3857818 - RNA, 22 nt, Human
ugcuacuguacauaaacaauga

SEQ ID NO: 3857819 - RNA, 13 nt, Human
ugcuacuguugua

SEQ ID NO: 3857820 - RNA, 22 nt, Human
ugcuacuuaauuccuuucucau

SEQ ID NO: 3857821 - RNA, 15 nt, Human
ugcuacuuccugccu

SEQ ID NO: 3857822 - RNA, 13 nt, Human
ugcuagaaaaauu

SEQ ID NO: 3857823 - RNA, 15 nt, Human
ugcuagaacaugguu

SEQ ID NO: 3857824 - RNA, 10 nt, Human
ugcuagaacu

SEQ ID NO: 3857825 - RNA, 13 nt, Human
ugcuagaacuccc

SEQ ID NO: 3857826 - RNA, 20 nt, Human
ugcuagaacucccuuucaac

SEQ ID NO: 3857827 - RNA, 11 nt, Human
ugcuagaacuu

SEQ ID NO: 3857828 - RNA, 16 nt, Human
ugcuagaacuuuuuua

SEQ ID NO: 3857829 - RNA, 17 nt, Human
ugcuagaacuuuuuuaa

SEQ ID NO: 3857830 - RNA, 21 nt, Human
ugcuagaacuuuuuuaaauaa

SEQ ID NO: 3857831 - RNA, 22 nt, Human
ugcuagaacuuuuuuaaauaaa

SEQ ID NO: 3857832 - RNA, 14 nt, Human
ugcuagaagaaaac

SEQ ID NO: 3857833 - RNA, 13 nt, Human
ugcuagagcuccu

SEQ ID NO: 3857834 - RNA, 14 nt, Human
ugcuagauaaaagc

SEQ ID NO: 3857835 - RNA, 23 nt, Human
ugcuagaugagaauucagcugcc

SEQ ID NO: 3857836 - RNA, 19 nt, Human
ugcuagaugugcaaaugca

SEQ ID NO: 3857837 - RNA, 20 nt, Human
ugcuagaugugcaaaugcaa

SEQ ID NO: 3857838 - RNA, 12 nt, Human
ugcuagcacaug

SEQ ID NO: 3857839 - RNA, 18 nt, Human
ugcuagcgcguugccugu

SEQ ID NO: 3857840 - RNA, 19 nt, Human
ugcuagcgcguugccuguc

SEQ ID NO: 3857841 - RNA, 13 nt, Human
ugcuagcuagcuc

SEQ ID NO: 3857842 - RNA, 18 nt, Human
ugcuagcuaugugaccuu

SEQ ID NO: 3857843 - RNA, 16 nt, Human
ugcuagcucugagcca

SEQ ID NO: 3857844 - RNA, 19 nt, Human
ugcuaggaacacuccuuca

SEQ ID NO: 3857845 - RNA, 18 nt, Human
ugcuaggccagagcccac

SEQ ID NO: 3857846 - RNA, 18 nt, Human
ugcuaggcgagugccagg

SEQ ID NO: 3857847 - RNA, 21 nt, Human
ugcuaggcgagugccaggacu

SEQ ID NO: 3857848 - RNA, 22 nt, Human
ugcuaggcgagugccaggacuc

SEQ ID NO: 3857849 - RNA, 21 nt, Human
ugcuaggguuaggagguccuu

SEQ ID NO: 3857850 - RNA, 21 nt, Human
ugcuaggugggccagccccuc

SEQ ID NO: 3857851 - RNA, 23 nt, Human
ugcuaggugggccagccccuccc

SEQ ID NO: 3857852 - RNA, 12 nt, Human
ugcuagguucua

SEQ ID NO: 3857853 - RNA, 14 nt, Human
ugcuaguaauugga

SEQ ID NO: 3857854 - RNA, 15 nt, Human
ugcuaguauuugaau

SEQ ID NO: 3857855 - RNA, 17 nt, Human
ugcuaguauuugaauua

SEQ ID NO: 3857856 - RNA, 22 nt, Human
ugcuaguauuugaauuaaaacu

SEQ ID NO: 3857857 - RNA, 21 nt, Human
ugcuauaacuauguugauaaa

SEQ ID NO: 3857858 - RNA, 18 nt, Human
ugcuauaaucuguuuuua

SEQ ID NO: 3857859 - RNA, 19 nt, Human
ugcuauaggcuggagaagc

SEQ ID NO: 3857860 - RNA, 20 nt, Human
ugcuauaggcuggagaagcu

SEQ ID NO: 3857861 - RNA, 14 nt, Human
ugcuauaguauuug

SEQ ID NO: 3857862 - RNA, 21 nt, Human
ugcuauaguauuugauucaaa

SEQ ID NO: 3857863 - RNA, 15 nt, Human
ugcuauauauauaaa

SEQ ID NO: 3857864 - RNA, 16 nt, Human
ugcuauauugcccagg

SEQ ID NO: 3857865 - RNA, 20 nt, Human
ugcuaucaaaauaaauugaa

SEQ ID NO: 3857866 - RNA, 21 nt, Human
ugcuaucaaaauaaauugaaa

SEQ ID NO: 3857867 - RNA, 15 nt, Human
ugcuaucaguuuuau

SEQ ID NO: 3857868 - RNA, 18 nt, Human
ugcuaucaguuuuauagc

SEQ ID NO: 3857869 - RNA, 20 nt, Human
ugcuauccugccaaaaucau

SEQ ID NO: 3857870 - RNA, 19 nt, Human
ugcuaucucccccagcccc

SEQ ID NO: 3857871 - RNA, 20 nt, Human
ugcuaucucugugugcacaa

SEQ ID NO: 3857872 - RNA, 21 nt, Human
ugcuaucucugugugcacaaa

SEQ ID NO: 3857873 - RNA, 22 nt, Human
ugcuaugauguuaguuuuccuu

SEQ ID NO: 3857874 - RNA, 19 nt, Human
ugcuauggggagaaaagac

SEQ ID NO: 3857875 - RNA, 22 nt, Human
ugcuauggggagaaaagacaug

SEQ ID NO: 3857876 - RNA, 13 nt, Human
ugcuauuaaagug

SEQ ID NO: 3857877 - RNA, 12 nt, Human
ugcuauuaauau

SEQ ID NO: 3857878 - RNA, 16 nt, Human
ugcuauuaauauuugu

SEQ ID NO: 3857879 - RNA, 19 nt, Human
ugcuauuacgaaguucaag

SEQ ID NO: 3857880 - RNA, 11 nt, Human
ugcuauucugu

SEQ ID NO: 3857881 - RNA, 16 nt, Human
ugcuauucugucccua

SEQ ID NO: 3857882 - RNA, 17 nt, Human
ugcuauucugucccuag

SEQ ID NO: 3857883 - RNA, 16 nt, Human
ugcuauugacaaguca

SEQ ID NO: 3857884 - RNA, 15 nt, Human
ugcuauuguaaauau

SEQ ID NO: 3857885 - RNA, 17 nt, Human
ugcuauuguaaauaugu

SEQ ID NO: 3857886 - RNA, 20 nt, Human
ugcuauuuauuuuuacaaga

SEQ ID NO: 3857887 - RNA, 14 nt, Human
ugcuauuucuauau

SEQ ID NO: 3857888 - RNA, 17 nt, Human
ugcuauuuuacugucuu

SEQ ID NO: 3857889 - RNA, 19 nt, Human
ugcuauuuuuguuuuuaga

SEQ ID NO: 3857890 - RNA, 19 nt, Human
ugcucaaaauuugaagaau

SEQ ID NO: 3857891 - RNA, 16 nt, Human
ugcucaacuugcaaaa

SEQ ID NO: 3857892 - RNA, 20 nt, Human
ugcucaacuugcaaaaucag

SEQ ID NO: 3857893 - RNA, 14 nt, Human
ugcucaagaaacaa

SEQ ID NO: 3857894 - RNA, 22 nt, Human
ugcucaagaagacauggagacu

SEQ ID NO: 3857895 - RNA, 21 nt, Human
ugcucaauaaaugauucuuag

SEQ ID NO: 3857896 - RNA, 17 nt, Human
ugcucacaacuuagugu

SEQ ID NO: 3857897 - RNA, 14 nt, Human
ugcucacagcugua

SEQ ID NO: 3857898 - RNA, 14 nt, Human
ugcucacccagugc

SEQ ID NO: 3857899 - RNA, 23 nt, Human
ugcucaccgcccaucaggguucu

SEQ ID NO: 3857900 - RNA, 22 nt, Human
ugcucaccuggggugugggagg

SEQ ID NO: 3857901 - RNA, 17 nt, Human
ugcucacgucaaaugca

SEQ ID NO: 3857902 - RNA, 13 nt, Human
ugcucacuaccuc

SEQ ID NO: 3857903 - RNA, 15 nt, Human
ugcucacuuuaaacc

SEQ ID NO: 3857904 - RNA, 16 nt, Human
ugcucagaacuugcug

SEQ ID NO: 3857905 - RNA, 22 nt, Human
ugcucagaacuugcugcugucu

SEQ ID NO: 3857906 - RNA, 14 nt, Human
ugcucagaccagcu

SEQ ID NO: 3857907 - RNA, 16 nt, Human
ugcucagaccagcucu

SEQ ID NO: 3857908 - RNA, 17 nt, Human
ugcucagaccagcucuu

SEQ ID NO: 3857909 - RNA, 20 nt, Human
ugcucagagaccugaagugu

SEQ ID NO: 3857910 - RNA, 12 nt, Human
ugcucagcagcu

SEQ ID NO: 3857911 - RNA, 15 nt, Human
ugcucagcagugaga

SEQ ID NO: 3857912 - RNA, 13 nt, Human
ugcucagcccuga

SEQ ID NO: 3857913 - RNA, 19 nt, Human
ugcucagcccugaggacag

SEQ ID NO: 3857914 - RNA, 18 nt, Human
ugcucagcucugggccau

SEQ ID NO: 3857915 - RNA, 16 nt, Human
ugcucagcugucaagg

SEQ ID NO: 3857916 - RNA, 20 nt, Human
ugcucagcugucaaggcuca

SEQ ID NO: 3857917 - RNA, 20 nt, Human
ugcucagcuucuccugugug

SEQ ID NO: 3857918 - RNA, 20 nt, Human
ugcucaggagaccuggagga

SEQ ID NO: 3857919 - RNA, 14 nt, Human
ugcucaggagcccu

SEQ ID NO: 3857920 - RNA, 15 nt, Human
ugcucaggagcccug

SEQ ID NO: 3857921 - RNA, 18 nt, Human
ugcucaggcugcagcugg

SEQ ID NO: 3857922 - RNA, 18 nt, Human
ugcucaggggcccuggag

SEQ ID NO: 3857923 - RNA, 19 nt, Human
ugcucaggggcguguggcu

SEQ ID NO: 3857924 - RNA, 18 nt, Human
ugcucagguacagagaag

SEQ ID NO: 3857925 - RNA, 22 nt, Human
ugcucagguacagagaaggaau

SEQ ID NO: 3857926 - RNA, 17 nt, Human
ugcucaggugcuggggc

SEQ ID NO: 3857927 - RNA, 17 nt, Human
ugcucaguaauuugagg

SEQ ID NO: 3857928 - RNA, 19 nt, Human
ugcucagugucuggcugca

SEQ ID NO: 3857929 - RNA, 17 nt, Human
ugcucaguucagaauca

SEQ ID NO: 3857930 - RNA, 13 nt, Human
ugcucaguugcua

SEQ ID NO: 3857931 - RNA, 13 nt, Human
ugcucaguuguag

SEQ ID NO: 3857932 - RNA, 18 nt, Human
ugcucaguuguagaaugu

SEQ ID NO: 3857933 - RNA, 22 nt, Human
ugcucaguuguagaauguauug

SEQ ID NO: 3857934 - RNA, 19 nt, Human
ugcucauacuacauugagu

SEQ ID NO: 3857935 - RNA, 22 nt, Human
ugcucaucauuccuugagaaaa

SEQ ID NO: 3857936 - RNA, 19 nt, Human
ugcucaucauucucugucu

SEQ ID NO: 3857937 - RNA, 21 nt, Human
ugcucaucauucucugucuca

SEQ ID NO: 3857938 - RNA, 17 nt, Human
ugcucauccacucuacu

SEQ ID NO: 3857939 - RNA, 12 nt, Human
ugccuuuguaac

SEQ ID NO: 3857940 - RNA, 13 nt, Human
ugccuuuuauagc

SEQ ID NO: 3857941 - RNA, 19 nt, Human
ugccuuuugcaaccaggaa

SEQ ID NO: 3857942 - RNA, 21 nt, Human
ugccuuuugcaccccucccau

SEQ ID NO: 3857943 - RNA, 15 nt, Human
ugccuuuugcagaag

SEQ ID NO: 3857944 - RNA, 17 nt, Human
ugccuuuugcagaagag

SEQ ID NO: 3857945 - RNA, 22 nt, Human
ugccuuuugcagaagagggugu

SEQ ID NO: 3857946 - RNA, 21 nt, Human
ugccuuuuuauuuauauguac

SEQ ID NO: 3857947 - RNA, 13 nt, Human
ugccuuuuucauu

SEQ ID NO: 3857948 - RNA, 15 nt, Human
ugccuuuuucauuau

SEQ ID NO: 3857949 - RNA, 21 nt, Human
ugccuuuuucauuauuuuauu

SEQ ID NO: 3857950 - RNA, 20 nt, Human
ugccuuuuucauuuuccaau

SEQ ID NO: 3857951 - RNA, 19 nt, Human
ugcgaaaggaugaaaguga

SEQ ID NO: 3857952 - RNA, 18 nt, Human
ugcgaaggggcccugguc

SEQ ID NO: 3857953 - RNA, 21 nt, Human
ugcgaauggacuuuggaagca

SEQ ID NO: 3857954 - RNA, 22 nt, Human
ugcgaauggacuuuggaagcag

SEQ ID NO: 3857955 - RNA, 14 nt, Human
ugcgaccccaucug

SEQ ID NO: 3857956 - RNA, 15 nt, Human
ugcgacccugggggc

SEQ ID NO: 3857957 - RNA, 19 nt, Human
ugcgacccugggggcacag

SEQ ID NO: 3857958 - RNA, 15 nt, Human
ugcgacggagagaaa

SEQ ID NO: 3857959 - RNA, 12 nt, Human
ugcgagagaugu

SEQ ID NO: 3857960 - RNA, 17 nt, Human
ugcgagagauguguguu

SEQ ID NO: 3857961 - RNA, 21 nt, Human
ugcgagcgcuaucuucacaua

SEQ ID NO: 3857962 - RNA, 14 nt, Human
ugcgaguauguguu

SEQ ID NO: 3857963 - RNA, 22 nt, Human
ugcgaguauguguuugugugug

SEQ ID NO: 3857964 - RNA, 19 nt, Human
ugcgagugugugcaugugu

SEQ ID NO: 3857965 - RNA, 13 nt, Human
ugcgauagagucu

SEQ ID NO: 3857966 - RNA, 21 nt, Human
ugcgaucauggcucacugcag

SEQ ID NO: 3857967 - RNA, 23 nt, Human
ugcgaucauggcucacugcagcc

SEQ ID NO: 3857968 - RNA, 20 nt, Human
ugcgaucuggguucacugca

SEQ ID NO: 3857969 - RNA, 16 nt, Human
ugcgcaaaaugcagcu

SEQ ID NO: 3857970 - RNA, 16 nt, Human
ugcgcagccccaucug

SEQ ID NO: 3857971 - RNA, 23 nt, Human
ugcgcaggcuggcccugcccugg

SEQ ID NO: 3857972 - RNA, 14 nt, Human
ugcgcagugccuug

SEQ ID NO: 3857973 - RNA, 15 nt, Human
ugcgcaucuugccuc

SEQ ID NO: 3857974 - RNA, 20 nt, Human
ugcgcaucuugccuccaggu

SEQ ID NO: 3857975 - RNA, 23 nt, Human
ugcgcauucucauggagaaguua

SEQ ID NO: 3857976 - RNA, 17 nt, Human
ugcgccauugcacucca

SEQ ID NO: 3857977 - RNA, 18 nt, Human
ugcgccauugcacuccag

SEQ ID NO: 3857978 - RNA, 21 nt, Human
ugcgccauugcacuccagccu

SEQ ID NO: 3857979 - RNA, 23 nt, Human
ugcgcccagggcugggaggaagg

SEQ ID NO: 3857980 - RNA, 17 nt, Human
ugcgcccaguccuucca

SEQ ID NO: 3857981 - RNA, 14 nt, Human
ugcgcccugggcuc

SEQ ID NO: 3857982 - RNA, 22 nt, Human
ugcgccuacaggagugagcacu

SEQ ID NO: 3857983 - RNA, 23 nt, Human
ugcgcgugcacguggagagcugg

SEQ ID NO: 3857984 - RNA, 13 nt, Human
ugcgcucagggcc

SEQ ID NO: 3857985 - RNA, 21 nt, Human
ugcgcucagggccaugcugag

SEQ ID NO: 3857986 - RNA, 22 nt, Human
ugcgcucagggccaugcugagg

SEQ ID NO: 3857987 - RNA, 13 nt, Human
ugcgcuccuggcc

SEQ ID NO: 3857988 - RNA, 18 nt, Human
ugcgcuccuggcccagcc

SEQ ID NO: 3857989 - RNA, 23 nt, Human
ugcgcugacaaccaccgcucccc

SEQ ID NO: 3857990 - RNA, 17 nt, Human
ugcgcugggcacuuccc

SEQ ID NO: 3857991 - RNA, 18 nt, Human
ugcgcugggcacuucccu

SEQ ID NO: 3857992 - RNA, 17 nt, Human
ugcgcuuuugcugguca

SEQ ID NO: 3857993 - RNA, 23 nt, Human
ugcggaaagguauuugggaaacu

SEQ ID NO: 3857994 - RNA, 17 nt, Human
ugcggacagccacggcc

SEQ ID NO: 3857995 - RNA, 23 nt, Human
ugcggacagccacggccaggcca

SEQ ID NO: 3857996 - RNA, 22 nt, Human
ugcggaccacccucacuggcuc

SEQ ID NO: 3857997 - RNA, 14 nt, Human
ugcggaccccagcu

SEQ ID NO: 3857998 - RNA, 15 nt, Human
ugcggagaacaaaug

SEQ ID NO: 3857999 - RNA, 21 nt, Human
ugcggaggaaggaggacccag

SEQ ID NO: 3858000 - RNA, 22 nt, Human
ugcggaggaaggaggacccagg

SEQ ID NO: 3858001 - RNA, 23 nt, Human
ugcggagucauuuuguguugaag

SEQ ID NO: 3858002 - RNA, 20 nt, Human
ugcggagugaagaggggcag

SEQ ID NO: 3858003 - RNA, 21 nt, Human
ugcggagugaagaggggcagc

SEQ ID NO: 3858004 - RNA, 17 nt, Human
ugcggaucucagcuuug

SEQ ID NO: 3858005 - RNA, 15 nt, Human
ugcggcaaaaggaaa

SEQ ID NO: 3858006 - RNA, 21 nt, Human
ugcggcccagcccggcuccca

SEQ ID NO: 3858007 - RNA, 16 nt, Human
ugcggccccucccccg

SEQ ID NO: 3858008 - RNA, 18 nt, Human
ugcggccccucccccguc

SEQ ID NO: 3858009 - RNA, 18 nt, Human
ugcggccgcauucccuga

SEQ ID NO: 3858010 - RNA, 19 nt, Human
ugcggccuuuggcuucacg

SEQ ID NO: 3858011 - RNA, 15 nt, Human
ugcggccuuuucaug

SEQ ID NO: 3858012 - RNA, 17 nt, Human
ugcggcggucccagcuc

SEQ ID NO: 3858013 - RNA, 18 nt, Human
ugcggcggucccagcucc

SEQ ID NO: 3858014 - RNA, 14 nt, Human
ugcggcuggccaug

SEQ ID NO: 3858015 - RNA, 21 nt, Human
ugcggcugugcagccuguccu

SEQ ID NO: 3858016 - RNA, 12 nt, Human
ugcggcugugug

SEQ ID NO: 3858017 - RNA, 13 nt, Human
ugcggcugugugu

SEQ ID NO: 3858018 - RNA, 14 nt, Human
ugcggcugugugug

SEQ ID NO: 3858019 - RNA, 16 nt, Human
ugcgggcacaauaaau

SEQ ID NO: 3858020 - RNA, 18 nt, Human
ugcggggcgggcacaccu

SEQ ID NO: 3858021 - RNA, 15 nt, Human
ugcggggugggggca

SEQ ID NO: 3858022 - RNA, 17 nt, Human
ugcgggucacaggaggg

SEQ ID NO: 3858023 - RNA, 21 nt, Human
ugcgggugaacaaagcagcca

SEQ ID NO: 3858024 - RNA, 23 nt, Human
ugcgggugaacaaagcagccacg

SEQ ID NO: 3858025 - RNA, 16 nt, Human
ugcgguagccagcaca

SEQ ID NO: 3858026 - RNA, 17 nt, Human
ugcgguagccagcacac

SEQ ID NO: 3858027 - RNA, 14 nt, Human
ugcgguccacccag

SEQ ID NO: 3858028 - RNA, 14 nt, Human
ugcggucuagggaa

SEQ ID NO: 3858029 - RNA, 15 nt, Human
ugcguacguuuccug

SEQ ID NO: 3858030 - RNA, 23 nt, Human
ugcguccccccccaaccuuuccc

SEQ ID NO: 3858031 - RNA, 14 nt, Human
ugcgugaaacacac

SEQ ID NO: 3858032 - RNA, 20 nt, Human
ugcgugaauguauguaaugu

SEQ ID NO: 3858033 - RNA, 14 nt, Human
ugcgugacaauaaa

SEQ ID NO: 3858034 - RNA, 22 nt, Human
ugcgugacaauaaaacauuaau

SEQ ID NO: 3858035 - RNA, 22 nt, Human
ugcgugacacucuccuugcagu

SEQ ID NO: 3858036 - RNA, 15 nt, Human
ugcgugccgugugag

SEQ ID NO: 3858037 - RNA, 20 nt, Human
ugcguggaaugcccuucacu

SEQ ID NO: 3858038 - RNA, 18 nt, Human
ugcguggacucugcacau

SEQ ID NO: 3858039 - RNA, 14 nt, Human
ugcgugggugugug

SEQ ID NO: 3858040 - RNA, 13 nt, Human
ugcgugucguggg

SEQ ID NO: 3858041 - RNA, 12 nt, Human
ugcguguguaga

SEQ ID NO: 3858042 - RNA, 21 nt, Human
ugcguguguagaguuaagaag

SEQ ID NO: 3858043 - RNA, 19 nt, Human
ugcguuagaaugaggagga

SEQ ID NO: 3858044 - RNA, 13 nt, Human
ugcguuggucucu

SEQ ID NO: 3858045 - RNA, 23 nt, Human
ugcuaaaaaugagcuugauuaaa

SEQ ID NO: 3858046 - RNA, 12 nt, Human
ugcuaaaaaugu

SEQ ID NO: 3858047 - RNA, 13 nt, Human
ugcuaaaccuuag

SEQ ID NO: 3858048 - RNA, 18 nt, Human
ugcuaaacguguauguuu

SEQ ID NO: 3858049 - RNA, 23 nt, Human
ugcuaaacguguauguuuuucag

SEQ ID NO: 3858050 - RNA, 21 nt, Human
ugcuaaagaaaaagucaucca

SEQ ID NO: 3858051 - RNA, 22 nt, Human
ugcuaaagaaaaagucauccaa

SEQ ID NO: 3858052 - RNA, 14 nt, Human
uggaaggcagacag

SEQ ID NO: 3858053 - RNA, 23 nt, Human
uggaaggcagacagcaggcagcg

SEQ ID NO: 3858054 - RNA, 14 nt, Human
uggaaggcagagaa

SEQ ID NO: 3858055 - RNA, 15 nt, Human
uggaaggcagagaaa

SEQ ID NO: 3858056 - RNA, 20 nt, Human
uggaaggcagagaaaucuaa

SEQ ID NO: 3858057 - RNA, 14 nt, Human
uggaaggcauggcg

SEQ ID NO: 3858058 - RNA, 15 nt, Human
uggaaggcccagcac

SEQ ID NO: 3858059 - RNA, 15 nt, Human
uggaagggacuagga

SEQ ID NO: 3858060 - RNA, 17 nt, Human
uggaaggguuuguggcu

SEQ ID NO: 3858061 - RNA, 17 nt, Human
uggaagguauuuaauag

SEQ ID NO: 3858062 - RNA, 18 nt, Human
uggaagugaaaacuuugu

SEQ ID NO: 3858063 - RNA, 19 nt, Human
uggaagugaaaacuuugua

SEQ ID NO: 3858064 - RNA, 17 nt, Human
uggaagugacuuuggcu

SEQ ID NO: 3858065 - RNA, 17 nt, Human
uggaagugcaucuacuu

SEQ ID NO: 3858066 - RNA, 16 nt, Human
uggaaguguauuuauu

SEQ ID NO: 3858067 - RNA, 22 nt, Human
uggaaguguauuuauuuuacag

SEQ ID NO: 3858068 - RNA, 20 nt, Human
uggaaguguguguggcagca

SEQ ID NO: 3858069 - RNA, 23 nt, Human
uggaaguucauaccuaaguacug

SEQ ID NO: 3858070 - RNA, 11 nt, Human
uggaaguugca

SEQ ID NO: 3858071 - RNA, 18 nt, Human
uggaaguugcauggcauc

SEQ ID NO: 3858072 - RNA, 15 nt, Human
uggaauaaaaggcuu

SEQ ID NO: 3858073 - RNA, 21 nt, Human
uggaauaaaauauuuuuuuca

SEQ ID NO: 3858074 - RNA, 14 nt, Human
uggaauaagacaga

SEQ ID NO: 3858075 - RNA, 15 nt, Human
uggaauaaguucaaa

SEQ ID NO: 3858076 - RNA, 22 nt, Human
uggaauaauccuaaacauauga

SEQ ID NO: 3858077 - RNA, 14 nt, Human
uggaauacaguguu

SEQ ID NO: 3858078 - RNA, 15 nt, Human
uggaauacaguguua

SEQ ID NO: 3858079 - RNA, 14 nt, Human
uggaauacaugaaa

SEQ ID NO: 3858080 - RNA, 15 nt, Human
uggaauacaugaaau

SEQ ID NO: 3858081 - RNA, 20 nt, Human
uggaauacuaaaaaucauga

SEQ ID NO: 3858082 - RNA, 14 nt, Human
uggaauaggaauaa

SEQ ID NO: 3858083 - RNA, 13 nt, Human
uggaauaguuuuu

SEQ ID NO: 3858084 - RNA, 14 nt, Human
uggaauauaaggaa

SEQ ID NO: 3858085 - RNA, 14 nt, Human
uggaauauaauugu

SEQ ID NO: 3858086 - RNA, 22 nt, Human
uggaauauaauuguuuuaucug

SEQ ID NO: 3858087 - RNA, 14 nt, Human
uggaauaucuacuu

SEQ ID NO: 3858088 - RNA, 16 nt, Human
uggaauaucuccguca

SEQ ID NO: 3858089 - RNA, 22 nt, Human
uggaauaucugcuguaugucaa

SEQ ID NO: 3858090 - RNA, 22 nt, Human
uggaaucacuguuuagaacaca

SEQ ID NO: 3858091 - RNA, 21 nt, Human
uggaaucagauuuuaacagcu

SEQ ID NO: 3858092 - RNA, 22 nt, Human
uggaaucaggaauauuuuccaa

SEQ ID NO: 3858093 - RNA, 18 nt, Human
uggaaucauuguccagag

SEQ ID NO: 3858094 - RNA, 17 nt, Human
uggaaucuagaagaaau

SEQ ID NO: 3858095 - RNA, 18 nt, Human
uggaaucuagaagaaaug

SEQ ID NO: 3858096 - RNA, 18 nt, Human
uggaaucuggagaccagg

SEQ ID NO: 3858097 - RNA, 22 nt, Human
uggaaucuucucuuugacaauu

SEQ ID NO: 3858098 - RNA, 18 nt, Human
uggaaugacaugugucaa

SEQ ID NO: 3858099 - RNA, 13 nt, Human
uggaaugaggguu

SEQ ID NO: 3858100 - RNA, 20 nt, Human
uggaaugcuucuucucaggc

SEQ ID NO: 3858101 - RNA, 13 nt, Human
uggaaugcuugaa

SEQ ID NO: 3858102 - RNA, 22 nt, Human
uggaaugcuugaaaaaugugca

SEQ ID NO: 3858103 - RNA, 17 nt, Human
uggaaugggcagcucau

SEQ ID NO: 3858104 - RNA, 16 nt, Human
uggaauguuggauaag

SEQ ID NO: 3858105 - RNA, 14 nt, Human
uggaauuaaaacaa

SEQ ID NO: 3858106 - RNA, 15 nt, Human
uggaauuaaaacaau

SEQ ID NO: 3858107 - RNA, 16 nt, Human
uggaauuaaaacaaug

SEQ ID NO: 3858108 - RNA, 23 nt, Human
uggaauuagaacccuugcacagc

SEQ ID NO: 3858109 - RNA, 15 nt, Human
uggaauuauuuuaaa

SEQ ID NO: 3858110 - RNA, 19 nt, Human
uggaauuauuuuaaaagau

SEQ ID NO: 3858111 - RNA, 13 nt, Human
uggaauucuuccu

SEQ ID NO: 3858112 - RNA, 20 nt, Human
uggaauugauuugcauugaa

SEQ ID NO: 3858113 - RNA, 23 nt, Human
uggaauugauuugcauugaacac

SEQ ID NO: 3858114 - RNA, 23 nt, Human
uggaauugcuuaccaaaggauag

SEQ ID NO: 3858115 - RNA, 22 nt, Human
uggaauuguggcuauccugauu

SEQ ID NO: 3858116 - RNA, 17 nt, Human
uggaauuuauauacaac

SEQ ID NO: 3858117 - RNA, 13 nt, Human
uggaauuucuugu

SEQ ID NO: 3858118 - RNA, 22 nt, Human
uggaauuugcaagucauggcug

SEQ ID NO: 3858119 - RNA, 17 nt, Human
uggaauuuguaaccuca

SEQ ID NO: 3858120 - RNA, 18 nt, Human
uggaauuuguaaccucag

SEQ ID NO: 3858121 - RNA, 19 nt, Human
uggaauuuguaaccucagc

SEQ ID NO: 3858122 - RNA, 13 nt, Human
uggaauuuguuca

SEQ ID NO: 3858123 - RNA, 15 nt, Human
uggaauuuguucaag

SEQ ID NO: 3858124 - RNA, 14 nt, Human
uggaauuuuuuauu

SEQ ID NO: 3858125 - RNA, 16 nt, Human
uggaauuuuuuauucu

SEQ ID NO: 3858126 - RNA, 21 nt, Human
uggaauuuuuuauucuuguga

SEQ ID NO: 3858127 - RNA, 18 nt, Human
uggaauuuuuuuguacga

SEQ ID NO: 3858128 - RNA, 17 nt, Human
uggacaaaauggaauac

SEQ ID NO: 3858129 - RNA, 13 nt, Human
uggacaaagcguu

SEQ ID NO: 3858130 - RNA, 23 nt, Human
uggacaaaucacauauuuuaaaa

SEQ ID NO: 3858131 - RNA, 15 nt, Human
uggacaaaugugaag

SEQ ID NO: 3858132 - RNA, 19 nt, Human
uggacaaaugugaagaugc

SEQ ID NO: 3858133 - RNA, 13 nt, Human
uggacaagaaagu

SEQ ID NO: 3858134 - RNA, 17 nt, Human
uggacaagccaacuugu

SEQ ID NO: 3858135 - RNA, 17 nt, Human
uggacaagcuucugaga

SEQ ID NO: 3858136 - RNA, 18 nt, Human
uggacaauacccccaggc

SEQ ID NO: 3858137 - RNA, 16 nt, Human
uggacacacacagacu

SEQ ID NO: 3858138 - RNA, 15 nt, Human
uggacacacacagcu

SEQ ID NO: 3858139 - RNA, 15 nt, Human
uggacacagcucuuc

SEQ ID NO: 3858140 - RNA, 16 nt, Human
uggacacagcucuucu

SEQ ID NO: 3858141 - RNA, 18 nt, Human
uggacacagcucuucucc

SEQ ID NO: 3858142 - RNA, 22 nt, Human
uggacacagcucuucuccaggc

SEQ ID NO: 3858143 - RNA, 15 nt, Human
uggacacaggccugc

SEQ ID NO: 3858144 - RNA, 20 nt, Human
uggacaccaggagucccugg

SEQ ID NO: 3858145 - RNA, 14 nt, Human
uggacaccugcccu

SEQ ID NO: 3858146 - RNA, 17 nt, Human
uggacaccugcccugcc

SEQ ID NO: 3858147 - RNA, 22 nt, Human
uggacacgcucaguggggcaga

SEQ ID NO: 3858148 - RNA, 19 nt, Human
uggacacuacacccagcaa

SEQ ID NO: 3858149 - RNA, 18 nt, Human
uggacacuccagggacac

SEQ ID NO: 3858150 - RNA, 22 nt, Human
uggacacuccagggacacacag

SEQ ID NO: 3858151 - RNA, 19 nt, Human
uggacacuccagugccagc

SEQ ID NO: 3858152 - RNA, 14 nt, Human
uggacacuguacaa

SEQ ID NO: 3858153 - RNA, 13 nt, Human
uggacacuuaauu

SEQ ID NO: 3858154 - RNA, 21 nt, Human
uggacacuuugaaauguguuu

SEQ ID NO: 3858155 - RNA, 22 nt, Human
uggacacuuugaaauguguuuc

SEQ ID NO: 3858156 - RNA, 14 nt, Human
uggacacuuuucac

SEQ ID NO: 3858157 - RNA, 16 nt, Human
uggacagaagcagcuc

SEQ ID NO: 3858158 - RNA, 16 nt, Human
uggacagacagaggau

SEQ ID NO: 3858159 - RNA, 22 nt, Human
uggacagacagaggaugagcuc

SEQ ID NO: 3858160 - RNA, 13 nt, Human
uggacagagggga

SEQ ID NO: 3858161 - RNA, 20 nt, Human
uggacagaggggacucuggg

SEQ ID NO: 3858162 - RNA, 17 nt, Human
uggacagcaaaaccauu

SEQ ID NO: 3858163 - RNA, 18 nt, Human
uggacagcaaaaccauug

SEQ ID NO: 3858164 - RNA, 22 nt, Human
uggacagcaaaaccauugcuuc

SEQ ID NO: 3858165 - RNA, 13 nt, Human
uggacagcugugc

SEQ ID NO: 3858166 - RNA, 16 nt, Human
uggacagcugugccuc

SEQ ID NO: 3858167 - RNA, 18 nt, Human
uggacagcugugccucgc

SEQ ID NO: 3858168 - RNA, 19 nt, Human
uggacagcugugccucgcu

SEQ ID NO: 3858169 - RNA, 18 nt, Human
uggacaggauguguuugc

SEQ ID NO: 3858170 - RNA, 12 nt, Human
uggacaggcaug

SEQ ID NO: 3858171 - RNA, 23 nt, Human
uggacaggcauguucucugagga

SEQ ID NO: 3858172 - RNA, 14 nt, Human
uggacaggcucugc

SEQ ID NO: 3858173 - RNA, 14 nt, Human
uggacaggcuggcu

SEQ ID NO: 3858174 - RNA, 13 nt, Human
uggacaggucugg

SEQ ID NO: 3858175 - RNA, 16 nt, Human
uggacaguccugggag

SEQ ID NO: 3858176 - RNA, 21 nt, Human
uggacaguucacacccugcaa

SEQ ID NO: 3858177 - RNA, 18 nt, Human
uggacaugaagauucuuu

SEQ ID NO: 3858178 - RNA, 21 nt, Human
uggacaugaagauucuuuccc

SEQ ID NO: 3858179 - RNA, 22 nt, Human
uggacaugaagauucuuuccca

SEQ ID NO: 3858180 - RNA, 17 nt, Human
uggacauggccccugug

SEQ ID NO: 3858181 - RNA, 20 nt, Human
uggacauuaagcaucacaaa

SEQ ID NO: 3858182 - RNA, 15 nt, Human
uggacauugucugcg

SEQ ID NO: 3858183 - RNA, 14 nt, Human
uggacauuuaccuu

SEQ ID NO: 3858184 - RNA, 19 nt, Human
uggacauuuagaagaaaga

SEQ ID NO: 3858185 - RNA, 19 nt, Human
uggacauuugccuugcugg

SEQ ID NO: 3858186 - RNA, 11 nt, Human
uggacauuuua

SEQ ID NO: 3858187 - RNA, 13 nt, Human
uggacauuuuaug

SEQ ID NO: 3858188 - RNA, 14 nt, Human
uggaccaaagcuga

SEQ ID NO: 3858189 - RNA, 21 nt, Human
uggaccaacccuguuuccuga

SEQ ID NO: 3858190 - RNA, 20 nt, Human
uggaccaauagggcugagcu

SEQ ID NO: 3858191 - RNA, 21 nt, Human
uggaccaauuauugauauaua

SEQ ID NO: 3858192 - RNA, 12 nt, Human
uggaccacugca

SEQ ID NO: 3858193 - RNA, 14 nt, Human
uggaccacuguuuc

SEQ ID NO: 3858194 - RNA, 19 nt, Human
uggaccacuguuucuugcu

SEQ ID NO: 3858195 - RNA, 23 nt, Human
uggaccacuguuucuugcuugua

SEQ ID NO: 3858196 - RNA, 13 nt, Human
uggaccaggacag

SEQ ID NO: 3858197 - RNA, 19 nt, Human
uggaccaggacaggaccag

SEQ ID NO: 3858198 - RNA, 13 nt, Human
uggaccagugguc

SEQ ID NO: 3858199 - RNA, 14 nt, Human
uggacccaaggaaa

SEQ ID NO: 3858200 - RNA, 17 nt, Human
uggacccagccaggccc

SEQ ID NO: 3858201 - RNA, 16 nt, Human
uggacccagggaacag

SEQ ID NO: 3858202 - RNA, 14 nt, Human
uggaccccagcugg

SEQ ID NO: 3858203 - RNA, 20 nt, Human
uggaccccaucugugaauaa

SEQ ID NO: 3858204 - RNA, 21 nt, Human
uggaccccaucugugaauaag

SEQ ID NO: 3858205 - RNA, 13 nt, Human
uggacccccagcu

SEQ ID NO: 3858206 - RNA, 14 nt, Human
uggacccccagcuu

SEQ ID NO: 3858207 - RNA, 15 nt, Human
uggaccccccuuuca

SEQ ID NO: 3858208 - RNA, 13 nt, Human
uggaccccugcau

SEQ ID NO: 3858209 - RNA, 16 nt, Human
uggaccccugcauugg

SEQ ID NO: 3858210 - RNA, 22 nt, Human
uggacccguucaugggggaggg

SEQ ID NO: 3858211 - RNA, 17 nt, Human
uggacccugaaaugugu

SEQ ID NO: 3858212 - RNA, 18 nt, Human
uggacccugaccagcucc

SEQ ID NO: 3858213 - RNA, 21 nt, Human
uggacccugaggcccagaggg

SEQ ID NO: 3858214 - RNA, 13 nt, Human
uggacccuguugc

SEQ ID NO: 3858215 - RNA, 15 nt, Human
uggacccuguugcua

SEQ ID NO: 3858216 - RNA, 18 nt, Human
uggaccuaaauggccuca

SEQ ID NO: 3858217 - RNA, 17 nt, Human
uggaccucgugcuuuaa

SEQ ID NO: 3858218 - RNA, 17 nt, Human
uggaccucugacagcag

SEQ ID NO: 3858219 - RNA, 19 nt, Human
uggaccucugacagcagca

SEQ ID NO: 3858220 - RNA, 17 nt, Human
uggaccucugcucugag

SEQ ID NO: 3858221 - RNA, 20 nt, Human
uggaccugccuccugccugc

SEQ ID NO: 3858222 - RNA, 15 nt, Human
uggaccugccugcau

SEQ ID NO: 3858223 - RNA, 17 nt, Human
uggaccuuaggccuucc

SEQ ID NO: 3858224 - RNA, 15 nt, Human
uggacgcacacagcu

SEQ ID NO: 3858225 - RNA, 18 nt, Human
uggacggcaggcucacug

SEQ ID NO: 3858226 - RNA, 20 nt, Human
uggacggcaggcucacugcc

SEQ ID NO: 3858227 - RNA, 23 nt, Human
uggacggcaggcucacugccagg

SEQ ID NO: 3858228 - RNA, 14 nt, Human
uggacggugcucca

SEQ ID NO: 3858229 - RNA, 18 nt, Human
uggacggugcuccaggca

SEQ ID NO: 3858230 - RNA, 19 nt, Human
uggacggugcuccaggcag

SEQ ID NO: 3858231 - RNA, 20 nt, Human
uggacggugcuccaggcagg

SEQ ID NO: 3858232 - RNA, 19 nt, Human
uggacguguuaugacucca

SEQ ID NO: 3858233 - RNA, 22 nt, Human
uggacuaaaugccuaguuuuua

SEQ ID NO: 3858234 - RNA, 19 nt, Human
uggacuaacuugucuuugg

SEQ ID NO: 3858235 - RNA, 24 nt, Human
uggacuacccacguucucacaccc

SEQ ID NO: 3858236 - RNA, 23 nt, Human
uggacuaucugucugguggcccc

SEQ ID NO: 3858237 - RNA, 18 nt, Human
uggacucaccucccccau

SEQ ID NO: 3858238 - RNA, 20 nt, Human
uggacucaccucccccaucu

SEQ ID NO: 3858239 - RNA, 18 nt, Human
uggacucagaaacuccau

SEQ ID NO: 3858240 - RNA, 12 nt, Human
uggacucagaga

SEQ ID NO: 3858241 - RNA, 18 nt, Human
uggacucaggaugcccag

SEQ ID NO: 3858242 - RNA, 21 nt, Human
uggacuccagacucucuguga

SEQ ID NO: 3858243 - RNA, 15 nt, Human
uggacuccagaucug

SEQ ID NO: 3858244 - RNA, 16 nt, Human
uggacucgccuguaau

SEQ ID NO: 3858245 - RNA, 16 nt, Human
uggacucuaaagacca

SEQ ID NO: 3858246 - RNA, 14 nt, Human
uggacucuaaaguc

SEQ ID NO: 3858247 - RNA, 15 nt, Human
uggacucucagucuc

SEQ ID NO: 3858248 - RNA, 15 nt, Human
uggacucuccccucu

SEQ ID NO: 3858249 - RNA, 21 nt, Human
uggacucuccccucuuaugua

SEQ ID NO: 3858250 - RNA, 21 nt, Human
uggacucugaaauaucccggg

SEQ ID NO: 3858251 - RNA, 13 nt, Human
uggacucugcauc

SEQ ID NO: 3858252 - RNA, 18 nt, Human
uggacucugcaucccagc

SEQ ID NO: 3858253 - RNA, 15 nt, Human
uggacucugcccuca

SEQ ID NO: 3858254 - RNA, 21 nt, Human
uggacucuucaaaaacuguuu

SEQ ID NO: 3858255 - RNA, 17 nt, Human
uggacugaccuggucca

SEQ ID NO: 3858256 - RNA, 15 nt, Human
uggacugaggccuga

SEQ ID NO: 3858257 - RNA, 16 nt, Human
uggacugaggccugag

SEQ ID NO: 3858258 - RNA, 19 nt, Human
uggacugagggggccugga

SEQ ID NO: 3858259 - RNA, 22 nt, Human
uggacugagggggccuggaugc

SEQ ID NO: 3858260 - RNA, 17 nt, Human
uggacugagugggaagc

SEQ ID NO: 3858261 - RNA, 19 nt, Human
uggacugcagaagcaaggg

SEQ ID NO: 3858262 - RNA, 22 nt, Human
uggacugcuaccuuucaaagcu

SEQ ID NO: 3858263 - RNA, 14 nt, Human
uggacuggaagggg

SEQ ID NO: 3858264 - RNA, 17 nt, Human
uggacuggaggccccug

SEQ ID NO: 3858265 - RNA, 13 nt, Human
uggacuggcuaga

SEQ ID NO: 3858266 - RNA, 19 nt, Human
uggacuggcuagaguccuc

SEQ ID NO: 3858267 - RNA, 13 nt, Human
uggacugggaggu

SEQ ID NO: 3858268 - RNA, 17 nt, Human
uggacugguggccccug

SEQ ID NO: 3858269 - RNA, 17 nt, Human
uggacugguugguuuug

SEQ ID NO: 3858270 - RNA, 15 nt, Human
uggacugucauagaa

SEQ ID NO: 3858271 - RNA, 15 nt, Human
uggacugugaugcca

SEQ ID NO: 3858272 - RNA, 17 nt, Human
uggacuguggugacuuu

SEQ ID NO: 3858273 - RNA, 15 nt, Human
uggacuuagaaagca

SEQ ID NO: 3858274 - RNA, 16 nt, Human
uggacuuagaaagcag

SEQ ID NO: 3858275 - RNA, 18 nt, Human
uggacuuauuucuucaaa

SEQ ID NO: 3858276 - RNA, 18 nt, Human
uggacuucuaccugcccu

SEQ ID NO: 3858277 - RNA, 14 nt, Human
uggacuugccucug

SEQ ID NO: 3858278 - RNA, 15 nt, Human
uggacuuguauauuu

SEQ ID NO: 3858279 - RNA, 15 nt, Human
uggacuuguccucag

SEQ ID NO: 3858280 - RNA, 12 nt, Human
uggacuuucaaa

SEQ ID NO: 3858281 - RNA, 16 nt, Human
uggacuuuccaccccc

SEQ ID NO: 3858282 - RNA, 19 nt, Human
uggacuuuccacccccucc

SEQ ID NO: 3858283 - RNA, 20 nt, Human
uggacuuuccacccccuccc

SEQ ID NO: 3858284 - RNA, 19 nt, Human
uggacuuuccugcaacuca

SEQ ID NO: 3858285 - RNA, 20 nt, Human
uggacuuucucuaauaauaa

SEQ ID NO: 3858286 - RNA, 22 nt, Human
uggacuuucucuaauaauaaau

SEQ ID NO: 3858287 - RNA, 11 nt, Human
uggacuuuguu

SEQ ID NO: 3858288 - RNA, 12 nt, Human
uggacuuuguua

SEQ ID NO: 3858289 - RNA, 15 nt, Human
uggacuuuguuacac

SEQ ID NO: 3858290 - RNA, 22 nt, Human
uggacuuuguuacacuguuauu

SEQ ID NO: 3858291 - RNA, 22 nt, Human
uggacuuuguuaguuucuccaa

SEQ ID NO: 3858292 - RNA, 14 nt, Human
uggacuuuguucac

SEQ ID NO: 3858293 - RNA, 17 nt, Human
uggagaaaaauaucugu

SEQ ID NO: 3858294 - RNA, 14 nt, Human
uggagaaaauggac

SEQ ID NO: 3858295 - RNA, 22 nt, Human
uggagaaaauggguuuauucac

SEQ ID NO: 3858296 - RNA, 14 nt, Human
uggagaaacccugu

SEQ ID NO: 3858297 - RNA, 22 nt, Human
uggagaaacuguagucucagga

SEQ ID NO: 3858298 - RNA, 17 nt, Human
uggagaaagcacugacc

SEQ ID NO: 3858299 - RNA, 18 nt, Human
uggagaaagcacugaccu

SEQ ID NO: 3858300 - RNA, 13 nt, Human
uggagaaagcuga

SEQ ID NO: 3858301 - RNA, 13 nt, Human
uggagaaagggcc

SEQ ID NO: 3858302 - RNA, 22 nt, Human
uggagaaagggcccugggccug

SEQ ID NO: 3858303 - RNA, 11 nt, Human
uggagaaauua

SEQ ID NO: 3858304 - RNA, 14 nt, Human
uggagaaccaccua

SEQ ID NO: 3858305 - RNA, 16 nt, Human
uggagaagaacugaaa

SEQ ID NO: 3858306 - RNA, 20 nt, Human
uggagaagagagaggaaagg

SEQ ID NO: 3858307 - RNA, 19 nt, Human
uggagaagagaggagagga

SEQ ID NO: 3858308 - RNA, 11 nt, Human
uggagaagcca

SEQ ID NO: 3858309 - RNA, 14 nt, Human
uggagaagccauug

SEQ ID NO: 3858310 - RNA, 17 nt, Human
uggagaagccauugucu

SEQ ID NO: 3858311 - RNA, 18 nt, Human
uggagaagccauugucuu

SEQ ID NO: 3858312 - RNA, 22 nt, Human
uggagaagcggcuggcagccca

SEQ ID NO: 3858313 - RNA, 16 nt, Human
uggagaagcucaccca

SEQ ID NO: 3858314 - RNA, 19 nt, Human
uggagaagcucccaggaac

SEQ ID NO: 3858315 - RNA, 15 nt, Human
uggagaagucucagc

SEQ ID NO: 3858316 - RNA, 17 nt, Human
uggagaagucucagcua

SEQ ID NO: 3858317 - RNA, 16 nt, Human
uggagaauaauucuuu

SEQ ID NO: 3858318 - RNA, 17 nt, Human
uggagaaucacaggcug

SEQ ID NO: 3858319 - RNA, 23 nt, Human
uggagaaucacaggcugggcugg

SEQ ID NO: 3858320 - RNA, 20 nt, Human
uggagaaucucaacaugucu

SEQ ID NO: 3858321 - RNA, 15 nt, Human
uggagaauguggaga

SEQ ID NO: 3858322 - RNA, 18 nt, Human
uggagaauugcugaaggg

SEQ ID NO: 3858323 - RNA, 13 nt, Human
uggagacagcccc

SEQ ID NO: 3858324 - RNA, 17 nt, Human
uggagacagccccagag

SEQ ID NO: 3858325 - RNA, 22 nt, Human
uggagacagccccagagcaggg

SEQ ID NO: 3858326 - RNA, 15 nt, Human
uggagacauuccugg

SEQ ID NO: 3858327 - RNA, 13 nt, Human
uggagaccaccag

SEQ ID NO: 3858328 - RNA, 18 nt, Human
uggagaccagggagccuu

SEQ ID NO: 3858329 - RNA, 22 nt, Human
uggagacccaccccaccugcag

SEQ ID NO: 3858330 - RNA, 24 nt, Human
uggagacguggaaccucugucuca

SEQ ID NO: 3858331 - RNA, 22 nt, Human
uggagacguuuauaaacagaaa

SEQ ID NO: 3858332 - RNA, 19 nt, Human
uggagacuccuaggcagga

SEQ ID NO: 3858333 - RNA, 19 nt, Human
uggagacuccugcccuguu

SEQ ID NO: 3858334 - RNA, 22 nt, Human
uggagacugcuccugagccccc

SEQ ID NO: 3858335 - RNA, 14 nt, Human
uggagacugucuca

SEQ ID NO: 3858336 - RNA, 20 nt, Human
uggagacugugugugcccuc

SEQ ID NO: 3858337 - RNA, 18 nt, Human
uggagacuuucuuuaaau

SEQ ID NO: 3858338 - RNA, 13 nt, Human
uggagagaaauau

SEQ ID NO: 3858339 - RNA, 12 nt, Human
uggagagaaggc

SEQ ID NO: 3858340 - RNA, 19 nt, Human
uggagagagcagacuggcg

SEQ ID NO: 3858341 - RNA, 14 nt, Human
uggagagcaacaca

SEQ ID NO: 3858342 - RNA, 13 nt, Human
uggagagcccugg

SEQ ID NO: 3858343 - RNA, 15 nt, Human
uggagagcccuggga

SEQ ID NO: 3858344 - RNA, 20 nt, Human
uggagagcccugggaccgcu

SEQ ID NO: 3858345 - RNA, 15 nt, Human
uggagagcuaggagc

SEQ ID NO: 3858346 - RNA, 22 nt, Human
uggagagcuaggagcaaagccu

SEQ ID NO: 3858347 - RNA, 13 nt, Human
uggagagcuggag

SEQ ID NO: 3858348 - RNA, 15 nt, Human
uggagagcuggagcc

SEQ ID NO: 3858349 - RNA, 17 nt, Human
uggagagcuggagccug

SEQ ID NO: 3858350 - RNA, 14 nt, Human
uggagagcuggugc

SEQ ID NO: 3858351 - RNA, 16 nt, Human
uggagagcuggugccc

SEQ ID NO: 3858352 - RNA, 15 nt, Human
uggcaacagaagcag

SEQ ID NO: 3858353 - RNA, 15 nt, Human
uggcaacagaucugg

SEQ ID NO: 3858354 - RNA, 16 nt, Human
uggcaacagaucugga

SEQ ID NO: 3858355 - RNA, 21 nt, Human
uggcaacaguuagcuggagcu

SEQ ID NO: 3858356 - RNA, 14 nt, Human
uggcaaccugcuuc

SEQ ID NO: 3858357 - RNA, 17 nt, Human
uggcaagaguguggagg

SEQ ID NO: 3858358 - RNA, 16 nt, Human
uggcaagccccugccc

SEQ ID NO: 3858359 - RNA, 11 nt, Human
uggcaaggaaa

SEQ ID NO: 3858360 - RNA, 19 nt, Human
uggcaaggacuuuguacau

SEQ ID NO: 3858361 - RNA, 20 nt, Human
uggcaaggcagcccugucug

SEQ ID NO: 3858362 - RNA, 22 nt, Human
uggcaaguuuugauaugaguau

SEQ ID NO: 3858363 - RNA, 20 nt, Human
uggcaauagugggcccuccg

SEQ ID NO: 3858364 - RNA, 16 nt, Human
uggcaauaguguguuc

SEQ ID NO: 3858365 - RNA, 17 nt, Human
uggcaauaguguguucu

SEQ ID NO: 3858366 - RNA, 15 nt, Human
uggcaauauuccuua

SEQ ID NO: 3858367 - RNA, 19 nt, Human
uggcaaugacucaaagucu

SEQ ID NO: 3858368 - RNA, 19 nt, Human
uggcaaugccacagcccug

SEQ ID NO: 3858369 - RNA, 19 nt, Human
uggcaaugccaucaucucc

SEQ ID NO: 3858370 - RNA, 20 nt, Human
uggcaauggaugaacugaaa

SEQ ID NO: 3858371 - RNA, 16 nt, Human
uggcaaugguaguuuc

SEQ ID NO: 3858372 - RNA, 13 nt, Human
uggcaauuccaau

SEQ ID NO: 3858373 - RNA, 14 nt, Human
uggcaauugucuau

SEQ ID NO: 3858374 - RNA, 16 nt, Human
uggcaauugucuauuu

SEQ ID NO: 3858375 - RNA, 18 nt, Human
uggcaauugucuauuuau

SEQ ID NO: 3858376 - RNA, 14 nt, Human
uggcaauuuugugg

SEQ ID NO: 3858377 - RNA, 23 nt, Human
uggcacagagguagucucacugc

SEQ ID NO: 3858378 - RNA, 18 nt, Human
uggcacagcccaaagaag

SEQ ID NO: 3858379 - RNA, 14 nt, Human
uggcacagccugca

SEQ ID NO: 3858380 - RNA, 16 nt, Human
uggcacagggcaugaa

SEQ ID NO: 3858381 - RNA, 18 nt, Human
uggcacagugucugggcu

SEQ ID NO: 3858382 - RNA, 20 nt, Human
uggcacagugucugggcuga

SEQ ID NO: 3858383 - RNA, 22 nt, Human
uggcacaguuuucugagaaaga

SEQ ID NO: 3858384 - RNA, 18 nt, Human
uggcacaucagaaaggaa

SEQ ID NO: 3858385 - RNA, 20 nt, Human
uggcacaucagcacgauuuc

SEQ ID NO: 3858386 - RNA, 21 nt, Human
uggcacaucagcacgauuucu

SEQ ID NO: 3858387 - RNA, 23 nt, Human
uggcacaucagcacgauuucugu

SEQ ID NO: 3858388 - RNA, 21 nt, Human
uggcaccacugcacuccagcc

SEQ ID NO: 3858389 - RNA, 20 nt, Human
uggcaccagacacccaggac

SEQ ID NO: 3858390 - RNA, 23 nt, Human
uggcaccagacacccaggacuua

SEQ ID NO: 3858391 - RNA, 14 nt, Human
uggcaccagaggcu

SEQ ID NO: 3858392 - RNA, 13 nt, Human
uggcaccagcgaa

SEQ ID NO: 3858393 - RNA, 16 nt, Human
uggcaccgccucccca

SEQ ID NO: 3858394 - RNA, 15 nt, Human
uggcaccgccuucuc

SEQ ID NO: 3858395 - RNA, 16 nt, Human
uggcaccgccuucucu

SEQ ID NO: 3858396 - RNA, 12 nt, Human
uggcaccuccua

SEQ ID NO: 3858397 - RNA, 20 nt, Human
uggcaccugucgcccagugc

SEQ ID NO: 3858398 - RNA, 14 nt, Human
uggcaccugucugc

SEQ ID NO: 3858399 - RNA, 18 nt, Human
uggcaccugucugcucca

SEQ ID NO: 3858400 - RNA, 21 nt, Human
uggcaccuucccccuccccca

SEQ ID NO: 3858401 - RNA, 20 nt, Human
uggcacgguggcucaggccu

SEQ ID NO: 3858402 - RNA, 16 nt, Human
uggcacgucaucuagu

SEQ ID NO: 3858403 - RNA, 18 nt, Human
uggcacucacagaccugg

SEQ ID NO: 3858404 - RNA, 21 nt, Human
uggcacucccuccagcacaaa

SEQ ID NO: 3858405 - RNA, 13 nt, Human
uggcacugagccc

SEQ ID NO: 3858406 - RNA, 18 nt, Human
uggcacugcuuccaguga

SEQ ID NO: 3858407 - RNA, 19 nt, Human
uggcacugcuuccagugag

SEQ ID NO: 3858408 - RNA, 18 nt, Human
uggcacuggaccccagca

SEQ ID NO: 3858409 - RNA, 15 nt, Human
uggcacuggaugcag

SEQ ID NO: 3858410 - RNA, 18 nt, Human
uggcacuggaugcagaaa

SEQ ID NO: 3858411 - RNA, 21 nt, Human
uggcacuggcaaacagggccu

SEQ ID NO: 3858412 - RNA, 17 nt, Human
uggcacuugcaucugug

SEQ ID NO: 3858413 - RNA, 15 nt, Human
uggcacuugccuggg

SEQ ID NO: 3858414 - RNA, 14 nt, Human
uggcagaacugagc

SEQ ID NO: 3858415 - RNA, 20 nt, Human
uggcagaacugagcuccucu

SEQ ID NO: 3858416 - RNA, 13 nt, Human
uggcagaagacac

SEQ ID NO: 3858417 - RNA, 14 nt, Human
uggcagaagacacc

SEQ ID NO: 3858418 - RNA, 16 nt, Human
uggcagaaguguuuca

SEQ ID NO: 3858419 - RNA, 20 nt, Human
uggcagaauaaucuuugggu

SEQ ID NO: 3858420 - RNA, 15 nt, Human
uggcagacuguguaa

SEQ ID NO: 3858421 - RNA, 12 nt, Human
uggcagagagag

SEQ ID NO: 3858422 - RNA, 18 nt, Human
uggcagagagagagaaag

SEQ ID NO: 3858423 - RNA, 21 nt, Human
uggcagaguugaagacagagc

SEQ ID NO: 3858424 - RNA, 15 nt, Human
uggcagaguuguaaa

SEQ ID NO: 3858425 - RNA, 16 nt, Human
uggcagaguuguaaau

SEQ ID NO: 3858426 - RNA, 23 nt, Human
uggcagaguuguaaauauauaaa

SEQ ID NO: 3858427 - RNA, 20 nt, Human
uggcagauaaucagccucuu

SEQ ID NO: 3858428 - RNA, 17 nt, Human
uggcagaugcagcucuu

SEQ ID NO: 3858429 - RNA, 13 nt, Human
uggcagauuuuac

SEQ ID NO: 3858430 - RNA, 16 nt, Human
uggcagauuuuacaaa

SEQ ID NO: 3858431 - RNA, 22 nt, Human
uggcagauuuuacaaaagaugu

SEQ ID NO: 3858432 - RNA, 13 nt, Human
uggcagcaacaau

SEQ ID NO: 3858433 - RNA, 20 nt, Human
uggcagcaacggcacagcua

SEQ ID NO: 3858434 - RNA, 20 nt, Human
uggcagcaccgccucuuccc

SEQ ID NO: 3858435 - RNA, 18 nt, Human
uggcagcaccugucuccu

SEQ ID NO: 3858436 - RNA, 20 nt, Human
uggcagcagaaaacuugugu

SEQ ID NO: 3858437 - RNA, 11 nt, Human
uggcagcagau

SEQ ID NO: 3858438 - RNA, 14 nt, Human
uggcagcaggcagc

SEQ ID NO: 3858439 - RNA, 19 nt, Human
uggcagcaggccuguugcu

SEQ ID NO: 3858440 - RNA, 14 nt, Human
uggcagcauaaagg

SEQ ID NO: 3858441 - RNA, 21 nt, Human
uggcagccacacuucucagga

SEQ ID NO: 3858442 - RNA, 16 nt, Human
uggcagcccagccagc

SEQ ID NO: 3858443 - RNA, 12 nt, Human
uggcagccccug

SEQ ID NO: 3858444 - RNA, 20 nt, Human
uggcagcccgcaucagcugc

SEQ ID NO: 3858445 - RNA, 14 nt, Human
uggcagcccuguag

SEQ ID NO: 3858446 - RNA, 14 nt, Human
uggcagccgagcuc

SEQ ID NO: 3858447 - RNA, 16 nt, Human
uggcagccgugccuuc

SEQ ID NO: 3858448 - RNA, 20 nt, Human
uggcagccgugccuucagcu

SEQ ID NO: 3858449 - RNA, 23 nt, Human
uggcagccgugccuucagcucua

SEQ ID NO: 3858450 - RNA, 21 nt, Human
uggcagccucccauccagggc

SEQ ID NO: 3858451 - RNA, 22 nt, Human
uggcagccucccauccagggcc

SEQ ID NO: 3858452 - RNA, 15 nt, Human
uggcagccucuucaa

SEQ ID NO: 3858453 - RNA, 22 nt, Human
uggcagcucaccucucccuugg

SEQ ID NO: 3858454 - RNA, 23 nt, Human
uggcagcucaccucucccuugga

SEQ ID NO: 3858455 - RNA, 13 nt, Human
uggcagcucagag

SEQ ID NO: 3858456 - RNA, 12 nt, Human
uggcagcucucc

SEQ ID NO: 3858457 - RNA, 13 nt, Human
uggcagcucucca

SEQ ID NO: 3858458 - RNA, 17 nt, Human
uggcagcucuccaguca

SEQ ID NO: 3858459 - RNA, 11 nt, Human
uggcagcucug

SEQ ID NO: 3858460 - RNA, 22 nt, Human
uggcagcucuggacagccccac

SEQ ID NO: 3858461 - RNA, 21 nt, Human
uggcaggacacugcagaacag

SEQ ID NO: 3858462 - RNA, 19 nt, Human
uggcaggaguuggaagugu

SEQ ID NO: 3858463 - RNA, 18 nt, Human
uggcaggauggccuggcc

SEQ ID NO: 3858464 - RNA, 20 nt, Human
uggcaggauggccuggccag

SEQ ID NO: 3858465 - RNA, 23 nt, Human
uggcaggcagaggcccaggcugc

SEQ ID NO: 3858466 - RNA, 23 nt, Human
uggcaggcagcgccaagcaaccu

SEQ ID NO: 3858467 - RNA, 19 nt, Human
uggcagggaggucaggccc

SEQ ID NO: 3858468 - RNA, 16 nt, Human
uggcagggcacagggc

SEQ ID NO: 3858469 - RNA, 18 nt, Human
uggcagggcacagggccu

SEQ ID NO: 3858470 - RNA, 14 nt, Human
uggcagggccuagc

SEQ ID NO: 3858471 - RNA, 12 nt, Human
uggcagggcuca

SEQ ID NO: 3858472 - RNA, 14 nt, Human
uggcagggcucagg

SEQ ID NO: 3858473 - RNA, 15 nt, Human
uggcagggcucagga

SEQ ID NO: 3858474 - RNA, 21 nt, Human
uggcagggcuggccccagggc

SEQ ID NO: 3858475 - RNA, 13 nt, Human
uggcagggggcug

SEQ ID NO: 3858476 - RNA, 16 nt, Human
uggcagggggcugcug

SEQ ID NO: 3858477 - RNA, 17 nt, Human
uggcagggggcugcugc

SEQ ID NO: 3858478 - RNA, 19 nt, Human
uggcagggggcugcugcug

SEQ ID NO: 3858479 - RNA, 16 nt, Human
uggcagggugggaugg

SEQ ID NO: 3858480 - RNA, 17 nt, Human
uggcagggugggaugga

SEQ ID NO: 3858481 - RNA, 20 nt, Human
uggcagguaggaauauuaua

SEQ ID NO: 3858482 - RNA, 17 nt, Human
uggcagguccuccccuc

SEQ ID NO: 3858483 - RNA, 22 nt, Human
uggcaggugauguccuguaaac

SEQ ID NO: 3858484 - RNA, 15 nt, Human
uggcaggugcagccc

SEQ ID NO: 3858485 - RNA, 22 nt, Human
uggcagguggaggugucaggcu

SEQ ID NO: 3858486 - RNA, 14 nt, Human
uggcaguaaagaga

SEQ ID NO: 3858487 - RNA, 17 nt, Human
uggcaguaaagagaaac

SEQ ID NO: 3858488 - RNA, 18 nt, Human
uggcaguccuggaagcca

SEQ ID NO: 3858489 - RNA, 16 nt, Human
uggcagucugaauuuu

SEQ ID NO: 3858490 - RNA, 17 nt, Human
uggcagugagugagccu

SEQ ID NO: 3858491 - RNA, 12 nt, Human
uggcaguggagg

SEQ ID NO: 3858492 - RNA, 23 nt, Human
uggcagugggaaaaauguaggag

SEQ ID NO: 3858493 - RNA, 16 nt, Human
uggcagugggagcugc

SEQ ID NO: 3858494 - RNA, 20 nt, Human
uggcagugggagcugccugu

SEQ ID NO: 3858495 - RNA, 21 nt, Human
uggcauaacauaaaucuguga

SEQ ID NO: 3858496 - RNA, 15 nt, Human
uggcauagcucuggg

SEQ ID NO: 3858497 - RNA, 16 nt, Human
uggcauagcucugggg

SEQ ID NO: 3858498 - RNA, 18 nt, Human
uggcaucacagggcagag

SEQ ID NO: 3858499 - RNA, 23 nt, Human
uggcaucaccuuaggcagggaag

SEQ ID NO: 3858500 - RNA, 18 nt, Human
uggcaucagcuggcguca

SEQ ID NO: 3858501 - RNA, 18 nt, Human
uggcaucaucucagcuca

SEQ ID NO: 3858502 - RNA, 15 nt, Human
uucuagggaaaugaa

SEQ ID NO: 3858503 - RNA, 23 nt, Human
uucuagggcugggaaacacuccu

SEQ ID NO: 3858504 - RNA, 23 nt, Human
uucuagguggcaaggcugugcuc

SEQ ID NO: 3858505 - RNA, 20 nt, Human
uucuagguuucaaagaugcu

SEQ ID NO: 3858506 - RNA, 19 nt, Human
uucuaguacacuuuuauga

SEQ ID NO: 3858507 - RNA, 21 nt, Human
uucuagucuccuuugcacuga

SEQ ID NO: 3858508 - RNA, 22 nt, Human
uucuagucuccuuugcacugag

SEQ ID NO: 3858509 - RNA, 23 nt, Human
uucuagucuccuuugcacugagg

SEQ ID NO: 3858510 - RNA, 18 nt, Human
uucuaguggucuuuguaa

SEQ ID NO: 3858511 - RNA, 21 nt, Human
uucuaguggucuuuguaagag

SEQ ID NO: 3858512 - RNA, 22 nt, Human
uucuaguggucuuuguaagagu

SEQ ID NO: 3858513 - RNA, 15 nt, Human
uucuaguguagaauu

SEQ ID NO: 3858514 - RNA, 17 nt, Human
uucuaguuauuuauucu

SEQ ID NO: 3858515 - RNA, 15 nt, Human
uucuaguucugccag

SEQ ID NO: 3858516 - RNA, 22 nt, Human
uucuaguuucccacaauauaaa

SEQ ID NO: 3858517 - RNA, 23 nt, Human
uucuauaaggccauaaaacaggu

SEQ ID NO: 3858518 - RNA, 18 nt, Human
uuguuaauaucacucauu

SEQ ID NO: 3858519 - RNA, 22 nt, Human
uuguuaaucucuguuauguacu

SEQ ID NO: 3858520 - RNA, 21 nt, Human
uuguuaauuuagaaaacuuua

SEQ ID NO: 3858521 - RNA, 17 nt, Human
uuguuaauuucaguccu

SEQ ID NO: 3858522 - RNA, 13 nt, Human
uuguuaauuugga

SEQ ID NO: 3858523 - RNA, 18 nt, Human
uuguuacccaugaaaaac

SEQ ID NO: 3858524 - RNA, 21 nt, Human
uuguuaccuccaacagaacua

SEQ ID NO: 3858525 - RNA, 23 nt, Human
uuguuaccuccaacagaacuaaa

SEQ ID NO: 3858526 - RNA, 22 nt, Human
uuguuacucugguucuuuguuu

SEQ ID NO: 3858527 - RNA, 9 nt, Human
uuguuacug

SEQ ID NO: 3858528 - RNA, 13 nt, Human
uuguuacuguucu

SEQ ID NO: 3858529 - RNA, 15 nt, Human
uuguuacuguucuug

SEQ ID NO: 3858530 - RNA, 16 nt, Human
uuguuacuguucuugc

SEQ ID NO: 3858531 - RNA, 19 nt, Human
uuguuacuguucuugcugc

SEQ ID NO: 3858532 - RNA, 23 nt, Human
uuguuacuguucuugcugcuaga

SEQ ID NO: 3858533 - RNA, 15 nt, Human
uuguuacuucucuaa

SEQ ID NO: 3858534 - RNA, 22 nt, Human
uuguuagaaaacaaaauuuuau

SEQ ID NO: 3858535 - RNA, 16 nt, Human
uuguuagauagcugca

SEQ ID NO: 3858536 - RNA, 21 nt, Human
uuguuaggccaaagacaaaua

SEQ ID NO: 3858537 - RNA, 22 nt, Human
uuguuaggccaaagacaaauag

SEQ ID NO: 3858538 - RNA, 13 nt, Human
uuguuauauaauc

SEQ ID NO: 3858539 - RNA, 15 nt, Human
uuguuauauaauuua

SEQ ID NO: 3858540 - RNA, 12 nt, Human
uuguuaugcuau

SEQ ID NO: 3858541 - RNA, 13 nt, Human
uuguuauuaaaug

SEQ ID NO: 3858542 - RNA, 14 nt, Human
uuguuauuaaaugu

SEQ ID NO: 3858543 - RNA, 15 nt, Human
uuguuauuaaaugua

SEQ ID NO: 3858544 - RNA, 22 nt, Human
uuguuauuuugcaaccucgcug

SEQ ID NO: 3858545 - RNA, 14 nt, Human
uuguucaaacaaua

SEQ ID NO: 3858546 - RNA, 15 nt, Human
uuguucaccuuugua

SEQ ID NO: 3858547 - RNA, 21 nt, Human
uuguucacugaaggugauuca

SEQ ID NO: 3858548 - RNA, 16 nt, Human
uuguucagcaugcaau

SEQ ID NO: 3858549 - RNA, 16 nt, Human
uuguucaucauccaga

SEQ ID NO: 3858550 - RNA, 14 nt, Human
uuguucauguuugg

SEQ ID NO: 3858551 - RNA, 19 nt, Human
uuguucauuuugagcugaa

SEQ ID NO: 3858552 - RNA, 21 nt, Human
uuguuccaaauacuaaugaaa

SEQ ID NO: 3858553 - RNA, 16 nt, Human
uuguuccaagacauug

SEQ ID NO: 3858554 - RNA, 22 nt, Human
uuguuccaagacauugucaaua

SEQ ID NO: 3858555 - RNA, 21 nt, Human
uuguuccacaaguuaaauaaa

SEQ ID NO: 3858556 - RNA, 12 nt, Human
uuguuccagaga

SEQ ID NO: 3858557 - RNA, 11 nt, Human
uuguucccagu

SEQ ID NO: 3858558 - RNA, 21 nt, Human
uuguucccauccucuucuuuu

SEQ ID NO: 3858559 - RNA, 18 nt, Human
uuguuccccacuggagca

SEQ ID NO: 3858560 - RNA, 19 nt, Human
uuguuccccaucaucugug

SEQ ID NO: 3858561 - RNA, 14 nt, Human
uuguuccccuccuc

SEQ ID NO: 3858562 - RNA, 16 nt, Human
uuguuccccuccucca

SEQ ID NO: 3858563 - RNA, 18 nt, Human
uuguuccccuccuccacu

SEQ ID NO: 3858564 - RNA, 20 nt, Human
uuguuccccuccuccacucu

SEQ ID NO: 3858565 - RNA, 23 nt, Human
uuguucccuauuuuucucuccug

SEQ ID NO: 3858566 - RNA, 20 nt, Human
uuguuccuaaguucuuagau

SEQ ID NO: 3858567 - RNA, 21 nt, Human
uuguucucugggagaaaauca

SEQ ID NO: 3858568 - RNA, 14 nt, Human
uuguucucugucca

SEQ ID NO: 3858569 - RNA, 23 nt, Human
uuguucugugguuuuccccuccc

SEQ ID NO: 3858570 - RNA, 15 nt, Human
uuguucuguuaacug

SEQ ID NO: 3858571 - RNA, 22 nt, Human
uuguucuucagagaucauggaa

SEQ ID NO: 3858572 - RNA, 19 nt, Human
uuguucuuggcaauaaauu

SEQ ID NO: 3858573 - RNA, 15 nt, Human
uuguugaaagaaagu

SEQ ID NO: 3858574 - RNA, 12 nt, Human
uuguugaaauuu

SEQ ID NO: 3858575 - RNA, 16 nt, Human
uuguugacaaaauuuu

SEQ ID NO: 3858576 - RNA, 21 nt, Human
uuguugacaguucugaagaau

SEQ ID NO: 3858577 - RNA, 17 nt, Human
uuguugacuuauuuucu

SEQ ID NO: 3858578 - RNA, 22 nt, Human
uuguugagcaugacagccugca

SEQ ID NO: 3858579 - RNA, 19 nt, Human
uuguugaggguauguuuua

SEQ ID NO: 3858580 - RNA, 22 nt, Human
uuguugagguggucugaauguu

SEQ ID NO: 3858581 - RNA, 23 nt, Human
uuguugaugggcacuugagaacu

SEQ ID NO: 3858582 - RNA, 18 nt, Human
uuguugcaagaugugaau

SEQ ID NO: 3858583 - RNA, 19 nt, Human
uuguugcaaguacugcugu

SEQ ID NO: 3858584 - RNA, 17 nt, Human
uuguugcacugaaguuu

SEQ ID NO: 3858585 - RNA, 16 nt, Human
uuguugcguuccuuuc

SEQ ID NO: 3858586 - RNA, 20 nt, Human
uuguugcuggcuuguuguaa

SEQ ID NO: 3858587 - RNA, 13 nt, Human
uuguuggaaugaa

SEQ ID NO: 3858588 - RNA, 15 nt, Human
uuguuggagccugca

SEQ ID NO: 3858589 - RNA, 15 nt, Human
uuguuggaucuucaa

SEQ ID NO: 3858590 - RNA, 12 nt, Human
uuguuggccucc

SEQ ID NO: 3858591 - RNA, 21 nt, Human
uuguuggccuccggccucccc

SEQ ID NO: 3858592 - RNA, 18 nt, Human
uuguuggcguaggcuaca

SEQ ID NO: 3858593 - RNA, 15 nt, Human
uuguuggugcacagc

SEQ ID NO: 3858594 - RNA, 20 nt, Human
uuguugguugguuuucuucu

SEQ ID NO: 3858595 - RNA, 20 nt, Human
uuguugguuuuuaaagauuu

SEQ ID NO: 3858596 - RNA, 13 nt, Human
uuguuguaaaaag

SEQ ID NO: 3858597 - RNA, 17 nt, Human
uuguuguaaaaagaaaa

SEQ ID NO: 3858598 - RNA, 21 nt, Human
uuguuguaaaacaaaauuuga

SEQ ID NO: 3858599 - RNA, 14 nt, Human
uuguuguacuuaaa

SEQ ID NO: 3858600 - RNA, 18 nt, Human
uuguuguagagaaaacau

SEQ ID NO: 3858601 - RNA, 23 nt, Human
uuguuguagauugauuguauugu

SEQ ID NO: 3858602 - RNA, 20 nt, Human
uuguuguauaauuucgagau

SEQ ID NO: 3858603 - RNA, 14 nt, Human
uuguuguccuuuuc

SEQ ID NO: 3858604 - RNA, 14 nt, Human
uuguugugugccuc

SEQ ID NO: 3858605 - RNA, 20 nt, Human
uuguuguuauuuuuugagaa

SEQ ID NO: 3858606 - RNA, 13 nt, Human
uuguuguucuguu

SEQ ID NO: 3858607 - RNA, 21 nt, Human
uuguuguucuguuaacugaau

SEQ ID NO: 3858608 - RNA, 15 nt, Human
uuguuuaaaaaguaa

SEQ ID NO: 3858609 - RNA, 23 nt, Human
uuguuuaaugguaguuuuacagu

SEQ ID NO: 3858610 - RNA, 22 nt, Human
uuguuuaauuuuuauuucuucc

SEQ ID NO: 3858611 - RNA, 21 nt, Human
uuguuuacagcacuacucugu

SEQ ID NO: 3858612 - RNA, 17 nt, Human
uuguuuacaugcuuauu

SEQ ID NO: 3858613 - RNA, 22 nt, Human
uuguuuacaugcuuauuccaug

SEQ ID NO: 3858614 - RNA, 21 nt, Human
uuguuuagaaagaauauucau

SEQ ID NO: 3858615 - RNA, 13 nt, Human
uuguuuagagaau

SEQ ID NO: 3858616 - RNA, 18 nt, Human
uuguuuauaauaaaaaua

SEQ ID NO: 3858617 - RNA, 13 nt, Human
uuguuuaucagca

SEQ ID NO: 3858618 - RNA, 15 nt, Human
uuguuuauuagauga

SEQ ID NO: 3858619 - RNA, 24 nt, Human
uuguuuauuagaugaauuauccua

SEQ ID NO: 3858620 - RNA, 19 nt, Human
uuguuuauuaguuuugcau

SEQ ID NO: 3858621 - RNA, 20 nt, Human
uuguuuauucuuuuuaaagu

SEQ ID NO: 3858622 - RNA, 13 nt, Human
uuguuuauugagu

SEQ ID NO: 3858623 - RNA, 19 nt, Human
uuguuuauugaguuuguag

SEQ ID NO: 3858624 - RNA, 20 nt, Human
uuguuucaagaaccuggaaa

SEQ ID NO: 3858625 - RNA, 21 nt, Human
uuguuucaaugagguguccaa

SEQ ID NO: 3858626 - RNA, 23 nt, Human
uuguuucaaugagguguccaacu

SEQ ID NO: 3858627 - RNA, 20 nt, Human
uuguuucagggcuguggccu

SEQ ID NO: 3858628 - RNA, 18 nt, Human
uuguuucgcucuuugaga

SEQ ID NO: 3858629 - RNA, 19 nt, Human
uuguuucgcucuuugagaa

SEQ ID NO: 3858630 - RNA, 22 nt, Human
uuguuucuagacuauaaauguu

SEQ ID NO: 3858631 - RNA, 23 nt, Human
uuguuucucaaaucuuggcaaua

SEQ ID NO: 3858632 - RNA, 17 nt, Human
uuguuucucccccuggg

SEQ ID NO: 3858633 - RNA, 12 nt, Human
uuguuucuuaaa

SEQ ID NO: 3858634 - RNA, 15 nt, Human
uuguuucuuaaauaa

SEQ ID NO: 3858635 - RNA, 19 nt, Human
uuguuucuuccaaagcaca

SEQ ID NO: 3858636 - RNA, 18 nt, Human
uuguuucuuguuuauuga

SEQ ID NO: 3858637 - RNA, 16 nt, Human
uuguagccuuuugacu

SEQ ID NO: 3858638 - RNA, 12 nt, Human
uuguagcuccuc

SEQ ID NO: 3858639 - RNA, 19 nt, Human
uuuacagugaagaaagccu

SEQ ID NO: 3858640 - RNA, 14 nt, Human
uuuacauaacugcc

SEQ ID NO: 3858641 - RNA, 16 nt, Human
uuuacauaacugccuu

SEQ ID NO: 3858642 - RNA, 23 nt, Human
uuuacauaacugccuugaaccug

SEQ ID NO: 3858643 - RNA, 14 nt, Human
uuuacauacuuuau

SEQ ID NO: 3858644 - RNA, 23 nt, Human
uuuacauagucugaagugaagua

SEQ ID NO: 3858645 - RNA, 19 nt, Human
uuuacauauaaaauguaau

SEQ ID NO: 3858646 - RNA, 18 nt, Human
uuuacaugcuuauuccau

SEQ ID NO: 3858647 - RNA, 17 nt, Human
uuuacauggcuggagcu

SEQ ID NO: 3858648 - RNA, 17 nt, Human
uuuacauuuuauggugc

SEQ ID NO: 3858649 - RNA, 23 nt, Human
uuuacauuuuauggugccuagua

SEQ ID NO: 3858650 - RNA, 13 nt, Human
uuuacauuuuuau

SEQ ID NO: 3858651 - RNA, 12 nt, Human
uuuaccaaguuu

SEQ ID NO: 3858652 - RNA, 13 nt, Human
uuuaccacuugug

SEQ ID NO: 3858653 - RNA, 13 nt, Human
uuuaccaucugaa

SEQ ID NO: 3858654 - RNA, 21 nt, Human
uuuaccaugcucaaugaaaag

SEQ ID NO: 3858655 - RNA, 16 nt, Human
uuuaccauuuguaaua

SEQ ID NO: 3858656 - RNA, 19 nt, Human
uuuaccauuuguaauaaag

SEQ ID NO: 3858657 - RNA, 20 nt, Human
uuuaccauuuguaauaaagu

SEQ ID NO: 3858658 - RNA, 23 nt, Human
uuuaccauuuguaauaaaguaua

SEQ ID NO: 3858659 - RNA, 18 nt, Human
uuuacccaaaaacuaaau

SEQ ID NO: 3858660 - RNA, 19 nt, Human
uuuacccacacacagauaa

SEQ ID NO: 3858661 - RNA, 18 nt, Human
uuuacccauauccccucu

SEQ ID NO: 3858662 - RNA, 15 nt, Human
uuuacccaugaagau

SEQ ID NO: 3858663 - RNA, 16 nt, Human
uuuacccuaaugucuu

SEQ ID NO: 3858664 - RNA, 18 nt, Human
uuuacccuauaucuauaa

SEQ ID NO: 3858665 - RNA, 14 nt, Human
uuuacccuggcccc

SEQ ID NO: 3858666 - RNA, 19 nt, Human
uuuacccuggccccucucc

SEQ ID NO: 3858667 - RNA, 20 nt, Human
uuuacccuucuuuucugacu

SEQ ID NO: 3858668 - RNA, 18 nt, Human
uuuaccguuucuucccug

SEQ ID NO: 3858669 - RNA, 15 nt, Human
uuuaccuaagauuac

SEQ ID NO: 3858670 - RNA, 18 nt, Human
uuuaccuaccacaguguc

SEQ ID NO: 3858671 - RNA, 13 nt, Human
uuuaccuagaaga

SEQ ID NO: 3858672 - RNA, 15 nt, Human
uuuaccucagccugg

SEQ ID NO: 3858673 - RNA, 15 nt, Human
uuuaccugucacauu

SEQ ID NO: 3858674 - RNA, 21 nt, Human
uuuaccugucacauugcauuc

SEQ ID NO: 3858675 - RNA, 16 nt, Human
uuuaccugugaaauag

SEQ ID NO: 3858676 - RNA, 21 nt, Human
uuuaccugugcguuacuaauu

SEQ ID NO: 3858677 - RNA, 16 nt, Human
uuuaccuuuuaauuaa

SEQ ID NO: 3858678 - RNA, 13 nt, Human
uuuacguagugua

SEQ ID NO: 3858679 - RNA, 18 nt, Human
uuuacgucugggagaaau

SEQ ID NO: 3858680 - RNA, 13 nt, Human
uuuacuaaacaua

SEQ ID NO: 3858681 - RNA, 14 nt, Human
uuuacuaaacauau

SEQ ID NO: 3858682 - RNA, 15 nt, Human
uuuacuaaagaaaga

SEQ ID NO: 3858683 - RNA, 22 nt, Human
uuuacuaaagaaagauuacuua

SEQ ID NO: 3858684 - RNA, 23 nt, Human
uuuacuaagaugacauugcuaag

SEQ ID NO: 3858685 - RNA, 20 nt, Human
uuuacuaagccacaagaaau

SEQ ID NO: 3858686 - RNA, 19 nt, Human
uuuacuacaauauguacau

SEQ ID NO: 3858687 - RNA, 21 nt, Human
uuuacuacagcuaugaagaaa

SEQ ID NO: 3858688 - RNA, 23 nt, Human
uuuacuacuguggaaaaauauuu

SEQ ID NO: 3858689 - RNA, 22 nt, Human
uuuacuacuucucucuguauuu

SEQ ID NO: 3858690 - RNA, 20 nt, Human
uuuacuagaacacagaaagc

SEQ ID NO: 3858691 - RNA, 13 nt, Human
uuuacuauauaua

SEQ ID NO: 3858692 - RNA, 17 nt, Human
uuuacucaacccucuca

SEQ ID NO: 3858693 - RNA, 21 nt, Human
uuuacucaacccucucaggug

SEQ ID NO: 3858694 - RNA, 13 nt, Human
uuuacucauuauc

SEQ ID NO: 3858695 - RNA, 14 nt, Human
uuuacucauugaaa

SEQ ID NO: 3858696 - RNA, 16 nt, Human
uuuacucauugaaaug

SEQ ID NO: 3858697 - RNA, 22 nt, Human
uuuacucauugaaaugucacgu

SEQ ID NO: 3858698 - RNA, 17 nt, Human
uuuacuccguaacagau

SEQ ID NO: 3858699 - RNA, 17 nt, Human
uuuacuccucacacuua

SEQ ID NO: 3858700 - RNA, 22 nt, Human
uuuacucuaugccccaaauaua

SEQ ID NO: 3858701 - RNA, 14 nt, Human
uuuacugaagccuu

SEQ ID NO: 3858702 - RNA, 21 nt, Human
uuuacugagcuucucugugaa

SEQ ID NO: 3858703 - RNA, 16 nt, Human
uuuacugcagcuuugu

SEQ ID NO: 3858704 - RNA, 22 nt, Human
uuuacugccaaagggaaauauc

SEQ ID NO: 3858705 - RNA, 12 nt, Human
uuuacugcuuuu

SEQ ID NO: 3858706 - RNA, 12 nt, Human
uuuacuguguuu

SEQ ID NO: 3858707 - RNA, 15 nt, Human
uuuagccaaacccuu

SEQ ID NO: 3858708 - RNA, 15 nt, Human
uuuagccuaguucau

SEQ ID NO: 3858709 - RNA, 14 nt, Human
uuuagccuguccug

SEQ ID NO: 3858710 - RNA, 13 nt, Human
uuuagccuguguc

SEQ ID NO: 3858711 - RNA, 16 nt, Human
uuuagccuucucuguu

SEQ ID NO: 3858712 - RNA, 21 nt, Human
uuuagcugaugaacuuauucu

SEQ ID NO: 3858713 - RNA, 22 nt, Human
uuuagcuggaaaaguauguuag

SEQ ID NO: 3858714 - RNA, 16 nt, Human
uuuagcuguguuauua

SEQ ID NO: 3858715 - RNA, 17 nt, Human
uuuagcuguguuauuau

SEQ ID NO: 3858716 - RNA, 22 nt, Human
uuuaggaaaaucacuuugucua

SEQ ID NO: 3858717 - RNA, 18 nt, Human
uuuaggaaaugaaugugu

SEQ ID NO: 3858718 - RNA, 17 nt, Human
uuuaggaacuucagaga

SEQ ID NO: 3858719 - RNA, 23 nt, Human
uuuaggagcuaaggcucuaugag

SEQ ID NO: 3858720 - RNA, 17 nt, Human
uuuaggauaaaauaaug

SEQ ID NO: 3858721 - RNA, 18 nt, Human
uuuaggcugguggcccag

SEQ ID NO: 3858722 - RNA, 23 nt, Human
uuuagggacucaauuucucccca

SEQ ID NO: 3858723 - RNA, 21 nt, Human
uuuagggagagucauauuuug

SEQ ID NO: 3858724 - RNA, 15 nt, Human
uuuagggcagcuugc

SEQ ID NO: 3858725 - RNA, 16 nt, Human
uuuagggccaggcagg

SEQ ID NO: 3858726 - RNA, 20 nt, Human
uuuaggguacuaaauuuaaa

SEQ ID NO: 3858727 - RNA, 22 nt, Human
uuuaggucaagaagaagaugga

SEQ ID NO: 3858728 - RNA, 18 nt, Human
uuuagguucuaaaguucu

SEQ ID NO: 3858729 - RNA, 22 nt, Human
uuuagguuuuuguuuguuuccu

SEQ ID NO: 3858730 - RNA, 13 nt, Human
uuuaguaaaccaa

SEQ ID NO: 3858731 - RNA, 16 nt, Human
uuuaguaaauguuauc

SEQ ID NO: 3858732 - RNA, 17 nt, Human
uuuaguaaauguuaucu

SEQ ID NO: 3858733 - RNA, 14 nt, Human
uuuaguaaucugua

SEQ ID NO: 3858734 - RNA, 15 nt, Human
uuuaguagagacagg

SEQ ID NO: 3858735 - RNA, 20 nt, Human
uuuaguauauuuauauaauu

SEQ ID NO: 3858736 - RNA, 15 nt, Human
uuuaguauuaucaaa

SEQ ID NO: 3858737 - RNA, 21 nt, Human
uuuaguauucauucugcauug

SEQ ID NO: 3858738 - RNA, 17 nt, Human
uuuagucuugucucaga

SEQ ID NO: 3858739 - RNA, 23 nt, Human
uuuagucuugucucagauuuuau

SEQ ID NO: 3858740 - RNA, 13 nt, Human
uuuaguggaaaau

SEQ ID NO: 3858741 - RNA, 20 nt, Human
uuuaguggacccugaaaugu

SEQ ID NO: 3858742 - RNA, 21 nt, Human
uuuaguggacccugaaaugug

SEQ ID NO: 3858743 - RNA, 13 nt, Human
uuuaguggcuuca

SEQ ID NO: 3858744 - RNA, 17 nt, Human
uuuaguguaaaaaugag

SEQ ID NO: 3858745 - RNA, 16 nt, Human
uuuaguuacagcugug

SEQ ID NO: 3858746 - RNA, 14 nt, Human
uuuaguuauaaagg

SEQ ID NO: 3858747 - RNA, 13 nt, Human
uuuaguuccugug

SEQ ID NO: 3858748 - RNA, 19 nt, Human
uuuaguuccugugcacagc

SEQ ID NO: 3858749 - RNA, 14 nt, Human
uuuaguugaauuuu

SEQ ID NO: 3858750 - RNA, 18 nt, Human
uuuaguugcaacuuugua

SEQ ID NO: 3858751 - RNA, 14 nt, Human
uuuaguuuacucaa

SEQ ID NO: 3858752 - RNA, 22 nt, Human
uuuaguuucuguucuguggaaa

SEQ ID NO: 3858753 - RNA, 19 nt, Human
uuuaguuuuauuuucuaaa

SEQ ID NO: 3858754 - RNA, 12 nt, Human
uuuaguuuuucu

SEQ ID NO: 3858755 - RNA, 15 nt, Human
uuuaguuuuuguucu

SEQ ID NO: 3858756 - RNA, 21 nt, Human
uuuauaaaaaaaaugaaaugu

SEQ ID NO: 3858757 - RNA, 14 nt, Human
uuuauaaaaagaua

SEQ ID NO: 3858758 - RNA, 22 nt, Human
uuuauaaaaauaaauagaaaag

SEQ ID NO: 3858759 - RNA, 23 nt, Human
uuuauaaaaauaaauagaaaagu

SEQ ID NO: 3858760 - RNA, 13 nt, Human
uuuauaaaacuuc

SEQ ID NO: 3858761 - RNA, 16 nt, Human
uuuauaaaauuagaaa

SEQ ID NO: 3858762 - RNA, 22 nt, Human
uuuauaaaauuagaaagcaacu

SEQ ID NO: 3858763 - RNA, 16 nt, Human
uuuauaaacagaaaug

SEQ ID NO: 3858764 - RNA, 23 nt, Human
uuuauaaacagaaauggaaagca

SEQ ID NO: 3858765 - RNA, 18 nt, Human
uuuauaaacagacaauau

SEQ ID NO: 3858766 - RNA, 22 nt, Human
uuuauaaacagacaauauguga

SEQ ID NO: 3858767 - RNA, 24 nt, Human
uuuauaaaguacccaucuaguacu

SEQ ID NO: 3858768 - RNA, 20 nt, Human
uuuauaaagugcuuguguaa

SEQ ID NO: 3858769 - RNA, 13 nt, Human
uuuauaaaugcua

SEQ ID NO: 3858770 - RNA, 13 nt, Human
uuuauaaauuaaa

SEQ ID NO: 3858771 - RNA, 18 nt, Human
uuuauaaauuaaauauau

SEQ ID NO: 3858772 - RNA, 16 nt, Human
uuuauaacucaucaua

SEQ ID NO: 3858773 - RNA, 17 nt, Human
uuuauaagaaaaacuuu

SEQ ID NO: 3858774 - RNA, 15 nt, Human
uuuauaagaaagccu

SEQ ID NO: 3858775 - RNA, 16 nt, Human
uuuauaagcaaauuuc

SEQ ID NO: 3858776 - RNA, 17 nt, Human
uuuauaagcaaauuuca

SEQ ID NO: 3858777 - RNA, 20 nt, Human
uuuauaagcaucauuauuua

SEQ ID NO: 3858778 - RNA, 21 nt, Human
uuuauaagcaucauuauuuau

SEQ ID NO: 3858779 - RNA, 22 nt, Human
uuuauaagcaucauuauuuaug

SEQ ID NO: 3858780 - RNA, 23 nt, Human
uuuauaagcaucauuauuuaugu

SEQ ID NO: 3858781 - RNA, 17 nt, Human
uuuauaaggacuuccug

SEQ ID NO: 3858782 - RNA, 17 nt, Human
uuuauaagucauuguau

SEQ ID NO: 3858783 - RNA, 14 nt, Human
uuucuuauugcgcu

SEQ ID NO: 3858784 - RNA, 17 nt, Human
uuucuuauugcgcugcu

SEQ ID NO: 3858785 - RNA, 18 nt, Human
uuucuuauuuaacuuaac

SEQ ID NO: 3858786 - RNA, 11 nt, Human
uuucuucaaaa

SEQ ID NO: 3858787 - RNA, 18 nt, Human
uuucuucaacaucaaugu

SEQ ID NO: 3858788 - RNA, 13 nt, Human
uuucuucacuuuu

SEQ ID NO: 3858789 - RNA, 12 nt, Human
uuucuucaugag

SEQ ID NO: 3858790 - RNA, 19 nt, Human
uuucuucaugcaaugacau

SEQ ID NO: 3858791 - RNA, 18 nt, Human
uuucuucccuguauuuuc

SEQ ID NO: 3858792 - RNA, 22 nt, Human
uuucuuccuaccaagucaaacu

SEQ ID NO: 3858793 - RNA, 11 nt, Human
uuucuuccucu

SEQ ID NO: 3858794 - RNA, 16 nt, Human
uuucuuccucugcuga

SEQ ID NO: 3858795 - RNA, 12 nt, Human
uuucuuccuggc

SEQ ID NO: 3858796 - RNA, 13 nt, Human
uuucuucuacuuu

SEQ ID NO: 3858797 - RNA, 12 nt, Human
uuucuucuaugu

SEQ ID NO: 3858798 - RNA, 23 nt, Human
uuucuucuguauuuuuuuuucua

SEQ ID NO: 3858799 - RNA, 22 nt, Human
uuucuugacucuuguuuucagu

SEQ ID NO: 3858800 - RNA, 19 nt, Human
uuucuugauaauuuuccuu

SEQ ID NO: 3858801 - RNA, 16 nt, Human
uuucuugcagaucaaa

SEQ ID NO: 3858802 - RNA, 23 nt, Human
uuucuugccaaugaggucugaaa

SEQ ID NO: 3858803 - RNA, 11 nt, Human
uuucuugcugg

SEQ ID NO: 3858804 - RNA, 21 nt, Human
uuucuugcugguugucauuuu

SEQ ID NO: 3858805 - RNA, 16 nt, Human
uuucuugcuuguaccu

SEQ ID NO: 3858806 - RNA, 19 nt, Human
uuucuuggcaaaagccuug

SEQ ID NO: 3858807 - RNA, 19 nt, Human
uuucuuggcccccuuccca

SEQ ID NO: 3858808 - RNA, 17 nt, Human
uuucuugguucauaaau

SEQ ID NO: 3858809 - RNA, 18 nt, Human
uuucuugguucauaaaug

SEQ ID NO: 3858810 - RNA, 19 nt, Human
uuucuugugcacuggcacc

SEQ ID NO: 3858811 - RNA, 20 nt, Human
uuucuugugcacuggcacca

SEQ ID NO: 3858812 - RNA, 13 nt, Human
uuucuuguuucuc

SEQ ID NO: 3858813 - RNA, 15 nt, Human
uuucuuuaaaagaau

SEQ ID NO: 3858814 - RNA, 12 nt, Human
uuucuuuaacug

SEQ ID NO: 3858815 - RNA, 13 nt, Human
uuucuuuaacugc

SEQ ID NO: 3858816 - RNA, 16 nt, Human
uuucuuuaagaaagua

SEQ ID NO: 3858817 - RNA, 13 nt, Human
uuucuuuaaugcu

SEQ ID NO: 3858818 - RNA, 15 nt, Human
uuucuuuacaaaaca

SEQ ID NO: 3858819 - RNA, 18 nt, Human
uuucuuuagagaacugaa

SEQ ID NO: 3858820 - RNA, 21 nt, Human
uuucuuuagagcauugccauu

SEQ ID NO: 3858821 - RNA, 21 nt, Human
uuucuuuaguuuuugugaagu

SEQ ID NO: 3858822 - RNA, 18 nt, Human
uuucuuuauauuuaucca

SEQ ID NO: 3858823 - RNA, 13 nt, Human
uuucuuucaacuu

SEQ ID NO: 3858824 - RNA, 16 nt, Human
uuucuuucacaaaaaa

SEQ ID NO: 3858825 - RNA, 13 nt, Human
uuucuuucuuaga

SEQ ID NO: 3858826 - RNA, 15 nt, Human
uuucuuucuuagaaa

SEQ ID NO: 3858827 - RNA, 13 nt, Human
uuucuuugaauaa

SEQ ID NO: 3858828 - RNA, 16 nt, Human
uuucuuugaauuuuca

SEQ ID NO: 3858829 - RNA, 12 nt, Human
uuucuuugauca

SEQ ID NO: 3858830 - RNA, 14 nt, Human
uuucuuugcaaagu

SEQ ID NO: 3858831 - RNA, 21 nt, Human
uuucuuugccuguucaguuac

SEQ ID NO: 3858832 - RNA, 19 nt, Human
uuucuuugggaauauuuga

SEQ ID NO: 3858833 - RNA, 23 nt, Human
uuucuuugggaauauuugaaucu

SEQ ID NO: 3858834 - RNA, 13 nt, Human
uuucuuuguggcu

SEQ ID NO: 3858835 - RNA, 15 nt, Human
uuucuuuguguagcu

SEQ ID NO: 3858836 - RNA, 18 nt, Human
uuucuuuguuucuuucuu

SEQ ID NO: 3858837 - RNA, 9 nt, Human
uuucuuuuc

SEQ ID NO: 3858838 - RNA, 21 nt, Human
uuucuuuucccccauuaauca

SEQ ID NO: 3858839 - RNA, 16 nt, Human
uuucuuuucucuggua

SEQ ID NO: 3858840 - RNA, 15 nt, Human
uuucuuuucuuuuua

SEQ ID NO: 3858841 - RNA, 16 nt, Human
uuucuuuuguaaaugu

SEQ ID NO: 3858842 - RNA, 14 nt, Human
uuucuuuuguaaua

SEQ ID NO: 3858843 - RNA, 15 nt, Human
uuucuuuuuaaagcu

SEQ ID NO: 3858844 - RNA, 20 nt, Human
uuucuuuuuaaguaaugugg

SEQ ID NO: 3858845 - RNA, 16 nt, Human
uuucuuuuugaaucuu

SEQ ID NO: 3858846 - RNA, 17 nt, Human
uuucuuuuugaaucuuu

SEQ ID NO: 3858847 - RNA, 19 nt, Human
uuucuuuuugaaucuuuaa

SEQ ID NO: 3858848 - RNA, 16 nt, Human
uuucuuuuuuaaauua

SEQ ID NO: 3858849 - RNA, 18 nt, Human
uuucuuuuuuuuuaaguu

SEQ ID NO: 3858850 - RNA, 14 nt, Human
uuugaaaaaagcuc

SEQ ID NO: 3858851 - RNA, 15 nt, Human
uuugaaaaaagcuca

SEQ ID NO: 3858852 - RNA, 16 nt, Human
uuugaaaaauuccuau

SEQ ID NO: 3858853 - RNA, 14 nt, Human
uuugaaaacagaaa

SEQ ID NO: 3858854 - RNA, 15 nt, Human
uuugaaaacauauaa

SEQ ID NO: 3858855 - RNA, 17 nt, Human
uuugaaaacauguuuau

SEQ ID NO: 3858856 - RNA, 19 nt, Human
uuugaaaacauguuuauuu

SEQ ID NO: 3858857 - RNA, 20 nt, Human
uuugaaaaccaacaccauca

SEQ ID NO: 3858858 - RNA, 22 nt, Human
uuugaaaaccaacaccaucaca

SEQ ID NO: 3858859 - RNA, 22 nt, Human
uuugaaaacucuguguuuggaa

SEQ ID NO: 3858860 - RNA, 19 nt, Human
uuugaaaacuucagaagca

SEQ ID NO: 3858861 - RNA, 23 nt, Human
uuugaaaagcuucuuaauuaauu

SEQ ID NO: 3858862 - RNA, 12 nt, Human
uuugaaaaguaa

SEQ ID NO: 3858863 - RNA, 14 nt, Human
uuugaaaaguaaua

SEQ ID NO: 3858864 - RNA, 15 nt, Human
uuugaaacaaagaag

SEQ ID NO: 3858865 - RNA, 19 nt, Human
uuugaaacacuuugcauaa

SEQ ID NO: 3858866 - RNA, 15 nt, Human
uuugaaacauugcuu

SEQ ID NO: 3858867 - RNA, 23 nt, Human
uuugaaacauugcuuuuaaaacu

SEQ ID NO: 3858868 - RNA, 21 nt, Human
uuugaaaggagaugucuugga

SEQ ID NO: 3858869 - RNA, 16 nt, Human
uuugaaagucuguccu

SEQ ID NO: 3858870 - RNA, 14 nt, Human
uuugaaauaauaaa

SEQ ID NO: 3858871 - RNA, 13 nt, Human
uuugaaauaccuc

SEQ ID NO: 3858872 - RNA, 20 nt, Human
uuugaaauagucugugugaa

SEQ ID NO: 3858873 - RNA, 14 nt, Human
uuugaaauauugac

SEQ ID NO: 3858874 - RNA, 20 nt, Human
uuugaaaugaggucuguuua

SEQ ID NO: 3858875 - RNA, 17 nt, Human
uuugaaauuauguaaau

SEQ ID NO: 3858876 - RNA, 22 nt, Human
uuugaaauuaugugacauuuua

SEQ ID NO: 3858877 - RNA, 11 nt, Human
uuugaaauucu

SEQ ID NO: 3858878 - RNA, 14 nt, Human
uuugaaauucugaa

SEQ ID NO: 3858879 - RNA, 15 nt, Human
uuugaaauucugaau

SEQ ID NO: 3858880 - RNA, 22 nt, Human
uuugaacaacuaggcuucagca

SEQ ID NO: 3858881 - RNA, 19 nt, Human
uuugaacacgaaagaaaug

SEQ ID NO: 3858882 - RNA, 21 nt, Human
uuugaacacgaaagaaaugua

SEQ ID NO: 3858883 - RNA, 16 nt, Human
uuugaaccaaaacauu

SEQ ID NO: 3858884 - RNA, 18 nt, Human
uuugaaccugaugaaaau

SEQ ID NO: 3858885 - RNA, 20 nt, Human
uuugaaccugaugaaaauaa

SEQ ID NO: 3858886 - RNA, 22 nt, Human
uuugaacuaagaaacuuuugua

SEQ ID NO: 3858887 - RNA, 15 nt, Human
uuugaacuaauaaaa

SEQ ID NO: 3858888 - RNA, 17 nt, Human
uuugaacucuucucauu

SEQ ID NO: 3858889 - RNA, 22 nt, Human
uuugaacucuucucauuacuug

SEQ ID NO: 3858890 - RNA, 19 nt, Human
uuugaacuggcaauugucu

SEQ ID NO: 3858891 - RNA, 14 nt, Human
uuugaacuuuuuau

SEQ ID NO: 3858892 - RNA, 18 nt, Human
uuugaagaacaugugaga

SEQ ID NO: 3858893 - RNA, 18 nt, Human
uuugaagagugaaauacc

SEQ ID NO: 3858894 - RNA, 18 nt, Human
uuugaagcaguuguguca

SEQ ID NO: 3858895 - RNA, 22 nt, Human
uuugaagccugcccuugucuga

SEQ ID NO: 3858896 - RNA, 18 nt, Human
uuugaagcuaauuauuuu

SEQ ID NO: 3858897 - RNA, 19 nt, Human
uuugaagcuaauuauuuua

SEQ ID NO: 3858898 - RNA, 16 nt, Human
uuugaagcuacugugu

SEQ ID NO: 3858899 - RNA, 18 nt, Human
uuugaagcugaaaauaua

SEQ ID NO: 3858900 - RNA, 23 nt, Human
uuugaaguaguuuguauaacuuc

SEQ ID NO: 3858901 - RNA, 22 nt, Human
uuugaagucauaccaaugaaaa

SEQ ID NO: 3858902 - RNA, 13 nt, Human
uuugaagucuugu

SEQ ID NO: 3858903 - RNA, 15 nt, Human
uuugaagucuuguau

SEQ ID NO: 3858904 - RNA, 16 nt, Human
uuugaagugcuguuua

SEQ ID NO: 3858905 - RNA, 13 nt, Human
uuugaaguguaau

SEQ ID NO: 3858906 - RNA, 18 nt, Human
uuugaaguguaggcagac

SEQ ID NO: 3858907 - RNA, 20 nt, Human
uuugaaguguaggcagacac

SEQ ID NO: 3858908 - RNA, 17 nt, Human
uuugaaguuuacauuuu

SEQ ID NO: 3858909 - RNA, 14 nt, Human
uuugaauaaagaau

SEQ ID NO: 3858910 - RNA, 13 nt, Human
uuugaauaaaugu

SEQ ID NO: 3858911 - RNA, 15 nt, Human
uuugaauaaauguca

SEQ ID NO: 3858912 - RNA, 15 nt, Human
uuugacaacaaauua

SEQ ID NO: 3858913 - RNA, 20 nt, Human
uuugacaacguuucagcgac

SEQ ID NO: 3858914 - RNA, 14 nt, Human
uuugacaaggggca

SEQ ID NO: 3858915 - RNA, 20 nt, Human
uuugacaccucuuuuuucgu

SEQ ID NO: 3858916 - RNA, 15 nt, Human
uuugacacuauaucu

SEQ ID NO: 3858917 - RNA, 18 nt, Human
uuugacacucugcagacu

SEQ ID NO: 3858918 - RNA, 13 nt, Human
uuugacacugaaa

SEQ ID NO: 3858919 - RNA, 15 nt, Human
uuugacacugcucua

SEQ ID NO: 3858920 - RNA, 20 nt, Human
uuugacagaauauguuucaa

SEQ ID NO: 3858921 - RNA, 18 nt, Human
uuugacagcgcacagcug

SEQ ID NO: 3858922 - RNA, 18 nt, Human
uuugacaguuauuuugau

SEQ ID NO: 3858923 - RNA, 16 nt, Human
uuugacauggaaauga

SEQ ID NO: 3858924 - RNA, 17 nt, Human
uuugacauuguauguau

SEQ ID NO: 3858925 - RNA, 18 nt, Human
uuugaccucacagugacc

SEQ ID NO: 3858926 - RNA, 18 nt, Human
uuugaccucugcagcaau

SEQ ID NO: 3858927 - RNA, 21 nt, Human
uuugaccucugcagcaauaaa

SEQ ID NO: 3858928 - RNA, 18 nt, Human
uuugaccuucauuucaug

SEQ ID NO: 3858929 - RNA, 19 nt, Human
uuugacgccaucccagccc

SEQ ID NO: 3858930 - RNA, 20 nt, Human
uuugacgccaucccagcccc

SEQ ID NO: 3858931 - RNA, 14 nt, Human
uuugacggaugauu

SEQ ID NO: 3858932 - RNA, 16 nt, Human
uuugacuaauuuuaca

SEQ ID NO: 3858933 - RNA, 19 nt, Human
uuugacuagaugauggaug

SEQ ID NO: 3858934 - RNA, 18 nt, Human
uuugacucuugcaaucca

SEQ ID NO: 3858935 - RNA, 19 nt, Human
uuugacugaagaugcagcu

SEQ ID NO: 3858936 - RNA, 19 nt, Human
uuugacuguuuuuacccau

SEQ ID NO: 3858937 - RNA, 16 nt, Human
uuugacuuaaugugau

SEQ ID NO: 3858938 - RNA, 22 nt, Human
uuugacuuucuucugaauauuu

SEQ ID NO: 3858939 - RNA, 22 nt, Human
uuugacuuuuuuuguaugugug

SEQ ID NO: 3858940 - RNA, 21 nt, Human
uuugagaaacaacaauuucua

SEQ ID NO: 3858941 - RNA, 13 nt, Human
uuugagaaaugca

SEQ ID NO: 3858942 - RNA, 23 nt, Human
uuugagaaauuuuuuuuuccagu

SEQ ID NO: 3858943 - RNA, 20 nt, Human
uuugagacagagucuuccuc

SEQ ID NO: 3858944 - RNA, 19 nt, Human
uuugagaccagccugggca

SEQ ID NO: 3858945 - RNA, 22 nt, Human
uuugagagagagucuuacucug

SEQ ID NO: 3858946 - RNA, 14 nt, Human
uuugagaguucuaa

SEQ ID NO: 3858947 - RNA, 16 nt, Human
uuugagaucuaaaaau

SEQ ID NO: 3858948 - RNA, 19 nt, Human
uuugagcucccacuucugc

SEQ ID NO: 3858949 - RNA, 17 nt, Human
uuugagcugccuucccu

SEQ ID NO: 3858950 - RNA, 22 nt, Human
uuugaggagcagcuucaguugu

SEQ ID NO: 3858951 - RNA, 16 nt, Human
uuugaggauuaguuua

SEQ ID NO: 3858952 - RNA, 20 nt, Human
uuugagggacugccucugcc

SEQ ID NO: 3858953 - RNA, 20 nt, Human
uuugaggucaaguaagaaga

SEQ ID NO: 3858954 - RNA, 22 nt, Human
uuugagucuuuuuuuuuuaagu

SEQ ID NO: 3858955 - RNA, 16 nt, Human
uuugagugauuauuug

SEQ ID NO: 3858956 - RNA, 13 nt, Human
uuugagugccuua

SEQ ID NO: 3858957 - RNA, 13 nt, Human
uuugagugcucug

SEQ ID NO: 3858958 - RNA, 16 nt, Human
uuugaguggaugaugu

SEQ ID NO: 3858959 - RNA, 20 nt, Human
uuugaguggaugauguuucg

SEQ ID NO: 3858960 - RNA, 14 nt, Human
uuugaguguuuuaa

SEQ ID NO: 3858961 - RNA, 19 nt, Human
uuugaguuauuuuaauuau

SEQ ID NO: 3858962 - RNA, 12 nt, Human
uuugaguucuac

SEQ ID NO: 3858963 - RNA, 21 nt, Human
uuugauaaaguaguaaaaauu

SEQ ID NO: 3858964 - RNA, 19 nt, Human
uuugauaaaguuucucaga

SEQ ID NO: 3858965 - RNA, 23 nt, Human
uuugauaacagggauugauuuua

SEQ ID NO: 3858966 - RNA, 14 nt, Human
uuugauaacuguuu

SEQ ID NO: 3858967 - RNA, 20 nt, Human
uuugauaacuguuuauaugu

SEQ ID NO: 3858968 - RNA, 22 nt, Human
uuugauaacuguuuauaugugu

SEQ ID NO: 3858969 - RNA, 14 nt, Human
uuugauaaugauaa

SEQ ID NO: 3858970 - RNA, 14 nt, Human
uuugauacauaaua

SEQ ID NO: 3858971 - RNA, 15 nt, Human
uuugauacauaauaa

SEQ ID NO: 3858972 - RNA, 14 nt, Human
uuugauacauuuuu

SEQ ID NO: 3858973 - RNA, 21 nt, Human
uuugauacuaagcauugaaug

SEQ ID NO: 3858974 - RNA, 17 nt, Human
uuugauacuuauauuuu

SEQ ID NO: 3858975 - RNA, 14 nt, Human
uuugauauaugaaa

SEQ ID NO: 3858976 - RNA, 17 nt, Human
uuugauauccaaagcug

SEQ ID NO: 3858977 - RNA, 18 nt, Human
uuugauaugaguauacaa

SEQ ID NO: 3858978 - RNA, 18 nt, Human
uuugauauggguaguauu

SEQ ID NO: 3858979 - RNA, 14 nt, Human
uuugauaugugaac

SEQ ID NO: 3858980 - RNA, 15 nt, Human
uuugauaugugaaca

SEQ ID NO: 3858981 - RNA, 14 nt, Human
uuugauccaagcug

SEQ ID NO: 3858982 - RNA, 15 nt, Human
uuugauccaagcugg

SEQ ID NO: 3858983 - RNA, 16 nt, Human
uuugaucucacauuuu

SEQ ID NO: 3858984 - RNA, 22 nt, Human
uuugaucuuccucugcuaaauu

SEQ ID NO: 3858985 - RNA, 18 nt, Human
uuugaugcuucuuugaaa

SEQ ID NO: 3858986 - RNA, 20 nt, Human
uuugaugucagcaguugcug

SEQ ID NO: 3858987 - RNA, 15 nt, Human
uuugauguuaacaca

SEQ ID NO: 3858988 - RNA, 17 nt, Human
uuugauguuaacacauu

SEQ ID NO: 3858989 - RNA, 15 nt, Human
uuugauguuccuucc

SEQ ID NO: 3858990 - RNA, 21 nt, Human
uuugauguucuuucacccuuu

SEQ ID NO: 3858991 - RNA, 22 nt, Human
uuugauguucuuucacccuuuu

SEQ ID NO: 3858992 - RNA, 14 nt, Human
uuugauuaacaaau

SEQ ID NO: 3858993 - RNA, 17 nt, Human
uuugauuauuugcaugu

SEQ ID NO: 3858994 - RNA, 20 nt, Human
uuugauuauuugcauguuau

SEQ ID NO: 3858995 - RNA, 22 nt, Human
uuugauucacauguuuucaaau

SEQ ID NO: 3858996 - RNA, 15 nt, Human
uuugauucagacagc

SEQ ID NO: 3858997 - RNA, 18 nt, Human
uuugauucagacagcugc

SEQ ID NO: 3858998 - RNA, 22 nt, Human
uuugauucagacagcugccugg

SEQ ID NO: 3858999 - RNA, 17 nt, Human
uuugauugggaugaaug

SEQ ID NO: 3859000 - RNA, 14 nt, Human
uuugauuuaauguu

SEQ ID NO: 3859001 - RNA, 13 nt, Human
uuugauuuacaua

SEQ ID NO: 3859002 - RNA, 17 nt, Human
uuugauuuagauugagu

SEQ ID NO: 3859003 - RNA, 13 nt, Human
uuugauuuauuaa

SEQ ID NO: 3859004 - RNA, 16 nt, Human
uuugauuuauuaacuu

SEQ ID NO: 3859005 - RNA, 21 nt, Human
uuugauuuauuaacuuaauaa

SEQ ID NO: 3859006 - RNA, 16 nt, Human
uuugcaaaguacugua

SEQ ID NO: 3859007 - RNA, 15 nt, Human
uuugcaaccaggaac

SEQ ID NO: 3859008 - RNA, 23 nt, Human
uuugcaaccaggaacagcaaaug

SEQ ID NO: 3859009 - RNA, 17 nt, Human
uuugcaacuuaauacuc

SEQ ID NO: 3859010 - RNA, 12 nt, Human
uuugcaaggaag

SEQ ID NO: 3859011 - RNA, 14 nt, Human
uuugcaaggaagcc

SEQ ID NO: 3859012 - RNA, 24 nt, Human
uuugcaaggugcauuuuuacuauu

SEQ ID NO: 3859013 - RNA, 15 nt, Human
uuugcaagugaaggu

SEQ ID NO: 3859014 - RNA, 18 nt, Human
uuugcaauaaaaaugaua

SEQ ID NO: 3859015 - RNA, 17 nt, Human
uuugcaauaacagcugc

SEQ ID NO: 3859016 - RNA, 15 nt, Human
uuugcaauaaugcag

SEQ ID NO: 3859017 - RNA, 16 nt, Human
uuugcaauaaugcagu

SEQ ID NO: 3859018 - RNA, 12 nt, Human
uuugcaccccuc

SEQ ID NO: 3859019 - RNA, 16 nt, Human
uuugcaccugcucucu

SEQ ID NO: 3859020 - RNA, 21 nt, Human
uuugcaccuuucuaguugaaa

SEQ ID NO: 3859021 - RNA, 14 nt, Human
uuugcacuaaauca

SEQ ID NO: 3859022 - RNA, 19 nt, Human
uuugcacuaaaucagagac

SEQ ID NO: 3859023 - RNA, 19 nt, Human
uuugcacucaaaucuuaag

SEQ ID NO: 3859024 - RNA, 21 nt, Human
uuugcacucaaaucuuaagaa

SEQ ID NO: 3859025 - RNA, 23 nt, Human
uuugcacucuuguuucucccgug

SEQ ID NO: 3859026 - RNA, 16 nt, Human
uuugcacugagggcca

SEQ ID NO: 3859027 - RNA, 20 nt, Human
uuugcacuggaguucuaugc

SEQ ID NO: 3859028 - RNA, 22 nt, Human
uuugcacuuuuucuuaaucauu

SEQ ID NO: 3859029 - RNA, 21 nt, Human
uuugcagcagugagucucuuc

SEQ ID NO: 3859030 - RNA, 12 nt, Human
uuuguggaauaa

SEQ ID NO: 3859031 - RNA, 20 nt, Human
uuuguggcagaaguguuuca

SEQ ID NO: 3859032 - RNA, 20 nt, Human
uuuguggccaaggagcugcu

SEQ ID NO: 3859033 - RNA, 12 nt, Human
uuuguggccuca

SEQ ID NO: 3859034 - RNA, 14 nt, Human
uuuguggccucaga

SEQ ID NO: 3859035 - RNA, 15 nt, Human
uuuguggccucagaa

SEQ ID NO: 3859036 - RNA, 14 nt, Human
uuugugggaauuua

SEQ ID NO: 3859037 - RNA, 20 nt, Human
uuuguggggcuuggcgugga

SEQ ID NO: 3859038 - RNA, 16 nt, Human
uuuguggugauauaga

SEQ ID NO: 3859039 - RNA, 13 nt, Human
uuuguggugauuu

SEQ ID NO: 3859040 - RNA, 16 nt, Human
uuugugguuuggaaua

SEQ ID NO: 3859041 - RNA, 17 nt, Human
uuuguguaauaaagugu

SEQ ID NO: 3859042 - RNA, 16 nt, Human
uuuguguaaugaaaau

SEQ ID NO: 3859043 - RNA, 11 nt, Human
uuuguguccuc

SEQ ID NO: 3859044 - RNA, 15 nt, Human
uuugugugaaauaau

SEQ ID NO: 3859045 - RNA, 13 nt, Human
uuugugugauuga

SEQ ID NO: 3859046 - RNA, 18 nt, Human
uuugugugcuaaacgugu

SEQ ID NO: 3859047 - RNA, 13 nt, Human
uuugugugucuua

SEQ ID NO: 3859048 - RNA, 15 nt, Human
uuuguguguguguca

SEQ ID NO: 3859049 - RNA, 18 nt, Human
uuuguguguuacaaugua

SEQ ID NO: 3859050 - RNA, 23 nt, Human
uuuguguguucacuaaacucuga

SEQ ID NO: 3859051 - RNA, 17 nt, Human
uuuguguguugucuuga

SEQ ID NO: 3859052 - RNA, 20 nt, Human
uuuguguuguuggaaaaagu

SEQ ID NO: 3859053 - RNA, 21 nt, Human
uuuguguuguuggaaaaaguc

SEQ ID NO: 3859054 - RNA, 15 nt, Human
uuuguguuuauucuu

SEQ ID NO: 3859055 - RNA, 13 nt, Human
uuuguuaaauaau

SEQ ID NO: 3859056 - RNA, 14 nt, Human
uuuguuaaauauuu

SEQ ID NO: 3859057 - RNA, 18 nt, Human
uuuguuaaauauuuacau

SEQ ID NO: 3859058 - RNA, 12 nt, Human
uuuguuaauuua

SEQ ID NO: 3859059 - RNA, 18 nt, Human
uuuguuaccuuaaaacua

SEQ ID NO: 3859060 - RNA, 21 nt, Human
uuuguuacucucuuccacaug

SEQ ID NO: 3859061 - RNA, 15 nt, Human
uuuguuacuguucuu

SEQ ID NO: 3859062 - RNA, 19 nt, Human
uuuguuacuguucuugcug

SEQ ID NO: 3859063 - RNA, 17 nt, Human
uuuguuaggauuuucac

SEQ ID NO: 3859064 - RNA, 21 nt, Human
uuuguuaguuccuguaugaaa

SEQ ID NO: 3859065 - RNA, 17 nt, Human
uuuguuauaccauuucc

SEQ ID NO: 3859066 - RNA, 17 nt, Human
uuuguuauuuguacagu

SEQ ID NO: 3859067 - RNA, 18 nt, Human
uuuguuauuuguacaguu

SEQ ID NO: 3859068 - RNA, 23 nt, Human
uuuguucaaguuuuggguauguu

SEQ ID NO: 3859069 - RNA, 19 nt, Human
uuuguucacugaaggugau

SEQ ID NO: 3859070 - RNA, 14 nt, Human
uuuguucauauuaa

SEQ ID NO: 3859071 - RNA, 18 nt, Human
uuuguuccagaaucugua

SEQ ID NO: 3859072 - RNA, 14 nt, Human
uuuguucccauccu

SEQ ID NO: 3859073 - RNA, 23 nt, Human
uuuguucccauccucuucuuuua

SEQ ID NO: 3859074 - RNA, 16 nt, Human
uuuguuccccuccucc

SEQ ID NO: 3859075 - RNA, 13 nt, Human
uuuguucccggcu

SEQ ID NO: 3859076 - RNA, 20 nt, Human
uuuguucgcauggucacaca

SEQ ID NO: 3859077 - RNA, 12 nt, Human
uuuguucucugu

SEQ ID NO: 3859078 - RNA, 15 nt, Human
uuuguucuuacacau

SEQ ID NO: 3859079 - RNA, 15 nt, Human
uuuguucuucaagaa

SEQ ID NO: 3859080 - RNA, 15 nt, Human
uuuguucuucuuaaa

SEQ ID NO: 3859081 - RNA, 15 nt, Human
uuuguugaaauuaug

SEQ ID NO: 3859082 - RNA, 15 nt, Human
uuuguugaacuguua

SEQ ID NO: 3859083 - RNA, 17 nt, Human
uuuguugacauucugaa

SEQ ID NO: 3859084 - RNA, 23 nt, Human
uuuguugagcugguaacaucguu

SEQ ID NO: 3859085 - RNA, 21 nt, Human
uuuguugcacugaaguuugau

SEQ ID NO: 3859086 - RNA, 22 nt, Human
uuuguugcacugaaguuugaua

SEQ ID NO: 3859087 - RNA, 19 nt, Human
uuuguugccagauuucaga

SEQ ID NO: 3859088 - RNA, 20 nt, Human
uuuguugccagauuucagaa

SEQ ID NO: 3859089 - RNA, 22 nt, Human
uuuguugcguuccuuucuuuuc

SEQ ID NO: 3859090 - RNA, 18 nt, Human
uuuguuguacuuaaaugg

SEQ ID NO: 3859091 - RNA, 13 nt, Human
uuuguugugugcc

SEQ ID NO: 3859092 - RNA, 22 nt, Human
uuuguuuaauuuuuauuucuuc

SEQ ID NO: 3859093 - RNA, 17 nt, Human
uuuguuuauuaaauagu

SEQ ID NO: 3859094 - RNA, 18 nt, Human
uuuguuuauuagaugaau

SEQ ID NO: 3859095 - RNA, 13 nt, Human
uuuguuucauauu

SEQ ID NO: 3859096 - RNA, 15 nt, Human
uuuguuuccuuuguu

SEQ ID NO: 3859097 - RNA, 18 nt, Human
uuuguuucucccccuggg

SEQ ID NO: 3859098 - RNA, 16 nt, Human
uuuguuucugaaaggg

SEQ ID NO: 3859099 - RNA, 17 nt, Human
uuuguuucuuucucuga

SEQ ID NO: 3859100 - RNA, 13 nt, Human
uuuguuugaacug

SEQ ID NO: 3859101 - RNA, 14 nt, Human
uuuguuugaacuga

SEQ ID NO: 3859102 - RNA, 18 nt, Human
uuuguuugaacugauaaa

SEQ ID NO: 3859103 - RNA, 21 nt, Human
uuuguuuggauguaauuuagg

SEQ ID NO: 3859104 - RNA, 16 nt, Human
uuuguuugguauugua

SEQ ID NO: 3859105 - RNA, 22 nt, Human
uuuguuugguuauagugcaaua

SEQ ID NO: 3859106 - RNA, 12 nt, Human
uuuguuugucug

SEQ ID NO: 3859107 - RNA, 13 nt, Human
uuuguuugugcau

SEQ ID NO: 3859108 - RNA, 16 nt, Human
uuuguuuguucuuguu

SEQ ID NO: 3859109 - RNA, 18 nt, Human
uuuguuuuacaaugucau

SEQ ID NO: 3859110 - RNA, 14 nt, Human
uuuguuuugugucu

SEQ ID NO: 3859111 - RNA, 15 nt, Human
uuuguuuugugucuc

SEQ ID NO: 3859112 - RNA, 14 nt, Human
uuuguuuuguugca

SEQ ID NO: 3859113 - RNA, 19 nt, Human
uuuguuuuuaaacuguaca

SEQ ID NO: 3859114 - RNA, 23 nt, Human
uuuguuuuuaaacuguacagugu

SEQ ID NO: 3859115 - RNA, 14 nt, Human
uuuguuuuucauuc

SEQ ID NO: 3859116 - RNA, 16 nt, Human
uuuucauauugugcca

SEQ ID NO: 3859117 - RNA, 15 nt, Human
uuuucauauuuuaau

SEQ ID NO: 3859118 - RNA, 16 nt, Human
uuuucauauuuuaauu

SEQ ID NO: 3859119 - RNA, 22 nt, Human
uuuucauauuuuaauuucaagc

SEQ ID NO: 3859120 - RNA, 20 nt, Human
uuuucauccauaacugaaca

SEQ ID NO: 3859121 - RNA, 14 nt, Human
uuuucaucugggaa

SEQ ID NO: 3859122 - RNA, 14 nt, Human
uuuucaucuucagu

SEQ ID NO: 3859123 - RNA, 19 nt, Human
uuuucaucuucaguugucu

SEQ ID NO: 3859124 - RNA, 17 nt, Human
uuuucaugcaaacucuu

SEQ ID NO: 3859125 - RNA, 14 nt, Human
uuuucaugugugau

SEQ ID NO: 3859126 - RNA, 20 nt, Human
uuuucauguuuuaacaaaaa

SEQ ID NO: 3859127 - RNA, 14 nt, Human
uuuucauuaaauaa

SEQ ID NO: 3859128 - RNA, 16 nt, Human
uuuucauuacaaugga

SEQ ID NO: 3859129 - RNA, 21 nt, Human
uuuucauuagcaaaaaaaguu

SEQ ID NO: 3859130 - RNA, 21 nt, Human
uuuucauuauuuuauuaugaa

SEQ ID NO: 3859131 - RNA, 14 nt, Human
uuuucauucucauu

SEQ ID NO: 3859132 - RNA, 13 nt, Human
uuuucauuguaaa

SEQ ID NO: 3859133 - RNA, 15 nt, Human
uuuucauuuuccaau

SEQ ID NO: 3859134 - RNA, 15 nt, Human
uuuuccaaaaaaaua

SEQ ID NO: 3859135 - RNA, 13 nt, Human
uuuuccaaaacaa

SEQ ID NO: 3859136 - RNA, 13 nt, Human
uuuuccaaacuga

SEQ ID NO: 3859137 - RNA, 19 nt, Human
uuuuccaaagagugauagu

SEQ ID NO: 3859138 - RNA, 14 nt, Human
uuuuccaacuacua

SEQ ID NO: 3859139 - RNA, 15 nt, Human
uuuuccaaugucugc

SEQ ID NO: 3859140 - RNA, 15 nt, Human
uuuuccacccuggaa

SEQ ID NO: 3859141 - RNA, 18 nt, Human
uuuuccacuccauugucg

SEQ ID NO: 3859142 - RNA, 13 nt, Human
uuuuccacuuugu

SEQ ID NO: 3859143 - RNA, 20 nt, Human
uuuuccagcuggaugagaau

SEQ ID NO: 3859144 - RNA, 12 nt, Human
uuuuccaggcug

SEQ ID NO: 3859145 - RNA, 19 nt, Human
uuuuccaggcuucugcugg

SEQ ID NO: 3859146 - RNA, 20 nt, Human
uuuuccaggcuucugcuggg

SEQ ID NO: 3859147 - RNA, 23 nt, Human
uuuuccaguaaugagcuuaagaa

SEQ ID NO: 3859148 - RNA, 17 nt, Human
uuuuccaguauuuuagu

SEQ ID NO: 3859149 - RNA, 15 nt, Human
uuuuccagucucuug

SEQ ID NO: 3859150 - RNA, 16 nt, Human
uuuuccaucauaauuc

SEQ ID NO: 3859151 - RNA, 18 nt, Human
uuuuccaugaaaaugcaa

SEQ ID NO: 3859152 - RNA, 19 nt, Human
uuuuccaugaguccccugu

SEQ ID NO: 3859153 - RNA, 15 nt, Human
uuuuccauuuuauaa

SEQ ID NO: 3859154 - RNA, 13 nt, Human
uuuucccaaagcc

SEQ ID NO: 3859155 - RNA, 14 nt, Human
uuuucccaauaaau

SEQ ID NO: 3859156 - RNA, 13 nt, Human
uuuucccacugca

SEQ ID NO: 3859157 - RNA, 22 nt, Human
uuuucccacugcacccccuccu

SEQ ID NO: 3859158 - RNA, 23 nt, Human
uuuucccagacuacuauuuucuu

SEQ ID NO: 3859159 - RNA, 20 nt, Human
uuuucccagauacuucccau

SEQ ID NO: 3859160 - RNA, 15 nt, Human
uuuucccaggaaaga

SEQ ID NO: 3859161 - RNA, 22 nt, Human
uuuucccauuuaucuaaauaug

SEQ ID NO: 3859162 - RNA, 16 nt, Human
uuuuccccccuagaaa

SEQ ID NO: 3859163 - RNA, 19 nt, Human
uuuucccccuuuucugcau

SEQ ID NO: 3859164 - RNA, 23 nt, Human
uuuuccccggucccuugagaccu

SEQ ID NO: 3859165 - RNA, 15 nt, Human
uuuuccccuuucugu

SEQ ID NO: 3859166 - RNA, 18 nt, Human
uuuucccuauuagagaag

SEQ ID NO: 3859167 - RNA, 16 nt, Human
uuuucccucagaaaau

SEQ ID NO: 3859168 - RNA, 17 nt, Human
uuuuccuaaagagagua

SEQ ID NO: 3859169 - RNA, 14 nt, Human
uuuuccuaaaugca

SEQ ID NO: 3859170 - RNA, 20 nt, Human
uuuuccuaauaaaguucugu

SEQ ID NO: 3859171 - RNA, 17 nt, Human
uuuuccuacaggcaguc

SEQ ID NO: 3859172 - RNA, 11 nt, Human
uuuuccuauau

SEQ ID NO: 3859173 - RNA, 19 nt, Human
uuuuccuaugcuauugaca

SEQ ID NO: 3859174 - RNA, 13 nt, Human
uuuuccuauuugu

SEQ ID NO: 3859175 - RNA, 18 nt, Human
uuuuccuauuuucagccc

SEQ ID NO: 3859176 - RNA, 14 nt, Human
uuuuccucuuguga

SEQ ID NO: 3859177 - RNA, 16 nt, Human
uuuuccucuugugauu

SEQ ID NO: 3859178 - RNA, 14 nt, Human
uuuuccugaaaacc

SEQ ID NO: 3859179 - RNA, 12 nt, Human
uuuuccugcuuc

SEQ ID NO: 3859180 - RNA, 12 nt, Human
uuuuccuuacau

SEQ ID NO: 3859181 - RNA, 14 nt, Human
uuuuccuuacauaa

SEQ ID NO: 3859182 - RNA, 15 nt, Human
uuuuccuuacauaaa

SEQ ID NO: 3859183 - RNA, 21 nt, Human
uuuuccuuccaaugucuggag

SEQ ID NO: 3859184 - RNA, 16 nt, Human
uuuuccuuguccccac

SEQ ID NO: 3859185 - RNA, 13 nt, Human
uuuuccuuugugg

SEQ ID NO: 3859186 - RNA, 19 nt, Human
uuuucgaagcucagcccac

SEQ ID NO: 3859187 - RNA, 19 nt, Human
uuuucguaugaaaaugagu

SEQ ID NO: 3859188 - RNA, 16 nt, Human
uuuucguuaacauuga

SEQ ID NO: 3859189 - RNA, 12 nt, Human
uuuucguuuguu

SEQ ID NO: 3859190 - RNA, 20 nt, Human
uuuucuaaacguaagcacug

SEQ ID NO: 3859191 - RNA, 21 nt, Human
uuuucuaaacguaagcacugu

SEQ ID NO: 3859192 - RNA, 22 nt, Human
uuuucuaaacguaagcacuguu

SEQ ID NO: 3859193 - RNA, 20 nt, Human
uuuucuaaaggaguuuaugu

SEQ ID NO: 3859194 - RNA, 14 nt, Human
uuuucuaaccuuga

SEQ ID NO: 3859195 - RNA, 21 nt, Human
uuuucuaagcaauuucuugcu

SEQ ID NO: 3859196 - RNA, 13 nt, Human
uuuucuacaaaua

SEQ ID NO: 3859197 - RNA, 18 nt, Human
uuuucuacagugguuuua

SEQ ID NO: 3859198 - RNA, 17 nt, Human
uuuucuacccuagccau

SEQ ID NO: 3859199 - RNA, 15 nt, Human
uuuucuacuguuuua

SEQ ID NO: 3859200 - RNA, 13 nt, Human
uuuucuagacuuu

SEQ ID NO: 3859201 - RNA, 15 nt, Human
uuuucuagauacaau

SEQ ID NO: 3859202 - RNA, 18 nt, Human
uuuucuagauacaauaaa

SEQ ID NO: 3859203 - RNA, 22 nt, Human
uuuucuagccuauuuaccugca

SEQ ID NO: 3859204 - RNA, 20 nt, Human
uuuucuaguguaucaaaaug

SEQ ID NO: 3859205 - RNA, 16 nt, Human
uuuucuaguuugcuca

SEQ ID NO: 3859206 - RNA, 11 nt, Human
uuuucuauuaa

SEQ ID NO: 3859207 - RNA, 12 nt, Human
uuuucuauuaaa

SEQ ID NO: 3859208 - RNA, 15 nt, Human
uuuucuauuaaaaga

SEQ ID NO: 3859209 - RNA, 20 nt, Human
uuuucuauuaaaagacucau

SEQ ID NO: 3859210 - RNA, 19 nt, Human
uuuucuauuauuuuuauaa

SEQ ID NO: 3859211 - RNA, 19 nt, Human
uuuucucacagaagaugaa

SEQ ID NO: 3859212 - RNA, 17 nt, Human
uuuucuccacuuuguug

SEQ ID NO: 3859213 - RNA, 21 nt, Human
uuuucuccucacuguauccag

SEQ ID NO: 3859214 - RNA, 11 nt, Human
uuuucuccuga

SEQ ID NO: 3859215 - RNA, 17 nt, Human
uuuucucugaacacauu

SEQ ID NO: 3859216 - RNA, 20 nt, Human
uuuucucugcauuuaaaaaa

SEQ ID NO: 3859217 - RNA, 14 nt, Human
uuuucucugguaau

SEQ ID NO: 3859218 - RNA, 21 nt, Human
uuuucucugguaauauugacu

SEQ ID NO: 3859219 - RNA, 14 nt, Human
uuuucucuguacuu

SEQ ID NO: 3859220 - RNA, 15 nt, Human
uuuucucuuucucuc

SEQ ID NO: 3859221 - RNA, 15 nt, Human
uuuucugaaacuaau

SEQ ID NO: 3859222 - RNA, 17 nt, Human
uuuucugaauaacauuu

SEQ ID NO: 3859223 - RNA, 12 nt, Human
uuuucugagccc

SEQ ID NO: 3859224 - RNA, 18 nt, Human
uuuucugauauguuugua

SEQ ID NO: 3859225 - RNA, 19 nt, Human
uuuucugauccaguuuugu

SEQ ID NO: 3859226 - RNA, 17 nt, Human
uuuucugauuagcuuug

SEQ ID NO: 3859227 - RNA, 23 nt, Human
uuuucugauuguaacguugcugu

SEQ ID NO: 3859228 - RNA, 13 nt, Human
uuuucugcacuga

SEQ ID NO: 3859229 - RNA, 15 nt, Human
uuuucugcccuggcu

SEQ ID NO: 3859230 - RNA, 16 nt, Human
uuuucugcccuggcug

SEQ ID NO: 3859231 - RNA, 12 nt, Human
uuuucugcuuua

SEQ ID NO: 3859232 - RNA, 15 nt, Human
uuuucugcuuuagac

SEQ ID NO: 3859233 - RNA, 19 nt, Human
uuuucugcuuuagacuuga

SEQ ID NO: 3859234 - RNA, 16 nt, Human
uuuucugcuuuugaaa

SEQ ID NO: 3859235 - RNA, 21 nt, Human
uuuucuggaauacaugaaaua

SEQ ID NO: 3859236 - RNA, 23 nt, Human
uuuucuggggaaagacacugccu

SEQ ID NO: 3859237 - RNA, 16 nt, Human
uuuucugguagauaga

SEQ ID NO: 3859238 - RNA, 17 nt, Human
uuuucugguucuaacau

SEQ ID NO: 3859239 - RNA, 14 nt, Human
uuuucuguaauuca

SEQ ID NO: 3859240 - RNA, 21 nt, Human
uuuucuguaccaguuaauuuu

SEQ ID NO: 3859241 - RNA, 11 nt, Human
uuuucuguacu

SEQ ID NO: 3859242 - RNA, 12 nt, Human
uuuucuguauuu

SEQ ID NO: 3859243 - RNA, 17 nt, Human
uuuucugucucugccuc

SEQ ID NO: 3859244 - RNA, 22 nt, Human
uuuucuguguaaccauuuuaua

SEQ ID NO: 3859245 - RNA, 11 nt, Human
uuuucugugug

SEQ ID NO: 3859246 - RNA, 12 nt, Human
uuuucugugugu

SEQ ID NO: 3859247 - RNA, 18 nt, Human
uuuucuguguguuccugg

SEQ ID NO: 3859248 - RNA, 23 nt, Human
uuuucuguugaaguuuacaauca

SEQ ID NO: 3859249 - RNA, 14 nt, Human
uuuucuguuucugu

SEQ ID NO: 3859250 - RNA, 13 nt, Human
uuuucuuaaagug

SEQ ID NO: 3859251 - RNA, 16 nt, Human
uuuucuuaaagugcca

SEQ ID NO: 3859252 - RNA, 18 nt, Human
uuuucuuaaagugccagu

SEQ ID NO: 3859253 - RNA, 21 nt, Human
uuuucuucaacaucaauguuc

SEQ ID NO: 3859254 - RNA, 17 nt, Human
uuuucuucacucaaauu

SEQ ID NO: 3859255 - RNA, 16 nt, Human
uuuucuucaugcaaug

SEQ ID NO: 3859256 - RNA, 11 nt, Human
uuuucuuccuu

SEQ ID NO: 3859257 - RNA, 14 nt, Human
uuuucuucuucccu

SEQ ID NO: 3859258 - RNA, 15 nt, Human
uuuucuucuucccuc

SEQ ID NO: 3859259 - RNA, 17 nt, Human
uuuucuugcaugaggcu

SEQ ID NO: 3859260 - RNA, 21 nt, Human
uuuucuugccaaugaggucug

SEQ ID NO: 3859261 - RNA, 19 nt, Human
uuuucuugccucugucccc

SEQ ID NO: 3859262 - RNA, 20 nt, Human
uuuucuugcuuaccuugacu

SEQ ID NO: 3859263 - RNA, 19 nt, Human
uuuucuuggcaaaagccuu

SEQ ID NO: 3859264 - RNA, 21 nt, Human
uuuucuuggcaaaagccuugu

SEQ ID NO: 3859265 - RNA, 24 nt, Human
uuuucuuggcaaaagccuugugua

SEQ ID NO: 3859266 - RNA, 18 nt, Human
uuuucuuguuuaucagca

SEQ ID NO: 3859267 - RNA, 12 nt, Human
uuuucuuuaaaa

SEQ ID NO: 3859268 - RNA, 16 nt, Human
uuuucuuuaaaagaau

SEQ ID NO: 3859269 - RNA, 14 nt, Human
uuuucuuuaacugc

SEQ ID NO: 3859270 - RNA, 18 nt, Human
uuuucuuuaacugccgua

SEQ ID NO: 3859271 - RNA, 16 nt, Human
uuuucuuuaaugcuuu

SEQ ID NO: 3859272 - RNA, 19 nt, Human
uuuucuuuagagaacugaa

SEQ ID NO: 3859273 - RNA, 11 nt, Human
uuuucuuucuc

SEQ ID NO: 3859274 - RNA, 14 nt, Human
uuuucuuugaaauu

SEQ ID NO: 3859275 - RNA, 15 nt, Human
uuuucuuugaauaaa

SEQ ID NO: 3859276 - RNA, 20 nt, Human
uuuucuuugaauaaauguca

SEQ ID NO: 3859277 - RNA, 17 nt, Human
uuuucuuugaaugcuuu

SEQ ID NO: 3859278 - RNA, 15 nt, Human
uuuucuuugcaaagu

SEQ ID NO: 3859279 - RNA, 20 nt, Human
uuuucuuuguaucauucauc

SEQ ID NO: 3859280 - RNA, 16 nt, Human
uuuucuuuguguagcu

SEQ ID NO: 3859281 - RNA, 13 nt, Human
uuuucuuuuaaga

SEQ ID NO: 3859282 - RNA, 14 nt, Human
uuuucuuuuguuac

SEQ ID NO: 3859283 - RNA, 20 nt, Human
uuuucuuuuguuuuuugaag

SEQ ID NO: 3859284 - RNA, 15 nt, Human
uuuucuuuuuacaua

SEQ ID NO: 3859285 - RNA, 16 nt, Human
uuuugaaaaaagcuca

SEQ ID NO: 3859286 - RNA, 23 nt, Human
uuuugaaaagcuauuagccagga

SEQ ID NO: 3859287 - RNA, 21 nt, Human
uuuugaaaagcuucuuaauua

SEQ ID NO: 3859288 - RNA, 15 nt, Human
uuuugaaacugcauu

SEQ ID NO: 3859289 - RNA, 12 nt, Human
uuuugaaagaau

SEQ ID NO: 3859290 - RNA, 22 nt, Human
uuuugaaauauuaaacccugga

SEQ ID NO: 3859291 - RNA, 17 nt, Human
uuuugaaaugaaauuua

SEQ ID NO: 3859292 - RNA, 22 nt, Human
uuuugaaaugaaauuuaaacau

SEQ ID NO: 3859293 - RNA, 13 nt, Human
uuuugaaauguca

SEQ ID NO: 3859294 - RNA, 17 nt, Human
uucagaucagugcuuga

SEQ ID NO: 3859295 - RNA, 16 nt, Human
uucagaucauggcauc

SEQ ID NO: 3859296 - RNA, 14 nt, Human
uucagauccuaccc

SEQ ID NO: 3859297 - RNA, 18 nt, Human
uucagaugccacuucuaa

SEQ ID NO: 3859298 - RNA, 14 nt, Human
uucagaugcuuuag

SEQ ID NO: 3859299 - RNA, 14 nt, Human
uucagauguaaugu

SEQ ID NO: 3859300 - RNA, 23 nt, Human
uucagaugucuucugccuguuau

SEQ ID NO: 3859301 - RNA, 15 nt, Human
uucagaugugaacca

SEQ ID NO: 3859302 - RNA, 16 nt, Human
uucagauguggagcca

SEQ ID NO: 3859303 - RNA, 21 nt, Human
uucagauucaggcauuuuccc

SEQ ID NO: 3859304 - RNA, 19 nt, Human
uucagauuggacauaacug

SEQ ID NO: 3859305 - RNA, 20 nt, Human
uucagauuguggaauguugg

SEQ ID NO: 3859306 - RNA, 15 nt, Human
uucagauuucucuuu

SEQ ID NO: 3859307 - RNA, 17 nt, Human
uucagauuucucuuuga

SEQ ID NO: 3859308 - RNA, 19 nt, Human
uucagauuucucuuugaaa

SEQ ID NO: 3859309 - RNA, 18 nt, Human
uucagauuugcacaaaaa

SEQ ID NO: 3859310 - RNA, 16 nt, Human
uucagauuugccuuau

SEQ ID NO: 3859311 - RNA, 12 nt, Human
uucagauuuggc

SEQ ID NO: 3859312 - RNA, 20 nt, Human
uucagauuuuaaaaagucuu

SEQ ID NO: 3859313 - RNA, 22 nt, Human
uucagauuuugauaacuguuua

SEQ ID NO: 3859314 - RNA, 17 nt, Human
uucagcaaaaauauuuu

SEQ ID NO: 3859315 - RNA, 19 nt, Human
uucagcaaaaauauuuuau

SEQ ID NO: 3859316 - RNA, 13 nt, Human
uucagcaaaccau

SEQ ID NO: 3859317 - RNA, 18 nt, Human
uucagcaagacuucucuu

SEQ ID NO: 3859318 - RNA, 17 nt, Human
uucagcaagagagaacc

SEQ ID NO: 3859319 - RNA, 19 nt, Human
uucagcaaguuagaacuag

SEQ ID NO: 3859320 - RNA, 17 nt, Human
uucagcaccaagcaugu

SEQ ID NO: 3859321 - RNA, 16 nt, Human
uucagcaccacccuag

SEQ ID NO: 3859322 - RNA, 21 nt, Human
uucagcacuagccaaaccuca

SEQ ID NO: 3859323 - RNA, 13 nt, Human
uucagcacuuguc

SEQ ID NO: 3859324 - RNA, 13 nt, Human
uucagcaggcagc

SEQ ID NO: 3859325 - RNA, 23 nt, Human
uucagcauccgcaggugcugguc

SEQ ID NO: 3859326 - RNA, 16 nt, Human
uucagcauucccuccc

SEQ ID NO: 3859327 - RNA, 17 nt, Human
uucagcauucccuccca

SEQ ID NO: 3859328 - RNA, 14 nt, Human
uucagccaagaauu

SEQ ID NO: 3859329 - RNA, 16 nt, Human
uucagccacuaagaac

SEQ ID NO: 3859330 - RNA, 13 nt, Human
uucagccaggagc

SEQ ID NO: 3859331 - RNA, 21 nt, Human
uucagccaucaacaagaguug

SEQ ID NO: 3859332 - RNA, 19 nt, Human
uucagccccuccucugcca

SEQ ID NO: 3859333 - RNA, 23 nt, Human
uucagcccuaaaucuagacucaa

SEQ ID NO: 3859334 - RNA, 16 nt, Human
uucagcccucaccccu

SEQ ID NO: 3859335 - RNA, 15 nt, Human
uucagcccucagaau

SEQ ID NO: 3859336 - RNA, 20 nt, Human
uucagccuagccgaccucag

SEQ ID NO: 3859337 - RNA, 22 nt, Human
uucagccuagccgaccucagcc

SEQ ID NO: 3859338 - RNA, 15 nt, Human
uucagccucuuucug

SEQ ID NO: 3859339 - RNA, 12 nt, Human
uucagccuuaau

SEQ ID NO: 3859340 - RNA, 13 nt, Human
uucagccuucuuu

SEQ ID NO: 3859341 - RNA, 20 nt, Human
uucagccuucuuuuucugga

SEQ ID NO: 3859342 - RNA, 21 nt, Human
uucagccuucuuuuucuggac

SEQ ID NO: 3859343 - RNA, 17 nt, Human
uucagcgguuuauauaa

SEQ ID NO: 3859344 - RNA, 13 nt, Human
uucagcuaaggga

SEQ ID NO: 3859345 - RNA, 20 nt, Human
uucagcuaagggaagacauu

SEQ ID NO: 3859346 - RNA, 21 nt, Human
uucagcuaagggaagacauuu

SEQ ID NO: 3859347 - RNA, 19 nt, Human
uucagcuagcuuuuaggaa

SEQ ID NO: 3859348 - RNA, 20 nt, Human
uucagcuagcuuuuaggaaa

SEQ ID NO: 3859349 - RNA, 18 nt, Human
uucagcucacacaugaga

SEQ ID NO: 3859350 - RNA, 20 nt, Human
uucagcucacgcuucacagu

SEQ ID NO: 3859351 - RNA, 14 nt, Human
uucagcucacugca

SEQ ID NO: 3859352 - RNA, 23 nt, Human
uucagcugagguuugcacuuccu

SEQ ID NO: 3859353 - RNA, 12 nt, Human
uucagcugcccc

SEQ ID NO: 3859354 - RNA, 18 nt, Human
uucagcuguccucccucc

SEQ ID NO: 3859355 - RNA, 21 nt, Human
uucagcuguccucccuccacc

SEQ ID NO: 3859356 - RNA, 20 nt, Human
uucagcugugaacauggacu

SEQ ID NO: 3859357 - RNA, 16 nt, Human
uucagcuuaaaauaaa

SEQ ID NO: 3859358 - RNA, 16 nt, Human
uucagcuucugcuggg

SEQ ID NO: 3859359 - RNA, 20 nt, Human
uucagcuucugcugggcugg

SEQ ID NO: 3859360 - RNA, 22 nt, Human
uucagcuucugcugggcugggg

SEQ ID NO: 3859361 - RNA, 16 nt, Human
uucaggaaaaggccug

SEQ ID NO: 3859362 - RNA, 17 nt, Human
uucaggaaaaggccugg

SEQ ID NO: 3859363 - RNA, 18 nt, Human
uucaggaaaauugaaugc

SEQ ID NO: 3859364 - RNA, 19 nt, Human
uucaggaaagcagcaguuu

SEQ ID NO: 3859365 - RNA, 17 nt, Human
uucaggaaccuggacca

SEQ ID NO: 3859366 - RNA, 23 nt, Human
uucaggaaccuggaccaaagcug

SEQ ID NO: 3859367 - RNA, 13 nt, Human
uucaggaagcuca

SEQ ID NO: 3859368 - RNA, 20 nt, Human
uucaggagagaguugaaccu

SEQ ID NO: 3859369 - RNA, 21 nt, Human
uucaggagagaguugaaccua

SEQ ID NO: 3859370 - RNA, 22 nt, Human
uucaggagcagccucagaacaa

SEQ ID NO: 3859371 - RNA, 17 nt, Human
uucaggagucccaagga

SEQ ID NO: 3859372 - RNA, 16 nt, Human
uucaggauacaugugc

SEQ ID NO: 3859373 - RNA, 21 nt, Human
uucaggauacucugucagaug

SEQ ID NO: 3859374 - RNA, 12 nt, Human
uucaggaucuau

SEQ ID NO: 3859375 - RNA, 17 nt, Human
uucaggcaauucuccug

SEQ ID NO: 3859376 - RNA, 22 nt, Human
uucaggcuccccagaucauguu

SEQ ID NO: 3859377 - RNA, 15 nt, Human
uucaggcucuucucc

SEQ ID NO: 3859378 - RNA, 16 nt, Human
uucaggcugcuuggga

SEQ ID NO: 3859379 - RNA, 18 nt, Human
uucagggaagauaaguug

SEQ ID NO: 3859380 - RNA, 21 nt, Human
uucagggaagauaaguuggaa

SEQ ID NO: 3859381 - RNA, 18 nt, Human
uucagggaauuucaggaa

SEQ ID NO: 3859382 - RNA, 18 nt, Human
uucagggcagauuuuagu

SEQ ID NO: 3859383 - RNA, 16 nt, Human
uucaggggacucagcc

SEQ ID NO: 3859384 - RNA, 21 nt, Human
uucaggggagucccgucagga

SEQ ID NO: 3859385 - RNA, 16 nt, Human
uucaggguccugagau

SEQ ID NO: 3859386 - RNA, 14 nt, Human
uucaggguuggccc

SEQ ID NO: 3859387 - RNA, 19 nt, Human
uucaggguuggccccugcc

SEQ ID NO: 3859388 - RNA, 22 nt, Human
uucagguaaagggcaaauaaug

SEQ ID NO: 3859389 - RNA, 15 nt, Human
uucagguaacaggca

SEQ ID NO: 3859390 - RNA, 17 nt, Human
uucagguaacaggcaga

SEQ ID NO: 3859391 - RNA, 14 nt, Human
uucagguagaggug

SEQ ID NO: 3859392 - RNA, 14 nt, Human
uucaggugaaaaug

SEQ ID NO: 3859393 - RNA, 15 nt, Human
uucaggugaaaaugu

SEQ ID NO: 3859394 - RNA, 21 nt, Human
uucaggugacaugugaaaccu

SEQ ID NO: 3859395 - RNA, 20 nt, Human
uucagguuaucgaaauaaca

SEQ ID NO: 3859396 - RNA, 24 nt, Human
uucagguuaucgaaauaacaaugu

SEQ ID NO: 3859397 - RNA, 15 nt, Human
uucagguuguuggug

SEQ ID NO: 3859398 - RNA, 15 nt, Human
uucaguaaaaaacaa

SEQ ID NO: 3859399 - RNA, 19 nt, Human
uucaguaaacauaaagcca

SEQ ID NO: 3859400 - RNA, 21 nt, Human
uucaguaacccccacuggacu

SEQ ID NO: 3859401 - RNA, 14 nt, Human
uucaguaagccgug

SEQ ID NO: 3859402 - RNA, 16 nt, Human
uucaguaauguuauuu

SEQ ID NO: 3859403 - RNA, 16 nt, Human
uucaguaccuggagga

SEQ ID NO: 3859404 - RNA, 17 nt, Human
uucaguaccuggaggag

SEQ ID NO: 3859405 - RNA, 20 nt, Human
uucaguacuucagcaagaga

SEQ ID NO: 3859406 - RNA, 22 nt, Human
uucaguacuucagcaagagaga

SEQ ID NO: 3859407 - RNA, 20 nt, Human
uucaguauaauuuaacuuca

SEQ ID NO: 3859408 - RNA, 20 nt, Human
uucaguauuauguaguuguu

SEQ ID NO: 3859409 - RNA, 20 nt, Human
uucagucagaaaacuuuaaa

SEQ ID NO: 3859410 - RNA, 17 nt, Human
uucaguccaauaggugu

SEQ ID NO: 3859411 - RNA, 17 nt, Human
uucagucccuuccccau

SEQ ID NO: 3859412 - RNA, 12 nt, Human
uucaguccugcu

SEQ ID NO: 3859413 - RNA, 16 nt, Human
uucaguccuguaguuu

SEQ ID NO: 3859414 - RNA, 21 nt, Human
uucagucucuauaccaauaaa

SEQ ID NO: 3859415 - RNA, 22 nt, Human
uucagucucuauaccaauaaag

SEQ ID NO: 3859416 - RNA, 23 nt, Human
uucagucucuauaccaauaaagu

SEQ ID NO: 3859417 - RNA, 13 nt, Human
uucagucuuucau

SEQ ID NO: 3859418 - RNA, 14 nt, Human
uucagucuuuuccu

SEQ ID NO: 3859419 - RNA, 20 nt, Human
uucagugagggucuucuuac

SEQ ID NO: 3859420 - RNA, 12 nt, Human
uuccacuggacu

SEQ ID NO: 3859421 - RNA, 20 nt, Human
uuccacugucaagaaagagc

SEQ ID NO: 3859422 - RNA, 20 nt, Human
uuccacuuauagccucuguc

SEQ ID NO: 3859423 - RNA, 20 nt, Human
uuccacuucuuccuuucucu

SEQ ID NO: 3859424 - RNA, 23 nt, Human
uuccacuuuguucuuuaggagau

SEQ ID NO: 3859425 - RNA, 20 nt, Human
uuccacuuuuuuuuguaugu

SEQ ID NO: 3859426 - RNA, 17 nt, Human
uuccagaaaaccccagc

SEQ ID NO: 3859427 - RNA, 18 nt, Human
uuccagaaaaccccagca

SEQ ID NO: 3859428 - RNA, 14 nt, Human
uuccagaaaggaua

SEQ ID NO: 3859429 - RNA, 16 nt, Human
uuccagaagaagagaa

SEQ ID NO: 3859430 - RNA, 20 nt, Human
uuccagaagaagagaagcug

SEQ ID NO: 3859431 - RNA, 21 nt, Human
uuccagaagaagagaagcugc

SEQ ID NO: 3859432 - RNA, 20 nt, Human
uuccagaagugugacuggcu

SEQ ID NO: 3859433 - RNA, 21 nt, Human
uuccagaagugugauugggaa

SEQ ID NO: 3859434 - RNA, 15 nt, Human
uuccagaaucccaag

SEQ ID NO: 3859435 - RNA, 15 nt, Human
uuccagaaugcugua

SEQ ID NO: 3859436 - RNA, 17 nt, Human
uuccagaccugaagaau

SEQ ID NO: 3859437 - RNA, 17 nt, Human
uuccagagaguccucug

SEQ ID NO: 3859438 - RNA, 19 nt, Human
uuccagagaguggcuccuc

SEQ ID NO: 3859439 - RNA, 20 nt, Human
uuccagagaguggcuccucc

SEQ ID NO: 3859440 - RNA, 21 nt, Human
uuccagagaguggcuccuccc

SEQ ID NO: 3859441 - RNA, 10 nt, Human
uuccagagca

SEQ ID NO: 3859442 - RNA, 21 nt, Human
uuccagagcauuccagucagg

SEQ ID NO: 3859443 - RNA, 19 nt, Human
uuccagaggcuauuauuuu

SEQ ID NO: 3859444 - RNA, 23 nt, Human
uuccagauaaccagcuguaacac

SEQ ID NO: 3859445 - RNA, 22 nt, Human
uuccagaucccaggccccugga

SEQ ID NO: 3859446 - RNA, 15 nt, Human
uuccagauccucucu

SEQ ID NO: 3859447 - RNA, 18 nt, Human
uuccagauccucucuggg

SEQ ID NO: 3859448 - RNA, 21 nt, Human
uuccagaugcugguuuuuccc

SEQ ID NO: 3859449 - RNA, 14 nt, Human
uuccagaugugaug

SEQ ID NO: 3859450 - RNA, 22 nt, Human
uuccagcaauucuccugccuca

SEQ ID NO: 3859451 - RNA, 24 nt, Human
uuccagcaugagguaucuaaggau

SEQ ID NO: 3859452 - RNA, 17 nt, Human
uuccagcauucccaggu

SEQ ID NO: 3859453 - RNA, 20 nt, Human
uuccagcauuuagcuggcca

SEQ ID NO: 3859454 - RNA, 16 nt, Human
uuccagccagggcugc

SEQ ID NO: 3859455 - RNA, 12 nt, Human
uuccagccauca

SEQ ID NO: 3859456 - RNA, 16 nt, Human
uuccagccccucuggu

SEQ ID NO: 3859457 - RNA, 16 nt, Human
uuccagccugccacuc

SEQ ID NO: 3859458 - RNA, 19 nt, Human
uuccagcucuaauaaaaca

SEQ ID NO: 3859459 - RNA, 11 nt, Human
uuccagcugcu

SEQ ID NO: 3859460 - RNA, 13 nt, Human
uuccagcugcugu

SEQ ID NO: 3859461 - RNA, 11 nt, Human
uuccaggcucc

SEQ ID NO: 3859462 - RNA, 19 nt, Human
uuccaggcugcauagaagg

SEQ ID NO: 3859463 - RNA, 15 nt, Human
uuccaggcuucugcu

SEQ ID NO: 3859464 - RNA, 17 nt, Human
uuccaggcuucugcugg

SEQ ID NO: 3859465 - RNA, 18 nt, Human
uuccaggggaaccugcca

SEQ ID NO: 3859466 - RNA, 17 nt, Human
uuccagguaucuccagg

SEQ ID NO: 3859467 - RNA, 17 nt, Human
uuccagguguuuauagu

SEQ ID NO: 3859468 - RNA, 23 nt, Human
uuccagguucugguuagcucagc

SEQ ID NO: 3859469 - RNA, 16 nt, Human
uuccaguaaugagcuu

SEQ ID NO: 3859470 - RNA, 19 nt, Human
uuccaguacaccuuucagc

SEQ ID NO: 3859471 - RNA, 17 nt, Human
uuccaguaccuuuguca

SEQ ID NO: 3859472 - RNA, 19 nt, Human
uuccaguaccuuugucaca

SEQ ID NO: 3859473 - RNA, 17 nt, Human
uuccaguauaaccagcu

SEQ ID NO: 3859474 - RNA, 11 nt, Human
uuccaguauuu

SEQ ID NO: 3859475 - RNA, 14 nt, Human
uuccaguauuuuag

SEQ ID NO: 3859476 - RNA, 15 nt, Human
uuccaguccaaucuc

SEQ ID NO: 3859477 - RNA, 22 nt, Human
uuccagucgggggaacugaggc

SEQ ID NO: 3859478 - RNA, 19 nt, Human
uuccagucucaaaaauaca

SEQ ID NO: 3859479 - RNA, 22 nt, Human
uuccagucuccaccaggaaccu

SEQ ID NO: 3859480 - RNA, 22 nt, Human
uuccagugaggcucugcccuug

SEQ ID NO: 3859481 - RNA, 21 nt, Human
uuccagugcaacacugaagcu

SEQ ID NO: 3859482 - RNA, 17 nt, Human
uuccaguucuucgacug

SEQ ID NO: 3859483 - RNA, 20 nt, Human
uuccaguuuguuuauuacuu

SEQ ID NO: 3859484 - RNA, 14 nt, Human
uuccauaauuauga

SEQ ID NO: 3859485 - RNA, 16 nt, Human
uuccauaauuaugaca

SEQ ID NO: 3859486 - RNA, 13 nt, Human
uuccauagcaaca

SEQ ID NO: 3859487 - RNA, 14 nt, Human
uuccauaguauauu

SEQ ID NO: 3859488 - RNA, 17 nt, Human
uuccauaguuaaagaag

SEQ ID NO: 3859489 - RNA, 13 nt, Human
uuccauaguuuug

SEQ ID NO: 3859490 - RNA, 22 nt, Human
uuccauaguuuugaugacuggc

SEQ ID NO: 3859491 - RNA, 21 nt, Human
uuccauaucuugcgaauccaa

SEQ ID NO: 3859492 - RNA, 14 nt, Human
uuccauaugcuguu

SEQ ID NO: 3859493 - RNA, 21 nt, Human
uuccauauggauccacuggcu

SEQ ID NO: 3859494 - RNA, 19 nt, Human
uuccaucagguuccauccc

SEQ ID NO: 3859495 - RNA, 20 nt, Human
uuccaucauaauucuaaucu

SEQ ID NO: 3859496 - RNA, 23 nt, Human
uuccauccauaaauccaguucua

SEQ ID NO: 3859497 - RNA, 18 nt, Human
uuccauccauggccagca

SEQ ID NO: 3859498 - RNA, 18 nt, Human
uuccaucccaaccagugc

SEQ ID NO: 3859499 - RNA, 20 nt, Human
uuccaucccaaccagugcca

SEQ ID NO: 3859500 - RNA, 14 nt, Human
uuccaucugauucc

SEQ ID NO: 3859501 - RNA, 15 nt, Human
uuccaugaaaaugca

SEQ ID NO: 3859502 - RNA, 16 nt, Human
uuccaugaaggcagag

SEQ ID NO: 3859503 - RNA, 16 nt, Human
uuccaugacaucaaga

SEQ ID NO: 3859504 - RNA, 18 nt, Human
uuccaugagaacagcagg

SEQ ID NO: 3859505 - RNA, 21 nt, Human
uuccaugaguuaucaugaauu

SEQ ID NO: 3859506 - RNA, 18 nt, Human
uuccaugaugcugggauu

SEQ ID NO: 3859507 - RNA, 23 nt, Human
uuccaugccugaggguggagacu

SEQ ID NO: 3859508 - RNA, 14 nt, Human
uuccauggacuuug

SEQ ID NO: 3859509 - RNA, 17 nt, Human
uuccauggcaggaaggc

SEQ ID NO: 3859510 - RNA, 16 nt, Human
uuccauggcccucauu

SEQ ID NO: 3859511 - RNA, 12 nt, Human
uuccauggccuc

SEQ ID NO: 3859512 - RNA, 12 nt, Human
uuccaugggaau

SEQ ID NO: 3859513 - RNA, 22 nt, Human
uuccaugggaccacaacuauuu

SEQ ID NO: 3859514 - RNA, 21 nt, Human
uuccauggugugaucgucuga

SEQ ID NO: 3859515 - RNA, 15 nt, Human
uuccaugucaagauu

SEQ ID NO: 3859516 - RNA, 17 nt, Human
uuccaugucaagauuca

SEQ ID NO: 3859517 - RNA, 17 nt, Human
uuccaugucgccucugc

SEQ ID NO: 3859518 - RNA, 21 nt, Human
uuccaugucgccucugcauuc

SEQ ID NO: 3859519 - RNA, 15 nt, Human
uuccaugucggccuc

SEQ ID NO: 3859520 - RNA, 16 nt, Human
uuccaugucggccucu

SEQ ID NO: 3859521 - RNA, 15 nt, Human
uuccaugugcccagu

SEQ ID NO: 3859522 - RNA, 13 nt, Human
uuccauuaaacga

SEQ ID NO: 3859523 - RNA, 23 nt, Human
uuccauuacaaguauuuuuaauu

SEQ ID NO: 3859524 - RNA, 15 nt, Human
uuccauuaugauucu

SEQ ID NO: 3859525 - RNA, 18 nt, Human
uuccauuguuuggagaca

SEQ ID NO: 3859526 - RNA, 21 nt, Human
uuccauuucucucuccagucu

SEQ ID NO: 3859527 - RNA, 18 nt, Human
uuccauuuuaauuuuaaa

SEQ ID NO: 3859528 - RNA, 16 nt, Human
uucccaaaggacucca

SEQ ID NO: 3859529 - RNA, 17 nt, Human
uucccaaaggacuccac

SEQ ID NO: 3859530 - RNA, 20 nt, Human
uucccaaaggacuccaccca

SEQ ID NO: 3859531 - RNA, 23 nt, Human
uucccaaaggcauuauaaaaaga

SEQ ID NO: 3859532 - RNA, 12 nt, Human
uucccaaauuuc

SEQ ID NO: 3859533 - RNA, 15 nt, Human
uucccaacuugccuu

SEQ ID NO: 3859534 - RNA, 23 nt, Human
uucccaacuugccuuugaagagu

SEQ ID NO: 3859535 - RNA, 22 nt, Human
uucccaagagcaucaugccucu

SEQ ID NO: 3859536 - RNA, 14 nt, Human
uucccaagcucugc

SEQ ID NO: 3859537 - RNA, 18 nt, Human
uucccaagcucugcuccu

SEQ ID NO: 3859538 - RNA, 23 nt, Human
uucccaagugagucucucugggc

SEQ ID NO: 3859539 - RNA, 20 nt, Human
uucccaauagcaacguagcu

SEQ ID NO: 3859540 - RNA, 15 nt, Human
uucccaaucagcacu

SEQ ID NO: 3859541 - RNA, 21 nt, Human
uucccaaugguguuuuucuug

SEQ ID NO: 3859542 - RNA, 16 nt, Human
uucccacaccuccaca

SEQ ID NO: 3859543 - RNA, 17 nt, Human
uucccacaccuccacag

SEQ ID NO: 3859544 - RNA, 21 nt, Human
uucccacaccuccacaguuca

SEQ ID NO: 3859545 - RNA, 16 nt, Human
uucccacauuugucuu

SEQ ID NO: 3859546 - RNA, 21 nt, Human
uucccacccaauucaaaacau

SEQ ID NO: 3859547 - RNA, 20 nt, Human
uucccaccccaaccugcucu

SEQ ID NO: 3859548 - RNA, 12 nt, Human
uucccaccucuc

SEQ ID NO: 3859549 - RNA, 15 nt, Human
uucccacucaccccg

SEQ ID NO: 3859550 - RNA, 21 nt, Human
uucccacuccaagcccagccc

SEQ ID NO: 3859551 - RNA, 20 nt, Human
uucccacucugucgagccug

SEQ ID NO: 3859552 - RNA, 14 nt, Human
uucccacucuucuc

SEQ ID NO: 3859553 - RNA, 11 nt, Human
uucccacugca

SEQ ID NO: 3859554 - RNA, 18 nt, Human
uucccacugcacccccuc

SEQ ID NO: 3859555 - RNA, 23 nt, Human
uucccacugcacccccuccugcu

SEQ ID NO: 3859556 - RNA, 24 nt, Human
uucccacugcacccccuccugcug

SEQ ID NO: 3859557 - RNA, 18 nt, Human
uucccacuuucccacccc

SEQ ID NO: 3859558 - RNA, 12 nt, Human
uucccagaauca

SEQ ID NO: 3859559 - RNA, 15 nt, Human
uucccagaaucaaag

SEQ ID NO: 3859560 - RNA, 19 nt, Human
uucccagagacaggaaaau

SEQ ID NO: 3859561 - RNA, 11 nt, Human
uucccagaggg

SEQ ID NO: 3859562 - RNA, 14 nt, Human
uucccagcacauga

SEQ ID NO: 3859563 - RNA, 23 nt, Human
uucccagcagggccacucccggc

SEQ ID NO: 3859564 - RNA, 14 nt, Human
uucccagcucuccc

SEQ ID NO: 3859565 - RNA, 11 nt, Human
uucccaggacc

SEQ ID NO: 3859566 - RNA, 12 nt, Human
uucccaggaccc

SEQ ID NO: 3859567 - RNA, 22 nt, Human
uucccaggcaaauaaaauuccc

SEQ ID NO: 3859568 - RNA, 22 nt, Human
uucccaggcccacugugccuca

SEQ ID NO: 3859569 - RNA, 13 nt, Human
uucccagggaagu

SEQ ID NO: 3859570 - RNA, 19 nt, Human
uucccaggguagcccgccu

SEQ ID NO: 3859571 - RNA, 20 nt, Human
uucccaggguagcccgccug

SEQ ID NO: 3859572 - RNA, 16 nt, Human
uucccaggugcuacac

SEQ ID NO: 3859573 - RNA, 20 nt, Human
uucccagucuucugacaaac

SEQ ID NO: 3859574 - RNA, 16 nt, Human
uucccaguggcugcug

SEQ ID NO: 3859575 - RNA, 18 nt, Human
uucccaguggcugcugcc

SEQ ID NO: 3859576 - RNA, 19 nt, Human
uucccaguggcugcugccc

SEQ ID NO: 3859577 - RNA, 18 nt, Human
uucccauaauuuucuuca

SEQ ID NO: 3859578 - RNA, 13 nt, Human
uucccauccccag

SEQ ID NO: 3859579 - RNA, 17 nt, Human
uucccauccccagcgau

SEQ ID NO: 3859580 - RNA, 13 nt, Human
uucccauccuacc

SEQ ID NO: 3859581 - RNA, 19 nt, Human
uucccauccucuucuuuua

SEQ ID NO: 3859582 - RNA, 12 nt, Human
uucccaucugca

SEQ ID NO: 3859583 - RNA, 14 nt, Human
uucccaucugcacc

SEQ ID NO: 3859584 - RNA, 18 nt, Human
uucccaugacccaggcug

SEQ ID NO: 3859585 - RNA, 22 nt, Human
uucccaugauuucauguacugc

SEQ ID NO: 3859586 - RNA, 18 nt, Human
uucccauugaaaauguaa

SEQ ID NO: 3859587 - RNA, 20 nt, Human
uucccauugcaucaccucug

SEQ ID NO: 3859588 - RNA, 17 nt, Human
uucccauuguggcuccu

SEQ ID NO: 3859589 - RNA, 15 nt, Human
uucccauuuaucuaa

SEQ ID NO: 3859590 - RNA, 17 nt, Human
uucccauuuguaauuug

SEQ ID NO: 3859591 - RNA, 17 nt, Human
uucccauuuugcaaaau

SEQ ID NO: 3859592 - RNA, 13 nt, Human
uucccauuuugga

SEQ ID NO: 3859593 - RNA, 15 nt, Human
uuccccaacagugug

SEQ ID NO: 3859594 - RNA, 16 nt, Human
uuccccaacaguguga

SEQ ID NO: 3859595 - RNA, 20 nt, Human
uuccccaacagugugaaguu

SEQ ID NO: 3859596 - RNA, 16 nt, Human
uuccccaacgaaaagc

SEQ ID NO: 3859597 - RNA, 17 nt, Human
uuccccacugacagccu

SEQ ID NO: 3859598 - RNA, 13 nt, Human
uuccccacuggag

SEQ ID NO: 3859599 - RNA, 14 nt, Human
uuccccacuggagc

SEQ ID NO: 3859600 - RNA, 22 nt, Human
uuccccacuugagaauuacccu

SEQ ID NO: 3859601 - RNA, 18 nt, Human
uuccccagacgccuggcu

SEQ ID NO: 3859602 - RNA, 12 nt, Human
uuccccagagaa

SEQ ID NO: 3859603 - RNA, 22 nt, Human
uuccccagcagggucuuuucau

SEQ ID NO: 3859604 - RNA, 20 nt, Human
uuccccagcaucacucccca

SEQ ID NO: 3859605 - RNA, 12 nt, Human
uuccccagccca

SEQ ID NO: 3859606 - RNA, 16 nt, Human
uuccccaggaggccag

SEQ ID NO: 3859607 - RNA, 18 nt, Human
uuccccaggaggccagcc

SEQ ID NO: 3859608 - RNA, 19 nt, Human
uuccccaggaggccagccu

SEQ ID NO: 3859609 - RNA, 18 nt, Human
uuccccaggggaaaauga

SEQ ID NO: 3859610 - RNA, 19 nt, Human
uuccccaucucaggccaga

SEQ ID NO: 3859611 - RNA, 15 nt, Human
uuccccaucuggguc

SEQ ID NO: 3859612 - RNA, 17 nt, Human
uuccccaucuucuaaac

SEQ ID NO: 3859613 - RNA, 16 nt, Human
uuccccauugccuccu

SEQ ID NO: 3859614 - RNA, 14 nt, Human
uucccccaaagugg

SEQ ID NO: 3859615 - RNA, 18 nt, Human
uucccccaaccucagacu

SEQ ID NO: 3859616 - RNA, 12 nt, Human
uucccccaccac

SEQ ID NO: 3859617 - RNA, 23 nt, Human
uucccccaccaccaaaacugcuc

SEQ ID NO: 3859618 - RNA, 18 nt, Human
uucccccaccgguccagc

SEQ ID NO: 3859619 - RNA, 14 nt, Human
uucccccacuaccg

SEQ ID NO: 3859620 - RNA, 15 nt, Human
uucccccacugauca

SEQ ID NO: 3859621 - RNA, 15 nt, Human
uucccccagcccugu

SEQ ID NO: 3859622 - RNA, 18 nt, Human
uucccccauagccacccc

SEQ ID NO: 3859623 - RNA, 21 nt, Human
uuccccccauguuguaaugcu

SEQ ID NO: 3859624 - RNA, 12 nt, Human
uucccccuaaac

SEQ ID NO: 3859625 - RNA, 14 nt, Human
uucccccuuucuuc

SEQ ID NO: 3859626 - RNA, 22 nt, Human
uuccccgagggaugaugccaca

SEQ ID NO: 3859627 - RNA, 22 nt, Human
uuccccuaguaagugccuucca

SEQ ID NO: 3859628 - RNA, 22 nt, Human
uuccccucagaaaaaaauucau

SEQ ID NO: 3859629 - RNA, 13 nt, Human
uuccccucccugg

SEQ ID NO: 3859630 - RNA, 14 nt, Human
uuccccucccuggg

SEQ ID NO: 3859631 - RNA, 17 nt, Human
uuccccuccuaccccuc

SEQ ID NO: 3859632 - RNA, 18 nt, Human
uuccccuccuucucccuu

SEQ ID NO: 3859633 - RNA, 13 nt, Human
uuccccucucccu

SEQ ID NO: 3859634 - RNA, 12 nt, Human
uuccccucugcu

SEQ ID NO: 3859635 - RNA, 15 nt, Human
uuccccucugcugcu

SEQ ID NO: 3859636 - RNA, 19 nt, Human
uuccccucuucccuucaac

SEQ ID NO: 3859637 - RNA, 18 nt, Human
uuccccuguuuauucaua

SEQ ID NO: 3859638 - RNA, 15 nt, Human
uuccccuuccuucuu

SEQ ID NO: 3859639 - RNA, 17 nt, Human
uuccccuuccuuuuaag

SEQ ID NO: 3859640 - RNA, 13 nt, Human
uuccccuugcccu

SEQ ID NO: 3859641 - RNA, 14 nt, Human
uuccccuugcccuu

SEQ ID NO: 3859642 - RNA, 21 nt, Human
uuccccuugcccuugcccuga

SEQ ID NO: 3859643 - RNA, 17 nt, Human
uuccccuuuccccacuc

SEQ ID NO: 3859644 - RNA, 21 nt, Human
uucccgagcaaagucuaaagu

SEQ ID NO: 3859645 - RNA, 23 nt, Human
uucccgagcaaagucuaaaguuu

SEQ ID NO: 3859646 - RNA, 21 nt, Human
uucccgccagagggcuuguga

SEQ ID NO: 3859647 - RNA, 22 nt, Human
uucccgcggguuccgcaggcag

SEQ ID NO: 3859648 - RNA, 14 nt, Human
uucccgcucagccc

SEQ ID NO: 3859649 - RNA, 18 nt, Human
uucccgcucagcccuccc

SEQ ID NO: 3859650 - RNA, 20 nt, Human
uucccggucccgaguacagu

SEQ ID NO: 3859651 - RNA, 20 nt, Human
uucccgucccauauccugcc

SEQ ID NO: 3859652 - RNA, 15 nt, Human
uucccguuucuccac

SEQ ID NO: 3859653 - RNA, 17 nt, Human
uucccguuucuccaccu

SEQ ID NO: 3859654 - RNA, 19 nt, Human
uucccuaaaauacauuuaa

SEQ ID NO: 3859655 - RNA, 22 nt, Human
uucccuaaaauacauuuaaaac

SEQ ID NO: 3859656 - RNA, 14 nt, Human
uucccuacauuaaa

SEQ ID NO: 3859657 - RNA, 14 nt, Human
uucccuacccucua

SEQ ID NO: 3859658 - RNA, 17 nt, Human
uucccuacccucuagag

SEQ ID NO: 3859659 - RNA, 20 nt, Human
uucccuacccucuagagaaa

SEQ ID NO: 3859660 - RNA, 13 nt, Human
uucccuaccucag

SEQ ID NO: 3859661 - RNA, 15 nt, Human
uucccuaccucaggc

SEQ ID NO: 3859662 - RNA, 16 nt, Human
uucccuacuuccugug

SEQ ID NO: 3859663 - RNA, 15 nt, Human
uucccuauccaauca

SEQ ID NO: 3859664 - RNA, 13 nt, Human
uucccuaucuuuu

SEQ ID NO: 3859665 - RNA, 12 nt, Human
uucccucacccc

SEQ ID NO: 3859666 - RNA, 21 nt, Human
uucccucaccuuggcaccaga

SEQ ID NO: 3859667 - RNA, 21 nt, Human
uucccucacucgucuccccca

SEQ ID NO: 3859668 - RNA, 11 nt, Human
uucccuccucc

SEQ ID NO: 3859669 - RNA, 22 nt, Human
uucccuccucccaugucacugc

SEQ ID NO: 3859670 - RNA, 15 nt, Human
uucccuccugcuacu

SEQ ID NO: 3859671 - RNA, 12 nt, Human
uucccuccuugg

SEQ ID NO: 3859672 - RNA, 13 nt, Human
uucccuccuuggu

SEQ ID NO: 3859673 - RNA, 14 nt, Human
uucccucucucacu

SEQ ID NO: 3859674 - RNA, 14 nt, Human
uucccucucucuga

SEQ ID NO: 3859675 - RNA, 22 nt, Human
uucccucugagaauuccaagga

SEQ ID NO: 3859676 - RNA, 13 nt, Human
uucccucugcuca

SEQ ID NO: 3859677 - RNA, 15 nt, Human
uucccucugcucagc

SEQ ID NO: 3859678 - RNA, 17 nt, Human
uucccucugcucagcca

SEQ ID NO: 3859679 - RNA, 15 nt, Human
uucccucugcuccug

SEQ ID NO: 3859680 - RNA, 13 nt, Human
uucccucuuuucu

SEQ ID NO: 3859681 - RNA, 15 nt, Human
uucccucuuuucuua

SEQ ID NO: 3859682 - RNA, 19 nt, Human
uucccucuuuucuuacucc

SEQ ID NO: 3859683 - RNA, 20 nt, Human
uucccugaaaacccagagag

SEQ ID NO: 3859684 - RNA, 21 nt, Human
uucccugaaacacgaaacuug

SEQ ID NO: 3859685 - RNA, 10 nt, Human
uucccugcaa

SEQ ID NO: 3859686 - RNA, 12 nt, Human
uucccugcacua

SEQ ID NO: 3859687 - RNA, 20 nt, Human
uucccuggaaaccuuccacc

SEQ ID NO: 3859688 - RNA, 22 nt, Human
uucccuggaaaccuuccaccca

SEQ ID NO: 3859689 - RNA, 12 nt, Human
uucccuggccuu

SEQ ID NO: 3859690 - RNA, 20 nt, Human
uucccuggggaaaacuugca

SEQ ID NO: 3859691 - RNA, 21 nt, Human
uucccuggguuagacugccag

SEQ ID NO: 3859692 - RNA, 20 nt, Human
uucccugucucuugaaaaau

SEQ ID NO: 3859693 - RNA, 17 nt, Human
uucccuguucuuccucc

SEQ ID NO: 3859694 - RNA, 22 nt, Human
uucccuuaagggguaucaugua

SEQ ID NO: 3859695 - RNA, 13 nt, Human
uucccuuccacug

SEQ ID NO: 3859696 - RNA, 14 nt, Human
uucccuuccuccau

SEQ ID NO: 3859697 - RNA, 22 nt, Human
uucccuucuccaucucucuggc

SEQ ID NO: 3859698 - RNA, 17 nt, Human
uucccuucuccuuccaa

SEQ ID NO: 3859699 - RNA, 18 nt, Human
uucccuugaugaagaagu

SEQ ID NO: 3859700 - RNA, 15 nt, Human
uucccuuggccucag

SEQ ID NO: 3859701 - RNA, 16 nt, Human
uucccuuguagcuccu

SEQ ID NO: 3859702 - RNA, 16 nt, Human
uucccuuugcuccacc

SEQ ID NO: 3859703 - RNA, 15 nt, Human
uucccuuugugcaca

SEQ ID NO: 3859704 - RNA, 21 nt, Human
uucccuuuuacauacugcugu

SEQ ID NO: 3859705 - RNA, 14 nt, Human
uucccuuuucuguu

SEQ ID NO: 3859706 - RNA, 21 nt, Human
uuccgaaaaauccucuuccuc

SEQ ID NO: 3859707 - RNA, 20 nt, Human
uuccgacaaccgaugcucca

SEQ ID NO: 3859708 - RNA, 22 nt, Human
uuccgacaaccgaugcuccagc

SEQ ID NO: 3859709 - RNA, 17 nt, Human
uuccgacccucugggaa

SEQ ID NO: 3859710 - RNA, 18 nt, Human
uuccgacccucugggaac

SEQ ID NO: 3859711 - RNA, 21 nt, Human
uuccgcacuucagaauuccau

SEQ ID NO: 3859712 - RNA, 17 nt, Human
uuccgcaggcagacuac

SEQ ID NO: 3859713 - RNA, 16 nt, Human
uuccgccccugccugc

SEQ ID NO: 3859714 - RNA, 17 nt, Human
uuccgccccuucccuuc

SEQ ID NO: 3859715 - RNA, 19 nt, Human
uuccgcuuggagcagaggg

SEQ ID NO: 3859716 - RNA, 22 nt, Human
uuccggcauggacaauggaccg

SEQ ID NO: 3859717 - RNA, 17 nt, Human
uuccgguagggaggcag

SEQ ID NO: 3859718 - RNA, 20 nt, Human
uuccguagguagauguguaa

SEQ ID NO: 3859719 - RNA, 18 nt, Human
uuccgugacgucacugga

SEQ ID NO: 3859720 - RNA, 13 nt, Human
uucgcuccugugu

SEQ ID NO: 3859721 - RNA, 14 nt, Human
uucgcucuuugaga

SEQ ID NO: 3859722 - RNA, 22 nt, Human
uucgcuucuugccucugugcug

SEQ ID NO: 3859723 - RNA, 17 nt, Human
uucgcuuggcuccaugc

SEQ ID NO: 3859724 - RNA, 23 nt, Human
uucggaaagaagaaggugggagg

SEQ ID NO: 3859725 - RNA, 20 nt, Human
uucggaagggguuccucaaa

SEQ ID NO: 3859726 - RNA, 19 nt, Human
uucggacaguuuauuuguu

SEQ ID NO: 3859727 - RNA, 12 nt, Human
uucggcauuuga

SEQ ID NO: 3859728 - RNA, 17 nt, Human
uucggccccauguaucu

SEQ ID NO: 3859729 - RNA, 19 nt, Human
uucggccuccauccugagg

SEQ ID NO: 3859730 - RNA, 16 nt, Human
uucggcucuggguggg

SEQ ID NO: 3859731 - RNA, 13 nt, Human
uucggcugucuca

SEQ ID NO: 3859732 - RNA, 22 nt, Human
uucgggaagagaggaguucaau

SEQ ID NO: 3859733 - RNA, 12 nt, Human
uucgggcugugc

SEQ ID NO: 3859734 - RNA, 13 nt, Human
uucgggcugugcc

SEQ ID NO: 3859735 - RNA, 21 nt, Human
uucgggugugcaaugucugag

SEQ ID NO: 3859736 - RNA, 22 nt, Human
uucgguggcuagucaagcuccu

SEQ ID NO: 3859737 - RNA, 20 nt, Human
uucgguuuuuuuccuguuuc

SEQ ID NO: 3859738 - RNA, 14 nt, Human
uucguacaguucuu

SEQ ID NO: 3859739 - RNA, 15 nt, Human
uucguacaguucuuc

SEQ ID NO: 3859740 - RNA, 15 nt, Human
uucguagcaugaguu

SEQ ID NO: 3859741 - RNA, 15 nt, Human
uucguaugaaaauga

SEQ ID NO: 3859742 - RNA, 17 nt, Human
uucguccacagcuuccu

SEQ ID NO: 3859743 - RNA, 19 nt, Human
uucgucuguuuauaaacau

SEQ ID NO: 3859744 - RNA, 13 nt, Human
uucgucuucuaau

SEQ ID NO: 3859745 - RNA, 16 nt, Human
uucgucuucuaauuuc

SEQ ID NO: 3859746 - RNA, 21 nt, Human
uucgugaaguauacuguauuu

SEQ ID NO: 3859747 - RNA, 20 nt, Human
uucgugagccccaucuucac

SEQ ID NO: 3859748 - RNA, 16 nt, Human
uucguuagaccgcucu

SEQ ID NO: 3859749 - RNA, 13 nt, Human
uucguuaucuaau

SEQ ID NO: 3859750 - RNA, 17 nt, Human
uucguucgcagagcuuu

SEQ ID NO: 3859751 - RNA, 14 nt, Human
uucguucucugcca

SEQ ID NO: 3859752 - RNA, 15 nt, Human
uucguucuuguucug

SEQ ID NO: 3859753 - RNA, 14 nt, Human
uucguucuuuuuaa

SEQ ID NO: 3859754 - RNA, 20 nt, Human
uucguuguguuuuuuaagau

SEQ ID NO: 3859755 - RNA, 12 nt, Human
uucguuuugguu

SEQ ID NO: 3859756 - RNA, 14 nt, Human
uucuaaaaaaagaa

SEQ ID NO: 3859757 - RNA, 15 nt, Human
uucuaaaaagucaga

SEQ ID NO: 3859758 - RNA, 18 nt, Human
uucuaaaacuaaauagca

SEQ ID NO: 3859759 - RNA, 22 nt, Human
uucuaaaacuaaauagcaugua

SEQ ID NO: 3859760 - RNA, 19 nt, Human
uucuaaaacuguacuuuga

SEQ ID NO: 3859761 - RNA, 15 nt, Human
uucuaaaagguguga

SEQ ID NO: 3859762 - RNA, 19 nt, Human
uucuaaaauauaaucaacc

SEQ ID NO: 3859763 - RNA, 20 nt, Human
uucuaaaaucuuauaguucu

SEQ ID NO: 3859764 - RNA, 15 nt, Human
uucuaaaaugauugu

SEQ ID NO: 3859765 - RNA, 19 nt, Human
uucuaaacccaauccaaau

SEQ ID NO: 3859766 - RNA, 21 nt, Human
uucuaaacguaagcacuguuu

SEQ ID NO: 3859767 - RNA, 18 nt, Human
uucuaaacuggagacugu

SEQ ID NO: 3859768 - RNA, 14 nt, Human
uucuaaagauucua

SEQ ID NO: 3859769 - RNA, 15 nt, Human
uucuaaagcucugac

SEQ ID NO: 3859770 - RNA, 23 nt, Human
uucuaaaggaguuuauguuccau

SEQ ID NO: 3859771 - RNA, 17 nt, Human
uucuaaaggcuaccuuu

SEQ ID NO: 3859772 - RNA, 13 nt, Human
uucuaaaggucca

SEQ ID NO: 3859773 - RNA, 13 nt, Human
uucuaaaguucua

SEQ ID NO: 3859774 - RNA, 20 nt, Human
uucuaacaaaaaaauauauu

SEQ ID NO: 3859775 - RNA, 18 nt, Human
uucuaaccuugaaugcug

SEQ ID NO: 3859776 - RNA, 20 nt, Human
uucuaaccuugaaugcugcc

SEQ ID NO: 3859777 - RNA, 22 nt, Human
uucuaaccuugaaugcugccag

SEQ ID NO: 3859778 - RNA, 23 nt, Human
uucuaaccuugaaugcugccagu

SEQ ID NO: 3859779 - RNA, 16 nt, Human
uucuaacucugaugua

SEQ ID NO: 3859780 - RNA, 23 nt, Human
uucuaacucugauguaaaugaag

SEQ ID NO: 3859781 - RNA, 16 nt, Human
uucuaagaaaagccua

SEQ ID NO: 3859782 - RNA, 18 nt, Human
uucuaagaaaucaaguaa

SEQ ID NO: 3859783 - RNA, 23 nt, Human
uucuaagaagugaaaaucuacac

SEQ ID NO: 3859784 - RNA, 13 nt, Human
uucuaagacucaa

SEQ ID NO: 3859785 - RNA, 21 nt, Human
uucuaagacuuacucuaagau

SEQ ID NO: 3859786 - RNA, 15 nt, Human
uucuaagauucuaau

SEQ ID NO: 3859787 - RNA, 13 nt, Human
uucuaagauucug

SEQ ID NO: 3859788 - RNA, 12 nt, Human
uucuaaggcucu

SEQ ID NO: 3859789 - RNA, 20 nt, Human
uucuaaguaaaaccacagca

SEQ ID NO: 3859790 - RNA, 21 nt, Human
uucuaaguaaaaccacagcag

SEQ ID NO: 3859791 - RNA, 24 nt, Human
uucuaaguaaaaccacagcaguug

SEQ ID NO: 3859792 - RNA, 15 nt, Human
uucuaaguaaauaca

SEQ ID NO: 3859793 - RNA, 17 nt, Human
uucuaaguaaauacaau

SEQ ID NO: 3859794 - RNA, 12 nt, Human
uucuaagucuuu

SEQ ID NO: 3859795 - RNA, 17 nt, Human
uucuaagucuuuccauu

SEQ ID NO: 3859796 - RNA, 20 nt, Human
uucuaagugaaauuucuagc

SEQ ID NO: 3859797 - RNA, 20 nt, Human
uucuaaguugaguauauuau

SEQ ID NO: 3859798 - RNA, 14 nt, Human
uucuaaguuucuaa

SEQ ID NO: 3859799 - RNA, 13 nt, Human
uucuaauaaauua

SEQ ID NO: 3859800 - RNA, 17 nt, Human
uucuaauaagcuaguug

SEQ ID NO: 3859801 - RNA, 19 nt, Human
uucuaauaagcuaguugaa

SEQ ID NO: 3859802 - RNA, 16 nt, Human
uucuaauaauuucuaa

SEQ ID NO: 3859803 - RNA, 18 nt, Human
uucuaauaauuucuaaug

SEQ ID NO: 3859804 - RNA, 14 nt, Human
uucuaauagaacuc

SEQ ID NO: 3859805 - RNA, 18 nt, Human
uucuaauagaacucaguu

SEQ ID NO: 3859806 - RNA, 14 nt, Human
uucuaauaguuuua

SEQ ID NO: 3859807 - RNA, 13 nt, Human
uucuaauaucauu

SEQ ID NO: 3859808 - RNA, 21 nt, Human
uucuaauauuuauugcuuuau

SEQ ID NO: 3859809 - RNA, 13 nt, Human
uucuaaucaaaag

SEQ ID NO: 3859810 - RNA, 14 nt, Human
uucuaaucugcuau

SEQ ID NO: 3859811 - RNA, 23 nt, Human
uucuaaugaggagagaaaauaua

SEQ ID NO: 3859812 - RNA, 16 nt, Human
uucuaaugcugauaug

SEQ ID NO: 3859813 - RNA, 17 nt, Human
uucuaauggaaugguuu

SEQ ID NO: 3859814 - RNA, 17 nt, Human
uucuaaugucuucauuu

SEQ ID NO: 3859815 - RNA, 20 nt, Human
uucuaauuggcuuuacuauu

SEQ ID NO: 3859816 - RNA, 21 nt, Human
uucuacaaagcacuagagaau

SEQ ID NO: 3859817 - RNA, 15 nt, Human
uucuacaaugugaac

SEQ ID NO: 3859818 - RNA, 19 nt, Human
uucuacaaugugaacuuua

SEQ ID NO: 3859819 - RNA, 19 nt, Human
uucuacagcaaauuuauaa

SEQ ID NO: 3859820 - RNA, 15 nt, Human
uucuacagugguuuu

SEQ ID NO: 3859821 - RNA, 22 nt, Human
uucuacauaaguaauucaagaa

SEQ ID NO: 3859822 - RNA, 14 nt, Human
uucuacauuucacc

SEQ ID NO: 3859823 - RNA, 22 nt, Human
uucuacauuucaccuacuuugu

SEQ ID NO: 3859824 - RNA, 15 nt, Human
uucuaccauuucaga

SEQ ID NO: 3859825 - RNA, 18 nt, Human
uucuacccaacggcccug

SEQ ID NO: 3859826 - RNA, 14 nt, Human
uucuacccuagcca

SEQ ID NO: 3859827 - RNA, 18 nt, Human
uucuacccuagccauucc

SEQ ID NO: 3859828 - RNA, 20 nt, Human
uucuacccuagccauuccug

SEQ ID NO: 3859829 - RNA, 18 nt, Human
uucuaccggagagagaau

SEQ ID NO: 3859830 - RNA, 20 nt, Human
uucuaccggcuuugccaugu

SEQ ID NO: 3859831 - RNA, 23 nt, Human
uucuaccuauaacacucuaggau

SEQ ID NO: 3859832 - RNA, 12 nt, Human
uucuaccuccca

SEQ ID NO: 3859833 - RNA, 13 nt, Human
uucuaccugcccu

SEQ ID NO: 3859834 - RNA, 22 nt, Human
uucuacggaucaucaacaagau

SEQ ID NO: 3859835 - RNA, 13 nt, Human
uucuacuauuuau

SEQ ID NO: 3859836 - RNA, 18 nt, Human
uucuacucauauauaucu

SEQ ID NO: 3859837 - RNA, 17 nt, Human
uucuacucuuaaguuuc

SEQ ID NO: 3859838 - RNA, 13 nt, Human
uucuacugcucuc

SEQ ID NO: 3859839 - RNA, 17 nt, Human
uucuacugucaaaugau

SEQ ID NO: 3859840 - RNA, 16 nt, Human
uucuacuugcucugga

SEQ ID NO: 3859841 - RNA, 19 nt, Human
uucuacuuugauaugacug

SEQ ID NO: 3859842 - RNA, 15 nt, Human
uucuacuuuuaaaga

SEQ ID NO: 3859843 - RNA, 21 nt, Human
uucuagaaacaaacaucuaau

SEQ ID NO: 3859844 - RNA, 22 nt, Human
uucuagaaagagaaacaguugg

SEQ ID NO: 3859845 - RNA, 18 nt, Human
uucuagaaguuucccuuc

SEQ ID NO: 3859846 - RNA, 18 nt, Human
uucuagaauuauuuuuca

SEQ ID NO: 3859847 - RNA, 15 nt, Human
uucuagaauuuauca

SEQ ID NO: 3859848 - RNA, 20 nt, Human
uucuagacauggagguucua

SEQ ID NO: 3859849 - RNA, 15 nt, Human
uucuagacuuucugu

SEQ ID NO: 3859850 - RNA, 12 nt, Human
uucuagagaaga

SEQ ID NO: 3859851 - RNA, 21 nt, Human
uucuagagagggaauucucuu

SEQ ID NO: 3859852 - RNA, 22 nt, Human
uucuagaugauuaaauaagauu

SEQ ID NO: 3859853 - RNA, 16 nt, Human
uucuagcacuggccug

SEQ ID NO: 3859854 - RNA, 19 nt, Human
uucuagcaugaagacagag

SEQ ID NO: 3859855 - RNA, 21 nt, Human
uucuagcauggcauauuuuuc

SEQ ID NO: 3859856 - RNA, 18 nt, Human
uucuagcccauggacuuc

SEQ ID NO: 3859857 - RNA, 18 nt, Human
uucuagcuagaaauauga

SEQ ID NO: 3859858 - RNA, 19 nt, Human
uucuagcuagaaauaugau

SEQ ID NO: 3859859 - RNA, 21 nt, Human
uucuagcuguugagcuguuuu

SEQ ID NO: 3859860 - RNA, 22 nt, Human
uucuagcuuaucuacuuccaaa

SEQ ID NO: 3859861 - RNA, 11 nt, Human
uucuaggaaaa

SEQ ID NO: 3859862 - RNA, 23 nt, Human
uucuaggaagaauuuuaaaaaug

SEQ ID NO: 3859863 - RNA, 13 nt, Human
uucuaggacugaa

SEQ ID NO: 3859864 - RNA, 14 nt, Human
uucuaggacugaau

SEQ ID NO: 3859865 - RNA, 23 nt, Human
uucuaggacugaauuaugaaacu

SEQ ID NO: 3859866 - RNA, 20 nt, Human
uucuaggcaucucuguacuu

SEQ ID NO: 3859867 - RNA, 13 nt, Human
uucuaggccuggg

SEQ ID NO: 3859868 - RNA, 22 nt, Human
uucuaggcuacaauuuucuccc

SEQ ID NO: 3859869 - RNA, 23 nt, Human
uucuaggcuacaauuuucuccca

SEQ ID NO: 3859870 - RNA, 19 nt, Human
uucuggugaggccuugcuc

SEQ ID NO: 3859871 - RNA, 12 nt, Human
uucuggugugaa

SEQ ID NO: 3859872 - RNA, 17 nt, Human
uucugguguguuaacau

SEQ ID NO: 3859873 - RNA, 23 nt, Human
uucugguguuggacaagcuucug

SEQ ID NO: 3859874 - RNA, 22 nt, Human
uucugguuagcucagccccagc

SEQ ID NO: 3859875 - RNA, 15 nt, Human
uucugguuccagggu

SEQ ID NO: 3859876 - RNA, 12 nt, Human
uucugguucuaa

SEQ ID NO: 3859877 - RNA, 19 nt, Human
uucugguuguuuuuaaaca

SEQ ID NO: 3859878 - RNA, 11 nt, Human
uucuguaaaau

SEQ ID NO: 3859879 - RNA, 22 nt, Human
uucuguaaacucugcauccaga

SEQ ID NO: 3859880 - RNA, 14 nt, Human
uucuguaaauacca

SEQ ID NO: 3859881 - RNA, 23 nt, Human
uucuguaaauaccauugacacau

SEQ ID NO: 3859882 - RNA, 16 nt, Human
aaggcuggcugggcau

SEQ ID NO: 3859883 - RNA, 14 nt, Human
aaggcuggggcuau

SEQ ID NO: 3859884 - RNA, 22 nt, Human
aaggcugggggaagaagcucuc

SEQ ID NO: 3859885 - RNA, 16 nt, Human
aaggcuguauucagca

SEQ ID NO: 3859886 - RNA, 18 nt, Human
aaggcugucucagauaaa

SEQ ID NO: 3859887 - RNA, 16 nt, Human
aaggcugugcucccug

SEQ ID NO: 3859888 - RNA, 18 nt, Human
aaggcuuauauucaacca

SEQ ID NO: 3859889 - RNA, 16 nt, Human
aaggcuucucucucac

SEQ ID NO: 3859890 - RNA, 18 nt, Human
aaggcuucucucuguggg

SEQ ID NO: 3859891 - RNA, 19 nt, Human
aaggcuugggauuugcugu

SEQ ID NO: 3859892 - RNA, 16 nt, Human
aaggcuuuauauuuuu

SEQ ID NO: 3859893 - RNA, 16 nt, Human
aaggcuuucagggccu

SEQ ID NO: 3859894 - RNA, 21 nt, Human
aaggcuuugcccugcugcccu

SEQ ID NO: 3859895 - RNA, 12 nt, Human
aagggaaaaaua

SEQ ID NO: 3859896 - RNA, 15 nt, Human
aagggaaaaauauau

SEQ ID NO: 3859897 - RNA, 14 nt, Human
aagggaaacaguca

SEQ ID NO: 3859898 - RNA, 18 nt, Human
aagggaaacagucauuug

SEQ ID NO: 3859899 - RNA, 16 nt, Human
aagggaaacugccagc

SEQ ID NO: 3859900 - RNA, 15 nt, Human
aagggaaaguuuuuu

SEQ ID NO: 3859901 - RNA, 14 nt, Human
aagggaacagaaag

SEQ ID NO: 3859902 - RNA, 15 nt, Human
aagggaagacauuuc

SEQ ID NO: 3859903 - RNA, 17 nt, Human
aagggaaguugugccuu

SEQ ID NO: 3859904 - RNA, 14 nt, Human
aagggaaugcauua

SEQ ID NO: 3859905 - RNA, 16 nt, Human
aagggacauguuuuga

SEQ ID NO: 3859906 - RNA, 13 nt, Human
aagggaccaaggc

SEQ ID NO: 3859907 - RNA, 18 nt, Human
aagggacgcuacccggga

SEQ ID NO: 3859908 - RNA, 17 nt, Human
aagggacugagaaauuu

SEQ ID NO: 3859909 - RNA, 21 nt, Human
aagggacugagagaugcagaa

SEQ ID NO: 3859910 - RNA, 17 nt, Human
aagggacugauguuugu

SEQ ID NO: 3859911 - RNA, 17 nt, Human
aagggagagaccucauc

SEQ ID NO: 3859912 - RNA, 24 nt, Human
aagggagcacuggguugacuuuca

SEQ ID NO: 3859913 - RNA, 16 nt, Human
aagggagcagagaagg

SEQ ID NO: 3859914 - RNA, 11 nt, Human
aagggagccaa

SEQ ID NO: 3859915 - RNA, 12 nt, Human
aagggagccaag

SEQ ID NO: 3859916 - RNA, 11 nt, Human
aagggaggagg

SEQ ID NO: 3859917 - RNA, 16 nt, Human
aagggaggcugcugcu

SEQ ID NO: 3859918 - RNA, 16 nt, Human
aagggagggcucugag

SEQ ID NO: 3859919 - RNA, 15 nt, Human
aagggagucugccag

SEQ ID NO: 3859920 - RNA, 16 nt, Human
aagggagucugccagg

SEQ ID NO: 3859921 - RNA, 15 nt, Human
aagggauaugugaaa

SEQ ID NO: 3859922 - RNA, 13 nt, Human
aagggauccugcc

SEQ ID NO: 3859923 - RNA, 16 nt, Human
aagggauccugccugc

SEQ ID NO: 3859924 - RNA, 24 nt, Human
aagggauggaggucacacugguag

SEQ ID NO: 3859925 - RNA, 16 nt, Human
aagggauguauuugua

SEQ ID NO: 3859926 - RNA, 17 nt, Human
aagggauuacccaagca

SEQ ID NO: 3859927 - RNA, 18 nt, Human
aagggauuacccaagcaa

SEQ ID NO: 3859928 - RNA, 19 nt, Human
aagggauuacccaagcaaa

SEQ ID NO: 3859929 - RNA, 23 nt, Human
aagggauuuaguaacaucauuuu

SEQ ID NO: 3859930 - RNA, 16 nt, Human
aagggauuucuuaggg

SEQ ID NO: 3859931 - RNA, 20 nt, Human
aagggauuuuagucacacgu

SEQ ID NO: 3859932 - RNA, 22 nt, Human
aagggauuuuagucacacgugg

SEQ ID NO: 3859933 - RNA, 15 nt, Human
aagggauuuucagcc

SEQ ID NO: 3859934 - RNA, 18 nt, Human
aagggcaaaauucccagg

SEQ ID NO: 3859935 - RNA, 20 nt, Human
aagggcaacagaucaguaaa

SEQ ID NO: 3859936 - RNA, 22 nt, Human
aagggcaacagaucaguaaaga

SEQ ID NO: 3859937 - RNA, 16 nt, Human
aagggcacauagaaag

SEQ ID NO: 3859938 - RNA, 19 nt, Human
aagggcagaacacuaaccu

SEQ ID NO: 3859939 - RNA, 13 nt, Human
aagggcagaguua

SEQ ID NO: 3859940 - RNA, 19 nt, Human
aagggcagaguuacuugau

SEQ ID NO: 3859941 - RNA, 14 nt, Human
aagggcagggacag

SEQ ID NO: 3859942 - RNA, 15 nt, Human
aagggcaguggaggu

SEQ ID NO: 3859943 - RNA, 14 nt, Human
aagggcauaaagua

SEQ ID NO: 3859944 - RNA, 15 nt, Human
aagggcauaaaguaa

SEQ ID NO: 3859945 - RNA, 21 nt, Human
aagggcauaaaguaaauacau

SEQ ID NO: 3859946 - RNA, 21 nt, Human
aagggcaugagcauuggauac

SEQ ID NO: 3859947 - RNA, 15 nt, Human
aagggcaugccuugu

SEQ ID NO: 3859948 - RNA, 11 nt, Human
aagggccagag

SEQ ID NO: 3859949 - RNA, 14 nt, Human
aagggccagagcca

SEQ ID NO: 3859950 - RNA, 13 nt, Human
aagggccaggaga

SEQ ID NO: 3859951 - RNA, 22 nt, Human
aagggccaguccugccuggcca

SEQ ID NO: 3859952 - RNA, 18 nt, Human
aagggccagucugggcug

SEQ ID NO: 3859953 - RNA, 16 nt, Human
aagggcccagauucua

SEQ ID NO: 3859954 - RNA, 14 nt, Human
aagggcccccacau

SEQ ID NO: 3859955 - RNA, 17 nt, Human
aagggccuggccugagc

SEQ ID NO: 3859956 - RNA, 17 nt, Human
aagggcuagaaccugga

SEQ ID NO: 3859957 - RNA, 19 nt, Human
aagggcuagaaccuggaga

SEQ ID NO: 3859958 - RNA, 17 nt, Human
aagggcugaccugccuc

SEQ ID NO: 3859959 - RNA, 13 nt, Human
aagggcugcauga

SEQ ID NO: 3859960 - RNA, 15 nt, Human
aagggcugcaugaug

SEQ ID NO: 3859961 - RNA, 19 nt, Human
aagggcugccggggcagcc

SEQ ID NO: 3859962 - RNA, 21 nt, Human
aagggcuuacacguggaggaa

SEQ ID NO: 3859963 - RNA, 14 nt, Human
aagggcuuacuauu

SEQ ID NO: 3859964 - RNA, 15 nt, Human
aagggcuuacuauuu

SEQ ID NO: 3859965 - RNA, 19 nt, Human
aagggcuucugcacccucc

SEQ ID NO: 3859966 - RNA, 23 nt, Human
aagggcuucugcacccuccaccc

SEQ ID NO: 3859967 - RNA, 17 nt, Human
aaggggaauugaggaca

SEQ ID NO: 3859968 - RNA, 20 nt, Human
aaggggacaaguagccaccu

SEQ ID NO: 3859969 - RNA, 16 nt, Human
aaggggacaggccuca

SEQ ID NO: 3859970 - RNA, 16 nt, Human
aaggggacccccgccc

SEQ ID NO: 3859971 - RNA, 18 nt, Human
aaggggagagccugcugg

SEQ ID NO: 3859972 - RNA, 16 nt, Human
aaggggagcccacugu

SEQ ID NO: 3859973 - RNA, 13 nt, Human
aaggggaggaggg

SEQ ID NO: 3859974 - RNA, 18 nt, Human
aaggggaucauaaaguua

SEQ ID NO: 3859975 - RNA, 14 nt, Human
aaggggauuuuuau

SEQ ID NO: 3859976 - RNA, 14 nt, Human
aaggggcaaauuuu

SEQ ID NO: 3859977 - RNA, 20 nt, Human
aaggggcagucuggaggggc

SEQ ID NO: 3859978 - RNA, 13 nt, Human
aaggggccauccu

SEQ ID NO: 3859979 - RNA, 23 nt, Human
aaggggccauuuggcauaccuuu

SEQ ID NO: 3859980 - RNA, 22 nt, Human
aaggggcccaaauucuuucagu

SEQ ID NO: 3859981 - RNA, 14 nt, Human
aaggggcccugguc

SEQ ID NO: 3859982 - RNA, 21 nt, Human
aaggggcccugguccuuccag

SEQ ID NO: 3859983 - RNA, 15 nt, Human
aaggggcccuuggag

SEQ ID NO: 3859984 - RNA, 16 nt, Human
aaggggcccuuggagc

SEQ ID NO: 3859985 - RNA, 21 nt, Human
aaggggcccuuggagcgugga

SEQ ID NO: 3859986 - RNA, 13 nt, Human
aaggggccugagc

SEQ ID NO: 3859987 - RNA, 20 nt, Human
aaggggcggugcccacaccg

SEQ ID NO: 3859988 - RNA, 22 nt, Human
aagggggcggccuaugacuugg

SEQ ID NO: 3859989 - RNA, 12 nt, Human
aagggggcuggg

SEQ ID NO: 3859990 - RNA, 23 nt, Human
aagggggcugggacaugggaaag

SEQ ID NO: 3859991 - RNA, 15 nt, Human
aaggggggagcuggg

SEQ ID NO: 3859992 - RNA, 15 nt, Human
aaggggguagggaaa

SEQ ID NO: 3859993 - RNA, 12 nt, Human
aaggggguccca

SEQ ID NO: 3859994 - RNA, 17 nt, Human
aaggggguggugucucc

SEQ ID NO: 3859995 - RNA, 17 nt, Human
aaggggugccugggaac

SEQ ID NO: 3859996 - RNA, 13 nt, Human
aaggggugugcau

SEQ ID NO: 3859997 - RNA, 19 nt, Human
aagggguuccucaaauuuu

SEQ ID NO: 3859998 - RNA, 16 nt, Human
aagggguuggauugca

SEQ ID NO: 3859999 - RNA, 20 nt, Human
aagggguuugccauuugaua

SEQ ID NO: 3860000 - RNA, 16 nt, Human
aaggguaaacaauaua

SEQ ID NO: 3860001 - RNA, 19 nt, Human
aaggguaucaggugcugcc

SEQ ID NO: 3860002 - RNA, 22 nt, Human
aagggucagaggaccuguauuu

SEQ ID NO: 3860003 - RNA, 16 nt, Human
aagggucauagaaagg

SEQ ID NO: 3860004 - RNA, 17 nt, Human
aagggucauagaaaggg

SEQ ID NO: 3860005 - RNA, 19 nt, Human
aaggguccuucccucuccc

SEQ ID NO: 3860006 - RNA, 22 nt, Human
aagggucuagggagagacccuu

SEQ ID NO: 3860007 - RNA, 16 nt, Human
aagggucuugggaaau

SEQ ID NO: 3860008 - RNA, 21 nt, Human
aagggugaugggaaagcauug

SEQ ID NO: 3860009 - RNA, 16 nt, Human
aagggugcugcuuccc

SEQ ID NO: 3860010 - RNA, 17 nt, Human
aagggugggugcucaga

SEQ ID NO: 3860011 - RNA, 19 nt, Human
aagggugggugcucagaau

SEQ ID NO: 3860012 - RNA, 17 nt, Human
aagguaaaacaaaucag

SEQ ID NO: 3860013 - RNA, 14 nt, Human
aagguaaaaugcca

SEQ ID NO: 3860014 - RNA, 15 nt, Human
aagguaaaauucuaa

SEQ ID NO: 3860015 - RNA, 16 nt, Human
aagguaaaauucuaaa

SEQ ID NO: 3860016 - RNA, 19 nt, Human
aagguaaauaaaaagaaag

SEQ ID NO: 3860017 - RNA, 22 nt, Human
aagguacuguaugaucaaaugu

SEQ ID NO: 3860018 - RNA, 13 nt, Human
aagguacuucaaa

SEQ ID NO: 3860019 - RNA, 18 nt, Human
aagguacuuucauauuuu

SEQ ID NO: 3860020 - RNA, 19 nt, Human
aagguagaaugaccuugua

SEQ ID NO: 3860021 - RNA, 18 nt, Human
aagguagcauucuuugga

SEQ ID NO: 3860022 - RNA, 18 nt, Human
aagguagcuuaccugaca

SEQ ID NO: 3860023 - RNA, 22 nt, Human
aagguaguuuuuaccuaccaca

SEQ ID NO: 3860024 - RNA, 22 nt, Human
aagguauaucauucuaaagaua

SEQ ID NO: 3860025 - RNA, 16 nt, Human
aagguauuauacaugu

SEQ ID NO: 3860026 - RNA, 15 nt, Human
aaggucaccucacuc

SEQ ID NO: 3860027 - RNA, 18 nt, Human
aaggucaccucacucagc

SEQ ID NO: 3860028 - RNA, 22 nt, Human
aaggucaccucacucagcacca

SEQ ID NO: 3860029 - RNA, 15 nt, Human
aaggucacuguuucc

SEQ ID NO: 3860030 - RNA, 14 nt, Human
aaggucucucuuug

SEQ ID NO: 3860031 - RNA, 12 nt, Human
aaggucugcuuu

SEQ ID NO: 3860032 - RNA, 16 nt, Human
aaggucuggccucagg

SEQ ID NO: 3860033 - RNA, 21 nt, Human
uucuguaauauuuacaaugua

SEQ ID NO: 3860034 - RNA, 23 nt, Human
uucuguaauuauaucuaaaauau

SEQ ID NO: 3860035 - RNA, 11 nt, Human
uucuguaauuc

SEQ ID NO: 3860036 - RNA, 22 nt, Human
uucuguacauagccuauauuua

SEQ ID NO: 3860037 - RNA, 22 nt, Human
uucuguacaugcauugagcucu

SEQ ID NO: 3860038 - RNA, 20 nt, Human
uucuguacugauuuuuguaa

SEQ ID NO: 3860039 - RNA, 15 nt, Human
uucuguacuuccuga

SEQ ID NO: 3860040 - RNA, 17 nt, Human
uucuguacuuccugagu

SEQ ID NO: 3860041 - RNA, 18 nt, Human
uucuguacuuuuuggcau

SEQ ID NO: 3860042 - RNA, 19 nt, Human
uucuguacuuuuuggcaua

SEQ ID NO: 3860043 - RNA, 20 nt, Human
uucuguagaaaugguuguau

SEQ ID NO: 3860044 - RNA, 22 nt, Human
uucuguagaaaugguuguauua

SEQ ID NO: 3860045 - RNA, 16 nt, Human
uucuguagguuaaaaa

SEQ ID NO: 3860046 - RNA, 14 nt, Human
uucuguagucauuu

SEQ ID NO: 3860047 - RNA, 11 nt, Human
uucuguauaaa

SEQ ID NO: 3860048 - RNA, 23 nt, Human
uucuguauagacaggagaagaaa

SEQ ID NO: 3860049 - RNA, 19 nt, Human
uucuguauauaaaugggaa

SEQ ID NO: 3860050 - RNA, 21 nt, Human
uucuguauauaaaugggaaca

SEQ ID NO: 3860051 - RNA, 17 nt, Human
uucuguaucuacuuuaa

SEQ ID NO: 3860052 - RNA, 13 nt, Human
uucuguauuugaa

SEQ ID NO: 3860053 - RNA, 17 nt, Human
uucuguauuugaaagug

SEQ ID NO: 3860054 - RNA, 22 nt, Human
uucuguauuuuuuuuucuaaga

SEQ ID NO: 3860055 - RNA, 22 nt, Human
uucugucaaagucagaacaaau

SEQ ID NO: 3860056 - RNA, 23 nt, Human
uucugucaaagucagaacaaauu

SEQ ID NO: 3860057 - RNA, 24 nt, Human
uucugucagaugagaacaaagcug

SEQ ID NO: 3860058 - RNA, 22 nt, Human
uucugucaucuaccuuuucucu

SEQ ID NO: 3860059 - RNA, 16 nt, Human
uucuguccccucuucc

SEQ ID NO: 3860060 - RNA, 14 nt, Human
uucugucccuucug

SEQ ID NO: 3860061 - RNA, 17 nt, Human
uucuguccgagcuuuga

SEQ ID NO: 3860062 - RNA, 21 nt, Human
uucuguccgagcuuugaaaau

SEQ ID NO: 3860063 - RNA, 19 nt, Human
uucuguccuacucuguguc

SEQ ID NO: 3860064 - RNA, 18 nt, Human
uucuguccuggugucacu

SEQ ID NO: 3860065 - RNA, 13 nt, Human
uucugucuccagc

SEQ ID NO: 3860066 - RNA, 13 nt, Human
uucugucucugcc

SEQ ID NO: 3860067 - RNA, 19 nt, Human
uucugucucugccucccuc

SEQ ID NO: 3860068 - RNA, 21 nt, Human
uucugucucugccucccucac

SEQ ID NO: 3860069 - RNA, 17 nt, Human
uucugucuucacaacag

SEQ ID NO: 3860070 - RNA, 21 nt, Human
uucugucuucauccccucaga

SEQ ID NO: 3860071 - RNA, 17 nt, Human
uucugucuucuacagau

SEQ ID NO: 3860072 - RNA, 14 nt, Human
uucugucuuuagau

SEQ ID NO: 3860073 - RNA, 17 nt, Human
uucugugaucauuuauu

SEQ ID NO: 3860074 - RNA, 14 nt, Human
uucugugcaccugg

SEQ ID NO: 3860075 - RNA, 13 nt, Human
uucugugcagcca

SEQ ID NO: 3860076 - RNA, 16 nt, Human
uucugugcccuacuca

SEQ ID NO: 3860077 - RNA, 17 nt, Human
uucuguggaaaguguaa

SEQ ID NO: 3860078 - RNA, 18 nt, Human
uucuguggaaaguguaaa

SEQ ID NO: 3860079 - RNA, 23 nt, Human
uucuguggaaaguguaaagcauu

SEQ ID NO: 3860080 - RNA, 22 nt, Human
uucuguggaugccgauuucugu

SEQ ID NO: 3860081 - RNA, 16 nt, Human
uucuguggggccccuc

SEQ ID NO: 3860082 - RNA, 21 nt, Human
uucugugguuccucugcucac

SEQ ID NO: 3860083 - RNA, 20 nt, Human
uucugugguuuuccccuccc

SEQ ID NO: 3860084 - RNA, 17 nt, Human
uucuguguaaccauuuu

SEQ ID NO: 3860085 - RNA, 17 nt, Human
uucuguguauuuaauug

SEQ ID NO: 3860086 - RNA, 20 nt, Human
uucuguguauuuaauuguaa

SEQ ID NO: 3860087 - RNA, 22 nt, Human
uucugugucuuucacagcuccu

SEQ ID NO: 3860088 - RNA, 13 nt, Human
uucugugugaaga

SEQ ID NO: 3860089 - RNA, 18 nt, Human
uucugugugucaguuuuc

SEQ ID NO: 3860090 - RNA, 14 nt, Human
uucuguguguuccu

SEQ ID NO: 3860091 - RNA, 17 nt, Human
uucuguguuuacagaga

SEQ ID NO: 3860092 - RNA, 17 nt, Human
uucuguuaaaaucuauu

SEQ ID NO: 3860093 - RNA, 13 nt, Human
uucuguuaaaaug

SEQ ID NO: 3860094 - RNA, 13 nt, Human
uucuguuacaaaa

SEQ ID NO: 3860095 - RNA, 14 nt, Human
uucuguuacaaaau

SEQ ID NO: 3860096 - RNA, 19 nt, Human
uucuguuauauccccugcu

SEQ ID NO: 3860097 - RNA, 17 nt, Human
uucuguucauuuguuau

SEQ ID NO: 3860098 - RNA, 13 nt, Human
uucuguuccaaau

SEQ ID NO: 3860099 - RNA, 23 nt, Human
uucuguuccucucuuuuccuguu

SEQ ID NO: 3860100 - RNA, 13 nt, Human
uucuguucuaguu

SEQ ID NO: 3860101 - RNA, 11 nt, Human
uucuguucuuu

SEQ ID NO: 3860102 - RNA, 22 nt, Human
uucuguuggauuccaugcuaag

SEQ ID NO: 3860103 - RNA, 12 nt, Human
uucuguuuaacu

SEQ ID NO: 3860104 - RNA, 19 nt, Human
uucuguuuacaucaguuuu

SEQ ID NO: 3860105 - RNA, 15 nt, Human
uucuguuuccuuuuu

SEQ ID NO: 3860106 - RNA, 20 nt, Human
uucuguuucuauucucuccu

SEQ ID NO: 3860107 - RNA, 12 nt, Human
uucuguuucuca

SEQ ID NO: 3860108 - RNA, 11 nt, Human
uucuguuucuu

SEQ ID NO: 3860109 - RNA, 12 nt, Human
uucuguuucuuc

SEQ ID NO: 3860110 - RNA, 14 nt, Human
uucuguuugauucu

SEQ ID NO: 3860111 - RNA, 12 nt, Human
uucuguuuguua

SEQ ID NO: 3860112 - RNA, 17 nt, Human
uucuguuuuauaauuuu

SEQ ID NO: 3860113 - RNA, 12 nt, Human
uucuguuuucaa

SEQ ID NO: 3860114 - RNA, 13 nt, Human
uucuguuuucaau

SEQ ID NO: 3860115 - RNA, 16 nt, Human
uucuguuuugccugaa

SEQ ID NO: 3860116 - RNA, 21 nt, Human
uucuguuuugccugaaguugg

SEQ ID NO: 3860117 - RNA, 12 nt, Human
uucuguuuuguu

SEQ ID NO: 3860118 - RNA, 23 nt, Human
uucuguuuuguuuggcaaggaaa

SEQ ID NO: 3860119 - RNA, 13 nt, Human
uucuuaaaaagua

SEQ ID NO: 3860120 - RNA, 14 nt, Human
uucuuaaaaaguua

SEQ ID NO: 3860121 - RNA, 16 nt, Human
uucuuaaacacuugca

SEQ ID NO: 3860122 - RNA, 19 nt, Human
uucuuaaauaagaaacuuu

SEQ ID NO: 3860123 - RNA, 15 nt, Human
uucuuaaauaauaaa

SEQ ID NO: 3860124 - RNA, 16 nt, Human
uucuuaaauaaugcuu

SEQ ID NO: 3860125 - RNA, 14 nt, Human
uucuuaaauaucuu

SEQ ID NO: 3860126 - RNA, 13 nt, Human
uucuuaacaaccu

SEQ ID NO: 3860127 - RNA, 22 nt, Human
uucuuaaccagaucauugugaa

SEQ ID NO: 3860128 - RNA, 16 nt, Human
uucuuaacuucuugcu

SEQ ID NO: 3860129 - RNA, 21 nt, Human
uucuuaagacgugauuuugcu

SEQ ID NO: 3860130 - RNA, 16 nt, Human
uucuuaauuaauuuga

SEQ ID NO: 3860131 - RNA, 22 nt, Human
uucuuaauuaauuugauuaaca

SEQ ID NO: 3860132 - RNA, 18 nt, Human
uucuuaauuauuauaaaa

SEQ ID NO: 3860133 - RNA, 19 nt, Human
uucuuaauuauuauaaaaa

SEQ ID NO: 3860134 - RNA, 13 nt, Human
uucuuaauucuua

SEQ ID NO: 3860135 - RNA, 20 nt, Human
uucuuaauuuggaaacuaau

SEQ ID NO: 3860136 - RNA, 14 nt, Human
uucuuacaaaccau

SEQ ID NO: 3860137 - RNA, 12 nt, Human
uucuuacacaua

SEQ ID NO: 3860138 - RNA, 22 nt, Human
uucuuacacgacuaaguugaau

SEQ ID NO: 3860139 - RNA, 13 nt, Human
uucuuacagacug

SEQ ID NO: 3860140 - RNA, 16 nt, Human
uucuuacauaauuuuu

SEQ ID NO: 3860141 - RNA, 16 nt, Human
uucuuacgcaaugcuu

SEQ ID NO: 3860142 - RNA, 20 nt, Human
uucuuacuaaaaaguauaaa

SEQ ID NO: 3860143 - RNA, 16 nt, Human
uucuuacuccuccucu

SEQ ID NO: 3860144 - RNA, 19 nt, Human
uucuuacuccuccucuuuc

SEQ ID NO: 3860145 - RNA, 12 nt, Human
uucuuagaaauu

SEQ ID NO: 3860146 - RNA, 22 nt, Human
uucuuagaacaguggaaacuau

SEQ ID NO: 3860147 - RNA, 18 nt, Human
uucuuagacuuuuccaau

SEQ ID NO: 3860148 - RNA, 18 nt, Human
uucuuagauaucuuuuua

SEQ ID NO: 3860149 - RNA, 17 nt, Human
uucuuagccuguggcag

SEQ ID NO: 3860150 - RNA, 23 nt, Human
uucuuagcucaaugagcauguuu

SEQ ID NO: 3860151 - RNA, 19 nt, Human
uucuuagcuuuuuaauugu

SEQ ID NO: 3860152 - RNA, 20 nt, Human
uucuuagcuuuuuaauuguu

SEQ ID NO: 3860153 - RNA, 15 nt, Human
uucuuaguagauuuu

SEQ ID NO: 3860154 - RNA, 13 nt, Human
uucuuagugucac

SEQ ID NO: 3860155 - RNA, 13 nt, Human
uucuuaguucuca

SEQ ID NO: 3860156 - RNA, 14 nt, Human
uucuuaguugcugu

SEQ ID NO: 3860157 - RNA, 20 nt, Human
uucuuauacagauaaaacau

SEQ ID NO: 3860158 - RNA, 22 nt, Human
uucuuauaggaaagcuugagua

SEQ ID NO: 3860159 - RNA, 16 nt, Human
uucuuauauaugugaa

SEQ ID NO: 3860160 - RNA, 13 nt, Human
uugacaacaucug

SEQ ID NO: 3860161 - RNA, 16 nt, Human
uugacaacugugacug

SEQ ID NO: 3860162 - RNA, 15 nt, Human
uugacaagcuggcuu

SEQ ID NO: 3860163 - RNA, 22 nt, Human
uugacaagucauuuuaacuuua

SEQ ID NO: 3860164 - RNA, 19 nt, Human
uugacaauaaaauauuauu

SEQ ID NO: 3860165 - RNA, 14 nt, Human
uugacacaagugga

SEQ ID NO: 3860166 - RNA, 17 nt, Human
uugacacaaguggaccu

SEQ ID NO: 3860167 - RNA, 16 nt, Human
uugacacaauuggaau

SEQ ID NO: 3860168 - RNA, 11 nt, Human
uugacacauag

SEQ ID NO: 3860169 - RNA, 18 nt, Human
uugacacauccgccuuuu

SEQ ID NO: 3860170 - RNA, 21 nt, Human
uugacacauccgccuuuugua

SEQ ID NO: 3860171 - RNA, 12 nt, Human
uugacaccugcu

SEQ ID NO: 3860172 - RNA, 17 nt, Human
uugacacucugcagacu

SEQ ID NO: 3860173 - RNA, 15 nt, Human
uugacacugaaauaa

SEQ ID NO: 3860174 - RNA, 22 nt, Human
uugacacugaacuuaauaacug

SEQ ID NO: 3860175 - RNA, 16 nt, Human
uugacacugcucuaac

SEQ ID NO: 3860176 - RNA, 23 nt, Human
uugacacugcucuaacagcccuc

SEQ ID NO: 3860177 - RNA, 15 nt, Human
uugacagaacacugu

SEQ ID NO: 3860178 - RNA, 17 nt, Human
uugacagaauauguuuc

SEQ ID NO: 3860179 - RNA, 23 nt, Human
uugacagagagagauacucuggg

SEQ ID NO: 3860180 - RNA, 19 nt, Human
uugacagagccugccccag

SEQ ID NO: 3860181 - RNA, 17 nt, Human
uugacagaucaagcugu

SEQ ID NO: 3860182 - RNA, 18 nt, Human
uugacagaucaagcugug

SEQ ID NO: 3860183 - RNA, 12 nt, Human
uugacaggaggu

SEQ ID NO: 3860184 - RNA, 16 nt, Human
uugacaguaacuuggu

SEQ ID NO: 3860185 - RNA, 17 nt, Human
uugacaguucugaagaa

SEQ ID NO: 3860186 - RNA, 20 nt, Human
uugacauaacacuauaaagg

SEQ ID NO: 3860187 - RNA, 17 nt, Human
uugacauauuuaauguu

SEQ ID NO: 3860188 - RNA, 16 nt, Human
uugacaucagccagcu

SEQ ID NO: 3860189 - RNA, 13 nt, Human
uugacauguacag

SEQ ID NO: 3860190 - RNA, 14 nt, Human
uugacauugaaauc

SEQ ID NO: 3860191 - RNA, 14 nt, Human
uugacauugcguuu

SEQ ID NO: 3860192 - RNA, 13 nt, Human
uugacauuuaauu

SEQ ID NO: 3860193 - RNA, 16 nt, Human
uugaccaagcaggaag

SEQ ID NO: 3860194 - RNA, 11 nt, Human
uugaccaggcc

SEQ ID NO: 3860195 - RNA, 20 nt, Human
uugaccgcgacuaauuucaa

SEQ ID NO: 3860196 - RNA, 20 nt, Human
uugaccgugaggccagagac

SEQ ID NO: 3860197 - RNA, 22 nt, Human
uugaccucacagugacccuucc

SEQ ID NO: 3860198 - RNA, 21 nt, Human
uugaccuccucccuguuauuu

SEQ ID NO: 3860199 - RNA, 19 nt, Human
uugaccugaggcccuucuc

SEQ ID NO: 3860200 - RNA, 22 nt, Human
uugaccugaggcccuucucucc

SEQ ID NO: 3860201 - RNA, 20 nt, Human
uugacggaugauuggauuau

SEQ ID NO: 3860202 - RNA, 20 nt, Human
uugacuaacucaaauacaca

SEQ ID NO: 3860203 - RNA, 23 nt, Human
uugacuaacucaaauacacauuu

SEQ ID NO: 3860204 - RNA, 15 nt, Human
uugacuaauuuuaca

SEQ ID NO: 3860205 - RNA, 22 nt, Human
uugacuagaaaauuuaaaacau

SEQ ID NO: 3860206 - RNA, 19 nt, Human
uugacuagggauucaggcu

SEQ ID NO: 3860207 - RNA, 12 nt, Human
uugacuauuuuu

SEQ ID NO: 3860208 - RNA, 15 nt, Human
uugacucaggauuua

SEQ ID NO: 3860209 - RNA, 19 nt, Human
uugacucuggcaaagcuuu

SEQ ID NO: 3860210 - RNA, 13 nt, Human
uugacucugggga

SEQ ID NO: 3860211 - RNA, 19 nt, Human
uugacuggcugugugaccu

SEQ ID NO: 3860212 - RNA, 17 nt, Human
uugacuggguuucucug

SEQ ID NO: 3860213 - RNA, 12 nt, Human
uugacuguuuuu

SEQ ID NO: 3860214 - RNA, 19 nt, Human
uugacuguuuuuacccaua

SEQ ID NO: 3860215 - RNA, 14 nt, Human
uuuuguauguuaaa

SEQ ID NO: 3860216 - RNA, 23 nt, Human
uuuugucaaugcaguugucucug

SEQ ID NO: 3860217 - RNA, 16 nt, Human
uuuugucauauaagau

SEQ ID NO: 3860218 - RNA, 20 nt, Human
uuuugucccccaacuugaga

SEQ ID NO: 3860219 - RNA, 22 nt, Human
uuuugucgaauuuuuauuauuu

SEQ ID NO: 3860220 - RNA, 15 nt, Human
uuuugucuacacacc

SEQ ID NO: 3860221 - RNA, 12 nt, Human
uuuugucuugaa

SEQ ID NO: 3860222 - RNA, 13 nt, Human
uuuugucuugugu

SEQ ID NO: 3860223 - RNA, 17 nt, Human
uuuugucuuuaaauaga

SEQ ID NO: 3860224 - RNA, 14 nt, Human
uuuugucuuuuaug

SEQ ID NO: 3860225 - RNA, 18 nt, Human
uuuugugaaaaugucaaa

SEQ ID NO: 3860226 - RNA, 12 nt, Human
uuuugugaaauu

SEQ ID NO: 3860227 - RNA, 20 nt, Human
uuuugugaaauuuuucauau

SEQ ID NO: 3860228 - RNA, 14 nt, Human
uuuugugaagacug

SEQ ID NO: 3860229 - RNA, 14 nt, Human
uuuugugaagcaaa

SEQ ID NO: 3860230 - RNA, 14 nt, Human
uuuugugaauuagg

SEQ ID NO: 3860231 - RNA, 18 nt, Human
agcuuguaugcaauggau

SEQ ID NO: 3860232 - RNA, 19 nt, Human
agcuugugcacaauucugu

SEQ ID NO: 3860233 - RNA, 14 nt, Human
agcuuguggagccc

SEQ ID NO: 3860234 - RNA, 18 nt, Human
agcuuguggagccccaca

SEQ ID NO: 3860235 - RNA, 17 nt, Human
agcuuguugacucagcu

SEQ ID NO: 3860236 - RNA, 19 nt, Human
agcuuguuuacaugcuuau

SEQ ID NO: 3860237 - RNA, 19 nt, Human
agcuuguuuuggacuuugu

SEQ ID NO: 3860238 - RNA, 12 nt, Human
agcuuuaaauua

SEQ ID NO: 3860239 - RNA, 22 nt, Human
agcuuuaaccauuaaaacugaa

SEQ ID NO: 3860240 - RNA, 18 nt, Human
agcuuuaacuuaaauagu

SEQ ID NO: 3860241 - RNA, 19 nt, Human
agcuuuacaugcaauuuau

SEQ ID NO: 3860242 - RNA, 13 nt, Human
agcuuuacccuca

SEQ ID NO: 3860243 - RNA, 18 nt, Human
agcuuuacccucaggcau

SEQ ID NO: 3860244 - RNA, 21 nt, Human
agcuuuacuggggcuggggaa

SEQ ID NO: 3860245 - RNA, 17 nt, Human
agcuuuagacccugggu

SEQ ID NO: 3860246 - RNA, 22 nt, Human
agcuuuagacccugggugggcu

SEQ ID NO: 3860247 - RNA, 17 nt, Human
agcuuuauauauggaca

SEQ ID NO: 3860248 - RNA, 23 nt, Human
agcuuuaucaaagggugaaaauu

SEQ ID NO: 3860249 - RNA, 14 nt, Human
agcuuuaugauuuu

SEQ ID NO: 3860250 - RNA, 14 nt, Human
agcuuuauguaaua

SEQ ID NO: 3860251 - RNA, 18 nt, Human
agcuuuauguucauuugu

SEQ ID NO: 3860252 - RNA, 23 nt, Human
agcuuuauguucauuuguuuguu

SEQ ID NO: 3860253 - RNA, 15 nt, Human
agcuuucaaagcauu

SEQ ID NO: 3860254 - RNA, 17 nt, Human
agcuuucaagugccuuu

SEQ ID NO: 3860255 - RNA, 17 nt, Human
agcuuuccauguugcug

SEQ ID NO: 3860256 - RNA, 13 nt, Human
agcuuuccugccc

SEQ ID NO: 3860257 - RNA, 14 nt, Human
agcuuuccugcccc

SEQ ID NO: 3860258 - RNA, 22 nt, Human
agcuuuccugccccaggccuga

SEQ ID NO: 3860259 - RNA, 23 nt, Human
agcuuuccuguugaaugacaaag

SEQ ID NO: 3860260 - RNA, 13 nt, Human
agcuuucuccccg

SEQ ID NO: 3860261 - RNA, 13 nt, Human
agcuuucucugcu

SEQ ID NO: 3860262 - RNA, 19 nt, Human
agcuuucucugcuucagcu

SEQ ID NO: 3860263 - RNA, 17 nt, Human
agcuuucugaacagcug

SEQ ID NO: 3860264 - RNA, 20 nt, Human
agcuuucugaccuucagcuc

SEQ ID NO: 3860265 - RNA, 22 nt, Human
agcuuucuguccuuuuggcacu

SEQ ID NO: 3860266 - RNA, 22 nt, Human
agcuuucuuuuuaaagcuuuug

SEQ ID NO: 3860267 - RNA, 18 nt, Human
agcuuugaaaauucagug

SEQ ID NO: 3860268 - RNA, 19 nt, Human
agcuuugaaaauucagugg

SEQ ID NO: 3860269 - RNA, 21 nt, Human
agcuuugacucaggagccugu

SEQ ID NO: 3860270 - RNA, 22 nt, Human
agcuuugagguggaagagggcu

SEQ ID NO: 3860271 - RNA, 21 nt, Human
agcuuugcaaacccauuaagg

SEQ ID NO: 3860272 - RNA, 18 nt, Human
agcuuugcauguuccacu

SEQ ID NO: 3860273 - RNA, 22 nt, Human
agcuuugcauguuccacuaacc

SEQ ID NO: 3860274 - RNA, 19 nt, Human
agcuuugccagcugcugcu

SEQ ID NO: 3860275 - RNA, 22 nt, Human
agcuuugcccaacaccagcccc

SEQ ID NO: 3860276 - RNA, 13 nt, Human
agcuuugcucaua

SEQ ID NO: 3860277 - RNA, 19 nt, Human
agcuuugcucauauuuccc

SEQ ID NO: 3860278 - RNA, 21 nt, Human
agcuuugcucauauuucccau

SEQ ID NO: 3860279 - RNA, 13 nt, Human
agcuuugcugcug

SEQ ID NO: 3860280 - RNA, 20 nt, Human
agcuuugcuucucucucuaa

SEQ ID NO: 3860281 - RNA, 12 nt, Human
agcuuuggacac

SEQ ID NO: 3860282 - RNA, 14 nt, Human
agcuuuggacacac

SEQ ID NO: 3860283 - RNA, 19 nt, Human
agcuuuggacccaaggaaa

SEQ ID NO: 3860284 - RNA, 14 nt, Human
agcuuuggacgcac

SEQ ID NO: 3860285 - RNA, 19 nt, Human
agcuuuggacgcacacagc

SEQ ID NO: 3860286 - RNA, 20 nt, Human
agcuuuggcuaugagggccu

SEQ ID NO: 3860287 - RNA, 16 nt, Human
agcuuuguccccugcu

SEQ ID NO: 3860288 - RNA, 17 nt, Human
agcuuuguccccugcuu

SEQ ID NO: 3860289 - RNA, 20 nt, Human
agcuuuguccccugcuucag

SEQ ID NO: 3860290 - RNA, 19 nt, Human
agcuuugucguauuuggca

SEQ ID NO: 3860291 - RNA, 21 nt, Human
agcuuugugacuguauauaaa

SEQ ID NO: 3860292 - RNA, 12 nt, Human
agcuuuguguuu

SEQ ID NO: 3860293 - RNA, 19 nt, Human
agcuuuguuucaaccaagu

SEQ ID NO: 3860294 - RNA, 13 nt, Human
agcuuuguuuguu

SEQ ID NO: 3860295 - RNA, 21 nt, Human
agcuuuguuuguugucagcug

SEQ ID NO: 3860296 - RNA, 12 nt, Human
agcuuuuaaaaa

SEQ ID NO: 3860297 - RNA, 16 nt, Human
agcuuuuaaaagauuu

SEQ ID NO: 3860298 - RNA, 18 nt, Human
agcuuuuaguacccaccu

SEQ ID NO: 3860299 - RNA, 15 nt, Human
agcuuuuaugugaaa

SEQ ID NO: 3860300 - RNA, 15 nt, Human
agcuuuuauuguaua

SEQ ID NO: 3860301 - RNA, 20 nt, Human
agcuuuucaaacaagaaugu

SEQ ID NO: 3860302 - RNA, 14 nt, Human
agcuuuucaccuuu

SEQ ID NO: 3860303 - RNA, 14 nt, Human
agcuuuucauugcu

SEQ ID NO: 3860304 - RNA, 13 nt, Human
agcuuuucccuuc

SEQ ID NO: 3860305 - RNA, 16 nt, Human
agcuuuucccuucuuu

SEQ ID NO: 3860306 - RNA, 18 nt, Human
agcuuuugaauaaaaacu

SEQ ID NO: 3860307 - RNA, 12 nt, Human
agcuuuugcaua

SEQ ID NO: 3860308 - RNA, 15 nt, Human
agcuuuuuaaaacau

SEQ ID NO: 3860309 - RNA, 15 nt, Human
agcuuuuuaauuguu

SEQ ID NO: 3860310 - RNA, 19 nt, Human
agcuuuuuucucugauaca

SEQ ID NO: 3860311 - RNA, 14 nt, Human
agcuuuuuucuuua

SEQ ID NO: 3860312 - RNA, 22 nt, Human
agcuuuuuuuuuuuaauuuugu

SEQ ID NO: 3860313 - RNA, 13 nt, Human
aggaaaaaaacuu

SEQ ID NO: 3860314 - RNA, 21 nt, Human
aggaaaaaaacuuuuauaaau

SEQ ID NO: 3860315 - RNA, 13 nt, Human
aggaaaaaaagac

SEQ ID NO: 3860316 - RNA, 23 nt, Human
aggaaaaaauguuggauuuauaa

SEQ ID NO: 3860317 - RNA, 17 nt, Human
aggaaaaacacaagcaa

SEQ ID NO: 3860318 - RNA, 19 nt, Human
aggaaaaacacaagcaaaa

SEQ ID NO: 3860319 - RNA, 13 nt, Human
aggaaaaacaggu

SEQ ID NO: 3860320 - RNA, 13 nt, Human
aggaaaaacugau

SEQ ID NO: 3860321 - RNA, 16 nt, Human
aggaaaaagaacuucc

SEQ ID NO: 3860322 - RNA, 12 nt, Human
aggaaaaagcuc

SEQ ID NO: 3860323 - RNA, 12 nt, Human
aggaaaaaggac

SEQ ID NO: 3860324 - RNA, 14 nt, Human
aggaaaaaggacag

SEQ ID NO: 3860325 - RNA, 17 nt, Human
aggaaaaauaugugaag

SEQ ID NO: 3860326 - RNA, 14 nt, Human
aggaaaaaugugua

SEQ ID NO: 3860327 - RNA, 19 nt, Human
aggaaaaccaagccguggc

SEQ ID NO: 3860328 - RNA, 22 nt, Human
aggaaaaccaagccguggcuuc

SEQ ID NO: 3860329 - RNA, 16 nt, Human
aggaaaaccugaagac

SEQ ID NO: 3860330 - RNA, 20 nt, Human
aggaaaacugcauggagacg

SEQ ID NO: 3860331 - RNA, 14 nt, Human
aggaaaagaaaaaa

SEQ ID NO: 3860332 - RNA, 12 nt, Human
aggaaaagaaau

SEQ ID NO: 3860333 - RNA, 14 nt, Human
aggaaaagccucug

SEQ ID NO: 3860334 - RNA, 16 nt, Human
aggaaaagcugcugac

SEQ ID NO: 3860335 - RNA, 13 nt, Human
aggaaaaggccug

SEQ ID NO: 3860336 - RNA, 15 nt, Human
aggaaaaggccuggg

SEQ ID NO: 3860337 - RNA, 16 nt, Human
aggaaaaggccugggg

SEQ ID NO: 3860338 - RNA, 17 nt, Human
aggaaaaggccuggggu

SEQ ID NO: 3860339 - RNA, 18 nt, Human
aggaaaaggccuggggug

SEQ ID NO: 3860340 - RNA, 21 nt, Human
aggaaaaggugauauccauuc

SEQ ID NO: 3860341 - RNA, 16 nt, Human
aggaaaaguacauuua

SEQ ID NO: 3860342 - RNA, 18 nt, Human
aggaagguuuucuccacu

SEQ ID NO: 3860343 - RNA, 15 nt, Human
aggaaguagaaacaa

SEQ ID NO: 3860344 - RNA, 16 nt, Human
aggaaguagcacaggc

SEQ ID NO: 3860345 - RNA, 18 nt, Human
aggaagucuaggagcugg

SEQ ID NO: 3860346 - RNA, 17 nt, Human
aggaagugaaaauaggu

SEQ ID NO: 3860347 - RNA, 15 nt, Human
aggaagugcccccuc

SEQ ID NO: 3860348 - RNA, 17 nt, Human
aggaaguguaacagcug

SEQ ID NO: 3860349 - RNA, 21 nt, Human
aggaaguguugaagggaggug

SEQ ID NO: 3860350 - RNA, 22 nt, Human
aggaaguugacuuauaguacau

SEQ ID NO: 3860351 - RNA, 23 nt, Human
aggaaguugacuuauaguacaug

SEQ ID NO: 3860352 - RNA, 16 nt, Human
aggaaguuuucuguag

SEQ ID NO: 3860353 - RNA, 13 nt, Human
aggaauaaauaaa

SEQ ID NO: 3860354 - RNA, 15 nt, Human
aggaauacaauauau

SEQ ID NO: 3860355 - RNA, 17 nt, Human
aggaauauaugugugcc

SEQ ID NO: 3860356 - RNA, 17 nt, Human
aggaauauuauauuugg

SEQ ID NO: 3860357 - RNA, 22 nt, Human
aggaauauuauauuuggaugca

SEQ ID NO: 3860358 - RNA, 15 nt, Human
aggaaucaacagggc

SEQ ID NO: 3860359 - RNA, 17 nt, Human
aggaaucaacagggcag

SEQ ID NO: 3860360 - RNA, 19 nt, Human
aggaaucaagagcugcccu

SEQ ID NO: 3860361 - RNA, 21 nt, Human
aggaaucaagagcugcccucc

SEQ ID NO: 3860362 - RNA, 19 nt, Human
aggaaucacguuagaggaa

SEQ ID NO: 3860363 - RNA, 18 nt, Human
aggaaucacucuugugga

SEQ ID NO: 3860364 - RNA, 13 nt, Human
aggaauccuggca

SEQ ID NO: 3860365 - RNA, 15 nt, Human
aggaauccuggcagc

SEQ ID NO: 3860366 - RNA, 13 nt, Human
aggaaucuuuaag

SEQ ID NO: 3860367 - RNA, 16 nt, Human
aggaaucuuuaagcag

SEQ ID NO: 3860368 - RNA, 23 nt, Human
aggaaugaaauccugcuucagug

SEQ ID NO: 3860369 - RNA, 15 nt, Human
aggaaugcaaagaug

SEQ ID NO: 3860370 - RNA, 24 nt, Human
aggaaugccuccucccugggcaga

SEQ ID NO: 3860371 - RNA, 16 nt, Human
aggaaugccuguguga

SEQ ID NO: 3860372 - RNA, 22 nt, Human
aggaaugcuaacaguucacuug

SEQ ID NO: 3860373 - RNA, 12 nt, Human
aggaaugcuccc

SEQ ID NO: 3860374 - RNA, 14 nt, Human
aggaaugcuccccc

SEQ ID NO: 3860375 - RNA, 22 nt, Human
aggaaugcucccccauccuccc

SEQ ID NO: 3860376 - RNA, 15 nt, Human
aggaaugcuggacug

SEQ ID NO: 3860377 - RNA, 16 nt, Human
aggaaugcuggacugg

SEQ ID NO: 3860378 - RNA, 21 nt, Human
aggaaugggggccucuucaaa

SEQ ID NO: 3860379 - RNA, 18 nt, Human
aggaauguagcugguuuc

SEQ ID NO: 3860380 - RNA, 17 nt, Human
aggaauuaaguuaucuu

SEQ ID NO: 3860381 - RNA, 22 nt, Human
aggaauucccagcccaaagcug

SEQ ID NO: 3860382 - RNA, 20 nt, Human
aggaauuccccaaagaaugu

SEQ ID NO: 3860383 - RNA, 17 nt, Human
aggaauucuguauagau

SEQ ID NO: 3860384 - RNA, 22 nt, Human
aggaauuucaccuguaaaccug

SEQ ID NO: 3860385 - RNA, 17 nt, Human
aggaauuucccaggacc

SEQ ID NO: 3860386 - RNA, 20 nt, Human
aggaauuucccaggacccug

SEQ ID NO: 3860387 - RNA, 13 nt, Human
aggaauuucuuaa

SEQ ID NO: 3860388 - RNA, 19 nt, Human
aggaauuucuuaacuucuu

SEQ ID NO: 3860389 - RNA, 14 nt, Human
aggaauuuuaaaaa

SEQ ID NO: 3860390 - RNA, 22 nt, Human
aggaauuuuauuuuuuucugaa

SEQ ID NO: 3860391 - RNA, 19 nt, Human
aggaauuuucuccaauuuu

SEQ ID NO: 3860392 - RNA, 12 nt, Human
aggacaaaacuu

SEQ ID NO: 3860393 - RNA, 20 nt, Human
aggacaaagugccaaagaaa

SEQ ID NO: 3860394 - RNA, 18 nt, Human
aggacaaauugagacagu

SEQ ID NO: 3860395 - RNA, 17 nt, Human
aggacaacgaggaagcc

SEQ ID NO: 3860396 - RNA, 16 nt, Human
aggacaauacuggggu

SEQ ID NO: 3860397 - RNA, 23 nt, Human
aggacaaucaguccccucccauc

SEQ ID NO: 3860398 - RNA, 16 nt, Human
aggacaauuucaaaaa

SEQ ID NO: 3860399 - RNA, 13 nt, Human
aggacacaggccu

SEQ ID NO: 3860400 - RNA, 16 nt, Human
aggacacaggccugug

SEQ ID NO: 3860401 - RNA, 11 nt, Human
aggacacaugu

SEQ ID NO: 3860402 - RNA, 13 nt, Human
aggacacaugucc

SEQ ID NO: 3860403 - RNA, 17 nt, Human
aggacaccacacccagc

SEQ ID NO: 3860404 - RNA, 18 nt, Human
aggacaccacacccagcc

SEQ ID NO: 3860405 - RNA, 19 nt, Human
aggacacuaaccacgcugg

SEQ ID NO: 3860406 - RNA, 17 nt, Human
aggacacugauaugggu

SEQ ID NO: 3860407 - RNA, 17 nt, Human
aggacacugcagaacag

SEQ ID NO: 3860408 - RNA, 14 nt, Human
aggacacuuccgua

SEQ ID NO: 3860409 - RNA, 17 nt, Human
aggacagaaggcuccug

SEQ ID NO: 3860410 - RNA, 19 nt, Human
aggacagaaggcuccugcc

SEQ ID NO: 3860411 - RNA, 19 nt, Human
aggacagauccagggacug

SEQ ID NO: 3860412 - RNA, 16 nt, Human
aggacagaugccuccu

SEQ ID NO: 3860413 - RNA, 20 nt, Human
aggacagaugccuccuuccu

SEQ ID NO: 3860414 - RNA, 23 nt, Human
aggacagcccuucuuuccacaga

SEQ ID NO: 3860415 - RNA, 12 nt, Human
aggacaggcccg

SEQ ID NO: 3860416 - RNA, 20 nt, Human
aggacaggcugcggccccuc

SEQ ID NO: 3860417 - RNA, 22 nt, Human
aggacagggaggugaccccagg

SEQ ID NO: 3860418 - RNA, 16 nt, Human
aggacagugcuucagc

SEQ ID NO: 3860419 - RNA, 17 nt, Human
aggacagugcuucagcc

SEQ ID NO: 3860420 - RNA, 21 nt, Human
aggacagugcuucagccugag

SEQ ID NO: 3860421 - RNA, 22 nt, Human
aggacagugcuucagccugagg

SEQ ID NO: 3860422 - RNA, 15 nt, Human
aggacauaauggggu

SEQ ID NO: 3860423 - RNA, 24 nt, Human
aggacauaaugggguccuggccau

SEQ ID NO: 3860424 - RNA, 13 nt, Human
aggacaucagcaa

SEQ ID NO: 3860425 - RNA, 15 nt, Human
aggacaucagcaaac

SEQ ID NO: 3860426 - RNA, 22 nt, Human
aggacaucagcaaacaggauca

SEQ ID NO: 3860427 - RNA, 21 nt, Human
aggacaugauggagcgcaccu

SEQ ID NO: 3860428 - RNA, 21 nt, Human
aggacaugcaauaaaauuuaa

SEQ ID NO: 3860429 - RNA, 16 nt, Human
aggacauguuuuuguu

SEQ ID NO: 3860430 - RNA, 23 nt, Human
aggacauguuuuuguuuucuuug

SEQ ID NO: 3860431 - RNA, 16 nt, Human
aggacauuaugugugc

SEQ ID NO: 3860432 - RNA, 17 nt, Human
aggacauuaugugugca

SEQ ID NO: 3860433 - RNA, 15 nt, Human
aggacauugcggaca

SEQ ID NO: 3860434 - RNA, 18 nt, Human
aggacauugcggacagcc

SEQ ID NO: 3860435 - RNA, 19 nt, Human
aggacauugcggacagcca

SEQ ID NO: 3860436 - RNA, 15 nt, Human
aggacauuucccagg

SEQ ID NO: 3860437 - RNA, 19 nt, Human
aggaccaacaagggcagug

SEQ ID NO: 3860438 - RNA, 14 nt, Human
aggaccacaggcuc

SEQ ID NO: 3860439 - RNA, 20 nt, Human
aggaccacaggcucaggcag

SEQ ID NO: 3860440 - RNA, 15 nt, Human
aggaccacucagccc

SEQ ID NO: 3860441 - RNA, 12 nt, Human
aggaccagaagc

SEQ ID NO: 3860442 - RNA, 16 nt, Human
aggaccagaagcuccc

SEQ ID NO: 3860443 - RNA, 22 nt, Human
aggaccagaagcucccccagca

SEQ ID NO: 3860444 - RNA, 13 nt, Human
aggaccagcccac

SEQ ID NO: 3860445 - RNA, 15 nt, Human
aggaccagcucagga

SEQ ID NO: 3860446 - RNA, 23 nt, Human
aggaccagcucaggacagaugcc

SEQ ID NO: 3860447 - RNA, 14 nt, Human
aggaccagcugggg

SEQ ID NO: 3860448 - RNA, 15 nt, Human
aggaccagcuggggc

SEQ ID NO: 3860449 - RNA, 19 nt, Human
aggaccagcuggggcgugg

SEQ ID NO: 3860450 - RNA, 17 nt, Human
aggaccaggacucccuc

SEQ ID NO: 3860451 - RNA, 18 nt, Human
aggaccaggacucccucc

SEQ ID NO: 3860452 - RNA, 13 nt, Human
aggaccagggccu

SEQ ID NO: 3860453 - RNA, 15 nt, Human
aggaccagggccuuu

SEQ ID NO: 3860454 - RNA, 20 nt, Human
aggaccagggccuuuucugg

SEQ ID NO: 3860455 - RNA, 19 nt, Human
aggaccagucaaccugggc

SEQ ID NO: 3860456 - RNA, 20 nt, Human
aggaccagucaaccugggca

SEQ ID NO: 3860457 - RNA, 17 nt, Human
aggaccagucccagagc

SEQ ID NO: 3860458 - RNA, 14 nt, Human
aggacccagaccca

SEQ ID NO: 3860459 - RNA, 15 nt, Human
aggacccagaggaag

SEQ ID NO: 3860460 - RNA, 14 nt, Human
aggacccaggaaag

SEQ ID NO: 3860461 - RNA, 13 nt, Human
aggacccagggcu

SEQ ID NO: 3860462 - RNA, 14 nt, Human
aggacccagggcuc

SEQ ID NO: 3860463 - RNA, 13 nt, Human
aggacccccuucc

SEQ ID NO: 3860464 - RNA, 15 nt, Human
aggaccccucaccuu

SEQ ID NO: 3860465 - RNA, 20 nt, Human
aggaccccugcaguuccccu

SEQ ID NO: 3860466 - RNA, 18 nt, Human
aggacccggaggggccug

SEQ ID NO: 3860467 - RNA, 22 nt, Human
aggacccggaggggccuggcag

SEQ ID NO: 3860468 - RNA, 16 nt, Human
aggacccucgcuggcc

SEQ ID NO: 3860469 - RNA, 18 nt, Human
aggacccucgcuggcccc

SEQ ID NO: 3860470 - RNA, 13 nt, Human
aggacccugccag

SEQ ID NO: 3860471 - RNA, 16 nt, Human
aggacccugccaggca

SEQ ID NO: 3860472 - RNA, 17 nt, Human
aggacccuggacccagc

SEQ ID NO: 3860473 - RNA, 20 nt, Human
aggacccuucccuugagccc

SEQ ID NO: 3860474 - RNA, 22 nt, Human
aggacccuucccuugagcccuc

SEQ ID NO: 3860475 - RNA, 16 nt, Human
aggaccuauguuugcu

SEQ ID NO: 3860476 - RNA, 14 nt, Human
aggaccucagguga

SEQ ID NO: 3860477 - RNA, 16 nt, Human
aggaccucccuuccga

SEQ ID NO: 3860478 - RNA, 20 nt, Human
aggaccucugaaacccugga

SEQ ID NO: 3860479 - RNA, 11 nt, Human
aggaccucugg

SEQ ID NO: 3860480 - RNA, 12 nt, Human
aggaccucuggg

SEQ ID NO: 3860481 - RNA, 17 nt, Human
aggaccugaaauuccaa

SEQ ID NO: 3860482 - RNA, 18 nt, Human
aggaccugaaauuccaaa

SEQ ID NO: 3860483 - RNA, 19 nt, Human
aggaccugagccugccgag

SEQ ID NO: 3860484 - RNA, 13 nt, Human
aggaccugccugu

SEQ ID NO: 3860485 - RNA, 13 nt, Human
aggaccuggcugc

SEQ ID NO: 3860486 - RNA, 16 nt, Human
aggaccuggcugccau

SEQ ID NO: 3860487 - RNA, 18 nt, Human
aggagccugugaacccag

SEQ ID NO: 3860488 - RNA, 19 nt, Human
aggagccugugaacccagg

SEQ ID NO: 3860489 - RNA, 21 nt, Human
aggagccugugaacccaggac

SEQ ID NO: 3860490 - RNA, 13 nt, Human
aggagccugugac

SEQ ID NO: 3860491 - RNA, 15 nt, Human
aggagcgagcauguc

SEQ ID NO: 3860492 - RNA, 14 nt, Human
aggagcgcucccuu

SEQ ID NO: 3860493 - RNA, 22 nt, Human
aggagcgcucccuugaccugcu

SEQ ID NO: 3860494 - RNA, 16 nt, Human
aggagcgggaccugug

SEQ ID NO: 3860495 - RNA, 18 nt, Human
aggagcgggaccuguggc

SEQ ID NO: 3860496 - RNA, 14 nt, Human
aggagcuaaggcuc

SEQ ID NO: 3860497 - RNA, 16 nt, Human
aggagcuaaggcucua

SEQ ID NO: 3860498 - RNA, 12 nt, Human
aggagcuaccug

SEQ ID NO: 3860499 - RNA, 18 nt, Human
aggagcuaccugugugga

SEQ ID NO: 3860500 - RNA, 22 nt, Human
aggagcuaccuguguggacagg

SEQ ID NO: 3860501 - RNA, 22 nt, Human
aggagcuccaguguccugagcu

SEQ ID NO: 3860502 - RNA, 21 nt, Human
aggagcuccccuccccaacug

SEQ ID NO: 3860503 - RNA, 21 nt, Human
aggagcucuucaggccucccu

SEQ ID NO: 3860504 - RNA, 22 nt, Human
aggagcugacucacaccugaac

SEQ ID NO: 3860505 - RNA, 18 nt, Human
aggagcugagaauagaag

SEQ ID NO: 3860506 - RNA, 22 nt, Human
aggagcugagaauagaaggaaa

SEQ ID NO: 3860507 - RNA, 12 nt, Human
aggagcugccug

SEQ ID NO: 3860508 - RNA, 15 nt, Human
aggagcugccuggac

SEQ ID NO: 3860509 - RNA, 21 nt, Human
aggagcugccuuggcucagac

SEQ ID NO: 3860510 - RNA, 23 nt, Human
aggagcugccuuggcucagacau

SEQ ID NO: 3860511 - RNA, 21 nt, Human
aggagcugcuauagccugggg

SEQ ID NO: 3860512 - RNA, 14 nt, Human
aggagcugcuggcu

SEQ ID NO: 3860513 - RNA, 17 nt, Human
aggagcugggaggaaaa

SEQ ID NO: 3860514 - RNA, 20 nt, Human
aggagcugucaccaaggaaa

SEQ ID NO: 3860515 - RNA, 21 nt, Human
aggagcugucaccaaggaaac

SEQ ID NO: 3860516 - RNA, 18 nt, Human
aggagcuuaccucccacc

SEQ ID NO: 3860517 - RNA, 11 nt, Human
aggagcuuccu

SEQ ID NO: 3860518 - RNA, 13 nt, Human
aggagcuucucug

SEQ ID NO: 3860519 - RNA, 20 nt, Human
aggagcuucuuguuuccuug

SEQ ID NO: 3860520 - RNA, 19 nt, Human
aggagcuuugacucaggag

SEQ ID NO: 3860521 - RNA, 17 nt, Human
aggaggaaaucccuuca

SEQ ID NO: 3860522 - RNA, 18 nt, Human
aggaggaauacugaacau

SEQ ID NO: 3860523 - RNA, 23 nt, Human
aggaggaaucaugucaggccugu

SEQ ID NO: 3860524 - RNA, 22 nt, Human
aggaggaaugcuggacuggagg

SEQ ID NO: 3860525 - RNA, 22 nt, Human
aggaggacaauucaugaacuuc

SEQ ID NO: 3860526 - RNA, 15 nt, Human
aggaggacccaggac

SEQ ID NO: 3860527 - RNA, 17 nt, Human
aggaggacccaggacag

SEQ ID NO: 3860528 - RNA, 18 nt, Human
aggaggacccagggcucu

SEQ ID NO: 3860529 - RNA, 16 nt, Human
aggaggagagggaaaa

SEQ ID NO: 3860530 - RNA, 20 nt, Human
aggaggagccuguccugccu

SEQ ID NO: 3860531 - RNA, 21 nt, Human
aggaggagccuguccugccug

SEQ ID NO: 3860532 - RNA, 12 nt, Human
aggaggaggagg

SEQ ID NO: 3860533 - RNA, 18 nt, Human
aggaggaggugccaacag

SEQ ID NO: 3860534 - RNA, 22 nt, Human
aggaggaugggcucgcccacca

SEQ ID NO: 3860535 - RNA, 22 nt, Human
aggaggcagaaagcagaggcug

SEQ ID NO: 3860536 - RNA, 14 nt, Human
aggaggcagagaag

SEQ ID NO: 3860537 - RNA, 20 nt, Human
aggaggcaggcauggcccug

SEQ ID NO: 3860538 - RNA, 11 nt, Human
aggaggccacc

SEQ ID NO: 3860539 - RNA, 13 nt, Human
aggaggccaccuc

SEQ ID NO: 3860540 - RNA, 23 nt, Human
aggaggccaccucuccaagggcu

SEQ ID NO: 3860541 - RNA, 22 nt, Human
aggaggccaggccggcgagccc

SEQ ID NO: 3860542 - RNA, 17 nt, Human
aggaggccuccaucuca

SEQ ID NO: 3860543 - RNA, 21 nt, Human
aggaggccuugggcucugcug

SEQ ID NO: 3860544 - RNA, 20 nt, Human
aggaggcuaugcucaggggc

SEQ ID NO: 3860545 - RNA, 16 nt, Human
aggaggcuccagaggg

SEQ ID NO: 3860546 - RNA, 19 nt, Human
aggaggcuccagagggcac

SEQ ID NO: 3860547 - RNA, 17 nt, Human
aggaggcugaggcagaa

SEQ ID NO: 3860548 - RNA, 17 nt, Human
aggaggcugaggcagga

SEQ ID NO: 3860549 - RNA, 13 nt, Human
aggaggcugaggu

SEQ ID NO: 3860550 - RNA, 18 nt, Human
aggaggcuggaggaaggg

SEQ ID NO: 3860551 - RNA, 13 nt, Human
aggaggcuggcug

SEQ ID NO: 3860552 - RNA, 18 nt, Human
aggagggacaaaggagcc

SEQ ID NO: 3860553 - RNA, 22 nt, Human
aggagggacaaaggagccugug

SEQ ID NO: 3860554 - RNA, 23 nt, Human
aggagggacaaaggagccuguga

SEQ ID NO: 3860555 - RNA, 19 nt, Human
aggagggacugucgcugcu

SEQ ID NO: 3860556 - RNA, 12 nt, Human
aggagggagagg

SEQ ID NO: 3860557 - RNA, 21 nt, Human
aggagggagcaucagugcccu

SEQ ID NO: 3860558 - RNA, 15 nt, Human
aggagggagggggcu

SEQ ID NO: 3860559 - RNA, 15 nt, Human
aggagggaggugcuu

SEQ ID NO: 3860560 - RNA, 14 nt, Human
aggagggcagcaga

SEQ ID NO: 3860561 - RNA, 22 nt, Human
aggagggcauccauaccagcuc

SEQ ID NO: 3860562 - RNA, 17 nt, Human
aggagggcguucuuagg

SEQ ID NO: 3860563 - RNA, 20 nt, Human
aggaggggaacacugcccuc

SEQ ID NO: 3860564 - RNA, 16 nt, Human
aggaggggaagaggcc

SEQ ID NO: 3860565 - RNA, 17 nt, Human
aggagggggccgggcgc

SEQ ID NO: 3860566 - RNA, 17 nt, Human
aggaggggggagggaag

SEQ ID NO: 3860567 - RNA, 14 nt, Human
aggagggucaggaa

SEQ ID NO: 3860568 - RNA, 17 nt, Human
aggagggucaggaagga

SEQ ID NO: 3860569 - RNA, 15 nt, Human
aggagggugggaagg

SEQ ID NO: 3860570 - RNA, 14 nt, Human
aggaggugccugga

SEQ ID NO: 3860571 - RNA, 20 nt, Human
aggagguggaggcugcagug

SEQ ID NO: 3860572 - RNA, 18 nt, Human
aggagguggcagcccugu

SEQ ID NO: 3860573 - RNA, 20 nt, Human
aggagguggcagcccuguag

SEQ ID NO: 3860574 - RNA, 23 nt, Human
aggaggugucucaggcugccuga

SEQ ID NO: 3860575 - RNA, 19 nt, Human
aggagguuggagggaaagc

SEQ ID NO: 3860576 - RNA, 23 nt, Human
aggagguuuggggucugccacca

SEQ ID NO: 3860577 - RNA, 19 nt, Human
aggaguaacaauacaaaug

SEQ ID NO: 3860578 - RNA, 18 nt, Human
aggaguacaggugaagca

SEQ ID NO: 3860579 - RNA, 15 nt, Human
aggaguagcugagcu

SEQ ID NO: 3860580 - RNA, 18 nt, Human
aggaguaugcagggagcu

SEQ ID NO: 3860581 - RNA, 15 nt, Human
aggagucacugagac

SEQ ID NO: 3860582 - RNA, 14 nt, Human
aggagucagagaga

SEQ ID NO: 3860583 - RNA, 20 nt, Human
aggaguccacuuuguuucgu

SEQ ID NO: 3860584 - RNA, 16 nt, Human
aggagucugagguccu

SEQ ID NO: 3860585 - RNA, 18 nt, Human
aggagucugagguccuga

SEQ ID NO: 3860586 - RNA, 20 nt, Human
aggagucugagguccugagc

SEQ ID NO: 3860587 - RNA, 24 nt, Human
aggagucugcacaugcagcugcac

SEQ ID NO: 3860588 - RNA, 21 nt, Human
aggagugaaacaucauagaaa

SEQ ID NO: 3860589 - RNA, 14 nt, Human
aggagugagaucau

SEQ ID NO: 3860590 - RNA, 13 nt, Human
aggagugagcacu

SEQ ID NO: 3860591 - RNA, 21 nt, Human
aggagugccguguguugcaug

SEQ ID NO: 3860592 - RNA, 20 nt, Human
aggagugcguggcccaccag

SEQ ID NO: 3860593 - RNA, 22 nt, Human
aggagugcguggcccaccaggc

SEQ ID NO: 3860594 - RNA, 15 nt, Human
aggagugggugggga

SEQ ID NO: 3860595 - RNA, 18 nt, Human
aggaguggugcagacaga

SEQ ID NO: 3860596 - RNA, 13 nt, Human
aggagugugugug

SEQ ID NO: 3860597 - RNA, 22 nt, Human
aggaguucaagaccagccuggc

SEQ ID NO: 3860598 - RNA, 13 nt, Human
aggaguucaauga

SEQ ID NO: 3860599 - RNA, 15 nt, Human
aggaguucaaugauc

SEQ ID NO: 3860600 - RNA, 16 nt, Human
aggaguucaaugaucu

SEQ ID NO: 3860601 - RNA, 19 nt, Human
aggaguucaaugaucuagg

SEQ ID NO: 3860602 - RNA, 19 nt, Human
aggaguuccuaaccagccu

SEQ ID NO: 3860603 - RNA, 16 nt, Human
aggaguucgagaccag

SEQ ID NO: 3860604 - RNA, 23 nt, Human
aggaguucgaguuacagccuggg

SEQ ID NO: 3860605 - RNA, 14 nt, Human
aggaguucugcuca

SEQ ID NO: 3860606 - RNA, 21 nt, Human
aggaguuuaagaccagccugg

SEQ ID NO: 3860607 - RNA, 14 nt, Human
aggaguuuauguuc

SEQ ID NO: 3860608 - RNA, 23 nt, Human
aggaguuuauguuccauuaaacg

SEQ ID NO: 3860609 - RNA, 20 nt, Human
aggaguuuccuaaaaguuca

SEQ ID NO: 3860610 - RNA, 19 nt, Human
aggaguuugagaccagccu

SEQ ID NO: 3860611 - RNA, 14 nt, Human
aggaguuuggagga

SEQ ID NO: 3860612 - RNA, 21 nt, Human
aggauaaaaagccagggcugg

SEQ ID NO: 3860613 - RNA, 21 nt, Human
aggauacaaaagcaugugaga

SEQ ID NO: 3860614 - RNA, 14 nt, Human
aggauacaugugcc

SEQ ID NO: 3860615 - RNA, 20 nt, Human
aggauacgacaguacacugu

SEQ ID NO: 3860616 - RNA, 15 nt, Human
aggauacugccuccc

SEQ ID NO: 3860617 - RNA, 18 nt, Human
aggauacugccuccccca

SEQ ID NO: 3860618 - RNA, 16 nt, Human
aggauacuuauuuaaa

SEQ ID NO: 3860619 - RNA, 23 nt, Human
aggauagaaguauaccugauuuu

SEQ ID NO: 3860620 - RNA, 14 nt, Human
aggauagaugcugg

SEQ ID NO: 3860621 - RNA, 15 nt, Human
aggauagaugcuggc

SEQ ID NO: 3860622 - RNA, 20 nt, Human
aggauagaugcuggcccagg

SEQ ID NO: 3860623 - RNA, 17 nt, Human
aggauagcuaacuguaa

SEQ ID NO: 3860624 - RNA, 20 nt, Human
aggauagcuaacuguaaauc

SEQ ID NO: 3860625 - RNA, 14 nt, Human
aggauaguauuuuu

SEQ ID NO: 3860626 - RNA, 14 nt, Human
aggauauauuuuca

SEQ ID NO: 3860627 - RNA, 17 nt, Human
aggauauccuuaucaga

SEQ ID NO: 3860628 - RNA, 22 nt, Human
aggauauccuuaucagagcuaa

SEQ ID NO: 3860629 - RNA, 21 nt, Human
aggauaucggcauuuguuucu

SEQ ID NO: 3860630 - RNA, 14 nt, Human
aggauauuuaagaa

SEQ ID NO: 3860631 - RNA, 16 nt, Human
aggauauuuaagaaaa

SEQ ID NO: 3860632 - RNA, 18 nt, Human
aggaucacagugcugaga

SEQ ID NO: 3860633 - RNA, 14 nt, Human
aggaucacuggagc

SEQ ID NO: 3860634 - RNA, 15 nt, Human
aggaucacuggagcc

SEQ ID NO: 3860635 - RNA, 16 nt, Human
aggaucacuggagccc

SEQ ID NO: 3860636 - RNA, 18 nt, Human
aggaucacuggagcccag

SEQ ID NO: 3860637 - RNA, 19 nt, Human
aggaucacuggagcccagg

SEQ ID NO: 3860638 - RNA, 16 nt, Human
aggaucagauugcaug

SEQ ID NO: 3860639 - RNA, 15 nt, Human
aggaucaguuaacua

SEQ ID NO: 3860640 - RNA, 17 nt, Human
aggaucaguuaacuauu

SEQ ID NO: 3860641 - RNA, 23 nt, Human
aggaucaguuaacuauugcauuu

SEQ ID NO: 3860642 - RNA, 22 nt, Human
aggaucaguuuuuuguuuuaca

SEQ ID NO: 3860643 - RNA, 13 nt, Human
aggaucaucugaa

SEQ ID NO: 3860644 - RNA, 20 nt, Human
aggaucauuuguuggaauga

SEQ ID NO: 3860645 - RNA, 19 nt, Human
aggaucccaugagcuccuu

SEQ ID NO: 3860646 - RNA, 15 nt, Human
aggaucccucucugg

SEQ ID NO: 3860647 - RNA, 19 nt, Human
aggaucccucucuggauug

SEQ ID NO: 3860648 - RNA, 16 nt, Human
aggauccggaaagaag

SEQ ID NO: 3860649 - RNA, 15 nt, Human
aggauccugagccag

SEQ ID NO: 3860650 - RNA, 17 nt, Human
aggauccugagccagau

SEQ ID NO: 3860651 - RNA, 21 nt, Human
aggauccugagccagauuuca

SEQ ID NO: 3860652 - RNA, 14 nt, Human
aggaucuaaggcug

SEQ ID NO: 3860653 - RNA, 20 nt, Human
aggaucuauuuuuggagguu

SEQ ID NO: 3860654 - RNA, 17 nt, Human
aggaucucaccaggcag

SEQ ID NO: 3860655 - RNA, 23 nt, Human
aggaucucaccaggcagccucug

SEQ ID NO: 3860656 - RNA, 20 nt, Human
aggaucucucaggagcacag

SEQ ID NO: 3860657 - RNA, 12 nt, Human
aggaucucuuga

SEQ ID NO: 3860658 - RNA, 13 nt, Human
aggaucuuugugg

SEQ ID NO: 3860659 - RNA, 16 nt, Human
aggaucuuuguggcca

SEQ ID NO: 3860660 - RNA, 18 nt, Human
aggaugaagggcccgaga

SEQ ID NO: 3860661 - RNA, 13 nt, Human
aggaugagagccc

SEQ ID NO: 3860662 - RNA, 14 nt, Human
aggaugagagccca

SEQ ID NO: 3860663 - RNA, 19 nt, Human
aggaugagagcccagaggu

SEQ ID NO: 3860664 - RNA, 20 nt, Human
aggaugagagcccagaggua

SEQ ID NO: 3860665 - RNA, 23 nt, Human
aggaugagagcccagagguaaca

SEQ ID NO: 3860666 - RNA, 18 nt, Human
aggaugauaaguuccuuu

SEQ ID NO: 3860667 - RNA, 16 nt, Human
aggaugauuuuggccu

SEQ ID NO: 3860668 - RNA, 18 nt, Human
aggaugcagagucagcag

SEQ ID NO: 3860669 - RNA, 14 nt, Human
aggaugcccaaaga

SEQ ID NO: 3860670 - RNA, 13 nt, Human
aggaugcccaggg

SEQ ID NO: 3860671 - RNA, 23 nt, Human
aggaugcuaacaucuaaaaauag

SEQ ID NO: 3860672 - RNA, 18 nt, Human
aggaugcuguguugucaa

SEQ ID NO: 3860673 - RNA, 23 nt, Human
aggaugcuuguacauaaugcgug

SEQ ID NO: 3860674 - RNA, 14 nt, Human
aggaugcuuugguu

SEQ ID NO: 3860675 - RNA, 14 nt, Human
aggauggaacacgg

SEQ ID NO: 3860676 - RNA, 14 nt, Human
aggauggagagagg

SEQ ID NO: 3860677 - RNA, 15 nt, Human
aggauggagagaggg

SEQ ID NO: 3860678 - RNA, 17 nt, Human
aggauggagccagcucu

SEQ ID NO: 3860679 - RNA, 12 nt, Human
aggauggagggg

SEQ ID NO: 3860680 - RNA, 16 nt, Human
aggauggccuggccag

SEQ ID NO: 3860681 - RNA, 23 nt, Human
aggauggccuggccagggccugg

SEQ ID NO: 3860682 - RNA, 13 nt, Human
aggauggcgcagg

SEQ ID NO: 3860683 - RNA, 17 nt, Human
aggaugggaaggaggga

SEQ ID NO: 3860684 - RNA, 11 nt, Human
aggaugggcuc

SEQ ID NO: 3860685 - RNA, 21 nt, Human
aggaugguaauucuuauucuu

SEQ ID NO: 3860686 - RNA, 18 nt, Human
aggauguagcuuuucacc

SEQ ID NO: 3860687 - RNA, 20 nt, Human
aggauguaucgggaagauuu

SEQ ID NO: 3860688 - RNA, 16 nt, Human
aggaugucacagggcc

SEQ ID NO: 3860689 - RNA, 14 nt, Human
aggaugugaauugu

SEQ ID NO: 3860690 - RNA, 21 nt, Human
aggaugugggggaagaccugg

SEQ ID NO: 3860691 - RNA, 19 nt, Human
aggauguguuugcuuucug

SEQ ID NO: 3860692 - RNA, 22 nt, Human
aggauguucuagcauggcugcc

SEQ ID NO: 3860693 - RNA, 16 nt, Human
aggauguucugggaca

SEQ ID NO: 3860694 - RNA, 14 nt, Human
aggauuaaauaaug

SEQ ID NO: 3860695 - RNA, 20 nt, Human
aggauuaaauaauguaaaua

SEQ ID NO: 3860696 - RNA, 18 nt, Human
aggauuauugauaguacu

SEQ ID NO: 3860697 - RNA, 21 nt, Human
aggauucacaccccaccugcg

SEQ ID NO: 3860698 - RNA, 14 nt, Human
aggauucagccgga

SEQ ID NO: 3860699 - RNA, 12 nt, Human
aggauucuaaaa

SEQ ID NO: 3860700 - RNA, 15 nt, Human
aggauucuaugaggc

SEQ ID NO: 3860701 - RNA, 20 nt, Human
aggauucugcuggccucugc

SEQ ID NO: 3860702 - RNA, 21 nt, Human
aggauugaaaauguccaggaa

SEQ ID NO: 3860703 - RNA, 17 nt, Human
aggauugcgagagaugu

SEQ ID NO: 3860704 - RNA, 20 nt, Human
aggauugcgagagaugugug

SEQ ID NO: 3860705 - RNA, 15 nt, Human
aggauugcuacuguc

SEQ ID NO: 3860706 - RNA, 18 nt, Human
aggauugcuacuguccua

SEQ ID NO: 3860707 - RNA, 21 nt, Human
aggauugcuugagcccaggag

SEQ ID NO: 3860708 - RNA, 12 nt, Human
aggauuggggaa

SEQ ID NO: 3860709 - RNA, 16 nt, Human
aggauugugauauuuu

SEQ ID NO: 3860710 - RNA, 16 nt, Human
aggauuuaaaaacugg

SEQ ID NO: 3860711 - RNA, 16 nt, Human
aggauuuaacagucau

SEQ ID NO: 3860712 - RNA, 13 nt, Human
aggauuuagaagu

SEQ ID NO: 3860713 - RNA, 12 nt, Human
aggauuucaagc

SEQ ID NO: 3860714 - RNA, 16 nt, Human
aggauuugcugggaga

SEQ ID NO: 3860715 - RNA, 13 nt, Human
aggauuuuauacc

SEQ ID NO: 3860716 - RNA, 17 nt, Human
aggauuuuuuucugagc

SEQ ID NO: 3860717 - RNA, 15 nt, Human
aggcaaaaaaggaug

SEQ ID NO: 3860718 - RNA, 23 nt, Human
aggcaaaaggcaguggggcuggg

SEQ ID NO: 3860719 - RNA, 13 nt, Human
aggcaaaauugca

SEQ ID NO: 3860720 - RNA, 20 nt, Human
aggcaaaauugcaaaucuug

SEQ ID NO: 3860721 - RNA, 18 nt, Human
aggcaaauccgaaaucag

SEQ ID NO: 3860722 - RNA, 15 nt, Human
aggcaaaugcccaag

SEQ ID NO: 3860723 - RNA, 13 nt, Human
aggcaaaugugua

SEQ ID NO: 3860724 - RNA, 14 nt, Human
aggcaaauguguac

SEQ ID NO: 3860725 - RNA, 16 nt, Human
aggcaacugaggcaga

SEQ ID NO: 3860726 - RNA, 22 nt, Human
aggcaacuucaguccugggaga

SEQ ID NO: 3860727 - RNA, 24 nt, Human
aggcaagagggguggagacugcuu

SEQ ID NO: 3860728 - RNA, 16 nt, Human
aggcaagauugauguu

SEQ ID NO: 3860729 - RNA, 18 nt, Human
aggcaagcaagcucucuu

SEQ ID NO: 3860730 - RNA, 12 nt, Human
aggcaagcccug

SEQ ID NO: 3860731 - RNA, 15 nt, Human
aggcaagcugaaauu

SEQ ID NO: 3860732 - RNA, 16 nt, Human
aggcaagcugaaauuu

SEQ ID NO: 3860733 - RNA, 13 nt, Human
aggcaaggcaggu

SEQ ID NO: 3860734 - RNA, 19 nt, Human
aggcaaggcaggugccucc

SEQ ID NO: 3860735 - RNA, 17 nt, Human
aggcaagguuauaugca

SEQ ID NO: 3860736 - RNA, 13 nt, Human
aggcaagugaaga

SEQ ID NO: 3860737 - RNA, 17 nt, Human
aggcaagugaagaaaag

SEQ ID NO: 3860738 - RNA, 18 nt, Human
aggcaaguuaagagaaac

SEQ ID NO: 3860739 - RNA, 14 nt, Human
aggcaauaaaaauc

SEQ ID NO: 3860740 - RNA, 14 nt, Human
aggcaaucacauag

SEQ ID NO: 3860741 - RNA, 15 nt, Human
aggcaauccuaccuu

SEQ ID NO: 3860742 - RNA, 12 nt, Human
aggcaauuagac

SEQ ID NO: 3860743 - RNA, 19 nt, Human
aggcaauucuccugccuuu

SEQ ID NO: 3860744 - RNA, 17 nt, Human
aggcacacaaggggccc

SEQ ID NO: 3860745 - RNA, 23 nt, Human
aggcacacaccaccacgccuggc

SEQ ID NO: 3860746 - RNA, 23 nt, Human
aggcacacacugugcuuucuauu

SEQ ID NO: 3860747 - RNA, 18 nt, Human
aggcacacagcugcagag

SEQ ID NO: 3860748 - RNA, 12 nt, Human
aggcacaggcag

SEQ ID NO: 3860749 - RNA, 16 nt, Human
aggcacaggcagggca

SEQ ID NO: 3860750 - RNA, 17 nt, Human
aggcacaggcagggcag

SEQ ID NO: 3860751 - RNA, 18 nt, Human
aggcacaggcagggcagg

SEQ ID NO: 3860752 - RNA, 13 nt, Human
aggcacauggagg

SEQ ID NO: 3860753 - RNA, 16 nt, Human
aggcacaugucagcaa

SEQ ID NO: 3860754 - RNA, 13 nt, Human
aggcaccagaaga

SEQ ID NO: 3860755 - RNA, 12 nt, Human
aggcaccauuca

SEQ ID NO: 3860756 - RNA, 17 nt, Human
aggcaccauucaggaac

SEQ ID NO: 3860757 - RNA, 12 nt, Human
aggcacccaucc

SEQ ID NO: 3860758 - RNA, 17 nt, Human
aggcacccccuggagag

SEQ ID NO: 3860759 - RNA, 13 nt, Human
aggcacccuucca

SEQ ID NO: 3860760 - RNA, 17 nt, Human
aggcaccgcugaugggg

SEQ ID NO: 3860761 - RNA, 23 nt, Human
aggcaccuacacucaccugcacu

SEQ ID NO: 3860762 - RNA, 22 nt, Human
aggcaccuaccaccacgcccgg

SEQ ID NO: 3860763 - RNA, 18 nt, Human
aggcaccucaagaagaag

SEQ ID NO: 3860764 - RNA, 14 nt, Human
aggcaccugcaggu

SEQ ID NO: 3860765 - RNA, 18 nt, Human
aggcaccugcagguuggg

SEQ ID NO: 3860766 - RNA, 21 nt, Human
aggcaccugcagguugggcca

SEQ ID NO: 3860767 - RNA, 16 nt, Human
aggcaccuuuuacugu

SEQ ID NO: 3860768 - RNA, 17 nt, Human
aggcaccuuuuacugug

SEQ ID NO: 3860769 - RNA, 18 nt, Human
aggcacgaacccaccugc

SEQ ID NO: 3860770 - RNA, 17 nt, Human
aggcacggguggucccc

SEQ ID NO: 3860771 - RNA, 14 nt, Human
aggcacucuagauu

SEQ ID NO: 3860772 - RNA, 14 nt, Human
aggcacucuuaaau

SEQ ID NO: 3860773 - RNA, 23 nt, Human
aggcacugagauaccagcgagga

SEQ ID NO: 3860774 - RNA, 13 nt, Human
aggcacugcccug

SEQ ID NO: 3860775 - RNA, 15 nt, Human
aggcacugcccuggu

SEQ ID NO: 3860776 - RNA, 18 nt, Human
aggguccuuuaguaccug

SEQ ID NO: 3860777 - RNA, 20 nt, Human
aggguccuuuaguaccugaa

SEQ ID NO: 3860778 - RNA, 14 nt, Human
agggucgaaagcuc

SEQ ID NO: 3860779 - RNA, 16 nt, Human
agggucgaaagcucua

SEQ ID NO: 3860780 - RNA, 22 nt, Human
agggucgaaagcucuagaaucu

SEQ ID NO: 3860781 - RNA, 22 nt, Human
agggucggaacccaagcuuaga

SEQ ID NO: 3860782 - RNA, 23 nt, Human
agggucggggaggaaauaccaaa

SEQ ID NO: 3860783 - RNA, 15 nt, Human
agggucggugccuuc

SEQ ID NO: 3860784 - RNA, 15 nt, Human
agggucuagggagag

SEQ ID NO: 3860785 - RNA, 15 nt, Human
agggucuauggggag

SEQ ID NO: 3860786 - RNA, 23 nt, Human
agggucucacuauguugcccagg

SEQ ID NO: 3860787 - RNA, 17 nt, Human
agggucucagggugucc

SEQ ID NO: 3860788 - RNA, 22 nt, Human
agggucucuagugcugugaaaa

SEQ ID NO: 3860789 - RNA, 17 nt, Human
agggucucucccucagg

SEQ ID NO: 3860790 - RNA, 13 nt, Human
agggucugcucuu

SEQ ID NO: 3860791 - RNA, 23 nt, Human
agggucugcucuuucucugccag

SEQ ID NO: 3860792 - RNA, 14 nt, Human
agggucuggagaag

SEQ ID NO: 3860793 - RNA, 21 nt, Human
agggucugggaaaugagcagg

SEQ ID NO: 3860794 - RNA, 22 nt, Human
agggucugggggcacaagacug

SEQ ID NO: 3860795 - RNA, 22 nt, Human
agggucuguagguugcacacuu

SEQ ID NO: 3860796 - RNA, 13 nt, Human
agggucuguguga

SEQ ID NO: 3860797 - RNA, 16 nt, Human
agggucuugggaaaua

SEQ ID NO: 3860798 - RNA, 17 nt, Human
agggugacagcuuccuu

SEQ ID NO: 3860799 - RNA, 21 nt, Human
agggugaguccuccagaacuc

SEQ ID NO: 3860800 - RNA, 19 nt, Human
agggugaguuggcuuaccu

SEQ ID NO: 3860801 - RNA, 22 nt, Human
agggugaguuggcuuaccuggc

SEQ ID NO: 3860802 - RNA, 15 nt, Human
agggugaugccaggu

SEQ ID NO: 3860803 - RNA, 19 nt, Human
agggugaugccagguucua

SEQ ID NO: 3860804 - RNA, 21 nt, Human
agggugaugccagguucuauu

SEQ ID NO: 3860805 - RNA, 21 nt, Human
agggugaugggaaagcauugu

SEQ ID NO: 3860806 - RNA, 23 nt, Human
agggugauuuuaugaucaguguu

SEQ ID NO: 3860807 - RNA, 15 nt, Human
agggugcagccacac

SEQ ID NO: 3860808 - RNA, 17 nt, Human
agggugcgucugggagg

SEQ ID NO: 3860809 - RNA, 14 nt, Human
agggugcugacugg

SEQ ID NO: 3860810 - RNA, 22 nt, Human
agggugcugccccaugaagcca

SEQ ID NO: 3860811 - RNA, 21 nt, Human
agggugcugcuucccucugcc

SEQ ID NO: 3860812 - RNA, 16 nt, Human
aggguggacuuagaaa

SEQ ID NO: 3860813 - RNA, 20 nt, Human
aggguggacuuagaaagcag

SEQ ID NO: 3860814 - RNA, 23 nt, Human
aggguggacuuagaaagcagggg

SEQ ID NO: 3860815 - RNA, 11 nt, Human
aggguggcagc

SEQ ID NO: 3860816 - RNA, 14 nt, Human
aggguggcagguga

SEQ ID NO: 3860817 - RNA, 21 nt, Human
aggguggcaucccaguggccu

SEQ ID NO: 3860818 - RNA, 18 nt, Human
aggguggcccuugcaguu

SEQ ID NO: 3860819 - RNA, 12 nt, Human
agggugggaagg

SEQ ID NO: 3860820 - RNA, 16 nt, Human
agggugggagagccca

SEQ ID NO: 3860821 - RNA, 17 nt, Human
agggugggggagggagg

SEQ ID NO: 3860822 - RNA, 17 nt, Human
agggugggggccaccug

SEQ ID NO: 3860823 - RNA, 21 nt, Human
agggugggggccaccugccug

SEQ ID NO: 3860824 - RNA, 23 nt, Human
aggguggucucuucuuggggccc

SEQ ID NO: 3860825 - RNA, 17 nt, Human
aggguggugaccucugc

SEQ ID NO: 3860826 - RNA, 19 nt, Human
aggguggugaccucugccu

SEQ ID NO: 3860827 - RNA, 21 nt, Human
aggguggugaccucugccuga

SEQ ID NO: 3860828 - RNA, 19 nt, Human
agggugucugcgucgucac

SEQ ID NO: 3860829 - RNA, 20 nt, Human
aggguguguuugaaaucauc

SEQ ID NO: 3860830 - RNA, 14 nt, Human
aggguguuuaugua

SEQ ID NO: 3860831 - RNA, 15 nt, Human
aggguuaaggccuga

SEQ ID NO: 3860832 - RNA, 20 nt, Human
aggguuacagagaccuaugu

SEQ ID NO: 3860833 - RNA, 15 nt, Human
aggguuauauuuuac

SEQ ID NO: 3860834 - RNA, 14 nt, Human
aggguucaaaaugu

SEQ ID NO: 3860835 - RNA, 18 nt, Human
aggguucaaaaugucugu

SEQ ID NO: 3860836 - RNA, 21 nt, Human
aggguuccuguagaccuaggg

SEQ ID NO: 3860837 - RNA, 20 nt, Human
aggguucugccucuccaggc

SEQ ID NO: 3860838 - RNA, 16 nt, Human
aggguugaccccagag

SEQ ID NO: 3860839 - RNA, 21 nt, Human
aggguugaguuacuuccuauc

SEQ ID NO: 3860840 - RNA, 17 nt, Human
aggguugcuggagccug

SEQ ID NO: 3860841 - RNA, 18 nt, Human
aggguuggccccugcccg

SEQ ID NO: 3860842 - RNA, 15 nt, Human
aggguugggcuggug

SEQ ID NO: 3860843 - RNA, 15 nt, Human
aggguuuaucuuuug

SEQ ID NO: 3860844 - RNA, 17 nt, Human
aggguuucagagagccu

SEQ ID NO: 3860845 - RNA, 11 nt, Human
aggguuucuga

SEQ ID NO: 3860846 - RNA, 17 nt, Human
aggguuucugagcugcu

SEQ ID NO: 3860847 - RNA, 18 nt, Human
aggguuucugagcugcuc

SEQ ID NO: 3860848 - RNA, 14 nt, Human
aggguuuguggcug

SEQ ID NO: 3860849 - RNA, 15 nt, Human
aggguuuuaacuuug

SEQ ID NO: 3860850 - RNA, 19 nt, Human
aggguuuuccacccuggaa

SEQ ID NO: 3860851 - RNA, 22 nt, Human
agguaaaaugccaugaugccuc

SEQ ID NO: 3860852 - RNA, 19 nt, Human
agguaaaauugaaaggcau

SEQ ID NO: 3860853 - RNA, 14 nt, Human
agguaaacuccugu

SEQ ID NO: 3860854 - RNA, 15 nt, Human
agguaaacuccuguc

SEQ ID NO: 3860855 - RNA, 12 nt, Human
agguaaagauau

SEQ ID NO: 3860856 - RNA, 18 nt, Human
agguaaagggcaaauaau

SEQ ID NO: 3860857 - RNA, 23 nt, Human
agguaacaagaugagaacagaua

SEQ ID NO: 3860858 - RNA, 23 nt, Human
agguaacacuagggccuuggaaa

SEQ ID NO: 3860859 - RNA, 17 nt, Human
agguaacagaacagcuu

SEQ ID NO: 3860860 - RNA, 19 nt, Human
agguaacagaacagcuuca

SEQ ID NO: 3860861 - RNA, 13 nt, Human
agguaacaggcag

SEQ ID NO: 3860862 - RNA, 14 nt, Human
agguaacaggcaga

SEQ ID NO: 3860863 - RNA, 15 nt, Human
agguaagaaguuuua

SEQ ID NO: 3860864 - RNA, 19 nt, Human
agguaagcaggaggaggug

SEQ ID NO: 3860865 - RNA, 17 nt, Human
agguaaggaauaccugu

SEQ ID NO: 3860866 - RNA, 19 nt, Human
agguaaucgaccugccucg

SEQ ID NO: 3860867 - RNA, 21 nt, Human
agguaaugaccaugaaagacu

SEQ ID NO: 3860868 - RNA, 14 nt, Human
agguaaugagggac

SEQ ID NO: 3860869 - RNA, 14 nt, Human
agguaauuuuuacc

SEQ ID NO: 3860870 - RNA, 17 nt, Human
agguaauuuuuuucacc

SEQ ID NO: 3860871 - RNA, 17 nt, Human
agguacaaccuguucug

SEQ ID NO: 3860872 - RNA, 12 nt, Human
agguacacucuu

SEQ ID NO: 3860873 - RNA, 18 nt, Human
agguacaggguuuuuacc

SEQ ID NO: 3860874 - RNA, 23 nt, Human
agguacccaauagcugcccauuu

SEQ ID NO: 3860875 - RNA, 17 nt, Human
agguaccccagcucugc

SEQ ID NO: 3860876 - RNA, 20 nt, Human
agguaccccagcucugcuug

SEQ ID NO: 3860877 - RNA, 14 nt, Human
agguacccugggug

SEQ ID NO: 3860878 - RNA, 19 nt, Human
agguaccuuucacauagag

SEQ ID NO: 3860879 - RNA, 17 nt, Human
agguacgcacagacagg

SEQ ID NO: 3860880 - RNA, 14 nt, Human
agguacuagaaugc

SEQ ID NO: 3860881 - RNA, 17 nt, Human
agguacuagaaugcuua

SEQ ID NO: 3860882 - RNA, 15 nt, Human
agguacuauauuugc

SEQ ID NO: 3860883 - RNA, 14 nt, Human
agguacucuccugg

SEQ ID NO: 3860884 - RNA, 22 nt, Human
agguacugagagugaacaaauu

SEQ ID NO: 3860885 - RNA, 19 nt, Human
agguacuguaugaucaaau

SEQ ID NO: 3860886 - RNA, 23 nt, Human
agguacuguaugaucaaauguuu

SEQ ID NO: 3860887 - RNA, 16 nt, Human
agguacuuugucuaag

SEQ ID NO: 3860888 - RNA, 23 nt, Human
agguacuuugucuaagaaacauu

SEQ ID NO: 3860889 - RNA, 20 nt, Human
agguacuuuuugugaagacg

SEQ ID NO: 3860890 - RNA, 13 nt, Human
agguagaaaaagg

SEQ ID NO: 3860891 - RNA, 17 nt, Human
agguagaaauaucugaa

SEQ ID NO: 3860892 - RNA, 17 nt, Human
agguagaacgccaggga

SEQ ID NO: 3860893 - RNA, 21 nt, Human
agguagaauguaaagcuuguc

SEQ ID NO: 3860894 - RNA, 20 nt, Human
agguagaccugucuccuggc

SEQ ID NO: 3860895 - RNA, 17 nt, Human
agguagaguuugaagga

SEQ ID NO: 3860896 - RNA, 20 nt, Human
agguagcauucuuuggaguu

SEQ ID NO: 3860897 - RNA, 17 nt, Human
agguagcccccucuucc

SEQ ID NO: 3860898 - RNA, 16 nt, Human
agguagcccuggccag

SEQ ID NO: 3860899 - RNA, 19 nt, Human
agguagcccuggccagagg

SEQ ID NO: 3860900 - RNA, 20 nt, Human
agguagcccuggccagaggc

SEQ ID NO: 3860901 - RNA, 21 nt, Human
agguagcccuggccagaggcu

SEQ ID NO: 3860902 - RNA, 15 nt, Human
agguagccugcuggu

SEQ ID NO: 3860903 - RNA, 15 nt, Human
agguaggguuuaauc

SEQ ID NO: 3860904 - RNA, 19 nt, Human
agguauaauugugugauau

SEQ ID NO: 3860905 - RNA, 15 nt, Human
agguauaauuuuaug

SEQ ID NO: 3860906 - RNA, 13 nt, Human
agguauaccucac

SEQ ID NO: 3860907 - RNA, 20 nt, Human
agguauaucauucuaaagau

SEQ ID NO: 3860908 - RNA, 14 nt, Human
agguaucuccagga

SEQ ID NO: 3860909 - RNA, 22 nt, Human
agguaugaccuucuaggaagcu

SEQ ID NO: 3860910 - RNA, 23 nt, Human
agguauggcucugcaccccucug

SEQ ID NO: 3860911 - RNA, 22 nt, Human
agguauuccuuuuguguacagu

SEQ ID NO: 3860912 - RNA, 20 nt, Human
agguauucguuaucuaauag

SEQ ID NO: 3860913 - RNA, 20 nt, Human
agguauuuaaaguauuuucu

SEQ ID NO: 3860914 - RNA, 23 nt, Human
agguauuugggaaacuugucacu

SEQ ID NO: 3860915 - RNA, 19 nt, Human
agguauuuuguuucuuuua

SEQ ID NO: 3860916 - RNA, 13 nt, Human
aggucaacagaau

SEQ ID NO: 3860917 - RNA, 14 nt, Human
aggucaacagaaug

SEQ ID NO: 3860918 - RNA, 15 nt, Human
aggucaacagaauga

SEQ ID NO: 3860919 - RNA, 16 nt, Human
agguucacuaaagcag

SEQ ID NO: 3860920 - RNA, 15 nt, Human
agguucagccaaggu

SEQ ID NO: 3860921 - RNA, 21 nt, Human
agguucaugccaccauggcca

SEQ ID NO: 3860922 - RNA, 12 nt, Human
agguuccacaga

SEQ ID NO: 3860923 - RNA, 18 nt, Human
agguuccacagaggacac

SEQ ID NO: 3860924 - RNA, 14 nt, Human
agguuccacagagu

SEQ ID NO: 3860925 - RNA, 16 nt, Human
agguuccauccuuuac

SEQ ID NO: 3860926 - RNA, 14 nt, Human
agguucccaagcuc

SEQ ID NO: 3860927 - RNA, 16 nt, Human
agguucccaagcucag

SEQ ID NO: 3860928 - RNA, 16 nt, Human
agguucccagagauga

SEQ ID NO: 3860929 - RNA, 14 nt, Human
agguuccccuguca

SEQ ID NO: 3860930 - RNA, 22 nt, Human
agguucccuuugacgccauccc

SEQ ID NO: 3860931 - RNA, 23 nt, Human
agguucccuuugacgccauccca

SEQ ID NO: 3860932 - RNA, 21 nt, Human
agguuccgcuuggagcagagg

SEQ ID NO: 3860933 - RNA, 23 nt, Human
agguuccgcuuggagcagagggg

SEQ ID NO: 3860934 - RNA, 14 nt, Human
agguuccucugccu

SEQ ID NO: 3860935 - RNA, 15 nt, Human
agguuccucugccug

SEQ ID NO: 3860936 - RNA, 17 nt, Human
agguuccucugccugcc

SEQ ID NO: 3860937 - RNA, 19 nt, Human
agguuccucugccugcccc

SEQ ID NO: 3860938 - RNA, 20 nt, Human
agguuccucugccugccccg

SEQ ID NO: 3860939 - RNA, 13 nt, Human
agguucuaaaguu

SEQ ID NO: 3860940 - RNA, 15 nt, Human
agguucuaaaguucu

SEQ ID NO: 3860941 - RNA, 17 nt, Human
agguucuagguuucaaa

SEQ ID NO: 3860942 - RNA, 17 nt, Human
agguucuauuuggaauu

SEQ ID NO: 3860943 - RNA, 21 nt, Human
agguucuccaacaucacagcc

SEQ ID NO: 3860944 - RNA, 19 nt, Human
agguucuccguuagcuccu

SEQ ID NO: 3860945 - RNA, 21 nt, Human
agguucuccguuagcuccugu

SEQ ID NO: 3860946 - RNA, 18 nt, Human
agguucugggugcaggag

SEQ ID NO: 3860947 - RNA, 17 nt, Human
agguucuggugugaacu

SEQ ID NO: 3860948 - RNA, 19 nt, Human
agguucugguuagcucagc

SEQ ID NO: 3860949 - RNA, 21 nt, Human
agguucugguuagcucagccc

SEQ ID NO: 3860950 - RNA, 22 nt, Human
agguucuguuuauggccacauu

SEQ ID NO: 3860951 - RNA, 14 nt, Human
agguucuuacugcu

SEQ ID NO: 3860952 - RNA, 19 nt, Human
agguucuucaucccuuucc

SEQ ID NO: 3860953 - RNA, 23 nt, Human
agguucuucccuuuuacauacug

SEQ ID NO: 3860954 - RNA, 23 nt, Human
agguucuucuuccugaagcugag

SEQ ID NO: 3860955 - RNA, 13 nt, Human
agguucuuugugu

SEQ ID NO: 3860956 - RNA, 23 nt, Human
agguugaagaccuaaccagggcc

SEQ ID NO: 3860957 - RNA, 12 nt, Human
agguugaagagg

SEQ ID NO: 3860958 - RNA, 13 nt, Human
agguugaagccaa

SEQ ID NO: 3860959 - RNA, 14 nt, Human
agguugauaacuuu

SEQ ID NO: 3860960 - RNA, 17 nt, Human
agguugauaacuuugcu

SEQ ID NO: 3860961 - RNA, 19 nt, Human
agguugauaacuuugcuug

SEQ ID NO: 3860962 - RNA, 16 nt, Human
agguugaucagaucug

SEQ ID NO: 3860963 - RNA, 12 nt, Human
agguugcacacu

SEQ ID NO: 3860964 - RNA, 19 nt, Human
agguugcacacuuugguac

SEQ ID NO: 3860965 - RNA, 18 nt, Human
agguugcagugagcagag

SEQ ID NO: 3860966 - RNA, 24 nt, Human
agguugcugguugcugugugguuu

SEQ ID NO: 3860967 - RNA, 17 nt, Human
agguuggaagagaauca

SEQ ID NO: 3860968 - RNA, 18 nt, Human
agguuggaagagaaucac

SEQ ID NO: 3860969 - RNA, 16 nt, Human
agguuggagcccaggg

SEQ ID NO: 3860970 - RNA, 15 nt, Human
agguuggauggaugg

SEQ ID NO: 3860971 - RNA, 20 nt, Human
agguuggcaaaaaggcagga

SEQ ID NO: 3860972 - RNA, 14 nt, Human
agguuggugggggc

SEQ ID NO: 3860973 - RNA, 22 nt, Human
agguugguuuaaugcaauagaa

SEQ ID NO: 3860974 - RNA, 17 nt, Human
agguuguagugagccca

SEQ ID NO: 3860975 - RNA, 16 nt, Human
agguugucugaaguca

SEQ ID NO: 3860976 - RNA, 12 nt, Human
agguugucugug

SEQ ID NO: 3860977 - RNA, 16 nt, Human
agguuguuagaaaaau

SEQ ID NO: 3860978 - RNA, 17 nt, Human
agguuuaaacuucucug

SEQ ID NO: 3860979 - RNA, 13 nt, Human
agguuuaaagagu

SEQ ID NO: 3860980 - RNA, 15 nt, Human
agguuuaaagagucu

SEQ ID NO: 3860981 - RNA, 14 nt, Human
agguuuaacauaaa

SEQ ID NO: 3860982 - RNA, 15 nt, Human
agguuuaacauuugc

SEQ ID NO: 3860983 - RNA, 16 nt, Human
agguuuaacauuugcc

SEQ ID NO: 3860984 - RNA, 15 nt, Human
agguuuaacucagau

SEQ ID NO: 3860985 - RNA, 19 nt, Human
agguuuaacucagaucacu

SEQ ID NO: 3860986 - RNA, 23 nt, Human
agguuuaacucagaucacuacug

SEQ ID NO: 3860987 - RNA, 14 nt, Human
agguuuaagcuguu

SEQ ID NO: 3860988 - RNA, 17 nt, Human
agguuuacaauuuacaa

SEQ ID NO: 3860989 - RNA, 14 nt, Human
agguuuaugacagu

SEQ ID NO: 3860990 - RNA, 16 nt, Human
agguuuaugacaguaa

SEQ ID NO: 3860991 - RNA, 19 nt, Human
agguuuauuguuaauacaa

SEQ ID NO: 3860992 - RNA, 14 nt, Human
agguuucuauuuuc

SEQ ID NO: 3860993 - RNA, 16 nt, Human
agguuucucaaagaaa

SEQ ID NO: 3860994 - RNA, 14 nt, Human
agguuucugaaaau

SEQ ID NO: 3860995 - RNA, 23 nt, Human
agguuucugaaaauuaacacugc

SEQ ID NO: 3860996 - RNA, 18 nt, Human
agguuucuggucucuagg

SEQ ID NO: 3860997 - RNA, 12 nt, Human
agguuugaaucu

SEQ ID NO: 3860998 - RNA, 23 nt, Human
agguuuggacaaaauggaauacu

SEQ ID NO: 3860999 - RNA, 22 nt, Human
agguuugguguguggagaugca

SEQ ID NO: 3861000 - RNA, 23 nt, Human
agguuuguuuagaagaagugugu

SEQ ID NO: 3861001 - RNA, 17 nt, Human
agguuuguuuugugaau

SEQ ID NO: 3861002 - RNA, 20 nt, Human
agguuuguuuugugaauuuu

SEQ ID NO: 3861003 - RNA, 18 nt, Human
agguuuuaaaagccuugg

SEQ ID NO: 3861004 - RNA, 19 nt, Human
agguuuuaaguuguuugca

SEQ ID NO: 3861005 - RNA, 16 nt, Human
agguuuuaauuuagua

SEQ ID NO: 3861006 - RNA, 17 nt, Human
agguuuuaauuuaguaa

SEQ ID NO: 3861007 - RNA, 13 nt, Human
agguuuuacagau

SEQ ID NO: 3861008 - RNA, 14 nt, Human
agguuuuacagauu

SEQ ID NO: 3861009 - RNA, 14 nt, Human
agguuuuagguucu

SEQ ID NO: 3861010 - RNA, 13 nt, Human
agguuuuguaaag

SEQ ID NO: 3861011 - RNA, 21 nt, Human
agguuuuguuuuuuuucagcc

SEQ ID NO: 3861012 - RNA, 23 nt, Human
agguuuuuaaacacuaaaauaua

SEQ ID NO: 3861013 - RNA, 20 nt, Human
agguuuuuauuaguaccaua

SEQ ID NO: 3861014 - RNA, 14 nt, Human
agguuuuucaauua

SEQ ID NO: 3861015 - RNA, 17 nt, Human
agguuuuucaauuaaac

SEQ ID NO: 3861016 - RNA, 18 nt, Human
agguuuuucaauuaaacg

SEQ ID NO: 3861017 - RNA, 12 nt, Human
agguuuuuccuu

SEQ ID NO: 3861018 - RNA, 20 nt, Human
agguuuuuggaauuaugucu

SEQ ID NO: 3861019 - RNA, 13 nt, Human
agguuuuuguaaa

SEQ ID NO: 3861020 - RNA, 16 nt, Human
agguuuuuguaaagau

SEQ ID NO: 3861021 - RNA, 17 nt, Human
agguuuuuguaaagauu

SEQ ID NO: 3861022 - RNA, 16 nt, Human
agguuuuuuuccuucu

SEQ ID NO: 3861023 - RNA, 16 nt, Human
agguuuuuuuucaguu

SEQ ID NO: 3861024 - RNA, 16 nt, Human
aguaaaaacaaagaaa

SEQ ID NO: 3861025 - RNA, 14 nt, Human
aguaaaaaggcuaa

SEQ ID NO: 3861026 - RNA, 17 nt, Human
aguaaaaauaaaauacu

SEQ ID NO: 3861027 - RNA, 15 nt, Human
aguaaaacacagagg

SEQ ID NO: 3861028 - RNA, 16 nt, Human
aguaaaaccacagcag

SEQ ID NO: 3861029 - RNA, 17 nt, Human
aguaaaaccacagcagu

SEQ ID NO: 3861030 - RNA, 19 nt, Human
aguaaaaccacagcaguug

SEQ ID NO: 3861031 - RNA, 13 nt, Human
aguaaaagacauu

SEQ ID NO: 3861032 - RNA, 17 nt, Human
aguaaaauaauaauuuu

SEQ ID NO: 3861033 - RNA, 17 nt, Human
aguaaaauacucuuuuu

SEQ ID NO: 3861034 - RNA, 16 nt, Human
aguaaaauguggcagg

SEQ ID NO: 3861035 - RNA, 16 nt, Human
aguaaaauuauacugu

SEQ ID NO: 3861036 - RNA, 17 nt, Human
aguaaaauugccauauu

SEQ ID NO: 3861037 - RNA, 22 nt, Human
aguaaaauugccauauugcaca

SEQ ID NO: 3861038 - RNA, 13 nt, Human
aguaaaauuuauu

SEQ ID NO: 3861039 - RNA, 12 nt, Human
aguaaacacugu

SEQ ID NO: 3861040 - RNA, 23 nt, Human
aguaaacgggaacaugcccccug

SEQ ID NO: 3861041 - RNA, 14 nt, Human
aguaaacuauuuau

SEQ ID NO: 3861042 - RNA, 14 nt, Human
aguaaacuuuuugu

SEQ ID NO: 3861043 - RNA, 13 nt, Human
aguaaagaaauga

SEQ ID NO: 3861044 - RNA, 22 nt, Human
aguaaagaacguggucagagua

SEQ ID NO: 3861045 - RNA, 12 nt, Human
aguaaagaacug

SEQ ID NO: 3861046 - RNA, 23 nt, Human
aguaaagaacugcacaugaagaa

SEQ ID NO: 3861047 - RNA, 15 nt, Human
aguaaagagaaacuu

SEQ ID NO: 3861048 - RNA, 20 nt, Human
aguaaagccauuaaaugaau

SEQ ID NO: 3861049 - RNA, 21 nt, Human
aguaaagccauuaaaugaaua

SEQ ID NO: 3861050 - RNA, 17 nt, Human
aguaaagccguuguuua

SEQ ID NO: 3861051 - RNA, 14 nt, Human
aguaaagcuaaaau

SEQ ID NO: 3861052 - RNA, 17 nt, Human
aguaaagcuaaaaugau

SEQ ID NO: 3861053 - RNA, 16 nt, Human
aguaaaggcaaacuua

SEQ ID NO: 3861054 - RNA, 19 nt, Human
aguaaagugauaauuucug

SEQ ID NO: 3861055 - RNA, 21 nt, Human
aguaaaguguaacauaugcaa

SEQ ID NO: 3861056 - RNA, 16 nt, Human
aguaaaucucuucugu

SEQ ID NO: 3861057 - RNA, 18 nt, Human
aguaaaugggggugcauu

SEQ ID NO: 3861058 - RNA, 10 nt, Human
aguaaauguu

SEQ ID NO: 3861059 - RNA, 18 nt, Human
aguaacaagagugauucu

SEQ ID NO: 3861060 - RNA, 21 nt, Human
aguaacaagagugauucuugc

SEQ ID NO: 3861061 - RNA, 17 nt, Human
aguaacacuaauauauu

SEQ ID NO: 3861062 - RNA, 15 nt, Human
aguaacauaauaaau

SEQ ID NO: 3861063 - RNA, 17 nt, Human
aguaacauuugcuguuu

SEQ ID NO: 3861064 - RNA, 18 nt, Human
aguaucuccucgcaagcu

SEQ ID NO: 3861065 - RNA, 16 nt, Human
aguaucucuucagucu

SEQ ID NO: 3861066 - RNA, 14 nt, Human
aguaucugggaacu

SEQ ID NO: 3861067 - RNA, 15 nt, Human
aguaucuguaucucu

SEQ ID NO: 3861068 - RNA, 12 nt, Human
aguaucuuuuga

SEQ ID NO: 3861069 - RNA, 13 nt, Human
aguaugaaaauaa

SEQ ID NO: 3861070 - RNA, 14 nt, Human
aguaugaaauuaua

SEQ ID NO: 3861071 - RNA, 16 nt, Human
aguaugaaucuaugcc

SEQ ID NO: 3861072 - RNA, 17 nt, Human
aguaugaaucuaugcca

SEQ ID NO: 3861073 - RNA, 23 nt, Human
aguaugaauuugagcaggucuca

SEQ ID NO: 3861074 - RNA, 18 nt, Human
aguaugacgcugauacau

SEQ ID NO: 3861075 - RNA, 16 nt, Human
aguaugaggcauuugu

SEQ ID NO: 3861076 - RNA, 17 nt, Human
aguaugaggcauuuguu

SEQ ID NO: 3861077 - RNA, 16 nt, Human
aguaugcauuauuaaa

SEQ ID NO: 3861078 - RNA, 19 nt, Human
aguaugcauuauuaaauug

SEQ ID NO: 3861079 - RNA, 20 nt, Human
aguaugggacuggccucugc

SEQ ID NO: 3861080 - RNA, 14 nt, Human
aguaugguacauuu

SEQ ID NO: 3861081 - RNA, 16 nt, Human
aguaugguggcugggu

SEQ ID NO: 3861082 - RNA, 15 nt, Human
aguauguauauuaaa

SEQ ID NO: 3861083 - RNA, 19 nt, Human
aguauguggaagugugggu

SEQ ID NO: 3861084 - RNA, 21 nt, Human
aguauguuuuacacuguacca

SEQ ID NO: 3861085 - RNA, 20 nt, Human
aguauguuuuagcauguguu

SEQ ID NO: 3861086 - RNA, 13 nt, Human
aguauuaaaacau

SEQ ID NO: 3861087 - RNA, 19 nt, Human
aguauuaaaacauuggauu

SEQ ID NO: 3861088 - RNA, 15 nt, Human
aguauuaaaauguau

SEQ ID NO: 3861089 - RNA, 18 nt, Human
aguauuaaaauguaugca

SEQ ID NO: 3861090 - RNA, 18 nt, Human
aguauuaauacuaaaaua

SEQ ID NO: 3861091 - RNA, 21 nt, Human
aguauuaauaucugaggauga

SEQ ID NO: 3861092 - RNA, 16 nt, Human
aguauuaauucucuuu

SEQ ID NO: 3861093 - RNA, 21 nt, Human
aguauuacuaaauugaccuuu

SEQ ID NO: 3861094 - RNA, 18 nt, Human
aguauuauaaauuauguu

SEQ ID NO: 3861095 - RNA, 12 nt, Human
aguauuauaugu

SEQ ID NO: 3861096 - RNA, 13 nt, Human
aguauuauuuucc

SEQ ID NO: 3861097 - RNA, 20 nt, Human
aguauuccagaccugaagaa

SEQ ID NO: 3861098 - RNA, 19 nt, Human
aguauuccauugugugagu

SEQ ID NO: 3861099 - RNA, 23 nt, Human
aguauucucggauaguugcuauu

SEQ ID NO: 3861100 - RNA, 12 nt, Human
aguauucugccu

SEQ ID NO: 3861101 - RNA, 23 nt, Human
aguauucugccuuugcagaaaca

SEQ ID NO: 3861102 - RNA, 12 nt, Human
aguauucuucuc

SEQ ID NO: 3861103 - RNA, 12 nt, Human
aguauucuuuuu

SEQ ID NO: 3861104 - RNA, 14 nt, Human
aguauucuuuuucu

SEQ ID NO: 3861105 - RNA, 15 nt, Human
aguauugaagcauuu

SEQ ID NO: 3861106 - RNA, 20 nt, Human
aguauugaagcauuuuauaa

SEQ ID NO: 3861107 - RNA, 12 nt, Human
aguauugacaaa

SEQ ID NO: 3861108 - RNA, 14 nt, Human
aguauugacaaaau

SEQ ID NO: 3861109 - RNA, 20 nt, Human
aguauugacaaaauguuauu

SEQ ID NO: 3861110 - RNA, 21 nt, Human
aguauugacaaaauguuauuu

SEQ ID NO: 3861111 - RNA, 20 nt, Human
aguauugcaucuguauaagu

SEQ ID NO: 3861112 - RNA, 20 nt, Human
aguauuguacaaaguauuaa

SEQ ID NO: 3861113 - RNA, 15 nt, Human
aguauuguccagguc

SEQ ID NO: 3861114 - RNA, 16 nt, Human
aguauuguccaggucu

SEQ ID NO: 3861115 - RNA, 21 nt, Human
aguauuguuguccuuuucaua

SEQ ID NO: 3861116 - RNA, 22 nt, Human
aguauuguuuaaaauguaauuu

SEQ ID NO: 3861117 - RNA, 12 nt, Human
aguauuuaacua

SEQ ID NO: 3861118 - RNA, 17 nt, Human
aguauuuaacuucugag

SEQ ID NO: 3861119 - RNA, 14 nt, Human
aguauuuaagccua

SEQ ID NO: 3861120 - RNA, 19 nt, Human
aguauuuaagccuaaagau

SEQ ID NO: 3861121 - RNA, 20 nt, Human
aguauuuaagccuaaagauu

SEQ ID NO: 3861122 - RNA, 15 nt, Human
aguauuuaauuagug

SEQ ID NO: 3861123 - RNA, 21 nt, Human
aguauuuaauuagugcuaagu

SEQ ID NO: 3861124 - RNA, 16 nt, Human
aguauuuauaauagca

SEQ ID NO: 3861125 - RNA, 13 nt, Human
aguauuuauauau

SEQ ID NO: 3861126 - RNA, 14 nt, Human
aguauuuauauauu

SEQ ID NO: 3861127 - RNA, 16 nt, Human
aguauuuauauauuua

SEQ ID NO: 3861128 - RNA, 20 nt, Human
aguauuuauauauuuauaac

SEQ ID NO: 3861129 - RNA, 23 nt, Human
aguauuuauauauuuauaacuca

SEQ ID NO: 3861130 - RNA, 15 nt, Human
aguauuuauuuaaug

SEQ ID NO: 3861131 - RNA, 20 nt, Human
aguauuuauuuaauguuaug

SEQ ID NO: 3861132 - RNA, 15 nt, Human
aguauuuauuuaugu

SEQ ID NO: 3861133 - RNA, 20 nt, Human
aguauuuauuuauguacuuu

SEQ ID NO: 3861134 - RNA, 16 nt, Human
aguauuuauuuuguaa

SEQ ID NO: 3861135 - RNA, 21 nt, Human
aguauuuauuuuguaauuaug

SEQ ID NO: 3861136 - RNA, 19 nt, Human
aguauuucagaugcuuuag

SEQ ID NO: 3861137 - RNA, 17 nt, Human
aguauuucaguguaguu

SEQ ID NO: 3861138 - RNA, 16 nt, Human
aguauuucaugcuggg

SEQ ID NO: 3861139 - RNA, 13 nt, Human
aguauuucauugc

SEQ ID NO: 3861140 - RNA, 19 nt, Human
aguauuucauugccugugu

SEQ ID NO: 3861141 - RNA, 21 nt, Human
aguauuucauugccuguguau

SEQ ID NO: 3861142 - RNA, 22 nt, Human
aguauuuccacuuguucucagg

SEQ ID NO: 3861143 - RNA, 12 nt, Human
aguauuugaaaa

SEQ ID NO: 3861144 - RNA, 13 nt, Human
aguauuugaaaac

SEQ ID NO: 3861145 - RNA, 23 nt, Human
aguauuugaaacugaauguuuau

SEQ ID NO: 3861146 - RNA, 16 nt, Human
aguauuugaauuaaaa

SEQ ID NO: 3861147 - RNA, 17 nt, Human
aguauuugaauuaaaac

SEQ ID NO: 3861148 - RNA, 20 nt, Human
aguauuugaauuaaaacuuc

SEQ ID NO: 3861149 - RNA, 23 nt, Human
aguauuugauucaaaauauuuaa

SEQ ID NO: 3861150 - RNA, 18 nt, Human
aguauuuguuaauuuaga

SEQ ID NO: 3861151 - RNA, 16 nt, Human
aguauuuuaaaauagc

SEQ ID NO: 3861152 - RNA, 18 nt, Human
aguauuuugaaguuuaca

SEQ ID NO: 3861153 - RNA, 20 nt, Human
aguauuuugaaguuuacauu

SEQ ID NO: 3861154 - RNA, 22 nt, Human
aguauuuugaaguuuacauuuu

SEQ ID NO: 3861155 - RNA, 23 nt, Human
aguauuuugaaguuuacauuuuu

SEQ ID NO: 3861156 - RNA, 14 nt, Human
aguauuuuguuuca

SEQ ID NO: 3861157 - RNA, 18 nt, Human
aguauuuuugacagaaua

SEQ ID NO: 3861158 - RNA, 19 nt, Human
aguauuuuugcugcuucug

SEQ ID NO: 3861159 - RNA, 18 nt, Human
aguauuuuuuacauuuua

SEQ ID NO: 3861160 - RNA, 22 nt, Human
aguauuuuuuacauuuuacaca

SEQ ID NO: 3861161 - RNA, 19 nt, Human
aguauuuuuucaaguugua

SEQ ID NO: 3861162 - RNA, 20 nt, Human
aguauuuuuuguauaauugg

SEQ ID NO: 3861163 - RNA, 15 nt, Human
agucaaaaggugccu

SEQ ID NO: 3861164 - RNA, 16 nt, Human
agucaaaaggugccug

SEQ ID NO: 3861165 - RNA, 21 nt, Human
agucaaaauauuuuuaaaaga

SEQ ID NO: 3861166 - RNA, 22 nt, Human
agucaaacacuugugacuuuug

SEQ ID NO: 3861167 - RNA, 18 nt, Human
agucaaacauuucaaagu

SEQ ID NO: 3861168 - RNA, 13 nt, Human
agucaaagacauu

SEQ ID NO: 3861169 - RNA, 16 nt, Human
agucaaagagaguuuu

SEQ ID NO: 3861170 - RNA, 23 nt, Human
agucaaagagaguuuuuaauaga

SEQ ID NO: 3861171 - RNA, 12 nt, Human
agucaaaguaaa

SEQ ID NO: 3861172 - RNA, 23 nt, Human
agucaaauguaauguggcuucug

SEQ ID NO: 3861173 - RNA, 14 nt, Human
agucaaauuaauaa

SEQ ID NO: 3861174 - RNA, 13 nt, Human
agucaaauugugu

SEQ ID NO: 3861175 - RNA, 16 nt, Human
agucaacaaacuauuu

SEQ ID NO: 3861176 - RNA, 14 nt, Human
agucaacaguaaac

SEQ ID NO: 3861177 - RNA, 15 nt, Human
agucaacaguaaacc

SEQ ID NO: 3861178 - RNA, 16 nt, Human
agucaacaguaaacca

SEQ ID NO: 3861179 - RNA, 17 nt, Human
agucaacaguaaaccac

SEQ ID NO: 3861180 - RNA, 20 nt, Human
agucaacaguaaaccacuga

SEQ ID NO: 3861181 - RNA, 15 nt, Human
agucaaccugccuga

SEQ ID NO: 3861182 - RNA, 21 nt, Human
agucaacuacacaaagcaggc

SEQ ID NO: 3861183 - RNA, 19 nt, Human
agucaagacgaacauguag

SEQ ID NO: 3861184 - RNA, 14 nt, Human
agucaagcuccucc

SEQ ID NO: 3861185 - RNA, 15 nt, Human
agucaagcuccuccu

SEQ ID NO: 3861186 - RNA, 22 nt, Human
agucaagcuccuccucccugca

SEQ ID NO: 3861187 - RNA, 16 nt, Human
agucaaggaguggcuu

SEQ ID NO: 3861188 - RNA, 13 nt, Human
agucaaggccugc

SEQ ID NO: 3861189 - RNA, 24 nt, Human
agucaaucaagucuguuuacugca

SEQ ID NO: 3861190 - RNA, 16 nt, Human
agucaaucauuucuca

SEQ ID NO: 3861191 - RNA, 22 nt, Human
agucaaucauuucucacugugu

SEQ ID NO: 3861192 - RNA, 18 nt, Human
agucaauccccucauuca

SEQ ID NO: 3861193 - RNA, 17 nt, Human
agucaauuacucuauaa

SEQ ID NO: 3861194 - RNA, 13 nt, Human
agucacaauguuc

SEQ ID NO: 3861195 - RNA, 23 nt, Human
agucacacagugagucgaggaca

SEQ ID NO: 3861196 - RNA, 16 nt, Human
agucacacgggggcag

SEQ ID NO: 3861197 - RNA, 16 nt, Human
agucacacugcuagca

SEQ ID NO: 3861198 - RNA, 13 nt, Human
agucacagggcag

SEQ ID NO: 3861199 - RNA, 14 nt, Human
agucacagggcagu

SEQ ID NO: 3861200 - RNA, 15 nt, Human
agucacaucacagga

SEQ ID NO: 3861201 - RNA, 14 nt, Human
agucacaucucuuc

SEQ ID NO: 3861202 - RNA, 23 nt, Human
agucacauggccuaugcacauau

SEQ ID NO: 3861203 - RNA, 20 nt, Human
agucacauuccaagccucau

SEQ ID NO: 3861204 - RNA, 18 nt, Human
agucacauuccugaacag

SEQ ID NO: 3861205 - RNA, 20 nt, Human
agucaccaaauagugugaaa

SEQ ID NO: 3861206 - RNA, 14 nt, Human
agucaccaagccca

SEQ ID NO: 3861207 - RNA, 15 nt, Human
agucaccaagcccag

SEQ ID NO: 3861208 - RNA, 18 nt, Human
agucaccacuccauuccc

SEQ ID NO: 3861209 - RNA, 13 nt, Human
aguuuggguaaaa

SEQ ID NO: 3861210 - RNA, 20 nt, Human
aguuuggguaaaauacuuuu

SEQ ID NO: 3861211 - RNA, 15 nt, Human
aguuugguauuugcg

SEQ ID NO: 3861212 - RNA, 16 nt, Human
aguuuggucuggacug

SEQ ID NO: 3861213 - RNA, 21 nt, Human
aguuugguuguguaagagaau

SEQ ID NO: 3861214 - RNA, 15 nt, Human
aguuuguaaauguua

SEQ ID NO: 3861215 - RNA, 22 nt, Human
aguuuguaaauguuauuucugc

SEQ ID NO: 3861216 - RNA, 19 nt, Human
aguuuguagguaaaaugua

SEQ ID NO: 3861217 - RNA, 23 nt, Human
aguuuguauuuuaauuaugggaa

SEQ ID NO: 3861218 - RNA, 16 nt, Human
aguuuguccauuugua

SEQ ID NO: 3861219 - RNA, 16 nt, Human
aguuuguccuguagag

SEQ ID NO: 3861220 - RNA, 14 nt, Human
aguuugucuauuuu

SEQ ID NO: 3861221 - RNA, 15 nt, Human
aguuugucuauuuua

SEQ ID NO: 3861222 - RNA, 21 nt, Human
aguuugucuauuuuaaaauaa

SEQ ID NO: 3861223 - RNA, 13 nt, Human
aguuugugagaaa

SEQ ID NO: 3861224 - RNA, 14 nt, Human
aguuugugagaaac

SEQ ID NO: 3861225 - RNA, 14 nt, Human
aguuugugugucuu

SEQ ID NO: 3861226 - RNA, 15 nt, Human
aguuugugugucuua

SEQ ID NO: 3861227 - RNA, 21 nt, Human
aguuuguguguugucucuuga

SEQ ID NO: 3861228 - RNA, 20 nt, Human
aguuuguguguugucuugaa

SEQ ID NO: 3861229 - RNA, 20 nt, Human
aguuuguuuaaugugaacuu

SEQ ID NO: 3861230 - RNA, 21 nt, Human
aguuuguuuauuacuuauuug

SEQ ID NO: 3861231 - RNA, 17 nt, Human
aguuuguuucuuugaau

SEQ ID NO: 3861232 - RNA, 22 nt, Human
aguuuuaaaaaaauaaaacauu

SEQ ID NO: 3861233 - RNA, 16 nt, Human
aguuuuaccagaugau

SEQ ID NO: 3861234 - RNA, 20 nt, Human
aguuuuacuuuuaaacugug

SEQ ID NO: 3861235 - RNA, 19 nt, Human
aguuuuaggguacaugugc

SEQ ID NO: 3861236 - RNA, 14 nt, Human
aguuuuaguuuucu

SEQ ID NO: 3861237 - RNA, 19 nt, Human
aguuuuauagccuggacug

SEQ ID NO: 3861238 - RNA, 13 nt, Human
aguuuuauauauu

SEQ ID NO: 3861239 - RNA, 19 nt, Human
aguuuuaucacauguaugu

SEQ ID NO: 3861240 - RNA, 21 nt, Human
aguuuuaucacauguauguuu

SEQ ID NO: 3861241 - RNA, 13 nt, Human
aguuuuaucauuu

SEQ ID NO: 3861242 - RNA, 20 nt, Human
aguuuuaucauuuucaaaau

SEQ ID NO: 3861243 - RNA, 15 nt, Human
aguuuuaugcucuuu

SEQ ID NO: 3861244 - RNA, 14 nt, Human
aguuuuauuuauau

SEQ ID NO: 3861245 - RNA, 15 nt, Human
aguuuuauuuauauu

SEQ ID NO: 3861246 - RNA, 16 nt, Human
aguuuuauuuuauguu

SEQ ID NO: 3861247 - RNA, 20 nt, Human
aguuuuauuuucuaaaguac

SEQ ID NO: 3861248 - RNA, 22 nt, Human
aguuuucaagucaaauuaauaa

SEQ ID NO: 3861249 - RNA, 17 nt, Human
aguuuucaccucgaauu

SEQ ID NO: 3861250 - RNA, 19 nt, Human
aguuuucagaaaaagaaau

SEQ ID NO: 3861251 - RNA, 20 nt, Human
aguuuucauccauaacugaa

SEQ ID NO: 3861252 - RNA, 21 nt, Human
aguuuucauccauaacugaac

SEQ ID NO: 3861253 - RNA, 12 nt, Human
aguuuuccauga

SEQ ID NO: 3861254 - RNA, 20 nt, Human
aguuuuccauggcaggaagg

SEQ ID NO: 3861255 - RNA, 16 nt, Human
aguuuuccuaaaugua

SEQ ID NO: 3861256 - RNA, 17 nt, Human
aguuuuccuaaauguau

SEQ ID NO: 3861257 - RNA, 17 nt, Human
aguuuucuccucccagg

SEQ ID NO: 3861258 - RNA, 17 nt, Human
aguuuucuccuuuuacu

SEQ ID NO: 3861259 - RNA, 12 nt, Human
aguuuucucuua

SEQ ID NO: 3861260 - RNA, 12 nt, Human
aguuuucugaga

SEQ ID NO: 3861261 - RNA, 18 nt, Human
aguuuucuggcuggagcc

SEQ ID NO: 3861262 - RNA, 14 nt, Human
aguuuucuucugug

SEQ ID NO: 3861263 - RNA, 15 nt, Human
aguuuucuuguugcu

SEQ ID NO: 3861264 - RNA, 18 nt, Human
aguuuucuuuccuccuuu

SEQ ID NO: 3861265 - RNA, 17 nt, Human
aguuuucuuuuaauuuu

SEQ ID NO: 3861266 - RNA, 15 nt, Human
aguuuugaaaagcua

SEQ ID NO: 3861267 - RNA, 17 nt, Human
aguuuugaaaagcuauu

SEQ ID NO: 3861268 - RNA, 18 nt, Human
aguuuugaauguuaagaa

SEQ ID NO: 3861269 - RNA, 23 nt, Human
aguuuugacaucagccagcugcc

SEQ ID NO: 3861270 - RNA, 12 nt, Human
aguuuugagaac

SEQ ID NO: 3861271 - RNA, 19 nt, Human
aguuuugaugacuggcauu

SEQ ID NO: 3861272 - RNA, 15 nt, Human
aguuuuggaugcagu

SEQ ID NO: 3861273 - RNA, 18 nt, Human
aguuuuggaugcagugcu

SEQ ID NO: 3861274 - RNA, 19 nt, Human
aguuuuggaugcagugcuc

SEQ ID NO: 3861275 - RNA, 14 nt, Human
aguuuuguauucau

SEQ ID NO: 3861276 - RNA, 12 nt, Human
aguuuugucuug

SEQ ID NO: 3861277 - RNA, 14 nt, Human
aguuuugucuugaa

SEQ ID NO: 3861278 - RNA, 12 nt, Human
aguuuugugaaa

SEQ ID NO: 3861279 - RNA, 13 nt, Human
aguuuugugaaau

SEQ ID NO: 3861280 - RNA, 14 nt, Human
aguuuugugaaauu

SEQ ID NO: 3861281 - RNA, 16 nt, Human
aguuuugugaaauuuu

SEQ ID NO: 3861282 - RNA, 19 nt, Human
aguuuugugaaauuuuuca

SEQ ID NO: 3861283 - RNA, 20 nt, Human
aguuuugugaaauuuuucau

SEQ ID NO: 3861284 - RNA, 12 nt, Human
aguuuuguguuu

SEQ ID NO: 3861285 - RNA, 21 nt, Human
aguuuuguguuuguuguagau

SEQ ID NO: 3861286 - RNA, 18 nt, Human
aguuuuguuuuaaaauua

SEQ ID NO: 3861287 - RNA, 17 nt, Human
aguuuuuaaaauaucuu

SEQ ID NO: 3861288 - RNA, 19 nt, Human
aguuuuuaagguuauuuau

SEQ ID NO: 3861289 - RNA, 18 nt, Human
aguuuuuacagcuguguu

SEQ ID NO: 3861290 - RNA, 23 nt, Human
aguuuuuaccuaccacagugucu

SEQ ID NO: 3861291 - RNA, 15 nt, Human
aguuuuuacugaaca

SEQ ID NO: 3861292 - RNA, 16 nt, Human
aguuuuuacuuucugu

SEQ ID NO: 3861293 - RNA, 21 nt, Human
aguuuuuaguaaucuguacau

SEQ ID NO: 3861294 - RNA, 17 nt, Human
aguuuuuauauguugua

SEQ ID NO: 3861295 - RNA, 13 nt, Human
aguuuuucuguca

SEQ ID NO: 3861296 - RNA, 23 nt, Human
aguuuuucuguuuuguuuggcaa

SEQ ID NO: 3861297 - RNA, 13 nt, Human
aguuuuugauagu

SEQ ID NO: 3861298 - RNA, 12 nt, Human
aguuuuuguuug

SEQ ID NO: 3861299 - RNA, 20 nt, Human
aguuuuuucaucuucaguug

SEQ ID NO: 3861300 - RNA, 23 nt, Human
aguuuuuucaucuucaguugucu

SEQ ID NO: 3861301 - RNA, 20 nt, Human
aguuuuuucuuccuuuucac

SEQ ID NO: 3861302 - RNA, 23 nt, Human
aguuuuuucuuccuuuucacugc

SEQ ID NO: 3861303 - RNA, 23 nt, Human
aguuuuuugaaauuaugugacau

SEQ ID NO: 3861304 - RNA, 16 nt, Human
aguuuuuuguuuuaca

SEQ ID NO: 3861305 - RNA, 19 nt, Human
aguuuuuuuccuucaagaa

SEQ ID NO: 3861306 - RNA, 18 nt, Human
auaaaaaaaagaaaaaag

SEQ ID NO: 3861307 - RNA, 17 nt, Human
auaaaaaaaagaaauga

SEQ ID NO: 3861308 - RNA, 14 nt, Human
auaaaaaaaauagu

SEQ ID NO: 3861309 - RNA, 15 nt, Human
auaaaaaaaauaguu

SEQ ID NO: 3861310 - RNA, 18 nt, Human
auaaaaaaaaugaaaugu

SEQ ID NO: 3861311 - RNA, 16 nt, Human
auaaaaaagaucccaa

SEQ ID NO: 3861312 - RNA, 16 nt, Human
auaaaaaagucucuau

SEQ ID NO: 3861313 - RNA, 20 nt, Human
auaaaaaauaauaauacaag

SEQ ID NO: 3861314 - RNA, 14 nt, Human
auaaaaaauaugua

SEQ ID NO: 3861315 - RNA, 20 nt, Human
auaaaaaauauguauuuacc

SEQ ID NO: 3861316 - RNA, 16 nt, Human
auaaaaaaucaugcca

SEQ ID NO: 3861317 - RNA, 13 nt, Human
auaaaaaaugaaa

SEQ ID NO: 3861318 - RNA, 12 nt, Human
auaaaaaaugga

SEQ ID NO: 3861319 - RNA, 18 nt, Human
auaaaaaauggugccuga

SEQ ID NO: 3861320 - RNA, 16 nt, Human
auaaaaaauuaugaca

SEQ ID NO: 3861321 - RNA, 13 nt, Human
auaaaaaauuuug

SEQ ID NO: 3861322 - RNA, 19 nt, Human
auaaaaaauuuuguaauuu

SEQ ID NO: 3861323 - RNA, 12 nt, Human
auaaaaacuaaa

SEQ ID NO: 3861324 - RNA, 18 nt, Human
auaaaaacuaaauuguaa

SEQ ID NO: 3861325 - RNA, 20 nt, Human
auaaaaagacauucuuccaa

SEQ ID NO: 3861326 - RNA, 18 nt, Human
auaaaaagaucacuuucu

SEQ ID NO: 3861327 - RNA, 12 nt, Human
auaaaaagcaaa

SEQ ID NO: 3861328 - RNA, 16 nt, Human
auaaaaagcaaaacaa

SEQ ID NO: 3861329 - RNA, 18 nt, Human
auaaaaagccagggcugg

SEQ ID NO: 3861330 - RNA, 17 nt, Human
auaaaaagcuuccauga

SEQ ID NO: 3861331 - RNA, 21 nt, Human
auaaaaagcuuccaugauucu

SEQ ID NO: 3861332 - RNA, 12 nt, Human
auaaaaaggcac

SEQ ID NO: 3861333 - RNA, 12 nt, Human
auaaaaaggugu

SEQ ID NO: 3861334 - RNA, 18 nt, Human
auaaaaaguuaaaaaguu

SEQ ID NO: 3861335 - RNA, 19 nt, Human
auaaaaauaaaaaagaucc

SEQ ID NO: 3861336 - RNA, 15 nt, Human
auaaaaauaaauaga

SEQ ID NO: 3861337 - RNA, 22 nt, Human
auaaaaauaaauuugguucuaa

SEQ ID NO: 3861338 - RNA, 14 nt, Human
auaaaaauacugac

SEQ ID NO: 3861339 - RNA, 22 nt, Human
auaaaaauauuguguugugaau

SEQ ID NO: 3861340 - RNA, 19 nt, Human
auaaaaaucauggcaacau

SEQ ID NO: 3861341 - RNA, 12 nt, Human
auaaaaaugaca

SEQ ID NO: 3861342 - RNA, 12 nt, Human
auaaaaauguuu

SEQ ID NO: 3861343 - RNA, 18 nt, Human
auaaaaauuacuguguua

SEQ ID NO: 3861344 - RNA, 18 nt, Human
auaaaaauucuagauuac

SEQ ID NO: 3861345 - RNA, 19 nt, Human
auaaaacagaguaaucuug

SEQ ID NO: 3861346 - RNA, 21 nt, Human
auaaaacagaguaaucuuguu

SEQ ID NO: 3861347 - RNA, 22 nt, Human
auaaaacauuaagaaaaucaua

SEQ ID NO: 3861348 - RNA, 11 nt, Human
auaaaacauuu

SEQ ID NO: 3861349 - RNA, 13 nt, Human
auaaaacauuuua

SEQ ID NO: 3861350 - RNA, 19 nt, Human
auaaaacauuuuaaaugga

SEQ ID NO: 3861351 - RNA, 20 nt, Human
auaaaacauuuucacacaau

SEQ ID NO: 3861352 - RNA, 13 nt, Human
auaaaaccuuuca

SEQ ID NO: 3861353 - RNA, 14 nt, Human
auaaaaccuuucaa

SEQ ID NO: 3861354 - RNA, 15 nt, Human
auaaaaccuuucaaa

SEQ ID NO: 3861355 - RNA, 14 nt, Human
auaaccacugcuuc

SEQ ID NO: 3861356 - RNA, 22 nt, Human
auaaccacuuaaaaaaugucca

SEQ ID NO: 3861357 - RNA, 14 nt, Human
auaaccagacacaa

SEQ ID NO: 3861358 - RNA, 20 nt, Human
auaaccaugugaaaaggcaa

SEQ ID NO: 3861359 - RNA, 14 nt, Human
auaaccuaauuaau

SEQ ID NO: 3861360 - RNA, 13 nt, Human
auaaccuauauga

SEQ ID NO: 3861361 - RNA, 18 nt, Human
auaaccuauaugauuuau

SEQ ID NO: 3861362 - RNA, 23 nt, Human
auaaccuauuuugaaaaauuccu

SEQ ID NO: 3861363 - RNA, 22 nt, Human
auaacgauaaaagacagugaaa

SEQ ID NO: 3861364 - RNA, 16 nt, Human
auaacgugauacauuu

SEQ ID NO: 3861365 - RNA, 18 nt, Human
auaacguguucaauauuu

SEQ ID NO: 3861366 - RNA, 17 nt, Human
auaacguuuaagccaaa

SEQ ID NO: 3861367 - RNA, 14 nt, Human
auaacuaaauuuga

SEQ ID NO: 3861368 - RNA, 18 nt, Human
auaacuaaauuugauacu

SEQ ID NO: 3861369 - RNA, 15 nt, Human
auaacuaacaugucc

SEQ ID NO: 3861370 - RNA, 20 nt, Human
auaacuacuccggagacagg

SEQ ID NO: 3861371 - RNA, 19 nt, Human
auaacuagauggugcugag

SEQ ID NO: 3861372 - RNA, 15 nt, Human
auaacuauucaguug

SEQ ID NO: 3861373 - RNA, 17 nt, Human
auaacucaucauaaaau

SEQ ID NO: 3861374 - RNA, 18 nt, Human
auaacucaucauaaaaua

SEQ ID NO: 3861375 - RNA, 19 nt, Human
auaacucaucauaaaauaa

SEQ ID NO: 3861376 - RNA, 15 nt, Human
auaacuccucauugu

SEQ ID NO: 3861377 - RNA, 20 nt, Human
auaacuccuucuuguaguag

SEQ ID NO: 3861378 - RNA, 11 nt, Human
auaacucugca

SEQ ID NO: 3861379 - RNA, 12 nt, Human
auaacucuuugg

SEQ ID NO: 3861380 - RNA, 14 nt, Human
auaacugaaaauua

SEQ ID NO: 3861381 - RNA, 12 nt, Human
auaacugacaaa

SEQ ID NO: 3861382 - RNA, 12 nt, Human
auaacugagaau

SEQ ID NO: 3861383 - RNA, 12 nt, Human
auaacugaggag

SEQ ID NO: 3861384 - RNA, 18 nt, Human
auaacugccuuaaaacuu

SEQ ID NO: 3861385 - RNA, 12 nt, Human
auaacuggaaac

SEQ ID NO: 3861386 - RNA, 21 nt, Human
auaacuggaacacucuauaac

SEQ ID NO: 3861387 - RNA, 19 nt, Human
auaacuggaggaauuuucu

SEQ ID NO: 3861388 - RNA, 19 nt, Human
auaacuguaauuauuugaa

SEQ ID NO: 3861389 - RNA, 15 nt, Human
auaacuguauuugaa

SEQ ID NO: 3861390 - RNA, 12 nt, Human
auaacugugaag

SEQ ID NO: 3861391 - RNA, 16 nt, Human
auaacuguuuauaugu

SEQ ID NO: 3861392 - RNA, 20 nt, Human
auaacuguuuauauguguug

SEQ ID NO: 3861393 - RNA, 19 nt, Human
auaacuuaaaaauguaaau

SEQ ID NO: 3861394 - RNA, 12 nt, Human
auaacuuaaaau

SEQ ID NO: 3861395 - RNA, 18 nt, Human
auaacuuaaugaaaacaa

SEQ ID NO: 3861396 - RNA, 19 nt, Human
auaacuuaaugaaaacaau

SEQ ID NO: 3861397 - RNA, 15 nt, Human
auaacuuauauugua

SEQ ID NO: 3861398 - RNA, 19 nt, Human
auaacuucuuaaaaguugu

SEQ ID NO: 3861399 - RNA, 20 nt, Human
auaacuugaugcaugugguu

SEQ ID NO: 3861400 - RNA, 22 nt, Human
auaacuuuaacuucuguuuuac

SEQ ID NO: 3861401 - RNA, 12 nt, Human
auaacuuugcuu

SEQ ID NO: 3861402 - RNA, 14 nt, Human
auaagaaaaacuuu

SEQ ID NO: 3861403 - RNA, 21 nt, Human
auaagaaaagauguagauuua

SEQ ID NO: 3861404 - RNA, 21 nt, Human
auaagaaaauauauucuuuca

SEQ ID NO: 3861405 - RNA, 21 nt, Human
auaagaaacuuuuuuauuuaa

SEQ ID NO: 3861406 - RNA, 13 nt, Human
auaagaaagacau

SEQ ID NO: 3861407 - RNA, 14 nt, Human
auaagaaagacauc

SEQ ID NO: 3861408 - RNA, 11 nt, Human
auaagaaagcc

SEQ ID NO: 3861409 - RNA, 15 nt, Human
auaagaaaguuucac

SEQ ID NO: 3861410 - RNA, 21 nt, Human
auaagaaauaaugcuacaauu

SEQ ID NO: 3861411 - RNA, 22 nt, Human
auaagaacaauagguaaagcua

SEQ ID NO: 3861412 - RNA, 23 nt, Human
auaagaaccuuuugagugccuua

SEQ ID NO: 3861413 - RNA, 23 nt, Human
auaagaagaaguucauguccaaa

SEQ ID NO: 3861414 - RNA, 14 nt, Human
auaagaagcaaaua

SEQ ID NO: 3861415 - RNA, 18 nt, Human
auaagaauaaaauguuga

SEQ ID NO: 3861416 - RNA, 17 nt, Human
auaagaauuauuuugau

SEQ ID NO: 3861417 - RNA, 14 nt, Human
auaagaauuugcau

SEQ ID NO: 3861418 - RNA, 17 nt, Human
auaagaauuugcauacu

SEQ ID NO: 3861419 - RNA, 21 nt, Human
auaagacaaugacauacgcuu

SEQ ID NO: 3861420 - RNA, 21 nt, Human
auaagacggauuuauuuuucc

SEQ ID NO: 3861421 - RNA, 17 nt, Human
auaagacuuagauugug

SEQ ID NO: 3861422 - RNA, 20 nt, Human
auaagagagaacaacuacug

SEQ ID NO: 3861423 - RNA, 14 nt, Human
auaagagcaugaaa

SEQ ID NO: 3861424 - RNA, 21 nt, Human
auaagaggcugauaauuccag

SEQ ID NO: 3861425 - RNA, 17 nt, Human
auaagagggcacacacu

SEQ ID NO: 3861426 - RNA, 17 nt, Human
auaagauaaaugugcug

SEQ ID NO: 3861427 - RNA, 14 nt, Human
auaagaugacugug

SEQ ID NO: 3861428 - RNA, 11 nt, Human
auaagauucua

SEQ ID NO: 3861429 - RNA, 12 nt, Human
auaagauucuaa

SEQ ID NO: 3861430 - RNA, 17 nt, Human
auaagauucuaacgguc

SEQ ID NO: 3861431 - RNA, 10 nt, Human
auaagcaaaa

SEQ ID NO: 3861432 - RNA, 14 nt, Human
auaagcaaaauccu

SEQ ID NO: 3861433 - RNA, 21 nt, Human
auaagcaaaauccugacuauu

SEQ ID NO: 3861434 - RNA, 12 nt, Human
auaagcaacaau

SEQ ID NO: 3861435 - RNA, 23 nt, Human
auaagcaagaaggcaaaaauagu

SEQ ID NO: 3861436 - RNA, 12 nt, Human
auaagcaagaga

SEQ ID NO: 3861437 - RNA, 14 nt, Human
auaagcaagagaga

SEQ ID NO: 3861438 - RNA, 16 nt, Human
auaagcaagagagaug

SEQ ID NO: 3861439 - RNA, 17 nt, Human
auaagcaaucaagguua

SEQ ID NO: 3861440 - RNA, 13 nt, Human
auaagcacuguaa

SEQ ID NO: 3861441 - RNA, 17 nt, Human
auaagcacuguaaacuu

SEQ ID NO: 3861442 - RNA, 18 nt, Human
auaagcacugugcuaaua

SEQ ID NO: 3861443 - RNA, 22 nt, Human
auaagcagguggaucuauuuca

SEQ ID NO: 3861444 - RNA, 14 nt, Human
auaagcaucauuau

SEQ ID NO: 3861445 - RNA, 15 nt, Human
auaagcaucauuauu

SEQ ID NO: 3861446 - RNA, 19 nt, Human
auaagcaucauuauuuaug

SEQ ID NO: 3861447 - RNA, 15 nt, Human
auaagcauugaaauu

SEQ ID NO: 3861448 - RNA, 22 nt, Human
auaagccaaaaaaugcuugcuu

SEQ ID NO: 3861449 - RNA, 22 nt, Human
auaagccaauuuuucugcacug

SEQ ID NO: 3861450 - RNA, 18 nt, Human
auaagcggcguaaguuua

SEQ ID NO: 3861451 - RNA, 16 nt, Human
auaagcuaaagaggcu

SEQ ID NO: 3861452 - RNA, 21 nt, Human
auaagcuaacaccagacagac

SEQ ID NO: 3861453 - RNA, 19 nt, Human
auaagcuacuagcaaaaua

SEQ ID NO: 3861454 - RNA, 22 nt, Human
auaagcuacuagcaaaauaaaa

SEQ ID NO: 3861455 - RNA, 17 nt, Human
auaagcuaguugaauac

SEQ ID NO: 3861456 - RNA, 20 nt, Human
auaagcuaguugaauacuug

SEQ ID NO: 3861457 - RNA, 15 nt, Human
auaagcuauuugaug

SEQ ID NO: 3861458 - RNA, 16 nt, Human
auaagcuauuugaugu

SEQ ID NO: 3861459 - RNA, 23 nt, Human
auaagcuauuugauguaauacuu

SEQ ID NO: 3861460 - RNA, 18 nt, Human
auaagcuuaugcuuaaau

SEQ ID NO: 3861461 - RNA, 13 nt, Human
auaagcuuccagg

SEQ ID NO: 3861462 - RNA, 23 nt, Human
auaagcuuccaggcugcauagaa

SEQ ID NO: 3861463 - RNA, 10 nt, Human
auaaggaauu

SEQ ID NO: 3861464 - RNA, 17 nt, Human
auaaggaauuauagacc

SEQ ID NO: 3861465 - RNA, 10 nt, Human
auaaggacug

SEQ ID NO: 3861466 - RNA, 11 nt, Human
auaaggacugc

SEQ ID NO: 3861467 - RNA, 15 nt, Human
auaaggacugcaugg

SEQ ID NO: 3861468 - RNA, 14 nt, Human
auaaggaucagaac

SEQ ID NO: 3861469 - RNA, 16 nt, Human
auaaggccuuaauaug

SEQ ID NO: 3861470 - RNA, 11 nt, Human
auaaggcuuca

SEQ ID NO: 3861471 - RNA, 13 nt, Human
auaagggaaaaau

SEQ ID NO: 3861472 - RNA, 22 nt, Human
auaagggaaguaguuaucaugu

SEQ ID NO: 3861473 - RNA, 23 nt, Human
auaagggaaguaguuaucauguu

SEQ ID NO: 3861474 - RNA, 13 nt, Human
auaagggcagagu

SEQ ID NO: 3861475 - RNA, 21 nt, Human
auaaggggucaaaauuugcug

SEQ ID NO: 3861476 - RNA, 17 nt, Human
auaagggguuugccauu

SEQ ID NO: 3861477 - RNA, 21 nt, Human
auaagguaccuuucacauaga

SEQ ID NO: 3861478 - RNA, 20 nt, Human
auaaggugcucucuuucugu

SEQ ID NO: 3861479 - RNA, 13 nt, Human
auaagguguauug

SEQ ID NO: 3861480 - RNA, 14 nt, Human
auaagguguauugc

SEQ ID NO: 3861481 - RNA, 20 nt, Human
auaagguguuuucuguguaa

SEQ ID NO: 3861482 - RNA, 22 nt, Human
auaagguguuuucuguguaacc

SEQ ID NO: 3861483 - RNA, 19 nt, Human
auaagguuucguuucugua

SEQ ID NO: 3861484 - RNA, 23 nt, Human
auaagguuucguuucuguauaca

SEQ ID NO: 3861485 - RNA, 15 nt, Human
auaaguaaaugcuag

SEQ ID NO: 3861486 - RNA, 13 nt, Human
auaaguaaguuug

SEQ ID NO: 3861487 - RNA, 18 nt, Human
auaaguacuguguacaga

SEQ ID NO: 3861488 - RNA, 19 nt, Human
auaaguauuucaaauugga

SEQ ID NO: 3861489 - RNA, 22 nt, Human
auaaguccucuagugaauguag

SEQ ID NO: 3861490 - RNA, 21 nt, Human
auaaguccuugcaagaaucag

SEQ ID NO: 3861491 - RNA, 22 nt, Human
auaagugaaauggauacuacau

SEQ ID NO: 3861492 - RNA, 12 nt, Human
auaagugcccuc

SEQ ID NO: 3861493 - RNA, 14 nt, Human
auaagugcuguaua

SEQ ID NO: 3861494 - RNA, 15 nt, Human
auaagugcuguauaa

SEQ ID NO: 3861495 - RNA, 18 nt, Human
auaaguggaggcacuuua

SEQ ID NO: 3861496 - RNA, 19 nt, Human
auaaguggaggcacuuuag

SEQ ID NO: 3861497 - RNA, 21 nt, Human
auaaguguauuuugaaauugu

SEQ ID NO: 3861498 - RNA, 14 nt, Human
auaaguguauuuuu

SEQ ID NO: 3861499 - RNA, 20 nt, Human
auaagugugugguagaaaca

SEQ ID NO: 3861500 - RNA, 19 nt, Human
auaaguguguguuuuucau

SEQ ID NO: 3861501 - RNA, 12 nt, Human
auauugucagau

SEQ ID NO: 3861502 - RNA, 15 nt, Human
auauugucagauauu

SEQ ID NO: 3861503 - RNA, 14 nt, Human
auauugugauucug

SEQ ID NO: 3861504 - RNA, 19 nt, Human
auauugugauucugccuuu

SEQ ID NO: 3861505 - RNA, 12 nt, Human
auauugugccaa

SEQ ID NO: 3861506 - RNA, 19 nt, Human
auauugugccaauauguau

SEQ ID NO: 3861507 - RNA, 18 nt, Human
auauuguguugugaaugu

SEQ ID NO: 3861508 - RNA, 17 nt, Human
auauuguuaaucucugu

SEQ ID NO: 3861509 - RNA, 20 nt, Human
auauuguuauuauauaauua

SEQ ID NO: 3861510 - RNA, 15 nt, Human
auauuguugacaacu

SEQ ID NO: 3861511 - RNA, 16 nt, Human
auauuguuguauaauu

SEQ ID NO: 3861512 - RNA, 14 nt, Human
auauuguuucugca

SEQ ID NO: 3861513 - RNA, 18 nt, Human
auauuguuucuuuaucac

SEQ ID NO: 3861514 - RNA, 19 nt, Human
auauuguuugguaaauguu

SEQ ID NO: 3861515 - RNA, 21 nt, Human
auauuguuugguaaauguuuc

SEQ ID NO: 3861516 - RNA, 13 nt, Human
auauuguuuucag

SEQ ID NO: 3861517 - RNA, 20 nt, Human
auauuguuuucaguguacau

SEQ ID NO: 3861518 - RNA, 17 nt, Human
auauuguuuuucuuucu

SEQ ID NO: 3861519 - RNA, 13 nt, Human
auauuuaaaaaua

SEQ ID NO: 3861520 - RNA, 12 nt, Human
auauuuaaacag

SEQ ID NO: 3861521 - RNA, 12 nt, Human
auauuuaaacuc

SEQ ID NO: 3861522 - RNA, 14 nt, Human
auauuuaaagggaa

SEQ ID NO: 3861523 - RNA, 19 nt, Human
auauuuaacucucuuuaug

SEQ ID NO: 3861524 - RNA, 22 nt, Human
auauuuaagaaaauacaauaaa

SEQ ID NO: 3861525 - RNA, 23 nt, Human
auauuuaagaaaauacaauaaac

SEQ ID NO: 3861526 - RNA, 14 nt, Human
auauuuaaggagau

SEQ ID NO: 3861527 - RNA, 15 nt, Human
auauuuaaguauuca

SEQ ID NO: 3861528 - RNA, 23 nt, Human
auauuuaaugcauuaaaccuguc

SEQ ID NO: 3861529 - RNA, 21 nt, Human
auauuuaauguugaacaaaau

SEQ ID NO: 3861530 - RNA, 14 nt, Human
auauuuaauguuuu

SEQ ID NO: 3861531 - RNA, 21 nt, Human
auauuuaauguuuuaaaugua

SEQ ID NO: 3861532 - RNA, 22 nt, Human
auauuuaauguuuuaaauguac

SEQ ID NO: 3861533 - RNA, 13 nt, Human
auauuuacaaaug

SEQ ID NO: 3861534 - RNA, 16 nt, Human
auauuuacaauguauu

SEQ ID NO: 3861535 - RNA, 16 nt, Human
auauuuacauaugaaa

SEQ ID NO: 3861536 - RNA, 21 nt, Human
auauuuacaugaauugcauuu

SEQ ID NO: 3861537 - RNA, 15 nt, Human
auauuuaccucagcc

SEQ ID NO: 3861538 - RNA, 14 nt, Human
auauuuacucuaua

SEQ ID NO: 3861539 - RNA, 19 nt, Human
auauuuacuucuuauacau

SEQ ID NO: 3861540 - RNA, 15 nt, Human
auauuuagcaaauaa

SEQ ID NO: 3861541 - RNA, 14 nt, Human
auauuuagcuccaa

SEQ ID NO: 3861542 - RNA, 18 nt, Human
auauuuaguguucauaaa

SEQ ID NO: 3861543 - RNA, 22 nt, Human
auauuuaguuauaguuucagau

SEQ ID NO: 3861544 - RNA, 14 nt, Human
auauuuauaaaacu

SEQ ID NO: 3861545 - RNA, 17 nt, Human
auauuuauaaaugagca

SEQ ID NO: 3861546 - RNA, 16 nt, Human
auauuuauaacagcau

SEQ ID NO: 3861547 - RNA, 13 nt, Human
auauuuauaacuc

SEQ ID NO: 3861548 - RNA, 17 nt, Human
auauuuauaacucauca

SEQ ID NO: 3861549 - RNA, 20 nt, Human
auauuuauaacucaucauaa

SEQ ID NO: 3861550 - RNA, 15 nt, Human
auauuuauauauuua

SEQ ID NO: 3861551 - RNA, 15 nt, Human
auauuuauccaaaau

SEQ ID NO: 3861552 - RNA, 20 nt, Human
auauuuauccaaaaugugua

SEQ ID NO: 3861553 - RNA, 19 nt, Human
auauuuauggggggagaac

SEQ ID NO: 3861554 - RNA, 22 nt, Human
auauuuauuaaauaaaaucaau

SEQ ID NO: 3861555 - RNA, 15 nt, Human
auauuuauuaaauuu

SEQ ID NO: 3861556 - RNA, 23 nt, Human
auauuuauuauuuucaccuguuu

SEQ ID NO: 3861557 - RNA, 19 nt, Human
auauuuauucauuauuugu

SEQ ID NO: 3861558 - RNA, 16 nt, Human
auauuuauugacucuu

SEQ ID NO: 3861559 - RNA, 18 nt, Human
auauuuauugacucuuga

SEQ ID NO: 3861560 - RNA, 12 nt, Human
auauuuauugcu

SEQ ID NO: 3861561 - RNA, 18 nt, Human
auauuuauugcuuuauaa

SEQ ID NO: 3861562 - RNA, 16 nt, Human
auauuuauuuaaagca

SEQ ID NO: 3861563 - RNA, 14 nt, Human
auauuuauuuuaau

SEQ ID NO: 3861564 - RNA, 18 nt, Human
auauuuauuuuaauaaug

SEQ ID NO: 3861565 - RNA, 18 nt, Human
auauuuauuuuuuuaagc

SEQ ID NO: 3861566 - RNA, 13 nt, Human
auauuucaagaca

SEQ ID NO: 3861567 - RNA, 23 nt, Human
auauuucagauaaucacaauaca

SEQ ID NO: 3861568 - RNA, 22 nt, Human
auauuuccaggcugcauuugua

SEQ ID NO: 3861569 - RNA, 23 nt, Human
auauuuccaggcugcauuuguau

SEQ ID NO: 3861570 - RNA, 18 nt, Human
auauuuccauauggauuu

SEQ ID NO: 3861571 - RNA, 22 nt, Human
auauuucccaugauuucaugua

SEQ ID NO: 3861572 - RNA, 22 nt, Human
auauuucccuaaaauacauuua

SEQ ID NO: 3861573 - RNA, 21 nt, Human
auauuucccuccccuggggac

SEQ ID NO: 3861574 - RNA, 21 nt, Human
auauuuccuauaccauuuccg

SEQ ID NO: 3861575 - RNA, 22 nt, Human
auauuuccuauaccauuuccgu

SEQ ID NO: 3861576 - RNA, 15 nt, Human
auauuuccuuuaugu

SEQ ID NO: 3861577 - RNA, 21 nt, Human
auauuuccuuuaugugaauuu

SEQ ID NO: 3861578 - RNA, 14 nt, Human
auauuucuauugaa

SEQ ID NO: 3861579 - RNA, 21 nt, Human
auauuucuauuuuauuaugaa

SEQ ID NO: 3861580 - RNA, 14 nt, Human
auauuugaaauauu

SEQ ID NO: 3861581 - RNA, 23 nt, Human
auauuugaaauauugacuuuuua

SEQ ID NO: 3861582 - RNA, 11 nt, Human
auauuugaauc

SEQ ID NO: 3861583 - RNA, 13 nt, Human
auauuugaaucuu

SEQ ID NO: 3861584 - RNA, 16 nt, Human
auauuugaaucuuguc

SEQ ID NO: 3861585 - RNA, 21 nt, Human
auauuugaauguaugcuucau

SEQ ID NO: 3861586 - RNA, 15 nt, Human
auauuugacuauucu

SEQ ID NO: 3861587 - RNA, 22 nt, Human
auauuugacuugcaugaagaga

SEQ ID NO: 3861588 - RNA, 17 nt, Human
auauuugaggaguguua

SEQ ID NO: 3861589 - RNA, 16 nt, Human
auauuugauuuauuaa

SEQ ID NO: 3861590 - RNA, 17 nt, Human
auauuugcaaaguguau

SEQ ID NO: 3861591 - RNA, 20 nt, Human
auauuuggaugcagaguuca

SEQ ID NO: 3861592 - RNA, 19 nt, Human
auauuugguuuuccuguau

SEQ ID NO: 3861593 - RNA, 20 nt, Human
auauuuguaaauuuauguga

SEQ ID NO: 3861594 - RNA, 13 nt, Human
auauuuguacaaa

SEQ ID NO: 3861595 - RNA, 14 nt, Human
auauuuguacaaaa

SEQ ID NO: 3861596 - RNA, 18 nt, Human
auauuuguacuguuuaau

SEQ ID NO: 3861597 - RNA, 22 nt, Human
auauuuguacuguuuaauguuc

SEQ ID NO: 3861598 - RNA, 17 nt, Human
auauuuguacuuucugu

SEQ ID NO: 3861599 - RNA, 19 nt, Human
auauuuguacuuucuguua

SEQ ID NO: 3861600 - RNA, 13 nt, Human
auauuuguaggag

SEQ ID NO: 3861601 - RNA, 18 nt, Human
auauuuguauaguugcuu

SEQ ID NO: 3861602 - RNA, 13 nt, Human
auauuuguaugau

SEQ ID NO: 3861603 - RNA, 17 nt, Human
auauuuguauuuauucu

SEQ ID NO: 3861604 - RNA, 21 nt, Human
auauuugucaugcugggauuu

SEQ ID NO: 3861605 - RNA, 20 nt, Human
auauuugucgauauuuccau

SEQ ID NO: 3861606 - RNA, 18 nt, Human
auauuugugacaaaaaau

SEQ ID NO: 3861607 - RNA, 18 nt, Human
auauuugugcauuuucua

SEQ ID NO: 3861608 - RNA, 17 nt, Human
auauuuguguauuuaac

SEQ ID NO: 3861609 - RNA, 22 nt, Human
auauuugugugcuaaacgugua

SEQ ID NO: 3861610 - RNA, 17 nt, Human
auauuuguguguucacu

SEQ ID NO: 3861611 - RNA, 16 nt, Human
auauuuguuuauggua

SEQ ID NO: 3861612 - RNA, 16 nt, Human
auauuuuaaaaugaga

SEQ ID NO: 3861613 - RNA, 13 nt, Human
auauuuuaaaauu

SEQ ID NO: 3861614 - RNA, 17 nt, Human
auauuuuaaaauuuguu

SEQ ID NO: 3861615 - RNA, 14 nt, Human
auauuuuaaagaau

SEQ ID NO: 3861616 - RNA, 20 nt, Human
auauuuuaaagaauuguguc

SEQ ID NO: 3861617 - RNA, 12 nt, Human
auauuuuaacuu

SEQ ID NO: 3861618 - RNA, 15 nt, Human
auauuuuaagcauua

SEQ ID NO: 3861619 - RNA, 21 nt, Human
auauuuuaagcauuacucuug

SEQ ID NO: 3861620 - RNA, 16 nt, Human
auauuuuaauuucaag

SEQ ID NO: 3861621 - RNA, 15 nt, Human
auauuuuacauaaau

SEQ ID NO: 3861622 - RNA, 23 nt, Human
auauuuuacauucuuggaaaguc

SEQ ID NO: 3861623 - RNA, 23 nt, Human
auauuuuaccucuuauugcaaaa

SEQ ID NO: 3861624 - RNA, 22 nt, Human
auauuuuauauaaaguauucuu

SEQ ID NO: 3861625 - RNA, 17 nt, Human
auauuuuaugauccagc

SEQ ID NO: 3861626 - RNA, 15 nt, Human
auauuuuaugugaga

SEQ ID NO: 3861627 - RNA, 15 nt, Human
auauuuuauuacugu

SEQ ID NO: 3861628 - RNA, 15 nt, Human
auauuuuauuauaua

SEQ ID NO: 3861629 - RNA, 15 nt, Human
auauuuuauuucaau

SEQ ID NO: 3861630 - RNA, 18 nt, Human
auauuuucauuaaaagcu

SEQ ID NO: 3861631 - RNA, 18 nt, Human
auauuuuccaugaaaaug

SEQ ID NO: 3861632 - RNA, 13 nt, Human
auauuuuccuccu

SEQ ID NO: 3861633 - RNA, 11 nt, Human
auauuuuccug

SEQ ID NO: 3861634 - RNA, 16 nt, Human
auauuuucguaugaaa

SEQ ID NO: 3861635 - RNA, 14 nt, Human
auauuuucuauuuu

SEQ ID NO: 3861636 - RNA, 12 nt, Human
auauuuucucua

SEQ ID NO: 3861637 - RNA, 13 nt, Human
auauuuucucugu

SEQ ID NO: 3861638 - RNA, 14 nt, Human
auauuuucugugug

SEQ ID NO: 3861639 - RNA, 20 nt, Human
auauuuucuguguguuccug

SEQ ID NO: 3861640 - RNA, 21 nt, Human
auauuuucuguguguuccugg

SEQ ID NO: 3861641 - RNA, 12 nt, Human
auauuuucuguu

SEQ ID NO: 3861642 - RNA, 12 nt, Human
auauuuugaauc

SEQ ID NO: 3861643 - RNA, 13 nt, Human
auauuuugaauca

SEQ ID NO: 3861644 - RNA, 23 nt, Human
auauuuugauaauaaauugaaau

SEQ ID NO: 3861645 - RNA, 12 nt, Human
auauuuugaucu

SEQ ID NO: 3861646 - RNA, 14 nt, Human
aucacuuuuuucca

SEQ ID NO: 3861647 - RNA, 16 nt, Human
aucagaaacacccuca

SEQ ID NO: 3861648 - RNA, 14 nt, Human
aucagaaagaggca

SEQ ID NO: 3861649 - RNA, 20 nt, Human
aucagaaaggaaaaacaaac

SEQ ID NO: 3861650 - RNA, 22 nt, Human
aucagaaaggaaaaacaaacuc

SEQ ID NO: 3861651 - RNA, 21 nt, Human
aucagaaagggagggcucuga

SEQ ID NO: 3861652 - RNA, 22 nt, Human
aucagaaagggagggcucugag

SEQ ID NO: 3861653 - RNA, 14 nt, Human
aucagaaaguaauu

SEQ ID NO: 3861654 - RNA, 14 nt, Human
aucagaaauuuuua

SEQ ID NO: 3861655 - RNA, 17 nt, Human
aucagaagauaacuuga

SEQ ID NO: 3861656 - RNA, 12 nt, Human
aucagaaggaga

SEQ ID NO: 3861657 - RNA, 18 nt, Human
aucagaagucaucuugcu

SEQ ID NO: 3861658 - RNA, 20 nt, Human
aucagaauaaccuucaaaua

SEQ ID NO: 3861659 - RNA, 19 nt, Human
aucagaauagccacauuug

SEQ ID NO: 3861660 - RNA, 22 nt, Human
aucagaauagccacauuuggaa

SEQ ID NO: 3861661 - RNA, 11 nt, Human
aucagaauucu

SEQ ID NO: 3861662 - RNA, 17 nt, Human
aucagaauugaaacacu

SEQ ID NO: 3861663 - RNA, 13 nt, Human
aucagacagaucu

SEQ ID NO: 3861664 - RNA, 20 nt, Human
aucagacaguggaugagaca

SEQ ID NO: 3861665 - RNA, 14 nt, Human
aucagacccuaccc

SEQ ID NO: 3861666 - RNA, 15 nt, Human
aucagacccuacccc

SEQ ID NO: 3861667 - RNA, 16 nt, Human
aucagacccuacccca

SEQ ID NO: 3861668 - RNA, 16 nt, Human
aucagacuaagccagc

SEQ ID NO: 3861669 - RNA, 17 nt, Human
aucagacuaagccagca

SEQ ID NO: 3861670 - RNA, 19 nt, Human
aucagacuaugaaguuuuu

SEQ ID NO: 3861671 - RNA, 15 nt, Human
aucagagcaggaccu

SEQ ID NO: 3861672 - RNA, 16 nt, Human
aucagagcaggaccuc

SEQ ID NO: 3861673 - RNA, 13 nt, Human
aucagagcuccuc

SEQ ID NO: 3861674 - RNA, 21 nt, Human
aucagagcuccucuguccugc

SEQ ID NO: 3861675 - RNA, 14 nt, Human
aucagaggccuaua

SEQ ID NO: 3861676 - RNA, 16 nt, Human
aucagagugacaucca

SEQ ID NO: 3861677 - RNA, 15 nt, Human
aucagauaagacaua

SEQ ID NO: 3861678 - RNA, 14 nt, Human
aucagauacaucac

SEQ ID NO: 3861679 - RNA, 15 nt, Human
aucagauacaucacu

SEQ ID NO: 3861680 - RNA, 23 nt, Human
aucagaugaacucuuagaaauga

SEQ ID NO: 3861681 - RNA, 14 nt, Human
aucagauggaaaua

SEQ ID NO: 3861682 - RNA, 15 nt, Human
aucagauguugaauu

SEQ ID NO: 3861683 - RNA, 16 nt, Human
aucagauguugaauuc

SEQ ID NO: 3861684 - RNA, 19 nt, Human
aucagauguugaauucuuu

SEQ ID NO: 3861685 - RNA, 21 nt, Human
aucagauguuuuggucaagua

SEQ ID NO: 3861686 - RNA, 14 nt, Human
aucagauugcuuuu

SEQ ID NO: 3861687 - RNA, 17 nt, Human
aucagauuuuaacagcu

SEQ ID NO: 3861688 - RNA, 12 nt, Human
aucagcaaaaaa

SEQ ID NO: 3861689 - RNA, 13 nt, Human
aucagcaaagaau

SEQ ID NO: 3861690 - RNA, 13 nt, Human
aucagcacgauuu

SEQ ID NO: 3861691 - RNA, 17 nt, Human
aucagcacgauuucugu

SEQ ID NO: 3861692 - RNA, 13 nt, Human
aucagcacugaaa

SEQ ID NO: 3861693 - RNA, 12 nt, Human
aucagccaauua

SEQ ID NO: 3861694 - RNA, 16 nt, Human
aucagccaauuauguu

SEQ ID NO: 3861695 - RNA, 12 nt, Human
aucagccagcug

SEQ ID NO: 3861696 - RNA, 20 nt, Human
aucagcccaaucccugaucc

SEQ ID NO: 3861697 - RNA, 17 nt, Human
aucagccccacccuggc

SEQ ID NO: 3861698 - RNA, 19 nt, Human
aucagccccacccuggccu

SEQ ID NO: 3861699 - RNA, 16 nt, Human
aucagccuacaggccu

SEQ ID NO: 3861700 - RNA, 13 nt, Human
aucagccucuuaa

SEQ ID NO: 3861701 - RNA, 18 nt, Human
aucagccugagucuccug

SEQ ID NO: 3861702 - RNA, 22 nt, Human
aucagccugagucuccugugcc

SEQ ID NO: 3861703 - RNA, 17 nt, Human
aucagccugcuccagcu

SEQ ID NO: 3861704 - RNA, 11 nt, Human
aucagccuggg

SEQ ID NO: 3861705 - RNA, 20 nt, Human
aucagccugggcaaugugau

SEQ ID NO: 3861706 - RNA, 23 nt, Human
aucagcggccccuugacucuggg

SEQ ID NO: 3861707 - RNA, 12 nt, Human
aucagcguggcc

SEQ ID NO: 3861708 - RNA, 13 nt, Human
aucagcguggccu

SEQ ID NO: 3861709 - RNA, 21 nt, Human
aucagcuacuuaagagaaaug

SEQ ID NO: 3861710 - RNA, 14 nt, Human
aucagcuauuuacu

SEQ ID NO: 3861711 - RNA, 15 nt, Human
aucagcuauuuacug

SEQ ID NO: 3861712 - RNA, 18 nt, Human
aucagcugagccuucuga

SEQ ID NO: 3861713 - RNA, 22 nt, Human
aucagcugcugaaacaacaaau

SEQ ID NO: 3861714 - RNA, 20 nt, Human
aucaggaaauauauaugugu

SEQ ID NO: 3861715 - RNA, 21 nt, Human
aucaggaaauauauaugugug

SEQ ID NO: 3861716 - RNA, 16 nt, Human
aucaggacccagagga

SEQ ID NO: 3861717 - RNA, 20 nt, Human
aucaggacccagaggaaggg

SEQ ID NO: 3861718 - RNA, 14 nt, Human
aucaggacccugga

SEQ ID NO: 3861719 - RNA, 18 nt, Human
aucaggaugaacccagga

SEQ ID NO: 3861720 - RNA, 19 nt, Human
aucaggauuuccucuugaa

SEQ ID NO: 3861721 - RNA, 14 nt, Human
aucaggcacagguc

SEQ ID NO: 3861722 - RNA, 14 nt, Human
aucaggccaggccc

SEQ ID NO: 3861723 - RNA, 18 nt, Human
aucaggccaggcccucug

SEQ ID NO: 3861724 - RNA, 22 nt, Human
aucaggccaggcccucugccca

SEQ ID NO: 3861725 - RNA, 19 nt, Human
aucaggccuaaucucauac

SEQ ID NO: 3861726 - RNA, 13 nt, Human
aucaggcucccag

SEQ ID NO: 3861727 - RNA, 14 nt, Human
aucaggcuuucuuu

SEQ ID NO: 3861728 - RNA, 18 nt, Human
aucagggaggucauuuug

SEQ ID NO: 3861729 - RNA, 21 nt, Human
aucagggcaaucccaacacau

SEQ ID NO: 3861730 - RNA, 13 nt, Human
aucagggccuggg

SEQ ID NO: 3861731 - RNA, 20 nt, Human
aucagggccuggggccugag

SEQ ID NO: 3861732 - RNA, 24 nt, Human
aucagggccuggggccugagagaa

SEQ ID NO: 3861733 - RNA, 14 nt, Human
aucagggggaagaa

SEQ ID NO: 3861734 - RNA, 16 nt, Human
aucagguccucagaga

SEQ ID NO: 3861735 - RNA, 14 nt, Human
aucaggugcugcca

SEQ ID NO: 3861736 - RNA, 15 nt, Human
aucaggugcugccau

SEQ ID NO: 3861737 - RNA, 13 nt, Human
aucagguggggag

SEQ ID NO: 3861738 - RNA, 15 nt, Human
aucagguuccauccc

SEQ ID NO: 3861739 - RNA, 14 nt, Human
aucagguuuuuccc

SEQ ID NO: 3861740 - RNA, 13 nt, Human
aucaguaaaauua

SEQ ID NO: 3861741 - RNA, 17 nt, Human
aucaguaaaauuauacu

SEQ ID NO: 3861742 - RNA, 14 nt, Human
aucaguaaacacug

SEQ ID NO: 3861743 - RNA, 19 nt, Human
aucaguaaacacuguguau

SEQ ID NO: 3861744 - RNA, 18 nt, Human
aucaguaaauaacuggaa

SEQ ID NO: 3861745 - RNA, 22 nt, Human
aucaguaacccccuuaaauuua

SEQ ID NO: 3861746 - RNA, 23 nt, Human
aucaguaacccccuuaaauuuaa

SEQ ID NO: 3861747 - RNA, 18 nt, Human
aucaguagccagcaucug

SEQ ID NO: 3861748 - RNA, 18 nt, Human
aucaguaggcuaauguca

SEQ ID NO: 3861749 - RNA, 23 nt, Human
aucaguaguucacauacaaauca

SEQ ID NO: 3861750 - RNA, 16 nt, Human
aucaguauaaacaaag

SEQ ID NO: 3861751 - RNA, 14 nt, Human
aucaguauaauucu

SEQ ID NO: 3861752 - RNA, 22 nt, Human
aucaguauaauucuguacugau

SEQ ID NO: 3861753 - RNA, 23 nt, Human
aucaguauuaauacuaaaauaug

SEQ ID NO: 3861754 - RNA, 13 nt, Human
aucagucaauauu

SEQ ID NO: 3861755 - RNA, 22 nt, Human
aucaguccuagaauguuucauu

SEQ ID NO: 3861756 - RNA, 21 nt, Human
aucaguccucuuucaaaggua

SEQ ID NO: 3861757 - RNA, 14 nt, Human
aucaguccuuugau

SEQ ID NO: 3861758 - RNA, 19 nt, Human
aucagucuauccacagaga

SEQ ID NO: 3861759 - RNA, 18 nt, Human
aucagucucugagggcuu

SEQ ID NO: 3861760 - RNA, 19 nt, Human
aucagucugauucccaagc

SEQ ID NO: 3861761 - RNA, 15 nt, Human
aucagugcccuccag

SEQ ID NO: 3861762 - RNA, 15 nt, Human
aucagugcucccuca

SEQ ID NO: 3861763 - RNA, 13 nt, Human
aucaguggagcca

SEQ ID NO: 3861764 - RNA, 17 nt, Human
aucaguggauuucccau

SEQ ID NO: 3861765 - RNA, 20 nt, Human
aucagugggcaggauaaacu

SEQ ID NO: 3861766 - RNA, 21 nt, Human
aucagugggcaggauaaacug

SEQ ID NO: 3861767 - RNA, 19 nt, Human
aucagugguuauuuaggga

SEQ ID NO: 3861768 - RNA, 17 nt, Human
aucaguguccucuugcu

SEQ ID NO: 3861769 - RNA, 14 nt, Human
aucagugucucaca

SEQ ID NO: 3861770 - RNA, 16 nt, Human
aucagugucuuuccac

SEQ ID NO: 3861771 - RNA, 18 nt, Human
aucaguuaagaaauuuca

SEQ ID NO: 3861772 - RNA, 23 nt, Human
aucaguuacccacucggucccag

SEQ ID NO: 3861773 - RNA, 19 nt, Human
aucaguuacucagcccugg

SEQ ID NO: 3861774 - RNA, 15 nt, Human
aucaguuagagcuga

SEQ ID NO: 3861775 - RNA, 16 nt, Human
aucaguuauucauucu

SEQ ID NO: 3861776 - RNA, 19 nt, Human
aucaguucauuagaaauau

SEQ ID NO: 3861777 - RNA, 19 nt, Human
aucaguugcgcguucugaa

SEQ ID NO: 3861778 - RNA, 16 nt, Human
aucaguuuaaaagcac

SEQ ID NO: 3861779 - RNA, 22 nt, Human
aucaguuuaaaagcacgacagu

SEQ ID NO: 3861780 - RNA, 21 nt, Human
aucaguuuuuucaccuggaag

SEQ ID NO: 3861781 - RNA, 15 nt, Human
aucauaaaacuugau

SEQ ID NO: 3861782 - RNA, 12 nt, Human
aucauaaaauaa

SEQ ID NO: 3861783 - RNA, 13 nt, Human
aucauaaaauaaa

SEQ ID NO: 3861784 - RNA, 13 nt, Human
aucauaaggcuuc

SEQ ID NO: 3861785 - RNA, 14 nt, Human
aucauaaguauuug

SEQ ID NO: 3861786 - RNA, 17 nt, Human
aucauaaguauuuggaa

SEQ ID NO: 3861787 - RNA, 19 nt, Human
aucauaaguauuuggaauu

SEQ ID NO: 3861788 - RNA, 13 nt, Human
aucauaauuacca

SEQ ID NO: 3861789 - RNA, 17 nt, Human
aucauacuccuaugcuu

SEQ ID NO: 3861790 - RNA, 15 nt, Human
aucauagaaauguaa

SEQ ID NO: 3861791 - RNA, 18 nt, Human
aucauagauuucugauuu

SEQ ID NO: 3861792 - RNA, 20 nt, Human
auccucauauggcccagugu

SEQ ID NO: 3861793 - RNA, 23 nt, Human
auccuccaacuucauuugaugcu

SEQ ID NO: 3861794 - RNA, 17 nt, Human
auccuccacuuguucag

SEQ ID NO: 3861795 - RNA, 23 nt, Human
auccuccagcuucugguacucuc

SEQ ID NO: 3861796 - RNA, 13 nt, Human
auccuccagggcu

SEQ ID NO: 3861797 - RNA, 11 nt, Human
auccuccaggu

SEQ ID NO: 3861798 - RNA, 22 nt, Human
auccuccaggugcacaagcucc

SEQ ID NO: 3861799 - RNA, 13 nt, Human
auccuccagguuu

SEQ ID NO: 3861800 - RNA, 14 nt, Human
auccuccagguuuu

SEQ ID NO: 3861801 - RNA, 16 nt, Human
auccuccagguuuuuc

SEQ ID NO: 3861802 - RNA, 21 nt, Human
auccuccagguuuuucaauua

SEQ ID NO: 3861803 - RNA, 20 nt, Human
auccucccaccucagccucc

SEQ ID NO: 3861804 - RNA, 20 nt, Human
auccucccacuucagccucc

SEQ ID NO: 3861805 - RNA, 13 nt, Human
auccuccccuucc

SEQ ID NO: 3861806 - RNA, 19 nt, Human
auccuccccuucccugcaa

SEQ ID NO: 3861807 - RNA, 11 nt, Human
auccucccugu

SEQ ID NO: 3861808 - RNA, 16 nt, Human
auccucccuguaacuu

SEQ ID NO: 3861809 - RNA, 15 nt, Human
auccucccuuccucc

SEQ ID NO: 3861810 - RNA, 20 nt, Human
auccuccuaccuccaaagcu

SEQ ID NO: 3861811 - RNA, 11 nt, Human
auccuccucag

SEQ ID NO: 3861812 - RNA, 14 nt, Human
auccuccucagauc

SEQ ID NO: 3861813 - RNA, 18 nt, Human
auccuccuccuuccuagu

SEQ ID NO: 3861814 - RNA, 16 nt, Human
auccuccuggaaccuu

SEQ ID NO: 3861815 - RNA, 22 nt, Human
auccuccuggaaccuugcuguc

SEQ ID NO: 3861816 - RNA, 14 nt, Human
auccucgcucccgg

SEQ ID NO: 3861817 - RNA, 16 nt, Human
auccucgcucccggga

SEQ ID NO: 3861818 - RNA, 21 nt, Human
auccucuccacagcugccucu

SEQ ID NO: 3861819 - RNA, 20 nt, Human
auccucucuggggcuguguu

SEQ ID NO: 3861820 - RNA, 15 nt, Human
auccucucuuccucu

SEQ ID NO: 3861821 - RNA, 20 nt, Human
auccucucuuccucuucccc

SEQ ID NO: 3861822 - RNA, 19 nt, Human
auccucugguucuucauuu

SEQ ID NO: 3861823 - RNA, 13 nt, Human
auccucuucuuuu

SEQ ID NO: 3861824 - RNA, 13 nt, Human
auccucuuuagag

SEQ ID NO: 3861825 - RNA, 16 nt, Human
auccucuuuagaguua

SEQ ID NO: 3861826 - RNA, 19 nt, Human
auccucuuuagaguuagac

SEQ ID NO: 3861827 - RNA, 20 nt, Human
auccucuuuagaguuagacu

SEQ ID NO: 3861828 - RNA, 22 nt, Human
auccucuuuagaguuagacugu

SEQ ID NO: 3861829 - RNA, 18 nt, Human
auccugaaauagaggcua

SEQ ID NO: 3861830 - RNA, 23 nt, Human
auccugacaagauuauaauauuu

SEQ ID NO: 3861831 - RNA, 17 nt, Human
auccugacucugccccc

SEQ ID NO: 3861832 - RNA, 18 nt, Human
auccugacucugcccccu

SEQ ID NO: 3861833 - RNA, 19 nt, Human
auccugacucugcccccug

SEQ ID NO: 3861834 - RNA, 11 nt, Human
auccugagcca

SEQ ID NO: 3861835 - RNA, 12 nt, Human
auccugagccau

SEQ ID NO: 3861836 - RNA, 12 nt, Human
auccugagcccc

SEQ ID NO: 3861837 - RNA, 23 nt, Human
auccugagccccgcccucuuccu

SEQ ID NO: 3861838 - RNA, 13 nt, Human
auccugaggcuga

SEQ ID NO: 3861839 - RNA, 19 nt, Human
auccugagguguaccagga

SEQ ID NO: 3861840 - RNA, 19 nt, Human
auccugcacugacucugga

SEQ ID NO: 3861841 - RNA, 16 nt, Human
auccugcauuguuagc

SEQ ID NO: 3861842 - RNA, 16 nt, Human
auccugccacccugua

SEQ ID NO: 3861843 - RNA, 18 nt, Human
auccugccacccuguagc

SEQ ID NO: 3861844 - RNA, 17 nt, Human
auccugccagccccaca

SEQ ID NO: 3861845 - RNA, 21 nt, Human
auccugcccaguguuguuugu

SEQ ID NO: 3861846 - RNA, 22 nt, Human
auccugcccaguguuguuugua

SEQ ID NO: 3861847 - RNA, 20 nt, Human
auccugcccccugaaacuua

SEQ ID NO: 3861848 - RNA, 19 nt, Human
auccugccuuagagccagg

SEQ ID NO: 3861849 - RNA, 17 nt, Human
auccugccuucauggaa

SEQ ID NO: 3861850 - RNA, 16 nt, Human
auccugcggguggggc

SEQ ID NO: 3861851 - RNA, 14 nt, Human
auccugcugcugug

SEQ ID NO: 3861852 - RNA, 14 nt, Human
auccugcuguucua

SEQ ID NO: 3861853 - RNA, 14 nt, Human
auccugcuucagug

SEQ ID NO: 3861854 - RNA, 21 nt, Human
auccuggaacaauauuuuaug

SEQ ID NO: 3861855 - RNA, 23 nt, Human
auccuggacugagggggccugga

SEQ ID NO: 3861856 - RNA, 15 nt, Human
auccuggaggcccag

SEQ ID NO: 3861857 - RNA, 16 nt, Human
auccuggaggcccagu

SEQ ID NO: 3861858 - RNA, 15 nt, Human
auccuggaguucugg

SEQ ID NO: 3861859 - RNA, 13 nt, Human
auccuggcagccc

SEQ ID NO: 3861860 - RNA, 24 nt, Human
auccuggcagcccagagacuuugu

SEQ ID NO: 3861861 - RNA, 14 nt, Human
auccuggcccauca

SEQ ID NO: 3861862 - RNA, 14 nt, Human
auccuggcccucug

SEQ ID NO: 3861863 - RNA, 18 nt, Human
auccuggcucuguggcuu

SEQ ID NO: 3861864 - RNA, 23 nt, Human
auccuggcuggagaauguggaga

SEQ ID NO: 3861865 - RNA, 16 nt, Human
auccuggcuuugccca

SEQ ID NO: 3861866 - RNA, 21 nt, Human
auccugggggccuggguuggg

SEQ ID NO: 3861867 - RNA, 23 nt, Human
auccuggguggucugcaggcagg

SEQ ID NO: 3861868 - RNA, 22 nt, Human
auccugguugguguugcagaag

SEQ ID NO: 3861869 - RNA, 14 nt, Human
auccugguuucaua

SEQ ID NO: 3861870 - RNA, 23 nt, Human
auccugguuucauaacuuccugu

SEQ ID NO: 3861871 - RNA, 14 nt, Human
auccuguauaagca

SEQ ID NO: 3861872 - RNA, 17 nt, Human
auccuguauaagcacug

SEQ ID NO: 3861873 - RNA, 23 nt, Human
auccuguauaagcacugaaaaac

SEQ ID NO: 3861874 - RNA, 20 nt, Human
auccuguauucagacagaug

SEQ ID NO: 3861875 - RNA, 16 nt, Human
auccuguauucuucaa

SEQ ID NO: 3861876 - RNA, 17 nt, Human
auccugucaucugagaa

SEQ ID NO: 3861877 - RNA, 17 nt, Human
auccuguccucagcuuc

SEQ ID NO: 3861878 - RNA, 23 nt, Human
auccugucuuuaaggaaaaaaag

SEQ ID NO: 3861879 - RNA, 15 nt, Human
auccugucuuucuga

SEQ ID NO: 3861880 - RNA, 16 nt, Human
auccugugaaguaagg

SEQ ID NO: 3861881 - RNA, 14 nt, Human
auccuguguggaga

SEQ ID NO: 3861882 - RNA, 23 nt, Human
auccuguguggagagggaaugug

SEQ ID NO: 3861883 - RNA, 15 nt, Human
auccugugugguuua

SEQ ID NO: 3861884 - RNA, 21 nt, Human
auccugugugguuuaguguaa

SEQ ID NO: 3861885 - RNA, 18 nt, Human
auccuguguuucuaggga

SEQ ID NO: 3861886 - RNA, 17 nt, Human
auccuguugaaaagcca

SEQ ID NO: 3861887 - RNA, 18 nt, Human
auccuguugaaaagccau

SEQ ID NO: 3861888 - RNA, 20 nt, Human
auccuuaaaucuuaauguuc

SEQ ID NO: 3861889 - RNA, 13 nt, Human
auccuuaacagau

SEQ ID NO: 3861890 - RNA, 18 nt, Human
auccuuagagguccucug

SEQ ID NO: 3861891 - RNA, 21 nt, Human
auccuuagagguccucuggag

SEQ ID NO: 3861892 - RNA, 21 nt, Human
auccuuaucuaguguuugauu

SEQ ID NO: 3861893 - RNA, 16 nt, Human
auccuuaugccacccc

SEQ ID NO: 3861894 - RNA, 22 nt, Human
auccuucaucuggauuccagag

SEQ ID NO: 3861895 - RNA, 18 nt, Human
auccuuccaaaaauuauu

SEQ ID NO: 3861896 - RNA, 19 nt, Human
auccuuccaaaaauuauua

SEQ ID NO: 3861897 - RNA, 14 nt, Human
auccuuccaaagaa

SEQ ID NO: 3861898 - RNA, 15 nt, Human
auccuuccauuccac

SEQ ID NO: 3861899 - RNA, 18 nt, Human
auccuucccaaguaagag

SEQ ID NO: 3861900 - RNA, 22 nt, Human
auccuucccugucugccagggc

SEQ ID NO: 3861901 - RNA, 20 nt, Human
auccuuccuauaacuugaug

SEQ ID NO: 3861902 - RNA, 19 nt, Human
auccuucgugaacaucccc

SEQ ID NO: 3861903 - RNA, 12 nt, Human
auccuucuaauc

SEQ ID NO: 3861904 - RNA, 19 nt, Human
auccuucuaaucugcuaug

SEQ ID NO: 3861905 - RNA, 12 nt, Human
auccuucuaguu

SEQ ID NO: 3861906 - RNA, 13 nt, Human
auccuucuaguuu

SEQ ID NO: 3861907 - RNA, 22 nt, Human
auccuucuaguuucccacaaua

SEQ ID NO: 3861908 - RNA, 11 nt, Human
auccuucugcc

SEQ ID NO: 3861909 - RNA, 16 nt, Human
auccuugagucaaaaa

SEQ ID NO: 3861910 - RNA, 14 nt, Human
auccuugauaauau

SEQ ID NO: 3861911 - RNA, 16 nt, Human
auccuuggcaccaaag

SEQ ID NO: 3861912 - RNA, 19 nt, Human
auccuuggucuuuguaucu

SEQ ID NO: 3861913 - RNA, 22 nt, Human
auccuuguauaaaaaaaauagu

SEQ ID NO: 3861914 - RNA, 17 nt, Human
auccuuuaaauccuucc

SEQ ID NO: 3861915 - RNA, 19 nt, Human
auccuuuaggguucugccu

SEQ ID NO: 3861916 - RNA, 20 nt, Human
auccuuucacuucuuucccu

SEQ ID NO: 3861917 - RNA, 16 nt, Human
auccuuugcagggcag

SEQ ID NO: 3861918 - RNA, 17 nt, Human
auccuuugcagggcagc

SEQ ID NO: 3861919 - RNA, 21 nt, Human
auccuuuguuuucugacuaau

SEQ ID NO: 3861920 - RNA, 23 nt, Human
auccuuuguuuucugacuaauua

SEQ ID NO: 3861921 - RNA, 15 nt, Human
auccuuuuucuuuau

SEQ ID NO: 3861922 - RNA, 14 nt, Human
aucgaaaaaauaau

SEQ ID NO: 3861923 - RNA, 12 nt, Human
aucgaaaauuca

SEQ ID NO: 3861924 - RNA, 16 nt, Human
aucgaaaauucauuuc

SEQ ID NO: 3861925 - RNA, 13 nt, Human
aucgaaauaacaa

SEQ ID NO: 3861926 - RNA, 17 nt, Human
aucgaaauaacaauguu

SEQ ID NO: 3861927 - RNA, 17 nt, Human
aucgagaccauccuggc

SEQ ID NO: 3861928 - RNA, 19 nt, Human
aucgagaccauccuggcua

SEQ ID NO: 3861929 - RNA, 15 nt, Human
aucgaggaaccagag

SEQ ID NO: 3861930 - RNA, 13 nt, Human
aucgauggccuug

SEQ ID NO: 3861931 - RNA, 15 nt, Human
aucgauguuauguaa

SEQ ID NO: 3861932 - RNA, 16 nt, Human
aucgauguuuuauuau

SEQ ID NO: 3861933 - RNA, 20 nt, Human
aucgauuuuuaaaaauuaaa

SEQ ID NO: 3861934 - RNA, 20 nt, Human
aucgcaccacuguguauuua

SEQ ID NO: 3861935 - RNA, 18 nt, Human
aucgcaccauucugacuc

SEQ ID NO: 3861936 - RNA, 14 nt, Human
aucgccagcaaaac

SEQ ID NO: 3861937 - RNA, 21 nt, Human
augcuauugacaauaaaauau

SEQ ID NO: 3861938 - RNA, 14 nt, Human
augcuauuucuaua

SEQ ID NO: 3861939 - RNA, 22 nt, Human
augcuauuucuauauuuucauu

SEQ ID NO: 3861940 - RNA, 23 nt, Human
augcuauuucuauauuuucauuc

SEQ ID NO: 3861941 - RNA, 12 nt, Human
augcuauuucug

SEQ ID NO: 3861942 - RNA, 11 nt, Human
augcuauuuuu

SEQ ID NO: 3861943 - RNA, 22 nt, Human
augcuauuuuuguuuuuagaau

SEQ ID NO: 3861944 - RNA, 14 nt, Human
augcucaaagaaau

SEQ ID NO: 3861945 - RNA, 16 nt, Human
augcucacgcucccaa

SEQ ID NO: 3861946 - RNA, 22 nt, Human
augcucaggggcccuggagcag

SEQ ID NO: 3861947 - RNA, 22 nt, Human
augcucagguacagagaaggaa

SEQ ID NO: 3861948 - RNA, 18 nt, Human
augcucaggugcuggggc

SEQ ID NO: 3861949 - RNA, 14 nt, Human
augcucaguugcua

SEQ ID NO: 3861950 - RNA, 13 nt, Human
augcucaucugcu

SEQ ID NO: 3861951 - RNA, 15 nt, Human
augcuccaagauucu

SEQ ID NO: 3861952 - RNA, 17 nt, Human
augcuccaagauucuag

SEQ ID NO: 3861953 - RNA, 12 nt, Human
augcuccagcca

SEQ ID NO: 3861954 - RNA, 20 nt, Human
augcuccagccaaccccugu

SEQ ID NO: 3861955 - RNA, 24 nt, Human
augcuccagucaacaaacuauuuc

SEQ ID NO: 3861956 - RNA, 21 nt, Human
augcuccccacagcgucccug

SEQ ID NO: 3861957 - RNA, 23 nt, Human
augcuccccacagcgucccuggc

SEQ ID NO: 3861958 - RNA, 15 nt, Human
augcucccccauccu

SEQ ID NO: 3861959 - RNA, 18 nt, Human
augcucccccauccuccc

SEQ ID NO: 3861960 - RNA, 20 nt, Human
augcucccccauccuccccu

SEQ ID NO: 3861961 - RNA, 17 nt, Human
augcuccccugugccag

SEQ ID NO: 3861962 - RNA, 17 nt, Human
augcucccuccccugcc

SEQ ID NO: 3861963 - RNA, 18 nt, Human
augcucccuccccugccc

SEQ ID NO: 3861964 - RNA, 20 nt, Human
augcucccuccccugcccug

SEQ ID NO: 3861965 - RNA, 19 nt, Human
augcuccucuuccccagac

SEQ ID NO: 3861966 - RNA, 23 nt, Human
augcuccucuuccccagacgccu

SEQ ID NO: 3861967 - RNA, 15 nt, Human
augcuccuugggccc

SEQ ID NO: 3861968 - RNA, 16 nt, Human
augcuccuugggcccu

SEQ ID NO: 3861969 - RNA, 16 nt, Human
augcucuagugccuuc

SEQ ID NO: 3861970 - RNA, 14 nt, Human
augcucuccuuucc

SEQ ID NO: 3861971 - RNA, 17 nt, Human
augcucucucaaauugu

SEQ ID NO: 3861972 - RNA, 19 nt, Human
augcucucugcagccagcc

SEQ ID NO: 3861973 - RNA, 17 nt, Human
augcucugcaaaaggag

SEQ ID NO: 3861974 - RNA, 23 nt, Human
augcucuuaauugccaccucuaa

SEQ ID NO: 3861975 - RNA, 22 nt, Human
augcucuuucccacccagccug

SEQ ID NO: 3861976 - RNA, 19 nt, Human
augcucuuuuuuacucauu

SEQ ID NO: 3861977 - RNA, 14 nt, Human
augcugaaaauugc

SEQ ID NO: 3861978 - RNA, 15 nt, Human
augcugaaacaggag

SEQ ID NO: 3861979 - RNA, 16 nt, Human
augcugaaacaggaga

SEQ ID NO: 3861980 - RNA, 18 nt, Human
augcugaaacaggagaga

SEQ ID NO: 3861981 - RNA, 19 nt, Human
augcugaagccaaagccaa

SEQ ID NO: 3861982 - RNA, 12 nt, Human
augcugaaggga

SEQ ID NO: 3861983 - RNA, 23 nt, Human
augcugaauauacagcaggugcu

SEQ ID NO: 3861984 - RNA, 22 nt, Human
augcugacauucaccugcccca

SEQ ID NO: 3861985 - RNA, 13 nt, Human
augcugacccaug

SEQ ID NO: 3861986 - RNA, 16 nt, Human
augcugacccaugggc

SEQ ID NO: 3861987 - RNA, 21 nt, Human
augcugacuguacuccuccca

SEQ ID NO: 3861988 - RNA, 17 nt, Human
augcugacuucacuuau

SEQ ID NO: 3861989 - RNA, 14 nt, Human
augcugagauucuu

SEQ ID NO: 3861990 - RNA, 23 nt, Human
augcugaggguguuucuuccugc

SEQ ID NO: 3861991 - RNA, 20 nt, Human
augcugaguuugugcuggug

SEQ ID NO: 3861992 - RNA, 19 nt, Human
augcugaucaucgccagag

SEQ ID NO: 3861993 - RNA, 22 nt, Human
augcugaucaucgccagaggug

SEQ ID NO: 3861994 - RNA, 22 nt, Human
augcugauguucaguguaauuu

SEQ ID NO: 3861995 - RNA, 18 nt, Human
augcugcaacaaaaugua

SEQ ID NO: 3861996 - RNA, 20 nt, Human
augcugcaacaaaauguaga

SEQ ID NO: 3861997 - RNA, 23 nt, Human
augcugcaaguuaugaaauauuu

SEQ ID NO: 3861998 - RNA, 20 nt, Human
augcugcagauuugggcugg

SEQ ID NO: 3861999 - RNA, 19 nt, Human
augcugcaggacuugagaa

SEQ ID NO: 3862000 - RNA, 13 nt, Human
augcugccaauau

SEQ ID NO: 3862001 - RNA, 12 nt, Human
augcugccagug

SEQ ID NO: 3862002 - RNA, 15 nt, Human
augcugcccaugcca

SEQ ID NO: 3862003 - RNA, 22 nt, Human
augcugcccaugccaccgcuuc

SEQ ID NO: 3862004 - RNA, 11 nt, Human
augcugccccu

SEQ ID NO: 3862005 - RNA, 12 nt, Human
augcugccccuc

SEQ ID NO: 3862006 - RNA, 11 nt, Human
augcugcccug

SEQ ID NO: 3862007 - RNA, 12 nt, Human
augcugcccugu

SEQ ID NO: 3862008 - RNA, 13 nt, Human
augcugcccugug

SEQ ID NO: 3862009 - RNA, 16 nt, Human
augcugcccugugagu

SEQ ID NO: 3862010 - RNA, 17 nt, Human
augcugccuaggcugac

SEQ ID NO: 3862011 - RNA, 13 nt, Human
augcugccugagu

SEQ ID NO: 3862012 - RNA, 11 nt, Human
augcugccugc

SEQ ID NO: 3862013 - RNA, 13 nt, Human
augcugccugccu

SEQ ID NO: 3862014 - RNA, 17 nt, Human
augcugccugccugucu

SEQ ID NO: 3862015 - RNA, 18 nt, Human
augcugccugccugucug

SEQ ID NO: 3862016 - RNA, 23 nt, Human
augcugccuuauucagggaagga

SEQ ID NO: 3862017 - RNA, 19 nt, Human
augcugcgcccuuccccag

SEQ ID NO: 3862018 - RNA, 20 nt, Human
augcugcuggggaagacagu

SEQ ID NO: 3862019 - RNA, 16 nt, Human
augcugcuuuuauauc

SEQ ID NO: 3862020 - RNA, 19 nt, Human
augcugcuuuuauaucugu

SEQ ID NO: 3862021 - RNA, 21 nt, Human
augcugcuuuuauaucuguau

SEQ ID NO: 3862022 - RNA, 18 nt, Human
augcuggacaggucuggg

SEQ ID NO: 3862023 - RNA, 14 nt, Human
augcuggagaagag

SEQ ID NO: 3862024 - RNA, 17 nt, Human
augcuggagaagagagg

SEQ ID NO: 3862025 - RNA, 23 nt, Human
augcuggagaagagaggagagga

SEQ ID NO: 3862026 - RNA, 22 nt, Human
augcuggagccuguguaacagc

SEQ ID NO: 3862027 - RNA, 23 nt, Human
augcuggagccuguguaacagcu

SEQ ID NO: 3862028 - RNA, 14 nt, Human
augcuggagcggcu

SEQ ID NO: 3862029 - RNA, 21 nt, Human
augcuggcauagagcagcacu

SEQ ID NO: 3862030 - RNA, 15 nt, Human
augcuggccagccug

SEQ ID NO: 3862031 - RNA, 12 nt, Human
augcuggcccag

SEQ ID NO: 3862032 - RNA, 13 nt, Human
augcuggcccagg

SEQ ID NO: 3862033 - RNA, 18 nt, Human
augcuggcccagggccca

SEQ ID NO: 3862034 - RNA, 22 nt, Human
augcuggcccagggcccagagc

SEQ ID NO: 3862035 - RNA, 17 nt, Human
augcuggccuuugcucu

SEQ ID NO: 3862036 - RNA, 22 nt, Human
augcuggcuauagaugucuuuu

SEQ ID NO: 3862037 - RNA, 19 nt, Human
augcuggcucccagggcca

SEQ ID NO: 3862038 - RNA, 23 nt, Human
augcugggaagacgccugagcuc

SEQ ID NO: 3862039 - RNA, 15 nt, Human
augcugggcugggug

SEQ ID NO: 3862040 - RNA, 21 nt, Human
augcuggguccauaucacaca

SEQ ID NO: 3862041 - RNA, 23 nt, Human
augcuggguuggugcacagugau

SEQ ID NO: 3862042 - RNA, 14 nt, Human
augcuggugagcca

SEQ ID NO: 3862043 - RNA, 16 nt, Human
augcuguaaaagcaag

SEQ ID NO: 3862044 - RNA, 15 nt, Human
augcuguacauacuu

SEQ ID NO: 3862045 - RNA, 18 nt, Human
augcuguacauacuuuuu

SEQ ID NO: 3862046 - RNA, 16 nt, Human
augcuguacaucuauu

SEQ ID NO: 3862047 - RNA, 22 nt, Human
augcuguacaucuauuuuggau

SEQ ID NO: 3862048 - RNA, 19 nt, Human
augcuguauauccuuucua

SEQ ID NO: 3862049 - RNA, 14 nt, Human
augcuguauauguu

SEQ ID NO: 3862050 - RNA, 19 nt, Human
augcuguauuuuaaaagaa

SEQ ID NO: 3862051 - RNA, 23 nt, Human
augcuguauuuuaaaagaaugau

SEQ ID NO: 3862052 - RNA, 20 nt, Human
augcugucaacuaugauaug

SEQ ID NO: 3862053 - RNA, 23 nt, Human
augcugucuacacuaagagagaa

SEQ ID NO: 3862054 - RNA, 18 nt, Human
augcugucuuucuugcuc

SEQ ID NO: 3862055 - RNA, 21 nt, Human
augcugucuuucuugcucccu

SEQ ID NO: 3862056 - RNA, 21 nt, Human
augcugugagucuuugguucu

SEQ ID NO: 3862057 - RNA, 22 nt, Human
augcugugagucuuugguucua

SEQ ID NO: 3862058 - RNA, 13 nt, Human
augcugugccccu

SEQ ID NO: 3862059 - RNA, 18 nt, Human
augcugugcgcccagggc

SEQ ID NO: 3862060 - RNA, 18 nt, Human
augcugugcuaaauauca

SEQ ID NO: 3862061 - RNA, 18 nt, Human
augcuguugccucaucua

SEQ ID NO: 3862062 - RNA, 14 nt, Human
augcuguuucagag

SEQ ID NO: 3862063 - RNA, 18 nt, Human
augcuuaaagaauucaaa

SEQ ID NO: 3862064 - RNA, 15 nt, Human
augcuuaauuucuaa

SEQ ID NO: 3862065 - RNA, 15 nt, Human
augcuuacaaaaaag

SEQ ID NO: 3862066 - RNA, 23 nt, Human
augcuuacgugauccucucaccu

SEQ ID NO: 3862067 - RNA, 20 nt, Human
augcuuagagggauuucuuu

SEQ ID NO: 3862068 - RNA, 14 nt, Human
augcuuaguaaugc

SEQ ID NO: 3862069 - RNA, 21 nt, Human
augcuuagucccucaugcaaa

SEQ ID NO: 3862070 - RNA, 20 nt, Human
augcuuauauuguucacuuc

SEQ ID NO: 3862071 - RNA, 15 nt, Human
augcuuaugacaaug

SEQ ID NO: 3862072 - RNA, 14 nt, Human
augcuuauuuuaaa

SEQ ID NO: 3862073 - RNA, 21 nt, Human
augcuuauuuuaaaauuuuau

SEQ ID NO: 3862074 - RNA, 13 nt, Human
augcuucauacag

SEQ ID NO: 3862075 - RNA, 16 nt, Human
augcuucauacaggga

SEQ ID NO: 3862076 - RNA, 19 nt, Human
augcuucauaugaggagga

SEQ ID NO: 3862077 - RNA, 15 nt, Human
augcuucaugaaaau

SEQ ID NO: 3862078 - RNA, 21 nt, Human
augcuucauucaauauugaca

SEQ ID NO: 3862079 - RNA, 13 nt, Human
augcuuccagaaa

SEQ ID NO: 3862080 - RNA, 16 nt, Human
augcuucccuuuccug

SEQ ID NO: 3862081 - RNA, 18 nt, Human
augggaaaguauucucuu

SEQ ID NO: 3862082 - RNA, 17 nt, Human
augggaacaauugaagu

SEQ ID NO: 3862083 - RNA, 11 nt, Human
augggaacauu

SEQ ID NO: 3862084 - RNA, 14 nt, Human
augggaacauuuau

SEQ ID NO: 3862085 - RNA, 20 nt, Human
augggaagacgaggcccucg

SEQ ID NO: 3862086 - RNA, 18 nt, Human
augggaaggugggcgggc

SEQ ID NO: 3862087 - RNA, 18 nt, Human
augggaaucaagauuuaa

SEQ ID NO: 3862088 - RNA, 13 nt, Human
augggaaugaagc

SEQ ID NO: 3862089 - RNA, 16 nt, Human
augggaaugaagcuug

SEQ ID NO: 3862090 - RNA, 21 nt, Human
augggaaugaagcuuguguau

SEQ ID NO: 3862091 - RNA, 18 nt, Human
augggaaugaggugggag

SEQ ID NO: 3862092 - RNA, 14 nt, Human
augggaauugugug

SEQ ID NO: 3862093 - RNA, 15 nt, Human
augggaauuguguga

SEQ ID NO: 3862094 - RNA, 22 nt, Human
augggacaaaguuccaaaaugc

SEQ ID NO: 3862095 - RNA, 15 nt, Human
augggacagggagga

SEQ ID NO: 3862096 - RNA, 21 nt, Human
augggacauuugcucauggaa

SEQ ID NO: 3862097 - RNA, 12 nt, Human
augggaccacaa

SEQ ID NO: 3862098 - RNA, 15 nt, Human
augggaccuauaacu

SEQ ID NO: 3862099 - RNA, 13 nt, Human
augggacuucuuu

SEQ ID NO: 3862100 - RNA, 19 nt, Human
augggacuucuuuucacau

SEQ ID NO: 3862101 - RNA, 20 nt, Human
augggacuucuuuucacauu

SEQ ID NO: 3862102 - RNA, 17 nt, Human
augggagacccuugaca

SEQ ID NO: 3862103 - RNA, 15 nt, Human
augggagagaagaga

SEQ ID NO: 3862104 - RNA, 23 nt, Human
augggagaguagauggugaaauu

SEQ ID NO: 3862105 - RNA, 19 nt, Human
augggagagugucaaccag

SEQ ID NO: 3862106 - RNA, 13 nt, Human
augggagccccag

SEQ ID NO: 3862107 - RNA, 14 nt, Human
augggagcuccucu

SEQ ID NO: 3862108 - RNA, 21 nt, Human
augggaggccuuucccuaagc

SEQ ID NO: 3862109 - RNA, 20 nt, Human
augggagggggcuugaagcc

SEQ ID NO: 3862110 - RNA, 15 nt, Human
augggauaaaugcca

SEQ ID NO: 3862111 - RNA, 20 nt, Human
augggauaaaugccaucaau

SEQ ID NO: 3862112 - RNA, 17 nt, Human
augggauacaaccuccc

SEQ ID NO: 3862113 - RNA, 18 nt, Human
augggcaacccccagccu

SEQ ID NO: 3862114 - RNA, 18 nt, Human
augggcacaaagggccca

SEQ ID NO: 3862115 - RNA, 14 nt, Human
augggcacugcugg

SEQ ID NO: 3862116 - RNA, 20 nt, Human
augggcagucauuuugcaga

SEQ ID NO: 3862117 - RNA, 15 nt, Human
augggcaguuucagu

SEQ ID NO: 3862118 - RNA, 16 nt, Human
augggcaucuuuugua

SEQ ID NO: 3862119 - RNA, 20 nt, Human
augggcaucuuuuguauuaa

SEQ ID NO: 3862120 - RNA, 23 nt, Human
augggcauggggugggccucugg

SEQ ID NO: 3862121 - RNA, 16 nt, Human
augggcauugacaaau

SEQ ID NO: 3862122 - RNA, 12 nt, Human
augggccaccgc

SEQ ID NO: 3862123 - RNA, 18 nt, Human
augggccaccgccuugcc

SEQ ID NO: 3862124 - RNA, 16 nt, Human
augggccacugaaauc

SEQ ID NO: 3862125 - RNA, 19 nt, Human
augggccacugaaaucugu

SEQ ID NO: 3862126 - RNA, 12 nt, Human
augggccagccc

SEQ ID NO: 3862127 - RNA, 20 nt, Human
augggccagccccuccaucu

SEQ ID NO: 3862128 - RNA, 13 nt, Human
augggccuggcau

SEQ ID NO: 3862129 - RNA, 18 nt, Human
augggcguacgcuggugc

SEQ ID NO: 3862130 - RNA, 17 nt, Human
augggcuaaugaagauc

SEQ ID NO: 3862131 - RNA, 20 nt, Human
augggcuggguucuacccag

SEQ ID NO: 3862132 - RNA, 15 nt, Human
augggcuucacugua

SEQ ID NO: 3862133 - RNA, 19 nt, Human
augggcuucacuguauaaa

SEQ ID NO: 3862134 - RNA, 18 nt, Human
augggcuuguuuucuugc

SEQ ID NO: 3862135 - RNA, 22 nt, Human
augggcuuuuggggagccagaa

SEQ ID NO: 3862136 - RNA, 15 nt, Human
auggggagaaaagac

SEQ ID NO: 3862137 - RNA, 20 nt, Human
auggggagaucggggccaga

SEQ ID NO: 3862138 - RNA, 13 nt, Human
auggggaggacaa

SEQ ID NO: 3862139 - RNA, 17 nt, Human
auggggauaaaaugacu

SEQ ID NO: 3862140 - RNA, 16 nt, Human
auggggaucacagaga

SEQ ID NO: 3862141 - RNA, 13 nt, Human
auggggccacagc

SEQ ID NO: 3862142 - RNA, 19 nt, Human
auggggccagauccagccu

SEQ ID NO: 3862143 - RNA, 21 nt, Human
auggggccagauccagccugg

SEQ ID NO: 3862144 - RNA, 17 nt, Human
auggggcucccgcccgu

SEQ ID NO: 3862145 - RNA, 16 nt, Human
augggggaaagcacag

SEQ ID NO: 3862146 - RNA, 21 nt, Human
augggggaacucagauccagg

SEQ ID NO: 3862147 - RNA, 16 nt, Human
augggggaugcuucau

SEQ ID NO: 3862148 - RNA, 15 nt, Human
augggggcaagaaga

SEQ ID NO: 3862149 - RNA, 17 nt, Human
augggggcacugaggac

SEQ ID NO: 3862150 - RNA, 16 nt, Human
augggggcagggcugu

SEQ ID NO: 3862151 - RNA, 16 nt, Human
augggggccucagggc

SEQ ID NO: 3862152 - RNA, 22 nt, Human
auggggggagcacccugagggc

SEQ ID NO: 3862153 - RNA, 14 nt, Human
auggggguaaaguu

SEQ ID NO: 3862154 - RNA, 18 nt, Human
auggggguagcagcugga

SEQ ID NO: 3862155 - RNA, 14 nt, Human
auggggguuucacc

SEQ ID NO: 3862156 - RNA, 12 nt, Human
auggguagggua

SEQ ID NO: 3862157 - RNA, 13 nt, Human
augggucacagga

SEQ ID NO: 3862158 - RNA, 13 nt, Human
augggucagagcu

SEQ ID NO: 3862159 - RNA, 17 nt, Human
augggucgcccaugaga

SEQ ID NO: 3862160 - RNA, 18 nt, Human
augggugaaggcuggcau

SEQ ID NO: 3862161 - RNA, 15 nt, Human
augggugauauccug

SEQ ID NO: 3862162 - RNA, 15 nt, Human
augggugcuuggagg

SEQ ID NO: 3862163 - RNA, 21 nt, Human
augggugcuuggaggaaggaa

SEQ ID NO: 3862164 - RNA, 19 nt, Human
auggguguguguuugugug

SEQ ID NO: 3862165 - RNA, 22 nt, Human
auggguuagggaaaacauucca

SEQ ID NO: 3862166 - RNA, 16 nt, Human
auggguuuuaugagau

SEQ ID NO: 3862167 - RNA, 22 nt, Human
auggguuuuaugagauggauca

SEQ ID NO: 3862168 - RNA, 19 nt, Human
auggguuuuguagguacuu

SEQ ID NO: 3862169 - RNA, 16 nt, Human
augguaaaaaauuuau

SEQ ID NO: 3862170 - RNA, 18 nt, Human
augguaaaaaauuuauaa

SEQ ID NO: 3862171 - RNA, 15 nt, Human
augguaaaauugcau

SEQ ID NO: 3862172 - RNA, 17 nt, Human
augguaaaauugcaugg

SEQ ID NO: 3862173 - RNA, 14 nt, Human
augguaacugcuuu

SEQ ID NO: 3862174 - RNA, 15 nt, Human
augguaacugcuuuc

SEQ ID NO: 3862175 - RNA, 23 nt, Human
augguaacugcuuucuguuccaa

SEQ ID NO: 3862176 - RNA, 13 nt, Human
augguaagagaaa

SEQ ID NO: 3862177 - RNA, 20 nt, Human
augguaauaagcacuguaaa

SEQ ID NO: 3862178 - RNA, 14 nt, Human
augguacaaccuuu

SEQ ID NO: 3862179 - RNA, 18 nt, Human
augguacaugucuuccau

SEQ ID NO: 3862180 - RNA, 16 nt, Human
augguacauuuuucaa

SEQ ID NO: 3862181 - RNA, 15 nt, Human
augguaccagauaaa

SEQ ID NO: 3862182 - RNA, 13 nt, Human
augguagaaaaau

SEQ ID NO: 3862183 - RNA, 20 nt, Human
augguagccaguugaauuua

SEQ ID NO: 3862184 - RNA, 22 nt, Human
augguagucuaaccaaaugcau

SEQ ID NO: 3862185 - RNA, 19 nt, Human
augguaguuucugugguug

SEQ ID NO: 3862186 - RNA, 22 nt, Human
augguaguuuuacaguguuucu

SEQ ID NO: 3862187 - RNA, 19 nt, Human
augguauaaugguugacug

SEQ ID NO: 3862188 - RNA, 12 nt, Human
augguauauaua

SEQ ID NO: 3862189 - RNA, 14 nt, Human
augguauauauaca

SEQ ID NO: 3862190 - RNA, 14 nt, Human
augguaugagcuga

SEQ ID NO: 3862191 - RNA, 15 nt, Human
augguauuugagaca

SEQ ID NO: 3862192 - RNA, 22 nt, Human
auggucacuuaaaaugugcagu

SEQ ID NO: 3862193 - RNA, 16 nt, Human
auggucagacacaaac

SEQ ID NO: 3862194 - RNA, 15 nt, Human
auggucauauuuaaa

SEQ ID NO: 3862195 - RNA, 22 nt, Human
auggucaucuuggagggaccaa

SEQ ID NO: 3862196 - RNA, 13 nt, Human
augguccaggaga

SEQ ID NO: 3862197 - RNA, 17 nt, Human
auggucccacaucccug

SEQ ID NO: 3862198 - RNA, 23 nt, Human
auggucccacaucccugggccug

SEQ ID NO: 3862199 - RNA, 17 nt, Human
auggucccauccaggca

SEQ ID NO: 3862200 - RNA, 19 nt, Human
auggucccauccaggcagu

SEQ ID NO: 3862201 - RNA, 16 nt, Human
auggucccaucugcag

SEQ ID NO: 3862202 - RNA, 14 nt, Human
augguccuggggcu

SEQ ID NO: 3862203 - RNA, 17 nt, Human
augguccuggggcucug

SEQ ID NO: 3862204 - RNA, 19 nt, Human
augguccuggggcucugug

SEQ ID NO: 3862205 - RNA, 20 nt, Human
augguccuggggcucugugc

SEQ ID NO: 3862206 - RNA, 15 nt, Human
auggucggaaaacau

SEQ ID NO: 3862207 - RNA, 16 nt, Human
auggucugcccucugc

SEQ ID NO: 3862208 - RNA, 17 nt, Human
auggucuucagccucuu

SEQ ID NO: 3862209 - RNA, 21 nt, Human
auggugaaaccccaucucuac

SEQ ID NO: 3862210 - RNA, 16 nt, Human
auggugaacugucauu

SEQ ID NO: 3862211 - RNA, 20 nt, Human
auggugaggcuuaacaaugu

SEQ ID NO: 3862212 - RNA, 20 nt, Human
auggugagggauacccaucc

SEQ ID NO: 3862213 - RNA, 14 nt, Human
auggugaugaaaug

SEQ ID NO: 3862214 - RNA, 14 nt, Human
auggugauuuuaaa

SEQ ID NO: 3862215 - RNA, 13 nt, Human
auggugcaaugac

SEQ ID NO: 3862216 - RNA, 17 nt, Human
auggugcaaugaccuuu

SEQ ID NO: 3862217 - RNA, 20 nt, Human
auggugcaguugacagcagg

SEQ ID NO: 3862218 - RNA, 19 nt, Human
auggugcauuacgugggca

SEQ ID NO: 3862219 - RNA, 15 nt, Human
auggugcauuguaua

SEQ ID NO: 3862220 - RNA, 18 nt, Human
auggugcauuguauagau

SEQ ID NO: 3862221 - RNA, 14 nt, Human
auggugccccagga

SEQ ID NO: 3862222 - RNA, 16 nt, Human
auggugccccaggacc

SEQ ID NO: 3862223 - RNA, 19 nt, Human
auggugccccaggaccagc

SEQ ID NO: 3862224 - RNA, 22 nt, Human
auggugccccaggaccagcuca

SEQ ID NO: 3862225 - RNA, 9 nt, Human
auggugccu

SEQ ID NO: 3862226 - RNA, 20 nt, Human
auggugccuaguauugacaa

SEQ ID NO: 3862227 - RNA, 16 nt, Human
auucaaaauauuuaaa

SEQ ID NO: 3862228 - RNA, 22 nt, Human
auucaaaauauuuaaaaauguc

SEQ ID NO: 3862229 - RNA, 16 nt, Human
auucaaaaugauguau

SEQ ID NO: 3862230 - RNA, 22 nt, Human
auucaaaauugacauugcuuua

SEQ ID NO: 3862231 - RNA, 14 nt, Human
auucaaacagucuc

SEQ ID NO: 3862232 - RNA, 15 nt, Human
auucaaacagucuca

SEQ ID NO: 3862233 - RNA, 16 nt, Human
auucaaacagucucag

SEQ ID NO: 3862234 - RNA, 22 nt, Human
auucaaacagucucaggaaauc

SEQ ID NO: 3862235 - RNA, 18 nt, Human
auucaaacugaaaagcug

SEQ ID NO: 3862236 - RNA, 16 nt, Human
auucaaagaaauaucu

SEQ ID NO: 3862237 - RNA, 13 nt, Human
auucaaagagaaa

SEQ ID NO: 3862238 - RNA, 13 nt, Human
auucaaagguucu

SEQ ID NO: 3862239 - RNA, 14 nt, Human
auucaaagguucua

SEQ ID NO: 3862240 - RNA, 16 nt, Human
auucaaagguucuagg

SEQ ID NO: 3862241 - RNA, 21 nt, Human
auucaaagguucuagguuuca

SEQ ID NO: 3862242 - RNA, 21 nt, Human
auucaaaucguuuauuucaca

SEQ ID NO: 3862243 - RNA, 14 nt, Human
auucaaauggguga

SEQ ID NO: 3862244 - RNA, 16 nt, Human
auucaaauguauuaca

SEQ ID NO: 3862245 - RNA, 13 nt, Human
auucaaauuuuau

SEQ ID NO: 3862246 - RNA, 12 nt, Human
auucaacaaaca

SEQ ID NO: 3862247 - RNA, 21 nt, Human
auucaacagcaagugugaaua

SEQ ID NO: 3862248 - RNA, 22 nt, Human
auucaacagcaagugugaauac

SEQ ID NO: 3862249 - RNA, 14 nt, Human
auucaaccauggac

SEQ ID NO: 3862250 - RNA, 17 nt, Human
auucaaccauggacuuu

SEQ ID NO: 3862251 - RNA, 18 nt, Human
auucaaccauggacuuua

SEQ ID NO: 3862252 - RNA, 20 nt, Human
auucaaccauggacuuuaua

SEQ ID NO: 3862253 - RNA, 15 nt, Human
auucaacccuggaga

SEQ ID NO: 3862254 - RNA, 14 nt, Human
auucaacuaaaaaa

SEQ ID NO: 3862255 - RNA, 19 nt, Human
auucaagaaaaguaagccc

SEQ ID NO: 3862256 - RNA, 12 nt, Human
auucaagaacau

SEQ ID NO: 3862257 - RNA, 21 nt, Human
auucaagaaugccaguagaaa

SEQ ID NO: 3862258 - RNA, 13 nt, Human
auucaagauuccc

SEQ ID NO: 3862259 - RNA, 21 nt, Human
auucaaggcauuucuaucaca

SEQ ID NO: 3862260 - RNA, 20 nt, Human
auucaagguaaaauucuaaa

SEQ ID NO: 3862261 - RNA, 21 nt, Human
auucaagucuaugaugcuguu

SEQ ID NO: 3862262 - RNA, 20 nt, Human
auucaaguguaaaauauuuu

SEQ ID NO: 3862263 - RNA, 14 nt, Human
auucaaguuauugu

SEQ ID NO: 3862264 - RNA, 15 nt, Human
auucaaguuauugua

SEQ ID NO: 3862265 - RNA, 12 nt, Human
auucaauaaagu

SEQ ID NO: 3862266 - RNA, 13 nt, Human
auucaauaagcau

SEQ ID NO: 3862267 - RNA, 22 nt, Human
auucaauacaaacaaucucuua

SEQ ID NO: 3862268 - RNA, 17 nt, Human
auucaauauugacauuu

SEQ ID NO: 3862269 - RNA, 22 nt, Human
auucaauguuuaugcaaggaag

SEQ ID NO: 3862270 - RNA, 23 nt, Human
auucaauguuuaugcaaggaagg

SEQ ID NO: 3862271 - RNA, 17 nt, Human
auucaauuaaagaaaua

SEQ ID NO: 3862272 - RNA, 16 nt, Human
auucaauucaaagcug

SEQ ID NO: 3862273 - RNA, 13 nt, Human
auucaauuguaaa

SEQ ID NO: 3862274 - RNA, 18 nt, Human
auucaauuguaaauugaa

SEQ ID NO: 3862275 - RNA, 16 nt, Human
auucaauuugaugugg

SEQ ID NO: 3862276 - RNA, 22 nt, Human
auucaauuuucuuuaaccaguc

SEQ ID NO: 3862277 - RNA, 12 nt, Human
auucacaaaaau

SEQ ID NO: 3862278 - RNA, 17 nt, Human
auucacaaacuuuuaua

SEQ ID NO: 3862279 - RNA, 21 nt, Human
auucacaaguuaagauucuug

SEQ ID NO: 3862280 - RNA, 16 nt, Human
auucacaauaaaagcu

SEQ ID NO: 3862281 - RNA, 17 nt, Human
auucacaccccaccugc

SEQ ID NO: 3862282 - RNA, 16 nt, Human
auucacacuugaacca

SEQ ID NO: 3862283 - RNA, 21 nt, Human
auucacagugcucuuuucucc

SEQ ID NO: 3862284 - RNA, 16 nt, Human
auucacaucucauuuu

SEQ ID NO: 3862285 - RNA, 16 nt, Human
auucacauguuuucaa

SEQ ID NO: 3862286 - RNA, 17 nt, Human
auucacauguuuucaaa

SEQ ID NO: 3862287 - RNA, 16 nt, Human
auucaccaaaauuauc

SEQ ID NO: 3862288 - RNA, 15 nt, Human
auucaccauguaaaa

SEQ ID NO: 3862289 - RNA, 14 nt, Human
auucacccagacag

SEQ ID NO: 3862290 - RNA, 16 nt, Human
auucacccccuuuccu

SEQ ID NO: 3862291 - RNA, 16 nt, Human
auucaccuaagagauu

SEQ ID NO: 3862292 - RNA, 22 nt, Human
auucaccuaagagauucugauu

SEQ ID NO: 3862293 - RNA, 18 nt, Human
auucaccuccuaaaacaa

SEQ ID NO: 3862294 - RNA, 13 nt, Human
auucaccuguaaa

SEQ ID NO: 3862295 - RNA, 15 nt, Human
auucaccuguaaaac

SEQ ID NO: 3862296 - RNA, 17 nt, Human
auucaccuguaaaacuu

SEQ ID NO: 3862297 - RNA, 20 nt, Human
auucacuauuggcugggagu

SEQ ID NO: 3862298 - RNA, 21 nt, Human
auucacucccacacccaagaa

SEQ ID NO: 3862299 - RNA, 15 nt, Human
auucacucuuccaga

SEQ ID NO: 3862300 - RNA, 20 nt, Human
auucacugcccccagcucuu

SEQ ID NO: 3862301 - RNA, 13 nt, Human
auucacuggcccc

SEQ ID NO: 3862302 - RNA, 16 nt, Human
auucacuuauauguuc

SEQ ID NO: 3862303 - RNA, 17 nt, Human
auucacuucacugugcu

SEQ ID NO: 3862304 - RNA, 20 nt, Human
auucagaaaauguucuguuu

SEQ ID NO: 3862305 - RNA, 20 nt, Human
auucagaaaugacuuuuuga

SEQ ID NO: 3862306 - RNA, 14 nt, Human
auucagaaauugga

SEQ ID NO: 3862307 - RNA, 15 nt, Human
auucagacaaaaugg

SEQ ID NO: 3862308 - RNA, 23 nt, Human
auucagacaaaauggauacauaa

SEQ ID NO: 3862309 - RNA, 13 nt, Human
auucagacaagca

SEQ ID NO: 3862310 - RNA, 17 nt, Human
auucagacagcugccug

SEQ ID NO: 3862311 - RNA, 13 nt, Human
auucagacaggca

SEQ ID NO: 3862312 - RNA, 20 nt, Human
auucagagaaaggcaaggga

SEQ ID NO: 3862313 - RNA, 12 nt, Human
auucagauguau

SEQ ID NO: 3862314 - RNA, 14 nt, Human
auucagauguaugu

SEQ ID NO: 3862315 - RNA, 14 nt, Human
auucagcaaaccau

SEQ ID NO: 3862316 - RNA, 14 nt, Human
auucagcacugauu

SEQ ID NO: 3862317 - RNA, 19 nt, Human
auucagcacugauuucaca

SEQ ID NO: 3862318 - RNA, 20 nt, Human
auucagcacugauuucacaa

SEQ ID NO: 3862319 - RNA, 21 nt, Human
auucagcacugauuucacaac

SEQ ID NO: 3862320 - RNA, 19 nt, Human
auucagcagcaaauuuuca

SEQ ID NO: 3862321 - RNA, 20 nt, Human
auucagcagcaaauuuucag

SEQ ID NO: 3862322 - RNA, 14 nt, Human
auucagccuggcuu

SEQ ID NO: 3862323 - RNA, 14 nt, Human
auucagcucugcaa

SEQ ID NO: 3862324 - RNA, 17 nt, Human
auucagcugagguucau

SEQ ID NO: 3862325 - RNA, 21 nt, Human
auucaggaaaaggccuggggu

SEQ ID NO: 3862326 - RNA, 22 nt, Human
auucaggaagcagcuuucccca

SEQ ID NO: 3862327 - RNA, 19 nt, Human
auucaggaagcucagggcc

SEQ ID NO: 3862328 - RNA, 22 nt, Human
auucaggaagcucagggccugg

SEQ ID NO: 3862329 - RNA, 21 nt, Human
auucaggaauguguggccugc

SEQ ID NO: 3862330 - RNA, 22 nt, Human
auucaggacuuaacggcuccag

SEQ ID NO: 3862331 - RNA, 22 nt, Human
auucaggcuacugcuucaaucu

SEQ ID NO: 3862332 - RNA, 11 nt, Human
auucaggcugc

SEQ ID NO: 3862333 - RNA, 16 nt, Human
auucaggcugcuuggg

SEQ ID NO: 3862334 - RNA, 12 nt, Human
auucaggggcug

SEQ ID NO: 3862335 - RNA, 19 nt, Human
auucaggggcugacacuuc

SEQ ID NO: 3862336 - RNA, 13 nt, Human
auucagguauguu

SEQ ID NO: 3862337 - RNA, 18 nt, Human
auucagguauguugccuu

SEQ ID NO: 3862338 - RNA, 20 nt, Human
auucagguauguugccuuua

SEQ ID NO: 3862339 - RNA, 18 nt, Human
auucaggugaaaauguuc

SEQ ID NO: 3862340 - RNA, 18 nt, Human
auucaggugcagaggaag

SEQ ID NO: 3862341 - RNA, 23 nt, Human
auucagguuuuuccuuuuuuugu

SEQ ID NO: 3862342 - RNA, 19 nt, Human
auucaguaauaacucuacc

SEQ ID NO: 3862343 - RNA, 22 nt, Human
auucagugcuguggccugggca

SEQ ID NO: 3862344 - RNA, 17 nt, Human
auucagugcuucuuaaa

SEQ ID NO: 3862345 - RNA, 19 nt, Human
auucaguggcgagaaauaa

SEQ ID NO: 3862346 - RNA, 19 nt, Human
auucaguguuaaaugugau

SEQ ID NO: 3862347 - RNA, 16 nt, Human
auucaguucccagaau

SEQ ID NO: 3862348 - RNA, 19 nt, Human
auucaguucccagaaucaa

SEQ ID NO: 3862349 - RNA, 13 nt, Human
auucaguuucuaa

SEQ ID NO: 3862350 - RNA, 15 nt, Human
auucaguuuucauuu

SEQ ID NO: 3862351 - RNA, 15 nt, Human
auucauaaaaacugc

SEQ ID NO: 3862352 - RNA, 16 nt, Human
auucauaaaaacugcu

SEQ ID NO: 3862353 - RNA, 12 nt, Human
auucauaaaucu

SEQ ID NO: 3862354 - RNA, 13 nt, Human
auucauacuuaaa

SEQ ID NO: 3862355 - RNA, 20 nt, Human
auucauacuuaaaaauuuau

SEQ ID NO: 3862356 - RNA, 16 nt, Human
auucauaguaacuucu

SEQ ID NO: 3862357 - RNA, 17 nt, Human
auucauaguaacuucuu

SEQ ID NO: 3862358 - RNA, 19 nt, Human
auucauaguaacuucuuau

SEQ ID NO: 3862359 - RNA, 14 nt, Human
auucauaugcauau

SEQ ID NO: 3862360 - RNA, 18 nt, Human
auucauauuacaauauuu

SEQ ID NO: 3862361 - RNA, 14 nt, Human
auucauauucuuuu

SEQ ID NO: 3862362 - RNA, 17 nt, Human
auucauauugaauauaa

SEQ ID NO: 3862363 - RNA, 14 nt, Human
auucauauuuacuu

SEQ ID NO: 3862364 - RNA, 15 nt, Human
auucauauuuguacu

SEQ ID NO: 3862365 - RNA, 22 nt, Human
auucauauuuguacuuucuguu

SEQ ID NO: 3862366 - RNA, 16 nt, Human
auucauauuuucuuuc

SEQ ID NO: 3862367 - RNA, 19 nt, Human
auucauccaaguuaaaugu

SEQ ID NO: 3862368 - RNA, 20 nt, Human
auucauccaaguuaaaugua

SEQ ID NO: 3862369 - RNA, 16 nt, Human
auucaucccaacuguc

SEQ ID NO: 3862370 - RNA, 17 nt, Human
auucaucccaacugucu

SEQ ID NO: 3862371 - RNA, 22 nt, Human
auucaucucucuuuaauauaaa

SEQ ID NO: 3862372 - RNA, 17 nt, Human
auugaacacaaacugua

SEQ ID NO: 3862373 - RNA, 20 nt, Human
auugaacacaaacuguaaau

SEQ ID NO: 3862374 - RNA, 14 nt, Human
auugaacagcaaag

SEQ ID NO: 3862375 - RNA, 15 nt, Human
auugaacccaggagg

SEQ ID NO: 3862376 - RNA, 23 nt, Human
auugaaccuuugugcccuaucac

SEQ ID NO: 3862377 - RNA, 19 nt, Human
auugaacuuaaauaaaugu

SEQ ID NO: 3862378 - RNA, 22 nt, Human
auugaacuuacuguagccucag

SEQ ID NO: 3862379 - RNA, 17 nt, Human
auugaacuuuuguacug

SEQ ID NO: 3862380 - RNA, 18 nt, Human
auugaacuuuuguacuga

SEQ ID NO: 3862381 - RNA, 13 nt, Human
auugaagaagaau

SEQ ID NO: 3862382 - RNA, 14 nt, Human
auugaagacaauuu

SEQ ID NO: 3862383 - RNA, 19 nt, Human
auugaagacaauuugauac

SEQ ID NO: 3862384 - RNA, 19 nt, Human
auugaagagagauauaucu

SEQ ID NO: 3862385 - RNA, 18 nt, Human
auugaagccgacucuggc

SEQ ID NO: 3862386 - RNA, 22 nt, Human
auugaagcucgugacaagugcc

SEQ ID NO: 3862387 - RNA, 12 nt, Human
auugaaggaaag

SEQ ID NO: 3862388 - RNA, 19 nt, Human
auugaaggaagccaaauuu

SEQ ID NO: 3862389 - RNA, 15 nt, Human
auugaaggcuuaaac

SEQ ID NO: 3862390 - RNA, 13 nt, Human
auugaagguuuuu

SEQ ID NO: 3862391 - RNA, 14 nt, Human
auugaaguaaaaug

SEQ ID NO: 3862392 - RNA, 15 nt, Human
auugaaguaaacuuu

SEQ ID NO: 3862393 - RNA, 15 nt, Human
auugaaguaaugaau

SEQ ID NO: 3862394 - RNA, 13 nt, Human
auugaaguuucaa

SEQ ID NO: 3862395 - RNA, 14 nt, Human
auugaauaauggua

SEQ ID NO: 3862396 - RNA, 13 nt, Human
auugaaucaguau

SEQ ID NO: 3862397 - RNA, 14 nt, Human
auugaaucauguag

SEQ ID NO: 3862398 - RNA, 16 nt, Human
auugaaucuauuuaag

SEQ ID NO: 3862399 - RNA, 18 nt, Human
auugaaucuauuuaagua

SEQ ID NO: 3862400 - RNA, 14 nt, Human
auugaaucugauug

SEQ ID NO: 3862401 - RNA, 23 nt, Human
auugaaucugauuggacauuuuc

SEQ ID NO: 3862402 - RNA, 22 nt, Human
auugaaugauauauaaauauau

SEQ ID NO: 3862403 - RNA, 22 nt, Human
auugaauggcuauguuuuuaau

SEQ ID NO: 3862404 - RNA, 18 nt, Human
auugaauucauuucacug

SEQ ID NO: 3862405 - RNA, 23 nt, Human
auugaauucuugguugaggaaac

SEQ ID NO: 3862406 - RNA, 14 nt, Human
auugaauuuaacaa

SEQ ID NO: 3862407 - RNA, 20 nt, Human
auugaauuuuuauuuuugaa

SEQ ID NO: 3862408 - RNA, 13 nt, Human
auugacaaacucu

SEQ ID NO: 3862409 - RNA, 15 nt, Human
auugacaagaacuga

SEQ ID NO: 3862410 - RNA, 13 nt, Human
auugacaauaaaa

SEQ ID NO: 3862411 - RNA, 18 nt, Human
auugacaauaaaauauua

SEQ ID NO: 3862412 - RNA, 20 nt, Human
auugacaauaauuucagguu

SEQ ID NO: 3862413 - RNA, 12 nt, Human
auugacacagaa

SEQ ID NO: 3862414 - RNA, 16 nt, Human
auugacacugaacuua

SEQ ID NO: 3862415 - RNA, 18 nt, Human
auugacacugaacuuaau

SEQ ID NO: 3862416 - RNA, 19 nt, Human
auugacacuuaaaaauggu

SEQ ID NO: 3862417 - RNA, 16 nt, Human
auugacagauugaauu

SEQ ID NO: 3862418 - RNA, 14 nt, Human
auugacagcuuugc

SEQ ID NO: 3862419 - RNA, 23 nt, Human
auugacaguaacuugguuauaca

SEQ ID NO: 3862420 - RNA, 14 nt, Human
auugaccaagaacu

SEQ ID NO: 3862421 - RNA, 15 nt, Human
auugaccaucugcuu

SEQ ID NO: 3862422 - RNA, 21 nt, Human
auugaccgacagcuuuccagu

SEQ ID NO: 3862423 - RNA, 20 nt, Human
auugaccgcgacuaauuuca

SEQ ID NO: 3862424 - RNA, 22 nt, Human
auugaccuauuuccagaaauac

SEQ ID NO: 3862425 - RNA, 17 nt, Human
auugaccugcuccgcug

SEQ ID NO: 3862426 - RNA, 20 nt, Human
auugacgauuccuucucuga

SEQ ID NO: 3862427 - RNA, 21 nt, Human
auugacgguuuuuuauuauug

SEQ ID NO: 3862428 - RNA, 23 nt, Human
auugacgucuagcuaugcuguau

SEQ ID NO: 3862429 - RNA, 23 nt, Human
auugacuaacucaaauacacauu

SEQ ID NO: 3862430 - RNA, 18 nt, Human
auugacuaucaaacugaa

SEQ ID NO: 3862431 - RNA, 13 nt, Human
auugacucugggu

SEQ ID NO: 3862432 - RNA, 14 nt, Human
auugacucuggguc

SEQ ID NO: 3862433 - RNA, 15 nt, Human
auugacucugggucc

SEQ ID NO: 3862434 - RNA, 13 nt, Human
auugacucuugag

SEQ ID NO: 3862435 - RNA, 22 nt, Human
auugacucuugaguuguuuuug

SEQ ID NO: 3862436 - RNA, 22 nt, Human
auugacugguuuacaggcccug

SEQ ID NO: 3862437 - RNA, 14 nt, Human
auugacuucaauga

SEQ ID NO: 3862438 - RNA, 18 nt, Human
auugacuucaaugauagu

SEQ ID NO: 3862439 - RNA, 22 nt, Human
auugacuuuccccaccagaugc

SEQ ID NO: 3862440 - RNA, 18 nt, Human
auugacuuuuauaaagca

SEQ ID NO: 3862441 - RNA, 18 nt, Human
auugacuuuuuauggcac

SEQ ID NO: 3862442 - RNA, 17 nt, Human
auugagaaagagcacuu

SEQ ID NO: 3862443 - RNA, 18 nt, Human
auugagaacugcauaugu

SEQ ID NO: 3862444 - RNA, 22 nt, Human
auugagaacugcauauguuucg

SEQ ID NO: 3862445 - RNA, 21 nt, Human
auugagaagaaaaacucaauu

SEQ ID NO: 3862446 - RNA, 13 nt, Human
auugagaaggaga

SEQ ID NO: 3862447 - RNA, 14 nt, Human
auugagaaggagag

SEQ ID NO: 3862448 - RNA, 15 nt, Human
auugagaaggagaga

SEQ ID NO: 3862449 - RNA, 14 nt, Human
auugagaaguucau

SEQ ID NO: 3862450 - RNA, 20 nt, Human
auugagaccgugaagauacu

SEQ ID NO: 3862451 - RNA, 19 nt, Human
auugagaccuacaggcuga

SEQ ID NO: 3862452 - RNA, 11 nt, Human
auugagagaau

SEQ ID NO: 3862453 - RNA, 20 nt, Human
auugagagagauguguaauu

SEQ ID NO: 3862454 - RNA, 20 nt, Human
auugagaguuuugucuugaa

SEQ ID NO: 3862455 - RNA, 16 nt, Human
auugagauacuuuuuc

SEQ ID NO: 3862456 - RNA, 19 nt, Human
auugagauuaugaugaaaa

SEQ ID NO: 3862457 - RNA, 15 nt, Human
auugagccuaaaaau

SEQ ID NO: 3862458 - RNA, 17 nt, Human
auugagccuaaaaauaa

SEQ ID NO: 3862459 - RNA, 15 nt, Human
auugagcugauauaa

SEQ ID NO: 3862460 - RNA, 15 nt, Human
auugaggaaaaauau

SEQ ID NO: 3862461 - RNA, 21 nt, Human
auugaggccugcccucaggga

SEQ ID NO: 3862462 - RNA, 22 nt, Human
auugaggcuuuguguuguaauu

SEQ ID NO: 3862463 - RNA, 22 nt, Human
auugaggggauuaauaugaaaa

SEQ ID NO: 3862464 - RNA, 23 nt, Human
auugagguguauggagagaaaac

SEQ ID NO: 3862465 - RNA, 17 nt, Human
auugaguaagauuuacc

SEQ ID NO: 3862466 - RNA, 19 nt, Human
auugaguaaugguguagaa

SEQ ID NO: 3862467 - RNA, 14 nt, Human
auugaguauuguuu

SEQ ID NO: 3862468 - RNA, 19 nt, Human
auugaguucuuccuguaau

SEQ ID NO: 3862469 - RNA, 20 nt, Human
auugaguucuuccuguaauc

SEQ ID NO: 3862470 - RNA, 13 nt, Human
auugaguuggaau

SEQ ID NO: 3862471 - RNA, 16 nt, Human
auugaguuuguaggua

SEQ ID NO: 3862472 - RNA, 19 nt, Human
auugauaaccuugaaaaaa

SEQ ID NO: 3862473 - RNA, 23 nt, Human
auugauaagagggcacacacugu

SEQ ID NO: 3862474 - RNA, 13 nt, Human
auugauaauaaac

SEQ ID NO: 3862475 - RNA, 15 nt, Human
auugauacucuuucu

SEQ ID NO: 3862476 - RNA, 18 nt, Human
auugauauaaauaaaaca

SEQ ID NO: 3862477 - RNA, 20 nt, Human
auugauaucuccaugaugau

SEQ ID NO: 3862478 - RNA, 14 nt, Human
auugauaugaaaaa

SEQ ID NO: 3862479 - RNA, 17 nt, Human
auugauaugcuuauaca

SEQ ID NO: 3862480 - RNA, 14 nt, Human
auugauauugugaa

SEQ ID NO: 3862481 - RNA, 19 nt, Human
auugauauugugaacauuu

SEQ ID NO: 3862482 - RNA, 15 nt, Human
auugaucaaauucau

SEQ ID NO: 3862483 - RNA, 18 nt, Human
auugaucauuuucccccc

SEQ ID NO: 3862484 - RNA, 17 nt, Human
auugauccagaaagaaa

SEQ ID NO: 3862485 - RNA, 19 nt, Human
auugauccagaaagaaaac

SEQ ID NO: 3862486 - RNA, 19 nt, Human
auugaucggagccuccucu

SEQ ID NO: 3862487 - RNA, 23 nt, Human
auugaucggagccuccucucuca

SEQ ID NO: 3862488 - RNA, 14 nt, Human
auugaugcaaauaa

SEQ ID NO: 3862489 - RNA, 13 nt, Human
auugaugugcaaa

SEQ ID NO: 3862490 - RNA, 16 nt, Human
auugaugugcaaaaau

SEQ ID NO: 3862491 - RNA, 20 nt, Human
auugaugugcaaaaauuuuu

SEQ ID NO: 3862492 - RNA, 13 nt, Human
auugauguugaug

SEQ ID NO: 3862493 - RNA, 20 nt, Human
auugauuauuacuggcaaaa

SEQ ID NO: 3862494 - RNA, 14 nt, Human
auugauugggaaaa

SEQ ID NO: 3862495 - RNA, 19 nt, Human
auugauugggaaaacauuu

SEQ ID NO: 3862496 - RNA, 21 nt, Human
auugauugggaaaacauuugc

SEQ ID NO: 3862497 - RNA, 21 nt, Human
auugauuuccguuaaaauacc

SEQ ID NO: 3862498 - RNA, 15 nt, Human
auugauuuccugugu

SEQ ID NO: 3862499 - RNA, 20 nt, Human
auugauuucugccuuccuug

SEQ ID NO: 3862500 - RNA, 13 nt, Human
auugauuugcauu

SEQ ID NO: 3862501 - RNA, 15 nt, Human
auugauuugcauuga

SEQ ID NO: 3862502 - RNA, 12 nt, Human
auugauuuuugg

SEQ ID NO: 3862503 - RNA, 21 nt, Human
auugcaacaaaauacauucuu

SEQ ID NO: 3862504 - RNA, 15 nt, Human
auugcaacaggcugg

SEQ ID NO: 3862505 - RNA, 16 nt, Human
auugcaacaggcuggg

SEQ ID NO: 3862506 - RNA, 17 nt, Human
auugcaacaggcugggc

SEQ ID NO: 3862507 - RNA, 23 nt, Human
auugcaagaagcuuuauuucuag

SEQ ID NO: 3862508 - RNA, 16 nt, Human
auugcaauaaaguaua

SEQ ID NO: 3862509 - RNA, 13 nt, Human
auugcaauuaaac

SEQ ID NO: 3862510 - RNA, 18 nt, Human
auugcacaaaauauaaag

SEQ ID NO: 3862511 - RNA, 11 nt, Human
auugcacaaua

SEQ ID NO: 3862512 - RNA, 16 nt, Human
auugcacaugucuuaa

SEQ ID NO: 3862513 - RNA, 21 nt, Human
auugcacaugucuuaaugaag

SEQ ID NO: 3862514 - RNA, 13 nt, Human
auugcacauuguu

SEQ ID NO: 3862515 - RNA, 21 nt, Human
auugcacauuguuguuuuuuu

SEQ ID NO: 3862516 - RNA, 12 nt, Human
auugcaccacug

SEQ ID NO: 3862517 - RNA, 16 nt, Human
auuuucucucagguga

SEQ ID NO: 3862518 - RNA, 17 nt, Human
auuuucucugauacuuu

SEQ ID NO: 3862519 - RNA, 18 nt, Human
auuuucucugauacuuuu

SEQ ID NO: 3862520 - RNA, 14 nt, Human
auuuucucuguacu

SEQ ID NO: 3862521 - RNA, 18 nt, Human
auuuucucuguguuuguu

SEQ ID NO: 3862522 - RNA, 21 nt, Human
auuuucugaaacuaaugaaag

SEQ ID NO: 3862523 - RNA, 22 nt, Human
auuuucugaaacuaaugaaagc

SEQ ID NO: 3862524 - RNA, 12 nt, Human
auuuucugcaag

SEQ ID NO: 3862525 - RNA, 20 nt, Human
auuuucuggguucugggugg

SEQ ID NO: 3862526 - RNA, 15 nt, Human
auuuucugguucuaa

SEQ ID NO: 3862527 - RNA, 19 nt, Human
auuuucugguucuaacauu

SEQ ID NO: 3862528 - RNA, 12 nt, Human
auuuucugucag

SEQ ID NO: 3862529 - RNA, 18 nt, Human
auuuucugucagaugaga

SEQ ID NO: 3862530 - RNA, 18 nt, Human
auuuucugugccugaaua

SEQ ID NO: 3862531 - RNA, 20 nt, Human
auuuucugugccugaauauu

SEQ ID NO: 3862532 - RNA, 21 nt, Human
auuuucugugccugaauauuu

SEQ ID NO: 3862533 - RNA, 19 nt, Human
auuuucugugggcaggccu

SEQ ID NO: 3862534 - RNA, 15 nt, Human
auuuucuguguguuc

SEQ ID NO: 3862535 - RNA, 11 nt, Human
auuuucuguug

SEQ ID NO: 3862536 - RNA, 21 nt, Human
auuuucuuacccaauuuccca

SEQ ID NO: 3862537 - RNA, 21 nt, Human
auuuucuuauugcgcugcuac

SEQ ID NO: 3862538 - RNA, 18 nt, Human
auuuucuucaccucugcu

SEQ ID NO: 3862539 - RNA, 14 nt, Human
auuuucuucaugca

SEQ ID NO: 3862540 - RNA, 14 nt, Human
auuuucuucuaagu

SEQ ID NO: 3862541 - RNA, 20 nt, Human
auuuucuucuaagugaaauu

SEQ ID NO: 3862542 - RNA, 18 nt, Human
auuuucuucucugugaga

SEQ ID NO: 3862543 - RNA, 13 nt, Human
auuuucuuuaaaa

SEQ ID NO: 3862544 - RNA, 16 nt, Human
auuuugaaaacuacau

SEQ ID NO: 3862545 - RNA, 17 nt, Human
auuuugaaaagauguac

SEQ ID NO: 3862546 - RNA, 20 nt, Human
auuuugaaaagcuucuuaau

SEQ ID NO: 3862547 - RNA, 14 nt, Human
auuuugaaaaguaa

SEQ ID NO: 3862548 - RNA, 23 nt, Human
auuuugaagcuaauuauuuuaau

SEQ ID NO: 3862549 - RNA, 20 nt, Human
auuuugaagugagaaaauga

SEQ ID NO: 3862550 - RNA, 22 nt, Human
auuuugaagugcuguuuauuaa

SEQ ID NO: 3862551 - RNA, 18 nt, Human
auuuugaaguuuacauuu

SEQ ID NO: 3862552 - RNA, 12 nt, Human
auuuugaaucaa

SEQ ID NO: 3862553 - RNA, 17 nt, Human
auuuugaaucaauaaua

SEQ ID NO: 3862554 - RNA, 16 nt, Human
auuuugacacugaaau

SEQ ID NO: 3862555 - RNA, 19 nt, Human
auuuugagauguaaaaaga

SEQ ID NO: 3862556 - RNA, 14 nt, Human
auuuugaggcuuuc

SEQ ID NO: 3862557 - RNA, 18 nt, Human
auuuugaguaaagcuccu

SEQ ID NO: 3862558 - RNA, 14 nt, Human
auuuugaguugcca

SEQ ID NO: 3862559 - RNA, 17 nt, Human
auuuugauaauaaauug

SEQ ID NO: 3862560 - RNA, 20 nt, Human
auuuugaucucacauuuuua

SEQ ID NO: 3862561 - RNA, 14 nt, Human
auuuugaugaacaa

SEQ ID NO: 3862562 - RNA, 16 nt, Human
auuuugaugcagcauu

SEQ ID NO: 3862563 - RNA, 21 nt, Human
auuuugaugcagcauuugaua

SEQ ID NO: 3862564 - RNA, 23 nt, Human
auuuugaugcagcauuugauaau

SEQ ID NO: 3862565 - RNA, 18 nt, Human
auuuugaugugacaauaa

SEQ ID NO: 3862566 - RNA, 19 nt, Human
auuuugaugugacaauaau

SEQ ID NO: 3862567 - RNA, 14 nt, Human
auuuugcaaaauuu

SEQ ID NO: 3862568 - RNA, 13 nt, Human
auuuugcaaagau

SEQ ID NO: 3862569 - RNA, 19 nt, Human
auuuugcaaauauaaacau

SEQ ID NO: 3862570 - RNA, 18 nt, Human
auuuugcacccacugaaa

SEQ ID NO: 3862571 - RNA, 22 nt, Human
auuuugcagaggcuaugggaag

SEQ ID NO: 3862572 - RNA, 12 nt, Human
auuuugcagcag

SEQ ID NO: 3862573 - RNA, 20 nt, Human
auuuugccaagggcauaaau

SEQ ID NO: 3862574 - RNA, 15 nt, Human
auuuugcccuugaca

SEQ ID NO: 3862575 - RNA, 18 nt, Human
auuuugccucuuuucucu

SEQ ID NO: 3862576 - RNA, 17 nt, Human
auuuugcgucagagaaa

SEQ ID NO: 3862577 - RNA, 19 nt, Human
auuuugcuaucaacaauaa

SEQ ID NO: 3862578 - RNA, 23 nt, Human
auuuugcuauuguaaauauguuu

SEQ ID NO: 3862579 - RNA, 21 nt, Human
auuuugcugucccuuuuccuu

SEQ ID NO: 3862580 - RNA, 14 nt, Human
auuuuggaaaauaa

SEQ ID NO: 3862581 - RNA, 19 nt, Human
auuuuggaaaguuuuugua

SEQ ID NO: 3862582 - RNA, 21 nt, Human
auuuuggagaaauuauuuaau

SEQ ID NO: 3862583 - RNA, 19 nt, Human
auuuuggagagauaggaag

SEQ ID NO: 3862584 - RNA, 20 nt, Human
auuuuggagaguuuccugaa

SEQ ID NO: 3862585 - RNA, 21 nt, Human
auuuuggagaguuuccugaaa

SEQ ID NO: 3862586 - RNA, 21 nt, Human
auuuuggagauuauaauaaau

SEQ ID NO: 3862587 - RNA, 17 nt, Human
auuuuggauuuugcaag

SEQ ID NO: 3862588 - RNA, 21 nt, Human
auuuuggccaugaaagcaugg

SEQ ID NO: 3862589 - RNA, 21 nt, Human
auuuuggcgaaucucaaaauu

SEQ ID NO: 3862590 - RNA, 16 nt, Human
auuuugggaaucuuuu

SEQ ID NO: 3862591 - RNA, 22 nt, Human
auuuugggguacccacugcucu

SEQ ID NO: 3862592 - RNA, 19 nt, Human
auuuuggguuuugggucuu

SEQ ID NO: 3862593 - RNA, 21 nt, Human
auuuugguaagagacagaaug

SEQ ID NO: 3862594 - RNA, 21 nt, Human
auuuugguauuacacuguauu

SEQ ID NO: 3862595 - RNA, 17 nt, Human
auuuuggugucuuucuc

SEQ ID NO: 3862596 - RNA, 17 nt, Human
auuuugguucuucucaa

SEQ ID NO: 3862597 - RNA, 19 nt, Human
auuuugguuguauucuuug

SEQ ID NO: 3862598 - RNA, 16 nt, Human
auuuugguuuuguucc

SEQ ID NO: 3862599 - RNA, 17 nt, Human
auuuugguuuuguuccc

SEQ ID NO: 3862600 - RNA, 12 nt, Human
auuuuguaaaau

SEQ ID NO: 3862601 - RNA, 14 nt, Human
auuuuguaaaaugu

SEQ ID NO: 3862602 - RNA, 17 nt, Human
auuuuguaaacucaaaa

SEQ ID NO: 3862603 - RNA, 23 nt, Human
auuuuguaaauaauaaaauagua

SEQ ID NO: 3862604 - RNA, 12 nt, Human
auuuuguaagaa

SEQ ID NO: 3862605 - RNA, 16 nt, Human
auuuuguaagaaggca

SEQ ID NO: 3862606 - RNA, 20 nt, Human
auuuuguaauuuucuugaug

SEQ ID NO: 3862607 - RNA, 20 nt, Human
auuuuguacaaauuuguuau

SEQ ID NO: 3862608 - RNA, 13 nt, Human
auuuuguaucugc

SEQ ID NO: 3862609 - RNA, 14 nt, Human
auuuuguaucugca

SEQ ID NO: 3862610 - RNA, 14 nt, Human
auuuuguaugaaau

SEQ ID NO: 3862611 - RNA, 23 nt, Human
auuuuguaugcaagcaguuucaa

SEQ ID NO: 3862612 - RNA, 16 nt, Human
auuuuguauuauugcu

SEQ ID NO: 3862613 - RNA, 15 nt, Human
auuuuguauuguggu

SEQ ID NO: 3862614 - RNA, 16 nt, Human
auuuuguauuuuccaa

SEQ ID NO: 3862615 - RNA, 20 nt, Human
auuuuguauuuuccaagugu

SEQ ID NO: 3862616 - RNA, 14 nt, Human
auuuugucgaauuu

SEQ ID NO: 3862617 - RNA, 21 nt, Human
auuuugugaaacagacuugua

SEQ ID NO: 3862618 - RNA, 21 nt, Human
auuuugugaagacugggaagu

SEQ ID NO: 3862619 - RNA, 17 nt, Human
auuuugugacauuccuu

SEQ ID NO: 3862620 - RNA, 23 nt, Human
auuuugugaguuuguuucuuuga

SEQ ID NO: 3862621 - RNA, 20 nt, Human
auuuugugcucauuuaaguu

SEQ ID NO: 3862622 - RNA, 23 nt, Human
auuuuguggaggcagugucauuu

SEQ ID NO: 3862623 - RNA, 13 nt, Human
auuuuguguaaaa

SEQ ID NO: 3862624 - RNA, 14 nt, Human
auuuuguguaaaaa

SEQ ID NO: 3862625 - RNA, 20 nt, Human
auuuuguguaagaaauacag

SEQ ID NO: 3862626 - RNA, 21 nt, Human
auuuuguguccuccaggagcu

SEQ ID NO: 3862627 - RNA, 15 nt, Human
auuuugugugaccaa

SEQ ID NO: 3862628 - RNA, 17 nt, Human
auuuuguguugaagagc

SEQ ID NO: 3862629 - RNA, 17 nt, Human
auuuuguguuuaggaac

SEQ ID NO: 3862630 - RNA, 17 nt, Human
auuuuguguuuauucuu

SEQ ID NO: 3862631 - RNA, 19 nt, Human
auuuuguguuuauucuuga

SEQ ID NO: 3862632 - RNA, 14 nt, Human
auuuuguucauaca

SEQ ID NO: 3862633 - RNA, 15 nt, Human
auuuuguucauacau

SEQ ID NO: 3862634 - RNA, 14 nt, Human
auuuuguucuuaca

SEQ ID NO: 3862635 - RNA, 17 nt, Human
auuuuguucuuacacau

SEQ ID NO: 3862636 - RNA, 23 nt, Human
auuuuguugcuguuuugauuugu

SEQ ID NO: 3862637 - RNA, 20 nt, Human
auuuuguugcuuuugugaac

SEQ ID NO: 3862638 - RNA, 11 nt, Human
auuuuguuuac

SEQ ID NO: 3862639 - RNA, 14 nt, Human
auuuuguuucugua

SEQ ID NO: 3862640 - RNA, 20 nt, Human
auuuuguuucuuuuaaagca

SEQ ID NO: 3862641 - RNA, 20 nt, Human
auuuuguuugguauuguauu

SEQ ID NO: 3862642 - RNA, 21 nt, Human
auuuuguuugguauuguauuu

SEQ ID NO: 3862643 - RNA, 22 nt, Human
auuuuguuuugcuuuuucugac

SEQ ID NO: 3862644 - RNA, 23 nt, Human
auuuuguuuugcuuuuucugacu

SEQ ID NO: 3862645 - RNA, 24 nt, Human
auuuuguuuugcuuuuucugacuc

SEQ ID NO: 3862646 - RNA, 14 nt, Human
auuuuguuuuuaaa

SEQ ID NO: 3862647 - RNA, 15 nt, Human
auuuuuaaaaaauau

SEQ ID NO: 3862648 - RNA, 23 nt, Human
auuuuuaaaaaauauuuucucug

SEQ ID NO: 3862649 - RNA, 22 nt, Human
auuuuuaaaaaaugaaauccuu

SEQ ID NO: 3862650 - RNA, 13 nt, Human
auuuuuaaaagcc

SEQ ID NO: 3862651 - RNA, 22 nt, Human
auuuuuaaaaugcaacaugugu

SEQ ID NO: 3862652 - RNA, 16 nt, Human
auuuuuaaaauguaca

SEQ ID NO: 3862653 - RNA, 14 nt, Human
auuuuuaaacaagu

SEQ ID NO: 3862654 - RNA, 21 nt, Human
auuuuuaaacagguggugaga

SEQ ID NO: 3862655 - RNA, 12 nt, Human
auuuuuaaagau

SEQ ID NO: 3862656 - RNA, 13 nt, Human
auuuuuaaagauc

SEQ ID NO: 3862657 - RNA, 17 nt, Human
auuuuuaaaguauauau

SEQ ID NO: 3862658 - RNA, 11 nt, Human
auuuuuaaaug

SEQ ID NO: 3862659 - RNA, 19 nt, Human
auuuuuaaaugcaguuaca

SEQ ID NO: 3862660 - RNA, 13 nt, Human
auuuuuaaaugug

SEQ ID NO: 3862661 - RNA, 17 nt, Human
caaaagcgcuuuuccuu

SEQ ID NO: 3862662 - RNA, 22 nt, Human
caaaagcgcuuuuccuuggcau

SEQ ID NO: 3862663 - RNA, 19 nt, Human
caaaagcuagacagauccc

SEQ ID NO: 3862664 - RNA, 16 nt, Human
caaaagcugaacacau

SEQ ID NO: 3862665 - RNA, 20 nt, Human
caaaagcugaacacauuucu

SEQ ID NO: 3862666 - RNA, 15 nt, Human
caaaagcugggcagg

SEQ ID NO: 3862667 - RNA, 19 nt, Human
caaaagcugggcagguugg

SEQ ID NO: 3862668 - RNA, 13 nt, Human
caaaagcuuuuua

SEQ ID NO: 3862669 - RNA, 12 nt, Human
caaaaggaaaaa

SEQ ID NO: 3862670 - RNA, 14 nt, Human
caaaaggaaaaagc

SEQ ID NO: 3862671 - RNA, 16 nt, Human
caaaaggaaaaagcuc

SEQ ID NO: 3862672 - RNA, 11 nt, Human
caaaaggaaag

SEQ ID NO: 3862673 - RNA, 20 nt, Human
caaaaggaaagcuguguuua

SEQ ID NO: 3862674 - RNA, 13 nt, Human
caaaaggaagucu

SEQ ID NO: 3862675 - RNA, 22 nt, Human
caaaaggagagacucccaugaa

SEQ ID NO: 3862676 - RNA, 21 nt, Human
caaaaggauaaugaauacuuu

SEQ ID NO: 3862677 - RNA, 19 nt, Human
caaaaggaucuuuguggcc

SEQ ID NO: 3862678 - RNA, 20 nt, Human
caaaaggaucuuuguggcca

SEQ ID NO: 3862679 - RNA, 21 nt, Human
caaaaggcaguggggcugggg

SEQ ID NO: 3862680 - RNA, 16 nt, Human
caaaaggccucuugua

SEQ ID NO: 3862681 - RNA, 22 nt, Human
caaaaggccucuuguaaagacu

SEQ ID NO: 3862682 - RNA, 23 nt, Human
caaaaggccucuuguaaagacug

SEQ ID NO: 3862683 - RNA, 15 nt, Human
caaaagggacaugaa

SEQ ID NO: 3862684 - RNA, 16 nt, Human
caaaagggucagagga

SEQ ID NO: 3862685 - RNA, 23 nt, Human
caaaagggucagaggaccuguau

SEQ ID NO: 3862686 - RNA, 22 nt, Human
caaaaggguuuaaacugauuca

SEQ ID NO: 3862687 - RNA, 15 nt, Human
caaaaggugccugug

SEQ ID NO: 3862688 - RNA, 23 nt, Human
caaaaggugccugugaggcaggg

SEQ ID NO: 3862689 - RNA, 20 nt, Human
caaaagguuaauaaaguaau

SEQ ID NO: 3862690 - RNA, 15 nt, Human
caaaagguuuauucc

SEQ ID NO: 3862691 - RNA, 14 nt, Human
caaaaguaaugccu

SEQ ID NO: 3862692 - RNA, 15 nt, Human
caaaaguagaacuuu

SEQ ID NO: 3862693 - RNA, 17 nt, Human
caaaaguaucgggggcu

SEQ ID NO: 3862694 - RNA, 13 nt, Human
caaaaguauuuuc

SEQ ID NO: 3862695 - RNA, 20 nt, Human
caaaaguauuuuccuguaaa

SEQ ID NO: 3862696 - RNA, 16 nt, Human
caaaagucugucuuuc

SEQ ID NO: 3862697 - RNA, 19 nt, Human
caaaagucugucuuuccug

SEQ ID NO: 3862698 - RNA, 21 nt, Human
caaaagugccucaagaggaau

SEQ ID NO: 3862699 - RNA, 14 nt, Human
caaaaguggccucu

SEQ ID NO: 3862700 - RNA, 18 nt, Human
caaaaguggccucuuugu

SEQ ID NO: 3862701 - RNA, 12 nt, Human
caaaaguuauua

SEQ ID NO: 3862702 - RNA, 17 nt, Human
caaaaguuuuccugaga

SEQ ID NO: 3862703 - RNA, 23 nt, Human
caaaauaaaaagugacacagcag

SEQ ID NO: 3862704 - RNA, 17 nt, Human
caaaauaaaaaugaggu

SEQ ID NO: 3862705 - RNA, 12 nt, Human
caaaauaaaaca

SEQ ID NO: 3862706 - RNA, 13 nt, Human
caaaauaaaacau

SEQ ID NO: 3862707 - RNA, 12 nt, Human
caaaauaaaacu

SEQ ID NO: 3862708 - RNA, 16 nt, Human
caaaauaaaacuuuuu

SEQ ID NO: 3862709 - RNA, 11 nt, Human
caaaauaaauu

SEQ ID NO: 3862710 - RNA, 14 nt, Human
caaaauaauaaaaa

SEQ ID NO: 3862711 - RNA, 20 nt, Human
caaaauaaugucuuguuaau

SEQ ID NO: 3862712 - RNA, 14 nt, Human
caaaauaauucuaa

SEQ ID NO: 3862713 - RNA, 19 nt, Human
caaaauacaugaugauuuc

SEQ ID NO: 3862714 - RNA, 22 nt, Human
caaaauacaugaugauuucaga

SEQ ID NO: 3862715 - RNA, 11 nt, Human
caaaauacauu

SEQ ID NO: 3862716 - RNA, 23 nt, Human
caaaauacauucuuuuugcucua

SEQ ID NO: 3862717 - RNA, 20 nt, Human
caaaauacuugucuguuuua

SEQ ID NO: 3862718 - RNA, 17 nt, Human
caaaauagaaaaguuau

SEQ ID NO: 3862719 - RNA, 12 nt, Human
caaaauagaaag

SEQ ID NO: 3862720 - RNA, 21 nt, Human
caaaauagaaaguugcaaggc

SEQ ID NO: 3862721 - RNA, 16 nt, Human
caaaauagcauuuguu

SEQ ID NO: 3862722 - RNA, 21 nt, Human
caaaauaggguauauuuuccu

SEQ ID NO: 3862723 - RNA, 14 nt, Human
caaaauauacaaaa

SEQ ID NO: 3862724 - RNA, 22 nt, Human
caaaauauauuuuguuuacaaa

SEQ ID NO: 3862725 - RNA, 14 nt, Human
caaaauauguucuu

SEQ ID NO: 3862726 - RNA, 21 nt, Human
caaaauauuuaaaaaugucuu

SEQ ID NO: 3862727 - RNA, 15 nt, Human
caaaauauuucccau

SEQ ID NO: 3862728 - RNA, 16 nt, Human
caaaauauuuguacau

SEQ ID NO: 3862729 - RNA, 17 nt, Human
caaaaucaagcaagccu

SEQ ID NO: 3862730 - RNA, 16 nt, Human
caaaaucaguuuuccu

SEQ ID NO: 3862731 - RNA, 19 nt, Human
caaaaucauuuuauauguc

SEQ ID NO: 3862732 - RNA, 23 nt, Human
caaaaucauuuuauaugucaaag

SEQ ID NO: 3862733 - RNA, 16 nt, Human
caaaauccaaaaagaa

SEQ ID NO: 3862734 - RNA, 21 nt, Human
caaaaucgaugcagugcuucc

SEQ ID NO: 3862735 - RNA, 19 nt, Human
caaaaucucccauuuugga

SEQ ID NO: 3862736 - RNA, 16 nt, Human
caaaaucucuccacuu

SEQ ID NO: 3862737 - RNA, 21 nt, Human
caaaaucuguagagcagggca

SEQ ID NO: 3862738 - RNA, 13 nt, Human
caaaaucugucca

SEQ ID NO: 3862739 - RNA, 21 nt, Human
caaaaucuguccaaaggaggc

SEQ ID NO: 3862740 - RNA, 16 nt, Human
caaaaugacaucuuuu

SEQ ID NO: 3862741 - RNA, 22 nt, Human
caaaaugacaucuuuuuaaagc

SEQ ID NO: 3862742 - RNA, 22 nt, Human
caaaaugaggaauguauauguu

SEQ ID NO: 3862743 - RNA, 18 nt, Human
caaaaugcucuagugccu

SEQ ID NO: 3862744 - RNA, 22 nt, Human
caaaaugcucuuauuucaucau

SEQ ID NO: 3862745 - RNA, 18 nt, Human
caaaauggaauucauucu

SEQ ID NO: 3862746 - RNA, 15 nt, Human
caaaauggauaaaau

SEQ ID NO: 3862747 - RNA, 23 nt, Human
caaaauggauaaaaucugauaug

SEQ ID NO: 3862748 - RNA, 17 nt, Human
caaaauggauacauaaa

SEQ ID NO: 3862749 - RNA, 15 nt, Human
caaaaugggacuugu

SEQ ID NO: 3862750 - RNA, 14 nt, Human
caaaauguaacugu

SEQ ID NO: 3862751 - RNA, 15 nt, Human
caaaauguaacuguu

SEQ ID NO: 3862752 - RNA, 19 nt, Human
caaaauguaacuguuacca

SEQ ID NO: 3862753 - RNA, 15 nt, Human
caaaauguaggguua

SEQ ID NO: 3862754 - RNA, 12 nt, Human
caaaauguauau

SEQ ID NO: 3862755 - RNA, 15 nt, Human
caaaauguauauauu

SEQ ID NO: 3862756 - RNA, 17 nt, Human
caaaauguauauauuua

SEQ ID NO: 3862757 - RNA, 16 nt, Human
caaaauguaugucugg

SEQ ID NO: 3862758 - RNA, 13 nt, Human
caaaaugucugua

SEQ ID NO: 3862759 - RNA, 16 nt, Human
caaaauguguauuucu

SEQ ID NO: 3862760 - RNA, 16 nt, Human
caaaauuaagcaaaug

SEQ ID NO: 3862761 - RNA, 19 nt, Human
caaaauuaagguguuugaa

SEQ ID NO: 3862762 - RNA, 22 nt, Human
caaaauuacagacugucugaaa

SEQ ID NO: 3862763 - RNA, 20 nt, Human
caaaauuaccaaaaaucuug

SEQ ID NO: 3862764 - RNA, 23 nt, Human
caaaauuagauccuaagaugugu

SEQ ID NO: 3862765 - RNA, 21 nt, Human
caaaauuagccaguaauccug

SEQ ID NO: 3862766 - RNA, 21 nt, Human
caaaauuauagaaguuuagau

SEQ ID NO: 3862767 - RNA, 15 nt, Human
caaaauuauuucaga

SEQ ID NO: 3862768 - RNA, 13 nt, Human
caaaauugacauu

SEQ ID NO: 3862769 - RNA, 16 nt, Human
caaaauugcaaaucuu

SEQ ID NO: 3862770 - RNA, 22 nt, Human
caaaauugcaaaucuugaaauu

SEQ ID NO: 3862771 - RNA, 20 nt, Human
caaaauuguuuugagcuuuc

SEQ ID NO: 3862772 - RNA, 17 nt, Human
caaaauuuaguuuuugu

SEQ ID NO: 3862773 - RNA, 20 nt, Human
caaaauuuaguuuuuguucu

SEQ ID NO: 3862774 - RNA, 17 nt, Human
caaaauuuccaguaccu

SEQ ID NO: 3862775 - RNA, 19 nt, Human
caaaauuuccaguaccuuu

SEQ ID NO: 3862776 - RNA, 20 nt, Human
caaaauuuccaguaccuuug

SEQ ID NO: 3862777 - RNA, 14 nt, Human
caaaauuucuauua

SEQ ID NO: 3862778 - RNA, 14 nt, Human
caaaauuugacuaa

SEQ ID NO: 3862779 - RNA, 13 nt, Human
caaaauuuguuug

SEQ ID NO: 3862780 - RNA, 12 nt, Human
caaaauuuuaaa

SEQ ID NO: 3862781 - RNA, 23 nt, Human
caaaauuuuauaagcaaauuuca

SEQ ID NO: 3862782 - RNA, 13 nt, Human
caaaauuuuauuc

SEQ ID NO: 3862783 - RNA, 23 nt, Human
caaaauuuuucaaccccacccug

SEQ ID NO: 3862784 - RNA, 16 nt, Human
caaaauuuuuucucua

SEQ ID NO: 3862785 - RNA, 16 nt, Human
caaaauuuuuuuaauc

SEQ ID NO: 3862786 - RNA, 21 nt, Human
caaacaaaaagguucucaggu

SEQ ID NO: 3862787 - RNA, 21 nt, Human
caaacaaaagcugaacacauu

SEQ ID NO: 3862788 - RNA, 15 nt, Human
caaacaaaauuucua

SEQ ID NO: 3862789 - RNA, 18 nt, Human
caaacaaaauuucuauua

SEQ ID NO: 3862790 - RNA, 15 nt, Human
caaacaaauaugcaa

SEQ ID NO: 3862791 - RNA, 17 nt, Human
caaacaagaaugucccu

SEQ ID NO: 3862792 - RNA, 13 nt, Human
caaacaauaccug

SEQ ID NO: 3862793 - RNA, 19 nt, Human
caaacaaugacaaagcaga

SEQ ID NO: 3862794 - RNA, 17 nt, Human
caaacaauggaaacuga

SEQ ID NO: 3862795 - RNA, 20 nt, Human
caaacaauggaaacugaaug

SEQ ID NO: 3862796 - RNA, 21 nt, Human
caaacaauggaaacugaaugc

SEQ ID NO: 3862797 - RNA, 14 nt, Human
caaacacaaaugca

SEQ ID NO: 3862798 - RNA, 15 nt, Human
caaacacacagaagg

SEQ ID NO: 3862799 - RNA, 21 nt, Human
caaacacaguuacacuugugc

SEQ ID NO: 3862800 - RNA, 14 nt, Human
caaacacauuguua

SEQ ID NO: 3862801 - RNA, 17 nt, Human
caaacacauuguuauuu

SEQ ID NO: 3862802 - RNA, 15 nt, Human
caaacaccucccagg

SEQ ID NO: 3862803 - RNA, 14 nt, Human
caaacaccugcuga

SEQ ID NO: 3862804 - RNA, 14 nt, Human
caaacaccuuccag

SEQ ID NO: 3862805 - RNA, 21 nt, Human
caaacaccuuccagcuccugu

SEQ ID NO: 3862806 - RNA, 11 nt, Human
caaaguggaac

SEQ ID NO: 3862807 - RNA, 15 nt, Human
caaaguggaacgaaa

SEQ ID NO: 3862808 - RNA, 14 nt, Human
caaaguggaaggaa

SEQ ID NO: 3862809 - RNA, 17 nt, Human
caaaguggaaggaaaga

SEQ ID NO: 3862810 - RNA, 22 nt, Human
caaagugguagguacuuuuugu

SEQ ID NO: 3862811 - RNA, 16 nt, Human
caaaguggugagaggc

SEQ ID NO: 3862812 - RNA, 19 nt, Human
caaaguggugagaggcauc

SEQ ID NO: 3862813 - RNA, 17 nt, Human
caaaguguguauuaaaa

SEQ ID NO: 3862814 - RNA, 18 nt, Human
caaaguguuuucucugaa

SEQ ID NO: 3862815 - RNA, 17 nt, Human
caaaguuagagaacuaa

SEQ ID NO: 3862816 - RNA, 24 nt, Human
caaaguuagagaacuaaacuaguu

SEQ ID NO: 3862817 - RNA, 18 nt, Human
caaaguugccuaaaucca

SEQ ID NO: 3862818 - RNA, 17 nt, Human
caaaguuggggcaggcu

SEQ ID NO: 3862819 - RNA, 13 nt, Human
caaaguuuaauaa

SEQ ID NO: 3862820 - RNA, 14 nt, Human
caaaguuuugaaaa

SEQ ID NO: 3862821 - RNA, 17 nt, Human
caaaguuuugaaaagcu

SEQ ID NO: 3862822 - RNA, 18 nt, Human
caaaguuuugaaaagcua

SEQ ID NO: 3862823 - RNA, 21 nt, Human
caaaguuuugaaaagcuauua

SEQ ID NO: 3862824 - RNA, 19 nt, Human
caaauaaaaacuaaauugu

SEQ ID NO: 3862825 - RNA, 21 nt, Human
caaauaaaaacuaaauuguaa

SEQ ID NO: 3862826 - RNA, 17 nt, Human
caaauaaaaagugcuuu

SEQ ID NO: 3862827 - RNA, 11 nt, Human
caaauaaacac

SEQ ID NO: 3862828 - RNA, 13 nt, Human
caaauaaacacug

SEQ ID NO: 3862829 - RNA, 17 nt, Human
caaauaaagucccaggu

SEQ ID NO: 3862830 - RNA, 14 nt, Human
caaauaacaacuuu

SEQ ID NO: 3862831 - RNA, 17 nt, Human
caaauaacuucaguccu

SEQ ID NO: 3862832 - RNA, 14 nt, Human
caaauaagaaauaa

SEQ ID NO: 3862833 - RNA, 16 nt, Human
caaauaaguauuuaua

SEQ ID NO: 3862834 - RNA, 17 nt, Human
caaauaaguauuuauaa

SEQ ID NO: 3862835 - RNA, 18 nt, Human
caaauaauaccuuagaag

SEQ ID NO: 3862836 - RNA, 19 nt, Human
caaauaauaccuuagaagg

SEQ ID NO: 3862837 - RNA, 22 nt, Human
caaauaauauguuuccuucccu

SEQ ID NO: 3862838 - RNA, 20 nt, Human
caaauaaugucucugugaga

SEQ ID NO: 3862839 - RNA, 16 nt, Human
caaauaauuuuagugu

SEQ ID NO: 3862840 - RNA, 13 nt, Human
caaauacacauuu

SEQ ID NO: 3862841 - RNA, 14 nt, Human
caaauacacauuug

SEQ ID NO: 3862842 - RNA, 16 nt, Human
caaauacacauuugcu

SEQ ID NO: 3862843 - RNA, 17 nt, Human
caaauacacauuugcua

SEQ ID NO: 3862844 - RNA, 13 nt, Human
caaauacauuuua

SEQ ID NO: 3862845 - RNA, 20 nt, Human
caaauacgugggcauucaaa

SEQ ID NO: 3862846 - RNA, 21 nt, Human
caaauacgugggcauucaaau

SEQ ID NO: 3862847 - RNA, 15 nt, Human
caaauacuaaaaaga

SEQ ID NO: 3862848 - RNA, 17 nt, Human
caaauacucauguguau

SEQ ID NO: 3862849 - RNA, 14 nt, Human
caaauacucuuagg

SEQ ID NO: 3862850 - RNA, 15 nt, Human
caaauacuuauucau

SEQ ID NO: 3862851 - RNA, 17 nt, Human
caaauacuuauucauug

SEQ ID NO: 3862852 - RNA, 20 nt, Human
caaauacuuuaauguauaaa

SEQ ID NO: 3862853 - RNA, 13 nt, Human
caaauagaaaaca

SEQ ID NO: 3862854 - RNA, 17 nt, Human
caaauagaaaacaggaa

SEQ ID NO: 3862855 - RNA, 15 nt, Human
caaauagcacuugac

SEQ ID NO: 3862856 - RNA, 15 nt, Human
caaauagcauaaguu

SEQ ID NO: 3862857 - RNA, 18 nt, Human
caaauaggaugcuuggga

SEQ ID NO: 3862858 - RNA, 17 nt, Human
caaauaggcuauuaaaa

SEQ ID NO: 3862859 - RNA, 23 nt, Human
caaauaggcuauuaaaaaagucu

SEQ ID NO: 3862860 - RNA, 23 nt, Human
caaauaguaggcaagauggcaca

SEQ ID NO: 3862861 - RNA, 15 nt, Human
caaauagugcucgcu

SEQ ID NO: 3862862 - RNA, 12 nt, Human
caaauaguguga

SEQ ID NO: 3862863 - RNA, 15 nt, Human
caaauagugugaaau

SEQ ID NO: 3862864 - RNA, 19 nt, Human
caaauaguugcauagcagu

SEQ ID NO: 3862865 - RNA, 18 nt, Human
caaauauaagaauaaaau

SEQ ID NO: 3862866 - RNA, 15 nt, Human
caaauauaagauuuu

SEQ ID NO: 3862867 - RNA, 18 nt, Human
caaauauaagauuuucug

SEQ ID NO: 3862868 - RNA, 15 nt, Human
caaauauauucucuu

SEQ ID NO: 3862869 - RNA, 11 nt, Human
caaauauauug

SEQ ID NO: 3862870 - RNA, 14 nt, Human
caaauauauuguua

SEQ ID NO: 3862871 - RNA, 12 nt, Human
caaauaugcaaa

SEQ ID NO: 3862872 - RNA, 16 nt, Human
caaauaugcaaagcac

SEQ ID NO: 3862873 - RNA, 17 nt, Human
caaauaugcaaagcacu

SEQ ID NO: 3862874 - RNA, 23 nt, Human
caaauauuagaugugauuuaaua

SEQ ID NO: 3862875 - RNA, 16 nt, Human
caaauauugguguugu

SEQ ID NO: 3862876 - RNA, 23 nt, Human
caaauauuguugacaacugugac

SEQ ID NO: 3862877 - RNA, 13 nt, Human
caaauauuuggag

SEQ ID NO: 3862878 - RNA, 13 nt, Human
caaaucaaagcag

SEQ ID NO: 3862879 - RNA, 14 nt, Human
caaaucaaagcaga

SEQ ID NO: 3862880 - RNA, 19 nt, Human
caaaucaacagaagcauuu

SEQ ID NO: 3862881 - RNA, 21 nt, Human
caaaucaacagaagcauuugu

SEQ ID NO: 3862882 - RNA, 20 nt, Human
caaaucaaucuguaaaacua

SEQ ID NO: 3862883 - RNA, 16 nt, Human
caaaucaauucuaguc

SEQ ID NO: 3862884 - RNA, 19 nt, Human
caaaucacauauuuuaaaa

SEQ ID NO: 3862885 - RNA, 14 nt, Human
caaaucaccacaaa

SEQ ID NO: 3862886 - RNA, 15 nt, Human
caaaucaccacaaac

SEQ ID NO: 3862887 - RNA, 13 nt, Human
caaaucagccaug

SEQ ID NO: 3862888 - RNA, 16 nt, Human
caaaucaggcuuuugu

SEQ ID NO: 3862889 - RNA, 22 nt, Human
caaaucaguuacuaagaagaaa

SEQ ID NO: 3862890 - RNA, 14 nt, Human
caaauccaggaccc

SEQ ID NO: 3862891 - RNA, 21 nt, Human
caaauccaggacccugccagg

SEQ ID NO: 3862892 - RNA, 15 nt, Human
caaauccgaaaucag

SEQ ID NO: 3862893 - RNA, 16 nt, Human
caaauccgaaccuccu

SEQ ID NO: 3862894 - RNA, 16 nt, Human
caaauccgcucucuuc

SEQ ID NO: 3862895 - RNA, 13 nt, Human
caaauccuaugug

SEQ ID NO: 3862896 - RNA, 18 nt, Human
caaauccuaugugauuuu

SEQ ID NO: 3862897 - RNA, 23 nt, Human
caaauccuaugugauuuuaacuc

SEQ ID NO: 3862898 - RNA, 13 nt, Human
caaauccucucca

SEQ ID NO: 3862899 - RNA, 18 nt, Human
caaauccugcauuuagau

SEQ ID NO: 3862900 - RNA, 14 nt, Human
caaaucgaaugaaa

SEQ ID NO: 3862901 - RNA, 19 nt, Human
caaaucguccagcgaccuu

SEQ ID NO: 3862902 - RNA, 23 nt, Human
caaaucuaagggaaaaagccuug

SEQ ID NO: 3862903 - RNA, 20 nt, Human
caaaucuauucagacaagca

SEQ ID NO: 3862904 - RNA, 13 nt, Human
caaaucugucugc

SEQ ID NO: 3862905 - RNA, 14 nt, Human
caaaucugucugcu

SEQ ID NO: 3862906 - RNA, 17 nt, Human
caaaucuguguauauua

SEQ ID NO: 3862907 - RNA, 13 nt, Human
caaaucuuccugg

SEQ ID NO: 3862908 - RNA, 21 nt, Human
caaaucuuggcaauauuccuu

SEQ ID NO: 3862909 - RNA, 22 nt, Human
caaaucuuggcaauauuccuua

SEQ ID NO: 3862910 - RNA, 19 nt, Human
caaaugaaauauauuuaaa

SEQ ID NO: 3862911 - RNA, 20 nt, Human
caaaugaaauauauuuaaaa

SEQ ID NO: 3862912 - RNA, 18 nt, Human
caaaugaauaaugccuuu

SEQ ID NO: 3862913 - RNA, 19 nt, Human
caaaugaaugaccuuguug

SEQ ID NO: 3862914 - RNA, 10 nt, Human
caaaugaauu

SEQ ID NO: 3862915 - RNA, 10 nt, Human
caaaugacau

SEQ ID NO: 3862916 - RNA, 19 nt, Human
caaaugacaugcacugacc

SEQ ID NO: 3862917 - RNA, 20 nt, Human
caaaugacaugcacugaccc

SEQ ID NO: 3862918 - RNA, 16 nt, Human
caaaugacuuuauuau

SEQ ID NO: 3862919 - RNA, 17 nt, Human
caaaugacuuuauuauu

SEQ ID NO: 3862920 - RNA, 17 nt, Human
caaaugagacagcaguc

SEQ ID NO: 3862921 - RNA, 12 nt, Human
caaaugagccau

SEQ ID NO: 3862922 - RNA, 21 nt, Human
caaaugagcucugaaaucuuc

SEQ ID NO: 3862923 - RNA, 18 nt, Human
caaaugaguaacauuugc

SEQ ID NO: 3862924 - RNA, 19 nt, Human
caaaugaguaacauuugcu

SEQ ID NO: 3862925 - RNA, 14 nt, Human
caaaugauugcuuu

SEQ ID NO: 3862926 - RNA, 15 nt, Human
caaaugauugcuuuu

SEQ ID NO: 3862927 - RNA, 20 nt, Human
caaaugcagggauugcugcc

SEQ ID NO: 3862928 - RNA, 16 nt, Human
caaaugcaguauauuu

SEQ ID NO: 3862929 - RNA, 16 nt, Human
caaaugcaucuuugau

SEQ ID NO: 3862930 - RNA, 17 nt, Human
caaaugcaucuuugaug

SEQ ID NO: 3862931 - RNA, 21 nt, Human
caaaugcaucuuugauguguu

SEQ ID NO: 3862932 - RNA, 17 nt, Human
caaaugcaugaacaagu

SEQ ID NO: 3862933 - RNA, 18 nt, Human
caaaugcccaagggaaag

SEQ ID NO: 3862934 - RNA, 21 nt, Human
caaaugcuaaugucaaacuug

SEQ ID NO: 3862935 - RNA, 13 nt, Human
caaaugcuauuaa

SEQ ID NO: 3862936 - RNA, 19 nt, Human
caaaugcugcgcccuuccc

SEQ ID NO: 3862937 - RNA, 14 nt, Human
caaauggaaacaga

SEQ ID NO: 3862938 - RNA, 20 nt, Human
caaauggaaacagaggacca

SEQ ID NO: 3862939 - RNA, 21 nt, Human
caaauggaaacagaggaccag

SEQ ID NO: 3862940 - RNA, 13 nt, Human
caaauggaaagga

SEQ ID NO: 3862941 - RNA, 22 nt, Human
caaauggaaaguaacucauuug

SEQ ID NO: 3862942 - RNA, 21 nt, Human
caaauggaaaugggcagagca

SEQ ID NO: 3862943 - RNA, 19 nt, Human
caaauggaagacacauuga

SEQ ID NO: 3862944 - RNA, 19 nt, Human
caaauggagaagcugcagg

SEQ ID NO: 3862945 - RNA, 18 nt, Human
caaauggaguuggaguuc

SEQ ID NO: 3862946 - RNA, 22 nt, Human
caaauggcgucuggaaguccaa

SEQ ID NO: 3862947 - RNA, 21 nt, Human
caaaugggcgccccccccucc

SEQ ID NO: 3862948 - RNA, 17 nt, Human
caaauggggccagaucc

SEQ ID NO: 3862949 - RNA, 19 nt, Human
caaauggggccagauccag

SEQ ID NO: 3862950 - RNA, 13 nt, Human
caaaugguaggca

SEQ ID NO: 3862951 - RNA, 15 nt, Human
caaaugguaggcauu

SEQ ID NO: 3862952 - RNA, 17 nt, Human
cacaaagacccuggcuu

SEQ ID NO: 3862953 - RNA, 20 nt, Human
cacaaagacccuggcuuuca

SEQ ID NO: 3862954 - RNA, 12 nt, Human
cacaaagagagu

SEQ ID NO: 3862955 - RNA, 22 nt, Human
cacaaagagaguuaaucaacug

SEQ ID NO: 3862956 - RNA, 22 nt, Human
cacaaagaugggugaaggcugg

SEQ ID NO: 3862957 - RNA, 12 nt, Human
cacaaagcccaa

SEQ ID NO: 3862958 - RNA, 20 nt, Human
cacaaagccuuaucaagugu

SEQ ID NO: 3862959 - RNA, 17 nt, Human
cacaaaggccaaacugc

SEQ ID NO: 3862960 - RNA, 21 nt, Human
cacaaaggccaaacugcugga

SEQ ID NO: 3862961 - RNA, 16 nt, Human
cacaaagggcccagau

SEQ ID NO: 3862962 - RNA, 22 nt, Human
cacaaaggggaucauaaaguua

SEQ ID NO: 3862963 - RNA, 10 nt, Human
cacaaauaaa

SEQ ID NO: 3862964 - RNA, 12 nt, Human
cacaaauaaaau

SEQ ID NO: 3862965 - RNA, 13 nt, Human
cacaaauaacaag

SEQ ID NO: 3862966 - RNA, 13 nt, Human
cacaaauauuaaa

SEQ ID NO: 3862967 - RNA, 20 nt, Human
cacaaauauuaaaaagucuu

SEQ ID NO: 3862968 - RNA, 14 nt, Human
cacaaauauuauuu

SEQ ID NO: 3862969 - RNA, 23 nt, Human
cacaaauauuuauuuucuuucug

SEQ ID NO: 3862970 - RNA, 15 nt, Human
cacaaaugcucaaag

SEQ ID NO: 3862971 - RNA, 13 nt, Human
cacaaauuaguua

SEQ ID NO: 3862972 - RNA, 15 nt, Human
cacaaauuaucuuaa

SEQ ID NO: 3862973 - RNA, 11 nt, Human
cacaacaaaaa

SEQ ID NO: 3862974 - RNA, 15 nt, Human
cacaacauuugcaga

SEQ ID NO: 3862975 - RNA, 16 nt, Human
cacaaccagccaggca

SEQ ID NO: 3862976 - RNA, 23 nt, Human
cacaaccaucugucccugccuca

SEQ ID NO: 3862977 - RNA, 14 nt, Human
cacaacgugcauug

SEQ ID NO: 3862978 - RNA, 13 nt, Human
cacaacuauauug

SEQ ID NO: 3862979 - RNA, 19 nt, Human
cacaacuauuuuuccaaaa

SEQ ID NO: 3862980 - RNA, 17 nt, Human
cacaacugacacaggaa

SEQ ID NO: 3862981 - RNA, 23 nt, Human
cacaacugcaauaacuucugacc

SEQ ID NO: 3862982 - RNA, 22 nt, Human
cacaacugugugauuaaaaggu

SEQ ID NO: 3862983 - RNA, 20 nt, Human
cacaacuuguuuuugguuuu

SEQ ID NO: 3862984 - RNA, 21 nt, Human
cacaagaaaugaaagcaggga

SEQ ID NO: 3862985 - RNA, 20 nt, Human
cacaagagcccagcagggcc

SEQ ID NO: 3862986 - RNA, 16 nt, Human
cacaagagcccaggcc

SEQ ID NO: 3862987 - RNA, 17 nt, Human
cacaagagcccaggccu

SEQ ID NO: 3862988 - RNA, 18 nt, Human
cacaagagcccaggccuc

SEQ ID NO: 3862989 - RNA, 14 nt, Human
cacaagauucccag

SEQ ID NO: 3862990 - RNA, 12 nt, Human
cacaagccaggg

SEQ ID NO: 3862991 - RNA, 15 nt, Human
cacaagccucugccc

SEQ ID NO: 3862992 - RNA, 12 nt, Human
cacaagccugag

SEQ ID NO: 3862993 - RNA, 15 nt, Human
cacaagccugaggga

SEQ ID NO: 3862994 - RNA, 14 nt, Human
cacaagcuccaagc

SEQ ID NO: 3862995 - RNA, 18 nt, Human
cacaagcuccaagcuccc

SEQ ID NO: 3862996 - RNA, 23 nt, Human
cacaagcugcacccucaggcagg

SEQ ID NO: 3862997 - RNA, 22 nt, Human
cacaagcugccucccuguccac

SEQ ID NO: 3862998 - RNA, 12 nt, Human
cacaagcuggaa

SEQ ID NO: 3862999 - RNA, 14 nt, Human
cacaagcuggaagc

SEQ ID NO: 3863000 - RNA, 15 nt, Human
cacaagcuggaagca

SEQ ID NO: 3863001 - RNA, 17 nt, Human
cacaaggaaauaaaauu

SEQ ID NO: 3863002 - RNA, 15 nt, Human
cacaaggaagaaauu

SEQ ID NO: 3863003 - RNA, 18 nt, Human
cacaaggauagaugcugg

SEQ ID NO: 3863004 - RNA, 21 nt, Human
cacaaggauagaugcuggccc

SEQ ID NO: 3863005 - RNA, 16 nt, Human
cacaaggauugaaaau

SEQ ID NO: 3863006 - RNA, 18 nt, Human
cacaaggcagcaaggccc

SEQ ID NO: 3863007 - RNA, 14 nt, Human
cacaaggcugacca

SEQ ID NO: 3863008 - RNA, 12 nt, Human
cacaagggcucu

SEQ ID NO: 3863009 - RNA, 17 nt, Human
cacaaggggcccuugga

SEQ ID NO: 3863010 - RNA, 17 nt, Human
cacaaggugcaaaucaa

SEQ ID NO: 3863011 - RNA, 20 nt, Human
cacaaggugcaaaucaaugc

SEQ ID NO: 3863012 - RNA, 23 nt, Human
cacaaguaagagacucagccugc

SEQ ID NO: 3863013 - RNA, 13 nt, Human
cacaagucuucca

SEQ ID NO: 3863014 - RNA, 14 nt, Human
cacaagucuuccag

SEQ ID NO: 3863015 - RNA, 22 nt, Human
cacaagugccacugcccgagcu

SEQ ID NO: 3863016 - RNA, 19 nt, Human
cacaagugccgcaaauugu

SEQ ID NO: 3863017 - RNA, 21 nt, Human
cacaagugccgcaaauuguac

SEQ ID NO: 3863018 - RNA, 19 nt, Human
cacaagugcucaucuguug

SEQ ID NO: 3863019 - RNA, 17 nt, Human
cacaaguguaaugaaua

SEQ ID NO: 3863020 - RNA, 17 nt, Human
cacaaguuaagauucuu

SEQ ID NO: 3863021 - RNA, 19 nt, Human
cacaaguuaagauucuugg

SEQ ID NO: 3863022 - RNA, 18 nt, Human
cacaauaaaaauguuuaa

SEQ ID NO: 3863023 - RNA, 19 nt, Human
cacaauaaauguauucaaa

SEQ ID NO: 3863024 - RNA, 13 nt, Human
cacaauacaauaa

SEQ ID NO: 3863025 - RNA, 19 nt, Human
cacaauacagauaacauua

SEQ ID NO: 3863026 - RNA, 12 nt, Human
cacaauaugaau

SEQ ID NO: 3863027 - RNA, 15 nt, Human
cacaauauugaacuu

SEQ ID NO: 3863028 - RNA, 15 nt, Human
cacaaucccuuucua

SEQ ID NO: 3863029 - RNA, 19 nt, Human
cacaaucucggcucacugc

SEQ ID NO: 3863030 - RNA, 20 nt, Human
cacaaucuuaaggggcagcu

SEQ ID NO: 3863031 - RNA, 14 nt, Human
cacaaugucuuggu

SEQ ID NO: 3863032 - RNA, 22 nt, Human
cacaauugaauuaguuuuuucu

SEQ ID NO: 3863033 - RNA, 15 nt, Human
cacacaaaaaaagac

SEQ ID NO: 3863034 - RNA, 19 nt, Human
cacacaaaaaaagaccugu

SEQ ID NO: 3863035 - RNA, 23 nt, Human
cacacaaaagggaacccagcucu

SEQ ID NO: 3863036 - RNA, 15 nt, Human
cacacaaacaaggcc

SEQ ID NO: 3863037 - RNA, 17 nt, Human
cacacaaagagaguuaa

SEQ ID NO: 3863038 - RNA, 13 nt, Human
cacacaaagguau

SEQ ID NO: 3863039 - RNA, 15 nt, Human
cacacaacagccaac

SEQ ID NO: 3863040 - RNA, 16 nt, Human
cacacaagaagaaggg

SEQ ID NO: 3863041 - RNA, 17 nt, Human
cacacacaaaaaaagac

SEQ ID NO: 3863042 - RNA, 19 nt, Human
cacacacaaaagggaaccc

SEQ ID NO: 3863043 - RNA, 15 nt, Human
cacacacaaaauaaa

SEQ ID NO: 3863044 - RNA, 13 nt, Human
cacacacaaagag

SEQ ID NO: 3863045 - RNA, 14 nt, Human
cacacacaaagaga

SEQ ID NO: 3863046 - RNA, 20 nt, Human
cacacacaacagccaacagc

SEQ ID NO: 3863047 - RNA, 10 nt, Human
cacacacaca

SEQ ID NO: 3863048 - RNA, 14 nt, Human
cacacacacacaag

SEQ ID NO: 3863049 - RNA, 13 nt, Human
cacacacacacac

SEQ ID NO: 3863050 - RNA, 16 nt, Human
cacacacacacacaca

SEQ ID NO: 3863051 - RNA, 15 nt, Human
cacacacacacacau

SEQ ID NO: 3863052 - RNA, 16 nt, Human
cacacacacacacaug

SEQ ID NO: 3863053 - RNA, 15 nt, Human
cacacacacacagcc

SEQ ID NO: 3863054 - RNA, 14 nt, Human
cacacacacacagg

SEQ ID NO: 3863055 - RNA, 15 nt, Human
cacacacacacaugc

SEQ ID NO: 3863056 - RNA, 12 nt, Human
cacacacacaga

SEQ ID NO: 3863057 - RNA, 13 nt, Human
cacacacacagaa

SEQ ID NO: 3863058 - RNA, 14 nt, Human
cacacacacagaaa

SEQ ID NO: 3863059 - RNA, 15 nt, Human
cacacacacagccac

SEQ ID NO: 3863060 - RNA, 13 nt, Human
cacacacacagga

SEQ ID NO: 3863061 - RNA, 12 nt, Human
cacacacacauc

SEQ ID NO: 3863062 - RNA, 19 nt, Human
cacacacagaaaauauacu

SEQ ID NO: 3863063 - RNA, 21 nt, Human
cacacacagaaaauauacugu

SEQ ID NO: 3863064 - RNA, 11 nt, Human
cacacacagcc

SEQ ID NO: 3863065 - RNA, 16 nt, Human
cacacacagccacaca

SEQ ID NO: 3863066 - RNA, 15 nt, Human
cacacacaggagcau

SEQ ID NO: 3863067 - RNA, 13 nt, Human
cacacacaggcaa

SEQ ID NO: 3863068 - RNA, 21 nt, Human
cacacacaggcaacugaggca

SEQ ID NO: 3863069 - RNA, 12 nt, Human
cacacacauaca

SEQ ID NO: 3863070 - RNA, 13 nt, Human
cacacacauagau

SEQ ID NO: 3863071 - RNA, 12 nt, Human
cacacacaugca

SEQ ID NO: 3863072 - RNA, 16 nt, Human
cacacacaugcauaca

SEQ ID NO: 3863073 - RNA, 18 nt, Human
cacacacaugcuaggaug

SEQ ID NO: 3863074 - RNA, 22 nt, Human
cacacacauugcugugaacagg

SEQ ID NO: 3863075 - RNA, 16 nt, Human
cacacaccagagccca

SEQ ID NO: 3863076 - RNA, 20 nt, Human
cacacaccagagcccaccuu

SEQ ID NO: 3863077 - RNA, 14 nt, Human
cacacacgcacaua

SEQ ID NO: 3863078 - RNA, 14 nt, Human
cacacacgcacgca

SEQ ID NO: 3863079 - RNA, 17 nt, Human
cacacacgcgugcacac

SEQ ID NO: 3863080 - RNA, 19 nt, Human
cacacacgcuuucuuaugc

SEQ ID NO: 3863081 - RNA, 20 nt, Human
cacacacucgcccgcccacu

SEQ ID NO: 3863082 - RNA, 23 nt, Human
cacacacugugcuuucuauugua

SEQ ID NO: 3863083 - RNA, 13 nt, Human
cacacagaaaaua

SEQ ID NO: 3863084 - RNA, 14 nt, Human
cacacagaaaauau

SEQ ID NO: 3863085 - RNA, 16 nt, Human
cacacagaaaauauac

SEQ ID NO: 3863086 - RNA, 21 nt, Human
cacacagaaaauauacuguaa

SEQ ID NO: 3863087 - RNA, 15 nt, Human
cacacagaaacucuu

SEQ ID NO: 3863088 - RNA, 14 nt, Human
cacacagaaauaua

SEQ ID NO: 3863089 - RNA, 16 nt, Human
cacacagaaauauaua

SEQ ID NO: 3863090 - RNA, 15 nt, Human
cacacagacuauuuu

SEQ ID NO: 3863091 - RNA, 21 nt, Human
cacacagaggcugccucuccc

SEQ ID NO: 3863092 - RNA, 11 nt, Human
cacacagccac

SEQ ID NO: 3863093 - RNA, 15 nt, Human
cacacagccacacac

SEQ ID NO: 3863094 - RNA, 19 nt, Human
cacacagccacacacacag

SEQ ID NO: 3863095 - RNA, 15 nt, Human
cacacagccaggugc

SEQ ID NO: 3863096 - RNA, 19 nt, Human
cacacagccaggugccuug

SEQ ID NO: 3863097 - RNA, 12 nt, Human
cacacagcucug

SEQ ID NO: 3863098 - RNA, 15 nt, Human
cacacagcucugucc

SEQ ID NO: 3863099 - RNA, 22 nt, Human
cacagcuguucuucuguucugc

SEQ ID NO: 3863100 - RNA, 15 nt, Human
cacagcuuagauuuc

SEQ ID NO: 3863101 - RNA, 17 nt, Human
cacagcuucagccagga

SEQ ID NO: 3863102 - RNA, 22 nt, Human
cacagcuucagccaggagcugg

SEQ ID NO: 3863103 - RNA, 21 nt, Human
cacagcuucauuuccuguguc

SEQ ID NO: 3863104 - RNA, 14 nt, Human
cacagcuuccccuc

SEQ ID NO: 3863105 - RNA, 22 nt, Human
cacagcuuccccucucuccucc

SEQ ID NO: 3863106 - RNA, 15 nt, Human
cacagcuuccugucc

SEQ ID NO: 3863107 - RNA, 20 nt, Human
cacagcuuuaucaccagaga

SEQ ID NO: 3863108 - RNA, 16 nt, Human
cacaggaaaagaauuu

SEQ ID NO: 3863109 - RNA, 12 nt, Human
cacaggaaaagg

SEQ ID NO: 3863110 - RNA, 19 nt, Human
cacaggacagggguuccuu

SEQ ID NO: 3863111 - RNA, 23 nt, Human
cacaggacaugcgguagccagca

SEQ ID NO: 3863112 - RNA, 16 nt, Human
cacaggacccccuucc

SEQ ID NO: 3863113 - RNA, 17 nt, Human
cacaggacccccuuccc

SEQ ID NO: 3863114 - RNA, 21 nt, Human
cacaggacugauucugggaug

SEQ ID NO: 3863115 - RNA, 15 nt, Human
cacaggaggcaagca

SEQ ID NO: 3863116 - RNA, 20 nt, Human
cacaggaggcaagcaagcuc

SEQ ID NO: 3863117 - RNA, 21 nt, Human
cacaggaggcaggcauggccc

SEQ ID NO: 3863118 - RNA, 18 nt, Human
cacaggagugggaaaaca

SEQ ID NO: 3863119 - RNA, 20 nt, Human
cacaggaguguccucuuccc

SEQ ID NO: 3863120 - RNA, 14 nt, Human
cacaggauagauaa

SEQ ID NO: 3863121 - RNA, 15 nt, Human
cacaggaucagucug

SEQ ID NO: 3863122 - RNA, 16 nt, Human
cacaggaucagucuga

SEQ ID NO: 3863123 - RNA, 17 nt, Human
cacaggaucagucugau

SEQ ID NO: 3863124 - RNA, 24 nt, Human
cacaggauccuauucucaccagga

SEQ ID NO: 3863125 - RNA, 23 nt, Human
cacaggaugaggugguggagugg

SEQ ID NO: 3863126 - RNA, 16 nt, Human
cacaggaugcuguguu

SEQ ID NO: 3863127 - RNA, 16 nt, Human
cacaggcaaaauccuu

SEQ ID NO: 3863128 - RNA, 13 nt, Human
cacaggcaacuga

SEQ ID NO: 3863129 - RNA, 19 nt, Human
cacaggcaacugaggcaga

SEQ ID NO: 3863130 - RNA, 10 nt, Human
cacaggcagc

SEQ ID NO: 3863131 - RNA, 15 nt, Human
cacaggcagcauuua

SEQ ID NO: 3863132 - RNA, 11 nt, Human
cacaggcagcc

SEQ ID NO: 3863133 - RNA, 15 nt, Human
cacaggcagccagug

SEQ ID NO: 3863134 - RNA, 16 nt, Human
cacaggcagcuggaug

SEQ ID NO: 3863135 - RNA, 18 nt, Human
cacaggcagggcaggacc

SEQ ID NO: 3863136 - RNA, 15 nt, Human
cacaggcauuuccug

SEQ ID NO: 3863137 - RNA, 23 nt, Human
cacaggcauuuccuggguggcua

SEQ ID NO: 3863138 - RNA, 18 nt, Human
cacaggccacccugugca

SEQ ID NO: 3863139 - RNA, 13 nt, Human
cacaggcccccuu

SEQ ID NO: 3863140 - RNA, 18 nt, Human
cacaggcccggcuccagg

SEQ ID NO: 3863141 - RNA, 23 nt, Human
cacaggcccggcuccaggcuccu

SEQ ID NO: 3863142 - RNA, 13 nt, Human
cacaggcccuccc

SEQ ID NO: 3863143 - RNA, 16 nt, Human
cacaggcccuuccucu

SEQ ID NO: 3863144 - RNA, 17 nt, Human
cacaggcccuuccucuc

SEQ ID NO: 3863145 - RNA, 21 nt, Human
cacaggcccuuccucuccacu

SEQ ID NO: 3863146 - RNA, 22 nt, Human
cacaggcccuuccucuccacug

SEQ ID NO: 3863147 - RNA, 21 nt, Human
cacaggccuguguagcuguga

SEQ ID NO: 3863148 - RNA, 22 nt, Human
cacaggcugggcugggcacugc

SEQ ID NO: 3863149 - RNA, 19 nt, Human
cacagggaagagcuccccu

SEQ ID NO: 3863150 - RNA, 16 nt, Human
cacagggacuugaagu

SEQ ID NO: 3863151 - RNA, 15 nt, Human
cacagggauccgacu

SEQ ID NO: 3863152 - RNA, 20 nt, Human
cacagggauucucacaauag

SEQ ID NO: 3863153 - RNA, 22 nt, Human
cacagggcagcugggcccaacc

SEQ ID NO: 3863154 - RNA, 21 nt, Human
cacagggcaguaccugagggu

SEQ ID NO: 3863155 - RNA, 14 nt, Human
cacagggccccaga

SEQ ID NO: 3863156 - RNA, 22 nt, Human
cacagggccccagaaggcaggg

SEQ ID NO: 3863157 - RNA, 15 nt, Human
cacagggccuggccc

SEQ ID NO: 3863158 - RNA, 16 nt, Human
cacagggccuggccca

SEQ ID NO: 3863159 - RNA, 18 nt, Human
cacagggccuggcccaug

SEQ ID NO: 3863160 - RNA, 13 nt, Human
cacagggcgagac

SEQ ID NO: 3863161 - RNA, 17 nt, Human
cacagggucccacagcc

SEQ ID NO: 3863162 - RNA, 19 nt, Human
cacagggucugcucuuucu

SEQ ID NO: 3863163 - RNA, 23 nt, Human
cacagggucugcucuuucucugc

SEQ ID NO: 3863164 - RNA, 16 nt, Human
cacaggguugggccca

SEQ ID NO: 3863165 - RNA, 13 nt, Human
cacaggucaggcu

SEQ ID NO: 3863166 - RNA, 14 nt, Human
cacaggucccaaau

SEQ ID NO: 3863167 - RNA, 22 nt, Human
cacaggucccaccuccagcccg

SEQ ID NO: 3863168 - RNA, 18 nt, Human
cacagguggugucacugu

SEQ ID NO: 3863169 - RNA, 13 nt, Human
cacaggugucagc

SEQ ID NO: 3863170 - RNA, 16 nt, Human
cacaggugucagccau

SEQ ID NO: 3863171 - RNA, 21 nt, Human
cacagguguccccagcccacu

SEQ ID NO: 3863172 - RNA, 19 nt, Human
cacagguucaugccaccau

SEQ ID NO: 3863173 - RNA, 15 nt, Human
cacagguuggaagag

SEQ ID NO: 3863174 - RNA, 16 nt, Human
cacagguuggaagaga

SEQ ID NO: 3863175 - RNA, 18 nt, Human
cacagguuggaagagaau

SEQ ID NO: 3863176 - RNA, 20 nt, Human
cacagguuggaagagaauca

SEQ ID NO: 3863177 - RNA, 13 nt, Human
cacaguagaacug

SEQ ID NO: 3863178 - RNA, 14 nt, Human
cacaguagagccag

SEQ ID NO: 3863179 - RNA, 15 nt, Human
cacaguagagccagc

SEQ ID NO: 3863180 - RNA, 13 nt, Human
cacaguauauuuu

SEQ ID NO: 3863181 - RNA, 20 nt, Human
cacaguauuacuucugcuac

SEQ ID NO: 3863182 - RNA, 15 nt, Human
cacaguauugcucac

SEQ ID NO: 3863183 - RNA, 19 nt, Human
cacaguauugcucacccag

SEQ ID NO: 3863184 - RNA, 21 nt, Human
cacaguccuuaccagcagagc

SEQ ID NO: 3863185 - RNA, 14 nt, Human
cacagucuccccca

SEQ ID NO: 3863186 - RNA, 15 nt, Human
cacagugaagcaaau

SEQ ID NO: 3863187 - RNA, 17 nt, Human
cacagugaaggcugucc

SEQ ID NO: 3863188 - RNA, 15 nt, Human
cacagugaagugcug

SEQ ID NO: 3863189 - RNA, 16 nt, Human
cacagugacccuuccc

SEQ ID NO: 3863190 - RNA, 18 nt, Human
cacagugagucgaggaca

SEQ ID NO: 3863191 - RNA, 20 nt, Human
cacagugagucgaggacagg

SEQ ID NO: 3863192 - RNA, 11 nt, Human
cacagugauuu

SEQ ID NO: 3863193 - RNA, 14 nt, Human
cacagugcaucuca

SEQ ID NO: 3863194 - RNA, 18 nt, Human
cacagugcaucucagccc

SEQ ID NO: 3863195 - RNA, 17 nt, Human
cacagugccuucaauaa

SEQ ID NO: 3863196 - RNA, 14 nt, Human
cacagugggaacuc

SEQ ID NO: 3863197 - RNA, 15 nt, Human
cacagugguggcagg

SEQ ID NO: 3863198 - RNA, 23 nt, Human
cacagugguggcagggccuagcu

SEQ ID NO: 3863199 - RNA, 21 nt, Human
cacaguguaccauuaaaauau

SEQ ID NO: 3863200 - RNA, 20 nt, Human
cacagugucugggcugacug

SEQ ID NO: 3863201 - RNA, 21 nt, Human
cacagugucugggcugacugg

SEQ ID NO: 3863202 - RNA, 22 nt, Human
cacagugugaauaaagugcugc

SEQ ID NO: 3863203 - RNA, 10 nt, Human
cacaguguuu

SEQ ID NO: 3863204 - RNA, 16 nt, Human
cacaguguuuuuguaa

SEQ ID NO: 3863205 - RNA, 22 nt, Human
cacaguguuuuuguaaagugug

SEQ ID NO: 3863206 - RNA, 15 nt, Human
cacaguuauuacaua

SEQ ID NO: 3863207 - RNA, 21 nt, Human
cacaguucaguggcagggcuc

SEQ ID NO: 3863208 - RNA, 16 nt, Human
cacaguuccucgcccu

SEQ ID NO: 3863209 - RNA, 19 nt, Human
cacaguuccucgcccuggg

SEQ ID NO: 3863210 - RNA, 14 nt, Human
cacaguucucuccu

SEQ ID NO: 3863211 - RNA, 16 nt, Human
cacaguucucuccuuc

SEQ ID NO: 3863212 - RNA, 23 nt, Human
cacaguugaagggaggggcugug

SEQ ID NO: 3863213 - RNA, 14 nt, Human
cacaguugccacca

SEQ ID NO: 3863214 - RNA, 15 nt, Human
cacaguuggccuuca

SEQ ID NO: 3863215 - RNA, 12 nt, Human
cacaguuugaac

SEQ ID NO: 3863216 - RNA, 19 nt, Human
cacaguuuucugagaaaga

SEQ ID NO: 3863217 - RNA, 13 nt, Human
cacauacaacaca

SEQ ID NO: 3863218 - RNA, 17 nt, Human
cacauacacacacacgc

SEQ ID NO: 3863219 - RNA, 15 nt, Human
cacauacacacauau

SEQ ID NO: 3863220 - RNA, 20 nt, Human
cacauacacgaaagagagag

SEQ ID NO: 3863221 - RNA, 13 nt, Human
cacauacaguuuu

SEQ ID NO: 3863222 - RNA, 14 nt, Human
cacauacaguuuua

SEQ ID NO: 3863223 - RNA, 17 nt, Human
cacauacaguuuuaugc

SEQ ID NO: 3863224 - RNA, 13 nt, Human
cacauacccuccc

SEQ ID NO: 3863225 - RNA, 15 nt, Human
cacauacccuccccc

SEQ ID NO: 3863226 - RNA, 18 nt, Human
cacauacccugaccuggc

SEQ ID NO: 3863227 - RNA, 19 nt, Human
cacauacucauuuuucaug

SEQ ID NO: 3863228 - RNA, 15 nt, Human
cacauagagaucauc

SEQ ID NO: 3863229 - RNA, 21 nt, Human
cacauagauuaauggcacuga

SEQ ID NO: 3863230 - RNA, 14 nt, Human
cacauagauucacc

SEQ ID NO: 3863231 - RNA, 16 nt, Human
cacauagauucaccug

SEQ ID NO: 3863232 - RNA, 19 nt, Human
cacauagauucaccuguaa

SEQ ID NO: 3863233 - RNA, 22 nt, Human
cacauagauucaccuguaaaac

SEQ ID NO: 3863234 - RNA, 21 nt, Human
cacauauaaacaucacacaca

SEQ ID NO: 3863235 - RNA, 13 nt, Human
cacauauacacga

SEQ ID NO: 3863236 - RNA, 12 nt, Human
cacauaucuguc

SEQ ID NO: 3863237 - RNA, 14 nt, Human
cacauaucugucau

SEQ ID NO: 3863238 - RNA, 18 nt, Human
cacauaugcaccuugugu

SEQ ID NO: 3863239 - RNA, 20 nt, Human
cacauauugauuuccguuaa

SEQ ID NO: 3863240 - RNA, 22 nt, Human
cacaucaagcgaugaaacugga

SEQ ID NO: 3863241 - RNA, 20 nt, Human
cacaucacaagacuaugcca

SEQ ID NO: 3863242 - RNA, 19 nt, Human
cacaucacccuuaccaugu

SEQ ID NO: 3863243 - RNA, 18 nt, Human
cacaucagcacgauuucu

SEQ ID NO: 3863244 - RNA, 18 nt, Human
cacuggguguaaacacau

SEQ ID NO: 3863245 - RNA, 18 nt, Human
cacugguagguugggaca

SEQ ID NO: 3863246 - RNA, 17 nt, Human
cacugguauuccugccu

SEQ ID NO: 3863247 - RNA, 19 nt, Human
cacugguauuccugccucc

SEQ ID NO: 3863248 - RNA, 21 nt, Human
cacuggucugcuguuccagug

SEQ ID NO: 3863249 - RNA, 17 nt, Human
cacuggugacaugucuu

SEQ ID NO: 3863250 - RNA, 22 nt, Human
cacuggugacugcgaucuucag

SEQ ID NO: 3863251 - RNA, 22 nt, Human
cacugguggcccgacagccugg

SEQ ID NO: 3863252 - RNA, 21 nt, Human
cacugguggggauaggccagc

SEQ ID NO: 3863253 - RNA, 23 nt, Human
cacugguggggauaggccagccg

SEQ ID NO: 3863254 - RNA, 22 nt, Human
cacugguguggauuaaccugcc

SEQ ID NO: 3863255 - RNA, 18 nt, Human
cacugguguuuaggugaa

SEQ ID NO: 3863256 - RNA, 22 nt, Human
cacugguucuucuuggucucag

SEQ ID NO: 3863257 - RNA, 20 nt, Human
cacugguugcacuuaugauu

SEQ ID NO: 3863258 - RNA, 13 nt, Human
cacugguuuuaaa

SEQ ID NO: 3863259 - RNA, 16 nt, Human
cacugguuuuaaauau

SEQ ID NO: 3863260 - RNA, 14 nt, Human
cacuguaaaaugaa

SEQ ID NO: 3863261 - RNA, 18 nt, Human
cacuguacuugcucuuga

SEQ ID NO: 3863262 - RNA, 21 nt, Human
cacuguaguaaauaaugcuuu

SEQ ID NO: 3863263 - RNA, 22 nt, Human
cacuguaguaaauggcaauucu

SEQ ID NO: 3863264 - RNA, 18 nt, Human
cacuguaguucuaagacu

SEQ ID NO: 3863265 - RNA, 13 nt, Human
cacuguauaaaua

SEQ ID NO: 3863266 - RNA, 14 nt, Human
cacuguauaaauag

SEQ ID NO: 3863267 - RNA, 18 nt, Human
cacuguauaaauaggaga

SEQ ID NO: 3863268 - RNA, 19 nt, Human
cacuguauaaauaggagag

SEQ ID NO: 3863269 - RNA, 23 nt, Human
cacuguauaaauaggagaggaug

SEQ ID NO: 3863270 - RNA, 22 nt, Human
cacuguauaccccgugaagcau

SEQ ID NO: 3863271 - RNA, 15 nt, Human
cacuguaugauuuau

SEQ ID NO: 3863272 - RNA, 18 nt, Human
cacuguaugcuggacggc

SEQ ID NO: 3863273 - RNA, 17 nt, Human
cacuguauguuauagaa

SEQ ID NO: 3863274 - RNA, 14 nt, Human
cacuguauuuguau

SEQ ID NO: 3863275 - RNA, 19 nt, Human
cacugucacuguuucucug

SEQ ID NO: 3863276 - RNA, 13 nt, Human
cacugucacuuug

SEQ ID NO: 3863277 - RNA, 17 nt, Human
cacugucacuuugcucu

SEQ ID NO: 3863278 - RNA, 19 nt, Human
cacugucacuuugcucugg

SEQ ID NO: 3863279 - RNA, 18 nt, Human
cacugucccucaaaugac

SEQ ID NO: 3863280 - RNA, 20 nt, Human
cacugucccuccugguguca

SEQ ID NO: 3863281 - RNA, 14 nt, Human
cacuguccuccaag

SEQ ID NO: 3863282 - RNA, 15 nt, Human
cacuguccugcucca

SEQ ID NO: 3863283 - RNA, 11 nt, Human
cacuguccugg

SEQ ID NO: 3863284 - RNA, 12 nt, Human
cacuguccuggg

SEQ ID NO: 3863285 - RNA, 13 nt, Human
cacuguccugggc

SEQ ID NO: 3863286 - RNA, 18 nt, Human
cacuguccugggccugca

SEQ ID NO: 3863287 - RNA, 15 nt, Human
cacuguccugggcgc

SEQ ID NO: 3863288 - RNA, 23 nt, Human
cacugucugagaguuuaguugua

SEQ ID NO: 3863289 - RNA, 13 nt, Human
cacugugaagaga

SEQ ID NO: 3863290 - RNA, 13 nt, Human
cacugugaaggac

SEQ ID NO: 3863291 - RNA, 17 nt, Human
cacugugaaggacccuu

SEQ ID NO: 3863292 - RNA, 15 nt, Human
cacugugacccccag

SEQ ID NO: 3863293 - RNA, 20 nt, Human
cacugugacccccagcuccg

SEQ ID NO: 3863294 - RNA, 16 nt, Human
cacugugaccuugacu

SEQ ID NO: 3863295 - RNA, 17 nt, Human
cacugugaccuugagaa

SEQ ID NO: 3863296 - RNA, 16 nt, Human
cacugugagcucccag

SEQ ID NO: 3863297 - RNA, 22 nt, Human
cacugugagcucccaggugcag

SEQ ID NO: 3863298 - RNA, 19 nt, Human
cacugugaucaauauuuuu

SEQ ID NO: 3863299 - RNA, 21 nt, Human
cacugugaucaauauuuuuau

SEQ ID NO: 3863300 - RNA, 15 nt, Human
cacugugcacaccca

SEQ ID NO: 3863301 - RNA, 13 nt, Human
cacugugcaggug

SEQ ID NO: 3863302 - RNA, 18 nt, Human
cacugugccaugugccag

SEQ ID NO: 3863303 - RNA, 15 nt, Human
cacugugcccuggug

SEQ ID NO: 3863304 - RNA, 18 nt, Human
cacugugcccugguggag

SEQ ID NO: 3863305 - RNA, 17 nt, Human
cacugugccucagagac

SEQ ID NO: 3863306 - RNA, 19 nt, Human
cacugugcgucuuggugua

SEQ ID NO: 3863307 - RNA, 15 nt, Human
cacugugcugagucu

SEQ ID NO: 3863308 - RNA, 17 nt, Human
cacugugcugagucuga

SEQ ID NO: 3863309 - RNA, 22 nt, Human
cacugugcugagucugaaggcu

SEQ ID NO: 3863310 - RNA, 17 nt, Human
cacugugcuguuguuau

SEQ ID NO: 3863311 - RNA, 14 nt, Human
cacugugcuuucag

SEQ ID NO: 3863312 - RNA, 22 nt, Human
cacugugcuuucuauuguacag

SEQ ID NO: 3863313 - RNA, 13 nt, Human
cacuguggacuug

SEQ ID NO: 3863314 - RNA, 23 nt, Human
cacuguggacuuggucaccagcu

SEQ ID NO: 3863315 - RNA, 15 nt, Human
cacuguggcugucug

SEQ ID NO: 3863316 - RNA, 20 nt, Human
cacugugggaaggccagcug

SEQ ID NO: 3863317 - RNA, 22 nt, Human
cacuguggguagacacacauga

SEQ ID NO: 3863318 - RNA, 12 nt, Human
cacugugggugu

SEQ ID NO: 3863319 - RNA, 13 nt, Human
cacugugguggca

SEQ ID NO: 3863320 - RNA, 14 nt, Human
cacuguggugucug

SEQ ID NO: 3863321 - RNA, 21 nt, Human
cacuguguauauuugauuuau

SEQ ID NO: 3863322 - RNA, 23 nt, Human
cacuguuacuuucguacauuggc

SEQ ID NO: 3863323 - RNA, 22 nt, Human
cacuguuagcuuuuuaaaacau

SEQ ID NO: 3863324 - RNA, 15 nt, Human
cacuguuaucaaaac

SEQ ID NO: 3863325 - RNA, 21 nt, Human
cacuguuaucauuuuuuccug

SEQ ID NO: 3863326 - RNA, 14 nt, Human
cacuguucaugcug

SEQ ID NO: 3863327 - RNA, 22 nt, Human
cacuguucccucugcuccugga

SEQ ID NO: 3863328 - RNA, 21 nt, Human
cacuguucucccuucggugga

SEQ ID NO: 3863329 - RNA, 13 nt, Human
cacuguucucugc

SEQ ID NO: 3863330 - RNA, 16 nt, Human
cacuguucuuagcuca

SEQ ID NO: 3863331 - RNA, 13 nt, Human
cacuguugauaaa

SEQ ID NO: 3863332 - RNA, 14 nt, Human
cacuguugauaaaa

SEQ ID NO: 3863333 - RNA, 15 nt, Human
cacuguugauguauc

SEQ ID NO: 3863334 - RNA, 17 nt, Human
cacuguugcccaggcug

SEQ ID NO: 3863335 - RNA, 11 nt, Human
cacuguuuaag

SEQ ID NO: 3863336 - RNA, 13 nt, Human
cacuguuuccugg

SEQ ID NO: 3863337 - RNA, 19 nt, Human
cacuguuucucuugagcug

SEQ ID NO: 3863338 - RNA, 17 nt, Human
cacuguuucuugcuugu

SEQ ID NO: 3863339 - RNA, 21 nt, Human
cacuguuucuugcuuguaccu

SEQ ID NO: 3863340 - RNA, 14 nt, Human
cacuguuuucuagu

SEQ ID NO: 3863341 - RNA, 21 nt, Human
cacuguuuucuaguguaucaa

SEQ ID NO: 3863342 - RNA, 23 nt, Human
cacuguuuucuaguguaucaaaa

SEQ ID NO: 3863343 - RNA, 15 nt, Human
cacuuaaaaaugguu

SEQ ID NO: 3863344 - RNA, 21 nt, Human
cacuuaaacgaagaguucccu

SEQ ID NO: 3863345 - RNA, 15 nt, Human
cacuuaaagaaguau

SEQ ID NO: 3863346 - RNA, 16 nt, Human
cacuuaaagaaguauu

SEQ ID NO: 3863347 - RNA, 18 nt, Human
cacuuaaagaaguauuuu

SEQ ID NO: 3863348 - RNA, 16 nt, Human
cacuuaaauuaugaua

SEQ ID NO: 3863349 - RNA, 13 nt, Human
cacuuaagacugu

SEQ ID NO: 3863350 - RNA, 17 nt, Human
cacuuaagagaauauuu

SEQ ID NO: 3863351 - RNA, 20 nt, Human
cacuuaaguuaguuccacug

SEQ ID NO: 3863352 - RNA, 15 nt, Human
cacuuaauguauguu

SEQ ID NO: 3863353 - RNA, 16 nt, Human
cacuuacacuuuaugc

SEQ ID NO: 3863354 - RNA, 16 nt, Human
cacuuaccuucaauaa

SEQ ID NO: 3863355 - RNA, 17 nt, Human
cacuuaccuucaauaaa

SEQ ID NO: 3863356 - RNA, 19 nt, Human
cacuuaccuucaauaaagu

SEQ ID NO: 3863357 - RNA, 21 nt, Human
cacuuaccuucaauaaaguau

SEQ ID NO: 3863358 - RNA, 18 nt, Human
cacuuacuguuucuguca

SEQ ID NO: 3863359 - RNA, 20 nt, Human
cacuuacuguuucugucagg

SEQ ID NO: 3863360 - RNA, 16 nt, Human
cacuuacuugcuuauu

SEQ ID NO: 3863361 - RNA, 19 nt, Human
cacuuagaaauugcauuuc

SEQ ID NO: 3863362 - RNA, 24 nt, Human
cacuuagaaauugcauuuccugac

SEQ ID NO: 3863363 - RNA, 20 nt, Human
cacuuagccuuucuuuucuu

SEQ ID NO: 3863364 - RNA, 15 nt, Human
cacuuagcuaucaga

SEQ ID NO: 3863365 - RNA, 23 nt, Human
cacuuaggaacguaaucgugucc

SEQ ID NO: 3863366 - RNA, 23 nt, Human
cacuuauaagguguuuucugugu

SEQ ID NO: 3863367 - RNA, 12 nt, Human
cacuuaugauuu

SEQ ID NO: 3863368 - RNA, 16 nt, Human
cacuuauugaauauau

SEQ ID NO: 3863369 - RNA, 17 nt, Human
cacuuauugaauauaug

SEQ ID NO: 3863370 - RNA, 21 nt, Human
cacuuauuggaacucugcuug

SEQ ID NO: 3863371 - RNA, 22 nt, Human
cacuuauuggaacucugcuuga

SEQ ID NO: 3863372 - RNA, 12 nt, Human
cacuucaaacua

SEQ ID NO: 3863373 - RNA, 18 nt, Human
cacuucaaggugacagaa

SEQ ID NO: 3863374 - RNA, 18 nt, Human
cacuucacacacaggcaa

SEQ ID NO: 3863375 - RNA, 14 nt, Human
cacuucacagagug

SEQ ID NO: 3863376 - RNA, 14 nt, Human
cacuucacccugga

SEQ ID NO: 3863377 - RNA, 17 nt, Human
cacuucacgcccuuggc

SEQ ID NO: 3863378 - RNA, 20 nt, Human
cacuucacgcccuuggccau

SEQ ID NO: 3863379 - RNA, 21 nt, Human
cacuucacgcccuuggccaug

SEQ ID NO: 3863380 - RNA, 17 nt, Human
cacuucacgcuuucagc

SEQ ID NO: 3863381 - RNA, 15 nt, Human
cacuucacugugcug

SEQ ID NO: 3863382 - RNA, 16 nt, Human
cacuucagaauuccau

SEQ ID NO: 3863383 - RNA, 13 nt, Human
cacuucagagagc

SEQ ID NO: 3863384 - RNA, 16 nt, Human
cacuucagagagcugg

SEQ ID NO: 3863385 - RNA, 17 nt, Human
cacuucagagagcuggu

SEQ ID NO: 3863386 - RNA, 12 nt, Human
cacuucagcuga

SEQ ID NO: 3863387 - RNA, 16 nt, Human
cacuucaggcucuucu

SEQ ID NO: 3863388 - RNA, 17 nt, Human
cacuucagggcagauuu

SEQ ID NO: 3863389 - RNA, 19 nt, Human
cagaacuugugcccucccu

SEQ ID NO: 3863390 - RNA, 13 nt, Human
cagaagaaaauag

SEQ ID NO: 3863391 - RNA, 19 nt, Human
cagaagaaaauagaauuga

SEQ ID NO: 3863392 - RNA, 14 nt, Human
cagaagaaaauucu

SEQ ID NO: 3863393 - RNA, 14 nt, Human
cagaagaagagaag

SEQ ID NO: 3863394 - RNA, 18 nt, Human
cagaagaauaugacagcu

SEQ ID NO: 3863395 - RNA, 18 nt, Human
cagaagaauauucaggac

SEQ ID NO: 3863396 - RNA, 17 nt, Human
cagaagaauugaaccca

SEQ ID NO: 3863397 - RNA, 22 nt, Human
cagaagaauugaacccaggagg

SEQ ID NO: 3863398 - RNA, 17 nt, Human
cagaagacaccagagca

SEQ ID NO: 3863399 - RNA, 21 nt, Human
cagaagacaccagagcagaug

SEQ ID NO: 3863400 - RNA, 21 nt, Human
cagaagaccacaaaaauugac

SEQ ID NO: 3863401 - RNA, 16 nt, Human
cagaagaccccugacu

SEQ ID NO: 3863402 - RNA, 18 nt, Human
cagaagacuucccagcuu

SEQ ID NO: 3863403 - RNA, 18 nt, Human
cagaagauccccucagga

SEQ ID NO: 3863404 - RNA, 23 nt, Human
cagaagauccccucaggacugca

SEQ ID NO: 3863405 - RNA, 14 nt, Human
cagaagaugacuga

SEQ ID NO: 3863406 - RNA, 14 nt, Human
cagaagcaggcugg

SEQ ID NO: 3863407 - RNA, 15 nt, Human
cagaagcaggcugga

SEQ ID NO: 3863408 - RNA, 14 nt, Human
cagaagcauuaacu

SEQ ID NO: 3863409 - RNA, 19 nt, Human
cagaagcauuuguauuuug

SEQ ID NO: 3863410 - RNA, 22 nt, Human
cagaagcauuuguauuuugugu

SEQ ID NO: 3863411 - RNA, 15 nt, Human
cagaagccaggagca

SEQ ID NO: 3863412 - RNA, 19 nt, Human
cagaagccaggagcaaaug

SEQ ID NO: 3863413 - RNA, 11 nt, Human
cagaagcccag

SEQ ID NO: 3863414 - RNA, 14 nt, Human
cagaagcccagaau

SEQ ID NO: 3863415 - RNA, 23 nt, Human
cagaagcccugauguguccucag

SEQ ID NO: 3863416 - RNA, 18 nt, Human
cagaagccuauuguaaau

SEQ ID NO: 3863417 - RNA, 22 nt, Human
cagaagccuauuguaaauacaa

SEQ ID NO: 3863418 - RNA, 13 nt, Human
cagaagccucugg

SEQ ID NO: 3863419 - RNA, 14 nt, Human
cagaagccugaggc

SEQ ID NO: 3863420 - RNA, 14 nt, Human
cagaagccuggggg

SEQ ID NO: 3863421 - RNA, 22 nt, Human
cagaagccugggggccuggcug

SEQ ID NO: 3863422 - RNA, 23 nt, Human
cagaagccugggggccuggcugg

SEQ ID NO: 3863423 - RNA, 18 nt, Human
cagaagcgggacgagacc

SEQ ID NO: 3863424 - RNA, 17 nt, Human
cagaagcuaagcugcag

SEQ ID NO: 3863425 - RNA, 15 nt, Human
cagaagcucccccag

SEQ ID NO: 3863426 - RNA, 22 nt, Human
cagaagcucuuacucuuuccua

SEQ ID NO: 3863427 - RNA, 16 nt, Human
cagaagcugagcacca

SEQ ID NO: 3863428 - RNA, 14 nt, Human
cagaagcuucagaa

SEQ ID NO: 3863429 - RNA, 19 nt, Human
cagaaggaaaaauguguaa

SEQ ID NO: 3863430 - RNA, 15 nt, Human
cagaaggaaggcagg

SEQ ID NO: 3863431 - RNA, 14 nt, Human
cagaaggaccuccu

SEQ ID NO: 3863432 - RNA, 17 nt, Human
cagaaggagacaggcag

SEQ ID NO: 3863433 - RNA, 18 nt, Human
cagaaggagacaggcaga

SEQ ID NO: 3863434 - RNA, 13 nt, Human
cagaaggaggagg

SEQ ID NO: 3863435 - RNA, 19 nt, Human
cagaaggcaaaugacuuug

SEQ ID NO: 3863436 - RNA, 13 nt, Human
cagaaggccaaga

SEQ ID NO: 3863437 - RNA, 18 nt, Human
cagaaggccaagaggcug

SEQ ID NO: 3863438 - RNA, 14 nt, Human
cagaaggcuccugc

SEQ ID NO: 3863439 - RNA, 17 nt, Human
cagaaggcuccugcccc

SEQ ID NO: 3863440 - RNA, 14 nt, Human
cagaaggcucuucu

SEQ ID NO: 3863441 - RNA, 15 nt, Human
cagaagggaaacagu

SEQ ID NO: 3863442 - RNA, 21 nt, Human
cagaagggagcuagccagagg

SEQ ID NO: 3863443 - RNA, 19 nt, Human
cagaagggagggcagagcu

SEQ ID NO: 3863444 - RNA, 22 nt, Human
cagaaggggacugccaccuccc

SEQ ID NO: 3863445 - RNA, 17 nt, Human
cagaaggggagauggac

SEQ ID NO: 3863446 - RNA, 17 nt, Human
cagaagggggagaccaa

SEQ ID NO: 3863447 - RNA, 15 nt, Human
cagaagggggccaug

SEQ ID NO: 3863448 - RNA, 15 nt, Human
cagaagggggucucu

SEQ ID NO: 3863449 - RNA, 19 nt, Human
cagaaggggguggugucuc

SEQ ID NO: 3863450 - RNA, 22 nt, Human
cagaagggguuuggucugggac

SEQ ID NO: 3863451 - RNA, 23 nt, Human
cagaagguggggguuggcugggu

SEQ ID NO: 3863452 - RNA, 16 nt, Human
cagaagucaagcccag

SEQ ID NO: 3863453 - RNA, 16 nt, Human
cagaagucaaggcuua

SEQ ID NO: 3863454 - RNA, 20 nt, Human
cagaagucacucaauuguuu

SEQ ID NO: 3863455 - RNA, 22 nt, Human
cagaagucacucaauuguuuuu

SEQ ID NO: 3863456 - RNA, 14 nt, Human
cagaagucaucuug

SEQ ID NO: 3863457 - RNA, 16 nt, Human
cagaagucaucuugcu

SEQ ID NO: 3863458 - RNA, 16 nt, Human
cagaagucaugaagcc

SEQ ID NO: 3863459 - RNA, 14 nt, Human
cagaagucuccuca

SEQ ID NO: 3863460 - RNA, 21 nt, Human
cagaagugagcuuugcugcua

SEQ ID NO: 3863461 - RNA, 12 nt, Human
cagaagugcauc

SEQ ID NO: 3863462 - RNA, 14 nt, Human
cagaaguggagcug

SEQ ID NO: 3863463 - RNA, 15 nt, Human
cagaaguggagcugg

SEQ ID NO: 3863464 - RNA, 17 nt, Human
cagaaguguuucaugca

SEQ ID NO: 3863465 - RNA, 19 nt, Human
cagaaguuaguuuguauau

SEQ ID NO: 3863466 - RNA, 21 nt, Human
cagaaguuguggauuucaguu

SEQ ID NO: 3863467 - RNA, 16 nt, Human
cagaaguuuaaauauu

SEQ ID NO: 3863468 - RNA, 20 nt, Human
cagaaguuucugccgcagcc

SEQ ID NO: 3863469 - RNA, 23 nt, Human
cagaaguuucugccgcagcccug

SEQ ID NO: 3863470 - RNA, 20 nt, Human
cagaaguuugagaucagccu

SEQ ID NO: 3863471 - RNA, 23 nt, Human
cagaaguuugagaucagccuggg

SEQ ID NO: 3863472 - RNA, 22 nt, Human
cagaaguuugcacuaucuuuca

SEQ ID NO: 3863473 - RNA, 16 nt, Human
cagaaguuuggcaaua

SEQ ID NO: 3863474 - RNA, 18 nt, Human
cagaauaaguuauugcag

SEQ ID NO: 3863475 - RNA, 20 nt, Human
cagaauaaucaaauacauuu

SEQ ID NO: 3863476 - RNA, 23 nt, Human
cagaauaaugaauggacucaaac

SEQ ID NO: 3863477 - RNA, 22 nt, Human
cagaauacuguuaaaggaaaaa

SEQ ID NO: 3863478 - RNA, 21 nt, Human
cagaauagccacauuuggaau

SEQ ID NO: 3863479 - RNA, 14 nt, Human
cagaauaguauuuu

SEQ ID NO: 3863480 - RNA, 15 nt, Human
cagaauaucacagaa

SEQ ID NO: 3863481 - RNA, 17 nt, Human
cagaauauuucuauuga

SEQ ID NO: 3863482 - RNA, 19 nt, Human
cagaauauuucuauugaau

SEQ ID NO: 3863483 - RNA, 16 nt, Human
cagaaucagcacagau

SEQ ID NO: 3863484 - RNA, 19 nt, Human
cagaaucauaugauucugc

SEQ ID NO: 3863485 - RNA, 19 nt, Human
cagaauccaagugaacacu

SEQ ID NO: 3863486 - RNA, 14 nt, Human
cagaaucccagccg

SEQ ID NO: 3863487 - RNA, 18 nt, Human
cagaaucccagccggcca

SEQ ID NO: 3863488 - RNA, 17 nt, Human
cagaaucuaaagccagu

SEQ ID NO: 3863489 - RNA, 18 nt, Human
cagaaucucaaauaacua

SEQ ID NO: 3863490 - RNA, 15 nt, Human
cagaaucucgcucug

SEQ ID NO: 3863491 - RNA, 17 nt, Human
cagaaucuuguuuugaa

SEQ ID NO: 3863492 - RNA, 15 nt, Human
cagaaucuuuguuaa

SEQ ID NO: 3863493 - RNA, 19 nt, Human
cagaaugaaaaaugaaaga

SEQ ID NO: 3863494 - RNA, 22 nt, Human
cagaaugaaaaaugaaagauga

SEQ ID NO: 3863495 - RNA, 12 nt, Human
cagaaugaaucu

SEQ ID NO: 3863496 - RNA, 21 nt, Human
cagaaugagacauccagcaga

SEQ ID NO: 3863497 - RNA, 15 nt, Human
cagaaugaggcugcu

SEQ ID NO: 3863498 - RNA, 16 nt, Human
cagaaugagugcuuca

SEQ ID NO: 3863499 - RNA, 21 nt, Human
cagaaugcaaccaagucacac

SEQ ID NO: 3863500 - RNA, 21 nt, Human
cagaaugcuguacaucuauuu

SEQ ID NO: 3863501 - RNA, 19 nt, Human
cagaauggaagagagaaag

SEQ ID NO: 3863502 - RNA, 13 nt, Human
cagaauggcauuu

SEQ ID NO: 3863503 - RNA, 19 nt, Human
cagaauggugaucacucca

SEQ ID NO: 3863504 - RNA, 21 nt, Human
cagaauguaagugggcccacc

SEQ ID NO: 3863505 - RNA, 17 nt, Human
cagaauguaucugugaa

SEQ ID NO: 3863506 - RNA, 18 nt, Human
cagaauguaucugugaag

SEQ ID NO: 3863507 - RNA, 13 nt, Human
cagaaugucagau

SEQ ID NO: 3863508 - RNA, 16 nt, Human
cagaauguugauuaca

SEQ ID NO: 3863509 - RNA, 14 nt, Human
cagaauuaaacuuu

SEQ ID NO: 3863510 - RNA, 17 nt, Human
cagaauuaaacuuuuaa

SEQ ID NO: 3863511 - RNA, 21 nt, Human
cagaauuaugauggaagacag

SEQ ID NO: 3863512 - RNA, 15 nt, Human
cagaauuauuuuuaa

SEQ ID NO: 3863513 - RNA, 23 nt, Human
cagaauucccagcugucuguguc

SEQ ID NO: 3863514 - RNA, 14 nt, Human
cagaauucugcuac

SEQ ID NO: 3863515 - RNA, 23 nt, Human
cagaauucugcuaccucacuggg

SEQ ID NO: 3863516 - RNA, 17 nt, Human
cagaauugaaacacuuu

SEQ ID NO: 3863517 - RNA, 14 nt, Human
cagaauuggaaaag

SEQ ID NO: 3863518 - RNA, 24 nt, Human
cagaauuucccaaagcagugcaug

SEQ ID NO: 3863519 - RNA, 21 nt, Human
cagaauuuuaggaacuucaga

SEQ ID NO: 3863520 - RNA, 15 nt, Human
cagaauuuuuuuugu

SEQ ID NO: 3863521 - RNA, 19 nt, Human
cagaauuuuuuuuguuguu

SEQ ID NO: 3863522 - RNA, 11 nt, Human
cagacaaaaug

SEQ ID NO: 3863523 - RNA, 20 nt, Human
cagacaaaauggauacauaa

SEQ ID NO: 3863524 - RNA, 14 nt, Human
cagacaacagaagu

SEQ ID NO: 3863525 - RNA, 16 nt, Human
cagacaagguagcccu

SEQ ID NO: 3863526 - RNA, 23 nt, Human
cagacaagguagcccuggccaga

SEQ ID NO: 3863527 - RNA, 16 nt, Human
cagacaauacguuuga

SEQ ID NO: 3863528 - RNA, 15 nt, Human
cagacaaucuucugu

SEQ ID NO: 3863529 - RNA, 12 nt, Human
cagacacacaca

SEQ ID NO: 3863530 - RNA, 15 nt, Human
cagacacacacacgc

SEQ ID NO: 3863531 - RNA, 18 nt, Human
cagacacacacacgcacg

SEQ ID NO: 3863532 - RNA, 15 nt, Human
cagacacaggcccgg

SEQ ID NO: 3863533 - RNA, 13 nt, Human
cagagguacccug

SEQ ID NO: 3863534 - RNA, 16 nt, Human
cagagguacccugggu

SEQ ID NO: 3863535 - RNA, 17 nt, Human
cagagguacccugggug

SEQ ID NO: 3863536 - RNA, 18 nt, Human
cagagguagggcugccac

SEQ ID NO: 3863537 - RNA, 22 nt, Human
cagagguagucucacugcuuga

SEQ ID NO: 3863538 - RNA, 17 nt, Human
cagagguccagcccauc

SEQ ID NO: 3863539 - RNA, 13 nt, Human
cagaggucuccca

SEQ ID NO: 3863540 - RNA, 14 nt, Human
cagagguggccaga

SEQ ID NO: 3863541 - RNA, 20 nt, Human
cagagguggcucuggaauga

SEQ ID NO: 3863542 - RNA, 12 nt, Human
cagaggugggca

SEQ ID NO: 3863543 - RNA, 21 nt, Human
cagagguuaucugucccaggu

SEQ ID NO: 3863544 - RNA, 21 nt, Human
cagagguucuuugagggacug

SEQ ID NO: 3863545 - RNA, 16 nt, Human
cagagguugcagugag

SEQ ID NO: 3863546 - RNA, 17 nt, Human
cagagguugcagugagc

SEQ ID NO: 3863547 - RNA, 18 nt, Human
cagagguugcagugagcu

SEQ ID NO: 3863548 - RNA, 15 nt, Human
cagaguaagacauug

SEQ ID NO: 3863549 - RNA, 20 nt, Human
cagaguauggagcucagaga

SEQ ID NO: 3863550 - RNA, 20 nt, Human
cagaguauuugaaaaaugua

SEQ ID NO: 3863551 - RNA, 16 nt, Human
cagagucaaggccugc

SEQ ID NO: 3863552 - RNA, 18 nt, Human
cagagucaaggccugcuc

SEQ ID NO: 3863553 - RNA, 19 nt, Human
cagagucaaggccugcucc

SEQ ID NO: 3863554 - RNA, 21 nt, Human
cagagucacacgggggcagcu

SEQ ID NO: 3863555 - RNA, 15 nt, Human
cagagucagcagaac

SEQ ID NO: 3863556 - RNA, 17 nt, Human
cagagucagccaggacc

SEQ ID NO: 3863557 - RNA, 18 nt, Human
cagagucagccaggacca

SEQ ID NO: 3863558 - RNA, 14 nt, Human
cagaguccaggccc

SEQ ID NO: 3863559 - RNA, 22 nt, Human
cagaguccccccacucccagca

SEQ ID NO: 3863560 - RNA, 18 nt, Human
cagagucccugccuggac

SEQ ID NO: 3863561 - RNA, 16 nt, Human
cagaguccuuaaaaug

SEQ ID NO: 3863562 - RNA, 23 nt, Human
cagagucggaacggagaaaggug

SEQ ID NO: 3863563 - RNA, 20 nt, Human
cagagucuagcguagugcag

SEQ ID NO: 3863564 - RNA, 13 nt, Human
cagagucucacug

SEQ ID NO: 3863565 - RNA, 20 nt, Human
cagagucucacuguugccca

SEQ ID NO: 3863566 - RNA, 20 nt, Human
cagagucuggugaagcucac

SEQ ID NO: 3863567 - RNA, 18 nt, Human
cagagucuugcuaccuca

SEQ ID NO: 3863568 - RNA, 14 nt, Human
cagagugagaccca

SEQ ID NO: 3863569 - RNA, 15 nt, Human
cagagugagacccag

SEQ ID NO: 3863570 - RNA, 17 nt, Human
cagagugagacccagcc

SEQ ID NO: 3863571 - RNA, 20 nt, Human
cagagugagacccugucucu

SEQ ID NO: 3863572 - RNA, 20 nt, Human
cagagugcaagccccugcuc

SEQ ID NO: 3863573 - RNA, 15 nt, Human
cagagugcacagcug

SEQ ID NO: 3863574 - RNA, 16 nt, Human
cagagugcacagcugu

SEQ ID NO: 3863575 - RNA, 12 nt, Human
cagagugcccca

SEQ ID NO: 3863576 - RNA, 14 nt, Human
cagagugccccacc

SEQ ID NO: 3863577 - RNA, 19 nt, Human
cagagugccccaccugcca

SEQ ID NO: 3863578 - RNA, 21 nt, Human
cagagugccccaccugccacu

SEQ ID NO: 3863579 - RNA, 20 nt, Human
cagaguggaauaagacagag

SEQ ID NO: 3863580 - RNA, 16 nt, Human
cagaguggccuggcca

SEQ ID NO: 3863581 - RNA, 21 nt, Human
cagaguggccuggccaggagc

SEQ ID NO: 3863582 - RNA, 23 nt, Human
cagaguggccuggccaggagcuc

SEQ ID NO: 3863583 - RNA, 14 nt, Human
cagaguuacaguuc

SEQ ID NO: 3863584 - RNA, 15 nt, Human
cagaguuacaguucu

SEQ ID NO: 3863585 - RNA, 14 nt, Human
cagaguucacuaua

SEQ ID NO: 3863586 - RNA, 20 nt, Human
cagaguucacuauaaauggu

SEQ ID NO: 3863587 - RNA, 22 nt, Human
cagaguuccugcggagugaaga

SEQ ID NO: 3863588 - RNA, 23 nt, Human
cagaguuccugcggagugaagag

SEQ ID NO: 3863589 - RNA, 20 nt, Human
cagaguucuauacuguaaag

SEQ ID NO: 3863590 - RNA, 15 nt, Human
cagaguucugcucua

SEQ ID NO: 3863591 - RNA, 16 nt, Human
cagaguugaagacaga

SEQ ID NO: 3863592 - RNA, 17 nt, Human
cagaguugaagacagag

SEQ ID NO: 3863593 - RNA, 18 nt, Human
cagaguugaagacagagc

SEQ ID NO: 3863594 - RNA, 20 nt, Human
cagaguugaagacagagcua

SEQ ID NO: 3863595 - RNA, 22 nt, Human
cagaguugaagacagagcuaca

SEQ ID NO: 3863596 - RNA, 15 nt, Human
cagaguugcugggag

SEQ ID NO: 3863597 - RNA, 17 nt, Human
cagaguuguaaauauau

SEQ ID NO: 3863598 - RNA, 18 nt, Human
cagaguuguaaauauaua

SEQ ID NO: 3863599 - RNA, 20 nt, Human
cagaguuguaaauauauaaa

SEQ ID NO: 3863600 - RNA, 23 nt, Human
cagaguugugcacauggcuuagu

SEQ ID NO: 3863601 - RNA, 15 nt, Human
cagaguuguuacauu

SEQ ID NO: 3863602 - RNA, 16 nt, Human
cagaguuugccuuccu

SEQ ID NO: 3863603 - RNA, 17 nt, Human
cagaguuugccuuccuu

SEQ ID NO: 3863604 - RNA, 22 nt, Human
cagaguuuucauuaaauccuuu

SEQ ID NO: 3863605 - RNA, 23 nt, Human
cagaguuuucauuaaauccuuuu

SEQ ID NO: 3863606 - RNA, 16 nt, Human
cagauaaaauuauaga

SEQ ID NO: 3863607 - RNA, 21 nt, Human
cagauaaaauuauagauggga

SEQ ID NO: 3863608 - RNA, 16 nt, Human
cagauaaagauugugu

SEQ ID NO: 3863609 - RNA, 17 nt, Human
cagauaaccagcuguaa

SEQ ID NO: 3863610 - RNA, 19 nt, Human
cagauaacugaaaauuauu

SEQ ID NO: 3863611 - RNA, 13 nt, Human
cagauaacugagg

SEQ ID NO: 3863612 - RNA, 16 nt, Human
cagauaacuuagcuua

SEQ ID NO: 3863613 - RNA, 12 nt, Human
cagauaacuuuu

SEQ ID NO: 3863614 - RNA, 22 nt, Human
cagauaagguaaaaugccauga

SEQ ID NO: 3863615 - RNA, 18 nt, Human
cagauaaucagccucuua

SEQ ID NO: 3863616 - RNA, 13 nt, Human
cagauacaaugua

SEQ ID NO: 3863617 - RNA, 14 nt, Human
cagauacaucacug

SEQ ID NO: 3863618 - RNA, 14 nt, Human
cagauaccagcccc

SEQ ID NO: 3863619 - RNA, 16 nt, Human
cagauaccagccccug

SEQ ID NO: 3863620 - RNA, 21 nt, Human
cagauaccauacucauuucua

SEQ ID NO: 3863621 - RNA, 18 nt, Human
cagauaccuccaacccug

SEQ ID NO: 3863622 - RNA, 19 nt, Human
cagauaccuuaucuuacaa

SEQ ID NO: 3863623 - RNA, 18 nt, Human
cagauacuacugaccaga

SEQ ID NO: 3863624 - RNA, 18 nt, Human
cagauacuggauuguacu

SEQ ID NO: 3863625 - RNA, 19 nt, Human
cagauacuuggggggcuga

SEQ ID NO: 3863626 - RNA, 22 nt, Human
cagauauaaaagacugaccaau

SEQ ID NO: 3863627 - RNA, 18 nt, Human
cagauauaaauggcuggu

SEQ ID NO: 3863628 - RNA, 22 nt, Human
cagauauaaauggcugguuuuu

SEQ ID NO: 3863629 - RNA, 15 nt, Human
cagauauacuuugug

SEQ ID NO: 3863630 - RNA, 13 nt, Human
cagauauauuuuu

SEQ ID NO: 3863631 - RNA, 15 nt, Human
cagauauauuuuuca

SEQ ID NO: 3863632 - RNA, 18 nt, Human
cagauauauuuuucacag

SEQ ID NO: 3863633 - RNA, 19 nt, Human
cagauauauuuuucacagu

SEQ ID NO: 3863634 - RNA, 14 nt, Human
cagauaugauucaa

SEQ ID NO: 3863635 - RNA, 19 nt, Human
cagauaugauucaaauguc

SEQ ID NO: 3863636 - RNA, 14 nt, Human
cagauauuuauauu

SEQ ID NO: 3863637 - RNA, 15 nt, Human
cagaucaagcuguga

SEQ ID NO: 3863638 - RNA, 18 nt, Human
cagaucaauggcgcagug

SEQ ID NO: 3863639 - RNA, 21 nt, Human
cagaucaccagcccggccugc

SEQ ID NO: 3863640 - RNA, 14 nt, Human
cagaucacugccac

SEQ ID NO: 3863641 - RNA, 13 nt, Human
cagaucagccaga

SEQ ID NO: 3863642 - RNA, 16 nt, Human
cagaucaguaaagaac

SEQ ID NO: 3863643 - RNA, 16 nt, Human
cagaucaguguaccau

SEQ ID NO: 3863644 - RNA, 20 nt, Human
cagaucauagauuucugauu

SEQ ID NO: 3863645 - RNA, 21 nt, Human
cagaucauagauuucugauuu

SEQ ID NO: 3863646 - RNA, 15 nt, Human
cagaucaucuuggaa

SEQ ID NO: 3863647 - RNA, 16 nt, Human
cagaucauugugaaau

SEQ ID NO: 3863648 - RNA, 22 nt, Human
cagaucauugugaaauuauuca

SEQ ID NO: 3863649 - RNA, 13 nt, Human
cagauccagccug

SEQ ID NO: 3863650 - RNA, 14 nt, Human
cagauccagccugg

SEQ ID NO: 3863651 - RNA, 15 nt, Human
cagauccagccuggg

SEQ ID NO: 3863652 - RNA, 18 nt, Human
cagauccagccugggguc

SEQ ID NO: 3863653 - RNA, 12 nt, Human
cagauccaggac

SEQ ID NO: 3863654 - RNA, 18 nt, Human
cagauccaggagcuccag

SEQ ID NO: 3863655 - RNA, 20 nt, Human
cagauccaggagcuccagug

SEQ ID NO: 3863656 - RNA, 13 nt, Human
cagauccagggac

SEQ ID NO: 3863657 - RNA, 15 nt, Human
cagauccagggacag

SEQ ID NO: 3863658 - RNA, 20 nt, Human
cagaucccaggccccuggag

SEQ ID NO: 3863659 - RNA, 22 nt, Human
cagaucccaggccccuggaggc

SEQ ID NO: 3863660 - RNA, 12 nt, Human
cagauccuaccc

SEQ ID NO: 3863661 - RNA, 16 nt, Human
cagauccuccucauuc

SEQ ID NO: 3863662 - RNA, 14 nt, Human
cagauccucucugg

SEQ ID NO: 3863663 - RNA, 19 nt, Human
cagaucuaccccuuacuua

SEQ ID NO: 3863664 - RNA, 16 nt, Human
cagaucuccaaagcuu

SEQ ID NO: 3863665 - RNA, 13 nt, Human
cagaucugcaccg

SEQ ID NO: 3863666 - RNA, 15 nt, Human
cagaucugcaccgcc

SEQ ID NO: 3863667 - RNA, 18 nt, Human
cagaucuggaaccucagc

SEQ ID NO: 3863668 - RNA, 21 nt, Human
cagaucuggaaccucagccug

SEQ ID NO: 3863669 - RNA, 22 nt, Human
cagaucuggaaccucagccugg

SEQ ID NO: 3863670 - RNA, 18 nt, Human
cagaucuggucccuugca

SEQ ID NO: 3863671 - RNA, 13 nt, Human
cagaucugugccc

SEQ ID NO: 3863672 - RNA, 20 nt, Human
cagaucugugccccaugccu

SEQ ID NO: 3863673 - RNA, 12 nt, Human
cagaucuguuuu

SEQ ID NO: 3863674 - RNA, 13 nt, Human
cagaucuguuuug

SEQ ID NO: 3863675 - RNA, 15 nt, Human
cagaucuuaauauaa

SEQ ID NO: 3863676 - RNA, 18 nt, Human
cagaucuuaauauaaauu

SEQ ID NO: 3863677 - RNA, 20 nt, Human
cagaucuuucagaaauauaa

SEQ ID NO: 3863678 - RNA, 14 nt, Human
caggacgccacuca

SEQ ID NO: 3863679 - RNA, 20 nt, Human
caggacgccacucauuucau

SEQ ID NO: 3863680 - RNA, 15 nt, Human
caggacgcuucugaa

SEQ ID NO: 3863681 - RNA, 16 nt, Human
caggacgcuucugaau

SEQ ID NO: 3863682 - RNA, 22 nt, Human
caggacgcuucugaaugcugcu

SEQ ID NO: 3863683 - RNA, 24 nt, Human
caggacggggccggccaggugggc

SEQ ID NO: 3863684 - RNA, 16 nt, Human
caggacgugggcuggg

SEQ ID NO: 3863685 - RNA, 19 nt, Human
caggacuaacacucagaag

SEQ ID NO: 3863686 - RNA, 21 nt, Human
caggacuauagcccagguccu

SEQ ID NO: 3863687 - RNA, 20 nt, Human
caggacuauauuugggccug

SEQ ID NO: 3863688 - RNA, 13 nt, Human
caggacucacagg

SEQ ID NO: 3863689 - RNA, 19 nt, Human
caggacucagaagccucug

SEQ ID NO: 3863690 - RNA, 21 nt, Human
caggacucagaagccucuggg

SEQ ID NO: 3863691 - RNA, 14 nt, Human
caggacucagcucc

SEQ ID NO: 3863692 - RNA, 19 nt, Human
caggacucagcuccccaga

SEQ ID NO: 3863693 - RNA, 12 nt, Human
caggacuccagc

SEQ ID NO: 3863694 - RNA, 13 nt, Human
caggacuccagcc

SEQ ID NO: 3863695 - RNA, 16 nt, Human
caggacuccagcccau

SEQ ID NO: 3863696 - RNA, 17 nt, Human
caggacuccaggcccaa

SEQ ID NO: 3863697 - RNA, 18 nt, Human
caggacuccaggcccaag

SEQ ID NO: 3863698 - RNA, 21 nt, Human
caggacuccaggcccaaggcu

SEQ ID NO: 3863699 - RNA, 20 nt, Human
caggacuccccaggccaggc

SEQ ID NO: 3863700 - RNA, 20 nt, Human
caggacucccuccucaccuc

SEQ ID NO: 3863701 - RNA, 21 nt, Human
caggacucccuccucaccucu

SEQ ID NO: 3863702 - RNA, 12 nt, Human
caggacucugac

SEQ ID NO: 3863703 - RNA, 14 nt, Human
caggacucugaccc

SEQ ID NO: 3863704 - RNA, 14 nt, Human
caggacucugcagc

SEQ ID NO: 3863705 - RNA, 15 nt, Human
caggacucugcagcc

SEQ ID NO: 3863706 - RNA, 18 nt, Human
caggacucugcagccuca

SEQ ID NO: 3863707 - RNA, 19 nt, Human
caggacucugcagccucag

SEQ ID NO: 3863708 - RNA, 12 nt, Human
caggacucugcc

SEQ ID NO: 3863709 - RNA, 18 nt, Human
caggacucuugugaaaag

SEQ ID NO: 3863710 - RNA, 20 nt, Human
caggacugagccccgcagac

SEQ ID NO: 3863711 - RNA, 18 nt, Human
caggacugaugucuccua

SEQ ID NO: 3863712 - RNA, 23 nt, Human
caggacugaugucuccuaagcac

SEQ ID NO: 3863713 - RNA, 19 nt, Human
caggacugcaacaggcuug

SEQ ID NO: 3863714 - RNA, 22 nt, Human
caggacugggagcccccagccu

SEQ ID NO: 3863715 - RNA, 23 nt, Human
caggacugggagcccccagccug

SEQ ID NO: 3863716 - RNA, 22 nt, Human
caggacuguccccuugaaggag

SEQ ID NO: 3863717 - RNA, 20 nt, Human
caggacuuaacggcuccagg

SEQ ID NO: 3863718 - RNA, 16 nt, Human
caggacuugaaagaaa

SEQ ID NO: 3863719 - RNA, 14 nt, Human
caggagaagaaaga

SEQ ID NO: 3863720 - RNA, 16 nt, Human
caggagaagcucagcu

SEQ ID NO: 3863721 - RNA, 19 nt, Human
caggagaagcucagcugca

SEQ ID NO: 3863722 - RNA, 20 nt, Human
caggagaagcucagcugcau

SEQ ID NO: 3863723 - RNA, 19 nt, Human
caggagaaggccaauuccu

SEQ ID NO: 3863724 - RNA, 22 nt, Human
caggagacuggcgugaacccag

SEQ ID NO: 3863725 - RNA, 14 nt, Human
caggagagaaaggg

SEQ ID NO: 3863726 - RNA, 12 nt, Human
caggagagcagc

SEQ ID NO: 3863727 - RNA, 22 nt, Human
caggagagcagcggggcgaagc

SEQ ID NO: 3863728 - RNA, 15 nt, Human
caggagagccagccc

SEQ ID NO: 3863729 - RNA, 17 nt, Human
caggagagccagcccuc

SEQ ID NO: 3863730 - RNA, 18 nt, Human
caggagagccagcccucc

SEQ ID NO: 3863731 - RNA, 23 nt, Human
caggagagccagcccucccuguc

SEQ ID NO: 3863732 - RNA, 18 nt, Human
caggagagcuuagggucu

SEQ ID NO: 3863733 - RNA, 22 nt, Human
caggagaggagagccagagaag

SEQ ID NO: 3863734 - RNA, 15 nt, Human
caggagaggggcaga

SEQ ID NO: 3863735 - RNA, 12 nt, Human
caggagaguaga

SEQ ID NO: 3863736 - RNA, 20 nt, Human
caggagauggaaguugcagu

SEQ ID NO: 3863737 - RNA, 23 nt, Human
caggagauugagaaggagagaaa

SEQ ID NO: 3863738 - RNA, 18 nt, Human
caggagcaaauguuucug

SEQ ID NO: 3863739 - RNA, 15 nt, Human
caggagcacaggcag

SEQ ID NO: 3863740 - RNA, 16 nt, Human
caggagcacggcucug

SEQ ID NO: 3863741 - RNA, 17 nt, Human
caggagcacggcucugu

SEQ ID NO: 3863742 - RNA, 19 nt, Human
caggagcagccacauuccu

SEQ ID NO: 3863743 - RNA, 15 nt, Human
caggagcagccucag

SEQ ID NO: 3863744 - RNA, 20 nt, Human
caggagcaguaucaugaagc

SEQ ID NO: 3863745 - RNA, 20 nt, Human
caggagcauccaccuccuuc

SEQ ID NO: 3863746 - RNA, 22 nt, Human
caggagcauccaccuccuucuc

SEQ ID NO: 3863747 - RNA, 23 nt, Human
caggagcccauuuggagggccug

SEQ ID NO: 3863748 - RNA, 20 nt, Human
caggagccccgaggccuucu

SEQ ID NO: 3863749 - RNA, 22 nt, Human
caggagccccgaggccuucucu

SEQ ID NO: 3863750 - RNA, 23 nt, Human
caggagccccgaggccuucucug

SEQ ID NO: 3863751 - RNA, 14 nt, Human
caggagcccuggga

SEQ ID NO: 3863752 - RNA, 16 nt, Human
caggagcccugggagg

SEQ ID NO: 3863753 - RNA, 18 nt, Human
caggagcccugggaggcu

SEQ ID NO: 3863754 - RNA, 19 nt, Human
caggagcccugggaggcuc

SEQ ID NO: 3863755 - RNA, 21 nt, Human
caggagcccugggaggcucug

SEQ ID NO: 3863756 - RNA, 17 nt, Human
caggagccgaagcccag

SEQ ID NO: 3863757 - RNA, 14 nt, Human
caggagccugugac

SEQ ID NO: 3863758 - RNA, 15 nt, Human
caggagccugugccu

SEQ ID NO: 3863759 - RNA, 22 nt, Human
caggagcgcucccuugaccugc

SEQ ID NO: 3863760 - RNA, 12 nt, Human
caggagcucaga

SEQ ID NO: 3863761 - RNA, 18 nt, Human
caggagcuccccucccca

SEQ ID NO: 3863762 - RNA, 19 nt, Human
caggagcucuucaggccuc

SEQ ID NO: 3863763 - RNA, 13 nt, Human
caggagcugccca

SEQ ID NO: 3863764 - RNA, 22 nt, Human
caggagcugcccagaguugcug

SEQ ID NO: 3863765 - RNA, 22 nt, Human
caggagcugggauccuaagggc

SEQ ID NO: 3863766 - RNA, 12 nt, Human
caggagcugggc

SEQ ID NO: 3863767 - RNA, 15 nt, Human
caggagcugggcaga

SEQ ID NO: 3863768 - RNA, 19 nt, Human
caggagcugucaccaagga

SEQ ID NO: 3863769 - RNA, 15 nt, Human
caggaggaauacuga

SEQ ID NO: 3863770 - RNA, 15 nt, Human
caggaggacaauuca

SEQ ID NO: 3863771 - RNA, 16 nt, Human
caggaggacaauucau

SEQ ID NO: 3863772 - RNA, 16 nt, Human
caggaggacccagggc

SEQ ID NO: 3863773 - RNA, 23 nt, Human
caggaggacugccccgugcagac

SEQ ID NO: 3863774 - RNA, 22 nt, Human
caggaggauugcuugagcccag

SEQ ID NO: 3863775 - RNA, 23 nt, Human
caggaggauugcuugagcccagg

SEQ ID NO: 3863776 - RNA, 18 nt, Human
caggaggcaggaccuucg

SEQ ID NO: 3863777 - RNA, 21 nt, Human
caggaggcaggcauggcccug

SEQ ID NO: 3863778 - RNA, 19 nt, Human
caggaggcagggaggcagc

SEQ ID NO: 3863779 - RNA, 13 nt, Human
caggaggccagcc

SEQ ID NO: 3863780 - RNA, 19 nt, Human
caggaggccagccuugacc

SEQ ID NO: 3863781 - RNA, 20 nt, Human
caggaggccccuggcccagc

SEQ ID NO: 3863782 - RNA, 12 nt, Human
caggaggcugag

SEQ ID NO: 3863783 - RNA, 16 nt, Human
caggaggcugaggcag

SEQ ID NO: 3863784 - RNA, 18 nt, Human
caggaggcugaggcagaa

SEQ ID NO: 3863785 - RNA, 20 nt, Human
caggaggcugaggcagaaga

SEQ ID NO: 3863786 - RNA, 21 nt, Human
caggaggcugaggcagaagaa

SEQ ID NO: 3863787 - RNA, 17 nt, Human
caggaggcugaggcagg

SEQ ID NO: 3863788 - RNA, 19 nt, Human
caggaggcugaggcaggag

SEQ ID NO: 3863789 - RNA, 21 nt, Human
caggaggcugggacgcucugc

SEQ ID NO: 3863790 - RNA, 23 nt, Human
caggaggcugggacgcucugcug

SEQ ID NO: 3863791 - RNA, 18 nt, Human
caggagggacaaaggagc

SEQ ID NO: 3863792 - RNA, 22 nt, Human
caggagggacaaaggagccugu

SEQ ID NO: 3863793 - RNA, 23 nt, Human
caggagggacaaaggagccugug

SEQ ID NO: 3863794 - RNA, 24 nt, Human
caggagggacaaaggagccuguga

SEQ ID NO: 3863795 - RNA, 16 nt, Human
caggagggacagucuc

SEQ ID NO: 3863796 - RNA, 19 nt, Human
caggagggagguuugugag

SEQ ID NO: 3863797 - RNA, 16 nt, Human
caggagggcauccaua

SEQ ID NO: 3863798 - RNA, 16 nt, Human
caggagggcccuaccu

SEQ ID NO: 3863799 - RNA, 16 nt, Human
caggagggggucgugg

SEQ ID NO: 3863800 - RNA, 18 nt, Human
caggagggggucguggag

SEQ ID NO: 3863801 - RNA, 23 nt, Human
caggagggggucguggagagcua

SEQ ID NO: 3863802 - RNA, 15 nt, Human
caggagggucuaugg

SEQ ID NO: 3863803 - RNA, 19 nt, Human
caggaggugccacuggagu

SEQ ID NO: 3863804 - RNA, 18 nt, Human
caggagguggcuauggcc

SEQ ID NO: 3863805 - RNA, 15 nt, Human
caggagguggucugg

SEQ ID NO: 3863806 - RNA, 19 nt, Human
caggagguuuuuuugucaa

SEQ ID NO: 3863807 - RNA, 15 nt, Human
caggaguagcugagc

SEQ ID NO: 3863808 - RNA, 16 nt, Human
caggaguagcugagcu

SEQ ID NO: 3863809 - RNA, 17 nt, Human
caggaguagcugagcuc

SEQ ID NO: 3863810 - RNA, 20 nt, Human
caggaguccaagaccagacu

SEQ ID NO: 3863811 - RNA, 16 nt, Human
caggagucccaaggaa

SEQ ID NO: 3863812 - RNA, 21 nt, Human
caggagucccaaggaaagccc

SEQ ID NO: 3863813 - RNA, 24 nt, Human
caggagucccaaggaaagccccag

SEQ ID NO: 3863814 - RNA, 15 nt, Human
caggagucccugcca

SEQ ID NO: 3863815 - RNA, 21 nt, Human
caggagucccugccaucaugu

SEQ ID NO: 3863816 - RNA, 12 nt, Human
caggagugagca

SEQ ID NO: 3863817 - RNA, 16 nt, Human
caggagugggugggga

SEQ ID NO: 3863818 - RNA, 17 nt, Human
caggaguggugcagaca

SEQ ID NO: 3863819 - RNA, 24 nt, Human
caggaguggugcagacagaagucu

SEQ ID NO: 3863820 - RNA, 17 nt, Human
caggaguguccucuucc

SEQ ID NO: 3863821 - RNA, 14 nt, Human
caggccucccuguu

SEQ ID NO: 3863822 - RNA, 22 nt, Human
caggccucucccuccuccagga

SEQ ID NO: 3863823 - RNA, 14 nt, Human
caggccucuguguc

SEQ ID NO: 3863824 - RNA, 12 nt, Human
caggccucuugg

SEQ ID NO: 3863825 - RNA, 19 nt, Human
caggccucuuggcagucac

SEQ ID NO: 3863826 - RNA, 13 nt, Human
caggccugacucu

SEQ ID NO: 3863827 - RNA, 14 nt, Human
caggccugagauuu

SEQ ID NO: 3863828 - RNA, 19 nt, Human
caggccugagauuucaucu

SEQ ID NO: 3863829 - RNA, 22 nt, Human
caggccugcagcaggaguggug

SEQ ID NO: 3863830 - RNA, 18 nt, Human
caggccugccagacggca

SEQ ID NO: 3863831 - RNA, 16 nt, Human
caggccugccucccac

SEQ ID NO: 3863832 - RNA, 13 nt, Human
caggccugcgaga

SEQ ID NO: 3863833 - RNA, 12 nt, Human
caggccugggcc

SEQ ID NO: 3863834 - RNA, 20 nt, Human
caggccugggggcugggcag

SEQ ID NO: 3863835 - RNA, 18 nt, Human
caggccugggucuguguc

SEQ ID NO: 3863836 - RNA, 19 nt, Human
caggccugggucugugucu

SEQ ID NO: 3863837 - RNA, 16 nt, Human
caggccuguguagcug

SEQ ID NO: 3863838 - RNA, 20 nt, Human
caggccuguguagcugugac

SEQ ID NO: 3863839 - RNA, 13 nt, Human
caggccuguugcu

SEQ ID NO: 3863840 - RNA, 23 nt, Human
caggccuguugcuauagagccua

SEQ ID NO: 3863841 - RNA, 15 nt, Human
caggcgaggccugga

SEQ ID NO: 3863842 - RNA, 17 nt, Human
caggcgccccuuccccc

SEQ ID NO: 3863843 - RNA, 23 nt, Human
caggcgcugcccaccugccggcc

SEQ ID NO: 3863844 - RNA, 20 nt, Human
caggcgcugugcuaucauga

SEQ ID NO: 3863845 - RNA, 16 nt, Human
caggcgggcucaagga

SEQ ID NO: 3863846 - RNA, 13 nt, Human
caggcguucagcu

SEQ ID NO: 3863847 - RNA, 19 nt, Human
caggcguucagcucacugu

SEQ ID NO: 3863848 - RNA, 22 nt, Human
caggcguucagcucacuguucu

SEQ ID NO: 3863849 - RNA, 19 nt, Human
caggcuaaggcguggagcu

SEQ ID NO: 3863850 - RNA, 16 nt, Human
caggcuagagugcagu

SEQ ID NO: 3863851 - RNA, 16 nt, Human
caggcucacucacaga

SEQ ID NO: 3863852 - RNA, 22 nt, Human
caggcucacugccaggccagcc

SEQ ID NO: 3863853 - RNA, 15 nt, Human
caggcucccaggagc

SEQ ID NO: 3863854 - RNA, 19 nt, Human
caggcucccagggacaccu

SEQ ID NO: 3863855 - RNA, 14 nt, Human
caggcuccccugag

SEQ ID NO: 3863856 - RNA, 15 nt, Human
caggcuccccugagg

SEQ ID NO: 3863857 - RNA, 13 nt, Human
caggcuccucccu

SEQ ID NO: 3863858 - RNA, 21 nt, Human
caggcuccucccucccucugc

SEQ ID NO: 3863859 - RNA, 13 nt, Human
caggcuccugcca

SEQ ID NO: 3863860 - RNA, 18 nt, Human
caggcuccugccaccacg

SEQ ID NO: 3863861 - RNA, 17 nt, Human
caggcuccuuccugucu

SEQ ID NO: 3863862 - RNA, 21 nt, Human
caggcuccuuccugucuuccu

SEQ ID NO: 3863863 - RNA, 19 nt, Human
caggcuccuuuagcgccca

SEQ ID NO: 3863864 - RNA, 14 nt, Human
caggcucucaacag

SEQ ID NO: 3863865 - RNA, 12 nt, Human
caggcucucagg

SEQ ID NO: 3863866 - RNA, 13 nt, Human
caggcucuccauu

SEQ ID NO: 3863867 - RNA, 13 nt, Human
caggcucugcccu

SEQ ID NO: 3863868 - RNA, 22 nt, Human
caggcucugcccugcccuagcu

SEQ ID NO: 3863869 - RNA, 17 nt, Human
caggcucugccucaccu

SEQ ID NO: 3863870 - RNA, 14 nt, Human
caggcucugugcug

SEQ ID NO: 3863871 - RNA, 15 nt, Human
caggcucugugcuga

SEQ ID NO: 3863872 - RNA, 19 nt, Human
caggcucugugcugacccu

SEQ ID NO: 3863873 - RNA, 22 nt, Human
caggcucugugcugacccuccu

SEQ ID NO: 3863874 - RNA, 23 nt, Human
caggcucugugcugacccuccug

SEQ ID NO: 3863875 - RNA, 24 nt, Human
caggcucugugcugacccuccugu

SEQ ID NO: 3863876 - RNA, 21 nt, Human
caggcucuuagcagcuuccag

SEQ ID NO: 3863877 - RNA, 14 nt, Human
caggcucuucuccu

SEQ ID NO: 3863878 - RNA, 22 nt, Human
caggcucuuuggggucagccag

SEQ ID NO: 3863879 - RNA, 23 nt, Human
caggcucuuuggggucagccagg

SEQ ID NO: 3863880 - RNA, 14 nt, Human
caggcugaaaacaa

SEQ ID NO: 3863881 - RNA, 18 nt, Human
caggcugaagcagguucc

SEQ ID NO: 3863882 - RNA, 14 nt, Human
caggcugaccacag

SEQ ID NO: 3863883 - RNA, 17 nt, Human
caggcugaccacagcac

SEQ ID NO: 3863884 - RNA, 13 nt, Human
caggcugagcuga

SEQ ID NO: 3863885 - RNA, 11 nt, Human
caggcugaggu

SEQ ID NO: 3863886 - RNA, 14 nt, Human
caggcugagugcag

SEQ ID NO: 3863887 - RNA, 16 nt, Human
caggcugagugcaggc

SEQ ID NO: 3863888 - RNA, 14 nt, Human
caggcugcagcugg

SEQ ID NO: 3863889 - RNA, 17 nt, Human
caggcugcagcuggaca

SEQ ID NO: 3863890 - RNA, 21 nt, Human
caggcugcauagaaggaggag

SEQ ID NO: 3863891 - RNA, 19 nt, Human
caggcugccagugccuggg

SEQ ID NO: 3863892 - RNA, 15 nt, Human
caggcugccugagca

SEQ ID NO: 3863893 - RNA, 18 nt, Human
caggcugcggccccuccc

SEQ ID NO: 3863894 - RNA, 15 nt, Human
caggcugcucucaaa

SEQ ID NO: 3863895 - RNA, 23 nt, Human
caggcugcucuugaacuccugac

SEQ ID NO: 3863896 - RNA, 16 nt, Human
caggcugcuggcgccu

SEQ ID NO: 3863897 - RNA, 21 nt, Human
caggcugcuggggccucagac

SEQ ID NO: 3863898 - RNA, 15 nt, Human
caggcugcuugggau

SEQ ID NO: 3863899 - RNA, 21 nt, Human
caggcuggagguaaggccuuu

SEQ ID NO: 3863900 - RNA, 15 nt, Human
caggcuggaguacag

SEQ ID NO: 3863901 - RNA, 13 nt, Human
caggcuggaguua

SEQ ID NO: 3863902 - RNA, 20 nt, Human
caggcuggcaccgccuucuc

SEQ ID NO: 3863903 - RNA, 17 nt, Human
caggcuggcagcucucc

SEQ ID NO: 3863904 - RNA, 19 nt, Human
caggcuggcagcucuccag

SEQ ID NO: 3863905 - RNA, 11 nt, Human
caggcuggcca

SEQ ID NO: 3863906 - RNA, 12 nt, Human
caggcuggccag

SEQ ID NO: 3863907 - RNA, 13 nt, Human
caggcuggccagc

SEQ ID NO: 3863908 - RNA, 15 nt, Human
caggcuggccagccc

SEQ ID NO: 3863909 - RNA, 18 nt, Human
caggcuggccagccccac

SEQ ID NO: 3863910 - RNA, 19 nt, Human
caggcuggccagccccaca

SEQ ID NO: 3863911 - RNA, 19 nt, Human
caggcuggccagccgcucu

SEQ ID NO: 3863912 - RNA, 14 nt, Human
caggcuggccaguc

SEQ ID NO: 3863913 - RNA, 16 nt, Human
caggcuggccagucca

SEQ ID NO: 3863914 - RNA, 17 nt, Human
caggcuggcccugcccu

SEQ ID NO: 3863915 - RNA, 18 nt, Human
caggcuggcccugcccug

SEQ ID NO: 3863916 - RNA, 19 nt, Human
caggcuggcccugcccugg

SEQ ID NO: 3863917 - RNA, 15 nt, Human
caggcuggcgcagcc

SEQ ID NO: 3863918 - RNA, 18 nt, Human
caggcuggcgugcagugg

SEQ ID NO: 3863919 - RNA, 19 nt, Human
caggcuggcgugcaguggu

SEQ ID NO: 3863920 - RNA, 21 nt, Human
caggcugggagagccuuccag

SEQ ID NO: 3863921 - RNA, 12 nt, Human
caggcugggcca

SEQ ID NO: 3863922 - RNA, 23 nt, Human
caggcugggccauguccaaagag

SEQ ID NO: 3863923 - RNA, 15 nt, Human
caggcugggcuucag

SEQ ID NO: 3863924 - RNA, 17 nt, Human
caggcugggcuucagug

SEQ ID NO: 3863925 - RNA, 23 nt, Human
caggcugggcuucaguggcagcu

SEQ ID NO: 3863926 - RNA, 21 nt, Human
caggcugggucgcccuggacu

SEQ ID NO: 3863927 - RNA, 16 nt, Human
caggcugggugacaga

SEQ ID NO: 3863928 - RNA, 23 nt, Human
caggcuggucucaaacuccugac

SEQ ID NO: 3863929 - RNA, 19 nt, Human
caggcuggucucaaacucu

SEQ ID NO: 3863930 - RNA, 22 nt, Human
caggcuggucucgaacuccuga

SEQ ID NO: 3863931 - RNA, 23 nt, Human
caggcuggucucgaacuccugac

SEQ ID NO: 3863932 - RNA, 23 nt, Human
caggcuguaucccaugagccuca

SEQ ID NO: 3863933 - RNA, 16 nt, Human
caggcugucuggccag

SEQ ID NO: 3863934 - RNA, 19 nt, Human
caggcuguucugcacugaa

SEQ ID NO: 3863935 - RNA, 21 nt, Human
caggcuuaauaaaaaugacag

SEQ ID NO: 3863936 - RNA, 16 nt, Human
caggcuuagggacagg

SEQ ID NO: 3863937 - RNA, 23 nt, Human
caggcuuagucacugagacagcc

SEQ ID NO: 3863938 - RNA, 21 nt, Human
caggcuuccugcaauuuucua

SEQ ID NO: 3863939 - RNA, 19 nt, Human
caggcuuuguacagagugc

SEQ ID NO: 3863940 - RNA, 21 nt, Human
caggcuuuuuuccagacucua

SEQ ID NO: 3863941 - RNA, 20 nt, Human
cagggaaaagcagcucuccc

SEQ ID NO: 3863942 - RNA, 15 nt, Human
cagggaaaauaggca

SEQ ID NO: 3863943 - RNA, 15 nt, Human
cagggaaaauauaua

SEQ ID NO: 3863944 - RNA, 14 nt, Human
cagggaaaggcucu

SEQ ID NO: 3863945 - RNA, 19 nt, Human
cagggaacccugcuugcac

SEQ ID NO: 3863946 - RNA, 16 nt, Human
cagggaagagaaagug

SEQ ID NO: 3863947 - RNA, 22 nt, Human
cagggaagagcagaacggagcc

SEQ ID NO: 3863948 - RNA, 15 nt, Human
cagggaagaggggug

SEQ ID NO: 3863949 - RNA, 23 nt, Human
cagggaagaggggugcagaggcu

SEQ ID NO: 3863950 - RNA, 15 nt, Human
cagggaagcagcagc

SEQ ID NO: 3863951 - RNA, 12 nt, Human
cagggaagccca

SEQ ID NO: 3863952 - RNA, 15 nt, Human
cagggaagccccaca

SEQ ID NO: 3863953 - RNA, 17 nt, Human
cagggaagccccacaug

SEQ ID NO: 3863954 - RNA, 22 nt, Human
cagggaagccccacauguccag

SEQ ID NO: 3863955 - RNA, 14 nt, Human
cagggaagcuacag

SEQ ID NO: 3863956 - RNA, 21 nt, Human
cagggaagcuacagguuacaa

SEQ ID NO: 3863957 - RNA, 16 nt, Human
cagggaaggaggagcc

SEQ ID NO: 3863958 - RNA, 13 nt, Human
cagggaaggaucc

SEQ ID NO: 3863959 - RNA, 12 nt, Human
cagggaaggcag

SEQ ID NO: 3863960 - RNA, 17 nt, Human
cagggaaggcaggcagg

SEQ ID NO: 3863961 - RNA, 22 nt, Human
cagggaaggcaggcagggcucu

SEQ ID NO: 3863962 - RNA, 17 nt, Human
cagggaaggggacaagg

SEQ ID NO: 3863963 - RNA, 23 nt, Human
cagggaaguccccaggccccagg

SEQ ID NO: 3863964 - RNA, 15 nt, Human
cagggaaguggggag

SEQ ID NO: 3863965 - RNA, 20 nt, Human
cauacuacugaaacagauuu

SEQ ID NO: 3863966 - RNA, 14 nt, Human
cauacucagccugc

SEQ ID NO: 3863967 - RNA, 15 nt, Human
cauacucagccugcu

SEQ ID NO: 3863968 - RNA, 20 nt, Human
cauacucagccugcugccca

SEQ ID NO: 3863969 - RNA, 18 nt, Human
cauacucauuucuaaaag

SEQ ID NO: 3863970 - RNA, 21 nt, Human
cauacucauuucuaaaagaau

SEQ ID NO: 3863971 - RNA, 22 nt, Human
cauacucauuuuucaugauaau

SEQ ID NO: 3863972 - RNA, 20 nt, Human
cauacuccuuccaucaaaua

SEQ ID NO: 3863973 - RNA, 22 nt, Human
cauacugagccaaguauaauuu

SEQ ID NO: 3863974 - RNA, 15 nt, Human
cauacugagggacca

SEQ ID NO: 3863975 - RNA, 18 nt, Human
cauacugugcuggagcca

SEQ ID NO: 3863976 - RNA, 16 nt, Human
cauacuuaucucucug

SEQ ID NO: 3863977 - RNA, 20 nt, Human
cauacuuaucucucugugcu

SEQ ID NO: 3863978 - RNA, 17 nt, Human
cauacuucaaaaguauu

SEQ ID NO: 3863979 - RNA, 20 nt, Human
cauacuugaacguuuucuaa

SEQ ID NO: 3863980 - RNA, 23 nt, Human
cauacuugaacguuuucuaauug

SEQ ID NO: 3863981 - RNA, 21 nt, Human
cauacuugaagggccagagcc

SEQ ID NO: 3863982 - RNA, 23 nt, Human
cauacuugaagggccagagccag

SEQ ID NO: 3863983 - RNA, 14 nt, Human
cauacuuuccugua

SEQ ID NO: 3863984 - RNA, 16 nt, Human
cauacuuuguauuuug

SEQ ID NO: 3863985 - RNA, 12 nt, Human
cauacuuugucu

SEQ ID NO: 3863986 - RNA, 16 nt, Human
cauacuuugucugaaa

SEQ ID NO: 3863987 - RNA, 18 nt, Human
cauacuuugucugaaaaa

SEQ ID NO: 3863988 - RNA, 16 nt, Human
cauacuuuuuaaaugu

SEQ ID NO: 3863989 - RNA, 20 nt, Human
cauacuuuuuaaauguaaag

SEQ ID NO: 3863990 - RNA, 14 nt, Human
cauagaaacaugac

SEQ ID NO: 3863991 - RNA, 19 nt, Human
cauagaaacaugacacuga

SEQ ID NO: 3863992 - RNA, 20 nt, Human
cauagaaauggaaauuuugc

SEQ ID NO: 3863993 - RNA, 23 nt, Human
cauagaaauguaacuuuuguaag

SEQ ID NO: 3863994 - RNA, 20 nt, Human
cauagaacuggguaaaugca

SEQ ID NO: 3863995 - RNA, 14 nt, Human
cauagaauaaaauu

SEQ ID NO: 3863996 - RNA, 15 nt, Human
cauagaauagcaugu

SEQ ID NO: 3863997 - RNA, 19 nt, Human
cauagacagaagaaacaag

SEQ ID NO: 3863998 - RNA, 20 nt, Human
cauagacagaagaaacaagg

SEQ ID NO: 3863999 - RNA, 14 nt, Human
cauagacaugaaag

SEQ ID NO: 3864000 - RNA, 15 nt, Human
cauagacccucucaa

SEQ ID NO: 3864001 - RNA, 17 nt, Human
cauagaccuuuucauuu

SEQ ID NO: 3864002 - RNA, 15 nt, Human
cauagacuagagaaa

SEQ ID NO: 3864003 - RNA, 16 nt, Human
cauagacuagagaaac

SEQ ID NO: 3864004 - RNA, 18 nt, Human
cauagagacuugggaaug

SEQ ID NO: 3864005 - RNA, 14 nt, Human
cauagagcagcacu

SEQ ID NO: 3864006 - RNA, 21 nt, Human
cauagaggugagggaagccug

SEQ ID NO: 3864007 - RNA, 14 nt, Human
cauagaguacacug

SEQ ID NO: 3864008 - RNA, 18 nt, Human
cauagaguuuaacacaag

SEQ ID NO: 3864009 - RNA, 16 nt, Human
cauagauaauauuguu

SEQ ID NO: 3864010 - RNA, 17 nt, Human
cauagauaauauuguuu

SEQ ID NO: 3864011 - RNA, 22 nt, Human
cauagauaauauuguuugguaa

SEQ ID NO: 3864012 - RNA, 15 nt, Human
cauagaucuucugaa

SEQ ID NO: 3864013 - RNA, 15 nt, Human
cauagaugcagguga

SEQ ID NO: 3864014 - RNA, 23 nt, Human
cauagaugucccuuucuuggcca

SEQ ID NO: 3864015 - RNA, 16 nt, Human
cauagauguuuuggua

SEQ ID NO: 3864016 - RNA, 18 nt, Human
cauagauuaauggcacug

SEQ ID NO: 3864017 - RNA, 20 nt, Human
cauagauuaauggcacugau

SEQ ID NO: 3864018 - RNA, 14 nt, Human
cauagauucaccug

SEQ ID NO: 3864019 - RNA, 20 nt, Human
cauagauucaccuguaaaac

SEQ ID NO: 3864020 - RNA, 21 nt, Human
cauagauucaccuguaaaacu

SEQ ID NO: 3864021 - RNA, 23 nt, Human
cauagauucaccuguaaaacuuu

SEQ ID NO: 3864022 - RNA, 18 nt, Human
cauagauugagaaguuuu

SEQ ID NO: 3864023 - RNA, 16 nt, Human
cauagauuuauuuuuc

SEQ ID NO: 3864024 - RNA, 23 nt, Human
cauagauuuauuuuucaguucca

SEQ ID NO: 3864025 - RNA, 15 nt, Human
cauagcaagacacau

SEQ ID NO: 3864026 - RNA, 22 nt, Human
cauagcaccuaacaacauugua

SEQ ID NO: 3864027 - RNA, 13 nt, Human
cauagcacuuccc

SEQ ID NO: 3864028 - RNA, 23 nt, Human
cauagcagagaaugaaagggccc

SEQ ID NO: 3864029 - RNA, 14 nt, Human
cauagcagaucugu

SEQ ID NO: 3864030 - RNA, 16 nt, Human
cauagcagaucuguuu

SEQ ID NO: 3864031 - RNA, 20 nt, Human
cauagcagcuuauucacaag

SEQ ID NO: 3864032 - RNA, 14 nt, Human
cauagcaguauaug

SEQ ID NO: 3864033 - RNA, 21 nt, Human
cauagcauagcuagagauugg

SEQ ID NO: 3864034 - RNA, 18 nt, Human
cauagcaugacauuucuu

SEQ ID NO: 3864035 - RNA, 11 nt, Human
cauagcauuca

SEQ ID NO: 3864036 - RNA, 17 nt, Human
cauagcccaucccugcc

SEQ ID NO: 3864037 - RNA, 19 nt, Human
cauagcccucacccugggg

SEQ ID NO: 3864038 - RNA, 18 nt, Human
cauagcgggggccuaaaa

SEQ ID NO: 3864039 - RNA, 21 nt, Human
cauagcuaagaaauaaaacug

SEQ ID NO: 3864040 - RNA, 22 nt, Human
cauagcuacccaaaagagaaaa

SEQ ID NO: 3864041 - RNA, 14 nt, Human
cauagcuccugcuc

SEQ ID NO: 3864042 - RNA, 13 nt, Human
cauagcugcugcc

SEQ ID NO: 3864043 - RNA, 20 nt, Human
cauagcugguuccugcuaga

SEQ ID NO: 3864044 - RNA, 15 nt, Human
cauagcugucuagag

SEQ ID NO: 3864045 - RNA, 13 nt, Human
cauagcugugauu

SEQ ID NO: 3864046 - RNA, 20 nt, Human
cauagcuuauuauugaagga

SEQ ID NO: 3864047 - RNA, 16 nt, Human
cauaggaccuuuccac

SEQ ID NO: 3864048 - RNA, 18 nt, Human
cauaggaccuuuccacca

SEQ ID NO: 3864049 - RNA, 17 nt, Human
cauaggaggcuucuguu

SEQ ID NO: 3864050 - RNA, 16 nt, Human
cauaggaguuuggagg

SEQ ID NO: 3864051 - RNA, 21 nt, Human
cauaggcaccuuuuacuguga

SEQ ID NO: 3864052 - RNA, 15 nt, Human
cauaggcccacacac

SEQ ID NO: 3864053 - RNA, 16 nt, Human
cauaggccugcuuugu

SEQ ID NO: 3864054 - RNA, 19 nt, Human
cauaggccugggugcuggc

SEQ ID NO: 3864055 - RNA, 15 nt, Human
cauagggucucuuca

SEQ ID NO: 3864056 - RNA, 17 nt, Human
cauagggucucuucagg

SEQ ID NO: 3864057 - RNA, 23 nt, Human
cauagguagaauguaaagcuugu

SEQ ID NO: 3864058 - RNA, 23 nt, Human
cauaggugauccauguaacugcc

SEQ ID NO: 3864059 - RNA, 16 nt, Human
cauaggugaucucauu

SEQ ID NO: 3864060 - RNA, 15 nt, Human
cauagguuaaaaaaa

SEQ ID NO: 3864061 - RNA, 22 nt, Human
cauagguuaaaaaaaaaaguca

SEQ ID NO: 3864062 - RNA, 20 nt, Human
cauaguaacugacaugauua

SEQ ID NO: 3864063 - RNA, 22 nt, Human
cauaguaacuucuuauggaauu

SEQ ID NO: 3864064 - RNA, 20 nt, Human
cauaguaaguucagcacuug

SEQ ID NO: 3864065 - RNA, 19 nt, Human
cauaguaccauuuauacaa

SEQ ID NO: 3864066 - RNA, 21 nt, Human
cauaguacucuuuguagcaaa

SEQ ID NO: 3864067 - RNA, 23 nt, Human
cauaguauauuaaaaaugguaaa

SEQ ID NO: 3864068 - RNA, 17 nt, Human
cauaguaugguggcugg

SEQ ID NO: 3864069 - RNA, 13 nt, Human
cauagucccagcu

SEQ ID NO: 3864070 - RNA, 20 nt, Human
cauagucugaagugaaguac

SEQ ID NO: 3864071 - RNA, 19 nt, Human
cauagucuggcuguaccca

SEQ ID NO: 3864072 - RNA, 19 nt, Human
cauagugaaaauuguuuag

SEQ ID NO: 3864073 - RNA, 20 nt, Human
cauagugacuuuucaaguau

SEQ ID NO: 3864074 - RNA, 20 nt, Human
cauagugcuaacaugaagac

SEQ ID NO: 3864075 - RNA, 17 nt, Human
cauagugcugggaugga

SEQ ID NO: 3864076 - RNA, 22 nt, Human
cauaguggcuuaaaacaacacu

SEQ ID NO: 3864077 - RNA, 15 nt, Human
cauaguggugcagag

SEQ ID NO: 3864078 - RNA, 14 nt, Human
cauaguuacugugu

SEQ ID NO: 3864079 - RNA, 18 nt, Human
cauaguuacuguguaaac

SEQ ID NO: 3864080 - RNA, 19 nt, Human
cauaguucccauguuaaau

SEQ ID NO: 3864081 - RNA, 22 nt, Human
cauaguucuagugcagcugaaa

SEQ ID NO: 3864082 - RNA, 16 nt, Human
cauaguuucuuuauuu

SEQ ID NO: 3864083 - RNA, 18 nt, Human
cauaguuuggcauuugca

SEQ ID NO: 3864084 - RNA, 21 nt, Human
cauaguuugggcuuguaccac

SEQ ID NO: 3864085 - RNA, 15 nt, Human
cauaguuuuauuuau

SEQ ID NO: 3864086 - RNA, 20 nt, Human
cauaguuuugaugacuggca

SEQ ID NO: 3864087 - RNA, 14 nt, Human
cauauaaaauaaug

SEQ ID NO: 3864088 - RNA, 22 nt, Human
cauauaaaauaaugcaaagaau

SEQ ID NO: 3864089 - RNA, 18 nt, Human
cauauaaaauggcaacaa

SEQ ID NO: 3864090 - RNA, 21 nt, Human
cauauaaaauggcaacaaacu

SEQ ID NO: 3864091 - RNA, 11 nt, Human
cauauaagaca

SEQ ID NO: 3864092 - RNA, 18 nt, Human
cauauaagacaaauauuc

SEQ ID NO: 3864093 - RNA, 23 nt, Human
cauauaagauucauauuuacuuc

SEQ ID NO: 3864094 - RNA, 17 nt, Human
cauauaagcccuugauu

SEQ ID NO: 3864095 - RNA, 16 nt, Human
cauauaagugauugcu

SEQ ID NO: 3864096 - RNA, 20 nt, Human
cauauaaguuugaaggaaac

SEQ ID NO: 3864097 - RNA, 21 nt, Human
cauauaaguuugaaggaaaca

SEQ ID NO: 3864098 - RNA, 23 nt, Human
cauauaaguuugaaggaaacagu

SEQ ID NO: 3864099 - RNA, 22 nt, Human
cauauaauagguuugaaaguac

SEQ ID NO: 3864100 - RNA, 15 nt, Human
cauauaauauauguu

SEQ ID NO: 3864101 - RNA, 17 nt, Human
cauauaauauauguuuu

SEQ ID NO: 3864102 - RNA, 14 nt, Human
cauauacacacaca

SEQ ID NO: 3864103 - RNA, 23 nt, Human
cauauacacgaauagacaucaaa

SEQ ID NO: 3864104 - RNA, 12 nt, Human
cauauacacuug

SEQ ID NO: 3864105 - RNA, 19 nt, Human
cauauaccagcaauauauc

SEQ ID NO: 3864106 - RNA, 17 nt, Human
cauauaccuauaaugug

SEQ ID NO: 3864107 - RNA, 20 nt, Human
cauauagagaugaaguuugu

SEQ ID NO: 3864108 - RNA, 19 nt, Human
cauccuccaguaccuugcu

SEQ ID NO: 3864109 - RNA, 13 nt, Human
cauccucccaagg

SEQ ID NO: 3864110 - RNA, 21 nt, Human
cauccuccccuucccugcaaa

SEQ ID NO: 3864111 - RNA, 16 nt, Human
cauccuccguccagcc

SEQ ID NO: 3864112 - RNA, 19 nt, Human
cauccuccguccagccgcc

SEQ ID NO: 3864113 - RNA, 20 nt, Human
cauccuccucccacccggcu

SEQ ID NO: 3864114 - RNA, 15 nt, Human
cauccuccuccuucc

SEQ ID NO: 3864115 - RNA, 18 nt, Human
cauccuccuccuuccuag

SEQ ID NO: 3864116 - RNA, 18 nt, Human
cauccucuggagccagcc

SEQ ID NO: 3864117 - RNA, 11 nt, Human
cauccucuuuc

SEQ ID NO: 3864118 - RNA, 21 nt, Human
cauccucuuucucuuuucuag

SEQ ID NO: 3864119 - RNA, 16 nt, Human
cauccugaacagcaug

SEQ ID NO: 3864120 - RNA, 17 nt, Human
cauccugacucugcccc

SEQ ID NO: 3864121 - RNA, 13 nt, Human
cauccugagcccc

SEQ ID NO: 3864122 - RNA, 14 nt, Human
cauccugagccccg

SEQ ID NO: 3864123 - RNA, 19 nt, Human
cauccugaggcuccacuug

SEQ ID NO: 3864124 - RNA, 13 nt, Human
cauccugccagcc

SEQ ID NO: 3864125 - RNA, 14 nt, Human
cauccugccagccc

SEQ ID NO: 3864126 - RNA, 15 nt, Human
cauccugccagcccc

SEQ ID NO: 3864127 - RNA, 21 nt, Human
cauccugccuuagagccaggc

SEQ ID NO: 3864128 - RNA, 11 nt, Human
cauccuggccc

SEQ ID NO: 3864129 - RNA, 16 nt, Human
cauccuggcccagggc

SEQ ID NO: 3864130 - RNA, 19 nt, Human
cauccuggcccagggcauc

SEQ ID NO: 3864131 - RNA, 14 nt, Human
cauccuggcccauc

SEQ ID NO: 3864132 - RNA, 15 nt, Human
cauccuggcccauca

SEQ ID NO: 3864133 - RNA, 14 nt, Human
cauccuggccuggc

SEQ ID NO: 3864134 - RNA, 18 nt, Human
cauccuggccuggcacau

SEQ ID NO: 3864135 - RNA, 13 nt, Human
cauccuggguaau

SEQ ID NO: 3864136 - RNA, 19 nt, Human
cauccuguauaagcacuga

SEQ ID NO: 3864137 - RNA, 20 nt, Human
cauccugucccaccaugcag

SEQ ID NO: 3864138 - RNA, 19 nt, Human
cauccugugccuccaucag

SEQ ID NO: 3864139 - RNA, 23 nt, Human
cauccuguguguuaagcucugcu

SEQ ID NO: 3864140 - RNA, 11 nt, Human
cauccuuaaag

SEQ ID NO: 3864141 - RNA, 19 nt, Human
cauccuuauccuucaucuu

SEQ ID NO: 3864142 - RNA, 21 nt, Human
cauccuucaagaacucugggc

SEQ ID NO: 3864143 - RNA, 15 nt, Human
cauccuucccacucu

SEQ ID NO: 3864144 - RNA, 16 nt, Human
cauccuucccacucug

SEQ ID NO: 3864145 - RNA, 22 nt, Human
cauccuucccugucugccaggg

SEQ ID NO: 3864146 - RNA, 13 nt, Human
cauccuuccuaua

SEQ ID NO: 3864147 - RNA, 18 nt, Human
cauccuuccucacaccag

SEQ ID NO: 3864148 - RNA, 15 nt, Human
cauccuuccuuccca

SEQ ID NO: 3864149 - RNA, 15 nt, Human
cauccuuuacguguu

SEQ ID NO: 3864150 - RNA, 22 nt, Human
cauccuuuaggguucugccucu

SEQ ID NO: 3864151 - RNA, 21 nt, Human
cauccuuucacuucuuucccu

SEQ ID NO: 3864152 - RNA, 18 nt, Human
cauccuuucugccucuca

SEQ ID NO: 3864153 - RNA, 19 nt, Human
cauccuuugcagggcagcc

SEQ ID NO: 3864154 - RNA, 17 nt, Human
cauccuuuucuccuauc

SEQ ID NO: 3864155 - RNA, 17 nt, Human
cauccuuuucugcagag

SEQ ID NO: 3864156 - RNA, 12 nt, Human
caucgcaaugua

SEQ ID NO: 3864157 - RNA, 14 nt, Human
caucgcacugugga

SEQ ID NO: 3864158 - RNA, 15 nt, Human
caucgccacaaacuc

SEQ ID NO: 3864159 - RNA, 20 nt, Human
caucgccagaggugcuucac

SEQ ID NO: 3864160 - RNA, 20 nt, Human
caucgccagcugaugacuca

SEQ ID NO: 3864161 - RNA, 20 nt, Human
caucggacaagacccccagc

SEQ ID NO: 3864162 - RNA, 16 nt, Human
caucggccuagggccc

SEQ ID NO: 3864163 - RNA, 15 nt, Human
caucguaggugauuu

SEQ ID NO: 3864164 - RNA, 17 nt, Human
caucgucuucuuggcca

SEQ ID NO: 3864165 - RNA, 18 nt, Human
caucgugaagaagccugu

SEQ ID NO: 3864166 - RNA, 22 nt, Human
caucguuuucuucacuguccuc

SEQ ID NO: 3864167 - RNA, 19 nt, Human
caucuaaaaauauacaugu

SEQ ID NO: 3864168 - RNA, 17 nt, Human
caucuaaacuaagaugu

SEQ ID NO: 3864169 - RNA, 15 nt, Human
caucuaaacugcccc

SEQ ID NO: 3864170 - RNA, 15 nt, Human
caucuaaacuuuaau

SEQ ID NO: 3864171 - RNA, 16 nt, Human
caucuaagccugaagg

SEQ ID NO: 3864172 - RNA, 16 nt, Human
caucuaagcugcagcu

SEQ ID NO: 3864173 - RNA, 23 nt, Human
caucuaagcugcagcuuccuguc

SEQ ID NO: 3864174 - RNA, 20 nt, Human
caucuaaguuauaagacucu

SEQ ID NO: 3864175 - RNA, 15 nt, Human
caucuaauucugauu

SEQ ID NO: 3864176 - RNA, 19 nt, Human
caucuaccuagauuuaaua

SEQ ID NO: 3864177 - RNA, 21 nt, Human
caucuaccuuuucucuucauu

SEQ ID NO: 3864178 - RNA, 14 nt, Human
caucuacucccaag

SEQ ID NO: 3864179 - RNA, 14 nt, Human
caucuacuucaggc

SEQ ID NO: 3864180 - RNA, 16 nt, Human
caucuagagcuugaug

SEQ ID NO: 3864181 - RNA, 20 nt, Human
caucuagaggcuuccuucau

SEQ ID NO: 3864182 - RNA, 22 nt, Human
caucuagaggcuuccuucauuu

SEQ ID NO: 3864183 - RNA, 14 nt, Human
caucuagcaaaugu

SEQ ID NO: 3864184 - RNA, 17 nt, Human
caucuagccagccccuc

SEQ ID NO: 3864185 - RNA, 17 nt, Human
caucuagguaaauuaca

SEQ ID NO: 3864186 - RNA, 18 nt, Human
caucuagguaauuuuuac

SEQ ID NO: 3864187 - RNA, 13 nt, Human
caucuaguuuuaa

SEQ ID NO: 3864188 - RNA, 13 nt, Human
caucuaucugugc

SEQ ID NO: 3864189 - RNA, 14 nt, Human
caucuaucugugcu

SEQ ID NO: 3864190 - RNA, 20 nt, Human
caucuaugggagagugucaa

SEQ ID NO: 3864191 - RNA, 20 nt, Human
caucuauucucuccaaaaau

SEQ ID NO: 3864192 - RNA, 13 nt, Human
caucuauuucuga

SEQ ID NO: 3864193 - RNA, 11 nt, Human
caucuauuuug

SEQ ID NO: 3864194 - RNA, 19 nt, Human
caucuauuuugaugcagca

SEQ ID NO: 3864195 - RNA, 14 nt, Human
caucucaaaauuau

SEQ ID NO: 3864196 - RNA, 20 nt, Human
caucucaacaggccucaggg

SEQ ID NO: 3864197 - RNA, 21 nt, Human
caucucaacaggccucagggc

SEQ ID NO: 3864198 - RNA, 22 nt, Human
caucucaaggaauaaugggcuu

SEQ ID NO: 3864199 - RNA, 16 nt, Human
caucucacacaugagc

SEQ ID NO: 3864200 - RNA, 17 nt, Human
caucucaccuccugcug

SEQ ID NO: 3864201 - RNA, 21 nt, Human
caucucagcucaucuucacug

SEQ ID NO: 3864202 - RNA, 15 nt, Human
caucucaggccaccu

SEQ ID NO: 3864203 - RNA, 21 nt, Human
caucucaggccaccugccccc

SEQ ID NO: 3864204 - RNA, 22 nt, Human
caucucaggccaccugcccccu

SEQ ID NO: 3864205 - RNA, 18 nt, Human
caucucaggccagagcca

SEQ ID NO: 3864206 - RNA, 18 nt, Human
caucucaggccucccuca

SEQ ID NO: 3864207 - RNA, 19 nt, Human
caucucaggggccagagga

SEQ ID NO: 3864208 - RNA, 21 nt, Human
caucucaucaugucuauuguc

SEQ ID NO: 3864209 - RNA, 15 nt, Human
caucucauccaucaa

SEQ ID NO: 3864210 - RNA, 19 nt, Human
caucucaugaggggagagg

SEQ ID NO: 3864211 - RNA, 20 nt, Human
caucucauguaucaucugga

SEQ ID NO: 3864212 - RNA, 22 nt, Human
caucucauucaaaccccacccu

SEQ ID NO: 3864213 - RNA, 17 nt, Human
caucucauuccaacuuc

SEQ ID NO: 3864214 - RNA, 14 nt, Human
caucuccaagaaug

SEQ ID NO: 3864215 - RNA, 17 nt, Human
caucuccaagaaugcug

SEQ ID NO: 3864216 - RNA, 13 nt, Human
caucuccaagcag

SEQ ID NO: 3864217 - RNA, 16 nt, Human
caucuccaccugcucc

SEQ ID NO: 3864218 - RNA, 21 nt, Human
caucuccagggaguccccucc

SEQ ID NO: 3864219 - RNA, 14 nt, Human
caucucccacccug

SEQ ID NO: 3864220 - RNA, 15 nt, Human
caucucccacccugu

SEQ ID NO: 3864221 - RNA, 17 nt, Human
caucucccagauaaugu

SEQ ID NO: 3864222 - RNA, 22 nt, Human
caucucccagauaaugugaaaa

SEQ ID NO: 3864223 - RNA, 14 nt, Human
caucuccccucagc

SEQ ID NO: 3864224 - RNA, 16 nt, Human
caucuccccucagcuc

SEQ ID NO: 3864225 - RNA, 15 nt, Human
caucucccucccaca

SEQ ID NO: 3864226 - RNA, 22 nt, Human
caucucccucgaacccacacug

SEQ ID NO: 3864227 - RNA, 23 nt, Human
caucucccucgaacccacacugc

SEQ ID NO: 3864228 - RNA, 15 nt, Human
caucucccugccugg

SEQ ID NO: 3864229 - RNA, 18 nt, Human
caucucccugccuggccc

SEQ ID NO: 3864230 - RNA, 15 nt, Human
caucucccugcuuug

SEQ ID NO: 3864231 - RNA, 17 nt, Human
caucucccuuuuccaug

SEQ ID NO: 3864232 - RNA, 13 nt, Human
caucuccugugca

SEQ ID NO: 3864233 - RNA, 19 nt, Human
caucuccugugcaugggug

SEQ ID NO: 3864234 - RNA, 20 nt, Human
caucuccugugcauggguga

SEQ ID NO: 3864235 - RNA, 21 nt, Human
caucucgccaccccuccuucc

SEQ ID NO: 3864236 - RNA, 14 nt, Human
caucucgcucccuc

SEQ ID NO: 3864237 - RNA, 19 nt, Human
caucucgcucccucccagg

SEQ ID NO: 3864238 - RNA, 14 nt, Human
caucucggagcauc

SEQ ID NO: 3864239 - RNA, 20 nt, Human
caucucggagcaucccggag

SEQ ID NO: 3864240 - RNA, 16 nt, Human
caucucuaacagcuca

SEQ ID NO: 3864241 - RNA, 19 nt, Human
caucucuaacagcucagga

SEQ ID NO: 3864242 - RNA, 21 nt, Human
caucucuaacagcucaggauc

SEQ ID NO: 3864243 - RNA, 22 nt, Human
caucucuaacagcucaggaucu

SEQ ID NO: 3864244 - RNA, 16 nt, Human
caucucuacaaaaagc

SEQ ID NO: 3864245 - RNA, 18 nt, Human
caucucucugcccaaccc

SEQ ID NO: 3864246 - RNA, 14 nt, Human
caucucucuggccc

SEQ ID NO: 3864247 - RNA, 15 nt, Human
caucucucuggcccu

SEQ ID NO: 3864248 - RNA, 14 nt, Human
caucucucuuuaau

SEQ ID NO: 3864249 - RNA, 18 nt, Human
caucucugaacuucagcu

SEQ ID NO: 3864250 - RNA, 13 nt, Human
caucucugacuuu

SEQ ID NO: 3864251 - RNA, 15 nt, Human
caucucugcaaucuu

SEQ ID NO: 3864252 - RNA, 21 nt, Human
caucucugcuugagucagguu

SEQ ID NO: 3864253 - RNA, 15 nt, Human
caucuuuuguauuaa

SEQ ID NO: 3864254 - RNA, 21 nt, Human
caucuuuugugagauguaauu

SEQ ID NO: 3864255 - RNA, 21 nt, Human
caucuuuuguuacucuuggga

SEQ ID NO: 3864256 - RNA, 21 nt, Human
caucuuuuuaaccugcaaaau

SEQ ID NO: 3864257 - RNA, 23 nt, Human
caugaaaaagcagcuaccaggug

SEQ ID NO: 3864258 - RNA, 15 nt, Human
caugaaaacacauuu

SEQ ID NO: 3864259 - RNA, 21 nt, Human
caugaaaaccauuaccugacu

SEQ ID NO: 3864260 - RNA, 22 nt, Human
caugaaaaccauuaccugacuu

SEQ ID NO: 3864261 - RNA, 22 nt, Human
caugaaaacguuuuauuguguu

SEQ ID NO: 3864262 - RNA, 22 nt, Human
caugaaaaugcaacaacaugua

SEQ ID NO: 3864263 - RNA, 17 nt, Human
caugaaaauguguguuu

SEQ ID NO: 3864264 - RNA, 15 nt, Human
caugaaaauucagaa

SEQ ID NO: 3864265 - RNA, 11 nt, Human
caugaaaauuu

SEQ ID NO: 3864266 - RNA, 15 nt, Human
caugaaacagaaaca

SEQ ID NO: 3864267 - RNA, 22 nt, Human
caugaaaccuuauuuuuuccca

SEQ ID NO: 3864268 - RNA, 15 nt, Human
caugaaacuccaccu

SEQ ID NO: 3864269 - RNA, 12 nt, Human
caugaaagaaaa

SEQ ID NO: 3864270 - RNA, 21 nt, Human
caugaaauaaaauauaucuua

SEQ ID NO: 3864271 - RNA, 14 nt, Human
caugaaauaugcau

SEQ ID NO: 3864272 - RNA, 20 nt, Human
caugaaaugaacacaaauua

SEQ ID NO: 3864273 - RNA, 21 nt, Human
caugaaaugcuaugucauuuc

SEQ ID NO: 3864274 - RNA, 16 nt, Human
caugaaaugugaauuu

SEQ ID NO: 3864275 - RNA, 20 nt, Human
caugaaaugugaauuuuuau

SEQ ID NO: 3864276 - RNA, 14 nt, Human
caugaaauuuuuaa

SEQ ID NO: 3864277 - RNA, 16 nt, Human
caugaaauuuuuguaa

SEQ ID NO: 3864278 - RNA, 22 nt, Human
caugaacagaaaacauucugau

SEQ ID NO: 3864279 - RNA, 16 nt, Human
caugaacauguuccug

SEQ ID NO: 3864280 - RNA, 20 nt, Human
caugaaccucaagcugcauc

SEQ ID NO: 3864281 - RNA, 23 nt, Human
caugaacuucgcaucaaaagaca

SEQ ID NO: 3864282 - RNA, 14 nt, Human
caugaagacaggau

SEQ ID NO: 3864283 - RNA, 17 nt, Human
caugaagaccacaucca

SEQ ID NO: 3864284 - RNA, 19 nt, Human
caugaagaccuuuuucugc

SEQ ID NO: 3864285 - RNA, 12 nt, Human
caugaagagaag

SEQ ID NO: 3864286 - RNA, 17 nt, Human
caugaagauauuuuucc

SEQ ID NO: 3864287 - RNA, 17 nt, Human
caugaagccacagccca

SEQ ID NO: 3864288 - RNA, 21 nt, Human
caugaagccacagcccaggcc

SEQ ID NO: 3864289 - RNA, 24 nt, Human
caugaagccacagcccaggccucc

SEQ ID NO: 3864290 - RNA, 22 nt, Human
caugaagccacgggugccagaa

SEQ ID NO: 3864291 - RNA, 11 nt, Human
caugaagccug

SEQ ID NO: 3864292 - RNA, 13 nt, Human
caugaagccugug

SEQ ID NO: 3864293 - RNA, 15 nt, Human
caugaagcuguugug

SEQ ID NO: 3864294 - RNA, 22 nt, Human
caugaaggaugccaagaaguuu

SEQ ID NO: 3864295 - RNA, 22 nt, Human
caugaagggacccuuugggggu

SEQ ID NO: 3864296 - RNA, 17 nt, Human
caugaagguaaauaaaa

SEQ ID NO: 3864297 - RNA, 21 nt, Human
caugaagguaaauaaaaagaa

SEQ ID NO: 3864298 - RNA, 22 nt, Human
caugaaguaauaugcacacauu

SEQ ID NO: 3864299 - RNA, 13 nt, Human
caugaaguauuuu

SEQ ID NO: 3864300 - RNA, 19 nt, Human
caugaagucguugugaggg

SEQ ID NO: 3864301 - RNA, 24 nt, Human
caugaagucuuaaggacaaagugc

SEQ ID NO: 3864302 - RNA, 20 nt, Human
caugaaguguguuuccuuca

SEQ ID NO: 3864303 - RNA, 21 nt, Human
caugaauauuuaguguucaua

SEQ ID NO: 3864304 - RNA, 16 nt, Human
caugaaucaaaagugc

SEQ ID NO: 3864305 - RNA, 17 nt, Human
caugaaucgcuucucuu

SEQ ID NO: 3864306 - RNA, 20 nt, Human
caugaaucgcuucucuuuug

SEQ ID NO: 3864307 - RNA, 15 nt, Human
caugaaucugcaaug

SEQ ID NO: 3864308 - RNA, 14 nt, Human
caugaaucugucuc

SEQ ID NO: 3864309 - RNA, 13 nt, Human
caugaauguaaau

SEQ ID NO: 3864310 - RNA, 14 nt, Human
caugaauguaaauu

SEQ ID NO: 3864311 - RNA, 18 nt, Human
caugaauguaucaggaaa

SEQ ID NO: 3864312 - RNA, 22 nt, Human
caugaauuaccuggauguucuu

SEQ ID NO: 3864313 - RNA, 18 nt, Human
caugaauuauuacagugu

SEQ ID NO: 3864314 - RNA, 18 nt, Human
caugaauuuauugcacau

SEQ ID NO: 3864315 - RNA, 12 nt, Human
caugaauuugua

SEQ ID NO: 3864316 - RNA, 18 nt, Human
caugaauuuguaaugucu

SEQ ID NO: 3864317 - RNA, 19 nt, Human
caugaauuuguaaugucuu

SEQ ID NO: 3864318 - RNA, 16 nt, Human
caugaauuugugaagg

SEQ ID NO: 3864319 - RNA, 15 nt, Human
caugaauuuuagcuu

SEQ ID NO: 3864320 - RNA, 17 nt, Human
caugaauuuuagcuuuu

SEQ ID NO: 3864321 - RNA, 19 nt, Human
caugaauuuuagcuuuugu

SEQ ID NO: 3864322 - RNA, 13 nt, Human
caugacaaagacu

SEQ ID NO: 3864323 - RNA, 15 nt, Human
caugacaagccccag

SEQ ID NO: 3864324 - RNA, 18 nt, Human
caugacaagccccaggca

SEQ ID NO: 3864325 - RNA, 19 nt, Human
caugacaagccccaggcag

SEQ ID NO: 3864326 - RNA, 20 nt, Human
caugacaagccccaggcagg

SEQ ID NO: 3864327 - RNA, 16 nt, Human
caugacaauguuguag

SEQ ID NO: 3864328 - RNA, 21 nt, Human
caugacacccgugagcgccug

SEQ ID NO: 3864329 - RNA, 15 nt, Human
caugacacugaaaug

SEQ ID NO: 3864330 - RNA, 16 nt, Human
caugacacugaaaugc

SEQ ID NO: 3864331 - RNA, 13 nt, Human
caugacacugacc

SEQ ID NO: 3864332 - RNA, 15 nt, Human
caugacacugaccuu

SEQ ID NO: 3864333 - RNA, 14 nt, Human
caugacagaaaaua

SEQ ID NO: 3864334 - RNA, 16 nt, Human
caugacagaaaauaug

SEQ ID NO: 3864335 - RNA, 21 nt, Human
caugacagaaaauauguauua

SEQ ID NO: 3864336 - RNA, 18 nt, Human
caugacauaacagugcag

SEQ ID NO: 3864337 - RNA, 20 nt, Human
caugacauaacagugcaggg

SEQ ID NO: 3864338 - RNA, 13 nt, Human
caugacauuucuu

SEQ ID NO: 3864339 - RNA, 14 nt, Human
caugaccaguaaag

SEQ ID NO: 3864340 - RNA, 13 nt, Human
caugacccaggcu

SEQ ID NO: 3864341 - RNA, 15 nt, Human
caugacccaggcugg

SEQ ID NO: 3864342 - RNA, 14 nt, Human
caugacccugccuc

SEQ ID NO: 3864343 - RNA, 15 nt, Human
caugacccugccucu

SEQ ID NO: 3864344 - RNA, 19 nt, Human
caugaccuaguuuuccaug

SEQ ID NO: 3864345 - RNA, 17 nt, Human
caugaccuccagcuuuc

SEQ ID NO: 3864346 - RNA, 14 nt, Human
caugaccuccaggg

SEQ ID NO: 3864347 - RNA, 22 nt, Human
caugaccugaucacuagccugu

SEQ ID NO: 3864348 - RNA, 16 nt, Human
caugaccugugaccag

SEQ ID NO: 3864349 - RNA, 23 nt, Human
caugacgacaaagcugcuaaauc

SEQ ID NO: 3864350 - RNA, 20 nt, Human
caugacucguauaugucuca

SEQ ID NO: 3864351 - RNA, 17 nt, Human
caugacucuuuauuguc

SEQ ID NO: 3864352 - RNA, 13 nt, Human
caugacugcauuu

SEQ ID NO: 3864353 - RNA, 13 nt, Human
caugacugcuugc

SEQ ID NO: 3864354 - RNA, 21 nt, Human
caugacuuuuccauguaucua

SEQ ID NO: 3864355 - RNA, 17 nt, Human
caugagaagagggccug

SEQ ID NO: 3864356 - RNA, 22 nt, Human
caugagaaguugauauagaaca

SEQ ID NO: 3864357 - RNA, 12 nt, Human
caugagaaucua

SEQ ID NO: 3864358 - RNA, 19 nt, Human
caugagaaucuauauuuaa

SEQ ID NO: 3864359 - RNA, 18 nt, Human
caugagacucagugcaga

SEQ ID NO: 3864360 - RNA, 15 nt, Human
caugagaggaggcag

SEQ ID NO: 3864361 - RNA, 17 nt, Human
caugagauguguggacu

SEQ ID NO: 3864362 - RNA, 16 nt, Human
caugagcaauucuccu

SEQ ID NO: 3864363 - RNA, 21 nt, Human
caugagcaccccaaggcugcg

SEQ ID NO: 3864364 - RNA, 18 nt, Human
caugagcaucaggccagg

SEQ ID NO: 3864365 - RNA, 17 nt, Human
caugagcauuggauaca

SEQ ID NO: 3864366 - RNA, 21 nt, Human
caugagccgcccaaggccuuc

SEQ ID NO: 3864367 - RNA, 18 nt, Human
caugagccucagcauccu

SEQ ID NO: 3864368 - RNA, 12 nt, Human
caugagccugcu

SEQ ID NO: 3864369 - RNA, 15 nt, Human
caugagccugcugga

SEQ ID NO: 3864370 - RNA, 16 nt, Human
caugagccugcuggaa

SEQ ID NO: 3864371 - RNA, 18 nt, Human
caugagccugcuggaagc

SEQ ID NO: 3864372 - RNA, 16 nt, Human
caugagcuauuuccau

SEQ ID NO: 3864373 - RNA, 14 nt, Human
caugagcuccagac

SEQ ID NO: 3864374 - RNA, 17 nt, Human
caugagcuccagacccc

SEQ ID NO: 3864375 - RNA, 22 nt, Human
caugaggaaagcaguugaaaug

SEQ ID NO: 3864376 - RNA, 23 nt, Human
caugaggaacaaggcaaggcugu

SEQ ID NO: 3864377 - RNA, 20 nt, Human
caugaggacaugauggagcg

SEQ ID NO: 3864378 - RNA, 22 nt, Human
caugaggacaugauggagcgca

SEQ ID NO: 3864379 - RNA, 20 nt, Human
caugaggacucuauucuuua

SEQ ID NO: 3864380 - RNA, 19 nt, Human
caugaggagaaaaaaagca

SEQ ID NO: 3864381 - RNA, 19 nt, Human
caugaggagauucugccuu

SEQ ID NO: 3864382 - RNA, 20 nt, Human
caugaggagauucugccuuu

SEQ ID NO: 3864383 - RNA, 21 nt, Human
caugaggagauucugccuuug

SEQ ID NO: 3864384 - RNA, 14 nt, Human
caugaggaggcaga

SEQ ID NO: 3864385 - RNA, 13 nt, Human
caugaggaggggc

SEQ ID NO: 3864386 - RNA, 21 nt, Human
caugaggaggggccccccugc

SEQ ID NO: 3864387 - RNA, 12 nt, Human
caugaggagggu

SEQ ID NO: 3864388 - RNA, 13 nt, Human
caugaggagggug

SEQ ID NO: 3864389 - RNA, 16 nt, Human
caugaggaguugcugu

SEQ ID NO: 3864390 - RNA, 24 nt, Human
caugaggcaaugucaggaacagaa

SEQ ID NO: 3864391 - RNA, 16 nt, Human
caugaggccacugcug

SEQ ID NO: 3864392 - RNA, 18 nt, Human
caugaggccacuggagac

SEQ ID NO: 3864393 - RNA, 15 nt, Human
caugagggaagaaua

SEQ ID NO: 3864394 - RNA, 19 nt, Human
caugagggaagaauaaaga

SEQ ID NO: 3864395 - RNA, 18 nt, Human
caugagggagaugccaug

SEQ ID NO: 3864396 - RNA, 17 nt, Human
caugagggaucacaggg

SEQ ID NO: 3864397 - RNA, 17 nt, Human
ccaaagcaagcaagagg

SEQ ID NO: 3864398 - RNA, 12 nt, Human
ccaaagcagggu

SEQ ID NO: 3864399 - RNA, 20 nt, Human
ccaaagccaauaacacacag

SEQ ID NO: 3864400 - RNA, 22 nt, Human
ccaaagccuccuccagccgcca

SEQ ID NO: 3864401 - RNA, 20 nt, Human
ccaaagcugacgaggcuggg

SEQ ID NO: 3864402 - RNA, 14 nt, Human
ccaaagcugagccu

SEQ ID NO: 3864403 - RNA, 15 nt, Human
ccaaagcugagccug

SEQ ID NO: 3864404 - RNA, 12 nt, Human
ccaaaggaaaaa

SEQ ID NO: 3864405 - RNA, 22 nt, Human
ccaaaggaaaaagcacaagaag

SEQ ID NO: 3864406 - RNA, 23 nt, Human
ccaaaggaaaaagcacaagaagc

SEQ ID NO: 3864407 - RNA, 17 nt, Human
ccaaaggacagccgccu

SEQ ID NO: 3864408 - RNA, 18 nt, Human
ccaaaggacgcacugagc

SEQ ID NO: 3864409 - RNA, 16 nt, Human
ccaaaggaggcuggca

SEQ ID NO: 3864410 - RNA, 18 nt, Human
ccaaaggaggcuggcagg

SEQ ID NO: 3864411 - RNA, 19 nt, Human
ccaaaggccauggagagcu

SEQ ID NO: 3864412 - RNA, 12 nt, Human
ccaaaggccccc

SEQ ID NO: 3864413 - RNA, 13 nt, Human
ccaaaggcuggug

SEQ ID NO: 3864414 - RNA, 21 nt, Human
ccaaaggcugguggcaagugc

SEQ ID NO: 3864415 - RNA, 19 nt, Human
ccaaagggagucugccagg

SEQ ID NO: 3864416 - RNA, 18 nt, Human
ccaaaggggacaggccuc

SEQ ID NO: 3864417 - RNA, 19 nt, Human
ccaaaggggacaggccuca

SEQ ID NO: 3864418 - RNA, 20 nt, Human
ccaaaggggaccccuaugaa

SEQ ID NO: 3864419 - RNA, 17 nt, Human
ccaaaguaaaagaaacc

SEQ ID NO: 3864420 - RNA, 18 nt, Human
ccaaaguacacuguuuca

SEQ ID NO: 3864421 - RNA, 22 nt, Human
ccaaaguacacuguuucaaacu

SEQ ID NO: 3864422 - RNA, 13 nt, Human
ccaaaguauuuuu

SEQ ID NO: 3864423 - RNA, 15 nt, Human
ccaaagucucuaauu

SEQ ID NO: 3864424 - RNA, 17 nt, Human
ccaaagugaccuaccca

SEQ ID NO: 3864425 - RNA, 15 nt, Human
ccaaagugcugagau

SEQ ID NO: 3864426 - RNA, 19 nt, Human
ccaaagugcugggauuaca

SEQ ID NO: 3864427 - RNA, 22 nt, Human
ccaaagugcugggauuacaggu

SEQ ID NO: 3864428 - RNA, 19 nt, Human
ccaaagugguauagaaaug

SEQ ID NO: 3864429 - RNA, 22 nt, Human
ccaaagugguauagaaaugcug

SEQ ID NO: 3864430 - RNA, 16 nt, Human
ccaaagugguuucagc

SEQ ID NO: 3864431 - RNA, 14 nt, Human
ccaaaguucuaaua

SEQ ID NO: 3864432 - RNA, 23 nt, Human
ccaaaguuguuguaaccugcugu

SEQ ID NO: 3864433 - RNA, 15 nt, Human
ccaaauaagaaaccu

SEQ ID NO: 3864434 - RNA, 16 nt, Human
ccaaauaagaaaccua

SEQ ID NO: 3864435 - RNA, 19 nt, Human
ccaaauagugugaaauaua

SEQ ID NO: 3864436 - RNA, 18 nt, Human
ccaaauauagcguuccca

SEQ ID NO: 3864437 - RNA, 18 nt, Human
ccaaauaucaccaggacu

SEQ ID NO: 3864438 - RNA, 20 nt, Human
ccaaauauuaggcuuaaaaa

SEQ ID NO: 3864439 - RNA, 22 nt, Human
ccaaaucaaaagacuuuuuccu

SEQ ID NO: 3864440 - RNA, 23 nt, Human
ccaaaucagcugcuacuacuccu

SEQ ID NO: 3864441 - RNA, 23 nt, Human
ccaaauccgaaccuccucuguga

SEQ ID NO: 3864442 - RNA, 15 nt, Human
ccaaauccgcucucu

SEQ ID NO: 3864443 - RNA, 13 nt, Human
ccaaauccucucc

SEQ ID NO: 3864444 - RNA, 20 nt, Human
ccaaauccuuagaucuggca

SEQ ID NO: 3864445 - RNA, 21 nt, Human
ccaaauccuuagaucuggcau

SEQ ID NO: 3864446 - RNA, 13 nt, Human
ccaaauccuuccc

SEQ ID NO: 3864447 - RNA, 15 nt, Human
ccaaaugcagcuuua

SEQ ID NO: 3864448 - RNA, 18 nt, Human
ccaaaugcagcuuuaaaa

SEQ ID NO: 3864449 - RNA, 19 nt, Human
ccaaaugcaucaauccugu

SEQ ID NO: 3864450 - RNA, 22 nt, Human
ccaaaugcauggugcaguugac

SEQ ID NO: 3864451 - RNA, 22 nt, Human
ccaaaugcuuuaaaaacuauuu

SEQ ID NO: 3864452 - RNA, 21 nt, Human
ccaaauggaaacagaggacca

SEQ ID NO: 3864453 - RNA, 19 nt, Human
ccaaauggagaagcugcag

SEQ ID NO: 3864454 - RNA, 18 nt, Human
ccaaauguuuacagggag

SEQ ID NO: 3864455 - RNA, 13 nt, Human
ccaaauuaaaaaa

SEQ ID NO: 3864456 - RNA, 12 nt, Human
ccaaauuaagag

SEQ ID NO: 3864457 - RNA, 11 nt, Human
ccaaauuauuu

SEQ ID NO: 3864458 - RNA, 14 nt, Human
ccaaauuauuugug

SEQ ID NO: 3864459 - RNA, 15 nt, Human
ccaaauucccuccuc

SEQ ID NO: 3864460 - RNA, 15 nt, Human
ccaaauucuuucagu

SEQ ID NO: 3864461 - RNA, 14 nt, Human
ccaaauugucaccu

SEQ ID NO: 3864462 - RNA, 22 nt, Human
ccaaauugucaccugcuucucu

SEQ ID NO: 3864463 - RNA, 20 nt, Human
ccaaauugugcuucucccca

SEQ ID NO: 3864464 - RNA, 18 nt, Human
ccaaauuuaaaacuguug

SEQ ID NO: 3864465 - RNA, 15 nt, Human
ccaaauuugauugau

SEQ ID NO: 3864466 - RNA, 13 nt, Human
ccaacaaaccauc

SEQ ID NO: 3864467 - RNA, 16 nt, Human
ccaacaaaccauccag

SEQ ID NO: 3864468 - RNA, 21 nt, Human
ccaacaagaauaaaggcagcu

SEQ ID NO: 3864469 - RNA, 18 nt, Human
ccaacaagaaugcauuga

SEQ ID NO: 3864470 - RNA, 13 nt, Human
ccaacaccaagca

SEQ ID NO: 3864471 - RNA, 16 nt, Human
ccaacaccaagcacag

SEQ ID NO: 3864472 - RNA, 22 nt, Human
ccaacaccaagcacagcagccu

SEQ ID NO: 3864473 - RNA, 16 nt, Human
ccaacaccacagacac

SEQ ID NO: 3864474 - RNA, 17 nt, Human
ccaacaccagccccugc

SEQ ID NO: 3864475 - RNA, 13 nt, Human
ccaacaccaggga

SEQ ID NO: 3864476 - RNA, 20 nt, Human
ccaacacccaaagcauggac

SEQ ID NO: 3864477 - RNA, 21 nt, Human
ccaacacgagcaggcuacugu

SEQ ID NO: 3864478 - RNA, 16 nt, Human
ccaacacgcaccugcc

SEQ ID NO: 3864479 - RNA, 21 nt, Human
ccaacacgcaccugccucagg

SEQ ID NO: 3864480 - RNA, 21 nt, Human
ccaacacucaagaagcaggcu

SEQ ID NO: 3864481 - RNA, 15 nt, Human
ccaacacugugcccu

SEQ ID NO: 3864482 - RNA, 16 nt, Human
ccaacacugugcccug

SEQ ID NO: 3864483 - RNA, 19 nt, Human
ccaacacugugcccuggug

SEQ ID NO: 3864484 - RNA, 18 nt, Human
ccaacagaacuaaauguu

SEQ ID NO: 3864485 - RNA, 17 nt, Human
ccaacagaugcuuuucu

SEQ ID NO: 3864486 - RNA, 20 nt, Human
ccaacagccacucagaaaag

SEQ ID NO: 3864487 - RNA, 13 nt, Human
ccaacagccaugc

SEQ ID NO: 3864488 - RNA, 16 nt, Human
ccaacagcgcccaaag

SEQ ID NO: 3864489 - RNA, 16 nt, Human
ccaacagcuacaacag

SEQ ID NO: 3864490 - RNA, 21 nt, Human
ccaacagcuacaacagccuca

SEQ ID NO: 3864491 - RNA, 23 nt, Human
ccaacaggagcugggauccuaag

SEQ ID NO: 3864492 - RNA, 15 nt, Human
ccaacaggaggacaa

SEQ ID NO: 3864493 - RNA, 16 nt, Human
ccaacaggaggacaau

SEQ ID NO: 3864494 - RNA, 22 nt, Human
ccaacaggcuguucugcacuga

SEQ ID NO: 3864495 - RNA, 14 nt, Human
ccaacagguggcag

SEQ ID NO: 3864496 - RNA, 18 nt, Human
ccaacagguggcaggacc

SEQ ID NO: 3864497 - RNA, 20 nt, Human
ccaacagugagucugucagc

SEQ ID NO: 3864498 - RNA, 13 nt, Human
ccaacagugugaa

SEQ ID NO: 3864499 - RNA, 15 nt, Human
ccaacagugugaagu

SEQ ID NO: 3864500 - RNA, 20 nt, Human
ccaacaguguuaggccuggc

SEQ ID NO: 3864501 - RNA, 22 nt, Human
ccaacaguuuaaugaagaucua

SEQ ID NO: 3864502 - RNA, 15 nt, Human
ccaacauaaaaauga

SEQ ID NO: 3864503 - RNA, 20 nt, Human
ccaacauacucccaucugug

SEQ ID NO: 3864504 - RNA, 16 nt, Human
ccaacaucucccuccc

SEQ ID NO: 3864505 - RNA, 21 nt, Human
ccaacaugcacugauguugug

SEQ ID NO: 3864506 - RNA, 23 nt, Human
ccaacaugcacugauguuguguu

SEQ ID NO: 3864507 - RNA, 15 nt, Human
ccaacauggagaaac

SEQ ID NO: 3864508 - RNA, 15 nt, Human
ccaacauggugaaac

SEQ ID NO: 3864509 - RNA, 15 nt, Human
ccaacauguggcucc

SEQ ID NO: 3864510 - RNA, 22 nt, Human
ccaacauguggcuccucccagc

SEQ ID NO: 3864511 - RNA, 20 nt, Human
ccaacauugccuauuucagu

SEQ ID NO: 3864512 - RNA, 21 nt, Human
ccaaccacacuugucggcucc

SEQ ID NO: 3864513 - RNA, 14 nt, Human
ccaaccauuuccuc

SEQ ID NO: 3864514 - RNA, 19 nt, Human
ccaacccaaaccuggagau

SEQ ID NO: 3864515 - RNA, 16 nt, Human
ccaacccagccgcugc

SEQ ID NO: 3864516 - RNA, 12 nt, Human
ccaacccaucag

SEQ ID NO: 3864517 - RNA, 13 nt, Human
ccaaccccagccg

SEQ ID NO: 3864518 - RNA, 18 nt, Human
ccaacccccaccccacac

SEQ ID NO: 3864519 - RNA, 15 nt, Human
ccaacccccagcacc

SEQ ID NO: 3864520 - RNA, 17 nt, Human
ccaaccccccagcacug

SEQ ID NO: 3864521 - RNA, 18 nt, Human
ccaaccccccagcacuga

SEQ ID NO: 3864522 - RNA, 20 nt, Human
ccaaccccccagcacugagg

SEQ ID NO: 3864523 - RNA, 22 nt, Human
ccaaccccucgcccagucccag

SEQ ID NO: 3864524 - RNA, 12 nt, Human
ccaaccccugug

SEQ ID NO: 3864525 - RNA, 15 nt, Human
ccaaccccuguggag

SEQ ID NO: 3864526 - RNA, 15 nt, Human
ccaacccgaggcccg

SEQ ID NO: 3864527 - RNA, 17 nt, Human
ccaacccgaggcccgca

SEQ ID NO: 3864528 - RNA, 17 nt, Human
ccaacccguggaggcug

SEQ ID NO: 3864529 - RNA, 20 nt, Human
ccaacccguggaggcugcuc

SEQ ID NO: 3864530 - RNA, 19 nt, Human
ccaacccuagguucccugu

SEQ ID NO: 3864531 - RNA, 12 nt, Human
ccaacccucagg

SEQ ID NO: 3864532 - RNA, 13 nt, Human
ccaacccucaggg

SEQ ID NO: 3864533 - RNA, 15 nt, Human
ccaacccucagggca

SEQ ID NO: 3864534 - RNA, 15 nt, Human
ccaacccucaucacc

SEQ ID NO: 3864535 - RNA, 13 nt, Human
ccaacccugccgu

SEQ ID NO: 3864536 - RNA, 22 nt, Human
ccaacccugccgucaccaccac

SEQ ID NO: 3864537 - RNA, 16 nt, Human
ccaacccuggggaagg

SEQ ID NO: 3864538 - RNA, 17 nt, Human
ccaacccuggggaagga

SEQ ID NO: 3864539 - RNA, 18 nt, Human
ccaacccuggggaaggag

SEQ ID NO: 3864540 - RNA, 20 nt, Human
ccaacccuggggaaggagcc

SEQ ID NO: 3864541 - RNA, 23 nt, Human
ccacaggaagccugcaguccugg

SEQ ID NO: 3864542 - RNA, 16 nt, Human
ccacaggacacaguca

SEQ ID NO: 3864543 - RNA, 21 nt, Human
ccacaggacauuucucuaaga

SEQ ID NO: 3864544 - RNA, 21 nt, Human
ccacaggaggcaagcaagcuc

SEQ ID NO: 3864545 - RNA, 20 nt, Human
ccacaggagugggaaaacac

SEQ ID NO: 3864546 - RNA, 16 nt, Human
ccacaggcauguccca

SEQ ID NO: 3864547 - RNA, 19 nt, Human
ccacaggcccuuccucucc

SEQ ID NO: 3864548 - RNA, 22 nt, Human
ccacaggcccuuccucuccacu

SEQ ID NO: 3864549 - RNA, 17 nt, Human
ccacaggccgcccugcg

SEQ ID NO: 3864550 - RNA, 14 nt, Human
ccacaggccugaga

SEQ ID NO: 3864551 - RNA, 21 nt, Human
ccacaggcucaggcaggggcc

SEQ ID NO: 3864552 - RNA, 14 nt, Human
ccacaggcuucuga

SEQ ID NO: 3864553 - RNA, 19 nt, Human
ccacaggcuucugagcagc

SEQ ID NO: 3864554 - RNA, 20 nt, Human
ccacagggcuaagagcuagc

SEQ ID NO: 3864555 - RNA, 21 nt, Human
ccacagggucccacagccacg

SEQ ID NO: 3864556 - RNA, 19 nt, Human
ccacagguguccccagccc

SEQ ID NO: 3864557 - RNA, 22 nt, Human
ccacagguguccccagcccacu

SEQ ID NO: 3864558 - RNA, 15 nt, Human
ccacaguagucuuga

SEQ ID NO: 3864559 - RNA, 14 nt, Human
ccacagucaaagaa

SEQ ID NO: 3864560 - RNA, 19 nt, Human
ccacagucccaucugcuuc

SEQ ID NO: 3864561 - RNA, 21 nt, Human
ccacagugacucgggcuccug

SEQ ID NO: 3864562 - RNA, 15 nt, Human
ccacaguucaguggc

SEQ ID NO: 3864563 - RNA, 19 nt, Human
ccacauacaacacaaagag

SEQ ID NO: 3864564 - RNA, 15 nt, Human
ccacauacccugacc

SEQ ID NO: 3864565 - RNA, 23 nt, Human
ccacauagugaugguuccccugu

SEQ ID NO: 3864566 - RNA, 19 nt, Human
ccacauccaacuccagcaa

SEQ ID NO: 3864567 - RNA, 12 nt, Human
ccacauccacag

SEQ ID NO: 3864568 - RNA, 12 nt, Human
ccacaucccagg

SEQ ID NO: 3864569 - RNA, 15 nt, Human
ccacaucccaggcuu

SEQ ID NO: 3864570 - RNA, 13 nt, Human
ccacaucccuggg

SEQ ID NO: 3864571 - RNA, 15 nt, Human
ccacaucccugggcc

SEQ ID NO: 3864572 - RNA, 22 nt, Human
ccacaucccugggccugcugcu

SEQ ID NO: 3864573 - RNA, 23 nt, Human
ccacaucccugggccugcugcug

SEQ ID NO: 3864574 - RNA, 21 nt, Human
ccacauccggggccagcuccg

SEQ ID NO: 3864575 - RNA, 14 nt, Human
ccacaucuacguuu

SEQ ID NO: 3864576 - RNA, 19 nt, Human
ccacaucuacguuuuuggu

SEQ ID NO: 3864577 - RNA, 16 nt, Human
ccacaucucugaaagc

SEQ ID NO: 3864578 - RNA, 23 nt, Human
ccacaucugccuuaaaaccaaag

SEQ ID NO: 3864579 - RNA, 20 nt, Human
ccacaucuugaucugcucag

SEQ ID NO: 3864580 - RNA, 16 nt, Human
ccacaucuugcucugc

SEQ ID NO: 3864581 - RNA, 17 nt, Human
ccacaucuugcucugcu

SEQ ID NO: 3864582 - RNA, 24 nt, Human
ccacaugauucugauguacucuaa

SEQ ID NO: 3864583 - RNA, 15 nt, Human
ccacauggcacagag

SEQ ID NO: 3864584 - RNA, 17 nt, Human
ccacaugggagcagucc

SEQ ID NO: 3864585 - RNA, 24 nt, Human
ccacaugggagcaguccaugcaug

SEQ ID NO: 3864586 - RNA, 20 nt, Human
ccacauggggcugggcagcu

SEQ ID NO: 3864587 - RNA, 14 nt, Human
ccacaugucaccgu

SEQ ID NO: 3864588 - RNA, 15 nt, Human
ccacaugugacacau

SEQ ID NO: 3864589 - RNA, 20 nt, Human
ccacauguguccaucccagc

SEQ ID NO: 3864590 - RNA, 22 nt, Human
ccacauguuacuggauaaauug

SEQ ID NO: 3864591 - RNA, 13 nt, Human
ccacauuaaagaa

SEQ ID NO: 3864592 - RNA, 14 nt, Human
ccacauuagaacuu

SEQ ID NO: 3864593 - RNA, 16 nt, Human
ccacauugaagaaugu

SEQ ID NO: 3864594 - RNA, 14 nt, Human
ccacauuggaagag

SEQ ID NO: 3864595 - RNA, 19 nt, Human
ccacauuggaagagcagca

SEQ ID NO: 3864596 - RNA, 19 nt, Human
ccacauuuggaauacuuuu

SEQ ID NO: 3864597 - RNA, 16 nt, Human
ccaccaaagcugccca

SEQ ID NO: 3864598 - RNA, 20 nt, Human
ccaccaaaggccagggucac

SEQ ID NO: 3864599 - RNA, 18 nt, Human
ccaccaacauacucccau

SEQ ID NO: 3864600 - RNA, 15 nt, Human
ccaccaacccucagg

SEQ ID NO: 3864601 - RNA, 17 nt, Human
ccaccaacccucagggc

SEQ ID NO: 3864602 - RNA, 17 nt, Human
ccaccaagacuuguuuu

SEQ ID NO: 3864603 - RNA, 12 nt, Human
ccaccaagccuu

SEQ ID NO: 3864604 - RNA, 11 nt, Human
ccaccaagggc

SEQ ID NO: 3864605 - RNA, 17 nt, Human
ccaccacacaucccagc

SEQ ID NO: 3864606 - RNA, 17 nt, Human
ccaccacaccgcagaag

SEQ ID NO: 3864607 - RNA, 14 nt, Human
ccaccacagccagc

SEQ ID NO: 3864608 - RNA, 18 nt, Human
ccaccacagccagcaccu

SEQ ID NO: 3864609 - RNA, 20 nt, Human
ccaccacagccagcaccugg

SEQ ID NO: 3864610 - RNA, 21 nt, Human
ccaccacagccagcaccuggc

SEQ ID NO: 3864611 - RNA, 11 nt, Human
ccaccacccaa

SEQ ID NO: 3864612 - RNA, 16 nt, Human
ccaccaccccccacuc

SEQ ID NO: 3864613 - RNA, 13 nt, Human
ccaccacccugag

SEQ ID NO: 3864614 - RNA, 20 nt, Human
ccaccaccuaggccacuccu

SEQ ID NO: 3864615 - RNA, 21 nt, Human
ccaccaccuaggccacuccuc

SEQ ID NO: 3864616 - RNA, 12 nt, Human
ccaccaccuccc

SEQ ID NO: 3864617 - RNA, 16 nt, Human
ccaccacgccuagccu

SEQ ID NO: 3864618 - RNA, 16 nt, Human
ccaccacggccacugg

SEQ ID NO: 3864619 - RNA, 14 nt, Human
ccaccacuauaaaa

SEQ ID NO: 3864620 - RNA, 14 nt, Human
ccaccacuggccac

SEQ ID NO: 3864621 - RNA, 20 nt, Human
ccaccacuggccaccaggcu

SEQ ID NO: 3864622 - RNA, 11 nt, Human
ccaccagaagc

SEQ ID NO: 3864623 - RNA, 12 nt, Human
ccaccagaagcc

SEQ ID NO: 3864624 - RNA, 18 nt, Human
ccaccagaagcccagaau

SEQ ID NO: 3864625 - RNA, 17 nt, Human
ccaccagagaccguccu

SEQ ID NO: 3864626 - RNA, 19 nt, Human
ccaccagcaucaccugccu

SEQ ID NO: 3864627 - RNA, 16 nt, Human
ccaccagcugugucca

SEQ ID NO: 3864628 - RNA, 18 nt, Human
ccaccaggaaccucuuca

SEQ ID NO: 3864629 - RNA, 19 nt, Human
ccaccaggagaaccacuac

SEQ ID NO: 3864630 - RNA, 18 nt, Human
ccaccaggcuggcgcagc

SEQ ID NO: 3864631 - RNA, 16 nt, Human
ccaccagggcaucucu

SEQ ID NO: 3864632 - RNA, 19 nt, Human
ccaccagggcaucucuggg

SEQ ID NO: 3864633 - RNA, 16 nt, Human
ccaccaggugccuuuc

SEQ ID NO: 3864634 - RNA, 20 nt, Human
ccaccaggugccuuucaaau

SEQ ID NO: 3864635 - RNA, 17 nt, Human
ccaccagugccucuccc

SEQ ID NO: 3864636 - RNA, 23 nt, Human
ccaccauauucagugcuguggcc

SEQ ID NO: 3864637 - RNA, 14 nt, Human
ccaccaucaagcca

SEQ ID NO: 3864638 - RNA, 17 nt, Human
ccaccaucaagccacca

SEQ ID NO: 3864639 - RNA, 18 nt, Human
ccaccaucaccagacagg

SEQ ID NO: 3864640 - RNA, 14 nt, Human
ccaccaucugcugu

SEQ ID NO: 3864641 - RNA, 15 nt, Human
ccaccaucugcuguc

SEQ ID NO: 3864642 - RNA, 22 nt, Human
ccaccaucuuugcagguugcuu

SEQ ID NO: 3864643 - RNA, 15 nt, Human
ccaccaugcccagcu

SEQ ID NO: 3864644 - RNA, 17 nt, Human
ccaccauggccagccaa

SEQ ID NO: 3864645 - RNA, 17 nt, Human
ccaccaugucugcccca

SEQ ID NO: 3864646 - RNA, 18 nt, Human
ccaccauuuggcaucccu

SEQ ID NO: 3864647 - RNA, 13 nt, Human
ccacccaaagcag

SEQ ID NO: 3864648 - RNA, 16 nt, Human
ccacccaacccuaucu

SEQ ID NO: 3864649 - RNA, 15 nt, Human
ccacccaagcaggag

SEQ ID NO: 3864650 - RNA, 21 nt, Human
ccacccaagggccuggccuga

SEQ ID NO: 3864651 - RNA, 22 nt, Human
ccacccaagggccuggccugag

SEQ ID NO: 3864652 - RNA, 22 nt, Human
ccacccaauucaaaacauugug

SEQ ID NO: 3864653 - RNA, 15 nt, Human
ccacccaccagggcg

SEQ ID NO: 3864654 - RNA, 15 nt, Human
ccacccacuucugca

SEQ ID NO: 3864655 - RNA, 17 nt, Human
ccacccacuucugcacu

SEQ ID NO: 3864656 - RNA, 11 nt, Human
ccacccagagg

SEQ ID NO: 3864657 - RNA, 12 nt, Human
ccacccaggagc

SEQ ID NO: 3864658 - RNA, 14 nt, Human
ccacccaggagccc

SEQ ID NO: 3864659 - RNA, 16 nt, Human
ccacccaggaggcagg

SEQ ID NO: 3864660 - RNA, 14 nt, Human
ccacccaggaggga

SEQ ID NO: 3864661 - RNA, 17 nt, Human
ccacccaggagggaggg

SEQ ID NO: 3864662 - RNA, 23 nt, Human
ccacccaggagggagggggcuau

SEQ ID NO: 3864663 - RNA, 18 nt, Human
ccacccaggaguguggcc

SEQ ID NO: 3864664 - RNA, 17 nt, Human
ccacccaggggcagccc

SEQ ID NO: 3864665 - RNA, 15 nt, Human
ccacccagucucugc

SEQ ID NO: 3864666 - RNA, 23 nt, Human
ccacccauaauccuuucugccga

SEQ ID NO: 3864667 - RNA, 21 nt, Human
ccacccauccuaccaaugcau

SEQ ID NO: 3864668 - RNA, 12 nt, Human
ccaccccaacau

SEQ ID NO: 3864669 - RNA, 22 nt, Human
ccaccccaaccugcucuccucu

SEQ ID NO: 3864670 - RNA, 19 nt, Human
ccaccccaagagaacucgc

SEQ ID NO: 3864671 - RNA, 12 nt, Human
ccaccccacacu

SEQ ID NO: 3864672 - RNA, 13 nt, Human
ccaccccacacuu

SEQ ID NO: 3864673 - RNA, 14 nt, Human
ccaccccagccccc

SEQ ID NO: 3864674 - RNA, 13 nt, Human
ccaccccagcugc

SEQ ID NO: 3864675 - RNA, 20 nt, Human
ccaccccagggcagccaggg

SEQ ID NO: 3864676 - RNA, 17 nt, Human
ccaccccagugcaccca

SEQ ID NO: 3864677 - RNA, 13 nt, Human
ccacccccaaggu

SEQ ID NO: 3864678 - RNA, 15 nt, Human
ccacccccaccaagg

SEQ ID NO: 3864679 - RNA, 15 nt, Human
ccacccccacccaag

SEQ ID NO: 3864680 - RNA, 17 nt, Human
ccacccccacccaaggg

SEQ ID NO: 3864681 - RNA, 19 nt, Human
ccacccccacccaagggcc

SEQ ID NO: 3864682 - RNA, 15 nt, Human
ccacccccaccccca

SEQ ID NO: 3864683 - RNA, 12 nt, Human
ccacccccagcc

SEQ ID NO: 3864684 - RNA, 19 nt, Human
ccacccccaggaccccuga

SEQ ID NO: 3864685 - RNA, 15 nt, Human
ccaccccccaggccu

SEQ ID NO: 3864686 - RNA, 12 nt, Human
ccagguccuggu

SEQ ID NO: 3864687 - RNA, 15 nt, Human
ccagguccugguggg

SEQ ID NO: 3864688 - RNA, 19 nt, Human
ccaggucuuggagcugagc

SEQ ID NO: 3864689 - RNA, 20 nt, Human
ccaggucuuggagcugagcc

SEQ ID NO: 3864690 - RNA, 21 nt, Human
ccaggucuuggagcugagccu

SEQ ID NO: 3864691 - RNA, 22 nt, Human
ccaggucuuggagcugagccuc

SEQ ID NO: 3864692 - RNA, 23 nt, Human
ccaggucuuggagcugagccucu

SEQ ID NO: 3864693 - RNA, 16 nt, Human
ccaggugaaggaggcu

SEQ ID NO: 3864694 - RNA, 21 nt, Human
ccaggugaaggaggcuccagg

SEQ ID NO: 3864695 - RNA, 18 nt, Human
ccaggugcaaccagggag

SEQ ID NO: 3864696 - RNA, 20 nt, Human
ccaggugcacaagcuccaag

SEQ ID NO: 3864697 - RNA, 24 nt, Human
ccaggugcacaagcuccaagcucc

SEQ ID NO: 3864698 - RNA, 19 nt, Human
ccaggugcacagacguccc

SEQ ID NO: 3864699 - RNA, 14 nt, Human
ccaggugcaguggc

SEQ ID NO: 3864700 - RNA, 12 nt, Human
ccaggugccuug

SEQ ID NO: 3864701 - RNA, 22 nt, Human
ccaggugcuacacccuuuucca

SEQ ID NO: 3864702 - RNA, 19 nt, Human
ccagguggaaggcagacag

SEQ ID NO: 3864703 - RNA, 20 nt, Human
ccaggugggcgggcagcaca

SEQ ID NO: 3864704 - RNA, 23 nt, Human
ccaggugggcgggcagcacagca

SEQ ID NO: 3864705 - RNA, 20 nt, Human
ccagguguuaacauuccaag

SEQ ID NO: 3864706 - RNA, 20 nt, Human
ccagguucaacccacagcua

SEQ ID NO: 3864707 - RNA, 23 nt, Human
ccagguucaagcgauucuccugc

SEQ ID NO: 3864708 - RNA, 14 nt, Human
ccagguucagcuug

SEQ ID NO: 3864709 - RNA, 15 nt, Human
ccagguuccacagag

SEQ ID NO: 3864710 - RNA, 18 nt, Human
ccagguuccacagaggac

SEQ ID NO: 3864711 - RNA, 21 nt, Human
ccagguuccccagccgcccac

SEQ ID NO: 3864712 - RNA, 15 nt, Human
ccagguucuauuugg

SEQ ID NO: 3864713 - RNA, 14 nt, Human
ccagguuggcucug

SEQ ID NO: 3864714 - RNA, 17 nt, Human
ccagguuggcucugcca

SEQ ID NO: 3864715 - RNA, 20 nt, Human
ccagguuggcucugccaguc

SEQ ID NO: 3864716 - RNA, 17 nt, Human
ccagguuucuggucucu

SEQ ID NO: 3864717 - RNA, 22 nt, Human
ccagguuucuggucucuaggcu

SEQ ID NO: 3864718 - RNA, 23 nt, Human
ccagguuuuguuccgcccagugg

SEQ ID NO: 3864719 - RNA, 23 nt, Human
ccagguuuuucaauuaaacggau

SEQ ID NO: 3864720 - RNA, 17 nt, Human
ccagguuuuuggucuga

SEQ ID NO: 3864721 - RNA, 11 nt, Human
ccaguaaaauu

SEQ ID NO: 3864722 - RNA, 23 nt, Human
ccaguaaaauugccauauugcac

SEQ ID NO: 3864723 - RNA, 12 nt, Human
ccaguaacacag

SEQ ID NO: 3864724 - RNA, 14 nt, Human
ccaguaacaggcuc

SEQ ID NO: 3864725 - RNA, 15 nt, Human
ccaguaacaggcuca

SEQ ID NO: 3864726 - RNA, 22 nt, Human
ccaguaacgggucguaaugacu

SEQ ID NO: 3864727 - RNA, 16 nt, Human
ccaguaacucaucugu

SEQ ID NO: 3864728 - RNA, 17 nt, Human
ccaguaagaucacuguu

SEQ ID NO: 3864729 - RNA, 15 nt, Human
ccaguacauucucag

SEQ ID NO: 3864730 - RNA, 18 nt, Human
ccaguaccuagcuggcuc

SEQ ID NO: 3864731 - RNA, 14 nt, Human
ccaguacuggagcu

SEQ ID NO: 3864732 - RNA, 14 nt, Human
ccaguacuugucau

SEQ ID NO: 3864733 - RNA, 22 nt, Human
ccaguagaccuuguuacuucug

SEQ ID NO: 3864734 - RNA, 20 nt, Human
ccaguaggggcuuauaauaa

SEQ ID NO: 3864735 - RNA, 13 nt, Human
ccaguaucgcuca

SEQ ID NO: 3864736 - RNA, 16 nt, Human
ccaguaucucuucagu

SEQ ID NO: 3864737 - RNA, 20 nt, Human
ccaguaucucuucagucucu

SEQ ID NO: 3864738 - RNA, 22 nt, Human
ccaguauucuagguagugcccu

SEQ ID NO: 3864739 - RNA, 14 nt, Human
ccaguauuuuaaaa

SEQ ID NO: 3864740 - RNA, 17 nt, Human
ccaguauuuuugcugcu

SEQ ID NO: 3864741 - RNA, 16 nt, Human
ccagucaagaagaaaa

SEQ ID NO: 3864742 - RNA, 12 nt, Human
ccagucaccccg

SEQ ID NO: 3864743 - RNA, 16 nt, Human
ccagucaccccggcca

SEQ ID NO: 3864744 - RNA, 21 nt, Human
ccagucacugugagcucccag

SEQ ID NO: 3864745 - RNA, 14 nt, Human
ccagucagccucuc

SEQ ID NO: 3864746 - RNA, 23 nt, Human
ccagucagccucucucccagucu

SEQ ID NO: 3864747 - RNA, 15 nt, Human
ccagucaggcccagg

SEQ ID NO: 3864748 - RNA, 21 nt, Human
ccagucauuauguuaauauuu

SEQ ID NO: 3864749 - RNA, 13 nt, Human
ccaguccaggcug

SEQ ID NO: 3864750 - RNA, 15 nt, Human
ccaguccaggcugcc

SEQ ID NO: 3864751 - RNA, 22 nt, Human
ccagucccaaugguccugacuu

SEQ ID NO: 3864752 - RNA, 17 nt, Human
ccagucccagcagccag

SEQ ID NO: 3864753 - RNA, 16 nt, Human
ccaguccccaccccug

SEQ ID NO: 3864754 - RNA, 15 nt, Human
ccaguccccagaacu

SEQ ID NO: 3864755 - RNA, 15 nt, Human
ccaguccccagcccu

SEQ ID NO: 3864756 - RNA, 15 nt, Human
ccagucccccaaccc

SEQ ID NO: 3864757 - RNA, 15 nt, Human
ccagucccccuaucc

SEQ ID NO: 3864758 - RNA, 15 nt, Human
ccaguccccgugccc

SEQ ID NO: 3864759 - RNA, 14 nt, Human
ccaguccccuuugu

SEQ ID NO: 3864760 - RNA, 15 nt, Human
ccagucccugaggca

SEQ ID NO: 3864761 - RNA, 13 nt, Human
ccagucccugucc

SEQ ID NO: 3864762 - RNA, 16 nt, Human
ccaguccuaucugggc

SEQ ID NO: 3864763 - RNA, 12 nt, Human
ccaguccugccc

SEQ ID NO: 3864764 - RNA, 14 nt, Human
ccaguccugccugg

SEQ ID NO: 3864765 - RNA, 15 nt, Human
ccaguccugccuggc

SEQ ID NO: 3864766 - RNA, 21 nt, Human
ccaguccugccuggccaggca

SEQ ID NO: 3864767 - RNA, 12 nt, Human
ccaguccugcuc

SEQ ID NO: 3864768 - RNA, 13 nt, Human
ccaguccuggccu

SEQ ID NO: 3864769 - RNA, 15 nt, Human
ccaguccuggccugg

SEQ ID NO: 3864770 - RNA, 20 nt, Human
ccaguccuggccuggcuucu

SEQ ID NO: 3864771 - RNA, 17 nt, Human
ccaguccuuccaccucg

SEQ ID NO: 3864772 - RNA, 23 nt, Human
ccagucgcccuuacuucuugccc

SEQ ID NO: 3864773 - RNA, 14 nt, Human
ccagucgcgcugcc

SEQ ID NO: 3864774 - RNA, 20 nt, Human
ccagucgcgcugccugugug

SEQ ID NO: 3864775 - RNA, 21 nt, Human
ccagucgcgcugccugugugg

SEQ ID NO: 3864776 - RNA, 20 nt, Human
ccagucgucaucagaugcuu

SEQ ID NO: 3864777 - RNA, 18 nt, Human
ccagucguuagaauauag

SEQ ID NO: 3864778 - RNA, 16 nt, Human
ccagucuacccagaga

SEQ ID NO: 3864779 - RNA, 18 nt, Human
ccagucuccaccaggaac

SEQ ID NO: 3864780 - RNA, 19 nt, Human
ccagucuccaccaggaacc

SEQ ID NO: 3864781 - RNA, 23 nt, Human
ccagucucugcuccaccuuucag

SEQ ID NO: 3864782 - RNA, 20 nt, Human
ccagucugaaguuucauuua

SEQ ID NO: 3864783 - RNA, 21 nt, Human
ccagucugaaguuucauuuau

SEQ ID NO: 3864784 - RNA, 22 nt, Human
ccagucugcugcccuccauccc

SEQ ID NO: 3864785 - RNA, 16 nt, Human
ccagucuguggaucag

SEQ ID NO: 3864786 - RNA, 20 nt, Human
ccagucuuuaaaggcccagc

SEQ ID NO: 3864787 - RNA, 14 nt, Human
ccagugaaaacuag

SEQ ID NO: 3864788 - RNA, 15 nt, Human
ccagugaaaacuaga

SEQ ID NO: 3864789 - RNA, 15 nt, Human
ccagugaaccaaaga

SEQ ID NO: 3864790 - RNA, 17 nt, Human
ccagugaauuuuugcaa

SEQ ID NO: 3864791 - RNA, 21 nt, Human
ccagugaauuuuugcaauaau

SEQ ID NO: 3864792 - RNA, 24 nt, Human
ccagugacacuucagagagcuggu

SEQ ID NO: 3864793 - RNA, 20 nt, Human
ccagugaccugcuggguaaa

SEQ ID NO: 3864794 - RNA, 22 nt, Human
ccagugaccugcuggguaaacu

SEQ ID NO: 3864795 - RNA, 16 nt, Human
ccagugacuccaggag

SEQ ID NO: 3864796 - RNA, 13 nt, Human
ccagugagacugu

SEQ ID NO: 3864797 - RNA, 21 nt, Human
ccagugagaugagggaugggc

SEQ ID NO: 3864798 - RNA, 14 nt, Human
ccagugagaugcau

SEQ ID NO: 3864799 - RNA, 16 nt, Human
ccagugagcacuccca

SEQ ID NO: 3864800 - RNA, 19 nt, Human
ccagugagcacucccaagu

SEQ ID NO: 3864801 - RNA, 13 nt, Human
ccagugaggcucu

SEQ ID NO: 3864802 - RNA, 14 nt, Human
ccagugcaaaugca

SEQ ID NO: 3864803 - RNA, 15 nt, Human
ccagugcaacagcac

SEQ ID NO: 3864804 - RNA, 18 nt, Human
ccagugcaacagcacugg

SEQ ID NO: 3864805 - RNA, 15 nt, Human
ccagugcaggcuggc

SEQ ID NO: 3864806 - RNA, 20 nt, Human
ccagugcaggcuggccagcc

SEQ ID NO: 3864807 - RNA, 22 nt, Human
ccagugcaggcuggccagccgc

SEQ ID NO: 3864808 - RNA, 19 nt, Human
ccagugcaugguggccaga

SEQ ID NO: 3864809 - RNA, 18 nt, Human
ccagugcccauuccucac

SEQ ID NO: 3864810 - RNA, 23 nt, Human
ccagugcccucuccccucagccu

SEQ ID NO: 3864811 - RNA, 16 nt, Human
ccagugcccugagcca

SEQ ID NO: 3864812 - RNA, 18 nt, Human
ccagugcccugaucccag

SEQ ID NO: 3864813 - RNA, 24 nt, Human
ccagugcccugaucccagagagcc

SEQ ID NO: 3864814 - RNA, 14 nt, Human
ccagugccugggug

SEQ ID NO: 3864815 - RNA, 17 nt, Human
ccagugccuuaccuccu

SEQ ID NO: 3864816 - RNA, 21 nt, Human
ccagugccuuaccuccugccc

SEQ ID NO: 3864817 - RNA, 22 nt, Human
ccagugccuuaccuccugccca

SEQ ID NO: 3864818 - RNA, 22 nt, Human
ccaguggauucuuguuuugcuu

SEQ ID NO: 3864819 - RNA, 20 nt, Human
ccaguggcagggcacagggc

SEQ ID NO: 3864820 - RNA, 21 nt, Human
ccaguggcagggcacagggcc

SEQ ID NO: 3864821 - RNA, 16 nt, Human
ccaguggccacucagc

SEQ ID NO: 3864822 - RNA, 24 nt, Human
ccaguggccucaacccucccucag

SEQ ID NO: 3864823 - RNA, 14 nt, Human
ccaguggccuggcu

SEQ ID NO: 3864824 - RNA, 17 nt, Human
ccaguggccuuccccag

SEQ ID NO: 3864825 - RNA, 19 nt, Human
ccaguggccuuccccagca

SEQ ID NO: 3864826 - RNA, 18 nt, Human
ccaguggcuauggccugu

SEQ ID NO: 3864827 - RNA, 21 nt, Human
ccaguggcugcugcccaggcc

SEQ ID NO: 3864828 - RNA, 16 nt, Human
ccagugggagauguua

SEQ ID NO: 3864829 - RNA, 14 nt, Human
ccagugggaggcgc

SEQ ID NO: 3864830 - RNA, 17 nt, Human
ccaugugacucuggcuu

SEQ ID NO: 3864831 - RNA, 18 nt, Human
ccaugugacucuggcuug

SEQ ID NO: 3864832 - RNA, 19 nt, Human
ccaugugagcugcugccau

SEQ ID NO: 3864833 - RNA, 21 nt, Human
ccaugugauggacacuccagg

SEQ ID NO: 3864834 - RNA, 18 nt, Human
ccaugugcuacaggggcc

SEQ ID NO: 3864835 - RNA, 23 nt, Human
ccaugugcuacaggggccagaag

SEQ ID NO: 3864836 - RNA, 17 nt, Human
ccauguggagacuucau

SEQ ID NO: 3864837 - RNA, 21 nt, Human
ccauguggauaacuuuacaga

SEQ ID NO: 3864838 - RNA, 14 nt, Human
ccauguggccacaa

SEQ ID NO: 3864839 - RNA, 12 nt, Human
ccaugugucacu

SEQ ID NO: 3864840 - RNA, 20 nt, Human
ccaugugucacuugugcuuu

SEQ ID NO: 3864841 - RNA, 17 nt, Human
ccaugugugagugugug

SEQ ID NO: 3864842 - RNA, 12 nt, Human
ccaugugugugc

SEQ ID NO: 3864843 - RNA, 16 nt, Human
ccauguguuauguuuu

SEQ ID NO: 3864844 - RNA, 22 nt, Human
ccauguucacaccgcugcacuc

SEQ ID NO: 3864845 - RNA, 14 nt, Human
ccauguucugcccc

SEQ ID NO: 3864846 - RNA, 21 nt, Human
ccauguucugcccccagccca

SEQ ID NO: 3864847 - RNA, 22 nt, Human
ccauguucugcccccagcccaa

SEQ ID NO: 3864848 - RNA, 13 nt, Human
ccauguugcugcc

SEQ ID NO: 3864849 - RNA, 14 nt, Human
ccauguugcugcca

SEQ ID NO: 3864850 - RNA, 15 nt, Human
ccauguugcugccaa

SEQ ID NO: 3864851 - RNA, 14 nt, Human
ccauguuggccagg

SEQ ID NO: 3864852 - RNA, 17 nt, Human
ccauguuggccaggcug

SEQ ID NO: 3864853 - RNA, 21 nt, Human
ccauguuggccaggcuggucu

SEQ ID NO: 3864854 - RNA, 20 nt, Human
ccauguuguaaugcugcacu

SEQ ID NO: 3864855 - RNA, 15 nt, Human
ccauguuucucuggc

SEQ ID NO: 3864856 - RNA, 16 nt, Human
ccauguuucucuggcc

SEQ ID NO: 3864857 - RNA, 21 nt, Human
ccauguuucucuggccccaag

SEQ ID NO: 3864858 - RNA, 21 nt, Human
ccauguuuguggcuauuaaaa

SEQ ID NO: 3864859 - RNA, 14 nt, Human
ccauuaaaacugcu

SEQ ID NO: 3864860 - RNA, 15 nt, Human
ccauuaaaacugcuu

SEQ ID NO: 3864861 - RNA, 18 nt, Human
ccauuaaaccaucucccu

SEQ ID NO: 3864862 - RNA, 19 nt, Human
ccauuaaaccaucucccug

SEQ ID NO: 3864863 - RNA, 10 nt, Human
ccauuaaacg

SEQ ID NO: 3864864 - RNA, 13 nt, Human
ccauuaaagucug

SEQ ID NO: 3864865 - RNA, 14 nt, Human
ccauuaacugcuuc

SEQ ID NO: 3864866 - RNA, 15 nt, Human
ccauuaaggggaaga

SEQ ID NO: 3864867 - RNA, 23 nt, Human
ccauuacagagguauuaaaacua

SEQ ID NO: 3864868 - RNA, 14 nt, Human
ccauuaccauggag

SEQ ID NO: 3864869 - RNA, 12 nt, Human
ccauuacccuca

SEQ ID NO: 3864870 - RNA, 16 nt, Human
ccauuaggccagcaac

SEQ ID NO: 3864871 - RNA, 20 nt, Human
ccauuauaaugaauuuagug

SEQ ID NO: 3864872 - RNA, 17 nt, Human
ccauuaugaagaagaga

SEQ ID NO: 3864873 - RNA, 15 nt, Human
ccauuauguccuagu

SEQ ID NO: 3864874 - RNA, 14 nt, Human
ccauuauucaaagu

SEQ ID NO: 3864875 - RNA, 18 nt, Human
ccauuauuuucugucaga

SEQ ID NO: 3864876 - RNA, 20 nt, Human
ccauucacuucauaauccag

SEQ ID NO: 3864877 - RNA, 22 nt, Human
ccauucagcccauuucacaccu

SEQ ID NO: 3864878 - RNA, 11 nt, Human
ccauucaguca

SEQ ID NO: 3864879 - RNA, 13 nt, Human
ccauucauuccau

SEQ ID NO: 3864880 - RNA, 18 nt, Human
ccauucauuccauucugg

SEQ ID NO: 3864881 - RNA, 20 nt, Human
ccauucauuccauucuggaa

SEQ ID NO: 3864882 - RNA, 11 nt, Human
ccauuccaaaa

SEQ ID NO: 3864883 - RNA, 13 nt, Human
ccauuccaaaaua

SEQ ID NO: 3864884 - RNA, 18 nt, Human
ccauuccacacagaaugc

SEQ ID NO: 3864885 - RNA, 19 nt, Human
ccauuccccagccucucuu

SEQ ID NO: 3864886 - RNA, 15 nt, Human
ccauucccccagugc

SEQ ID NO: 3864887 - RNA, 14 nt, Human
ccauucccugccug

SEQ ID NO: 3864888 - RNA, 19 nt, Human
ccauucccugggaucuggu

SEQ ID NO: 3864889 - RNA, 22 nt, Human
ccauuccucaccuuuucccggg

SEQ ID NO: 3864890 - RNA, 12 nt, Human
ccauuccucagg

SEQ ID NO: 3864891 - RNA, 22 nt, Human
ccauuccuggaaaccacagucc

SEQ ID NO: 3864892 - RNA, 16 nt, Human
ccauuccuucccagag

SEQ ID NO: 3864893 - RNA, 12 nt, Human
ccauucuacuug

SEQ ID NO: 3864894 - RNA, 17 nt, Human
ccauucuauuuuagaau

SEQ ID NO: 3864895 - RNA, 18 nt, Human
ccauucucaagcccugca

SEQ ID NO: 3864896 - RNA, 16 nt, Human
ccauucuccaccugcc

SEQ ID NO: 3864897 - RNA, 19 nt, Human
ccauucuccaccugccagg

SEQ ID NO: 3864898 - RNA, 20 nt, Human
ccauucuccaccugccaggg

SEQ ID NO: 3864899 - RNA, 22 nt, Human
ccauucuccagggguuuacagu

SEQ ID NO: 3864900 - RNA, 13 nt, Human
ccauucuccauuu

SEQ ID NO: 3864901 - RNA, 13 nt, Human
ccauucucccagg

SEQ ID NO: 3864902 - RNA, 15 nt, Human
ccauucugccugccc

SEQ ID NO: 3864903 - RNA, 19 nt, Human
ccauucugcuccuucccca

SEQ ID NO: 3864904 - RNA, 22 nt, Human
ccauucuuacuuacuaaaauau

SEQ ID NO: 3864905 - RNA, 20 nt, Human
ccauucuuccuaguuuucuc

SEQ ID NO: 3864906 - RNA, 14 nt, Human
ccauucuuucccaa

SEQ ID NO: 3864907 - RNA, 13 nt, Human
ccauucuuucuga

SEQ ID NO: 3864908 - RNA, 18 nt, Human
ccauucuuuuguaauuua

SEQ ID NO: 3864909 - RNA, 23 nt, Human
ccauugaagccgacucuggcccu

SEQ ID NO: 3864910 - RNA, 21 nt, Human
ccauugaaggcuuaaacccau

SEQ ID NO: 3864911 - RNA, 13 nt, Human
ccauugaauucuu

SEQ ID NO: 3864912 - RNA, 16 nt, Human
ccauugacauguacag

SEQ ID NO: 3864913 - RNA, 17 nt, Human
ccauugacauguacaga

SEQ ID NO: 3864914 - RNA, 24 nt, Human
ccauugaggcuugguuccuuccca

SEQ ID NO: 3864915 - RNA, 18 nt, Human
ccauugcacuccagccug

SEQ ID NO: 3864916 - RNA, 20 nt, Human
ccauugcacuccagccuggg

SEQ ID NO: 3864917 - RNA, 15 nt, Human
ccauugccaccagga

SEQ ID NO: 3864918 - RNA, 14 nt, Human
ccauugcccugguu

SEQ ID NO: 3864919 - RNA, 17 nt, Human
ccauugccuagcucuuu

SEQ ID NO: 3864920 - RNA, 15 nt, Human
ccauugccuccuccu

SEQ ID NO: 3864921 - RNA, 23 nt, Human
ccauugccuccuccuucccaaag

SEQ ID NO: 3864922 - RNA, 19 nt, Human
ccauugcuguucuacuuuu

SEQ ID NO: 3864923 - RNA, 11 nt, Human
ccauuggaaau

SEQ ID NO: 3864924 - RNA, 15 nt, Human
ccauuggaaauuuca

SEQ ID NO: 3864925 - RNA, 19 nt, Human
ccauuggcuauuuaaaacu

SEQ ID NO: 3864926 - RNA, 17 nt, Human
ccauuggggcucccagc

SEQ ID NO: 3864927 - RNA, 22 nt, Human
ccauuggggcucccagccaggc

SEQ ID NO: 3864928 - RNA, 15 nt, Human
ccauugucccucugc

SEQ ID NO: 3864929 - RNA, 19 nt, Human
ccauugugaaccaaugcaa

SEQ ID NO: 3864930 - RNA, 12 nt, Human
ccauugugugag

SEQ ID NO: 3864931 - RNA, 21 nt, Human
ccauuguuugaaacaaagaag

SEQ ID NO: 3864932 - RNA, 13 nt, Human
ccauuuaaagcuu

SEQ ID NO: 3864933 - RNA, 20 nt, Human
ccauuuaauggggaggacaa

SEQ ID NO: 3864934 - RNA, 12 nt, Human
ccauuuacacuu

SEQ ID NO: 3864935 - RNA, 18 nt, Human
ccauuuacacuuuugaga

SEQ ID NO: 3864936 - RNA, 16 nt, Human
ccauuuacugcauucu

SEQ ID NO: 3864937 - RNA, 23 nt, Human
ccauuuacugcauucuucugauc

SEQ ID NO: 3864938 - RNA, 21 nt, Human
ccauuuagguuucugaguucc

SEQ ID NO: 3864939 - RNA, 14 nt, Human
ccauuuauccaccu

SEQ ID NO: 3864940 - RNA, 20 nt, Human
ccauuuaugugagugugugu

SEQ ID NO: 3864941 - RNA, 22 nt, Human
ccauuucacaccugaaaauguu

SEQ ID NO: 3864942 - RNA, 17 nt, Human
ccauuucaucuauuucu

SEQ ID NO: 3864943 - RNA, 15 nt, Human
ccauuucauguccau

SEQ ID NO: 3864944 - RNA, 21 nt, Human
ccauuucauuugugccagaau

SEQ ID NO: 3864945 - RNA, 22 nt, Human
ccauuuccauguccccucccag

SEQ ID NO: 3864946 - RNA, 17 nt, Human
ccauuucccaucugcac

SEQ ID NO: 3864947 - RNA, 21 nt, Human
ccauuucgugagccccaucuu

SEQ ID NO: 3864948 - RNA, 11 nt, Human
ccauuucuaau

SEQ ID NO: 3864949 - RNA, 21 nt, Human
ccauuucuaauuauguagcuc

SEQ ID NO: 3864950 - RNA, 13 nt, Human
ccauuucuacucu

SEQ ID NO: 3864951 - RNA, 13 nt, Human
ccauuucugccuu

SEQ ID NO: 3864952 - RNA, 15 nt, Human
ccauuugaaagaaag

SEQ ID NO: 3864953 - RNA, 19 nt, Human
ccauuugauaccccugggg

SEQ ID NO: 3864954 - RNA, 18 nt, Human
ccauuugcaauaacagcu

SEQ ID NO: 3864955 - RNA, 21 nt, Human
ccauuugcguuccaugaugcu

SEQ ID NO: 3864956 - RNA, 20 nt, Human
ccauuugcuacuguacauaa

SEQ ID NO: 3864957 - RNA, 21 nt, Human
ccauuuggagggccugggccu

SEQ ID NO: 3864958 - RNA, 18 nt, Human
ccauuuggcaucccuggg

SEQ ID NO: 3864959 - RNA, 12 nt, Human
ccauuuguaaaa

SEQ ID NO: 3864960 - RNA, 13 nt, Human
ccauuuguaauaa

SEQ ID NO: 3864961 - RNA, 15 nt, Human
ccauuugugccagag

SEQ ID NO: 3864962 - RNA, 18 nt, Human
ccauuugugccagaggaa

SEQ ID NO: 3864963 - RNA, 14 nt, Human
ccauuugugugugu

SEQ ID NO: 3864964 - RNA, 14 nt, Human
ccauuuguuaucug

SEQ ID NO: 3864965 - RNA, 13 nt, Human
ccauuuguucaua

SEQ ID NO: 3864966 - RNA, 16 nt, Human
ccauuuguucauauua

SEQ ID NO: 3864967 - RNA, 20 nt, Human
ccauuuguucauauuaagaa

SEQ ID NO: 3864968 - RNA, 14 nt, Human
ccauuuuaaguccc

SEQ ID NO: 3864969 - RNA, 15 nt, Human
ccauuuuaagucccu

SEQ ID NO: 3864970 - RNA, 19 nt, Human
ccauuuuagucacuuuuuu

SEQ ID NO: 3864971 - RNA, 18 nt, Human
ccauuuuccuacaggcag

SEQ ID NO: 3864972 - RNA, 12 nt, Human
ccauuuucugug

SEQ ID NO: 3864973 - RNA, 13 nt, Human
ccauuuucugugg

SEQ ID NO: 3864974 - RNA, 17 nt, Human
ccauuuugcaaaauuuc

SEQ ID NO: 3864975 - RNA, 23 nt, Human
ccauuuuggauucuuauggacaa

SEQ ID NO: 3864976 - RNA, 20 nt, Human
cccacguucucacacccacc

SEQ ID NO: 3864977 - RNA, 15 nt, Human
cccacuacugcagca

SEQ ID NO: 3864978 - RNA, 18 nt, Human
cccacuagacccacugga

SEQ ID NO: 3864979 - RNA, 18 nt, Human
cccacuagccuaggucau

SEQ ID NO: 3864980 - RNA, 23 nt, Human
cccacucaagccaagcagccaag

SEQ ID NO: 3864981 - RNA, 12 nt, Human
cccacucacaga

SEQ ID NO: 3864982 - RNA, 12 nt, Human
cccacucccaca

SEQ ID NO: 3864983 - RNA, 13 nt, Human
cccacucccucac

SEQ ID NO: 3864984 - RNA, 14 nt, Human
cccacucccucaca

SEQ ID NO: 3864985 - RNA, 22 nt, Human
cccacucccuggcucucagaag

SEQ ID NO: 3864986 - RNA, 18 nt, Human
cccacuccugcucugcuc

SEQ ID NO: 3864987 - RNA, 21 nt, Human
cccacucuaggggucaggcuc

SEQ ID NO: 3864988 - RNA, 13 nt, Human
cccacucucagag

SEQ ID NO: 3864989 - RNA, 14 nt, Human
cccacucucagagg

SEQ ID NO: 3864990 - RNA, 14 nt, Human
cccacucucauucc

SEQ ID NO: 3864991 - RNA, 21 nt, Human
cccacucucauuccccaggug

SEQ ID NO: 3864992 - RNA, 11 nt, Human
cccacucuccc

SEQ ID NO: 3864993 - RNA, 14 nt, Human
cccacucuccccac

SEQ ID NO: 3864994 - RNA, 15 nt, Human
cccacucuccccaca

SEQ ID NO: 3864995 - RNA, 17 nt, Human
cccacucuccccacacu

SEQ ID NO: 3864996 - RNA, 14 nt, Human
cccacucuccuagg

SEQ ID NO: 3864997 - RNA, 15 nt, Human
cccacucuccuaggc

SEQ ID NO: 3864998 - RNA, 21 nt, Human
cccacucuccuaggcauucug

SEQ ID NO: 3864999 - RNA, 13 nt, Human
cccacucugcucu

SEQ ID NO: 3865000 - RNA, 16 nt, Human
cccacucugcucugau

SEQ ID NO: 3865001 - RNA, 17 nt, Human
cccacucugcucugaug

SEQ ID NO: 3865002 - RNA, 18 nt, Human
cccacucugcucugaugc

SEQ ID NO: 3865003 - RNA, 21 nt, Human
cccacucugcuuugacugagc

SEQ ID NO: 3865004 - RNA, 12 nt, Human
cccacugaugcu

SEQ ID NO: 3865005 - RNA, 15 nt, Human
cccacugcaauccug

SEQ ID NO: 3865006 - RNA, 14 nt, Human
cccacugcaccccc

SEQ ID NO: 3865007 - RNA, 23 nt, Human
cccacugcacccccuccugcugc

SEQ ID NO: 3865008 - RNA, 15 nt, Human
cccacugcaggcccc

SEQ ID NO: 3865009 - RNA, 13 nt, Human
cccacugccagca

SEQ ID NO: 3865010 - RNA, 14 nt, Human
cccacugccagcag

SEQ ID NO: 3865011 - RNA, 15 nt, Human
cccacugccagcagc

SEQ ID NO: 3865012 - RNA, 17 nt, Human
cccacugccagcagcag

SEQ ID NO: 3865013 - RNA, 21 nt, Human
cccacugccagcagcagcagg

SEQ ID NO: 3865014 - RNA, 17 nt, Human
cccacugccauaaaaca

SEQ ID NO: 3865015 - RNA, 17 nt, Human
cccacugcccacccccu

SEQ ID NO: 3865016 - RNA, 19 nt, Human
cccacugcccacccccuca

SEQ ID NO: 3865017 - RNA, 22 nt, Human
cccacugcccacccccucaagc

SEQ ID NO: 3865018 - RNA, 16 nt, Human
cccacugccucagguu

SEQ ID NO: 3865019 - RNA, 14 nt, Human
cccacugccugccc

SEQ ID NO: 3865020 - RNA, 16 nt, Human
cccacugccugcccac

SEQ ID NO: 3865021 - RNA, 13 nt, Human
cccacugcucugg

SEQ ID NO: 3865022 - RNA, 15 nt, Human
cccacuggcagcauc

SEQ ID NO: 3865023 - RNA, 15 nt, Human
cccacuggcuguggg

SEQ ID NO: 3865024 - RNA, 22 nt, Human
cccacuggcugugggcucccuu

SEQ ID NO: 3865025 - RNA, 21 nt, Human
cccacuggggaaauaacagcu

SEQ ID NO: 3865026 - RNA, 21 nt, Human
cccacugguuccuucuuccug

SEQ ID NO: 3865027 - RNA, 18 nt, Human
cccacuguacuugcucuu

SEQ ID NO: 3865028 - RNA, 19 nt, Human
cccacuguacuugcucuug

SEQ ID NO: 3865029 - RNA, 19 nt, Human
cccacuguaucuaggcaac

SEQ ID NO: 3865030 - RNA, 12 nt, Human
cccacuguauga

SEQ ID NO: 3865031 - RNA, 16 nt, Human
cccacugugcaggugc

SEQ ID NO: 3865032 - RNA, 16 nt, Human
cccacugugccucaga

SEQ ID NO: 3865033 - RNA, 13 nt, Human
cccacuucagccu

SEQ ID NO: 3865034 - RNA, 12 nt, Human
cccacuucccug

SEQ ID NO: 3865035 - RNA, 15 nt, Human
cccacuucccugggc

SEQ ID NO: 3865036 - RNA, 12 nt, Human
cccacuucucau

SEQ ID NO: 3865037 - RNA, 19 nt, Human
cccacuucucaucacacac

SEQ ID NO: 3865038 - RNA, 20 nt, Human
cccacuucucaucacacaca

SEQ ID NO: 3865039 - RNA, 21 nt, Human
cccacuucucaucacacacau

SEQ ID NO: 3865040 - RNA, 12 nt, Human
cccacuucugca

SEQ ID NO: 3865041 - RNA, 23 nt, Human
cccacuugagaauuacccuuuug

SEQ ID NO: 3865042 - RNA, 13 nt, Human
cccacuugccucu

SEQ ID NO: 3865043 - RNA, 23 nt, Human
cccacuugucacugacacaaagg

SEQ ID NO: 3865044 - RNA, 22 nt, Human
cccacuuugcuguuccuuacuu

SEQ ID NO: 3865045 - RNA, 15 nt, Human
cccacuuuggccucc

SEQ ID NO: 3865046 - RNA, 13 nt, Human
cccagaaaagaaa

SEQ ID NO: 3865047 - RNA, 14 nt, Human
cccagaaaggagac

SEQ ID NO: 3865048 - RNA, 17 nt, Human
cccagaaaggagacuag

SEQ ID NO: 3865049 - RNA, 14 nt, Human
cccagaacacacuc

SEQ ID NO: 3865050 - RNA, 17 nt, Human
cccagaacucugccugc

SEQ ID NO: 3865051 - RNA, 21 nt, Human
cccagaacucugccugcccuu

SEQ ID NO: 3865052 - RNA, 19 nt, Human
cccagaaggaccuccugag

SEQ ID NO: 3865053 - RNA, 23 nt, Human
cccagaaggcagggaaaggcucu

SEQ ID NO: 3865054 - RNA, 22 nt, Human
cccagaauaaacuggcagcuca

SEQ ID NO: 3865055 - RNA, 19 nt, Human
cccagaauaaguuauugca

SEQ ID NO: 3865056 - RNA, 14 nt, Human
cccagaauacugau

SEQ ID NO: 3865057 - RNA, 12 nt, Human
cccagaaugaga

SEQ ID NO: 3865058 - RNA, 18 nt, Human
cccagaaugagacaucca

SEQ ID NO: 3865059 - RNA, 21 nt, Human
cccagacagcucccucugccu

SEQ ID NO: 3865060 - RNA, 17 nt, Human
cccagacccuggaggaa

SEQ ID NO: 3865061 - RNA, 14 nt, Human
cccagaccugccuc

SEQ ID NO: 3865062 - RNA, 18 nt, Human
cccagaccugccucuucc

SEQ ID NO: 3865063 - RNA, 22 nt, Human
cccagaccuguuagcagacagg

SEQ ID NO: 3865064 - RNA, 17 nt, Human
cccagacgaugucuuca

SEQ ID NO: 3865065 - RNA, 15 nt, Human
cccagacgccuggcu

SEQ ID NO: 3865066 - RNA, 20 nt, Human
cccagacuagauguaguauu

SEQ ID NO: 3865067 - RNA, 21 nt, Human
cccagagaaagcgcagaugcu

SEQ ID NO: 3865068 - RNA, 14 nt, Human
cccagagaagcccc

SEQ ID NO: 3865069 - RNA, 16 nt, Human
cccagagaagccccuu

SEQ ID NO: 3865070 - RNA, 22 nt, Human
cccagagaagccccuuccccau

SEQ ID NO: 3865071 - RNA, 13 nt, Human
cccagagacagga

SEQ ID NO: 3865072 - RNA, 15 nt, Human
cccagagacaggaaa

SEQ ID NO: 3865073 - RNA, 21 nt, Human
cccagagacauacuugaaggg

SEQ ID NO: 3865074 - RNA, 22 nt, Human
cccagagacauacuugaagggc

SEQ ID NO: 3865075 - RNA, 13 nt, Human
cccagagagcccg

SEQ ID NO: 3865076 - RNA, 17 nt, Human
cccagagaugccuccac

SEQ ID NO: 3865077 - RNA, 18 nt, Human
cccagagaugccuccacc

SEQ ID NO: 3865078 - RNA, 20 nt, Human
cccagagaugucaucagagc

SEQ ID NO: 3865079 - RNA, 20 nt, Human
cccagagcaccugcugucug

SEQ ID NO: 3865080 - RNA, 12 nt, Human
cccagagcacug

SEQ ID NO: 3865081 - RNA, 21 nt, Human
cccagagcaggaggccccugg

SEQ ID NO: 3865082 - RNA, 15 nt, Human
cccagagccacacau

SEQ ID NO: 3865083 - RNA, 13 nt, Human
cccagagccacag

SEQ ID NO: 3865084 - RNA, 14 nt, Human
cccagagccacagu

SEQ ID NO: 3865085 - RNA, 15 nt, Human
cccagagcccagcuc

SEQ ID NO: 3865086 - RNA, 17 nt, Human
cccagagcccagcucca

SEQ ID NO: 3865087 - RNA, 15 nt, Human
cccagagcccaggcu

SEQ ID NO: 3865088 - RNA, 16 nt, Human
cccagagccccuccuc

SEQ ID NO: 3865089 - RNA, 20 nt, Human
cccagagccccuccuccagc

SEQ ID NO: 3865090 - RNA, 14 nt, Human
cccagagcugggug

SEQ ID NO: 3865091 - RNA, 18 nt, Human
cccagagcugggugagug

SEQ ID NO: 3865092 - RNA, 11 nt, Human
cccagagcugu

SEQ ID NO: 3865093 - RNA, 21 nt, Human
cccagagcuguggacuuuguu

SEQ ID NO: 3865094 - RNA, 13 nt, Human
cccagagcuguuu

SEQ ID NO: 3865095 - RNA, 21 nt, Human
cccagagcuguuuauggccuc

SEQ ID NO: 3865096 - RNA, 23 nt, Human
cccagagcuguuuauggccucag

SEQ ID NO: 3865097 - RNA, 22 nt, Human
cccagaggaaggggccagaggc

SEQ ID NO: 3865098 - RNA, 15 nt, Human
cccagaggagggcag

SEQ ID NO: 3865099 - RNA, 20 nt, Human
cccagaggccgagagcuaug

SEQ ID NO: 3865100 - RNA, 23 nt, Human
cccagaggcgucccgcaccuguc

SEQ ID NO: 3865101 - RNA, 24 nt, Human
cccagaggcgucccgcaccugucu

SEQ ID NO: 3865102 - RNA, 16 nt, Human
cccagaggcuggguga

SEQ ID NO: 3865103 - RNA, 14 nt, Human
cccagagggccugc

SEQ ID NO: 3865104 - RNA, 14 nt, Human
cccagaggggccug

SEQ ID NO: 3865105 - RNA, 22 nt, Human
cccagagggucugggggcacaa

SEQ ID NO: 3865106 - RNA, 20 nt, Human
cccagagguaacagaacagc

SEQ ID NO: 3865107 - RNA, 19 nt, Human
cccagagguccagcccauc

SEQ ID NO: 3865108 - RNA, 15 nt, Human
cccagagucaucuga

SEQ ID NO: 3865109 - RNA, 17 nt, Human
cccagagugugaaacuu

SEQ ID NO: 3865110 - RNA, 16 nt, Human
cccagagugugggaag

SEQ ID NO: 3865111 - RNA, 21 nt, Human
cccagaguuuuuauguagcag

SEQ ID NO: 3865112 - RNA, 18 nt, Human
cccagauaccagccccug

SEQ ID NO: 3865113 - RNA, 14 nt, Human
cccagaucagccag

SEQ ID NO: 3865114 - RNA, 23 nt, Human
cccagauggcuggaaggggucca

SEQ ID NO: 3865115 - RNA, 21 nt, Human
cccagauguuuuacgucuggg

SEQ ID NO: 3865116 - RNA, 22 nt, Human
cccagauguuuuacgucuggga

SEQ ID NO: 3865117 - RNA, 19 nt, Human
cccagauuccccuguguca

SEQ ID NO: 3865118 - RNA, 20 nt, Human
cccagauugcaacaggcugg

SEQ ID NO: 3865119 - RNA, 21 nt, Human
cccagauugcaacaggcuggg

SEQ ID NO: 3865120 - RNA, 23 nt, Human
cccagauugcaacaggcugggcu

SEQ ID NO: 3865121 - RNA, 11 nt, Human
cccucucugga

SEQ ID NO: 3865122 - RNA, 22 nt, Human
cccucucuggcuaaggacaggc

SEQ ID NO: 3865123 - RNA, 19 nt, Human
cccucucugggccucagag

SEQ ID NO: 3865124 - RNA, 14 nt, Human
cccucucuugucag

SEQ ID NO: 3865125 - RNA, 20 nt, Human
cccucugaaaguuguacaug

SEQ ID NO: 3865126 - RNA, 16 nt, Human
cccucugaacuugccu

SEQ ID NO: 3865127 - RNA, 19 nt, Human
cccucugaaugguccaggg

SEQ ID NO: 3865128 - RNA, 14 nt, Human
cccucugaccugca

SEQ ID NO: 3865129 - RNA, 17 nt, Human
cccucugaccugcacug

SEQ ID NO: 3865130 - RNA, 19 nt, Human
cccucugaccugcacuggg

SEQ ID NO: 3865131 - RNA, 16 nt, Human
cccucugcacccagaa

SEQ ID NO: 3865132 - RNA, 14 nt, Human
cccucugccaccag

SEQ ID NO: 3865133 - RNA, 19 nt, Human
cccucugcccacucccugc

SEQ ID NO: 3865134 - RNA, 14 nt, Human
cccucugcccagcu

SEQ ID NO: 3865135 - RNA, 15 nt, Human
cccucugcccagcuu

SEQ ID NO: 3865136 - RNA, 14 nt, Human
cccucugccccucc

SEQ ID NO: 3865137 - RNA, 12 nt, Human
cccucugcccug

SEQ ID NO: 3865138 - RNA, 14 nt, Human
cccucugccugucc

SEQ ID NO: 3865139 - RNA, 15 nt, Human
cccucugccuguccc

SEQ ID NO: 3865140 - RNA, 16 nt, Human
cccucugccugucccu

SEQ ID NO: 3865141 - RNA, 19 nt, Human
cccucugcugaagacuugc

SEQ ID NO: 3865142 - RNA, 21 nt, Human
cccucuggaguggccacuaag

SEQ ID NO: 3865143 - RNA, 13 nt, Human
cccucuggaucaa

SEQ ID NO: 3865144 - RNA, 19 nt, Human
cccucuggauucugaaucu

SEQ ID NO: 3865145 - RNA, 12 nt, Human
cccucuggccag

SEQ ID NO: 3865146 - RNA, 18 nt, Human
cccucuggccaggaugga

SEQ ID NO: 3865147 - RNA, 14 nt, Human
cccucugggaaccu

SEQ ID NO: 3865148 - RNA, 17 nt, Human
cccucugggcucugagu

SEQ ID NO: 3865149 - RNA, 15 nt, Human
cccucuggucccaca

SEQ ID NO: 3865150 - RNA, 20 nt, Human
cccucuggucgcuccugccc

SEQ ID NO: 3865151 - RNA, 22 nt, Human
cccucuggucgcuccugcccac

SEQ ID NO: 3865152 - RNA, 18 nt, Human
cccucuguguauuugcuu

SEQ ID NO: 3865153 - RNA, 20 nt, Human
cccucuguucugcacacagc

SEQ ID NO: 3865154 - RNA, 21 nt, Human
cccucuguucugcacacagca

SEQ ID NO: 3865155 - RNA, 18 nt, Human
cccucuguugccaggcua

SEQ ID NO: 3865156 - RNA, 20 nt, Human
cccucuuauguaccucuuuu

SEQ ID NO: 3865157 - RNA, 14 nt, Human
cccucuucccuggu

SEQ ID NO: 3865158 - RNA, 22 nt, Human
cccucuuccuacuggucucucu

SEQ ID NO: 3865159 - RNA, 12 nt, Human
cccucuuccucu

SEQ ID NO: 3865160 - RNA, 20 nt, Human
cccucuuccugacgaaacug

SEQ ID NO: 3865161 - RNA, 14 nt, Human
cccucuucugagca

SEQ ID NO: 3865162 - RNA, 15 nt, Human
cccucuucugagcac

SEQ ID NO: 3865163 - RNA, 19 nt, Human
cccucuugacccaucuccc

SEQ ID NO: 3865164 - RNA, 15 nt, Human
cccucuugcccaucc

SEQ ID NO: 3865165 - RNA, 22 nt, Human
cccucuugcccauccugacuga

SEQ ID NO: 3865166 - RNA, 12 nt, Human
cccucuugcccc

SEQ ID NO: 3865167 - RNA, 19 nt, Human
cccucuugccccaaccccc

SEQ ID NO: 3865168 - RNA, 23 nt, Human
cccucuugccccaacccccagca

SEQ ID NO: 3865169 - RNA, 22 nt, Human
cccucuugccccccaccccagc

SEQ ID NO: 3865170 - RNA, 13 nt, Human
cccucuugucucc

SEQ ID NO: 3865171 - RNA, 21 nt, Human
cccucuuguuuuguuugucuc

SEQ ID NO: 3865172 - RNA, 17 nt, Human
cccucuuucccucccuu

SEQ ID NO: 3865173 - RNA, 16 nt, Human
cccucuuucucuuucu

SEQ ID NO: 3865174 - RNA, 22 nt, Human
cccucuuucucuuucuuccuuu

SEQ ID NO: 3865175 - RNA, 19 nt, Human
cccucuuugcugcagagaa

SEQ ID NO: 3865176 - RNA, 21 nt, Human
cccucuuuggcuccccuguac

SEQ ID NO: 3865177 - RNA, 12 nt, Human
cccucuuuucuu

SEQ ID NO: 3865178 - RNA, 16 nt, Human
cccucuuuucuuacuc

SEQ ID NO: 3865179 - RNA, 16 nt, Human
cccugaaaacccagag

SEQ ID NO: 3865180 - RNA, 18 nt, Human
cccugaaaacccagagag

SEQ ID NO: 3865181 - RNA, 22 nt, Human
cccugaaaauguuuuucugcca

SEQ ID NO: 3865182 - RNA, 13 nt, Human
cccugaaacacga

SEQ ID NO: 3865183 - RNA, 21 nt, Human
cccugaaacacgaaacuuguu

SEQ ID NO: 3865184 - RNA, 15 nt, Human
cccugaaacuuauuu

SEQ ID NO: 3865185 - RNA, 17 nt, Human
cccugaaacuuauuuuu

SEQ ID NO: 3865186 - RNA, 22 nt, Human
cccugaacaacgagccuuuuca

SEQ ID NO: 3865187 - RNA, 13 nt, Human
cccugaaccaucc

SEQ ID NO: 3865188 - RNA, 16 nt, Human
cccugaagccagccuu

SEQ ID NO: 3865189 - RNA, 14 nt, Human
cccugaaggaacca

SEQ ID NO: 3865190 - RNA, 19 nt, Human
cccugaaggccccgcccag

SEQ ID NO: 3865191 - RNA, 20 nt, Human
cccugaaggccccgcccagg

SEQ ID NO: 3865192 - RNA, 20 nt, Human
cccugaagugagcacagccu

SEQ ID NO: 3865193 - RNA, 20 nt, Human
cccugaauuuaaauagcuuu

SEQ ID NO: 3865194 - RNA, 16 nt, Human
cccugaccacucagag

SEQ ID NO: 3865195 - RNA, 15 nt, Human
cccugaccagcuccc

SEQ ID NO: 3865196 - RNA, 16 nt, Human
cccugaccagcucccc

SEQ ID NO: 3865197 - RNA, 12 nt, Human
cccugacccugc

SEQ ID NO: 3865198 - RNA, 16 nt, Human
cccugaccucccagcc

SEQ ID NO: 3865199 - RNA, 22 nt, Human
cccugaccucccagcccuaugg

SEQ ID NO: 3865200 - RNA, 16 nt, Human
cccugaccuggccccc

SEQ ID NO: 3865201 - RNA, 15 nt, Human
cccugacucauucug

SEQ ID NO: 3865202 - RNA, 12 nt, Human
cccugacugggg

SEQ ID NO: 3865203 - RNA, 19 nt, Human
cccugagauccccugagcc

SEQ ID NO: 3865204 - RNA, 20 nt, Human
cccugagauccccugagccc

SEQ ID NO: 3865205 - RNA, 16 nt, Human
cccugagcaaugucug

SEQ ID NO: 3865206 - RNA, 20 nt, Human
cccugagcaaugucugugcu

SEQ ID NO: 3865207 - RNA, 16 nt, Human
cccugagcaggaaagu

SEQ ID NO: 3865208 - RNA, 14 nt, Human
cccugagcaggauu

SEQ ID NO: 3865209 - RNA, 20 nt, Human
cccugagccagggucuccag

SEQ ID NO: 3865210 - RNA, 17 nt, Human
cccugagcccacugugc

SEQ ID NO: 3865211 - RNA, 15 nt, Human
cccugagccccuucc

SEQ ID NO: 3865212 - RNA, 12 nt, Human
cccugagccggc

SEQ ID NO: 3865213 - RNA, 11 nt, Human
cccugagcuga

SEQ ID NO: 3865214 - RNA, 14 nt, Human
cccugagcugacca

SEQ ID NO: 3865215 - RNA, 16 nt, Human
cccugagcuuucugcu

SEQ ID NO: 3865216 - RNA, 22 nt, Human
cccugaggaaggaggggaagcu

SEQ ID NO: 3865217 - RNA, 19 nt, Human
cccugaggagucugagguc

SEQ ID NO: 3865218 - RNA, 22 nt, Human
cccugaggagucugagguccug

SEQ ID NO: 3865219 - RNA, 17 nt, Human
cccugaggcccagaggg

SEQ ID NO: 3865220 - RNA, 23 nt, Human
cccugaggcccagagggccugca

SEQ ID NO: 3865221 - RNA, 19 nt, Human
cccugaggccuagacucug

SEQ ID NO: 3865222 - RNA, 23 nt, Human
cccugagggcggggugucugucu

SEQ ID NO: 3865223 - RNA, 21 nt, Human
cccugaggucagggagugcug

SEQ ID NO: 3865224 - RNA, 17 nt, Human
cccugaggugagcauca

SEQ ID NO: 3865225 - RNA, 15 nt, Human
cccugaggugugggg

SEQ ID NO: 3865226 - RNA, 20 nt, Human
cccugaggugugggggcugc

SEQ ID NO: 3865227 - RNA, 20 nt, Human
cccugaguggaucuccaagg

SEQ ID NO: 3865228 - RNA, 22 nt, Human
cccugaucccauuuuccucuga

SEQ ID NO: 3865229 - RNA, 21 nt, Human
cccugaucugacauccccacu

SEQ ID NO: 3865230 - RNA, 19 nt, Human
cccugauuacaccagccuc

SEQ ID NO: 3865231 - RNA, 19 nt, Human
cccugauugaccugcuccg

SEQ ID NO: 3865232 - RNA, 21 nt, Human
cccugauugaccugcuccgcu

SEQ ID NO: 3865233 - RNA, 21 nt, Human
cccugauuuaauaugcaaagu

SEQ ID NO: 3865234 - RNA, 18 nt, Human
cccugcaaaaggacucuc

SEQ ID NO: 3865235 - RNA, 20 nt, Human
cccugcaaaaggacucucag

SEQ ID NO: 3865236 - RNA, 22 nt, Human
cccugcaaacagaacaggguca

SEQ ID NO: 3865237 - RNA, 14 nt, Human
cccugcacagcagg

SEQ ID NO: 3865238 - RNA, 22 nt, Human
cccugcacagcaggcugccagu

SEQ ID NO: 3865239 - RNA, 15 nt, Human
cccugcacccuccua

SEQ ID NO: 3865240 - RNA, 17 nt, Human
cccugcacccuccuagg

SEQ ID NO: 3865241 - RNA, 21 nt, Human
cccugcacuaaagccagccug

SEQ ID NO: 3865242 - RNA, 22 nt, Human
cccugcacuaaagccagccuga

SEQ ID NO: 3865243 - RNA, 13 nt, Human
cccugcacuggag

SEQ ID NO: 3865244 - RNA, 20 nt, Human
cccugcacuguaaaaugugg

SEQ ID NO: 3865245 - RNA, 14 nt, Human
cccugcacuguccu

SEQ ID NO: 3865246 - RNA, 13 nt, Human
cccugcagacccu

SEQ ID NO: 3865247 - RNA, 15 nt, Human
cccugcagacccugc

SEQ ID NO: 3865248 - RNA, 17 nt, Human
cccugcagacccugccc

SEQ ID NO: 3865249 - RNA, 20 nt, Human
cccugcagagaugcgguggc

SEQ ID NO: 3865250 - RNA, 15 nt, Human
cccugcagaugccac

SEQ ID NO: 3865251 - RNA, 18 nt, Human
cccugcagaugccacccu

SEQ ID NO: 3865252 - RNA, 19 nt, Human
cccugcagcacggacaaua

SEQ ID NO: 3865253 - RNA, 13 nt, Human
cccugcagcccug

SEQ ID NO: 3865254 - RNA, 13 nt, Human
cccugcagcucuc

SEQ ID NO: 3865255 - RNA, 21 nt, Human
cccugcagcucucaugcugcc

SEQ ID NO: 3865256 - RNA, 15 nt, Human
cccugcaggaaggag

SEQ ID NO: 3865257 - RNA, 22 nt, Human
cccugcaggaaggagcugccug

SEQ ID NO: 3865258 - RNA, 21 nt, Human
cccugcaguguucgcuuggcu

SEQ ID NO: 3865259 - RNA, 17 nt, Human
cccugcaguuccccugg

SEQ ID NO: 3865260 - RNA, 19 nt, Human
cccugcaucugaccagcag

SEQ ID NO: 3865261 - RNA, 22 nt, Human
cccugcaugggccagccccucc

SEQ ID NO: 3865262 - RNA, 15 nt, Human
cccugccacccuggg

SEQ ID NO: 3865263 - RNA, 18 nt, Human
cccugccaccuccugccu

SEQ ID NO: 3865264 - RNA, 14 nt, Human
cccugccaccuguc

SEQ ID NO: 3865265 - RNA, 12 nt, Human
cccuuugcuguc

SEQ ID NO: 3865266 - RNA, 14 nt, Human
cccuuugggcccag

SEQ ID NO: 3865267 - RNA, 15 nt, Human
cccuuugggcccugc

SEQ ID NO: 3865268 - RNA, 17 nt, Human
cccuuugggcccugcau

SEQ ID NO: 3865269 - RNA, 18 nt, Human
cccuuugggcccugcaug

SEQ ID NO: 3865270 - RNA, 14 nt, Human
cccuuugugcugug

SEQ ID NO: 3865271 - RNA, 15 nt, Human
cccuuuuaaaguuga

SEQ ID NO: 3865272 - RNA, 16 nt, Human
cccuuuucagcuucug

SEQ ID NO: 3865273 - RNA, 23 nt, Human
cccuuuucuuuucuacccuagcc

SEQ ID NO: 3865274 - RNA, 14 nt, Human
cccuuuuggccccc

SEQ ID NO: 3865275 - RNA, 16 nt, Human
cccuuuuggguuucug

SEQ ID NO: 3865276 - RNA, 20 nt, Human
cccuuuuggguuucugcccu

SEQ ID NO: 3865277 - RNA, 13 nt, Human
cccuuuugucucu

SEQ ID NO: 3865278 - RNA, 16 nt, Human
cccuuuuguuccccag

SEQ ID NO: 3865279 - RNA, 16 nt, Human
cccuuuuuacuccccu

SEQ ID NO: 3865280 - RNA, 16 nt, Human
cccuuuuuccuugucc

SEQ ID NO: 3865281 - RNA, 23 nt, Human
cccuuuuuccuuguccccacacu

SEQ ID NO: 3865282 - RNA, 15 nt, Human
cccuuuuucuccagc

SEQ ID NO: 3865283 - RNA, 16 nt, Human
cccuuuuucuccagcu

SEQ ID NO: 3865284 - RNA, 21 nt, Human
cccuuuuuuccuuuccaccuu

SEQ ID NO: 3865285 - RNA, 22 nt, Human
cccuuuuuuggcugcugaaggc

SEQ ID NO: 3865286 - RNA, 21 nt, Human
cccuuuuuugucccccaacuu

SEQ ID NO: 3865287 - RNA, 23 nt, Human
cccuuuuuuuccuuuuucugauu

SEQ ID NO: 3865288 - RNA, 15 nt, Human
ccgaaaaauccucuu

SEQ ID NO: 3865289 - RNA, 16 nt, Human
ccgaaaacguggcugc

SEQ ID NO: 3865290 - RNA, 15 nt, Human
ccgaaaaucauauaa

SEQ ID NO: 3865291 - RNA, 15 nt, Human
ccgaacacccucgaa

SEQ ID NO: 3865292 - RNA, 18 nt, Human
ccgaagaauggagaggaa

SEQ ID NO: 3865293 - RNA, 18 nt, Human
ccgaagccgccuguggac

SEQ ID NO: 3865294 - RNA, 21 nt, Human
ccgaagcuaacagggaaggca

SEQ ID NO: 3865295 - RNA, 19 nt, Human
ccgaagcucuggcugaacc

SEQ ID NO: 3865296 - RNA, 19 nt, Human
ccgaaggaaaagggcuuuc

SEQ ID NO: 3865297 - RNA, 23 nt, Human
ccgaaggugaggagcuugaaacc

SEQ ID NO: 3865298 - RNA, 15 nt, Human
ccgaaggugcuggag

SEQ ID NO: 3865299 - RNA, 14 nt, Human
ccgaaugugucuuu

SEQ ID NO: 3865300 - RNA, 16 nt, Human
ccgaauugagcacaaa

SEQ ID NO: 3865301 - RNA, 22 nt, Human
ccgacaacuauuucggccuuuu

SEQ ID NO: 3865302 - RNA, 12 nt, Human
ccgacagccugg

SEQ ID NO: 3865303 - RNA, 15 nt, Human
ccgacagcuuuccag

SEQ ID NO: 3865304 - RNA, 13 nt, Human
ccgacauggcucc

SEQ ID NO: 3865305 - RNA, 17 nt, Human
ccgacauugucucccgc

SEQ ID NO: 3865306 - RNA, 15 nt, Human
ccgacccucugggaa

SEQ ID NO: 3865307 - RNA, 22 nt, Human
ccgacccuugccgucuaccuga

SEQ ID NO: 3865308 - RNA, 12 nt, Human
ccgaccucagcc

SEQ ID NO: 3865309 - RNA, 13 nt, Human
ccgaccucagccu

SEQ ID NO: 3865310 - RNA, 14 nt, Human
ccgaccucagccuu

SEQ ID NO: 3865311 - RNA, 15 nt, Human
ccgaccucagccuuc

SEQ ID NO: 3865312 - RNA, 18 nt, Human
ccgaccuggccugucugu

SEQ ID NO: 3865313 - RNA, 21 nt, Human
ccgacgccacagcccagccac

SEQ ID NO: 3865314 - RNA, 17 nt, Human
ccgacgcgucuccuguu

SEQ ID NO: 3865315 - RNA, 17 nt, Human
ccgacuagacacacaaa

SEQ ID NO: 3865316 - RNA, 14 nt, Human
ccgacucacaccac

SEQ ID NO: 3865317 - RNA, 12 nt, Human
ccgacuccagcc

SEQ ID NO: 3865318 - RNA, 14 nt, Human
ccgacuccagccag

SEQ ID NO: 3865319 - RNA, 19 nt, Human
ccgacucuuucugagugcc

SEQ ID NO: 3865320 - RNA, 20 nt, Human
ccgacugaaaauauuguuuu

SEQ ID NO: 3865321 - RNA, 16 nt, Human
ccgacugcuuuggacc

SEQ ID NO: 3865322 - RNA, 20 nt, Human
ccgacuugaauuuucccacu

SEQ ID NO: 3865323 - RNA, 18 nt, Human
ccgacuugugcacaggca

SEQ ID NO: 3865324 - RNA, 19 nt, Human
ccgacuugugcacaggcag

SEQ ID NO: 3865325 - RNA, 17 nt, Human
ccgagaaggaagccucc

SEQ ID NO: 3865326 - RNA, 17 nt, Human
ccgagacggcacugaga

SEQ ID NO: 3865327 - RNA, 13 nt, Human
ccgagagggagag

SEQ ID NO: 3865328 - RNA, 15 nt, Human
ccgagaggugggcca

SEQ ID NO: 3865329 - RNA, 19 nt, Human
ccgagaggugggccagucu

SEQ ID NO: 3865330 - RNA, 16 nt, Human
ccgagaguagccgaga

SEQ ID NO: 3865331 - RNA, 21 nt, Human
ccgagaguccaucagccucca

SEQ ID NO: 3865332 - RNA, 18 nt, Human
ccgagaucacgccacugc

SEQ ID NO: 3865333 - RNA, 22 nt, Human
ccgagaucgcgccacugcacuc

SEQ ID NO: 3865334 - RNA, 20 nt, Human
ccgagaucgugccauugcac

SEQ ID NO: 3865335 - RNA, 14 nt, Human
ccgagcaaccgugg

SEQ ID NO: 3865336 - RNA, 14 nt, Human
ccgagcagcugagc

SEQ ID NO: 3865337 - RNA, 17 nt, Human
ccgagcagcugagcagg

SEQ ID NO: 3865338 - RNA, 16 nt, Human
ccgagcaggaggccua

SEQ ID NO: 3865339 - RNA, 17 nt, Human
ccgagcccuacuuccag

SEQ ID NO: 3865340 - RNA, 19 nt, Human
ccgagccgggccuggggcu

SEQ ID NO: 3865341 - RNA, 16 nt, Human
ccgagccuggcuccaa

SEQ ID NO: 3865342 - RNA, 19 nt, Human
ccgagccuggcuccaaacc

SEQ ID NO: 3865343 - RNA, 19 nt, Human
ccgagcgcuuucuggaaaa

SEQ ID NO: 3865344 - RNA, 11 nt, Human
ccgagcuccuc

SEQ ID NO: 3865345 - RNA, 18 nt, Human
ccgagcugggggccauga

SEQ ID NO: 3865346 - RNA, 17 nt, Human
ccgagcuggugcauuac

SEQ ID NO: 3865347 - RNA, 19 nt, Human
ccgaggacgcucccugcuc

SEQ ID NO: 3865348 - RNA, 16 nt, Human
ccgaggagccaggcaa

SEQ ID NO: 3865349 - RNA, 16 nt, Human
ccgaggcccugcaugg

SEQ ID NO: 3865350 - RNA, 17 nt, Human
ccgaggcuggagcuggc

SEQ ID NO: 3865351 - RNA, 16 nt, Human
ccgagggaugaugcca

SEQ ID NO: 3865352 - RNA, 18 nt, Human
ccgagggaugaugccaca

SEQ ID NO: 3865353 - RNA, 15 nt, Human
ccgagggcgaccccg

SEQ ID NO: 3865354 - RNA, 22 nt, Human
ccgagggcugagccugguccca

SEQ ID NO: 3865355 - RNA, 17 nt, Human
ccgaggguccuggcucc

SEQ ID NO: 3865356 - RNA, 21 nt, Human
ccgaggguccuggcuccugag

SEQ ID NO: 3865357 - RNA, 13 nt, Human
ccgaguacagucu

SEQ ID NO: 3865358 - RNA, 18 nt, Human
ccgaguagaaaaugugac

SEQ ID NO: 3865359 - RNA, 20 nt, Human
ccgaguagcugagauuauag

SEQ ID NO: 3865360 - RNA, 14 nt, Human
ccgaguagcuggga

SEQ ID NO: 3865361 - RNA, 17 nt, Human
ccgaguagcugggacua

SEQ ID NO: 3865362 - RNA, 20 nt, Human
ccgaguagcugggacuacag

SEQ ID NO: 3865363 - RNA, 20 nt, Human
ccgaguagcugggauuacag

SEQ ID NO: 3865364 - RNA, 19 nt, Human
ccgagucauucguucugug

SEQ ID NO: 3865365 - RNA, 12 nt, Human
ccgaguccaagc

SEQ ID NO: 3865366 - RNA, 15 nt, Human
ccgaguccaagcugg

SEQ ID NO: 3865367 - RNA, 16 nt, Human
ccgagucucuucucca

SEQ ID NO: 3865368 - RNA, 18 nt, Human
ccgagucucuucuccacu

SEQ ID NO: 3865369 - RNA, 19 nt, Human
ccgagucucuucuccacug

SEQ ID NO: 3865370 - RNA, 22 nt, Human
ccgagucugggacacaaaacuc

SEQ ID NO: 3865371 - RNA, 17 nt, Human
ccgagucugucucuguc

SEQ ID NO: 3865372 - RNA, 16 nt, Human
ccgagugaaccuaccu

SEQ ID NO: 3865373 - RNA, 20 nt, Human
ccgagugaacuggucuuccu

SEQ ID NO: 3865374 - RNA, 22 nt, Human
ccgaguggauagaugcccugcu

SEQ ID NO: 3865375 - RNA, 15 nt, Human
ccgaguuuccccaga

SEQ ID NO: 3865376 - RNA, 18 nt, Human
ccgauagagggacggcca

SEQ ID NO: 3865377 - RNA, 13 nt, Human
ccgauccuuccuc

SEQ ID NO: 3865378 - RNA, 13 nt, Human
ccgaugcccagag

SEQ ID NO: 3865379 - RNA, 14 nt, Human
ccgaugcuccagcc

SEQ ID NO: 3865380 - RNA, 21 nt, Human
ccgaugcugcuuuccccugug

SEQ ID NO: 3865381 - RNA, 22 nt, Human
ccgaugcuuuaccaaacagcaa

SEQ ID NO: 3865382 - RNA, 21 nt, Human
ccgaugguggguggggcugca

SEQ ID NO: 3865383 - RNA, 13 nt, Human
ccgauucacccug

SEQ ID NO: 3865384 - RNA, 21 nt, Human
ccgcaaugugcccccagacgc

SEQ ID NO: 3865385 - RNA, 14 nt, Human
ccgcacacccucac

SEQ ID NO: 3865386 - RNA, 22 nt, Human
ccgcacacccucacucugccag

SEQ ID NO: 3865387 - RNA, 16 nt, Human
ccgcacagcagccugc

SEQ ID NO: 3865388 - RNA, 23 nt, Human
ccgcaccgaccacggggccgaca

SEQ ID NO: 3865389 - RNA, 19 nt, Human
ccgcacugggcuuggggac

SEQ ID NO: 3865390 - RNA, 20 nt, Human
ccgcagaagccuccccagcu

SEQ ID NO: 3865391 - RNA, 22 nt, Human
ccgcagaagccuccccagcuca

SEQ ID NO: 3865392 - RNA, 15 nt, Human
ccgcagaaggaaggc

SEQ ID NO: 3865393 - RNA, 17 nt, Human
ccgcagaccuccccagc

SEQ ID NO: 3865394 - RNA, 23 nt, Human
ccgcagcccugcagagggcacag

SEQ ID NO: 3865395 - RNA, 17 nt, Human
ccgcagcucuugcccuu

SEQ ID NO: 3865396 - RNA, 18 nt, Human
ccgcagcucuugcccuuc

SEQ ID NO: 3865397 - RNA, 22 nt, Human
ccgcagcucuugcccuucccug

SEQ ID NO: 3865398 - RNA, 12 nt, Human
ccgcaggaagcu

SEQ ID NO: 3865399 - RNA, 19 nt, Human
ccgcaggaagcugcuccgu

SEQ ID NO: 3865400 - RNA, 19 nt, Human
ccgcagucgucgcacaguc

SEQ ID NO: 3865401 - RNA, 16 nt, Human
ccgcagugggagcaaa

SEQ ID NO: 3865402 - RNA, 18 nt, Human
ccgcaguguggccaggcu

SEQ ID NO: 3865403 - RNA, 16 nt, Human
ccgcaguguuugugug

SEQ ID NO: 3865404 - RNA, 15 nt, Human
ccgcauccccugccu

SEQ ID NO: 3865405 - RNA, 17 nt, Human
ccgcauccccugccucc

SEQ ID NO: 3865406 - RNA, 21 nt, Human
ccgcauccuagucucuaucau

SEQ ID NO: 3865407 - RNA, 16 nt, Human
ccgcaucuucuccauc

SEQ ID NO: 3865408 - RNA, 23 nt, Human
ccgcaugcccccucgugccaguc

SEQ ID NO: 3865409 - RNA, 15 nt, Human
ccgcauuccaggcuc

SEQ ID NO: 3865410 - RNA, 23 nt, Human
ccucuuccucuugacccugcacc

SEQ ID NO: 3865411 - RNA, 11 nt, Human
ccucuuccuga

SEQ ID NO: 3865412 - RNA, 14 nt, Human
ccucuuccuggccg

SEQ ID NO: 3865413 - RNA, 13 nt, Human
ccucuuccuguga

SEQ ID NO: 3865414 - RNA, 23 nt, Human
ccucuuccuucccugcugugaaa

SEQ ID NO: 3865415 - RNA, 14 nt, Human
ccucuucucaagug

SEQ ID NO: 3865416 - RNA, 17 nt, Human
ccucuucucaagugccu

SEQ ID NO: 3865417 - RNA, 14 nt, Human
ccucuucucucaga

SEQ ID NO: 3865418 - RNA, 17 nt, Human
ccucuucugacgugccu

SEQ ID NO: 3865419 - RNA, 14 nt, Human
ccucuucugcaucu

SEQ ID NO: 3865420 - RNA, 20 nt, Human
ccucuucugcuuaggagaga

SEQ ID NO: 3865421 - RNA, 13 nt, Human
ccucuucugggag

SEQ ID NO: 3865422 - RNA, 17 nt, Human
ccucuucugggagggca

SEQ ID NO: 3865423 - RNA, 21 nt, Human
ccucuucugggagggcagcag

SEQ ID NO: 3865424 - RNA, 17 nt, Human
ccucuucuuacuugaug

SEQ ID NO: 3865425 - RNA, 14 nt, Human
ccucuugaccaggc

SEQ ID NO: 3865426 - RNA, 16 nt, Human
ccucuugacccugcac

SEQ ID NO: 3865427 - RNA, 14 nt, Human
ccucuugagcagug

SEQ ID NO: 3865428 - RNA, 19 nt, Human
ccucuugagcaguggcugg

SEQ ID NO: 3865429 - RNA, 14 nt, Human
ccucuugccacugc

SEQ ID NO: 3865430 - RNA, 21 nt, Human
ccucuugccccaacccccagc

SEQ ID NO: 3865431 - RNA, 22 nt, Human
ccucuugccccaacccccagca

SEQ ID NO: 3865432 - RNA, 16 nt, Human
ccucuugccccccacc

SEQ ID NO: 3865433 - RNA, 14 nt, Human
ccucuugcugucuc

SEQ ID NO: 3865434 - RNA, 18 nt, Human
ccucuuggaccucugcuc

SEQ ID NO: 3865435 - RNA, 14 nt, Human
ccucuuggagaagu

SEQ ID NO: 3865436 - RNA, 21 nt, Human
ccucuuggagaagucucagcu

SEQ ID NO: 3865437 - RNA, 22 nt, Human
ccucuuggagaagucucagcua

SEQ ID NO: 3865438 - RNA, 12 nt, Human
ccucuuggagac

SEQ ID NO: 3865439 - RNA, 15 nt, Human
ccucuuggcagucac

SEQ ID NO: 3865440 - RNA, 13 nt, Human
ccucuuguaaaua

SEQ ID NO: 3865441 - RNA, 20 nt, Human
ccucuuguaaauaaagcccu

SEQ ID NO: 3865442 - RNA, 12 nt, Human
ccucuugucucc

SEQ ID NO: 3865443 - RNA, 14 nt, Human
ccucuugucucccc

SEQ ID NO: 3865444 - RNA, 19 nt, Human
ccucuugucuuccuauuuc

SEQ ID NO: 3865445 - RNA, 13 nt, Human
ccucuuuaaaaca

SEQ ID NO: 3865446 - RNA, 17 nt, Human
ccucuuuaaaacaaaac

SEQ ID NO: 3865447 - RNA, 23 nt, Human
ccucuuuaguuuuugguugggaa

SEQ ID NO: 3865448 - RNA, 23 nt, Human
ccucuuucagaaaacagaaaaaa

SEQ ID NO: 3865449 - RNA, 13 nt, Human
ccucuuucagcuc

SEQ ID NO: 3865450 - RNA, 15 nt, Human
ccucuuucagcuccu

SEQ ID NO: 3865451 - RNA, 15 nt, Human
ccucuuucauccacu

SEQ ID NO: 3865452 - RNA, 11 nt, Human
ccucuuucccu

SEQ ID NO: 3865453 - RNA, 15 nt, Human
ccucuuucccuagga

SEQ ID NO: 3865454 - RNA, 13 nt, Human
ccucuuucccucc

SEQ ID NO: 3865455 - RNA, 19 nt, Human
ccucuuucccucccuuccu

SEQ ID NO: 3865456 - RNA, 16 nt, Human
ccucuuucccuuccag

SEQ ID NO: 3865457 - RNA, 23 nt, Human
ccucuuuccucucuuuguucuca

SEQ ID NO: 3865458 - RNA, 12 nt, Human
ccucuuucucuc

SEQ ID NO: 3865459 - RNA, 13 nt, Human
ccucuuucucuuu

SEQ ID NO: 3865460 - RNA, 18 nt, Human
ccucuuucucuuucuucc

SEQ ID NO: 3865461 - RNA, 15 nt, Human
ccucuuugcauggaa

SEQ ID NO: 3865462 - RNA, 11 nt, Human
ccucuuugcuu

SEQ ID NO: 3865463 - RNA, 17 nt, Human
ccucuuugcuuugcuuu

SEQ ID NO: 3865464 - RNA, 18 nt, Human
ccucuuuggcuccccugu

SEQ ID NO: 3865465 - RNA, 23 nt, Human
ccucuuugucuaaaacaauaaaa

SEQ ID NO: 3865466 - RNA, 17 nt, Human
ccucuuuuaccugcugc

SEQ ID NO: 3865467 - RNA, 15 nt, Human
ccucuuuucuuacuc

SEQ ID NO: 3865468 - RNA, 22 nt, Human
ccucuuuucuuacuccuccucu

SEQ ID NO: 3865469 - RNA, 24 nt, Human
ccucuuuugcuugccaaaguacag

SEQ ID NO: 3865470 - RNA, 21 nt, Human
ccugaaaauguuuuucugcca

SEQ ID NO: 3865471 - RNA, 15 nt, Human
ccugaaacaacuugg

SEQ ID NO: 3865472 - RNA, 19 nt, Human
ccugaaacacgaaacuugu

SEQ ID NO: 3865473 - RNA, 18 nt, Human
ccugaaacuuacacacaa

SEQ ID NO: 3865474 - RNA, 23 nt, Human
ccugaaagaggaaugaaguacuc

SEQ ID NO: 3865475 - RNA, 15 nt, Human
ccugaaagaggcuga

SEQ ID NO: 3865476 - RNA, 15 nt, Human
ccugaaauuccaaag

SEQ ID NO: 3865477 - RNA, 16 nt, Human
ccugaaauuccaaagu

SEQ ID NO: 3865478 - RNA, 15 nt, Human
ccugaaauuucagau

SEQ ID NO: 3865479 - RNA, 14 nt, Human
ccugaacagaagcu

SEQ ID NO: 3865480 - RNA, 15 nt, Human
ccugaaccgcacagc

SEQ ID NO: 3865481 - RNA, 16 nt, Human
ccugaaccgcacagcu

SEQ ID NO: 3865482 - RNA, 18 nt, Human
ccugaaccgcacagcuca

SEQ ID NO: 3865483 - RNA, 20 nt, Human
ccugaaccgcacagcucagg

SEQ ID NO: 3865484 - RNA, 13 nt, Human
ccugaaccuagga

SEQ ID NO: 3865485 - RNA, 17 nt, Human
ccugaagaaccaguccc

SEQ ID NO: 3865486 - RNA, 12 nt, Human
ccugaagacuga

SEQ ID NO: 3865487 - RNA, 21 nt, Human
ccugaagaggcgggccagcca

SEQ ID NO: 3865488 - RNA, 21 nt, Human
ccugaagaguccucugaauga

SEQ ID NO: 3865489 - RNA, 12 nt, Human
ccugaagccagc

SEQ ID NO: 3865490 - RNA, 14 nt, Human
ccugaagccagccu

SEQ ID NO: 3865491 - RNA, 22 nt, Human
ccugaagcuaucguaaaauuaa

SEQ ID NO: 3865492 - RNA, 13 nt, Human
ccugaaggccccg

SEQ ID NO: 3865493 - RNA, 23 nt, Human
ccugaaggccugagguuacugga

SEQ ID NO: 3865494 - RNA, 14 nt, Human
ccugaaggggcguc

SEQ ID NO: 3865495 - RNA, 16 nt, Human
ccugaaggggcgucug

SEQ ID NO: 3865496 - RNA, 15 nt, Human
ccugaagucacacag

SEQ ID NO: 3865497 - RNA, 17 nt, Human
ccugaaucaugagccug

SEQ ID NO: 3865498 - RNA, 19 nt, Human
ccugaaucaugagccugcu

SEQ ID NO: 3865499 - RNA, 21 nt, Human
ccugaaucaugagccugcugg

SEQ ID NO: 3865500 - RNA, 22 nt, Human
ccugaaucaugagccugcugga

SEQ ID NO: 3865501 - RNA, 12 nt, Human
ccugaaucauuc

SEQ ID NO: 3865502 - RNA, 17 nt, Human
ccugaauccaaacuaau

SEQ ID NO: 3865503 - RNA, 16 nt, Human
ccugaaugcucuguag

SEQ ID NO: 3865504 - RNA, 21 nt, Human
ccugaauguuuaaagaucaug

SEQ ID NO: 3865505 - RNA, 14 nt, Human
ccugaauucuauuu

SEQ ID NO: 3865506 - RNA, 18 nt, Human
ccugaauucuauuugcug

SEQ ID NO: 3865507 - RNA, 20 nt, Human
ccugaauuuggccugcacua

SEQ ID NO: 3865508 - RNA, 14 nt, Human
ccugacaacacuca

SEQ ID NO: 3865509 - RNA, 15 nt, Human
ccugacaacacucau

SEQ ID NO: 3865510 - RNA, 14 nt, Human
ccugacacaccagg

SEQ ID NO: 3865511 - RNA, 20 nt, Human
ccugacacacuaaccaagcu

SEQ ID NO: 3865512 - RNA, 23 nt, Human
ccugacacacuaaccaagcugag

SEQ ID NO: 3865513 - RNA, 18 nt, Human
ccugacaccccacuuagc

SEQ ID NO: 3865514 - RNA, 14 nt, Human
ccugacacugcugg

SEQ ID NO: 3865515 - RNA, 15 nt, Human
ccugacacugcugga

SEQ ID NO: 3865516 - RNA, 16 nt, Human
ccugacagaaggugcc

SEQ ID NO: 3865517 - RNA, 17 nt, Human
ccugacagaaggugcca

SEQ ID NO: 3865518 - RNA, 23 nt, Human
ccugacagagggauggaggaaga

SEQ ID NO: 3865519 - RNA, 20 nt, Human
ccugacagccccucccuccu

SEQ ID NO: 3865520 - RNA, 23 nt, Human
ccugacaggugaggucuguuccu

SEQ ID NO: 3865521 - RNA, 13 nt, Human
ccugacauugucu

SEQ ID NO: 3865522 - RNA, 23 nt, Human
ccugaccaaacagccaacuagcc

SEQ ID NO: 3865523 - RNA, 20 nt, Human
ccugaccaacaguuccuuca

SEQ ID NO: 3865524 - RNA, 19 nt, Human
ccugaccaacauggagaaa

SEQ ID NO: 3865525 - RNA, 13 nt, Human
ccugaccacccuc

SEQ ID NO: 3865526 - RNA, 17 nt, Human
ccugaccacccuccccu

SEQ ID NO: 3865527 - RNA, 20 nt, Human
ccugaccacgcuuucuagcu

SEQ ID NO: 3865528 - RNA, 13 nt, Human
ccugaccacucag

SEQ ID NO: 3865529 - RNA, 16 nt, Human
ccugaccacucagaga

SEQ ID NO: 3865530 - RNA, 17 nt, Human
ccugaccacucagagac

SEQ ID NO: 3865531 - RNA, 21 nt, Human
ccugaccagcugcuccgagga

SEQ ID NO: 3865532 - RNA, 13 nt, Human
ccugaccaguugc

SEQ ID NO: 3865533 - RNA, 16 nt, Human
ccugaccgugggcggg

SEQ ID NO: 3865534 - RNA, 14 nt, Human
ccugaccucccagc

SEQ ID NO: 3865535 - RNA, 14 nt, Human
ccugaccucccccu

SEQ ID NO: 3865536 - RNA, 19 nt, Human
ccugaccucccccuccuuc

SEQ ID NO: 3865537 - RNA, 16 nt, Human
ccugaccucccucuaa

SEQ ID NO: 3865538 - RNA, 18 nt, Human
ccugaccucuugcugucu

SEQ ID NO: 3865539 - RNA, 21 nt, Human
ccugaccucuugcugucucug

SEQ ID NO: 3865540 - RNA, 15 nt, Human
ccugaccugaggcuc

SEQ ID NO: 3865541 - RNA, 15 nt, Human
ccugaccuggccccc

SEQ ID NO: 3865542 - RNA, 16 nt, Human
ccugaccugucucacc

SEQ ID NO: 3865543 - RNA, 19 nt, Human
ccugaccugugagcccagc

SEQ ID NO: 3865544 - RNA, 22 nt, Human
ccugaccugugagcccagcugg

SEQ ID NO: 3865545 - RNA, 21 nt, Human
ccugaccuugaggagucuugu

SEQ ID NO: 3865546 - RNA, 13 nt, Human
ccugacgaaacug

SEQ ID NO: 3865547 - RNA, 19 nt, Human
ccugacucccccagucccc

SEQ ID NO: 3865548 - RNA, 20 nt, Human
ccugacuccucuaagccacu

SEQ ID NO: 3865549 - RNA, 18 nt, Human
ccugacucgucugacugu

SEQ ID NO: 3865550 - RNA, 21 nt, Human
ccugacucgucugacugugug

SEQ ID NO: 3865551 - RNA, 13 nt, Human
ccugacucugaaa

SEQ ID NO: 3865552 - RNA, 15 nt, Human
ccugacucugccccc

SEQ ID NO: 3865553 - RNA, 13 nt, Human
ccugacugccaag

SEQ ID NO: 3865554 - RNA, 18 nt, Human
ccugacugccaagccaug

SEQ ID NO: 3865555 - RNA, 14 nt, Human
ccugacugcucaga

SEQ ID NO: 3865556 - RNA, 17 nt, Human
ccugcccaccuggccuc

SEQ ID NO: 3865557 - RNA, 18 nt, Human
ccugcccaccuggccucu

SEQ ID NO: 3865558 - RNA, 17 nt, Human
ccugcccacugcugcag

SEQ ID NO: 3865559 - RNA, 22 nt, Human
ccugcccagaucagccagaagc

SEQ ID NO: 3865560 - RNA, 18 nt, Human
ccugcccagcccccuggu

SEQ ID NO: 3865561 - RNA, 12 nt, Human
ccugcccaggag

SEQ ID NO: 3865562 - RNA, 22 nt, Human
ccugcccaggagagccagcccu

SEQ ID NO: 3865563 - RNA, 23 nt, Human
ccugcccaggagagccagcccuc

SEQ ID NO: 3865564 - RNA, 15 nt, Human
ccugcccaggccccu

SEQ ID NO: 3865565 - RNA, 19 nt, Human
ccugcccaggccccugcca

SEQ ID NO: 3865566 - RNA, 15 nt, Human
ccugcccaggccggc

SEQ ID NO: 3865567 - RNA, 18 nt, Human
ccugcccaggccggccag

SEQ ID NO: 3865568 - RNA, 12 nt, Human
ccugcccagucc

SEQ ID NO: 3865569 - RNA, 15 nt, Human
ccugcccaguccccc

SEQ ID NO: 3865570 - RNA, 18 nt, Human
ccugcccagugcacuugc

SEQ ID NO: 3865571 - RNA, 23 nt, Human
ccugcccaguguuguuuguaaau

SEQ ID NO: 3865572 - RNA, 16 nt, Human
ccugcccaguugcacu

SEQ ID NO: 3865573 - RNA, 16 nt, Human
ccugcccauuggagag

SEQ ID NO: 3865574 - RNA, 14 nt, Human
ccugcccauuucau

SEQ ID NO: 3865575 - RNA, 23 nt, Human
ccugccccaaauaacuucagucc

SEQ ID NO: 3865576 - RNA, 21 nt, Human
ccugccccaacucuccccuga

SEQ ID NO: 3865577 - RNA, 24 nt, Human
ccugccccaacucuccccugaccu

SEQ ID NO: 3865578 - RNA, 19 nt, Human
ccugccccagcccaagucc

SEQ ID NO: 3865579 - RNA, 14 nt, Human
ccugccccagcgcu

SEQ ID NO: 3865580 - RNA, 17 nt, Human
ccugccccagggcuccc

SEQ ID NO: 3865581 - RNA, 13 nt, Human
ccugccccauccc

SEQ ID NO: 3865582 - RNA, 15 nt, Human
ccugcccccaaauaa

SEQ ID NO: 3865583 - RNA, 21 nt, Human
ccugcccccacaccuggcccu

SEQ ID NO: 3865584 - RNA, 22 nt, Human
ccugcccccacaccuggcccug

SEQ ID NO: 3865585 - RNA, 14 nt, Human
ccugcccccacccc

SEQ ID NO: 3865586 - RNA, 18 nt, Human
ccugcccccagccccggg

SEQ ID NO: 3865587 - RNA, 16 nt, Human
ccugcccccaggacug

SEQ ID NO: 3865588 - RNA, 15 nt, Human
ccugccccccagccu

SEQ ID NO: 3865589 - RNA, 15 nt, Human
ccugcccccugaaac

SEQ ID NO: 3865590 - RNA, 18 nt, Human
ccugcccccugaaacuua

SEQ ID NO: 3865591 - RNA, 15 nt, Human
ccugcccccugcagg

SEQ ID NO: 3865592 - RNA, 16 nt, Human
ccugcccccugcagga

SEQ ID NO: 3865593 - RNA, 18 nt, Human
ccugcccccuucucccac

SEQ ID NO: 3865594 - RNA, 22 nt, Human
ccugccccgcccagcugcaccu

SEQ ID NO: 3865595 - RNA, 20 nt, Human
ccugccccgcccccaguccc

SEQ ID NO: 3865596 - RNA, 22 nt, Human
ccugccccgucaccaucucagg

SEQ ID NO: 3865597 - RNA, 23 nt, Human
ccugccccgucaccaucucaggc

SEQ ID NO: 3865598 - RNA, 22 nt, Human
ccugccccucaacucuccucca

SEQ ID NO: 3865599 - RNA, 14 nt, Human
ccugccccucccuu

SEQ ID NO: 3865600 - RNA, 19 nt, Human
ccugccccuccucucugcc

SEQ ID NO: 3865601 - RNA, 15 nt, Human
ccugccccucucccg

SEQ ID NO: 3865602 - RNA, 12 nt, Human
ccugccccucuu

SEQ ID NO: 3865603 - RNA, 17 nt, Human
ccugccccucuuucucu

SEQ ID NO: 3865604 - RNA, 11 nt, Human
ccugccccugc

SEQ ID NO: 3865605 - RNA, 23 nt, Human
ccugccccuucuacacucuccug

SEQ ID NO: 3865606 - RNA, 17 nt, Human
ccugcccgcacagcagc

SEQ ID NO: 3865607 - RNA, 22 nt, Human
ccugcccgcacagcagccugcu

SEQ ID NO: 3865608 - RNA, 19 nt, Human
ccugcccgcagaccucugg

SEQ ID NO: 3865609 - RNA, 14 nt, Human
ccugcccggcugcg

SEQ ID NO: 3865610 - RNA, 16 nt, Human
ccugcccggcugcgga

SEQ ID NO: 3865611 - RNA, 22 nt, Human
ccugcccguaaacacgccugca

SEQ ID NO: 3865612 - RNA, 12 nt, Human
ccugcccgucuc

SEQ ID NO: 3865613 - RNA, 13 nt, Human
ccugcccgucucu

SEQ ID NO: 3865614 - RNA, 22 nt, Human
ccugcccgucucucucccaugg

SEQ ID NO: 3865615 - RNA, 23 nt, Human
ccugcccgucucucucccaugga

SEQ ID NO: 3865616 - RNA, 16 nt, Human
ccugcccguguacaua

SEQ ID NO: 3865617 - RNA, 14 nt, Human
ccugcccucaggga

SEQ ID NO: 3865618 - RNA, 23 nt, Human
ccugcccucauggccccucugac

SEQ ID NO: 3865619 - RNA, 21 nt, Human
ccugcccuccccagagcacug

SEQ ID NO: 3865620 - RNA, 22 nt, Human
ccugcccuccccagagcacugg

SEQ ID NO: 3865621 - RNA, 15 nt, Human
ccugcccucguggcc

SEQ ID NO: 3865622 - RNA, 18 nt, Human
ccugcccucguggccagc

SEQ ID NO: 3865623 - RNA, 13 nt, Human
ccugcccugcacg

SEQ ID NO: 3865624 - RNA, 15 nt, Human
ccugcccugccaccu

SEQ ID NO: 3865625 - RNA, 16 nt, Human
ccugcccugcccugcc

SEQ ID NO: 3865626 - RNA, 17 nt, Human
ccugcccugcccugcca

SEQ ID NO: 3865627 - RNA, 13 nt, Human
ccugcccugccug

SEQ ID NO: 3865628 - RNA, 15 nt, Human
ccugcccugggaggc

SEQ ID NO: 3865629 - RNA, 22 nt, Human
ccugcccugggaggcagugaug

SEQ ID NO: 3865630 - RNA, 21 nt, Human
ccugcccugucaggaggcaga

SEQ ID NO: 3865631 - RNA, 12 nt, Human
ccugcccugugg

SEQ ID NO: 3865632 - RNA, 19 nt, Human
ccugcccugugggccccca

SEQ ID NO: 3865633 - RNA, 19 nt, Human
ccugcccuuaccugccagg

SEQ ID NO: 3865634 - RNA, 22 nt, Human
ccugcccuuaccugccaggaag

SEQ ID NO: 3865635 - RNA, 15 nt, Human
ccugcccuuguccca

SEQ ID NO: 3865636 - RNA, 13 nt, Human
ccugcccuugucu

SEQ ID NO: 3865637 - RNA, 22 nt, Human
ccugcccuuuuuucugccuccu

SEQ ID NO: 3865638 - RNA, 14 nt, Human
ccugccgacuccug

SEQ ID NO: 3865639 - RNA, 22 nt, Human
ccugccgagaguccaucagccu

SEQ ID NO: 3865640 - RNA, 13 nt, Human
ccugccgcagagc

SEQ ID NO: 3865641 - RNA, 14 nt, Human
ccugccgcagagcu

SEQ ID NO: 3865642 - RNA, 18 nt, Human
ccugccggagaggaagag

SEQ ID NO: 3865643 - RNA, 15 nt, Human
ccugccggccggggc

SEQ ID NO: 3865644 - RNA, 19 nt, Human
ccugccgggcugagggccu

SEQ ID NO: 3865645 - RNA, 21 nt, Human
ccugccgggcugagggccugc

SEQ ID NO: 3865646 - RNA, 23 nt, Human
ccugccgggcugagggccugcug

SEQ ID NO: 3865647 - RNA, 15 nt, Human
ccugccgguaaacac

SEQ ID NO: 3865648 - RNA, 23 nt, Human
ccugccgguaaacacgccugcaa

SEQ ID NO: 3865649 - RNA, 17 nt, Human
ccugccgucaccaccac

SEQ ID NO: 3865650 - RNA, 20 nt, Human
ccugccuaagggagaguggu

SEQ ID NO: 3865651 - RNA, 21 nt, Human
ccugccuagcacucacaugcu

SEQ ID NO: 3865652 - RNA, 21 nt, Human
ccugccuaggaauucccagcc

SEQ ID NO: 3865653 - RNA, 21 nt, Human
ccugccucacagcuggccguc

SEQ ID NO: 3865654 - RNA, 11 nt, Human
ccugccucagc

SEQ ID NO: 3865655 - RNA, 13 nt, Human
ccugccucagccu

SEQ ID NO: 3865656 - RNA, 14 nt, Human
ccugccucagccuc

SEQ ID NO: 3865657 - RNA, 19 nt, Human
ccugccucaggccucugug

SEQ ID NO: 3865658 - RNA, 13 nt, Human
ccugccuccaccc

SEQ ID NO: 3865659 - RNA, 12 nt, Human
ccugccuccagg

SEQ ID NO: 3865660 - RNA, 14 nt, Human
ccugccuccaggaa

SEQ ID NO: 3865661 - RNA, 20 nt, Human
ccugccuccagggcuggacu

SEQ ID NO: 3865662 - RNA, 23 nt, Human
ccugccuccagggcuggacugag

SEQ ID NO: 3865663 - RNA, 14 nt, Human
ccugccuccauccu

SEQ ID NO: 3865664 - RNA, 20 nt, Human
ccugccucccacuucacugc

SEQ ID NO: 3865665 - RNA, 13 nt, Human
ccugccuccuuug

SEQ ID NO: 3865666 - RNA, 19 nt, Human
ccugccuccuuugugagga

SEQ ID NO: 3865667 - RNA, 19 nt, Human
ccugccucgaacuggcugc

SEQ ID NO: 3865668 - RNA, 21 nt, Human
ccugccucgaacuggcugcaa

SEQ ID NO: 3865669 - RNA, 14 nt, Human
ccugccucucccag

SEQ ID NO: 3865670 - RNA, 21 nt, Human
ccugccucucccaggcagggg

SEQ ID NO: 3865671 - RNA, 13 nt, Human
ccugccucuccgc

SEQ ID NO: 3865672 - RNA, 13 nt, Human
ccugccucucugc

SEQ ID NO: 3865673 - RNA, 18 nt, Human
ccugccugagggccccuc

SEQ ID NO: 3865674 - RNA, 14 nt, Human
ccugccugccaugu

SEQ ID NO: 3865675 - RNA, 16 nt, Human
ccugccugcccuguca

SEQ ID NO: 3865676 - RNA, 18 nt, Human
ccugccugcccugucagg

SEQ ID NO: 3865677 - RNA, 13 nt, Human
ccugccugcgucu

SEQ ID NO: 3865678 - RNA, 18 nt, Human
ccugccugcucgcucccu

SEQ ID NO: 3865679 - RNA, 12 nt, Human
ccugccuggacc

SEQ ID NO: 3865680 - RNA, 12 nt, Human
ccugccuggagg

SEQ ID NO: 3865681 - RNA, 19 nt, Human
ccugccuggaggaccugag

SEQ ID NO: 3865682 - RNA, 24 nt, Human
ccugccuggaggaccugagccugc

SEQ ID NO: 3865683 - RNA, 13 nt, Human
ccugccuggccag

SEQ ID NO: 3865684 - RNA, 14 nt, Human
ccugccuggccccu

SEQ ID NO: 3865685 - RNA, 15 nt, Human
ccugccuggccggcc

SEQ ID NO: 3865686 - RNA, 17 nt, Human
ccugccuggccggccag

SEQ ID NO: 3865687 - RNA, 19 nt, Human
ccugccuggccggccagcc

SEQ ID NO: 3865688 - RNA, 23 nt, Human
ccugccuggggcgggccccucau

SEQ ID NO: 3865689 - RNA, 18 nt, Human
ccugccugguccucacac

SEQ ID NO: 3865690 - RNA, 12 nt, Human
ccugccugucug

SEQ ID NO: 3865691 - RNA, 16 nt, Human
ccugccugucugcccc

SEQ ID NO: 3865692 - RNA, 22 nt, Human
ccugccugucugucucuccauc

SEQ ID NO: 3865693 - RNA, 12 nt, Human
ccugccugugcu

SEQ ID NO: 3865694 - RNA, 22 nt, Human
ccugccuguucccauucuugca

SEQ ID NO: 3865695 - RNA, 19 nt, Human
ccugccuucuguccuggug

SEQ ID NO: 3865696 - RNA, 23 nt, Human
ccugccuucuucuuuuugcuguu

SEQ ID NO: 3865697 - RNA, 22 nt, Human
ccugccuugaagccacugaagc

SEQ ID NO: 3865698 - RNA, 16 nt, Human
ccugccuuguuuggau

SEQ ID NO: 3865699 - RNA, 13 nt, Human
ccugccuuuccau

SEQ ID NO: 3865700 - RNA, 16 nt, Human
ccuuuuugacacugaa

SEQ ID NO: 3865701 - RNA, 13 nt, Human
ccuuuuugcuuga

SEQ ID NO: 3865702 - RNA, 21 nt, Human
ccuuuuugcuugaagcaaaca

SEQ ID NO: 3865703 - RNA, 19 nt, Human
ccuuuuuguauaaaauaga

SEQ ID NO: 3865704 - RNA, 16 nt, Human
ccuuuuuuaaaaaugc

SEQ ID NO: 3865705 - RNA, 13 nt, Human
ccuuuuuuaaaag

SEQ ID NO: 3865706 - RNA, 20 nt, Human
ccuuuuuuaaaaguaaaugu

SEQ ID NO: 3865707 - RNA, 13 nt, Human
ccuuuuuuaagau

SEQ ID NO: 3865708 - RNA, 14 nt, Human
ccuuuuuuccuuuc

SEQ ID NO: 3865709 - RNA, 15 nt, Human
ccuuuuuucuguaua

SEQ ID NO: 3865710 - RNA, 14 nt, Human
ccuuuuuucuuuuu

SEQ ID NO: 3865711 - RNA, 23 nt, Human
ccuuuuuugauaaaguuucucag

SEQ ID NO: 3865712 - RNA, 12 nt, Human
ccuuuuuugauc

SEQ ID NO: 3865713 - RNA, 15 nt, Human
ccuuuuuuggcugcu

SEQ ID NO: 3865714 - RNA, 18 nt, Human
ccuuuuuuggcugcugaa

SEQ ID NO: 3865715 - RNA, 22 nt, Human
ccuuuuuuggcugcugaaggcu

SEQ ID NO: 3865716 - RNA, 23 nt, Human
ccuuuuuugucccccaacuugag

SEQ ID NO: 3865717 - RNA, 22 nt, Human
ccuuuuuuguuuuuucaaaaua

SEQ ID NO: 3865718 - RNA, 12 nt, Human
cgaaaacauugu

SEQ ID NO: 3865719 - RNA, 15 nt, Human
cgaaaacguggcugc

SEQ ID NO: 3865720 - RNA, 18 nt, Human
cgaaaauucauuucacau

SEQ ID NO: 3865721 - RNA, 13 nt, Human
cgaaacagcgcug

SEQ ID NO: 3865722 - RNA, 21 nt, Human
cgaaaccaauuccucauccuc

SEQ ID NO: 3865723 - RNA, 14 nt, Human
cgaaaccccaucuc

SEQ ID NO: 3865724 - RNA, 17 nt, Human
cgaaacuuguuauugug

SEQ ID NO: 3865725 - RNA, 12 nt, Human
cgaaagaacagu

SEQ ID NO: 3865726 - RNA, 22 nt, Human
cgaaagagagagaaacaaacuu

SEQ ID NO: 3865727 - RNA, 12 nt, Human
cgaaagaggcac

SEQ ID NO: 3865728 - RNA, 19 nt, Human
cgaaagaggcacccuucca

SEQ ID NO: 3865729 - RNA, 20 nt, Human
cgaaagaggcacccuuccau

SEQ ID NO: 3865730 - RNA, 22 nt, Human
cgaaaggauguaaacagugccu

SEQ ID NO: 3865731 - RNA, 16 nt, Human
cgaaaggucaccucac

SEQ ID NO: 3865732 - RNA, 18 nt, Human
cgaaaggucaccucacuc

SEQ ID NO: 3865733 - RNA, 16 nt, Human
cgaaauaacaauguua

SEQ ID NO: 3865734 - RNA, 20 nt, Human
cgaaauaacaauguuaagga

SEQ ID NO: 3865735 - RNA, 19 nt, Human
cgaaauaauuguuguucug

SEQ ID NO: 3865736 - RNA, 20 nt, Human
cgaaauaauuguuguucugu

SEQ ID NO: 3865737 - RNA, 22 nt, Human
cgaaauaauuguuguucuguua

SEQ ID NO: 3865738 - RNA, 20 nt, Human
cgaaauaucuauguuuuacc

SEQ ID NO: 3865739 - RNA, 17 nt, Human
cgaaaucccugcucacu

SEQ ID NO: 3865740 - RNA, 21 nt, Human
cgaacacccucgaagcgcgcc

SEQ ID NO: 3865741 - RNA, 20 nt, Human
cgaacauggaacucauuccu

SEQ ID NO: 3865742 - RNA, 23 nt, Human
cgaacauguuuuucuucucccuc

SEQ ID NO: 3865743 - RNA, 15 nt, Human
cgaaccaggagcugc

SEQ ID NO: 3865744 - RNA, 23 nt, Human
cgaacccaccugcugagagaccc

SEQ ID NO: 3865745 - RNA, 23 nt, Human
cgaaccgugagcaggaaggccug

SEQ ID NO: 3865746 - RNA, 15 nt, Human
cgaaccuccucugug

SEQ ID NO: 3865747 - RNA, 19 nt, Human
cgaacuccuaaccucaagu

SEQ ID NO: 3865748 - RNA, 16 nt, Human
cgaacuguuguauaaa

SEQ ID NO: 3865749 - RNA, 18 nt, Human
cgaagaagagccacagug

SEQ ID NO: 3865750 - RNA, 13 nt, Human
cgaagacacagac

SEQ ID NO: 3865751 - RNA, 20 nt, Human
cgaagccaucuuucuuugga

SEQ ID NO: 3865752 - RNA, 14 nt, Human
cgaagcccaggccc

SEQ ID NO: 3865753 - RNA, 16 nt, Human
cgaagcgcgccacucg

SEQ ID NO: 3865754 - RNA, 16 nt, Human
cgaagcguuguccuca

SEQ ID NO: 3865755 - RNA, 22 nt, Human
cgaagcuaacagggaaggcagg

SEQ ID NO: 3865756 - RNA, 19 nt, Human
cgaagggggcaucuggccu

SEQ ID NO: 3865757 - RNA, 16 nt, Human
cgaaggugcuggaggu

SEQ ID NO: 3865758 - RNA, 17 nt, Human
cgaaguccuauggaaac

SEQ ID NO: 3865759 - RNA, 23 nt, Human
cgaagucucuuuuuuuggcccag

SEQ ID NO: 3865760 - RNA, 16 nt, Human
cgaaguucaagaucaa

SEQ ID NO: 3865761 - RNA, 15 nt, Human
cgaauagacaucaaa

SEQ ID NO: 3865762 - RNA, 16 nt, Human
cgaauagcugggacua

SEQ ID NO: 3865763 - RNA, 11 nt, Human
cgaauauugcu

SEQ ID NO: 3865764 - RNA, 19 nt, Human
cgaauccccucccugucaa

SEQ ID NO: 3865765 - RNA, 17 nt, Human
cgaaucuacuaauucca

SEQ ID NO: 3865766 - RNA, 22 nt, Human
cgaaucucuuuuugcuuucgaa

SEQ ID NO: 3865767 - RNA, 18 nt, Human
cgaaugacaaaaucaucu

SEQ ID NO: 3865768 - RNA, 13 nt, Human
cgaaugacacugu

SEQ ID NO: 3865769 - RNA, 20 nt, Human
cgaauggacuuuggaagcag

SEQ ID NO: 3865770 - RNA, 22 nt, Human
cgaaugguagucuaaccaaaug

SEQ ID NO: 3865771 - RNA, 21 nt, Human
cgaaugugcagguuuguuaca

SEQ ID NO: 3865772 - RNA, 13 nt, Human
cgaaugugucuuu

SEQ ID NO: 3865773 - RNA, 14 nt, Human
cgaaugugucuuua

SEQ ID NO: 3865774 - RNA, 16 nt, Human
cgaaugugucuuuaga

SEQ ID NO: 3865775 - RNA, 14 nt, Human
cgaauuaauagcuu

SEQ ID NO: 3865776 - RNA, 13 nt, Human
cgacaaagcugcu

SEQ ID NO: 3865777 - RNA, 17 nt, Human
cgacaacagauuggauu

SEQ ID NO: 3865778 - RNA, 16 nt, Human
cgacacggucggggca

SEQ ID NO: 3865779 - RNA, 14 nt, Human
cgacacuguucucc

SEQ ID NO: 3865780 - RNA, 18 nt, Human
cgacagccuggcacaggg

SEQ ID NO: 3865781 - RNA, 17 nt, Human
cgacaggcgagagagga

SEQ ID NO: 3865782 - RNA, 21 nt, Human
cgacaggcgagagaggagcca

SEQ ID NO: 3865783 - RNA, 23 nt, Human
cgacaggcgagagaggagccaga

SEQ ID NO: 3865784 - RNA, 17 nt, Human
cgacaucacuguucaug

SEQ ID NO: 3865785 - RNA, 23 nt, Human
cgacauggcuccggccucugccu

SEQ ID NO: 3865786 - RNA, 23 nt, Human
cgaccacagggucugcacucuaa

SEQ ID NO: 3865787 - RNA, 15 nt, Human
cgaccaccccugccu

SEQ ID NO: 3865788 - RNA, 21 nt, Human
cgaccaccccugccuccaccc

SEQ ID NO: 3865789 - RNA, 12 nt, Human
cgaccaccugcc

SEQ ID NO: 3865790 - RNA, 15 nt, Human
cgaccagagccccac

SEQ ID NO: 3865791 - RNA, 16 nt, Human
cgaccagaggagccuu

SEQ ID NO: 3865792 - RNA, 16 nt, Human
cgaccagggccgagga

SEQ ID NO: 3865793 - RNA, 13 nt, Human
cgaccaucugauu

SEQ ID NO: 3865794 - RNA, 18 nt, Human
cgaccccccgugggcucc

SEQ ID NO: 3865795 - RNA, 23 nt, Human
cgacccccucucccugcauggca

SEQ ID NO: 3865796 - RNA, 16 nt, Human
cgacccucugggaacc

SEQ ID NO: 3865797 - RNA, 17 nt, Human
cgacccucugggaaccu

SEQ ID NO: 3865798 - RNA, 21 nt, Human
cgacccucugggaaccuccca

SEQ ID NO: 3865799 - RNA, 12 nt, Human
cgacccuggggg

SEQ ID NO: 3865800 - RNA, 20 nt, Human
cgaccgaggcuggagcuggc

SEQ ID NO: 3865801 - RNA, 13 nt, Human
cgaccgccccagu

SEQ ID NO: 3865802 - RNA, 12 nt, Human
cgaccucagccu

SEQ ID NO: 3865803 - RNA, 19 nt, Human
cgaccucguccucccccug

SEQ ID NO: 3865804 - RNA, 23 nt, Human
cgaccugaggacauggcuucuga

SEQ ID NO: 3865805 - RNA, 18 nt, Human
cgaccugauuuacaguuu

SEQ ID NO: 3865806 - RNA, 15 nt, Human
cgacgccacagccca

SEQ ID NO: 3865807 - RNA, 22 nt, Human
cgacggugggcauuugugaggc

SEQ ID NO: 3865808 - RNA, 15 nt, Human
cgacuaaacuagauu

SEQ ID NO: 3865809 - RNA, 14 nt, Human
cgacuaauuucaaa

SEQ ID NO: 3865810 - RNA, 12 nt, Human
cgacuauagaaa

SEQ ID NO: 3865811 - RNA, 19 nt, Human
cgacucacaccacuagccu

SEQ ID NO: 3865812 - RNA, 11 nt, Human
cgacucaggau

SEQ ID NO: 3865813 - RNA, 13 nt, Human
cgacuccagccag

SEQ ID NO: 3865814 - RNA, 19 nt, Human
cgacuccguuggccacucc

SEQ ID NO: 3865815 - RNA, 20 nt, Human
cgacucuauagacucuagga

SEQ ID NO: 3865816 - RNA, 19 nt, Human
cgacucuuucugagugccu

SEQ ID NO: 3865817 - RNA, 16 nt, Human
cgacugcacagcggcc

SEQ ID NO: 3865818 - RNA, 17 nt, Human
cgacuggccagggccac

SEQ ID NO: 3865819 - RNA, 11 nt, Human
cgacuguuguu

SEQ ID NO: 3865820 - RNA, 18 nt, Human
cgacuugaauuuucccac

SEQ ID NO: 3865821 - RNA, 21 nt, Human
cgacuugaauuuucccacugc

SEQ ID NO: 3865822 - RNA, 19 nt, Human
cgacuuguuuuugcacaug

SEQ ID NO: 3865823 - RNA, 17 nt, Human
cgacuuuguacccccca

SEQ ID NO: 3865824 - RNA, 16 nt, Human
cgagaacuuucauuuu

SEQ ID NO: 3865825 - RNA, 13 nt, Human
cgagaagcaagaa

SEQ ID NO: 3865826 - RNA, 15 nt, Human
cgagaagcaagaaag

SEQ ID NO: 3865827 - RNA, 18 nt, Human
cgagaagcugcucuggaa

SEQ ID NO: 3865828 - RNA, 16 nt, Human
cgagaagggcugcuuc

SEQ ID NO: 3865829 - RNA, 14 nt, Human
cgagaccagccugg

SEQ ID NO: 3865830 - RNA, 15 nt, Human
cgagaccauccuggc

SEQ ID NO: 3865831 - RNA, 17 nt, Human
cgagacccaagggcaga

SEQ ID NO: 3865832 - RNA, 20 nt, Human
cgagaccccggcuuccuuuc

SEQ ID NO: 3865833 - RNA, 15 nt, Human
cgagacucugucuca

SEQ ID NO: 3865834 - RNA, 14 nt, Human
cgagacugcaaugu

SEQ ID NO: 3865835 - RNA, 17 nt, Human
cgagagaucaaagauga

SEQ ID NO: 3865836 - RNA, 14 nt, Human
cgagagaugugugu

SEQ ID NO: 3865837 - RNA, 15 nt, Human
cgagagccugcuccc

SEQ ID NO: 3865838 - RNA, 20 nt, Human
cgagaggugggccagucugu

SEQ ID NO: 3865839 - RNA, 22 nt, Human
cgagaggugggccagucugugg

SEQ ID NO: 3865840 - RNA, 14 nt, Human
cgagagucuggccc

SEQ ID NO: 3865841 - RNA, 20 nt, Human
cgagagucuggcccuagacu

SEQ ID NO: 3865842 - RNA, 13 nt, Human
cgagauaccccac

SEQ ID NO: 3865843 - RNA, 20 nt, Human
cgagauaccccaccucccuc

SEQ ID NO: 3865844 - RNA, 18 nt, Human
cgagauagccaaggccaa

SEQ ID NO: 3865845 - RNA, 19 nt, Human
cgccgcaaaccacacugga

SEQ ID NO: 3865846 - RNA, 22 nt, Human
cgccgcaaaccacacuggacuc

SEQ ID NO: 3865847 - RNA, 13 nt, Human
cgccgccucgccc

SEQ ID NO: 3865848 - RNA, 16 nt, Human
cgccgccucgcccacc

SEQ ID NO: 3865849 - RNA, 18 nt, Human
cgccgccucgcccaccgc

SEQ ID NO: 3865850 - RNA, 15 nt, Human
cgccgccugguacuc

SEQ ID NO: 3865851 - RNA, 21 nt, Human
cgccggcaauaaaagcccagg

SEQ ID NO: 3865852 - RNA, 17 nt, Human
cgccggggacagaggcc

SEQ ID NO: 3865853 - RNA, 19 nt, Human
cgccggggacagaggccug

SEQ ID NO: 3865854 - RNA, 14 nt, Human
cgccgugcugggca

SEQ ID NO: 3865855 - RNA, 15 nt, Human
cgccgugcugggcag

SEQ ID NO: 3865856 - RNA, 17 nt, Human
cgccgugcugggcagcc

SEQ ID NO: 3865857 - RNA, 18 nt, Human
cgccuaaggucacagcua

SEQ ID NO: 3865858 - RNA, 13 nt, Human
cgccuagcugcug

SEQ ID NO: 3865859 - RNA, 20 nt, Human
cgccuaguggggucucccuc

SEQ ID NO: 3865860 - RNA, 16 nt, Human
cgccuaugaucccagc

SEQ ID NO: 3865861 - RNA, 22 nt, Human
cgccucaaugugguugcaaggc

SEQ ID NO: 3865862 - RNA, 15 nt, Human
cgccucaguaagacg

SEQ ID NO: 3865863 - RNA, 19 nt, Human
cgccuccaaccccucgccc

SEQ ID NO: 3865864 - RNA, 21 nt, Human
cgccuccaaccccucgcccag

SEQ ID NO: 3865865 - RNA, 17 nt, Human
cgccuccaacccuagca

SEQ ID NO: 3865866 - RNA, 18 nt, Human
cgccuccauccaaggcca

SEQ ID NO: 3865867 - RNA, 19 nt, Human
cgccucccacuggggucca

SEQ ID NO: 3865868 - RNA, 24 nt, Human
cgccuccccacggccgcuccaggg

SEQ ID NO: 3865869 - RNA, 18 nt, Human
cgccucccuccaccccag

SEQ ID NO: 3865870 - RNA, 20 nt, Human
cgccucccuccccugcccuc

SEQ ID NO: 3865871 - RNA, 20 nt, Human
cgccuccgggacccccagga

SEQ ID NO: 3865872 - RNA, 13 nt, Human
cgccucgcccacc

SEQ ID NO: 3865873 - RNA, 16 nt, Human
cgccucgcccaccgca

SEQ ID NO: 3865874 - RNA, 12 nt, Human
cgccucucccac

SEQ ID NO: 3865875 - RNA, 15 nt, Human
cgccucuccucgguu

SEQ ID NO: 3865876 - RNA, 13 nt, Human
cgccucugcuggc

SEQ ID NO: 3865877 - RNA, 15 nt, Human
cgccucuugaccagg

SEQ ID NO: 3865878 - RNA, 17 nt, Human
cgccucuugaccaggcu

SEQ ID NO: 3865879 - RNA, 20 nt, Human
cgccugacaaccacuggucu

SEQ ID NO: 3865880 - RNA, 23 nt, Human
cgccugacaaccacuggucugua

SEQ ID NO: 3865881 - RNA, 14 nt, Human
cgccugagcccagg

SEQ ID NO: 3865882 - RNA, 21 nt, Human
cgccugcaaacgcugccugcc

SEQ ID NO: 3865883 - RNA, 22 nt, Human
cgccugcauguaaacacgccug

SEQ ID NO: 3865884 - RNA, 12 nt, Human
cgccugcccacc

SEQ ID NO: 3865885 - RNA, 20 nt, Human
cgccugcccaccugccuggc

SEQ ID NO: 3865886 - RNA, 15 nt, Human
cgccugccccuccca

SEQ ID NO: 3865887 - RNA, 17 nt, Human
cgccugcccuccccaga

SEQ ID NO: 3865888 - RNA, 20 nt, Human
cgccugcccuccccagagca

SEQ ID NO: 3865889 - RNA, 19 nt, Human
cgccugccuccccugugca

SEQ ID NO: 3865890 - RNA, 19 nt, Human
cgccugccuuuggcacucu

SEQ ID NO: 3865891 - RNA, 14 nt, Human
cgccuggagcccuc

SEQ ID NO: 3865892 - RNA, 16 nt, Human
cgccuggauuucuggu

SEQ ID NO: 3865893 - RNA, 20 nt, Human
cgccuggcagaacugagcuc

SEQ ID NO: 3865894 - RNA, 18 nt, Human
cgccuggccaggagcagg

SEQ ID NO: 3865895 - RNA, 14 nt, Human
cgccuggccuggcc

SEQ ID NO: 3865896 - RNA, 17 nt, Human
cgccuguaaucccagca

SEQ ID NO: 3865897 - RNA, 18 nt, Human
cgccuguaaucccagcac

SEQ ID NO: 3865898 - RNA, 20 nt, Human
cgccuguagucccagcuacu

SEQ ID NO: 3865899 - RNA, 15 nt, Human
cgccugugcacacac

SEQ ID NO: 3865900 - RNA, 21 nt, Human
cgccuguucccccgccgcuuu

SEQ ID NO: 3865901 - RNA, 16 nt, Human
cgccuuaaggauguuc

SEQ ID NO: 3865902 - RNA, 20 nt, Human
cgccuuccaccucugggagc

SEQ ID NO: 3865903 - RNA, 14 nt, Human
cgccuuccccaccc

SEQ ID NO: 3865904 - RNA, 15 nt, Human
cgccuucccuccugc

SEQ ID NO: 3865905 - RNA, 13 nt, Human
cgccuuccuugac

SEQ ID NO: 3865906 - RNA, 16 nt, Human
cgccuugcccagccug

SEQ ID NO: 3865907 - RNA, 19 nt, Human
cgccuugcccagccuggau

SEQ ID NO: 3865908 - RNA, 19 nt, Human
cgccuugucuccuacuccu

SEQ ID NO: 3865909 - RNA, 18 nt, Human
cgccuuucagcaggcagc

SEQ ID NO: 3865910 - RNA, 14 nt, Human
cgccuuuuguauac

SEQ ID NO: 3865911 - RNA, 16 nt, Human
cgccuuuuguauacau

SEQ ID NO: 3865912 - RNA, 19 nt, Human
cgcgaaaccaauuccucau

SEQ ID NO: 3865913 - RNA, 17 nt, Human
cgcgacaaugcaaacca

SEQ ID NO: 3865914 - RNA, 15 nt, Human
cgcgacuaauuucaa

SEQ ID NO: 3865915 - RNA, 14 nt, Human
cgcgauguggaacu

SEQ ID NO: 3865916 - RNA, 22 nt, Human
cgcgauguggaacugcugccac

SEQ ID NO: 3865917 - RNA, 12 nt, Human
cgcgcacacaca

SEQ ID NO: 3865918 - RNA, 21 nt, Human
cgcgccaaauaaugucucugu

SEQ ID NO: 3865919 - RNA, 23 nt, Human
cgcgccaaauaaugucucuguga

SEQ ID NO: 3865920 - RNA, 17 nt, Human
cgcgccacaggacccuc

SEQ ID NO: 3865921 - RNA, 16 nt, Human
cgcgccaggauggcgc

SEQ ID NO: 3865922 - RNA, 17 nt, Human
cgcgccccccucccaga

SEQ ID NO: 3865923 - RNA, 16 nt, Human
cgcgcccgccccugca

SEQ ID NO: 3865924 - RNA, 13 nt, Human
cgcgcgcacacac

SEQ ID NO: 3865925 - RNA, 13 nt, Human
cgcgcugccugug

SEQ ID NO: 3865926 - RNA, 15 nt, Human
cgcgcugccugugug

SEQ ID NO: 3865927 - RNA, 14 nt, Human
cgcgcuugcuggcc

SEQ ID NO: 3865928 - RNA, 22 nt, Human
cgcggcggagcuggccccgccg

SEQ ID NO: 3865929 - RNA, 15 nt, Human
cgcggcgggcccugc

SEQ ID NO: 3865930 - RNA, 12 nt, Human
cgcggcugggag

SEQ ID NO: 3865931 - RNA, 23 nt, Human
cgcgggagccaugcgcccccucc

SEQ ID NO: 3865932 - RNA, 15 nt, Human
cgcggggacauuggg

SEQ ID NO: 3865933 - RNA, 20 nt, Human
cgcgucgcccucccaggcuc

SEQ ID NO: 3865934 - RNA, 14 nt, Human
cgcgucuacccugg

SEQ ID NO: 3865935 - RNA, 16 nt, Human
cgcgugcacacaccag

SEQ ID NO: 3865936 - RNA, 19 nt, Human
cgcgugcacguggagagcu

SEQ ID NO: 3865937 - RNA, 17 nt, Human
cgcgugccguggcacca

SEQ ID NO: 3865938 - RNA, 23 nt, Human
cgcguguguggguggauauaaau

SEQ ID NO: 3865939 - RNA, 17 nt, Human
cgcguugccugucgcuu

SEQ ID NO: 3865940 - RNA, 15 nt, Human
cgcguuuagaccaag

SEQ ID NO: 3865941 - RNA, 19 nt, Human
cgcuaaagagcccuugccu

SEQ ID NO: 3865942 - RNA, 18 nt, Human
cgcuaacuugcuuaaaug

SEQ ID NO: 3865943 - RNA, 21 nt, Human
cgcuaacuugcuuaaauguga

SEQ ID NO: 3865944 - RNA, 15 nt, Human
cgcuaagagggaggg

SEQ ID NO: 3865945 - RNA, 23 nt, Human
cgcuaauucaaggaauuucuuaa

SEQ ID NO: 3865946 - RNA, 20 nt, Human
cgcuacaaaacgcgcagaug

SEQ ID NO: 3865947 - RNA, 17 nt, Human
cgcuacaccacucuggc

SEQ ID NO: 3865948 - RNA, 20 nt, Human
cgcuacaccacucuggcagc

SEQ ID NO: 3865949 - RNA, 18 nt, Human
cgcuacccgggaaggggg

SEQ ID NO: 3865950 - RNA, 21 nt, Human
cgcuacccgggaagggggcug

SEQ ID NO: 3865951 - RNA, 24 nt, Human
cgcuacccgggaagggggcuggga

SEQ ID NO: 3865952 - RNA, 16 nt, Human
cgcuacuauaaagaga

SEQ ID NO: 3865953 - RNA, 15 nt, Human
cgcuagagcagccca

SEQ ID NO: 3865954 - RNA, 15 nt, Human
cgcuagaggccugag

SEQ ID NO: 3865955 - RNA, 14 nt, Human
cgcuagcaguggca

SEQ ID NO: 3865956 - RNA, 20 nt, Human
cgcuagcaguggcaggcaga

SEQ ID NO: 3865957 - RNA, 21 nt, Human
cgcuaggcucgccuucccucc

SEQ ID NO: 3865958 - RNA, 13 nt, Human
cgcuauuacaaau

SEQ ID NO: 3865959 - RNA, 21 nt, Human
cgcucagcccucccugccccu

SEQ ID NO: 3865960 - RNA, 15 nt, Human
cgcucaguaaacggg

SEQ ID NO: 3865961 - RNA, 16 nt, Human
cgcucauucagcaucu

SEQ ID NO: 3865962 - RNA, 14 nt, Human
cgcuccaacuccaa

SEQ ID NO: 3865963 - RNA, 13 nt, Human
cgcuccagcugcc

SEQ ID NO: 3865964 - RNA, 21 nt, Human
cgcucccagugucuuccugug

SEQ ID NO: 3865965 - RNA, 22 nt, Human
cgcucccagugucuuccugugg

SEQ ID NO: 3865966 - RNA, 15 nt, Human
cgcuccccacucugc

SEQ ID NO: 3865967 - RNA, 16 nt, Human
cgcuccccacucugcu

SEQ ID NO: 3865968 - RNA, 14 nt, Human
cgcuccccgccugu

SEQ ID NO: 3865969 - RNA, 19 nt, Human
cgcuccccgccuguucccc

SEQ ID NO: 3865970 - RNA, 16 nt, Human
cgcucccuugaccugc

SEQ ID NO: 3865971 - RNA, 20 nt, Human
cgcuccgggacguggcaccu

SEQ ID NO: 3865972 - RNA, 20 nt, Human
cgcuccugccgcagagcugg

SEQ ID NO: 3865973 - RNA, 16 nt, Human
cgcuccuggcccagcc

SEQ ID NO: 3865974 - RNA, 18 nt, Human
cgcuccuggcccagccuu

SEQ ID NO: 3865975 - RNA, 17 nt, Human
cgcuccugucugccagc

SEQ ID NO: 3865976 - RNA, 21 nt, Human
cgcucgcuuccgcauccuagu

SEQ ID NO: 3865977 - RNA, 12 nt, Human
cgcucggaggcc

SEQ ID NO: 3865978 - RNA, 15 nt, Human
cgcucggaggcccca

SEQ ID NO: 3865979 - RNA, 14 nt, Human
cgcucuccugccac

SEQ ID NO: 3865980 - RNA, 18 nt, Human
cgcucucuggccuucggc

SEQ ID NO: 3865981 - RNA, 15 nt, Human
cgcucucuuugcaac

SEQ ID NO: 3865982 - RNA, 12 nt, Human
cgcucugcaugc

SEQ ID NO: 3865983 - RNA, 19 nt, Human
cgcucugcaugcggcccag

SEQ ID NO: 3865984 - RNA, 21 nt, Human
cgcucugcaugcggcccagcc

SEQ ID NO: 3865985 - RNA, 21 nt, Human
cgcucugccucaccgcuuccc

SEQ ID NO: 3865986 - RNA, 20 nt, Human
cgcucugcuggccuggccgg

SEQ ID NO: 3865987 - RNA, 16 nt, Human
cgcugagacugugcug

SEQ ID NO: 3865988 - RNA, 17 nt, Human
cgcugaguggacuggag

SEQ ID NO: 3865989 - RNA, 20 nt, Human
cgcugagugggagaaggcag

SEQ ID NO: 3865990 - RNA, 19 nt, Human
cuacuuccaaacuaauuuu

SEQ ID NO: 3865991 - RNA, 15 nt, Human
cuacuuccccuuccu

SEQ ID NO: 3865992 - RNA, 19 nt, Human
cuacuuccuccuccccacu

SEQ ID NO: 3865993 - RNA, 14 nt, Human
cuacuuccugccug

SEQ ID NO: 3865994 - RNA, 17 nt, Human
cuacuucggggcuggga

SEQ ID NO: 3865995 - RNA, 23 nt, Human
cuacuucuuuuuucaaaagaaag

SEQ ID NO: 3865996 - RNA, 14 nt, Human
cuacuugcucugga

SEQ ID NO: 3865997 - RNA, 13 nt, Human
cuacuugggaggc

SEQ ID NO: 3865998 - RNA, 15 nt, Human
cuacuugggaggcug

SEQ ID NO: 3865999 - RNA, 14 nt, Human
cuacuugguuugug

SEQ ID NO: 3866000 - RNA, 15 nt, Human
cuacuuuaagcacua

SEQ ID NO: 3866001 - RNA, 14 nt, Human
cuacuuuauaacua

SEQ ID NO: 3866002 - RNA, 19 nt, Human
cuacuuugacuuuuugcau

SEQ ID NO: 3866003 - RNA, 21 nt, Human
cuacuuugacuuuuugcauuu

SEQ ID NO: 3866004 - RNA, 14 nt, Human
cuacuuuguccuuu

SEQ ID NO: 3866005 - RNA, 18 nt, Human
cuacuuugucuaaaaaua

SEQ ID NO: 3866006 - RNA, 17 nt, Human
cuacuuuguggcaaucu

SEQ ID NO: 3866007 - RNA, 13 nt, Human
cuacuuuuacuca

SEQ ID NO: 3866008 - RNA, 16 nt, Human
cuacuuuuccuucccu

SEQ ID NO: 3866009 - RNA, 17 nt, Human
cuagaaaaacaggcacu

SEQ ID NO: 3866010 - RNA, 17 nt, Human
cuagaaacccaagcucc

SEQ ID NO: 3866011 - RNA, 23 nt, Human
cuagaaacccaagcuccuccucg

SEQ ID NO: 3866012 - RNA, 21 nt, Human
cuagaaacgaguuggugucuu

SEQ ID NO: 3866013 - RNA, 14 nt, Human
cuagaaacuuccaa

SEQ ID NO: 3866014 - RNA, 22 nt, Human
cuagaaagccuguuccccucac

SEQ ID NO: 3866015 - RNA, 20 nt, Human
cuagaaauugacacaagugg

SEQ ID NO: 3866016 - RNA, 19 nt, Human
cuagaacacaggcaaaauc

SEQ ID NO: 3866017 - RNA, 18 nt, Human
cuagaaccuagaagggcu

SEQ ID NO: 3866018 - RNA, 14 nt, Human
cuagaaccuggagg

SEQ ID NO: 3866019 - RNA, 16 nt, Human
cuagaaccuggagggc

SEQ ID NO: 3866020 - RNA, 18 nt, Human
cuagaaccuggagggcug

SEQ ID NO: 3866021 - RNA, 16 nt, Human
cuagaacucccuuuca

SEQ ID NO: 3866022 - RNA, 17 nt, Human
cuagaacuuuuuuaaau

SEQ ID NO: 3866023 - RNA, 19 nt, Human
cuagaacuuuuuuaaauaa

SEQ ID NO: 3866024 - RNA, 22 nt, Human
cuagaacuuuuuuaaauaaacu

SEQ ID NO: 3866025 - RNA, 18 nt, Human
cuagaagaaaugaaauuu

SEQ ID NO: 3866026 - RNA, 20 nt, Human
cuagaagaaaugaaauuuua

SEQ ID NO: 3866027 - RNA, 21 nt, Human
cuagaagaaaugaaauuuuac

SEQ ID NO: 3866028 - RNA, 16 nt, Human
cuagaagagucuauug

SEQ ID NO: 3866029 - RNA, 22 nt, Human
cuagaagauuuugaaauuuuua

SEQ ID NO: 3866030 - RNA, 12 nt, Human
cuagaagccaag

SEQ ID NO: 3866031 - RNA, 13 nt, Human
cuagaagccaagg

SEQ ID NO: 3866032 - RNA, 13 nt, Human
cuagaagggaagg

SEQ ID NO: 3866033 - RNA, 22 nt, Human
cuagaagggcuagaaccuggag

SEQ ID NO: 3866034 - RNA, 21 nt, Human
cuagaagugggccaggacagg

SEQ ID NO: 3866035 - RNA, 19 nt, Human
cuagaaguuacugaaugca

SEQ ID NO: 3866036 - RNA, 16 nt, Human
cuagaauaaucuugcu

SEQ ID NO: 3866037 - RNA, 20 nt, Human
cuagaauauccuacuucucc

SEQ ID NO: 3866038 - RNA, 20 nt, Human
cuagaauuauaagucacaaa

SEQ ID NO: 3866039 - RNA, 22 nt, Human
cuagaauucccucucucugacu

SEQ ID NO: 3866040 - RNA, 12 nt, Human
cuagaauuuauu

SEQ ID NO: 3866041 - RNA, 12 nt, Human
cuagaauuuuaa

SEQ ID NO: 3866042 - RNA, 14 nt, Human
cuagacaagccaga

SEQ ID NO: 3866043 - RNA, 12 nt, Human
cuagacacacaa

SEQ ID NO: 3866044 - RNA, 17 nt, Human
cuagacacacaaagcag

SEQ ID NO: 3866045 - RNA, 17 nt, Human
cuagacaccaaaguucu

SEQ ID NO: 3866046 - RNA, 18 nt, Human
cuagacaccaaaguucua

SEQ ID NO: 3866047 - RNA, 18 nt, Human
cuagacagauccccguuc

SEQ ID NO: 3866048 - RNA, 19 nt, Human
cuagacauggagguucuaa

SEQ ID NO: 3866049 - RNA, 14 nt, Human
cuagacauucuguc

SEQ ID NO: 3866050 - RNA, 18 nt, Human
cuagaccagcagacagag

SEQ ID NO: 3866051 - RNA, 21 nt, Human
cuagacccacuggacucaccu

SEQ ID NO: 3866052 - RNA, 17 nt, Human
cuagaccguuauaaagu

SEQ ID NO: 3866053 - RNA, 21 nt, Human
cuagacgagcaggcuucuucc

SEQ ID NO: 3866054 - RNA, 19 nt, Human
cuagacgcuucaucccaca

SEQ ID NO: 3866055 - RNA, 20 nt, Human
cuagacguucauuugugugc

SEQ ID NO: 3866056 - RNA, 16 nt, Human
cuagacuauaaauguu

SEQ ID NO: 3866057 - RNA, 13 nt, Human
cuagacucggggu

SEQ ID NO: 3866058 - RNA, 16 nt, Human
cuagacucggggugcu

SEQ ID NO: 3866059 - RNA, 18 nt, Human
cuagacugccacaaggaa

SEQ ID NO: 3866060 - RNA, 15 nt, Human
cuagacuggugacug

SEQ ID NO: 3866061 - RNA, 22 nt, Human
cuagacuuuaggcuuucagcuu

SEQ ID NO: 3866062 - RNA, 13 nt, Human
cuagacuuucugu

SEQ ID NO: 3866063 - RNA, 19 nt, Human
cuagagaaauaagaucuuu

SEQ ID NO: 3866064 - RNA, 16 nt, Human
cuagagaaauucuugu

SEQ ID NO: 3866065 - RNA, 15 nt, Human
cuagagaacgcagcc

SEQ ID NO: 3866066 - RNA, 15 nt, Human
cuagagaagacaggc

SEQ ID NO: 3866067 - RNA, 17 nt, Human
cuagagaagaggcuggu

SEQ ID NO: 3866068 - RNA, 19 nt, Human
cuagagaauguuagaggau

SEQ ID NO: 3866069 - RNA, 13 nt, Human
cuagagagggagg

SEQ ID NO: 3866070 - RNA, 15 nt, Human
cuagagauauuuugu

SEQ ID NO: 3866071 - RNA, 18 nt, Human
cuagagauauuuuguaaa

SEQ ID NO: 3866072 - RNA, 19 nt, Human
cuagagauauuuuguaaaa

SEQ ID NO: 3866073 - RNA, 21 nt, Human
cuagagaugugcaauugauuu

SEQ ID NO: 3866074 - RNA, 14 nt, Human
cuagagcacugcca

SEQ ID NO: 3866075 - RNA, 15 nt, Human
cuagagcacugccac

SEQ ID NO: 3866076 - RNA, 21 nt, Human
cuagagcagcccaaauuuuuc

SEQ ID NO: 3866077 - RNA, 15 nt, Human
cuagagcagggauua

SEQ ID NO: 3866078 - RNA, 15 nt, Human
cuagagccagaccaa

SEQ ID NO: 3866079 - RNA, 15 nt, Human
cuagagccugccugg

SEQ ID NO: 3866080 - RNA, 16 nt, Human
cuagagccugccugga

SEQ ID NO: 3866081 - RNA, 17 nt, Human
cuagagccuucagccuu

SEQ ID NO: 3866082 - RNA, 13 nt, Human
cuagagcuccucc

SEQ ID NO: 3866083 - RNA, 17 nt, Human
cuagagcuccucccucu

SEQ ID NO: 3866084 - RNA, 20 nt, Human
cuagagcuccucccucucaa

SEQ ID NO: 3866085 - RNA, 14 nt, Human
cuagagcuuucuuu

SEQ ID NO: 3866086 - RNA, 22 nt, Human
cuagagcuuucuuucacaaaaa

SEQ ID NO: 3866087 - RNA, 15 nt, Human
cuagaggaaaagaaa

SEQ ID NO: 3866088 - RNA, 19 nt, Human
cuagaggaaccaaccccca

SEQ ID NO: 3866089 - RNA, 18 nt, Human
cuagaggcagggagggga

SEQ ID NO: 3866090 - RNA, 20 nt, Human
cuagaggccagccccaccca

SEQ ID NO: 3866091 - RNA, 21 nt, Human
cuagaggccagccccacccag

SEQ ID NO: 3866092 - RNA, 20 nt, Human
cuagaggcccuuugcugucc

SEQ ID NO: 3866093 - RNA, 22 nt, Human
cuagaggccugaaauccugguu

SEQ ID NO: 3866094 - RNA, 23 nt, Human
cuagaggccuuuaguuauaaagg

SEQ ID NO: 3866095 - RNA, 16 nt, Human
cuagagggaccucucc

SEQ ID NO: 3866096 - RNA, 17 nt, Human
cuagagggaccucuccc

SEQ ID NO: 3866097 - RNA, 20 nt, Human
cuagagggaccucucccagg

SEQ ID NO: 3866098 - RNA, 21 nt, Human
cuagagggaggggccuaggcc

SEQ ID NO: 3866099 - RNA, 22 nt, Human
cuagagggaggggccuaggccu

SEQ ID NO: 3866100 - RNA, 19 nt, Human
cuagaggugagaaauuuaa

SEQ ID NO: 3866101 - RNA, 18 nt, Human
cuagagguucaaagauau

SEQ ID NO: 3866102 - RNA, 21 nt, Human
cuagagguucaaagauauuuu

SEQ ID NO: 3866103 - RNA, 15 nt, Human
cuagaguccaagguu

SEQ ID NO: 3866104 - RNA, 15 nt, Human
cuagaguccucacuc

SEQ ID NO: 3866105 - RNA, 19 nt, Human
cuagaguccucacucccag

SEQ ID NO: 3866106 - RNA, 17 nt, Human
cuagagugagggccuga

SEQ ID NO: 3866107 - RNA, 18 nt, Human
cuagagugagggccugag

SEQ ID NO: 3866108 - RNA, 18 nt, Human
cuagaguuuuauagccug

SEQ ID NO: 3866109 - RNA, 15 nt, Human
cuagauaaaaagaug

SEQ ID NO: 3866110 - RNA, 16 nt, Human
cuagauaaaaagaugg

SEQ ID NO: 3866111 - RNA, 16 nt, Human
cuagauacaauaaauu

SEQ ID NO: 3866112 - RNA, 24 nt, Human
cuagauaccuaaaacauaagauca

SEQ ID NO: 3866113 - RNA, 24 nt, Human
cuagauacuguaucaugacaaaga

SEQ ID NO: 3866114 - RNA, 16 nt, Human
cuagauaggaggaugg

SEQ ID NO: 3866115 - RNA, 24 nt, Human
cuagauaugaauauauggcauuug

SEQ ID NO: 3866116 - RNA, 15 nt, Human
cuagaucagaugcuc

SEQ ID NO: 3866117 - RNA, 18 nt, Human
cuagaucaugaagaaccu

SEQ ID NO: 3866118 - RNA, 14 nt, Human
cuagaucauuuguu

SEQ ID NO: 3866119 - RNA, 23 nt, Human
cuagaucauuuguucugggagua

SEQ ID NO: 3866120 - RNA, 17 nt, Human
cuagauccuaagggucg

SEQ ID NO: 3866121 - RNA, 17 nt, Human
cuagaucuuugugccaa

SEQ ID NO: 3866122 - RNA, 16 nt, Human
cuagaugaccucauua

SEQ ID NO: 3866123 - RNA, 23 nt, Human
cuagaugagcccagcccuguucu

SEQ ID NO: 3866124 - RNA, 20 nt, Human
cuagaugauuaaauaagauu

SEQ ID NO: 3866125 - RNA, 23 nt, Human
cuagaugauuaaauaagauucua

SEQ ID NO: 3866126 - RNA, 14 nt, Human
cuagaugauuuuuu

SEQ ID NO: 3866127 - RNA, 17 nt, Human
cuagaugauuuuuugaa

SEQ ID NO: 3866128 - RNA, 21 nt, Human
cuagaugcuuuccuaaaucag

SEQ ID NO: 3866129 - RNA, 13 nt, Human
cuagauggaccug

SEQ ID NO: 3866130 - RNA, 16 nt, Human
cuagauggaccugccu

SEQ ID NO: 3866131 - RNA, 18 nt, Human
cuagauggaccugccugc

SEQ ID NO: 3866132 - RNA, 16 nt, Human
cuagauggcagucacu

SEQ ID NO: 3866133 - RNA, 16 nt, Human
cuagauggcuccucuc

SEQ ID NO: 3866134 - RNA, 15 nt, Human
cuauaaaagcuuucu

SEQ ID NO: 3866135 - RNA, 13 nt, Human
cuauaaaauagau

SEQ ID NO: 3866136 - RNA, 16 nt, Human
cuauaaacaauuacau

SEQ ID NO: 3866137 - RNA, 12 nt, Human
cuauaaacacug

SEQ ID NO: 3866138 - RNA, 14 nt, Human
cuauaaacacuguu

SEQ ID NO: 3866139 - RNA, 21 nt, Human
cuauaaacacuguuuguucca

SEQ ID NO: 3866140 - RNA, 18 nt, Human
cuauaaagcaguauuuuu

SEQ ID NO: 3866141 - RNA, 19 nt, Human
cuauaaagcaguauuuuuc

SEQ ID NO: 3866142 - RNA, 17 nt, Human
cuauaaaguaaagcuaa

SEQ ID NO: 3866143 - RNA, 22 nt, Human
cuauaaaucaacaccuuaauau

SEQ ID NO: 3866144 - RNA, 16 nt, Human
cuauaaaugguguuuu

SEQ ID NO: 3866145 - RNA, 18 nt, Human
cuauaaaugguguuuuuu

SEQ ID NO: 3866146 - RNA, 13 nt, Human
cuauaaauuauau

SEQ ID NO: 3866147 - RNA, 15 nt, Human
cuauaaauuccucuu

SEQ ID NO: 3866148 - RNA, 23 nt, Human
cuauaaauuccucuuugcuuugc

SEQ ID NO: 3866149 - RNA, 22 nt, Human
cuauaacaaaggauacuuauuu

SEQ ID NO: 3866150 - RNA, 12 nt, Human
cuauaacagaua

SEQ ID NO: 3866151 - RNA, 12 nt, Human
cuauaacuugau

SEQ ID NO: 3866152 - RNA, 17 nt, Human
cuauaacuugaugcaug

SEQ ID NO: 3866153 - RNA, 22 nt, Human
cuauaagcaagaaggcaaaaau

SEQ ID NO: 3866154 - RNA, 16 nt, Human
cuauaaggcagccuug

SEQ ID NO: 3866155 - RNA, 21 nt, Human
cuauaaggugcucucuuucug

SEQ ID NO: 3866156 - RNA, 22 nt, Human
cuauaaggugcucucuuucugu

SEQ ID NO: 3866157 - RNA, 15 nt, Human
cuauaauaaagaagu

SEQ ID NO: 3866158 - RNA, 14 nt, Human
cuauaaucugucaa

SEQ ID NO: 3866159 - RNA, 15 nt, Human
cuauaaucugucaaa

SEQ ID NO: 3866160 - RNA, 21 nt, Human
cuauaaucugucaaaacacug

SEQ ID NO: 3866161 - RNA, 14 nt, Human
cuauaaucuguuuu

SEQ ID NO: 3866162 - RNA, 16 nt, Human
cuauaauguaagcucu

SEQ ID NO: 3866163 - RNA, 22 nt, Human
cuauaaugugaaauguaacugu

SEQ ID NO: 3866164 - RNA, 16 nt, Human
cuauaauguguguaug

SEQ ID NO: 3866165 - RNA, 12 nt, Human
cuauaauuuaaa

SEQ ID NO: 3866166 - RNA, 22 nt, Human
cuauaauuuaccuaagauuaca

SEQ ID NO: 3866167 - RNA, 14 nt, Human
cuauacaaauauaa

SEQ ID NO: 3866168 - RNA, 14 nt, Human
cuauacauaucuuu

SEQ ID NO: 3866169 - RNA, 13 nt, Human
cuauaccaauaaa

SEQ ID NO: 3866170 - RNA, 14 nt, Human
cuauaccaauaaag

SEQ ID NO: 3866171 - RNA, 15 nt, Human
cuauaccaauaaagu

SEQ ID NO: 3866172 - RNA, 20 nt, Human
cuauaccugggcauacuaau

SEQ ID NO: 3866173 - RNA, 14 nt, Human
cuauaccugugccu

SEQ ID NO: 3866174 - RNA, 11 nt, Human
cuauacuugaa

SEQ ID NO: 3866175 - RNA, 17 nt, Human
cuauacuugaacaaaag

SEQ ID NO: 3866176 - RNA, 21 nt, Human
cuauacuugaacaaaaggguc

SEQ ID NO: 3866177 - RNA, 15 nt, Human
cuauagaaaguguuc

SEQ ID NO: 3866178 - RNA, 20 nt, Human
cuauagaaaguguucuguua

SEQ ID NO: 3866179 - RNA, 22 nt, Human
cuauagaaaguguucuguuaca

SEQ ID NO: 3866180 - RNA, 15 nt, Human
cuauagaugucuuuu

SEQ ID NO: 3866181 - RNA, 22 nt, Human
cuauagaugucuuuucccauuu

SEQ ID NO: 3866182 - RNA, 10 nt, Human
cuauagcacc

SEQ ID NO: 3866183 - RNA, 20 nt, Human
cuauagcaucacuuaaaaca

SEQ ID NO: 3866184 - RNA, 12 nt, Human
cuauagccuggg

SEQ ID NO: 3866185 - RNA, 13 nt, Human
cuauagccugggg

SEQ ID NO: 3866186 - RNA, 17 nt, Human
cuauagcuaaguacaca

SEQ ID NO: 3866187 - RNA, 14 nt, Human
cuauagcucaggac

SEQ ID NO: 3866188 - RNA, 22 nt, Human
cuauagcuguucuaauggauua

SEQ ID NO: 3866189 - RNA, 21 nt, Human
cuauagcuugcagaacuguag

SEQ ID NO: 3866190 - RNA, 22 nt, Human
cuauaggcuggagaagcucacc

SEQ ID NO: 3866191 - RNA, 15 nt, Human
cuauagguccagaag

SEQ ID NO: 3866192 - RNA, 21 nt, Human
cuauaggugcuacaaaaacac

SEQ ID NO: 3866193 - RNA, 15 nt, Human
cuauaguauuugauu

SEQ ID NO: 3866194 - RNA, 14 nt, Human
cuauagucccagcu

SEQ ID NO: 3866195 - RNA, 18 nt, Human
cuauaguuacuguccugu

SEQ ID NO: 3866196 - RNA, 20 nt, Human
cuauaguuauuaaguucuuu

SEQ ID NO: 3866197 - RNA, 13 nt, Human
cuauaguucuaga

SEQ ID NO: 3866198 - RNA, 14 nt, Human
cuauaguucuagac

SEQ ID NO: 3866199 - RNA, 12 nt, Human
cuauauaaaaua

SEQ ID NO: 3866200 - RNA, 20 nt, Human
cuauauaauuccuguuuuua

SEQ ID NO: 3866201 - RNA, 17 nt, Human
cuauauacaugugugua

SEQ ID NO: 3866202 - RNA, 19 nt, Human
cuauauaccaaagcacauu

SEQ ID NO: 3866203 - RNA, 21 nt, Human
cuauauacucacuuucuagau

SEQ ID NO: 3866204 - RNA, 14 nt, Human
cuauauagagaugu

SEQ ID NO: 3866205 - RNA, 16 nt, Human
cuauauaguuuauuga

SEQ ID NO: 3866206 - RNA, 22 nt, Human
cuauauaguuuauugacaauaa

SEQ ID NO: 3866207 - RNA, 15 nt, Human
cuauauauaaaacgg

SEQ ID NO: 3866208 - RNA, 13 nt, Human
cuauauauaauuc

SEQ ID NO: 3866209 - RNA, 19 nt, Human
cuauauauaauucuguaca

SEQ ID NO: 3866210 - RNA, 15 nt, Human
cuauauauauaaaua

SEQ ID NO: 3866211 - RNA, 16 nt, Human
cuauauauauaaauau

SEQ ID NO: 3866212 - RNA, 16 nt, Human
cuauauauauaaaugu

SEQ ID NO: 3866213 - RNA, 15 nt, Human
cuauauauguguaug

SEQ ID NO: 3866214 - RNA, 18 nt, Human
cuauauccauguacugua

SEQ ID NO: 3866215 - RNA, 19 nt, Human
cuauauccauguacuguag

SEQ ID NO: 3866216 - RNA, 18 nt, Human
cuauaucuauaaacacug

SEQ ID NO: 3866217 - RNA, 20 nt, Human
cuauaugaauuuaaauauaa

SEQ ID NO: 3866218 - RNA, 19 nt, Human
cuauauggcaagaaagcug

SEQ ID NO: 3866219 - RNA, 21 nt, Human
cuauauguacuugucaaagaa

SEQ ID NO: 3866220 - RNA, 21 nt, Human
cuauauguaguauaaagaaaa

SEQ ID NO: 3866221 - RNA, 12 nt, Human
cuauaugugaau

SEQ ID NO: 3866222 - RNA, 20 nt, Human
cuauauugcugaaugcaaga

SEQ ID NO: 3866223 - RNA, 13 nt, Human
cuauauuguacac

SEQ ID NO: 3866224 - RNA, 15 nt, Human
cuauauuguacacac

SEQ ID NO: 3866225 - RNA, 23 nt, Human
cuauauuguuuucaguguacaug

SEQ ID NO: 3866226 - RNA, 13 nt, Human
cuauauuuaagua

SEQ ID NO: 3866227 - RNA, 16 nt, Human
cuauauuuaaguauuc

SEQ ID NO: 3866228 - RNA, 22 nt, Human
cuauauuuaaguauucaagaaa

SEQ ID NO: 3866229 - RNA, 16 nt, Human
cuauauuuacagugaa

SEQ ID NO: 3866230 - RNA, 13 nt, Human
cuauauuuagauu

SEQ ID NO: 3866231 - RNA, 22 nt, Human
cuauauuugcuagacucuagac

SEQ ID NO: 3866232 - RNA, 12 nt, Human
cuauauuugggc

SEQ ID NO: 3866233 - RNA, 15 nt, Human
cuauauuuucauucu

SEQ ID NO: 3866234 - RNA, 15 nt, Human
cuaucaaaauaaauu

SEQ ID NO: 3866235 - RNA, 21 nt, Human
cuaucaaagaccuugugugua

SEQ ID NO: 3866236 - RNA, 20 nt, Human
cuaucaaccccagacacugg

SEQ ID NO: 3866237 - RNA, 15 nt, Human
cuaucaagcccaggu

SEQ ID NO: 3866238 - RNA, 17 nt, Human
cuaucaagucaaucauu

SEQ ID NO: 3866239 - RNA, 19 nt, Human
cuaucaagucaaucauuuc

SEQ ID NO: 3866240 - RNA, 14 nt, Human
cuaucacacagugg

SEQ ID NO: 3866241 - RNA, 19 nt, Human
cuaucacccaacgcuccaa

SEQ ID NO: 3866242 - RNA, 16 nt, Human
cuaucaccuauuucca

SEQ ID NO: 3866243 - RNA, 15 nt, Human
cuaucaccuccccuc

SEQ ID NO: 3866244 - RNA, 16 nt, Human
cuaucaccuccccucc

SEQ ID NO: 3866245 - RNA, 18 nt, Human
cuaucagacuaagccagc

SEQ ID NO: 3866246 - RNA, 21 nt, Human
cuaucagaggugaaagcuaua

SEQ ID NO: 3866247 - RNA, 19 nt, Human
cuaucagcagcuagaaaac

SEQ ID NO: 3866248 - RNA, 20 nt, Human
cuaucagccugucucuucca

SEQ ID NO: 3866249 - RNA, 21 nt, Human
cuaucagugugccccccaucc

SEQ ID NO: 3866250 - RNA, 23 nt, Human
cuaucagugugccccccauccug

SEQ ID NO: 3866251 - RNA, 18 nt, Human
cuaucaugucaaacguga

SEQ ID NO: 3866252 - RNA, 13 nt, Human
cuaucauuaaagu

SEQ ID NO: 3866253 - RNA, 17 nt, Human
cuaucauuaaaguucua

SEQ ID NO: 3866254 - RNA, 19 nt, Human
cuaucauugcuuccuccuc

SEQ ID NO: 3866255 - RNA, 20 nt, Human
cuaucauugcuuccuccucc

SEQ ID NO: 3866256 - RNA, 13 nt, Human
cuaucauuuaaua

SEQ ID NO: 3866257 - RNA, 15 nt, Human
cuaucauuuuuguac

SEQ ID NO: 3866258 - RNA, 16 nt, Human
cuaucauuuuuguaca

SEQ ID NO: 3866259 - RNA, 13 nt, Human
cuauccacagaga

SEQ ID NO: 3866260 - RNA, 19 nt, Human
cuauccacagagaguccca

SEQ ID NO: 3866261 - RNA, 12 nt, Human
cuauccacccag

SEQ ID NO: 3866262 - RNA, 13 nt, Human
cuauccacccagc

SEQ ID NO: 3866263 - RNA, 14 nt, Human
cuauccacccagcc

SEQ ID NO: 3866264 - RNA, 15 nt, Human
cuauccaugcaccaa

SEQ ID NO: 3866265 - RNA, 21 nt, Human
cuaucccaauaggcagacugg

SEQ ID NO: 3866266 - RNA, 16 nt, Human
cuaucccaucccaucc

SEQ ID NO: 3866267 - RNA, 19 nt, Human
cuauccccaucucccugcc

SEQ ID NO: 3866268 - RNA, 22 nt, Human
cuauccccaucucccugccugg

SEQ ID NO: 3866269 - RNA, 23 nt, Human
cuauccccaucucccugccuggc

SEQ ID NO: 3866270 - RNA, 15 nt, Human
cuaucccggcugccc

SEQ ID NO: 3866271 - RNA, 17 nt, Human
cuaucccggcugcccuu

SEQ ID NO: 3866272 - RNA, 15 nt, Human
cuauccgcugccagc

SEQ ID NO: 3866273 - RNA, 22 nt, Human
cuauccgcugccagccuugagc

SEQ ID NO: 3866274 - RNA, 20 nt, Human
cuauccggacagagcacguu

SEQ ID NO: 3866275 - RNA, 17 nt, Human
cuauccguguugcaggu

SEQ ID NO: 3866276 - RNA, 17 nt, Human
cuauccuacuuccccuu

SEQ ID NO: 3866277 - RNA, 20 nt, Human
cuauccucucuuccucuucc

SEQ ID NO: 3866278 - RNA, 23 nt, Human
cuauccugacuucuaauaucauu

SEQ ID NO: 3866279 - RNA, 13 nt, Human
cucaaauccagga

SEQ ID NO: 3866280 - RNA, 15 nt, Human
cucaaauccaggacc

SEQ ID NO: 3866281 - RNA, 15 nt, Human
cucaaaucuauucag

SEQ ID NO: 3866282 - RNA, 22 nt, Human
cucaaaucuauucagacaagca

SEQ ID NO: 3866283 - RNA, 15 nt, Human
cucaaaucuuaagaa

SEQ ID NO: 3866284 - RNA, 16 nt, Human
cucaaaucuuaagaaa

SEQ ID NO: 3866285 - RNA, 21 nt, Human
cucaaaucuuuuagucauuau

SEQ ID NO: 3866286 - RNA, 17 nt, Human
cucaaaugacccaaaga

SEQ ID NO: 3866287 - RNA, 22 nt, Human
cucaaaugaguaacauuugcug

SEQ ID NO: 3866288 - RNA, 22 nt, Human
cucaaaugcaguauuuuuguug

SEQ ID NO: 3866289 - RNA, 19 nt, Human
cucaaaugcucagaccagc

SEQ ID NO: 3866290 - RNA, 20 nt, Human
cucaaauggggccagaucca

SEQ ID NO: 3866291 - RNA, 23 nt, Human
cucaaauguucuaaguuucuaag

SEQ ID NO: 3866292 - RNA, 18 nt, Human
cucaaauuguaauuaaua

SEQ ID NO: 3866293 - RNA, 14 nt, Human
cucaaauuucuaaa

SEQ ID NO: 3866294 - RNA, 14 nt, Human
cucaaauuuugagu

SEQ ID NO: 3866295 - RNA, 15 nt, Human
cucaacaagggagag

SEQ ID NO: 3866296 - RNA, 12 nt, Human
cucaacaauaaa

SEQ ID NO: 3866297 - RNA, 21 nt, Human
cucaacaccaugauuccuuua

SEQ ID NO: 3866298 - RNA, 21 nt, Human
cucaacaccucugcacaagcu

SEQ ID NO: 3866299 - RNA, 14 nt, Human
cucaacaggccuca

SEQ ID NO: 3866300 - RNA, 21 nt, Human
cucaacaggccucagggcucc

SEQ ID NO: 3866301 - RNA, 15 nt, Human
cucaacaugagucaa

SEQ ID NO: 3866302 - RNA, 14 nt, Human
cucaaccaaauggu

SEQ ID NO: 3866303 - RNA, 20 nt, Human
cucaaccaaaugguacaaaa

SEQ ID NO: 3866304 - RNA, 20 nt, Human
cucaaccauccccuccgugg

SEQ ID NO: 3866305 - RNA, 21 nt, Human
cucaacccucccucagccccu

SEQ ID NO: 3866306 - RNA, 23 nt, Human
cucaacccucccucagccccucu

SEQ ID NO: 3866307 - RNA, 14 nt, Human
cucaaccucuucug

SEQ ID NO: 3866308 - RNA, 21 nt, Human
cucaaccucuucuggcucaaa

SEQ ID NO: 3866309 - RNA, 15 nt, Human
cucaaccuguaaauu

SEQ ID NO: 3866310 - RNA, 17 nt, Human
cucaaccuguaaauuau

SEQ ID NO: 3866311 - RNA, 20 nt, Human
cucaaccuguaaauuauuuu

SEQ ID NO: 3866312 - RNA, 21 nt, Human
cucaaccugugaugaggggag

SEQ ID NO: 3866313 - RNA, 16 nt, Human
cucaacuaaauccaaa

SEQ ID NO: 3866314 - RNA, 23 nt, Human
cucaacuccgugcuuaaccaaag

SEQ ID NO: 3866315 - RNA, 16 nt, Human
cucaacucuccuccag

SEQ ID NO: 3866316 - RNA, 19 nt, Human
cucaacucuccuccagagu

SEQ ID NO: 3866317 - RNA, 21 nt, Human
cucaacugcucuuuuauacug

SEQ ID NO: 3866318 - RNA, 21 nt, Human
cucaagaaauaaaaggaagcc

SEQ ID NO: 3866319 - RNA, 22 nt, Human
cucaagaaauaaaaggaagcca

SEQ ID NO: 3866320 - RNA, 23 nt, Human
cucaagaaauaaaaggaagccaa

SEQ ID NO: 3866321 - RNA, 11 nt, Human
cucaagacaau

SEQ ID NO: 3866322 - RNA, 15 nt, Human
cucaagagcaaagua

SEQ ID NO: 3866323 - RNA, 18 nt, Human
cucaagaggaaugaaaaa

SEQ ID NO: 3866324 - RNA, 14 nt, Human
cucaagaggcugag

SEQ ID NO: 3866325 - RNA, 17 nt, Human
cucaagauacugcuacu

SEQ ID NO: 3866326 - RNA, 21 nt, Human
cucaagaugggggcagggcug

SEQ ID NO: 3866327 - RNA, 15 nt, Human
cucaagauucccagg

SEQ ID NO: 3866328 - RNA, 16 nt, Human
cucaagauucccagga

SEQ ID NO: 3866329 - RNA, 22 nt, Human
cucaagcagcgaccgcccccuc

SEQ ID NO: 3866330 - RNA, 18 nt, Human
cucaagccaagcagccaa

SEQ ID NO: 3866331 - RNA, 22 nt, Human
cucaagccaagcagccaagcuc

SEQ ID NO: 3866332 - RNA, 18 nt, Human
cucaagccaauccccucc

SEQ ID NO: 3866333 - RNA, 13 nt, Human
cucaagccaccag

SEQ ID NO: 3866334 - RNA, 21 nt, Human
cucaagccaccagaugugaca

SEQ ID NO: 3866335 - RNA, 16 nt, Human
cucaagcccaggaggg

SEQ ID NO: 3866336 - RNA, 20 nt, Human
cucaagcggguggcucuggg

SEQ ID NO: 3866337 - RNA, 20 nt, Human
cucaagcucuuccuuacucc

SEQ ID NO: 3866338 - RNA, 23 nt, Human
cucaaggaauaaugggcuuagag

SEQ ID NO: 3866339 - RNA, 21 nt, Human
cucaaggacaaagucuccagc

SEQ ID NO: 3866340 - RNA, 23 nt, Human
cucaaggacaaagucuccagccc

SEQ ID NO: 3866341 - RNA, 18 nt, Human
cucaaggacuugaaagca

SEQ ID NO: 3866342 - RNA, 19 nt, Human
cucaaggacuugaaagcau

SEQ ID NO: 3866343 - RNA, 20 nt, Human
cucaaggccucccacaguga

SEQ ID NO: 3866344 - RNA, 17 nt, Human
cucaagggacaaggaca

SEQ ID NO: 3866345 - RNA, 14 nt, Human
cucaagggcaugag

SEQ ID NO: 3866346 - RNA, 21 nt, Human
cucaagggcuagcaucccuga

SEQ ID NO: 3866347 - RNA, 23 nt, Human
cucaaggggccauccugucccac

SEQ ID NO: 3866348 - RNA, 19 nt, Human
cucaagguuuuagguucua

SEQ ID NO: 3866349 - RNA, 23 nt, Human
cucaagguuuuagguucuaaagu

SEQ ID NO: 3866350 - RNA, 18 nt, Human
cucaaguagcauuuacug

SEQ ID NO: 3866351 - RNA, 14 nt, Human
cucaaguccucuuu

SEQ ID NO: 3866352 - RNA, 21 nt, Human
cucaaguccucuuuucugaga

SEQ ID NO: 3866353 - RNA, 15 nt, Human
cucaagucuggcaga

SEQ ID NO: 3866354 - RNA, 15 nt, Human
cucaagucuuucucu

SEQ ID NO: 3866355 - RNA, 17 nt, Human
cucaagugauccuccca

SEQ ID NO: 3866356 - RNA, 18 nt, Human
cucaagugauccucccac

SEQ ID NO: 3866357 - RNA, 19 nt, Human
cucaagugauucuccugcc

SEQ ID NO: 3866358 - RNA, 15 nt, Human
cucaaguucaaggac

SEQ ID NO: 3866359 - RNA, 18 nt, Human
cucaaguucuaagauucu

SEQ ID NO: 3866360 - RNA, 19 nt, Human
cucaaguucuaagauucua

SEQ ID NO: 3866361 - RNA, 14 nt, Human
cucaaguugaaaga

SEQ ID NO: 3866362 - RNA, 18 nt, Human
cucaaguuuuucagaaag

SEQ ID NO: 3866363 - RNA, 16 nt, Human
cucaauaaaugauucu

SEQ ID NO: 3866364 - RNA, 13 nt, Human
cucaauauuuucc

SEQ ID NO: 3866365 - RNA, 22 nt, Human
cucaauauuuuccaugaaaaug

SEQ ID NO: 3866366 - RNA, 15 nt, Human
cucaaucaagaaaau

SEQ ID NO: 3866367 - RNA, 19 nt, Human
cucaauccuaauuucuccu

SEQ ID NO: 3866368 - RNA, 22 nt, Human
cucaauccuaauuucuccuccc

SEQ ID NO: 3866369 - RNA, 12 nt, Human
cucaaugagcau

SEQ ID NO: 3866370 - RNA, 14 nt, Human
cucaaugagcaugu

SEQ ID NO: 3866371 - RNA, 21 nt, Human
cucaaugagcauguuuagacu

SEQ ID NO: 3866372 - RNA, 12 nt, Human
cucaaugagcuc

SEQ ID NO: 3866373 - RNA, 13 nt, Human
cucaaugcacuga

SEQ ID NO: 3866374 - RNA, 15 nt, Human
cucaaugcacugaca

SEQ ID NO: 3866375 - RNA, 22 nt, Human
cucaaugcaguuagcugaagaa

SEQ ID NO: 3866376 - RNA, 20 nt, Human
cucaaugcuuuauuuguaaa

SEQ ID NO: 3866377 - RNA, 23 nt, Human
cucaauggccuaaaacuggccug

SEQ ID NO: 3866378 - RNA, 11 nt, Human
cucaaugugaa

SEQ ID NO: 3866379 - RNA, 13 nt, Human
cucaaugugaaaa

SEQ ID NO: 3866380 - RNA, 18 nt, Human
cucaaugugaccaggggu

SEQ ID NO: 3866381 - RNA, 12 nt, Human
cucaauguuuga

SEQ ID NO: 3866382 - RNA, 14 nt, Human
cucaauuagugugg

SEQ ID NO: 3866383 - RNA, 21 nt, Human
cucaauuccaacaguuuaaug

SEQ ID NO: 3866384 - RNA, 19 nt, Human
cucaauucccccuggccac

SEQ ID NO: 3866385 - RNA, 12 nt, Human
cucaauugugaa

SEQ ID NO: 3866386 - RNA, 13 nt, Human
cucaauugugaaa

SEQ ID NO: 3866387 - RNA, 17 nt, Human
cucacaaccugaaccua

SEQ ID NO: 3866388 - RNA, 20 nt, Human
cucacaaccugaaccuagga

SEQ ID NO: 3866389 - RNA, 13 nt, Human
cucacaagccagc

SEQ ID NO: 3866390 - RNA, 20 nt, Human
cucacaaggcagcaaggccc

SEQ ID NO: 3866391 - RNA, 21 nt, Human
cucacaaggcagcaaggcccg

SEQ ID NO: 3866392 - RNA, 19 nt, Human
cucacaaguggguaccccc

SEQ ID NO: 3866393 - RNA, 16 nt, Human
cucacacacccugagg

SEQ ID NO: 3866394 - RNA, 23 nt, Human
cucacacacccugucugccccgc

SEQ ID NO: 3866395 - RNA, 22 nt, Human
cucacacaggacccccuucccc

SEQ ID NO: 3866396 - RNA, 22 nt, Human
cucacacaggcauuuccugggu

SEQ ID NO: 3866397 - RNA, 17 nt, Human
cucacaccacuagccuc

SEQ ID NO: 3866398 - RNA, 21 nt, Human
cucacaccacuagccucaggg

SEQ ID NO: 3866399 - RNA, 12 nt, Human
cucacacccacc

SEQ ID NO: 3866400 - RNA, 23 nt, Human
cucacacccaccguccgcccugc

SEQ ID NO: 3866401 - RNA, 21 nt, Human
cucacaccgcgucuggugaca

SEQ ID NO: 3866402 - RNA, 19 nt, Human
cucacaccucacucuuuau

SEQ ID NO: 3866403 - RNA, 22 nt, Human
cucacaccuguaaucccagcac

SEQ ID NO: 3866404 - RNA, 23 nt, Human
cucacacucaugcauuguccucu

SEQ ID NO: 3866405 - RNA, 18 nt, Human
cucacacuccccuagggg

SEQ ID NO: 3866406 - RNA, 14 nt, Human
cucacacuccuuua

SEQ ID NO: 3866407 - RNA, 12 nt, Human
cucacacugaga

SEQ ID NO: 3866408 - RNA, 18 nt, Human
cucacacuggucugcugu

SEQ ID NO: 3866409 - RNA, 13 nt, Human
cucacagacagga

SEQ ID NO: 3866410 - RNA, 23 nt, Human
cucacagacaggaccccugcagu

SEQ ID NO: 3866411 - RNA, 14 nt, Human
cucacagaccugga

SEQ ID NO: 3866412 - RNA, 17 nt, Human
cucacagaccuggagcc

SEQ ID NO: 3866413 - RNA, 22 nt, Human
cucacagaccuggagccccugg

SEQ ID NO: 3866414 - RNA, 23 nt, Human
cucacagacuggagacaaugcag

SEQ ID NO: 3866415 - RNA, 17 nt, Human
cucacagagucaaggcc

SEQ ID NO: 3866416 - RNA, 19 nt, Human
cucacagagucaaggccug

SEQ ID NO: 3866417 - RNA, 22 nt, Human
cucacagagucaaggccugcuc

SEQ ID NO: 3866418 - RNA, 20 nt, Human
cucacagaugugacuguaua

SEQ ID NO: 3866419 - RNA, 19 nt, Human
cucacagauugcugccuca

SEQ ID NO: 3866420 - RNA, 17 nt, Human
cucacagcacacucagc

SEQ ID NO: 3866421 - RNA, 20 nt, Human
cucacagcacaugcuggcca

SEQ ID NO: 3866422 - RNA, 13 nt, Human
cuccuguccuccc

SEQ ID NO: 3866423 - RNA, 20 nt, Human
cuccuguccucccauccccu

SEQ ID NO: 3866424 - RNA, 17 nt, Human
cuccugucugccagcca

SEQ ID NO: 3866425 - RNA, 19 nt, Human
cuccugucugccagccagc

SEQ ID NO: 3866426 - RNA, 14 nt, Human
cuccugucuucugc

SEQ ID NO: 3866427 - RNA, 18 nt, Human
cuccugucuucugcuuug

SEQ ID NO: 3866428 - RNA, 17 nt, Human
cuccugugcaacuuucc

SEQ ID NO: 3866429 - RNA, 17 nt, Human
cuccugugcauggguga

SEQ ID NO: 3866430 - RNA, 11 nt, Human
cuccugugccc

SEQ ID NO: 3866431 - RNA, 22 nt, Human
cuccugugcccacaucccaggc

SEQ ID NO: 3866432 - RNA, 19 nt, Human
cuccugugcucagcccuga

SEQ ID NO: 3866433 - RNA, 22 nt, Human
cuccugugcucagcccugagga

SEQ ID NO: 3866434 - RNA, 16 nt, Human
cuccuguggaacccag

SEQ ID NO: 3866435 - RNA, 13 nt, Human
cuccuguggcccc

SEQ ID NO: 3866436 - RNA, 22 nt, Human
cuccuguggccccacccugggc

SEQ ID NO: 3866437 - RNA, 15 nt, Human
cuccuguggccugcc

SEQ ID NO: 3866438 - RNA, 18 nt, Human
cuccuguggccugccagu

SEQ ID NO: 3866439 - RNA, 15 nt, Human
cuccugugggagccu

SEQ ID NO: 3866440 - RNA, 16 nt, Human
cuccugugggagccuc

SEQ ID NO: 3866441 - RNA, 23 nt, Human
cuccugugucuugcaauggcagc

SEQ ID NO: 3866442 - RNA, 11 nt, Human
cuccugugugu

SEQ ID NO: 3866443 - RNA, 21 nt, Human
cuccugugugugcgccuacag

SEQ ID NO: 3866444 - RNA, 24 nt, Human
cuccugugugugcgccuacaggag

SEQ ID NO: 3866445 - RNA, 19 nt, Human
cuccuguugcacccagccc

SEQ ID NO: 3866446 - RNA, 13 nt, Human
cuccuguugggag

SEQ ID NO: 3866447 - RNA, 22 nt, Human
cuccuguugggagagggcgcag

SEQ ID NO: 3866448 - RNA, 24 nt, Human
cuccuguugggagagggcgcaggc

SEQ ID NO: 3866449 - RNA, 20 nt, Human
cuccuguuucccuucccuuc

SEQ ID NO: 3866450 - RNA, 17 nt, Human
cuccuuagaaguggaag

SEQ ID NO: 3866451 - RNA, 20 nt, Human
cuccuuagagacaucaaaau

SEQ ID NO: 3866452 - RNA, 17 nt, Human
cuccuuaucaaaggaca

SEQ ID NO: 3866453 - RNA, 23 nt, Human
cuccuucaacaaggcuugcugca

SEQ ID NO: 3866454 - RNA, 16 nt, Human
cuccuucacagauggg

SEQ ID NO: 3866455 - RNA, 17 nt, Human
cuccuucacagaugggu

SEQ ID NO: 3866456 - RNA, 19 nt, Human
cuccuucacagaugggugc

SEQ ID NO: 3866457 - RNA, 19 nt, Human
cuccuucaccuuugucccc

SEQ ID NO: 3866458 - RNA, 21 nt, Human
cuccuucaccuuuguccccac

SEQ ID NO: 3866459 - RNA, 19 nt, Human
cuccuucagacacccucaa

SEQ ID NO: 3866460 - RNA, 13 nt, Human
cuccuucagcccu

SEQ ID NO: 3866461 - RNA, 17 nt, Human
cuccuucagcccucacc

SEQ ID NO: 3866462 - RNA, 22 nt, Human
cuccuucauaugaaaggugcca

SEQ ID NO: 3866463 - RNA, 14 nt, Human
cuccuuccaacagg

SEQ ID NO: 3866464 - RNA, 18 nt, Human
cuccuuccaacaggagcu

SEQ ID NO: 3866465 - RNA, 14 nt, Human
cuccuuccaacugc

SEQ ID NO: 3866466 - RNA, 18 nt, Human
cuccuuccaacugcugcc

SEQ ID NO: 3866467 - RNA, 19 nt, Human
cuccuuccaacugcugccc

SEQ ID NO: 3866468 - RNA, 18 nt, Human
cuccuuccaccucccucc

SEQ ID NO: 3866469 - RNA, 13 nt, Human
cuccuucccaaag

SEQ ID NO: 3866470 - RNA, 23 nt, Human
cuccuucccaaaggacuccaccc

SEQ ID NO: 3866471 - RNA, 16 nt, Human
cuccuucccacucuuc

SEQ ID NO: 3866472 - RNA, 19 nt, Human
cuccuucccacucuucuca

SEQ ID NO: 3866473 - RNA, 18 nt, Human
cuccuucccagcugcccc

SEQ ID NO: 3866474 - RNA, 17 nt, Human
cuccuucccaucgcugu

SEQ ID NO: 3866475 - RNA, 20 nt, Human
cuccuuccuaguucaucccu

SEQ ID NO: 3866476 - RNA, 15 nt, Human
cuccuuccugcccca

SEQ ID NO: 3866477 - RNA, 14 nt, Human
cuccuuccuggaga

SEQ ID NO: 3866478 - RNA, 20 nt, Human
cuccuuccuggagcccagag

SEQ ID NO: 3866479 - RNA, 18 nt, Human
cuccuuccuggccugaga

SEQ ID NO: 3866480 - RNA, 17 nt, Human
cuccuuccugucuuccu

SEQ ID NO: 3866481 - RNA, 18 nt, Human
cuccuuccuugaccagca

SEQ ID NO: 3866482 - RNA, 22 nt, Human
cuccuuccuugcuguccuaggc

SEQ ID NO: 3866483 - RNA, 13 nt, Human
cuccuuccuuguu

SEQ ID NO: 3866484 - RNA, 19 nt, Human
cuccuucgcaggcaugucc

SEQ ID NO: 3866485 - RNA, 13 nt, Human
cuccuucucccuu

SEQ ID NO: 3866486 - RNA, 16 nt, Human
cuccuucucugucuca

SEQ ID NO: 3866487 - RNA, 18 nt, Human
cuccuucugagcuccugu

SEQ ID NO: 3866488 - RNA, 19 nt, Human
cuccuucugagcuccuguc

SEQ ID NO: 3866489 - RNA, 14 nt, Human
cuccuucuguccua

SEQ ID NO: 3866490 - RNA, 20 nt, Human
cuccuucuguccuacucugu

SEQ ID NO: 3866491 - RNA, 17 nt, Human
cuccuugagagaccagg

SEQ ID NO: 3866492 - RNA, 22 nt, Human
cuccuugagggcaagagccaca

SEQ ID NO: 3866493 - RNA, 12 nt, Human
cuccuugcaguu

SEQ ID NO: 3866494 - RNA, 17 nt, Human
cuccuugcuacccagaa

SEQ ID NO: 3866495 - RNA, 14 nt, Human
cuccuuggagacag

SEQ ID NO: 3866496 - RNA, 20 nt, Human
cuccuuggcuuaccugaccu

SEQ ID NO: 3866497 - RNA, 13 nt, Human
cuccuugggagga

SEQ ID NO: 3866498 - RNA, 18 nt, Human
cuccuugggaggaagcag

SEQ ID NO: 3866499 - RNA, 22 nt, Human
cuccuugggaggaagcagaaua

SEQ ID NO: 3866500 - RNA, 23 nt, Human
cuccuuggugucgggcaugacac

SEQ ID NO: 3866501 - RNA, 16 nt, Human
cuccuuguggccuggg

SEQ ID NO: 3866502 - RNA, 20 nt, Human
cuccuuguggccugggccuc

SEQ ID NO: 3866503 - RNA, 16 nt, Human
cuccuugugggccugg

SEQ ID NO: 3866504 - RNA, 14 nt, Human
cuccuuguguuacu

SEQ ID NO: 3866505 - RNA, 12 nt, Human
cuccuuguuccu

SEQ ID NO: 3866506 - RNA, 15 nt, Human
cuccuuuaauuguaa

SEQ ID NO: 3866507 - RNA, 18 nt, Human
cuccuuuacccucaucug

SEQ ID NO: 3866508 - RNA, 14 nt, Human
cuccuuuagcaggu

SEQ ID NO: 3866509 - RNA, 20 nt, Human
cuccuuuagcaggugguccu

SEQ ID NO: 3866510 - RNA, 16 nt, Human
cuccuuuagcgcccag

SEQ ID NO: 3866511 - RNA, 22 nt, Human
cuccuuuagcgcccaguugggu

SEQ ID NO: 3866512 - RNA, 13 nt, Human
cuccuuucacaac

SEQ ID NO: 3866513 - RNA, 16 nt, Human
cuccuuucacaaccuu

SEQ ID NO: 3866514 - RNA, 20 nt, Human
cuccuuucacaaccuucugu

SEQ ID NO: 3866515 - RNA, 19 nt, Human
cuccuuucaccccagggcc

SEQ ID NO: 3866516 - RNA, 17 nt, Human
cuccuuucuccagccag

SEQ ID NO: 3866517 - RNA, 19 nt, Human
cuccuuucuccagccagca

SEQ ID NO: 3866518 - RNA, 14 nt, Human
cuccuuucuccucc

SEQ ID NO: 3866519 - RNA, 13 nt, Human
cuccuuucucuuu

SEQ ID NO: 3866520 - RNA, 13 nt, Human
cuccuuucugugc

SEQ ID NO: 3866521 - RNA, 14 nt, Human
cuccuuucugugcc

SEQ ID NO: 3866522 - RNA, 14 nt, Human
cuccuuugcacuga

SEQ ID NO: 3866523 - RNA, 21 nt, Human
cuccuuugcacugagggccac

SEQ ID NO: 3866524 - RNA, 12 nt, Human
cuccuuuguaua

SEQ ID NO: 3866525 - RNA, 17 nt, Human
cuccuuugugaggaagc

SEQ ID NO: 3866526 - RNA, 17 nt, Human
cuccuuuguucccggcu

SEQ ID NO: 3866527 - RNA, 13 nt, Human
cuccuuuuaaaga

SEQ ID NO: 3866528 - RNA, 19 nt, Human
cuccuuuuccagagcauuc

SEQ ID NO: 3866529 - RNA, 16 nt, Human
cuccuuuucuuuuguu

SEQ ID NO: 3866530 - RNA, 20 nt, Human
cuccuuuucuuuuguuacug

SEQ ID NO: 3866531 - RNA, 21 nt, Human
cuccuuuucuuuuguuacugu

SEQ ID NO: 3866532 - RNA, 22 nt, Human
cuccuuuucuuuuguuacuguu

SEQ ID NO: 3866533 - RNA, 23 nt, Human
cuccuuuucuuuuguuacuguuc

SEQ ID NO: 3866534 - RNA, 24 nt, Human
cuccuuuugaccuucauuucaugu

SEQ ID NO: 3866535 - RNA, 17 nt, Human
cuccuuuuguguuccaa

SEQ ID NO: 3866536 - RNA, 13 nt, Human
cuccuuuuuccau

SEQ ID NO: 3866537 - RNA, 14 nt, Human
cucgaaacacagaa

SEQ ID NO: 3866538 - RNA, 19 nt, Human
cucgaaacacagaaaccuu

SEQ ID NO: 3866539 - RNA, 16 nt, Human
cucgaacuggcugcaa

SEQ ID NO: 3866540 - RNA, 17 nt, Human
cucgaagcgcgccacuc

SEQ ID NO: 3866541 - RNA, 15 nt, Human
cucgaaucucugugc

SEQ ID NO: 3866542 - RNA, 20 nt, Human
cucgacacgugggcuccccu

SEQ ID NO: 3866543 - RNA, 22 nt, Human
cucgacacgugggcuccccucu

SEQ ID NO: 3866544 - RNA, 19 nt, Human
cucgacaucacuguucaug

SEQ ID NO: 3866545 - RNA, 19 nt, Human
cucgagaacuuucauuuuu

SEQ ID NO: 3866546 - RNA, 22 nt, Human
cucgagaucccaacacugccag

SEQ ID NO: 3866547 - RNA, 23 nt, Human
cucgagaucccaacacugccagc

SEQ ID NO: 3866548 - RNA, 12 nt, Human
cucgagcgcccu

SEQ ID NO: 3866549 - RNA, 17 nt, Human
cucgaggacuguauuug

SEQ ID NO: 3866550 - RNA, 23 nt, Human
cucgaggacuguauuugugacua

SEQ ID NO: 3866551 - RNA, 13 nt, Human
cucgagggcaggg

SEQ ID NO: 3866552 - RNA, 18 nt, Human
cucgagggcagggaccac

SEQ ID NO: 3866553 - RNA, 23 nt, Human
cucgaggguuggguucaucugag

SEQ ID NO: 3866554 - RNA, 17 nt, Human
cucgaggucgggcagca

SEQ ID NO: 3866555 - RNA, 21 nt, Human
cucgaggucgggcagcacaag

SEQ ID NO: 3866556 - RNA, 17 nt, Human
cucgagguuucucaaag

SEQ ID NO: 3866557 - RNA, 13 nt, Human
cucgaguacugug

SEQ ID NO: 3866558 - RNA, 20 nt, Human
cucgaguacugugggcaauu

SEQ ID NO: 3866559 - RNA, 12 nt, Human
cucgagucugag

SEQ ID NO: 3866560 - RNA, 16 nt, Human
cucgaguuacagacaa

SEQ ID NO: 3866561 - RNA, 21 nt, Human
cucgauccaaauugugcuucu

SEQ ID NO: 3866562 - RNA, 14 nt, Human
cucgaugcagacag

SEQ ID NO: 3866563 - RNA, 19 nt, Human
cucgauguggucacagcug

SEQ ID NO: 3866564 - RNA, 22 nt, Human
cucgauuuuaucuuucgcacag

SEQ ID NO: 3866565 - RNA, 13 nt, Human
cucgauuuuguau

SEQ ID NO: 3866566 - RNA, 17 nt, Human
cucucaucucuuagcuc

SEQ ID NO: 3866567 - RNA, 16 nt, Human
cucucaugcugccccu

SEQ ID NO: 3866568 - RNA, 22 nt, Human
cucucaugcugccccugccuug

SEQ ID NO: 3866569 - RNA, 20 nt, Human
cucucauguuuucaacugcc

SEQ ID NO: 3866570 - RNA, 11 nt, Human
cucucauuccc

SEQ ID NO: 3866571 - RNA, 20 nt, Human
cucucauuccccagguggcu

SEQ ID NO: 3866572 - RNA, 21 nt, Human
cucucauuccccagguggcug

SEQ ID NO: 3866573 - RNA, 16 nt, Human
cucuccaaaccacuuu

SEQ ID NO: 3866574 - RNA, 14 nt, Human
cucuccaaccugga

SEQ ID NO: 3866575 - RNA, 16 nt, Human
cucuccaaccuggaca

SEQ ID NO: 3866576 - RNA, 13 nt, Human
cucuccaagggcu

SEQ ID NO: 3866577 - RNA, 23 nt, Human
cucuccaagucucaguggcuuca

SEQ ID NO: 3866578 - RNA, 14 nt, Human
cucuccaagugcca

SEQ ID NO: 3866579 - RNA, 20 nt, Human
cucuccaagugccagaggug

SEQ ID NO: 3866580 - RNA, 22 nt, Human
cucuccacacagugcucaaggc

SEQ ID NO: 3866581 - RNA, 10 nt, Human
cucuccaccu

SEQ ID NO: 3866582 - RNA, 14 nt, Human
cucuccaccuagug

SEQ ID NO: 3866583 - RNA, 19 nt, Human
cucuccacucaugugacuc

SEQ ID NO: 3866584 - RNA, 12 nt, Human
cucuccacugcc

SEQ ID NO: 3866585 - RNA, 15 nt, Human
cucuccacugccuuc

SEQ ID NO: 3866586 - RNA, 15 nt, Human
cucuccacuuucagc

SEQ ID NO: 3866587 - RNA, 18 nt, Human
cucuccacuuucagcugu

SEQ ID NO: 3866588 - RNA, 12 nt, Human
cucuccagcagg

SEQ ID NO: 3866589 - RNA, 13 nt, Human
cucuccagccccu

SEQ ID NO: 3866590 - RNA, 16 nt, Human
cucuccagcuccaaga

SEQ ID NO: 3866591 - RNA, 23 nt, Human
cucuccaggcaggucugaagcuc

SEQ ID NO: 3866592 - RNA, 17 nt, Human
cucuccaggcgccggcg

SEQ ID NO: 3866593 - RNA, 21 nt, Human
cucuccagucuuccaccugga

SEQ ID NO: 3866594 - RNA, 19 nt, Human
cucuccaguuugcaccugu

SEQ ID NO: 3866595 - RNA, 13 nt, Human
cucuccauaaccc

SEQ ID NO: 3866596 - RNA, 16 nt, Human
cucuccaucuucagcu

SEQ ID NO: 3866597 - RNA, 21 nt, Human
cucuccauucccguggaacgu

SEQ ID NO: 3866598 - RNA, 16 nt, Human
cucuccauucugcucc

SEQ ID NO: 3866599 - RNA, 20 nt, Human
cucuccauucugcuccuucc

SEQ ID NO: 3866600 - RNA, 14 nt, Human
cucucccaacucuu

SEQ ID NO: 3866601 - RNA, 13 nt, Human
cucucccacccuc

SEQ ID NO: 3866602 - RNA, 17 nt, Human
cucucccacccucuucc

SEQ ID NO: 3866603 - RNA, 12 nt, Human
cucucccaggac

SEQ ID NO: 3866604 - RNA, 13 nt, Human
cucucccaggacc

SEQ ID NO: 3866605 - RNA, 14 nt, Human
cucucccaggcagg

SEQ ID NO: 3866606 - RNA, 16 nt, Human
cucucccaggccccau

SEQ ID NO: 3866607 - RNA, 20 nt, Human
cucucccagucuacccagag

SEQ ID NO: 3866608 - RNA, 12 nt, Human
cucucccaguug

SEQ ID NO: 3866609 - RNA, 14 nt, Human
cucucccaucacuu

SEQ ID NO: 3866610 - RNA, 18 nt, Human
cucucccaucacuucccu

SEQ ID NO: 3866611 - RNA, 20 nt, Human
cucucccaucacuucccuac

SEQ ID NO: 3866612 - RNA, 20 nt, Human
cucucccaucccccugcccu

SEQ ID NO: 3866613 - RNA, 13 nt, Human
cucucccauggag

SEQ ID NO: 3866614 - RNA, 16 nt, Human
cucucccauugucccu

SEQ ID NO: 3866615 - RNA, 18 nt, Human
cucuccccaacccccauu

SEQ ID NO: 3866616 - RNA, 21 nt, Human
cucuccccaauauccucgcuc

SEQ ID NO: 3866617 - RNA, 12 nt, Human
cucuccccacac

SEQ ID NO: 3866618 - RNA, 14 nt, Human
cucuccccacacua

SEQ ID NO: 3866619 - RNA, 15 nt, Human
cucuccccacacuaa

SEQ ID NO: 3866620 - RNA, 14 nt, Human
cucuccccaccccu

SEQ ID NO: 3866621 - RNA, 21 nt, Human
cucuccccacgagggcuggcu

SEQ ID NO: 3866622 - RNA, 16 nt, Human
cucuccccagcccaga

SEQ ID NO: 3866623 - RNA, 24 nt, Human
cucuccccagggaagcagcagccu

SEQ ID NO: 3866624 - RNA, 15 nt, Human
cucuccccaggucca

SEQ ID NO: 3866625 - RNA, 13 nt, Human
cucucccccaccc

SEQ ID NO: 3866626 - RNA, 18 nt, Human
cucucccccuuaccccac

SEQ ID NO: 3866627 - RNA, 12 nt, Human
cucuccccucaa

SEQ ID NO: 3866628 - RNA, 21 nt, Human
cucuccccucaaagucugcaa

SEQ ID NO: 3866629 - RNA, 21 nt, Human
cucuccccucagagugcaagc

SEQ ID NO: 3866630 - RNA, 17 nt, Human
cucuccccuccagccuu

SEQ ID NO: 3866631 - RNA, 15 nt, Human
cucuccccugccccc

SEQ ID NO: 3866632 - RNA, 21 nt, Human
cucuccccugcccccugcagg

SEQ ID NO: 3866633 - RNA, 15 nt, Human
cucuccccugcccug

SEQ ID NO: 3866634 - RNA, 16 nt, Human
cucuccccuucucugu

SEQ ID NO: 3866635 - RNA, 16 nt, Human
cucucccgucagggcc

SEQ ID NO: 3866636 - RNA, 23 nt, Human
cucucccucaacaagggagagac

SEQ ID NO: 3866637 - RNA, 13 nt, Human
cucucccuccccu

SEQ ID NO: 3866638 - RNA, 15 nt, Human
cucucccucuaggcu

SEQ ID NO: 3866639 - RNA, 13 nt, Human
cucucccucuggc

SEQ ID NO: 3866640 - RNA, 15 nt, Human
cucucccucuggucc

SEQ ID NO: 3866641 - RNA, 14 nt, Human
cucucccugacccu

SEQ ID NO: 3866642 - RNA, 16 nt, Human
cucucccugcugcucc

SEQ ID NO: 3866643 - RNA, 19 nt, Human
cucucccugcugcuccuag

SEQ ID NO: 3866644 - RNA, 20 nt, Human
cucucccugcugcuccuagg

SEQ ID NO: 3866645 - RNA, 17 nt, Human
cucucccuugggcucug

SEQ ID NO: 3866646 - RNA, 19 nt, Human
cucucccuugggcucugau

SEQ ID NO: 3866647 - RNA, 23 nt, Human
cucucccuugggcucugaugaaa

SEQ ID NO: 3866648 - RNA, 18 nt, Human
cucuccgccccugagccc

SEQ ID NO: 3866649 - RNA, 20 nt, Human
cucuccgccccugagcccac

SEQ ID NO: 3866650 - RNA, 16 nt, Human
cucuccggggccauuu

SEQ ID NO: 3866651 - RNA, 21 nt, Human
cucuccggggccauuugcaau

SEQ ID NO: 3866652 - RNA, 22 nt, Human
cucuccuaacugccagcccccu

SEQ ID NO: 3866653 - RNA, 16 nt, Human
cucuccucacacacag

SEQ ID NO: 3866654 - RNA, 14 nt, Human
cucuccucagacug

SEQ ID NO: 3866655 - RNA, 15 nt, Human
cucuccucagacugc

SEQ ID NO: 3866656 - RNA, 12 nt, Human
cucuccucaucu

SEQ ID NO: 3866657 - RNA, 20 nt, Human
cucuccuccugcccaccugu

SEQ ID NO: 3866658 - RNA, 13 nt, Human
cucuccuccuuuu

SEQ ID NO: 3866659 - RNA, 20 nt, Human
cucuccucggcccccuccau

SEQ ID NO: 3866660 - RNA, 10 nt, Human
cucuccucug

SEQ ID NO: 3866661 - RNA, 12 nt, Human
cucuccucugcu

SEQ ID NO: 3866662 - RNA, 13 nt, Human
cucuccucugcug

SEQ ID NO: 3866663 - RNA, 14 nt, Human
cucuccucugcugc

SEQ ID NO: 3866664 - RNA, 16 nt, Human
cucuccucuugccacu

SEQ ID NO: 3866665 - RNA, 21 nt, Human
cucuccugauagucuuucagu

SEQ ID NO: 3866666 - RNA, 13 nt, Human
cucuccugccuac

SEQ ID NO: 3866667 - RNA, 12 nt, Human
cucuccuggagg

SEQ ID NO: 3866668 - RNA, 23 nt, Human
cucuccuggccuauccgcugcca

SEQ ID NO: 3866669 - RNA, 16 nt, Human
cucuccuggcuuccca

SEQ ID NO: 3866670 - RNA, 18 nt, Human
cucuccugggcagcugcc

SEQ ID NO: 3866671 - RNA, 21 nt, Human
cucuccugggcagcugccucc

SEQ ID NO: 3866672 - RNA, 13 nt, Human
cucuccugggccc

SEQ ID NO: 3866673 - RNA, 17 nt, Human
cucuccugggccccucc

SEQ ID NO: 3866674 - RNA, 15 nt, Human
cucuccuguaccucu

SEQ ID NO: 3866675 - RNA, 18 nt, Human
cucuccugucucccuccu

SEQ ID NO: 3866676 - RNA, 19 nt, Human
cucuccuguuucccuuccc

SEQ ID NO: 3866677 - RNA, 22 nt, Human
cucuccuucaugacagccucca

SEQ ID NO: 3866678 - RNA, 19 nt, Human
cucuccuuggugucgggca

SEQ ID NO: 3866679 - RNA, 16 nt, Human
cucuccuuucuuuuuc

SEQ ID NO: 3866680 - RNA, 23 nt, Human
cucuccuuucuuuuucuucuucc

SEQ ID NO: 3866681 - RNA, 21 nt, Human
cucuccuuugaaaccugcucu

SEQ ID NO: 3866682 - RNA, 19 nt, Human
cucuccuuuggccauucca

SEQ ID NO: 3866683 - RNA, 14 nt, Human
cucuccuuuguaua

SEQ ID NO: 3866684 - RNA, 20 nt, Human
cucuccuuuguauauuauuu

SEQ ID NO: 3866685 - RNA, 18 nt, Human
cucuccuuuguucccggc

SEQ ID NO: 3866686 - RNA, 22 nt, Human
cucuccuuuucuuuuguuacug

SEQ ID NO: 3866687 - RNA, 19 nt, Human
cucucgcaccuuuccaaag

SEQ ID NO: 3866688 - RNA, 22 nt, Human
cucucgcggccucuucucucag

SEQ ID NO: 3866689 - RNA, 16 nt, Human
cucucggaacugcaug

SEQ ID NO: 3866690 - RNA, 19 nt, Human
cucucggaacugcaugcug

SEQ ID NO: 3866691 - RNA, 18 nt, Human
cucucggaaggcuggcug

SEQ ID NO: 3866692 - RNA, 16 nt, Human
cucucggcuccccaug

SEQ ID NO: 3866693 - RNA, 17 nt, Human
cucucggcuccccaugu

SEQ ID NO: 3866694 - RNA, 19 nt, Human
cucucggguucaagcaauu

SEQ ID NO: 3866695 - RNA, 21 nt, Human
cucucgguuccacgucccccu

SEQ ID NO: 3866696 - RNA, 16 nt, Human
cucucgguugaaaccu

SEQ ID NO: 3866697 - RNA, 17 nt, Human
cucucguaacugguuuc

SEQ ID NO: 3866698 - RNA, 15 nt, Human
cucucuaaccuccuu

SEQ ID NO: 3866699 - RNA, 16 nt, Human
cucucuaaccuccuuu

SEQ ID NO: 3866700 - RNA, 19 nt, Human
cucucuacaaacucccacu

SEQ ID NO: 3866701 - RNA, 14 nt, Human
cucucuacagucuc

SEQ ID NO: 3866702 - RNA, 16 nt, Human
cucucuacagucucgu

SEQ ID NO: 3866703 - RNA, 16 nt, Human
cucucuacccagccca

SEQ ID NO: 3866704 - RNA, 19 nt, Human
cucucuacccagcccaucu

SEQ ID NO: 3866705 - RNA, 19 nt, Human
cucucuacuccuaccucag

SEQ ID NO: 3866706 - RNA, 23 nt, Human
cucucuaggguacauggugcugg

SEQ ID NO: 3866707 - RNA, 14 nt, Human
cucucuauccucuc

SEQ ID NO: 3866708 - RNA, 24 nt, Human
cucucuauccucucuuccucuucc

SEQ ID NO: 3866709 - RNA, 23 nt, Human
cucucuaugguaaagauauuauu

SEQ ID NO: 3866710 - RNA, 15 nt, Human
cucucucaaaauuau

SEQ ID NO: 3866711 - RNA, 15 nt, Human
cugaugacacugaga

SEQ ID NO: 3866712 - RNA, 17 nt, Human
cugaugacagagcgaga

SEQ ID NO: 3866713 - RNA, 12 nt, Human
cugaugacccag

SEQ ID NO: 3866714 - RNA, 13 nt, Human
cugaugacccagg

SEQ ID NO: 3866715 - RNA, 18 nt, Human
cugaugacucaagauucc

SEQ ID NO: 3866716 - RNA, 21 nt, Human
cugaugagcaaccgcuucccu

SEQ ID NO: 3866717 - RNA, 12 nt, Human
cugaugcagcuu

SEQ ID NO: 3866718 - RNA, 23 nt, Human
cugaugcaggauuuguucucugu

SEQ ID NO: 3866719 - RNA, 18 nt, Human
cugaugcaucagaaaggg

SEQ ID NO: 3866720 - RNA, 12 nt, Human
cugaugcucccu

SEQ ID NO: 3866721 - RNA, 18 nt, Human
cugaugcucccuccccug

SEQ ID NO: 3866722 - RNA, 14 nt, Human
cugaugcugggcug

SEQ ID NO: 3866723 - RNA, 15 nt, Human
cugaugcugggcugg

SEQ ID NO: 3866724 - RNA, 17 nt, Human
cugaugcugggcugggu

SEQ ID NO: 3866725 - RNA, 16 nt, Human
cugaugcuucuucaga

SEQ ID NO: 3866726 - RNA, 17 nt, Human
cugaugcuucuucagag

SEQ ID NO: 3866727 - RNA, 20 nt, Human
cugaugcuucuucagagacu

SEQ ID NO: 3866728 - RNA, 20 nt, Human
cugauggaaacaaaguggaa

SEQ ID NO: 3866729 - RNA, 14 nt, Human
cugauggacaagga

SEQ ID NO: 3866730 - RNA, 15 nt, Human
cugauggaccuguca

SEQ ID NO: 3866731 - RNA, 15 nt, Human
cugauggagccuucc

SEQ ID NO: 3866732 - RNA, 14 nt, Human
cugauggaguaaau

SEQ ID NO: 3866733 - RNA, 19 nt, Human
cugauggcuucuccagggu

SEQ ID NO: 3866734 - RNA, 23 nt, Human
cugaugggguggaaggcauggcg

SEQ ID NO: 3866735 - RNA, 15 nt, Human
cugauggugcaauga

SEQ ID NO: 3866736 - RNA, 16 nt, Human
cugauggugcaaugac

SEQ ID NO: 3866737 - RNA, 20 nt, Human
cugauggugcaaugaccuuu

SEQ ID NO: 3866738 - RNA, 20 nt, Human
cugauguacaauuaaaaacc

SEQ ID NO: 3866739 - RNA, 22 nt, Human
cugaugucaauuucuguguugc

SEQ ID NO: 3866740 - RNA, 19 nt, Human
cugaugucccuagaaaaca

SEQ ID NO: 3866741 - RNA, 18 nt, Human
cugaugucuccuaagcac

SEQ ID NO: 3866742 - RNA, 12 nt, Human
cugaugucucua

SEQ ID NO: 3866743 - RNA, 19 nt, Human
cugaugucucuaaagcacu

SEQ ID NO: 3866744 - RNA, 19 nt, Human
cugauguuaggcugggccc

SEQ ID NO: 3866745 - RNA, 17 nt, Human
cugauguucccuccggu

SEQ ID NO: 3866746 - RNA, 22 nt, Human
cugauguuccuuuggaagaaaa

SEQ ID NO: 3866747 - RNA, 21 nt, Human
cugauuaaguugucuaaacaa

SEQ ID NO: 3866748 - RNA, 14 nt, Human
cugauuacaccagc

SEQ ID NO: 3866749 - RNA, 14 nt, Human
cugauuacugucaa

SEQ ID NO: 3866750 - RNA, 16 nt, Human
cugauuacugucaaua

SEQ ID NO: 3866751 - RNA, 17 nt, Human
cugauuacugucaauaa

SEQ ID NO: 3866752 - RNA, 19 nt, Human
cugauuacugucaauaaac

SEQ ID NO: 3866753 - RNA, 13 nt, Human
cugauuagaaaug

SEQ ID NO: 3866754 - RNA, 19 nt, Human
cugauuagaaaugaccaau

SEQ ID NO: 3866755 - RNA, 17 nt, Human
cugauuagcuuuguguu

SEQ ID NO: 3866756 - RNA, 14 nt, Human
cugauucaacuaaa

SEQ ID NO: 3866757 - RNA, 15 nt, Human
cugauucaacuaaaa

SEQ ID NO: 3866758 - RNA, 17 nt, Human
cugauucaacuaaaaaa

SEQ ID NO: 3866759 - RNA, 17 nt, Human
cugauucaauuugaugu

SEQ ID NO: 3866760 - RNA, 18 nt, Human
cugauucacugcauggcu

SEQ ID NO: 3866761 - RNA, 17 nt, Human
cugauucccaagcucug

SEQ ID NO: 3866762 - RNA, 18 nt, Human
cugauucccaagcucugc

SEQ ID NO: 3866763 - RNA, 19 nt, Human
cugauucgaaugacacugu

SEQ ID NO: 3866764 - RNA, 23 nt, Human
cugauucggcugucucagacucu

SEQ ID NO: 3866765 - RNA, 18 nt, Human
cugauucucagggucucu

SEQ ID NO: 3866766 - RNA, 19 nt, Human
cugauucuggcuuuaagcc

SEQ ID NO: 3866767 - RNA, 13 nt, Human
cugauucugggau

SEQ ID NO: 3866768 - RNA, 19 nt, Human
cugauucugggaugcuccu

SEQ ID NO: 3866769 - RNA, 15 nt, Human
cugauucuucagcaa

SEQ ID NO: 3866770 - RNA, 15 nt, Human
cugauugaccugcuc

SEQ ID NO: 3866771 - RNA, 17 nt, Human
cugauugagaaguucau

SEQ ID NO: 3866772 - RNA, 19 nt, Human
cugauugagaaguucauug

SEQ ID NO: 3866773 - RNA, 15 nt, Human
cugauuggacauuuu

SEQ ID NO: 3866774 - RNA, 14 nt, Human
cugauuggcucacc

SEQ ID NO: 3866775 - RNA, 16 nt, Human
cugauuggcucaccca

SEQ ID NO: 3866776 - RNA, 18 nt, Human
cugauuggcuuguagaau

SEQ ID NO: 3866777 - RNA, 22 nt, Human
cugauuggcuuguagaauuguu

SEQ ID NO: 3866778 - RNA, 17 nt, Human
cugauuggugcaacccu

SEQ ID NO: 3866779 - RNA, 18 nt, Human
cugauugguuucucuucu

SEQ ID NO: 3866780 - RNA, 21 nt, Human
cugauuguaacguugcugugg

SEQ ID NO: 3866781 - RNA, 21 nt, Human
cugauuguggaucuuuucauu

SEQ ID NO: 3866782 - RNA, 23 nt, Human
cugauuguggaucuuuucauucu

SEQ ID NO: 3866783 - RNA, 17 nt, Human
cugauugugucucuugg

SEQ ID NO: 3866784 - RNA, 16 nt, Human
cugauuuagauaugca

SEQ ID NO: 3866785 - RNA, 17 nt, Human
cugauuuaggagaagcc

SEQ ID NO: 3866786 - RNA, 18 nt, Human
cugauuuauuuuguauga

SEQ ID NO: 3866787 - RNA, 23 nt, Human
cugauuuauuuuguaugaaauau

SEQ ID NO: 3866788 - RNA, 12 nt, Human
cugauuucagga

SEQ ID NO: 3866789 - RNA, 13 nt, Human
cugauuuccccuc

SEQ ID NO: 3866790 - RNA, 12 nt, Human
cugauuucuagg

SEQ ID NO: 3866791 - RNA, 16 nt, Human
cugauuugcaaaaaaa

SEQ ID NO: 3866792 - RNA, 22 nt, Human
cugauuugcaauaaaaaugaua

SEQ ID NO: 3866793 - RNA, 17 nt, Human
cugauuugcauauucau

SEQ ID NO: 3866794 - RNA, 14 nt, Human
cugauuuggaaaaa

SEQ ID NO: 3866795 - RNA, 19 nt, Human
cugauuugggcugaaugua

SEQ ID NO: 3866796 - RNA, 23 nt, Human
cugauuugggcugaauguaugua

SEQ ID NO: 3866797 - RNA, 12 nt, Human
cugauuuguaac

SEQ ID NO: 3866798 - RNA, 13 nt, Human
cugauuuuaaugg

SEQ ID NO: 3866799 - RNA, 21 nt, Human
cugauuuuaggagcuaaggcu

SEQ ID NO: 3866800 - RNA, 22 nt, Human
cugauuuuaggagcuaaggcuc

SEQ ID NO: 3866801 - RNA, 23 nt, Human
cugauuuuaggagcuaaggcucu

SEQ ID NO: 3866802 - RNA, 17 nt, Human
cugauuuuauucuugau

SEQ ID NO: 3866803 - RNA, 18 nt, Human
cugauuuuauucuugauc

SEQ ID NO: 3866804 - RNA, 18 nt, Human
cugauuuucaaagcuuuu

SEQ ID NO: 3866805 - RNA, 16 nt, Human
cugauuuuuuuuuccu

SEQ ID NO: 3866806 - RNA, 18 nt, Human
cugauuuuuuuuuccuuc

SEQ ID NO: 3866807 - RNA, 21 nt, Human
cugauuuuuuuuuccuucagu

SEQ ID NO: 3866808 - RNA, 22 nt, Human
cugauuuuuuuuuccuucagug

SEQ ID NO: 3866809 - RNA, 23 nt, Human
cugcaaaaaauacuuuuucuaau

SEQ ID NO: 3866810 - RNA, 14 nt, Human
cugcaaaaccaggu

SEQ ID NO: 3866811 - RNA, 16 nt, Human
cugcaaaaccagguuu

SEQ ID NO: 3866812 - RNA, 17 nt, Human
cugcaaaaggacucuca

SEQ ID NO: 3866813 - RNA, 21 nt, Human
cugcaaaaggccucuuguaaa

SEQ ID NO: 3866814 - RNA, 12 nt, Human
cugcaaaaugag

SEQ ID NO: 3866815 - RNA, 21 nt, Human
cugcaaaaugaggaauguaua

SEQ ID NO: 3866816 - RNA, 22 nt, Human
cugcaaaaugaggaauguauau

SEQ ID NO: 3866817 - RNA, 23 nt, Human
cugcaaaauuugaugccaggaca

SEQ ID NO: 3866818 - RNA, 15 nt, Human
cugcaaacaaacacc

SEQ ID NO: 3866819 - RNA, 16 nt, Human
cugcaaacagaacagg

SEQ ID NO: 3866820 - RNA, 19 nt, Human
cugcaaacagaacaggguc

SEQ ID NO: 3866821 - RNA, 20 nt, Human
cugcaaacagaacaggguca

SEQ ID NO: 3866822 - RNA, 20 nt, Human
cugcaaaccugaccccugcu

SEQ ID NO: 3866823 - RNA, 15 nt, Human
cugcaaacgcugccu

SEQ ID NO: 3866824 - RNA, 16 nt, Human
cugcaaacgcugccug

SEQ ID NO: 3866825 - RNA, 19 nt, Human
cugcaaacgcugccugccg

SEQ ID NO: 3866826 - RNA, 13 nt, Human
cugcaaacuggga

SEQ ID NO: 3866827 - RNA, 16 nt, Human
cugcaaacugggaacc

SEQ ID NO: 3866828 - RNA, 15 nt, Human
cugcaaaggaaauac

SEQ ID NO: 3866829 - RNA, 23 nt, Human
cugcaaaggacagauccagggac

SEQ ID NO: 3866830 - RNA, 21 nt, Human
cugcaaaggguaucaggugcu

SEQ ID NO: 3866831 - RNA, 21 nt, Human
cugcaaaguacagguacuuug

SEQ ID NO: 3866832 - RNA, 23 nt, Human
cugcaaaguacagguacuuuguc

SEQ ID NO: 3866833 - RNA, 17 nt, Human
cugcaaauagaaaacag

SEQ ID NO: 3866834 - RNA, 15 nt, Human
cugcaaaugucauca

SEQ ID NO: 3866835 - RNA, 21 nt, Human
cugcaacaaaauguagaauau

SEQ ID NO: 3866836 - RNA, 20 nt, Human
cugcaacaggaacugugaga

SEQ ID NO: 3866837 - RNA, 13 nt, Human
cugcaaccuccac

SEQ ID NO: 3866838 - RNA, 14 nt, Human
cugcaaccuccacc

SEQ ID NO: 3866839 - RNA, 13 nt, Human
cugcaaccuccgc

SEQ ID NO: 3866840 - RNA, 15 nt, Human
cugcaaccuguugau

SEQ ID NO: 3866841 - RNA, 20 nt, Human
cugcaaccuucgccaccugg

SEQ ID NO: 3866842 - RNA, 20 nt, Human
cugcaaccuuguuuauuaaa

SEQ ID NO: 3866843 - RNA, 17 nt, Human
cugcaacggcuuagacu

SEQ ID NO: 3866844 - RNA, 15 nt, Human
cugcaacuucugccu

SEQ ID NO: 3866845 - RNA, 14 nt, Human
cugcaagagccuug

SEQ ID NO: 3866846 - RNA, 21 nt, Human
cugcaagagccuuggugucca

SEQ ID NO: 3866847 - RNA, 18 nt, Human
cugcaagaggcuccuguc

SEQ ID NO: 3866848 - RNA, 14 nt, Human
cugcaagcacagcc

SEQ ID NO: 3866849 - RNA, 19 nt, Human
cugcaaggacauucuugua

SEQ ID NO: 3866850 - RNA, 19 nt, Human
cugcaaggcccacaggagg

SEQ ID NO: 3866851 - RNA, 13 nt, Human
cugcaaggccuuu

SEQ ID NO: 3866852 - RNA, 16 nt, Human
cugcaagguacucugg

SEQ ID NO: 3866853 - RNA, 17 nt, Human
cugcaaggucuuugguu

SEQ ID NO: 3866854 - RNA, 20 nt, Human
cugcaagguuuaggcuggug

SEQ ID NO: 3866855 - RNA, 13 nt, Human
cugcauuugugaa

SEQ ID NO: 3866856 - RNA, 20 nt, Human
cugcauuuuaauuuuaacca

SEQ ID NO: 3866857 - RNA, 17 nt, Human
cugcauuuuucugcaga

SEQ ID NO: 3866858 - RNA, 16 nt, Human
cugccaaaaugcucua

SEQ ID NO: 3866859 - RNA, 16 nt, Human
cugccaaaggauguga

SEQ ID NO: 3866860 - RNA, 22 nt, Human
cugccaaaggaugugauauaua

SEQ ID NO: 3866861 - RNA, 15 nt, Human
cugccaaccauaccu

SEQ ID NO: 3866862 - RNA, 21 nt, Human
cugccaaccauaccuuccuuc

SEQ ID NO: 3866863 - RNA, 22 nt, Human
cugccaaccauaccuuccuucc

SEQ ID NO: 3866864 - RNA, 21 nt, Human
cugccaacuucuucagagcug

SEQ ID NO: 3866865 - RNA, 17 nt, Human
cugccaagacugcugug

SEQ ID NO: 3866866 - RNA, 20 nt, Human
cugccaagacugcuguggcc

SEQ ID NO: 3866867 - RNA, 17 nt, Human
cugccaauaacauucuu

SEQ ID NO: 3866868 - RNA, 18 nt, Human
cugccaauauccuaauaa

SEQ ID NO: 3866869 - RNA, 19 nt, Human
cugccaauauccuaauaaa

SEQ ID NO: 3866870 - RNA, 22 nt, Human
cugccaauauccuaauaaaaag

SEQ ID NO: 3866871 - RNA, 17 nt, Human
cugccaaugggagcuca

SEQ ID NO: 3866872 - RNA, 19 nt, Human
cugccacaaggaagaaauu

SEQ ID NO: 3866873 - RNA, 13 nt, Human
cugccacacaaac

SEQ ID NO: 3866874 - RNA, 22 nt, Human
cugccacacaaacguauguaaa

SEQ ID NO: 3866875 - RNA, 15 nt, Human
cugccacacucugac

SEQ ID NO: 3866876 - RNA, 16 nt, Human
cugccacacucugacg

SEQ ID NO: 3866877 - RNA, 13 nt, Human
cugccacacuuca

SEQ ID NO: 3866878 - RNA, 15 nt, Human
cugccaccaaaggcc

SEQ ID NO: 3866879 - RNA, 18 nt, Human
cugccaccaaaggccagg

SEQ ID NO: 3866880 - RNA, 15 nt, Human
cugccaccagagacc

SEQ ID NO: 3866881 - RNA, 15 nt, Human
cugccaccaggccac

SEQ ID NO: 3866882 - RNA, 18 nt, Human
cugccaccaggccaccuc

SEQ ID NO: 3866883 - RNA, 12 nt, Human
cugccaccaguc

SEQ ID NO: 3866884 - RNA, 15 nt, Human
cugccacccaccucc

SEQ ID NO: 3866885 - RNA, 18 nt, Human
cugccacccaccucccug

SEQ ID NO: 3866886 - RNA, 20 nt, Human
cugccacccaccucccugcc

SEQ ID NO: 3866887 - RNA, 22 nt, Human
cugccacccaccucccugccuc

SEQ ID NO: 3866888 - RNA, 14 nt, Human
cugccacccaggau

SEQ ID NO: 3866889 - RNA, 12 nt, Human
cugccaccccua

SEQ ID NO: 3866890 - RNA, 19 nt, Human
cugccacccuaccuguuca

SEQ ID NO: 3866891 - RNA, 16 nt, Human
cugccacccuggggag

SEQ ID NO: 3866892 - RNA, 21 nt, Human
cugccacccuggggagaaagu

SEQ ID NO: 3866893 - RNA, 15 nt, Human
cugccacccuguagc

SEQ ID NO: 3866894 - RNA, 11 nt, Human
cugccaccucc

SEQ ID NO: 3866895 - RNA, 22 nt, Human
cugccaccuccccuauccaccc

SEQ ID NO: 3866896 - RNA, 18 nt, Human
cugccaccuccccuugcc

SEQ ID NO: 3866897 - RNA, 14 nt, Human
cugccaccuccugc

SEQ ID NO: 3866898 - RNA, 12 nt, Human
cugccaccugga

SEQ ID NO: 3866899 - RNA, 14 nt, Human
cugccaccuggacc

SEQ ID NO: 3866900 - RNA, 16 nt, Human
cugccacuaggcuggg

SEQ ID NO: 3866901 - RNA, 22 nt, Human
cugccacuaggcugggugccca

SEQ ID NO: 3866902 - RNA, 23 nt, Human
cugccacuaggcugggugcccac

SEQ ID NO: 3866903 - RNA, 13 nt, Human
cugccacucacac

SEQ ID NO: 3866904 - RNA, 15 nt, Human
cugccacucacacag

SEQ ID NO: 3866905 - RNA, 24 nt, Human
cugccacucacacagccaggugcc

SEQ ID NO: 3866906 - RNA, 14 nt, Human
cugccacugagggg

SEQ ID NO: 3866907 - RNA, 17 nt, Human
cugccagacccccugga

SEQ ID NO: 3866908 - RNA, 19 nt, Human
cugccagacccccuggaga

SEQ ID NO: 3866909 - RNA, 11 nt, Human
cugccagagaa

SEQ ID NO: 3866910 - RNA, 20 nt, Human
cugccagagaagcaucggag

SEQ ID NO: 3866911 - RNA, 10 nt, Human
cugccagagg

SEQ ID NO: 3866912 - RNA, 19 nt, Human
cugccagcagcagcaggug

SEQ ID NO: 3866913 - RNA, 12 nt, Human
cugccagccagc

SEQ ID NO: 3866914 - RNA, 16 nt, Human
cugccagccagcagcc

SEQ ID NO: 3866915 - RNA, 13 nt, Human
cugccagccuggc

SEQ ID NO: 3866916 - RNA, 19 nt, Human
cugccagccuggcuucugg

SEQ ID NO: 3866917 - RNA, 23 nt, Human
cugccagccuggcuucuggagcc

SEQ ID NO: 3866918 - RNA, 13 nt, Human
cugccagccuuga

SEQ ID NO: 3866919 - RNA, 13 nt, Human
cugccagcugcac

SEQ ID NO: 3866920 - RNA, 13 nt, Human
cugccaggaagcc

SEQ ID NO: 3866921 - RNA, 15 nt, Human
cugccaggaagccag

SEQ ID NO: 3866922 - RNA, 19 nt, Human
cugccaggaagccagcagg

SEQ ID NO: 3866923 - RNA, 21 nt, Human
cugccaggaagccagcaggcu

SEQ ID NO: 3866924 - RNA, 11 nt, Human
cugccaggaga

SEQ ID NO: 3866925 - RNA, 20 nt, Human
cugccaggagcacggcucug

SEQ ID NO: 3866926 - RNA, 15 nt, Human
cugccaggagcuuug

SEQ ID NO: 3866927 - RNA, 21 nt, Human
cugccaggaggacccagggcu

SEQ ID NO: 3866928 - RNA, 18 nt, Human
cugccaggagggacaaag

SEQ ID NO: 3866929 - RNA, 14 nt, Human
cugccaggcacagg

SEQ ID NO: 3866930 - RNA, 17 nt, Human
cugccaggcacaggcag

SEQ ID NO: 3866931 - RNA, 17 nt, Human
cugccaggcaggggugg

SEQ ID NO: 3866932 - RNA, 23 nt, Human
cugccaggccagccuccgagagg

SEQ ID NO: 3866933 - RNA, 22 nt, Human
cugccaggcccccaagccugca

SEQ ID NO: 3866934 - RNA, 20 nt, Human
cugccagggacagagggggu

SEQ ID NO: 3866935 - RNA, 16 nt, Human
cugccagggagacaga

SEQ ID NO: 3866936 - RNA, 13 nt, Human
cugccagggagcu

SEQ ID NO: 3866937 - RNA, 13 nt, Human
cugccagggcagg

SEQ ID NO: 3866938 - RNA, 19 nt, Human
cugccagggccccucuccc

SEQ ID NO: 3866939 - RNA, 20 nt, Human
cugccagggccccucucccc

SEQ ID NO: 3866940 - RNA, 16 nt, Human
cugccaguccuguccu

SEQ ID NO: 3866941 - RNA, 12 nt, Human
cugccagugaca

SEQ ID NO: 3866942 - RNA, 16 nt, Human
cugccagugacagaca

SEQ ID NO: 3866943 - RNA, 19 nt, Human
cugccagugacagacaggc

SEQ ID NO: 3866944 - RNA, 12 nt, Human
cugccagugccu

SEQ ID NO: 3866945 - RNA, 14 nt, Human
cugccagugccuua

SEQ ID NO: 3866946 - RNA, 21 nt, Human
cugccagugccuuaccuccug

SEQ ID NO: 3866947 - RNA, 20 nt, Human
cugccaguggggccugaggc

SEQ ID NO: 3866948 - RNA, 15 nt, Human
cugccaguguggaac

SEQ ID NO: 3866949 - RNA, 22 nt, Human
cugccauauucuguuggccagu

SEQ ID NO: 3866950 - RNA, 23 nt, Human
cugccauauucuguuggccagug

SEQ ID NO: 3866951 - RNA, 19 nt, Human
cugccauccagguucagcu

SEQ ID NO: 3866952 - RNA, 16 nt, Human
cugccauccuggccca

SEQ ID NO: 3866953 - RNA, 18 nt, Human
cugccauccuggcccagg

SEQ ID NO: 3866954 - RNA, 19 nt, Human
cugccauccuggcccaggg

SEQ ID NO: 3866955 - RNA, 23 nt, Human
cugccauccuggcccagggcauc

SEQ ID NO: 3866956 - RNA, 14 nt, Human
cugccaucuagcca

SEQ ID NO: 3866957 - RNA, 21 nt, Human
cugccaucucaccuccugcug

SEQ ID NO: 3866958 - RNA, 15 nt, Human
cugccaucuucccag

SEQ ID NO: 3866959 - RNA, 18 nt, Human
cugccaucuucccagcag

SEQ ID NO: 3866960 - RNA, 23 nt, Human
cugccaugaacuggaggccagga

SEQ ID NO: 3866961 - RNA, 21 nt, Human
cugccauggcgugucccucuc

SEQ ID NO: 3866962 - RNA, 22 nt, Human
cugccauggcgugucccucucg

SEQ ID NO: 3866963 - RNA, 16 nt, Human
cugccauguugccccu

SEQ ID NO: 3866964 - RNA, 23 nt, Human
cugccauuacagagguauuaaaa

SEQ ID NO: 3866965 - RNA, 15 nt, Human
cugccauuauuuucu

SEQ ID NO: 3866966 - RNA, 16 nt, Human
cugcccaauuggagga

SEQ ID NO: 3866967 - RNA, 19 nt, Human
cugcccacaccuccugggg

SEQ ID NO: 3866968 - RNA, 13 nt, Human
cugcccacccccu

SEQ ID NO: 3866969 - RNA, 15 nt, Human
cugcccacccccuca

SEQ ID NO: 3866970 - RNA, 15 nt, Human
cugcccaccugccug

SEQ ID NO: 3866971 - RNA, 18 nt, Human
cugcccaccugccuggcc

SEQ ID NO: 3866972 - RNA, 17 nt, Human
cugcccaccuggccucu

SEQ ID NO: 3866973 - RNA, 17 nt, Human
cugcccacucccaggac

SEQ ID NO: 3866974 - RNA, 14 nt, Human
cugcccacucccug

SEQ ID NO: 3866975 - RNA, 15 nt, Human
cugcccacucccugc

SEQ ID NO: 3866976 - RNA, 23 nt, Human
cugcccacuguuucucuugagcu

SEQ ID NO: 3866977 - RNA, 20 nt, Human
cugcccagaauucccagcug

SEQ ID NO: 3866978 - RNA, 22 nt, Human
cugcccagaauucccagcuguc

SEQ ID NO: 3866979 - RNA, 17 nt, Human
cugcccagacaagauuu

SEQ ID NO: 3866980 - RNA, 22 nt, Human
cugcccagaccccucuggccag

SEQ ID NO: 3866981 - RNA, 23 nt, Human
cugcccagaccccucuggccagg

SEQ ID NO: 3866982 - RNA, 20 nt, Human
cugcccagaucagccagaag

SEQ ID NO: 3866983 - RNA, 17 nt, Human
cugcccagccuccaagc

SEQ ID NO: 3866984 - RNA, 22 nt, Human
cugcccagcggacaguggcagg

SEQ ID NO: 3866985 - RNA, 14 nt, Human
cugcccagcuuggg

SEQ ID NO: 3866986 - RNA, 17 nt, Human
cugcccagcuugggccc

SEQ ID NO: 3866987 - RNA, 19 nt, Human
cugcccagcuugggcccag

SEQ ID NO: 3866988 - RNA, 22 nt, Human
cugcccagcuugggcccagcug

SEQ ID NO: 3866989 - RNA, 12 nt, Human
cugcccaggaga

SEQ ID NO: 3866990 - RNA, 18 nt, Human
cugcccaggagagccagc

SEQ ID NO: 3866991 - RNA, 19 nt, Human
cugcccaggagagccagcc

SEQ ID NO: 3866992 - RNA, 14 nt, Human
cugcccaggcacug

SEQ ID NO: 3866993 - RNA, 16 nt, Human
cugcccaggccccugc

SEQ ID NO: 3866994 - RNA, 22 nt, Human
cugcccaggccggccagccuca

SEQ ID NO: 3866995 - RNA, 18 nt, Human
cugcccaggccugccugu

SEQ ID NO: 3866996 - RNA, 19 nt, Human
cugcccaggccugccuguu

SEQ ID NO: 3866997 - RNA, 18 nt, Human
cugcccaggggugccccc

SEQ ID NO: 3866998 - RNA, 19 nt, Human
cugcccaggggugcccccu

SEQ ID NO: 3866999 - RNA, 13 nt, Human
cuggcuucucuga

SEQ ID NO: 3867000 - RNA, 16 nt, Human
cuggcuucuguggggc

SEQ ID NO: 3867001 - RNA, 19 nt, Human
cuggcuucuguggggcccc

SEQ ID NO: 3867002 - RNA, 18 nt, Human
cuggcuuggccacagcca

SEQ ID NO: 3867003 - RNA, 23 nt, Human
cuggcuugggacuaaaugcccug

SEQ ID NO: 3867004 - RNA, 17 nt, Human
cuggcuuguuguaaagc

SEQ ID NO: 3867005 - RNA, 20 nt, Human
cuggcuuguuguaaagcaau

SEQ ID NO: 3867006 - RNA, 13 nt, Human
cuggcuuguuuau

SEQ ID NO: 3867007 - RNA, 22 nt, Human
cuggcuuucaacuguuucuaga

SEQ ID NO: 3867008 - RNA, 14 nt, Human
cuggcuuuguccca

SEQ ID NO: 3867009 - RNA, 20 nt, Human
cuggcuuuucacugcuggcu

SEQ ID NO: 3867010 - RNA, 23 nt, Human
cuggcuuuucacugcuggcugcc

SEQ ID NO: 3867011 - RNA, 23 nt, Human
cugggaaaaacuuuggaaccaga

SEQ ID NO: 3867012 - RNA, 12 nt, Human
cugggaaacacu

SEQ ID NO: 3867013 - RNA, 18 nt, Human
cugggaaacacuccuugc

SEQ ID NO: 3867014 - RNA, 16 nt, Human
cugggaaacagaggcu

SEQ ID NO: 3867015 - RNA, 18 nt, Human
cugggaaagccccugccc

SEQ ID NO: 3867016 - RNA, 20 nt, Human
cugggaaagggauuuucagc

SEQ ID NO: 3867017 - RNA, 19 nt, Human
cugggaaaugagaaggcag

SEQ ID NO: 3867018 - RNA, 21 nt, Human
cugggaaaugagaaggcagcc

SEQ ID NO: 3867019 - RNA, 23 nt, Human
cugggaaaugagaaggcagccac

SEQ ID NO: 3867020 - RNA, 14 nt, Human
cugggaaaugagau

SEQ ID NO: 3867021 - RNA, 19 nt, Human
cugggaacaccauagguca

SEQ ID NO: 3867022 - RNA, 22 nt, Human
cugggaacccaaguccaagcau

SEQ ID NO: 3867023 - RNA, 13 nt, Human
cugggaaccuccc

SEQ ID NO: 3867024 - RNA, 16 nt, Human
cugggaaccucccaga

SEQ ID NO: 3867025 - RNA, 21 nt, Human
cugggaaccucccagaggucc

SEQ ID NO: 3867026 - RNA, 23 nt, Human
cugggaacucccaagaacagcag

SEQ ID NO: 3867027 - RNA, 15 nt, Human
cugggaacugcagac

SEQ ID NO: 3867028 - RNA, 18 nt, Human
cugggaacugcagaccug

SEQ ID NO: 3867029 - RNA, 20 nt, Human
cugggaacugcagaccuguc

SEQ ID NO: 3867030 - RNA, 21 nt, Human
cugggaacugcagaccugucc

SEQ ID NO: 3867031 - RNA, 23 nt, Human
cugggaacugcagaccuguccuc

SEQ ID NO: 3867032 - RNA, 18 nt, Human
cugggaagauaggcucug

SEQ ID NO: 3867033 - RNA, 21 nt, Human
cugggaagauaggcucugcac

SEQ ID NO: 3867034 - RNA, 22 nt, Human
cugggaagauaggcucugcaca

SEQ ID NO: 3867035 - RNA, 19 nt, Human
cugggaagcugagggcaaa

SEQ ID NO: 3867036 - RNA, 20 nt, Human
cugggaaggcuacucaccuu

SEQ ID NO: 3867037 - RNA, 12 nt, Human
cugggaaggggu

SEQ ID NO: 3867038 - RNA, 20 nt, Human
cugggaauggaggggcagag

SEQ ID NO: 3867039 - RNA, 19 nt, Human
cugggaauguauuauucug

SEQ ID NO: 3867040 - RNA, 21 nt, Human
cugggaccacaggugcccgcc

SEQ ID NO: 3867041 - RNA, 16 nt, Human
cugggaccacgugaga

SEQ ID NO: 3867042 - RNA, 18 nt, Human
cugggaccaggcaccagg

SEQ ID NO: 3867043 - RNA, 15 nt, Human
cugggacccuuuccu

SEQ ID NO: 3867044 - RNA, 23 nt, Human
cugggacccuuuccuuccuuccc

SEQ ID NO: 3867045 - RNA, 17 nt, Human
cugggaccgcuacacca

SEQ ID NO: 3867046 - RNA, 22 nt, Human
cugggaccgcuacaccacucug

SEQ ID NO: 3867047 - RNA, 24 nt, Human
cugggaccgcuacaccacucuggc

SEQ ID NO: 3867048 - RNA, 16 nt, Human
cugggaccuccccuga

SEQ ID NO: 3867049 - RNA, 18 nt, Human
cugggaccugccaggcag

SEQ ID NO: 3867050 - RNA, 19 nt, Human
cugggaccugccaggcagg

SEQ ID NO: 3867051 - RNA, 20 nt, Human
cugggaccugccaggcaggg

SEQ ID NO: 3867052 - RNA, 20 nt, Human
cugggaccuuuagugguggc

SEQ ID NO: 3867053 - RNA, 17 nt, Human
cugggacgcucugcugu

SEQ ID NO: 3867054 - RNA, 23 nt, Human
cugggacguggcucagccagcac

SEQ ID NO: 3867055 - RNA, 13 nt, Human
cugggacuacagg

SEQ ID NO: 3867056 - RNA, 17 nt, Human
cugggacuacaggcacc

SEQ ID NO: 3867057 - RNA, 16 nt, Human
cugggacucagccuuc

SEQ ID NO: 3867058 - RNA, 18 nt, Human
cugggacucagccuucag

SEQ ID NO: 3867059 - RNA, 14 nt, Human
cugggacuggccag

SEQ ID NO: 3867060 - RNA, 14 nt, Human
cugggacuuccaug

SEQ ID NO: 3867061 - RNA, 19 nt, Human
cugggacuuccaugccuua

SEQ ID NO: 3867062 - RNA, 18 nt, Human
cugggagaaaaucaucaa

SEQ ID NO: 3867063 - RNA, 18 nt, Human
cugggagaaauugacaga

SEQ ID NO: 3867064 - RNA, 15 nt, Human
cugggagaaccucag

SEQ ID NO: 3867065 - RNA, 18 nt, Human
cugggagaaccucaggcu

SEQ ID NO: 3867066 - RNA, 18 nt, Human
cugggagagccuuccagg

SEQ ID NO: 3867067 - RNA, 20 nt, Human
cugggagagccuuccagggg

SEQ ID NO: 3867068 - RNA, 21 nt, Human
cugggagagccuuccaggggu

SEQ ID NO: 3867069 - RNA, 23 nt, Human
cugggagaggcagagugccccac

SEQ ID NO: 3867070 - RNA, 24 nt, Human
cugggagaggcagagugccccacc

SEQ ID NO: 3867071 - RNA, 23 nt, Human
cugggagaggugccagcaacuga

SEQ ID NO: 3867072 - RNA, 17 nt, Human
cugggagcccccagccu

SEQ ID NO: 3867073 - RNA, 19 nt, Human
cugggagccgggccgcaga

SEQ ID NO: 3867074 - RNA, 20 nt, Human
cugggagcuccacucugcuu

SEQ ID NO: 3867075 - RNA, 13 nt, Human
cugggagcucugc

SEQ ID NO: 3867076 - RNA, 14 nt, Human
cugggagcucugca

SEQ ID NO: 3867077 - RNA, 22 nt, Human
cugggaggaaaagaaaagaggg

SEQ ID NO: 3867078 - RNA, 14 nt, Human
cugggaggaagcag

SEQ ID NO: 3867079 - RNA, 14 nt, Human
cugggaggaaggac

SEQ ID NO: 3867080 - RNA, 17 nt, Human
cugggaggagggagagg

SEQ ID NO: 3867081 - RNA, 23 nt, Human
cugggaggagggagagggagguc

SEQ ID NO: 3867082 - RNA, 18 nt, Human
cugggaggcaagaggggu

SEQ ID NO: 3867083 - RNA, 23 nt, Human
cugggaggcaagagggguggaga

SEQ ID NO: 3867084 - RNA, 16 nt, Human
cugggaggcagugaug

SEQ ID NO: 3867085 - RNA, 13 nt, Human
cugggaggcaugg

SEQ ID NO: 3867086 - RNA, 14 nt, Human
cugggaggccagug

SEQ ID NO: 3867087 - RNA, 22 nt, Human
cugggaggcggagaguacagug

SEQ ID NO: 3867088 - RNA, 17 nt, Human
cugggaggcgggcgcac

SEQ ID NO: 3867089 - RNA, 15 nt, Human
cugggaggcucugga

SEQ ID NO: 3867090 - RNA, 13 nt, Human
cugggagggcagc

SEQ ID NO: 3867091 - RNA, 20 nt, Human
cugggagggcccacuucagg

SEQ ID NO: 3867092 - RNA, 20 nt, Human
cugggaggucaaggcugcag

SEQ ID NO: 3867093 - RNA, 21 nt, Human
cugggaggucaaggcugcagu

SEQ ID NO: 3867094 - RNA, 21 nt, Human
cugggaguaguugucuuuccu

SEQ ID NO: 3867095 - RNA, 16 nt, Human
cugggagucacacagu

SEQ ID NO: 3867096 - RNA, 13 nt, Human
cugggaguccccu

SEQ ID NO: 3867097 - RNA, 13 nt, Human
cugggagugagcu

SEQ ID NO: 3867098 - RNA, 16 nt, Human
cugggaguguguggug

SEQ ID NO: 3867099 - RNA, 15 nt, Human
cugggauagaggggu

SEQ ID NO: 3867100 - RNA, 20 nt, Human
cugggaucccucauccucau

SEQ ID NO: 3867101 - RNA, 21 nt, Human
cugggaugaaacuaaagcaau

SEQ ID NO: 3867102 - RNA, 22 nt, Human
cugggaugagccgcugugagcc

SEQ ID NO: 3867103 - RNA, 16 nt, Human
cugggauggugggcuu

SEQ ID NO: 3867104 - RNA, 20 nt, Human
cugggauggugggcuucagg

SEQ ID NO: 3867105 - RNA, 14 nt, Human
cugggauguccaca

SEQ ID NO: 3867106 - RNA, 21 nt, Human
cugggauguccacagaugccu

SEQ ID NO: 3867107 - RNA, 15 nt, Human
cugggauguggcugc

SEQ ID NO: 3867108 - RNA, 20 nt, Human
cugggauguggcugcagcag

SEQ ID NO: 3867109 - RNA, 20 nt, Human
cugggauuacaggcaugagc

SEQ ID NO: 3867110 - RNA, 17 nt, Human
cugggauuacaggugug

SEQ ID NO: 3867111 - RNA, 18 nt, Human
cugggauuacagguguga

SEQ ID NO: 3867112 - RNA, 17 nt, Human
cugggauucccaccaag

SEQ ID NO: 3867113 - RNA, 23 nt, Human
cugggauuccuuagacucuuuuc

SEQ ID NO: 3867114 - RNA, 21 nt, Human
cugggauucuacuuuaagcac

SEQ ID NO: 3867115 - RNA, 22 nt, Human
cugggauucuacuuuaagcacu

SEQ ID NO: 3867116 - RNA, 21 nt, Human
cugggauuuaugcucaugaac

SEQ ID NO: 3867117 - RNA, 21 nt, Human
cugggauuuuaaacuagauga

SEQ ID NO: 3867118 - RNA, 23 nt, Human
cugggauuuuaaacuagaugacc

SEQ ID NO: 3867119 - RNA, 18 nt, Human
cugggcaacagagcaaga

SEQ ID NO: 3867120 - RNA, 17 nt, Human
cugggcaaggaaaaaga

SEQ ID NO: 3867121 - RNA, 15 nt, Human
cugggcaaggaggcc

SEQ ID NO: 3867122 - RNA, 19 nt, Human
cugggcaaugauggcaauu

SEQ ID NO: 3867123 - RNA, 20 nt, Human
cugggcaaugugauaaaacc

SEQ ID NO: 3867124 - RNA, 15 nt, Human
cugggcacacgcugc

SEQ ID NO: 3867125 - RNA, 22 nt, Human
cugggcacacucugccagcaaa

SEQ ID NO: 3867126 - RNA, 16 nt, Human
cugggcacccucccac

SEQ ID NO: 3867127 - RNA, 17 nt, Human
cugggcacccucccacc

SEQ ID NO: 3867128 - RNA, 18 nt, Human
cugggcacuucccugcug

SEQ ID NO: 3867129 - RNA, 17 nt, Human
cugggcagaaggaagac

SEQ ID NO: 3867130 - RNA, 12 nt, Human
cugggcagagga

SEQ ID NO: 3867131 - RNA, 18 nt, Human
cugggcagccaggcugcc

SEQ ID NO: 3867132 - RNA, 12 nt, Human
cugggcagcccg

SEQ ID NO: 3867133 - RNA, 11 nt, Human
cugggcagcua

SEQ ID NO: 3867134 - RNA, 15 nt, Human
cugggcagcugccuc

SEQ ID NO: 3867135 - RNA, 21 nt, Human
cugggcagcugccuccccucc

SEQ ID NO: 3867136 - RNA, 17 nt, Human
cugggcagcugucccuu

SEQ ID NO: 3867137 - RNA, 19 nt, Human
cugggcagcugucccuugc

SEQ ID NO: 3867138 - RNA, 13 nt, Human
cugggcaggaggg

SEQ ID NO: 3867139 - RNA, 20 nt, Human
cugggcagguuggugggggc

SEQ ID NO: 3867140 - RNA, 15 nt, Human
cugggcaucuguucu

SEQ ID NO: 3867141 - RNA, 23 nt, Human
cugggcaugagggguuccucccc

SEQ ID NO: 3867142 - RNA, 22 nt, Human
cugguuugacuccgcuggaggu

SEQ ID NO: 3867143 - RNA, 15 nt, Human
cugguuuggaaugcu

SEQ ID NO: 3867144 - RNA, 18 nt, Human
cugguuuuccuaaaugca

SEQ ID NO: 3867145 - RNA, 20 nt, Human
cugguuuucuggaugguucc

SEQ ID NO: 3867146 - RNA, 14 nt, Human
cugguuuuggcauc

SEQ ID NO: 3867147 - RNA, 15 nt, Human
cugguuuuguaagau

SEQ ID NO: 3867148 - RNA, 22 nt, Human
cugguuuuguaagaugcugggu

SEQ ID NO: 3867149 - RNA, 14 nt, Human
cugguuuuucaguu

SEQ ID NO: 3867150 - RNA, 16 nt, Human
cugguuuuucaguuuu

SEQ ID NO: 3867151 - RNA, 20 nt, Human
cuguaaaaacacugaaaaau

SEQ ID NO: 3867152 - RNA, 22 nt, Human
cuguaaaaacacugaaaaauua

SEQ ID NO: 3867153 - RNA, 12 nt, Human
cuguaaaacgcu

SEQ ID NO: 3867154 - RNA, 13 nt, Human
cuguaaaacuuua

SEQ ID NO: 3867155 - RNA, 20 nt, Human
cuguaaaagcaaguccugca

SEQ ID NO: 3867156 - RNA, 22 nt, Human
cuguaaaaucuuucuuucuuag

SEQ ID NO: 3867157 - RNA, 16 nt, Human
cuguaaaaugaaauua

SEQ ID NO: 3867158 - RNA, 14 nt, Human
cuguaaaaugcaaa

SEQ ID NO: 3867159 - RNA, 22 nt, Human
cuguaaaccccuuuaguggcuu

SEQ ID NO: 3867160 - RNA, 12 nt, Human
cuguaaacugug

SEQ ID NO: 3867161 - RNA, 14 nt, Human
cuguaaacugugua

SEQ ID NO: 3867162 - RNA, 19 nt, Human
cuguaaacuuuaucacuua

SEQ ID NO: 3867163 - RNA, 15 nt, Human
cuguaaagaaagaga

SEQ ID NO: 3867164 - RNA, 23 nt, Human
cuguaaagaaagagagaaaauaa

SEQ ID NO: 3867165 - RNA, 20 nt, Human
cuguaaagagaccuaccuca

SEQ ID NO: 3867166 - RNA, 13 nt, Human
cuguaaagcaaaa

SEQ ID NO: 3867167 - RNA, 16 nt, Human
cuguaaagcgcagaua

SEQ ID NO: 3867168 - RNA, 21 nt, Human
cuguaaauaaugugcacugaa

SEQ ID NO: 3867169 - RNA, 15 nt, Human
cuguaaauaccauug

SEQ ID NO: 3867170 - RNA, 17 nt, Human
cuguaaaucuaacauua

SEQ ID NO: 3867171 - RNA, 20 nt, Human
cuguaaauuauuuuaaauua

SEQ ID NO: 3867172 - RNA, 18 nt, Human
cuguaaauuuggcuucug

SEQ ID NO: 3867173 - RNA, 17 nt, Human
cuguaacagguauuuug

SEQ ID NO: 3867174 - RNA, 18 nt, Human
cuguaacaguucuuuuug

SEQ ID NO: 3867175 - RNA, 19 nt, Human
cuguaacauacuggccugg

SEQ ID NO: 3867176 - RNA, 20 nt, Human
cuguaaccucuucagaggcc

SEQ ID NO: 3867177 - RNA, 15 nt, Human
cuguaacgugugcug

SEQ ID NO: 3867178 - RNA, 19 nt, Human
cuguaacuacuuuauaacu

SEQ ID NO: 3867179 - RNA, 14 nt, Human
cuguaacugccagg

SEQ ID NO: 3867180 - RNA, 12 nt, Human
cuguaacugucc

SEQ ID NO: 3867181 - RNA, 17 nt, Human
cuguaacuguuacagua

SEQ ID NO: 3867182 - RNA, 15 nt, Human
cuguaacuuaaaaua

SEQ ID NO: 3867183 - RNA, 13 nt, Human
cuguaagaaaccu

SEQ ID NO: 3867184 - RNA, 22 nt, Human
cuguaagaaaccuacugcccag

SEQ ID NO: 3867185 - RNA, 23 nt, Human
cuguaagaagagacugggaagau

SEQ ID NO: 3867186 - RNA, 21 nt, Human
cuguaagacucauucccuaga

SEQ ID NO: 3867187 - RNA, 19 nt, Human
cuguaagccaaagaaauga

SEQ ID NO: 3867188 - RNA, 21 nt, Human
cuguaaggauccggaaagaag

SEQ ID NO: 3867189 - RNA, 16 nt, Human
cuguaaggcaugaagg

SEQ ID NO: 3867190 - RNA, 17 nt, Human
cuguaaggcaugaagga

SEQ ID NO: 3867191 - RNA, 15 nt, Human
cuguaaggcucuaga

SEQ ID NO: 3867192 - RNA, 16 nt, Human
cuguaaggcucuagau

SEQ ID NO: 3867193 - RNA, 18 nt, Human
cuguaaggcucuagauca

SEQ ID NO: 3867194 - RNA, 20 nt, Human
cuguaaguagaugcauuugg

SEQ ID NO: 3867195 - RNA, 22 nt, Human
cuguaaguugggcuugcuauuc

SEQ ID NO: 3867196 - RNA, 15 nt, Human
cuguaauaauaccuc

SEQ ID NO: 3867197 - RNA, 16 nt, Human
cuguaauaauaccuca

SEQ ID NO: 3867198 - RNA, 23 nt, Human
cuguaauaauaccucaauguuug

SEQ ID NO: 3867199 - RNA, 18 nt, Human
cuguaaucccagcacacu

SEQ ID NO: 3867200 - RNA, 19 nt, Human
cuguaaucccagcacuugg

SEQ ID NO: 3867201 - RNA, 20 nt, Human
cuguaaucccagcacuuugg

SEQ ID NO: 3867202 - RNA, 22 nt, Human
cuguaaucccagcuacucggga

SEQ ID NO: 3867203 - RNA, 18 nt, Human
cuguaaucccagcuacuu

SEQ ID NO: 3867204 - RNA, 20 nt, Human
cuguaauccuagcacuuugg

SEQ ID NO: 3867205 - RNA, 22 nt, Human
cuguaaucucguuucaaaaaca

SEQ ID NO: 3867206 - RNA, 15 nt, Human
cuguaaugaaucuaa

SEQ ID NO: 3867207 - RNA, 18 nt, Human
cuguaaugguacugacuu

SEQ ID NO: 3867208 - RNA, 22 nt, Human
cuguaaugugcgagggacccag

SEQ ID NO: 3867209 - RNA, 17 nt, Human
cuguaauguuaauauug

SEQ ID NO: 3867210 - RNA, 18 nt, Human
cuguaauguuaauauuga

SEQ ID NO: 3867211 - RNA, 14 nt, Human
cuguaauuauuuga

SEQ ID NO: 3867212 - RNA, 15 nt, Human
cuguaauuauuugaa

SEQ ID NO: 3867213 - RNA, 16 nt, Human
cuguaauuauuugaau

SEQ ID NO: 3867214 - RNA, 14 nt, Human
cuguaauucagugu

SEQ ID NO: 3867215 - RNA, 23 nt, Human
cuguaauucaguguauuucaguu

SEQ ID NO: 3867216 - RNA, 23 nt, Human
cuguaauuccagcacuuugggag

SEQ ID NO: 3867217 - RNA, 22 nt, Human
cuguaauuccuaccucccugca

SEQ ID NO: 3867218 - RNA, 17 nt, Human
cuguaauuugugauaca

SEQ ID NO: 3867219 - RNA, 21 nt, Human
cuguaauuugugauacaaugc

SEQ ID NO: 3867220 - RNA, 22 nt, Human
cuguacaaaagggacaugaaau

SEQ ID NO: 3867221 - RNA, 13 nt, Human
cuguacaaaguag

SEQ ID NO: 3867222 - RNA, 15 nt, Human
cuguacaaaguagaa

SEQ ID NO: 3867223 - RNA, 16 nt, Human
cuguacaaauauaaga

SEQ ID NO: 3867224 - RNA, 19 nt, Human
cuguacaaauauaagaaua

SEQ ID NO: 3867225 - RNA, 20 nt, Human
cuguacaaauauaagaauaa

SEQ ID NO: 3867226 - RNA, 15 nt, Human
cuguacaauauuuaa

SEQ ID NO: 3867227 - RNA, 16 nt, Human
cuguacacaacucacu

SEQ ID NO: 3867228 - RNA, 17 nt, Human
cuguacacaacucacuc

SEQ ID NO: 3867229 - RNA, 20 nt, Human
cuguacacaacucacuccuu

SEQ ID NO: 3867230 - RNA, 15 nt, Human
cuguacacacuuuau

SEQ ID NO: 3867231 - RNA, 13 nt, Human
cuguacacugcac

SEQ ID NO: 3867232 - RNA, 23 nt, Human
cuguacagagcccacgcccccac

SEQ ID NO: 3867233 - RNA, 21 nt, Human
cuguacagagccguaaaaacu

SEQ ID NO: 3867234 - RNA, 22 nt, Human
cuguacagagccguaaaaacug

SEQ ID NO: 3867235 - RNA, 22 nt, Human
cuguacagauugcugcuucugc

SEQ ID NO: 3867236 - RNA, 15 nt, Human
cuguacagcuggcuc

SEQ ID NO: 3867237 - RNA, 17 nt, Human
cuguacagcuggcucua

SEQ ID NO: 3867238 - RNA, 11 nt, Human
cuguacagucu

SEQ ID NO: 3867239 - RNA, 16 nt, Human
cuguacagucugucuu

SEQ ID NO: 3867240 - RNA, 20 nt, Human
cuguacagucugucuucugu

SEQ ID NO: 3867241 - RNA, 11 nt, Human
cuguacagugu

SEQ ID NO: 3867242 - RNA, 13 nt, Human
cuguacaguguua

SEQ ID NO: 3867243 - RNA, 16 nt, Human
cuguacauacuuuuug

SEQ ID NO: 3867244 - RNA, 15 nt, Human
cuguacauagccuau

SEQ ID NO: 3867245 - RNA, 16 nt, Human
cuguacauagccuaua

SEQ ID NO: 3867246 - RNA, 19 nt, Human
cuguacauagccuauauuu

SEQ ID NO: 3867247 - RNA, 17 nt, Human
cuguacaugaaaacaca

SEQ ID NO: 3867248 - RNA, 14 nt, Human
cuguacauuuaaaa

SEQ ID NO: 3867249 - RNA, 16 nt, Human
cuguacauuuaaaauu

SEQ ID NO: 3867250 - RNA, 17 nt, Human
cuguacauuuuguugua

SEQ ID NO: 3867251 - RNA, 18 nt, Human
cuguacauuuuguuguaa

SEQ ID NO: 3867252 - RNA, 19 nt, Human
cuguacauuuuguuguaaa

SEQ ID NO: 3867253 - RNA, 20 nt, Human
cuguacauuuuguuguaaaa

SEQ ID NO: 3867254 - RNA, 13 nt, Human
cuguaccucaucc

SEQ ID NO: 3867255 - RNA, 18 nt, Human
cuguaccucaucccauga

SEQ ID NO: 3867256 - RNA, 22 nt, Human
cuguaccuuuugaggagcccca

SEQ ID NO: 3867257 - RNA, 23 nt, Human
cuguaccuuuugaggagccccag

SEQ ID NO: 3867258 - RNA, 13 nt, Human
cuguacucaggag

SEQ ID NO: 3867259 - RNA, 21 nt, Human
cuguacuccucccaggcgccc

SEQ ID NO: 3867260 - RNA, 18 nt, Human
cuguacucgcuugugcag

SEQ ID NO: 3867261 - RNA, 14 nt, Human
cuguacugauucaa

SEQ ID NO: 3867262 - RNA, 14 nt, Human
cuguacugccugcu

SEQ ID NO: 3867263 - RNA, 16 nt, Human
cuguacugccugcuug

SEQ ID NO: 3867264 - RNA, 17 nt, Human
cuguacugccugcuugg

SEQ ID NO: 3867265 - RNA, 19 nt, Human
cuguacugccugcuugggg

SEQ ID NO: 3867266 - RNA, 22 nt, Human
cuguacugcucaggcugcagcu

SEQ ID NO: 3867267 - RNA, 18 nt, Human
cuguacuguuacugggcc

SEQ ID NO: 3867268 - RNA, 20 nt, Human
cuguacuguucugugucuuu

SEQ ID NO: 3867269 - RNA, 13 nt, Human
cuguacuuaauaa

SEQ ID NO: 3867270 - RNA, 18 nt, Human
cuguacuuaauaaauuca

SEQ ID NO: 3867271 - RNA, 22 nt, Human
cuguacuucacugucaggaaga

SEQ ID NO: 3867272 - RNA, 16 nt, Human
cuguacuucuugaaua

SEQ ID NO: 3867273 - RNA, 20 nt, Human
cuguacuugcucuugaugcc

SEQ ID NO: 3867274 - RNA, 21 nt, Human
cuguacuugcucuugaugccu

SEQ ID NO: 3867275 - RNA, 23 nt, Human
cuguacuugcucuugaugccugg

SEQ ID NO: 3867276 - RNA, 17 nt, Human
cuguacuugguccaacu

SEQ ID NO: 3867277 - RNA, 23 nt, Human
cuguacuugguccaacugcaacu

SEQ ID NO: 3867278 - RNA, 12 nt, Human
cuguacuuugau

SEQ ID NO: 3867279 - RNA, 15 nt, Human
cuguacuuugauuca

SEQ ID NO: 3867280 - RNA, 19 nt, Human
cuguacuuugauucacaug

SEQ ID NO: 3867281 - RNA, 19 nt, Human
cuguagaaaagggaacuga

SEQ ID NO: 3867282 - RNA, 17 nt, Human
cuguagaaaugguugua

SEQ ID NO: 3867283 - RNA, 15 nt, Human
cuguagaagagggau

SEQ ID NO: 3867284 - RNA, 19 nt, Human
cuguagaauagccuguggc

SEQ ID NO: 3867285 - RNA, 20 nt, Human
cuguagaauagccuguggcc

SEQ ID NO: 3867286 - RNA, 21 nt, Human
cugucuagcacuuccuugcca

SEQ ID NO: 3867287 - RNA, 22 nt, Human
cugucuaggucaguacccaccu

SEQ ID NO: 3867288 - RNA, 16 nt, Human
cugucuagucucuccu

SEQ ID NO: 3867289 - RNA, 14 nt, Human
cugucuauuucugc

SEQ ID NO: 3867290 - RNA, 15 nt, Human
cugucuauuucugcu

SEQ ID NO: 3867291 - RNA, 16 nt, Human
cugucuauuucugcug

SEQ ID NO: 3867292 - RNA, 17 nt, Human
cugucuauuucugcuga

SEQ ID NO: 3867293 - RNA, 23 nt, Human
cugucucaaaaaaacacaaaagu

SEQ ID NO: 3867294 - RNA, 18 nt, Human
cugucucaaaaaaagaaa

SEQ ID NO: 3867295 - RNA, 18 nt, Human
cugucucaagcucuuccu

SEQ ID NO: 3867296 - RNA, 14 nt, Human
cugucucaccugga

SEQ ID NO: 3867297 - RNA, 21 nt, Human
cugucucagacuuuuguacau

SEQ ID NO: 3867298 - RNA, 22 nt, Human
cugucucagacuuuuguacauc

SEQ ID NO: 3867299 - RNA, 16 nt, Human
cugucucaguuucacu

SEQ ID NO: 3867300 - RNA, 17 nt, Human
cugucucauccaucauc

SEQ ID NO: 3867301 - RNA, 21 nt, Human
cugucucauccaucaucaugu

SEQ ID NO: 3867302 - RNA, 15 nt, Human
cugucucauccccag

SEQ ID NO: 3867303 - RNA, 17 nt, Human
cugucucauccccaggg

SEQ ID NO: 3867304 - RNA, 21 nt, Human
cugucucauccccaggggucc

SEQ ID NO: 3867305 - RNA, 14 nt, Human
cugucucauccucc

SEQ ID NO: 3867306 - RNA, 15 nt, Human
cugucucauccuccu

SEQ ID NO: 3867307 - RNA, 18 nt, Human
cugucuccagacccccac

SEQ ID NO: 3867308 - RNA, 22 nt, Human
cugucuccagacccccaccccu

SEQ ID NO: 3867309 - RNA, 18 nt, Human
cugucuccauguuugaug

SEQ ID NO: 3867310 - RNA, 15 nt, Human
cugucuccccucugc

SEQ ID NO: 3867311 - RNA, 16 nt, Human
cugucuccccucugcu

SEQ ID NO: 3867312 - RNA, 18 nt, Human
cugucuccccucugcugg

SEQ ID NO: 3867313 - RNA, 21 nt, Human
cugucucccuccucugcccgg

SEQ ID NO: 3867314 - RNA, 22 nt, Human
cugucuccuaagcuggagugca

SEQ ID NO: 3867315 - RNA, 23 nt, Human
cugucuccuuucaccccagggcc

SEQ ID NO: 3867316 - RNA, 16 nt, Human
cugucucgagcgcccu

SEQ ID NO: 3867317 - RNA, 23 nt, Human
cugucucgagcgcccugcagacc

SEQ ID NO: 3867318 - RNA, 20 nt, Human
cugucucuaacuuauuuuau

SEQ ID NO: 3867319 - RNA, 19 nt, Human
cugucucucagggccaggc

SEQ ID NO: 3867320 - RNA, 20 nt, Human
cugucucucagggccaggcc

SEQ ID NO: 3867321 - RNA, 13 nt, Human
cugucucucauga

SEQ ID NO: 3867322 - RNA, 19 nt, Human
cugucucugaaguacuaac

SEQ ID NO: 3867323 - RNA, 13 nt, Human
cugucucugccuc

SEQ ID NO: 3867324 - RNA, 17 nt, Human
cugucucugcucgcccu

SEQ ID NO: 3867325 - RNA, 15 nt, Human
cugucucuugaaaaa

SEQ ID NO: 3867326 - RNA, 18 nt, Human
cugucucuugaaaaaugc

SEQ ID NO: 3867327 - RNA, 21 nt, Human
cugucugaaccacgcgggggc

SEQ ID NO: 3867328 - RNA, 16 nt, Human
cugucugaagccaaug

SEQ ID NO: 3867329 - RNA, 22 nt, Human
cugucugaaggacacuuccugc

SEQ ID NO: 3867330 - RNA, 20 nt, Human
cugucugacaaccucuuggu

SEQ ID NO: 3867331 - RNA, 15 nt, Human
cugucugagacucac

SEQ ID NO: 3867332 - RNA, 16 nt, Human
cugucugaucugugcu

SEQ ID NO: 3867333 - RNA, 12 nt, Human
cugucugcagcc

SEQ ID NO: 3867334 - RNA, 14 nt, Human
cugucugccagcca

SEQ ID NO: 3867335 - RNA, 15 nt, Human
cugucugccagccag

SEQ ID NO: 3867336 - RNA, 16 nt, Human
cugucugccagccagc

SEQ ID NO: 3867337 - RNA, 21 nt, Human
cugucugccagccagcagcca

SEQ ID NO: 3867338 - RNA, 14 nt, Human
cugucugccagggc

SEQ ID NO: 3867339 - RNA, 15 nt, Human
cugucugccccagcc

SEQ ID NO: 3867340 - RNA, 12 nt, Human
cugucugcucca

SEQ ID NO: 3867341 - RNA, 19 nt, Human
cugucugcuggucacuucu

SEQ ID NO: 3867342 - RNA, 19 nt, Human
cugucuggaggggagcucu

SEQ ID NO: 3867343 - RNA, 19 nt, Human
cugucuggcaaugccacag

SEQ ID NO: 3867344 - RNA, 15 nt, Human
cugucuggccaggcc

SEQ ID NO: 3867345 - RNA, 17 nt, Human
cugucugggugcuacug

SEQ ID NO: 3867346 - RNA, 22 nt, Human
cugucugggugcuacuggggaa

SEQ ID NO: 3867347 - RNA, 16 nt, Human
cugucuggguggcuca

SEQ ID NO: 3867348 - RNA, 23 nt, Human
cugucugguuucaccgaggacau

SEQ ID NO: 3867349 - RNA, 16 nt, Human
cugucugguuuuaaca

SEQ ID NO: 3867350 - RNA, 17 nt, Human
cugucugguuuuaacaa

SEQ ID NO: 3867351 - RNA, 19 nt, Human
cugucuguagagggcccug

SEQ ID NO: 3867352 - RNA, 16 nt, Human
cugucugucucuccau

SEQ ID NO: 3867353 - RNA, 14 nt, Human
cugucugucugucc

SEQ ID NO: 3867354 - RNA, 15 nt, Human
cugucugucuguccc

SEQ ID NO: 3867355 - RNA, 15 nt, Human
cugucugucugucug

SEQ ID NO: 3867356 - RNA, 17 nt, Human
cugucugugaagagcaa

SEQ ID NO: 3867357 - RNA, 16 nt, Human
cugucuguuacacugg

SEQ ID NO: 3867358 - RNA, 18 nt, Human
cugucuguuacacuggag

SEQ ID NO: 3867359 - RNA, 18 nt, Human
cugucuguuguauucauu

SEQ ID NO: 3867360 - RNA, 14 nt, Human
cugucuuaauuuuc

SEQ ID NO: 3867361 - RNA, 16 nt, Human
cugucuuauccuccac

SEQ ID NO: 3867362 - RNA, 15 nt, Human
cugucuucaagggcu

SEQ ID NO: 3867363 - RNA, 18 nt, Human
cugucuucacaacagauu

SEQ ID NO: 3867364 - RNA, 19 nt, Human
cugucuucacagcucugug

SEQ ID NO: 3867365 - RNA, 23 nt, Human
cugucuucacagcucuguguugc

SEQ ID NO: 3867366 - RNA, 18 nt, Human
cugucuucaccugauuca

SEQ ID NO: 3867367 - RNA, 14 nt, Human
cugucuuccucaaa

SEQ ID NO: 3867368 - RNA, 13 nt, Human
cugucuuccuuug

SEQ ID NO: 3867369 - RNA, 23 nt, Human
cugucuucucccugcacaagcca

SEQ ID NO: 3867370 - RNA, 13 nt, Human
cugucuucugcuu

SEQ ID NO: 3867371 - RNA, 14 nt, Human
cugucuucugcuuu

SEQ ID NO: 3867372 - RNA, 16 nt, Human
cugucuucugcuuugu

SEQ ID NO: 3867373 - RNA, 23 nt, Human
cugucuucugcuuuguugugugc

SEQ ID NO: 3867374 - RNA, 21 nt, Human
cugucuucuguauauaaaugg

SEQ ID NO: 3867375 - RNA, 21 nt, Human
cugucuugccuuuuucauuau

SEQ ID NO: 3867376 - RNA, 12 nt, Human
cugucuuguaau

SEQ ID NO: 3867377 - RNA, 14 nt, Human
cugucuuguaauau

SEQ ID NO: 3867378 - RNA, 17 nt, Human
cugucuuuaaaagagag

SEQ ID NO: 3867379 - RNA, 18 nt, Human
cugucuuuaaaagagaga

SEQ ID NO: 3867380 - RNA, 20 nt, Human
cugucuuuacuccucacacu

SEQ ID NO: 3867381 - RNA, 15 nt, Human
cugucuuucagauac

SEQ ID NO: 3867382 - RNA, 17 nt, Human
cugucuuuccacucugg

SEQ ID NO: 3867383 - RNA, 20 nt, Human
cugucuuuccuaagaccugg

SEQ ID NO: 3867384 - RNA, 13 nt, Human
cugucuuuccuag

SEQ ID NO: 3867385 - RNA, 20 nt, Human
cugucuuuccuagauggcag

SEQ ID NO: 3867386 - RNA, 18 nt, Human
cugucuuuccugaaccau

SEQ ID NO: 3867387 - RNA, 23 nt, Human
cugucuuucugagcacacuuuag

SEQ ID NO: 3867388 - RNA, 14 nt, Human
cugucuuucuugcu

SEQ ID NO: 3867389 - RNA, 18 nt, Human
cugucuuucuugcucccu

SEQ ID NO: 3867390 - RNA, 20 nt, Human
cugucuuucuugcucccuga

SEQ ID NO: 3867391 - RNA, 22 nt, Human
cugucuuucuugcucccugacu

SEQ ID NO: 3867392 - RNA, 23 nt, Human
cugucuuucuugcucccugacug

SEQ ID NO: 3867393 - RNA, 14 nt, Human
cugucuuuggaaaa

SEQ ID NO: 3867394 - RNA, 13 nt, Human
cugugaaaccugu

SEQ ID NO: 3867395 - RNA, 16 nt, Human
cugugaaaugcuggca

SEQ ID NO: 3867396 - RNA, 22 nt, Human
cugugaaauucccaacaaacau

SEQ ID NO: 3867397 - RNA, 21 nt, Human
cugugaacaagcuucaguaag

SEQ ID NO: 3867398 - RNA, 15 nt, Human
cugugaacaggcugg

SEQ ID NO: 3867399 - RNA, 18 nt, Human
cugugaacauggacucuu

SEQ ID NO: 3867400 - RNA, 14 nt, Human
cugugaacccagga

SEQ ID NO: 3867401 - RNA, 16 nt, Human
cugugaacccaggaca

SEQ ID NO: 3867402 - RNA, 19 nt, Human
cugugaacccuggggccug

SEQ ID NO: 3867403 - RNA, 16 nt, Human
cugugaacuuggggaa

SEQ ID NO: 3867404 - RNA, 15 nt, Human
cugugaagagaacca

SEQ ID NO: 3867405 - RNA, 14 nt, Human
cugugaaggacccu

SEQ ID NO: 3867406 - RNA, 18 nt, Human
cugugaaguccuucaccu

SEQ ID NO: 3867407 - RNA, 23 nt, Human
cugugaaguuuacauuguaaaua

SEQ ID NO: 3867408 - RNA, 18 nt, Human
cugugaaucaccuagggg

SEQ ID NO: 3867409 - RNA, 17 nt, Human
cugugaauccagugaaa

SEQ ID NO: 3867410 - RNA, 20 nt, Human
cugugaaugccacugccuuc

SEQ ID NO: 3867411 - RNA, 21 nt, Human
cugugaaugccacugccuucg

SEQ ID NO: 3867412 - RNA, 15 nt, Human
cugugaauucagauu

SEQ ID NO: 3867413 - RNA, 15 nt, Human
cugugaauugagcug

SEQ ID NO: 3867414 - RNA, 23 nt, Human
cugugaauugagcugcagaaacg

SEQ ID NO: 3867415 - RNA, 14 nt, Human
cugugacacacuac

SEQ ID NO: 3867416 - RNA, 15 nt, Human
cugugacaggcagca

SEQ ID NO: 3867417 - RNA, 16 nt, Human
cugugacauggugccu

SEQ ID NO: 3867418 - RNA, 19 nt, Human
cugugacauggugccugag

SEQ ID NO: 3867419 - RNA, 16 nt, Human
cugugaccacaacaug

SEQ ID NO: 3867420 - RNA, 20 nt, Human
cugugaccagcacugucuca

SEQ ID NO: 3867421 - RNA, 19 nt, Human
cugugaccauuuauaaugu

SEQ ID NO: 3867422 - RNA, 15 nt, Human
cugugacccacuucu

SEQ ID NO: 3867423 - RNA, 13 nt, Human
cugugacccccag

SEQ ID NO: 3867424 - RNA, 21 nt, Human
cugugacccccagcuccggcc

SEQ ID NO: 3867425 - RNA, 14 nt, Human
cugugaccugcauc

SEQ ID NO: 3867426 - RNA, 22 nt, Human
cugugaccugccccgcccagcu

SEQ ID NO: 3867427 - RNA, 15 nt, Human
cugugaccugcugag

SEQ ID NO: 3867428 - RNA, 16 nt, Human
cugugaccugcugagc

SEQ ID NO: 3867429 - RNA, 19 nt, Human
cugugaccugcugagcucu

SEQ ID NO: 3867430 - RNA, 17 nt, Human
cuuccuccauccuccuc

SEQ ID NO: 3867431 - RNA, 23 nt, Human
cuuccuccauccuccuccuuccu

SEQ ID NO: 3867432 - RNA, 12 nt, Human
cuuccucccaag

SEQ ID NO: 3867433 - RNA, 17 nt, Human
cuuccuccgaggccagu

SEQ ID NO: 3867434 - RNA, 15 nt, Human
cuuccuccuccacca

SEQ ID NO: 3867435 - RNA, 17 nt, Human
cuuccuccuccccacuu

SEQ ID NO: 3867436 - RNA, 16 nt, Human
cuuccuccucccuccu

SEQ ID NO: 3867437 - RNA, 21 nt, Human
cuuccuccucccuccugccga

SEQ ID NO: 3867438 - RNA, 10 nt, Human
cuuccuccug

SEQ ID NO: 3867439 - RNA, 11 nt, Human
cuuccuccuga

SEQ ID NO: 3867440 - RNA, 15 nt, Human
cuuccuccugacacc

SEQ ID NO: 3867441 - RNA, 12 nt, Human
cuuccuccugga

SEQ ID NO: 3867442 - RNA, 13 nt, Human
cuuccuccuggaa

SEQ ID NO: 3867443 - RNA, 14 nt, Human
cuuccuccugggcc

SEQ ID NO: 3867444 - RNA, 16 nt, Human
cuuccucgcagagagg

SEQ ID NO: 3867445 - RNA, 18 nt, Human
cuuccucgcagagaggcc

SEQ ID NO: 3867446 - RNA, 19 nt, Human
cuuccucgcagagaggcca

SEQ ID NO: 3867447 - RNA, 18 nt, Human
cuuccucuagaagccaag

SEQ ID NO: 3867448 - RNA, 14 nt, Human
cuuccucuccacug

SEQ ID NO: 3867449 - RNA, 21 nt, Human
cuuccucuccacugccuucga

SEQ ID NO: 3867450 - RNA, 19 nt, Human
cuuccucuccugucucccu

SEQ ID NO: 3867451 - RNA, 15 nt, Human
cuuccucucuccaga

SEQ ID NO: 3867452 - RNA, 16 nt, Human
cuuccucucuccagau

SEQ ID NO: 3867453 - RNA, 15 nt, Human
cuuccucugagccuu

SEQ ID NO: 3867454 - RNA, 14 nt, Human
cuuccucugaggcu

SEQ ID NO: 3867455 - RNA, 15 nt, Human
cuuccucugaggcug

SEQ ID NO: 3867456 - RNA, 22 nt, Human
cuuccucugcagcugaccucug

SEQ ID NO: 3867457 - RNA, 11 nt, Human
cuuccucugcu

SEQ ID NO: 3867458 - RNA, 14 nt, Human
cuuccucuggggcu

SEQ ID NO: 3867459 - RNA, 15 nt, Human
cuuccucuucggccc

SEQ ID NO: 3867460 - RNA, 14 nt, Human
cuuccucuugaccc

SEQ ID NO: 3867461 - RNA, 21 nt, Human
cuuccucuuuccaucuacccu

SEQ ID NO: 3867462 - RNA, 22 nt, Human
cuuccucuuuccaucuacccuc

SEQ ID NO: 3867463 - RNA, 18 nt, Human
cuuccugaaacuauauuu

SEQ ID NO: 3867464 - RNA, 13 nt, Human
cuuccugagggga

SEQ ID NO: 3867465 - RNA, 22 nt, Human
cuuccugauugguuucucuucu

SEQ ID NO: 3867466 - RNA, 13 nt, Human
cuuccugcaagga

SEQ ID NO: 3867467 - RNA, 15 nt, Human
cuuccugcaaggacu

SEQ ID NO: 3867468 - RNA, 15 nt, Human
cuuccugcaauuuuc

SEQ ID NO: 3867469 - RNA, 17 nt, Human
cuuccugcaauuuucua

SEQ ID NO: 3867470 - RNA, 16 nt, Human
cuuccugccaccaguc

SEQ ID NO: 3867471 - RNA, 17 nt, Human
cuuccugccaccugcug

SEQ ID NO: 3867472 - RNA, 15 nt, Human
cuuccugccagcccc

SEQ ID NO: 3867473 - RNA, 18 nt, Human
cuuccugccagccccugc

SEQ ID NO: 3867474 - RNA, 22 nt, Human
cuuccugccagccccugccauu

SEQ ID NO: 3867475 - RNA, 15 nt, Human
cuuccugccccucuu

SEQ ID NO: 3867476 - RNA, 19 nt, Human
cuuccugcccuacagaggu

SEQ ID NO: 3867477 - RNA, 16 nt, Human
cuuccugccuggucuc

SEQ ID NO: 3867478 - RNA, 21 nt, Human
cuuccugcguccuccucaccu

SEQ ID NO: 3867479 - RNA, 18 nt, Human
cuuccuggagcagaagca

SEQ ID NO: 3867480 - RNA, 19 nt, Human
cuuccuggagcagaagcag

SEQ ID NO: 3867481 - RNA, 16 nt, Human
cuuccuggagcccaga

SEQ ID NO: 3867482 - RNA, 17 nt, Human
cuuccuggagcccagag

SEQ ID NO: 3867483 - RNA, 20 nt, Human
cuuccugggcacacgcugcu

SEQ ID NO: 3867484 - RNA, 23 nt, Human
cuuccuggggcaucuggcgaauc

SEQ ID NO: 3867485 - RNA, 23 nt, Human
cuuccuguaacacaagccacaga

SEQ ID NO: 3867486 - RNA, 21 nt, Human
cuuccugucaagcaaucaaga

SEQ ID NO: 3867487 - RNA, 16 nt, Human
cuuccuguccagagag

SEQ ID NO: 3867488 - RNA, 19 nt, Human
cuuccuguccagagagaga

SEQ ID NO: 3867489 - RNA, 16 nt, Human
cuuccuguccagcucc

SEQ ID NO: 3867490 - RNA, 18 nt, Human
cuuccuguccccaucugu

SEQ ID NO: 3867491 - RNA, 17 nt, Human
cuuccuguccgcccucu

SEQ ID NO: 3867492 - RNA, 22 nt, Human
cuuccuguccgcccucuucccc

SEQ ID NO: 3867493 - RNA, 13 nt, Human
cuuccugugacuu

SEQ ID NO: 3867494 - RNA, 16 nt, Human
cuuccugugacuucag

SEQ ID NO: 3867495 - RNA, 16 nt, Human
cuuccugugggagcag

SEQ ID NO: 3867496 - RNA, 15 nt, Human
cuuccuguguccuga

SEQ ID NO: 3867497 - RNA, 14 nt, Human
cuuccuguucugaa

SEQ ID NO: 3867498 - RNA, 16 nt, Human
cuuccuguuugggccc

SEQ ID NO: 3867499 - RNA, 18 nt, Human
cuuccuguuuuucacauu

SEQ ID NO: 3867500 - RNA, 16 nt, Human
cuuccuuaccgugggc

SEQ ID NO: 3867501 - RNA, 15 nt, Human
cuuccuucaccucug

SEQ ID NO: 3867502 - RNA, 13 nt, Human
cuuccuucagaga

SEQ ID NO: 3867503 - RNA, 14 nt, Human
cuuccuucagagag

SEQ ID NO: 3867504 - RNA, 15 nt, Human
cuuccuucccuggcu

SEQ ID NO: 3867505 - RNA, 18 nt, Human
cuuccuucugccugagcu

SEQ ID NO: 3867506 - RNA, 17 nt, Human
cuuccuucuguaaauac

SEQ ID NO: 3867507 - RNA, 18 nt, Human
cuuccuucuuugcccuuu

SEQ ID NO: 3867508 - RNA, 19 nt, Human
cuuccuugcuaaugcacca

SEQ ID NO: 3867509 - RNA, 19 nt, Human
cuuccuugcuguccuaggc

SEQ ID NO: 3867510 - RNA, 17 nt, Human
cuuccuugcuuaaggua

SEQ ID NO: 3867511 - RNA, 21 nt, Human
cuuccuuguuacccaugaaaa

SEQ ID NO: 3867512 - RNA, 22 nt, Human
cuuccuuuacuuucccuugcuu

SEQ ID NO: 3867513 - RNA, 15 nt, Human
cuuccuuugcuuccc

SEQ ID NO: 3867514 - RNA, 22 nt, Human
cuuccuuuguuuuuuuuuccug

SEQ ID NO: 3867515 - RNA, 13 nt, Human
cuuccuuuuaacu

SEQ ID NO: 3867516 - RNA, 17 nt, Human
cuuccuuuuaucaguag

SEQ ID NO: 3867517 - RNA, 17 nt, Human
cuucgacacuguucuua

SEQ ID NO: 3867518 - RNA, 17 nt, Human
cuucgacagcauuuucc

SEQ ID NO: 3867519 - RNA, 21 nt, Human
cuucgacagcauuuuccucug

SEQ ID NO: 3867520 - RNA, 15 nt, Human
cuucgacucaggauc

SEQ ID NO: 3867521 - RNA, 16 nt, Human
cuucgacucaggaucc

SEQ ID NO: 3867522 - RNA, 14 nt, Human
cuucgacuguuguu

SEQ ID NO: 3867523 - RNA, 21 nt, Human
cuucgauacaccgggccugga

SEQ ID NO: 3867524 - RNA, 15 nt, Human
cuucgcaucaaaaga

SEQ ID NO: 3867525 - RNA, 22 nt, Human
cuucgcaucaaaagacaauucu

SEQ ID NO: 3867526 - RNA, 23 nt, Human
cuucgcaucaaaagacaauucuu

SEQ ID NO: 3867527 - RNA, 13 nt, Human
cuucgccaccugg

SEQ ID NO: 3867528 - RNA, 19 nt, Human
cuucgcguauuucaggauu

SEQ ID NO: 3867529 - RNA, 15 nt, Human
cuucgcuccuguguc

SEQ ID NO: 3867530 - RNA, 16 nt, Human
cuucgcuccugugucu

SEQ ID NO: 3867531 - RNA, 19 nt, Human
cuucggaaaccuuggugua

SEQ ID NO: 3867532 - RNA, 21 nt, Human
cuucggaccgcuuguggggac

SEQ ID NO: 3867533 - RNA, 22 nt, Human
cuucggagaugaggaguaaaau

SEQ ID NO: 3867534 - RNA, 16 nt, Human
cuucggaggaccaggg

SEQ ID NO: 3867535 - RNA, 13 nt, Human
cuucggcauuuga

SEQ ID NO: 3867536 - RNA, 20 nt, Human
cuucggccuccauccugagg

SEQ ID NO: 3867537 - RNA, 23 nt, Human
cuucgggaagagaggaguucaau

SEQ ID NO: 3867538 - RNA, 15 nt, Human
cuucgggaccaggau

SEQ ID NO: 3867539 - RNA, 15 nt, Human
cuucggggcugggaa

SEQ ID NO: 3867540 - RNA, 16 nt, Human
cuucgguacccaccac

SEQ ID NO: 3867541 - RNA, 22 nt, Human
cuucguaucccgagucugggac

SEQ ID NO: 3867542 - RNA, 19 nt, Human
cuucgugacaauguuuaca

SEQ ID NO: 3867543 - RNA, 17 nt, Human
cuucguuaacuguguau

SEQ ID NO: 3867544 - RNA, 13 nt, Human
cuucuaaaaacuu

SEQ ID NO: 3867545 - RNA, 21 nt, Human
cuucuaaaacuguacuuugau

SEQ ID NO: 3867546 - RNA, 18 nt, Human
cuucuaaacuuccccauc

SEQ ID NO: 3867547 - RNA, 15 nt, Human
cuucuaaagguguug

SEQ ID NO: 3867548 - RNA, 21 nt, Human
cuucuaaguaaaaccacagca

SEQ ID NO: 3867549 - RNA, 23 nt, Human
cuucuaaguaaaaccacagcagu

SEQ ID NO: 3867550 - RNA, 14 nt, Human
cuucuaaguaaaua

SEQ ID NO: 3867551 - RNA, 12 nt, Human
cuucuaauauau

SEQ ID NO: 3867552 - RNA, 16 nt, Human
cuucuaauaucauuca

SEQ ID NO: 3867553 - RNA, 14 nt, Human
cuucuaaucugcua

SEQ ID NO: 3867554 - RNA, 16 nt, Human
cuucuaaucugcuaug

SEQ ID NO: 3867555 - RNA, 14 nt, Human
cuucuacacucucc

SEQ ID NO: 3867556 - RNA, 17 nt, Human
cuucuacacucuccugg

SEQ ID NO: 3867557 - RNA, 17 nt, Human
cuucuaccaacuggaag

SEQ ID NO: 3867558 - RNA, 17 nt, Human
cuucuaccaugaacaga

SEQ ID NO: 3867559 - RNA, 17 nt, Human
cuucuaccucuuggcug

SEQ ID NO: 3867560 - RNA, 23 nt, Human
cuucuaccugccacucacacagc

SEQ ID NO: 3867561 - RNA, 13 nt, Human
cuucuaccugccc

SEQ ID NO: 3867562 - RNA, 21 nt, Human
cuucuacuucugcccuugcca

SEQ ID NO: 3867563 - RNA, 13 nt, Human
cuucuacuuuuaa

SEQ ID NO: 3867564 - RNA, 15 nt, Human
cuucuagaauuauaa

SEQ ID NO: 3867565 - RNA, 17 nt, Human
cuucuagcugacuugca

SEQ ID NO: 3867566 - RNA, 13 nt, Human
cuucuaggaagcu

SEQ ID NO: 3867567 - RNA, 16 nt, Human
cuucuaggacgccacc

SEQ ID NO: 3867568 - RNA, 19 nt, Human
cuucuaggacgccacccag

SEQ ID NO: 3867569 - RNA, 18 nt, Human
cuucuaggguaugggaaa

SEQ ID NO: 3867570 - RNA, 16 nt, Human
cuucuagucuuggcca

SEQ ID NO: 3867571 - RNA, 18 nt, Human
cuucuagugaugaugguu

SEQ ID NO: 3867572 - RNA, 18 nt, Human
cuucuaguucugccagga

SEQ ID NO: 3867573 - RNA, 14 nt, Human
cuucuaguuuccca

SEQ ID NO: 3867574 - RNA, 15 nt, Human
cuucuauaauuguau

SEQ ID NO: 3867575 - RNA, 17 nt, Human
cuucuauacccacccag

SEQ ID NO: 3867576 - RNA, 21 nt, Human
cuugaaccugugaguaaauau

SEQ ID NO: 3867577 - RNA, 16 nt, Human
cuugaacguuuucuaa

SEQ ID NO: 3867578 - RNA, 18 nt, Human
cuugaacuccugaccuca

SEQ ID NO: 3867579 - RNA, 13 nt, Human
cuugaacuccugg

SEQ ID NO: 3867580 - RNA, 18 nt, Human
cuugaacuccuggacuca

SEQ ID NO: 3867581 - RNA, 15 nt, Human
cuugaacuccuggcc

SEQ ID NO: 3867582 - RNA, 19 nt, Human
cuugaacuccuggccucaa

SEQ ID NO: 3867583 - RNA, 14 nt, Human
cuugaacucugggc

SEQ ID NO: 3867584 - RNA, 18 nt, Human
cuugaacuggguacuugu

SEQ ID NO: 3867585 - RNA, 13 nt, Human
cuugaagaucguu

SEQ ID NO: 3867586 - RNA, 13 nt, Human
cuugaagccaaag

SEQ ID NO: 3867587 - RNA, 14 nt, Human
cuugaagccaaaga

SEQ ID NO: 3867588 - RNA, 21 nt, Human
cuugaagccacugaagcuggg

SEQ ID NO: 3867589 - RNA, 20 nt, Human
cuugaagccugcuccuuccc

SEQ ID NO: 3867590 - RNA, 21 nt, Human
cuugaaggcccugcugaguca

SEQ ID NO: 3867591 - RNA, 17 nt, Human
cuugaagggccagagcc

SEQ ID NO: 3867592 - RNA, 13 nt, Human
cuugaagggccca

SEQ ID NO: 3867593 - RNA, 14 nt, Human
cuugaagggcccag

SEQ ID NO: 3867594 - RNA, 14 nt, Human
cuugaaggugcuga

SEQ ID NO: 3867595 - RNA, 20 nt, Human
cuugaagucacccggccccc

SEQ ID NO: 3867596 - RNA, 10 nt, Human
cuugaaguug

SEQ ID NO: 3867597 - RNA, 13 nt, Human
cuugaauauaaaa

SEQ ID NO: 3867598 - RNA, 16 nt, Human
cuugaauauaaaaaau

SEQ ID NO: 3867599 - RNA, 14 nt, Human
cuugaauccuaggg

SEQ ID NO: 3867600 - RNA, 23 nt, Human
cuugaaugaugccaugaggaaca

SEQ ID NO: 3867601 - RNA, 23 nt, Human
cuugaaugccauagucaaagaga

SEQ ID NO: 3867602 - RNA, 22 nt, Human
cuugaauguggcuugagaaaua

SEQ ID NO: 3867603 - RNA, 20 nt, Human
cuugaauguggucucaggau

SEQ ID NO: 3867604 - RNA, 21 nt, Human
cuugaauguggucucaggaua

SEQ ID NO: 3867605 - RNA, 21 nt, Human
cuugaauuguaacuguucuug

SEQ ID NO: 3867606 - RNA, 22 nt, Human
cuugaauuguaacuguucuuga

SEQ ID NO: 3867607 - RNA, 17 nt, Human
cuugaauuuucccacug

SEQ ID NO: 3867608 - RNA, 22 nt, Human
cuugacaaagucaagccacaug

SEQ ID NO: 3867609 - RNA, 16 nt, Human
cuugacaacuggcagg

SEQ ID NO: 3867610 - RNA, 20 nt, Human
cuugacaacuggcaggcagg

SEQ ID NO: 3867611 - RNA, 13 nt, Human
cuugacaccugcu

SEQ ID NO: 3867612 - RNA, 15 nt, Human
cuugacaccugcuga

SEQ ID NO: 3867613 - RNA, 17 nt, Human
cuugacagaacacuguc

SEQ ID NO: 3867614 - RNA, 15 nt, Human
cuugacagggcacac

SEQ ID NO: 3867615 - RNA, 20 nt, Human
cuugacagggcacaccgggc

SEQ ID NO: 3867616 - RNA, 14 nt, Human
cuugacauucaagg

SEQ ID NO: 3867617 - RNA, 15 nt, Human
cuugaccaagcagga

SEQ ID NO: 3867618 - RNA, 23 nt, Human
cuugaccagcagaucccagcuca

SEQ ID NO: 3867619 - RNA, 17 nt, Human
cuugaccaggcuuggcc

SEQ ID NO: 3867620 - RNA, 17 nt, Human
cuugaccauucuccacc

SEQ ID NO: 3867621 - RNA, 23 nt, Human
cuugaccauucuccaccugccag

SEQ ID NO: 3867622 - RNA, 13 nt, Human
cuugacccaucuc

SEQ ID NO: 3867623 - RNA, 15 nt, Human
cuugacccugagcug

SEQ ID NO: 3867624 - RNA, 14 nt, Human
cuugacccugcacc

SEQ ID NO: 3867625 - RNA, 15 nt, Human
cuugacccugcaccc

SEQ ID NO: 3867626 - RNA, 18 nt, Human
cuugaccgugaggccaga

SEQ ID NO: 3867627 - RNA, 12 nt, Human
cuugaccuccua

SEQ ID NO: 3867628 - RNA, 16 nt, Human
cuugaccugcugaagu

SEQ ID NO: 3867629 - RNA, 18 nt, Human
cuugaccuguuucucugc

SEQ ID NO: 3867630 - RNA, 12 nt, Human
cuugaccuuccu

SEQ ID NO: 3867631 - RNA, 15 nt, Human
cuugaccuuguagag

SEQ ID NO: 3867632 - RNA, 17 nt, Human
cuugaccuuuguacagc

SEQ ID NO: 3867633 - RNA, 15 nt, Human
cuugacucaggauuu

SEQ ID NO: 3867634 - RNA, 13 nt, Human
cuugacuuugcuc

SEQ ID NO: 3867635 - RNA, 15 nt, Human
cuugagaaaaaaaga

SEQ ID NO: 3867636 - RNA, 22 nt, Human
cuugagaaaaaaagaauaguug

SEQ ID NO: 3867637 - RNA, 18 nt, Human
cuugagaaaccccucgau

SEQ ID NO: 3867638 - RNA, 22 nt, Human
cuugagaaauauggacacuuaa

SEQ ID NO: 3867639 - RNA, 11 nt, Human
cuugagaacuu

SEQ ID NO: 3867640 - RNA, 17 nt, Human
cuugagaagauucuucc

SEQ ID NO: 3867641 - RNA, 17 nt, Human
cuugagacacggagccc

SEQ ID NO: 3867642 - RNA, 14 nt, Human
cuugagaccucagc

SEQ ID NO: 3867643 - RNA, 14 nt, Human
cuugagagaccagg

SEQ ID NO: 3867644 - RNA, 22 nt, Human
cuugagauguaugaaggcuuuu

SEQ ID NO: 3867645 - RNA, 21 nt, Human
cuugagcaaguuccuucuggu

SEQ ID NO: 3867646 - RNA, 14 nt, Human
cuugagcaguggcu

SEQ ID NO: 3867647 - RNA, 16 nt, Human
cuugagcauguuacug

SEQ ID NO: 3867648 - RNA, 13 nt, Human
cuugagccaguaa

SEQ ID NO: 3867649 - RNA, 14 nt, Human
cuugagcccaggag

SEQ ID NO: 3867650 - RNA, 16 nt, Human
cuugagcccuccccag

SEQ ID NO: 3867651 - RNA, 20 nt, Human
cuugagcccuccccaggaau

SEQ ID NO: 3867652 - RNA, 14 nt, Human
cuugagcccuggcu

SEQ ID NO: 3867653 - RNA, 20 nt, Human
cuugagcccuggcuguucug

SEQ ID NO: 3867654 - RNA, 19 nt, Human
cuugagccgggccccuggg

SEQ ID NO: 3867655 - RNA, 20 nt, Human
cuugagccgggccccugggc

SEQ ID NO: 3867656 - RNA, 12 nt, Human
cuugagccuggg

SEQ ID NO: 3867657 - RNA, 15 nt, Human
cuugagccugggagg

SEQ ID NO: 3867658 - RNA, 16 nt, Human
cuugagccugggaggu

SEQ ID NO: 3867659 - RNA, 19 nt, Human
cuugagccugucaagaggc

SEQ ID NO: 3867660 - RNA, 18 nt, Human
cuugagccuugaacuuug

SEQ ID NO: 3867661 - RNA, 22 nt, Human
cuugagccuugaacuuugaccu

SEQ ID NO: 3867662 - RNA, 14 nt, Human
cuugagcuccccaa

SEQ ID NO: 3867663 - RNA, 11 nt, Human
cuugagcucua

SEQ ID NO: 3867664 - RNA, 10 nt, Human
cuugagcuga

SEQ ID NO: 3867665 - RNA, 12 nt, Human
cuugaggacaca

SEQ ID NO: 3867666 - RNA, 16 nt, Human
cuugaggacacauguc

SEQ ID NO: 3867667 - RNA, 22 nt, Human
cuugaggagugugagaaucaaa

SEQ ID NO: 3867668 - RNA, 16 nt, Human
cuugaggauuuugagu

SEQ ID NO: 3867669 - RNA, 17 nt, Human
cuugaggauuuugagua

SEQ ID NO: 3867670 - RNA, 17 nt, Human
cuugaggccugaucugc

SEQ ID NO: 3867671 - RNA, 16 nt, Human
cuugaggggaccagga

SEQ ID NO: 3867672 - RNA, 16 nt, Human
cuugaggggagccagg

SEQ ID NO: 3867673 - RNA, 17 nt, Human
cuugaggggagccagga

SEQ ID NO: 3867674 - RNA, 20 nt, Human
cuugaggggagccaggaggg

SEQ ID NO: 3867675 - RNA, 20 nt, Human
cuugagggggaaggauucug

SEQ ID NO: 3867676 - RNA, 17 nt, Human
cuugaggguugggcugg

SEQ ID NO: 3867677 - RNA, 20 nt, Human
cuugaggguugggcuggugu

SEQ ID NO: 3867678 - RNA, 18 nt, Human
cuugaggucucagccccu

SEQ ID NO: 3867679 - RNA, 14 nt, Human
cuugaggucuuuug

SEQ ID NO: 3867680 - RNA, 22 nt, Human
cuugaggucuuuugacaugugg

SEQ ID NO: 3867681 - RNA, 22 nt, Human
cuugagguggccuccuugcuug

SEQ ID NO: 3867682 - RNA, 22 nt, Human
cuugaguaaaauacucuuuuua

SEQ ID NO: 3867683 - RNA, 18 nt, Human
cuugaguauaagaaaugc

SEQ ID NO: 3867684 - RNA, 23 nt, Human
cuugagugggguuaucucugugu

SEQ ID NO: 3867685 - RNA, 16 nt, Human
cuugaguguaauguuu

SEQ ID NO: 3867686 - RNA, 18 nt, Human
cuugaguucucaacugag

SEQ ID NO: 3867687 - RNA, 18 nt, Human
cuugaguugauucagcuc

SEQ ID NO: 3867688 - RNA, 20 nt, Human
cuugaguugauucagcucug

SEQ ID NO: 3867689 - RNA, 21 nt, Human
cuugaguuggggccauugcuu

SEQ ID NO: 3867690 - RNA, 20 nt, Human
cuugaguuguuuuuguauau

SEQ ID NO: 3867691 - RNA, 12 nt, Human
cuugaguuuguc

SEQ ID NO: 3867692 - RNA, 21 nt, Human
cuugaguuugucgcucaugug

SEQ ID NO: 3867693 - RNA, 16 nt, Human
cuugaguuuuauuuau

SEQ ID NO: 3867694 - RNA, 13 nt, Human
cuugauaacagcu

SEQ ID NO: 3867695 - RNA, 17 nt, Human
cuugauaauguuguggu

SEQ ID NO: 3867696 - RNA, 21 nt, Human
cuugauaauguugugguuugu

SEQ ID NO: 3867697 - RNA, 18 nt, Human
cuugauacauucaaauuu

SEQ ID NO: 3867698 - RNA, 16 nt, Human
cuugauaccccccucu

SEQ ID NO: 3867699 - RNA, 17 nt, Human
cuugauaccccccucug

SEQ ID NO: 3867700 - RNA, 20 nt, Human
cuugauaccccccucugucu

SEQ ID NO: 3867701 - RNA, 14 nt, Human
cuugauagaaaugc

SEQ ID NO: 3867702 - RNA, 18 nt, Human
cuugauauuuguauuuau

SEQ ID NO: 3867703 - RNA, 13 nt, Human
cuugauauuuucu

SEQ ID NO: 3867704 - RNA, 23 nt, Human
cuugaucaacaucuuuucuugcc

SEQ ID NO: 3867705 - RNA, 23 nt, Human
cuugaucagccccacccuggccu

SEQ ID NO: 3867706 - RNA, 18 nt, Human
cuugaucaguaguuugca

SEQ ID NO: 3867707 - RNA, 22 nt, Human
cuugaucaguuaagaaauuuca

SEQ ID NO: 3867708 - RNA, 19 nt, Human
cuugauccauuucuaauua

SEQ ID NO: 3867709 - RNA, 20 nt, Human
cuugauccauuucuaauuau

SEQ ID NO: 3867710 - RNA, 16 nt, Human
cuugaucugcucagcc

SEQ ID NO: 3867711 - RNA, 15 nt, Human
cuugaucuguauaua

SEQ ID NO: 3867712 - RNA, 21 nt, Human
cuugaugaccaaaguccuuuu

SEQ ID NO: 3867713 - RNA, 20 nt, Human
cuugaugacuggaauuuuua

SEQ ID NO: 3867714 - RNA, 13 nt, Human
cuugaugagugua

SEQ ID NO: 3867715 - RNA, 19 nt, Human
cuugaugaguguaacaaga

SEQ ID NO: 3867716 - RNA, 21 nt, Human
cuugaugaguguaacaagaaa

SEQ ID NO: 3867717 - RNA, 14 nt, Human
cuugaugcacagag

SEQ ID NO: 3867718 - RNA, 19 nt, Human
cuugaugccaguaggcuca

SEQ ID NO: 3867719 - RNA, 17 nt, Human
cuugaugggauucugga

SEQ ID NO: 3867720 - RNA, 16 nt, Human
cuugauggucagacac

SEQ ID NO: 3867721 - RNA, 23 nt, Human
cuuuugacggaaggaccuauguu

SEQ ID NO: 3867722 - RNA, 18 nt, Human
cuuuugacuuucauugga

SEQ ID NO: 3867723 - RNA, 20 nt, Human
cuuuugagugugugugugca

SEQ ID NO: 3867724 - RNA, 14 nt, Human
cuuuugauaagaaa

SEQ ID NO: 3867725 - RNA, 15 nt, Human
cuuuugauaugcaua

SEQ ID NO: 3867726 - RNA, 24 nt, Human
cuuuugcaaccaggaacagcaaau

SEQ ID NO: 3867727 - RNA, 20 nt, Human
cuuuugcaagguuccacaga

SEQ ID NO: 3867728 - RNA, 15 nt, Human
cuuuugcaccccucc

SEQ ID NO: 3867729 - RNA, 17 nt, Human
cuuuugcaccccuccca

SEQ ID NO: 3867730 - RNA, 19 nt, Human
cuuuugcaccccucccauu

SEQ ID NO: 3867731 - RNA, 15 nt, Human
cuuuugcauucuccc

SEQ ID NO: 3867732 - RNA, 17 nt, Human
cuuuugccauuaaacuu

SEQ ID NO: 3867733 - RNA, 23 nt, Human
cuuuugcccacacuugggagcaa

SEQ ID NO: 3867734 - RNA, 21 nt, Human
cuuuugcccuucacaguguuu

SEQ ID NO: 3867735 - RNA, 15 nt, Human
cuuuugcccuuugau

SEQ ID NO: 3867736 - RNA, 20 nt, Human
cuuuugccuuuugcaaccag

SEQ ID NO: 3867737 - RNA, 15 nt, Human
cuuuugcuacuaagu

SEQ ID NO: 3867738 - RNA, 23 nt, Human
cuuuugcuacuaaguucacauua

SEQ ID NO: 3867739 - RNA, 11 nt, Human
cuuuugcuuuu

SEQ ID NO: 3867740 - RNA, 18 nt, Human
cuuuugcuuuugcccauu

SEQ ID NO: 3867741 - RNA, 17 nt, Human
cuuuugcuuuuggcaaa

SEQ ID NO: 3867742 - RNA, 16 nt, Human
cuuuuggaaucuagaa

SEQ ID NO: 3867743 - RNA, 12 nt, Human
cuuuuggaggac

SEQ ID NO: 3867744 - RNA, 13 nt, Human
cuuuuggagucag

SEQ ID NO: 3867745 - RNA, 13 nt, Human
cuuuuggcccccg

SEQ ID NO: 3867746 - RNA, 14 nt, Human
cuuuuggcuuccau

SEQ ID NO: 3867747 - RNA, 15 nt, Human
cuuuugggggaaacu

SEQ ID NO: 3867748 - RNA, 14 nt, Human
cuuuugggggaggg

SEQ ID NO: 3867749 - RNA, 18 nt, Human
cuuuugggggucaacagu

SEQ ID NO: 3867750 - RNA, 19 nt, Human
cuuuuggguuucugcccug

SEQ ID NO: 3867751 - RNA, 20 nt, Human
cuuuuggguuucugcccugc

SEQ ID NO: 3867752 - RNA, 20 nt, Human
cuuuugguaaagacuggcuu

SEQ ID NO: 3867753 - RNA, 15 nt, Human
cuuuuggucugugug

SEQ ID NO: 3867754 - RNA, 16 nt, Human
cuuuuggucuguguga

SEQ ID NO: 3867755 - RNA, 13 nt, Human
cuuuugguuaagu

SEQ ID NO: 3867756 - RNA, 16 nt, Human
cuuuugguuaagucug

SEQ ID NO: 3867757 - RNA, 13 nt, Human
cuuuuguaaaugu

SEQ ID NO: 3867758 - RNA, 10 nt, Human
cuuuuguaag

SEQ ID NO: 3867759 - RNA, 20 nt, Human
cuuuuguaagacaaagguuu

SEQ ID NO: 3867760 - RNA, 12 nt, Human
cuuuuguacauc

SEQ ID NO: 3867761 - RNA, 17 nt, Human
cuuuuguacaucuggcu

SEQ ID NO: 3867762 - RNA, 18 nt, Human
cuuuuguauguaaaugug

SEQ ID NO: 3867763 - RNA, 11 nt, Human
cuuuuguauua

SEQ ID NO: 3867764 - RNA, 12 nt, Human
cuuuuguauuaa

SEQ ID NO: 3867765 - RNA, 13 nt, Human
cuuuuguccugca

SEQ ID NO: 3867766 - RNA, 21 nt, Human
cuuuugugaagaacuauuuua

SEQ ID NO: 3867767 - RNA, 20 nt, Human
cuuuugugauggagugcugu

SEQ ID NO: 3867768 - RNA, 17 nt, Human
cuuuuguguaaugaaaa

SEQ ID NO: 3867769 - RNA, 23 nt, Human
cuuuuguguacaguguguaaagu

SEQ ID NO: 3867770 - RNA, 17 nt, Human
cuuuugugugaauugac

SEQ ID NO: 3867771 - RNA, 11 nt, Human
cuuuuguuacu

SEQ ID NO: 3867772 - RNA, 13 nt, Human
cuuuuguuacugu

SEQ ID NO: 3867773 - RNA, 14 nt, Human
cuuuuguuacuguu

SEQ ID NO: 3867774 - RNA, 17 nt, Human
cuuuuguuacuguucuu

SEQ ID NO: 3867775 - RNA, 19 nt, Human
cuuuuguuacuguucuugc

SEQ ID NO: 3867776 - RNA, 21 nt, Human
cuuuuguuacuguucuugcug

SEQ ID NO: 3867777 - RNA, 19 nt, Human
cuuuuguucauuucauccu

SEQ ID NO: 3867778 - RNA, 13 nt, Human
cuuuuguuuuuug

SEQ ID NO: 3867779 - RNA, 18 nt, Human
cuuuuuaaaaauuguuau

SEQ ID NO: 3867780 - RNA, 22 nt, Human
cuuuuuaaaauggugcuuaagu

SEQ ID NO: 3867781 - RNA, 15 nt, Human
cuuuuuaaagcuuau

SEQ ID NO: 3867782 - RNA, 23 nt, Human
cuuuuuaaaguguuucuguuauu

SEQ ID NO: 3867783 - RNA, 23 nt, Human
cuuuuuaaauucaguccuaagaa

SEQ ID NO: 3867784 - RNA, 15 nt, Human
cuuuuuaaccucugu

SEQ ID NO: 3867785 - RNA, 16 nt, Human
cuuuuuaaccucuguu

SEQ ID NO: 3867786 - RNA, 20 nt, Human
cuuuuuaaggucuuucagua

SEQ ID NO: 3867787 - RNA, 15 nt, Human
cuuuuuaauaaaaag

SEQ ID NO: 3867788 - RNA, 14 nt, Human
cuuuuuaauaugcu

SEQ ID NO: 3867789 - RNA, 18 nt, Human
cuuuuuaaucaugaauau

SEQ ID NO: 3867790 - RNA, 21 nt, Human
cuuuuuacauaacugccuuga

SEQ ID NO: 3867791 - RNA, 22 nt, Human
cuuuuuacauaacugccuugaa

SEQ ID NO: 3867792 - RNA, 17 nt, Human
cuuuuuaccuuucauac

SEQ ID NO: 3867793 - RNA, 19 nt, Human
cuuuuuacuccccuugagc

SEQ ID NO: 3867794 - RNA, 16 nt, Human
cuuuuuaguaauuucu

SEQ ID NO: 3867795 - RNA, 12 nt, Human
cuuuuuaguuua

SEQ ID NO: 3867796 - RNA, 13 nt, Human
cuuuuuauaaaaa

SEQ ID NO: 3867797 - RNA, 18 nt, Human
cuuuuuauauucucagca

SEQ ID NO: 3867798 - RNA, 15 nt, Human
cuuuuuaugcuauuu

SEQ ID NO: 3867799 - RNA, 18 nt, Human
cuuuuuauuaaaauauuu

SEQ ID NO: 3867800 - RNA, 19 nt, Human
cuuuuuauugaugugcaaa

SEQ ID NO: 3867801 - RNA, 23 nt, Human
cuuuuuauugccuucucaccagc

SEQ ID NO: 3867802 - RNA, 14 nt, Human
cuuuuuauuuauau

SEQ ID NO: 3867803 - RNA, 19 nt, Human
cuuuuuauuuauauguacu

SEQ ID NO: 3867804 - RNA, 16 nt, Human
cuuuuuauuucugcau

SEQ ID NO: 3867805 - RNA, 15 nt, Human
cuuuuuauuugcaug

SEQ ID NO: 3867806 - RNA, 15 nt, Human
cuuuuucaauaacug

SEQ ID NO: 3867807 - RNA, 18 nt, Human
cuuuuucauaaauuauuu

SEQ ID NO: 3867808 - RNA, 17 nt, Human
cuuuuucauauguugcu

SEQ ID NO: 3867809 - RNA, 15 nt, Human
cuuuuucauuuaucu

SEQ ID NO: 3867810 - RNA, 12 nt, Human
cuuuuucauuug

SEQ ID NO: 3867811 - RNA, 15 nt, Human
cuuuuucauuugccu

SEQ ID NO: 3867812 - RNA, 13 nt, Human
cuuuuuccagagg

SEQ ID NO: 3867813 - RNA, 17 nt, Human
cuuuuuccccaaagucu

SEQ ID NO: 3867814 - RNA, 23 nt, Human
cuuuuuccuagccuguuucuucc

SEQ ID NO: 3867815 - RNA, 17 nt, Human
cuuuuuccuugucccca

SEQ ID NO: 3867816 - RNA, 22 nt, Human
cuuuuucuaaugaggagagaaa

SEQ ID NO: 3867817 - RNA, 11 nt, Human
cuuuuucuacc

SEQ ID NO: 3867818 - RNA, 14 nt, Human
cuuuuucucccucu

SEQ ID NO: 3867819 - RNA, 13 nt, Human
cuuuuucugauua

SEQ ID NO: 3867820 - RNA, 14 nt, Human
cuuuuucugcacua

SEQ ID NO: 3867821 - RNA, 20 nt, Human
cuuuuucugcacuauaugca

SEQ ID NO: 3867822 - RNA, 15 nt, Human
cuuuuucuuaaucau

SEQ ID NO: 3867823 - RNA, 13 nt, Human
cuuuuucuuccuc

SEQ ID NO: 3867824 - RNA, 12 nt, Human
cuuuuucuuuau

SEQ ID NO: 3867825 - RNA, 16 nt, Human
cuuuuucuuuuguaag

SEQ ID NO: 3867826 - RNA, 17 nt, Human
cuuuuucuuuuguaagu

SEQ ID NO: 3867827 - RNA, 18 nt, Human
cuuuuucuuuuguaagug

SEQ ID NO: 3867828 - RNA, 16 nt, Human
cuuuuugaaaguaauu

SEQ ID NO: 3867829 - RNA, 18 nt, Human
cuuuuugaaaucagcaua

SEQ ID NO: 3867830 - RNA, 12 nt, Human
cuuuuugaagug

SEQ ID NO: 3867831 - RNA, 13 nt, Human
cuuuuugaagugu

SEQ ID NO: 3867832 - RNA, 22 nt, Human
cuuuuugaaguguaggcagaca

SEQ ID NO: 3867833 - RNA, 11 nt, Human
cuuuuugaaug

SEQ ID NO: 3867834 - RNA, 13 nt, Human
cuuuuugacacug

SEQ ID NO: 3867835 - RNA, 14 nt, Human
cuuuuugaggcaaa

SEQ ID NO: 3867836 - RNA, 13 nt, Human
cuuuuugcagcuu

SEQ ID NO: 3867837 - RNA, 14 nt, Human
cuuuuugcucuaaa

SEQ ID NO: 3867838 - RNA, 15 nt, Human
cuuuuugcucuaaaa

SEQ ID NO: 3867839 - RNA, 15 nt, Human
cuuuuuggaggugcu

SEQ ID NO: 3867840 - RNA, 21 nt, Human
cuuuuuggguuuauuuggaaa

SEQ ID NO: 3867841 - RNA, 23 nt, Human
cuuuuuggucgaggaguaacaau

SEQ ID NO: 3867842 - RNA, 23 nt, Human
cuuuuugguguauagaaguuugu

SEQ ID NO: 3867843 - RNA, 11 nt, Human
cuuuuuguagg

SEQ ID NO: 3867844 - RNA, 18 nt, Human
cuuuuugugaaguuaggu

SEQ ID NO: 3867845 - RNA, 22 nt, Human
cuuuuugugauaugcacaaugu

SEQ ID NO: 3867846 - RNA, 15 nt, Human
cuuuuuguguuuuuu

SEQ ID NO: 3867847 - RNA, 17 nt, Human
cuuuuuuaaaaaagcaa

SEQ ID NO: 3867848 - RNA, 18 nt, Human
cuuuuuuaaaaucaacuu

SEQ ID NO: 3867849 - RNA, 18 nt, Human
cuuuuuuaaauaaacuuu

SEQ ID NO: 3867850 - RNA, 15 nt, Human
cuuuuuuaaauuuuc

SEQ ID NO: 3867851 - RNA, 18 nt, Human
cuuuuuuaaauuuucuuc

SEQ ID NO: 3867852 - RNA, 20 nt, Human
cuuuuuuaagauuuuucuca

SEQ ID NO: 3867853 - RNA, 13 nt, Human
cuuuuuuacaaag

SEQ ID NO: 3867854 - RNA, 15 nt, Human
cuuuuuuacacaaau

SEQ ID NO: 3867855 - RNA, 11 nt, Human
cuuuuuuacuc

SEQ ID NO: 3867856 - RNA, 20 nt, Human
cuuuuuuacucauugaaaug

SEQ ID NO: 3867857 - RNA, 21 nt, Human
cuuuuuuacucauugaaaugu

SEQ ID NO: 3867858 - RNA, 19 nt, Human
cuuuuuuauacacauaauu

SEQ ID NO: 3867859 - RNA, 18 nt, Human
cuuuuuuauacauaaaca

SEQ ID NO: 3867860 - RNA, 23 nt, Human
cuuuuuuaugugccguguuauug

SEQ ID NO: 3867861 - RNA, 14 nt, Human
cuuuuuuauuaauc

SEQ ID NO: 3867862 - RNA, 17 nt, Human
cuuuuuuauuaaucacu

SEQ ID NO: 3867863 - RNA, 19 nt, Human
cuuuuuuauuaaucacugu

SEQ ID NO: 3867864 - RNA, 21 nt, Human
cuuuuuuauuaaucacugugu

SEQ ID NO: 3867865 - RNA, 14 nt, Human
cuuuuuucaaaauc

SEQ ID NO: 3867866 - RNA, 15 nt, Human
cuuuuuucacuacau

SEQ ID NO: 3867867 - RNA, 16 nt, Human
gaaacuuuauacauua

SEQ ID NO: 3867868 - RNA, 22 nt, Human
gaaacuuuauucaaguaaaaau

SEQ ID NO: 3867869 - RNA, 16 nt, Human
gaaacuuucuuucuca

SEQ ID NO: 3867870 - RNA, 17 nt, Human
gaaacuuugggaaaaca

SEQ ID NO: 3867871 - RNA, 14 nt, Human
gaaacuuuuaacug

SEQ ID NO: 3867872 - RNA, 13 nt, Human
gaaacuuuuggaa

SEQ ID NO: 3867873 - RNA, 17 nt, Human
gaaacuuuuuuauuuaa

SEQ ID NO: 3867874 - RNA, 18 nt, Human
gaaacuuuuuuauuuaaa

SEQ ID NO: 3867875 - RNA, 16 nt, Human
gaaagaaaauaugcau

SEQ ID NO: 3867876 - RNA, 18 nt, Human
gaaagaaaaucaggcugg

SEQ ID NO: 3867877 - RNA, 21 nt, Human
gaaagaaacccgacagaggga

SEQ ID NO: 3867878 - RNA, 13 nt, Human
gaaagaaagagga

SEQ ID NO: 3867879 - RNA, 23 nt, Human
gaaagaaaguugcacggcugcug

SEQ ID NO: 3867880 - RNA, 11 nt, Human
gaaagaaauca

SEQ ID NO: 3867881 - RNA, 16 nt, Human
gaaagaaaucauguua

SEQ ID NO: 3867882 - RNA, 17 nt, Human
gaaagaaaucauguuau

SEQ ID NO: 3867883 - RNA, 20 nt, Human
gaaagaacgcugauuuaaag

SEQ ID NO: 3867884 - RNA, 16 nt, Human
gaaagaacggaagaag

SEQ ID NO: 3867885 - RNA, 22 nt, Human
gaaagaacugucauguaaacau

SEQ ID NO: 3867886 - RNA, 15 nt, Human
gaaagaagaaggugg

SEQ ID NO: 3867887 - RNA, 11 nt, Human
gaaagaagaga

SEQ ID NO: 3867888 - RNA, 11 nt, Human
gaaagaaggaa

SEQ ID NO: 3867889 - RNA, 18 nt, Human
gaaagaaguggggacaga

SEQ ID NO: 3867890 - RNA, 20 nt, Human
gaaagaaguguggggauuuu

SEQ ID NO: 3867891 - RNA, 19 nt, Human
gaaagaauagaaagaaagu

SEQ ID NO: 3867892 - RNA, 15 nt, Human
gaaagaauauauuua

SEQ ID NO: 3867893 - RNA, 18 nt, Human
gaaagaauauauuuauuu

SEQ ID NO: 3867894 - RNA, 16 nt, Human
gaaagaaugaaagagu

SEQ ID NO: 3867895 - RNA, 14 nt, Human
gaaagaauguaaag

SEQ ID NO: 3867896 - RNA, 15 nt, Human
gaaagaauguaaagc

SEQ ID NO: 3867897 - RNA, 22 nt, Human
gaaagaauguuacugccuuaau

SEQ ID NO: 3867898 - RNA, 19 nt, Human
gaaagacacugccugggcu

SEQ ID NO: 3867899 - RNA, 16 nt, Human
gaaagacagagcuggg

SEQ ID NO: 3867900 - RNA, 19 nt, Human
gaaagaccaggccaauguc

SEQ ID NO: 3867901 - RNA, 19 nt, Human
gaaagacgcacuuuggcuu

SEQ ID NO: 3867902 - RNA, 20 nt, Human
gaaagacuaucuaaauguug

SEQ ID NO: 3867903 - RNA, 17 nt, Human
gaaagacuauucaaaca

SEQ ID NO: 3867904 - RNA, 16 nt, Human
gaaagacuuccaaaga

SEQ ID NO: 3867905 - RNA, 20 nt, Human
gaaagacuuccaaagaaugu

SEQ ID NO: 3867906 - RNA, 15 nt, Human
gaaagagaagguggg

SEQ ID NO: 3867907 - RNA, 19 nt, Human
gaaagagagagaauucuuu

SEQ ID NO: 3867908 - RNA, 16 nt, Human
gaaagagauacagagg

SEQ ID NO: 3867909 - RNA, 23 nt, Human
gaaagagauaccaagaugccauc

SEQ ID NO: 3867910 - RNA, 21 nt, Human
gaaagagcacuuaagagaaua

SEQ ID NO: 3867911 - RNA, 22 nt, Human
gaaagagcacuuaagagaauau

SEQ ID NO: 3867912 - RNA, 13 nt, Human
gaaagaggaagca

SEQ ID NO: 3867913 - RNA, 21 nt, Human
gaaagaggcaccaggaagccg

SEQ ID NO: 3867914 - RNA, 20 nt, Human
gaaagaggcugaggccugga

SEQ ID NO: 3867915 - RNA, 14 nt, Human
gaaagaggugaccc

SEQ ID NO: 3867916 - RNA, 21 nt, Human
gaaagaggugaccccagggca

SEQ ID NO: 3867917 - RNA, 23 nt, Human
gaaagauggcugugccucugccu

SEQ ID NO: 3867918 - RNA, 13 nt, Human
gaaagcaaaaaug

SEQ ID NO: 3867919 - RNA, 15 nt, Human
gaaagcaaaaaugcu

SEQ ID NO: 3867920 - RNA, 12 nt, Human
gaaagcaaagca

SEQ ID NO: 3867921 - RNA, 11 nt, Human
gaaagcacaca

SEQ ID NO: 3867922 - RNA, 23 nt, Human
gaaagcacuccucccugauguac

SEQ ID NO: 3867923 - RNA, 13 nt, Human
gaaagcagaacag

SEQ ID NO: 3867924 - RNA, 14 nt, Human
gaaagcagaggcug

SEQ ID NO: 3867925 - RNA, 14 nt, Human
gaaagcagggacuu

SEQ ID NO: 3867926 - RNA, 18 nt, Human
gaaagcaguugagacaag

SEQ ID NO: 3867927 - RNA, 14 nt, Human
gaaagcauauugac

SEQ ID NO: 3867928 - RNA, 16 nt, Human
gaaagcaucaccucag

SEQ ID NO: 3867929 - RNA, 17 nt, Human
gaaagcaucaccucagg

SEQ ID NO: 3867930 - RNA, 17 nt, Human
gaaagcauccaugugug

SEQ ID NO: 3867931 - RNA, 22 nt, Human
gaaagcauguggcauguucauc

SEQ ID NO: 3867932 - RNA, 14 nt, Human
gaaagcauuugaau

SEQ ID NO: 3867933 - RNA, 17 nt, Human
gaaagcauuugaaugca

SEQ ID NO: 3867934 - RNA, 14 nt, Human
gaaagccaccucuc

SEQ ID NO: 3867935 - RNA, 19 nt, Human
gaaagccaccucucccuca

SEQ ID NO: 3867936 - RNA, 20 nt, Human
gaaagccaccucucccucaa

SEQ ID NO: 3867937 - RNA, 16 nt, Human
gaaagccagugacucc

SEQ ID NO: 3867938 - RNA, 19 nt, Human
gaaagccagugacuccagg

SEQ ID NO: 3867939 - RNA, 14 nt, Human
gaaagccauuuguu

SEQ ID NO: 3867940 - RNA, 14 nt, Human
gaaagccccugccc

SEQ ID NO: 3867941 - RNA, 22 nt, Human
gaaagcccugagcuuucugcua

SEQ ID NO: 3867942 - RNA, 17 nt, Human
gaaagcccugugcucca

SEQ ID NO: 3867943 - RNA, 16 nt, Human
gaaagccuaucaaaga

SEQ ID NO: 3867944 - RNA, 18 nt, Human
gaaagccucacugauaua

SEQ ID NO: 3867945 - RNA, 16 nt, Human
gaaagccucugcugcc

SEQ ID NO: 3867946 - RNA, 20 nt, Human
gaaagccuguuccccucacu

SEQ ID NO: 3867947 - RNA, 14 nt, Human
gaaagcgcagaugc

SEQ ID NO: 3867948 - RNA, 13 nt, Human
gaaagcuagagau

SEQ ID NO: 3867949 - RNA, 16 nt, Human
gaaagcugacuuggcu

SEQ ID NO: 3867950 - RNA, 21 nt, Human
gaaagcugacuuggcuggugu

SEQ ID NO: 3867951 - RNA, 22 nt, Human
gaaagcugacuuggcuggugug

SEQ ID NO: 3867952 - RNA, 22 nt, Human
gaaagcugagaacuccugacug

SEQ ID NO: 3867953 - RNA, 22 nt, Human
gaaagcugauuacugucaauaa

SEQ ID NO: 3867954 - RNA, 17 nt, Human
gaaagcugccugguaua

SEQ ID NO: 3867955 - RNA, 17 nt, Human
gaaagcugugaacaggc

SEQ ID NO: 3867956 - RNA, 18 nt, Human
gaaaggaaaaccugaaga

SEQ ID NO: 3867957 - RNA, 12 nt, Human
gaaaggaaaaga

SEQ ID NO: 3867958 - RNA, 14 nt, Human
gaaaggaaaagaaa

SEQ ID NO: 3867959 - RNA, 18 nt, Human
gaaaggaagcuccacugu

SEQ ID NO: 3867960 - RNA, 22 nt, Human
gaaaggaagcuccacugucacc

SEQ ID NO: 3867961 - RNA, 21 nt, Human
gaaaggaagugggacuggcac

SEQ ID NO: 3867962 - RNA, 20 nt, Human
gaaaggaaugcaaagaugaa

SEQ ID NO: 3867963 - RNA, 16 nt, Human
gaaaggaccugcaaac

SEQ ID NO: 3867964 - RNA, 21 nt, Human
gaaaggacucugggguuuuua

SEQ ID NO: 3867965 - RNA, 11 nt, Human
gaaaggagacu

SEQ ID NO: 3867966 - RNA, 12 nt, Human
gaaaggagaugu

SEQ ID NO: 3867967 - RNA, 20 nt, Human
gaaaggaggcaugccucuga

SEQ ID NO: 3867968 - RNA, 20 nt, Human
gaaaggauauuuaagaaaau

SEQ ID NO: 3867969 - RNA, 20 nt, Human
gaaaggauguaaacagugcc

SEQ ID NO: 3867970 - RNA, 16 nt, Human
gaaaggccagcacucg

SEQ ID NO: 3867971 - RNA, 13 nt, Human
gaaaggccugcac

SEQ ID NO: 3867972 - RNA, 18 nt, Human
gaaaggcuccaggagcag

SEQ ID NO: 3867973 - RNA, 18 nt, Human
gaaaggcugcuguacuga

SEQ ID NO: 3867974 - RNA, 20 nt, Human
gaaaggcugcuguacugaag

SEQ ID NO: 3867975 - RNA, 14 nt, Human
gaaaggcuuuuaaa

SEQ ID NO: 3867976 - RNA, 22 nt, Human
gaaagggagcuaucaggaacag

SEQ ID NO: 3867977 - RNA, 13 nt, Human
gaaagggagggcu

SEQ ID NO: 3867978 - RNA, 20 nt, Human
gaaagggagggcucugaggc

SEQ ID NO: 3867979 - RNA, 21 nt, Human
gaaagggagggcucugaggcg

SEQ ID NO: 3867980 - RNA, 20 nt, Human
gaaagggauuuucagcccuc

SEQ ID NO: 3867981 - RNA, 15 nt, Human
gaaagggccaggaga

SEQ ID NO: 3867982 - RNA, 13 nt, Human
gaaagggcccaga

SEQ ID NO: 3867983 - RNA, 15 nt, Human
gaaagggcccagaga

SEQ ID NO: 3867984 - RNA, 13 nt, Human
gaaaggggagccc

SEQ ID NO: 3867985 - RNA, 17 nt, Human
gaaagggggucccagug

SEQ ID NO: 3867986 - RNA, 16 nt, Human
gaaagggguuggggug

SEQ ID NO: 3867987 - RNA, 17 nt, Human
gaaaggguucuguaaaa

SEQ ID NO: 3867988 - RNA, 16 nt, Human
gaaaggucaccucacu

SEQ ID NO: 3867989 - RNA, 22 nt, Human
gaaaggugaguuugagcugccu

SEQ ID NO: 3867990 - RNA, 18 nt, Human
gaaaggugccauggaaga

SEQ ID NO: 3867991 - RNA, 22 nt, Human
gaaaggugccauggaagaggcu

SEQ ID NO: 3867992 - RNA, 17 nt, Human
gaaaggugguguuucug

SEQ ID NO: 3867993 - RNA, 20 nt, Human
gaaaggugugagacugggaa

SEQ ID NO: 3867994 - RNA, 15 nt, Human
gaaagguucugcccg

SEQ ID NO: 3867995 - RNA, 16 nt, Human
gaaagguuuacauugu

SEQ ID NO: 3867996 - RNA, 20 nt, Human
gaaagguuugagaagcacug

SEQ ID NO: 3867997 - RNA, 18 nt, Human
gaaaguacacucugcugu

SEQ ID NO: 3867998 - RNA, 21 nt, Human
gaaaguagggggcuuucuggg

SEQ ID NO: 3867999 - RNA, 17 nt, Human
gaaagucagaugcccag

SEQ ID NO: 3868000 - RNA, 19 nt, Human
gaaagucaugaacacauca

SEQ ID NO: 3868001 - RNA, 15 nt, Human
gaaagucuguccuug

SEQ ID NO: 3868002 - RNA, 19 nt, Human
gaaagucuugugacuagug

SEQ ID NO: 3868003 - RNA, 20 nt, Human
gaaagucuugugacuagugc

SEQ ID NO: 3868004 - RNA, 22 nt, Human
gaaagucuugugacuagugcug

SEQ ID NO: 3868005 - RNA, 16 nt, Human
gaaagugaaaguccag

SEQ ID NO: 3868006 - RNA, 21 nt, Human
gaaagugaauaaacuucagca

SEQ ID NO: 3868007 - RNA, 16 nt, Human
gaaagugaauuugaau

SEQ ID NO: 3868008 - RNA, 17 nt, Human
gaaagugaauuugaaug

SEQ ID NO: 3868009 - RNA, 15 nt, Human
gaaagugagcagugu

SEQ ID NO: 3868010 - RNA, 14 nt, Human
gaaagugcauuuuu

SEQ ID NO: 3868011 - RNA, 15 nt, Human
gaaagugccuuucag

SEQ ID NO: 3868012 - RNA, 13 nt, Human
gaaugaugaagcu

SEQ ID NO: 3868013 - RNA, 14 nt, Human
gaaugaugccauga

SEQ ID NO: 3868014 - RNA, 14 nt, Human
gaaugauuaugaau

SEQ ID NO: 3868015 - RNA, 22 nt, Human
gaaugauuaugaauuacauuug

SEQ ID NO: 3868016 - RNA, 23 nt, Human
gaaugauucuaauuuuuaagcaa

SEQ ID NO: 3868017 - RNA, 22 nt, Human
gaaugauuuccaaagagaaaaa

SEQ ID NO: 3868018 - RNA, 16 nt, Human
gaaugauuuuuagaug

SEQ ID NO: 3868019 - RNA, 14 nt, Human
gaaugauuuuucuu

SEQ ID NO: 3868020 - RNA, 18 nt, Human
gaaugcacaaacagaggc

SEQ ID NO: 3868021 - RNA, 19 nt, Human
gaaugcacaaacagaggcc

SEQ ID NO: 3868022 - RNA, 15 nt, Human
gaaugcacagauaua

SEQ ID NO: 3868023 - RNA, 20 nt, Human
gaaugcagucuguccaggcu

SEQ ID NO: 3868024 - RNA, 22 nt, Human
gaaugcagucuguccaggcucg

SEQ ID NO: 3868025 - RNA, 21 nt, Human
gaaugcaugcuuuccauauuu

SEQ ID NO: 3868026 - RNA, 14 nt, Human
gaaugcauuuuguu

SEQ ID NO: 3868027 - RNA, 17 nt, Human
gaaugccacccacaucu

SEQ ID NO: 3868028 - RNA, 21 nt, Human
gaaugccacugccuucgcuuc

SEQ ID NO: 3868029 - RNA, 22 nt, Human
gaaugcccacaggcaaaugcau

SEQ ID NO: 3868030 - RNA, 18 nt, Human
gaaugcccccagcuggcc

SEQ ID NO: 3868031 - RNA, 21 nt, Human
gaaugccucaaugugaccagg

SEQ ID NO: 3868032 - RNA, 14 nt, Human
gaaugccuccugca

SEQ ID NO: 3868033 - RNA, 16 nt, Human
gaaugccuccuguggg

SEQ ID NO: 3868034 - RNA, 11 nt, Human
gaaugcucccc

SEQ ID NO: 3868035 - RNA, 20 nt, Human
gaaugcucccccauccuccc

SEQ ID NO: 3868036 - RNA, 21 nt, Human
gaaugcucccccauccucccc

SEQ ID NO: 3868037 - RNA, 13 nt, Human
gaaugcugccagu

SEQ ID NO: 3868038 - RNA, 15 nt, Human
gaaugcugccagugu

SEQ ID NO: 3868039 - RNA, 21 nt, Human
gaaugcugcccgcucugcaga

SEQ ID NO: 3868040 - RNA, 23 nt, Human
gaaugcuggacuggaggccccug

SEQ ID NO: 3868041 - RNA, 13 nt, Human
gaaugcugggacu

SEQ ID NO: 3868042 - RNA, 22 nt, Human
gaaugcugguuuuccuaaaugc

SEQ ID NO: 3868043 - RNA, 22 nt, Human
gaaugcuucuaaguaaauacaa

SEQ ID NO: 3868044 - RNA, 14 nt, Human
gaaugcuuggaaua

SEQ ID NO: 3868045 - RNA, 21 nt, Human
gaaugcuuuuagugugugcau

SEQ ID NO: 3868046 - RNA, 22 nt, Human
gaauggaaggguucuggcugcc

SEQ ID NO: 3868047 - RNA, 21 nt, Human
gaauggaggggcagagccagg

SEQ ID NO: 3868048 - RNA, 13 nt, Human
gaauggcauuugc

SEQ ID NO: 3868049 - RNA, 17 nt, Human
gaauggccugccuugaa

SEQ ID NO: 3868050 - RNA, 16 nt, Human
gaauggcuuuguauag

SEQ ID NO: 3868051 - RNA, 21 nt, Human
gaaugggaucaugaaaguaga

SEQ ID NO: 3868052 - RNA, 18 nt, Human
gaauggggaucacagaga

SEQ ID NO: 3868053 - RNA, 22 nt, Human
gaaugguccgugcuaaggacuu

SEQ ID NO: 3868054 - RNA, 17 nt, Human
gaauggugcauuguaua

SEQ ID NO: 3868055 - RNA, 13 nt, Human
gaaugguggugga

SEQ ID NO: 3868056 - RNA, 16 nt, Human
gaaugguuccaugccu

SEQ ID NO: 3868057 - RNA, 13 nt, Human
gaauguaaagcaa

SEQ ID NO: 3868058 - RNA, 15 nt, Human
gaauguaaagcuugu

SEQ ID NO: 3868059 - RNA, 14 nt, Human
gaauguaaauuugu

SEQ ID NO: 3868060 - RNA, 11 nt, Human
gaauguaauca

SEQ ID NO: 3868061 - RNA, 18 nt, Human
gaauguaaucaauguuuc

SEQ ID NO: 3868062 - RNA, 14 nt, Human
gaauguaauuugug

SEQ ID NO: 3868063 - RNA, 23 nt, Human
gaauguaauuuguguaauaaagu

SEQ ID NO: 3868064 - RNA, 15 nt, Human
gaauguagcugguuu

SEQ ID NO: 3868065 - RNA, 20 nt, Human
gaauguagcugguuuccuca

SEQ ID NO: 3868066 - RNA, 14 nt, Human
gaauguaguuugag

SEQ ID NO: 3868067 - RNA, 22 nt, Human
gaauguaguuugaggaaauuug

SEQ ID NO: 3868068 - RNA, 15 nt, Human
gaauguauaguauuu

SEQ ID NO: 3868069 - RNA, 15 nt, Human
gaauguaucugugaa

SEQ ID NO: 3868070 - RNA, 16 nt, Human
gaauguaucugugaag

SEQ ID NO: 3868071 - RNA, 16 nt, Human
gaauguaugcuucaua

SEQ ID NO: 3868072 - RNA, 14 nt, Human
gaauguauguaaug

SEQ ID NO: 3868073 - RNA, 19 nt, Human
gaauguauuauucugcagc

SEQ ID NO: 3868074 - RNA, 21 nt, Human
gaauguauuauucugcagcau

SEQ ID NO: 3868075 - RNA, 13 nt, Human
gaauguauuguac

SEQ ID NO: 3868076 - RNA, 21 nt, Human
gaauguauuguaccuuuuaac

SEQ ID NO: 3868077 - RNA, 15 nt, Human
gaaugucacuucugg

SEQ ID NO: 3868078 - RNA, 14 nt, Human
gaaugucagauucc

SEQ ID NO: 3868079 - RNA, 18 nt, Human
gaaugucaguauguggaa

SEQ ID NO: 3868080 - RNA, 19 nt, Human
gaaugucaguauguggaag

SEQ ID NO: 3868081 - RNA, 17 nt, Human
gaaugucaguuguuauu

SEQ ID NO: 3868082 - RNA, 22 nt, Human
gaaugucaguuguuauuuauug

SEQ ID NO: 3868083 - RNA, 16 nt, Human
gaaugugaagccuucc

SEQ ID NO: 3868084 - RNA, 22 nt, Human
gaauguggccccugaacaagaa

SEQ ID NO: 3868085 - RNA, 18 nt, Human
gaauguggcuugagaaau

SEQ ID NO: 3868086 - RNA, 16 nt, Human
gaauguggucucagga

SEQ ID NO: 3868087 - RNA, 17 nt, Human
gaauguggucucaggau

SEQ ID NO: 3868088 - RNA, 12 nt, Human
gaaugugucagg

SEQ ID NO: 3868089 - RNA, 12 nt, Human
gaaugugucuuu

SEQ ID NO: 3868090 - RNA, 13 nt, Human
gaaugugucuuua

SEQ ID NO: 3868091 - RNA, 15 nt, Human
gaaugugucuuuaga

SEQ ID NO: 3868092 - RNA, 13 nt, Human
gaauguguuucac

SEQ ID NO: 3868093 - RNA, 22 nt, Human
gaauguguuucacaguuugaaa

SEQ ID NO: 3868094 - RNA, 13 nt, Human
gaauguuaaauaa

SEQ ID NO: 3868095 - RNA, 14 nt, Human
gaauguuaaauaaa

SEQ ID NO: 3868096 - RNA, 16 nt, Human
gaauguuaaauaaauu

SEQ ID NO: 3868097 - RNA, 21 nt, Human
gaauguuaaauaaauuguaua

SEQ ID NO: 3868098 - RNA, 13 nt, Human
gaauguuaauuuu

SEQ ID NO: 3868099 - RNA, 22 nt, Human
gaauguuaauuuuuugguacaa

SEQ ID NO: 3868100 - RNA, 20 nt, Human
gaauguugcaaugugaaaaa

SEQ ID NO: 3868101 - RNA, 20 nt, Human
gaauguuggauaaggaauua

SEQ ID NO: 3868102 - RNA, 14 nt, Human
gaauguugggacug

SEQ ID NO: 3868103 - RNA, 23 nt, Human
gaauguugggacugcuaaauaaa

SEQ ID NO: 3868104 - RNA, 22 nt, Human
gaauguugguuuacuuucaaau

SEQ ID NO: 3868105 - RNA, 21 nt, Human
gaauguuuaaagaucaugaca

SEQ ID NO: 3868106 - RNA, 20 nt, Human
gaauguuuacacucuuugua

SEQ ID NO: 3868107 - RNA, 21 nt, Human
gaauguuuacacucuuuguaa

SEQ ID NO: 3868108 - RNA, 14 nt, Human
gaauguuuauuccu

SEQ ID NO: 3868109 - RNA, 17 nt, Human
gaauguuugccucugcc

SEQ ID NO: 3868110 - RNA, 17 nt, Human
gaauguuuuagcacagc

SEQ ID NO: 3868111 - RNA, 12 nt, Human
gaauuaaaacaa

SEQ ID NO: 3868112 - RNA, 13 nt, Human
gaauuaaaacaau

SEQ ID NO: 3868113 - RNA, 15 nt, Human
gaauuaaaacaaugu

SEQ ID NO: 3868114 - RNA, 11 nt, Human
gaauuaaaacu

SEQ ID NO: 3868115 - RNA, 16 nt, Human
gaauuaaaacuucuua

SEQ ID NO: 3868116 - RNA, 18 nt, Human
gaauuaaaacuucuuaaa

SEQ ID NO: 3868117 - RNA, 20 nt, Human
gaauuaaaaggauaguauuu

SEQ ID NO: 3868118 - RNA, 14 nt, Human
gaauuaaaguacuu

SEQ ID NO: 3868119 - RNA, 22 nt, Human
gaauuaaaguggaccaauaggg

SEQ ID NO: 3868120 - RNA, 16 nt, Human
gaauuaaccuggugcu

SEQ ID NO: 3868121 - RNA, 17 nt, Human
gaauuaacuccauucca

SEQ ID NO: 3868122 - RNA, 19 nt, Human
gaauuaaugacagagccag

SEQ ID NO: 3868123 - RNA, 21 nt, Human
gaauuacauguaaaacauuau

SEQ ID NO: 3868124 - RNA, 22 nt, Human
gaauuacauguaaaacauuauc

SEQ ID NO: 3868125 - RNA, 19 nt, Human
gaauuacgugcucuguggg

SEQ ID NO: 3868126 - RNA, 18 nt, Human
gaauuagaaacauaaaua

SEQ ID NO: 3868127 - RNA, 15 nt, Human
gaauuagauuauauu

SEQ ID NO: 3868128 - RNA, 17 nt, Human
gaauuagauuucuauag

SEQ ID NO: 3868129 - RNA, 15 nt, Human
gaauuagcugcuucu

SEQ ID NO: 3868130 - RNA, 17 nt, Human
gaauuaggcuguaacua

SEQ ID NO: 3868131 - RNA, 18 nt, Human
gaauuaggcuguaacuac

SEQ ID NO: 3868132 - RNA, 16 nt, Human
gaauuaguaaaguuag

SEQ ID NO: 3868133 - RNA, 11 nt, Human
gaauuaguuuu

SEQ ID NO: 3868134 - RNA, 21 nt, Human
gaauuauaacuguaaagaugu

SEQ ID NO: 3868135 - RNA, 18 nt, Human
gaauuaucccuuuucuug

SEQ ID NO: 3868136 - RNA, 21 nt, Human
gaauuaugcuuuguagaguuu

SEQ ID NO: 3868137 - RNA, 16 nt, Human
gaauuauucaauuuau

SEQ ID NO: 3868138 - RNA, 16 nt, Human
gaauuauugacacuga

SEQ ID NO: 3868139 - RNA, 17 nt, Human
gaauuauugacacugaa

SEQ ID NO: 3868140 - RNA, 12 nt, Human
gaauuauuuugu

SEQ ID NO: 3868141 - RNA, 16 nt, Human
gaauuauuuuuuuucu

SEQ ID NO: 3868142 - RNA, 16 nt, Human
gaauucaaacuggggc

SEQ ID NO: 3868143 - RNA, 18 nt, Human
gaauucaaauuuuaucug

SEQ ID NO: 3868144 - RNA, 12 nt, Human
gaauuccaaagc

SEQ ID NO: 3868145 - RNA, 14 nt, Human
gaauuccaaagcaa

SEQ ID NO: 3868146 - RNA, 13 nt, Human
gaauuccaaggag

SEQ ID NO: 3868147 - RNA, 12 nt, Human
gaauucccucac

SEQ ID NO: 3868148 - RNA, 21 nt, Human
gaauucuguauagauuagaau

SEQ ID NO: 3868149 - RNA, 22 nt, Human
gaauucuguauagauuagaauu

SEQ ID NO: 3868150 - RNA, 22 nt, Human
gaauucuuacauguuuucuuug

SEQ ID NO: 3868151 - RNA, 11 nt, Human
gaauucuuccu

SEQ ID NO: 3868152 - RNA, 20 nt, Human
gaauucuugguugaggaaac

SEQ ID NO: 3868153 - RNA, 16 nt, Human
gaauugaacccaggag

SEQ ID NO: 3868154 - RNA, 21 nt, Human
gaauugacccacaagaaauga

SEQ ID NO: 3868155 - RNA, 19 nt, Human
gaauugagccuaaaaauaa

SEQ ID NO: 3868156 - RNA, 14 nt, Human
gaauugauaauaaa

SEQ ID NO: 3868157 - RNA, 14 nt, Human
gacaguuucuuagc

SEQ ID NO: 3868158 - RNA, 21 nt, Human
gacaguuucuuagcuuuuuaa

SEQ ID NO: 3868159 - RNA, 16 nt, Human
gacaguuuguaaaugu

SEQ ID NO: 3868160 - RNA, 19 nt, Human
gacaguuuguaaauguuau

SEQ ID NO: 3868161 - RNA, 14 nt, Human
gacaguuuuucugu

SEQ ID NO: 3868162 - RNA, 21 nt, Human
gacauaaaggaaaagacacau

SEQ ID NO: 3868163 - RNA, 17 nt, Human
gacauaaaguugauaaa

SEQ ID NO: 3868164 - RNA, 20 nt, Human
gacauaaaguugauaaagau

SEQ ID NO: 3868165 - RNA, 14 nt, Human
gacauaacguuuuu

SEQ ID NO: 3868166 - RNA, 23 nt, Human
gacauaauauauucuauuuuuau

SEQ ID NO: 3868167 - RNA, 17 nt, Human
gacauacccccuccccc

SEQ ID NO: 3868168 - RNA, 19 nt, Human
gacauacuugaagggccag

SEQ ID NO: 3868169 - RNA, 15 nt, Human
gacauagagguauau

SEQ ID NO: 3868170 - RNA, 14 nt, Human
gacauagauauuuu

SEQ ID NO: 3868171 - RNA, 18 nt, Human
gacauagcccaucccugc

SEQ ID NO: 3868172 - RNA, 22 nt, Human
gacauagcccaucccugccugg

SEQ ID NO: 3868173 - RNA, 17 nt, Human
gacauauauuuuuuaaa

SEQ ID NO: 3868174 - RNA, 21 nt, Human
gacauauauuuuuuaaaauaa

SEQ ID NO: 3868175 - RNA, 15 nt, Human
gacauaucaucugug

SEQ ID NO: 3868176 - RNA, 14 nt, Human
gacauaucuacacu

SEQ ID NO: 3868177 - RNA, 14 nt, Human
gacauauuuaacug

SEQ ID NO: 3868178 - RNA, 16 nt, Human
gacauauuuaauguuu

SEQ ID NO: 3868179 - RNA, 14 nt, Human
gacaucaacagaua

SEQ ID NO: 3868180 - RNA, 23 nt, Human
gacaucaacugcaucaagaugug

SEQ ID NO: 3868181 - RNA, 19 nt, Human
gacaucaagcacagaagga

SEQ ID NO: 3868182 - RNA, 13 nt, Human
gacaucacagcag

SEQ ID NO: 3868183 - RNA, 15 nt, Human
gacaucacagcagcc

SEQ ID NO: 3868184 - RNA, 13 nt, Human
gacaucagcauca

SEQ ID NO: 3868185 - RNA, 18 nt, Human
gacaucagcaucaccuag

SEQ ID NO: 3868186 - RNA, 13 nt, Human
gacaucagccagc

SEQ ID NO: 3868187 - RNA, 16 nt, Human
gacauccaagcuuccu

SEQ ID NO: 3868188 - RNA, 17 nt, Human
gacauccaagcuuccuu

SEQ ID NO: 3868189 - RNA, 17 nt, Human
gacauccauaaagaagc

SEQ ID NO: 3868190 - RNA, 18 nt, Human
gacauccauaaagaagca

SEQ ID NO: 3868191 - RNA, 22 nt, Human
gacauccauguuuguaaaacua

SEQ ID NO: 3868192 - RNA, 20 nt, Human
gacauccugucaucugagaa

SEQ ID NO: 3868193 - RNA, 13 nt, Human
gacaucucagggg

SEQ ID NO: 3868194 - RNA, 18 nt, Human
gacaucucaggggccaga

SEQ ID NO: 3868195 - RNA, 16 nt, Human
gacaucucugacuuuc

SEQ ID NO: 3868196 - RNA, 20 nt, Human
gacaucuucaaagcuugaag

SEQ ID NO: 3868197 - RNA, 13 nt, Human
gacaucuuuuuaa

SEQ ID NO: 3868198 - RNA, 19 nt, Human
gacaucuuuuuaaagcuua

SEQ ID NO: 3868199 - RNA, 11 nt, Human
gacaugaauuu

SEQ ID NO: 3868200 - RNA, 17 nt, Human
gacaugaauuuuagcuu

SEQ ID NO: 3868201 - RNA, 20 nt, Human
gacaugauuagcagaagaaa

SEQ ID NO: 3868202 - RNA, 14 nt, Human
gacaugauuccuuc

SEQ ID NO: 3868203 - RNA, 22 nt, Human
gacaugauuccuuccuguucug

SEQ ID NO: 3868204 - RNA, 14 nt, Human
gacaugauuuccuu

SEQ ID NO: 3868205 - RNA, 16 nt, Human
gacaugcacugacccu

SEQ ID NO: 3868206 - RNA, 22 nt, Human
gacaugcccucccuucucccug

SEQ ID NO: 3868207 - RNA, 14 nt, Human
gacaugcgggcugg

SEQ ID NO: 3868208 - RNA, 23 nt, Human
gacaugcgguagccagcacacag

SEQ ID NO: 3868209 - RNA, 18 nt, Human
gacaugcugaagccaaag

SEQ ID NO: 3868210 - RNA, 19 nt, Human
gacaugcugaagccaaagc

SEQ ID NO: 3868211 - RNA, 21 nt, Human
gacaugcugacuguccucucc

SEQ ID NO: 3868212 - RNA, 17 nt, Human
gacauggagacuccugc

SEQ ID NO: 3868213 - RNA, 19 nt, Human
gacauggagacuccugccc

SEQ ID NO: 3868214 - RNA, 15 nt, Human
gacauggagguucua

SEQ ID NO: 3868215 - RNA, 21 nt, Human
gacauggagguucuaaggccu

SEQ ID NO: 3868216 - RNA, 18 nt, Human
gacauggcuucugaaccu

SEQ ID NO: 3868217 - RNA, 19 nt, Human
gacauggcuuucagaaaac

SEQ ID NO: 3868218 - RNA, 14 nt, Human
gacaugggaaaggg

SEQ ID NO: 3868219 - RNA, 18 nt, Human
gacaugggaaaggggaag

SEQ ID NO: 3868220 - RNA, 17 nt, Human
gacauggugaaaauauu

SEQ ID NO: 3868221 - RNA, 14 nt, Human
gacauggugccuga

SEQ ID NO: 3868222 - RNA, 16 nt, Human
gacauggugccugaga

SEQ ID NO: 3868223 - RNA, 17 nt, Human
gacauggugccugagag

SEQ ID NO: 3868224 - RNA, 19 nt, Human
gacauggugccugagaggc

SEQ ID NO: 3868225 - RNA, 20 nt, Human
gacauggugccugagaggca

SEQ ID NO: 3868226 - RNA, 21 nt, Human
gacaugucuuuucuugcauga

SEQ ID NO: 3868227 - RNA, 12 nt, Human
gacaugugaaac

SEQ ID NO: 3868228 - RNA, 15 nt, Human
gacaugugaaaccuu

SEQ ID NO: 3868229 - RNA, 18 nt, Human
gacaugugaaaccuuuuu

SEQ ID NO: 3868230 - RNA, 13 nt, Human
gacauguggaaag

SEQ ID NO: 3868231 - RNA, 15 nt, Human
gacauguucccuucu

SEQ ID NO: 3868232 - RNA, 18 nt, Human
gacauguuuuuguuuucu

SEQ ID NO: 3868233 - RNA, 23 nt, Human
gacauuaaaucuaugaaguauau

SEQ ID NO: 3868234 - RNA, 19 nt, Human
gacauuaacaaauaaaaaa

SEQ ID NO: 3868235 - RNA, 12 nt, Human
gacauuaacagu

SEQ ID NO: 3868236 - RNA, 21 nt, Human
gacauuaacucauuagacugg

SEQ ID NO: 3868237 - RNA, 22 nt, Human
gacauuaacucauuagacugga

SEQ ID NO: 3868238 - RNA, 16 nt, Human
gacauuaagaauguug

SEQ ID NO: 3868239 - RNA, 21 nt, Human
gacauuaagcaucacaaauga

SEQ ID NO: 3868240 - RNA, 23 nt, Human
gacauuaugugguuuuagauuuu

SEQ ID NO: 3868241 - RNA, 20 nt, Human
gacauuaugugugcaugugu

SEQ ID NO: 3868242 - RNA, 15 nt, Human
gacauucaccugccc

SEQ ID NO: 3868243 - RNA, 23 nt, Human
gacauucaguauauaaaauaugu

SEQ ID NO: 3868244 - RNA, 18 nt, Human
gacauucaugccuggcuu

SEQ ID NO: 3868245 - RNA, 14 nt, Human
gacauucugaaugc

SEQ ID NO: 3868246 - RNA, 20 nt, Human
gacauucugaaugcuucuaa

SEQ ID NO: 3868247 - RNA, 22 nt, Human
gacauucugauucgaaugacac

SEQ ID NO: 3868248 - RNA, 17 nt, Human
gacauucugccaggccc

SEQ ID NO: 3868249 - RNA, 23 nt, Human
gacauucugucgccuuagcaugu

SEQ ID NO: 3868250 - RNA, 18 nt, Human
gacauugccaaaaaggau

SEQ ID NO: 3868251 - RNA, 14 nt, Human
gacauugcguuuga

SEQ ID NO: 3868252 - RNA, 18 nt, Human
gacauugcuaagaugcuc

SEQ ID NO: 3868253 - RNA, 23 nt, Human
gacauuggcaccuaauccaggca

SEQ ID NO: 3868254 - RNA, 21 nt, Human
gacauugggucuauuccagcu

SEQ ID NO: 3868255 - RNA, 23 nt, Human
gacauugggucuauuccagcuca

SEQ ID NO: 3868256 - RNA, 19 nt, Human
gacauuguagagcuucugg

SEQ ID NO: 3868257 - RNA, 13 nt, Human
gacauugucaaua

SEQ ID NO: 3868258 - RNA, 18 nt, Human
gacauuguggcacauucu

SEQ ID NO: 3868259 - RNA, 17 nt, Human
gacauuguuggcagcau

SEQ ID NO: 3868260 - RNA, 15 nt, Human
gacauuuagaagaaa

SEQ ID NO: 3868261 - RNA, 11 nt, Human
gacauuuccca

SEQ ID NO: 3868262 - RNA, 17 nt, Human
gacauuucuaauuccug

SEQ ID NO: 3868263 - RNA, 19 nt, Human
gacauuucucuuacugcaa

SEQ ID NO: 3868264 - RNA, 19 nt, Human
gacauuucuuuucuuuuua

SEQ ID NO: 3868265 - RNA, 15 nt, Human
gacauuugccuugcu

SEQ ID NO: 3868266 - RNA, 16 nt, Human
gacauuugcucaugga

SEQ ID NO: 3868267 - RNA, 22 nt, Human
gacauuugggagacaugugaca

SEQ ID NO: 3868268 - RNA, 23 nt, Human
gacauuugggagacaugugacau

SEQ ID NO: 3868269 - RNA, 15 nt, Human
gacauuugucauuuu

SEQ ID NO: 3868270 - RNA, 20 nt, Human
gacauuugucauuuucauua

SEQ ID NO: 3868271 - RNA, 20 nt, Human
gacauuuuaaaaaaugguca

SEQ ID NO: 3868272 - RNA, 14 nt, Human
gacauuuuaacaag

SEQ ID NO: 3868273 - RNA, 19 nt, Human
gaccaaaaaccaguauugu

SEQ ID NO: 3868274 - RNA, 17 nt, Human
gaccaaaauccccuucu

SEQ ID NO: 3868275 - RNA, 19 nt, Human
gaccaaaauccccuucuca

SEQ ID NO: 3868276 - RNA, 21 nt, Human
gaccaaauggaaacagaggac

SEQ ID NO: 3868277 - RNA, 17 nt, Human
gaccaacaagggcagug

SEQ ID NO: 3868278 - RNA, 20 nt, Human
gaccaacccuggggaaggag

SEQ ID NO: 3868279 - RNA, 14 nt, Human
gaccaaccugacca

SEQ ID NO: 3868280 - RNA, 20 nt, Human
gaccaacuagacauucuguc

SEQ ID NO: 3868281 - RNA, 14 nt, Human
gaccaacugucacu

SEQ ID NO: 3868282 - RNA, 12 nt, Human
gaccaacugugu

SEQ ID NO: 3868283 - RNA, 14 nt, Human
gaccaagagagaaa

SEQ ID NO: 3868284 - RNA, 15 nt, Human
gaccaagagagaaag

SEQ ID NO: 3868285 - RNA, 16 nt, Human
gaccaagagagaaaga

SEQ ID NO: 3868286 - RNA, 12 nt, Human
gaccaagcagga

SEQ ID NO: 3868287 - RNA, 15 nt, Human
gaccaagcaggaagc

SEQ ID NO: 3868288 - RNA, 19 nt, Human
gaccaagcaggaagcucag

SEQ ID NO: 3868289 - RNA, 15 nt, Human
gaccaagcaucuugg

SEQ ID NO: 3868290 - RNA, 11 nt, Human
gaccaaggaac

SEQ ID NO: 3868291 - RNA, 23 nt, Human
gaccaaggaacaaaaaaaccaca

SEQ ID NO: 3868292 - RNA, 17 nt, Human
gaccaaggcaaggcagg

SEQ ID NO: 3868293 - RNA, 19 nt, Human
gaccaaggcaaggcaggug

SEQ ID NO: 3868294 - RNA, 14 nt, Human
gaccaaguuauaaa

SEQ ID NO: 3868295 - RNA, 21 nt, Human
gaccaaguuauaaaucaaugu

SEQ ID NO: 3868296 - RNA, 16 nt, Human
gaccaauagcccacag

SEQ ID NO: 3868297 - RNA, 20 nt, Human
gaccaauauuauacuaagaa

SEQ ID NO: 3868298 - RNA, 21 nt, Human
gaccaauauuguacaguuuuu

SEQ ID NO: 3868299 - RNA, 13 nt, Human
gaccaauucaacc

SEQ ID NO: 3868300 - RNA, 17 nt, Human
gaccaauugugcugcca

SEQ ID NO: 3868301 - RNA, 21 nt, Human
gaccucaggugauccacccac

SEQ ID NO: 3868302 - RNA, 19 nt, Human
gaccucaggugauccgccc

SEQ ID NO: 3868303 - RNA, 20 nt, Human
gaccucaguuuuaucauuuu

SEQ ID NO: 3868304 - RNA, 19 nt, Human
gaccucaucaggaugaacc

SEQ ID NO: 3868305 - RNA, 20 nt, Human
gaccuccacacccgugagaa

SEQ ID NO: 3868306 - RNA, 18 nt, Human
gaccuccagcuuuccugu

SEQ ID NO: 3868307 - RNA, 16 nt, Human
gaccuccccagccccu

SEQ ID NO: 3868308 - RNA, 15 nt, Human
gaccucccccuccuu

SEQ ID NO: 3868309 - RNA, 19 nt, Human
gaccucccccuccuuccca

SEQ ID NO: 3868310 - RNA, 21 nt, Human
gaccucccuuccgacccucug

SEQ ID NO: 3868311 - RNA, 22 nt, Human
gaccucccuuccgacccucugg

SEQ ID NO: 3868312 - RNA, 23 nt, Human
gaccucccuuccgacccucuggg

SEQ ID NO: 3868313 - RNA, 19 nt, Human
gaccuccucccuguuauuu

SEQ ID NO: 3868314 - RNA, 21 nt, Human
gaccucgagcagaugaugcca

SEQ ID NO: 3868315 - RNA, 16 nt, Human
gaccucguccuccccc

SEQ ID NO: 3868316 - RNA, 22 nt, Human
gaccucguccucccccugccag

SEQ ID NO: 3868317 - RNA, 18 nt, Human
gaccucgugccaccccga

SEQ ID NO: 3868318 - RNA, 21 nt, Human
gaccucuacuuuccaggcuag

SEQ ID NO: 3868319 - RNA, 15 nt, Human
gaccucugacagcag

SEQ ID NO: 3868320 - RNA, 14 nt, Human
gaccucugcagcaa

SEQ ID NO: 3868321 - RNA, 16 nt, Human
gaccucugcagcaaua

SEQ ID NO: 3868322 - RNA, 18 nt, Human
gaccucugcagcaauaaa

SEQ ID NO: 3868323 - RNA, 22 nt, Human
gaccucugcagcaauaaagcag

SEQ ID NO: 3868324 - RNA, 15 nt, Human
gaccucugcucugag

SEQ ID NO: 3868325 - RNA, 23 nt, Human
gaccucuggauuaggucucuguu

SEQ ID NO: 3868326 - RNA, 10 nt, Human
gaccucuggg

SEQ ID NO: 3868327 - RNA, 22 nt, Human
gaccucuugcugucucugcucg

SEQ ID NO: 3868328 - RNA, 19 nt, Human
gaccugaaauuccaaaguc

SEQ ID NO: 3868329 - RNA, 16 nt, Human
gaccugaagagugguc

SEQ ID NO: 3868330 - RNA, 15 nt, Human
gaccugacuauugaa

SEQ ID NO: 3868331 - RNA, 16 nt, Human
gaccugagaccugaag

SEQ ID NO: 3868332 - RNA, 12 nt, Human
gaccugagccug

SEQ ID NO: 3868333 - RNA, 13 nt, Human
gaccugagccugc

SEQ ID NO: 3868334 - RNA, 17 nt, Human
gaccugagccugccgag

SEQ ID NO: 3868335 - RNA, 13 nt, Human
gaccugaggaagc

SEQ ID NO: 3868336 - RNA, 21 nt, Human
gaccugaggcccuucucucca

SEQ ID NO: 3868337 - RNA, 15 nt, Human
gaccugaggcugugg

SEQ ID NO: 3868338 - RNA, 16 nt, Human
gaccugcacuggggag

SEQ ID NO: 3868339 - RNA, 15 nt, Human
gaccugccaggcagg

SEQ ID NO: 3868340 - RNA, 21 nt, Human
gaccugccaggcagggguggg

SEQ ID NO: 3868341 - RNA, 11 nt, Human
gaccugccucc

SEQ ID NO: 3868342 - RNA, 19 nt, Human
gaccugccuccugccugcc

SEQ ID NO: 3868343 - RNA, 23 nt, Human
gaccugccuccugccugccccuc

SEQ ID NO: 3868344 - RNA, 19 nt, Human
gaccugccucggccuccca

SEQ ID NO: 3868345 - RNA, 18 nt, Human
gaccugccucucacacac

SEQ ID NO: 3868346 - RNA, 18 nt, Human
gaccugccucuucccccu

SEQ ID NO: 3868347 - RNA, 15 nt, Human
gaccugcuaggccag

SEQ ID NO: 3868348 - RNA, 18 nt, Human
gaccugcuaggccagagc

SEQ ID NO: 3868349 - RNA, 23 nt, Human
gaccugcuaggccagagcccacu

SEQ ID NO: 3868350 - RNA, 17 nt, Human
gaccugcugagcucuga

SEQ ID NO: 3868351 - RNA, 19 nt, Human
gaccugcugagggaccagc

SEQ ID NO: 3868352 - RNA, 17 nt, Human
gaccugcuuuuugaaau

SEQ ID NO: 3868353 - RNA, 15 nt, Human
gaccuggagccccug

SEQ ID NO: 3868354 - RNA, 15 nt, Human
gaccuggauaacuua

SEQ ID NO: 3868355 - RNA, 10 nt, Human
gaccuggcag

SEQ ID NO: 3868356 - RNA, 16 nt, Human
gaccuggcagcucugg

SEQ ID NO: 3868357 - RNA, 20 nt, Human
gaccuggcaucuaauucuga

SEQ ID NO: 3868358 - RNA, 15 nt, Human
gaccuggccugucug

SEQ ID NO: 3868359 - RNA, 16 nt, Human
gaccuggccugucugu

SEQ ID NO: 3868360 - RNA, 13 nt, Human
gaccuggggcaca

SEQ ID NO: 3868361 - RNA, 21 nt, Human
gaccuggggcacaguccagga

SEQ ID NO: 3868362 - RNA, 19 nt, Human
gaccuggggcugcugugaa

SEQ ID NO: 3868363 - RNA, 21 nt, Human
gaccugggguugucagcucuc

SEQ ID NO: 3868364 - RNA, 19 nt, Human
gaccugguacccuccuggc

SEQ ID NO: 3868365 - RNA, 21 nt, Human
gaccugguacccuccuggcuc

SEQ ID NO: 3868366 - RNA, 13 nt, Human
gaccuggucaggg

SEQ ID NO: 3868367 - RNA, 18 nt, Human
gaccugguccacagggca

SEQ ID NO: 3868368 - RNA, 19 nt, Human
gaccugguccacagggcac

SEQ ID NO: 3868369 - RNA, 23 nt, Human
gaccuguauauuuguaaagcuau

SEQ ID NO: 3868370 - RNA, 13 nt, Human
gaccuguauuuaa

SEQ ID NO: 3868371 - RNA, 16 nt, Human
gaccuguauuuaagca

SEQ ID NO: 3868372 - RNA, 15 nt, Human
gaccugucaugcccc

SEQ ID NO: 3868373 - RNA, 19 nt, Human
gaccugucaugccccccuc

SEQ ID NO: 3868374 - RNA, 21 nt, Human
gaccugucaugccccccucaa

SEQ ID NO: 3868375 - RNA, 15 nt, Human
gaccugucuccuggc

SEQ ID NO: 3868376 - RNA, 12 nt, Human
gaccugugacca

SEQ ID NO: 3868377 - RNA, 15 nt, Human
gaccugugaccagca

SEQ ID NO: 3868378 - RNA, 19 nt, Human
gaccuguggccaaguucuu

SEQ ID NO: 3868379 - RNA, 19 nt, Human
gaccuguggugcaaaagca

SEQ ID NO: 3868380 - RNA, 18 nt, Human
gaccuguuaaaauuauac

SEQ ID NO: 3868381 - RNA, 15 nt, Human
gaccuguugguucca

SEQ ID NO: 3868382 - RNA, 19 nt, Human
gaccuuacgaucaggcaca

SEQ ID NO: 3868383 - RNA, 13 nt, Human
gaccuuaggccuu

SEQ ID NO: 3868384 - RNA, 15 nt, Human
gaccuuaggccuucc

SEQ ID NO: 3868385 - RNA, 16 nt, Human
gaccuuaggccuuccu

SEQ ID NO: 3868386 - RNA, 18 nt, Human
gaccuuaggccuuccucu

SEQ ID NO: 3868387 - RNA, 21 nt, Human
gaccuuaggccuuccucucuc

SEQ ID NO: 3868388 - RNA, 20 nt, Human
gaccuuaguguuucugugca

SEQ ID NO: 3868389 - RNA, 16 nt, Human
gaccuucaccaaacau

SEQ ID NO: 3868390 - RNA, 22 nt, Human
gaccuucacucuaagauguuau

SEQ ID NO: 3868391 - RNA, 17 nt, Human
gaccuucauuucaugua

SEQ ID NO: 3868392 - RNA, 16 nt, Human
gaccuuccaagagccu

SEQ ID NO: 3868393 - RNA, 23 nt, Human
gaccuuccucauccaccccaucc

SEQ ID NO: 3868394 - RNA, 18 nt, Human
gaccuuccucgcagagag

SEQ ID NO: 3868395 - RNA, 18 nt, Human
gaccuuccucuggggcuc

SEQ ID NO: 3868396 - RNA, 19 nt, Human
gaccuuccugccaccaguc

SEQ ID NO: 3868397 - RNA, 18 nt, Human
gaccuucuccaaaugaga

SEQ ID NO: 3868398 - RNA, 14 nt, Human
gaccuucuccuuca

SEQ ID NO: 3868399 - RNA, 16 nt, Human
gaccuucuccuucacc

SEQ ID NO: 3868400 - RNA, 12 nt, Human
gaccuucuggga

SEQ ID NO: 3868401 - RNA, 19 nt, Human
gaccuugaaggguaaagaa

SEQ ID NO: 3868402 - RNA, 13 nt, Human
gaccuugaugagc

SEQ ID NO: 3868403 - RNA, 15 nt, Human
gaccuugaugagcug

SEQ ID NO: 3868404 - RNA, 16 nt, Human
gaccuugcaacuucau

SEQ ID NO: 3868405 - RNA, 18 nt, Human
gaccuuguaaaagacagu

SEQ ID NO: 3868406 - RNA, 20 nt, Human
gaccuuguaauguaacugcu

SEQ ID NO: 3868407 - RNA, 16 nt, Human
gaccuuguuacuucug

SEQ ID NO: 3868408 - RNA, 17 nt, Human
gaccuuucagcugugaa

SEQ ID NO: 3868409 - RNA, 17 nt, Human
gaccuuuccaccacagc

SEQ ID NO: 3868410 - RNA, 21 nt, Human
gaccuuuccaccacagccagc

SEQ ID NO: 3868411 - RNA, 20 nt, Human
gaccuuuuaaaguguuucag

SEQ ID NO: 3868412 - RNA, 22 nt, Human
gaccuuuuaaaguguuucagcu

SEQ ID NO: 3868413 - RNA, 16 nt, Human
gacgaagaagagccac

SEQ ID NO: 3868414 - RNA, 18 nt, Human
gacgaagaagagccacag

SEQ ID NO: 3868415 - RNA, 21 nt, Human
gacgacaagugcugaacagug

SEQ ID NO: 3868416 - RNA, 21 nt, Human
gacgaggcccucgggcccagc

SEQ ID NO: 3868417 - RNA, 22 nt, Human
gacgaggcccucgggcccagcc

SEQ ID NO: 3868418 - RNA, 17 nt, Human
gacgaguugauuuccuc

SEQ ID NO: 3868419 - RNA, 17 nt, Human
gacgcaccagcccagaa

SEQ ID NO: 3868420 - RNA, 15 nt, Human
gacgcacugagcaac

SEQ ID NO: 3868421 - RNA, 22 nt, Human
gacgcaugcccucaaucccagc

SEQ ID NO: 3868422 - RNA, 15 nt, Human
gacgccacagcccag

SEQ ID NO: 3868423 - RNA, 15 nt, Human
gacgccaccauuccu

SEQ ID NO: 3868424 - RNA, 16 nt, Human
gacgccaccauuccug

SEQ ID NO: 3868425 - RNA, 13 nt, Human
gacgccacccagc

SEQ ID NO: 3868426 - RNA, 21 nt, Human
gacgccacucauuucaucuca

SEQ ID NO: 3868427 - RNA, 23 nt, Human
gacgccacucauuucaucucauu

SEQ ID NO: 3868428 - RNA, 16 nt, Human
gacgccaucccagccc

SEQ ID NO: 3868429 - RNA, 19 nt, Human
gacgccaucccagccccaa

SEQ ID NO: 3868430 - RNA, 16 nt, Human
gacgccuggcugcuga

SEQ ID NO: 3868431 - RNA, 21 nt, Human
gacgccugggggugccaggac

SEQ ID NO: 3868432 - RNA, 14 nt, Human
gacgcgucuccugu

SEQ ID NO: 3868433 - RNA, 15 nt, Human
gacgcucucuggccu

SEQ ID NO: 3868434 - RNA, 16 nt, Human
gacgcucucuggccuu

SEQ ID NO: 3868435 - RNA, 16 nt, Human
gacgcugaauaaaugu

SEQ ID NO: 3868436 - RNA, 15 nt, Human
gacgcugauacauaa

SEQ ID NO: 3868437 - RNA, 21 nt, Human
gacgcugguagagauggagga

SEQ ID NO: 3868438 - RNA, 17 nt, Human
gacgcugugcugcccug

SEQ ID NO: 3868439 - RNA, 22 nt, Human
gacgcugugcugcccugcccac

SEQ ID NO: 3868440 - RNA, 18 nt, Human
gacgcuucacaggacagg

SEQ ID NO: 3868441 - RNA, 13 nt, Human
gacgcuuugucug

SEQ ID NO: 3868442 - RNA, 15 nt, Human
gacggagagaaaaaa

SEQ ID NO: 3868443 - RNA, 13 nt, Human
gacggagucccac

SEQ ID NO: 3868444 - RNA, 14 nt, Human
gacggagucccacc

SEQ ID NO: 3868445 - RNA, 14 nt, Human
gaggccagccuggc

SEQ ID NO: 3868446 - RNA, 19 nt, Human
gaggccagccuggccuccu

SEQ ID NO: 3868447 - RNA, 12 nt, Human
gaggccagccuu

SEQ ID NO: 3868448 - RNA, 22 nt, Human
gaggccaggaguuugagaccag

SEQ ID NO: 3868449 - RNA, 16 nt, Human
gaggccagugagccac

SEQ ID NO: 3868450 - RNA, 18 nt, Human
gaggccaucuggagagcc

SEQ ID NO: 3868451 - RNA, 23 nt, Human
gaggccaugauucgcccaaagcc

SEQ ID NO: 3868452 - RNA, 22 nt, Human
gaggccauggacucuguccuga

SEQ ID NO: 3868453 - RNA, 23 nt, Human
gaggccaugggccuccugugugu

SEQ ID NO: 3868454 - RNA, 22 nt, Human
gaggccaugugcauaguuucuu

SEQ ID NO: 3868455 - RNA, 19 nt, Human
gaggccauugugugagccu

SEQ ID NO: 3868456 - RNA, 18 nt, Human
gaggcccacauuggaaga

SEQ ID NO: 3868457 - RNA, 11 nt, Human
gaggcccagag

SEQ ID NO: 3868458 - RNA, 19 nt, Human
gaggcccagagggccugca

SEQ ID NO: 3868459 - RNA, 23 nt, Human
gaggcccaggcugggaacucauc

SEQ ID NO: 3868460 - RNA, 14 nt, Human
gaggccccaaagga

SEQ ID NO: 3868461 - RNA, 19 nt, Human
gaggccccaaaggaaaaag

SEQ ID NO: 3868462 - RNA, 19 nt, Human
gaggccccaauaccccaug

SEQ ID NO: 3868463 - RNA, 14 nt, Human
gaggccccacuggg

SEQ ID NO: 3868464 - RNA, 12 nt, Human
gaggccccaggg

SEQ ID NO: 3868465 - RNA, 15 nt, Human
gaggcccccagccca

SEQ ID NO: 3868466 - RNA, 16 nt, Human
gaggcccccagcccag

SEQ ID NO: 3868467 - RNA, 21 nt, Human
gaggcccccagcccagggcuc

SEQ ID NO: 3868468 - RNA, 22 nt, Human
gaggccccuauguaguccgugc

SEQ ID NO: 3868469 - RNA, 24 nt, Human
gaggccccuauguaguccgugcug

SEQ ID NO: 3868470 - RNA, 23 nt, Human
gaggccccuucucucccugccag

SEQ ID NO: 3868471 - RNA, 17 nt, Human
gaggcccuccacaccug

SEQ ID NO: 3868472 - RNA, 21 nt, Human
gaggcccuccacaccugcggc

SEQ ID NO: 3868473 - RNA, 22 nt, Human
gaggcccuccacaccugcggcc

SEQ ID NO: 3868474 - RNA, 17 nt, Human
gaggcccuccugugcug

SEQ ID NO: 3868475 - RNA, 17 nt, Human
gaggcccucgcugccag

SEQ ID NO: 3868476 - RNA, 16 nt, Human
gaggcccucgggccca

SEQ ID NO: 3868477 - RNA, 17 nt, Human
gaggcccucgggcccag

SEQ ID NO: 3868478 - RNA, 19 nt, Human
gaggcccucgggcccagcc

SEQ ID NO: 3868479 - RNA, 19 nt, Human
gaggcccucuggaguggcc

SEQ ID NO: 3868480 - RNA, 19 nt, Human
gaggcccugcaugggccag

SEQ ID NO: 3868481 - RNA, 12 nt, Human
gaggcccuggau

SEQ ID NO: 3868482 - RNA, 20 nt, Human
gaggcccuucucuccagccc

SEQ ID NO: 3868483 - RNA, 21 nt, Human
gaggcccuucucuccagcccc

SEQ ID NO: 3868484 - RNA, 23 nt, Human
gaggcccuucucuccagccccug

SEQ ID NO: 3868485 - RNA, 16 nt, Human
gaggcccuuugcuguc

SEQ ID NO: 3868486 - RNA, 17 nt, Human
gaggcccuuugcugucc

SEQ ID NO: 3868487 - RNA, 14 nt, Human
gaggccgaggccau

SEQ ID NO: 3868488 - RNA, 18 nt, Human
gaggccuaggaggguccu

SEQ ID NO: 3868489 - RNA, 21 nt, Human
gaggccuagucagccacaugg

SEQ ID NO: 3868490 - RNA, 23 nt, Human
gaggccuauaaugaagcuuuaua

SEQ ID NO: 3868491 - RNA, 16 nt, Human
gaggccucaggugcug

SEQ ID NO: 3868492 - RNA, 13 nt, Human
gaggccucugggc

SEQ ID NO: 3868493 - RNA, 19 nt, Human
gaggccucuuggaccucug

SEQ ID NO: 3868494 - RNA, 21 nt, Human
gaggccucuuggaccucugcu

SEQ ID NO: 3868495 - RNA, 9 nt, Human
gaggccuga

SEQ ID NO: 3868496 - RNA, 22 nt, Human
gaggccugaaauccugguuccu

SEQ ID NO: 3868497 - RNA, 13 nt, Human
gaggccugaagcc

SEQ ID NO: 3868498 - RNA, 18 nt, Human
gaggccugaagccagcug

SEQ ID NO: 3868499 - RNA, 23 nt, Human
gaggccugaagccagcugcccua

SEQ ID NO: 3868500 - RNA, 19 nt, Human
gaggccugacugccaagcc

SEQ ID NO: 3868501 - RNA, 12 nt, Human
gaggccugcccg

SEQ ID NO: 3868502 - RNA, 16 nt, Human
gaggccugcccgggcg

SEQ ID NO: 3868503 - RNA, 23 nt, Human
gaggccugcccucagggaucuug

SEQ ID NO: 3868504 - RNA, 19 nt, Human
gaggccugccuccagggcu

SEQ ID NO: 3868505 - RNA, 21 nt, Human
gaggccugccuccagggcugg

SEQ ID NO: 3868506 - RNA, 18 nt, Human
gaggccuggaguaacaca

SEQ ID NO: 3868507 - RNA, 14 nt, Human
gaggccuggccagg

SEQ ID NO: 3868508 - RNA, 16 nt, Human
gaggccugggccgcug

SEQ ID NO: 3868509 - RNA, 21 nt, Human
gaggccugggccgcugccacg

SEQ ID NO: 3868510 - RNA, 13 nt, Human
gaggccugggcug

SEQ ID NO: 3868511 - RNA, 18 nt, Human
gaggccugggcugggaaa

SEQ ID NO: 3868512 - RNA, 19 nt, Human
gaggccugucugugaccug

SEQ ID NO: 3868513 - RNA, 19 nt, Human
gaggccuucucugaaggac

SEQ ID NO: 3868514 - RNA, 12 nt, Human
gaggccuugcuc

SEQ ID NO: 3868515 - RNA, 14 nt, Human
gaggccuuuaacca

SEQ ID NO: 3868516 - RNA, 22 nt, Human
gaggcgcacuuuccuccuggca

SEQ ID NO: 3868517 - RNA, 22 nt, Human
gaggcgcccuuggcuucuguga

SEQ ID NO: 3868518 - RNA, 14 nt, Human
gaggcgcggaguga

SEQ ID NO: 3868519 - RNA, 20 nt, Human
gaggcggaccuuguagugag

SEQ ID NO: 3868520 - RNA, 19 nt, Human
gaggcggagaguacaguga

SEQ ID NO: 3868521 - RNA, 21 nt, Human
gaggcggagagugcugacugu

SEQ ID NO: 3868522 - RNA, 20 nt, Human
gaggcggccccggccggggu

SEQ ID NO: 3868523 - RNA, 15 nt, Human
gaggcgggagaauca

SEQ ID NO: 3868524 - RNA, 13 nt, Human
gaggcgggccagc

SEQ ID NO: 3868525 - RNA, 18 nt, Human
gaggcuaaguugggaucu

SEQ ID NO: 3868526 - RNA, 18 nt, Human
gaggcuacuguaaggcaa

SEQ ID NO: 3868527 - RNA, 22 nt, Human
gaggcuagugugguguuuccug

SEQ ID NO: 3868528 - RNA, 17 nt, Human
gaggcuaugcucagggg

SEQ ID NO: 3868529 - RNA, 20 nt, Human
gaggcuaugcucaggggccc

SEQ ID NO: 3868530 - RNA, 15 nt, Human
gaggcucaaauuuug

SEQ ID NO: 3868531 - RNA, 10 nt, Human
gaggcucagg

SEQ ID NO: 3868532 - RNA, 12 nt, Human
gaggcucagguc

SEQ ID NO: 3868533 - RNA, 15 nt, Human
gaggcuccacuuggu

SEQ ID NO: 3868534 - RNA, 16 nt, Human
gaggcuccaggcagca

SEQ ID NO: 3868535 - RNA, 13 nt, Human
gaggcuccugucc

SEQ ID NO: 3868536 - RNA, 14 nt, Human
gaggcucugcccuu

SEQ ID NO: 3868537 - RNA, 19 nt, Human
gaggcucuggagcccacug

SEQ ID NO: 3868538 - RNA, 20 nt, Human
gaggcucuggagcccacugu

SEQ ID NO: 3868539 - RNA, 20 nt, Human
gaggcugaaagaggccaaug

SEQ ID NO: 3868540 - RNA, 15 nt, Human
gaggcugacuccugg

SEQ ID NO: 3868541 - RNA, 16 nt, Human
gaggcugagacaggag

SEQ ID NO: 3868542 - RNA, 18 nt, Human
gaggcugagaugggagaa

SEQ ID NO: 3868543 - RNA, 16 nt, Human
gaggcugaggcaagag

SEQ ID NO: 3868544 - RNA, 13 nt, Human
gaggcugaggcac

SEQ ID NO: 3868545 - RNA, 14 nt, Human
gaggcugaggcaca

SEQ ID NO: 3868546 - RNA, 18 nt, Human
gaggcugaggcaggagaa

SEQ ID NO: 3868547 - RNA, 18 nt, Human
gaggcugaggcaggagac

SEQ ID NO: 3868548 - RNA, 16 nt, Human
gaggcugaggccugga

SEQ ID NO: 3868549 - RNA, 18 nt, Human
gaggcugaggccuggacu

SEQ ID NO: 3868550 - RNA, 15 nt, Human
gaggcugaggcuggc

SEQ ID NO: 3868551 - RNA, 20 nt, Human
gaggcugcagaaggccaaga

SEQ ID NO: 3868552 - RNA, 9 nt, Human
gaggcugcc

SEQ ID NO: 3868553 - RNA, 17 nt, Human
gaggcugcccccggccc

SEQ ID NO: 3868554 - RNA, 22 nt, Human
gaggcugcccccggcccccugg

SEQ ID NO: 3868555 - RNA, 23 nt, Human
gaggcugcccccggcccccuggu

SEQ ID NO: 3868556 - RNA, 14 nt, Human
gaggcugccccucu

SEQ ID NO: 3868557 - RNA, 19 nt, Human
gaggcugccccucucacca

SEQ ID NO: 3868558 - RNA, 13 nt, Human
gaggcugcccucc

SEQ ID NO: 3868559 - RNA, 15 nt, Human
gaggcugcccuccug

SEQ ID NO: 3868560 - RNA, 13 nt, Human
gaggcugcucggg

SEQ ID NO: 3868561 - RNA, 22 nt, Human
gaggcugcucggggugcacagg

SEQ ID NO: 3868562 - RNA, 19 nt, Human
gaggcuggacuccagaucu

SEQ ID NO: 3868563 - RNA, 20 nt, Human
gaggcuggacuccagaucug

SEQ ID NO: 3868564 - RNA, 14 nt, Human
gaggcuggaggcag

SEQ ID NO: 3868565 - RNA, 17 nt, Human
gaggcuggaggcagggc

SEQ ID NO: 3868566 - RNA, 17 nt, Human
gaggcugggccaagcca

SEQ ID NO: 3868567 - RNA, 21 nt, Human
gaggcugggccaagccaggga

SEQ ID NO: 3868568 - RNA, 13 nt, Human
gaggcugggcucc

SEQ ID NO: 3868569 - RNA, 20 nt, Human
gaggcugggcucccuuccca

SEQ ID NO: 3868570 - RNA, 20 nt, Human
gaggcugggggagagccgug

SEQ ID NO: 3868571 - RNA, 14 nt, Human
gaggcuguccugua

SEQ ID NO: 3868572 - RNA, 22 nt, Human
gaggcugucuucucaggcucug

SEQ ID NO: 3868573 - RNA, 15 nt, Human
gaggcuguggcuggu

SEQ ID NO: 3868574 - RNA, 17 nt, Human
gaggcugugugccuggg

SEQ ID NO: 3868575 - RNA, 22 nt, Human
gaggcuuagcuuugcucugcca

SEQ ID NO: 3868576 - RNA, 17 nt, Human
gaggcuuauauuugugu

SEQ ID NO: 3868577 - RNA, 23 nt, Human
gaggcuuccagagaguccucugg

SEQ ID NO: 3868578 - RNA, 13 nt, Human
gaggcuuccugcg

SEQ ID NO: 3868579 - RNA, 20 nt, Human
gaggcuucuccgccagccuc

SEQ ID NO: 3868580 - RNA, 15 nt, Human
gaggcuuggaaagca

SEQ ID NO: 3868581 - RNA, 18 nt, Human
gaggcuugggaccgccag

SEQ ID NO: 3868582 - RNA, 14 nt, Human
gaggcuugguuccu

SEQ ID NO: 3868583 - RNA, 18 nt, Human
gaggcuugucagagcugg

SEQ ID NO: 3868584 - RNA, 21 nt, Human
gaggcuugucagagcugggag

SEQ ID NO: 3868585 - RNA, 23 nt, Human
gaggcuuguuuaccuuucucucu

SEQ ID NO: 3868586 - RNA, 14 nt, Human
gaggcuuuguguug

SEQ ID NO: 3868587 - RNA, 10 nt, Human
gagggaaaag

SEQ ID NO: 3868588 - RNA, 15 nt, Human
gagggaaaagggaag

SEQ ID NO: 3868589 - RNA, 13 nt, Human
gaguacugugggc

SEQ ID NO: 3868590 - RNA, 22 nt, Human
gaguacugugggcaauuuagaa

SEQ ID NO: 3868591 - RNA, 15 nt, Human
gaguagaaaggccuu

SEQ ID NO: 3868592 - RNA, 17 nt, Human
gaguagaaaggccuuua

SEQ ID NO: 3868593 - RNA, 12 nt, Human
gaguagaaugua

SEQ ID NO: 3868594 - RNA, 14 nt, Human
gaguagaauugcau

SEQ ID NO: 3868595 - RNA, 17 nt, Human
gaguagaugcgcagccc

SEQ ID NO: 3868596 - RNA, 22 nt, Human
gaguagcaaguucuagagaaga

SEQ ID NO: 3868597 - RNA, 19 nt, Human
gaguagccgagagccugcu

SEQ ID NO: 3868598 - RNA, 13 nt, Human
gaguagcugagcu

SEQ ID NO: 3868599 - RNA, 22 nt, Human
gaguagcugggacuacaggcac

SEQ ID NO: 3868600 - RNA, 12 nt, Human
gaguaggaagac

SEQ ID NO: 3868601 - RNA, 21 nt, Human
gaguaguugauguugcauuuu

SEQ ID NO: 3868602 - RNA, 18 nt, Human
gaguauacaauauauaaa

SEQ ID NO: 3868603 - RNA, 19 nt, Human
gaguauacaauauauaaaa

SEQ ID NO: 3868604 - RNA, 16 nt, Human
gaguauaggccggucu

SEQ ID NO: 3868605 - RNA, 12 nt, Human
gaguauaugcac

SEQ ID NO: 3868606 - RNA, 15 nt, Human
gaguaucagaauuga

SEQ ID NO: 3868607 - RNA, 17 nt, Human
gaguaucaggucuccca

SEQ ID NO: 3868608 - RNA, 16 nt, Human
gaguaucugggaacug

SEQ ID NO: 3868609 - RNA, 14 nt, Human
gaguauuaaaaugu

SEQ ID NO: 3868610 - RNA, 12 nt, Human
gaguauucuaau

SEQ ID NO: 3868611 - RNA, 20 nt, Human
gaguauucuaauaagcuagu

SEQ ID NO: 3868612 - RNA, 18 nt, Human
gaguauugaaugguggug

SEQ ID NO: 3868613 - RNA, 23 nt, Human
gaguauuuucugguaaaaagaaa

SEQ ID NO: 3868614 - RNA, 19 nt, Human
gagucaaaacucaaaugcu

SEQ ID NO: 3868615 - RNA, 15 nt, Human
gagucaaggccugcu

SEQ ID NO: 3868616 - RNA, 13 nt, Human
gagucaauacaua

SEQ ID NO: 3868617 - RNA, 15 nt, Human
gagucacaagccucg

SEQ ID NO: 3868618 - RNA, 22 nt, Human
gagucaccuucccuugccacuu

SEQ ID NO: 3868619 - RNA, 15 nt, Human
gagucacuacaacug

SEQ ID NO: 3868620 - RNA, 17 nt, Human
gagucacuacgccuggc

SEQ ID NO: 3868621 - RNA, 14 nt, Human
gagucacugagacc

SEQ ID NO: 3868622 - RNA, 14 nt, Human
gagucagccaggag

SEQ ID NO: 3868623 - RNA, 11 nt, Human
gagucagccuu

SEQ ID NO: 3868624 - RNA, 22 nt, Human
gagucagggaccccugcccuug

SEQ ID NO: 3868625 - RNA, 18 nt, Human
gagucagggagagcugaa

SEQ ID NO: 3868626 - RNA, 15 nt, Human
gagucagggcccaga

SEQ ID NO: 3868627 - RNA, 16 nt, Human
gagucagggcccagag

SEQ ID NO: 3868628 - RNA, 18 nt, Human
gagucagguuugggguuc

SEQ ID NO: 3868629 - RNA, 15 nt, Human
gagucagucgccuuu

SEQ ID NO: 3868630 - RNA, 16 nt, Human
gagucauaaaccuuaa

SEQ ID NO: 3868631 - RNA, 14 nt, Human
gagucauauuuuga

SEQ ID NO: 3868632 - RNA, 13 nt, Human
gagucaucuccau

SEQ ID NO: 3868633 - RNA, 14 nt, Human
gagucauugcugua

SEQ ID NO: 3868634 - RNA, 13 nt, Human
gagucauuuaaau

SEQ ID NO: 3868635 - RNA, 18 nt, Human
gagucauuugagucucuu

SEQ ID NO: 3868636 - RNA, 19 nt, Human
gaguccaaacuggaaugag

SEQ ID NO: 3868637 - RNA, 20 nt, Human
gaguccaacguggggcagca

SEQ ID NO: 3868638 - RNA, 12 nt, Human
gaguccaagcug

SEQ ID NO: 3868639 - RNA, 13 nt, Human
gaguccaggcccc

SEQ ID NO: 3868640 - RNA, 14 nt, Human
gaguccaucagccu

SEQ ID NO: 3868641 - RNA, 16 nt, Human
gaguccaucagccucc

SEQ ID NO: 3868642 - RNA, 15 nt, Human
gaguccauucuccca

SEQ ID NO: 3868643 - RNA, 16 nt, Human
gagucccaccuuggcu

SEQ ID NO: 3868644 - RNA, 21 nt, Human
gagucccaccuuggcugcagg

SEQ ID NO: 3868645 - RNA, 13 nt, Human
gagucccacugcc

SEQ ID NO: 3868646 - RNA, 17 nt, Human
gagucccacugccucag

SEQ ID NO: 3868647 - RNA, 19 nt, Human
gagucccaggagcugccca

SEQ ID NO: 3868648 - RNA, 18 nt, Human
gagucccaggcugagccu

SEQ ID NO: 3868649 - RNA, 23 nt, Human
gagucccagguuggcucugccag

SEQ ID NO: 3868650 - RNA, 14 nt, Human
gagucccaguggga

SEQ ID NO: 3868651 - RNA, 22 nt, Human
gaguccccccacucccagcauc

SEQ ID NO: 3868652 - RNA, 20 nt, Human
gaguccccgggcaucuuugg

SEQ ID NO: 3868653 - RNA, 18 nt, Human
gaguccccucaccuccuc

SEQ ID NO: 3868654 - RNA, 18 nt, Human
gaguccccuccccggccc

SEQ ID NO: 3868655 - RNA, 22 nt, Human
gagucccuuccaggccaucaga

SEQ ID NO: 3868656 - RNA, 19 nt, Human
gaguccgaaagggacuugg

SEQ ID NO: 3868657 - RNA, 17 nt, Human
gaguccuagagcuacag

SEQ ID NO: 3868658 - RNA, 16 nt, Human
gaguccucacucccag

SEQ ID NO: 3868659 - RNA, 15 nt, Human
gaguccuccagaacu

SEQ ID NO: 3868660 - RNA, 21 nt, Human
gaguccuccagaacucuuccu

SEQ ID NO: 3868661 - RNA, 22 nt, Human
gaguccuccagaacucuuccuc

SEQ ID NO: 3868662 - RNA, 14 nt, Human
gagucgaggacagg

SEQ ID NO: 3868663 - RNA, 16 nt, Human
gagucgcaucucagug

SEQ ID NO: 3868664 - RNA, 19 nt, Human
gagucgucaucacuuuuca

SEQ ID NO: 3868665 - RNA, 18 nt, Human
gagucguggggugugcug

SEQ ID NO: 3868666 - RNA, 11 nt, Human
gagucuaaaga

SEQ ID NO: 3868667 - RNA, 18 nt, Human
gagucuaauagucuuugc

SEQ ID NO: 3868668 - RNA, 16 nt, Human
gagucuagauguuuau

SEQ ID NO: 3868669 - RNA, 11 nt, Human
gagucuagauu

SEQ ID NO: 3868670 - RNA, 13 nt, Human
gagucuagauuca

SEQ ID NO: 3868671 - RNA, 23 nt, Human
gagucuagauucaaagguucuag

SEQ ID NO: 3868672 - RNA, 16 nt, Human
gagucuagcacucauu

SEQ ID NO: 3868673 - RNA, 19 nt, Human
gagucucacuguugcccag

SEQ ID NO: 3868674 - RNA, 22 nt, Human
gagucucacuguugcccaggcu

SEQ ID NO: 3868675 - RNA, 23 nt, Human
gagucucacuguugcccaggcug

SEQ ID NO: 3868676 - RNA, 13 nt, Human
gagucucccaagg

SEQ ID NO: 3868677 - RNA, 13 nt, Human
gagucucccaggg

SEQ ID NO: 3868678 - RNA, 15 nt, Human
gagucucccagggag

SEQ ID NO: 3868679 - RNA, 12 nt, Human
gagucuccugug

SEQ ID NO: 3868680 - RNA, 23 nt, Human
gagucucgcuauugucaccaggg

SEQ ID NO: 3868681 - RNA, 16 nt, Human
gagucucuucuccacu

SEQ ID NO: 3868682 - RNA, 18 nt, Human
gagucucuucuccacugg

SEQ ID NO: 3868683 - RNA, 15 nt, Human
gagucugaagcagau

SEQ ID NO: 3868684 - RNA, 13 nt, Human
gagucugaaggcu

SEQ ID NO: 3868685 - RNA, 14 nt, Human
gagucugaaggcug

SEQ ID NO: 3868686 - RNA, 15 nt, Human
gagucugaaggcugg

SEQ ID NO: 3868687 - RNA, 12 nt, Human
gagucugaggcc

SEQ ID NO: 3868688 - RNA, 17 nt, Human
gagucugagguccugag

SEQ ID NO: 3868689 - RNA, 12 nt, Human
gagucugaugau

SEQ ID NO: 3868690 - RNA, 16 nt, Human
gagucugccacccagg

SEQ ID NO: 3868691 - RNA, 14 nt, Human
gagucuggaguggg

SEQ ID NO: 3868692 - RNA, 18 nt, Human
gagucuggcccuagacuc

SEQ ID NO: 3868693 - RNA, 11 nt, Human
gagucugggac

SEQ ID NO: 3868694 - RNA, 16 nt, Human
gagucuguucugguaa

SEQ ID NO: 3868695 - RNA, 22 nt, Human
gagucuguugugugucaugcca

SEQ ID NO: 3868696 - RNA, 16 nt, Human
gagucuguuuuguaaa

SEQ ID NO: 3868697 - RNA, 11 nt, Human
gagucuucaug

SEQ ID NO: 3868698 - RNA, 20 nt, Human
gagucuugcuauauugccca

SEQ ID NO: 3868699 - RNA, 14 nt, Human
gagucuuugguucu

SEQ ID NO: 3868700 - RNA, 16 nt, Human
gagucuuugguucuaa

SEQ ID NO: 3868701 - RNA, 15 nt, Human
gagugaaaaagagaa

SEQ ID NO: 3868702 - RNA, 22 nt, Human
gagugaacaaauuuacagagac

SEQ ID NO: 3868703 - RNA, 21 nt, Human
gagugaacuggucuuccuuuu

SEQ ID NO: 3868704 - RNA, 19 nt, Human
gagugaagaggggcagccc

SEQ ID NO: 3868705 - RNA, 17 nt, Human
gagugaagcugggagaa

SEQ ID NO: 3868706 - RNA, 15 nt, Human
gagugaauucccuca

SEQ ID NO: 3868707 - RNA, 18 nt, Human
gagugaauucccucacuc

SEQ ID NO: 3868708 - RNA, 14 nt, Human
gagugacagaggca

SEQ ID NO: 3868709 - RNA, 14 nt, Human
gagugagacagacu

SEQ ID NO: 3868710 - RNA, 22 nt, Human
gagugagacccagcccucaucc

SEQ ID NO: 3868711 - RNA, 13 nt, Human
gagugagacccug

SEQ ID NO: 3868712 - RNA, 19 nt, Human
gagugagaggggaggccaa

SEQ ID NO: 3868713 - RNA, 20 nt, Human
gagugagaggggaggccaag

SEQ ID NO: 3868714 - RNA, 13 nt, Human
gagugagccuggc

SEQ ID NO: 3868715 - RNA, 12 nt, Human
gagugagcuggu

SEQ ID NO: 3868716 - RNA, 21 nt, Human
gagugagggguaaaagcugau

SEQ ID NO: 3868717 - RNA, 22 nt, Human
gagugaggguuucugagcugcu

SEQ ID NO: 3868718 - RNA, 21 nt, Human
gagugaguuggguguauugug

SEQ ID NO: 3868719 - RNA, 15 nt, Human
gagugauauggagca

SEQ ID NO: 3868720 - RNA, 12 nt, Human
gagugauugcag

SEQ ID NO: 3868721 - RNA, 12 nt, Human
gagugcacagcu

SEQ ID NO: 3868722 - RNA, 15 nt, Human
gagugcaggcccacc

SEQ ID NO: 3868723 - RNA, 18 nt, Human
gagugcaggcccacccug

SEQ ID NO: 3868724 - RNA, 22 nt, Human
gagugcaguccugaucagagcc

SEQ ID NO: 3868725 - RNA, 18 nt, Human
gagugcagugagccgaga

SEQ ID NO: 3868726 - RNA, 18 nt, Human
gagugccaacuucuuuca

SEQ ID NO: 3868727 - RNA, 15 nt, Human
gagugccccaccugc

SEQ ID NO: 3868728 - RNA, 18 nt, Human
gagugccuuacacaaugg

SEQ ID NO: 3868729 - RNA, 14 nt, Human
gagugccuuuugca

SEQ ID NO: 3868730 - RNA, 18 nt, Human
gagugcggaccacccuca

SEQ ID NO: 3868731 - RNA, 15 nt, Human
gagugcguggugcga

SEQ ID NO: 3868732 - RNA, 15 nt, Human
gagugcuaaguguag

SEQ ID NO: 3868733 - RNA, 21 nt, Human
gagugcucaguagucagacug

SEQ ID NO: 3868734 - RNA, 19 nt, Human
gagugcuugcuuuucaugc

SEQ ID NO: 3868735 - RNA, 19 nt, Human
gaguggaauaguauccucc

SEQ ID NO: 3868736 - RNA, 18 nt, Human
gcaaaccaagagauugcu

SEQ ID NO: 3868737 - RNA, 21 nt, Human
gcaaaccaagagauugcuaau

SEQ ID NO: 3868738 - RNA, 22 nt, Human
gcaaaccacacuggacuccggc

SEQ ID NO: 3868739 - RNA, 12 nt, Human
gcaaaccaucau

SEQ ID NO: 3868740 - RNA, 17 nt, Human
gcaaaccaucauugaaa

SEQ ID NO: 3868741 - RNA, 16 nt, Human
gcaaaccauuuuuaaa

SEQ ID NO: 3868742 - RNA, 20 nt, Human
gcaaacccugucaaacauua

SEQ ID NO: 3868743 - RNA, 14 nt, Human
gcaaacgcuaaaga

SEQ ID NO: 3868744 - RNA, 14 nt, Human
gcaaacgcugccug

SEQ ID NO: 3868745 - RNA, 15 nt, Human
gcaaacgcugccugc

SEQ ID NO: 3868746 - RNA, 18 nt, Human
gcaaacgcugccugcccg

SEQ ID NO: 3868747 - RNA, 17 nt, Human
gcaaacucacugcucaa

SEQ ID NO: 3868748 - RNA, 19 nt, Human
gcaaacucacugcucaaga

SEQ ID NO: 3868749 - RNA, 14 nt, Human
gcaaacucugcugu

SEQ ID NO: 3868750 - RNA, 13 nt, Human
gcaaacugcaugc

SEQ ID NO: 3868751 - RNA, 17 nt, Human
gcaaacugggaaccccu

SEQ ID NO: 3868752 - RNA, 20 nt, Human
gcaaacugggaaccccuuuc

SEQ ID NO: 3868753 - RNA, 23 nt, Human
gcaaacugggaaccccuuuccca

SEQ ID NO: 3868754 - RNA, 15 nt, Human
gcaaacuucagaguu

SEQ ID NO: 3868755 - RNA, 18 nt, Human
gcaaacuuuauuuugugu

SEQ ID NO: 3868756 - RNA, 22 nt, Human
gcaaagaaagugggaggucagg

SEQ ID NO: 3868757 - RNA, 22 nt, Human
gcaaagaacucuuacccuggca

SEQ ID NO: 3868758 - RNA, 14 nt, Human
gcaaagaauugacu

SEQ ID NO: 3868759 - RNA, 21 nt, Human
gcaaagacuauucccuucuaa

SEQ ID NO: 3868760 - RNA, 22 nt, Human
gcaaagacuauucccuucuaac

SEQ ID NO: 3868761 - RNA, 18 nt, Human
gcaaagaucaaaauaaaa

SEQ ID NO: 3868762 - RNA, 19 nt, Human
gcaaagaucuguccucagc

SEQ ID NO: 3868763 - RNA, 21 nt, Human
gcaaagaucuguccucagccu

SEQ ID NO: 3868764 - RNA, 22 nt, Human
gcaaagaucuguccucagccuu

SEQ ID NO: 3868765 - RNA, 14 nt, Human
gcaaagaugaaggu

SEQ ID NO: 3868766 - RNA, 13 nt, Human
gcaaagcacagag

SEQ ID NO: 3868767 - RNA, 22 nt, Human
gcaaagcaccagcuucuccagg

SEQ ID NO: 3868768 - RNA, 19 nt, Human
gcaaagccccaugcuggag

SEQ ID NO: 3868769 - RNA, 19 nt, Human
gcaaagccuguucauggca

SEQ ID NO: 3868770 - RNA, 21 nt, Human
gcaaagccuguucauggcaga

SEQ ID NO: 3868771 - RNA, 14 nt, Human
gcaaagcgacguua

SEQ ID NO: 3868772 - RNA, 19 nt, Human
gcaaagcucuguggccaca

SEQ ID NO: 3868773 - RNA, 21 nt, Human
gcaaagcugaugacaacuucc

SEQ ID NO: 3868774 - RNA, 17 nt, Human
gcaaagcuguucuuccu

SEQ ID NO: 3868775 - RNA, 19 nt, Human
gcaaagcuguucuuccugg

SEQ ID NO: 3868776 - RNA, 23 nt, Human
gcaaaggacuguuuuuuccugag

SEQ ID NO: 3868777 - RNA, 20 nt, Human
gcaaagggagcacuggguug

SEQ ID NO: 3868778 - RNA, 18 nt, Human
gcaaaggguccagaagga

SEQ ID NO: 3868779 - RNA, 19 nt, Human
gcaaagguuccaacuguau

SEQ ID NO: 3868780 - RNA, 21 nt, Human
gcaaagguuccaacuguauau

SEQ ID NO: 3868781 - RNA, 12 nt, Human
gcaaaguacaau

SEQ ID NO: 3868782 - RNA, 19 nt, Human
gcaaaguacaauguguuuu

SEQ ID NO: 3868783 - RNA, 22 nt, Human
gcaaaguacuguaagaauaauu

SEQ ID NO: 3868784 - RNA, 15 nt, Human
gcaaaguauuguaaa

SEQ ID NO: 3868785 - RNA, 12 nt, Human
gcaaaguguuuu

SEQ ID NO: 3868786 - RNA, 17 nt, Human
gcaaaguguuuuguacc

SEQ ID NO: 3868787 - RNA, 19 nt, Human
gcaaauaacaaaugccaaa

SEQ ID NO: 3868788 - RNA, 17 nt, Human
gcaaauaaguguauuuu

SEQ ID NO: 3868789 - RNA, 17 nt, Human
gcaaauagaaaacagga

SEQ ID NO: 3868790 - RNA, 16 nt, Human
gcaaauauaaacaucu

SEQ ID NO: 3868791 - RNA, 21 nt, Human
gcaaaucaccacaaacuguaa

SEQ ID NO: 3868792 - RNA, 18 nt, Human
gcaaaucaguuacuaaga

SEQ ID NO: 3868793 - RNA, 16 nt, Human
gcaaauccgaaaucag

SEQ ID NO: 3868794 - RNA, 20 nt, Human
gcaaauccuugugggaaaag

SEQ ID NO: 3868795 - RNA, 12 nt, Human
gcaaaucuugaa

SEQ ID NO: 3868796 - RNA, 19 nt, Human
gcaaaugacaugcacugac

SEQ ID NO: 3868797 - RNA, 17 nt, Human
gcaaaugccagggcccg

SEQ ID NO: 3868798 - RNA, 23 nt, Human
gcaaauggugguuguuucuucca

SEQ ID NO: 3868799 - RNA, 23 nt, Human
gcaaauguaguauggccuguguc

SEQ ID NO: 3868800 - RNA, 18 nt, Human
gcaaaugucaucagaacu

SEQ ID NO: 3868801 - RNA, 23 nt, Human
gcaaaugugaaucauuuuaccuu

SEQ ID NO: 3868802 - RNA, 12 nt, Human
gcaaauguguac

SEQ ID NO: 3868803 - RNA, 21 nt, Human
gcaaauguuacauaguguagg

SEQ ID NO: 3868804 - RNA, 17 nt, Human
gcaaauguuuauuuaaa

SEQ ID NO: 3868805 - RNA, 12 nt, Human
gcaaauuucaaa

SEQ ID NO: 3868806 - RNA, 16 nt, Human
gcaaauuucaaaagac

SEQ ID NO: 3868807 - RNA, 23 nt, Human
gcaaauuucaaaagacauguugu

SEQ ID NO: 3868808 - RNA, 22 nt, Human
gcaacaaacugcacaugauuuc

SEQ ID NO: 3868809 - RNA, 22 nt, Human
gcaacaagaccaccacuucgaa

SEQ ID NO: 3868810 - RNA, 15 nt, Human
gcaacaauuuucaga

SEQ ID NO: 3868811 - RNA, 19 nt, Human
gcaacacaagcuggaagca

SEQ ID NO: 3868812 - RNA, 15 nt, Human
gcaacacagaggaau

SEQ ID NO: 3868813 - RNA, 18 nt, Human
gcaacacagccugggccc

SEQ ID NO: 3868814 - RNA, 17 nt, Human
gcaacacucuauauuua

SEQ ID NO: 3868815 - RNA, 13 nt, Human
gcaacagaaaaaa

SEQ ID NO: 3868816 - RNA, 17 nt, Human
gcaacagaaaaauggag

SEQ ID NO: 3868817 - RNA, 14 nt, Human
gcaacagagugaga

SEQ ID NO: 3868818 - RNA, 13 nt, Human
gcaacagaucugg

SEQ ID NO: 3868819 - RNA, 16 nt, Human
gcaacagaucuggaac

SEQ ID NO: 3868820 - RNA, 22 nt, Human
gcaacagaucuggaaccucagc

SEQ ID NO: 3868821 - RNA, 13 nt, Human
gcaacagcacugg

SEQ ID NO: 3868822 - RNA, 18 nt, Human
gcaacagcacuggcucuc

SEQ ID NO: 3868823 - RNA, 20 nt, Human
gcaacagcacuggcucucuc

SEQ ID NO: 3868824 - RNA, 19 nt, Human
gcaacaggccauugugaac

SEQ ID NO: 3868825 - RNA, 13 nt, Human
gcaacaggcuggg

SEQ ID NO: 3868826 - RNA, 14 nt, Human
gcaacaggcugggc

SEQ ID NO: 3868827 - RNA, 16 nt, Human
gcaacaggcugggcuu

SEQ ID NO: 3868828 - RNA, 22 nt, Human
gcaacaggguauggacuaucug

SEQ ID NO: 3868829 - RNA, 20 nt, Human
gcaacagguuuuauaauuuu

SEQ ID NO: 3868830 - RNA, 13 nt, Human
gcaacaucuuuuu

SEQ ID NO: 3868831 - RNA, 23 nt, Human
gcaacaugcuucaugaaaauccu

SEQ ID NO: 3868832 - RNA, 14 nt, Human
gcaacauuccaaga

SEQ ID NO: 3868833 - RNA, 15 nt, Human
gcaaccaagucacac

SEQ ID NO: 3868834 - RNA, 15 nt, Human
gcaaccacacaccuc

SEQ ID NO: 3868835 - RNA, 16 nt, Human
gcaaccaccaccaacc

SEQ ID NO: 3868836 - RNA, 15 nt, Human
gcaaccagagcacug

SEQ ID NO: 3868837 - RNA, 19 nt, Human
gcaaccagagcacuguaua

SEQ ID NO: 3868838 - RNA, 15 nt, Human
gcaaccaggaacagc

SEQ ID NO: 3868839 - RNA, 14 nt, Human
gcaaccauuugaaa

SEQ ID NO: 3868840 - RNA, 19 nt, Human
gcaaccccaggcugaagca

SEQ ID NO: 3868841 - RNA, 21 nt, Human
gcaaccccaguucugcuccuc

SEQ ID NO: 3868842 - RNA, 18 nt, Human
gcaacccccagccugcua

SEQ ID NO: 3868843 - RNA, 13 nt, Human
gcaaccccuggac

SEQ ID NO: 3868844 - RNA, 18 nt, Human
gcaaccgccucaaaaugu

SEQ ID NO: 3868845 - RNA, 23 nt, Human
gcaaccgucuguuaugcugugac

SEQ ID NO: 3868846 - RNA, 18 nt, Human
gcaaccguggcccuuccu

SEQ ID NO: 3868847 - RNA, 19 nt, Human
gcaaccucaguaauuuaga

SEQ ID NO: 3868848 - RNA, 16 nt, Human
gcaaccuccaccuccu

SEQ ID NO: 3868849 - RNA, 17 nt, Human
gcaaccucccaacccag

SEQ ID NO: 3868850 - RNA, 18 nt, Human
gcaaccuccgccucuugg

SEQ ID NO: 3868851 - RNA, 19 nt, Human
gcaaccuccgccucuuggg

SEQ ID NO: 3868852 - RNA, 23 nt, Human
gcaaccucugccuccuggguuca

SEQ ID NO: 3868853 - RNA, 17 nt, Human
gcaaccugauuguaaac

SEQ ID NO: 3868854 - RNA, 18 nt, Human
gcaaccugauuguaaacu

SEQ ID NO: 3868855 - RNA, 14 nt, Human
gcaaccugcuucca

SEQ ID NO: 3868856 - RNA, 14 nt, Human
gcaaccugggucca

SEQ ID NO: 3868857 - RNA, 18 nt, Human
gcaacggggaggccaagu

SEQ ID NO: 3868858 - RNA, 22 nt, Human
gcaacguuuacaccgacuagcc

SEQ ID NO: 3868859 - RNA, 13 nt, Human
gcaacucugaagg

SEQ ID NO: 3868860 - RNA, 19 nt, Human
gcaacugaauaaauaccuc

SEQ ID NO: 3868861 - RNA, 19 nt, Human
gcaacugacacucccaccc

SEQ ID NO: 3868862 - RNA, 19 nt, Human
gcaacugaggcagacagca

SEQ ID NO: 3868863 - RNA, 22 nt, Human
gcaacugaggcagacagcagcu

SEQ ID NO: 3868864 - RNA, 21 nt, Human
gcaacugcugaugcucauggu

SEQ ID NO: 3868865 - RNA, 11 nt, Human
gcaacugggac

SEQ ID NO: 3868866 - RNA, 23 nt, Human
gcaacugucuauuucugcugaau

SEQ ID NO: 3868867 - RNA, 20 nt, Human
gcaacuguuaugaaauaaag

SEQ ID NO: 3868868 - RNA, 19 nt, Human
gcaacuucaguccugggag

SEQ ID NO: 3868869 - RNA, 21 nt, Human
gcaacuugucuuuuucuggac

SEQ ID NO: 3868870 - RNA, 17 nt, Human
gcaagaaaaaaaaaugc

SEQ ID NO: 3868871 - RNA, 18 nt, Human
gcaagaaaaaaaaaugcc

SEQ ID NO: 3868872 - RNA, 20 nt, Human
gcaagaaggcaaaaauaguu

SEQ ID NO: 3868873 - RNA, 21 nt, Human
gcaagaaugguggcuucuuuu

SEQ ID NO: 3868874 - RNA, 14 nt, Human
gcaagacgcccucu

SEQ ID NO: 3868875 - RNA, 20 nt, Human
gcaagacgcugugcugcccu

SEQ ID NO: 3868876 - RNA, 19 nt, Human
gcaagacuucucuuugccu

SEQ ID NO: 3868877 - RNA, 21 nt, Human
gcaagacuucucuuugccuca

SEQ ID NO: 3868878 - RNA, 22 nt, Human
gcaagacuucucuuugccucaa

SEQ ID NO: 3868879 - RNA, 15 nt, Human
gcaccucagccugca

SEQ ID NO: 3868880 - RNA, 18 nt, Human
gcaccuccacauccucca

SEQ ID NO: 3868881 - RNA, 11 nt, Human
gcaccucccau

SEQ ID NO: 3868882 - RNA, 17 nt, Human
gcaccuccccccacugc

SEQ ID NO: 3868883 - RNA, 16 nt, Human
gcaccuccucagccug

SEQ ID NO: 3868884 - RNA, 17 nt, Human
gcaccuccuugucacuu

SEQ ID NO: 3868885 - RNA, 19 nt, Human
gcaccucugaccuaucacu

SEQ ID NO: 3868886 - RNA, 20 nt, Human
gcaccucuuccuugauguuu

SEQ ID NO: 3868887 - RNA, 21 nt, Human
gcaccugauggaaaagauaua

SEQ ID NO: 3868888 - RNA, 15 nt, Human
gcaccugcagguugg

SEQ ID NO: 3868889 - RNA, 13 nt, Human
gcaccugccagcc

SEQ ID NO: 3868890 - RNA, 14 nt, Human
gcaccugccagccu

SEQ ID NO: 3868891 - RNA, 15 nt, Human
gcaccugccagccug

SEQ ID NO: 3868892 - RNA, 16 nt, Human
gcaccugcccccuggu

SEQ ID NO: 3868893 - RNA, 18 nt, Human
gcaccugcccccuggugg

SEQ ID NO: 3868894 - RNA, 23 nt, Human
gcaccugcugucuggguggcuca

SEQ ID NO: 3868895 - RNA, 18 nt, Human
gcaccuggaauauauaac

SEQ ID NO: 3868896 - RNA, 19 nt, Human
gcaccugggcccuggggcc

SEQ ID NO: 3868897 - RNA, 21 nt, Human
gcaccuguaaucccagcuacu

SEQ ID NO: 3868898 - RNA, 22 nt, Human
gcaccuguacaguggaaccguu

SEQ ID NO: 3868899 - RNA, 23 nt, Human
gcaccuguacaguggaaccguug

SEQ ID NO: 3868900 - RNA, 16 nt, Human
gcaccuguagucccag

SEQ ID NO: 3868901 - RNA, 18 nt, Human
gcaccuguagucccagcu

SEQ ID NO: 3868902 - RNA, 15 nt, Human
gcaccugucccagaa

SEQ ID NO: 3868903 - RNA, 19 nt, Human
gcaccugucccagaaaaag

SEQ ID NO: 3868904 - RNA, 22 nt, Human
gcaccugucccagaaaaagcau

SEQ ID NO: 3868905 - RNA, 15 nt, Human
gcaccuguccccacc

SEQ ID NO: 3868906 - RNA, 16 nt, Human
gcaccugucugcucca

SEQ ID NO: 3868907 - RNA, 21 nt, Human
gcaccugucugcuccagcucu

SEQ ID NO: 3868908 - RNA, 19 nt, Human
gcaccuuaccaacuuucug

SEQ ID NO: 3868909 - RNA, 20 nt, Human
gcaccuuaccaacuuucugu

SEQ ID NO: 3868910 - RNA, 17 nt, Human
gcaccuuagacaguccc

SEQ ID NO: 3868911 - RNA, 20 nt, Human
gcaccuuagacagucccugc

SEQ ID NO: 3868912 - RNA, 16 nt, Human
gcaccuuaguggcuuu

SEQ ID NO: 3868913 - RNA, 18 nt, Human
gcaccuugugccuggggu

SEQ ID NO: 3868914 - RNA, 22 nt, Human
gcaccuugugucuguacacgug

SEQ ID NO: 3868915 - RNA, 17 nt, Human
gcaccuuucuaguugaa

SEQ ID NO: 3868916 - RNA, 16 nt, Human
gcaccuuugcacagga

SEQ ID NO: 3868917 - RNA, 15 nt, Human
gcacgaaauguuauu

SEQ ID NO: 3868918 - RNA, 15 nt, Human
gcacgaacccaccug

SEQ ID NO: 3868919 - RNA, 19 nt, Human
gcacgaacccaccugcuga

SEQ ID NO: 3868920 - RNA, 16 nt, Human
gcacgaccgccccagu

SEQ ID NO: 3868921 - RNA, 21 nt, Human
gcacgacgcccucuccccacc

SEQ ID NO: 3868922 - RNA, 20 nt, Human
gcacgagugggaaggacuug

SEQ ID NO: 3868923 - RNA, 23 nt, Human
gcacgauguggaaaaaugagaga

SEQ ID NO: 3868924 - RNA, 15 nt, Human
gcacgauuucuguuu

SEQ ID NO: 3868925 - RNA, 10 nt, Human
gcacgcacac

SEQ ID NO: 3868926 - RNA, 11 nt, Human
gcacgcacaca

SEQ ID NO: 3868927 - RNA, 12 nt, Human
gcacgcacacac

SEQ ID NO: 3868928 - RNA, 15 nt, Human
gcacgcacacugucu

SEQ ID NO: 3868929 - RNA, 20 nt, Human
gcacgcgcccuuucuaccau

SEQ ID NO: 3868930 - RNA, 20 nt, Human
gcacgcggagugaguuuuuu

SEQ ID NO: 3868931 - RNA, 23 nt, Human
gcacgcggauuaauuugcaucug

SEQ ID NO: 3868932 - RNA, 16 nt, Human
gcacgcugugggcagg

SEQ ID NO: 3868933 - RNA, 19 nt, Human
gcacgcuugcguaugucug

SEQ ID NO: 3868934 - RNA, 15 nt, Human
gcacggacaauaaac

SEQ ID NO: 3868935 - RNA, 18 nt, Human
gcacggacaauaaaccuc

SEQ ID NO: 3868936 - RNA, 22 nt, Human
gcacggcucuguccccagccug

SEQ ID NO: 3868937 - RNA, 13 nt, Human
gcacggcugcuga

SEQ ID NO: 3868938 - RNA, 18 nt, Human
gcacggugaauggcuuug

SEQ ID NO: 3868939 - RNA, 14 nt, Human
gcacggugggccuu

SEQ ID NO: 3868940 - RNA, 17 nt, Human
gcacggugggccuugcu

SEQ ID NO: 3868941 - RNA, 18 nt, Human
gcacggugggccuugcug

SEQ ID NO: 3868942 - RNA, 19 nt, Human
gcacggugggccuugcugg

SEQ ID NO: 3868943 - RNA, 20 nt, Human
gcacggugggccuugcuggg

SEQ ID NO: 3868944 - RNA, 17 nt, Human
gcacguaaaguacuugu

SEQ ID NO: 3868945 - RNA, 15 nt, Human
gcacguggagagcug

SEQ ID NO: 3868946 - RNA, 18 nt, Human
gcacguggagagcuggug

SEQ ID NO: 3868947 - RNA, 15 nt, Human
gcacguggccucuug

SEQ ID NO: 3868948 - RNA, 17 nt, Human
gcacguggcuucugaug

SEQ ID NO: 3868949 - RNA, 23 nt, Human
gcacguguguuuuucuauuaaaa

SEQ ID NO: 3868950 - RNA, 19 nt, Human
gcacguuuaaaguucugug

SEQ ID NO: 3868951 - RNA, 14 nt, Human
gcacuaaagcagug

SEQ ID NO: 3868952 - RNA, 15 nt, Human
gcacuaaagccagcc

SEQ ID NO: 3868953 - RNA, 14 nt, Human
gcacuaaauaugaa

SEQ ID NO: 3868954 - RNA, 15 nt, Human
gcacuaaauaugaac

SEQ ID NO: 3868955 - RNA, 19 nt, Human
gcacuaacguugagccccu

SEQ ID NO: 3868956 - RNA, 15 nt, Human
gcacuaagauauuuc

SEQ ID NO: 3868957 - RNA, 23 nt, Human
gcacuaaggggcccggccagcca

SEQ ID NO: 3868958 - RNA, 20 nt, Human
gcacuaaggugugcucugau

SEQ ID NO: 3868959 - RNA, 16 nt, Human
gcacuaccgauucuuu

SEQ ID NO: 3868960 - RNA, 12 nt, Human
gcacuacugggu

SEQ ID NO: 3868961 - RNA, 16 nt, Human
gcacuacuggguguca

SEQ ID NO: 3868962 - RNA, 18 nt, Human
gcacuacugggugucauu

SEQ ID NO: 3868963 - RNA, 24 nt, Human
gcacuagacugguggcaggggcuu

SEQ ID NO: 3868964 - RNA, 18 nt, Human
gcacuagagaaugcacag

SEQ ID NO: 3868965 - RNA, 15 nt, Human
gcacuagccaaaccu

SEQ ID NO: 3868966 - RNA, 18 nt, Human
gcacuagccaaaccucac

SEQ ID NO: 3868967 - RNA, 20 nt, Human
gcacuagccaaaccucacca

SEQ ID NO: 3868968 - RNA, 16 nt, Human
gcacuagccuuuggcu

SEQ ID NO: 3868969 - RNA, 17 nt, Human
gcacuaggcacccagcu

SEQ ID NO: 3868970 - RNA, 22 nt, Human
gcacuauaauguaagcucuacu

SEQ ID NO: 3868971 - RNA, 14 nt, Human
gcacuauaugcaaa

SEQ ID NO: 3868972 - RNA, 18 nt, Human
gcacuaucuuucagcucc

SEQ ID NO: 3868973 - RNA, 22 nt, Human
gcacuaugaggaauaauuauuu

SEQ ID NO: 3868974 - RNA, 15 nt, Human
gcacuauugagucuu

SEQ ID NO: 3868975 - RNA, 17 nt, Human
gcacuauuuauuuacaa

SEQ ID NO: 3868976 - RNA, 21 nt, Human
gcacuauuuauuuacaaaugu

SEQ ID NO: 3868977 - RNA, 22 nt, Human
gcacucacacaggacccccuuc

SEQ ID NO: 3868978 - RNA, 20 nt, Human
gcacucacagaccuggagcc

SEQ ID NO: 3868979 - RNA, 19 nt, Human
gcacucacccaugugccaa

SEQ ID NO: 3868980 - RNA, 20 nt, Human
gcacucacccaugugccaag

SEQ ID NO: 3868981 - RNA, 17 nt, Human
gcacucagaagacacug

SEQ ID NO: 3868982 - RNA, 20 nt, Human
gcacucagaagacacugaug

SEQ ID NO: 3868983 - RNA, 20 nt, Human
gcacucauuuucuauaacag

SEQ ID NO: 3868984 - RNA, 13 nt, Human
gcacuccagccug

SEQ ID NO: 3868985 - RNA, 16 nt, Human
gcacuccagccugggc

SEQ ID NO: 3868986 - RNA, 21 nt, Human
gcacuccagccugggcgacag

SEQ ID NO: 3868987 - RNA, 15 nt, Human
gcacuccaugcuuag

SEQ ID NO: 3868988 - RNA, 12 nt, Human
gcacuccccugc

SEQ ID NO: 3868989 - RNA, 13 nt, Human
gcacuccccugcu

SEQ ID NO: 3868990 - RNA, 14 nt, Human
gcacuccccugcug

SEQ ID NO: 3868991 - RNA, 23 nt, Human
gcacucccuugguggcaagagcc

SEQ ID NO: 3868992 - RNA, 19 nt, Human
gcacuccucgguacuccca

SEQ ID NO: 3868993 - RNA, 17 nt, Human
gcacucgcuagcagugg

SEQ ID NO: 3868994 - RNA, 12 nt, Human
gcacucuagauu

SEQ ID NO: 3868995 - RNA, 13 nt, Human
gcacucuagauuc

SEQ ID NO: 3868996 - RNA, 15 nt, Human
gcacucuagauucca

SEQ ID NO: 3868997 - RNA, 23 nt, Human
gcacucugaguuuaccauuugua

SEQ ID NO: 3868998 - RNA, 19 nt, Human
gcacucugugcccaugggc

SEQ ID NO: 3868999 - RNA, 19 nt, Human
gcacucuguuauuuagacu

SEQ ID NO: 3869000 - RNA, 14 nt, Human
gcacugaaaagguu

SEQ ID NO: 3869001 - RNA, 14 nt, Human
gcacugaaguuuga

SEQ ID NO: 3869002 - RNA, 22 nt, Human
gcacugacauuguuggccaaag

SEQ ID NO: 3869003 - RNA, 14 nt, Human
gcacugacccuucc

SEQ ID NO: 3869004 - RNA, 15 nt, Human
gcacugacccuucca

SEQ ID NO: 3869005 - RNA, 20 nt, Human
gcacugacccuuccagacau

SEQ ID NO: 3869006 - RNA, 21 nt, Human
gcacugacccuuccagacaua

SEQ ID NO: 3869007 - RNA, 15 nt, Human
gcacugacuucuaag

SEQ ID NO: 3869008 - RNA, 21 nt, Human
gcacugagauaccagcgagga

SEQ ID NO: 3869009 - RNA, 15 nt, Human
gcacugagauauuua

SEQ ID NO: 3869010 - RNA, 12 nt, Human
gcacugagcccc

SEQ ID NO: 3869011 - RNA, 11 nt, Human
gcacugagggc

SEQ ID NO: 3869012 - RNA, 12 nt, Human
gcacugagggcc

SEQ ID NO: 3869013 - RNA, 19 nt, Human
gcacugaugcugccccuca

SEQ ID NO: 3869014 - RNA, 22 nt, Human
gcacugaugcugccccucaucu

SEQ ID NO: 3869015 - RNA, 18 nt, Human
gcacugauguuguguuuu

SEQ ID NO: 3869016 - RNA, 12 nt, Human
gcacugauuuca

SEQ ID NO: 3869017 - RNA, 19 nt, Human
gcacugauuucacaacaga

SEQ ID NO: 3869018 - RNA, 13 nt, Human
gcacugccaggag

SEQ ID NO: 3869019 - RNA, 14 nt, Human
gcacugccaggagg

SEQ ID NO: 3869020 - RNA, 16 nt, Human
gcacugccaggaggga

SEQ ID NO: 3869021 - RNA, 15 nt, Human
gcacugccaugcagg

SEQ ID NO: 3869022 - RNA, 21 nt, Human
gcacugccucucacagcugag

SEQ ID NO: 3869023 - RNA, 18 nt, Human
gcacugccugauggaccu

SEQ ID NO: 3869024 - RNA, 17 nt, Human
gccaccucuaacagcac

SEQ ID NO: 3869025 - RNA, 19 nt, Human
gccaccucuaacagcacca

SEQ ID NO: 3869026 - RNA, 12 nt, Human
gccaccucucca

SEQ ID NO: 3869027 - RNA, 13 nt, Human
gccaccucuccaa

SEQ ID NO: 3869028 - RNA, 15 nt, Human
gccaccucuccaagg

SEQ ID NO: 3869029 - RNA, 18 nt, Human
gccaccucuccaagggcu

SEQ ID NO: 3869030 - RNA, 13 nt, Human
gccaccucucucc

SEQ ID NO: 3869031 - RNA, 23 nt, Human
gccaccucugcggaccccagcug

SEQ ID NO: 3869032 - RNA, 16 nt, Human
gccaccucugucauuu

SEQ ID NO: 3869033 - RNA, 22 nt, Human
gccaccugaggugggcccagga

SEQ ID NO: 3869034 - RNA, 10 nt, Human
gccaccugcc

SEQ ID NO: 3869035 - RNA, 14 nt, Human
gccaccugcccccu

SEQ ID NO: 3869036 - RNA, 20 nt, Human
gccaccugcccccuucuccc

SEQ ID NO: 3869037 - RNA, 21 nt, Human
gccaccugcccccuucuccca

SEQ ID NO: 3869038 - RNA, 23 nt, Human
gccaccugcccccuucucccaca

SEQ ID NO: 3869039 - RNA, 11 nt, Human
gccaccugccu

SEQ ID NO: 3869040 - RNA, 12 nt, Human
gccaccuggacc

SEQ ID NO: 3869041 - RNA, 13 nt, Human
gccaccuggaccc

SEQ ID NO: 3869042 - RNA, 13 nt, Human
gccaccuguccca

SEQ ID NO: 3869043 - RNA, 13 nt, Human
gccaccugucugu

SEQ ID NO: 3869044 - RNA, 14 nt, Human
gccaccugucuguc

SEQ ID NO: 3869045 - RNA, 20 nt, Human
gccacgcccaacuaauuuuu

SEQ ID NO: 3869046 - RNA, 21 nt, Human
gccacgcgguacaaaggaaaa

SEQ ID NO: 3869047 - RNA, 19 nt, Human
gccacggccaggccagagg

SEQ ID NO: 3869048 - RNA, 17 nt, Human
gccacgugccaggcccg

SEQ ID NO: 3869049 - RNA, 21 nt, Human
gccacgugggcaaacaggcag

SEQ ID NO: 3869050 - RNA, 15 nt, Human
gccacguuccacagu

SEQ ID NO: 3869051 - RNA, 22 nt, Human
gccacguuccuuacugcagaau

SEQ ID NO: 3869052 - RNA, 19 nt, Human
gccacuaaccuugccuggu

SEQ ID NO: 3869053 - RNA, 23 nt, Human
gccacuaacuagagcagcccugg

SEQ ID NO: 3869054 - RNA, 20 nt, Human
gccacuaagaaccccucugc

SEQ ID NO: 3869055 - RNA, 13 nt, Human
gccacuaagcaga

SEQ ID NO: 3869056 - RNA, 16 nt, Human
gccacuaagcagagga

SEQ ID NO: 3869057 - RNA, 21 nt, Human
gccacuagacucuucacuguu

SEQ ID NO: 3869058 - RNA, 14 nt, Human
gccacuaggcuggg

SEQ ID NO: 3869059 - RNA, 16 nt, Human
gccacuaggcugggug

SEQ ID NO: 3869060 - RNA, 17 nt, Human
gccacuaggcugggugc

SEQ ID NO: 3869061 - RNA, 16 nt, Human
gccacucaccgaagcc

SEQ ID NO: 3869062 - RNA, 15 nt, Human
gccacucacuaggcc

SEQ ID NO: 3869063 - RNA, 18 nt, Human
gccacucacuaggccccc

SEQ ID NO: 3869064 - RNA, 22 nt, Human
gccacucaggcccaaagccucg

SEQ ID NO: 3869065 - RNA, 20 nt, Human
gccacucauuucaucucauu

SEQ ID NO: 3869066 - RNA, 22 nt, Human
gccacuccagaccccuggcuuu

SEQ ID NO: 3869067 - RNA, 13 nt, Human
gccacuccccagc

SEQ ID NO: 3869068 - RNA, 21 nt, Human
gccacuccgagaggugggcca

SEQ ID NO: 3869069 - RNA, 13 nt, Human
gccacuccucuga

SEQ ID NO: 3869070 - RNA, 17 nt, Human
gccacuccucugacuca

SEQ ID NO: 3869071 - RNA, 21 nt, Human
gccacuccucugacucagggc

SEQ ID NO: 3869072 - RNA, 14 nt, Human
gccacucgcuuccc

SEQ ID NO: 3869073 - RNA, 18 nt, Human
gccacucgcuucccccau

SEQ ID NO: 3869074 - RNA, 18 nt, Human
gccacucucuucccuuuc

SEQ ID NO: 3869075 - RNA, 15 nt, Human
gccacucugccucug

SEQ ID NO: 3869076 - RNA, 22 nt, Human
gccacucugccucugccugcau

SEQ ID NO: 3869077 - RNA, 13 nt, Human
gccacucuguucc

SEQ ID NO: 3869078 - RNA, 13 nt, Human
gccacucuuccaa

SEQ ID NO: 3869079 - RNA, 14 nt, Human
gccacugaagcugg

SEQ ID NO: 3869080 - RNA, 20 nt, Human
gccacugaggggggauccag

SEQ ID NO: 3869081 - RNA, 16 nt, Human
gccacugauauucaga

SEQ ID NO: 3869082 - RNA, 16 nt, Human
gccacugcacagagcu

SEQ ID NO: 3869083 - RNA, 17 nt, Human
gccacugcaccgggcca

SEQ ID NO: 3869084 - RNA, 19 nt, Human
gccacugcaccgggccaca

SEQ ID NO: 3869085 - RNA, 20 nt, Human
gccacugcaccgggccacag

SEQ ID NO: 3869086 - RNA, 21 nt, Human
gccacugcaccgggccacaga

SEQ ID NO: 3869087 - RNA, 21 nt, Human
gccacugcacuauagccuagg

SEQ ID NO: 3869088 - RNA, 18 nt, Human
gccacugcacuccagccu

SEQ ID NO: 3869089 - RNA, 21 nt, Human
gccacugcacuccagccuggg

SEQ ID NO: 3869090 - RNA, 19 nt, Human
gccacugcauaccaaccug

SEQ ID NO: 3869091 - RNA, 13 nt, Human
gccacugccucuc

SEQ ID NO: 3869092 - RNA, 16 nt, Human
gccacugccucucccu

SEQ ID NO: 3869093 - RNA, 17 nt, Human
gccacugccucuuccuc

SEQ ID NO: 3869094 - RNA, 18 nt, Human
gccacugccuucgcuucu

SEQ ID NO: 3869095 - RNA, 23 nt, Human
gccacugccuucgcuucuugccu

SEQ ID NO: 3869096 - RNA, 22 nt, Human
gccacugcucccuaagccagcc

SEQ ID NO: 3869097 - RNA, 23 nt, Human
gccacugcucccuaagccagccu

SEQ ID NO: 3869098 - RNA, 16 nt, Human
gccacugcuccgugga

SEQ ID NO: 3869099 - RNA, 22 nt, Human
gccacuggagugugcguggugg

SEQ ID NO: 3869100 - RNA, 20 nt, Human
gccacuguguuccuuccgcu

SEQ ID NO: 3869101 - RNA, 21 nt, Human
gccacuguuuugaaucucaua

SEQ ID NO: 3869102 - RNA, 16 nt, Human
gccacuuaauguaugu

SEQ ID NO: 3869103 - RNA, 21 nt, Human
gccacuuaccuucaauaaagu

SEQ ID NO: 3869104 - RNA, 16 nt, Human
gccacuucggccaggu

SEQ ID NO: 3869105 - RNA, 21 nt, Human
gccacuugaacaaaaucuguu

SEQ ID NO: 3869106 - RNA, 13 nt, Human
gccacuuggagug

SEQ ID NO: 3869107 - RNA, 15 nt, Human
gccacuuuaagagag

SEQ ID NO: 3869108 - RNA, 20 nt, Human
gccacuuuaagagagaaauc

SEQ ID NO: 3869109 - RNA, 19 nt, Human
gccacuuuacccaccuaga

SEQ ID NO: 3869110 - RNA, 13 nt, Human
gccacuuuccaag

SEQ ID NO: 3869111 - RNA, 19 nt, Human
gccacuuugcaaaggagcu

SEQ ID NO: 3869112 - RNA, 14 nt, Human
gccacuuugcacga

SEQ ID NO: 3869113 - RNA, 23 nt, Human
gccacuuugcacgacgcccucuc

SEQ ID NO: 3869114 - RNA, 21 nt, Human
gccacuuugguacauggccag

SEQ ID NO: 3869115 - RNA, 23 nt, Human
gccacuuuugacuagggauucag

SEQ ID NO: 3869116 - RNA, 20 nt, Human
gccagaaaccuuccugcuga

SEQ ID NO: 3869117 - RNA, 22 nt, Human
gccagaacguggcucugcuggc

SEQ ID NO: 3869118 - RNA, 14 nt, Human
gccagaagcuacug

SEQ ID NO: 3869119 - RNA, 12 nt, Human
gccagaagcuga

SEQ ID NO: 3869120 - RNA, 16 nt, Human
gccagaagucaaggcu

SEQ ID NO: 3869121 - RNA, 23 nt, Human
gccagaagucaaggcuuagaccc

SEQ ID NO: 3869122 - RNA, 15 nt, Human
gccagaaucagcaca

SEQ ID NO: 3869123 - RNA, 19 nt, Human
gccagacacucugcucugc

SEQ ID NO: 3869124 - RNA, 14 nt, Human
gccagacauguggu

SEQ ID NO: 3869125 - RNA, 23 nt, Human
gccagaccaacguuacucagggc

SEQ ID NO: 3869126 - RNA, 15 nt, Human
gccagaccagagcuc

SEQ ID NO: 3869127 - RNA, 16 nt, Human
gccagaccagcaggcu

SEQ ID NO: 3869128 - RNA, 17 nt, Human
gccagacccccuggaga

SEQ ID NO: 3869129 - RNA, 13 nt, Human
gccagacucuggu

SEQ ID NO: 3869130 - RNA, 15 nt, Human
gccagacucuggucu

SEQ ID NO: 3869131 - RNA, 17 nt, Human
gccagagaacccagccc

SEQ ID NO: 3869132 - RNA, 18 nt, Human
gccagagaacccagccca

SEQ ID NO: 3869133 - RNA, 14 nt, Human
gccagagaagugac

SEQ ID NO: 3869134 - RNA, 16 nt, Human
gccagagaagugacag

SEQ ID NO: 3869135 - RNA, 12 nt, Human
gccagagacaca

SEQ ID NO: 3869136 - RNA, 15 nt, Human
gccagagacacaagc

SEQ ID NO: 3869137 - RNA, 19 nt, Human
gccagagacacaagccuuc

SEQ ID NO: 3869138 - RNA, 20 nt, Human
gccagagacacaagccuucg

SEQ ID NO: 3869139 - RNA, 15 nt, Human
gccagagagccuggu

SEQ ID NO: 3869140 - RNA, 21 nt, Human
gccagagauccaaaagaagcc

SEQ ID NO: 3869141 - RNA, 22 nt, Human
gccagagauccaaaagaagccc

SEQ ID NO: 3869142 - RNA, 23 nt, Human
gccagagcccacuccaucuggua

SEQ ID NO: 3869143 - RNA, 14 nt, Human
gccagagccugggg

SEQ ID NO: 3869144 - RNA, 16 nt, Human
gccagagccuggggcu

SEQ ID NO: 3869145 - RNA, 14 nt, Human
gccagaggaacugu

SEQ ID NO: 3869146 - RNA, 21 nt, Human
gccagaggaacuguccagaga

SEQ ID NO: 3869147 - RNA, 24 nt, Human
gccagaggaacuguccagagagca

SEQ ID NO: 3869148 - RNA, 12 nt, Human
gccagaggagag

SEQ ID NO: 3869149 - RNA, 17 nt, Human
gccagaggagagaggac

SEQ ID NO: 3869150 - RNA, 19 nt, Human
gccagaggagagaggaccc

SEQ ID NO: 3869151 - RNA, 13 nt, Human
gccagaggcaccu

SEQ ID NO: 3869152 - RNA, 20 nt, Human
gccagaggcagaacccuggu

SEQ ID NO: 3869153 - RNA, 23 nt, Human
gccagaggcagaacccuggugag

SEQ ID NO: 3869154 - RNA, 13 nt, Human
gccagaggcuggg

SEQ ID NO: 3869155 - RNA, 18 nt, Human
gccagagggagugacaga

SEQ ID NO: 3869156 - RNA, 21 nt, Human
gccagagggagugacagaggc

SEQ ID NO: 3869157 - RNA, 13 nt, Human
gccagaggugcuu

SEQ ID NO: 3869158 - RNA, 15 nt, Human
gccagaggugcuuca

SEQ ID NO: 3869159 - RNA, 16 nt, Human
gccagaggugcuucac

SEQ ID NO: 3869160 - RNA, 19 nt, Human
gccagaggugcuucacccu

SEQ ID NO: 3869161 - RNA, 15 nt, Human
gccagaggugggcag

SEQ ID NO: 3869162 - RNA, 17 nt, Human
gccagaggugggcaggu

SEQ ID NO: 3869163 - RNA, 19 nt, Human
gccagaguggccuggccag

SEQ ID NO: 3869164 - RNA, 22 nt, Human
gccagaguggccuggccaggag

SEQ ID NO: 3869165 - RNA, 14 nt, Human
gccagaucuuaggu

SEQ ID NO: 3869166 - RNA, 22 nt, Human
gccagauggacuccagccugcc

SEQ ID NO: 3869167 - RNA, 17 nt, Human
gccagauggggccucug

SEQ ID NO: 3869168 - RNA, 22 nt, Human
gcccaccugucaaacaaagcca

SEQ ID NO: 3869169 - RNA, 15 nt, Human
gcccacgacacugca

SEQ ID NO: 3869170 - RNA, 15 nt, Human
gcccacgcccccacu

SEQ ID NO: 3869171 - RNA, 17 nt, Human
gcccacgcccccacugg

SEQ ID NO: 3869172 - RNA, 15 nt, Human
gcccacgcugacuac

SEQ ID NO: 3869173 - RNA, 15 nt, Human
gcccacggcuaagag

SEQ ID NO: 3869174 - RNA, 18 nt, Human
gcccacggcuaagaggcu

SEQ ID NO: 3869175 - RNA, 21 nt, Human
gcccacggcuaagaggcugcu

SEQ ID NO: 3869176 - RNA, 15 nt, Human
gcccacguagggcgg

SEQ ID NO: 3869177 - RNA, 15 nt, Human
gcccacgucacgugu

SEQ ID NO: 3869178 - RNA, 13 nt, Human
gcccacguccugu

SEQ ID NO: 3869179 - RNA, 18 nt, Human
gcccacuauggucaucuu

SEQ ID NO: 3869180 - RNA, 19 nt, Human
gcccacuccaucugguaga

SEQ ID NO: 3869181 - RNA, 19 nt, Human
gcccacucccugcaaccug

SEQ ID NO: 3869182 - RNA, 13 nt, Human
gcccacuccugcu

SEQ ID NO: 3869183 - RNA, 17 nt, Human
gcccacucugcucgccu

SEQ ID NO: 3869184 - RNA, 20 nt, Human
gcccacugcccacccccuca

SEQ ID NO: 3869185 - RNA, 13 nt, Human
gcccacuguccug

SEQ ID NO: 3869186 - RNA, 14 nt, Human
gcccacuguccugg

SEQ ID NO: 3869187 - RNA, 23 nt, Human
gcccacuguccugggccugcaga

SEQ ID NO: 3869188 - RNA, 17 nt, Human
gcccacuguccugggcg

SEQ ID NO: 3869189 - RNA, 23 nt, Human
gcccacuguccugggcgcccugg

SEQ ID NO: 3869190 - RNA, 15 nt, Human
gcccacuucccuggg

SEQ ID NO: 3869191 - RNA, 13 nt, Human
gcccacuucugcc

SEQ ID NO: 3869192 - RNA, 16 nt, Human
gcccagaaaaggacag

SEQ ID NO: 3869193 - RNA, 15 nt, Human
gcccagaacuucccu

SEQ ID NO: 3869194 - RNA, 16 nt, Human
gcccagaacuucccug

SEQ ID NO: 3869195 - RNA, 18 nt, Human
gcccagaagaaaauucuc

SEQ ID NO: 3869196 - RNA, 23 nt, Human
gcccagaauaaacuggcagcuca

SEQ ID NO: 3869197 - RNA, 16 nt, Human
gcccagaauaaguuau

SEQ ID NO: 3869198 - RNA, 18 nt, Human
gcccagaauucccagcug

SEQ ID NO: 3869199 - RNA, 16 nt, Human
gcccagaccccucugg

SEQ ID NO: 3869200 - RNA, 19 nt, Human
gcccagaccccucuggcca

SEQ ID NO: 3869201 - RNA, 20 nt, Human
gcccagaccccucuggccag

SEQ ID NO: 3869202 - RNA, 14 nt, Human
gcccagacccugga

SEQ ID NO: 3869203 - RNA, 17 nt, Human
gcccagacccuggagga

SEQ ID NO: 3869204 - RNA, 13 nt, Human
gcccagagaagcc

SEQ ID NO: 3869205 - RNA, 10 nt, Human
gcccagagac

SEQ ID NO: 3869206 - RNA, 19 nt, Human
gcccagagacccaagcugc

SEQ ID NO: 3869207 - RNA, 17 nt, Human
gcccagagagaagagcc

SEQ ID NO: 3869208 - RNA, 21 nt, Human
gcccagagagaagagccccac

SEQ ID NO: 3869209 - RNA, 22 nt, Human
gcccagagagaagagccccacu

SEQ ID NO: 3869210 - RNA, 15 nt, Human
gcccagagagggugg

SEQ ID NO: 3869211 - RNA, 16 nt, Human
gcccagagaugccucc

SEQ ID NO: 3869212 - RNA, 18 nt, Human
gcccagagaugccuccac

SEQ ID NO: 3869213 - RNA, 22 nt, Human
gcccagagaugccuccaccgcu

SEQ ID NO: 3869214 - RNA, 22 nt, Human
gcccagagaugggacugggagg

SEQ ID NO: 3869215 - RNA, 18 nt, Human
gcccagagcaggaagcau

SEQ ID NO: 3869216 - RNA, 18 nt, Human
gcccagagcccagcucca

SEQ ID NO: 3869217 - RNA, 15 nt, Human
gcccagagcugggug

SEQ ID NO: 3869218 - RNA, 16 nt, Human
gcccagagcuggguga

SEQ ID NO: 3869219 - RNA, 16 nt, Human
gcccagaggagggcag

SEQ ID NO: 3869220 - RNA, 12 nt, Human
gcccagagggcc

SEQ ID NO: 3869221 - RNA, 13 nt, Human
gcccagagggccc

SEQ ID NO: 3869222 - RNA, 16 nt, Human
gcccagagggcccagg

SEQ ID NO: 3869223 - RNA, 21 nt, Human
gcccagagggcccaggcaggc

SEQ ID NO: 3869224 - RNA, 14 nt, Human
gcccagagggccug

SEQ ID NO: 3869225 - RNA, 15 nt, Human
gcccagagggucugg

SEQ ID NO: 3869226 - RNA, 12 nt, Human
gcccagagguaa

SEQ ID NO: 3869227 - RNA, 16 nt, Human
gcccagagguaacaga

SEQ ID NO: 3869228 - RNA, 22 nt, Human
gcccagagguaacagaacagcu

SEQ ID NO: 3869229 - RNA, 19 nt, Human
gcccagauuaugagacaca

SEQ ID NO: 3869230 - RNA, 22 nt, Human
gcccagauuaugagacacagga

SEQ ID NO: 3869231 - RNA, 20 nt, Human
gcccagauuccccuguguca

SEQ ID NO: 3869232 - RNA, 21 nt, Human
gcccagcacugcuugaggaaa

SEQ ID NO: 3869233 - RNA, 21 nt, Human
gcccagccaaacccugucuga

SEQ ID NO: 3869234 - RNA, 15 nt, Human
gcccagccaggcccc

SEQ ID NO: 3869235 - RNA, 16 nt, Human
gcccagccaggcccca

SEQ ID NO: 3869236 - RNA, 20 nt, Human
gcccagccauuaccauggag

SEQ ID NO: 3869237 - RNA, 23 nt, Human
gcccagccauuaccauggagaca

SEQ ID NO: 3869238 - RNA, 16 nt, Human
gcccagcccaccccau

SEQ ID NO: 3869239 - RNA, 13 nt, Human
gcccagcccagcu

SEQ ID NO: 3869240 - RNA, 15 nt, Human
gcccagcccagcugg

SEQ ID NO: 3869241 - RNA, 16 nt, Human
gcccagcccagcuggu

SEQ ID NO: 3869242 - RNA, 23 nt, Human
gcccagccccacuccucugcuga

SEQ ID NO: 3869243 - RNA, 21 nt, Human
gcccagcccccacagugcugu

SEQ ID NO: 3869244 - RNA, 11 nt, Human
gcccagccccu

SEQ ID NO: 3869245 - RNA, 19 nt, Human
gcccagccccuacugcugu

SEQ ID NO: 3869246 - RNA, 14 nt, Human
gcccagccccuaga

SEQ ID NO: 3869247 - RNA, 13 nt, Human
gcccagccccuuc

SEQ ID NO: 3869248 - RNA, 14 nt, Human
gcccagccccuucu

SEQ ID NO: 3869249 - RNA, 14 nt, Human
gcccagcccggcuc

SEQ ID NO: 3869250 - RNA, 12 nt, Human
gcccagcccucc

SEQ ID NO: 3869251 - RNA, 17 nt, Human
gcccagcccugcuggcc

SEQ ID NO: 3869252 - RNA, 16 nt, Human
gcccagcccuguucug

SEQ ID NO: 3869253 - RNA, 19 nt, Human
gcccagccgacccccucuc

SEQ ID NO: 3869254 - RNA, 19 nt, Human
gcccagccggccucucugg

SEQ ID NO: 3869255 - RNA, 21 nt, Human
gcccagccggccucucuggcc

SEQ ID NO: 3869256 - RNA, 23 nt, Human
gcccagccggccucucuggccuc

SEQ ID NO: 3869257 - RNA, 21 nt, Human
gcccagccucuuucccuucca

SEQ ID NO: 3869258 - RNA, 23 nt, Human
gcccagccuuuguuccccacugg

SEQ ID NO: 3869259 - RNA, 17 nt, Human
gcccagcgcggacaucc

SEQ ID NO: 3869260 - RNA, 19 nt, Human
gcccagcgcggacaucccc

SEQ ID NO: 3869261 - RNA, 15 nt, Human
gcccagcgcucugcc

SEQ ID NO: 3869262 - RNA, 16 nt, Human
gcccagcgcucugccu

SEQ ID NO: 3869263 - RNA, 19 nt, Human
gcccagcggacaguggcag

SEQ ID NO: 3869264 - RNA, 21 nt, Human
gcccagcggacaguggcagga

SEQ ID NO: 3869265 - RNA, 16 nt, Human
gcccagcggccccucc

SEQ ID NO: 3869266 - RNA, 18 nt, Human
gcccagcggccccuccca

SEQ ID NO: 3869267 - RNA, 15 nt, Human
gcccagcucagaggg

SEQ ID NO: 3869268 - RNA, 14 nt, Human
gcccagcucagucu

SEQ ID NO: 3869269 - RNA, 15 nt, Human
gcccagcuccaaggg

SEQ ID NO: 3869270 - RNA, 14 nt, Human
gcccagcuccaggg

SEQ ID NO: 3869271 - RNA, 15 nt, Human
gcccagcuccagggc

SEQ ID NO: 3869272 - RNA, 18 nt, Human
gcccagcuccagggccag

SEQ ID NO: 3869273 - RNA, 11 nt, Human
gcccagcuccc

SEQ ID NO: 3869274 - RNA, 12 nt, Human
gcccagcucccc

SEQ ID NO: 3869275 - RNA, 12 nt, Human
gcccagcuccug

SEQ ID NO: 3869276 - RNA, 14 nt, Human
gcccagcuccugac

SEQ ID NO: 3869277 - RNA, 15 nt, Human
gcccagcugcaccug

SEQ ID NO: 3869278 - RNA, 18 nt, Human
gcccagcugcaccugcca

SEQ ID NO: 3869279 - RNA, 18 nt, Human
gcccagcugcucugccca

SEQ ID NO: 3869280 - RNA, 20 nt, Human
gcccagcugcucugcccaga

SEQ ID NO: 3869281 - RNA, 21 nt, Human
gcccagcugcucugcccagag

SEQ ID NO: 3869282 - RNA, 13 nt, Human
gcccagcugggcu

SEQ ID NO: 3869283 - RNA, 16 nt, Human
gcccagcugggcucug

SEQ ID NO: 3869284 - RNA, 13 nt, Human
gcccagcuggguc

SEQ ID NO: 3869285 - RNA, 14 nt, Human
gcccagcuggguca

SEQ ID NO: 3869286 - RNA, 20 nt, Human
gcccagcugggucaggcagg

SEQ ID NO: 3869287 - RNA, 13 nt, Human
gcccagcuugggc

SEQ ID NO: 3869288 - RNA, 15 nt, Human
gcccagcuugggccc

SEQ ID NO: 3869289 - RNA, 18 nt, Human
gcccagcuugggcccagc

SEQ ID NO: 3869290 - RNA, 23 nt, Human
gcccagcuugggcccagcugggc

SEQ ID NO: 3869291 - RNA, 16 nt, Human
gcccaggaaaggcucc

SEQ ID NO: 3869292 - RNA, 24 nt, Human
gcccaggaaaggcuccaggagcag

SEQ ID NO: 3869293 - RNA, 20 nt, Human
gcccaggaagucucaucugg

SEQ ID NO: 3869294 - RNA, 21 nt, Human
gcccaggaagucucaucuggg

SEQ ID NO: 3869295 - RNA, 17 nt, Human
gcccaggaccagcuggg

SEQ ID NO: 3869296 - RNA, 19 nt, Human
gcccaggaccagcuggggc

SEQ ID NO: 3869297 - RNA, 13 nt, Human
gcccaggacccca

SEQ ID NO: 3869298 - RNA, 18 nt, Human
gcccaggacggggccggc

SEQ ID NO: 3869299 - RNA, 14 nt, Human
gcccaggagagaga

SEQ ID NO: 3869300 - RNA, 23 nt, Human
gcccaggagagagaaagccaggc

SEQ ID NO: 3869301 - RNA, 14 nt, Human
gcccaggagagcca

SEQ ID NO: 3869302 - RNA, 15 nt, Human
gcccaggagccucac

SEQ ID NO: 3869303 - RNA, 18 nt, Human
gcccaggagccucacugg

SEQ ID NO: 3869304 - RNA, 20 nt, Human
gcccaggagcuccccucccc

SEQ ID NO: 3869305 - RNA, 13 nt, Human
gcccaggaguuug

SEQ ID NO: 3869306 - RNA, 15 nt, Human
gcccaggaguuuggc

SEQ ID NO: 3869307 - RNA, 19 nt, Human
gcccaggaguuuggccaga

SEQ ID NO: 3869308 - RNA, 22 nt, Human
gcccaggauacuggcacagagg

SEQ ID NO: 3869309 - RNA, 23 nt, Human
gcccaggauacuggcacagaggu

SEQ ID NO: 3869310 - RNA, 14 nt, Human
gcccaggaugcugc

SEQ ID NO: 3869311 - RNA, 14 nt, Human
gcccaggcaggcca

SEQ ID NO: 3869312 - RNA, 12 nt, Human
gcccaggcaggu

SEQ ID NO: 3869313 - RNA, 13 nt, Human
gcccaggcagguc

SEQ ID NO: 3869314 - RNA, 14 nt, Human
gccugucugucucu

SEQ ID NO: 3869315 - RNA, 20 nt, Human
gccugucugucucuccaucu

SEQ ID NO: 3869316 - RNA, 19 nt, Human
gccugucugugaagagcaa

SEQ ID NO: 3869317 - RNA, 16 nt, Human
gccugucugugaccug

SEQ ID NO: 3869318 - RNA, 16 nt, Human
gccugucuuaauuuuc

SEQ ID NO: 3869319 - RNA, 17 nt, Human
gccugugaacugaacuc

SEQ ID NO: 3869320 - RNA, 21 nt, Human
gccugugacauacccccuccc

SEQ ID NO: 3869321 - RNA, 15 nt, Human
gccugugcaaugcau

SEQ ID NO: 3869322 - RNA, 13 nt, Human
gccugugccaggu

SEQ ID NO: 3869323 - RNA, 14 nt, Human
gccugugccaggug

SEQ ID NO: 3869324 - RNA, 17 nt, Human
gccugugccucugggac

SEQ ID NO: 3869325 - RNA, 19 nt, Human
gccugugccucugggacug

SEQ ID NO: 3869326 - RNA, 15 nt, Human
gccugugcugcccgu

SEQ ID NO: 3869327 - RNA, 16 nt, Human
gccugugcugcccguc

SEQ ID NO: 3869328 - RNA, 13 nt, Human
gccugugcuguga

SEQ ID NO: 3869329 - RNA, 19 nt, Human
gccuguggaaucuggagug

SEQ ID NO: 3869330 - RNA, 17 nt, Human
gccuguggaaugagugu

SEQ ID NO: 3869331 - RNA, 18 nt, Human
gccuguggcaguaaagag

SEQ ID NO: 3869332 - RNA, 19 nt, Human
gccuguggcaguaaagaga

SEQ ID NO: 3869333 - RNA, 22 nt, Human
gccuguggccaugacccugccu

SEQ ID NO: 3869334 - RNA, 14 nt, Human
gccuguggcccugu

SEQ ID NO: 3869335 - RNA, 16 nt, Human
gccuguggccuuugca

SEQ ID NO: 3869336 - RNA, 14 nt, Human
gccuguggcugugg

SEQ ID NO: 3869337 - RNA, 16 nt, Human
gccuguggcuguggag

SEQ ID NO: 3869338 - RNA, 17 nt, Human
gccuguguaacagcucc

SEQ ID NO: 3869339 - RNA, 21 nt, Human
gccuguguagcugugaccugc

SEQ ID NO: 3869340 - RNA, 22 nt, Human
gccuguguagcugugaccugcu

SEQ ID NO: 3869341 - RNA, 19 nt, Human
gccuguguccaugcgcuca

SEQ ID NO: 3869342 - RNA, 20 nt, Human
gccuguguccaugcgcucag

SEQ ID NO: 3869343 - RNA, 12 nt, Human
gccuguucaguu

SEQ ID NO: 3869344 - RNA, 15 nt, Human
gccuguucaguuaca

SEQ ID NO: 3869345 - RNA, 16 nt, Human
gccuguucaguuacag

SEQ ID NO: 3869346 - RNA, 22 nt, Human
gccuguucaguuacagaaagug

SEQ ID NO: 3869347 - RNA, 15 nt, Human
gccuguucauggcag

SEQ ID NO: 3869348 - RNA, 20 nt, Human
gccuguucccccgccgcuuu

SEQ ID NO: 3869349 - RNA, 20 nt, Human
gccuguugcuauagagccua

SEQ ID NO: 3869350 - RNA, 20 nt, Human
gccuguugggccaggagccu

SEQ ID NO: 3869351 - RNA, 21 nt, Human
gccuguugggccaggagccuc

SEQ ID NO: 3869352 - RNA, 12 nt, Human
gccuguuuaaga

SEQ ID NO: 3869353 - RNA, 19 nt, Human
gccuguuucccaggcccac

SEQ ID NO: 3869354 - RNA, 13 nt, Human
gccuguuucuucc

SEQ ID NO: 3869355 - RNA, 13 nt, Human
gccuguuuuaugu

SEQ ID NO: 3869356 - RNA, 17 nt, Human
gccuuaaaaccaaagag

SEQ ID NO: 3869357 - RNA, 14 nt, Human
gccuuaaaauggaa

SEQ ID NO: 3869358 - RNA, 13 nt, Human
gccuuaaagacaa

SEQ ID NO: 3869359 - RNA, 21 nt, Human
gccuuaagugaggaaaucaaa

SEQ ID NO: 3869360 - RNA, 23 nt, Human
gccuuaauacuuuuuuauuuugu

SEQ ID NO: 3869361 - RNA, 17 nt, Human
gccuuaauuuccuuuuu

SEQ ID NO: 3869362 - RNA, 17 nt, Human
gccuuaauuuucaguau

SEQ ID NO: 3869363 - RNA, 15 nt, Human
gccuuacauuuguga

SEQ ID NO: 3869364 - RNA, 13 nt, Human
gccuuaccccugc

SEQ ID NO: 3869365 - RNA, 20 nt, Human
gccuuaccuccugcccagga

SEQ ID NO: 3869366 - RNA, 22 nt, Human
gccuuaccuccugcccaggaga

SEQ ID NO: 3869367 - RNA, 16 nt, Human
gccuuagaaccuuucu

SEQ ID NO: 3869368 - RNA, 17 nt, Human
gccuuagaagucacaca

SEQ ID NO: 3869369 - RNA, 19 nt, Human
gccuuagaagucacacagu

SEQ ID NO: 3869370 - RNA, 15 nt, Human
gccuuagcauguuug

SEQ ID NO: 3869371 - RNA, 17 nt, Human
gccuuagggcacugggc

SEQ ID NO: 3869372 - RNA, 19 nt, Human
gccuuagggcacugggcug

SEQ ID NO: 3869373 - RNA, 18 nt, Human
gccuuagucucaguuugu

SEQ ID NO: 3869374 - RNA, 12 nt, Human
gccuuagugggc

SEQ ID NO: 3869375 - RNA, 20 nt, Human
gccuuagugggccagggcug

SEQ ID NO: 3869376 - RNA, 13 nt, Human
gccuuauccucug

SEQ ID NO: 3869377 - RNA, 15 nt, Human
gccuuauccucugau

SEQ ID NO: 3869378 - RNA, 19 nt, Human
gccuuaucgggcuccagcc

SEQ ID NO: 3869379 - RNA, 23 nt, Human
gccuuaucuccaagaccagagau

SEQ ID NO: 3869380 - RNA, 23 nt, Human
gccuuaugaggguccucuacuuc

SEQ ID NO: 3869381 - RNA, 14 nt, Human
gccuuauggaacac

SEQ ID NO: 3869382 - RNA, 19 nt, Human
gccuuauggaacacucuga

SEQ ID NO: 3869383 - RNA, 20 nt, Human
gccuuauggaacacucugag

SEQ ID NO: 3869384 - RNA, 21 nt, Human
gccuuauggaacacucugaga

SEQ ID NO: 3869385 - RNA, 23 nt, Human
gccuuauggaacacucugagacu

SEQ ID NO: 3869386 - RNA, 18 nt, Human
gccuuauucagggaagga

SEQ ID NO: 3869387 - RNA, 11 nt, Human
gccuucaagcu

SEQ ID NO: 3869388 - RNA, 15 nt, Human
gccuucaagcucuga

SEQ ID NO: 3869389 - RNA, 15 nt, Human
gccuucaauaaaugg

SEQ ID NO: 3869390 - RNA, 22 nt, Human
gccuucacauuccccuggggac

SEQ ID NO: 3869391 - RNA, 16 nt, Human
gccuucagauguucuc

SEQ ID NO: 3869392 - RNA, 13 nt, Human
gccuucagcucca

SEQ ID NO: 3869393 - RNA, 21 nt, Human
gccuucauaucauccacacau

SEQ ID NO: 3869394 - RNA, 14 nt, Human
gccuuccacccagg

SEQ ID NO: 3869395 - RNA, 19 nt, Human
gccuuccacgcugucucca

SEQ ID NO: 3869396 - RNA, 22 nt, Human
gccuuccacgcugucuccagac

SEQ ID NO: 3869397 - RNA, 18 nt, Human
gccuuccagcacccugca

SEQ ID NO: 3869398 - RNA, 13 nt, Human
gccuuccagcugc

SEQ ID NO: 3869399 - RNA, 12 nt, Human
gccuuccagggg

SEQ ID NO: 3869400 - RNA, 15 nt, Human
gccuuccaggggugg

SEQ ID NO: 3869401 - RNA, 14 nt, Human
gccuuccauaauua

SEQ ID NO: 3869402 - RNA, 19 nt, Human
gccuucccaaguugugcuu

SEQ ID NO: 3869403 - RNA, 12 nt, Human
gccuuccccacc

SEQ ID NO: 3869404 - RNA, 20 nt, Human
gccuuccccuuauccucccu

SEQ ID NO: 3869405 - RNA, 23 nt, Human
gccuucccuagcuuuagacccug

SEQ ID NO: 3869406 - RNA, 17 nt, Human
gccuucccuccugcuuu

SEQ ID NO: 3869407 - RNA, 15 nt, Human
gccuuccuaagccug

SEQ ID NO: 3869408 - RNA, 19 nt, Human
gccuuccuaagccuguggc

SEQ ID NO: 3869409 - RNA, 18 nt, Human
gccuuccuccacauccuu

SEQ ID NO: 3869410 - RNA, 16 nt, Human
gccuuccuccugggcc

SEQ ID NO: 3869411 - RNA, 18 nt, Human
gccuuccucucuccagau

SEQ ID NO: 3869412 - RNA, 16 nt, Human
gccuuccucugcagcu

SEQ ID NO: 3869413 - RNA, 23 nt, Human
gccuuccuucccgccagagggcu

SEQ ID NO: 3869414 - RNA, 11 nt, Human
gccuuccuugc

SEQ ID NO: 3869415 - RNA, 13 nt, Human
gccuuccuugcua

SEQ ID NO: 3869416 - RNA, 19 nt, Human
gccuuccuuucuccaggac

SEQ ID NO: 3869417 - RNA, 23 nt, Human
gccuucggccuccauccugaggc

SEQ ID NO: 3869418 - RNA, 18 nt, Human
gccuucgguacccaccac

SEQ ID NO: 3869419 - RNA, 15 nt, Human
gccuucuaaaggugu

SEQ ID NO: 3869420 - RNA, 15 nt, Human
gccuucucaccagcu

SEQ ID NO: 3869421 - RNA, 18 nt, Human
gccuucucaccagcugca

SEQ ID NO: 3869422 - RNA, 19 nt, Human
gccuucucaccagcugcaa

SEQ ID NO: 3869423 - RNA, 15 nt, Human
gccuucucagaagca

SEQ ID NO: 3869424 - RNA, 17 nt, Human
gccuucucccccccggg

SEQ ID NO: 3869425 - RNA, 23 nt, Human
gccuucucccccccggggcuggg

SEQ ID NO: 3869426 - RNA, 17 nt, Human
gccuucugacggcccug

SEQ ID NO: 3869427 - RNA, 20 nt, Human
gccuucugacggcccugcaa

SEQ ID NO: 3869428 - RNA, 14 nt, Human
gccuucugaugucu

SEQ ID NO: 3869429 - RNA, 23 nt, Human
gccuucugaugucucuaaagcac

SEQ ID NO: 3869430 - RNA, 14 nt, Human
gccuucuggccuug

SEQ ID NO: 3869431 - RNA, 20 nt, Human
gccuucuuauucucacucca

SEQ ID NO: 3869432 - RNA, 21 nt, Human
gccuucuuauucucacuccac

SEQ ID NO: 3869433 - RNA, 23 nt, Human
gccuucuuauucucacuccacca

SEQ ID NO: 3869434 - RNA, 15 nt, Human
gccuucuucagggcc

SEQ ID NO: 3869435 - RNA, 17 nt, Human
gccuucuucuuuuugcu

SEQ ID NO: 3869436 - RNA, 20 nt, Human
gccuucuucuuuuugcuguu

SEQ ID NO: 3869437 - RNA, 21 nt, Human
gccuucuugugaucuugcucu

SEQ ID NO: 3869438 - RNA, 22 nt, Human
gccuucuuugcuugccucucug

SEQ ID NO: 3869439 - RNA, 15 nt, Human
gccuucuuuuucugg

SEQ ID NO: 3869440 - RNA, 23 nt, Human
gccuugaacuuugaccucugcag

SEQ ID NO: 3869441 - RNA, 14 nt, Human
gccuugaauaauaa

SEQ ID NO: 3869442 - RNA, 21 nt, Human
gccuugaauauccccucccag

SEQ ID NO: 3869443 - RNA, 17 nt, Human
gccuugaccauucucca

SEQ ID NO: 3869444 - RNA, 20 nt, Human
gccuugaccauucuccaccu

SEQ ID NO: 3869445 - RNA, 16 nt, Human
gccuugagcccuggcu

SEQ ID NO: 3869446 - RNA, 18 nt, Human
gccuugcagaacugccau

SEQ ID NO: 3869447 - RNA, 17 nt, Human
gccuugccagagaucca

SEQ ID NO: 3869448 - RNA, 18 nt, Human
gccuugcccacuccugcu

SEQ ID NO: 3869449 - RNA, 15 nt, Human
gccuugcccagagau

SEQ ID NO: 3869450 - RNA, 22 nt, Human
gccuugcccagagaugccucca

SEQ ID NO: 3869451 - RNA, 13 nt, Human
gccuugcccagcc

SEQ ID NO: 3869452 - RNA, 15 nt, Human
gccuugcccagccug

SEQ ID NO: 3869453 - RNA, 22 nt, Human
gccuugcccggauucugggagg

SEQ ID NO: 3869454 - RNA, 20 nt, Human
gccuugcggcuccucaggga

SEQ ID NO: 3869455 - RNA, 19 nt, Human
gccuugcuaccucaagggg

SEQ ID NO: 3869456 - RNA, 11 nt, Human
gccuugcuugu

SEQ ID NO: 3869457 - RNA, 20 nt, Human
gccuuggagggucccaagcu

SEQ ID NO: 3869458 - RNA, 18 nt, Human
gcgggcagguucugccug

SEQ ID NO: 3869459 - RNA, 15 nt, Human
gcgggccaaggacug

SEQ ID NO: 3869460 - RNA, 17 nt, Human
gcgggccaaggacugcc

SEQ ID NO: 3869461 - RNA, 15 nt, Human
gcgggccagccaggc

SEQ ID NO: 3869462 - RNA, 14 nt, Human
gcgggcccagcacu

SEQ ID NO: 3869463 - RNA, 23 nt, Human
gcgggcgcacugccucucacagc

SEQ ID NO: 3869464 - RNA, 15 nt, Human
gcgggcgcgugagug

SEQ ID NO: 3869465 - RNA, 14 nt, Human
gcggggacagcucc

SEQ ID NO: 3869466 - RNA, 14 nt, Human
gcggggaggaggaa

SEQ ID NO: 3869467 - RNA, 23 nt, Human
gcggggguuccguguccaccccc

SEQ ID NO: 3869468 - RNA, 13 nt, Human
gcgggucacagga

SEQ ID NO: 3869469 - RNA, 15 nt, Human
gcgggucacaggagg

SEQ ID NO: 3869470 - RNA, 17 nt, Human
gcgggucugcucccaag

SEQ ID NO: 3869471 - RNA, 21 nt, Human
gcgggugaacaaagcagccac

SEQ ID NO: 3869472 - RNA, 22 nt, Human
gcgggugaacaaagcagccacg

SEQ ID NO: 3869473 - RNA, 19 nt, Human
gcggguggaucaccugagg

SEQ ID NO: 3869474 - RNA, 14 nt, Human
gcgggugggggugg

SEQ ID NO: 3869475 - RNA, 15 nt, Human
gcgggugggggugga

SEQ ID NO: 3869476 - RNA, 17 nt, Human
gcggguuccgcaggcag

SEQ ID NO: 3869477 - RNA, 23 nt, Human
gcgguagccagcacacagggcag

SEQ ID NO: 3869478 - RNA, 18 nt, Human
gcgguccacccaggagcc

SEQ ID NO: 3869479 - RNA, 20 nt, Human
gcgguccacccaggagcccc

SEQ ID NO: 3869480 - RNA, 23 nt, Human
gcgguccacccaggagccccgag

SEQ ID NO: 3869481 - RNA, 18 nt, Human
gcggucccagcucccugg

SEQ ID NO: 3869482 - RNA, 15 nt, Human
gcggugccaugucug

SEQ ID NO: 3869483 - RNA, 21 nt, Human
gcggugccaugucugcagugu

SEQ ID NO: 3869484 - RNA, 15 nt, Human
gcggugcggcaggga

SEQ ID NO: 3869485 - RNA, 22 nt, Human
gcggugcuaucucccccagccc

SEQ ID NO: 3869486 - RNA, 14 nt, Human
gcgguggcccuguc

SEQ ID NO: 3869487 - RNA, 18 nt, Human
gcgguggcucacgccugu

SEQ ID NO: 3869488 - RNA, 18 nt, Human
gcgguuauaaaaaauggu

SEQ ID NO: 3869489 - RNA, 12 nt, Human
gcgguucaggaa

SEQ ID NO: 3869490 - RNA, 14 nt, Human
gcguaaguacagag

SEQ ID NO: 3869491 - RNA, 17 nt, Human
gcguaaguacagagaag

SEQ ID NO: 3869492 - RNA, 23 nt, Human
gcguaaguacagagaagccauca

SEQ ID NO: 3869493 - RNA, 15 nt, Human
gcguagaaguuuuug

SEQ ID NO: 3869494 - RNA, 16 nt, Human
gcguaggcuacagaga

SEQ ID NO: 3869495 - RNA, 18 nt, Human
gcguaggcuacagagaag

SEQ ID NO: 3869496 - RNA, 19 nt, Human
gcguauuauaccaaaaugu

SEQ ID NO: 3869497 - RNA, 11 nt, Human
gcgucagccuc

SEQ ID NO: 3869498 - RNA, 16 nt, Human
gcgucagccuccagcc

SEQ ID NO: 3869499 - RNA, 14 nt, Human
gcgucagcugcucc

SEQ ID NO: 3869500 - RNA, 22 nt, Human
gcgucagcugcucccuggcauu

SEQ ID NO: 3869501 - RNA, 23 nt, Human
gcgucagucuuuuucuguuguaa

SEQ ID NO: 3869502 - RNA, 22 nt, Human
gcgucauuacagggcacaggcc

SEQ ID NO: 3869503 - RNA, 14 nt, Human
gcgucccaagaugu

SEQ ID NO: 3869504 - RNA, 19 nt, Human
gcgucccagucucuggcag

SEQ ID NO: 3869505 - RNA, 14 nt, Human
gcgucccuggcgca

SEQ ID NO: 3869506 - RNA, 14 nt, Human
gcguccuccucugu

SEQ ID NO: 3869507 - RNA, 15 nt, Human
gcguccuccucugug

SEQ ID NO: 3869508 - RNA, 24 nt, Human
gcguccuguccacacccagcucag

SEQ ID NO: 3869509 - RNA, 22 nt, Human
gcguccugucggagcccugucu

SEQ ID NO: 3869510 - RNA, 17 nt, Human
gcgucgcccucccaggc

SEQ ID NO: 3869511 - RNA, 17 nt, Human
gcgucuggaggggcccc

SEQ ID NO: 3869512 - RNA, 18 nt, Human
gcgucuggaggggccccu

SEQ ID NO: 3869513 - RNA, 16 nt, Human
gcgucuuccgccccug

SEQ ID NO: 3869514 - RNA, 20 nt, Human
gcgucuuccgccccugccug

SEQ ID NO: 3869515 - RNA, 21 nt, Human
gcgucuuccgccccugccugc

SEQ ID NO: 3869516 - RNA, 22 nt, Human
gcgucuuccgccccugccugcc

SEQ ID NO: 3869517 - RNA, 11 nt, Human
gcgugaaacac

SEQ ID NO: 3869518 - RNA, 20 nt, Human
gcgugaaacacaccaggcug

SEQ ID NO: 3869519 - RNA, 15 nt, Human
gcgugagacgccacc

SEQ ID NO: 3869520 - RNA, 22 nt, Human
gcgugagccacugcaccgggcc

SEQ ID NO: 3869521 - RNA, 23 nt, Human
gcgugagccacugcaccgggcca

SEQ ID NO: 3869522 - RNA, 15 nt, Human
gcgugaucaaagcca

SEQ ID NO: 3869523 - RNA, 20 nt, Human
gcgugcacacaccagagccc

SEQ ID NO: 3869524 - RNA, 11 nt, Human
gcgugcagaug

SEQ ID NO: 3869525 - RNA, 18 nt, Human
gcgugcagggacaaagag

SEQ ID NO: 3869526 - RNA, 19 nt, Human
gcgugcagggacaaagagg

SEQ ID NO: 3869527 - RNA, 16 nt, Human
gcgugcccggggcagc

SEQ ID NO: 3869528 - RNA, 14 nt, Human
gcgugcccucgcug

SEQ ID NO: 3869529 - RNA, 17 nt, Human
gcgugccguggcaccag

SEQ ID NO: 3869530 - RNA, 21 nt, Human
gcgugccgugugagugugaca

SEQ ID NO: 3869531 - RNA, 18 nt, Human
gcgugcuccagccuggcu

SEQ ID NO: 3869532 - RNA, 15 nt, Human
gcguggacugguugg

SEQ ID NO: 3869533 - RNA, 12 nt, Human
gcguggagcugc

SEQ ID NO: 3869534 - RNA, 16 nt, Human
gcguggagcugccuga

SEQ ID NO: 3869535 - RNA, 16 nt, Human
gcguggagggaggccc

SEQ ID NO: 3869536 - RNA, 18 nt, Human
gcguggagggcguggagg

SEQ ID NO: 3869537 - RNA, 23 nt, Human
gcguggauuaaacuuaugaaugu

SEQ ID NO: 3869538 - RNA, 17 nt, Human
gcguggcccaccaggcc

SEQ ID NO: 3869539 - RNA, 21 nt, Human
gcguggcgcaguggcccugag

SEQ ID NO: 3869540 - RNA, 12 nt, Human
gcguggcugacu

SEQ ID NO: 3869541 - RNA, 15 nt, Human
gcgugggagccagcc

SEQ ID NO: 3869542 - RNA, 17 nt, Human
gcguggggacagggcuc

SEQ ID NO: 3869543 - RNA, 12 nt, Human
gcgugggucaga

SEQ ID NO: 3869544 - RNA, 14 nt, Human
gcgugggucagaag

SEQ ID NO: 3869545 - RNA, 18 nt, Human
gcguggucacugcuguca

SEQ ID NO: 3869546 - RNA, 17 nt, Human
gcgugguggucccuggg

SEQ ID NO: 3869547 - RNA, 15 nt, Human
gcgugguuccuuucu

SEQ ID NO: 3869548 - RNA, 19 nt, Human
gcgugucgugggugugugu

SEQ ID NO: 3869549 - RNA, 18 nt, Human
gcgugugcgugcaugugc

SEQ ID NO: 3869550 - RNA, 19 nt, Human
gcguguggcucacgugugu

SEQ ID NO: 3869551 - RNA, 20 nt, Human
gcguguguagaguuaagaag

SEQ ID NO: 3869552 - RNA, 22 nt, Human
gcguuaaaggcucgauuuugua

SEQ ID NO: 3869553 - RNA, 17 nt, Human
gcguuacacccuuucuu

SEQ ID NO: 3869554 - RNA, 22 nt, Human
gcguuagaaugaggaggaagga

SEQ ID NO: 3869555 - RNA, 18 nt, Human
gcguuaugaagagcuaau

SEQ ID NO: 3869556 - RNA, 18 nt, Human
gcguuccaugaugcuggg

SEQ ID NO: 3869557 - RNA, 15 nt, Human
gcguucuuguaauuu

SEQ ID NO: 3869558 - RNA, 18 nt, Human
gcguugaaauuguaauua

SEQ ID NO: 3869559 - RNA, 22 nt, Human
gcguugggagggggagaaaagg

SEQ ID NO: 3869560 - RNA, 14 nt, Human
gcguuggucucugc

SEQ ID NO: 3869561 - RNA, 15 nt, Human
gcguuguuacaggaa

SEQ ID NO: 3869562 - RNA, 19 nt, Human
gcguuguugcauguuugaa

SEQ ID NO: 3869563 - RNA, 17 nt, Human
gcguuucuaugacacau

SEQ ID NO: 3869564 - RNA, 20 nt, Human
gcguuugcccaaaucugccu

SEQ ID NO: 3869565 - RNA, 19 nt, Human
gcguuuuuuaaauguauac

SEQ ID NO: 3869566 - RNA, 14 nt, Human
gcuaaaaccugagc

SEQ ID NO: 3869567 - RNA, 15 nt, Human
gcuaaaagaaacuuu

SEQ ID NO: 3869568 - RNA, 14 nt, Human
gcuaaaauguuuuc

SEQ ID NO: 3869569 - RNA, 18 nt, Human
gcuaaacguguauguuuu

SEQ ID NO: 3869570 - RNA, 13 nt, Human
gcuaaacuuuucu

SEQ ID NO: 3869571 - RNA, 15 nt, Human
gcuaaagaaguuuga

SEQ ID NO: 3869572 - RNA, 18 nt, Human
gcuaaagaaguuugaaca

SEQ ID NO: 3869573 - RNA, 23 nt, Human
gcuaaagagcccuugccucccca

SEQ ID NO: 3869574 - RNA, 21 nt, Human
gcuaaagauaauugcuauuua

SEQ ID NO: 3869575 - RNA, 14 nt, Human
gcuaaagccuuccu

SEQ ID NO: 3869576 - RNA, 22 nt, Human
gcuaaagguuaccgauuucaaa

SEQ ID NO: 3869577 - RNA, 21 nt, Human
gcuaaauaaaauuuguugcau

SEQ ID NO: 3869578 - RNA, 19 nt, Human
gcuaaauggucgcccagga

SEQ ID NO: 3869579 - RNA, 23 nt, Human
gcuaaauggucgcccaggagaca

SEQ ID NO: 3869580 - RNA, 14 nt, Human
gcuaaauguaacag

SEQ ID NO: 3869581 - RNA, 17 nt, Human
gcuaaauugauguugau

SEQ ID NO: 3869582 - RNA, 16 nt, Human
gcuaacaccagacaga

SEQ ID NO: 3869583 - RNA, 15 nt, Human
gcuaacacuggcccc

SEQ ID NO: 3869584 - RNA, 16 nt, Human
gcuaacagggaaggca

SEQ ID NO: 3869585 - RNA, 20 nt, Human
gcuaacagggaaggcaggca

SEQ ID NO: 3869586 - RNA, 22 nt, Human
gcuaacccccuucuacugagcc

SEQ ID NO: 3869587 - RNA, 19 nt, Human
gcuaacuugcuuaaaugug

SEQ ID NO: 3869588 - RNA, 22 nt, Human
gcuaacuugcuuaaaugugaau

SEQ ID NO: 3869589 - RNA, 23 nt, Human
gcuaagaaccuggaacuugggga

SEQ ID NO: 3869590 - RNA, 14 nt, Human
gcuaagaauuuuuu

SEQ ID NO: 3869591 - RNA, 14 nt, Human
gcuaagacuuccua

SEQ ID NO: 3869592 - RNA, 14 nt, Human
gcuaagagaaguag

SEQ ID NO: 3869593 - RNA, 18 nt, Human
gcuaagagcuagcgcugc

SEQ ID NO: 3869594 - RNA, 19 nt, Human
gcuaagaguguccuaggag

SEQ ID NO: 3869595 - RNA, 18 nt, Human
gcuaagccccagcaagca

SEQ ID NO: 3869596 - RNA, 20 nt, Human
gcuaagccccagcaagcaau

SEQ ID NO: 3869597 - RNA, 17 nt, Human
gcuaaggcguggagcug

SEQ ID NO: 3869598 - RNA, 20 nt, Human
gcuaaggcguggagcugccu

SEQ ID NO: 3869599 - RNA, 21 nt, Human
gcuaaggcguggagcugccug

SEQ ID NO: 3869600 - RNA, 11 nt, Human
gcuaaggcucu

SEQ ID NO: 3869601 - RNA, 18 nt, Human
gcuaagggaagacauuuc

SEQ ID NO: 3869602 - RNA, 20 nt, Human
gcucagagagggugggagug

SEQ ID NO: 3869603 - RNA, 22 nt, Human
gcucagagagggugggaguggg

SEQ ID NO: 3869604 - RNA, 18 nt, Human
gcucagagaugugcaccc

SEQ ID NO: 3869605 - RNA, 18 nt, Human
gcucagaggcgcacugug

SEQ ID NO: 3869606 - RNA, 23 nt, Human
gcucagaggguuguucuccuaga

SEQ ID NO: 3869607 - RNA, 15 nt, Human
gcucagauagaauga

SEQ ID NO: 3869608 - RNA, 19 nt, Human
gcucagauagaaugacagu

SEQ ID NO: 3869609 - RNA, 14 nt, Human
gcucagcaaggcca

SEQ ID NO: 3869610 - RNA, 18 nt, Human
gcucagcaaggccaccuc

SEQ ID NO: 3869611 - RNA, 17 nt, Human
gcucagcacugccugcu

SEQ ID NO: 3869612 - RNA, 18 nt, Human
gcucagcacugccugcuc

SEQ ID NO: 3869613 - RNA, 11 nt, Human
gcucagcagcu

SEQ ID NO: 3869614 - RNA, 17 nt, Human
gcucagcagugacugug

SEQ ID NO: 3869615 - RNA, 18 nt, Human
gcucagcagugagagcag

SEQ ID NO: 3869616 - RNA, 12 nt, Human
gcucagccagca

SEQ ID NO: 3869617 - RNA, 14 nt, Human
gcucagccagcacu

SEQ ID NO: 3869618 - RNA, 16 nt, Human
gcucagcccacccccc

SEQ ID NO: 3869619 - RNA, 21 nt, Human
gcucagccccaccccagggca

SEQ ID NO: 3869620 - RNA, 22 nt, Human
gcucagccccaccccagggcag

SEQ ID NO: 3869621 - RNA, 17 nt, Human
gcucagccccagcccag

SEQ ID NO: 3869622 - RNA, 18 nt, Human
gcucagccccagcccagc

SEQ ID NO: 3869623 - RNA, 20 nt, Human
gcucagccccgagcuguccc

SEQ ID NO: 3869624 - RNA, 12 nt, Human
gcucagcccucc

SEQ ID NO: 3869625 - RNA, 19 nt, Human
gcucagcccucccugcccc

SEQ ID NO: 3869626 - RNA, 11 nt, Human
gcucagcccug

SEQ ID NO: 3869627 - RNA, 15 nt, Human
gcucagcccuggagg

SEQ ID NO: 3869628 - RNA, 17 nt, Human
gcucagccuggugggcc

SEQ ID NO: 3869629 - RNA, 18 nt, Human
gcucagccuggugggccu

SEQ ID NO: 3869630 - RNA, 19 nt, Human
gcucagccuggugggccuc

SEQ ID NO: 3869631 - RNA, 15 nt, Human
gcucagcgccagccu

SEQ ID NO: 3869632 - RNA, 15 nt, Human
gcucagcggggacag

SEQ ID NO: 3869633 - RNA, 18 nt, Human
gcucagcggggacagcuc

SEQ ID NO: 3869634 - RNA, 19 nt, Human
gcucagcggggacagcucc

SEQ ID NO: 3869635 - RNA, 20 nt, Human
gcucagcggggacagcuccu

SEQ ID NO: 3869636 - RNA, 16 nt, Human
gcucagcucuggcuca

SEQ ID NO: 3869637 - RNA, 18 nt, Human
gcucagcucuggcucaca

SEQ ID NO: 3869638 - RNA, 21 nt, Human
gcucagcucuggcucacagac

SEQ ID NO: 3869639 - RNA, 19 nt, Human
gcucagcugcauuccgcag

SEQ ID NO: 3869640 - RNA, 19 nt, Human
gcucagcugucaaggcuca

SEQ ID NO: 3869641 - RNA, 16 nt, Human
gcucagcuucuccugu

SEQ ID NO: 3869642 - RNA, 15 nt, Human
gcucaggaccaggca

SEQ ID NO: 3869643 - RNA, 19 nt, Human
gcucaggacucagaagccu

SEQ ID NO: 3869644 - RNA, 18 nt, Human
gcucaggagcccugggag

SEQ ID NO: 3869645 - RNA, 22 nt, Human
gcucaggagcccugggaggcuc

SEQ ID NO: 3869646 - RNA, 18 nt, Human
gcucaggaucucuuagca

SEQ ID NO: 3869647 - RNA, 20 nt, Human
gcucaggaugagggaaaaga

SEQ ID NO: 3869648 - RNA, 22 nt, Human
gcucaggcaggggccuccaugg

SEQ ID NO: 3869649 - RNA, 20 nt, Human
gcucaggccuauaaccccag

SEQ ID NO: 3869650 - RNA, 22 nt, Human
gcucaggcgauccaccugucuc

SEQ ID NO: 3869651 - RNA, 24 nt, Human
gcucaggcgauccaccugucucag

SEQ ID NO: 3869652 - RNA, 21 nt, Human
gcucaggcugcagcuggacag

SEQ ID NO: 3869653 - RNA, 23 nt, Human
gcucaggcugcagcuggacagag

SEQ ID NO: 3869654 - RNA, 15 nt, Human
gcucagggaaaagca

SEQ ID NO: 3869655 - RNA, 17 nt, Human
gcucagggaaaagcagc

SEQ ID NO: 3869656 - RNA, 16 nt, Human
gcucagggaccacagc

SEQ ID NO: 3869657 - RNA, 23 nt, Human
gcucagggccaugcugaggccug

SEQ ID NO: 3869658 - RNA, 19 nt, Human
gcucagggccuggcucagg

SEQ ID NO: 3869659 - RNA, 16 nt, Human
gcucaggggcagcuca

SEQ ID NO: 3869660 - RNA, 18 nt, Human
gcucaggggcguguggcu

SEQ ID NO: 3869661 - RNA, 20 nt, Human
gcucaggggcguguggcuca

SEQ ID NO: 3869662 - RNA, 17 nt, Human
gcucagguacagagaag

SEQ ID NO: 3869663 - RNA, 21 nt, Human
gcucagguacagagaaggaau

SEQ ID NO: 3869664 - RNA, 19 nt, Human
gcucaggucccuggggcua

SEQ ID NO: 3869665 - RNA, 16 nt, Human
gcucaggugucccugc

SEQ ID NO: 3869666 - RNA, 18 nt, Human
gcucaggugucccugcac

SEQ ID NO: 3869667 - RNA, 19 nt, Human
gcucaggugucccugcacu

SEQ ID NO: 3869668 - RNA, 18 nt, Human
gcucaguaaacgggaaca

SEQ ID NO: 3869669 - RNA, 21 nt, Human
gcucaguaauuugaggacaac

SEQ ID NO: 3869670 - RNA, 12 nt, Human
gcucagucccau

SEQ ID NO: 3869671 - RNA, 20 nt, Human
gcucagucucaggagcaugg

SEQ ID NO: 3869672 - RNA, 20 nt, Human
gcucagugaaguugcugcuu

SEQ ID NO: 3869673 - RNA, 21 nt, Human
gcucagugcaaccucugcuuc

SEQ ID NO: 3869674 - RNA, 15 nt, Human
gcucagugccuggac

SEQ ID NO: 3869675 - RNA, 22 nt, Human
gcucagugucuggcugcagagc

SEQ ID NO: 3869676 - RNA, 19 nt, Human
gcucaguguuuuugugaau

SEQ ID NO: 3869677 - RNA, 18 nt, Human
gcucauaacggaucagaa

SEQ ID NO: 3869678 - RNA, 22 nt, Human
gcucaucagaaacaauuucugu

SEQ ID NO: 3869679 - RNA, 16 nt, Human
gcucaucauucucugu

SEQ ID NO: 3869680 - RNA, 18 nt, Human
gcucaucauucucugucu

SEQ ID NO: 3869681 - RNA, 20 nt, Human
gcucaucauucucugucuca

SEQ ID NO: 3869682 - RNA, 16 nt, Human
gcucaucucuguccca

SEQ ID NO: 3869683 - RNA, 21 nt, Human
gcucaucugcugguccguggg

SEQ ID NO: 3869684 - RNA, 15 nt, Human
gcucaugguccccau

SEQ ID NO: 3869685 - RNA, 18 nt, Human
gcucaugguccccauggc

SEQ ID NO: 3869686 - RNA, 17 nt, Human
gcucaugugugcaacag

SEQ ID NO: 3869687 - RNA, 16 nt, Human
gcucauucagcaucug

SEQ ID NO: 3869688 - RNA, 18 nt, Human
gcucauucagcaucugac

SEQ ID NO: 3869689 - RNA, 14 nt, Human
gcucauucuaauga

SEQ ID NO: 3869690 - RNA, 11 nt, Human
gcucauuuaag

SEQ ID NO: 3869691 - RNA, 17 nt, Human
gcucauuuacuguuuua

SEQ ID NO: 3869692 - RNA, 17 nt, Human
gcuccaaacccucgagg

SEQ ID NO: 3869693 - RNA, 14 nt, Human
gcuccaaaccuuca

SEQ ID NO: 3869694 - RNA, 22 nt, Human
gcuccaaaccuucacacacaga

SEQ ID NO: 3869695 - RNA, 21 nt, Human
gcuccaaccugcaaagaucug

SEQ ID NO: 3869696 - RNA, 16 nt, Human
gcuccaagauucuaga

SEQ ID NO: 3869697 - RNA, 19 nt, Human
gcuccaagccccaucuucu

SEQ ID NO: 3869698 - RNA, 14 nt, Human
gcuccaagcuccca

SEQ ID NO: 3869699 - RNA, 16 nt, Human
gcuccaagcucccagg

SEQ ID NO: 3869700 - RNA, 18 nt, Human
gcuccaagcucccaggca

SEQ ID NO: 3869701 - RNA, 21 nt, Human
gcuccaaggggaaucagaacu

SEQ ID NO: 3869702 - RNA, 15 nt, Human
gcuccaccacauccu

SEQ ID NO: 3869703 - RNA, 13 nt, Human
gcuccaccccacu

SEQ ID NO: 3869704 - RNA, 16 nt, Human
gcuccacccuggccga

SEQ ID NO: 3869705 - RNA, 19 nt, Human
gcuccacccuuggccuguc

SEQ ID NO: 3869706 - RNA, 14 nt, Human
gcuccaccuuucag

SEQ ID NO: 3869707 - RNA, 15 nt, Human
gcuccacucugcuuc

SEQ ID NO: 3869708 - RNA, 21 nt, Human
gcuccacucugcuucucugac

SEQ ID NO: 3869709 - RNA, 18 nt, Human
gcuccacugucacccucc

SEQ ID NO: 3869710 - RNA, 9 nt, Human
gcuccagac

SEQ ID NO: 3869711 - RNA, 23 nt, Human
gcuccagacacauguccaagaag

SEQ ID NO: 3869712 - RNA, 14 nt, Human
gcuccagaccccca

SEQ ID NO: 3869713 - RNA, 23 nt, Human
gcuccagacccccagcaacccuc

SEQ ID NO: 3869714 - RNA, 12 nt, Human
gcuccagaccug

SEQ ID NO: 3869715 - RNA, 22 nt, Human
gcuccagacguaggggaggggu

SEQ ID NO: 3869716 - RNA, 20 nt, Human
gcuccagagggcacucugcu

SEQ ID NO: 3869717 - RNA, 21 nt, Human
gcuccagagggcacucugcuu

SEQ ID NO: 3869718 - RNA, 19 nt, Human
gcuccagaugcagggcagu

SEQ ID NO: 3869719 - RNA, 19 nt, Human
gcuccagcaacacagccug

SEQ ID NO: 3869720 - RNA, 14 nt, Human
gcuccagccaaccc

SEQ ID NO: 3869721 - RNA, 17 nt, Human
gcuccagccaaccccug

SEQ ID NO: 3869722 - RNA, 18 nt, Human
gcuccagccaaccccugu

SEQ ID NO: 3869723 - RNA, 13 nt, Human
gcuccagccaucu

SEQ ID NO: 3869724 - RNA, 16 nt, Human
gcuccagccccucuug

SEQ ID NO: 3869725 - RNA, 19 nt, Human
gcuccagccccuuuccaaa

SEQ ID NO: 3869726 - RNA, 11 nt, Human
gcuccagccug

SEQ ID NO: 3869727 - RNA, 21 nt, Human
gcuccagcucaccagccccag

SEQ ID NO: 3869728 - RNA, 21 nt, Human
gcuccagcugccccggccccu

SEQ ID NO: 3869729 - RNA, 16 nt, Human
gcuccaggagcagcca

SEQ ID NO: 3869730 - RNA, 16 nt, Human
gcuccaggcuccuuua

SEQ ID NO: 3869731 - RNA, 23 nt, Human
gcuccagggaugauucaagccau

SEQ ID NO: 3869732 - RNA, 15 nt, Human
gcuccagguggcucu

SEQ ID NO: 3869733 - RNA, 16 nt, Human
gcuccagguggcucug

SEQ ID NO: 3869734 - RNA, 18 nt, Human
gcuccaguccccagaacu

SEQ ID NO: 3869735 - RNA, 15 nt, Human
gcuccaguguccuga

SEQ ID NO: 3869736 - RNA, 17 nt, Human
gcuccaguguccugagc

SEQ ID NO: 3869737 - RNA, 21 nt, Human
gcuccauccgugccucuuuuu

SEQ ID NO: 3869738 - RNA, 18 nt, Human
gcuccaugugcccccucu

SEQ ID NO: 3869739 - RNA, 20 nt, Human
gcuccaugugcccccucuac

SEQ ID NO: 3869740 - RNA, 16 nt, Human
gcuccaugugccucuu

SEQ ID NO: 3869741 - RNA, 23 nt, Human
gcucccaagggauggugcccugu

SEQ ID NO: 3869742 - RNA, 21 nt, Human
gcucccaaggggccugagcag

SEQ ID NO: 3869743 - RNA, 18 nt, Human
gcucccacaagccugagg

SEQ ID NO: 3869744 - RNA, 16 nt, Human
gcucccacaggcagcu

SEQ ID NO: 3869745 - RNA, 18 nt, Human
gcuuuaaagggccugccu

SEQ ID NO: 3869746 - RNA, 21 nt, Human
gcuuuaaagggccugccuggc

SEQ ID NO: 3869747 - RNA, 18 nt, Human
gcuuuaacuuaaauagua

SEQ ID NO: 3869748 - RNA, 13 nt, Human
gcuuuaagccuuc

SEQ ID NO: 3869749 - RNA, 12 nt, Human
gcuuuaauauaa

SEQ ID NO: 3869750 - RNA, 17 nt, Human
gcuuuaauauaaaugca

SEQ ID NO: 3869751 - RNA, 23 nt, Human
gcuuuaauaucaucaguauugaa

SEQ ID NO: 3869752 - RNA, 21 nt, Human
gcuuuaauuuuuuuaaccaaa

SEQ ID NO: 3869753 - RNA, 12 nt, Human
gcuuuacaugca

SEQ ID NO: 3869754 - RNA, 16 nt, Human
gcuuuaccaaacagca

SEQ ID NO: 3869755 - RNA, 15 nt, Human
gcuuuacuuagcuua

SEQ ID NO: 3869756 - RNA, 21 nt, Human
gcuuuagaaucccagcccccu

SEQ ID NO: 3869757 - RNA, 18 nt, Human
gcuuuagaauguuuuccu

SEQ ID NO: 3869758 - RNA, 16 nt, Human
gcuuuagacccugggu

SEQ ID NO: 3869759 - RNA, 17 nt, Human
gcuuuagacccugggug

SEQ ID NO: 3869760 - RNA, 21 nt, Human
gcuuuagacuugaaaagagac

SEQ ID NO: 3869761 - RNA, 20 nt, Human
gcuuuauacguguagcuaua

SEQ ID NO: 3869762 - RNA, 16 nt, Human
gcuuuauccucuuuag

SEQ ID NO: 3869763 - RNA, 20 nt, Human
gcuuuaugauaauagauucu

SEQ ID NO: 3869764 - RNA, 12 nt, Human
gcuuuaugauuu

SEQ ID NO: 3869765 - RNA, 14 nt, Human
gcuuuaugcugaaa

SEQ ID NO: 3869766 - RNA, 16 nt, Human
gcuuuauuuguaaauu

SEQ ID NO: 3869767 - RNA, 21 nt, Human
gcuuuauuuguuuuuuuuguu

SEQ ID NO: 3869768 - RNA, 20 nt, Human
gcuuuauuuugagauguaaa

SEQ ID NO: 3869769 - RNA, 13 nt, Human
gcuuuauuuuuua

SEQ ID NO: 3869770 - RNA, 23 nt, Human
gcuuuauuuuuuaaguauuuaua

SEQ ID NO: 3869771 - RNA, 16 nt, Human
gcuuuauuuuuuugaa

SEQ ID NO: 3869772 - RNA, 11 nt, Human
gcuuucaagug

SEQ ID NO: 3869773 - RNA, 21 nt, Human
gcuuucaauuccguagccagc

SEQ ID NO: 3869774 - RNA, 23 nt, Human
gcuuucagauacuggauuguacu

SEQ ID NO: 3869775 - RNA, 13 nt, Human
gcuuucagggagg

SEQ ID NO: 3869776 - RNA, 21 nt, Human
gcuuucagggccaugguucac

SEQ ID NO: 3869777 - RNA, 18 nt, Human
gcuuucagggccuccagc

SEQ ID NO: 3869778 - RNA, 18 nt, Human
gcuuucauuuucucucag

SEQ ID NO: 3869779 - RNA, 14 nt, Human
gcuuuccauauuuu

SEQ ID NO: 3869780 - RNA, 19 nt, Human
gcuuuccauucgugaaaac

SEQ ID NO: 3869781 - RNA, 15 nt, Human
gcuuuccccuguggg

SEQ ID NO: 3869782 - RNA, 22 nt, Human
gcuuuccugaauccaaacuaau

SEQ ID NO: 3869783 - RNA, 19 nt, Human
gcuuuccugccccaggccu

SEQ ID NO: 3869784 - RNA, 18 nt, Human
gcuuuccuguuucucagu

SEQ ID NO: 3869785 - RNA, 18 nt, Human
gcuuuccuuguggcagag

SEQ ID NO: 3869786 - RNA, 21 nt, Human
gcuuucguccacagcuuccug

SEQ ID NO: 3869787 - RNA, 19 nt, Human
gcuuucgucuccagccccu

SEQ ID NO: 3869788 - RNA, 17 nt, Human
gcuuucuauuguacaga

SEQ ID NO: 3869789 - RNA, 16 nt, Human
gcuuucuccaggagga

SEQ ID NO: 3869790 - RNA, 18 nt, Human
gcuuucuccccaaugaga

SEQ ID NO: 3869791 - RNA, 21 nt, Human
gcuuucuccccaaugagacuu

SEQ ID NO: 3869792 - RNA, 19 nt, Human
gcuuucucuuuucucuuuu

SEQ ID NO: 3869793 - RNA, 19 nt, Human
gcuuucugaagcuuuacca

SEQ ID NO: 3869794 - RNA, 18 nt, Human
gcuuucugcucagcuucu

SEQ ID NO: 3869795 - RNA, 13 nt, Human
gcuuucuguucca

SEQ ID NO: 3869796 - RNA, 14 nt, Human
gcuuucuguuccaa

SEQ ID NO: 3869797 - RNA, 16 nt, Human
gcuuucuguugucauu

SEQ ID NO: 3869798 - RNA, 15 nt, Human
gcuuucuugcucccu

SEQ ID NO: 3869799 - RNA, 21 nt, Human
gcuuucuugcucccuucagcc

SEQ ID NO: 3869800 - RNA, 12 nt, Human
gcuuucuugcug

SEQ ID NO: 3869801 - RNA, 15 nt, Human
gcuuugaaacagaaa

SEQ ID NO: 3869802 - RNA, 11 nt, Human
gcuuugaaugu

SEQ ID NO: 3869803 - RNA, 20 nt, Human
gcuuugacucaccuguuacu

SEQ ID NO: 3869804 - RNA, 15 nt, Human
gcuuugacucaggag

SEQ ID NO: 3869805 - RNA, 19 nt, Human
gcuuugacucuauaagcaa

SEQ ID NO: 3869806 - RNA, 20 nt, Human
gcuuugacucuauaagcaaa

SEQ ID NO: 3869807 - RNA, 16 nt, Human
gcuuugagaagccuuc

SEQ ID NO: 3869808 - RNA, 22 nt, Human
gcuuugagaagccuucagcucc

SEQ ID NO: 3869809 - RNA, 22 nt, Human
gcuuugagagagaaaggacucc

SEQ ID NO: 3869810 - RNA, 22 nt, Human
gcuuugagguggaagagggcug

SEQ ID NO: 3869811 - RNA, 18 nt, Human
gcuuugauuaauccagaa

SEQ ID NO: 3869812 - RNA, 20 nt, Human
gcuuugauucauaguaacuu

SEQ ID NO: 3869813 - RNA, 19 nt, Human
gcuuugcaaccauuuucau

SEQ ID NO: 3869814 - RNA, 17 nt, Human
gcuuugcauguuccacu

SEQ ID NO: 3869815 - RNA, 20 nt, Human
gcuuugcauuccuacaaaga

SEQ ID NO: 3869816 - RNA, 16 nt, Human
gcuuugccauugugaa

SEQ ID NO: 3869817 - RNA, 18 nt, Human
gcuuugcccugcugcccu

SEQ ID NO: 3869818 - RNA, 19 nt, Human
gcuuugcccugcugcccuc

SEQ ID NO: 3869819 - RNA, 20 nt, Human
gcuuugccugguuuugucuu

SEQ ID NO: 3869820 - RNA, 24 nt, Human
gcuuugccuuccacgcugucucca

SEQ ID NO: 3869821 - RNA, 16 nt, Human
gcuuugcgugcccggg

SEQ ID NO: 3869822 - RNA, 15 nt, Human
gcuuugcugcuacag

SEQ ID NO: 3869823 - RNA, 12 nt, Human
gcuuugcugcug

SEQ ID NO: 3869824 - RNA, 21 nt, Human
gcuuugcuuaugguaauaaaa

SEQ ID NO: 3869825 - RNA, 18 nt, Human
gcuuuggacacacacagc

SEQ ID NO: 3869826 - RNA, 19 nt, Human
gcuuuggacacacacagcu

SEQ ID NO: 3869827 - RNA, 22 nt, Human
gcuuuggacacacacagcuucu

SEQ ID NO: 3869828 - RNA, 22 nt, Human
gcuuuggaccuaaauggccuca

SEQ ID NO: 3869829 - RNA, 15 nt, Human
gcuuuggagaagagu

SEQ ID NO: 3869830 - RNA, 15 nt, Human
gcuuuggcagugcca

SEQ ID NO: 3869831 - RNA, 16 nt, Human
gcuuuggcagugccau

SEQ ID NO: 3869832 - RNA, 14 nt, Human
gcuuuggccugagu

SEQ ID NO: 3869833 - RNA, 13 nt, Human
gcuuuggcuucuu

SEQ ID NO: 3869834 - RNA, 15 nt, Human
gcuuugggagaaugu

SEQ ID NO: 3869835 - RNA, 17 nt, Human
gcuuuggucucuugcuu

SEQ ID NO: 3869836 - RNA, 16 nt, Human
gcuuugguuuaaaaga

SEQ ID NO: 3869837 - RNA, 20 nt, Human
gcuuuguagaguuuugucau

SEQ ID NO: 3869838 - RNA, 13 nt, Human
gcuuuguauagaa

SEQ ID NO: 3869839 - RNA, 15 nt, Human
gcuuuguaugcacuu

SEQ ID NO: 3869840 - RNA, 16 nt, Human
gcuuuguauuuuuaau

SEQ ID NO: 3869841 - RNA, 14 nt, Human
gcuuuguccccugc

SEQ ID NO: 3869842 - RNA, 15 nt, Human
gcuuugugauuuuug

SEQ ID NO: 3869843 - RNA, 14 nt, Human
gcuuuguggcacug

SEQ ID NO: 3869844 - RNA, 19 nt, Human
gcuuugugugaaggcagag

SEQ ID NO: 3869845 - RNA, 23 nt, Human
gcuuuguguuugguuuacauuua

SEQ ID NO: 3869846 - RNA, 17 nt, Human
gcuuuguuaccuuaaaa

SEQ ID NO: 3869847 - RNA, 19 nt, Human
gcuuuguuaccuuaaaacu

SEQ ID NO: 3869848 - RNA, 15 nt, Human
gcuuuguugcacuga

SEQ ID NO: 3869849 - RNA, 21 nt, Human
gcuuuguugugugccucuagc

SEQ ID NO: 3869850 - RNA, 22 nt, Human
gcuuuguugugugccucuagcu

SEQ ID NO: 3869851 - RNA, 14 nt, Human
gcuuuguuuguucu

SEQ ID NO: 3869852 - RNA, 22 nt, Human
gcuuuguuuugggggucaggca

SEQ ID NO: 3869853 - RNA, 12 nt, Human
gcuuuuaaaauu

SEQ ID NO: 3869854 - RNA, 19 nt, Human
gcuuuuaacagagucugaa

SEQ ID NO: 3869855 - RNA, 17 nt, Human
gcuuuuaaccaucugau

SEQ ID NO: 3869856 - RNA, 15 nt, Human
gcuuuuaccaugccc

SEQ ID NO: 3869857 - RNA, 13 nt, Human
gcuuuuacccuuu

SEQ ID NO: 3869858 - RNA, 22 nt, Human
gcuuuuacccuuuuucuugaau

SEQ ID NO: 3869859 - RNA, 13 nt, Human
gcuuuuagaaaag

SEQ ID NO: 3869860 - RNA, 14 nt, Human
gcuuuuaguaccca

SEQ ID NO: 3869861 - RNA, 19 nt, Human
gcuuuuaguacccaccuga

SEQ ID NO: 3869862 - RNA, 15 nt, Human
gcuuuuaguuuuucu

SEQ ID NO: 3869863 - RNA, 20 nt, Human
gcuuuuaguuuuucuguccc

SEQ ID NO: 3869864 - RNA, 16 nt, Human
gcuuuuauaucuguau

SEQ ID NO: 3869865 - RNA, 15 nt, Human
gcuuuuaugugaaac

SEQ ID NO: 3869866 - RNA, 17 nt, Human
gcuuuuauuaaauuugu

SEQ ID NO: 3869867 - RNA, 15 nt, Human
gcuuuuauuguauaa

SEQ ID NO: 3869868 - RNA, 12 nt, Human
gcuuuucacugc

SEQ ID NO: 3869869 - RNA, 16 nt, Human
gcuuuucccaaaagcc

SEQ ID NO: 3869870 - RNA, 21 nt, Human
gcuuuucccuuuuuuuaagua

SEQ ID NO: 3869871 - RNA, 21 nt, Human
gcuuuuccuuggggcaggcag

SEQ ID NO: 3869872 - RNA, 22 nt, Human
gcuuuuccuuuguuuuuaugaa

SEQ ID NO: 3869873 - RNA, 14 nt, Human
gcuuuucucagcug

SEQ ID NO: 3869874 - RNA, 16 nt, Human
gcuuuucuccucuuuc

SEQ ID NO: 3869875 - RNA, 14 nt, Human
gcuuuucugcccug

SEQ ID NO: 3869876 - RNA, 17 nt, Human
gcuuuucugcccuggcu

SEQ ID NO: 3869877 - RNA, 22 nt, Human
gcuuuucugcccuggcugcugc

SEQ ID NO: 3869878 - RNA, 18 nt, Human
gcuuuucugucucugccu

SEQ ID NO: 3869879 - RNA, 17 nt, Human
gcuuuucuguuuccugu

SEQ ID NO: 3869880 - RNA, 13 nt, Human
gcuuuugcuucua

SEQ ID NO: 3869881 - RNA, 18 nt, Human
gcuuuuggauuggacaaa

SEQ ID NO: 3869882 - RNA, 18 nt, Human
gcuuuuggggagccagaa

SEQ ID NO: 3869883 - RNA, 21 nt, Human
gcuuuugucuaauuaaaacac

SEQ ID NO: 3869884 - RNA, 18 nt, Human
gcuuuugucuaugggacu

SEQ ID NO: 3869885 - RNA, 12 nt, Human
gcuuuugugcau

SEQ ID NO: 3869886 - RNA, 13 nt, Human
gcuuuugugcauu

SEQ ID NO: 3869887 - RNA, 17 nt, Human
gcuuuugugucuuacau

SEQ ID NO: 3869888 - RNA, 23 nt, Human
gcuuuuguuuccuuuuucagaua

SEQ ID NO: 3869889 - RNA, 16 nt, Human
gcuuuuguuuugcuuu

SEQ ID NO: 3869890 - RNA, 13 nt, Human
ggaagcccccacc

SEQ ID NO: 3869891 - RNA, 22 nt, Human
ggaagcccccaccgugggcagg

SEQ ID NO: 3869892 - RNA, 15 nt, Human
ggaagcccuggagac

SEQ ID NO: 3869893 - RNA, 18 nt, Human
ggaagccgcuggggccag

SEQ ID NO: 3869894 - RNA, 20 nt, Human
ggaagccgugcucgccccag

SEQ ID NO: 3869895 - RNA, 20 nt, Human
ggaagccuuuacugacccug

SEQ ID NO: 3869896 - RNA, 20 nt, Human
ggaagcgcgagggccucaaa

SEQ ID NO: 3869897 - RNA, 22 nt, Human
ggaagcggagguugcagggagc

SEQ ID NO: 3869898 - RNA, 22 nt, Human
ggaagcgugaaggccgagaagc

SEQ ID NO: 3869899 - RNA, 13 nt, Human
ggaagcuacaggu

SEQ ID NO: 3869900 - RNA, 17 nt, Human
ggaagcucagggccugg

SEQ ID NO: 3869901 - RNA, 23 nt, Human
ggaagcucagggccuggcucagg

SEQ ID NO: 3869902 - RNA, 18 nt, Human
ggaagcucugaagucaca

SEQ ID NO: 3869903 - RNA, 20 nt, Human
ggaagcucuuggagcuguga

SEQ ID NO: 3869904 - RNA, 21 nt, Human
ggaagcucuuggagcugugag

SEQ ID NO: 3869905 - RNA, 11 nt, Human
ggaagcugcag

SEQ ID NO: 3869906 - RNA, 14 nt, Human
ggaagcugcagcuu

SEQ ID NO: 3869907 - RNA, 16 nt, Human
ggaagcugcagcuugg

SEQ ID NO: 3869908 - RNA, 15 nt, Human
ggaagcugcuccgug

SEQ ID NO: 3869909 - RNA, 18 nt, Human
ggaagcuggccgaggguc

SEQ ID NO: 3869910 - RNA, 17 nt, Human
ggaagcuguguccuugc

SEQ ID NO: 3869911 - RNA, 21 nt, Human
ggaagcuuuguccccugcuuc

SEQ ID NO: 3869912 - RNA, 16 nt, Human
ggaaggaaacccagcu

SEQ ID NO: 3869913 - RNA, 19 nt, Human
ggaaggaaacccagcucug

SEQ ID NO: 3869914 - RNA, 20 nt, Human
ggaaggaaacccagcucugg

SEQ ID NO: 3869915 - RNA, 18 nt, Human
ggaaggaacucuggcuuc

SEQ ID NO: 3869916 - RNA, 20 nt, Human
ggaaggagacucaccucugc

SEQ ID NO: 3869917 - RNA, 14 nt, Human
ggaaggagagccug

SEQ ID NO: 3869918 - RNA, 17 nt, Human
ggaaggagagccugcug

SEQ ID NO: 3869919 - RNA, 12 nt, Human
ggaaggagccag

SEQ ID NO: 3869920 - RNA, 13 nt, Human
ggaaggagcugcc

SEQ ID NO: 3869921 - RNA, 18 nt, Human
ggaaggagcugccuggac

SEQ ID NO: 3869922 - RNA, 19 nt, Human
ggaaggagcugccuggacc

SEQ ID NO: 3869923 - RNA, 13 nt, Human
ggaaggaggagcc

SEQ ID NO: 3869924 - RNA, 20 nt, Human
ggaaggaggguacagcuggg

SEQ ID NO: 3869925 - RNA, 17 nt, Human
ggaaggaucccaugagc

SEQ ID NO: 3869926 - RNA, 22 nt, Human
ggaaggaucccaugagcuccuu

SEQ ID NO: 3869927 - RNA, 17 nt, Human
ggaaggcaggcagggcu

SEQ ID NO: 3869928 - RNA, 22 nt, Human
ggaaggcaggcagggcucuccu

SEQ ID NO: 3869929 - RNA, 14 nt, Human
ggaaggccaccugc

SEQ ID NO: 3869930 - RNA, 17 nt, Human
ggaaggccaccugcagg

SEQ ID NO: 3869931 - RNA, 20 nt, Human
ggaaggccugacuucugcug

SEQ ID NO: 3869932 - RNA, 14 nt, Human
ggaaggccugggug

SEQ ID NO: 3869933 - RNA, 22 nt, Human
ggaaggcuacuucggggcuggg

SEQ ID NO: 3869934 - RNA, 23 nt, Human
ggaagggaccaaggcaaggcagg

SEQ ID NO: 3869935 - RNA, 17 nt, Human
ggaagggagccaaggga

SEQ ID NO: 3869936 - RNA, 14 nt, Human
ggaagggcaaaacc

SEQ ID NO: 3869937 - RNA, 21 nt, Human
ggaagggcaggaaggagagcc

SEQ ID NO: 3869938 - RNA, 11 nt, Human
ggaagggccag

SEQ ID NO: 3869939 - RNA, 17 nt, Human
ggaaggggacccccgcc

SEQ ID NO: 3869940 - RNA, 14 nt, Human
ggaaggggacccuc

SEQ ID NO: 3869941 - RNA, 17 nt, Human
ggaaggggccagaggcu

SEQ ID NO: 3869942 - RNA, 18 nt, Human
ggaaggggcccgugggag

SEQ ID NO: 3869943 - RNA, 17 nt, Human
ggaaggggggucagaag

SEQ ID NO: 3869944 - RNA, 16 nt, Human
ggaaggggguccaccc

SEQ ID NO: 3869945 - RNA, 13 nt, Human
ggaaggguggugg

SEQ ID NO: 3869946 - RNA, 13 nt, Human
ggaaggucucauu

SEQ ID NO: 3869947 - RNA, 18 nt, Human
ggaaguacuggagaaaau

SEQ ID NO: 3869948 - RNA, 16 nt, Human
ggaaguaggaaguaaa

SEQ ID NO: 3869949 - RNA, 14 nt, Human
ggaaguaguccuug

SEQ ID NO: 3869950 - RNA, 16 nt, Human
ggaaguaguccuuggc

SEQ ID NO: 3869951 - RNA, 19 nt, Human
ggaaguaguuaucauguua

SEQ ID NO: 3869952 - RNA, 22 nt, Human
ggaagucguccuuacuccugug

SEQ ID NO: 3869953 - RNA, 20 nt, Human
ggaagugaagacuggaagcu

SEQ ID NO: 3869954 - RNA, 23 nt, Human
ggaagugaagagggagaagggau

SEQ ID NO: 3869955 - RNA, 21 nt, Human
ggaagugacaaggccccagag

SEQ ID NO: 3869956 - RNA, 22 nt, Human
ggaagugacaaggccccagaga

SEQ ID NO: 3869957 - RNA, 16 nt, Human
ggaagugaggaagcca

SEQ ID NO: 3869958 - RNA, 20 nt, Human
ggaagugguggcuguggaag

SEQ ID NO: 3869959 - RNA, 19 nt, Human
ggaaguguaacagcugagg

SEQ ID NO: 3869960 - RNA, 22 nt, Human
ggaaguuaaagggaagaaaaca

SEQ ID NO: 3869961 - RNA, 23 nt, Human
ggaaguucauaccuaaguacugu

SEQ ID NO: 3869962 - RNA, 18 nt, Human
ggaaguugacuuauagua

SEQ ID NO: 3869963 - RNA, 15 nt, Human
ggaaguuuagcucug

SEQ ID NO: 3869964 - RNA, 17 nt, Human
ggaaguuuagcucugag

SEQ ID NO: 3869965 - RNA, 17 nt, Human
ggaaguuuguguucugu

SEQ ID NO: 3869966 - RNA, 15 nt, Human
ggaauaaaaggcuug

SEQ ID NO: 3869967 - RNA, 12 nt, Human
ggaauaaaauac

SEQ ID NO: 3869968 - RNA, 19 nt, Human
ggaauaaaauacuauuuuu

SEQ ID NO: 3869969 - RNA, 21 nt, Human
ggaauaaaauccuaagacaca

SEQ ID NO: 3869970 - RNA, 23 nt, Human
ggaauaaauaugccucuccuuug

SEQ ID NO: 3869971 - RNA, 21 nt, Human
ggaauaagaagcaaauaaaua

SEQ ID NO: 3869972 - RNA, 21 nt, Human
ggaauaauuauuuauuuaaua

SEQ ID NO: 3869973 - RNA, 12 nt, Human
ggaauacagugu

SEQ ID NO: 3869974 - RNA, 15 nt, Human
ggaauaccugucccc

SEQ ID NO: 3869975 - RNA, 18 nt, Human
ggaauacuagggagaagg

SEQ ID NO: 3869976 - RNA, 16 nt, Human
ggaauagaagcaaauu

SEQ ID NO: 3869977 - RNA, 17 nt, Human
ggaauaguugagcccca

SEQ ID NO: 3869978 - RNA, 20 nt, Human
ggaauaguugagccccaagu

SEQ ID NO: 3869979 - RNA, 18 nt, Human
ggaauauaugugugccua

SEQ ID NO: 3869980 - RNA, 15 nt, Human
ggaauauuauauuug

SEQ ID NO: 3869981 - RNA, 11 nt, Human
ggaauauuuga

SEQ ID NO: 3869982 - RNA, 14 nt, Human
ggaauauuugaauc

SEQ ID NO: 3869983 - RNA, 18 nt, Human
ggaaucaacagggcagca

SEQ ID NO: 3869984 - RNA, 19 nt, Human
ggaaucaagagcugcccuc

SEQ ID NO: 3869985 - RNA, 18 nt, Human
ggaaucacucuuguggau

SEQ ID NO: 3869986 - RNA, 21 nt, Human
ggaaucagacuucacacugca

SEQ ID NO: 3869987 - RNA, 18 nt, Human
ggaaucaugucaggccug

SEQ ID NO: 3869988 - RNA, 20 nt, Human
ggaauccaagccuccacagc

SEQ ID NO: 3869989 - RNA, 21 nt, Human
ggaauccaagccuccacagcg

SEQ ID NO: 3869990 - RNA, 16 nt, Human
ggaauccacucccagg

SEQ ID NO: 3869991 - RNA, 20 nt, Human
ggaaucccacuaaugcaaac

SEQ ID NO: 3869992 - RNA, 22 nt, Human
ggaauccuauauagaaugcugc

SEQ ID NO: 3869993 - RNA, 13 nt, Human
ggaauccuggcag

SEQ ID NO: 3869994 - RNA, 21 nt, Human
ggaauccuggcagcccagaga

SEQ ID NO: 3869995 - RNA, 19 nt, Human
ggaauccuguccucagcuu

SEQ ID NO: 3869996 - RNA, 15 nt, Human
ggaaucuagaagaaa

SEQ ID NO: 3869997 - RNA, 19 nt, Human
ggaaucuagaagaaaugaa

SEQ ID NO: 3869998 - RNA, 17 nt, Human
ggaaucuuucugcuuug

SEQ ID NO: 3869999 - RNA, 21 nt, Human
ggaaucuuuguaccaaaauuu

SEQ ID NO: 3870000 - RNA, 18 nt, Human
ggaaugaaaaaagcuuua

SEQ ID NO: 3870001 - RNA, 20 nt, Human
ggaaugagaaguagccacag

SEQ ID NO: 3870002 - RNA, 13 nt, Human
ggaaugagcccag

SEQ ID NO: 3870003 - RNA, 17 nt, Human
ggaaugaggaaaauucu

SEQ ID NO: 3870004 - RNA, 17 nt, Human
ggaaugagggggcucag

SEQ ID NO: 3870005 - RNA, 21 nt, Human
ggaaugaggugggagguggaa

SEQ ID NO: 3870006 - RNA, 24 nt, Human
ggaaugauuaauuaaaacacaaca

SEQ ID NO: 3870007 - RNA, 13 nt, Human
ggaaugcaaagau

SEQ ID NO: 3870008 - RNA, 14 nt, Human
ggaaugcggcaaga

SEQ ID NO: 3870009 - RNA, 23 nt, Human
ggaaugcucccccauccuccccu

SEQ ID NO: 3870010 - RNA, 23 nt, Human
ggaaugcugcccgcucugcagac

SEQ ID NO: 3870011 - RNA, 14 nt, Human
ggaaugcuguguua

SEQ ID NO: 3870012 - RNA, 16 nt, Human
ggaaugcuuccuagaa

SEQ ID NO: 3870013 - RNA, 15 nt, Human
ggaaugcuuggaaua

SEQ ID NO: 3870014 - RNA, 19 nt, Human
ggaauggauuuuucuuuaa

SEQ ID NO: 3870015 - RNA, 20 nt, Human
ggaauggauuuuucuuuaac

SEQ ID NO: 3870016 - RNA, 18 nt, Human
ggaauguacaugucaaua

SEQ ID NO: 3870017 - RNA, 23 nt, Human
ggaauguauaguauuugaaaaca

SEQ ID NO: 3870018 - RNA, 14 nt, Human
ggaaugucuuuggu

SEQ ID NO: 3870019 - RNA, 19 nt, Human
ggaauguuugccucugccu

SEQ ID NO: 3870020 - RNA, 21 nt, Human
ggaauguuugggcagaaggga

SEQ ID NO: 3870021 - RNA, 17 nt, Human
ggaauuaaaacaauguc

SEQ ID NO: 3870022 - RNA, 16 nt, Human
ggaauuaaccuggugc

SEQ ID NO: 3870023 - RNA, 19 nt, Human
ggaauuagcuuggggccag

SEQ ID NO: 3870024 - RNA, 14 nt, Human
ggaauuauuuuaaa

SEQ ID NO: 3870025 - RNA, 12 nt, Human
ggaauucuguau

SEQ ID NO: 3870026 - RNA, 15 nt, Human
ggaauucuguauaga

SEQ ID NO: 3870027 - RNA, 17 nt, Human
ggaauugauuugcauug

SEQ ID NO: 3870028 - RNA, 19 nt, Human
ggaauugauuugcauugaa

SEQ ID NO: 3870029 - RNA, 16 nt, Human
ggaauuggagcucgug

SEQ ID NO: 3870030 - RNA, 23 nt, Human
ggaauuggguggggggcuucaua

SEQ ID NO: 3870031 - RNA, 23 nt, Human
ggaauugguggcagauuuuacaa

SEQ ID NO: 3870032 - RNA, 21 nt, Human
ggaauuguggcuauccugauu

SEQ ID NO: 3870033 - RNA, 12 nt, Human
ggccaaguucuu

SEQ ID NO: 3870034 - RNA, 22 nt, Human
ggccaaugcaccuaaagaaaaa

SEQ ID NO: 3870035 - RNA, 14 nt, Human
ggccacacagcugc

SEQ ID NO: 3870036 - RNA, 15 nt, Human
ggccacacagcugcc

SEQ ID NO: 3870037 - RNA, 16 nt, Human
ggccacacagcugccg

SEQ ID NO: 3870038 - RNA, 21 nt, Human
ggccacacucagcacaaggcc

SEQ ID NO: 3870039 - RNA, 11 nt, Human
ggccacagcca

SEQ ID NO: 3870040 - RNA, 13 nt, Human
ggccacagccaga

SEQ ID NO: 3870041 - RNA, 17 nt, Human
ggccacagccagaaccc

SEQ ID NO: 3870042 - RNA, 17 nt, Human
ggccacagcgccagccu

SEQ ID NO: 3870043 - RNA, 14 nt, Human
ggccacaguuguuu

SEQ ID NO: 3870044 - RNA, 16 nt, Human
ggccacaguuguuuga

SEQ ID NO: 3870045 - RNA, 16 nt, Human
ggccacauagaugcug

SEQ ID NO: 3870046 - RNA, 16 nt, Human
ggccacaucaaagagg

SEQ ID NO: 3870047 - RNA, 16 nt, Human
ggccacaugaguccca

SEQ ID NO: 3870048 - RNA, 11 nt, Human
ggccaccagga

SEQ ID NO: 3870049 - RNA, 18 nt, Human
ggccaccaggugccuuuc

SEQ ID NO: 3870050 - RNA, 23 nt, Human
ggccacccguucugcuggccugg

SEQ ID NO: 3870051 - RNA, 22 nt, Human
ggccaccuccuaaaaggcccag

SEQ ID NO: 3870052 - RNA, 15 nt, Human
ggccaccucuccaag

SEQ ID NO: 3870053 - RNA, 23 nt, Human
ggccaccucugcggaccccagcu

SEQ ID NO: 3870054 - RNA, 15 nt, Human
ggccaccucuuccug

SEQ ID NO: 3870055 - RNA, 22 nt, Human
ggccaccucuuccuggccggug

SEQ ID NO: 3870056 - RNA, 21 nt, Human
ggccaccugaggugggcccag

SEQ ID NO: 3870057 - RNA, 11 nt, Human
ggccaccugca

SEQ ID NO: 3870058 - RNA, 22 nt, Human
ggccaccugcccccuucuccca

SEQ ID NO: 3870059 - RNA, 14 nt, Human
ggccaccugccugc

SEQ ID NO: 3870060 - RNA, 16 nt, Human
ggccaccugcggugcu

SEQ ID NO: 3870061 - RNA, 16 nt, Human
ggccaccuggcucuca

SEQ ID NO: 3870062 - RNA, 14 nt, Human
ggccaccuuuucag

SEQ ID NO: 3870063 - RNA, 13 nt, Human
ggccacgcagcca

SEQ ID NO: 3870064 - RNA, 19 nt, Human
ggccacgcagccaggacac

SEQ ID NO: 3870065 - RNA, 18 nt, Human
ggccacgugauguggagg

SEQ ID NO: 3870066 - RNA, 12 nt, Human
ggccacgugcca

SEQ ID NO: 3870067 - RNA, 17 nt, Human
ggccacgugccaggccc

SEQ ID NO: 3870068 - RNA, 18 nt, Human
ggccacgugccaggcccg

SEQ ID NO: 3870069 - RNA, 23 nt, Human
ggccacucccggcacuccaugcu

SEQ ID NO: 3870070 - RNA, 13 nt, Human
ggccacuccgaga

SEQ ID NO: 3870071 - RNA, 15 nt, Human
ggccacucugccucu

SEQ ID NO: 3870072 - RNA, 16 nt, Human
ggccacucugccucug

SEQ ID NO: 3870073 - RNA, 14 nt, Human
ggccacugaagagg

SEQ ID NO: 3870074 - RNA, 15 nt, Human
ggccacugaagagga

SEQ ID NO: 3870075 - RNA, 18 nt, Human
ggccacugcacagagcuc

SEQ ID NO: 3870076 - RNA, 19 nt, Human
ggccacugcacagagcucu

SEQ ID NO: 3870077 - RNA, 13 nt, Human
ggccacugcuccc

SEQ ID NO: 3870078 - RNA, 18 nt, Human
ggccacuggccaucucca

SEQ ID NO: 3870079 - RNA, 15 nt, Human
ggccacuucugggug

SEQ ID NO: 3870080 - RNA, 13 nt, Human
ggccacuucuguc

SEQ ID NO: 3870081 - RNA, 22 nt, Human
ggccacuuggauccauuuccag

SEQ ID NO: 3870082 - RNA, 15 nt, Human
ggccacuuuugacua

SEQ ID NO: 3870083 - RNA, 12 nt, Human
ggccagaaguac

SEQ ID NO: 3870084 - RNA, 15 nt, Human
ggccagacaugccac

SEQ ID NO: 3870085 - RNA, 18 nt, Human
ggccagaccagagcucug

SEQ ID NO: 3870086 - RNA, 19 nt, Human
ggccagaccagagcucugg

SEQ ID NO: 3870087 - RNA, 12 nt, Human
ggccagagccca

SEQ ID NO: 3870088 - RNA, 14 nt, Human
ggccagagcuggga

SEQ ID NO: 3870089 - RNA, 21 nt, Human
ggccagagcugggaggcaugg

SEQ ID NO: 3870090 - RNA, 21 nt, Human
ggccagaggcccccagcccag

SEQ ID NO: 3870091 - RNA, 23 nt, Human
ggccagagggagugacagaggca

SEQ ID NO: 3870092 - RNA, 15 nt, Human
ggccagaguggccug

SEQ ID NO: 3870093 - RNA, 16 nt, Human
ggccagaguggccugg

SEQ ID NO: 3870094 - RNA, 18 nt, Human
ggccagaguggccuggcc

SEQ ID NO: 3870095 - RNA, 16 nt, Human
ggccagauccagccug

SEQ ID NO: 3870096 - RNA, 17 nt, Human
ggccagauccagccugg

SEQ ID NO: 3870097 - RNA, 15 nt, Human
ggccagaugcaccag

SEQ ID NO: 3870098 - RNA, 19 nt, Human
ggccagaugcaccagcccu

SEQ ID NO: 3870099 - RNA, 23 nt, Human
ggccagcaagguggaguggaugc

SEQ ID NO: 3870100 - RNA, 19 nt, Human
ggccagcagcaccugcccu

SEQ ID NO: 3870101 - RNA, 13 nt, Human
ggccagcagcuug

SEQ ID NO: 3870102 - RNA, 13 nt, Human
ggccagccagcca

SEQ ID NO: 3870103 - RNA, 17 nt, Human
ggccagccagccacucu

SEQ ID NO: 3870104 - RNA, 15 nt, Human
ggccagccccacagc

SEQ ID NO: 3870105 - RNA, 23 nt, Human
ggccagccccacagcccacgucc

SEQ ID NO: 3870106 - RNA, 15 nt, Human
ggccagccccaccca

SEQ ID NO: 3870107 - RNA, 16 nt, Human
ggccagccccacccag

SEQ ID NO: 3870108 - RNA, 21 nt, Human
ggccagccccacccaggaggg

SEQ ID NO: 3870109 - RNA, 17 nt, Human
ggccagccccggcccug

SEQ ID NO: 3870110 - RNA, 12 nt, Human
ggccagccccuc

SEQ ID NO: 3870111 - RNA, 18 nt, Human
ggccagccccucccacca

SEQ ID NO: 3870112 - RNA, 23 nt, Human
ggccagccccucccaccacagca

SEQ ID NO: 3870113 - RNA, 15 nt, Human
ggccagcccggcugg

SEQ ID NO: 3870114 - RNA, 16 nt, Human
ggccagcccggcuggu

SEQ ID NO: 3870115 - RNA, 18 nt, Human
ggccagcccggcugguuu

SEQ ID NO: 3870116 - RNA, 16 nt, Human
ggccagccucacccuu

SEQ ID NO: 3870117 - RNA, 13 nt, Human
ggccagccuggcc

SEQ ID NO: 3870118 - RNA, 18 nt, Human
ggccagccuggggccugg

SEQ ID NO: 3870119 - RNA, 19 nt, Human
ggccagccuggggccuggc

SEQ ID NO: 3870120 - RNA, 20 nt, Human
ggccagccuggggccuggca

SEQ ID NO: 3870121 - RNA, 21 nt, Human
ggccagccuggggccuggcag

SEQ ID NO: 3870122 - RNA, 22 nt, Human
ggccagccuugaccauucucca

SEQ ID NO: 3870123 - RNA, 22 nt, Human
ggccagcgagcgcccagcuccu

SEQ ID NO: 3870124 - RNA, 20 nt, Human
ggccagcugcaucuacucag

SEQ ID NO: 3870125 - RNA, 23 nt, Human
ggccagcugcaucuacucaggcc

SEQ ID NO: 3870126 - RNA, 15 nt, Human
ggccagcuuuucaaa

SEQ ID NO: 3870127 - RNA, 18 nt, Human
ggccaggaaguagcacag

SEQ ID NO: 3870128 - RNA, 23 nt, Human
ggccaggaaguagcacaggcuga

SEQ ID NO: 3870129 - RNA, 23 nt, Human
ggccaggacagagcugacaaaau

SEQ ID NO: 3870130 - RNA, 16 nt, Human
ggccaggacaggcccg

SEQ ID NO: 3870131 - RNA, 14 nt, Human
ggccaggacucugc

SEQ ID NO: 3870132 - RNA, 16 nt, Human
ggccaggacucugcag

SEQ ID NO: 3870133 - RNA, 20 nt, Human
ggccaggacucugcagccuc

SEQ ID NO: 3870134 - RNA, 13 nt, Human
ggccaggacugag

SEQ ID NO: 3870135 - RNA, 20 nt, Human
ggccaggacugagccccgca

SEQ ID NO: 3870136 - RNA, 14 nt, Human
ggccaggagccucc

SEQ ID NO: 3870137 - RNA, 15 nt, Human
ggccaggagcucuuc

SEQ ID NO: 3870138 - RNA, 14 nt, Human
ggccaggaggugcc

SEQ ID NO: 3870139 - RNA, 19 nt, Human
ggccaggaguuugagacca

SEQ ID NO: 3870140 - RNA, 20 nt, Human
ggccaggaguuugagaccag

SEQ ID NO: 3870141 - RNA, 11 nt, Human
ggccaggccac

SEQ ID NO: 3870142 - RNA, 15 nt, Human
ggccaggcccucugc

SEQ ID NO: 3870143 - RNA, 19 nt, Human
ggccaggccgggccuguac

SEQ ID NO: 3870144 - RNA, 14 nt, Human
ggccaggccucucc

SEQ ID NO: 3870145 - RNA, 11 nt, Human
ggccaggcucc

SEQ ID NO: 3870146 - RNA, 16 nt, Human
ggccaggcuccuuccu

SEQ ID NO: 3870147 - RNA, 11 nt, Human
ggccaggcugc

SEQ ID NO: 3870148 - RNA, 14 nt, Human
ggccaggcugcucu

SEQ ID NO: 3870149 - RNA, 16 nt, Human
ggccaggcugcucuug

SEQ ID NO: 3870150 - RNA, 12 nt, Human
ggccaggcuggu

SEQ ID NO: 3870151 - RNA, 19 nt, Human
ggccaggcuggucuaaaac

SEQ ID NO: 3870152 - RNA, 16 nt, Human
ggccagggagaagcuc

SEQ ID NO: 3870153 - RNA, 20 nt, Human
ggccagggccacgcuccagc

SEQ ID NO: 3870154 - RNA, 17 nt, Human
ggccagggccuggaaga

SEQ ID NO: 3870155 - RNA, 23 nt, Human
ggccagggccuggaagacagaga

SEQ ID NO: 3870156 - RNA, 14 nt, Human
ggccagggcugccc

SEQ ID NO: 3870157 - RNA, 19 nt, Human
ggccagggcugcccugaga

SEQ ID NO: 3870158 - RNA, 17 nt, Human
ggccaggggucucccug

SEQ ID NO: 3870159 - RNA, 20 nt, Human
ggccaguaagggaaauagaa

SEQ ID NO: 3870160 - RNA, 20 nt, Human
ggccaguccacccugccugc

SEQ ID NO: 3870161 - RNA, 16 nt, Human
ggccaguccaggcugc

SEQ ID NO: 3870162 - RNA, 21 nt, Human
ggccaguccaggcugccgugg

SEQ ID NO: 3870163 - RNA, 20 nt, Human
ggccaguccugccuggccag

SEQ ID NO: 3870164 - RNA, 21 nt, Human
ggccaguccugccuggccagg

SEQ ID NO: 3870165 - RNA, 19 nt, Human
ggccagugcccugauccca

SEQ ID NO: 3870166 - RNA, 19 nt, Human
ggccaguggccuuccccag

SEQ ID NO: 3870167 - RNA, 22 nt, Human
ggccaguggccuuccccagcau

SEQ ID NO: 3870168 - RNA, 19 nt, Human
ggccaguggcuggaucugu

SEQ ID NO: 3870169 - RNA, 14 nt, Human
ggccaguggggccu

SEQ ID NO: 3870170 - RNA, 13 nt, Human
ggccagugucugu

SEQ ID NO: 3870171 - RNA, 22 nt, Human
ggccagugucugucccgggguc

SEQ ID NO: 3870172 - RNA, 20 nt, Human
ggccagugugacaaggauug

SEQ ID NO: 3870173 - RNA, 19 nt, Human
ggccaguguuuaaaacuuc

SEQ ID NO: 3870174 - RNA, 15 nt, Human
ggccauacuggccuc

SEQ ID NO: 3870175 - RNA, 18 nt, Human
ggccauauuuaccucagc

SEQ ID NO: 3870176 - RNA, 19 nt, Human
ggccauauuuaccucagcc

SEQ ID NO: 3870177 - RNA, 22 nt, Human
ggccauauuuaccucagccugg

SEQ ID NO: 3870178 - RNA, 12 nt, Human
ggccgaggcggg

SEQ ID NO: 3870179 - RNA, 16 nt, Human
ggccgaggguccuggc

SEQ ID NO: 3870180 - RNA, 22 nt, Human
ggccgauuugggaaccaagcua

SEQ ID NO: 3870181 - RNA, 21 nt, Human
ggccgcaccuaaagcagccag

SEQ ID NO: 3870182 - RNA, 18 nt, Human
ggccgcagcucuugcccu

SEQ ID NO: 3870183 - RNA, 22 nt, Human
ggccgcccccugccccccagcc

SEQ ID NO: 3870184 - RNA, 17 nt, Human
ggccgcccgggcccaga

SEQ ID NO: 3870185 - RNA, 21 nt, Human
ggccgcccgggcccagaggag

SEQ ID NO: 3870186 - RNA, 13 nt, Human
ggccgccuggguc

SEQ ID NO: 3870187 - RNA, 16 nt, Human
ggccgcgcccuuuccc

SEQ ID NO: 3870188 - RNA, 18 nt, Human
ggccgcgcguccagcugc

SEQ ID NO: 3870189 - RNA, 15 nt, Human
ggccgcuagaggccu

SEQ ID NO: 3870190 - RNA, 18 nt, Human
ggccgcuagaggccugag

SEQ ID NO: 3870191 - RNA, 13 nt, Human
ggccgcugccacc

SEQ ID NO: 3870192 - RNA, 23 nt, Human
ggccgcugccacccaccucccug

SEQ ID NO: 3870193 - RNA, 18 nt, Human
ggccggcagccccagccu

SEQ ID NO: 3870194 - RNA, 21 nt, Human
ggccggcagccccagccugcu

SEQ ID NO: 3870195 - RNA, 16 nt, Human
ggccggccagccagcc

SEQ ID NO: 3870196 - RNA, 15 nt, Human
ggccggccagguggg

SEQ ID NO: 3870197 - RNA, 17 nt, Human
ggccggcgagcccugug

SEQ ID NO: 3870198 - RNA, 14 nt, Human
ggccgggcagaggg

SEQ ID NO: 3870199 - RNA, 23 nt, Human
ggccgggccuguacagucugucu

SEQ ID NO: 3870200 - RNA, 13 nt, Human
ggccggggccggg

SEQ ID NO: 3870201 - RNA, 21 nt, Human
ggccggucugcaagucagagg

SEQ ID NO: 3870202 - RNA, 16 nt, Human
ggccguaucuccggcu

SEQ ID NO: 3870203 - RNA, 19 nt, Human
ggccgucacuugugggggu

SEQ ID NO: 3870204 - RNA, 12 nt, Human
ggccgucaggac

SEQ ID NO: 3870205 - RNA, 13 nt, Human
ggccguccucccg

SEQ ID NO: 3870206 - RNA, 20 nt, Human
ggccguccucccgggcccuc

SEQ ID NO: 3870207 - RNA, 20 nt, Human
ggccgugacgucuggguggc

SEQ ID NO: 3870208 - RNA, 17 nt, Human
ggccgugggccuggggu

SEQ ID NO: 3870209 - RNA, 16 nt, Human
ggccguggggguugag

SEQ ID NO: 3870210 - RNA, 19 nt, Human
ggccguugauguuggcugg

SEQ ID NO: 3870211 - RNA, 21 nt, Human
ggccguugauguuggcuggga

SEQ ID NO: 3870212 - RNA, 14 nt, Human
ggccuaaaaucuug

SEQ ID NO: 3870213 - RNA, 21 nt, Human
ggccuaaccugccgagagucc

SEQ ID NO: 3870214 - RNA, 15 nt, Human
ggccuaagaggcugc

SEQ ID NO: 3870215 - RNA, 13 nt, Human
ggccuaauaaaac

SEQ ID NO: 3870216 - RNA, 23 nt, Human
ggccuaauaaaacugaugugaaa

SEQ ID NO: 3870217 - RNA, 23 nt, Human
ggccuaaucucauaccucugacc

SEQ ID NO: 3870218 - RNA, 23 nt, Human
ggccuacagcuuugaucccugac

SEQ ID NO: 3870219 - RNA, 23 nt, Human
ggccuacaugcuuugugaacaag

SEQ ID NO: 3870220 - RNA, 20 nt, Human
ggccuaccccgcagacaccu

SEQ ID NO: 3870221 - RNA, 12 nt, Human
ggccuacuccug

SEQ ID NO: 3870222 - RNA, 20 nt, Human
ggccuacuccugucuucugc

SEQ ID NO: 3870223 - RNA, 13 nt, Human
ggccuagaccagc

SEQ ID NO: 3870224 - RNA, 14 nt, Human
ggccuagaggccug

SEQ ID NO: 3870225 - RNA, 17 nt, Human
ggccuagauccacacac

SEQ ID NO: 3870226 - RNA, 23 nt, Human
ggccuagauccacacacagagga

SEQ ID NO: 3870227 - RNA, 23 nt, Human
ggccuagcauacguacacauuuu

SEQ ID NO: 3870228 - RNA, 17 nt, Human
ggccuaggaggguccuc

SEQ ID NO: 3870229 - RNA, 21 nt, Human
ggccuaggaggguccucugag

SEQ ID NO: 3870230 - RNA, 14 nt, Human
ggccuaggcugcau

SEQ ID NO: 3870231 - RNA, 15 nt, Human
ggccuagucccuucc

SEQ ID NO: 3870232 - RNA, 23 nt, Human
ggccuaucagugugccccccauc

SEQ ID NO: 3870233 - RNA, 18 nt, Human
ggccuaugacuugggcac

SEQ ID NO: 3870234 - RNA, 17 nt, Human
ggccuauggagagcccu

SEQ ID NO: 3870235 - RNA, 14 nt, Human
ggccuauguggucu

SEQ ID NO: 3870236 - RNA, 22 nt, Human
ggccucaaaguuggggcaggcu

SEQ ID NO: 3870237 - RNA, 15 nt, Human
ggccucaacccuccc

SEQ ID NO: 3870238 - RNA, 17 nt, Human
ggccucaacccucccuc

SEQ ID NO: 3870239 - RNA, 23 nt, Human
ggccucaacccucccucagcccc

SEQ ID NO: 3870240 - RNA, 18 nt, Human
ggccucaacuccucccau

SEQ ID NO: 3870241 - RNA, 18 nt, Human
ggccucaagaucaaugaa

SEQ ID NO: 3870242 - RNA, 15 nt, Human
ggccucaaggacuug

SEQ ID NO: 3870243 - RNA, 13 nt, Human
ggccucacccacc

SEQ ID NO: 3870244 - RNA, 18 nt, Human
ggccucacccaccccugc

SEQ ID NO: 3870245 - RNA, 18 nt, Human
ggccucaccgaguggggg

SEQ ID NO: 3870246 - RNA, 15 nt, Human
ggccucaccucuacc

SEQ ID NO: 3870247 - RNA, 21 nt, Human
ggccucagacugcacccagga

SEQ ID NO: 3870248 - RNA, 22 nt, Human
ggccucagacugcacccaggag

SEQ ID NO: 3870249 - RNA, 23 nt, Human
ggccucagacugcacccaggagg

SEQ ID NO: 3870250 - RNA, 17 nt, Human
ggccucagcaccccugu

SEQ ID NO: 3870251 - RNA, 15 nt, Human
ggccucagccagaga

SEQ ID NO: 3870252 - RNA, 17 nt, Human
ggccucagccagagaag

SEQ ID NO: 3870253 - RNA, 16 nt, Human
ggccucagggcuccuu

SEQ ID NO: 3870254 - RNA, 17 nt, Human
ggccucaggugcugucc

SEQ ID NO: 3870255 - RNA, 18 nt, Human
ggccucaggugcugucca

SEQ ID NO: 3870256 - RNA, 17 nt, Human
ggccucagguuugccug

SEQ ID NO: 3870257 - RNA, 11 nt, Human
ggccucagucu

SEQ ID NO: 3870258 - RNA, 14 nt, Human
ggccucauguggcu

SEQ ID NO: 3870259 - RNA, 15 nt, Human
ggccucauguggcug

SEQ ID NO: 3870260 - RNA, 17 nt, Human
ggccucauguggcugga

SEQ ID NO: 3870261 - RNA, 17 nt, Human
ggccucauuacuuuacc

SEQ ID NO: 3870262 - RNA, 15 nt, Human
ggccuccagaacuca

SEQ ID NO: 3870263 - RNA, 10 nt, Human
ggccuccagg

SEQ ID NO: 3870264 - RNA, 14 nt, Human
ggccuccauccuga

SEQ ID NO: 3870265 - RNA, 15 nt, Human
ggccuccauccugag

SEQ ID NO: 3870266 - RNA, 19 nt, Human
ggccuccauccugaggcuc

SEQ ID NO: 3870267 - RNA, 17 nt, Human
ggccuccauuccuggag

SEQ ID NO: 3870268 - RNA, 17 nt, Human
ggccucccaacucaccc

SEQ ID NO: 3870269 - RNA, 22 nt, Human
ggccucccaacucaccccagcc

SEQ ID NO: 3870270 - RNA, 11 nt, Human
ggccucccaca

SEQ ID NO: 3870271 - RNA, 12 nt, Human
ggccucccaccc

SEQ ID NO: 3870272 - RNA, 13 nt, Human
ggccucccacccg

SEQ ID NO: 3870273 - RNA, 12 nt, Human
ggccucccccac

SEQ ID NO: 3870274 - RNA, 19 nt, Human
ggccuccccugccaccagg

SEQ ID NO: 3870275 - RNA, 22 nt, Human
ggccuccccugccaccaggcca

SEQ ID NO: 3870276 - RNA, 15 nt, Human
ggccucccugccagu

SEQ ID NO: 3870277 - RNA, 21 nt, Human
ggccuccggcgucagccucca

SEQ ID NO: 3870278 - RNA, 21 nt, Human
ggccuccgucacuaccuggcu

SEQ ID NO: 3870279 - RNA, 21 nt, Human
ggccuccucuaacaggggcug

SEQ ID NO: 3870280 - RNA, 18 nt, Human
ggccuccucuguccaggg

SEQ ID NO: 3870281 - RNA, 23 nt, Human
ggccuccucuucaccccggcagg

SEQ ID NO: 3870282 - RNA, 14 nt, Human
ggccuccuucugag

SEQ ID NO: 3870283 - RNA, 16 nt, Human
ggccuccuugcuuguu

SEQ ID NO: 3870284 - RNA, 19 nt, Human
ggccucgcaggaagaccca

SEQ ID NO: 3870285 - RNA, 16 nt, Human
ggccucgccuggccug

SEQ ID NO: 3870286 - RNA, 22 nt, Human
ggccucgggacaccugcccugc

SEQ ID NO: 3870287 - RNA, 16 nt, Human
ggccucuaaccccagg

SEQ ID NO: 3870288 - RNA, 22 nt, Human
ggccucuaaccccaggccccga

SEQ ID NO: 3870289 - RNA, 19 nt, Human
ggccucuaccacaagggcu

SEQ ID NO: 3870290 - RNA, 15 nt, Human
ggccucuccauuugc

SEQ ID NO: 3870291 - RNA, 13 nt, Human
ggccucucuaucc

SEQ ID NO: 3870292 - RNA, 23 nt, Human
ggccucucuauccucucuuccuc

SEQ ID NO: 3870293 - RNA, 14 nt, Human
ggccucucucuagg

SEQ ID NO: 3870294 - RNA, 15 nt, Human
ggccucucuggccuc

SEQ ID NO: 3870295 - RNA, 17 nt, Human
ggccucucuggccuccc

SEQ ID NO: 3870296 - RNA, 21 nt, Human
ggccucugcaaaggaaauacc

SEQ ID NO: 3870297 - RNA, 16 nt, Human
ggccucugcacucccc

SEQ ID NO: 3870298 - RNA, 22 nt, Human
ggccucugcacuccccugcugg

SEQ ID NO: 3870299 - RNA, 20 nt, Human
ggccucugcggagcacacug

SEQ ID NO: 3870300 - RNA, 18 nt, Human
ggccucuuaugggcuggg

SEQ ID NO: 3870301 - RNA, 16 nt, Human
ggccucuugagcagug

SEQ ID NO: 3870302 - RNA, 13 nt, Human
ggccucuuggcag

SEQ ID NO: 3870303 - RNA, 23 nt, Human
ggccucuuugucuaaaacaauaa

SEQ ID NO: 3870304 - RNA, 23 nt, Human
ggccugaagaguccucugaauga

SEQ ID NO: 3870305 - RNA, 20 nt, Human
ggccugaagccagcugcccu

SEQ ID NO: 3870306 - RNA, 19 nt, Human
ggccugaaucaugagccug

SEQ ID NO: 3870307 - RNA, 19 nt, Human
ggccugaccucccccuccu

SEQ ID NO: 3870308 - RNA, 20 nt, Human
ggccugaccucccccuccuu

SEQ ID NO: 3870309 - RNA, 16 nt, Human
ggccugacucucagca

SEQ ID NO: 3870310 - RNA, 13 nt, Human
ggccugacugcuc

SEQ ID NO: 3870311 - RNA, 15 nt, Human
ggccugagacccagg

SEQ ID NO: 3870312 - RNA, 21 nt, Human
ggccugagagaauuggcucaa

SEQ ID NO: 3870313 - RNA, 18 nt, Human
ggccugagagucagcucu

SEQ ID NO: 3870314 - RNA, 22 nt, Human
ggccugagauuucaucugcucu

SEQ ID NO: 3870315 - RNA, 17 nt, Human
ggccugagcaguccuug

SEQ ID NO: 3870316 - RNA, 19 nt, Human
ggccugagcaguccuuggc

SEQ ID NO: 3870317 - RNA, 15 nt, Human
ggccugagccuggcc

SEQ ID NO: 3870318 - RNA, 18 nt, Human
ggccugaggaugagcugg

SEQ ID NO: 3870319 - RNA, 22 nt, Human
ggccugagugagaggggaggcc

SEQ ID NO: 3870320 - RNA, 20 nt, Human
ggccugaucagaccacggcu

SEQ ID NO: 3870321 - RNA, 14 nt, Human
ggccugaugcuccc

SEQ ID NO: 3870322 - RNA, 19 nt, Human
ggggccacuuuugacuagg

SEQ ID NO: 3870323 - RNA, 17 nt, Human
ggggccagauccagccu

SEQ ID NO: 3870324 - RNA, 20 nt, Human
ggggccaggcugggucgccc

SEQ ID NO: 3870325 - RNA, 20 nt, Human
ggggccaugagcuccagacc

SEQ ID NO: 3870326 - RNA, 21 nt, Human
ggggccaugagcuccagaccc

SEQ ID NO: 3870327 - RNA, 22 nt, Human
ggggccaugagcuccagacccc

SEQ ID NO: 3870328 - RNA, 14 nt, Human
ggggccaugaggcc

SEQ ID NO: 3870329 - RNA, 14 nt, Human
ggggccaugccucc

SEQ ID NO: 3870330 - RNA, 19 nt, Human
ggggccccagucagccucu

SEQ ID NO: 3870331 - RNA, 16 nt, Human
ggggccccgucucagg

SEQ ID NO: 3870332 - RNA, 20 nt, Human
ggggccccgucucaggucug

SEQ ID NO: 3870333 - RNA, 19 nt, Human
ggggccccucucagcccuc

SEQ ID NO: 3870334 - RNA, 21 nt, Human
ggggcccgccuggcagaacug

SEQ ID NO: 3870335 - RNA, 21 nt, Human
ggggcccgcgauguggaacug

SEQ ID NO: 3870336 - RNA, 15 nt, Human
ggggcccggccagcc

SEQ ID NO: 3870337 - RNA, 22 nt, Human
ggggccgcugccacccaccucc

SEQ ID NO: 3870338 - RNA, 16 nt, Human
ggggccggccaguggc

SEQ ID NO: 3870339 - RNA, 21 nt, Human
ggggccgggcgcgguggcuca

SEQ ID NO: 3870340 - RNA, 17 nt, Human
ggggccgggggcagucu

SEQ ID NO: 3870341 - RNA, 23 nt, Human
ggggccuacagcuuugaucccug

SEQ ID NO: 3870342 - RNA, 20 nt, Human
ggggccuaggccucagccag

SEQ ID NO: 3870343 - RNA, 15 nt, Human
ggggccucagugcca

SEQ ID NO: 3870344 - RNA, 21 nt, Human
ggggccuccaugggccccagg

SEQ ID NO: 3870345 - RNA, 16 nt, Human
ggggccugaggcuccu

SEQ ID NO: 3870346 - RNA, 18 nt, Human
ggggccugccaccuggac

SEQ ID NO: 3870347 - RNA, 19 nt, Human
ggggccuggagauccuccu

SEQ ID NO: 3870348 - RNA, 11 nt, Human
ggggccuggca

SEQ ID NO: 3870349 - RNA, 22 nt, Human
ggggccuggcgggaugggccac

SEQ ID NO: 3870350 - RNA, 22 nt, Human
ggggccuggcuggcugagggca

SEQ ID NO: 3870351 - RNA, 16 nt, Human
ggggccugggacuucc

SEQ ID NO: 3870352 - RNA, 12 nt, Human
ggggccugggca

SEQ ID NO: 3870353 - RNA, 15 nt, Human
ggggccugggcagga

SEQ ID NO: 3870354 - RNA, 17 nt, Human
ggggccuguacugccug

SEQ ID NO: 3870355 - RNA, 13 nt, Human
ggggcgaggcaga

SEQ ID NO: 3870356 - RNA, 21 nt, Human
ggggcgaucgcggcggagcug

SEQ ID NO: 3870357 - RNA, 16 nt, Human
ggggcgcggcugggag

SEQ ID NO: 3870358 - RNA, 21 nt, Human
ggggcgcucgcuuccgcaucc

SEQ ID NO: 3870359 - RNA, 14 nt, Human
ggggcgcuggccca

SEQ ID NO: 3870360 - RNA, 17 nt, Human
ggggcgcuggcccagcc

SEQ ID NO: 3870361 - RNA, 17 nt, Human
ggggcgugaggucccag

SEQ ID NO: 3870362 - RNA, 19 nt, Human
ggggcguggagggaggccc

SEQ ID NO: 3870363 - RNA, 15 nt, Human
ggggcguggggaggg

SEQ ID NO: 3870364 - RNA, 16 nt, Human
ggggcuacaagaggga

SEQ ID NO: 3870365 - RNA, 14 nt, Human
ggggcuagaaccua

SEQ ID NO: 3870366 - RNA, 15 nt, Human
ggggcucagcaaggc

SEQ ID NO: 3870367 - RNA, 21 nt, Human
ggggcucagcaaggccaccuc

SEQ ID NO: 3870368 - RNA, 16 nt, Human
ggggcucccagccagg

SEQ ID NO: 3870369 - RNA, 11 nt, Human
ggggcuccugg

SEQ ID NO: 3870370 - RNA, 21 nt, Human
ggggcuccuuucuccagccag

SEQ ID NO: 3870371 - RNA, 22 nt, Human
ggggcuccuuucuccagccagc

SEQ ID NO: 3870372 - RNA, 20 nt, Human
ggggcucuaacgccugagcc

SEQ ID NO: 3870373 - RNA, 20 nt, Human
ggggcucucagcucagcgcc

SEQ ID NO: 3870374 - RNA, 14 nt, Human
ggggcucuucucau

SEQ ID NO: 3870375 - RNA, 18 nt, Human
ggggcugaacggggagaa

SEQ ID NO: 3870376 - RNA, 20 nt, Human
ggggcugaccuuccucgcag

SEQ ID NO: 3870377 - RNA, 15 nt, Human
ggggcugaggagcag

SEQ ID NO: 3870378 - RNA, 17 nt, Human
ggggcugaggugggagg

SEQ ID NO: 3870379 - RNA, 22 nt, Human
ggggcugcaccggcuggccugg

SEQ ID NO: 3870380 - RNA, 14 nt, Human
ggggcugccagggg

SEQ ID NO: 3870381 - RNA, 13 nt, Human
ggggcugcccgcu

SEQ ID NO: 3870382 - RNA, 16 nt, Human
ggggcugcccgcuccc

SEQ ID NO: 3870383 - RNA, 15 nt, Human
ggggcugcuccucca

SEQ ID NO: 3870384 - RNA, 16 nt, Human
ggggcugcuccuccag

SEQ ID NO: 3870385 - RNA, 15 nt, Human
ggggcugcuggccug

SEQ ID NO: 3870386 - RNA, 16 nt, Human
ggggcuggaggagccc

SEQ ID NO: 3870387 - RNA, 17 nt, Human
ggggcuggaggagccca

SEQ ID NO: 3870388 - RNA, 17 nt, Human
ggggcugggcagaggaa

SEQ ID NO: 3870389 - RNA, 17 nt, Human
ggggcuggggcaggagg

SEQ ID NO: 3870390 - RNA, 10 nt, Human
ggggcugggu

SEQ ID NO: 3870391 - RNA, 13 nt, Human
ggggcuggguugg

SEQ ID NO: 3870392 - RNA, 23 nt, Human
ggggcuggguuggcgcacccucc

SEQ ID NO: 3870393 - RNA, 23 nt, Human
ggggcuguccugccacccagccc

SEQ ID NO: 3870394 - RNA, 20 nt, Human
ggggcuuauaauaaaggacu

SEQ ID NO: 3870395 - RNA, 20 nt, Human
gggggaacgcccacuucccu

SEQ ID NO: 3870396 - RNA, 17 nt, Human
gggggaacucagaucca

SEQ ID NO: 3870397 - RNA, 17 nt, Human
gggggaagagcacagcc

SEQ ID NO: 3870398 - RNA, 15 nt, Human
gggggagagggcugc

SEQ ID NO: 3870399 - RNA, 12 nt, Human
gggggauaugaa

SEQ ID NO: 3870400 - RNA, 17 nt, Human
gggggaucacagccucu

SEQ ID NO: 3870401 - RNA, 21 nt, Human
gggggaugccacuccucccuc

SEQ ID NO: 3870402 - RNA, 13 nt, Human
gggggcagggcug

SEQ ID NO: 3870403 - RNA, 22 nt, Human
gggggcagucugagagaggcca

SEQ ID NO: 3870404 - RNA, 21 nt, Human
gggggcagugcucacccacac

SEQ ID NO: 3870405 - RNA, 15 nt, Human
gggggccaacaccag

SEQ ID NO: 3870406 - RNA, 12 nt, Human
gggggccaccug

SEQ ID NO: 3870407 - RNA, 16 nt, Human
gggggccaccugccug

SEQ ID NO: 3870408 - RNA, 20 nt, Human
gggggccccagucagccucu

SEQ ID NO: 3870409 - RNA, 18 nt, Human
gggggccucagugccacu

SEQ ID NO: 3870410 - RNA, 18 nt, Human
gggggccugaccuccccc

SEQ ID NO: 3870411 - RNA, 11 nt, Human
gggggccuggc

SEQ ID NO: 3870412 - RNA, 13 nt, Human
gggggccuggcug

SEQ ID NO: 3870413 - RNA, 14 nt, Human
gggggccuggcugg

SEQ ID NO: 3870414 - RNA, 18 nt, Human
gggggcuagggagacgcc

SEQ ID NO: 3870415 - RNA, 19 nt, Human
gggggcucagcaaggccac

SEQ ID NO: 3870416 - RNA, 20 nt, Human
gggggcugccuggcccccag

SEQ ID NO: 3870417 - RNA, 12 nt, Human
gggggcuggccu

SEQ ID NO: 3870418 - RNA, 11 nt, Human
gggggcuggga

SEQ ID NO: 3870419 - RNA, 23 nt, Human
ggggggcccgccuggcagaacug

SEQ ID NO: 3870420 - RNA, 21 nt, Human
gggggucaccggccgauggag

SEQ ID NO: 3870421 - RNA, 20 nt, Human
gggggucaggcagccaguga

SEQ ID NO: 3870422 - RNA, 18 nt, Human
ggggguccuccuccaggg

SEQ ID NO: 3870423 - RNA, 22 nt, Human
gggggucuggcugguguuaaca

SEQ ID NO: 3870424 - RNA, 13 nt, Human
ggggguggaggcu

SEQ ID NO: 3870425 - RNA, 13 nt, Human
ggggguggccgcu

SEQ ID NO: 3870426 - RNA, 19 nt, Human
ggggguuccguguccaccc

SEQ ID NO: 3870427 - RNA, 22 nt, Human
gggguaaaauuccuuagcuuag

SEQ ID NO: 3870428 - RNA, 17 nt, Human
gggguaggcagagccuu

SEQ ID NO: 3870429 - RNA, 15 nt, Human
gggguaguuggcaga

SEQ ID NO: 3870430 - RNA, 14 nt, Human
gggguaugaagagc

SEQ ID NO: 3870431 - RNA, 21 nt, Human
ggggucacucuggcagcucag

SEQ ID NO: 3870432 - RNA, 15 nt, Human
ggggucaggcuccau

SEQ ID NO: 3870433 - RNA, 22 nt, Human
ggggucagggaccaaggacccc

SEQ ID NO: 3870434 - RNA, 13 nt, Human
ggggucagugcug

SEQ ID NO: 3870435 - RNA, 13 nt, Human
ggggucccagugg

SEQ ID NO: 3870436 - RNA, 18 nt, Human
gggguccccuccaggagu

SEQ ID NO: 3870437 - RNA, 22 nt, Human
ggggucccuagcagcccacccu

SEQ ID NO: 3870438 - RNA, 22 nt, Human
gggguccuucaaguuagcucag

SEQ ID NO: 3870439 - RNA, 22 nt, Human
ggggucgacuucgggcuggcca

SEQ ID NO: 3870440 - RNA, 15 nt, Human
ggggucuccaggagg

SEQ ID NO: 3870441 - RNA, 20 nt, Human
ggggucucccucuccugccu

SEQ ID NO: 3870442 - RNA, 19 nt, Human
ggggucucucacagacagg

SEQ ID NO: 3870443 - RNA, 21 nt, Human
ggggucuggcugguguuaaca

SEQ ID NO: 3870444 - RNA, 23 nt, Human
ggggucuguguguuuaugugugu

SEQ ID NO: 3870445 - RNA, 12 nt, Human
ggggucuuugug

SEQ ID NO: 3870446 - RNA, 12 nt, Human
ggggugacacag

SEQ ID NO: 3870447 - RNA, 21 nt, Human
ggggugacagucaucaucagg

SEQ ID NO: 3870448 - RNA, 22 nt, Human
ggggugaccuccggccaggugc

SEQ ID NO: 3870449 - RNA, 18 nt, Human
ggggugacgccugcccuc

SEQ ID NO: 3870450 - RNA, 18 nt, Human
ggggugauuucagagagg

SEQ ID NO: 3870451 - RNA, 16 nt, Human
ggggugcacaggaggg

SEQ ID NO: 3870452 - RNA, 16 nt, Human
ggggugcccacaggcc

SEQ ID NO: 3870453 - RNA, 18 nt, Human
ggggugcugggccccugc

SEQ ID NO: 3870454 - RNA, 14 nt, Human
ggggugcuuccuug

SEQ ID NO: 3870455 - RNA, 17 nt, Human
gggguggaggcuuccug

SEQ ID NO: 3870456 - RNA, 13 nt, Human
gggguggccaggc

SEQ ID NO: 3870457 - RNA, 22 nt, Human
gggguggcccgaaagggucucc

SEQ ID NO: 3870458 - RNA, 12 nt, Human
gggguggccucc

SEQ ID NO: 3870459 - RNA, 17 nt, Human
gggguggccugcaguga

SEQ ID NO: 3870460 - RNA, 18 nt, Human
gggguggggguggaggcu

SEQ ID NO: 3870461 - RNA, 11 nt, Human
gggguggguca

SEQ ID NO: 3870462 - RNA, 18 nt, Human
gggguguuaguggcaccg

SEQ ID NO: 3870463 - RNA, 20 nt, Human
gggguguuugggaggcugcg

SEQ ID NO: 3870464 - RNA, 17 nt, Human
gggguuacaaacugcaa

SEQ ID NO: 3870465 - RNA, 13 nt, Human
gggguuaugugga

SEQ ID NO: 3870466 - RNA, 23 nt, Human
gggguucagccccuccucugcca

SEQ ID NO: 3870467 - RNA, 14 nt, Human
gguauaccucacuu

SEQ ID NO: 3870468 - RNA, 16 nt, Human
gguauauccaaaagcu

SEQ ID NO: 3870469 - RNA, 19 nt, Human
gguauauccuuuucugugu

SEQ ID NO: 3870470 - RNA, 21 nt, Human
gguauauccuuuucuguguuu

SEQ ID NO: 3870471 - RNA, 21 nt, Human
gguauaucuagguuuaugaca

SEQ ID NO: 3870472 - RNA, 15 nt, Human
gguaucaagaaaguc

SEQ ID NO: 3870473 - RNA, 12 nt, Human
gguaucauauau

SEQ ID NO: 3870474 - RNA, 19 nt, Human
gguaucauuuucugcauuu

SEQ ID NO: 3870475 - RNA, 12 nt, Human
gguauccugccc

SEQ ID NO: 3870476 - RNA, 17 nt, Human
gguauccugcccagugu

SEQ ID NO: 3870477 - RNA, 17 nt, Human
gguaucuaauucuuuaa

SEQ ID NO: 3870478 - RNA, 20 nt, Human
gguaucucagaaagugccug

SEQ ID NO: 3870479 - RNA, 23 nt, Human
gguaucuccaggauugaagagca

SEQ ID NO: 3870480 - RNA, 19 nt, Human
gguaugaacuugaggacac

SEQ ID NO: 3870481 - RNA, 15 nt, Human
gguauggaacucucu

SEQ ID NO: 3870482 - RNA, 12 nt, Human
gguauguuuaau

SEQ ID NO: 3870483 - RNA, 18 nt, Human
gguauguuuaaucuguua

SEQ ID NO: 3870484 - RNA, 16 nt, Human
gguauuaauaaaaaga

SEQ ID NO: 3870485 - RNA, 14 nt, Human
gguauuccugccuc

SEQ ID NO: 3870486 - RNA, 21 nt, Human
gguauuuaucuauuguaagau

SEQ ID NO: 3870487 - RNA, 22 nt, Human
gguauuuuaggcagggauuuga

SEQ ID NO: 3870488 - RNA, 12 nt, Human
gguauuuucaau

SEQ ID NO: 3870489 - RNA, 21 nt, Human
gguauuuuuuuguaauugcuu

SEQ ID NO: 3870490 - RNA, 20 nt, Human
ggucaacagaaugaaaaaug

SEQ ID NO: 3870491 - RNA, 21 nt, Human
ggucaacagaaugaaaaauga

SEQ ID NO: 3870492 - RNA, 20 nt, Human
ggucaacagagaaggcagga

SEQ ID NO: 3870493 - RNA, 22 nt, Human
ggucaacaguuuuccuaugcuu

SEQ ID NO: 3870494 - RNA, 18 nt, Human
ggucaagaaacagccagc

SEQ ID NO: 3870495 - RNA, 19 nt, Human
ggucaagaaacagccagca

SEQ ID NO: 3870496 - RNA, 21 nt, Human
ggucaagaaacagccagcaag

SEQ ID NO: 3870497 - RNA, 17 nt, Human
ggucaagcccaggagga

SEQ ID NO: 3870498 - RNA, 23 nt, Human
ggucaaggcaguagaacuccagg

SEQ ID NO: 3870499 - RNA, 20 nt, Human
ggucaaguaagaagacauga

SEQ ID NO: 3870500 - RNA, 17 nt, Human
ggucaauccugugggug

SEQ ID NO: 3870501 - RNA, 12 nt, Human
ggucaaugcuau

SEQ ID NO: 3870502 - RNA, 22 nt, Human
ggucacaaauccuaaaagaagc

SEQ ID NO: 3870503 - RNA, 16 nt, Human
ggucacagccuccucu

SEQ ID NO: 3870504 - RNA, 17 nt, Human
ggucacagccuccucug

SEQ ID NO: 3870505 - RNA, 21 nt, Human
ggucacagcggagguguggag

SEQ ID NO: 3870506 - RNA, 12 nt, Human
ggucacagcugu

SEQ ID NO: 3870507 - RNA, 20 nt, Human
ggucaccuaggaagccucag

SEQ ID NO: 3870508 - RNA, 16 nt, Human
ggucacucuggcagcu

SEQ ID NO: 3870509 - RNA, 21 nt, Human
ggucacucuuccugcaaggac

SEQ ID NO: 3870510 - RNA, 24 nt, Human
ggucacugaggccugagacccagg

SEQ ID NO: 3870511 - RNA, 17 nt, Human
ggucacuggcucuccaa

SEQ ID NO: 3870512 - RNA, 15 nt, Human
ggucacuucuucugu

SEQ ID NO: 3870513 - RNA, 20 nt, Human
ggucagagacugcuguguuu

SEQ ID NO: 3870514 - RNA, 14 nt, Human
ggucagagccugca

SEQ ID NO: 3870515 - RNA, 20 nt, Human
ggucagaggaccuguauuua

SEQ ID NO: 3870516 - RNA, 13 nt, Human
ggucagccagggc

SEQ ID NO: 3870517 - RNA, 15 nt, Human
ggucagccagggcca

SEQ ID NO: 3870518 - RNA, 14 nt, Human
ggucagcucagagc

SEQ ID NO: 3870519 - RNA, 15 nt, Human
ggucaggaggcaggg

SEQ ID NO: 3870520 - RNA, 17 nt, Human
ggucaggcagccaguga

SEQ ID NO: 3870521 - RNA, 14 nt, Human
ggucaggcccugga

SEQ ID NO: 3870522 - RNA, 17 nt, Human
ggucagggaccaaggac

SEQ ID NO: 3870523 - RNA, 17 nt, Human
ggucaggggugacacag

SEQ ID NO: 3870524 - RNA, 14 nt, Human
ggucagguuuaaca

SEQ ID NO: 3870525 - RNA, 18 nt, Human
ggucagguuuaacauuug

SEQ ID NO: 3870526 - RNA, 19 nt, Human
ggucagguuuaacauuugc

SEQ ID NO: 3870527 - RNA, 21 nt, Human
ggucaguaguuuaaaaguucu

SEQ ID NO: 3870528 - RNA, 19 nt, Human
ggucagugaggcccaggga

SEQ ID NO: 3870529 - RNA, 14 nt, Human
ggucagugcaaaua

SEQ ID NO: 3870530 - RNA, 22 nt, Human
ggucauaaagaggcguugcuuu

SEQ ID NO: 3870531 - RNA, 22 nt, Human
ggucauacuaucuacucuccuc

SEQ ID NO: 3870532 - RNA, 23 nt, Human
ggucauagcccagaucagcuccu

SEQ ID NO: 3870533 - RNA, 15 nt, Human
ggucaugcccuccuc

SEQ ID NO: 3870534 - RNA, 16 nt, Human
ggucaugcccuccucu

SEQ ID NO: 3870535 - RNA, 20 nt, Human
ggucaugcccuccucuccca

SEQ ID NO: 3870536 - RNA, 15 nt, Human
ggucauggccacacu

SEQ ID NO: 3870537 - RNA, 16 nt, Human
ggucaugggccacugc

SEQ ID NO: 3870538 - RNA, 15 nt, Human
ggucaugguggugca

SEQ ID NO: 3870539 - RNA, 20 nt, Human
ggucauuuccauguaugcau

SEQ ID NO: 3870540 - RNA, 14 nt, Human
ggucauuucuucag

SEQ ID NO: 3870541 - RNA, 17 nt, Human
gguccaaauaaaaacua

SEQ ID NO: 3870542 - RNA, 20 nt, Human
gguccaaccagaccuggaag

SEQ ID NO: 3870543 - RNA, 21 nt, Human
gguccaaugcucaggugcugg

SEQ ID NO: 3870544 - RNA, 17 nt, Human
gguccaauuaguuuccu

SEQ ID NO: 3870545 - RNA, 13 nt, Human
gguccacagggca

SEQ ID NO: 3870546 - RNA, 15 nt, Human
gguccacagggcacc

SEQ ID NO: 3870547 - RNA, 18 nt, Human
gguccacaggucuagacu

SEQ ID NO: 3870548 - RNA, 19 nt, Human
gguccacccaggagccccg

SEQ ID NO: 3870549 - RNA, 17 nt, Human
gguccagcccuggcuga

SEQ ID NO: 3870550 - RNA, 20 nt, Human
gguccagcccuggcugaagg

SEQ ID NO: 3870551 - RNA, 22 nt, Human
gguccagcccuggcugaaggac

SEQ ID NO: 3870552 - RNA, 15 nt, Human
gguccagcucuggag

SEQ ID NO: 3870553 - RNA, 20 nt, Human
gguccaggccuacuccuguc

SEQ ID NO: 3870554 - RNA, 12 nt, Human
gguccagggagc

SEQ ID NO: 3870555 - RNA, 16 nt, Human
gguccagggagcaggc

SEQ ID NO: 3870556 - RNA, 12 nt, Human
gguccagggcua

SEQ ID NO: 3870557 - RNA, 18 nt, Human
gguccaguggaugccaca

SEQ ID NO: 3870558 - RNA, 15 nt, Human
gguccauagagagca

SEQ ID NO: 3870559 - RNA, 14 nt, Human
gguccaugggcaga

SEQ ID NO: 3870560 - RNA, 16 nt, Human
gguccaugggcagagc

SEQ ID NO: 3870561 - RNA, 18 nt, Human
gguccaugggcagagccc

SEQ ID NO: 3870562 - RNA, 20 nt, Human
ggucccaaacagcugccucu

SEQ ID NO: 3870563 - RNA, 22 nt, Human
ggucccaacaggaggacaauuc

SEQ ID NO: 3870564 - RNA, 16 nt, Human
ggucccaagcugggcc

SEQ ID NO: 3870565 - RNA, 13 nt, Human
ggucccacacugg

SEQ ID NO: 3870566 - RNA, 23 nt, Human
ggucccacaucccugggccugcu

SEQ ID NO: 3870567 - RNA, 12 nt, Human
ggucccacccca

SEQ ID NO: 3870568 - RNA, 15 nt, Human
ggucccaccccacac

SEQ ID NO: 3870569 - RNA, 12 nt, Human
ggucccaccccu

SEQ ID NO: 3870570 - RNA, 12 nt, Human
ggucccacucag

SEQ ID NO: 3870571 - RNA, 12 nt, Human
ggucccagcagc

SEQ ID NO: 3870572 - RNA, 15 nt, Human
ggucccagccacccc

SEQ ID NO: 3870573 - RNA, 14 nt, Human
ggucccagcucccu

SEQ ID NO: 3870574 - RNA, 14 nt, Human
ggucccaggcagag

SEQ ID NO: 3870575 - RNA, 19 nt, Human
ggucccagugggaggggca

SEQ ID NO: 3870576 - RNA, 20 nt, Human
ggucccagugggaggggcag

SEQ ID NO: 3870577 - RNA, 14 nt, Human
ggucccauccaggc

SEQ ID NO: 3870578 - RNA, 16 nt, Human
ggucccauccaggcag

SEQ ID NO: 3870579 - RNA, 20 nt, Human
ggucccaucugcagggcccc

SEQ ID NO: 3870580 - RNA, 17 nt, Human
ggucccauuucucacug

SEQ ID NO: 3870581 - RNA, 18 nt, Human
gguccccagacuccacca

SEQ ID NO: 3870582 - RNA, 19 nt, Human
gguccccagcccuuccucu

SEQ ID NO: 3870583 - RNA, 12 nt, Human
gguccccagggc

SEQ ID NO: 3870584 - RNA, 16 nt, Human
gguccccaucauccca

SEQ ID NO: 3870585 - RNA, 23 nt, Human
ggucccccuuccauggacuuugu

SEQ ID NO: 3870586 - RNA, 22 nt, Human
gguccccguuccaccccaagag

SEQ ID NO: 3870587 - RNA, 17 nt, Human
ggucccuaauaaagcug

SEQ ID NO: 3870588 - RNA, 20 nt, Human
ggucccugauaacaaccugg

SEQ ID NO: 3870589 - RNA, 13 nt, Human
ggucccugcaggg

SEQ ID NO: 3870590 - RNA, 23 nt, Human
ggucccugggaggaaauuugaau

SEQ ID NO: 3870591 - RNA, 11 nt, Human
ggucccugggu

SEQ ID NO: 3870592 - RNA, 14 nt, Human
ggucccugguggca

SEQ ID NO: 3870593 - RNA, 23 nt, Human
ggucccuugcagcuaguuuucua

SEQ ID NO: 3870594 - RNA, 17 nt, Human
gguccgguguccuuuuc

SEQ ID NO: 3870595 - RNA, 17 nt, Human
gguccgguguucuaaga

SEQ ID NO: 3870596 - RNA, 16 nt, Human
gguccuaaaagcaaaa

SEQ ID NO: 3870597 - RNA, 21 nt, Human
gguccuaaggcaucuaucugu

SEQ ID NO: 3870598 - RNA, 19 nt, Human
gguccuaagucccugcccc

SEQ ID NO: 3870599 - RNA, 22 nt, Human
gguccuaauuaccagucuuuaa

SEQ ID NO: 3870600 - RNA, 20 nt, Human
gguccuaggcuggaaggagg

SEQ ID NO: 3870601 - RNA, 15 nt, Human
gguccuaguaagaag

SEQ ID NO: 3870602 - RNA, 16 nt, Human
gguccucauucaaagg

SEQ ID NO: 3870603 - RNA, 14 nt, Human
gguccuccuccagg

SEQ ID NO: 3870604 - RNA, 21 nt, Human
gguccucugauacccagagca

SEQ ID NO: 3870605 - RNA, 13 nt, Human
gguccucuggagc

SEQ ID NO: 3870606 - RNA, 23 nt, Human
gguccucugucagucacagccac

SEQ ID NO: 3870607 - RNA, 22 nt, Human
gguccucuucugggccugacca

SEQ ID NO: 3870608 - RNA, 18 nt, Human
gguccugaagaauuaaga

SEQ ID NO: 3870609 - RNA, 15 nt, Human
gguccugcagccugc

SEQ ID NO: 3870610 - RNA, 22 nt, Human
gguccugcuauuucccaagcug

SEQ ID NO: 3870611 - RNA, 17 nt, Human
gguucagccccuccucu

SEQ ID NO: 3870612 - RNA, 12 nt, Human
gguucaguuucu

SEQ ID NO: 3870613 - RNA, 15 nt, Human
gguucaucugagcaa

SEQ ID NO: 3870614 - RNA, 21 nt, Human
gguucauguagagaaaagcac

SEQ ID NO: 3870615 - RNA, 16 nt, Human
gguucauuauuggaau

SEQ ID NO: 3870616 - RNA, 18 nt, Human
gguucauuauuggaauua

SEQ ID NO: 3870617 - RNA, 19 nt, Human
gguucauuauuggaauuaa

SEQ ID NO: 3870618 - RNA, 23 nt, Human
gguucauuucaaauacaucuuug

SEQ ID NO: 3870619 - RNA, 21 nt, Human
gguucauuuucagauucaggc

SEQ ID NO: 3870620 - RNA, 21 nt, Human
gguuccagcaauucuccugcc

SEQ ID NO: 3870621 - RNA, 15 nt, Human
gguuccagccugcca

SEQ ID NO: 3870622 - RNA, 13 nt, Human
gguuccaugccug

SEQ ID NO: 3870623 - RNA, 14 nt, Human
gguuccaugccuga

SEQ ID NO: 3870624 - RNA, 16 nt, Human
gguuccaugccugagg

SEQ ID NO: 3870625 - RNA, 12 nt, Human
gguuccccaccg

SEQ ID NO: 3870626 - RNA, 16 nt, Human
gguucccccagcccug

SEQ ID NO: 3870627 - RNA, 15 nt, Human
gguuccccuguucac

SEQ ID NO: 3870628 - RNA, 17 nt, Human
gguucccguuucuccac

SEQ ID NO: 3870629 - RNA, 16 nt, Human
gguucccucugagaau

SEQ ID NO: 3870630 - RNA, 21 nt, Human
gguucccuugagggcugcagu

SEQ ID NO: 3870631 - RNA, 22 nt, Human
gguucccuuuccuuccaucccu

SEQ ID NO: 3870632 - RNA, 21 nt, Human
gguuccgcacuuuccacuucu

SEQ ID NO: 3870633 - RNA, 23 nt, Human
gguuccgcuuggagcagaggggc

SEQ ID NO: 3870634 - RNA, 22 nt, Human
gguuccuaggggaaugaggggg

SEQ ID NO: 3870635 - RNA, 18 nt, Human
gguuccuauggcuggcca

SEQ ID NO: 3870636 - RNA, 22 nt, Human
gguuccuauggcuggccacugc

SEQ ID NO: 3870637 - RNA, 19 nt, Human
gguuccucaaauuuuuuga

SEQ ID NO: 3870638 - RNA, 16 nt, Human
gguuccuccccuccuc

SEQ ID NO: 3870639 - RNA, 19 nt, Human
gguuccucguucucccugg

SEQ ID NO: 3870640 - RNA, 11 nt, Human
gguuccucucu

SEQ ID NO: 3870641 - RNA, 13 nt, Human
gguuccucucugg

SEQ ID NO: 3870642 - RNA, 15 nt, Human
gguuccucugccugc

SEQ ID NO: 3870643 - RNA, 22 nt, Human
gguuccuggggcauccaugggg

SEQ ID NO: 3870644 - RNA, 20 nt, Human
gguuccuuccucugagccuu

SEQ ID NO: 3870645 - RNA, 15 nt, Human
gguuccuuuuauuag

SEQ ID NO: 3870646 - RNA, 20 nt, Human
gguucggauuugggguggau

SEQ ID NO: 3870647 - RNA, 13 nt, Human
gguucuaaaguuc

SEQ ID NO: 3870648 - RNA, 11 nt, Human
gguucuaaggc

SEQ ID NO: 3870649 - RNA, 18 nt, Human
gguucuacaaucuauuua

SEQ ID NO: 3870650 - RNA, 20 nt, Human
gguucuagcauggcauauuu

SEQ ID NO: 3870651 - RNA, 23 nt, Human
gguucuaggcaucucuguacuuu

SEQ ID NO: 3870652 - RNA, 13 nt, Human
gguucucaaugaa

SEQ ID NO: 3870653 - RNA, 23 nt, Human
gguucucacagugggagccaggg

SEQ ID NO: 3870654 - RNA, 19 nt, Human
gguucuccguuagcuccug

SEQ ID NO: 3870655 - RNA, 21 nt, Human
gguucuccguuagcuccugug

SEQ ID NO: 3870656 - RNA, 18 nt, Human
gguucugagauggcuccc

SEQ ID NO: 3870657 - RNA, 19 nt, Human
gguucugcuucaaggcuuc

SEQ ID NO: 3870658 - RNA, 18 nt, Human
gguucuuaguucucacug

SEQ ID NO: 3870659 - RNA, 14 nt, Human
gguucuuguauuaa

SEQ ID NO: 3870660 - RNA, 14 nt, Human
gguucuuguuggug

SEQ ID NO: 3870661 - RNA, 15 nt, Human
gguucuuuguuuuaa

SEQ ID NO: 3870662 - RNA, 22 nt, Human
gguugaacucugguggcacagg

SEQ ID NO: 3870663 - RNA, 16 nt, Human
gguugaagccaugucu

SEQ ID NO: 3870664 - RNA, 23 nt, Human
gguugaagggcaguguucccugg

SEQ ID NO: 3870665 - RNA, 15 nt, Human
gguugacuuuaccca

SEQ ID NO: 3870666 - RNA, 19 nt, Human
gguugaggggcuccuggaa

SEQ ID NO: 3870667 - RNA, 21 nt, Human
gguugagguccagcccuggcu

SEQ ID NO: 3870668 - RNA, 13 nt, Human
gguugauuaaggc

SEQ ID NO: 3870669 - RNA, 14 nt, Human
gguugcaaccacug

SEQ ID NO: 3870670 - RNA, 15 nt, Human
gguugcacuuuguag

SEQ ID NO: 3870671 - RNA, 13 nt, Human
gguugcagggagc

SEQ ID NO: 3870672 - RNA, 18 nt, Human
gguugcagugagccaaga

SEQ ID NO: 3870673 - RNA, 20 nt, Human
gguugccacaggccucccug

SEQ ID NO: 3870674 - RNA, 16 nt, Human
gguugcuccgccuggc

SEQ ID NO: 3870675 - RNA, 17 nt, Human
gguuggagcccagggca

SEQ ID NO: 3870676 - RNA, 21 nt, Human
gguuggagcccagggcaucuu

SEQ ID NO: 3870677 - RNA, 14 nt, Human
gguuggcaguaagg

SEQ ID NO: 3870678 - RNA, 16 nt, Human
gguuggcucugccagu

SEQ ID NO: 3870679 - RNA, 19 nt, Human
gguuggcugggaaaucgag

SEQ ID NO: 3870680 - RNA, 19 nt, Human
gguugggacccaguggcag

SEQ ID NO: 3870681 - RNA, 16 nt, Human
gguugguaggguggga

SEQ ID NO: 3870682 - RNA, 16 nt, Human
gguuggugcacaguga

SEQ ID NO: 3870683 - RNA, 17 nt, Human
gguuggugcacagugau

SEQ ID NO: 3870684 - RNA, 18 nt, Human
gguuguauuagauguucu

SEQ ID NO: 3870685 - RNA, 19 nt, Human
gguuguauuagauguucuc

SEQ ID NO: 3870686 - RNA, 16 nt, Human
gguuguauucuuugau

SEQ ID NO: 3870687 - RNA, 18 nt, Human
gguuguuagaaaaaugga

SEQ ID NO: 3870688 - RNA, 19 nt, Human
gguuguuucuguuccaaau

SEQ ID NO: 3870689 - RNA, 20 nt, Human
gguuguuuuuuccuuugcuc

SEQ ID NO: 3870690 - RNA, 15 nt, Human
gguuuaaagagucua

SEQ ID NO: 3870691 - RNA, 12 nt, Human
gguuuaaaugaa

SEQ ID NO: 3870692 - RNA, 22 nt, Human
gguuuaaaugaacaagagaagc

SEQ ID NO: 3870693 - RNA, 13 nt, Human
gguuuaagcuguu

SEQ ID NO: 3870694 - RNA, 22 nt, Human
gguuuaauccccaguaaaauug

SEQ ID NO: 3870695 - RNA, 19 nt, Human
gguuuaauguuuuggccaa

SEQ ID NO: 3870696 - RNA, 18 nt, Human
gguuuacauuuaaagcau

SEQ ID NO: 3870697 - RNA, 17 nt, Human
gguuuaccuagagaaca

SEQ ID NO: 3870698 - RNA, 23 nt, Human
gguuuacucuguggccaaaggag

SEQ ID NO: 3870699 - RNA, 17 nt, Human
gguuuaggcugguggcc

SEQ ID NO: 3870700 - RNA, 16 nt, Human
gguuuaguguaaaaau

SEQ ID NO: 3870701 - RNA, 20 nt, Human
gguuucaaagaugcugugag

SEQ ID NO: 3870702 - RNA, 20 nt, Human
gguuucaccauguuggccag

SEQ ID NO: 3870703 - RNA, 15 nt, Human
gguuucagaaaugug

SEQ ID NO: 3870704 - RNA, 17 nt, Human
gguuucagcacuagcca

SEQ ID NO: 3870705 - RNA, 20 nt, Human
gguuuccaacaauucagcau

SEQ ID NO: 3870706 - RNA, 14 nt, Human
gguuuccacaugcu

SEQ ID NO: 3870707 - RNA, 12 nt, Human
gguuuccaggga

SEQ ID NO: 3870708 - RNA, 15 nt, Human
gguuucccaauggug

SEQ ID NO: 3870709 - RNA, 19 nt, Human
gguuuccugcccugggagg

SEQ ID NO: 3870710 - RNA, 20 nt, Human
gguuuccuggcacuggaccc

SEQ ID NO: 3870711 - RNA, 17 nt, Human
gguuucguuucuguaua

SEQ ID NO: 3870712 - RNA, 21 nt, Human
gguuucuaagcauaaaagaug

SEQ ID NO: 3870713 - RNA, 22 nt, Human
gguuucucuguggcuccaggcc

SEQ ID NO: 3870714 - RNA, 22 nt, Human
gguuucucuucuccccuuccau

SEQ ID NO: 3870715 - RNA, 14 nt, Human
gguuucugagcugc

SEQ ID NO: 3870716 - RNA, 18 nt, Human
gguuugaauauaaacacu

SEQ ID NO: 3870717 - RNA, 20 nt, Human
gguuugagagagcagccagg

SEQ ID NO: 3870718 - RNA, 21 nt, Human
gguuugccaaaauucauuucu

SEQ ID NO: 3870719 - RNA, 16 nt, Human
gguuuggaauauuaaa

SEQ ID NO: 3870720 - RNA, 20 nt, Human
gguuuggacaaaauggaaua

SEQ ID NO: 3870721 - RNA, 13 nt, Human
gguuuggagcuga

SEQ ID NO: 3870722 - RNA, 23 nt, Human
gguuuggccaucucuggaugccu

SEQ ID NO: 3870723 - RNA, 14 nt, Human
gguuuggcgggcca

SEQ ID NO: 3870724 - RNA, 14 nt, Human
gguuuggcuccugc

SEQ ID NO: 3870725 - RNA, 15 nt, Human
gguuuggcugugucu

SEQ ID NO: 3870726 - RNA, 21 nt, Human
gguuuggcugugucuaaacug

SEQ ID NO: 3870727 - RNA, 15 nt, Human
gguuugguguauggu

SEQ ID NO: 3870728 - RNA, 20 nt, Human
gguuuguaaauuaacuuuua

SEQ ID NO: 3870729 - RNA, 23 nt, Human
gguuugucgggcaccagccagcg

SEQ ID NO: 3870730 - RNA, 17 nt, Human
gguuuguggggggaggc

SEQ ID NO: 3870731 - RNA, 14 nt, Human
gguuuuaacuuugu

SEQ ID NO: 3870732 - RNA, 18 nt, Human
gguuuuaauugaaggaaa

SEQ ID NO: 3870733 - RNA, 18 nt, Human
gguuuuagguagaaaaac

SEQ ID NO: 3870734 - RNA, 22 nt, Human
gguuuuaucugagugaaauacu

SEQ ID NO: 3870735 - RNA, 23 nt, Human
gguuuuaugguuacuucuucucu

SEQ ID NO: 3870736 - RNA, 20 nt, Human
gguuuuauuuuguaauuauu

SEQ ID NO: 3870737 - RNA, 21 nt, Human
gguuuucacauaaaugcagcc

SEQ ID NO: 3870738 - RNA, 19 nt, Human
gguuuucgaagcucagccc

SEQ ID NO: 3870739 - RNA, 12 nt, Human
gguuuucuguuc

SEQ ID NO: 3870740 - RNA, 16 nt, Human
gguuuucuuuuaagaa

SEQ ID NO: 3870741 - RNA, 15 nt, Human
gguuuuggcaucucu

SEQ ID NO: 3870742 - RNA, 19 nt, Human
gguuuuguaagaugcuggg

SEQ ID NO: 3870743 - RNA, 20 nt, Human
gguuuuguaagaugcugggu

SEQ ID NO: 3870744 - RNA, 15 nt, Human
gguuuuguagguacu

SEQ ID NO: 3870745 - RNA, 12 nt, Human
gguuuuguuugc

SEQ ID NO: 3870746 - RNA, 15 nt, Human
gguuuuguuugcuau

SEQ ID NO: 3870747 - RNA, 16 nt, Human
gguuuuuaaaacccag

SEQ ID NO: 3870748 - RNA, 19 nt, Human
gguuuuuaaauuuuguaau

SEQ ID NO: 3870749 - RNA, 15 nt, Human
gguuuuucaauuaaa

SEQ ID NO: 3870750 - RNA, 16 nt, Human
gguuuuucaauuaaac

SEQ ID NO: 3870751 - RNA, 17 nt, Human
gguuuuucaauuaaacg

SEQ ID NO: 3870752 - RNA, 20 nt, Human
gguuuuucaauuaaacggau

SEQ ID NO: 3870753 - RNA, 14 nt, Human
gguuuuuuaauaua

SEQ ID NO: 3870754 - RNA, 19 nt, Human
gguuuuuuuccuguuucug

SEQ ID NO: 3870755 - RNA, 16 nt, Human
guccaauuaguuuccu

SEQ ID NO: 3870756 - RNA, 19 nt, Human
guccaauuuguaaaaacag

SEQ ID NO: 3870757 - RNA, 16 nt, Human
guccaauuuuaauuua

SEQ ID NO: 3870758 - RNA, 15 nt, Human
guccacagaugccuc

SEQ ID NO: 3870759 - RNA, 13 nt, Human
guccacagcuucc

SEQ ID NO: 3870760 - RNA, 17 nt, Human
guccaccaauagaauga

SEQ ID NO: 3870761 - RNA, 15 nt, Human
guccacccugccugc

SEQ ID NO: 3870762 - RNA, 16 nt, Human
guccacgcgugccgug

SEQ ID NO: 3870763 - RNA, 16 nt, Human
guccacgugcguguuu

SEQ ID NO: 3870764 - RNA, 23 nt, Human
guccacgugcguguuuucugacu

SEQ ID NO: 3870765 - RNA, 12 nt, Human
guccacucccag

SEQ ID NO: 3870766 - RNA, 15 nt, Human
guccacucccagugc

SEQ ID NO: 3870767 - RNA, 21 nt, Human
guccacugggguggccugacu

SEQ ID NO: 3870768 - RNA, 20 nt, Human
guccacugucacuguuucuc

SEQ ID NO: 3870769 - RNA, 14 nt, Human
guccacuguguaua

SEQ ID NO: 3870770 - RNA, 16 nt, Human
guccacuucugacagc

SEQ ID NO: 3870771 - RNA, 18 nt, Human
guccacuucugacagccu

SEQ ID NO: 3870772 - RNA, 20 nt, Human
guccacuuuuccaguauuuu

SEQ ID NO: 3870773 - RNA, 22 nt, Human
guccacuuuuccaguauuuuag

SEQ ID NO: 3870774 - RNA, 17 nt, Human
guccagaagaauauuca

SEQ ID NO: 3870775 - RNA, 14 nt, Human
guccagaaggagac

SEQ ID NO: 3870776 - RNA, 19 nt, Human
guccagaaggagacaggca

SEQ ID NO: 3870777 - RNA, 11 nt, Human
guccagacagc

SEQ ID NO: 3870778 - RNA, 21 nt, Human
guccagaccuuguucacacuc

SEQ ID NO: 3870779 - RNA, 22 nt, Human
guccagagagagaagugccccu

SEQ ID NO: 3870780 - RNA, 13 nt, Human
guccagagcugcu

SEQ ID NO: 3870781 - RNA, 16 nt, Human
guccagagcugcuucc

SEQ ID NO: 3870782 - RNA, 19 nt, Human
guccagauuuacacuggga

SEQ ID NO: 3870783 - RNA, 22 nt, Human
guccagauuuacacugggagag

SEQ ID NO: 3870784 - RNA, 18 nt, Human
guccagcauugcuggacu

SEQ ID NO: 3870785 - RNA, 19 nt, Human
guccagcauugcuggacuc

SEQ ID NO: 3870786 - RNA, 17 nt, Human
guccagcccuggcugaa

SEQ ID NO: 3870787 - RNA, 19 nt, Human
guccagcccuggcugaagg

SEQ ID NO: 3870788 - RNA, 23 nt, Human
guccagccugccccggagcugga

SEQ ID NO: 3870789 - RNA, 11 nt, Human
guccagccugg

SEQ ID NO: 3870790 - RNA, 13 nt, Human
guccagccugggc

SEQ ID NO: 3870791 - RNA, 13 nt, Human
guccagcucugga

SEQ ID NO: 3870792 - RNA, 16 nt, Human
guccagcucuggaggg

SEQ ID NO: 3870793 - RNA, 12 nt, Human
guccagcuggcc

SEQ ID NO: 3870794 - RNA, 22 nt, Human
guccaggacaggagaugcugug

SEQ ID NO: 3870795 - RNA, 21 nt, Human
guccaggaugcuaacaucuaa

SEQ ID NO: 3870796 - RNA, 17 nt, Human
guccaggauuccucuuu

SEQ ID NO: 3870797 - RNA, 15 nt, Human
guccaggcacaggau

SEQ ID NO: 3870798 - RNA, 15 nt, Human
guccaggcacugaga

SEQ ID NO: 3870799 - RNA, 22 nt, Human
guccaggcacugcugcccagcc

SEQ ID NO: 3870800 - RNA, 21 nt, Human
guccaggccuacuccugucuu

SEQ ID NO: 3870801 - RNA, 20 nt, Human
guccaggcugccguggggcc

SEQ ID NO: 3870802 - RNA, 23 nt, Human
guccagggaagagaaagugauuu

SEQ ID NO: 3870803 - RNA, 20 nt, Human
guccagggaagcuggccgag

SEQ ID NO: 3870804 - RNA, 21 nt, Human
guccagggagcauuuuccucc

SEQ ID NO: 3870805 - RNA, 16 nt, Human
guccagggcccugagc

SEQ ID NO: 3870806 - RNA, 21 nt, Human
guccaggggccccuccagcuu

SEQ ID NO: 3870807 - RNA, 21 nt, Human
guccagguccugguggggcag

SEQ ID NO: 3870808 - RNA, 17 nt, Human
guccaggucgggcucag

SEQ ID NO: 3870809 - RNA, 18 nt, Human
guccaguaagaucacugu

SEQ ID NO: 3870810 - RNA, 23 nt, Human
guccaguaagaucacuguuuaga

SEQ ID NO: 3870811 - RNA, 17 nt, Human
guccaguccaguccuau

SEQ ID NO: 3870812 - RNA, 17 nt, Human
guccagugaccugcugg

SEQ ID NO: 3870813 - RNA, 17 nt, Human
guccauaauguucugcu

SEQ ID NO: 3870814 - RNA, 13 nt, Human
guccauagagagc

SEQ ID NO: 3870815 - RNA, 16 nt, Human
guccauagcuguggug

SEQ ID NO: 3870816 - RNA, 15 nt, Human
guccauaucacacac

SEQ ID NO: 3870817 - RNA, 16 nt, Human
guccauaucacacaca

SEQ ID NO: 3870818 - RNA, 18 nt, Human
guccauaucacacacauu

SEQ ID NO: 3870819 - RNA, 16 nt, Human
guccauauuuucacag

SEQ ID NO: 3870820 - RNA, 15 nt, Human
guccaucagccucca

SEQ ID NO: 3870821 - RNA, 13 nt, Human
guccaucugcccg

SEQ ID NO: 3870822 - RNA, 22 nt, Human
guccaugaagauguagaggaga

SEQ ID NO: 3870823 - RNA, 19 nt, Human
guccaugcuaacaaagaca

SEQ ID NO: 3870824 - RNA, 14 nt, Human
guccauuuguaaaa

SEQ ID NO: 3870825 - RNA, 16 nt, Human
guccauuuguaaaacu

SEQ ID NO: 3870826 - RNA, 17 nt, Human
guccauuuugugaagcc

SEQ ID NO: 3870827 - RNA, 21 nt, Human
guccauuuugugaagcccugu

SEQ ID NO: 3870828 - RNA, 22 nt, Human
guccauuuugugaagcccuguu

SEQ ID NO: 3870829 - RNA, 16 nt, Human
guccauuuuuacaagu

SEQ ID NO: 3870830 - RNA, 18 nt, Human
guccauuuuucuuccagg

SEQ ID NO: 3870831 - RNA, 19 nt, Human
gucccaaacagcugccucu

SEQ ID NO: 3870832 - RNA, 20 nt, Human
gucccaacaggaggacaauu

SEQ ID NO: 3870833 - RNA, 13 nt, Human
gucccaagcuggg

SEQ ID NO: 3870834 - RNA, 16 nt, Human
gucccaagcugggccc

SEQ ID NO: 3870835 - RNA, 22 nt, Human
gucccaagcugggccccagccc

SEQ ID NO: 3870836 - RNA, 23 nt, Human
gucccaaggaaagccccagcacu

SEQ ID NO: 3870837 - RNA, 21 nt, Human
gucccacaucccugggccugc

SEQ ID NO: 3870838 - RNA, 20 nt, Human
gucccaccccacacacgcca

SEQ ID NO: 3870839 - RNA, 14 nt, Human
gucccacccccacc

SEQ ID NO: 3870840 - RNA, 15 nt, Human
gucccacccccaccc

SEQ ID NO: 3870841 - RNA, 22 nt, Human
gucccacccccacccccagcuc

SEQ ID NO: 3870842 - RNA, 23 nt, Human
gucccacccccacccccagcuca

SEQ ID NO: 3870843 - RNA, 16 nt, Human
gucccaccccucccuc

SEQ ID NO: 3870844 - RNA, 19 nt, Human
gucccaccgguugcuucug

SEQ ID NO: 3870845 - RNA, 20 nt, Human
gucccaccgguugcuucugg

SEQ ID NO: 3870846 - RNA, 23 nt, Human
gucccaccgguugcuucugggaa

SEQ ID NO: 3870847 - RNA, 22 nt, Human
gucccaccuccagcccgggagc

SEQ ID NO: 3870848 - RNA, 12 nt, Human
gucccaccucuu

SEQ ID NO: 3870849 - RNA, 15 nt, Human
gucccaccuuggcug

SEQ ID NO: 3870850 - RNA, 19 nt, Human
gucccaccuuggcugcagg

SEQ ID NO: 3870851 - RNA, 20 nt, Human
gucccaccuuggcugcaggg

SEQ ID NO: 3870852 - RNA, 21 nt, Human
gucccaccuuggcugcaggga

SEQ ID NO: 3870853 - RNA, 16 nt, Human
gucccacgugucuucc

SEQ ID NO: 3870854 - RNA, 21 nt, Human
gucccacgugucuuccacuuu

SEQ ID NO: 3870855 - RNA, 18 nt, Human
gucccacucaagccaagc

SEQ ID NO: 3870856 - RNA, 11 nt, Human
gucccacugcc

SEQ ID NO: 3870857 - RNA, 19 nt, Human
gucccacugccucagguuc

SEQ ID NO: 3870858 - RNA, 14 nt, Human
gucccacugugcag

SEQ ID NO: 3870859 - RNA, 22 nt, Human
gucccagaaaaagcaucauggc

SEQ ID NO: 3870860 - RNA, 21 nt, Human
gucccagaagaugacugaggg

SEQ ID NO: 3870861 - RNA, 20 nt, Human
gucccagaaugccuccugca

SEQ ID NO: 3870862 - RNA, 17 nt, Human
gucccagauuggcucac

SEQ ID NO: 3870863 - RNA, 11 nt, Human
gucccagcagc

SEQ ID NO: 3870864 - RNA, 14 nt, Human
gucccagcagccag

SEQ ID NO: 3870865 - RNA, 16 nt, Human
gucccagcagccagcc

SEQ ID NO: 3870866 - RNA, 14 nt, Human
gucccagccacccc

SEQ ID NO: 3870867 - RNA, 20 nt, Human
gucccagccagcaguucaga

SEQ ID NO: 3870868 - RNA, 19 nt, Human
gucccaggagcugcccaga

SEQ ID NO: 3870869 - RNA, 16 nt, Human
gucccaggcagggaga

SEQ ID NO: 3870870 - RNA, 18 nt, Human
gucccagguuggcucugc

SEQ ID NO: 3870871 - RNA, 12 nt, Human
gucccagugccg

SEQ ID NO: 3870872 - RNA, 19 nt, Human
gucccagugggaggggcag

SEQ ID NO: 3870873 - RNA, 21 nt, Human
gucccagugggaggggcaggc

SEQ ID NO: 3870874 - RNA, 22 nt, Human
gucccagugggaggggcaggcu

SEQ ID NO: 3870875 - RNA, 14 nt, Human
gucccauauccugc

SEQ ID NO: 3870876 - RNA, 15 nt, Human
gucccauauccugcc

SEQ ID NO: 3870877 - RNA, 16 nt, Human
gucccauauccugccu

SEQ ID NO: 3870878 - RNA, 15 nt, Human
gucccauccaggcag

SEQ ID NO: 3870879 - RNA, 17 nt, Human
gucccaugaucccugug

SEQ ID NO: 3870880 - RNA, 16 nt, Human
gucccaugcaggcccu

SEQ ID NO: 3870881 - RNA, 21 nt, Human
gucccauggacacuccagugc

SEQ ID NO: 3870882 - RNA, 13 nt, Human
gucccauguggug

SEQ ID NO: 3870883 - RNA, 23 nt, Human
gucccauucccccagugcggcca

SEQ ID NO: 3870884 - RNA, 16 nt, Human
gucccauucccuggga

SEQ ID NO: 3870885 - RNA, 17 nt, Human
gucccauucccugggau

SEQ ID NO: 3870886 - RNA, 22 nt, Human
guccccaaauccgaaccuccuc

SEQ ID NO: 3870887 - RNA, 16 nt, Human
guccccaacagcgccc

SEQ ID NO: 3870888 - RNA, 22 nt, Human
guccccaaccgugucugucugg

SEQ ID NO: 3870889 - RNA, 24 nt, Human
guccccacacuccuacaccuaacu

SEQ ID NO: 3870890 - RNA, 16 nt, Human
guccccaccccugccc

SEQ ID NO: 3870891 - RNA, 18 nt, Human
guccccaccgcagacagg

SEQ ID NO: 3870892 - RNA, 22 nt, Human
guccccaccgcagacaggacca

SEQ ID NO: 3870893 - RNA, 14 nt, Human
guccccaccuggga

SEQ ID NO: 3870894 - RNA, 15 nt, Human
guccccaccugggac

SEQ ID NO: 3870895 - RNA, 12 nt, Human
guccccagcaga

SEQ ID NO: 3870896 - RNA, 15 nt, Human
guccccagcccacug

SEQ ID NO: 3870897 - RNA, 20 nt, Human
guccccaggccccaggaagc

SEQ ID NO: 3870898 - RNA, 16 nt, Human
guccccauacuccuau

SEQ ID NO: 3870899 - RNA, 16 nt, Human
gucuccgaaaugcugu

SEQ ID NO: 3870900 - RNA, 20 nt, Human
gucuccgaaaugcugucuuu

SEQ ID NO: 3870901 - RNA, 16 nt, Human
gucuccuaagcaccug

SEQ ID NO: 3870902 - RNA, 17 nt, Human
gucuccuaagcaccugu

SEQ ID NO: 3870903 - RNA, 20 nt, Human
gucuccuaagcuggagugca

SEQ ID NO: 3870904 - RNA, 15 nt, Human
gucuccuacuccuga

SEQ ID NO: 3870905 - RNA, 17 nt, Human
gucuccuacuccugacu

SEQ ID NO: 3870906 - RNA, 16 nt, Human
gucuccuacugaggau

SEQ ID NO: 3870907 - RNA, 14 nt, Human
gucuccucacuccc

SEQ ID NO: 3870908 - RNA, 14 nt, Human
gucuccucagccuc

SEQ ID NO: 3870909 - RNA, 15 nt, Human
gucuccucaggacca

SEQ ID NO: 3870910 - RNA, 14 nt, Human
gucuccuccaccgc

SEQ ID NO: 3870911 - RNA, 21 nt, Human
gucuccuccaccgccauggcu

SEQ ID NO: 3870912 - RNA, 15 nt, Human
gucuccucucagccc

SEQ ID NO: 3870913 - RNA, 14 nt, Human
gucuccugccccca

SEQ ID NO: 3870914 - RNA, 22 nt, Human
gucuccugugcccacaucccag

SEQ ID NO: 3870915 - RNA, 18 nt, Human
gucucgaacuccugaccu

SEQ ID NO: 3870916 - RNA, 21 nt, Human
gucucgagcgcccugcagacc

SEQ ID NO: 3870917 - RNA, 22 nt, Human
gucucgcucuguugcccaggcu

SEQ ID NO: 3870918 - RNA, 20 nt, Human
gucucgcugaugcugggcug

SEQ ID NO: 3870919 - RNA, 21 nt, Human
gucucgcugaugcugggcugg

SEQ ID NO: 3870920 - RNA, 17 nt, Human
gucucgcuuuguugccc

SEQ ID NO: 3870921 - RNA, 19 nt, Human
gucucgcuuuguugcccag

SEQ ID NO: 3870922 - RNA, 16 nt, Human
gucucggacuaagccu

SEQ ID NO: 3870923 - RNA, 22 nt, Human
gucucggugguaccaggucucc

SEQ ID NO: 3870924 - RNA, 14 nt, Human
gucucgucucuuuu

SEQ ID NO: 3870925 - RNA, 21 nt, Human
gucucgucuuccgucuccccc

SEQ ID NO: 3870926 - RNA, 19 nt, Human
gucucgugguaggacugua

SEQ ID NO: 3870927 - RNA, 13 nt, Human
gucucuaaagcac

SEQ ID NO: 3870928 - RNA, 22 nt, Human
gucucuaaucugugcuguuuca

SEQ ID NO: 3870929 - RNA, 14 nt, Human
gucucuaggcuggg

SEQ ID NO: 3870930 - RNA, 17 nt, Human
gucucuagugcugugaa

SEQ ID NO: 3870931 - RNA, 19 nt, Human
gucucuauaccaauaaagu

SEQ ID NO: 3870932 - RNA, 18 nt, Human
gucucuaucauuaaaguu

SEQ ID NO: 3870933 - RNA, 20 nt, Human
gucucuaucauuaaaguucu

SEQ ID NO: 3870934 - RNA, 23 nt, Human
gucucuaugccagcucaguccca

SEQ ID NO: 3870935 - RNA, 11 nt, Human
gucucuauuua

SEQ ID NO: 3870936 - RNA, 14 nt, Human
gucucuauuuaaau

SEQ ID NO: 3870937 - RNA, 21 nt, Human
gucucuauuuaaauucuuuuu

SEQ ID NO: 3870938 - RNA, 16 nt, Human
gucucuauuucauuuu

SEQ ID NO: 3870939 - RNA, 15 nt, Human
gucucucaugaaccu

SEQ ID NO: 3870940 - RNA, 14 nt, Human
gucucucccucagg

SEQ ID NO: 3870941 - RNA, 11 nt, Human
gucucuccuuu

SEQ ID NO: 3870942 - RNA, 14 nt, Human
gucucuccuuuucu

SEQ ID NO: 3870943 - RNA, 20 nt, Human
gucucuccuuuucuuuuguu

SEQ ID NO: 3870944 - RNA, 22 nt, Human
gucucucguaguguuaaguuau

SEQ ID NO: 3870945 - RNA, 17 nt, Human
gucucucuaugccucuc

SEQ ID NO: 3870946 - RNA, 16 nt, Human
gucucucuuuggacuc

SEQ ID NO: 3870947 - RNA, 12 nt, Human
gucucugcaaac

SEQ ID NO: 3870948 - RNA, 22 nt, Human
gucucugccaugaacuggaggc

SEQ ID NO: 3870949 - RNA, 12 nt, Human
gucucugcucca

SEQ ID NO: 3870950 - RNA, 21 nt, Human
gucucugcuccaccuuucagc

SEQ ID NO: 3870951 - RNA, 22 nt, Human
gucucugcucgcccuccuuucu

SEQ ID NO: 3870952 - RNA, 14 nt, Human
gucucugcugccgc

SEQ ID NO: 3870953 - RNA, 17 nt, Human
gucucuggaauuugaaa

SEQ ID NO: 3870954 - RNA, 16 nt, Human
gucucuggcaguucug

SEQ ID NO: 3870955 - RNA, 21 nt, Human
gucucuggcaguucuggaaug

SEQ ID NO: 3870956 - RNA, 21 nt, Human
gucucuggggcaggcugcuuc

SEQ ID NO: 3870957 - RNA, 16 nt, Human
gucucugguuccuccc

SEQ ID NO: 3870958 - RNA, 17 nt, Human
gucucugguuccucccc

SEQ ID NO: 3870959 - RNA, 12 nt, Human
gucucugugagg

SEQ ID NO: 3870960 - RNA, 22 nt, Human
gucucuguuuuacaaguuggag

SEQ ID NO: 3870961 - RNA, 17 nt, Human
gucucuuaaaaaaauaa

SEQ ID NO: 3870962 - RNA, 15 nt, Human
gucucuuauggaugu

SEQ ID NO: 3870963 - RNA, 23 nt, Human
gucucuuauggauguccccagca

SEQ ID NO: 3870964 - RNA, 11 nt, Human
gucucuucucc

SEQ ID NO: 3870965 - RNA, 16 nt, Human
gucucuucuccacugg

SEQ ID NO: 3870966 - RNA, 14 nt, Human
gucucuucuccuua

SEQ ID NO: 3870967 - RNA, 21 nt, Human
gucucuucugaauaaagcaau

SEQ ID NO: 3870968 - RNA, 23 nt, Human
gucucuucugaauaaagcaauua

SEQ ID NO: 3870969 - RNA, 14 nt, Human
gucucuucugagcu

SEQ ID NO: 3870970 - RNA, 19 nt, Human
gucucuucugggcacccuc

SEQ ID NO: 3870971 - RNA, 17 nt, Human
gucucuugguccugcug

SEQ ID NO: 3870972 - RNA, 19 nt, Human
gucucuuguauuaaacucu

SEQ ID NO: 3870973 - RNA, 23 nt, Human
gucucuuuaagggcaugccuugu

SEQ ID NO: 3870974 - RNA, 18 nt, Human
gucucuuuaaucuucagu

SEQ ID NO: 3870975 - RNA, 18 nt, Human
gucucuuuaaugucacag

SEQ ID NO: 3870976 - RNA, 21 nt, Human
gucucuuuaaugucacaggca

SEQ ID NO: 3870977 - RNA, 16 nt, Human
gucucuuuauuccuag

SEQ ID NO: 3870978 - RNA, 17 nt, Human
gucucuuuauuccuagu

SEQ ID NO: 3870979 - RNA, 22 nt, Human
gucucuuuauuccuaguuggug

SEQ ID NO: 3870980 - RNA, 18 nt, Human
gucucuuuuacccuggcc

SEQ ID NO: 3870981 - RNA, 22 nt, Human
gucucuuuuacccuggccccuc

SEQ ID NO: 3870982 - RNA, 23 nt, Human
gucucuuuuacccuggccccucu

SEQ ID NO: 3870983 - RNA, 18 nt, Human
gucucuuuuguaaauuaa

SEQ ID NO: 3870984 - RNA, 17 nt, Human
gucugaaacauuucaua

SEQ ID NO: 3870985 - RNA, 15 nt, Human
gucugaacagcugua

SEQ ID NO: 3870986 - RNA, 21 nt, Human
gucugaaggacacuuccugcc

SEQ ID NO: 3870987 - RNA, 13 nt, Human
gucugaauguucu

SEQ ID NO: 3870988 - RNA, 23 nt, Human
gucugacaagguggucaacaaca

SEQ ID NO: 3870989 - RNA, 23 nt, Human
gucugacaggcaaugcuggcugu

SEQ ID NO: 3870990 - RNA, 15 nt, Human
gucugacccacugcu

SEQ ID NO: 3870991 - RNA, 19 nt, Human
gucugagagcaaagugacc

SEQ ID NO: 3870992 - RNA, 16 nt, Human
gucugagccacagcag

SEQ ID NO: 3870993 - RNA, 22 nt, Human
gucugagccacagcagcauuuu

SEQ ID NO: 3870994 - RNA, 22 nt, Human
gucugaggccguugcugacuua

SEQ ID NO: 3870995 - RNA, 22 nt, Human
gucugaggggcaacugagucug

SEQ ID NO: 3870996 - RNA, 15 nt, Human
gucugagguccugag

SEQ ID NO: 3870997 - RNA, 15 nt, Human
gucugaguggcuuca

SEQ ID NO: 3870998 - RNA, 21 nt, Human
gucugaguuguuaccccaagc

SEQ ID NO: 3870999 - RNA, 15 nt, Human
gucugaucugugcuu

SEQ ID NO: 3871000 - RNA, 22 nt, Human
gucugaucugugcuuuccagcu

SEQ ID NO: 3871001 - RNA, 14 nt, Human
gucugauuggcuug

SEQ ID NO: 3871002 - RNA, 22 nt, Human
gucugauuggcuuguagaauug

SEQ ID NO: 3871003 - RNA, 22 nt, Human
gucugauuucaggauacucugu

SEQ ID NO: 3871004 - RNA, 15 nt, Human
gucugcaacuuuaag

SEQ ID NO: 3871005 - RNA, 15 nt, Human
gucugcaagaaccug

SEQ ID NO: 3871006 - RNA, 13 nt, Human
gucugcaagucag

SEQ ID NO: 3871007 - RNA, 16 nt, Human
gucugcaagucagagg

SEQ ID NO: 3871008 - RNA, 17 nt, Human
gucugcaagucagagga

SEQ ID NO: 3871009 - RNA, 18 nt, Human
gucugcaagucagaggau

SEQ ID NO: 3871010 - RNA, 13 nt, Human
gucugcacccagg

SEQ ID NO: 3871011 - RNA, 14 nt, Human
gucugcacuuaaau

SEQ ID NO: 3871012 - RNA, 11 nt, Human
gucugcagccc

SEQ ID NO: 3871013 - RNA, 13 nt, Human
gucugcagcccug

SEQ ID NO: 3871014 - RNA, 13 nt, Human
gucugcaggcagg

SEQ ID NO: 3871015 - RNA, 20 nt, Human
gucugcauuucgguggcuag

SEQ ID NO: 3871016 - RNA, 20 nt, Human
gucugcauuuucugaaacua

SEQ ID NO: 3871017 - RNA, 21 nt, Human
gucugcauuuucugaaacuaa

SEQ ID NO: 3871018 - RNA, 21 nt, Human
gucugccaaccuaaaacucuu

SEQ ID NO: 3871019 - RNA, 23 nt, Human
gucugccaggcccccaccacaca

SEQ ID NO: 3871020 - RNA, 19 nt, Human
gucugccccaaguuuugug

SEQ ID NO: 3871021 - RNA, 22 nt, Human
gucugccccaaguuuugugaaa

SEQ ID NO: 3871022 - RNA, 21 nt, Human
gucugcccucugcauccucug

SEQ ID NO: 3871023 - RNA, 22 nt, Human
gucugccuguugcgugacacuc

SEQ ID NO: 3871024 - RNA, 21 nt, Human
gucugcgaaguccuauggaaa

SEQ ID NO: 3871025 - RNA, 16 nt, Human
gucugcgugggucaga

SEQ ID NO: 3871026 - RNA, 18 nt, Human
gucugcuauauuuucaug

SEQ ID NO: 3871027 - RNA, 23 nt, Human
gucugcucagacagaaccccuac

SEQ ID NO: 3871028 - RNA, 12 nt, Human
gucugcucccaa

SEQ ID NO: 3871029 - RNA, 21 nt, Human
gucugcucccaaggggccuga

SEQ ID NO: 3871030 - RNA, 17 nt, Human
gucugcucgggcccagg

SEQ ID NO: 3871031 - RNA, 21 nt, Human
gucugcucgggcccaggccau

SEQ ID NO: 3871032 - RNA, 13 nt, Human
gucugcugaggag

SEQ ID NO: 3871033 - RNA, 16 nt, Human
gucugcugcccuccau

SEQ ID NO: 3871034 - RNA, 13 nt, Human
gucugcuuagaaa

SEQ ID NO: 3871035 - RNA, 23 nt, Human
gucugcuuuaaagggccugccug

SEQ ID NO: 3871036 - RNA, 18 nt, Human
gucuggaaugcaguggua

SEQ ID NO: 3871037 - RNA, 19 nt, Human
gucuggacauucagaacac

SEQ ID NO: 3871038 - RNA, 23 nt, Human
gucuggaggggagcucugucugu

SEQ ID NO: 3871039 - RNA, 17 nt, Human
gucuggaggggccccug

SEQ ID NO: 3871040 - RNA, 23 nt, Human
gucuggaggggccccugcuucuc

SEQ ID NO: 3871041 - RNA, 16 nt, Human
gucuggauaacuucca

SEQ ID NO: 3871042 - RNA, 16 nt, Human
gugucaccccagagcc

SEQ ID NO: 3871043 - RNA, 21 nt, Human
gugucacucaaggcggugcuu

SEQ ID NO: 3871044 - RNA, 20 nt, Human
gugucacugucccuccuggu

SEQ ID NO: 3871045 - RNA, 17 nt, Human
gugucacuuacuguuuc

SEQ ID NO: 3871046 - RNA, 15 nt, Human
gugucacuugugcuu

SEQ ID NO: 3871047 - RNA, 16 nt, Human
gugucagcauagaagu

SEQ ID NO: 3871048 - RNA, 23 nt, Human
gugucagcgccuggccuacccag

SEQ ID NO: 3871049 - RNA, 14 nt, Human
gugucagcugaggc

SEQ ID NO: 3871050 - RNA, 23 nt, Human
gugucaggaugguaauucuuauu

SEQ ID NO: 3871051 - RNA, 19 nt, Human
gugucaggcugcuggcgcc

SEQ ID NO: 3871052 - RNA, 16 nt, Human
gugucaguauccaggc

SEQ ID NO: 3871053 - RNA, 19 nt, Human
gugucaguuuauguuuugg

SEQ ID NO: 3871054 - RNA, 23 nt, Human
gugucauaaacagaugaauaaac

SEQ ID NO: 3871055 - RNA, 13 nt, Human
gugucauuucaaa

SEQ ID NO: 3871056 - RNA, 17 nt, Human
gugucauuucauuccau

SEQ ID NO: 3871057 - RNA, 22 nt, Human
guguccaaaaccgccagcucug

SEQ ID NO: 3871058 - RNA, 24 nt, Human
guguccaaaaccgccagcucuguu

SEQ ID NO: 3871059 - RNA, 15 nt, Human
guguccaccuguggg

SEQ ID NO: 3871060 - RNA, 17 nt, Human
guguccaccugugggug

SEQ ID NO: 3871061 - RNA, 16 nt, Human
guguccaugugugugc

SEQ ID NO: 3871062 - RNA, 20 nt, Human
guguccauugacauguacag

SEQ ID NO: 3871063 - RNA, 17 nt, Human
guguccauuuugugaag

SEQ ID NO: 3871064 - RNA, 22 nt, Human
guguccauuuugugaagcccug

SEQ ID NO: 3871065 - RNA, 18 nt, Human
gugucccagaagaugacu

SEQ ID NO: 3871066 - RNA, 22 nt, Human
gugucccagaagaugacugagg

SEQ ID NO: 3871067 - RNA, 13 nt, Human
gugucccaggcag

SEQ ID NO: 3871068 - RNA, 19 nt, Human
gugucccaggcagggagac

SEQ ID NO: 3871069 - RNA, 22 nt, Human
gugucccaugacccaccccugu

SEQ ID NO: 3871070 - RNA, 21 nt, Human
gugucccauucccccagugcg

SEQ ID NO: 3871071 - RNA, 19 nt, Human
gugucccauugguguuguc

SEQ ID NO: 3871072 - RNA, 19 nt, Human
guguccccaacagcgccca

SEQ ID NO: 3871073 - RNA, 12 nt, Human
guguccccacca

SEQ ID NO: 3871074 - RNA, 13 nt, Human
guguccccaccau

SEQ ID NO: 3871075 - RNA, 18 nt, Human
guguccccggggcccagg

SEQ ID NO: 3871076 - RNA, 19 nt, Human
guguccccggggcccaggg

SEQ ID NO: 3871077 - RNA, 13 nt, Human
guguccccuccac

SEQ ID NO: 3871078 - RNA, 18 nt, Human
guguccccugacagggcc

SEQ ID NO: 3871079 - RNA, 16 nt, Human
gugucccugcacuugc

SEQ ID NO: 3871080 - RNA, 18 nt, Human
gugucccugcacuugcag

SEQ ID NO: 3871081 - RNA, 14 nt, Human
guguccuaggagua

SEQ ID NO: 3871082 - RNA, 20 nt, Human
guguccuccugggguucuuu

SEQ ID NO: 3871083 - RNA, 20 nt, Human
guguccugaaacgcuccuuu

SEQ ID NO: 3871084 - RNA, 17 nt, Human
guguccugaccacccuc

SEQ ID NO: 3871085 - RNA, 17 nt, Human
guguccugccugucugc

SEQ ID NO: 3871086 - RNA, 20 nt, Human
guguccugccugucugcccc

SEQ ID NO: 3871087 - RNA, 13 nt, Human
guguccuggugcu

SEQ ID NO: 3871088 - RNA, 21 nt, Human
guguccuguaguugcguggac

SEQ ID NO: 3871089 - RNA, 20 nt, Human
guguccuugugcaugagcua

SEQ ID NO: 3871090 - RNA, 23 nt, Human
gugucgcucugcuggccuggccg

SEQ ID NO: 3871091 - RNA, 15 nt, Human
gugucgggcaugaca

SEQ ID NO: 3871092 - RNA, 13 nt, Human
gugucuaaacugc

SEQ ID NO: 3871093 - RNA, 16 nt, Human
gugucuaagauucuag

SEQ ID NO: 3871094 - RNA, 17 nt, Human
gugucuaagauucuaga

SEQ ID NO: 3871095 - RNA, 20 nt, Human
gugucuaagauucuagauca

SEQ ID NO: 3871096 - RNA, 23 nt, Human
gugucucaaucugaucugaguga

SEQ ID NO: 3871097 - RNA, 11 nt, Human
gugucucaggc

SEQ ID NO: 3871098 - RNA, 16 nt, Human
gugucucaggcugccu

SEQ ID NO: 3871099 - RNA, 23 nt, Human
gugucucagggugcagaggucag

SEQ ID NO: 3871100 - RNA, 22 nt, Human
gugucucaguccaccugagcug

SEQ ID NO: 3871101 - RNA, 17 nt, Human
gugucucccuucauccu

SEQ ID NO: 3871102 - RNA, 16 nt, Human
gugucuccugcaugca

SEQ ID NO: 3871103 - RNA, 23 nt, Human
gugucuccugcaugcagaaaggg

SEQ ID NO: 3871104 - RNA, 14 nt, Human
gugucucuuggucc

SEQ ID NO: 3871105 - RNA, 20 nt, Human
gugucucuugguccugcugc

SEQ ID NO: 3871106 - RNA, 22 nt, Human
gugucucuuuucucuuucuccu

SEQ ID NO: 3871107 - RNA, 22 nt, Human
gugucugagcccucaaagugag

SEQ ID NO: 3871108 - RNA, 17 nt, Human
gugucugaguggcuuca

SEQ ID NO: 3871109 - RNA, 17 nt, Human
gugucuggauucccagg

SEQ ID NO: 3871110 - RNA, 17 nt, Human
gugucuggcacagccug

SEQ ID NO: 3871111 - RNA, 12 nt, Human
gugucugggcug

SEQ ID NO: 3871112 - RNA, 22 nt, Human
gugucuuaauuaaaagaauauu

SEQ ID NO: 3871113 - RNA, 14 nt, Human
gugucuuaauuauu

SEQ ID NO: 3871114 - RNA, 15 nt, Human
gugucuuaauuauua

SEQ ID NO: 3871115 - RNA, 12 nt, Human
gugucuuagcau

SEQ ID NO: 3871116 - RNA, 15 nt, Human
gugucuuccauaaug

SEQ ID NO: 3871117 - RNA, 14 nt, Human
gugucuuccuccca

SEQ ID NO: 3871118 - RNA, 20 nt, Human
gugucuucuccaccacgcug

SEQ ID NO: 3871119 - RNA, 17 nt, Human
gugucuugggcagagcu

SEQ ID NO: 3871120 - RNA, 23 nt, Human
gugucuugggcagagcuggcucu

SEQ ID NO: 3871121 - RNA, 18 nt, Human
gugucuuguucugucacu

SEQ ID NO: 3871122 - RNA, 19 nt, Human
gugucuuuagauagcccug

SEQ ID NO: 3871123 - RNA, 21 nt, Human
gugucuuucuaagaaaucaag

SEQ ID NO: 3871124 - RNA, 22 nt, Human
gugucuuucuuuggugccuuuc

SEQ ID NO: 3871125 - RNA, 18 nt, Human
gugucuuuuuucacuaca

SEQ ID NO: 3871126 - RNA, 17 nt, Human
gugugaaaaugugugug

SEQ ID NO: 3871127 - RNA, 14 nt, Human
gugugaacuggacc

SEQ ID NO: 3871128 - RNA, 22 nt, Human
gugugaacuggacccuguugcu

SEQ ID NO: 3871129 - RNA, 17 nt, Human
gugugaacuuggaagca

SEQ ID NO: 3871130 - RNA, 20 nt, Human
gugugaaguacaauaauuca

SEQ ID NO: 3871131 - RNA, 20 nt, Human
gugugacaucaguggcaugg

SEQ ID NO: 3871132 - RNA, 14 nt, Human
gugugaccaacugu

SEQ ID NO: 3871133 - RNA, 16 nt, Human
gugugaccaacugugu

SEQ ID NO: 3871134 - RNA, 13 nt, Human
gugugaccugagg

SEQ ID NO: 3871135 - RNA, 18 nt, Human
gugugagucaccaagccc

SEQ ID NO: 3871136 - RNA, 17 nt, Human
gugugagugcauguacu

SEQ ID NO: 3871137 - RNA, 15 nt, Human
gugugagugugacag

SEQ ID NO: 3871138 - RNA, 18 nt, Human
gugugagugugacagggc

SEQ ID NO: 3871139 - RNA, 14 nt, Human
gugugagugugugc

SEQ ID NO: 3871140 - RNA, 15 nt, Human
gugugauauuucaga

SEQ ID NO: 3871141 - RNA, 14 nt, Human
gugugaucgucuga

SEQ ID NO: 3871142 - RNA, 17 nt, Human
gugugaugaacuuucuc

SEQ ID NO: 3871143 - RNA, 21 nt, Human
gugugauugacagcuuugcug

SEQ ID NO: 3871144 - RNA, 23 nt, Human
gugugauugacagcuuugcugcu

SEQ ID NO: 3871145 - RNA, 15 nt, Human
gugugcaacagacaa

SEQ ID NO: 3871146 - RNA, 16 nt, Human
gugugcaagugugugc

SEQ ID NO: 3871147 - RNA, 16 nt, Human
gugugcaccaggguug

SEQ ID NO: 3871148 - RNA, 16 nt, Human
gugugcauguguguau

SEQ ID NO: 3871149 - RNA, 17 nt, Human
gugugcauguguguaua

SEQ ID NO: 3871150 - RNA, 16 nt, Human
gugugcauugcuguga

SEQ ID NO: 3871151 - RNA, 19 nt, Human
gugugccccccauccuggc

SEQ ID NO: 3871152 - RNA, 22 nt, Human
gugugccucaguauauuuaaac

SEQ ID NO: 3871153 - RNA, 14 nt, Human
gugugccucuagcu

SEQ ID NO: 3871154 - RNA, 16 nt, Human
gugugccucuagcuga

SEQ ID NO: 3871155 - RNA, 13 nt, Human
gugugccugcagc

SEQ ID NO: 3871156 - RNA, 15 nt, Human
gugugccugcagccc

SEQ ID NO: 3871157 - RNA, 16 nt, Human
gugugccugcagcccc

SEQ ID NO: 3871158 - RNA, 23 nt, Human
gugugccugggggaguuuuccuc

SEQ ID NO: 3871159 - RNA, 23 nt, Human
gugugccuuccagauccucucug

SEQ ID NO: 3871160 - RNA, 16 nt, Human
gugugcggcugugugu

SEQ ID NO: 3871161 - RNA, 15 nt, Human
gugugcuaaaaauga

SEQ ID NO: 3871162 - RNA, 12 nt, Human
gugugcucugau

SEQ ID NO: 3871163 - RNA, 17 nt, Human
gugugcucuucuucuuu

SEQ ID NO: 3871164 - RNA, 12 nt, Human
gugugcugggag

SEQ ID NO: 3871165 - RNA, 17 nt, Human
gugugcuuuuuuugugu

SEQ ID NO: 3871166 - RNA, 18 nt, Human
guguggacucaaguccuu

SEQ ID NO: 3871167 - RNA, 13 nt, Human
guguggagaagcg

SEQ ID NO: 3871168 - RNA, 21 nt, Human
guguggagagggaaugugaaa

SEQ ID NO: 3871169 - RNA, 17 nt, Human
guguggagucauuucug

SEQ ID NO: 3871170 - RNA, 16 nt, Human
guguggcagcaggcag

SEQ ID NO: 3871171 - RNA, 15 nt, Human
guguggccacuucug

SEQ ID NO: 3871172 - RNA, 13 nt, Human
guguggccaggcu

SEQ ID NO: 3871173 - RNA, 13 nt, Human
guguggcugagga

SEQ ID NO: 3871174 - RNA, 19 nt, Human
guguggcuuucagagccuc

SEQ ID NO: 3871175 - RNA, 17 nt, Human
gugugggacuguacaca

SEQ ID NO: 3871176 - RNA, 14 nt, Human
gugugggcuguguc

SEQ ID NO: 3871177 - RNA, 21 nt, Human
guguggggccaugccuccuca

SEQ ID NO: 3871178 - RNA, 16 nt, Human
guguggguaccuguau

SEQ ID NO: 3871179 - RNA, 14 nt, Human
guguggguguccug

SEQ ID NO: 3871180 - RNA, 15 nt, Human
guguggguucuacag

SEQ ID NO: 3871181 - RNA, 18 nt, Human
gugugguacagagaagcc

SEQ ID NO: 3871182 - RNA, 19 nt, Human
gugugguacagagaagcca

SEQ ID NO: 3871183 - RNA, 20 nt, Human
gugugguacagagaagccag

SEQ ID NO: 3871184 - RNA, 13 nt, Human
guguggugcagug

SEQ ID NO: 3871185 - RNA, 12 nt, Human
gugugguggccu

SEQ ID NO: 3871186 - RNA, 15 nt, Human
gugugguuaugaacu

SEQ ID NO: 3871187 - RNA, 18 nt, Human
guucaaggucacuguuuc

SEQ ID NO: 3871188 - RNA, 20 nt, Human
guucaauaaacuuaacuuua

SEQ ID NO: 3871189 - RNA, 21 nt, Human
guucaauauaagcuuuucuuu

SEQ ID NO: 3871190 - RNA, 12 nt, Human
guucaauauuuu

SEQ ID NO: 3871191 - RNA, 18 nt, Human
guucaaucucccgcugcu

SEQ ID NO: 3871192 - RNA, 10 nt, Human
guucaaugau

SEQ ID NO: 3871193 - RNA, 14 nt, Human
guucaaugaucuag

SEQ ID NO: 3871194 - RNA, 17 nt, Human
guucaaugaucuagguu

SEQ ID NO: 3871195 - RNA, 20 nt, Human
guucaaugaucuagguuuaa

SEQ ID NO: 3871196 - RNA, 17 nt, Human
guucaaugguucugaaa

SEQ ID NO: 3871197 - RNA, 17 nt, Human
guucaauuauuuccccc

SEQ ID NO: 3871198 - RNA, 15 nt, Human
guucaauucccugaa

SEQ ID NO: 3871199 - RNA, 17 nt, Human
guucaauucccugaagg

SEQ ID NO: 3871200 - RNA, 17 nt, Human
guucacacccugcaagg

SEQ ID NO: 3871201 - RNA, 12 nt, Human
guucacauuuuu

SEQ ID NO: 3871202 - RNA, 17 nt, Human
guucaccauuauaauga

SEQ ID NO: 3871203 - RNA, 22 nt, Human
guucaccuugaagaaccucuca

SEQ ID NO: 3871204 - RNA, 24 nt, Human
guucacucuuggagccugcagagc

SEQ ID NO: 3871205 - RNA, 24 nt, Human
guucacuggacacuucacgcccuu

SEQ ID NO: 3871206 - RNA, 21 nt, Human
guucagaaaaaagguucuuug

SEQ ID NO: 3871207 - RNA, 13 nt, Human
guucagaacaacu

SEQ ID NO: 3871208 - RNA, 20 nt, Human
guucagaauuaaacuuuuaa

SEQ ID NO: 3871209 - RNA, 22 nt, Human
guucagaauuuaguguauccau

SEQ ID NO: 3871210 - RNA, 17 nt, Human
guucagagacucagggc

SEQ ID NO: 3871211 - RNA, 22 nt, Human
guucagagacucagggccccag

SEQ ID NO: 3871212 - RNA, 15 nt, Human
guucagagcugcccu

SEQ ID NO: 3871213 - RNA, 19 nt, Human
guucagauaauugaauaag

SEQ ID NO: 3871214 - RNA, 16 nt, Human
guucagauugcuuuga

SEQ ID NO: 3871215 - RNA, 16 nt, Human
guucagcaccacccua

SEQ ID NO: 3871216 - RNA, 15 nt, Human
guucagcacuguccc

SEQ ID NO: 3871217 - RNA, 14 nt, Human
guucagcaguacag

SEQ ID NO: 3871218 - RNA, 22 nt, Human
guucagcauucuuagccugugg

SEQ ID NO: 3871219 - RNA, 17 nt, Human
guucagccacugaggga

SEQ ID NO: 3871220 - RNA, 15 nt, Human
guucagccccuccuc

SEQ ID NO: 3871221 - RNA, 16 nt, Human
guucagccccuccucu

SEQ ID NO: 3871222 - RNA, 18 nt, Human
guucagccccuccucugc

SEQ ID NO: 3871223 - RNA, 21 nt, Human
guucagccccuccucugccac

SEQ ID NO: 3871224 - RNA, 13 nt, Human
guucagccugggu

SEQ ID NO: 3871225 - RNA, 22 nt, Human
guucagcgcugucaggauugcg

SEQ ID NO: 3871226 - RNA, 15 nt, Human
guucagcugccccac

SEQ ID NO: 3871227 - RNA, 15 nt, Human
guucagcugcuucuc

SEQ ID NO: 3871228 - RNA, 18 nt, Human
guucaggagucccaagga

SEQ ID NO: 3871229 - RNA, 18 nt, Human
guucaggggacucagccc

SEQ ID NO: 3871230 - RNA, 19 nt, Human
guucaggggacucagcccu

SEQ ID NO: 3871231 - RNA, 20 nt, Human
guucaggguuggccccugcc

SEQ ID NO: 3871232 - RNA, 22 nt, Human
guucaguaacagggccuugcua

SEQ ID NO: 3871233 - RNA, 14 nt, Human
guucaguaccugga

SEQ ID NO: 3871234 - RNA, 18 nt, Human
guucaguggcagggcuca

SEQ ID NO: 3871235 - RNA, 22 nt, Human
guucaguggcagggcucaggau

SEQ ID NO: 3871236 - RNA, 13 nt, Human
guucaguguaauu

SEQ ID NO: 3871237 - RNA, 16 nt, Human
guucaguguaauuucu

SEQ ID NO: 3871238 - RNA, 17 nt, Human
guucaguguuucugggg

SEQ ID NO: 3871239 - RNA, 11 nt, Human
guucaguuaca

SEQ ID NO: 3871240 - RNA, 14 nt, Human
guucaguuacagaa

SEQ ID NO: 3871241 - RNA, 15 nt, Human
guucaguuacagaaa

SEQ ID NO: 3871242 - RNA, 12 nt, Human
guucauaaauga

SEQ ID NO: 3871243 - RNA, 13 nt, Human
guucauaaaugaa

SEQ ID NO: 3871244 - RNA, 23 nt, Human
guucauaacagugccauugucuu

SEQ ID NO: 3871245 - RNA, 14 nt, Human
guucauacauauuu

SEQ ID NO: 3871246 - RNA, 14 nt, Human
guucauacauugua

SEQ ID NO: 3871247 - RNA, 16 nt, Human
guucauacauuugagg

SEQ ID NO: 3871248 - RNA, 21 nt, Human
guucauaccuaaguacuguaa

SEQ ID NO: 3871249 - RNA, 17 nt, Human
guucauagacccucuca

SEQ ID NO: 3871250 - RNA, 18 nt, Human
guucauauuaagaaugau

SEQ ID NO: 3871251 - RNA, 21 nt, Human
guucaucauccagauguggcu

SEQ ID NO: 3871252 - RNA, 17 nt, Human
guucaucauccuaagcu

SEQ ID NO: 3871253 - RNA, 20 nt, Human
guucauccaauccucacugg

SEQ ID NO: 3871254 - RNA, 22 nt, Human
guucauccaauccucacugggu

SEQ ID NO: 3871255 - RNA, 20 nt, Human
guucauccuauucuuucgaa

SEQ ID NO: 3871256 - RNA, 12 nt, Human
guucaucuugaa

SEQ ID NO: 3871257 - RNA, 13 nt, Human
guucaucuugaau

SEQ ID NO: 3871258 - RNA, 19 nt, Human
guucaugagaaucuauauu

SEQ ID NO: 3871259 - RNA, 16 nt, Human
guucaugcagcugugg

SEQ ID NO: 3871260 - RNA, 22 nt, Human
guucauggcagauguaggaggg

SEQ ID NO: 3871261 - RNA, 12 nt, Human
guucauguagag

SEQ ID NO: 3871262 - RNA, 19 nt, Human
guucauguagagaaaagca

SEQ ID NO: 3871263 - RNA, 18 nt, Human
guucauuagaaauauuuu

SEQ ID NO: 3871264 - RNA, 13 nt, Human
guucauuccucca

SEQ ID NO: 3871265 - RNA, 16 nt, Human
guucauugcacuuuga

SEQ ID NO: 3871266 - RNA, 14 nt, Human
guucauuguaaugu

SEQ ID NO: 3871267 - RNA, 18 nt, Human
guucauuguaauguuacu

SEQ ID NO: 3871268 - RNA, 20 nt, Human
guucauuucaaauacaucuu

SEQ ID NO: 3871269 - RNA, 19 nt, Human
guuccaagacauugucaau

SEQ ID NO: 3871270 - RNA, 14 nt, Human
guuccaagagucua

SEQ ID NO: 3871271 - RNA, 18 nt, Human
guuccaagagucuaaaga

SEQ ID NO: 3871272 - RNA, 17 nt, Human
guuccaaguccaauaag

SEQ ID NO: 3871273 - RNA, 15 nt, Human
guuccaauaaacagg

SEQ ID NO: 3871274 - RNA, 15 nt, Human
guuccaauccuggcu

SEQ ID NO: 3871275 - RNA, 20 nt, Human
guuccaccaucaagccacca

SEQ ID NO: 3871276 - RNA, 20 nt, Human
guuccacgucccccuggggc

SEQ ID NO: 3871277 - RNA, 13 nt, Human
guuccacugagac

SEQ ID NO: 3871278 - RNA, 14 nt, Human
guuccacugagacc

SEQ ID NO: 3871279 - RNA, 18 nt, Human
guuccacugagcuccaug

SEQ ID NO: 3871280 - RNA, 14 nt, Human
guuccagacauucu

SEQ ID NO: 3871281 - RNA, 14 nt, Human
guuccagccugcca

SEQ ID NO: 3871282 - RNA, 14 nt, Human
guuccagcucuuug

SEQ ID NO: 3871283 - RNA, 21 nt, Human
guuccagggucccucugugua

SEQ ID NO: 3871284 - RNA, 21 nt, Human
guuccaucuccuauaaucugu

SEQ ID NO: 3871285 - RNA, 17 nt, Human
guuccaugccugagggu

SEQ ID NO: 3871286 - RNA, 20 nt, Human
guuccaugccugagggugga

SEQ ID NO: 3871287 - RNA, 17 nt, Human
guuccauuaaacgauuu

SEQ ID NO: 3871288 - RNA, 22 nt, Human
guuccauugaagccgacucugg

SEQ ID NO: 3871289 - RNA, 19 nt, Human
guucccaagcucagaggcg

SEQ ID NO: 3871290 - RNA, 18 nt, Human
guucccacauuaaagaag

SEQ ID NO: 3871291 - RNA, 15 nt, Human
guucccagaaucaaa

SEQ ID NO: 3871292 - RNA, 21 nt, Human
guucccagauggcuggaaggg

SEQ ID NO: 3871293 - RNA, 21 nt, Human
guucccauccucuucuuuuag

SEQ ID NO: 3871294 - RNA, 16 nt, Human
guucccauuucagcug

SEQ ID NO: 3871295 - RNA, 18 nt, Human
guuccccaucuggguccu

SEQ ID NO: 3871296 - RNA, 16 nt, Human
guucccccagcccugu

SEQ ID NO: 3871297 - RNA, 20 nt, Human
guucccccagcccuguggaa

SEQ ID NO: 3871298 - RNA, 23 nt, Human
guuccccucucccuucccuccuc

SEQ ID NO: 3871299 - RNA, 18 nt, Human
guuccccucuugucuccc

SEQ ID NO: 3871300 - RNA, 20 nt, Human
guuccccucuugucuccccu

SEQ ID NO: 3871301 - RNA, 18 nt, Human
guuccccuguuuauucau

SEQ ID NO: 3871302 - RNA, 17 nt, Human
guuccccuuugcuucau

SEQ ID NO: 3871303 - RNA, 14 nt, Human
guucccguuucucc

SEQ ID NO: 3871304 - RNA, 19 nt, Human
guucccguuucuccaccua

SEQ ID NO: 3871305 - RNA, 21 nt, Human
guucccuaggggacacuuccc

SEQ ID NO: 3871306 - RNA, 22 nt, Human
guucccuauuuuucucuccugu

SEQ ID NO: 3871307 - RNA, 12 nt, Human
guucccucugag

SEQ ID NO: 3871308 - RNA, 15 nt, Human
guucccucugcucag

SEQ ID NO: 3871309 - RNA, 16 nt, Human
guucccucugcucagc

SEQ ID NO: 3871310 - RNA, 16 nt, Human
guucccucugcuccug

SEQ ID NO: 3871311 - RNA, 18 nt, Human
guucccugaaaacccaga

SEQ ID NO: 3871312 - RNA, 15 nt, Human
guucccuguucuucc

SEQ ID NO: 3871313 - RNA, 16 nt, Human
guucccuguucuuccu

SEQ ID NO: 3871314 - RNA, 18 nt, Human
guucccuugaugaagaag

SEQ ID NO: 3871315 - RNA, 12 nt, Human
guucccuuggcc

SEQ ID NO: 3871316 - RNA, 13 nt, Human
guucccuuggccu

SEQ ID NO: 3871317 - RNA, 22 nt, Human
guucccuuuccuuccaucccua

SEQ ID NO: 3871318 - RNA, 18 nt, Human
guucccuuugcuccaccc

SEQ ID NO: 3871319 - RNA, 22 nt, Human
guucccuuuuuuggcugcugaa

SEQ ID NO: 3871320 - RNA, 18 nt, Human
guuccgggcaaaugccag

SEQ ID NO: 3871321 - RNA, 22 nt, Human
guuccgggcaaaugccagggcc

SEQ ID NO: 3871322 - RNA, 18 nt, Human
guuccuaagaagcuucua

SEQ ID NO: 3871323 - RNA, 19 nt, Human
guuccuaagagugcugggc

SEQ ID NO: 3871324 - RNA, 14 nt, Human
guuccuaaguucuu

SEQ ID NO: 3871325 - RNA, 15 nt, Human
guuccuagaguagag

SEQ ID NO: 3871326 - RNA, 16 nt, Human
guuccuagccaccgcc

SEQ ID NO: 3871327 - RNA, 23 nt, Human
guuccuagugauggcuuaugaua

SEQ ID NO: 3871328 - RNA, 15 nt, Human
guuccucaaauuuuu

SEQ ID NO: 3871329 - RNA, 20 nt, Human
guuccucaaauuuuuugacu

SEQ ID NO: 3871330 - RNA, 22 nt, Human
guuccucccccaguuccuccca

SEQ ID NO: 3871331 - RNA, 15 nt, Human
guuccucgcccuggg

SEQ ID NO: 3871332 - RNA, 18 nt, Human
uaaaauugcuauguuacu

SEQ ID NO: 3871333 - RNA, 15 nt, Human
uaaaauuguaaaauu

SEQ ID NO: 3871334 - RNA, 16 nt, Human
uaaaauuguaaaauug

SEQ ID NO: 3871335 - RNA, 19 nt, Human
uaaaauuguacaugaacau

SEQ ID NO: 3871336 - RNA, 15 nt, Human
uaaaauugugaugug

SEQ ID NO: 3871337 - RNA, 16 nt, Human
uaaaauuguuaucaaa

SEQ ID NO: 3871338 - RNA, 17 nt, Human
uaaaauuuaaguaucuu

SEQ ID NO: 3871339 - RNA, 14 nt, Human
uaaaauuuauauug

SEQ ID NO: 3871340 - RNA, 15 nt, Human
uaaaauuuauuucau

SEQ ID NO: 3871341 - RNA, 15 nt, Human
uaaaauuugaaacau

SEQ ID NO: 3871342 - RNA, 16 nt, Human
uaaaauuugaaacauu

SEQ ID NO: 3871343 - RNA, 21 nt, Human
uaaaauuugcccucccauccc

SEQ ID NO: 3871344 - RNA, 21 nt, Human
uaaaauuuugcuuuuaauuaa

SEQ ID NO: 3871345 - RNA, 16 nt, Human
uaaaauuuuguauguu

SEQ ID NO: 3871346 - RNA, 19 nt, Human
uaaaauuuuguauguuaaa

SEQ ID NO: 3871347 - RNA, 23 nt, Human
uaaaauuuuguauguuaaagaga

SEQ ID NO: 3871348 - RNA, 18 nt, Human
uaaaauuuuuuuagaaag

SEQ ID NO: 3871349 - RNA, 16 nt, Human
uaaaauuuuuuuucau

SEQ ID NO: 3871350 - RNA, 17 nt, Human
uaaacaaaauagaaagu

SEQ ID NO: 3871351 - RNA, 22 nt, Human
uaaacaaaauagaaaguugcaa

SEQ ID NO: 3871352 - RNA, 18 nt, Human
uaaacaaaauagaagcug

SEQ ID NO: 3871353 - RNA, 23 nt, Human
uaaacaaaauagaagcuguagua

SEQ ID NO: 3871354 - RNA, 13 nt, Human
uaaacaaacauug

SEQ ID NO: 3871355 - RNA, 17 nt, Human
uaaacaaaguuacuagg

SEQ ID NO: 3871356 - RNA, 12 nt, Human
uaaacaaaugua

SEQ ID NO: 3871357 - RNA, 17 nt, Human
uaaacaaauucauauuc

SEQ ID NO: 3871358 - RNA, 22 nt, Human
uaaacaaauucauauucugucu

SEQ ID NO: 3871359 - RNA, 18 nt, Human
uaaacaacagcugaagca

SEQ ID NO: 3871360 - RNA, 13 nt, Human
uaaacaagaaaaa

SEQ ID NO: 3871361 - RNA, 18 nt, Human
uaaacaagaccacguuuc

SEQ ID NO: 3871362 - RNA, 19 nt, Human
uaaacaagaccacguuucu

SEQ ID NO: 3871363 - RNA, 20 nt, Human
uaaacaagauuuuaaagaca

SEQ ID NO: 3871364 - RNA, 21 nt, Human
uaaacaagauuuuaaagacau

SEQ ID NO: 3871365 - RNA, 13 nt, Human
uaaacaaguauuu

SEQ ID NO: 3871366 - RNA, 23 nt, Human
uaaacaaguauuuguuaauuuag

SEQ ID NO: 3871367 - RNA, 22 nt, Human
uaaacaaguucgagucaaaguu

SEQ ID NO: 3871368 - RNA, 21 nt, Human
uaaacaaugcugauuugguga

SEQ ID NO: 3871369 - RNA, 16 nt, Human
uaaacaauucaaguga

SEQ ID NO: 3871370 - RNA, 12 nt, Human
uaaacacauuaa

SEQ ID NO: 3871371 - RNA, 11 nt, Human
uaaacacuaca

SEQ ID NO: 3871372 - RNA, 16 nt, Human
uaaacacucaccuucu

SEQ ID NO: 3871373 - RNA, 17 nt, Human
uaaacacucagcuguuc

SEQ ID NO: 3871374 - RNA, 11 nt, Human
uaaacacuguu

SEQ ID NO: 3871375 - RNA, 21 nt, Human
uaaacagauauaaauggcugg

SEQ ID NO: 3871376 - RNA, 20 nt, Human
uaaacagaugaugagaauuu

SEQ ID NO: 3871377 - RNA, 16 nt, Human
uaaacagauguccauc

SEQ ID NO: 3871378 - RNA, 22 nt, Human
uaaacagauguccaucagauga

SEQ ID NO: 3871379 - RNA, 18 nt, Human
uaaacagauuuuuacaaa

SEQ ID NO: 3871380 - RNA, 20 nt, Human
uaaacagauuuuuacaaaug

SEQ ID NO: 3871381 - RNA, 17 nt, Human
uaaacagcaguguuccc

SEQ ID NO: 3871382 - RNA, 23 nt, Human
uaaacaggcccagcauugcuggu

SEQ ID NO: 3871383 - RNA, 23 nt, Human
uaaacagguggugagaaauuucu

SEQ ID NO: 3871384 - RNA, 15 nt, Human
uaaacaguauuucau

SEQ ID NO: 3871385 - RNA, 23 nt, Human
uaaacagugagccugaauuuugu

SEQ ID NO: 3871386 - RNA, 12 nt, Human
uaaacagugccu

SEQ ID NO: 3871387 - RNA, 14 nt, Human
uaaacauaaaacaa

SEQ ID NO: 3871388 - RNA, 15 nt, Human
uaaacauaaugaaaa

SEQ ID NO: 3871389 - RNA, 16 nt, Human
uaaacauaaugaaaau

SEQ ID NO: 3871390 - RNA, 16 nt, Human
uaaacauaugauuuca

SEQ ID NO: 3871391 - RNA, 18 nt, Human
uaaacauaugauuucacu

SEQ ID NO: 3871392 - RNA, 15 nt, Human
uaaacaucaaucuuu

SEQ ID NO: 3871393 - RNA, 18 nt, Human
uaaacaucaaucuuuaaa

SEQ ID NO: 3871394 - RNA, 17 nt, Human
uaaacaucagguuaggc

SEQ ID NO: 3871395 - RNA, 17 nt, Human
uaaacaucauucauuuu

SEQ ID NO: 3871396 - RNA, 20 nt, Human
uaaacauccaauauuuucuu

SEQ ID NO: 3871397 - RNA, 17 nt, Human
uaaacauccuucaagaa

SEQ ID NO: 3871398 - RNA, 21 nt, Human
uaaacaugcuguacauacuuu

SEQ ID NO: 3871399 - RNA, 13 nt, Human
uaaacauguguuu

SEQ ID NO: 3871400 - RNA, 17 nt, Human
uaaacauuaaaugucuu

SEQ ID NO: 3871401 - RNA, 21 nt, Human
uaaacauuaauagcagccuuu

SEQ ID NO: 3871402 - RNA, 20 nt, Human
uaaacauuaguguucauagc

SEQ ID NO: 3871403 - RNA, 13 nt, Human
uaaacauuaguuc

SEQ ID NO: 3871404 - RNA, 23 nt, Human
uaaacauuauuaaguaacuuauu

SEQ ID NO: 3871405 - RNA, 18 nt, Human
uaaacauugaaguaauga

SEQ ID NO: 3871406 - RNA, 23 nt, Human
uaaacauuuauuuuuuuuaaaga

SEQ ID NO: 3871407 - RNA, 14 nt, Human
uaaaccaaaggaca

SEQ ID NO: 3871408 - RNA, 20 nt, Human
uaaaccaaaggacauuaugu

SEQ ID NO: 3871409 - RNA, 17 nt, Human
uaaaccaaggacugagc

SEQ ID NO: 3871410 - RNA, 19 nt, Human
uaaaccaaggcuagaacca

SEQ ID NO: 3871411 - RNA, 12 nt, Human
uaaaccaauuuu

SEQ ID NO: 3871412 - RNA, 19 nt, Human
uaaaccauaaaaagcugac

SEQ ID NO: 3871413 - RNA, 18 nt, Human
uaaaccauuuuuguuacu

SEQ ID NO: 3871414 - RNA, 13 nt, Human
uaaacccucagag

SEQ ID NO: 3871415 - RNA, 20 nt, Human
uaaaccgcuuuggccugagu

SEQ ID NO: 3871416 - RNA, 16 nt, Human
uaaaccggaccaucuc

SEQ ID NO: 3871417 - RNA, 18 nt, Human
uaaaccuaaaaaagauau

SEQ ID NO: 3871418 - RNA, 21 nt, Human
uaaaccuaggacuuccgagcu

SEQ ID NO: 3871419 - RNA, 19 nt, Human
uaaaccucaaaaugucuaa

SEQ ID NO: 3871420 - RNA, 21 nt, Human
uaaaccuguuuuuuuuucauu

SEQ ID NO: 3871421 - RNA, 19 nt, Human
uaaaccuuaauauuucuuc

SEQ ID NO: 3871422 - RNA, 13 nt, Human
uaaaccuuuuuug

SEQ ID NO: 3871423 - RNA, 15 nt, Human
uaaacgaaacaaaga

SEQ ID NO: 3871424 - RNA, 17 nt, Human
uaaacgauuuuuaaaau

SEQ ID NO: 3871425 - RNA, 19 nt, Human
uaaacgauuuuuaaaaugu

SEQ ID NO: 3871426 - RNA, 13 nt, Human
uaaacggauuauu

SEQ ID NO: 3871427 - RNA, 15 nt, Human
uaaacggauuauuuu

SEQ ID NO: 3871428 - RNA, 20 nt, Human
uaaacggauuauuuuuucag

SEQ ID NO: 3871429 - RNA, 22 nt, Human
uaaacggauuauuuuuucagac

SEQ ID NO: 3871430 - RNA, 20 nt, Human
uaaacgguucaguuucuucu

SEQ ID NO: 3871431 - RNA, 20 nt, Human
uaaacguaugcaugugaaga

SEQ ID NO: 3871432 - RNA, 17 nt, Human
uaaacgugcagacuaug

SEQ ID NO: 3871433 - RNA, 22 nt, Human
uaaacguguauguuuuucaguu

SEQ ID NO: 3871434 - RNA, 23 nt, Human
uaaacguguauguuuuucaguuc

SEQ ID NO: 3871435 - RNA, 22 nt, Human
uaaacguuucaguaauaaaaca

SEQ ID NO: 3871436 - RNA, 13 nt, Human
uaaacuaaaugug

SEQ ID NO: 3871437 - RNA, 16 nt, Human
uaaacuacucuuugau

SEQ ID NO: 3871438 - RNA, 18 nt, Human
uaaacuacucuuugauuu

SEQ ID NO: 3871439 - RNA, 16 nt, Human
uaaacuagaugaccuc

SEQ ID NO: 3871440 - RNA, 23 nt, Human
uaaacuagcauaucugccuuuau

SEQ ID NO: 3871441 - RNA, 22 nt, Human
uaaacuauaaaacaaaaauuug

SEQ ID NO: 3871442 - RNA, 17 nt, Human
uaaacuaucaguuuguc

SEQ ID NO: 3871443 - RNA, 17 nt, Human
uaaacuauuggaaagua

SEQ ID NO: 3871444 - RNA, 15 nt, Human
uaaacuauuugucuu

SEQ ID NO: 3871445 - RNA, 19 nt, Human
uaaacucagggacagagcc

SEQ ID NO: 3871446 - RNA, 20 nt, Human
uaaacucagggacagagcca

SEQ ID NO: 3871447 - RNA, 14 nt, Human
uaaacucauuuaua

SEQ ID NO: 3871448 - RNA, 15 nt, Human
uaaacucuaaacauu

SEQ ID NO: 3871449 - RNA, 18 nt, Human
uaaacucucuuugggaau

SEQ ID NO: 3871450 - RNA, 19 nt, Human
uaaacucugaauaagcacu

SEQ ID NO: 3871451 - RNA, 17 nt, Human
uaaacucugaauuuauc

SEQ ID NO: 3871452 - RNA, 21 nt, Human
uaaacucugaauuuaucuuug

SEQ ID NO: 3871453 - RNA, 22 nt, Human
uaaacugaaaacucccauuuac

SEQ ID NO: 3871454 - RNA, 14 nt, Human
uaaacugacuuuau

SEQ ID NO: 3871455 - RNA, 16 nt, Human
uaaacugacuuuaucc

SEQ ID NO: 3871456 - RNA, 11 nt, Human
uaaacugccau

SEQ ID NO: 3871457 - RNA, 20 nt, Human
uaaacugcccccucugcccu

SEQ ID NO: 3871458 - RNA, 23 nt, Human
uaaacuggagacugugugugccc

SEQ ID NO: 3871459 - RNA, 14 nt, Human
uaaacuguacagug

SEQ ID NO: 3871460 - RNA, 18 nt, Human
uaaacuguguacauaacu

SEQ ID NO: 3871461 - RNA, 13 nt, Human
uaaacugugugca

SEQ ID NO: 3871462 - RNA, 22 nt, Human
uaaacuguguggacugugaugc

SEQ ID NO: 3871463 - RNA, 13 nt, Human
uaaacuguguuua

SEQ ID NO: 3871464 - RNA, 18 nt, Human
uaaacuguuagcacuguu

SEQ ID NO: 3871465 - RNA, 19 nt, Human
uaaacuguuagcacuguug

SEQ ID NO: 3871466 - RNA, 18 nt, Human
uaaacuguuucuuuaaaa

SEQ ID NO: 3871467 - RNA, 14 nt, Human
uaaacuuaacuuua

SEQ ID NO: 3871468 - RNA, 14 nt, Human
uaaacuuaaucuaa

SEQ ID NO: 3871469 - RNA, 18 nt, Human
uaaacuuauaaaucauau

SEQ ID NO: 3871470 - RNA, 14 nt, Human
uaaacuuaugaaug

SEQ ID NO: 3871471 - RNA, 16 nt, Human
uaaacuuaugaauguu

SEQ ID NO: 3871472 - RNA, 17 nt, Human
uaaacuuaugaauguuu

SEQ ID NO: 3871473 - RNA, 22 nt, Human
uaaacuuggugcuuauugauau

SEQ ID NO: 3871474 - RNA, 17 nt, Human
uaaacuuguuugcugug

SEQ ID NO: 3871475 - RNA, 15 nt, Human
uaaacuuuaauaugu

SEQ ID NO: 3871476 - RNA, 23 nt, Human
uaaauaugaacccuuuguuucuu

SEQ ID NO: 3871477 - RNA, 23 nt, Human
uaaauaugaaucugcucacuuua

SEQ ID NO: 3871478 - RNA, 17 nt, Human
uaaauaugcagugauau

SEQ ID NO: 3871479 - RNA, 23 nt, Human
uaaauaugccucuccuuuguaua

SEQ ID NO: 3871480 - RNA, 23 nt, Human
uaaauauggacugcucaggaaac

SEQ ID NO: 3871481 - RNA, 18 nt, Human
uaaauauguuagcaaaga

SEQ ID NO: 3871482 - RNA, 18 nt, Human
uaaauauguuuuuuagau

SEQ ID NO: 3871483 - RNA, 19 nt, Human
uaaauauuaguuaauggau

SEQ ID NO: 3871484 - RNA, 19 nt, Human
uaaauauucacacuugaac

SEQ ID NO: 3871485 - RNA, 23 nt, Human
uaaauauugguugggaugacuug

SEQ ID NO: 3871486 - RNA, 16 nt, Human
uaaauauugucuuuuu

SEQ ID NO: 3871487 - RNA, 17 nt, Human
uaaauauugucuuuuug

SEQ ID NO: 3871488 - RNA, 10 nt, Human
uaaauauuua

SEQ ID NO: 3871489 - RNA, 17 nt, Human
uaaauauuuacauauga

SEQ ID NO: 3871490 - RNA, 21 nt, Human
uaaauauuuacauaugaaauu

SEQ ID NO: 3871491 - RNA, 23 nt, Human
uaaauauuuacauaugaaauuua

SEQ ID NO: 3871492 - RNA, 17 nt, Human
uaaauauuuauuuaugu

SEQ ID NO: 3871493 - RNA, 15 nt, Human
uaaauauuuccuuaa

SEQ ID NO: 3871494 - RNA, 15 nt, Human
uaaauauuuugacuu

SEQ ID NO: 3871495 - RNA, 22 nt, Human
uaaaucaaccaccuauuuuuga

SEQ ID NO: 3871496 - RNA, 16 nt, Human
uaaaucacgcuuuuug

SEQ ID NO: 3871497 - RNA, 19 nt, Human
uaaaucacgcuuuuugaaa

SEQ ID NO: 3871498 - RNA, 20 nt, Human
uaaaucagacuaugaaguuu

SEQ ID NO: 3871499 - RNA, 19 nt, Human
uaaaucagccguguaacca

SEQ ID NO: 3871500 - RNA, 18 nt, Human
uaaaucaguaagaggugu

SEQ ID NO: 3871501 - RNA, 22 nt, Human
uaaaucagucaagcuguugaag

SEQ ID NO: 3871502 - RNA, 11 nt, Human
uaaaucagugg

SEQ ID NO: 3871503 - RNA, 15 nt, Human
uaaaucauaaaguca

SEQ ID NO: 3871504 - RNA, 14 nt, Human
uaaaucauauugau

SEQ ID NO: 3871505 - RNA, 19 nt, Human
uaaaucauauugaugaaaa

SEQ ID NO: 3871506 - RNA, 20 nt, Human
uaaaucauauugaugaaaag

SEQ ID NO: 3871507 - RNA, 16 nt, Human
uaaaucaugaugcuag

SEQ ID NO: 3871508 - RNA, 19 nt, Human
uaaaucauuuuaggaaagg

SEQ ID NO: 3871509 - RNA, 19 nt, Human
uaaauccacccauguuauc

SEQ ID NO: 3871510 - RNA, 15 nt, Human
uaaauccauuuggaa

SEQ ID NO: 3871511 - RNA, 18 nt, Human
uaaauccauuuggaaauc

SEQ ID NO: 3871512 - RNA, 18 nt, Human
uaaauccugaagagcauu

SEQ ID NO: 3871513 - RNA, 17 nt, Human
uaaauccugccauuuaa

SEQ ID NO: 3871514 - RNA, 18 nt, Human
uaaauccugccauuuaaa

SEQ ID NO: 3871515 - RNA, 15 nt, Human
uaaaucuaaaucuau

SEQ ID NO: 3871516 - RNA, 15 nt, Human
uaaaucuagacucaa

SEQ ID NO: 3871517 - RNA, 19 nt, Human
uaaaucuaguauacauugu

SEQ ID NO: 3871518 - RNA, 14 nt, Human
uaaaucuccaaaau

SEQ ID NO: 3871519 - RNA, 21 nt, Human
uaaaucuccaaaauaaaacuu

SEQ ID NO: 3871520 - RNA, 17 nt, Human
uaaaucuccuauuuuuu

SEQ ID NO: 3871521 - RNA, 14 nt, Human
uaaaucucuaauau

SEQ ID NO: 3871522 - RNA, 15 nt, Human
uaaaucugacccagu

SEQ ID NO: 3871523 - RNA, 16 nt, Human
uaaaucugacccagug

SEQ ID NO: 3871524 - RNA, 22 nt, Human
uaaaucugugaacuugaaauuu

SEQ ID NO: 3871525 - RNA, 17 nt, Human
uaaaucuguucaaggaa

SEQ ID NO: 3871526 - RNA, 18 nt, Human
uaaaucuguugccaagcu

SEQ ID NO: 3871527 - RNA, 13 nt, Human
uaaaucuuuuaua

SEQ ID NO: 3871528 - RNA, 22 nt, Human
uaaaugaaagaaaauugaguug

SEQ ID NO: 3871529 - RNA, 15 nt, Human
uaaaugaaauuguaa

SEQ ID NO: 3871530 - RNA, 16 nt, Human
uaaaugaagcagcuuu

SEQ ID NO: 3871531 - RNA, 17 nt, Human
uaaaugaagcagcuuua

SEQ ID NO: 3871532 - RNA, 21 nt, Human
uaaaugaaguaacuugucuua

SEQ ID NO: 3871533 - RNA, 18 nt, Human
uaaaugaaguuuauacag

SEQ ID NO: 3871534 - RNA, 20 nt, Human
uaaaugaaguuuauacagua

SEQ ID NO: 3871535 - RNA, 13 nt, Human
uaaaugaauguuu

SEQ ID NO: 3871536 - RNA, 14 nt, Human
uaaaugaucugccu

SEQ ID NO: 3871537 - RNA, 14 nt, Human
uaaaugauucaaaa

SEQ ID NO: 3871538 - RNA, 15 nt, Human
uaaaugcaaauaaca

SEQ ID NO: 3871539 - RNA, 16 nt, Human
uaaaugcaaauaacaa

SEQ ID NO: 3871540 - RNA, 17 nt, Human
uaaaugcaaauaacaaa

SEQ ID NO: 3871541 - RNA, 19 nt, Human
uaaaugcaaccauuugaaa

SEQ ID NO: 3871542 - RNA, 14 nt, Human
uaaaugcaauaugu

SEQ ID NO: 3871543 - RNA, 19 nt, Human
uaaaugcaauauuaaugcc

SEQ ID NO: 3871544 - RNA, 12 nt, Human
uaaaugcagccc

SEQ ID NO: 3871545 - RNA, 23 nt, Human
uaaaugcagcccauuucuccaga

SEQ ID NO: 3871546 - RNA, 22 nt, Human
uaaaugcagcgaaccaauauuu

SEQ ID NO: 3871547 - RNA, 17 nt, Human
uaaaugcaguuacaaau

SEQ ID NO: 3871548 - RNA, 21 nt, Human
uaaaugcaguuacaaauuaua

SEQ ID NO: 3871549 - RNA, 16 nt, Human
uaaaugcauaaaugca

SEQ ID NO: 3871550 - RNA, 12 nt, Human
uaaaugccacac

SEQ ID NO: 3871551 - RNA, 16 nt, Human
uaaaugccaucaauaa

SEQ ID NO: 3871552 - RNA, 22 nt, Human
uaaaugcccucuucucgugccu

SEQ ID NO: 3871553 - RNA, 20 nt, Human
uaaaugccuaguuuuuagua

SEQ ID NO: 3871554 - RNA, 13 nt, Human
uaaaugcuauuuu

SEQ ID NO: 3871555 - RNA, 14 nt, Human
uaaaugcuauuuuu

SEQ ID NO: 3871556 - RNA, 23 nt, Human
uaaaugcuauuuuuuauuuuacu

SEQ ID NO: 3871557 - RNA, 17 nt, Human
uaaaugcuuuaugcaaa

SEQ ID NO: 3871558 - RNA, 17 nt, Human
uaaauggaaaaaaugau

SEQ ID NO: 3871559 - RNA, 18 nt, Human
uaaauggaaacugaaacu

SEQ ID NO: 3871560 - RNA, 22 nt, Human
uaaauggaaacugaaacuacug

SEQ ID NO: 3871561 - RNA, 11 nt, Human
uaaauggaaau

SEQ ID NO: 3871562 - RNA, 16 nt, Human
uaaauggaaccacucu

SEQ ID NO: 3871563 - RNA, 23 nt, Human
uaaauggccucauguggcuggaa

SEQ ID NO: 3871564 - RNA, 11 nt, Human
uaaauggcugc

SEQ ID NO: 3871565 - RNA, 16 nt, Human
uaaaugggaacauuua

SEQ ID NO: 3871566 - RNA, 17 nt, Human
uaaaugggaacauuuau

SEQ ID NO: 3871567 - RNA, 23 nt, Human
uaaaugggaacauuuauuuuaug

SEQ ID NO: 3871568 - RNA, 19 nt, Human
uaaaugggggugcauuuga

SEQ ID NO: 3871569 - RNA, 16 nt, Human
uaaauggguagagaaa

SEQ ID NO: 3871570 - RNA, 18 nt, Human
uaaaugguaauaagcacu

SEQ ID NO: 3871571 - RNA, 21 nt, Human
uaaaugguguacauaauguau

SEQ ID NO: 3871572 - RNA, 17 nt, Human
uaaauguagaguuuuua

SEQ ID NO: 3871573 - RNA, 21 nt, Human
uaaauguaguucugcuccaga

SEQ ID NO: 3871574 - RNA, 15 nt, Human
uaaauguauauacac

SEQ ID NO: 3871575 - RNA, 17 nt, Human
uaaaugucacuuuuuga

SEQ ID NO: 3871576 - RNA, 23 nt, Human
uaaaugucacuuuuugaggcaaa

SEQ ID NO: 3871577 - RNA, 15 nt, Human
uaaauguccauucuu

SEQ ID NO: 3871578 - RNA, 12 nt, Human
uaaaugucuaau

SEQ ID NO: 3871579 - RNA, 16 nt, Human
uaaaugucuaauguau

SEQ ID NO: 3871580 - RNA, 19 nt, Human
uaaaugucuuuaaugcaau

SEQ ID NO: 3871581 - RNA, 13 nt, Human
uaaaugucuuugu

SEQ ID NO: 3871582 - RNA, 14 nt, Human
uaaaugucuuugua

SEQ ID NO: 3871583 - RNA, 16 nt, Human
uaaaugucuuuguaag

SEQ ID NO: 3871584 - RNA, 21 nt, Human
uaaaugucuuuguaagucagu

SEQ ID NO: 3871585 - RNA, 22 nt, Human
uaaaugucuuuuuuuuaaugug

SEQ ID NO: 3871586 - RNA, 22 nt, Human
uaaaugugaauuacuaacuucu

SEQ ID NO: 3871587 - RNA, 23 nt, Human
uaaaugugauaugauuggcaaua

SEQ ID NO: 3871588 - RNA, 19 nt, Human
uaaaugugaugaauacugu

SEQ ID NO: 3871589 - RNA, 16 nt, Human
uaaaugugcuuuuaaa

SEQ ID NO: 3871590 - RNA, 13 nt, Human
uaaaugugguaaa

SEQ ID NO: 3871591 - RNA, 11 nt, Human
uaaaugugugu

SEQ ID NO: 3871592 - RNA, 14 nt, Human
uaaauguguguaug

SEQ ID NO: 3871593 - RNA, 19 nt, Human
uaaauguguuggacaaaug

SEQ ID NO: 3871594 - RNA, 22 nt, Human
uaaauguguuggacaaauguga

SEQ ID NO: 3871595 - RNA, 16 nt, Human
uaaauguuaaagaugu

SEQ ID NO: 3871596 - RNA, 18 nt, Human
uaaauguuaccucugaau

SEQ ID NO: 3871597 - RNA, 22 nt, Human
uaaauguuaguuucuugguaaa

SEQ ID NO: 3871598 - RNA, 18 nt, Human
uaaauguuauagcugcau

SEQ ID NO: 3871599 - RNA, 19 nt, Human
uaaauguuaugacuaugua

SEQ ID NO: 3871600 - RNA, 23 nt, Human
uaaauguuaugacuauguaaacu

SEQ ID NO: 3871601 - RNA, 21 nt, Human
uaaauguuauuucugcaaaca

SEQ ID NO: 3871602 - RNA, 22 nt, Human
uaaauguuugacacaauuggaa

SEQ ID NO: 3871603 - RNA, 20 nt, Human
uaaauguuuggcauguaaau

SEQ ID NO: 3871604 - RNA, 11 nt, Human
uaaauguuuug

SEQ ID NO: 3871605 - RNA, 15 nt, Human
uaaauguuuuguaaa

SEQ ID NO: 3871606 - RNA, 23 nt, Human
uaaauguuuuguaaacuuugaaa

SEQ ID NO: 3871607 - RNA, 20 nt, Human
uaaauguuuuucuauguagu

SEQ ID NO: 3871608 - RNA, 20 nt, Human
uaaauguuuuuuuuuaaaga

SEQ ID NO: 3871609 - RNA, 24 nt, Human
uaaauguuuuuuuuuaaagacuuu

SEQ ID NO: 3871610 - RNA, 14 nt, Human
uaaauuaaacaauu

SEQ ID NO: 3871611 - RNA, 15 nt, Human
uaaauuaaacaauuu

SEQ ID NO: 3871612 - RNA, 20 nt, Human
uaaauuaaagccuuuaguau

SEQ ID NO: 3871613 - RNA, 16 nt, Human
uaaauuaacuuuuaua

SEQ ID NO: 3871614 - RNA, 17 nt, Human
uaaauuaacuuuuauaa

SEQ ID NO: 3871615 - RNA, 12 nt, Human
uaaauuaagaca

SEQ ID NO: 3871616 - RNA, 11 nt, Human
uaaauuaauau

SEQ ID NO: 3871617 - RNA, 15 nt, Human
uaaauuaauaucuuu

SEQ ID NO: 3871618 - RNA, 17 nt, Human
uaaauuaauaucuuucu

SEQ ID NO: 3871619 - RNA, 19 nt, Human
uaaauuacaauugucauuu

SEQ ID NO: 3871620 - RNA, 21 nt, Human
uaacuuccuuggacucauuuu

SEQ ID NO: 3871621 - RNA, 15 nt, Human
uaacuucuaaaacug

SEQ ID NO: 3871622 - RNA, 19 nt, Human
uaacuucuuauggaauuga

SEQ ID NO: 3871623 - RNA, 22 nt, Human
uaacuugaaccuaugaagcaau

SEQ ID NO: 3871624 - RNA, 13 nt, Human
uaacuugaugcau

SEQ ID NO: 3871625 - RNA, 16 nt, Human
uaacuugaugcaugug

SEQ ID NO: 3871626 - RNA, 19 nt, Human
uaacuugcuuaaaugugaa

SEQ ID NO: 3871627 - RNA, 15 nt, Human
uaacuugguuauaca

SEQ ID NO: 3871628 - RNA, 16 nt, Human
uaacuugguuauacau

SEQ ID NO: 3871629 - RNA, 14 nt, Human
uaacuuguaauaaa

SEQ ID NO: 3871630 - RNA, 15 nt, Human
uaacuuguaauaaac

SEQ ID NO: 3871631 - RNA, 17 nt, Human
uaacuugucuaaauaag

SEQ ID NO: 3871632 - RNA, 14 nt, Human
uaacuugucuuaaa

SEQ ID NO: 3871633 - RNA, 17 nt, Human
uaacuuguuuccaaugu

SEQ ID NO: 3871634 - RNA, 16 nt, Human
uaacuuuaauguuuuu

SEQ ID NO: 3871635 - RNA, 22 nt, Human
uaacuuuagaagugcauuucug

SEQ ID NO: 3871636 - RNA, 15 nt, Human
uaacuuuaucacauu

SEQ ID NO: 3871637 - RNA, 21 nt, Human
uaacuuuaucacauuauuugc

SEQ ID NO: 3871638 - RNA, 16 nt, Human
uaacuuuauguguaaa

SEQ ID NO: 3871639 - RNA, 23 nt, Human
uaacuuuauucuugaaagaagaa

SEQ ID NO: 3871640 - RNA, 22 nt, Human
uaacuuugcuuucaugaccauc

SEQ ID NO: 3871641 - RNA, 12 nt, Human
uaacuuuguuuu

SEQ ID NO: 3871642 - RNA, 18 nt, Human
uaacuuuguuuuauuuuc

SEQ ID NO: 3871643 - RNA, 20 nt, Human
uaacuuuuauaaacuuuacc

SEQ ID NO: 3871644 - RNA, 22 nt, Human
uaacuuuuauaaacuuuaccuu

SEQ ID NO: 3871645 - RNA, 13 nt, Human
uaacuuuuuauau

SEQ ID NO: 3871646 - RNA, 15 nt, Human
uaacuuuuuauauuc

SEQ ID NO: 3871647 - RNA, 21 nt, Human
uaacuuuuuuucuucuacuuu

SEQ ID NO: 3871648 - RNA, 20 nt, Human
uaagaaaaaauaacacacau

SEQ ID NO: 3871649 - RNA, 15 nt, Human
uaagaaaaacuuuuu

SEQ ID NO: 3871650 - RNA, 19 nt, Human
uaagaaaaacuuuuuuggu

SEQ ID NO: 3871651 - RNA, 14 nt, Human
uaagaaaaaucaug

SEQ ID NO: 3871652 - RNA, 16 nt, Human
uaagaaaaaucauguu

SEQ ID NO: 3871653 - RNA, 20 nt, Human
uaagaaaacaaucacacuca

SEQ ID NO: 3871654 - RNA, 16 nt, Human
uaagaaaacaucacug

SEQ ID NO: 3871655 - RNA, 18 nt, Human
uaagaaaagagauauuuu

SEQ ID NO: 3871656 - RNA, 22 nt, Human
uaagaaaagagauauuuuaaaa

SEQ ID NO: 3871657 - RNA, 16 nt, Human
uaagaaaagauguaga

SEQ ID NO: 3871658 - RNA, 12 nt, Human
uaagaaaagauu

SEQ ID NO: 3871659 - RNA, 19 nt, Human
uaagaaaagauuuuaauca

SEQ ID NO: 3871660 - RNA, 20 nt, Human
uaagaaaaguauuuugaagu

SEQ ID NO: 3871661 - RNA, 21 nt, Human
uaagaaaaguauuuugaaguu

SEQ ID NO: 3871662 - RNA, 19 nt, Human
uaagaaaauagagaugagc

SEQ ID NO: 3871663 - RNA, 21 nt, Human
uaagaaaauagagaugagcuu

SEQ ID NO: 3871664 - RNA, 23 nt, Human
uaagaaaauauauucuuucaaag

SEQ ID NO: 3871665 - RNA, 21 nt, Human
uaagaaaauaucacuugucaa

SEQ ID NO: 3871666 - RNA, 17 nt, Human
uaagaaaauauuuuguc

SEQ ID NO: 3871667 - RNA, 20 nt, Human
uaagaaaauauuuugucuaa

SEQ ID NO: 3871668 - RNA, 23 nt, Human
uaagaaaaugcuagaagaaaaca

SEQ ID NO: 3871669 - RNA, 13 nt, Human
uaagaaacauugg

SEQ ID NO: 3871670 - RNA, 24 nt, Human
uaagaaacuuauuucucauaucaa

SEQ ID NO: 3871671 - RNA, 14 nt, Human
uaagaaacuuuugu

SEQ ID NO: 3871672 - RNA, 15 nt, Human
uaagaaacuuuugua

SEQ ID NO: 3871673 - RNA, 21 nt, Human
uaagaaacuuuuuuauuuaaa

SEQ ID NO: 3871674 - RNA, 14 nt, Human
uaagaaagacaucu

SEQ ID NO: 3871675 - RNA, 16 nt, Human
uaagaaagacaucuuu

SEQ ID NO: 3871676 - RNA, 17 nt, Human
uaagaaagccugaguac

SEQ ID NO: 3871677 - RNA, 22 nt, Human
uaagaaaggaagcauuguaaaa

SEQ ID NO: 3871678 - RNA, 18 nt, Human
uaagaaagugaagcaaau

SEQ ID NO: 3871679 - RNA, 16 nt, Human
uaagaaauaaaacugu

SEQ ID NO: 3871680 - RNA, 15 nt, Human
uaagaaauacagacu

SEQ ID NO: 3871681 - RNA, 19 nt, Human
uaagaaauaucugugaaau

SEQ ID NO: 3871682 - RNA, 16 nt, Human
uaagaaauaugugaga

SEQ ID NO: 3871683 - RNA, 17 nt, Human
uaagaaauaugugagau

SEQ ID NO: 3871684 - RNA, 17 nt, Human
uaagaaauugaauacuu

SEQ ID NO: 3871685 - RNA, 22 nt, Human
uaagaaauugaauacuuugaau

SEQ ID NO: 3871686 - RNA, 23 nt, Human
uaagaaauugaauacuuugaaug

SEQ ID NO: 3871687 - RNA, 17 nt, Human
uaagaaauuuugccuuu

SEQ ID NO: 3871688 - RNA, 17 nt, Human
uaagaacaaaagaagca

SEQ ID NO: 3871689 - RNA, 22 nt, Human
uaagaacaaagagaaaaaauac

SEQ ID NO: 3871690 - RNA, 15 nt, Human
uaagaacaccugcau

SEQ ID NO: 3871691 - RNA, 19 nt, Human
uaagaaccuuuugagugcc

SEQ ID NO: 3871692 - RNA, 16 nt, Human
uaagaacuaaaauguu

SEQ ID NO: 3871693 - RNA, 21 nt, Human
uaagaagaaaauugcugugcc

SEQ ID NO: 3871694 - RNA, 19 nt, Human
uaagaagagacugggaaga

SEQ ID NO: 3871695 - RNA, 23 nt, Human
uaagaagcacgugguaaaacacu

SEQ ID NO: 3871696 - RNA, 18 nt, Human
uaagaagcuguuguacau

SEQ ID NO: 3871697 - RNA, 18 nt, Human
uaagaaggcaaaaaugua

SEQ ID NO: 3871698 - RNA, 19 nt, Human
uaagaagggauggauucca

SEQ ID NO: 3871699 - RNA, 19 nt, Human
uaagaauaaaauguugaaa

SEQ ID NO: 3871700 - RNA, 20 nt, Human
uaagaauaaaauguugaaaa

SEQ ID NO: 3871701 - RNA, 15 nt, Human
uaagaauaaacauuu

SEQ ID NO: 3871702 - RNA, 17 nt, Human
uaagaauaauaaaauca

SEQ ID NO: 3871703 - RNA, 15 nt, Human
uaagaauaauuuaua

SEQ ID NO: 3871704 - RNA, 16 nt, Human
uaagaauacagcuuuc

SEQ ID NO: 3871705 - RNA, 19 nt, Human
uaagaauaucuguaauggu

SEQ ID NO: 3871706 - RNA, 21 nt, Human
uaagaaucagaguagaaauaa

SEQ ID NO: 3871707 - RNA, 21 nt, Human
uaagaaucauuguaaacauua

SEQ ID NO: 3871708 - RNA, 13 nt, Human
uaagaaugaaaua

SEQ ID NO: 3871709 - RNA, 13 nt, Human
uaagaaugaguuu

SEQ ID NO: 3871710 - RNA, 13 nt, Human
uaagaaugaucug

SEQ ID NO: 3871711 - RNA, 15 nt, Human
uaagaaugcugguuu

SEQ ID NO: 3871712 - RNA, 21 nt, Human
uaagaaugcugguuuuccuaa

SEQ ID NO: 3871713 - RNA, 19 nt, Human
uaagaauguugguuuacuu

SEQ ID NO: 3871714 - RNA, 15 nt, Human
uaagaauucagacau

SEQ ID NO: 3871715 - RNA, 20 nt, Human
uaagaauucugauugauuug

SEQ ID NO: 3871716 - RNA, 22 nt, Human
uaagaauugaccaucugcuuuu

SEQ ID NO: 3871717 - RNA, 16 nt, Human
uaagaauuugguaaau

SEQ ID NO: 3871718 - RNA, 15 nt, Human
uaagaauuuuuuauu

SEQ ID NO: 3871719 - RNA, 23 nt, Human
uaagaauuuuuuauuuuuuggua

SEQ ID NO: 3871720 - RNA, 13 nt, Human
uaagacaaauaug

SEQ ID NO: 3871721 - RNA, 14 nt, Human
uaagacacaaaugc

SEQ ID NO: 3871722 - RNA, 23 nt, Human
uaagacacugaaaaaucuaagug

SEQ ID NO: 3871723 - RNA, 14 nt, Human
uaagacacuuccgu

SEQ ID NO: 3871724 - RNA, 14 nt, Human
uaagacacuuuuug

SEQ ID NO: 3871725 - RNA, 17 nt, Human
uaagacagaguauccug

SEQ ID NO: 3871726 - RNA, 14 nt, Human
uaagacagcaugug

SEQ ID NO: 3871727 - RNA, 17 nt, Human
uaagacauaacguuuuu

SEQ ID NO: 3871728 - RNA, 20 nt, Human
uaagacauaacguuuuuccu

SEQ ID NO: 3871729 - RNA, 17 nt, Human
uaagacaugauuuccuu

SEQ ID NO: 3871730 - RNA, 18 nt, Human
uaagaccaccaccucaga

SEQ ID NO: 3871731 - RNA, 22 nt, Human
uaagaccaccucaaauuuaaag

SEQ ID NO: 3871732 - RNA, 22 nt, Human
uaagacccuuauugcuguccug

SEQ ID NO: 3871733 - RNA, 16 nt, Human
uaagaccggaagcucc

SEQ ID NO: 3871734 - RNA, 14 nt, Human
uaagaccuacuguu

SEQ ID NO: 3871735 - RNA, 18 nt, Human
uaagaccuacuguucuaa

SEQ ID NO: 3871736 - RNA, 20 nt, Human
uaagaccuacuguucuaaag

SEQ ID NO: 3871737 - RNA, 22 nt, Human
uaagaccuacuguucuaaagcu

SEQ ID NO: 3871738 - RNA, 15 nt, Human
uaagacguguuugug

SEQ ID NO: 3871739 - RNA, 20 nt, Human
uaagacuauauauauaaaug

SEQ ID NO: 3871740 - RNA, 23 nt, Human
uaagacuauauauauaaauguau

SEQ ID NO: 3871741 - RNA, 15 nt, Human
uaagacucaaauguu

SEQ ID NO: 3871742 - RNA, 19 nt, Human
uaagacucaaauguucuaa

SEQ ID NO: 3871743 - RNA, 21 nt, Human
uaagacucaaauguucuaagu

SEQ ID NO: 3871744 - RNA, 18 nt, Human
uaagacucauucccuaga

SEQ ID NO: 3871745 - RNA, 22 nt, Human
uaagacuccucggccuggcucc

SEQ ID NO: 3871746 - RNA, 21 nt, Human
uaagacucugucucaaaaaua

SEQ ID NO: 3871747 - RNA, 17 nt, Human
uaagacuguagauaugu

SEQ ID NO: 3871748 - RNA, 17 nt, Human
uaagacuugacagugga

SEQ ID NO: 3871749 - RNA, 20 nt, Human
uaagagaaaagagagaaaca

SEQ ID NO: 3871750 - RNA, 15 nt, Human
uaagagaaacuuuau

SEQ ID NO: 3871751 - RNA, 20 nt, Human
uaagagaaacuuuauacauu

SEQ ID NO: 3871752 - RNA, 15 nt, Human
uaagagaaauggcaa

SEQ ID NO: 3871753 - RNA, 18 nt, Human
uaagagaagcuacuuugu

SEQ ID NO: 3871754 - RNA, 12 nt, Human
uaagagaaguag

SEQ ID NO: 3871755 - RNA, 20 nt, Human
uaagagaaguagaaaucaua

SEQ ID NO: 3871756 - RNA, 23 nt, Human
uaagagacagaauguaucuguga

SEQ ID NO: 3871757 - RNA, 14 nt, Human
uaagagacucagcc

SEQ ID NO: 3871758 - RNA, 14 nt, Human
uaagagagaaaucu

SEQ ID NO: 3871759 - RNA, 13 nt, Human
uaagagagaauga

SEQ ID NO: 3871760 - RNA, 14 nt, Human
uaagagagaaugag

SEQ ID NO: 3871761 - RNA, 15 nt, Human
uaagagagagagaca

SEQ ID NO: 3871762 - RNA, 20 nt, Human
uaagagcaaaagaauggcag

SEQ ID NO: 3871763 - RNA, 16 nt, Human
uacaugccuaccaaua

SEQ ID NO: 3871764 - RNA, 18 nt, Human
uacaugcuaagagaagua

SEQ ID NO: 3871765 - RNA, 19 nt, Human
uacaugcuaagagaaguag

SEQ ID NO: 3871766 - RNA, 14 nt, Human
uacaugcugcuaau

SEQ ID NO: 3871767 - RNA, 15 nt, Human
uacaugcuuauucca

SEQ ID NO: 3871768 - RNA, 23 nt, Human
uacaugcuuauuccaugacugcu

SEQ ID NO: 3871769 - RNA, 16 nt, Human
uacaugcuuugugaac

SEQ ID NO: 3871770 - RNA, 22 nt, Human
uacauggaauaacauguaauua

SEQ ID NO: 3871771 - RNA, 22 nt, Human
uacauggcagaguuuguguguu

SEQ ID NO: 3871772 - RNA, 16 nt, Human
uacauggccaguguga

SEQ ID NO: 3871773 - RNA, 21 nt, Human
uacauggcuggagcuagaauu

SEQ ID NO: 3871774 - RNA, 17 nt, Human
uacauggugcugggaga

SEQ ID NO: 3871775 - RNA, 23 nt, Human
uacauggugcugggagaggcagc

SEQ ID NO: 3871776 - RNA, 13 nt, Human
uacauguaauuug

SEQ ID NO: 3871777 - RNA, 14 nt, Human
uacauguaauuuga

SEQ ID NO: 3871778 - RNA, 13 nt, Human
uacauguaguagu

SEQ ID NO: 3871779 - RNA, 20 nt, Human
uacauguauuaaauuacauu

SEQ ID NO: 3871780 - RNA, 23 nt, Human
uacauguauuaaauuacauuugu

SEQ ID NO: 3871781 - RNA, 21 nt, Human
uacauguauugcacauuguaa

SEQ ID NO: 3871782 - RNA, 13 nt, Human
uacauguauuugu

SEQ ID NO: 3871783 - RNA, 17 nt, Human
uacaugugauacauuuu

SEQ ID NO: 3871784 - RNA, 20 nt, Human
uacaugugcacauugugcag

SEQ ID NO: 3871785 - RNA, 17 nt, Human
uacaugugccgaaugug

SEQ ID NO: 3871786 - RNA, 14 nt, Human
uacauguguagccu

SEQ ID NO: 3871787 - RNA, 12 nt, Human
uacaugugugua

SEQ ID NO: 3871788 - RNA, 13 nt, Human
uacauguguguau

SEQ ID NO: 3871789 - RNA, 19 nt, Human
uacauguguguauauaugu

SEQ ID NO: 3871790 - RNA, 16 nt, Human
uacauguguguauaug

SEQ ID NO: 3871791 - RNA, 12 nt, Human
uacauuaaacau

SEQ ID NO: 3871792 - RNA, 15 nt, Human
uacauuaauguuaau

SEQ ID NO: 3871793 - RNA, 23 nt, Human
uacauuaauguuaauucagcacu

SEQ ID NO: 3871794 - RNA, 14 nt, Human
uacauuaguaaaug

SEQ ID NO: 3871795 - RNA, 20 nt, Human
uacauuaguaaaugucuuug

SEQ ID NO: 3871796 - RNA, 21 nt, Human
uacauuaguaaaugucuuugu

SEQ ID NO: 3871797 - RNA, 23 nt, Human
uacauuaguaaaugucuuuguaa

SEQ ID NO: 3871798 - RNA, 13 nt, Human
uacauuauaaacg

SEQ ID NO: 3871799 - RNA, 24 nt, Human
uacauuaucuaacugugcucaaga

SEQ ID NO: 3871800 - RNA, 13 nt, Human
uacauucaaauuu

SEQ ID NO: 3871801 - RNA, 18 nt, Human
uacauucaaauuugucug

SEQ ID NO: 3871802 - RNA, 15 nt, Human
uacauucauuuagcu

SEQ ID NO: 3871803 - RNA, 22 nt, Human
uacauugccguggcaucuuaaa

SEQ ID NO: 3871804 - RNA, 17 nt, Human
uacauugcuggucuugu

SEQ ID NO: 3871805 - RNA, 22 nt, Human
uacauugcuggucuuguaagag

SEQ ID NO: 3871806 - RNA, 17 nt, Human
uacauuguaaauaguau

SEQ ID NO: 3871807 - RNA, 22 nt, Human
uacauuguacgaagaguauuuu

SEQ ID NO: 3871808 - RNA, 18 nt, Human
uacauugucauuuauaua

SEQ ID NO: 3871809 - RNA, 23 nt, Human
uacauugugggauguucagcacu

SEQ ID NO: 3871810 - RNA, 13 nt, Human
uacauuguugagc

SEQ ID NO: 3871811 - RNA, 23 nt, Human
uacauuguuugucugucuucaua

SEQ ID NO: 3871812 - RNA, 13 nt, Human
uacauuuaaaauu

SEQ ID NO: 3871813 - RNA, 18 nt, Human
uacauuuaaaauugcuau

SEQ ID NO: 3871814 - RNA, 23 nt, Human
uacauuuaaaccuuuuauuauaa

SEQ ID NO: 3871815 - RNA, 18 nt, Human
uacauuuaaagcauugcu

SEQ ID NO: 3871816 - RNA, 20 nt, Human
uacauuuaaagcauugcugu

SEQ ID NO: 3871817 - RNA, 15 nt, Human
uacauuuaauacagc

SEQ ID NO: 3871818 - RNA, 17 nt, Human
uacauuuaauugagaag

SEQ ID NO: 3871819 - RNA, 18 nt, Human
uacauuuacaaacugaag

SEQ ID NO: 3871820 - RNA, 12 nt, Human
uacauuuauaau

SEQ ID NO: 3871821 - RNA, 20 nt, Human
uacauuuauaguuguaacua

SEQ ID NO: 3871822 - RNA, 12 nt, Human
uacauuuaugau

SEQ ID NO: 3871823 - RNA, 16 nt, Human
uacauuuaugauuuaa

SEQ ID NO: 3871824 - RNA, 17 nt, Human
uacauuuaugauuuaau

SEQ ID NO: 3871825 - RNA, 18 nt, Human
uacauuucacauuauucu

SEQ ID NO: 3871826 - RNA, 18 nt, Human
uacauuucuccuuugaua

SEQ ID NO: 3871827 - RNA, 14 nt, Human
uacauuucugaaau

SEQ ID NO: 3871828 - RNA, 21 nt, Human
uacauuugcuccauccuccug

SEQ ID NO: 3871829 - RNA, 19 nt, Human
uacauuugggaguuuuuau

SEQ ID NO: 3871830 - RNA, 16 nt, Human
uacauuuguauaaaau

SEQ ID NO: 3871831 - RNA, 23 nt, Human
uacauuuguauguugugaagaug

SEQ ID NO: 3871832 - RNA, 16 nt, Human
uacauuugugagauuc

SEQ ID NO: 3871833 - RNA, 13 nt, Human
uacauuuuacaca

SEQ ID NO: 3871834 - RNA, 18 nt, Human
uacauuuuacacacugua

SEQ ID NO: 3871835 - RNA, 12 nt, Human
uacauuuuaugg

SEQ ID NO: 3871836 - RNA, 15 nt, Human
uacauuuucuaagaa

SEQ ID NO: 3871837 - RNA, 19 nt, Human
uacauuuucuaagaaacau

SEQ ID NO: 3871838 - RNA, 14 nt, Human
uacauuuuguacca

SEQ ID NO: 3871839 - RNA, 21 nt, Human
uacauuuuguauauuuguauu

SEQ ID NO: 3871840 - RNA, 18 nt, Human
uacauuuuguuguaaaaa

SEQ ID NO: 3871841 - RNA, 22 nt, Human
uacauuuuguuguaaaaagaaa

SEQ ID NO: 3871842 - RNA, 14 nt, Human
uacauuuuuaagug

SEQ ID NO: 3871843 - RNA, 23 nt, Human
uacauuuuuaagugcugcauuua

SEQ ID NO: 3871844 - RNA, 19 nt, Human
uacauuuuuacaauaaaua

SEQ ID NO: 3871845 - RNA, 20 nt, Human
uacauuuuuugggcagcaau

SEQ ID NO: 3871846 - RNA, 22 nt, Human
uaccaaaaaucucaauauuuca

SEQ ID NO: 3871847 - RNA, 13 nt, Human
uaccaaaauuuua

SEQ ID NO: 3871848 - RNA, 12 nt, Human
uaccaaacagca

SEQ ID NO: 3871849 - RNA, 18 nt, Human
uaccaaaccgccagcgaa

SEQ ID NO: 3871850 - RNA, 19 nt, Human
uaccaaagugaccuaccca

SEQ ID NO: 3871851 - RNA, 15 nt, Human
uaccaaaguuuuauc

SEQ ID NO: 3871852 - RNA, 17 nt, Human
uaccaaaguuuuaucaa

SEQ ID NO: 3871853 - RNA, 18 nt, Human
uaccaaauagcuucuguu

SEQ ID NO: 3871854 - RNA, 23 nt, Human
uaccaaauuaaaaaaaaauugua

SEQ ID NO: 3871855 - RNA, 14 nt, Human
uaccaacuggaagc

SEQ ID NO: 3871856 - RNA, 12 nt, Human
uaccaacuuuac

SEQ ID NO: 3871857 - RNA, 12 nt, Human
uaccaacuuuca

SEQ ID NO: 3871858 - RNA, 17 nt, Human
uaccaacuuucuguaaa

SEQ ID NO: 3871859 - RNA, 18 nt, Human
uaccaaggucuucuuaau

SEQ ID NO: 3871860 - RNA, 14 nt, Human
uaccaagucaaacu

SEQ ID NO: 3871861 - RNA, 14 nt, Human
uaccaagugaaauu

SEQ ID NO: 3871862 - RNA, 21 nt, Human
uaccaaguuucagguauuaag

SEQ ID NO: 3871863 - RNA, 22 nt, Human
uaccaauagauuccccauugcc

SEQ ID NO: 3871864 - RNA, 23 nt, Human
uaccaauauuuaaucuuuuauga

SEQ ID NO: 3871865 - RNA, 13 nt, Human
uaccaaucauauu

SEQ ID NO: 3871866 - RNA, 22 nt, Human
uaccaaucauauuaauacaaug

SEQ ID NO: 3871867 - RNA, 19 nt, Human
uaccaaucauuuuaauuau

SEQ ID NO: 3871868 - RNA, 22 nt, Human
uaccaaucauuuuaauuauuau

SEQ ID NO: 3871869 - RNA, 14 nt, Human
uaccacagugucug

SEQ ID NO: 3871870 - RNA, 14 nt, Human
uaccaccccuuccu

SEQ ID NO: 3871871 - RNA, 14 nt, Human
uaccaccugacauu

SEQ ID NO: 3871872 - RNA, 16 nt, Human
uaccacgaaauacuua

SEQ ID NO: 3871873 - RNA, 18 nt, Human
uaccacggccuccuuucc

SEQ ID NO: 3871874 - RNA, 13 nt, Human
uaccacucuguaa

SEQ ID NO: 3871875 - RNA, 15 nt, Human
uaccacucuguaauu

SEQ ID NO: 3871876 - RNA, 16 nt, Human
uaccacugaaucugua

SEQ ID NO: 3871877 - RNA, 18 nt, Human
uaccacugaaucuguaca

SEQ ID NO: 3871878 - RNA, 22 nt, Human
uaccacugcugauauuuucucu

SEQ ID NO: 3871879 - RNA, 13 nt, Human
uaccagaaagcag

SEQ ID NO: 3871880 - RNA, 22 nt, Human
uaccagacgguucaccagccuc

SEQ ID NO: 3871881 - RNA, 23 nt, Human
uaccagacgguucaccagccucu

SEQ ID NO: 3871882 - RNA, 23 nt, Human
uaccagacuguguauucauugaa

SEQ ID NO: 3871883 - RNA, 15 nt, Human
uaccagauaaaauua

SEQ ID NO: 3871884 - RNA, 14 nt, Human
uaccagauaacuuu

SEQ ID NO: 3871885 - RNA, 18 nt, Human
uaccagaugaugggggag

SEQ ID NO: 3871886 - RNA, 21 nt, Human
uaccagcaagaauaaaaaaga

SEQ ID NO: 3871887 - RNA, 20 nt, Human
uaccagcagaaggauuuuuu

SEQ ID NO: 3871888 - RNA, 19 nt, Human
uaccagcccuggggcuggg

SEQ ID NO: 3871889 - RNA, 20 nt, Human
uaccagcccuggggcugggc

SEQ ID NO: 3871890 - RNA, 21 nt, Human
uaccagccuccguauuucaga

SEQ ID NO: 3871891 - RNA, 20 nt, Human
uaccagcgaggaggcuccag

SEQ ID NO: 3871892 - RNA, 17 nt, Human
uaccagcgcccgcuggg

SEQ ID NO: 3871893 - RNA, 13 nt, Human
uaccagcugcgcu

SEQ ID NO: 3871894 - RNA, 14 nt, Human
uaccagcugcgcuu

SEQ ID NO: 3871895 - RNA, 22 nt, Human
uaccaggccgccccagccucug

SEQ ID NO: 3871896 - RNA, 19 nt, Human
uaccagggacugaggggag

SEQ ID NO: 3871897 - RNA, 18 nt, Human
uaccaggucuccuccacc

SEQ ID NO: 3871898 - RNA, 15 nt, Human
uaccaguauuuagaa

SEQ ID NO: 3871899 - RNA, 18 nt, Human
uaccaguauuuagaagcc

SEQ ID NO: 3871900 - RNA, 14 nt, Human
uaccagucucacau

SEQ ID NO: 3871901 - RNA, 16 nt, Human
uaccagugaaccaaag

SEQ ID NO: 3871902 - RNA, 13 nt, Human
uaccagugaauuu

SEQ ID NO: 3871903 - RNA, 14 nt, Human
uaccagugaauuuu

SEQ ID NO: 3871904 - RNA, 14 nt, Human
uaccagugcaggcu

SEQ ID NO: 3871905 - RNA, 20 nt, Human
uaccagugcaggcuggccag

SEQ ID NO: 3871906 - RNA, 21 nt, Human
uaccagugcaggcuggccagc

SEQ ID NO: 3871907 - RNA, 13 nt, Human
uaguuuucuuguu

SEQ ID NO: 3871908 - RNA, 14 nt, Human
uaguuuucuuguug

SEQ ID NO: 3871909 - RNA, 18 nt, Human
uaguuuugugaaggugau

SEQ ID NO: 3871910 - RNA, 14 nt, Human
uaguuuuucauuaa

SEQ ID NO: 3871911 - RNA, 21 nt, Human
uaguuuuucauuaaauaaauu

SEQ ID NO: 3871912 - RNA, 10 nt, Human
uaguuuuugu

SEQ ID NO: 3871913 - RNA, 17 nt, Human
uaguuuuuucaucuuca

SEQ ID NO: 3871914 - RNA, 21 nt, Human
uaguuuuuucaucuucaguug

SEQ ID NO: 3871915 - RNA, 18 nt, Human
uaguuuuuucuuccuuuu

SEQ ID NO: 3871916 - RNA, 23 nt, Human
uaguuuuuucuuccuuuucacug

SEQ ID NO: 3871917 - RNA, 14 nt, Human
uauaaaaaaaauag

SEQ ID NO: 3871918 - RNA, 19 nt, Human
uauaaaaaaaaugaaaugu

SEQ ID NO: 3871919 - RNA, 22 nt, Human
uauaaaaaaucaugccaguauu

SEQ ID NO: 3871920 - RNA, 13 nt, Human
uauaaaaaauggu

SEQ ID NO: 3871921 - RNA, 16 nt, Human
uauaaaaaaugguuca

SEQ ID NO: 3871922 - RNA, 17 nt, Human
uauaaaaaaugguucag

SEQ ID NO: 3871923 - RNA, 20 nt, Human
uauaaaaaccccaaacuguu

SEQ ID NO: 3871924 - RNA, 23 nt, Human
uauaaaaagaaaagauaaagaug

SEQ ID NO: 3871925 - RNA, 18 nt, Human
uauaaaaagcuuccauga

SEQ ID NO: 3871926 - RNA, 19 nt, Human
uauaaaaauaaaaaacacu

SEQ ID NO: 3871927 - RNA, 21 nt, Human
uauaaaaauagauaauuaaaa

SEQ ID NO: 3871928 - RNA, 17 nt, Human
uauaaaacaggucaaua

SEQ ID NO: 3871929 - RNA, 22 nt, Human
uauaaaacugcguuaaaggcuc

SEQ ID NO: 3871930 - RNA, 16 nt, Human
uauaaaacuguacuuc

SEQ ID NO: 3871931 - RNA, 14 nt, Human
uauaaaagaaacac

SEQ ID NO: 3871932 - RNA, 18 nt, Human
uauaaaagacugucuuaa

SEQ ID NO: 3871933 - RNA, 11 nt, Human
uauaaaagaug

SEQ ID NO: 3871934 - RNA, 14 nt, Human
uauaaaagccuguu

SEQ ID NO: 3871935 - RNA, 19 nt, Human
uauaaaagccuguuuaaga

SEQ ID NO: 3871936 - RNA, 20 nt, Human
uauaaaagccuguuuaagag

SEQ ID NO: 3871937 - RNA, 18 nt, Human
uauaaaagcuauggugag

SEQ ID NO: 3871938 - RNA, 20 nt, Human
uauaaaaggcaaauguguac

SEQ ID NO: 3871939 - RNA, 22 nt, Human
uauaaaagugauuguuggcaca

SEQ ID NO: 3871940 - RNA, 12 nt, Human
uauaaaauacag

SEQ ID NO: 3871941 - RNA, 15 nt, Human
uauaaaauacauagu

SEQ ID NO: 3871942 - RNA, 12 nt, Human
uauaaaauagac

SEQ ID NO: 3871943 - RNA, 19 nt, Human
uauaaaauaguuguccaua

SEQ ID NO: 3871944 - RNA, 23 nt, Human
uauaaaauaugaagacauaaacc

SEQ ID NO: 3871945 - RNA, 15 nt, Human
uauaaaauauuuuca

SEQ ID NO: 3871946 - RNA, 20 nt, Human
uauaaaauggcaacaaacug

SEQ ID NO: 3871947 - RNA, 18 nt, Human
uauaaaauguaucaacac

SEQ ID NO: 3871948 - RNA, 16 nt, Human
uauaaaauuaaagaaa

SEQ ID NO: 3871949 - RNA, 15 nt, Human
uauaaaauuagaaag

SEQ ID NO: 3871950 - RNA, 18 nt, Human
uauaaaauuagaaagcaa

SEQ ID NO: 3871951 - RNA, 20 nt, Human
uauaaaauuaugagauuggu

SEQ ID NO: 3871952 - RNA, 15 nt, Human
uauaaacaagaaaaa

SEQ ID NO: 3871953 - RNA, 20 nt, Human
uauaaacaagaaaaauaaag

SEQ ID NO: 3871954 - RNA, 21 nt, Human
uauaaacaagaaaaauaaaga

SEQ ID NO: 3871955 - RNA, 22 nt, Human
uauaaacaagaaugaagguuuu

SEQ ID NO: 3871956 - RNA, 12 nt, Human
uauaaacacugu

SEQ ID NO: 3871957 - RNA, 13 nt, Human
uauaaacacuguu

SEQ ID NO: 3871958 - RNA, 17 nt, Human
uauaaacagaaauggaa

SEQ ID NO: 3871959 - RNA, 20 nt, Human
uauaaacagacaauauguga

SEQ ID NO: 3871960 - RNA, 14 nt, Human
uauaaacaucacac

SEQ ID NO: 3871961 - RNA, 22 nt, Human
uauaaacaugcuugcauuauau

SEQ ID NO: 3871962 - RNA, 18 nt, Human
uauaaaccgaacugaugu

SEQ ID NO: 3871963 - RNA, 15 nt, Human
uauaaaccuaaaaaa

SEQ ID NO: 3871964 - RNA, 20 nt, Human
uauaaaccuaaaaaagauau

SEQ ID NO: 3871965 - RNA, 23 nt, Human
uauaaacuuagugcggacaaguu

SEQ ID NO: 3871966 - RNA, 11 nt, Human
uauaaacuuua

SEQ ID NO: 3871967 - RNA, 15 nt, Human
uauaaacuuuaccuu

SEQ ID NO: 3871968 - RNA, 21 nt, Human
uauaaacuuuagaguagcaug

SEQ ID NO: 3871969 - RNA, 18 nt, Human
uauaaagaagaacuugca

SEQ ID NO: 3871970 - RNA, 12 nt, Human
uauaaagaauag

SEQ ID NO: 3871971 - RNA, 17 nt, Human
uauaaagagaaaauuga

SEQ ID NO: 3871972 - RNA, 18 nt, Human
uauaaagagaaaauugaa

SEQ ID NO: 3871973 - RNA, 21 nt, Human
uauaaagagaaaauugaauuu

SEQ ID NO: 3871974 - RNA, 19 nt, Human
uauaaagcaucuaaacuuu

SEQ ID NO: 3871975 - RNA, 12 nt, Human
uauaaagcauuu

SEQ ID NO: 3871976 - RNA, 22 nt, Human
uauaaagcgauauacagaugaa

SEQ ID NO: 3871977 - RNA, 21 nt, Human
uauaaaggaaaaaagagaagu

SEQ ID NO: 3871978 - RNA, 19 nt, Human
uauaaagggggagggaaau

SEQ ID NO: 3871979 - RNA, 21 nt, Human
uauaaagggggagggaaauag

SEQ ID NO: 3871980 - RNA, 15 nt, Human
uauaaaguauucuuu

SEQ ID NO: 3871981 - RNA, 18 nt, Human
uauaaaguauucuuuuuc

SEQ ID NO: 3871982 - RNA, 13 nt, Human
uauaaagugcuug

SEQ ID NO: 3871983 - RNA, 18 nt, Human
uauaaagugcuuguguaa

SEQ ID NO: 3871984 - RNA, 18 nt, Human
uauaaaguuuuauauauu

SEQ ID NO: 3871985 - RNA, 21 nt, Human
uauaaaguuuuauauauuaua

SEQ ID NO: 3871986 - RNA, 13 nt, Human
uauaaauaaauau

SEQ ID NO: 3871987 - RNA, 14 nt, Human
uauaaauaaauaua

SEQ ID NO: 3871988 - RNA, 16 nt, Human
uauaaauagaauguaa

SEQ ID NO: 3871989 - RNA, 19 nt, Human
uauaaauagaauguaaaug

SEQ ID NO: 3871990 - RNA, 10 nt, Human
uauaaauaua

SEQ ID NO: 3871991 - RNA, 13 nt, Human
uauaaauauauau

SEQ ID NO: 3871992 - RNA, 14 nt, Human
uauaaauauauaua

SEQ ID NO: 3871993 - RNA, 17 nt, Human
uauaaauauauauaaau

SEQ ID NO: 3871994 - RNA, 19 nt, Human
uauaaauauauauaaauau

SEQ ID NO: 3871995 - RNA, 15 nt, Human
uauaaauauauuuaa

SEQ ID NO: 3871996 - RNA, 15 nt, Human
uauaaaucaauguca

SEQ ID NO: 3871997 - RNA, 23 nt, Human
uauaaaucgcuuuugauaaucaa

SEQ ID NO: 3871998 - RNA, 13 nt, Human
uauaaaugagcaa

SEQ ID NO: 3871999 - RNA, 18 nt, Human
uauaaaugccaaagucuu

SEQ ID NO: 3872000 - RNA, 16 nt, Human
uauaaaugguguuuuu

SEQ ID NO: 3872001 - RNA, 19 nt, Human
uauaaauguauauacacau

SEQ ID NO: 3872002 - RNA, 11 nt, Human
uauaaaugucu

SEQ ID NO: 3872003 - RNA, 19 nt, Human
uauaaaugucuuuaaugca

SEQ ID NO: 3872004 - RNA, 12 nt, Human
uauaaaugugug

SEQ ID NO: 3872005 - RNA, 12 nt, Human
uauaaauuaaau

SEQ ID NO: 3872006 - RNA, 23 nt, Human
uauaaauuaaauauauguaugua

SEQ ID NO: 3872007 - RNA, 15 nt, Human
uauaaauuauauucc

SEQ ID NO: 3872008 - RNA, 14 nt, Human
uauaaauuauguuu

SEQ ID NO: 3872009 - RNA, 16 nt, Human
uauaaauuauguuuau

SEQ ID NO: 3872010 - RNA, 13 nt, Human
uauaaauucacuu

SEQ ID NO: 3872011 - RNA, 13 nt, Human
uauaaauucugug

SEQ ID NO: 3872012 - RNA, 17 nt, Human
uauaaauucuguggguc

SEQ ID NO: 3872013 - RNA, 22 nt, Human
uauaaauugucuuuaaaaacug

SEQ ID NO: 3872014 - RNA, 15 nt, Human
uauaaauuuauuuac

SEQ ID NO: 3872015 - RNA, 17 nt, Human
uauaaauuuuuuuuguu

SEQ ID NO: 3872016 - RNA, 21 nt, Human
uauaaauuuuuuuuguuucau

SEQ ID NO: 3872017 - RNA, 20 nt, Human
uauaacagauacauuucccu

SEQ ID NO: 3872018 - RNA, 12 nt, Human
uauaacagguua

SEQ ID NO: 3872019 - RNA, 13 nt, Human
uauaacagguuau

SEQ ID NO: 3872020 - RNA, 15 nt, Human
uauaacagguuauuu

SEQ ID NO: 3872021 - RNA, 16 nt, Human
uauaacaguguuuaaa

SEQ ID NO: 3872022 - RNA, 16 nt, Human
uauaaccaauguuuaa

SEQ ID NO: 3872023 - RNA, 20 nt, Human
uauaaccacaaagcacaguu

SEQ ID NO: 3872024 - RNA, 16 nt, Human
uauaaccagacacaua

SEQ ID NO: 3872025 - RNA, 20 nt, Human
uauaaccaguguuguggauu

SEQ ID NO: 3872026 - RNA, 16 nt, Human
uauaacccuguuacaa

SEQ ID NO: 3872027 - RNA, 19 nt, Human
uauaacccuguuacaaagc

SEQ ID NO: 3872028 - RNA, 17 nt, Human
uauaaccuaguuaaaga

SEQ ID NO: 3872029 - RNA, 22 nt, Human
uauaaccuaguuaaagaaagga

SEQ ID NO: 3872030 - RNA, 17 nt, Human
uauaacgugauacauuu

SEQ ID NO: 3872031 - RNA, 19 nt, Human
uauaacguguucaauauuu

SEQ ID NO: 3872032 - RNA, 14 nt, Human
uauaacuaacaugu

SEQ ID NO: 3872033 - RNA, 19 nt, Human
uauaacuauguugauaaaa

SEQ ID NO: 3872034 - RNA, 16 nt, Human
uauaacucaucauaaa

SEQ ID NO: 3872035 - RNA, 17 nt, Human
uauaacucaucauaaaa

SEQ ID NO: 3872036 - RNA, 18 nt, Human
uauaacucaucauaaaau

SEQ ID NO: 3872037 - RNA, 23 nt, Human
uauaacucugcacuacuccucug

SEQ ID NO: 3872038 - RNA, 20 nt, Human
uauaacugccuuaaaacuuu

SEQ ID NO: 3872039 - RNA, 17 nt, Human
uauaacuuauauuguaa

SEQ ID NO: 3872040 - RNA, 19 nt, Human
uauaacuuauauuguaaga

SEQ ID NO: 3872041 - RNA, 24 nt, Human
uauaacuuauauuguaagaaauac

SEQ ID NO: 3872042 - RNA, 13 nt, Human
uauaacuugucua

SEQ ID NO: 3872043 - RNA, 12 nt, Human
uauaacuuuuua

SEQ ID NO: 3872044 - RNA, 12 nt, Human
uauaagaaaaac

SEQ ID NO: 3872045 - RNA, 14 nt, Human
uauaagaaagacau

SEQ ID NO: 3872046 - RNA, 15 nt, Human
uauaagaaagccuga

SEQ ID NO: 3872047 - RNA, 17 nt, Human
uauaagaaaugcauaug

SEQ ID NO: 3872048 - RNA, 12 nt, Human
uauaagacucuc

SEQ ID NO: 3872049 - RNA, 22 nt, Human
uauaagagcuuccaauuuuccu

SEQ ID NO: 3872050 - RNA, 19 nt, Human
uauaagauccuagauccua

SEQ ID NO: 3872051 - RNA, 21 nt, Human
uauaagauccuagauccuaag

SEQ ID NO: 3872052 - RNA, 23 nt, Human
uauauaaaggaaaaaagagaagu

SEQ ID NO: 3872053 - RNA, 22 nt, Human
uauauaaauauauuauuacuug

SEQ ID NO: 3872054 - RNA, 12 nt, Human
uauauaaaugcu

SEQ ID NO: 3872055 - RNA, 15 nt, Human
uauauaaaugcuuuu

SEQ ID NO: 3872056 - RNA, 18 nt, Human
uauauaaaugguuaaaag

SEQ ID NO: 3872057 - RNA, 22 nt, Human
uauauaaauguaaaaauaauaa

SEQ ID NO: 3872058 - RNA, 17 nt, Human
uauauaacagauacauu

SEQ ID NO: 3872059 - RNA, 17 nt, Human
uauauaacauauaugga

SEQ ID NO: 3872060 - RNA, 13 nt, Human
uauauaagaaaga

SEQ ID NO: 3872061 - RNA, 14 nt, Human
uauauaagaaagac

SEQ ID NO: 3872062 - RNA, 18 nt, Human
uauauaagauggaagcuu

SEQ ID NO: 3872063 - RNA, 19 nt, Human
uauauaaguguacauaugu

SEQ ID NO: 3872064 - RNA, 23 nt, Human
uauauaaguguacauaugugcug

SEQ ID NO: 3872065 - RNA, 15 nt, Human
uauauaaugguuuca

SEQ ID NO: 3872066 - RNA, 19 nt, Human
uauauaaugguuucaaaga

SEQ ID NO: 3872067 - RNA, 17 nt, Human
uauauaauuauguuauu

SEQ ID NO: 3872068 - RNA, 16 nt, Human
uauauaauucuguaca

SEQ ID NO: 3872069 - RNA, 13 nt, Human
uauauaauugcca

SEQ ID NO: 3872070 - RNA, 14 nt, Human
uauauaauugccaa

SEQ ID NO: 3872071 - RNA, 16 nt, Human
uauauacaauaacaua

SEQ ID NO: 3872072 - RNA, 13 nt, Human
uauauacacacac

SEQ ID NO: 3872073 - RNA, 14 nt, Human
uauauacacauaua

SEQ ID NO: 3872074 - RNA, 18 nt, Human
uauauacacauauaccua

SEQ ID NO: 3872075 - RNA, 22 nt, Human
uauauacaguaacuuuaugugu

SEQ ID NO: 3872076 - RNA, 15 nt, Human
uauauacauauauau

SEQ ID NO: 3872077 - RNA, 16 nt, Human
uauauacauauguaga

SEQ ID NO: 3872078 - RNA, 13 nt, Human
uauauacaugugu

SEQ ID NO: 3872079 - RNA, 19 nt, Human
uauauaccugcgcuuguuu

SEQ ID NO: 3872080 - RNA, 18 nt, Human
uauauacgcaucuauaaa

SEQ ID NO: 3872081 - RNA, 21 nt, Human
uauauacuugugguuuucaaa

SEQ ID NO: 3872082 - RNA, 17 nt, Human
uauauagaaauauauac

SEQ ID NO: 3872083 - RNA, 13 nt, Human
uauauagagaugu

SEQ ID NO: 3872084 - RNA, 20 nt, Human
uauauagcaagacauuauau

SEQ ID NO: 3872085 - RNA, 18 nt, Human
uauauagcagcaaaaaua

SEQ ID NO: 3872086 - RNA, 21 nt, Human
uauauagcaucuggaagauca

SEQ ID NO: 3872087 - RNA, 21 nt, Human
uauauagccaauauaacuauc

SEQ ID NO: 3872088 - RNA, 23 nt, Human
uauauaggcuauuuucuaaagac

SEQ ID NO: 3872089 - RNA, 17 nt, Human
uauauagguugugcaaa

SEQ ID NO: 3872090 - RNA, 12 nt, Human
uauauagguuuu

SEQ ID NO: 3872091 - RNA, 20 nt, Human
uauauagguuuuguuugcua

SEQ ID NO: 3872092 - RNA, 12 nt, Human
uauauauaaaga

SEQ ID NO: 3872093 - RNA, 13 nt, Human
uauauauaaauaa

SEQ ID NO: 3872094 - RNA, 14 nt, Human
uauauauaaauaaa

SEQ ID NO: 3872095 - RNA, 13 nt, Human
uauauauaaaugu

SEQ ID NO: 3872096 - RNA, 15 nt, Human
uauauauaagaaaga

SEQ ID NO: 3872097 - RNA, 20 nt, Human
uauauauaaucaucaaguaa

SEQ ID NO: 3872098 - RNA, 16 nt, Human
uauauauaauucugua

SEQ ID NO: 3872099 - RNA, 19 nt, Human
uauauauaauucuguacau

SEQ ID NO: 3872100 - RNA, 19 nt, Human
uauauauacauaacagggu

SEQ ID NO: 3872101 - RNA, 14 nt, Human
uauauauacauaca

SEQ ID NO: 3872102 - RNA, 15 nt, Human
uauauauacauauau

SEQ ID NO: 3872103 - RNA, 15 nt, Human
uauauauacauaugu

SEQ ID NO: 3872104 - RNA, 16 nt, Human
uauauauagcagcuuu

SEQ ID NO: 3872105 - RNA, 11 nt, Human
uauauauauaa

SEQ ID NO: 3872106 - RNA, 14 nt, Human
uauauauauaaaca

SEQ ID NO: 3872107 - RNA, 14 nt, Human
uauauauauaaaug

SEQ ID NO: 3872108 - RNA, 15 nt, Human
uauauauauacacac

SEQ ID NO: 3872109 - RNA, 11 nt, Human
uauauauauau

SEQ ID NO: 3872110 - RNA, 13 nt, Human
uauauauauauaa

SEQ ID NO: 3872111 - RNA, 14 nt, Human
uauauauauauaaa

SEQ ID NO: 3872112 - RNA, 15 nt, Human
uauauauauauacuu

SEQ ID NO: 3872113 - RNA, 13 nt, Human
uauauauauauau

SEQ ID NO: 3872114 - RNA, 11 nt, Human
uauauauauca

SEQ ID NO: 3872115 - RNA, 14 nt, Human
uauauauaugcaua

SEQ ID NO: 3872116 - RNA, 14 nt, Human
uauauaucaguuug

SEQ ID NO: 3872117 - RNA, 18 nt, Human
uauauaucugcuguccag

SEQ ID NO: 3872118 - RNA, 21 nt, Human
uauauaucugcuguccagaca

SEQ ID NO: 3872119 - RNA, 13 nt, Human
uauauaugaaaac

SEQ ID NO: 3872120 - RNA, 15 nt, Human
uauauaugaaaacua

SEQ ID NO: 3872121 - RNA, 16 nt, Human
uauauaugaaaacuau

SEQ ID NO: 3872122 - RNA, 15 nt, Human
uauauaugccuuuuu

SEQ ID NO: 3872123 - RNA, 16 nt, Human
uauauauguguauaua

SEQ ID NO: 3872124 - RNA, 19 nt, Human
uauauauguguauauauac

SEQ ID NO: 3872125 - RNA, 16 nt, Human
uauauauguguaugua

SEQ ID NO: 3872126 - RNA, 18 nt, Human
uauauauguguguuuaaa

SEQ ID NO: 3872127 - RNA, 19 nt, Human
uauauauguugauuucuug

SEQ ID NO: 3872128 - RNA, 17 nt, Human
uauauauuauauggaaa

SEQ ID NO: 3872129 - RNA, 22 nt, Human
uauauauugguaacauccuuuc

SEQ ID NO: 3872130 - RNA, 15 nt, Human
uauauauuuauaacu

SEQ ID NO: 3872131 - RNA, 17 nt, Human
uauauauuucuauuauu

SEQ ID NO: 3872132 - RNA, 19 nt, Human
uauauauuuuuuucugaaa

SEQ ID NO: 3872133 - RNA, 22 nt, Human
uauaucaacagauaguuguguu

SEQ ID NO: 3872134 - RNA, 13 nt, Human
uauaucacccaga

SEQ ID NO: 3872135 - RNA, 18 nt, Human
uauaucagaaaagggaag

SEQ ID NO: 3872136 - RNA, 15 nt, Human
uauaucagacugcuu

SEQ ID NO: 3872137 - RNA, 21 nt, Human
uauaucagacugcuuugagaa

SEQ ID NO: 3872138 - RNA, 15 nt, Human
uauaucagccugagu

SEQ ID NO: 3872139 - RNA, 17 nt, Human
uauaucauucuaaagau

SEQ ID NO: 3872140 - RNA, 16 nt, Human
uauauccauguacugu

SEQ ID NO: 3872141 - RNA, 14 nt, Human
uauauccugugacu

SEQ ID NO: 3872142 - RNA, 18 nt, Human
uauauccugugacugucu

SEQ ID NO: 3872143 - RNA, 16 nt, Human
uauauccuuucuaaca

SEQ ID NO: 3872144 - RNA, 20 nt, Human
uauaucuauaaacacuguuu

SEQ ID NO: 3872145 - RNA, 19 nt, Human
uauaucuaucuauuugagg

SEQ ID NO: 3872146 - RNA, 19 nt, Human
uauaucucaaauuguaauu

SEQ ID NO: 3872147 - RNA, 12 nt, Human
uauaucuccuuu

SEQ ID NO: 3872148 - RNA, 16 nt, Human
uauaucuccuuuguau

SEQ ID NO: 3872149 - RNA, 15 nt, Human
uauaucucuauuuga

SEQ ID NO: 3872150 - RNA, 12 nt, Human
uauaucugaaaa

SEQ ID NO: 3872151 - RNA, 17 nt, Human
uauaucugaaaacugga

SEQ ID NO: 3872152 - RNA, 18 nt, Human
uauaucugaaaacuggaa

SEQ ID NO: 3872153 - RNA, 13 nt, Human
uauaucugcaaaa

SEQ ID NO: 3872154 - RNA, 17 nt, Human
uauaucugcuguccaga

SEQ ID NO: 3872155 - RNA, 16 nt, Human
uauaucugcuucagug

SEQ ID NO: 3872156 - RNA, 13 nt, Human
uauaucuggccuc

SEQ ID NO: 3872157 - RNA, 15 nt, Human
uauaucuguauguau

SEQ ID NO: 3872158 - RNA, 12 nt, Human
uauaugaaaacu

SEQ ID NO: 3872159 - RNA, 13 nt, Human
uauaugaacauag

SEQ ID NO: 3872160 - RNA, 18 nt, Human
uauaugaagaaaaucacu

SEQ ID NO: 3872161 - RNA, 16 nt, Human
uauaugaauaaagugu

SEQ ID NO: 3872162 - RNA, 21 nt, Human
uauaugauuuauaguuuguac

SEQ ID NO: 3872163 - RNA, 17 nt, Human
uauaugauuuuuaucca

SEQ ID NO: 3872164 - RNA, 21 nt, Human
uauaugcacuuauaauuuucc

SEQ ID NO: 3872165 - RNA, 18 nt, Human
uauaugccuuuuuccuag

SEQ ID NO: 3872166 - RNA, 14 nt, Human
uauaugcuuacuga

SEQ ID NO: 3872167 - RNA, 14 nt, Human
uauauggaaauaua

SEQ ID NO: 3872168 - RNA, 19 nt, Human
uauauggaaauauauauua

SEQ ID NO: 3872169 - RNA, 15 nt, Human
uauauggacauggca

SEQ ID NO: 3872170 - RNA, 13 nt, Human
uauauggauaaug

SEQ ID NO: 3872171 - RNA, 19 nt, Human
uauauggaugauucagaaa

SEQ ID NO: 3872172 - RNA, 18 nt, Human
uauauggcagaguuguaa

SEQ ID NO: 3872173 - RNA, 15 nt, Human
uauauggcauuugca

SEQ ID NO: 3872174 - RNA, 21 nt, Human
uauauggggaugguaguuuuu

SEQ ID NO: 3872175 - RNA, 15 nt, Human
uauaugguauauaua

SEQ ID NO: 3872176 - RNA, 18 nt, Human
uauaugguauauauacau

SEQ ID NO: 3872177 - RNA, 15 nt, Human
uauauggucuaaugu

SEQ ID NO: 3872178 - RNA, 12 nt, Human
uauauguacaug

SEQ ID NO: 3872179 - RNA, 18 nt, Human
uauauguacccucugaaa

SEQ ID NO: 3872180 - RNA, 19 nt, Human
uauauguaccguaggcuuu

SEQ ID NO: 3872181 - RNA, 15 nt, Human
uauauguagauguau

SEQ ID NO: 3872182 - RNA, 18 nt, Human
uauauguagauguaugca

SEQ ID NO: 3872183 - RNA, 20 nt, Human
uauauguagauguaugcaca

SEQ ID NO: 3872184 - RNA, 12 nt, Human
uauauguaugua

SEQ ID NO: 3872185 - RNA, 16 nt, Human
uauauguauguaaaaa

SEQ ID NO: 3872186 - RNA, 16 nt, Human
uauauguauguguuua

SEQ ID NO: 3872187 - RNA, 22 nt, Human
uauauguauguguuuagaauug

SEQ ID NO: 3872188 - RNA, 11 nt, Human
uauauguauuu

SEQ ID NO: 3872189 - RNA, 20 nt, Human
uauauguauuuaaaaaaauc

SEQ ID NO: 3872190 - RNA, 12 nt, Human
uauaugugagga

SEQ ID NO: 3872191 - RNA, 16 nt, Human
uauaugugaugaucua

SEQ ID NO: 3872192 - RNA, 17 nt, Human
uauauguguauauauac

SEQ ID NO: 3872193 - RNA, 14 nt, Human
uauaugugugccua

SEQ ID NO: 3872194 - RNA, 16 nt, Human
uauauguguguuuaaa

SEQ ID NO: 3872195 - RNA, 22 nt, Human
uauauguguguuuaaauaaagu

SEQ ID NO: 3872196 - RNA, 23 nt, Human
uauauguguguuuaaauaaagua

SEQ ID NO: 3872197 - RNA, 15 nt, Human
uauauguguugaaaa

SEQ ID NO: 3872198 - RNA, 16 nt, Human
uauauguguugaaaac

SEQ ID NO: 3872199 - RNA, 13 nt, Human
uaucuacucuccu

SEQ ID NO: 3872200 - RNA, 21 nt, Human
uaucuacucuccucaucucua

SEQ ID NO: 3872201 - RNA, 15 nt, Human
uaucuagauacugua

SEQ ID NO: 3872202 - RNA, 17 nt, Human
uaucuagguuuaugaca

SEQ ID NO: 3872203 - RNA, 23 nt, Human
uaucuaguaauauauuuaaaggg

SEQ ID NO: 3872204 - RNA, 16 nt, Human
uaucuaguaugaaauu

SEQ ID NO: 3872205 - RNA, 23 nt, Human
uaucuagugcagcugauuuuaac

SEQ ID NO: 3872206 - RNA, 18 nt, Human
uaucuaguucuaacagug

SEQ ID NO: 3872207 - RNA, 17 nt, Human
uaucuaguuuaauuaau

SEQ ID NO: 3872208 - RNA, 22 nt, Human
uaucuauaaaauagauauaaau

SEQ ID NO: 3872209 - RNA, 13 nt, Human
uaucuauaauuua

SEQ ID NO: 3872210 - RNA, 18 nt, Human
uaucuauacauaucuuua

SEQ ID NO: 3872211 - RNA, 23 nt, Human
uaucuauauaguaccuuugcucu

SEQ ID NO: 3872212 - RNA, 20 nt, Human
uaucuauauauaauucugua

SEQ ID NO: 3872213 - RNA, 15 nt, Human
uaucuauauaugugu

SEQ ID NO: 3872214 - RNA, 23 nt, Human
uaucuauauuuuacauaaauuua

SEQ ID NO: 3872215 - RNA, 23 nt, Human
uaucuaucuuccaaaugcaauuu

SEQ ID NO: 3872216 - RNA, 16 nt, Human
uaucuauguuuuacca

SEQ ID NO: 3872217 - RNA, 17 nt, Human
uaucuauuaauauaugu

SEQ ID NO: 3872218 - RNA, 15 nt, Human
uaucuauuguaagau

SEQ ID NO: 3872219 - RNA, 12 nt, Human
uaucuauuugag

SEQ ID NO: 3872220 - RNA, 10 nt, Human
uaucucagaa

SEQ ID NO: 3872221 - RNA, 13 nt, Human
uaucucagaaagu

SEQ ID NO: 3872222 - RNA, 19 nt, Human
uaucucagaaagugccuga

SEQ ID NO: 3872223 - RNA, 19 nt, Human
uaucucagauauuugcacc

SEQ ID NO: 3872224 - RNA, 16 nt, Human
uaucucagauguuaaa

SEQ ID NO: 3872225 - RNA, 19 nt, Human
uaucucagauguuaaaaua

SEQ ID NO: 3872226 - RNA, 13 nt, Human
uaucucagggccu

SEQ ID NO: 3872227 - RNA, 22 nt, Human
uaucucagucaugcauaaauau

SEQ ID NO: 3872228 - RNA, 23 nt, Human
uaucuccaggauugaagagcauu

SEQ ID NO: 3872229 - RNA, 14 nt, Human
uaucuccggcuccc

SEQ ID NO: 3872230 - RNA, 19 nt, Human
uaucuccggcucccagccu

SEQ ID NO: 3872231 - RNA, 16 nt, Human
uaucuccuagggcuau

SEQ ID NO: 3872232 - RNA, 16 nt, Human
uaucucgugggagagc

SEQ ID NO: 3872233 - RNA, 18 nt, Human
uaucucuauuuaauauuu

SEQ ID NO: 3872234 - RNA, 20 nt, Human
uaucucuauuuaauauuuau

SEQ ID NO: 3872235 - RNA, 18 nt, Human
uaucucugugugcacaaa

SEQ ID NO: 3872236 - RNA, 13 nt, Human
uaucucuucaguc

SEQ ID NO: 3872237 - RNA, 22 nt, Human
uaucucuuuugaauccaugcuu

SEQ ID NO: 3872238 - RNA, 23 nt, Human
uaucucuuuugaauccaugcuug

SEQ ID NO: 3872239 - RNA, 12 nt, Human
uaucugaaaacu

SEQ ID NO: 3872240 - RNA, 14 nt, Human
uaucugaaaaugua

SEQ ID NO: 3872241 - RNA, 17 nt, Human
uaucugaagucagaucu

SEQ ID NO: 3872242 - RNA, 20 nt, Human
uaucugaauuuuuaaacaag

SEQ ID NO: 3872243 - RNA, 15 nt, Human
uaucugaggaauucu

SEQ ID NO: 3872244 - RNA, 22 nt, Human
uaucugaggaauucuguauaga

SEQ ID NO: 3872245 - RNA, 17 nt, Human
uaucugcaggcagacac

SEQ ID NO: 3872246 - RNA, 16 nt, Human
uaucugccucucuugu

SEQ ID NO: 3872247 - RNA, 21 nt, Human
uaucugccucucuuguaauuu

SEQ ID NO: 3872248 - RNA, 13 nt, Human
uaucugcugucca

SEQ ID NO: 3872249 - RNA, 17 nt, Human
uaucugcuguccagaca

SEQ ID NO: 3872250 - RNA, 19 nt, Human
uaucuggaaguaaccauuu

SEQ ID NO: 3872251 - RNA, 18 nt, Human
uaucuggacaagccaacu

SEQ ID NO: 3872252 - RNA, 18 nt, Human
uaucuggauucaaauuua

SEQ ID NO: 3872253 - RNA, 14 nt, Human
uaucugggccuggg

SEQ ID NO: 3872254 - RNA, 16 nt, Human
uaucugggccugggcu

SEQ ID NO: 3872255 - RNA, 23 nt, Human
uaucuguagugagauagcauugu

SEQ ID NO: 3872256 - RNA, 15 nt, Human
uaucuguauuuaauu

SEQ ID NO: 3872257 - RNA, 17 nt, Human
uaucuguauuuaauuuu

SEQ ID NO: 3872258 - RNA, 20 nt, Human
uaucugucauuugagcaggg

SEQ ID NO: 3872259 - RNA, 21 nt, Human
uaucugucauuugagcagggc

SEQ ID NO: 3872260 - RNA, 23 nt, Human
uaucugucauuugagcagggcuc

SEQ ID NO: 3872261 - RNA, 12 nt, Human
uaucugucuuuc

SEQ ID NO: 3872262 - RNA, 15 nt, Human
uaucugucuuuccac

SEQ ID NO: 3872263 - RNA, 18 nt, Human
uaucugugcgugaaacac

SEQ ID NO: 3872264 - RNA, 19 nt, Human
uaucugugcgugaaacaca

SEQ ID NO: 3872265 - RNA, 20 nt, Human
uaucugugcgugaaacacac

SEQ ID NO: 3872266 - RNA, 14 nt, Human
uaucuguucuuuaa

SEQ ID NO: 3872267 - RNA, 22 nt, Human
uaucuguuuccugacauugucu

SEQ ID NO: 3872268 - RNA, 14 nt, Human
uaucuguuuuacug

SEQ ID NO: 3872269 - RNA, 18 nt, Human
uaucuguuuuacugcuuu

SEQ ID NO: 3872270 - RNA, 18 nt, Human
uaucuuaaagaaacagcu

SEQ ID NO: 3872271 - RNA, 23 nt, Human
uaucuuaaagaaacagcuuucaa

SEQ ID NO: 3872272 - RNA, 13 nt, Human
uaucuuaauuuug

SEQ ID NO: 3872273 - RNA, 19 nt, Human
uaucuuacaaaguguauuu

SEQ ID NO: 3872274 - RNA, 13 nt, Human
uaucuuacgaaaa

SEQ ID NO: 3872275 - RNA, 22 nt, Human
uaucuuauaaaguggaaguaug

SEQ ID NO: 3872276 - RNA, 18 nt, Human
uaucuuauacuguacaau

SEQ ID NO: 3872277 - RNA, 12 nt, Human
uaucuucacaua

SEQ ID NO: 3872278 - RNA, 10 nt, Human
uaucuucauc

SEQ ID NO: 3872279 - RNA, 23 nt, Human
uaucuucauguaaauugacugua

SEQ ID NO: 3872280 - RNA, 20 nt, Human
uaucuucguuaguaaucugu

SEQ ID NO: 3872281 - RNA, 17 nt, Human
uaucuucguucuuguua

SEQ ID NO: 3872282 - RNA, 15 nt, Human
uaucuucucaaguuc

SEQ ID NO: 3872283 - RNA, 22 nt, Human
uaucuucucaaguucuaagauu

SEQ ID NO: 3872284 - RNA, 14 nt, Human
uaucuugaagacuu

SEQ ID NO: 3872285 - RNA, 15 nt, Human
uaucuugaagacuuu

SEQ ID NO: 3872286 - RNA, 17 nt, Human
uaucuuggacugacauu

SEQ ID NO: 3872287 - RNA, 16 nt, Human
uaucuuggcagguagg

SEQ ID NO: 3872288 - RNA, 11 nt, Human
uaucuuggccu

SEQ ID NO: 3872289 - RNA, 15 nt, Human
uaucuugucucuggg

SEQ ID NO: 3872290 - RNA, 13 nt, Human
uaucuuguguugu

SEQ ID NO: 3872291 - RNA, 16 nt, Human
uaucuuguguuguccu

SEQ ID NO: 3872292 - RNA, 19 nt, Human
uaucuuucgcacagcaguu

SEQ ID NO: 3872293 - RNA, 23 nt, Human
uaucuuucgugauaaacuuugcu

SEQ ID NO: 3872294 - RNA, 15 nt, Human
uaucuuugaauaugu

SEQ ID NO: 3872295 - RNA, 22 nt, Human
uaucuuugauucuccuucagcc

SEQ ID NO: 3872296 - RNA, 11 nt, Human
uaucuuugcca

SEQ ID NO: 3872297 - RNA, 18 nt, Human
uaucuuugugauaauuua

SEQ ID NO: 3872298 - RNA, 14 nt, Human
uaucuuuuauguuu

SEQ ID NO: 3872299 - RNA, 19 nt, Human
uaucuuuuauguuugaaua

SEQ ID NO: 3872300 - RNA, 13 nt, Human
uaucuuuucuaca

SEQ ID NO: 3872301 - RNA, 14 nt, Human
uaucuuuucuacag

SEQ ID NO: 3872302 - RNA, 19 nt, Human
uaucuuuucuacagcaaau

SEQ ID NO: 3872303 - RNA, 13 nt, Human
uaucuuuucuuua

SEQ ID NO: 3872304 - RNA, 14 nt, Human
uaucuuuucuuuag

SEQ ID NO: 3872305 - RNA, 20 nt, Human
uaucuuuucuuuagagaacu

SEQ ID NO: 3872306 - RNA, 17 nt, Human
uaucuuuuguuuccuuu

SEQ ID NO: 3872307 - RNA, 22 nt, Human
uaucuuuuguuuccuuuuuucc

SEQ ID NO: 3872308 - RNA, 18 nt, Human
uaucuuuuuauugaugug

SEQ ID NO: 3872309 - RNA, 19 nt, Human
uaucuuuuuauugaugugc

SEQ ID NO: 3872310 - RNA, 15 nt, Human
uaucuuuuuucaaaa

SEQ ID NO: 3872311 - RNA, 18 nt, Human
uaugaaaaacaaaaauaa

SEQ ID NO: 3872312 - RNA, 18 nt, Human
uaugaaaaauaugauauu

SEQ ID NO: 3872313 - RNA, 19 nt, Human
uaugaaaaauuggggagga

SEQ ID NO: 3872314 - RNA, 16 nt, Human
uaugaaaacuauacaa

SEQ ID NO: 3872315 - RNA, 15 nt, Human
uaugaaaacuuauga

SEQ ID NO: 3872316 - RNA, 19 nt, Human
uaugaaaagcuagaauuga

SEQ ID NO: 3872317 - RNA, 14 nt, Human
uaugaaaauggaaa

SEQ ID NO: 3872318 - RNA, 22 nt, Human
uaugaaagauggcugugccucu

SEQ ID NO: 3872319 - RNA, 23 nt, Human
uaugaaagauggcugugccucug

SEQ ID NO: 3872320 - RNA, 14 nt, Human
uaugaaagauugug

SEQ ID NO: 3872321 - RNA, 13 nt, Human
uaugaaauaaaga

SEQ ID NO: 3872322 - RNA, 17 nt, Human
uaugaaaugugcacuuu

SEQ ID NO: 3872323 - RNA, 19 nt, Human
uaugaaauuauauaaguau

SEQ ID NO: 3872324 - RNA, 17 nt, Human
uaugaacacuuaaauua

SEQ ID NO: 3872325 - RNA, 18 nt, Human
uaugaacccuuuguuucu

SEQ ID NO: 3872326 - RNA, 19 nt, Human
uaugaacccuuuguuucuu

SEQ ID NO: 3872327 - RNA, 22 nt, Human
uaugaacuugaggacacauguc

SEQ ID NO: 3872328 - RNA, 13 nt, Human
uaugaagaaaaaa

SEQ ID NO: 3872329 - RNA, 20 nt, Human
uaugaagaaaaaauacauuu

SEQ ID NO: 3872330 - RNA, 16 nt, Human
uaugaagaacugagga

SEQ ID NO: 3872331 - RNA, 17 nt, Human
uaugaagaacugaggag

SEQ ID NO: 3872332 - RNA, 15 nt, Human
uaugaagaagagagu

SEQ ID NO: 3872333 - RNA, 21 nt, Human
uaugaagaaggugaauagcca

SEQ ID NO: 3872334 - RNA, 14 nt, Human
uaugaagacauaaa

SEQ ID NO: 3872335 - RNA, 21 nt, Human
uaugaagcuaccucaaacuuc

SEQ ID NO: 3872336 - RNA, 14 nt, Human
uaugaaguaaagaa

SEQ ID NO: 3872337 - RNA, 22 nt, Human
uaugaaguuuaaaacaguauuu

SEQ ID NO: 3872338 - RNA, 20 nt, Human
uaugaaguuuuuuuuauaca

SEQ ID NO: 3872339 - RNA, 18 nt, Human
uaugaauaaagacaccua

SEQ ID NO: 3872340 - RNA, 15 nt, Human
uaugaauacagcagc

SEQ ID NO: 3872341 - RNA, 22 nt, Human
uaugaauacagcagcaagaaaa

SEQ ID NO: 3872342 - RNA, 12 nt, Human
uaugaauacagg

SEQ ID NO: 3872343 - RNA, 16 nt, Human
uaugaauacagggcau

SEQ ID NO: 3872344 - RNA, 17 nt, Human
ucaacauuuacauguau

SEQ ID NO: 3872345 - RNA, 17 nt, Human
ucaacauuucucauguu

SEQ ID NO: 3872346 - RNA, 17 nt, Human
ucaaccaaaugguacaa

SEQ ID NO: 3872347 - RNA, 17 nt, Human
ucaaccaaugccaaaaa

SEQ ID NO: 3872348 - RNA, 12 nt, Human
ucaaccacaaaa

SEQ ID NO: 3872349 - RNA, 13 nt, Human
ucaaccagacaga

SEQ ID NO: 3872350 - RNA, 22 nt, Human
ucaaccagacagagggucacag

SEQ ID NO: 3872351 - RNA, 15 nt, Human
ucaaccauggacuuu

SEQ ID NO: 3872352 - RNA, 15 nt, Human
ucaaccauuccccau

SEQ ID NO: 3872353 - RNA, 14 nt, Human
ucaacccagaaaca

SEQ ID NO: 3872354 - RNA, 15 nt, Human
ucaacccagaaacac

SEQ ID NO: 3872355 - RNA, 23 nt, Human
ucaacccaggagcauccaccucc

SEQ ID NO: 3872356 - RNA, 13 nt, Human
ucaaccccacccu

SEQ ID NO: 3872357 - RNA, 20 nt, Human
ucaaccccuucgcuccugug

SEQ ID NO: 3872358 - RNA, 23 nt, Human
ucaaccccuucgcuccugugucu

SEQ ID NO: 3872359 - RNA, 17 nt, Human
ucaacccucccucagcc

SEQ ID NO: 3872360 - RNA, 20 nt, Human
ucaacccucccucagccccu

SEQ ID NO: 3872361 - RNA, 16 nt, Human
ucaacccuucuggaaa

SEQ ID NO: 3872362 - RNA, 20 nt, Human
ucaacccuuugccccaccuu

SEQ ID NO: 3872363 - RNA, 20 nt, Human
ucaaccuacuuucauacuga

SEQ ID NO: 3872364 - RNA, 11 nt, Human
ucaaccucauc

SEQ ID NO: 3872365 - RNA, 14 nt, Human
ucaaccuccugggc

SEQ ID NO: 3872366 - RNA, 15 nt, Human
ucaaccuccugggcu

SEQ ID NO: 3872367 - RNA, 21 nt, Human
ucaaccucgcgcuugcuggcc

SEQ ID NO: 3872368 - RNA, 17 nt, Human
ucaaccucuucuggcuc

SEQ ID NO: 3872369 - RNA, 13 nt, Human
ucaaccugccuga

SEQ ID NO: 3872370 - RNA, 17 nt, Human
ucaaccugggcaaagcc

SEQ ID NO: 3872371 - RNA, 17 nt, Human
ucaaccuguaaauuauu

SEQ ID NO: 3872372 - RNA, 18 nt, Human
ucaaccuguaaauuauuu

SEQ ID NO: 3872373 - RNA, 20 nt, Human
ucaaccugugaugaggggag

SEQ ID NO: 3872374 - RNA, 23 nt, Human
ucaaccuuaagaccuacuguucu

SEQ ID NO: 3872375 - RNA, 16 nt, Human
ucaaccuugagacagc

SEQ ID NO: 3872376 - RNA, 17 nt, Human
ucaaccuugagacagcu

SEQ ID NO: 3872377 - RNA, 18 nt, Human
ucaaccuugagacagcuu

SEQ ID NO: 3872378 - RNA, 18 nt, Human
ucaacgcagcccugcuuu

SEQ ID NO: 3872379 - RNA, 22 nt, Human
ucaacgcuuaaaggugucuucc

SEQ ID NO: 3872380 - RNA, 15 nt, Human
ucaacguauuguuuc

SEQ ID NO: 3872381 - RNA, 22 nt, Human
ucaacuaaaguuguacuuuaaa

SEQ ID NO: 3872382 - RNA, 15 nt, Human
ucaacuaaauccaaa

SEQ ID NO: 3872383 - RNA, 12 nt, Human
ucaacuauuuua

SEQ ID NO: 3872384 - RNA, 16 nt, Human
ucaacucaccuaaugu

SEQ ID NO: 3872385 - RNA, 15 nt, Human
ucaacucauggagau

SEQ ID NO: 3872386 - RNA, 18 nt, Human
ucaacucccuccuuuagu

SEQ ID NO: 3872387 - RNA, 14 nt, Human
ucaacucccugccc

SEQ ID NO: 3872388 - RNA, 15 nt, Human
ucaacucugcugagg

SEQ ID NO: 3872389 - RNA, 17 nt, Human
ucaacucugcugagggu

SEQ ID NO: 3872390 - RNA, 22 nt, Human
ucaacucugcugaggguccaga

SEQ ID NO: 3872391 - RNA, 16 nt, Human
ucaacucuuuguuauu

SEQ ID NO: 3872392 - RNA, 18 nt, Human
ucaacugaccagccucca

SEQ ID NO: 3872393 - RNA, 20 nt, Human
ucaacugccaaaaugcucua

SEQ ID NO: 3872394 - RNA, 18 nt, Human
ucaacugggcucuguccc

SEQ ID NO: 3872395 - RNA, 16 nt, Human
ucaacuggguccagaa

SEQ ID NO: 3872396 - RNA, 13 nt, Human
ucaacuuaacaug

SEQ ID NO: 3872397 - RNA, 16 nt, Human
ucaacuucuggcuccu

SEQ ID NO: 3872398 - RNA, 18 nt, Human
ucaacuucuggcuccuca

SEQ ID NO: 3872399 - RNA, 19 nt, Human
ucaacuucuggcuccucaa

SEQ ID NO: 3872400 - RNA, 16 nt, Human
ucaacuugagcauguu

SEQ ID NO: 3872401 - RNA, 20 nt, Human
ucaacuugagcauguuacug

SEQ ID NO: 3872402 - RNA, 19 nt, Human
ucaacuugcauccaacucc

SEQ ID NO: 3872403 - RNA, 23 nt, Human
ucaacuuucuguuggauuccaug

SEQ ID NO: 3872404 - RNA, 22 nt, Human
ucaacuuucuuuugauuagugu

SEQ ID NO: 3872405 - RNA, 12 nt, Human
ucaacuuugaau

SEQ ID NO: 3872406 - RNA, 14 nt, Human
ucaacuuugaauaa

SEQ ID NO: 3872407 - RNA, 16 nt, Human
ucaacuuugaauaaag

SEQ ID NO: 3872408 - RNA, 18 nt, Human
ucaacuuugaauaaagaa

SEQ ID NO: 3872409 - RNA, 13 nt, Human
ucaacuuuguaaa

SEQ ID NO: 3872410 - RNA, 19 nt, Human
ucaacuuuguaaaaaucuu

SEQ ID NO: 3872411 - RNA, 15 nt, Human
ucaacuuuuccuuug

SEQ ID NO: 3872412 - RNA, 21 nt, Human
ucaacuuuuuauugccuucuc

SEQ ID NO: 3872413 - RNA, 22 nt, Human
ucaacuuuuuauugccuucuca

SEQ ID NO: 3872414 - RNA, 17 nt, Human
ucaagaaaacaacuuca

SEQ ID NO: 3872415 - RNA, 19 nt, Human
ucaagaaaacaggcacugc

SEQ ID NO: 3872416 - RNA, 22 nt, Human
ucaagaaaacaggcacugcccu

SEQ ID NO: 3872417 - RNA, 12 nt, Human
ucaagaaacagc

SEQ ID NO: 3872418 - RNA, 13 nt, Human
ucaagaaacagcc

SEQ ID NO: 3872419 - RNA, 17 nt, Human
ucaagaaagccagucuu

SEQ ID NO: 3872420 - RNA, 20 nt, Human
ucaagaaagccagucuuaac

SEQ ID NO: 3872421 - RNA, 21 nt, Human
ucaagaaagcuucaaacugca

SEQ ID NO: 3872422 - RNA, 20 nt, Human
ucaagaaauaaaaggaagcc

SEQ ID NO: 3872423 - RNA, 14 nt, Human
ucaagaaauaaguu

SEQ ID NO: 3872424 - RNA, 10 nt, Human
ucaagaaaug

SEQ ID NO: 3872425 - RNA, 23 nt, Human
ucaagaagaagauggauuggugu

SEQ ID NO: 3872426 - RNA, 19 nt, Human
ucaagaagacauggagacu

SEQ ID NO: 3872427 - RNA, 22 nt, Human
ucaagaagugaagaaugcacaa

SEQ ID NO: 3872428 - RNA, 14 nt, Human
ucaagaaguucuuu

SEQ ID NO: 3872429 - RNA, 16 nt, Human
ucaagaaugcaguacu

SEQ ID NO: 3872430 - RNA, 16 nt, Human
ucaagaccccugucuu

SEQ ID NO: 3872431 - RNA, 22 nt, Human
ucaagacccuuuuggguuucug

SEQ ID NO: 3872432 - RNA, 17 nt, Human
ucaagacugaauuccaa

SEQ ID NO: 3872433 - RNA, 19 nt, Human
ucaagacuggaaggugggg

SEQ ID NO: 3872434 - RNA, 15 nt, Human
ucaagagacugaguc

SEQ ID NO: 3872435 - RNA, 15 nt, Human
ucaagagcacacuug

SEQ ID NO: 3872436 - RNA, 22 nt, Human
ucaagagcccugucaguagagu

SEQ ID NO: 3872437 - RNA, 16 nt, Human
ucaagagccuuaaaac

SEQ ID NO: 3872438 - RNA, 13 nt, Human
ucaagaggagccc

SEQ ID NO: 3872439 - RNA, 21 nt, Human
ucaagagugaauucccucacu

SEQ ID NO: 3872440 - RNA, 13 nt, Human
ucaagauaaagga

SEQ ID NO: 3872441 - RNA, 17 nt, Human
ucaagauaaaggacagu

SEQ ID NO: 3872442 - RNA, 22 nt, Human
ucaagauacugcuacuguaauu

SEQ ID NO: 3872443 - RNA, 15 nt, Human
ucaagaucauguacc

SEQ ID NO: 3872444 - RNA, 19 nt, Human
ucaagaucuaaaucauaua

SEQ ID NO: 3872445 - RNA, 15 nt, Human
ucaagauucccagga

SEQ ID NO: 3872446 - RNA, 16 nt, Human
ucaagauucccaggag

SEQ ID NO: 3872447 - RNA, 22 nt, Human
ucaagauucccaggaguucugc

SEQ ID NO: 3872448 - RNA, 16 nt, Human
ucaagauuguuccugc

SEQ ID NO: 3872449 - RNA, 13 nt, Human
ucaagauuuugaa

SEQ ID NO: 3872450 - RNA, 18 nt, Human
ucaagauuuugaaugcuu

SEQ ID NO: 3872451 - RNA, 21 nt, Human
ucaagcaaacagcuucacaaa

SEQ ID NO: 3872452 - RNA, 19 nt, Human
ucaagcaauccuccugagu

SEQ ID NO: 3872453 - RNA, 16 nt, Human
ucaagcagauuggaga

SEQ ID NO: 3872454 - RNA, 18 nt, Human
ucaagcagcgaccgcccc

SEQ ID NO: 3872455 - RNA, 21 nt, Human
ucaagcagcgaccgcccccuc

SEQ ID NO: 3872456 - RNA, 19 nt, Human
ucaagcagucgugccugug

SEQ ID NO: 3872457 - RNA, 20 nt, Human
ucaagcagucgugccugugu

SEQ ID NO: 3872458 - RNA, 23 nt, Human
ucaagcagucgugccugugucca

SEQ ID NO: 3872459 - RNA, 19 nt, Human
ucaagcagucuacccaccu

SEQ ID NO: 3872460 - RNA, 14 nt, Human
ucaagccaagcagc

SEQ ID NO: 3872461 - RNA, 16 nt, Human
ucaagccaagcagcca

SEQ ID NO: 3872462 - RNA, 20 nt, Human
ucaagccaccaacauacucc

SEQ ID NO: 3872463 - RNA, 16 nt, Human
ucaagccagacucugc

SEQ ID NO: 3872464 - RNA, 22 nt, Human
ucaagccauguauaaaugugau

SEQ ID NO: 3872465 - RNA, 22 nt, Human
ucaagcccagccacguggagcc

SEQ ID NO: 3872466 - RNA, 15 nt, Human
ucaagcccaggaggg

SEQ ID NO: 3872467 - RNA, 16 nt, Human
ucaagccccggacuca

SEQ ID NO: 3872468 - RNA, 12 nt, Human
ucaagcccugca

SEQ ID NO: 3872469 - RNA, 22 nt, Human
ucaagccuagauguuuuauaca

SEQ ID NO: 3872470 - RNA, 18 nt, Human
ucaagccugugcaaaaaa

SEQ ID NO: 3872471 - RNA, 17 nt, Human
ucaagcgauucuccugc

SEQ ID NO: 3872472 - RNA, 15 nt, Human
ucaagcgauucucuu

SEQ ID NO: 3872473 - RNA, 15 nt, Human
ucaagcgauucuucu

SEQ ID NO: 3872474 - RNA, 15 nt, Human
ucaagcuccuccucc

SEQ ID NO: 3872475 - RNA, 20 nt, Human
ucaagcuccuccucccugca

SEQ ID NO: 3872476 - RNA, 11 nt, Human
ucaagcucuga

SEQ ID NO: 3872477 - RNA, 18 nt, Human
ucaagcugaccuugcuga

SEQ ID NO: 3872478 - RNA, 14 nt, Human
ucaagcugcucuga

SEQ ID NO: 3872479 - RNA, 14 nt, Human
ucaagcuuauuuug

SEQ ID NO: 3872480 - RNA, 20 nt, Human
ucaaggaaagggggucccag

SEQ ID NO: 3872481 - RNA, 17 nt, Human
ucaaggaacuugaaaaa

SEQ ID NO: 3872482 - RNA, 20 nt, Human
ucaaggaacuugaaaaauac

SEQ ID NO: 3872483 - RNA, 21 nt, Human
ucaaggaauuucuuaacuucu

SEQ ID NO: 3872484 - RNA, 23 nt, Human
ucaaggaccaacaagggcagugg

SEQ ID NO: 3872485 - RNA, 15 nt, Human
ucaaggauccugagc

SEQ ID NO: 3872486 - RNA, 16 nt, Human
ucaaggauccugagcc

SEQ ID NO: 3872487 - RNA, 18 nt, Human
ucaaggauccugagccag

SEQ ID NO: 3872488 - RNA, 20 nt, Human
ucaaggauccugagccagau

SEQ ID NO: 3872489 - RNA, 19 nt, Human
ucacagggcagagccggga

SEQ ID NO: 3872490 - RNA, 12 nt, Human
ucacagggcagu

SEQ ID NO: 3872491 - RNA, 20 nt, Human
ucacagggcaguaccugagg

SEQ ID NO: 3872492 - RNA, 22 nt, Human
ucacagggcaguaccugagggu

SEQ ID NO: 3872493 - RNA, 12 nt, Human
ucacagggccaa

SEQ ID NO: 3872494 - RNA, 17 nt, Human
ucacaggguugggccca

SEQ ID NO: 3872495 - RNA, 19 nt, Human
ucacaggguugggcccaga

SEQ ID NO: 3872496 - RNA, 23 nt, Human
ucacaggguugggcccagaucug

SEQ ID NO: 3872497 - RNA, 16 nt, Human
ucacaggugacucuaa

SEQ ID NO: 3872498 - RNA, 20 nt, Human
ucacaggugucagccauugc

SEQ ID NO: 3872499 - RNA, 18 nt, Human
ucacaggugugguguaau

SEQ ID NO: 3872500 - RNA, 19 nt, Human
ucacaggugugguguaauu

SEQ ID NO: 3872501 - RNA, 21 nt, Human
ucacaggugugguguaauuua

SEQ ID NO: 3872502 - RNA, 18 nt, Human
ucacagguuggaagagaa

SEQ ID NO: 3872503 - RNA, 15 nt, Human
ucacaguaaaaauaa

SEQ ID NO: 3872504 - RNA, 18 nt, Human
ucacaguaaaaauaaaau

SEQ ID NO: 3872505 - RNA, 21 nt, Human
ucacaguaaaaauaaaauacu

SEQ ID NO: 3872506 - RNA, 19 nt, Human
ucacaguacagcaugugcc

SEQ ID NO: 3872507 - RNA, 16 nt, Human
ucacaguagagccagc

SEQ ID NO: 3872508 - RNA, 21 nt, Human
ucacaguagagccagcuuggg

SEQ ID NO: 3872509 - RNA, 16 nt, Human
ucacagucacauucca

SEQ ID NO: 3872510 - RNA, 22 nt, Human
ucacagucccacugugcaggug

SEQ ID NO: 3872511 - RNA, 19 nt, Human
ucacaguccuuaccagcag

SEQ ID NO: 3872512 - RNA, 16 nt, Human
ucacagugaacacuca

SEQ ID NO: 3872513 - RNA, 17 nt, Human
ucacagugacccuuccc

SEQ ID NO: 3872514 - RNA, 20 nt, Human
ucacagugcucuuuucuccu

SEQ ID NO: 3872515 - RNA, 13 nt, Human
ucacagugcugag

SEQ ID NO: 3872516 - RNA, 16 nt, Human
ucacagugcuuuuaag

SEQ ID NO: 3872517 - RNA, 17 nt, Human
ucacagugggagccagg

SEQ ID NO: 3872518 - RNA, 17 nt, Human
ucacagugugauuuuga

SEQ ID NO: 3872519 - RNA, 14 nt, Human
ucacaguguuucga

SEQ ID NO: 3872520 - RNA, 23 nt, Human
ucacaguguuugcaaugguguug

SEQ ID NO: 3872521 - RNA, 16 nt, Human
ucacaguucaaaauuc

SEQ ID NO: 3872522 - RNA, 19 nt, Human
ucacaguucaaaauucuaa

SEQ ID NO: 3872523 - RNA, 13 nt, Human
ucacaguuccucg

SEQ ID NO: 3872524 - RNA, 17 nt, Human
ucacaguuccucgcccu

SEQ ID NO: 3872525 - RNA, 21 nt, Human
ucacaguuccucgcccugggu

SEQ ID NO: 3872526 - RNA, 22 nt, Human
ucacaguuggcuggaugaaauu

SEQ ID NO: 3872527 - RNA, 15 nt, Human
ucacaguuugaaaua

SEQ ID NO: 3872528 - RNA, 20 nt, Human
ucacaguuuugguugcuuua

SEQ ID NO: 3872529 - RNA, 21 nt, Human
ucacaguuuugguugcuuuaa

SEQ ID NO: 3872530 - RNA, 23 nt, Human
ucacaguuuugguugcuuuaaua

SEQ ID NO: 3872531 - RNA, 13 nt, Human
ucacauaaaugca

SEQ ID NO: 3872532 - RNA, 15 nt, Human
ucacauaacagaaug

SEQ ID NO: 3872533 - RNA, 17 nt, Human
ucacauaagcucagaau

SEQ ID NO: 3872534 - RNA, 20 nt, Human
ucacauaagcucagaaucca

SEQ ID NO: 3872535 - RNA, 18 nt, Human
ucacauacaauuauuuuu

SEQ ID NO: 3872536 - RNA, 14 nt, Human
ucacauacccuccc

SEQ ID NO: 3872537 - RNA, 20 nt, Human
ucacauagcccacuuacauu

SEQ ID NO: 3872538 - RNA, 21 nt, Human
ucacauaucuaguaugaaauu

SEQ ID NO: 3872539 - RNA, 12 nt, Human
ucacauaucugu

SEQ ID NO: 3872540 - RNA, 15 nt, Human
ucacauaucugucau

SEQ ID NO: 3872541 - RNA, 16 nt, Human
ucacauauugauuucc

SEQ ID NO: 3872542 - RNA, 18 nt, Human
ucacauauugauuuccgu

SEQ ID NO: 3872543 - RNA, 22 nt, Human
ucacauauuuuaaaauuuguuc

SEQ ID NO: 3872544 - RNA, 18 nt, Human
ucacaucagauaagacau

SEQ ID NO: 3872545 - RNA, 15 nt, Human
ucacaucccacccca

SEQ ID NO: 3872546 - RNA, 19 nt, Human
ucacauccuggccuggcac

SEQ ID NO: 3872547 - RNA, 23 nt, Human
ucacauccuggccuggcacauca

SEQ ID NO: 3872548 - RNA, 18 nt, Human
ucacauccuguguuucua

SEQ ID NO: 3872549 - RNA, 21 nt, Human
ucacauccuugacuuuuuaga

SEQ ID NO: 3872550 - RNA, 15 nt, Human
ucacaugaauuauua

SEQ ID NO: 3872551 - RNA, 18 nt, Human
ucacaugaccacauagca

SEQ ID NO: 3872552 - RNA, 23 nt, Human
ucacaugagcuauuuccauucca

SEQ ID NO: 3872553 - RNA, 21 nt, Human
ucacaugauuccagccaucac

SEQ ID NO: 3872554 - RNA, 21 nt, Human
ucacauggccuaugcacauau

SEQ ID NO: 3872555 - RNA, 16 nt, Human
ucacaugguuuacauc

SEQ ID NO: 3872556 - RNA, 16 nt, Human
ucacauguauguuuug

SEQ ID NO: 3872557 - RNA, 14 nt, Human
ucacauguuuucaa

SEQ ID NO: 3872558 - RNA, 19 nt, Human
ucacauuaauauuugcuga

SEQ ID NO: 3872559 - RNA, 20 nt, Human
ucacauuaauauuugcugac

SEQ ID NO: 3872560 - RNA, 16 nt, Human
ucacauuaauggucua

SEQ ID NO: 3872561 - RNA, 22 nt, Human
ucacauuaauggucuaaaaaua

SEQ ID NO: 3872562 - RNA, 22 nt, Human
ucacauuagaagacaauugaca

SEQ ID NO: 3872563 - RNA, 13 nt, Human
ucacauuagaauu

SEQ ID NO: 3872564 - RNA, 15 nt, Human
ucacauuagaauuag

SEQ ID NO: 3872565 - RNA, 13 nt, Human
ucacauuagaucu

SEQ ID NO: 3872566 - RNA, 17 nt, Human
ucacauuccccugggga

SEQ ID NO: 3872567 - RNA, 18 nt, Human
ucacauuccccuggggac

SEQ ID NO: 3872568 - RNA, 13 nt, Human
ucacauuccugaa

SEQ ID NO: 3872569 - RNA, 17 nt, Human
ucacauuccugaacagg

SEQ ID NO: 3872570 - RNA, 13 nt, Human
ucacauucuuaua

SEQ ID NO: 3872571 - RNA, 17 nt, Human
ucacauucuuauaaaua

SEQ ID NO: 3872572 - RNA, 20 nt, Human
ucacauugagcugauauaaa

SEQ ID NO: 3872573 - RNA, 23 nt, Human
ucacauugagcugauauaaauuc

SEQ ID NO: 3872574 - RNA, 20 nt, Human
ucacauuggagucacugcca

SEQ ID NO: 3872575 - RNA, 12 nt, Human
ucacauuuaaau

SEQ ID NO: 3872576 - RNA, 19 nt, Human
ucacauuuagaaaagugaa

SEQ ID NO: 3872577 - RNA, 18 nt, Human
ucacauuuauucugcuca

SEQ ID NO: 3872578 - RNA, 19 nt, Human
ucacauuuauucugcucac

SEQ ID NO: 3872579 - RNA, 17 nt, Human
ucacauuuuccuuuuca

SEQ ID NO: 3872580 - RNA, 14 nt, Human
ucacauuuuuuucu

SEQ ID NO: 3872581 - RNA, 15 nt, Human
ucacauuuuuuucua

SEQ ID NO: 3872582 - RNA, 17 nt, Human
ucacauuuuuuucuacc

SEQ ID NO: 3872583 - RNA, 21 nt, Human
ucaccaaaucagcugcuacua

SEQ ID NO: 3872584 - RNA, 21 nt, Human
ucaccaagcucacaguuccuc

SEQ ID NO: 3872585 - RNA, 12 nt, Human
ucaccacaaacu

SEQ ID NO: 3872586 - RNA, 21 nt, Human
ucaccacaguaaguuccuacu

SEQ ID NO: 3872587 - RNA, 12 nt, Human
ucaccaccaccc

SEQ ID NO: 3872588 - RNA, 18 nt, Human
ucaccaccaccccuacca

SEQ ID NO: 3872589 - RNA, 13 nt, Human
ucaccaccucucc

SEQ ID NO: 3872590 - RNA, 18 nt, Human
ucaccaccuucccagcuc

SEQ ID NO: 3872591 - RNA, 16 nt, Human
ucaccacugcccccug

SEQ ID NO: 3872592 - RNA, 18 nt, Human
ucaccagaggaaucacuc

SEQ ID NO: 3872593 - RNA, 18 nt, Human
ucaccagaucugauuugu

SEQ ID NO: 3872594 - RNA, 21 nt, Human
ucaccagcccaucgccacaaa

SEQ ID NO: 3872595 - RNA, 21 nt, Human
ucaccagccccacugccagca

SEQ ID NO: 3872596 - RNA, 22 nt, Human
ucaccagccccagugcccacag

SEQ ID NO: 3872597 - RNA, 16 nt, Human
ucaccagcccuggcaa

SEQ ID NO: 3872598 - RNA, 13 nt, Human
ucaccagcuccuc

SEQ ID NO: 3872599 - RNA, 15 nt, Human
ucaccagcuccuccc

SEQ ID NO: 3872600 - RNA, 14 nt, Human
ucaccagcugcaaa

SEQ ID NO: 3872601 - RNA, 15 nt, Human
ucaccagcugcaaag

SEQ ID NO: 3872602 - RNA, 19 nt, Human
ucaccagcugcaaaguguu

SEQ ID NO: 3872603 - RNA, 14 nt, Human
ucaccagcugccuc

SEQ ID NO: 3872604 - RNA, 17 nt, Human
ucaccagcugccucuuc

SEQ ID NO: 3872605 - RNA, 21 nt, Human
ucaccaguacauucucaguuu

SEQ ID NO: 3872606 - RNA, 20 nt, Human
ucaccaucaauccugauucc

SEQ ID NO: 3872607 - RNA, 14 nt, Human
ucaccaucucaggc

SEQ ID NO: 3872608 - RNA, 14 nt, Human
ucaccaucugugca

SEQ ID NO: 3872609 - RNA, 14 nt, Human
ucaccaugaugggg

SEQ ID NO: 3872610 - RNA, 19 nt, Human
ucaccauguaaaacaaaaa

SEQ ID NO: 3872611 - RNA, 15 nt, Human
ucaccauguaagcac

SEQ ID NO: 3872612 - RNA, 17 nt, Human
ucaccauguaagcacuc

SEQ ID NO: 3872613 - RNA, 18 nt, Human
ucaccaugugagcucuuc

SEQ ID NO: 3872614 - RNA, 19 nt, Human
ucaccauguuggccaggcu

SEQ ID NO: 3872615 - RNA, 23 nt, Human
ucaccauuauaaugaauuuagug

SEQ ID NO: 3872616 - RNA, 21 nt, Human
ucaccauucguacauaauacu

SEQ ID NO: 3872617 - RNA, 17 nt, Human
ucaccauuugauuaugu

SEQ ID NO: 3872618 - RNA, 23 nt, Human
ucaccauuuggcaaugccaucau

SEQ ID NO: 3872619 - RNA, 16 nt, Human
ucacccacagaaagag

SEQ ID NO: 3872620 - RNA, 16 nt, Human
ucacccaccagacuuu

SEQ ID NO: 3872621 - RNA, 16 nt, Human
ucacccagacagcucc

SEQ ID NO: 3872622 - RNA, 20 nt, Human
ucacccagacauaaaggaaa

SEQ ID NO: 3872623 - RNA, 22 nt, Human
ucacccagacauaaaggaaaag

SEQ ID NO: 3872624 - RNA, 21 nt, Human
ucacccagcuaaucuguaggg

SEQ ID NO: 3872625 - RNA, 19 nt, Human
ucacccaguccugcccgcc

SEQ ID NO: 3872626 - RNA, 13 nt, Human
ucaccccacccuu

SEQ ID NO: 3872627 - RNA, 17 nt, Human
ucaccccagagccacac

SEQ ID NO: 3872628 - RNA, 20 nt, Human
ucaccccagccccaaaacuc

SEQ ID NO: 3872629 - RNA, 13 nt, Human
ucaccccagggcc

SEQ ID NO: 3872630 - RNA, 16 nt, Human
ucaccccagggccuga

SEQ ID NO: 3872631 - RNA, 19 nt, Human
ucaccccagggccugagcc

SEQ ID NO: 3872632 - RNA, 17 nt, Human
ucacccccucccacccc

SEQ ID NO: 3872633 - RNA, 17 nt, Human
ucauguguuugaacuuc

SEQ ID NO: 3872634 - RNA, 15 nt, Human
ucauguuaaccucug

SEQ ID NO: 3872635 - RNA, 21 nt, Human
ucauguuaauccuagcugugu

SEQ ID NO: 3872636 - RNA, 14 nt, Human
ucauguuaguaaua

SEQ ID NO: 3872637 - RNA, 15 nt, Human
ucauguuaguuaccu

SEQ ID NO: 3872638 - RNA, 23 nt, Human
ucauguuaguuaccuuauaguua

SEQ ID NO: 3872639 - RNA, 20 nt, Human
ucauguuauauuuaaugcau

SEQ ID NO: 3872640 - RNA, 13 nt, Human
ucauguuccaaau

SEQ ID NO: 3872641 - RNA, 23 nt, Human
ucauguucccacuucaaaacaaa

SEQ ID NO: 3872642 - RNA, 22 nt, Human
ucauguugguguuggcaucagu

SEQ ID NO: 3872643 - RNA, 12 nt, Human
ucauguuucuuu

SEQ ID NO: 3872644 - RNA, 15 nt, Human
ucauguuugcucucc

SEQ ID NO: 3872645 - RNA, 22 nt, Human
ucauguuuggugcauagaacug

SEQ ID NO: 3872646 - RNA, 14 nt, Human
ucauguuuugguga

SEQ ID NO: 3872647 - RNA, 14 nt, Human
ucauguuuugugac

SEQ ID NO: 3872648 - RNA, 21 nt, Human
ucauguuuuugaaacagaacc

SEQ ID NO: 3872649 - RNA, 13 nt, Human
ucauuaaauaaau

SEQ ID NO: 3872650 - RNA, 23 nt, Human
ucauuaagguauuauuuuuucca

SEQ ID NO: 3872651 - RNA, 17 nt, Human
ucauuaaucugccuccc

SEQ ID NO: 3872652 - RNA, 21 nt, Human
ucauuaaugacacuugucccc

SEQ ID NO: 3872653 - RNA, 22 nt, Human
ucauuaaugacacuugucccca

SEQ ID NO: 3872654 - RNA, 23 nt, Human
ucauuaccuuuuaccagcuuuua

SEQ ID NO: 3872655 - RNA, 20 nt, Human
ucauuaccuuuuuugauaaa

SEQ ID NO: 3872656 - RNA, 15 nt, Human
ucauuacugggccuu

SEQ ID NO: 3872657 - RNA, 12 nt, Human
ucauuacuuguu

SEQ ID NO: 3872658 - RNA, 20 nt, Human
ucauuacuuuaccaccccca

SEQ ID NO: 3872659 - RNA, 17 nt, Human
ucauuagaauuaccauu

SEQ ID NO: 3872660 - RNA, 12 nt, Human
ucauuagagcag

SEQ ID NO: 3872661 - RNA, 12 nt, Human
ucauuagcaaaa

SEQ ID NO: 3872662 - RNA, 16 nt, Human
ucauuagcaaaaaaag

SEQ ID NO: 3872663 - RNA, 17 nt, Human
ucauuagcaaaaaaagu

SEQ ID NO: 3872664 - RNA, 18 nt, Human
ucauuagcugugauuuuu

SEQ ID NO: 3872665 - RNA, 21 nt, Human
ucauuaggugugacugaauuu

SEQ ID NO: 3872666 - RNA, 13 nt, Human
ucauuauaaacgu

SEQ ID NO: 3872667 - RNA, 15 nt, Human
ucauuauaaacguga

SEQ ID NO: 3872668 - RNA, 19 nt, Human
ucauuaucucaaaacugca

SEQ ID NO: 3872669 - RNA, 13 nt, Human
ucauuauguaaaa

SEQ ID NO: 3872670 - RNA, 18 nt, Human
ucauuaugucaaccaggu

SEQ ID NO: 3872671 - RNA, 16 nt, Human
ucauuauguuaauauu

SEQ ID NO: 3872672 - RNA, 12 nt, Human
ucauuauuauua

SEQ ID NO: 3872673 - RNA, 14 nt, Human
ucauuauucucugc

SEQ ID NO: 3872674 - RNA, 17 nt, Human
ucauuauucucugcuau

SEQ ID NO: 3872675 - RNA, 17 nt, Human
ucauuauuggaauuaac

SEQ ID NO: 3872676 - RNA, 19 nt, Human
ucauuauuggaauuaaccu

SEQ ID NO: 3872677 - RNA, 13 nt, Human
ucauuauuuguca

SEQ ID NO: 3872678 - RNA, 15 nt, Human
ucauuauuugucaaa

SEQ ID NO: 3872679 - RNA, 14 nt, Human
ucauuauuuuauua

SEQ ID NO: 3872680 - RNA, 18 nt, Human
ucauuauuuuauuaugaa

SEQ ID NO: 3872681 - RNA, 16 nt, Human
ucauucaauacaagug

SEQ ID NO: 3872682 - RNA, 15 nt, Human
ucauucaauauugac

SEQ ID NO: 3872683 - RNA, 21 nt, Human
ucauucaauauugacauuugu

SEQ ID NO: 3872684 - RNA, 16 nt, Human
ucauucacuagcuuug

SEQ ID NO: 3872685 - RNA, 16 nt, Human
ucauucacuucacugu

SEQ ID NO: 3872686 - RNA, 19 nt, Human
ucauucacuucacugugcu

SEQ ID NO: 3872687 - RNA, 16 nt, Human
ucauucacuucucuua

SEQ ID NO: 3872688 - RNA, 22 nt, Human
ucauucagagucagccaggacc

SEQ ID NO: 3872689 - RNA, 22 nt, Human
ucauucagauaugauucaaaug

SEQ ID NO: 3872690 - RNA, 12 nt, Human
ucauucaggaaa

SEQ ID NO: 3872691 - RNA, 12 nt, Human
ucauucauauua

SEQ ID NO: 3872692 - RNA, 15 nt, Human
ucauucauauuacaa

SEQ ID NO: 3872693 - RNA, 22 nt, Human
ucauucauauuacaauauuugu

SEQ ID NO: 3872694 - RNA, 15 nt, Human
ucauucauucuuagc

SEQ ID NO: 3872695 - RNA, 19 nt, Human
ucauucauuuuauauugaa

SEQ ID NO: 3872696 - RNA, 12 nt, Human
ucauuccaaaua

SEQ ID NO: 3872697 - RNA, 20 nt, Human
ucauuccauugccuagcucu

SEQ ID NO: 3872698 - RNA, 23 nt, Human
ucauuccccagguggcugaccca

SEQ ID NO: 3872699 - RNA, 18 nt, Human
ucauucccucucaucuca

SEQ ID NO: 3872700 - RNA, 23 nt, Human
ucauucccuucgacagcauuuuc

SEQ ID NO: 3872701 - RNA, 17 nt, Human
ucauuccuaacacagca

SEQ ID NO: 3872702 - RNA, 14 nt, Human
ucauuccugaaaga

SEQ ID NO: 3872703 - RNA, 17 nt, Human
ucauuccugccugucuc

SEQ ID NO: 3872704 - RNA, 14 nt, Human
ucauuccuguauuc

SEQ ID NO: 3872705 - RNA, 17 nt, Human
ucauuccuucagauuug

SEQ ID NO: 3872706 - RNA, 20 nt, Human
ucauuccuuuuuauuuauau

SEQ ID NO: 3872707 - RNA, 18 nt, Human
ucauucucauaauuccua

SEQ ID NO: 3872708 - RNA, 21 nt, Human
ucauucucauaauuccuacag

SEQ ID NO: 3872709 - RNA, 23 nt, Human
ucauucucauaauuccuacagca

SEQ ID NO: 3872710 - RNA, 13 nt, Human
ucauucuccugcc

SEQ ID NO: 3872711 - RNA, 14 nt, Human
ucauucuccugccu

SEQ ID NO: 3872712 - RNA, 18 nt, Human
ucauucucugucucaucc

SEQ ID NO: 3872713 - RNA, 14 nt, Human
ucauucugaauuaa

SEQ ID NO: 3872714 - RNA, 13 nt, Human
ucauucugcauug

SEQ ID NO: 3872715 - RNA, 16 nt, Human
ucauucugugaucauu

SEQ ID NO: 3872716 - RNA, 20 nt, Human
ucauucuuacuaaaaaguau

SEQ ID NO: 3872717 - RNA, 13 nt, Human
ucauucuucucua

SEQ ID NO: 3872718 - RNA, 15 nt, Human
ucauucuuguuuucu

SEQ ID NO: 3872719 - RNA, 21 nt, Human
ucauucuuuuugaaaugucaa

SEQ ID NO: 3872720 - RNA, 12 nt, Human
ucauugaaaucu

SEQ ID NO: 3872721 - RNA, 22 nt, Human
ucauugaaaucuuuuugcuuug

SEQ ID NO: 3872722 - RNA, 12 nt, Human
ucauugaaaugu

SEQ ID NO: 3872723 - RNA, 20 nt, Human
ucauugaauuauaaaagcca

SEQ ID NO: 3872724 - RNA, 21 nt, Human
ucauugacuaucaaacugaag

SEQ ID NO: 3872725 - RNA, 16 nt, Human
ucauugacuuuuauaa

SEQ ID NO: 3872726 - RNA, 16 nt, Human
ucauugauaugaaaaa

SEQ ID NO: 3872727 - RNA, 18 nt, Human
ucauugauugucagcuac

SEQ ID NO: 3872728 - RNA, 17 nt, Human
ucauugauuuccugugu

SEQ ID NO: 3872729 - RNA, 19 nt, Human
ucauugauuuccuguguca

SEQ ID NO: 3872730 - RNA, 17 nt, Human
ucauugcacauaagcuu

SEQ ID NO: 3872731 - RNA, 21 nt, Human
ucauugccagugucuuucuuu

SEQ ID NO: 3872732 - RNA, 23 nt, Human
ucauugccuguguauggaaaaac

SEQ ID NO: 3872733 - RNA, 17 nt, Human
ucauugcugaaaauggu

SEQ ID NO: 3872734 - RNA, 17 nt, Human
ucauugcugagccucug

SEQ ID NO: 3872735 - RNA, 14 nt, Human
ucauugcugucugc

SEQ ID NO: 3872736 - RNA, 13 nt, Human
ucauugcuuacaa

SEQ ID NO: 3872737 - RNA, 16 nt, Human
ucauugcuuaugacau

SEQ ID NO: 3872738 - RNA, 21 nt, Human
ucauugcuucacaacccaucu

SEQ ID NO: 3872739 - RNA, 12 nt, Human
ucauugcuuuac

SEQ ID NO: 3872740 - RNA, 14 nt, Human
ucauuggaaauuua

SEQ ID NO: 3872741 - RNA, 15 nt, Human
ucauuggaaauuuag

SEQ ID NO: 3872742 - RNA, 19 nt, Human
ucauuggaaauuuagcauu

SEQ ID NO: 3872743 - RNA, 17 nt, Human
ucauuggcuuuauccuc

SEQ ID NO: 3872744 - RNA, 19 nt, Human
ucauugggcuguuuucuca

SEQ ID NO: 3872745 - RNA, 19 nt, Human
ucauuguaaacaaacucuu

SEQ ID NO: 3872746 - RNA, 17 nt, Human
ucauuguaauguuacug

SEQ ID NO: 3872747 - RNA, 19 nt, Human
ucauuguaauguuacugau

SEQ ID NO: 3872748 - RNA, 17 nt, Human
ucauuguauaaaaauag

SEQ ID NO: 3872749 - RNA, 23 nt, Human
ucauuguaugauguguugugaua

SEQ ID NO: 3872750 - RNA, 16 nt, Human
ucauugucccucuuca

SEQ ID NO: 3872751 - RNA, 18 nt, Human
ucauugucuguguagagu

SEQ ID NO: 3872752 - RNA, 12 nt, Human
ucauugugaaau

SEQ ID NO: 3872753 - RNA, 17 nt, Human
ucauugugaaauuauuc

SEQ ID NO: 3872754 - RNA, 18 nt, Human
ucauugugaaauuauuca

SEQ ID NO: 3872755 - RNA, 15 nt, Human
ucauuguuaaaguaa

SEQ ID NO: 3872756 - RNA, 16 nt, Human
ucauuguuuggcauug

SEQ ID NO: 3872757 - RNA, 16 nt, Human
ucauuuaaaaugauua

SEQ ID NO: 3872758 - RNA, 14 nt, Human
ucauuuaagggaaa

SEQ ID NO: 3872759 - RNA, 17 nt, Human
ucauuuaagggaaaaau

SEQ ID NO: 3872760 - RNA, 19 nt, Human
ucauuuaagggaaagaaaa

SEQ ID NO: 3872761 - RNA, 23 nt, Human
ucauuuaaguuucaaacuuacua

SEQ ID NO: 3872762 - RNA, 18 nt, Human
ucauuuaauaauauacuu

SEQ ID NO: 3872763 - RNA, 22 nt, Human
ucauuuaauccucccuuccucc

SEQ ID NO: 3872764 - RNA, 16 nt, Human
ucauuuacuaaacaua

SEQ ID NO: 3872765 - RNA, 11 nt, Human
ucauuuacugu

SEQ ID NO: 3872766 - RNA, 20 nt, Human
ucauuuacuguggcuucuua

SEQ ID NO: 3872767 - RNA, 15 nt, Human
ucauuuacuguuuua

SEQ ID NO: 3872768 - RNA, 12 nt, Human
ucauuuagaacu

SEQ ID NO: 3872769 - RNA, 19 nt, Human
ucauuuagauugaaaacuu

SEQ ID NO: 3872770 - RNA, 15 nt, Human
ucauuuagccugucc

SEQ ID NO: 3872771 - RNA, 17 nt, Human
ucauuuagccuguccug

SEQ ID NO: 3872772 - RNA, 23 nt, Human
ucauuuagugaguuauuccuuga

SEQ ID NO: 3872773 - RNA, 19 nt, Human
ucauuuaguuugauuauuc

SEQ ID NO: 3872774 - RNA, 17 nt, Human
ucauuuauauagauuau

SEQ ID NO: 3872775 - RNA, 22 nt, Human
ucauuuauauagauuauaacuu

SEQ ID NO: 3872776 - RNA, 15 nt, Human
ucauuuaucccucaa

SEQ ID NO: 3872777 - RNA, 16 nt, Human
ucauuuaucuauaauu

SEQ ID NO: 3872778 - RNA, 14 nt, Human
uccagaagugugac

SEQ ID NO: 3872779 - RNA, 15 nt, Human
uccagaagugugacu

SEQ ID NO: 3872780 - RNA, 22 nt, Human
uccagaauaaaacgcaaagggc

SEQ ID NO: 3872781 - RNA, 23 nt, Human
uccagaauaucugggauucuacu

SEQ ID NO: 3872782 - RNA, 18 nt, Human
uccagaaucuaaagccag

SEQ ID NO: 3872783 - RNA, 18 nt, Human
uccagaaugcuguacauc

SEQ ID NO: 3872784 - RNA, 14 nt, Human
uccagaauuuccca

SEQ ID NO: 3872785 - RNA, 20 nt, Human
uccagaauuucccaaagcag

SEQ ID NO: 3872786 - RNA, 24 nt, Human
uccagacaaaccagaagcaacaga

SEQ ID NO: 3872787 - RNA, 13 nt, Human
uccagacacuuuu

SEQ ID NO: 3872788 - RNA, 13 nt, Human
uccagacagccug

SEQ ID NO: 3872789 - RNA, 14 nt, Human
uccagacagccugu

SEQ ID NO: 3872790 - RNA, 16 nt, Human
uccagacagccuguau

SEQ ID NO: 3872791 - RNA, 22 nt, Human
uccagacagugugcuguuugaa

SEQ ID NO: 3872792 - RNA, 19 nt, Human
uccagacauacgaaacaca

SEQ ID NO: 3872793 - RNA, 12 nt, Human
uccagaccccca

SEQ ID NO: 3872794 - RNA, 20 nt, Human
uccagacccccaccccuucc

SEQ ID NO: 3872795 - RNA, 21 nt, Human
uccagacccccagcaacccuc

SEQ ID NO: 3872796 - RNA, 13 nt, Human
uccagaccccugg

SEQ ID NO: 3872797 - RNA, 15 nt, Human
uccagaccugaggcg

SEQ ID NO: 3872798 - RNA, 13 nt, Human
uccagaccugauc

SEQ ID NO: 3872799 - RNA, 18 nt, Human
uccagaccugauccugga

SEQ ID NO: 3872800 - RNA, 18 nt, Human
uccagacguaggggaggg

SEQ ID NO: 3872801 - RNA, 14 nt, Human
uccagacucagagc

SEQ ID NO: 3872802 - RNA, 14 nt, Human
uccagacucucugu

SEQ ID NO: 3872803 - RNA, 23 nt, Human
uccagacugcuuccaauuuucug

SEQ ID NO: 3872804 - RNA, 15 nt, Human
uccagagacaacagg

SEQ ID NO: 3872805 - RNA, 16 nt, Human
uccagagacaacaggu

SEQ ID NO: 3872806 - RNA, 19 nt, Human
uccagagaguggcuccucc

SEQ ID NO: 3872807 - RNA, 20 nt, Human
uccagagauucauuuucuag

SEQ ID NO: 3872808 - RNA, 21 nt, Human
uccagagauucauuuucuaga

SEQ ID NO: 3872809 - RNA, 17 nt, Human
uccagagcacugcucca

SEQ ID NO: 3872810 - RNA, 15 nt, Human
uccagauaguguagc

SEQ ID NO: 3872811 - RNA, 22 nt, Human
uccagauaguguagcugaggag

SEQ ID NO: 3872812 - RNA, 16 nt, Human
uccagaucagauucuu

SEQ ID NO: 3872813 - RNA, 13 nt, Human
uccagaucccagg

SEQ ID NO: 3872814 - RNA, 16 nt, Human
uccagaucccaggccc

SEQ ID NO: 3872815 - RNA, 19 nt, Human
uccagaucccaggccccug

SEQ ID NO: 3872816 - RNA, 16 nt, Human
uccagauccucucugg

SEQ ID NO: 3872817 - RNA, 18 nt, Human
uccagaucugcagucacu

SEQ ID NO: 3872818 - RNA, 15 nt, Human
uccagaugccacaau

SEQ ID NO: 3872819 - RNA, 14 nt, Human
uccagaugugaugc

SEQ ID NO: 3872820 - RNA, 13 nt, Human
uccagauguggcu

SEQ ID NO: 3872821 - RNA, 14 nt, Human
uccagauguggcua

SEQ ID NO: 3872822 - RNA, 17 nt, Human
uccagauugacgacaag

SEQ ID NO: 3872823 - RNA, 18 nt, Human
uccagauuuacacuggga

SEQ ID NO: 3872824 - RNA, 16 nt, Human
uccagcaacacagccu

SEQ ID NO: 3872825 - RNA, 20 nt, Human
uccagcaacuucuucuccau

SEQ ID NO: 3872826 - RNA, 18 nt, Human
uccagcaauucuccugcc

SEQ ID NO: 3872827 - RNA, 17 nt, Human
uccagcacaaacacaag

SEQ ID NO: 3872828 - RNA, 19 nt, Human
uccagcacaaacacaaggu

SEQ ID NO: 3872829 - RNA, 23 nt, Human
uccagcaccauccgccagggccc

SEQ ID NO: 3872830 - RNA, 19 nt, Human
uccagcaccuugugccugg

SEQ ID NO: 3872831 - RNA, 21 nt, Human
uccagcaccuugugccugggg

SEQ ID NO: 3872832 - RNA, 22 nt, Human
uccagcaccuugugccuggggu

SEQ ID NO: 3872833 - RNA, 17 nt, Human
uccagcagaagacaaaa

SEQ ID NO: 3872834 - RNA, 15 nt, Human
uccagcagauuauuc

SEQ ID NO: 3872835 - RNA, 17 nt, Human
uccagcagauuauucac

SEQ ID NO: 3872836 - RNA, 20 nt, Human
uccagcagauuauucacuga

SEQ ID NO: 3872837 - RNA, 22 nt, Human
uccagcagauuauucacugauu

SEQ ID NO: 3872838 - RNA, 14 nt, Human
uccagcagucacuu

SEQ ID NO: 3872839 - RNA, 20 nt, Human
uccagcagucucugccuugc

SEQ ID NO: 3872840 - RNA, 21 nt, Human
uccagcauuuagcuggccaca

SEQ ID NO: 3872841 - RNA, 20 nt, Human
uccagccacuggcugcuaac

SEQ ID NO: 3872842 - RNA, 11 nt, Human
uccagccagcg

SEQ ID NO: 3872843 - RNA, 18 nt, Human
uccagccagcgccucccu

SEQ ID NO: 3872844 - RNA, 22 nt, Human
uccagccagcgccucccuccac

SEQ ID NO: 3872845 - RNA, 23 nt, Human
uccagccagcgccucccuccacc

SEQ ID NO: 3872846 - RNA, 23 nt, Human
uccagccccgcgaccauguggcc

SEQ ID NO: 3872847 - RNA, 20 nt, Human
uccagccccucuuggagaag

SEQ ID NO: 3872848 - RNA, 15 nt, Human
uccagccccuggaug

SEQ ID NO: 3872849 - RNA, 16 nt, Human
uccagccccuggaugc

SEQ ID NO: 3872850 - RNA, 21 nt, Human
uccagccccuggaugcagccu

SEQ ID NO: 3872851 - RNA, 12 nt, Human
uccagccccugu

SEQ ID NO: 3872852 - RNA, 15 nt, Human
uccagccccuguccc

SEQ ID NO: 3872853 - RNA, 20 nt, Human
uccagccccugucccacccc

SEQ ID NO: 3872854 - RNA, 22 nt, Human
uccagccccuucucagaaucua

SEQ ID NO: 3872855 - RNA, 23 nt, Human
uccagcccgggagccuaggacca

SEQ ID NO: 3872856 - RNA, 16 nt, Human
uccagccgccauugcc

SEQ ID NO: 3872857 - RNA, 18 nt, Human
uccagccgccauugccac

SEQ ID NO: 3872858 - RNA, 19 nt, Human
uccagccgccauugccacc

SEQ ID NO: 3872859 - RNA, 20 nt, Human
uccagccgccauugccacca

SEQ ID NO: 3872860 - RNA, 20 nt, Human
uccagccggcauggcuggga

SEQ ID NO: 3872861 - RNA, 16 nt, Human
uccagccugccccgga

SEQ ID NO: 3872862 - RNA, 20 nt, Human
uccagccugcugccugcuuu

SEQ ID NO: 3872863 - RNA, 22 nt, Human
uccagccuggaaaccugucuga

SEQ ID NO: 3872864 - RNA, 20 nt, Human
uccagccuggacccccagcu

SEQ ID NO: 3872865 - RNA, 21 nt, Human
uccagccuggacccccagcuu

SEQ ID NO: 3872866 - RNA, 12 nt, Human
uccagccuggcu

SEQ ID NO: 3872867 - RNA, 13 nt, Human
uccagccugggag

SEQ ID NO: 3872868 - RNA, 19 nt, Human
uccagccugggcagccagg

SEQ ID NO: 3872869 - RNA, 22 nt, Human
uccagccugggcagccaggcug

SEQ ID NO: 3872870 - RNA, 20 nt, Human
uccagccugguuuagccugg

SEQ ID NO: 3872871 - RNA, 20 nt, Human
uccagcuagugacccacaug

SEQ ID NO: 3872872 - RNA, 21 nt, Human
uccagcuauuuuuauuuguuu

SEQ ID NO: 3872873 - RNA, 20 nt, Human
uccagcucaccccccacacu

SEQ ID NO: 3872874 - RNA, 15 nt, Human
uccagcucagaaccc

SEQ ID NO: 3872875 - RNA, 19 nt, Human
uccagcucagaacccaggg

SEQ ID NO: 3872876 - RNA, 13 nt, Human
uccagcucagcag

SEQ ID NO: 3872877 - RNA, 20 nt, Human
uccagcucauucauuuuaua

SEQ ID NO: 3872878 - RNA, 12 nt, Human
uccagcuccaac

SEQ ID NO: 3872879 - RNA, 18 nt, Human
uccagcuccucauccagg

SEQ ID NO: 3872880 - RNA, 21 nt, Human
uccagcuccuccgugcuuccu

SEQ ID NO: 3872881 - RNA, 16 nt, Human
uccagcuccuuugggc

SEQ ID NO: 3872882 - RNA, 15 nt, Human
uccagcucuggaggg

SEQ ID NO: 3872883 - RNA, 15 nt, Human
uccagcucuuuccuc

SEQ ID NO: 3872884 - RNA, 21 nt, Human
uccagcucuuuccuccuucca

SEQ ID NO: 3872885 - RNA, 21 nt, Human
uccagcugacuaaacuuuuuu

SEQ ID NO: 3872886 - RNA, 12 nt, Human
uccagcugcccc

SEQ ID NO: 3872887 - RNA, 14 nt, Human
uccagcugcugaga

SEQ ID NO: 3872888 - RNA, 12 nt, Human
uccagcugcugu

SEQ ID NO: 3872889 - RNA, 14 nt, Human
uccagcugcugucu

SEQ ID NO: 3872890 - RNA, 15 nt, Human
uccagcugcugucuu

SEQ ID NO: 3872891 - RNA, 15 nt, Human
uccagcuggccggga

SEQ ID NO: 3872892 - RNA, 22 nt, Human
uccagcuggccgggagccugau

SEQ ID NO: 3872893 - RNA, 18 nt, Human
uccagcuggccuggacag

SEQ ID NO: 3872894 - RNA, 14 nt, Human
uccagcuguccccc

SEQ ID NO: 3872895 - RNA, 21 nt, Human
uccagcuguccccccacuccc

SEQ ID NO: 3872896 - RNA, 17 nt, Human
uccagcuguucagcugg

SEQ ID NO: 3872897 - RNA, 20 nt, Human
uccagcuucugguacucucc

SEQ ID NO: 3872898 - RNA, 18 nt, Human
uccagcuuguggagcccc

SEQ ID NO: 3872899 - RNA, 21 nt, Human
uccagcuuuguucuucuuaaa

SEQ ID NO: 3872900 - RNA, 21 nt, Human
uccaggaagaaagaauguuac

SEQ ID NO: 3872901 - RNA, 19 nt, Human
uccaggacaggagaugcug

SEQ ID NO: 3872902 - RNA, 14 nt, Human
uccaggacccugcc

SEQ ID NO: 3872903 - RNA, 20 nt, Human
uccaggacuauauuugggcc

SEQ ID NO: 3872904 - RNA, 23 nt, Human
uccaggacuauauuugggccugc

SEQ ID NO: 3872905 - RNA, 16 nt, Human
uccaggagaaggccaa

SEQ ID NO: 3872906 - RNA, 14 nt, Human
uccaggagccuggc

SEQ ID NO: 3872907 - RNA, 13 nt, Human
uccaggagcucca

SEQ ID NO: 3872908 - RNA, 15 nt, Human
uccaggagcuccagu

SEQ ID NO: 3872909 - RNA, 17 nt, Human
uccaggagcuccagugu

SEQ ID NO: 3872910 - RNA, 23 nt, Human
uccaggagcuucuuguuuccuug

SEQ ID NO: 3872911 - RNA, 15 nt, Human
uccaggauccagaag

SEQ ID NO: 3872912 - RNA, 20 nt, Human
uccaggaugguguuacugca

SEQ ID NO: 3872913 - RNA, 23 nt, Human
uccaggaugguguuacugcaguu

SEQ ID NO: 3872914 - RNA, 18 nt, Human
uccaggauuccucuuuuc

SEQ ID NO: 3872915 - RNA, 16 nt, Human
uccaggcacagcugag

SEQ ID NO: 3872916 - RNA, 13 nt, Human
uccaggcacagga

SEQ ID NO: 3872917 - RNA, 19 nt, Human
uccaggcacccuucuuucc

SEQ ID NO: 3872918 - RNA, 13 nt, Human
uccaggcagaucc

SEQ ID NO: 3872919 - RNA, 16 nt, Human
uccaggcagauccagg

SEQ ID NO: 3872920 - RNA, 19 nt, Human
uccaggcagauccaggacu

SEQ ID NO: 3872921 - RNA, 21 nt, Human
uccaggcagauccaggacuau

SEQ ID NO: 3872922 - RNA, 20 nt, Human
ucccaaugcacauccauucc

SEQ ID NO: 3872923 - RNA, 22 nt, Human
ucccaaugcacauccauuccca

SEQ ID NO: 3872924 - RNA, 21 nt, Human
ucccaaugguguuuuucuugu

SEQ ID NO: 3872925 - RNA, 14 nt, Human
ucccaauuaggaag

SEQ ID NO: 3872926 - RNA, 20 nt, Human
ucccaauuaggaaguguaac

SEQ ID NO: 3872927 - RNA, 15 nt, Human
ucccaauucacaucu

SEQ ID NO: 3872928 - RNA, 17 nt, Human
ucccaauuucagacucc

SEQ ID NO: 3872929 - RNA, 14 nt, Human
ucccacaaaggaga

SEQ ID NO: 3872930 - RNA, 23 nt, Human
ucccacaauauaaaacuguacuu

SEQ ID NO: 3872931 - RNA, 18 nt, Human
ucccacacuggugacugc

SEQ ID NO: 3872932 - RNA, 13 nt, Human
ucccacagcgcug

SEQ ID NO: 3872933 - RNA, 17 nt, Human
ucccacaggacauuucu

SEQ ID NO: 3872934 - RNA, 21 nt, Human
ucccacaggacauuucucuaa

SEQ ID NO: 3872935 - RNA, 13 nt, Human
ucccacaggcagc

SEQ ID NO: 3872936 - RNA, 15 nt, Human
ucccacaggcagcuu

SEQ ID NO: 3872937 - RNA, 23 nt, Human
ucccacauccaacuccagcaacu

SEQ ID NO: 3872938 - RNA, 16 nt, Human
ucccacaucccugggc

SEQ ID NO: 3872939 - RNA, 13 nt, Human
ucccacaugggcc

SEQ ID NO: 3872940 - RNA, 16 nt, Human
ucccacaugggcccag

SEQ ID NO: 3872941 - RNA, 18 nt, Human
ucccaccaaggucuucag

SEQ ID NO: 3872942 - RNA, 17 nt, Human
ucccaccaggcugcuca

SEQ ID NO: 3872943 - RNA, 15 nt, Human
ucccacccacaugug

SEQ ID NO: 3872944 - RNA, 16 nt, Human
ucccacccacauguga

SEQ ID NO: 3872945 - RNA, 19 nt, Human
ucccaccccaaccugcucu

SEQ ID NO: 3872946 - RNA, 13 nt, Human
ucccaccccaccc

SEQ ID NO: 3872947 - RNA, 20 nt, Human
ucccaccccacccccuucag

SEQ ID NO: 3872948 - RNA, 19 nt, Human
ucccaccccauccuccagg

SEQ ID NO: 3872949 - RNA, 20 nt, Human
ucccacccccacccccagcu

SEQ ID NO: 3872950 - RNA, 23 nt, Human
ucccacccccacccccagcucaa

SEQ ID NO: 3872951 - RNA, 23 nt, Human
ucccacccccagccccgacucca

SEQ ID NO: 3872952 - RNA, 20 nt, Human
ucccacccccaucucucccu

SEQ ID NO: 3872953 - RNA, 17 nt, Human
ucccacccccuucucug

SEQ ID NO: 3872954 - RNA, 21 nt, Human
ucccacccccuucucugcucc

SEQ ID NO: 3872955 - RNA, 15 nt, Human
ucccacccgaugcug

SEQ ID NO: 3872956 - RNA, 18 nt, Human
ucccacccgaugcugcuu

SEQ ID NO: 3872957 - RNA, 20 nt, Human
ucccacccgaugcugcuuuc

SEQ ID NO: 3872958 - RNA, 15 nt, Human
ucccacccucuuccu

SEQ ID NO: 3872959 - RNA, 12 nt, Human
ucccacccugua

SEQ ID NO: 3872960 - RNA, 24 nt, Human
ucccaccgcccagcggcuugccug

SEQ ID NO: 3872961 - RNA, 19 nt, Human
ucccaccgguugcuucugg

SEQ ID NO: 3872962 - RNA, 20 nt, Human
ucccaccgguugcuucuggg

SEQ ID NO: 3872963 - RNA, 21 nt, Human
ucccaccgguugcuucuggga

SEQ ID NO: 3872964 - RNA, 17 nt, Human
ucccaccuagcagcacc

SEQ ID NO: 3872965 - RNA, 15 nt, Human
ucccaccuccagccc

SEQ ID NO: 3872966 - RNA, 14 nt, Human
ucccaccuccaguc

SEQ ID NO: 3872967 - RNA, 17 nt, Human
ucccaccuccagucccc

SEQ ID NO: 3872968 - RNA, 15 nt, Human
ucccaccuccccuug

SEQ ID NO: 3872969 - RNA, 17 nt, Human
ucccaccuccccuuggg

SEQ ID NO: 3872970 - RNA, 18 nt, Human
ucccaccuccccuugggc

SEQ ID NO: 3872971 - RNA, 15 nt, Human
ucccaccucccugcc

SEQ ID NO: 3872972 - RNA, 16 nt, Human
ucccaccucccugccc

SEQ ID NO: 3872973 - RNA, 19 nt, Human
ucccaccucccugcccagg

SEQ ID NO: 3872974 - RNA, 17 nt, Human
ucccaccucucucacuc

SEQ ID NO: 3872975 - RNA, 21 nt, Human
ucccaccucugugaccucagg

SEQ ID NO: 3872976 - RNA, 22 nt, Human
ucccaccucuucucuuccugua

SEQ ID NO: 3872977 - RNA, 13 nt, Human
ucccaccugacac

SEQ ID NO: 3872978 - RNA, 19 nt, Human
ucccaccugcaucuggggc

SEQ ID NO: 3872979 - RNA, 17 nt, Human
ucccaccuuggcugcag

SEQ ID NO: 3872980 - RNA, 18 nt, Human
ucccaccuuggcugcagg

SEQ ID NO: 3872981 - RNA, 20 nt, Human
ucccacgaauuugcugggga

SEQ ID NO: 3872982 - RNA, 21 nt, Human
ucccacgaauuugcuggggaa

SEQ ID NO: 3872983 - RNA, 20 nt, Human
ucccacgcacuccaugagca

SEQ ID NO: 3872984 - RNA, 18 nt, Human
ucccacgcuucucuuugg

SEQ ID NO: 3872985 - RNA, 17 nt, Human
ucccacggccuuucuag

SEQ ID NO: 3872986 - RNA, 17 nt, Human
ucccacgugucuuccac

SEQ ID NO: 3872987 - RNA, 14 nt, Human
ucccacuaucuggg

SEQ ID NO: 3872988 - RNA, 17 nt, Human
ucccacucaagccaagc

SEQ ID NO: 3872989 - RNA, 15 nt, Human
ucccacucaccccgg

SEQ ID NO: 3872990 - RNA, 22 nt, Human
ucccacuccaagcccagcccau

SEQ ID NO: 3872991 - RNA, 17 nt, Human
ucccacucuagggcagu

SEQ ID NO: 3872992 - RNA, 13 nt, Human
ucccacucuccua

SEQ ID NO: 3872993 - RNA, 13 nt, Human
ucccacugcaccc

SEQ ID NO: 3872994 - RNA, 16 nt, Human
ucccacugcacccccu

SEQ ID NO: 3872995 - RNA, 18 nt, Human
ucccacugccucagguuc

SEQ ID NO: 3872996 - RNA, 21 nt, Human
ucccacuucagccucccaagc

SEQ ID NO: 3872997 - RNA, 15 nt, Human
ucccacuuccccucc

SEQ ID NO: 3872998 - RNA, 20 nt, Human
ucccacuuccccuccuaccc

SEQ ID NO: 3872999 - RNA, 13 nt, Human
ucccagaagauga

SEQ ID NO: 3873000 - RNA, 17 nt, Human
ucccagaagaugacuga

SEQ ID NO: 3873001 - RNA, 20 nt, Human
ucccagaaggaccuccugag

SEQ ID NO: 3873002 - RNA, 12 nt, Human
ucccagaaucaa

SEQ ID NO: 3873003 - RNA, 18 nt, Human
ucccagaaucccagccgg

SEQ ID NO: 3873004 - RNA, 19 nt, Human
ucccagaaucccagccggc

SEQ ID NO: 3873005 - RNA, 17 nt, Human
ucccagaccccgacacc

SEQ ID NO: 3873006 - RNA, 17 nt, Human
ucccagagacaggaaaa

SEQ ID NO: 3873007 - RNA, 14 nt, Human
ucccagagagcccg

SEQ ID NO: 3873008 - RNA, 16 nt, Human
ucccagagcaaaauaa

SEQ ID NO: 3873009 - RNA, 13 nt, Human
ucccagagcaccu

SEQ ID NO: 3873010 - RNA, 15 nt, Human
ucccagagcaccugc

SEQ ID NO: 3873011 - RNA, 20 nt, Human
ucccagagcucccucugccc

SEQ ID NO: 3873012 - RNA, 19 nt, Human
ucccagagcugguggaccc

SEQ ID NO: 3873013 - RNA, 23 nt, Human
ucccagaggggccugccaccugg

SEQ ID NO: 3873014 - RNA, 21 nt, Human
ucccagaggguuuccaugggg

SEQ ID NO: 3873015 - RNA, 17 nt, Human
ucccagaucggaucugu

SEQ ID NO: 3873016 - RNA, 20 nt, Human
ucccagauuggcucacacug

SEQ ID NO: 3873017 - RNA, 20 nt, Human
ucccagauuucagucuuuuc

SEQ ID NO: 3873018 - RNA, 15 nt, Human
ucccagcaccugccu

SEQ ID NO: 3873019 - RNA, 16 nt, Human
ucccagcacuuuggga

SEQ ID NO: 3873020 - RNA, 18 nt, Human
ucccagcacuuugggagg

SEQ ID NO: 3873021 - RNA, 21 nt, Human
ucccagcacuuugggaggcca

SEQ ID NO: 3873022 - RNA, 23 nt, Human
ucccagcacuuugggaggccaag

SEQ ID NO: 3873023 - RNA, 23 nt, Human
ucccagcacuuugggaggcugag

SEQ ID NO: 3873024 - RNA, 14 nt, Human
ucccagcagccagc

SEQ ID NO: 3873025 - RNA, 13 nt, Human
ucccagccacccc

SEQ ID NO: 3873026 - RNA, 22 nt, Human
ucccagccacucgggaggcuga

SEQ ID NO: 3873027 - RNA, 18 nt, Human
ucccagccagcaguucag

SEQ ID NO: 3873028 - RNA, 15 nt, Human
ucccagccaggcccu

SEQ ID NO: 3873029 - RNA, 16 nt, Human
ucccagcccccugacc

SEQ ID NO: 3873030 - RNA, 18 nt, Human
ucccagcccccugaccac

SEQ ID NO: 3873031 - RNA, 16 nt, Human
ucccagcccuauggau

SEQ ID NO: 3873032 - RNA, 17 nt, Human
ucccagcccuauggaug

SEQ ID NO: 3873033 - RNA, 18 nt, Human
ucccagcccuauggaugu

SEQ ID NO: 3873034 - RNA, 14 nt, Human
ucccagccuuggca

SEQ ID NO: 3873035 - RNA, 14 nt, Human
ucccagcuacucag

SEQ ID NO: 3873036 - RNA, 16 nt, Human
ucccagcuacucagaa

SEQ ID NO: 3873037 - RNA, 19 nt, Human
ucccagcuacucagaagcc

SEQ ID NO: 3873038 - RNA, 16 nt, Human
ucccagcuacucagga

SEQ ID NO: 3873039 - RNA, 19 nt, Human
ucccagcuacuugggaggc

SEQ ID NO: 3873040 - RNA, 20 nt, Human
ucccagcuaggaagagcagg

SEQ ID NO: 3873041 - RNA, 17 nt, Human
ucccagcucacgucaca

SEQ ID NO: 3873042 - RNA, 15 nt, Human
ucccagcuccacccc

SEQ ID NO: 3873043 - RNA, 18 nt, Human
ucccagcucucccucugg

SEQ ID NO: 3873044 - RNA, 12 nt, Human
ucccagcugccu

SEQ ID NO: 3873045 - RNA, 14 nt, Human
ucccagcugccuag

SEQ ID NO: 3873046 - RNA, 15 nt, Human
ucccaggacaccaca

SEQ ID NO: 3873047 - RNA, 18 nt, Human
ucccaggaccacaggcuc

SEQ ID NO: 3873048 - RNA, 14 nt, Human
ucccaggacccuga

SEQ ID NO: 3873049 - RNA, 17 nt, Human
ucccaggagccugccca

SEQ ID NO: 3873050 - RNA, 18 nt, Human
ucccaggagccugcccag

SEQ ID NO: 3873051 - RNA, 22 nt, Human
ucccaggaguggaggaggccug

SEQ ID NO: 3873052 - RNA, 15 nt, Human
ucccaggaguucugc

SEQ ID NO: 3873053 - RNA, 15 nt, Human
ucccaggaugcuggg

SEQ ID NO: 3873054 - RNA, 16 nt, Human
ucccaggauguacaag

SEQ ID NO: 3873055 - RNA, 20 nt, Human
ucccaggcaaggcuguggac

SEQ ID NO: 3873056 - RNA, 17 nt, Human
ucccaggcauuccccag

SEQ ID NO: 3873057 - RNA, 19 nt, Human
ucccaggcauuccccagga

SEQ ID NO: 3873058 - RNA, 21 nt, Human
ucccaggcauuccccaggagg

SEQ ID NO: 3873059 - RNA, 19 nt, Human
ucccaggcccacugugccu

SEQ ID NO: 3873060 - RNA, 21 nt, Human
ucccaggccccaugaccucca

SEQ ID NO: 3873061 - RNA, 23 nt, Human
ucccaggccccaugaccuccagc

SEQ ID NO: 3873062 - RNA, 18 nt, Human
ucccaggcugagccucag

SEQ ID NO: 3873063 - RNA, 19 nt, Human
ucccaggcugagccucagu

SEQ ID NO: 3873064 - RNA, 18 nt, Human
ucccaggcuucacccuga

SEQ ID NO: 3873065 - RNA, 22 nt, Human
ucccaggcuucacccugaaugg

SEQ ID NO: 3873066 - RNA, 20 nt, Human
uccuggucuugagaugucuu

SEQ ID NO: 3873067 - RNA, 13 nt, Human
uccuggugccacc

SEQ ID NO: 3873068 - RNA, 14 nt, Human
uccuggugccaccu

SEQ ID NO: 3873069 - RNA, 22 nt, Human
uccuggugcccuggaugcccag

SEQ ID NO: 3873070 - RNA, 15 nt, Human
uccuggugcucucug

SEQ ID NO: 3873071 - RNA, 17 nt, Human
uccugguggggcagcuc

SEQ ID NO: 3873072 - RNA, 17 nt, Human
uccugguggguccaggg

SEQ ID NO: 3873073 - RNA, 18 nt, Human
uccuggugguauuuucaa

SEQ ID NO: 3873074 - RNA, 15 nt, Human
uccuggugucacccc

SEQ ID NO: 3873075 - RNA, 18 nt, Human
uccuggugucaccccaga

SEQ ID NO: 3873076 - RNA, 21 nt, Human
uccuggugucacuuacuguuu

SEQ ID NO: 3873077 - RNA, 14 nt, Human
uccuggugugaagg

SEQ ID NO: 3873078 - RNA, 15 nt, Human
uccugguguggaaga

SEQ ID NO: 3873079 - RNA, 15 nt, Human
uccugguucccguuu

SEQ ID NO: 3873080 - RNA, 20 nt, Human
uccuguaaacacucagcugu

SEQ ID NO: 3873081 - RNA, 21 nt, Human
uccuguaaacacucagcuguu

SEQ ID NO: 3873082 - RNA, 19 nt, Human
uccuguaaaugguguacau

SEQ ID NO: 3873083 - RNA, 17 nt, Human
uccuguacacugaauau

SEQ ID NO: 3873084 - RNA, 20 nt, Human
uccuguagaccuagggagga

SEQ ID NO: 3873085 - RNA, 15 nt, Human
uccuguagcaucuuc

SEQ ID NO: 3873086 - RNA, 22 nt, Human
uccuguagcaucuucuggaguc

SEQ ID NO: 3873087 - RNA, 21 nt, Human
uccuguagccuucuguaggaa

SEQ ID NO: 3873088 - RNA, 22 nt, Human
uccuguagccuucuguaggaau

SEQ ID NO: 3873089 - RNA, 19 nt, Human
uccuguaggaguucuauuu

SEQ ID NO: 3873090 - RNA, 15 nt, Human
uccuguaguuuuauu

SEQ ID NO: 3873091 - RNA, 14 nt, Human
uccuguauaagcac

SEQ ID NO: 3873092 - RNA, 14 nt, Human
uccugucagugccg

SEQ ID NO: 3873093 - RNA, 15 nt, Human
uccugucaucugaga

SEQ ID NO: 3873094 - RNA, 17 nt, Human
uccuguccacacccagc

SEQ ID NO: 3873095 - RNA, 15 nt, Human
uccuguccagcucca

SEQ ID NO: 3873096 - RNA, 14 nt, Human
uccugucccugcgc

SEQ ID NO: 3873097 - RNA, 21 nt, Human
uccugucccuucucuuaauuu

SEQ ID NO: 3873098 - RNA, 13 nt, Human
uccuguccgcccu

SEQ ID NO: 3873099 - RNA, 10 nt, Human
uccuguccuc

SEQ ID NO: 3873100 - RNA, 21 nt, Human
uccuguccucccauccccugg

SEQ ID NO: 3873101 - RNA, 13 nt, Human
uccuguccugcuc

SEQ ID NO: 3873102 - RNA, 23 nt, Human
uccuguccuuuacacauucggcu

SEQ ID NO: 3873103 - RNA, 19 nt, Human
uccugucggagcccugucu

SEQ ID NO: 3873104 - RNA, 11 nt, Human
uccugucuccc

SEQ ID NO: 3873105 - RNA, 13 nt, Human
uccugucuccccu

SEQ ID NO: 3873106 - RNA, 21 nt, Human
uccugucugccagccagcagc

SEQ ID NO: 3873107 - RNA, 17 nt, Human
uccugucuucccagggu

SEQ ID NO: 3873108 - RNA, 13 nt, Human
uccugucuucugc

SEQ ID NO: 3873109 - RNA, 18 nt, Human
uccugucuuuaaggaaaa

SEQ ID NO: 3873110 - RNA, 16 nt, Human
uccugucuuuacaaau

SEQ ID NO: 3873111 - RNA, 22 nt, Human
uccugugaaugccacugccuuc

SEQ ID NO: 3873112 - RNA, 18 nt, Human
uccugugacuucagcucu

SEQ ID NO: 3873113 - RNA, 18 nt, Human
uccugugagguuucccaa

SEQ ID NO: 3873114 - RNA, 19 nt, Human
uccugugagguuucccaau

SEQ ID NO: 3873115 - RNA, 17 nt, Human
uccugugaucuuauuuu

SEQ ID NO: 3873116 - RNA, 14 nt, Human
uccugugcacagcc

SEQ ID NO: 3873117 - RNA, 13 nt, Human
uccugugccaggu

SEQ ID NO: 3873118 - RNA, 18 nt, Human
uccugugcuacuuugccu

SEQ ID NO: 3873119 - RNA, 12 nt, Human
uccugugcuggg

SEQ ID NO: 3873120 - RNA, 18 nt, Human
uccuguggaacccagcag

SEQ ID NO: 3873121 - RNA, 23 nt, Human
uccuguggaaggcagagaaaucu

SEQ ID NO: 3873122 - RNA, 14 nt, Human
uccuguggcaggca

SEQ ID NO: 3873123 - RNA, 16 nt, Human
uccuguggcaggcagc

SEQ ID NO: 3873124 - RNA, 20 nt, Human
uccuguggcaggcagcgcca

SEQ ID NO: 3873125 - RNA, 16 nt, Human
uccuguggcauaaauu

SEQ ID NO: 3873126 - RNA, 14 nt, Human
uccugugggagccu

SEQ ID NO: 3873127 - RNA, 15 nt, Human
uccugugggagccuc

SEQ ID NO: 3873128 - RNA, 13 nt, Human
uccuguggggaaa

SEQ ID NO: 3873129 - RNA, 23 nt, Human
uccuguguaaucauuucuugggc

SEQ ID NO: 3873130 - RNA, 16 nt, Human
uccuguguacuguguc

SEQ ID NO: 3873131 - RNA, 16 nt, Human
uccugugucaauccag

SEQ ID NO: 3873132 - RNA, 18 nt, Human
uccuguguggagagggaa

SEQ ID NO: 3873133 - RNA, 21 nt, Human
uccuguguggagagggaaugu

SEQ ID NO: 3873134 - RNA, 19 nt, Human
uccuguguguuaagcucug

SEQ ID NO: 3873135 - RNA, 16 nt, Human
uccuguuagcuccuca

SEQ ID NO: 3873136 - RNA, 23 nt, Human
uccuguuagcuguuauuucuauu

SEQ ID NO: 3873137 - RNA, 15 nt, Human
uccuguucacaccag

SEQ ID NO: 3873138 - RNA, 16 nt, Human
uccuguucagcauucu

SEQ ID NO: 3873139 - RNA, 19 nt, Human
uccuguucuuaagacguga

SEQ ID NO: 3873140 - RNA, 22 nt, Human
uccuguugcacccagcccuggu

SEQ ID NO: 3873141 - RNA, 21 nt, Human
uccuguuggauuuguuuaaaa

SEQ ID NO: 3873142 - RNA, 21 nt, Human
uccuguugggagagggcgcag

SEQ ID NO: 3873143 - RNA, 17 nt, Human
uccuguugucaagaaua

SEQ ID NO: 3873144 - RNA, 20 nt, Human
uccuguuguuauggaaacug

SEQ ID NO: 3873145 - RNA, 19 nt, Human
uccuguuguuguuaaugaa

SEQ ID NO: 3873146 - RNA, 21 nt, Human
uccuguuguuguuaaugaaaa

SEQ ID NO: 3873147 - RNA, 13 nt, Human
uccuguuucugaa

SEQ ID NO: 3873148 - RNA, 21 nt, Human
uccuguuucugaaaagaaaua

SEQ ID NO: 3873149 - RNA, 13 nt, Human
uccuguuugucua

SEQ ID NO: 3873150 - RNA, 17 nt, Human
uccuguuuugcacagcc

SEQ ID NO: 3873151 - RNA, 14 nt, Human
uccuguuuuucaca

SEQ ID NO: 3873152 - RNA, 20 nt, Human
uccuguuuuucuggguggcc

SEQ ID NO: 3873153 - RNA, 13 nt, Human
uccuguuuuuguu

SEQ ID NO: 3873154 - RNA, 19 nt, Human
uccuguuuuuguuaacuuu

SEQ ID NO: 3873155 - RNA, 19 nt, Human
uccuuaaaaaucacacugu

SEQ ID NO: 3873156 - RNA, 23 nt, Human
uccuuaaaggcaccaucuaauag

SEQ ID NO: 3873157 - RNA, 23 nt, Human
uccuuaaauaaacucaaugagcu

SEQ ID NO: 3873158 - RNA, 13 nt, Human
uccuuaagaacac

SEQ ID NO: 3873159 - RNA, 19 nt, Human
uccuuaaggcucuuuugua

SEQ ID NO: 3873160 - RNA, 11 nt, Human
uccuuaaguau

SEQ ID NO: 3873161 - RNA, 17 nt, Human
uccuuaauucacuccca

SEQ ID NO: 3873162 - RNA, 16 nt, Human
uccuuaccagcagagc

SEQ ID NO: 3873163 - RNA, 20 nt, Human
uccuuaccagcagagcaccu

SEQ ID NO: 3873164 - RNA, 14 nt, Human
uccuuaccucuucc

SEQ ID NO: 3873165 - RNA, 17 nt, Human
uccuuaccucuuccgga

SEQ ID NO: 3873166 - RNA, 14 nt, Human
uccuuacuccugug

SEQ ID NO: 3873167 - RNA, 17 nt, Human
uccuuacuccuguggga

SEQ ID NO: 3873168 - RNA, 23 nt, Human
uccuuacuccugugggagccucg

SEQ ID NO: 3873169 - RNA, 20 nt, Human
uccuuacuuuuuauauauau

SEQ ID NO: 3873170 - RNA, 17 nt, Human
uccuuagaccuuccaua

SEQ ID NO: 3873171 - RNA, 13 nt, Human
uccuuagcugcca

SEQ ID NO: 3873172 - RNA, 14 nt, Human
uccuuagcugccaa

SEQ ID NO: 3873173 - RNA, 22 nt, Human
uccuuagucuucucauagcauu

SEQ ID NO: 3873174 - RNA, 21 nt, Human
uccuuauggguagggcucuga

SEQ ID NO: 3873175 - RNA, 15 nt, Human
uccuucaaaauccuu

SEQ ID NO: 3873176 - RNA, 16 nt, Human
uccuucaaagcaaaug

SEQ ID NO: 3873177 - RNA, 18 nt, Human
uccuucaaagucucaaug

SEQ ID NO: 3873178 - RNA, 21 nt, Human
uccuucaaaguuuaauaaauu

SEQ ID NO: 3873179 - RNA, 20 nt, Human
uccuucaacaaggcuugcug

SEQ ID NO: 3873180 - RNA, 21 nt, Human
uccuucaacaaggcuugcugc

SEQ ID NO: 3873181 - RNA, 20 nt, Human
uccuucaacaauucuaaaau

SEQ ID NO: 3873182 - RNA, 20 nt, Human
uccuucaagaacucugggcu

SEQ ID NO: 3873183 - RNA, 21 nt, Human
uccuucaagaacucugggcug

SEQ ID NO: 3873184 - RNA, 19 nt, Human
uccuucaaguuagcucagg

SEQ ID NO: 3873185 - RNA, 14 nt, Human
uccuucacauccug

SEQ ID NO: 3873186 - RNA, 20 nt, Human
uccuucaccuuuguccccac

SEQ ID NO: 3873187 - RNA, 13 nt, Human
uccuucagacacc

SEQ ID NO: 3873188 - RNA, 18 nt, Human
uccuucagcacuuuagaa

SEQ ID NO: 3873189 - RNA, 15 nt, Human
uccuucagcccucac

SEQ ID NO: 3873190 - RNA, 11 nt, Human
uccuucagugc

SEQ ID NO: 3873191 - RNA, 12 nt, Human
uccuucagugcc

SEQ ID NO: 3873192 - RNA, 13 nt, Human
uccuucagugccu

SEQ ID NO: 3873193 - RNA, 15 nt, Human
uccuucagugccuua

SEQ ID NO: 3873194 - RNA, 20 nt, Human
uccuucaucuuuuaaagaaa

SEQ ID NO: 3873195 - RNA, 22 nt, Human
uccuucauuucugauauagaau

SEQ ID NO: 3873196 - RNA, 14 nt, Human
uccuuccaacagga

SEQ ID NO: 3873197 - RNA, 15 nt, Human
uccuuccaccaaguu

SEQ ID NO: 3873198 - RNA, 14 nt, Human
uccuuccaccuccc

SEQ ID NO: 3873199 - RNA, 17 nt, Human
uccuuccaccucccucc

SEQ ID NO: 3873200 - RNA, 22 nt, Human
uccuuccagcuagugacccaca

SEQ ID NO: 3873201 - RNA, 21 nt, Human
uccuuccaggcccccaccacu

SEQ ID NO: 3873202 - RNA, 15 nt, Human
uccuuccaguauaac

SEQ ID NO: 3873203 - RNA, 21 nt, Human
uccuuccaguguccuuagaac

SEQ ID NO: 3873204 - RNA, 15 nt, Human
uccuucccacucugu

SEQ ID NO: 3873205 - RNA, 17 nt, Human
uccuucccacucuucuc

SEQ ID NO: 3873206 - RNA, 19 nt, Human
uccuucccacucuucucau

SEQ ID NO: 3873207 - RNA, 16 nt, Human
uccuucccagcugccc

SEQ ID NO: 3873208 - RNA, 21 nt, Human
uccuucccagcugccccuccc

SEQ ID NO: 3873209 - RNA, 20 nt, Human
uccuucccaggaguggagga

SEQ ID NO: 3873210 - RNA, 14 nt, Human
uccuucccauggag

SEQ ID NO: 3873211 - RNA, 22 nt, Human
ucgcuucuguguaucucuuuca

SEQ ID NO: 3873212 - RNA, 12 nt, Human
ucgcuuguaaau

SEQ ID NO: 3873213 - RNA, 20 nt, Human
ucgcuugugcagaaaacauu

SEQ ID NO: 3873214 - RNA, 20 nt, Human
ucggaaccugugagcugcac

SEQ ID NO: 3873215 - RNA, 22 nt, Human
ucggaacugcaugcugcuggac

SEQ ID NO: 3873216 - RNA, 16 nt, Human
ucggaagcagugccuu

SEQ ID NO: 3873217 - RNA, 23 nt, Human
ucggaccgcuuguggggacccag

SEQ ID NO: 3873218 - RNA, 23 nt, Human
ucggacuaagccuaccugcucuc

SEQ ID NO: 3873219 - RNA, 18 nt, Human
ucggacuuagcugggaga

SEQ ID NO: 3873220 - RNA, 21 nt, Human
ucggagaagagcgcaguguuu

SEQ ID NO: 3873221 - RNA, 23 nt, Human
ucggagccucauccgaggcaggg

SEQ ID NO: 3873222 - RNA, 13 nt, Human
ucggaggaagccc

SEQ ID NO: 3873223 - RNA, 20 nt, Human
ucggaggccccaaaggaaaa

SEQ ID NO: 3873224 - RNA, 19 nt, Human
ucggaggccccacugaugc

SEQ ID NO: 3873225 - RNA, 22 nt, Human
ucggaggcuugucagagcuggg

SEQ ID NO: 3873226 - RNA, 12 nt, Human
ucggaguucuuc

SEQ ID NO: 3873227 - RNA, 16 nt, Human
ucggauuuuuuccaaa

SEQ ID NO: 3873228 - RNA, 17 nt, Human
ucggauuuuuuccaaaa

SEQ ID NO: 3873229 - RNA, 18 nt, Human
ucggcaacuaagcagucc

SEQ ID NO: 3873230 - RNA, 12 nt, Human
ucggcccacagc

SEQ ID NO: 3873231 - RNA, 19 nt, Human
ucggcccacagcucccacc

SEQ ID NO: 3873232 - RNA, 18 nt, Human
ucggccuccauccugagg

SEQ ID NO: 3873233 - RNA, 19 nt, Human
ucggccucccaaagugcug

SEQ ID NO: 3873234 - RNA, 22 nt, Human
ucggccucccaaagugcuggga

SEQ ID NO: 3873235 - RNA, 17 nt, Human
ucggccucuaaccccag

SEQ ID NO: 3873236 - RNA, 14 nt, Human
ucggccugccccca

SEQ ID NO: 3873237 - RNA, 17 nt, Human
ucggcguggcccaaggc

SEQ ID NO: 3873238 - RNA, 22 nt, Human
ucggcguggcccaaggcuggca

SEQ ID NO: 3873239 - RNA, 14 nt, Human
ucggcucagcucgg

SEQ ID NO: 3873240 - RNA, 12 nt, Human
ucggcucccugg

SEQ ID NO: 3873241 - RNA, 11 nt, Human
ucggcuccugc

SEQ ID NO: 3873242 - RNA, 13 nt, Human
ucggcuccugcug

SEQ ID NO: 3873243 - RNA, 14 nt, Human
ucggcuccugcugc

SEQ ID NO: 3873244 - RNA, 18 nt, Human
ucggcuccugcugcacca

SEQ ID NO: 3873245 - RNA, 15 nt, Human
ucgggaaccucacuc

SEQ ID NO: 3873246 - RNA, 15 nt, Human
ucgggaagagaggag

SEQ ID NO: 3873247 - RNA, 16 nt, Human
ucgggaagagaggagu

SEQ ID NO: 3873248 - RNA, 21 nt, Human
ucgggaagagaggaguucaau

SEQ ID NO: 3873249 - RNA, 22 nt, Human
ucgggaagagaggaguucaaug

SEQ ID NO: 3873250 - RNA, 21 nt, Human
ucgggagacagcaucaggguu

SEQ ID NO: 3873251 - RNA, 13 nt, Human
ucgggagcagugu

SEQ ID NO: 3873252 - RNA, 19 nt, Human
ucgggagcagugucuucca

SEQ ID NO: 3873253 - RNA, 22 nt, Human
ucgggagcagugucuuccauaa

SEQ ID NO: 3873254 - RNA, 16 nt, Human
ucgggaggcugagaca

SEQ ID NO: 3873255 - RNA, 17 nt, Human
ucgggaggucgaggcag

SEQ ID NO: 3873256 - RNA, 17 nt, Human
ucgggcaccagccagcg

SEQ ID NO: 3873257 - RNA, 14 nt, Human
ucgggcccaccugg

SEQ ID NO: 3873258 - RNA, 17 nt, Human
ucgggcccaccuggcca

SEQ ID NO: 3873259 - RNA, 18 nt, Human
ucgggcccaccuggccac

SEQ ID NO: 3873260 - RNA, 11 nt, Human
ucgggcccagc

SEQ ID NO: 3873261 - RNA, 12 nt, Human
ucgggcccagcc

SEQ ID NO: 3873262 - RNA, 17 nt, Human
ucgggcccaggccaucu

SEQ ID NO: 3873263 - RNA, 17 nt, Human
ucgggccccaccugcag

SEQ ID NO: 3873264 - RNA, 21 nt, Human
ucgggcccuucuugcugcccu

SEQ ID NO: 3873265 - RNA, 12 nt, Human
ucgggcucagcu

SEQ ID NO: 3873266 - RNA, 15 nt, Human
ucgggcucagcucug

SEQ ID NO: 3873267 - RNA, 14 nt, Human
ucgggcucccgggu

SEQ ID NO: 3873268 - RNA, 12 nt, Human
ucgggcuccugu

SEQ ID NO: 3873269 - RNA, 16 nt, Human
ucgggcuccugugccc

SEQ ID NO: 3873270 - RNA, 17 nt, Human
ucgggcuccugugcccu

SEQ ID NO: 3873271 - RNA, 17 nt, Human
ucggggauguguccuga

SEQ ID NO: 3873272 - RNA, 15 nt, Human
ucggggcaucuggcc

SEQ ID NO: 3873273 - RNA, 18 nt, Human
ucggggcaugcuggggca

SEQ ID NO: 3873274 - RNA, 16 nt, Human
ucgggggcuggccuag

SEQ ID NO: 3873275 - RNA, 14 nt, Human
ucgggggcuggggc

SEQ ID NO: 3873276 - RNA, 17 nt, Human
ucggggugcacaggagg

SEQ ID NO: 3873277 - RNA, 22 nt, Human
ucggggugcacaggaggggguc

SEQ ID NO: 3873278 - RNA, 12 nt, Human
ucggucaccuug

SEQ ID NO: 3873279 - RNA, 13 nt, Human
ucggucaccuugu

SEQ ID NO: 3873280 - RNA, 16 nt, Human
ucgguguccccaccau

SEQ ID NO: 3873281 - RNA, 19 nt, Human
ucgguguccccaccaucug

SEQ ID NO: 3873282 - RNA, 20 nt, Human
ucgguguccccaccaucugc

SEQ ID NO: 3873283 - RNA, 21 nt, Human
ucgguguccccaccaucugcu

SEQ ID NO: 3873284 - RNA, 23 nt, Human
ucgguuccacgucccccuggggc

SEQ ID NO: 3873285 - RNA, 19 nt, Human
ucgguuucuaacuuggagc

SEQ ID NO: 3873286 - RNA, 13 nt, Human
ucgguuucuccaa

SEQ ID NO: 3873287 - RNA, 19 nt, Human
ucgguuuuuuuccuguuuc

SEQ ID NO: 3873288 - RNA, 16 nt, Human
ucguaaaauuaagaaa

SEQ ID NO: 3873289 - RNA, 15 nt, Human
ucguacaguucuucg

SEQ ID NO: 3873290 - RNA, 22 nt, Human
ucguacauaauacugaaccacu

SEQ ID NO: 3873291 - RNA, 22 nt, Human
ucguauagaagucuucaugaaa

SEQ ID NO: 3873292 - RNA, 21 nt, Human
ucgucauguuggccaggcugg

SEQ ID NO: 3873293 - RNA, 16 nt, Human
ucgucugacugugugu

SEQ ID NO: 3873294 - RNA, 18 nt, Human
ucgucuguuuauaaacau

SEQ ID NO: 3873295 - RNA, 12 nt, Human
ucgucuucacuc

SEQ ID NO: 3873296 - RNA, 17 nt, Human
ucgucuuccgucucccc

SEQ ID NO: 3873297 - RNA, 10 nt, Human
ucgucuuugc

SEQ ID NO: 3873298 - RNA, 21 nt, Human
ucgugaagaagccuguaacac

SEQ ID NO: 3873299 - RNA, 17 nt, Human
ucgugaaguauacugua

SEQ ID NO: 3873300 - RNA, 17 nt, Human
ucgugaccugcuaggcc

SEQ ID NO: 3873301 - RNA, 18 nt, Human
ucgugacgcugaauaaau

SEQ ID NO: 3873302 - RNA, 21 nt, Human
ucgugacgcugaauaaauguc

SEQ ID NO: 3873303 - RNA, 22 nt, Human
ucgugacgcugaauaaaugucu

SEQ ID NO: 3873304 - RNA, 22 nt, Human
ucgugccagucgcgcugccugu

SEQ ID NO: 3873305 - RNA, 20 nt, Human
ucgugccguuacucuccaac

SEQ ID NO: 3873306 - RNA, 23 nt, Human
ucgugccguuacucuccaaccug

SEQ ID NO: 3873307 - RNA, 14 nt, Human
ucgugccugugucc

SEQ ID NO: 3873308 - RNA, 18 nt, Human
ucgugcggaaucagcuuc

SEQ ID NO: 3873309 - RNA, 23 nt, Human
ucguggaaagggugcugcuuccc

SEQ ID NO: 3873310 - RNA, 18 nt, Human
ucguggacacacacagac

SEQ ID NO: 3873311 - RNA, 20 nt, Human
ucguggacaccugcccugcc

SEQ ID NO: 3873312 - RNA, 10 nt, Human
ucguggagag

SEQ ID NO: 3873313 - RNA, 12 nt, Human
ucguggagagcu

SEQ ID NO: 3873314 - RNA, 16 nt, Human
ucguggagagcuagga

SEQ ID NO: 3873315 - RNA, 17 nt, Human
ucguggagaugucuucg

SEQ ID NO: 3873316 - RNA, 19 nt, Human
ucguggagaugucuucgua

SEQ ID NO: 3873317 - RNA, 13 nt, Human
ucguggccagccc

SEQ ID NO: 3873318 - RNA, 17 nt, Human
ucguggccagcccggcu

SEQ ID NO: 3873319 - RNA, 20 nt, Human
ucguggccuuccccagccuc

SEQ ID NO: 3873320 - RNA, 13 nt, Human
ucguggcugucaa

SEQ ID NO: 3873321 - RNA, 23 nt, Human
ucgugggagagagacguguacau

SEQ ID NO: 3873322 - RNA, 20 nt, Human
ucgugggaucugccccuccc

SEQ ID NO: 3873323 - RNA, 15 nt, Human
ucgugggugugugua

SEQ ID NO: 3873324 - RNA, 16 nt, Human
ucguguauccuggggc

SEQ ID NO: 3873325 - RNA, 15 nt, Human
ucguguguagaaaaa

SEQ ID NO: 3873326 - RNA, 21 nt, Human
ucguguguuucuauuuuuuga

SEQ ID NO: 3873327 - RNA, 14 nt, Human
ucguuaacugugua

SEQ ID NO: 3873328 - RNA, 21 nt, Human
ucguuaacuguguauguacau

SEQ ID NO: 3873329 - RNA, 22 nt, Human
ucguuaacuguguauguacaua

SEQ ID NO: 3873330 - RNA, 13 nt, Human
ucguuaauuugua

SEQ ID NO: 3873331 - RNA, 23 nt, Human
ucguuagaccgcucucuuuucug

SEQ ID NO: 3873332 - RNA, 21 nt, Human
ucguuagggaagagaaacagg

SEQ ID NO: 3873333 - RNA, 18 nt, Human
ucguuaguaaucuguaua

SEQ ID NO: 3873334 - RNA, 22 nt, Human
ucguucgcagagcuuuucagau

SEQ ID NO: 3873335 - RNA, 11 nt, Human
ucguucugugg

SEQ ID NO: 3873336 - RNA, 15 nt, Human
ucguucuguuuacau

SEQ ID NO: 3873337 - RNA, 19 nt, Human
ucguucuguuuacaucagu

SEQ ID NO: 3873338 - RNA, 15 nt, Human
ucguucuuguuagua

SEQ ID NO: 3873339 - RNA, 18 nt, Human
ucguucuuuuuaaguuaa

SEQ ID NO: 3873340 - RNA, 16 nt, Human
ucguugacuuuaggga

SEQ ID NO: 3873341 - RNA, 22 nt, Human
ucguugguuauacaaguucuug

SEQ ID NO: 3873342 - RNA, 14 nt, Human
ucguuuaaugaaug

SEQ ID NO: 3873343 - RNA, 15 nt, Human
ucguuuacuaugccu

SEQ ID NO: 3873344 - RNA, 16 nt, Human
ucguuucaaaaacaca

SEQ ID NO: 3873345 - RNA, 19 nt, Human
ucguuucaaaaacacagug

SEQ ID NO: 3873346 - RNA, 13 nt, Human
ucguuucuguaua

SEQ ID NO: 3873347 - RNA, 14 nt, Human
ucguuuguguucug

SEQ ID NO: 3873348 - RNA, 14 nt, Human
ucguuuguuuguuu

SEQ ID NO: 3873349 - RNA, 13 nt, Human
ucguuuucuuaaa

SEQ ID NO: 3873350 - RNA, 17 nt, Human
ucguuuuuuucauucca

SEQ ID NO: 3873351 - RNA, 14 nt, Human
ucuaaaaauauaca

SEQ ID NO: 3873352 - RNA, 11 nt, Human
ucuaaaacaau

SEQ ID NO: 3873353 - RNA, 17 nt, Human
ucuaaaacuaaauagca

SEQ ID NO: 3873354 - RNA, 20 nt, Human
ucuaaaacuaaauagcaugu

SEQ ID NO: 3873355 - RNA, 12 nt, Human
ucuaaaacugua

SEQ ID NO: 3873356 - RNA, 18 nt, Human
ucugcaggucccuaauaa

SEQ ID NO: 3873357 - RNA, 21 nt, Human
ucugcaguagucucugugcuu

SEQ ID NO: 3873358 - RNA, 19 nt, Human
ucugcaguccuacucaagc

SEQ ID NO: 3873359 - RNA, 16 nt, Human
ucugcauauguugaau

SEQ ID NO: 3873360 - RNA, 21 nt, Human
ucugcauauguugaauacuuu

SEQ ID NO: 3873361 - RNA, 22 nt, Human
ucugcauccagagauucauuuu

SEQ ID NO: 3873362 - RNA, 14 nt, Human
ucugcaucccagca

SEQ ID NO: 3873363 - RNA, 21 nt, Human
ucugcaucccagcaccugccu

SEQ ID NO: 3873364 - RNA, 24 nt, Human
ucugcaucccagcaccugccuccu

SEQ ID NO: 3873365 - RNA, 18 nt, Human
ucugcaucuccugucuuu

SEQ ID NO: 3873366 - RNA, 15 nt, Human
ucugcaucugaccac

SEQ ID NO: 3873367 - RNA, 22 nt, Human
ucugcaucuuggggacaucucu

SEQ ID NO: 3873368 - RNA, 16 nt, Human
ucugcauucauuuuua

SEQ ID NO: 3873369 - RNA, 14 nt, Human
ucugcauugcccag

SEQ ID NO: 3873370 - RNA, 18 nt, Human
ucugcauugcccagucuu

SEQ ID NO: 3873371 - RNA, 18 nt, Human
ucugcauugcuagauaaa

SEQ ID NO: 3873372 - RNA, 10 nt, Human
ucugcauuua

SEQ ID NO: 3873373 - RNA, 15 nt, Human
ucugcauuuaaaaaa

SEQ ID NO: 3873374 - RNA, 15 nt, Human
ucugcauuugucuau

SEQ ID NO: 3873375 - RNA, 17 nt, Human
ucugcauuuucacccca

SEQ ID NO: 3873376 - RNA, 21 nt, Human
ucugcauuuucaccccacccu

SEQ ID NO: 3873377 - RNA, 19 nt, Human
ucugcauuuucugaaacua

SEQ ID NO: 3873378 - RNA, 20 nt, Human
ucugcauuuucugaaacuaa

SEQ ID NO: 3873379 - RNA, 20 nt, Human
ucugcauuuuucagagaaua

SEQ ID NO: 3873380 - RNA, 15 nt, Human
ucugcauuuuucugc

SEQ ID NO: 3873381 - RNA, 18 nt, Human
ucugcauuuuucugcaga

SEQ ID NO: 3873382 - RNA, 13 nt, Human
ucugccaccccua

SEQ ID NO: 3873383 - RNA, 20 nt, Human
ucugccaccuccccuaucca

SEQ ID NO: 3873384 - RNA, 23 nt, Human
ucugccaccuccccuauccaccc

SEQ ID NO: 3873385 - RNA, 14 nt, Human
ucugccacuggaag

SEQ ID NO: 3873386 - RNA, 17 nt, Human
ucugccacuucccaggu

SEQ ID NO: 3873387 - RNA, 23 nt, Human
ucugccagaagauccccucagga

SEQ ID NO: 3873388 - RNA, 22 nt, Human
ucugccagauguccuaauggug

SEQ ID NO: 3873389 - RNA, 13 nt, Human
ucugccagccagc

SEQ ID NO: 3873390 - RNA, 15 nt, Human
ucugccagccagcag

SEQ ID NO: 3873391 - RNA, 23 nt, Human
ucugccaggcccccaccacacau

SEQ ID NO: 3873392 - RNA, 12 nt, Human
ucugccagggca

SEQ ID NO: 3873393 - RNA, 17 nt, Human
ucugccagggcagugcu

SEQ ID NO: 3873394 - RNA, 23 nt, Human
ucugccagggccccucuccccag

SEQ ID NO: 3873395 - RNA, 18 nt, Human
ucugcccaauuggaggaa

SEQ ID NO: 3873396 - RNA, 17 nt, Human
ucugcccaccucggccu

SEQ ID NO: 3873397 - RNA, 12 nt, Human
ucugcccacucc

SEQ ID NO: 3873398 - RNA, 16 nt, Human
ucugcccagagcuggg

SEQ ID NO: 3873399 - RNA, 18 nt, Human
ucugcccagagcugggug

SEQ ID NO: 3873400 - RNA, 16 nt, Human
ucugcccagcuugggc

SEQ ID NO: 3873401 - RNA, 14 nt, Human
ucugcccaggggug

SEQ ID NO: 3873402 - RNA, 23 nt, Human
ucugcccaggggugcccccuccu

SEQ ID NO: 3873403 - RNA, 14 nt, Human
ucugcccauucccc

SEQ ID NO: 3873404 - RNA, 15 nt, Human
ucugccccagcccag

SEQ ID NO: 3873405 - RNA, 17 nt, Human
ucugccccagcccagau

SEQ ID NO: 3873406 - RNA, 20 nt, Human
ucugccccagcucuggcuuc

SEQ ID NO: 3873407 - RNA, 18 nt, Human
ucugccccauccuccagc

SEQ ID NO: 3873408 - RNA, 18 nt, Human
ucugcccccagcccaaag

SEQ ID NO: 3873409 - RNA, 14 nt, Human
ucugcccccugcug

SEQ ID NO: 3873410 - RNA, 13 nt, Human
ucugccccucccc

SEQ ID NO: 3873411 - RNA, 14 nt, Human
ucugccccuccccc

SEQ ID NO: 3873412 - RNA, 16 nt, Human
ucugccccucccccaa

SEQ ID NO: 3873413 - RNA, 22 nt, Human
ucugccccucccccaaccccca

SEQ ID NO: 3873414 - RNA, 18 nt, Human
ucugccccucccugcuuc

SEQ ID NO: 3873415 - RNA, 21 nt, Human
ucugcccucauuacugggccu

SEQ ID NO: 3873416 - RNA, 14 nt, Human
ucugcccugcccac

SEQ ID NO: 3873417 - RNA, 11 nt, Human
ucugcccugcg

SEQ ID NO: 3873418 - RNA, 21 nt, Human
ucugcccugugggaccccagg

SEQ ID NO: 3873419 - RNA, 18 nt, Human
ucugccgcaauacaggaa

SEQ ID NO: 3873420 - RNA, 18 nt, Human
ucugccgcccccuccuga

SEQ ID NO: 3873421 - RNA, 20 nt, Human
ucugccgcuaccucccuccc

SEQ ID NO: 3873422 - RNA, 22 nt, Human
ucugccggacccggaggccgag

SEQ ID NO: 3873423 - RNA, 16 nt, Human
ucugccggcccugggg

SEQ ID NO: 3873424 - RNA, 23 nt, Human
ucugccggcucuuuccuugcuca

SEQ ID NO: 3873425 - RNA, 16 nt, Human
ucugccggugcucgga

SEQ ID NO: 3873426 - RNA, 14 nt, Human
ucugccgucucugg

SEQ ID NO: 3873427 - RNA, 21 nt, Human
ucugccuaaggacuucuuuaa

SEQ ID NO: 3873428 - RNA, 16 nt, Human
ucugccuauugcagcu

SEQ ID NO: 3873429 - RNA, 20 nt, Human
ucugccuccaugcugcagug

SEQ ID NO: 3873430 - RNA, 20 nt, Human
ucugccucccaucacccgcu

SEQ ID NO: 3873431 - RNA, 15 nt, Human
ucugccuccucuuca

SEQ ID NO: 3873432 - RNA, 13 nt, Human
ucugccuccuuua

SEQ ID NO: 3873433 - RNA, 13 nt, Human
ucugccucuccag

SEQ ID NO: 3873434 - RNA, 14 nt, Human
ucugccucugccug

SEQ ID NO: 3873435 - RNA, 15 nt, Human
ucugccucuucuggg

SEQ ID NO: 3873436 - RNA, 18 nt, Human
ucugccugccagcugcac

SEQ ID NO: 3873437 - RNA, 15 nt, Human
ucugccugcccaggc

SEQ ID NO: 3873438 - RNA, 20 nt, Human
ucugccugcccaggccccug

SEQ ID NO: 3873439 - RNA, 22 nt, Human
ucugccugcccaggccccugcc

SEQ ID NO: 3873440 - RNA, 12 nt, Human
ucugccugcccc

SEQ ID NO: 3873441 - RNA, 13 nt, Human
ucugccuggagug

SEQ ID NO: 3873442 - RNA, 21 nt, Human
ucugccugucccucucaggca

SEQ ID NO: 3873443 - RNA, 14 nt, Human
ucugccugucuccc

SEQ ID NO: 3873444 - RNA, 14 nt, Human
ucugccugugagcc

SEQ ID NO: 3873445 - RNA, 19 nt, Human
ucugccuguuauaacucug

SEQ ID NO: 3873446 - RNA, 16 nt, Human
ucugccuuaaaaccaa

SEQ ID NO: 3873447 - RNA, 17 nt, Human
ucugccuuaaaaccaaa

SEQ ID NO: 3873448 - RNA, 14 nt, Human
ucugccuuccuugc

SEQ ID NO: 3873449 - RNA, 16 nt, Human
ucugccuuccuugcua

SEQ ID NO: 3873450 - RNA, 21 nt, Human
ucugccuucgaggucagagga

SEQ ID NO: 3873451 - RNA, 20 nt, Human
ucugccuucucaugauccaa

SEQ ID NO: 3873452 - RNA, 12 nt, Human
ucugccuugccu

SEQ ID NO: 3873453 - RNA, 11 nt, Human
ucugccuuuau

SEQ ID NO: 3873454 - RNA, 10 nt, Human
ucugccuuug

SEQ ID NO: 3873455 - RNA, 23 nt, Human
ucugccuuugacauuuaauuuag

SEQ ID NO: 3873456 - RNA, 13 nt, Human
ucugccuuugcag

SEQ ID NO: 3873457 - RNA, 11 nt, Human
ucugccuuuuc

SEQ ID NO: 3873458 - RNA, 22 nt, Human
ucugcgaaguccuauggaaacc

SEQ ID NO: 3873459 - RNA, 14 nt, Human
ucugcgccucaggc

SEQ ID NO: 3873460 - RNA, 16 nt, Human
ucugcggaccccagcu

SEQ ID NO: 3873461 - RNA, 14 nt, Human
ucugcggagcacac

SEQ ID NO: 3873462 - RNA, 17 nt, Human
ucugcgucaugcuugug

SEQ ID NO: 3873463 - RNA, 15 nt, Human
ucugcuaaauugaug

SEQ ID NO: 3873464 - RNA, 17 nt, Human
ucugcuaaauugauguu

SEQ ID NO: 3873465 - RNA, 22 nt, Human
ucugcuaagcucaaggcgugag

SEQ ID NO: 3873466 - RNA, 15 nt, Human
ucugcuaccuugccc

SEQ ID NO: 3873467 - RNA, 13 nt, Human
ucugcuagagagu

SEQ ID NO: 3873468 - RNA, 15 nt, Human
ucugcuauauauaaa

SEQ ID NO: 3873469 - RNA, 17 nt, Human
ucugcuauauuuucaug

SEQ ID NO: 3873470 - RNA, 15 nt, Human
ucugcuaugcuugaa

SEQ ID NO: 3873471 - RNA, 17 nt, Human
ucugcucacaguaaccc

SEQ ID NO: 3873472 - RNA, 15 nt, Human
ucugcucaccgccca

SEQ ID NO: 3873473 - RNA, 20 nt, Human
ucugcucaccgcccaucagg

SEQ ID NO: 3873474 - RNA, 18 nt, Human
ucugcucagauagaauga

SEQ ID NO: 3873475 - RNA, 16 nt, Human
ucugcucagcagcuau

SEQ ID NO: 3873476 - RNA, 15 nt, Human
ucugcucagcccugg

SEQ ID NO: 3873477 - RNA, 22 nt, Human
ucugcucaucauucucugucuc

SEQ ID NO: 3873478 - RNA, 14 nt, Human
ucugcuccacccuu

SEQ ID NO: 3873479 - RNA, 16 nt, Human
ucugcuccacccuugg

SEQ ID NO: 3873480 - RNA, 18 nt, Human
ucugcuccacccuuggcc

SEQ ID NO: 3873481 - RNA, 19 nt, Human
ucugcuccacccuuggccu

SEQ ID NO: 3873482 - RNA, 21 nt, Human
ucugcuccacccuuggccugu

SEQ ID NO: 3873483 - RNA, 15 nt, Human
ucugcuccagacagg

SEQ ID NO: 3873484 - RNA, 14 nt, Human
ucugcuccagcucu

SEQ ID NO: 3873485 - RNA, 13 nt, Human
ucugcucccaagg

SEQ ID NO: 3873486 - RNA, 19 nt, Human
ucugcucccaaggggccug

SEQ ID NO: 3873487 - RNA, 16 nt, Human
ucugcuccccagggga

SEQ ID NO: 3873488 - RNA, 16 nt, Human
ucugcuccucuccagg

SEQ ID NO: 3873489 - RNA, 22 nt, Human
ucugcuccuggagccuuugaau

SEQ ID NO: 3873490 - RNA, 16 nt, Human
ucugcucgggcccagg

SEQ ID NO: 3873491 - RNA, 18 nt, Human
ucugcucgggcccaggcc

SEQ ID NO: 3873492 - RNA, 22 nt, Human
ucugcucgggcccaggccaucu

SEQ ID NO: 3873493 - RNA, 18 nt, Human
ucugcucuauuauauaaa

SEQ ID NO: 3873494 - RNA, 13 nt, Human
ucugcucugaugc

SEQ ID NO: 3873495 - RNA, 16 nt, Human
ucugcucugcguguca

SEQ ID NO: 3873496 - RNA, 14 nt, Human
ucugcucuuucucu

SEQ ID NO: 3873497 - RNA, 15 nt, Human
ucugcucuuucucug

SEQ ID NO: 3873498 - RNA, 16 nt, Human
ucugcucuuucucugc

SEQ ID NO: 3873499 - RNA, 19 nt, Human
ucugcucuuucucugccag

SEQ ID NO: 3873500 - RNA, 13 nt, Human
ucugcugaaggaa

SEQ ID NO: 3873501 - RNA, 14 nt, Human
ucugcugaauuuuc

SEQ ID NO: 3873502 - RNA, 23 nt, Human
ucuguacuguuacugggcccuga

SEQ ID NO: 3873503 - RNA, 12 nt, Human
ucuguagaaaug

SEQ ID NO: 3873504 - RNA, 22 nt, Human
ucuguagaaaugguuguauuag

SEQ ID NO: 3873505 - RNA, 16 nt, Human
ucuguagagggcccug

SEQ ID NO: 3873506 - RNA, 17 nt, Human
ucuguagagggcccugg

SEQ ID NO: 3873507 - RNA, 16 nt, Human
ucuguagauucugugg

SEQ ID NO: 3873508 - RNA, 23 nt, Human
ucuguagauucuguggaacaagc

SEQ ID NO: 3873509 - RNA, 22 nt, Human
ucuguaggccaguaguucucaa

SEQ ID NO: 3873510 - RNA, 15 nt, Human
ucuguagguugcaca

SEQ ID NO: 3873511 - RNA, 16 nt, Human
ucuguagguugcacac

SEQ ID NO: 3873512 - RNA, 18 nt, Human
ucuguagguugcacacuu

SEQ ID NO: 3873513 - RNA, 21 nt, Human
ucuguagguugcacacuuugg

SEQ ID NO: 3873514 - RNA, 23 nt, Human
ucuguaguacuccuuaagaacac

SEQ ID NO: 3873515 - RNA, 15 nt, Human
ucuguagucauuuac

SEQ ID NO: 3873516 - RNA, 22 nt, Human
ucuguaguuuuaucacauguau

SEQ ID NO: 3873517 - RNA, 23 nt, Human
ucuguaguuuuaucacauguaug

SEQ ID NO: 3873518 - RNA, 15 nt, Human
ucuguauaaaugucu

SEQ ID NO: 3873519 - RNA, 18 nt, Human
ucuguauaaguaagaaaa

SEQ ID NO: 3873520 - RNA, 21 nt, Human
ucuguauaaguaagaaaauau

SEQ ID NO: 3873521 - RNA, 22 nt, Human
ucuguauaauacuuuguauaca

SEQ ID NO: 3873522 - RNA, 20 nt, Human
ucuguauagacaggagaaga

SEQ ID NO: 3873523 - RNA, 23 nt, Human
ucuguauagacaggagaagaaag

SEQ ID NO: 3873524 - RNA, 14 nt, Human
ucuguauauaaaau

SEQ ID NO: 3873525 - RNA, 14 nt, Human
ucuguauauaaaug

SEQ ID NO: 3873526 - RNA, 17 nt, Human
ucuguauauaaauggga

SEQ ID NO: 3873527 - RNA, 15 nt, Human
ucuguauauacuuuu

SEQ ID NO: 3873528 - RNA, 16 nt, Human
ucuguauauauauaua

SEQ ID NO: 3873529 - RNA, 15 nt, Human
ucuguauauuuuggg

SEQ ID NO: 3873530 - RNA, 21 nt, Human
ucuguaucggagacagugauc

SEQ ID NO: 3873531 - RNA, 22 nt, Human
ucuguauguauuagugauauuu

SEQ ID NO: 3873532 - RNA, 12 nt, Human
ucuguauguguu

SEQ ID NO: 3873533 - RNA, 20 nt, Human
ucuguauuuccccaacaugu

SEQ ID NO: 3873534 - RNA, 23 nt, Human
ucuguauuuuuucuugcauugac

SEQ ID NO: 3873535 - RNA, 17 nt, Human
ucugucacccaggcugg

SEQ ID NO: 3873536 - RNA, 12 nt, Human
ucugucacucag

SEQ ID NO: 3873537 - RNA, 19 nt, Human
ucugucagaugagaacaaa

SEQ ID NO: 3873538 - RNA, 19 nt, Human
ucugucagaugggaagaca

SEQ ID NO: 3873539 - RNA, 21 nt, Human
ucugucagcgcagguuuaguu

SEQ ID NO: 3873540 - RNA, 13 nt, Human
ucugucagcugca

SEQ ID NO: 3873541 - RNA, 14 nt, Human
ucugucagcugcaa

SEQ ID NO: 3873542 - RNA, 17 nt, Human
ucugucagucacagcca

SEQ ID NO: 3873543 - RNA, 12 nt, Human
ucugucaguucu

SEQ ID NO: 3873544 - RNA, 21 nt, Human
ucugucaucuaccuuuucucu

SEQ ID NO: 3873545 - RNA, 17 nt, Human
ucugucauuguacccuu

SEQ ID NO: 3873546 - RNA, 24 nt, Human
ucuguccaggcacugcugcccagc

SEQ ID NO: 3873547 - RNA, 17 nt, Human
ucuguccagggcccuga

SEQ ID NO: 3873548 - RNA, 20 nt, Human
ucuguccagggcccugagcu

SEQ ID NO: 3873549 - RNA, 16 nt, Human
ucuguccaucugcccg

SEQ ID NO: 3873550 - RNA, 17 nt, Human
ucuguccaucugcccgc

SEQ ID NO: 3873551 - RNA, 18 nt, Human
ucuguccaucugcccgcc

SEQ ID NO: 3873552 - RNA, 18 nt, Human
ucugucccaguuaacugu

SEQ ID NO: 3873553 - RNA, 22 nt, Human
ucuguccccuucucucaucucu

SEQ ID NO: 3873554 - RNA, 19 nt, Human
ucugucccuucugucccuc

SEQ ID NO: 3873555 - RNA, 20 nt, Human
ucugucccuucugucccuca

SEQ ID NO: 3873556 - RNA, 22 nt, Human
ucugucccuucugucccucaca

SEQ ID NO: 3873557 - RNA, 19 nt, Human
ucugucccuugccccccug

SEQ ID NO: 3873558 - RNA, 20 nt, Human
ucuguccguuuacuccaagg

SEQ ID NO: 3873559 - RNA, 19 nt, Human
ucuguccucagccuugcca

SEQ ID NO: 3873560 - RNA, 16 nt, Human
ucuguccugagaagca

SEQ ID NO: 3873561 - RNA, 12 nt, Human
ucuguccugcug

SEQ ID NO: 3873562 - RNA, 15 nt, Human
ucuguccugcuucug

SEQ ID NO: 3873563 - RNA, 17 nt, Human
ucuguccuggugucacu

SEQ ID NO: 3873564 - RNA, 17 nt, Human
ucugucgcccagucugg

SEQ ID NO: 3873565 - RNA, 17 nt, Human
ucugucgcccaugcugg

SEQ ID NO: 3873566 - RNA, 17 nt, Human
ucugucuaaaaaccaga

SEQ ID NO: 3873567 - RNA, 15 nt, Human
ucugucuaaagauag

SEQ ID NO: 3873568 - RNA, 14 nt, Human
ucugucuacaaaua

SEQ ID NO: 3873569 - RNA, 23 nt, Human
ucugucuacuugcucagguacuu

SEQ ID NO: 3873570 - RNA, 19 nt, Human
ucugucuagcaugccaaca

SEQ ID NO: 3873571 - RNA, 13 nt, Human
ucugucuaggaau

SEQ ID NO: 3873572 - RNA, 15 nt, Human
ucugucucagacuuu

SEQ ID NO: 3873573 - RNA, 14 nt, Human
ucugucucagucca

SEQ ID NO: 3873574 - RNA, 15 nt, Human
ucugucucauaugau

SEQ ID NO: 3873575 - RNA, 12 nt, Human
ucugucucaucc

SEQ ID NO: 3873576 - RNA, 21 nt, Human
ucugucucauccaucaucaug

SEQ ID NO: 3873577 - RNA, 19 nt, Human
ucugucucauccuccugga

SEQ ID NO: 3873578 - RNA, 20 nt, Human
ucugucucauccuccuggaa

SEQ ID NO: 3873579 - RNA, 17 nt, Human
ucugucuccagcuuccc

SEQ ID NO: 3873580 - RNA, 22 nt, Human
ucugucucccaguuaugaauca

SEQ ID NO: 3873581 - RNA, 22 nt, Human
ucugucuccuuaacacugagcu

SEQ ID NO: 3873582 - RNA, 13 nt, Human
ucugucucugaag

SEQ ID NO: 3873583 - RNA, 18 nt, Human
ucugucugccaaccuaaa

SEQ ID NO: 3873584 - RNA, 18 nt, Human
ucugucuggagugacaga

SEQ ID NO: 3873585 - RNA, 14 nt, Human
ucugucuggcaaug

SEQ ID NO: 3873586 - RNA, 14 nt, Human
ucugucugucccaa

SEQ ID NO: 3873587 - RNA, 15 nt, Human
ucugucugucccaaa

SEQ ID NO: 3873588 - RNA, 15 nt, Human
ucugucuucacagcu

SEQ ID NO: 3873589 - RNA, 22 nt, Human
ucugucuucacagcucuguguu

SEQ ID NO: 3873590 - RNA, 14 nt, Human
ucugucuuccuuug

SEQ ID NO: 3873591 - RNA, 12 nt, Human
ucugucuugaag

SEQ ID NO: 3873592 - RNA, 20 nt, Human
ucugucuuguaauauuuugu

SEQ ID NO: 3873593 - RNA, 11 nt, Human
ucugucuuucc

SEQ ID NO: 3873594 - RNA, 13 nt, Human
ucugugaaaccug

SEQ ID NO: 3873595 - RNA, 22 nt, Human
ucugugaaaccugugaagcuga

SEQ ID NO: 3873596 - RNA, 21 nt, Human
ucugugaaaggaaagagggag

SEQ ID NO: 3873597 - RNA, 16 nt, Human
ucugugaaaguacauu

SEQ ID NO: 3873598 - RNA, 15 nt, Human
ucugugaaauaucau

SEQ ID NO: 3873599 - RNA, 19 nt, Human
ucugugaacuugaaauuug

SEQ ID NO: 3873600 - RNA, 22 nt, Human
ucugugaacuugaaauuugaau

SEQ ID NO: 3873601 - RNA, 16 nt, Human
ucugugaauaagccau

SEQ ID NO: 3873602 - RNA, 15 nt, Human
ucugugaauucagau

SEQ ID NO: 3873603 - RNA, 16 nt, Human
ucugugacccacuucu

SEQ ID NO: 3873604 - RNA, 17 nt, Human
ucugugauacagaacuc

SEQ ID NO: 3873605 - RNA, 17 nt, Human
ucugugcaugguggcac

SEQ ID NO: 3873606 - RNA, 12 nt, Human
ucugugcauucu

SEQ ID NO: 3873607 - RNA, 15 nt, Human
ucugugccagagccu

SEQ ID NO: 3873608 - RNA, 16 nt, Human
ucugugccagagccug

SEQ ID NO: 3873609 - RNA, 17 nt, Human
ucugugccagagccugg

SEQ ID NO: 3873610 - RNA, 18 nt, Human
ucugugccccuuccgcca

SEQ ID NO: 3873611 - RNA, 20 nt, Human
ucugugccccuuccgccacu

SEQ ID NO: 3873612 - RNA, 15 nt, Human
ucugugccugaauau

SEQ ID NO: 3873613 - RNA, 14 nt, Human
ucugugccuggagc

SEQ ID NO: 3873614 - RNA, 20 nt, Human
ucugugccuggagcuccugg

SEQ ID NO: 3873615 - RNA, 16 nt, Human
ucugugcguagaaguu

SEQ ID NO: 3873616 - RNA, 22 nt, Human
ucugugcuagggaaacuucccg

SEQ ID NO: 3873617 - RNA, 13 nt, Human
ucugugcucagga

SEQ ID NO: 3873618 - RNA, 14 nt, Human
ucugugcuccuccu

SEQ ID NO: 3873619 - RNA, 14 nt, Human
ucugugcugacaug

SEQ ID NO: 3873620 - RNA, 23 nt, Human
ucugugcugacccuccuguugca

SEQ ID NO: 3873621 - RNA, 19 nt, Human
ucugugcuggagauguuuu

SEQ ID NO: 3873622 - RNA, 14 nt, Human
ucugugcuuuccag

SEQ ID NO: 3873623 - RNA, 17 nt, Human
ucugugcuuuccagcuc

SEQ ID NO: 3873624 - RNA, 22 nt, Human
ucugugcuuugacucaccuguu

SEQ ID NO: 3873625 - RNA, 22 nt, Human
ucuguggaaaguguaaagcauu

SEQ ID NO: 3873626 - RNA, 19 nt, Human
ucuguggaugccagggccg

SEQ ID NO: 3873627 - RNA, 23 nt, Human
ucugugggaugggaugguggagg

SEQ ID NO: 3873628 - RNA, 20 nt, Human
ucugugggcugcacucugug

SEQ ID NO: 3873629 - RNA, 21 nt, Human
ucugugggcugcacucugugc

SEQ ID NO: 3873630 - RNA, 23 nt, Human
ucugugggcugcacucugugccc

SEQ ID NO: 3873631 - RNA, 23 nt, Human
ucuguggguuucuaaagcugcca

SEQ ID NO: 3873632 - RNA, 13 nt, Human
ucugugguuggcu

SEQ ID NO: 3873633 - RNA, 19 nt, Human
ucugugguuggcugggaaa

SEQ ID NO: 3873634 - RNA, 21 nt, Human
ucugugguuuuccccucccug

SEQ ID NO: 3873635 - RNA, 23 nt, Human
ucugugguuuuccccucccuggg

SEQ ID NO: 3873636 - RNA, 15 nt, Human
ucuguguacaaagaa

SEQ ID NO: 3873637 - RNA, 16 nt, Human
ucuguguacaaagaaa

SEQ ID NO: 3873638 - RNA, 14 nt, Human
ucugugucacuggc

SEQ ID NO: 3873639 - RNA, 22 nt, Human
ucugugucacuggcugccucca

SEQ ID NO: 3873640 - RNA, 23 nt, Human
ucugugucacuggcugccuccac

SEQ ID NO: 3873641 - RNA, 23 nt, Human
ucugugucuaagauucuagauca

SEQ ID NO: 3873642 - RNA, 11 nt, Human
ucugugucucu

SEQ ID NO: 3873643 - RNA, 12 nt, Human
ucugugucugug

SEQ ID NO: 3873644 - RNA, 16 nt, Human
ucugugugaaacuuuc

SEQ ID NO: 3873645 - RNA, 21 nt, Human
ucugugugaaacuuucauucc

SEQ ID NO: 3873646 - RNA, 15 nt, Human
ucuugaacugagcuu

SEQ ID NO: 3873647 - RNA, 19 nt, Human
ucuugaagcccccagcccu

SEQ ID NO: 3873648 - RNA, 16 nt, Human
ucuugaaggaaaaauu

SEQ ID NO: 3873649 - RNA, 17 nt, Human
ucuugaaggaaaaauuc

SEQ ID NO: 3873650 - RNA, 19 nt, Human
ucuugaaggaaaaauucaa

SEQ ID NO: 3873651 - RNA, 13 nt, Human
ucuugaaggugcu

SEQ ID NO: 3873652 - RNA, 12 nt, Human
ucuugaaguccu

SEQ ID NO: 3873653 - RNA, 13 nt, Human
ucuugaaguccug

SEQ ID NO: 3873654 - RNA, 19 nt, Human
ucuugaaguccuggcuuca

SEQ ID NO: 3873655 - RNA, 16 nt, Human
ucuugaauaauguaag

SEQ ID NO: 3873656 - RNA, 19 nt, Human
ucuugaauguggucucagg

SEQ ID NO: 3873657 - RNA, 21 nt, Human
ucuugaauuuaauaaucugua

SEQ ID NO: 3873658 - RNA, 20 nt, Human
ucuugacaccagcuguucug

SEQ ID NO: 3873659 - RNA, 21 nt, Human
ucuugacaccagcuguucugu

SEQ ID NO: 3873660 - RNA, 20 nt, Human
ucuugacagagccugcccca

SEQ ID NO: 3873661 - RNA, 11 nt, Human
ucuugacccua

SEQ ID NO: 3873662 - RNA, 14 nt, Human
ucuugacccugcac

SEQ ID NO: 3873663 - RNA, 15 nt, Human
ucuugacccugcacc

SEQ ID NO: 3873664 - RNA, 19 nt, Human
ucuugacccugcacccucc

SEQ ID NO: 3873665 - RNA, 15 nt, Human
ucuugaccucugccu

SEQ ID NO: 3873666 - RNA, 22 nt, Human
ucuugagcaguggcugguccag

SEQ ID NO: 3873667 - RNA, 13 nt, Human
ucuugagccuggg

SEQ ID NO: 3873668 - RNA, 18 nt, Human
ucuugagccuugaacuuu

SEQ ID NO: 3873669 - RNA, 20 nt, Human
ucuugagccuugaacuuuga

SEQ ID NO: 3873670 - RNA, 16 nt, Human
ucuugagcucuauuau

SEQ ID NO: 3873671 - RNA, 13 nt, Human
ucuugagcuggcc

SEQ ID NO: 3873672 - RNA, 16 nt, Human
ucuugaggccaggagu

SEQ ID NO: 3873673 - RNA, 20 nt, Human
ucuugagguacucugcacau

SEQ ID NO: 3873674 - RNA, 19 nt, Human
ucuugaguauaagaaaugc

SEQ ID NO: 3873675 - RNA, 21 nt, Human
ucuugaguuugucgcucaugu

SEQ ID NO: 3873676 - RNA, 21 nt, Human
ucuugauaauuuuccuuuaau

SEQ ID NO: 3873677 - RNA, 17 nt, Human
ucuugauaccccccucu

SEQ ID NO: 3873678 - RNA, 21 nt, Human
ucuugauaccccccucugucu

SEQ ID NO: 3873679 - RNA, 17 nt, Human
ucuugaucaacaucuuu

SEQ ID NO: 3873680 - RNA, 18 nt, Human
ucuugaucaguuaagaaa

SEQ ID NO: 3873681 - RNA, 14 nt, Human
ucuugaucugcuca

SEQ ID NO: 3873682 - RNA, 16 nt, Human
ucuugaugaaaagcuu

SEQ ID NO: 3873683 - RNA, 19 nt, Human
ucuugaugacuggaauuuu

SEQ ID NO: 3873684 - RNA, 16 nt, Human
ucuugauguaaaaucu

SEQ ID NO: 3873685 - RNA, 15 nt, Human
ucuugauuaaaaguu

SEQ ID NO: 3873686 - RNA, 15 nt, Human
ucuugauucagucac

SEQ ID NO: 3873687 - RNA, 18 nt, Human
ucuugauuuauuugcuuc

SEQ ID NO: 3873688 - RNA, 16 nt, Human
ucuugcaagcaugcuu

SEQ ID NO: 3873689 - RNA, 19 nt, Human
ucuugcaauggcagccuug

SEQ ID NO: 3873690 - RNA, 21 nt, Human
ucuugcaccaaauuaucuuga

SEQ ID NO: 3873691 - RNA, 23 nt, Human
ucuugcaccccaaagcuuuccug

SEQ ID NO: 3873692 - RNA, 13 nt, Human
ucuugcaggucuc

SEQ ID NO: 3873693 - RNA, 14 nt, Human
ucuugcaggucuca

SEQ ID NO: 3873694 - RNA, 21 nt, Human
ucuugcaguaucggcacugua

SEQ ID NO: 3873695 - RNA, 16 nt, Human
ucuugcauccuuccua

SEQ ID NO: 3873696 - RNA, 15 nt, Human
ucuugcaugguuugg

SEQ ID NO: 3873697 - RNA, 20 nt, Human
ucuugcaugguuuggagcug

SEQ ID NO: 3873698 - RNA, 23 nt, Human
ucuugcauuuaaaagacagcuuu

SEQ ID NO: 3873699 - RNA, 22 nt, Human
ucuugccaaccuguaauaaaua

SEQ ID NO: 3873700 - RNA, 14 nt, Human
ucuugcccauccug

SEQ ID NO: 3873701 - RNA, 18 nt, Human
ucuugcccauccugacug

SEQ ID NO: 3873702 - RNA, 23 nt, Human
ucuugccccaacccccagcaccc

SEQ ID NO: 3873703 - RNA, 14 nt, Human
ucuugccccaucac

SEQ ID NO: 3873704 - RNA, 13 nt, Human
ucuugcccuuccc

SEQ ID NO: 3873705 - RNA, 16 nt, Human
ucuugcccuucccugu

SEQ ID NO: 3873706 - RNA, 19 nt, Human
ucuugccgaggagccaggc

SEQ ID NO: 3873707 - RNA, 20 nt, Human
ucuugccuaaguauuccuuu

SEQ ID NO: 3873708 - RNA, 19 nt, Human
ucuugccuauauuuuccug

SEQ ID NO: 3873709 - RNA, 16 nt, Human
ucuugccucaaccucc

SEQ ID NO: 3873710 - RNA, 15 nt, Human
ucuugccuccaggug

SEQ ID NO: 3873711 - RNA, 17 nt, Human
ucuugccuccaggugca

SEQ ID NO: 3873712 - RNA, 18 nt, Human
ucuugccuccaggugcag

SEQ ID NO: 3873713 - RNA, 13 nt, Human
ucuugccucugug

SEQ ID NO: 3873714 - RNA, 19 nt, Human
ucuugccucugugcugugu

SEQ ID NO: 3873715 - RNA, 16 nt, Human
ucuugccuuuuucauu

SEQ ID NO: 3873716 - RNA, 17 nt, Human
ucuugcgaauccaagcu

SEQ ID NO: 3873717 - RNA, 21 nt, Human
ucuugcgaauccaagcucccu

SEQ ID NO: 3873718 - RNA, 23 nt, Human
ucuugcgaauccaagcucccugc

SEQ ID NO: 3873719 - RNA, 16 nt, Human
ucuugcuaaucagugu

SEQ ID NO: 3873720 - RNA, 23 nt, Human
ucuugcuaaucagugucucacac

SEQ ID NO: 3873721 - RNA, 13 nt, Human
ucuugcuaccagu

SEQ ID NO: 3873722 - RNA, 17 nt, Human
ucuugcuaccucaguca

SEQ ID NO: 3873723 - RNA, 18 nt, Human
ucuugcuauauugcccag

SEQ ID NO: 3873724 - RNA, 20 nt, Human
ucuugcuaucggggaagcca

SEQ ID NO: 3873725 - RNA, 19 nt, Human
ucuugcucccuucagcccc

SEQ ID NO: 3873726 - RNA, 22 nt, Human
ucuugcucccuucagcccccag

SEQ ID NO: 3873727 - RNA, 18 nt, Human
ucuugcucuaucucacag

SEQ ID NO: 3873728 - RNA, 17 nt, Human
ucuugcucuaucucuca

SEQ ID NO: 3873729 - RNA, 12 nt, Human
ucuugcucugcu

SEQ ID NO: 3873730 - RNA, 15 nt, Human
ucuugcucugcugac

SEQ ID NO: 3873731 - RNA, 20 nt, Human
ucuugcugcuagaacuuuuu

SEQ ID NO: 3873732 - RNA, 22 nt, Human
ucuugcuggucuagucacgcau

SEQ ID NO: 3873733 - RNA, 18 nt, Human
ucuugcuguugacauauu

SEQ ID NO: 3873734 - RNA, 19 nt, Human
ucuugcuguugacauauuu

SEQ ID NO: 3873735 - RNA, 19 nt, Human
ucuugcuuaccuugacugu

SEQ ID NO: 3873736 - RNA, 21 nt, Human
ucuugcuuaccuugacuguug

SEQ ID NO: 3873737 - RNA, 13 nt, Human
ucuugcuuguacc

SEQ ID NO: 3873738 - RNA, 14 nt, Human
ucuugcuuguaccu

SEQ ID NO: 3873739 - RNA, 13 nt, Human
ucuugcuuucuau

SEQ ID NO: 3873740 - RNA, 15 nt, Human
ucuuggaacuugccu

SEQ ID NO: 3873741 - RNA, 19 nt, Human
ucuuggaagcuguuuggaa

SEQ ID NO: 3873742 - RNA, 20 nt, Human
ucuuggaagcuguuuggaaa

SEQ ID NO: 3873743 - RNA, 18 nt, Human
ucuuggaaguacaugaau

SEQ ID NO: 3873744 - RNA, 16 nt, Human
ucuuggacacuguaca

SEQ ID NO: 3873745 - RNA, 12 nt, Human
ucuuggagaagu

SEQ ID NO: 3873746 - RNA, 19 nt, Human
ucuuggagaagucucagcu

SEQ ID NO: 3873747 - RNA, 20 nt, Human
ucuuggagaagucucagcua

SEQ ID NO: 3873748 - RNA, 17 nt, Human
ucuuggagacccugcaa

SEQ ID NO: 3873749 - RNA, 13 nt, Human
ucuuggagccugc

SEQ ID NO: 3873750 - RNA, 19 nt, Human
ucuuggcaauaaauuuuga

SEQ ID NO: 3873751 - RNA, 20 nt, Human
ucuuggcaauaaauuuugaa

SEQ ID NO: 3873752 - RNA, 16 nt, Human
ucuuggccaugggagg

SEQ ID NO: 3873753 - RNA, 19 nt, Human
ucuuggcggcagcagccau

SEQ ID NO: 3873754 - RNA, 14 nt, Human
ucuuggcuggaccc

SEQ ID NO: 3873755 - RNA, 16 nt, Human
ucuuggcuuaaucauu

SEQ ID NO: 3873756 - RNA, 19 nt, Human
ucuuggcuuaaucauuuuc

SEQ ID NO: 3873757 - RNA, 20 nt, Human
ucuuggcuuaaucauuuuca

SEQ ID NO: 3873758 - RNA, 15 nt, Human
ucuuggcuuucaugu

SEQ ID NO: 3873759 - RNA, 11 nt, Human
ucuugggaaau

SEQ ID NO: 3873760 - RNA, 19 nt, Human
ucuugggaaauaugaaugc

SEQ ID NO: 3873761 - RNA, 19 nt, Human
ucuugggcagagcuggcuc

SEQ ID NO: 3873762 - RNA, 11 nt, Human
ucuugggcccu

SEQ ID NO: 3873763 - RNA, 17 nt, Human
ucuuggggacaucucuu

SEQ ID NO: 3873764 - RNA, 17 nt, Human
ucuuggggcccagugca

SEQ ID NO: 3873765 - RNA, 21 nt, Human
ucuugggggacagggcuggcc

SEQ ID NO: 3873766 - RNA, 22 nt, Human
ucuugggggacagggcuggccc

SEQ ID NO: 3873767 - RNA, 20 nt, Human
ucuugguaaaguccuuuucu

SEQ ID NO: 3873768 - RNA, 22 nt, Human
ucuugguaaauuuccccaacag

SEQ ID NO: 3873769 - RNA, 17 nt, Human
ucuuggucagauuugaa

SEQ ID NO: 3873770 - RNA, 15 nt, Human
ucuugguccugcugc

SEQ ID NO: 3873771 - RNA, 17 nt, Human
ucuuggucuucccaggc

SEQ ID NO: 3873772 - RNA, 14 nt, Human
ucuugguguaauuu

SEQ ID NO: 3873773 - RNA, 13 nt, Human
ucuugguguuaaa

SEQ ID NO: 3873774 - RNA, 18 nt, Human
ucuugguucauaaaugaa

SEQ ID NO: 3873775 - RNA, 19 nt, Human
ucuugguuccagccugcca

SEQ ID NO: 3873776 - RNA, 23 nt, Human
ucuugguugaaaauaaaaagauc

SEQ ID NO: 3873777 - RNA, 15 nt, Human
ucuugguuuccuucc

SEQ ID NO: 3873778 - RNA, 16 nt, Human
ucuugguuuguaaauu

SEQ ID NO: 3873779 - RNA, 14 nt, Human
ucuuguaaagacug

SEQ ID NO: 3873780 - RNA, 17 nt, Human
ucuuguaaagacugguu

SEQ ID NO: 3873781 - RNA, 23 nt, Human
ucuuguaaagacugguuuucugc

SEQ ID NO: 3873782 - RNA, 11 nt, Human
ucuuguaagau

SEQ ID NO: 3873783 - RNA, 17 nt, Human
ucuuguaauauuuugua

SEQ ID NO: 3873784 - RNA, 19 nt, Human
ucuuguaauauuuuguauu

SEQ ID NO: 3873785 - RNA, 18 nt, Human
ucuuguagcuuuaucaaa

SEQ ID NO: 3873786 - RNA, 16 nt, Human
ucuuguaguagucuca

SEQ ID NO: 3873787 - RNA, 19 nt, Human
ucuuguauuaaacucuuca

SEQ ID NO: 3873788 - RNA, 23 nt, Human
ucuuguccaugugguucuucaaa

SEQ ID NO: 3873789 - RNA, 13 nt, Human
ucuuguccuagcu

SEQ ID NO: 3873790 - RNA, 15 nt, Human
ucuugucuauaaagc

SEQ ID NO: 3873791 - RNA, 12 nt, Human
ugaccacccucc

SEQ ID NO: 3873792 - RNA, 21 nt, Human
ugaccacgcuuucuagcuguu

SEQ ID NO: 3873793 - RNA, 22 nt, Human
ugaccacgcuuucuagcuguug

SEQ ID NO: 3873794 - RNA, 21 nt, Human
ugaccacggacguuuccauca

SEQ ID NO: 3873795 - RNA, 22 nt, Human
ugaccacggacguuuccaucag

SEQ ID NO: 3873796 - RNA, 16 nt, Human
ugaccacucagagaca

SEQ ID NO: 3873797 - RNA, 20 nt, Human
ugaccacucagagacaugca

SEQ ID NO: 3873798 - RNA, 18 nt, Human
ugaccacugcagaagaca

SEQ ID NO: 3873799 - RNA, 17 nt, Human
ugaccacuugaggccug

SEQ ID NO: 3873800 - RNA, 19 nt, Human
ugaccagcaacuugucuuu

SEQ ID NO: 3873801 - RNA, 20 nt, Human
ugaccagcaccaucucuccu

SEQ ID NO: 3873802 - RNA, 18 nt, Human
ugaccagcagaucccagc

SEQ ID NO: 3873803 - RNA, 11 nt, Human
ugaccagcagc

SEQ ID NO: 3873804 - RNA, 12 nt, Human
ugaccagcuccc

SEQ ID NO: 3873805 - RNA, 22 nt, Human
ugaccaggaucccaagccuccu

SEQ ID NO: 3873806 - RNA, 16 nt, Human
ugaccaggcauccucc

SEQ ID NO: 3873807 - RNA, 16 nt, Human
ugaccauacugaggga

SEQ ID NO: 3873808 - RNA, 14 nt, Human
ugaccaucauuuca

SEQ ID NO: 3873809 - RNA, 22 nt, Human
ugaccauccacucuacccuccc

SEQ ID NO: 3873810 - RNA, 19 nt, Human
ugaccaugcauuuuaccau

SEQ ID NO: 3873811 - RNA, 15 nt, Human
ugaccaugucuauga

SEQ ID NO: 3873812 - RNA, 14 nt, Human
ugaccauucuccac

SEQ ID NO: 3873813 - RNA, 16 nt, Human
ugaccauucuccaccu

SEQ ID NO: 3873814 - RNA, 17 nt, Human
ugaccauucuccaccug

SEQ ID NO: 3873815 - RNA, 18 nt, Human
ugaccauucuccaccugc

SEQ ID NO: 3873816 - RNA, 22 nt, Human
ugaccauucuccaccugccagg

SEQ ID NO: 3873817 - RNA, 23 nt, Human
ugaccauuuauaauguuaguaga

SEQ ID NO: 3873818 - RNA, 12 nt, Human
ugaccauuuuuu

SEQ ID NO: 3873819 - RNA, 22 nt, Human
ugaccauuuuuuaauuuacuug

SEQ ID NO: 3873820 - RNA, 14 nt, Human
ugacccacagccuc

SEQ ID NO: 3873821 - RNA, 19 nt, Human
ugacccacagccucugccu

SEQ ID NO: 3873822 - RNA, 15 nt, Human
ugacccacaugccau

SEQ ID NO: 3873823 - RNA, 12 nt, Human
ugacccaccccu

SEQ ID NO: 3873824 - RNA, 12 nt, Human
ugacccacugcu

SEQ ID NO: 3873825 - RNA, 13 nt, Human
ugacccacugcuu

SEQ ID NO: 3873826 - RNA, 22 nt, Human
ugacccacugguuccuucuucc

SEQ ID NO: 3873827 - RNA, 17 nt, Human
ugacccagaggacagca

SEQ ID NO: 3873828 - RNA, 20 nt, Human
ugacccagcacugcccaaag

SEQ ID NO: 3873829 - RNA, 18 nt, Human
ugacccagccccuugaga

SEQ ID NO: 3873830 - RNA, 19 nt, Human
ugacccagccccuugagaa

SEQ ID NO: 3873831 - RNA, 14 nt, Human
ugacccaggccgca

SEQ ID NO: 3873832 - RNA, 15 nt, Human
ugacccaggccgcag

SEQ ID NO: 3873833 - RNA, 12 nt, Human
ugacccaguccc

SEQ ID NO: 3873834 - RNA, 21 nt, Human
ugacccaguccccgugccccg

SEQ ID NO: 3873835 - RNA, 14 nt, Human
ugacccaugcugcc

SEQ ID NO: 3873836 - RNA, 17 nt, Human
ugacccaugcugcccug

SEQ ID NO: 3873837 - RNA, 19 nt, Human
ugacccaugggcaggagac

SEQ ID NO: 3873838 - RNA, 14 nt, Human
ugacccauugcugu

SEQ ID NO: 3873839 - RNA, 13 nt, Human
ugaccccagagga

SEQ ID NO: 3873840 - RNA, 11 nt, Human
ugaccccaggg

SEQ ID NO: 3873841 - RNA, 12 nt, Human
ugaccccagggc

SEQ ID NO: 3873842 - RNA, 17 nt, Human
ugaccccagggcacagg

SEQ ID NO: 3873843 - RNA, 22 nt, Human
ugaccccagggcacaggagcua

SEQ ID NO: 3873844 - RNA, 19 nt, Human
ugacccccccagcuucacu

SEQ ID NO: 3873845 - RNA, 19 nt, Human
ugaccccucauagcccuca

SEQ ID NO: 3873846 - RNA, 23 nt, Human
ugaccccucauagcccucacccu

SEQ ID NO: 3873847 - RNA, 15 nt, Human
ugaccccuccucacu

SEQ ID NO: 3873848 - RNA, 20 nt, Human
ugaccccuccucacuggcca

SEQ ID NO: 3873849 - RNA, 22 nt, Human
ugaccccuccucacuggccauc

SEQ ID NO: 3873850 - RNA, 13 nt, Human
ugaccccuccugg

SEQ ID NO: 3873851 - RNA, 14 nt, Human
ugaccccuccuggg

SEQ ID NO: 3873852 - RNA, 19 nt, Human
ugaccccuccuggggccag

SEQ ID NO: 3873853 - RNA, 23 nt, Human
ugaccccuccuggggccaggccg

SEQ ID NO: 3873854 - RNA, 20 nt, Human
ugaccccugcccagaucagc

SEQ ID NO: 3873855 - RNA, 15 nt, Human
ugaccccuucccugu

SEQ ID NO: 3873856 - RNA, 21 nt, Human
ugaccccuuuucagcuucugc

SEQ ID NO: 3873857 - RNA, 14 nt, Human
ugacccggaggcca

SEQ ID NO: 3873858 - RNA, 17 nt, Human
ugacccggaggccacau

SEQ ID NO: 3873859 - RNA, 20 nt, Human
ugacccggcacccccugcag

SEQ ID NO: 3873860 - RNA, 21 nt, Human
ugacccggcacccccugcagc

SEQ ID NO: 3873861 - RNA, 14 nt, Human
ugacccuccaaaug

SEQ ID NO: 3873862 - RNA, 22 nt, Human
ugacccuccaccgcagaaggaa

SEQ ID NO: 3873863 - RNA, 23 nt, Human
ugacccuccaccgcagaaggaag

SEQ ID NO: 3873864 - RNA, 13 nt, Human
ugacccucccuuc

SEQ ID NO: 3873865 - RNA, 16 nt, Human
ugacccucccuuccug

SEQ ID NO: 3873866 - RNA, 22 nt, Human
ugacccuccuguugcacccagc

SEQ ID NO: 3873867 - RNA, 22 nt, Human
ugacccucugaaugguccaggg

SEQ ID NO: 3873868 - RNA, 16 nt, Human
ugacccugaucagucu

SEQ ID NO: 3873869 - RNA, 13 nt, Human
ugacccugccucu

SEQ ID NO: 3873870 - RNA, 18 nt, Human
ugacccugccucucccag

SEQ ID NO: 3873871 - RNA, 19 nt, Human
ugacccugccucucccagg

SEQ ID NO: 3873872 - RNA, 22 nt, Human
ugacccugcgaaggggcccugg

SEQ ID NO: 3873873 - RNA, 14 nt, Human
ugacccuggggcug

SEQ ID NO: 3873874 - RNA, 15 nt, Human
ugacccuggggcugg

SEQ ID NO: 3873875 - RNA, 22 nt, Human
ugacccuuacagccucugacuu

SEQ ID NO: 3873876 - RNA, 20 nt, Human
ugacccuuccagacauacga

SEQ ID NO: 3873877 - RNA, 13 nt, Human
ugacccuuuucau

SEQ ID NO: 3873878 - RNA, 19 nt, Human
ugaccgaaacagcgcuggg

SEQ ID NO: 3873879 - RNA, 23 nt, Human
ugaccgugggcggggccuugcgg

SEQ ID NO: 3873880 - RNA, 19 nt, Human
ugaccguguuggucuguac

SEQ ID NO: 3873881 - RNA, 20 nt, Human
ugaccguguuggucuguacu

SEQ ID NO: 3873882 - RNA, 17 nt, Human
ugaccuacucgagggac

SEQ ID NO: 3873883 - RNA, 18 nt, Human
ugaccuacucgagggacu

SEQ ID NO: 3873884 - RNA, 13 nt, Human
ugaccuacucuca

SEQ ID NO: 3873885 - RNA, 16 nt, Human
ugaccuaucacuucca

SEQ ID NO: 3873886 - RNA, 17 nt, Human
ugaccucaauuucaauu

SEQ ID NO: 3873887 - RNA, 23 nt, Human
ugaccucaauuucaauuuugucu

SEQ ID NO: 3873888 - RNA, 14 nt, Human
ugaccucacgugca

SEQ ID NO: 3873889 - RNA, 16 nt, Human
ugaccucagcuuugau

SEQ ID NO: 3873890 - RNA, 20 nt, Human
ugaccucaggugauccaccc

SEQ ID NO: 3873891 - RNA, 19 nt, Human
ugaccucaugcaucuccac

SEQ ID NO: 3873892 - RNA, 14 nt, Human
ugaccuccacagcu

SEQ ID NO: 3873893 - RNA, 17 nt, Human
ugaccucccccuccuuc

SEQ ID NO: 3873894 - RNA, 13 nt, Human
ugaccucccucua

SEQ ID NO: 3873895 - RNA, 17 nt, Human
ugaccuccgccauccac

SEQ ID NO: 3873896 - RNA, 18 nt, Human
ugaccucgugauccaccc

SEQ ID NO: 3873897 - RNA, 19 nt, Human
ugaccucuagcccugcccg

SEQ ID NO: 3873898 - RNA, 21 nt, Human
ugaccucucauaaauuuacuu

SEQ ID NO: 3873899 - RNA, 16 nt, Human
ugaccucucucucugg

SEQ ID NO: 3873900 - RNA, 22 nt, Human
ugaccucuguuguccuccccuu

SEQ ID NO: 3873901 - RNA, 15 nt, Human
ugaccucuugcuguc

SEQ ID NO: 3873902 - RNA, 14 nt, Human
ugaccugaaguuca

SEQ ID NO: 3873903 - RNA, 18 nt, Human
ugaccugaaguucaccau

SEQ ID NO: 3873904 - RNA, 20 nt, Human
ugaccugaggcuccugugcu

SEQ ID NO: 3873905 - RNA, 12 nt, Human
ugaccugagggc

SEQ ID NO: 3873906 - RNA, 16 nt, Human
ugaccugcauuguaaa

SEQ ID NO: 3873907 - RNA, 13 nt, Human
ugaccugccccgc

SEQ ID NO: 3873908 - RNA, 19 nt, Human
ugaccugccccgcccagcu

SEQ ID NO: 3873909 - RNA, 19 nt, Human
ugaccugccucccuucaug

SEQ ID NO: 3873910 - RNA, 21 nt, Human
ugaccugccucccuucaugca

SEQ ID NO: 3873911 - RNA, 15 nt, Human
ugaccugccucucac

SEQ ID NO: 3873912 - RNA, 20 nt, Human
ugaccugccucucacacaca

SEQ ID NO: 3873913 - RNA, 21 nt, Human
ugaccugccucucacacacau

SEQ ID NO: 3873914 - RNA, 19 nt, Human
ugaccugcuaggccagagc

SEQ ID NO: 3873915 - RNA, 18 nt, Human
ugaccugcugaccugugc

SEQ ID NO: 3873916 - RNA, 16 nt, Human
ugaccugcugagcucu

SEQ ID NO: 3873917 - RNA, 19 nt, Human
ugaccugcugagcucugag

SEQ ID NO: 3873918 - RNA, 22 nt, Human
ugaccugcugagcucugagagg

SEQ ID NO: 3873919 - RNA, 22 nt, Human
ugaccuggauaacuuagguggc

SEQ ID NO: 3873920 - RNA, 15 nt, Human
ugaccuggcccccuc

SEQ ID NO: 3873921 - RNA, 13 nt, Human
ugaccuggucagg

SEQ ID NO: 3873922 - RNA, 21 nt, Human
ugaccugucaugccccccuca

SEQ ID NO: 3873923 - RNA, 22 nt, Human
ugaccugugaccagcacugucu

SEQ ID NO: 3873924 - RNA, 20 nt, Human
ugaccugugagcccagcugg

SEQ ID NO: 3873925 - RNA, 19 nt, Human
ugaccuguggggauuucuc

SEQ ID NO: 3873926 - RNA, 22 nt, Human
ugaccuguggggauuucuccca

SEQ ID NO: 3873927 - RNA, 16 nt, Human
ugaccuguuucucugc

SEQ ID NO: 3873928 - RNA, 16 nt, Human
ugaccuuaaaugcaac

SEQ ID NO: 3873929 - RNA, 13 nt, Human
ugaccuucauuuc

SEQ ID NO: 3873930 - RNA, 19 nt, Human
ugaccuuccaagagccuga

SEQ ID NO: 3873931 - RNA, 20 nt, Human
ugaccuuccaagagccugag

SEQ ID NO: 3873932 - RNA, 16 nt, Human
ugaccuuccucugggg

SEQ ID NO: 3873933 - RNA, 21 nt, Human
ugaccuuccucuggggcucua

SEQ ID NO: 3873934 - RNA, 16 nt, Human
ugaccuuccuuccugu

SEQ ID NO: 3873935 - RNA, 21 nt, Human
ugagaccaguugggagcacug

SEQ ID NO: 3873936 - RNA, 13 nt, Human
ugagacccccaca

SEQ ID NO: 3873937 - RNA, 13 nt, Human
ugagaccccuggc

SEQ ID NO: 3873938 - RNA, 14 nt, Human
ugagaccccuggcc

SEQ ID NO: 3873939 - RNA, 16 nt, Human
ugagaccccuggccuc

SEQ ID NO: 3873940 - RNA, 16 nt, Human
ugagaccccugucucc

SEQ ID NO: 3873941 - RNA, 13 nt, Human
ugagacccuggug

SEQ ID NO: 3873942 - RNA, 12 nt, Human
ugagacccuguc

SEQ ID NO: 3873943 - RNA, 20 nt, Human
ugagaccgugaagauacuuu

SEQ ID NO: 3873944 - RNA, 19 nt, Human
ugagaccuacaggcugacg

SEQ ID NO: 3873945 - RNA, 13 nt, Human
ugagaccucagcc

SEQ ID NO: 3873946 - RNA, 16 nt, Human
ugagaccucagccaug

SEQ ID NO: 3873947 - RNA, 12 nt, Human
ugagaccugccc

SEQ ID NO: 3873948 - RNA, 19 nt, Human
ugagaccuuccuuuuacuu

SEQ ID NO: 3873949 - RNA, 18 nt, Human
ugagacucacaggaagga

SEQ ID NO: 3873950 - RNA, 20 nt, Human
ugagacucagacaggaaagg

SEQ ID NO: 3873951 - RNA, 16 nt, Human
ugagacucagugcaga

SEQ ID NO: 3873952 - RNA, 18 nt, Human
ugagacucagugcagaug

SEQ ID NO: 3873953 - RNA, 17 nt, Human
ugagacucgagaacuuu

SEQ ID NO: 3873954 - RNA, 19 nt, Human
ugagacucgcgacaaugca

SEQ ID NO: 3873955 - RNA, 21 nt, Human
ugagacucgcgacaaugcaaa

SEQ ID NO: 3873956 - RNA, 21 nt, Human
ugagacucuaggguccagugg

SEQ ID NO: 3873957 - RNA, 19 nt, Human
ugagacucucuuaggagca

SEQ ID NO: 3873958 - RNA, 23 nt, Human
ugagacucucuuaggagcagagc

SEQ ID NO: 3873959 - RNA, 13 nt, Human
ugagacucugucu

SEQ ID NO: 3873960 - RNA, 20 nt, Human
ugagacucugucucagucca

SEQ ID NO: 3873961 - RNA, 22 nt, Human
ugagacuggggccacuacauuu

SEQ ID NO: 3873962 - RNA, 23 nt, Human
ugagacuggggccacuacauuug

SEQ ID NO: 3873963 - RNA, 15 nt, Human
ugagacuugccuucc

SEQ ID NO: 3873964 - RNA, 18 nt, Human
ugagacuuuaaaagcauu

SEQ ID NO: 3873965 - RNA, 14 nt, Human
ugagagaauuggcu

SEQ ID NO: 3873966 - RNA, 16 nt, Human
ugagagaauuggcuca

SEQ ID NO: 3873967 - RNA, 18 nt, Human
ugagagaauuguaucauu

SEQ ID NO: 3873968 - RNA, 19 nt, Human
ugagagaauuguaucauuu

SEQ ID NO: 3873969 - RNA, 16 nt, Human
ugagagacacacugaa

SEQ ID NO: 3873970 - RNA, 20 nt, Human
ugagagacacacugaagaag

SEQ ID NO: 3873971 - RNA, 21 nt, Human
ugagagacacacugaagaagc

SEQ ID NO: 3873972 - RNA, 14 nt, Human
ugagagagacaaga

SEQ ID NO: 3873973 - RNA, 23 nt, Human
ugagagagaugggagcuccucuc

SEQ ID NO: 3873974 - RNA, 16 nt, Human
ugagagagcagccagg

SEQ ID NO: 3873975 - RNA, 15 nt, Human
ugagagaguggcugg

SEQ ID NO: 3873976 - RNA, 21 nt, Human
ugagagauucugugaucuuuu

SEQ ID NO: 3873977 - RNA, 23 nt, Human
ugagagcaguuugguuucuagca

SEQ ID NO: 3873978 - RNA, 16 nt, Human
ugagagcccagaggua

SEQ ID NO: 3873979 - RNA, 16 nt, Human
ugagagccccagcuga

SEQ ID NO: 3873980 - RNA, 20 nt, Human
ugagagcccugaggccuaga

SEQ ID NO: 3873981 - RNA, 19 nt, Human
ugagagcgaggcugagccu

SEQ ID NO: 3873982 - RNA, 16 nt, Human
ugagagcugcaugugu

SEQ ID NO: 3873983 - RNA, 10 nt, Human
ugagaggaaa

SEQ ID NO: 3873984 - RNA, 12 nt, Human
ugagaggaaauc

SEQ ID NO: 3873985 - RNA, 16 nt, Human
ugagaggaggcagcag

SEQ ID NO: 3873986 - RNA, 12 nt, Human
ugagaggcaggc

SEQ ID NO: 3873987 - RNA, 13 nt, Human
ugagaggcccugg

SEQ ID NO: 3873988 - RNA, 16 nt, Human
ugagaggcccuggauc

SEQ ID NO: 3873989 - RNA, 17 nt, Human
ugagagggccgggcaga

SEQ ID NO: 3873990 - RNA, 19 nt, Human
ugagaggggaacagacugg

SEQ ID NO: 3873991 - RNA, 14 nt, Human
ugagaggggagagc

SEQ ID NO: 3873992 - RNA, 21 nt, Human
ugagaggggagagcugaacag

SEQ ID NO: 3873993 - RNA, 18 nt, Human
ugagaggggcuguccagu

SEQ ID NO: 3873994 - RNA, 19 nt, Human
ugagaguauauuauguauu

SEQ ID NO: 3873995 - RNA, 19 nt, Human
ugagaguaucaggucuccc

SEQ ID NO: 3873996 - RNA, 21 nt, Human
ugagagucagcucucugcccu

SEQ ID NO: 3873997 - RNA, 13 nt, Human
ugagagucuagau

SEQ ID NO: 3873998 - RNA, 14 nt, Human
ugagagugugacca

SEQ ID NO: 3873999 - RNA, 18 nt, Human
ugagaguuuugucuugaa

SEQ ID NO: 3874000 - RNA, 21 nt, Human
ugagaguuuugucuugaaugu

SEQ ID NO: 3874001 - RNA, 21 nt, Human
ugagauaccagcgaggaggcu

SEQ ID NO: 3874002 - RNA, 21 nt, Human
ugagauacuuugcauugucug

SEQ ID NO: 3874003 - RNA, 15 nt, Human
ugagauacuuuuucu

SEQ ID NO: 3874004 - RNA, 23 nt, Human
ugagauacuuuuucuuuuguaag

SEQ ID NO: 3874005 - RNA, 18 nt, Human
ugagauagaagauguuug

SEQ ID NO: 3874006 - RNA, 21 nt, Human
ugagauaguuuucauccauaa

SEQ ID NO: 3874007 - RNA, 12 nt, Human
ugagauauuaau

SEQ ID NO: 3874008 - RNA, 19 nt, Human
ugagauauuaaugcccaga

SEQ ID NO: 3874009 - RNA, 20 nt, Human
ugagauauuaaugcccagac

SEQ ID NO: 3874010 - RNA, 15 nt, Human
ugagaucaaaacggu

SEQ ID NO: 3874011 - RNA, 14 nt, Human
ugagaucagccugg

SEQ ID NO: 3874012 - RNA, 14 nt, Human
ugagaucaggcucu

SEQ ID NO: 3874013 - RNA, 12 nt, Human
ugagauccccug

SEQ ID NO: 3874014 - RNA, 18 nt, Human
ugagauccuuccuuuuga

SEQ ID NO: 3874015 - RNA, 18 nt, Human
ugagaucgugccacugca

SEQ ID NO: 3874016 - RNA, 20 nt, Human
ugagaucgugccacugcacu

SEQ ID NO: 3874017 - RNA, 23 nt, Human
ugagaucgugcuacugcacucca

SEQ ID NO: 3874018 - RNA, 17 nt, Human
ugagaugagaggggaga

SEQ ID NO: 3874019 - RNA, 21 nt, Human
ugagaugagggaugggccugg

SEQ ID NO: 3874020 - RNA, 22 nt, Human
ugagaugagggaugggccuggc

SEQ ID NO: 3874021 - RNA, 16 nt, Human
ugagaugauuaaaaug

SEQ ID NO: 3874022 - RNA, 19 nt, Human
ugagaugauucagaagggg

SEQ ID NO: 3874023 - RNA, 16 nt, Human
ugagaugauuuccaag

SEQ ID NO: 3874024 - RNA, 16 nt, Human
ugagaugcagcuggaa

SEQ ID NO: 3874025 - RNA, 13 nt, Human
ugagaugcuggag

SEQ ID NO: 3874026 - RNA, 19 nt, Human
ugagaugcuggagaagaga

SEQ ID NO: 3874027 - RNA, 20 nt, Human
ugagaugcuggagaagagag

SEQ ID NO: 3874028 - RNA, 23 nt, Human
ugagaugcuggagaagagaggag

SEQ ID NO: 3874029 - RNA, 17 nt, Human
ugagaugcuggcuuggg

SEQ ID NO: 3874030 - RNA, 13 nt, Human
ugagaugcugguu

SEQ ID NO: 3874031 - RNA, 12 nt, Human
ugagaugcugua

SEQ ID NO: 3874032 - RNA, 16 nt, Human
ugagauggcucccagg

SEQ ID NO: 3874033 - RNA, 22 nt, Human
ugagaugguaugcacaauucca

SEQ ID NO: 3874034 - RNA, 13 nt, Human
ugagaugugaaca

SEQ ID NO: 3874035 - RNA, 15 nt, Human
ugagauguguaucag

SEQ ID NO: 3874036 - RNA, 18 nt, Human
ugagauguguaucagugu

SEQ ID NO: 3874037 - RNA, 20 nt, Human
ugagauguguaucaguguuu

SEQ ID NO: 3874038 - RNA, 14 nt, Human
ugagauguguucac

SEQ ID NO: 3874039 - RNA, 16 nt, Human
ugagauuaauuccuuu

SEQ ID NO: 3874040 - RNA, 19 nt, Human
ugagauuacagaggaaguu

SEQ ID NO: 3874041 - RNA, 16 nt, Human
ugagauuacaggcaug

SEQ ID NO: 3874042 - RNA, 20 nt, Human
ugagauuccucuguauugug

SEQ ID NO: 3874043 - RNA, 15 nt, Human
ugagauucucaaagg

SEQ ID NO: 3874044 - RNA, 17 nt, Human
ugagauugaauuucacu

SEQ ID NO: 3874045 - RNA, 19 nt, Human
ugagauugguuuuccugug

SEQ ID NO: 3874046 - RNA, 16 nt, Human
ugagauuguccucauu

SEQ ID NO: 3874047 - RNA, 23 nt, Human
ugagauuguuuucuuuuucuacc

SEQ ID NO: 3874048 - RNA, 18 nt, Human
ugagauuuauuaaagaaa

SEQ ID NO: 3874049 - RNA, 13 nt, Human
ugagauuucaucu

SEQ ID NO: 3874050 - RNA, 14 nt, Human
ugagauuucaucug

SEQ ID NO: 3874051 - RNA, 21 nt, Human
ugagauuucaucugcucuccu

SEQ ID NO: 3874052 - RNA, 17 nt, Human
ugagauuuccuccuggc

SEQ ID NO: 3874053 - RNA, 18 nt, Human
ugagauuuuuuauugcua

SEQ ID NO: 3874054 - RNA, 19 nt, Human
ugagauuuuuuauugcuag

SEQ ID NO: 3874055 - RNA, 23 nt, Human
ugagauuuuuuauugcuaguauu

SEQ ID NO: 3874056 - RNA, 17 nt, Human
ugagcaaaccugcccca

SEQ ID NO: 3874057 - RNA, 21 nt, Human
ugagcaaaccugccccauccc

SEQ ID NO: 3874058 - RNA, 19 nt, Human
ugagcaaauguggcuccug

SEQ ID NO: 3874059 - RNA, 18 nt, Human
ugagcaacucuugauuau

SEQ ID NO: 3874060 - RNA, 14 nt, Human
ugagcaagcccagg

SEQ ID NO: 3874061 - RNA, 17 nt, Human
ugagcaauguauaaccc

SEQ ID NO: 3874062 - RNA, 20 nt, Human
ugagcaaugucugugcuagg

SEQ ID NO: 3874063 - RNA, 17 nt, Human
ugagcacagccuagggc

SEQ ID NO: 3874064 - RNA, 14 nt, Human
ugagcaccagggga

SEQ ID NO: 3874065 - RNA, 17 nt, Human
ugagcaccgucauggcu

SEQ ID NO: 3874066 - RNA, 22 nt, Human
ugagcaccgugucaagcugcuc

SEQ ID NO: 3874067 - RNA, 12 nt, Human
ugagcaccugcu

SEQ ID NO: 3874068 - RNA, 18 nt, Human
ugagcacucccaagucua

SEQ ID NO: 3874069 - RNA, 13 nt, Human
ugagcacugccag

SEQ ID NO: 3874070 - RNA, 22 nt, Human
ugagcacuguuuauacacugug

SEQ ID NO: 3874071 - RNA, 22 nt, Human
ugagcacuguuuucuaguguau

SEQ ID NO: 3874072 - RNA, 15 nt, Human
ugagcagaauucauu

SEQ ID NO: 3874073 - RNA, 12 nt, Human
ugagcagcaccc

SEQ ID NO: 3874074 - RNA, 21 nt, Human
ugagcagccuggagcccugga

SEQ ID NO: 3874075 - RNA, 12 nt, Human
ugagcagggcuc

SEQ ID NO: 3874076 - RNA, 16 nt, Human
ugagcagggcucagcg

SEQ ID NO: 3874077 - RNA, 20 nt, Human
ugagcagggcucagcgggga

SEQ ID NO: 3874078 - RNA, 14 nt, Human
ugagcaguccuugg

SEQ ID NO: 3874079 - RNA, 17 nt, Human
ugagcagugauauucuu

SEQ ID NO: 3874080 - RNA, 15 nt, Human
ugcagaacuguagcu

SEQ ID NO: 3874081 - RNA, 14 nt, Human
ugcagaagacagua

SEQ ID NO: 3874082 - RNA, 15 nt, Human
ugcagaagggagcug

SEQ ID NO: 3874083 - RNA, 22 nt, Human
ugcagaagggagcuggcuccag

SEQ ID NO: 3874084 - RNA, 13 nt, Human
ugcagaaguaagc

SEQ ID NO: 3874085 - RNA, 20 nt, Human
ugcagaauguaagugggccc

SEQ ID NO: 3874086 - RNA, 21 nt, Human
ugcagaauguaagugggccca

SEQ ID NO: 3874087 - RNA, 15 nt, Human
ugcagacaggaaucu

SEQ ID NO: 3874088 - RNA, 16 nt, Human
ugcagacaggaaucuu

SEQ ID NO: 3874089 - RNA, 15 nt, Human
ugcagacaugagugc

SEQ ID NO: 3874090 - RNA, 19 nt, Human
ugcagaccccuuggccagc

SEQ ID NO: 3874091 - RNA, 19 nt, Human
ugcagacccugcccuuguu

SEQ ID NO: 3874092 - RNA, 15 nt, Human
ugcagaccuguccuc

SEQ ID NO: 3874093 - RNA, 17 nt, Human
ugcagacuagaauucua

SEQ ID NO: 3874094 - RNA, 19 nt, Human
ugcagacucaauaaaauca

SEQ ID NO: 3874095 - RNA, 14 nt, Human
ugcagacucaguuu

SEQ ID NO: 3874096 - RNA, 19 nt, Human
ugcagacucaguuugucag

SEQ ID NO: 3874097 - RNA, 19 nt, Human
ugcagacucuacagaggcc

SEQ ID NO: 3874098 - RNA, 12 nt, Human
ugcagacugcua

SEQ ID NO: 3874099 - RNA, 22 nt, Human
ugcagacugcugcuagagccag

SEQ ID NO: 3874100 - RNA, 20 nt, Human
ugcagagacaggaccugacu

SEQ ID NO: 3874101 - RNA, 15 nt, Human
ugcagagagccauuu

SEQ ID NO: 3874102 - RNA, 18 nt, Human
ugcagagagccauuuugu

SEQ ID NO: 3874103 - RNA, 22 nt, Human
ugcagagagccauuuugugaau

SEQ ID NO: 3874104 - RNA, 19 nt, Human
ugcagagaugcgguggcua

SEQ ID NO: 3874105 - RNA, 20 nt, Human
ugcagagauuucucauugac

SEQ ID NO: 3874106 - RNA, 23 nt, Human
ugcagagcaccuuugcacaggau

SEQ ID NO: 3874107 - RNA, 22 nt, Human
ugcagagcagugggccuggcca

SEQ ID NO: 3874108 - RNA, 19 nt, Human
ugcagagccuucucagaag

SEQ ID NO: 3874109 - RNA, 22 nt, Human
ugcagagccuucucagaagcac

SEQ ID NO: 3874110 - RNA, 13 nt, Human
ugcagagcugaag

SEQ ID NO: 3874111 - RNA, 14 nt, Human
ugcagaggccagag

SEQ ID NO: 3874112 - RNA, 19 nt, Human
ugcagaggcuaugggaaga

SEQ ID NO: 3874113 - RNA, 12 nt, Human
ugcagaggcugu

SEQ ID NO: 3874114 - RNA, 19 nt, Human
ugcagagguacccugggug

SEQ ID NO: 3874115 - RNA, 14 nt, Human
ugcagaggucugug

SEQ ID NO: 3874116 - RNA, 18 nt, Human
ugcagaggucugugcuga

SEQ ID NO: 3874117 - RNA, 20 nt, Human
ugcagaguauuuuuguauuc

SEQ ID NO: 3874118 - RNA, 15 nt, Human
ugcagagucagcaga

SEQ ID NO: 3874119 - RNA, 14 nt, Human
ugcagagugcccag

SEQ ID NO: 3874120 - RNA, 20 nt, Human
ugcagaguuuccaaaaccag

SEQ ID NO: 3874121 - RNA, 17 nt, Human
ugcagauaaacaguagu

SEQ ID NO: 3874122 - RNA, 23 nt, Human
ugcagauacuacugaccagacaa

SEQ ID NO: 3874123 - RNA, 15 nt, Human
ugcagaugccagagc

SEQ ID NO: 3874124 - RNA, 18 nt, Human
ugcagauggggcucccgc

SEQ ID NO: 3874125 - RNA, 17 nt, Human
ugcagauuugggcugga

SEQ ID NO: 3874126 - RNA, 16 nt, Human
ugcagcaaucuuugaa

SEQ ID NO: 3874127 - RNA, 16 nt, Human
ugcagcacggacaaua

SEQ ID NO: 3874128 - RNA, 18 nt, Human
ugcagcacggacaauaaa

SEQ ID NO: 3874129 - RNA, 22 nt, Human
ugcagcacggacaauaaaccuc

SEQ ID NO: 3874130 - RNA, 23 nt, Human
ugcagcagauuggaaggagacac

SEQ ID NO: 3874131 - RNA, 19 nt, Human
ugcagcagcuugcugcacc

SEQ ID NO: 3874132 - RNA, 22 nt, Human
ugcagcaggaguggugcagaca

SEQ ID NO: 3874133 - RNA, 17 nt, Human
ugcagcagggaugcccu

SEQ ID NO: 3874134 - RNA, 14 nt, Human
ugcagcagggcagu

SEQ ID NO: 3874135 - RNA, 23 nt, Human
ugcagcaugaccugugaccagca

SEQ ID NO: 3874136 - RNA, 16 nt, Human
ugcagcauggucccug

SEQ ID NO: 3874137 - RNA, 22 nt, Human
ugcagcauuugauaaugauaaa

SEQ ID NO: 3874138 - RNA, 21 nt, Human
ugcagccaaguagccucuccu

SEQ ID NO: 3874139 - RNA, 12 nt, Human
ugcagccagccc

SEQ ID NO: 3874140 - RNA, 15 nt, Human
ugcagccagcccagc

SEQ ID NO: 3874141 - RNA, 12 nt, Human
ugcagcccaugc

SEQ ID NO: 3874142 - RNA, 19 nt, Human
ugcagcccauuucuccaga

SEQ ID NO: 3874143 - RNA, 21 nt, Human
ugcagcccugagaaagcccug

SEQ ID NO: 3874144 - RNA, 22 nt, Human
ugcagcccugcugcugccugcc

SEQ ID NO: 3874145 - RNA, 16 nt, Human
ugcagccucacagucc

SEQ ID NO: 3874146 - RNA, 21 nt, Human
ugcagccucacaguccuuacc

SEQ ID NO: 3874147 - RNA, 20 nt, Human
ugcagccucagagacaucag

SEQ ID NO: 3874148 - RNA, 16 nt, Human
ugcagccucaggacug

SEQ ID NO: 3874149 - RNA, 18 nt, Human
ugcagccucaggacuggg

SEQ ID NO: 3874150 - RNA, 19 nt, Human
ugcagccuccuccugacca

SEQ ID NO: 3874151 - RNA, 19 nt, Human
ugcagccucgaacuccugg

SEQ ID NO: 3874152 - RNA, 23 nt, Human
ugcagccucgaacuccugggcuc

SEQ ID NO: 3874153 - RNA, 12 nt, Human
ugcagccugcuc

SEQ ID NO: 3874154 - RNA, 12 nt, Human
ugcagccugggu

SEQ ID NO: 3874155 - RNA, 12 nt, Human
ugcagcgcagcu

SEQ ID NO: 3874156 - RNA, 22 nt, Human
ugcagcgcagcuggacucugca

SEQ ID NO: 3874157 - RNA, 22 nt, Human
ugcagcuaguccuagugaaccu

SEQ ID NO: 3874158 - RNA, 13 nt, Human
ugcagcuaucugg

SEQ ID NO: 3874159 - RNA, 17 nt, Human
ugcagcucaacuuucug

SEQ ID NO: 3874160 - RNA, 15 nt, Human
ugcagcucagaacca

SEQ ID NO: 3874161 - RNA, 20 nt, Human
ugcagcucccuggcuucugu

SEQ ID NO: 3874162 - RNA, 15 nt, Human
ugcagcucuuccugg

SEQ ID NO: 3874163 - RNA, 18 nt, Human
ugcagcugaaauugaaaa

SEQ ID NO: 3874164 - RNA, 16 nt, Human
ugcagcugauguugga

SEQ ID NO: 3874165 - RNA, 16 nt, Human
ugcagcugauuuuaac

SEQ ID NO: 3874166 - RNA, 20 nt, Human
ugcagcugauuuuaacaaua

SEQ ID NO: 3874167 - RNA, 22 nt, Human
ugcagcuguggcagaguuacag

SEQ ID NO: 3874168 - RNA, 15 nt, Human
ugcagcuuccuguca

SEQ ID NO: 3874169 - RNA, 18 nt, Human
ugcagcuuccugucaaca

SEQ ID NO: 3874170 - RNA, 17 nt, Human
ugcagcuuguagccagc

SEQ ID NO: 3874171 - RNA, 18 nt, Human
ugcagcuuguagccagcc

SEQ ID NO: 3874172 - RNA, 21 nt, Human
ugcagcuuguagccagccggg

SEQ ID NO: 3874173 - RNA, 22 nt, Human
ugcagcuuguagccagccgggg

SEQ ID NO: 3874174 - RNA, 22 nt, Human
ugcagcuuuaaaaaauuaaucu

SEQ ID NO: 3874175 - RNA, 16 nt, Human
ugcagcuuuacaugca

SEQ ID NO: 3874176 - RNA, 14 nt, Human
ugcagcuuuugguc

SEQ ID NO: 3874177 - RNA, 15 nt, Human
ugcaggaaggagcug

SEQ ID NO: 3874178 - RNA, 17 nt, Human
ugcaggaaggagcugcc

SEQ ID NO: 3874179 - RNA, 20 nt, Human
ugcaggaaggagcugccugg

SEQ ID NO: 3874180 - RNA, 21 nt, Human
ugcaggaaggagcugccugga

SEQ ID NO: 3874181 - RNA, 20 nt, Human
ugcaggaaucaaaaauugaa

SEQ ID NO: 3874182 - RNA, 21 nt, Human
ugcaggaaucaaaaauugaag

SEQ ID NO: 3874183 - RNA, 19 nt, Human
ugcaggaaucuuuaaaaga

SEQ ID NO: 3874184 - RNA, 16 nt, Human
ugcaggaccugccugu

SEQ ID NO: 3874185 - RNA, 17 nt, Human
ugcaggaccugccugua

SEQ ID NO: 3874186 - RNA, 18 nt, Human
ugcaggaccugccuguag

SEQ ID NO: 3874187 - RNA, 13 nt, Human
ugcaggacuugag

SEQ ID NO: 3874188 - RNA, 23 nt, Human
ugcaggaguuaaaaagggcaggg

SEQ ID NO: 3874189 - RNA, 19 nt, Human
ugcaggaucucaccaggca

SEQ ID NO: 3874190 - RNA, 20 nt, Human
ugcaggcacuuauuguaaau

SEQ ID NO: 3874191 - RNA, 14 nt, Human
ugcaggcagacacg

SEQ ID NO: 3874192 - RNA, 14 nt, Human
ugcaggcagccagg

SEQ ID NO: 3874193 - RNA, 19 nt, Human
ugcaggcaggaacaaacag

SEQ ID NO: 3874194 - RNA, 15 nt, Human
ugcaggccaggccag

SEQ ID NO: 3874195 - RNA, 19 nt, Human
ugcaggccccgcuugucca

SEQ ID NO: 3874196 - RNA, 17 nt, Human
ugcaggcccuggccucc

SEQ ID NO: 3874197 - RNA, 22 nt, Human
ugcaggcccuuugaagccucag

SEQ ID NO: 3874198 - RNA, 16 nt, Human
ugcaggccugcucagg

SEQ ID NO: 3874199 - RNA, 21 nt, Human
ugcaggccugcucagggacug

SEQ ID NO: 3874200 - RNA, 18 nt, Human
ugcaggcuccccugagga

SEQ ID NO: 3874201 - RNA, 23 nt, Human
ugcaggcuggcaccgccuucucu

SEQ ID NO: 3874202 - RNA, 14 nt, Human
ugcaggcuggccag

SEQ ID NO: 3874203 - RNA, 16 nt, Human
ugcaggcuggccagcc

SEQ ID NO: 3874204 - RNA, 18 nt, Human
ugcaggcuggccagccgc

SEQ ID NO: 3874205 - RNA, 19 nt, Human
ugcaggcuggccagccgcu

SEQ ID NO: 3874206 - RNA, 14 nt, Human
ugcagggagccgag

SEQ ID NO: 3874207 - RNA, 16 nt, Human
ugcagggauguggguu

SEQ ID NO: 3874208 - RNA, 22 nt, Human
ugcagggauguggguuccacag

SEQ ID NO: 3874209 - RNA, 13 nt, Human
ugcagggcagccc

SEQ ID NO: 3874210 - RNA, 20 nt, Human
ugcagggcagccccacaacu

SEQ ID NO: 3874211 - RNA, 13 nt, Human
ugcagggccagga

SEQ ID NO: 3874212 - RNA, 23 nt, Human
ugcagggccaggacugagccccg

SEQ ID NO: 3874213 - RNA, 19 nt, Human
ugcagggccauggcucagg

SEQ ID NO: 3874214 - RNA, 14 nt, Human
ugcaggggcucugg

SEQ ID NO: 3874215 - RNA, 19 nt, Human
ugcaggggcucuggagaga

SEQ ID NO: 3874216 - RNA, 13 nt, Human
ugcaggggugacg

SEQ ID NO: 3874217 - RNA, 17 nt, Human
ugcaggguggugcuggg

SEQ ID NO: 3874218 - RNA, 18 nt, Human
ugcagguagaccugucuc

SEQ ID NO: 3874219 - RNA, 12 nt, Human
ugcaggucccua

SEQ ID NO: 3874220 - RNA, 15 nt, Human
ugcaggucccuaaua

SEQ ID NO: 3874221 - RNA, 21 nt, Human
ugcaggucccuaauaaagcug

SEQ ID NO: 3874222 - RNA, 22 nt, Human
ugcaggucccuaauaaagcugu

SEQ ID NO: 3874223 - RNA, 15 nt, Human
ugcaggucucaaccc

SEQ ID NO: 3874224 - RNA, 19 nt, Human
ugcauuuuaacccuauuuu

SEQ ID NO: 3874225 - RNA, 21 nt, Human
ugcauuuuaauuuuaaccaaa

SEQ ID NO: 3874226 - RNA, 17 nt, Human
ugcauuuucaccccacc

SEQ ID NO: 3874227 - RNA, 20 nt, Human
ugcauuuucugaaacuaaug

SEQ ID NO: 3874228 - RNA, 13 nt, Human
ugcauuuugcuau

SEQ ID NO: 3874229 - RNA, 16 nt, Human
ugcauuuugcuauugu

SEQ ID NO: 3874230 - RNA, 18 nt, Human
ugcauuuugcuauuguaa

SEQ ID NO: 3874231 - RNA, 19 nt, Human
ugcauuuugcuauuguaaa

SEQ ID NO: 3874232 - RNA, 22 nt, Human
ugcauuuugcuauuguaaauau

SEQ ID NO: 3874233 - RNA, 14 nt, Human
ugcauuuuucugca

SEQ ID NO: 3874234 - RNA, 14 nt, Human
ugcauuuuugugaa

SEQ ID NO: 3874235 - RNA, 21 nt, Human
ugccaaaaaggauacauaaug

SEQ ID NO: 3874236 - RNA, 22 nt, Human
ugccaaaaagugaaauaaugug

SEQ ID NO: 3874237 - RNA, 17 nt, Human
ugccaaaacccagcugc

SEQ ID NO: 3874238 - RNA, 12 nt, Human
ugccaaaauaau

SEQ ID NO: 3874239 - RNA, 17 nt, Human
ugccaaaauaaugucuu

SEQ ID NO: 3874240 - RNA, 19 nt, Human
ugccaaaaucauuuuaaug

SEQ ID NO: 3874241 - RNA, 15 nt, Human
ugccaaagaaagugg

SEQ ID NO: 3874242 - RNA, 21 nt, Human
ugccaaagcuaggguggcccu

SEQ ID NO: 3874243 - RNA, 22 nt, Human
ugccaaagcuaggguggcccuu

SEQ ID NO: 3874244 - RNA, 15 nt, Human
ugccaaaggauguga

SEQ ID NO: 3874245 - RNA, 16 nt, Human
ugccaaaggaugugau

SEQ ID NO: 3874246 - RNA, 17 nt, Human
ugccaaaggaugugaua

SEQ ID NO: 3874247 - RNA, 22 nt, Human
ugccaaaguacagaauuugaau

SEQ ID NO: 3874248 - RNA, 18 nt, Human
ugccaaauauaaauaaaa

SEQ ID NO: 3874249 - RNA, 19 nt, Human
ugccaaauauaaauaaaaa

SEQ ID NO: 3874250 - RNA, 22 nt, Human
ugccaaauauaaauaaaaauaa

SEQ ID NO: 3874251 - RNA, 17 nt, Human
ugccaaauauguccugg

SEQ ID NO: 3874252 - RNA, 12 nt, Human
ugccaaaugcuc

SEQ ID NO: 3874253 - RNA, 22 nt, Human
ugccaaauuaaaaaagauaaac

SEQ ID NO: 3874254 - RNA, 22 nt, Human
ugccaaauuauucuccuauguu

SEQ ID NO: 3874255 - RNA, 18 nt, Human
ugccaacaagaaugcauu

SEQ ID NO: 3874256 - RNA, 19 nt, Human
ugccaacaagaaugcauug

SEQ ID NO: 3874257 - RNA, 20 nt, Human
ugccaacacucaagaagcag

SEQ ID NO: 3874258 - RNA, 23 nt, Human
ugccaacacucaagaagcaggcu

SEQ ID NO: 3874259 - RNA, 13 nt, Human
ugccaacauugcc

SEQ ID NO: 3874260 - RNA, 19 nt, Human
ugccaaccauaccuuccuu

SEQ ID NO: 3874261 - RNA, 17 nt, Human
ugccaaccuauuuugaa

SEQ ID NO: 3874262 - RNA, 18 nt, Human
ugccaaccuguaauaaau

SEQ ID NO: 3874263 - RNA, 17 nt, Human
ugccaagaacugaaaac

SEQ ID NO: 3874264 - RNA, 18 nt, Human
ugccaagaacugaaaaca

SEQ ID NO: 3874265 - RNA, 20 nt, Human
ugccaagaacugaaaacaua

SEQ ID NO: 3874266 - RNA, 23 nt, Human
ugccaagacaaaucaacagaagc

SEQ ID NO: 3874267 - RNA, 19 nt, Human
ugccaagcacagugccugc

SEQ ID NO: 3874268 - RNA, 23 nt, Human
ugccaagccauggguagccuggg

SEQ ID NO: 3874269 - RNA, 18 nt, Human
ugccaagccccauccugc

SEQ ID NO: 3874270 - RNA, 14 nt, Human
ugccaagcucagga

SEQ ID NO: 3874271 - RNA, 23 nt, Human
ugccaagucauagccauaaauga

SEQ ID NO: 3874272 - RNA, 13 nt, Human
ugccaaguccagg

SEQ ID NO: 3874273 - RNA, 20 nt, Human
ugccaaguuguuugagaaau

SEQ ID NO: 3874274 - RNA, 22 nt, Human
ugccaauaauaauaccucccuu

SEQ ID NO: 3874275 - RNA, 15 nt, Human
ugccaauauccuaau

SEQ ID NO: 3874276 - RNA, 17 nt, Human
ugccaauauccuaauaa

SEQ ID NO: 3874277 - RNA, 19 nt, Human
ugccaauauccuaauaaaa

SEQ ID NO: 3874278 - RNA, 23 nt, Human
ugccaauauccuaauaaaaaggu

SEQ ID NO: 3874279 - RNA, 15 nt, Human
ugccaauauguauug

SEQ ID NO: 3874280 - RNA, 16 nt, Human
ugccaauauguauugu

SEQ ID NO: 3874281 - RNA, 14 nt, Human
ugccaauggaaccu

SEQ ID NO: 3874282 - RNA, 13 nt, Human
ugccaauggacua

SEQ ID NO: 3874283 - RNA, 14 nt, Human
ugccaaugggagcu

SEQ ID NO: 3874284 - RNA, 21 nt, Human
ugccaauuugcacauuaaaug

SEQ ID NO: 3874285 - RNA, 17 nt, Human
ugccacaaccagccagg

SEQ ID NO: 3874286 - RNA, 17 nt, Human
ugccacaaggaagaaau

SEQ ID NO: 3874287 - RNA, 22 nt, Human
ugccacaaggaagaaauuaacu

SEQ ID NO: 3874288 - RNA, 23 nt, Human
ugccacaaggaagaaauuaacuu

SEQ ID NO: 3874289 - RNA, 15 nt, Human
ugccacaaggacuuc

SEQ ID NO: 3874290 - RNA, 16 nt, Human
ugccacaaggacuucc

SEQ ID NO: 3874291 - RNA, 14 nt, Human
ugccacacaaacgu

SEQ ID NO: 3874292 - RNA, 13 nt, Human
ugccacacccucc

SEQ ID NO: 3874293 - RNA, 22 nt, Human
ugccacacccucccccgccacu

SEQ ID NO: 3874294 - RNA, 16 nt, Human
ugccacacgucugacc

SEQ ID NO: 3874295 - RNA, 14 nt, Human
ugccacacucucca

SEQ ID NO: 3874296 - RNA, 12 nt, Human
ugccacacuuca

SEQ ID NO: 3874297 - RNA, 13 nt, Human
ugccacacuucag

SEQ ID NO: 3874298 - RNA, 15 nt, Human
ugccacacuucaggc

SEQ ID NO: 3874299 - RNA, 16 nt, Human
ugccacacuucaggcu

SEQ ID NO: 3874300 - RNA, 14 nt, Human
ugccacagagcggg

SEQ ID NO: 3874301 - RNA, 16 nt, Human
ugccacagagcgggga

SEQ ID NO: 3874302 - RNA, 22 nt, Human
ugccacagaguguagccagguc

SEQ ID NO: 3874303 - RNA, 17 nt, Human
ugccacagccuccccug

SEQ ID NO: 3874304 - RNA, 17 nt, Human
ugccacaggccucccug

SEQ ID NO: 3874305 - RNA, 22 nt, Human
ugccacaggccucccuguuuga

SEQ ID NO: 3874306 - RNA, 23 nt, Human
ugccacaggccucccuguuugaa

SEQ ID NO: 3874307 - RNA, 17 nt, Human
ugccacaguagaacugu

SEQ ID NO: 3874308 - RNA, 22 nt, Human
ugccacaguagaacugucugug

SEQ ID NO: 3874309 - RNA, 21 nt, Human
ugccacaucuugaucugcuca

SEQ ID NO: 3874310 - RNA, 21 nt, Human
ugccaccaacuggcccucuuc

SEQ ID NO: 3874311 - RNA, 16 nt, Human
ugccaccaacuuacaa

SEQ ID NO: 3874312 - RNA, 19 nt, Human
ugccaccaacuuacaaaaa

SEQ ID NO: 3874313 - RNA, 22 nt, Human
ugccaccacuauaaaaugucuu

SEQ ID NO: 3874314 - RNA, 18 nt, Human
ugccaccagagaccgucc

SEQ ID NO: 3874315 - RNA, 13 nt, Human
ugccaccaggaga

SEQ ID NO: 3874316 - RNA, 17 nt, Human
ugccaccaggagaacca

SEQ ID NO: 3874317 - RNA, 18 nt, Human
ugccaccaggccaccucc

SEQ ID NO: 3874318 - RNA, 19 nt, Human
ugccaccauccugcugcug

SEQ ID NO: 3874319 - RNA, 18 nt, Human
ugccaccauggccagcca

SEQ ID NO: 3874320 - RNA, 12 nt, Human
ugccacccacca

SEQ ID NO: 3874321 - RNA, 16 nt, Human
ugccacccaccucccu

SEQ ID NO: 3874322 - RNA, 18 nt, Human
ugccacccaccucccugc

SEQ ID NO: 3874323 - RNA, 20 nt, Human
ugccacccagccccagccag

SEQ ID NO: 3874324 - RNA, 22 nt, Human
ugccacccagccccagccaggg

SEQ ID NO: 3874325 - RNA, 21 nt, Human
ugccacccaggugauguuagu

SEQ ID NO: 3874326 - RNA, 21 nt, Human
ugccaccccacccucccugga

SEQ ID NO: 3874327 - RNA, 23 nt, Human
ugccaccccacccucccuggagu

SEQ ID NO: 3874328 - RNA, 18 nt, Human
ugccacccccgcuggagg

SEQ ID NO: 3874329 - RNA, 17 nt, Human
ugccaccccgagggcug

SEQ ID NO: 3874330 - RNA, 18 nt, Human
ugccaccccgagggcuga

SEQ ID NO: 3874331 - RNA, 20 nt, Human
ugccaccccuaaacuccagg

SEQ ID NO: 3874332 - RNA, 15 nt, Human
ugccacccugcugag

SEQ ID NO: 3874333 - RNA, 17 nt, Human
ugccacccugggcucug

SEQ ID NO: 3874334 - RNA, 18 nt, Human
ugccacccugggcucugu

SEQ ID NO: 3874335 - RNA, 19 nt, Human
ugccacccuggggagaaag

SEQ ID NO: 3874336 - RNA, 20 nt, Human
ugccacccuggggagaaagu

SEQ ID NO: 3874337 - RNA, 18 nt, Human
ugccaccuccccuugcca

SEQ ID NO: 3874338 - RNA, 21 nt, Human
ugccaccuccccuugccagcu

SEQ ID NO: 3874339 - RNA, 14 nt, Human
ugccaccuccugcc

SEQ ID NO: 3874340 - RNA, 18 nt, Human
ugccaccucuaacagcac

SEQ ID NO: 3874341 - RNA, 19 nt, Human
ugccaccucuaacagcacc

SEQ ID NO: 3874342 - RNA, 20 nt, Human
ugccaccucuaacagcacca

SEQ ID NO: 3874343 - RNA, 13 nt, Human
ugccaccuggacc

SEQ ID NO: 3874344 - RNA, 15 nt, Human
ugccaccuggacccc

SEQ ID NO: 3874345 - RNA, 18 nt, Human
ugccaccuggaccccugc

SEQ ID NO: 3874346 - RNA, 20 nt, Human
ugccaccuggaccccugcau

SEQ ID NO: 3874347 - RNA, 17 nt, Human
ugccaccuggggcaguc

SEQ ID NO: 3874348 - RNA, 23 nt, Human
ugccacgaauuucugugcccucc

SEQ ID NO: 3874349 - RNA, 22 nt, Human
ugccacgcgguacaaaggaaaa

SEQ ID NO: 3874350 - RNA, 15 nt, Human
ugccacguuccacag

SEQ ID NO: 3874351 - RNA, 20 nt, Human
ugccacguuccacaguugcc

SEQ ID NO: 3874352 - RNA, 16 nt, Human
ugccacuaaauugaca

SEQ ID NO: 3874353 - RNA, 18 nt, Human
ugccacuaauuuuaguau

SEQ ID NO: 3874354 - RNA, 21 nt, Human
ugccacuaccccuugauuuuc

SEQ ID NO: 3874355 - RNA, 18 nt, Human
ugccacuaggcugggugc

SEQ ID NO: 3874356 - RNA, 21 nt, Human
ugccacuaggcugggugccca

SEQ ID NO: 3874357 - RNA, 15 nt, Human
ugccacuagggcucu

SEQ ID NO: 3874358 - RNA, 16 nt, Human
ugccacucacacagcc

SEQ ID NO: 3874359 - RNA, 19 nt, Human
ugccacucacacagccagg

SEQ ID NO: 3874360 - RNA, 21 nt, Human
ugccacucacacagccaggug

SEQ ID NO: 3874361 - RNA, 23 nt, Human
ugccacucacacagccaggugcc

SEQ ID NO: 3874362 - RNA, 20 nt, Human
ugccacucacuaggccccca

SEQ ID NO: 3874363 - RNA, 17 nt, Human
ugccacucauuccugua

SEQ ID NO: 3874364 - RNA, 15 nt, Human
ugccacuccucccuc

SEQ ID NO: 3874365 - RNA, 16 nt, Human
ugccacuccucccucc

SEQ ID NO: 3874366 - RNA, 19 nt, Human
ugccacugacugcagggac

SEQ ID NO: 3874367 - RNA, 19 nt, Human
ugccccagcucuggcuucc

SEQ ID NO: 3874368 - RNA, 15 nt, Human
ugccccagcuugggc

SEQ ID NO: 3874369 - RNA, 18 nt, Human
ugccccaggaccagcuca

SEQ ID NO: 3874370 - RNA, 18 nt, Human
ugccccaucacugcgcca

SEQ ID NO: 3874371 - RNA, 17 nt, Human
ugccccaucccaugcug

SEQ ID NO: 3874372 - RNA, 16 nt, Human
ugccccaucuccccuc

SEQ ID NO: 3874373 - RNA, 19 nt, Human
ugccccaucuccccucagc

SEQ ID NO: 3874374 - RNA, 23 nt, Human
ugccccaugaagccacagcccag

SEQ ID NO: 3874375 - RNA, 16 nt, Human
ugccccauuuauccac

SEQ ID NO: 3874376 - RNA, 22 nt, Human
ugcccccaauaguagucucugu

SEQ ID NO: 3874377 - RNA, 22 nt, Human
ugcccccacaccuggcccuggg

SEQ ID NO: 3874378 - RNA, 22 nt, Human
ugcccccaccccggggacccug

SEQ ID NO: 3874379 - RNA, 16 nt, Human
ugcccccagagccaca

SEQ ID NO: 3874380 - RNA, 17 nt, Human
ugcccccagagccacag

SEQ ID NO: 3874381 - RNA, 18 nt, Human
ugcccccagagccacagu

SEQ ID NO: 3874382 - RNA, 14 nt, Human
ugcccccagcccaa

SEQ ID NO: 3874383 - RNA, 12 nt, Human
ugcccccaggac

SEQ ID NO: 3874384 - RNA, 16 nt, Human
ugcccccaggacuggg

SEQ ID NO: 3874385 - RNA, 14 nt, Human
ugcccccagggcac

SEQ ID NO: 3874386 - RNA, 21 nt, Human
ugcccccaggguccugggagg

SEQ ID NO: 3874387 - RNA, 22 nt, Human
ugcccccaggguccugggagga

SEQ ID NO: 3874388 - RNA, 18 nt, Human
ugcccccauuucugaggu

SEQ ID NO: 3874389 - RNA, 15 nt, Human
ugccccccaccccag

SEQ ID NO: 3874390 - RNA, 12 nt, Human
ugccccccagcc

SEQ ID NO: 3874391 - RNA, 14 nt, Human
ugccccccagccuc

SEQ ID NO: 3874392 - RNA, 20 nt, Human
ugccccccagccucuggcau

SEQ ID NO: 3874393 - RNA, 12 nt, Human
ugccccccaucc

SEQ ID NO: 3874394 - RNA, 14 nt, Human
ugccccccauccug

SEQ ID NO: 3874395 - RNA, 16 nt, Human
ugccccccauccuggc

SEQ ID NO: 3874396 - RNA, 23 nt, Human
ugccccccauccuggcccaucag

SEQ ID NO: 3874397 - RNA, 22 nt, Human
ugccccccucaaaccuccucuu

SEQ ID NO: 3874398 - RNA, 20 nt, Human
ugcccccgcauccccugccu

SEQ ID NO: 3874399 - RNA, 14 nt, Human
ugcccccggccccc

SEQ ID NO: 3874400 - RNA, 18 nt, Human
ugcccccggcccccuggu

SEQ ID NO: 3874401 - RNA, 12 nt, Human
ugcccccuccuc

SEQ ID NO: 3874402 - RNA, 17 nt, Human
ugcccccuccucuccca

SEQ ID NO: 3874403 - RNA, 21 nt, Human
ugcccccuccucucccauccc

SEQ ID NO: 3874404 - RNA, 17 nt, Human
ugcccccucgugccagu

SEQ ID NO: 3874405 - RNA, 18 nt, Human
ugcccccucgugccaguc

SEQ ID NO: 3874406 - RNA, 14 nt, Human
ugcccccucugccc

SEQ ID NO: 3874407 - RNA, 15 nt, Human
ugcccccucugcccu

SEQ ID NO: 3874408 - RNA, 17 nt, Human
ugcccccucugcccugc

SEQ ID NO: 3874409 - RNA, 12 nt, Human
ugcccccugcag

SEQ ID NO: 3874410 - RNA, 22 nt, Human
ugcccccugcagaaccggagag

SEQ ID NO: 3874411 - RNA, 14 nt, Human
ugcccccugcagac

SEQ ID NO: 3874412 - RNA, 18 nt, Human
ugcccccuuucagauguc

SEQ ID NO: 3874413 - RNA, 13 nt, Human
ugccccggagcug

SEQ ID NO: 3874414 - RNA, 18 nt, Human
ugccccggccaccucugc

SEQ ID NO: 3874415 - RNA, 23 nt, Human
ugccccggccccggccccagcca

SEQ ID NO: 3874416 - RNA, 20 nt, Human
ugccccgucuacagcucccc

SEQ ID NO: 3874417 - RNA, 14 nt, Human
ugccccgucucugu

SEQ ID NO: 3874418 - RNA, 17 nt, Human
ugccccgucucuguucc

SEQ ID NO: 3874419 - RNA, 21 nt, Human
ugccccuaaucucuguaggaa

SEQ ID NO: 3874420 - RNA, 17 nt, Human
ugccccuacccuggacu

SEQ ID NO: 3874421 - RNA, 23 nt, Human
ugccccuagcuuagagccucccu

SEQ ID NO: 3874422 - RNA, 12 nt, Human
ugccccuccccc

SEQ ID NO: 3874423 - RNA, 21 nt, Human
ugccccucccccaacccccac

SEQ ID NO: 3874424 - RNA, 22 nt, Human
ugccccucccccaacccccacc

SEQ ID NO: 3874425 - RNA, 15 nt, Human
ugccccucccugcuu

SEQ ID NO: 3874426 - RNA, 17 nt, Human
ugccccucccugcuuca

SEQ ID NO: 3874427 - RNA, 14 nt, Human
ugccccucucacca

SEQ ID NO: 3874428 - RNA, 12 nt, Human
ugccccucucug

SEQ ID NO: 3874429 - RNA, 13 nt, Human
ugccccucucugg

SEQ ID NO: 3874430 - RNA, 21 nt, Human
ugccccucucugggccucaga

SEQ ID NO: 3874431 - RNA, 17 nt, Human
ugccccucuuucucuuu

SEQ ID NO: 3874432 - RNA, 22 nt, Human
ugccccucuuucucuuucuucc

SEQ ID NO: 3874433 - RNA, 23 nt, Human
ugccccugagcaaugucugugcu

SEQ ID NO: 3874434 - RNA, 14 nt, Human
ugccccugcugccu

SEQ ID NO: 3874435 - RNA, 23 nt, Human
ugccccugcugccuccccaaccc

SEQ ID NO: 3874436 - RNA, 14 nt, Human
ugccccuggccuug

SEQ ID NO: 3874437 - RNA, 19 nt, Human
ugccccuggccuugggauc

SEQ ID NO: 3874438 - RNA, 18 nt, Human
ugccccuguucucuucca

SEQ ID NO: 3874439 - RNA, 20 nt, Human
ugccccuuccgccacugggg

SEQ ID NO: 3874440 - RNA, 14 nt, Human
ugccccuucuacac

SEQ ID NO: 3874441 - RNA, 20 nt, Human
ugccccuugacaacuggcag

SEQ ID NO: 3874442 - RNA, 14 nt, Human
ugccccuuucugga

SEQ ID NO: 3874443 - RNA, 16 nt, Human
ugcccgagcuggugca

SEQ ID NO: 3874444 - RNA, 20 nt, Human
ugcccgagcuggugcauuac

SEQ ID NO: 3874445 - RNA, 13 nt, Human
ugcccgcacagca

SEQ ID NO: 3874446 - RNA, 13 nt, Human
ugcccgccaccac

SEQ ID NO: 3874447 - RNA, 15 nt, Human
ugcccgccugcccac

SEQ ID NO: 3874448 - RNA, 13 nt, Human
ugcccgcucccag

SEQ ID NO: 3874449 - RNA, 14 nt, Human
ugcccgcucccagu

SEQ ID NO: 3874450 - RNA, 17 nt, Human
ugcccgcucccaguguc

SEQ ID NO: 3874451 - RNA, 15 nt, Human
ugcccggauucuggg

SEQ ID NO: 3874452 - RNA, 14 nt, Human
ugcccggcugcgga

SEQ ID NO: 3874453 - RNA, 22 nt, Human
ugcccgggcgcggccagccccg

SEQ ID NO: 3874454 - RNA, 21 nt, Human
ugcccggggaaaggcaagguc

SEQ ID NO: 3874455 - RNA, 14 nt, Human
ugcccggggcagca

SEQ ID NO: 3874456 - RNA, 19 nt, Human
ugcccgucucucucccaug

SEQ ID NO: 3874457 - RNA, 13 nt, Human
ugcccgucuucag

SEQ ID NO: 3874458 - RNA, 16 nt, Human
ugcccgucuucagccu

SEQ ID NO: 3874459 - RNA, 18 nt, Human
ugcccgucuucagccuag

SEQ ID NO: 3874460 - RNA, 19 nt, Human
ugcccguguaguccccaac

SEQ ID NO: 3874461 - RNA, 19 nt, Human
ugcccuaaauaacccuuca

SEQ ID NO: 3874462 - RNA, 23 nt, Human
ugcccuaacuguacauuucacag

SEQ ID NO: 3874463 - RNA, 13 nt, Human
ugcccuaagcaga

SEQ ID NO: 3874464 - RNA, 17 nt, Human
ugcccuaagcagaaagu

SEQ ID NO: 3874465 - RNA, 18 nt, Human
ugcccuaagcagaaagug

SEQ ID NO: 3874466 - RNA, 13 nt, Human
ugcccuaauaaaa

SEQ ID NO: 3874467 - RNA, 20 nt, Human
ugcccuaaugcgcaggcugg

SEQ ID NO: 3874468 - RNA, 18 nt, Human
ugcccuacagaggucucu

SEQ ID NO: 3874469 - RNA, 22 nt, Human
ugcccuacuauagcaguuuuua

SEQ ID NO: 3874470 - RNA, 23 nt, Human
ugcccuagagcacacuguagcau

SEQ ID NO: 3874471 - RNA, 16 nt, Human
ugcccuagaugagccc

SEQ ID NO: 3874472 - RNA, 14 nt, Human
ugcccuagcuccac

SEQ ID NO: 3874473 - RNA, 19 nt, Human
ugcccucaagagcaaagua

SEQ ID NO: 3874474 - RNA, 19 nt, Human
ugcccucauuacugggccu

SEQ ID NO: 3874475 - RNA, 21 nt, Human
ugcccuccacagccgcagccu

SEQ ID NO: 3874476 - RNA, 19 nt, Human
ugcccuccacugcccucug

SEQ ID NO: 3874477 - RNA, 14 nt, Human
ugcccuccaucccg

SEQ ID NO: 3874478 - RNA, 20 nt, Human
ugcccuccaucccgacaugg

SEQ ID NO: 3874479 - RNA, 16 nt, Human
ugcccucccuccuucc

SEQ ID NO: 3874480 - RNA, 14 nt, Human
ugcccuccucacuc

SEQ ID NO: 3874481 - RNA, 12 nt, Human
ugcccuccucuc

SEQ ID NO: 3874482 - RNA, 14 nt, Human
ugcccuccucuccc

SEQ ID NO: 3874483 - RNA, 16 nt, Human
ugcccuccucucccau

SEQ ID NO: 3874484 - RNA, 23 nt, Human
ugcccuccugacccauugcuguu

SEQ ID NO: 3874485 - RNA, 14 nt, Human
ugcccuccugugcu

SEQ ID NO: 3874486 - RNA, 21 nt, Human
ugcccuccugugcucagcccu

SEQ ID NO: 3874487 - RNA, 15 nt, Human
ugcccucgcugcuuc

SEQ ID NO: 3874488 - RNA, 20 nt, Human
ugcccucgggcgagucacug

SEQ ID NO: 3874489 - RNA, 23 nt, Human
ugcccucgggcgagucacugccu

SEQ ID NO: 3874490 - RNA, 15 nt, Human
ugcccucguggccag

SEQ ID NO: 3874491 - RNA, 17 nt, Human
ugcccucucccacccuc

SEQ ID NO: 3874492 - RNA, 15 nt, Human
ugcccucuccugggc

SEQ ID NO: 3874493 - RNA, 22 nt, Human
ugcccucuccugggcagcugcc

SEQ ID NO: 3874494 - RNA, 23 nt, Human
ugcccucuccugggcagcugccu

SEQ ID NO: 3874495 - RNA, 21 nt, Human
ugcccucuccuuccuuaccca

SEQ ID NO: 3874496 - RNA, 12 nt, Human
ugcccucugggc

SEQ ID NO: 3874497 - RNA, 12 nt, Human
ugcccucuucau

SEQ ID NO: 3874498 - RNA, 20 nt, Human
ugcccucuucucgugccucc

SEQ ID NO: 3874499 - RNA, 14 nt, Human
ugcccugaccuccc

SEQ ID NO: 3874500 - RNA, 16 nt, Human
ugcccugaccucccag

SEQ ID NO: 3874501 - RNA, 18 nt, Human
ugcccugaccucccagcc

SEQ ID NO: 3874502 - RNA, 20 nt, Human
ugcccugaccucccagcccu

SEQ ID NO: 3874503 - RNA, 15 nt, Human
ugcccugagaagcug

SEQ ID NO: 3874504 - RNA, 14 nt, Human
ugcccugaggaagg

SEQ ID NO: 3874505 - RNA, 17 nt, Human
ugcccugccaccugucu

SEQ ID NO: 3874506 - RNA, 11 nt, Human
ugcccugcccc

SEQ ID NO: 3874507 - RNA, 18 nt, Human
ugcccugcccugccaccu

SEQ ID NO: 3874508 - RNA, 14 nt, Human
ugcccugccugagg

SEQ ID NO: 3874509 - RNA, 19 nt, Human
ugcccugcggccccgucug

SEQ ID NO: 3874510 - RNA, 18 nt, Human
ugcccugcugagucccag

SEQ ID NO: 3874511 - RNA, 16 nt, Human
ugcccugcugcccucc

SEQ ID NO: 3874512 - RNA, 14 nt, Human
uggaaagaguacuc

SEQ ID NO: 3874513 - RNA, 18 nt, Human
uggaaagauaacuaggaa

SEQ ID NO: 3874514 - RNA, 19 nt, Human
uggaaagcagaguuuucau

SEQ ID NO: 3874515 - RNA, 20 nt, Human
uggaaagcaucaccucaggc

SEQ ID NO: 3874516 - RNA, 12 nt, Human
uggaaagccucu

SEQ ID NO: 3874517 - RNA, 20 nt, Human
uggaaagcuccuagcagaga

SEQ ID NO: 3874518 - RNA, 15 nt, Human
uggaaaggagaggaa

SEQ ID NO: 3874519 - RNA, 21 nt, Human
uggaaaggagccuaggccagg

SEQ ID NO: 3874520 - RNA, 13 nt, Human
uggaaaggcagcu

SEQ ID NO: 3874521 - RNA, 17 nt, Human
uggaaaggcucagucuc

SEQ ID NO: 3874522 - RNA, 15 nt, Human
uggaaaggggagagc

SEQ ID NO: 3874523 - RNA, 19 nt, Human
uggaaaggggagagccugc

SEQ ID NO: 3874524 - RNA, 21 nt, Human
uggaaaggggagagccugcug

SEQ ID NO: 3874525 - RNA, 19 nt, Human
uggaaaggggggagcuggg

SEQ ID NO: 3874526 - RNA, 23 nt, Human
uggaaagggugcugcuucccucu

SEQ ID NO: 3874527 - RNA, 21 nt, Human
uggaaagugaauuugaaugaa

SEQ ID NO: 3874528 - RNA, 12 nt, Human
uggaaauaaagu

SEQ ID NO: 3874529 - RNA, 14 nt, Human
uggaaauacacagu

SEQ ID NO: 3874530 - RNA, 17 nt, Human
uggaaauauauauuaua

SEQ ID NO: 3874531 - RNA, 13 nt, Human
uggaaauauuaaa

SEQ ID NO: 3874532 - RNA, 13 nt, Human
uggaaauauuaug

SEQ ID NO: 3874533 - RNA, 23 nt, Human
uggaaauauuaugcaaauuccca

SEQ ID NO: 3874534 - RNA, 23 nt, Human
uggaaauauucaugcuucuuccu

SEQ ID NO: 3874535 - RNA, 19 nt, Human
uggaaauccuaguuuccuc

SEQ ID NO: 3874536 - RNA, 15 nt, Human
uggaaaucuuuaaaa

SEQ ID NO: 3874537 - RNA, 19 nt, Human
uggaaauggaugcaaagua

SEQ ID NO: 3874538 - RNA, 18 nt, Human
uggaaauuaagaagaaac

SEQ ID NO: 3874539 - RNA, 20 nt, Human
uggaaauuaagaagaaacua

SEQ ID NO: 3874540 - RNA, 22 nt, Human
uggaaauuaggauguaaaucug

SEQ ID NO: 3874541 - RNA, 21 nt, Human
uggaaauucaggugaaaaugu

SEQ ID NO: 3874542 - RNA, 17 nt, Human
uggaaauucccuucauc

SEQ ID NO: 3874543 - RNA, 22 nt, Human
uggaaauucccuucaucuggaa

SEQ ID NO: 3874544 - RNA, 19 nt, Human
uggaaauuccuguacugug

SEQ ID NO: 3874545 - RNA, 14 nt, Human
uggaaauuuaaagc

SEQ ID NO: 3874546 - RNA, 16 nt, Human
uggaaauuuaaagcag

SEQ ID NO: 3874547 - RNA, 15 nt, Human
uggaaauuuagcauu

SEQ ID NO: 3874548 - RNA, 17 nt, Human
uggaaauuuagcauugu

SEQ ID NO: 3874549 - RNA, 12 nt, Human
uggaaauuucac

SEQ ID NO: 3874550 - RNA, 14 nt, Human
uggaaauuucacgu

SEQ ID NO: 3874551 - RNA, 18 nt, Human
uggaacaauauuuuaugg

SEQ ID NO: 3874552 - RNA, 21 nt, Human
uggaacaaucuaaaaguuuaa

SEQ ID NO: 3874553 - RNA, 16 nt, Human
uggaacacagaacuga

SEQ ID NO: 3874554 - RNA, 20 nt, Human
uggaacacagaacugaacug

SEQ ID NO: 3874555 - RNA, 16 nt, Human
uggaacagaauguuuu

SEQ ID NO: 3874556 - RNA, 21 nt, Human
uggaacagaauguuuuacugu

SEQ ID NO: 3874557 - RNA, 23 nt, Human
uggaacagauucacacugucugg

SEQ ID NO: 3874558 - RNA, 19 nt, Human
uggaacagugcuacugaaa

SEQ ID NO: 3874559 - RNA, 16 nt, Human
uggaacauacuguuca

SEQ ID NO: 3874560 - RNA, 17 nt, Human
uggaacauacuguucac

SEQ ID NO: 3874561 - RNA, 23 nt, Human
uggaacauccuuugcagggcagc

SEQ ID NO: 3874562 - RNA, 12 nt, Human
uggaaccagacu

SEQ ID NO: 3874563 - RNA, 19 nt, Human
uggaaccagacucuugccu

SEQ ID NO: 3874564 - RNA, 17 nt, Human
uggaacccagacucaga

SEQ ID NO: 3874565 - RNA, 22 nt, Human
uggaacccagacucagacauug

SEQ ID NO: 3874566 - RNA, 22 nt, Human
uggaacccuuuuaaaguugaua

SEQ ID NO: 3874567 - RNA, 18 nt, Human
uggaacccuuuuggcccc

SEQ ID NO: 3874568 - RNA, 17 nt, Human
uggaaccgcaggaagcu

SEQ ID NO: 3874569 - RNA, 13 nt, Human
uggaaccuccuuu

SEQ ID NO: 3874570 - RNA, 18 nt, Human
uggaaccuugcuguccug

SEQ ID NO: 3874571 - RNA, 15 nt, Human
uggaacgcguugaaa

SEQ ID NO: 3874572 - RNA, 17 nt, Human
uggaacgcguugaaauu

SEQ ID NO: 3874573 - RNA, 19 nt, Human
uggaacgcguugaaauugu

SEQ ID NO: 3874574 - RNA, 17 nt, Human
uggaacgcuaaugaaac

SEQ ID NO: 3874575 - RNA, 18 nt, Human
uggaacgcuaaugaaaca

SEQ ID NO: 3874576 - RNA, 17 nt, Human
uggaacuaauaaauaca

SEQ ID NO: 3874577 - RNA, 23 nt, Human
uggaacuacauuaguacacagca

SEQ ID NO: 3874578 - RNA, 18 nt, Human
uggaacuagguuuuaaua

SEQ ID NO: 3874579 - RNA, 16 nt, Human
uggaacucauuccugc

SEQ ID NO: 3874580 - RNA, 23 nt, Human
uggaacucuugacagcuauaauu

SEQ ID NO: 3874581 - RNA, 16 nt, Human
uggaacugaagggggc

SEQ ID NO: 3874582 - RNA, 21 nt, Human
uggaacugaagggggcggccu

SEQ ID NO: 3874583 - RNA, 21 nt, Human
uggaacugcguuaugaagagc

SEQ ID NO: 3874584 - RNA, 17 nt, Human
uggaacugcugccacug

SEQ ID NO: 3874585 - RNA, 23 nt, Human
uggaacugucucucaugaaccuc

SEQ ID NO: 3874586 - RNA, 13 nt, Human
uggaacuucuaau

SEQ ID NO: 3874587 - RNA, 13 nt, Human
uggaacuugaacu

SEQ ID NO: 3874588 - RNA, 16 nt, Human
uggaacuugaacugau

SEQ ID NO: 3874589 - RNA, 22 nt, Human
uggaagaaaaaaaucuucucca

SEQ ID NO: 3874590 - RNA, 20 nt, Human
uggaagaaauuccuguagca

SEQ ID NO: 3874591 - RNA, 13 nt, Human
uggaagaagggag

SEQ ID NO: 3874592 - RNA, 21 nt, Human
uggaagaagggagaagaaagg

SEQ ID NO: 3874593 - RNA, 11 nt, Human
uggaagacaca

SEQ ID NO: 3874594 - RNA, 13 nt, Human
uggaagacagaga

SEQ ID NO: 3874595 - RNA, 20 nt, Human
uggaagacagagaccuccug

SEQ ID NO: 3874596 - RNA, 14 nt, Human
uggaagacagcucu

SEQ ID NO: 3874597 - RNA, 17 nt, Human
uggaagacgcaagggcc

SEQ ID NO: 3874598 - RNA, 13 nt, Human
uggaagagaaauc

SEQ ID NO: 3874599 - RNA, 16 nt, Human
uggaagagaaaucuca

SEQ ID NO: 3874600 - RNA, 12 nt, Human
uggaagagaauc

SEQ ID NO: 3874601 - RNA, 14 nt, Human
uggaagagagaaag

SEQ ID NO: 3874602 - RNA, 16 nt, Human
uggaagagagaaagca

SEQ ID NO: 3874603 - RNA, 16 nt, Human
uggaagagcagcaccu

SEQ ID NO: 3874604 - RNA, 22 nt, Human
uggaagagcagcaccuccucag

SEQ ID NO: 3874605 - RNA, 23 nt, Human
uggaagaggaacagcacugggga

SEQ ID NO: 3874606 - RNA, 16 nt, Human
uggaagagugugugug

SEQ ID NO: 3874607 - RNA, 21 nt, Human
uggaagauccugcgggugggg

SEQ ID NO: 3874608 - RNA, 17 nt, Human
uggaagauccugugagg

SEQ ID NO: 3874609 - RNA, 18 nt, Human
uggaagauccugugagga

SEQ ID NO: 3874610 - RNA, 21 nt, Human
uggaagauggggaccagcagc

SEQ ID NO: 3874611 - RNA, 16 nt, Human
uggaagauuuuaaauu

SEQ ID NO: 3874612 - RNA, 17 nt, Human
uggaagauuuucagucu

SEQ ID NO: 3874613 - RNA, 14 nt, Human
uggaagcaaaguau

SEQ ID NO: 3874614 - RNA, 23 nt, Human
uggaagcacaccaaucuuacuuu

SEQ ID NO: 3874615 - RNA, 17 nt, Human
uggaagcagguuaaaug

SEQ ID NO: 3874616 - RNA, 17 nt, Human
uggaagcagugcccagg

SEQ ID NO: 3874617 - RNA, 17 nt, Human
uggaagcauguaggaga

SEQ ID NO: 3874618 - RNA, 22 nt, Human
uggaagcauguaggagaaucca

SEQ ID NO: 3874619 - RNA, 18 nt, Human
uggaagccagcuuucccu

SEQ ID NO: 3874620 - RNA, 13 nt, Human
uggaagcccuccu

SEQ ID NO: 3874621 - RNA, 15 nt, Human
uggaagcccuccuuc

SEQ ID NO: 3874622 - RNA, 17 nt, Human
uggaagcccuccuucca

SEQ ID NO: 3874623 - RNA, 18 nt, Human
uggaagcuagcuccccuc

SEQ ID NO: 3874624 - RNA, 17 nt, Human
uggaagcuguuuggaaa

SEQ ID NO: 3874625 - RNA, 19 nt, Human
uggaagcuguuuggaaaag

SEQ ID NO: 3874626 - RNA, 23 nt, Human
uggaagcuguuuggaaaagacag

SEQ ID NO: 3874627 - RNA, 20 nt, Human
uggaagcuuguuuuccaguc

SEQ ID NO: 3874628 - RNA, 18 nt, Human
uggaagcuuuguccccug

SEQ ID NO: 3874629 - RNA, 16 nt, Human
uggaagggaggugggc

SEQ ID NO: 3874630 - RNA, 19 nt, Human
uggaaggguucuggcugcc

SEQ ID NO: 3874631 - RNA, 15 nt, Human
uggaaggguuugugg

SEQ ID NO: 3874632 - RNA, 13 nt, Human
uggaagguauuua

SEQ ID NO: 3874633 - RNA, 14 nt, Human
uggaaguaguggag

SEQ ID NO: 3874634 - RNA, 17 nt, Human
uggaaguccaauguggc

SEQ ID NO: 3874635 - RNA, 14 nt, Human
uggaagugaggcau

SEQ ID NO: 3874636 - RNA, 19 nt, Human
uggaaguggggcgggcuuc

SEQ ID NO: 3874637 - RNA, 13 nt, Human
uggaagugugggu

SEQ ID NO: 3874638 - RNA, 21 nt, Human
uggaagugugugaucuguggg

SEQ ID NO: 3874639 - RNA, 18 nt, Human
uggaaguucauaccuaag

SEQ ID NO: 3874640 - RNA, 18 nt, Human
uggaaguuuagcucugag

SEQ ID NO: 3874641 - RNA, 19 nt, Human
uggaaguuuagcucugaga

SEQ ID NO: 3874642 - RNA, 19 nt, Human
uggaaguuuguguucuguu

SEQ ID NO: 3874643 - RNA, 13 nt, Human
uggaaguuuucag

SEQ ID NO: 3874644 - RNA, 15 nt, Human
uggaaguuuucagga

SEQ ID NO: 3874645 - RNA, 18 nt, Human
uggaauaaaaauuccaga

SEQ ID NO: 3874646 - RNA, 13 nt, Human
uggaauaaaauac

SEQ ID NO: 3874647 - RNA, 15 nt, Human
uggaauaaaauacua

SEQ ID NO: 3874648 - RNA, 19 nt, Human
uggaauaaaauacuauuuu

SEQ ID NO: 3874649 - RNA, 17 nt, Human
uggaauaaggagaauga

SEQ ID NO: 3874650 - RNA, 22 nt, Human
uggaauacaguguuauuuucuu

SEQ ID NO: 3874651 - RNA, 14 nt, Human
uggaauacauuucu

SEQ ID NO: 3874652 - RNA, 19 nt, Human
uggaauaguauccuccagg

SEQ ID NO: 3874653 - RNA, 15 nt, Human
uggaauauauaacca

SEQ ID NO: 3874654 - RNA, 16 nt, Human
uggaauauauaaccag

SEQ ID NO: 3874655 - RNA, 13 nt, Human
uggaauauuaaaa

SEQ ID NO: 3874656 - RNA, 20 nt, Human
uggaucacgacgcugcagag

SEQ ID NO: 3874657 - RNA, 16 nt, Human
uggaucagaugaacuc

SEQ ID NO: 3874658 - RNA, 16 nt, Human
uggaucaguccuuuga

SEQ ID NO: 3874659 - RNA, 22 nt, Human
uggauccaauguuagagacuuu

SEQ ID NO: 3874660 - RNA, 23 nt, Human
uggauccaauguuagagacuuuu

SEQ ID NO: 3874661 - RNA, 17 nt, Human
uggauccccagugaaaa

SEQ ID NO: 3874662 - RNA, 19 nt, Human
uggauccccagugaaaacu

SEQ ID NO: 3874663 - RNA, 20 nt, Human
uggauccccagugaaaacua

SEQ ID NO: 3874664 - RNA, 17 nt, Human
uggauccccucugucua

SEQ ID NO: 3874665 - RNA, 23 nt, Human
uggauccccucugucuacaaaua

SEQ ID NO: 3874666 - RNA, 13 nt, Human
uggauccuagccu

SEQ ID NO: 3874667 - RNA, 23 nt, Human
uggauccuagccuuauccucuga

SEQ ID NO: 3874668 - RNA, 20 nt, Human
uggauccugaaauagaggcu

SEQ ID NO: 3874669 - RNA, 18 nt, Human
uggauccuugucaguugu

SEQ ID NO: 3874670 - RNA, 14 nt, Human
uggaucuauuucau

SEQ ID NO: 3874671 - RNA, 15 nt, Human
uggaucuccaaggac

SEQ ID NO: 3874672 - RNA, 16 nt, Human
uggaucucccagggcu

SEQ ID NO: 3874673 - RNA, 14 nt, Human
uggaucucuuaaga

SEQ ID NO: 3874674 - RNA, 23 nt, Human
uggaucucuucuuaauguacaua

SEQ ID NO: 3874675 - RNA, 20 nt, Human
uggaucugggacccuuuccu

SEQ ID NO: 3874676 - RNA, 21 nt, Human
uggaucugggacccuuuccuu

SEQ ID NO: 3874677 - RNA, 18 nt, Human
uggaucuguccaaggaaa

SEQ ID NO: 3874678 - RNA, 15 nt, Human
uggaucuugaaugug

SEQ ID NO: 3874679 - RNA, 21 nt, Human
uggaucuugauguaaggaugg

SEQ ID NO: 3874680 - RNA, 13 nt, Human
uggaugaccagaa

SEQ ID NO: 3874681 - RNA, 16 nt, Human
uggaugauacuaauaa

SEQ ID NO: 3874682 - RNA, 19 nt, Human
uggaugauauaaugcgggu

SEQ ID NO: 3874683 - RNA, 21 nt, Human
uggaugauggucuucagccuc

SEQ ID NO: 3874684 - RNA, 20 nt, Human
uggaugcaaaguacaaugug

SEQ ID NO: 3874685 - RNA, 22 nt, Human
uggaugcagccucacaguccuu

SEQ ID NO: 3874686 - RNA, 20 nt, Human
uggaugcauguuuuccagcu

SEQ ID NO: 3874687 - RNA, 15 nt, Human
uggaugcauuucucu

SEQ ID NO: 3874688 - RNA, 21 nt, Human
uggaugccaauauuaaaucug

SEQ ID NO: 3874689 - RNA, 14 nt, Human
uggaugccucagaa

SEQ ID NO: 3874690 - RNA, 23 nt, Human
uggaugccugguggcagcugcgg

SEQ ID NO: 3874691 - RNA, 23 nt, Human
uggaugcggaacccaaauuacgu

SEQ ID NO: 3874692 - RNA, 16 nt, Human
uggaugcuuagaggga

SEQ ID NO: 3874693 - RNA, 15 nt, Human
uggauggagcccagg

SEQ ID NO: 3874694 - RNA, 14 nt, Human
uggauggccccagc

SEQ ID NO: 3874695 - RNA, 18 nt, Human
uggauggccccagcacag

SEQ ID NO: 3874696 - RNA, 13 nt, Human
uggauggggcagg

SEQ ID NO: 3874697 - RNA, 20 nt, Human
uggauggggcaggccaccug

SEQ ID NO: 3874698 - RNA, 22 nt, Human
uggaugggggaacucagaucca

SEQ ID NO: 3874699 - RNA, 18 nt, Human
uggauggucauugcaguu

SEQ ID NO: 3874700 - RNA, 14 nt, Human
uggaugucuuccuu

SEQ ID NO: 3874701 - RNA, 15 nt, Human
uggauguuacucucu

SEQ ID NO: 3874702 - RNA, 15 nt, Human
uggauuaaacuuaug

SEQ ID NO: 3874703 - RNA, 17 nt, Human
uggauuaaacuuaugaa

SEQ ID NO: 3874704 - RNA, 15 nt, Human
uggauuaaauacaua

SEQ ID NO: 3874705 - RNA, 14 nt, Human
uggauuaaauuagu

SEQ ID NO: 3874706 - RNA, 20 nt, Human
uggauuacugccauucacuu

SEQ ID NO: 3874707 - RNA, 17 nt, Human
uggauuagccuggagca

SEQ ID NO: 3874708 - RNA, 17 nt, Human
uggauuauaaucagaau

SEQ ID NO: 3874709 - RNA, 15 nt, Human
uggauuauuuaauaa

SEQ ID NO: 3874710 - RNA, 18 nt, Human
uggauuauuuaauaacau

SEQ ID NO: 3874711 - RNA, 20 nt, Human
uggauuauuuaauaacauua

SEQ ID NO: 3874712 - RNA, 23 nt, Human
uggauuauuuaauaacauuaccu

SEQ ID NO: 3874713 - RNA, 13 nt, Human
uggauuauuucau

SEQ ID NO: 3874714 - RNA, 23 nt, Human
uggauucagccuucuuuuucugg

SEQ ID NO: 3874715 - RNA, 23 nt, Human
uggauucauucucauaauuccua

SEQ ID NO: 3874716 - RNA, 15 nt, Human
uggauucauuuccug

SEQ ID NO: 3874717 - RNA, 17 nt, Human
uggauucauuuccugcc

SEQ ID NO: 3874718 - RNA, 18 nt, Human
uggauucauuuccugccc

SEQ ID NO: 3874719 - RNA, 19 nt, Human
uggauucauuuccugcccu

SEQ ID NO: 3874720 - RNA, 20 nt, Human
uggauucauuuccugcccuu

SEQ ID NO: 3874721 - RNA, 22 nt, Human
uggauuccccaucucaggccag

SEQ ID NO: 3874722 - RNA, 15 nt, Human
uggauucuaaaaugc

SEQ ID NO: 3874723 - RNA, 15 nt, Human
uggauucuaaauaca

SEQ ID NO: 3874724 - RNA, 13 nt, Human
uggauucucagau

SEQ ID NO: 3874725 - RNA, 16 nt, Human
uggauucucagauauu

SEQ ID NO: 3874726 - RNA, 19 nt, Human
uggauucucagauauuuau

SEQ ID NO: 3874727 - RNA, 14 nt, Human
uggauucugaaucu

SEQ ID NO: 3874728 - RNA, 17 nt, Human
uggauucuuguuuugcu

SEQ ID NO: 3874729 - RNA, 21 nt, Human
uggauuggagauagggaaaga

SEQ ID NO: 3874730 - RNA, 15 nt, Human
uggauuggauuauuu

SEQ ID NO: 3874731 - RNA, 16 nt, Human
uggauuggauuauuua

SEQ ID NO: 3874732 - RNA, 17 nt, Human
uggauuggauuauuuaa

SEQ ID NO: 3874733 - RNA, 20 nt, Human
uggauuggauuauuuaauaa

SEQ ID NO: 3874734 - RNA, 17 nt, Human
uggauugggggggccaa

SEQ ID NO: 3874735 - RNA, 18 nt, Human
uggauuguuaauuucagu

SEQ ID NO: 3874736 - RNA, 18 nt, Human
uggauuuaaaagccugcu

SEQ ID NO: 3874737 - RNA, 20 nt, Human
uggauuuaaaagccugcuca

SEQ ID NO: 3874738 - RNA, 15 nt, Human
uggauuuaacagaaa

SEQ ID NO: 3874739 - RNA, 20 nt, Human
uggauuuaacagaaauguac

SEQ ID NO: 3874740 - RNA, 21 nt, Human
uggauuuauguuguauagauu

SEQ ID NO: 3874741 - RNA, 22 nt, Human
uggauuuccagccaaagccucc

SEQ ID NO: 3874742 - RNA, 21 nt, Human
uggauuuccuaauacugucau

SEQ ID NO: 3874743 - RNA, 16 nt, Human
uggauuuggagagaaa

SEQ ID NO: 3874744 - RNA, 21 nt, Human
uggauuuggagagaaauauuu

SEQ ID NO: 3874745 - RNA, 22 nt, Human
uggauuuggagagaaauauuuu

SEQ ID NO: 3874746 - RNA, 22 nt, Human
uggauuuuccaggacuguuuca

SEQ ID NO: 3874747 - RNA, 20 nt, Human
uggauuuucuauuguuacuc

SEQ ID NO: 3874748 - RNA, 16 nt, Human
uggauuuuuaauuaaa

SEQ ID NO: 3874749 - RNA, 17 nt, Human
uggauuuuuaauuaaaa

SEQ ID NO: 3874750 - RNA, 19 nt, Human
uggauuuuuaauuaaaaac

SEQ ID NO: 3874751 - RNA, 14 nt, Human
uggauuuuuaccag

SEQ ID NO: 3874752 - RNA, 15 nt, Human
uggauuuuucuuuaa

SEQ ID NO: 3874753 - RNA, 18 nt, Human
uggauuuuucuuuaacug

SEQ ID NO: 3874754 - RNA, 20 nt, Human
uggcaaaacucuacuuaauc

SEQ ID NO: 3874755 - RNA, 20 nt, Human
uggcaaaaggaucuuugugg

SEQ ID NO: 3874756 - RNA, 21 nt, Human
uggcaaaauaguucugcaggu

SEQ ID NO: 3874757 - RNA, 16 nt, Human
uggcaaacagggccuc

SEQ ID NO: 3874758 - RNA, 17 nt, Human
uggcaaacgcuaaagag

SEQ ID NO: 3874759 - RNA, 17 nt, Human
uggcaaagaugugggga

SEQ ID NO: 3874760 - RNA, 23 nt, Human
uggcaaauguaacugugccaguu

SEQ ID NO: 3874761 - RNA, 17 nt, Human
uggcaaauuaacuugag

SEQ ID NO: 3874762 - RNA, 18 nt, Human
uggcaacaaacugcacau

SEQ ID NO: 3874763 - RNA, 13 nt, Human
uggcaacagaagc

SEQ ID NO: 3874764 - RNA, 13 nt, Human
uggcaacagaucu

SEQ ID NO: 3874765 - RNA, 17 nt, Human
uggcaacagaucuggaa

SEQ ID NO: 3874766 - RNA, 18 nt, Human
uggcaacagaucuggaac

SEQ ID NO: 3874767 - RNA, 15 nt, Human
uggcaagaaagcugg

SEQ ID NO: 3874768 - RNA, 22 nt, Human
uggcaagagggugacagcuucc

SEQ ID NO: 3874769 - RNA, 19 nt, Human
uggcaagaguguggaggcu

SEQ ID NO: 3874770 - RNA, 21 nt, Human
uggcaagcuagaaccuggagg

SEQ ID NO: 3874771 - RNA, 16 nt, Human
uggcaaggaaaaacag

SEQ ID NO: 3874772 - RNA, 12 nt, Human
uggcaaggaaag

SEQ ID NO: 3874773 - RNA, 21 nt, Human
uggcaaggacuuuguacauuu

SEQ ID NO: 3874774 - RNA, 16 nt, Human
uggcaaggcugugcuc

SEQ ID NO: 3874775 - RNA, 17 nt, Human
uggcaaggguucaccug

SEQ ID NO: 3874776 - RNA, 15 nt, Human
uggcaagucacaugc

SEQ ID NO: 3874777 - RNA, 14 nt, Human
uggcaagugaauuu

SEQ ID NO: 3874778 - RNA, 23 nt, Human
uggcaaguuuugauaugaguaua

SEQ ID NO: 3874779 - RNA, 17 nt, Human
uggcaauaaauuuugaa

SEQ ID NO: 3874780 - RNA, 18 nt, Human
uggcaauagugggcccuc

SEQ ID NO: 3874781 - RNA, 13 nt, Human
uggcaauauagaa

SEQ ID NO: 3874782 - RNA, 19 nt, Human
uggcaaucucagaugcagu

SEQ ID NO: 3874783 - RNA, 15 nt, Human
uggcaaugccacagc

SEQ ID NO: 3874784 - RNA, 21 nt, Human
uggcaaugguaguuucugugg

SEQ ID NO: 3874785 - RNA, 13 nt, Human
uggcaauugucua

SEQ ID NO: 3874786 - RNA, 16 nt, Human
uggcaauuuaacaugu

SEQ ID NO: 3874787 - RNA, 17 nt, Human
uggcacagccugcacuu

SEQ ID NO: 3874788 - RNA, 14 nt, Human
uggcacaggacaug

SEQ ID NO: 3874789 - RNA, 13 nt, Human
uggcacaggacug

SEQ ID NO: 3874790 - RNA, 21 nt, Human
uggcacaggaguguccucuuc

SEQ ID NO: 3874791 - RNA, 16 nt, Human
uggcacaggcccccuu

SEQ ID NO: 3874792 - RNA, 19 nt, Human
uggcacagugucugggcug

SEQ ID NO: 3874793 - RNA, 20 nt, Human
uggcacaguuuucugagaaa

SEQ ID NO: 3874794 - RNA, 14 nt, Human
uggcacaucagaaa

SEQ ID NO: 3874795 - RNA, 15 nt, Human
uggcacaucagaaag

SEQ ID NO: 3874796 - RNA, 19 nt, Human
uggcacauccuaugcaaua

SEQ ID NO: 3874797 - RNA, 17 nt, Human
uggcaccagcagccugg

SEQ ID NO: 3874798 - RNA, 18 nt, Human
uggcaccagcgaagggag

SEQ ID NO: 3874799 - RNA, 20 nt, Human
uggcacccaccguggaggag

SEQ ID NO: 3874800 - RNA, 11 nt, Human
ugguacagaga

SEQ ID NO: 3874801 - RNA, 15 nt, Human
ugguacagagaagcc

SEQ ID NO: 3874802 - RNA, 21 nt, Human
ugguacagagaagccagcuug

SEQ ID NO: 3874803 - RNA, 15 nt, Human
ugguacagguauauu

SEQ ID NO: 3874804 - RNA, 18 nt, Human
ugguacaugguguuugug

SEQ ID NO: 3874805 - RNA, 14 nt, Human
ugguaccagcccug

SEQ ID NO: 3874806 - RNA, 19 nt, Human
ugguaccagcccuggggcu

SEQ ID NO: 3874807 - RNA, 19 nt, Human
ugguacccagccaucugcc

SEQ ID NO: 3874808 - RNA, 20 nt, Human
ugguacccccuucugggcau

SEQ ID NO: 3874809 - RNA, 13 nt, Human
ugguaccuugcac

SEQ ID NO: 3874810 - RNA, 14 nt, Human
ugguaccuugcaca

SEQ ID NO: 3874811 - RNA, 16 nt, Human
ugguaccuugcacaca

SEQ ID NO: 3874812 - RNA, 15 nt, Human
ugguacgugacccuc

SEQ ID NO: 3874813 - RNA, 16 nt, Human
ugguacuaacuuuccu

SEQ ID NO: 3874814 - RNA, 17 nt, Human
ugguacuguacagcugg

SEQ ID NO: 3874815 - RNA, 24 nt, Human
ugguacuuagaguuucuguuugau

SEQ ID NO: 3874816 - RNA, 18 nt, Human
ugguacuuauuacugcua

SEQ ID NO: 3874817 - RNA, 17 nt, Human
ugguacuugcugcuauu

SEQ ID NO: 3874818 - RNA, 21 nt, Human
ugguacuuuuaugauguauau

SEQ ID NO: 3874819 - RNA, 23 nt, Human
ugguacuuuuaugauguauauuu

SEQ ID NO: 3874820 - RNA, 17 nt, Human
ugguagaccaaaauaaa

SEQ ID NO: 3874821 - RNA, 13 nt, Human
ugguagagaugga

SEQ ID NO: 3874822 - RNA, 20 nt, Human
ugguagagugugccugaagu

SEQ ID NO: 3874823 - RNA, 15 nt, Human
ugguagauuaaauau

SEQ ID NO: 3874824 - RNA, 12 nt, Human
ugguagcauuuu

SEQ ID NO: 3874825 - RNA, 19 nt, Human
ugguagcauuuuaaacaaa

SEQ ID NO: 3874826 - RNA, 19 nt, Human
ugguagccaguugaauuua

SEQ ID NO: 3874827 - RNA, 12 nt, Human
ugguagcucagg

SEQ ID NO: 3874828 - RNA, 20 nt, Human
ugguagcugggaaagcauaa

SEQ ID NO: 3874829 - RNA, 13 nt, Human
ugguaggaacugc

SEQ ID NO: 3874830 - RNA, 18 nt, Human
ugguaggccuuuuaacau

SEQ ID NO: 3874831 - RNA, 14 nt, Human
ugguagguacuuuu

SEQ ID NO: 3874832 - RNA, 22 nt, Human
ugguagguacuuuuugugaaga

SEQ ID NO: 3874833 - RNA, 18 nt, Human
ugguagguugggacacca

SEQ ID NO: 3874834 - RNA, 15 nt, Human
ugguaguaaaacaca

SEQ ID NO: 3874835 - RNA, 18 nt, Human
ugguaguuaguagcaugu

SEQ ID NO: 3874836 - RNA, 17 nt, Human
ugguaguugaggaaagc

SEQ ID NO: 3874837 - RNA, 15 nt, Human
ugguaguuucugugg

SEQ ID NO: 3874838 - RNA, 15 nt, Human
ugguaguuuuacagu

SEQ ID NO: 3874839 - RNA, 15 nt, Human
ugguaguuuuuucau

SEQ ID NO: 3874840 - RNA, 16 nt, Human
ugguaguuuuuucauc

SEQ ID NO: 3874841 - RNA, 18 nt, Human
ugguaguuuuuucaucuu

SEQ ID NO: 3874842 - RNA, 22 nt, Human
ugguauagaaaugcugguuuuu

SEQ ID NO: 3874843 - RNA, 14 nt, Human
ugguauauauacau

SEQ ID NO: 3874844 - RNA, 22 nt, Human
ugguauauccaaaagcuuuuua

SEQ ID NO: 3874845 - RNA, 22 nt, Human
ugguauauccuuuucuguguuu

SEQ ID NO: 3874846 - RNA, 15 nt, Human
ugguaucaagaaagu

SEQ ID NO: 3874847 - RNA, 14 nt, Human
ugguaucauauauu

SEQ ID NO: 3874848 - RNA, 20 nt, Human
ugguaucuaauucuuuaaug

SEQ ID NO: 3874849 - RNA, 17 nt, Human
ugguaucuguucuuuaa

SEQ ID NO: 3874850 - RNA, 19 nt, Human
ugguaucuguucuuuaauu

SEQ ID NO: 3874851 - RNA, 22 nt, Human
ugguaucuguucuuuaauuuau

SEQ ID NO: 3874852 - RNA, 22 nt, Human
ugguaugaacuugaggacacau

SEQ ID NO: 3874853 - RNA, 23 nt, Human
ugguaugaacuugaggacacaug

SEQ ID NO: 3874854 - RNA, 22 nt, Human
ugguaugcuugcauauauuuca

SEQ ID NO: 3874855 - RNA, 19 nt, Human
ugguauggaacucucucca

SEQ ID NO: 3874856 - RNA, 16 nt, Human
ugguauggcugcaguc

SEQ ID NO: 3874857 - RNA, 16 nt, Human
ugguauuaauaaaaag

SEQ ID NO: 3874858 - RNA, 14 nt, Human
ugguauuguauuua

SEQ ID NO: 3874859 - RNA, 19 nt, Human
ugguauuguauuuauucaa

SEQ ID NO: 3874860 - RNA, 21 nt, Human
ugguauuuaucuauuguaaga

SEQ ID NO: 3874861 - RNA, 22 nt, Human
ugguauuuucaauagccacuaa

SEQ ID NO: 3874862 - RNA, 22 nt, Human
uggucaaacaaacucucugaac

SEQ ID NO: 3874863 - RNA, 14 nt, Human
uggucaacacuuaa

SEQ ID NO: 3874864 - RNA, 14 nt, Human
uggucaacauuucu

SEQ ID NO: 3874865 - RNA, 14 nt, Human
uggucaaccuccug

SEQ ID NO: 3874866 - RNA, 15 nt, Human
uggucaaucaacacu

SEQ ID NO: 3874867 - RNA, 14 nt, Human
uggucacagccucc

SEQ ID NO: 3874868 - RNA, 15 nt, Human
uggucacagccuccu

SEQ ID NO: 3874869 - RNA, 16 nt, Human
uggucacagccuccuc

SEQ ID NO: 3874870 - RNA, 17 nt, Human
uggucacagccuccucu

SEQ ID NO: 3874871 - RNA, 22 nt, Human
uggucacaggaaguagaggagg

SEQ ID NO: 3874872 - RNA, 18 nt, Human
uggucacaggacucugcc

SEQ ID NO: 3874873 - RNA, 13 nt, Human
uggucacagggca

SEQ ID NO: 3874874 - RNA, 17 nt, Human
uggucacagggcaugcc

SEQ ID NO: 3874875 - RNA, 18 nt, Human
uggucaccaaaucagcug

SEQ ID NO: 3874876 - RNA, 14 nt, Human
uggucaccaugaaa

SEQ ID NO: 3874877 - RNA, 16 nt, Human
uggucaccuaggaagc

SEQ ID NO: 3874878 - RNA, 19 nt, Human
uggucacggauuugugucu

SEQ ID NO: 3874879 - RNA, 20 nt, Human
uggucacguuuggugcuucu

SEQ ID NO: 3874880 - RNA, 22 nt, Human
uggucacuuaaaaugugcagua

SEQ ID NO: 3874881 - RNA, 16 nt, Human
uggucacuucuucugu

SEQ ID NO: 3874882 - RNA, 10 nt, Human
uggucagccc

SEQ ID NO: 3874883 - RNA, 20 nt, Human
uggucagcccuaggauaaaa

SEQ ID NO: 3874884 - RNA, 19 nt, Human
uggucagcccuagggugga

SEQ ID NO: 3874885 - RNA, 18 nt, Human
uggucauuuuauguuaag

SEQ ID NO: 3874886 - RNA, 14 nt, Human
ugguccacagggca

SEQ ID NO: 3874887 - RNA, 15 nt, Human
ugguccacagggcac

SEQ ID NO: 3874888 - RNA, 14 nt, Human
ugguccacuuuucc

SEQ ID NO: 3874889 - RNA, 15 nt, Human
ugguccagcuugcuc

SEQ ID NO: 3874890 - RNA, 12 nt, Human
ugguccaggaga

SEQ ID NO: 3874891 - RNA, 13 nt, Human
ugguccagggcua

SEQ ID NO: 3874892 - RNA, 21 nt, Human
ugguccagggcuagugacuug

SEQ ID NO: 3874893 - RNA, 14 nt, Human
ugguccaugcaggg

SEQ ID NO: 3874894 - RNA, 18 nt, Human
ugguccaugcagggggcu

SEQ ID NO: 3874895 - RNA, 20 nt, Human
ugguccauggaaugcuugaa

SEQ ID NO: 3874896 - RNA, 22 nt, Human
ugguccaugggccauaugaaaa

SEQ ID NO: 3874897 - RNA, 20 nt, Human
uggucccacaucccugggcc

SEQ ID NO: 3874898 - RNA, 23 nt, Human
uggucccacaucccugggccugc

SEQ ID NO: 3874899 - RNA, 13 nt, Human
uggucccacucag

SEQ ID NO: 3874900 - RNA, 14 nt, Human
uggucccccuucca

SEQ ID NO: 3874901 - RNA, 15 nt, Human
uggucccccuuccau

SEQ ID NO: 3874902 - RNA, 18 nt, Human
ugguccccuccuucccaa

SEQ ID NO: 3874903 - RNA, 13 nt, Human
uggucccugggag

SEQ ID NO: 3874904 - RNA, 22 nt, Human
uggucccuguuuucccacgagg

SEQ ID NO: 3874905 - RNA, 16 nt, Human
ugguccggacacuccu

SEQ ID NO: 3874906 - RNA, 14 nt, Human
ugguccuaaguccc

SEQ ID NO: 3874907 - RNA, 21 nt, Human
ugguccuaagucccugccccc

SEQ ID NO: 3874908 - RNA, 17 nt, Human
ugguccuaaucuucuga

SEQ ID NO: 3874909 - RNA, 22 nt, Human
ugguccuagaggcccuuugcug

SEQ ID NO: 3874910 - RNA, 19 nt, Human
ugguccuaggcuggaagga

SEQ ID NO: 3874911 - RNA, 23 nt, Human
ugguccuaggcuggaaggaggaa

SEQ ID NO: 3874912 - RNA, 19 nt, Human
ugguccuauggccucaugu

SEQ ID NO: 3874913 - RNA, 19 nt, Human
ugguccucauucaaaggga

SEQ ID NO: 3874914 - RNA, 22 nt, Human
ugguccugacucaacauguuac

SEQ ID NO: 3874915 - RNA, 12 nt, Human
ugguccugacuu

SEQ ID NO: 3874916 - RNA, 11 nt, Human
ugguccugggg

SEQ ID NO: 3874917 - RNA, 13 nt, Human
ugguccuguagga

SEQ ID NO: 3874918 - RNA, 17 nt, Human
uggucgaggaguaacaa

SEQ ID NO: 3874919 - RNA, 14 nt, Human
uggucgcccaggag

SEQ ID NO: 3874920 - RNA, 13 nt, Human
uggucgcuccugc

SEQ ID NO: 3874921 - RNA, 15 nt, Human
uggucgcuccugccc

SEQ ID NO: 3874922 - RNA, 19 nt, Human
uggucguaaacaucucaga

SEQ ID NO: 3874923 - RNA, 17 nt, Human
uggucuaacacuggcau

SEQ ID NO: 3874924 - RNA, 18 nt, Human
uggucuaagguucagccu

SEQ ID NO: 3874925 - RNA, 19 nt, Human
uggucuaucuuugagcgcc

SEQ ID NO: 3874926 - RNA, 14 nt, Human
uggucuauguuccg

SEQ ID NO: 3874927 - RNA, 17 nt, Human
uggucucacccuggagg

SEQ ID NO: 3874928 - RNA, 19 nt, Human
uggucucagcagcgaccac

SEQ ID NO: 3874929 - RNA, 13 nt, Human
uggucucaggaua

SEQ ID NO: 3874930 - RNA, 23 nt, Human
uggucucaggauauccuuaucag

SEQ ID NO: 3874931 - RNA, 14 nt, Human
uggucuccugcccc

SEQ ID NO: 3874932 - RNA, 22 nt, Human
uggucuccuuggaaauccgucu

SEQ ID NO: 3874933 - RNA, 19 nt, Human
uggucucgaacuccugacc

SEQ ID NO: 3874934 - RNA, 21 nt, Human
uggucucgaacuccugaccuu

SEQ ID NO: 3874935 - RNA, 21 nt, Human
uggucucucuaugccucucua

SEQ ID NO: 3874936 - RNA, 13 nt, Human
uggucugaauguu

SEQ ID NO: 3874937 - RNA, 18 nt, Human
uggucugaauguucugac

SEQ ID NO: 3874938 - RNA, 17 nt, Human
uggucugacccacugcu

SEQ ID NO: 3874939 - RNA, 16 nt, Human
uggucugauuucagga

SEQ ID NO: 3874940 - RNA, 15 nt, Human
uggucugcaggcagg

SEQ ID NO: 3874941 - RNA, 18 nt, Human
uggucugcccucugcauc

SEQ ID NO: 3874942 - RNA, 16 nt, Human
uggucugggacucucu

SEQ ID NO: 3874943 - RNA, 16 nt, Human
uggucugggacuuccu

SEQ ID NO: 3874944 - RNA, 19 nt, Human
uggucugggacuuccuugc

SEQ ID NO: 3874945 - RNA, 13 nt, Human
uguaaaacaaaaa

SEQ ID NO: 3874946 - RNA, 16 nt, Human
uguaaaacaaaaaaca

SEQ ID NO: 3874947 - RNA, 14 nt, Human
uguaaaacaaaauu

SEQ ID NO: 3874948 - RNA, 14 nt, Human
uguaaaacagguag

SEQ ID NO: 3874949 - RNA, 19 nt, Human
uguaaaacauuuauuuuga

SEQ ID NO: 3874950 - RNA, 16 nt, Human
uguaaaaccugucaau

SEQ ID NO: 3874951 - RNA, 22 nt, Human
uguaaaacgagaauccacccau

SEQ ID NO: 3874952 - RNA, 15 nt, Human
uguaaaacugaggca

SEQ ID NO: 3874953 - RNA, 12 nt, Human
uguaaaacuuua

SEQ ID NO: 3874954 - RNA, 16 nt, Human
uguaaaacuuuauuuu

SEQ ID NO: 3874955 - RNA, 18 nt, Human
uguaaaagauuaaacugc

SEQ ID NO: 3874956 - RNA, 18 nt, Human
uguaaaagcaacaucagc

SEQ ID NO: 3874957 - RNA, 19 nt, Human
uguaaaagcaacaucagcu

SEQ ID NO: 3874958 - RNA, 21 nt, Human
uguaaaaggccaaaccucugu

SEQ ID NO: 3874959 - RNA, 23 nt, Human
uguaaaaggccaaaccucuguuc

SEQ ID NO: 3874960 - RNA, 12 nt, Human
uguaaaauaauu

SEQ ID NO: 3874961 - RNA, 14 nt, Human
uguaaaauagcuug

SEQ ID NO: 3874962 - RNA, 20 nt, Human
uguaaaauagcuuguauagu

SEQ ID NO: 3874963 - RNA, 21 nt, Human
uguaaaaucuuggcacagaaa

SEQ ID NO: 3874964 - RNA, 22 nt, Human
uguaaaaucuuggcacagaaac

SEQ ID NO: 3874965 - RNA, 15 nt, Human
uguaaaaucuuguca

SEQ ID NO: 3874966 - RNA, 20 nt, Human
uguaaaaucuugucaugugu

SEQ ID NO: 3874967 - RNA, 13 nt, Human
uguaaaaucuuuc

SEQ ID NO: 3874968 - RNA, 15 nt, Human
uguaaaaugaaauua

SEQ ID NO: 3874969 - RNA, 12 nt, Human
uguaaaaugaca

SEQ ID NO: 3874970 - RNA, 21 nt, Human
uguaaaaugacaaucaugugu

SEQ ID NO: 3874971 - RNA, 14 nt, Human
uguaaaauguauua

SEQ ID NO: 3874972 - RNA, 17 nt, Human
uguaaaauguugaauaa

SEQ ID NO: 3874973 - RNA, 20 nt, Human
uguaaaauuuugccuaauac

SEQ ID NO: 3874974 - RNA, 14 nt, Human
uguaaacaaacucu

SEQ ID NO: 3874975 - RNA, 13 nt, Human
uguaaacacaucu

SEQ ID NO: 3874976 - RNA, 18 nt, Human
uguaaacacucagcuguu

SEQ ID NO: 3874977 - RNA, 14 nt, Human
uguaaacauguguu

SEQ ID NO: 3874978 - RNA, 11 nt, Human
uguaaacauuu

SEQ ID NO: 3874979 - RNA, 14 nt, Human
uguaaaccgcuuug

SEQ ID NO: 3874980 - RNA, 15 nt, Human
uguaaacucaaaaua

SEQ ID NO: 3874981 - RNA, 23 nt, Human
uguaaacucaaaauauuuguaca

SEQ ID NO: 3874982 - RNA, 12 nt, Human
uguaaacugcca

SEQ ID NO: 3874983 - RNA, 21 nt, Human
uguaaacuguacuagucugug

SEQ ID NO: 3874984 - RNA, 13 nt, Human
uguaaacugugua

SEQ ID NO: 3874985 - RNA, 18 nt, Human
uguaaacuguguauucca

SEQ ID NO: 3874986 - RNA, 22 nt, Human
uguaaagaaagagagaaaauaa

SEQ ID NO: 3874987 - RNA, 22 nt, Human
uguaaagagaccuaccucaggu

SEQ ID NO: 3874988 - RNA, 18 nt, Human
uguaaagauuucuguuca

SEQ ID NO: 3874989 - RNA, 12 nt, Human
uguaaagcuaaa

SEQ ID NO: 3874990 - RNA, 16 nt, Human
uguaaagcuaaaauaa

SEQ ID NO: 3874991 - RNA, 17 nt, Human
uguaaagcuaaaauaaa

SEQ ID NO: 3874992 - RNA, 21 nt, Human
uguaaagcuaaaauaaagaaa

SEQ ID NO: 3874993 - RNA, 16 nt, Human
uguaaaggagucaaaa

SEQ ID NO: 3874994 - RNA, 19 nt, Human
uguaaaggagucaaaacua

SEQ ID NO: 3874995 - RNA, 16 nt, Human
uguaaaggucacuuuu

SEQ ID NO: 3874996 - RNA, 15 nt, Human
uguaaaguccccaga

SEQ ID NO: 3874997 - RNA, 19 nt, Human
uguaaagugaagaauccuu

SEQ ID NO: 3874998 - RNA, 14 nt, Human
uguaaaguuagucu

SEQ ID NO: 3874999 - RNA, 19 nt, Human
uguaaaguugguuggauaa

SEQ ID NO: 3875000 - RNA, 14 nt, Human
uguaaauaaagccc

SEQ ID NO: 3875001 - RNA, 23 nt, Human
uguaaauaauucuuuuuuauuaa

SEQ ID NO: 3875002 - RNA, 15 nt, Human
uguaaauaauuuauu

SEQ ID NO: 3875003 - RNA, 18 nt, Human
uguaaauacaauuuuguu

SEQ ID NO: 3875004 - RNA, 21 nt, Human
uguaaauacacauagcaugua

SEQ ID NO: 3875005 - RNA, 12 nt, Human
uguaaauacaua

SEQ ID NO: 3875006 - RNA, 20 nt, Human
uguaaauaccagacugcagg

SEQ ID NO: 3875007 - RNA, 19 nt, Human
uguaaauaccaggauuuuu

SEQ ID NO: 3875008 - RNA, 19 nt, Human
uguaaauaccauugacaca

SEQ ID NO: 3875009 - RNA, 20 nt, Human
uguaaauaccauugacacau

SEQ ID NO: 3875010 - RNA, 21 nt, Human
uguaaauacuguuuuuaacaa

SEQ ID NO: 3875011 - RNA, 18 nt, Human
uguaaauaggauuuuuag

SEQ ID NO: 3875012 - RNA, 13 nt, Human
uguaaauagguuu

SEQ ID NO: 3875013 - RNA, 16 nt, Human
uguaaauaguauuuga

SEQ ID NO: 3875014 - RNA, 12 nt, Human
uguaaauauaaa

SEQ ID NO: 3875015 - RNA, 14 nt, Human
uguaaauauaaaga

SEQ ID NO: 3875016 - RNA, 15 nt, Human
uguaaauauauaaau

SEQ ID NO: 3875017 - RNA, 19 nt, Human
uguaaauauauaaauauau

SEQ ID NO: 3875018 - RNA, 21 nt, Human
uguaaauauauaaauauauau

SEQ ID NO: 3875019 - RNA, 22 nt, Human
uguaaauauguuuuuuagauca

SEQ ID NO: 3875020 - RNA, 14 nt, Human
uguaaauauucuau

SEQ ID NO: 3875021 - RNA, 12 nt, Human
uguaaauauuua

SEQ ID NO: 3875022 - RNA, 18 nt, Human
uguaaauauuuuaaagaa

SEQ ID NO: 3875023 - RNA, 22 nt, Human
uguaaauauuuuaaagaauugu

SEQ ID NO: 3875024 - RNA, 21 nt, Human
uguaaaucauguugaucaugu

SEQ ID NO: 3875025 - RNA, 13 nt, Human
uguaaaucccauu

SEQ ID NO: 3875026 - RNA, 18 nt, Human
uguaaaucccauuauuca

SEQ ID NO: 3875027 - RNA, 20 nt, Human
uguaaaucccauuauucaaa

SEQ ID NO: 3875028 - RNA, 20 nt, Human
uguaaauccuuuuucuuuau

SEQ ID NO: 3875029 - RNA, 22 nt, Human
uguaaauccuuuuucuuuauaa

SEQ ID NO: 3875030 - RNA, 19 nt, Human
uguaaaucuaacauuauua

SEQ ID NO: 3875031 - RNA, 13 nt, Human
uguaaaucugcuc

SEQ ID NO: 3875032 - RNA, 21 nt, Human
uguaaaugaaguaacuugucu

SEQ ID NO: 3875033 - RNA, 18 nt, Human
uguaaaugcaucuguccu

SEQ ID NO: 3875034 - RNA, 15 nt, Human
uguaaaugguguaca

SEQ ID NO: 3875035 - RNA, 16 nt, Human
uguaaaugguguacau

SEQ ID NO: 3875036 - RNA, 11 nt, Human
uguaaauguau

SEQ ID NO: 3875037 - RNA, 15 nt, Human
uguaaauguguacau

SEQ ID NO: 3875038 - RNA, 22 nt, Human
uguaaauguguuggacaaaugu

SEQ ID NO: 3875039 - RNA, 19 nt, Human
uguaaauguuaguuucuug

SEQ ID NO: 3875040 - RNA, 17 nt, Human
uguaaauguuauuucug

SEQ ID NO: 3875041 - RNA, 19 nt, Human
uguaaauguuauuucugca

SEQ ID NO: 3875042 - RNA, 15 nt, Human
uguaaauuaacuuuu

SEQ ID NO: 3875043 - RNA, 20 nt, Human
uguaaauuaccaguaaagug

SEQ ID NO: 3875044 - RNA, 16 nt, Human
uguaaauuauguaaug

SEQ ID NO: 3875045 - RNA, 19 nt, Human
uguaaauucugauuucuuu

SEQ ID NO: 3875046 - RNA, 17 nt, Human
uguaaauugaaucagua

SEQ ID NO: 3875047 - RNA, 14 nt, Human
uguaaauuuagugu

SEQ ID NO: 3875048 - RNA, 18 nt, Human
uguaaauuuggcuucugu

SEQ ID NO: 3875049 - RNA, 21 nt, Human
uguaaauuuggcuucuguugu

SEQ ID NO: 3875050 - RNA, 15 nt, Human
uguaacaagaaaaca

SEQ ID NO: 3875051 - RNA, 13 nt, Human
uguaacaagaaag

SEQ ID NO: 3875052 - RNA, 15 nt, Human
uguaacaagaaagga

SEQ ID NO: 3875053 - RNA, 14 nt, Human
uguaacaagccacc

SEQ ID NO: 3875054 - RNA, 15 nt, Human
uguaacaauugugua

SEQ ID NO: 3875055 - RNA, 20 nt, Human
uguaacaauuguguagccuu

SEQ ID NO: 3875056 - RNA, 20 nt, Human
uguaacacagcugagagacu

SEQ ID NO: 3875057 - RNA, 16 nt, Human
uguaacacuccucugc

SEQ ID NO: 3875058 - RNA, 20 nt, Human
uguaacacuuuacaauguuc

SEQ ID NO: 3875059 - RNA, 22 nt, Human
uguaacagcuccuugggaggaa

SEQ ID NO: 3875060 - RNA, 21 nt, Human
uguaacaggucuccucuuaaa

SEQ ID NO: 3875061 - RNA, 14 nt, Human
uguaacagucugau

SEQ ID NO: 3875062 - RNA, 16 nt, Human
uguaacauaugcaaac

SEQ ID NO: 3875063 - RNA, 22 nt, Human
uguaacaucacuauccaugcac

SEQ ID NO: 3875064 - RNA, 17 nt, Human
uguaaccacaacuuuca

SEQ ID NO: 3875065 - RNA, 19 nt, Human
uguaaccauuuuauaaagu

SEQ ID NO: 3875066 - RNA, 14 nt, Human
uguaaccucagcuc

SEQ ID NO: 3875067 - RNA, 23 nt, Human
uguaaccuguugcuguguuuaau

SEQ ID NO: 3875068 - RNA, 18 nt, Human
uguaacgguuaacuguaa

SEQ ID NO: 3875069 - RNA, 18 nt, Human
uguaacgugugcuguguu

SEQ ID NO: 3875070 - RNA, 16 nt, Human
uguaacguugcugugg

SEQ ID NO: 3875071 - RNA, 17 nt, Human
uguaacguugcuguggg

SEQ ID NO: 3875072 - RNA, 20 nt, Human
uguaacguugcugugggaac

SEQ ID NO: 3875073 - RNA, 22 nt, Human
uguaacguuuucuuucacacac

SEQ ID NO: 3875074 - RNA, 23 nt, Human
uguaacuaaaauaauuuuguaau

SEQ ID NO: 3875075 - RNA, 18 nt, Human
uguaacuaggcucagaga

SEQ ID NO: 3875076 - RNA, 21 nt, Human
uguaacuauaguccagcuuug

SEQ ID NO: 3875077 - RNA, 18 nt, Human
uguaacucuaaaagaucc

SEQ ID NO: 3875078 - RNA, 13 nt, Human
uguaacugccagg

SEQ ID NO: 3875079 - RNA, 13 nt, Human
uguaacugcccaa

SEQ ID NO: 3875080 - RNA, 15 nt, Human
uguaacuguuacagu

SEQ ID NO: 3875081 - RNA, 14 nt, Human
uguaacuguuacca

SEQ ID NO: 3875082 - RNA, 17 nt, Human
uguaacuguuaccauug

SEQ ID NO: 3875083 - RNA, 16 nt, Human
uguaacuuauauugaa

SEQ ID NO: 3875084 - RNA, 20 nt, Human
uguaacuuauauugaagaca

SEQ ID NO: 3875085 - RNA, 23 nt, Human
uguaacuuauauugaagacaauu

SEQ ID NO: 3875086 - RNA, 22 nt, Human
uguaacuuauguagauauuugg

SEQ ID NO: 3875087 - RNA, 23 nt, Human
uguaacuuauguagauauuuggc

SEQ ID NO: 3875088 - RNA, 20 nt, Human
uguaacuuccaaauaaauaa

SEQ ID NO: 3875089 - RNA, 22 nt, Human
uguaacuugauccauuucuaau

SEQ ID NO: 3875090 - RNA, 12 nt, Human
uguagaugaugu

SEQ ID NO: 3875091 - RNA, 14 nt, Human
uguagauugauugu

SEQ ID NO: 3875092 - RNA, 18 nt, Human
uguagauugauuguauug

SEQ ID NO: 3875093 - RNA, 22 nt, Human
uguagauuuaguguaauaagac

SEQ ID NO: 3875094 - RNA, 18 nt, Human
uguagauuuuauagugug

SEQ ID NO: 3875095 - RNA, 19 nt, Human
uguagcaaacccugucaaa

SEQ ID NO: 3875096 - RNA, 21 nt, Human
uguagcaaacccugucaaaca

SEQ ID NO: 3875097 - RNA, 20 nt, Human
uguagcaaccuucugcauuc

SEQ ID NO: 3875098 - RNA, 17 nt, Human
uguagcaaucagauuuu

SEQ ID NO: 3875099 - RNA, 13 nt, Human
uguagcagaaagg

SEQ ID NO: 3875100 - RNA, 23 nt, Human
uguagcagugagaaaaagcuccu

SEQ ID NO: 3875101 - RNA, 22 nt, Human
uguagcagugagucauaucuua

SEQ ID NO: 3875102 - RNA, 12 nt, Human
uguagcauacug

SEQ ID NO: 3875103 - RNA, 15 nt, Human
uguagcauauaggug

SEQ ID NO: 3875104 - RNA, 14 nt, Human
uguagcauccugga

SEQ ID NO: 3875105 - RNA, 16 nt, Human
uguagcaucuucugga

SEQ ID NO: 3875106 - RNA, 18 nt, Human
uguagcauuucuugaugu

SEQ ID NO: 3875107 - RNA, 14 nt, Human
uguagccagccggg

SEQ ID NO: 3875108 - RNA, 21 nt, Human
uguagccaggucccccugcag

SEQ ID NO: 3875109 - RNA, 15 nt, Human
uguagccaugggacc

SEQ ID NO: 3875110 - RNA, 17 nt, Human
uguagccccaagaaggc

SEQ ID NO: 3875111 - RNA, 21 nt, Human
uguagccccaagaaggcuggg

SEQ ID NO: 3875112 - RNA, 16 nt, Human
uguagcccccuggccu

SEQ ID NO: 3875113 - RNA, 18 nt, Human
uguagcccccuggccucu

SEQ ID NO: 3875114 - RNA, 19 nt, Human
uguagcccuuuccaagcuu

SEQ ID NO: 3875115 - RNA, 15 nt, Human
uguagccucagauga

SEQ ID NO: 3875116 - RNA, 14 nt, Human
uguagccugugcau

SEQ ID NO: 3875117 - RNA, 20 nt, Human
uguagccugugcauguaugu

SEQ ID NO: 3875118 - RNA, 21 nt, Human
uguagccuuccuccacauccu

SEQ ID NO: 3875119 - RNA, 17 nt, Human
uguagccuugcccggau

SEQ ID NO: 3875120 - RNA, 14 nt, Human
uguagcuacagaga

SEQ ID NO: 3875121 - RNA, 16 nt, Human
uguagcuacagagaaa

SEQ ID NO: 3875122 - RNA, 17 nt, Human
uguagcuacagagaaac

SEQ ID NO: 3875123 - RNA, 18 nt, Human
uguagcuacagagaaacc

SEQ ID NO: 3875124 - RNA, 22 nt, Human
uguagcuacagagaaaccagcu

SEQ ID NO: 3875125 - RNA, 12 nt, Human
uguagcuguaaa

SEQ ID NO: 3875126 - RNA, 14 nt, Human
uguagcuguaaaac

SEQ ID NO: 3875127 - RNA, 17 nt, Human
uguagcuguaaaacgcu

SEQ ID NO: 3875128 - RNA, 18 nt, Human
uguagcuguaaaacgcug

SEQ ID NO: 3875129 - RNA, 13 nt, Human
uguagcugugacc

SEQ ID NO: 3875130 - RNA, 23 nt, Human
uguagcugugaccugcugagcuc

SEQ ID NO: 3875131 - RNA, 18 nt, Human
uguagcuucagucauuaa

SEQ ID NO: 3875132 - RNA, 18 nt, Human
uguaggaagguacuguau

SEQ ID NO: 3875133 - RNA, 19 nt, Human
uguaggaagguacuguaug

SEQ ID NO: 3875134 - RNA, 20 nt, Human
uguaggaagguacuguauga

SEQ ID NO: 3875135 - RNA, 20 nt, Human
uguaggaaggucucauucuu

SEQ ID NO: 3875136 - RNA, 18 nt, Human
uguaggaagguuaauguu

SEQ ID NO: 3875137 - RNA, 23 nt, Human
uguaggaauucuuuuggggaagu

SEQ ID NO: 3875138 - RNA, 20 nt, Human
uguaggagagguugucugug

SEQ ID NO: 3875139 - RNA, 17 nt, Human
uguaggagcugagguuu

SEQ ID NO: 3875140 - RNA, 12 nt, Human
uguaggagcugc

SEQ ID NO: 3875141 - RNA, 19 nt, Human
uguaggagggacugucgcu

SEQ ID NO: 3875142 - RNA, 11 nt, Human
uguaggcagac

SEQ ID NO: 3875143 - RNA, 13 nt, Human
uguaggcagacac

SEQ ID NO: 3875144 - RNA, 16 nt, Human
uguaggcagacacagg

SEQ ID NO: 3875145 - RNA, 20 nt, Human
uguaggcauaaagucagggg

SEQ ID NO: 3875146 - RNA, 13 nt, Human
uguagggagggcg

SEQ ID NO: 3875147 - RNA, 19 nt, Human
uguaggggacgagaaagau

SEQ ID NO: 3875148 - RNA, 23 nt, Human
uguaggggaggggcuccuuucca

SEQ ID NO: 3875149 - RNA, 19 nt, Human
uguagguaaaauguauuuu

SEQ ID NO: 3875150 - RNA, 15 nt, Human
uguagguaucauuuu

SEQ ID NO: 3875151 - RNA, 14 nt, Human
uguagguccucaga

SEQ ID NO: 3875152 - RNA, 20 nt, Human
uguaggugucugcacccagg

SEQ ID NO: 3875153 - RNA, 20 nt, Human
uguagguugcacacuuuggu

SEQ ID NO: 3875154 - RNA, 19 nt, Human
uguaguaaacuauuuaucu

SEQ ID NO: 3875155 - RNA, 13 nt, Human
uguaguaaagaaa

SEQ ID NO: 3875156 - RNA, 15 nt, Human
uguaguaaagaaauu

SEQ ID NO: 3875157 - RNA, 20 nt, Human
uguaguaaagccguuguuua

SEQ ID NO: 3875158 - RNA, 18 nt, Human
uguaguaaauaaugcuuu

SEQ ID NO: 3875159 - RNA, 15 nt, Human
uguaguaauugacau

SEQ ID NO: 3875160 - RNA, 16 nt, Human
uguaguaauugacaug

SEQ ID NO: 3875161 - RNA, 18 nt, Human
uguaguaauugacaugug

SEQ ID NO: 3875162 - RNA, 18 nt, Human
uguaguagcccuuucugu

SEQ ID NO: 3875163 - RNA, 16 nt, Human
uguaguagcguuuuuu

SEQ ID NO: 3875164 - RNA, 23 nt, Human
uguaguagcguuuuuuaaaugua

SEQ ID NO: 3875165 - RNA, 20 nt, Human
uguaguaggcauuuuuacca

SEQ ID NO: 3875166 - RNA, 15 nt, Human
uguaguauaaagaaa

SEQ ID NO: 3875167 - RNA, 23 nt, Human
uguaguaucaaauauuagaugug

SEQ ID NO: 3875168 - RNA, 14 nt, Human
uguaguaucucaua

SEQ ID NO: 3875169 - RNA, 18 nt, Human
uguaguauuuuuuguaua

SEQ ID NO: 3875170 - RNA, 19 nt, Human
uguaguauuuuuuguauaa

SEQ ID NO: 3875171 - RNA, 20 nt, Human
uguagucauuuacuaaacau

SEQ ID NO: 3875172 - RNA, 22 nt, Human
uguaguccgugcugacagcugc

SEQ ID NO: 3875173 - RNA, 23 nt, Human
uguaguccuagccacucaggagg

SEQ ID NO: 3875174 - RNA, 20 nt, Human
uguaguccuagcuacucagg

SEQ ID NO: 3875175 - RNA, 17 nt, Human
uguaguccucauaaaaa

SEQ ID NO: 3875176 - RNA, 21 nt, Human
uguaguccucauaaaaagcaa

SEQ ID NO: 3875177 - RNA, 17 nt, Human
uguagugccgcucuugg

SEQ ID NO: 3875178 - RNA, 22 nt, Human
uguaguguuggagaagaacuga

SEQ ID NO: 3875179 - RNA, 13 nt, Human
uguaguuaggaaa

SEQ ID NO: 3875180 - RNA, 13 nt, Human
uguaguucuaaga

SEQ ID NO: 3875181 - RNA, 15 nt, Human
uguaguucuuuaaac

SEQ ID NO: 3875182 - RNA, 17 nt, Human
uguaguucuuuaaacug

SEQ ID NO: 3875183 - RNA, 20 nt, Human
uguaguugaacugauaguua

SEQ ID NO: 3875184 - RNA, 22 nt, Human
uguaguugcaauagaacagaga

SEQ ID NO: 3875185 - RNA, 20 nt, Human
uguaguuuuaucacauguau

SEQ ID NO: 3875186 - RNA, 23 nt, Human
uguaguuuuauuuuauguuuaga

SEQ ID NO: 3875187 - RNA, 19 nt, Human
uguaguuuuuauauguugu

SEQ ID NO: 3875188 - RNA, 17 nt, Human
uguauaaaaaaaauagu

SEQ ID NO: 3875189 - RNA, 14 nt, Human
uguauaaaaauaaa

SEQ ID NO: 3875190 - RNA, 13 nt, Human
uguauaaaaauag

SEQ ID NO: 3875191 - RNA, 22 nt, Human
uguauaaaagggacugagaaau

SEQ ID NO: 3875192 - RNA, 14 nt, Human
uguauaaaauaauu

SEQ ID NO: 3875193 - RNA, 13 nt, Human
uguauaaaauaca

SEQ ID NO: 3875194 - RNA, 22 nt, Human
uguauaaaauacauagugaaaa

SEQ ID NO: 3875195 - RNA, 17 nt, Human
uguauaaacaagaaaaa

SEQ ID NO: 3875196 - RNA, 23 nt, Human
uguauaaacaagaaaaauaaaga

SEQ ID NO: 3875197 - RNA, 13 nt, Human
uguauaaagaaca

SEQ ID NO: 3875198 - RNA, 14 nt, Human
uguauaaauaggag

SEQ ID NO: 3875199 - RNA, 13 nt, Human
uguauaaauauac

SEQ ID NO: 3875200 - RNA, 14 nt, Human
uguauaaauauaca

SEQ ID NO: 3875201 - RNA, 19 nt, Human
uguauaaaugucuuuaaug

SEQ ID NO: 3875202 - RNA, 15 nt, Human
uguauaacagguuau

SEQ ID NO: 3875203 - RNA, 17 nt, Human
uguauaacagguuauuu

SEQ ID NO: 3875204 - RNA, 18 nt, Human
uguauaacccuguuacaa

SEQ ID NO: 3875205 - RNA, 16 nt, Human
uguauaacuaggagcu

SEQ ID NO: 3875206 - RNA, 21 nt, Human
uguauaacuucuuaaaaguug

SEQ ID NO: 3875207 - RNA, 14 nt, Human
uguauaaguaagaa

SEQ ID NO: 3875208 - RNA, 20 nt, Human
uguauaaguaagaaaauauu

SEQ ID NO: 3875209 - RNA, 16 nt, Human
uguauaagugcacaca

SEQ ID NO: 3875210 - RNA, 22 nt, Human
uguauaagugcacacagaaaua

SEQ ID NO: 3875211 - RNA, 23 nt, Human
uguauaagugcacacagaaauau

SEQ ID NO: 3875212 - RNA, 16 nt, Human
uguauaaguggaggca

SEQ ID NO: 3875213 - RNA, 21 nt, Human
uguauaaguggaggcacuuua

SEQ ID NO: 3875214 - RNA, 13 nt, Human
uguauaaguuauu

SEQ ID NO: 3875215 - RNA, 22 nt, Human
uguauaauacuuuguauacaag

SEQ ID NO: 3875216 - RNA, 16 nt, Human
uguauaauauaaaaaa

SEQ ID NO: 3875217 - RNA, 14 nt, Human
uguauaauuggauu

SEQ ID NO: 3875218 - RNA, 18 nt, Human
uguauaauuggauuuccu

SEQ ID NO: 3875219 - RNA, 19 nt, Human
uguauaauuggauuuccua

SEQ ID NO: 3875220 - RNA, 15 nt, Human
uguauaauuguaucg

SEQ ID NO: 3875221 - RNA, 13 nt, Human
uguauaauuucga

SEQ ID NO: 3875222 - RNA, 16 nt, Human
uguauacaaauauauu

SEQ ID NO: 3875223 - RNA, 22 nt, Human
uguauacaaauauauuguuaau

SEQ ID NO: 3875224 - RNA, 16 nt, Human
uguauacagugcagag

SEQ ID NO: 3875225 - RNA, 22 nt, Human
uguauacagugcagagccuucu

SEQ ID NO: 3875226 - RNA, 15 nt, Human
uguauacauccuggg

SEQ ID NO: 3875227 - RNA, 17 nt, Human
uguauacauccugggua

SEQ ID NO: 3875228 - RNA, 19 nt, Human
uguauacguuucaaaaaca

SEQ ID NO: 3875229 - RNA, 15 nt, Human
uguauacugccacua

SEQ ID NO: 3875230 - RNA, 11 nt, Human
uguauacuuua

SEQ ID NO: 3875231 - RNA, 14 nt, Human
uguauacuuuagua

SEQ ID NO: 3875232 - RNA, 15 nt, Human
uguauacuuuaguau

SEQ ID NO: 3875233 - RNA, 17 nt, Human
uguauacuuuaguauga

SEQ ID NO: 3875234 - RNA, 19 nt, Human
uguguauuaaaaaaaacaa

SEQ ID NO: 3875235 - RNA, 21 nt, Human
uguguauuaaaaaaaacaaaa

SEQ ID NO: 3875236 - RNA, 12 nt, Human
uguguauucuua

SEQ ID NO: 3875237 - RNA, 20 nt, Human
uguguauucuuaaaaugcaa

SEQ ID NO: 3875238 - RNA, 23 nt, Human
uguguauucuuaaaaugcaauau

SEQ ID NO: 3875239 - RNA, 12 nt, Human
uguguauuguuc

SEQ ID NO: 3875240 - RNA, 21 nt, Human
uguguauuuaauuguaaacug

SEQ ID NO: 3875241 - RNA, 15 nt, Human
uguguauuuacgcuu

SEQ ID NO: 3875242 - RNA, 15 nt, Human
uguguauuugcuaau

SEQ ID NO: 3875243 - RNA, 15 nt, Human
ugugucaagcugcuu

SEQ ID NO: 3875244 - RNA, 17 nt, Human
ugugucacuggcugccu

SEQ ID NO: 3875245 - RNA, 19 nt, Human
ugugucagcauagaaguaa

SEQ ID NO: 3875246 - RNA, 15 nt, Human
ugugucagcugaggc

SEQ ID NO: 3875247 - RNA, 17 nt, Human
ugugucagcugaggcug

SEQ ID NO: 3875248 - RNA, 17 nt, Human
ugugucagguggggcag

SEQ ID NO: 3875249 - RNA, 13 nt, Human
ugugucaguuuau

SEQ ID NO: 3875250 - RNA, 22 nt, Human
ugugucaucuagcauuagguau

SEQ ID NO: 3875251 - RNA, 16 nt, Human
ugugucaugccaguga

SEQ ID NO: 3875252 - RNA, 13 nt, Human
ugugucauuucaa

SEQ ID NO: 3875253 - RNA, 17 nt, Human
uguguccaaaaccgcca

SEQ ID NO: 3875254 - RNA, 17 nt, Human
uguguccacgacugucu

SEQ ID NO: 3875255 - RNA, 18 nt, Human
uguguccacgacugucuc

SEQ ID NO: 3875256 - RNA, 17 nt, Human
uguguccaugugugugc

SEQ ID NO: 3875257 - RNA, 13 nt, Human
ugugucccaggca

SEQ ID NO: 3875258 - RNA, 14 nt, Human
ugugucccaggcag

SEQ ID NO: 3875259 - RNA, 19 nt, Human
ugugucccaggcagggaga

SEQ ID NO: 3875260 - RNA, 14 nt, Human
ugugucccaugacc

SEQ ID NO: 3875261 - RNA, 19 nt, Human
ugugucccaugacccaccc

SEQ ID NO: 3875262 - RNA, 22 nt, Human
ugugucccaugacccaccccug

SEQ ID NO: 3875263 - RNA, 21 nt, Human
ugugucccccucuguccaggc

SEQ ID NO: 3875264 - RNA, 17 nt, Human
ugugucccucuucucuu

SEQ ID NO: 3875265 - RNA, 14 nt, Human
uguguccugacacu

SEQ ID NO: 3875266 - RNA, 17 nt, Human
uguguccugacacugca

SEQ ID NO: 3875267 - RNA, 20 nt, Human
uguguccuggugcucucugc

SEQ ID NO: 3875268 - RNA, 15 nt, Human
ugugucuaaacugca

SEQ ID NO: 3875269 - RNA, 17 nt, Human
ugugucuaaacugcauu

SEQ ID NO: 3875270 - RNA, 19 nt, Human
ugugucuaaauuugaaugu

SEQ ID NO: 3875271 - RNA, 18 nt, Human
ugugucuaagauucuaga

SEQ ID NO: 3875272 - RNA, 19 nt, Human
ugugucuaagauucuagau

SEQ ID NO: 3875273 - RNA, 20 nt, Human
ugugucuaagauucuagauc

SEQ ID NO: 3875274 - RNA, 14 nt, Human
ugugucuacagaga

SEQ ID NO: 3875275 - RNA, 19 nt, Human
ugugucuaggcaggaccug

SEQ ID NO: 3875276 - RNA, 20 nt, Human
ugugucuaggcaggaccugu

SEQ ID NO: 3875277 - RNA, 21 nt, Human
ugugucucuugguccugcugc

SEQ ID NO: 3875278 - RNA, 12 nt, Human
ugugucugcagg

SEQ ID NO: 3875279 - RNA, 17 nt, Human
ugugucugcgaaguccu

SEQ ID NO: 3875280 - RNA, 13 nt, Human
ugugucuguacac

SEQ ID NO: 3875281 - RNA, 17 nt, Human
ugugucuucaauuugua

SEQ ID NO: 3875282 - RNA, 21 nt, Human
ugugucuugcaauggcagccu

SEQ ID NO: 3875283 - RNA, 14 nt, Human
ugugucuuuagaua

SEQ ID NO: 3875284 - RNA, 18 nt, Human
ugugucuuucacagcucc

SEQ ID NO: 3875285 - RNA, 10 nt, Human
ugugucuuuu

SEQ ID NO: 3875286 - RNA, 17 nt, Human
ugugugaaacuuucauu

SEQ ID NO: 3875287 - RNA, 20 nt, Human
ugugugaaagguacuucaaa

SEQ ID NO: 3875288 - RNA, 15 nt, Human
ugugugaaggcagag

SEQ ID NO: 3875289 - RNA, 17 nt, Human
ugugugaccaacugugu

SEQ ID NO: 3875290 - RNA, 17 nt, Human
ugugugaggagcugcug

SEQ ID NO: 3875291 - RNA, 15 nt, Human
ugugugauauuucag

SEQ ID NO: 3875292 - RNA, 16 nt, Human
ugugugaugaacuuuc

SEQ ID NO: 3875293 - RNA, 19 nt, Human
ugugugaugugacauuugu

SEQ ID NO: 3875294 - RNA, 23 nt, Human
ugugugcaccuuaccaacuuucu

SEQ ID NO: 3875295 - RNA, 19 nt, Human
ugugugcacguacacacac

SEQ ID NO: 3875296 - RNA, 17 nt, Human
ugugugcagagcugaag

SEQ ID NO: 3875297 - RNA, 22 nt, Human
ugugugcaucaggcuuucuuuu

SEQ ID NO: 3875298 - RNA, 13 nt, Human
ugugugcccagcu

SEQ ID NO: 3875299 - RNA, 14 nt, Human
ugugugcccagcuu

SEQ ID NO: 3875300 - RNA, 22 nt, Human
ugugugccgagcccuugcccau

SEQ ID NO: 3875301 - RNA, 16 nt, Human
ugugugccucuagcug

SEQ ID NO: 3875302 - RNA, 17 nt, Human
ugugugccucuagcuga

SEQ ID NO: 3875303 - RNA, 19 nt, Human
ugugugcguccugucggag

SEQ ID NO: 3875304 - RNA, 21 nt, Human
ugugugcguguuuggguuuuu

SEQ ID NO: 3875305 - RNA, 22 nt, Human
ugugugcucauguaugugcgaa

SEQ ID NO: 3875306 - RNA, 18 nt, Human
ugugugcucuucuucuuu

SEQ ID NO: 3875307 - RNA, 15 nt, Human
ugugugcuuauguau

SEQ ID NO: 3875308 - RNA, 21 nt, Human
uguguggagagggaaugugaa

SEQ ID NO: 3875309 - RNA, 22 nt, Human
uguguggagagggaaugugaaa

SEQ ID NO: 3875310 - RNA, 22 nt, Human
uguguggagcucgcuaaaguca

SEQ ID NO: 3875311 - RNA, 17 nt, Human
uguguggagucauuucu

SEQ ID NO: 3875312 - RNA, 17 nt, Human
uguguggccacuucugu

SEQ ID NO: 3875313 - RNA, 17 nt, Human
uguguggcuuucagagc

SEQ ID NO: 3875314 - RNA, 15 nt, Human
ugugugggacuguac

SEQ ID NO: 3875315 - RNA, 15 nt, Human
ugugugggagugugu

SEQ ID NO: 3875316 - RNA, 13 nt, Human
ugugugggucuau

SEQ ID NO: 3875317 - RNA, 14 nt, Human
ugugugguagaaac

SEQ ID NO: 3875318 - RNA, 16 nt, Human
ugugugguagaaacaa

SEQ ID NO: 3875319 - RNA, 14 nt, Human
uguguguauacaug

SEQ ID NO: 3875320 - RNA, 22 nt, Human
uguguguauauauguguauaua

SEQ ID NO: 3875321 - RNA, 13 nt, Human
uguguguaugcua

SEQ ID NO: 3875322 - RNA, 19 nt, Human
uguguguauguuugcacac

SEQ ID NO: 3875323 - RNA, 17 nt, Human
ugugugucaguuuucau

SEQ ID NO: 3875324 - RNA, 18 nt, Human
ugugugucaugccaguga

SEQ ID NO: 3875325 - RNA, 19 nt, Human
uguguguccccuugcagcc

SEQ ID NO: 3875326 - RNA, 20 nt, Human
ugugugugaaugaacacucu

SEQ ID NO: 3875327 - RNA, 23 nt, Human
ugugugugaccccuccuggggcc

SEQ ID NO: 3875328 - RNA, 18 nt, Human
ugugugugcagacuucag

SEQ ID NO: 3875329 - RNA, 19 nt, Human
ugugugugcuuauguauga

SEQ ID NO: 3875330 - RNA, 19 nt, Human
ugugugugggcugugagug

SEQ ID NO: 3875331 - RNA, 13 nt, Human
ugugugugguuuu

SEQ ID NO: 3875332 - RNA, 11 nt, Human
ugugugugugc

SEQ ID NO: 3875333 - RNA, 13 nt, Human
uguguguguguau

SEQ ID NO: 3875334 - RNA, 15 nt, Human
uguguguguguauga

SEQ ID NO: 3875335 - RNA, 16 nt, Human
uguguguguguaugug

SEQ ID NO: 3875336 - RNA, 13 nt, Human
ugugugugugugu

SEQ ID NO: 3875337 - RNA, 15 nt, Human
ugugugugugugucc

SEQ ID NO: 3875338 - RNA, 16 nt, Human
ugugugugugugugca

SEQ ID NO: 3875339 - RNA, 20 nt, Human
uguguguuaagcucugcuau

SEQ ID NO: 3875340 - RNA, 14 nt, Human
uguguguuccuggc

SEQ ID NO: 3875341 - RNA, 20 nt, Human
uguguguugauacuguugca

SEQ ID NO: 3875342 - RNA, 21 nt, Human
uguguguugauacuguugcac

SEQ ID NO: 3875343 - RNA, 22 nt, Human
uguguguugaucccaagacaau

SEQ ID NO: 3875344 - RNA, 19 nt, Human
uguguguugccacaggaca

SEQ ID NO: 3875345 - RNA, 18 nt, Human
uguguguugucuugaaag

SEQ ID NO: 3875346 - RNA, 18 nt, Human
uguguguuguguguggga

SEQ ID NO: 3875347 - RNA, 18 nt, Human
uguguguuuaaauaaagu

SEQ ID NO: 3875348 - RNA, 23 nt, Human
uguguguuuauugucaaaguggu

SEQ ID NO: 3875349 - RNA, 13 nt, Human
uguguguuucacu

SEQ ID NO: 3875350 - RNA, 13 nt, Human
uguguguuuggaa

SEQ ID NO: 3875351 - RNA, 15 nt, Human
uguguguuugugcug

SEQ ID NO: 3875352 - RNA, 19 nt, Human
uguguuaagcucugcuauu

SEQ ID NO: 3875353 - RNA, 22 nt, Human
uguguuaaguauguguaaaaug

SEQ ID NO: 3875354 - RNA, 19 nt, Human
uguguuaaucuuaauguau

SEQ ID NO: 3875355 - RNA, 19 nt, Human
uguguuacccuccuguaaa

SEQ ID NO: 3875356 - RNA, 14 nt, Human
uguguuaguuccca

SEQ ID NO: 3875357 - RNA, 17 nt, Human
uguguuaguucccaaca

SEQ ID NO: 3875358 - RNA, 23 nt, Human
uguguuaucacccagaagaaaau

SEQ ID NO: 3875359 - RNA, 14 nt, Human
uguguuaugaagca

SEQ ID NO: 3875360 - RNA, 14 nt, Human
uguguuauuauaga

SEQ ID NO: 3875361 - RNA, 19 nt, Human
uguguucacuaaacucuga

SEQ ID NO: 3875362 - RNA, 19 nt, Human
uguguuccaacugccccca

SEQ ID NO: 3875363 - RNA, 17 nt, Human
uguguuccaaguuucca

SEQ ID NO: 3875364 - RNA, 19 nt, Human
uguguuccaaguuuccaaa

SEQ ID NO: 3875365 - RNA, 17 nt, Human
uguguucccauuucagc

SEQ ID NO: 3875366 - RNA, 10 nt, Human
uguguuccug

SEQ ID NO: 3875367 - RNA, 16 nt, Human
uguguuccuggcaaua

SEQ ID NO: 3875368 - RNA, 13 nt, Human
uguguugaagagg

SEQ ID NO: 3875369 - RNA, 15 nt, Human
uguguugaaggaacu

SEQ ID NO: 3875370 - RNA, 15 nt, Human
uguguugauacauuc

SEQ ID NO: 3875371 - RNA, 14 nt, Human
uguguugcauuauu

SEQ ID NO: 3875372 - RNA, 13 nt, Human
uguguugccaagc

SEQ ID NO: 3875373 - RNA, 16 nt, Human
uguguugccaagcucc

SEQ ID NO: 3875374 - RNA, 22 nt, Human
uguguugccacaguagaacugu

SEQ ID NO: 3875375 - RNA, 17 nt, Human
uguguugcuuauguugu

SEQ ID NO: 3875376 - RNA, 12 nt, Human
uguguuguauua

SEQ ID NO: 3875377 - RNA, 14 nt, Human
uguguugugugugg

SEQ ID NO: 3875378 - RNA, 13 nt, Human
uguguuguugcuu

SEQ ID NO: 3875379 - RNA, 13 nt, Human
uguucucugcccu

SEQ ID NO: 3875380 - RNA, 14 nt, Human
uguucucugcccuc

SEQ ID NO: 3875381 - RNA, 13 nt, Human
uguucucugggag

SEQ ID NO: 3875382 - RNA, 17 nt, Human
uguucucugggagaaaa

SEQ ID NO: 3875383 - RNA, 18 nt, Human
uguucugaauaauuucuu

SEQ ID NO: 3875384 - RNA, 19 nt, Human
uguucugacauuaacaguu

SEQ ID NO: 3875385 - RNA, 15 nt, Human
uguucugacccugcu

SEQ ID NO: 3875386 - RNA, 18 nt, Human
uguucugacccugcuuca

SEQ ID NO: 3875387 - RNA, 21 nt, Human
uguucugagauucaauauuga

SEQ ID NO: 3875388 - RNA, 14 nt, Human
uguucugauuagaa

SEQ ID NO: 3875389 - RNA, 13 nt, Human
uguucugcacuga

SEQ ID NO: 3875390 - RNA, 16 nt, Human
uguucugcacugaaaa

SEQ ID NO: 3875391 - RNA, 23 nt, Human
uguucugcccaaugccuuuuuga

SEQ ID NO: 3875392 - RNA, 22 nt, Human
uguucugcccccagcccaaagg

SEQ ID NO: 3875393 - RNA, 20 nt, Human
uguucugcuaaauuucaaau

SEQ ID NO: 3875394 - RNA, 13 nt, Human
uguucuggaggaa

SEQ ID NO: 3875395 - RNA, 17 nt, Human
uguucuggcucuuccag

SEQ ID NO: 3875396 - RNA, 14 nt, Human
uguucugggacaca

SEQ ID NO: 3875397 - RNA, 15 nt, Human
uguucugggacacag

SEQ ID NO: 3875398 - RNA, 20 nt, Human
uguucuggugaggccuugcu

SEQ ID NO: 3875399 - RNA, 16 nt, Human
uguucugucccuugcc

SEQ ID NO: 3875400 - RNA, 22 nt, Human
uguucugugauacagaacucuu

SEQ ID NO: 3875401 - RNA, 13 nt, Human
uguucuguggaaa

SEQ ID NO: 3875402 - RNA, 17 nt, Human
uguucuguggaaagugu

SEQ ID NO: 3875403 - RNA, 18 nt, Human
uguucuguggaaagugua

SEQ ID NO: 3875404 - RNA, 20 nt, Human
uguucuguggaaaguguaaa

SEQ ID NO: 3875405 - RNA, 19 nt, Human
uguucugugguuccucugc

SEQ ID NO: 3875406 - RNA, 13 nt, Human
uguucugugucuu

SEQ ID NO: 3875407 - RNA, 19 nt, Human
uguucuguuaacugaauac

SEQ ID NO: 3875408 - RNA, 13 nt, Human
uguucuguuacaa

SEQ ID NO: 3875409 - RNA, 18 nt, Human
uguucuguuacaaaaugu

SEQ ID NO: 3875410 - RNA, 13 nt, Human
uguucuguuuaau

SEQ ID NO: 3875411 - RNA, 16 nt, Human
uguucuguuuguuaaa

SEQ ID NO: 3875412 - RNA, 16 nt, Human
uguucuguuuuguuuc

SEQ ID NO: 3875413 - RNA, 18 nt, Human
uguucuguuuuguuuugu

SEQ ID NO: 3875414 - RNA, 16 nt, Human
uguucuuaauucuuag

SEQ ID NO: 3875415 - RNA, 18 nt, Human
uguucuuaauugcacucu

SEQ ID NO: 3875416 - RNA, 16 nt, Human
uguucuuacacauaca

SEQ ID NO: 3875417 - RNA, 10 nt, Human
uguucuucca

SEQ ID NO: 3875418 - RNA, 16 nt, Human
uguucuuccaaagcag

SEQ ID NO: 3875419 - RNA, 20 nt, Human
uguucuuccaaagcagagag

SEQ ID NO: 3875420 - RNA, 13 nt, Human
uguucuuccaguu

SEQ ID NO: 3875421 - RNA, 10 nt, Human
uguucuuccu

SEQ ID NO: 3875422 - RNA, 16 nt, Human
uguucuugcugcuaga

SEQ ID NO: 3875423 - RNA, 21 nt, Human
uguucuugcugcuagaacuuu

SEQ ID NO: 3875424 - RNA, 16 nt, Human
uguucuuggcaauaaa

SEQ ID NO: 3875425 - RNA, 17 nt, Human
uguucuuggcaauaaau

SEQ ID NO: 3875426 - RNA, 23 nt, Human
uguucuuggcaauaaauuuugaa

SEQ ID NO: 3875427 - RNA, 17 nt, Human
uguucuugguuuguaaa

SEQ ID NO: 3875428 - RNA, 22 nt, Human
uguucuugguuuguaaauuaac

SEQ ID NO: 3875429 - RNA, 14 nt, Human
uguucuuguauuua

SEQ ID NO: 3875430 - RNA, 20 nt, Human
uguucuuuauauacaauaau

SEQ ID NO: 3875431 - RNA, 19 nt, Human
uguucuuucacccuuuucu

SEQ ID NO: 3875432 - RNA, 20 nt, Human
uguucuuuccaaaguacacu

SEQ ID NO: 3875433 - RNA, 20 nt, Human
uguucuuucuggcuaugcau

SEQ ID NO: 3875434 - RNA, 20 nt, Human
uguucuuuggaaauacacag

SEQ ID NO: 3875435 - RNA, 13 nt, Human
uguucuuugggga

SEQ ID NO: 3875436 - RNA, 13 nt, Human
uguucuuuuuaga

SEQ ID NO: 3875437 - RNA, 15 nt, Human
uguugaaaaaauuua

SEQ ID NO: 3875438 - RNA, 18 nt, Human
uguugaaaaaguuuguuu

SEQ ID NO: 3875439 - RNA, 23 nt, Human
uguugaaacggaugauuucuaug

SEQ ID NO: 3875440 - RNA, 16 nt, Human
uguugaaacuuuaaga

SEQ ID NO: 3875441 - RNA, 12 nt, Human
uguugaaagcaa

SEQ ID NO: 3875442 - RNA, 23 nt, Human
uguugaaagcaaaaaugcuaaua

SEQ ID NO: 3875443 - RNA, 21 nt, Human
uguugaaauuuugcaaauaua

SEQ ID NO: 3875444 - RNA, 18 nt, Human
uguugaacaaaauaaauu

SEQ ID NO: 3875445 - RNA, 23 nt, Human
uguugaaccaaaccucccugcua

SEQ ID NO: 3875446 - RNA, 18 nt, Human
uguugaagaauacaguua

SEQ ID NO: 3875447 - RNA, 18 nt, Human
uguugaagagcagcuccu

SEQ ID NO: 3875448 - RNA, 17 nt, Human
uguugaagccacugccu

SEQ ID NO: 3875449 - RNA, 15 nt, Human
uguugaagccuuugu

SEQ ID NO: 3875450 - RNA, 14 nt, Human
uguugaaggaacuu

SEQ ID NO: 3875451 - RNA, 18 nt, Human
uguugaaggaacuugucu

SEQ ID NO: 3875452 - RNA, 13 nt, Human
uguugaagucacc

SEQ ID NO: 3875453 - RNA, 13 nt, Human
uguugaauacuuu

SEQ ID NO: 3875454 - RNA, 18 nt, Human
uguugaauacuuuuuaca

SEQ ID NO: 3875455 - RNA, 18 nt, Human
uguugaauucuuuugcca

SEQ ID NO: 3875456 - RNA, 17 nt, Human
uguugacaguucauaug

SEQ ID NO: 3875457 - RNA, 15 nt, Human
uguugacauauuuaa

SEQ ID NO: 3875458 - RNA, 16 nt, Human
uguugacauauuuaau

SEQ ID NO: 3875459 - RNA, 18 nt, Human
uguugacauauuuaaugu

SEQ ID NO: 3875460 - RNA, 23 nt, Human
uguugacauauuuaauguuuuaa

SEQ ID NO: 3875461 - RNA, 20 nt, Human
uguugacaucacuggcaugg

SEQ ID NO: 3875462 - RNA, 17 nt, Human
uguugacauccaagcuu

SEQ ID NO: 3875463 - RNA, 20 nt, Human
uguugacaugggacauuugc

SEQ ID NO: 3875464 - RNA, 14 nt, Human
uguugacauuaguc

SEQ ID NO: 3875465 - RNA, 22 nt, Human
uguugacucuaguacugugaau

SEQ ID NO: 3875466 - RNA, 23 nt, Human
uguugagaaucccaaauuugauu

SEQ ID NO: 3875467 - RNA, 13 nt, Human
uguugagacagag

SEQ ID NO: 3875468 - RNA, 23 nt, Human
uguugagcaagcaguagcauuug

SEQ ID NO: 3875469 - RNA, 17 nt, Human
uguugagcaucacagaa

SEQ ID NO: 3875470 - RNA, 20 nt, Human
uguugagcaugacagccugc

SEQ ID NO: 3875471 - RNA, 20 nt, Human
uguugagguggucugaaugu

SEQ ID NO: 3875472 - RNA, 23 nt, Human
uguugagguggucugaauguucu

SEQ ID NO: 3875473 - RNA, 14 nt, Human
uguugauacuguug

SEQ ID NO: 3875474 - RNA, 16 nt, Human
uguugauacuguugca

SEQ ID NO: 3875475 - RNA, 17 nt, Human
uguugauacuguugcac

SEQ ID NO: 3875476 - RNA, 19 nt, Human
uguugauacuguugcacgu

SEQ ID NO: 3875477 - RNA, 23 nt, Human
uguugaucauguacuuuuuagua

SEQ ID NO: 3875478 - RNA, 12 nt, Human
uguugaucccaa

SEQ ID NO: 3875479 - RNA, 16 nt, Human
uguugaucccaagaca

SEQ ID NO: 3875480 - RNA, 21 nt, Human
uguugaugcaauccuuacaaa

SEQ ID NO: 3875481 - RNA, 23 nt, Human
uguugaugcaauccuuacaaaug

SEQ ID NO: 3875482 - RNA, 22 nt, Human
uguugaugggcacuugagaacu

SEQ ID NO: 3875483 - RNA, 17 nt, Human
uguugauguaucugagu

SEQ ID NO: 3875484 - RNA, 21 nt, Human
uguugauguaucugaguugcc

SEQ ID NO: 3875485 - RNA, 16 nt, Human
uguugauuaaagauga

SEQ ID NO: 3875486 - RNA, 16 nt, Human
uguugauuucuaguua

SEQ ID NO: 3875487 - RNA, 19 nt, Human
uguugauuucuaguuauuu

SEQ ID NO: 3875488 - RNA, 20 nt, Human
uguugauuucuaguuauuua

SEQ ID NO: 3875489 - RNA, 19 nt, Human
uguugauuucuuuccagag

SEQ ID NO: 3875490 - RNA, 23 nt, Human
uguugcaagaugugaauuauuga

SEQ ID NO: 3875491 - RNA, 15 nt, Human
uguugcaauuaggau

SEQ ID NO: 3875492 - RNA, 23 nt, Human
uguugcacacccacucagcuccg

SEQ ID NO: 3875493 - RNA, 15 nt, Human
uguugcacccagccc

SEQ ID NO: 3875494 - RNA, 17 nt, Human
uguugcacugaaaugga

SEQ ID NO: 3875495 - RNA, 17 nt, Human
uguugcauggauguuuu

SEQ ID NO: 3875496 - RNA, 18 nt, Human
uguugcauuauucauuua

SEQ ID NO: 3875497 - RNA, 20 nt, Human
uguugcauuauucauuuagu

SEQ ID NO: 3875498 - RNA, 18 nt, Human
uguugccaagcuccaagc

SEQ ID NO: 3875499 - RNA, 15 nt, Human
uguugccacaggaca

SEQ ID NO: 3875500 - RNA, 19 nt, Human
uguugccaguuguccuccu

SEQ ID NO: 3875501 - RNA, 23 nt, Human
uguugcccaacuacuaucucaga

SEQ ID NO: 3875502 - RNA, 13 nt, Human
uguugcccaggca

SEQ ID NO: 3875503 - RNA, 15 nt, Human
uguugcccaggcagg

SEQ ID NO: 3875504 - RNA, 14 nt, Human
uguugcccaggcug

SEQ ID NO: 3875505 - RNA, 11 nt, Human
uguugccccag

SEQ ID NO: 3875506 - RNA, 20 nt, Human
uguugccccuuucucuuuuc

SEQ ID NO: 3875507 - RNA, 19 nt, Human
uguugccuugcauaauggu

SEQ ID NO: 3875508 - RNA, 21 nt, Human
uguugcgugacacucuccuug

SEQ ID NO: 3875509 - RNA, 14 nt, Human
uguugcguuccuuu

SEQ ID NO: 3875510 - RNA, 11 nt, Human
uguugcuaagc

SEQ ID NO: 3875511 - RNA, 12 nt, Human
uguugcuaagcc

SEQ ID NO: 3875512 - RNA, 17 nt, Human
uguugcuaugugccuua

SEQ ID NO: 3875513 - RNA, 23 nt, Human
uguugcucaaaucuauucagaca

SEQ ID NO: 3875514 - RNA, 23 nt, Human
uguugcucagcaaggggcucugc

SEQ ID NO: 3875515 - RNA, 14 nt, Human
uguugcugaauagg

SEQ ID NO: 3875516 - RNA, 16 nt, Human
uguugcugauuuuauu

SEQ ID NO: 3875517 - RNA, 13 nt, Human
uguugcugccaac

SEQ ID NO: 3875518 - RNA, 13 nt, Human
uguugcugccuca

SEQ ID NO: 3875519 - RNA, 14 nt, Human
uguugcugccucau

SEQ ID NO: 3875520 - RNA, 16 nt, Human
uguugcuuagucacuu

SEQ ID NO: 3875521 - RNA, 20 nt, Human
uguugcuuauguuguuuugu

SEQ ID NO: 3875522 - RNA, 15 nt, Human
uguugcuucuuguga

SEQ ID NO: 3875523 - RNA, 21 nt, Human
uguuggaaaagaauacagaaa

SEQ ID NO: 3875524 - RNA, 12 nt, Human
uguuuguguauu

SEQ ID NO: 3875525 - RNA, 12 nt, Human
uguuuguuaugg

SEQ ID NO: 3875526 - RNA, 15 nt, Human
uguuuguuguagauu

SEQ ID NO: 3875527 - RNA, 19 nt, Human
uguuuguuucaagaaccug

SEQ ID NO: 3875528 - RNA, 22 nt, Human
uguuuguuucucccccugggcu

SEQ ID NO: 3875529 - RNA, 12 nt, Human
uguuuguuuugu

SEQ ID NO: 3875530 - RNA, 23 nt, Human
uguuuuaaaauaaaaauucugaa

SEQ ID NO: 3875531 - RNA, 17 nt, Human
uguuuuaaaauaaggau

SEQ ID NO: 3875532 - RNA, 21 nt, Human
uguuuuaaacucuccuaguca

SEQ ID NO: 3875533 - RNA, 12 nt, Human
uguuuuaaagaa

SEQ ID NO: 3875534 - RNA, 18 nt, Human
uguuuuaaauauagaauu

SEQ ID NO: 3875535 - RNA, 13 nt, Human
uguuuuaaauucu

SEQ ID NO: 3875536 - RNA, 17 nt, Human
uguuuuaaauucugaga

SEQ ID NO: 3875537 - RNA, 13 nt, Human
uguuuuaacaaaa

SEQ ID NO: 3875538 - RNA, 16 nt, Human
uguuuuaagaaaugua

SEQ ID NO: 3875539 - RNA, 16 nt, Human
uguuuuaagaggcagg

SEQ ID NO: 3875540 - RNA, 22 nt, Human
uguuuuaagaggcagggucuca

SEQ ID NO: 3875541 - RNA, 18 nt, Human
uguuuuaaggaagaaaaa

SEQ ID NO: 3875542 - RNA, 19 nt, Human
uguuuuaaggaugcuugua

SEQ ID NO: 3875543 - RNA, 22 nt, Human
uguuuuaaggaugcuuguacau

SEQ ID NO: 3875544 - RNA, 18 nt, Human
uguuuuaaguacuacaca

SEQ ID NO: 3875545 - RNA, 13 nt, Human
uguuuuaauugua

SEQ ID NO: 3875546 - RNA, 22 nt, Human
uguuuuaauuuaaacaccuccu

SEQ ID NO: 3875547 - RNA, 23 nt, Human
uguuuuaauuuaaacaccuccuc

SEQ ID NO: 3875548 - RNA, 17 nt, Human
uguuuuacaauaguucu

SEQ ID NO: 3875549 - RNA, 16 nt, Human
uguuuuacuaaagaaa

SEQ ID NO: 3875550 - RNA, 24 nt, Human
uguuuuagaaugaugcacauuuca

SEQ ID NO: 3875551 - RNA, 20 nt, Human
uguuuuagacaaauacucau

SEQ ID NO: 3875552 - RNA, 21 nt, Human
uguuuuagacaaauacucaug

SEQ ID NO: 3875553 - RNA, 22 nt, Human
uguuuuagacaaauacucaugu

SEQ ID NO: 3875554 - RNA, 24 nt, Human
uguuuuagacaaauacucaugugu

SEQ ID NO: 3875555 - RNA, 18 nt, Human
uguuuuagaguaagaaau

SEQ ID NO: 3875556 - RNA, 16 nt, Human
uguuuuagcacagcgu

SEQ ID NO: 3875557 - RNA, 14 nt, Human
uguuuuaggagcau

SEQ ID NO: 3875558 - RNA, 16 nt, Human
uguuuuaguuaaauuu

SEQ ID NO: 3875559 - RNA, 19 nt, Human
uguuuuauaaaauuuugcu

SEQ ID NO: 3875560 - RNA, 23 nt, Human
uguuuuaucaugacauguuauau

SEQ ID NO: 3875561 - RNA, 23 nt, Human
uguuuuauuauuucuauuaaaua

SEQ ID NO: 3875562 - RNA, 14 nt, Human
uguuuuauuccugu

SEQ ID NO: 3875563 - RNA, 23 nt, Human
uguuuuauuuuuuauuguuuuca

SEQ ID NO: 3875564 - RNA, 14 nt, Human
uguuuucaaauguu

SEQ ID NO: 3875565 - RNA, 21 nt, Human
uguuuucaauuuuaaacauau

SEQ ID NO: 3875566 - RNA, 15 nt, Human
uguuuucagacucag

SEQ ID NO: 3875567 - RNA, 19 nt, Human
uguuuucauuaucucaaaa

SEQ ID NO: 3875568 - RNA, 12 nt, Human
uguuuucccuga

SEQ ID NO: 3875569 - RNA, 16 nt, Human
uguuuucccugaccuc

SEQ ID NO: 3875570 - RNA, 13 nt, Human
uguuuucuagugu

SEQ ID NO: 3875571 - RNA, 15 nt, Human
uguuuucuaguguau

SEQ ID NO: 3875572 - RNA, 16 nt, Human
uguuuucuaguguauc

SEQ ID NO: 3875573 - RNA, 20 nt, Human
uguuuucuaguguaucaaaa

SEQ ID NO: 3875574 - RNA, 17 nt, Human
uguuuucucugaacaca

SEQ ID NO: 3875575 - RNA, 21 nt, Human
uguuuucucuggaguauucua

SEQ ID NO: 3875576 - RNA, 17 nt, Human
uguuuucuuuugguaaa

SEQ ID NO: 3875577 - RNA, 17 nt, Human
uguuuugaaggcaaaau

SEQ ID NO: 3875578 - RNA, 15 nt, Human
uguuuugaauauuac

SEQ ID NO: 3875579 - RNA, 21 nt, Human
uguuuugaauauuacuccuau

SEQ ID NO: 3875580 - RNA, 19 nt, Human
uguuuugaaugguguugua

SEQ ID NO: 3875581 - RNA, 17 nt, Human
uguuuugacggaugauu

SEQ ID NO: 3875582 - RNA, 12 nt, Human
uguuuugagaac

SEQ ID NO: 3875583 - RNA, 16 nt, Human
uguuuugagaguaaug

SEQ ID NO: 3875584 - RNA, 12 nt, Human
uguuuugauaaa

SEQ ID NO: 3875585 - RNA, 20 nt, Human
uguuuugauguuuguggccu

SEQ ID NO: 3875586 - RNA, 14 nt, Human
uguuuugcaagcca

SEQ ID NO: 3875587 - RNA, 20 nt, Human
uguuuugccaaagacuguaa

SEQ ID NO: 3875588 - RNA, 16 nt, Human
uguuuugccagcccau

SEQ ID NO: 3875589 - RNA, 17 nt, Human
uguuuuggacuuuguua

SEQ ID NO: 3875590 - RNA, 17 nt, Human
uguuuuggauggcuugu

SEQ ID NO: 3875591 - RNA, 22 nt, Human
uguuuuggauuuggagagaaau

SEQ ID NO: 3875592 - RNA, 18 nt, Human
uguuuuggcugaaauucu

SEQ ID NO: 3875593 - RNA, 21 nt, Human
uguuuugguagauuaaauaua

SEQ ID NO: 3875594 - RNA, 15 nt, Human
uguuuugguuugcua

SEQ ID NO: 3875595 - RNA, 16 nt, Human
uguuuuguaaacuuug

SEQ ID NO: 3875596 - RNA, 17 nt, Human
uguuuuguaaacuuuga

SEQ ID NO: 3875597 - RNA, 18 nt, Human
uguuuuguaaacuuugaa

SEQ ID NO: 3875598 - RNA, 20 nt, Human
uguuuuguaaacuuugaaau

SEQ ID NO: 3875599 - RNA, 21 nt, Human
uguuuuguaaacuuugaaaua

SEQ ID NO: 3875600 - RNA, 15 nt, Human
uguuuuguacagaug

SEQ ID NO: 3875601 - RNA, 15 nt, Human
uguuuuguaccagug

SEQ ID NO: 3875602 - RNA, 16 nt, Human
uguuuuguaccaguga

SEQ ID NO: 3875603 - RNA, 20 nt, Human
uguuuuguaccagugaauuu

SEQ ID NO: 3875604 - RNA, 14 nt, Human
uguuuuguauacaa

SEQ ID NO: 3875605 - RNA, 17 nt, Human
uguuuugucuuacaaag

SEQ ID NO: 3875606 - RNA, 13 nt, Human
uguuuugugcauu

SEQ ID NO: 3875607 - RNA, 19 nt, Human
uguuuuguugacauucuga

SEQ ID NO: 3875608 - RNA, 13 nt, Human
uguuuuguuuguc

SEQ ID NO: 3875609 - RNA, 14 nt, Human
uguuuuguuugucu

SEQ ID NO: 3875610 - RNA, 12 nt, Human
uguuuuuaaaag

SEQ ID NO: 3875611 - RNA, 19 nt, Human
uguuuuuaaaaucuuauua

SEQ ID NO: 3875612 - RNA, 14 nt, Human
uguuuuuaaacugu

SEQ ID NO: 3875613 - RNA, 15 nt, Human
uguuuuuaaacugua

SEQ ID NO: 3875614 - RNA, 18 nt, Human
uguuuuuaaacuguacag

SEQ ID NO: 3875615 - RNA, 19 nt, Human
uguuuuuaacaugucaauc

SEQ ID NO: 3875616 - RNA, 20 nt, Human
uguuuuuaagcuguuuccau

SEQ ID NO: 3875617 - RNA, 16 nt, Human
uguuuuuaucuuuuua

SEQ ID NO: 3875618 - RNA, 14 nt, Human
uguuuuucaguuca

SEQ ID NO: 3875619 - RNA, 11 nt, Human
uguuuuucauu

SEQ ID NO: 3875620 - RNA, 16 nt, Human
uguuuuuccuuccaau

SEQ ID NO: 3875621 - RNA, 13 nt, Human
uguuuuucuaaag

SEQ ID NO: 3875622 - RNA, 20 nt, Human
uguuuuucuauuaaaagacu

SEQ ID NO: 3875623 - RNA, 22 nt, Human
uguuuuucuauuaaaagacuca

SEQ ID NO: 3875624 - RNA, 12 nt, Human
uguuuuucucac

SEQ ID NO: 3875625 - RNA, 21 nt, Human
uguuuuucucacuccuuuugg

SEQ ID NO: 3875626 - RNA, 12 nt, Human
uguuuuucugcu

SEQ ID NO: 3875627 - RNA, 22 nt, Human
uguuuuucugugugucaguuuu

SEQ ID NO: 3875628 - RNA, 13 nt, Human
uguuuuugaaaua

SEQ ID NO: 3875629 - RNA, 13 nt, Human
uguuuuuguauau

SEQ ID NO: 3875630 - RNA, 15 nt, Human
uguuuuuguugugug

SEQ ID NO: 3875631 - RNA, 14 nt, Human
uguuuuuguuuugu

SEQ ID NO: 3875632 - RNA, 15 nt, Human
uguuuuuuaaagucu

SEQ ID NO: 3875633 - RNA, 12 nt, Human
uguuuuuuaaga

SEQ ID NO: 3875634 - RNA, 21 nt, Human
uguuuuuuagaucaaauacuu

SEQ ID NO: 3875635 - RNA, 14 nt, Human
uguuuuuuaucuuu

SEQ ID NO: 3875636 - RNA, 23 nt, Human
uguuuuuuaucuuuucuacagca

SEQ ID NO: 3875637 - RNA, 15 nt, Human
uguuuuuuaugaagu

SEQ ID NO: 3875638 - RNA, 17 nt, Human
uguuuuuuaugaagugc

SEQ ID NO: 3875639 - RNA, 14 nt, Human
uguuuuuucaugug

SEQ ID NO: 3875640 - RNA, 14 nt, Human
uguuuuuugaaaac

SEQ ID NO: 3875641 - RNA, 23 nt, Human
uguuuuuugccacagcuuuugca

SEQ ID NO: 3875642 - RNA, 16 nt, Human
uguuuuuuggucuuuu

SEQ ID NO: 3875643 - RNA, 18 nt, Human
uguuuuuuguuuuucugc

SEQ ID NO: 3875644 - RNA, 15 nt, Human
uguuuuuuuguuugu

SEQ ID NO: 3875645 - RNA, 22 nt, Human
uuaaaaaaaaaaaaaaaaaaga

SEQ ID NO: 3875646 - RNA, 20 nt, Human
uuaaaaaaaaaaaaaggaaa

SEQ ID NO: 3875647 - RNA, 22 nt, Human
uuaaaaaaaaaccugagcccca

SEQ ID NO: 3875648 - RNA, 16 nt, Human
uuaaaaaaaaaggcau

SEQ ID NO: 3875649 - RNA, 22 nt, Human
uuaaaaaaaaagucagagacag

SEQ ID NO: 3875650 - RNA, 16 nt, Human
uuaaaaaaaaauugua

SEQ ID NO: 3875651 - RNA, 19 nt, Human
uuaaaaaaaaauuguaucu

SEQ ID NO: 3875652 - RNA, 19 nt, Human
uuaaaaaaaacaaaaagaa

SEQ ID NO: 3875653 - RNA, 21 nt, Human
uuaaaaaaaacaaaaagaaca

SEQ ID NO: 3875654 - RNA, 17 nt, Human
uuaaaaaaaacucuuua

SEQ ID NO: 3875655 - RNA, 12 nt, Human
uuaaaaaaaaua

SEQ ID NO: 3875656 - RNA, 19 nt, Human
uuaaaaaaaauaauaaauu

SEQ ID NO: 3875657 - RNA, 13 nt, Human
uuaaaaaaagaaa

SEQ ID NO: 3875658 - RNA, 21 nt, Human
uuaaaaaaaggcauuguuuga

SEQ ID NO: 3875659 - RNA, 18 nt, Human
uuaaaaaaaucaaaacaa

SEQ ID NO: 3875660 - RNA, 20 nt, Human
uuaaaaaacuucauguaauu

SEQ ID NO: 3875661 - RNA, 18 nt, Human
uuaaaaaagaaacauuug

SEQ ID NO: 3875662 - RNA, 15 nt, Human
uuaaaaaagagacau

SEQ ID NO: 3875663 - RNA, 12 nt, Human
uuaaaaaagaua

SEQ ID NO: 3875664 - RNA, 15 nt, Human
uuaaaaaagauaaac

SEQ ID NO: 3875665 - RNA, 18 nt, Human
uuaaaaaagauaaacaca

SEQ ID NO: 3875666 - RNA, 21 nt, Human
uuaaaaaagcuuaaaacuuug

SEQ ID NO: 3875667 - RNA, 15 nt, Human
uuaaaaaaguuuaaa

SEQ ID NO: 3875668 - RNA, 21 nt, Human
uuaaaaaauauuuauuaaaua

SEQ ID NO: 3875669 - RNA, 14 nt, Human
uuaucuauaauuua

SEQ ID NO: 3875670 - RNA, 17 nt, Human
uuaucuauacauaucuu

SEQ ID NO: 3875671 - RNA, 19 nt, Human
uuaucuauacauaucuuua

SEQ ID NO: 3875672 - RNA, 21 nt, Human
uuaucuauuguaagauaaaaa

SEQ ID NO: 3875673 - RNA, 16 nt, Human
uuaucucacuugugcc

SEQ ID NO: 3875674 - RNA, 16 nt, Human
uuaucucagauguuaa

SEQ ID NO: 3875675 - RNA, 21 nt, Human
uuaucucagucaugcauaaau

SEQ ID NO: 3875676 - RNA, 21 nt, Human
uuaucuccacaaccucuuccc

SEQ ID NO: 3875677 - RNA, 21 nt, Human
uuaucuccccuucacaugcau

SEQ ID NO: 3875678 - RNA, 12 nt, Human
uuaucucugugu

SEQ ID NO: 3875679 - RNA, 20 nt, Human
uuaucucuuuuauauuugua

SEQ ID NO: 3875680 - RNA, 17 nt, Human
uuaucugaagucagauc

SEQ ID NO: 3875681 - RNA, 18 nt, Human
uuaucugccucucuugua

SEQ ID NO: 3875682 - RNA, 14 nt, Human
uuaucuggcuucaa

SEQ ID NO: 3875683 - RNA, 23 nt, Human
uuaucugggauuaugguuuugug

SEQ ID NO: 3875684 - RNA, 12 nt, Human
uuaucuguccca

SEQ ID NO: 3875685 - RNA, 17 nt, Human
uuaucugugaauucaga

SEQ ID NO: 3875686 - RNA, 18 nt, Human
uuaucuugaaggaaaaau

SEQ ID NO: 3875687 - RNA, 16 nt, Human
uuaucuugaauaaugu

SEQ ID NO: 3875688 - RNA, 20 nt, Human
uuaucuugaauaauguaaga

SEQ ID NO: 3875689 - RNA, 16 nt, Human
uuaucuuuacuuuuaa

SEQ ID NO: 3875690 - RNA, 15 nt, Human
uuaucuuuguaauua

SEQ ID NO: 3875691 - RNA, 12 nt, Human
uuaucuuuugag

SEQ ID NO: 3875692 - RNA, 18 nt, Human
uuaugaaaaagaagaauc

SEQ ID NO: 3875693 - RNA, 19 nt, Human
uuaugaaacuuuuggaagg

SEQ ID NO: 3875694 - RNA, 21 nt, Human
uuaugaaagcaacaaagaaau

SEQ ID NO: 3875695 - RNA, 18 nt, Human
uuaugaaagguuuacauu

SEQ ID NO: 3875696 - RNA, 19 nt, Human
uuaugaaauucacccccuu

SEQ ID NO: 3875697 - RNA, 12 nt, Human
uuaugaagaaaa

SEQ ID NO: 3875698 - RNA, 23 nt, Human
uuaugaagaaaaaauacauuuua

SEQ ID NO: 3875699 - RNA, 20 nt, Human
uuaugaagcuuuuaugugaa

SEQ ID NO: 3875700 - RNA, 13 nt, Human
uuaugaaguuuaa

SEQ ID NO: 3875701 - RNA, 14 nt, Human
uuaugaaguuuaaa

SEQ ID NO: 3875702 - RNA, 13 nt, Human
uuaugaaucagug

SEQ ID NO: 3875703 - RNA, 12 nt, Human
uuaugaaucuga

SEQ ID NO: 3875704 - RNA, 14 nt, Human
uuaugaaugaaaaa

SEQ ID NO: 3875705 - RNA, 19 nt, Human
uuaugaaugugaagccuuc

SEQ ID NO: 3875706 - RNA, 17 nt, Human
uuaugaauuacauuugu

SEQ ID NO: 3875707 - RNA, 24 nt, Human
uuaugacaguaauuguguuuacau

SEQ ID NO: 3875708 - RNA, 15 nt, Human
uuaugacuauguaaa

SEQ ID NO: 3875709 - RNA, 22 nt, Human
uuaugacuucauuaauaauaaa

SEQ ID NO: 3875710 - RNA, 22 nt, Human
uuaugagaaacuuaaauguuau

SEQ ID NO: 3875711 - RNA, 18 nt, Human
uuaugagaaauguaaugc

SEQ ID NO: 3875712 - RNA, 19 nt, Human
uuaugagauggaucacaua

SEQ ID NO: 3875713 - RNA, 18 nt, Human
uuaugagcucauguagca

SEQ ID NO: 3875714 - RNA, 14 nt, Human
uuaugagcuuccaa

SEQ ID NO: 3875715 - RNA, 19 nt, Human
uuaugaguuauucauauuc

SEQ ID NO: 3875716 - RNA, 21 nt, Human
uuaugaguuuuugauagcuuu

SEQ ID NO: 3875717 - RNA, 16 nt, Human
uuaugauaauagauuc

SEQ ID NO: 3875718 - RNA, 17 nt, Human
uuaugauaauagauucu

SEQ ID NO: 3875719 - RNA, 20 nt, Human
uuaugauacuugaaaauuaa

SEQ ID NO: 3875720 - RNA, 18 nt, Human
uuaugauagugguaugac

SEQ ID NO: 3875721 - RNA, 15 nt, Human
uuaugaucaguguug

SEQ ID NO: 3875722 - RNA, 18 nt, Human
uuaugauccagcagauua

SEQ ID NO: 3875723 - RNA, 16 nt, Human
uuaugauguauauuua

SEQ ID NO: 3875724 - RNA, 18 nt, Human
uuaugaugugcuuaacag

SEQ ID NO: 3875725 - RNA, 21 nt, Human
uuaugaugugggucaaggaau

SEQ ID NO: 3875726 - RNA, 15 nt, Human
uuaugauugccuuuu

SEQ ID NO: 3875727 - RNA, 20 nt, Human
uuaugauuuaauaaaauaau

SEQ ID NO: 3875728 - RNA, 14 nt, Human
uuaugcaaaaugga

SEQ ID NO: 3875729 - RNA, 15 nt, Human
uuaugcaaaauggaa

SEQ ID NO: 3875730 - RNA, 22 nt, Human
uuaugcaaggaaggaaagaaag

SEQ ID NO: 3875731 - RNA, 16 nt, Human
uuaugcacuuauaagg

SEQ ID NO: 3875732 - RNA, 19 nt, Human
uuaugcacuuauaaggugu

SEQ ID NO: 3875733 - RNA, 20 nt, Human
uuaugcagcuuccuuuugag

SEQ ID NO: 3875734 - RNA, 16 nt, Human
uuaugcagugcugcuu

SEQ ID NO: 3875735 - RNA, 16 nt, Human
uuaugcaucauuucag

SEQ ID NO: 3875736 - RNA, 22 nt, Human
uuaugcaugaagauaauguaaa

SEQ ID NO: 3875737 - RNA, 22 nt, Human
uuaugcaugaaguaauaugcac

SEQ ID NO: 3875738 - RNA, 13 nt, Human
uuaugccaccuga

SEQ ID NO: 3875739 - RNA, 16 nt, Human
uuaugcgguuaauuuu

SEQ ID NO: 3875740 - RNA, 16 nt, Human
uuaugcuaacuguaga

SEQ ID NO: 3875741 - RNA, 10 nt, Human
uuaugcuaag

SEQ ID NO: 3875742 - RNA, 20 nt, Human
uuaugcuaagaauuuuuuau

SEQ ID NO: 3875743 - RNA, 14 nt, Human
uuaugcugaguaug

SEQ ID NO: 3875744 - RNA, 16 nt, Human
uuaugcuguauuuucu

SEQ ID NO: 3875745 - RNA, 21 nt, Human
uuaugcuguauuuucuuuuua

SEQ ID NO: 3875746 - RNA, 17 nt, Human
uuaugcugugacacaug

SEQ ID NO: 3875747 - RNA, 16 nt, Human
uuaugcuuccagaaac

SEQ ID NO: 3875748 - RNA, 11 nt, Human
uuaugcuucuu

SEQ ID NO: 3875749 - RNA, 17 nt, Human
uuauggaacacucugag

SEQ ID NO: 3875750 - RNA, 19 nt, Human
uuauggaagauuuuaaauu

SEQ ID NO: 3875751 - RNA, 22 nt, Human
uuauggaagauuuuaaauucac

SEQ ID NO: 3875752 - RNA, 14 nt, Human
uuauggaauugauu

SEQ ID NO: 3875753 - RNA, 19 nt, Human
uuauggaauugauuugcau

SEQ ID NO: 3875754 - RNA, 19 nt, Human
uuauggagaccucuccuuc

SEQ ID NO: 3875755 - RNA, 21 nt, Human
uuauggagaccucuccuuccu

SEQ ID NO: 3875756 - RNA, 17 nt, Human
uuauggauaugaaaaau

SEQ ID NO: 3875757 - RNA, 17 nt, Human
uuauggaugauuuaagu

SEQ ID NO: 3875758 - RNA, 11 nt, Human
uuauggaugca

SEQ ID NO: 3875759 - RNA, 11 nt, Human
uuauggccuca

SEQ ID NO: 3875760 - RNA, 15 nt, Human
uuauggccucagcug

SEQ ID NO: 3875761 - RNA, 14 nt, Human
uuauggcugcauag

SEQ ID NO: 3875762 - RNA, 16 nt, Human
uuauggcuuuugugca

SEQ ID NO: 3875763 - RNA, 17 nt, Human
uuauggcuuuugugcau

SEQ ID NO: 3875764 - RNA, 24 nt, Human
uuaugggagcugucaagcauguau

SEQ ID NO: 3875765 - RNA, 17 nt, Human
uuaugggcauugacaaa

SEQ ID NO: 3875766 - RNA, 15 nt, Human
uuaugggucacagga

SEQ ID NO: 3875767 - RNA, 22 nt, Human
uuaugguaacugcuuucuguuc

SEQ ID NO: 3875768 - RNA, 22 nt, Human
uuauguaaaaggccaaaccucu

SEQ ID NO: 3875769 - RNA, 16 nt, Human
uuauguaaaauguuuu

SEQ ID NO: 3875770 - RNA, 23 nt, Human
uuauguaaacaaaucuuuccaua

SEQ ID NO: 3875771 - RNA, 16 nt, Human
uuauguaaauaauucu

SEQ ID NO: 3875772 - RNA, 12 nt, Human
uuauguaaaucc

SEQ ID NO: 3875773 - RNA, 16 nt, Human
uuauguaauaauguga

SEQ ID NO: 3875774 - RNA, 17 nt, Human
uuauguaauaaugugaa

SEQ ID NO: 3875775 - RNA, 11 nt, Human
uuauguaauuu

SEQ ID NO: 3875776 - RNA, 16 nt, Human
uuauguagaugugcau

SEQ ID NO: 3875777 - RNA, 16 nt, Human
uuauguagcucuuugu

SEQ ID NO: 3875778 - RNA, 21 nt, Human
uuauguauauuuaaaagaaag

SEQ ID NO: 3875779 - RNA, 19 nt, Human
uuauguauguuuacacugu

SEQ ID NO: 3875780 - RNA, 14 nt, Human
uuauguauugugca

SEQ ID NO: 3875781 - RNA, 20 nt, Human
uuauguauugugcaaugugu

SEQ ID NO: 3875782 - RNA, 17 nt, Human
uuauguccacuguguau

SEQ ID NO: 3875783 - RNA, 18 nt, Human
uuaugucccuucacauag

SEQ ID NO: 3875784 - RNA, 17 nt, Human
uuaugucuauuuaagcc

SEQ ID NO: 3875785 - RNA, 19 nt, Human
uuaugucugcugaauaaua

SEQ ID NO: 3875786 - RNA, 11 nt, Human
uuaugucuggg

SEQ ID NO: 3875787 - RNA, 17 nt, Human
uuaugucuguggauuuu

SEQ ID NO: 3875788 - RNA, 13 nt, Human
uuaugucuuuuau

SEQ ID NO: 3875789 - RNA, 21 nt, Human
uuaugucuuuugaugaauaga

SEQ ID NO: 3875790 - RNA, 18 nt, Human
uuaugugccguguuauug

SEQ ID NO: 3875791 - RNA, 16 nt, Human
uuaugugcgcugauaa

SEQ ID NO: 3875792 - RNA, 15 nt, Human
uuaugugcuauuaau

SEQ ID NO: 3875793 - RNA, 19 nt, Human
uuauguggguugccuggug

SEQ ID NO: 3875794 - RNA, 18 nt, Human
uuaugugguuuuagauuu

SEQ ID NO: 3875795 - RNA, 13 nt, Human
uuauguguaugug

SEQ ID NO: 3875796 - RNA, 18 nt, Human
uuauguguaugugccauu

SEQ ID NO: 3875797 - RNA, 18 nt, Human
uuauguguguauauguau

SEQ ID NO: 3875798 - RNA, 22 nt, Human
uuauguguguauauguaugugu

SEQ ID NO: 3875799 - RNA, 19 nt, Human
uuauguuaaaacugggaca

SEQ ID NO: 3875800 - RNA, 11 nt, Human
uuauguuaaac

SEQ ID NO: 3875801 - RNA, 12 nt, Human
uuauguuaaacu

SEQ ID NO: 3875802 - RNA, 15 nt, Human
uuauguuacaucugu

SEQ ID NO: 3875803 - RNA, 13 nt, Human
uuauguuauauau

SEQ ID NO: 3875804 - RNA, 15 nt, Human
uuauguuauauauaa

SEQ ID NO: 3875805 - RNA, 17 nt, Human
uuauguuauauauaaau

SEQ ID NO: 3875806 - RNA, 18 nt, Human
uuauguuauauauaaaua

SEQ ID NO: 3875807 - RNA, 16 nt, Human
uuauguuguuagagaa

SEQ ID NO: 3875808 - RNA, 19 nt, Human
uuauguuguuuauaauaaa

SEQ ID NO: 3875809 - RNA, 12 nt, Human
uuauguuugaau

SEQ ID NO: 3875810 - RNA, 13 nt, Human
uuauguuugaaua

SEQ ID NO: 3875811 - RNA, 11 nt, Human
uuauguuugcc

SEQ ID NO: 3875812 - RNA, 20 nt, Human
uuauguuugccacuuugcaa

SEQ ID NO: 3875813 - RNA, 16 nt, Human
uuauguuuuguuucug

SEQ ID NO: 3875814 - RNA, 17 nt, Human
uuauguuuuuguacucu

SEQ ID NO: 3875815 - RNA, 15 nt, Human
uucaaaccugugaag

SEQ ID NO: 3875816 - RNA, 13 nt, Human
uucaaacuacuuu

SEQ ID NO: 3875817 - RNA, 22 nt, Human
uucaaacuacuuugcugcuaau

SEQ ID NO: 3875818 - RNA, 17 nt, Human
uucaaacugaaaagcug

SEQ ID NO: 3875819 - RNA, 15 nt, Human
uucaaacuggggccu

SEQ ID NO: 3875820 - RNA, 12 nt, Human
uucaaacuguga

SEQ ID NO: 3875821 - RNA, 13 nt, Human
uucaaagaaucac

SEQ ID NO: 3875822 - RNA, 23 nt, Human
uucaaagagaaaacaucucauca

SEQ ID NO: 3875823 - RNA, 13 nt, Human
uucaaagaugcug

SEQ ID NO: 3875824 - RNA, 17 nt, Human
uucaaagauucaaaauu

SEQ ID NO: 3875825 - RNA, 21 nt, Human
uucaaagccagcguccuccuc

SEQ ID NO: 3875826 - RNA, 13 nt, Human
uucaaagccauuu

SEQ ID NO: 3875827 - RNA, 14 nt, Human
uucaaaggaacauu

SEQ ID NO: 3875828 - RNA, 22 nt, Human
uucaaagggacggucaguuugg

SEQ ID NO: 3875829 - RNA, 16 nt, Human
uucaaagguucuaggu

SEQ ID NO: 3875830 - RNA, 21 nt, Human
uucaaagguucuagguuucaa

SEQ ID NO: 3875831 - RNA, 18 nt, Human
uucaaagucaugauguuu

SEQ ID NO: 3875832 - RNA, 19 nt, Human
uucaaaguuuaauaaauuu

SEQ ID NO: 3875833 - RNA, 19 nt, Human
uucaaauagggucuaacuc

SEQ ID NO: 3875834 - RNA, 19 nt, Human
uucaaaugguuuaacaaaa

SEQ ID NO: 3875835 - RNA, 14 nt, Human
uucaaaugugcugu

SEQ ID NO: 3875836 - RNA, 18 nt, Human
uucaaauguguuuugguc

SEQ ID NO: 3875837 - RNA, 18 nt, Human
uucaaauuggacuuucaa

SEQ ID NO: 3875838 - RNA, 23 nt, Human
uucaaauuguaagcaugcacaaa

SEQ ID NO: 3875839 - RNA, 21 nt, Human
uucaaauugugugugcucugc

SEQ ID NO: 3875840 - RNA, 13 nt, Human
uucaaauuucaca

SEQ ID NO: 3875841 - RNA, 21 nt, Human
uucaaauuuuuuaaaagagac

SEQ ID NO: 3875842 - RNA, 21 nt, Human
uucaacaaagaaacaaagaug

SEQ ID NO: 3875843 - RNA, 20 nt, Human
uucaacaaauaucuuguguu

SEQ ID NO: 3875844 - RNA, 22 nt, Human
uucaacaaauauucacuggccc

SEQ ID NO: 3875845 - RNA, 19 nt, Human
uucaacaauucuaaaauga

SEQ ID NO: 3875846 - RNA, 16 nt, Human
uucaacaggagaauuu

SEQ ID NO: 3875847 - RNA, 18 nt, Human
uucaacagugaagacaga

SEQ ID NO: 3875848 - RNA, 19 nt, Human
uucaacagugaagacagaa

SEQ ID NO: 3875849 - RNA, 14 nt, Human
uucaacaucaaugu

SEQ ID NO: 3875850 - RNA, 15 nt, Human
uucaacauccugcca

SEQ ID NO: 3875851 - RNA, 15 nt, Human
uucaaccauggacuu

SEQ ID NO: 3875852 - RNA, 20 nt, Human
uucaaccccacccuguuugg

SEQ ID NO: 3875853 - RNA, 21 nt, Human
uucaaccccacccuguuugga

SEQ ID NO: 3875854 - RNA, 15 nt, Human
uucaacccuggagag

SEQ ID NO: 3875855 - RNA, 15 nt, Human
uucaaccucuagaau

SEQ ID NO: 3875856 - RNA, 15 nt, Human
uucaacguuucuuca

SEQ ID NO: 3875857 - RNA, 11 nt, Human
uucaacuauuu

SEQ ID NO: 3875858 - RNA, 16 nt, Human
uucaacuucaggaaag

SEQ ID NO: 3875859 - RNA, 18 nt, Human
uucaacuugugccuggga

SEQ ID NO: 3875860 - RNA, 21 nt, Human
uucaagaaaaaauaaauggaa

SEQ ID NO: 3875861 - RNA, 22 nt, Human
uucaagaaagcuucaaacugca

SEQ ID NO: 3875862 - RNA, 15 nt, Human
uucaagaaaugaaga

SEQ ID NO: 3875863 - RNA, 16 nt, Human
uucaagaaccuggaaa

SEQ ID NO: 3875864 - RNA, 23 nt, Human
uucaagaaguucuuugauucugu

SEQ ID NO: 3875865 - RNA, 23 nt, Human
uucaagaauaaucacgcuuuccu

SEQ ID NO: 3875866 - RNA, 21 nt, Human
uucaagaggagcccccacccu

SEQ ID NO: 3875867 - RNA, 17 nt, Human
uucaagaucccauuuga

SEQ ID NO: 3875868 - RNA, 23 nt, Human
uucaagaucuaaaucauauauaa

SEQ ID NO: 3875869 - RNA, 16 nt, Human
uucaagcagcaucuuc

SEQ ID NO: 3875870 - RNA, 17 nt, Human
uucaagcagucgugccu

SEQ ID NO: 3875871 - RNA, 23 nt, Human
uucaagcagucgugccugugucc

SEQ ID NO: 3875872 - RNA, 16 nt, Human
uucaagcgauucucuu

SEQ ID NO: 3875873 - RNA, 21 nt, Human
uucaagcgauucuucugcuuc

SEQ ID NO: 3875874 - RNA, 16 nt, Human
uucaagcucugaggga

SEQ ID NO: 3875875 - RNA, 14 nt, Human
uucaagcugcuuuu

SEQ ID NO: 3875876 - RNA, 17 nt, Human
uucaagcugcuuuuugu

SEQ ID NO: 3875877 - RNA, 19 nt, Human
uucaagcuuauuuuggaga

SEQ ID NO: 3875878 - RNA, 20 nt, Human
uucaagcuuauuuuggagag

SEQ ID NO: 3875879 - RNA, 12 nt, Human
uucaaggaauca

SEQ ID NO: 3875880 - RNA, 15 nt, Human
uucaaggauccugag

SEQ ID NO: 3875881 - RNA, 16 nt, Human
uucaaggauccugagc

SEQ ID NO: 3875882 - RNA, 15 nt, Human
uucaaggcuuccacu

SEQ ID NO: 3875883 - RNA, 16 nt, Human
uucaagggcugcuuca

SEQ ID NO: 3875884 - RNA, 24 nt, Human
uucaaggggagccaaaaucucaag

SEQ ID NO: 3875885 - RNA, 15 nt, Human
uucaagguaaaauuc

SEQ ID NO: 3875886 - RNA, 19 nt, Human
uucaagguaaaauucuaaa

SEQ ID NO: 3875887 - RNA, 19 nt, Human
uucaagguaauuucuugug

SEQ ID NO: 3875888 - RNA, 22 nt, Human
uucaaggucacuguuuccuggg

SEQ ID NO: 3875889 - RNA, 14 nt, Human
uucaaggugacaga

SEQ ID NO: 3875890 - RNA, 15 nt, Human
uucaaguauuuaagc

SEQ ID NO: 3875891 - RNA, 16 nt, Human
uucaaguauuuaagcc

SEQ ID NO: 3875892 - RNA, 22 nt, Human
uucaagugcaugcucucugcag

SEQ ID NO: 3875893 - RNA, 13 nt, Human
uucaagugccuuu

SEQ ID NO: 3875894 - RNA, 23 nt, Human
uucaagugccuuucugcaguuuu

SEQ ID NO: 3875895 - RNA, 22 nt, Human
uucaaguggggcucgccaugcc

SEQ ID NO: 3875896 - RNA, 17 nt, Human
uucaaguuaaauuuuau

SEQ ID NO: 3875897 - RNA, 16 nt, Human
uucaaguuagcucagg

SEQ ID NO: 3875898 - RNA, 17 nt, Human
uucaaguuagcucagga

SEQ ID NO: 3875899 - RNA, 22 nt, Human
uucaaguuguaaauaauuuauu

SEQ ID NO: 3875900 - RNA, 16 nt, Human
uucaaguuuuaaaguu

SEQ ID NO: 3875901 - RNA, 20 nt, Human
uucaauaaagcauuuauaaa

SEQ ID NO: 3875902 - RNA, 12 nt, Human
uucaauaaagcu

SEQ ID NO: 3875903 - RNA, 13 nt, Human
uucaauaaaguau

SEQ ID NO: 3875904 - RNA, 19 nt, Human
uucaauaaaguauuuaauu

SEQ ID NO: 3875905 - RNA, 13 nt, Human
uucaauaaaguuu

SEQ ID NO: 3875906 - RNA, 16 nt, Human
uucaauaaaguuugau

SEQ ID NO: 3875907 - RNA, 18 nt, Human
uucaauaaaugucuguug

SEQ ID NO: 3875908 - RNA, 22 nt, Human
uucaauacaaacaaucucuuaa

SEQ ID NO: 3875909 - RNA, 12 nt, Human
uucaauacagau

SEQ ID NO: 3875910 - RNA, 15 nt, Human
uucaauagccacuaa

SEQ ID NO: 3875911 - RNA, 17 nt, Human
uucaauagccacuaacc

SEQ ID NO: 3875912 - RNA, 21 nt, Human
uucaauaggaaaaacugauuu

SEQ ID NO: 3875913 - RNA, 15 nt, Human
uucaauauccuuugc

SEQ ID NO: 3875914 - RNA, 14 nt, Human
uucaauauugacau

SEQ ID NO: 3875915 - RNA, 16 nt, Human
uucaauauugacauuu

SEQ ID NO: 3875916 - RNA, 18 nt, Human
uucaauauugacauuugu

SEQ ID NO: 3875917 - RNA, 11 nt, Human
uucaauauuua

SEQ ID NO: 3875918 - RNA, 11 nt, Human
uucaauauuuu

SEQ ID NO: 3875919 - RNA, 16 nt, Human
uucaauauuuucuuuu

SEQ ID NO: 3875920 - RNA, 12 nt, Human
uucaaucacugu

SEQ ID NO: 3875921 - RNA, 22 nt, Human
uucaaucucguauagaagucuu

SEQ ID NO: 3875922 - RNA, 19 nt, Human
uucaaucuggauucauauu

SEQ ID NO: 3875923 - RNA, 15 nt, Human
uucaaucuguaaacu

SEQ ID NO: 3875924 - RNA, 17 nt, Human
uucaaucuguaaacugu

SEQ ID NO: 3875925 - RNA, 15 nt, Human
uucaaugaucuaggu

SEQ ID NO: 3875926 - RNA, 19 nt, Human
uucaaugaucuagguuuaa

SEQ ID NO: 3875927 - RNA, 22 nt, Human
uucaaugaucuagguuuaacuc

SEQ ID NO: 3875928 - RNA, 17 nt, Human
uucaaugggcucuucca

SEQ ID NO: 3875929 - RNA, 20 nt, Human
uucaaugguuugcaaggaag

SEQ ID NO: 3875930 - RNA, 15 nt, Human
uucaauguaauuaaa

SEQ ID NO: 3875931 - RNA, 14 nt, Human
uucaauguguauaa

SEQ ID NO: 3875932 - RNA, 21 nt, Human
uucaauguguauaaauugucu

SEQ ID NO: 3875933 - RNA, 19 nt, Human
uucaauucaaaaauguaca

SEQ ID NO: 3875934 - RNA, 13 nt, Human
uucaauucagugc

SEQ ID NO: 3875935 - RNA, 14 nt, Human
uucaauuccugggc

SEQ ID NO: 3875936 - RNA, 18 nt, Human
uucaauucucauuuguca

SEQ ID NO: 3875937 - RNA, 12 nt, Human
uucaauuguaaa

SEQ ID NO: 3875938 - RNA, 22 nt, Human
uucaauuugauguggugaaaag

SEQ ID NO: 3875939 - RNA, 14 nt, Human
uucaauuuuaaaga

SEQ ID NO: 3875940 - RNA, 15 nt, Human
uucacaaaauuucca

SEQ ID NO: 3875941 - RNA, 15 nt, Human
uucacaaagcccaag

SEQ ID NO: 3875942 - RNA, 11 nt, Human
uucacaaauau

SEQ ID NO: 3875943 - RNA, 14 nt, Human
uucacaaauauuaa

SEQ ID NO: 3875944 - RNA, 15 nt, Human
uucacaaauauuaaa

SEQ ID NO: 3875945 - RNA, 19 nt, Human
uucacaaauauuaaaaagu

SEQ ID NO: 3875946 - RNA, 20 nt, Human
uucacaaauauuaaaaaguc

SEQ ID NO: 3875947 - RNA, 22 nt, Human
uucacaaauauuaaaaagucuu

SEQ ID NO: 3875948 - RNA, 22 nt, Human
uucacaacagccugacaacauu

SEQ ID NO: 3875949 - RNA, 12 nt, Human
uucacaaccugg

SEQ ID NO: 3875950 - RNA, 23 nt, Human
uucacaagacccaaaaggcagaa

SEQ ID NO: 3875951 - RNA, 13 nt, Human
uucacaagcugcc

SEQ ID NO: 3875952 - RNA, 15 nt, Human
uucacaaguuaagau

SEQ ID NO: 3875953 - RNA, 13 nt, Human
uucacaauagaaa

SEQ ID NO: 3875954 - RNA, 13 nt, Human
uucacaauguggc

SEQ ID NO: 3875955 - RNA, 14 nt, Human
uucacaccccaccu

SEQ ID NO: 3875956 - RNA, 15 nt, Human
uucacaccccaccug

SEQ ID NO: 3875957 - RNA, 11 nt, Human
uucacacccug

SEQ ID NO: 3875958 - RNA, 19 nt, Human
uucacaccugacucugaaa

SEQ ID NO: 3875959 - RNA, 21 nt, Human
uucacacugcaagagccuugg

SEQ ID NO: 3875960 - RNA, 17 nt, Human
uucucaucacuccccuc

SEQ ID NO: 3875961 - RNA, 12 nt, Human
uucucaucagua

SEQ ID NO: 3875962 - RNA, 17 nt, Human
uucucaucccacgcacu

SEQ ID NO: 3875963 - RNA, 14 nt, Human
uucucaucugcacc

SEQ ID NO: 3875964 - RNA, 17 nt, Human
uucucaugauuuacaga

SEQ ID NO: 3875965 - RNA, 21 nt, Human
uucucaugccucagccuccug

SEQ ID NO: 3875966 - RNA, 17 nt, Human
uucucaugugauccuuu

SEQ ID NO: 3875967 - RNA, 18 nt, Human
uucucaugugauccuuuu

SEQ ID NO: 3875968 - RNA, 20 nt, Human
uucucauguugaagccacug

SEQ ID NO: 3875969 - RNA, 21 nt, Human
uucucauuacuuguugccuau

SEQ ID NO: 3875970 - RNA, 11 nt, Human
uucucauucuu

SEQ ID NO: 3875971 - RNA, 21 nt, Human
uucucauuggaaauuuagcau

SEQ ID NO: 3875972 - RNA, 19 nt, Human
uucucauuucaccccuccc

SEQ ID NO: 3875973 - RNA, 17 nt, Human
uucucauuuuuuaaaaa

SEQ ID NO: 3875974 - RNA, 22 nt, Human
uucucauuuuuuaaaaaagcuu

SEQ ID NO: 3875975 - RNA, 23 nt, Human
uucucauuuuuuaaaaaagcuua

SEQ ID NO: 3875976 - RNA, 22 nt, Human
uucuccaacaucacagcccagc

SEQ ID NO: 3875977 - RNA, 16 nt, Human
uucuccaagcaggaca

SEQ ID NO: 3875978 - RNA, 19 nt, Human
uucuccaauaucagugcuc

SEQ ID NO: 3875979 - RNA, 15 nt, Human
uucuccacagcaacc

SEQ ID NO: 3875980 - RNA, 13 nt, Human
uucuccacccugc

SEQ ID NO: 3875981 - RNA, 16 nt, Human
uucuccacccugcucu

SEQ ID NO: 3875982 - RNA, 14 nt, Human
uucuccagaaccca

SEQ ID NO: 3875983 - RNA, 19 nt, Human
uucuccagacccaccacac

SEQ ID NO: 3875984 - RNA, 17 nt, Human
uucuccagauuuuuaau

SEQ ID NO: 3875985 - RNA, 17 nt, Human
uucuccagccuggaccc

SEQ ID NO: 3875986 - RNA, 14 nt, Human
uucuccagcucaga

SEQ ID NO: 3875987 - RNA, 17 nt, Human
uucuccagucauuaugu

SEQ ID NO: 3875988 - RNA, 15 nt, Human
uucuccauccuacca

SEQ ID NO: 3875989 - RNA, 19 nt, Human
uucuccaucucucuggccc

SEQ ID NO: 3875990 - RNA, 18 nt, Human
uucuccauggcccugcca

SEQ ID NO: 3875991 - RNA, 12 nt, Human
uucucccaggaa

SEQ ID NO: 3875992 - RNA, 13 nt, Human
uucuccccagaau

SEQ ID NO: 3875993 - RNA, 12 nt, Human
uucuccccagcu

SEQ ID NO: 3875994 - RNA, 21 nt, Human
uucucccccauguucuguccc

SEQ ID NO: 3875995 - RNA, 17 nt, Human
uucucccccccggggcu

SEQ ID NO: 3875996 - RNA, 18 nt, Human
uucucccccugggcucug

SEQ ID NO: 3875997 - RNA, 16 nt, Human
uucuccccugcacugu

SEQ ID NO: 3875998 - RNA, 15 nt, Human
uucuccccugccccc

SEQ ID NO: 3875999 - RNA, 23 nt, Human
uucuccccugcccccaggacugg

SEQ ID NO: 3876000 - RNA, 13 nt, Human
uucuccccuucca

SEQ ID NO: 3876001 - RNA, 22 nt, Human
uucuccccuuccauuucugccu

SEQ ID NO: 3876002 - RNA, 20 nt, Human
uucucccuccuucccuuccu

SEQ ID NO: 3876003 - RNA, 15 nt, Human
uucuccgccagccuc

SEQ ID NO: 3876004 - RNA, 20 nt, Human
uucuccgccagccuccucug

SEQ ID NO: 3876005 - RNA, 16 nt, Human
uucuccguuagcuccu

SEQ ID NO: 3876006 - RNA, 17 nt, Human
uucuccguuagcuccug

SEQ ID NO: 3876007 - RNA, 19 nt, Human
uucuccguuagcuccugug

SEQ ID NO: 3876008 - RNA, 18 nt, Human
uucuccucacuguaucca

SEQ ID NO: 3876009 - RNA, 19 nt, Human
uucuccucccuuccuuuuc

SEQ ID NO: 3876010 - RNA, 14 nt, Human
uucuccucuccccu

SEQ ID NO: 3876011 - RNA, 13 nt, Human
uucuccucuugua

SEQ ID NO: 3876012 - RNA, 14 nt, Human
uucuccucuuguaa

SEQ ID NO: 3876013 - RNA, 17 nt, Human
uucuccucuuguaaaua

SEQ ID NO: 3876014 - RNA, 12 nt, Human
uucuccugccuc

SEQ ID NO: 3876015 - RNA, 13 nt, Human
uucuccugccuca

SEQ ID NO: 3876016 - RNA, 15 nt, Human
uucuccugccugugc

SEQ ID NO: 3876017 - RNA, 22 nt, Human
uucuccugcugcucccucagac

SEQ ID NO: 3876018 - RNA, 20 nt, Human
uucuccuuaagagacaauuu

SEQ ID NO: 3876019 - RNA, 15 nt, Human
uucuccuuagucuuc

SEQ ID NO: 3876020 - RNA, 20 nt, Human
uucuccuuagucuucucaua

SEQ ID NO: 3876021 - RNA, 18 nt, Human
uucuccuuucacaaccuu

SEQ ID NO: 3876022 - RNA, 22 nt, Human
uucuccuuucacaaccuucugu

SEQ ID NO: 3876023 - RNA, 20 nt, Human
uucuccuuugauaaaauaaa

SEQ ID NO: 3876024 - RNA, 14 nt, Human
uucuccuuuguacu

SEQ ID NO: 3876025 - RNA, 16 nt, Human
uucuccuuuugaaaag

SEQ ID NO: 3876026 - RNA, 17 nt, Human
uucucgauuuuaucuuu

SEQ ID NO: 3876027 - RNA, 19 nt, Human
uucucguccucguuugugu

SEQ ID NO: 3876028 - RNA, 17 nt, Human
uucucgugccuccccac

SEQ ID NO: 3876029 - RNA, 23 nt, Human
uucucuaaaugaggggccucagg

SEQ ID NO: 3876030 - RNA, 19 nt, Human
uucucuaagagaacaaugu

SEQ ID NO: 3876031 - RNA, 24 nt, Human
uucucuaagagaacaaugugcuau

SEQ ID NO: 3876032 - RNA, 20 nt, Human
uucucuaaguuccacugagc

SEQ ID NO: 3876033 - RNA, 14 nt, Human
uucucuaauaauaa

SEQ ID NO: 3876034 - RNA, 20 nt, Human
uucucuaauaauaaauaguu

SEQ ID NO: 3876035 - RNA, 20 nt, Human
uucucuaguuugauuaaauu

SEQ ID NO: 3876036 - RNA, 21 nt, Human
uucucuaguuugauuaaauuc

SEQ ID NO: 3876037 - RNA, 15 nt, Human
uucucuauuaaaaug

SEQ ID NO: 3876038 - RNA, 15 nt, Human
uucucucaacaccau

SEQ ID NO: 3876039 - RNA, 11 nt, Human
uucucucagac

SEQ ID NO: 3876040 - RNA, 20 nt, Human
uucucucagccuuacauuug

SEQ ID NO: 3876041 - RNA, 23 nt, Human
uucucucaucucuuagcuccccu

SEQ ID NO: 3876042 - RNA, 13 nt, Human
uucucuccagccc

SEQ ID NO: 3876043 - RNA, 16 nt, Human
uucucuccagccccug

SEQ ID NO: 3876044 - RNA, 14 nt, Human
uucucuccccaacc

SEQ ID NO: 3876045 - RNA, 18 nt, Human
uucucucccugccagagg

SEQ ID NO: 3876046 - RNA, 14 nt, Human
uucucuccucccca

SEQ ID NO: 3876047 - RNA, 22 nt, Human
uucucuccuguaccucuugagc

SEQ ID NO: 3876048 - RNA, 16 nt, Human
uucucucuccugucca

SEQ ID NO: 3876049 - RNA, 21 nt, Human
uucucucugccugugagccag

SEQ ID NO: 3876050 - RNA, 20 nt, Human
uucucucuuuauacagcugu

SEQ ID NO: 3876051 - RNA, 20 nt, Human
uucucugaacacaggcagcu

SEQ ID NO: 3876052 - RNA, 15 nt, Human
uucucugaagggagg

SEQ ID NO: 3876053 - RNA, 12 nt, Human
uucucugacuuc

SEQ ID NO: 3876054 - RNA, 16 nt, Human
uucucugacuucugcc

SEQ ID NO: 3876055 - RNA, 18 nt, Human
uucucugaggaagcuggg

SEQ ID NO: 3876056 - RNA, 20 nt, Human
uucucugaggacaagagaaa

SEQ ID NO: 3876057 - RNA, 20 nt, Human
uucucugaggacacuaacca

SEQ ID NO: 3876058 - RNA, 15 nt, Human
uucucugcccagcuu

SEQ ID NO: 3876059 - RNA, 18 nt, Human
uucucugcccagcuuuuc

SEQ ID NO: 3876060 - RNA, 21 nt, Human
uucucugccgcuaccucccuc

SEQ ID NO: 3876061 - RNA, 19 nt, Human
uucucugccuuugacauuu

SEQ ID NO: 3876062 - RNA, 20 nt, Human
uucucugccuuugacauuua

SEQ ID NO: 3876063 - RNA, 14 nt, Human
uucucugcuccacc

SEQ ID NO: 3876064 - RNA, 17 nt, Human
uucucuggagccaaguc

SEQ ID NO: 3876065 - RNA, 16 nt, Human
uucucugggagaaaau

SEQ ID NO: 3876066 - RNA, 19 nt, Human
uucucugggagaaaaucau

SEQ ID NO: 3876067 - RNA, 23 nt, Human
uucucugggagaaaaucaucaag

SEQ ID NO: 3876068 - RNA, 13 nt, Human
uucucuguacuuu

SEQ ID NO: 3876069 - RNA, 17 nt, Human
uucucugucucagacuu

SEQ ID NO: 3876070 - RNA, 17 nt, Human
uucucugucucauccau

SEQ ID NO: 3876071 - RNA, 19 nt, Human
uucucugugacccacuucu

SEQ ID NO: 3876072 - RNA, 20 nt, Human
uucucuguugucguaaagau

SEQ ID NO: 3876073 - RNA, 22 nt, Human
uucucuguugucguaaagauuu

SEQ ID NO: 3876074 - RNA, 15 nt, Human
uucucuuaauuuaau

SEQ ID NO: 3876075 - RNA, 12 nt, Human
uucucuuagaaa

SEQ ID NO: 3876076 - RNA, 18 nt, Human
uucucuuagcaacucaga

SEQ ID NO: 3876077 - RNA, 19 nt, Human
uucucuucauauucagcuu

SEQ ID NO: 3876078 - RNA, 12 nt, Human
uucucuuccugu

SEQ ID NO: 3876079 - RNA, 12 nt, Human
uucucuucucug

SEQ ID NO: 3876080 - RNA, 14 nt, Human
uucucuugagcugg

SEQ ID NO: 3876081 - RNA, 20 nt, Human
uucucuugagcuggccucuc

SEQ ID NO: 3876082 - RNA, 12 nt, Human
uucucuugccuc

SEQ ID NO: 3876083 - RNA, 15 nt, Human
uucucuugggcugag

SEQ ID NO: 3876084 - RNA, 21 nt, Human
uucucuugguguuaaaacacu

SEQ ID NO: 3876085 - RNA, 19 nt, Human
uucucuuguauaagauccu

SEQ ID NO: 3876086 - RNA, 15 nt, Human
uucucuuuaacucag

SEQ ID NO: 3876087 - RNA, 13 nt, Human
uucucuuucaaag

SEQ ID NO: 3876088 - RNA, 16 nt, Human
uucucuuuccaugaca

SEQ ID NO: 3876089 - RNA, 14 nt, Human
uucucuuucucucc

SEQ ID NO: 3876090 - RNA, 16 nt, Human
uucucuuucucuccuu

SEQ ID NO: 3876091 - RNA, 16 nt, Human
uucucuuucuuuacaa

SEQ ID NO: 3876092 - RNA, 22 nt, Human
uucucuuucuuuacaagauggg

SEQ ID NO: 3876093 - RNA, 22 nt, Human
uucucuuugauuauuugcaugu

SEQ ID NO: 3876094 - RNA, 15 nt, Human
uucucuuugccucaa

SEQ ID NO: 3876095 - RNA, 17 nt, Human
uucucuuugguguacaa

SEQ ID NO: 3876096 - RNA, 16 nt, Human
uucucuuuucaaaaca

SEQ ID NO: 3876097 - RNA, 21 nt, Human
uucucuuuucaagaaguucuu

SEQ ID NO: 3876098 - RNA, 19 nt, Human
uucugaaaauuaacacugc

SEQ ID NO: 3876099 - RNA, 16 nt, Human
uucugaaaauuccaga

SEQ ID NO: 3876100 - RNA, 13 nt, Human
uucugaaacuaau

SEQ ID NO: 3876101 - RNA, 18 nt, Human
uucugaaacuaaugaaag

SEQ ID NO: 3876102 - RNA, 15 nt, Human
uucugaaagggacgc

SEQ ID NO: 3876103 - RNA, 14 nt, Human
uucugaaauauuuu

SEQ ID NO: 3876104 - RNA, 20 nt, Human
uucugaaaugucaguucuga

SEQ ID NO: 3876105 - RNA, 13 nt, Human
uucuuauaaauau

SEQ ID NO: 3876106 - RNA, 17 nt, Human
uucuuauaaauaugaag

SEQ ID NO: 3876107 - RNA, 13 nt, Human
uucuuauaauacu

SEQ ID NO: 3876108 - RNA, 19 nt, Human
uucuuauaauacucuguug

SEQ ID NO: 3876109 - RNA, 23 nt, Human
uucuuaugccauguuaauuucau

SEQ ID NO: 3876110 - RNA, 15 nt, Human
uucuuauggaauuga

SEQ ID NO: 3876111 - RNA, 17 nt, Human
uucuuauggaauugauu

SEQ ID NO: 3876112 - RNA, 13 nt, Human
uucuuaugugaca

SEQ ID NO: 3876113 - RNA, 16 nt, Human
uucuuaugugacauua

SEQ ID NO: 3876114 - RNA, 20 nt, Human
uucuuaugugacauuaacaa

SEQ ID NO: 3876115 - RNA, 19 nt, Human
uucuuauugcgcugcuacc

SEQ ID NO: 3876116 - RNA, 15 nt, Human
uucuuauugcuuuua

SEQ ID NO: 3876117 - RNA, 21 nt, Human
uucuuauuuaaucuuuucuua

SEQ ID NO: 3876118 - RNA, 11 nt, Human
uucuucaaaau

SEQ ID NO: 3876119 - RNA, 21 nt, Human
uucuucaaaauauaaaaugcc

SEQ ID NO: 3876120 - RNA, 23 nt, Human
uucuucaaaauauaaaaugccaa

SEQ ID NO: 3876121 - RNA, 15 nt, Human
uucuucaaaauguau

SEQ ID NO: 3876122 - RNA, 17 nt, Human
uucuucaaccagcagau

SEQ ID NO: 3876123 - RNA, 14 nt, Human
uucuucacccagcu

SEQ ID NO: 3876124 - RNA, 14 nt, Human
uucuucacugcaac

SEQ ID NO: 3876125 - RNA, 14 nt, Human
uucuucagaagaca

SEQ ID NO: 3876126 - RNA, 13 nt, Human
uucuucagagacu

SEQ ID NO: 3876127 - RNA, 17 nt, Human
uucuucagaucagugcu

SEQ ID NO: 3876128 - RNA, 23 nt, Human
uucuucaggcugccuaagacaug

SEQ ID NO: 3876129 - RNA, 24 nt, Human
uucuucaggcugccuaagacaugu

SEQ ID NO: 3876130 - RNA, 13 nt, Human
uucuucaguuggu

SEQ ID NO: 3876131 - RNA, 21 nt, Human
uucuucauccggcagccugga

SEQ ID NO: 3876132 - RNA, 20 nt, Human
uucuuccaggugcccagcua

SEQ ID NO: 3876133 - RNA, 14 nt, Human
uucuuccaucugau

SEQ ID NO: 3876134 - RNA, 19 nt, Human
uucuucccaacuugccuuu

SEQ ID NO: 3876135 - RNA, 21 nt, Human
uucuucccaacuugccuuuga

SEQ ID NO: 3876136 - RNA, 20 nt, Human
uucuucccaauagcaaggcu

SEQ ID NO: 3876137 - RNA, 17 nt, Human
uucuucccauucuccau

SEQ ID NO: 3876138 - RNA, 18 nt, Human
uucuucccuuaaaauuua

SEQ ID NO: 3876139 - RNA, 22 nt, Human
uucuucccuuuuaaacacauuu

SEQ ID NO: 3876140 - RNA, 16 nt, Human
uucuuccucagccagc

SEQ ID NO: 3876141 - RNA, 13 nt, Human
uucuuccucugcu

SEQ ID NO: 3876142 - RNA, 18 nt, Human
uucuuccuuaaacuccug

SEQ ID NO: 3876143 - RNA, 17 nt, Human
uucuuccuuuacuuucc

SEQ ID NO: 3876144 - RNA, 17 nt, Human
uucuucgggaagagagg

SEQ ID NO: 3876145 - RNA, 15 nt, Human
uucuucuagaguuca

SEQ ID NO: 3876146 - RNA, 20 nt, Human
uucuucuauugccucugaga

SEQ ID NO: 3876147 - RNA, 23 nt, Human
uucuucucaggcaugaacaugua

SEQ ID NO: 3876148 - RNA, 13 nt, Human
uucuucucccuca

SEQ ID NO: 3876149 - RNA, 17 nt, Human
uucuucuccuaugugua

SEQ ID NO: 3876150 - RNA, 14 nt, Human
uucuucugaggccu

SEQ ID NO: 3876151 - RNA, 13 nt, Human
uucuucugcuuca

SEQ ID NO: 3876152 - RNA, 20 nt, Human
uucuucugcuucagccuccc

SEQ ID NO: 3876153 - RNA, 13 nt, Human
uucuucuguaaua

SEQ ID NO: 3876154 - RNA, 14 nt, Human
uucuucuguaauau

SEQ ID NO: 3876155 - RNA, 13 nt, Human
uucuucuguauuu

SEQ ID NO: 3876156 - RNA, 21 nt, Human
uucuucuguguuuauaaaaua

SEQ ID NO: 3876157 - RNA, 16 nt, Human
uucuucuugaggggaa

SEQ ID NO: 3876158 - RNA, 17 nt, Human
uucuucuuuuugcuuca

SEQ ID NO: 3876159 - RNA, 16 nt, Human
uucuugaaagaagaau

SEQ ID NO: 3876160 - RNA, 14 nt, Human
uucuugaaagcugu

SEQ ID NO: 3876161 - RNA, 15 nt, Human
uucuugaaagcugug

SEQ ID NO: 3876162 - RNA, 21 nt, Human
uucuugaggggaagcuagucu

SEQ ID NO: 3876163 - RNA, 20 nt, Human
uucuugauguaaaaucuugu

SEQ ID NO: 3876164 - RNA, 18 nt, Human
uucuugauuaaagugauu

SEQ ID NO: 3876165 - RNA, 12 nt, Human
uucuugcaaagu

SEQ ID NO: 3876166 - RNA, 13 nt, Human
uucuugcaaagua

SEQ ID NO: 3876167 - RNA, 14 nt, Human
uucuugcauauuuu

SEQ ID NO: 3876168 - RNA, 16 nt, Human
uucuugcauccuuccu

SEQ ID NO: 3876169 - RNA, 12 nt, Human
uucuugccucau

SEQ ID NO: 3876170 - RNA, 18 nt, Human
uucuugccugaacuccug

SEQ ID NO: 3876171 - RNA, 22 nt, Human
uucuugcgauaguuuacugaga

SEQ ID NO: 3876172 - RNA, 17 nt, Human
uucuugcucccuucagc

SEQ ID NO: 3876173 - RNA, 22 nt, Human
uucuugcucgggucccuucacc

SEQ ID NO: 3876174 - RNA, 12 nt, Human
uucuugcugccc

SEQ ID NO: 3876175 - RNA, 14 nt, Human
uucuugcugcccug

SEQ ID NO: 3876176 - RNA, 18 nt, Human
uucuugcugcccugcccc

SEQ ID NO: 3876177 - RNA, 16 nt, Human
uucuugcugcuagaac

SEQ ID NO: 3876178 - RNA, 23 nt, Human
uucuugcugguugucauuuuugc

SEQ ID NO: 3876179 - RNA, 12 nt, Human
uucuugcuugua

SEQ ID NO: 3876180 - RNA, 21 nt, Human
uucuuggcaauaaauuuugaa

SEQ ID NO: 3876181 - RNA, 21 nt, Human
uucuugguaaaguccuuuucu

SEQ ID NO: 3876182 - RNA, 14 nt, Human
uucuugguagagau

SEQ ID NO: 3876183 - RNA, 16 nt, Human
uucuugguagagauuc

SEQ ID NO: 3876184 - RNA, 21 nt, Human
uucuugguauuuggauaucug

SEQ ID NO: 3876185 - RNA, 21 nt, Human
uucuuggugcuuacacaucuc

SEQ ID NO: 3876186 - RNA, 15 nt, Human
uucuugguuuguaaa

SEQ ID NO: 3876187 - RNA, 23 nt, Human
uucuugguuuguaaauuaacuuu

SEQ ID NO: 3876188 - RNA, 22 nt, Human
uucuuguaaauguguuggacaa

SEQ ID NO: 3876189 - RNA, 12 nt, Human
uucuuguaauuu

SEQ ID NO: 3876190 - RNA, 12 nt, Human
uucuuguacagu

SEQ ID NO: 3876191 - RNA, 12 nt, Human
uucuuguaucug

SEQ ID NO: 3876192 - RNA, 13 nt, Human
uucuugucaaaaa

SEQ ID NO: 3876193 - RNA, 16 nt, Human
uucuugucagacauaa

SEQ ID NO: 3876194 - RNA, 20 nt, Human
uucuugucagacauaaagcc

SEQ ID NO: 3876195 - RNA, 13 nt, Human
uucuugucuauaa

SEQ ID NO: 3876196 - RNA, 21 nt, Human
uucuugucuauaaagcauuua

SEQ ID NO: 3876197 - RNA, 23 nt, Human
uucuugucuauaguugucaguau

SEQ ID NO: 3876198 - RNA, 22 nt, Human
uucuugugacagauuauacaga

SEQ ID NO: 3876199 - RNA, 17 nt, Human
uucuugugaucuugcuc

SEQ ID NO: 3876200 - RNA, 22 nt, Human
uucuugugccauagucacaugg

SEQ ID NO: 3876201 - RNA, 17 nt, Human
uucuuguuggugcacag

SEQ ID NO: 3876202 - RNA, 15 nt, Human
uucuuguuuauugag

SEQ ID NO: 3876203 - RNA, 14 nt, Human
uucuuguuuccuug

SEQ ID NO: 3876204 - RNA, 16 nt, Human
uucuuguuuugcuucc

SEQ ID NO: 3876205 - RNA, 16 nt, Human
uucuuuaaaagaauga

SEQ ID NO: 3876206 - RNA, 17 nt, Human
uucuuuaaaagaaugac

SEQ ID NO: 3876207 - RNA, 18 nt, Human
uucuuuaaaagaaugacu

SEQ ID NO: 3876208 - RNA, 19 nt, Human
uucuuuaaaagaaugggca

SEQ ID NO: 3876209 - RNA, 20 nt, Human
uucuuuaaaauguaaagcca

SEQ ID NO: 3876210 - RNA, 22 nt, Human
uucuuuaaagaaguugaaguuu

SEQ ID NO: 3876211 - RNA, 14 nt, Human
uucuuuaaccaguc

SEQ ID NO: 3876212 - RNA, 16 nt, Human
uucuuuaaccuuguau

SEQ ID NO: 3876213 - RNA, 21 nt, Human
uucuuuaagaauuacagguug

SEQ ID NO: 3876214 - RNA, 18 nt, Human
uucuuuaaugcuuuuaua

SEQ ID NO: 3876215 - RNA, 12 nt, Human
uucuuuaauuuu

SEQ ID NO: 3876216 - RNA, 18 nt, Human
uucuuuaauuuuggaauu

SEQ ID NO: 3876217 - RNA, 11 nt, Human
uucuuuacaaa

SEQ ID NO: 3876218 - RNA, 14 nt, Human
uucuuuaccugaga

SEQ ID NO: 3876219 - RNA, 23 nt, Human
uucuuuagagaacugaaaagaga

SEQ ID NO: 3876220 - RNA, 12 nt, Human
uucuuuagucuu

SEQ ID NO: 3876221 - RNA, 19 nt, Human
uucuuucaagggcuuuccu

SEQ ID NO: 3876222 - RNA, 20 nt, Human
uucuuucaagugaaucuaaa

SEQ ID NO: 3876223 - RNA, 22 nt, Human
uucuuucaagugaaucuaaaag

SEQ ID NO: 3876224 - RNA, 18 nt, Human
uucuuucaauacagauau

SEQ ID NO: 3876225 - RNA, 15 nt, Human
uucuuucaauucugu

SEQ ID NO: 3876226 - RNA, 13 nt, Human
uucuuucauuucu

SEQ ID NO: 3876227 - RNA, 14 nt, Human
uucuuucauuuucu

SEQ ID NO: 3876228 - RNA, 14 nt, Human
uucuuuccaaagua

SEQ ID NO: 3876229 - RNA, 21 nt, Human
uucuuuccaaaguacacuguu

SEQ ID NO: 3876230 - RNA, 18 nt, Human
uucuuuccacagaagcuc

SEQ ID NO: 3876231 - RNA, 16 nt, Human
uucuuucccagugagu

SEQ ID NO: 3876232 - RNA, 21 nt, Human
uucuuuccugaggcugggcuc

SEQ ID NO: 3876233 - RNA, 18 nt, Human
uucuuucuaguggucuuu

SEQ ID NO: 3876234 - RNA, 16 nt, Human
uucuuucuauuugacu

SEQ ID NO: 3876235 - RNA, 15 nt, Human
uucuuucucacuaaa

SEQ ID NO: 3876236 - RNA, 23 nt, Human
uucuuucucucagccuuacauuu

SEQ ID NO: 3876237 - RNA, 22 nt, Human
uucuuucuggcuaugcauuuga

SEQ ID NO: 3876238 - RNA, 13 nt, Human
uucuuucuuagaa

SEQ ID NO: 3876239 - RNA, 14 nt, Human
uucuuucuuagaaa

SEQ ID NO: 3876240 - RNA, 15 nt, Human
uucuuucuuagaaau

SEQ ID NO: 3876241 - RNA, 11 nt, Human
uucuuugaaaa

SEQ ID NO: 3876242 - RNA, 15 nt, Human
uucuuugaaauuguu

SEQ ID NO: 3876243 - RNA, 14 nt, Human
uucuuugaauaaau

SEQ ID NO: 3876244 - RNA, 11 nt, Human
uucuuugaaug

SEQ ID NO: 3876245 - RNA, 17 nt, Human
uucuuugaauuuucauu

SEQ ID NO: 3876246 - RNA, 17 nt, Human
uucuuugagacuggguc

SEQ ID NO: 3876247 - RNA, 22 nt, Human
uucuuugagggacugccucugc

SEQ ID NO: 3876248 - RNA, 15 nt, Human
uucuuugaucaugaa

SEQ ID NO: 3876249 - RNA, 17 nt, Human
uucuuugaucaugaaua

SEQ ID NO: 3876250 - RNA, 22 nt, Human
uucuuugauguuaacacauuuu

SEQ ID NO: 3876251 - RNA, 23 nt, Human
uuguagcauauaggugauguuug

SEQ ID NO: 3876252 - RNA, 17 nt, Human
uuguagcauccucuuua

SEQ ID NO: 3876253 - RNA, 16 nt, Human
uuguagcauccuggaa

SEQ ID NO: 3876254 - RNA, 16 nt, Human
uuguagcauuucuuga

SEQ ID NO: 3876255 - RNA, 15 nt, Human
uuguagccagccggg

SEQ ID NO: 3876256 - RNA, 17 nt, Human
uuguagcccaggcugga

SEQ ID NO: 3876257 - RNA, 15 nt, Human
uuguagccuuuugac

SEQ ID NO: 3876258 - RNA, 14 nt, Human
uuguagcuggggcu

SEQ ID NO: 3876259 - RNA, 13 nt, Human
uuguagcuguaaa

SEQ ID NO: 3876260 - RNA, 20 nt, Human
uuguaggagcugagguuuca

SEQ ID NO: 3876261 - RNA, 17 nt, Human
uuguaggauaagugaaa

SEQ ID NO: 3876262 - RNA, 16 nt, Human
uuguagggaugccuuu

SEQ ID NO: 3876263 - RNA, 20 nt, Human
uuguaggggucaaagaaaug

SEQ ID NO: 3876264 - RNA, 15 nt, Human
uuguagguaaaaugu

SEQ ID NO: 3876265 - RNA, 23 nt, Human
uuguaguagcguuuuuuaaaugu

SEQ ID NO: 3876266 - RNA, 23 nt, Human
uuguagugcuuugagagagaaag

SEQ ID NO: 3876267 - RNA, 19 nt, Human
uuguaguguucagaaaaaa

SEQ ID NO: 3876268 - RNA, 23 nt, Human
uuguaguguuggagaagaacuga

SEQ ID NO: 3876269 - RNA, 13 nt, Human
uuguaguuccacu

SEQ ID NO: 3876270 - RNA, 14 nt, Human
uuguaguuguuuua

SEQ ID NO: 3876271 - RNA, 13 nt, Human
uuguaguuuaccu

SEQ ID NO: 3876272 - RNA, 12 nt, Human
uuguauaaaaau

SEQ ID NO: 3876273 - RNA, 15 nt, Human
uuguauaaaauaauu

SEQ ID NO: 3876274 - RNA, 17 nt, Human
uuguauaaaauaauuuu

SEQ ID NO: 3876275 - RNA, 19 nt, Human
uuguauaaaauaauuuuua

SEQ ID NO: 3876276 - RNA, 13 nt, Human
uuguauaaaugua

SEQ ID NO: 3876277 - RNA, 17 nt, Human
uuguauaaauguauaua

SEQ ID NO: 3876278 - RNA, 22 nt, Human
uuguauaaauguauauacacau

SEQ ID NO: 3876279 - RNA, 19 nt, Human
uuguauaaauuuauuuacu

SEQ ID NO: 3876280 - RNA, 13 nt, Human
uuguauaacaggu

SEQ ID NO: 3876281 - RNA, 14 nt, Human
uuguauaacagguu

SEQ ID NO: 3876282 - RNA, 21 nt, Human
uuguauaagauuagaaugaaa

SEQ ID NO: 3876283 - RNA, 15 nt, Human
uuguauaauauugaa

SEQ ID NO: 3876284 - RNA, 16 nt, Human
uuguauaauauugaaa

SEQ ID NO: 3876285 - RNA, 13 nt, Human
uuguauaauugua

SEQ ID NO: 3876286 - RNA, 14 nt, Human
uuguauaauuucga

SEQ ID NO: 3876287 - RNA, 16 nt, Human
uuguauacaaauauau

SEQ ID NO: 3876288 - RNA, 22 nt, Human
uuguauacaaauauauuguuaa

SEQ ID NO: 3876289 - RNA, 18 nt, Human
uuguauacauccugggua

SEQ ID NO: 3876290 - RNA, 19 nt, Human
uuguauacauccuggguaa

SEQ ID NO: 3876291 - RNA, 15 nt, Human
uuguauacuuuaaau

SEQ ID NO: 3876292 - RNA, 21 nt, Human
uuguauacuuuaaauaauuua

SEQ ID NO: 3876293 - RNA, 22 nt, Human
uuguauacuuuaaauaauuuaa

SEQ ID NO: 3876294 - RNA, 15 nt, Human
uuguauaguaaagug

SEQ ID NO: 3876295 - RNA, 19 nt, Human
uuguauaguuaacacacua

SEQ ID NO: 3876296 - RNA, 14 nt, Human
uuguauaguuaugu

SEQ ID NO: 3876297 - RNA, 21 nt, Human
uuguauaguuauguaaauaau

SEQ ID NO: 3876298 - RNA, 20 nt, Human
uuguauaguugcuugccuga

SEQ ID NO: 3876299 - RNA, 13 nt, Human
uuguauauaucug

SEQ ID NO: 3876300 - RNA, 19 nt, Human
uuguauauaucugcuucag

SEQ ID NO: 3876301 - RNA, 14 nt, Human
uuguauauaugugu

SEQ ID NO: 3876302 - RNA, 21 nt, Human
uuguauauauuauuauaaucu

SEQ ID NO: 3876303 - RNA, 14 nt, Human
uuguauauuacaau

SEQ ID NO: 3876304 - RNA, 15 nt, Human
uuguauauuacaaug

SEQ ID NO: 3876305 - RNA, 16 nt, Human
uuguauauuauuucua

SEQ ID NO: 3876306 - RNA, 14 nt, Human
uuguauauucacuu

SEQ ID NO: 3876307 - RNA, 13 nt, Human
uuguauauugguu

SEQ ID NO: 3876308 - RNA, 19 nt, Human
uuguauauugguuuuauga

SEQ ID NO: 3876309 - RNA, 16 nt, Human
uuguauauuuguacaa

SEQ ID NO: 3876310 - RNA, 17 nt, Human
uuguauauuuguacaaa

SEQ ID NO: 3876311 - RNA, 17 nt, Human
uuguaucguauagcugu

SEQ ID NO: 3876312 - RNA, 18 nt, Human
uuguaucguauagcugua

SEQ ID NO: 3876313 - RNA, 13 nt, Human
uuguaucuagugc

SEQ ID NO: 3876314 - RNA, 16 nt, Human
uuguaucugucuuucc

SEQ ID NO: 3876315 - RNA, 18 nt, Human
uuguaucugucuuuccac

SEQ ID NO: 3876316 - RNA, 20 nt, Human
uuguaugcaagcaguuucaa

SEQ ID NO: 3876317 - RNA, 15 nt, Human
uuguaugcaauggau

SEQ ID NO: 3876318 - RNA, 12 nt, Human
uuguaugccuuu

SEQ ID NO: 3876319 - RNA, 13 nt, Human
uuguauguaaaug

SEQ ID NO: 3876320 - RNA, 18 nt, Human
uuguauguaaaugugcau

SEQ ID NO: 3876321 - RNA, 16 nt, Human
uuguaugucaaagcuu

SEQ ID NO: 3876322 - RNA, 15 nt, Human
uuguauuaaacucuu

SEQ ID NO: 3876323 - RNA, 22 nt, Human
uuguauuauugcuguugcuuga

SEQ ID NO: 3876324 - RNA, 13 nt, Human
uuguauucaauua

SEQ ID NO: 3876325 - RNA, 13 nt, Human
uuguauucuuuga

SEQ ID NO: 3876326 - RNA, 17 nt, Human
uuguauucuuugauguu

SEQ ID NO: 3876327 - RNA, 19 nt, Human
uuguauuguauauuacaau

SEQ ID NO: 3876328 - RNA, 14 nt, Human
uuguauugugguau

SEQ ID NO: 3876329 - RNA, 15 nt, Human
uuguauuguuucaau

SEQ ID NO: 3876330 - RNA, 23 nt, Human
uuguauuuaaaugaaagugagac

SEQ ID NO: 3876331 - RNA, 13 nt, Human
uuguauuuaacag

SEQ ID NO: 3876332 - RNA, 17 nt, Human
uuguauuuaacagaaau

SEQ ID NO: 3876333 - RNA, 23 nt, Human
uuguauuuuccaagugugcauau

SEQ ID NO: 3876334 - RNA, 23 nt, Human
uuguauuuugugugaccaacugu

SEQ ID NO: 3876335 - RNA, 14 nt, Human
uuguauuuuuaaug

SEQ ID NO: 3876336 - RNA, 19 nt, Human
uuguauuuuuguuguuggg

SEQ ID NO: 3876337 - RNA, 22 nt, Human
uugucaaaguggugagaggcau

SEQ ID NO: 3876338 - RNA, 13 nt, Human
uugucaacauugu

SEQ ID NO: 3876339 - RNA, 14 nt, Human
uugucaauauuaaa

SEQ ID NO: 3876340 - RNA, 18 nt, Human
uugucaauauuaaauaca

SEQ ID NO: 3876341 - RNA, 22 nt, Human
uugucaaugcaguugucucugu

SEQ ID NO: 3876342 - RNA, 13 nt, Human
uugucacaauaaa

SEQ ID NO: 3876343 - RNA, 18 nt, Human
uugucacacacuuuggcu

SEQ ID NO: 3876344 - RNA, 14 nt, Human
uugucaccagaucu

SEQ ID NO: 3876345 - RNA, 16 nt, Human
uugucaccagaucuga

SEQ ID NO: 3876346 - RNA, 16 nt, Human
uugucacugacacaaa

SEQ ID NO: 3876347 - RNA, 19 nt, Human
uugucacugacacaaagga

SEQ ID NO: 3876348 - RNA, 15 nt, Human
uugucacuugcaugu

SEQ ID NO: 3876349 - RNA, 14 nt, Human
uugucagacauaaa

SEQ ID NO: 3876350 - RNA, 15 nt, Human
uugucagacauaaag

SEQ ID NO: 3876351 - RNA, 16 nt, Human
uugucagacauaaagc

SEQ ID NO: 3876352 - RNA, 16 nt, Human
uugucagaccauaaga

SEQ ID NO: 3876353 - RNA, 20 nt, Human
uugucagacuuuaaagaaua

SEQ ID NO: 3876354 - RNA, 18 nt, Human
uugucagauaugauaugu

SEQ ID NO: 3876355 - RNA, 12 nt, Human
uugucagcuacu

SEQ ID NO: 3876356 - RNA, 17 nt, Human
uugucaggagugugugu

SEQ ID NO: 3876357 - RNA, 21 nt, Human
uugucauauaagauucauauu

SEQ ID NO: 3876358 - RNA, 21 nt, Human
uugucauaucagcacauauuu

SEQ ID NO: 3876359 - RNA, 21 nt, Human
uugucauauguagccuucaca

SEQ ID NO: 3876360 - RNA, 23 nt, Human
uugucaucauuguauauaugugu

SEQ ID NO: 3876361 - RNA, 12 nt, Human
uugucaugguua

SEQ ID NO: 3876362 - RNA, 20 nt, Human
uugucauuagccugaguaga

SEQ ID NO: 3876363 - RNA, 14 nt, Human
uugucauugcuguu

SEQ ID NO: 3876364 - RNA, 15 nt, Human
uugucauugcuguug

SEQ ID NO: 3876365 - RNA, 13 nt, Human
uugucauuuauaa

SEQ ID NO: 3876366 - RNA, 19 nt, Human
uugucauuuucauuagcaa

SEQ ID NO: 3876367 - RNA, 15 nt, Human
uugucauuuucucca

SEQ ID NO: 3876368 - RNA, 16 nt, Human
uugucauuuugaagcu

SEQ ID NO: 3876369 - RNA, 19 nt, Human
uuguccagagcugcuuccc

SEQ ID NO: 3876370 - RNA, 13 nt, Human
uuguccagcgccu

SEQ ID NO: 3876371 - RNA, 13 nt, Human
uuguccauugucc

SEQ ID NO: 3876372 - RNA, 15 nt, Human
uugucccaagugcca

SEQ ID NO: 3876373 - RNA, 23 nt, Human
uugucccauuucuaaaggccucu

SEQ ID NO: 3876374 - RNA, 23 nt, Human
uuguccccaaauccgaaccuccu

SEQ ID NO: 3876375 - RNA, 18 nt, Human
uuguccccaaugaauaua

SEQ ID NO: 3876376 - RNA, 14 nt, Human
uugucccccaacuu

SEQ ID NO: 3876377 - RNA, 16 nt, Human
uugucccccaacuuga

SEQ ID NO: 3876378 - RNA, 18 nt, Human
uugucccccaacuugaga

SEQ ID NO: 3876379 - RNA, 16 nt, Human
uuguccccgacccuug

SEQ ID NO: 3876380 - RNA, 12 nt, Human
uuguccccugcu

SEQ ID NO: 3876381 - RNA, 15 nt, Human
uugucccucugcccc

SEQ ID NO: 3876382 - RNA, 20 nt, Human
uuguccgguggaaggccuuc

SEQ ID NO: 3876383 - RNA, 18 nt, Human
uuguccguguucauacau

SEQ ID NO: 3876384 - RNA, 16 nt, Human
uuguccuauuaguguu

SEQ ID NO: 3876385 - RNA, 17 nt, Human
uuguccucaguccauuu

SEQ ID NO: 3876386 - RNA, 17 nt, Human
uuguccuccugcugcca

SEQ ID NO: 3876387 - RNA, 23 nt, Human
uugucgaaaagagucuuccaauu

SEQ ID NO: 3876388 - RNA, 21 nt, Human
uugucggccccaccagugccu

SEQ ID NO: 3876389 - RNA, 20 nt, Human
uugucggcuccaguccccag

SEQ ID NO: 3876390 - RNA, 17 nt, Human
uugucuaaaacaauaaa

SEQ ID NO: 3876391 - RNA, 23 nt, Human
uugucuaagaaacauuggaagca

SEQ ID NO: 3876392 - RNA, 19 nt, Human
uugucuaagaaauugaaua

SEQ ID NO: 3876393 - RNA, 18 nt, Human
uugucuacacacccugca

SEQ ID NO: 3876394 - RNA, 16 nt, Human
uugucuauaaagcauu

SEQ ID NO: 3876395 - RNA, 18 nt, Human
uugucuauaaagcauuua

SEQ ID NO: 3876396 - RNA, 20 nt, Human
uugucuauaguugucaguau

SEQ ID NO: 3876397 - RNA, 16 nt, Human
uuguuuacaugcuuau

SEQ ID NO: 3876398 - RNA, 23 nt, Human
uuguuuacuuaaagauuuaucaa

SEQ ID NO: 3876399 - RNA, 18 nt, Human
uuguuuagaagaagugug

SEQ ID NO: 3876400 - RNA, 15 nt, Human
uuguuuauaauaaaa

SEQ ID NO: 3876401 - RNA, 16 nt, Human
uuguuuauaauaaaaa

SEQ ID NO: 3876402 - RNA, 18 nt, Human
uuguuuauaccuuugccu

SEQ ID NO: 3876403 - RNA, 19 nt, Human
uuguuuaucagauacauca

SEQ ID NO: 3876404 - RNA, 17 nt, Human
uuguuuaucuagaugua

SEQ ID NO: 3876405 - RNA, 12 nt, Human
uuguuuauguaa

SEQ ID NO: 3876406 - RNA, 15 nt, Human
uuguuuauguaauuu

SEQ ID NO: 3876407 - RNA, 13 nt, Human
uuguuuauuucau

SEQ ID NO: 3876408 - RNA, 18 nt, Human
uuguuucaaacacaaaug

SEQ ID NO: 3876409 - RNA, 18 nt, Human
uuguuucaagaaccugga

SEQ ID NO: 3876410 - RNA, 12 nt, Human
uuguuucaguga

SEQ ID NO: 3876411 - RNA, 20 nt, Human
uuguuucauugacuaucaaa

SEQ ID NO: 3876412 - RNA, 15 nt, Human
uuguuuccuuucacu

SEQ ID NO: 3876413 - RNA, 13 nt, Human
uuguuucgcucuu

SEQ ID NO: 3876414 - RNA, 23 nt, Human
uuguuucuacuuugauaugacug

SEQ ID NO: 3876415 - RNA, 14 nt, Human
uuguuucuccccca

SEQ ID NO: 3876416 - RNA, 16 nt, Human
uuguuucucccccugg

SEQ ID NO: 3876417 - RNA, 12 nt, Human
uuguuucugaaa

SEQ ID NO: 3876418 - RNA, 14 nt, Human
uuguuucuguacuu

SEQ ID NO: 3876419 - RNA, 14 nt, Human
uuguuucugugggc

SEQ ID NO: 3876420 - RNA, 17 nt, Human
uuguuucuguuccaaau

SEQ ID NO: 3876421 - RNA, 12 nt, Human
uuguuucuguuu

SEQ ID NO: 3876422 - RNA, 14 nt, Human
uuguuucuuaaaua

SEQ ID NO: 3876423 - RNA, 13 nt, Human
uuguuucuuccaa

SEQ ID NO: 3876424 - RNA, 13 nt, Human
uuguuucuuguuu

SEQ ID NO: 3876425 - RNA, 15 nt, Human
uuguuucuuucuagu

SEQ ID NO: 3876426 - RNA, 20 nt, Human
uuguuucuuucucugaggac

SEQ ID NO: 3876427 - RNA, 14 nt, Human
uuguuucuuugaau

SEQ ID NO: 3876428 - RNA, 16 nt, Human
uuguuugaaaauauua

SEQ ID NO: 3876429 - RNA, 12 nt, Human
uuguuugcuauc

SEQ ID NO: 3876430 - RNA, 19 nt, Human
uuguuugcucaccuggggu

SEQ ID NO: 3876431 - RNA, 14 nt, Human
uuguuugcugcuau

SEQ ID NO: 3876432 - RNA, 18 nt, Human
uuguuuggagacagaguc

SEQ ID NO: 3876433 - RNA, 16 nt, Human
uuguuuggcaaggaaa

SEQ ID NO: 3876434 - RNA, 20 nt, Human
uuguuuggggaugagaaagg

SEQ ID NO: 3876435 - RNA, 17 nt, Human
uuguuugguaaauguuu

SEQ ID NO: 3876436 - RNA, 21 nt, Human
uuguuugguauuguauuuauu

SEQ ID NO: 3876437 - RNA, 11 nt, Human
uuguuugugcu

SEQ ID NO: 3876438 - RNA, 10 nt, Human
uuguuuguuu

SEQ ID NO: 3876439 - RNA, 12 nt, Human
uuguuuguuucu

SEQ ID NO: 3876440 - RNA, 21 nt, Human
uuguuuguuucucccccuggg

SEQ ID NO: 3876441 - RNA, 13 nt, Human
uuguuuguuucuu

SEQ ID NO: 3876442 - RNA, 15 nt, Human
uuguuuuacugucuu

SEQ ID NO: 3876443 - RNA, 16 nt, Human
uuguuuucugacuaau

SEQ ID NO: 3876444 - RNA, 17 nt, Human
uuguuuucugacuaauu

SEQ ID NO: 3876445 - RNA, 15 nt, Human
uuguuuugaaaauaa

SEQ ID NO: 3876446 - RNA, 17 nt, Human
uuguuuugagcuuucca

SEQ ID NO: 3876447 - RNA, 20 nt, Human
uuguuuugagcuuuccaugu

SEQ ID NO: 3876448 - RNA, 20 nt, Human
uuguuuugcacacuuugcca

SEQ ID NO: 3876449 - RNA, 18 nt, Human
uuguuuugccaauuugca

SEQ ID NO: 3876450 - RNA, 16 nt, Human
uuguuuugcuuccccu

SEQ ID NO: 3876451 - RNA, 18 nt, Human
uuguuuugcuuuuucuga

SEQ ID NO: 3876452 - RNA, 14 nt, Human
uuguuuuguuuguc

SEQ ID NO: 3876453 - RNA, 16 nt, Human
uuguuuuguuuuuugg

SEQ ID NO: 3876454 - RNA, 18 nt, Human
uuguuuuuaaacuguaca

SEQ ID NO: 3876455 - RNA, 19 nt, Human
uuguuuuuaaacuguacag

SEQ ID NO: 3876456 - RNA, 17 nt, Human
uuguuuuuagaaucauu

SEQ ID NO: 3876457 - RNA, 12 nt, Human
uuguuuuuauga

SEQ ID NO: 3876458 - RNA, 13 nt, Human
uuguuuuuccuug

SEQ ID NO: 3876459 - RNA, 21 nt, Human
uuguuuuuccuuguauuuaaa

SEQ ID NO: 3876460 - RNA, 12 nt, Human
uuguuuuucugc

SEQ ID NO: 3876461 - RNA, 15 nt, Human
uuguuuuuguaaaga

SEQ ID NO: 3876462 - RNA, 13 nt, Human
uuguuuuuguaua

SEQ ID NO: 3876463 - RNA, 16 nt, Human
uuguuuuuuaaagucu

SEQ ID NO: 3876464 - RNA, 21 nt, Human
uuguuuuuucaaaauagaaaa

SEQ ID NO: 3876465 - RNA, 12 nt, Human
uuguuuuuugaa

SEQ ID NO: 3876466 - RNA, 17 nt, Human
uuguuuuuugaaguguu

SEQ ID NO: 3876467 - RNA, 19 nt, Human
uuguuuuuuuuuuccacuu

SEQ ID NO: 3876468 - RNA, 22 nt, Human
uuuaaaaaaagaaaaugaaaaa

SEQ ID NO: 3876469 - RNA, 20 nt, Human
uuuaaaaaaauaaaacauuu

SEQ ID NO: 3876470 - RNA, 21 nt, Human
uuuaaaaaaauaaaacauuuu

SEQ ID NO: 3876471 - RNA, 17 nt, Human
uuuaaaaaaaucacaaa

SEQ ID NO: 3876472 - RNA, 16 nt, Human
uuuaaaaaaauuuaag

SEQ ID NO: 3876473 - RNA, 17 nt, Human
uuuaaaaaaauuuaagu

SEQ ID NO: 3876474 - RNA, 11 nt, Human
uuuaaaaaacu

SEQ ID NO: 3876475 - RNA, 21 nt, Human
uuuaaaaaagcuuaaaacuuu

SEQ ID NO: 3876476 - RNA, 23 nt, Human
uuuaaaaaagcuuaaaacuuuga

SEQ ID NO: 3876477 - RNA, 21 nt, Human
uuuaaaaaaguuuaaaaugua

SEQ ID NO: 3876478 - RNA, 12 nt, Human
uuuaaaaaauaa

SEQ ID NO: 3876479 - RNA, 16 nt, Human
uuuaaaaaauauuuuc

SEQ ID NO: 3876480 - RNA, 15 nt, Human
uuuaaaaaaucucaa

SEQ ID NO: 3876481 - RNA, 19 nt, Human
uuuaaaaaccgaauaaaug

SEQ ID NO: 3876482 - RNA, 21 nt, Human
uuuaaaaacuauuuaacuuga

SEQ ID NO: 3876483 - RNA, 14 nt, Human
uuuaaaaacuguuu

SEQ ID NO: 3876484 - RNA, 14 nt, Human
uuuaaaaagccagu

SEQ ID NO: 3876485 - RNA, 20 nt, Human
uuuaaaaaggaacugcagca

SEQ ID NO: 3876486 - RNA, 20 nt, Human
uuuaaaaaguauugccaaac

SEQ ID NO: 3876487 - RNA, 15 nt, Human
uuuaaaaagucuuca

SEQ ID NO: 3876488 - RNA, 20 nt, Human
uuuaaaaaguguuuaaaugu

SEQ ID NO: 3876489 - RNA, 23 nt, Human
uuuaaaaaguuguagcagauugu

SEQ ID NO: 3876490 - RNA, 21 nt, Human
uuuaaaaauaagucaacagua

SEQ ID NO: 3876491 - RNA, 23 nt, Human
uuuaaaaauaagucaacaguaaa

SEQ ID NO: 3876492 - RNA, 17 nt, Human
uuuaaaaauacacuugu

SEQ ID NO: 3876493 - RNA, 17 nt, Human
uuuaaaaauagaaacau

SEQ ID NO: 3876494 - RNA, 15 nt, Human
uuuaaaaauauaauu

SEQ ID NO: 3876495 - RNA, 16 nt, Human
uuuaaaaaucaacuuu

SEQ ID NO: 3876496 - RNA, 15 nt, Human
uuuaaaaaucauaaa

SEQ ID NO: 3876497 - RNA, 11 nt, Human
uuuaaaaauga

SEQ ID NO: 3876498 - RNA, 12 nt, Human
uuuaaaaaugaa

SEQ ID NO: 3876499 - RNA, 12 nt, Human
uuuaaaaaugca

SEQ ID NO: 3876500 - RNA, 11 nt, Human
uuuaaaaaugu

SEQ ID NO: 3876501 - RNA, 13 nt, Human
uuuaaaaaugucu

SEQ ID NO: 3876502 - RNA, 23 nt, Human
uuuaaaaauuagccuaagauaua

SEQ ID NO: 3876503 - RNA, 11 nt, Human
uuuaaaacaaa

SEQ ID NO: 3876504 - RNA, 13 nt, Human
uuuaaaacacaug

SEQ ID NO: 3876505 - RNA, 15 nt, Human
uuuaaaacauguaau

SEQ ID NO: 3876506 - RNA, 22 nt, Human
uuuaaaacuguuggaauggauu

SEQ ID NO: 3876507 - RNA, 11 nt, Human
uuuaaaacuug

SEQ ID NO: 3876508 - RNA, 12 nt, Human
uuuaaaagaaau

SEQ ID NO: 3876509 - RNA, 17 nt, Human
uuuaaaagaaugauuau

SEQ ID NO: 3876510 - RNA, 23 nt, Human
uuuaaaagaaugggcaguuacau

SEQ ID NO: 3876511 - RNA, 16 nt, Human
uuuaaaagagacaaac

SEQ ID NO: 3876512 - RNA, 16 nt, Human
uuuaaaagaucuucaa

SEQ ID NO: 3876513 - RNA, 18 nt, Human
uuuaaaagaugcaaugua

SEQ ID NO: 3876514 - RNA, 12 nt, Human
uuuaaaagauuu

SEQ ID NO: 3876515 - RNA, 14 nt, Human
uuuaaaagccugcu

SEQ ID NO: 3876516 - RNA, 17 nt, Human
uuuaaaaggaaagaaaa

SEQ ID NO: 3876517 - RNA, 21 nt, Human
uuuaaaagguauuuugaauac

SEQ ID NO: 3876518 - RNA, 18 nt, Human
uuuaaaagugucaagcug

SEQ ID NO: 3876519 - RNA, 19 nt, Human
uuuaaaaguuauuaauauu

SEQ ID NO: 3876520 - RNA, 16 nt, Human
uuuaaaauacuguaga

SEQ ID NO: 3876521 - RNA, 17 nt, Human
uuuaaaauacuguagau

SEQ ID NO: 3876522 - RNA, 21 nt, Human
uuuaaaauagaaauuuuguaa

SEQ ID NO: 3876523 - RNA, 23 nt, Human
uuuaaaauagaaauuuuguaaga

SEQ ID NO: 3876524 - RNA, 17 nt, Human
uuuaaaauagcguucuu

SEQ ID NO: 3876525 - RNA, 14 nt, Human
uuuaaaauauaauu

SEQ ID NO: 3876526 - RNA, 21 nt, Human
uuuaaaauauauugaauauuu

SEQ ID NO: 3876527 - RNA, 16 nt, Human
uuuaaaauaucuacau

SEQ ID NO: 3876528 - RNA, 14 nt, Human
uuuaaaaucacuaa

SEQ ID NO: 3876529 - RNA, 19 nt, Human
uuuaaaaucaucagaaagg

SEQ ID NO: 3876530 - RNA, 20 nt, Human
uuuaaaaucuuauuaaaguu

SEQ ID NO: 3876531 - RNA, 16 nt, Human
uuuaaaaucuuuucua

SEQ ID NO: 3876532 - RNA, 21 nt, Human
uuuaaaauguaauuuaaauga

SEQ ID NO: 3876533 - RNA, 23 nt, Human
uuuaaaauguaauuuaaaugaaa

SEQ ID NO: 3876534 - RNA, 12 nt, Human
uuuaaaauguac

SEQ ID NO: 3876535 - RNA, 12 nt, Human
uuuaaaaugucu

SEQ ID NO: 3876536 - RNA, 18 nt, Human
uuuaaaauugcuauguua

SEQ ID NO: 3876537 - RNA, 23 nt, Human
uuuaaaauugcuauguuacuauu

SEQ ID NO: 3876538 - RNA, 19 nt, Human
uuuaaaauuuaaguaucuu

SEQ ID NO: 3876539 - RNA, 17 nt, Human
uuuaaaauuuauauugu

SEQ ID NO: 3876540 - RNA, 21 nt, Human
uuuaaaauuuuguauguuaaa

SEQ ID NO: 3876541 - RNA, 15 nt, Human
uuuaaacaaacauug

SEQ ID NO: 3876542 - RNA, 23 nt, Human
uuuaaacaaauucauauucuguc

SEQ ID NO: 3876543 - RNA, 13 nt, Human
uuuaaacacacag

SEQ ID NO: 3876544 - RNA, 23 nt, Human
uuuacagccagugggagauguua

SEQ ID NO: 3876545 - RNA, 15 nt, Human
uuuacagcuguguua

SEQ ID NO: 3876546 - RNA, 19 nt, Human
uuuacagcuuuacacacac

SEQ ID NO: 3876547 - RNA, 19 nt, Human
uuuacaggcccugcuccug

SEQ ID NO: 3876548 - RNA, 19 nt, Human
uuuacaguaaauaaauugu

SEQ ID NO: 3876549 - RNA, 16 nt, Human
uuuacaguccuucaaa

SEQ ID NO: 3876550 - RNA, 16 nt, Human
uuuacagucuauuuga

SEQ ID NO: 3876551 - RNA, 23 nt, Human
uuuacagugaaaauguaagcugu

SEQ ID NO: 3876552 - RNA, 20 nt, Human
uuuacagugaagaaagccug

SEQ ID NO: 3876553 - RNA, 17 nt, Human
uuuacaguguuucuggc

SEQ ID NO: 3876554 - RNA, 21 nt, Human
uuuacauacacuguauguuau

SEQ ID NO: 3876555 - RNA, 15 nt, Human
uuuacauacugcugu

SEQ ID NO: 3876556 - RNA, 13 nt, Human
uuuacaugaagua

SEQ ID NO: 3876557 - RNA, 16 nt, Human
uuuacaugaaguauuu

SEQ ID NO: 3876558 - RNA, 16 nt, Human
uuuacaugaggacucu

SEQ ID NO: 3876559 - RNA, 20 nt, Human
uuuacaugcaauuuauuaaa

SEQ ID NO: 3876560 - RNA, 13 nt, Human
uuuacaugcuuau

SEQ ID NO: 3876561 - RNA, 17 nt, Human
uuuacaugcuuauucca

SEQ ID NO: 3876562 - RNA, 15 nt, Human
uuuacauguaguagu

SEQ ID NO: 3876563 - RNA, 12 nt, Human
uuuacauguuuu

SEQ ID NO: 3876564 - RNA, 16 nt, Human
uuuacauuguugagcu

SEQ ID NO: 3876565 - RNA, 12 nt, Human
uuuacauuuaaa

SEQ ID NO: 3876566 - RNA, 16 nt, Human
uuuacauuuaaagcau

SEQ ID NO: 3876567 - RNA, 17 nt, Human
uuuacauuuaaagcauu

SEQ ID NO: 3876568 - RNA, 20 nt, Human
uuuacauuuaaagcauugcu

SEQ ID NO: 3876569 - RNA, 13 nt, Human
uuuacauuuuaug

SEQ ID NO: 3876570 - RNA, 22 nt, Human
uuuacauuuuauggugccuagu

SEQ ID NO: 3876571 - RNA, 14 nt, Human
uuuaccaaaaauuu

SEQ ID NO: 3876572 - RNA, 21 nt, Human
uuuaccaaguuauauaaagag

SEQ ID NO: 3876573 - RNA, 13 nt, Human
uuuaccaccccca

SEQ ID NO: 3876574 - RNA, 18 nt, Human
uuuaccacccccacaccu

SEQ ID NO: 3876575 - RNA, 19 nt, Human
uuuaccagcuuuuaaccau

SEQ ID NO: 3876576 - RNA, 19 nt, Human
uuuaccaguuaauuacuca

SEQ ID NO: 3876577 - RNA, 17 nt, Human
uuuaccaguugccuuuu

SEQ ID NO: 3876578 - RNA, 14 nt, Human
uuuaccaucugaaa

SEQ ID NO: 3876579 - RNA, 22 nt, Human
uuuacccagaaugucagauucc

SEQ ID NO: 3876580 - RNA, 23 nt, Human
uuuacccagaaugucagauuccu

SEQ ID NO: 3876581 - RNA, 14 nt, Human
uuuacccauauccc

SEQ ID NO: 3876582 - RNA, 16 nt, Human
uuuaccccaucccugu

SEQ ID NO: 3876583 - RNA, 21 nt, Human
uuuacccucuugaauauaauc

SEQ ID NO: 3876584 - RNA, 21 nt, Human
uuuacccuugagcccucccca

SEQ ID NO: 3876585 - RNA, 14 nt, Human
uuuaccuagagaac

SEQ ID NO: 3876586 - RNA, 15 nt, Human
uuuaccuauguaaca

SEQ ID NO: 3876587 - RNA, 12 nt, Human
uuuaccucagcc

SEQ ID NO: 3876588 - RNA, 18 nt, Human
uuuaccugaagucuuugu

SEQ ID NO: 3876589 - RNA, 20 nt, Human
uuuaccugucacauugcauu

SEQ ID NO: 3876590 - RNA, 16 nt, Human
uuuaccuucaaacuuu

SEQ ID NO: 3876591 - RNA, 18 nt, Human
uuuaccuucaaacuuuag

SEQ ID NO: 3876592 - RNA, 13 nt, Human
uuuaccuuguaua

SEQ ID NO: 3876593 - RNA, 17 nt, Human
uuuaccuugucauuuug

SEQ ID NO: 3876594 - RNA, 18 nt, Human
uuuaccuuuuaugcaaaa

SEQ ID NO: 3876595 - RNA, 13 nt, Human
uuuacgcuuugau

SEQ ID NO: 3876596 - RNA, 17 nt, Human
uuuacuaaagaaagauu

SEQ ID NO: 3876597 - RNA, 21 nt, Human
uuuacuaagccacaagaaauu

SEQ ID NO: 3876598 - RNA, 13 nt, Human
uuuacuacaguuu

SEQ ID NO: 3876599 - RNA, 17 nt, Human
uuuacuaccaaugccaa

SEQ ID NO: 3876600 - RNA, 21 nt, Human
uuuacuacuguggaaaaauau

SEQ ID NO: 3876601 - RNA, 14 nt, Human
uuuacuauauauau

SEQ ID NO: 3876602 - RNA, 15 nt, Human
uuuacuauauauaua

SEQ ID NO: 3876603 - RNA, 15 nt, Human
uuuacuaugccugug

SEQ ID NO: 3876604 - RNA, 13 nt, Human
uuuacucauugaa

SEQ ID NO: 3876605 - RNA, 17 nt, Human
uuuacucauugaaaugu

SEQ ID NO: 3876606 - RNA, 18 nt, Human
uuuacucauugaaauguc

SEQ ID NO: 3876607 - RNA, 22 nt, Human
uuuacuccagguuauugcaaua

SEQ ID NO: 3876608 - RNA, 21 nt, Human
uuuacuccucacacuuacugu

SEQ ID NO: 3876609 - RNA, 21 nt, Human
uuuacucuaugccccaaauau

SEQ ID NO: 3876610 - RNA, 13 nt, Human
uuuacucugccua

SEQ ID NO: 3876611 - RNA, 14 nt, Human
uuuacugagcuucu

SEQ ID NO: 3876612 - RNA, 15 nt, Human
uuuacugcucugaga

SEQ ID NO: 3876613 - RNA, 16 nt, Human
uuuacugguugcaugg

SEQ ID NO: 3876614 - RNA, 22 nt, Human
uuuacugguugcauggaaauca

SEQ ID NO: 3876615 - RNA, 20 nt, Human
uuuacugucaaaauaauuuu

SEQ ID NO: 3876616 - RNA, 17 nt, Human
uuuacugugaaacuggc

SEQ ID NO: 3876617 - RNA, 17 nt, Human
uuuacugugacuuuauu

SEQ ID NO: 3876618 - RNA, 20 nt, Human
uuuacuguuuugaaaucaau

SEQ ID NO: 3876619 - RNA, 16 nt, Human
uuuacuuaaagauuua

SEQ ID NO: 3876620 - RNA, 23 nt, Human
uuuacuucaaugggcucuuccaa

SEQ ID NO: 3876621 - RNA, 16 nt, Human
uuuacuucacuucaaa

SEQ ID NO: 3876622 - RNA, 14 nt, Human
uuuacuucuuauac

SEQ ID NO: 3876623 - RNA, 15 nt, Human
uuuacuucuuauaca

SEQ ID NO: 3876624 - RNA, 22 nt, Human
uuuacuucuuauacauuugaua

SEQ ID NO: 3876625 - RNA, 14 nt, Human
uuuacuuggaaaua

SEQ ID NO: 3876626 - RNA, 15 nt, Human
uuuacuuguuuugga

SEQ ID NO: 3876627 - RNA, 13 nt, Human
uuuacuuugaauu

SEQ ID NO: 3876628 - RNA, 15 nt, Human
uuuacuuuuaaacag

SEQ ID NO: 3876629 - RNA, 15 nt, Human
uuuacuuuuaaacug

SEQ ID NO: 3876630 - RNA, 13 nt, Human
uuuacuuuuguuu

SEQ ID NO: 3876631 - RNA, 23 nt, Human
uuuagaaaaaaguuuacaacaua

SEQ ID NO: 3876632 - RNA, 15 nt, Human
uuuagaaaacuuuaa

SEQ ID NO: 3876633 - RNA, 13 nt, Human
uuuagaaaauaua

SEQ ID NO: 3876634 - RNA, 11 nt, Human
uuuagaaacuu

SEQ ID NO: 3876635 - RNA, 15 nt, Human
uuuagaaagaauauu

SEQ ID NO: 3876636 - RNA, 11 nt, Human
uuuagaaauau

SEQ ID NO: 3876637 - RNA, 14 nt, Human
uuuagaaauauaau

SEQ ID NO: 3876638 - RNA, 15 nt, Human
uuuagaaauauaauu

SEQ ID NO: 3876639 - RNA, 13 nt, Human
uuuagaaaucauu

SEQ ID NO: 3876640 - RNA, 16 nt, Human
uuuagaacagaaaaca

SEQ ID NO: 3876641 - RNA, 18 nt, Human
uuuagaacagaaaacaac

SEQ ID NO: 3876642 - RNA, 23 nt, Human
uuuagaacagaaaacaacaaaaa

SEQ ID NO: 3876643 - RNA, 14 nt, Human
uuuagaacagguuu

SEQ ID NO: 3876644 - RNA, 19 nt, Human
uuuagaagaagugugucac

SEQ ID NO: 3876645 - RNA, 14 nt, Human
uuuagaagacucua

SEQ ID NO: 3876646 - RNA, 14 nt, Human
uuuagaagccaacu

SEQ ID NO: 3876647 - RNA, 14 nt, Human
uuuagaagccugca

SEQ ID NO: 3876648 - RNA, 18 nt, Human
uuuagaauggugauuuua

SEQ ID NO: 3876649 - RNA, 13 nt, Human
uuuagaauuaaaa

SEQ ID NO: 3876650 - RNA, 17 nt, Human
uuuagaauugaagguuu

SEQ ID NO: 3876651 - RNA, 19 nt, Human
uuuagacaccuucauuuug

SEQ ID NO: 3876652 - RNA, 13 nt, Human
uuuagaccaagga

SEQ ID NO: 3876653 - RNA, 19 nt, Human
uuuagacccuauugcugcu

SEQ ID NO: 3876654 - RNA, 12 nt, Human
uuuagacuugaa

SEQ ID NO: 3876655 - RNA, 14 nt, Human
uuuagacuugaaaa

SEQ ID NO: 3876656 - RNA, 15 nt, Human
uuuagacuugaaaag

SEQ ID NO: 3876657 - RNA, 19 nt, Human
uuuagacuugaaaagagac

SEQ ID NO: 3876658 - RNA, 21 nt, Human
uuuagacuuggauucuuucca

SEQ ID NO: 3876659 - RNA, 22 nt, Human
uuuagacuuggauucuuuccau

SEQ ID NO: 3876660 - RNA, 14 nt, Human
uuuagagaacugaa

SEQ ID NO: 3876661 - RNA, 17 nt, Human
uuuagaguuagacuguu

SEQ ID NO: 3876662 - RNA, 18 nt, Human
uuuagaguugauacuaca

SEQ ID NO: 3876663 - RNA, 15 nt, Human
uuuagaucucugaag

SEQ ID NO: 3876664 - RNA, 22 nt, Human
uuuagaugaaugucaguuguua

SEQ ID NO: 3876665 - RNA, 20 nt, Human
uuuagaugguuacacuguua

SEQ ID NO: 3876666 - RNA, 19 nt, Human
uuuagauugaaaacuuuuc

SEQ ID NO: 3876667 - RNA, 19 nt, Human
uuuagauugaguaagauuu

SEQ ID NO: 3876668 - RNA, 16 nt, Human
uuuagauuucaagaaa

SEQ ID NO: 3876669 - RNA, 19 nt, Human
uuuagauuuucuuuugccu

SEQ ID NO: 3876670 - RNA, 22 nt, Human
uuuagauuuuguguuuauucuu

SEQ ID NO: 3876671 - RNA, 22 nt, Human
uuuagcaauuuaauauuuugca

SEQ ID NO: 3876672 - RNA, 14 nt, Human
uuuagcacaaaaaa

SEQ ID NO: 3876673 - RNA, 18 nt, Human
uuuagcagaaucaaaaug

SEQ ID NO: 3876674 - RNA, 19 nt, Human
uuuagcaguaaaauagcug

SEQ ID NO: 3876675 - RNA, 18 nt, Human
uuuagcaguucugcaaau

SEQ ID NO: 3876676 - RNA, 21 nt, Human
uuuagcaguucugcaaauaga

SEQ ID NO: 3876677 - RNA, 23 nt, Human
uuuagcaguucugcaaauagaaa

SEQ ID NO: 3876678 - RNA, 20 nt, Human
uuuagcaugacaagccccag

SEQ ID NO: 3876679 - RNA, 23 nt, Human
uuuagcaugacaagccccaggca

SEQ ID NO: 3876680 - RNA, 14 nt, Human
uuuagcauguuguu

SEQ ID NO: 3876681 - RNA, 12 nt, Human
uuuagcauugua

SEQ ID NO: 3876682 - RNA, 22 nt, Human
uuuagccugugucauugcccca

SEQ ID NO: 3876683 - RNA, 14 nt, Human
uuuagcuauuacug

SEQ ID NO: 3876684 - RNA, 11 nt, Human
uuuagcucuga

SEQ ID NO: 3876685 - RNA, 12 nt, Human
uuuagcucugag

SEQ ID NO: 3876686 - RNA, 20 nt, Human
uuuagcuggaaaaguauguu

SEQ ID NO: 3876687 - RNA, 13 nt, Human
uuuagcuggccac

SEQ ID NO: 3876688 - RNA, 16 nt, Human
uuuagcuguaucaaac

SEQ ID NO: 3876689 - RNA, 15 nt, Human
uuuaggaacuucaga

SEQ ID NO: 3876690 - RNA, 23 nt, Human
uuuguacaaggggccauuuggca

SEQ ID NO: 3876691 - RNA, 21 nt, Human
uuuguacacccaugaaagaaa

SEQ ID NO: 3876692 - RNA, 10 nt, Human
uuuguacaga

SEQ ID NO: 3876693 - RNA, 17 nt, Human
uuuguacaguuugcugu

SEQ ID NO: 3876694 - RNA, 12 nt, Human
uuuguacaucug

SEQ ID NO: 3876695 - RNA, 23 nt, Human
uuuguaccagugaauuuuugcaa

SEQ ID NO: 3876696 - RNA, 20 nt, Human
uuuguacgacgucagauguu

SEQ ID NO: 3876697 - RNA, 14 nt, Human
uuuguacugaaaaa

SEQ ID NO: 3876698 - RNA, 13 nt, Human
uuuguacuguaaa

SEQ ID NO: 3876699 - RNA, 17 nt, Human
uuuguagccuuccucca

SEQ ID NO: 3876700 - RNA, 21 nt, Human
uuuguaggaaggucucauucu

SEQ ID NO: 3876701 - RNA, 22 nt, Human
uuuguaggaaggucucauucuu

SEQ ID NO: 3876702 - RNA, 21 nt, Human
uuuguaggagaaacucccaug

SEQ ID NO: 3876703 - RNA, 18 nt, Human
uuuguaggggaacucauu

SEQ ID NO: 3876704 - RNA, 20 nt, Human
uuuguaggggaacucauuug

SEQ ID NO: 3876705 - RNA, 19 nt, Human
uuuguaggggucaaagaaa

SEQ ID NO: 3876706 - RNA, 15 nt, Human
uuuguaggguuucua

SEQ ID NO: 3876707 - RNA, 15 nt, Human
uuuguagguaaaaug

SEQ ID NO: 3876708 - RNA, 17 nt, Human
uuuguagguaaaaugua

SEQ ID NO: 3876709 - RNA, 18 nt, Human
uuuguagugaaauaauag

SEQ ID NO: 3876710 - RNA, 20 nt, Human
uuuguauaaaagugugaaau

SEQ ID NO: 3876711 - RNA, 14 nt, Human
uuuguauaaaauaa

SEQ ID NO: 3876712 - RNA, 18 nt, Human
uuuguauaaaauaauuuu

SEQ ID NO: 3876713 - RNA, 13 nt, Human
uuuguauaaaaug

SEQ ID NO: 3876714 - RNA, 13 nt, Human
uuuguauaauugu

SEQ ID NO: 3876715 - RNA, 14 nt, Human
uuuguauacaaaua

SEQ ID NO: 3876716 - RNA, 14 nt, Human
uuuguauacaagua

SEQ ID NO: 3876717 - RNA, 17 nt, Human
uuuguauacauccuggg

SEQ ID NO: 3876718 - RNA, 16 nt, Human
uuuguauaguuaugua

SEQ ID NO: 3876719 - RNA, 22 nt, Human
uuuguauaguuauguaaauaau

SEQ ID NO: 3876720 - RNA, 21 nt, Human
uuuguauauuacacauuugua

SEQ ID NO: 3876721 - RNA, 15 nt, Human
uuuguaugaaaacau

SEQ ID NO: 3876722 - RNA, 19 nt, Human
uuuguaugaaauauaugug

SEQ ID NO: 3876723 - RNA, 13 nt, Human
uuuguaugauauu

SEQ ID NO: 3876724 - RNA, 21 nt, Human
uuuguaugcaagcaguuucaa

SEQ ID NO: 3876725 - RNA, 22 nt, Human
uuuguaugccaagugagaagau

SEQ ID NO: 3876726 - RNA, 16 nt, Human
uuuguauguaaaugug

SEQ ID NO: 3876727 - RNA, 17 nt, Human
uuuguauguaaaugugc

SEQ ID NO: 3876728 - RNA, 14 nt, Human
uuuguauguauaau

SEQ ID NO: 3876729 - RNA, 16 nt, Human
uuuguauguuaaagag

SEQ ID NO: 3876730 - RNA, 18 nt, Human
uuuguauguuuuuuuucu

SEQ ID NO: 3876731 - RNA, 15 nt, Human
uuuguauuauugcug

SEQ ID NO: 3876732 - RNA, 20 nt, Human
uuuguauuauugcuguugcu

SEQ ID NO: 3876733 - RNA, 22 nt, Human
uuuguauucaauuaaagaaaua

SEQ ID NO: 3876734 - RNA, 14 nt, Human
uuuguauucucuga

SEQ ID NO: 3876735 - RNA, 14 nt, Human
uuuguauuguauau

SEQ ID NO: 3876736 - RNA, 16 nt, Human
uuuguauuuauucuuu

SEQ ID NO: 3876737 - RNA, 23 nt, Human
uuuguauuuuccaagugugcaua

SEQ ID NO: 3876738 - RNA, 23 nt, Human
uuuguauuuugugugaccaacug

SEQ ID NO: 3876739 - RNA, 14 nt, Human
uuuguauuuuuaau

SEQ ID NO: 3876740 - RNA, 15 nt, Human
uuugucacugcuuca

SEQ ID NO: 3876741 - RNA, 23 nt, Human
uuugucaguguagaucaacucau

SEQ ID NO: 3876742 - RNA, 18 nt, Human
uuugucauuuucauuagc

SEQ ID NO: 3876743 - RNA, 13 nt, Human
uuuguccauuugu

SEQ ID NO: 3876744 - RNA, 16 nt, Human
uuugucccacagcuug

SEQ ID NO: 3876745 - RNA, 21 nt, Human
uuuguccccaccgcagacagg

SEQ ID NO: 3876746 - RNA, 14 nt, Human
uuugucccccaacu

SEQ ID NO: 3876747 - RNA, 21 nt, Human
uuugucccccaacuugagaug

SEQ ID NO: 3876748 - RNA, 12 nt, Human
uuuguccucaaa

SEQ ID NO: 3876749 - RNA, 19 nt, Human
uuuguccugaugcuuuugu

SEQ ID NO: 3876750 - RNA, 22 nt, Human
uuugucgauauuuccaucauua

SEQ ID NO: 3876751 - RNA, 11 nt, Human
uuugucuaaaa

SEQ ID NO: 3876752 - RNA, 14 nt, Human
uuugucuaaaacaa

SEQ ID NO: 3876753 - RNA, 16 nt, Human
uuugucuaaaacaaua

SEQ ID NO: 3876754 - RNA, 16 nt, Human
uuugucuaagaaacau

SEQ ID NO: 3876755 - RNA, 17 nt, Human
uuugucuacguuuaguu

SEQ ID NO: 3876756 - RNA, 18 nt, Human
uuugucuauuuuaaaaua

SEQ ID NO: 3876757 - RNA, 17 nt, Human
uuugucucuccuuuucu

SEQ ID NO: 3876758 - RNA, 12 nt, Human
uuugucucuucu

SEQ ID NO: 3876759 - RNA, 14 nt, Human
uuugucugaaaaau

SEQ ID NO: 3876760 - RNA, 19 nt, Human
uuugucugccccaaguuuu

SEQ ID NO: 3876761 - RNA, 17 nt, Human
uuugucugucuucauag

SEQ ID NO: 3876762 - RNA, 16 nt, Human
uuugucuucuccccag

SEQ ID NO: 3876763 - RNA, 13 nt, Human
uuugucuuuuugu

SEQ ID NO: 3876764 - RNA, 17 nt, Human
uuugugaaauuuuucau

SEQ ID NO: 3876765 - RNA, 22 nt, Human
uuugugaacaagucccuguaau

SEQ ID NO: 3876766 - RNA, 15 nt, Human
uuugugaagcccugu

SEQ ID NO: 3876767 - RNA, 24 nt, Human
uuugugaaggccucgcaggaagac

SEQ ID NO: 3876768 - RNA, 18 nt, Human
uuugugacuaauuguaua

SEQ ID NO: 3876769 - RNA, 12 nt, Human
uuugugagagcg

SEQ ID NO: 3876770 - RNA, 16 nt, Human
uuugugagcaggcugu

SEQ ID NO: 3876771 - RNA, 19 nt, Human
uuugugaggaagccgcugg

SEQ ID NO: 3876772 - RNA, 18 nt, Human
uuugugagucaauacaua

SEQ ID NO: 3876773 - RNA, 13 nt, Human
uuugugauaauuu

SEQ ID NO: 3876774 - RNA, 15 nt, Human
uuugugauacaaugc

SEQ ID NO: 3876775 - RNA, 22 nt, Human
uuugugauacaaugcugugccc

SEQ ID NO: 3876776 - RNA, 21 nt, Human
uuugugauggagugcuguuuu

SEQ ID NO: 3876777 - RNA, 20 nt, Human
uuugugauucaaucuguaaa

SEQ ID NO: 3876778 - RNA, 17 nt, Human
uuugugauuuagaacug

SEQ ID NO: 3876779 - RNA, 13 nt, Human
uuugugccagagg

SEQ ID NO: 3876780 - RNA, 12 nt, Human
uuugugcccuau

SEQ ID NO: 3876781 - RNA, 14 nt, Human
uuugugcuagaaau

SEQ ID NO: 3876782 - RNA, 12 nt, Human
uuugugcuucua

SEQ ID NO: 3876783 - RNA, 14 nt, Human
uuugugcuucuaau

SEQ ID NO: 3876784 - RNA, 11 nt, Human
uuuguggaaaa

SEQ ID NO: 3876785 - RNA, 14 nt, Human
uuuguggaugucuu

SEQ ID NO: 3876786 - RNA, 17 nt, Human
uuuguggcaccuuuucu

SEQ ID NO: 3876787 - RNA, 18 nt, Human
uuuguggccaaggagcug

SEQ ID NO: 3876788 - RNA, 21 nt, Human
uuuguggccaaggagcugcua

SEQ ID NO: 3876789 - RNA, 17 nt, Human
uuugugggggacuguaa

SEQ ID NO: 3876790 - RNA, 18 nt, Human
uuugugggggacuguaag

SEQ ID NO: 3876791 - RNA, 22 nt, Human
uuugugguacgaccuuuagauu

SEQ ID NO: 3876792 - RNA, 16 nt, Human
uuugugguuuuaugga

SEQ ID NO: 3876793 - RNA, 21 nt, Human
uuuguguaacucccagugaug

SEQ ID NO: 3876794 - RNA, 16 nt, Human
uuuguguaauaaagug

SEQ ID NO: 3876795 - RNA, 19 nt, Human
uuuguguaauagaaaacug

SEQ ID NO: 3876796 - RNA, 22 nt, Human
uuugugucaaugggcaaugaca

SEQ ID NO: 3876797 - RNA, 21 nt, Human
uuugugucauguuuaagaaau

SEQ ID NO: 3876798 - RNA, 20 nt, Human
uuugugucucuuauggaugu

SEQ ID NO: 3876799 - RNA, 21 nt, Human
uuugugugaccaacuguguug

SEQ ID NO: 3876800 - RNA, 12 nt, Human
uuugugugagag

SEQ ID NO: 3876801 - RNA, 14 nt, Human
uuugugugauugaa

SEQ ID NO: 3876802 - RNA, 16 nt, Human
uuugugugcucuccau

SEQ ID NO: 3876803 - RNA, 14 nt, Human
uuuguguguagucu

SEQ ID NO: 3876804 - RNA, 14 nt, Human
uuuguguguuauac

SEQ ID NO: 3876805 - RNA, 19 nt, Human
uuuguguguucacuaaacu

SEQ ID NO: 3876806 - RNA, 17 nt, Human
uuuguguguugucucuu

SEQ ID NO: 3876807 - RNA, 17 nt, Human
uuuguguucuguuuugu

SEQ ID NO: 3876808 - RNA, 13 nt, Human
uuuguguucuuug

SEQ ID NO: 3876809 - RNA, 17 nt, Human
uuuguguuguaauucuu

SEQ ID NO: 3876810 - RNA, 23 nt, Human
uuuguguuguaauucuucaguug

SEQ ID NO: 3876811 - RNA, 16 nt, Human
uuuguguuuauucuug

SEQ ID NO: 3876812 - RNA, 18 nt, Human
uuuguguuugguuuacau

SEQ ID NO: 3876813 - RNA, 24 nt, Human
uuuguuaaaauacaguucugucau

SEQ ID NO: 3876814 - RNA, 22 nt, Human
uuuguuaauuuagaaaacuuua

SEQ ID NO: 3876815 - RNA, 23 nt, Human
uuuguuaauuuagaaaacuuuaa

SEQ ID NO: 3876816 - RNA, 24 nt, Human
uuuguuaccuccaacagaacuaaa

SEQ ID NO: 3876817 - RNA, 9 nt, Human
uuuguuacu

SEQ ID NO: 3876818 - RNA, 13 nt, Human
uuuguuacuguuc

SEQ ID NO: 3876819 - RNA, 16 nt, Human
uuuguuacuguucuug

SEQ ID NO: 3876820 - RNA, 23 nt, Human
uuuguuacuguucuugcugcuag

SEQ ID NO: 3876821 - RNA, 15 nt, Human
uuuguuagauagcug

SEQ ID NO: 3876822 - RNA, 21 nt, Human
uuuguuagauagcugcaugug

SEQ ID NO: 3876823 - RNA, 18 nt, Human
uuuguuauauaauuuaga

SEQ ID NO: 3876824 - RNA, 16 nt, Human
uuuguuauuguuuugu

SEQ ID NO: 3876825 - RNA, 12 nt, Human
uuuguuauuuug

SEQ ID NO: 3876826 - RNA, 16 nt, Human
uuuguucauacauauu

SEQ ID NO: 3876827 - RNA, 15 nt, Human
uuuguucauauuaag

SEQ ID NO: 3876828 - RNA, 12 nt, Human
uuuguucaucug

SEQ ID NO: 3876829 - RNA, 12 nt, Human
uuuguucauguu

SEQ ID NO: 3876830 - RNA, 14 nt, Human
uuuguucauguuug

SEQ ID NO: 3876831 - RNA, 23 nt, Human
uuuguucauuucauccuuucacu

SEQ ID NO: 3876832 - RNA, 15 nt, Human
uuuguuccccuccuc

SEQ ID NO: 3876833 - RNA, 19 nt, Human
uuuguucucagcucccccu

SEQ ID NO: 3876834 - RNA, 21 nt, Human
uuuguucuggcucuuccaggc

SEQ ID NO: 3876835 - RNA, 20 nt, Human
uuuuccaugcguguuucuga

SEQ ID NO: 3876836 - RNA, 22 nt, Human
uuuuccauggcaggaaggcuug

SEQ ID NO: 3876837 - RNA, 16 nt, Human
uuuuccauugguuuac

SEQ ID NO: 3876838 - RNA, 13 nt, Human
uuuuccauuuuau

SEQ ID NO: 3876839 - RNA, 14 nt, Human
uuuuccauuuuaua

SEQ ID NO: 3876840 - RNA, 18 nt, Human
uuuucccaaaauguugaa

SEQ ID NO: 3876841 - RNA, 20 nt, Human
uuuucccaaagcaucccucu

SEQ ID NO: 3876842 - RNA, 12 nt, Human
uuuucccacgag

SEQ ID NO: 3876843 - RNA, 15 nt, Human
uuuucccauaagaca

SEQ ID NO: 3876844 - RNA, 16 nt, Human
uuuucccauaagacaa

SEQ ID NO: 3876845 - RNA, 14 nt, Human
uuuuccccagacuu

SEQ ID NO: 3876846 - RNA, 19 nt, Human
uuuuccccucuuuuguuaa

SEQ ID NO: 3876847 - RNA, 17 nt, Human
uuuuccccuuuccuguc

SEQ ID NO: 3876848 - RNA, 15 nt, Human
uuuucccugaaguua

SEQ ID NO: 3876849 - RNA, 21 nt, Human
uuuucccugaaguuaugugua

SEQ ID NO: 3876850 - RNA, 15 nt, Human
uuuucccuguacagu

SEQ ID NO: 3876851 - RNA, 13 nt, Human
uuuuccuaaguga

SEQ ID NO: 3876852 - RNA, 20 nt, Human
uuuuccuaagugauuguaug

SEQ ID NO: 3876853 - RNA, 17 nt, Human
uuuuccuagcccucuca

SEQ ID NO: 3876854 - RNA, 15 nt, Human
uuuuccuaugcuauu

SEQ ID NO: 3876855 - RNA, 14 nt, Human
uuuuccucccuucu

SEQ ID NO: 3876856 - RNA, 17 nt, Human
uuuuccucccuucugcu

SEQ ID NO: 3876857 - RNA, 21 nt, Human
uuuuccucccuuggguucuga

SEQ ID NO: 3876858 - RNA, 19 nt, Human
uuuuccuccgggagagggg

SEQ ID NO: 3876859 - RNA, 17 nt, Human
uuuuccucgcuucuuuc

SEQ ID NO: 3876860 - RNA, 19 nt, Human
uuuuccucucaauaaaauu

SEQ ID NO: 3876861 - RNA, 16 nt, Human
uuuuccucuccacaca

SEQ ID NO: 3876862 - RNA, 18 nt, Human
uuuuccucuucuauuuug

SEQ ID NO: 3876863 - RNA, 20 nt, Human
uuuuccuggaauugccagcu

SEQ ID NO: 3876864 - RNA, 14 nt, Human
uuuuccuguucaua

SEQ ID NO: 3876865 - RNA, 16 nt, Human
uuuuccuguuucugaa

SEQ ID NO: 3876866 - RNA, 21 nt, Human
uuuuccuucaagaaugcagua

SEQ ID NO: 3876867 - RNA, 17 nt, Human
uuuuccuucagauauuu

SEQ ID NO: 3876868 - RNA, 15 nt, Human
uuuuccuucagugcc

SEQ ID NO: 3876869 - RNA, 13 nt, Human
uuuuccuugcaua

SEQ ID NO: 3876870 - RNA, 14 nt, Human
uuuuccuugcauac

SEQ ID NO: 3876871 - RNA, 16 nt, Human
uuuuccuuugucauca

SEQ ID NO: 3876872 - RNA, 13 nt, Human
uuuuccuuugugc

SEQ ID NO: 3876873 - RNA, 23 nt, Human
uuuucgaacauucuuugccuggu

SEQ ID NO: 3876874 - RNA, 14 nt, Human
uuuucgccuuuccu

SEQ ID NO: 3876875 - RNA, 19 nt, Human
uuuucggccccauguaucu

SEQ ID NO: 3876876 - RNA, 14 nt, Human
uuuucuaaaagcuu

SEQ ID NO: 3876877 - RNA, 23 nt, Human
uuuucuaacagaaagcaugauuu

SEQ ID NO: 3876878 - RNA, 13 nt, Human
uuuucuaaccuug

SEQ ID NO: 3876879 - RNA, 12 nt, Human
uuuucuaacugg

SEQ ID NO: 3876880 - RNA, 15 nt, Human
uuuucuacagcaaau

SEQ ID NO: 3876881 - RNA, 16 nt, Human
uuuucuacagcaaauu

SEQ ID NO: 3876882 - RNA, 17 nt, Human
uuuucuacagcaaauuu

SEQ ID NO: 3876883 - RNA, 21 nt, Human
uuuucuacagcaaauuuauaa

SEQ ID NO: 3876884 - RNA, 16 nt, Human
uuuucuacguuucuuu

SEQ ID NO: 3876885 - RNA, 20 nt, Human
uuuucuagaauuauuuuuca

SEQ ID NO: 3876886 - RNA, 22 nt, Human
uuuucuagaauuauuuuucacu

SEQ ID NO: 3876887 - RNA, 14 nt, Human
uuuucuagacuuuc

SEQ ID NO: 3876888 - RNA, 18 nt, Human
uuuucuagcccgaauaca

SEQ ID NO: 3876889 - RNA, 21 nt, Human
uuuucuagcccgaauacaaac

SEQ ID NO: 3876890 - RNA, 14 nt, Human
uuuucuaguacacu

SEQ ID NO: 3876891 - RNA, 17 nt, Human
uuuucuaguuugcucau

SEQ ID NO: 3876892 - RNA, 16 nt, Human
uuuucuauaauuuaaa

SEQ ID NO: 3876893 - RNA, 14 nt, Human
uuuucuauguacua

SEQ ID NO: 3876894 - RNA, 16 nt, Human
uuuucuauuaaaagac

SEQ ID NO: 3876895 - RNA, 17 nt, Human
uuuucuauuaaaagacu

SEQ ID NO: 3876896 - RNA, 23 nt, Human
uuuucuauuguuacucugguucu

SEQ ID NO: 3876897 - RNA, 15 nt, Human
uuuucucaaaguuuu

SEQ ID NO: 3876898 - RNA, 17 nt, Human
uuuucucacuccuuuug

SEQ ID NO: 3876899 - RNA, 20 nt, Human
uuuucuccaauaucagugcu

SEQ ID NO: 3876900 - RNA, 21 nt, Human
uuuucuccaauaucagugcuc

SEQ ID NO: 3876901 - RNA, 14 nt, Human
uuuucuccucccag

SEQ ID NO: 3876902 - RNA, 21 nt, Human
uuuucucgcuguccuuucuag

SEQ ID NO: 3876903 - RNA, 14 nt, Human
uuuucucuaggaaa

SEQ ID NO: 3876904 - RNA, 20 nt, Human
uuuucucuaggaaauauacu

SEQ ID NO: 3876905 - RNA, 21 nt, Human
uuuucucucaacaccaugauu

SEQ ID NO: 3876906 - RNA, 16 nt, Human
uuuucucuccuguccu

SEQ ID NO: 3876907 - RNA, 18 nt, Human
uuuucucuccuguccucc

SEQ ID NO: 3876908 - RNA, 16 nt, Human
uuuucucugguaauau

SEQ ID NO: 3876909 - RNA, 14 nt, Human
uuuucucuuagaaa

SEQ ID NO: 3876910 - RNA, 21 nt, Human
uuuucucuuagaacauuguau

SEQ ID NO: 3876911 - RNA, 22 nt, Human
uuuucucuuucuccuuagucuu

SEQ ID NO: 3876912 - RNA, 15 nt, Human
uuuucugaaucuucu

SEQ ID NO: 3876913 - RNA, 10 nt, Human
uuuucugagc

SEQ ID NO: 3876914 - RNA, 16 nt, Human
uuuucugagcccgggc

SEQ ID NO: 3876915 - RNA, 15 nt, Human
uuuucugauccaguu

SEQ ID NO: 3876916 - RNA, 14 nt, Human
uuuucugauuguaa

SEQ ID NO: 3876917 - RNA, 12 nt, Human
uuuucugcacua

SEQ ID NO: 3876918 - RNA, 21 nt, Human
uuuucugcaucaucuguagau

SEQ ID NO: 3876919 - RNA, 13 nt, Human
uuuucugcccugg

SEQ ID NO: 3876920 - RNA, 18 nt, Human
uuuucuggaauguaauca

SEQ ID NO: 3876921 - RNA, 16 nt, Human
uuuucuggacucugga

SEQ ID NO: 3876922 - RNA, 22 nt, Human
uuuucuggacucuggacuuucu

SEQ ID NO: 3876923 - RNA, 21 nt, Human
uuuucuggagguugauaacuu

SEQ ID NO: 3876924 - RNA, 23 nt, Human
uuuucuggagguugauaacuuug

SEQ ID NO: 3876925 - RNA, 22 nt, Human
uuuucuggguguccaaaggaag

SEQ ID NO: 3876926 - RNA, 14 nt, Human
uuuucuguaccagu

SEQ ID NO: 3876927 - RNA, 14 nt, Human
uuuucuguagucau

SEQ ID NO: 3876928 - RNA, 18 nt, Human
uuuucugugccugaauau

SEQ ID NO: 3876929 - RNA, 23 nt, Human
uuuucugugugucaguuuucaua

SEQ ID NO: 3876930 - RNA, 15 nt, Human
uuuucuguguguucc

SEQ ID NO: 3876931 - RNA, 12 nt, Human
uuuucuguuaua

SEQ ID NO: 3876932 - RNA, 13 nt, Human
uuuucuguucuuu

SEQ ID NO: 3876933 - RNA, 13 nt, Human
uuuucuguuguaa

SEQ ID NO: 3876934 - RNA, 15 nt, Human
uuuucuguuguaacu

SEQ ID NO: 3876935 - RNA, 12 nt, Human
uuuucuuaaaaa

SEQ ID NO: 3876936 - RNA, 13 nt, Human
uuuucuuaaaaag

SEQ ID NO: 3876937 - RNA, 17 nt, Human
uuuucuuaaccaguugu

SEQ ID NO: 3876938 - RNA, 13 nt, Human
uuuucuuauuuca

SEQ ID NO: 3876939 - RNA, 22 nt, Human
uuuucuucaacaucaauguuca

SEQ ID NO: 3876940 - RNA, 15 nt, Human
uuuucuucacugucc

SEQ ID NO: 3876941 - RNA, 13 nt, Human
uuuucuucucccu

SEQ ID NO: 3876942 - RNA, 18 nt, Human
uuuucuucuucccucccu

SEQ ID NO: 3876943 - RNA, 16 nt, Human
uuuucuucuugggaua

SEQ ID NO: 3876944 - RNA, 19 nt, Human
uuuucuugauaauuuuccu

SEQ ID NO: 3876945 - RNA, 13 nt, Human
uuuucuugccuga

SEQ ID NO: 3876946 - RNA, 13 nt, Human
uuuucuuguaauu

SEQ ID NO: 3876947 - RNA, 19 nt, Human
uuuucuuguaucuggauuc

SEQ ID NO: 3876948 - RNA, 15 nt, Human
uuuucuuuaaaagaa

SEQ ID NO: 3876949 - RNA, 20 nt, Human
uuuucuuuacaaaacaaacu

SEQ ID NO: 3876950 - RNA, 13 nt, Human
uuuucuuuauaag

SEQ ID NO: 3876951 - RNA, 12 nt, Human
uuuucuuucagu

SEQ ID NO: 3876952 - RNA, 17 nt, Human
uuuucuuuccuccuuuc

SEQ ID NO: 3876953 - RNA, 13 nt, Human
uuuucuuugaaua

SEQ ID NO: 3876954 - RNA, 12 nt, Human
uuuucuuuguau

SEQ ID NO: 3876955 - RNA, 18 nt, Human
uuuucuuuguaucauuca

SEQ ID NO: 3876956 - RNA, 11 nt, Human
uuuucuuuucu

SEQ ID NO: 3876957 - RNA, 22 nt, Human
uuuucuuuugcuuuauggguuu

SEQ ID NO: 3876958 - RNA, 16 nt, Human
uuuucuuuuguuacug

SEQ ID NO: 3876959 - RNA, 19 nt, Human
uuuucuuuuguuacuguuc

SEQ ID NO: 3876960 - RNA, 20 nt, Human
uuuucuuuuguuacuguucu

SEQ ID NO: 3876961 - RNA, 21 nt, Human
uuuucuuuuuuaaauuaauau

SEQ ID NO: 3876962 - RNA, 23 nt, Human
uuuugaaaaaagcucauuucaug

SEQ ID NO: 3876963 - RNA, 22 nt, Human
uuuugaaaaaugcacugggaaa

SEQ ID NO: 3876964 - RNA, 22 nt, Human
uuuugaaaaauuccuauuguga

SEQ ID NO: 3876965 - RNA, 23 nt, Human
uuuugaaaacuacauuuuaacau

SEQ ID NO: 3876966 - RNA, 16 nt, Human
uuuugaaaagcuauua

SEQ ID NO: 3876967 - RNA, 21 nt, Human
uuuugaaaccaugaagagauu

SEQ ID NO: 3876968 - RNA, 23 nt, Human
uuuugaaaucaaugcaagaguga

SEQ ID NO: 3876969 - RNA, 13 nt, Human
uuuugaaaugcug

SEQ ID NO: 3876970 - RNA, 16 nt, Human
uuuugaaaugcugaaa

SEQ ID NO: 3876971 - RNA, 18 nt, Human
uuuugaaaugcugaaaau

SEQ ID NO: 3876972 - RNA, 20 nt, Human
uuuugaaaugcugaaaauug

SEQ ID NO: 3876973 - RNA, 20 nt, Human
uuuugaaauuaugugacauu

SEQ ID NO: 3876974 - RNA, 23 nt, Human
uuuugaacuaagaaacuuuugua

SEQ ID NO: 3876975 - RNA, 14 nt, Human
uuuugaaggaauac

SEQ ID NO: 3876976 - RNA, 19 nt, Human
uuuugaaguaguuuguaua

SEQ ID NO: 3876977 - RNA, 15 nt, Human
uuuugaagucuugua

SEQ ID NO: 3876978 - RNA, 13 nt, Human
uuuugaaucaaua

SEQ ID NO: 3876979 - RNA, 16 nt, Human
uuuugaauccaugcuu

SEQ ID NO: 3876980 - RNA, 20 nt, Human
uuuugaaucucauaauuuau

SEQ ID NO: 3876981 - RNA, 18 nt, Human
acuguaguaaauaaugcu

SEQ ID NO: 3876982 - RNA, 21 nt, Human
acuguaguaaauaaugcuuug

SEQ ID NO: 3876983 - RNA, 17 nt, Human
acuguaguucuaagacu

SEQ ID NO: 3876984 - RNA, 23 nt, Human
acuguauaaauaggagaggauga

SEQ ID NO: 3876985 - RNA, 15 nt, Human
acuguauagacaguu

SEQ ID NO: 3876986 - RNA, 22 nt, Human
acuguauagacaguuuguaaau

SEQ ID NO: 3876987 - RNA, 18 nt, Human
acuguauauaaaggaaaa

SEQ ID NO: 3876988 - RNA, 13 nt, Human
acuguauauuugu

SEQ ID NO: 3876989 - RNA, 14 nt, Human
acuguauauuugua

SEQ ID NO: 3876990 - RNA, 15 nt, Human
acuguaucauuuucu

SEQ ID NO: 3876991 - RNA, 13 nt, Human
acuguaugaucaa

SEQ ID NO: 3876992 - RNA, 15 nt, Human
acuguaugaucaaau

SEQ ID NO: 3876993 - RNA, 20 nt, Human
acuguaugaucaaauguuua

SEQ ID NO: 3876994 - RNA, 22 nt, Human
acuguaugaucaaauguuuaau

SEQ ID NO: 3876995 - RNA, 15 nt, Human
acuguaugauuuaua

SEQ ID NO: 3876996 - RNA, 12 nt, Human
acuguaugcuca

SEQ ID NO: 3876997 - RNA, 13 nt, Human
acuguaugcugga

SEQ ID NO: 3876998 - RNA, 12 nt, Human
acuguauguuau

SEQ ID NO: 3876999 - RNA, 12 nt, Human
acuguauuugaa

SEQ ID NO: 3877000 - RNA, 23 nt, Human
acuguauuugaaauaagaauuca

SEQ ID NO: 3877001 - RNA, 14 nt, Human
acuguauuugugac

SEQ ID NO: 3877002 - RNA, 20 nt, Human
acuguauuugugacuaauug

SEQ ID NO: 3877003 - RNA, 21 nt, Human
acuguauuuuguauuguuuca

SEQ ID NO: 3877004 - RNA, 23 nt, Human
acugucaaaaaguuugguucugu

SEQ ID NO: 3877005 - RNA, 20 nt, Human
acugucaaaugaugugcaaa

SEQ ID NO: 3877006 - RNA, 20 nt, Human
acugucaaggcugcuuagaa

SEQ ID NO: 3877007 - RNA, 21 nt, Human
acugucaaggcugcuuagaau

SEQ ID NO: 3877008 - RNA, 12 nt, Human
acugucaauaaa

SEQ ID NO: 3877009 - RNA, 18 nt, Human
acugucaauaaacagcuu

SEQ ID NO: 3877010 - RNA, 17 nt, Human
acugucacccuccaccu

SEQ ID NO: 3877011 - RNA, 15 nt, Human
acugucacuguuccu

SEQ ID NO: 3877012 - RNA, 19 nt, Human
acugucagcagggacugua

SEQ ID NO: 3877013 - RNA, 22 nt, Human
acugucagcagggacuguaaac

SEQ ID NO: 3877014 - RNA, 23 nt, Human
acugucagcuccccucggagaag

SEQ ID NO: 3877015 - RNA, 16 nt, Human
acugucaggaagaaau

SEQ ID NO: 3877016 - RNA, 24 nt, Human
acugucaugcuucaucauucccuc

SEQ ID NO: 3877017 - RNA, 13 nt, Human
acuguccagagag

SEQ ID NO: 3877018 - RNA, 13 nt, Human
acugucccucaaa

SEQ ID NO: 3877019 - RNA, 20 nt, Human
acugucccucaaaugaccca

SEQ ID NO: 3877020 - RNA, 14 nt, Human
acugucccuccugg

SEQ ID NO: 3877021 - RNA, 15 nt, Human
acugucccuccuggu

SEQ ID NO: 3877022 - RNA, 16 nt, Human
acugucccuccuggug

SEQ ID NO: 3877023 - RNA, 18 nt, Human
acuguccuacccacccuc

SEQ ID NO: 3877024 - RNA, 18 nt, Human
acuguccuccaagccagc

SEQ ID NO: 3877025 - RNA, 17 nt, Human
acuguccucuccccucc

SEQ ID NO: 3877026 - RNA, 19 nt, Human
acuguccucuuucagaaaa

SEQ ID NO: 3877027 - RNA, 22 nt, Human
acuguccucuuucagaaaacag

SEQ ID NO: 3877028 - RNA, 10 nt, Human
acuguccugc

SEQ ID NO: 3877029 - RNA, 13 nt, Human
acuguccugcucc

SEQ ID NO: 3877030 - RNA, 16 nt, Human
acuguccugcuccaca

SEQ ID NO: 3877031 - RNA, 18 nt, Human
acuguccugcuccacagu

SEQ ID NO: 3877032 - RNA, 12 nt, Human
acuguccugggc

SEQ ID NO: 3877033 - RNA, 14 nt, Human
acuguccugggccu

SEQ ID NO: 3877034 - RNA, 13 nt, Human
acuguccugggcg

SEQ ID NO: 3877035 - RNA, 22 nt, Human
acuguccuguugauuaauuucu

SEQ ID NO: 3877036 - RNA, 13 nt, Human
acugucgcugcuu

SEQ ID NO: 3877037 - RNA, 14 nt, Human
acugucgcugcuuc

SEQ ID NO: 3877038 - RNA, 14 nt, Human
acugucggaggaaa

SEQ ID NO: 3877039 - RNA, 17 nt, Human
acugucggaggaaagac

SEQ ID NO: 3877040 - RNA, 21 nt, Human
acugucggaggaaagacaaca

SEQ ID NO: 3877041 - RNA, 17 nt, Human
acugucuauuaauauuc

SEQ ID NO: 3877042 - RNA, 19 nt, Human
acugucuauuucugcugaa

SEQ ID NO: 3877043 - RNA, 21 nt, Human
acugucucaagagggcacugg

SEQ ID NO: 3877044 - RNA, 15 nt, Human
acugucucucaugaa

SEQ ID NO: 3877045 - RNA, 13 nt, Human
acugucugguuuu

SEQ ID NO: 3877046 - RNA, 19 nt, Human
acugucugguuuuaacaau

SEQ ID NO: 3877047 - RNA, 10 nt, Human
acugucuuaa

SEQ ID NO: 3877048 - RNA, 12 nt, Human
acugucuucagu

SEQ ID NO: 3877049 - RNA, 16 nt, Human
acugucuucuucaggg

SEQ ID NO: 3877050 - RNA, 18 nt, Human
acugucuuuaaaagagag

SEQ ID NO: 3877051 - RNA, 12 nt, Human
acugugaagagc

SEQ ID NO: 3877052 - RNA, 23 nt, Human
acugugacaacugucuaacuuua

SEQ ID NO: 3877053 - RNA, 13 nt, Human
acugugacacacu

SEQ ID NO: 3877054 - RNA, 23 nt, Human
acugugacacacuacaccacaca

SEQ ID NO: 3877055 - RNA, 15 nt, Human
acugugacaggcagc

SEQ ID NO: 3877056 - RNA, 17 nt, Human
acugugacaggcagcag

SEQ ID NO: 3877057 - RNA, 18 nt, Human
acugugacaggcagcaga

SEQ ID NO: 3877058 - RNA, 17 nt, Human
acugugagaacccaguu

SEQ ID NO: 3877059 - RNA, 23 nt, Human
acugugaugaagccgaccuuaga

SEQ ID NO: 3877060 - RNA, 22 nt, Human
acugugauucagaaaauguucu

SEQ ID NO: 3877061 - RNA, 13 nt, Human
acugugauuugaa

SEQ ID NO: 3877062 - RNA, 21 nt, Human
acugugcacaucugugucuug

SEQ ID NO: 3877063 - RNA, 20 nt, Human
acugugcaggugcuauuguu

SEQ ID NO: 3877064 - RNA, 19 nt, Human
acugugcauagugcuggga

SEQ ID NO: 3877065 - RNA, 12 nt, Human
acugugcccugg

SEQ ID NO: 3877066 - RNA, 14 nt, Human
acugugcccuggug

SEQ ID NO: 3877067 - RNA, 22 nt, Human
acugugccucagagaccagggc

SEQ ID NO: 3877068 - RNA, 23 nt, Human
acugugccucagagaccagggcu

SEQ ID NO: 3877069 - RNA, 11 nt, Human
acugugccuuu

SEQ ID NO: 3877070 - RNA, 12 nt, Human
acugugcuaaua

SEQ ID NO: 3877071 - RNA, 18 nt, Human
acugugcuaauaacagug

SEQ ID NO: 3877072 - RNA, 21 nt, Human
acugugcuaauaacagugcau

SEQ ID NO: 3877073 - RNA, 22 nt, Human
acugugcuacugucuuuggaaa

SEQ ID NO: 3877074 - RNA, 18 nt, Human
acugugcuccagccuggg

SEQ ID NO: 3877075 - RNA, 20 nt, Human
acugugcugagucugaaggc

SEQ ID NO: 3877076 - RNA, 22 nt, Human
acugugcugagucugaaggcug

SEQ ID NO: 3877077 - RNA, 21 nt, Human
acugugcuggagccacuaacu

SEQ ID NO: 3877078 - RNA, 22 nt, Human
acugugcuggagccacuaacua

SEQ ID NO: 3877079 - RNA, 14 nt, Human
acugugcuguuguu

SEQ ID NO: 3877080 - RNA, 11 nt, Human
acugugcuuuc

SEQ ID NO: 3877081 - RNA, 20 nt, Human
acugugcuuucuauuguaca

SEQ ID NO: 3877082 - RNA, 11 nt, Human
acuguggagac

SEQ ID NO: 3877083 - RNA, 15 nt, Human
acuguggagacugcu

SEQ ID NO: 3877084 - RNA, 15 nt, Human
acuguggaggaagga

SEQ ID NO: 3877085 - RNA, 17 nt, Human
acuguggaggaaggauu

SEQ ID NO: 3877086 - RNA, 19 nt, Human
acuguggcacuugccuggg

SEQ ID NO: 3877087 - RNA, 23 nt, Human
acuguggccguuaucuggaagua

SEQ ID NO: 3877088 - RNA, 19 nt, Human
acuguggcugcuagcacuu

SEQ ID NO: 3877089 - RNA, 14 nt, Human
acuguggcugucug

SEQ ID NO: 3877090 - RNA, 18 nt, Human
acugugggcaauuuagaa

SEQ ID NO: 3877091 - RNA, 18 nt, Human
acuguggguagacacaca

SEQ ID NO: 3877092 - RNA, 15 nt, Human
acuguggguguguga

SEQ ID NO: 3877093 - RNA, 19 nt, Human
acugugguagguguuugaa

SEQ ID NO: 3877094 - RNA, 20 nt, Human
acuguggugacuuuggauaa

SEQ ID NO: 3877095 - RNA, 21 nt, Human
acuguggugacuuuggauaau

SEQ ID NO: 3877096 - RNA, 21 nt, Human
acuuaauuucuuuauguaauc

SEQ ID NO: 3877097 - RNA, 22 nt, Human
acuuacagagcguggcugugcu

SEQ ID NO: 3877098 - RNA, 19 nt, Human
acuuacauauauuuuuaaa

SEQ ID NO: 3877099 - RNA, 14 nt, Human
acuuacaugauuca

SEQ ID NO: 3877100 - RNA, 15 nt, Human
acuuacauuuacaaa

SEQ ID NO: 3877101 - RNA, 18 nt, Human
acuuaccaggcaccaaaa

SEQ ID NO: 3877102 - RNA, 21 nt, Human
acuuaccaggcaccaaaagaa

SEQ ID NO: 3877103 - RNA, 21 nt, Human
acuuaccuaagugacauuugu

SEQ ID NO: 3877104 - RNA, 16 nt, Human
acuuaccuagugaaac

SEQ ID NO: 3877105 - RNA, 19 nt, Human
acuuaccugaguugaagag

SEQ ID NO: 3877106 - RNA, 15 nt, Human
acuuaccuucaauaa

SEQ ID NO: 3877107 - RNA, 20 nt, Human
acuuaccuucaauaaaguau

SEQ ID NO: 3877108 - RNA, 17 nt, Human
acuuacuaaaauauaua

SEQ ID NO: 3877109 - RNA, 12 nt, Human
acuuacuauuuu

SEQ ID NO: 3877110 - RNA, 18 nt, Human
acuuacugcgacuaaacu

SEQ ID NO: 3877111 - RNA, 16 nt, Human
acuuacuguaagacau

SEQ ID NO: 3877112 - RNA, 17 nt, Human
acuuacuguaagacauu

SEQ ID NO: 3877113 - RNA, 13 nt, Human
acuuacuguacau

SEQ ID NO: 3877114 - RNA, 21 nt, Human
acuuacuguacaugaaaacac

SEQ ID NO: 3877115 - RNA, 16 nt, Human
acuuacuuacccucac

SEQ ID NO: 3877116 - RNA, 15 nt, Human
acuuacuugcuuauu

SEQ ID NO: 3877117 - RNA, 15 nt, Human
acuuacuuuuguaaa

SEQ ID NO: 3877118 - RNA, 21 nt, Human
acuuacuuuuucuggucucua

SEQ ID NO: 3877119 - RNA, 15 nt, Human
acuuagaaagcaggg

SEQ ID NO: 3877120 - RNA, 16 nt, Human
acuuagaaauugcauu

SEQ ID NO: 3877121 - RNA, 15 nt, Human
acuuagaauaaaauu

SEQ ID NO: 3877122 - RNA, 18 nt, Human
acuuagaaucccuguguu

SEQ ID NO: 3877123 - RNA, 20 nt, Human
acuuagaaucccuguguuaa

SEQ ID NO: 3877124 - RNA, 19 nt, Human
acuuagacucuaguauuua

SEQ ID NO: 3877125 - RNA, 23 nt, Human
acuuagagcuuuuuuuuuuuaau

SEQ ID NO: 3877126 - RNA, 16 nt, Human
acuuagauuuuacaug

SEQ ID NO: 3877127 - RNA, 24 nt, Human
acuuagauuuuacaugaaguauuu

SEQ ID NO: 3877128 - RNA, 13 nt, Human
acuuagcaaaaag

SEQ ID NO: 3877129 - RNA, 19 nt, Human
acuuagcauccuaagaaau

SEQ ID NO: 3877130 - RNA, 16 nt, Human
acuuagcaugcacaaa

SEQ ID NO: 3877131 - RNA, 23 nt, Human
acuuagcaugcacaaaguguauu

SEQ ID NO: 3877132 - RNA, 21 nt, Human
acuuagcauuuucugcaucuc

SEQ ID NO: 3877133 - RNA, 23 nt, Human
acuuagccauuuuucaaagcaau

SEQ ID NO: 3877134 - RNA, 17 nt, Human
acuuagccuuuaccugu

SEQ ID NO: 3877135 - RNA, 20 nt, Human
acuuagccuuuaccugugaa

SEQ ID NO: 3877136 - RNA, 15 nt, Human
acuuagccuuucuuu

SEQ ID NO: 3877137 - RNA, 21 nt, Human
acuuagcuggagaugucucua

SEQ ID NO: 3877138 - RNA, 17 nt, Human
agaagcaacagaaaaaa

SEQ ID NO: 3877139 - RNA, 19 nt, Human
agaagcaacccaaauguuc

SEQ ID NO: 3877140 - RNA, 23 nt, Human
agaagcaaccucaguaauuuaga

SEQ ID NO: 3877141 - RNA, 15 nt, Human
agaagcaagaaagaa

SEQ ID NO: 3877142 - RNA, 20 nt, Human
agaagcaauaaagaagagug

SEQ ID NO: 3877143 - RNA, 21 nt, Human
agaagcaauaaagaagagugc

SEQ ID NO: 3877144 - RNA, 14 nt, Human
agaagcagaaauac

SEQ ID NO: 3877145 - RNA, 15 nt, Human
agaagcagaaauaca

SEQ ID NO: 3877146 - RNA, 13 nt, Human
agaagcagaugag

SEQ ID NO: 3877147 - RNA, 18 nt, Human
agaagcaggcuacacuga

SEQ ID NO: 3877148 - RNA, 17 nt, Human
agaagcagugagccgca

SEQ ID NO: 3877149 - RNA, 15 nt, Human
agaagcauacaacuu

SEQ ID NO: 3877150 - RNA, 10 nt, Human
agaagcauuu

SEQ ID NO: 3877151 - RNA, 15 nt, Human
acuuuugcccuuuga

SEQ ID NO: 3877152 - RNA, 14 nt, Human
acuuuuggcauuuu

SEQ ID NO: 3877153 - RNA, 20 nt, Human
acuuuugguuaagucuguuu

SEQ ID NO: 3877154 - RNA, 17 nt, Human
acuuuuguaaagaaauu

SEQ ID NO: 3877155 - RNA, 16 nt, Human
acuuuuguacugaauu

SEQ ID NO: 3877156 - RNA, 17 nt, Human
acuuuuguacugaauuu

SEQ ID NO: 3877157 - RNA, 19 nt, Human
acuuuuguguaaugaaaau

SEQ ID NO: 3877158 - RNA, 13 nt, Human
acuuuuguucuug

SEQ ID NO: 3877159 - RNA, 18 nt, Human
acuuuuuaaaaaacuuuc

SEQ ID NO: 3877160 - RNA, 11 nt, Human
acuuuuuacaa

SEQ ID NO: 3877161 - RNA, 12 nt, Human
acuuuuuauaaa

SEQ ID NO: 3877162 - RNA, 14 nt, Human
acuuuuuauauaua

SEQ ID NO: 3877163 - RNA, 12 nt, Human
acuuuuuauauu

SEQ ID NO: 3877164 - RNA, 21 nt, Human
acuuuuuauauuuuauacauu

SEQ ID NO: 3877165 - RNA, 17 nt, Human
acuuuuuauugccuucu

SEQ ID NO: 3877166 - RNA, 13 nt, Human
acuuuuucauuug

SEQ ID NO: 3877167 - RNA, 11 nt, Human
acuuuuucuga

SEQ ID NO: 3877168 - RNA, 17 nt, Human
acuuuuugaacuaagaa

SEQ ID NO: 3877169 - RNA, 21 nt, Human
acuuuuugaacuaagaaacuu

SEQ ID NO: 3877170 - RNA, 17 nt, Human
acuuuuugguggaugua

SEQ ID NO: 3877171 - RNA, 15 nt, Human
acuuuuugugaagac

SEQ ID NO: 3877172 - RNA, 23 nt, Human
acuuuuuguucugguccuuuuug

SEQ ID NO: 3877173 - RNA, 19 nt, Human
acuuuuuuaaauaaacuuu

SEQ ID NO: 3877174 - RNA, 20 nt, Human
acuuuuuuaaauaaacuuuu

SEQ ID NO: 3877175 - RNA, 15 nt, Human
acuuuuuuauuuaaa

SEQ ID NO: 3877176 - RNA, 13 nt, Human
acuuuuuuccaca

SEQ ID NO: 3877177 - RNA, 12 nt, Human
acuuuuuuuagu

SEQ ID NO: 3877178 - RNA, 16 nt, Human
acuuuuuuucaaugug

SEQ ID NO: 3877179 - RNA, 18 nt, Human
acuuuuuuucuucuacuu

SEQ ID NO: 3877180 - RNA, 14 nt, Human
acuuuuuuuguaug

SEQ ID NO: 3877181 - RNA, 20 nt, Human
agaaaaaaaaaagaagaaga

SEQ ID NO: 3877182 - RNA, 17 nt, Human
agaaaaaaaaagaaaaa

SEQ ID NO: 3877183 - RNA, 13 nt, Human
agaaaaaaaaaug

SEQ ID NO: 3877184 - RNA, 16 nt, Human
agaaaaaaaaaugcca

SEQ ID NO: 3877185 - RNA, 19 nt, Human
agaaaaaaaauaacacaga

SEQ ID NO: 3877186 - RNA, 22 nt, Human
agaaaaaaauaauuuuaugaac

SEQ ID NO: 3877187 - RNA, 17 nt, Human
agaaaaaaaucuucucc

SEQ ID NO: 3877188 - RNA, 14 nt, Human
agaaaaaaauguau

SEQ ID NO: 3877189 - RNA, 23 nt, Human
agaaaaaaauguauuuuauguua

SEQ ID NO: 3877190 - RNA, 13 nt, Human
agaaaaaaauguc

SEQ ID NO: 3877191 - RNA, 19 nt, Human
agaaaaaaauuacuaauuu

SEQ ID NO: 3877192 - RNA, 15 nt, Human
agaaaaaaauucaug

SEQ ID NO: 3877193 - RNA, 17 nt, Human
agaaaaaaauugaaaug

SEQ ID NO: 3877194 - RNA, 18 nt, Human
agaaaaaagagaaaagaa

SEQ ID NO: 3877195 - RNA, 18 nt, Human
agaaaaaauaacacacau

SEQ ID NO: 3877196 - RNA, 14 nt, Human
agaaaaaauacauu

SEQ ID NO: 3877197 - RNA, 16 nt, Human
agaaaaaauacauuuu

SEQ ID NO: 3877198 - RNA, 19 nt, Human
agaaaaaauauuuucccua

SEQ ID NO: 3877199 - RNA, 13 nt, Human
agaaaaacaaauc

SEQ ID NO: 3877200 - RNA, 19 nt, Human
agaaaaacaaugguaacau

SEQ ID NO: 3877201 - RNA, 22 nt, Human
agaaaaacaaugguaacauuuu

SEQ ID NO: 3877202 - RNA, 14 nt, Human
agaaaaagaagcaa

SEQ ID NO: 3877203 - RNA, 12 nt, Human
agaaaaagcaaa

SEQ ID NO: 3877204 - RNA, 14 nt, Human
agaaaaaggagcuu

SEQ ID NO: 3877205 - RNA, 13 nt, Human
agaaaaauaaaga

SEQ ID NO: 3877206 - RNA, 20 nt, Human
agaaaaauaaagaaaagaug

SEQ ID NO: 3877207 - RNA, 15 nt, Human
agaaaaauaacccuu

SEQ ID NO: 3877208 - RNA, 17 nt, Human
agaaaaauauauacuaa

SEQ ID NO: 3877209 - RNA, 15 nt, Human
agaaaaauaucugua

SEQ ID NO: 3877210 - RNA, 19 nt, Human
agaaaaauaugaccacacu

SEQ ID NO: 3877211 - RNA, 15 nt, Human
acugauaaagaaaga

SEQ ID NO: 3877212 - RNA, 15 nt, Human
acugauaguuacugu

SEQ ID NO: 3877213 - RNA, 23 nt, Human
acugauaguuacuguugugaccu

SEQ ID NO: 3877214 - RNA, 17 nt, Human
acugauauauuuuacaa

SEQ ID NO: 3877215 - RNA, 17 nt, Human
acugaucaugcauuguu

SEQ ID NO: 3877216 - RNA, 17 nt, Human
acugauccagcccugag

SEQ ID NO: 3877217 - RNA, 23 nt, Human
acugaucucaggggucuuaccuu

SEQ ID NO: 3877218 - RNA, 15 nt, Human
acugaugcugagauu

SEQ ID NO: 3877219 - RNA, 16 nt, Human
acugaugcugagauuc

SEQ ID NO: 3877220 - RNA, 19 nt, Human
acugaugcugccccucauc

SEQ ID NO: 3877221 - RNA, 20 nt, Human
acugaugcugccccucaucu

SEQ ID NO: 3877222 - RNA, 15 nt, Human
acugaugcuguucuc

SEQ ID NO: 3877223 - RNA, 20 nt, Human
acugaugcuguucucuucuu

SEQ ID NO: 3877224 - RNA, 22 nt, Human
acugauggcuaauguacugcau

SEQ ID NO: 3877225 - RNA, 12 nt, Human
acugaugggcaa

SEQ ID NO: 3877226 - RNA, 18 nt, Human
acugauguacaauuaaaa

SEQ ID NO: 3877227 - RNA, 20 nt, Human
acugauguaugaggaauuuc

SEQ ID NO: 3877228 - RNA, 14 nt, Human
acugaugucuccua

SEQ ID NO: 3877229 - RNA, 17 nt, Human
acugaugucuccuaagc

SEQ ID NO: 3877230 - RNA, 13 nt, Human
acugaugugaaac

SEQ ID NO: 3877231 - RNA, 14 nt, Human
acugaugugaaacu

SEQ ID NO: 3877232 - RNA, 18 nt, Human
acugauguuaggcugggc

SEQ ID NO: 3877233 - RNA, 23 nt, Human
acugauguuaggcugggcccaga

SEQ ID NO: 3877234 - RNA, 13 nt, Human
acugauguugugu

SEQ ID NO: 3877235 - RNA, 18 nt, Human
acugauguuugugcagua

SEQ ID NO: 3877236 - RNA, 20 nt, Human
acugauuaugucuuuuauau

SEQ ID NO: 3877237 - RNA, 18 nt, Human
acugauuauuuucuucau

SEQ ID NO: 3877238 - RNA, 19 nt, Human
acugauucacaucucauuu

SEQ ID NO: 3877239 - RNA, 20 nt, Human
acugauuguuuuagagacua

SEQ ID NO: 3877240 - RNA, 13 nt, Human
acugauuucacaa

SEQ ID NO: 3877241 - RNA, 17 nt, Human
acugauuucacaacaga

SEQ ID NO: 3877242 - RNA, 12 nt, Human
acugauuucaga

SEQ ID NO: 3877243 - RNA, 15 nt, Human
acugauuucaguaag

SEQ ID NO: 3877244 - RNA, 19 nt, Human
acugauuuccccuuuugca

SEQ ID NO: 3877245 - RNA, 22 nt, Human
acugauuuccccuuuugcauuc

SEQ ID NO: 3877246 - RNA, 23 nt, Human
acugauuuccccuuuugcauucu

SEQ ID NO: 3877247 - RNA, 14 nt, Human
acugauuuccuuug

SEQ ID NO: 3877248 - RNA, 22 nt, Human
acugauuugcaauaaaaaugau

SEQ ID NO: 3877249 - RNA, 16 nt, Human
acugauuuggagauau

SEQ ID NO: 3877250 - RNA, 18 nt, Human
acugauuuuuguaagaca

SEQ ID NO: 3877251 - RNA, 14 nt, Human
acugauuuuuguga

SEQ ID NO: 3877252 - RNA, 15 nt, Human
acugauuuuugugau

SEQ ID NO: 3877253 - RNA, 22 nt, Human
acugcaaaaagaaaaucuuuau

SEQ ID NO: 3877254 - RNA, 15 nt, Human
acugcaaaggcgcag

SEQ ID NO: 3877255 - RNA, 21 nt, Human
acugcaaaucaggcuuuuguu

SEQ ID NO: 3877256 - RNA, 21 nt, Human
acugcaaaugucaucagaacu

SEQ ID NO: 3877257 - RNA, 18 nt, Human
acugcaacaggcuugugc

SEQ ID NO: 3877258 - RNA, 13 nt, Human
acugcaaccucca

SEQ ID NO: 3877259 - RNA, 17 nt, Human
acugcaaccucugccuc

SEQ ID NO: 3877260 - RNA, 14 nt, Human
acugcaaccuuguu

SEQ ID NO: 3877261 - RNA, 17 nt, Human
acugcaagagccuuggu

SEQ ID NO: 3877262 - RNA, 15 nt, Human
acugcaagucacaaa

SEQ ID NO: 3877263 - RNA, 19 nt, Human
acugcaaguccuuuuguaa

SEQ ID NO: 3877264 - RNA, 20 nt, Human
acugcaaguccuuuuguaaa

SEQ ID NO: 3877265 - RNA, 16 nt, Human
acugcaauaacuucug

SEQ ID NO: 3877266 - RNA, 17 nt, Human
acugcaauaacuucuga

SEQ ID NO: 3877267 - RNA, 18 nt, Human
acugcaauaacuucugac

SEQ ID NO: 3877268 - RNA, 17 nt, Human
acugcaauagagacugu

SEQ ID NO: 3877269 - RNA, 22 nt, Human
acugcaauagagacuguagauu

SEQ ID NO: 3877270 - RNA, 20 nt, Human
acugcaauccugucuuucug

SEQ ID NO: 3877271 - RNA, 21 nt, Human
acugcaauccugucuuucuga

SEQ ID NO: 3877272 - RNA, 15 nt, Human
acugcaaugugaucu

SEQ ID NO: 3877273 - RNA, 14 nt, Human
acugcacaauaacu

SEQ ID NO: 3877274 - RNA, 20 nt, Human
acugcacaauaacuccuccc

SEQ ID NO: 3877275 - RNA, 12 nt, Human
acugcacagagc

SEQ ID NO: 3877276 - RNA, 17 nt, Human
acugcacagagcucucc

SEQ ID NO: 3877277 - RNA, 18 nt, Human
acugcacagagcucucca

SEQ ID NO: 3877278 - RNA, 23 nt, Human
acugcacagagcucuccagcucc

SEQ ID NO: 3877279 - RNA, 16 nt, Human
acugcacagugcaucu

SEQ ID NO: 3877280 - RNA, 22 nt, Human
acugcacagugcaucucagccc

SEQ ID NO: 3877281 - RNA, 16 nt, Human
acugcacaugaagaaa

SEQ ID NO: 3877282 - RNA, 18 nt, Human
acugcacaugaagaaaua

SEQ ID NO: 3877283 - RNA, 19 nt, Human
acugcacaugauuucacaa

SEQ ID NO: 3877284 - RNA, 20 nt, Human
acugcacaugauuucacaaa

SEQ ID NO: 3877285 - RNA, 21 nt, Human
acugcacaugauuucacaaau

SEQ ID NO: 3877286 - RNA, 16 nt, Human
acugcacccccuccug

SEQ ID NO: 3877287 - RNA, 19 nt, Human
acugcacccccuccugcug

SEQ ID NO: 3877288 - RNA, 20 nt, Human
acugcacccccuccugcugc

SEQ ID NO: 3877289 - RNA, 21 nt, Human
acugcacccccuccugcugca

SEQ ID NO: 3877290 - RNA, 16 nt, Human
acugcaccgggccaca

SEQ ID NO: 3877291 - RNA, 21 nt, Human
acugcacuauagccuagguga

SEQ ID NO: 3877292 - RNA, 13 nt, Human
acugcacuccagc

SEQ ID NO: 3877293 - RNA, 18 nt, Human
acugcacuccagccuggg

SEQ ID NO: 3877294 - RNA, 19 nt, Human
acugcacuccagccugggc

SEQ ID NO: 3877295 - RNA, 20 nt, Human
acugcacuccagccugggca

SEQ ID NO: 3877296 - RNA, 21 nt, Human
acugcacuccagccugggcga

SEQ ID NO: 3877297 - RNA, 20 nt, Human
acugcacuccagccugggug

SEQ ID NO: 3877298 - RNA, 17 nt, Human
acugcacucuagccgga

SEQ ID NO: 3877299 - RNA, 16 nt, Human
acugcagaccuguccu

SEQ ID NO: 3877300 - RNA, 14 nt, Human
acugcagauugaga

SEQ ID NO: 3877301 - RNA, 20 nt, Human
acugcagauugagaccuaca

SEQ ID NO: 3877302 - RNA, 23 nt, Human
acugcagauugagaccuacaggc

SEQ ID NO: 3877303 - RNA, 21 nt, Human
acugcagcaaucuuugaaaga

SEQ ID NO: 3877304 - RNA, 14 nt, Human
acugcagcaccucc

SEQ ID NO: 3877305 - RNA, 15 nt, Human
acugcagcaccucca

SEQ ID NO: 3877306 - RNA, 22 nt, Human
acugcagccucaaccuccuggg

SEQ ID NO: 3877307 - RNA, 22 nt, Human
acugcagccucgaacuccuggg

SEQ ID NO: 3877308 - RNA, 19 nt, Human
acugcaggcaucacagcua

SEQ ID NO: 3877309 - RNA, 12 nt, Human
acugcaggcccc

SEQ ID NO: 3877310 - RNA, 18 nt, Human
acugcaggcccuggccuc

SEQ ID NO: 3877311 - RNA, 17 nt, Human
acugcaggucaaguugu

SEQ ID NO: 3877312 - RNA, 22 nt, Human
acugcagugaaagacaagcugc

SEQ ID NO: 3877313 - RNA, 22 nt, Human
acugcauaccaaccugggcaau

SEQ ID NO: 3877314 - RNA, 14 nt, Human
acugcaugcacuuc

SEQ ID NO: 3877315 - RNA, 22 nt, Human
acugcaugcccagagacccagc

SEQ ID NO: 3877316 - RNA, 14 nt, Human
acugcauggaccua

SEQ ID NO: 3877317 - RNA, 21 nt, Human
acugcauggaccuaacauucg

SEQ ID NO: 3877318 - RNA, 14 nt, Human
acugcauuauauuu

SEQ ID NO: 3877319 - RNA, 17 nt, Human
acugcauucuucugauc

SEQ ID NO: 3877320 - RNA, 21 nt, Human
acugcauugacuuucaguaaa

SEQ ID NO: 3877321 - RNA, 14 nt, Human
acugcauuuaggga

SEQ ID NO: 3877322 - RNA, 12 nt, Human
acugcauuugug

SEQ ID NO: 3877323 - RNA, 17 nt, Human
acugccaaaaugcucua

SEQ ID NO: 3877324 - RNA, 18 nt, Human
acugccaaccucgcucca

SEQ ID NO: 3877325 - RNA, 19 nt, Human
acugccaacugaucuguua

SEQ ID NO: 3877326 - RNA, 23 nt, Human
acugccaauauagaaaaauaaaa

SEQ ID NO: 3877327 - RNA, 20 nt, Human
acugccacaaggaagaaauu

SEQ ID NO: 3877328 - RNA, 12 nt, Human
acugccaccucc

SEQ ID NO: 3877329 - RNA, 14 nt, Human
acugccagaugcug

SEQ ID NO: 3877330 - RNA, 19 nt, Human
acugccagaugcugauguu

SEQ ID NO: 3877331 - RNA, 22 nt, Human
acugccagaugcugauguucag

SEQ ID NO: 3877332 - RNA, 13 nt, Human
acugccagcagca

SEQ ID NO: 3877333 - RNA, 14 nt, Human
acugccagcagcag

SEQ ID NO: 3877334 - RNA, 16 nt, Human
acugccagcagcagca

SEQ ID NO: 3877335 - RNA, 18 nt, Human
acugccagcagcagcagg

SEQ ID NO: 3877336 - RNA, 12 nt, Human
acugccagcucu

SEQ ID NO: 3877337 - RNA, 13 nt, Human
acugccaggaggg

SEQ ID NO: 3877338 - RNA, 15 nt, Human
acugccaggccagcc

SEQ ID NO: 3877339 - RNA, 23 nt, Human
acugccaggccagccuccgagag

SEQ ID NO: 3877340 - RNA, 15 nt, Human
acugccauaaaacau

SEQ ID NO: 3877341 - RNA, 21 nt, Human
acugccauauuaaauuuuuug

SEQ ID NO: 3877342 - RNA, 20 nt, Human
acugccauuauuuucuguca

SEQ ID NO: 3877343 - RNA, 22 nt, Human
acugccauuauuuucugucaga

SEQ ID NO: 3877344 - RNA, 17 nt, Human
acugccccaacuccugg

SEQ ID NO: 3877345 - RNA, 18 nt, Human
acugccccaacuccugga

SEQ ID NO: 3877346 - RNA, 16 nt, Human
acugcccccucugccc

SEQ ID NO: 3877347 - RNA, 18 nt, Human
acugcccccucugcccug

SEQ ID NO: 3877348 - RNA, 18 nt, Human
acugccccgugcagacug

SEQ ID NO: 3877349 - RNA, 19 nt, Human
acugccccgugcagacugg

SEQ ID NO: 3877350 - RNA, 14 nt, Human
acugcccgcacacc

SEQ ID NO: 3877351 - RNA, 19 nt, Human
acugcccgcacacccucac

SEQ ID NO: 3877352 - RNA, 22 nt, Human
acugcccggggcagcugccaga

SEQ ID NO: 3877353 - RNA, 23 nt, Human
acugcccuccagcucuuuccucc

SEQ ID NO: 3877354 - RNA, 18 nt, Human
acugccgaccgaggcugg

SEQ ID NO: 3877355 - RNA, 19 nt, Human
agaaccagucuuucaacuc

SEQ ID NO: 3877356 - RNA, 22 nt, Human
agaaccagucuuucaacucauu

SEQ ID NO: 3877357 - RNA, 18 nt, Human
agaaccaguuucaggugu

SEQ ID NO: 3877358 - RNA, 22 nt, Human
agaaccaucccuauuuuguauu

SEQ ID NO: 3877359 - RNA, 14 nt, Human
agaaccccucugcu

SEQ ID NO: 3877360 - RNA, 16 nt, Human
agaaccccucugcuuu

SEQ ID NO: 3877361 - RNA, 16 nt, Human
agaacccugccaugga

SEQ ID NO: 3877362 - RNA, 14 nt, Human
agaaccgagcaaag

SEQ ID NO: 3877363 - RNA, 16 nt, Human
agaaccgagcaaagau

SEQ ID NO: 3877364 - RNA, 21 nt, Human
agaaccgagcaaagaucaaaa

SEQ ID NO: 3877365 - RNA, 22 nt, Human
agaaccgagcaaagaucaaaau

SEQ ID NO: 3877366 - RNA, 13 nt, Human
agaaccuaacaug

SEQ ID NO: 3877367 - RNA, 17 nt, Human
agaaccuaacuguaucu

SEQ ID NO: 3877368 - RNA, 18 nt, Human
agaaccuaacuguaucuu

SEQ ID NO: 3877369 - RNA, 14 nt, Human
agaaccuaauucaa

SEQ ID NO: 3877370 - RNA, 19 nt, Human
agaaccucaggcuuccuug

SEQ ID NO: 3877371 - RNA, 23 nt, Human
agaaccuggaaaaauuccagaag

SEQ ID NO: 3877372 - RNA, 12 nt, Human
agaaccuggaga

SEQ ID NO: 3877373 - RNA, 14 nt, Human
agaaccuggccuuc

SEQ ID NO: 3877374 - RNA, 14 nt, Human
agaaccuucucuau

SEQ ID NO: 3877375 - RNA, 23 nt, Human
agaaccuuuugagugccuuacac

SEQ ID NO: 3877376 - RNA, 12 nt, Human
agaacggaagaa

SEQ ID NO: 3877377 - RNA, 22 nt, Human
agaacggacgagauaaugugaa

SEQ ID NO: 3877378 - RNA, 17 nt, Human
agaacguaaagaacuuu

SEQ ID NO: 3877379 - RNA, 20 nt, Human
agaacguauuuuaaaagcca

SEQ ID NO: 3877380 - RNA, 20 nt, Human
agaacguuuuuuccucagug

SEQ ID NO: 3877381 - RNA, 17 nt, Human
agaacuaaaauguucua

SEQ ID NO: 3877382 - RNA, 11 nt, Human
agaacuaaaug

SEQ ID NO: 3877383 - RNA, 13 nt, Human
agaacuaaauguu

SEQ ID NO: 3877384 - RNA, 22 nt, Human
agaacuacaaacaaaauuucua

SEQ ID NO: 3877385 - RNA, 23 nt, Human
agaacuacaaacaaaauuucuau

SEQ ID NO: 3877386 - RNA, 17 nt, Human
agaacuagaaccuggag

SEQ ID NO: 3877387 - RNA, 18 nt, Human
agaacuagaaccuggagg

SEQ ID NO: 3877388 - RNA, 15 nt, Human
agaacuagcauauag

SEQ ID NO: 3877389 - RNA, 17 nt, Human
agaacuagccaaaccag

SEQ ID NO: 3877390 - RNA, 21 nt, Human
agaacuauaugugaauccucu

SEQ ID NO: 3877391 - RNA, 14 nt, Human
agaacuaucuucau

SEQ ID NO: 3877392 - RNA, 18 nt, Human
agaacuaucuucaucuga

SEQ ID NO: 3877393 - RNA, 15 nt, Human
agaacucacucuggg

SEQ ID NO: 3877394 - RNA, 19 nt, Human
agaacucaucacuguggcu

SEQ ID NO: 3877395 - RNA, 23 nt, Human
agaacucaucccuaaugcugcag

SEQ ID NO: 3877396 - RNA, 21 nt, Human
agaacucaugacggaagaguu

SEQ ID NO: 3877397 - RNA, 19 nt, Human
agaacucauguuauuuuuu

SEQ ID NO: 3877398 - RNA, 16 nt, Human
agaacuccaggcccuc

SEQ ID NO: 3877399 - RNA, 14 nt, Human
agaacuccugacug

SEQ ID NO: 3877400 - RNA, 18 nt, Human
agaacucgcgcucaguaa

SEQ ID NO: 3877401 - RNA, 21 nt, Human
agaacucgcgcucaguaaacg

SEQ ID NO: 3877402 - RNA, 12 nt, Human
agaacucugccu

SEQ ID NO: 3877403 - RNA, 13 nt, Human
agaacucugccug

SEQ ID NO: 3877404 - RNA, 14 nt, Human
agaacucugccugc

SEQ ID NO: 3877405 - RNA, 14 nt, Human
agaacucuggcuuu

SEQ ID NO: 3877406 - RNA, 20 nt, Human
agaacucugggcugcuaccc

SEQ ID NO: 3877407 - RNA, 13 nt, Human
agaacucuuccuc

SEQ ID NO: 3877408 - RNA, 22 nt, Human
agaacucuuccuccaaggacag

SEQ ID NO: 3877409 - RNA, 14 nt, Human
agaacugaaaacau

SEQ ID NO: 3877410 - RNA, 17 nt, Human
agaacugaaaacauaaa

SEQ ID NO: 3877411 - RNA, 21 nt, Human
agaacugaaccggcuuuacca

SEQ ID NO: 3877412 - RNA, 15 nt, Human
agaacugaaugagaa

SEQ ID NO: 3877413 - RNA, 16 nt, Human
agaacugagcuccucu

SEQ ID NO: 3877414 - RNA, 15 nt, Human
agaacugcacaugaa

SEQ ID NO: 3877415 - RNA, 18 nt, Human
agaacugcaggcccuggc

SEQ ID NO: 3877416 - RNA, 15 nt, Human
agaacugcauauguu

SEQ ID NO: 3877417 - RNA, 11 nt, Human
agaacugccau

SEQ ID NO: 3877418 - RNA, 20 nt, Human
agaacugccauuauuuucug

SEQ ID NO: 3877419 - RNA, 22 nt, Human
agaacuggacucaggaugccca

SEQ ID NO: 3877420 - RNA, 21 nt, Human
agaacuggauuuucagaccug

SEQ ID NO: 3877421 - RNA, 15 nt, Human
agaacuggguaaaug

SEQ ID NO: 3877422 - RNA, 20 nt, Human
agaacuggguaaaugcaaag

SEQ ID NO: 3877423 - RNA, 22 nt, Human
agaacugucauguaaacauacc

SEQ ID NO: 3877424 - RNA, 23 nt, Human
agaacugucggaggaaagacaac

SEQ ID NO: 3877425 - RNA, 14 nt, Human
agaacugucuguga

SEQ ID NO: 3877426 - RNA, 20 nt, Human
agaacuguguuucaaguuca

SEQ ID NO: 3877427 - RNA, 21 nt, Human
agaacuguguuucaaguucaa

SEQ ID NO: 3877428 - RNA, 21 nt, Human
agaacuuacugauuauuuucu

SEQ ID NO: 3877429 - RNA, 16 nt, Human
agaacuucagaaagac

SEQ ID NO: 3877430 - RNA, 18 nt, Human
agaacuuccccauacaaa

SEQ ID NO: 3877431 - RNA, 13 nt, Human
agaacuucccuga

SEQ ID NO: 3877432 - RNA, 21 nt, Human
agaacuucccugauugaccug

SEQ ID NO: 3877433 - RNA, 17 nt, Human
agaacuugaagccugcu

SEQ ID NO: 3877434 - RNA, 18 nt, Human
agaacuugaaugugucag

SEQ ID NO: 3877435 - RNA, 15 nt, Human
agaacuugacccuga

SEQ ID NO: 3877436 - RNA, 14 nt, Human
agaacuugcugccu

SEQ ID NO: 3877437 - RNA, 23 nt, Human
agaacuuggauguaccugccccc

SEQ ID NO: 3877438 - RNA, 14 nt, Human
agaacuuucauuuu

SEQ ID NO: 3877439 - RNA, 15 nt, Human
agaacuuuuuuaaau

SEQ ID NO: 3877440 - RNA, 17 nt, Human
agaacuuuuuuaaauaa

SEQ ID NO: 3877441 - RNA, 18 nt, Human
agaacuuuuuuaaauaaa

SEQ ID NO: 3877442 - RNA, 14 nt, Human
agaagaaaaaaacg

SEQ ID NO: 3877443 - RNA, 12 nt, Human
agaagaaaagag

SEQ ID NO: 3877444 - RNA, 18 nt, Human
agaagaaaagagaagaag

SEQ ID NO: 3877445 - RNA, 20 nt, Human
agaagaaaagagaagaagaa

SEQ ID NO: 3877446 - RNA, 19 nt, Human
agaagaaaauggaaccagg

SEQ ID NO: 3877447 - RNA, 23 nt, Human
agaagaaaauggaaccaggcuug

SEQ ID NO: 3877448 - RNA, 12 nt, Human
agaagaaaauuc

SEQ ID NO: 3877449 - RNA, 13 nt, Human
agaagaaacaagg

SEQ ID NO: 3877450 - RNA, 21 nt, Human
agaagaaacaagguuuucagu

SEQ ID NO: 3877451 - RNA, 13 nt, Human
agaagaaacuagg

SEQ ID NO: 3877452 - RNA, 18 nt, Human
agaagaaagaacggaaga

SEQ ID NO: 3877453 - RNA, 14 nt, Human
agaagaaagacucu

SEQ ID NO: 3877454 - RNA, 15 nt, Human
agaagaaagacucua

SEQ ID NO: 3877455 - RNA, 18 nt, Human
agaagaaauaguucugug

SEQ ID NO: 3877456 - RNA, 13 nt, Human
agaagaaaugaaa

SEQ ID NO: 3877457 - RNA, 23 nt, Human
agaagaacuagagguuuuaugau

SEQ ID NO: 3877458 - RNA, 19 nt, Human
agaagaacuauaugugaau

SEQ ID NO: 3877459 - RNA, 21 nt, Human
agaagaacuguguuucaaguu

SEQ ID NO: 3877460 - RNA, 13 nt, Human
agaagaagaaaaa

SEQ ID NO: 3877461 - RNA, 14 nt, Human
agaagaagaagaaa

SEQ ID NO: 3877462 - RNA, 14 nt, Human
agaagaaggcagca

SEQ ID NO: 3877463 - RNA, 17 nt, Human
agaagaagucagagagg

SEQ ID NO: 3877464 - RNA, 18 nt, Human
agaagaauauucaggacu

SEQ ID NO: 3877465 - RNA, 19 nt, Human
agaagaauauucaggacuu

SEQ ID NO: 3877466 - RNA, 14 nt, Human
agaagaauauugua

SEQ ID NO: 3877467 - RNA, 22 nt, Human
agaagaauauuguauuguuaga

SEQ ID NO: 3877468 - RNA, 14 nt, Human
agaagaauauuguu

SEQ ID NO: 3877469 - RNA, 20 nt, Human
agaagaauauuguuccuaag

SEQ ID NO: 3877470 - RNA, 15 nt, Human
agaagaaugcaugcu

SEQ ID NO: 3877471 - RNA, 19 nt, Human
agaagaauguguuucaaac

SEQ ID NO: 3877472 - RNA, 15 nt, Human
agaagaauuugaaga

SEQ ID NO: 3877473 - RNA, 22 nt, Human
agaagaauuugaagacuucaaa

SEQ ID NO: 3877474 - RNA, 15 nt, Human
agaagacaaaaagac

SEQ ID NO: 3877475 - RNA, 12 nt, Human
agaagacaaaau

SEQ ID NO: 3877476 - RNA, 15 nt, Human
agaagacaaacuuug

SEQ ID NO: 3877477 - RNA, 13 nt, Human
agaagacacugau

SEQ ID NO: 3877478 - RNA, 18 nt, Human
agaagacaggcuggaaga

SEQ ID NO: 3877479 - RNA, 22 nt, Human
agaagacauggagacuccugcc

SEQ ID NO: 3877480 - RNA, 19 nt, Human
agaagacauguuuuagaca

SEQ ID NO: 3877481 - RNA, 18 nt, Human
agaagacugcauuauauu

SEQ ID NO: 3877482 - RNA, 13 nt, Human
agaagagaagcug

SEQ ID NO: 3877483 - RNA, 15 nt, Human
agaagagaagcugcu

SEQ ID NO: 3877484 - RNA, 17 nt, Human
agaagagaagcugcuga

SEQ ID NO: 3877485 - RNA, 22 nt, Human
agaagagaauauuagcuuuacu

SEQ ID NO: 3877486 - RNA, 12 nt, Human
agaagagacagg

SEQ ID NO: 3877487 - RNA, 15 nt, Human
agaagagagaaauag

SEQ ID NO: 3877488 - RNA, 15 nt, Human
agaagagaggagagg

SEQ ID NO: 3877489 - RNA, 15 nt, Human
agaagagaggggaag

SEQ ID NO: 3877490 - RNA, 22 nt, Human
agaagagaguccauauuucaau

SEQ ID NO: 3877491 - RNA, 17 nt, Human
agaagagaucaggaaga

SEQ ID NO: 3877492 - RNA, 21 nt, Human
agaagagauugugguuucauu

SEQ ID NO: 3877493 - RNA, 11 nt, Human
agaagagccac

SEQ ID NO: 3877494 - RNA, 13 nt, Human
agaagagccccac

SEQ ID NO: 3877495 - RNA, 23 nt, Human
agaagagcgcaguguuuugcaag

SEQ ID NO: 3877496 - RNA, 12 nt, Human
agaagagggaga

SEQ ID NO: 3877497 - RNA, 18 nt, Human
agaagagggccuguggga

SEQ ID NO: 3877498 - RNA, 14 nt, Human
agaagauaauuguu

SEQ ID NO: 3877499 - RNA, 19 nt, Human
agaagaucacgcuccccgc

SEQ ID NO: 3877500 - RNA, 14 nt, Human
agaagauccccuca

SEQ ID NO: 3877501 - RNA, 15 nt, Human
agaagaucuuugggc

SEQ ID NO: 3877502 - RNA, 19 nt, Human
agaagaugaauacaaacaa

SEQ ID NO: 3877503 - RNA, 16 nt, Human
agaagaugacuuccca

SEQ ID NO: 3877504 - RNA, 17 nt, Human
agaagaugaucagaccu

SEQ ID NO: 3877505 - RNA, 19 nt, Human
agaagauggcacuuauaac

SEQ ID NO: 3877506 - RNA, 15 nt, Human
acuccuuccuggccu

SEQ ID NO: 3877507 - RNA, 19 nt, Human
acuccuuccuggccugaga

SEQ ID NO: 3877508 - RNA, 20 nt, Human
acuccuuccuggccugagag

SEQ ID NO: 3877509 - RNA, 23 nt, Human
acuccuuccuggccugagaguca

SEQ ID NO: 3877510 - RNA, 21 nt, Human
acuccuugagagaccaggcaa

SEQ ID NO: 3877511 - RNA, 23 nt, Human
acuccuugagagaccaggcaaag

SEQ ID NO: 3877512 - RNA, 23 nt, Human
acuccuugauuuuagccuucucu

SEQ ID NO: 3877513 - RNA, 17 nt, Human
acuccuugcaucaaggg

SEQ ID NO: 3877514 - RNA, 19 nt, Human
acuccuugcaucaaggggu

SEQ ID NO: 3877515 - RNA, 16 nt, Human
acuccuuggccuagcc

SEQ ID NO: 3877516 - RNA, 15 nt, Human
acucgaaucugugug

SEQ ID NO: 3877517 - RNA, 17 nt, Human
acucgagaacuuucauu

SEQ ID NO: 3877518 - RNA, 19 nt, Human
acucgaggacuguauuugu

SEQ ID NO: 3877519 - RNA, 16 nt, Human
acucgaguuacagaca

SEQ ID NO: 3877520 - RNA, 15 nt, Human
acucgcccgcccacu

SEQ ID NO: 3877521 - RNA, 21 nt, Human
acucgcccgcccacuguccug

SEQ ID NO: 3877522 - RNA, 15 nt, Human
acucgcgacaaugca

SEQ ID NO: 3877523 - RNA, 16 nt, Human
acucgcgacaaugcaa

SEQ ID NO: 3877524 - RNA, 20 nt, Human
acucgcgacaaugcaaacca

SEQ ID NO: 3877525 - RNA, 23 nt, Human
acucgcgacaaugcaaaccauca

SEQ ID NO: 3877526 - RNA, 14 nt, Human
acucgcuagcagug

SEQ ID NO: 3877527 - RNA, 18 nt, Human
acucgcuagcaguggcag

SEQ ID NO: 3877528 - RNA, 23 nt, Human
acucgcuagcaguggcaggcaga

SEQ ID NO: 3877529 - RNA, 15 nt, Human
acucgcuguaugaaa

SEQ ID NO: 3877530 - RNA, 13 nt, Human
acucgcuuguaaa

SEQ ID NO: 3877531 - RNA, 17 nt, Human
acucgcuugugcagaaa

SEQ ID NO: 3877532 - RNA, 23 nt, Human
acucgcuugugcagaaaacauug

SEQ ID NO: 3877533 - RNA, 22 nt, Human
acucggcagcccuuccaaacuc

SEQ ID NO: 3877534 - RNA, 21 nt, Human
acucggccucccaaagugcug

SEQ ID NO: 3877535 - RNA, 15 nt, Human
acucggcucugcagu

SEQ ID NO: 3877536 - RNA, 20 nt, Human
acucgggaggcugagacagg

SEQ ID NO: 3877537 - RNA, 22 nt, Human
acucgggaggcugagacaggag

SEQ ID NO: 3877538 - RNA, 21 nt, Human
acucgggaggcugaggcacaa

SEQ ID NO: 3877539 - RNA, 21 nt, Human
acucgggaggcugaggcagga

SEQ ID NO: 3877540 - RNA, 15 nt, Human
acucgggcuccugug

SEQ ID NO: 3877541 - RNA, 23 nt, Human
acucgguguccccaccaucugcu

SEQ ID NO: 3877542 - RNA, 19 nt, Human
acucguauagcaugcaucu

SEQ ID NO: 3877543 - RNA, 14 nt, Human
acucguauaugucu

SEQ ID NO: 3877544 - RNA, 16 nt, Human
acucgucugacugugu

SEQ ID NO: 3877545 - RNA, 15 nt, Human
acucuaaaagguuca

SEQ ID NO: 3877546 - RNA, 16 nt, Human
acucuaaaagguucag

SEQ ID NO: 3877547 - RNA, 21 nt, Human
acucuaaaauuauaaaugaca

SEQ ID NO: 3877548 - RNA, 14 nt, Human
acucuaaagaccaa

SEQ ID NO: 3877549 - RNA, 18 nt, Human
acucuaaagaccaaacuu

SEQ ID NO: 3877550 - RNA, 22 nt, Human
acucuaaauucuuuauuucugu

SEQ ID NO: 3877551 - RNA, 18 nt, Human
acucuaacuguauauuug

SEQ ID NO: 3877552 - RNA, 21 nt, Human
acucuaacuguauauuuguau

SEQ ID NO: 3877553 - RNA, 13 nt, Human
acucuaagaaaga

SEQ ID NO: 3877554 - RNA, 12 nt, Human
acucuaagaucu

SEQ ID NO: 3877555 - RNA, 13 nt, Human
acucuaagaucuu

SEQ ID NO: 3877556 - RNA, 17 nt, Human
acucuaagaucuuagau

SEQ ID NO: 3877557 - RNA, 20 nt, Human
acucuaagaucuuagauucu

SEQ ID NO: 3877558 - RNA, 14 nt, Human
acucuaagauguua

SEQ ID NO: 3877559 - RNA, 20 nt, Human
acucuaagucauguauguuu

SEQ ID NO: 3877560 - RNA, 23 nt, Human
acucuaaguguuugcugcaauuu

SEQ ID NO: 3877561 - RNA, 21 nt, Human
acucuaauagugcuuaaaaau

SEQ ID NO: 3877562 - RNA, 13 nt, Human
acucuaauucuaa

SEQ ID NO: 3877563 - RNA, 16 nt, Human
acucuaauucuaacca

SEQ ID NO: 3877564 - RNA, 21 nt, Human
acucuaauucuaaccagagca

SEQ ID NO: 3877565 - RNA, 13 nt, Human
acucuacauaauu

SEQ ID NO: 3877566 - RNA, 16 nt, Human
acucuacaugcuuguu

SEQ ID NO: 3877567 - RNA, 17 nt, Human
acucuacccauauuaca

SEQ ID NO: 3877568 - RNA, 19 nt, Human
acucuacccauauuacaga

SEQ ID NO: 3877569 - RNA, 16 nt, Human
acucuacccucccacc

SEQ ID NO: 3877570 - RNA, 18 nt, Human
acucuacccucccacccc

SEQ ID NO: 3877571 - RNA, 13 nt, Human
acucuaccucaua

SEQ ID NO: 3877572 - RNA, 22 nt, Human
acucuaccucauaucaguuugc

SEQ ID NO: 3877573 - RNA, 20 nt, Human
acucuagacaagauauugua

SEQ ID NO: 3877574 - RNA, 21 nt, Human
acucuagacaagauauuguac

SEQ ID NO: 3877575 - RNA, 14 nt, Human
acucuagaguccaa

SEQ ID NO: 3877576 - RNA, 20 nt, Human
acucuagauaccuaaaacau

SEQ ID NO: 3877577 - RNA, 22 nt, Human
acucuagaugaaguuuuacauu

SEQ ID NO: 3877578 - RNA, 14 nt, Human
acucuagauuccau

SEQ ID NO: 3877579 - RNA, 21 nt, Human
acucuagauuuuguuuugcuu

SEQ ID NO: 3877580 - RNA, 23 nt, Human
acucuagauuuuguuuugcuuuu

SEQ ID NO: 3877581 - RNA, 21 nt, Human
acucuaggauguauauuuuau

SEQ ID NO: 3877582 - RNA, 17 nt, Human
acucuagggaaaaacca

SEQ ID NO: 3877583 - RNA, 13 nt, Human
acucuagggcagu

SEQ ID NO: 3877584 - RNA, 21 nt, Human
acucuaggggucaggcuccau

SEQ ID NO: 3877585 - RNA, 23 nt, Human
acucuagucaaugacaugaauuu

SEQ ID NO: 3877586 - RNA, 16 nt, Human
acucuaucaaguauua

SEQ ID NO: 3877587 - RNA, 16 nt, Human
acucuaucugggccug

SEQ ID NO: 3877588 - RNA, 17 nt, Human
acucuaucugggccugg

SEQ ID NO: 3877589 - RNA, 19 nt, Human
acucuaugccccaaauaua

SEQ ID NO: 3877590 - RNA, 23 nt, Human
acucuauggguaucaaacagcuc

SEQ ID NO: 3877591 - RNA, 12 nt, Human
acucuauucuuu

SEQ ID NO: 3877592 - RNA, 14 nt, Human
acucuauuuuuaca

SEQ ID NO: 3877593 - RNA, 22 nt, Human
acucucacacugguucucaaug

SEQ ID NO: 3877594 - RNA, 15 nt, Human
acucucagcccagaa

SEQ ID NO: 3877595 - RNA, 16 nt, Human
acucucagcccagaag

SEQ ID NO: 3877596 - RNA, 21 nt, Human
acucucagcccagaagaaaau

SEQ ID NO: 3877597 - RNA, 22 nt, Human
acucucaggaccaaagcuuuca

SEQ ID NO: 3877598 - RNA, 18 nt, Human
acucucaggaucaagaaa

SEQ ID NO: 3877599 - RNA, 16 nt, Human
acucucagucucugag

SEQ ID NO: 3877600 - RNA, 17 nt, Human
acucucagucucugagc

SEQ ID NO: 3877601 - RNA, 14 nt, Human
acucucauucccca

SEQ ID NO: 3877602 - RNA, 18 nt, Human
acggauuauuuuuucaga

SEQ ID NO: 3877603 - RNA, 19 nt, Human
acggauuauuuuuucagac

SEQ ID NO: 3877604 - RNA, 21 nt, Human
acggauuauuuuuucagaccg

SEQ ID NO: 3877605 - RNA, 15 nt, Human
acggauuuauuuuuc

SEQ ID NO: 3877606 - RNA, 20 nt, Human
acggcaccugggcccugggg

SEQ ID NO: 3877607 - RNA, 21 nt, Human
acggcaccugggcccuggggc

SEQ ID NO: 3877608 - RNA, 19 nt, Human
acggcacggucuucccucu

SEQ ID NO: 3877609 - RNA, 16 nt, Human
acggcacuguggccuu

SEQ ID NO: 3877610 - RNA, 15 nt, Human
acggcaggcucacug

SEQ ID NO: 3877611 - RNA, 17 nt, Human
acggcaggcucacugcc

SEQ ID NO: 3877612 - RNA, 21 nt, Human
acggcauuagcuuccugcccc

SEQ ID NO: 3877613 - RNA, 16 nt, Human
acggccaacaaagcug

SEQ ID NO: 3877614 - RNA, 15 nt, Human
acggccaagaaugua

SEQ ID NO: 3877615 - RNA, 15 nt, Human
acggccacacagcug

SEQ ID NO: 3877616 - RNA, 13 nt, Human
acggccacaucaa

SEQ ID NO: 3877617 - RNA, 12 nt, Human
acggccaggcca

SEQ ID NO: 3877618 - RNA, 17 nt, Human
acggccagggagaagcu

SEQ ID NO: 3877619 - RNA, 20 nt, Human
acggccaucucuuuguacag

SEQ ID NO: 3877620 - RNA, 22 nt, Human
acggccaucucuuuguacagga

SEQ ID NO: 3877621 - RNA, 22 nt, Human
acggcccucaucuaugaggaaa

SEQ ID NO: 3877622 - RNA, 11 nt, Human
acggcccugca

SEQ ID NO: 3877623 - RNA, 23 nt, Human
acggcccuggccuugggcccucu

SEQ ID NO: 3877624 - RNA, 14 nt, Human
acggccgcuccagg

SEQ ID NO: 3877625 - RNA, 18 nt, Human
acggccugaugcucccuc

SEQ ID NO: 3877626 - RNA, 19 nt, Human
acggccugaugcucccucc

SEQ ID NO: 3877627 - RNA, 20 nt, Human
acggccugaugcucccuccc

SEQ ID NO: 3877628 - RNA, 23 nt, Human
acggccuugcugggggccgcccu

SEQ ID NO: 3877629 - RNA, 21 nt, Human
acggccuuucuagccuggcua

SEQ ID NO: 3877630 - RNA, 16 nt, Human
acggcuaagaggcugc

SEQ ID NO: 3877631 - RNA, 16 nt, Human
acggcucacugcagcc

SEQ ID NO: 3877632 - RNA, 18 nt, Human
acggcucacugcagccuc

SEQ ID NO: 3877633 - RNA, 19 nt, Human
acggcucacugcagccuca

SEQ ID NO: 3877634 - RNA, 19 nt, Human
acggcucuguccccagccu

SEQ ID NO: 3877635 - RNA, 16 nt, Human
acggcugcgcacugug

SEQ ID NO: 3877636 - RNA, 15 nt, Human
acgggaccgggccgc

SEQ ID NO: 3877637 - RNA, 15 nt, Human
acgggacugacgcaa

SEQ ID NO: 3877638 - RNA, 16 nt, Human
acgggacugacgcaac

SEQ ID NO: 3877639 - RNA, 23 nt, Human
acgggagcuggggagaggaaaga

SEQ ID NO: 3877640 - RNA, 20 nt, Human
acgggaggguaaggcugugg

SEQ ID NO: 3877641 - RNA, 22 nt, Human
acgggaugguucuggcuguuug

SEQ ID NO: 3877642 - RNA, 15 nt, Human
acggggacucagccc

SEQ ID NO: 3877643 - RNA, 14 nt, Human
acggggacugggga

SEQ ID NO: 3877644 - RNA, 15 nt, Human
acggggccggccagg

SEQ ID NO: 3877645 - RNA, 18 nt, Human
acggggccggccaggugg

SEQ ID NO: 3877646 - RNA, 14 nt, Human
acggggggccccag

SEQ ID NO: 3877647 - RNA, 22 nt, Human
acggggggccccagucagccuc

SEQ ID NO: 3877648 - RNA, 23 nt, Human
acggggggccccagucagccucu

SEQ ID NO: 3877649 - RNA, 23 nt, Human
acggguuagacagccaaaggcug

SEQ ID NO: 3877650 - RNA, 17 nt, Human
acgguauuaugcuucuu

SEQ ID NO: 3877651 - RNA, 18 nt, Human
acgguauuaugcuucuug

SEQ ID NO: 3877652 - RNA, 17 nt, Human
acggucagguuuaacau

SEQ ID NO: 3877653 - RNA, 13 nt, Human
acggucaguuugg

SEQ ID NO: 3877654 - RNA, 18 nt, Human
acggucuguucuugaagc

SEQ ID NO: 3877655 - RNA, 17 nt, Human
acggugacaaagauggc

SEQ ID NO: 3877656 - RNA, 22 nt, Human
acggugcuccaggcaggcuaag

SEQ ID NO: 3877657 - RNA, 19 nt, Human
acggugcugugagggaggg

SEQ ID NO: 3877658 - RNA, 21 nt, Human
acgguggggguagggggcugg

SEQ ID NO: 3877659 - RNA, 21 nt, Human
acgguggucacuggaacucag

SEQ ID NO: 3877660 - RNA, 15 nt, Human
acgguguuuugccau

SEQ ID NO: 3877661 - RNA, 20 nt, Human
acgguuccuacacaggacag

SEQ ID NO: 3877662 - RNA, 18 nt, Human
acgguuucgaagucauua

SEQ ID NO: 3877663 - RNA, 18 nt, Human
acguaaagcuagaaauga

SEQ ID NO: 3877664 - RNA, 19 nt, Human
acguaaaguacuuguaguu

SEQ ID NO: 3877665 - RNA, 15 nt, Human
acguaauaagguuuu

SEQ ID NO: 3877666 - RNA, 17 nt, Human
acguaauaagguuuuaa

SEQ ID NO: 3877667 - RNA, 15 nt, Human
acguacaaguaguuc

SEQ ID NO: 3877668 - RNA, 17 nt, Human
acguacaaguaguucug

SEQ ID NO: 3877669 - RNA, 18 nt, Human
acguacaaguaguucugu

SEQ ID NO: 3877670 - RNA, 20 nt, Human
acguacaaguaguucuguau

SEQ ID NO: 3877671 - RNA, 21 nt, Human
acguacaaguaguucuguauu

SEQ ID NO: 3877672 - RNA, 22 nt, Human
acguacaaguaguucuguauuu

SEQ ID NO: 3877673 - RNA, 17 nt, Human
acguagcugaggccgga

SEQ ID NO: 3877674 - RNA, 20 nt, Human
acguagcugcaaaggacaga

SEQ ID NO: 3877675 - RNA, 24 nt, Human
acguagcuucuaccaugaacagaa

SEQ ID NO: 3877676 - RNA, 20 nt, Human
acguagucggcacagccugg

SEQ ID NO: 3877677 - RNA, 22 nt, Human
acguaguguagauuuguuuugu

SEQ ID NO: 3877678 - RNA, 13 nt, Human
acguaugcaugug

SEQ ID NO: 3877679 - RNA, 14 nt, Human
acguaugcauguga

SEQ ID NO: 3877680 - RNA, 18 nt, Human
acguaugucugguucuca

SEQ ID NO: 3877681 - RNA, 20 nt, Human
acguauguuuuuguguauuu

SEQ ID NO: 3877682 - RNA, 21 nt, Human
acguauuuaauagcaaagaau

SEQ ID NO: 3877683 - RNA, 21 nt, Human
acgucacuggaccacugggca

SEQ ID NO: 3877684 - RNA, 22 nt, Human
acgucauaggaaguuagccuuu

SEQ ID NO: 3877685 - RNA, 17 nt, Human
acgucaucuaguuuuaa

SEQ ID NO: 3877686 - RNA, 18 nt, Human
acgucauguauuugagca

SEQ ID NO: 3877687 - RNA, 18 nt, Human
acguccagaauuuuucau

SEQ ID NO: 3877688 - RNA, 20 nt, Human
acguccaucacguuagcugu

SEQ ID NO: 3877689 - RNA, 12 nt, Human
acgucccuccac

SEQ ID NO: 3877690 - RNA, 16 nt, Human
acguccugagaaagcu

SEQ ID NO: 3877691 - RNA, 15 nt, Human
acguccugccaccug

SEQ ID NO: 3877692 - RNA, 20 nt, Human
acguccugccaccuggggca

SEQ ID NO: 3877693 - RNA, 18 nt, Human
acguccugucagugccgc

SEQ ID NO: 3877694 - RNA, 21 nt, Human
acguccugucagugccgccgc

SEQ ID NO: 3877695 - RNA, 17 nt, Human
acgucuagcuaugcugu

SEQ ID NO: 3877696 - RNA, 22 nt, Human
acgucugaagcuugacucccaa

SEQ ID NO: 3877697 - RNA, 16 nt, Human
acgucugacccucucc

SEQ ID NO: 3877698 - RNA, 22 nt, Human
acgucugacccucuccacccca

SEQ ID NO: 3877699 - RNA, 17 nt, Human
acgucugggagaaauug

SEQ ID NO: 3877700 - RNA, 16 nt, Human
acgucuguaagcugaa

SEQ ID NO: 3877701 - RNA, 14 nt, Human
acgucugucuucac

SEQ ID NO: 3877702 - RNA, 15 nt, Human
acgucugucuucaca

SEQ ID NO: 3877703 - RNA, 13 nt, Human
acgucugugccau

SEQ ID NO: 3877704 - RNA, 12 nt, Human
acgucuucuaaa

SEQ ID NO: 3877705 - RNA, 20 nt, Human
acgugacacaaacacacaca

SEQ ID NO: 3877706 - RNA, 19 nt, Human
acgugacagugccugggaa

SEQ ID NO: 3877707 - RNA, 15 nt, Human
acgugagagugucuu

SEQ ID NO: 3877708 - RNA, 23 nt, Human
acgugagagugucuucacggcag

SEQ ID NO: 3877709 - RNA, 22 nt, Human
acgugagccagguaaugaggga

SEQ ID NO: 3877710 - RNA, 20 nt, Human
acgugauccucucaccucag

SEQ ID NO: 3877711 - RNA, 19 nt, Human
acgugauuuugcuguagaa

SEQ ID NO: 3877712 - RNA, 14 nt, Human
acgugcaauuuguu

SEQ ID NO: 3877713 - RNA, 23 nt, Human
acgugcaccuguacucaggaggc

SEQ ID NO: 3877714 - RNA, 16 nt, Human
acgugcacgcacacug

SEQ ID NO: 3877715 - RNA, 14 nt, Human
acgugccaggcccg

SEQ ID NO: 3877716 - RNA, 18 nt, Human
acgugccaggcccggggc

SEQ ID NO: 3877717 - RNA, 21 nt, Human
acgugccaggcccggggcugg

SEQ ID NO: 3877718 - RNA, 15 nt, Human
acgugccuuuugcac

SEQ ID NO: 3877719 - RNA, 20 nt, Human
acgugcgcugggcacuuccc

SEQ ID NO: 3877720 - RNA, 18 nt, Human
acgugcucugugggucuc

SEQ ID NO: 3877721 - RNA, 14 nt, Human
acguggaaccucug

SEQ ID NO: 3877722 - RNA, 20 nt, Human
acguggaaccucugucucau

SEQ ID NO: 3877723 - RNA, 17 nt, Human
acguggacguuuuuaau

SEQ ID NO: 3877724 - RNA, 21 nt, Human
acguggagaaucacaggcugg

SEQ ID NO: 3877725 - RNA, 14 nt, Human
acguggagagcugg

SEQ ID NO: 3877726 - RNA, 16 nt, Human
acguggagagcuggug

SEQ ID NO: 3877727 - RNA, 14 nt, Human
acguggagagggau

SEQ ID NO: 3877728 - RNA, 16 nt, Human
acguggagcucuuggc

SEQ ID NO: 3877729 - RNA, 21 nt, Human
acguggaggaaugcuccccca

SEQ ID NO: 3877730 - RNA, 17 nt, Human
acguggaggagcagugc

SEQ ID NO: 3877731 - RNA, 16 nt, Human
acguggcaccuccucg

SEQ ID NO: 3877732 - RNA, 20 nt, Human
acguggccauguaugaagcc

SEQ ID NO: 3877733 - RNA, 16 nt, Human
acguggccucuugagc

SEQ ID NO: 3877734 - RNA, 17 nt, Human
acguggcucagccagca

SEQ ID NO: 3877735 - RNA, 14 nt, Human
acguggcucugcug

SEQ ID NO: 3877736 - RNA, 22 nt, Human
acguggcugcgugccccugcug

SEQ ID NO: 3877737 - RNA, 13 nt, Human
acguggcugcuuc

SEQ ID NO: 3877738 - RNA, 19 nt, Human
acguggcugcuucaaggau

SEQ ID NO: 3877739 - RNA, 21 nt, Human
acguggcugcuucaaggaucc

SEQ ID NO: 3877740 - RNA, 23 nt, Human
acguggcuucugaugaaucuugc

SEQ ID NO: 3877741 - RNA, 11 nt, Human
acgugggagac

SEQ ID NO: 3877742 - RNA, 16 nt, Human
acgugggagacaagaa

SEQ ID NO: 3877743 - RNA, 16 nt, Human
acgugggcaaacaggc

SEQ ID NO: 3877744 - RNA, 20 nt, Human
acgugggcauucaaauguau

SEQ ID NO: 3877745 - RNA, 20 nt, Human
acgugggcggcagagaggac

SEQ ID NO: 3877746 - RNA, 19 nt, Human
acgugggcuccccucuucc

SEQ ID NO: 3877747 - RNA, 20 nt, Human
acguggggcagcacagagag

SEQ ID NO: 3877748 - RNA, 14 nt, Human
acguguagcuauau

SEQ ID NO: 3877749 - RNA, 15 nt, Human
acguguaguguccau

SEQ ID NO: 3877750 - RNA, 16 nt, Human
acguguaguguccauu

SEQ ID NO: 3877751 - RNA, 16 nt, Human
acguguauguuuuuca

SEQ ID NO: 3877752 - RNA, 19 nt, Human
acguguauguuuuucaguu

SEQ ID NO: 3877753 - RNA, 15 nt, Human
acgugugauuuuucu

SEQ ID NO: 3877754 - RNA, 14 nt, Human
acguguguuuuucu

SEQ ID NO: 3877755 - RNA, 17 nt, Human
acguguguuuuucuauu

SEQ ID NO: 3877756 - RNA, 11 nt, Human
acguguugccu

SEQ ID NO: 3877757 - RNA, 22 nt, Human
acguguuuuauuccuguauguu

SEQ ID NO: 3877758 - RNA, 13 nt, Human
acguuaaaguagg

SEQ ID NO: 3877759 - RNA, 12 nt, Human
acguuacauuuu

SEQ ID NO: 3877760 - RNA, 17 nt, Human
acguuaccuugacacau

SEQ ID NO: 3877761 - RNA, 15 nt, Human
acguuacucagggcu

SEQ ID NO: 3877762 - RNA, 21 nt, Human
acguuagucgugagcucuugu

SEQ ID NO: 3877763 - RNA, 19 nt, Human
acguuaugauaguguccca

SEQ ID NO: 3877764 - RNA, 21 nt, Human
acguucacccaucuuaucaag

SEQ ID NO: 3877765 - RNA, 14 nt, Human
acguucaccccucc

SEQ ID NO: 3877766 - RNA, 12 nt, Human
acguuccgggca

SEQ ID NO: 3877767 - RNA, 14 nt, Human
acguuccuaagcug

SEQ ID NO: 3877768 - RNA, 16 nt, Human
acguuccuauugucau

SEQ ID NO: 3877769 - RNA, 19 nt, Human
acguuccuuacugcagaau

SEQ ID NO: 3877770 - RNA, 20 nt, Human
acguuccuuacugcagaaua

SEQ ID NO: 3877771 - RNA, 21 nt, Human
acguuccuuacugcagaauag

SEQ ID NO: 3877772 - RNA, 13 nt, Human
acguugcucccca

SEQ ID NO: 3877773 - RNA, 12 nt, Human
acguugcugugg

SEQ ID NO: 3877774 - RNA, 14 nt, Human
acguugcuguggga

SEQ ID NO: 3877775 - RNA, 23 nt, Human
acguuggacuuuucguuaacauu

SEQ ID NO: 3877776 - RNA, 16 nt, Human
acguugggacagggag

SEQ ID NO: 3877777 - RNA, 14 nt, Human
acguugugcauuug

SEQ ID NO: 3877778 - RNA, 13 nt, Human
acguuuaaagugu

SEQ ID NO: 3877779 - RNA, 19 nt, Human
acguuuaagccaaaacaau

SEQ ID NO: 3877780 - RNA, 17 nt, Human
acguuucaguaauaaaa

SEQ ID NO: 3877781 - RNA, 19 nt, Human
acguuucaguaauaaaaca

SEQ ID NO: 3877782 - RNA, 12 nt, Human
acguuucuaaag

SEQ ID NO: 3877783 - RNA, 22 nt, Human
acguuucuaaaggcuaccuuug

SEQ ID NO: 3877784 - RNA, 10 nt, Human
acguuucuca

SEQ ID NO: 3877785 - RNA, 12 nt, Human
acguuucuuuaa

SEQ ID NO: 3877786 - RNA, 21 nt, Human
acguuucuuuaaccuuguaua

SEQ ID NO: 3877787 - RNA, 20 nt, Human
acguuuggaagauccuguga

SEQ ID NO: 3877788 - RNA, 19 nt, Human
acguuuuaaggacugacug

SEQ ID NO: 3877789 - RNA, 20 nt, Human
acguuuuauaagcaucauua

SEQ ID NO: 3877790 - RNA, 14 nt, Human
acguuuuauugugu

SEQ ID NO: 3877791 - RNA, 17 nt, Human
acguuuucuaauugcuu

SEQ ID NO: 3877792 - RNA, 18 nt, Human
acguuuucuaauugcuua

SEQ ID NO: 3877793 - RNA, 17 nt, Human
acguuuuuuccucagug

SEQ ID NO: 3877794 - RNA, 18 nt, Human
acguuuuuuccucagugc

SEQ ID NO: 3877795 - RNA, 16 nt, Human
acuaaaaaaaagauga

SEQ ID NO: 3877796 - RNA, 16 nt, Human
acuaaaaacaaacccu

SEQ ID NO: 3877797 - RNA, 17 nt, Human
acuaaaaaguauaaaau

SEQ ID NO: 3877798 - RNA, 12 nt, Human
acuaaaaauaca

SEQ ID NO: 3877799 - RNA, 13 nt, Human
acuaaaaauacaa

SEQ ID NO: 3877800 - RNA, 15 nt, Human
acuaaaaauauuguu

SEQ ID NO: 3877801 - RNA, 23 nt, Human
acuaaaagauauaagugcuguau

SEQ ID NO: 3877802 - RNA, 20 nt, Human
acuaaaaguucuucuccaau

SEQ ID NO: 3877803 - RNA, 17 nt, Human
acuaaaauaauuuugua

SEQ ID NO: 3877804 - RNA, 14 nt, Human
acuaaaauauauau

SEQ ID NO: 3877805 - RNA, 14 nt, Human
acuaaaauauuuau

SEQ ID NO: 3877806 - RNA, 12 nt, Human
acuaaacucauu

SEQ ID NO: 3877807 - RNA, 14 nt, Human
acuaaacucauuua

SEQ ID NO: 3877808 - RNA, 21 nt, Human
acuaaacucugaauaagcacu

SEQ ID NO: 3877809 - RNA, 23 nt, Human
acuaaacugguuuguugcagcca

SEQ ID NO: 3877810 - RNA, 13 nt, Human
acuaaacuuuacc

SEQ ID NO: 3877811 - RNA, 21 nt, Human
acuaaagaaaauaucugaaau

SEQ ID NO: 3877812 - RNA, 17 nt, Human
acuaaagaaagauuacu

SEQ ID NO: 3877813 - RNA, 16 nt, Human
acuaaagagagaaugu

SEQ ID NO: 3877814 - RNA, 11 nt, Human
acuaaagcaau

SEQ ID NO: 3877815 - RNA, 15 nt, Human
acuaaagcaauagaa

SEQ ID NO: 3877816 - RNA, 20 nt, Human
acuaaagcaguggacaccag

SEQ ID NO: 3877817 - RNA, 12 nt, Human
acuaaagcauga

SEQ ID NO: 3877818 - RNA, 15 nt, Human
acuaaagcaugaaau

SEQ ID NO: 3877819 - RNA, 16 nt, Human
acuaaagccaaacaua

SEQ ID NO: 3877820 - RNA, 13 nt, Human
acuaaagccaagg

SEQ ID NO: 3877821 - RNA, 15 nt, Human
acuaaagccagccug

SEQ ID NO: 3877822 - RNA, 17 nt, Human
acuaaagguggccacaa

SEQ ID NO: 3877823 - RNA, 22 nt, Human
acuaaaguuagaaaguugauuu

SEQ ID NO: 3877824 - RNA, 15 nt, Human
acuaaaguuguacuu

SEQ ID NO: 3877825 - RNA, 19 nt, Human
acuaaauagcauguauugu

SEQ ID NO: 3877826 - RNA, 21 nt, Human
acuaaaucagagacaaaauau

SEQ ID NO: 3877827 - RNA, 16 nt, Human
acuaaaucucuaauau

SEQ ID NO: 3877828 - RNA, 17 nt, Human
acuaaaucucuaauaug

SEQ ID NO: 3877829 - RNA, 14 nt, Human
acuaaaucuguaag

SEQ ID NO: 3877830 - RNA, 18 nt, Human
acuaaaucuguaagcucu

SEQ ID NO: 3877831 - RNA, 13 nt, Human
acuaaaucuuuua

SEQ ID NO: 3877832 - RNA, 15 nt, Human
acuaaaucuuuuaua

SEQ ID NO: 3877833 - RNA, 19 nt, Human
acuaaaugccuaguuuuua

SEQ ID NO: 3877834 - RNA, 18 nt, Human
acuaaauuguaaacuccu

SEQ ID NO: 3877835 - RNA, 20 nt, Human
acuaaauuugauacuuauau

SEQ ID NO: 3877836 - RNA, 15 nt, Human
acuaaauuuuaaagc

SEQ ID NO: 3877837 - RNA, 14 nt, Human
acuaacacaaggac

SEQ ID NO: 3877838 - RNA, 15 nt, Human
acuaacacaaggaca

SEQ ID NO: 3877839 - RNA, 12 nt, Human
acuaacacuauu

SEQ ID NO: 3877840 - RNA, 15 nt, Human
acuaacacuauuuua

SEQ ID NO: 3877841 - RNA, 18 nt, Human
acuaacacucagaagccu

SEQ ID NO: 3877842 - RNA, 20 nt, Human
acuaacacucagaagccugg

SEQ ID NO: 3877843 - RNA, 16 nt, Human
acuaacagauaagcaa

SEQ ID NO: 3877844 - RNA, 18 nt, Human
acuaacauuuauuugagu

SEQ ID NO: 3877845 - RNA, 15 nt, Human
acuaaccaagcugag

SEQ ID NO: 3877846 - RNA, 21 nt, Human
acuaaccaagcugaguuuccu

SEQ ID NO: 3877847 - RNA, 22 nt, Human
acuaaccaagcugaguuuccua

SEQ ID NO: 3877848 - RNA, 14 nt, Human
acuaaccccgggcg

SEQ ID NO: 3877849 - RNA, 17 nt, Human
acuaaccuugccuggua

SEQ ID NO: 3877850 - RNA, 22 nt, Human
acuaacgaaauaucaaagucau

SEQ ID NO: 3877851 - RNA, 22 nt, Human
acuaacuaaacucucuuuggga

SEQ ID NO: 3877852 - RNA, 15 nt, Human
acuaacuaugcaugg

SEQ ID NO: 3877853 - RNA, 20 nt, Human
acuaacuccuaggaaaauac

SEQ ID NO: 3877854 - RNA, 17 nt, Human
acuaacuucuaaaacug

SEQ ID NO: 3877855 - RNA, 22 nt, Human
acuaacuucuaaaacuguacuu

SEQ ID NO: 3877856 - RNA, 17 nt, Human
acuaacuugacuuuuaa

SEQ ID NO: 3877857 - RNA, 17 nt, Human
acuaagaaacuuuugua

SEQ ID NO: 3877858 - RNA, 19 nt, Human
acuaagaaacuuuuguaaa

SEQ ID NO: 3877859 - RNA, 17 nt, Human
acuaagaaauauuccaa

SEQ ID NO: 3877860 - RNA, 16 nt, Human
acuaagaauucaaacu

SEQ ID NO: 3877861 - RNA, 17 nt, Human
acuaagagaaguuguaa

SEQ ID NO: 3877862 - RNA, 13 nt, Human
acuaagagagaau

SEQ ID NO: 3877863 - RNA, 20 nt, Human
acuaagaggaaaguacauuu

SEQ ID NO: 3877864 - RNA, 21 nt, Human
acuaagaggaaaguacauuuu

SEQ ID NO: 3877865 - RNA, 17 nt, Human
acuaagaucgguuaaca

SEQ ID NO: 3877866 - RNA, 22 nt, Human
acuaagaucgguuaacaaauaa

SEQ ID NO: 3877867 - RNA, 20 nt, Human
acuaagaugacauugcuaag

SEQ ID NO: 3877868 - RNA, 23 nt, Human
acuaagaugugcagcauuucacu

SEQ ID NO: 3877869 - RNA, 18 nt, Human
acuaagauguucacugug

SEQ ID NO: 3877870 - RNA, 14 nt, Human
acuaagcagaggag

SEQ ID NO: 3877871 - RNA, 15 nt, Human
acuaagccacaagaa

SEQ ID NO: 3877872 - RNA, 13 nt, Human
acuaagcccuguc

SEQ ID NO: 3877873 - RNA, 14 nt, Human
acuaagccuaccug

SEQ ID NO: 3877874 - RNA, 17 nt, Human
acuaaggugcuaaaucu

SEQ ID NO: 3877875 - RNA, 19 nt, Human
acuaagucucuuuuuuaca

SEQ ID NO: 3877876 - RNA, 21 nt, Human
acuaagucucuuuuuuacaaa

SEQ ID NO: 3877877 - RNA, 22 nt, Human
acuaaguuuuuauggcuuuugu

SEQ ID NO: 3877878 - RNA, 15 nt, Human
acuaauaaaauauuu

SEQ ID NO: 3877879 - RNA, 21 nt, Human
acuaauaaaauauuuucugug

SEQ ID NO: 3877880 - RNA, 14 nt, Human
acuaauaaauacau

SEQ ID NO: 3877881 - RNA, 11 nt, Human
acuaauaauug

SEQ ID NO: 3877882 - RNA, 13 nt, Human
acuaauaauugca

SEQ ID NO: 3877883 - RNA, 14 nt, Human
acuaauagaaaagu

SEQ ID NO: 3877884 - RNA, 15 nt, Human
acuaauagacaauuu

SEQ ID NO: 3877885 - RNA, 22 nt, Human
acuaauaugggcauuguaguua

SEQ ID NO: 3877886 - RNA, 17 nt, Human
acuaauauuucuguaau

SEQ ID NO: 3877887 - RNA, 18 nt, Human
acuaaucuauuggguuca

SEQ ID NO: 3877888 - RNA, 20 nt, Human
acuaaucuauuggguucauu

SEQ ID NO: 3877889 - RNA, 18 nt, Human
acuaaugaaaacagaaug

SEQ ID NO: 3877890 - RNA, 23 nt, Human
acuaaugccuuacucuucuugaa

SEQ ID NO: 3877891 - RNA, 22 nt, Human
acuaauggcaugagaaauacaa

SEQ ID NO: 3877892 - RNA, 12 nt, Human
acuaauguaaaa

SEQ ID NO: 3877893 - RNA, 20 nt, Human
acuaauguguaagacaaaaa

SEQ ID NO: 3877894 - RNA, 18 nt, Human
acuaauucauaaucacuc

SEQ ID NO: 3877895 - RNA, 15 nt, Human
acuaauuccacaccu

SEQ ID NO: 3877896 - RNA, 16 nt, Human
acuaauuucaaaaugc

SEQ ID NO: 3877897 - RNA, 19 nt, Human
acuaauuucaaaaugcuuu

SEQ ID NO: 3877898 - RNA, 17 nt, Human
acuaauuugauguuuac

SEQ ID NO: 3877899 - RNA, 19 nt, Human
acuaauuuuuguauuauuu

SEQ ID NO: 3877900 - RNA, 13 nt, Human
acuacaaaauuug

SEQ ID NO: 3877901 - RNA, 18 nt, Human
acuacaaaauuugaaauu

SEQ ID NO: 3877902 - RNA, 23 nt, Human
acuacaaagcuucuaucccagga

SEQ ID NO: 3877903 - RNA, 21 nt, Human
acuacaaagguuuaaaugaac

SEQ ID NO: 3877904 - RNA, 22 nt, Human
acuacacauuuuuaaauuguua

SEQ ID NO: 3877905 - RNA, 16 nt, Human
acuacaccacacacaa

SEQ ID NO: 3877906 - RNA, 23 nt, Human
acuacacgguucaaaccugugaa

SEQ ID NO: 3877907 - RNA, 18 nt, Human
acuacagaaaaaccagag

SEQ ID NO: 3877908 - RNA, 23 nt, Human
acuacagaccugcuuuuugaaau

SEQ ID NO: 3877909 - RNA, 17 nt, Human
acuacagcuggggugca

SEQ ID NO: 3877910 - RNA, 18 nt, Human
acuacagcuggggugcag

SEQ ID NO: 3877911 - RNA, 23 nt, Human
acuacagcuggggugcagggaug

SEQ ID NO: 3877912 - RNA, 17 nt, Human
acuacaggcgugagcca

SEQ ID NO: 3877913 - RNA, 16 nt, Human
acuacaguccucccau

SEQ ID NO: 3877914 - RNA, 17 nt, Human
acuacaguccucccauc

SEQ ID NO: 3877915 - RNA, 17 nt, Human
acuacagucuaaagcug

SEQ ID NO: 3877916 - RNA, 15 nt, Human
acuacaguuagggcu

SEQ ID NO: 3877917 - RNA, 13 nt, Human
acuacauaaacug

SEQ ID NO: 3877918 - RNA, 14 nt, Human
acuacaugcacuug

SEQ ID NO: 3877919 - RNA, 13 nt, Human
acuacauucuguu

SEQ ID NO: 3877920 - RNA, 15 nt, Human
acuacauucuguuaa

SEQ ID NO: 3877921 - RNA, 20 nt, Human
acuacccaaaacaagccugg

SEQ ID NO: 3877922 - RNA, 18 nt, Human
acuacccuauucucucuu

SEQ ID NO: 3877923 - RNA, 17 nt, Human
acuaccgaaugugucuu

SEQ ID NO: 3877924 - RNA, 18 nt, Human
acuaccgaaugugucuuu

SEQ ID NO: 3877925 - RNA, 19 nt, Human
acuaccgaaugugucuuua

SEQ ID NO: 3877926 - RNA, 16 nt, Human
acuaccuccucuccug

SEQ ID NO: 3877927 - RNA, 22 nt, Human
acuaccuguauuuaaaaauaga

SEQ ID NO: 3877928 - RNA, 17 nt, Human
acuaccuugaaaauaag

SEQ ID NO: 3877929 - RNA, 18 nt, Human
acuaccuugguuccccca

SEQ ID NO: 3877930 - RNA, 15 nt, Human
acuacgugacugugg

SEQ ID NO: 3877931 - RNA, 14 nt, Human
acuacuagggaaau

SEQ ID NO: 3877932 - RNA, 21 nt, Human
acuacuagggaaaugccuuug

SEQ ID NO: 3877933 - RNA, 13 nt, Human
acuacucagcaug

SEQ ID NO: 3877934 - RNA, 19 nt, Human
acuacuccucugcagugcc

SEQ ID NO: 3877935 - RNA, 21 nt, Human
acuacuccucugcagugccuu

SEQ ID NO: 3877936 - RNA, 17 nt, Human
acuacugaaacagauuu

SEQ ID NO: 3877937 - RNA, 23 nt, Human
acuacugacauguggggccaggu

SEQ ID NO: 3877938 - RNA, 22 nt, Human
acuacugacggaguccuguguu

SEQ ID NO: 3877939 - RNA, 13 nt, Human
acuacugcagcac

SEQ ID NO: 3877940 - RNA, 17 nt, Human
acuacugggugucauuu

SEQ ID NO: 3877941 - RNA, 18 nt, Human
acuacugggugucauuuc

SEQ ID NO: 3877942 - RNA, 19 nt, Human
acuacugggugucauuuca

SEQ ID NO: 3877943 - RNA, 23 nt, Human
acuacugggugucauuucauucc

SEQ ID NO: 3877944 - RNA, 19 nt, Human
acuacuguggaaaaauauu

SEQ ID NO: 3877945 - RNA, 20 nt, Human
acuacuguggaaaaauauuu

SEQ ID NO: 3877946 - RNA, 22 nt, Human
acuacuguggaaaaauauuuaa

SEQ ID NO: 3877947 - RNA, 12 nt, Human
acuacuguguuc

SEQ ID NO: 3877948 - RNA, 15 nt, Human
acuacuguguuccug

SEQ ID NO: 3877949 - RNA, 20 nt, Human
acuacuguucagcuuuuauu

SEQ ID NO: 3877950 - RNA, 14 nt, Human
acuacuuagcacuu

SEQ ID NO: 3877951 - RNA, 21 nt, Human
acuacuuagcauccuaagaaa

SEQ ID NO: 3877952 - RNA, 16 nt, Human
acuacuucucucugua

SEQ ID NO: 3877953 - RNA, 19 nt, Human
acuacuugauuuuauugua

SEQ ID NO: 3877954 - RNA, 12 nt, Human
acuacuuuauaa

SEQ ID NO: 3877955 - RNA, 22 nt, Human
acuacuuuguuaggauuuucac

SEQ ID NO: 3877956 - RNA, 22 nt, Human
acuagaaagugaauaaaaauua

SEQ ID NO: 3877957 - RNA, 23 nt, Human
acuagaacugaauuuugucuuua

SEQ ID NO: 3877958 - RNA, 18 nt, Human
acuagaagaugaauacaa

SEQ ID NO: 3877959 - RNA, 21 nt, Human
acuagaauucuagugcugcug

SEQ ID NO: 3877960 - RNA, 22 nt, Human
acuagaauucuagugcugcuga

SEQ ID NO: 3877961 - RNA, 18 nt, Human
acuagacacacaaagcag

SEQ ID NO: 3877962 - RNA, 21 nt, Human
acuagacacacaaagcaguug

SEQ ID NO: 3877963 - RNA, 16 nt, Human
acuagacacagauaau

SEQ ID NO: 3877964 - RNA, 17 nt, Human
acuagacucuucacugu

SEQ ID NO: 3877965 - RNA, 18 nt, Human
acuagagauauuuuguaa

SEQ ID NO: 3877966 - RNA, 17 nt, Human
acuagagaucugguuuu

SEQ ID NO: 3877967 - RNA, 16 nt, Human
acuagagcaagcagga

SEQ ID NO: 3877968 - RNA, 21 nt, Human
acuagagcagcccuggaguca

SEQ ID NO: 3877969 - RNA, 16 nt, Human
acuagaggcagggagg

SEQ ID NO: 3877970 - RNA, 16 nt, Human
acuagagguuuuauga

SEQ ID NO: 3877971 - RNA, 14 nt, Human
acuagaugaccuca

SEQ ID NO: 3877972 - RNA, 15 nt, Human
acuagauggugcuga

SEQ ID NO: 3877973 - RNA, 17 nt, Human
acuagauguaguauuuu

SEQ ID NO: 3877974 - RNA, 18 nt, Human
acuagauuacauucaguu

SEQ ID NO: 3877975 - RNA, 19 nt, Human
acuagcaaaauaaaacaua

SEQ ID NO: 3877976 - RNA, 23 nt, Human
acuagcaccauuuuaagucccug

SEQ ID NO: 3877977 - RNA, 19 nt, Human
acuagcauaucugccuuua

SEQ ID NO: 3877978 - RNA, 18 nt, Human
acuagccaaaccaggacc

SEQ ID NO: 3877979 - RNA, 15 nt, Human
acuagccaaaccuca

SEQ ID NO: 3877980 - RNA, 15 nt, Human
acuagccaccaacuc

SEQ ID NO: 3877981 - RNA, 23 nt, Human
acuagccaccaacucuugcaggu

SEQ ID NO: 3877982 - RNA, 17 nt, Human
acuagcccaaugaaaug

SEQ ID NO: 3877983 - RNA, 16 nt, Human
acuagccugucauccu

SEQ ID NO: 3877984 - RNA, 14 nt, Human
acuagcuauggugu

SEQ ID NO: 3877985 - RNA, 24 nt, Human
acuagcucuuguugagccgugggc

SEQ ID NO: 3877986 - RNA, 22 nt, Human
acuagcuggaauuuuuuauucu

SEQ ID NO: 3877987 - RNA, 23 nt, Human
acuagcuggaauuuuuuauucuu

SEQ ID NO: 3877988 - RNA, 24 nt, Human
acuagcuggaauuuuuuauucuug

SEQ ID NO: 3877989 - RNA, 16 nt, Human
acuagcuuuucaaaca

SEQ ID NO: 3877990 - RNA, 15 nt, Human
acuaggaaggcacuu

SEQ ID NO: 3877991 - RNA, 21 nt, Human
acuaggcaguuagagaugccu

SEQ ID NO: 3877992 - RNA, 22 nt, Human
acuaggcccccacuugccucuu

SEQ ID NO: 3877993 - RNA, 23 nt, Human
acuaggcccccacuugccucuuc

SEQ ID NO: 3877994 - RNA, 14 nt, Human
acuaggcucagaga

SEQ ID NO: 3877995 - RNA, 14 nt, Human
acuaggcugggugc

SEQ ID NO: 3877996 - RNA, 20 nt, Human
acuaggcugggugcccacag

SEQ ID NO: 3877997 - RNA, 17 nt, Human
acuagggaagauaauau

SEQ ID NO: 3877998 - RNA, 13 nt, Human
acuagggaccugg

SEQ ID NO: 3877999 - RNA, 17 nt, Human
acuagggagaagguuuc

SEQ ID NO: 3878000 - RNA, 18 nt, Human
acuagggaucccucaucu

SEQ ID NO: 3878001 - RNA, 19 nt, Human
acuagggaucccucaucug

SEQ ID NO: 3878002 - RNA, 17 nt, Human
acuagggauucaggcug

SEQ ID NO: 3878003 - RNA, 18 nt, Human
acuagggauucaggcugc

SEQ ID NO: 3878004 - RNA, 19 nt, Human
acuagggauucaggcugcu

SEQ ID NO: 3878005 - RNA, 21 nt, Human
acuagggauucaggcugcuug

SEQ ID NO: 3878006 - RNA, 21 nt, Human
acuagggugaggguuuucugu

SEQ ID NO: 3878007 - RNA, 18 nt, Human
acuaggucaaaaaucugu

SEQ ID NO: 3878008 - RNA, 21 nt, Human
acuagguucaauucccugaag

SEQ ID NO: 3878009 - RNA, 13 nt, Human
acuaguacugugu

SEQ ID NO: 3878010 - RNA, 23 nt, Human
acuaguacuguguacuguauaga

SEQ ID NO: 3878011 - RNA, 17 nt, Human
acuaguaguucucuugg

SEQ ID NO: 3878012 - RNA, 16 nt, Human
acuaguauuucuauga

SEQ ID NO: 3878013 - RNA, 19 nt, Human
acuaguauuucuaugaaau

SEQ ID NO: 3878014 - RNA, 22 nt, Human
acuagucaccccaaguagucug

SEQ ID NO: 3878015 - RNA, 14 nt, Human
acuagucugugugc

SEQ ID NO: 3878016 - RNA, 16 nt, Human
acuagugcugaagcuu

SEQ ID NO: 3878017 - RNA, 18 nt, Human
acuagugcugaagcuuau

SEQ ID NO: 3878018 - RNA, 13 nt, Human
acuaguguucugu

SEQ ID NO: 3878019 - RNA, 21 nt, Human
acuaguugugaccuuaguguu

SEQ ID NO: 3878020 - RNA, 18 nt, Human
acuauaaagguugacaau

SEQ ID NO: 3878021 - RNA, 22 nt, Human
acuauaacauauguacauaaau

SEQ ID NO: 3878022 - RNA, 20 nt, Human
acuauaagcaagaaggcaaa

SEQ ID NO: 3878023 - RNA, 13 nt, Human
acuauaauguaag

SEQ ID NO: 3878024 - RNA, 14 nt, Human
acuauaauguaagc

SEQ ID NO: 3878025 - RNA, 21 nt, Human
acuauaauguaagcucuacug

SEQ ID NO: 3878026 - RNA, 15 nt, Human
acuauaaugugaaau

SEQ ID NO: 3878027 - RNA, 23 nt, Human
acuauaauuuaccugaagucuuu

SEQ ID NO: 3878028 - RNA, 15 nt, Human
acuauacaacaaagg

SEQ ID NO: 3878029 - RNA, 14 nt, Human
acuauacuugaaca

SEQ ID NO: 3878030 - RNA, 18 nt, Human
acuauacuugaacaaaag

SEQ ID NO: 3878031 - RNA, 20 nt, Human
acuauaggcaugcgccacca

SEQ ID NO: 3878032 - RNA, 16 nt, Human
acuauaguuuaaaaca

SEQ ID NO: 3878033 - RNA, 20 nt, Human
acuauaguuuaaaacacauu

SEQ ID NO: 3878034 - RNA, 17 nt, Human
acuauauauauaaaugu

SEQ ID NO: 3878035 - RNA, 22 nt, Human
acuauauauauaaauguauaaa

SEQ ID NO: 3878036 - RNA, 14 nt, Human
acuauauauauaug

SEQ ID NO: 3878037 - RNA, 17 nt, Human
acuauaucuguauauaa

SEQ ID NO: 3878038 - RNA, 14 nt, Human
acuauaucuguuuu

SEQ ID NO: 3878039 - RNA, 23 nt, Human
acuauaucuguuuuacugcuuuu

SEQ ID NO: 3878040 - RNA, 19 nt, Human
acuauauucauuuccacuc

SEQ ID NO: 3878041 - RNA, 18 nt, Human
acuauauugauuguccuu

SEQ ID NO: 3878042 - RNA, 22 nt, Human
acuauauuguuugcuaagcauu

SEQ ID NO: 3878043 - RNA, 13 nt, Human
acuauauuugcua

SEQ ID NO: 3878044 - RNA, 13 nt, Human
acuaucauaaaau

SEQ ID NO: 3878045 - RNA, 13 nt, Human
acuauccuggcuu

SEQ ID NO: 3878046 - RNA, 15 nt, Human
acuaucucauuucca

SEQ ID NO: 3878047 - RNA, 16 nt, Human
acuaucucauuuccaa

SEQ ID NO: 3878048 - RNA, 20 nt, Human
acuaucugaaccauuaaagu

SEQ ID NO: 3878049 - RNA, 17 nt, Human
accucagggcucccagg

SEQ ID NO: 3878050 - RNA, 19 nt, Human
accucaggguauugcuugc

SEQ ID NO: 3878051 - RNA, 23 nt, Human
accucaggguauugcuugccacu

SEQ ID NO: 3878052 - RNA, 22 nt, Human
accucagguaaucgaccugccu

SEQ ID NO: 3878053 - RNA, 15 nt, Human
accucagguugcugg

SEQ ID NO: 3878054 - RNA, 17 nt, Human
accucagguugcugguu

SEQ ID NO: 3878055 - RNA, 17 nt, Human
accucaguaauuuagaa

SEQ ID NO: 3878056 - RNA, 18 nt, Human
accucaguuauuacaugu

SEQ ID NO: 3878057 - RNA, 22 nt, Human
accucaguuauuacauguaauu

SEQ ID NO: 3878058 - RNA, 17 nt, Human
accucaguucccuuggc

SEQ ID NO: 3878059 - RNA, 17 nt, Human
accucaguuuuaucauu

SEQ ID NO: 3878060 - RNA, 14 nt, Human
accucauccaaaca

SEQ ID NO: 3878061 - RNA, 14 nt, Human
accucaucccauga

SEQ ID NO: 3878062 - RNA, 18 nt, Human
accucaugcaucuccacc

SEQ ID NO: 3878063 - RNA, 20 nt, Human
accucaugcaucuccaccug

SEQ ID NO: 3878064 - RNA, 21 nt, Human
accucaugcccacccccugcc

SEQ ID NO: 3878065 - RNA, 11 nt, Human
accucauguuu

SEQ ID NO: 3878066 - RNA, 19 nt, Human
accucauguuuaugaaaau

SEQ ID NO: 3878067 - RNA, 20 nt, Human
accuccaaaacuccugcccc

SEQ ID NO: 3878068 - RNA, 19 nt, Human
accuccaaagcuucccacg

SEQ ID NO: 3878069 - RNA, 23 nt, Human
accuccaacagaacuaaauguuc

SEQ ID NO: 3878070 - RNA, 23 nt, Human
accuccaacccugccgucaccac

SEQ ID NO: 3878071 - RNA, 17 nt, Human
accuccaagccacugag

SEQ ID NO: 3878072 - RNA, 19 nt, Human
accuccacacccgugagaa

SEQ ID NO: 3878073 - RNA, 15 nt, Human
accuccacagcuucc

SEQ ID NO: 3878074 - RNA, 19 nt, Human
accuccacaguucaguggc

SEQ ID NO: 3878075 - RNA, 14 nt, Human
accuccacauccuc

SEQ ID NO: 3878076 - RNA, 15 nt, Human
accuccaccuccugg

SEQ ID NO: 3878077 - RNA, 15 nt, Human
accuccaggccuguu

SEQ ID NO: 3878078 - RNA, 14 nt, Human
accuccaggcuuuc

SEQ ID NO: 3878079 - RNA, 18 nt, Human
accuccagucccccuauc

SEQ ID NO: 3878080 - RNA, 16 nt, Human
accuccauuaaagucu

SEQ ID NO: 3878081 - RNA, 18 nt, Human
accuccauuaaagucuga

SEQ ID NO: 3878082 - RNA, 20 nt, Human
accuccauuaaagucugaau

SEQ ID NO: 3878083 - RNA, 12 nt, Human
accucccaccuu

SEQ ID NO: 3878084 - RNA, 12 nt, Human
accucccagagg

SEQ ID NO: 3878085 - RNA, 13 nt, Human
accucccagaggu

SEQ ID NO: 3878086 - RNA, 14 nt, Human
accucccagagguc

SEQ ID NO: 3878087 - RNA, 23 nt, Human
accucccagagguccagcccauc

SEQ ID NO: 3878088 - RNA, 16 nt, Human
accucccagccccugc

SEQ ID NO: 3878089 - RNA, 21 nt, Human
accucccagccccugccccuc

SEQ ID NO: 3878090 - RNA, 21 nt, Human
accucccagcccuauggaugu

SEQ ID NO: 3878091 - RNA, 22 nt, Human
accuccccacgcccuccccucc

SEQ ID NO: 3878092 - RNA, 23 nt, Human
accuccccagccccuagcccagg

SEQ ID NO: 3878093 - RNA, 17 nt, Human
accuccccagccugcgc

SEQ ID NO: 3878094 - RNA, 22 nt, Human
accuccccagccugcgccugcu

SEQ ID NO: 3878095 - RNA, 13 nt, Human
accuccccaggcc

SEQ ID NO: 3878096 - RNA, 14 nt, Human
accuccccaggccg

SEQ ID NO: 3878097 - RNA, 11 nt, Human
accucccccac

SEQ ID NO: 3878098 - RNA, 13 nt, Human
accuccccccacu

SEQ ID NO: 3878099 - RNA, 15 nt, Human
accuccccccacugc

SEQ ID NO: 3878100 - RNA, 19 nt, Human
accucccccucccccuucu

SEQ ID NO: 3878101 - RNA, 20 nt, Human
accucccccucccccuucuc

SEQ ID NO: 3878102 - RNA, 21 nt, Human
accucccccucccccuucucc

SEQ ID NO: 3878103 - RNA, 14 nt, Human
accucccccuccuu

SEQ ID NO: 3878104 - RNA, 21 nt, Human
accucccccuccuucccagcu

SEQ ID NO: 3878105 - RNA, 14 nt, Human
accuccccuaucca

SEQ ID NO: 3878106 - RNA, 18 nt, Human
accuccccuauccaccca

SEQ ID NO: 3878107 - RNA, 20 nt, Human
accuccccuauccacccagc

SEQ ID NO: 3878108 - RNA, 13 nt, Human
accuccccuccuu

SEQ ID NO: 3878109 - RNA, 19 nt, Human
accuccccuccuugccucc

SEQ ID NO: 3878110 - RNA, 13 nt, Human
accuccccugccu

SEQ ID NO: 3878111 - RNA, 17 nt, Human
accuccccugccuugcu

SEQ ID NO: 3878112 - RNA, 19 nt, Human
accuccccuugccagcugc

SEQ ID NO: 3878113 - RNA, 23 nt, Human
accucccucuuguuuuguuuguc

SEQ ID NO: 3878114 - RNA, 13 nt, Human
accucccugaccc

SEQ ID NO: 3878115 - RNA, 14 nt, Human
accucccugccucc

SEQ ID NO: 3878116 - RNA, 18 nt, Human
accucccuuccgacccuc

SEQ ID NO: 3878117 - RNA, 22 nt, Human
accucccuuccgacccucuggg

SEQ ID NO: 3878118 - RNA, 21 nt, Human
accucccuuuccaaaugccca

SEQ ID NO: 3878119 - RNA, 20 nt, Human
accuccgccucuuggguuca

SEQ ID NO: 3878120 - RNA, 22 nt, Human
accuccggccaggugccuccug

SEQ ID NO: 3878121 - RNA, 14 nt, Human
accuccuaaaacaa

SEQ ID NO: 3878122 - RNA, 18 nt, Human
accuccuaaaaggcccag

SEQ ID NO: 3878123 - RNA, 22 nt, Human
accuccuaaaaggcccagagag

SEQ ID NO: 3878124 - RNA, 13 nt, Human
accuccucacauu

SEQ ID NO: 3878125 - RNA, 13 nt, Human
accuccucagccu

SEQ ID NO: 3878126 - RNA, 15 nt, Human
accuccucccuguua

SEQ ID NO: 3878127 - RNA, 18 nt, Human
accuccucucacucccca

SEQ ID NO: 3878128 - RNA, 13 nt, Human
accuccucuccug

SEQ ID NO: 3878129 - RNA, 13 nt, Human
accuccucuguga

SEQ ID NO: 3878130 - RNA, 14 nt, Human
accuccucugugaa

SEQ ID NO: 3878131 - RNA, 17 nt, Human
accuccugacacccuuc

SEQ ID NO: 3878132 - RNA, 19 nt, Human
accuccugacacccuucuc

SEQ ID NO: 3878133 - RNA, 16 nt, Human
accuccugcccaggag

SEQ ID NO: 3878134 - RNA, 17 nt, Human
accuccugcccaggaga

SEQ ID NO: 3878135 - RNA, 19 nt, Human
accuccugcccaggagagc

SEQ ID NO: 3878136 - RNA, 21 nt, Human
accuccugcccaggagagcca

SEQ ID NO: 3878137 - RNA, 23 nt, Human
accuccugccucgaacuggcugc

SEQ ID NO: 3878138 - RNA, 11 nt, Human
accuccugcug

SEQ ID NO: 3878139 - RNA, 12 nt, Human
accuccugcugg

SEQ ID NO: 3878140 - RNA, 13 nt, Human
accuccugcuggg

SEQ ID NO: 3878141 - RNA, 14 nt, Human
accuccugcugggc

SEQ ID NO: 3878142 - RNA, 17 nt, Human
accuccuucccucucug

SEQ ID NO: 3878143 - RNA, 18 nt, Human
accuccuucccucucugg

SEQ ID NO: 3878144 - RNA, 21 nt, Human
accuccuucccucucuggaga

SEQ ID NO: 3878145 - RNA, 12 nt, Human
accuccuucucu

SEQ ID NO: 3878146 - RNA, 23 nt, Human
accuccuucucugucucaugugu

SEQ ID NO: 3878147 - RNA, 19 nt, Human
accuccuugucacuuuauu

SEQ ID NO: 3878148 - RNA, 22 nt, Human
accuccuuucaucacacugggu

SEQ ID NO: 3878149 - RNA, 14 nt, Human
accucgaguacugu

SEQ ID NO: 3878150 - RNA, 15 nt, Human
accucgaguacugug

SEQ ID NO: 3878151 - RNA, 22 nt, Human
accucgaguacugugggcaauu

SEQ ID NO: 3878152 - RNA, 15 nt, Human
accucgcaucauugc

SEQ ID NO: 3878153 - RNA, 23 nt, Human
accucgcccagcggcaucaggcu

SEQ ID NO: 3878154 - RNA, 22 nt, Human
accucgcccucuccuuuguucc

SEQ ID NO: 3878155 - RNA, 15 nt, Human
accucguccuccccc

SEQ ID NO: 3878156 - RNA, 18 nt, Human
accucguccucccccugc

SEQ ID NO: 3878157 - RNA, 17 nt, Human
accucgugauccacccg

SEQ ID NO: 3878158 - RNA, 19 nt, Human
accucgugccaccccgagg

SEQ ID NO: 3878159 - RNA, 23 nt, Human
accucguuagggaagagaaacag

SEQ ID NO: 3878160 - RNA, 14 nt, Human
accucuaaauucuu

SEQ ID NO: 3878161 - RNA, 18 nt, Human
accucuaaauucuuucau

SEQ ID NO: 3878162 - RNA, 20 nt, Human
accucuacccaaacccuagg

SEQ ID NO: 3878163 - RNA, 22 nt, Human
accucuacuaaaaagaaggaaa

SEQ ID NO: 3878164 - RNA, 15 nt, Human
accucuacuuuccag

SEQ ID NO: 3878165 - RNA, 20 nt, Human
accucucaauauucaauaaa

SEQ ID NO: 3878166 - RNA, 22 nt, Human
accucuccagccucagcucuca

SEQ ID NO: 3878167 - RNA, 16 nt, Human
accucuccauccugcu

SEQ ID NO: 3878168 - RNA, 19 nt, Human
accucuccaucuucagcuu

SEQ ID NO: 3878169 - RNA, 12 nt, Human
accucucccacg

SEQ ID NO: 3878170 - RNA, 21 nt, Human
accucuccccuggaacugucu

SEQ ID NO: 3878171 - RNA, 23 nt, Human
accucucccugacccuguauaua

SEQ ID NO: 3878172 - RNA, 19 nt, Human
accucucucacuccuugaa

SEQ ID NO: 3878173 - RNA, 23 nt, Human
accucucuccuuugcugaggccu

SEQ ID NO: 3878174 - RNA, 16 nt, Human
accucucugucccuug

SEQ ID NO: 3878175 - RNA, 22 nt, Human
accucucuuauagaauauuuau

SEQ ID NO: 3878176 - RNA, 20 nt, Human
accucugaaaacggcccucu

SEQ ID NO: 3878177 - RNA, 20 nt, Human
accucugaaacccuggacca

SEQ ID NO: 3878178 - RNA, 17 nt, Human
accucugacagcagcau

SEQ ID NO: 3878179 - RNA, 19 nt, Human
accucugacagcagcaucu

SEQ ID NO: 3878180 - RNA, 13 nt, Human
accucugauaccu

SEQ ID NO: 3878181 - RNA, 18 nt, Human
accucugcacaagcugca

SEQ ID NO: 3878182 - RNA, 18 nt, Human
accucugcagcaauaaag

SEQ ID NO: 3878183 - RNA, 12 nt, Human
accucugccaga

SEQ ID NO: 3878184 - RNA, 19 nt, Human
accucugccuuugugguga

SEQ ID NO: 3878185 - RNA, 14 nt, Human
accucugcucugag

SEQ ID NO: 3878186 - RNA, 17 nt, Human
acgcucccucccccugc

SEQ ID NO: 3878187 - RNA, 15 nt, Human
acgcuccuuccucug

SEQ ID NO: 3878188 - RNA, 14 nt, Human
acgcuccuuucuga

SEQ ID NO: 3878189 - RNA, 13 nt, Human
acgcuccuuugug

SEQ ID NO: 3878190 - RNA, 16 nt, Human
acgcucucuggccuuc

SEQ ID NO: 3878191 - RNA, 17 nt, Human
acgcucucuggccuucg

SEQ ID NO: 3878192 - RNA, 12 nt, Human
acgcugaauaaa

SEQ ID NO: 3878193 - RNA, 15 nt, Human
acgcugaauaaaugu

SEQ ID NO: 3878194 - RNA, 18 nt, Human
acgcugaauaaaugucuu

SEQ ID NO: 3878195 - RNA, 14 nt, Human
acgcugcagagcac

SEQ ID NO: 3878196 - RNA, 14 nt, Human
acgcugcugucaca

SEQ ID NO: 3878197 - RNA, 19 nt, Human
acgcugcugucacaaccaa

SEQ ID NO: 3878198 - RNA, 21 nt, Human
acgcugcugucacaaccaaga

SEQ ID NO: 3878199 - RNA, 15 nt, Human
acgcuggagugcagu

SEQ ID NO: 3878200 - RNA, 17 nt, Human
acgcuggagugcaguga

SEQ ID NO: 3878201 - RNA, 18 nt, Human
acgcuggcaacacagagg

SEQ ID NO: 3878202 - RNA, 11 nt, Human
acgcuggcucc

SEQ ID NO: 3878203 - RNA, 23 nt, Human
acgcugguagagauggaggagga

SEQ ID NO: 3878204 - RNA, 20 nt, Human
acgcugucaaaaguuggacu

SEQ ID NO: 3878205 - RNA, 23 nt, Human
acgcugucccuaguaaaaauaca

SEQ ID NO: 3878206 - RNA, 14 nt, Human
acgcugucuccaga

SEQ ID NO: 3878207 - RNA, 15 nt, Human
acgcugucuccagac

SEQ ID NO: 3878208 - RNA, 14 nt, Human
acgcugugcugccc

SEQ ID NO: 3878209 - RNA, 16 nt, Human
acgcugugcugcccug

SEQ ID NO: 3878210 - RNA, 19 nt, Human
acgcuuucagcgaaugaca

SEQ ID NO: 3878211 - RNA, 17 nt, Human
acgcuuucuagcuguug

SEQ ID NO: 3878212 - RNA, 11 nt, Human
acgcuuugauu

SEQ ID NO: 3878213 - RNA, 12 nt, Human
acgcuuugauuc

SEQ ID NO: 3878214 - RNA, 11 nt, Human
acgcuuuguca

SEQ ID NO: 3878215 - RNA, 23 nt, Human
acgcuuuugugauggagugcugu

SEQ ID NO: 3878216 - RNA, 17 nt, Human
acgcuuuuugaaaaagc

SEQ ID NO: 3878217 - RNA, 15 nt, Human
acggaaaaugccaau

SEQ ID NO: 3878218 - RNA, 15 nt, Human
acggaagagccuugc

SEQ ID NO: 3878219 - RNA, 22 nt, Human
acggaaggguaaacaauauagu

SEQ ID NO: 3878220 - RNA, 21 nt, Human
acggaagugguggcuguggaa

SEQ ID NO: 3878221 - RNA, 14 nt, Human
acggaaguuuucaa

SEQ ID NO: 3878222 - RNA, 19 nt, Human
acggaaguuuucaaugaug

SEQ ID NO: 3878223 - RNA, 19 nt, Human
acggaauaguuggcuagga

SEQ ID NO: 3878224 - RNA, 23 nt, Human
acggacaaaaccccccagauauc

SEQ ID NO: 3878225 - RNA, 14 nt, Human
acggacaauaaacc

SEQ ID NO: 3878226 - RNA, 18 nt, Human
acggacaauaaaccuccg

SEQ ID NO: 3878227 - RNA, 19 nt, Human
acggacaauaaaccuccgc

SEQ ID NO: 3878228 - RNA, 19 nt, Human
acggacacucaaaagcugg

SEQ ID NO: 3878229 - RNA, 13 nt, Human
acggagagaaaaa

SEQ ID NO: 3878230 - RNA, 18 nt, Human
acggagccacuccucuga

SEQ ID NO: 3878231 - RNA, 19 nt, Human
acggagccacuccucugac

SEQ ID NO: 3878232 - RNA, 20 nt, Human
acggagccacuccucugacu

SEQ ID NO: 3878233 - RNA, 21 nt, Human
acggagccacuccucugacuc

SEQ ID NO: 3878234 - RNA, 21 nt, Human
acggagccccaggccucugug

SEQ ID NO: 3878235 - RNA, 17 nt, Human
acggaucagaaauacag

SEQ ID NO: 3878236 - RNA, 23 nt, Human
acggauccugcacugacucugga

SEQ ID NO: 3878237 - RNA, 15 nt, Human
acggaucugagaauc

SEQ ID NO: 3878238 - RNA, 13 nt, Human
acggaugauuucu

SEQ ID NO: 3878239 - RNA, 23 nt, Human
accucugcucugaggcuuccaga

SEQ ID NO: 3878240 - RNA, 15 nt, Human
accucugcuucccag

SEQ ID NO: 3878241 - RNA, 17 nt, Human
accucugcuucccaggu

SEQ ID NO: 3878242 - RNA, 20 nt, Human
accucugcuuucugauguug

SEQ ID NO: 3878243 - RNA, 24 nt, Human
accucugcuuuuaucucagauguu

SEQ ID NO: 3878244 - RNA, 23 nt, Human
accucuggacuggcuagaguccu

SEQ ID NO: 3878245 - RNA, 22 nt, Human
accucuguauuugaaucagccu

SEQ ID NO: 3878246 - RNA, 12 nt, Human
accucugucuca

SEQ ID NO: 3878247 - RNA, 16 nt, Human
accucugucucauccu

SEQ ID NO: 3878248 - RNA, 20 nt, Human
accucugucucauccuccug

SEQ ID NO: 3878249 - RNA, 22 nt, Human
accucugucuuggcuuucaugu

SEQ ID NO: 3878250 - RNA, 15 nt, Human
accucugugaccuca

SEQ ID NO: 3878251 - RNA, 16 nt, Human
accucugugaccucag

SEQ ID NO: 3878252 - RNA, 14 nt, Human
accucuguuguccu

SEQ ID NO: 3878253 - RNA, 22 nt, Human
accucuuaaagaaaacccaccc

SEQ ID NO: 3878254 - RNA, 15 nt, Human
accucuucacccccc

SEQ ID NO: 3878255 - RNA, 12 nt, Human
accucuuccgac

SEQ ID NO: 3878256 - RNA, 19 nt, Human
accucuugagccuugaacu

SEQ ID NO: 3878257 - RNA, 12 nt, Human
accucuugcugu

SEQ ID NO: 3878258 - RNA, 13 nt, Human
accucuugcuguc

SEQ ID NO: 3878259 - RNA, 16 nt, Human
accucuugcugucucu

SEQ ID NO: 3878260 - RNA, 22 nt, Human
accucuuuaaguauugauucug

SEQ ID NO: 3878261 - RNA, 22 nt, Human
accucuuuauuuuuugauugaa

SEQ ID NO: 3878262 - RNA, 15 nt, Human
accucuuuucugcau

SEQ ID NO: 3878263 - RNA, 18 nt, Human
accugaaaaaaaguuuac

SEQ ID NO: 3878264 - RNA, 19 nt, Human
accugaaaacacugugcac

SEQ ID NO: 3878265 - RNA, 20 nt, Human
accugaaaacacugugcaca

SEQ ID NO: 3878266 - RNA, 12 nt, Human
accugaaaagua

SEQ ID NO: 3878267 - RNA, 18 nt, Human
accugaacacuuauugcu

SEQ ID NO: 3878268 - RNA, 16 nt, Human
accugaagacugagga

SEQ ID NO: 3878269 - RNA, 22 nt, Human
accugaagcuaucguaaaauua

SEQ ID NO: 3878270 - RNA, 23 nt, Human
accugaagggguuuucuugauaa

SEQ ID NO: 3878271 - RNA, 13 nt, Human
accugaaguucac

SEQ ID NO: 3878272 - RNA, 18 nt, Human
accugaauagcucccaga

SEQ ID NO: 3878273 - RNA, 19 nt, Human
accugaauuuuggcugugu

SEQ ID NO: 3878274 - RNA, 15 nt, Human
accugacacaagagg

SEQ ID NO: 3878275 - RNA, 19 nt, Human
accugacacaccaggcgcu

SEQ ID NO: 3878276 - RNA, 16 nt, Human
accugacacucccuug

SEQ ID NO: 3878277 - RNA, 17 nt, Human
accugaccccugacccc

SEQ ID NO: 3878278 - RNA, 15 nt, Human
accugaccccugcuc

SEQ ID NO: 3878279 - RNA, 16 nt, Human
accugaccccugcuca

SEQ ID NO: 3878280 - RNA, 14 nt, Human
accugaccgugggc

SEQ ID NO: 3878281 - RNA, 18 nt, Human
accugaccucuugcuguc

SEQ ID NO: 3878282 - RNA, 21 nt, Human
accugaccucuugcugucucu

SEQ ID NO: 3878283 - RNA, 19 nt, Human
accugacguagcugcaaag

SEQ ID NO: 3878284 - RNA, 16 nt, Human
accugacucugaaauc

SEQ ID NO: 3878285 - RNA, 17 nt, Human
accugacucugaaaucu

SEQ ID NO: 3878286 - RNA, 20 nt, Human
accugacugguuaacagcag

SEQ ID NO: 3878287 - RNA, 17 nt, Human
accugagauuuauuaaa

SEQ ID NO: 3878288 - RNA, 19 nt, Human
accugagauuuauuaaaga

SEQ ID NO: 3878289 - RNA, 12 nt, Human
accugagcccca

SEQ ID NO: 3878290 - RNA, 23 nt, Human
accugagcccggaugcuucucca

SEQ ID NO: 3878291 - RNA, 13 nt, Human
accugagccugcc

SEQ ID NO: 3878292 - RNA, 12 nt, Human
accugagcuaaa

SEQ ID NO: 3878293 - RNA, 22 nt, Human
accugagcuaaauaaagauauu

SEQ ID NO: 3878294 - RNA, 20 nt, Human
accugagcuagaagcuggag

SEQ ID NO: 3878295 - RNA, 13 nt, Human
accugagcuuugg

SEQ ID NO: 3878296 - RNA, 17 nt, Human
accugaggaacugucuc

SEQ ID NO: 3878297 - RNA, 21 nt, Human
accugaggacauggcuucuga

SEQ ID NO: 3878298 - RNA, 21 nt, Human
accugaggcccuucucuccag

SEQ ID NO: 3878299 - RNA, 12 nt, Human
accugaggcugu

SEQ ID NO: 3878300 - RNA, 15 nt, Human
accugagggucugua

SEQ ID NO: 3878301 - RNA, 16 nt, Human
accugaggugggccca

SEQ ID NO: 3878302 - RNA, 19 nt, Human
accugaggugggcccagga

SEQ ID NO: 3878303 - RNA, 22 nt, Human
accugaggugggcccaggacca

SEQ ID NO: 3878304 - RNA, 23 nt, Human
accugaggugggcccaggaccag

SEQ ID NO: 3878305 - RNA, 23 nt, Human
accugagucacccuaccugugcc

SEQ ID NO: 3878306 - RNA, 18 nt, Human
accugagucugcuauauu

SEQ ID NO: 3878307 - RNA, 20 nt, Human
accugauccuggaggcccag

SEQ ID NO: 3878308 - RNA, 13 nt, Human
accugaugaaaau

SEQ ID NO: 3878309 - RNA, 22 nt, Human
accugaugaaaauaaagaaugg

SEQ ID NO: 3878310 - RNA, 22 nt, Human
accugauggaaguaaagccuca

SEQ ID NO: 3878311 - RNA, 21 nt, Human
accugauggcacuuagcuauc

SEQ ID NO: 3878312 - RNA, 19 nt, Human
accugauguaccugaugcu

SEQ ID NO: 3878313 - RNA, 13 nt, Human
accugauguguac

SEQ ID NO: 3878314 - RNA, 21 nt, Human
accugauguuaaaauuccauc

SEQ ID NO: 3878315 - RNA, 11 nt, Human
accugauucaa

SEQ ID NO: 3878316 - RNA, 16 nt, Human
accugauuuuuuuucc

SEQ ID NO: 3878317 - RNA, 15 nt, Human
accugcaaaaaauag

SEQ ID NO: 3878318 - RNA, 15 nt, Human
accugcaaagaucug

SEQ ID NO: 3878319 - RNA, 16 nt, Human
accugcaaagaucugu

SEQ ID NO: 3878320 - RNA, 22 nt, Human
accugcaaagaucuguccucag

SEQ ID NO: 3878321 - RNA, 15 nt, Human
accugcaaucccagc

SEQ ID NO: 3878322 - RNA, 15 nt, Human
accugcaccuccccc

SEQ ID NO: 3878323 - RNA, 17 nt, Human
accugcaccucccccca

SEQ ID NO: 3878324 - RNA, 21 nt, Human
accugcaccuccccccacugc

SEQ ID NO: 3878325 - RNA, 17 nt, Human
accugcagauucuagga

SEQ ID NO: 3878326 - RNA, 17 nt, Human
accugcagccucccucc

SEQ ID NO: 3878327 - RNA, 15 nt, Human
accugcagcucccuc

SEQ ID NO: 3878328 - RNA, 23 nt, Human
accugcaggcugagccacucucu

SEQ ID NO: 3878329 - RNA, 19 nt, Human
accugcauccguaguuccc

SEQ ID NO: 3878330 - RNA, 21 nt, Human
accugcauccguaguucccug

SEQ ID NO: 3878331 - RNA, 21 nt, Human
accugcauuuguauguguccc

SEQ ID NO: 3878332 - RNA, 22 nt, Human
accugccacccugggccuggca

SEQ ID NO: 3878333 - RNA, 22 nt, Human
accugccacuaggcugggugcc

SEQ ID NO: 3878334 - RNA, 16 nt, Human
accugccacucacaca

SEQ ID NO: 3878335 - RNA, 17 nt, Human
accugccacucacacag

SEQ ID NO: 3878336 - RNA, 19 nt, Human
accugccacucacacagcc

SEQ ID NO: 3878337 - RNA, 22 nt, Human
accugccacucacacagccagg

SEQ ID NO: 3878338 - RNA, 14 nt, Human
accugccagccugg

SEQ ID NO: 3878339 - RNA, 14 nt, Human
accugccaggaagc

SEQ ID NO: 3878340 - RNA, 15 nt, Human
accugccaggcaggg

SEQ ID NO: 3878341 - RNA, 18 nt, Human
accugccaggcaggggug

SEQ ID NO: 3878342 - RNA, 11 nt, Human
accugccaggg

SEQ ID NO: 3878343 - RNA, 13 nt, Human
accugccagggag

SEQ ID NO: 3878344 - RNA, 18 nt, Human
accugccauuugcacccu

SEQ ID NO: 3878345 - RNA, 15 nt, Human
accugcccaucacag

SEQ ID NO: 3878346 - RNA, 17 nt, Human
accugccccaacucucc

SEQ ID NO: 3878347 - RNA, 23 nt, Human
accugccccacuuguccuuagcc

SEQ ID NO: 3878348 - RNA, 13 nt, Human
accugccccaucc

SEQ ID NO: 3878349 - RNA, 17 nt, Human
accugcccccuucuccc

SEQ ID NO: 3878350 - RNA, 18 nt, Human
accugcccccuucuccca

SEQ ID NO: 3878351 - RNA, 16 nt, Human
accugccccgcccagc

SEQ ID NO: 3878352 - RNA, 20 nt, Human
accugccccucaacucuccu

SEQ ID NO: 3878353 - RNA, 20 nt, Human
accugccccuccucucugcc

SEQ ID NO: 3878354 - RNA, 22 nt, Human
accugccccuccucucugcccu

SEQ ID NO: 3878355 - RNA, 23 nt, Human
accugccccuccucucugcccua

SEQ ID NO: 3878356 - RNA, 18 nt, Human
accugcccuaccugcccc

SEQ ID NO: 3878357 - RNA, 19 nt, Human
accugcccuaccugcccca

SEQ ID NO: 3878358 - RNA, 15 nt, Human
accugcccucaaggg

SEQ ID NO: 3878359 - RNA, 17 nt, Human
accugcccugcccccac

SEQ ID NO: 3878360 - RNA, 20 nt, Human
accugcccugcccugccacc

SEQ ID NO: 3878361 - RNA, 22 nt, Human
accugcccugcccugccaccug

SEQ ID NO: 3878362 - RNA, 12 nt, Human
accugcccugga

SEQ ID NO: 3878363 - RNA, 20 nt, Human
accugcccuuuuuucugccu

SEQ ID NO: 3878364 - RNA, 12 nt, Human
accugccgaccu

SEQ ID NO: 3878365 - RNA, 18 nt, Human
accugccgaccucguccu

SEQ ID NO: 3878366 - RNA, 16 nt, Human
accugccgagagucca

SEQ ID NO: 3878367 - RNA, 17 nt, Human
accugccucacagcugg

SEQ ID NO: 3878368 - RNA, 23 nt, Human
accugccucccuucaugcaugga

SEQ ID NO: 3878369 - RNA, 18 nt, Human
accugccuccucguuccu

SEQ ID NO: 3878370 - RNA, 14 nt, Human
accugccuccugcc

SEQ ID NO: 3878371 - RNA, 18 nt, Human
accugccuccugccugcc

SEQ ID NO: 3878372 - RNA, 23 nt, Human
accugccucggccucccaaagug

SEQ ID NO: 3878373 - RNA, 10 nt, Human
accugccugc

SEQ ID NO: 3878374 - RNA, 18 nt, Human
accugccugcgucuuccg

SEQ ID NO: 3878375 - RNA, 11 nt, Human
accugccugua

SEQ ID NO: 3878376 - RNA, 13 nt, Human
accugcgcuucac

SEQ ID NO: 3878377 - RNA, 14 nt, Human
accugcgcuucacu

SEQ ID NO: 3878378 - RNA, 22 nt, Human
accugcggcugcugugugccuu

SEQ ID NO: 3878379 - RNA, 16 nt, Human
accugcggugcuaucu

SEQ ID NO: 3878380 - RNA, 16 nt, Human
accugcucacgucaaa

SEQ ID NO: 3878381 - RNA, 13 nt, Human
accugcucccagg

SEQ ID NO: 3878382 - RNA, 13 nt, Human
accugcucuccuc

SEQ ID NO: 3878383 - RNA, 15 nt, Human
accugcucuccucuu

SEQ ID NO: 3878384 - RNA, 16 nt, Human
accugcucuccucuuc

SEQ ID NO: 3878385 - RNA, 23 nt, Human
accugcucuccucuucuacucac

SEQ ID NO: 3878386 - RNA, 18 nt, Human
accugcucuccucuugcc

SEQ ID NO: 3878387 - RNA, 12 nt, Human
accugcucugcu

SEQ ID NO: 3878388 - RNA, 16 nt, Human
gacuuuggcugcaugc

SEQ ID NO: 3878389 - RNA, 14 nt, Human
gacuuuguaccccc

SEQ ID NO: 3878390 - RNA, 22 nt, Human
gacuuuguaccccccaaccccu

SEQ ID NO: 3878391 - RNA, 19 nt, Human
gacuuuucaaguauuuaag

SEQ ID NO: 3878392 - RNA, 22 nt, Human
gacuuuuccaauaugugauuuu

SEQ ID NO: 3878393 - RNA, 22 nt, Human
gacuuuucgaccaauucaaccc

SEQ ID NO: 3878394 - RNA, 17 nt, Human
gacuuuucguuaacauu

SEQ ID NO: 3878395 - RNA, 13 nt, Human
gacuuuucugcaa

SEQ ID NO: 3878396 - RNA, 12 nt, Human
gacuuuucugua

SEQ ID NO: 3878397 - RNA, 23 nt, Human
gacuuuucuguccgagcuuugaa

SEQ ID NO: 3878398 - RNA, 23 nt, Human
gacuuuucuuucagccaagaauu

SEQ ID NO: 3878399 - RNA, 15 nt, Human
gacuuuugcuuuaau

SEQ ID NO: 3878400 - RNA, 20 nt, Human
gacuuuuguacaucuggcuu

SEQ ID NO: 3878401 - RNA, 13 nt, Human
gacuuuuuauaaa

SEQ ID NO: 3878402 - RNA, 16 nt, Human
gacuuuuuauaaaaug

SEQ ID NO: 3878403 - RNA, 18 nt, Human
gacuuuuugguggaugua

SEQ ID NO: 3878404 - RNA, 20 nt, Human
gagaaaaagaaaaaauauau

SEQ ID NO: 3878405 - RNA, 16 nt, Human
gagaaaaagaaaugca

SEQ ID NO: 3878406 - RNA, 12 nt, Human
gagaaaaagacc

SEQ ID NO: 3878407 - RNA, 19 nt, Human
gagaaaaagcuccuguccu

SEQ ID NO: 3878408 - RNA, 18 nt, Human
gagaaaaaugcuccccac

SEQ ID NO: 3878409 - RNA, 15 nt, Human
gagaaaacagaccua

SEQ ID NO: 3878410 - RNA, 17 nt, Human
gagaaaaccccuuccca

SEQ ID NO: 3878411 - RNA, 15 nt, Human
gagaaaaccuguucu

SEQ ID NO: 3878412 - RNA, 22 nt, Human
gagaaaacuuauuugagugauu

SEQ ID NO: 3878413 - RNA, 14 nt, Human
gagaaaagaaaaaa

SEQ ID NO: 3878414 - RNA, 15 nt, Human
gagaaaagaaaaaaa

SEQ ID NO: 3878415 - RNA, 14 nt, Human
gagaaaagagagaa

SEQ ID NO: 3878416 - RNA, 13 nt, Human
gagaaaauaaaaa

SEQ ID NO: 3878417 - RNA, 18 nt, Human
gagaaaauaaaaaguuaa

SEQ ID NO: 3878418 - RNA, 18 nt, Human
gagaaaaucaucaagaag

SEQ ID NO: 3878419 - RNA, 18 nt, Human
gagaaaauccccauugaa

SEQ ID NO: 3878420 - RNA, 13 nt, Human
gagaaacaaacuu

SEQ ID NO: 3878421 - RNA, 14 nt, Human
gagaaacagagaca

SEQ ID NO: 3878422 - RNA, 19 nt, Human
gagaaacagagacaggccc

SEQ ID NO: 3878423 - RNA, 16 nt, Human
gagaaaccagcuuccu

SEQ ID NO: 3878424 - RNA, 23 nt, Human
gagaaaccagcuuccuucagaga

SEQ ID NO: 3878425 - RNA, 12 nt, Human
gagaaacccugu

SEQ ID NO: 3878426 - RNA, 22 nt, Human
gagaaaccguccucuuuuucca

SEQ ID NO: 3878427 - RNA, 17 nt, Human
gagaaaccuguaucuuu

SEQ ID NO: 3878428 - RNA, 18 nt, Human
gagaaacuuaagcaaagg

SEQ ID NO: 3878429 - RNA, 19 nt, Human
gagaaacuuuauacauuag

SEQ ID NO: 3878430 - RNA, 20 nt, Human
gagaaagccaggcagguagc

SEQ ID NO: 3878431 - RNA, 19 nt, Human
gagaaagcugacuuggcug

SEQ ID NO: 3878432 - RNA, 20 nt, Human
gagaaagcugacuuggcugg

SEQ ID NO: 3878433 - RNA, 15 nt, Human
gagaaagggacaaug

SEQ ID NO: 3878434 - RNA, 17 nt, Human
gagaaaggggagcccac

SEQ ID NO: 3878435 - RNA, 18 nt, Human
gagaaaggggagcccacu

SEQ ID NO: 3878436 - RNA, 23 nt, Human
gagaaauaaaguuugcuuagaaa

SEQ ID NO: 3878437 - RNA, 18 nt, Human
gagaaauaagugcccucu

SEQ ID NO: 3878438 - RNA, 23 nt, Human
gagaaauagcuuaugaaaagaau

SEQ ID NO: 3878439 - RNA, 20 nt, Human
gagaaauauggacacuuaau

SEQ ID NO: 3878440 - RNA, 14 nt, Human
gagaaaugaaaaca

SEQ ID NO: 3878441 - RNA, 19 nt, Human
gagaaauucguguguuuuu

SEQ ID NO: 3878442 - RNA, 12 nt, Human
gagaaauucugu

SEQ ID NO: 3878443 - RNA, 14 nt, Human
gagaaauucuguua

SEQ ID NO: 3878444 - RNA, 20 nt, Human
gagaaauucuguuaaaaucu

SEQ ID NO: 3878445 - RNA, 14 nt, Human
gagaaauucuuguu

SEQ ID NO: 3878446 - RNA, 14 nt, Human
gagaaauuuauaaa

SEQ ID NO: 3878447 - RNA, 12 nt, Human
gagaacaaagcu

SEQ ID NO: 3878448 - RNA, 22 nt, Human
gagaacaaagcuguuaaacugu

SEQ ID NO: 3878449 - RNA, 12 nt, Human
gagaacaaauau

SEQ ID NO: 3878450 - RNA, 22 nt, Human
gagaacacagccgauucaccug

SEQ ID NO: 3878451 - RNA, 12 nt, Human
gagaacaggacu

SEQ ID NO: 3878452 - RNA, 18 nt, Human
gagaacaggugguuuuua

SEQ ID NO: 3878453 - RNA, 13 nt, Human
gagaaccaaaucu

SEQ ID NO: 3878454 - RNA, 22 nt, Human
gagaaccgagcaaagaucaaaa

SEQ ID NO: 3878455 - RNA, 23 nt, Human
gagaaccgagcaaagaucaaaau

SEQ ID NO: 3878456 - RNA, 18 nt, Human
gagaaccuaaguuucagu

SEQ ID NO: 3878457 - RNA, 21 nt, Human
gagaaccuagggugauauuaa

SEQ ID NO: 3878458 - RNA, 22 nt, Human
aauccuauauagaaugcugcac

SEQ ID NO: 3878459 - RNA, 20 nt, Human
aauccuauucucgggcugag

SEQ ID NO: 3878460 - RNA, 20 nt, Human
aauccucaguuuuugugaaa

SEQ ID NO: 3878461 - RNA, 13 nt, Human
aauccuccuccag

SEQ ID NO: 3878462 - RNA, 15 nt, Human
aauccuccugaguga

SEQ ID NO: 3878463 - RNA, 18 nt, Human
aauccucucucuguguua

SEQ ID NO: 3878464 - RNA, 17 nt, Human
aauccucuuccucugag

SEQ ID NO: 3878465 - RNA, 19 nt, Human
aauccugauuccucucuaa

SEQ ID NO: 3878466 - RNA, 10 nt, Human
aauccugccc

SEQ ID NO: 3878467 - RNA, 21 nt, Human
aauccuggagaggguauuuuu

SEQ ID NO: 3878468 - RNA, 15 nt, Human
aauccuggauuuuuu

SEQ ID NO: 3878469 - RNA, 12 nt, Human
aauccuggcagc

SEQ ID NO: 3878470 - RNA, 13 nt, Human
aauccuggcagcc

SEQ ID NO: 3878471 - RNA, 19 nt, Human
aauccuggcccucuguguu

SEQ ID NO: 3878472 - RNA, 21 nt, Human
aauccuggggaacauagaacu

SEQ ID NO: 3878473 - RNA, 22 nt, Human
aauccuguaggaagguacugua

SEQ ID NO: 3878474 - RNA, 15 nt, Human
aauccuguccucagc

SEQ ID NO: 3878475 - RNA, 18 nt, Human
aauccuguccucagcuuc

SEQ ID NO: 3878476 - RNA, 21 nt, Human
aauccuguccucagcuucuua

SEQ ID NO: 3878477 - RNA, 16 nt, Human
aauccuguugaaaagc

SEQ ID NO: 3878478 - RNA, 22 nt, Human
aauccuguugaaaagccauguu

SEQ ID NO: 3878479 - RNA, 20 nt, Human
aauccuuagaucuggcaugu

SEQ ID NO: 3878480 - RNA, 12 nt, Human
aauccuuccaaa

SEQ ID NO: 3878481 - RNA, 21 nt, Human
aauccuuccaaaaauuauuau

SEQ ID NO: 3878482 - RNA, 14 nt, Human
aauccuucuaaucu

SEQ ID NO: 3878483 - RNA, 15 nt, Human
aauccuugaagguau

SEQ ID NO: 3878484 - RNA, 17 nt, Human
aauccuugcuuaugaca

SEQ ID NO: 3878485 - RNA, 18 nt, Human
aauccuugcuuaugacau

SEQ ID NO: 3878486 - RNA, 13 nt, Human
aauccuuuacugu

SEQ ID NO: 3878487 - RNA, 14 nt, Human
aauccuuugccugc

SEQ ID NO: 3878488 - RNA, 14 nt, Human
aauccuuuggaaaa

SEQ ID NO: 3878489 - RNA, 13 nt, Human
aauccuuugugaa

SEQ ID NO: 3878490 - RNA, 12 nt, Human
aauccuuuugua

SEQ ID NO: 3878491 - RNA, 20 nt, Human
aauccuuuuucuuuauaaac

SEQ ID NO: 3878492 - RNA, 15 nt, Human
aaucgaccugccucg

SEQ ID NO: 3878493 - RNA, 19 nt, Human
aaucgaggaaccagagcca

SEQ ID NO: 3878494 - RNA, 20 nt, Human
aaucgagugagacaaaauuu

SEQ ID NO: 3878495 - RNA, 13 nt, Human
aaucgauuggcuu

SEQ ID NO: 3878496 - RNA, 21 nt, Human
aaucgcuuaaagauguuccua

SEQ ID NO: 3878497 - RNA, 23 nt, Human
aaucgcuucucuuuugaaacaau

SEQ ID NO: 3878498 - RNA, 21 nt, Human
aaucgcuuuccuaaaacagua

SEQ ID NO: 3878499 - RNA, 23 nt, Human
aaucggaucuggggcucugggau

SEQ ID NO: 3878500 - RNA, 15 nt, Human
aaucgguuuaaacau

SEQ ID NO: 3878501 - RNA, 16 nt, Human
aaucguuaugugugua

SEQ ID NO: 3878502 - RNA, 18 nt, Human
aaucguuauguguguaua

SEQ ID NO: 3878503 - RNA, 14 nt, Human
aaucuaaaagcuuu

SEQ ID NO: 3878504 - RNA, 17 nt, Human
aaucuaaaucuauuuau

SEQ ID NO: 3878505 - RNA, 18 nt, Human
aaucuaaauggaaccacu

SEQ ID NO: 3878506 - RNA, 22 nt, Human
aaucuaagcagcauuucugaag

SEQ ID NO: 3878507 - RNA, 21 nt, Human
aaucuaagcagcuuauuguuu

SEQ ID NO: 3878508 - RNA, 15 nt, Human
aaucuaagugauaua

SEQ ID NO: 3878509 - RNA, 17 nt, Human
aaucuaaugacauucaa

SEQ ID NO: 3878510 - RNA, 18 nt, Human
aaucuaaugacauucaau

SEQ ID NO: 3878511 - RNA, 16 nt, Human
aaucuacacacggugc

SEQ ID NO: 3878512 - RNA, 15 nt, Human
aaucuacccaaagga

SEQ ID NO: 3878513 - RNA, 17 nt, Human
aaucuaccuucuguagu

SEQ ID NO: 3878514 - RNA, 16 nt, Human
aaucuacuaauuccac

SEQ ID NO: 3878515 - RNA, 17 nt, Human
aaucuacuaauuccaca

SEQ ID NO: 3878516 - RNA, 17 nt, Human
aaucuacucaaagcaug

SEQ ID NO: 3878517 - RNA, 15 nt, Human
aaucuagaagaaaug

SEQ ID NO: 3878518 - RNA, 17 nt, Human
aaucuagaagaaaugaa

SEQ ID NO: 3878519 - RNA, 18 nt, Human
aaucuagaagaaaugaaa

SEQ ID NO: 3878520 - RNA, 19 nt, Human
aaucuagaagaaaugaaau

SEQ ID NO: 3878521 - RNA, 21 nt, Human
aaucuguaaacuguguauucc

SEQ ID NO: 3878522 - RNA, 11 nt, Human
aaucuguacau

SEQ ID NO: 3878523 - RNA, 22 nt, Human
aaucuguacauuuuguuguaaa

SEQ ID NO: 3878524 - RNA, 16 nt, Human
aaucuguagggcugga

SEQ ID NO: 3878525 - RNA, 20 nt, Human
aaucuguauaauacuuugua

SEQ ID NO: 3878526 - RNA, 21 nt, Human
aaucuguauaauacuuuguau

SEQ ID NO: 3878527 - RNA, 14 nt, Human
aaucugucaaaaca

SEQ ID NO: 3878528 - RNA, 18 nt, Human
aaucugucaaaacacugu

SEQ ID NO: 3878529 - RNA, 13 nt, Human
aaucugucaagag

SEQ ID NO: 3878530 - RNA, 20 nt, Human
aaucuguccaaaggaggcug

SEQ ID NO: 3878531 - RNA, 11 nt, Human
aaucugucugc

SEQ ID NO: 3878532 - RNA, 14 nt, Human
aaucugucugcugg

SEQ ID NO: 3878533 - RNA, 22 nt, Human
aaucugucugcuggucacuucu

SEQ ID NO: 3878534 - RNA, 23 nt, Human
aaucugucugcuggucacuucuu

SEQ ID NO: 3878535 - RNA, 13 nt, Human
aaucugugaacuu

SEQ ID NO: 3878536 - RNA, 18 nt, Human
aaucugugaacuugaaau

SEQ ID NO: 3878537 - RNA, 20 nt, Human
aaucugugaacuugaaauuu

SEQ ID NO: 3878538 - RNA, 18 nt, Human
aaucuguguacaaagaaa

SEQ ID NO: 3878539 - RNA, 20 nt, Human
aaucuguguacaaagaaaua

SEQ ID NO: 3878540 - RNA, 20 nt, Human
aaucuguguauauuauuugg

SEQ ID NO: 3878541 - RNA, 17 nt, Human
aaucugugugugcccug

SEQ ID NO: 3878542 - RNA, 19 nt, Human
aaucuguucugggcucuuu

SEQ ID NO: 3878543 - RNA, 21 nt, Human
aaucuguugauaaauccauca

SEQ ID NO: 3878544 - RNA, 13 nt, Human
aaucuuaagaaau

SEQ ID NO: 3878545 - RNA, 15 nt, Human
aaucuuaagaaauaa

SEQ ID NO: 3878546 - RNA, 19 nt, Human
aaucuuaagguguagccac

SEQ ID NO: 3878547 - RNA, 22 nt, Human
aaucuuaauacuguuauucuuu

SEQ ID NO: 3878548 - RNA, 18 nt, Human
aaucuuacuuuguaaauu

SEQ ID NO: 3878549 - RNA, 19 nt, Human
aaucuuacuuuguaaauuc

SEQ ID NO: 3878550 - RNA, 20 nt, Human
aaucuuacuuuguaaauucu

SEQ ID NO: 3878551 - RNA, 16 nt, Human
aaucuuagcugccaag

SEQ ID NO: 3878552 - RNA, 21 nt, Human
aaucuuaguguaugauuacug

SEQ ID NO: 3878553 - RNA, 17 nt, Human
aaucuuauaauuguucu

SEQ ID NO: 3878554 - RNA, 14 nt, Human
aaucuuauaauuua

SEQ ID NO: 3878555 - RNA, 14 nt, Human
aaucuuauaguucu

SEQ ID NO: 3878556 - RNA, 15 nt, Human
aaucuuaucaugguc

SEQ ID NO: 3878557 - RNA, 14 nt, Human
aaucuuauuaaagu

SEQ ID NO: 3878558 - RNA, 17 nt, Human
aaucuucaaagccuucu

SEQ ID NO: 3878559 - RNA, 20 nt, Human
aaucuucaguuuuaucuuua

SEQ ID NO: 3878560 - RNA, 23 nt, Human
aaucuuccaauuuaguuguugua

SEQ ID NO: 3878561 - RNA, 19 nt, Human
aaucuuccuggucgaaagu

SEQ ID NO: 3878562 - RNA, 14 nt, Human
aaucuugaaauuaa

SEQ ID NO: 3878563 - RNA, 13 nt, Human
aaucuugucucaa

SEQ ID NO: 3878564 - RNA, 20 nt, Human
aaucuugucucaaugcucau

SEQ ID NO: 3878565 - RNA, 14 nt, Human
aaucuugugcuaga

SEQ ID NO: 3878566 - RNA, 22 nt, Human
aaucuugugcuagaauacuuuu

SEQ ID NO: 3878567 - RNA, 18 nt, Human
aaucuuguugguucacca

SEQ ID NO: 3878568 - RNA, 13 nt, Human
aaucuuguuuuga

SEQ ID NO: 3878569 - RNA, 14 nt, Human
aaucuuguuuugaa

SEQ ID NO: 3878570 - RNA, 14 nt, Human
aaucuuuaauuaaa

SEQ ID NO: 3878571 - RNA, 21 nt, Human
aaucuuuaauuaaaaccuggg

SEQ ID NO: 3878572 - RNA, 15 nt, Human
aaucuuuaauuuuac

SEQ ID NO: 3878573 - RNA, 22 nt, Human
aaucuuuagagaaguauacaua

SEQ ID NO: 3878574 - RNA, 16 nt, Human
aaucuuuauaaaugua

SEQ ID NO: 3878575 - RNA, 21 nt, Human
aaucuuucaaaccagcuucau

SEQ ID NO: 3878576 - RNA, 21 nt, Human
aaucuuucuuuaccugagacc

SEQ ID NO: 3878577 - RNA, 18 nt, Human
aaucuuucuuucuuagaa

SEQ ID NO: 3878578 - RNA, 23 nt, Human
aaucuuugaaagacuuccaaaga

SEQ ID NO: 3878579 - RNA, 20 nt, Human
aaucuuuguaccaaaauuuu

SEQ ID NO: 3878580 - RNA, 22 nt, Human
aaucuuuguuucagguucagua

SEQ ID NO: 3878581 - RNA, 21 nt, Human
aaucuuuuacaacugccucga

SEQ ID NO: 3878582 - RNA, 23 nt, Human
aaucuuuuacaacugccucgaaa

SEQ ID NO: 3878583 - RNA, 16 nt, Human
aaucuuuucacaaaua

SEQ ID NO: 3878584 - RNA, 14 nt, Human
aaucuuuucugaau

SEQ ID NO: 3878585 - RNA, 14 nt, Human
aaugaaaaaagcuu

SEQ ID NO: 3878586 - RNA, 18 nt, Human
aaugaaaaaugaaagaug

SEQ ID NO: 3878587 - RNA, 14 nt, Human
aaugaaaaauucuc

SEQ ID NO: 3878588 - RNA, 18 nt, Human
aaugaaaaauuuaagcau

SEQ ID NO: 3878589 - RNA, 16 nt, Human
aaugaaaacagaaugu

SEQ ID NO: 3878590 - RNA, 13 nt, Human
aaugaaaacagug

SEQ ID NO: 3878591 - RNA, 20 nt, Human
aaugauugaaaauaaugcug

SEQ ID NO: 3878592 - RNA, 15 nt, Human
aaugauugcuuuuaa

SEQ ID NO: 3878593 - RNA, 20 nt, Human
aaugauugcuuuuaaaauuu

SEQ ID NO: 3878594 - RNA, 18 nt, Human
aaugauuguuuaaagguu

SEQ ID NO: 3878595 - RNA, 22 nt, Human
aaugauuucaugcuaucucugu

SEQ ID NO: 3878596 - RNA, 20 nt, Human
aaugauuuccucuguaaucu

SEQ ID NO: 3878597 - RNA, 13 nt, Human
aaugauuuuuaaa

SEQ ID NO: 3878598 - RNA, 18 nt, Human
aaugauuuuucuuuacaa

SEQ ID NO: 3878599 - RNA, 17 nt, Human
aaugcaaaaaaaauuag

SEQ ID NO: 3878600 - RNA, 14 nt, Human
aaugcaaaaaaucu

SEQ ID NO: 3878601 - RNA, 11 nt, Human
aaugcaaacca

SEQ ID NO: 3878602 - RNA, 12 nt, Human
aaugcaaaccau

SEQ ID NO: 3878603 - RNA, 14 nt, Human
aaugcaaaccauca

SEQ ID NO: 3878604 - RNA, 21 nt, Human
aaugcaaacugggaugaaacu

SEQ ID NO: 3878605 - RNA, 14 nt, Human
aaugcaaagaugaa

SEQ ID NO: 3878606 - RNA, 18 nt, Human
aaugcaaagaugaagguc

SEQ ID NO: 3878607 - RNA, 23 nt, Human
aaugcaaaguucuguguuuaauu

SEQ ID NO: 3878608 - RNA, 15 nt, Human
aaugcaacaacaugu

SEQ ID NO: 3878609 - RNA, 19 nt, Human
aaugcaagagugauugcag

SEQ ID NO: 3878610 - RNA, 22 nt, Human
aaugcaagagugauugcagcuu

SEQ ID NO: 3878611 - RNA, 17 nt, Human
aaugcaagcuaguggcu

SEQ ID NO: 3878612 - RNA, 14 nt, Human
aaugcaauauguau

SEQ ID NO: 3878613 - RNA, 14 nt, Human
aaugcaauauuugu

SEQ ID NO: 3878614 - RNA, 21 nt, Human
aaugcaauguaagcauacuuu

SEQ ID NO: 3878615 - RNA, 14 nt, Human
aaugcacaaugucu

SEQ ID NO: 3878616 - RNA, 16 nt, Human
aaugcacaaugucuug

SEQ ID NO: 3878617 - RNA, 14 nt, Human
aaugcacacaaaac

SEQ ID NO: 3878618 - RNA, 16 nt, Human
aaugcacagauauacu

SEQ ID NO: 3878619 - RNA, 18 nt, Human
aaugcacauccauuccca

SEQ ID NO: 3878620 - RNA, 15 nt, Human
aaugcaccuaaagaa

SEQ ID NO: 3878621 - RNA, 13 nt, Human
aaugcacggccuc

SEQ ID NO: 3878622 - RNA, 19 nt, Human
aaugcacguagcugaggcc

SEQ ID NO: 3878623 - RNA, 18 nt, Human
aaugcacugggaaaaagu

SEQ ID NO: 3878624 - RNA, 13 nt, Human
aaugcacuuucua

SEQ ID NO: 3878625 - RNA, 13 nt, Human
aaugcacuuuguu

SEQ ID NO: 3878626 - RNA, 20 nt, Human
aaugcagcaaggcccugcug

SEQ ID NO: 3878627 - RNA, 20 nt, Human
aaugcagcagggaugcccug

SEQ ID NO: 3878628 - RNA, 22 nt, Human
aaugcagcagggaugcccugga

SEQ ID NO: 3878629 - RNA, 12 nt, Human
aaugcagccaga

SEQ ID NO: 3878630 - RNA, 12 nt, Human
aaugcagcccau

SEQ ID NO: 3878631 - RNA, 17 nt, Human
aaugcagcccauuucuc

SEQ ID NO: 3878632 - RNA, 14 nt, Human
aaugcaguauggua

SEQ ID NO: 3878633 - RNA, 19 nt, Human
aaugcaguaugguacauuu

SEQ ID NO: 3878634 - RNA, 19 nt, Human
aaugcagucuguccaggcu

SEQ ID NO: 3878635 - RNA, 20 nt, Human
aaugcagucuguccaggcuc

SEQ ID NO: 3878636 - RNA, 23 nt, Human
aaugcaguuacaaauuauaaugu

SEQ ID NO: 3878637 - RNA, 19 nt, Human
aaugcaguugucucuguuu

SEQ ID NO: 3878638 - RNA, 16 nt, Human
aaugcaguuucuucau

SEQ ID NO: 3878639 - RNA, 13 nt, Human
aaugcauaaaaug

SEQ ID NO: 3878640 - RNA, 17 nt, Human
aaugcauacagaaauau

SEQ ID NO: 3878641 - RNA, 18 nt, Human
aaugcauauccugagcca

SEQ ID NO: 3878642 - RNA, 17 nt, Human
aaugcauauuugcaaag

SEQ ID NO: 3878643 - RNA, 17 nt, Human
aauggagaagcugcagg

SEQ ID NO: 3878644 - RNA, 20 nt, Human
aauggagauuugaaggucug

SEQ ID NO: 3878645 - RNA, 17 nt, Human
aauggagcaucaagcca

SEQ ID NO: 3878646 - RNA, 20 nt, Human
aauggaggaucucuaaagag

SEQ ID NO: 3878647 - RNA, 19 nt, Human
aauggaguagaccccuggc

SEQ ID NO: 3878648 - RNA, 23 nt, Human
aauggaguagaccccuggcuggu

SEQ ID NO: 3878649 - RNA, 21 nt, Human
aauggaguuggaguucauuca

SEQ ID NO: 3878650 - RNA, 17 nt, Human
aauggauacauaaagac

SEQ ID NO: 3878651 - RNA, 14 nt, Human
aauggauagcucau

SEQ ID NO: 3878652 - RNA, 18 nt, Human
aauggaucacaagaugga

SEQ ID NO: 3878653 - RNA, 20 nt, Human
aauggauccccagugaaaac

SEQ ID NO: 3878654 - RNA, 12 nt, Human
aauggaugaaau

SEQ ID NO: 3878655 - RNA, 18 nt, Human
aauggauuggauuauuua

SEQ ID NO: 3878656 - RNA, 21 nt, Human
aauggauuggauuauuuaaua

SEQ ID NO: 3878657 - RNA, 18 nt, Human
aauggauuguuaauuuca

SEQ ID NO: 3878658 - RNA, 21 nt, Human
aauggauuugaugcuguuuga

SEQ ID NO: 3878659 - RNA, 20 nt, Human
aauggauuuuucuuuaacug

SEQ ID NO: 3878660 - RNA, 21 nt, Human
aauggcaacaaacugcacaug

SEQ ID NO: 3878661 - RNA, 12 nt, Human
aauggcagcaga

SEQ ID NO: 3878662 - RNA, 12 nt, Human
aauggcagccuu

SEQ ID NO: 3878663 - RNA, 20 nt, Human
aauggcaugagaaauacaaa

SEQ ID NO: 3878664 - RNA, 15 nt, Human
aauggcaugagauag

SEQ ID NO: 3878665 - RNA, 16 nt, Human
aauggccggcuggaaa

SEQ ID NO: 3878666 - RNA, 14 nt, Human
aauggccuucauau

SEQ ID NO: 3878667 - RNA, 14 nt, Human
aauggccuuccuuc

SEQ ID NO: 3878668 - RNA, 20 nt, Human
aauggcgcagugccucuggu

SEQ ID NO: 3878669 - RNA, 14 nt, Human
aauggcuauguuuu

SEQ ID NO: 3878670 - RNA, 20 nt, Human
aauggcuauguuuuuaaugu

SEQ ID NO: 3878671 - RNA, 16 nt, Human
aauggcugauaauuuu

SEQ ID NO: 3878672 - RNA, 17 nt, Human
aauggcugauaauuuua

SEQ ID NO: 3878673 - RNA, 18 nt, Human
aauggcuuuggucucuug

SEQ ID NO: 3878674 - RNA, 14 nt, Human
aaugggaaaagaga

SEQ ID NO: 3878675 - RNA, 20 nt, Human
aaugggaaauacuacuccug

SEQ ID NO: 3878676 - RNA, 13 nt, Human
aaugggacacuaa

SEQ ID NO: 3878677 - RNA, 18 nt, Human
aaugggacuggagucccu

SEQ ID NO: 3878678 - RNA, 16 nt, Human
aaugggaggccucuga

SEQ ID NO: 3878679 - RNA, 16 nt, Human
aaugggaucaugaaag

SEQ ID NO: 3878680 - RNA, 23 nt, Human
aaugggauguaugaauacagcag

SEQ ID NO: 3878681 - RNA, 18 nt, Human
aaugggcgccccccccuc

SEQ ID NO: 3878682 - RNA, 21 nt, Human
aaugggcgccccccccucccc

SEQ ID NO: 3878683 - RNA, 15 nt, Human
aaugggcucuuccaa

SEQ ID NO: 3878684 - RNA, 20 nt, Human
aaugggcucuuccaacaagg

SEQ ID NO: 3878685 - RNA, 13 nt, Human
aauggggccagau

SEQ ID NO: 3878686 - RNA, 17 nt, Human
aaugggggugcauuuga

SEQ ID NO: 3878687 - RNA, 19 nt, Human
aaugguacaugucuuccau

SEQ ID NO: 3878688 - RNA, 20 nt, Human
aaugguacuccacauauuuc

SEQ ID NO: 3878689 - RNA, 16 nt, Human
aaugguagcauuuuaa

SEQ ID NO: 3878690 - RNA, 23 nt, Human
aaugguaguaaucacaguuggcc

SEQ ID NO: 3878691 - RNA, 20 nt, Human
aaugguaguuucugugguug

SEQ ID NO: 3878692 - RNA, 16 nt, Human
aaugguauaaauuuca

SEQ ID NO: 3878693 - RNA, 16 nt, Human
aaugguauggaacucu

SEQ ID NO: 3878694 - RNA, 14 nt, Human
aaugguccaggaga

SEQ ID NO: 3878695 - RNA, 15 nt, Human
aaugguccugacuuu

SEQ ID NO: 3878696 - RNA, 22 nt, Human
aauggugaacugucauuacaga

SEQ ID NO: 3878697 - RNA, 16 nt, Human
aauggugaucacucca

SEQ ID NO: 3878698 - RNA, 16 nt, Human
aauggugccuucauuu

SEQ ID NO: 3878699 - RNA, 16 nt, Human
aauggugcucauuuca

SEQ ID NO: 3878700 - RNA, 17 nt, Human
aauggugcuuaaguucc

SEQ ID NO: 3878701 - RNA, 21 nt, Human
aaugguggcuucagcuccagc

SEQ ID NO: 3878702 - RNA, 22 nt, Human
aaugguggcuucuuuucuuugu

SEQ ID NO: 3878703 - RNA, 23 nt, Human
aauggugguuguuucuuccaaga

SEQ ID NO: 3878704 - RNA, 20 nt, Human
aauggugucaguauccaggc

SEQ ID NO: 3878705 - RNA, 14 nt, Human
aauggugugggaga

SEQ ID NO: 3878706 - RNA, 17 nt, Human
aaugguguuauuugaaa

SEQ ID NO: 3878707 - RNA, 20 nt, Human
aaugguguuuuucuuguaaa

SEQ ID NO: 3878708 - RNA, 14 nt, Human
aaugguuauaaaag

SEQ ID NO: 3878709 - RNA, 17 nt, Human
aaugguugaugauacuu

SEQ ID NO: 3878710 - RNA, 13 nt, Human
aaugguuguauua

SEQ ID NO: 3878711 - RNA, 16 nt, Human
aaugguuguauuagau

SEQ ID NO: 3878712 - RNA, 21 nt, Human
aaugguuguauuagauguucu

SEQ ID NO: 3878713 - RNA, 23 nt, Human
aaugguuguauuagauguucucu

SEQ ID NO: 3878714 - RNA, 16 nt, Human
aaugguuuaaaugguc

SEQ ID NO: 3878715 - RNA, 22 nt, Human
aaugguuuauuuuguauugugg

SEQ ID NO: 3878716 - RNA, 14 nt, Human
aaugguuugaauau

SEQ ID NO: 3878717 - RNA, 18 nt, Human
aaugguuugcaaggaagc

SEQ ID NO: 3878718 - RNA, 19 nt, Human
aaugguuugcaaggaagcc

SEQ ID NO: 3878719 - RNA, 21 nt, Human
aaugguuuggugcuuuuuaua

SEQ ID NO: 3878720 - RNA, 17 nt, Human
aaugguuuucuugugug

SEQ ID NO: 3878721 - RNA, 17 nt, Human
aaugguuuuuaaauuuu

SEQ ID NO: 3878722 - RNA, 12 nt, Human
aauguaaaaaag

SEQ ID NO: 3878723 - RNA, 23 nt, Human
aauguaaaaaggaauaugaaagu

SEQ ID NO: 3878724 - RNA, 13 nt, Human
aauguaaacauuu

SEQ ID NO: 3878725 - RNA, 15 nt, Human
aauguaaacugccau

SEQ ID NO: 3878726 - RNA, 22 nt, Human
aauguaaagcaaccaaaaagaa

SEQ ID NO: 3878727 - RNA, 14 nt, Human
aauguaaagccaug

SEQ ID NO: 3878728 - RNA, 18 nt, Human
aauguaaauauucuauau

SEQ ID NO: 3878729 - RNA, 17 nt, Human
aauguaaauauuuuaaa

SEQ ID NO: 3878730 - RNA, 22 nt, Human
aauguaaauauuuuaaagaauu

SEQ ID NO: 3878731 - RNA, 18 nt, Human
aauguaaaugucucacug

SEQ ID NO: 3878732 - RNA, 15 nt, Human
aauguaaauuuguac

SEQ ID NO: 3878733 - RNA, 16 nt, Human
aauguaaauuuguacu

SEQ ID NO: 3878734 - RNA, 17 nt, Human
aauguaaauuuguacua

SEQ ID NO: 3878735 - RNA, 18 nt, Human
aauguaaauuuguacuau

SEQ ID NO: 3878736 - RNA, 17 nt, Human
aauguaacagucugauc

SEQ ID NO: 3878737 - RNA, 20 nt, Human
aauguaacuguccguaguau

SEQ ID NO: 3878738 - RNA, 22 nt, Human
aauguaacuguuaccauuggaa

SEQ ID NO: 3878739 - RNA, 16 nt, Human
aauguaacuuuuguaa

SEQ ID NO: 3878740 - RNA, 17 nt, Human
aauguaagaaucauugu

SEQ ID NO: 3878741 - RNA, 23 nt, Human
aauguaagaaucauuguaaacau

SEQ ID NO: 3878742 - RNA, 13 nt, Human
aauguaagacaaa

SEQ ID NO: 3878743 - RNA, 19 nt, Human
aauguaagauuauagauuc

SEQ ID NO: 3878744 - RNA, 20 nt, Human
aauguaagauuauagauucu

SEQ ID NO: 3878745 - RNA, 15 nt, Human
aauguaagcuguuua

SEQ ID NO: 3878746 - RNA, 13 nt, Human
aauguaaggcugu

SEQ ID NO: 3878747 - RNA, 15 nt, Human
aauguaaggcugugu

SEQ ID NO: 3878748 - RNA, 17 nt, Human
aauguauauaaaaaugg

SEQ ID NO: 3878749 - RNA, 16 nt, Human
aauguauauacacaua

SEQ ID NO: 3878750 - RNA, 17 nt, Human
aauguauauacacauau

SEQ ID NO: 3878751 - RNA, 12 nt, Human
aauguauauauu

SEQ ID NO: 3878752 - RNA, 20 nt, Human
aauguauauauuuagugcug

SEQ ID NO: 3878753 - RNA, 16 nt, Human
aauguaucaaacugua

SEQ ID NO: 3878754 - RNA, 14 nt, Human
aauguaucaggaaa

SEQ ID NO: 3878755 - RNA, 15 nt, Human
aauguaucaggaaau

SEQ ID NO: 3878756 - RNA, 18 nt, Human
aauguaucauagaaaugu

SEQ ID NO: 3878757 - RNA, 22 nt, Human
aauguaucauagaaauguaacu

SEQ ID NO: 3878758 - RNA, 13 nt, Human
aauguaucuaaga

SEQ ID NO: 3878759 - RNA, 17 nt, Human
aauguaucuuauucaca

SEQ ID NO: 3878760 - RNA, 18 nt, Human
aauguaucuuauucacau

SEQ ID NO: 3878761 - RNA, 13 nt, Human
aauguaugcaugu

SEQ ID NO: 3878762 - RNA, 20 nt, Human
aauguaugcauucacauuua

SEQ ID NO: 3878763 - RNA, 16 nt, Human
aauguaugcuucauac

SEQ ID NO: 3878764 - RNA, 18 nt, Human
aauguaugcuucauacag

SEQ ID NO: 3878765 - RNA, 15 nt, Human
aauguauguaaauag

SEQ ID NO: 3878766 - RNA, 20 nt, Human
aauguaugugcacugucacu

SEQ ID NO: 3878767 - RNA, 21 nt, Human
aauguaugugcacugucacuu

SEQ ID NO: 3878768 - RNA, 22 nt, Human
aauguauuauguccugugagau

SEQ ID NO: 3878769 - RNA, 18 nt, Human
aauguauuauucugcagc

SEQ ID NO: 3878770 - RNA, 15 nt, Human
aauguauuguaccuu

SEQ ID NO: 3878771 - RNA, 19 nt, Human
aauguauuuguucauguuu

SEQ ID NO: 3878772 - RNA, 20 nt, Human
aauguauuuguucauguuug

SEQ ID NO: 3878773 - RNA, 17 nt, Human
aauguauuuuauuguaa

SEQ ID NO: 3878774 - RNA, 14 nt, Human
aaugucaaggugcu

SEQ ID NO: 3878775 - RNA, 23 nt, Human
aaugucacguuuuguuuugugcc

SEQ ID NO: 3878776 - RNA, 17 nt, Human
aaugucacuuaaaggcu

SEQ ID NO: 3878777 - RNA, 16 nt, Human
aaugucagauacaaug

SEQ ID NO: 3878778 - RNA, 16 nt, Human
aaugucaguauuucag

SEQ ID NO: 3878779 - RNA, 19 nt, Human
aaugucaguuguuauuuau

SEQ ID NO: 3878780 - RNA, 19 nt, Human
aaugucauugaaaaacuaa

SEQ ID NO: 3878781 - RNA, 21 nt, Human
aauguccaccaauagaaugag

SEQ ID NO: 3878782 - RNA, 20 nt, Human
aauguccaguaagaucacug

SEQ ID NO: 3878783 - RNA, 17 nt, Human
aauguccuccagaagcc

SEQ ID NO: 3878784 - RNA, 21 nt, Human
aauguccuccagaagccucug

SEQ ID NO: 3878785 - RNA, 12 nt, Human
aaugucuaaaug

SEQ ID NO: 3878786 - RNA, 17 nt, Human
aaugucuaaaugcugaa

SEQ ID NO: 3878787 - RNA, 18 nt, Human
aaugucuaaaugcugaaa

SEQ ID NO: 3878788 - RNA, 16 nt, Human
aaugucucacugagca

SEQ ID NO: 3878789 - RNA, 13 nt, Human
aaugucuggagac

SEQ ID NO: 3878790 - RNA, 17 nt, Human
aaugucuguaauaauag

SEQ ID NO: 3878791 - RNA, 18 nt, Human
aaugucuguaauaauaga

SEQ ID NO: 3878792 - RNA, 17 nt, Human
aaugucuguuaacuuaa

SEQ ID NO: 3878793 - RNA, 19 nt, Human
aaugucuugguacuugcug

SEQ ID NO: 3878794 - RNA, 18 nt, Human
aaugucuuguuaauauuc

SEQ ID NO: 3878795 - RNA, 20 nt, Human
aaugucuuguuaauauucuu

SEQ ID NO: 3878796 - RNA, 17 nt, Human
aaugucuuuaaugcaau

SEQ ID NO: 3878797 - RNA, 16 nt, Human
aaugucuuuguaaguc

SEQ ID NO: 3878798 - RNA, 13 nt, Human
aaugucuuuugaa

SEQ ID NO: 3878799 - RNA, 15 nt, Human
aaugucuuuugaaua

SEQ ID NO: 3878800 - RNA, 21 nt, Human
aaugucuuuuuuuuaaugugc

SEQ ID NO: 3878801 - RNA, 18 nt, Human
aaugugaaaaaucugcug

SEQ ID NO: 3878802 - RNA, 14 nt, Human
aaugugaaacugga

SEQ ID NO: 3878803 - RNA, 13 nt, Human
aaugugaaagcac

SEQ ID NO: 3878804 - RNA, 15 nt, Human
aaugugaacuuguag

SEQ ID NO: 3878805 - RNA, 14 nt, Human
aaugugaaguguua

SEQ ID NO: 3878806 - RNA, 20 nt, Human
aaugugaauuuuuauuguug

SEQ ID NO: 3878807 - RNA, 22 nt, Human
aaugugagugguugaauaugau

SEQ ID NO: 3878808 - RNA, 16 nt, Human
aaugugauauuauaca

SEQ ID NO: 3878809 - RNA, 19 nt, Human
aaugugaucuauguuucau

SEQ ID NO: 3878810 - RNA, 13 nt, Human
aaugugauguucu

SEQ ID NO: 3878811 - RNA, 19 nt, Human
aaugugauucuaaugucuu

SEQ ID NO: 3878812 - RNA, 13 nt, Human
aaugugcccccag

SEQ ID NO: 3878813 - RNA, 21 nt, Human
aaugugccuauugcuagagcu

SEQ ID NO: 3878814 - RNA, 19 nt, Human
aaugugcuacugauuguuu

SEQ ID NO: 3878815 - RNA, 20 nt, Human
aaugugcuguguaaaguuag

SEQ ID NO: 3878816 - RNA, 17 nt, Human
aauguggccuaaaaaug

SEQ ID NO: 3878817 - RNA, 16 nt, Human
aauguggcuugagaaa

SEQ ID NO: 3878818 - RNA, 14 nt, Human
aaugugggcagaga

SEQ ID NO: 3878819 - RNA, 17 nt, Human
aaugugguuuuccugaa

SEQ ID NO: 3878820 - RNA, 11 nt, Human
aaugugucuuu

SEQ ID NO: 3878821 - RNA, 13 nt, Human
aaugugucuuuag

SEQ ID NO: 3878822 - RNA, 17 nt, Human
aaugugucuuuagauag

SEQ ID NO: 3878823 - RNA, 20 nt, Human
aaugugugagugcauguacu

SEQ ID NO: 3878824 - RNA, 16 nt, Human
aauguguggccugcac

SEQ ID NO: 3878825 - RNA, 16 nt, Human
aaugugugguggccuc

SEQ ID NO: 3878826 - RNA, 15 nt, Human
aauguguguaugugu

SEQ ID NO: 3878827 - RNA, 16 nt, Human
aaugugugugauguga

SEQ ID NO: 3878828 - RNA, 17 nt, Human
aaugugugugguuuuuu

SEQ ID NO: 3878829 - RNA, 23 nt, Human
aauguguuggacaaaugugaaga

SEQ ID NO: 3878830 - RNA, 23 nt, Human
aauguguuguuccaaauacuaau

SEQ ID NO: 3878831 - RNA, 22 nt, Human
aauguguuuuguuuauuaaaua

SEQ ID NO: 3878832 - RNA, 13 nt, Human
aauguuaaaaugu

SEQ ID NO: 3878833 - RNA, 16 nt, Human
aauguuaaagauguag

SEQ ID NO: 3878834 - RNA, 21 nt, Human
aauguuaaagauguagcaaac

SEQ ID NO: 3878835 - RNA, 13 nt, Human
aauguuaaauaaa

SEQ ID NO: 3878836 - RNA, 15 nt, Human
aauguuaaauaaauu

SEQ ID NO: 3878837 - RNA, 21 nt, Human
aauguuaaauaaauuguauau

SEQ ID NO: 3878838 - RNA, 22 nt, Human
aauguuaaauaaauuguauauu

SEQ ID NO: 3878839 - RNA, 16 nt, Human
aauguuaaauuuguaa

SEQ ID NO: 3878840 - RNA, 14 nt, Human
aauguuaagaauug

SEQ ID NO: 3878841 - RNA, 13 nt, Human
aauguuaagcaga

SEQ ID NO: 3878842 - RNA, 13 nt, Human
aauguuaauuuuu

SEQ ID NO: 3878843 - RNA, 20 nt, Human
aauguuaauuuuuugguaca

SEQ ID NO: 3878844 - RNA, 21 nt, Human
aauguuaauuuuuugguacaa

SEQ ID NO: 3878845 - RNA, 15 nt, Human
aauguuaccucugaa

SEQ ID NO: 3878846 - RNA, 21 nt, Human
aauguuacugaucaugcauug

SEQ ID NO: 3878847 - RNA, 15 nt, Human
aauguuagagacuuu

SEQ ID NO: 3878848 - RNA, 13 nt, Human
aauguuagagcac

SEQ ID NO: 3878849 - RNA, 22 nt, Human
aauguuagagguuuuaaaguga

SEQ ID NO: 3878850 - RNA, 20 nt, Human
aauguuagaguaaugaaaug

SEQ ID NO: 3878851 - RNA, 21 nt, Human
aauguuaucuuauacuguaca

SEQ ID NO: 3878852 - RNA, 22 nt, Human
aauguuaucuuauacuguacaa

SEQ ID NO: 3878853 - RNA, 23 nt, Human
aauguuaucuucucaaguucuaa

SEQ ID NO: 3878854 - RNA, 19 nt, Human
aauguuaugacuauguaaa

SEQ ID NO: 3878855 - RNA, 14 nt, Human
aauguuauguauau

SEQ ID NO: 3878856 - RNA, 14 nt, Human
aauguuauuucccu

SEQ ID NO: 3878857 - RNA, 15 nt, Human
aauguuauuucugca

SEQ ID NO: 3878858 - RNA, 21 nt, Human
aauguuauuuguuauuuucag

SEQ ID NO: 3878859 - RNA, 21 nt, Human
aauuuauuuugucgaauuuuu

SEQ ID NO: 3878860 - RNA, 20 nt, Human
aauuuauuuuuaagaaagaa

SEQ ID NO: 3878861 - RNA, 23 nt, Human
aauuuauuuuuaccuucacugug

SEQ ID NO: 3878862 - RNA, 17 nt, Human
aauuucaaaagacaugu

SEQ ID NO: 3878863 - RNA, 13 nt, Human
aauuucaagcuua

SEQ ID NO: 3878864 - RNA, 20 nt, Human
aauuucaagcuuauuuugga

SEQ ID NO: 3878865 - RNA, 14 nt, Human
aauuucaagguucu

SEQ ID NO: 3878866 - RNA, 15 nt, Human
aauuucaagguucua

SEQ ID NO: 3878867 - RNA, 16 nt, Human
aauuucaagguucuaa

SEQ ID NO: 3878868 - RNA, 19 nt, Human
aauuucaccuguaaaccug

SEQ ID NO: 3878869 - RNA, 20 nt, Human
aauuucaccuguaaaccuga

SEQ ID NO: 3878870 - RNA, 21 nt, Human
aauuucacgucauaggaaguu

SEQ ID NO: 3878871 - RNA, 23 nt, Human
aauuucacugucuuuaauucugu

SEQ ID NO: 3878872 - RNA, 21 nt, Human
aauuucaggaggaauacugaa

SEQ ID NO: 3878873 - RNA, 22 nt, Human
aauuucagguuuuguaaagaug

SEQ ID NO: 3878874 - RNA, 20 nt, Human
aauuucauagcuguacuucu

SEQ ID NO: 3878875 - RNA, 21 nt, Human
aauuucauagcuguacuucuu

SEQ ID NO: 3878876 - RNA, 15 nt, Human
aauuucauaucuaca

SEQ ID NO: 3878877 - RNA, 16 nt, Human
aauuucauguaaaaca

SEQ ID NO: 3878878 - RNA, 17 nt, Human
aauuuccaguaccuuug

SEQ ID NO: 3878879 - RNA, 21 nt, Human
aauuuccauuuacuuaagacu

SEQ ID NO: 3878880 - RNA, 19 nt, Human
aauuucccaauuaggaagu

SEQ ID NO: 3878881 - RNA, 13 nt, Human
aauuucccacccc

SEQ ID NO: 3878882 - RNA, 16 nt, Human
aauuucccaggacccu

SEQ ID NO: 3878883 - RNA, 17 nt, Human
aauuuccccaacagugu

SEQ ID NO: 3878884 - RNA, 18 nt, Human
aauuuccccaacagugug

SEQ ID NO: 3878885 - RNA, 19 nt, Human
aauuuccccaacaguguga

SEQ ID NO: 3878886 - RNA, 12 nt, Human
aauuuccuggga

SEQ ID NO: 3878887 - RNA, 17 nt, Human
aauuuccugggagcuuu

SEQ ID NO: 3878888 - RNA, 18 nt, Human
aauuuccugggagcuuuu

SEQ ID NO: 3878889 - RNA, 15 nt, Human
aauuuccuuuuugac

SEQ ID NO: 3878890 - RNA, 18 nt, Human
aauuuccuuuuugacacu

SEQ ID NO: 3878891 - RNA, 20 nt, Human
aauuuccuuuuugacacuga

SEQ ID NO: 3878892 - RNA, 21 nt, Human
aauuuccuuuuugacacugaa

SEQ ID NO: 3878893 - RNA, 22 nt, Human
aauuuccuuuuugacacugaaa

SEQ ID NO: 3878894 - RNA, 19 nt, Human
aauuucgcuucuuagaaca

SEQ ID NO: 3878895 - RNA, 22 nt, Human
aauuucuaaaaaacagaggcca

SEQ ID NO: 3878896 - RNA, 17 nt, Human
aauuucuaaaaagauua

SEQ ID NO: 3878897 - RNA, 13 nt, Human
aauuucuaaaucu

SEQ ID NO: 3878898 - RNA, 18 nt, Human
aauuucuaggacugaauu

SEQ ID NO: 3878899 - RNA, 23 nt, Human
aauuucuaggacugaauuaugaa

SEQ ID NO: 3878900 - RNA, 19 nt, Human
aauuucucccagucauuua

SEQ ID NO: 3878901 - RNA, 12 nt, Human
aauuucucccca

SEQ ID NO: 3878902 - RNA, 12 nt, Human
aauuucuccucc

SEQ ID NO: 3878903 - RNA, 23 nt, Human
aauuucucuuaaguacugaaaua

SEQ ID NO: 3878904 - RNA, 14 nt, Human
aauuucugccauuu

SEQ ID NO: 3878905 - RNA, 16 nt, Human
aauuucugucagaaug

SEQ ID NO: 3878906 - RNA, 12 nt, Human
aauuucugugcc

SEQ ID NO: 3878907 - RNA, 12 nt, Human
aauuucuuaacu

SEQ ID NO: 3878908 - RNA, 20 nt, Human
aauuucuuaacuucuugcuu

SEQ ID NO: 3878909 - RNA, 14 nt, Human
aauuucuuauguga

SEQ ID NO: 3878910 - RNA, 16 nt, Human
aauuucuuaugugaca

SEQ ID NO: 3878911 - RNA, 14 nt, Human
aauuucuucaaaau

SEQ ID NO: 3878912 - RNA, 20 nt, Human
aauuucuucacuguugaaaa

SEQ ID NO: 3878913 - RNA, 21 nt, Human
aauuucuucacuguugaaaau

SEQ ID NO: 3878914 - RNA, 24 nt, Human
aauuucuugcucuaucucucaaaa

SEQ ID NO: 3878915 - RNA, 15 nt, Human
aauuucuuugccugu

SEQ ID NO: 3878916 - RNA, 18 nt, Human
aauuucuuuuuucuuuuu

SEQ ID NO: 3878917 - RNA, 23 nt, Human
aauuugaaaacauaaucugcaaa

SEQ ID NO: 3878918 - RNA, 19 nt, Human
aauuugaaaauaauuguuc

SEQ ID NO: 3878919 - RNA, 20 nt, Human
aauuugaaacacuuugcaua

SEQ ID NO: 3878920 - RNA, 14 nt, Human
aauuugaaacauug

SEQ ID NO: 3878921 - RNA, 17 nt, Human
aauuugaaccaaaacau

SEQ ID NO: 3878922 - RNA, 18 nt, Human
aauuugaagacuucaaaa

SEQ ID NO: 3878923 - RNA, 13 nt, Human
aauuugaauuuug

SEQ ID NO: 3878924 - RNA, 16 nt, Human
aauuugaauuuugugu

SEQ ID NO: 3878925 - RNA, 18 nt, Human
aauuugaauuuuguguua

SEQ ID NO: 3878926 - RNA, 20 nt, Human
aauuugagagaaauaugaag

SEQ ID NO: 3878927 - RNA, 15 nt, Human
aauuugauacauaau

SEQ ID NO: 3878928 - RNA, 20 nt, Human
aauuugauacauaugugaau

SEQ ID NO: 3878929 - RNA, 15 nt, Human
aauuugauacuuaua

SEQ ID NO: 3878930 - RNA, 21 nt, Human
aauuugauaguauugugcaua

SEQ ID NO: 3878931 - RNA, 15 nt, Human
aauuugauaugugaa

SEQ ID NO: 3878932 - RNA, 18 nt, Human
aauuugaucguuccaguu

SEQ ID NO: 3878933 - RNA, 16 nt, Human
aauuugaugaaagcug

SEQ ID NO: 3878934 - RNA, 17 nt, Human
aauuugaugaaagcuga

SEQ ID NO: 3878935 - RNA, 12 nt, Human
aauuugaugugg

SEQ ID NO: 3878936 - RNA, 13 nt, Human
aauuugauuaaca

SEQ ID NO: 3878937 - RNA, 20 nt, Human
aauuugauugacugcccauu

SEQ ID NO: 3878938 - RNA, 11 nt, Human
aauuugcaaag

SEQ ID NO: 3878939 - RNA, 12 nt, Human
aauuugcaaagu

SEQ ID NO: 3878940 - RNA, 13 nt, Human
aauuugcaaagua

SEQ ID NO: 3878941 - RNA, 14 nt, Human
aauuugcaaaguac

SEQ ID NO: 3878942 - RNA, 12 nt, Human
aauuugcacauu

SEQ ID NO: 3878943 - RNA, 14 nt, Human
aauuugcacauuaa

SEQ ID NO: 3878944 - RNA, 15 nt, Human
aauuugcccucccau

SEQ ID NO: 3878945 - RNA, 23 nt, Human
aauuugccuaauaugaugacugu

SEQ ID NO: 3878946 - RNA, 16 nt, Human
aauuugccuguaacaa

SEQ ID NO: 3878947 - RNA, 14 nt, Human
aauuugcugccaaa

SEQ ID NO: 3878948 - RNA, 9 nt, Human
aauuuggaa

SEQ ID NO: 3878949 - RNA, 14 nt, Human
aauuuggaaacuaa

SEQ ID NO: 3878950 - RNA, 22 nt, Human
aauuuggaaacuaauaaaauau

SEQ ID NO: 3878951 - RNA, 11 nt, Human
aauuuggaauu

SEQ ID NO: 3878952 - RNA, 19 nt, Human
aauuuggaccauuuuccug

SEQ ID NO: 3878953 - RNA, 20 nt, Human
aauuuggagcacaaaauuca

SEQ ID NO: 3878954 - RNA, 22 nt, Human
aauuuggaggcuggaguaauca

SEQ ID NO: 3878955 - RNA, 13 nt, Human
aauuuggcaauuu

SEQ ID NO: 3878956 - RNA, 16 nt, Human
aauuugggcuuccugu

SEQ ID NO: 3878957 - RNA, 20 nt, Human
aauuugggcuuccuguuugu

SEQ ID NO: 3878958 - RNA, 18 nt, Human
aauuugggggaaaauuua

SEQ ID NO: 3878959 - RNA, 13 nt, Human
aauuugguuuuca

SEQ ID NO: 3878960 - RNA, 15 nt, Human
aauuugguuuucaca

SEQ ID NO: 3878961 - RNA, 16 nt, Human
aauuuguaaccucagc

SEQ ID NO: 3878962 - RNA, 15 nt, Human
aauuuguaaguuuau

SEQ ID NO: 3878963 - RNA, 14 nt, Human
aauuuguaaguuuc

SEQ ID NO: 3878964 - RNA, 19 nt, Human
aauuuguaaguuucaggug

SEQ ID NO: 3878965 - RNA, 14 nt, Human
aauuuguauaaaau

SEQ ID NO: 3878966 - RNA, 15 nt, Human
aauuuguauaaaaug

SEQ ID NO: 3878967 - RNA, 18 nt, Human
aauuuguaucugaaggag

SEQ ID NO: 3878968 - RNA, 19 nt, Human
aauuuguaucugaaggaga

SEQ ID NO: 3878969 - RNA, 16 nt, Human
aauuugucauuuugaa

SEQ ID NO: 3878970 - RNA, 19 nt, Human
aauuugucauuuugaagcu

SEQ ID NO: 3878971 - RNA, 14 nt, Human
aauuugugauacaa

SEQ ID NO: 3878972 - RNA, 13 nt, Human
aauuuguguaaua

SEQ ID NO: 3878973 - RNA, 16 nt, Human
aauuuguguaauaaag

SEQ ID NO: 3878974 - RNA, 17 nt, Human
aauuuguguaauaaagu

SEQ ID NO: 3878975 - RNA, 23 nt, Human
aauuuguguguuuuuagcuguga

SEQ ID NO: 3878976 - RNA, 21 nt, Human
aauuuguucuuguauuuauug

SEQ ID NO: 3878977 - RNA, 21 nt, Human
aauuuguuggggcuuuacaua

SEQ ID NO: 3878978 - RNA, 17 nt, Human
aauuuguuugaaaucuu

SEQ ID NO: 3878979 - RNA, 14 nt, Human
aauuuguuugugcu

SEQ ID NO: 3878980 - RNA, 17 nt, Human
aauuuguuuuggauaua

SEQ ID NO: 3878981 - RNA, 14 nt, Human
aauuuuaaaaauga

SEQ ID NO: 3878982 - RNA, 22 nt, Human
aauuuuaaaaucugagggaaau

SEQ ID NO: 3878983 - RNA, 17 nt, Human
aauuuuaaacaaagguu

SEQ ID NO: 3878984 - RNA, 13 nt, Human
aauuuuaaacaua

SEQ ID NO: 3878985 - RNA, 13 nt, Human
aauuuuaaaguau

SEQ ID NO: 3878986 - RNA, 16 nt, Human
aauuuuaaaguaugca

SEQ ID NO: 3878987 - RNA, 13 nt, Human
aauuuuaaagugc

SEQ ID NO: 3878988 - RNA, 22 nt, Human
aauuuuaaauaaaagugaucaa

SEQ ID NO: 3878989 - RNA, 12 nt, Human
aauuuuaaauua

SEQ ID NO: 3878990 - RNA, 14 nt, Human
aauuuuaacacaca

SEQ ID NO: 3878991 - RNA, 23 nt, Human
aauuuuaagcuaggaaaagaaau

SEQ ID NO: 3878992 - RNA, 22 nt, Human
aauuuuaagguagaaccucacc

SEQ ID NO: 3878993 - RNA, 19 nt, Human
aauuuuaagugcuuuguaa

SEQ ID NO: 3878994 - RNA, 22 nt, Human
aauuuuaagugcuuuguaaugg

SEQ ID NO: 3878995 - RNA, 16 nt, Human
aauuuuaauauuuuau

SEQ ID NO: 3878996 - RNA, 21 nt, Human
aauuuuacccuuuagacugua

SEQ ID NO: 3878997 - RNA, 15 nt, Human
aauuuuagaaauauu

SEQ ID NO: 3878998 - RNA, 14 nt, Human
aauuuuagcuuuug

SEQ ID NO: 3878999 - RNA, 21 nt, Human
aauuuuaggaacuucagagau

SEQ ID NO: 3879000 - RNA, 19 nt, Human
aauuuuaguagagacaggg

SEQ ID NO: 3879001 - RNA, 18 nt, Human
aauuuuaguuuuucauua

SEQ ID NO: 3879002 - RNA, 21 nt, Human
aauuuuauaaggacuuccuga

SEQ ID NO: 3879003 - RNA, 20 nt, Human
aauuuuauagcucaguuuau

SEQ ID NO: 3879004 - RNA, 15 nt, Human
aauuuuauaucuugu

SEQ ID NO: 3879005 - RNA, 14 nt, Human
aauuuuaucccuca

SEQ ID NO: 3879006 - RNA, 19 nt, Human
aauuuuaucuguuuccuga

SEQ ID NO: 3879007 - RNA, 12 nt, Human
aauuuuaugaac

SEQ ID NO: 3879008 - RNA, 22 nt, Human
aauuuuauuuuaaaauuucaua

SEQ ID NO: 3879009 - RNA, 16 nt, Human
acaaaauauugaaagg

SEQ ID NO: 3879010 - RNA, 19 nt, Human
acaaaaucgauuggcuuua

SEQ ID NO: 3879011 - RNA, 17 nt, Human
acaaaaucuguugccac

SEQ ID NO: 3879012 - RNA, 13 nt, Human
acaaaauggaaua

SEQ ID NO: 3879013 - RNA, 14 nt, Human
acaaaauggaauac

SEQ ID NO: 3879014 - RNA, 20 nt, Human
acaaaauggaauacucuuau

SEQ ID NO: 3879015 - RNA, 16 nt, Human
acaaaauggcuucagu

SEQ ID NO: 3879016 - RNA, 14 nt, Human
acaaaauguaacug

SEQ ID NO: 3879017 - RNA, 16 nt, Human
acaaaauguagaauau

SEQ ID NO: 3879018 - RNA, 19 nt, Human
acaaaauguagaauauuca

SEQ ID NO: 3879019 - RNA, 23 nt, Human
acaaaauguagaauauucagaca

SEQ ID NO: 3879020 - RNA, 12 nt, Human
acaaaauguuau

SEQ ID NO: 3879021 - RNA, 14 nt, Human
acaaaauuauuugu

SEQ ID NO: 3879022 - RNA, 13 nt, Human
acaaaauucaaag

SEQ ID NO: 3879023 - RNA, 18 nt, Human
acaaaauucaaagcaugg

SEQ ID NO: 3879024 - RNA, 20 nt, Human
acaaaauucgaccugauuua

SEQ ID NO: 3879025 - RNA, 16 nt, Human
acaaaauucuuucugg

SEQ ID NO: 3879026 - RNA, 15 nt, Human
acaaaauuuaguuuu

SEQ ID NO: 3879027 - RNA, 20 nt, Human
acaaaauuuaguuuuuguuc

SEQ ID NO: 3879028 - RNA, 15 nt, Human
acaaaauuuuauuuu

SEQ ID NO: 3879029 - RNA, 11 nt, Human
acaaacaaaag

SEQ ID NO: 3879030 - RNA, 16 nt, Human
acaaacaaacaaacaa

SEQ ID NO: 3879031 - RNA, 13 nt, Human
acaaacaaacaag

SEQ ID NO: 3879032 - RNA, 13 nt, Human
acaaacaaugaaa

SEQ ID NO: 3879033 - RNA, 17 nt, Human
acaaacacauuguuauu

SEQ ID NO: 3879034 - RNA, 19 nt, Human
acaaacacauuguuauuuu

SEQ ID NO: 3879035 - RNA, 15 nt, Human
acaaacaccucccag

SEQ ID NO: 3879036 - RNA, 21 nt, Human
acaaacaccuucuuauuauau

SEQ ID NO: 3879037 - RNA, 20 nt, Human
acaaacagggcugccuucug

SEQ ID NO: 3879038 - RNA, 14 nt, Human
acaaacaugacccu

SEQ ID NO: 3879039 - RNA, 12 nt, Human
acaaacauugug

SEQ ID NO: 3879040 - RNA, 13 nt, Human
acaaacauugugu

SEQ ID NO: 3879041 - RNA, 12 nt, Human
acaaacauuuuu

SEQ ID NO: 3879042 - RNA, 14 nt, Human
acaaacauuuuuca

SEQ ID NO: 3879043 - RNA, 17 nt, Human
acaaacauuuuucaaca

SEQ ID NO: 3879044 - RNA, 20 nt, Human
acaaaccacaacugacacag

SEQ ID NO: 3879045 - RNA, 14 nt, Human
acaaaccagaagca

SEQ ID NO: 3879046 - RNA, 18 nt, Human
acaaaccuaccaaaaugg

SEQ ID NO: 3879047 - RNA, 21 nt, Human
acaaaccuaccaaaauggaau

SEQ ID NO: 3879048 - RNA, 23 nt, Human
acaaaccugaaaagauguugugu

SEQ ID NO: 3879049 - RNA, 21 nt, Human
acaaacguauguaaauguaua

SEQ ID NO: 3879050 - RNA, 21 nt, Human
acaaacuacagaccugcuuuu

SEQ ID NO: 3879051 - RNA, 16 nt, Human
acaaacuacauguaau

SEQ ID NO: 3879052 - RNA, 22 nt, Human
acaaacuauuucuuauauaugu

SEQ ID NO: 3879053 - RNA, 20 nt, Human
acaaacucguuuuuuacaaa

SEQ ID NO: 3879054 - RNA, 11 nt, Human
acaaacugcaa

SEQ ID NO: 3879055 - RNA, 14 nt, Human
acaaacugcaauag

SEQ ID NO: 3879056 - RNA, 20 nt, Human
acaaacugcaauagagacug

SEQ ID NO: 3879057 - RNA, 14 nt, Human
acaaacugcacaug

SEQ ID NO: 3879058 - RNA, 19 nt, Human
acaaacugcacaugauuuc

SEQ ID NO: 3879059 - RNA, 20 nt, Human
acaaacugcacaugauuuca

SEQ ID NO: 3879060 - RNA, 15 nt, Human
acaaacugcuuccuu

SEQ ID NO: 3879061 - RNA, 17 nt, Human
acaaacugguauucugu

SEQ ID NO: 3879062 - RNA, 18 nt, Human
acaaacuguaaaaaaugu

SEQ ID NO: 3879063 - RNA, 19 nt, Human
acaaacuguaauacaauga

SEQ ID NO: 3879064 - RNA, 16 nt, Human
acaaacuguguaacug

SEQ ID NO: 3879065 - RNA, 16 nt, Human
acaaacuguguacaua

SEQ ID NO: 3879066 - RNA, 18 nt, Human
acaaacuuuucaaggcuu

SEQ ID NO: 3879067 - RNA, 20 nt, Human
acaaagaaacaaagauguua

SEQ ID NO: 3879068 - RNA, 21 nt, Human
acaaagaaauccggagaagcu

SEQ ID NO: 3879069 - RNA, 14 nt, Human
acaaagaaauuaug

SEQ ID NO: 3879070 - RNA, 16 nt, Human
acaaagaaauuaugug

SEQ ID NO: 3879071 - RNA, 18 nt, Human
acaaagaagacaacauua

SEQ ID NO: 3879072 - RNA, 22 nt, Human
acaaagaagacauguuuuagac

SEQ ID NO: 3879073 - RNA, 18 nt, Human
acaaagacaaauucuguu

SEQ ID NO: 3879074 - RNA, 22 nt, Human
acaaagacaaauucuguuucuu

SEQ ID NO: 3879075 - RNA, 15 nt, Human
acaaagacccuggcu

SEQ ID NO: 3879076 - RNA, 20 nt, Human
acaaagagcguugaaguuga

SEQ ID NO: 3879077 - RNA, 18 nt, Human
acaaagaguucaagaaau

SEQ ID NO: 3879078 - RNA, 21 nt, Human
acaaagauaucuuuucuuuag

SEQ ID NO: 3879079 - RNA, 21 nt, Human
acaaagaugggugaaggcugg

SEQ ID NO: 3879080 - RNA, 21 nt, Human
acaaagauguuugucagauau

SEQ ID NO: 3879081 - RNA, 24 nt, Human
acaaagauguuugucagauaugau

SEQ ID NO: 3879082 - RNA, 16 nt, Human
acaaagcacaguuuga

SEQ ID NO: 3879083 - RNA, 19 nt, Human
acaaagcacaguuugaaca

SEQ ID NO: 3879084 - RNA, 23 nt, Human
acaaagcacuagagaaugcacag

SEQ ID NO: 3879085 - RNA, 13 nt, Human
acaaagcagccac

SEQ ID NO: 3879086 - RNA, 18 nt, Human
acaaagccacuuucaauc

SEQ ID NO: 3879087 - RNA, 16 nt, Human
acaaagccagaagcug

SEQ ID NO: 3879088 - RNA, 20 nt, Human
acaaagccagaagcugagca

SEQ ID NO: 3879089 - RNA, 13 nt, Human
acaaagcccaagg

SEQ ID NO: 3879090 - RNA, 15 nt, Human
acaaagcgugcacaa

SEQ ID NO: 3879091 - RNA, 21 nt, Human
acaaagcgugguggacaugca

SEQ ID NO: 3879092 - RNA, 13 nt, Human
acaaagcuguuaa

SEQ ID NO: 3879093 - RNA, 21 nt, Human
acaaagcuucuaucccaggag

SEQ ID NO: 3879094 - RNA, 22 nt, Human
acaaagcuucuaucccaggagg

SEQ ID NO: 3879095 - RNA, 23 nt, Human
acaaagcuuggaagagccugcag

SEQ ID NO: 3879096 - RNA, 13 nt, Human
acaaaggaaaaag

SEQ ID NO: 3879097 - RNA, 19 nt, Human
acaaaggaagugcccccuc

SEQ ID NO: 3879098 - RNA, 14 nt, Human
acaaaggagccugu

SEQ ID NO: 3879099 - RNA, 21 nt, Human
acaaaggauacuuauuuaaau

SEQ ID NO: 3879100 - RNA, 20 nt, Human
acaaaggauuaauugcugca

SEQ ID NO: 3879101 - RNA, 19 nt, Human
acaaaggcaaguuaagaga

SEQ ID NO: 3879102 - RNA, 15 nt, Human
acaaaggccaaacug

SEQ ID NO: 3879103 - RNA, 20 nt, Human
acaaaggcuguauucagcaa

SEQ ID NO: 3879104 - RNA, 14 nt, Human
acaaagggcccaga

SEQ ID NO: 3879105 - RNA, 15 nt, Human
acaaaggggaaagaa

SEQ ID NO: 3879106 - RNA, 19 nt, Human
acaaaggggaucauaaagu

SEQ ID NO: 3879107 - RNA, 17 nt, Human
acaaaggguuuuaaugu

SEQ ID NO: 3879108 - RNA, 24 nt, Human
acaaagguugagauguaaaaggua

SEQ ID NO: 3879109 - RNA, 15 nt, Human
acaaagguuuaaaug

SEQ ID NO: 3879110 - RNA, 20 nt, Human
acaaagguuuaaaugaacaa

SEQ ID NO: 3879111 - RNA, 21 nt, Human
acaaagguuuuccucuucuau

SEQ ID NO: 3879112 - RNA, 20 nt, Human
acaaaguauuaagcauauau

SEQ ID NO: 3879113 - RNA, 15 nt, Human
acaaagucuccagcc

SEQ ID NO: 3879114 - RNA, 18 nt, Human
acaaagugagacagucca

SEQ ID NO: 3879115 - RNA, 17 nt, Human
acaaagugccaaagaaa

SEQ ID NO: 3879116 - RNA, 18 nt, Human
acaaaguggaaggaaaga

SEQ ID NO: 3879117 - RNA, 19 nt, Human
acaaaguggaaggaaagau

SEQ ID NO: 3879118 - RNA, 23 nt, Human
acaaaguguauuuuauaaaauua

SEQ ID NO: 3879119 - RNA, 23 nt, Human
acaaaguuacuagguaacuucau

SEQ ID NO: 3879120 - RNA, 19 nt, Human
acaaaguuccaaaaugcca

SEQ ID NO: 3879121 - RNA, 19 nt, Human
acaaaguuucagaguauau

SEQ ID NO: 3879122 - RNA, 22 nt, Human
acaaauaacaacuuuuuuuucu

SEQ ID NO: 3879123 - RNA, 16 nt, Human
acaaauaauaagcaaa

SEQ ID NO: 3879124 - RNA, 13 nt, Human
acaaauaauuuag

SEQ ID NO: 3879125 - RNA, 15 nt, Human
acaaauaauuuuagu

SEQ ID NO: 3879126 - RNA, 13 nt, Human
acaaauacucaug

SEQ ID NO: 3879127 - RNA, 14 nt, Human
acaaauacucaugu

SEQ ID NO: 3879128 - RNA, 15 nt, Human
acaaauacucaugug

SEQ ID NO: 3879129 - RNA, 18 nt, Human
acaaauacucauguguau

SEQ ID NO: 3879130 - RNA, 17 nt, Human
acaaauacucuuaggaa

SEQ ID NO: 3879131 - RNA, 21 nt, Human
acaaauagucggauuagaaau

SEQ ID NO: 3879132 - RNA, 14 nt, Human
acaaauauaagaau

SEQ ID NO: 3879133 - RNA, 15 nt, Human
acaaauauaagaaua

SEQ ID NO: 3879134 - RNA, 21 nt, Human
acaaauaucuuguguuguccu

SEQ ID NO: 3879135 - RNA, 22 nt, Human
acaaauaucuuguguuguccuu

SEQ ID NO: 3879136 - RNA, 12 nt, Human
acaaauaugcaa

SEQ ID NO: 3879137 - RNA, 21 nt, Human
acaaauauuauuuguguuucc

SEQ ID NO: 3879138 - RNA, 19 nt, Human
acaaauauucacuggcccc

SEQ ID NO: 3879139 - RNA, 13 nt, Human
acaaauauucaga

SEQ ID NO: 3879140 - RNA, 14 nt, Human
acaaauauucagaa

SEQ ID NO: 3879141 - RNA, 18 nt, Human
acaaauauuuauuuucuu

SEQ ID NO: 3879142 - RNA, 16 nt, Human
acaaaucaacagaagc

SEQ ID NO: 3879143 - RNA, 12 nt, Human
acaaaucaaguu

SEQ ID NO: 3879144 - RNA, 19 nt, Human
acaaaucaaguuuccaagc

SEQ ID NO: 3879145 - RNA, 22 nt, Human
acaaaucaaguuuccaagcaaa

SEQ ID NO: 3879146 - RNA, 17 nt, Human
acaaaucaguuaguuuu

SEQ ID NO: 3879147 - RNA, 19 nt, Human
acaaaucuaagggaaaaag

SEQ ID NO: 3879148 - RNA, 22 nt, Human
acaaaucuaggaaaauauuuug

SEQ ID NO: 3879149 - RNA, 15 nt, Human
acaaaucuaugccac

SEQ ID NO: 3879150 - RNA, 21 nt, Human
acaaaucuaugccacucagaa

SEQ ID NO: 3879151 - RNA, 21 nt, Human
acaaaucucaagcaaacagcu

SEQ ID NO: 3879152 - RNA, 16 nt, Human
acaaaugacuuuauua

SEQ ID NO: 3879153 - RNA, 23 nt, Human
acaaaugacuuuauuauuuauuu

SEQ ID NO: 3879154 - RNA, 18 nt, Human
acaaaugcaucuuugaug

SEQ ID NO: 3879155 - RNA, 17 nt, Human
acaaaugcucaaagaaa

SEQ ID NO: 3879156 - RNA, 22 nt, Human
acaaaugcugcgcccuucccca

SEQ ID NO: 3879157 - RNA, 16 nt, Human
acaaauggaggccugu

SEQ ID NO: 3879158 - RNA, 18 nt, Human
acagauaagcaagagaga

SEQ ID NO: 3879159 - RNA, 19 nt, Human
acagauaagcaagagagau

SEQ ID NO: 3879160 - RNA, 21 nt, Human
acagauaagcaagagagaugu

SEQ ID NO: 3879161 - RNA, 22 nt, Human
acagauaauaauggguuucuuu

SEQ ID NO: 3879162 - RNA, 15 nt, Human
acagauacacacaca

SEQ ID NO: 3879163 - RNA, 13 nt, Human
acagauacauuuc

SEQ ID NO: 3879164 - RNA, 12 nt, Human
acagauaccaua

SEQ ID NO: 3879165 - RNA, 14 nt, Human
acagauagagaguu

SEQ ID NO: 3879166 - RNA, 19 nt, Human
acagauaggccuucuugug

SEQ ID NO: 3879167 - RNA, 17 nt, Human
acagauauaaauggcug

SEQ ID NO: 3879168 - RNA, 14 nt, Human
acagaucaagcugu

SEQ ID NO: 3879169 - RNA, 12 nt, Human
acagaucaguaa

SEQ ID NO: 3879170 - RNA, 12 nt, Human
acagaucuggaa

SEQ ID NO: 3879171 - RNA, 14 nt, Human
acagaucuggaacc

SEQ ID NO: 3879172 - RNA, 20 nt, Human
acagaucuggaaccucagcc

SEQ ID NO: 3879173 - RNA, 12 nt, Human
acagaugaaaag

SEQ ID NO: 3879174 - RNA, 12 nt, Human
acagaugaaaau

SEQ ID NO: 3879175 - RNA, 15 nt, Human
acagaugaaaauuug

SEQ ID NO: 3879176 - RNA, 16 nt, Human
acagaugcaaugugcu

SEQ ID NO: 3879177 - RNA, 16 nt, Human
acagaugccccagagc

SEQ ID NO: 3879178 - RNA, 19 nt, Human
acagaugccccagagcugu

SEQ ID NO: 3879179 - RNA, 22 nt, Human
acagaugccccagagcuguuua

SEQ ID NO: 3879180 - RNA, 17 nt, Human
acagaugccuccuuccu

SEQ ID NO: 3879181 - RNA, 22 nt, Human
acagaugccuccuuccucuuuu

SEQ ID NO: 3879182 - RNA, 18 nt, Human
acagaugccuuuuuugua

SEQ ID NO: 3879183 - RNA, 14 nt, Human
acagaugcuccagg

SEQ ID NO: 3879184 - RNA, 14 nt, Human
acagaugcuuuucu

SEQ ID NO: 3879185 - RNA, 21 nt, Human
acagauggaaaaacugaggcu

SEQ ID NO: 3879186 - RNA, 23 nt, Human
acagaugggugcuuggaggaagg

SEQ ID NO: 3879187 - RNA, 19 nt, Human
acagauguucccccaucuc

SEQ ID NO: 3879188 - RNA, 23 nt, Human
acagauguuucuuuuguauguaa

SEQ ID NO: 3879189 - RNA, 24 nt, Human
acagauguuucuuuuguauguaaa

SEQ ID NO: 3879190 - RNA, 15 nt, Human
acagauucacacugu

SEQ ID NO: 3879191 - RNA, 19 nt, Human
acagauucagucuugccuu

SEQ ID NO: 3879192 - RNA, 13 nt, Human
acagauucuuuau

SEQ ID NO: 3879193 - RNA, 17 nt, Human
acagauugcugcuucug

SEQ ID NO: 3879194 - RNA, 21 nt, Human
acagauuggauuuuauguuga

SEQ ID NO: 3879195 - RNA, 14 nt, Human
acagauuguuucua

SEQ ID NO: 3879196 - RNA, 17 nt, Human
acagauuuauuccuuug

SEQ ID NO: 3879197 - RNA, 15 nt, Human
acagauuucauaccu

SEQ ID NO: 3879198 - RNA, 16 nt, Human
acagauuucauaccuc

SEQ ID NO: 3879199 - RNA, 22 nt, Human
acagauuugagcucagcccugg

SEQ ID NO: 3879200 - RNA, 21 nt, Human
acagauuuggaaagacuggac

SEQ ID NO: 3879201 - RNA, 19 nt, Human
acagauuuuaauugucaug

SEQ ID NO: 3879202 - RNA, 22 nt, Human
acagauuuugggguuguguugu

SEQ ID NO: 3879203 - RNA, 15 nt, Human
acagauuuuuacaaa

SEQ ID NO: 3879204 - RNA, 16 nt, Human
acagauuuuuacaaau

SEQ ID NO: 3879205 - RNA, 21 nt, Human
acagcaaaaccauugcuucac

SEQ ID NO: 3879206 - RNA, 18 nt, Human
acaucucugaaagcacag

SEQ ID NO: 3879207 - RNA, 16 nt, Human
acaucucugacuuucu

SEQ ID NO: 3879208 - RNA, 23 nt, Human
acaucucuuugaauuuucugugu

SEQ ID NO: 3879209 - RNA, 13 nt, Human
acaucugaaagcc

SEQ ID NO: 3879210 - RNA, 21 nt, Human
acaucugagguuuuauuucau

SEQ ID NO: 3879211 - RNA, 23 nt, Human
acaucugagguuuuauuucauuu

SEQ ID NO: 3879212 - RNA, 11 nt, Human
acaucugccuu

SEQ ID NO: 3879213 - RNA, 21 nt, Human
acaucuggcuuauuuuaaugu

SEQ ID NO: 3879214 - RNA, 19 nt, Human
acaucuguaaaucuacaca

SEQ ID NO: 3879215 - RNA, 14 nt, Human
acaucuuaguauuu

SEQ ID NO: 3879216 - RNA, 20 nt, Human
acaucuugaauacucugccc

SEQ ID NO: 3879217 - RNA, 14 nt, Human
acaucuugaauccu

SEQ ID NO: 3879218 - RNA, 19 nt, Human
acaucuugaauccuuccau

SEQ ID NO: 3879219 - RNA, 20 nt, Human
acaucuugaucugcucagcc

SEQ ID NO: 3879220 - RNA, 22 nt, Human
acaucuugaucugcucagcccu

SEQ ID NO: 3879221 - RNA, 18 nt, Human
acaucuugcucugcugac

SEQ ID NO: 3879222 - RNA, 22 nt, Human
acaucuugcucugcugacagac

SEQ ID NO: 3879223 - RNA, 17 nt, Human
acaucuuuaucuguucu

SEQ ID NO: 3879224 - RNA, 12 nt, Human
acaucuuucaca

SEQ ID NO: 3879225 - RNA, 14 nt, Human
acaucuuucacacu

SEQ ID NO: 3879226 - RNA, 13 nt, Human
acaucuuucacau

SEQ ID NO: 3879227 - RNA, 23 nt, Human
acaucuuugaaauuauguaaauu

SEQ ID NO: 3879228 - RNA, 17 nt, Human
acaugaaaacacauuuu

SEQ ID NO: 3879229 - RNA, 19 nt, Human
acaugaaaacacauuuuuc

SEQ ID NO: 3879230 - RNA, 18 nt, Human
acaugaaaauuuuaaaaa

SEQ ID NO: 3879231 - RNA, 13 nt, Human
acaugaaacagaa

SEQ ID NO: 3879232 - RNA, 20 nt, Human
acaugaaaccuacacacugu

SEQ ID NO: 3879233 - RNA, 12 nt, Human
acaugaaaugau

SEQ ID NO: 3879234 - RNA, 19 nt, Human
acaugaacacccuuagaaa

SEQ ID NO: 3879235 - RNA, 18 nt, Human
acaugaagaauagaaaca

SEQ ID NO: 3879236 - RNA, 21 nt, Human
acaugaagaccuuuuucugca

SEQ ID NO: 3879237 - RNA, 22 nt, Human
acaugaagauucuuucccaauu

SEQ ID NO: 3879238 - RNA, 15 nt, Human
acaugaagcuucaug

SEQ ID NO: 3879239 - RNA, 16 nt, Human
acaugaagguaaauaa

SEQ ID NO: 3879240 - RNA, 16 nt, Human
acaugaaguccaagca

SEQ ID NO: 3879241 - RNA, 21 nt, Human
acaugaaguguguuuccuuca

SEQ ID NO: 3879242 - RNA, 21 nt, Human
acaugaaucaaaagugccuca

SEQ ID NO: 3879243 - RNA, 18 nt, Human
acaugaauuuuagcuuuu

SEQ ID NO: 3879244 - RNA, 11 nt, Human
acaugacacug

SEQ ID NO: 3879245 - RNA, 12 nt, Human
acaugacacuga

SEQ ID NO: 3879246 - RNA, 19 nt, Human
acaugacacugaaaugccu

SEQ ID NO: 3879247 - RNA, 23 nt, Human
acaugacacugaaaugccuuacu

SEQ ID NO: 3879248 - RNA, 18 nt, Human
acaugacuccauagaccu

SEQ ID NO: 3879249 - RNA, 20 nt, Human
acaugacuccauagaccuuu

SEQ ID NO: 3879250 - RNA, 21 nt, Human
acaugacucuuuauugucugu

SEQ ID NO: 3879251 - RNA, 18 nt, Human
acaugagauguguggacu

SEQ ID NO: 3879252 - RNA, 20 nt, Human
acaugagauguguggacugu

SEQ ID NO: 3879253 - RNA, 17 nt, Human
acaugagcaucaggcca

SEQ ID NO: 3879254 - RNA, 23 nt, Human
acaugagcuauuuccauuccaga

SEQ ID NO: 3879255 - RNA, 21 nt, Human
acaugaggaacuguagaugau

SEQ ID NO: 3879256 - RNA, 21 nt, Human
acaugaggacaugauggagcg

SEQ ID NO: 3879257 - RNA, 17 nt, Human
acaugaggggacauuuu

SEQ ID NO: 3879258 - RNA, 20 nt, Human
acaugagguacugagaguga

SEQ ID NO: 3879259 - RNA, 13 nt, Human
acaugagucaaga

SEQ ID NO: 3879260 - RNA, 13 nt, Human
acaugauucauuu

SEQ ID NO: 3879261 - RNA, 13 nt, Human
acaugauuccuuc

SEQ ID NO: 3879262 - RNA, 14 nt, Human
acaugauuucacaa

SEQ ID NO: 3879263 - RNA, 22 nt, Human
acaugauuucacaaauauuaaa

SEQ ID NO: 3879264 - RNA, 21 nt, Human
acaugauuuccuugaaugugg

SEQ ID NO: 3879265 - RNA, 23 nt, Human
acaugauuuccuugaauguggcu

SEQ ID NO: 3879266 - RNA, 15 nt, Human
acaugcaaaaagaaa

SEQ ID NO: 3879267 - RNA, 15 nt, Human
acaugcaaggcacug

SEQ ID NO: 3879268 - RNA, 16 nt, Human
acaugcaauaaaauuu

SEQ ID NO: 3879269 - RNA, 18 nt, Human
acaugcaauaaaauuuaa

SEQ ID NO: 3879270 - RNA, 19 nt, Human
acaugcaauaaaauuuaaa

SEQ ID NO: 3879271 - RNA, 12 nt, Human
acaugcacacac

SEQ ID NO: 3879272 - RNA, 17 nt, Human
acaugcacucagcucuu

SEQ ID NO: 3879273 - RNA, 12 nt, Human
acaugcacugac

SEQ ID NO: 3879274 - RNA, 15 nt, Human
acauuagguugugaa

SEQ ID NO: 3879275 - RNA, 14 nt, Human
acauuaguaaaugu

SEQ ID NO: 3879276 - RNA, 15 nt, Human
acauuaguaaauguc

SEQ ID NO: 3879277 - RNA, 17 nt, Human
acauuaguaaaugucuu

SEQ ID NO: 3879278 - RNA, 19 nt, Human
acauuaguaaaugucuuug

SEQ ID NO: 3879279 - RNA, 16 nt, Human
acauuaguacuuuaua

SEQ ID NO: 3879280 - RNA, 18 nt, Human
acauuaguacuuuauaga

SEQ ID NO: 3879281 - RNA, 19 nt, Human
acauuaguacuuuauagaa

SEQ ID NO: 3879282 - RNA, 15 nt, Human
acauuauagauuuuc

SEQ ID NO: 3879283 - RNA, 19 nt, Human
acauuaucucacuugugcc

SEQ ID NO: 3879284 - RNA, 14 nt, Human
acauuaugugugca

SEQ ID NO: 3879285 - RNA, 17 nt, Human
acauuaugugugcaugu

SEQ ID NO: 3879286 - RNA, 19 nt, Human
acauuaugugugcaugugu

SEQ ID NO: 3879287 - RNA, 22 nt, Human
acauuaugugugcaugugugua

SEQ ID NO: 3879288 - RNA, 18 nt, Human
acauuauuaucaacaaua

SEQ ID NO: 3879289 - RNA, 22 nt, Human
acauucaagauuaaacugagug

SEQ ID NO: 3879290 - RNA, 20 nt, Human
acauucagcugagguucauu

SEQ ID NO: 3879291 - RNA, 16 nt, Human
acauucaugccuggcu

SEQ ID NO: 3879292 - RNA, 15 nt, Human
acauuccaagacagu

SEQ ID NO: 3879293 - RNA, 17 nt, Human
acauuccaagacaguau

SEQ ID NO: 3879294 - RNA, 19 nt, Human
acauuccccuggggaccca

SEQ ID NO: 3879295 - RNA, 22 nt, Human
acauuccccuggggacccacgu

SEQ ID NO: 3879296 - RNA, 11 nt, Human
acauucccugc

SEQ ID NO: 3879297 - RNA, 20 nt, Human
acauuccuaaacuaucuuuu

SEQ ID NO: 3879298 - RNA, 19 nt, Human
acauuccucaugaauguaa

SEQ ID NO: 3879299 - RNA, 14 nt, Human
acauuccugaacag

SEQ ID NO: 3879300 - RNA, 11 nt, Human
acauuccuucu

SEQ ID NO: 3879301 - RNA, 21 nt, Human
acauucgaucucauucaguau

SEQ ID NO: 3879302 - RNA, 15 nt, Human
acauucggcucccug

SEQ ID NO: 3879303 - RNA, 17 nt, Human
acauucucaguuuuucu

SEQ ID NO: 3879304 - RNA, 16 nt, Human
acauucucuaauaaga

SEQ ID NO: 3879305 - RNA, 20 nt, Human
acauucucuaauaagaaaac

SEQ ID NO: 3879306 - RNA, 14 nt, Human
acauucugaaugcu

SEQ ID NO: 3879307 - RNA, 23 nt, Human
acauucugauucgaaugacacug

SEQ ID NO: 3879308 - RNA, 18 nt, Human
acauucugcuuucaucuu

SEQ ID NO: 3879309 - RNA, 20 nt, Human
acauucuggcucagggaggu

SEQ ID NO: 3879310 - RNA, 20 nt, Human
acauucuggggaaacaacau

SEQ ID NO: 3879311 - RNA, 20 nt, Human
acauucuggucucgucuucc

SEQ ID NO: 3879312 - RNA, 14 nt, Human
acauucuguaaaau

SEQ ID NO: 3879313 - RNA, 22 nt, Human
acauucugucgccuuagcaugu

SEQ ID NO: 3879314 - RNA, 15 nt, Human
acauucuguuaauca

SEQ ID NO: 3879315 - RNA, 18 nt, Human
acauucuuauaaauauga

SEQ ID NO: 3879316 - RNA, 16 nt, Human
acauucuuauauuuca

SEQ ID NO: 3879317 - RNA, 19 nt, Human
acauucuuccaaaaagauu

SEQ ID NO: 3879318 - RNA, 23 nt, Human
acauucuuggcuuaaucauuuuc

SEQ ID NO: 3879319 - RNA, 19 nt, Human
acauucuuuuaacuucuuu

SEQ ID NO: 3879320 - RNA, 20 nt, Human
acauucuuuuaacuucuuuc

SEQ ID NO: 3879321 - RNA, 14 nt, Human
acauucuuuuugcu

SEQ ID NO: 3879322 - RNA, 18 nt, Human
acauugaauuagaaacau

SEQ ID NO: 3879323 - RNA, 16 nt, Human
acauugaccaagaacu

SEQ ID NO: 3879324 - RNA, 17 nt, Human
acauugaccaagaacug

SEQ ID NO: 3879325 - RNA, 18 nt, Human
acauugaccaagaacugc

SEQ ID NO: 3879326 - RNA, 20 nt, Human
acauugaccaagaacugcau

SEQ ID NO: 3879327 - RNA, 14 nt, Human
acauugacuauuuu

SEQ ID NO: 3879328 - RNA, 16 nt, Human
acauugauuugauuuu

SEQ ID NO: 3879329 - RNA, 19 nt, Human
acauugcauauaacuuaua

SEQ ID NO: 3879330 - RNA, 11 nt, Human
acauugcauuc

SEQ ID NO: 3879331 - RNA, 17 nt, Human
acauugccaaaaaggau

SEQ ID NO: 3879332 - RNA, 21 nt, Human
acauugcggacagccacggcc

SEQ ID NO: 3879333 - RNA, 14 nt, Human
acauugcuaagaug

SEQ ID NO: 3879334 - RNA, 17 nt, Human
acauugcuaagaugcuc

SEQ ID NO: 3879335 - RNA, 19 nt, Human
acauugcuggucuuguaag

SEQ ID NO: 3879336 - RNA, 20 nt, Human
acauugcuggucuuguaaga

SEQ ID NO: 3879337 - RNA, 21 nt, Human
acauugcuggucuuguaagag

SEQ ID NO: 3879338 - RNA, 14 nt, Human
acauugcuuuuaaa

SEQ ID NO: 3879339 - RNA, 16 nt, Human
acauuggagccugggc

SEQ ID NO: 3879340 - RNA, 17 nt, Human
acauugggcagcgcccu

SEQ ID NO: 3879341 - RNA, 20 nt, Human
acauugggcagcgcccuucc

SEQ ID NO: 3879342 - RNA, 22 nt, Human
acauugggcagcgcccuuccuc

SEQ ID NO: 3879343 - RNA, 23 nt, Human
acauuggguccugggucuuucau

SEQ ID NO: 3879344 - RNA, 22 nt, Human
acauugggucuauuccagcuca

SEQ ID NO: 3879345 - RNA, 22 nt, Human
acauugguauucgcuugagaaa

SEQ ID NO: 3879346 - RNA, 16 nt, Human
acauugguguuguacu

SEQ ID NO: 3879347 - RNA, 23 nt, Human
acauugguguuguacucaauuuu

SEQ ID NO: 3879348 - RNA, 16 nt, Human
acauugguucuuguau

SEQ ID NO: 3879349 - RNA, 21 nt, Human
acauugguucuuguauuaaga

SEQ ID NO: 3879350 - RNA, 17 nt, Human
acauuguaaauaguauu

SEQ ID NO: 3879351 - RNA, 19 nt, Human
acauuguacgaagaguauu

SEQ ID NO: 3879352 - RNA, 14 nt, Human
acauugucaauaaa

SEQ ID NO: 3879353 - RNA, 14 nt, Human
acauugucagcaaa

SEQ ID NO: 3879354 - RNA, 18 nt, Human
acauugucagcaaauuaa

SEQ ID NO: 3879355 - RNA, 19 nt, Human
acauugucauuuauauaga

SEQ ID NO: 3879356 - RNA, 12 nt, Human
acauugucuccc

SEQ ID NO: 3879357 - RNA, 22 nt, Human
acauugucucuaaauugugggu

SEQ ID NO: 3879358 - RNA, 15 nt, Human
acauugugucuagga

SEQ ID NO: 3879359 - RNA, 15 nt, Human
acauuguuauuuuca

SEQ ID NO: 3879360 - RNA, 13 nt, Human
acauuguucaccu

SEQ ID NO: 3879361 - RNA, 17 nt, Human
acacugaccauccacuc

SEQ ID NO: 3879362 - RNA, 13 nt, Human
acacugacuugag

SEQ ID NO: 3879363 - RNA, 15 nt, Human
acacugauccagccc

SEQ ID NO: 3879364 - RNA, 20 nt, Human
acacugcaaucauaugugau

SEQ ID NO: 3879365 - RNA, 21 nt, Human
acacugcaggcaucacagcua

SEQ ID NO: 3879366 - RNA, 14 nt, Human
acacugcauguuug

SEQ ID NO: 3879367 - RNA, 15 nt, Human
acacugcccucgcac

SEQ ID NO: 3879368 - RNA, 20 nt, Human
acacugccugccuuaaguga

SEQ ID NO: 3879369 - RNA, 14 nt, Human
acacugccuguaua

SEQ ID NO: 3879370 - RNA, 22 nt, Human
acacugccuguauacuuuagua

SEQ ID NO: 3879371 - RNA, 23 nt, Human
acacugccuuuuuauuuauaugu

SEQ ID NO: 3879372 - RNA, 18 nt, Human
acacugcgcuuuauuuuc

SEQ ID NO: 3879373 - RNA, 14 nt, Human
acacugcucuaaca

SEQ ID NO: 3879374 - RNA, 19 nt, Human
acacugcucuaacagcccu

SEQ ID NO: 3879375 - RNA, 21 nt, Human
acacugcugcuccagugcagg

SEQ ID NO: 3879376 - RNA, 21 nt, Human
acacuggaggagagaagaaug

SEQ ID NO: 3879377 - RNA, 22 nt, Human
acacuggaggagagaagaauga

SEQ ID NO: 3879378 - RNA, 13 nt, Human
acacuggccccua

SEQ ID NO: 3879379 - RNA, 16 nt, Human
acacuggccccuagaa

SEQ ID NO: 3879380 - RNA, 14 nt, Human
acacuggccccuca

SEQ ID NO: 3879381 - RNA, 22 nt, Human
acacuggcugccagcuauuuuu

SEQ ID NO: 3879382 - RNA, 18 nt, Human
acacugggacuugcaaaa

SEQ ID NO: 3879383 - RNA, 15 nt, Human
acacugggaggccag

SEQ ID NO: 3879384 - RNA, 20 nt, Human
acacugggaggccagugagc

SEQ ID NO: 3879385 - RNA, 22 nt, Human
acacugggaggccgaggcaggg

SEQ ID NO: 3879386 - RNA, 18 nt, Human
acacuggggacuuggccu

SEQ ID NO: 3879387 - RNA, 15 nt, Human
acacugggggagggg

SEQ ID NO: 3879388 - RNA, 20 nt, Human
acacuggggugccgccugcc

SEQ ID NO: 3879389 - RNA, 17 nt, Human
acacugggugcccaagc

SEQ ID NO: 3879390 - RNA, 18 nt, Human
acacugggugguggccug

SEQ ID NO: 3879391 - RNA, 19 nt, Human
acacugggugguggccugg

SEQ ID NO: 3879392 - RNA, 20 nt, Human
acacugggugguggccuggu

SEQ ID NO: 3879393 - RNA, 18 nt, Human
acacugguauuccugccu

SEQ ID NO: 3879394 - RNA, 21 nt, Human
acacuggugugaccugagggc

SEQ ID NO: 3879395 - RNA, 15 nt, Human
acacugguucucaau

SEQ ID NO: 3879396 - RNA, 17 nt, Human
acauuuggguaaaucau

SEQ ID NO: 3879397 - RNA, 17 nt, Human
acauuuguacagaauuu

SEQ ID NO: 3879398 - RNA, 14 nt, Human
acauuuguauaaaa

SEQ ID NO: 3879399 - RNA, 19 nt, Human
acauuuguauaaaauaauu

SEQ ID NO: 3879400 - RNA, 20 nt, Human
acauuuguauguugugaaga

SEQ ID NO: 3879401 - RNA, 16 nt, Human
acauuugucauuuuca

SEQ ID NO: 3879402 - RNA, 20 nt, Human
acauuugugccgacacuguu

SEQ ID NO: 3879403 - RNA, 14 nt, Human
acauuuguguguua

SEQ ID NO: 3879404 - RNA, 16 nt, Human
acauuuuaaaagugcc

SEQ ID NO: 3879405 - RNA, 15 nt, Human
acauuuuaaauaaaa

SEQ ID NO: 3879406 - RNA, 15 nt, Human
acauuuuaaauggac

SEQ ID NO: 3879407 - RNA, 12 nt, Human
acauuuuaacaa

SEQ ID NO: 3879408 - RNA, 15 nt, Human
acauuuuaaugcacc

SEQ ID NO: 3879409 - RNA, 18 nt, Human
acauuuuacauuaaauuu

SEQ ID NO: 3879410 - RNA, 18 nt, Human
acauuuuacuuuuuccug

SEQ ID NO: 3879411 - RNA, 16 nt, Human
acauuuuagacaguaa

SEQ ID NO: 3879412 - RNA, 18 nt, Human
acauuuuagcucuauuga

SEQ ID NO: 3879413 - RNA, 14 nt, Human
acauuuuauuuuau

SEQ ID NO: 3879414 - RNA, 20 nt, Human
acauuuucacacaauacaau

SEQ ID NO: 3879415 - RNA, 12 nt, Human
acauuuuccuuu

SEQ ID NO: 3879416 - RNA, 19 nt, Human
acauuuucuaagaaacauu

SEQ ID NO: 3879417 - RNA, 13 nt, Human
acauuuugaaagu

SEQ ID NO: 3879418 - RNA, 21 nt, Human
acauuuugaaagucuguccuu

SEQ ID NO: 3879419 - RNA, 19 nt, Human
acauuuugagaacaaagau

SEQ ID NO: 3879420 - RNA, 14 nt, Human
acauuuugccaaaa

SEQ ID NO: 3879421 - RNA, 21 nt, Human
acauuuuguauaauuguaucg

SEQ ID NO: 3879422 - RNA, 13 nt, Human
acauuuuguugua

SEQ ID NO: 3879423 - RNA, 16 nt, Human
acauuuuguuguaaaa

SEQ ID NO: 3879424 - RNA, 18 nt, Human
acauuuuuaagugcugca

SEQ ID NO: 3879425 - RNA, 19 nt, Human
acauuuuuaagugcugcau

SEQ ID NO: 3879426 - RNA, 23 nt, Human
acauuuuuaagugcugcauuuaa

SEQ ID NO: 3879427 - RNA, 14 nt, Human
acauuuuuacaaua

SEQ ID NO: 3879428 - RNA, 20 nt, Human
acauuuuuauaccuguuuaa

SEQ ID NO: 3879429 - RNA, 21 nt, Human
acauuuuuauaccuguuuaaa

SEQ ID NO: 3879430 - RNA, 23 nt, Human
acauuuuucaacuuugaauaaag

SEQ ID NO: 3879431 - RNA, 19 nt, Human
acauuuuuccguuugcuuu

SEQ ID NO: 3879432 - RNA, 17 nt, Human
acauuuuuuaagcuuca

SEQ ID NO: 3879433 - RNA, 16 nt, Human
acauuuuuuaggaaau

SEQ ID NO: 3879434 - RNA, 20 nt, Human
acauuuuuuaggaaauguuu

SEQ ID NO: 3879435 - RNA, 14 nt, Human
acauuuuuugaaau

SEQ ID NO: 3879436 - RNA, 23 nt, Human
acauuuuuuugcaugcaugcaaa

SEQ ID NO: 3879437 - RNA, 21 nt, Human
acauuuuuuuuuuuaauuuug

SEQ ID NO: 3879438 - RNA, 18 nt, Human
accaaaaaaauccagaaa

SEQ ID NO: 3879439 - RNA, 12 nt, Human
accaaaaaauau

SEQ ID NO: 3879440 - RNA, 12 nt, Human
accaaaaacaaa

SEQ ID NO: 3879441 - RNA, 12 nt, Human
accaaaacaugu

SEQ ID NO: 3879442 - RNA, 13 nt, Human
accaaaacugcuc

SEQ ID NO: 3879443 - RNA, 15 nt, Human
accaaaagaacaaga

SEQ ID NO: 3879444 - RNA, 14 nt, Human
accaaaaguuacau

SEQ ID NO: 3879445 - RNA, 21 nt, Human
accaaaaguuacauguuugca

SEQ ID NO: 3879446 - RNA, 18 nt, Human
accaaaaguuauuaaaau

SEQ ID NO: 3879447 - RNA, 19 nt, Human
accaaaaguuauuaaaauu

SEQ ID NO: 3879448 - RNA, 22 nt, Human
accaaaaguuauuaaaauuguu

SEQ ID NO: 3879449 - RNA, 14 nt, Human
accaaaauccccuu

SEQ ID NO: 3879450 - RNA, 21 nt, Human
accaaaaugauacuuacugaa

SEQ ID NO: 3879451 - RNA, 13 nt, Human
accaaaauucauc

SEQ ID NO: 3879452 - RNA, 14 nt, Human
accaaaauuuuaaa

SEQ ID NO: 3879453 - RNA, 18 nt, Human
accaaaauuuuaaaaaag

SEQ ID NO: 3879454 - RNA, 21 nt, Human
accaaacaauauugcuccaug

SEQ ID NO: 3879455 - RNA, 14 nt, Human
accaaacaauuauu

SEQ ID NO: 3879456 - RNA, 21 nt, Human
accaaacagcaaaccaagaga

SEQ ID NO: 3879457 - RNA, 17 nt, Human
accaaacuacugaauga

SEQ ID NO: 3879458 - RNA, 18 nt, Human
accaaagagacuggagca

SEQ ID NO: 3879459 - RNA, 15 nt, Human
accaaagagggcuuc

SEQ ID NO: 3879460 - RNA, 13 nt, Human
accaaagaugcag

SEQ ID NO: 3879461 - RNA, 12 nt, Human
accaaagcugcc

SEQ ID NO: 3879462 - RNA, 19 nt, Human
accaaaggaaaaugucugu

SEQ ID NO: 3879463 - RNA, 21 nt, Human
accaaagggagaguuccagag

SEQ ID NO: 3879464 - RNA, 17 nt, Human
accaaagggagucugcc

SEQ ID NO: 3879465 - RNA, 19 nt, Human
accaaagggagucugccag

SEQ ID NO: 3879466 - RNA, 20 nt, Human
accaaagggagucugccagg

SEQ ID NO: 3879467 - RNA, 20 nt, Human
accaaaggugaaggaauaua

SEQ ID NO: 3879468 - RNA, 12 nt, Human
accaaaguucua

SEQ ID NO: 3879469 - RNA, 12 nt, Human
accaaaguuuua

SEQ ID NO: 3879470 - RNA, 18 nt, Human
accaaauagugugaaaua

SEQ ID NO: 3879471 - RNA, 16 nt, Human
accaaaucagcugcua

SEQ ID NO: 3879472 - RNA, 16 nt, Human
accaaaugcaucaauc

SEQ ID NO: 3879473 - RNA, 13 nt, Human
accaaaugcuuua

SEQ ID NO: 3879474 - RNA, 19 nt, Human
accaaaugcuuuaaaaacu

SEQ ID NO: 3879475 - RNA, 14 nt, Human
accaaauggaaaca

SEQ ID NO: 3879476 - RNA, 15 nt, Human
accaaauuaaaaaaa

SEQ ID NO: 3879477 - RNA, 20 nt, Human
accaaauuaacuuacuucca

SEQ ID NO: 3879478 - RNA, 14 nt, Human
accaaauuccuugg

SEQ ID NO: 3879479 - RNA, 16 nt, Human
accaacaccaucacag

SEQ ID NO: 3879480 - RNA, 23 nt, Human
accaacaggcuguucugcacuga

SEQ ID NO: 3879481 - RNA, 16 nt, Human
accaacaguuccuuca

SEQ ID NO: 3879482 - RNA, 14 nt, Human
accaacauaaaaau

SEQ ID NO: 3879483 - RNA, 23 nt, Human
accaacauaaaaaugaucuaaac

SEQ ID NO: 3879484 - RNA, 22 nt, Human
accaacaucccauugcccuggu

SEQ ID NO: 3879485 - RNA, 23 nt, Human
accaacauggagaaacccugucu

SEQ ID NO: 3879486 - RNA, 15 nt, Human
accaacccagccgcu

SEQ ID NO: 3879487 - RNA, 16 nt, Human
accaacccuguuuccu

SEQ ID NO: 3879488 - RNA, 19 nt, Human
accaacccuguuuccugag

SEQ ID NO: 3879489 - RNA, 17 nt, Human
accagugaaccaaagag

SEQ ID NO: 3879490 - RNA, 22 nt, Human
accagugaauuuuugcaauaau

SEQ ID NO: 3879491 - RNA, 13 nt, Human
accagugcaggcu

SEQ ID NO: 3879492 - RNA, 14 nt, Human
accagugcaggcug

SEQ ID NO: 3879493 - RNA, 15 nt, Human
accagugcaggcugg

SEQ ID NO: 3879494 - RNA, 21 nt, Human
accagugcaggcuggccagcc

SEQ ID NO: 3879495 - RNA, 16 nt, Human
accagugccaaggacc

SEQ ID NO: 3879496 - RNA, 23 nt, Human
accagugcccaaagucuguguga

SEQ ID NO: 3879497 - RNA, 13 nt, Human
accagugccucuc

SEQ ID NO: 3879498 - RNA, 21 nt, Human
accagugccucucccugcugc

SEQ ID NO: 3879499 - RNA, 22 nt, Human
accaguggcguuguugcauguu

SEQ ID NO: 3879500 - RNA, 23 nt, Human
accaguggcguuguugcauguuu

SEQ ID NO: 3879501 - RNA, 12 nt, Human
accaguggucuc

SEQ ID NO: 3879502 - RNA, 17 nt, Human
accaguggucucacaug

SEQ ID NO: 3879503 - RNA, 13 nt, Human
accaguguagccu

SEQ ID NO: 3879504 - RNA, 22 nt, Human
accaguguuagggaagggccug

SEQ ID NO: 3879505 - RNA, 15 nt, Human
accaguguuguggau

SEQ ID NO: 3879506 - RNA, 14 nt, Human
accaguuaauuacu

SEQ ID NO: 3879507 - RNA, 12 nt, Human
accaguuaauuu

SEQ ID NO: 3879508 - RNA, 16 nt, Human
accaguuaauuuuucc

SEQ ID NO: 3879509 - RNA, 24 nt, Human
accaguugaauaaaagugcacacc

SEQ ID NO: 3879510 - RNA, 19 nt, Human
accaguugggagcacugga

SEQ ID NO: 3879511 - RNA, 21 nt, Human
accaguuuagauuucaagaaa

SEQ ID NO: 3879512 - RNA, 19 nt, Human
accauaaccccggaagcca

SEQ ID NO: 3879513 - RNA, 17 nt, Human
accauaagcuacugcca

SEQ ID NO: 3879514 - RNA, 18 nt, Human
accauaauguuacauuau

SEQ ID NO: 3879515 - RNA, 21 nt, Human
accauacuaauuauacccccu

SEQ ID NO: 3879516 - RNA, 22 nt, Human
accauagcacaggcuaauuuuu

SEQ ID NO: 3879517 - RNA, 17 nt, Human
accauaggucaccuuua

SEQ ID NO: 3879518 - RNA, 15 nt, Human
accauaguuacugua

SEQ ID NO: 3879519 - RNA, 18 nt, Human
accauaguuacuguaaaa

SEQ ID NO: 3879520 - RNA, 14 nt, Human
accauaguugacag

SEQ ID NO: 3879521 - RNA, 21 nt, Human
accauauagcaaaacuuuuaa

SEQ ID NO: 3879522 - RNA, 13 nt, Human
accauaugaauug

SEQ ID NO: 3879523 - RNA, 14 nt, Human
accauauuaccaca

SEQ ID NO: 3879524 - RNA, 21 nt, Human
accauauuuauccauuuguaa

SEQ ID NO: 3879525 - RNA, 18 nt, Human
accaucacaauacagaua

SEQ ID NO: 3879526 - RNA, 20 nt, Human
accaucagaaacacccucac

SEQ ID NO: 3879527 - RNA, 14 nt, Human
accaucagggacag

SEQ ID NO: 3879528 - RNA, 14 nt, Human
accaucaugucugg

SEQ ID NO: 3879529 - RNA, 23 nt, Human
accauccacucuacccucccacc

SEQ ID NO: 3879530 - RNA, 18 nt, Human
accaucccugaaggcccc

SEQ ID NO: 3879531 - RNA, 18 nt, Human
accauccuaggcugacac

SEQ ID NO: 3879532 - RNA, 16 nt, Human
accauccugcagccuc

SEQ ID NO: 3879533 - RNA, 19 nt, Human
accauccuggccaacauga

SEQ ID NO: 3879534 - RNA, 13 nt, Human
accauccuggcua

SEQ ID NO: 3879535 - RNA, 20 nt, Human
accauccuggcuaacacggu

SEQ ID NO: 3879536 - RNA, 18 nt, Human
accauccuguauucuuca

SEQ ID NO: 3879537 - RNA, 16 nt, Human
accaucgcuggccccu

SEQ ID NO: 3879538 - RNA, 17 nt, Human
accaucucaggccaccu

SEQ ID NO: 3879539 - RNA, 12 nt, Human
accaucucccug

SEQ ID NO: 3879540 - RNA, 13 nt, Human
accaucucccugg

SEQ ID NO: 3879541 - RNA, 14 nt, Human
accaucucccuggu

SEQ ID NO: 3879542 - RNA, 17 nt, Human
accaucucccuggugcu

SEQ ID NO: 3879543 - RNA, 22 nt, Human
accaucugaaagugguacuuga

SEQ ID NO: 3879544 - RNA, 23 nt, Human
accaucuggccuggccuggcccu

SEQ ID NO: 3879545 - RNA, 17 nt, Human
accaucuuuuauucuuu

SEQ ID NO: 3879546 - RNA, 19 nt, Human
accaucuuuuauucuuuuu

SEQ ID NO: 3879547 - RNA, 20 nt, Human
accaucuuuuauucuuuuuu

SEQ ID NO: 3879548 - RNA, 21 nt, Human
accaucuuuuccucauuuuca

SEQ ID NO: 3879549 - RNA, 15 nt, Human
accaugaaacaaagc

SEQ ID NO: 3879550 - RNA, 12 nt, Human
accaugaaagac

SEQ ID NO: 3879551 - RNA, 20 nt, Human
accaugaagagauuuuucau

SEQ ID NO: 3879552 - RNA, 24 nt, Human
accaugaagagauuuuucaugauu

SEQ ID NO: 3879553 - RNA, 23 nt, Human
accaugacaacccugugguuucc

SEQ ID NO: 3879554 - RNA, 21 nt, Human
accaugagaagagggccugug

SEQ ID NO: 3879555 - RNA, 20 nt, Human
accaugaucacuuaucaguu

SEQ ID NO: 3879556 - RNA, 22 nt, Human
accaugauuaaccacuucagcu

SEQ ID NO: 3879557 - RNA, 16 nt, Human
accaugcaaaugcuau

SEQ ID NO: 3879558 - RNA, 17 nt, Human
accaugccucacuaauu

SEQ ID NO: 3879559 - RNA, 23 nt, Human
accaugcgacacugggaggccag

SEQ ID NO: 3879560 - RNA, 14 nt, Human
accauggacuuuau

SEQ ID NO: 3879561 - RNA, 16 nt, Human
accauggacuuuauaa

SEQ ID NO: 3879562 - RNA, 16 nt, Human
accauggagacaagaa

SEQ ID NO: 3879563 - RNA, 23 nt, Human
accauggaguggcagcccagcca

SEQ ID NO: 3879564 - RNA, 21 nt, Human
accauggcuaaggcaccagcc

SEQ ID NO: 3879565 - RNA, 23 nt, Human
accauggcugaaggaaaccagug

SEQ ID NO: 3879566 - RNA, 13 nt, Human
accauguaaaaca

SEQ ID NO: 3879567 - RNA, 17 nt, Human
accauguaaaacaaaaa

SEQ ID NO: 3879568 - RNA, 21 nt, Human
accauguaaaacaaaaaacaa

SEQ ID NO: 3879569 - RNA, 21 nt, Human
accauguaaagaacauaaaua

SEQ ID NO: 3879570 - RNA, 18 nt, Human
accauguaagcacucugg

SEQ ID NO: 3879571 - RNA, 21 nt, Human
accauguaagcacucuggaug

SEQ ID NO: 3879572 - RNA, 12 nt, Human
accauguaaugg

SEQ ID NO: 3879573 - RNA, 22 nt, Human
accaugucaaggguucaagauu

SEQ ID NO: 3879574 - RNA, 13 nt, Human
accaugucacugu

SEQ ID NO: 3879575 - RNA, 15 nt, Human
accaugucacugugg

SEQ ID NO: 3879576 - RNA, 22 nt, Human
accaugucagcaaaaagcaaaa

SEQ ID NO: 3879577 - RNA, 15 nt, Human
accaugucauuucag

SEQ ID NO: 3879578 - RNA, 18 nt, Human
accaugugagcucuuccu

SEQ ID NO: 3879579 - RNA, 13 nt, Human
accaugugccuga

SEQ ID NO: 3879580 - RNA, 20 nt, Human
accauguuuguggcuauuaa

SEQ ID NO: 3879581 - RNA, 13 nt, Human
accauuaaaacug

SEQ ID NO: 3879582 - RNA, 21 nt, Human
accauuaaaacugaagucuga

SEQ ID NO: 3879583 - RNA, 19 nt, Human
accauuaaaacugcuuuuu

SEQ ID NO: 3879584 - RNA, 14 nt, Human
accauuaaaauaug

SEQ ID NO: 3879585 - RNA, 20 nt, Human
accauuaaaauaugcacuaa

SEQ ID NO: 3879586 - RNA, 13 nt, Human
accauuaaaccau

SEQ ID NO: 3879587 - RNA, 14 nt, Human
accauuaaaccauc

SEQ ID NO: 3879588 - RNA, 15 nt, Human
accauuaaagucaga

SEQ ID NO: 3879589 - RNA, 14 nt, Human
accauuaccaaaau

SEQ ID NO: 3879590 - RNA, 21 nt, Human
accauuauaaccuuaauuuau

SEQ ID NO: 3879591 - RNA, 17 nt, Human
accauuauaaugaauuu

SEQ ID NO: 3879592 - RNA, 17 nt, Human
accauucacaauaaaag

SEQ ID NO: 3879593 - RNA, 23 nt, Human
accauucagaucacugaauuuau

SEQ ID NO: 3879594 - RNA, 13 nt, Human
accauucuccacc

SEQ ID NO: 3879595 - RNA, 16 nt, Human
accauucuccaccugc

SEQ ID NO: 3879596 - RNA, 24 nt, Human
accauucugacucgguuucuccaa

SEQ ID NO: 3879597 - RNA, 18 nt, Human
accauugaauucuugguu

SEQ ID NO: 3879598 - RNA, 23 nt, Human
accauugagaccgugaagauacu

SEQ ID NO: 3879599 - RNA, 15 nt, Human
accauugcaacaaaa

SEQ ID NO: 3879600 - RNA, 16 nt, Human
accauugcaacaaaau

SEQ ID NO: 3879601 - RNA, 12 nt, Human
accauugcugcu

SEQ ID NO: 3879602 - RNA, 20 nt, Human
accauugcuucacuacccau

SEQ ID NO: 3879603 - RNA, 13 nt, Human
accauuggaaauu

SEQ ID NO: 3879604 - RNA, 15 nt, Human
accauuggaaauuuc

SEQ ID NO: 3879605 - RNA, 20 nt, Human
accauuggaaauuucacguc

SEQ ID NO: 3879606 - RNA, 16 nt, Human
accauuggggcuccca

SEQ ID NO: 3879607 - RNA, 14 nt, Human
accauugucucaga

SEQ ID NO: 3879608 - RNA, 19 nt, Human
accauugucucagagcagg

SEQ ID NO: 3879609 - RNA, 21 nt, Human
accauugucuuguucugugau

SEQ ID NO: 3879610 - RNA, 21 nt, Human
accauuuaaaaacaggcagcu

SEQ ID NO: 3879611 - RNA, 19 nt, Human
accauuuauacaaauuaga

SEQ ID NO: 3879612 - RNA, 15 nt, Human
accauuuaucuugaa

SEQ ID NO: 3879613 - RNA, 16 nt, Human
accauuuaucuugaag

SEQ ID NO: 3879614 - RNA, 19 nt, Human
accauuuccccagggcacg

SEQ ID NO: 3879615 - RNA, 13 nt, Human
accauuuccucag

SEQ ID NO: 3879616 - RNA, 22 nt, Human
accauuuccucagcuuaucucu

SEQ ID NO: 3879617 - RNA, 23 nt, Human
accauuugaaguguaccugugua

SEQ ID NO: 3879618 - RNA, 20 nt, Human
accauuuggcaucccugggc

SEQ ID NO: 3879619 - RNA, 22 nt, Human
accauuuggcaucccugggccu

SEQ ID NO: 3879620 - RNA, 19 nt, Human
accauuuguaauaaaguau

SEQ ID NO: 3879621 - RNA, 21 nt, Human
accauuuguaauaaaguauau

SEQ ID NO: 3879622 - RNA, 12 nt, Human
accauuuuccug

SEQ ID NO: 3879623 - RNA, 23 nt, Human
accauuuugggguacccacugcu

SEQ ID NO: 3879624 - RNA, 21 nt, Human
acccaaaacaagccugguagg

SEQ ID NO: 3879625 - RNA, 17 nt, Human
accccuccuuccuugac

SEQ ID NO: 3879626 - RNA, 22 nt, Human
accccuccuuccuugaccagca

SEQ ID NO: 3879627 - RNA, 23 nt, Human
accccucgcccagucccagcagc

SEQ ID NO: 3879628 - RNA, 13 nt, Human
accccucuggcca

SEQ ID NO: 3879629 - RNA, 18 nt, Human
accccucuggccaggaug

SEQ ID NO: 3879630 - RNA, 15 nt, Human
accccugagcuugca

SEQ ID NO: 3879631 - RNA, 19 nt, Human
accccugaggaagaugggg

SEQ ID NO: 3879632 - RNA, 15 nt, Human
accccugaucugaca

SEQ ID NO: 3879633 - RNA, 10 nt, Human
accccugcau

SEQ ID NO: 3879634 - RNA, 16 nt, Human
accccugcccagauca

SEQ ID NO: 3879635 - RNA, 11 nt, Human
accccugcccc

SEQ ID NO: 3879636 - RNA, 13 nt, Human
accccugccccca

SEQ ID NO: 3879637 - RNA, 19 nt, Human
accccugcccccacuuccu

SEQ ID NO: 3879638 - RNA, 12 nt, Human
accccugccucc

SEQ ID NO: 3879639 - RNA, 22 nt, Human
accccugcuuugggcuugggcc

SEQ ID NO: 3879640 - RNA, 19 nt, Human
accccuggaagagcccagu

SEQ ID NO: 3879641 - RNA, 12 nt, Human
accccuggaccc

SEQ ID NO: 3879642 - RNA, 20 nt, Human
accccuggaccccagccuca

SEQ ID NO: 3879643 - RNA, 14 nt, Human
accccuggccuccg

SEQ ID NO: 3879644 - RNA, 13 nt, Human
accccuggcuggu

SEQ ID NO: 3879645 - RNA, 15 nt, Human
accccuggcuguacu

SEQ ID NO: 3879646 - RNA, 21 nt, Human
accccuggcuguacugcucag

SEQ ID NO: 3879647 - RNA, 19 nt, Human
accccuggcuuuucacugc

SEQ ID NO: 3879648 - RNA, 20 nt, Human
accccugguucucaucuuuc

SEQ ID NO: 3879649 - RNA, 16 nt, Human
accccuguaggccuca

SEQ ID NO: 3879650 - RNA, 15 nt, Human
accccuguccucacu

SEQ ID NO: 3879651 - RNA, 19 nt, Human
accccuuaagcccuggccc

SEQ ID NO: 3879652 - RNA, 17 nt, Human
accccuuagccucccug

SEQ ID NO: 3879653 - RNA, 16 nt, Human
accccuuauccaggac

SEQ ID NO: 3879654 - RNA, 16 nt, Human
accccuuccagaagca

SEQ ID NO: 3879655 - RNA, 13 nt, Human
accccuuccagau

SEQ ID NO: 3879656 - RNA, 19 nt, Human
accccuuccauguggagaa

SEQ ID NO: 3879657 - RNA, 20 nt, Human
accccuucgcuccugugucu

SEQ ID NO: 3879658 - RNA, 17 nt, Human
accccuucucugugacc

SEQ ID NO: 3879659 - RNA, 14 nt, Human
accccuugauuuuc

SEQ ID NO: 3879660 - RNA, 21 nt, Human
accccuuucuagaccaauaaa

SEQ ID NO: 3879661 - RNA, 16 nt, Human
acccgacagagggaag

SEQ ID NO: 3879662 - RNA, 23 nt, Human
acccgaccccccgugggcucccg

SEQ ID NO: 3879663 - RNA, 15 nt, Human
acccgaggcugccca

SEQ ID NO: 3879664 - RNA, 17 nt, Human
acccgaggcugcccacu

SEQ ID NO: 3879665 - RNA, 22 nt, Human
acccgaugcugcuuuccccugu

SEQ ID NO: 3879666 - RNA, 15 nt, Human
acccgccccacuccc

SEQ ID NO: 3879667 - RNA, 15 nt, Human
acccgccuagcugcu

SEQ ID NO: 3879668 - RNA, 21 nt, Human
acccgccucucccgucagggc

SEQ ID NO: 3879669 - RNA, 16 nt, Human
acccgccuuuuauaaa

SEQ ID NO: 3879670 - RNA, 19 nt, Human
acccgcuaagagggaggga

SEQ ID NO: 3879671 - RNA, 22 nt, Human
acccggagcuaacacuggcccc

SEQ ID NO: 3879672 - RNA, 23 nt, Human
acccggagcuaacacuggccccu

SEQ ID NO: 3879673 - RNA, 19 nt, Human
acccggaggccacaugagu

SEQ ID NO: 3879674 - RNA, 14 nt, Human
acccggaggccgag

SEQ ID NO: 3879675 - RNA, 21 nt, Human
acccggaggggccuggcagcc

SEQ ID NO: 3879676 - RNA, 16 nt, Human
acccggcacccccugc

SEQ ID NO: 3879677 - RNA, 22 nt, Human
acccggcaggcuagaaccuggc

SEQ ID NO: 3879678 - RNA, 17 nt, Human
acccggccccugcuggu

SEQ ID NO: 3879679 - RNA, 20 nt, Human
acccgggaagggggcuggga

SEQ ID NO: 3879680 - RNA, 15 nt, Human
acccgggaggcagag

SEQ ID NO: 3879681 - RNA, 17 nt, Human
acccgggaggcagaggu

SEQ ID NO: 3879682 - RNA, 21 nt, Human
acccgggaggcggagcuugca

SEQ ID NO: 3879683 - RNA, 13 nt, Human
acccgggcucagg

SEQ ID NO: 3879684 - RNA, 23 nt, Human
acccgggcucagggaccacagca

SEQ ID NO: 3879685 - RNA, 15 nt, Human
acccggggcccaggg

SEQ ID NO: 3879686 - RNA, 15 nt, Human
acccgguccccacuu

SEQ ID NO: 3879687 - RNA, 19 nt, Human
acccgguuucuuuuuaagu

SEQ ID NO: 3879688 - RNA, 15 nt, Human
acccguacaacgugu

SEQ ID NO: 3879689 - RNA, 14 nt, Human
acccgucuccagcu

SEQ ID NO: 3879690 - RNA, 15 nt, Human
acccguggaggcugc

SEQ ID NO: 3879691 - RNA, 13 nt, Human
acccguucaacuu

SEQ ID NO: 3879692 - RNA, 18 nt, Human
acccguucaugggggagg

SEQ ID NO: 3879693 - RNA, 13 nt, Human
acccguuccaaaa

SEQ ID NO: 3879694 - RNA, 14 nt, Human
acccguuuuaugau

SEQ ID NO: 3879695 - RNA, 16 nt, Human
acccuaaauaauaaaa

SEQ ID NO: 3879696 - RNA, 13 nt, Human
acccuaaccaagu

SEQ ID NO: 3879697 - RNA, 14 nt, Human
acccuaaccaaguu

SEQ ID NO: 3879698 - RNA, 17 nt, Human
acccuaaccaaguuccu

SEQ ID NO: 3879699 - RNA, 22 nt, Human
acccuaaggucauuaccacagg

SEQ ID NO: 3879700 - RNA, 19 nt, Human
acccuaaugucuucauaaa

SEQ ID NO: 3879701 - RNA, 13 nt, Human
acccuagcaaaag

SEQ ID NO: 3879702 - RNA, 17 nt, Human
acccuagccauuccugg

SEQ ID NO: 3879703 - RNA, 19 nt, Human
acccuagguucccgguccc

SEQ ID NO: 3879704 - RNA, 16 nt, Human
acccuaguuucccuga

SEQ ID NO: 3879705 - RNA, 15 nt, Human
acccuaucuccugac

SEQ ID NO: 3879706 - RNA, 14 nt, Human
acccucacucugcc

SEQ ID NO: 3879707 - RNA, 15 nt, Human
acccucacucugcca

SEQ ID NO: 3879708 - RNA, 16 nt, Human
acccucacucugccag

SEQ ID NO: 3879709 - RNA, 22 nt, Human
acccucacuggcucuccuggcc

SEQ ID NO: 3879710 - RNA, 11 nt, Human
acccucagagc

SEQ ID NO: 3879711 - RNA, 20 nt, Human
acccucagaugcacaugagc

SEQ ID NO: 3879712 - RNA, 13 nt, Human
acccucaggcagg

SEQ ID NO: 3879713 - RNA, 14 nt, Human
acccucauguucuu

SEQ ID NO: 3879714 - RNA, 17 nt, Human
acccucauucuacugaa

SEQ ID NO: 3879715 - RNA, 17 nt, Human
acccucauuguguuucu

SEQ ID NO: 3879716 - RNA, 11 nt, Human
acccuccaaau

SEQ ID NO: 3879717 - RNA, 15 nt, Human
acccuccacccuguc

SEQ ID NO: 3879718 - RNA, 16 nt, Human
acccuccacccugucc

SEQ ID NO: 3879719 - RNA, 17 nt, Human
acccuccacccuguccc

SEQ ID NO: 3879720 - RNA, 12 nt, Human
acccucccaccc

SEQ ID NO: 3879721 - RNA, 20 nt, Human
acccucccacccccuucucu

SEQ ID NO: 3879722 - RNA, 14 nt, Human
acccuccccucucu

SEQ ID NO: 3879723 - RNA, 19 nt, Human
acccuccccuucccagggc

SEQ ID NO: 3879724 - RNA, 19 nt, Human
acccucccucagccccucu

SEQ ID NO: 3879725 - RNA, 11 nt, Human
acccucccugc

SEQ ID NO: 3879726 - RNA, 12 nt, Human
acccucccugga

SEQ ID NO: 3879727 - RNA, 15 nt, Human
acccucccuggagug

SEQ ID NO: 3879728 - RNA, 20 nt, Human
acccuccgauuguuccugaa

SEQ ID NO: 3879729 - RNA, 17 nt, Human
acccuccuaucaccucc

SEQ ID NO: 3879730 - RNA, 21 nt, Human
acccuccuaucaccuccccuc

SEQ ID NO: 3879731 - RNA, 19 nt, Human
acccuccuggccucagacu

SEQ ID NO: 3879732 - RNA, 22 nt, Human
acccuccuggccucagacugca

SEQ ID NO: 3879733 - RNA, 14 nt, Human
acccuccuguaaau

SEQ ID NO: 3879734 - RNA, 22 nt, Human
acccuccuguugcacccagccc

SEQ ID NO: 3879735 - RNA, 15 nt, Human
acccuccuucccacu

SEQ ID NO: 3879736 - RNA, 21 nt, Human
acccuccuucccacucuucuc

SEQ ID NO: 3879737 - RNA, 21 nt, Human
acccuccuuucaccacaugug

SEQ ID NO: 3879738 - RNA, 14 nt, Human
acccucgcuggccc

SEQ ID NO: 3879739 - RNA, 16 nt, Human
acccucgggcccaccu

SEQ ID NO: 3879740 - RNA, 20 nt, Human
agcuagugacccacaugcca

SEQ ID NO: 3879741 - RNA, 16 nt, Human
agcuaguguaccuccu

SEQ ID NO: 3879742 - RNA, 18 nt, Human
agcuaguguaccuccucu

SEQ ID NO: 3879743 - RNA, 22 nt, Human
agcuaguguaccuccucucagu

SEQ ID NO: 3879744 - RNA, 23 nt, Human
agcuaguguaccuccucucagug

SEQ ID NO: 3879745 - RNA, 17 nt, Human
agcuaguugaauacuug

SEQ ID NO: 3879746 - RNA, 18 nt, Human
agcuaguugaauacuuga

SEQ ID NO: 3879747 - RNA, 20 nt, Human
agcuaguugaauacuugaac

SEQ ID NO: 3879748 - RNA, 22 nt, Human
agcuauaaagcaguauuuuucu

SEQ ID NO: 3879749 - RNA, 23 nt, Human
agcuauaaauuccucuuugcuuu

SEQ ID NO: 3879750 - RNA, 13 nt, Human
agcuauacaguuu

SEQ ID NO: 3879751 - RNA, 16 nt, Human
agcuauaccugugccu

SEQ ID NO: 3879752 - RNA, 18 nt, Human
agcuauagacccgaggaa

SEQ ID NO: 3879753 - RNA, 11 nt, Human
agcuauauaag

SEQ ID NO: 3879754 - RNA, 14 nt, Human
agcuauauccaugu

SEQ ID NO: 3879755 - RNA, 20 nt, Human
agcuauauccauguacugua

SEQ ID NO: 3879756 - RNA, 16 nt, Human
agcuaucaagaggcug

SEQ ID NO: 3879757 - RNA, 19 nt, Human
agcuaucaagaggcugaga

SEQ ID NO: 3879758 - RNA, 21 nt, Human
agcuaucaagaggcugagaca

SEQ ID NO: 3879759 - RNA, 20 nt, Human
agcuaucagaagaccacaaa

SEQ ID NO: 3879760 - RNA, 18 nt, Human
agcuaucuauauggaauu

SEQ ID NO: 3879761 - RNA, 15 nt, Human
agcuaucuucaugua

SEQ ID NO: 3879762 - RNA, 12 nt, Human
agcuaugacuua

SEQ ID NO: 3879763 - RNA, 13 nt, Human
agcuaugagagga

SEQ ID NO: 3879764 - RNA, 13 nt, Human
agcuaugcaaaaa

SEQ ID NO: 3879765 - RNA, 23 nt, Human
agcuaugcugguaggcuccugcc

SEQ ID NO: 3879766 - RNA, 19 nt, Human
agcuauggugucauaggcu

SEQ ID NO: 3879767 - RNA, 18 nt, Human
agcuaugucaagaggcug

SEQ ID NO: 3879768 - RNA, 15 nt, Human
agcuauuacugucug

SEQ ID NO: 3879769 - RNA, 14 nt, Human
agcuauuagccagg

SEQ ID NO: 3879770 - RNA, 17 nt, Human
agcuauugauauaaaua

SEQ ID NO: 3879771 - RNA, 16 nt, Human
agcuauuuaugggccc

SEQ ID NO: 3879772 - RNA, 21 nt, Human
agcuauuucaucuauuuuugg

SEQ ID NO: 3879773 - RNA, 18 nt, Human
agcuauuuccauuccaga

SEQ ID NO: 3879774 - RNA, 20 nt, Human
agcuauuuccauuccagaau

SEQ ID NO: 3879775 - RNA, 15 nt, Human
agcuauuugauguaa

SEQ ID NO: 3879776 - RNA, 13 nt, Human
agcuauuuuccag

SEQ ID NO: 3879777 - RNA, 13 nt, Human
agcuauuuuguga

SEQ ID NO: 3879778 - RNA, 22 nt, Human
agcucaaagcguggacaggugu

SEQ ID NO: 3879779 - RNA, 13 nt, Human
agcucaaaggcac

SEQ ID NO: 3879780 - RNA, 16 nt, Human
agcucaaaggcacagu

SEQ ID NO: 3879781 - RNA, 12 nt, Human
agcucaaaugaa

SEQ ID NO: 3879782 - RNA, 17 nt, Human
agcucaaaugaaaugua

SEQ ID NO: 3879783 - RNA, 23 nt, Human
agcucaacucucuuauugccuca

SEQ ID NO: 3879784 - RNA, 17 nt, Human
agcucaaugagcauguu

SEQ ID NO: 3879785 - RNA, 15 nt, Human
agcucacaaggcagc

SEQ ID NO: 3879786 - RNA, 16 nt, Human
agcucacaaggcagca

SEQ ID NO: 3879787 - RNA, 19 nt, Human
agcucacaaggcagcaagg

SEQ ID NO: 3879788 - RNA, 22 nt, Human
agcucaccagccccagugccca

SEQ ID NO: 3879789 - RNA, 21 nt, Human
agcucaccccccacacucacu

SEQ ID NO: 3879790 - RNA, 13 nt, Human
agcucaccccugg

SEQ ID NO: 3879791 - RNA, 19 nt, Human
agcucacugcaaccuccac

SEQ ID NO: 3879792 - RNA, 23 nt, Human
agcucacuucugggcuucaucug

SEQ ID NO: 3879793 - RNA, 19 nt, Human
agcucagaaaauaucccuc

SEQ ID NO: 3879794 - RNA, 14 nt, Human
agcucagaacccag

SEQ ID NO: 3879795 - RNA, 16 nt, Human
agcucagaacccaggg

SEQ ID NO: 3879796 - RNA, 18 nt, Human
agcucagaacccagggcu

SEQ ID NO: 3879797 - RNA, 19 nt, Human
agcucagaacccagggcuc

SEQ ID NO: 3879798 - RNA, 19 nt, Human
agcucagaaggcucuucug

SEQ ID NO: 3879799 - RNA, 15 nt, Human
agcucagacccccac

SEQ ID NO: 3879800 - RNA, 16 nt, Human
agcucagacccccacu

SEQ ID NO: 3879801 - RNA, 20 nt, Human
agcucagacccccacucuca

SEQ ID NO: 3879802 - RNA, 12 nt, Human
agcucagagagg

SEQ ID NO: 3879803 - RNA, 21 nt, Human
agcucagagagggcaggcaug

SEQ ID NO: 3879804 - RNA, 20 nt, Human
agcucagcacugccugcucc

SEQ ID NO: 3879805 - RNA, 21 nt, Human
agcucagcacugccugcuccc

SEQ ID NO: 3879806 - RNA, 23 nt, Human
agcucagcacugccugcucccau

SEQ ID NO: 3879807 - RNA, 16 nt, Human
agcucagcauuuccac

SEQ ID NO: 3879808 - RNA, 11 nt, Human
agcucagccca

SEQ ID NO: 3879809 - RNA, 21 nt, Human
agcucagcccaccccccucau

SEQ ID NO: 3879810 - RNA, 18 nt, Human
agcucagccccagcccag

SEQ ID NO: 3879811 - RNA, 17 nt, Human
agcucagcgccagccug

SEQ ID NO: 3879812 - RNA, 21 nt, Human
agcucagcuacugauuuuugu

SEQ ID NO: 3879813 - RNA, 18 nt, Human
agcauuuguguugaagag

SEQ ID NO: 3879814 - RNA, 14 nt, Human
agcauuuguuucua

SEQ ID NO: 3879815 - RNA, 19 nt, Human
agcauuuguuucuacuuug

SEQ ID NO: 3879816 - RNA, 19 nt, Human
agcauuuuaaacaaaauag

SEQ ID NO: 3879817 - RNA, 23 nt, Human
agcauuuuagcaauuuauacaau

SEQ ID NO: 3879818 - RNA, 13 nt, Human
agcauuuuauaaa

SEQ ID NO: 3879819 - RNA, 15 nt, Human
agcauuuuauaaauc

SEQ ID NO: 3879820 - RNA, 20 nt, Human
agcauuuuccagcacuuugc

SEQ ID NO: 3879821 - RNA, 13 nt, Human
agcauuuuccucu

SEQ ID NO: 3879822 - RNA, 14 nt, Human
agcauuuuccucug

SEQ ID NO: 3879823 - RNA, 21 nt, Human
agcauuuuccucugcuuugaa

SEQ ID NO: 3879824 - RNA, 19 nt, Human
agcauuuucugcaucucca

SEQ ID NO: 3879825 - RNA, 14 nt, Human
agcauuuuggcgcu

SEQ ID NO: 3879826 - RNA, 16 nt, Human
agcauuuuuauuucag

SEQ ID NO: 3879827 - RNA, 17 nt, Human
agcauuuuuauuucaga

SEQ ID NO: 3879828 - RNA, 12 nt, Human
agcauuuuucaa

SEQ ID NO: 3879829 - RNA, 22 nt, Human
agcauuuuucaauauauugaac

SEQ ID NO: 3879830 - RNA, 16 nt, Human
agcauuuuugauuuau

SEQ ID NO: 3879831 - RNA, 14 nt, Human
agccaaaaauagcu

SEQ ID NO: 3879832 - RNA, 22 nt, Human
agccaaaaauagcuaaauaccu

SEQ ID NO: 3879833 - RNA, 16 nt, Human
agccaaaacagaucca

SEQ ID NO: 3879834 - RNA, 22 nt, Human
agccaaaauguaggcuuaguuu

SEQ ID NO: 3879835 - RNA, 18 nt, Human
agccaaaauuaagguguu

SEQ ID NO: 3879836 - RNA, 12 nt, Human
agccaaaccagg

SEQ ID NO: 3879837 - RNA, 18 nt, Human
agccaaacccaugaggca

SEQ ID NO: 3879838 - RNA, 15 nt, Human
agccaaacucugcca

SEQ ID NO: 3879839 - RNA, 13 nt, Human
agccaaagaaaaa

SEQ ID NO: 3879840 - RNA, 14 nt, Human
agccaaagaaauga

SEQ ID NO: 3879841 - RNA, 19 nt, Human
agccaaagaaaugaacauu

SEQ ID NO: 3879842 - RNA, 16 nt, Human
agccaaagcuaggccu

SEQ ID NO: 3879843 - RNA, 23 nt, Human
agccaaagcuaggccuggccaga

SEQ ID NO: 3879844 - RNA, 19 nt, Human
agccaaagggaaauaugcu

SEQ ID NO: 3879845 - RNA, 17 nt, Human
agccaaaucaaaauaug

SEQ ID NO: 3879846 - RNA, 15 nt, Human
agccaaaugguuuaa

SEQ ID NO: 3879847 - RNA, 12 nt, Human
agccaaauuuaa

SEQ ID NO: 3879848 - RNA, 12 nt, Human
agccaacagcua

SEQ ID NO: 3879849 - RNA, 19 nt, Human
agccaacagcuacaacagc

SEQ ID NO: 3879850 - RNA, 23 nt, Human
agccaacagguggcaggaccagg

SEQ ID NO: 3879851 - RNA, 21 nt, Human
agccaacagucaaaacagaga

SEQ ID NO: 3879852 - RNA, 16 nt, Human
agccaaccuaagcaag

SEQ ID NO: 3879853 - RNA, 17 nt, Human
agccaacuagccccugg

SEQ ID NO: 3879854 - RNA, 17 nt, Human
agccaacuaugauuauu

SEQ ID NO: 3879855 - RNA, 20 nt, Human
agccaacuaugauuauuaac

SEQ ID NO: 3879856 - RNA, 13 nt, Human
agccaacucuggg

SEQ ID NO: 3879857 - RNA, 14 nt, Human
agccaacuuggcuu

SEQ ID NO: 3879858 - RNA, 20 nt, Human
agccaacuuguaaauacacc

SEQ ID NO: 3879859 - RNA, 16 nt, Human
agccaagaaagaugua

SEQ ID NO: 3879860 - RNA, 17 nt, Human
agccaagaaagauguau

SEQ ID NO: 3879861 - RNA, 21 nt, Human
agccaagcacagugguggcag

SEQ ID NO: 3879862 - RNA, 16 nt, Human
agccaagcagccaagc

SEQ ID NO: 3879863 - RNA, 15 nt, Human
agccaagcuccuugg

SEQ ID NO: 3879864 - RNA, 23 nt, Human
agccaagcuccuugggaggcccc

SEQ ID NO: 3879865 - RNA, 21 nt, Human
agccaggaagaucccccagaa

SEQ ID NO: 3879866 - RNA, 22 nt, Human
agccaggaagaucccccagaaa

SEQ ID NO: 3879867 - RNA, 19 nt, Human
agccaggaauuucccagga

SEQ ID NO: 3879868 - RNA, 20 nt, Human
agccaggaauuucccaggac

SEQ ID NO: 3879869 - RNA, 15 nt, Human
agccaggagaagcuc

SEQ ID NO: 3879870 - RNA, 22 nt, Human
agccaggagcaaauguuucugc

SEQ ID NO: 3879871 - RNA, 14 nt, Human
agccaggagcuguc

SEQ ID NO: 3879872 - RNA, 15 nt, Human
agccaggagcuguca

SEQ ID NO: 3879873 - RNA, 17 nt, Human
agccaggagcugucacc

SEQ ID NO: 3879874 - RNA, 19 nt, Human
agccaggaggccugcuagg

SEQ ID NO: 3879875 - RNA, 14 nt, Human
agccaggaucaugg

SEQ ID NO: 3879876 - RNA, 18 nt, Human
agccaggaucauggugua

SEQ ID NO: 3879877 - RNA, 17 nt, Human
agccaggcacacacugu

SEQ ID NO: 3879878 - RNA, 18 nt, Human
agccaggcacacacugug

SEQ ID NO: 3879879 - RNA, 22 nt, Human
agccaggccugggucugugucu

SEQ ID NO: 3879880 - RNA, 15 nt, Human
agccaggcgggcuca

SEQ ID NO: 3879881 - RNA, 21 nt, Human
agccaggcuagcuggagccug

SEQ ID NO: 3879882 - RNA, 15 nt, Human
agccaggcucacuca

SEQ ID NO: 3879883 - RNA, 13 nt, Human
agccagggcucaa

SEQ ID NO: 3879884 - RNA, 14 nt, Human
agccagggcugcua

SEQ ID NO: 3879885 - RNA, 20 nt, Human
agccagggcuuaccuguaca

SEQ ID NO: 3879886 - RNA, 18 nt, Human
agccagggggacuagccc

SEQ ID NO: 3879887 - RNA, 23 nt, Human
agccagggggacuagccccugug

SEQ ID NO: 3879888 - RNA, 16 nt, Human
agccagggucucuccc

SEQ ID NO: 3879889 - RNA, 20 nt, Human
agccagggucucucccucag

SEQ ID NO: 3879890 - RNA, 22 nt, Human
agccagggucucucccucaggu

SEQ ID NO: 3879891 - RNA, 22 nt, Human
agccaggguguggcccugccau

SEQ ID NO: 3879892 - RNA, 18 nt, Human
agccagguaaugagggac

SEQ ID NO: 3879893 - RNA, 12 nt, Human
agccaggucccu

SEQ ID NO: 3879894 - RNA, 14 nt, Human
agccaggugccuug

SEQ ID NO: 3879895 - RNA, 18 nt, Human
agccagguuccacagagg

SEQ ID NO: 3879896 - RNA, 21 nt, Human
agccaguaaaugggggugcau

SEQ ID NO: 3879897 - RNA, 14 nt, Human
agccagugaacaua

SEQ ID NO: 3879898 - RNA, 13 nt, Human
agccagugacucc

SEQ ID NO: 3879899 - RNA, 16 nt, Human
agccagugacuccagg

SEQ ID NO: 3879900 - RNA, 17 nt, Human
agccagugacuccagga

SEQ ID NO: 3879901 - RNA, 19 nt, Human
agccagugacuccaggaga

SEQ ID NO: 3879902 - RNA, 21 nt, Human
agccagugacuccaggagagg

SEQ ID NO: 3879903 - RNA, 17 nt, Human
agccagugcccugagcc

SEQ ID NO: 3879904 - RNA, 23 nt, Human
agccagugcccugagccaggguc

SEQ ID NO: 3879905 - RNA, 16 nt, Human
agccaguguugccuaa

SEQ ID NO: 3879906 - RNA, 19 nt, Human
agccaguucaguaccugga

SEQ ID NO: 3879907 - RNA, 21 nt, Human
agccaguucaguaccuggagg

SEQ ID NO: 3879908 - RNA, 22 nt, Human
agccaguuuggguaaaauacuu

SEQ ID NO: 3879909 - RNA, 16 nt, Human
agccauacauaaaaga

SEQ ID NO: 3879910 - RNA, 23 nt, Human
agccauacauaaaagaaauaaac

SEQ ID NO: 3879911 - RNA, 16 nt, Human
agccauacuuaucucu

SEQ ID NO: 3879912 - RNA, 16 nt, Human
agccauauuuguaaaa

SEQ ID NO: 3879913 - RNA, 16 nt, Human
agccaucaaaaugcuu

SEQ ID NO: 3879914 - RNA, 21 nt, Human
agccaucaccucagauggcag

SEQ ID NO: 3879915 - RNA, 12 nt, Human
agccaucaugua

SEQ ID NO: 3879916 - RNA, 18 nt, Human
agccaucccgucuucucc

SEQ ID NO: 3879917 - RNA, 15 nt, Human
agccaucugcccagg

SEQ ID NO: 3879918 - RNA, 16 nt, Human
agccaucugcccaggg

SEQ ID NO: 3879919 - RNA, 17 nt, Human
agccaucuugguaaauu

SEQ ID NO: 3879920 - RNA, 14 nt, Human
agccaugagaaugu

SEQ ID NO: 3879921 - RNA, 15 nt, Human
agccaugcugggaag

SEQ ID NO: 3879922 - RNA, 13 nt, Human
agccaugggacca

SEQ ID NO: 3879923 - RNA, 15 nt, Human
agccaugggaccaaa

SEQ ID NO: 3879924 - RNA, 16 nt, Human
agccaugggaccaaac

SEQ ID NO: 3879925 - RNA, 23 nt, Human
agccaugggcacaaagggcccag

SEQ ID NO: 3879926 - RNA, 18 nt, Human
agccauggguagccuggg

SEQ ID NO: 3879927 - RNA, 20 nt, Human
agccauguacagacagagaa

SEQ ID NO: 3879928 - RNA, 15 nt, Human
agccaugucugcauu

SEQ ID NO: 3879929 - RNA, 17 nt, Human
agccaugucuucucccu

SEQ ID NO: 3879930 - RNA, 17 nt, Human
agccauguuaacaugac

SEQ ID NO: 3879931 - RNA, 18 nt, Human
agccauguuuaagauuua

SEQ ID NO: 3879932 - RNA, 14 nt, Human
agccauguuuauua

SEQ ID NO: 3879933 - RNA, 15 nt, Human
agccauguuucacaa

SEQ ID NO: 3879934 - RNA, 12 nt, Human
agccauuccugg

SEQ ID NO: 3879935 - RNA, 20 nt, Human
agccauuccugguacccagc

SEQ ID NO: 3879936 - RNA, 22 nt, Human
agccauuggcuauuuaaaacuu

SEQ ID NO: 3879937 - RNA, 17 nt, Human
agccauugucuucggaa

SEQ ID NO: 3879938 - RNA, 18 nt, Human
agccauuguuggcuuucc

SEQ ID NO: 3879939 - RNA, 17 nt, Human
agccauuugucccaagu

SEQ ID NO: 3879940 - RNA, 18 nt, Human
agccauuugucccaagug

SEQ ID NO: 3879941 - RNA, 17 nt, Human
agccauuuguuggggca

SEQ ID NO: 3879942 - RNA, 18 nt, Human
agccauuuguuggggcag

SEQ ID NO: 3879943 - RNA, 14 nt, Human
agccauuuugugaa

SEQ ID NO: 3879944 - RNA, 16 nt, Human
agccauuuugugaaug

SEQ ID NO: 3879945 - RNA, 20 nt, Human
agccauuuuucaaagcaauu

SEQ ID NO: 3879946 - RNA, 20 nt, Human
agcccaaaccaccagaagcc

SEQ ID NO: 3879947 - RNA, 13 nt, Human
agcccaaagaagg

SEQ ID NO: 3879948 - RNA, 16 nt, Human
agcccaaagaaggaaa

SEQ ID NO: 3879949 - RNA, 23 nt, Human
agcccaacagacaccaucuuuug

SEQ ID NO: 3879950 - RNA, 21 nt, Human
agcccaacgggaagcaaccuc

SEQ ID NO: 3879951 - RNA, 14 nt, Human
agcccaagcuuccc

SEQ ID NO: 3879952 - RNA, 21 nt, Human
agcccaagggaucugguccua

SEQ ID NO: 3879953 - RNA, 16 nt, Human
agcccaauauuauaau

SEQ ID NO: 3879954 - RNA, 21 nt, Human
agcccaauccagguacgcaca

SEQ ID NO: 3879955 - RNA, 22 nt, Human
agcccaauccagguacgcacag

SEQ ID NO: 3879956 - RNA, 16 nt, Human
agcccacaaagccuua

SEQ ID NO: 3879957 - RNA, 17 nt, Human
agcccacaaagccuuau

SEQ ID NO: 3879958 - RNA, 12 nt, Human
agcccacagcac

SEQ ID NO: 3879959 - RNA, 23 nt, Human
agcccacauuggauucaucagca

SEQ ID NO: 3879960 - RNA, 22 nt, Human
agcccaccauuuggcaucccug

SEQ ID NO: 3879961 - RNA, 13 nt, Human
agcccaccccccu

SEQ ID NO: 3879962 - RNA, 15 nt, Human
agcccacccuccugu

SEQ ID NO: 3879963 - RNA, 16 nt, Human
agcccacccuccuguc

SEQ ID NO: 3879964 - RNA, 17 nt, Human
agcccacccuccugucu

SEQ ID NO: 3879965 - RNA, 18 nt, Human
agcccacccuccugucuu

SEQ ID NO: 3879966 - RNA, 12 nt, Human
agcccacccugc

SEQ ID NO: 3879967 - RNA, 14 nt, Human
agcccacccugcug

SEQ ID NO: 3879968 - RNA, 19 nt, Human
agcccacccugcugcuggu

SEQ ID NO: 3879969 - RNA, 13 nt, Human
agcccaccuuggc

SEQ ID NO: 3879970 - RNA, 14 nt, Human
agcccaccuuggcu

SEQ ID NO: 3879971 - RNA, 16 nt, Human
agcccaccuuggcuca

SEQ ID NO: 3879972 - RNA, 15 nt, Human
agcugugacccucaa

SEQ ID NO: 3879973 - RNA, 15 nt, Human
agcugugaccugcug

SEQ ID NO: 3879974 - RNA, 17 nt, Human
agcugugaccugcugag

SEQ ID NO: 3879975 - RNA, 19 nt, Human
agcugugacuucuauuuua

SEQ ID NO: 3879976 - RNA, 21 nt, Human
agcugugagacagugggaaau

SEQ ID NO: 3879977 - RNA, 15 nt, Human
agcugugcacaaagu

SEQ ID NO: 3879978 - RNA, 19 nt, Human
agcugugcagguggggaga

SEQ ID NO: 3879979 - RNA, 22 nt, Human
agcugugccacccugggcucug

SEQ ID NO: 3879980 - RNA, 22 nt, Human
agcuguggcagaguuacaguuc

SEQ ID NO: 3879981 - RNA, 22 nt, Human
agcugugggcaaaagaguguaa

SEQ ID NO: 3879982 - RNA, 21 nt, Human
agcuguggguacagagagguc

SEQ ID NO: 3879983 - RNA, 22 nt, Human
agcuguggucaaggcuacagau

SEQ ID NO: 3879984 - RNA, 15 nt, Human
agcugugguuuucuu

SEQ ID NO: 3879985 - RNA, 15 nt, Human
agcuguguccuugca

SEQ ID NO: 3879986 - RNA, 13 nt, Human
agcugugugaaau

SEQ ID NO: 3879987 - RNA, 16 nt, Human
agcuguguggcagucu

SEQ ID NO: 3879988 - RNA, 14 nt, Human
agcuguguuauuau

SEQ ID NO: 3879989 - RNA, 23 nt, Human
agcuguguuguugcuucuuguga

SEQ ID NO: 3879990 - RNA, 11 nt, Human
agcuguguuua

SEQ ID NO: 3879991 - RNA, 15 nt, Human
agcuguuaaacuguu

SEQ ID NO: 3879992 - RNA, 22 nt, Human
agcuguuaaacuguuagcacug

SEQ ID NO: 3879993 - RNA, 16 nt, Human
agcuguuaccauucac

SEQ ID NO: 3879994 - RNA, 17 nt, Human
agcuguuaccauucaca

SEQ ID NO: 3879995 - RNA, 18 nt, Human
agcuguucugucuuccca

SEQ ID NO: 3879996 - RNA, 22 nt, Human
agcuguugaagucucaggaguc

SEQ ID NO: 3879997 - RNA, 20 nt, Human
agcuguugacucuaguacug

SEQ ID NO: 3879998 - RNA, 13 nt, Human
agcuguugagcug

SEQ ID NO: 3879999 - RNA, 15 nt, Human
agcuguugagcuguu

SEQ ID NO: 3880000 - RNA, 17 nt, Human
agcuguugagcuguuuu

SEQ ID NO: 3880001 - RNA, 17 nt, Human
agcuguugaugggauga

SEQ ID NO: 3880002 - RNA, 16 nt, Human
agcuguugucucuucu

SEQ ID NO: 3880003 - RNA, 20 nt, Human
agcuguugucucuucuccuu

SEQ ID NO: 3880004 - RNA, 16 nt, Human
agcuguuuacuaggga

SEQ ID NO: 3880005 - RNA, 22 nt, Human
agcuguuuacuagggaucccuc

SEQ ID NO: 3880006 - RNA, 19 nt, Human
agcuguuuauuuuauauua

SEQ ID NO: 3880007 - RNA, 14 nt, Human
agcuguuuccauag

SEQ ID NO: 3880008 - RNA, 20 nt, Human
agcuguuugguuuuaaaaua

SEQ ID NO: 3880009 - RNA, 13 nt, Human
agcuguuugucau

SEQ ID NO: 3880010 - RNA, 14 nt, Human
agcuguuuucuucu

SEQ ID NO: 3880011 - RNA, 12 nt, Human
agcuuaaaaaaa

SEQ ID NO: 3880012 - RNA, 13 nt, Human
agcuuaaaacuuu

SEQ ID NO: 3880013 - RNA, 14 nt, Human
agcuuaaaacuuug

SEQ ID NO: 3880014 - RNA, 20 nt, Human
agcuuaaaauaaacaguugu

SEQ ID NO: 3880015 - RNA, 20 nt, Human
agcuuaaaggggcuagagug

SEQ ID NO: 3880016 - RNA, 22 nt, Human
agcuuacaaauacuaaaaagaa

SEQ ID NO: 3880017 - RNA, 15 nt, Human
agcuuacaagccagc

SEQ ID NO: 3880018 - RNA, 21 nt, Human
agcuuacaaucgcaaaucaaa

SEQ ID NO: 3880019 - RNA, 17 nt, Human
agcuuacauaguuuuaa

SEQ ID NO: 3880020 - RNA, 16 nt, Human
agcuuacaugagaaca

SEQ ID NO: 3880021 - RNA, 20 nt, Human
agcuuaccagaagcuuccau

SEQ ID NO: 3880022 - RNA, 22 nt, Human
agcuuaccagaagcuuccauag

SEQ ID NO: 3880023 - RNA, 16 nt, Human
agcuuagaccucagcc

SEQ ID NO: 3880024 - RNA, 20 nt, Human
agcuuagaccucagccugug

SEQ ID NO: 3880025 - RNA, 15 nt, Human
agcuuagacuaaggc

SEQ ID NO: 3880026 - RNA, 13 nt, Human
agcuuagauuuca

SEQ ID NO: 3880027 - RNA, 16 nt, Human
agcuuaucaauuuguc

SEQ ID NO: 3880028 - RNA, 23 nt, Human
agcuuaucaauuugucauuuuga

SEQ ID NO: 3880029 - RNA, 13 nt, Human
agcuuaucucuuu

SEQ ID NO: 3880030 - RNA, 16 nt, Human
agcuuaugaaaagaau

SEQ ID NO: 3880031 - RNA, 20 nt, Human
agcuuauguuaacugacaag

SEQ ID NO: 3880032 - RNA, 17 nt, Human
agcuuauuaaugcuaag

SEQ ID NO: 3880033 - RNA, 19 nt, Human
agcuuauuaaugcuaaggg

SEQ ID NO: 3880034 - RNA, 22 nt, Human
agcuuauucaucuguuuuucuu

SEQ ID NO: 3880035 - RNA, 22 nt, Human
agcuuauuguuucucugaaagu

SEQ ID NO: 3880036 - RNA, 12 nt, Human
agcuuauuuaau

SEQ ID NO: 3880037 - RNA, 21 nt, Human
agcuucaagucugugccugga

SEQ ID NO: 3880038 - RNA, 20 nt, Human
agcuucaccccaaucccagc

SEQ ID NO: 3880039 - RNA, 23 nt, Human
agcuucacuucugacucuucccc

SEQ ID NO: 3880040 - RNA, 13 nt, Human
agcuucagguuau

SEQ ID NO: 3880041 - RNA, 15 nt, Human
agcuucaguugcuug

SEQ ID NO: 3880042 - RNA, 19 nt, Human
agcuucaguuguuuucccg

SEQ ID NO: 3880043 - RNA, 16 nt, Human
agcuucauacuucaug

SEQ ID NO: 3880044 - RNA, 22 nt, Human
agcuucaugccuuuguaaguua

SEQ ID NO: 3880045 - RNA, 18 nt, Human
agcuucauuuccuguguc

SEQ ID NO: 3880046 - RNA, 18 nt, Human
agcuuccaauuuuccuuc

SEQ ID NO: 3880047 - RNA, 14 nt, Human
agcuuccagcagga

SEQ ID NO: 3880048 - RNA, 16 nt, Human
agcuuccagcaggagg

SEQ ID NO: 3880049 - RNA, 17 nt, Human
agcuuccagcaggaggg

SEQ ID NO: 3880050 - RNA, 15 nt, Human
agcuuccagcucuaa

SEQ ID NO: 3880051 - RNA, 21 nt, Human
agcuuccaggaaaaaggacag

SEQ ID NO: 3880052 - RNA, 20 nt, Human
agcuuccaggcugcauagaa

SEQ ID NO: 3880053 - RNA, 21 nt, Human
agcuuccaggcugcauagaag

SEQ ID NO: 3880054 - RNA, 17 nt, Human
agcuuccauagcugcug

SEQ ID NO: 3880055 - RNA, 23 nt, Human
agcuuccauagcugcugcccuag

SEQ ID NO: 3880056 - RNA, 22 nt, Human
agcuuccaugauucuauuuaua

SEQ ID NO: 3880057 - RNA, 20 nt, Human
agcuuccauuuuaauuuuaa

SEQ ID NO: 3880058 - RNA, 18 nt, Human
agcuuccccaguagcugg

SEQ ID NO: 3880059 - RNA, 22 nt, Human
agcuucccccccaccacaggcc

SEQ ID NO: 3880060 - RNA, 13 nt, Human
agcuucccuccau

SEQ ID NO: 3880061 - RNA, 16 nt, Human
aggcauuaauguuucu

SEQ ID NO: 3880062 - RNA, 19 nt, Human
aggcauuaauguuucuauc

SEQ ID NO: 3880063 - RNA, 20 nt, Human
aggcauuaauguuucuaucu

SEQ ID NO: 3880064 - RNA, 12 nt, Human
aggcauucaagu

SEQ ID NO: 3880065 - RNA, 13 nt, Human
aggcauuccagcu

SEQ ID NO: 3880066 - RNA, 24 nt, Human
aggcauuccagcuccuccgugcuu

SEQ ID NO: 3880067 - RNA, 18 nt, Human
aggcauuccccaggaggc

SEQ ID NO: 3880068 - RNA, 15 nt, Human
aggcauucuggaccu

SEQ ID NO: 3880069 - RNA, 21 nt, Human
aggcauucuggaccucugggu

SEQ ID NO: 3880070 - RNA, 20 nt, Human
aggcauugccaagggcuuug

SEQ ID NO: 3880071 - RNA, 14 nt, Human
aggcauuguuugag

SEQ ID NO: 3880072 - RNA, 15 nt, Human
aggcauuuaggaacu

SEQ ID NO: 3880073 - RNA, 12 nt, Human
aggcauuuccua

SEQ ID NO: 3880074 - RNA, 18 nt, Human
aggcauuugcaggguccu

SEQ ID NO: 3880075 - RNA, 16 nt, Human
aggcauuugcugaaua

SEQ ID NO: 3880076 - RNA, 20 nt, Human
aggcauuuguaaauauuaaa

SEQ ID NO: 3880077 - RNA, 11 nt, Human
aggcauuuguu

SEQ ID NO: 3880078 - RNA, 18 nt, Human
aggcauuuguuugaacug

SEQ ID NO: 3880079 - RNA, 13 nt, Human
aggccaaaaaaau

SEQ ID NO: 3880080 - RNA, 14 nt, Human
aggccaaaccucug

SEQ ID NO: 3880081 - RNA, 14 nt, Human
aggccaaacugcug

SEQ ID NO: 3880082 - RNA, 15 nt, Human
aggccaaaggaagca

SEQ ID NO: 3880083 - RNA, 19 nt, Human
aggccaaaggaagcacaug

SEQ ID NO: 3880084 - RNA, 17 nt, Human
aggccaaaggcuggugg

SEQ ID NO: 3880085 - RNA, 22 nt, Human
aggccaaaggggaccuggaagg

SEQ ID NO: 3880086 - RNA, 17 nt, Human
aggccaacacugugggu

SEQ ID NO: 3880087 - RNA, 17 nt, Human
aggccaagaaacgucuu

SEQ ID NO: 3880088 - RNA, 19 nt, Human
aggccaagaauauugcaaa

SEQ ID NO: 3880089 - RNA, 20 nt, Human
aggccaagaauauugcaaaa

SEQ ID NO: 3880090 - RNA, 14 nt, Human
aggccaagaaucaa

SEQ ID NO: 3880091 - RNA, 17 nt, Human
aggccaagagcagaggc

SEQ ID NO: 3880092 - RNA, 13 nt, Human
aggccaagagguu

SEQ ID NO: 3880093 - RNA, 22 nt, Human
aggccaaggggagucaccuucc

SEQ ID NO: 3880094 - RNA, 14 nt, Human
aggccaaggugucc

SEQ ID NO: 3880095 - RNA, 22 nt, Human
aggccaagugugauaaauaaac

SEQ ID NO: 3880096 - RNA, 16 nt, Human
aggccaaucagaagcu

SEQ ID NO: 3880097 - RNA, 20 nt, Human
aggccaaucagaagcuaaca

SEQ ID NO: 3880098 - RNA, 17 nt, Human
aggccacaagacccuug

SEQ ID NO: 3880099 - RNA, 18 nt, Human
aggccacaagacccuugu

SEQ ID NO: 3880100 - RNA, 19 nt, Human
aggccacaagacccuugug

SEQ ID NO: 3880101 - RNA, 21 nt, Human
aggccacaccaucuccuuuca

SEQ ID NO: 3880102 - RNA, 22 nt, Human
aggccacaccaucuccuuucag

SEQ ID NO: 3880103 - RNA, 18 nt, Human
aggccacaugagucccag

SEQ ID NO: 3880104 - RNA, 21 nt, Human
aggccacaugggagcagucca

SEQ ID NO: 3880105 - RNA, 19 nt, Human
aggccacauggggcugggc

SEQ ID NO: 3880106 - RNA, 15 nt, Human
aggccacaugucacc

SEQ ID NO: 3880107 - RNA, 22 nt, Human
aggccaccauauucagugcugu

SEQ ID NO: 3880108 - RNA, 20 nt, Human
aggccacccugugcagaagg

SEQ ID NO: 3880109 - RNA, 14 nt, Human
aggccaccucccca

SEQ ID NO: 3880110 - RNA, 13 nt, Human
aggccaccuccua

SEQ ID NO: 3880111 - RNA, 11 nt, Human
aggccaccucu

SEQ ID NO: 3880112 - RNA, 13 nt, Human
aggccaccucucc

SEQ ID NO: 3880113 - RNA, 15 nt, Human
aggccaccucuuccu

SEQ ID NO: 3880114 - RNA, 16 nt, Human
aggccaccugcccccu

SEQ ID NO: 3880115 - RNA, 21 nt, Human
aggccaccugcccccuucucc

SEQ ID NO: 3880116 - RNA, 14 nt, Human
aggccacuccucca

SEQ ID NO: 3880117 - RNA, 17 nt, Human
aggccagaccauggaca

SEQ ID NO: 3880118 - RNA, 18 nt, Human
aggccagaccauggacac

SEQ ID NO: 3880119 - RNA, 16 nt, Human
aggccagaguggccug

SEQ ID NO: 3880120 - RNA, 19 nt, Human
aggccagaguggccuggcc

SEQ ID NO: 3880121 - RNA, 13 nt, Human
aggccagcaacgc

SEQ ID NO: 3880122 - RNA, 14 nt, Human
aggccagcaacgcu

SEQ ID NO: 3880123 - RNA, 17 nt, Human
aggccagcaacgcuugu

SEQ ID NO: 3880124 - RNA, 15 nt, Human
aggccagcaaggugg

SEQ ID NO: 3880125 - RNA, 17 nt, Human
aggccagcaagguggag

SEQ ID NO: 3880126 - RNA, 20 nt, Human
aggccagcaagguggagugg

SEQ ID NO: 3880127 - RNA, 13 nt, Human
aggccagccagug

SEQ ID NO: 3880128 - RNA, 17 nt, Human
aggccagccuccgagag

SEQ ID NO: 3880129 - RNA, 22 nt, Human
aggccagccuccgagagggaga

SEQ ID NO: 3880130 - RNA, 23 nt, Human
aggccagccuccgagagggagag

SEQ ID NO: 3880131 - RNA, 16 nt, Human
aggccagccuggccuc

SEQ ID NO: 3880132 - RNA, 17 nt, Human
aggccagccuggccucc

SEQ ID NO: 3880133 - RNA, 19 nt, Human
aggccagccuggccuccug

SEQ ID NO: 3880134 - RNA, 21 nt, Human
aggccagccuggccuccugcc

SEQ ID NO: 3880135 - RNA, 19 nt, Human
aggccagcugccccagcca

SEQ ID NO: 3880136 - RNA, 12 nt, Human
aggccagcugcu

SEQ ID NO: 3880137 - RNA, 13 nt, Human
aggccagcugcuu

SEQ ID NO: 3880138 - RNA, 23 nt, Human
aggccagcugcuugggcuucauc

SEQ ID NO: 3880139 - RNA, 14 nt, Human
aggccagcuggcag

SEQ ID NO: 3880140 - RNA, 20 nt, Human
aggccagcuggcagcagagu

SEQ ID NO: 3880141 - RNA, 23 nt, Human
aggccagcugugguuuucuuuug

SEQ ID NO: 3880142 - RNA, 19 nt, Human
aggccaggacucugcagcc

SEQ ID NO: 3880143 - RNA, 23 nt, Human
aggccaggacucugcagccucag

SEQ ID NO: 3880144 - RNA, 16 nt, Human
aggccaggccaccagg

SEQ ID NO: 3880145 - RNA, 17 nt, Human
aggccaggcccucugcc

SEQ ID NO: 3880146 - RNA, 11 nt, Human
aggccaggcuc

SEQ ID NO: 3880147 - RNA, 12 nt, Human
aggccaggcucc

SEQ ID NO: 3880148 - RNA, 13 nt, Human
aggccaggggcuu

SEQ ID NO: 3880149 - RNA, 16 nt, Human
aggccaggggcuuuug

SEQ ID NO: 3880150 - RNA, 23 nt, Human
aggccagggggccagucccugag

SEQ ID NO: 3880151 - RNA, 20 nt, Human
aggccagggucacugaaggc

SEQ ID NO: 3880152 - RNA, 16 nt, Human
aggccagguccagaga

SEQ ID NO: 3880153 - RNA, 17 nt, Human
aggccagguccagagag

SEQ ID NO: 3880154 - RNA, 18 nt, Human
aggccaguaguucucaaa

SEQ ID NO: 3880155 - RNA, 14 nt, Human
aggccaucuggaga

SEQ ID NO: 3880156 - RNA, 21 nt, Human
aggccaucuggagagcccaga

SEQ ID NO: 3880157 - RNA, 21 nt, Human
aggccaucugggcuccuccag

SEQ ID NO: 3880158 - RNA, 18 nt, Human
aggccaucuuccaggugg

SEQ ID NO: 3880159 - RNA, 13 nt, Human
aggccaugaaaaa

SEQ ID NO: 3880160 - RNA, 21 nt, Human
aggccaugauucgcccaaagc

SEQ ID NO: 3880161 - RNA, 17 nt, Human
aggccauggacucuguc

SEQ ID NO: 3880162 - RNA, 21 nt, Human
aggccauggacucuguccuga

SEQ ID NO: 3880163 - RNA, 16 nt, Human
aggccauggagagcug

SEQ ID NO: 3880164 - RNA, 18 nt, Human
aggccauggagagcugga

SEQ ID NO: 3880165 - RNA, 20 nt, Human
aggccaugugcauaguuucu

SEQ ID NO: 3880166 - RNA, 13 nt, Human
aggccauuauugu

SEQ ID NO: 3880167 - RNA, 18 nt, Human
aggccauucuuucccaac

SEQ ID NO: 3880168 - RNA, 14 nt, Human
aggccauugugaac

SEQ ID NO: 3880169 - RNA, 17 nt, Human
aggccauugugaaccaa

SEQ ID NO: 3880170 - RNA, 12 nt, Human
aggcccaaagcc

SEQ ID NO: 3880171 - RNA, 22 nt, Human
aggcccaaauuaucaagcuaau

SEQ ID NO: 3880172 - RNA, 18 nt, Human
aggcccaaccaccagaug

SEQ ID NO: 3880173 - RNA, 14 nt, Human
aggcccaacuguga

SEQ ID NO: 3880174 - RNA, 12 nt, Human
aggcccaagaga

SEQ ID NO: 3880175 - RNA, 17 nt, Human
aggcccaaggcucccgg

SEQ ID NO: 3880176 - RNA, 13 nt, Human
aggcccacacaca

SEQ ID NO: 3880177 - RNA, 15 nt, Human
aggcccacacacagg

SEQ ID NO: 3880178 - RNA, 15 nt, Human
aggcccacccugcuu

SEQ ID NO: 3880179 - RNA, 23 nt, Human
aggcccacccugcuuggcccagg

SEQ ID NO: 3880180 - RNA, 22 nt, Human
aggcccaccuaccuucaaagcu

SEQ ID NO: 3880181 - RNA, 20 nt, Human
aggcccagagagaagagccc

SEQ ID NO: 3880182 - RNA, 22 nt, Human
aggcccagagagaagagcccca

SEQ ID NO: 3880183 - RNA, 23 nt, Human
aggcccagagagaagagccccac

SEQ ID NO: 3880184 - RNA, 13 nt, Human
aggcccagagggc

SEQ ID NO: 3880185 - RNA, 13 nt, Human
aggcccagcauug

SEQ ID NO: 3880186 - RNA, 21 nt, Human
aggcccagcauugcugguucu

SEQ ID NO: 3880187 - RNA, 15 nt, Human
aggcccagccccuag

SEQ ID NO: 3880188 - RNA, 12 nt, Human
aggcccagcuga

SEQ ID NO: 3880189 - RNA, 13 nt, Human
aggcccaggcugg

SEQ ID NO: 3880190 - RNA, 13 nt, Human
aggcccagugaga

SEQ ID NO: 3880191 - RNA, 13 nt, Human
aggcccauagcag

SEQ ID NO: 3880192 - RNA, 18 nt, Human
aggcccaugggaggcugg

SEQ ID NO: 3880193 - RNA, 22 nt, Human
aggccccaaaggaaaaagcaca

SEQ ID NO: 3880194 - RNA, 21 nt, Human
aggccccaagggguuucuguu

SEQ ID NO: 3880195 - RNA, 13 nt, Human
aggccccacugau

SEQ ID NO: 3880196 - RNA, 19 nt, Human
aggccccacugaugcuguu

SEQ ID NO: 3880197 - RNA, 15 nt, Human
aggccccacugggga

SEQ ID NO: 3880198 - RNA, 13 nt, Human
aggccccagagac

SEQ ID NO: 3880199 - RNA, 20 nt, Human
aggccccagagacucagagg

SEQ ID NO: 3880200 - RNA, 12 nt, Human
aggccccagccu

SEQ ID NO: 3880201 - RNA, 16 nt, Human
aggccccaggaagccg

SEQ ID NO: 3880202 - RNA, 16 nt, Human
aggcccccaccacaca

SEQ ID NO: 3880203 - RNA, 17 nt, Human
aggcccccacuugccuc

SEQ ID NO: 3880204 - RNA, 14 nt, Human
aggcccccagccca

SEQ ID NO: 3880205 - RNA, 18 nt, Human
aggcccccagcccagggc

SEQ ID NO: 3880206 - RNA, 18 nt, Human
aggcccccgccuuggccu

SEQ ID NO: 3880207 - RNA, 17 nt, Human
aguguuuauuuuucaua

SEQ ID NO: 3880208 - RNA, 21 nt, Human
aguguuuauuuuucauauugu

SEQ ID NO: 3880209 - RNA, 13 nt, Human
aguguuucagcua

SEQ ID NO: 3880210 - RNA, 20 nt, Human
aguguuucagcuaagggaag

SEQ ID NO: 3880211 - RNA, 21 nt, Human
aguguuucuaauaaacuugga

SEQ ID NO: 3880212 - RNA, 14 nt, Human
aguguuucugugca

SEQ ID NO: 3880213 - RNA, 17 nt, Human
aguguuucugugcaugg

SEQ ID NO: 3880214 - RNA, 21 nt, Human
aguguuucuguuauuaacaaa

SEQ ID NO: 3880215 - RNA, 11 nt, Human
aguguuucuuu

SEQ ID NO: 3880216 - RNA, 12 nt, Human
aguguuugcugc

SEQ ID NO: 3880217 - RNA, 20 nt, Human
aguguuuggugcucauuuaa

SEQ ID NO: 3880218 - RNA, 14 nt, Human
aguguuuuaaauuc

SEQ ID NO: 3880219 - RNA, 14 nt, Human
aguguuuucagagc

SEQ ID NO: 3880220 - RNA, 14 nt, Human
aguguuuucucuga

SEQ ID NO: 3880221 - RNA, 13 nt, Human
aguguuuucuggg

SEQ ID NO: 3880222 - RNA, 19 nt, Human
aguguuuuggacuccaucu

SEQ ID NO: 3880223 - RNA, 22 nt, Human
aguguuuuguaccagugaauuu

SEQ ID NO: 3880224 - RNA, 23 nt, Human
aguguuuuguaccagugaauuuu

SEQ ID NO: 3880225 - RNA, 14 nt, Human
aguguuuuuguaaa

SEQ ID NO: 3880226 - RNA, 20 nt, Human
aguguuuuuguaaagugugg

SEQ ID NO: 3880227 - RNA, 15 nt, Human
aguguuuuugugaau

SEQ ID NO: 3880228 - RNA, 16 nt, Human
aguguuuuugugaauu

SEQ ID NO: 3880229 - RNA, 19 nt, Human
aguguuuuuuuauuucuac

SEQ ID NO: 3880230 - RNA, 22 nt, Human
aguuaaaaaaaaaaaaaggaaa

SEQ ID NO: 3880231 - RNA, 16 nt, Human
aguuaaaaaaaauaau

SEQ ID NO: 3880232 - RNA, 18 nt, Human
aguuaaaaaaaauaauaa

SEQ ID NO: 3880233 - RNA, 21 nt, Human
aguuaaaagaauguaaaauau

SEQ ID NO: 3880234 - RNA, 13 nt, Human
aguuaaagaaagg

SEQ ID NO: 3880235 - RNA, 18 nt, Human
aguuaaagaaaggaaaag

SEQ ID NO: 3880236 - RNA, 21 nt, Human
aguuaaagaagacauuugcca

SEQ ID NO: 3880237 - RNA, 13 nt, Human
aguuaaagggaag

SEQ ID NO: 3880238 - RNA, 17 nt, Human
aguuaaagggaagaaaa

SEQ ID NO: 3880239 - RNA, 18 nt, Human
aguuaaagggaagaaaac

SEQ ID NO: 3880240 - RNA, 23 nt, Human
aguuaaagggaagaaaacacugu

SEQ ID NO: 3880241 - RNA, 12 nt, Human
aguuaaaucuca

SEQ ID NO: 3880242 - RNA, 14 nt, Human
aguuaaauuucugg

SEQ ID NO: 3880243 - RNA, 13 nt, Human
aguuaacaaugau

SEQ ID NO: 3880244 - RNA, 16 nt, Human
aguuaacaaugauaua

SEQ ID NO: 3880245 - RNA, 17 nt, Human
aguuaacaaugauauau

SEQ ID NO: 3880246 - RNA, 18 nt, Human
aguuaacaggcaaacauu

SEQ ID NO: 3880247 - RNA, 15 nt, Human
aguuaacaucaugaa

SEQ ID NO: 3880248 - RNA, 19 nt, Human
aguuaacuauugcauuuau

SEQ ID NO: 3880249 - RNA, 16 nt, Human
aguuaacuauuuuauu

SEQ ID NO: 3880250 - RNA, 20 nt, Human
aguuaagaaaaaaauaauuu

SEQ ID NO: 3880251 - RNA, 12 nt, Human
aguuaagaagcu

SEQ ID NO: 3880252 - RNA, 16 nt, Human
aguuaagaagcuguug

SEQ ID NO: 3880253 - RNA, 16 nt, Human
aguuaagaccuggcag

SEQ ID NO: 3880254 - RNA, 22 nt, Human
aguuaagagaaacuuuauacau

SEQ ID NO: 3880255 - RNA, 16 nt, Human
aguuaagauucuuggu

SEQ ID NO: 3880256 - RNA, 19 nt, Human
aguuaaggugggcccggcc

SEQ ID NO: 3880257 - RNA, 22 nt, Human
aguuaagucuaucugguauuaa

SEQ ID NO: 3880258 - RNA, 20 nt, Human
aguuaauauaucccagaaau

SEQ ID NO: 3880259 - RNA, 14 nt, Human
aguuaaucaacuga

SEQ ID NO: 3880260 - RNA, 16 nt, Human
aguuaaucaacugaaa

SEQ ID NO: 3880261 - RNA, 15 nt, Human
aguuaaucaucaaga

SEQ ID NO: 3880262 - RNA, 16 nt, Human
aguuaaucuugcuuuc

SEQ ID NO: 3880263 - RNA, 16 nt, Human
aguuaaugcuuaagag

SEQ ID NO: 3880264 - RNA, 20 nt, Human
aguuaaugcuuaagagggaa

SEQ ID NO: 3880265 - RNA, 17 nt, Human
aguuaauguauauaaaa

SEQ ID NO: 3880266 - RNA, 15 nt, Human
aguuaauuuuuccaa

SEQ ID NO: 3880267 - RNA, 17 nt, Human
aguuaauuuuuccaacu

SEQ ID NO: 3880268 - RNA, 13 nt, Human
aguuacagaaagu

SEQ ID NO: 3880269 - RNA, 22 nt, Human
aguuacagcgagaggcagagaa

SEQ ID NO: 3880270 - RNA, 13 nt, Human
aguuacagcugug

SEQ ID NO: 3880271 - RNA, 16 nt, Human
aguuacagcugugauu

SEQ ID NO: 3880272 - RNA, 22 nt, Human
aguuacauaauucacucugagu

SEQ ID NO: 3880273 - RNA, 17 nt, Human
aguuaccacacaucuau

SEQ ID NO: 3880274 - RNA, 16 nt, Human
aguuaccagugccuua

SEQ ID NO: 3880275 - RNA, 19 nt, Human
aguuaccauuaaaccaucu

SEQ ID NO: 3880276 - RNA, 13 nt, Human
aguuacccacuga

SEQ ID NO: 3880277 - RNA, 20 nt, Human
aguuaccuggaaucaaauaa

SEQ ID NO: 3880278 - RNA, 17 nt, Human
aguuaccuuauaguuac

SEQ ID NO: 3880279 - RNA, 20 nt, Human
aguuaccuuauaguuacugu

SEQ ID NO: 3880280 - RNA, 16 nt, Human
aguuacuaccuccucu

SEQ ID NO: 3880281 - RNA, 16 nt, Human
aguuacuagguaacuu

SEQ ID NO: 3880282 - RNA, 17 nt, Human
aguuacuagguaacuuc

SEQ ID NO: 3880283 - RNA, 19 nt, Human
aguuacuagguaacuucau

SEQ ID NO: 3880284 - RNA, 12 nt, Human
aguuacucagcc

SEQ ID NO: 3880285 - RNA, 13 nt, Human
aguuacucagccc

SEQ ID NO: 3880286 - RNA, 17 nt, Human
aguuacuccagugccaa

SEQ ID NO: 3880287 - RNA, 21 nt, Human
aguuacucuucaguuaagccu

SEQ ID NO: 3880288 - RNA, 12 nt, Human
aguuacugaaug

SEQ ID NO: 3880289 - RNA, 13 nt, Human
aguuacugaaugc

SEQ ID NO: 3880290 - RNA, 18 nt, Human
aguuacugauucacugca

SEQ ID NO: 3880291 - RNA, 14 nt, Human
aguuacugugcauu

SEQ ID NO: 3880292 - RNA, 16 nt, Human
aguuacuguguaaacu

SEQ ID NO: 3880293 - RNA, 14 nt, Human
aguuacuguguaau

SEQ ID NO: 3880294 - RNA, 16 nt, Human
aguuacuguguaauua

SEQ ID NO: 3880295 - RNA, 17 nt, Human
aguuacuguuauagagg

SEQ ID NO: 3880296 - RNA, 22 nt, Human
aguuacuucacuuuaauucuca

SEQ ID NO: 3880297 - RNA, 13 nt, Human
aguuacuuuagau

SEQ ID NO: 3880298 - RNA, 15 nt, Human
aguuacuuuagaugg

SEQ ID NO: 3880299 - RNA, 21 nt, Human
aguuacuuuccaauucuccuu

SEQ ID NO: 3880300 - RNA, 17 nt, Human
aguuacuuuuccuugca

SEQ ID NO: 3880301 - RNA, 20 nt, Human
aguuacuuuuccuugcauac

SEQ ID NO: 3880302 - RNA, 15 nt, Human
aguuagaacauuugc

SEQ ID NO: 3880303 - RNA, 18 nt, Human
aguuagaauaauaaauau

SEQ ID NO: 3880304 - RNA, 15 nt, Human
aguuagaaucuauuu

SEQ ID NO: 3880305 - RNA, 14 nt, Human
aguuagaauuccuu

SEQ ID NO: 3880306 - RNA, 15 nt, Human
aguuagaauuccuuc

SEQ ID NO: 3880307 - RNA, 21 nt, Human
aguuagaauuccuucagggug

SEQ ID NO: 3880308 - RNA, 12 nt, Human
aguuagacuguu

SEQ ID NO: 3880309 - RNA, 12 nt, Human
aguuagagcuga

SEQ ID NO: 3880310 - RNA, 19 nt, Human
aguuagaggccagccuggc

SEQ ID NO: 3880311 - RNA, 17 nt, Human
aguuagauucacuuuga

SEQ ID NO: 3880312 - RNA, 16 nt, Human
aguuagcaaacuuugu

SEQ ID NO: 3880313 - RNA, 22 nt, Human
aguuagcaaacuuuguauguca

SEQ ID NO: 3880314 - RNA, 15 nt, Human
aguuagccuccacca

SEQ ID NO: 3880315 - RNA, 23 nt, Human
aguuagccuuuaucuaccaacuu

SEQ ID NO: 3880316 - RNA, 18 nt, Human
aguuagcuaauaaaaagc

SEQ ID NO: 3880317 - RNA, 15 nt, Human
aguuaggaaauaaaa

SEQ ID NO: 3880318 - RNA, 20 nt, Human
aguuaggaaauaaaaccuuu

SEQ ID NO: 3880319 - RNA, 21 nt, Human
aguuaggaaauaaaaccuuuc

SEQ ID NO: 3880320 - RNA, 22 nt, Human
aguuaggaaauaaaaccuuuca

SEQ ID NO: 3880321 - RNA, 16 nt, Human
aguuaggauagcauuu

SEQ ID NO: 3880322 - RNA, 18 nt, Human
aguuagguuuaacauaaa

SEQ ID NO: 3880323 - RNA, 23 nt, Human
aguuagguuuaacauaaagguua

SEQ ID NO: 3880324 - RNA, 17 nt, Human
aguuagucuacucuuaa

SEQ ID NO: 3880325 - RNA, 14 nt, Human
aguuaguggaaauc

SEQ ID NO: 3880326 - RNA, 13 nt, Human
aguuaguguagau

SEQ ID NO: 3880327 - RNA, 16 nt, Human
aguuaguuaaguuggg

SEQ ID NO: 3880328 - RNA, 17 nt, Human
aguuaguuccacugaga

SEQ ID NO: 3880329 - RNA, 14 nt, Human
aguuaguuuguaua

SEQ ID NO: 3880330 - RNA, 15 nt, Human
aguuaguuuguauau

SEQ ID NO: 3880331 - RNA, 22 nt, Human
aguuaguuuguauauauuauua

SEQ ID NO: 3880332 - RNA, 18 nt, Human
aguuauaaaauuaaaagu

SEQ ID NO: 3880333 - RNA, 14 nt, Human
aguuauaagaagaa

SEQ ID NO: 3880334 - RNA, 19 nt, Human
aguuauacaguuauaaaau

SEQ ID NO: 3880335 - RNA, 20 nt, Human
aguuauacaguuauaaaauu

SEQ ID NO: 3880336 - RNA, 15 nt, Human
aguuauagaugucua

SEQ ID NO: 3880337 - RNA, 17 nt, Human
aguuauagaugucuagg

SEQ ID NO: 3880338 - RNA, 19 nt, Human
aguuauagaugucuaggua

SEQ ID NO: 3880339 - RNA, 18 nt, Human
aguuauaguuucagauau

SEQ ID NO: 3880340 - RNA, 20 nt, Human
aguuauauaauucacucaag

SEQ ID NO: 3880341 - RNA, 21 nt, Human
aguuauauagguuuuguuugc

SEQ ID NO: 3880342 - RNA, 14 nt, Human
aguuauauuuccua

SEQ ID NO: 3880343 - RNA, 16 nt, Human
aguuauauuuugcagu

SEQ ID NO: 3880344 - RNA, 16 nt, Human
aguuaucaugaauuuu

SEQ ID NO: 3880345 - RNA, 19 nt, Human
aguuaucauguuaguaaua

SEQ ID NO: 3880346 - RNA, 14 nt, Human
aguuaucuaagaau

SEQ ID NO: 3880347 - RNA, 21 nt, Human
aguuaucuaagaauacagcuu

SEQ ID NO: 3880348 - RNA, 18 nt, Human
aguuaucuguucuuuuga

SEQ ID NO: 3880349 - RNA, 18 nt, Human
aguuaucuuugaauaugu

SEQ ID NO: 3880350 - RNA, 23 nt, Human
aguuaugaacacuuaaauuauga

SEQ ID NO: 3880351 - RNA, 14 nt, Human
aguuaugauguaau

SEQ ID NO: 3880352 - RNA, 14 nt, Human
auacuacugaaaca

SEQ ID NO: 3880353 - RNA, 19 nt, Human
auacuauuaaacaugcugu

SEQ ID NO: 3880354 - RNA, 16 nt, Human
auacuauuuaagaugu

SEQ ID NO: 3880355 - RNA, 15 nt, Human
auacucagccugcug

SEQ ID NO: 3880356 - RNA, 19 nt, Human
auacucauaaugugaagug

SEQ ID NO: 3880357 - RNA, 20 nt, Human
auacucauaaugugaagugu

SEQ ID NO: 3880358 - RNA, 19 nt, Human
auacucauuucuaaaagaa

SEQ ID NO: 3880359 - RNA, 22 nt, Human
auacucauuucuaaaagaauau

SEQ ID NO: 3880360 - RNA, 16 nt, Human
auacuccaguguacau

SEQ ID NO: 3880361 - RNA, 17 nt, Human
auacuccaguguacaua

SEQ ID NO: 3880362 - RNA, 23 nt, Human
auacuccaguguacauaguguaa

SEQ ID NO: 3880363 - RNA, 11 nt, Human
auacucccauc

SEQ ID NO: 3880364 - RNA, 12 nt, Human
auacuccuuccc

SEQ ID NO: 3880365 - RNA, 18 nt, Human
auacucuaauucuaacca

SEQ ID NO: 3880366 - RNA, 23 nt, Human
auacucuagaugaaguuuuacau

SEQ ID NO: 3880367 - RNA, 15 nt, Human
auacucugucagaug

SEQ ID NO: 3880368 - RNA, 19 nt, Human
auacucuuaggaagagaaa

SEQ ID NO: 3880369 - RNA, 22 nt, Human
auacucuuaggaagagaaacca

SEQ ID NO: 3880370 - RNA, 18 nt, Human
auacucuuauagacaaca

SEQ ID NO: 3880371 - RNA, 14 nt, Human
auacucuuauaucu

SEQ ID NO: 3880372 - RNA, 22 nt, Human
auacucuuucuguauauacuuu

SEQ ID NO: 3880373 - RNA, 22 nt, Human
auacugaacaucugaguccugg

SEQ ID NO: 3880374 - RNA, 23 nt, Human
auacugaacaucugaguccugga

SEQ ID NO: 3880375 - RNA, 12 nt, Human
auacugaaggaa

SEQ ID NO: 3880376 - RNA, 13 nt, Human
auacugaaggaaa

SEQ ID NO: 3880377 - RNA, 20 nt, Human
auacugaaggaaaaacacaa

SEQ ID NO: 3880378 - RNA, 18 nt, Human
auacugagccaaguauaa

SEQ ID NO: 3880379 - RNA, 22 nt, Human
auacugagggaccaacugggcc

SEQ ID NO: 3880380 - RNA, 22 nt, Human
auacugauggaauuuuuuugua

SEQ ID NO: 3880381 - RNA, 20 nt, Human
auacugauuaugucuuuuau

SEQ ID NO: 3880382 - RNA, 16 nt, Human
auacugcacuuacaau

SEQ ID NO: 3880383 - RNA, 14 nt, Human
auacugcagggcca

SEQ ID NO: 3880384 - RNA, 18 nt, Human
auacugccagaugcugau

SEQ ID NO: 3880385 - RNA, 18 nt, Human
auacugccuuguuuaaug

SEQ ID NO: 3880386 - RNA, 20 nt, Human
auacugccuuguuuaauggu

SEQ ID NO: 3880387 - RNA, 19 nt, Human
auacugcgacuuucugccu

SEQ ID NO: 3880388 - RNA, 22 nt, Human
auacugcgacuuucugccugga

SEQ ID NO: 3880389 - RNA, 19 nt, Human
auacugcuacuguaauuuu

SEQ ID NO: 3880390 - RNA, 18 nt, Human
auacugcugagauacaua

SEQ ID NO: 3880391 - RNA, 19 nt, Human
auacugcugagauacauac

SEQ ID NO: 3880392 - RNA, 21 nt, Human
auacugcugagauacauacag

SEQ ID NO: 3880393 - RNA, 21 nt, Human
auacugcuuggagcugagcaa

SEQ ID NO: 3880394 - RNA, 14 nt, Human
auacuggaaguuuu

SEQ ID NO: 3880395 - RNA, 18 nt, Human
auacuggaaguuuugcau

SEQ ID NO: 3880396 - RNA, 16 nt, Human
auacuggacucuucaa

SEQ ID NO: 3880397 - RNA, 15 nt, Human
auacuggauuguacu

SEQ ID NO: 3880398 - RNA, 12 nt, Human
auacuggcaugc

SEQ ID NO: 3880399 - RNA, 16 nt, Human
auacuggcaugcuaaa

SEQ ID NO: 3880400 - RNA, 17 nt, Human
auacuggccucgccugg

SEQ ID NO: 3880401 - RNA, 21 nt, Human
auacuggugcagucauuauga

SEQ ID NO: 3880402 - RNA, 14 nt, Human
auacuguaaagaaa

SEQ ID NO: 3880403 - RNA, 22 nt, Human
auacuguaaagaaagagagaaa

SEQ ID NO: 3880404 - RNA, 13 nt, Human
auacuguacaaua

SEQ ID NO: 3880405 - RNA, 19 nt, Human
auacuguauauucaggacu

SEQ ID NO: 3880406 - RNA, 20 nt, Human
auacuguauuaagagugaaa

SEQ ID NO: 3880407 - RNA, 19 nt, Human
auacuguauuuuguauugu

SEQ ID NO: 3880408 - RNA, 21 nt, Human
auacugucgguuuuuuuuaaa

SEQ ID NO: 3880409 - RNA, 17 nt, Human
auacugucucuuucaug

SEQ ID NO: 3880410 - RNA, 16 nt, Human
auacugugcuggagcc

SEQ ID NO: 3880411 - RNA, 18 nt, Human
auacuguuauucuuugca

SEQ ID NO: 3880412 - RNA, 14 nt, Human
auacuguugcacgu

SEQ ID NO: 3880413 - RNA, 16 nt, Human
auacuguuugagguuu

SEQ ID NO: 3880414 - RNA, 16 nt, Human
auacuuaaaaauuuau

SEQ ID NO: 3880415 - RNA, 21 nt, Human
auacuuaaauggaaaaaauga

SEQ ID NO: 3880416 - RNA, 20 nt, Human
auacuuaaauguuauguaua

SEQ ID NO: 3880417 - RNA, 24 nt, Human
auacuuacugaacuguguguaauu

SEQ ID NO: 3880418 - RNA, 17 nt, Human
auacuuauauuucccua

SEQ ID NO: 3880419 - RNA, 15 nt, Human
auacuuaucucucug

SEQ ID NO: 3880420 - RNA, 15 nt, Human
auacuuauuuaaaua

SEQ ID NO: 3880421 - RNA, 22 nt, Human
auacuucagcucacacaugaga

SEQ ID NO: 3880422 - RNA, 17 nt, Human
auacuucauuuaaaaaa

SEQ ID NO: 3880423 - RNA, 15 nt, Human
auacuucuugugugu

SEQ ID NO: 3880424 - RNA, 18 nt, Human
auacuucuuguguguaug

SEQ ID NO: 3880425 - RNA, 15 nt, Human
auacuugaaaauuaa

SEQ ID NO: 3880426 - RNA, 14 nt, Human
auacuugaacaaaa

SEQ ID NO: 3880427 - RNA, 12 nt, Human
auacuugaacca

SEQ ID NO: 3880428 - RNA, 16 nt, Human
auacuugaagggccag

SEQ ID NO: 3880429 - RNA, 19 nt, Human
auacuugaagggccagagc

SEQ ID NO: 3880430 - RNA, 22 nt, Human
auacuugaagggccagagccag

SEQ ID NO: 3880431 - RNA, 23 nt, Human
auacuugcagcucccauucuaug

SEQ ID NO: 3880432 - RNA, 12 nt, Human
auacuugcuuug

SEQ ID NO: 3880433 - RNA, 16 nt, Human
auacuuggauuuaguu

SEQ ID NO: 3880434 - RNA, 22 nt, Human
auacuuggauuuaguuucagua

SEQ ID NO: 3880435 - RNA, 14 nt, Human
auacuuguaauuau

SEQ ID NO: 3880436 - RNA, 18 nt, Human
auacuugucaauauuuaa

SEQ ID NO: 3880437 - RNA, 17 nt, Human
auacuugucuuguucac

SEQ ID NO: 3880438 - RNA, 14 nt, Human
auacuuguggacua

SEQ ID NO: 3880439 - RNA, 15 nt, Human
auacuuguuuuugua

SEQ ID NO: 3880440 - RNA, 20 nt, Human
auacuuguuuuuguaaagaa

SEQ ID NO: 3880441 - RNA, 19 nt, Human
auacuuuaaauaauuuaac

SEQ ID NO: 3880442 - RNA, 20 nt, Human
auacuuuaaauaauuuaacu

SEQ ID NO: 3880443 - RNA, 23 nt, Human
auacuuuagaaguagaauugaca

SEQ ID NO: 3880444 - RNA, 23 nt, Human
auacuuuagugaacguggacucc

SEQ ID NO: 3880445 - RNA, 21 nt, Human
auacuuuaucaaugugucuuu

SEQ ID NO: 3880446 - RNA, 21 nt, Human
auacuuucauccugacucugc

SEQ ID NO: 3880447 - RNA, 15 nt, Human
auacuuucccuaccc

SEQ ID NO: 3880448 - RNA, 21 nt, Human
auacuuucccuacccucuaga

SEQ ID NO: 3880449 - RNA, 22 nt, Human
auacuuucccuacccucuagag

SEQ ID NO: 3880450 - RNA, 23 nt, Human
auacuuucccuacccucuagaga

SEQ ID NO: 3880451 - RNA, 24 nt, Human
auacuuucccuacccucuagagaa

SEQ ID NO: 3880452 - RNA, 18 nt, Human
auacuuugcauugucugu

SEQ ID NO: 3880453 - RNA, 14 nt, Human
auacuuuguauugu

SEQ ID NO: 3880454 - RNA, 16 nt, Human
auacuuuuacaaguaa

SEQ ID NO: 3880455 - RNA, 20 nt, Human
auacuuuuacaaguaacaaa

SEQ ID NO: 3880456 - RNA, 19 nt, Human
auacuuuuccuuaccuuua

SEQ ID NO: 3880457 - RNA, 13 nt, Human
auacuuuuucuaa

SEQ ID NO: 3880458 - RNA, 21 nt, Human
auacuuuuuuuucuuuaaaaa

SEQ ID NO: 3880459 - RNA, 16 nt, Human
auagaaaaacccugcc

SEQ ID NO: 3880460 - RNA, 14 nt, Human
auagaaaaguuauu

SEQ ID NO: 3880461 - RNA, 16 nt, Human
auagaaacaugacacu

SEQ ID NO: 3880462 - RNA, 12 nt, Human
auagaaagcauu

SEQ ID NO: 3880463 - RNA, 12 nt, Human
auagaaagcuau

SEQ ID NO: 3880464 - RNA, 17 nt, Human
auagaaaguugcaaggc

SEQ ID NO: 3880465 - RNA, 20 nt, Human
auagaaauaaauagcuauau

SEQ ID NO: 3880466 - RNA, 12 nt, Human
auagaaaugcca

SEQ ID NO: 3880467 - RNA, 22 nt, Human
auagaaaugcugguuuuucagu

SEQ ID NO: 3880468 - RNA, 22 nt, Human
auagaaaugucucaaggcaguu

SEQ ID NO: 3880469 - RNA, 17 nt, Human
auagaaauguuugcuga

SEQ ID NO: 3880470 - RNA, 15 nt, Human
auagaaauuuccaga

SEQ ID NO: 3880471 - RNA, 14 nt, Human
auagaaauuuugua

SEQ ID NO: 3880472 - RNA, 23 nt, Human
auagaaauuuuguaagaaggcaa

SEQ ID NO: 3880473 - RNA, 18 nt, Human
auagaacaacauauacaa

SEQ ID NO: 3880474 - RNA, 14 nt, Human
auagaacaaggcug

SEQ ID NO: 3880475 - RNA, 15 nt, Human
auagaacucugggcu

SEQ ID NO: 3880476 - RNA, 13 nt, Human
auagaagaaaaaa

SEQ ID NO: 3880477 - RNA, 17 nt, Human
auagaagaaaaaagaau

SEQ ID NO: 3880478 - RNA, 20 nt, Human
auagaagaauacaaacauau

SEQ ID NO: 3880479 - RNA, 23 nt, Human
auagaagaaugcaugcuuuccau

SEQ ID NO: 3880480 - RNA, 13 nt, Human
auagaagcuguag

SEQ ID NO: 3880481 - RNA, 14 nt, Human
auagaagcuguagu

SEQ ID NO: 3880482 - RNA, 19 nt, Human
auagaagucuucaugaaau

SEQ ID NO: 3880483 - RNA, 21 nt, Human
auagaagucuucaugaaaugc

SEQ ID NO: 3880484 - RNA, 23 nt, Human
auagaagucuucaugaaaugcua

SEQ ID NO: 3880485 - RNA, 16 nt, Human
auagaaguuuuaaauu

SEQ ID NO: 3880486 - RNA, 14 nt, Human
auagaauaaaauuu

SEQ ID NO: 3880487 - RNA, 22 nt, Human
auagaauaaaauuuuuaaucuu

SEQ ID NO: 3880488 - RNA, 20 nt, Human
auagaauaaaggcaguuuuc

SEQ ID NO: 3880489 - RNA, 20 nt, Human
auagaauaggcacuuuaaaa

SEQ ID NO: 3880490 - RNA, 16 nt, Human
auagaaucaaucagua

SEQ ID NO: 3880491 - RNA, 12 nt, Human
auagaaugcugc

SEQ ID NO: 3880492 - RNA, 13 nt, Human
auagaaugcugca

SEQ ID NO: 3880493 - RNA, 14 nt, Human
auagaauguaaaug

SEQ ID NO: 3880494 - RNA, 15 nt, Human
auagaauguaaaugu

SEQ ID NO: 3880495 - RNA, 20 nt, Human
auagaauuagcuuuuucauc

SEQ ID NO: 3880496 - RNA, 23 nt, Human
auauaaaauggcaacaaacugca

SEQ ID NO: 3880497 - RNA, 13 nt, Human
auauaaacacuau

SEQ ID NO: 3880498 - RNA, 12 nt, Human
auauaaacaucu

SEQ ID NO: 3880499 - RNA, 21 nt, Human
auauaaaccuaaaaaagauau

SEQ ID NO: 3880500 - RNA, 17 nt, Human
auauaaagagaaaauug

SEQ ID NO: 3880501 - RNA, 22 nt, Human
auauaaagagaaaauugaauuu

SEQ ID NO: 3880502 - RNA, 20 nt, Human
auauaaagcaucuaaacuuu

SEQ ID NO: 3880503 - RNA, 19 nt, Human
auauaaaguaguccuguga

SEQ ID NO: 3880504 - RNA, 13 nt, Human
auauaaaguauag

SEQ ID NO: 3880505 - RNA, 17 nt, Human
auauaaaguauucuuuu

SEQ ID NO: 3880506 - RNA, 22 nt, Human
auauaaaguuuuauauauuaua

SEQ ID NO: 3880507 - RNA, 19 nt, Human
auauaaauaaauauauaua

SEQ ID NO: 3880508 - RNA, 21 nt, Human
auauaaauagaauguaaaugu

SEQ ID NO: 3880509 - RNA, 22 nt, Human
auauaaauagaauguaaauguc

SEQ ID NO: 3880510 - RNA, 14 nt, Human
auauaaauauauau

SEQ ID NO: 3880511 - RNA, 16 nt, Human
auauaaauauauauuc

SEQ ID NO: 3880512 - RNA, 22 nt, Human
auauaaauauuagaaacagcuu

SEQ ID NO: 3880513 - RNA, 13 nt, Human
auauaaauauuug

SEQ ID NO: 3880514 - RNA, 17 nt, Human
auauaaaugcaaauaac

SEQ ID NO: 3880515 - RNA, 18 nt, Human
auauaaauguauaaauau

SEQ ID NO: 3880516 - RNA, 11 nt, Human
auauaaaugug

SEQ ID NO: 3880517 - RNA, 19 nt, Human
auauaaauguuaagaaaaa

SEQ ID NO: 3880518 - RNA, 22 nt, Human
auauaaauuuuuuuuguuucau

SEQ ID NO: 3880519 - RNA, 15 nt, Human
auauaacaaugcugu

SEQ ID NO: 3880520 - RNA, 12 nt, Human
auauaacacauu

SEQ ID NO: 3880521 - RNA, 14 nt, Human
auauaacacauuuu

SEQ ID NO: 3880522 - RNA, 16 nt, Human
auauaacagauacauu

SEQ ID NO: 3880523 - RNA, 11 nt, Human
auauaaccaau

SEQ ID NO: 3880524 - RNA, 23 nt, Human
auauaaccacaaagcacaguuug

SEQ ID NO: 3880525 - RNA, 12 nt, Human
auauaagaaaga

SEQ ID NO: 3880526 - RNA, 14 nt, Human
auauaagaaagaca

SEQ ID NO: 3880527 - RNA, 16 nt, Human
auauaagaaagacauc

SEQ ID NO: 3880528 - RNA, 14 nt, Human
auauaagaauaaaa

SEQ ID NO: 3880529 - RNA, 23 nt, Human
auauaagggaaguaguuaucaug

SEQ ID NO: 3880530 - RNA, 22 nt, Human
auauaaguaaagugauuaaagu

SEQ ID NO: 3880531 - RNA, 19 nt, Human
auauaaguauucuaaauuu

SEQ ID NO: 3880532 - RNA, 22 nt, Human
auauaaguauucuaaauuuuau

SEQ ID NO: 3880533 - RNA, 15 nt, Human
auauaagugauugcu

SEQ ID NO: 3880534 - RNA, 15 nt, Human
auauaagugcuguau

SEQ ID NO: 3880535 - RNA, 20 nt, Human
auauaagugcuguauaaaau

SEQ ID NO: 3880536 - RNA, 15 nt, Human
auauaaguguacaua

SEQ ID NO: 3880537 - RNA, 21 nt, Human
auauaaguuugaaggaaacag

SEQ ID NO: 3880538 - RNA, 14 nt, Human
auauaauaaaguau

SEQ ID NO: 3880539 - RNA, 19 nt, Human
auauaauacacaaaaucaa

SEQ ID NO: 3880540 - RNA, 21 nt, Human
auauaauacacaaaaucaaau

SEQ ID NO: 3880541 - RNA, 17 nt, Human
auauaauauauuugugu

SEQ ID NO: 3880542 - RNA, 17 nt, Human
auauaauaucuaaaguu

SEQ ID NO: 3880543 - RNA, 23 nt, Human
auauaauaugcacacagugcuuu

SEQ ID NO: 3880544 - RNA, 17 nt, Human
auauaaucuuucaaacc

SEQ ID NO: 3880545 - RNA, 18 nt, Human
auauaaugguuucaaaga

SEQ ID NO: 3880546 - RNA, 12 nt, Human
auauaauucugu

SEQ ID NO: 3880547 - RNA, 17 nt, Human
auauaauucuguaaaug

SEQ ID NO: 3880548 - RNA, 18 nt, Human
auauaauuguuuuuuauc

SEQ ID NO: 3880549 - RNA, 22 nt, Human
auauaauuguuuuuuaucuuuu

SEQ ID NO: 3880550 - RNA, 22 nt, Human
auauaauuuauuuccacuaaaa

SEQ ID NO: 3880551 - RNA, 15 nt, Human
auauacaaaaagaaa

SEQ ID NO: 3880552 - RNA, 14 nt, Human
auauacaauuauau

SEQ ID NO: 3880553 - RNA, 17 nt, Human
auauacacgaauagaca

SEQ ID NO: 3880554 - RNA, 22 nt, Human
auauacacgaauagacaucaaa

SEQ ID NO: 3880555 - RNA, 21 nt, Human
auauacagaugaaaauuugag

SEQ ID NO: 3880556 - RNA, 22 nt, Human
auauacagaugaaaauuugaga

SEQ ID NO: 3880557 - RNA, 15 nt, Human
auauacagcucagaa

SEQ ID NO: 3880558 - RNA, 14 nt, Human
auauacaguaacuu

SEQ ID NO: 3880559 - RNA, 17 nt, Human
auauacaguaacuuuau

SEQ ID NO: 3880560 - RNA, 23 nt, Human
auauacaguaacuuuauguguaa

SEQ ID NO: 3880561 - RNA, 13 nt, Human
auauacauacacu

SEQ ID NO: 3880562 - RNA, 16 nt, Human
auauacauacacuugu

SEQ ID NO: 3880563 - RNA, 21 nt, Human
auauacauacacuuguauaaa

SEQ ID NO: 3880564 - RNA, 18 nt, Human
auauacauacugcaucuu

SEQ ID NO: 3880565 - RNA, 19 nt, Human
auauacaugaaaauuuuaa

SEQ ID NO: 3880566 - RNA, 14 nt, Human
auauacaugugugu

SEQ ID NO: 3880567 - RNA, 15 nt, Human
auauacaugugugua

SEQ ID NO: 3880568 - RNA, 16 nt, Human
auauacauguguguau

SEQ ID NO: 3880569 - RNA, 17 nt, Human
auauacauguguguaua

SEQ ID NO: 3880570 - RNA, 15 nt, Human
auauacauguuuaug

SEQ ID NO: 3880571 - RNA, 16 nt, Human
auauacauguuuaugu

SEQ ID NO: 3880572 - RNA, 23 nt, Human
auauacauuuuuagccuguguca

SEQ ID NO: 3880573 - RNA, 22 nt, Human
auauaccacucuuuaccuuuau

SEQ ID NO: 3880574 - RNA, 15 nt, Human
auauaccuauaaugu

SEQ ID NO: 3880575 - RNA, 20 nt, Human
auauaccuauaaugugugua

SEQ ID NO: 3880576 - RNA, 19 nt, Human
auauacucacuuucuagau

SEQ ID NO: 3880577 - RNA, 22 nt, Human
auauacucuagaugaaguuuua

SEQ ID NO: 3880578 - RNA, 10 nt, Human
auauacugua

SEQ ID NO: 3880579 - RNA, 11 nt, Human
auauacuguaa

SEQ ID NO: 3880580 - RNA, 13 nt, Human
auauacuguaaag

SEQ ID NO: 3880581 - RNA, 15 nt, Human
auauacuguaaagaa

SEQ ID NO: 3880582 - RNA, 20 nt, Human
auauacuguaaagaaagaga

SEQ ID NO: 3880583 - RNA, 24 nt, Human
auauacuguaaagaaagagagaaa

SEQ ID NO: 3880584 - RNA, 15 nt, Human
auauacuuguggacu

SEQ ID NO: 3880585 - RNA, 20 nt, Human
auauacuuugaaaggagaug

SEQ ID NO: 3880586 - RNA, 18 nt, Human
auauacuuuuacaaguaa

SEQ ID NO: 3880587 - RNA, 11 nt, Human
auauacuuuuu

SEQ ID NO: 3880588 - RNA, 22 nt, Human
auauacuuuuuucuuauuuaac

SEQ ID NO: 3880589 - RNA, 15 nt, Human
auauagaacagugcu

SEQ ID NO: 3880590 - RNA, 22 nt, Human
auauagagauguuuuuaaaagu

SEQ ID NO: 3880591 - RNA, 17 nt, Human
auauagagucauuguaa

SEQ ID NO: 3880592 - RNA, 23 nt, Human
auauagaucaguuauaaguagca

SEQ ID NO: 3880593 - RNA, 18 nt, Human
auauagauuauaacuugu

SEQ ID NO: 3880594 - RNA, 18 nt, Human
auauagcauuuaugguaa

SEQ ID NO: 3880595 - RNA, 20 nt, Human
auauagcauuuaugguaauc

SEQ ID NO: 3880596 - RNA, 18 nt, Human
auauagcguucccaacaa

SEQ ID NO: 3880597 - RNA, 19 nt, Human
auauagcuggcaagaaugg

SEQ ID NO: 3880598 - RNA, 15 nt, Human
auauagcuguacaaa

SEQ ID NO: 3880599 - RNA, 18 nt, Human
auauagcuguacaaauau

SEQ ID NO: 3880600 - RNA, 19 nt, Human
auauagcuguacaaauaua

SEQ ID NO: 3880601 - RNA, 16 nt, Human
auauagguugugcaaa

SEQ ID NO: 3880602 - RNA, 19 nt, Human
auauagguuucuauucuug

SEQ ID NO: 3880603 - RNA, 14 nt, Human
auauagguuuuguu

SEQ ID NO: 3880604 - RNA, 20 nt, Human
auauagguuuuguuugcuau

SEQ ID NO: 3880605 - RNA, 23 nt, Human
auauagguuuuguuugcuaucuu

SEQ ID NO: 3880606 - RNA, 18 nt, Human
auauagugcuauauauau

SEQ ID NO: 3880607 - RNA, 22 nt, Human
auauaguuccuaagaagcuucu

SEQ ID NO: 3880608 - RNA, 12 nt, Human
auauaguuuuac

SEQ ID NO: 3880609 - RNA, 16 nt, Human
auauaguuuuacuuuu

SEQ ID NO: 3880610 - RNA, 18 nt, Human
auauaguuuuacuuuuaa

SEQ ID NO: 3880611 - RNA, 21 nt, Human
auauaguuuuuaccuuuuaug

SEQ ID NO: 3880612 - RNA, 10 nt, Human
auauauaaaa

SEQ ID NO: 3880613 - RNA, 19 nt, Human
auauauaaaaagaaaagau

SEQ ID NO: 3880614 - RNA, 21 nt, Human
auauauaaaaagaaaagauaa

SEQ ID NO: 3880615 - RNA, 19 nt, Human
auauauaaagaauauauau

SEQ ID NO: 3880616 - RNA, 18 nt, Human
auauauaaaguauagaga

SEQ ID NO: 3880617 - RNA, 12 nt, Human
auauauaaauaa

SEQ ID NO: 3880618 - RNA, 13 nt, Human
auauauaaauaua

SEQ ID NO: 3880619 - RNA, 19 nt, Human
auauauaaauauauuauua

SEQ ID NO: 3880620 - RNA, 12 nt, Human
auauauaaccag

SEQ ID NO: 3880621 - RNA, 13 nt, Human
auauauaaccagu

SEQ ID NO: 3880622 - RNA, 13 nt, Human
auauauaagaaag

SEQ ID NO: 3880623 - RNA, 18 nt, Human
auauauaagaaagacauc

SEQ ID NO: 3880624 - RNA, 23 nt, Human
auauauaagcucagauuauuuaa

SEQ ID NO: 3880625 - RNA, 15 nt, Human
auauauaaguguaca

SEQ ID NO: 3880626 - RNA, 16 nt, Human
auauauaaguguacau

SEQ ID NO: 3880627 - RNA, 13 nt, Human
auauauacacaca

SEQ ID NO: 3880628 - RNA, 15 nt, Human
auauauacacacaca

SEQ ID NO: 3880629 - RNA, 23 nt, Human
auauauacaguaacuuuaugugu

SEQ ID NO: 3880630 - RNA, 18 nt, Human
auauauacauacacuugu

SEQ ID NO: 3880631 - RNA, 14 nt, Human
auauauacauauau

SEQ ID NO: 3880632 - RNA, 14 nt, Human
auauauacauaugu

SEQ ID NO: 3880633 - RNA, 18 nt, Human
auauauacuuaagaauau

SEQ ID NO: 3880634 - RNA, 18 nt, Human
auauauagaaauauauac

SEQ ID NO: 3880635 - RNA, 16 nt, Human
auauauagugcuauau

SEQ ID NO: 3880636 - RNA, 11 nt, Human
auauauauaaa

SEQ ID NO: 3880637 - RNA, 14 nt, Human
auauauauaaaccu

SEQ ID NO: 3880638 - RNA, 13 nt, Human
auauauauaaaga

SEQ ID NO: 3880639 - RNA, 15 nt, Human
auauauauaaaugua

SEQ ID NO: 3880640 - RNA, 13 nt, Human
auauauauacaca

SEQ ID NO: 3880641 - RNA, 22 nt, Human
auauguguuuuucacauuugcg

SEQ ID NO: 3880642 - RNA, 16 nt, Human
auauguuaauuugugu

SEQ ID NO: 3880643 - RNA, 17 nt, Human
auauguuauuuuaaaca

SEQ ID NO: 3880644 - RNA, 12 nt, Human
auauguucaacu

SEQ ID NO: 3880645 - RNA, 15 nt, Human
auauguucaacugga

SEQ ID NO: 3880646 - RNA, 16 nt, Human
auauguugaauacuuu

SEQ ID NO: 3880647 - RNA, 18 nt, Human
auauguugaauacuuuuu

SEQ ID NO: 3880648 - RNA, 14 nt, Human
auauguugaugaaa

SEQ ID NO: 3880649 - RNA, 24 nt, Human
auauguuuaccuuuuaauuaauga

SEQ ID NO: 3880650 - RNA, 17 nt, Human
auauguuuccuucccuc

SEQ ID NO: 3880651 - RNA, 17 nt, Human
auauguuuuaaauauag

SEQ ID NO: 3880652 - RNA, 20 nt, Human
auauguuuuaagaggcaggg

SEQ ID NO: 3880653 - RNA, 17 nt, Human
auauguuuuuaaaggug

SEQ ID NO: 3880654 - RNA, 13 nt, Human
auauuaaaaaguc

SEQ ID NO: 3880655 - RNA, 16 nt, Human
auauuaaaaauauaaa

SEQ ID NO: 3880656 - RNA, 17 nt, Human
auauuaaaaauauaaaa

SEQ ID NO: 3880657 - RNA, 15 nt, Human
auauuaaaaauggua

SEQ ID NO: 3880658 - RNA, 16 nt, Human
auauuaaaaaugguaa

SEQ ID NO: 3880659 - RNA, 20 nt, Human
auauuaaaaaugguaaaauu

SEQ ID NO: 3880660 - RNA, 22 nt, Human
auauuaaaauuccaaauucaug

SEQ ID NO: 3880661 - RNA, 18 nt, Human
auauuaaacaaaguuuca

SEQ ID NO: 3880662 - RNA, 22 nt, Human
auauuaaacaaaguuucagagu

SEQ ID NO: 3880663 - RNA, 22 nt, Human
auauuaaagagaaagcccgcuu

SEQ ID NO: 3880664 - RNA, 14 nt, Human
auauuaaagccaug

SEQ ID NO: 3880665 - RNA, 23 nt, Human
auauuaaagccauguuuauuaca

SEQ ID NO: 3880666 - RNA, 14 nt, Human
auauuaaaggaguu

SEQ ID NO: 3880667 - RNA, 13 nt, Human
auauuaaaucugc

SEQ ID NO: 3880668 - RNA, 16 nt, Human
auauuaagaaagacua

SEQ ID NO: 3880669 - RNA, 14 nt, Human
auauuaagaaugau

SEQ ID NO: 3880670 - RNA, 17 nt, Human
auauuaagaaugaucug

SEQ ID NO: 3880671 - RNA, 23 nt, Human
auauuaagcaugacagaaaauau

SEQ ID NO: 3880672 - RNA, 14 nt, Human
auauuaaugccuuu

SEQ ID NO: 3880673 - RNA, 15 nt, Human
auauuaaugccuuua

SEQ ID NO: 3880674 - RNA, 17 nt, Human
auauuaaugccuuuaaa

SEQ ID NO: 3880675 - RNA, 23 nt, Human
auauuaaugccuuuaaaguauga

SEQ ID NO: 3880676 - RNA, 21 nt, Human
auauuaauuuucuacaaauaa

SEQ ID NO: 3880677 - RNA, 13 nt, Human
auauuacaauauu

SEQ ID NO: 3880678 - RNA, 15 nt, Human
auauuacaauauuug

SEQ ID NO: 3880679 - RNA, 15 nt, Human
auauuacacauuugu

SEQ ID NO: 3880680 - RNA, 21 nt, Human
auauuaccuaaugaaagugau

SEQ ID NO: 3880681 - RNA, 21 nt, Human
auauuacuccuauuuuuguaa

SEQ ID NO: 3880682 - RNA, 21 nt, Human
auauuacuguacaugggacua

SEQ ID NO: 3880683 - RNA, 18 nt, Human
auauuacuguuuauuucu

SEQ ID NO: 3880684 - RNA, 20 nt, Human
auauuacuguuuauuucugu

SEQ ID NO: 3880685 - RNA, 12 nt, Human
auauuacuuuau

SEQ ID NO: 3880686 - RNA, 13 nt, Human
auauuacuuuauc

SEQ ID NO: 3880687 - RNA, 14 nt, Human
auauuacuuuauca

SEQ ID NO: 3880688 - RNA, 17 nt, Human
auauuacuuuaucacuu

SEQ ID NO: 3880689 - RNA, 16 nt, Human
auauuagaaaacuuug

SEQ ID NO: 3880690 - RNA, 17 nt, Human
auauuagaaaacuuugu

SEQ ID NO: 3880691 - RNA, 18 nt, Human
auauuagaaaacuuuguu

SEQ ID NO: 3880692 - RNA, 20 nt, Human
auauuagacuucuguuuuca

SEQ ID NO: 3880693 - RNA, 19 nt, Human
auauuagcgacaacagauu

SEQ ID NO: 3880694 - RNA, 22 nt, Human
auauuagcgacaacagauugga

SEQ ID NO: 3880695 - RNA, 20 nt, Human
auauuagcuuuacuguuugu

SEQ ID NO: 3880696 - RNA, 21 nt, Human
auauuagcuuuacuguuuguu

SEQ ID NO: 3880697 - RNA, 15 nt, Human
auauuaguauguaug

SEQ ID NO: 3880698 - RNA, 13 nt, Human
auauuauaaagga

SEQ ID NO: 3880699 - RNA, 20 nt, Human
auauuauacuaagaaaagau

SEQ ID NO: 3880700 - RNA, 16 nt, Human
auauuauacuuguaau

SEQ ID NO: 3880701 - RNA, 19 nt, Human
auauuauacuuguaauuau

SEQ ID NO: 3880702 - RNA, 14 nt, Human
auauuauagagagu

SEQ ID NO: 3880703 - RNA, 13 nt, Human
auauuauaucaga

SEQ ID NO: 3880704 - RNA, 13 nt, Human
auauuauauggaa

SEQ ID NO: 3880705 - RNA, 12 nt, Human
auauuauauuug

SEQ ID NO: 3880706 - RNA, 15 nt, Human
auauuauauuuggau

SEQ ID NO: 3880707 - RNA, 14 nt, Human
auauuauguuaaaa

SEQ ID NO: 3880708 - RNA, 19 nt, Human
auauuauuacuuguaaaua

SEQ ID NO: 3880709 - RNA, 13 nt, Human
auauuauuagaaa

SEQ ID NO: 3880710 - RNA, 19 nt, Human
auauuauuauaaucuuaua

SEQ ID NO: 3880711 - RNA, 23 nt, Human
auauuauuauaaucuuauaauug

SEQ ID NO: 3880712 - RNA, 19 nt, Human
auauuauuccucaaaaaau

SEQ ID NO: 3880713 - RNA, 19 nt, Human
auauuauuuggcaguuugg

SEQ ID NO: 3880714 - RNA, 21 nt, Human
auauuauuuggcaguuuggua

SEQ ID NO: 3880715 - RNA, 12 nt, Human
auauucaaccau

SEQ ID NO: 3880716 - RNA, 21 nt, Human
auauucaaccauggacuuuau

SEQ ID NO: 3880717 - RNA, 20 nt, Human
auauucaacucauaagacuu

SEQ ID NO: 3880718 - RNA, 15 nt, Human
auauucaauaaagcu

SEQ ID NO: 3880719 - RNA, 15 nt, Human
auauucacacuugaa

SEQ ID NO: 3880720 - RNA, 16 nt, Human
auauucacacuugaac

SEQ ID NO: 3880721 - RNA, 19 nt, Human
auauucagaaucuuuguua

SEQ ID NO: 3880722 - RNA, 17 nt, Human
auauucagaauuaugau

SEQ ID NO: 3880723 - RNA, 16 nt, Human
auauucagacaaaaug

SEQ ID NO: 3880724 - RNA, 12 nt, Human
auauucauauug

SEQ ID NO: 3880725 - RNA, 19 nt, Human
auauucauauuggaaaaau

SEQ ID NO: 3880726 - RNA, 20 nt, Human
auauucaugcuucuuccuua

SEQ ID NO: 3880727 - RNA, 22 nt, Human
auauucauguaaacaaaauuua

SEQ ID NO: 3880728 - RNA, 17 nt, Human
auauucauucuuuuuga

SEQ ID NO: 3880729 - RNA, 14 nt, Human
auauucauuguaua

SEQ ID NO: 3880730 - RNA, 13 nt, Human
auauucauuugga

SEQ ID NO: 3880731 - RNA, 20 nt, Human
auauuccagguuuaaguaga

SEQ ID NO: 3880732 - RNA, 12 nt, Human
auauuccauagu

SEQ ID NO: 3880733 - RNA, 18 nt, Human
auauuccauauauuagca

SEQ ID NO: 3880734 - RNA, 18 nt, Human
auauuccccuaucucuag

SEQ ID NO: 3880735 - RNA, 17 nt, Human
auauucccuagaaacuu

SEQ ID NO: 3880736 - RNA, 15 nt, Human
auauuccugaaugaa

SEQ ID NO: 3880737 - RNA, 18 nt, Human
auauuccugaaugaaaua

SEQ ID NO: 3880738 - RNA, 23 nt, Human
auauuccugaaugaaauaucaga

SEQ ID NO: 3880739 - RNA, 20 nt, Human
auauuccuuucuaucauuuu

SEQ ID NO: 3880740 - RNA, 12 nt, Human
auauuccuuuga

SEQ ID NO: 3880741 - RNA, 13 nt, Human
auauucuaagacu

SEQ ID NO: 3880742 - RNA, 19 nt, Human
auauucuaguaauaaagac

SEQ ID NO: 3880743 - RNA, 20 nt, Human
auauucuauaugaauuuaaa

SEQ ID NO: 3880744 - RNA, 23 nt, Human
auauucuauuuucauuuucugca

SEQ ID NO: 3880745 - RNA, 17 nt, Human
auauucucagcagagug

SEQ ID NO: 3880746 - RNA, 23 nt, Human
auauucuggagucaucauucccu

SEQ ID NO: 3880747 - RNA, 22 nt, Human
auauucuuccuggggcccaaau

SEQ ID NO: 3880748 - RNA, 13 nt, Human
auauucuugucaa

SEQ ID NO: 3880749 - RNA, 13 nt, Human
auauugaaaaaaa

SEQ ID NO: 3880750 - RNA, 16 nt, Human
auauugaaaauugaaa

SEQ ID NO: 3880751 - RNA, 20 nt, Human
auauugaacuuuuguacuga

SEQ ID NO: 3880752 - RNA, 16 nt, Human
auauugaagacaauuu

SEQ ID NO: 3880753 - RNA, 20 nt, Human
auauugaagacaauuugaua

SEQ ID NO: 3880754 - RNA, 21 nt, Human
auauugaauauaauauauuug

SEQ ID NO: 3880755 - RNA, 12 nt, Human
auauugaauguu

SEQ ID NO: 3880756 - RNA, 15 nt, Human
auauugacauuugua

SEQ ID NO: 3880757 - RNA, 16 nt, Human
auauugacauuuguag

SEQ ID NO: 3880758 - RNA, 20 nt, Human
auauugacauuuguaguuga

SEQ ID NO: 3880759 - RNA, 16 nt, Human
auauugagacaaaaau

SEQ ID NO: 3880760 - RNA, 20 nt, Human
auauugagacaaaaauuauc

SEQ ID NO: 3880761 - RNA, 14 nt, Human
auauugagcaauau

SEQ ID NO: 3880762 - RNA, 22 nt, Human
auauugaggcuuuguguuguaa

SEQ ID NO: 3880763 - RNA, 17 nt, Human
auauugagucaaauggu

SEQ ID NO: 3880764 - RNA, 15 nt, Human
auauugauccagaaa

SEQ ID NO: 3880765 - RNA, 13 nt, Human
auauugauuuauu

SEQ ID NO: 3880766 - RNA, 16 nt, Human
auauugcaaaauacau

SEQ ID NO: 3880767 - RNA, 23 nt, Human
auauugcaaaauacaugaagcuu

SEQ ID NO: 3880768 - RNA, 22 nt, Human
auauugcauacuauuaaacaug

SEQ ID NO: 3880769 - RNA, 16 nt, Human
auauugcauaugcaua

SEQ ID NO: 3880770 - RNA, 19 nt, Human
auauugcugaagaaucuac

SEQ ID NO: 3880771 - RNA, 22 nt, Human
auauugcugauggugcaaugac

SEQ ID NO: 3880772 - RNA, 17 nt, Human
auauugcuucuucuccu

SEQ ID NO: 3880773 - RNA, 16 nt, Human
auauugcuuuuucuaa

SEQ ID NO: 3880774 - RNA, 15 nt, Human
auauuggaaaaauca

SEQ ID NO: 3880775 - RNA, 12 nt, Human
auauuggaacuu

SEQ ID NO: 3880776 - RNA, 17 nt, Human
auauuggcauggauuuc

SEQ ID NO: 3880777 - RNA, 17 nt, Human
auauuggccaaggaaag

SEQ ID NO: 3880778 - RNA, 15 nt, Human
auauugguauucacu

SEQ ID NO: 3880779 - RNA, 12 nt, Human
auauugguuuua

SEQ ID NO: 3880780 - RNA, 19 nt, Human
auauugguuuuaugaugac

SEQ ID NO: 3880781 - RNA, 13 nt, Human
auauuguaagaaa

SEQ ID NO: 3880782 - RNA, 13 nt, Human
auauuguacaguu

SEQ ID NO: 3880783 - RNA, 14 nt, Human
auauuguacaguuu

SEQ ID NO: 3880784 - RNA, 21 nt, Human
auauuguacauaaaagaauuu

SEQ ID NO: 3880785 - RNA, 18 nt, Human
auauuguauuacuagaag

SEQ ID NO: 3880786 - RNA, 23 nt, Human
aucugaaaauguauguguaagua

SEQ ID NO: 3880787 - RNA, 13 nt, Human
aucugaaauucua

SEQ ID NO: 3880788 - RNA, 13 nt, Human
aucugaagauugu

SEQ ID NO: 3880789 - RNA, 18 nt, Human
aucugaagcccucccagg

SEQ ID NO: 3880790 - RNA, 20 nt, Human
aucugaagcuucacucacug

SEQ ID NO: 3880791 - RNA, 15 nt, Human
aucugaaggagauuu

SEQ ID NO: 3880792 - RNA, 21 nt, Human
aucugaaggggcaaauucuuu

SEQ ID NO: 3880793 - RNA, 23 nt, Human
aucugaaggggcaaauucuuuug

SEQ ID NO: 3880794 - RNA, 16 nt, Human
aucugaagucagaucu

SEQ ID NO: 3880795 - RNA, 21 nt, Human
aucugaauaaaguguaacaau

SEQ ID NO: 3880796 - RNA, 16 nt, Human
aucugaauuggaaugc

SEQ ID NO: 3880797 - RNA, 14 nt, Human
aucugaauuuuuaa

SEQ ID NO: 3880798 - RNA, 18 nt, Human
aucugaauuuuuaaacaa

SEQ ID NO: 3880799 - RNA, 13 nt, Human
aucugacacaaaa

SEQ ID NO: 3880800 - RNA, 14 nt, Human
aucugacaucccca

SEQ ID NO: 3880801 - RNA, 15 nt, Human
aucugacaucucugc

SEQ ID NO: 3880802 - RNA, 23 nt, Human
aucugacaugauuccuuccuguu

SEQ ID NO: 3880803 - RNA, 14 nt, Human
aucugacccagugc

SEQ ID NO: 3880804 - RNA, 14 nt, Human
aucugacuaugaca

SEQ ID NO: 3880805 - RNA, 17 nt, Human
aucugacuaugacauaa

SEQ ID NO: 3880806 - RNA, 13 nt, Human
aucugagaaucuu

SEQ ID NO: 3880807 - RNA, 17 nt, Human
aucugagcaagagcugg

SEQ ID NO: 3880808 - RNA, 22 nt, Human
aucugaggaaucaacagggcag

SEQ ID NO: 3880809 - RNA, 18 nt, Human
aucugaggaauucuguau

SEQ ID NO: 3880810 - RNA, 21 nt, Human
aucugaggaauucuguauaga

SEQ ID NO: 3880811 - RNA, 23 nt, Human
aucugaggcauccagcagucucu

SEQ ID NO: 3880812 - RNA, 21 nt, Human
aucugagggaggaggccaccu

SEQ ID NO: 3880813 - RNA, 16 nt, Human
aucugagucagagcca

SEQ ID NO: 3880814 - RNA, 14 nt, Human
aucugaguccugga

SEQ ID NO: 3880815 - RNA, 17 nt, Human
aucugaguccuggauga

SEQ ID NO: 3880816 - RNA, 13 nt, Human
aucugaguugcca

SEQ ID NO: 3880817 - RNA, 14 nt, Human
aucugaguugccaa

SEQ ID NO: 3880818 - RNA, 17 nt, Human
aucugaucugagugaga

SEQ ID NO: 3880819 - RNA, 19 nt, Human
aucugauggccuuaauuuc

SEQ ID NO: 3880820 - RNA, 21 nt, Human
aucugauggccuuaauuuccu

SEQ ID NO: 3880821 - RNA, 18 nt, Human
aucugauggcuucuccag

SEQ ID NO: 3880822 - RNA, 19 nt, Human
aucugauuggacauuuucu

SEQ ID NO: 3880823 - RNA, 21 nt, Human
aucugauuugcauauucauuc

SEQ ID NO: 3880824 - RNA, 21 nt, Human
aucugcaaaaggccucuugua

SEQ ID NO: 3880825 - RNA, 21 nt, Human
aucugcaaagcauguuuugca

SEQ ID NO: 3880826 - RNA, 18 nt, Human
aucugcaauuucuacuac

SEQ ID NO: 3880827 - RNA, 23 nt, Human
aucugcaccccuucucuccuccc

SEQ ID NO: 3880828 - RNA, 12 nt, Human
aucugcacccuu

SEQ ID NO: 3880829 - RNA, 19 nt, Human
aucugcacccuucuuuucu

SEQ ID NO: 3880830 - RNA, 13 nt, Human
aucugcagaagga

SEQ ID NO: 3880831 - RNA, 16 nt, Human
aucugcagucacuucg

SEQ ID NO: 3880832 - RNA, 16 nt, Human
aucugcauugcccagu

SEQ ID NO: 3880833 - RNA, 21 nt, Human
aucugcauugcccagucuuuc

SEQ ID NO: 3880834 - RNA, 22 nt, Human
aucugcauugcccagucuuuca

SEQ ID NO: 3880835 - RNA, 11 nt, Human
aucugcauuua

SEQ ID NO: 3880836 - RNA, 17 nt, Human
aucugcauuuagcacaa

SEQ ID NO: 3880837 - RNA, 19 nt, Human
aucugcauuuucaccccac

SEQ ID NO: 3880838 - RNA, 23 nt, Human
aucugcauuuucaccccacccuu

SEQ ID NO: 3880839 - RNA, 23 nt, Human
aucugcauuuucuggguucuggg

SEQ ID NO: 3880840 - RNA, 16 nt, Human
aucugccaagggccga

SEQ ID NO: 3880841 - RNA, 21 nt, Human
aucugcccaacuguguagcau

SEQ ID NO: 3880842 - RNA, 13 nt, Human
aucugcccagggg

SEQ ID NO: 3880843 - RNA, 11 nt, Human
aucugccccuc

SEQ ID NO: 3880844 - RNA, 14 nt, Human
aucugccccucccu

SEQ ID NO: 3880845 - RNA, 13 nt, Human
aucugcccgccug

SEQ ID NO: 3880846 - RNA, 17 nt, Human
aucugcccgccugccca

SEQ ID NO: 3880847 - RNA, 18 nt, Human
aucugcccgccugcccac

SEQ ID NO: 3880848 - RNA, 19 nt, Human
aucugcccgccugcccacc

SEQ ID NO: 3880849 - RNA, 11 nt, Human
aucugccuaag

SEQ ID NO: 3880850 - RNA, 13 nt, Human
aucugccuaagga

SEQ ID NO: 3880851 - RNA, 16 nt, Human
aucugccuaaggacuu

SEQ ID NO: 3880852 - RNA, 19 nt, Human
aucugccuaaggacuucuu

SEQ ID NO: 3880853 - RNA, 23 nt, Human
aucugccuaaggacuucuuuaau

SEQ ID NO: 3880854 - RNA, 12 nt, Human
aucugccucccu

SEQ ID NO: 3880855 - RNA, 18 nt, Human
aucugccucucuuguaau

SEQ ID NO: 3880856 - RNA, 12 nt, Human
aucugccugggu

SEQ ID NO: 3880857 - RNA, 18 nt, Human
aucugccuuaaaaccaaa

SEQ ID NO: 3880858 - RNA, 19 nt, Human
aucugccuuaaaaccaaag

SEQ ID NO: 3880859 - RNA, 23 nt, Human
aucugcggaucucagcuuugaga

SEQ ID NO: 3880860 - RNA, 18 nt, Human
aucugcgggggcagugcu

SEQ ID NO: 3880861 - RNA, 19 nt, Human
aucugcgggggcagugcuc

SEQ ID NO: 3880862 - RNA, 23 nt, Human
aucugcgggggcagugcucaccc

SEQ ID NO: 3880863 - RNA, 13 nt, Human
aucugcucacuuu

SEQ ID NO: 3880864 - RNA, 15 nt, Human
aucugcucuccuucc

SEQ ID NO: 3880865 - RNA, 16 nt, Human
aucugcucuccuuccu

SEQ ID NO: 3880866 - RNA, 20 nt, Human
aucugcucuccuuccuggag

SEQ ID NO: 3880867 - RNA, 14 nt, Human
aucugcuggaguuu

SEQ ID NO: 3880868 - RNA, 22 nt, Human
aucugcuguccagacagccugu

SEQ ID NO: 3880869 - RNA, 19 nt, Human
aucugcuuacaauucccug

SEQ ID NO: 3880870 - RNA, 21 nt, Human
aucugcuuacaauucccugcu

SEQ ID NO: 3880871 - RNA, 16 nt, Human
aucugcuuuuauuaaa

SEQ ID NO: 3880872 - RNA, 19 nt, Human
aucuggaaccucagccugg

SEQ ID NO: 3880873 - RNA, 13 nt, Human
aucuggaagagcu

SEQ ID NO: 3880874 - RNA, 20 nt, Human
aucuggaaggggaucccacc

SEQ ID NO: 3880875 - RNA, 21 nt, Human
aucuggaauugguuuagccca

SEQ ID NO: 3880876 - RNA, 22 nt, Human
aucuggaccccaucugugaaua

SEQ ID NO: 3880877 - RNA, 16 nt, Human
aucuggacuccucugu

SEQ ID NO: 3880878 - RNA, 19 nt, Human
aucuggagagcccagaguc

SEQ ID NO: 3880879 - RNA, 22 nt, Human
aucuggagagcuagaaccugga

SEQ ID NO: 3880880 - RNA, 23 nt, Human
aucuggagagcuagaaccuggag

SEQ ID NO: 3880881 - RNA, 17 nt, Human
aucuggaggccuuccag

SEQ ID NO: 3880882 - RNA, 17 nt, Human
aucuggauaggagccug

SEQ ID NO: 3880883 - RNA, 16 nt, Human
aucuggcaacaucuuu

SEQ ID NO: 3880884 - RNA, 20 nt, Human
aucuggcccucgacacucac

SEQ ID NO: 3880885 - RNA, 13 nt, Human
aucuggccuggcc

SEQ ID NO: 3880886 - RNA, 14 nt, Human
aucuggccuggcca

SEQ ID NO: 3880887 - RNA, 16 nt, Human
aucuggccuggccagu

SEQ ID NO: 3880888 - RNA, 15 nt, Human
aucuggccuggccug

SEQ ID NO: 3880889 - RNA, 23 nt, Human
aucuggccuggccuggcccugcc

SEQ ID NO: 3880890 - RNA, 16 nt, Human
aucuggcuuauuuuaa

SEQ ID NO: 3880891 - RNA, 12 nt, Human
aucuggcuucug

SEQ ID NO: 3880892 - RNA, 20 nt, Human
aucuggcuucuggccaggaa

SEQ ID NO: 3880893 - RNA, 22 nt, Human
aucuggcuucuggccaggaagc

SEQ ID NO: 3880894 - RNA, 22 nt, Human
aucugggaaaauaccccaucau

SEQ ID NO: 3880895 - RNA, 19 nt, Human
aucugggaacucccaagaa

SEQ ID NO: 3880896 - RNA, 22 nt, Human
aucugggacccuuuccuuccuu

SEQ ID NO: 3880897 - RNA, 15 nt, Human
aucugggccagaauu

SEQ ID NO: 3880898 - RNA, 14 nt, Human
aucugggccugggc

SEQ ID NO: 3880899 - RNA, 16 nt, Human
aucugggccugggcua

SEQ ID NO: 3880900 - RNA, 15 nt, Human
aucugggccuuggcc

SEQ ID NO: 3880901 - RNA, 22 nt, Human
aucugggcuccuaaccuuccug

SEQ ID NO: 3880902 - RNA, 18 nt, Human
aucugggcuuccuggagc

SEQ ID NO: 3880903 - RNA, 16 nt, Human
aucuggggagcaggca

SEQ ID NO: 3880904 - RNA, 23 nt, Human
aucuggggagcaggcagccagca

SEQ ID NO: 3880905 - RNA, 22 nt, Human
aucuggggcagcacccuauaaa

SEQ ID NO: 3880906 - RNA, 16 nt, Human
aucuggggcucuggga

SEQ ID NO: 3880907 - RNA, 18 nt, Human
aucuggguccuugcaccc

SEQ ID NO: 3880908 - RNA, 15 nt, Human
aucugggucucuaau

SEQ ID NO: 3880909 - RNA, 18 nt, Human
aucugggugcaugaucuu

SEQ ID NO: 3880910 - RNA, 19 nt, Human
aucuggguucacugcaacc

SEQ ID NO: 3880911 - RNA, 15 nt, Human
aucugguauuaaaug

SEQ ID NO: 3880912 - RNA, 16 nt, Human
aucugguauuaaaugc

SEQ ID NO: 3880913 - RNA, 18 nt, Human
aucugguccuacccaucc

SEQ ID NO: 3880914 - RNA, 18 nt, Human
aucuggucuuguuagaaa

SEQ ID NO: 3880915 - RNA, 21 nt, Human
aucugguuuauuuuuguucca

SEQ ID NO: 3880916 - RNA, 13 nt, Human
aucugguuuucuc

SEQ ID NO: 3880917 - RNA, 13 nt, Human
aucuguaaacugu

SEQ ID NO: 3880918 - RNA, 22 nt, Human
aucuguaaacuguguauuccaa

SEQ ID NO: 3880919 - RNA, 16 nt, Human
aucuguacauuuuguu

SEQ ID NO: 3880920 - RNA, 20 nt, Human
aucuguacauuuuguuguaa

SEQ ID NO: 3880921 - RNA, 23 nt, Human
aucuguacauuuuguuguaaaaa

SEQ ID NO: 3880922 - RNA, 14 nt, Human
aucuguagggcugg

SEQ ID NO: 3880923 - RNA, 17 nt, Human
aucuguauaaguaagaa

SEQ ID NO: 3880924 - RNA, 15 nt, Human
aucuguauaauacuu

SEQ ID NO: 3880925 - RNA, 16 nt, Human
aucuguauaauacuuu

SEQ ID NO: 3880926 - RNA, 20 nt, Human
aucuguauaauacuuuguau

SEQ ID NO: 3880927 - RNA, 21 nt, Human
aucuguauaauacuuuguaua

SEQ ID NO: 3880928 - RNA, 22 nt, Human
aucuguauauaaaauauuuuca

SEQ ID NO: 3880929 - RNA, 21 nt, Human
aucuguauauacaauaacaua

SEQ ID NO: 3880930 - RNA, 14 nt, Human
auguacuauaacau

SEQ ID NO: 3880931 - RNA, 16 nt, Human
auguacucuacugaua

SEQ ID NO: 3880932 - RNA, 19 nt, Human
auguacugauuucaguaag

SEQ ID NO: 3880933 - RNA, 11 nt, Human
auguacuguac

SEQ ID NO: 3880934 - RNA, 16 nt, Human
auguacuguacuaauu

SEQ ID NO: 3880935 - RNA, 17 nt, Human
auguacuguacuaauuc

SEQ ID NO: 3880936 - RNA, 16 nt, Human
auguacuucaugcugu

SEQ ID NO: 3880937 - RNA, 16 nt, Human
auguacuugucaaaga

SEQ ID NO: 3880938 - RNA, 17 nt, Human
auguacuugucaaagaa

SEQ ID NO: 3880939 - RNA, 19 nt, Human
auguacuuguuucucuguu

SEQ ID NO: 3880940 - RNA, 20 nt, Human
auguacuuuuauuuuacaca

SEQ ID NO: 3880941 - RNA, 17 nt, Human
auguagaauauucagac

SEQ ID NO: 3880942 - RNA, 20 nt, Human
auguagacaguuggguuuuu

SEQ ID NO: 3880943 - RNA, 16 nt, Human
auguagacuauauaca

SEQ ID NO: 3880944 - RNA, 17 nt, Human
auguagacuauauacau

SEQ ID NO: 3880945 - RNA, 23 nt, Human
auguagacuauauacaugugugu

SEQ ID NO: 3880946 - RNA, 20 nt, Human
auguagagcacaauggaauu

SEQ ID NO: 3880947 - RNA, 18 nt, Human
auguagauaaacucagaa

SEQ ID NO: 3880948 - RNA, 19 nt, Human
auguagauaacaagaccuc

SEQ ID NO: 3880949 - RNA, 15 nt, Human
auguagauauuuggc

SEQ ID NO: 3880950 - RNA, 20 nt, Human
auguagauauuuggcuuaaa

SEQ ID NO: 3880951 - RNA, 20 nt, Human
auguagauuuguacaggagu

SEQ ID NO: 3880952 - RNA, 20 nt, Human
auguagcaaacccugucaaa

SEQ ID NO: 3880953 - RNA, 18 nt, Human
auguagcaaucagauuuu

SEQ ID NO: 3880954 - RNA, 14 nt, Human
auguagcaugcuug

SEQ ID NO: 3880955 - RNA, 19 nt, Human
auguagcaugcuuguugca

SEQ ID NO: 3880956 - RNA, 13 nt, Human
auguagcccaucc

SEQ ID NO: 3880957 - RNA, 20 nt, Human
auguagcccauccuucccuu

SEQ ID NO: 3880958 - RNA, 21 nt, Human
auguagcgcuuugaauaugaa

SEQ ID NO: 3880959 - RNA, 14 nt, Human
auguagcugguuuc

SEQ ID NO: 3880960 - RNA, 18 nt, Human
auguagcuuuucaccuuu

SEQ ID NO: 3880961 - RNA, 13 nt, Human
auguaggagggac

SEQ ID NO: 3880962 - RNA, 18 nt, Human
auguaggguaaggugccu

SEQ ID NO: 3880963 - RNA, 16 nt, Human
auguagguaagacugu

SEQ ID NO: 3880964 - RNA, 20 nt, Human
auguagguaagacuguagau

SEQ ID NO: 3880965 - RNA, 22 nt, Human
auguaguaacacuaauauauuu

SEQ ID NO: 3880966 - RNA, 16 nt, Human
auguaguaaguaaauu

SEQ ID NO: 3880967 - RNA, 13 nt, Human
auguaguaauuga

SEQ ID NO: 3880968 - RNA, 14 nt, Human
auguaguaguacuu

SEQ ID NO: 3880969 - RNA, 20 nt, Human
auguaguaugcuaugauuaa

SEQ ID NO: 3880970 - RNA, 14 nt, Human
auguagugccucuu

SEQ ID NO: 3880971 - RNA, 18 nt, Human
auguaguugauguaucca

SEQ ID NO: 3880972 - RNA, 15 nt, Human
auguaguuugaggaa

SEQ ID NO: 3880973 - RNA, 15 nt, Human
auguauaaaauacau

SEQ ID NO: 3880974 - RNA, 22 nt, Human
auguauaaaauacauagugaaa

SEQ ID NO: 3880975 - RNA, 17 nt, Human
auguauaaagaacaagg

SEQ ID NO: 3880976 - RNA, 16 nt, Human
auguauaaaugugaua

SEQ ID NO: 3880977 - RNA, 14 nt, Human
auguauaauauuuu

SEQ ID NO: 3880978 - RNA, 18 nt, Human
auguauauacacauauac

SEQ ID NO: 3880979 - RNA, 16 nt, Human
auguauauacauuuau

SEQ ID NO: 3880980 - RNA, 20 nt, Human
auguauauuaaaaaagagac

SEQ ID NO: 3880981 - RNA, 20 nt, Human
auguauauuuuuuuaauuua

SEQ ID NO: 3880982 - RNA, 13 nt, Human
auguaucaggaaa

SEQ ID NO: 3880983 - RNA, 21 nt, Human
auguaucaggaaauauauaug

SEQ ID NO: 3880984 - RNA, 21 nt, Human
auguaucccuucucacagcac

SEQ ID NO: 3880985 - RNA, 14 nt, Human
auguaucuaagaau

SEQ ID NO: 3880986 - RNA, 15 nt, Human
auguaucuaccucac

SEQ ID NO: 3880987 - RNA, 16 nt, Human
auguaucuauuuauua

SEQ ID NO: 3880988 - RNA, 14 nt, Human
auguaucugaguug

SEQ ID NO: 3880989 - RNA, 18 nt, Human
auguaugaauacagcagc

SEQ ID NO: 3880990 - RNA, 23 nt, Human
auguaugaauacagcagcaagaa

SEQ ID NO: 3880991 - RNA, 18 nt, Human
auguaugagguacaaccu

SEQ ID NO: 3880992 - RNA, 17 nt, Human
auguaugcacacacaua

SEQ ID NO: 3880993 - RNA, 19 nt, Human
auguaugcauguugucuaa

SEQ ID NO: 3880994 - RNA, 17 nt, Human
auguaugcuucauacag

SEQ ID NO: 3880995 - RNA, 18 nt, Human
auguauggaauacagugu

SEQ ID NO: 3880996 - RNA, 20 nt, Human
auguauggaauacaguguua

SEQ ID NO: 3880997 - RNA, 12 nt, Human
auguauguaaaa

SEQ ID NO: 3880998 - RNA, 13 nt, Human
auguauguaaaaa

SEQ ID NO: 3880999 - RNA, 14 nt, Human
auguauguaaaaau

SEQ ID NO: 3881000 - RNA, 15 nt, Human
auguaugugcacugu

SEQ ID NO: 3881001 - RNA, 15 nt, Human
auguauguguaagua

SEQ ID NO: 3881002 - RNA, 15 nt, Human
auguauguguuuaga

SEQ ID NO: 3881003 - RNA, 18 nt, Human
auguauguguuuagaauu

SEQ ID NO: 3881004 - RNA, 21 nt, Human
auguauguguuuagaauugaa

SEQ ID NO: 3881005 - RNA, 14 nt, Human
auguauguuaccaa

SEQ ID NO: 3881006 - RNA, 19 nt, Human
auguauguucagaagaaau

SEQ ID NO: 3881007 - RNA, 20 nt, Human
auguauguucagaagaaauu

SEQ ID NO: 3881008 - RNA, 13 nt, Human
auguauguuuaca

SEQ ID NO: 3881009 - RNA, 17 nt, Human
auguauguuuacacugu

SEQ ID NO: 3881010 - RNA, 21 nt, Human
auguauguuuacacugucaaa

SEQ ID NO: 3881011 - RNA, 17 nt, Human
auguauguuuacauauc

SEQ ID NO: 3881012 - RNA, 12 nt, Human
auguauguuucu

SEQ ID NO: 3881013 - RNA, 14 nt, Human
auguauguuucucu

SEQ ID NO: 3881014 - RNA, 20 nt, Human
auguauguuuugguaucugu

SEQ ID NO: 3881015 - RNA, 12 nt, Human
auguauuaaauu

SEQ ID NO: 3881016 - RNA, 17 nt, Human
auguauuaauauucauu

SEQ ID NO: 3881017 - RNA, 12 nt, Human
auguauuaguga

SEQ ID NO: 3881018 - RNA, 16 nt, Human
auguauuagugauauu

SEQ ID NO: 3881019 - RNA, 23 nt, Human
auguauuagugauauuucucuag

SEQ ID NO: 3881020 - RNA, 12 nt, Human
auguauuauguc

SEQ ID NO: 3881021 - RNA, 24 nt, Human
auguauucagcuuuaguagauauu

SEQ ID NO: 3881022 - RNA, 19 nt, Human
auguauucuagcuaaugua

SEQ ID NO: 3881023 - RNA, 18 nt, Human
auguauucuguaaaagaa

SEQ ID NO: 3881024 - RNA, 17 nt, Human
auguauucuuuucucag

SEQ ID NO: 3881025 - RNA, 14 nt, Human
auguauugauaaga

SEQ ID NO: 3881026 - RNA, 15 nt, Human
auguauuggccugga

SEQ ID NO: 3881027 - RNA, 16 nt, Human
auguauuggccuggag

SEQ ID NO: 3881028 - RNA, 19 nt, Human
auguauuguaaacaugugu

SEQ ID NO: 3881029 - RNA, 13 nt, Human
auguauuguaccu

SEQ ID NO: 3881030 - RNA, 17 nt, Human
auguauugugcaaugug

SEQ ID NO: 3881031 - RNA, 17 nt, Human
auguauuuaccaaaaau

SEQ ID NO: 3881032 - RNA, 16 nt, Human
auguauuuauuuaaaa

SEQ ID NO: 3881033 - RNA, 13 nt, Human
auguauuuguuca

SEQ ID NO: 3881034 - RNA, 19 nt, Human
auguauuuguucauguuug

SEQ ID NO: 3881035 - RNA, 14 nt, Human
auguauuuuaugua

SEQ ID NO: 3881036 - RNA, 20 nt, Human
auguauuuuauguauguuua

SEQ ID NO: 3881037 - RNA, 14 nt, Human
auguauuuuauugu

SEQ ID NO: 3881038 - RNA, 12 nt, Human
auguauuuugug

SEQ ID NO: 3881039 - RNA, 13 nt, Human
auguauuuuguga

SEQ ID NO: 3881040 - RNA, 15 nt, Human
auguauuuugugagu

SEQ ID NO: 3881041 - RNA, 19 nt, Human
auguauuuugugaguuugu

SEQ ID NO: 3881042 - RNA, 19 nt, Human
auguauuuuucuacauuau

SEQ ID NO: 3881043 - RNA, 23 nt, Human
augucaaaaauauuuaggaauuu

SEQ ID NO: 3881044 - RNA, 22 nt, Human
augucaaaaguagaacuuugua

SEQ ID NO: 3881045 - RNA, 14 nt, Human
augucaaacaaaua

SEQ ID NO: 3881046 - RNA, 21 nt, Human
augucaaacaugagaugugug

SEQ ID NO: 3881047 - RNA, 14 nt, Human
augucaaacgugaa

SEQ ID NO: 3881048 - RNA, 14 nt, Human
augucaacuucugg

SEQ ID NO: 3881049 - RNA, 18 nt, Human
augucaacuucuggcucc

SEQ ID NO: 3881050 - RNA, 17 nt, Human
augucaagauucagcua

SEQ ID NO: 3881051 - RNA, 18 nt, Human
augucaaugaacaagcau

SEQ ID NO: 3881052 - RNA, 19 nt, Human
augucaauuucuguguugc

SEQ ID NO: 3881053 - RNA, 12 nt, Human
augucacagggc

SEQ ID NO: 3881054 - RNA, 18 nt, Human
augucaccaccuucccag

SEQ ID NO: 3881055 - RNA, 20 nt, Human
augucaccaccuucccagcu

SEQ ID NO: 3881056 - RNA, 21 nt, Human
augucaccguggaccuuccug

SEQ ID NO: 3881057 - RNA, 16 nt, Human
augucacuagaaugga

SEQ ID NO: 3881058 - RNA, 22 nt, Human
augucacuagaauggauaaaau

SEQ ID NO: 3881059 - RNA, 14 nt, Human
augucacugugguc

SEQ ID NO: 3881060 - RNA, 23 nt, Human
augucagacauccauguuuguaa

SEQ ID NO: 3881061 - RNA, 15 nt, Human
augucagcaaaaagc

SEQ ID NO: 3881062 - RNA, 22 nt, Human
augucagcaaaaagcaaaauca

SEQ ID NO: 3881063 - RNA, 20 nt, Human
augucagcaguugcugguaa

SEQ ID NO: 3881064 - RNA, 22 nt, Human
augucagcaguugcugguaaaa

SEQ ID NO: 3881065 - RNA, 15 nt, Human
augucaggaacagaa

SEQ ID NO: 3881066 - RNA, 16 nt, Human
augucaggccugugug

SEQ ID NO: 3881067 - RNA, 19 nt, Human
augucaggucagccaacug

SEQ ID NO: 3881068 - RNA, 16 nt, Human
augucaguauguggaa

SEQ ID NO: 3881069 - RNA, 18 nt, Human
augucagucugcuuagaa

SEQ ID NO: 3881070 - RNA, 20 nt, Human
augucagucugcuuagaaau

SEQ ID NO: 3881071 - RNA, 15 nt, Human
augucagugcugaug

SEQ ID NO: 3881072 - RNA, 14 nt, Human
augucaguucugau

SEQ ID NO: 3881073 - RNA, 14 nt, Human
augucauacagaga

SEQ ID NO: 3881074 - RNA, 16 nt, Human
augucauacagagaag

SEQ ID NO: 3881075 - RNA, 15 nt, Human
auguugugaauaauu

SEQ ID NO: 3881076 - RNA, 15 nt, Human
auguugugauguauu

SEQ ID NO: 3881077 - RNA, 20 nt, Human
auguuguucauuauuggagg

SEQ ID NO: 3881078 - RNA, 17 nt, Human
auguuguuuauaauaaa

SEQ ID NO: 3881079 - RNA, 18 nt, Human
auguuguuuauaauaaaa

SEQ ID NO: 3881080 - RNA, 23 nt, Human
auguuguuuccuaauaucaaaug

SEQ ID NO: 3881081 - RNA, 15 nt, Human
auguuguuuuguaca

SEQ ID NO: 3881082 - RNA, 18 nt, Human
auguuguuuuguacagau

SEQ ID NO: 3881083 - RNA, 17 nt, Human
auguuuaaaaaaguuua

SEQ ID NO: 3881084 - RNA, 21 nt, Human
auguuuaaaaaaguuuaaaau

SEQ ID NO: 3881085 - RNA, 12 nt, Human
auguuuaaaaca

SEQ ID NO: 3881086 - RNA, 17 nt, Human
auguuuaaaauaaaaug

SEQ ID NO: 3881087 - RNA, 19 nt, Human
auguuuaaaauaaaaugaa

SEQ ID NO: 3881088 - RNA, 21 nt, Human
auguuuaaaguaauuguucca

SEQ ID NO: 3881089 - RNA, 19 nt, Human
auguuuaacuuaaucaauu

SEQ ID NO: 3881090 - RNA, 13 nt, Human
auguuuaagauuu

SEQ ID NO: 3881091 - RNA, 22 nt, Human
auguuuaagcagaauuggaaaa

SEQ ID NO: 3881092 - RNA, 15 nt, Human
auguuuaaucauaua

SEQ ID NO: 3881093 - RNA, 16 nt, Human
auguuuaaucauauaa

SEQ ID NO: 3881094 - RNA, 17 nt, Human
auguuuaaucauauaaa

SEQ ID NO: 3881095 - RNA, 16 nt, Human
auguuuacacucuuug

SEQ ID NO: 3881096 - RNA, 21 nt, Human
auguuuacacucuuuguaaga

SEQ ID NO: 3881097 - RNA, 22 nt, Human
auguuuacacucuuuguaagag

SEQ ID NO: 3881098 - RNA, 22 nt, Human
auguuuacagguggacacacaa

SEQ ID NO: 3881099 - RNA, 13 nt, Human
auguuuacauauc

SEQ ID NO: 3881100 - RNA, 19 nt, Human
auguuuaccuuuuaauuaa

SEQ ID NO: 3881101 - RNA, 13 nt, Human
auguuuauauaaa

SEQ ID NO: 3881102 - RNA, 14 nt, Human
auguuuauauaaau

SEQ ID NO: 3881103 - RNA, 16 nt, Human
auguuuauauaaaugc

SEQ ID NO: 3881104 - RNA, 19 nt, Human
auguuuauauaaaugcuuu

SEQ ID NO: 3881105 - RNA, 18 nt, Human
auguuuaugaaaauaaau

SEQ ID NO: 3881106 - RNA, 14 nt, Human
auguuuaugagcca

SEQ ID NO: 3881107 - RNA, 15 nt, Human
auguuuaugagccag

SEQ ID NO: 3881108 - RNA, 21 nt, Human
auguuuaugagccagacaaau

SEQ ID NO: 3881109 - RNA, 18 nt, Human
auguuuaugcaaggaagg

SEQ ID NO: 3881110 - RNA, 15 nt, Human
auguuuauuacagua

SEQ ID NO: 3881111 - RNA, 14 nt, Human
auguuuauuccuga

SEQ ID NO: 3881112 - RNA, 16 nt, Human
auguuuauucuucuag

SEQ ID NO: 3881113 - RNA, 19 nt, Human
auguuuauucuucuagagu

SEQ ID NO: 3881114 - RNA, 14 nt, Human
auguuuauuucagg

SEQ ID NO: 3881115 - RNA, 18 nt, Human
auguuucaaacauauaua

SEQ ID NO: 3881116 - RNA, 15 nt, Human
auguuucaagaggag

SEQ ID NO: 3881117 - RNA, 17 nt, Human
auguuucacacaaacaa

SEQ ID NO: 3881118 - RNA, 18 nt, Human
auguuucaggaggcugga

SEQ ID NO: 3881119 - RNA, 13 nt, Human
auguuuccaaccu

SEQ ID NO: 3881120 - RNA, 12 nt, Human
auguuuccagca

SEQ ID NO: 3881121 - RNA, 13 nt, Human
auguuuccagcau

SEQ ID NO: 3881122 - RNA, 21 nt, Human
auguuuccagcauucccaggu

SEQ ID NO: 3881123 - RNA, 20 nt, Human
auguuuccucuaguucuuug

SEQ ID NO: 3881124 - RNA, 22 nt, Human
auguuucgcugauauauguguu

SEQ ID NO: 3881125 - RNA, 13 nt, Human
auguuucuaaggu

SEQ ID NO: 3881126 - RNA, 17 nt, Human
auguuucucuggcccca

SEQ ID NO: 3881127 - RNA, 22 nt, Human
auguuucugcaguagucucugu

SEQ ID NO: 3881128 - RNA, 22 nt, Human
auguuucuucuagguucuaaaa

SEQ ID NO: 3881129 - RNA, 16 nt, Human
auguuucuuuuaaaga

SEQ ID NO: 3881130 - RNA, 19 nt, Human
auguuucuuuuguauguaa

SEQ ID NO: 3881131 - RNA, 20 nt, Human
auguuucuuuuguauguaaa

SEQ ID NO: 3881132 - RNA, 16 nt, Human
auguuucuuuuguuug

SEQ ID NO: 3881133 - RNA, 21 nt, Human
auguuucuuuuguuugguaaa

SEQ ID NO: 3881134 - RNA, 12 nt, Human
auguuugaaaug

SEQ ID NO: 3881135 - RNA, 17 nt, Human
auguuugaauauggaca

SEQ ID NO: 3881136 - RNA, 20 nt, Human
auguuugaauuuuucucuuc

SEQ ID NO: 3881137 - RNA, 22 nt, Human
auguuugaggagcauguuuugu

SEQ ID NO: 3881138 - RNA, 21 nt, Human
auguuugcaccuuucuaguug

SEQ ID NO: 3881139 - RNA, 16 nt, Human
auguuugcacuuguga

SEQ ID NO: 3881140 - RNA, 13 nt, Human
auguuugcccaaa

SEQ ID NO: 3881141 - RNA, 14 nt, Human
auguuugccucugc

SEQ ID NO: 3881142 - RNA, 15 nt, Human
auguuugccucugcc

SEQ ID NO: 3881143 - RNA, 17 nt, Human
auguuugccucugccuc

SEQ ID NO: 3881144 - RNA, 18 nt, Human
auguuugccucugccucu

SEQ ID NO: 3881145 - RNA, 22 nt, Human
auguuuggcauguaaauguaaa

SEQ ID NO: 3881146 - RNA, 23 nt, Human
auguuuggcugcuagaacauggu

SEQ ID NO: 3881147 - RNA, 23 nt, Human
auguuugggagacugcugaguca

SEQ ID NO: 3881148 - RNA, 18 nt, Human
auguuugggcagaaggga

SEQ ID NO: 3881149 - RNA, 17 nt, Human
auguuugguaccaagaa

SEQ ID NO: 3881150 - RNA, 20 nt, Human
auguuuggugcauagaacug

SEQ ID NO: 3881151 - RNA, 14 nt, Human
auguuuguacaaga

SEQ ID NO: 3881152 - RNA, 23 nt, Human
auguuuguccugaacacuuuugu

SEQ ID NO: 3881153 - RNA, 20 nt, Human
auguuugucucaguuggaaa

SEQ ID NO: 3881154 - RNA, 19 nt, Human
auguuugugcaguaacuug

SEQ ID NO: 3881155 - RNA, 22 nt, Human
auguuugugcaguaacuuggga

SEQ ID NO: 3881156 - RNA, 15 nt, Human
auguuuguggccuca

SEQ ID NO: 3881157 - RNA, 17 nt, Human
auguuuguggccucaga

SEQ ID NO: 3881158 - RNA, 22 nt, Human
auguuuuaaagaauaugacuuu

SEQ ID NO: 3881159 - RNA, 20 nt, Human
auguuuuaaauauagaauuu

SEQ ID NO: 3881160 - RNA, 15 nt, Human
auguuuuaacaaaaa

SEQ ID NO: 3881161 - RNA, 16 nt, Human
auguuuuaagaggcag

SEQ ID NO: 3881162 - RNA, 16 nt, Human
auguuuuacacuguac

SEQ ID NO: 3881163 - RNA, 12 nt, Human
auguuuucaaau

SEQ ID NO: 3881164 - RNA, 19 nt, Human
auguuuucagcuaggaaca

SEQ ID NO: 3881165 - RNA, 15 nt, Human
auguuuucaggcuag

SEQ ID NO: 3881166 - RNA, 16 nt, Human
auguuuuccagcuccu

SEQ ID NO: 3881167 - RNA, 23 nt, Human
auguuuuccuuugucaucauugu

SEQ ID NO: 3881168 - RNA, 20 nt, Human
auguuuucugaaaauauaac

SEQ ID NO: 3881169 - RNA, 12 nt, Human
auguuuugauaa

SEQ ID NO: 3881170 - RNA, 20 nt, Human
auguuuugauaaaguaguaa

SEQ ID NO: 3881171 - RNA, 21 nt, Human
auguuuugauaaaguaguaaa

SEQ ID NO: 3881172 - RNA, 23 nt, Human
auguuuuggccaaugcaccuaaa

SEQ ID NO: 3881173 - RNA, 20 nt, Human
auguuuugguaucuguucuu

SEQ ID NO: 3881174 - RNA, 23 nt, Human
auguuuugguccacuuuuccagu

SEQ ID NO: 3881175 - RNA, 17 nt, Human
auguuuuguaaacuuug

SEQ ID NO: 3881176 - RNA, 16 nt, Human
auguuuugugcauuug

SEQ ID NO: 3881177 - RNA, 20 nt, Human
auguuuuguuucugaaaauu

SEQ ID NO: 3881178 - RNA, 12 nt, Human
auguuuuuaaaa

SEQ ID NO: 3881179 - RNA, 18 nt, Human
auguuuuuaaaaguuuca

SEQ ID NO: 3881180 - RNA, 20 nt, Human
auguuuuuaaaaguuucaau

SEQ ID NO: 3881181 - RNA, 17 nt, Human
auguuuuuaaauauauu

SEQ ID NO: 3881182 - RNA, 16 nt, Human
auguuuuuaauaaaag

SEQ ID NO: 3881183 - RNA, 13 nt, Human
auguuuuuaauau

SEQ ID NO: 3881184 - RNA, 13 nt, Human
auguuuuuaaugu

SEQ ID NO: 3881185 - RNA, 19 nt, Human
auguuuuuaauguauagua

SEQ ID NO: 3881186 - RNA, 14 nt, Human
auguuuuuauacaa

SEQ ID NO: 3881187 - RNA, 20 nt, Human
auguuuuuauuaagauuauu

SEQ ID NO: 3881188 - RNA, 22 nt, Human
auguuuuucugccagggagcuu

SEQ ID NO: 3881189 - RNA, 14 nt, Human
auguuuuugaaggc

SEQ ID NO: 3881190 - RNA, 19 nt, Human
auguuuuugaaggcagaaa

SEQ ID NO: 3881191 - RNA, 21 nt, Human
auguuuuuguuuucuuugaau

SEQ ID NO: 3881192 - RNA, 19 nt, Human
auguuuuuuagaucaaaua

SEQ ID NO: 3881193 - RNA, 18 nt, Human
auguuuuuugccacagcu

SEQ ID NO: 3881194 - RNA, 22 nt, Human
auguuuuuugccacagcuuuug

SEQ ID NO: 3881195 - RNA, 15 nt, Human
auuaaaaaaaaauug

SEQ ID NO: 3881196 - RNA, 17 nt, Human
auuaaaaaaaaauugua

SEQ ID NO: 3881197 - RNA, 19 nt, Human
auuaaaaaaaacaaaaaga

SEQ ID NO: 3881198 - RNA, 20 nt, Human
auuaaaaaaaacaaaaagaa

SEQ ID NO: 3881199 - RNA, 22 nt, Human
auuaaaaaagagacauccaaau

SEQ ID NO: 3881200 - RNA, 14 nt, Human
auuaaaaaagauaa

SEQ ID NO: 3881201 - RNA, 18 nt, Human
auuaaaaaagauaaacac

SEQ ID NO: 3881202 - RNA, 13 nt, Human
auuaaaaaagucu

SEQ ID NO: 3881203 - RNA, 22 nt, Human
auuaaaaacuaguaguucucuu

SEQ ID NO: 3881204 - RNA, 13 nt, Human
auuaaaaacugag

SEQ ID NO: 3881205 - RNA, 20 nt, Human
auuaaaaacugagugacucu

SEQ ID NO: 3881206 - RNA, 21 nt, Human
auuaaaaagaugguugccaag

SEQ ID NO: 3881207 - RNA, 16 nt, Human
auuaaaaagauucuuu

SEQ ID NO: 3881208 - RNA, 19 nt, Human
auuaaaaagguuuacagaa

SEQ ID NO: 3881209 - RNA, 12 nt, Human
auuaaaaagucu

SEQ ID NO: 3881210 - RNA, 13 nt, Human
auuaaaaagucuu

SEQ ID NO: 3881211 - RNA, 15 nt, Human
auuaaaaagucuuuu

SEQ ID NO: 3881212 - RNA, 22 nt, Human
auuaaaaaugaaauuauuuaua

SEQ ID NO: 3881213 - RNA, 13 nt, Human
auuaaaaauggua

SEQ ID NO: 3881214 - RNA, 20 nt, Human
auuaaaaauuggcuaguuga

SEQ ID NO: 3881215 - RNA, 13 nt, Human
auuaaaacaaugu

SEQ ID NO: 3881216 - RNA, 18 nt, Human
auuaaaacugaagucuga

SEQ ID NO: 3881217 - RNA, 20 nt, Human
auuaaaacugaagucugaaa

SEQ ID NO: 3881218 - RNA, 21 nt, Human
auuaaaacugaagucugaaau

SEQ ID NO: 3881219 - RNA, 22 nt, Human
auugucuccuauauauuucuau

SEQ ID NO: 3881220 - RNA, 23 nt, Human
auugucuccuauauauuucuauu

SEQ ID NO: 3881221 - RNA, 23 nt, Human
auugucugaaaagugaagacaga

SEQ ID NO: 3881222 - RNA, 23 nt, Human
auugucuuaauggaugaaaucau

SEQ ID NO: 3881223 - RNA, 20 nt, Human
auugucuuuaaaaacuguuu

SEQ ID NO: 3881224 - RNA, 17 nt, Human
auugucuuuauaugaac

SEQ ID NO: 3881225 - RNA, 14 nt, Human
auugugaacucauu

SEQ ID NO: 3881226 - RNA, 15 nt, Human
auugugaacucauug

SEQ ID NO: 3881227 - RNA, 17 nt, Human
auugugaacucauugcu

SEQ ID NO: 3881228 - RNA, 16 nt, Human
auugugaacugacagg

SEQ ID NO: 3881229 - RNA, 15 nt, Human
auugugaaguacaua

SEQ ID NO: 3881230 - RNA, 17 nt, Human
auugugaccaaguuaua

SEQ ID NO: 3881231 - RNA, 17 nt, Human
auugugaucagaccaua

SEQ ID NO: 3881232 - RNA, 14 nt, Human
auugugauguauau

SEQ ID NO: 3881233 - RNA, 13 nt, Human
auugugauguguc

SEQ ID NO: 3881234 - RNA, 16 nt, Human
auugugauuagacaga

SEQ ID NO: 3881235 - RNA, 18 nt, Human
auugugauucugccuuug

SEQ ID NO: 3881236 - RNA, 17 nt, Human
auugugauuugacuguu

SEQ ID NO: 3881237 - RNA, 15 nt, Human
auugugcaaauggaa

SEQ ID NO: 3881238 - RNA, 15 nt, Human
auugugcaauguaaa

SEQ ID NO: 3881239 - RNA, 18 nt, Human
auugugcaauguaaauau

SEQ ID NO: 3881240 - RNA, 20 nt, Human
auugugcaauguaaauauuu

SEQ ID NO: 3881241 - RNA, 15 nt, Human
auugugcaaugugua

SEQ ID NO: 3881242 - RNA, 21 nt, Human
auugugcaauguguauaaaca

SEQ ID NO: 3881243 - RNA, 22 nt, Human
auugugcaauguguauaaacaa

SEQ ID NO: 3881244 - RNA, 15 nt, Human
auugugcauucuaga

SEQ ID NO: 3881245 - RNA, 15 nt, Human
auugugcucagagac

SEQ ID NO: 3881246 - RNA, 15 nt, Human
auugugcuucacagu

SEQ ID NO: 3881247 - RNA, 24 nt, Human
auugugcuucacaguagagccagc

SEQ ID NO: 3881248 - RNA, 14 nt, Human
auugugcuucuccc

SEQ ID NO: 3881249 - RNA, 15 nt, Human
auugugcuucuuucu

SEQ ID NO: 3881250 - RNA, 13 nt, Human
auugugggaaggg

SEQ ID NO: 3881251 - RNA, 19 nt, Human
auugugggcauaaacuguu

SEQ ID NO: 3881252 - RNA, 21 nt, Human
auuguggggaugaugaaauaa

SEQ ID NO: 3881253 - RNA, 22 nt, Human
auugugguuauuuuuauacagu

SEQ ID NO: 3881254 - RNA, 20 nt, Human
auugugguuuauauauuuaa

SEQ ID NO: 3881255 - RNA, 23 nt, Human
auuguguaacaauuuuaaugcua

SEQ ID NO: 3881256 - RNA, 14 nt, Human
auuguguagccuuu

SEQ ID NO: 3881257 - RNA, 16 nt, Human
auuguguagccuuuuu

SEQ ID NO: 3881258 - RNA, 22 nt, Human
auuguguagccuuuuuguauaa

SEQ ID NO: 3881259 - RNA, 14 nt, Human
auugugucucuugg

SEQ ID NO: 3881260 - RNA, 18 nt, Human
auugugucucuugguccu

SEQ ID NO: 3881261 - RNA, 21 nt, Human
auugugucucuugguccugcu

SEQ ID NO: 3881262 - RNA, 15 nt, Human
auugugucuuuugca

SEQ ID NO: 3881263 - RNA, 14 nt, Human
auugugugaacuug

SEQ ID NO: 3881264 - RNA, 18 nt, Human
auugugugauauuucaga

SEQ ID NO: 3881265 - RNA, 16 nt, Human
auuguguguuauuuaa

SEQ ID NO: 3881266 - RNA, 18 nt, Human
auuguguguuauuuaaau

SEQ ID NO: 3881267 - RNA, 20 nt, Human
auuguguuaccuguagauuc

SEQ ID NO: 3881268 - RNA, 20 nt, Human
auuguguucccauuucagcu

SEQ ID NO: 3881269 - RNA, 14 nt, Human
auuguguuccuuuu

SEQ ID NO: 3881270 - RNA, 17 nt, Human
auuguguugugaauguu

SEQ ID NO: 3881271 - RNA, 15 nt, Human
auuguguuuacauuu

SEQ ID NO: 3881272 - RNA, 18 nt, Human
auuguguuuacauuuuau

SEQ ID NO: 3881273 - RNA, 22 nt, Human
auuguguuuacauuuuauggug

SEQ ID NO: 3881274 - RNA, 15 nt, Human
auuguguuugucauu

SEQ ID NO: 3881275 - RNA, 18 nt, Human
auuguguuugucauuagc

SEQ ID NO: 3881276 - RNA, 22 nt, Human
auuguguuugucauuagccuga

SEQ ID NO: 3881277 - RNA, 13 nt, Human
auuguguuugugu

SEQ ID NO: 3881278 - RNA, 22 nt, Human
auuguuaagucuaaauauuucc

SEQ ID NO: 3881279 - RNA, 15 nt, Human
auuguuaauugcuga

SEQ ID NO: 3881280 - RNA, 19 nt, Human
auuguuaauugcugaggca

SEQ ID NO: 3881281 - RNA, 17 nt, Human
auuguuacucuuacgaa

SEQ ID NO: 3881282 - RNA, 14 nt, Human
auuguuauuaaaug

SEQ ID NO: 3881283 - RNA, 15 nt, Human
auuguucaaacaaua

SEQ ID NO: 3881284 - RNA, 12 nt, Human
auuguucauuuu

SEQ ID NO: 3881285 - RNA, 17 nt, Human
auuguuccaagacauug

SEQ ID NO: 3881286 - RNA, 24 nt, Human
auuguuccagcaguuuucaaguca

SEQ ID NO: 3881287 - RNA, 17 nt, Human
auuguuccuaaguucuu

SEQ ID NO: 3881288 - RNA, 14 nt, Human
auuguucuuuucaa

SEQ ID NO: 3881289 - RNA, 18 nt, Human
auuguugacaacugugac

SEQ ID NO: 3881290 - RNA, 19 nt, Human
auuguugagcuauugcugu

SEQ ID NO: 3881291 - RNA, 20 nt, Human
auuguugagguggucugaau

SEQ ID NO: 3881292 - RNA, 14 nt, Human
auuguugcauugcu

SEQ ID NO: 3881293 - RNA, 16 nt, Human
auuguugcauugcuuu

SEQ ID NO: 3881294 - RNA, 16 nt, Human
auuguugcucccugug

SEQ ID NO: 3881295 - RNA, 21 nt, Human
auuguuguacacagaaauaca

SEQ ID NO: 3881296 - RNA, 14 nt, Human
auuguuguauaauu

SEQ ID NO: 3881297 - RNA, 15 nt, Human
auuguuguauaauuu

SEQ ID NO: 3881298 - RNA, 14 nt, Human
auuguuguucuguu

SEQ ID NO: 3881299 - RNA, 19 nt, Human
auuguuguuugccauacuu

SEQ ID NO: 3881300 - RNA, 22 nt, Human
auuguuguuugccauacuuugu

SEQ ID NO: 3881301 - RNA, 18 nt, Human
auuguuguuuguauguau

SEQ ID NO: 3881302 - RNA, 20 nt, Human
auuguuguuuguauguauaa

SEQ ID NO: 3881303 - RNA, 22 nt, Human
auuguuuaaaaaccgaauaaau

SEQ ID NO: 3881304 - RNA, 22 nt, Human
auuguuuaaaaaucuuaaugua

SEQ ID NO: 3881305 - RNA, 19 nt, Human
auuguuuaaaaucauuucu

SEQ ID NO: 3881306 - RNA, 16 nt, Human
auuguuuaaaauguaa

SEQ ID NO: 3881307 - RNA, 20 nt, Human
auuguuuaaagcaacugucu

SEQ ID NO: 3881308 - RNA, 17 nt, Human
auuguuuaucuagaugu

SEQ ID NO: 3881309 - RNA, 20 nt, Human
auuguuuaucuagauguaaa

SEQ ID NO: 3881310 - RNA, 13 nt, Human
auuguuuauguaa

SEQ ID NO: 3881311 - RNA, 14 nt, Human
auuguuuauucuuu

SEQ ID NO: 3881312 - RNA, 15 nt, Human
auuguuuauuuauca

SEQ ID NO: 3881313 - RNA, 18 nt, Human
auuguuuauuuaucagug

SEQ ID NO: 3881314 - RNA, 19 nt, Human
auuguuucuauacaaauau

SEQ ID NO: 3881315 - RNA, 17 nt, Human
auuguuucugcauucau

SEQ ID NO: 3881316 - RNA, 19 nt, Human
auuguuucuuuaagaaagu

SEQ ID NO: 3881317 - RNA, 20 nt, Human
auuguuucuuuaagaaagua

SEQ ID NO: 3881318 - RNA, 17 nt, Human
auuguuugaaacaaaga

SEQ ID NO: 3881319 - RNA, 12 nt, Human
auuguuugcugc

SEQ ID NO: 3881320 - RNA, 15 nt, Human
auuguuugcugcuau

SEQ ID NO: 3881321 - RNA, 19 nt, Human
auuguuugcuuauuguucc

SEQ ID NO: 3881322 - RNA, 21 nt, Human
auuguuugcuuauuguuccaa

SEQ ID NO: 3881323 - RNA, 18 nt, Human
auuguuuggcuuccuccu

SEQ ID NO: 3881324 - RNA, 17 nt, Human
auuguuugguaaauguu

SEQ ID NO: 3881325 - RNA, 16 nt, Human
auuguuugucuuuaac

SEQ ID NO: 3881326 - RNA, 13 nt, Human
auuguuuuaaucu

SEQ ID NO: 3881327 - RNA, 18 nt, Human
auuguuuuaaucugaaau

SEQ ID NO: 3881328 - RNA, 14 nt, Human
auuguuuuacaaua

SEQ ID NO: 3881329 - RNA, 18 nt, Human
auuguuuuacaauaguuc

SEQ ID NO: 3881330 - RNA, 19 nt, Human
auuguuuuacaauaguucu

SEQ ID NO: 3881331 - RNA, 18 nt, Human
auuguuuuaucaugacau

SEQ ID NO: 3881332 - RNA, 18 nt, Human
auuguuuucuauuuaugc

SEQ ID NO: 3881333 - RNA, 15 nt, Human
auuguuuugaauauu

SEQ ID NO: 3881334 - RNA, 17 nt, Human
auuguuuugaauauuac

SEQ ID NO: 3881335 - RNA, 20 nt, Human
auuguuuugagcuuuccaug

SEQ ID NO: 3881336 - RNA, 18 nt, Human
auuguuuugguuugcuac

SEQ ID NO: 3881337 - RNA, 14 nt, Human
auuguuuuucuuuc

SEQ ID NO: 3881338 - RNA, 15 nt, Human
auuguuuuucuuucu

SEQ ID NO: 3881339 - RNA, 19 nt, Human
auuguuuuucuuucuacaa

SEQ ID NO: 3881340 - RNA, 19 nt, Human
auuuaaaaaaaaaagagga

SEQ ID NO: 3881341 - RNA, 17 nt, Human
auuuaaaaaaaaaccug

SEQ ID NO: 3881342 - RNA, 14 nt, Human
auuuaaaaaaaauc

SEQ ID NO: 3881343 - RNA, 13 nt, Human
auuuaaaaaacua

SEQ ID NO: 3881344 - RNA, 20 nt, Human
auuuaaaaacaaaaggcaau

SEQ ID NO: 3881345 - RNA, 14 nt, Human
auuuaaaaacugga

SEQ ID NO: 3881346 - RNA, 16 nt, Human
auuuaaaaacuggaac

SEQ ID NO: 3881347 - RNA, 18 nt, Human
auuuaaaaauaagucaac

SEQ ID NO: 3881348 - RNA, 19 nt, Human
auuuaaaaauaagucaaca

SEQ ID NO: 3881349 - RNA, 18 nt, Human
auuuaaaaauauuuuugg

SEQ ID NO: 3881350 - RNA, 16 nt, Human
auuuaaaaaugucuug

SEQ ID NO: 3881351 - RNA, 15 nt, Human
auuuaaaacagacac

SEQ ID NO: 3881352 - RNA, 23 nt, Human
auuuaaaacagacacuggcaugg

SEQ ID NO: 3881353 - RNA, 14 nt, Human
auuuaaaacaugua

SEQ ID NO: 3881354 - RNA, 15 nt, Human
auuuaaaacauguaa

SEQ ID NO: 3881355 - RNA, 17 nt, Human
auuuaaaacuguaauuu

SEQ ID NO: 3881356 - RNA, 15 nt, Human
auuuaaaagccugcu

SEQ ID NO: 3881357 - RNA, 17 nt, Human
auuuaaaagccugcuca

SEQ ID NO: 3881358 - RNA, 20 nt, Human
auuuaaaaguaaaaugucuu

SEQ ID NO: 3881359 - RNA, 15 nt, Human
auuuaaaauagcaaa

SEQ ID NO: 3881360 - RNA, 18 nt, Human
auuuaaaauagcaaaaga

SEQ ID NO: 3881361 - RNA, 20 nt, Human
auuuaaaauugugauguguc

SEQ ID NO: 3881362 - RNA, 15 nt, Human
auuuaaacaaacaaa

SEQ ID NO: 3881363 - RNA, 18 nt, Human
auuuaaacagauguccau

SEQ ID NO: 3881364 - RNA, 15 nt, Human
auuugugagauuccu

SEQ ID NO: 3881365 - RNA, 21 nt, Human
auuugugaugacaacuggaau

SEQ ID NO: 3881366 - RNA, 17 nt, Human
auuugugauguacugua

SEQ ID NO: 3881367 - RNA, 16 nt, Human
auuugugcauuuucua

SEQ ID NO: 3881368 - RNA, 21 nt, Human
auuugugccgacacuguucuc

SEQ ID NO: 3881369 - RNA, 22 nt, Human
auuuguggguuuuuauuuccua

SEQ ID NO: 3881370 - RNA, 18 nt, Human
auuuguguaauaaagugu

SEQ ID NO: 3881371 - RNA, 20 nt, Human
auuuguguaauaaaguguuu

SEQ ID NO: 3881372 - RNA, 22 nt, Human
auuuguguauuuaacagggagg

SEQ ID NO: 3881373 - RNA, 21 nt, Human
auuuguguggagucauuucug

SEQ ID NO: 3881374 - RNA, 23 nt, Human
auuuguguggagucauuucugau

SEQ ID NO: 3881375 - RNA, 14 nt, Human
auuugugugugugc

SEQ ID NO: 3881376 - RNA, 14 nt, Human
auuuguguugaaga

SEQ ID NO: 3881377 - RNA, 13 nt, Human
auuuguguuuuaa

SEQ ID NO: 3881378 - RNA, 20 nt, Human
auuuguguuuuaauuuaaac

SEQ ID NO: 3881379 - RNA, 22 nt, Human
auuuguuaaaauacaguucugu

SEQ ID NO: 3881380 - RNA, 16 nt, Human
auuuguuaaauauuua

SEQ ID NO: 3881381 - RNA, 13 nt, Human
auuuguuaaauug

SEQ ID NO: 3881382 - RNA, 14 nt, Human
auuuguuauaauga

SEQ ID NO: 3881383 - RNA, 16 nt, Human
auuuguuauucuuaag

SEQ ID NO: 3881384 - RNA, 16 nt, Human
auuuguuauuuugcaa

SEQ ID NO: 3881385 - RNA, 12 nt, Human
auuuguucaagu

SEQ ID NO: 3881386 - RNA, 12 nt, Human
auuuguucaugu

SEQ ID NO: 3881387 - RNA, 15 nt, Human
auuuguucugggagu

SEQ ID NO: 3881388 - RNA, 13 nt, Human
auuuguucuugua

SEQ ID NO: 3881389 - RNA, 20 nt, Human
auuuguugaaauuauguaug

SEQ ID NO: 3881390 - RNA, 16 nt, Human
auuuguugauucucuc

SEQ ID NO: 3881391 - RNA, 20 nt, Human
auuuguuggggcuuuacaua

SEQ ID NO: 3881392 - RNA, 12 nt, Human
auuuguuuaaaa

SEQ ID NO: 3881393 - RNA, 17 nt, Human
auuuguuuaaaaaguaa

SEQ ID NO: 3881394 - RNA, 13 nt, Human
auuuguuuaaaag

SEQ ID NO: 3881395 - RNA, 19 nt, Human
auuuguuuauguaauuuca

SEQ ID NO: 3881396 - RNA, 23 nt, Human
auuuguuugguuauagugcaaua

SEQ ID NO: 3881397 - RNA, 15 nt, Human
auuuguuugugcuuc

SEQ ID NO: 3881398 - RNA, 17 nt, Human
auuuguuuucacuuuuu

SEQ ID NO: 3881399 - RNA, 13 nt, Human
auuuguuuucccg

SEQ ID NO: 3881400 - RNA, 19 nt, Human
auuuguuuucccgccaagc

SEQ ID NO: 3881401 - RNA, 21 nt, Human
auuuguuuugacggaugauug

SEQ ID NO: 3881402 - RNA, 21 nt, Human
auuuguuuugccaauuugcac

SEQ ID NO: 3881403 - RNA, 23 nt, Human
auuuguuuugccaauuugcacau

SEQ ID NO: 3881404 - RNA, 15 nt, Human
auuuguuuuggauau

SEQ ID NO: 3881405 - RNA, 16 nt, Human
auuuguuuuguuuaca

SEQ ID NO: 3881406 - RNA, 15 nt, Human
auuuguuuuucauuc

SEQ ID NO: 3881407 - RNA, 14 nt, Human
auuuuaaaaaauga

SEQ ID NO: 3881408 - RNA, 16 nt, Human
auuuuaaaaaaugaaa

SEQ ID NO: 3881409 - RNA, 18 nt, Human
auuuuaaaaagucuucac

SEQ ID NO: 3881410 - RNA, 15 nt, Human
auuuuaaaaauacau

SEQ ID NO: 3881411 - RNA, 13 nt, Human
auuuuaaaaaugg

SEQ ID NO: 3881412 - RNA, 15 nt, Human
auuuuaaaaauggug

SEQ ID NO: 3881413 - RNA, 18 nt, Human
auuuuaaaacaauaggau

SEQ ID NO: 3881414 - RNA, 23 nt, Human
auuuuaaaagaaugauuaugaau

SEQ ID NO: 3881415 - RNA, 16 nt, Human
auuuuaaaauaaacuu

SEQ ID NO: 3881416 - RNA, 19 nt, Human
auuuuaaaauaaacuuucu

SEQ ID NO: 3881417 - RNA, 18 nt, Human
auuuuaaaauguacaugu

SEQ ID NO: 3881418 - RNA, 14 nt, Human
auuuuaaaauuuca

SEQ ID NO: 3881419 - RNA, 16 nt, Human
auuuuaaaauuucaua

SEQ ID NO: 3881420 - RNA, 15 nt, Human
auuuuaaacaaaaua

SEQ ID NO: 3881421 - RNA, 21 nt, Human
auuuuaaacuagaugaccuca

SEQ ID NO: 3881422 - RNA, 23 nt, Human
auuuuaaacuagaugaccucauu

SEQ ID NO: 3881423 - RNA, 12 nt, Human
auuuuaaagaca

SEQ ID NO: 3881424 - RNA, 15 nt, Human
auuuuaaagaccccu

SEQ ID NO: 3881425 - RNA, 14 nt, Human
auuuuaaauaaaag

SEQ ID NO: 3881426 - RNA, 19 nt, Human
auuuuaaaucuaaaucuau

SEQ ID NO: 3881427 - RNA, 15 nt, Human
auuuuaaauggacag

SEQ ID NO: 3881428 - RNA, 13 nt, Human
auuuuaaaugugu

SEQ ID NO: 3881429 - RNA, 13 nt, Human
auuuuaaauuaua

SEQ ID NO: 3881430 - RNA, 17 nt, Human
auuuuaaauuauaagga

SEQ ID NO: 3881431 - RNA, 13 nt, Human
auuuuaacaagaa

SEQ ID NO: 3881432 - RNA, 17 nt, Human
auuuuaacaagaagaug

SEQ ID NO: 3881433 - RNA, 14 nt, Human
auuuuaacaauaac

SEQ ID NO: 3881434 - RNA, 15 nt, Human
auuuuaacaauaacu

SEQ ID NO: 3881435 - RNA, 16 nt, Human
auuuuaacaauaacua

SEQ ID NO: 3881436 - RNA, 15 nt, Human
auuuuaacacacaua

SEQ ID NO: 3881437 - RNA, 20 nt, Human
auuuuaacacacauaaagga

SEQ ID NO: 3881438 - RNA, 21 nt, Human
auuuuaacacacauaaaggau

SEQ ID NO: 3881439 - RNA, 13 nt, Human
auuuuaacaugga

SEQ ID NO: 3881440 - RNA, 18 nt, Human
auuuuaacuaaauuuuaa

SEQ ID NO: 3881441 - RNA, 19 nt, Human
auuuuaacuuaacugaaau

SEQ ID NO: 3881442 - RNA, 19 nt, Human
auuuuaagacguguuugug

SEQ ID NO: 3881443 - RNA, 14 nt, Human
auuuuaagcacucu

SEQ ID NO: 3881444 - RNA, 14 nt, Human
auuuuaagcauuac

SEQ ID NO: 3881445 - RNA, 15 nt, Human
auuuuaagcauuacu

SEQ ID NO: 3881446 - RNA, 15 nt, Human
auuuuaagcauugug

SEQ ID NO: 3881447 - RNA, 19 nt, Human
auuuuaagcauugugagua

SEQ ID NO: 3881448 - RNA, 16 nt, Human
auuuuaagccuuuguu

SEQ ID NO: 3881449 - RNA, 22 nt, Human
auuuuaagccuuuguugaacug

SEQ ID NO: 3881450 - RNA, 23 nt, Human
auuuuaagccuuuguugaacugu

SEQ ID NO: 3881451 - RNA, 16 nt, Human
auuuuaagcuaggaaa

SEQ ID NO: 3881452 - RNA, 19 nt, Human
auuuuaaguauugcaucug

SEQ ID NO: 3881453 - RNA, 22 nt, Human
auuuuaaguauugcaucuguau

SEQ ID NO: 3881454 - RNA, 23 nt, Human
auuuuaaguauugcaucuguaua

SEQ ID NO: 3881455 - RNA, 12 nt, Human
auuuuaagugcu

SEQ ID NO: 3881456 - RNA, 14 nt, Human
auuuuaagugcuuu

SEQ ID NO: 3881457 - RNA, 20 nt, Human
auuuuaagugcuuuguaaug

SEQ ID NO: 3881458 - RNA, 13 nt, Human
auuuuaaucuaau

SEQ ID NO: 3881459 - RNA, 22 nt, Human
auuuuaauguacuaauauuucu

SEQ ID NO: 3881460 - RNA, 16 nt, Human
auuuuaaugugaugau

SEQ ID NO: 3881461 - RNA, 13 nt, Human
auuuuaauuauua

SEQ ID NO: 3881462 - RNA, 15 nt, Human
auuuuaauucaguug

SEQ ID NO: 3881463 - RNA, 12 nt, Human
auuuuaauucau

SEQ ID NO: 3881464 - RNA, 13 nt, Human
auuuuaauuguca

SEQ ID NO: 3881465 - RNA, 15 nt, Human
auuuuaauugucaug

SEQ ID NO: 3881466 - RNA, 15 nt, Human
auuuuaauuuaguaa

SEQ ID NO: 3881467 - RNA, 20 nt, Human
auuuuaauuuaguaaauguu

SEQ ID NO: 3881468 - RNA, 18 nt, Human
auuuuaauuuaugaguuu

SEQ ID NO: 3881469 - RNA, 13 nt, Human
auuuuaauuucaa

SEQ ID NO: 3881470 - RNA, 18 nt, Human
auuuuaauuuuaaccaaa

SEQ ID NO: 3881471 - RNA, 17 nt, Human
auuuuaauuuuuaaaug

SEQ ID NO: 3881472 - RNA, 19 nt, Human
auuuuaauuuuugcuuuua

SEQ ID NO: 3881473 - RNA, 13 nt, Human
auuuuacaauuga

SEQ ID NO: 3881474 - RNA, 17 nt, Human
auuuuacaauugaaaug

SEQ ID NO: 3881475 - RNA, 12 nt, Human
auuuuacaauuu

SEQ ID NO: 3881476 - RNA, 18 nt, Human
auuuuacacagaaacacu

SEQ ID NO: 3881477 - RNA, 23 nt, Human
auuuuacacagaaacacugccuu

SEQ ID NO: 3881478 - RNA, 19 nt, Human
auuuuacacauuagauuuu

SEQ ID NO: 3881479 - RNA, 21 nt, Human
auuuuacacgcuuuugugaug

SEQ ID NO: 3881480 - RNA, 13 nt, Human
auuuuacagagcg

SEQ ID NO: 3881481 - RNA, 14 nt, Human
auuuuacaguuaag

SEQ ID NO: 3881482 - RNA, 13 nt, Human
auuuuacaugaag

SEQ ID NO: 3881483 - RNA, 20 nt, Human
auuuuaccaaguuauauaaa

SEQ ID NO: 3881484 - RNA, 22 nt, Human
auuuuaccaaguuauauaaaga

SEQ ID NO: 3881485 - RNA, 17 nt, Human
auuuuacuacuguggaa

SEQ ID NO: 3881486 - RNA, 22 nt, Human
auuuuacuacuguggaaaaaua

SEQ ID NO: 3881487 - RNA, 15 nt, Human
auuuuacugucuuaa

SEQ ID NO: 3881488 - RNA, 18 nt, Human
auuuuacuucuagagaua

SEQ ID NO: 3881489 - RNA, 17 nt, Human
auuuuacuuuuuggaaa

SEQ ID NO: 3881490 - RNA, 15 nt, Human
auuuuagaaauauuc

SEQ ID NO: 3881491 - RNA, 16 nt, Human
auuuuagaauaaauuc

SEQ ID NO: 3881492 - RNA, 13 nt, Human
auuuuagcagaga

SEQ ID NO: 3881493 - RNA, 18 nt, Human
auuuuagcgugcucacug

SEQ ID NO: 3881494 - RNA, 16 nt, Human
auuuuagcugcagaac

SEQ ID NO: 3881495 - RNA, 13 nt, Human
auuuuaggaaagg

SEQ ID NO: 3881496 - RNA, 15 nt, Human
auuuuaggaaaggau

SEQ ID NO: 3881497 - RNA, 21 nt, Human
auuuuaggaaaugaaugugug

SEQ ID NO: 3881498 - RNA, 17 nt, Human
auuuuaggaacuucaga

SEQ ID NO: 3881499 - RNA, 19 nt, Human
auuuuaggaacuucagaga

SEQ ID NO: 3881500 - RNA, 18 nt, Human
auuuuaggagcuaaggcu

SEQ ID NO: 3881501 - RNA, 20 nt, Human
auuuuaggagcuaaggcucu

SEQ ID NO: 3881502 - RNA, 21 nt, Human
auuuuaggagcuaaggcucua

SEQ ID NO: 3881503 - RNA, 15 nt, Human
auuuuagguguugau

SEQ ID NO: 3881504 - RNA, 17 nt, Human
auuuuaguauauuuaua

SEQ ID NO: 3881505 - RNA, 13 nt, Human
auuuuaguauuca

SEQ ID NO: 3881506 - RNA, 16 nt, Human
auuuuaguauucauuc

SEQ ID NO: 3881507 - RNA, 19 nt, Human
auuuuaguauucauucugc

SEQ ID NO: 3881508 - RNA, 20 nt, Human
auuuuaguauucauucugca

SEQ ID NO: 3881509 - RNA, 14 nt, Human
auuuuagucacuuu

SEQ ID NO: 3881510 - RNA, 19 nt, Human
caacuuuuuauugccuucu

SEQ ID NO: 3881511 - RNA, 15 nt, Human
caagaaaaaaaaaug

SEQ ID NO: 3881512 - RNA, 16 nt, Human
caagaaaaaaaaaugc

SEQ ID NO: 3881513 - RNA, 19 nt, Human
caagaaaaaaaaaugccau

SEQ ID NO: 3881514 - RNA, 20 nt, Human
caagaaaaauaaagaaaaga

SEQ ID NO: 3881515 - RNA, 21 nt, Human
caagaaaacaggcacugcccu

SEQ ID NO: 3881516 - RNA, 12 nt, Human
caagaaaacaua

SEQ ID NO: 3881517 - RNA, 18 nt, Human
caagaaaauaagagcuca

SEQ ID NO: 3881518 - RNA, 12 nt, Human
caagaaaaucag

SEQ ID NO: 3881519 - RNA, 12 nt, Human
caagaaacagcc

SEQ ID NO: 3881520 - RNA, 18 nt, Human
caagaaacagccagcaag

SEQ ID NO: 3881521 - RNA, 15 nt, Human
caagaaagaaacccg

SEQ ID NO: 3881522 - RNA, 15 nt, Human
caagaaagccagucu

SEQ ID NO: 3881523 - RNA, 16 nt, Human
caagaaagccagucuu

SEQ ID NO: 3881524 - RNA, 20 nt, Human
caagaaagcucacuguagcu

SEQ ID NO: 3881525 - RNA, 12 nt, Human
caagaaaggaga

SEQ ID NO: 3881526 - RNA, 21 nt, Human
caagaaagggccaggagaugg

SEQ ID NO: 3881527 - RNA, 22 nt, Human
caagaaagggccaggagaugga

SEQ ID NO: 3881528 - RNA, 15 nt, Human
caagaaaucccuguu

SEQ ID NO: 3881529 - RNA, 15 nt, Human
caagaaaugaaagca

SEQ ID NO: 3881530 - RNA, 17 nt, Human
caagaaaugaaagcagg

SEQ ID NO: 3881531 - RNA, 19 nt, Human
caagaaaugaaagcaggga

SEQ ID NO: 3881532 - RNA, 13 nt, Human
caagaaauuugau

SEQ ID NO: 3881533 - RNA, 17 nt, Human
caagaacacacacauau

SEQ ID NO: 3881534 - RNA, 13 nt, Human
caagaacagcagg

SEQ ID NO: 3881535 - RNA, 10 nt, Human
caagaaccug

SEQ ID NO: 3881536 - RNA, 21 nt, Human
caagaacucaucacuguggcu

SEQ ID NO: 3881537 - RNA, 14 nt, Human
caagaacuuguuua

SEQ ID NO: 3881538 - RNA, 19 nt, Human
caagaagaagggcacccua

SEQ ID NO: 3881539 - RNA, 20 nt, Human
caagaagaucacgcuccccg

SEQ ID NO: 3881540 - RNA, 21 nt, Human
caagaagaucacgcuccccgc

SEQ ID NO: 3881541 - RNA, 12 nt, Human
caagaagaugaa

SEQ ID NO: 3881542 - RNA, 13 nt, Human
caagaagaugaau

SEQ ID NO: 3881543 - RNA, 18 nt, Human
caagaagaugaauggcgu

SEQ ID NO: 3881544 - RNA, 21 nt, Human
caagaagcaauguuauaaagu

SEQ ID NO: 3881545 - RNA, 14 nt, Human
caagaagcaguggc

SEQ ID NO: 3881546 - RNA, 18 nt, Human
caagaagcaguggccuua

SEQ ID NO: 3881547 - RNA, 15 nt, Human
caagaagcccaggaa

SEQ ID NO: 3881548 - RNA, 21 nt, Human
caagaagcgugagacgccacc

SEQ ID NO: 3881549 - RNA, 12 nt, Human
caagaaggauuu

SEQ ID NO: 3881550 - RNA, 14 nt, Human
caagaaggcugggg

SEQ ID NO: 3881551 - RNA, 18 nt, Human
caagaagggacugagaga

SEQ ID NO: 3881552 - RNA, 12 nt, Human
caagaagggcug

SEQ ID NO: 3881553 - RNA, 16 nt, Human
caagaagggcugcaug

SEQ ID NO: 3881554 - RNA, 22 nt, Human
caagaaggguuuuccacccugg

SEQ ID NO: 3881555 - RNA, 23 nt, Human
caagaaggguuuuccacccugga

SEQ ID NO: 3881556 - RNA, 20 nt, Human
caagaaguagcagugucugu

SEQ ID NO: 3881557 - RNA, 17 nt, Human
caagaauaaucacgcuu

SEQ ID NO: 3881558 - RNA, 20 nt, Human
caagaauaaucacgcuuucc

SEQ ID NO: 3881559 - RNA, 23 nt, Human
caagaauaaucacgcuuuccuga

SEQ ID NO: 3881560 - RNA, 15 nt, Human
caagaauacuacuua

SEQ ID NO: 3881561 - RNA, 18 nt, Human
caagaauagcaucuguac

SEQ ID NO: 3881562 - RNA, 18 nt, Human
caagaauauccuuuaaaa

SEQ ID NO: 3881563 - RNA, 13 nt, Human
caagaauauugca

SEQ ID NO: 3881564 - RNA, 15 nt, Human
caagaauauugcaaa

SEQ ID NO: 3881565 - RNA, 20 nt, Human
caagaauauugcaaaauaca

SEQ ID NO: 3881566 - RNA, 23 nt, Human
caagaauauugcaaaauacauga

SEQ ID NO: 3881567 - RNA, 16 nt, Human
caagaauauugucccu

SEQ ID NO: 3881568 - RNA, 19 nt, Human
caagaaucagugcaaagau

SEQ ID NO: 3881569 - RNA, 13 nt, Human
caagaaugaaggu

SEQ ID NO: 3881570 - RNA, 15 nt, Human
caagaaugcauugau

SEQ ID NO: 3881571 - RNA, 16 nt, Human
caagaaugcauugaua

SEQ ID NO: 3881572 - RNA, 15 nt, Human
caagaaugcugaaac

SEQ ID NO: 3881573 - RNA, 17 nt, Human
caagaaugcugaaacca

SEQ ID NO: 3881574 - RNA, 19 nt, Human
caagaauucuccaaaacaa

SEQ ID NO: 3881575 - RNA, 21 nt, Human
caagaauucuccaaaacaauu

SEQ ID NO: 3881576 - RNA, 22 nt, Human
caagaauugaagcaggacuaaa

SEQ ID NO: 3881577 - RNA, 21 nt, Human
caagaauuggaagcugcccug

SEQ ID NO: 3881578 - RNA, 20 nt, Human
caagaauuucuaggacugaa

SEQ ID NO: 3881579 - RNA, 23 nt, Human
caagaauuucuaggacugaauua

SEQ ID NO: 3881580 - RNA, 22 nt, Human
caagaauuugaucguuccaguu

SEQ ID NO: 3881581 - RNA, 14 nt, Human
caagacaaaccaag

SEQ ID NO: 3881582 - RNA, 14 nt, Human
caagacaaaucaac

SEQ ID NO: 3881583 - RNA, 15 nt, Human
caagacaaaucaaca

SEQ ID NO: 3881584 - RNA, 20 nt, Human
caagacaaaucaacagaagc

SEQ ID NO: 3881585 - RNA, 16 nt, Human
caagacaacauuguaa

SEQ ID NO: 3881586 - RNA, 15 nt, Human
caagacacaucccua

SEQ ID NO: 3881587 - RNA, 17 nt, Human
caagacagaagcugaag

SEQ ID NO: 3881588 - RNA, 18 nt, Human
caagacagaagcugaagu

SEQ ID NO: 3881589 - RNA, 17 nt, Human
caagacaugucuguucu

SEQ ID NO: 3881590 - RNA, 15 nt, Human
caagacauuaaaucu

SEQ ID NO: 3881591 - RNA, 16 nt, Human
caagaccacguuucua

SEQ ID NO: 3881592 - RNA, 22 nt, Human
caagaccagacucgccaacaug

SEQ ID NO: 3881593 - RNA, 14 nt, Human
caagaccagccugg

SEQ ID NO: 3881594 - RNA, 15 nt, Human
caagaccagccuggc

SEQ ID NO: 3881595 - RNA, 18 nt, Human
caagacccuugugguccc

SEQ ID NO: 3881596 - RNA, 23 nt, Human
caagacccuuguggucccacccc

SEQ ID NO: 3881597 - RNA, 23 nt, Human
caagaccucagggcacaaagaug

SEQ ID NO: 3881598 - RNA, 14 nt, Human
caagaccuguuggu

SEQ ID NO: 3881599 - RNA, 17 nt, Human
caagaccuguugguucc

SEQ ID NO: 3881600 - RNA, 16 nt, Human
caagaccuucuccuuc

SEQ ID NO: 3881601 - RNA, 17 nt, Human
caagaccuucuccuuca

SEQ ID NO: 3881602 - RNA, 21 nt, Human
caagaccuucuccuucaccuu

SEQ ID NO: 3881603 - RNA, 22 nt, Human
caagacucugucuaaaaaacaa

SEQ ID NO: 3881604 - RNA, 23 nt, Human
caagacucugucuaaaaaacaaa

SEQ ID NO: 3881605 - RNA, 19 nt, Human
caagacugcacaucaaaau

SEQ ID NO: 3881606 - RNA, 19 nt, Human
caagacugcuguggccagg

SEQ ID NO: 3881607 - RNA, 22 nt, Human
caagacugcuguggccaggagg

SEQ ID NO: 3881608 - RNA, 16 nt, Human
caagacuguugcucaa

SEQ ID NO: 3881609 - RNA, 17 nt, Human
caagacuuauuuucaca

SEQ ID NO: 3881610 - RNA, 20 nt, Human
caagacuucucuuugccuca

SEQ ID NO: 3881611 - RNA, 20 nt, Human
caagacuuggcaacagaagc

SEQ ID NO: 3881612 - RNA, 18 nt, Human
caagacuuuucuuugaag

SEQ ID NO: 3881613 - RNA, 21 nt, Human
caagagaaaggccugcacaca

SEQ ID NO: 3881614 - RNA, 16 nt, Human
caagagaagcauucuc

SEQ ID NO: 3881615 - RNA, 19 nt, Human
caagagacccuucaaacuu

SEQ ID NO: 3881616 - RNA, 12 nt, Human
caagagacucug

SEQ ID NO: 3881617 - RNA, 12 nt, Human
caagagacugag

SEQ ID NO: 3881618 - RNA, 13 nt, Human
caagagacugagu

SEQ ID NO: 3881619 - RNA, 19 nt, Human
caagagagaaccuaacugu

SEQ ID NO: 3881620 - RNA, 13 nt, Human
caagagagauguu

SEQ ID NO: 3881621 - RNA, 15 nt, Human
caagagagauguuuu

SEQ ID NO: 3881622 - RNA, 16 nt, Human
caagagaugggaauga

SEQ ID NO: 3881623 - RNA, 16 nt, Human
caagagcacacuuggc

SEQ ID NO: 3881624 - RNA, 20 nt, Human
caagagcagccuguggcauc

SEQ ID NO: 3881625 - RNA, 16 nt, Human
caagagcaucaugccu

SEQ ID NO: 3881626 - RNA, 20 nt, Human
caagagccauguagaagcug

SEQ ID NO: 3881627 - RNA, 21 nt, Human
caagagccauguagaagcugc

SEQ ID NO: 3881628 - RNA, 13 nt, Human
caagagcccagca

SEQ ID NO: 3881629 - RNA, 22 nt, Human
caagagcccccuugacaccggg

SEQ ID NO: 3881630 - RNA, 21 nt, Human
caagagccugaucucuuccug

SEQ ID NO: 3881631 - RNA, 12 nt, Human
caagagccuuaa

SEQ ID NO: 3881632 - RNA, 12 nt, Human
caagagccuugg

SEQ ID NO: 3881633 - RNA, 12 nt, Human
caagagcugagg

SEQ ID NO: 3881634 - RNA, 13 nt, Human
caagagcugcccu

SEQ ID NO: 3881635 - RNA, 14 nt, Human
caagagcugcccuc

SEQ ID NO: 3881636 - RNA, 19 nt, Human
caagaggaaguucagaucu

SEQ ID NO: 3881637 - RNA, 20 nt, Human
caagaggaaguucagaucuu

SEQ ID NO: 3881638 - RNA, 15 nt, Human
caagaggaaugaaaa

SEQ ID NO: 3881639 - RNA, 21 nt, Human
caagaggagcccccacccugu

SEQ ID NO: 3881640 - RNA, 15 nt, Human
caagaggcaagcuga

SEQ ID NO: 3881641 - RNA, 20 nt, Human
caagaggcaagcugaaauuu

SEQ ID NO: 3881642 - RNA, 19 nt, Human
caagaggccguggcugcug

SEQ ID NO: 3881643 - RNA, 17 nt, Human
caagagggacgccuggg

SEQ ID NO: 3881644 - RNA, 15 nt, Human
caagagggcacuggu

SEQ ID NO: 3881645 - RNA, 21 nt, Human
caagaggggguggaggggugu

SEQ ID NO: 3881646 - RNA, 21 nt, Human
caagagggguggagacugcuu

SEQ ID NO: 3881647 - RNA, 23 nt, Human
caagagggguggagacugcuucc

SEQ ID NO: 3881648 - RNA, 16 nt, Human
caagagggucugagga

SEQ ID NO: 3881649 - RNA, 17 nt, Human
caagagggucugaggaa

SEQ ID NO: 3881650 - RNA, 15 nt, Human
caagagguacagggu

SEQ ID NO: 3881651 - RNA, 21 nt, Human
caagagguacaggguuuuuac

SEQ ID NO: 3881652 - RNA, 22 nt, Human
caagagguuuggcuccugccca

SEQ ID NO: 3881653 - RNA, 23 nt, Human
caagagguuuggcuccugcccac

SEQ ID NO: 3881654 - RNA, 22 nt, Human
caagaguaguuauauaauuguu

SEQ ID NO: 3881655 - RNA, 22 nt, Human
caagugaaaaaggaggaagaga

SEQ ID NO: 3881656 - RNA, 13 nt, Human
caagugaacacau

SEQ ID NO: 3881657 - RNA, 12 nt, Human
caagugaagguu

SEQ ID NO: 3881658 - RNA, 21 nt, Human
caagugaagguuuacaauuua

SEQ ID NO: 3881659 - RNA, 19 nt, Human
caagugaauuuuucucuaa

SEQ ID NO: 3881660 - RNA, 15 nt, Human
caagugacaucucuu

SEQ ID NO: 3881661 - RNA, 14 nt, Human
caagugagacccug

SEQ ID NO: 3881662 - RNA, 15 nt, Human
caagugagacccugu

SEQ ID NO: 3881663 - RNA, 17 nt, Human
caagugagagcugggug

SEQ ID NO: 3881664 - RNA, 18 nt, Human
caagugagagcugggugu

SEQ ID NO: 3881665 - RNA, 18 nt, Human
caagugauucucaugccu

SEQ ID NO: 3881666 - RNA, 16 nt, Human
caagugauucuccugc

SEQ ID NO: 3881667 - RNA, 17 nt, Human
caagugauucuccugcc

SEQ ID NO: 3881668 - RNA, 18 nt, Human
caagugauucuccugccu

SEQ ID NO: 3881669 - RNA, 15 nt, Human
caagugauugaaaau

SEQ ID NO: 3881670 - RNA, 19 nt, Human
caagugauugaaaauagua

SEQ ID NO: 3881671 - RNA, 20 nt, Human
caagugcacggggcacagcg

SEQ ID NO: 3881672 - RNA, 14 nt, Human
caagugcaggcugg

SEQ ID NO: 3881673 - RNA, 13 nt, Human
caagugccagagg

SEQ ID NO: 3881674 - RNA, 15 nt, Human
caagugccagaggug

SEQ ID NO: 3881675 - RNA, 17 nt, Human
caagugccagagguggg

SEQ ID NO: 3881676 - RNA, 18 nt, Human
caagugccgcaaauugua

SEQ ID NO: 3881677 - RNA, 16 nt, Human
caagugccugcuuuua

SEQ ID NO: 3881678 - RNA, 17 nt, Human
caagugcugaacagugg

SEQ ID NO: 3881679 - RNA, 18 nt, Human
caagugcugaacagugga

SEQ ID NO: 3881680 - RNA, 20 nt, Human
caagugcugccccugccugu

SEQ ID NO: 3881681 - RNA, 14 nt, Human
caagugcuggaguc

SEQ ID NO: 3881682 - RNA, 21 nt, Human
caaguggaccuuaggccuucc

SEQ ID NO: 3881683 - RNA, 23 nt, Human
caaguggaccuuaggccuuccuc

SEQ ID NO: 3881684 - RNA, 15 nt, Human
caaguggacucaggg

SEQ ID NO: 3881685 - RNA, 18 nt, Human
caaguggacucagggcag

SEQ ID NO: 3881686 - RNA, 23 nt, Human
caaguggacucagggcagcgcca

SEQ ID NO: 3881687 - RNA, 20 nt, Human
caaguggcaaagcuguucuu

SEQ ID NO: 3881688 - RNA, 23 nt, Human
caaguggcagagcuuggacugga

SEQ ID NO: 3881689 - RNA, 19 nt, Human
caaguggcucccacacccu

SEQ ID NO: 3881690 - RNA, 17 nt, Human
caaguggggcucgccau

SEQ ID NO: 3881691 - RNA, 15 nt, Human
caaguggggugcugg

SEQ ID NO: 3881692 - RNA, 18 nt, Human
caaguggggugcugggag

SEQ ID NO: 3881693 - RNA, 21 nt, Human
caaguggggugcugggaggag

SEQ ID NO: 3881694 - RNA, 19 nt, Human
caaguggguacccccagga

SEQ ID NO: 3881695 - RNA, 21 nt, Human
caagugguuuccacaugcucu

SEQ ID NO: 3881696 - RNA, 23 nt, Human
caaguguaaaauauuuugaauca

SEQ ID NO: 3881697 - RNA, 12 nt, Human
caaguguaauga

SEQ ID NO: 3881698 - RNA, 15 nt, Human
caaguguaaugaaua

SEQ ID NO: 3881699 - RNA, 18 nt, Human
caaguguauaucagaaaa

SEQ ID NO: 3881700 - RNA, 14 nt, Human
caagugucuuccau

SEQ ID NO: 3881701 - RNA, 14 nt, Human
caagugugaacaaa

SEQ ID NO: 3881702 - RNA, 17 nt, Human
caagugugcauauugua

SEQ ID NO: 3881703 - RNA, 21 nt, Human
caagugugcauauuguacacu

SEQ ID NO: 3881704 - RNA, 23 nt, Human
caagugugcauauuguacacuuu

SEQ ID NO: 3881705 - RNA, 22 nt, Human
caagugugguagagugugccug

SEQ ID NO: 3881706 - RNA, 23 nt, Human
caagugugguagggacuuaaaaa

SEQ ID NO: 3881707 - RNA, 22 nt, Human
caagugugugccaccaugccuc

SEQ ID NO: 3881708 - RNA, 11 nt, Human
caagugugugu

SEQ ID NO: 3881709 - RNA, 16 nt, Human
caaguguucacaaccu

SEQ ID NO: 3881710 - RNA, 12 nt, Human
caaguuaaaugu

SEQ ID NO: 3881711 - RNA, 14 nt, Human
caaguuaagagaaa

SEQ ID NO: 3881712 - RNA, 17 nt, Human
caaguuaagagaaacuu

SEQ ID NO: 3881713 - RNA, 15 nt, Human
caaguuaagauucuu

SEQ ID NO: 3881714 - RNA, 16 nt, Human
caaguuagaaaacaua

SEQ ID NO: 3881715 - RNA, 17 nt, Human
caaguuagcucaggagg

SEQ ID NO: 3881716 - RNA, 12 nt, Human
caaguucaaucu

SEQ ID NO: 3881717 - RNA, 22 nt, Human
caaguucacaccugcagauucu

SEQ ID NO: 3881718 - RNA, 17 nt, Human
caaguucaugcagcugu

SEQ ID NO: 3881719 - RNA, 20 nt, Human
caaguuccucuaacuuggcu

SEQ ID NO: 3881720 - RNA, 21 nt, Human
caaguuccucuaacuuggcuc

SEQ ID NO: 3881721 - RNA, 14 nt, Human
caaguucuaagauu

SEQ ID NO: 3881722 - RNA, 20 nt, Human
caaguucuaagauucuaaug

SEQ ID NO: 3881723 - RNA, 16 nt, Human
caaguucuagagaaga

SEQ ID NO: 3881724 - RNA, 13 nt, Human
caaguucuauuua

SEQ ID NO: 3881725 - RNA, 17 nt, Human
caaguugaagacuuugu

SEQ ID NO: 3881726 - RNA, 18 nt, Human
caaguuggaugcggccau

SEQ ID NO: 3881727 - RNA, 15 nt, Human
caaguuguaaauaau

SEQ ID NO: 3881728 - RNA, 19 nt, Human
caaguugugccaaauuauu

SEQ ID NO: 3881729 - RNA, 22 nt, Human
caaguuguuccuuaagucagaa

SEQ ID NO: 3881730 - RNA, 16 nt, Human
caaguuguuucauuga

SEQ ID NO: 3881731 - RNA, 13 nt, Human
caaguuguuugag

SEQ ID NO: 3881732 - RNA, 13 nt, Human
caaguuucaucca

SEQ ID NO: 3881733 - RNA, 20 nt, Human
caaguuucauccagaacuac

SEQ ID NO: 3881734 - RNA, 22 nt, Human
caaguuuccaagcaaauguuac

SEQ ID NO: 3881735 - RNA, 13 nt, Human
caaguuuuaaagu

SEQ ID NO: 3881736 - RNA, 15 nt, Human
caaguuuuaaaguuc

SEQ ID NO: 3881737 - RNA, 20 nt, Human
caaguuuucauaagcacacu

SEQ ID NO: 3881738 - RNA, 16 nt, Human
caaguuuucccugaag

SEQ ID NO: 3881739 - RNA, 17 nt, Human
caaguuuucuuccauga

SEQ ID NO: 3881740 - RNA, 11 nt, Human
caaguuuugug

SEQ ID NO: 3881741 - RNA, 17 nt, Human
caaguuuugugaaauuu

SEQ ID NO: 3881742 - RNA, 17 nt, Human
caauaaaaaauuaugac

SEQ ID NO: 3881743 - RNA, 16 nt, Human
caauaaaaauggcuca

SEQ ID NO: 3881744 - RNA, 20 nt, Human
caauaaaaauguuuaacggu

SEQ ID NO: 3881745 - RNA, 14 nt, Human
caauaaaacauuaa

SEQ ID NO: 3881746 - RNA, 15 nt, Human
caauaaaagcccagg

SEQ ID NO: 3881747 - RNA, 18 nt, Human
caauaaaagcccaggagc

SEQ ID NO: 3881748 - RNA, 22 nt, Human
caauaaaagcccaggagcccau

SEQ ID NO: 3881749 - RNA, 17 nt, Human
caauaaaauauuauuga

SEQ ID NO: 3881750 - RNA, 21 nt, Human
caauaaaauauuauugaacua

SEQ ID NO: 3881751 - RNA, 15 nt, Human
caauaaaaucaugua

SEQ ID NO: 3881752 - RNA, 23 nt, Human
caauaaaauccauacauuugugu

SEQ ID NO: 3881753 - RNA, 20 nt, Human
caauaaaaugugauuuuucu

SEQ ID NO: 3881754 - RNA, 18 nt, Human
caauaaaauuauuugcag

SEQ ID NO: 3881755 - RNA, 20 nt, Human
caauaaaauuuuuuuaaagu

SEQ ID NO: 3881756 - RNA, 18 nt, Human
caauaaaauuuuuuuuca

SEQ ID NO: 3881757 - RNA, 16 nt, Human
caauaaacaacagcug

SEQ ID NO: 3881758 - RNA, 15 nt, Human
caauaaacccucaga

SEQ ID NO: 3881759 - RNA, 19 nt, Human
caauaaacgauuuaauucu

SEQ ID NO: 3881760 - RNA, 19 nt, Human
caauaaagaaaacuuccau

SEQ ID NO: 3881761 - RNA, 13 nt, Human
caauaaagaagag

SEQ ID NO: 3881762 - RNA, 12 nt, Human
caauaaagagau

SEQ ID NO: 3881763 - RNA, 16 nt, Human
caauaaagcacugagc

SEQ ID NO: 3881764 - RNA, 14 nt, Human
caauaaagcauuua

SEQ ID NO: 3881765 - RNA, 15 nt, Human
caauaaagcauuuau

SEQ ID NO: 3881766 - RNA, 15 nt, Human
caauaaagccuucaa

SEQ ID NO: 3881767 - RNA, 17 nt, Human
caauaaagcugcugaga

SEQ ID NO: 3881768 - RNA, 14 nt, Human
caauaaagcuuguu

SEQ ID NO: 3881769 - RNA, 13 nt, Human
caauaaaguauuu

SEQ ID NO: 3881770 - RNA, 17 nt, Human
caauaaaguauuuaauu

SEQ ID NO: 3881771 - RNA, 17 nt, Human
caauaaaucugacccag

SEQ ID NO: 3881772 - RNA, 23 nt, Human
caauaaaugguauagcaaauguu

SEQ ID NO: 3881773 - RNA, 13 nt, Human
caauaaauugcua

SEQ ID NO: 3881774 - RNA, 13 nt, Human
caauaaauuuuga

SEQ ID NO: 3881775 - RNA, 18 nt, Human
caauaaauuuugaaaagu

SEQ ID NO: 3881776 - RNA, 17 nt, Human
caauaacacuaaaauuu

SEQ ID NO: 3881777 - RNA, 14 nt, Human
caauaacagcugca

SEQ ID NO: 3881778 - RNA, 15 nt, Human
caauaacagcugcaa

SEQ ID NO: 3881779 - RNA, 15 nt, Human
caauaacguuuaagc

SEQ ID NO: 3881780 - RNA, 15 nt, Human
caauaacuacugugu

SEQ ID NO: 3881781 - RNA, 16 nt, Human
caauaacuacuguguu

SEQ ID NO: 3881782 - RNA, 22 nt, Human
caauaacuacuguguuccuggc

SEQ ID NO: 3881783 - RNA, 18 nt, Human
caauaacuccucccaggg

SEQ ID NO: 3881784 - RNA, 18 nt, Human
caauaacuggaacacucu

SEQ ID NO: 3881785 - RNA, 13 nt, Human
caauaacuucuga

SEQ ID NO: 3881786 - RNA, 20 nt, Human
caauaagaauuuagggagaa

SEQ ID NO: 3881787 - RNA, 12 nt, Human
caauaagccuug

SEQ ID NO: 3881788 - RNA, 11 nt, Human
caauaauaaaa

SEQ ID NO: 3881789 - RNA, 19 nt, Human
caauaauaaauauuuuugc

SEQ ID NO: 3881790 - RNA, 21 nt, Human
caauaauauuguuguauaauu

SEQ ID NO: 3881791 - RNA, 22 nt, Human
caauaauauuguuguauaauuu

SEQ ID NO: 3881792 - RNA, 15 nt, Human
caauaauggaaaaaa

SEQ ID NO: 3881793 - RNA, 18 nt, Human
caauaauggucccaucca

SEQ ID NO: 3881794 - RNA, 23 nt, Human
caauaauggucccauccaggcag

SEQ ID NO: 3881795 - RNA, 21 nt, Human
caauaauuauuugucucagau

SEQ ID NO: 3881796 - RNA, 19 nt, Human
caauaauucauauucuuca

SEQ ID NO: 3881797 - RNA, 16 nt, Human
caauaauugcagaacu

SEQ ID NO: 3881798 - RNA, 14 nt, Human
caauacaaauggau

SEQ ID NO: 3881799 - RNA, 21 nt, Human
caauacaaauggauuuuggga

SEQ ID NO: 3881800 - RNA, 21 nt, Human
cacuccucugacucagggcuc

SEQ ID NO: 3881801 - RNA, 23 nt, Human
cacuccucugacucagggcuccu

SEQ ID NO: 3881802 - RNA, 16 nt, Human
cacuccugagaccccu

SEQ ID NO: 3881803 - RNA, 21 nt, Human
cacuccugagaccccuggccu

SEQ ID NO: 3881804 - RNA, 22 nt, Human
cacuccugagaccccuggccuc

SEQ ID NO: 3881805 - RNA, 11 nt, Human
cacuccugcuc

SEQ ID NO: 3881806 - RNA, 16 nt, Human
cacuccugcuguaaau

SEQ ID NO: 3881807 - RNA, 19 nt, Human
cacuccugcuuaaucuuca

SEQ ID NO: 3881808 - RNA, 17 nt, Human
cacuccuuccugccacc

SEQ ID NO: 3881809 - RNA, 18 nt, Human
cacuccuuccugccaccu

SEQ ID NO: 3881810 - RNA, 24 nt, Human
cacuccuuccugccaccugcugcu

SEQ ID NO: 3881811 - RNA, 15 nt, Human
cacuccuuuuaaaga

SEQ ID NO: 3881812 - RNA, 16 nt, Human
cacucgcauugacaca

SEQ ID NO: 3881813 - RNA, 15 nt, Human
cacucgcccgcccac

SEQ ID NO: 3881814 - RNA, 23 nt, Human
cacucgcccgcccacuguccugg

SEQ ID NO: 3881815 - RNA, 22 nt, Human
cacucgggaggcugagacagga

SEQ ID NO: 3881816 - RNA, 20 nt, Human
cacucggguuucucuguggc

SEQ ID NO: 3881817 - RNA, 15 nt, Human
cacucguguguuucu

SEQ ID NO: 3881818 - RNA, 18 nt, Human
cacucuaaaagguucagg

SEQ ID NO: 3881819 - RNA, 16 nt, Human
cacucuaagauguuau

SEQ ID NO: 3881820 - RNA, 17 nt, Human
cacucuaagucauguau

SEQ ID NO: 3881821 - RNA, 14 nt, Human
cacucuacuuagca

SEQ ID NO: 3881822 - RNA, 11 nt, Human
cacucuagauu

SEQ ID NO: 3881823 - RNA, 13 nt, Human
cacucuagccugg

SEQ ID NO: 3881824 - RNA, 15 nt, Human
cacucuagggcagug

SEQ ID NO: 3881825 - RNA, 17 nt, Human
cacucuaggggucaggc

SEQ ID NO: 3881826 - RNA, 18 nt, Human
cacucuagguuuuacaga

SEQ ID NO: 3881827 - RNA, 19 nt, Human
cacucuagucaaugacaug

SEQ ID NO: 3881828 - RNA, 15 nt, Human
cacucucagaggccc

SEQ ID NO: 3881829 - RNA, 22 nt, Human
cacucucaggaaaugcugaccc

SEQ ID NO: 3881830 - RNA, 14 nt, Human
cacucuccccacac

SEQ ID NO: 3881831 - RNA, 16 nt, Human
cacucuccugggcccc

SEQ ID NO: 3881832 - RNA, 19 nt, Human
cacucuccugggccccucc

SEQ ID NO: 3881833 - RNA, 21 nt, Human
cacucuccugggccccucccu

SEQ ID NO: 3881834 - RNA, 15 nt, Human
cacucuccuugcagu

SEQ ID NO: 3881835 - RNA, 20 nt, Human
cacucuccuugcuacccaga

SEQ ID NO: 3881836 - RNA, 12 nt, Human
cacucuccuugg

SEQ ID NO: 3881837 - RNA, 15 nt, Human
cacucucuaccagau

SEQ ID NO: 3881838 - RNA, 13 nt, Human
cacucucugaaga

SEQ ID NO: 3881839 - RNA, 14 nt, Human
cacucucugaagau

SEQ ID NO: 3881840 - RNA, 20 nt, Human
cacucugacgcaaaaccacu

SEQ ID NO: 3881841 - RNA, 15 nt, Human
cacucugcaggaaau

SEQ ID NO: 3881842 - RNA, 13 nt, Human
cacucugccaggg

SEQ ID NO: 3881843 - RNA, 23 nt, Human
cacucugccccccccccccaucu

SEQ ID NO: 3881844 - RNA, 19 nt, Human
cacucugccucugccugca

SEQ ID NO: 3881845 - RNA, 15 nt, Human
cacucugcucgccuu

SEQ ID NO: 3881846 - RNA, 14 nt, Human
cacucugcucugau

SEQ ID NO: 3881847 - RNA, 15 nt, Human
cacucugcucugccc

SEQ ID NO: 3881848 - RNA, 11 nt, Human
cacucugcugc

SEQ ID NO: 3881849 - RNA, 13 nt, Human
cacucugcuucuc

SEQ ID NO: 3881850 - RNA, 16 nt, Human
cacucugcuucucuga

SEQ ID NO: 3881851 - RNA, 16 nt, Human
cacucugcuuguuauu

SEQ ID NO: 3881852 - RNA, 19 nt, Human
cacucugcuuugacugagc

SEQ ID NO: 3881853 - RNA, 21 nt, Human
cacucugcuuugacugagcag

SEQ ID NO: 3881854 - RNA, 19 nt, Human
cacucuggauucagccuuc

SEQ ID NO: 3881855 - RNA, 13 nt, Human
cacucuggcagca

SEQ ID NO: 3881856 - RNA, 14 nt, Human
cacucuggcagcac

SEQ ID NO: 3881857 - RNA, 13 nt, Human
cacucuggcagcc

SEQ ID NO: 3881858 - RNA, 14 nt, Human
cacucuggcagcca

SEQ ID NO: 3881859 - RNA, 15 nt, Human
cacucuggcagcuca

SEQ ID NO: 3881860 - RNA, 20 nt, Human
cacucugggcacacucugcc

SEQ ID NO: 3881861 - RNA, 14 nt, Human
cacucuguaauuga

SEQ ID NO: 3881862 - RNA, 23 nt, Human
cacucuguaauugaauauuauuc

SEQ ID NO: 3881863 - RNA, 18 nt, Human
cacucugucgagccuggg

SEQ ID NO: 3881864 - RNA, 19 nt, Human
cacucugucgcccagucug

SEQ ID NO: 3881865 - RNA, 14 nt, Human
cacucugugcccau

SEQ ID NO: 3881866 - RNA, 23 nt, Human
cacucugugucugaguggcuuca

SEQ ID NO: 3881867 - RNA, 17 nt, Human
cacucuguuauuuagac

SEQ ID NO: 3881868 - RNA, 20 nt, Human
cacucuguucauuccuccag

SEQ ID NO: 3881869 - RNA, 22 nt, Human
cacucuuaaagcaaaaaaugaa

SEQ ID NO: 3881870 - RNA, 11 nt, Human
cacucuuaggc

SEQ ID NO: 3881871 - RNA, 19 nt, Human
cacucuuaugcuguaccca

SEQ ID NO: 3881872 - RNA, 20 nt, Human
cacucuuauugcccacgcug

SEQ ID NO: 3881873 - RNA, 14 nt, Human
cacucuucauggug

SEQ ID NO: 3881874 - RNA, 14 nt, Human
cacucuuccugagu

SEQ ID NO: 3881875 - RNA, 19 nt, Human
cacucuuggagccugcaga

SEQ ID NO: 3881876 - RNA, 14 nt, Human
cacucuuguuucuc

SEQ ID NO: 3881877 - RNA, 15 nt, Human
cacucuuuaccuuua

SEQ ID NO: 3881878 - RNA, 20 nt, Human
cacucuuuauagugcacaaa

SEQ ID NO: 3881879 - RNA, 12 nt, Human
cacucuuuguaa

SEQ ID NO: 3881880 - RNA, 14 nt, Human
cacucuuuuauaca

SEQ ID NO: 3881881 - RNA, 15 nt, Human
cacucuuuuauacaa

SEQ ID NO: 3881882 - RNA, 12 nt, Human
cacugaaaaaau

SEQ ID NO: 3881883 - RNA, 17 nt, Human
cacugaaaaaauauaug

SEQ ID NO: 3881884 - RNA, 11 nt, Human
cacugaaaaau

SEQ ID NO: 3881885 - RNA, 23 nt, Human
cacugaaaaaucuaagugauaua

SEQ ID NO: 3881886 - RNA, 15 nt, Human
cacugaaaacaucug

SEQ ID NO: 3881887 - RNA, 16 nt, Human
cacugaaaacaucugg

SEQ ID NO: 3881888 - RNA, 22 nt, Human
cacugaaaauuggacagauugc

SEQ ID NO: 3881889 - RNA, 14 nt, Human
cacugaaaccuuua

SEQ ID NO: 3881890 - RNA, 21 nt, Human
cacugaaacuucaagcaccag

SEQ ID NO: 3881891 - RNA, 13 nt, Human
cacugaaaggaaa

SEQ ID NO: 3881892 - RNA, 18 nt, Human
cacugaaaguuuuguaaa

SEQ ID NO: 3881893 - RNA, 23 nt, Human
cacugaaauaaccguaaagguuu

SEQ ID NO: 3881894 - RNA, 15 nt, Human
cacugaacaaacuaa

SEQ ID NO: 3881895 - RNA, 22 nt, Human
cacugaacaaacuaaaggugca

SEQ ID NO: 3881896 - RNA, 13 nt, Human
cacugaaccuggg

SEQ ID NO: 3881897 - RNA, 11 nt, Human
cacugaagaag

SEQ ID NO: 3881898 - RNA, 23 nt, Human
cacugaagaagcaccaaucauga

SEQ ID NO: 3881899 - RNA, 14 nt, Human
cacugaagauagaa

SEQ ID NO: 3881900 - RNA, 14 nt, Human
cacugaagccugcg

SEQ ID NO: 3881901 - RNA, 17 nt, Human
cacugaagccugcguug

SEQ ID NO: 3881902 - RNA, 18 nt, Human
cacugaaggccuggccca

SEQ ID NO: 3881903 - RNA, 20 nt, Human
cacugaaggcuuucagggcc

SEQ ID NO: 3881904 - RNA, 22 nt, Human
cacugaaggcuuucagggccuc

SEQ ID NO: 3881905 - RNA, 19 nt, Human
cacugaaguagugugcagu

SEQ ID NO: 3881906 - RNA, 20 nt, Human
cacugaaucuguacagagcc

SEQ ID NO: 3881907 - RNA, 21 nt, Human
cacugaaugccucaaugugac

SEQ ID NO: 3881908 - RNA, 23 nt, Human
cacugaauuaaugacagagccag

SEQ ID NO: 3881909 - RNA, 15 nt, Human
cacugaauuuauaaa

SEQ ID NO: 3881910 - RNA, 22 nt, Human
cacugaauuuuuaugugugauu

SEQ ID NO: 3881911 - RNA, 15 nt, Human
cacugacacaaagga

SEQ ID NO: 3881912 - RNA, 20 nt, Human
cacugacacugguauuccug

SEQ ID NO: 3881913 - RNA, 23 nt, Human
cacugacacugguauuccugccu

SEQ ID NO: 3881914 - RNA, 17 nt, Human
cacugacagauuuccau

SEQ ID NO: 3881915 - RNA, 22 nt, Human
cacugacagauuuccauccuag

SEQ ID NO: 3881916 - RNA, 13 nt, Human
cacugacagccuc

SEQ ID NO: 3881917 - RNA, 17 nt, Human
cacugacagccucccac

SEQ ID NO: 3881918 - RNA, 20 nt, Human
cacugacagccucccacccc

SEQ ID NO: 3881919 - RNA, 15 nt, Human
cacugaccagaacua

SEQ ID NO: 3881920 - RNA, 14 nt, Human
cacugacccacagc

SEQ ID NO: 3881921 - RNA, 14 nt, Human
cacugacccuucca

SEQ ID NO: 3881922 - RNA, 19 nt, Human
cacugacccuuccagacau

SEQ ID NO: 3881923 - RNA, 14 nt, Human
cacugacuccugug

SEQ ID NO: 3881924 - RNA, 13 nt, Human
cacugacucugga

SEQ ID NO: 3881925 - RNA, 19 nt, Human
cacugagaauguaagaacu

SEQ ID NO: 3881926 - RNA, 20 nt, Human
cacugagaauguaagaacua

SEQ ID NO: 3881927 - RNA, 17 nt, Human
cacugagacagcccggg

SEQ ID NO: 3881928 - RNA, 22 nt, Human
cacugagacagcccgggcucug

SEQ ID NO: 3881929 - RNA, 22 nt, Human
cacugagaggacagagagaaau

SEQ ID NO: 3881930 - RNA, 17 nt, Human
cacugagcacuguuuuc

SEQ ID NO: 3881931 - RNA, 13 nt, Human
cacugagcagagu

SEQ ID NO: 3881932 - RNA, 13 nt, Human
cacugagcccccc

SEQ ID NO: 3881933 - RNA, 12 nt, Human
cacugagcucca

SEQ ID NO: 3881934 - RNA, 14 nt, Human
cacugaggcaggga

SEQ ID NO: 3881935 - RNA, 14 nt, Human
cacugagggcaguc

SEQ ID NO: 3881936 - RNA, 14 nt, Human
cacugagggccaca

SEQ ID NO: 3881937 - RNA, 18 nt, Human
cacugagggccacacuau

SEQ ID NO: 3881938 - RNA, 21 nt, Human
cacugaguuuuccauggcagg

SEQ ID NO: 3881939 - RNA, 18 nt, Human
cacugauauauuuuccag

SEQ ID NO: 3881940 - RNA, 15 nt, Human
cacugauauucagaa

SEQ ID NO: 3881941 - RNA, 14 nt, Human
cacugauccagccc

SEQ ID NO: 3881942 - RNA, 16 nt, Human
cacugauccagcccug

SEQ ID NO: 3881943 - RNA, 12 nt, Human
cacugaugcugc

SEQ ID NO: 3881944 - RNA, 23 nt, Human
cacugaugcuguucucuucuuca

SEQ ID NO: 3881945 - RNA, 20 nt, Human
cacugauggaaacaaagugg

SEQ ID NO: 3881946 - RNA, 22 nt, Human
cagcaacuugucuuuuucugga

SEQ ID NO: 3881947 - RNA, 11 nt, Human
cagcaagaaaa

SEQ ID NO: 3881948 - RNA, 22 nt, Human
cagcaagaaaaaaaaaugccau

SEQ ID NO: 3881949 - RNA, 16 nt, Human
cagcaagaagggaguu

SEQ ID NO: 3881950 - RNA, 20 nt, Human
cagcaagacuucucuuugcc

SEQ ID NO: 3881951 - RNA, 22 nt, Human
cagcaaggaggcuggcuggggc

SEQ ID NO: 3881952 - RNA, 17 nt, Human
cagcaaggcaccugcag

SEQ ID NO: 3881953 - RNA, 13 nt, Human
cagcaaggccacc

SEQ ID NO: 3881954 - RNA, 14 nt, Human
cagcaaggccaccu

SEQ ID NO: 3881955 - RNA, 15 nt, Human
cagcaaggccaccuc

SEQ ID NO: 3881956 - RNA, 16 nt, Human
cagcaaggccaccucu

SEQ ID NO: 3881957 - RNA, 19 nt, Human
cagcaaggccaccucuucc

SEQ ID NO: 3881958 - RNA, 14 nt, Human
cagcaaggcccgag

SEQ ID NO: 3881959 - RNA, 19 nt, Human
cagcaaggcccgagcagcu

SEQ ID NO: 3881960 - RNA, 16 nt, Human
cagcaaggcccugcug

SEQ ID NO: 3881961 - RNA, 18 nt, Human
cagcaaggcccugcugcc

SEQ ID NO: 3881962 - RNA, 19 nt, Human
cagcaaggcgcuaacuugc

SEQ ID NO: 3881963 - RNA, 20 nt, Human
cagcaaggcgcuaacuugcu

SEQ ID NO: 3881964 - RNA, 12 nt, Human
cagcaaggggcu

SEQ ID NO: 3881965 - RNA, 14 nt, Human
cagcaaggggcucu

SEQ ID NO: 3881966 - RNA, 16 nt, Human
cagcaaggggcucugc

SEQ ID NO: 3881967 - RNA, 18 nt, Human
cagcaaggucuugcucuc

SEQ ID NO: 3881968 - RNA, 15 nt, Human
cagcaagguggagug

SEQ ID NO: 3881969 - RNA, 15 nt, Human
cagcaagugagagcu

SEQ ID NO: 3881970 - RNA, 17 nt, Human
cagcaauagagacggga

SEQ ID NO: 3881971 - RNA, 16 nt, Human
cagcaauauguaaaua

SEQ ID NO: 3881972 - RNA, 17 nt, Human
cagcaauauuuaaggag

SEQ ID NO: 3881973 - RNA, 19 nt, Human
cagcaauauuuaaggagau

SEQ ID NO: 3881974 - RNA, 16 nt, Human
cagcaauuuaaauguu

SEQ ID NO: 3881975 - RNA, 13 nt, Human
cagcaauuucuaa

SEQ ID NO: 3881976 - RNA, 23 nt, Human
cagcaauuucuaauuuuuaagaa

SEQ ID NO: 3881977 - RNA, 12 nt, Human
cagcacaaaaug

SEQ ID NO: 3881978 - RNA, 11 nt, Human
cagcacaaaca

SEQ ID NO: 3881979 - RNA, 13 nt, Human
cagcacaaacaca

SEQ ID NO: 3881980 - RNA, 18 nt, Human
cagcacaaccuucaagcu

SEQ ID NO: 3881981 - RNA, 21 nt, Human
cagcacaaccuucaagcugcu

SEQ ID NO: 3881982 - RNA, 16 nt, Human
cagcacaaggccaucu

SEQ ID NO: 3881983 - RNA, 21 nt, Human
cagcacagauaaaaaguggaa

SEQ ID NO: 3881984 - RNA, 15 nt, Human
cagcacagcucccug

SEQ ID NO: 3881985 - RNA, 15 nt, Human
cagcacagcuugacc

SEQ ID NO: 3881986 - RNA, 21 nt, Human
cagcacagcuugaccugaggc

SEQ ID NO: 3881987 - RNA, 19 nt, Human
cagcacaucucaacaggcc

SEQ ID NO: 3881988 - RNA, 15 nt, Human
cagcacaugcuggcc

SEQ ID NO: 3881989 - RNA, 20 nt, Human
cagcacaugcuggccagccu

SEQ ID NO: 3881990 - RNA, 22 nt, Human
cagcacaugcuggccagccugg

SEQ ID NO: 3881991 - RNA, 19 nt, Human
cagcaccaaaucaaaaucu

SEQ ID NO: 3881992 - RNA, 23 nt, Human
cagcaccaaaucaaaaucucucc

SEQ ID NO: 3881993 - RNA, 16 nt, Human
cagcaccaccaggucu

SEQ ID NO: 3881994 - RNA, 22 nt, Human
cagcaccaccaggucucccggg

SEQ ID NO: 3881995 - RNA, 21 nt, Human
cagcaccacccuagucccuuc

SEQ ID NO: 3881996 - RNA, 22 nt, Human
cagcaccacccuagucccuucc

SEQ ID NO: 3881997 - RNA, 14 nt, Human
cagcaccagaaugu

SEQ ID NO: 3881998 - RNA, 18 nt, Human
cagcacccagcaacucca

SEQ ID NO: 3881999 - RNA, 16 nt, Human
cagcaccccuuccaug

SEQ ID NO: 3882000 - RNA, 19 nt, Human
cagcaccccuuccaugugg

SEQ ID NO: 3882001 - RNA, 22 nt, Human
cagcaccccuuccauguggaga

SEQ ID NO: 3882002 - RNA, 16 nt, Human
cagcacccgggcucag

SEQ ID NO: 3882003 - RNA, 12 nt, Human
cagcacccugca

SEQ ID NO: 3882004 - RNA, 14 nt, Human
cagcaccgccucuu

SEQ ID NO: 3882005 - RNA, 17 nt, Human
cagcaccggaccagccu

SEQ ID NO: 3882006 - RNA, 15 nt, Human
cagcaccuacagugu

SEQ ID NO: 3882007 - RNA, 16 nt, Human
cagcaccucagccugc

SEQ ID NO: 3882008 - RNA, 17 nt, Human
cagcaccucagccugca

SEQ ID NO: 3882009 - RNA, 18 nt, Human
cagcaccuccaggccugu

SEQ ID NO: 3882010 - RNA, 15 nt, Human
cagcaccuccucagc

SEQ ID NO: 3882011 - RNA, 18 nt, Human
cagcaccuccucagccug

SEQ ID NO: 3882012 - RNA, 19 nt, Human
cagcaccuccucagccuga

SEQ ID NO: 3882013 - RNA, 12 nt, Human
cagcaccugccc

SEQ ID NO: 3882014 - RNA, 13 nt, Human
cagcaccugcccu

SEQ ID NO: 3882015 - RNA, 13 nt, Human
cagcaccugccuc

SEQ ID NO: 3882016 - RNA, 23 nt, Human
cagcaccuguaagaaacagagca

SEQ ID NO: 3882017 - RNA, 13 nt, Human
cagcaccuugugc

SEQ ID NO: 3882018 - RNA, 17 nt, Human
cagcaccuugugccugg

SEQ ID NO: 3882019 - RNA, 16 nt, Human
cagcacgauuucuguu

SEQ ID NO: 3882020 - RNA, 14 nt, Human
cagcacggacaaua

SEQ ID NO: 3882021 - RNA, 18 nt, Human
cagcacggacaauaaacc

SEQ ID NO: 3882022 - RNA, 19 nt, Human
cagcacggacaauaaaccu

SEQ ID NO: 3882023 - RNA, 18 nt, Human
cagcacgggggccaagga

SEQ ID NO: 3882024 - RNA, 14 nt, Human
cagcacuaaagcag

SEQ ID NO: 3882025 - RNA, 17 nt, Human
cagcacuaaagcagugg

SEQ ID NO: 3882026 - RNA, 11 nt, Human
cagcacuacuc

SEQ ID NO: 3882027 - RNA, 16 nt, Human
cagcacuacugggugu

SEQ ID NO: 3882028 - RNA, 15 nt, Human
cagcacuagccaaac

SEQ ID NO: 3882029 - RNA, 21 nt, Human
cagcacuagccaaaccucacc

SEQ ID NO: 3882030 - RNA, 19 nt, Human
cagcacuaugcuuuccuuc

SEQ ID NO: 3882031 - RNA, 15 nt, Human
cagcacucacacagg

SEQ ID NO: 3882032 - RNA, 22 nt, Human
cagcacucacacaggacccccu

SEQ ID NO: 3882033 - RNA, 12 nt, Human
cagcacugaaaa

SEQ ID NO: 3882034 - RNA, 14 nt, Human
cagcacugaaaaua

SEQ ID NO: 3882035 - RNA, 11 nt, Human
cagcacugagg

SEQ ID NO: 3882036 - RNA, 15 nt, Human
cagcacugaggaaga

SEQ ID NO: 3882037 - RNA, 14 nt, Human
cagcacugauuuca

SEQ ID NO: 3882038 - RNA, 14 nt, Human
cagcacugccugcu

SEQ ID NO: 3882039 - RNA, 18 nt, Human
cagcacugccugcuccca

SEQ ID NO: 3882040 - RNA, 19 nt, Human
cagcacugcuugaggaaaa

SEQ ID NO: 3882041 - RNA, 12 nt, Human
cagcacuggcuc

SEQ ID NO: 3882042 - RNA, 16 nt, Human
cagcacuggcucucuc

SEQ ID NO: 3882043 - RNA, 20 nt, Human
cagcacuggcucucuccagg

SEQ ID NO: 3882044 - RNA, 13 nt, Human
cagcacugucccu

SEQ ID NO: 3882045 - RNA, 15 nt, Human
cagcacugucucagu

SEQ ID NO: 3882046 - RNA, 14 nt, Human
cagcacuuggcccu

SEQ ID NO: 3882047 - RNA, 13 nt, Human
cagcacuuguaua

SEQ ID NO: 3882048 - RNA, 17 nt, Human
cagcacuuguccagcug

SEQ ID NO: 3882049 - RNA, 19 nt, Human
cagcacuuguccagcugag

SEQ ID NO: 3882050 - RNA, 17 nt, Human
cagcacuugucucauuu

SEQ ID NO: 3882051 - RNA, 20 nt, Human
cagcacuugucucauuuuaa

SEQ ID NO: 3882052 - RNA, 23 nt, Human
cagcacuugucucauuuuaaugu

SEQ ID NO: 3882053 - RNA, 19 nt, Human
cagcacuuucuucuuccca

SEQ ID NO: 3882054 - RNA, 20 nt, Human
cagcacuuugggaggccaag

SEQ ID NO: 3882055 - RNA, 22 nt, Human
cagcacuuugggaggccaagga

SEQ ID NO: 3882056 - RNA, 20 nt, Human
cagcacuuugggaggcugag

SEQ ID NO: 3882057 - RNA, 22 nt, Human
cagcacuuugggaggcugaggc

SEQ ID NO: 3882058 - RNA, 23 nt, Human
cagcacuuugggaggcugaggcg

SEQ ID NO: 3882059 - RNA, 23 nt, Human
cagcacuuugggaggcugaggug

SEQ ID NO: 3882060 - RNA, 15 nt, Human
cagcagaaaugccuu

SEQ ID NO: 3882061 - RNA, 21 nt, Human
cagcagaauggugaucacucc

SEQ ID NO: 3882062 - RNA, 23 nt, Human
cagcagaauugaccgacagcuuu

SEQ ID NO: 3882063 - RNA, 12 nt, Human
cagcagacacau

SEQ ID NO: 3882064 - RNA, 15 nt, Human
cagcagacagagcca

SEQ ID NO: 3882065 - RNA, 17 nt, Human
cagcagacauugucagc

SEQ ID NO: 3882066 - RNA, 15 nt, Human
cagcagacucagcuc

SEQ ID NO: 3882067 - RNA, 23 nt, Human
cagcagacucagcucugacauuc

SEQ ID NO: 3882068 - RNA, 11 nt, Human
cagcagacuga

SEQ ID NO: 3882069 - RNA, 15 nt, Human
cagcagaggcacugg

SEQ ID NO: 3882070 - RNA, 22 nt, Human
cagcagaggcccagauauuaga

SEQ ID NO: 3882071 - RNA, 13 nt, Human
cagcagaggcggu

SEQ ID NO: 3882072 - RNA, 10 nt, Human
cagcagagug

SEQ ID NO: 3882073 - RNA, 11 nt, Human
cagcagagugc

SEQ ID NO: 3882074 - RNA, 24 nt, Human
cagcagauaacaaugcagcaaggc

SEQ ID NO: 3882075 - RNA, 15 nt, Human
cagcagaucccagcu

SEQ ID NO: 3882076 - RNA, 17 nt, Human
cagcagaucccagcuca

SEQ ID NO: 3882077 - RNA, 19 nt, Human
cagcagauuauucacugau

SEQ ID NO: 3882078 - RNA, 16 nt, Human
cagcagauuggaagga

SEQ ID NO: 3882079 - RNA, 23 nt, Human
cagcagauuggaaggagacacag

SEQ ID NO: 3882080 - RNA, 13 nt, Human
cagcagauuuuag

SEQ ID NO: 3882081 - RNA, 16 nt, Human
cagcagcagcccugcc

SEQ ID NO: 3882082 - RNA, 12 nt, Human
cagcagcaggug

SEQ ID NO: 3882083 - RNA, 12 nt, Human
cagcagcaucuc

SEQ ID NO: 3882084 - RNA, 16 nt, Human
cagcagccagccaaac

SEQ ID NO: 3882085 - RNA, 13 nt, Human
cagcagccagccc

SEQ ID NO: 3882086 - RNA, 15 nt, Human
cagcagccagcucuc

SEQ ID NO: 3882087 - RNA, 19 nt, Human
cagcagccagcucucagcc

SEQ ID NO: 3882088 - RNA, 21 nt, Human
cagcagccagcucucagccaa

SEQ ID NO: 3882089 - RNA, 18 nt, Human
cagcagccaucauaggaa

SEQ ID NO: 3882090 - RNA, 22 nt, Human
cagcagccaucauaggaaggga

SEQ ID NO: 3882091 - RNA, 19 nt, Human
cagcagcccaagcuucccu

SEQ ID NO: 3882092 - RNA, 15 nt, Human
cagccugucucuucc

SEQ ID NO: 3882093 - RNA, 19 nt, Human
cagccugucucuuccauau

SEQ ID NO: 3882094 - RNA, 14 nt, Human
cagccugugcugcc

SEQ ID NO: 3882095 - RNA, 12 nt, Human
cagccuguggcg

SEQ ID NO: 3882096 - RNA, 18 nt, Human
cagccuguggcggugccu

SEQ ID NO: 3882097 - RNA, 19 nt, Human
cagccuguggcggugccug

SEQ ID NO: 3882098 - RNA, 14 nt, Human
cagccugugucuuu

SEQ ID NO: 3882099 - RNA, 23 nt, Human
cagccuucagacagagaggacug

SEQ ID NO: 3882100 - RNA, 20 nt, Human
cagccuucccccucccaggg

SEQ ID NO: 3882101 - RNA, 19 nt, Human
cagccuuccucugcagcug

SEQ ID NO: 3882102 - RNA, 20 nt, Human
cagccuuccucugcagcuga

SEQ ID NO: 3882103 - RNA, 21 nt, Human
cagccuuccucugcagcugac

SEQ ID NO: 3882104 - RNA, 18 nt, Human
cagccuucuuccauccca

SEQ ID NO: 3882105 - RNA, 21 nt, Human
cagccuucuuuuucuggacuc

SEQ ID NO: 3882106 - RNA, 20 nt, Human
cagccuugaccauucuccac

SEQ ID NO: 3882107 - RNA, 21 nt, Human
cagccuugaccauucuccacc

SEQ ID NO: 3882108 - RNA, 19 nt, Human
cagccuugagcccuggcug

SEQ ID NO: 3882109 - RNA, 13 nt, Human
cagccuugccaga

SEQ ID NO: 3882110 - RNA, 15 nt, Human
cagccuugccagaga

SEQ ID NO: 3882111 - RNA, 19 nt, Human
cagccuuugaucagguggg

SEQ ID NO: 3882112 - RNA, 22 nt, Human
cagccuuugaucagguggggag

SEQ ID NO: 3882113 - RNA, 17 nt, Human
cagccuuugccuccccg

SEQ ID NO: 3882114 - RNA, 16 nt, Human
cagccuuuguucccca

SEQ ID NO: 3882115 - RNA, 23 nt, Human
cagccuuuguuccccacuggagc

SEQ ID NO: 3882116 - RNA, 20 nt, Human
cagccuuuuuguuucaauga

SEQ ID NO: 3882117 - RNA, 21 nt, Human
cagcgaaaggauguaaacagu

SEQ ID NO: 3882118 - RNA, 14 nt, Human
cagcgaagggagug

SEQ ID NO: 3882119 - RNA, 16 nt, Human
cagcgaaguagcuugc

SEQ ID NO: 3882120 - RNA, 18 nt, Human
cagcgaaguagcuugcuc

SEQ ID NO: 3882121 - RNA, 16 nt, Human
cagcgaccaccccugc

SEQ ID NO: 3882122 - RNA, 16 nt, Human
cagcgaccgcccccuc

SEQ ID NO: 3882123 - RNA, 13 nt, Human
cagcgagaggcag

SEQ ID NO: 3882124 - RNA, 18 nt, Human
cagcgagaggcagagaaa

SEQ ID NO: 3882125 - RNA, 16 nt, Human
cagcgagcccuggugg

SEQ ID NO: 3882126 - RNA, 21 nt, Human
cagcgagcccugguggcagug

SEQ ID NO: 3882127 - RNA, 12 nt, Human
cagcgagccugc

SEQ ID NO: 3882128 - RNA, 21 nt, Human
cagcgagcgcccagcuccuga

SEQ ID NO: 3882129 - RNA, 18 nt, Human
cagcgaggaggcuccaga

SEQ ID NO: 3882130 - RNA, 14 nt, Human
cagcgagggcagcu

SEQ ID NO: 3882131 - RNA, 22 nt, Human
cagcgaguuguggaaagccucu

SEQ ID NO: 3882132 - RNA, 22 nt, Human
cagcgauguaugcagcuaucug

SEQ ID NO: 3882133 - RNA, 23 nt, Human
cagcgauguaugcagcuaucugg

SEQ ID NO: 3882134 - RNA, 20 nt, Human
cagcgauucccucucccagg

SEQ ID NO: 3882135 - RNA, 23 nt, Human
cagcgauucccucucccaggccc

SEQ ID NO: 3882136 - RNA, 14 nt, Human
cagcgccaagcaac

SEQ ID NO: 3882137 - RNA, 19 nt, Human
cagcgccaggcugaccaca

SEQ ID NO: 3882138 - RNA, 13 nt, Human
cagcgccuuuccc

SEQ ID NO: 3882139 - RNA, 14 nt, Human
cagcgccuuuccca

SEQ ID NO: 3882140 - RNA, 22 nt, Human
cagcgccuuucccaacucuagc

SEQ ID NO: 3882141 - RNA, 22 nt, Human
cagcgcggacauccccugcugg

SEQ ID NO: 3882142 - RNA, 20 nt, Human
cagcgcugucaggauugcga

SEQ ID NO: 3882143 - RNA, 21 nt, Human
cagcgcugucaggauugcgag

SEQ ID NO: 3882144 - RNA, 16 nt, Human
cagcgcuugaagccug

SEQ ID NO: 3882145 - RNA, 22 nt, Human
cagcggagguguggagccgagg

SEQ ID NO: 3882146 - RNA, 17 nt, Human
cagcggagucuguccug

SEQ ID NO: 3882147 - RNA, 14 nt, Human
cagcggcaucaggc

SEQ ID NO: 3882148 - RNA, 13 nt, Human
cagcggccccucc

SEQ ID NO: 3882149 - RNA, 18 nt, Human
cagcggccccucccacac

SEQ ID NO: 3882150 - RNA, 14 nt, Human
cagcggccccugca

SEQ ID NO: 3882151 - RNA, 16 nt, Human
cagcggcuggacuugg

SEQ ID NO: 3882152 - RNA, 18 nt, Human
cagcggcuggacuuggag

SEQ ID NO: 3882153 - RNA, 20 nt, Human
cagcggcuggugcagggccu

SEQ ID NO: 3882154 - RNA, 18 nt, Human
cagcgggagccucccugc

SEQ ID NO: 3882155 - RNA, 20 nt, Human
cagcgggagccucccugccu

SEQ ID NO: 3882156 - RNA, 13 nt, Human
cagcgggcagguu

SEQ ID NO: 3882157 - RNA, 14 nt, Human
cagcggggacagcu

SEQ ID NO: 3882158 - RNA, 20 nt, Human
cagcggggccuggcgggaug

SEQ ID NO: 3882159 - RNA, 15 nt, Human
cagcgguuuggggag

SEQ ID NO: 3882160 - RNA, 15 nt, Human
cagcguacucaucau

SEQ ID NO: 3882161 - RNA, 21 nt, Human
cagcguauauauaagaaagac

SEQ ID NO: 3882162 - RNA, 21 nt, Human
cagcgucagcugcucccuggc

SEQ ID NO: 3882163 - RNA, 14 nt, Human
cagcgucccuggcg

SEQ ID NO: 3882164 - RNA, 16 nt, Human
cagcguccuccucugu

SEQ ID NO: 3882165 - RNA, 19 nt, Human
cagcgucggucugugcccc

SEQ ID NO: 3882166 - RNA, 22 nt, Human
cagcguggagggguaggggcug

SEQ ID NO: 3882167 - RNA, 23 nt, Human
cagcguggagggguaggggcugg

SEQ ID NO: 3882168 - RNA, 12 nt, Human
cagcguggccuu

SEQ ID NO: 3882169 - RNA, 13 nt, Human
cagcguggccuug

SEQ ID NO: 3882170 - RNA, 18 nt, Human
cagcguggccuuguucug

SEQ ID NO: 3882171 - RNA, 19 nt, Human
cagcguuucuaugacacau

SEQ ID NO: 3882172 - RNA, 22 nt, Human
cagcuaaagaaguuugaacauu

SEQ ID NO: 3882173 - RNA, 12 nt, Human
cagcuaaagcaa

SEQ ID NO: 3882174 - RNA, 19 nt, Human
cagcuaaagcaauaugcau

SEQ ID NO: 3882175 - RNA, 18 nt, Human
cagcuaaagcccaaccuc

SEQ ID NO: 3882176 - RNA, 14 nt, Human
cagcuaagaaccug

SEQ ID NO: 3882177 - RNA, 19 nt, Human
cagcuaagaaccuggaacu

SEQ ID NO: 3882178 - RNA, 21 nt, Human
cagcuaaggaggggaaaaaaa

SEQ ID NO: 3882179 - RNA, 21 nt, Human
cagcuaagggaagacauuucu

SEQ ID NO: 3882180 - RNA, 21 nt, Human
cagcuaauaacugaucucguu

SEQ ID NO: 3882181 - RNA, 19 nt, Human
cagcuaaucagcauucuca

SEQ ID NO: 3882182 - RNA, 14 nt, Human
cagcuaaucuguag

SEQ ID NO: 3882183 - RNA, 16 nt, Human
cagcuaaucuguaggg

SEQ ID NO: 3882184 - RNA, 17 nt, Human
cagcuaaucuguagggc

SEQ ID NO: 3882185 - RNA, 19 nt, Human
cagcuaaucuguagggcug

SEQ ID NO: 3882186 - RNA, 21 nt, Human
cagcuaaucuguagggcugga

SEQ ID NO: 3882187 - RNA, 15 nt, Human
cagcuaaugggacac

SEQ ID NO: 3882188 - RNA, 20 nt, Human
cagcuacagcuuucuugcuc

SEQ ID NO: 3882189 - RNA, 15 nt, Human
cagcuaccaugacaa

SEQ ID NO: 3882190 - RNA, 18 nt, Human
cagcuacccacuauccuu

SEQ ID NO: 3882191 - RNA, 24 nt, Human
cagcuacccaggaggcugaggugg

SEQ ID NO: 3882192 - RNA, 24 nt, Human
cagcuacccuuuuucuccagcugg

SEQ ID NO: 3882193 - RNA, 21 nt, Human
cagcuaccucaaccaaugcca

SEQ ID NO: 3882194 - RNA, 19 nt, Human
cagcuacuaaugauguuuu

SEQ ID NO: 3882195 - RNA, 19 nt, Human
cagcuacucaagaggcuga

SEQ ID NO: 3882196 - RNA, 23 nt, Human
cagcuacucaagaggcugaggca

SEQ ID NO: 3882197 - RNA, 14 nt, Human
cagcuacucagaag

SEQ ID NO: 3882198 - RNA, 16 nt, Human
cagcuacucagaagcc

SEQ ID NO: 3882199 - RNA, 19 nt, Human
cagcuacucagaagccuga

SEQ ID NO: 3882200 - RNA, 13 nt, Human
cagcuacucagga

SEQ ID NO: 3882201 - RNA, 19 nt, Human
cagcuacucgggaggcuga

SEQ ID NO: 3882202 - RNA, 15 nt, Human
cagcuacuuccuccu

SEQ ID NO: 3882203 - RNA, 15 nt, Human
cagcuacuugggaag

SEQ ID NO: 3882204 - RNA, 19 nt, Human
cagcuacuugggaggcuga

SEQ ID NO: 3882205 - RNA, 23 nt, Human
cagcuagaaauaagcccaacaga

SEQ ID NO: 3882206 - RNA, 13 nt, Human
cagcuagagcuuc

SEQ ID NO: 3882207 - RNA, 15 nt, Human
cagcuagcaaaagaa

SEQ ID NO: 3882208 - RNA, 19 nt, Human
cagcuagcaaaagaaguaa

SEQ ID NO: 3882209 - RNA, 16 nt, Human
cagcuaggaagagcag

SEQ ID NO: 3882210 - RNA, 20 nt, Human
cagcuaggaagagcaggacu

SEQ ID NO: 3882211 - RNA, 19 nt, Human
cagcuagguggggccuaga

SEQ ID NO: 3882212 - RNA, 15 nt, Human
cagcuagugacccac

SEQ ID NO: 3882213 - RNA, 21 nt, Human
cagcuagugacccacaugcca

SEQ ID NO: 3882214 - RNA, 22 nt, Human
cagcuagugacccacaugccau

SEQ ID NO: 3882215 - RNA, 15 nt, Human
cagcuauaccugugc

SEQ ID NO: 3882216 - RNA, 16 nt, Human
cagcuauaccugugcc

SEQ ID NO: 3882217 - RNA, 19 nt, Human
cagcuauaccugugccucg

SEQ ID NO: 3882218 - RNA, 17 nt, Human
cagcuaugggagcccca

SEQ ID NO: 3882219 - RNA, 20 nt, Human
cagcuaugggagccccaggg

SEQ ID NO: 3882220 - RNA, 22 nt, Human
cagcuaugggagccccaggguc

SEQ ID NO: 3882221 - RNA, 15 nt, Human
cagcuauuuugugaa

SEQ ID NO: 3882222 - RNA, 18 nt, Human
cagcuauuuuuacuagaa

SEQ ID NO: 3882223 - RNA, 19 nt, Human
cagcucaaggaaaggccug

SEQ ID NO: 3882224 - RNA, 20 nt, Human
cagcucaaggaaaggccuga

SEQ ID NO: 3882225 - RNA, 22 nt, Human
cagcucaagucuucccugauca

SEQ ID NO: 3882226 - RNA, 13 nt, Human
cagcucacagugc

SEQ ID NO: 3882227 - RNA, 13 nt, Human
cagcucaccagcc

SEQ ID NO: 3882228 - RNA, 20 nt, Human
cagcucaccagccccagugc

SEQ ID NO: 3882229 - RNA, 12 nt, Human
cagcucaccccc

SEQ ID NO: 3882230 - RNA, 19 nt, Human
cagcucaccccccacacuc

SEQ ID NO: 3882231 - RNA, 20 nt, Human
cagcucaccccccacacuca

SEQ ID NO: 3882232 - RNA, 22 nt, Human
cagcucaccccccacacucacu

SEQ ID NO: 3882233 - RNA, 15 nt, Human
cagcucaccucuccc

SEQ ID NO: 3882234 - RNA, 17 nt, Human
cagcucaccucucccuu

SEQ ID NO: 3882235 - RNA, 23 nt, Human
caguaccccauggagcugggcua

SEQ ID NO: 3882236 - RNA, 24 nt, Human
caguacccucucagcuccaggugg

SEQ ID NO: 3882237 - RNA, 16 nt, Human
caguacccugguugug

SEQ ID NO: 3882238 - RNA, 17 nt, Human
caguacccugguugugu

SEQ ID NO: 3882239 - RNA, 20 nt, Human
caguaccuauaaaguaaagc

SEQ ID NO: 3882240 - RNA, 14 nt, Human
caguaccugagggu

SEQ ID NO: 3882241 - RNA, 21 nt, Human
caguaccugagggucuguagg

SEQ ID NO: 3882242 - RNA, 22 nt, Human
caguaccuggguccccagcccu

SEQ ID NO: 3882243 - RNA, 13 nt, Human
caguaccuugcuu

SEQ ID NO: 3882244 - RNA, 16 nt, Human
caguacuucagcaaga

SEQ ID NO: 3882245 - RNA, 23 nt, Human
caguacuugugaaacacagcugu

SEQ ID NO: 3882246 - RNA, 20 nt, Human
caguacuuuggaggccccua

SEQ ID NO: 3882247 - RNA, 23 nt, Human
caguacuuuuuuaaauauuuucu

SEQ ID NO: 3882248 - RNA, 13 nt, Human
caguagaaaauau

SEQ ID NO: 3882249 - RNA, 12 nt, Human
caguagacaagc

SEQ ID NO: 3882250 - RNA, 17 nt, Human
caguagagccagcuugg

SEQ ID NO: 3882251 - RNA, 15 nt, Human
caguagagucaucuc

SEQ ID NO: 3882252 - RNA, 18 nt, Human
caguagauugcagaaaau

SEQ ID NO: 3882253 - RNA, 14 nt, Human
caguagauuuucuu

SEQ ID NO: 3882254 - RNA, 18 nt, Human
caguagcacaaguuauuu

SEQ ID NO: 3882255 - RNA, 14 nt, Human
caguagcaggcccg

SEQ ID NO: 3882256 - RNA, 20 nt, Human
caguagcugggaccacaggu

SEQ ID NO: 3882257 - RNA, 22 nt, Human
caguaggacaaggugcaggcag

SEQ ID NO: 3882258 - RNA, 24 nt, Human
caguaggacaaggugcaggcaggc

SEQ ID NO: 3882259 - RNA, 17 nt, Human
caguaggacuccuuauu

SEQ ID NO: 3882260 - RNA, 12 nt, Human
caguaggagccc

SEQ ID NO: 3882261 - RNA, 14 nt, Human
caguaggagcccag

SEQ ID NO: 3882262 - RNA, 21 nt, Human
caguaggagcccagcucugaa

SEQ ID NO: 3882263 - RNA, 16 nt, Human
caguagucucugugcu

SEQ ID NO: 3882264 - RNA, 22 nt, Human
caguagugagaagaauauuguu

SEQ ID NO: 3882265 - RNA, 22 nt, Human
caguaguucacauacaaaucau

SEQ ID NO: 3882266 - RNA, 19 nt, Human
caguaguuugcauuucaga

SEQ ID NO: 3882267 - RNA, 21 nt, Human
caguaguuugcauuucagaaa

SEQ ID NO: 3882268 - RNA, 14 nt, Human
caguauaaacaaag

SEQ ID NO: 3882269 - RNA, 22 nt, Human
caguauaauucuguacugauuu

SEQ ID NO: 3882270 - RNA, 23 nt, Human
caguauaauugaguuuucagugg

SEQ ID NO: 3882271 - RNA, 22 nt, Human
caguauacaagauaagcuucca

SEQ ID NO: 3882272 - RNA, 22 nt, Human
caguauagaauaggcacuuuaa

SEQ ID NO: 3882273 - RNA, 14 nt, Human
caguauauuaguau

SEQ ID NO: 3882274 - RNA, 15 nt, Human
caguauauuuaaacu

SEQ ID NO: 3882275 - RNA, 14 nt, Human
caguauauuuauag

SEQ ID NO: 3882276 - RNA, 15 nt, Human
caguauauuuauagu

SEQ ID NO: 3882277 - RNA, 14 nt, Human
caguauauuuuauu

SEQ ID NO: 3882278 - RNA, 16 nt, Human
caguauauuuuauuuc

SEQ ID NO: 3882279 - RNA, 19 nt, Human
caguauauuuuauuucaau

SEQ ID NO: 3882280 - RNA, 22 nt, Human
caguauauuuuauuucaaugua

SEQ ID NO: 3882281 - RNA, 24 nt, Human
caguaucaggccugccagacggca

SEQ ID NO: 3882282 - RNA, 15 nt, Human
caguaucaugaagcc

SEQ ID NO: 3882283 - RNA, 16 nt, Human
caguaucaugcccugu

SEQ ID NO: 3882284 - RNA, 12 nt, Human
caguaucccaca

SEQ ID NO: 3882285 - RNA, 15 nt, Human
caguaucccacaucc

SEQ ID NO: 3882286 - RNA, 15 nt, Human
caguaucggcacugu

SEQ ID NO: 3882287 - RNA, 18 nt, Human
caguaucuauauaugugu

SEQ ID NO: 3882288 - RNA, 13 nt, Human
caguaucucaggg

SEQ ID NO: 3882289 - RNA, 15 nt, Human
caguaucucuucagu

SEQ ID NO: 3882290 - RNA, 21 nt, Human
caguaugagucaaugugcagu

SEQ ID NO: 3882291 - RNA, 23 nt, Human
caguaugagucaaugugcagugu

SEQ ID NO: 3882292 - RNA, 20 nt, Human
caguauggggguuguaaauu

SEQ ID NO: 3882293 - RNA, 21 nt, Human
caguauggggguuguaaauug

SEQ ID NO: 3882294 - RNA, 16 nt, Human
caguaugguacauuuu

SEQ ID NO: 3882295 - RNA, 20 nt, Human
caguaugguacauuuuucaa

SEQ ID NO: 3882296 - RNA, 23 nt, Human
caguaugguacauuuuucaacuu

SEQ ID NO: 3882297 - RNA, 15 nt, Human
caguauguauucuuu

SEQ ID NO: 3882298 - RNA, 19 nt, Human
caguauguucaaagucaaa

SEQ ID NO: 3882299 - RNA, 13 nt, Human
caguauguuguca

SEQ ID NO: 3882300 - RNA, 15 nt, Human
caguauguugucaaa

SEQ ID NO: 3882301 - RNA, 15 nt, Human
caguauguuuuacac

SEQ ID NO: 3882302 - RNA, 19 nt, Human
caguauuaaaggggggagg

SEQ ID NO: 3882303 - RNA, 19 nt, Human
caguauuacuucugcuaca

SEQ ID NO: 3882304 - RNA, 14 nt, Human
caguauugaagcau

SEQ ID NO: 3882305 - RNA, 21 nt, Human
caguauugaagcauuuuauaa

SEQ ID NO: 3882306 - RNA, 16 nt, Human
caguauugagcugccu

SEQ ID NO: 3882307 - RNA, 19 nt, Human
caguauuguacaaaguauu

SEQ ID NO: 3882308 - RNA, 21 nt, Human
caguauuguacaaaguauuaa

SEQ ID NO: 3882309 - RNA, 22 nt, Human
caguauuguacaaaguauuaag

SEQ ID NO: 3882310 - RNA, 16 nt, Human
caguauuuagaagcca

SEQ ID NO: 3882311 - RNA, 19 nt, Human
caguauuuauuuuguaauu

SEQ ID NO: 3882312 - RNA, 19 nt, Human
caguauuucauugccugug

SEQ ID NO: 3882313 - RNA, 16 nt, Human
caguauuuccacuugu

SEQ ID NO: 3882314 - RNA, 13 nt, Human
caguauuuguaau

SEQ ID NO: 3882315 - RNA, 15 nt, Human
caguauuuguaauua

SEQ ID NO: 3882316 - RNA, 15 nt, Human
caguauuugugggga

SEQ ID NO: 3882317 - RNA, 13 nt, Human
caguauuuuagug

SEQ ID NO: 3882318 - RNA, 23 nt, Human
caguauuuuaguggacccugaaa

SEQ ID NO: 3882319 - RNA, 23 nt, Human
caguauuuucccaauagcacuuu

SEQ ID NO: 3882320 - RNA, 19 nt, Human
caguauuuuggagaaauua

SEQ ID NO: 3882321 - RNA, 18 nt, Human
caguauuuuguguccucc

SEQ ID NO: 3882322 - RNA, 14 nt, Human
caguauuuuuaaag

SEQ ID NO: 3882323 - RNA, 18 nt, Human
caguauuuuuaaaggcau

SEQ ID NO: 3882324 - RNA, 14 nt, Human
caguauuuuugcug

SEQ ID NO: 3882325 - RNA, 19 nt, Human
caguauuuuugcugcuucu

SEQ ID NO: 3882326 - RNA, 24 nt, Human
cagucaaaaccaagucacuuaggu

SEQ ID NO: 3882327 - RNA, 14 nt, Human
cagucaagaagaaa

SEQ ID NO: 3882328 - RNA, 15 nt, Human
cagucaauuaacaau

SEQ ID NO: 3882329 - RNA, 16 nt, Human
cagucacagccacccc

SEQ ID NO: 3882330 - RNA, 15 nt, Human
cagucacauuccaag

SEQ ID NO: 3882331 - RNA, 12 nt, Human
cagucaccccag

SEQ ID NO: 3882332 - RNA, 18 nt, Human
cagucaccccggccaccu

SEQ ID NO: 3882333 - RNA, 15 nt, Human
cagucaccucaugga

SEQ ID NO: 3882334 - RNA, 15 nt, Human
cagucacucuaguca

SEQ ID NO: 3882335 - RNA, 24 nt, Human
cagucacucuagucaaugacauga

SEQ ID NO: 3882336 - RNA, 12 nt, Human
cagucacugcca

SEQ ID NO: 3882337 - RNA, 18 nt, Human
cagucacugccacuuugc

SEQ ID NO: 3882338 - RNA, 21 nt, Human
cagucacuucggccagagcug

SEQ ID NO: 3882339 - RNA, 17 nt, Human
cagucagauuuccaguc

SEQ ID NO: 3882340 - RNA, 12 nt, Human
cagucagccucu

SEQ ID NO: 3882341 - RNA, 18 nt, Human
cagucagccucucuccca

SEQ ID NO: 3882342 - RNA, 22 nt, Human
cagucaggaaagagaacuucca

SEQ ID NO: 3882343 - RNA, 12 nt, Human
cagucaggauga

SEQ ID NO: 3882344 - RNA, 14 nt, Human
cagucaggcccagg

SEQ ID NO: 3882345 - RNA, 22 nt, Human
cagucaggcucucugggcugac

SEQ ID NO: 3882346 - RNA, 17 nt, Human
cagucaggggcagcuga

SEQ ID NO: 3882347 - RNA, 17 nt, Human
cagucagugcaaauguc

SEQ ID NO: 3882348 - RNA, 15 nt, Human
cagucauaacuaaau

SEQ ID NO: 3882349 - RNA, 14 nt, Human
cagucaucaucagg

SEQ ID NO: 3882350 - RNA, 15 nt, Human
cagucaucaucaggg

SEQ ID NO: 3882351 - RNA, 20 nt, Human
cagucaucguaggugauuug

SEQ ID NO: 3882352 - RNA, 18 nt, Human
cagucaucuugaccaagc

SEQ ID NO: 3882353 - RNA, 24 nt, Human
cagucaucuugaccaagcaggaag

SEQ ID NO: 3882354 - RNA, 14 nt, Human
cagucaugcauaaa

SEQ ID NO: 3882355 - RNA, 16 nt, Human
cagucaugcauaaaua

SEQ ID NO: 3882356 - RNA, 24 nt, Human
cagucauggcaccaaagccaccag

SEQ ID NO: 3882357 - RNA, 20 nt, Human
cagucauucagauaugauuc

SEQ ID NO: 3882358 - RNA, 22 nt, Human
cagucauucagcagcaaauuuu

SEQ ID NO: 3882359 - RNA, 17 nt, Human
cagucauuggcugucuc

SEQ ID NO: 3882360 - RNA, 21 nt, Human
cagucauuuugcagaggcuau

SEQ ID NO: 3882361 - RNA, 20 nt, Human
cagucauuuuucagaccuuu

SEQ ID NO: 3882362 - RNA, 21 nt, Human
cagucauuuuucagaccuuuu

SEQ ID NO: 3882363 - RNA, 21 nt, Human
cagucauuuuuguuucuaccu

SEQ ID NO: 3882364 - RNA, 23 nt, Human
cagucauuuuuguuucuaccucc

SEQ ID NO: 3882365 - RNA, 21 nt, Human
caguccaaauguccuccagaa

SEQ ID NO: 3882366 - RNA, 22 nt, Human
caguccaaauguccuccagaag

SEQ ID NO: 3882367 - RNA, 23 nt, Human
caguccaaggaaaccacagcugc

SEQ ID NO: 3882368 - RNA, 22 nt, Human
caguccaagggguccccuccag

SEQ ID NO: 3882369 - RNA, 17 nt, Human
caguccacccugccugc

SEQ ID NO: 3882370 - RNA, 23 nt, Human
caguccaggaugcuaacaucuaa

SEQ ID NO: 3882371 - RNA, 18 nt, Human
caguccaguccuaucugg

SEQ ID NO: 3882372 - RNA, 22 nt, Human
caguccaguccuaucugggcuu

SEQ ID NO: 3882373 - RNA, 23 nt, Human
caguccaguccuaucugggcuuc

SEQ ID NO: 3882374 - RNA, 16 nt, Human
caguccauagcagaga

SEQ ID NO: 3882375 - RNA, 12 nt, Human
caguccaugcau

SEQ ID NO: 3882376 - RNA, 17 nt, Human
caguccauuuauauaug

SEQ ID NO: 3882377 - RNA, 18 nt, Human
caguccauuuauauauga

SEQ ID NO: 3882378 - RNA, 15 nt, Human
caguucacacccugc

SEQ ID NO: 3882379 - RNA, 16 nt, Human
caguucacacccugca

SEQ ID NO: 3882380 - RNA, 16 nt, Human
caguucaccugcacuu

SEQ ID NO: 3882381 - RNA, 14 nt, Human
caguucacuugcag

SEQ ID NO: 3882382 - RNA, 15 nt, Human
caguucagagcugcc

SEQ ID NO: 3882383 - RNA, 17 nt, Human
caguucagagcugcccu

SEQ ID NO: 3882384 - RNA, 21 nt, Human
caguucagagcugcccucucc

SEQ ID NO: 3882385 - RNA, 23 nt, Human
caguucagagcugcccucuccug

SEQ ID NO: 3882386 - RNA, 14 nt, Human
caguucagcuuggg

SEQ ID NO: 3882387 - RNA, 15 nt, Human
caguucagcuugggg

SEQ ID NO: 3882388 - RNA, 18 nt, Human
caguucaguaccuggagg

SEQ ID NO: 3882389 - RNA, 22 nt, Human
caguucaguaccuggaggagga

SEQ ID NO: 3882390 - RNA, 20 nt, Human
caguucaguggcagggcuca

SEQ ID NO: 3882391 - RNA, 22 nt, Human
caguucaguggcagggcucagg

SEQ ID NO: 3882392 - RNA, 14 nt, Human
caguucaucuuuug

SEQ ID NO: 3882393 - RNA, 22 nt, Human
caguucauguauguucagaaga

SEQ ID NO: 3882394 - RNA, 16 nt, Human
caguucauguuugcuu

SEQ ID NO: 3882395 - RNA, 12 nt, Human
caguuccaagaa

SEQ ID NO: 3882396 - RNA, 21 nt, Human
caguucccagaaggcauauca

SEQ ID NO: 3882397 - RNA, 15 nt, Human
caguucccagaauca

SEQ ID NO: 3882398 - RNA, 17 nt, Human
caguucccccaaccuca

SEQ ID NO: 3882399 - RNA, 18 nt, Human
caguucccccaaccucag

SEQ ID NO: 3882400 - RNA, 18 nt, Human
caguucccuuggccucag

SEQ ID NO: 3882401 - RNA, 20 nt, Human
caguucccuuggccucagaa

SEQ ID NO: 3882402 - RNA, 16 nt, Human
caguuccucccaggaa

SEQ ID NO: 3882403 - RNA, 17 nt, Human
caguuccucuuugcaug

SEQ ID NO: 3882404 - RNA, 19 nt, Human
caguuccugcagcagagcc

SEQ ID NO: 3882405 - RNA, 15 nt, Human
caguuccugggaaca

SEQ ID NO: 3882406 - RNA, 15 nt, Human
caguuccuuuagaaa

SEQ ID NO: 3882407 - RNA, 15 nt, Human
caguuccuuucaaag

SEQ ID NO: 3882408 - RNA, 15 nt, Human
caguuccuuugugug

SEQ ID NO: 3882409 - RNA, 22 nt, Human
caguuccuuuguguguacucac

SEQ ID NO: 3882410 - RNA, 14 nt, Human
caguucgcagccac

SEQ ID NO: 3882411 - RNA, 15 nt, Human
caguucgcagccacc

SEQ ID NO: 3882412 - RNA, 17 nt, Human
caguucgccuggagccc

SEQ ID NO: 3882413 - RNA, 18 nt, Human
caguucgccuggagcccu

SEQ ID NO: 3882414 - RNA, 22 nt, Human
caguucggugagcuacaaaugc

SEQ ID NO: 3882415 - RNA, 15 nt, Human
caguucuaaccuccu

SEQ ID NO: 3882416 - RNA, 17 nt, Human
caguucuagucucucug

SEQ ID NO: 3882417 - RNA, 17 nt, Human
caguucuaguuugcauu

SEQ ID NO: 3882418 - RNA, 13 nt, Human
caguucucuccuu

SEQ ID NO: 3882419 - RNA, 14 nt, Human
caguucugaagaag

SEQ ID NO: 3882420 - RNA, 14 nt, Human
caguucugaagaau

SEQ ID NO: 3882421 - RNA, 18 nt, Human
caguucugcuccucucca

SEQ ID NO: 3882422 - RNA, 20 nt, Human
caguucugcuccucuccagg

SEQ ID NO: 3882423 - RNA, 22 nt, Human
caguucugcuccucuccaggca

SEQ ID NO: 3882424 - RNA, 21 nt, Human
caguucuguuauauccccugc

SEQ ID NO: 3882425 - RNA, 18 nt, Human
caguucuucgacuguugu

SEQ ID NO: 3882426 - RNA, 19 nt, Human
caguucuucgggaagagag

SEQ ID NO: 3882427 - RNA, 22 nt, Human
caguucuucgggaagagaggag

SEQ ID NO: 3882428 - RNA, 24 nt, Human
caguucuucgggaagagaggaguu

SEQ ID NO: 3882429 - RNA, 19 nt, Human
caguucuugccacuuuuuu

SEQ ID NO: 3882430 - RNA, 15 nt, Human
caguucuuguguggu

SEQ ID NO: 3882431 - RNA, 21 nt, Human
caguucuuuaagaagaucuuu

SEQ ID NO: 3882432 - RNA, 16 nt, Human
caguucuuugggccag

SEQ ID NO: 3882433 - RNA, 20 nt, Human
caguucuuuuguuguaaaga

SEQ ID NO: 3882434 - RNA, 18 nt, Human
caguugaaaaacagcuga

SEQ ID NO: 3882435 - RNA, 19 nt, Human
caguugaaaaacagcugag

SEQ ID NO: 3882436 - RNA, 19 nt, Human
caguugaagggaggggcug

SEQ ID NO: 3882437 - RNA, 14 nt, Human
caguugaauuucau

SEQ ID NO: 3882438 - RNA, 20 nt, Human
caguugagucgucaucacuu

SEQ ID NO: 3882439 - RNA, 16 nt, Human
caguugauuuucugga

SEQ ID NO: 3882440 - RNA, 15 nt, Human
caguugcaauaauac

SEQ ID NO: 3882441 - RNA, 13 nt, Human
caguugcacuugg

SEQ ID NO: 3882442 - RNA, 11 nt, Human
caguugcagcc

SEQ ID NO: 3882443 - RNA, 20 nt, Human
caguugcagcccuugugaug

SEQ ID NO: 3882444 - RNA, 11 nt, Human
caguugcaguc

SEQ ID NO: 3882445 - RNA, 18 nt, Human
caguugcauguaguaaca

SEQ ID NO: 3882446 - RNA, 12 nt, Human
caguugccacca

SEQ ID NO: 3882447 - RNA, 21 nt, Human
caguugccaccaccucugugg

SEQ ID NO: 3882448 - RNA, 22 nt, Human
caguugccaccaccucuguggc

SEQ ID NO: 3882449 - RNA, 14 nt, Human
caguugcccagccu

SEQ ID NO: 3882450 - RNA, 17 nt, Human
caguugcgcguucugaa

SEQ ID NO: 3882451 - RNA, 23 nt, Human
caguugcucaaaaagaaaucaau

SEQ ID NO: 3882452 - RNA, 16 nt, Human
caguugcucuaugcuu

SEQ ID NO: 3882453 - RNA, 19 nt, Human
caguugcugguaaaaugaa

SEQ ID NO: 3882454 - RNA, 22 nt, Human
caguugcugucagucuugaccu

SEQ ID NO: 3882455 - RNA, 13 nt, Human
caguuggacuuuu

SEQ ID NO: 3882456 - RNA, 22 nt, Human
caguuggagcuccagccugaca

SEQ ID NO: 3882457 - RNA, 16 nt, Human
caguuggccuucagaa

SEQ ID NO: 3882458 - RNA, 16 nt, Human
caguugggagcacugg

SEQ ID NO: 3882459 - RNA, 21 nt, Human
caguugggagcacuggagugc

SEQ ID NO: 3882460 - RNA, 17 nt, Human
caguugggugagaacaa

SEQ ID NO: 3882461 - RNA, 11 nt, Human
caguuggguuu

SEQ ID NO: 3882462 - RNA, 16 nt, Human
caguuggguuuuuuaa

SEQ ID NO: 3882463 - RNA, 18 nt, Human
caguuggguuuuuuaagg

SEQ ID NO: 3882464 - RNA, 14 nt, Human
caguugguaacuuu

SEQ ID NO: 3882465 - RNA, 15 nt, Human
caguugguguguuuu

SEQ ID NO: 3882466 - RNA, 22 nt, Human
caguugguguucaaauagcacu

SEQ ID NO: 3882467 - RNA, 17 nt, Human
caguugguugugucuuu

SEQ ID NO: 3882468 - RNA, 18 nt, Human
caguugguugugucuuuu

SEQ ID NO: 3882469 - RNA, 14 nt, Human
caguuguaucagca

SEQ ID NO: 3882470 - RNA, 22 nt, Human
caguugucucugaugcagcuua

SEQ ID NO: 3882471 - RNA, 13 nt, Human
caguugucucugu

SEQ ID NO: 3882472 - RNA, 22 nt, Human
caguuguggugugaguaucaga

SEQ ID NO: 3882473 - RNA, 17 nt, Human
caguuguguuuguugcu

SEQ ID NO: 3882474 - RNA, 21 nt, Human
caguuguuaaguccuuggcuu

SEQ ID NO: 3882475 - RNA, 22 nt, Human
caguuguuagugugucuuagug

SEQ ID NO: 3882476 - RNA, 14 nt, Human
caguuguuauuuau

SEQ ID NO: 3882477 - RNA, 21 nt, Human
caguuguuauuuauugaaaug

SEQ ID NO: 3882478 - RNA, 14 nt, Human
caguuuaaaagcac

SEQ ID NO: 3882479 - RNA, 23 nt, Human
caguuuacagacgcugcugucac

SEQ ID NO: 3882480 - RNA, 18 nt, Human
caguuuaccaguugccuu

SEQ ID NO: 3882481 - RNA, 14 nt, Human
caguuuauauuuaa

SEQ ID NO: 3882482 - RNA, 18 nt, Human
caguuuaucaugaagccu

SEQ ID NO: 3882483 - RNA, 16 nt, Human
caguuuaucauucaag

SEQ ID NO: 3882484 - RNA, 20 nt, Human
caguuuaugcagugcugcuu

SEQ ID NO: 3882485 - RNA, 16 nt, Human
caguuuauguuguaca

SEQ ID NO: 3882486 - RNA, 23 nt, Human
caguuuauuccagagcugccagu

SEQ ID NO: 3882487 - RNA, 15 nt, Human
caguuucacagaaaa

SEQ ID NO: 3882488 - RNA, 17 nt, Human
caguuucacagaaaaua

SEQ ID NO: 3882489 - RNA, 14 nt, Human
caguuucuaaaauu

SEQ ID NO: 3882490 - RNA, 18 nt, Human
caguuugaaauucugaau

SEQ ID NO: 3882491 - RNA, 16 nt, Human
caguuugagacaggag

SEQ ID NO: 3882492 - RNA, 18 nt, Human
caguuugagacaggagac

SEQ ID NO: 3882493 - RNA, 21 nt, Human
caguuugaggauuaguuuaga

SEQ ID NO: 3882494 - RNA, 20 nt, Human
caguuugauaacuagggaag

SEQ ID NO: 3882495 - RNA, 11 nt, Human
caguuugcaaa

SEQ ID NO: 3882496 - RNA, 15 nt, Human
caguuugcaaaaaau

SEQ ID NO: 3882497 - RNA, 14 nt, Human
caguuugcagagua

SEQ ID NO: 3882498 - RNA, 21 nt, Human
caguuugccggauacaaacug

SEQ ID NO: 3882499 - RNA, 12 nt, Human
caguuugcugua

SEQ ID NO: 3882500 - RNA, 12 nt, Human
caguuugcuuug

SEQ ID NO: 3882501 - RNA, 14 nt, Human
caguuugcuuugcc

SEQ ID NO: 3882502 - RNA, 17 nt, Human
caguuuggcaaacucuc

SEQ ID NO: 3882503 - RNA, 22 nt, Human
caguuuggguaaaauacuuuua

SEQ ID NO: 3882504 - RNA, 15 nt, Human
caguuuggugucaac

SEQ ID NO: 3882505 - RNA, 11 nt, Human
caguuugguug

SEQ ID NO: 3882506 - RNA, 13 nt, Human
caguuuguauaua

SEQ ID NO: 3882507 - RNA, 14 nt, Human
caguuuguauauac

SEQ ID NO: 3882508 - RNA, 16 nt, Human
caguuugucuuggaua

SEQ ID NO: 3882509 - RNA, 16 nt, Human
caguuugugugucuua

SEQ ID NO: 3882510 - RNA, 15 nt, Human
caguuuguuggaaag

SEQ ID NO: 3882511 - RNA, 13 nt, Human
caguuuuaacugu

SEQ ID NO: 3882512 - RNA, 14 nt, Human
caguuuuaacugug

SEQ ID NO: 3882513 - RNA, 18 nt, Human
caguuuuaacuguggaua

SEQ ID NO: 3882514 - RNA, 23 nt, Human
caguuuuaacuguggauauuguu

SEQ ID NO: 3882515 - RNA, 16 nt, Human
caguuuuaugcucuuu

SEQ ID NO: 3882516 - RNA, 18 nt, Human
caguuuuaugcucuuuuu

SEQ ID NO: 3882517 - RNA, 14 nt, Human
caguuuucagaaaa

SEQ ID NO: 3882518 - RNA, 15 nt, Human
caguuuucauaguau

SEQ ID NO: 3882519 - RNA, 15 nt, Human
caguuuuccaugaaa

SEQ ID NO: 3882520 - RNA, 19 nt, Human
caguuuuccuaugcuuuga

SEQ ID NO: 3882521 - RNA, 13 nt, Human
caguuuuccuucu

SEQ ID NO: 3882522 - RNA, 15 nt, Human
caguuuucugagaaa

SEQ ID NO: 3882523 - RNA, 16 nt, Human
cauguauaaaugugau

SEQ ID NO: 3882524 - RNA, 18 nt, Human
cauguauaauauuuuuaa

SEQ ID NO: 3882525 - RNA, 19 nt, Human
cauguauaguuuucccuau

SEQ ID NO: 3882526 - RNA, 16 nt, Human
cauguauccuuucaca

SEQ ID NO: 3882527 - RNA, 20 nt, Human
cauguaucuaugcauuuucu

SEQ ID NO: 3882528 - RNA, 22 nt, Human
cauguauggaaucccacuguau

SEQ ID NO: 3882529 - RNA, 12 nt, Human
cauguauggcca

SEQ ID NO: 3882530 - RNA, 14 nt, Human
cauguauggccagg

SEQ ID NO: 3882531 - RNA, 15 nt, Human
cauguauggccagga

SEQ ID NO: 3882532 - RNA, 22 nt, Human
cauguaugucuuggacacugua

SEQ ID NO: 3882533 - RNA, 13 nt, Human
cauguauguuucu

SEQ ID NO: 3882534 - RNA, 21 nt, Human
cauguauguuuugguaucugu

SEQ ID NO: 3882535 - RNA, 22 nt, Human
cauguauguuuugguaucuguu

SEQ ID NO: 3882536 - RNA, 12 nt, Human
cauguauuaaau

SEQ ID NO: 3882537 - RNA, 20 nt, Human
cauguauuaaauuacauuug

SEQ ID NO: 3882538 - RNA, 22 nt, Human
cauguauuaaauuacauuugua

SEQ ID NO: 3882539 - RNA, 17 nt, Human
cauguauugcacauugu

SEQ ID NO: 3882540 - RNA, 18 nt, Human
cauguauugcacauugua

SEQ ID NO: 3882541 - RNA, 21 nt, Human
cauguauugcacauuguaaaa

SEQ ID NO: 3882542 - RNA, 15 nt, Human
cauguauuggccugg

SEQ ID NO: 3882543 - RNA, 16 nt, Human
cauguauuggccugga

SEQ ID NO: 3882544 - RNA, 15 nt, Human
cauguauuugagcau

SEQ ID NO: 3882545 - RNA, 15 nt, Human
cauguauuuggugau

SEQ ID NO: 3882546 - RNA, 14 nt, Human
caugucaaacaaau

SEQ ID NO: 3882547 - RNA, 15 nt, Human
caugucaaacaaaua

SEQ ID NO: 3882548 - RNA, 20 nt, Human
caugucaaacaugagaugug

SEQ ID NO: 3882549 - RNA, 19 nt, Human
caugucaaacgugaaaaug

SEQ ID NO: 3882550 - RNA, 22 nt, Human
caugucaacagcguuccuagag

SEQ ID NO: 3882551 - RNA, 22 nt, Human
caugucaacuucuggcuccuca

SEQ ID NO: 3882552 - RNA, 14 nt, Human
caugucaagauuca

SEQ ID NO: 3882553 - RNA, 17 nt, Human
caugucaagauucagcu

SEQ ID NO: 3882554 - RNA, 20 nt, Human
caugucaaggguucaagauu

SEQ ID NO: 3882555 - RNA, 20 nt, Human
caugucaccggauccugggu

SEQ ID NO: 3882556 - RNA, 20 nt, Human
caugucaccguggaccuucc

SEQ ID NO: 3882557 - RNA, 14 nt, Human
caugucagcaaaaa

SEQ ID NO: 3882558 - RNA, 16 nt, Human
caugucagcaaaaagc

SEQ ID NO: 3882559 - RNA, 17 nt, Human
caugucagcaaaaagca

SEQ ID NO: 3882560 - RNA, 18 nt, Human
caugucagcaucagcuca

SEQ ID NO: 3882561 - RNA, 19 nt, Human
cauguccaaacguccucuu

SEQ ID NO: 3882562 - RNA, 13 nt, Human
cauguccaaagag

SEQ ID NO: 3882563 - RNA, 14 nt, Human
cauguccaaagagg

SEQ ID NO: 3882564 - RNA, 18 nt, Human
cauguccaaagaggcugc

SEQ ID NO: 3882565 - RNA, 19 nt, Human
cauguccaaagaggcugcc

SEQ ID NO: 3882566 - RNA, 22 nt, Human
cauguccagcaccuugugccug

SEQ ID NO: 3882567 - RNA, 23 nt, Human
cauguccagcaccuugugccugg

SEQ ID NO: 3882568 - RNA, 20 nt, Human
cauguccccaaaccugcaag

SEQ ID NO: 3882569 - RNA, 15 nt, Human
cauguccuaugugug

SEQ ID NO: 3882570 - RNA, 16 nt, Human
cauguccuauguguga

SEQ ID NO: 3882571 - RNA, 15 nt, Human
cauguccuguaaagg

SEQ ID NO: 3882572 - RNA, 19 nt, Human
cauguccuuguguguuuug

SEQ ID NO: 3882573 - RNA, 22 nt, Human
cauguccuuguguguuuugaga

SEQ ID NO: 3882574 - RNA, 21 nt, Human
cauguccuuugcgccugugac

SEQ ID NO: 3882575 - RNA, 22 nt, Human
caugucgcuagccagugcucca

SEQ ID NO: 3882576 - RNA, 21 nt, Human
caugucguggacacacacaga

SEQ ID NO: 3882577 - RNA, 17 nt, Human
caugucuauucagcuuc

SEQ ID NO: 3882578 - RNA, 17 nt, Human
caugucugcagugugcc

SEQ ID NO: 3882579 - RNA, 20 nt, Human
caugucugcagugugccccc

SEQ ID NO: 3882580 - RNA, 15 nt, Human
caugucugcauuucg

SEQ ID NO: 3882581 - RNA, 23 nt, Human
caugucugcauuucgguggcuag

SEQ ID NO: 3882582 - RNA, 12 nt, Human
caugucuggcua

SEQ ID NO: 3882583 - RNA, 13 nt, Human
caugucuuaauga

SEQ ID NO: 3882584 - RNA, 15 nt, Human
caugucuuaaugaag

SEQ ID NO: 3882585 - RNA, 21 nt, Human
caugucuuaaugaaguuugaa

SEQ ID NO: 3882586 - RNA, 22 nt, Human
caugucuuaaugaaguuugaau

SEQ ID NO: 3882587 - RNA, 23 nt, Human
caugucuucucacaagccagcca

SEQ ID NO: 3882588 - RNA, 15 nt, Human
caugucuucucccug

SEQ ID NO: 3882589 - RNA, 17 nt, Human
caugucuuguacaugug

SEQ ID NO: 3882590 - RNA, 21 nt, Human
caugucuuucuccaaaguuau

SEQ ID NO: 3882591 - RNA, 15 nt, Human
caugucuuuuaaaau

SEQ ID NO: 3882592 - RNA, 17 nt, Human
caugugaaaaucaaaua

SEQ ID NO: 3882593 - RNA, 15 nt, Human
caugugaaaucauuc

SEQ ID NO: 3882594 - RNA, 17 nt, Human
caugugaaaucauucau

SEQ ID NO: 3882595 - RNA, 15 nt, Human
caugugaacccggga

SEQ ID NO: 3882596 - RNA, 16 nt, Human
caugugaccacucugu

SEQ ID NO: 3882597 - RNA, 12 nt, Human
caugugacucug

SEQ ID NO: 3882598 - RNA, 16 nt, Human
caugugacucugaagc

SEQ ID NO: 3882599 - RNA, 17 nt, Human
caugugacucugaagcu

SEQ ID NO: 3882600 - RNA, 14 nt, Human
caugugacucuuuc

SEQ ID NO: 3882601 - RNA, 16 nt, Human
caugugacucuuucca

SEQ ID NO: 3882602 - RNA, 17 nt, Human
caugugacucuuuccaa

SEQ ID NO: 3882603 - RNA, 20 nt, Human
caugugagcaugucacuucc

SEQ ID NO: 3882604 - RNA, 15 nt, Human
caugugauacauuuu

SEQ ID NO: 3882605 - RNA, 16 nt, Human
caugugauacauuuuu

SEQ ID NO: 3882606 - RNA, 18 nt, Human
caugugauccuuuuaugu

SEQ ID NO: 3882607 - RNA, 19 nt, Human
caugugauccuuuuauguu

SEQ ID NO: 3882608 - RNA, 18 nt, Human
caugugaucucauuguuc

SEQ ID NO: 3882609 - RNA, 20 nt, Human
caugugaugagaggaaauca

SEQ ID NO: 3882610 - RNA, 18 nt, Human
caugugauggacacucca

SEQ ID NO: 3882611 - RNA, 20 nt, Human
caugugauggacacuccagg

SEQ ID NO: 3882612 - RNA, 22 nt, Human
caugugauggacacuccaggga

SEQ ID NO: 3882613 - RNA, 11 nt, Human
caugugcacau

SEQ ID NO: 3882614 - RNA, 15 nt, Human
caugugcacaugcac

SEQ ID NO: 3882615 - RNA, 15 nt, Human
caugugcauaguuuc

SEQ ID NO: 3882616 - RNA, 20 nt, Human
caugugccacaacgccuggc

SEQ ID NO: 3882617 - RNA, 22 nt, Human
caugugccagggcaaugaugaa

SEQ ID NO: 3882618 - RNA, 14 nt, Human
caugugcccaguua

SEQ ID NO: 3882619 - RNA, 22 nt, Human
caugugccuauagucccagcua

SEQ ID NO: 3882620 - RNA, 16 nt, Human
caugugccugcaccag

SEQ ID NO: 3882621 - RNA, 17 nt, Human
caugugccugcaccagg

SEQ ID NO: 3882622 - RNA, 17 nt, Human
caugugcuacaggggcc

SEQ ID NO: 3882623 - RNA, 21 nt, Human
cauguggaaagugaauuugaa

SEQ ID NO: 3882624 - RNA, 15 nt, Human
cauguggagaaagga

SEQ ID NO: 3882625 - RNA, 19 nt, Human
cauguggagaaaggaguga

SEQ ID NO: 3882626 - RNA, 15 nt, Human
cauguggagucagcc

SEQ ID NO: 3882627 - RNA, 14 nt, Human
cauguggccugugg

SEQ ID NO: 3882628 - RNA, 12 nt, Human
caugugggagcu

SEQ ID NO: 3882629 - RNA, 14 nt, Human
cauguggggccagg

SEQ ID NO: 3882630 - RNA, 17 nt, Human
cauguggggccagguca

SEQ ID NO: 3882631 - RNA, 23 nt, Human
cauguggggccaggucacccuuu

SEQ ID NO: 3882632 - RNA, 15 nt, Human
caugugggucuucca

SEQ ID NO: 3882633 - RNA, 22 nt, Human
caugugguggcacaggcccccu

SEQ ID NO: 3882634 - RNA, 22 nt, Human
caugugguuaaugccauggaca

SEQ ID NO: 3882635 - RNA, 20 nt, Human
caugugguuugguuccucuc

SEQ ID NO: 3882636 - RNA, 16 nt, Human
cauguguaaucaauaa

SEQ ID NO: 3882637 - RNA, 16 nt, Human
cauguguagccuaugu

SEQ ID NO: 3882638 - RNA, 14 nt, Human
cauguguauaaaaa

SEQ ID NO: 3882639 - RNA, 18 nt, Human
cauguguaugggcaaaaa

SEQ ID NO: 3882640 - RNA, 23 nt, Human
caugugucaacaccccugugugg

SEQ ID NO: 3882641 - RNA, 18 nt, Human
cauguguccaucccagcg

SEQ ID NO: 3882642 - RNA, 21 nt, Human
cauguguccugguucccguuu

SEQ ID NO: 3882643 - RNA, 21 nt, Human
caugugugagugugugcaagu

SEQ ID NO: 3882644 - RNA, 21 nt, Human
caugugugguacaugguguuu

SEQ ID NO: 3882645 - RNA, 14 nt, Human
cauguguguauaag

SEQ ID NO: 3882646 - RNA, 14 nt, Human
cauguguguauaua

SEQ ID NO: 3882647 - RNA, 22 nt, Human
cauguguguccacgacugucuc

SEQ ID NO: 3882648 - RNA, 15 nt, Human
caugugugugcaagu

SEQ ID NO: 3882649 - RNA, 15 nt, Human
caugugugugcucag

SEQ ID NO: 3882650 - RNA, 23 nt, Human
cauguguguuaacccagugcuuu

SEQ ID NO: 3882651 - RNA, 15 nt, Human
cauguguuaaucuua

SEQ ID NO: 3882652 - RNA, 13 nt, Human
cauguguucccuu

SEQ ID NO: 3882653 - RNA, 22 nt, Human
cauguguucccuuugucuuuca

SEQ ID NO: 3882654 - RNA, 22 nt, Human
cauguuaaaccaugggauaaau

SEQ ID NO: 3882655 - RNA, 21 nt, Human
cauguuaaccccuccacucuu

SEQ ID NO: 3882656 - RNA, 16 nt, Human
cauguuaauccuagcu

SEQ ID NO: 3882657 - RNA, 17 nt, Human
cauguuacuggauaaau

SEQ ID NO: 3882658 - RNA, 14 nt, Human
cauguuaggaaaau

SEQ ID NO: 3882659 - RNA, 14 nt, Human
cauguuaguaauac

SEQ ID NO: 3882660 - RNA, 20 nt, Human
cauguuaguaauaccucuaa

SEQ ID NO: 3882661 - RNA, 24 nt, Human
cauguuaguaauaccucuaauagu

SEQ ID NO: 3882662 - RNA, 24 nt, Human
cauguuaguuaccuuauaguuacu

SEQ ID NO: 3882663 - RNA, 20 nt, Human
cauguuauauauuuuuugua

SEQ ID NO: 3882664 - RNA, 20 nt, Human
cauguuauauuuaaugcauu

SEQ ID NO: 3882665 - RNA, 21 nt, Human
cauguuaugauaaaaaauuuu

SEQ ID NO: 3882666 - RNA, 16 nt, Human
cauguuccaauaaaca

SEQ ID NO: 3882667 - RNA, 14 nt, Human
cauuggcuauuuaa

SEQ ID NO: 3882668 - RNA, 19 nt, Human
cauugggcagcgcccuucc

SEQ ID NO: 3882669 - RNA, 23 nt, Human
cauugggcagcgcccuuccucuc

SEQ ID NO: 3882670 - RNA, 18 nt, Human
cauuggggcucccagcca

SEQ ID NO: 3882671 - RNA, 20 nt, Human
cauugggugagguaauaaac

SEQ ID NO: 3882672 - RNA, 15 nt, Human
cauugguuaauuuuu

SEQ ID NO: 3882673 - RNA, 17 nt, Human
cauugguucccuuugcu

SEQ ID NO: 3882674 - RNA, 14 nt, Human
cauugguucuugua

SEQ ID NO: 3882675 - RNA, 18 nt, Human
cauugguucuuguauuaa

SEQ ID NO: 3882676 - RNA, 22 nt, Human
cauugguucuuguauuaagaau

SEQ ID NO: 3882677 - RNA, 20 nt, Human
cauuguaaaagcauuuugua

SEQ ID NO: 3882678 - RNA, 15 nt, Human
cauuguaacuuggau

SEQ ID NO: 3882679 - RNA, 21 nt, Human
cauuguaauguuacugaucau

SEQ ID NO: 3882680 - RNA, 19 nt, Human
cauuguaauguugugaaua

SEQ ID NO: 3882681 - RNA, 14 nt, Human
cauuguagaaaagc

SEQ ID NO: 3882682 - RNA, 17 nt, Human
cauuguagagcuucugg

SEQ ID NO: 3882683 - RNA, 18 nt, Human
cauuguagugcuuugaga

SEQ ID NO: 3882684 - RNA, 20 nt, Human
cauuguagugcuuugagaga

SEQ ID NO: 3882685 - RNA, 24 nt, Human
cauuguagugcuuugagagagaaa

SEQ ID NO: 3882686 - RNA, 16 nt, Human
cauuguauaaaaauag

SEQ ID NO: 3882687 - RNA, 24 nt, Human
cauuguauagauauaaugaacaaa

SEQ ID NO: 3882688 - RNA, 15 nt, Human
cauuguauauaugug

SEQ ID NO: 3882689 - RNA, 16 nt, Human
cauuguaucgauguua

SEQ ID NO: 3882690 - RNA, 17 nt, Human
cauuguaucgauguuau

SEQ ID NO: 3882691 - RNA, 21 nt, Human
cauuguaucgauguuauguaa

SEQ ID NO: 3882692 - RNA, 22 nt, Human
cauuguaucgauguuauguaaa

SEQ ID NO: 3882693 - RNA, 16 nt, Human
cauuguaugauguguu

SEQ ID NO: 3882694 - RNA, 20 nt, Human
cauuguaugauguguuguga

SEQ ID NO: 3882695 - RNA, 22 nt, Human
cauuguccagagcugcuucccc

SEQ ID NO: 3882696 - RNA, 18 nt, Human
cauugucccucugcccca

SEQ ID NO: 3882697 - RNA, 19 nt, Human
cauugucccugaagagaag

SEQ ID NO: 3882698 - RNA, 13 nt, Human
cauugucuucgga

SEQ ID NO: 3882699 - RNA, 21 nt, Human
cauugucuuuauaugaacaua

SEQ ID NO: 3882700 - RNA, 17 nt, Human
cauugugaaccaaugca

SEQ ID NO: 3882701 - RNA, 19 nt, Human
cauugugaguaaaucagau

SEQ ID NO: 3882702 - RNA, 16 nt, Human
cauugugcauucuaga

SEQ ID NO: 3882703 - RNA, 17 nt, Human
cauuguggcacauucuu

SEQ ID NO: 3882704 - RNA, 16 nt, Human
cauuguggcuccuauc

SEQ ID NO: 3882705 - RNA, 19 nt, Human
cauuguggcugucagcagg

SEQ ID NO: 3882706 - RNA, 21 nt, Human
cauuguggcugucagcaggaa

SEQ ID NO: 3882707 - RNA, 15 nt, Human
cauugugggaagggg

SEQ ID NO: 3882708 - RNA, 14 nt, Human
cauuguuagcacua

SEQ ID NO: 3882709 - RNA, 17 nt, Human
cauuguuauauaaucau

SEQ ID NO: 3882710 - RNA, 17 nt, Human
cauuguucaaaaggaac

SEQ ID NO: 3882711 - RNA, 19 nt, Human
cauuguucaccuuuguagc

SEQ ID NO: 3882712 - RNA, 16 nt, Human
cauuguugaggugguc

SEQ ID NO: 3882713 - RNA, 18 nt, Human
cauuguugagguggucug

SEQ ID NO: 3882714 - RNA, 16 nt, Human
cauuguugcucccugu

SEQ ID NO: 3882715 - RNA, 13 nt, Human
cauuguuggcagc

SEQ ID NO: 3882716 - RNA, 17 nt, Human
cauuguuucguaacaca

SEQ ID NO: 3882717 - RNA, 21 nt, Human
cauuguuucugugggcgggcc

SEQ ID NO: 3882718 - RNA, 19 nt, Human
cauuguuugaaacaaagaa

SEQ ID NO: 3882719 - RNA, 14 nt, Human
cauuguuugcugcu

SEQ ID NO: 3882720 - RNA, 16 nt, Human
cauuguuugcugcuau

SEQ ID NO: 3882721 - RNA, 17 nt, Human
cauuguuugcuuauugu

SEQ ID NO: 3882722 - RNA, 21 nt, Human
cauuguuugcuuauuguucca

SEQ ID NO: 3882723 - RNA, 18 nt, Human
cauuguuugucugucuuc

SEQ ID NO: 3882724 - RNA, 12 nt, Human
cauuguuuugaa

SEQ ID NO: 3882725 - RNA, 19 nt, Human
cauuguuuugaauauuacu

SEQ ID NO: 3882726 - RNA, 14 nt, Human
cauuguuuugccaa

SEQ ID NO: 3882727 - RNA, 20 nt, Human
cauuguuuugccaacauugc

SEQ ID NO: 3882728 - RNA, 15 nt, Human
cauuuaaaaaaaauc

SEQ ID NO: 3882729 - RNA, 22 nt, Human
cauuuaaaaagguuuaaaacua

SEQ ID NO: 3882730 - RNA, 17 nt, Human
cauuuaaaacagacacu

SEQ ID NO: 3882731 - RNA, 19 nt, Human
cauuuaaaacauuaaaaua

SEQ ID NO: 3882732 - RNA, 13 nt, Human
cauuuaaaagaca

SEQ ID NO: 3882733 - RNA, 17 nt, Human
cauuuaaaaugauuaga

SEQ ID NO: 3882734 - RNA, 22 nt, Human
cauuuaaaauugcuauguuacu

SEQ ID NO: 3882735 - RNA, 21 nt, Human
cauuuaaacagauguccauca

SEQ ID NO: 3882736 - RNA, 14 nt, Human
cauuuaaagcauug

SEQ ID NO: 3882737 - RNA, 16 nt, Human
cauuuaaagcauugcu

SEQ ID NO: 3882738 - RNA, 17 nt, Human
cauuuaaagcauugcug

SEQ ID NO: 3882739 - RNA, 17 nt, Human
cauuuaaauuuuuuggc

SEQ ID NO: 3882740 - RNA, 18 nt, Human
cauuuaaauuuuuuggca

SEQ ID NO: 3882741 - RNA, 22 nt, Human
cauuuaaggaugggguuaugaa

SEQ ID NO: 3882742 - RNA, 17 nt, Human
cauuuaagggaaaaaua

SEQ ID NO: 3882743 - RNA, 12 nt, Human
cauuuaaguuuc

SEQ ID NO: 3882744 - RNA, 17 nt, Human
cauuuaauaauauacuu

SEQ ID NO: 3882745 - RNA, 19 nt, Human
cauuuaauaauuauaugcu

SEQ ID NO: 3882746 - RNA, 22 nt, Human
cauuuaauggggaggacaaaau

SEQ ID NO: 3882747 - RNA, 24 nt, Human
cauuuaauguagccaugggaccaa

SEQ ID NO: 3882748 - RNA, 16 nt, Human
cauuuacaaacugaag

SEQ ID NO: 3882749 - RNA, 14 nt, Human
cauuuacaacccgg

SEQ ID NO: 3882750 - RNA, 23 nt, Human
cauuuacaacccgguucacucuu

SEQ ID NO: 3882751 - RNA, 20 nt, Human
cauuuacaguccuucaaaau

SEQ ID NO: 3882752 - RNA, 16 nt, Human
cauuuacauguuuuaa

SEQ ID NO: 3882753 - RNA, 22 nt, Human
cauuuacccuucuuuucugacu

SEQ ID NO: 3882754 - RNA, 17 nt, Human
cauuuacuaaacauaug

SEQ ID NO: 3882755 - RNA, 15 nt, Human
cauuuacuguggcuu

SEQ ID NO: 3882756 - RNA, 16 nt, Human
cauuuacuuaagacuu

SEQ ID NO: 3882757 - RNA, 15 nt, Human
cauuuagaaaaguga

SEQ ID NO: 3882758 - RNA, 12 nt, Human
cauuuagaaaau

SEQ ID NO: 3882759 - RNA, 20 nt, Human
cauuuagaagaaagauguuu

SEQ ID NO: 3882760 - RNA, 20 nt, Human
cauuuagaauggugauuuua

SEQ ID NO: 3882761 - RNA, 22 nt, Human
cauuuagauccugguuucauaa

SEQ ID NO: 3882762 - RNA, 16 nt, Human
cauuuagccuguccug

SEQ ID NO: 3882763 - RNA, 21 nt, Human
cauuuagcuggccacauggcg

SEQ ID NO: 3882764 - RNA, 17 nt, Human
cauuuagggaguauucu

SEQ ID NO: 3882765 - RNA, 16 nt, Human
cauuuaggugaggaag

SEQ ID NO: 3882766 - RNA, 18 nt, Human
cauuuaggugaggaagca

SEQ ID NO: 3882767 - RNA, 15 nt, Human
cauuuagguuucuga

SEQ ID NO: 3882768 - RNA, 15 nt, Human
cauuuagucauguga

SEQ ID NO: 3882769 - RNA, 20 nt, Human
cauuuaguccaaugucuuuu

SEQ ID NO: 3882770 - RNA, 18 nt, Human
cauuuauaaagcuaaaau

SEQ ID NO: 3882771 - RNA, 17 nt, Human
cauuuauaauugcaucu

SEQ ID NO: 3882772 - RNA, 18 nt, Human
cauuuauacaaauuagaa

SEQ ID NO: 3882773 - RNA, 20 nt, Human
cauuuauacaaauuagaaaa

SEQ ID NO: 3882774 - RNA, 11 nt, Human
cauuuauacuc

SEQ ID NO: 3882775 - RNA, 12 nt, Human
cauuuauauaug

SEQ ID NO: 3882776 - RNA, 13 nt, Human
cauuuauauauug

SEQ ID NO: 3882777 - RNA, 13 nt, Human
cauuuauauugau

SEQ ID NO: 3882778 - RNA, 21 nt, Human
cauuuauauugauaagaucuu

SEQ ID NO: 3882779 - RNA, 22 nt, Human
cauuuauccacaggaaaguguu

SEQ ID NO: 3882780 - RNA, 20 nt, Human
cauuuauccaccuccaucuu

SEQ ID NO: 3882781 - RNA, 16 nt, Human
cauuuaucuauaauuu

SEQ ID NO: 3882782 - RNA, 15 nt, Human
cauuuaucuugaagg

SEQ ID NO: 3882783 - RNA, 17 nt, Human
cauuuaucuuucuacag

SEQ ID NO: 3882784 - RNA, 17 nt, Human
cauuuaugagcucuuca

SEQ ID NO: 3882785 - RNA, 20 nt, Human
cauuuaugagcucuucaugu

SEQ ID NO: 3882786 - RNA, 20 nt, Human
cauuuaugauuuaauaaaau

SEQ ID NO: 3882787 - RNA, 19 nt, Human
cauuuaugguaaucauauu

SEQ ID NO: 3882788 - RNA, 22 nt, Human
cauuuaugguaaucauauuaga

SEQ ID NO: 3882789 - RNA, 21 nt, Human
cauuuaugugucaguucauuu

SEQ ID NO: 3882790 - RNA, 13 nt, Human
cauuuauuguuua

SEQ ID NO: 3882791 - RNA, 15 nt, Human
cauuuauuuuaagca

SEQ ID NO: 3882792 - RNA, 21 nt, Human
cauuuauuuuaagcacucuua

SEQ ID NO: 3882793 - RNA, 13 nt, Human
cauuuauuuuaug

SEQ ID NO: 3882794 - RNA, 14 nt, Human
cauuuauuuuauga

SEQ ID NO: 3882795 - RNA, 17 nt, Human
cauuuauuuuaugagaa

SEQ ID NO: 3882796 - RNA, 18 nt, Human
cauuuauuuuaugagaaa

SEQ ID NO: 3882797 - RNA, 14 nt, Human
cauuuauuuugaca

SEQ ID NO: 3882798 - RNA, 20 nt, Human
cauuuauuuuuuuuaaagaa

SEQ ID NO: 3882799 - RNA, 15 nt, Human
cauuucaaaaugcuu

SEQ ID NO: 3882800 - RNA, 16 nt, Human
cauuucaauucucaaa

SEQ ID NO: 3882801 - RNA, 20 nt, Human
cauuucacaaaacagccuuu

SEQ ID NO: 3882802 - RNA, 12 nt, Human
cauuucacauua

SEQ ID NO: 3882803 - RNA, 16 nt, Human
cauuucacauuauucu

SEQ ID NO: 3882804 - RNA, 19 nt, Human
cauuucaccccucccuuuc

SEQ ID NO: 3882805 - RNA, 22 nt, Human
cauuucaccccucccuuucucc

SEQ ID NO: 3882806 - RNA, 19 nt, Human
cauuucacuugucaggagu

SEQ ID NO: 3882807 - RNA, 23 nt, Human
cauuucagaaguuaguuuguaua

SEQ ID NO: 3882808 - RNA, 15 nt, Human
cauuucaggagcagc

SEQ ID NO: 3882809 - RNA, 19 nt, Human
cauuucauauucuuucaau

SEQ ID NO: 3882810 - RNA, 18 nt, Human
cauuucaucauuguuucu

SEQ ID NO: 3882811 - RNA, 17 nt, Human
ccacugaaaaaauauau

SEQ ID NO: 3882812 - RNA, 18 nt, Human
ccacugaagauagaagaa

SEQ ID NO: 3882813 - RNA, 15 nt, Human
ccacugaagcuggga

SEQ ID NO: 3882814 - RNA, 16 nt, Human
ccacugaagcugggau

SEQ ID NO: 3882815 - RNA, 12 nt, Human
ccacugagcucc

SEQ ID NO: 3882816 - RNA, 19 nt, Human
ccacugaggagcuuuguuu

SEQ ID NO: 3882817 - RNA, 13 nt, Human
ccacugagggcag

SEQ ID NO: 3882818 - RNA, 23 nt, Human
ccacugauauucagaauuaugau

SEQ ID NO: 3882819 - RNA, 19 nt, Human
ccacugaugcuguucucuu

SEQ ID NO: 3882820 - RNA, 21 nt, Human
ccacugauggaaacaaagugg

SEQ ID NO: 3882821 - RNA, 16 nt, Human
ccacugcacagagcuc

SEQ ID NO: 3882822 - RNA, 13 nt, Human
ccacugcaccccc

SEQ ID NO: 3882823 - RNA, 14 nt, Human
ccacugcacccccu

SEQ ID NO: 3882824 - RNA, 18 nt, Human
ccacugcaccccgucuca

SEQ ID NO: 3882825 - RNA, 17 nt, Human
ccacugcacuccagccu

SEQ ID NO: 3882826 - RNA, 23 nt, Human
ccacugcacuccagccuggguga

SEQ ID NO: 3882827 - RNA, 13 nt, Human
ccacugcaggccc

SEQ ID NO: 3882828 - RNA, 23 nt, Human
ccacugccacacgucugacccuc

SEQ ID NO: 3882829 - RNA, 14 nt, Human
ccacugccagcagc

SEQ ID NO: 3882830 - RNA, 20 nt, Human
ccacugccagcagcagcagg

SEQ ID NO: 3882831 - RNA, 16 nt, Human
ccacugcccacuggcc

SEQ ID NO: 3882832 - RNA, 20 nt, Human
ccacugcccccugcugccau

SEQ ID NO: 3882833 - RNA, 19 nt, Human
ccacugccccuucauugau

SEQ ID NO: 3882834 - RNA, 17 nt, Human
ccacugcccgagcuggu

SEQ ID NO: 3882835 - RNA, 20 nt, Human
ccacugcccgagcuggugca

SEQ ID NO: 3882836 - RNA, 23 nt, Human
ccacugcccgagcuggugcauua

SEQ ID NO: 3882837 - RNA, 15 nt, Human
ccacugccucagguu

SEQ ID NO: 3882838 - RNA, 15 nt, Human
ccacugccucucccu

SEQ ID NO: 3882839 - RNA, 16 nt, Human
ccacugccucucccuc

SEQ ID NO: 3882840 - RNA, 16 nt, Human
ccacugccucugccuu

SEQ ID NO: 3882841 - RNA, 13 nt, Human
ccacugccucuuc

SEQ ID NO: 3882842 - RNA, 11 nt, Human
ccacugccugc

SEQ ID NO: 3882843 - RNA, 15 nt, Human
ccacugccugcccac

SEQ ID NO: 3882844 - RNA, 16 nt, Human
ccacugccugcccacc

SEQ ID NO: 3882845 - RNA, 12 nt, Human
ccacugccuucg

SEQ ID NO: 3882846 - RNA, 18 nt, Human
ccacugccuucgcuucuu

SEQ ID NO: 3882847 - RNA, 20 nt, Human
ccacugcucccuaagccagc

SEQ ID NO: 3882848 - RNA, 12 nt, Human
ccacugcucugg

SEQ ID NO: 3882849 - RNA, 13 nt, Human
ccacugcucuggu

SEQ ID NO: 3882850 - RNA, 18 nt, Human
ccacugcugauauuuucu

SEQ ID NO: 3882851 - RNA, 19 nt, Human
ccacugcugauauuuucuc

SEQ ID NO: 3882852 - RNA, 18 nt, Human
ccacugcugcaguagggg

SEQ ID NO: 3882853 - RNA, 14 nt, Human
ccacugcuuuuccc

SEQ ID NO: 3882854 - RNA, 22 nt, Human
ccacugcuuuuggucuguguga

SEQ ID NO: 3882855 - RNA, 15 nt, Human
ccacuggaagggcag

SEQ ID NO: 3882856 - RNA, 13 nt, Human
ccacuggacugac

SEQ ID NO: 3882857 - RNA, 18 nt, Human
ccacuggacugaccuggu

SEQ ID NO: 3882858 - RNA, 21 nt, Human
ccacuggacuugagcuuggca

SEQ ID NO: 3882859 - RNA, 18 nt, Human
ccacuggagcagaagggg

SEQ ID NO: 3882860 - RNA, 11 nt, Human
ccacuggaggu

SEQ ID NO: 3882861 - RNA, 14 nt, Human
ccacuggccaccag

SEQ ID NO: 3882862 - RNA, 16 nt, Human
ccacuggcugcuaaca

SEQ ID NO: 3882863 - RNA, 11 nt, Human
ccacuggcugu

SEQ ID NO: 3882864 - RNA, 19 nt, Human
ccacuggcugugggcuccc

SEQ ID NO: 3882865 - RNA, 21 nt, Human
ccacuggcugugggcucccuu

SEQ ID NO: 3882866 - RNA, 14 nt, Human
ccacuggggcucag

SEQ ID NO: 3882867 - RNA, 18 nt, Human
ccacugggguccagggag

SEQ ID NO: 3882868 - RNA, 19 nt, Human
ccacuggguguaaacacau

SEQ ID NO: 3882869 - RNA, 15 nt, Human
ccacugguucuucuu

SEQ ID NO: 3882870 - RNA, 14 nt, Human
ccacuguaaaauga

SEQ ID NO: 3882871 - RNA, 20 nt, Human
ccacuguacuugcucuugau

SEQ ID NO: 3882872 - RNA, 14 nt, Human
ccacugucacccuc

SEQ ID NO: 3882873 - RNA, 24 nt, Human
ccacugucacuguuucucugcugu

SEQ ID NO: 3882874 - RNA, 11 nt, Human
ccacuguccug

SEQ ID NO: 3882875 - RNA, 14 nt, Human
ccacugucuucuuc

SEQ ID NO: 3882876 - RNA, 14 nt, Human
ccacugugaagaga

SEQ ID NO: 3882877 - RNA, 18 nt, Human
ccacugugcagguuccca

SEQ ID NO: 3882878 - RNA, 15 nt, Human
ccacugugccucaga

SEQ ID NO: 3882879 - RNA, 16 nt, Human
ccacugugccucagag

SEQ ID NO: 3882880 - RNA, 21 nt, Human
ccacugugccuuugcaaauca

SEQ ID NO: 3882881 - RNA, 22 nt, Human
ccacugugccuuugcaaaucag

SEQ ID NO: 3882882 - RNA, 17 nt, Human
ccacugugcugaauucu

SEQ ID NO: 3882883 - RNA, 19 nt, Human
ccacugugcugaauucugc

SEQ ID NO: 3882884 - RNA, 13 nt, Human
ccacugugguggc

SEQ ID NO: 3882885 - RNA, 14 nt, Human
ccacuguuaucaaa

SEQ ID NO: 3882886 - RNA, 18 nt, Human
ccacuguuucucuugagc

SEQ ID NO: 3882887 - RNA, 23 nt, Human
ccacuguuucucuugagcuggcc

SEQ ID NO: 3882888 - RNA, 18 nt, Human
ccacuguuucuugcuugu

SEQ ID NO: 3882889 - RNA, 15 nt, Human
ccacuguuuggaaau

SEQ ID NO: 3882890 - RNA, 21 nt, Human
ccacuuaaaaaauguccauga

SEQ ID NO: 3882891 - RNA, 15 nt, Human
ccacuuaauguaugu

SEQ ID NO: 3882892 - RNA, 17 nt, Human
ccacuuaauguauguua

SEQ ID NO: 3882893 - RNA, 20 nt, Human
ccacuuaauguauguuacca

SEQ ID NO: 3882894 - RNA, 13 nt, Human
ccacuuaccuuca

SEQ ID NO: 3882895 - RNA, 19 nt, Human
ccacuuaccuucaauaaag

SEQ ID NO: 3882896 - RNA, 20 nt, Human
ccacuuagccuuucuuuucu

SEQ ID NO: 3882897 - RNA, 15 nt, Human
ccacuucaaaacaaa

SEQ ID NO: 3882898 - RNA, 13 nt, Human
ccacuucaauaga

SEQ ID NO: 3882899 - RNA, 13 nt, Human
ccacuucagcuga

SEQ ID NO: 3882900 - RNA, 21 nt, Human
ccacuucaggguucuccucuc

SEQ ID NO: 3882901 - RNA, 21 nt, Human
ccacuucauucuugaaagcug

SEQ ID NO: 3882902 - RNA, 13 nt, Human
ccacuuccagggg

SEQ ID NO: 3882903 - RNA, 19 nt, Human
ccacuuccaggggaaccug

SEQ ID NO: 3882904 - RNA, 19 nt, Human
ccacuuccccuccuacccc

SEQ ID NO: 3882905 - RNA, 13 nt, Human
ccacuucccuggg

SEQ ID NO: 3882906 - RNA, 14 nt, Human
ccacuucccugggc

SEQ ID NO: 3882907 - RNA, 14 nt, Human
ccacuucugacagc

SEQ ID NO: 3882908 - RNA, 13 nt, Human
ccacuucugcacu

SEQ ID NO: 3882909 - RNA, 13 nt, Human
ccacuucugccag

SEQ ID NO: 3882910 - RNA, 19 nt, Human
ccacuucugccagaugucc

SEQ ID NO: 3882911 - RNA, 15 nt, Human
ccacuucuuccuuuc

SEQ ID NO: 3882912 - RNA, 23 nt, Human
ccacuugacacuauucacuaaaa

SEQ ID NO: 3882913 - RNA, 15 nt, Human
ccacuugaggccuga

SEQ ID NO: 3882914 - RNA, 19 nt, Human
ccacuugaggccugaucug

SEQ ID NO: 3882915 - RNA, 24 nt, Human
ccacuugaggccugaucugcccau

SEQ ID NO: 3882916 - RNA, 16 nt, Human
ccacuugccucuuccu

SEQ ID NO: 3882917 - RNA, 17 nt, Human
ccacuugccucuuccuu

SEQ ID NO: 3882918 - RNA, 12 nt, Human
ccacuuggccaa

SEQ ID NO: 3882919 - RNA, 17 nt, Human
ccacuuggccaagcagg

SEQ ID NO: 3882920 - RNA, 19 nt, Human
ccacuuggucugugagaug

SEQ ID NO: 3882921 - RNA, 22 nt, Human
ccacuuggucugugagaugcua

SEQ ID NO: 3882922 - RNA, 20 nt, Human
ccacuuguagauuugauuuu

SEQ ID NO: 3882923 - RNA, 15 nt, Human
ccacuuguccgcugg

SEQ ID NO: 3882924 - RNA, 21 nt, Human
ccacuuguccgcuggguggua

SEQ ID NO: 3882925 - RNA, 18 nt, Human
ccacuuguccuuagccug

SEQ ID NO: 3882926 - RNA, 22 nt, Human
ccacuuguccuuagccuggacc

SEQ ID NO: 3882927 - RNA, 24 nt, Human
ccacuuucaaucuucaauccuuga

SEQ ID NO: 3882928 - RNA, 13 nt, Human
ccacuuucagcug

SEQ ID NO: 3882929 - RNA, 14 nt, Human
ccacuuucagcugu

SEQ ID NO: 3882930 - RNA, 16 nt, Human
ccacuuucagcugucu

SEQ ID NO: 3882931 - RNA, 17 nt, Human
ccacuuucagcugucuu

SEQ ID NO: 3882932 - RNA, 19 nt, Human
ccacuuucuagccagagga

SEQ ID NO: 3882933 - RNA, 13 nt, Human
ccacuuucuuucu

SEQ ID NO: 3882934 - RNA, 19 nt, Human
ccacuuugcacauuuugau

SEQ ID NO: 3882935 - RNA, 21 nt, Human
ccacuuugcacgacgcccucu

SEQ ID NO: 3882936 - RNA, 13 nt, Human
ccacuuuguccau

SEQ ID NO: 3882937 - RNA, 14 nt, Human
ccacuuuguuggaa

SEQ ID NO: 3882938 - RNA, 14 nt, Human
ccacuuuuuagaaa

SEQ ID NO: 3882939 - RNA, 15 nt, Human
ccacuuuuugcagcu

SEQ ID NO: 3882940 - RNA, 17 nt, Human
ccacuuuuugcagcuuu

SEQ ID NO: 3882941 - RNA, 16 nt, Human
ccagaaaacaaaacug

SEQ ID NO: 3882942 - RNA, 15 nt, Human
ccagaaaaccccagc

SEQ ID NO: 3882943 - RNA, 14 nt, Human
ccagaaaaggacag

SEQ ID NO: 3882944 - RNA, 21 nt, Human
ccagaaacacccacaggcaug

SEQ ID NO: 3882945 - RNA, 20 nt, Human
ccagaaacaccuagaucaga

SEQ ID NO: 3882946 - RNA, 18 nt, Human
ccagaaaccuuuguuugc

SEQ ID NO: 3882947 - RNA, 14 nt, Human
ccagaaaggagacu

SEQ ID NO: 3882948 - RNA, 15 nt, Human
ccagaaaggauauuu

SEQ ID NO: 3882949 - RNA, 16 nt, Human
ccagaaaggauauuua

SEQ ID NO: 3882950 - RNA, 22 nt, Human
ccagaaauccaucuaaauaccu

SEQ ID NO: 3882951 - RNA, 18 nt, Human
ccagaaauggugagaugu

SEQ ID NO: 3882952 - RNA, 22 nt, Human
ccagaaaugucuaaaugcugaa

SEQ ID NO: 3882953 - RNA, 13 nt, Human
ccagaaauuagaa

SEQ ID NO: 3882954 - RNA, 10 nt, Human
ccagaaauuc

SEQ ID NO: 3882955 - RNA, 20 nt, Human
ccagaacacggcucacgcuu

SEQ ID NO: 3882956 - RNA, 22 nt, Human
ccagaaccacacuugaaaccuu

SEQ ID NO: 3882957 - RNA, 21 nt, Human
ccagagcuacccgcagaguuc

SEQ ID NO: 3882958 - RNA, 12 nt, Human
ccagagcucugg

SEQ ID NO: 3882959 - RNA, 16 nt, Human
ccagagcucuggagcc

SEQ ID NO: 3882960 - RNA, 21 nt, Human
ccagagcucuggagccaccug

SEQ ID NO: 3882961 - RNA, 22 nt, Human
ccagagcucuggagccaccugu

SEQ ID NO: 3882962 - RNA, 14 nt, Human
ccagagcugccacc

SEQ ID NO: 3882963 - RNA, 16 nt, Human
ccagagcugccaccug

SEQ ID NO: 3882964 - RNA, 19 nt, Human
ccagagcugccaccugccu

SEQ ID NO: 3882965 - RNA, 13 nt, Human
ccagagcugccag

SEQ ID NO: 3882966 - RNA, 18 nt, Human
ccagagcugguggaccca

SEQ ID NO: 3882967 - RNA, 22 nt, Human
ccagagcugguggacccaggga

SEQ ID NO: 3882968 - RNA, 20 nt, Human
ccagagcuguuuauggccuc

SEQ ID NO: 3882969 - RNA, 17 nt, Human
ccagaggaaccugaggc

SEQ ID NO: 3882970 - RNA, 23 nt, Human
ccagaggaacuguccagagagca

SEQ ID NO: 3882971 - RNA, 19 nt, Human
ccagaggaaggggccagag

SEQ ID NO: 3882972 - RNA, 17 nt, Human
ccagaggaauccuggca

SEQ ID NO: 3882973 - RNA, 15 nt, Human
ccagaggacucccaa

SEQ ID NO: 3882974 - RNA, 16 nt, Human
ccagaggagccaccag

SEQ ID NO: 3882975 - RNA, 17 nt, Human
ccagaggagccaccagu

SEQ ID NO: 3882976 - RNA, 21 nt, Human
ccagaggagccaccaguucuc

SEQ ID NO: 3882977 - RNA, 21 nt, Human
ccagaggagcugggagccggg

SEQ ID NO: 3882978 - RNA, 22 nt, Human
ccagaggagcugggagccgggc

SEQ ID NO: 3882979 - RNA, 22 nt, Human
ccagaggagggcagcagaaggg

SEQ ID NO: 3882980 - RNA, 15 nt, Human
ccagaggcacagccg

SEQ ID NO: 3882981 - RNA, 17 nt, Human
ccagaggcacagccggg

SEQ ID NO: 3882982 - RNA, 18 nt, Human
ccagaggcagcuucuuug

SEQ ID NO: 3882983 - RNA, 19 nt, Human
ccagaggcagcuucuuugc

SEQ ID NO: 3882984 - RNA, 15 nt, Human
ccagaggcccccagc

SEQ ID NO: 3882985 - RNA, 19 nt, Human
ccagaggcccccagcccag

SEQ ID NO: 3882986 - RNA, 17 nt, Human
ccagagggagugacaga

SEQ ID NO: 3882987 - RNA, 15 nt, Human
ccagagggccugcaa

SEQ ID NO: 3882988 - RNA, 16 nt, Human
ccagagggccugcaag

SEQ ID NO: 3882989 - RNA, 17 nt, Human
ccagagggccugcaagg

SEQ ID NO: 3882990 - RNA, 19 nt, Human
ccagagggccugcaaggga

SEQ ID NO: 3882991 - RNA, 20 nt, Human
ccagagggccugcaagggag

SEQ ID NO: 3882992 - RNA, 14 nt, Human
ccagaggggaagga

SEQ ID NO: 3882993 - RNA, 23 nt, Human
ccagaggggccugccaccuggac

SEQ ID NO: 3882994 - RNA, 23 nt, Human
ccagagggguggguuccucuucc

SEQ ID NO: 3882995 - RNA, 16 nt, Human
ccagagggugggcuuc

SEQ ID NO: 3882996 - RNA, 17 nt, Human
ccagagguaacagaaca

SEQ ID NO: 3882997 - RNA, 21 nt, Human
ccagagguaacagaacagcuu

SEQ ID NO: 3882998 - RNA, 17 nt, Human
ccagagguccagcccau

SEQ ID NO: 3882999 - RNA, 16 nt, Human
ccagaggucuggcccu

SEQ ID NO: 3883000 - RNA, 18 nt, Human
ccagaggugggcaggugg

SEQ ID NO: 3883001 - RNA, 17 nt, Human
ccagagguugugcacug

SEQ ID NO: 3883002 - RNA, 19 nt, Human
ccagagguugugcacuguu

SEQ ID NO: 3883003 - RNA, 21 nt, Human
ccagaguccccccacucccag

SEQ ID NO: 3883004 - RNA, 22 nt, Human
ccagaguccccccacucccagc

SEQ ID NO: 3883005 - RNA, 17 nt, Human
ccagagucccugccugg

SEQ ID NO: 3883006 - RNA, 18 nt, Human
ccagagucccugccugga

SEQ ID NO: 3883007 - RNA, 19 nt, Human
ccagagucccugccuggac

SEQ ID NO: 3883008 - RNA, 22 nt, Human
ccagagucccugccuggaccag

SEQ ID NO: 3883009 - RNA, 18 nt, Human
ccagagugcugaaggaau

SEQ ID NO: 3883010 - RNA, 13 nt, Human
ccagaguggccug

SEQ ID NO: 3883011 - RNA, 15 nt, Human
ccagaguggccuggc

SEQ ID NO: 3883012 - RNA, 18 nt, Human
ccagaguggccuggccag

SEQ ID NO: 3883013 - RNA, 19 nt, Human
ccagaguggccuggccagg

SEQ ID NO: 3883014 - RNA, 22 nt, Human
ccagaguggccuggccaggagc

SEQ ID NO: 3883015 - RNA, 21 nt, Human
ccagaguggggaugacaugca

SEQ ID NO: 3883016 - RNA, 12 nt, Human
ccagagugugaa

SEQ ID NO: 3883017 - RNA, 18 nt, Human
ccagaguuccccaugcag

SEQ ID NO: 3883018 - RNA, 21 nt, Human
ccagaguuccccaugcagaca

SEQ ID NO: 3883019 - RNA, 13 nt, Human
ccagaguuccugc

SEQ ID NO: 3883020 - RNA, 15 nt, Human
ccagaguugcuggga

SEQ ID NO: 3883021 - RNA, 22 nt, Human
ccagauaaaauuauagauggga

SEQ ID NO: 3883022 - RNA, 13 nt, Human
ccagauaacuuuu

SEQ ID NO: 3883023 - RNA, 22 nt, Human
ccagauacggacagagaccaag

SEQ ID NO: 3883024 - RNA, 19 nt, Human
ccagaucaccaaucuagau

SEQ ID NO: 3883025 - RNA, 21 nt, Human
ccagaucaccagcccggccug

SEQ ID NO: 3883026 - RNA, 18 nt, Human
ccagaucacugccacacu

SEQ ID NO: 3883027 - RNA, 13 nt, Human
ccagaucagccag

SEQ ID NO: 3883028 - RNA, 15 nt, Human
ccagaucagccagaa

SEQ ID NO: 3883029 - RNA, 13 nt, Human
ccagaucagucag

SEQ ID NO: 3883030 - RNA, 17 nt, Human
ccagaucauguuuuggu

SEQ ID NO: 3883031 - RNA, 20 nt, Human
ccagaucauguuuuggugaa

SEQ ID NO: 3883032 - RNA, 16 nt, Human
ccagauccagccuggg

SEQ ID NO: 3883033 - RNA, 17 nt, Human
ccagauccucacaacca

SEQ ID NO: 3883034 - RNA, 23 nt, Human
ccagaucugauuuguaacccacu

SEQ ID NO: 3883035 - RNA, 14 nt, Human
ccagaucugcaccg

SEQ ID NO: 3883036 - RNA, 19 nt, Human
ccagaucuggucccuugca

SEQ ID NO: 3883037 - RNA, 16 nt, Human
ccagaucuuucagaaa

SEQ ID NO: 3883038 - RNA, 15 nt, Human
ccagaugcaccagcc

SEQ ID NO: 3883039 - RNA, 15 nt, Human
ccagaugcagggcag

SEQ ID NO: 3883040 - RNA, 18 nt, Human
ccagaugccccuuucugg

SEQ ID NO: 3883041 - RNA, 18 nt, Human
ccagaugccuucuccaga

SEQ ID NO: 3883042 - RNA, 17 nt, Human
ccagaugcgucccaaga

SEQ ID NO: 3883043 - RNA, 16 nt, Human
ccagauggacuccagc

SEQ ID NO: 3883044 - RNA, 16 nt, Human
ccagauggucauccag

SEQ ID NO: 3883045 - RNA, 18 nt, Human
ccagaugugacaguguug

SEQ ID NO: 3883046 - RNA, 15 nt, Human
ccagauuccccugug

SEQ ID NO: 3883047 - RNA, 18 nt, Human
ccagauuccccuguguca

SEQ ID NO: 3883048 - RNA, 18 nt, Human
ccagauucuuuccugagg

SEQ ID NO: 3883049 - RNA, 20 nt, Human
ccagauucuuuccugaggcu

SEQ ID NO: 3883050 - RNA, 18 nt, Human
ccagauugacgacaagug

SEQ ID NO: 3883051 - RNA, 19 nt, Human
ccagauugacgacaagugc

SEQ ID NO: 3883052 - RNA, 21 nt, Human
ccagauugacgacaagugcug

SEQ ID NO: 3883053 - RNA, 20 nt, Human
ccagauugcaacaggcuggg

SEQ ID NO: 3883054 - RNA, 23 nt, Human
ccagauugcaacaggcugggcuu

SEQ ID NO: 3883055 - RNA, 19 nt, Human
ccagauuggcucacacuga

SEQ ID NO: 3883056 - RNA, 22 nt, Human
ccagauuguaucaugugcuaga

SEQ ID NO: 3883057 - RNA, 14 nt, Human
ccagauuuaaauaa

SEQ ID NO: 3883058 - RNA, 15 nt, Human
ccagauuucacucuc

SEQ ID NO: 3883059 - RNA, 14 nt, Human
ccagauuuuccuga

SEQ ID NO: 3883060 - RNA, 18 nt, Human
ccagauuuugcuguauau

SEQ ID NO: 3883061 - RNA, 13 nt, Human
ccagauuuuuaau

SEQ ID NO: 3883062 - RNA, 16 nt, Human
ccagauuuuuacacau

SEQ ID NO: 3883063 - RNA, 18 nt, Human
ccagauuuuucggaggcc

SEQ ID NO: 3883064 - RNA, 24 nt, Human
ccagauuuuuuacagcugccugca

SEQ ID NO: 3883065 - RNA, 21 nt, Human
ccagcaaagagugggcugcau

SEQ ID NO: 3883066 - RNA, 19 nt, Human
ccagcaaagccccaugcug

SEQ ID NO: 3883067 - RNA, 22 nt, Human
ccagcaaagccccaugcuggag

SEQ ID NO: 3883068 - RNA, 16 nt, Human
ccagcaaagcccccag

SEQ ID NO: 3883069 - RNA, 23 nt, Human
ccagcaaagcccccagagcccag

SEQ ID NO: 3883070 - RNA, 19 nt, Human
ccagcaacacagccugggc

SEQ ID NO: 3883071 - RNA, 22 nt, Human
ccagcaacacagccugggcccc

SEQ ID NO: 3883072 - RNA, 15 nt, Human
ccagcaacccuccua

SEQ ID NO: 3883073 - RNA, 11 nt, Human
ccagcaacuga

SEQ ID NO: 3883074 - RNA, 14 nt, Human
ccagcaacuucuuc

SEQ ID NO: 3883075 - RNA, 14 nt, Human
ccagcaacuugaac

SEQ ID NO: 3883076 - RNA, 17 nt, Human
ccagcaagagaaccccg

SEQ ID NO: 3883077 - RNA, 16 nt, Human
ccagcaagguggagug

SEQ ID NO: 3883078 - RNA, 15 nt, Human
ccagcaagugagagc

SEQ ID NO: 3883079 - RNA, 16 nt, Human
ccagcaagugagagcu

SEQ ID NO: 3883080 - RNA, 17 nt, Human
ccagcaagugagagcug

SEQ ID NO: 3883081 - RNA, 20 nt, Human
ccagcaagugagagcugggu

SEQ ID NO: 3883082 - RNA, 16 nt, Human
ccagcaauauaucuga

SEQ ID NO: 3883083 - RNA, 17 nt, Human
ccagcaaugauguccag

SEQ ID NO: 3883084 - RNA, 16 nt, Human
ccagcaauucuccugc

SEQ ID NO: 3883085 - RNA, 19 nt, Human
ccagcaauucuccugccuc

SEQ ID NO: 3883086 - RNA, 16 nt, Human
ccagcacacucccgag

SEQ ID NO: 3883087 - RNA, 17 nt, Human
ccagcacacucccgaga

SEQ ID NO: 3883088 - RNA, 15 nt, Human
ccagcacacugggag

SEQ ID NO: 3883089 - RNA, 22 nt, Human
ccagcacagcuuagauuucaua

SEQ ID NO: 3883090 - RNA, 19 nt, Human
ccagcaccaccaggucucc

SEQ ID NO: 3883091 - RNA, 23 nt, Human
ccagcaccaccaggucucccggg

SEQ ID NO: 3883092 - RNA, 13 nt, Human
ccagcaccacccu

SEQ ID NO: 3883093 - RNA, 20 nt, Human
ccagcaccacccuccuuccc

SEQ ID NO: 3883094 - RNA, 18 nt, Human
ccagcacccagcaacucc

SEQ ID NO: 3883095 - RNA, 18 nt, Human
ccagcaccggaccagccu

SEQ ID NO: 3883096 - RNA, 19 nt, Human
ccagcaccggaccagccug

SEQ ID NO: 3883097 - RNA, 21 nt, Human
ccagcaccggaccagccuggc

SEQ ID NO: 3883098 - RNA, 20 nt, Human
ccagcaccuugugccugggg

SEQ ID NO: 3883099 - RNA, 17 nt, Human
ccagcacugaggaagaa

SEQ ID NO: 3883100 - RNA, 20 nt, Human
ccagcccucccuguccuccu

SEQ ID NO: 3883101 - RNA, 13 nt, Human
ccagcccugcugg

SEQ ID NO: 3883102 - RNA, 15 nt, Human
ccagcccugcuggcc

SEQ ID NO: 3883103 - RNA, 13 nt, Human
ccagcccuggcuc

SEQ ID NO: 3883104 - RNA, 17 nt, Human
ccagcccuggcucugca

SEQ ID NO: 3883105 - RNA, 15 nt, Human
ccagcccuguggaag

SEQ ID NO: 3883106 - RNA, 20 nt, Human
ccagcccuuucagcugcagc

SEQ ID NO: 3883107 - RNA, 17 nt, Human
ccagccgacccccucuc

SEQ ID NO: 3883108 - RNA, 18 nt, Human
ccagccgacccccucucc

SEQ ID NO: 3883109 - RNA, 17 nt, Human
ccagccgagauagccaa

SEQ ID NO: 3883110 - RNA, 18 nt, Human
ccagccgccaugcuccug

SEQ ID NO: 3883111 - RNA, 19 nt, Human
ccagccgccaugcuccugg

SEQ ID NO: 3883112 - RNA, 19 nt, Human
ccagccgcgcaucagacug

SEQ ID NO: 3883113 - RNA, 19 nt, Human
ccagccgcucuccugccac

SEQ ID NO: 3883114 - RNA, 14 nt, Human
ccagccgcugcccg

SEQ ID NO: 3883115 - RNA, 16 nt, Human
ccagccgcugcccggc

SEQ ID NO: 3883116 - RNA, 23 nt, Human
ccagccgcuuggcgaugccagcc

SEQ ID NO: 3883117 - RNA, 16 nt, Human
ccagccggccaaugga

SEQ ID NO: 3883118 - RNA, 17 nt, Human
ccagccggccaauggaa

SEQ ID NO: 3883119 - RNA, 14 nt, Human
ccagccggccucuc

SEQ ID NO: 3883120 - RNA, 13 nt, Human
ccagccucagcgc

SEQ ID NO: 3883121 - RNA, 20 nt, Human
ccagccucaguccuccccuc

SEQ ID NO: 3883122 - RNA, 19 nt, Human
ccagccucaucucuuuguu

SEQ ID NO: 3883123 - RNA, 17 nt, Human
ccagccucccugaagcc

SEQ ID NO: 3883124 - RNA, 16 nt, Human
ccagccucgucuucau

SEQ ID NO: 3883125 - RNA, 15 nt, Human
ccagccucuagggac

SEQ ID NO: 3883126 - RNA, 15 nt, Human
ccagccucuccccug

SEQ ID NO: 3883127 - RNA, 19 nt, Human
ccagccucuguuccccuag

SEQ ID NO: 3883128 - RNA, 13 nt, Human
ccagccucuuucc

SEQ ID NO: 3883129 - RNA, 20 nt, Human
ccagccugcccaagcccagg

SEQ ID NO: 3883130 - RNA, 23 nt, Human
ccagccugcccaagcccaggcca

SEQ ID NO: 3883131 - RNA, 13 nt, Human
ccagccugcgccu

SEQ ID NO: 3883132 - RNA, 16 nt, Human
ccagccugcgccugcu

SEQ ID NO: 3883133 - RNA, 17 nt, Human
ccagccugcgccugcug

SEQ ID NO: 3883134 - RNA, 10 nt, Human
ccagccugcu

SEQ ID NO: 3883135 - RNA, 19 nt, Human
ccagccugcuagcuagcuc

SEQ ID NO: 3883136 - RNA, 13 nt, Human
ccagccuggaugc

SEQ ID NO: 3883137 - RNA, 17 nt, Human
ccagccuggaugccauc

SEQ ID NO: 3883138 - RNA, 19 nt, Human
ccagccuggccacgcagcc

SEQ ID NO: 3883139 - RNA, 15 nt, Human
ccagccuggcccagc

SEQ ID NO: 3883140 - RNA, 19 nt, Human
ccagccuggcccagcuccc

SEQ ID NO: 3883141 - RNA, 20 nt, Human
ccagccuggcccagcucccc

SEQ ID NO: 3883142 - RNA, 17 nt, Human
ccagccuggccuccugc

SEQ ID NO: 3883143 - RNA, 18 nt, Human
ccagccuggccuccugcc

SEQ ID NO: 3883144 - RNA, 20 nt, Human
ccagccuggccuccugccuc

SEQ ID NO: 3883145 - RNA, 13 nt, Human
ccagccuggcuuc

SEQ ID NO: 3883146 - RNA, 17 nt, Human
ccagccugggaggcaca

SEQ ID NO: 3883147 - RNA, 18 nt, Human
ccagccugggaggcacag

SEQ ID NO: 3883148 - RNA, 19 nt, Human
ccagccugggcaacagagc

SEQ ID NO: 3883149 - RNA, 18 nt, Human
ccagccugggcagccagg

SEQ ID NO: 3883150 - RNA, 22 nt, Human
ccagccugggcagccaggcugc

SEQ ID NO: 3883151 - RNA, 17 nt, Human
ccagccugggccuaugg

SEQ ID NO: 3883152 - RNA, 21 nt, Human
ccagccugggccuauggagag

SEQ ID NO: 3883153 - RNA, 22 nt, Human
ccagccugggccuauggagagc

SEQ ID NO: 3883154 - RNA, 19 nt, Human
ccagccuggggccuggcag

SEQ ID NO: 3883155 - RNA, 21 nt, Human
ccagccuggggcugaggcuga

SEQ ID NO: 3883156 - RNA, 10 nt, Human
ccagccuguc

SEQ ID NO: 3883157 - RNA, 19 nt, Human
ccagccuucuuugcuugcc

SEQ ID NO: 3883158 - RNA, 21 nt, Human
ccagccuugagcccuggcugu

SEQ ID NO: 3883159 - RNA, 18 nt, Human
ccagccuuucucccaggc

SEQ ID NO: 3883160 - RNA, 23 nt, Human
ccagccuuuguuccccacuggag

SEQ ID NO: 3883161 - RNA, 14 nt, Human
ccagcgagcccugg

SEQ ID NO: 3883162 - RNA, 22 nt, Human
ccagcgagcgcccagcuccuga

SEQ ID NO: 3883163 - RNA, 20 nt, Human
ccagcgaucucuccacugug

SEQ ID NO: 3883164 - RNA, 23 nt, Human
ccagcgauucccucucccaggcc

SEQ ID NO: 3883165 - RNA, 17 nt, Human
ccagcgcccgcugggcu

SEQ ID NO: 3883166 - RNA, 22 nt, Human
ccagcgcccgcugggcugagcc

SEQ ID NO: 3883167 - RNA, 14 nt, Human
ccagcgccucccuc

SEQ ID NO: 3883168 - RNA, 20 nt, Human
ccagcgccucccuccacccc

SEQ ID NO: 3883169 - RNA, 23 nt, Human
ccagcgccucccuccaccccagg

SEQ ID NO: 3883170 - RNA, 15 nt, Human
ccagcgcggacaucc

SEQ ID NO: 3883171 - RNA, 13 nt, Human
ccagcgcucugcc

SEQ ID NO: 3883172 - RNA, 21 nt, Human
ccagcgcuugaagccugaacc

SEQ ID NO: 3883173 - RNA, 14 nt, Human
ccagcggacacacg

SEQ ID NO: 3883174 - RNA, 17 nt, Human
ccagcggacaguggcag

SEQ ID NO: 3883175 - RNA, 18 nt, Human
ccagcggacaguggcagg

SEQ ID NO: 3883176 - RNA, 15 nt, Human
ccagcggcccuguca

SEQ ID NO: 3883177 - RNA, 13 nt, Human
ccagcggcugagu

SEQ ID NO: 3883178 - RNA, 21 nt, Human
ccagcggcuggugcagggccu

SEQ ID NO: 3883179 - RNA, 23 nt, Human
ccagcgggaauggcagcugccac

SEQ ID NO: 3883180 - RNA, 22 nt, Human
ccagcguauauauaagaaagac

SEQ ID NO: 3883181 - RNA, 15 nt, Human
ccagcgucccagucu

SEQ ID NO: 3883182 - RNA, 16 nt, Human
ccagcgucggucugug

SEQ ID NO: 3883183 - RNA, 18 nt, Human
ccagcgucggucugugcc

SEQ ID NO: 3883184 - RNA, 23 nt, Human
ccagcguggcgcaguggcccuga

SEQ ID NO: 3883185 - RNA, 19 nt, Human
ccagcuaagaaccuggaac

SEQ ID NO: 3883186 - RNA, 15 nt, Human
ccagcuaaggggugg

SEQ ID NO: 3883187 - RNA, 20 nt, Human
ccagcuacaccuuucuccuu

SEQ ID NO: 3883188 - RNA, 15 nt, Human
ccagcuacccugugu

SEQ ID NO: 3883189 - RNA, 21 nt, Human
ccagcuacccuuuuucuccag

SEQ ID NO: 3883190 - RNA, 14 nt, Human
ccagcuacucagaa

SEQ ID NO: 3883191 - RNA, 14 nt, Human
ccagcuacucagga

SEQ ID NO: 3883192 - RNA, 15 nt, Human
ccagcuacuugggag

SEQ ID NO: 3883193 - RNA, 20 nt, Human
ccagcuagugacccacaugc

SEQ ID NO: 3883194 - RNA, 16 nt, Human
ccagcuauaccugugc

SEQ ID NO: 3883195 - RNA, 22 nt, Human
ccagcuauguuauauugaaaaa

SEQ ID NO: 3883196 - RNA, 22 nt, Human
ccagcuauugauauaaauaaaa

SEQ ID NO: 3883197 - RNA, 13 nt, Human
ccagcucacagug

SEQ ID NO: 3883198 - RNA, 13 nt, Human
ccagcucaccccc

SEQ ID NO: 3883199 - RNA, 20 nt, Human
ccagcucagaacccagggcu

SEQ ID NO: 3883200 - RNA, 13 nt, Human
ccagcucagcacu

SEQ ID NO: 3883201 - RNA, 12 nt, Human
ccagcucagcag

SEQ ID NO: 3883202 - RNA, 15 nt, Human
ccagcucaggggcag

SEQ ID NO: 3883203 - RNA, 16 nt, Human
ccagcucauucauuuu

SEQ ID NO: 3883204 - RNA, 17 nt, Human
ccagcucauucauuuua

SEQ ID NO: 3883205 - RNA, 15 nt, Human
ccagcuccaaccugc

SEQ ID NO: 3883206 - RNA, 20 nt, Human
ccagcuccaaccugcaaaga

SEQ ID NO: 3883207 - RNA, 13 nt, Human
ccagcuccacccc

SEQ ID NO: 3883208 - RNA, 13 nt, Human
ccagcuccagggc

SEQ ID NO: 3883209 - RNA, 14 nt, Human
ccagcuccagggcc

SEQ ID NO: 3883210 - RNA, 16 nt, Human
ccagcuccagggccag

SEQ ID NO: 3883211 - RNA, 12 nt, Human
ccagcucccagg

SEQ ID NO: 3883212 - RNA, 23 nt, Human
ccagcucccaggaccacaggcuc

SEQ ID NO: 3883213 - RNA, 19 nt, Human
ccagcuccccccaccuccc

SEQ ID NO: 3883214 - RNA, 15 nt, Human
ccagcucccccggga

SEQ ID NO: 3883215 - RNA, 14 nt, Human
ccagcucccucuau

SEQ ID NO: 3883216 - RNA, 22 nt, Human
ccagcucccugugcccccaggg

SEQ ID NO: 3883217 - RNA, 17 nt, Human
ccagcucccuucuuccc

SEQ ID NO: 3883218 - RNA, 18 nt, Human
ccagcuccggccuguccu

SEQ ID NO: 3883219 - RNA, 18 nt, Human
ccagcuccucacucaccu

SEQ ID NO: 3883220 - RNA, 23 nt, Human
ccagcuccucauccagggcucug

SEQ ID NO: 3883221 - RNA, 23 nt, Human
ccagcuccugacacugcuggaga

SEQ ID NO: 3883222 - RNA, 14 nt, Human
ccagcucucccucu

SEQ ID NO: 3883223 - RNA, 20 nt, Human
ccagcucugaaaccaguguu

SEQ ID NO: 3883224 - RNA, 20 nt, Human
ccagcucugccgucucugga

SEQ ID NO: 3883225 - RNA, 19 nt, Human
ccagcucuggaggggaggg

SEQ ID NO: 3883226 - RNA, 21 nt, Human
ccagcucugguccauagagag

SEQ ID NO: 3883227 - RNA, 14 nt, Human
ccagcucuguauca

SEQ ID NO: 3883228 - RNA, 18 nt, Human
ccagcucuguaucaggac

SEQ ID NO: 3883229 - RNA, 21 nt, Human
ccagcucuguaucaggaccca

SEQ ID NO: 3883230 - RNA, 12 nt, Human
ccagcucuguuc

SEQ ID NO: 3883231 - RNA, 14 nt, Human
ccagcucuguucuu

SEQ ID NO: 3883232 - RNA, 16 nt, Human
ccagcucuuuccuccu

SEQ ID NO: 3883233 - RNA, 17 nt, Human
ccagcucuuuccuccuu

SEQ ID NO: 3883234 - RNA, 17 nt, Human
ccagcugacaucuugaa

SEQ ID NO: 3883235 - RNA, 14 nt, Human
ccagcugacuaaac

SEQ ID NO: 3883236 - RNA, 23 nt, Human
ccagcugacuaaacuuuuuuucu

SEQ ID NO: 3883237 - RNA, 16 nt, Human
ccagcugaugacucaa

SEQ ID NO: 3883238 - RNA, 15 nt, Human
ccagcugcaaagugu

SEQ ID NO: 3883239 - RNA, 17 nt, Human
ccagcugcaccagagca

SEQ ID NO: 3883240 - RNA, 17 nt, Human
ccagcugcaccccuucc

SEQ ID NO: 3883241 - RNA, 19 nt, Human
ccagcugcaccccuuccug

SEQ ID NO: 3883242 - RNA, 21 nt, Human
ccagcugcaccccuuccuggg

SEQ ID NO: 3883243 - RNA, 23 nt, Human
ccagcugcaccccuuccugggca

SEQ ID NO: 3883244 - RNA, 19 nt, Human
ccaggagccccgaggccuu

SEQ ID NO: 3883245 - RNA, 20 nt, Human
ccaggagccccgaggccuuc

SEQ ID NO: 3883246 - RNA, 13 nt, Human
ccaggagccuccu

SEQ ID NO: 3883247 - RNA, 17 nt, Human
ccaggagccugcccagc

SEQ ID NO: 3883248 - RNA, 16 nt, Human
ccaggagccugugccu

SEQ ID NO: 3883249 - RNA, 17 nt, Human
ccaggagccugugccuc

SEQ ID NO: 3883250 - RNA, 14 nt, Human
ccaggagcuccagu

SEQ ID NO: 3883251 - RNA, 20 nt, Human
ccaggagcuccccuccccaa

SEQ ID NO: 3883252 - RNA, 16 nt, Human
ccaggagcugcccaga

SEQ ID NO: 3883253 - RNA, 16 nt, Human
ccaggagcugggcaga

SEQ ID NO: 3883254 - RNA, 22 nt, Human
ccaggagcuucuuguuuccuug

SEQ ID NO: 3883255 - RNA, 21 nt, Human
ccaggaggcagggaggcagcc

SEQ ID NO: 3883256 - RNA, 22 nt, Human
ccaggaggcagggaggcagccg

SEQ ID NO: 3883257 - RNA, 22 nt, Human
ccaggaggcggaccuuguagug

SEQ ID NO: 3883258 - RNA, 17 nt, Human
ccaggagggacaaagga

SEQ ID NO: 3883259 - RNA, 24 nt, Human
ccaggagggacaaaggagccugug

SEQ ID NO: 3883260 - RNA, 22 nt, Human
ccaggagggaggcaggggaggg

SEQ ID NO: 3883261 - RNA, 16 nt, Human
ccaggagggcacugga

SEQ ID NO: 3883262 - RNA, 18 nt, Human
ccaggagggcauccauac

SEQ ID NO: 3883263 - RNA, 22 nt, Human
ccaggaggggaacacugcccuc

SEQ ID NO: 3883264 - RNA, 18 nt, Human
ccaggaggucgaccccaa

SEQ ID NO: 3883265 - RNA, 22 nt, Human
ccaggaggugggagugaggagc

SEQ ID NO: 3883266 - RNA, 17 nt, Human
ccaggaguucugcucau

SEQ ID NO: 3883267 - RNA, 18 nt, Human
ccaggaguuugagaccag

SEQ ID NO: 3883268 - RNA, 17 nt, Human
ccaggaguuuggccaga

SEQ ID NO: 3883269 - RNA, 16 nt, Human
ccaggauagagacugg

SEQ ID NO: 3883270 - RNA, 18 nt, Human
ccaggaucagauugcaug

SEQ ID NO: 3883271 - RNA, 19 nt, Human
ccaggaucagauugcaugu

SEQ ID NO: 3883272 - RNA, 21 nt, Human
ccaggaucccaagccuccugc

SEQ ID NO: 3883273 - RNA, 17 nt, Human
ccaggaucccaggggcc

SEQ ID NO: 3883274 - RNA, 16 nt, Human
ccaggauggcgcagga

SEQ ID NO: 3883275 - RNA, 22 nt, Human
ccaggauguacaaggacagccc

SEQ ID NO: 3883276 - RNA, 17 nt, Human
ccaggauugaagagcau

SEQ ID NO: 3883277 - RNA, 18 nt, Human
ccaggauugaagagcauu

SEQ ID NO: 3883278 - RNA, 13 nt, Human
ccaggauuucuaa

SEQ ID NO: 3883279 - RNA, 17 nt, Human
ccaggauuugcacagaa

SEQ ID NO: 3883280 - RNA, 23 nt, Human
ccaggauuuuaacaaaagcaaga

SEQ ID NO: 3883281 - RNA, 15 nt, Human
ccaggcacacacugu

SEQ ID NO: 3883282 - RNA, 16 nt, Human
ccaggcacacacugug

SEQ ID NO: 3883283 - RNA, 16 nt, Human
ccaggcacagcugagu

SEQ ID NO: 3883284 - RNA, 11 nt, Human
ccaggcacagg

SEQ ID NO: 3883285 - RNA, 12 nt, Human
ccaggcacaggc

SEQ ID NO: 3883286 - RNA, 16 nt, Human
ccaggcacaggcaggg

SEQ ID NO: 3883287 - RNA, 17 nt, Human
ccaggcacaggcagggc

SEQ ID NO: 3883288 - RNA, 15 nt, Human
ccaggcaccaucucc

SEQ ID NO: 3883289 - RNA, 16 nt, Human
ccaggcacccaaaccc

SEQ ID NO: 3883290 - RNA, 21 nt, Human
ccaggcacccuucuuuccucu

SEQ ID NO: 3883291 - RNA, 22 nt, Human
ccaggcacccuucuuuccucuu

SEQ ID NO: 3883292 - RNA, 12 nt, Human
ccaggcacugca

SEQ ID NO: 3883293 - RNA, 13 nt, Human
ccaggcacugcaa

SEQ ID NO: 3883294 - RNA, 16 nt, Human
ccaggcacugcugccc

SEQ ID NO: 3883295 - RNA, 19 nt, Human
ccaggcacugcugcccagc

SEQ ID NO: 3883296 - RNA, 15 nt, Human
ccaggcagauccagg

SEQ ID NO: 3883297 - RNA, 18 nt, Human
ccaggcagauccaggacu

SEQ ID NO: 3883298 - RNA, 13 nt, Human
ccaggcagaucug

SEQ ID NO: 3883299 - RNA, 17 nt, Human
ccaggcagaucugugcc

SEQ ID NO: 3883300 - RNA, 18 nt, Human
ccaggcagaucugugccc

SEQ ID NO: 3883301 - RNA, 20 nt, Human
ccaggcagaucugugcccca

SEQ ID NO: 3883302 - RNA, 15 nt, Human
ccaggcagcagacac

SEQ ID NO: 3883303 - RNA, 16 nt, Human
ccaggcagccucuggg

SEQ ID NO: 3883304 - RNA, 22 nt, Human
ccaggcagccucugucaggccu

SEQ ID NO: 3883305 - RNA, 20 nt, Human
ccaggcagcugucacugcug

SEQ ID NO: 3883306 - RNA, 18 nt, Human
ccaggcaggagcccuucu

SEQ ID NO: 3883307 - RNA, 18 nt, Human
ccaggcaggcuaaggcgu

SEQ ID NO: 3883308 - RNA, 13 nt, Human
ccaggcagggaga

SEQ ID NO: 3883309 - RNA, 19 nt, Human
ccaggcagggccaacccuu

SEQ ID NO: 3883310 - RNA, 15 nt, Human
ccaggcagggguggg

SEQ ID NO: 3883311 - RNA, 21 nt, Human
ccaggcaggggugggggugga

SEQ ID NO: 3883312 - RNA, 21 nt, Human
ccaggcagucgggggcuggcc

SEQ ID NO: 3883313 - RNA, 19 nt, Human
ccaggcauuccccaggagg

SEQ ID NO: 3883314 - RNA, 14 nt, Human
ccaggccacaagac

SEQ ID NO: 3883315 - RNA, 14 nt, Human
ccaggccaccagga

SEQ ID NO: 3883316 - RNA, 16 nt, Human
ccaggccaccuccaga

SEQ ID NO: 3883317 - RNA, 17 nt, Human
ccaggccaccuccccag

SEQ ID NO: 3883318 - RNA, 21 nt, Human
ccaggccagagggagugacag

SEQ ID NO: 3883319 - RNA, 11 nt, Human
ccaggccagcc

SEQ ID NO: 3883320 - RNA, 13 nt, Human
ccaggccagccuc

SEQ ID NO: 3883321 - RNA, 14 nt, Human
ccaggccagccucc

SEQ ID NO: 3883322 - RNA, 15 nt, Human
ccaggccagcugccu

SEQ ID NO: 3883323 - RNA, 13 nt, Human
ccaggccaggacu

SEQ ID NO: 3883324 - RNA, 17 nt, Human
ccaggccaggacucugc

SEQ ID NO: 3883325 - RNA, 19 nt, Human
ccaggccaggacucugcag

SEQ ID NO: 3883326 - RNA, 16 nt, Human
ccaggccauggaggca

SEQ ID NO: 3883327 - RNA, 14 nt, Human
ccaggcccaaggcu

SEQ ID NO: 3883328 - RNA, 15 nt, Human
ccaggcccacucagg

SEQ ID NO: 3883329 - RNA, 22 nt, Human
ccaggcccacugugccucagag

SEQ ID NO: 3883330 - RNA, 21 nt, Human
ccaggccccaaaaccacagcc

SEQ ID NO: 3883331 - RNA, 13 nt, Human
ccaggccccauga

SEQ ID NO: 3883332 - RNA, 18 nt, Human
ccaggccccaugaccucc

SEQ ID NO: 3883333 - RNA, 20 nt, Human
ccaggcccccaagccugcag

SEQ ID NO: 3883334 - RNA, 22 nt, Human
ccaggcccccaccacacauccc

SEQ ID NO: 3883335 - RNA, 23 nt, Human
ccaggcccccaccacacauccca

SEQ ID NO: 3883336 - RNA, 19 nt, Human
ccaggccccgaggacccag

SEQ ID NO: 3883337 - RNA, 21 nt, Human
ccaggccccgaggacccagac

SEQ ID NO: 3883338 - RNA, 23 nt, Human
ccaggccccgaggacccagaccc

SEQ ID NO: 3883339 - RNA, 21 nt, Human
ccaggccccuggaggcugccu

SEQ ID NO: 3883340 - RNA, 22 nt, Human
ccaggcccgucuguccaucugc

SEQ ID NO: 3883341 - RNA, 13 nt, Human
ccaggcccucugc

SEQ ID NO: 3883342 - RNA, 19 nt, Human
ccaggcccucugcccacuc

SEQ ID NO: 3883343 - RNA, 23 nt, Human
ccaggcccucugcccacucccug

SEQ ID NO: 3883344 - RNA, 17 nt, Human
ccaggccggccagccuc

SEQ ID NO: 3883345 - RNA, 15 nt, Human
ccaggccguccuccc

SEQ ID NO: 3883346 - RNA, 19 nt, Human
ccaggccguccucccgggc

SEQ ID NO: 3883347 - RNA, 21 nt, Human
ccaggccucagucucccuucu

SEQ ID NO: 3883348 - RNA, 13 nt, Human
ccaggccuccagc

SEQ ID NO: 3883349 - RNA, 14 nt, Human
ccaggccuccagcu

SEQ ID NO: 3883350 - RNA, 15 nt, Human
ccaggccuccagcuc

SEQ ID NO: 3883351 - RNA, 17 nt, Human
ccaggccuccagcucag

SEQ ID NO: 3883352 - RNA, 23 nt, Human
ccaggccucucccuccuccagga

SEQ ID NO: 3883353 - RNA, 17 nt, Human
ccaggccucuguguccu

SEQ ID NO: 3883354 - RNA, 12 nt, Human
ccaggccugccu

SEQ ID NO: 3883355 - RNA, 13 nt, Human
ccaggccugggcc

SEQ ID NO: 3883356 - RNA, 17 nt, Human
ccaggccugggccagag

SEQ ID NO: 3883357 - RNA, 16 nt, Human
ccaggccugggucugu

SEQ ID NO: 3883358 - RNA, 18 nt, Human
ccaggccugggucugugu

SEQ ID NO: 3883359 - RNA, 22 nt, Human
ccaggcgggagcgguggcccug

SEQ ID NO: 3883360 - RNA, 23 nt, Human
ccaggcuaguccggacccaccuc

SEQ ID NO: 3883361 - RNA, 18 nt, Human
ccaggcucacucacagag

SEQ ID NO: 3883362 - RNA, 20 nt, Human
ccaggcucacucacagaguc

SEQ ID NO: 3883363 - RNA, 13 nt, Human
ccaggcuccgccc

SEQ ID NO: 3883364 - RNA, 23 nt, Human
ccaggcuccgcccuuaguccccc

SEQ ID NO: 3883365 - RNA, 16 nt, Human
ccaggcuccucccucc

SEQ ID NO: 3883366 - RNA, 14 nt, Human
ccaggcuccuuccu

SEQ ID NO: 3883367 - RNA, 22 nt, Human
ccaggcuccuuccugucuuccu

SEQ ID NO: 3883368 - RNA, 22 nt, Human
ccaggcucugugcugacccucc

SEQ ID NO: 3883369 - RNA, 23 nt, Human
ccaggcucugugcugacccuccu

SEQ ID NO: 3883370 - RNA, 23 nt, Human
ccaggcucuuuggggucagccag

SEQ ID NO: 3883371 - RNA, 20 nt, Human
ccaggcugaagcagguuccc

SEQ ID NO: 3883372 - RNA, 17 nt, Human
ccaggcugagccucagu

SEQ ID NO: 3883373 - RNA, 17 nt, Human
ccaggcugcauagaagg

SEQ ID NO: 3883374 - RNA, 20 nt, Human
ccaggcugccaaggccagag

SEQ ID NO: 3883375 - RNA, 18 nt, Human
ccaggcugccguggggcc

SEQ ID NO: 3883376 - RNA, 23 nt, Human
ccaggcugccucccuuguggcag

SEQ ID NO: 3883377 - RNA, 17 nt, Human
ccaggcugcucagggcu

SEQ ID NO: 3883378 - RNA, 19 nt, Human
ccaggcugcucagggcugg

SEQ ID NO: 3883379 - RNA, 23 nt, Human
ccaggcugcucucaaaccccuga

SEQ ID NO: 3883380 - RNA, 18 nt, Human
ccaggcuggacaugcuga

SEQ ID NO: 3883381 - RNA, 16 nt, Human
ccaggcuggccagccc

SEQ ID NO: 3883382 - RNA, 22 nt, Human
ccaggcuggccagccccacagc

SEQ ID NO: 3883383 - RNA, 23 nt, Human
ccaggcuggccagccccacagcc

SEQ ID NO: 3883384 - RNA, 16 nt, Human
ccaggcuggcgcagcc

SEQ ID NO: 3883385 - RNA, 17 nt, Human
ccaggcuggcgcagcca

SEQ ID NO: 3883386 - RNA, 19 nt, Human
ccaggcuggcgcagccaag

SEQ ID NO: 3883387 - RNA, 22 nt, Human
cccagauuggcucacacugaga

SEQ ID NO: 3883388 - RNA, 16 nt, Human
cccagauuucagucuu

SEQ ID NO: 3883389 - RNA, 17 nt, Human
cccagcaacccuccuau

SEQ ID NO: 3883390 - RNA, 16 nt, Human
cccagcaacuccaacu

SEQ ID NO: 3883391 - RNA, 18 nt, Human
cccagcaagugagagcug

SEQ ID NO: 3883392 - RNA, 19 nt, Human
cccagcacagcuugaccug

SEQ ID NO: 3883393 - RNA, 19 nt, Human
cccagcacaugugcugccc

SEQ ID NO: 3883394 - RNA, 18 nt, Human
cccagcaccaccaggucu

SEQ ID NO: 3883395 - RNA, 19 nt, Human
cccagcaccaccaggucuc

SEQ ID NO: 3883396 - RNA, 12 nt, Human
cccagcacccgg

SEQ ID NO: 3883397 - RNA, 19 nt, Human
cccagcacccgggcucagg

SEQ ID NO: 3883398 - RNA, 22 nt, Human
cccagcacccgggcucagggac

SEQ ID NO: 3883399 - RNA, 17 nt, Human
cccagcaccucagccug

SEQ ID NO: 3883400 - RNA, 18 nt, Human
cccagcaccucagccugc

SEQ ID NO: 3883401 - RNA, 14 nt, Human
cccagcaccugccu

SEQ ID NO: 3883402 - RNA, 17 nt, Human
cccagcaccugccuccu

SEQ ID NO: 3883403 - RNA, 16 nt, Human
cccagcacuuggagag

SEQ ID NO: 3883404 - RNA, 17 nt, Human
cccagcacuuugggagg

SEQ ID NO: 3883405 - RNA, 20 nt, Human
cccagcacuuugggaggccu

SEQ ID NO: 3883406 - RNA, 20 nt, Human
cccagcacuuugggaggcug

SEQ ID NO: 3883407 - RNA, 22 nt, Human
cccagcagggucuuuucaucug

SEQ ID NO: 3883408 - RNA, 12 nt, Human
cccagcaguucu

SEQ ID NO: 3883409 - RNA, 19 nt, Human
cccagcaucacuccccaag

SEQ ID NO: 3883410 - RNA, 20 nt, Human
cccagcauuccagccccucu

SEQ ID NO: 3883411 - RNA, 16 nt, Human
cccagcauucucaggc

SEQ ID NO: 3883412 - RNA, 17 nt, Human
cccagcauucucaggca

SEQ ID NO: 3883413 - RNA, 15 nt, Human
cccagcauugcuggu

SEQ ID NO: 3883414 - RNA, 12 nt, Human
cccagccacccc

SEQ ID NO: 3883415 - RNA, 16 nt, Human
cccagccacuccccag

SEQ ID NO: 3883416 - RNA, 22 nt, Human
cccagccagauggacuccagcc

SEQ ID NO: 3883417 - RNA, 16 nt, Human
cccagccagcaguuca

SEQ ID NO: 3883418 - RNA, 16 nt, Human
cccagccaggcccagc

SEQ ID NO: 3883419 - RNA, 13 nt, Human
cccagccaucugc

SEQ ID NO: 3883420 - RNA, 18 nt, Human
cccagccaugccagcugg

SEQ ID NO: 3883421 - RNA, 18 nt, Human
cccagccauuaccaugga

SEQ ID NO: 3883422 - RNA, 13 nt, Human
cccagcccaaguc

SEQ ID NO: 3883423 - RNA, 18 nt, Human
cccagcccacccuccugu

SEQ ID NO: 3883424 - RNA, 14 nt, Human
cccagcccacuucu

SEQ ID NO: 3883425 - RNA, 11 nt, Human
cccagcccaga

SEQ ID NO: 3883426 - RNA, 13 nt, Human
cccagcccagaga

SEQ ID NO: 3883427 - RNA, 15 nt, Human
cccagcccagagaca

SEQ ID NO: 3883428 - RNA, 16 nt, Human
cccagcccagcugcuc

SEQ ID NO: 3883429 - RNA, 22 nt, Human
cccagcccagcugcucugccca

SEQ ID NO: 3883430 - RNA, 17 nt, Human
cccagccccaaugaaca

SEQ ID NO: 3883431 - RNA, 16 nt, Human
cccagccccacuuacc

SEQ ID NO: 3883432 - RNA, 13 nt, Human
cccagccccaucc

SEQ ID NO: 3883433 - RNA, 14 nt, Human
cccagccccauccu

SEQ ID NO: 3883434 - RNA, 15 nt, Human
cccagccccauccuc

SEQ ID NO: 3883435 - RNA, 16 nt, Human
cccagccccgacucca

SEQ ID NO: 3883436 - RNA, 20 nt, Human
cccagccccgacuccagcca

SEQ ID NO: 3883437 - RNA, 22 nt, Human
cccagccccgacuccagccagc

SEQ ID NO: 3883438 - RNA, 19 nt, Human
cccagccccuacugcugug

SEQ ID NO: 3883439 - RNA, 16 nt, Human
cccagccccuagaaac

SEQ ID NO: 3883440 - RNA, 21 nt, Human
cccagccccuagaaacccaag

SEQ ID NO: 3883441 - RNA, 13 nt, Human
cccagccccuagc

SEQ ID NO: 3883442 - RNA, 16 nt, Human
cccagccccuccccca

SEQ ID NO: 3883443 - RNA, 20 nt, Human
cccagccccugccccucaug

SEQ ID NO: 3883444 - RNA, 12 nt, Human
cccagcccugcu

SEQ ID NO: 3883445 - RNA, 15 nt, Human
cccagcccugcuggc

SEQ ID NO: 3883446 - RNA, 16 nt, Human
cccagcccugcuggcc

SEQ ID NO: 3883447 - RNA, 19 nt, Human
cccagcccugcuggccgcc

SEQ ID NO: 3883448 - RNA, 17 nt, Human
cccagcccugcugggga

SEQ ID NO: 3883449 - RNA, 15 nt, Human
cccagcccuggcucu

SEQ ID NO: 3883450 - RNA, 19 nt, Human
cccagcccuggucucagca

SEQ ID NO: 3883451 - RNA, 18 nt, Human
cccagccggccaauggaa

SEQ ID NO: 3883452 - RNA, 14 nt, Human
cccagccggccucu

SEQ ID NO: 3883453 - RNA, 19 nt, Human
cccagccggccucucuggc

SEQ ID NO: 3883454 - RNA, 23 nt, Human
cccagccggccucucuggccucc

SEQ ID NO: 3883455 - RNA, 12 nt, Human
cccagccuauga

SEQ ID NO: 3883456 - RNA, 23 nt, Human
cccagccuaugagcauccugagc

SEQ ID NO: 3883457 - RNA, 23 nt, Human
cccagccucaaauccaggacccu

SEQ ID NO: 3883458 - RNA, 11 nt, Human
cccagccucag

SEQ ID NO: 3883459 - RNA, 14 nt, Human
cccagccucagcgc

SEQ ID NO: 3883460 - RNA, 15 nt, Human
cccagccucagcgcg

SEQ ID NO: 3883461 - RNA, 22 nt, Human
cccagccucagcgcggcccucc

SEQ ID NO: 3883462 - RNA, 18 nt, Human
cccagccuccaagcucca

SEQ ID NO: 3883463 - RNA, 17 nt, Human
cccagccucccugaagc

SEQ ID NO: 3883464 - RNA, 12 nt, Human
cccagccucucu

SEQ ID NO: 3883465 - RNA, 15 nt, Human
cccagccucuggcau

SEQ ID NO: 3883466 - RNA, 21 nt, Human
cccagccucuucuagagccgu

SEQ ID NO: 3883467 - RNA, 21 nt, Human
cccagccugcuagcuagcuca

SEQ ID NO: 3883468 - RNA, 10 nt, Human
cccagccugg

SEQ ID NO: 3883469 - RNA, 14 nt, Human
cccagccuggaugc

SEQ ID NO: 3883470 - RNA, 12 nt, Human
cccagccuggcc

SEQ ID NO: 3883471 - RNA, 23 nt, Human
cccagccuggccacgcagccagg

SEQ ID NO: 3883472 - RNA, 14 nt, Human
cccagccuggccca

SEQ ID NO: 3883473 - RNA, 16 nt, Human
cccagccuggcccagc

SEQ ID NO: 3883474 - RNA, 17 nt, Human
cccagccuggcccagcu

SEQ ID NO: 3883475 - RNA, 22 nt, Human
cccagccuggcccagcuccccc

SEQ ID NO: 3883476 - RNA, 12 nt, Human
cccagccugggc

SEQ ID NO: 3883477 - RNA, 12 nt, Human
cccagccuguca

SEQ ID NO: 3883478 - RNA, 14 nt, Human
cccagccugucaga

SEQ ID NO: 3883479 - RNA, 19 nt, Human
cccagccugucagauccag

SEQ ID NO: 3883480 - RNA, 21 nt, Human
cccagccuuggcaucuagagc

SEQ ID NO: 3883481 - RNA, 19 nt, Human
cccagcgagcccugguggc

SEQ ID NO: 3883482 - RNA, 15 nt, Human
cccagcgcucugccu

SEQ ID NO: 3883483 - RNA, 18 nt, Human
cccagcggacaguggcag

SEQ ID NO: 3883484 - RNA, 15 nt, Human
cccagcggccccucc

SEQ ID NO: 3883485 - RNA, 20 nt, Human
cccagcggccccucccacac

SEQ ID NO: 3883486 - RNA, 15 nt, Human
cccagcggcuggugc

SEQ ID NO: 3883487 - RNA, 22 nt, Human
cccagcgggcagguucugccug

SEQ ID NO: 3883488 - RNA, 15 nt, Human
cccagcuaaauaauc

SEQ ID NO: 3883489 - RNA, 19 nt, Human
cccagcuaagaaccuggaa

SEQ ID NO: 3883490 - RNA, 22 nt, Human
cccagcuaagaaccuggaacuu

SEQ ID NO: 3883491 - RNA, 19 nt, Human
cccagcuaaucuguagggc

SEQ ID NO: 3883492 - RNA, 23 nt, Human
cccagcuaaucuguagggcugga

SEQ ID NO: 3883493 - RNA, 23 nt, Human
cccagcuacucagaagccugagg

SEQ ID NO: 3883494 - RNA, 13 nt, Human
cccagcuaggaag

SEQ ID NO: 3883495 - RNA, 12 nt, Human
cccagcucaggg

SEQ ID NO: 3883496 - RNA, 12 nt, Human
cccagcucccac

SEQ ID NO: 3883497 - RNA, 15 nt, Human
cccagcuccccaaga

SEQ ID NO: 3883498 - RNA, 16 nt, Human
cccagcucccccggga

SEQ ID NO: 3883499 - RNA, 19 nt, Human
cccagcucccccgggaggg

SEQ ID NO: 3883500 - RNA, 15 nt, Human
cccagcucccuagga

SEQ ID NO: 3883501 - RNA, 11 nt, Human
cccagcuccug

SEQ ID NO: 3883502 - RNA, 13 nt, Human
cccagcucucccu

SEQ ID NO: 3883503 - RNA, 18 nt, Human
cccagcucucccucuggc

SEQ ID NO: 3883504 - RNA, 14 nt, Human
cccagcucugaaac

SEQ ID NO: 3883505 - RNA, 22 nt, Human
cccagcucugaaaccaguguua

SEQ ID NO: 3883506 - RNA, 20 nt, Human
cccagcucugcuugccgaaa

SEQ ID NO: 3883507 - RNA, 13 nt, Human
cccagcucuggug

SEQ ID NO: 3883508 - RNA, 22 nt, Human
cccagcucuggugagucuuggc

SEQ ID NO: 3883509 - RNA, 15 nt, Human
cccagcugacaugga

SEQ ID NO: 3883510 - RNA, 23 nt, Human
cccagcugcaccugccagccugg

SEQ ID NO: 3883511 - RNA, 14 nt, Human
cccagcugccccuc

SEQ ID NO: 3883512 - RNA, 17 nt, Human
cccagcugccccucccu

SEQ ID NO: 3883513 - RNA, 14 nt, Human
cccagcugcucugc

SEQ ID NO: 3883514 - RNA, 15 nt, Human
cccagcugcucugcc

SEQ ID NO: 3883515 - RNA, 17 nt, Human
cccagcugcucugccca

SEQ ID NO: 3883516 - RNA, 14 nt, Human
cccagcugggcucu

SEQ ID NO: 3883517 - RNA, 17 nt, Human
cccagcugggcucugcc

SEQ ID NO: 3883518 - RNA, 22 nt, Human
cccagcugggcucugccacccu

SEQ ID NO: 3883519 - RNA, 24 nt, Human
cccagcugggcucugccacccuac

SEQ ID NO: 3883520 - RNA, 20 nt, Human
cccagcuggggccaggcugg

SEQ ID NO: 3883521 - RNA, 17 nt, Human
cccagcugggucaggca

SEQ ID NO: 3883522 - RNA, 19 nt, Human
cccagcugggucaggcagg

SEQ ID NO: 3883523 - RNA, 16 nt, Human
cccagcuggugggaag

SEQ ID NO: 3883524 - RNA, 23 nt, Human
cccagcugucugugucagccugu

SEQ ID NO: 3883525 - RNA, 18 nt, Human
cccagcugugagccuugg

SEQ ID NO: 3883526 - RNA, 11 nt, Human
cccagcuguuu

SEQ ID NO: 3883527 - RNA, 17 nt, Human
cccagcuuccagcagga

SEQ ID NO: 3883528 - RNA, 15 nt, Human
cccagcuugaaaccu

SEQ ID NO: 3883529 - RNA, 14 nt, Human
cccagcuugggcag

SEQ ID NO: 3883530 - RNA, 19 nt, Human
cccagcuugggcccagcug

SEQ ID NO: 3883531 - RNA, 21 nt, Human
cccaggaaaggcuccaggagc

SEQ ID NO: 3883532 - RNA, 22 nt, Human
cccaggaaaggcuccaggagca

SEQ ID NO: 3883533 - RNA, 15 nt, Human
cccagguggcugugg

SEQ ID NO: 3883534 - RNA, 22 nt, Human
cccagguguuaacauuccaaga

SEQ ID NO: 3883535 - RNA, 21 nt, Human
cccagguuggcucugccaguc

SEQ ID NO: 3883536 - RNA, 19 nt, Human
cccagguuucuggucucua

SEQ ID NO: 3883537 - RNA, 22 nt, Human
cccagguuucuggucucuaggc

SEQ ID NO: 3883538 - RNA, 14 nt, Human
cccaguaagccacu

SEQ ID NO: 3883539 - RNA, 16 nt, Human
cccaguagaccuuguu

SEQ ID NO: 3883540 - RNA, 16 nt, Human
cccagucagccucucu

SEQ ID NO: 3883541 - RNA, 18 nt, Human
cccagucagccucucucc

SEQ ID NO: 3883542 - RNA, 22 nt, Human
cccagucagccucucucccagu

SEQ ID NO: 3883543 - RNA, 23 nt, Human
cccaguccaaauguccuccagaa

SEQ ID NO: 3883544 - RNA, 13 nt, Human
cccaguccccacc

SEQ ID NO: 3883545 - RNA, 14 nt, Human
cccaguccccaccc

SEQ ID NO: 3883546 - RNA, 18 nt, Human
cccaguccccaccccugc

SEQ ID NO: 3883547 - RNA, 19 nt, Human
cccaguccccaccccugcc

SEQ ID NO: 3883548 - RNA, 13 nt, Human
cccaguccccgug

SEQ ID NO: 3883549 - RNA, 16 nt, Human
cccagucccgccccuc

SEQ ID NO: 3883550 - RNA, 16 nt, Human
cccaguccuggccugg

SEQ ID NO: 3883551 - RNA, 21 nt, Human
cccaguccuggccuggcuucu

SEQ ID NO: 3883552 - RNA, 23 nt, Human
cccaguccuggccuggcuucucc

SEQ ID NO: 3883553 - RNA, 21 nt, Human
cccagucucucuuaaaguugg

SEQ ID NO: 3883554 - RNA, 15 nt, Human
cccagucucuggcag

SEQ ID NO: 3883555 - RNA, 19 nt, Human
cccagucuggaaugcagug

SEQ ID NO: 3883556 - RNA, 20 nt, Human
cccagucuggaaugcagugg

SEQ ID NO: 3883557 - RNA, 11 nt, Human
cccagucuguc

SEQ ID NO: 3883558 - RNA, 17 nt, Human
cccagucuguuccccau

SEQ ID NO: 3883559 - RNA, 13 nt, Human
cccagugacacuu

SEQ ID NO: 3883560 - RNA, 18 nt, Human
cccagugacacuucagag

SEQ ID NO: 3883561 - RNA, 14 nt, Human
cccagugacagcua

SEQ ID NO: 3883562 - RNA, 15 nt, Human
cccagugacagcuag

SEQ ID NO: 3883563 - RNA, 21 nt, Human
cccagugagcacucccaaguc

SEQ ID NO: 3883564 - RNA, 21 nt, Human
cccagugagcagccuggagcc

SEQ ID NO: 3883565 - RNA, 14 nt, Human
cccagugcacccac

SEQ ID NO: 3883566 - RNA, 10 nt, Human
cccagugcag

SEQ ID NO: 3883567 - RNA, 11 nt, Human
cccagugcaga

SEQ ID NO: 3883568 - RNA, 22 nt, Human
cccagugcaugguggccagagg

SEQ ID NO: 3883569 - RNA, 21 nt, Human
cccagugcccacaggaucagu

SEQ ID NO: 3883570 - RNA, 14 nt, Human
cccagugcccucuc

SEQ ID NO: 3883571 - RNA, 18 nt, Human
cccagugcccucuccccu

SEQ ID NO: 3883572 - RNA, 15 nt, Human
cccagugcccugggg

SEQ ID NO: 3883573 - RNA, 15 nt, Human
cccagugccgagaag

SEQ ID NO: 3883574 - RNA, 20 nt, Human
cccaguggcagggcacaggg

SEQ ID NO: 3883575 - RNA, 23 nt, Human
cccaguggcagggcacagggccu

SEQ ID NO: 3883576 - RNA, 18 nt, Human
cccaguggcugcugccca

SEQ ID NO: 3883577 - RNA, 21 nt, Human
cccaguggcugcugcccaggc

SEQ ID NO: 3883578 - RNA, 17 nt, Human
cccagugggaggggcag

SEQ ID NO: 3883579 - RNA, 18 nt, Human
cccagugggaggggcagg

SEQ ID NO: 3883580 - RNA, 22 nt, Human
cccagugggaggggcaggcuga

SEQ ID NO: 3883581 - RNA, 21 nt, Human
cccagugucaaguugugcuug

SEQ ID NO: 3883582 - RNA, 22 nt, Human
cccagugucaaguugugcuugu

SEQ ID NO: 3883583 - RNA, 15 nt, Human
cccagugucuuccug

SEQ ID NO: 3883584 - RNA, 17 nt, Human
cccagugucuuccugug

SEQ ID NO: 3883585 - RNA, 18 nt, Human
cccaguguuguuuguaaa

SEQ ID NO: 3883586 - RNA, 14 nt, Human
cccaguuagcucuc

SEQ ID NO: 3883587 - RNA, 19 nt, Human
cccaguucaggagucccaa

SEQ ID NO: 3883588 - RNA, 22 nt, Human
cccaguucaggagucccaagga

SEQ ID NO: 3883589 - RNA, 21 nt, Human
cccaguuccuguggcucccuc

SEQ ID NO: 3883590 - RNA, 19 nt, Human
cccaguucgccuggagccc

SEQ ID NO: 3883591 - RNA, 13 nt, Human
cccaguucugcuc

SEQ ID NO: 3883592 - RNA, 14 nt, Human
cccaguucugcucc

SEQ ID NO: 3883593 - RNA, 16 nt, Human
cccaguucugcuccuc

SEQ ID NO: 3883594 - RNA, 19 nt, Human
cccaguugcacucagguga

SEQ ID NO: 3883595 - RNA, 17 nt, Human
cccaguuggagcuccag

SEQ ID NO: 3883596 - RNA, 14 nt, Human
cccaguugggugga

SEQ ID NO: 3883597 - RNA, 13 nt, Human
cccaguuguauuu

SEQ ID NO: 3883598 - RNA, 19 nt, Human
cccaguuucuaaacuggag

SEQ ID NO: 3883599 - RNA, 21 nt, Human
cccaguuucuaaacuggagac

SEQ ID NO: 3883600 - RNA, 23 nt, Human
cccaguuucuaaacuggagacug

SEQ ID NO: 3883601 - RNA, 15 nt, Human
cccaguuugcagaaa

SEQ ID NO: 3883602 - RNA, 16 nt, Human
cccaguuugcagaaaa

SEQ ID NO: 3883603 - RNA, 23 nt, Human
cccauaaggggucaaaauuugcu

SEQ ID NO: 3883604 - RNA, 15 nt, Human
cccauagaaacauga

SEQ ID NO: 3883605 - RNA, 22 nt, Human
cccauagaucuucugaaaugaa

SEQ ID NO: 3883606 - RNA, 19 nt, Human
cccauagugaccggcugcu

SEQ ID NO: 3883607 - RNA, 11 nt, Human
cccauaucaug

SEQ ID NO: 3883608 - RNA, 15 nt, Human
cccauaugccugggc

SEQ ID NO: 3883609 - RNA, 19 nt, Human
cccauauuguaaaacaggu

SEQ ID NO: 3883610 - RNA, 16 nt, Human
cccauauuucaucgug

SEQ ID NO: 3883611 - RNA, 22 nt, Human
cccaucacaggguugggcccag

SEQ ID NO: 3883612 - RNA, 21 nt, Human
cccaucacugcgccacugcuc

SEQ ID NO: 3883613 - RNA, 15 nt, Human
cccaucacuggagca

SEQ ID NO: 3883614 - RNA, 14 nt, Human
cccaucaggguagg

SEQ ID NO: 3883615 - RNA, 22 nt, Human
cccaucauuacccuucccugca

SEQ ID NO: 3883616 - RNA, 15 nt, Human
cccaucauucaugcu

SEQ ID NO: 3883617 - RNA, 14 nt, Human
cccauccaggcagu

SEQ ID NO: 3883618 - RNA, 13 nt, Human
cccauccagggcc

SEQ ID NO: 3883619 - RNA, 21 nt, Human
cccauccaguucaugagaauc

SEQ ID NO: 3883620 - RNA, 13 nt, Human
cccaucccacacc

SEQ ID NO: 3883621 - RNA, 15 nt, Human
cccaucccaucccau

SEQ ID NO: 3883622 - RNA, 16 nt, Human
cccaucccaucccauc

SEQ ID NO: 3883623 - RNA, 14 nt, Human
cccaucccaugcug

SEQ ID NO: 3883624 - RNA, 13 nt, Human
cccauccccagcg

SEQ ID NO: 3883625 - RNA, 18 nt, Human
cccauccccagcgauucc

SEQ ID NO: 3883626 - RNA, 17 nt, Human
cccaucccccugcccuc

SEQ ID NO: 3883627 - RNA, 16 nt, Human
cccaucccuccccagu

SEQ ID NO: 3883628 - RNA, 12 nt, Human
cccaucccugcc

SEQ ID NO: 3883629 - RNA, 13 nt, Human
cccaucccugccu

SEQ ID NO: 3883630 - RNA, 17 nt, Human
cccauccuaccaaugca

SEQ ID NO: 3883631 - RNA, 17 nt, Human
cccauccuacccucggg

SEQ ID NO: 3883632 - RNA, 14 nt, Human
cccauccuagaggc

SEQ ID NO: 3883633 - RNA, 18 nt, Human
cccauccuccagcaggga

SEQ ID NO: 3883634 - RNA, 16 nt, Human
cccauccuccagcuuc

SEQ ID NO: 3883635 - RNA, 12 nt, Human
cccauccucccc

SEQ ID NO: 3883636 - RNA, 13 nt, Human
cccauccuccccu

SEQ ID NO: 3883637 - RNA, 14 nt, Human
cccauccuccccuu

SEQ ID NO: 3883638 - RNA, 15 nt, Human
cccauccuccccuuc

SEQ ID NO: 3883639 - RNA, 16 nt, Human
cccauccuccccuucc

SEQ ID NO: 3883640 - RNA, 18 nt, Human
cccauccuccccuucccu

SEQ ID NO: 3883641 - RNA, 18 nt, Human
cccauccuguggucacug

SEQ ID NO: 3883642 - RNA, 19 nt, Human
cccaucgguguccauuuau

SEQ ID NO: 3883643 - RNA, 20 nt, Human
cccaucgguguccauuuaua

SEQ ID NO: 3883644 - RNA, 22 nt, Human
cccaucguugcccccauuucug

SEQ ID NO: 3883645 - RNA, 13 nt, Human
cccaucucacaca

SEQ ID NO: 3883646 - RNA, 13 nt, Human
cccaucucaggac

SEQ ID NO: 3883647 - RNA, 16 nt, Human
cccaucucaggccaga

SEQ ID NO: 3883648 - RNA, 20 nt, Human
cccaucucaugccccuggcu

SEQ ID NO: 3883649 - RNA, 22 nt, Human
cccaucucaugccccuggcugg

SEQ ID NO: 3883650 - RNA, 16 nt, Human
cccaucuccccucagc

SEQ ID NO: 3883651 - RNA, 14 nt, Human
cccaucucccugcu

SEQ ID NO: 3883652 - RNA, 19 nt, Human
cccaucucuacaaaaagca

SEQ ID NO: 3883653 - RNA, 21 nt, Human
cccaucucucccuccccugcc

SEQ ID NO: 3883654 - RNA, 19 nt, Human
cccaucugcaccccuucuc

SEQ ID NO: 3883655 - RNA, 16 nt, Human
cccaucugccagauca

SEQ ID NO: 3883656 - RNA, 12 nt, Human
cccaucugccca

SEQ ID NO: 3883657 - RNA, 14 nt, Human
cccaucugcccagg

SEQ ID NO: 3883658 - RNA, 18 nt, Human
cccaucugccccacaguc

SEQ ID NO: 3883659 - RNA, 17 nt, Human
cccaucugucugccaac

SEQ ID NO: 3883660 - RNA, 13 nt, Human
cccaucugugaau

SEQ ID NO: 3883661 - RNA, 16 nt, Human
cccaucugugaauaag

SEQ ID NO: 3883662 - RNA, 15 nt, Human
cccaucuucgggacc

SEQ ID NO: 3883663 - RNA, 18 nt, Human
cccaucuucgggaccagg

SEQ ID NO: 3883664 - RNA, 24 nt, Human
cccaucuugccuccauggugccuc

SEQ ID NO: 3883665 - RNA, 12 nt, Human
cccaucuuguuu

SEQ ID NO: 3883666 - RNA, 12 nt, Human
cccaugaagcca

SEQ ID NO: 3883667 - RNA, 19 nt, Human
cccaugacccaccccugug

SEQ ID NO: 3883668 - RNA, 20 nt, Human
cccaugacccaccccugugc

SEQ ID NO: 3883669 - RNA, 21 nt, Human
cccaugacccaccccugugcu

SEQ ID NO: 3883670 - RNA, 22 nt, Human
cccaugacccaccccugugcuc

SEQ ID NO: 3883671 - RNA, 15 nt, Human
cccaugaccuccagc

SEQ ID NO: 3883672 - RNA, 20 nt, Human
cccaugaccuuauccuuccu

SEQ ID NO: 3883673 - RNA, 22 nt, Human
cccaugaccuuauccuuccucu

SEQ ID NO: 3883674 - RNA, 15 nt, Human
cccaugagccucagc

SEQ ID NO: 3883675 - RNA, 22 nt, Human
cccaugagccucagcauccugg

SEQ ID NO: 3883676 - RNA, 13 nt, Human
cccaugagcuccu

SEQ ID NO: 3883677 - RNA, 23 nt, Human
cccaugaguuggggucuggcagc

SEQ ID NO: 3883678 - RNA, 23 nt, Human
ccccaccccuggaagagcccagu

SEQ ID NO: 3883679 - RNA, 15 nt, Human
ccccaccccuugcuc

SEQ ID NO: 3883680 - RNA, 18 nt, Human
ccccaccccuugcucuca

SEQ ID NO: 3883681 - RNA, 16 nt, Human
ccccacccucccugga

SEQ ID NO: 3883682 - RNA, 21 nt, Human
ccccacccuccuggccucaga

SEQ ID NO: 3883683 - RNA, 15 nt, Human
ccccacccucgggga

SEQ ID NO: 3883684 - RNA, 23 nt, Human
ccccacccucggggauguguccu

SEQ ID NO: 3883685 - RNA, 23 nt, Human
ccccacccucguggacaccugcc

SEQ ID NO: 3883686 - RNA, 16 nt, Human
ccccacccugccucac

SEQ ID NO: 3883687 - RNA, 14 nt, Human
ccccacccugggcc

SEQ ID NO: 3883688 - RNA, 15 nt, Human
ccccacccugggccc

SEQ ID NO: 3883689 - RNA, 15 nt, Human
ccccacccugggcuc

SEQ ID NO: 3883690 - RNA, 17 nt, Human
ccccacccuguuccugc

SEQ ID NO: 3883691 - RNA, 18 nt, Human
ccccacccuguuccugcu

SEQ ID NO: 3883692 - RNA, 20 nt, Human
ccccacccuguuccugcugc

SEQ ID NO: 3883693 - RNA, 14 nt, Human
ccccacccuuuggg

SEQ ID NO: 3883694 - RNA, 13 nt, Human
ccccaccugcagg

SEQ ID NO: 3883695 - RNA, 14 nt, Human
ccccaccuggcccu

SEQ ID NO: 3883696 - RNA, 15 nt, Human
ccccacgccacagcc

SEQ ID NO: 3883697 - RNA, 19 nt, Human
ccccacgugacagugccug

SEQ ID NO: 3883698 - RNA, 14 nt, Human
ccccacuacugcag

SEQ ID NO: 3883699 - RNA, 23 nt, Human
ccccacuacugcagcaccuccag

SEQ ID NO: 3883700 - RNA, 13 nt, Human
ccccacucacaga

SEQ ID NO: 3883701 - RNA, 13 nt, Human
ccccacucccagc

SEQ ID NO: 3883702 - RNA, 15 nt, Human
ccccacucccagcau

SEQ ID NO: 3883703 - RNA, 14 nt, Human
ccccacuccccacc

SEQ ID NO: 3883704 - RNA, 16 nt, Human
ccccacuccucugcug

SEQ ID NO: 3883705 - RNA, 11 nt, Human
ccccacucuca

SEQ ID NO: 3883706 - RNA, 12 nt, Human
ccccacucucag

SEQ ID NO: 3883707 - RNA, 14 nt, Human
ccccacucucagag

SEQ ID NO: 3883708 - RNA, 20 nt, Human
ccccacucucagaggcccca

SEQ ID NO: 3883709 - RNA, 15 nt, Human
ccccacucugcucug

SEQ ID NO: 3883710 - RNA, 15 nt, Human
ccccacugacagccu

SEQ ID NO: 3883711 - RNA, 14 nt, Human
ccccacugaccaga

SEQ ID NO: 3883712 - RNA, 11 nt, Human
ccccacugaug

SEQ ID NO: 3883713 - RNA, 13 nt, Human
ccccacugaugcu

SEQ ID NO: 3883714 - RNA, 14 nt, Human
ccccacugaugcug

SEQ ID NO: 3883715 - RNA, 16 nt, Human
ccccacugcaggcccc

SEQ ID NO: 3883716 - RNA, 15 nt, Human
ccccacugccagcag

SEQ ID NO: 3883717 - RNA, 16 nt, Human
ccccacugccagcagc

SEQ ID NO: 3883718 - RNA, 15 nt, Human
ccccacugccugccc

SEQ ID NO: 3883719 - RNA, 12 nt, Human
ccccacuggagc

SEQ ID NO: 3883720 - RNA, 14 nt, Human
ccccacuggcugug

SEQ ID NO: 3883721 - RNA, 21 nt, Human
ccccacuggcugugggcuccc

SEQ ID NO: 3883722 - RNA, 14 nt, Human
ccccacuugccucu

SEQ ID NO: 3883723 - RNA, 15 nt, Human
ccccagaacucugcc

SEQ ID NO: 3883724 - RNA, 18 nt, Human
ccccagacuagauguagu

SEQ ID NO: 3883725 - RNA, 10 nt, Human
ccccagagac

SEQ ID NO: 3883726 - RNA, 17 nt, Human
ccccagagccacacaug

SEQ ID NO: 3883727 - RNA, 16 nt, Human
ccccagagcccaggcu

SEQ ID NO: 3883728 - RNA, 16 nt, Human
ccccagagcccccggg

SEQ ID NO: 3883729 - RNA, 21 nt, Human
ccccagagccccuccuccagc

SEQ ID NO: 3883730 - RNA, 22 nt, Human
ccccagagugugggaagggaga

SEQ ID NO: 3883731 - RNA, 15 nt, Human
ccccagauugcaaca

SEQ ID NO: 3883732 - RNA, 22 nt, Human
ccccagcaaagcccccagagcc

SEQ ID NO: 3883733 - RNA, 19 nt, Human
ccccagcaagugagagcug

SEQ ID NO: 3883734 - RNA, 21 nt, Human
ccccagcaagugagagcuggg

SEQ ID NO: 3883735 - RNA, 13 nt, Human
ccccagcacccgg

SEQ ID NO: 3883736 - RNA, 18 nt, Human
ccccagcaccucagccug

SEQ ID NO: 3883737 - RNA, 19 nt, Human
ccccagcacuaaagcagug

SEQ ID NO: 3883738 - RNA, 13 nt, Human
ccccagcacugag

SEQ ID NO: 3883739 - RNA, 16 nt, Human
ccccagcagccugggg

SEQ ID NO: 3883740 - RNA, 12 nt, Human
ccccagcaggug

SEQ ID NO: 3883741 - RNA, 12 nt, Human
ccccagcaucac

SEQ ID NO: 3883742 - RNA, 18 nt, Human
ccccagcauucucaggca

SEQ ID NO: 3883743 - RNA, 19 nt, Human
ccccagcauucucaggcac

SEQ ID NO: 3883744 - RNA, 9 nt, Human
ccccagcca

SEQ ID NO: 3883745 - RNA, 11 nt, Human
ccccagccaga

SEQ ID NO: 3883746 - RNA, 22 nt, Human
ccccagccaugccagcuggccu

SEQ ID NO: 3883747 - RNA, 16 nt, Human
ccccagcccaagucca

SEQ ID NO: 3883748 - RNA, 13 nt, Human
ccccagcccagag

SEQ ID NO: 3883749 - RNA, 12 nt, Human
ccccagcccagg

SEQ ID NO: 3883750 - RNA, 15 nt, Human
ccccagcccagggug

SEQ ID NO: 3883751 - RNA, 14 nt, Human
ccccagccccacuu

SEQ ID NO: 3883752 - RNA, 16 nt, Human
ccccagccccauccca

SEQ ID NO: 3883753 - RNA, 22 nt, Human
ccccagcccccaaagcagcccu

SEQ ID NO: 3883754 - RNA, 17 nt, Human
ccccagcccccuuuggg

SEQ ID NO: 3883755 - RNA, 23 nt, Human
ccccagcccccuuugggcccagg

SEQ ID NO: 3883756 - RNA, 19 nt, Human
ccccagccccgacuccagc

SEQ ID NO: 3883757 - RNA, 22 nt, Human
ccccagccccucccccaucucc

SEQ ID NO: 3883758 - RNA, 20 nt, Human
ccccagcccuaaucucaccc

SEQ ID NO: 3883759 - RNA, 19 nt, Human
ccccagcccuccuuaucaa

SEQ ID NO: 3883760 - RNA, 17 nt, Human
ccccagcccugcugggg

SEQ ID NO: 3883761 - RNA, 20 nt, Human
ccccagcccugcuggggauc

SEQ ID NO: 3883762 - RNA, 16 nt, Human
ccccagcccuggcucu

SEQ ID NO: 3883763 - RNA, 13 nt, Human
ccccagcccugug

SEQ ID NO: 3883764 - RNA, 20 nt, Human
ccccagcccuuccucugcuc

SEQ ID NO: 3883765 - RNA, 16 nt, Human
ccccagccgcucggag

SEQ ID NO: 3883766 - RNA, 21 nt, Human
ccccagccgcuuggcgaugcc

SEQ ID NO: 3883767 - RNA, 21 nt, Human
ccccagccuaagaugaagagg

SEQ ID NO: 3883768 - RNA, 14 nt, Human
ccccagccuaugag

SEQ ID NO: 3883769 - RNA, 13 nt, Human
ccccagccucccu

SEQ ID NO: 3883770 - RNA, 13 nt, Human
ccccagccucucu

SEQ ID NO: 3883771 - RNA, 14 nt, Human
ccccagccucuggc

SEQ ID NO: 3883772 - RNA, 16 nt, Human
ccccagccucuggcau

SEQ ID NO: 3883773 - RNA, 18 nt, Human
ccccagccugcgccugcu

SEQ ID NO: 3883774 - RNA, 20 nt, Human
ccccagccugcuagcuagcu

SEQ ID NO: 3883775 - RNA, 13 nt, Human
ccccagccuggcc

SEQ ID NO: 3883776 - RNA, 16 nt, Human
ccccagccuggccacg

SEQ ID NO: 3883777 - RNA, 22 nt, Human
ccccagccuggccacgcagcca

SEQ ID NO: 3883778 - RNA, 12 nt, Human
ccccagccuggg

SEQ ID NO: 3883779 - RNA, 13 nt, Human
ccccagccugggc

SEQ ID NO: 3883780 - RNA, 20 nt, Human
ccccagccugggccuaugga

SEQ ID NO: 3883781 - RNA, 11 nt, Human
ccccagccugu

SEQ ID NO: 3883782 - RNA, 19 nt, Human
ccccagcgagagucccugc

SEQ ID NO: 3883783 - RNA, 17 nt, Human
ccccagcuaagaaccug

SEQ ID NO: 3883784 - RNA, 11 nt, Human
ccccagcuacc

SEQ ID NO: 3883785 - RNA, 13 nt, Human
ccccagcucaggg

SEQ ID NO: 3883786 - RNA, 17 nt, Human
ccccagcucaggggcag

SEQ ID NO: 3883787 - RNA, 21 nt, Human
ccccagcucaggggcagcuca

SEQ ID NO: 3883788 - RNA, 13 nt, Human
ccccagcucccac

SEQ ID NO: 3883789 - RNA, 11 nt, Human
ccccagcuccg

SEQ ID NO: 3883790 - RNA, 12 nt, Human
ccccagcucugg

SEQ ID NO: 3883791 - RNA, 16 nt, Human
ccccagcugacaugga

SEQ ID NO: 3883792 - RNA, 13 nt, Human
ccccagcugcuug

SEQ ID NO: 3883793 - RNA, 10 nt, Human
ccccagcugg

SEQ ID NO: 3883794 - RNA, 11 nt, Human
ccccagcuggc

SEQ ID NO: 3883795 - RNA, 12 nt, Human
ccccagcuggga

SEQ ID NO: 3883796 - RNA, 21 nt, Human
ccccagcuggggccaggcugg

SEQ ID NO: 3883797 - RNA, 22 nt, Human
ccccagcuggggccaggcuggg

SEQ ID NO: 3883798 - RNA, 18 nt, Human
ccccagcuucacuucuga

SEQ ID NO: 3883799 - RNA, 17 nt, Human
ccccagcuuccagcagg

SEQ ID NO: 3883800 - RNA, 18 nt, Human
ccccagcuuccagcagga

SEQ ID NO: 3883801 - RNA, 21 nt, Human
ccccagcuuccagcaggaggg

SEQ ID NO: 3883802 - RNA, 15 nt, Human
ccccagcuugggcag

SEQ ID NO: 3883803 - RNA, 11 nt, Human
ccccaggacca

SEQ ID NO: 3883804 - RNA, 15 nt, Human
ccccaggaccagcuc

SEQ ID NO: 3883805 - RNA, 19 nt, Human
ccccaggaccagcucagga

SEQ ID NO: 3883806 - RNA, 21 nt, Human
ccccaggaccuggcugccaua

SEQ ID NO: 3883807 - RNA, 13 nt, Human
ccccaggacuggg

SEQ ID NO: 3883808 - RNA, 21 nt, Human
ccccaggaggccagccuugac

SEQ ID NO: 3883809 - RNA, 11 nt, Human
ccccaggcagg

SEQ ID NO: 3883810 - RNA, 16 nt, Human
ccccaggcccacucag

SEQ ID NO: 3883811 - RNA, 17 nt, Human
ccccaggccucuguguc

SEQ ID NO: 3883812 - RNA, 13 nt, Human
ccccaggcugaag

SEQ ID NO: 3883813 - RNA, 19 nt, Human
ccccaggcuggacaugcug

SEQ ID NO: 3883814 - RNA, 22 nt, Human
ccccaggcuggacaugcugacu

SEQ ID NO: 3883815 - RNA, 22 nt, Human
ccccagggaagcagcagccucg

SEQ ID NO: 3883816 - RNA, 14 nt, Human
ccccagggcacagg

SEQ ID NO: 3883817 - RNA, 17 nt, Human
ccccagggcacaggagc

SEQ ID NO: 3883818 - RNA, 12 nt, Human
ccccagggcacg

SEQ ID NO: 3883819 - RNA, 20 nt, Human
ccccagggcacuucacagag

SEQ ID NO: 3883820 - RNA, 12 nt, Human
ccccagggcagc

SEQ ID NO: 3883821 - RNA, 21 nt, Human
ccccagggccugagccuggcc

SEQ ID NO: 3883822 - RNA, 16 nt, Human
ccccaggguccuggga

SEQ ID NO: 3883823 - RNA, 17 nt, Human
ccccaggguccugggag

SEQ ID NO: 3883824 - RNA, 16 nt, Human
ccccagggucuucccu

SEQ ID NO: 3883825 - RNA, 22 nt, Human
ccccaggguugaggggaccaag

SEQ ID NO: 3883826 - RNA, 13 nt, Human
cccccugcagcua

SEQ ID NO: 3883827 - RNA, 14 nt, Human
cccccugcaggaag

SEQ ID NO: 3883828 - RNA, 14 nt, Human
cccccugccagugc

SEQ ID NO: 3883829 - RNA, 22 nt, Human
cccccugccccccagccucugg

SEQ ID NO: 3883830 - RNA, 19 nt, Human
cccccugccccuucuacac

SEQ ID NO: 3883831 - RNA, 20 nt, Human
cccccugcccucguggccag

SEQ ID NO: 3883832 - RNA, 24 nt, Human
cccccugccggccggggcugagac

SEQ ID NO: 3883833 - RNA, 17 nt, Human
cccccuggccuccccca

SEQ ID NO: 3883834 - RNA, 15 nt, Human
cccccuggccucugu

SEQ ID NO: 3883835 - RNA, 21 nt, Human
cccccuggggcuucuccugac

SEQ ID NO: 3883836 - RNA, 23 nt, Human
cccccuggggcuucuccugaccc

SEQ ID NO: 3883837 - RNA, 15 nt, Human
cccccugguccccuc

SEQ ID NO: 3883838 - RNA, 17 nt, Human
cccccugguccccuccu

SEQ ID NO: 3883839 - RNA, 16 nt, Human
cccccuggucucuggu

SEQ ID NO: 3883840 - RNA, 20 nt, Human
cccccugguggacaguccug

SEQ ID NO: 3883841 - RNA, 21 nt, Human
cccccugguggacaguccugg

SEQ ID NO: 3883842 - RNA, 21 nt, Human
cccccuguccccucagcucca

SEQ ID NO: 3883843 - RNA, 22 nt, Human
cccccugugccuugucacgcca

SEQ ID NO: 3883844 - RNA, 13 nt, Human
cccccuucuccca

SEQ ID NO: 3883845 - RNA, 14 nt, Human
cccccuucucccac

SEQ ID NO: 3883846 - RNA, 16 nt, Human
cccccuucucugcucc

SEQ ID NO: 3883847 - RNA, 17 nt, Human
cccccuucucugcucca

SEQ ID NO: 3883848 - RNA, 22 nt, Human
cccccuucugggcaucuguucu

SEQ ID NO: 3883849 - RNA, 18 nt, Human
cccccuugccagacaugu

SEQ ID NO: 3883850 - RNA, 18 nt, Human
cccccuuucagaugucuu

SEQ ID NO: 3883851 - RNA, 22 nt, Human
cccccuuucagaugucuucugc

SEQ ID NO: 3883852 - RNA, 15 nt, Human
cccccuuucccgggc

SEQ ID NO: 3883853 - RNA, 19 nt, Human
cccccuuugggcccaggga

SEQ ID NO: 3883854 - RNA, 20 nt, Human
cccccuuugggcccagggac

SEQ ID NO: 3883855 - RNA, 17 nt, Human
ccccgacuccagccagc

SEQ ID NO: 3883856 - RNA, 14 nt, Human
ccccgagccuggcu

SEQ ID NO: 3883857 - RNA, 17 nt, Human
ccccgaggacccagacc

SEQ ID NO: 3883858 - RNA, 12 nt, Human
ccccgaggcccu

SEQ ID NO: 3883859 - RNA, 22 nt, Human
ccccgagggaugaugccacacc

SEQ ID NO: 3883860 - RNA, 21 nt, Human
ccccgaguuuccccagacacc

SEQ ID NO: 3883861 - RNA, 14 nt, Human
ccccgcagacaccu

SEQ ID NO: 3883862 - RNA, 17 nt, Human
ccccgcagaccucccca

SEQ ID NO: 3883863 - RNA, 19 nt, Human
ccccgcagaccuccccagc

SEQ ID NO: 3883864 - RNA, 21 nt, Human
ccccgcagaccuccccagccc

SEQ ID NO: 3883865 - RNA, 16 nt, Human
ccccgcauccccugcc

SEQ ID NO: 3883866 - RNA, 23 nt, Human
ccccgcccagcugcaccugccag

SEQ ID NO: 3883867 - RNA, 14 nt, Human
ccccgcccaggcug

SEQ ID NO: 3883868 - RNA, 19 nt, Human
ccccgcccaggcuggccag

SEQ ID NO: 3883869 - RNA, 20 nt, Human
ccccgccccacauuccgaca

SEQ ID NO: 3883870 - RNA, 12 nt, Human
ccccgcccccag

SEQ ID NO: 3883871 - RNA, 17 nt, Human
ccccgcccccugcccuc

SEQ ID NO: 3883872 - RNA, 18 nt, Human
ccccgccugcccucaugg

SEQ ID NO: 3883873 - RNA, 13 nt, Human
ccccgccuggcca

SEQ ID NO: 3883874 - RNA, 21 nt, Human
ccccgccuuccgccccuuccc

SEQ ID NO: 3883875 - RNA, 22 nt, Human
ccccgcgaccauguggccacaa

SEQ ID NO: 3883876 - RNA, 21 nt, Human
ccccgcguggaacucgugucu

SEQ ID NO: 3883877 - RNA, 21 nt, Human
ccccgcucugcaugcggccca

SEQ ID NO: 3883878 - RNA, 14 nt, Human
ccccggaguucagu

SEQ ID NO: 3883879 - RNA, 17 nt, Human
ccccggcacccucuggc

SEQ ID NO: 3883880 - RNA, 18 nt, Human
ccccggcagcagccccca

SEQ ID NO: 3883881 - RNA, 17 nt, Human
ccccggcaggcccugca

SEQ ID NO: 3883882 - RNA, 15 nt, Human
ccccggccaccucug

SEQ ID NO: 3883883 - RNA, 16 nt, Human
ccccggccaccucugc

SEQ ID NO: 3883884 - RNA, 13 nt, Human
ccccggccaccug

SEQ ID NO: 3883885 - RNA, 19 nt, Human
ccccggccccagccagagu

SEQ ID NO: 3883886 - RNA, 13 nt, Human
ccccggcccuggg

SEQ ID NO: 3883887 - RNA, 17 nt, Human
ccccggcuuccuuuccc

SEQ ID NO: 3883888 - RNA, 23 nt, Human
ccccgggaggggcccgcuugccu

SEQ ID NO: 3883889 - RNA, 15 nt, Human
ccccggucccuugag

SEQ ID NO: 3883890 - RNA, 15 nt, Human
ccccgguggcugggc

SEQ ID NO: 3883891 - RNA, 17 nt, Human
ccccgguggcugggcag

SEQ ID NO: 3883892 - RNA, 15 nt, Human
ccccgucaagaguga

SEQ ID NO: 3883893 - RNA, 13 nt, Human
ccccgucucuguu

SEQ ID NO: 3883894 - RNA, 15 nt, Human
ccccgucugccuggc

SEQ ID NO: 3883895 - RNA, 19 nt, Human
ccccgugcagacuggaggg

SEQ ID NO: 3883896 - RNA, 21 nt, Human
ccccguuccugacaucacagc

SEQ ID NO: 3883897 - RNA, 20 nt, Human
ccccuaaaagaaacccugca

SEQ ID NO: 3883898 - RNA, 13 nt, Human
ccccuaccccaca

SEQ ID NO: 3883899 - RNA, 20 nt, Human
ccccuaccccacaccaggcc

SEQ ID NO: 3883900 - RNA, 17 nt, Human
ccccuaccccuggcugu

SEQ ID NO: 3883901 - RNA, 14 nt, Human
ccccuacugcugug

SEQ ID NO: 3883902 - RNA, 17 nt, Human
ccccuagaaacccaagc

SEQ ID NO: 3883903 - RNA, 18 nt, Human
ccccuagaaacccaagcu

SEQ ID NO: 3883904 - RNA, 21 nt, Human
ccccuagaaacccaagcuccu

SEQ ID NO: 3883905 - RNA, 13 nt, Human
ccccuagcccagg

SEQ ID NO: 3883906 - RNA, 17 nt, Human
ccccuagccgguuccug

SEQ ID NO: 3883907 - RNA, 20 nt, Human
ccccuagcgcuaucucccug

SEQ ID NO: 3883908 - RNA, 21 nt, Human
ccccuagcuuagagccucccu

SEQ ID NO: 3883909 - RNA, 13 nt, Human
ccccuaguucccu

SEQ ID NO: 3883910 - RNA, 15 nt, Human
ccccuaguucccucu

SEQ ID NO: 3883911 - RNA, 14 nt, Human
ccccuauccuuggc

SEQ ID NO: 3883912 - RNA, 15 nt, Human
ccccuauccuuggca

SEQ ID NO: 3883913 - RNA, 23 nt, Human
ccccucaacucuccuccagaguc

SEQ ID NO: 3883914 - RNA, 20 nt, Human
ccccucacagccucugaccc

SEQ ID NO: 3883915 - RNA, 13 nt, Human
ccccucaccuccu

SEQ ID NO: 3883916 - RNA, 13 nt, Human
ccccucagcucca

SEQ ID NO: 3883917 - RNA, 17 nt, Human
ccccucagcuccagacg

SEQ ID NO: 3883918 - RNA, 14 nt, Human
ccccucagcucggc

SEQ ID NO: 3883919 - RNA, 16 nt, Human
ccccucagggucccug

SEQ ID NO: 3883920 - RNA, 18 nt, Human
ccccucaguugugcagcu

SEQ ID NO: 3883921 - RNA, 20 nt, Human
ccccucauagcccucacccu

SEQ ID NO: 3883922 - RNA, 20 nt, Human
ccccucaucucucugcccaa

SEQ ID NO: 3883923 - RNA, 14 nt, Human
ccccuccaaccugg

SEQ ID NO: 3883924 - RNA, 23 nt, Human
ccccuccaaucccaccaacccuc

SEQ ID NO: 3883925 - RNA, 16 nt, Human
ccccuccaauccugcc

SEQ ID NO: 3883926 - RNA, 13 nt, Human
ccccuccaccugc

SEQ ID NO: 3883927 - RNA, 22 nt, Human
ccccuccagcuuguggagcccc

SEQ ID NO: 3883928 - RNA, 12 nt, Human
ccccucccacca

SEQ ID NO: 3883929 - RNA, 12 nt, Human
ccccucccagag

SEQ ID NO: 3883930 - RNA, 12 nt, Human
ccccucccagcu

SEQ ID NO: 3883931 - RNA, 13 nt, Human
ccccucccagcug

SEQ ID NO: 3883932 - RNA, 22 nt, Human
ccccucccagcugacaguccuc

SEQ ID NO: 3883933 - RNA, 13 nt, Human
ccccucccaucug

SEQ ID NO: 3883934 - RNA, 13 nt, Human
ccccucccauuag

SEQ ID NO: 3883935 - RNA, 13 nt, Human
ccccuccccaugc

SEQ ID NO: 3883936 - RNA, 21 nt, Human
ccccucccccaacccccaccc

SEQ ID NO: 3883937 - RNA, 14 nt, Human
ccccucccccagcc

SEQ ID NO: 3883938 - RNA, 18 nt, Human
ccccucccccagccacuc

SEQ ID NO: 3883939 - RNA, 15 nt, Human
ccccucccccguccu

SEQ ID NO: 3883940 - RNA, 20 nt, Human
ccccucccccguccuggagg

SEQ ID NO: 3883941 - RNA, 20 nt, Human
ccccucccccugagauucag

SEQ ID NO: 3883942 - RNA, 19 nt, Human
ccccuccccuaaugccugc

SEQ ID NO: 3883943 - RNA, 18 nt, Human
ccccuccccugcugcagg

SEQ ID NO: 3883944 - RNA, 22 nt, Human
ccccucccgucuacucauuccc

SEQ ID NO: 3883945 - RNA, 12 nt, Human
ccccucccuacc

SEQ ID NO: 3883946 - RNA, 14 nt, Human
ccccucccuggaug

SEQ ID NO: 3883947 - RNA, 15 nt, Human
ccccucccuggccug

SEQ ID NO: 3883948 - RNA, 13 nt, Human
ccccucccuggcu

SEQ ID NO: 3883949 - RNA, 22 nt, Human
ccccucccuggcucccaugacc

SEQ ID NO: 3883950 - RNA, 13 nt, Human
ccccucccuguca

SEQ ID NO: 3883951 - RNA, 16 nt, Human
ccccuccgcccugcca

SEQ ID NO: 3883952 - RNA, 18 nt, Human
ccccuccgcccugccacu

SEQ ID NO: 3883953 - RNA, 13 nt, Human
ccccuccgccucc

SEQ ID NO: 3883954 - RNA, 17 nt, Human
ccccuccggacuggugc

SEQ ID NO: 3883955 - RNA, 19 nt, Human
ccccuccuaccccucccag

SEQ ID NO: 3883956 - RNA, 19 nt, Human
ccccuccuaguuugggagg

SEQ ID NO: 3883957 - RNA, 15 nt, Human
ccccuccuccacucu

SEQ ID NO: 3883958 - RNA, 17 nt, Human
ccccuccuccagccccu

SEQ ID NO: 3883959 - RNA, 19 nt, Human
ccccuccucuagcuguggg

SEQ ID NO: 3883960 - RNA, 15 nt, Human
ccccuccucucccau

SEQ ID NO: 3883961 - RNA, 15 nt, Human
ccccuccucucugcc

SEQ ID NO: 3883962 - RNA, 11 nt, Human
ccccuccucug

SEQ ID NO: 3883963 - RNA, 13 nt, Human
ccccuccucugcu

SEQ ID NO: 3883964 - RNA, 14 nt, Human
ccccuccucugcuu

SEQ ID NO: 3883965 - RNA, 14 nt, Human
ccccuccugcugca

SEQ ID NO: 3883966 - RNA, 22 nt, Human
ccccuccugcugcagaggggca

SEQ ID NO: 3883967 - RNA, 18 nt, Human
ccccuccuggggccaggc

SEQ ID NO: 3883968 - RNA, 16 nt, Human
ccccuccuucccagcu

SEQ ID NO: 3883969 - RNA, 15 nt, Human
ccccuccuuccuuga

SEQ ID NO: 3883970 - RNA, 20 nt, Human
ccccuccuuccuugaccagc

SEQ ID NO: 3883971 - RNA, 13 nt, Human
ccgcauucccuga

SEQ ID NO: 3883972 - RNA, 19 nt, Human
ccgccaccgcggguguggg

SEQ ID NO: 3883973 - RNA, 20 nt, Human
ccgccacuggggcucagagc

SEQ ID NO: 3883974 - RNA, 11 nt, Human
ccgccagccuc

SEQ ID NO: 3883975 - RNA, 21 nt, Human
ccgccagggcccacacccccu

SEQ ID NO: 3883976 - RNA, 19 nt, Human
ccgccauugccaccaggag

SEQ ID NO: 3883977 - RNA, 14 nt, Human
ccgcccaaggccuu

SEQ ID NO: 3883978 - RNA, 22 nt, Human
ccgcccagcugcaccugccagc

SEQ ID NO: 3883979 - RNA, 16 nt, Human
ccgcccaggcuggcca

SEQ ID NO: 3883980 - RNA, 20 nt, Human
ccgcccaggcuggccagccc

SEQ ID NO: 3883981 - RNA, 13 nt, Human
ccgccccacauuc

SEQ ID NO: 3883982 - RNA, 14 nt, Human
ccgccccagccucu

SEQ ID NO: 3883983 - RNA, 15 nt, Human
ccgccccagccucug

SEQ ID NO: 3883984 - RNA, 12 nt, Human
ccgcccccagcc

SEQ ID NO: 3883985 - RNA, 20 nt, Human
ccgcccccagcccccuccug

SEQ ID NO: 3883986 - RNA, 14 nt, Human
ccgcccccagccua

SEQ ID NO: 3883987 - RNA, 19 nt, Human
ccgccccccacacuucccu

SEQ ID NO: 3883988 - RNA, 20 nt, Human
ccgccccccacacuucccug

SEQ ID NO: 3883989 - RNA, 12 nt, Human
ccgcccccuccu

SEQ ID NO: 3883990 - RNA, 14 nt, Human
ccgcccccuccuga

SEQ ID NO: 3883991 - RNA, 17 nt, Human
ccgccccugagcccacu

SEQ ID NO: 3883992 - RNA, 17 nt, Human
ccgccccuuccccgagg

SEQ ID NO: 3883993 - RNA, 18 nt, Human
ccgccccuucccuucccu

SEQ ID NO: 3883994 - RNA, 16 nt, Human
ccgcccgggcccagag

SEQ ID NO: 3883995 - RNA, 15 nt, Human
ccgcccugcuccucc

SEQ ID NO: 3883996 - RNA, 16 nt, Human
ccgcccuguacccucu

SEQ ID NO: 3883997 - RNA, 19 nt, Human
ccgccgacuuuguaccccc

SEQ ID NO: 3883998 - RNA, 14 nt, Human
ccgccgccucgccc

SEQ ID NO: 3883999 - RNA, 18 nt, Human
ccgccgcuuuucuccucu

SEQ ID NO: 3884000 - RNA, 14 nt, Human
ccgccgugaccccu

SEQ ID NO: 3884001 - RNA, 16 nt, Human
ccgccgugaccccugc

SEQ ID NO: 3884002 - RNA, 18 nt, Human
ccgccuaguuuacuguuu

SEQ ID NO: 3884003 - RNA, 12 nt, Human
ccgccuccagga

SEQ ID NO: 3884004 - RNA, 15 nt, Human
ccgccucccagccug

SEQ ID NO: 3884005 - RNA, 17 nt, Human
ccgccuccuacagccca

SEQ ID NO: 3884006 - RNA, 20 nt, Human
ccgccucgaccucucucaaa

SEQ ID NO: 3884007 - RNA, 23 nt, Human
ccgccucuccucgguucaagguc

SEQ ID NO: 3884008 - RNA, 14 nt, Human
ccgccucugcuggc

SEQ ID NO: 3884009 - RNA, 11 nt, Human
ccgccugccag

SEQ ID NO: 3884010 - RNA, 14 nt, Human
ccgccugcccaccu

SEQ ID NO: 3884011 - RNA, 20 nt, Human
ccgccugcccaccugccugg

SEQ ID NO: 3884012 - RNA, 22 nt, Human
ccgccugcccgucucucuccca

SEQ ID NO: 3884013 - RNA, 15 nt, Human
ccgccuggaggagau

SEQ ID NO: 3884014 - RNA, 16 nt, Human
ccgccuggcagaacug

SEQ ID NO: 3884015 - RNA, 21 nt, Human
ccgccuggcagaacugagcuc

SEQ ID NO: 3884016 - RNA, 15 nt, Human
ccgccuggccaggag

SEQ ID NO: 3884017 - RNA, 20 nt, Human
ccgccuggccaggagcaggc

SEQ ID NO: 3884018 - RNA, 23 nt, Human
ccgccuuccgccccuucccuucc

SEQ ID NO: 3884019 - RNA, 22 nt, Human
ccgccuugcccagccuggaugc

SEQ ID NO: 3884020 - RNA, 12 nt, Human
ccgccuuuugua

SEQ ID NO: 3884021 - RNA, 22 nt, Human
ccgcgccaaauaaugucucugu

SEQ ID NO: 3884022 - RNA, 21 nt, Human
ccgcgcuccgggcuuucacgg

SEQ ID NO: 3884023 - RNA, 15 nt, Human
ccgcggagccugcau

SEQ ID NO: 3884024 - RNA, 16 nt, Human
ccgcgggcacugccgc

SEQ ID NO: 3884025 - RNA, 21 nt, Human
ccgcggggcugucggcgcugc

SEQ ID NO: 3884026 - RNA, 17 nt, Human
ccgcggguuccgcaggc

SEQ ID NO: 3884027 - RNA, 19 nt, Human
ccgcggguuccgcaggcag

SEQ ID NO: 3884028 - RNA, 17 nt, Human
ccgcgucuacccuggga

SEQ ID NO: 3884029 - RNA, 22 nt, Human
ccgcgugcggaggggacagagc

SEQ ID NO: 3884030 - RNA, 22 nt, Human
ccgcguguccccggggcccagg

SEQ ID NO: 3884031 - RNA, 17 nt, Human
ccgcguuguaaaauaua

SEQ ID NO: 3884032 - RNA, 16 nt, Human
ccgcguuuagaccaag

SEQ ID NO: 3884033 - RNA, 18 nt, Human
ccgcuaaaagaaacuuuc

SEQ ID NO: 3884034 - RNA, 20 nt, Human
ccgcuacaccacucuggcag

SEQ ID NO: 3884035 - RNA, 21 nt, Human
ccgcuacaccacucuggcagc

SEQ ID NO: 3884036 - RNA, 19 nt, Human
ccgcuagaggccugaggau

SEQ ID NO: 3884037 - RNA, 21 nt, Human
ccgcuaggcucgccuucccuc

SEQ ID NO: 3884038 - RNA, 16 nt, Human
ccgcucaccuagagcc

SEQ ID NO: 3884039 - RNA, 20 nt, Human
ccgcucaccuagagccagac

SEQ ID NO: 3884040 - RNA, 11 nt, Human
ccgcucagccc

SEQ ID NO: 3884041 - RNA, 12 nt, Human
ccgcucagcccu

SEQ ID NO: 3884042 - RNA, 15 nt, Human
ccgcucagcccuccc

SEQ ID NO: 3884043 - RNA, 20 nt, Human
ccgcucaggcugaccacuuu

SEQ ID NO: 3884044 - RNA, 16 nt, Human
ccgcuccccagcccag

SEQ ID NO: 3884045 - RNA, 14 nt, Human
ccgcuccugucugc

SEQ ID NO: 3884046 - RNA, 17 nt, Human
ccgcuccugucugccag

SEQ ID NO: 3884047 - RNA, 15 nt, Human
ccgcucggaggcccc

SEQ ID NO: 3884048 - RNA, 16 nt, Human
ccgcucggaggcccca

SEQ ID NO: 3884049 - RNA, 20 nt, Human
ccgcucuacaucuucugccu

SEQ ID NO: 3884050 - RNA, 14 nt, Human
ccgcucuccugcca

SEQ ID NO: 3884051 - RNA, 14 nt, Human
ccgcucucuuccug

SEQ ID NO: 3884052 - RNA, 15 nt, Human
ccgcucucuuccugc

SEQ ID NO: 3884053 - RNA, 17 nt, Human
ccgcucucuuccugccc

SEQ ID NO: 3884054 - RNA, 19 nt, Human
ccgcucucuuccugccccu

SEQ ID NO: 3884055 - RNA, 22 nt, Human
ccgcucucuuccugccccucuu

SEQ ID NO: 3884056 - RNA, 21 nt, Human
ccgcucugcaugcggcccagc

SEQ ID NO: 3884057 - RNA, 23 nt, Human
ccgcugagcgaggagaugcuccu

SEQ ID NO: 3884058 - RNA, 13 nt, Human
ccgcugaguggac

SEQ ID NO: 3884059 - RNA, 17 nt, Human
ccgcugaguggacugga

SEQ ID NO: 3884060 - RNA, 19 nt, Human
ccgcugaguggacuggagu

SEQ ID NO: 3884061 - RNA, 13 nt, Human
ccgcugauucuca

SEQ ID NO: 3884062 - RNA, 22 nt, Human
ccgcugauucucagggucucug

SEQ ID NO: 3884063 - RNA, 14 nt, Human
ccgcugccacccac

SEQ ID NO: 3884064 - RNA, 17 nt, Human
ccgcugccacccaccuc

SEQ ID NO: 3884065 - RNA, 20 nt, Human
ccgcugccacccaccucccu

SEQ ID NO: 3884066 - RNA, 13 nt, Human
ccgcugccagccu

SEQ ID NO: 3884067 - RNA, 15 nt, Human
ccgcugccagccuug

SEQ ID NO: 3884068 - RNA, 20 nt, Human
ccgcugcccggcgcccucug

SEQ ID NO: 3884069 - RNA, 22 nt, Human
ccgcugcccggcgcccucuguc

SEQ ID NO: 3884070 - RNA, 23 nt, Human
ccgcugccgugccgccugcacuc

SEQ ID NO: 3884071 - RNA, 14 nt, Human
ccgcugcuccacgc

SEQ ID NO: 3884072 - RNA, 14 nt, Human
ccgcugcugugcaa

SEQ ID NO: 3884073 - RNA, 12 nt, Human
ccgcuggcuggg

SEQ ID NO: 3884074 - RNA, 15 nt, Human
ccgcuggcugggggc

SEQ ID NO: 3884075 - RNA, 22 nt, Human
ccgcuggcugggggccucacuc

SEQ ID NO: 3884076 - RNA, 19 nt, Human
ccgcugggcugagccccua

SEQ ID NO: 3884077 - RNA, 21 nt, Human
ccgcugggcugagccccuacc

SEQ ID NO: 3884078 - RNA, 16 nt, Human
ccgcuguaagcuccuu

SEQ ID NO: 3884079 - RNA, 18 nt, Human
ccgcuguucacccacagg

SEQ ID NO: 3884080 - RNA, 19 nt, Human
ccgcuguucacccacaggg

SEQ ID NO: 3884081 - RNA, 21 nt, Human
ccgcuguucacccacagggcu

SEQ ID NO: 3884082 - RNA, 15 nt, Human
ccgcuucugccugca

SEQ ID NO: 3884083 - RNA, 14 nt, Human
ccgcuugccucggc

SEQ ID NO: 3884084 - RNA, 18 nt, Human
ccgcuugccucggcuccu

SEQ ID NO: 3884085 - RNA, 23 nt, Human
ccgcuuggagcuauuuuccaggc

SEQ ID NO: 3884086 - RNA, 21 nt, Human
ccgcuuggcgaugccagccaa

SEQ ID NO: 3884087 - RNA, 17 nt, Human
ccgcuuguccagcgccu

SEQ ID NO: 3884088 - RNA, 11 nt, Human
ccggaaagaag

SEQ ID NO: 3884089 - RNA, 13 nt, Human
ccggaagcuccug

SEQ ID NO: 3884090 - RNA, 15 nt, Human
ccggaagcuccuggu

SEQ ID NO: 3884091 - RNA, 19 nt, Human
ccggaauccuguccucagc

SEQ ID NO: 3884092 - RNA, 22 nt, Human
ccggaauccuguccucagcuuc

SEQ ID NO: 3884093 - RNA, 13 nt, Human
ccggaccagccug

SEQ ID NO: 3884094 - RNA, 14 nt, Human
ccggacccaccuca

SEQ ID NO: 3884095 - RNA, 12 nt, Human
ccggacuggugc

SEQ ID NO: 3884096 - RNA, 18 nt, Human
ccggacuggugcccuccu

SEQ ID NO: 3884097 - RNA, 23 nt, Human
ccggacuuagaaaaccagcucag

SEQ ID NO: 3884098 - RNA, 16 nt, Human
ccggacuuuucugcaa

SEQ ID NO: 3884099 - RNA, 14 nt, Human
ccggagaggaccgg

SEQ ID NO: 3884100 - RNA, 17 nt, Human
ccggagauuggacggcc

SEQ ID NO: 3884101 - RNA, 19 nt, Human
ccggagauuggacggccug

SEQ ID NO: 3884102 - RNA, 21 nt, Human
ccggagauuggacggccugau

SEQ ID NO: 3884103 - RNA, 16 nt, Human
ccggagcuaacacugg

SEQ ID NO: 3884104 - RNA, 21 nt, Human
ccggagcugccccucucuggg

SEQ ID NO: 3884105 - RNA, 23 nt, Human
ccggagcuggaggauccccucca

SEQ ID NO: 3884106 - RNA, 20 nt, Human
ccggaggcggugggccuggu

SEQ ID NO: 3884107 - RNA, 13 nt, Human
ccggagggcugcg

SEQ ID NO: 3884108 - RNA, 14 nt, Human
ccggaggggccugg

SEQ ID NO: 3884109 - RNA, 15 nt, Human
ccggaggggccuggc

SEQ ID NO: 3884110 - RNA, 16 nt, Human
ccggaggggccuggca

SEQ ID NO: 3884111 - RNA, 21 nt, Human
ccggaggggccuggcagccgu

SEQ ID NO: 3884112 - RNA, 17 nt, Human
ccggagguagagguugu

SEQ ID NO: 3884113 - RNA, 22 nt, Human
ccggagugucuggaauuguggc

SEQ ID NO: 3884114 - RNA, 20 nt, Human
ccggauggcggacaccuggc

SEQ ID NO: 3884115 - RNA, 13 nt, Human
ccggaugugcuuu

SEQ ID NO: 3884116 - RNA, 17 nt, Human
ccgugaugcucaggcuu

SEQ ID NO: 3884117 - RNA, 13 nt, Human
ccgugcagacugg

SEQ ID NO: 3884118 - RNA, 18 nt, Human
ccgugcagcuucuguccu

SEQ ID NO: 3884119 - RNA, 19 nt, Human
ccgugcagcuucuguccug

SEQ ID NO: 3884120 - RNA, 11 nt, Human
ccgugccaaag

SEQ ID NO: 3884121 - RNA, 14 nt, Human
ccgugccaagucca

SEQ ID NO: 3884122 - RNA, 12 nt, Human
ccgugcccaggg

SEQ ID NO: 3884123 - RNA, 20 nt, Human
ccgugcccaggggcccacag

SEQ ID NO: 3884124 - RNA, 14 nt, Human
ccgugcccugcucg

SEQ ID NO: 3884125 - RNA, 21 nt, Human
ccgugccgccugcacuccuca

SEQ ID NO: 3884126 - RNA, 14 nt, Human
ccgugccuccacca

SEQ ID NO: 3884127 - RNA, 17 nt, Human
ccgugccuucagcucua

SEQ ID NO: 3884128 - RNA, 16 nt, Human
ccgugcuaaggacuug

SEQ ID NO: 3884129 - RNA, 16 nt, Human
ccgugcucgccccagc

SEQ ID NO: 3884130 - RNA, 14 nt, Human
ccgugcugacagcu

SEQ ID NO: 3884131 - RNA, 18 nt, Human
ccgugcugacagcugcuc

SEQ ID NO: 3884132 - RNA, 19 nt, Human
ccgugcugacagcugcucc

SEQ ID NO: 3884133 - RNA, 21 nt, Human
ccgugcugacagcugcuccua

SEQ ID NO: 3884134 - RNA, 15 nt, Human
ccgugcuuccucagu

SEQ ID NO: 3884135 - RNA, 15 nt, Human
ccguggaccuuccug

SEQ ID NO: 3884136 - RNA, 20 nt, Human
ccguggaggaggaaggcaag

SEQ ID NO: 3884137 - RNA, 12 nt, Human
ccguggaggcug

SEQ ID NO: 3884138 - RNA, 15 nt, Human
ccguggaggcugcuc

SEQ ID NO: 3884139 - RNA, 19 nt, Human
ccguggauugcacguggcc

SEQ ID NO: 3884140 - RNA, 23 nt, Human
ccguggcaucaccuuaggcaggg

SEQ ID NO: 3884141 - RNA, 13 nt, Human
ccguggccccagc

SEQ ID NO: 3884142 - RNA, 14 nt, Human
ccguggcccuuccu

SEQ ID NO: 3884143 - RNA, 17 nt, Human
ccguggcccuuccugga

SEQ ID NO: 3884144 - RNA, 20 nt, Human
ccguggcccuuccuggacag

SEQ ID NO: 3884145 - RNA, 14 nt, Human
ccguggcuucccgc

SEQ ID NO: 3884146 - RNA, 22 nt, Human
ccgugggcaauugucugaaaag

SEQ ID NO: 3884147 - RNA, 14 nt, Human
ccgugggccauggc

SEQ ID NO: 3884148 - RNA, 15 nt, Human
ccgugggccauggca

SEQ ID NO: 3884149 - RNA, 12 nt, Human
ccgugggcgggg

SEQ ID NO: 3884150 - RNA, 19 nt, Human
ccgugggcggggccuugcg

SEQ ID NO: 3884151 - RNA, 18 nt, Human
ccguggguugcuaacuga

SEQ ID NO: 3884152 - RNA, 19 nt, Human
ccguguacauagugcauug

SEQ ID NO: 3884153 - RNA, 12 nt, Human
ccguguccaccc

SEQ ID NO: 3884154 - RNA, 19 nt, Human
ccguguccccugacagggc

SEQ ID NO: 3884155 - RNA, 22 nt, Human
ccgugugagaagugaaugcugg

SEQ ID NO: 3884156 - RNA, 23 nt, Human
ccgugugagaagugaaugcuggg

SEQ ID NO: 3884157 - RNA, 18 nt, Human
ccgugugagugugacagg

SEQ ID NO: 3884158 - RNA, 20 nt, Human
ccgugugagugugacagggc

SEQ ID NO: 3884159 - RNA, 22 nt, Human
ccgugugagugugacagggcca

SEQ ID NO: 3884160 - RNA, 13 nt, Human
ccgugugcccucg

SEQ ID NO: 3884161 - RNA, 14 nt, Human
ccguguggccccuu

SEQ ID NO: 3884162 - RNA, 15 nt, Human
ccguguggccccuuc

SEQ ID NO: 3884163 - RNA, 22 nt, Human
ccgugugguaagcaacauggcu

SEQ ID NO: 3884164 - RNA, 19 nt, Human
ccguuauaaagugugccac

SEQ ID NO: 3884165 - RNA, 20 nt, Human
ccguuccaccccaagagaac

SEQ ID NO: 3884166 - RNA, 24 nt, Human
ccguuccugacaucacagcagccu

SEQ ID NO: 3884167 - RNA, 15 nt, Human
ccguucugcuggccu

SEQ ID NO: 3884168 - RNA, 23 nt, Human
ccguucugcuggccuggaucucc

SEQ ID NO: 3884169 - RNA, 18 nt, Human
ccguugauguuggcuggg

SEQ ID NO: 3884170 - RNA, 14 nt, Human
ccguugcugacuua

SEQ ID NO: 3884171 - RNA, 15 nt, Human
ccguugcugacuuag

SEQ ID NO: 3884172 - RNA, 20 nt, Human
ccguugucucccuggcccuc

SEQ ID NO: 3884173 - RNA, 21 nt, Human
ccguuugauuugucacugcuu

SEQ ID NO: 3884174 - RNA, 15 nt, Human
ccguuuuccccauga

SEQ ID NO: 3884175 - RNA, 17 nt, Human
ccguuuuccccaugaca

SEQ ID NO: 3884176 - RNA, 12 nt, Human
ccuaaaaaagau

SEQ ID NO: 3884177 - RNA, 11 nt, Human
ccuaaaaauaa

SEQ ID NO: 3884178 - RNA, 13 nt, Human
ccuaaaacaaaag

SEQ ID NO: 3884179 - RNA, 14 nt, Human
ccuaaaagcaaaau

SEQ ID NO: 3884180 - RNA, 13 nt, Human
ccuaaaaggccca

SEQ ID NO: 3884181 - RNA, 15 nt, Human
ccuaaaaggcccaga

SEQ ID NO: 3884182 - RNA, 14 nt, Human
ccuaaaaguaaaca

SEQ ID NO: 3884183 - RNA, 22 nt, Human
ccuaaaagugggcuugauucug

SEQ ID NO: 3884184 - RNA, 15 nt, Human
ccuaaaauucagugg

SEQ ID NO: 3884185 - RNA, 16 nt, Human
ccuaaaauucagugga

SEQ ID NO: 3884186 - RNA, 14 nt, Human
ccuaaaauuugccc

SEQ ID NO: 3884187 - RNA, 21 nt, Human
ccuaaaccaaaaacugaaagu

SEQ ID NO: 3884188 - RNA, 11 nt, Human
ccuaaacugua

SEQ ID NO: 3884189 - RNA, 12 nt, Human
ccuaaagaaaaa

SEQ ID NO: 3884190 - RNA, 14 nt, Human
ccuaaagcagccag

SEQ ID NO: 3884191 - RNA, 19 nt, Human
ccuaaagccucaaaacaaa

SEQ ID NO: 3884192 - RNA, 18 nt, Human
ccuaaauccauuuggaaa

SEQ ID NO: 3884193 - RNA, 20 nt, Human
ccuaaauccauuuggaaauc

SEQ ID NO: 3884194 - RNA, 14 nt, Human
ccuaaauggccuca

SEQ ID NO: 3884195 - RNA, 15 nt, Human
ccuaaauuauuuacu

SEQ ID NO: 3884196 - RNA, 20 nt, Human
ccuaaauuuuccuguccucu

SEQ ID NO: 3884197 - RNA, 21 nt, Human
ccuaacaacauuguagccuca

SEQ ID NO: 3884198 - RNA, 13 nt, Human
ccuaacaccagcg

SEQ ID NO: 3884199 - RNA, 21 nt, Human
ccuaacaucugaccuggcauc

SEQ ID NO: 3884200 - RNA, 18 nt, Human
ccuaaccagggccagaag

SEQ ID NO: 3884201 - RNA, 19 nt, Human
ccuaacccagaaaaucuga

SEQ ID NO: 3884202 - RNA, 16 nt, Human
ccuaaccccuuccaga

SEQ ID NO: 3884203 - RNA, 18 nt, Human
ccuaaccccuuccagauc

SEQ ID NO: 3884204 - RNA, 13 nt, Human
ccuaacucauacu

SEQ ID NO: 3884205 - RNA, 15 nt, Human
ccuaacucuucuuuc

SEQ ID NO: 3884206 - RNA, 15 nt, Human
ccuaagacugugaca

SEQ ID NO: 3884207 - RNA, 12 nt, Human
ccuaagagauuc

SEQ ID NO: 3884208 - RNA, 14 nt, Human
ccuaagaggcugcc

SEQ ID NO: 3884209 - RNA, 15 nt, Human
ccuaagaggcugccc

SEQ ID NO: 3884210 - RNA, 12 nt, Human
ccuaagaguguu

SEQ ID NO: 3884211 - RNA, 21 nt, Human
ccuaagauuuauuuuguuaaa

SEQ ID NO: 3884212 - RNA, 15 nt, Human
ccuaagcagaaagug

SEQ ID NO: 3884213 - RNA, 17 nt, Human
ccuaagcauugccuggc

SEQ ID NO: 3884214 - RNA, 13 nt, Human
ccuaagccaaggg

SEQ ID NO: 3884215 - RNA, 14 nt, Human
ccuaagccagccug

SEQ ID NO: 3884216 - RNA, 15 nt, Human
ccuaagccagccugg

SEQ ID NO: 3884217 - RNA, 19 nt, Human
ccuaagccagccuggucca

SEQ ID NO: 3884218 - RNA, 17 nt, Human
ccuaaggaucucucagg

SEQ ID NO: 3884219 - RNA, 21 nt, Human
ccuaaggcaucuaucugugcu

SEQ ID NO: 3884220 - RNA, 22 nt, Human
ccuaaggcaugugugaaacaua

SEQ ID NO: 3884221 - RNA, 12 nt, Human
ccuaaggcugca

SEQ ID NO: 3884222 - RNA, 12 nt, Human
ccuaaguacugu

SEQ ID NO: 3884223 - RNA, 20 nt, Human
ccuaaguaucaaguauagaa

SEQ ID NO: 3884224 - RNA, 16 nt, Human
ccuaaguauuaaaaca

SEQ ID NO: 3884225 - RNA, 17 nt, Human
ccuaaguauuaaaacau

SEQ ID NO: 3884226 - RNA, 21 nt, Human
ccuaaguauuaaaacauugga

SEQ ID NO: 3884227 - RNA, 16 nt, Human
ccuaagucccugcccc

SEQ ID NO: 3884228 - RNA, 18 nt, Human
ccuaagucccugcccccu

SEQ ID NO: 3884229 - RNA, 18 nt, Human
ccuaaguccuuuaugugg

SEQ ID NO: 3884230 - RNA, 14 nt, Human
ccuaaguggcugcu

SEQ ID NO: 3884231 - RNA, 15 nt, Human
ccuaaguggcugcug

SEQ ID NO: 3884232 - RNA, 17 nt, Human
ccuaaguuaccuuucua

SEQ ID NO: 3884233 - RNA, 17 nt, Human
ccuaaguucuuagauau

SEQ ID NO: 3884234 - RNA, 18 nt, Human
ccuaaguucuuagauauc

SEQ ID NO: 3884235 - RNA, 14 nt, Human
ccuaauaaaaaggu

SEQ ID NO: 3884236 - RNA, 12 nt, Human
ccuaauaaaacu

SEQ ID NO: 3884237 - RNA, 15 nt, Human
ccuaauaaaacugau

SEQ ID NO: 3884238 - RNA, 21 nt, Human
ccuaauaaaacugaugugaaa

SEQ ID NO: 3884239 - RNA, 23 nt, Human
ccuaauaaaacugaugugaaacu

SEQ ID NO: 3884240 - RNA, 18 nt, Human
ccuaauaaacauccuuca

SEQ ID NO: 3884241 - RNA, 12 nt, Human
ccuaauaaagcu

SEQ ID NO: 3884242 - RNA, 23 nt, Human
ccuaauaaagcuguguggcaguc

SEQ ID NO: 3884243 - RNA, 21 nt, Human
ccuaauaaaguucuguacuca

SEQ ID NO: 3884244 - RNA, 13 nt, Human
ccuaauccaggca

SEQ ID NO: 3884245 - RNA, 15 nt, Human
ccuaauccaggcaga

SEQ ID NO: 3884246 - RNA, 19 nt, Human
ccuaauccaggcagaucca

SEQ ID NO: 3884247 - RNA, 18 nt, Human
ccuaauccccuucucccc

SEQ ID NO: 3884248 - RNA, 13 nt, Human
ccuaaucucugua

SEQ ID NO: 3884249 - RNA, 21 nt, Human
ccuaaugaaagugaugacaua

SEQ ID NO: 3884250 - RNA, 12 nt, Human
ccuaaugcugca

SEQ ID NO: 3884251 - RNA, 18 nt, Human
ccuaauguggcagcuguc

SEQ ID NO: 3884252 - RNA, 19 nt, Human
ccuaauguuuaugagccag

SEQ ID NO: 3884253 - RNA, 21 nt, Human
ccuaauuaauauauuaaaauu

SEQ ID NO: 3884254 - RNA, 14 nt, Human
ccuaauuaauuuca

SEQ ID NO: 3884255 - RNA, 20 nt, Human
ccuaauucaauucaaagcug

SEQ ID NO: 3884256 - RNA, 20 nt, Human
ccuaauucagccauguacag

SEQ ID NO: 3884257 - RNA, 14 nt, Human
ccuaauuccacagc

SEQ ID NO: 3884258 - RNA, 15 nt, Human
ccuaauucuucuguc

SEQ ID NO: 3884259 - RNA, 22 nt, Human
ccuacaagauuuagaaaaaagu

SEQ ID NO: 3884260 - RNA, 15 nt, Human
ccuacacacugucau

SEQ ID NO: 3884261 - RNA, 11 nt, Human
ccuacacagga

SEQ ID NO: 3884262 - RNA, 20 nt, Human
ccuaggccacuccuccaaag

SEQ ID NO: 3884263 - RNA, 15 nt, Human
ccuaggccaggugca

SEQ ID NO: 3884264 - RNA, 23 nt, Human
ccuaggccucaacuccucccaua

SEQ ID NO: 3884265 - RNA, 18 nt, Human
ccuaggccucagccagag

SEQ ID NO: 3884266 - RNA, 19 nt, Human
ccuaggccucagccagaga

SEQ ID NO: 3884267 - RNA, 13 nt, Human
ccuaggccugggc

SEQ ID NO: 3884268 - RNA, 14 nt, Human
ccuaggcgggcggu

SEQ ID NO: 3884269 - RNA, 16 nt, Human
ccuaggcuaggguggg

SEQ ID NO: 3884270 - RNA, 15 nt, Human
ccuaggcuccacccc

SEQ ID NO: 3884271 - RNA, 18 nt, Human
ccuagggaacagaaauug

SEQ ID NO: 3884272 - RNA, 16 nt, Human
ccuagguagcccccuc

SEQ ID NO: 3884273 - RNA, 13 nt, Human
ccuaggucuauuu

SEQ ID NO: 3884274 - RNA, 14 nt, Human
ccuaggucuccagu

SEQ ID NO: 3884275 - RNA, 15 nt, Human
ccuaggugacagagu

SEQ ID NO: 3884276 - RNA, 20 nt, Human
ccuagguucccggucccgag

SEQ ID NO: 3884277 - RNA, 21 nt, Human
ccuagguucccggucccgagu

SEQ ID NO: 3884278 - RNA, 14 nt, Human
ccuaguaagaagac

SEQ ID NO: 3884279 - RNA, 18 nt, Human
ccuagucccuuccacacc

SEQ ID NO: 3884280 - RNA, 19 nt, Human
ccuagucccuuccacaccc

SEQ ID NO: 3884281 - RNA, 16 nt, Human
ccuagucccuuccccu

SEQ ID NO: 3884282 - RNA, 19 nt, Human
ccuagugaaggcuucucuc

SEQ ID NO: 3884283 - RNA, 21 nt, Human
ccuagugaaggcuucucucug

SEQ ID NO: 3884284 - RNA, 18 nt, Human
ccuagugacccggaggcc

SEQ ID NO: 3884285 - RNA, 17 nt, Human
ccuaguggcuguccagu

SEQ ID NO: 3884286 - RNA, 19 nt, Human
ccuaguggcuguccagugc

SEQ ID NO: 3884287 - RNA, 23 nt, Human
ccuaguggcuguccagugcccau

SEQ ID NO: 3884288 - RNA, 17 nt, Human
ccuaguggggucucccu

SEQ ID NO: 3884289 - RNA, 20 nt, Human
ccuaguggggucucccucuc

SEQ ID NO: 3884290 - RNA, 20 nt, Human
ccuaguuaaagaaaggaaaa

SEQ ID NO: 3884291 - RNA, 18 nt, Human
ccuaguucaucccuucuc

SEQ ID NO: 3884292 - RNA, 21 nt, Human
ccuaguucaucccuucucuuc

SEQ ID NO: 3884293 - RNA, 22 nt, Human
ccuaguucaucccuucucuucc

SEQ ID NO: 3884294 - RNA, 23 nt, Human
ccuaguuccaccaucaagccacc

SEQ ID NO: 3884295 - RNA, 20 nt, Human
ccuaguucccucugcucagc

SEQ ID NO: 3884296 - RNA, 15 nt, Human
ccuaguucuagaaaa

SEQ ID NO: 3884297 - RNA, 13 nt, Human
ccuaguuuccucu

SEQ ID NO: 3884298 - RNA, 14 nt, Human
ccuaguuuccucuc

SEQ ID NO: 3884299 - RNA, 13 nt, Human
ccuaguuuuccau

SEQ ID NO: 3884300 - RNA, 15 nt, Human
ccuaguuuuccaugc

SEQ ID NO: 3884301 - RNA, 15 nt, Human
ccuaguuuucuccuc

SEQ ID NO: 3884302 - RNA, 19 nt, Human
ccuaguuuucuuuccuccu

SEQ ID NO: 3884303 - RNA, 20 nt, Human
ccuauaaaacaggucaauac

SEQ ID NO: 3884304 - RNA, 18 nt, Human
ccuauaacacugugaaga

SEQ ID NO: 3884305 - RNA, 16 nt, Human
ccuauaacugcccagc

SEQ ID NO: 3884306 - RNA, 14 nt, Human
ccuauaacuugaug

SEQ ID NO: 3884307 - RNA, 12 nt, Human
ccuauaaggaag

SEQ ID NO: 3884308 - RNA, 23 nt, Human
ccuauaaucugucaaaacacugu

SEQ ID NO: 3884309 - RNA, 12 nt, Human
ccuauaaugaag

SEQ ID NO: 3884310 - RNA, 14 nt, Human
ccuauaaugugugu

SEQ ID NO: 3884311 - RNA, 12 nt, Human
ccuauaccauuu

SEQ ID NO: 3884312 - RNA, 23 nt, Human
ccuauaccauuuccguaauucuu

SEQ ID NO: 3884313 - RNA, 20 nt, Human
ccuauaccccuuacuuagca

SEQ ID NO: 3884314 - RNA, 13 nt, Human
ccuauagucccag

SEQ ID NO: 3884315 - RNA, 13 nt, Human
ccuauauauuucu

SEQ ID NO: 3884316 - RNA, 18 nt, Human
ccuauauuguuuucagug

SEQ ID NO: 3884317 - RNA, 22 nt, Human
ccuauauuguuuucaguguaca

SEQ ID NO: 3884318 - RNA, 15 nt, Human
ccuauauuuacagug

SEQ ID NO: 3884319 - RNA, 14 nt, Human
ccuauauuuuccug

SEQ ID NO: 3884320 - RNA, 16 nt, Human
ccuaucaccuccccuc

SEQ ID NO: 3884321 - RNA, 21 nt, Human
ccuaucagccugucucuucca

SEQ ID NO: 3884322 - RNA, 12 nt, Human
ccuaucagugug

SEQ ID NO: 3884323 - RNA, 16 nt, Human
ccuaucagugugcccc

SEQ ID NO: 3884324 - RNA, 24 nt, Human
ccuaucagugugccccccauccug

SEQ ID NO: 3884325 - RNA, 13 nt, Human
ccuauccacccag

SEQ ID NO: 3884326 - RNA, 14 nt, Human
ccuauccacccagc

SEQ ID NO: 3884327 - RNA, 17 nt, Human
ccuauccacccagccca

SEQ ID NO: 3884328 - RNA, 13 nt, Human
ccuaucccaccuc

SEQ ID NO: 3884329 - RNA, 17 nt, Human
ccuauccgcugccagcc

SEQ ID NO: 3884330 - RNA, 18 nt, Human
ccuauccgcugccagccu

SEQ ID NO: 3884331 - RNA, 19 nt, Human
ccuauccugguuuuuguag

SEQ ID NO: 3884332 - RNA, 16 nt, Human
ccuauccuuggcacca

SEQ ID NO: 3884333 - RNA, 17 nt, Human
ccuauccuuggcaccaa

SEQ ID NO: 3884334 - RNA, 16 nt, Human
ccuaucuaucuuccaa

SEQ ID NO: 3884335 - RNA, 21 nt, Human
ccuaucuaucuuccaaaugca

SEQ ID NO: 3884336 - RNA, 16 nt, Human
ccuaucuccugacaga

SEQ ID NO: 3884337 - RNA, 16 nt, Human
ccuaucugggcuuccu

SEQ ID NO: 3884338 - RNA, 20 nt, Human
ccuaucugggcuuccuggag

SEQ ID NO: 3884339 - RNA, 22 nt, Human
ccuaucugggcuuccuggagca

SEQ ID NO: 3884340 - RNA, 13 nt, Human
ccuaucuuugcca

SEQ ID NO: 3884341 - RNA, 19 nt, Human
ccuaucuuugccacccuca

SEQ ID NO: 3884342 - RNA, 20 nt, Human
ccuaucuuugccacccucau

SEQ ID NO: 3884343 - RNA, 16 nt, Human
ccuaugaccauaaaau

SEQ ID NO: 3884344 - RNA, 16 nt, Human
ccuaugacuugggcac

SEQ ID NO: 3884345 - RNA, 15 nt, Human
ccuaugagcauccug

SEQ ID NO: 3884346 - RNA, 16 nt, Human
ccuaugagcauccuga

SEQ ID NO: 3884347 - RNA, 20 nt, Human
ccuaugagcauccugagccc

SEQ ID NO: 3884348 - RNA, 11 nt, Human
ccuaugaugua

SEQ ID NO: 3884349 - RNA, 15 nt, Human
ccuaugauguauacu

SEQ ID NO: 3884350 - RNA, 18 nt, Human
ccuaugauguauacugcc

SEQ ID NO: 3884351 - RNA, 14 nt, Human
ccuaugcacauaug

SEQ ID NO: 3884352 - RNA, 19 nt, Human
ccuaugcagagguccacaa

SEQ ID NO: 3884353 - RNA, 11 nt, Human
ccuaugcaugg

SEQ ID NO: 3884354 - RNA, 19 nt, Human
ccuaugcaugguuucagca

SEQ ID NO: 3884355 - RNA, 21 nt, Human
ccuaugcaugguuucagcacu

SEQ ID NO: 3884356 - RNA, 21 nt, Human
ccuaugcuauugacaauaaaa

SEQ ID NO: 3884357 - RNA, 22 nt, Human
ccuauggaaacccgaggguuga

SEQ ID NO: 3884358 - RNA, 16 nt, Human
ccuauggaauuuauaa

SEQ ID NO: 3884359 - RNA, 21 nt, Human
ccuauggagagcccugggacc

SEQ ID NO: 3884360 - RNA, 12 nt, Human
ccuauggccuca

SEQ ID NO: 3884361 - RNA, 19 nt, Human
ccuauggcuggccacugca

SEQ ID NO: 3884362 - RNA, 23 nt, Human
ccuauggcuggccacugcacaga

SEQ ID NO: 3884363 - RNA, 19 nt, Human
ccuaugggccugccgggcu

SEQ ID NO: 3884364 - RNA, 17 nt, Human
ccuauggggauggucca

SEQ ID NO: 3884365 - RNA, 22 nt, Human
ccuaugguauaaugguugacug

SEQ ID NO: 3884366 - RNA, 19 nt, Human
ccuauguagacaauauaag

SEQ ID NO: 3884367 - RNA, 18 nt, Human
ccuauguaguccgugcug

SEQ ID NO: 3884368 - RNA, 14 nt, Human
ccuauguccuaagg

SEQ ID NO: 3884369 - RNA, 19 nt, Human
ccuauguccuaaggacaca

SEQ ID NO: 3884370 - RNA, 23 nt, Human
ccuauguccuaaggacacacuaa

SEQ ID NO: 3884371 - RNA, 17 nt, Human
ccuaugugauuuuaacu

SEQ ID NO: 3884372 - RNA, 20 nt, Human
ccuaugugauuuuaacucug

SEQ ID NO: 3884373 - RNA, 23 nt, Human
ccuaugugauuuuaacucugucu

SEQ ID NO: 3884374 - RNA, 19 nt, Human
ccuauuaguguuauaugaa

SEQ ID NO: 3884375 - RNA, 14 nt, Human
ccuauucccacacc

SEQ ID NO: 3884376 - RNA, 22 nt, Human
ccuauucccacaccuccacagu

SEQ ID NO: 3884377 - RNA, 22 nt, Human
ccuauucuauugcaguuauaga

SEQ ID NO: 3884378 - RNA, 19 nt, Human
ccuauucucaccaggaagg

SEQ ID NO: 3884379 - RNA, 15 nt, Human
ccuauucucgggcug

SEQ ID NO: 3884380 - RNA, 15 nt, Human
ccuauucuuucgaaa

SEQ ID NO: 3884381 - RNA, 16 nt, Human
ccuauugcuagagcuc

SEQ ID NO: 3884382 - RNA, 12 nt, Human
ccuauuguugau

SEQ ID NO: 3884383 - RNA, 12 nt, Human
ccuauuucagaa

SEQ ID NO: 3884384 - RNA, 15 nt, Human
ccuauuucaucacaa

SEQ ID NO: 3884385 - RNA, 16 nt, Human
ccuauuuccagaaaua

SEQ ID NO: 3884386 - RNA, 15 nt, Human
ccuauuucucuuucu

SEQ ID NO: 3884387 - RNA, 14 nt, Human
ccuauuugacuuac

SEQ ID NO: 3884388 - RNA, 15 nt, Human
ccuauuuuuaaauaa

SEQ ID NO: 3884389 - RNA, 23 nt, Human
ccuauuuuugacauggaaaugaa

SEQ ID NO: 3884390 - RNA, 23 nt, Human
ccuauuuuuuuagauugagaaau

SEQ ID NO: 3884391 - RNA, 16 nt, Human
ccucaaaagcacccuu

SEQ ID NO: 3884392 - RNA, 21 nt, Human
ccucaaagcaagcauucagaa

SEQ ID NO: 3884393 - RNA, 15 nt, Human
ccucaaagcuuccau

SEQ ID NO: 3884394 - RNA, 21 nt, Human
ccucaaauaaaaagugcuuuu

SEQ ID NO: 3884395 - RNA, 16 nt, Human
ccucaaauccaggacc

SEQ ID NO: 3884396 - RNA, 16 nt, Human
ccucaaaugacccaaa

SEQ ID NO: 3884397 - RNA, 16 nt, Human
ccucaacaagggagag

SEQ ID NO: 3884398 - RNA, 18 nt, Human
ccucaacaagggagagac

SEQ ID NO: 3884399 - RNA, 21 nt, Human
ccucaacaagggagagaccuc

SEQ ID NO: 3884400 - RNA, 14 nt, Human
ccucaaccccuccc

SEQ ID NO: 3884401 - RNA, 19 nt, Human
ccucaacccucccucagcc

SEQ ID NO: 3884402 - RNA, 22 nt, Human
ccucaacccucccucagccccu

SEQ ID NO: 3884403 - RNA, 12 nt, Human
ccucaaccuccu

SEQ ID NO: 3884404 - RNA, 15 nt, Human
ccucaaccuccuggg

SEQ ID NO: 3884405 - RNA, 13 nt, Human
ccucaaccuguga

SEQ ID NO: 3884406 - RNA, 18 nt, Human
ccucaacguauuguuucg

SEQ ID NO: 3884407 - RNA, 22 nt, Human
ccucagggagcagggaaggccu

SEQ ID NO: 3884408 - RNA, 15 nt, Human
ccucagggcaaagcc

SEQ ID NO: 3884409 - RNA, 17 nt, Human
ccucagggcaaagccag

SEQ ID NO: 3884410 - RNA, 15 nt, Human
ccucagggcucccag

SEQ ID NO: 3884411 - RNA, 16 nt, Human
ccucagggcuccuugu

SEQ ID NO: 3884412 - RNA, 22 nt, Human
ccucagguaaucgaccugccuc

SEQ ID NO: 3884413 - RNA, 19 nt, Human
ccucaggucagggugagga

SEQ ID NO: 3884414 - RNA, 18 nt, Human
ccucaggugagaagcaga

SEQ ID NO: 3884415 - RNA, 16 nt, Human
ccucagguggccaugc

SEQ ID NO: 3884416 - RNA, 24 nt, Human
ccucagguguuuuuuaugaagugc

SEQ ID NO: 3884417 - RNA, 23 nt, Human
ccucagguuccuauggcuggcca

SEQ ID NO: 3884418 - RNA, 17 nt, Human
ccucagguugcugguug

SEQ ID NO: 3884419 - RNA, 18 nt, Human
ccucagguugcugguugc

SEQ ID NO: 3884420 - RNA, 15 nt, Human
ccucaguaagacgac

SEQ ID NO: 3884421 - RNA, 21 nt, Human
ccucaguaaguaucuggagga

SEQ ID NO: 3884422 - RNA, 19 nt, Human
ccucaguagucccugcaca

SEQ ID NO: 3884423 - RNA, 15 nt, Human
ccucaguauauuuaa

SEQ ID NO: 3884424 - RNA, 16 nt, Human
ccucaguccauuuaua

SEQ ID NO: 3884425 - RNA, 18 nt, Human
ccucaguccauuuauaua

SEQ ID NO: 3884426 - RNA, 20 nt, Human
ccucaguccauuuauauaug

SEQ ID NO: 3884427 - RNA, 16 nt, Human
ccucaguccuccccuc

SEQ ID NO: 3884428 - RNA, 19 nt, Human
ccucagucuggcccuuccu

SEQ ID NO: 3884429 - RNA, 18 nt, Human
ccucagugacccuggcuc

SEQ ID NO: 3884430 - RNA, 23 nt, Human
ccucaguggacuuuccacccccu

SEQ ID NO: 3884431 - RNA, 12 nt, Human
ccucagugucau

SEQ ID NO: 3884432 - RNA, 21 nt, Human
ccucaguucccuuggccucag

SEQ ID NO: 3884433 - RNA, 19 nt, Human
ccucaguucuugccacuuu

SEQ ID NO: 3884434 - RNA, 15 nt, Human
ccucaguugugcagc

SEQ ID NO: 3884435 - RNA, 17 nt, Human
ccucaguugugcagcuu

SEQ ID NO: 3884436 - RNA, 22 nt, Human
ccucauaguaugguggcugggu

SEQ ID NO: 3884437 - RNA, 12 nt, Human
ccucauauuuaa

SEQ ID NO: 3884438 - RNA, 13 nt, Human
ccucauauuuaaa

SEQ ID NO: 3884439 - RNA, 16 nt, Human
ccucaucaaggacacg

SEQ ID NO: 3884440 - RNA, 15 nt, Human
ccucaucaggaugaa

SEQ ID NO: 3884441 - RNA, 22 nt, Human
ccucauccaccccaucccuccc

SEQ ID NO: 3884442 - RNA, 14 nt, Human
ccucauccagggcu

SEQ ID NO: 3884443 - RNA, 15 nt, Human
ccucauccagggcuc

SEQ ID NO: 3884444 - RNA, 20 nt, Human
ccucaucccgagcaccucca

SEQ ID NO: 3884445 - RNA, 15 nt, Human
ccucauccgaggcag

SEQ ID NO: 3884446 - RNA, 13 nt, Human
ccucaucucauuc

SEQ ID NO: 3884447 - RNA, 21 nt, Human
ccucaucuccccaucauuggu

SEQ ID NO: 3884448 - RNA, 17 nt, Human
ccucaucucucugccca

SEQ ID NO: 3884449 - RNA, 13 nt, Human
ccucaucugcuca

SEQ ID NO: 3884450 - RNA, 17 nt, Human
ccucaucugucccuccg

SEQ ID NO: 3884451 - RNA, 17 nt, Human
ccucaucuucuucacca

SEQ ID NO: 3884452 - RNA, 20 nt, Human
ccucaucuugaagggcccag

SEQ ID NO: 3884453 - RNA, 23 nt, Human
ccucaugaauguaaauuuguacu

SEQ ID NO: 3884454 - RNA, 18 nt, Human
ccucaugcaucuccaccu

SEQ ID NO: 3884455 - RNA, 21 nt, Human
ccucaugcugccaauauccua

SEQ ID NO: 3884456 - RNA, 23 nt, Human
ccucauggaauuggagcucgugg

SEQ ID NO: 3884457 - RNA, 16 nt, Human
ccucauggccccucug

SEQ ID NO: 3884458 - RNA, 22 nt, Human
ccucauggccccucugaccugc

SEQ ID NO: 3884459 - RNA, 18 nt, Human
ccucaugugaucacaauu

SEQ ID NO: 3884460 - RNA, 12 nt, Human
ccucauuaaauu

SEQ ID NO: 3884461 - RNA, 17 nt, Human
ccucauuaaugacacuu

SEQ ID NO: 3884462 - RNA, 19 nt, Human
ccucauuacggcuccucuc

SEQ ID NO: 3884463 - RNA, 15 nt, Human
ccucauucaggaaaa

SEQ ID NO: 3884464 - RNA, 21 nt, Human
ccucauuccaccuucccaugc

SEQ ID NO: 3884465 - RNA, 15 nt, Human
ccuccaaaagcacuu

SEQ ID NO: 3884466 - RNA, 17 nt, Human
ccuccaaaaugugccua

SEQ ID NO: 3884467 - RNA, 19 nt, Human
ccuccaaagcuucccacgg

SEQ ID NO: 3884468 - RNA, 19 nt, Human
ccuccaaauggagaagcug

SEQ ID NO: 3884469 - RNA, 12 nt, Human
ccuccaacccug

SEQ ID NO: 3884470 - RNA, 14 nt, Human
ccuccaacccugcc

SEQ ID NO: 3884471 - RNA, 16 nt, Human
ccuccaagaccuucuc

SEQ ID NO: 3884472 - RNA, 19 nt, Human
ccuccaagaccuucuccuu

SEQ ID NO: 3884473 - RNA, 20 nt, Human
ccuccaagaccuucuccuuc

SEQ ID NO: 3884474 - RNA, 11 nt, Human
ccuccaagccu

SEQ ID NO: 3884475 - RNA, 21 nt, Human
ccuccaaguccacaguggaac

SEQ ID NO: 3884476 - RNA, 16 nt, Human
ccuccaauccugcccc

SEQ ID NO: 3884477 - RNA, 14 nt, Human
ccuccacaccugcg

SEQ ID NO: 3884478 - RNA, 16 nt, Human
ccuccacaccugcggc

SEQ ID NO: 3884479 - RNA, 17 nt, Human
ccuccacaccugcggcc

SEQ ID NO: 3884480 - RNA, 15 nt, Human
ccuccacagccgcag

SEQ ID NO: 3884481 - RNA, 14 nt, Human
ccuccacagcgagg

SEQ ID NO: 3884482 - RNA, 20 nt, Human
ccuccacagcgagggcagcu

SEQ ID NO: 3884483 - RNA, 16 nt, Human
ccuccacauccuccac

SEQ ID NO: 3884484 - RNA, 15 nt, Human
ccuccaccaccacug

SEQ ID NO: 3884485 - RNA, 21 nt, Human
ccuccaccaccacuggccacc

SEQ ID NO: 3884486 - RNA, 14 nt, Human
ccuccaccccagga

SEQ ID NO: 3884487 - RNA, 15 nt, Human
ccuccaccccaggac

SEQ ID NO: 3884488 - RNA, 13 nt, Human
ccuccacccucug

SEQ ID NO: 3884489 - RNA, 22 nt, Human
ccuccacccucugagcuuugca

SEQ ID NO: 3884490 - RNA, 18 nt, Human
ccuccaccgcagaaggaa

SEQ ID NO: 3884491 - RNA, 13 nt, Human
ccuccaccucccu

SEQ ID NO: 3884492 - RNA, 22 nt, Human
ccuccaccucccugcaauaaaa

SEQ ID NO: 3884493 - RNA, 21 nt, Human
ccuccaccuuccauuuucccc

SEQ ID NO: 3884494 - RNA, 14 nt, Human
ccuccacucucccc

SEQ ID NO: 3884495 - RNA, 13 nt, Human
ccuccacugcccu

SEQ ID NO: 3884496 - RNA, 15 nt, Human
ccuccacugcccucu

SEQ ID NO: 3884497 - RNA, 12 nt, Human
ccuccacuguca

SEQ ID NO: 3884498 - RNA, 13 nt, Human
ccuccacugucac

SEQ ID NO: 3884499 - RNA, 21 nt, Human
ccuccagaacucacuggggcc

SEQ ID NO: 3884500 - RNA, 22 nt, Human
ccuccagaacucacuggggccu

SEQ ID NO: 3884501 - RNA, 18 nt, Human
ccuccagaagccucuggc

SEQ ID NO: 3884502 - RNA, 21 nt, Human
ccuccagaagccucuggcuag

SEQ ID NO: 3884503 - RNA, 18 nt, Human
ccuccagagccccacagc

SEQ ID NO: 3884504 - RNA, 12 nt, Human
ccuccagccccu

SEQ ID NO: 3884505 - RNA, 15 nt, Human
ccuccagccccuguc

SEQ ID NO: 3884506 - RNA, 18 nt, Human
ccuccagccccuguccca

SEQ ID NO: 3884507 - RNA, 21 nt, Human
ccuccagccccugucccaccc

SEQ ID NO: 3884508 - RNA, 16 nt, Human
ccuccagcccgggagc

SEQ ID NO: 3884509 - RNA, 18 nt, Human
ccuccagcccgggagccu

SEQ ID NO: 3884510 - RNA, 19 nt, Human
ccuccagcccgggagccua

SEQ ID NO: 3884511 - RNA, 21 nt, Human
ccuccagccugcccaagccca

SEQ ID NO: 3884512 - RNA, 14 nt, Human
ccuccagcugcacc

SEQ ID NO: 3884513 - RNA, 16 nt, Human
ccuccagcugcaccag

SEQ ID NO: 3884514 - RNA, 20 nt, Human
ccuccagcuucaggcaggcc

SEQ ID NO: 3884515 - RNA, 19 nt, Human
ccuccagcuuguggagccc

SEQ ID NO: 3884516 - RNA, 22 nt, Human
ccuccagcuuguggagccccac

SEQ ID NO: 3884517 - RNA, 15 nt, Human
ccuccaggaaccaca

SEQ ID NO: 3884518 - RNA, 23 nt, Human
ccuccaggagcuucuuguuuccu

SEQ ID NO: 3884519 - RNA, 18 nt, Human
ccuccaggccugccuccc

SEQ ID NO: 3884520 - RNA, 19 nt, Human
ccuccagggccacgugcca

SEQ ID NO: 3884521 - RNA, 21 nt, Human
ccuccagggccacgugccagg

SEQ ID NO: 3884522 - RNA, 20 nt, Human
ccuccaggguggcagcaaca

SEQ ID NO: 3884523 - RNA, 21 nt, Human
ccuccaggguggcagcaacaa

SEQ ID NO: 3884524 - RNA, 14 nt, Human
ccuccaggugugca

SEQ ID NO: 3884525 - RNA, 17 nt, Human
ccuccagguuuuucaau

SEQ ID NO: 3884526 - RNA, 20 nt, Human
ccuccagguuuuucaauuaa

SEQ ID NO: 3884527 - RNA, 22 nt, Human
ccuccagguuuuucaauuaaac

SEQ ID NO: 3884528 - RNA, 16 nt, Human
ccuccaguaccuugcu

SEQ ID NO: 3884529 - RNA, 14 nt, Human
ccuccaucccgaca

SEQ ID NO: 3884530 - RNA, 15 nt, Human
ccuccaucccgacau

SEQ ID NO: 3884531 - RNA, 14 nt, Human
ccuccaucccuggc

SEQ ID NO: 3884532 - RNA, 17 nt, Human
ccuccaucccuggcccc

SEQ ID NO: 3884533 - RNA, 17 nt, Human
ccuccauccuacccccu

SEQ ID NO: 3884534 - RNA, 21 nt, Human
ccuccauccuauccacugggc

SEQ ID NO: 3884535 - RNA, 13 nt, Human
ccuccauccugag

SEQ ID NO: 3884536 - RNA, 21 nt, Human
ccuccaucuguacuuggucca

SEQ ID NO: 3884537 - RNA, 15 nt, Human
ccuccaugcugccuc

SEQ ID NO: 3884538 - RNA, 11 nt, Human
ccuccauggga

SEQ ID NO: 3884539 - RNA, 12 nt, Human
ccuccaugggcc

SEQ ID NO: 3884540 - RNA, 18 nt, Human
ccuccauggugccucugg

SEQ ID NO: 3884541 - RNA, 12 nt, Human
ccuccauguggg

SEQ ID NO: 3884542 - RNA, 20 nt, Human
ccuccauuccuggagcccga

SEQ ID NO: 3884543 - RNA, 16 nt, Human
ccucccaaagugcugg

SEQ ID NO: 3884544 - RNA, 23 nt, Human
ccucccaaagugcugggauuaca

SEQ ID NO: 3884545 - RNA, 14 nt, Human
ccucccaacucacc

SEQ ID NO: 3884546 - RNA, 17 nt, Human
ccucccaacucacccca

SEQ ID NO: 3884547 - RNA, 21 nt, Human
ccucccaacucaccccagccc

SEQ ID NO: 3884548 - RNA, 23 nt, Human
ccucccaacucaccccagcccca

SEQ ID NO: 3884549 - RNA, 14 nt, Human
ccucccaagcaguu

SEQ ID NO: 3884550 - RNA, 23 nt, Human
ccucccaaggagaacaaauauuc

SEQ ID NO: 3884551 - RNA, 21 nt, Human
ccuggccuauccgcugccagc

SEQ ID NO: 3884552 - RNA, 22 nt, Human
ccuggccucagacugcacccag

SEQ ID NO: 3884553 - RNA, 11 nt, Human
ccuggccucca

SEQ ID NO: 3884554 - RNA, 19 nt, Human
ccuggccuccaggcccguc

SEQ ID NO: 3884555 - RNA, 14 nt, Human
ccuggccuccccca

SEQ ID NO: 3884556 - RNA, 17 nt, Human
ccuggccucccccacuu

SEQ ID NO: 3884557 - RNA, 18 nt, Human
ccuggccuccccugccac

SEQ ID NO: 3884558 - RNA, 23 nt, Human
ccuggccuccggcgucagccucc

SEQ ID NO: 3884559 - RNA, 13 nt, Human
ccuggccuccugc

SEQ ID NO: 3884560 - RNA, 15 nt, Human
ccuggccuccugccu

SEQ ID NO: 3884561 - RNA, 21 nt, Human
ccuggccuccugccucuacug

SEQ ID NO: 3884562 - RNA, 14 nt, Human
ccuggccucugcac

SEQ ID NO: 3884563 - RNA, 15 nt, Human
ccuggccucugcacu

SEQ ID NO: 3884564 - RNA, 21 nt, Human
ccuggccucugcacuccccug

SEQ ID NO: 3884565 - RNA, 22 nt, Human
ccuggccucugcacuccccugc

SEQ ID NO: 3884566 - RNA, 15 nt, Human
ccuggccugagcugg

SEQ ID NO: 3884567 - RNA, 20 nt, Human
ccuggccugagcugggauga

SEQ ID NO: 3884568 - RNA, 12 nt, Human
ccuggccugcug

SEQ ID NO: 3884569 - RNA, 16 nt, Human
ccuggccuggcacaca

SEQ ID NO: 3884570 - RNA, 19 nt, Human
ccuggccuggcacacauca

SEQ ID NO: 3884571 - RNA, 14 nt, Human
ccuggccuggcccu

SEQ ID NO: 3884572 - RNA, 22 nt, Human
ccuggccuuguccucagccagu

SEQ ID NO: 3884573 - RNA, 20 nt, Human
ccuggcgacugccccugccu

SEQ ID NO: 3884574 - RNA, 22 nt, Human
ccuggcgcaggugggcuggacu

SEQ ID NO: 3884575 - RNA, 18 nt, Human
ccuggcggccccaacucg

SEQ ID NO: 3884576 - RNA, 13 nt, Human
ccuggcgggaugg

SEQ ID NO: 3884577 - RNA, 22 nt, Human
ccuggcuaauaaggcuuuagug

SEQ ID NO: 3884578 - RNA, 17 nt, Human
ccuggcucagagccagu

SEQ ID NO: 3884579 - RNA, 22 nt, Human
ccuggcuccaaacccucgaggc

SEQ ID NO: 3884580 - RNA, 15 nt, Human
ccuggcuccaggcca

SEQ ID NO: 3884581 - RNA, 16 nt, Human
ccuggcuccaggccag

SEQ ID NO: 3884582 - RNA, 17 nt, Human
ccuggcuccaggccagg

SEQ ID NO: 3884583 - RNA, 18 nt, Human
ccuggcucccacaggcag

SEQ ID NO: 3884584 - RNA, 19 nt, Human
ccuggcucccacaggcagc

SEQ ID NO: 3884585 - RNA, 17 nt, Human
ccuggcucccacaggcc

SEQ ID NO: 3884586 - RNA, 15 nt, Human
ccuggcucccaggac

SEQ ID NO: 3884587 - RNA, 14 nt, Human
ccuggcucccauga

SEQ ID NO: 3884588 - RNA, 21 nt, Human
ccuggcucccaugaccauacu

SEQ ID NO: 3884589 - RNA, 14 nt, Human
ccuggcucccucac

SEQ ID NO: 3884590 - RNA, 12 nt, Human
ccuggcuccgcu

SEQ ID NO: 3884591 - RNA, 20 nt, Human
ccuggcuccuugugccagag

SEQ ID NO: 3884592 - RNA, 14 nt, Human
ccuggcucucaccu

SEQ ID NO: 3884593 - RNA, 15 nt, Human
ccuggcucucaccuc

SEQ ID NO: 3884594 - RNA, 21 nt, Human
ccuggcucucaccucuagguc

SEQ ID NO: 3884595 - RNA, 15 nt, Human
ccuggcucugcuguc

SEQ ID NO: 3884596 - RNA, 12 nt, Human
ccuggcucugug

SEQ ID NO: 3884597 - RNA, 20 nt, Human
ccuggcucuguggcuugcua

SEQ ID NO: 3884598 - RNA, 20 nt, Human
ccuggcucuugugcuggaug

SEQ ID NO: 3884599 - RNA, 14 nt, Human
ccuggcugaaggac

SEQ ID NO: 3884600 - RNA, 16 nt, Human
ccuggcugagguuccu

SEQ ID NO: 3884601 - RNA, 12 nt, Human
ccuggcugcccu

SEQ ID NO: 3884602 - RNA, 13 nt, Human
ccuggcugcccug

SEQ ID NO: 3884603 - RNA, 18 nt, Human
ccuggcugcccuggcccu

SEQ ID NO: 3884604 - RNA, 20 nt, Human
ccuggcugcccuggcccuga

SEQ ID NO: 3884605 - RNA, 22 nt, Human
ccuggcugcggggcgggcacac

SEQ ID NO: 3884606 - RNA, 20 nt, Human
ccuggcugcugaucgccuuc

SEQ ID NO: 3884607 - RNA, 14 nt, Human
ccuggcugcugccc

SEQ ID NO: 3884608 - RNA, 16 nt, Human
ccuggcugcugccccc

SEQ ID NO: 3884609 - RNA, 17 nt, Human
ccuggcugcugccccca

SEQ ID NO: 3884610 - RNA, 21 nt, Human
ccuggcuggagaauguggaga

SEQ ID NO: 3884611 - RNA, 19 nt, Human
ccuggcuggcugagggcag

SEQ ID NO: 3884612 - RNA, 24 nt, Human
ccuggcugggacguggcucagcca

SEQ ID NO: 3884613 - RNA, 18 nt, Human
ccuggcugggacugggaa

SEQ ID NO: 3884614 - RNA, 22 nt, Human
ccuggcugguaagggccaaguc

SEQ ID NO: 3884615 - RNA, 13 nt, Human
ccuggcuguacug

SEQ ID NO: 3884616 - RNA, 13 nt, Human
ccuggcuucuccu

SEQ ID NO: 3884617 - RNA, 15 nt, Human
ccuggcuucuggagc

SEQ ID NO: 3884618 - RNA, 22 nt, Human
ccuggcuucuggagcccuuggg

SEQ ID NO: 3884619 - RNA, 18 nt, Human
ccuggcuuguaacuccac

SEQ ID NO: 3884620 - RNA, 16 nt, Human
ccuggcuuguuuauuu

SEQ ID NO: 3884621 - RNA, 21 nt, Human
ccuggcuuucauuuucucuca

SEQ ID NO: 3884622 - RNA, 16 nt, Human
ccuggcuuugcccaac

SEQ ID NO: 3884623 - RNA, 17 nt, Human
ccuggcuuugcccaacc

SEQ ID NO: 3884624 - RNA, 21 nt, Human
ccuggcuuuucacugcuggcu

SEQ ID NO: 3884625 - RNA, 22 nt, Human
ccuggcuuuucacugcuggcug

SEQ ID NO: 3884626 - RNA, 24 nt, Human
ccuggcuuuucacugcuggcugcc

SEQ ID NO: 3884627 - RNA, 18 nt, Human
ccugggaaauauucccua

SEQ ID NO: 3884628 - RNA, 22 nt, Human
ccugggaaggccucuuggagac

SEQ ID NO: 3884629 - RNA, 14 nt, Human
ccugggaauguauu

SEQ ID NO: 3884630 - RNA, 18 nt, Human
ccugggacaacugcuccc

SEQ ID NO: 3884631 - RNA, 19 nt, Human
ccugggacaacugcuccca

SEQ ID NO: 3884632 - RNA, 23 nt, Human
ccugggacaacugcucccaccuc

SEQ ID NO: 3884633 - RNA, 23 nt, Human
ccugggaccgcuacaccacucug

SEQ ID NO: 3884634 - RNA, 19 nt, Human
ccugggaccuccccugagg

SEQ ID NO: 3884635 - RNA, 22 nt, Human
ccugggagaaucgcuccugcag

SEQ ID NO: 3884636 - RNA, 14 nt, Human
ccugggagacagac

SEQ ID NO: 3884637 - RNA, 12 nt, Human
ccugggaggaga

SEQ ID NO: 3884638 - RNA, 16 nt, Human
ccugggaggcacagca

SEQ ID NO: 3884639 - RNA, 14 nt, Human
ccugggaggcggag

SEQ ID NO: 3884640 - RNA, 18 nt, Human
ccugggaguggguggagg

SEQ ID NO: 3884641 - RNA, 18 nt, Human
ccugggauaggggcagag

SEQ ID NO: 3884642 - RNA, 23 nt, Human
ccugggauaggggcagaggaggc

SEQ ID NO: 3884643 - RNA, 13 nt, Human
ccugggcaaagcc

SEQ ID NO: 3884644 - RNA, 18 nt, Human
ccugggcacacgcugcuc

SEQ ID NO: 3884645 - RNA, 19 nt, Human
ccugggcacacgcugcucu

SEQ ID NO: 3884646 - RNA, 17 nt, Human
ccugggcaccuggggag

SEQ ID NO: 3884647 - RNA, 13 nt, Human
ccugggcagaaag

SEQ ID NO: 3884648 - RNA, 14 nt, Human
ccugggcagaagga

SEQ ID NO: 3884649 - RNA, 17 nt, Human
ccugggcagccaggcug

SEQ ID NO: 3884650 - RNA, 23 nt, Human
ccugggcagccaggcugccaagg

SEQ ID NO: 3884651 - RNA, 13 nt, Human
ccugggcagcugc

SEQ ID NO: 3884652 - RNA, 16 nt, Human
ccugggcagcugccuc

SEQ ID NO: 3884653 - RNA, 17 nt, Human
ccugggcagcugccucc

SEQ ID NO: 3884654 - RNA, 20 nt, Human
ccugggcagcugccuccccu

SEQ ID NO: 3884655 - RNA, 22 nt, Human
ccugggcagcugccuccccucc

SEQ ID NO: 3884656 - RNA, 14 nt, Human
ccugggcaggaggg

SEQ ID NO: 3884657 - RNA, 14 nt, Human
ccugggcauugcuu

SEQ ID NO: 3884658 - RNA, 23 nt, Human
ccugggccacagggcgagacucc

SEQ ID NO: 3884659 - RNA, 17 nt, Human
ccugggcccaucucccu

SEQ ID NO: 3884660 - RNA, 18 nt, Human
ccugggcccaucucccug

SEQ ID NO: 3884661 - RNA, 20 nt, Human
ccugggcccaucucccugcu

SEQ ID NO: 3884662 - RNA, 22 nt, Human
ccugggcccaucucccugcuuu

SEQ ID NO: 3884663 - RNA, 15 nt, Human
ccugggccccaccac

SEQ ID NO: 3884664 - RNA, 23 nt, Human
ccugggccccaccaccuaggcca

SEQ ID NO: 3884665 - RNA, 22 nt, Human
ccugggccccucaucugcucag

SEQ ID NO: 3884666 - RNA, 19 nt, Human
ccugggccccucccuaccu

SEQ ID NO: 3884667 - RNA, 22 nt, Human
ccugggccccucccuaccucaa

SEQ ID NO: 3884668 - RNA, 14 nt, Human
ccugggcccucucu

SEQ ID NO: 3884669 - RNA, 15 nt, Human
ccugggcccucucug

SEQ ID NO: 3884670 - RNA, 14 nt, Human
ccugggcccugggc

SEQ ID NO: 3884671 - RNA, 15 nt, Human
ccugggcccugggcu

SEQ ID NO: 3884672 - RNA, 18 nt, Human
ccugggcccugggcugga

SEQ ID NO: 3884673 - RNA, 15 nt, Human
ccugggcccuggggc

SEQ ID NO: 3884674 - RNA, 22 nt, Human
ccugggcccuggggccuguacu

SEQ ID NO: 3884675 - RNA, 16 nt, Human
ccugggccgcugccac

SEQ ID NO: 3884676 - RNA, 18 nt, Human
ccugggccuauggagagc

SEQ ID NO: 3884677 - RNA, 22 nt, Human
ccugggccuauggagagcccug

SEQ ID NO: 3884678 - RNA, 23 nt, Human
ccugggccuauggagagcccugg

SEQ ID NO: 3884679 - RNA, 17 nt, Human
ccugggccugcugcuga

SEQ ID NO: 3884680 - RNA, 12 nt, Human
ccugggccuggc

SEQ ID NO: 3884681 - RNA, 17 nt, Human
ccugggccuugggcucc

SEQ ID NO: 3884682 - RNA, 18 nt, Human
ccugggccuugggcuccg

SEQ ID NO: 3884683 - RNA, 17 nt, Human
ccugggcgcccuggaag

SEQ ID NO: 3884684 - RNA, 24 nt, Human
ccugggcucugccccagcucuggc

SEQ ID NO: 3884685 - RNA, 18 nt, Human
ccugggcucugggagcag

SEQ ID NO: 3884686 - RNA, 12 nt, Human
ccugggcucugu

SEQ ID NO: 3884687 - RNA, 22 nt, Human
ccugggcucugugggcugcacu

SEQ ID NO: 3884688 - RNA, 13 nt, Human
ccugggcugggaa

SEQ ID NO: 3884689 - RNA, 13 nt, Human
ccugggcugugcu

SEQ ID NO: 3884690 - RNA, 20 nt, Human
ccugggcuguuggcacucac

SEQ ID NO: 3884691 - RNA, 22 nt, Human
ccugggcuguuggcacucacag

SEQ ID NO: 3884692 - RNA, 19 nt, Human
ccugggcuuggccugcugu

SEQ ID NO: 3884693 - RNA, 22 nt, Human
ccugggcuuuuguuuugcuuuu

SEQ ID NO: 3884694 - RNA, 13 nt, Human
ccuggggaaggag

SEQ ID NO: 3884695 - RNA, 15 nt, Human
ccugugccugacccu

SEQ ID NO: 3884696 - RNA, 19 nt, Human
ccugugcuacuuugccuuu

SEQ ID NO: 3884697 - RNA, 15 nt, Human
ccugugcucagcccu

SEQ ID NO: 3884698 - RNA, 16 nt, Human
ccugugcucagcccug

SEQ ID NO: 3884699 - RNA, 17 nt, Human
ccugugcuccgugccuc

SEQ ID NO: 3884700 - RNA, 19 nt, Human
ccugugcuccgugccucca

SEQ ID NO: 3884701 - RNA, 21 nt, Human
ccugugcugcccgucuucagc

SEQ ID NO: 3884702 - RNA, 12 nt, Human
ccugugcuggug

SEQ ID NO: 3884703 - RNA, 17 nt, Human
ccugugcugguguccug

SEQ ID NO: 3884704 - RNA, 17 nt, Human
ccuguggaacccagcag

SEQ ID NO: 3884705 - RNA, 22 nt, Human
ccuguggaacccagcaguucug

SEQ ID NO: 3884706 - RNA, 19 nt, Human
ccuguggaaggcagagaaa

SEQ ID NO: 3884707 - RNA, 24 nt, Human
ccuguggaagggacuaggagcacu

SEQ ID NO: 3884708 - RNA, 19 nt, Human
ccuguggaaucuggaguga

SEQ ID NO: 3884709 - RNA, 16 nt, Human
ccuguggagcucagcc

SEQ ID NO: 3884710 - RNA, 17 nt, Human
ccuguggagcucagccc

SEQ ID NO: 3884711 - RNA, 12 nt, Human
ccuguggauauu

SEQ ID NO: 3884712 - RNA, 19 nt, Human
ccuguggcaggcagcgcca

SEQ ID NO: 3884713 - RNA, 18 nt, Human
ccuguggcaguaaagaga

SEQ ID NO: 3884714 - RNA, 18 nt, Human
ccuguggcauaaauugca

SEQ ID NO: 3884715 - RNA, 17 nt, Human
ccuguggccaugacccu

SEQ ID NO: 3884716 - RNA, 22 nt, Human
ccuguggccaugacccugccuc

SEQ ID NO: 3884717 - RNA, 23 nt, Human
ccuguggccaugacccugccucu

SEQ ID NO: 3884718 - RNA, 15 nt, Human
ccuguggccccaccc

SEQ ID NO: 3884719 - RNA, 18 nt, Human
ccuguggccccacccugg

SEQ ID NO: 3884720 - RNA, 20 nt, Human
ccuguggccccacccugggc

SEQ ID NO: 3884721 - RNA, 13 nt, Human
ccuguggcccugu

SEQ ID NO: 3884722 - RNA, 22 nt, Human
ccuguggcccuguccugccaug

SEQ ID NO: 3884723 - RNA, 15 nt, Human
ccuguggccugccag

SEQ ID NO: 3884724 - RNA, 16 nt, Human
ccuguggccugccagu

SEQ ID NO: 3884725 - RNA, 15 nt, Human
ccuguggccuguguc

SEQ ID NO: 3884726 - RNA, 18 nt, Human
ccuguggcggugccuggg

SEQ ID NO: 3884727 - RNA, 19 nt, Human
ccuguggcggugccugggu

SEQ ID NO: 3884728 - RNA, 23 nt, Human
ccuguggcucuacaacugagucc

SEQ ID NO: 3884729 - RNA, 19 nt, Human
ccugugggaccccaggccc

SEQ ID NO: 3884730 - RNA, 14 nt, Human
ccugugggagccug

SEQ ID NO: 3884731 - RNA, 15 nt, Human
ccugugggagccugc

SEQ ID NO: 3884732 - RNA, 22 nt, Human
ccuguggggaucucaggggcug

SEQ ID NO: 3884733 - RNA, 22 nt, Human
ccugugggggaagagcacagcc

SEQ ID NO: 3884734 - RNA, 16 nt, Human
ccuguggucacugacu

SEQ ID NO: 3884735 - RNA, 12 nt, Human
ccuguggugcaa

SEQ ID NO: 3884736 - RNA, 20 nt, Human
ccugugguuuccaaggagcu

SEQ ID NO: 3884737 - RNA, 13 nt, Human
ccuguguaacagc

SEQ ID NO: 3884738 - RNA, 15 nt, Human
ccuguguaacagcuc

SEQ ID NO: 3884739 - RNA, 15 nt, Human
ccuguguagcuguga

SEQ ID NO: 3884740 - RNA, 19 nt, Human
ccuguguagcugugaccug

SEQ ID NO: 3884741 - RNA, 22 nt, Human
ccuguguagcugugaccugcug

SEQ ID NO: 3884742 - RNA, 23 nt, Human
ccuguguagcugugaccugcuga

SEQ ID NO: 3884743 - RNA, 14 nt, Human
ccuguguauggaaa

SEQ ID NO: 3884744 - RNA, 20 nt, Human
ccuguguauggaaaaaccau

SEQ ID NO: 3884745 - RNA, 21 nt, Human
ccugugucaauccagauggug

SEQ ID NO: 3884746 - RNA, 22 nt, Human
ccugugucaguuuauguuuugg

SEQ ID NO: 3884747 - RNA, 19 nt, Human
ccuguguccaugcgcucag

SEQ ID NO: 3884748 - RNA, 21 nt, Human
ccuguguccaugugaucucau

SEQ ID NO: 3884749 - RNA, 13 nt, Human
ccugugucccaug

SEQ ID NO: 3884750 - RNA, 14 nt, Human
ccugugucccauga

SEQ ID NO: 3884751 - RNA, 19 nt, Human
ccugugucccaugacccac

SEQ ID NO: 3884752 - RNA, 21 nt, Human
ccugugucccaugacccaccc

SEQ ID NO: 3884753 - RNA, 22 nt, Human
ccugugucccaugacccacccc

SEQ ID NO: 3884754 - RNA, 23 nt, Human
ccugugucugcgaaguccuaugg

SEQ ID NO: 3884755 - RNA, 23 nt, Human
ccugugucuucuccaccacgcug

SEQ ID NO: 3884756 - RNA, 18 nt, Human
ccugugugauugacagcu

SEQ ID NO: 3884757 - RNA, 15 nt, Human
ccugugugcuugguc

SEQ ID NO: 3884758 - RNA, 15 nt, Human
ccuguguggagaggg

SEQ ID NO: 3884759 - RNA, 21 nt, Human
ccuguguggagagggaaugug

SEQ ID NO: 3884760 - RNA, 22 nt, Human
ccuguguggagagggaauguga

SEQ ID NO: 3884761 - RNA, 20 nt, Human
ccuguguggccacuucuguc

SEQ ID NO: 3884762 - RNA, 19 nt, Human
ccugugugguacucugaaa

SEQ ID NO: 3884763 - RNA, 19 nt, Human
ccuguguguacucugucca

SEQ ID NO: 3884764 - RNA, 21 nt, Human
ccuguguguccaaaacugccu

SEQ ID NO: 3884765 - RNA, 20 nt, Human
ccuguguguuaagcucugcu

SEQ ID NO: 3884766 - RNA, 13 nt, Human
ccuguguuaauuu

SEQ ID NO: 3884767 - RNA, 23 nt, Human
ccuguguuaauuuaaguuuugac

SEQ ID NO: 3884768 - RNA, 19 nt, Human
ccuguguucuuccuggccg

SEQ ID NO: 3884769 - RNA, 13 nt, Human
ccuguguuucuag

SEQ ID NO: 3884770 - RNA, 18 nt, Human
ccuguguuucuugccuca

SEQ ID NO: 3884771 - RNA, 20 nt, Human
ccuguuaauguauuuguuca

SEQ ID NO: 3884772 - RNA, 21 nt, Human
ccuguuaccuaauuagagcag

SEQ ID NO: 3884773 - RNA, 23 nt, Human
ccuguuaccuaauuagagcagau

SEQ ID NO: 3884774 - RNA, 18 nt, Human
ccuguuaccuacuuugac

SEQ ID NO: 3884775 - RNA, 22 nt, Human
ccuguuacuugaaauaccagug

SEQ ID NO: 3884776 - RNA, 23 nt, Human
ccuguuagcuccucacuguggua

SEQ ID NO: 3884777 - RNA, 19 nt, Human
ccuguuauuuucaaguagc

SEQ ID NO: 3884778 - RNA, 15 nt, Human
ccuguucagcauucu

SEQ ID NO: 3884779 - RNA, 13 nt, Human
ccuguucagcucc

SEQ ID NO: 3884780 - RNA, 12 nt, Human
ccuguucccauu

SEQ ID NO: 3884781 - RNA, 13 nt, Human
ccuguuccccaga

SEQ ID NO: 3884782 - RNA, 23 nt, Human
ccuguuccccagagaaaggggag

SEQ ID NO: 3884783 - RNA, 22 nt, Human
ccuguucccccgccgcuuuucu

SEQ ID NO: 3884784 - RNA, 14 nt, Human
ccuguuccccucuc

SEQ ID NO: 3884785 - RNA, 15 nt, Human
ccuguuccccucucc

SEQ ID NO: 3884786 - RNA, 18 nt, Human
ccuguuccccucucccuu

SEQ ID NO: 3884787 - RNA, 15 nt, Human
ccuguuccugcugcu

SEQ ID NO: 3884788 - RNA, 13 nt, Human
ccuguucugaacu

SEQ ID NO: 3884789 - RNA, 12 nt, Human
ccuguucuggca

SEQ ID NO: 3884790 - RNA, 24 nt, Human
ccuguucuuccuccagcugcacca

SEQ ID NO: 3884791 - RNA, 22 nt, Human
ccuguugaauuuuguucucugg

SEQ ID NO: 3884792 - RNA, 19 nt, Human
ccuguugacacaggucuuu

SEQ ID NO: 3884793 - RNA, 23 nt, Human
ccuguugauuaauuucugccauu

SEQ ID NO: 3884794 - RNA, 15 nt, Human
ccuguugcacccagc

SEQ ID NO: 3884795 - RNA, 18 nt, Human
ccuguugcacccagcccu

SEQ ID NO: 3884796 - RNA, 21 nt, Human
ccuguugcacccagcccuggu

SEQ ID NO: 3884797 - RNA, 23 nt, Human
ccuguugcacccagcccuggucu

SEQ ID NO: 3884798 - RNA, 22 nt, Human
ccuguugcccuuucuguaccau

SEQ ID NO: 3884799 - RNA, 21 nt, Human
ccuguugcgugacacucuccu

SEQ ID NO: 3884800 - RNA, 17 nt, Human
ccuguugcuuacaauuu

SEQ ID NO: 3884801 - RNA, 20 nt, Human
ccuguuggacccgcucugga

SEQ ID NO: 3884802 - RNA, 17 nt, Human
ccuguuggauuuguuua

SEQ ID NO: 3884803 - RNA, 24 nt, Human
ccuguuggauuuguuuaaaaggau

SEQ ID NO: 3884804 - RNA, 18 nt, Human
ccuguugggccaggagcc

SEQ ID NO: 3884805 - RNA, 19 nt, Human
ccuguugggccaggagccu

SEQ ID NO: 3884806 - RNA, 22 nt, Human
ccuguugguuccaagcccugga

SEQ ID NO: 3884807 - RNA, 13 nt, Human
ccuguugugccac

SEQ ID NO: 3884808 - RNA, 14 nt, Human
ccuguuuaaauauu

SEQ ID NO: 3884809 - RNA, 12 nt, Human
ccuguuuccuga

SEQ ID NO: 3884810 - RNA, 15 nt, Human
ccuguuucugaaaag

SEQ ID NO: 3884811 - RNA, 17 nt, Human
ccuguuucugaaaagaa

SEQ ID NO: 3884812 - RNA, 16 nt, Human
ccuguuucugcagcca

SEQ ID NO: 3884813 - RNA, 14 nt, Human
ccuguuucuggcac

SEQ ID NO: 3884814 - RNA, 23 nt, Human
ccuguuugaagccugcccuuguc

SEQ ID NO: 3884815 - RNA, 20 nt, Human
ccuguuuggccucucuaucc

SEQ ID NO: 3884816 - RNA, 19 nt, Human
ccuguuuuauacuguacuu

SEQ ID NO: 3884817 - RNA, 13 nt, Human
ccuguuuuccccc

SEQ ID NO: 3884818 - RNA, 15 nt, Human
ccuguuuucugagcc

SEQ ID NO: 3884819 - RNA, 16 nt, Human
ccuguuuucugagccc

SEQ ID NO: 3884820 - RNA, 16 nt, Human
ccuguuuuguacauag

SEQ ID NO: 3884821 - RNA, 14 nt, Human
ccuguuuuuauuau

SEQ ID NO: 3884822 - RNA, 15 nt, Human
ccuguuuuuauuauu

SEQ ID NO: 3884823 - RNA, 13 nt, Human
ccuguuuuucaca

SEQ ID NO: 3884824 - RNA, 16 nt, Human
ccuguuuuuguuaacu

SEQ ID NO: 3884825 - RNA, 23 nt, Human
ccuguuuuuguuucuuguuuuga

SEQ ID NO: 3884826 - RNA, 14 nt, Human
ccuguuuuuuuucu

SEQ ID NO: 3884827 - RNA, 17 nt, Human
ccuguuuuuuuucuuuu

SEQ ID NO: 3884828 - RNA, 23 nt, Human
ccuuaaaacuuuaaucccacuug

SEQ ID NO: 3884829 - RNA, 12 nt, Human
ccuuaaaaugga

SEQ ID NO: 3884830 - RNA, 23 nt, Human
ccuuaaagaaagucgaauuaaua

SEQ ID NO: 3884831 - RNA, 14 nt, Human
ccuuaaaggggaga

SEQ ID NO: 3884832 - RNA, 13 nt, Human
ccuuaaauuaaac

SEQ ID NO: 3884833 - RNA, 18 nt, Human
ccuuaaauuaaacaauuu

SEQ ID NO: 3884834 - RNA, 17 nt, Human
ccuuaagagucauccag

SEQ ID NO: 3884835 - RNA, 16 nt, Human
ccuuaagcccuggccc

SEQ ID NO: 3884836 - RNA, 18 nt, Human
ccuuaagcccuggccccc

SEQ ID NO: 3884837 - RNA, 15 nt, Human
ccuuaagcugcagga

SEQ ID NO: 3884838 - RNA, 13 nt, Human
ccuucucugaaca

SEQ ID NO: 3884839 - RNA, 19 nt, Human
ccuucucugaacacaggca

SEQ ID NO: 3884840 - RNA, 22 nt, Human
ccuucucugaacacaggcagcu

SEQ ID NO: 3884841 - RNA, 13 nt, Human
ccuucucugccca

SEQ ID NO: 3884842 - RNA, 14 nt, Human
ccuucucugcucca

SEQ ID NO: 3884843 - RNA, 17 nt, Human
ccuucucugcuccacca

SEQ ID NO: 3884844 - RNA, 17 nt, Human
ccuucucugucucaugu

SEQ ID NO: 3884845 - RNA, 18 nt, Human
ccuucucuguucauuucc

SEQ ID NO: 3884846 - RNA, 19 nt, Human
ccuucucuguucauuuccu

SEQ ID NO: 3884847 - RNA, 14 nt, Human
ccuucucuuaauuu

SEQ ID NO: 3884848 - RNA, 16 nt, Human
ccuucugacccaugcu

SEQ ID NO: 3884849 - RNA, 18 nt, Human
ccuucugacggcccugca

SEQ ID NO: 3884850 - RNA, 20 nt, Human
ccuucugagcuggccucuca

SEQ ID NO: 3884851 - RNA, 16 nt, Human
ccuucugccugagcuu

SEQ ID NO: 3884852 - RNA, 17 nt, Human
ccuucugcucagcucug

SEQ ID NO: 3884853 - RNA, 20 nt, Human
ccuucugcuggauaaaauga

SEQ ID NO: 3884854 - RNA, 22 nt, Human
ccuucuggaauaaggagaauga

SEQ ID NO: 3884855 - RNA, 18 nt, Human
ccuucuggauucuuggcc

SEQ ID NO: 3884856 - RNA, 12 nt, Human
ccuucuggccuu

SEQ ID NO: 3884857 - RNA, 12 nt, Human
ccuucugggaaa

SEQ ID NO: 3884858 - RNA, 20 nt, Human
ccuucugggcaucuguucug

SEQ ID NO: 3884859 - RNA, 17 nt, Human
ccuucuguaguuuuauc

SEQ ID NO: 3884860 - RNA, 19 nt, Human
ccuucugucccucacagca

SEQ ID NO: 3884861 - RNA, 21 nt, Human
ccuucuguccuggugucacuu

SEQ ID NO: 3884862 - RNA, 13 nt, Human
ccuucugugccca

SEQ ID NO: 3884863 - RNA, 18 nt, Human
ccuucugugcccagcuca

SEQ ID NO: 3884864 - RNA, 19 nt, Human
ccuucugugcccagcucag

SEQ ID NO: 3884865 - RNA, 20 nt, Human
ccuucugugcccagcucagu

SEQ ID NO: 3884866 - RNA, 14 nt, Human
ccuucuguggggac

SEQ ID NO: 3884867 - RNA, 19 nt, Human
ccuucuuauucucacucca

SEQ ID NO: 3884868 - RNA, 14 nt, Human
ccuucuucacccag

SEQ ID NO: 3884869 - RNA, 17 nt, Human
ccuucuucacccagcua

SEQ ID NO: 3884870 - RNA, 14 nt, Human
ccuucuucauguuc

SEQ ID NO: 3884871 - RNA, 18 nt, Human
ccuucuuccaucccagga

SEQ ID NO: 3884872 - RNA, 19 nt, Human
ccuucuucuuuuugcuguu

SEQ ID NO: 3884873 - RNA, 20 nt, Human
ccuucuucuuuuugcuguug

SEQ ID NO: 3884874 - RNA, 22 nt, Human
ccuucuucuuuuugcuguuguu

SEQ ID NO: 3884875 - RNA, 19 nt, Human
ccuucuugcauccuuccua

SEQ ID NO: 3884876 - RNA, 16 nt, Human
ccuucuugccuucaga

SEQ ID NO: 3884877 - RNA, 21 nt, Human
ccuucuugcugcccugcccca

SEQ ID NO: 3884878 - RNA, 19 nt, Human
ccuucuuucuacccugcug

SEQ ID NO: 3884879 - RNA, 15 nt, Human
ccuucuuugaagaag

SEQ ID NO: 3884880 - RNA, 20 nt, Human
ccuucuuugauaauguuaaa

SEQ ID NO: 3884881 - RNA, 18 nt, Human
ccuucuuugcuugccucu

SEQ ID NO: 3884882 - RNA, 22 nt, Human
ccuucuuuuaugagcagaagga

SEQ ID NO: 3884883 - RNA, 24 nt, Human
ccuucuuuuaugagcagaaggaaa

SEQ ID NO: 3884884 - RNA, 14 nt, Human
ccuucuuuuucugg

SEQ ID NO: 3884885 - RNA, 15 nt, Human
ccuucuuuuucugga

SEQ ID NO: 3884886 - RNA, 15 nt, Human
ccuugaaaacacugu

SEQ ID NO: 3884887 - RNA, 20 nt, Human
ccuugaaaacuuuaugcuaa

SEQ ID NO: 3884888 - RNA, 16 nt, Human
ccuugaaccacuuccc

SEQ ID NO: 3884889 - RNA, 19 nt, Human
ccuugaaccacuucccuca

SEQ ID NO: 3884890 - RNA, 14 nt, Human
ccuugaacuccugg

SEQ ID NO: 3884891 - RNA, 14 nt, Human
ccuugaacugggua

SEQ ID NO: 3884892 - RNA, 17 nt, Human
ccuugaacuuugaccuc

SEQ ID NO: 3884893 - RNA, 17 nt, Human
ccuugaagaaccucuca

SEQ ID NO: 3884894 - RNA, 18 nt, Human
ccuugaagaacugcaggc

SEQ ID NO: 3884895 - RNA, 23 nt, Human
ccuugaagauaucuugaaaugaa

SEQ ID NO: 3884896 - RNA, 14 nt, Human
ccuugaagccacug

SEQ ID NO: 3884897 - RNA, 22 nt, Human
ccuugaagccacugaagcuggg

SEQ ID NO: 3884898 - RNA, 16 nt, Human
ccuugaaggagaauca

SEQ ID NO: 3884899 - RNA, 17 nt, Human
ccuugaaugaugccaug

SEQ ID NO: 3884900 - RNA, 15 nt, Human
ccuugaaugcugcca

SEQ ID NO: 3884901 - RNA, 17 nt, Human
ccuugaaugcugccagu

SEQ ID NO: 3884902 - RNA, 19 nt, Human
ccuugaaugcugccagugu

SEQ ID NO: 3884903 - RNA, 22 nt, Human
ccuugaaugcugccagugugga

SEQ ID NO: 3884904 - RNA, 12 nt, Human
ccuugaaugugg

SEQ ID NO: 3884905 - RNA, 15 nt, Human
ccuugacagggcaca

SEQ ID NO: 3884906 - RNA, 14 nt, Human
ccuugacaucaguu

SEQ ID NO: 3884907 - RNA, 12 nt, Human
ccuugaccaggc

SEQ ID NO: 3884908 - RNA, 15 nt, Human
ccuugaccaggccug

SEQ ID NO: 3884909 - RNA, 19 nt, Human
ccuugaccauucuccaccu

SEQ ID NO: 3884910 - RNA, 22 nt, Human
ccuugaccauucuccaccugcc

SEQ ID NO: 3884911 - RNA, 13 nt, Human
ccuugaccuuccu

SEQ ID NO: 3884912 - RNA, 16 nt, Human
ccuugaccuuuguaca

SEQ ID NO: 3884913 - RNA, 17 nt, Human
ccuugaccuuuguacag

SEQ ID NO: 3884914 - RNA, 21 nt, Human
ccuugaccuuuguacagccca

SEQ ID NO: 3884915 - RNA, 20 nt, Human
ccuugacgucaagucuccuu

SEQ ID NO: 3884916 - RNA, 21 nt, Human
ccuugacuguugauguacuga

SEQ ID NO: 3884917 - RNA, 20 nt, Human
ccuugacuuugaacuaauga

SEQ ID NO: 3884918 - RNA, 14 nt, Human
ccuugagaaaccuu

SEQ ID NO: 3884919 - RNA, 19 nt, Human
ccuugagaaaccuuauugu

SEQ ID NO: 3884920 - RNA, 18 nt, Human
ccuugagaccucagccau

SEQ ID NO: 3884921 - RNA, 19 nt, Human
ccuugagaccucagccaug

SEQ ID NO: 3884922 - RNA, 11 nt, Human
ccuugagcccu

SEQ ID NO: 3884923 - RNA, 18 nt, Human
ccuugagcccuccccagg

SEQ ID NO: 3884924 - RNA, 15 nt, Human
ccuugagcccuggcu

SEQ ID NO: 3884925 - RNA, 22 nt, Human
ccuugagcccuggcuguucugu

SEQ ID NO: 3884926 - RNA, 18 nt, Human
ccuugaggaaacaacagc

SEQ ID NO: 3884927 - RNA, 22 nt, Human
ccuugaggaggggcagguaaac

SEQ ID NO: 3884928 - RNA, 17 nt, Human
ccuugagggcaagagcc

SEQ ID NO: 3884929 - RNA, 13 nt, Human
ccuugagggcugc

SEQ ID NO: 3884930 - RNA, 22 nt, Human
ccuugaggggagccaggagggg

SEQ ID NO: 3884931 - RNA, 14 nt, Human
ccuugaggucucag

SEQ ID NO: 3884932 - RNA, 12 nt, Human
ccuugaggucuu

SEQ ID NO: 3884933 - RNA, 13 nt, Human
ccuugaggucuuu

SEQ ID NO: 3884934 - RNA, 23 nt, Human
ccuugaggucuuuugacaugugg

SEQ ID NO: 3884935 - RNA, 22 nt, Human
ccuugagugggguuaucucugu

SEQ ID NO: 3884936 - RNA, 16 nt, Human
ccuugauaauauauug

SEQ ID NO: 3884937 - RNA, 22 nt, Human
ccuugaugaaauaacacagcag

SEQ ID NO: 3884938 - RNA, 23 nt, Human
ccuugaugauugacaacacccau

SEQ ID NO: 3884939 - RNA, 14 nt, Human
ccuugaugcacaga

SEQ ID NO: 3884940 - RNA, 14 nt, Human
ccuugaugugccug

SEQ ID NO: 3884941 - RNA, 22 nt, Human
ccuugauuggaagggcuuuuca

SEQ ID NO: 3884942 - RNA, 18 nt, Human
ccuugauugguguugcca

SEQ ID NO: 3884943 - RNA, 13 nt, Human
ccuugauuucaaa

SEQ ID NO: 3884944 - RNA, 21 nt, Human
ccuugauuuuagccuucucug

SEQ ID NO: 3884945 - RNA, 17 nt, Human
ccuugcacacaucaucu

SEQ ID NO: 3884946 - RNA, 22 nt, Human
ccuugcacacuccccugcacug

SEQ ID NO: 3884947 - RNA, 18 nt, Human
ccuugcaccccucacucu

SEQ ID NO: 3884948 - RNA, 13 nt, Human
ccuugcaccugca

SEQ ID NO: 3884949 - RNA, 14 nt, Human
ccuugcagaacugc

SEQ ID NO: 3884950 - RNA, 18 nt, Human
ccuugcagaacugccauu

SEQ ID NO: 3884951 - RNA, 20 nt, Human
ccuugcagcacucacacagg

SEQ ID NO: 3884952 - RNA, 20 nt, Human
ccuugcaguucagcaccacc

SEQ ID NO: 3884953 - RNA, 23 nt, Human
ccuugcaguucagcaccacccua

SEQ ID NO: 3884954 - RNA, 17 nt, Human
ccuugccaccccacccu

SEQ ID NO: 3884955 - RNA, 19 nt, Human
ccuugccaccccacccucc

SEQ ID NO: 3884956 - RNA, 15 nt, Human
ccuugccacuuugca

SEQ ID NO: 3884957 - RNA, 13 nt, Human
ccuugccagacau

SEQ ID NO: 3884958 - RNA, 15 nt, Human
ccuugccagcugcug

SEQ ID NO: 3884959 - RNA, 24 nt, Human
ccuugccagcugcugagccgcaga

SEQ ID NO: 3884960 - RNA, 21 nt, Human
ccuugccaggguuucgagaag

SEQ ID NO: 3884961 - RNA, 19 nt, Human
ccuugccaggucccuuuca

SEQ ID NO: 3884962 - RNA, 17 nt, Human
ccuugcccacuccugcu

SEQ ID NO: 3884963 - RNA, 22 nt, Human
ccuugcccacuccugcucugcu

SEQ ID NO: 3884964 - RNA, 23 nt, Human
ccuugcccacuccugcucugcuc

SEQ ID NO: 3884965 - RNA, 12 nt, Human
ccuugcccagag

SEQ ID NO: 3884966 - RNA, 14 nt, Human
ccuugcccagagau

SEQ ID NO: 3884967 - RNA, 23 nt, Human
ccuugcccagagaugccuccacc

SEQ ID NO: 3884968 - RNA, 14 nt, Human
ccuugcccagccug

SEQ ID NO: 3884969 - RNA, 17 nt, Human
ccuugcccagggcucag

SEQ ID NO: 3884970 - RNA, 16 nt, Human
ccuugccccccuggcc

SEQ ID NO: 3884971 - RNA, 17 nt, Human
ccuugccccccuggccu

SEQ ID NO: 3884972 - RNA, 22 nt, Human
ccuugcccugaccucccagccc

SEQ ID NO: 3884973 - RNA, 18 nt, Human
ccuugcccuugcccugac

SEQ ID NO: 3884974 - RNA, 15 nt, Human
ccuugccucaaugcc

SEQ ID NO: 3884975 - RNA, 16 nt, Human
ccuugccucaaugcca

SEQ ID NO: 3884976 - RNA, 12 nt, Human
ccuugccucccc

SEQ ID NO: 3884977 - RNA, 14 nt, Human
ccuugccuccccau

SEQ ID NO: 3884978 - RNA, 14 nt, Human
ccuugccuccugug

SEQ ID NO: 3884979 - RNA, 23 nt, Human
ccuugccugaacauccuuccuuc

SEQ ID NO: 3884980 - RNA, 17 nt, Human
ccuugccugguacagua

SEQ ID NO: 3884981 - RNA, 20 nt, Human
ccuugccuuucgaggccuga

SEQ ID NO: 3884982 - RNA, 15 nt, Human
ggcugggggccucag

SEQ ID NO: 3884983 - RNA, 16 nt, Human
ggcugggggccucagu

SEQ ID NO: 3884984 - RNA, 17 nt, Human
ggcugggggccucagug

SEQ ID NO: 3884985 - RNA, 19 nt, Human
ggcugggggccucagugcc

SEQ ID NO: 3884986 - RNA, 16 nt, Human
ggcugggguggccugu

SEQ ID NO: 3884987 - RNA, 14 nt, Human
ggcugggucgcccu

SEQ ID NO: 3884988 - RNA, 17 nt, Human
ggcugggugcccacagc

SEQ ID NO: 3884989 - RNA, 21 nt, Human
ggcuggguucuacccaggugc

SEQ ID NO: 3884990 - RNA, 19 nt, Human
ggcugguaacaguucaugu

SEQ ID NO: 3884991 - RNA, 20 nt, Human
ggcugguacaacggaggccu

SEQ ID NO: 3884992 - RNA, 16 nt, Human
ggcugguaucucagaa

SEQ ID NO: 3884993 - RNA, 19 nt, Human
ggcugguauugguggcuuu

SEQ ID NO: 3884994 - RNA, 13 nt, Human
ggcuggucucaaa

SEQ ID NO: 3884995 - RNA, 10 nt, Human
ggcuggugcc

SEQ ID NO: 3884996 - RNA, 18 nt, Human
ggcuggugccagccuucc

SEQ ID NO: 3884997 - RNA, 19 nt, Human
ggcuggugcuguggccagg

SEQ ID NO: 3884998 - RNA, 14 nt, Human
ggcugguggcaagu

SEQ ID NO: 3884999 - RNA, 16 nt, Human
ggcuggugucaccuga

SEQ ID NO: 3885000 - RNA, 16 nt, Human
ggcuggugugguacag

SEQ ID NO: 3885001 - RNA, 23 nt, Human
ggcuggugugguacagagaagcc

SEQ ID NO: 3885002 - RNA, 21 nt, Human
ggcugguuuuguaagaugcug

SEQ ID NO: 3885003 - RNA, 17 nt, Human
ggcuguaacugccaggc

SEQ ID NO: 3885004 - RNA, 18 nt, Human
ggcuguaacugccaggcu

SEQ ID NO: 3885005 - RNA, 15 nt, Human
ggcuguacccaggaa

SEQ ID NO: 3885006 - RNA, 15 nt, Human
ggcuguagaaggaga

SEQ ID NO: 3885007 - RNA, 21 nt, Human
ggcuguaggacucgcagucag

SEQ ID NO: 3885008 - RNA, 20 nt, Human
ggcuguaucccaugagccuc

SEQ ID NO: 3885009 - RNA, 15 nt, Human
ggcugucaauuacag

SEQ ID NO: 3885010 - RNA, 16 nt, Human
ggcugucagcaggaag

SEQ ID NO: 3885011 - RNA, 15 nt, Human
ggcugucccggaggc

SEQ ID NO: 3885012 - RNA, 22 nt, Human
ggcuguccuguacauuguggga

SEQ ID NO: 3885013 - RNA, 13 nt, Human
ggcuguccuuucc

SEQ ID NO: 3885014 - RNA, 13 nt, Human
ggcugucggcgcu

SEQ ID NO: 3885015 - RNA, 14 nt, Human
ggcugucugaggcu

SEQ ID NO: 3885016 - RNA, 19 nt, Human
ggcugucuucucaggcucu

SEQ ID NO: 3885017 - RNA, 22 nt, Human
ggcugucuucucaggcucugcc

SEQ ID NO: 3885018 - RNA, 13 nt, Human
ggcugugaggccc

SEQ ID NO: 3885019 - RNA, 13 nt, Human
ggcugugccucug

SEQ ID NO: 3885020 - RNA, 13 nt, Human
ggcugugcucaga

SEQ ID NO: 3885021 - RNA, 14 nt, Human
ggcugugcucagag

SEQ ID NO: 3885022 - RNA, 15 nt, Human
ggcugugcucagaga

SEQ ID NO: 3885023 - RNA, 20 nt, Human
ggcugugcucccugguucug

SEQ ID NO: 3885024 - RNA, 12 nt, Human
ggcugugcuggg

SEQ ID NO: 3885025 - RNA, 17 nt, Human
ggcugugcuugaaggcc

SEQ ID NO: 3885026 - RNA, 20 nt, Human
ggcugugcuugaaggcccug

SEQ ID NO: 3885027 - RNA, 21 nt, Human
ggcugugcuugaaggcccugc

SEQ ID NO: 3885028 - RNA, 23 nt, Human
ggcugugcuugaaggcccugcug

SEQ ID NO: 3885029 - RNA, 17 nt, Human
ggcuguggaccauggag

SEQ ID NO: 3885030 - RNA, 23 nt, Human
ggcuguggagacaaugucugcag

SEQ ID NO: 3885031 - RNA, 21 nt, Human
ggcuguggcauccagaguccc

SEQ ID NO: 3885032 - RNA, 21 nt, Human
ggcugugggccucaaggacuu

SEQ ID NO: 3885033 - RNA, 18 nt, Human
ggcugugggcucccuucc

SEQ ID NO: 3885034 - RNA, 24 nt, Human
ggcugugguagggggugucucagg

SEQ ID NO: 3885035 - RNA, 22 nt, Human
ggcuguguaagauuuguuuuua

SEQ ID NO: 3885036 - RNA, 20 nt, Human
ggcuguguucuggugaggcc

SEQ ID NO: 3885037 - RNA, 18 nt, Human
ggcuguucugcacugaaa

SEQ ID NO: 3885038 - RNA, 21 nt, Human
ggcuguucugugguuccucug

SEQ ID NO: 3885039 - RNA, 17 nt, Human
ggcuguugaagucaccu

SEQ ID NO: 3885040 - RNA, 13 nt, Human
ggcuguugcaugg

SEQ ID NO: 3885041 - RNA, 23 nt, Human
ggcuguuggcacucacagaccug

SEQ ID NO: 3885042 - RNA, 17 nt, Human
ggcuguuggcagugagu

SEQ ID NO: 3885043 - RNA, 15 nt, Human
ggcuguuggcugggg

SEQ ID NO: 3885044 - RNA, 16 nt, Human
ggcuguuggcuggggg

SEQ ID NO: 3885045 - RNA, 13 nt, Human
ggcuuaauaaaaa

SEQ ID NO: 3885046 - RNA, 14 nt, Human
ggcuuaauaaaaau

SEQ ID NO: 3885047 - RNA, 14 nt, Human
ggcuuaaucauuuu

SEQ ID NO: 3885048 - RNA, 14 nt, Human
ggcuuaauguuuau

SEQ ID NO: 3885049 - RNA, 16 nt, Human
ggcuuaauguuuauuc

SEQ ID NO: 3885050 - RNA, 21 nt, Human
ggcuuaauuauugauguuuuc

SEQ ID NO: 3885051 - RNA, 17 nt, Human
ggcuuacacguggagga

SEQ ID NO: 3885052 - RNA, 16 nt, Human
ggcuuacggcccuggc

SEQ ID NO: 3885053 - RNA, 18 nt, Human
ggcuuagacccucaugcu

SEQ ID NO: 3885054 - RNA, 21 nt, Human
ggcuuagacuucgacucagga

SEQ ID NO: 3885055 - RNA, 15 nt, Human
ggcuuagucacugag

SEQ ID NO: 3885056 - RNA, 17 nt, Human
ggcuuauaauucuuuca

SEQ ID NO: 3885057 - RNA, 14 nt, Human
ggcuuauauucaac

SEQ ID NO: 3885058 - RNA, 16 nt, Human
ggcuuauauuugugua

SEQ ID NO: 3885059 - RNA, 17 nt, Human
ggcuuauuuuaauguga

SEQ ID NO: 3885060 - RNA, 22 nt, Human
ggcuucaaccuugagacagcuu

SEQ ID NO: 3885061 - RNA, 20 nt, Human
ggcuucacggaagagccuug

SEQ ID NO: 3885062 - RNA, 15 nt, Human
ggcuucacuccugcu

SEQ ID NO: 3885063 - RNA, 19 nt, Human
ggcuucacuguauaaauag

SEQ ID NO: 3885064 - RNA, 11 nt, Human
ggcuucagccu

SEQ ID NO: 3885065 - RNA, 16 nt, Human
ggcuucagcuccagcc

SEQ ID NO: 3885066 - RNA, 13 nt, Human
ggcuucaggucca

SEQ ID NO: 3885067 - RNA, 18 nt, Human
ggcuucagucucauauuu

SEQ ID NO: 3885068 - RNA, 19 nt, Human
ggcuucaguggcagcugcu

SEQ ID NO: 3885069 - RNA, 9 nt, Human
ggcuucaua

SEQ ID NO: 3885070 - RNA, 18 nt, Human
ggcuucauuagagcaggc

SEQ ID NO: 3885071 - RNA, 21 nt, Human
ggcuuccagaaaaccccagca

SEQ ID NO: 3885072 - RNA, 20 nt, Human
ggcuuccagagaguccucug

SEQ ID NO: 3885073 - RNA, 12 nt, Human
ggcuuccaggua

SEQ ID NO: 3885074 - RNA, 17 nt, Human
ggcuucccaguggcugc

SEQ ID NO: 3885075 - RNA, 22 nt, Human
ggcuucccaguggcugcugccc

SEQ ID NO: 3885076 - RNA, 18 nt, Human
ggcuucccauccccagcg

SEQ ID NO: 3885077 - RNA, 14 nt, Human
ggcuucccgcucag

SEQ ID NO: 3885078 - RNA, 12 nt, Human
ggcuuccuccuc

SEQ ID NO: 3885079 - RNA, 21 nt, Human
ggcuuccucuagaagccaagg

SEQ ID NO: 3885080 - RNA, 20 nt, Human
ggcuuccugaggggagacag

SEQ ID NO: 3885081 - RNA, 12 nt, Human
ggcuuccuggag

SEQ ID NO: 3885082 - RNA, 14 nt, Human
ggcuuccuggugcu

SEQ ID NO: 3885083 - RNA, 17 nt, Human
ggcuucggacaaaauau

SEQ ID NO: 3885084 - RNA, 21 nt, Human
ggcuucucauacguccaccau

SEQ ID NO: 3885085 - RNA, 17 nt, Human
ggcuucuccgccagccu

SEQ ID NO: 3885086 - RNA, 23 nt, Human
ggcuucuccgccagccuccucug

SEQ ID NO: 3885087 - RNA, 12 nt, Human
ggcuucucucuc

SEQ ID NO: 3885088 - RNA, 14 nt, Human
ggcuucucucugug

SEQ ID NO: 3885089 - RNA, 15 nt, Human
ggcuucucugaggaa

SEQ ID NO: 3885090 - RNA, 11 nt, Human
ggcuucugaug

SEQ ID NO: 3885091 - RNA, 19 nt, Human
ggcuucugaugaaucuugc

SEQ ID NO: 3885092 - RNA, 14 nt, Human
ggcuucugcacccu

SEQ ID NO: 3885093 - RNA, 21 nt, Human
ggcuucugcacccuccacccu

SEQ ID NO: 3885094 - RNA, 22 nt, Human
ggcuucugcacccuccacccug

SEQ ID NO: 3885095 - RNA, 20 nt, Human
ggcuucugcuggggccuggg

SEQ ID NO: 3885096 - RNA, 18 nt, Human
ggcuucuggagcccuugg

SEQ ID NO: 3885097 - RNA, 12 nt, Human
ggcuucuguggg

SEQ ID NO: 3885098 - RNA, 13 nt, Human
ggcuucugugggg

SEQ ID NO: 3885099 - RNA, 19 nt, Human
ggcuucuguggggccccuc

SEQ ID NO: 3885100 - RNA, 20 nt, Human
ggcuucuguuucuaguugag

SEQ ID NO: 3885101 - RNA, 18 nt, Human
ggcuucuuuucuuuguau

SEQ ID NO: 3885102 - RNA, 14 nt, Human
ggcuugaagcugug

SEQ ID NO: 3885103 - RNA, 17 nt, Human
ggcuugacucaggauuu

SEQ ID NO: 3885104 - RNA, 15 nt, Human
ggcuugcacucucuu

SEQ ID NO: 3885105 - RNA, 13 nt, Human
ggcuugccugcag

SEQ ID NO: 3885106 - RNA, 13 nt, Human
ggcuugcugagag

SEQ ID NO: 3885107 - RNA, 13 nt, Human
ggcuugcugcaga

SEQ ID NO: 3885108 - RNA, 11 nt, Human
ggcuugcugcc

SEQ ID NO: 3885109 - RNA, 12 nt, Human
ggcuuggcccug

SEQ ID NO: 3885110 - RNA, 13 nt, Human
ggcuuggcccugg

SEQ ID NO: 3885111 - RNA, 16 nt, Human
ggcuuggcccuggcag

SEQ ID NO: 3885112 - RNA, 17 nt, Human
ggcuuggccuaucuccu

SEQ ID NO: 3885113 - RNA, 14 nt, Human
ggcuugggaccgcc

SEQ ID NO: 3885114 - RNA, 16 nt, Human
ggcuugggccuaggcu

SEQ ID NO: 3885115 - RNA, 17 nt, Human
ggcuuggggaccagagc

SEQ ID NO: 3885116 - RNA, 18 nt, Human
ggcuuggggaccagagcu

SEQ ID NO: 3885117 - RNA, 21 nt, Human
ggcuuggggaccagagcugcc

SEQ ID NO: 3885118 - RNA, 21 nt, Human
ggcuugguggcucacgccugu

SEQ ID NO: 3885119 - RNA, 17 nt, Human
ggcuuguaacuccacca

SEQ ID NO: 3885120 - RNA, 15 nt, Human
ggcuugucagagcug

SEQ ID NO: 3885121 - RNA, 17 nt, Human
ggcuugucagagcuggg

SEQ ID NO: 3885122 - RNA, 14 nt, Human
ggcuuguggggccu

SEQ ID NO: 3885123 - RNA, 15 nt, Human
ggcuuguuuauuuug

SEQ ID NO: 3885124 - RNA, 14 nt, Human
ggcuuuauccucuu

SEQ ID NO: 3885125 - RNA, 17 nt, Human
ggcuuuauuuuuuugaa

SEQ ID NO: 3885126 - RNA, 12 nt, Human
ggcuuucagcuu

SEQ ID NO: 3885127 - RNA, 16 nt, Human
ggcuuucaugaggagg

SEQ ID NO: 3885128 - RNA, 21 nt, Human
gggcaggccaccuggcucuca

SEQ ID NO: 3885129 - RNA, 13 nt, Human
gggcaggcccugc

SEQ ID NO: 3885130 - RNA, 11 nt, Human
gggcagggagc

SEQ ID NO: 3885131 - RNA, 15 nt, Human
gggcagggagcuggg

SEQ ID NO: 3885132 - RNA, 20 nt, Human
gggcagggcaucuccugugc

SEQ ID NO: 3885133 - RNA, 14 nt, Human
gggcagggccgccc

SEQ ID NO: 3885134 - RNA, 22 nt, Human
gggcagggccgcccgggcccag

SEQ ID NO: 3885135 - RNA, 23 nt, Human
gggcagggccgcccgggcccaga

SEQ ID NO: 3885136 - RNA, 11 nt, Human
gggcagggcug

SEQ ID NO: 3885137 - RNA, 16 nt, Human
gggcagggcugugcuu

SEQ ID NO: 3885138 - RNA, 13 nt, Human
gggcaggggcugg

SEQ ID NO: 3885139 - RNA, 14 nt, Human
gggcagggugaccc

SEQ ID NO: 3885140 - RNA, 13 nt, Human
gggcaggugggag

SEQ ID NO: 3885141 - RNA, 14 nt, Human
gggcagguggggug

SEQ ID NO: 3885142 - RNA, 17 nt, Human
gggcagguugguggggg

SEQ ID NO: 3885143 - RNA, 20 nt, Human
gggcaguaccugagggucug

SEQ ID NO: 3885144 - RNA, 17 nt, Human
gggcagucauuauccag

SEQ ID NO: 3885145 - RNA, 17 nt, Human
gggcagucugagagagg

SEQ ID NO: 3885146 - RNA, 18 nt, Human
gggcagucugagagaggc

SEQ ID NO: 3885147 - RNA, 20 nt, Human
gggcagucugagagaggcca

SEQ ID NO: 3885148 - RNA, 19 nt, Human
gggcagugcuuggcccagg

SEQ ID NO: 3885149 - RNA, 20 nt, Human
gggcagugcuuggcccagga

SEQ ID NO: 3885150 - RNA, 22 nt, Human
gggcagugcuuggcccaggagu

SEQ ID NO: 3885151 - RNA, 23 nt, Human
gggcagugcuuggcccaggaguu

SEQ ID NO: 3885152 - RNA, 21 nt, Human
gggcagugggacccauagauc

SEQ ID NO: 3885153 - RNA, 22 nt, Human
gggcagugguaagcucuggcuu

SEQ ID NO: 3885154 - RNA, 16 nt, Human
gggcaguucgcagcca

SEQ ID NO: 3885155 - RNA, 19 nt, Human
gggcaguucgcagccaccc

SEQ ID NO: 3885156 - RNA, 21 nt, Human
gggcaguucgcagccacccug

SEQ ID NO: 3885157 - RNA, 22 nt, Human
gggcauagaugcaggugagccc

SEQ ID NO: 3885158 - RNA, 13 nt, Human
gggcaucaugcau

SEQ ID NO: 3885159 - RNA, 20 nt, Human
gggcauccauaccagcucgc

SEQ ID NO: 3885160 - RNA, 14 nt, Human
gggcaucuauggga

SEQ ID NO: 3885161 - RNA, 22 nt, Human
gggcaucucugggcuggaugag

SEQ ID NO: 3885162 - RNA, 17 nt, Human
gggcaucugccccuccc

SEQ ID NO: 3885163 - RNA, 19 nt, Human
gggcaucugccccuccccc

SEQ ID NO: 3885164 - RNA, 21 nt, Human
gggcaucuggccuggccagug

SEQ ID NO: 3885165 - RNA, 20 nt, Human
gggcaugagcauuggauaca

SEQ ID NO: 3885166 - RNA, 15 nt, Human
gggcauggccaggug

SEQ ID NO: 3885167 - RNA, 21 nt, Human
gggcauggggugggccucugg

SEQ ID NO: 3885168 - RNA, 19 nt, Human
gggcaugguauuugagaca

SEQ ID NO: 3885169 - RNA, 19 nt, Human
gggcauguauuggccugga

SEQ ID NO: 3885170 - RNA, 18 nt, Human
gggcauucucucuccaag

SEQ ID NO: 3885171 - RNA, 17 nt, Human
gggccaaacgcugagcc

SEQ ID NO: 3885172 - RNA, 22 nt, Human
gggccaacuugagggcccagag

SEQ ID NO: 3885173 - RNA, 17 nt, Human
gggccaagacuuggcaa

SEQ ID NO: 3885174 - RNA, 16 nt, Human
gggccaaggaccugag

SEQ ID NO: 3885175 - RNA, 15 nt, Human
gggccaagucccacc

SEQ ID NO: 3885176 - RNA, 21 nt, Human
gggccaauucaauacaaacaa

SEQ ID NO: 3885177 - RNA, 19 nt, Human
gggccacaugggaggcuca

SEQ ID NO: 3885178 - RNA, 20 nt, Human
gggccaccaggaucagccag

SEQ ID NO: 3885179 - RNA, 15 nt, Human
gggccaccuccccag

SEQ ID NO: 3885180 - RNA, 17 nt, Human
gggccacgcuccagcug

SEQ ID NO: 3885181 - RNA, 21 nt, Human
gggccacuccuuccugcccca

SEQ ID NO: 3885182 - RNA, 15 nt, Human
gggccacucugccuc

SEQ ID NO: 3885183 - RNA, 14 nt, Human
gggccagagccagg

SEQ ID NO: 3885184 - RNA, 15 nt, Human
gggccagagccaggg

SEQ ID NO: 3885185 - RNA, 13 nt, Human
gggccagauccag

SEQ ID NO: 3885186 - RNA, 17 nt, Human
gggccagauccagccug

SEQ ID NO: 3885187 - RNA, 19 nt, Human
gggccagauccagccuggg

SEQ ID NO: 3885188 - RNA, 12 nt, Human
gggccagccagg

SEQ ID NO: 3885189 - RNA, 15 nt, Human
gggccagccaggcgg

SEQ ID NO: 3885190 - RNA, 18 nt, Human
gggccagccaggcgggcu

SEQ ID NO: 3885191 - RNA, 12 nt, Human
gggccagccccu

SEQ ID NO: 3885192 - RNA, 12 nt, Human
gggccaggagcc

SEQ ID NO: 3885193 - RNA, 14 nt, Human
gggccaggcugggu

SEQ ID NO: 3885194 - RNA, 16 nt, Human
gggccagggcccugca

SEQ ID NO: 3885195 - RNA, 21 nt, Human
gggccagggcugcccugagaa

SEQ ID NO: 3885196 - RNA, 18 nt, Human
gggccagucccugaggca

SEQ ID NO: 3885197 - RNA, 21 nt, Human
gggccagucccugaggcaggu

SEQ ID NO: 3885198 - RNA, 15 nt, Human
gggccagucugggcu

SEQ ID NO: 3885199 - RNA, 23 nt, Human
gggccaguuggucccccuuccau

SEQ ID NO: 3885200 - RNA, 23 nt, Human
gggccaugcugaggccugggccg

SEQ ID NO: 3885201 - RNA, 15 nt, Human
gggccauguccaaag

SEQ ID NO: 3885202 - RNA, 16 nt, Human
gggccauguccaaaga

SEQ ID NO: 3885203 - RNA, 23 nt, Human
gggccauguccaaagaggcugcc

SEQ ID NO: 3885204 - RNA, 14 nt, Human
gggccauuugcaau

SEQ ID NO: 3885205 - RNA, 18 nt, Human
gggcccaagacagaugcc

SEQ ID NO: 3885206 - RNA, 18 nt, Human
gggcccaaggcggccccu

SEQ ID NO: 3885207 - RNA, 21 nt, Human
gggcccacccaagcaggaggc

SEQ ID NO: 3885208 - RNA, 13 nt, Human
gggcccaccuggc

SEQ ID NO: 3885209 - RNA, 14 nt, Human
gggcccaccuggcc

SEQ ID NO: 3885210 - RNA, 18 nt, Human
gggcccaccuggccaccu

SEQ ID NO: 3885211 - RNA, 15 nt, Human
gggcccagagcccag

SEQ ID NO: 3885212 - RNA, 12 nt, Human
gggcccagagga

SEQ ID NO: 3885213 - RNA, 11 nt, Human
gggcccagccc

SEQ ID NO: 3885214 - RNA, 13 nt, Human
gggcccagccccc

SEQ ID NO: 3885215 - RNA, 22 nt, Human
gggcccagcccccacagugcug

SEQ ID NO: 3885216 - RNA, 14 nt, Human
gggcccaggaccag

SEQ ID NO: 3885217 - RNA, 18 nt, Human
gggcccaggaccagcugg

SEQ ID NO: 3885218 - RNA, 19 nt, Human
gggcccaggaccagcuggg

SEQ ID NO: 3885219 - RNA, 13 nt, Human
gggcccaggaggg

SEQ ID NO: 3885220 - RNA, 14 nt, Human
gggcccaggcaaau

SEQ ID NO: 3885221 - RNA, 12 nt, Human
gggccccaccug

SEQ ID NO: 3885222 - RNA, 11 nt, Human
gggccccagcu

SEQ ID NO: 3885223 - RNA, 18 nt, Human
gggccccagucagccucu

SEQ ID NO: 3885224 - RNA, 19 nt, Human
gggccccagucagccucuc

SEQ ID NO: 3885225 - RNA, 15 nt, Human
gggccccccugcccu

SEQ ID NO: 3885226 - RNA, 17 nt, Human
gggccccccugcccugu

SEQ ID NO: 3885227 - RNA, 17 nt, Human
gggccccucacccugcc

SEQ ID NO: 3885228 - RNA, 21 nt, Human
gggccccucaucgcguccucc

SEQ ID NO: 3885229 - RNA, 10 nt, Human
gggccccucc

SEQ ID NO: 3885230 - RNA, 16 nt, Human
gggccccucucagccc

SEQ ID NO: 3885231 - RNA, 17 nt, Human
gggccccucucagcccu

SEQ ID NO: 3885232 - RNA, 13 nt, Human
gggccccugccag

SEQ ID NO: 3885233 - RNA, 22 nt, Human
gggccccugccucucugcaggu

SEQ ID NO: 3885234 - RNA, 21 nt, Human
gggccccugcuucuccagccu

SEQ ID NO: 3885235 - RNA, 22 nt, Human
gggcccgcgauguggaacugcu

SEQ ID NO: 3885236 - RNA, 13 nt, Human
gggcccgcuugcc

SEQ ID NO: 3885237 - RNA, 20 nt, Human
gggcccgcuugccucggcuc

SEQ ID NO: 3885238 - RNA, 23 nt, Human
gggcccggcccgcgccacaggac

SEQ ID NO: 3885239 - RNA, 20 nt, Human
gggcccguugucucccuggc

SEQ ID NO: 3885240 - RNA, 21 nt, Human
gggcccguugucucccuggcc

SEQ ID NO: 3885241 - RNA, 23 nt, Human
gggcccuccgacagcccccucug

SEQ ID NO: 3885242 - RNA, 16 nt, Human
gggcccucucugcucu

SEQ ID NO: 3885243 - RNA, 12 nt, Human
gggcccugagcu

SEQ ID NO: 3885244 - RNA, 12 nt, Human
gggcccugcaug

SEQ ID NO: 3885245 - RNA, 14 nt, Human
gggcccugcaugua

SEQ ID NO: 3885246 - RNA, 13 nt, Human
gggcccugccucc

SEQ ID NO: 3885247 - RNA, 18 nt, Human
gggcccugggccugccuc

SEQ ID NO: 3885248 - RNA, 13 nt, Human
gggcccugggcug

SEQ ID NO: 3885249 - RNA, 15 nt, Human
gggcccugggcugga

SEQ ID NO: 3885250 - RNA, 18 nt, Human
gggccgaauccccucccu

SEQ ID NO: 3885251 - RNA, 17 nt, Human
gggccgaugcccagaga

SEQ ID NO: 3885252 - RNA, 13 nt, Human
gggccgcaggcgg

SEQ ID NO: 3885253 - RNA, 23 nt, Human
gggccgcaggcgggaaaagcagc

SEQ ID NO: 3885254 - RNA, 14 nt, Human
gggccgccagggag

SEQ ID NO: 3885255 - RNA, 23 nt, Human
gggccgccagggagaccuggaca

SEQ ID NO: 3885256 - RNA, 17 nt, Human
gggccgccgccucuuuc

SEQ ID NO: 3885257 - RNA, 23 nt, Human
gggccgcguggugccauccccag

SEQ ID NO: 3885258 - RNA, 21 nt, Human
gggccgcuccgcuccccugcu

SEQ ID NO: 3885259 - RNA, 13 nt, Human
gggccgcugccac

SEQ ID NO: 3885260 - RNA, 21 nt, Human
gggccgcugccacccaccucc

SEQ ID NO: 3885261 - RNA, 15 nt, Human
gggccggccaggugg

SEQ ID NO: 3885262 - RNA, 21 nt, Human
gggccggccaggugggcgggc

SEQ ID NO: 3885263 - RNA, 12 nt, Human
gggccggcccug

SEQ ID NO: 3885264 - RNA, 16 nt, Human
gggccggggaacuggc

SEQ ID NO: 3885265 - RNA, 19 nt, Human
gggccggggaacuggccaa

SEQ ID NO: 3885266 - RNA, 17 nt, Human
gggccggggcuucugug

SEQ ID NO: 3885267 - RNA, 17 nt, Human
gggccgugcccaggggc

SEQ ID NO: 3885268 - RNA, 20 nt, Human
gggccuagauccacacacag

SEQ ID NO: 3885269 - RNA, 23 nt, Human
gggccuagauccacacacagagg

SEQ ID NO: 3885270 - RNA, 23 nt, Human
gggccuaucagugugccccccau

SEQ ID NO: 3885271 - RNA, 18 nt, Human
gggccuauggagagcccu

SEQ ID NO: 3885272 - RNA, 19 nt, Human
gggccuauggagagcccug

SEQ ID NO: 3885273 - RNA, 16 nt, Human
gggcuggaggagccca

SEQ ID NO: 3885274 - RNA, 18 nt, Human
gggcuggaggagcccagg

SEQ ID NO: 3885275 - RNA, 22 nt, Human
gggcuggaggagcccaggccag

SEQ ID NO: 3885276 - RNA, 23 nt, Human
gggcuggaggagcccaggccagg

SEQ ID NO: 3885277 - RNA, 14 nt, Human
gggcuggaggccca

SEQ ID NO: 3885278 - RNA, 17 nt, Human
gggcuggccaguuggaa

SEQ ID NO: 3885279 - RNA, 16 nt, Human
gggcuggcccagcccu

SEQ ID NO: 3885280 - RNA, 18 nt, Human
gggcuggccccagggcac

SEQ ID NO: 3885281 - RNA, 13 nt, Human
gggcuggcucccu

SEQ ID NO: 3885282 - RNA, 14 nt, Human
gggcuggcuccuga

SEQ ID NO: 3885283 - RNA, 16 nt, Human
gggcugggagcucugc

SEQ ID NO: 3885284 - RNA, 13 nt, Human
gggcugggcagcu

SEQ ID NO: 3885285 - RNA, 14 nt, Human
gggcugggcagcug

SEQ ID NO: 3885286 - RNA, 18 nt, Human
gggcugggcccucucuuc

SEQ ID NO: 3885287 - RNA, 11 nt, Human
gggcugggugu

SEQ ID NO: 3885288 - RNA, 20 nt, Human
gggcuggguucuacccaggu

SEQ ID NO: 3885289 - RNA, 22 nt, Human
gggcuggguucuacccaggugc

SEQ ID NO: 3885290 - RNA, 22 nt, Human
gggcuggguuggcgcacccucc

SEQ ID NO: 3885291 - RNA, 20 nt, Human
gggcuggugccagccuuccu

SEQ ID NO: 3885292 - RNA, 16 nt, Human
gggcuguaacugccag

SEQ ID NO: 3885293 - RNA, 22 nt, Human
gggcuguaacugccaggcucuc

SEQ ID NO: 3885294 - RNA, 16 nt, Human
gggcugucaucugugc

SEQ ID NO: 3885295 - RNA, 17 nt, Human
gggcugucaucugugca

SEQ ID NO: 3885296 - RNA, 24 nt, Human
gggcuguccacuagaccagugagc

SEQ ID NO: 3885297 - RNA, 12 nt, Human
gggcugugaucg

SEQ ID NO: 3885298 - RNA, 16 nt, Human
gggcuguuggcacuca

SEQ ID NO: 3885299 - RNA, 15 nt, Human
gggcuuaagaaaucu

SEQ ID NO: 3885300 - RNA, 17 nt, Human
gggcuucagggcaggug

SEQ ID NO: 3885301 - RNA, 18 nt, Human
gggcuucaguggcagcug

SEQ ID NO: 3885302 - RNA, 20 nt, Human
gggcuucaguggcagcugcu

SEQ ID NO: 3885303 - RNA, 20 nt, Human
gggcuucauccuccucagau

SEQ ID NO: 3885304 - RNA, 23 nt, Human
gggcuuccauuugugugugugca

SEQ ID NO: 3885305 - RNA, 16 nt, Human
gggcuucccaagggcu

SEQ ID NO: 3885306 - RNA, 16 nt, Human
gggcuucugcacccuc

SEQ ID NO: 3885307 - RNA, 17 nt, Human
gggcuucugcacccucc

SEQ ID NO: 3885308 - RNA, 21 nt, Human
gggcuucugcacccuccaccc

SEQ ID NO: 3885309 - RNA, 23 nt, Human
gggcuucugugcaccugggcucu

SEQ ID NO: 3885310 - RNA, 16 nt, Human
gggcuucugugcccag

SEQ ID NO: 3885311 - RNA, 15 nt, Human
gggcuugaagccaaa

SEQ ID NO: 3885312 - RNA, 13 nt, Human
gggcuuggccugc

SEQ ID NO: 3885313 - RNA, 20 nt, Human
gggcuugggccuaggcugca

SEQ ID NO: 3885314 - RNA, 20 nt, Human
gggcuuggggaccagagcug

SEQ ID NO: 3885315 - RNA, 21 nt, Human
gggcuuggggaccagagcugc

SEQ ID NO: 3885316 - RNA, 13 nt, Human
gggcuuuaaaauu

SEQ ID NO: 3885317 - RNA, 21 nt, Human
gggcuuuccugugccagguga

SEQ ID NO: 3885318 - RNA, 15 nt, Human
gggcuuucuggggcc

SEQ ID NO: 3885319 - RNA, 15 nt, Human
gggcuuugugugaag

SEQ ID NO: 3885320 - RNA, 14 nt, Human
gggcuuuuuucuuu

SEQ ID NO: 3885321 - RNA, 19 nt, Human
ggggaaaaucagccugcuc

SEQ ID NO: 3885322 - RNA, 22 nt, Human
ggggaaccugccaugccaggaa

SEQ ID NO: 3885323 - RNA, 16 nt, Human
ggggaacguucucuuu

SEQ ID NO: 3885324 - RNA, 19 nt, Human
ggggaagagagccugcagg

SEQ ID NO: 3885325 - RNA, 19 nt, Human
ggggaagagauccaaagac

SEQ ID NO: 3885326 - RNA, 13 nt, Human
ggggaaggagcca

SEQ ID NO: 3885327 - RNA, 21 nt, Human
ggggaaggagccaguuugccg

SEQ ID NO: 3885328 - RNA, 13 nt, Human
ggggaaggcaggg

SEQ ID NO: 3885329 - RNA, 17 nt, Human
ggggaaggccaagggga

SEQ ID NO: 3885330 - RNA, 14 nt, Human
ggggaaggggcggu

SEQ ID NO: 3885331 - RNA, 14 nt, Human
ggggaaugaggggg

SEQ ID NO: 3885332 - RNA, 22 nt, Human
ggggaauguuugccucugccuc

SEQ ID NO: 3885333 - RNA, 13 nt, Human
ggggacaggccuc

SEQ ID NO: 3885334 - RNA, 17 nt, Human
ggggacaggccucaccu

SEQ ID NO: 3885335 - RNA, 16 nt, Human
ggggacagggcuggcc

SEQ ID NO: 3885336 - RNA, 24 nt, Human
ggggacagggcuggcccagcccug

SEQ ID NO: 3885337 - RNA, 21 nt, Human
ggggaccaggagugggugggg

SEQ ID NO: 3885338 - RNA, 21 nt, Human
ggggacccaauguaggagcug

SEQ ID NO: 3885339 - RNA, 14 nt, Human
ggggacccaggcuc

SEQ ID NO: 3885340 - RNA, 15 nt, Human
ggggacccccgcccc

SEQ ID NO: 3885341 - RNA, 11 nt, Human
ggggacccugu

SEQ ID NO: 3885342 - RNA, 23 nt, Human
ggggacgcugguagagauggagg

SEQ ID NO: 3885343 - RNA, 21 nt, Human
ggggacucugagcgggaggca

SEQ ID NO: 3885344 - RNA, 23 nt, Human
ggggacucugagcgggaggcaga

SEQ ID NO: 3885345 - RNA, 15 nt, Human
ggggacucugggcua

SEQ ID NO: 3885346 - RNA, 22 nt, Human
ggggacucugggcuauggacac

SEQ ID NO: 3885347 - RNA, 18 nt, Human
ggggacugcugcugccug

SEQ ID NO: 3885348 - RNA, 18 nt, Human
ggggacuuggccucucuc

SEQ ID NO: 3885349 - RNA, 18 nt, Human
ggggagaaaguacuucuu

SEQ ID NO: 3885350 - RNA, 19 nt, Human
ggggagaacuuacauugug

SEQ ID NO: 3885351 - RNA, 17 nt, Human
ggggagacugggcugag

SEQ ID NO: 3885352 - RNA, 18 nt, Human
ggggagagcaggcuggca

SEQ ID NO: 3885353 - RNA, 14 nt, Human
ggggagcacccuga

SEQ ID NO: 3885354 - RNA, 14 nt, Human
ggggagcagagaca

SEQ ID NO: 3885355 - RNA, 14 nt, Human
ggggagcaggcagc

SEQ ID NO: 3885356 - RNA, 11 nt, Human
ggggagcccac

SEQ ID NO: 3885357 - RNA, 19 nt, Human
ggggagcccacuguccugg

SEQ ID NO: 3885358 - RNA, 22 nt, Human
ggggagccccuucugcucagcu

SEQ ID NO: 3885359 - RNA, 19 nt, Human
ggggagcgggucugcuccc

SEQ ID NO: 3885360 - RNA, 12 nt, Human
ggggagcuggac

SEQ ID NO: 3885361 - RNA, 15 nt, Human
ggggagcugggccug

SEQ ID NO: 3885362 - RNA, 18 nt, Human
ggggaggaaacucaccug

SEQ ID NO: 3885363 - RNA, 23 nt, Human
ggggaggaccugacccuacuccc

SEQ ID NO: 3885364 - RNA, 14 nt, Human
ggggaggagggggc

SEQ ID NO: 3885365 - RNA, 19 nt, Human
ggggaggaucacuggagcc

SEQ ID NO: 3885366 - RNA, 22 nt, Human
ggggaggcggacguuccagccg

SEQ ID NO: 3885367 - RNA, 14 nt, Human
ggggagggauucug

SEQ ID NO: 3885368 - RNA, 14 nt, Human
ggggagggcugcga

SEQ ID NO: 3885369 - RNA, 20 nt, Human
ggggaggggcgcuggcccag

SEQ ID NO: 3885370 - RNA, 18 nt, Human
ggggaggggcugugggcg

SEQ ID NO: 3885371 - RNA, 15 nt, Human
ggggagggggauccg

SEQ ID NO: 3885372 - RNA, 22 nt, Human
ggggagggguugccacaggccu

SEQ ID NO: 3885373 - RNA, 13 nt, Human
ggggaggguaggc

SEQ ID NO: 3885374 - RNA, 15 nt, Human
ggggagucaccuucc

SEQ ID NO: 3885375 - RNA, 11 nt, Human
ggggaguggaa

SEQ ID NO: 3885376 - RNA, 19 nt, Human
ggggagugggacagagucu

SEQ ID NO: 3885377 - RNA, 17 nt, Human
ggggaucacagccucug

SEQ ID NO: 3885378 - RNA, 21 nt, Human
ggggauccccgccuggccagg

SEQ ID NO: 3885379 - RNA, 22 nt, Human
ggggauccccgccuggccagga

SEQ ID NO: 3885380 - RNA, 23 nt, Human
ggggaucccucccccccaugcac

SEQ ID NO: 3885381 - RNA, 14 nt, Human
ggggaugugggagg

SEQ ID NO: 3885382 - RNA, 18 nt, Human
ggggaugugggagggagc

SEQ ID NO: 3885383 - RNA, 20 nt, Human
ggggauucuuccaucugauu

SEQ ID NO: 3885384 - RNA, 22 nt, Human
ggggcaagaagaucacgcuccc

SEQ ID NO: 3885385 - RNA, 14 nt, Human
ggggcacaagacug

SEQ ID NO: 3885386 - RNA, 22 nt, Human
ggggcacaagacugacgccagg

SEQ ID NO: 3885387 - RNA, 17 nt, Human
ggggcacaguccaggaa

SEQ ID NO: 3885388 - RNA, 21 nt, Human
ggggcacaugcugagucuccc

SEQ ID NO: 3885389 - RNA, 15 nt, Human
ggggcagagccagga

SEQ ID NO: 3885390 - RNA, 16 nt, Human
ggggcagagccaggaa

SEQ ID NO: 3885391 - RNA, 17 nt, Human
ggggcagagcccugcuc

SEQ ID NO: 3885392 - RNA, 21 nt, Human
ggggcagccaaacccaugagg

SEQ ID NO: 3885393 - RNA, 15 nt, Human
ggggcagcccuugcu

SEQ ID NO: 3885394 - RNA, 17 nt, Human
ggggcagccugcguggc

SEQ ID NO: 3885395 - RNA, 20 nt, Human
ggggcagcgggggccaggga

SEQ ID NO: 3885396 - RNA, 13 nt, Human
ggggcagcugacc

SEQ ID NO: 3885397 - RNA, 19 nt, Human
ggggcagcugccagagaag

SEQ ID NO: 3885398 - RNA, 14 nt, Human
ggggcaggcacagc

SEQ ID NO: 3885399 - RNA, 11 nt, Human
ggggcaggcag

SEQ ID NO: 3885400 - RNA, 21 nt, Human
ggggcaggcccugcacugucc

SEQ ID NO: 3885401 - RNA, 23 nt, Human
ggggcaggcccugcacuguccug

SEQ ID NO: 3885402 - RNA, 14 nt, Human
ggggcaggcugggc

SEQ ID NO: 3885403 - RNA, 16 nt, Human
ggggcaggcugggcca

SEQ ID NO: 3885404 - RNA, 21 nt, Human
ggggcagggaaggggaggcag

SEQ ID NO: 3885405 - RNA, 13 nt, Human
ggggcagggagcu

SEQ ID NO: 3885406 - RNA, 11 nt, Human
ggggcagucug

SEQ ID NO: 3885407 - RNA, 18 nt, Human
ggggcagucugagagagg

SEQ ID NO: 3885408 - RNA, 17 nt, Human
ggggcagucuggagggg

SEQ ID NO: 3885409 - RNA, 13 nt, Human
ggggcaguggcaa

SEQ ID NO: 3885410 - RNA, 15 nt, Human
ggggcaucuggccug

SEQ ID NO: 3885411 - RNA, 15 nt, Human
ggggcaugaccagau

SEQ ID NO: 3885412 - RNA, 19 nt, Human
ggggcauguauuggccugg

SEQ ID NO: 3885413 - RNA, 14 nt, Human
ggggcauugcugac

SEQ ID NO: 3885414 - RNA, 16 nt, Human
ggggccacacagaaac

SEQ ID NO: 3885415 - RNA, 20 nt, Human
ggggccacagccagaacccc

SEQ ID NO: 3885416 - RNA, 19 nt, Human
ggggccaccaaagcugccc

SEQ ID NO: 3885417 - RNA, 16 nt, Human
ggggccaccugccugc

SEQ ID NO: 3885418 - RNA, 16 nt, Human
guaccucaucccauga

SEQ ID NO: 3885419 - RNA, 15 nt, Human
guaccuccccugccu

SEQ ID NO: 3885420 - RNA, 16 nt, Human
guaccuccccugccuu

SEQ ID NO: 3885421 - RNA, 14 nt, Human
guaccuccucucag

SEQ ID NO: 3885422 - RNA, 18 nt, Human
guaccuccucucaguguu

SEQ ID NO: 3885423 - RNA, 19 nt, Human
guaccuccucucaguguuu

SEQ ID NO: 3885424 - RNA, 14 nt, Human
guaccucuggcuga

SEQ ID NO: 3885425 - RNA, 15 nt, Human
guaccucuggcugac

SEQ ID NO: 3885426 - RNA, 13 nt, Human
guaccucuugagc

SEQ ID NO: 3885427 - RNA, 22 nt, Human
guaccucuugagccuugaacuu

SEQ ID NO: 3885428 - RNA, 12 nt, Human
guaccugaaaag

SEQ ID NO: 3885429 - RNA, 23 nt, Human
guaccugaaaaguaacuuggcuu

SEQ ID NO: 3885430 - RNA, 17 nt, Human
guaccuggugaccccuu

SEQ ID NO: 3885431 - RNA, 23 nt, Human
guaccuugcuucuuacugauaau

SEQ ID NO: 3885432 - RNA, 19 nt, Human
guaccuuuuaacaccugau

SEQ ID NO: 3885433 - RNA, 17 nt, Human
guacggauuuucaguua

SEQ ID NO: 3885434 - RNA, 15 nt, Human
guacgucugacaggc

SEQ ID NO: 3885435 - RNA, 12 nt, Human
guacgugacccu

SEQ ID NO: 3885436 - RNA, 16 nt, Human
guacguugugcauuug

SEQ ID NO: 3885437 - RNA, 17 nt, Human
guacguuuguaugugug

SEQ ID NO: 3885438 - RNA, 13 nt, Human
guacuaaagccaa

SEQ ID NO: 3885439 - RNA, 13 nt, Human
guacuaagcauuu

SEQ ID NO: 3885440 - RNA, 15 nt, Human
guacuacaauuuaaa

SEQ ID NO: 3885441 - RNA, 15 nt, Human
guacuaccuguguau

SEQ ID NO: 3885442 - RNA, 15 nt, Human
guacuacuagauguc

SEQ ID NO: 3885443 - RNA, 21 nt, Human
guacuagagauauuuuguaaa

SEQ ID NO: 3885444 - RNA, 13 nt, Human
guacuaguacugu

SEQ ID NO: 3885445 - RNA, 19 nt, Human
guacuaguggcauggagaa

SEQ ID NO: 3885446 - RNA, 16 nt, Human
guacuaguuacacauc

SEQ ID NO: 3885447 - RNA, 13 nt, Human
guacuaguuuuag

SEQ ID NO: 3885448 - RNA, 14 nt, Human
guacuauaucuguu

SEQ ID NO: 3885449 - RNA, 17 nt, Human
guacuauaucuguuuua

SEQ ID NO: 3885450 - RNA, 19 nt, Human
guacuaucuuaucucagau

SEQ ID NO: 3885451 - RNA, 17 nt, Human
guacuauguaucaauga

SEQ ID NO: 3885452 - RNA, 18 nt, Human
guacuccacacugcacaa

SEQ ID NO: 3885453 - RNA, 19 nt, Human
guacuccacauauuucagu

SEQ ID NO: 3885454 - RNA, 15 nt, Human
guacucuaacuuaag

SEQ ID NO: 3885455 - RNA, 14 nt, Human
guacucuccuagag

SEQ ID NO: 3885456 - RNA, 15 nt, Human
guacucuccuagaga

SEQ ID NO: 3885457 - RNA, 23 nt, Human
guacucuccuagagacagaagca

SEQ ID NO: 3885458 - RNA, 12 nt, Human
guacucuggccu

SEQ ID NO: 3885459 - RNA, 15 nt, Human
guacucuggccucug

SEQ ID NO: 3885460 - RNA, 12 nt, Human
guacugaauuuu

SEQ ID NO: 3885461 - RNA, 18 nt, Human
guacugaauuuuuuugua

SEQ ID NO: 3885462 - RNA, 19 nt, Human
guacugaccccaucaccua

SEQ ID NO: 3885463 - RNA, 17 nt, Human
guacugacuuugcuugc

SEQ ID NO: 3885464 - RNA, 15 nt, Human
guacugauucaauuu

SEQ ID NO: 3885465 - RNA, 16 nt, Human
guacugauucaauuug

SEQ ID NO: 3885466 - RNA, 15 nt, Human
guacugauuucagua

SEQ ID NO: 3885467 - RNA, 13 nt, Human
guacugcagccuc

SEQ ID NO: 3885468 - RNA, 23 nt, Human
guacugccccccaugaggaagga

SEQ ID NO: 3885469 - RNA, 20 nt, Human
guacugcucaggcugcagcu

SEQ ID NO: 3885470 - RNA, 23 nt, Human
guacugcucaggcugcagcugga

SEQ ID NO: 3885471 - RNA, 16 nt, Human
guacuggagaaaaugg

SEQ ID NO: 3885472 - RNA, 14 nt, Human
guacuggcauggua

SEQ ID NO: 3885473 - RNA, 16 nt, Human
guacuguaagaauaau

SEQ ID NO: 3885474 - RNA, 18 nt, Human
guacuguaauaauaccuc

SEQ ID NO: 3885475 - RNA, 20 nt, Human
guacuguaauaauaccucaa

SEQ ID NO: 3885476 - RNA, 15 nt, Human
guacuguacagcugg

SEQ ID NO: 3885477 - RNA, 19 nt, Human
guacuguacagcuggcucu

SEQ ID NO: 3885478 - RNA, 13 nt, Human
guacuguacuaau

SEQ ID NO: 3885479 - RNA, 14 nt, Human
guacuguacuaauu

SEQ ID NO: 3885480 - RNA, 14 nt, Human
guacuguaugauca

SEQ ID NO: 3885481 - RNA, 17 nt, Human
guacuguaugaucaaau

SEQ ID NO: 3885482 - RNA, 20 nt, Human
guacuguaugaucaaauguu

SEQ ID NO: 3885483 - RNA, 22 nt, Human
guacuguaugaucaaauguuua

SEQ ID NO: 3885484 - RNA, 23 nt, Human
guacuguguacagaauucugcua

SEQ ID NO: 3885485 - RNA, 14 nt, Human
guacuguguacugu

SEQ ID NO: 3885486 - RNA, 18 nt, Human
guacuguuacugggcccu

SEQ ID NO: 3885487 - RNA, 14 nt, Human
guacuguucugugu

SEQ ID NO: 3885488 - RNA, 18 nt, Human
guacuguucugugucuuu

SEQ ID NO: 3885489 - RNA, 15 nt, Human
guacuguuuaauguu

SEQ ID NO: 3885490 - RNA, 20 nt, Human
guacuuagaguuucuguuug

SEQ ID NO: 3885491 - RNA, 22 nt, Human
guacuucaaauccuugaagauu

SEQ ID NO: 3885492 - RNA, 21 nt, Human
guacuucacugucaggaagaa

SEQ ID NO: 3885493 - RNA, 23 nt, Human
guacuucagcaagagagaaccua

SEQ ID NO: 3885494 - RNA, 22 nt, Human
guacuucccgggccagggcugc

SEQ ID NO: 3885495 - RNA, 21 nt, Human
guacuuccugaguggccaggg

SEQ ID NO: 3885496 - RNA, 22 nt, Human
guacuugcccugaccaugcauu

SEQ ID NO: 3885497 - RNA, 15 nt, Human
guacuugcucuugau

SEQ ID NO: 3885498 - RNA, 16 nt, Human
guacuugcucuugaug

SEQ ID NO: 3885499 - RNA, 19 nt, Human
guacuugcucuugaugccu

SEQ ID NO: 3885500 - RNA, 21 nt, Human
guacuugguccaacugcaacu

SEQ ID NO: 3885501 - RNA, 11 nt, Human
guacuugucaa

SEQ ID NO: 3885502 - RNA, 14 nt, Human
guacuugucaaaga

SEQ ID NO: 3885503 - RNA, 15 nt, Human
guacuugucaaagaa

SEQ ID NO: 3885504 - RNA, 20 nt, Human
guacuugugaaacacagcug

SEQ ID NO: 3885505 - RNA, 16 nt, Human
guacuuguggacacag

SEQ ID NO: 3885506 - RNA, 20 nt, Human
guacuuguggacacagcucu

SEQ ID NO: 3885507 - RNA, 21 nt, Human
guacuuguggacacagcucuu

SEQ ID NO: 3885508 - RNA, 16 nt, Human
guacuuguuucucugu

SEQ ID NO: 3885509 - RNA, 15 nt, Human
guacuuuaucaugaa

SEQ ID NO: 3885510 - RNA, 20 nt, Human
guacuuuaucaugaaugcuu

SEQ ID NO: 3885511 - RNA, 17 nt, Human
guacuuucuauuuuaau

SEQ ID NO: 3885512 - RNA, 15 nt, Human
guacuuucuguuaaa

SEQ ID NO: 3885513 - RNA, 21 nt, Human
guacuuucuguuaugggcuuu

SEQ ID NO: 3885514 - RNA, 21 nt, Human
guacuuugauucacauguuuu

SEQ ID NO: 3885515 - RNA, 20 nt, Human
guacuuugucuaagaaacau

SEQ ID NO: 3885516 - RNA, 10 nt, Human
guacuuugug

SEQ ID NO: 3885517 - RNA, 17 nt, Human
guacuuuuaaaaacaua

SEQ ID NO: 3885518 - RNA, 20 nt, Human
guacuuuuaugauguauauu

SEQ ID NO: 3885519 - RNA, 22 nt, Human
guacuuuuaugauguauauuua

SEQ ID NO: 3885520 - RNA, 23 nt, Human
guacuuuuauuuuacacagaaac

SEQ ID NO: 3885521 - RNA, 17 nt, Human
guacuuuucauucucuu

SEQ ID NO: 3885522 - RNA, 21 nt, Human
guacuuuucccauuuguaauu

SEQ ID NO: 3885523 - RNA, 18 nt, Human
guacuuuugagugugugu

SEQ ID NO: 3885524 - RNA, 23 nt, Human
guacuuuuuaguaauuucuuuuu

SEQ ID NO: 3885525 - RNA, 14 nt, Human
guacuuuuugugaa

SEQ ID NO: 3885526 - RNA, 21 nt, Human
guacuuuuuuaaauauuuucu

SEQ ID NO: 3885527 - RNA, 12 nt, Human
guagaaaaauuu

SEQ ID NO: 3885528 - RNA, 18 nt, Human
guagaaagacagagcugg

SEQ ID NO: 3885529 - RNA, 21 nt, Human
guagaaagacagagcugggau

SEQ ID NO: 3885530 - RNA, 21 nt, Human
guagaaaggccuuuaaaauuu

SEQ ID NO: 3885531 - RNA, 16 nt, Human
guagaaauaauaugca

SEQ ID NO: 3885532 - RNA, 17 nt, Human
guagaaauaauaugcau

SEQ ID NO: 3885533 - RNA, 20 nt, Human
guagaaauaucugaaaaugu

SEQ ID NO: 3885534 - RNA, 21 nt, Human
guagaaauaucugaaaaugua

SEQ ID NO: 3885535 - RNA, 23 nt, Human
guagaaauaucugaaaauguaug

SEQ ID NO: 3885536 - RNA, 20 nt, Human
guagaaaucccccuuucucu

SEQ ID NO: 3885537 - RNA, 18 nt, Human
guagaacacuaauucaua

SEQ ID NO: 3885538 - RNA, 14 nt, Human
guagaaccucaccu

SEQ ID NO: 3885539 - RNA, 17 nt, Human
guagaacucacucuggg

SEQ ID NO: 3885540 - RNA, 21 nt, Human
guagaacucacucugggcugu

SEQ ID NO: 3885541 - RNA, 16 nt, Human
guagaacugucuguga

SEQ ID NO: 3885542 - RNA, 20 nt, Human
guagaagauuugaugcugga

SEQ ID NO: 3885543 - RNA, 18 nt, Human
guagaagcauuccuucuu

SEQ ID NO: 3885544 - RNA, 19 nt, Human
guagaaggguuauauuuua

SEQ ID NO: 3885545 - RNA, 18 nt, Human
guagaaguucuaguguuu

SEQ ID NO: 3885546 - RNA, 22 nt, Human
guagaaguucuaguguuuucaa

SEQ ID NO: 3885547 - RNA, 14 nt, Human
guagaaguuuuugu

SEQ ID NO: 3885548 - RNA, 11 nt, Human
guagaauauuc

SEQ ID NO: 3885549 - RNA, 18 nt, Human
guagaaugaccuuguaau

SEQ ID NO: 3885550 - RNA, 20 nt, Human
guagaaugaccuuguaaugu

SEQ ID NO: 3885551 - RNA, 16 nt, Human
guagaauguaaagcuu

SEQ ID NO: 3885552 - RNA, 19 nt, Human
guagaauguauuguaccuu

SEQ ID NO: 3885553 - RNA, 23 nt, Human
guagaauguauuguaccuuuuaa

SEQ ID NO: 3885554 - RNA, 15 nt, Human
guagaauugcauuga

SEQ ID NO: 3885555 - RNA, 22 nt, Human
guagacaagcaauuagacaaga

SEQ ID NO: 3885556 - RNA, 21 nt, Human
guagacacacuaucauaguua

SEQ ID NO: 3885557 - RNA, 15 nt, Human
guagacauuucucuu

SEQ ID NO: 3885558 - RNA, 14 nt, Human
guagaccccuggcu

SEQ ID NO: 3885559 - RNA, 20 nt, Human
guagaccuagggaggaccuu

SEQ ID NO: 3885560 - RNA, 19 nt, Human
guagaccugucuccuggcg

SEQ ID NO: 3885561 - RNA, 19 nt, Human
guagaccuuguuacuucug

SEQ ID NO: 3885562 - RNA, 21 nt, Human
guauucucuccuguaccucuu

SEQ ID NO: 3885563 - RNA, 11 nt, Human
guauucucuga

SEQ ID NO: 3885564 - RNA, 12 nt, Human
guauucucugag

SEQ ID NO: 3885565 - RNA, 12 nt, Human
guauucucuuuu

SEQ ID NO: 3885566 - RNA, 18 nt, Human
guauucucuuuucaagaa

SEQ ID NO: 3885567 - RNA, 19 nt, Human
guauucucuuuucaagaag

SEQ ID NO: 3885568 - RNA, 18 nt, Human
guauucugggguauggcg

SEQ ID NO: 3885569 - RNA, 17 nt, Human
guauucuguucuggagg

SEQ ID NO: 3885570 - RNA, 20 nt, Human
guauucuuaaaaugcaauau

SEQ ID NO: 3885571 - RNA, 15 nt, Human
guauucuucaaccuc

SEQ ID NO: 3885572 - RNA, 11 nt, Human
guauucuuuga

SEQ ID NO: 3885573 - RNA, 14 nt, Human
guauucuuugaugu

SEQ ID NO: 3885574 - RNA, 18 nt, Human
guauucuuugauguuaac

SEQ ID NO: 3885575 - RNA, 10 nt, Human
guauugaagc

SEQ ID NO: 3885576 - RNA, 22 nt, Human
guauugaagcauuuuauaaauc

SEQ ID NO: 3885577 - RNA, 13 nt, Human
guauugacaaaau

SEQ ID NO: 3885578 - RNA, 19 nt, Human
guauugacaaaauguuauu

SEQ ID NO: 3885579 - RNA, 20 nt, Human
guauugacaaaauguuauuu

SEQ ID NO: 3885580 - RNA, 13 nt, Human
guauugcacauug

SEQ ID NO: 3885581 - RNA, 23 nt, Human
guauugcaucuguauaaguaaga

SEQ ID NO: 3885582 - RNA, 16 nt, Human
guauugccaaacauua

SEQ ID NO: 3885583 - RNA, 12 nt, Human
guauuggcaaag

SEQ ID NO: 3885584 - RNA, 12 nt, Human
guauuggccugg

SEQ ID NO: 3885585 - RNA, 15 nt, Human
guauuggccuggagg

SEQ ID NO: 3885586 - RNA, 22 nt, Human
guauuggcuagagguucaaaga

SEQ ID NO: 3885587 - RNA, 17 nt, Human
guauugguggcuuuccu

SEQ ID NO: 3885588 - RNA, 19 nt, Human
guauuguaaauuauauuug

SEQ ID NO: 3885589 - RNA, 20 nt, Human
guauuguaaauuauauuugu

SEQ ID NO: 3885590 - RNA, 10 nt, Human
guauuguaca

SEQ ID NO: 3885591 - RNA, 21 nt, Human
guauuguacaaaguauuaagc

SEQ ID NO: 3885592 - RNA, 23 nt, Human
guauuguacaaaguauuaagcau

SEQ ID NO: 3885593 - RNA, 13 nt, Human
guauuguauuuau

SEQ ID NO: 3885594 - RNA, 17 nt, Human
guauuguauuuauucaa

SEQ ID NO: 3885595 - RNA, 18 nt, Human
guauuguauuuauucaau

SEQ ID NO: 3885596 - RNA, 21 nt, Human
guauuguccuauuaguguuau

SEQ ID NO: 3885597 - RNA, 18 nt, Human
guauuguucccagugaca

SEQ ID NO: 3885598 - RNA, 20 nt, Human
guauuguuugggauccuauu

SEQ ID NO: 3885599 - RNA, 16 nt, Human
guauuuaacaaaaagu

SEQ ID NO: 3885600 - RNA, 20 nt, Human
guauuuaacaaaaagugcuu

SEQ ID NO: 3885601 - RNA, 20 nt, Human
guauuuaacagaaauuguau

SEQ ID NO: 3885602 - RNA, 14 nt, Human
guauuuaagcaaau

SEQ ID NO: 3885603 - RNA, 12 nt, Human
guauuuaagccu

SEQ ID NO: 3885604 - RNA, 20 nt, Human
guauuuaauagguuuggaca

SEQ ID NO: 3885605 - RNA, 18 nt, Human
guauuuaauuagugcuaa

SEQ ID NO: 3885606 - RNA, 12 nt, Human
guauuuauaaua

SEQ ID NO: 3885607 - RNA, 20 nt, Human
guauuuaucuauuguaagau

SEQ ID NO: 3885608 - RNA, 22 nt, Human
guauuuauggguggauuuaucc

SEQ ID NO: 3885609 - RNA, 11 nt, Human
guauuuauuca

SEQ ID NO: 3885610 - RNA, 14 nt, Human
guauuuauucaaua

SEQ ID NO: 3885611 - RNA, 17 nt, Human
guauuuauucaauaaag

SEQ ID NO: 3885612 - RNA, 20 nt, Human
guauuuauucaauaaaguau

SEQ ID NO: 3885613 - RNA, 23 nt, Human
guauuuauucaauaaaguauuua

SEQ ID NO: 3885614 - RNA, 15 nt, Human
guauuuauuccauau

SEQ ID NO: 3885615 - RNA, 19 nt, Human
guauuuauuuaguauuuau

SEQ ID NO: 3885616 - RNA, 16 nt, Human
guauuuauuuauguac

SEQ ID NO: 3885617 - RNA, 18 nt, Human
guauuuauuuuccucccc

SEQ ID NO: 3885618 - RNA, 19 nt, Human
guauuuauuuuccucccca

SEQ ID NO: 3885619 - RNA, 17 nt, Human
guauuuauuuuguaauu

SEQ ID NO: 3885620 - RNA, 13 nt, Human
guauuucagugua

SEQ ID NO: 3885621 - RNA, 15 nt, Human
guauuucauguggcu

SEQ ID NO: 3885622 - RNA, 17 nt, Human
guauuucauguggcugu

SEQ ID NO: 3885623 - RNA, 18 nt, Human
guauuucauguggcugua

SEQ ID NO: 3885624 - RNA, 16 nt, Human
guauuuccagugcaau

SEQ ID NO: 3885625 - RNA, 14 nt, Human
guauuugaaacuga

SEQ ID NO: 3885626 - RNA, 14 nt, Human
guauuugaauuaaa

SEQ ID NO: 3885627 - RNA, 18 nt, Human
guauuugaauuaaaacuu

SEQ ID NO: 3885628 - RNA, 22 nt, Human
guauuugaauuaaaacuucuua

SEQ ID NO: 3885629 - RNA, 15 nt, Human
guauuugagacauuc

SEQ ID NO: 3885630 - RNA, 13 nt, Human
guauuugcaguuc

SEQ ID NO: 3885631 - RNA, 22 nt, Human
guauuugcuuuuuuguuuuggc

SEQ ID NO: 3885632 - RNA, 16 nt, Human
guauuuggauaucugu

SEQ ID NO: 3885633 - RNA, 21 nt, Human
guauuugggaaacuugucacu

SEQ ID NO: 3885634 - RNA, 23 nt, Human
guauuuguuaauuuagaaaacuu

SEQ ID NO: 3885635 - RNA, 14 nt, Human
guauuuguucaugu

SEQ ID NO: 3885636 - RNA, 12 nt, Human
guauuuguuugc

SEQ ID NO: 3885637 - RNA, 18 nt, Human
guauuuuaaaagaaugau

SEQ ID NO: 3885638 - RNA, 20 nt, Human
guauuuuaaaagaaugauua

SEQ ID NO: 3885639 - RNA, 23 nt, Human
guauuuuaaaauagcguucuugu

SEQ ID NO: 3885640 - RNA, 14 nt, Human
guauuuuacuaaua

SEQ ID NO: 3885641 - RNA, 19 nt, Human
guauuuuaggcagggauuu

SEQ ID NO: 3885642 - RNA, 15 nt, Human
guauuuuaguauauu

SEQ ID NO: 3885643 - RNA, 22 nt, Human
guauuuuauaaaauuaaagaaa

SEQ ID NO: 3885644 - RNA, 19 nt, Human
guauuuuauaauucuggga

SEQ ID NO: 3885645 - RNA, 22 nt, Human
guauuuuaucuuugauucuccu

SEQ ID NO: 3885646 - RNA, 13 nt, Human
guauuuuauguau

SEQ ID NO: 3885647 - RNA, 16 nt, Human
guauuuuauguuauau

SEQ ID NO: 3885648 - RNA, 22 nt, Human
guauuuuauguuauauauaaau

SEQ ID NO: 3885649 - RNA, 17 nt, Human
guauuuuauuguaacag

SEQ ID NO: 3885650 - RNA, 16 nt, Human
guauuuuccaagugug

SEQ ID NO: 3885651 - RNA, 20 nt, Human
guauuuuccaagugugcaua

SEQ ID NO: 3885652 - RNA, 16 nt, Human
guauuuuccuguaaaa

SEQ ID NO: 3885653 - RNA, 19 nt, Human
guauuuucuucucugugag

SEQ ID NO: 3885654 - RNA, 15 nt, Human
guauuuucuuucucu

SEQ ID NO: 3885655 - RNA, 18 nt, Human
guauuuucuuucucuacu

SEQ ID NO: 3885656 - RNA, 18 nt, Human
guauuuugugugaccaac

SEQ ID NO: 3885657 - RNA, 22 nt, Human
guauuuuuaauggggguagcag

SEQ ID NO: 3885658 - RNA, 14 nt, Human
guauuuuuauaaau

SEQ ID NO: 3885659 - RNA, 13 nt, Human
guauuuuuaucca

SEQ ID NO: 3885660 - RNA, 13 nt, Human
guauuuuucuuga

SEQ ID NO: 3885661 - RNA, 12 nt, Human
guauuuuugaca

SEQ ID NO: 3885662 - RNA, 20 nt, Human
guauuuuugacagaauaugu

SEQ ID NO: 3885663 - RNA, 15 nt, Human
guauuuuuuaaagcu

SEQ ID NO: 3885664 - RNA, 17 nt, Human
guauuuuuuaaugcuaa

SEQ ID NO: 3885665 - RNA, 14 nt, Human
guauuuuuuccuuu

SEQ ID NO: 3885666 - RNA, 17 nt, Human
guauuuuuuugcaagug

SEQ ID NO: 3885667 - RNA, 14 nt, Human
gucaaaaagaacca

SEQ ID NO: 3885668 - RNA, 19 nt, Human
gucaaaaagaaccacuugu

SEQ ID NO: 3885669 - RNA, 23 nt, Human
gucaaaaauuaaaccggaccauc

SEQ ID NO: 3885670 - RNA, 14 nt, Human
gucaaaacacugug

SEQ ID NO: 3885671 - RNA, 14 nt, Human
gucaaaacuuuaaa

SEQ ID NO: 3885672 - RNA, 17 nt, Human
gucaaaaguagaacuuu

SEQ ID NO: 3885673 - RNA, 23 nt, Human
gucaaaaguagaacuuuguauag

SEQ ID NO: 3885674 - RNA, 16 nt, Human
gucaaaaguuggacua

SEQ ID NO: 3885675 - RNA, 16 nt, Human
gucaaacaugaagugu

SEQ ID NO: 3885676 - RNA, 17 nt, Human
gucaaacauuaguacuu

SEQ ID NO: 3885677 - RNA, 16 nt, Human
gucaaaccauaaacuu

SEQ ID NO: 3885678 - RNA, 13 nt, Human
gucaaaccgcacu

SEQ ID NO: 3885679 - RNA, 21 nt, Human
gucaaaccgcacucacccaug

SEQ ID NO: 3885680 - RNA, 14 nt, Human
gucaaacgugaaaa

SEQ ID NO: 3885681 - RNA, 15 nt, Human
gucaaacgugaaaau

SEQ ID NO: 3885682 - RNA, 21 nt, Human
gucaaacuuggauacuuggau

SEQ ID NO: 3885683 - RNA, 16 nt, Human
gucaaagcaaggaucu

SEQ ID NO: 3885684 - RNA, 19 nt, Human
gucaaaguggugagaggca

SEQ ID NO: 3885685 - RNA, 16 nt, Human
gucaaaugaugugcaa

SEQ ID NO: 3885686 - RNA, 22 nt, Human
gucaaaugguaggcauuuccua

SEQ ID NO: 3885687 - RNA, 18 nt, Human
gucaacaaacuauuucuu

SEQ ID NO: 3885688 - RNA, 22 nt, Human
gucaacaaaucuaggaaaauau

SEQ ID NO: 3885689 - RNA, 21 nt, Human
gucaacaaguaugaauaaaga

SEQ ID NO: 3885690 - RNA, 19 nt, Human
gucaacacuuaaggguuuu

SEQ ID NO: 3885691 - RNA, 13 nt, Human
gucaacagaauga

SEQ ID NO: 3885692 - RNA, 15 nt, Human
gucaacagaaugaaa

SEQ ID NO: 3885693 - RNA, 16 nt, Human
gucaacagaaugaaaa

SEQ ID NO: 3885694 - RNA, 19 nt, Human
gucaacagagaaggcagga

SEQ ID NO: 3885695 - RNA, 17 nt, Human
gucaacauuucucaugu

SEQ ID NO: 3885696 - RNA, 15 nt, Human
gucaaccagacagag

SEQ ID NO: 3885697 - RNA, 21 nt, Human
gucaacgagacguuuccuacc

SEQ ID NO: 3885698 - RNA, 17 nt, Human
gucaacucuuuguuauu

SEQ ID NO: 3885699 - RNA, 15 nt, Human
gucaacuucuggcuc

SEQ ID NO: 3885700 - RNA, 17 nt, Human
gucaacuucuggcuccu

SEQ ID NO: 3885701 - RNA, 20 nt, Human
gucaacuugagcauguuacu

SEQ ID NO: 3885702 - RNA, 12 nt, Human
gucaagaagaaa

SEQ ID NO: 3885703 - RNA, 15 nt, Human
gucaagaagaaaaag

SEQ ID NO: 3885704 - RNA, 17 nt, Human
gucaagaagaagaugga

SEQ ID NO: 3885705 - RNA, 19 nt, Human
gucaagagugaauucccuc

SEQ ID NO: 3885706 - RNA, 20 nt, Human
gucaagcugcucugagccac

SEQ ID NO: 3885707 - RNA, 13 nt, Human
gugaggcucugcc

SEQ ID NO: 3885708 - RNA, 16 nt, Human
gugaggcucugcccuu

SEQ ID NO: 3885709 - RNA, 21 nt, Human
gugaggcuuaacaaugucuug

SEQ ID NO: 3885710 - RNA, 17 nt, Human
gugagggagggcuguca

SEQ ID NO: 3885711 - RNA, 13 nt, Human
gugagggagggga

SEQ ID NO: 3885712 - RNA, 17 nt, Human
gugagggggggcucccu

SEQ ID NO: 3885713 - RNA, 21 nt, Human
gugagggguauaucugggcug

SEQ ID NO: 3885714 - RNA, 16 nt, Human
gugagggucccaugug

SEQ ID NO: 3885715 - RNA, 14 nt, Human
gugaggguccugca

SEQ ID NO: 3885716 - RNA, 23 nt, Human
gugaggguccugcagccugcagg

SEQ ID NO: 3885717 - RNA, 24 nt, Human
gugaggguccugcagccugcagga

SEQ ID NO: 3885718 - RNA, 12 nt, Human
gugagguccugg

SEQ ID NO: 3885719 - RNA, 13 nt, Human
gugagguccuggg

SEQ ID NO: 3885720 - RNA, 16 nt, Human
gugagguccugggggc

SEQ ID NO: 3885721 - RNA, 20 nt, Human
gugagguccugggggccuga

SEQ ID NO: 3885722 - RNA, 15 nt, Human
gugagguuucccaau

SEQ ID NO: 3885723 - RNA, 13 nt, Human
gugaguaaauauu

SEQ ID NO: 3885724 - RNA, 14 nt, Human
gugaguaagagcug

SEQ ID NO: 3885725 - RNA, 15 nt, Human
gugaguaagagcugg

SEQ ID NO: 3885726 - RNA, 16 nt, Human
gugaguaagagcuggu

SEQ ID NO: 3885727 - RNA, 17 nt, Human
gugaguacuacaguccu

SEQ ID NO: 3885728 - RNA, 14 nt, Human
gugaguccuccaga

SEQ ID NO: 3885729 - RNA, 17 nt, Human
gugaguccuccagaacu

SEQ ID NO: 3885730 - RNA, 17 nt, Human
gugaguccuggcauggg

SEQ ID NO: 3885731 - RNA, 18 nt, Human
gugagucuuggcggcagc

SEQ ID NO: 3885732 - RNA, 19 nt, Human
gugagucuuggcggcagca

SEQ ID NO: 3885733 - RNA, 20 nt, Human
gugagucuuggcggcagcag

SEQ ID NO: 3885734 - RNA, 18 nt, Human
gugagugacgaugaugua

SEQ ID NO: 3885735 - RNA, 14 nt, Human
gugagugagccugg

SEQ ID NO: 3885736 - RNA, 18 nt, Human
gugagugagccuggcucu

SEQ ID NO: 3885737 - RNA, 16 nt, Human
gugaguguaaguguga

SEQ ID NO: 3885738 - RNA, 14 nt, Human
gugagugugacagg

SEQ ID NO: 3885739 - RNA, 19 nt, Human
gugagugugacagggccag

SEQ ID NO: 3885740 - RNA, 16 nt, Human
gugaguguggcucccc

SEQ ID NO: 3885741 - RNA, 22 nt, Human
gugaguguguccaagugugugu

SEQ ID NO: 3885742 - RNA, 17 nt, Human
gugaguuacagcgagag

SEQ ID NO: 3885743 - RNA, 20 nt, Human
gugaguuuaguaaggcugug

SEQ ID NO: 3885744 - RNA, 21 nt, Human
gugaguuuggucuggacugac

SEQ ID NO: 3885745 - RNA, 12 nt, Human
gugaguuuguuu

SEQ ID NO: 3885746 - RNA, 13 nt, Human
gugaguuuguuuc

SEQ ID NO: 3885747 - RNA, 13 nt, Human
gugauaaaaucau

SEQ ID NO: 3885748 - RNA, 21 nt, Human
gugauaaaaucauaaguauuu

SEQ ID NO: 3885749 - RNA, 17 nt, Human
gugauaaaucagucaag

SEQ ID NO: 3885750 - RNA, 12 nt, Human
gugauaaggaca

SEQ ID NO: 3885751 - RNA, 21 nt, Human
gugauaaggacaugaugcuuu

SEQ ID NO: 3885752 - RNA, 15 nt, Human
gugauacaaugcugu

SEQ ID NO: 3885753 - RNA, 15 nt, Human
gugauacauuuuuua

SEQ ID NO: 3885754 - RNA, 13 nt, Human
gugauagcacuuu

SEQ ID NO: 3885755 - RNA, 12 nt, Human
gugauagcauug

SEQ ID NO: 3885756 - RNA, 17 nt, Human
gugauaguucacccccu

SEQ ID NO: 3885757 - RNA, 16 nt, Human
gugauauauguauuaa

SEQ ID NO: 3885758 - RNA, 13 nt, Human
gugauauauuuaa

SEQ ID NO: 3885759 - RNA, 19 nt, Human
gugauaugcacaauguaga

SEQ ID NO: 3885760 - RNA, 17 nt, Human
gugauauggagcaagag

SEQ ID NO: 3885761 - RNA, 20 nt, Human
gugauauucuuuguuaauuu

SEQ ID NO: 3885762 - RNA, 22 nt, Human
gugauauucuuuguuaauuugg

SEQ ID NO: 3885763 - RNA, 17 nt, Human
gugauauuucagaaaua

SEQ ID NO: 3885764 - RNA, 13 nt, Human
gugauauuucucu

SEQ ID NO: 3885765 - RNA, 13 nt, Human
gugaucaaagcca

SEQ ID NO: 3885766 - RNA, 16 nt, Human
gugaucaauaaaaugu

SEQ ID NO: 3885767 - RNA, 19 nt, Human
gugaucaauaaaaugugau

SEQ ID NO: 3885768 - RNA, 17 nt, Human
gugaucaauauuuuuau

SEQ ID NO: 3885769 - RNA, 17 nt, Human
gugaucaauuaaaugua

SEQ ID NO: 3885770 - RNA, 14 nt, Human
gugaucacuuucug

SEQ ID NO: 3885771 - RNA, 18 nt, Human
gugauccacccaccucag

SEQ ID NO: 3885772 - RNA, 23 nt, Human
gugauccacccaccucagccucc

SEQ ID NO: 3885773 - RNA, 21 nt, Human
gugaucccuagcugugaccuc

SEQ ID NO: 3885774 - RNA, 15 nt, Human
gugauccucccaccu

SEQ ID NO: 3885775 - RNA, 18 nt, Human
gugauccucccaccucag

SEQ ID NO: 3885776 - RNA, 22 nt, Human
gugauccucccaccucagccuc

SEQ ID NO: 3885777 - RNA, 22 nt, Human
gugaucgaugauucaggugcag

SEQ ID NO: 3885778 - RNA, 14 nt, Human
gugaucucagauca

SEQ ID NO: 3885779 - RNA, 23 nt, Human
gugaucucauuguucaauuccca

SEQ ID NO: 3885780 - RNA, 14 nt, Human
gugaucucauuuaa

SEQ ID NO: 3885781 - RNA, 19 nt, Human
gugaucugcugcagagcag

SEQ ID NO: 3885782 - RNA, 13 nt, Human
gugaucugucuug

SEQ ID NO: 3885783 - RNA, 21 nt, Human
gugaucuuaauauauuugaaa

SEQ ID NO: 3885784 - RNA, 12 nt, Human
gugaucuuauuu

SEQ ID NO: 3885785 - RNA, 15 nt, Human
gugaucuuuuaaagu

SEQ ID NO: 3885786 - RNA, 15 nt, Human
gugaugaacuuucuc

SEQ ID NO: 3885787 - RNA, 14 nt, Human
gugaugaauacugu

SEQ ID NO: 3885788 - RNA, 13 nt, Human
gugaugacauauu

SEQ ID NO: 3885789 - RNA, 14 nt, Human
gugaugagaggaaa

SEQ ID NO: 3885790 - RNA, 14 nt, Human
gugaugagggcagc

SEQ ID NO: 3885791 - RNA, 15 nt, Human
gugaugaggggaggg

SEQ ID NO: 3885792 - RNA, 15 nt, Human
gugaugccacacaga

SEQ ID NO: 3885793 - RNA, 19 nt, Human
gugaugccacacagagugg

SEQ ID NO: 3885794 - RNA, 15 nt, Human
gugaugcgcaguugc

SEQ ID NO: 3885795 - RNA, 22 nt, Human
gugaugcgcaugucacggaggg

SEQ ID NO: 3885796 - RNA, 22 nt, Human
gugaugcuaaagguuguauugc

SEQ ID NO: 3885797 - RNA, 16 nt, Human
gugauggggcccugcc

SEQ ID NO: 3885798 - RNA, 17 nt, Human
gugauggggcccugccu

SEQ ID NO: 3885799 - RNA, 16 nt, Human
gugaugguguagcccu

SEQ ID NO: 3885800 - RNA, 22 nt, Human
gugaugguuccccuguucacuc

SEQ ID NO: 3885801 - RNA, 16 nt, Human
gugaugucauacagag

SEQ ID NO: 3885802 - RNA, 17 nt, Human
gugaugucauacagaga

SEQ ID NO: 3885803 - RNA, 14 nt, Human
gugaugucaucugu

SEQ ID NO: 3885804 - RNA, 16 nt, Human
gugaugugacauuugu

SEQ ID NO: 3885805 - RNA, 13 nt, Human
gugauguuagugu

SEQ ID NO: 3885806 - RNA, 22 nt, Human
gugauguucuaaggcucugaga

SEQ ID NO: 3885807 - RNA, 15 nt, Human
gugauguuuuuauga

SEQ ID NO: 3885808 - RNA, 19 nt, Human
gugauuagaggcagaucug

SEQ ID NO: 3885809 - RNA, 14 nt, Human
gugauucaaucugu

SEQ ID NO: 3885810 - RNA, 16 nt, Human
gugauucaaucuguaa

SEQ ID NO: 3885811 - RNA, 20 nt, Human
gugauucacagugugaaucu

SEQ ID NO: 3885812 - RNA, 22 nt, Human
gugauuccacuacaccuggcug

SEQ ID NO: 3885813 - RNA, 15 nt, Human
gugauuccgcaguga

SEQ ID NO: 3885814 - RNA, 21 nt, Human
gugauuccuaagccacuugaa

SEQ ID NO: 3885815 - RNA, 19 nt, Human
gugauuccuuugaagagga

SEQ ID NO: 3885816 - RNA, 20 nt, Human
gugauucucaugccucagcc

SEQ ID NO: 3885817 - RNA, 13 nt, Human
gugauucuccugc

SEQ ID NO: 3885818 - RNA, 14 nt, Human
gugauucuccugcc

SEQ ID NO: 3885819 - RNA, 16 nt, Human
gugauucuccugccuc

SEQ ID NO: 3885820 - RNA, 18 nt, Human
gugauucuccugccucag

SEQ ID NO: 3885821 - RNA, 23 nt, Human
gugauucuccugccucagccucc

SEQ ID NO: 3885822 - RNA, 17 nt, Human
gugauugacagcuuugc

SEQ ID NO: 3885823 - RNA, 19 nt, Human
gugauugcagcuuuauguu

SEQ ID NO: 3885824 - RNA, 16 nt, Human
gugauugggacagagg

SEQ ID NO: 3885825 - RNA, 14 nt, Human
gugauuguggaaug

SEQ ID NO: 3885826 - RNA, 19 nt, Human
gugauuguggaauggagau

SEQ ID NO: 3885827 - RNA, 17 nt, Human
gugauuuaagggcccag

SEQ ID NO: 3885828 - RNA, 15 nt, Human
gugauuuaauagugu

SEQ ID NO: 3885829 - RNA, 19 nt, Human
gugauuuaauaguguuaau

SEQ ID NO: 3885830 - RNA, 18 nt, Human
gugauuuacgcucauugu

SEQ ID NO: 3885831 - RNA, 18 nt, Human
gugauuuagaacuguaug

SEQ ID NO: 3885832 - RNA, 19 nt, Human
gugauuucagagagggcag

SEQ ID NO: 3885833 - RNA, 20 nt, Human
gugauuucccguggccccag

SEQ ID NO: 3885834 - RNA, 14 nt, Human
gugauuugaaaaau

SEQ ID NO: 3885835 - RNA, 23 nt, Human
gugauuugaaaaauauaaaauua

SEQ ID NO: 3885836 - RNA, 21 nt, Human
gugauuugacuguuuuuaccc

SEQ ID NO: 3885837 - RNA, 22 nt, Human
gugauuugacuguuuuuaccca

SEQ ID NO: 3885838 - RNA, 13 nt, Human
gugauuuggaucu

SEQ ID NO: 3885839 - RNA, 15 nt, Human
gugauuuuuuuuuag

SEQ ID NO: 3885840 - RNA, 23 nt, Human
gugauuuuuuuuuuuuuccuguc

SEQ ID NO: 3885841 - RNA, 18 nt, Human
gugcaaaaauuuuuggau

SEQ ID NO: 3885842 - RNA, 19 nt, Human
gugcaaaagcuucaaauua

SEQ ID NO: 3885843 - RNA, 16 nt, Human
gugcaaaaggcuugca

SEQ ID NO: 3885844 - RNA, 19 nt, Human
gugcaaacccacucagaga

SEQ ID NO: 3885845 - RNA, 12 nt, Human
gugcaaagccac

SEQ ID NO: 3885846 - RNA, 19 nt, Human
gugcaaaugucagauacaa

SEQ ID NO: 3885847 - RNA, 23 nt, Human
gugcaaaugucagauacaaugua

SEQ ID NO: 3885848 - RNA, 14 nt, Human
gugcaacaggguau

SEQ ID NO: 3885849 - RNA, 19 nt, Human
gugcaagagacucuggccu

SEQ ID NO: 3885850 - RNA, 12 nt, Human
gugcaagagagg

SEQ ID NO: 3885851 - RNA, 15 nt, Human
gugcaagccccugcu

SEQ ID NO: 3885852 - RNA, 15 nt, Human
gugcaaggaccuaaa

SEQ ID NO: 3885853 - RNA, 12 nt, Human
guggagcaggcc

SEQ ID NO: 3885854 - RNA, 14 nt, Human
guggagcccaggag

SEQ ID NO: 3885855 - RNA, 15 nt, Human
guggagcccaggagu

SEQ ID NO: 3885856 - RNA, 14 nt, Human
guggagcucagccc

SEQ ID NO: 3885857 - RNA, 15 nt, Human
guggagcucagcccc

SEQ ID NO: 3885858 - RNA, 17 nt, Human
guggaggagcagugcag

SEQ ID NO: 3885859 - RNA, 19 nt, Human
guggaggaggaaggcaaga

SEQ ID NO: 3885860 - RNA, 15 nt, Human
guggaggaggccugg

SEQ ID NO: 3885861 - RNA, 13 nt, Human
guggaggcugcuc

SEQ ID NO: 3885862 - RNA, 13 nt, Human
guggaggcuuccu

SEQ ID NO: 3885863 - RNA, 15 nt, Human
guggaggcuuccugc

SEQ ID NO: 3885864 - RNA, 23 nt, Human
guggagggacaaguggacucagg

SEQ ID NO: 3885865 - RNA, 12 nt, Human
guggagggaggg

SEQ ID NO: 3885866 - RNA, 23 nt, Human
guggagggcacauuccuugccug

SEQ ID NO: 3885867 - RNA, 22 nt, Human
guggagggguaggggcugggaa

SEQ ID NO: 3885868 - RNA, 21 nt, Human
guggagguuaaggcugaggaa

SEQ ID NO: 3885869 - RNA, 15 nt, Human
guggagucauucuca

SEQ ID NO: 3885870 - RNA, 14 nt, Human
guggagucauuucu

SEQ ID NO: 3885871 - RNA, 20 nt, Human
guggagucccuuuugcauca

SEQ ID NO: 3885872 - RNA, 19 nt, Human
guggagugcaguggugcga

SEQ ID NO: 3885873 - RNA, 13 nt, Human
guggaguggaugc

SEQ ID NO: 3885874 - RNA, 16 nt, Human
guggauaacaaagaua

SEQ ID NO: 3885875 - RNA, 16 nt, Human
guggauauaaaaugug

SEQ ID NO: 3885876 - RNA, 14 nt, Human
guggauauuguuac

SEQ ID NO: 3885877 - RNA, 16 nt, Human
guggauauuuguauaa

SEQ ID NO: 3885878 - RNA, 19 nt, Human
guggaucuccaaggaccag

SEQ ID NO: 3885879 - RNA, 23 nt, Human
guggaucuccaaggaccagguua

SEQ ID NO: 3885880 - RNA, 18 nt, Human
guggaucuguccaaggaa

SEQ ID NO: 3885881 - RNA, 15 nt, Human
guggaugauguuucg

SEQ ID NO: 3885882 - RNA, 14 nt, Human
guggaugccucaga

SEQ ID NO: 3885883 - RNA, 18 nt, Human
guggaugccugguggcag

SEQ ID NO: 3885884 - RNA, 21 nt, Human
guggauggaaggggcugacag

SEQ ID NO: 3885885 - RNA, 15 nt, Human
guggauggccccagc

SEQ ID NO: 3885886 - RNA, 19 nt, Human
guggauggccccagcacag

SEQ ID NO: 3885887 - RNA, 18 nt, Human
guggauuaaacuuaugaa

SEQ ID NO: 3885888 - RNA, 21 nt, Human
guggauuaaacuuaugaaugu

SEQ ID NO: 3885889 - RNA, 22 nt, Human
guggauucuuguuuugcuuccc

SEQ ID NO: 3885890 - RNA, 13 nt, Human
guggauugagggu

SEQ ID NO: 3885891 - RNA, 19 nt, Human
guggauugcacguggccuc

SEQ ID NO: 3885892 - RNA, 19 nt, Human
guggauuuaacagaaaugu

SEQ ID NO: 3885893 - RNA, 14 nt, Human
guggauuucaguuu

SEQ ID NO: 3885894 - RNA, 13 nt, Human
guggcaaauauaa

SEQ ID NO: 3885895 - RNA, 15 nt, Human
guggcaaauauaaaa

SEQ ID NO: 3885896 - RNA, 21 nt, Human
guggcaagcugugacuucucc

SEQ ID NO: 3885897 - RNA, 16 nt, Human
guggcaaggcugugcu

SEQ ID NO: 3885898 - RNA, 16 nt, Human
guggcaaucugugggc

SEQ ID NO: 3885899 - RNA, 16 nt, Human
guggcacaggcccccu

SEQ ID NO: 3885900 - RNA, 23 nt, Human
guggcacauuuuuuuuuuuaauu

SEQ ID NO: 3885901 - RNA, 13 nt, Human
guggcaccagcag

SEQ ID NO: 3885902 - RNA, 14 nt, Human
guggcaccagcagc

SEQ ID NO: 3885903 - RNA, 19 nt, Human
guggcaccagcagccugga

SEQ ID NO: 3885904 - RNA, 19 nt, Human
guggcaccaggcgcugccc

SEQ ID NO: 3885905 - RNA, 14 nt, Human
guggcaccugucug

SEQ ID NO: 3885906 - RNA, 16 nt, Human
guggcacugagccccc

SEQ ID NO: 3885907 - RNA, 19 nt, Human
guggcacuugccuggguca

SEQ ID NO: 3885908 - RNA, 19 nt, Human
guggcacuuuuucauuugc

SEQ ID NO: 3885909 - RNA, 17 nt, Human
guggcagaaguguuuca

SEQ ID NO: 3885910 - RNA, 21 nt, Human
guggcagauaaucagccucuu

SEQ ID NO: 3885911 - RNA, 19 nt, Human
guggcagauuuuacaaaag

SEQ ID NO: 3885912 - RNA, 22 nt, Human
guggcagauuuuacaaaagaug

SEQ ID NO: 3885913 - RNA, 13 nt, Human
guggcagcaacaa

SEQ ID NO: 3885914 - RNA, 16 nt, Human
guggcagcccagccag

SEQ ID NO: 3885915 - RNA, 22 nt, Human
guggcagcucaccucucccuug

SEQ ID NO: 3885916 - RNA, 23 nt, Human
guggcagcugcgguccacccagg

SEQ ID NO: 3885917 - RNA, 19 nt, Human
guggcagcugcuuuugucu

SEQ ID NO: 3885918 - RNA, 22 nt, Human
guggcaggcagaggcccaggcu

SEQ ID NO: 3885919 - RNA, 12 nt, Human
guggcaggcagc

SEQ ID NO: 3885920 - RNA, 20 nt, Human
guggcagggcacagggccug

SEQ ID NO: 3885921 - RNA, 16 nt, Human
guggcagggcucagga

SEQ ID NO: 3885922 - RNA, 17 nt, Human
guggcagggcucaggau

SEQ ID NO: 3885923 - RNA, 17 nt, Human
guggcaguaaagagaaa

SEQ ID NO: 3885924 - RNA, 11 nt, Human
guggcagucug

SEQ ID NO: 3885925 - RNA, 16 nt, Human
guggcagugggagcug

SEQ ID NO: 3885926 - RNA, 15 nt, Human
guggcaguuuggcaa

SEQ ID NO: 3885927 - RNA, 14 nt, Human
guggcaucaccuua

SEQ ID NO: 3885928 - RNA, 19 nt, Human
guggcaucaucucagcuca

SEQ ID NO: 3885929 - RNA, 14 nt, Human
guggcauccagagu

SEQ ID NO: 3885930 - RNA, 20 nt, Human
guggcaucuuugccuugggc

SEQ ID NO: 3885931 - RNA, 16 nt, Human
guggcaugugcuguga

SEQ ID NO: 3885932 - RNA, 15 nt, Human
guggcauguggccug

SEQ ID NO: 3885933 - RNA, 19 nt, Human
guggcauguggccuguggc

SEQ ID NO: 3885934 - RNA, 16 nt, Human
guggcauuggcagcag

SEQ ID NO: 3885935 - RNA, 22 nt, Human
guggcauuggcagcaggugcug

SEQ ID NO: 3885936 - RNA, 17 nt, Human
guggccaagaagcagug

SEQ ID NO: 3885937 - RNA, 14 nt, Human
guggccaaguucuu

SEQ ID NO: 3885938 - RNA, 13 nt, Human
guggccacucagc

SEQ ID NO: 3885939 - RNA, 21 nt, Human
guggccagaccagagcucugg

SEQ ID NO: 3885940 - RNA, 14 nt, Human
guggccagcccggc

SEQ ID NO: 3885941 - RNA, 15 nt, Human
guggccagcccggcu

SEQ ID NO: 3885942 - RNA, 16 nt, Human
guggccagcccggcug

SEQ ID NO: 3885943 - RNA, 15 nt, Human
guggccagccuggau

SEQ ID NO: 3885944 - RNA, 12 nt, Human
guggccaggagg

SEQ ID NO: 3885945 - RNA, 21 nt, Human
guggccaggcugccuggccuu

SEQ ID NO: 3885946 - RNA, 18 nt, Human
guggccaucccugugagg

SEQ ID NO: 3885947 - RNA, 23 nt, Human
guggccauucuuuuuuucuuggc

SEQ ID NO: 3885948 - RNA, 12 nt, Human
guggccccaccc

SEQ ID NO: 3885949 - RNA, 18 nt, Human
guggccccacccugggcc

SEQ ID NO: 3885950 - RNA, 15 nt, Human
guggccccagccugg

SEQ ID NO: 3885951 - RNA, 18 nt, Human
guggccccagccuggccc

SEQ ID NO: 3885952 - RNA, 20 nt, Human
guggccccagccuggcccag

SEQ ID NO: 3885953 - RNA, 17 nt, Human
guggccccguuucuggu

SEQ ID NO: 3885954 - RNA, 19 nt, Human
guggcccgacagccuggca

SEQ ID NO: 3885955 - RNA, 18 nt, Human
guggcccugcccucuccu

SEQ ID NO: 3885956 - RNA, 13 nt, Human
guggcccuggccu

SEQ ID NO: 3885957 - RNA, 17 nt, Human
guggcccuggccugcug

SEQ ID NO: 3885958 - RNA, 23 nt, Human
guggcccuuaugacugccaagac

SEQ ID NO: 3885959 - RNA, 14 nt, Human
guggcccuuccugg

SEQ ID NO: 3885960 - RNA, 23 nt, Human
guggcccuuucggauccagggag

SEQ ID NO: 3885961 - RNA, 21 nt, Human
guggccuaaccugccgagagu

SEQ ID NO: 3885962 - RNA, 19 nt, Human
guggccuacaaaucaguaa

SEQ ID NO: 3885963 - RNA, 19 nt, Human
guggccucaacccucccuc

SEQ ID NO: 3885964 - RNA, 12 nt, Human
guggccucagaa

SEQ ID NO: 3885965 - RNA, 22 nt, Human
guggccucagcucaaugcaguu

SEQ ID NO: 3885966 - RNA, 14 nt, Human
guggccucccaacu

SEQ ID NO: 3885967 - RNA, 17 nt, Human
guggccuccuugcuugu

SEQ ID NO: 3885968 - RNA, 21 nt, Human
guggccuccuugcuuguuaca

SEQ ID NO: 3885969 - RNA, 13 nt, Human
guggccucugugg

SEQ ID NO: 3885970 - RNA, 18 nt, Human
guggccugacucccccag

SEQ ID NO: 3885971 - RNA, 12 nt, Human
guggccuggcca

SEQ ID NO: 3885972 - RNA, 13 nt, Human
guggccuggccag

SEQ ID NO: 3885973 - RNA, 16 nt, Human
guggccuggccaggag

SEQ ID NO: 3885974 - RNA, 18 nt, Human
guggccuggccaggagcu

SEQ ID NO: 3885975 - RNA, 19 nt, Human
guggccuggcuccgcugug

SEQ ID NO: 3885976 - RNA, 16 nt, Human
guggccuggcuugucu

SEQ ID NO: 3885977 - RNA, 12 nt, Human
guggccugggcc

SEQ ID NO: 3885978 - RNA, 15 nt, Human
guggccugggccucc

SEQ ID NO: 3885979 - RNA, 14 nt, Human
guggccuggucccu

SEQ ID NO: 3885980 - RNA, 16 nt, Human
guggccuguggccugu

SEQ ID NO: 3885981 - RNA, 15 nt, Human
guggccuguguggcc

SEQ ID NO: 3885982 - RNA, 17 nt, Human
guggccuuccccagcau

SEQ ID NO: 3885983 - RNA, 19 nt, Human
guggccuuccccagccucu

SEQ ID NO: 3885984 - RNA, 20 nt, Human
guggccuuccccagccucuu

SEQ ID NO: 3885985 - RNA, 17 nt, Human
guggcgaaaucccugcu

SEQ ID NO: 3885986 - RNA, 22 nt, Human
guggcgaaaucccugcucacug

SEQ ID NO: 3885987 - RNA, 17 nt, Human
guggcgccgucuccagg

SEQ ID NO: 3885988 - RNA, 22 nt, Human
guggcgccgucuccaggggcug

SEQ ID NO: 3885989 - RNA, 16 nt, Human
guggcgcgcaccugua

SEQ ID NO: 3885990 - RNA, 14 nt, Human
guggcggugccugg

SEQ ID NO: 3885991 - RNA, 17 nt, Human
guggcggugccugggug

SEQ ID NO: 3885992 - RNA, 16 nt, Human
guggcguuuguaauga

SEQ ID NO: 3885993 - RNA, 21 nt, Human
guggcuaaaggucccaaggca

SEQ ID NO: 3885994 - RNA, 17 nt, Human
guggcuaacuuggguua

SEQ ID NO: 3885995 - RNA, 16 nt, Human
guggcuaaugguguaa

SEQ ID NO: 3885996 - RNA, 20 nt, Human
guggcuacucugugccagag

SEQ ID NO: 3885997 - RNA, 18 nt, Human
guggcuagucaagcuccu

SEQ ID NO: 3885998 - RNA, 17 nt, Human
ucagcagugagagcaga

SEQ ID NO: 3885999 - RNA, 14 nt, Human
ucagcaguugcugg

SEQ ID NO: 3886000 - RNA, 22 nt, Human
ucagcaguugcugguaaaauga

SEQ ID NO: 3886001 - RNA, 21 nt, Human
ucagcaguuguuauuacaucc

SEQ ID NO: 3886002 - RNA, 23 nt, Human
ucagcauauuuguauaguugcuu

SEQ ID NO: 3886003 - RNA, 18 nt, Human
ucagcauccucaguuccu

SEQ ID NO: 3886004 - RNA, 19 nt, Human
ucagcaugaauuuguaaug

SEQ ID NO: 3886005 - RNA, 19 nt, Human
ucagcaugucuauucagcu

SEQ ID NO: 3886006 - RNA, 20 nt, Human
ucagcauucucacuccuacc

SEQ ID NO: 3886007 - RNA, 23 nt, Human
ucagcauucucacuccuaccugg

SEQ ID NO: 3886008 - RNA, 18 nt, Human
ucagcauucuuagccugu

SEQ ID NO: 3886009 - RNA, 18 nt, Human
ucagcauugauauuugug

SEQ ID NO: 3886010 - RNA, 13 nt, Human
ucagcauuucuuu

SEQ ID NO: 3886011 - RNA, 11 nt, Human
ucagcauuuga

SEQ ID NO: 3886012 - RNA, 17 nt, Human
ucagcauuugaucuguu

SEQ ID NO: 3886013 - RNA, 16 nt, Human
ucagccaaauguaauu

SEQ ID NO: 3886014 - RNA, 15 nt, Human
ucagccaagcacagu

SEQ ID NO: 3886015 - RNA, 23 nt, Human
ucagccaccauccuauugcaaag

SEQ ID NO: 3886016 - RNA, 20 nt, Human
ucagccacccugaggccucu

SEQ ID NO: 3886017 - RNA, 17 nt, Human
ucagccacccugaguug

SEQ ID NO: 3886018 - RNA, 21 nt, Human
ucagccacuaagaaccccucu

SEQ ID NO: 3886019 - RNA, 23 nt, Human
ucagccagcacuuguccagcuga

SEQ ID NO: 3886020 - RNA, 12 nt, Human
ucagccagccuc

SEQ ID NO: 3886021 - RNA, 13 nt, Human
ucagccaggacca

SEQ ID NO: 3886022 - RNA, 23 nt, Human
ucagccaggaccauaccgggucu

SEQ ID NO: 3886023 - RNA, 20 nt, Human
ucagccagugaccaaccuuu

SEQ ID NO: 3886024 - RNA, 18 nt, Human
ucagccaucaacaagagu

SEQ ID NO: 3886025 - RNA, 17 nt, Human
ucagccaucaacuaaag

SEQ ID NO: 3886026 - RNA, 16 nt, Human
ucagccauucacugcc

SEQ ID NO: 3886027 - RNA, 22 nt, Human
ucagcccaaaccaccagaagcc

SEQ ID NO: 3886028 - RNA, 12 nt, Human
ucagcccacccc

SEQ ID NO: 3886029 - RNA, 18 nt, Human
ucagcccaccccccucau

SEQ ID NO: 3886030 - RNA, 12 nt, Human
ucagcccagaag

SEQ ID NO: 3886031 - RNA, 16 nt, Human
ucagcccagaagaaaa

SEQ ID NO: 3886032 - RNA, 18 nt, Human
ucagccccaccccagggc

SEQ ID NO: 3886033 - RNA, 19 nt, Human
ucagccccaccccagggca

SEQ ID NO: 3886034 - RNA, 23 nt, Human
ucagccccaccccagggcagcca

SEQ ID NO: 3886035 - RNA, 16 nt, Human
ucagcccccagccccu

SEQ ID NO: 3886036 - RNA, 20 nt, Human
ucagcccccagccccucccc

SEQ ID NO: 3886037 - RNA, 19 nt, Human
ucagccccgagcugucccc

SEQ ID NO: 3886038 - RNA, 16 nt, Human
ucagccccgcguggaa

SEQ ID NO: 3886039 - RNA, 16 nt, Human
ucagccccuaggagua

SEQ ID NO: 3886040 - RNA, 13 nt, Human
ucagccccuccuc

SEQ ID NO: 3886041 - RNA, 15 nt, Human
ucagccccuccucug

SEQ ID NO: 3886042 - RNA, 20 nt, Human
ucagccccucuugcccccca

SEQ ID NO: 3886043 - RNA, 22 nt, Human
ucagccccugauccugugaagu

SEQ ID NO: 3886044 - RNA, 18 nt, Human
ucagcccucccugccccu

SEQ ID NO: 3886045 - RNA, 19 nt, Human
ucagcccucccugccccuc

SEQ ID NO: 3886046 - RNA, 23 nt, Human
ucagcccugaggugaaagggagc

SEQ ID NO: 3886047 - RNA, 13 nt, Human
ucagcccuggagg

SEQ ID NO: 3886048 - RNA, 12 nt, Human
ucagcccugggc

SEQ ID NO: 3886049 - RNA, 18 nt, Human
ucagcccugggccccacc

SEQ ID NO: 3886050 - RNA, 19 nt, Human
ucagccuagccgaccucag

SEQ ID NO: 3886051 - RNA, 20 nt, Human
ucagccuagccgaccucagc

SEQ ID NO: 3886052 - RNA, 22 nt, Human
ucagccuagccgaccucagccu

SEQ ID NO: 3886053 - RNA, 20 nt, Human
ucagccuaguggcuuguccu

SEQ ID NO: 3886054 - RNA, 16 nt, Human
ucagccuccagccucu

SEQ ID NO: 3886055 - RNA, 18 nt, Human
ucagccuccagccucugu

SEQ ID NO: 3886056 - RNA, 23 nt, Human
ucagccuccauccuacccccugu

SEQ ID NO: 3886057 - RNA, 12 nt, Human
ucagccucccaa

SEQ ID NO: 3886058 - RNA, 16 nt, Human
ucagccucccacagug

SEQ ID NO: 3886059 - RNA, 21 nt, Human
ucagccucccacagugcuggg

SEQ ID NO: 3886060 - RNA, 12 nt, Human
ucagccucccga

SEQ ID NO: 3886061 - RNA, 19 nt, Human
ucagccuccucaucugggg

SEQ ID NO: 3886062 - RNA, 22 nt, Human
ucagccuccugaguagcuggga

SEQ ID NO: 3886063 - RNA, 13 nt, Human
ucagccuccugug

SEQ ID NO: 3886064 - RNA, 20 nt, Human
ucagccuccuguguagcugg

SEQ ID NO: 3886065 - RNA, 23 nt, Human
ucagccucgcaggccucccugcc

SEQ ID NO: 3886066 - RNA, 16 nt, Human
ucagccucucucccag

SEQ ID NO: 3886067 - RNA, 19 nt, Human
ucagccucucucccagucu

SEQ ID NO: 3886068 - RNA, 17 nt, Human
ucagccugaaccccagg

SEQ ID NO: 3886069 - RNA, 19 nt, Human
ucagccugaaccccagggc

SEQ ID NO: 3886070 - RNA, 10 nt, Human
ucagccugag

SEQ ID NO: 3886071 - RNA, 11 nt, Human
ucagccugagu

SEQ ID NO: 3886072 - RNA, 12 nt, Human
ucagccugcaca

SEQ ID NO: 3886073 - RNA, 16 nt, Human
ucagccugcuccagcu

SEQ ID NO: 3886074 - RNA, 19 nt, Human
ucagccugcuccagcuguu

SEQ ID NO: 3886075 - RNA, 21 nt, Human
ucagccugcugcccaggcugu

SEQ ID NO: 3886076 - RNA, 22 nt, Human
ucagccugcugcccaggcugug

SEQ ID NO: 3886077 - RNA, 12 nt, Human
ucagccuggcca

SEQ ID NO: 3886078 - RNA, 19 nt, Human
ucagccugggcgcuggucc

SEQ ID NO: 3886079 - RNA, 14 nt, Human
ucagccuggugggc

SEQ ID NO: 3886080 - RNA, 19 nt, Human
ucagccuggugggccuccu

SEQ ID NO: 3886081 - RNA, 16 nt, Human
ucagccugugcugccc

SEQ ID NO: 3886082 - RNA, 16 nt, Human
ucagccuuacauuugu

SEQ ID NO: 3886083 - RNA, 15 nt, Human
ucagccuuagcucuc

SEQ ID NO: 3886084 - RNA, 23 nt, Human
ucagccuuccccuugcccagggc

SEQ ID NO: 3886085 - RNA, 15 nt, Human
ucagccuucuuuuuc

SEQ ID NO: 3886086 - RNA, 18 nt, Human
ucagccuucuuuuucugg

SEQ ID NO: 3886087 - RNA, 20 nt, Human
ucagccuucuuuuucuggac

SEQ ID NO: 3886088 - RNA, 21 nt, Human
ucagccuucuuuuucuggacu

SEQ ID NO: 3886089 - RNA, 14 nt, Human
ucagccuugccaga

SEQ ID NO: 3886090 - RNA, 20 nt, Human
ucagcgacuccguuggccac

SEQ ID NO: 3886091 - RNA, 21 nt, Human
ucagcgcugucaggauugcga

SEQ ID NO: 3886092 - RNA, 22 nt, Human
ucagcggccccuugacucuggg

SEQ ID NO: 3886093 - RNA, 15 nt, Human
ucagcggggacagcu

SEQ ID NO: 3886094 - RNA, 13 nt, Human
ucagcguggccuu

SEQ ID NO: 3886095 - RNA, 14 nt, Human
ucagcguggccuug

SEQ ID NO: 3886096 - RNA, 14 nt, Human
ucagcuaagcucac

SEQ ID NO: 3886097 - RNA, 15 nt, Human
ucagcuacugauuuu

SEQ ID NO: 3886098 - RNA, 19 nt, Human
ucagcuacuuaagagaaau

SEQ ID NO: 3886099 - RNA, 19 nt, Human
ucagcuaggaacaaaucuu

SEQ ID NO: 3886100 - RNA, 13 nt, Human
ucagcucacgcuu

SEQ ID NO: 3886101 - RNA, 16 nt, Human
ucagcucacugcaacc

SEQ ID NO: 3886102 - RNA, 14 nt, Human
ucagcucacuguuc

SEQ ID NO: 3886103 - RNA, 12 nt, Human
ucagcucagagc

SEQ ID NO: 3886104 - RNA, 18 nt, Human
ucagcucagcgccagccu

SEQ ID NO: 3886105 - RNA, 16 nt, Human
ucagcuccagccccuu

SEQ ID NO: 3886106 - RNA, 15 nt, Human
ucagcuccagcucac

SEQ ID NO: 3886107 - RNA, 22 nt, Human
ucagcuccagggaauccaagcc

SEQ ID NO: 3886108 - RNA, 19 nt, Human
ucagcuccagguggcucug

SEQ ID NO: 3886109 - RNA, 13 nt, Human
ucagcucccacaa

SEQ ID NO: 3886110 - RNA, 18 nt, Human
ucagcucccacaagccuc

SEQ ID NO: 3886111 - RNA, 16 nt, Human
ucagcucccauuucua

SEQ ID NO: 3886112 - RNA, 13 nt, Human
ucagcuccccaga

SEQ ID NO: 3886113 - RNA, 15 nt, Human
ucagcucccccuguc

SEQ ID NO: 3886114 - RNA, 18 nt, Human
ucagcucggcucagcucg

SEQ ID NO: 3886115 - RNA, 15 nt, Human
ucagcucucaucuga

SEQ ID NO: 3886116 - RNA, 14 nt, Human
ucagcucucuguau

SEQ ID NO: 3886117 - RNA, 16 nt, Human
ucagcucugaaagaga

SEQ ID NO: 3886118 - RNA, 16 nt, Human
ucagcucugacauucu

SEQ ID NO: 3886119 - RNA, 22 nt, Human
ucagcucugacauucugauucg

SEQ ID NO: 3886120 - RNA, 16 nt, Human
ucagcucuggcucaca

SEQ ID NO: 3886121 - RNA, 17 nt, Human
ucagcucugggagagga

SEQ ID NO: 3886122 - RNA, 12 nt, Human
ucagcugagccu

SEQ ID NO: 3886123 - RNA, 18 nt, Human
ucagcugagccuucugag

SEQ ID NO: 3886124 - RNA, 21 nt, Human
ucagcugcccccgcucauggg

SEQ ID NO: 3886125 - RNA, 15 nt, Human
ucagcugcuacuacu

SEQ ID NO: 3886126 - RNA, 15 nt, Human
ucagcugcucccugg

SEQ ID NO: 3886127 - RNA, 19 nt, Human
ucagcugcucccuggcauu

SEQ ID NO: 3886128 - RNA, 12 nt, Human
ucagcugcuucu

SEQ ID NO: 3886129 - RNA, 15 nt, Human
ucagcugcuucuccc

SEQ ID NO: 3886130 - RNA, 16 nt, Human
ucagcuguaguccuca

SEQ ID NO: 3886131 - RNA, 14 nt, Human
ucagcuguccuccc

SEQ ID NO: 3886132 - RNA, 17 nt, Human
ucagcuguccucccucc

SEQ ID NO: 3886133 - RNA, 15 nt, Human
ucagcuguccugcag

SEQ ID NO: 3886134 - RNA, 17 nt, Human
ucagcuguccugcagca

SEQ ID NO: 3886135 - RNA, 18 nt, Human
ucagcuguccugcagcaa

SEQ ID NO: 3886136 - RNA, 14 nt, Human
ucagcugucuuuug

SEQ ID NO: 3886137 - RNA, 12 nt, Human
ucagcugugaac

SEQ ID NO: 3886138 - RNA, 15 nt, Human
ucagcuguucagauu

SEQ ID NO: 3886139 - RNA, 16 nt, Human
ucagcuguuugucaua

SEQ ID NO: 3886140 - RNA, 18 nt, Human
ucagcuuccccaguagcu

SEQ ID NO: 3886141 - RNA, 15 nt, Human
ucagcuuccuaccca

SEQ ID NO: 3886142 - RNA, 20 nt, Human
ucagcuucuauccuugacuu

SEQ ID NO: 3886143 - RNA, 21 nt, Human
ucccagggagcaagggcaggg

SEQ ID NO: 3886144 - RNA, 17 nt, Human
ucccagggccagggccc

SEQ ID NO: 3886145 - RNA, 22 nt, Human
ucccagggcuacucacucaagu

SEQ ID NO: 3886146 - RNA, 12 nt, Human
ucccaggggacc

SEQ ID NO: 3886147 - RNA, 16 nt, Human
ucccaggguagcccgc

SEQ ID NO: 3886148 - RNA, 22 nt, Human
ucccaggguagcccgccugcca

SEQ ID NO: 3886149 - RNA, 21 nt, Human
ucccagguguuaacauuccaa

SEQ ID NO: 3886150 - RNA, 21 nt, Human
ucccagguuggcucugccagu

SEQ ID NO: 3886151 - RNA, 23 nt, Human
ucccagguuggcucugccagucc

SEQ ID NO: 3886152 - RNA, 16 nt, Human
ucccaguagaaaauau

SEQ ID NO: 3886153 - RNA, 20 nt, Human
ucccaguccaaauguccucc

SEQ ID NO: 3886154 - RNA, 15 nt, Human
ucccagugacacuuc

SEQ ID NO: 3886155 - RNA, 20 nt, Human
ucccagugacacuucagaga

SEQ ID NO: 3886156 - RNA, 15 nt, Human
ucccaguggcugcug

SEQ ID NO: 3886157 - RNA, 22 nt, Human
ucccaguggcugcugcccaggc

SEQ ID NO: 3886158 - RNA, 14 nt, Human
ucccagugggaggg

SEQ ID NO: 3886159 - RNA, 15 nt, Human
ucccagugggagggg

SEQ ID NO: 3886160 - RNA, 17 nt, Human
ucccagugucuuccugu

SEQ ID NO: 3886161 - RNA, 20 nt, Human
ucccagugucuuccuguggg

SEQ ID NO: 3886162 - RNA, 22 nt, Human
ucccauaaccgcugauucucag

SEQ ID NO: 3886163 - RNA, 22 nt, Human
ucccauaauuuucuucaugcaa

SEQ ID NO: 3886164 - RNA, 21 nt, Human
ucccauagauacucucuucuu

SEQ ID NO: 3886165 - RNA, 15 nt, Human
ucccauaggcccagu

SEQ ID NO: 3886166 - RNA, 18 nt, Human
ucccauagucccugccac

SEQ ID NO: 3886167 - RNA, 16 nt, Human
ucccauaugccugggc

SEQ ID NO: 3886168 - RNA, 22 nt, Human
ucccauaugccugggcagaagg

SEQ ID NO: 3886169 - RNA, 14 nt, Human
ucccaucaaaacuc

SEQ ID NO: 3886170 - RNA, 20 nt, Human
ucccaucacguguacuggcu

SEQ ID NO: 3886171 - RNA, 23 nt, Human
ucccaucauuacccuucccugca

SEQ ID NO: 3886172 - RNA, 14 nt, Human
ucccauccaggcag

SEQ ID NO: 3886173 - RNA, 14 nt, Human
ucccauccagggcc

SEQ ID NO: 3886174 - RNA, 16 nt, Human
ucccaucccagcugaa

SEQ ID NO: 3886175 - RNA, 19 nt, Human
ucccaucccaucccauccc

SEQ ID NO: 3886176 - RNA, 18 nt, Human
ucccaucccaucccgcuc

SEQ ID NO: 3886177 - RNA, 14 nt, Human
ucccauccccagcg

SEQ ID NO: 3886178 - RNA, 17 nt, Human
ucccaucccccugcccu

SEQ ID NO: 3886179 - RNA, 13 nt, Human
ucccauccccugg

SEQ ID NO: 3886180 - RNA, 15 nt, Human
ucccauccccuggac

SEQ ID NO: 3886181 - RNA, 18 nt, Human
ucccauccucuucuuuua

SEQ ID NO: 3886182 - RNA, 15 nt, Human
ucccauccugugugu

SEQ ID NO: 3886183 - RNA, 13 nt, Human
ucccaucgcuguc

SEQ ID NO: 3886184 - RNA, 17 nt, Human
ucccaucuaagcugcag

SEQ ID NO: 3886185 - RNA, 18 nt, Human
ucccaucuaagcugcagc

SEQ ID NO: 3886186 - RNA, 20 nt, Human
ucccaucuaagcugcagcuu

SEQ ID NO: 3886187 - RNA, 19 nt, Human
ucccaucucacacaugagc

SEQ ID NO: 3886188 - RNA, 23 nt, Human
ucccaucucacacaugagcauca

SEQ ID NO: 3886189 - RNA, 14 nt, Human
ucccaucucuuccu

SEQ ID NO: 3886190 - RNA, 15 nt, Human
ucccaucucuuccuu

SEQ ID NO: 3886191 - RNA, 16 nt, Human
ucccaucucuuccuug

SEQ ID NO: 3886192 - RNA, 13 nt, Human
ucccaucugcacc

SEQ ID NO: 3886193 - RNA, 13 nt, Human
ucccaucugcuuc

SEQ ID NO: 3886194 - RNA, 17 nt, Human
ucccaucuggucauuug

SEQ ID NO: 3886195 - RNA, 21 nt, Human
ucccaucugugaaaggaaaga

SEQ ID NO: 3886196 - RNA, 21 nt, Human
ucccaucuuaacucuuugccu

SEQ ID NO: 3886197 - RNA, 21 nt, Human
ucccaucuuuuuaaccucugu

SEQ ID NO: 3886198 - RNA, 11 nt, Human
ucccaugaagc

SEQ ID NO: 3886199 - RNA, 14 nt, Human
ucccaugacccacc

SEQ ID NO: 3886200 - RNA, 16 nt, Human
ucccaugacccacccc

SEQ ID NO: 3886201 - RNA, 21 nt, Human
ucccaugacccaccccugugc

SEQ ID NO: 3886202 - RNA, 14 nt, Human
ucccaugacccagg

SEQ ID NO: 3886203 - RNA, 15 nt, Human
ucccaugagccucag

SEQ ID NO: 3886204 - RNA, 17 nt, Human
ucccaugagccucagca

SEQ ID NO: 3886205 - RNA, 18 nt, Human
ucccaugagccucagcau

SEQ ID NO: 3886206 - RNA, 20 nt, Human
ucccaugagccucagcaucc

SEQ ID NO: 3886207 - RNA, 22 nt, Human
ucccaugagccucagcauccug

SEQ ID NO: 3886208 - RNA, 23 nt, Human
ucccaugagcuccuuaaggcucu

SEQ ID NO: 3886209 - RNA, 16 nt, Human
ucccaugaucccugug

SEQ ID NO: 3886210 - RNA, 13 nt, Human
ucccaugauuuca

SEQ ID NO: 3886211 - RNA, 14 nt, Human
ucccaugauuucau

SEQ ID NO: 3886212 - RNA, 16 nt, Human
ucccaugauuucaugu

SEQ ID NO: 3886213 - RNA, 19 nt, Human
ucccaugauuucauguacu

SEQ ID NO: 3886214 - RNA, 15 nt, Human
ucccaugcaggcccu

SEQ ID NO: 3886215 - RNA, 12 nt, Human
ucccaugcccug

SEQ ID NO: 3886216 - RNA, 21 nt, Human
ucccauggacacuccagugcc

SEQ ID NO: 3886217 - RNA, 13 nt, Human
ucccauggagccc

SEQ ID NO: 3886218 - RNA, 15 nt, Human
ucccauggagcccca

SEQ ID NO: 3886219 - RNA, 23 nt, Human
ucccaugggcagaggaccaggcu

SEQ ID NO: 3886220 - RNA, 15 nt, Human
ucccauguagccccc

SEQ ID NO: 3886221 - RNA, 15 nt, Human
ucccaugucacugca

SEQ ID NO: 3886222 - RNA, 14 nt, Human
ucccauguucaagc

SEQ ID NO: 3886223 - RNA, 16 nt, Human
ucccauuagcaaaaau

SEQ ID NO: 3886224 - RNA, 21 nt, Human
ucccauuaggacaaucagucc

SEQ ID NO: 3886225 - RNA, 16 nt, Human
ucccauuauucaaagu

SEQ ID NO: 3886226 - RNA, 19 nt, Human
ucccauuauucaaaguugc

SEQ ID NO: 3886227 - RNA, 16 nt, Human
ucccauucaagauucc

SEQ ID NO: 3886228 - RNA, 13 nt, Human
ucccauucccugg

SEQ ID NO: 3886229 - RNA, 17 nt, Human
ucccauuccugaagaac

SEQ ID NO: 3886230 - RNA, 15 nt, Human
ucccauucuuggccc

SEQ ID NO: 3886231 - RNA, 14 nt, Human
ucccauugaaaaug

SEQ ID NO: 3886232 - RNA, 13 nt, Human
ucccauugcccug

SEQ ID NO: 3886233 - RNA, 16 nt, Human
ucccauugucccucug

SEQ ID NO: 3886234 - RNA, 18 nt, Human
ucccauugucccucugcc

SEQ ID NO: 3886235 - RNA, 24 nt, Human
ucccauuucuaaaggccucuuccu

SEQ ID NO: 3886236 - RNA, 14 nt, Human
ucccauuucuacuc

SEQ ID NO: 3886237 - RNA, 16 nt, Human
ucccauuucucacuga

SEQ ID NO: 3886238 - RNA, 15 nt, Human
ucccauuuguaauuu

SEQ ID NO: 3886239 - RNA, 19 nt, Human
ucccauuuucagacugcuu

SEQ ID NO: 3886240 - RNA, 21 nt, Human
ucccauuuucagacugcuuua

SEQ ID NO: 3886241 - RNA, 18 nt, Human
ucccauuuuggaauuugc

SEQ ID NO: 3886242 - RNA, 16 nt, Human
uccccaaaaaccucac

SEQ ID NO: 3886243 - RNA, 19 nt, Human
uccccaaaagcgugagcuu

SEQ ID NO: 3886244 - RNA, 16 nt, Human
uccccaaaccugcaag

SEQ ID NO: 3886245 - RNA, 18 nt, Human
uccccaaagucuuaaaau

SEQ ID NO: 3886246 - RNA, 14 nt, Human
uccccaaauccgaa

SEQ ID NO: 3886247 - RNA, 20 nt, Human
uccccaacagcgcccaaagg

SEQ ID NO: 3886248 - RNA, 15 nt, Human
uccccaacaguguga

SEQ ID NO: 3886249 - RNA, 21 nt, Human
uccccaacccccauucucauc

SEQ ID NO: 3886250 - RNA, 23 nt, Human
uccccaacccccauucucaucug

SEQ ID NO: 3886251 - RNA, 17 nt, Human
uccccaacccugccccu

SEQ ID NO: 3886252 - RNA, 19 nt, Human
uccccaacccugccccugc

SEQ ID NO: 3886253 - RNA, 18 nt, Human
uccccaacugaccaccuu

SEQ ID NO: 3886254 - RNA, 19 nt, Human
uccccaaggcccccugccu

SEQ ID NO: 3886255 - RNA, 23 nt, Human
uccccaaggcccccugccugccc

SEQ ID NO: 3886256 - RNA, 23 nt, Human
uccccaauaucuugcuugaacuu

SEQ ID NO: 3886257 - RNA, 17 nt, Human
uccccaaugagacuugc

SEQ ID NO: 3886258 - RNA, 21 nt, Human
uccccaaugagacuugccuuc

SEQ ID NO: 3886259 - RNA, 10 nt, Human
uccccacacu

SEQ ID NO: 3886260 - RNA, 17 nt, Human
uccccacagcgucccug

SEQ ID NO: 3886261 - RNA, 17 nt, Human
uccccaccagaugcuga

SEQ ID NO: 3886262 - RNA, 20 nt, Human
uccccaccagaugcugaaaa

SEQ ID NO: 3886263 - RNA, 13 nt, Human
uccccacccacca

SEQ ID NO: 3886264 - RNA, 22 nt, Human
uccccacccaccaacccucagg

SEQ ID NO: 3886265 - RNA, 21 nt, Human
uccccaccccuaccccuggcu

SEQ ID NO: 3886266 - RNA, 23 nt, Human
uccccaccccuaccccuggcugu

SEQ ID NO: 3886267 - RNA, 17 nt, Human
uccccacccuccccuuc

SEQ ID NO: 3886268 - RNA, 16 nt, Human
uccccacccuccuggc

SEQ ID NO: 3886269 - RNA, 22 nt, Human
uccccacccuccuggccucaga

SEQ ID NO: 3886270 - RNA, 17 nt, Human
uccccaccuccaggcuu

SEQ ID NO: 3886271 - RNA, 13 nt, Human
uccccaccuggga

SEQ ID NO: 3886272 - RNA, 14 nt, Human
uccccaccugggac

SEQ ID NO: 3886273 - RNA, 15 nt, Human
uccccacgagggcug

SEQ ID NO: 3886274 - RNA, 20 nt, Human
uccccacgagggcuggcugg

SEQ ID NO: 3886275 - RNA, 18 nt, Human
uccccacgcccuccccuc

SEQ ID NO: 3886276 - RNA, 19 nt, Human
uccccacggccgcuccagg

SEQ ID NO: 3886277 - RNA, 20 nt, Human
uccccacggccgcuccaggg

SEQ ID NO: 3886278 - RNA, 23 nt, Human
uccccacggggccucgggaccuc

SEQ ID NO: 3886279 - RNA, 15 nt, Human
uccccacugccuacu

SEQ ID NO: 3886280 - RNA, 20 nt, Human
uccccacugccuacugcauc

SEQ ID NO: 3886281 - RNA, 13 nt, Human
uccccacuggagc

SEQ ID NO: 3886282 - RNA, 15 nt, Human
uccccacuggagcag

SEQ ID NO: 3886283 - RNA, 19 nt, Human
uccccacuuguccgcuggg

SEQ ID NO: 3886284 - RNA, 19 nt, Human
uccccagaacucugccugc

SEQ ID NO: 3886285 - RNA, 17 nt, Human
uccccagaauggaggca

SEQ ID NO: 3886286 - RNA, 15 nt, Human
uccccagacuuguug

SEQ ID NO: 3886287 - RNA, 19 nt, Human
ucccuccacguucaccccu

SEQ ID NO: 3886288 - RNA, 23 nt, Human
ucccuccacuccuuccugccacc

SEQ ID NO: 3886289 - RNA, 13 nt, Human
ucccuccagcaca

SEQ ID NO: 3886290 - RNA, 22 nt, Human
ucccuccagcacaaacacaagg

SEQ ID NO: 3886291 - RNA, 14 nt, Human
ucccucccaccucu

SEQ ID NO: 3886292 - RNA, 16 nt, Human
ucccucccaccucugu

SEQ ID NO: 3886293 - RNA, 23 nt, Human
ucccucccagaggagccaccagu

SEQ ID NO: 3886294 - RNA, 13 nt, Human
ucccucccagcuc

SEQ ID NO: 3886295 - RNA, 18 nt, Human
ucccucccccugccccuu

SEQ ID NO: 3886296 - RNA, 12 nt, Human
ucccucccccuu

SEQ ID NO: 3886297 - RNA, 13 nt, Human
ucccuccccugcc

SEQ ID NO: 3886298 - RNA, 14 nt, Human
ucccuccccugccc

SEQ ID NO: 3886299 - RNA, 15 nt, Human
ucccuccccugcccu

SEQ ID NO: 3886300 - RNA, 13 nt, Human
ucccuccccuugc

SEQ ID NO: 3886301 - RNA, 14 nt, Human
ucccucccuccacc

SEQ ID NO: 3886302 - RNA, 15 nt, Human
ucccucccuccaccu

SEQ ID NO: 3886303 - RNA, 17 nt, Human
ucccucccucuuucccu

SEQ ID NO: 3886304 - RNA, 12 nt, Human
ucccucccugcu

SEQ ID NO: 3886305 - RNA, 18 nt, Human
ucccucccuuccucuuuc

SEQ ID NO: 3886306 - RNA, 18 nt, Human
ucccuccgauccuuccuc

SEQ ID NO: 3886307 - RNA, 12 nt, Human
ucccuccucacc

SEQ ID NO: 3886308 - RNA, 14 nt, Human
ucccuccucaccuc

SEQ ID NO: 3886309 - RNA, 16 nt, Human
ucccuccucaccucug

SEQ ID NO: 3886310 - RNA, 18 nt, Human
ucccuccucaccucugga

SEQ ID NO: 3886311 - RNA, 10 nt, Human
ucccuccucc

SEQ ID NO: 3886312 - RNA, 17 nt, Human
ucccuccuccaggccug

SEQ ID NO: 3886313 - RNA, 16 nt, Human
ucccuccucccauguc

SEQ ID NO: 3886314 - RNA, 14 nt, Human
ucccuccugcuuug

SEQ ID NO: 3886315 - RNA, 22 nt, Human
ucccuccugcuuugcgugcccg

SEQ ID NO: 3886316 - RNA, 11 nt, Human
ucccuccuggg

SEQ ID NO: 3886317 - RNA, 12 nt, Human
ucccuccuuggu

SEQ ID NO: 3886318 - RNA, 15 nt, Human
ucccuccuuuaguga

SEQ ID NO: 3886319 - RNA, 16 nt, Human
ucccucuaaugagacu

SEQ ID NO: 3886320 - RNA, 17 nt, Human
ucccucuacugggagcc

SEQ ID NO: 3886321 - RNA, 18 nt, Human
ucccucuacugggagccu

SEQ ID NO: 3886322 - RNA, 22 nt, Human
ucccucuacugggagccuaccc

SEQ ID NO: 3886323 - RNA, 19 nt, Human
ucccucucaggcaugccug

SEQ ID NO: 3886324 - RNA, 10 nt, Human
ucccucucau

SEQ ID NO: 3886325 - RNA, 17 nt, Human
ucccucucaucucaggu

SEQ ID NO: 3886326 - RNA, 17 nt, Human
ucccucucccaggcccc

SEQ ID NO: 3886327 - RNA, 14 nt, Human
ucccucuccuaacu

SEQ ID NO: 3886328 - RNA, 14 nt, Human
ucccucuccugccu

SEQ ID NO: 3886329 - RNA, 16 nt, Human
ucccucuccugccuac

SEQ ID NO: 3886330 - RNA, 12 nt, Human
ucccucucggaa

SEQ ID NO: 3886331 - RNA, 14 nt, Human
ucccucucguaaga

SEQ ID NO: 3886332 - RNA, 15 nt, Human
ucccucucucacucc

SEQ ID NO: 3886333 - RNA, 17 nt, Human
ucccucugaccugcagg

SEQ ID NO: 3886334 - RNA, 19 nt, Human
ucccucugaccugcaggcc

SEQ ID NO: 3886335 - RNA, 13 nt, Human
ucccucugcucag

SEQ ID NO: 3886336 - RNA, 14 nt, Human
ucccucugcucagc

SEQ ID NO: 3886337 - RNA, 18 nt, Human
ucccucugcucagccaag

SEQ ID NO: 3886338 - RNA, 15 nt, Human
ucccucugcuccugg

SEQ ID NO: 3886339 - RNA, 18 nt, Human
ucccucugcuccuggagc

SEQ ID NO: 3886340 - RNA, 20 nt, Human
ucccucuggcccugccuucu

SEQ ID NO: 3886341 - RNA, 17 nt, Human
ucccucuggggcuguuc

SEQ ID NO: 3886342 - RNA, 16 nt, Human
ucccucuggucccaca

SEQ ID NO: 3886343 - RNA, 21 nt, Human
ucccucuuagucuagguccuu

SEQ ID NO: 3886344 - RNA, 16 nt, Human
ucccucuucacucccc

SEQ ID NO: 3886345 - RNA, 21 nt, Human
ucccucuuccuucccugcugu

SEQ ID NO: 3886346 - RNA, 13 nt, Human
ucccucuuggucu

SEQ ID NO: 3886347 - RNA, 12 nt, Human
ucccucuuguuu

SEQ ID NO: 3886348 - RNA, 20 nt, Human
ucccucuuguuuuguuuguc

SEQ ID NO: 3886349 - RNA, 22 nt, Human
ucccucuuguuuuguuugucuc

SEQ ID NO: 3886350 - RNA, 11 nt, Human
ucccucuuucc

SEQ ID NO: 3886351 - RNA, 13 nt, Human
ucccucuuucccu

SEQ ID NO: 3886352 - RNA, 18 nt, Human
ucccucuuucccucccuu

SEQ ID NO: 3886353 - RNA, 21 nt, Human
ucccucuuucccucccuuccu

SEQ ID NO: 3886354 - RNA, 10 nt, Human
ucccucuuuu

SEQ ID NO: 3886355 - RNA, 14 nt, Human
ucccucuuuucuua

SEQ ID NO: 3886356 - RNA, 16 nt, Human
ucccugaaaacccaga

SEQ ID NO: 3886357 - RNA, 18 nt, Human
ucccugaaaacccagaga

SEQ ID NO: 3886358 - RNA, 13 nt, Human
ucccugaaacacg

SEQ ID NO: 3886359 - RNA, 15 nt, Human
ucccugaaccauccc

SEQ ID NO: 3886360 - RNA, 14 nt, Human
ucccugaacuuccu

SEQ ID NO: 3886361 - RNA, 17 nt, Human
ucccugaagccagccuu

SEQ ID NO: 3886362 - RNA, 18 nt, Human
ucccugaaggccccgccc

SEQ ID NO: 3886363 - RNA, 23 nt, Human
ucccugaaggccccgcccaggcu

SEQ ID NO: 3886364 - RNA, 16 nt, Human
ucccugaaguuaugug

SEQ ID NO: 3886365 - RNA, 16 nt, Human
ucccugacacugcggg

SEQ ID NO: 3886366 - RNA, 14 nt, Human
ucccugacccgucu

SEQ ID NO: 3886367 - RNA, 16 nt, Human
ucccugacccugcaga

SEQ ID NO: 3886368 - RNA, 17 nt, Human
ucccugaccucccucua

SEQ ID NO: 3886369 - RNA, 21 nt, Human
ucccugaccucccucuaauuu

SEQ ID NO: 3886370 - RNA, 16 nt, Human
ucccugacucauucug

SEQ ID NO: 3886371 - RNA, 13 nt, Human
ucccugagauggg

SEQ ID NO: 3886372 - RNA, 16 nt, Human
ucccugagcaggaaag

SEQ ID NO: 3886373 - RNA, 15 nt, Human
ucccugaggacugau

SEQ ID NO: 3886374 - RNA, 22 nt, Human
ucccugaggcagguccccagac

SEQ ID NO: 3886375 - RNA, 19 nt, Human
ucccugauaacaaccugga

SEQ ID NO: 3886376 - RNA, 15 nt, Human
ucccugaucccugau

SEQ ID NO: 3886377 - RNA, 15 nt, Human
ucccugaucccuucc

SEQ ID NO: 3886378 - RNA, 19 nt, Human
ucccugauugaccugcucc

SEQ ID NO: 3886379 - RNA, 15 nt, Human
ucccugcaaccaacu

SEQ ID NO: 3886380 - RNA, 17 nt, Human
ucccugcacagugacuu

SEQ ID NO: 3886381 - RNA, 22 nt, Human
ucccugcacagugacuucugag

SEQ ID NO: 3886382 - RNA, 23 nt, Human
ucccugcacagugacuucugaga

SEQ ID NO: 3886383 - RNA, 22 nt, Human
ucccugcacuaaagccagccug

SEQ ID NO: 3886384 - RNA, 13 nt, Human
ucccugcacuugc

SEQ ID NO: 3886385 - RNA, 16 nt, Human
ucccugcaucugacca

SEQ ID NO: 3886386 - RNA, 23 nt, Human
ucccugcauggcauccuccagcc

SEQ ID NO: 3886387 - RNA, 17 nt, Human
ucccugcauuucugagu

SEQ ID NO: 3886388 - RNA, 13 nt, Human
ucccugccagcuc

SEQ ID NO: 3886389 - RNA, 16 nt, Human
ucccugcccaggccgg

SEQ ID NO: 3886390 - RNA, 16 nt, Human
ucccugcccauuucau

SEQ ID NO: 3886391 - RNA, 13 nt, Human
ucccugccccaaa

SEQ ID NO: 3886392 - RNA, 17 nt, Human
ucccugcccucaucucu

SEQ ID NO: 3886393 - RNA, 18 nt, Human
ucccugccucaggccucu

SEQ ID NO: 3886394 - RNA, 16 nt, Human
ucccugccuccugccg

SEQ ID NO: 3886395 - RNA, 15 nt, Human
ucccugccuggcccc

SEQ ID NO: 3886396 - RNA, 23 nt, Human
ucccugccugguccucacacuca

SEQ ID NO: 3886397 - RNA, 16 nt, Human
ucccugcgccuuuccu

SEQ ID NO: 3886398 - RNA, 15 nt, Human
ucccugcuaaucucc

SEQ ID NO: 3886399 - RNA, 23 nt, Human
ucccugcuagggguuuuaggucu

SEQ ID NO: 3886400 - RNA, 15 nt, Human
ucccugcucacugca

SEQ ID NO: 3886401 - RNA, 17 nt, Human
ucccugcuguccccucu

SEQ ID NO: 3886402 - RNA, 18 nt, Human
ucccuggaaggacaucca

SEQ ID NO: 3886403 - RNA, 17 nt, Human
ucccuggaccagaugcu

SEQ ID NO: 3886404 - RNA, 19 nt, Human
ucccuggaccagaugcuga

SEQ ID NO: 3886405 - RNA, 21 nt, Human
ucccuggagccuccacugccu

SEQ ID NO: 3886406 - RNA, 21 nt, Human
ucccuggaguguggcugagga

SEQ ID NO: 3886407 - RNA, 20 nt, Human
ucccuggaucuaccuggagg

SEQ ID NO: 3886408 - RNA, 20 nt, Human
ucccuggaugacauuaaaga

SEQ ID NO: 3886409 - RNA, 18 nt, Human
ucccuggauuuuuaccag

SEQ ID NO: 3886410 - RNA, 20 nt, Human
ucccuggcccccucccugga

SEQ ID NO: 3886411 - RNA, 15 nt, Human
ucccuggcggcccca

SEQ ID NO: 3886412 - RNA, 16 nt, Human
ucccuggcucucagaa

SEQ ID NO: 3886413 - RNA, 18 nt, Human
ucccuggcucucagaagg

SEQ ID NO: 3886414 - RNA, 20 nt, Human
ucccuggcugcccuggcccu

SEQ ID NO: 3886415 - RNA, 21 nt, Human
ucccuggcugcccuggcccug

SEQ ID NO: 3886416 - RNA, 23 nt, Human
ucccuggcugcccuggcccugag

SEQ ID NO: 3886417 - RNA, 12 nt, Human
ucccuggcuucc

SEQ ID NO: 3886418 - RNA, 14 nt, Human
ucccuggcuucugu

SEQ ID NO: 3886419 - RNA, 15 nt, Human
ucccuggcuucugug

SEQ ID NO: 3886420 - RNA, 18 nt, Human
ucccuggcuuguaacucc

SEQ ID NO: 3886421 - RNA, 22 nt, Human
ucccuggcuuguaacuccacca

SEQ ID NO: 3886422 - RNA, 19 nt, Human
ucccugggaggaaauuuga

SEQ ID NO: 3886423 - RNA, 12 nt, Human
ucccugggccug

SEQ ID NO: 3886424 - RNA, 19 nt, Human
ucccugggccugcugcuga

SEQ ID NO: 3886425 - RNA, 16 nt, Human
ucccugggccuugggc

SEQ ID NO: 3886426 - RNA, 19 nt, Human
ucccugggccuugggcucc

SEQ ID NO: 3886427 - RNA, 16 nt, Human
ucccugggcugugcua

SEQ ID NO: 3886428 - RNA, 20 nt, Human
ucccugggcugugcuaccug

SEQ ID NO: 3886429 - RNA, 19 nt, Human
ucccugggggaagcccugg

SEQ ID NO: 3886430 - RNA, 20 nt, Human
ucccuggguagcgggggagg

SEQ ID NO: 3886431 - RNA, 12 nt, Human
ucccuggucccu

SEQ ID NO: 3886432 - RNA, 13 nt, Human
ucccuggucccuu

SEQ ID NO: 3886433 - RNA, 12 nt, Human
uccuaguuccac

SEQ ID NO: 3886434 - RNA, 22 nt, Human
uccuaguuccaccaucaagcca

SEQ ID NO: 3886435 - RNA, 15 nt, Human
uccuaguucuagaaa

SEQ ID NO: 3886436 - RNA, 16 nt, Human
uccuaguucuagaaaa

SEQ ID NO: 3886437 - RNA, 19 nt, Human
uccuaguucuagaaaaaca

SEQ ID NO: 3886438 - RNA, 16 nt, Human
uccuaguuugaccuca

SEQ ID NO: 3886439 - RNA, 18 nt, Human
uccuaguuugaccucaca

SEQ ID NO: 3886440 - RNA, 16 nt, Human
uccuaguuuuccuacu

SEQ ID NO: 3886441 - RNA, 14 nt, Human
uccuauaacuugau

SEQ ID NO: 3886442 - RNA, 21 nt, Human
uccuauaaggaagauuuggaa

SEQ ID NO: 3886443 - RNA, 22 nt, Human
uccuauaaucugucaaaacacu

SEQ ID NO: 3886444 - RNA, 13 nt, Human
uccuauaccauuu

SEQ ID NO: 3886445 - RNA, 17 nt, Human
uccuauauauuucuauu

SEQ ID NO: 3886446 - RNA, 23 nt, Human
uccuauaucauuaaaagaacaua

SEQ ID NO: 3886447 - RNA, 21 nt, Human
uccuauauuguuuucagugua

SEQ ID NO: 3886448 - RNA, 14 nt, Human
uccuaucaccuccc

SEQ ID NO: 3886449 - RNA, 22 nt, Human
uccuaucagccugucucuucca

SEQ ID NO: 3886450 - RNA, 16 nt, Human
uccuaucugggcuucc

SEQ ID NO: 3886451 - RNA, 18 nt, Human
uccuaucugggcuuccug

SEQ ID NO: 3886452 - RNA, 19 nt, Human
uccuaucugggcuuccugg

SEQ ID NO: 3886453 - RNA, 17 nt, Human
uccuaucuguguuuuga

SEQ ID NO: 3886454 - RNA, 22 nt, Human
uccuaucuucauaucuaucaga

SEQ ID NO: 3886455 - RNA, 17 nt, Human
uccuaugaaugcuuugc

SEQ ID NO: 3886456 - RNA, 15 nt, Human
uccuaugauguauac

SEQ ID NO: 3886457 - RNA, 20 nt, Human
uccuaugcaugguuucagca

SEQ ID NO: 3886458 - RNA, 21 nt, Human
uccuaugcaugguuucagcac

SEQ ID NO: 3886459 - RNA, 21 nt, Human
uccuaugcuauugacaauaaa

SEQ ID NO: 3886460 - RNA, 22 nt, Human
uccuaugcuauugacaauaaaa

SEQ ID NO: 3886461 - RNA, 23 nt, Human
uccuaugugauuuuaacucuguc

SEQ ID NO: 3886462 - RNA, 12 nt, Human
uccuauguguaa

SEQ ID NO: 3886463 - RNA, 11 nt, Human
uccuauguuug

SEQ ID NO: 3886464 - RNA, 18 nt, Human
uccuauguuuuuguucaa

SEQ ID NO: 3886465 - RNA, 15 nt, Human
uccuauucuauaaaa

SEQ ID NO: 3886466 - RNA, 14 nt, Human
uccuauucuauugc

SEQ ID NO: 3886467 - RNA, 14 nt, Human
uccuauucucacca

SEQ ID NO: 3886468 - RNA, 20 nt, Human
uccuauucucaccaggaagg

SEQ ID NO: 3886469 - RNA, 18 nt, Human
uccuauugugauuugacu

SEQ ID NO: 3886470 - RNA, 22 nt, Human
uccuauugugauuugacuguuu

SEQ ID NO: 3886471 - RNA, 16 nt, Human
uccuauuucaguacuu

SEQ ID NO: 3886472 - RNA, 18 nt, Human
uccuauuuggggcuugca

SEQ ID NO: 3886473 - RNA, 16 nt, Human
uccuauuuguuuucau

SEQ ID NO: 3886474 - RNA, 14 nt, Human
uccuauuuuuuuaa

SEQ ID NO: 3886475 - RNA, 22 nt, Human
uccuauuuuuuuaaaaucacua

SEQ ID NO: 3886476 - RNA, 15 nt, Human
uccucaaacacugca

SEQ ID NO: 3886477 - RNA, 16 nt, Human
uccucaaagaaagugu

SEQ ID NO: 3886478 - RNA, 19 nt, Human
uccucaaagaaaguguauu

SEQ ID NO: 3886479 - RNA, 17 nt, Human
uccucaacacccaacug

SEQ ID NO: 3886480 - RNA, 15 nt, Human
uccucaaggggccau

SEQ ID NO: 3886481 - RNA, 14 nt, Human
uccucaauccagcu

SEQ ID NO: 3886482 - RNA, 21 nt, Human
uccucaauuauuauucacauu

SEQ ID NO: 3886483 - RNA, 15 nt, Human
uccucacacuuuugg

SEQ ID NO: 3886484 - RNA, 22 nt, Human
uccucacacuuuuggaaccaug

SEQ ID NO: 3886485 - RNA, 19 nt, Human
uccucacagucccacugug

SEQ ID NO: 3886486 - RNA, 14 nt, Human
uccucaccacaugc

SEQ ID NO: 3886487 - RNA, 13 nt, Human
uccucacccccag

SEQ ID NO: 3886488 - RNA, 15 nt, Human
uccucaccccugucc

SEQ ID NO: 3886489 - RNA, 17 nt, Human
uccucaccccuguccuc

SEQ ID NO: 3886490 - RNA, 16 nt, Human
uccucaccucuggacu

SEQ ID NO: 3886491 - RNA, 21 nt, Human
uccucaccucuggacuggcua

SEQ ID NO: 3886492 - RNA, 22 nt, Human
uccucaccucuggacuggcuag

SEQ ID NO: 3886493 - RNA, 14 nt, Human
uccucacucccagu

SEQ ID NO: 3886494 - RNA, 17 nt, Human
uccucacucccuuccca

SEQ ID NO: 3886495 - RNA, 19 nt, Human
uccucacucccuucccaua

SEQ ID NO: 3886496 - RNA, 19 nt, Human
uccucacugcccuccccag

SEQ ID NO: 3886497 - RNA, 17 nt, Human
uccucacugcucccuga

SEQ ID NO: 3886498 - RNA, 20 nt, Human
uccucacugcucccugaagc

SEQ ID NO: 3886499 - RNA, 13 nt, Human
uccucacuggcca

SEQ ID NO: 3886500 - RNA, 17 nt, Human
uccucacuggccauccc

SEQ ID NO: 3886501 - RNA, 15 nt, Human
uccucacuggguggg

SEQ ID NO: 3886502 - RNA, 22 nt, Human
uccucacuggguggggugagga

SEQ ID NO: 3886503 - RNA, 14 nt, Human
uccucagaaagugu

SEQ ID NO: 3886504 - RNA, 20 nt, Human
uccucagagaauuucuacca

SEQ ID NO: 3886505 - RNA, 20 nt, Human
uccucagaucuucugugggu

SEQ ID NO: 3886506 - RNA, 20 nt, Human
uccucagccuccucaucugg

SEQ ID NO: 3886507 - RNA, 12 nt, Human
uccucagccuga

SEQ ID NO: 3886508 - RNA, 14 nt, Human
uccucagccugaac

SEQ ID NO: 3886509 - RNA, 21 nt, Human
uccucagccugaaccccaggg

SEQ ID NO: 3886510 - RNA, 18 nt, Human
uccucagccuugccagag

SEQ ID NO: 3886511 - RNA, 21 nt, Human
uccucagccuugccagagauc

SEQ ID NO: 3886512 - RNA, 14 nt, Human
uccucagcuuaucu

SEQ ID NO: 3886513 - RNA, 12 nt, Human
uccucaggacca

SEQ ID NO: 3886514 - RNA, 22 nt, Human
uccucaggagccgaagcccagg

SEQ ID NO: 3886515 - RNA, 22 nt, Human
uccucagguggccaugccucag

SEQ ID NO: 3886516 - RNA, 18 nt, Human
uccucaguuccugcagca

SEQ ID NO: 3886517 - RNA, 16 nt, Human
uccucauaaaaagcaa

SEQ ID NO: 3886518 - RNA, 21 nt, Human
uccucauauggcccaguguca

SEQ ID NO: 3886519 - RNA, 14 nt, Human
uccucauccacccc

SEQ ID NO: 3886520 - RNA, 15 nt, Human
uccucauccacccca

SEQ ID NO: 3886521 - RNA, 18 nt, Human
uccucauccaccccaucc

SEQ ID NO: 3886522 - RNA, 18 nt, Human
uccucauccagggcucug

SEQ ID NO: 3886523 - RNA, 22 nt, Human
uccucaucccguguucuccuuu

SEQ ID NO: 3886524 - RNA, 17 nt, Human
uccucauccucagaugc

SEQ ID NO: 3886525 - RNA, 20 nt, Human
uccucauccucagaugcuca

SEQ ID NO: 3886526 - RNA, 23 nt, Human
uccucaucucuaacagcucagga

SEQ ID NO: 3886527 - RNA, 15 nt, Human
uccucaugaauguaa

SEQ ID NO: 3886528 - RNA, 19 nt, Human
uccucauggcagccuacuc

SEQ ID NO: 3886529 - RNA, 17 nt, Human
uccucauuagcauuuug

SEQ ID NO: 3886530 - RNA, 18 nt, Human
uccucauuagcauuuugc

SEQ ID NO: 3886531 - RNA, 18 nt, Human
uccuccaaaggcccccua

SEQ ID NO: 3886532 - RNA, 23 nt, Human
uccuccaaaggcccccuacgcca

SEQ ID NO: 3886533 - RNA, 20 nt, Human
uccuccaagacacuguggac

SEQ ID NO: 3886534 - RNA, 14 nt, Human
uccuccaagccagc

SEQ ID NO: 3886535 - RNA, 20 nt, Human
uccuccaccaccgcccgucu

SEQ ID NO: 3886536 - RNA, 21 nt, Human
uccuccaccgccauggcuucc

SEQ ID NO: 3886537 - RNA, 22 nt, Human
uccuccaccgccauggcuucca

SEQ ID NO: 3886538 - RNA, 23 nt, Human
uccuccaccgccauggcuuccaa

SEQ ID NO: 3886539 - RNA, 19 nt, Human
uccuccacguucugcucau

SEQ ID NO: 3886540 - RNA, 16 nt, Human
uccuccacucuccccc

SEQ ID NO: 3886541 - RNA, 19 nt, Human
uccuccacucucccccacc

SEQ ID NO: 3886542 - RNA, 10 nt, Human
uccuccagaa

SEQ ID NO: 3886543 - RNA, 18 nt, Human
uccuccagaacucuuccu

SEQ ID NO: 3886544 - RNA, 14 nt, Human
uccuccagaagccu

SEQ ID NO: 3886545 - RNA, 21 nt, Human
uccuccagaagccucuggcua

SEQ ID NO: 3886546 - RNA, 22 nt, Human
uccuccagaagccucuggcuag

SEQ ID NO: 3886547 - RNA, 20 nt, Human
uccuccagcagggaaaaugc

SEQ ID NO: 3886548 - RNA, 12 nt, Human
uccuccagcccc

SEQ ID NO: 3886549 - RNA, 13 nt, Human
uccuccagccccu

SEQ ID NO: 3886550 - RNA, 15 nt, Human
uccuccagccccugu

SEQ ID NO: 3886551 - RNA, 14 nt, Human
uccuccagcugcac

SEQ ID NO: 3886552 - RNA, 15 nt, Human
uccuccagcugcacc

SEQ ID NO: 3886553 - RNA, 13 nt, Human
uccuccagcuucu

SEQ ID NO: 3886554 - RNA, 14 nt, Human
uccuccagcuucug

SEQ ID NO: 3886555 - RNA, 17 nt, Human
uccuccaggccugccuc

SEQ ID NO: 3886556 - RNA, 19 nt, Human
uccuccagggcucaacacu

SEQ ID NO: 3886557 - RNA, 20 nt, Human
uccuccaggguggcagcaac

SEQ ID NO: 3886558 - RNA, 20 nt, Human
uccuccaggugcacaagcuc

SEQ ID NO: 3886559 - RNA, 12 nt, Human
uccuccagguuu

SEQ ID NO: 3886560 - RNA, 18 nt, Human
uccuccagguuuuucaau

SEQ ID NO: 3886561 - RNA, 19 nt, Human
uccuccagguuuuucaauu

SEQ ID NO: 3886562 - RNA, 22 nt, Human
uccuccagugugggcuugacca

SEQ ID NO: 3886563 - RNA, 16 nt, Human
uccuccauacucagga

SEQ ID NO: 3886564 - RNA, 15 nt, Human
uccuccauccuccuc

SEQ ID NO: 3886565 - RNA, 19 nt, Human
uccuccaucuccaagaaug

SEQ ID NO: 3886566 - RNA, 22 nt, Human
uccucccaaaaguaucgggggc

SEQ ID NO: 3886567 - RNA, 20 nt, Human
uccucccaauuucagacucc

SEQ ID NO: 3886568 - RNA, 20 nt, Human
uccucccacccggcugcaga

SEQ ID NO: 3886569 - RNA, 13 nt, Human
uccucccaccuca

SEQ ID NO: 3886570 - RNA, 21 nt, Human
uccucccaccucagccucccg

SEQ ID NO: 3886571 - RNA, 13 nt, Human
uccucccaggcgc

SEQ ID NO: 3886572 - RNA, 19 nt, Human
uccucccaggcgccccuuc

SEQ ID NO: 3886573 - RNA, 21 nt, Human
uccucccaggcgccccuuccc

SEQ ID NO: 3886574 - RNA, 21 nt, Human
uccucccauagauacucucuu

SEQ ID NO: 3886575 - RNA, 19 nt, Human
uccucccauccccuggacu

SEQ ID NO: 3886576 - RNA, 23 nt, Human
uccucccauccccuggacuggga

SEQ ID NO: 3886577 - RNA, 13 nt, Human
ucuauuuauguuu

SEQ ID NO: 3886578 - RNA, 14 nt, Human
ucuauuuauuaagu

SEQ ID NO: 3886579 - RNA, 22 nt, Human
ucuauuuauuuacugagcuucu

SEQ ID NO: 3886580 - RNA, 15 nt, Human
ucuauuuauuuguga

SEQ ID NO: 3886581 - RNA, 19 nt, Human
ucuauuucccccuuucuuc

SEQ ID NO: 3886582 - RNA, 15 nt, Human
ucuauuuccuggaau

SEQ ID NO: 3886583 - RNA, 16 nt, Human
ucuauuucuccuccau

SEQ ID NO: 3886584 - RNA, 18 nt, Human
ucuauuugaauuauuucu

SEQ ID NO: 3886585 - RNA, 15 nt, Human
ucuauuuuaaaauaa

SEQ ID NO: 3886586 - RNA, 12 nt, Human
ucuauuuuaaga

SEQ ID NO: 3886587 - RNA, 11 nt, Human
ucuauuuuaca

SEQ ID NO: 3886588 - RNA, 14 nt, Human
ucuauuuuagaaua

SEQ ID NO: 3886589 - RNA, 11 nt, Human
ucuauuuucua

SEQ ID NO: 3886590 - RNA, 13 nt, Human
ucuauuuucucau

SEQ ID NO: 3886591 - RNA, 13 nt, Human
ucuauuuugaugc

SEQ ID NO: 3886592 - RNA, 23 nt, Human
ucuauuuugaugcagcauuugau

SEQ ID NO: 3886593 - RNA, 14 nt, Human
ucuauuuuuguaga

SEQ ID NO: 3886594 - RNA, 20 nt, Human
ucuauuuuuugaaaagcaga

SEQ ID NO: 3886595 - RNA, 15 nt, Human
ucucaaaaauacaaa

SEQ ID NO: 3886596 - RNA, 21 nt, Human
ucucaaaacuggacagucacu

SEQ ID NO: 3886597 - RNA, 13 nt, Human
ucucaaaagaacu

SEQ ID NO: 3886598 - RNA, 14 nt, Human
ucucaaaagcauuu

SEQ ID NO: 3886599 - RNA, 18 nt, Human
ucucaaaagcauuuauca

SEQ ID NO: 3886600 - RNA, 21 nt, Human
ucucaaaagcauuuaucauuc

SEQ ID NO: 3886601 - RNA, 19 nt, Human
ucucaaacacaguuacacu

SEQ ID NO: 3886602 - RNA, 22 nt, Human
ucucaaacacaguuacacuugu

SEQ ID NO: 3886603 - RNA, 23 nt, Human
ucucaaaccuugaugugccugug

SEQ ID NO: 3886604 - RNA, 22 nt, Human
ucucaaacgguacacagacuau

SEQ ID NO: 3886605 - RNA, 23 nt, Human
ucucaaacucccgaccucaggug

SEQ ID NO: 3886606 - RNA, 21 nt, Human
ucucaaacuccugaccucagg

SEQ ID NO: 3886607 - RNA, 21 nt, Human
ucucaaacucuugaccucagg

SEQ ID NO: 3886608 - RNA, 21 nt, Human
ucucaaagaaauuuccacuca

SEQ ID NO: 3886609 - RNA, 21 nt, Human
ucucaacaaagcacaguguua

SEQ ID NO: 3886610 - RNA, 23 nt, Human
ucucaacacccaguuuccuuggg

SEQ ID NO: 3886611 - RNA, 16 nt, Human
ucucaacaggccucag

SEQ ID NO: 3886612 - RNA, 17 nt, Human
ucucaacaggccucagg

SEQ ID NO: 3886613 - RNA, 17 nt, Human
ucucaacccaggagcau

SEQ ID NO: 3886614 - RNA, 18 nt, Human
ucucaagagggcacuggu

SEQ ID NO: 3886615 - RNA, 20 nt, Human
ucucaagccgcaucccagac

SEQ ID NO: 3886616 - RNA, 22 nt, Human
ucucaagccgcaucccagacuu

SEQ ID NO: 3886617 - RNA, 14 nt, Human
ucucaaguaauaua

SEQ ID NO: 3886618 - RNA, 21 nt, Human
ucucaaguucuaagauucuaa

SEQ ID NO: 3886619 - RNA, 22 nt, Human
ucucaauaaaauuauagcucua

SEQ ID NO: 3886620 - RNA, 13 nt, Human
ucucaaugaaaua

SEQ ID NO: 3886621 - RNA, 21 nt, Human
ucucaaugaaccauaaauuca

SEQ ID NO: 3886622 - RNA, 16 nt, Human
ucucaauuccaacagu

SEQ ID NO: 3886623 - RNA, 17 nt, Human
ucucaauugcuuuguaa

SEQ ID NO: 3886624 - RNA, 13 nt, Human
ucucaauuuuugg

SEQ ID NO: 3886625 - RNA, 22 nt, Human
ucucaauuuuugguugaauaaa

SEQ ID NO: 3886626 - RNA, 21 nt, Human
ucucacacaugagcaucaggc

SEQ ID NO: 3886627 - RNA, 18 nt, Human
ucucacacucuaacugua

SEQ ID NO: 3886628 - RNA, 14 nt, Human
ucucacacuggcgu

SEQ ID NO: 3886629 - RNA, 19 nt, Human
ucucacacugguucucaau

SEQ ID NO: 3886630 - RNA, 14 nt, Human
ucucacagacagga

SEQ ID NO: 3886631 - RNA, 21 nt, Human
ucucacagacaggaccccugc

SEQ ID NO: 3886632 - RNA, 16 nt, Human
ucucacagaugugacu

SEQ ID NO: 3886633 - RNA, 11 nt, Human
ucucacagcac

SEQ ID NO: 3886634 - RNA, 18 nt, Human
ucucacagcacacucagc

SEQ ID NO: 3886635 - RNA, 20 nt, Human
ucucacagcacaugcuggcc

SEQ ID NO: 3886636 - RNA, 23 nt, Human
ucucacagcacaugcuggccagc

SEQ ID NO: 3886637 - RNA, 21 nt, Human
ucucacagcuccaagaauuuc

SEQ ID NO: 3886638 - RNA, 12 nt, Human
ucucacaguggg

SEQ ID NO: 3886639 - RNA, 19 nt, Human
ucucacagugggagccagg

SEQ ID NO: 3886640 - RNA, 23 nt, Human
ucucacagugggagccagggcug

SEQ ID NO: 3886641 - RNA, 19 nt, Human
ucucacaugauuccagcca

SEQ ID NO: 3886642 - RNA, 22 nt, Human
ucucacauggaaugaggguuug

SEQ ID NO: 3886643 - RNA, 23 nt, Human
ucucacauggugcuacgccugca

SEQ ID NO: 3886644 - RNA, 16 nt, Human
ucucaccagcugcaaa

SEQ ID NO: 3886645 - RNA, 20 nt, Human
ucucaccagcugcaaagugu

SEQ ID NO: 3886646 - RNA, 15 nt, Human
ucucaccagcugcug

SEQ ID NO: 3886647 - RNA, 12 nt, Human
ucucaccaggaa

SEQ ID NO: 3886648 - RNA, 14 nt, Human
ucucaccaggcagc

SEQ ID NO: 3886649 - RNA, 18 nt, Human
ucucaccaggcagccucu

SEQ ID NO: 3886650 - RNA, 19 nt, Human
ucucaccaggcagccucug

SEQ ID NO: 3886651 - RNA, 15 nt, Human
ucucaccauuuggau

SEQ ID NO: 3886652 - RNA, 18 nt, Human
ucucaccauuuggauccu

SEQ ID NO: 3886653 - RNA, 17 nt, Human
ucucaccccaucccaca

SEQ ID NO: 3886654 - RNA, 21 nt, Human
ucucaccccaucccacacccu

SEQ ID NO: 3886655 - RNA, 12 nt, Human
ucucacccugga

SEQ ID NO: 3886656 - RNA, 16 nt, Human
ucucacccuggaggca

SEQ ID NO: 3886657 - RNA, 13 nt, Human
ucucaccucagcc

SEQ ID NO: 3886658 - RNA, 16 nt, Human
ucucaccuccugcugg

SEQ ID NO: 3886659 - RNA, 21 nt, Human
ucucaccucuagguccccaua

SEQ ID NO: 3886660 - RNA, 15 nt, Human
ucucaccuguacucu

SEQ ID NO: 3886661 - RNA, 16 nt, Human
ucucaccuuccaaauc

SEQ ID NO: 3886662 - RNA, 22 nt, Human
ucucacggccacacagcugccg

SEQ ID NO: 3886663 - RNA, 23 nt, Human
ucucacgggcaugggcacucccu

SEQ ID NO: 3886664 - RNA, 14 nt, Human
ucucacuaaaucuu

SEQ ID NO: 3886665 - RNA, 17 nt, Human
ucucacuccaccaccca

SEQ ID NO: 3886666 - RNA, 15 nt, Human
ucucacuccccuccu

SEQ ID NO: 3886667 - RNA, 18 nt, Human
ucucacuccuaccuggua

SEQ ID NO: 3886668 - RNA, 12 nt, Human
ucucacucuguc

SEQ ID NO: 3886669 - RNA, 18 nt, Human
ucucacucugucgcccag

SEQ ID NO: 3886670 - RNA, 11 nt, Human
ucucacugagc

SEQ ID NO: 3886671 - RNA, 16 nt, Human
ucucacugagcacugu

SEQ ID NO: 3886672 - RNA, 17 nt, Human
ucucacugagcacuguu

SEQ ID NO: 3886673 - RNA, 21 nt, Human
ucucacugugggaaggccagc

SEQ ID NO: 3886674 - RNA, 16 nt, Human
ucucacuguucccucu

SEQ ID NO: 3886675 - RNA, 18 nt, Human
ucucacuguucccucugc

SEQ ID NO: 3886676 - RNA, 22 nt, Human
ucucacuguucccucugcuccu

SEQ ID NO: 3886677 - RNA, 17 nt, Human
ucucacuguugcccagg

SEQ ID NO: 3886678 - RNA, 21 nt, Human
ucucacuguugcccaggcugg

SEQ ID NO: 3886679 - RNA, 19 nt, Human
ucucacuguuuguuuuuau

SEQ ID NO: 3886680 - RNA, 15 nt, Human
ucucacuuuucucca

SEQ ID NO: 3886681 - RNA, 20 nt, Human
ucucacuuuucuccaugagu

SEQ ID NO: 3886682 - RNA, 17 nt, Human
ucucagaaagugccuga

SEQ ID NO: 3886683 - RNA, 12 nt, Human
ucucagaagcac

SEQ ID NO: 3886684 - RNA, 19 nt, Human
ucucagaagguauuccuuu

SEQ ID NO: 3886685 - RNA, 19 nt, Human
ucucagaaucuacccaaag

SEQ ID NO: 3886686 - RNA, 20 nt, Human
ucucagaaucuacccaaagg

SEQ ID NO: 3886687 - RNA, 17 nt, Human
ucucagaaucucaaaua

SEQ ID NO: 3886688 - RNA, 18 nt, Human
ucucagacuuuuguacau

SEQ ID NO: 3886689 - RNA, 21 nt, Human
ucucagagcuacuugggccau

SEQ ID NO: 3886690 - RNA, 14 nt, Human
ucucagaggcccca

SEQ ID NO: 3886691 - RNA, 23 nt, Human
ucucagauauuuauauuuuuauu

SEQ ID NO: 3886692 - RNA, 14 nt, Human
ucucagaucacugc

SEQ ID NO: 3886693 - RNA, 17 nt, Human
ucucagaucacugcaac

SEQ ID NO: 3886694 - RNA, 17 nt, Human
ucucagauccuuguuuc

SEQ ID NO: 3886695 - RNA, 18 nt, Human
ucucagauccuuguuuca

SEQ ID NO: 3886696 - RNA, 19 nt, Human
ucucagauccuuguuucaa

SEQ ID NO: 3886697 - RNA, 19 nt, Human
ucucagauguuaaaauaaa

SEQ ID NO: 3886698 - RNA, 14 nt, Human
ucucagauuuuauu

SEQ ID NO: 3886699 - RNA, 16 nt, Human
ucucagauuuuauuau

SEQ ID NO: 3886700 - RNA, 12 nt, Human
ucucagcagagu

SEQ ID NO: 3886701 - RNA, 13 nt, Human
ucucagcagagug

SEQ ID NO: 3886702 - RNA, 23 nt, Human
ucucagcagcgaccaccccugcc

SEQ ID NO: 3886703 - RNA, 15 nt, Human
ucucagcccagaaga

SEQ ID NO: 3886704 - RNA, 20 nt, Human
ucucagcccagaagaaaauu

SEQ ID NO: 3886705 - RNA, 12 nt, Human
ucucagccccuu

SEQ ID NO: 3886706 - RNA, 20 nt, Human
ucucagccccuuucccuugu

SEQ ID NO: 3886707 - RNA, 13 nt, Human
ucucagccuccca

SEQ ID NO: 3886708 - RNA, 21 nt, Human
ucucagcuccagguggcucug

SEQ ID NO: 3886709 - RNA, 19 nt, Human
ucucagcuuugagaagccu

SEQ ID NO: 3886710 - RNA, 23 nt, Human
ucucaggaaaucaaauaugcaaa

SEQ ID NO: 3886711 - RNA, 19 nt, Human
ucucaggacacaggccugu

SEQ ID NO: 3886712 - RNA, 20 nt, Human
ucucaggacacaggccugug

SEQ ID NO: 3886713 - RNA, 13 nt, Human
ucucaggagccau

SEQ ID NO: 3886714 - RNA, 20 nt, Human
ucucaggcaccagucccugu

SEQ ID NO: 3886715 - RNA, 20 nt, Human
ucucaggcaugaacauguac

SEQ ID NO: 3886716 - RNA, 18 nt, Human
ucucaggccaccugcccc

SEQ ID NO: 3886717 - RNA, 19 nt, Human
ucucaggccaccugccccc

SEQ ID NO: 3886718 - RNA, 17 nt, Human
ucucaggccagagccaa

SEQ ID NO: 3886719 - RNA, 23 nt, Human
ucucaggccggcagccccagccu

SEQ ID NO: 3886720 - RNA, 14 nt, Human
ucucaggcucugcc

SEQ ID NO: 3886721 - RNA, 14 nt, Human
ucuccugccuacuc

SEQ ID NO: 3886722 - RNA, 17 nt, Human
ucuccugccuacucacg

SEQ ID NO: 3886723 - RNA, 12 nt, Human
ucuccugccuca

SEQ ID NO: 3886724 - RNA, 17 nt, Human
ucuccugccucagccuc

SEQ ID NO: 3886725 - RNA, 17 nt, Human
ucuccugccuuccuccu

SEQ ID NO: 3886726 - RNA, 20 nt, Human
ucuccugccuuccuccuggg

SEQ ID NO: 3886727 - RNA, 16 nt, Human
ucuccugccuuugccu

SEQ ID NO: 3886728 - RNA, 21 nt, Human
ucuccuggaagugcuaauuuu

SEQ ID NO: 3886729 - RNA, 17 nt, Human
ucuccuggaggauugca

SEQ ID NO: 3886730 - RNA, 21 nt, Human
ucuccuggccuauccgcugcc

SEQ ID NO: 3886731 - RNA, 23 nt, Human
ucuccuggccuauccgcugccag

SEQ ID NO: 3886732 - RNA, 12 nt, Human
ucuccuggcuuc

SEQ ID NO: 3886733 - RNA, 15 nt, Human
ucuccuggcuuccca

SEQ ID NO: 3886734 - RNA, 18 nt, Human
ucuccuggcuucccaucc

SEQ ID NO: 3886735 - RNA, 23 nt, Human
ucuccuggcuucccauccccagc

SEQ ID NO: 3886736 - RNA, 16 nt, Human
ucuccugggcagcugc

SEQ ID NO: 3886737 - RNA, 15 nt, Human
ucuccugggccccuc

SEQ ID NO: 3886738 - RNA, 23 nt, Human
ucuccuguaagccaaagaaauga

SEQ ID NO: 3886739 - RNA, 14 nt, Human
ucuccuguccaacc

SEQ ID NO: 3886740 - RNA, 17 nt, Human
ucuccuguccucccuca

SEQ ID NO: 3886741 - RNA, 19 nt, Human
ucuccuguuuauucccauc

SEQ ID NO: 3886742 - RNA, 20 nt, Human
ucuccuguuuauucccaucu

SEQ ID NO: 3886743 - RNA, 17 nt, Human
ucuccuguuucccuucc

SEQ ID NO: 3886744 - RNA, 14 nt, Human
ucuccuguuuuucu

SEQ ID NO: 3886745 - RNA, 15 nt, Human
ucuccuuagaagugg

SEQ ID NO: 3886746 - RNA, 18 nt, Human
ucuccuuagucuucucau

SEQ ID NO: 3886747 - RNA, 14 nt, Human
ucuccuucaccuuu

SEQ ID NO: 3886748 - RNA, 15 nt, Human
ucuccuucagcccuc

SEQ ID NO: 3886749 - RNA, 21 nt, Human
ucuccuucaugacagccucca

SEQ ID NO: 3886750 - RNA, 11 nt, Human
ucuccuuccuu

SEQ ID NO: 3886751 - RNA, 14 nt, Human
ucuccuuccuuacc

SEQ ID NO: 3886752 - RNA, 18 nt, Human
ucuccuuccuuacccaaa

SEQ ID NO: 3886753 - RNA, 13 nt, Human
ucuccuugcaguu

SEQ ID NO: 3886754 - RNA, 23 nt, Human
ucuccuugcuccuggccuugcug

SEQ ID NO: 3886755 - RNA, 23 nt, Human
ucuccuuggugucgggcaugaca

SEQ ID NO: 3886756 - RNA, 19 nt, Human
ucuccuuguggccugggcc

SEQ ID NO: 3886757 - RNA, 20 nt, Human
ucuccuuguggccugggccu

SEQ ID NO: 3886758 - RNA, 13 nt, Human
ucuccuuguguua

SEQ ID NO: 3886759 - RNA, 14 nt, Human
ucuccuuguucuga

SEQ ID NO: 3886760 - RNA, 16 nt, Human
ucuccuuguucugaua

SEQ ID NO: 3886761 - RNA, 15 nt, Human
ucuccuuuaauugua

SEQ ID NO: 3886762 - RNA, 20 nt, Human
ucuccuuuagggacagcuua

SEQ ID NO: 3886763 - RNA, 14 nt, Human
ucuccuuucagggc

SEQ ID NO: 3886764 - RNA, 12 nt, Human
ucuccuuugaaa

SEQ ID NO: 3886765 - RNA, 19 nt, Human
ucuccuuugcacugagggc

SEQ ID NO: 3886766 - RNA, 23 nt, Human
ucuccuuugcacugagggccaca

SEQ ID NO: 3886767 - RNA, 17 nt, Human
ucuccuuugcaggcuca

SEQ ID NO: 3886768 - RNA, 20 nt, Human
ucuccuuuguacuuugugcu

SEQ ID NO: 3886769 - RNA, 14 nt, Human
ucuccuuuguauau

SEQ ID NO: 3886770 - RNA, 22 nt, Human
ucuccuuuguauucugucuuca

SEQ ID NO: 3886771 - RNA, 18 nt, Human
ucuccuuuucuuuuguua

SEQ ID NO: 3886772 - RNA, 17 nt, Human
ucucgaacuccugaccu

SEQ ID NO: 3886773 - RNA, 14 nt, Human
ucucgaugcaauga

SEQ ID NO: 3886774 - RNA, 23 nt, Human
ucucgcauaggaccuuuccacca

SEQ ID NO: 3886775 - RNA, 16 nt, Human
ucucgcaucuucccaa

SEQ ID NO: 3886776 - RNA, 13 nt, Human
ucucgccaagcag

SEQ ID NO: 3886777 - RNA, 21 nt, Human
ucucgcggccucuucucucag

SEQ ID NO: 3886778 - RNA, 15 nt, Human
ucucgcucccuccca

SEQ ID NO: 3886779 - RNA, 16 nt, Human
ucucgcucccucccag

SEQ ID NO: 3886780 - RNA, 15 nt, Human
ucucgcucugucacc

SEQ ID NO: 3886781 - RNA, 19 nt, Human
ucucgcucuguugcccagg

SEQ ID NO: 3886782 - RNA, 15 nt, Human
ucucgcuucccugaa

SEQ ID NO: 3886783 - RNA, 21 nt, Human
ucucggaacugcaugcugcug

SEQ ID NO: 3886784 - RNA, 21 nt, Human
ucucggcaacuaagcaguccc

SEQ ID NO: 3886785 - RNA, 23 nt, Human
ucucggcucagugcaaccucugc

SEQ ID NO: 3886786 - RNA, 19 nt, Human
ucucguccucguuuguguu

SEQ ID NO: 3886787 - RNA, 14 nt, Human
ucucgugauugaua

SEQ ID NO: 3886788 - RNA, 18 nt, Human
ucucgugggagagccauc

SEQ ID NO: 3886789 - RNA, 14 nt, Human
ucucguuucaaaaa

SEQ ID NO: 3886790 - RNA, 22 nt, Human
ucucuaaagaguuuauuuuaag

SEQ ID NO: 3886791 - RNA, 23 nt, Human
ucucuaaaugaggggccucaggu

SEQ ID NO: 3886792 - RNA, 22 nt, Human
ucucuaacucagaaacaucagu

SEQ ID NO: 3886793 - RNA, 12 nt, Human
ucucuaacuuca

SEQ ID NO: 3886794 - RNA, 22 nt, Human
ucucuaacuucaaggcccauau

SEQ ID NO: 3886795 - RNA, 19 nt, Human
ucucuaacuucaccauauu

SEQ ID NO: 3886796 - RNA, 18 nt, Human
ucucuaauaauaaauagu

SEQ ID NO: 3886797 - RNA, 13 nt, Human
ucucuacaaaccc

SEQ ID NO: 3886798 - RNA, 22 nt, Human
ucucuacagucucgucucuuuu

SEQ ID NO: 3886799 - RNA, 13 nt, Human
ucucuaccauccc

SEQ ID NO: 3886800 - RNA, 18 nt, Human
ucucuacccaucuuaaaa

SEQ ID NO: 3886801 - RNA, 13 nt, Human
ucucuacucugcu

SEQ ID NO: 3886802 - RNA, 22 nt, Human
ucucuacugaaugucauugaaa

SEQ ID NO: 3886803 - RNA, 22 nt, Human
ucucuacuuuucccuguacuuu

SEQ ID NO: 3886804 - RNA, 13 nt, Human
ucucuagaauuuu

SEQ ID NO: 3886805 - RNA, 22 nt, Human
ucucuagaauuuuaagugcuuu

SEQ ID NO: 3886806 - RNA, 23 nt, Human
ucucuagcuggugguuucacggu

SEQ ID NO: 3886807 - RNA, 13 nt, Human
ucucuaggaaaua

SEQ ID NO: 3886808 - RNA, 19 nt, Human
ucucuaggaaauauuuauu

SEQ ID NO: 3886809 - RNA, 13 nt, Human
ucucuaggaaguc

SEQ ID NO: 3886810 - RNA, 18 nt, Human
ucucuaggccucuccagu

SEQ ID NO: 3886811 - RNA, 15 nt, Human
ucucuaggcugggga

SEQ ID NO: 3886812 - RNA, 16 nt, Human
ucucuagugcugugaa

SEQ ID NO: 3886813 - RNA, 15 nt, Human
ucucuaguuugauua

SEQ ID NO: 3886814 - RNA, 18 nt, Human
ucucuaguuugauuaaau

SEQ ID NO: 3886815 - RNA, 13 nt, Human
ucucuauaaaaaa

SEQ ID NO: 3886816 - RNA, 14 nt, Human
ucucuauaccaaua

SEQ ID NO: 3886817 - RNA, 14 nt, Human
ucucuaucauuaaa

SEQ ID NO: 3886818 - RNA, 17 nt, Human
ucucuaucauuaaaguu

SEQ ID NO: 3886819 - RNA, 15 nt, Human
ucucuaucauuuaau

SEQ ID NO: 3886820 - RNA, 16 nt, Human
ucucuaucauuuaaua

SEQ ID NO: 3886821 - RNA, 21 nt, Human
ucucuauuaccacugaagaua

SEQ ID NO: 3886822 - RNA, 17 nt, Human
ucucuauuccccacccu

SEQ ID NO: 3886823 - RNA, 23 nt, Human
ucucuauuuaaauucuuuuuuaa

SEQ ID NO: 3886824 - RNA, 14 nt, Human
ucucuauuuaauau

SEQ ID NO: 3886825 - RNA, 15 nt, Human
ucucuauuuaauauu

SEQ ID NO: 3886826 - RNA, 13 nt, Human
ucucucaaaucug

SEQ ID NO: 3886827 - RNA, 14 nt, Human
ucucucaaauuguc

SEQ ID NO: 3886828 - RNA, 15 nt, Human
ucucucacagacagg

SEQ ID NO: 3886829 - RNA, 19 nt, Human
ucucucacagacaggaccc

SEQ ID NO: 3886830 - RNA, 17 nt, Human
ucucucacuuguuuuau

SEQ ID NO: 3886831 - RNA, 13 nt, Human
ucucucaggagca

SEQ ID NO: 3886832 - RNA, 17 nt, Human
ucucucaggagcacagg

SEQ ID NO: 3886833 - RNA, 19 nt, Human
ucucucaggagcacaggca

SEQ ID NO: 3886834 - RNA, 19 nt, Human
ucucucaucucuuagcucc

SEQ ID NO: 3886835 - RNA, 12 nt, Human
ucucucaugaac

SEQ ID NO: 3886836 - RNA, 19 nt, Human
ucucuccacuuucagcugu

SEQ ID NO: 3886837 - RNA, 20 nt, Human
ucucuccacuuucagcuguc

SEQ ID NO: 3886838 - RNA, 16 nt, Human
ucucuccagauguuuc

SEQ ID NO: 3886839 - RNA, 18 nt, Human
ucucuccagccccuggau

SEQ ID NO: 3886840 - RNA, 18 nt, Human
ucucuccagcugacuaaa

SEQ ID NO: 3886841 - RNA, 19 nt, Human
ucucuccagcugacuaaac

SEQ ID NO: 3886842 - RNA, 13 nt, Human
ucucuccagugca

SEQ ID NO: 3886843 - RNA, 14 nt, Human
ucucucccaggggc

SEQ ID NO: 3886844 - RNA, 17 nt, Human
ucucucccauggagccc

SEQ ID NO: 3886845 - RNA, 20 nt, Human
ucucucccauggagccccag

SEQ ID NO: 3886846 - RNA, 23 nt, Human
ucucucccauggagccccagccc

SEQ ID NO: 3886847 - RNA, 13 nt, Human
ucucuccccucaa

SEQ ID NO: 3886848 - RNA, 14 nt, Human
ucucucccuccccu

SEQ ID NO: 3886849 - RNA, 12 nt, Human
ucucuccuggcc

SEQ ID NO: 3886850 - RNA, 17 nt, Human
ucucuccuucuuccccc

SEQ ID NO: 3886851 - RNA, 15 nt, Human
ucucuccuuguucug

SEQ ID NO: 3886852 - RNA, 19 nt, Human
ucucuccuuguucugauaa

SEQ ID NO: 3886853 - RNA, 10 nt, Human
ucucuccuuu

SEQ ID NO: 3886854 - RNA, 22 nt, Human
ucucuccuuucuuuuucuucuu

SEQ ID NO: 3886855 - RNA, 14 nt, Human
ucucuccuuugcug

SEQ ID NO: 3886856 - RNA, 17 nt, Human
ucucuccuuuucuuuug

SEQ ID NO: 3886857 - RNA, 18 nt, Human
ucucucgguuccacgucc

SEQ ID NO: 3886858 - RNA, 16 nt, Human
ucucucuauuaccacu

SEQ ID NO: 3886859 - RNA, 17 nt, Human
ucucucucaauuuuugg

SEQ ID NO: 3886860 - RNA, 19 nt, Human
ucucucuccuguacuuuuu

SEQ ID NO: 3886861 - RNA, 14 nt, Human
ucucucucuaaggu

SEQ ID NO: 3886862 - RNA, 14 nt, Human
ucucucucuacaaa

SEQ ID NO: 3886863 - RNA, 16 nt, Human
ucucucucucucaaaa

SEQ ID NO: 3886864 - RNA, 14 nt, Human
ucucucucuguugu

SEQ ID NO: 3886865 - RNA, 15 nt, Human
ucucucucuuagcau

SEQ ID NO: 3886866 - RNA, 14 nt, Human
ucucucugacucuc

SEQ ID NO: 3886867 - RNA, 14 nt, Human
ucugagaaugaaca

SEQ ID NO: 3886868 - RNA, 13 nt, Human
ucugagacucaca

SEQ ID NO: 3886869 - RNA, 22 nt, Human
ucugagacucgcgacaaugcaa

SEQ ID NO: 3886870 - RNA, 19 nt, Human
ucugagagcaaagugaccu

SEQ ID NO: 3886871 - RNA, 17 nt, Human
ucugagagucuagauuc

SEQ ID NO: 3886872 - RNA, 18 nt, Human
ucugagauucaauauuga

SEQ ID NO: 3886873 - RNA, 15 nt, Human
ucugagcaagagcug

SEQ ID NO: 3886874 - RNA, 17 nt, Human
ucugagcaagagcuggc

SEQ ID NO: 3886875 - RNA, 15 nt, Human
ucugagcacacuuua

SEQ ID NO: 3886876 - RNA, 19 nt, Human
ucugagcaccgaauauuga

SEQ ID NO: 3886877 - RNA, 22 nt, Human
ucugagcaccgaauauugagca

SEQ ID NO: 3886878 - RNA, 17 nt, Human
ucugagcagcgagccug

SEQ ID NO: 3886879 - RNA, 19 nt, Human
ucugagcagugaaugauuc

SEQ ID NO: 3886880 - RNA, 22 nt, Human
ucugagcauuagauuucucauu

SEQ ID NO: 3886881 - RNA, 15 nt, Human
ucugagccacagugg

SEQ ID NO: 3886882 - RNA, 17 nt, Human
ucugagccacaguggga

SEQ ID NO: 3886883 - RNA, 15 nt, Human
ucugagccccuggga

SEQ ID NO: 3886884 - RNA, 16 nt, Human
ucugagccccugggac

SEQ ID NO: 3886885 - RNA, 13 nt, Human
ucugagcccgggc

SEQ ID NO: 3886886 - RNA, 21 nt, Human
ucugagcccgguaagagcaaa

SEQ ID NO: 3886887 - RNA, 18 nt, Human
ucugagcccucaaaguga

SEQ ID NO: 3886888 - RNA, 17 nt, Human
ucugagcuauuucaucu

SEQ ID NO: 3886889 - RNA, 13 nt, Human
ucugagcuccagc

SEQ ID NO: 3886890 - RNA, 15 nt, Human
ucugagcugcucuga

SEQ ID NO: 3886891 - RNA, 22 nt, Human
ucugagcuggccucucacugcc

SEQ ID NO: 3886892 - RNA, 22 nt, Human
ucugaggaaucaacagggcagc

SEQ ID NO: 3886893 - RNA, 21 nt, Human
ucugaggaauccagacccggc

SEQ ID NO: 3886894 - RNA, 15 nt, Human
ucugaggaauucugu

SEQ ID NO: 3886895 - RNA, 17 nt, Human
ucugaggaauucuguau

SEQ ID NO: 3886896 - RNA, 14 nt, Human
ucugaggacaagag

SEQ ID NO: 3886897 - RNA, 18 nt, Human
ucugaggacaagagaaaa

SEQ ID NO: 3886898 - RNA, 16 nt, Human
ucugaggccagccugg

SEQ ID NO: 3886899 - RNA, 19 nt, Human
ucugaggccagccuggccu

SEQ ID NO: 3886900 - RNA, 20 nt, Human
ucugaggccagccuggccuc

SEQ ID NO: 3886901 - RNA, 21 nt, Human
ucugaggcucuuucugggcca

SEQ ID NO: 3886902 - RNA, 11 nt, Human
ucugaggcugu

SEQ ID NO: 3886903 - RNA, 17 nt, Human
ucugagggaaauguuuu

SEQ ID NO: 3886904 - RNA, 18 nt, Human
ucugagggaaauguuuug

SEQ ID NO: 3886905 - RNA, 21 nt, Human
ucugagggaggaggccaccuc

SEQ ID NO: 3886906 - RNA, 20 nt, Human
ucugagggcuuguaguucuu

SEQ ID NO: 3886907 - RNA, 21 nt, Human
ucugaggggcuaccaggaaag

SEQ ID NO: 3886908 - RNA, 19 nt, Human
ucugagguccugagcacug

SEQ ID NO: 3886909 - RNA, 21 nt, Human
ucugagguccugagcacugcc

SEQ ID NO: 3886910 - RNA, 23 nt, Human
ucugaggugcacugggaggcucc

SEQ ID NO: 3886911 - RNA, 13 nt, Human
ucugaguacagag

SEQ ID NO: 3886912 - RNA, 16 nt, Human
ucugagucaacuccuu

SEQ ID NO: 3886913 - RNA, 18 nt, Human
ucugagugaaccuguaua

SEQ ID NO: 3886914 - RNA, 24 nt, Human
ucugaguguuuuuacuacaguugu

SEQ ID NO: 3886915 - RNA, 12 nt, Human
ucugaguuaugu

SEQ ID NO: 3886916 - RNA, 19 nt, Human
ucugaguucuguguauuuu

SEQ ID NO: 3886917 - RNA, 21 nt, Human
ucugaguuuaccauuuguaau

SEQ ID NO: 3886918 - RNA, 22 nt, Human
ucugaguuucauucuccugccu

SEQ ID NO: 3886919 - RNA, 20 nt, Human
ucugauaacuagauggugcu

SEQ ID NO: 3886920 - RNA, 22 nt, Human
ucugauaacuagauggugcuga

SEQ ID NO: 3886921 - RNA, 17 nt, Human
ucugauacagaaaaguu

SEQ ID NO: 3886922 - RNA, 16 nt, Human
ucugauacccagagca

SEQ ID NO: 3886923 - RNA, 13 nt, Human
ucugauaugggac

SEQ ID NO: 3886924 - RNA, 17 nt, Human
ucugaucauccacugug

SEQ ID NO: 3886925 - RNA, 21 nt, Human
ucugauccuaguuccaccauc

SEQ ID NO: 3886926 - RNA, 20 nt, Human
ucugaucgugacgcugaaua

SEQ ID NO: 3886927 - RNA, 15 nt, Human
ucugaugaaaaauug

SEQ ID NO: 3886928 - RNA, 14 nt, Human
ucugaugaaucuug

SEQ ID NO: 3886929 - RNA, 16 nt, Human
ucugaugcaagcaaga

SEQ ID NO: 3886930 - RNA, 21 nt, Human
ucugaugcaagcaagaaacac

SEQ ID NO: 3886931 - RNA, 13 nt, Human
ucugaugcagcuu

SEQ ID NO: 3886932 - RNA, 17 nt, Human
ucugaugcagcuuauac

SEQ ID NO: 3886933 - RNA, 13 nt, Human
ucugauggcuucu

SEQ ID NO: 3886934 - RNA, 15 nt, Human
ucugauguaaaugaa

SEQ ID NO: 3886935 - RNA, 15 nt, Human
ucugauguacucuaa

SEQ ID NO: 3886936 - RNA, 13 nt, Human
ucugauuccacuu

SEQ ID NO: 3886937 - RNA, 19 nt, Human
ucugauucccaagcucugc

SEQ ID NO: 3886938 - RNA, 19 nt, Human
ucugauucgaaugacacug

SEQ ID NO: 3886939 - RNA, 22 nt, Human
ucugauugauuugauugggaug

SEQ ID NO: 3886940 - RNA, 21 nt, Human
ucugauuggacauuuucuuca

SEQ ID NO: 3886941 - RNA, 20 nt, Human
ucugauuguaacguugcugu

SEQ ID NO: 3886942 - RNA, 16 nt, Human
ucugauugugauguga

SEQ ID NO: 3886943 - RNA, 13 nt, Human
ucugauuuaauug

SEQ ID NO: 3886944 - RNA, 23 nt, Human
ucugauuuauuuuguaugaaaua

SEQ ID NO: 3886945 - RNA, 20 nt, Human
ucugauuucuuuucaccauu

SEQ ID NO: 3886946 - RNA, 13 nt, Human
ucugauuuuagga

SEQ ID NO: 3886947 - RNA, 21 nt, Human
ucugauuuuauguaaaauuuu

SEQ ID NO: 3886948 - RNA, 22 nt, Human
ucugauuuuauguaaaauuuug

SEQ ID NO: 3886949 - RNA, 14 nt, Human
ucugcaaaaauauu

SEQ ID NO: 3886950 - RNA, 16 nt, Human
ucugcaaaaggagaga

SEQ ID NO: 3886951 - RNA, 20 nt, Human
ucugcaaaaugaggaaugua

SEQ ID NO: 3886952 - RNA, 21 nt, Human
ucugcaaaaugaggaauguau

SEQ ID NO: 3886953 - RNA, 22 nt, Human
ucugcaaaaugaggaauguaua

SEQ ID NO: 3886954 - RNA, 16 nt, Human
ucugcaaagcauguuu

SEQ ID NO: 3886955 - RNA, 16 nt, Human
ucugcaaauagaaaac

SEQ ID NO: 3886956 - RNA, 14 nt, Human
ucugcaacaagcau

SEQ ID NO: 3886957 - RNA, 16 nt, Human
ucugcaacaagcaugc

SEQ ID NO: 3886958 - RNA, 21 nt, Human
ucugcaacuuuaagcagcucu

SEQ ID NO: 3886959 - RNA, 21 nt, Human
ucugcaagaauugaagcagga

SEQ ID NO: 3886960 - RNA, 23 nt, Human
ucugcaaguauacuagggagcca

SEQ ID NO: 3886961 - RNA, 15 nt, Human
ucugcaagucagagg

SEQ ID NO: 3886962 - RNA, 19 nt, Human
ucugcaauucaaaaguucc

SEQ ID NO: 3886963 - RNA, 16 nt, Human
ucugcaauuccccucu

SEQ ID NO: 3886964 - RNA, 20 nt, Human
ucugcaauuccccucugcug

SEQ ID NO: 3886965 - RNA, 14 nt, Human
ucugcacaagcugc

SEQ ID NO: 3886966 - RNA, 14 nt, Human
ucugcacacaaaua

SEQ ID NO: 3886967 - RNA, 20 nt, Human
ucugcacauaaacucuuuua

SEQ ID NO: 3886968 - RNA, 20 nt, Human
ucugcacaugcagcugcacc

SEQ ID NO: 3886969 - RNA, 21 nt, Human
ucugcacaugcagcugcaccc

SEQ ID NO: 3886970 - RNA, 15 nt, Human
ucugcacaugucuug

SEQ ID NO: 3886971 - RNA, 16 nt, Human
ucugcacaugucuugu

SEQ ID NO: 3886972 - RNA, 21 nt, Human
ucugcacaugucuuguacaug

SEQ ID NO: 3886973 - RNA, 14 nt, Human
ucugcacccagaac

SEQ ID NO: 3886974 - RNA, 15 nt, Human
ucugcacccagaaca

SEQ ID NO: 3886975 - RNA, 17 nt, Human
ucugcaccccccugggc

SEQ ID NO: 3886976 - RNA, 18 nt, Human
ucugcaccccccugggcu

SEQ ID NO: 3886977 - RNA, 15 nt, Human
ucugcaccccuucuc

SEQ ID NO: 3886978 - RNA, 18 nt, Human
ucugcaccccuucucucc

SEQ ID NO: 3886979 - RNA, 19 nt, Human
ucugcaccccuucucuccu

SEQ ID NO: 3886980 - RNA, 13 nt, Human
ucugcacccucca

SEQ ID NO: 3886981 - RNA, 16 nt, Human
ucugcacccuccaccc

SEQ ID NO: 3886982 - RNA, 17 nt, Human
ucugcacccuccacccu

SEQ ID NO: 3886983 - RNA, 18 nt, Human
ucugcacccuccacccug

SEQ ID NO: 3886984 - RNA, 19 nt, Human
ucugcacccuccacccugu

SEQ ID NO: 3886985 - RNA, 23 nt, Human
ucugcaccgccggccagcuggga

SEQ ID NO: 3886986 - RNA, 21 nt, Human
ucugcaccuauguagcucugc

SEQ ID NO: 3886987 - RNA, 22 nt, Human
ucugcaccuauguagcucugca

SEQ ID NO: 3886988 - RNA, 16 nt, Human
ucugcaccuuaucuua

SEQ ID NO: 3886989 - RNA, 12 nt, Human
ucugcacuacuc

SEQ ID NO: 3886990 - RNA, 18 nt, Human
ucugcacuacuccucugc

SEQ ID NO: 3886991 - RNA, 19 nt, Human
ucugcacuacuccucugca

SEQ ID NO: 3886992 - RNA, 18 nt, Human
ucugcacuauaugcaaac

SEQ ID NO: 3886993 - RNA, 16 nt, Human
ucugcacuccccugcu

SEQ ID NO: 3886994 - RNA, 20 nt, Human
ucugcacuccccugcugggu

SEQ ID NO: 3886995 - RNA, 12 nt, Human
ucugcacugaaa

SEQ ID NO: 3886996 - RNA, 13 nt, Human
ucugcacugaaaa

SEQ ID NO: 3886997 - RNA, 16 nt, Human
ucugcacugaaaaggu

SEQ ID NO: 3886998 - RNA, 22 nt, Human
ucugcacugagcagagucuugc

SEQ ID NO: 3886999 - RNA, 13 nt, Human
ucugcagaaggaa

SEQ ID NO: 3887000 - RNA, 18 nt, Human
ucugcagacuucccagcu

SEQ ID NO: 3887001 - RNA, 15 nt, Human
ucugcagauaaacag

SEQ ID NO: 3887002 - RNA, 20 nt, Human
ucugcagauagaaagcauua

SEQ ID NO: 3887003 - RNA, 15 nt, Human
ucugcagcccugaga

SEQ ID NO: 3887004 - RNA, 11 nt, Human
ucugcagccuc

SEQ ID NO: 3887005 - RNA, 13 nt, Human
ucugcagccucag

SEQ ID NO: 3887006 - RNA, 19 nt, Human
ucugcaggaaauaggccca

SEQ ID NO: 3887007 - RNA, 22 nt, Human
ucugcaggcaccuuaguggcuu

SEQ ID NO: 3887008 - RNA, 16 nt, Human
ucugcaggcagacacg

SEQ ID NO: 3887009 - RNA, 13 nt, Human
ucugcaggcaggg

SEQ ID NO: 3887010 - RNA, 12 nt, Human
ucugcagguccc

SEQ ID NO: 3887011 - RNA, 13 nt, Human
ucuuuugacaugu

SEQ ID NO: 3887012 - RNA, 17 nt, Human
ucuuuugacauguggaa

SEQ ID NO: 3887013 - RNA, 16 nt, Human
ucuuuugauuauguuu

SEQ ID NO: 3887014 - RNA, 17 nt, Human
ucuuuugccguuauuaa

SEQ ID NO: 3887015 - RNA, 23 nt, Human
ucuuuugccuuuugcaaccagga

SEQ ID NO: 3887016 - RNA, 19 nt, Human
ucuuuugcuacuaaguuca

SEQ ID NO: 3887017 - RNA, 13 nt, Human
ucuuuugcuuuug

SEQ ID NO: 3887018 - RNA, 18 nt, Human
ucuuuugcuuuuggcaaa

SEQ ID NO: 3887019 - RNA, 15 nt, Human
ucuuuuguauguaaa

SEQ ID NO: 3887020 - RNA, 17 nt, Human
ucuuuuguauguaaaug

SEQ ID NO: 3887021 - RNA, 15 nt, Human
ucuuuuguuaaauaa

SEQ ID NO: 3887022 - RNA, 19 nt, Human
ucuuuuguuacucuuggga

SEQ ID NO: 3887023 - RNA, 13 nt, Human
ucuuuuguuacug

SEQ ID NO: 3887024 - RNA, 14 nt, Human
ucuuuuguuacugu

SEQ ID NO: 3887025 - RNA, 16 nt, Human
ucuuuuguuacuguuc

SEQ ID NO: 3887026 - RNA, 17 nt, Human
ucuuuuguuacuguucu

SEQ ID NO: 3887027 - RNA, 22 nt, Human
ucuuuuguuacuguucuugcug

SEQ ID NO: 3887028 - RNA, 20 nt, Human
ucuuuuguucgcauggucac

SEQ ID NO: 3887029 - RNA, 15 nt, Human
ucuuuuguuguuucu

SEQ ID NO: 3887030 - RNA, 13 nt, Human
ucuuuuuaaagcu

SEQ ID NO: 3887031 - RNA, 23 nt, Human
ucuuuuuaaaguguuucuguuau

SEQ ID NO: 3887032 - RNA, 18 nt, Human
ucuuuuuaaaguucaaac

SEQ ID NO: 3887033 - RNA, 16 nt, Human
ucuuuuuaaguaaugu

SEQ ID NO: 3887034 - RNA, 15 nt, Human
ucuuuuuaaguuaau

SEQ ID NO: 3887035 - RNA, 21 nt, Human
ucuuuuuacccauuuguucau

SEQ ID NO: 3887036 - RNA, 16 nt, Human
ucuuuuuauacuauua

SEQ ID NO: 3887037 - RNA, 12 nt, Human
ucuuuuucaguu

SEQ ID NO: 3887038 - RNA, 14 nt, Human
ucuuuuucuggacu

SEQ ID NO: 3887039 - RNA, 14 nt, Human
ucuuuuucuguugu

SEQ ID NO: 3887040 - RNA, 15 nt, Human
ucuuuuucuguugua

SEQ ID NO: 3887041 - RNA, 16 nt, Human
ucuuuuucuguuguaa

SEQ ID NO: 3887042 - RNA, 15 nt, Human
ucuuuuucuucuucc

SEQ ID NO: 3887043 - RNA, 17 nt, Human
ucuuuuugaaguauuua

SEQ ID NO: 3887044 - RNA, 22 nt, Human
ucuuuuugggagagacuuguuu

SEQ ID NO: 3887045 - RNA, 14 nt, Human
ucuuuuuuacucau

SEQ ID NO: 3887046 - RNA, 22 nt, Human
ucuuuuuuacucauugaaaugu

SEQ ID NO: 3887047 - RNA, 20 nt, Human
ucuuuuuuagcauaaaauuu

SEQ ID NO: 3887048 - RNA, 13 nt, Human
ucuuuuuuaugug

SEQ ID NO: 3887049 - RNA, 15 nt, Human
ucuuuuuuauuaauc

SEQ ID NO: 3887050 - RNA, 16 nt, Human
ucuuuuuucaaaagaa

SEQ ID NO: 3887051 - RNA, 17 nt, Human
ucuuuuuucaaaagaaa

SEQ ID NO: 3887052 - RNA, 21 nt, Human
ucuuuuuuggccaucugcucc

SEQ ID NO: 3887053 - RNA, 22 nt, Human
ucuuuuuuguuuguuucuuugu

SEQ ID NO: 3887054 - RNA, 15 nt, Human
ucuuuuuuucuugaa

SEQ ID NO: 3887055 - RNA, 17 nt, Human
ucuuuuuuuguauaguu

SEQ ID NO: 3887056 - RNA, 18 nt, Human
ucuuuuuuuguauaguua

SEQ ID NO: 3887057 - RNA, 20 nt, Human
ucuuuuuuuucuauuucacu

SEQ ID NO: 3887058 - RNA, 16 nt, Human
ucuuuuuuuuuaaguu

SEQ ID NO: 3887059 - RNA, 20 nt, Human
ugaaaaaaaaaaugcugaac

SEQ ID NO: 3887060 - RNA, 15 nt, Human
ugaaaaaaacuucau

SEQ ID NO: 3887061 - RNA, 12 nt, Human
ugaaaaaaauug

SEQ ID NO: 3887062 - RNA, 21 nt, Human
ugaaaaaagaaauucccugga

SEQ ID NO: 3887063 - RNA, 17 nt, Human
ugaaaaaagcaguucuu

SEQ ID NO: 3887064 - RNA, 11 nt, Human
ugaaaaaagcu

SEQ ID NO: 3887065 - RNA, 14 nt, Human
ugaaaaaagcucau

SEQ ID NO: 3887066 - RNA, 19 nt, Human
ugaaaaaagcuuuuaugag

SEQ ID NO: 3887067 - RNA, 12 nt, Human
ugaaaaaauaua

SEQ ID NO: 3887068 - RNA, 22 nt, Human
ugaaaaagaccuuuggagcaaa

SEQ ID NO: 3887069 - RNA, 14 nt, Human
ugaaaaagcaugua

SEQ ID NO: 3887070 - RNA, 18 nt, Human
ugaaaaagcauguacagu

SEQ ID NO: 3887071 - RNA, 20 nt, Human
ugaaaaauauaaaauuauga

SEQ ID NO: 3887072 - RNA, 22 nt, Human
ugaaaaauauaaaauuaugaga

SEQ ID NO: 3887073 - RNA, 21 nt, Human
ugaaaaaucacuugauucaua

SEQ ID NO: 3887074 - RNA, 20 nt, Human
ugaaaaaucugcuguuaacu

SEQ ID NO: 3887075 - RNA, 14 nt, Human
ugaaaaaugaaaga

SEQ ID NO: 3887076 - RNA, 19 nt, Human
ugaaaaaugagauugaaug

SEQ ID NO: 3887077 - RNA, 14 nt, Human
ugaaaaauugcuga

SEQ ID NO: 3887078 - RNA, 22 nt, Human
ugaaaaauugcugacuguagcu

SEQ ID NO: 3887079 - RNA, 18 nt, Human
ugaaaaauuuaagcauug

SEQ ID NO: 3887080 - RNA, 20 nt, Human
ugaaaaauuuaagcauuguu

SEQ ID NO: 3887081 - RNA, 13 nt, Human
ugaaaacacauuu

SEQ ID NO: 3887082 - RNA, 14 nt, Human
ugaaaacacauuug

SEQ ID NO: 3887083 - RNA, 19 nt, Human
ugaaaacacauuugcuuuu

SEQ ID NO: 3887084 - RNA, 18 nt, Human
ugaaaacagaaaacgguu

SEQ ID NO: 3887085 - RNA, 17 nt, Human
ugaaaacagaaauuggu

SEQ ID NO: 3887086 - RNA, 18 nt, Human
ugaaaacagaaauuggua

SEQ ID NO: 3887087 - RNA, 19 nt, Human
ugaaaacaguguguaaaca

SEQ ID NO: 3887088 - RNA, 14 nt, Human
ugaaaacccagaga

SEQ ID NO: 3887089 - RNA, 23 nt, Human
ugaaaacccagagaggaaucaga

SEQ ID NO: 3887090 - RNA, 15 nt, Human
ugaaaacuacauuuu

SEQ ID NO: 3887091 - RNA, 16 nt, Human
ugaaaacuacauuuua

SEQ ID NO: 3887092 - RNA, 17 nt, Human
ugaaaacuacauuuuaa

SEQ ID NO: 3887093 - RNA, 13 nt, Human
ugaaaacuauaca

SEQ ID NO: 3887094 - RNA, 13 nt, Human
ugaaaacucuuug

SEQ ID NO: 3887095 - RNA, 12 nt, Human
ugaaaacuggaa

SEQ ID NO: 3887096 - RNA, 19 nt, Human
ugaaaacuuuaugcuaagu

SEQ ID NO: 3887097 - RNA, 15 nt, Human
ugaaaagacuccaaa

SEQ ID NO: 3887098 - RNA, 16 nt, Human
ugaaaagacuccaaag

SEQ ID NO: 3887099 - RNA, 16 nt, Human
ugaaaagagaaugaug

SEQ ID NO: 3887100 - RNA, 12 nt, Human
ugaaaagagcug

SEQ ID NO: 3887101 - RNA, 23 nt, Human
ugaaaagaggggaccagaagcca

SEQ ID NO: 3887102 - RNA, 22 nt, Human
ugaaaagaggugugcaagagag

SEQ ID NO: 3887103 - RNA, 17 nt, Human
ugaaaagauuuaagcac

SEQ ID NO: 3887104 - RNA, 17 nt, Human
ugaaaagccauguuuaa

SEQ ID NO: 3887105 - RNA, 22 nt, Human
ugaaaagccauguuuaagauuu

SEQ ID NO: 3887106 - RNA, 16 nt, Human
ugaaaagccucuguuu

SEQ ID NO: 3887107 - RNA, 20 nt, Human
ugaaaagccucuguuuugau

SEQ ID NO: 3887108 - RNA, 17 nt, Human
ugaaaagcuagaauuga

SEQ ID NO: 3887109 - RNA, 13 nt, Human
ugaaaagcuauua

SEQ ID NO: 3887110 - RNA, 19 nt, Human
ugaaaagcuucuuaauuaa

SEQ ID NO: 3887111 - RNA, 23 nt, Human
ugaaaaggugaccuugcaacuuc

SEQ ID NO: 3887112 - RNA, 22 nt, Human
ugaaaagguuuaugaaaaagaa

SEQ ID NO: 3887113 - RNA, 20 nt, Human
ugaaaaguaauauuuauuaa

SEQ ID NO: 3887114 - RNA, 14 nt, Human
ugaaaagucaaacu

SEQ ID NO: 3887115 - RNA, 14 nt, Human
ugaaaaguguguau

SEQ ID NO: 3887116 - RNA, 22 nt, Human
ugaaaaguuacuaccugucaag

SEQ ID NO: 3887117 - RNA, 21 nt, Human
ugaaaauaaaaagaucacuuu

SEQ ID NO: 3887118 - RNA, 14 nt, Human
ugaaaauaaagaau

SEQ ID NO: 3887119 - RNA, 18 nt, Human
ugaaaauaacugaauuug

SEQ ID NO: 3887120 - RNA, 21 nt, Human
ugaaaauaacugaauuuggag

SEQ ID NO: 3887121 - RNA, 22 nt, Human
ugaaaauaaucucugauucccu

SEQ ID NO: 3887122 - RNA, 13 nt, Human
ugaaaauaauugu

SEQ ID NO: 3887123 - RNA, 23 nt, Human
ugaaaauacaacuuaaauaauaa

SEQ ID NO: 3887124 - RNA, 20 nt, Human
ugaaaauaguuuauuuuaaa

SEQ ID NO: 3887125 - RNA, 14 nt, Human
ugaaaauauaacca

SEQ ID NO: 3887126 - RNA, 13 nt, Human
ugaaaauauauac

SEQ ID NO: 3887127 - RNA, 16 nt, Human
ugaaaauaucggggag

SEQ ID NO: 3887128 - RNA, 22 nt, Human
ugaaaauauuuguaucacaaau

SEQ ID NO: 3887129 - RNA, 21 nt, Human
ugaaaauauuuuuuauauaua

SEQ ID NO: 3887130 - RNA, 12 nt, Human
ugaaaaucaaau

SEQ ID NO: 3887131 - RNA, 19 nt, Human
ugaaaaugaauaucuauua

SEQ ID NO: 3887132 - RNA, 23 nt, Human
ugaaaaugcaacaacauguauaa

SEQ ID NO: 3887133 - RNA, 13 nt, Human
ugaaaaugcuggc

SEQ ID NO: 3887134 - RNA, 16 nt, Human
ugaaaaugguauuuuc

SEQ ID NO: 3887135 - RNA, 18 nt, Human
ugaaaauguaagcuguuu

SEQ ID NO: 3887136 - RNA, 14 nt, Human
ugaaaaugucaaag

SEQ ID NO: 3887137 - RNA, 21 nt, Human
ugaaaaugucagaaaccaguu

SEQ ID NO: 3887138 - RNA, 22 nt, Human
ugaaaaugugcuauacugcaua

SEQ ID NO: 3887139 - RNA, 13 nt, Human
ugaaaauguucau

SEQ ID NO: 3887140 - RNA, 17 nt, Human
ugaaaauuauuuaaacc

SEQ ID NO: 3887141 - RNA, 16 nt, Human
ugaaaauuauuugaaa

SEQ ID NO: 3887142 - RNA, 18 nt, Human
ugaaaauuauuuuaaaca

SEQ ID NO: 3887143 - RNA, 19 nt, Human
ugaaaauuauuuuaaacaa

SEQ ID NO: 3887144 - RNA, 19 nt, Human
ugaaaauucaaaaaguguu

SEQ ID NO: 3887145 - RNA, 23 nt, Human
ugaaaauucaaaaaguguuuauu

SEQ ID NO: 3887146 - RNA, 19 nt, Human
ugaaaauugccuuucugug

SEQ ID NO: 3887147 - RNA, 20 nt, Human
ugaaaauuuuaaaaauacau

SEQ ID NO: 3887148 - RNA, 14 nt, Human
ugaaaauuuuacca

SEQ ID NO: 3887149 - RNA, 13 nt, Human
ugaaaauuuugau

SEQ ID NO: 3887150 - RNA, 21 nt, Human
ugaaaauuuugauguuuuaag

SEQ ID NO: 3887151 - RNA, 14 nt, Human
ugaaacaaagaguu

SEQ ID NO: 3887152 - RNA, 22 nt, Human
ugaaacaacaaauaggaauugu

SEQ ID NO: 3887153 - RNA, 15 nt, Human
ugaaacaacuuggaa

SEQ ID NO: 3887154 - RNA, 20 nt, Human
ugaaacacaaacaauaguaa

SEQ ID NO: 3887155 - RNA, 17 nt, Human
ugaaacacaccaggcug

SEQ ID NO: 3887156 - RNA, 23 nt, Human
ugaacguuuucuaauugcuuauu

SEQ ID NO: 3887157 - RNA, 17 nt, Human
ugaacuaaacuuucaca

SEQ ID NO: 3887158 - RNA, 15 nt, Human
ugaacuaaagugcug

SEQ ID NO: 3887159 - RNA, 19 nt, Human
ugaacuaaagugcugcacu

SEQ ID NO: 3887160 - RNA, 16 nt, Human
ugaacuaauaaaagca

SEQ ID NO: 3887161 - RNA, 21 nt, Human
ugaacuauggacggugcucca

SEQ ID NO: 3887162 - RNA, 21 nt, Human
ugaacuauguuuagugugauu

SEQ ID NO: 3887163 - RNA, 17 nt, Human
ugaacuauuucuacaca

SEQ ID NO: 3887164 - RNA, 20 nt, Human
ugaacuauuucuacacagug

SEQ ID NO: 3887165 - RNA, 14 nt, Human
ugaacucagccaag

SEQ ID NO: 3887166 - RNA, 15 nt, Human
ugaacuccugaccuc

SEQ ID NO: 3887167 - RNA, 15 nt, Human
ugaacuccuggccuc

SEQ ID NO: 3887168 - RNA, 17 nt, Human
ugaacuccuggccucaa

SEQ ID NO: 3887169 - RNA, 12 nt, Human
ugaacucugaga

SEQ ID NO: 3887170 - RNA, 21 nt, Human
ugaacucuuaaucaaauagca

SEQ ID NO: 3887171 - RNA, 19 nt, Human
ugaacucuuagaaaugaag

SEQ ID NO: 3887172 - RNA, 14 nt, Human
ugaacucuuucugg

SEQ ID NO: 3887173 - RNA, 20 nt, Human
ugaacucuuucuggccugcc

SEQ ID NO: 3887174 - RNA, 22 nt, Human
ugaacucuuucuggccugccuu

SEQ ID NO: 3887175 - RNA, 23 nt, Human
ugaacucuuucuggccugccuuc

SEQ ID NO: 3887176 - RNA, 20 nt, Human
ugaacucuuugaaugacaaa

SEQ ID NO: 3887177 - RNA, 18 nt, Human
ugaacugaaauuaaaacu

SEQ ID NO: 3887178 - RNA, 19 nt, Human
ugaacugaacucugacaac

SEQ ID NO: 3887179 - RNA, 23 nt, Human
ugaacugacaggcagccuggaca

SEQ ID NO: 3887180 - RNA, 15 nt, Human
ugaacugagcuugga

SEQ ID NO: 3887181 - RNA, 13 nt, Human
ugaacugauaaag

SEQ ID NO: 3887182 - RNA, 21 nt, Human
ugaacuggacccuguugcuaa

SEQ ID NO: 3887183 - RNA, 16 nt, Human
ugaacuggaggccagg

SEQ ID NO: 3887184 - RNA, 21 nt, Human
ugaacuggcaauugucuauuu

SEQ ID NO: 3887185 - RNA, 18 nt, Human
ugaacuggucuuccuuuu

SEQ ID NO: 3887186 - RNA, 13 nt, Human
ugaacugguucau

SEQ ID NO: 3887187 - RNA, 16 nt, Human
ugaacuguuaagaaau

SEQ ID NO: 3887188 - RNA, 12 nt, Human
ugaacuuaacau

SEQ ID NO: 3887189 - RNA, 23 nt, Human
ugaacuuaauaacuguguacugu

SEQ ID NO: 3887190 - RNA, 19 nt, Human
ugaacuuacaggugauuaa

SEQ ID NO: 3887191 - RNA, 18 nt, Human
ugaacuuagauuuuacau

SEQ ID NO: 3887192 - RNA, 20 nt, Human
ugaacuuagauuuuacauga

SEQ ID NO: 3887193 - RNA, 19 nt, Human
ugaacuuccugcuuccuca

SEQ ID NO: 3887194 - RNA, 21 nt, Human
ugaacuucgcaucaaaagaca

SEQ ID NO: 3887195 - RNA, 14 nt, Human
ugaacuugaaauuu

SEQ ID NO: 3887196 - RNA, 20 nt, Human
ugaacuugaggacacauguc

SEQ ID NO: 3887197 - RNA, 20 nt, Human
ugaacuugccucuuuuaccu

SEQ ID NO: 3887198 - RNA, 12 nt, Human
ugaacuugguuc

SEQ ID NO: 3887199 - RNA, 21 nt, Human
ugaacuuucucuucauacuuu

SEQ ID NO: 3887200 - RNA, 20 nt, Human
ugaacuuugaccucugcagc

SEQ ID NO: 3887201 - RNA, 17 nt, Human
ugaacuuugggaagccu

SEQ ID NO: 3887202 - RNA, 12 nt, Human
ugaacuuuugua

SEQ ID NO: 3887203 - RNA, 14 nt, Human
ugaacuuuuguacu

SEQ ID NO: 3887204 - RNA, 16 nt, Human
ugaacuuuuguacuga

SEQ ID NO: 3887205 - RNA, 18 nt, Human
ugaagaaaaaauacauuu

SEQ ID NO: 3887206 - RNA, 18 nt, Human
ugaagaaaagugggccag

SEQ ID NO: 3887207 - RNA, 22 nt, Human
ugaagaaaauacuuaaauguua

SEQ ID NO: 3887208 - RNA, 21 nt, Human
ugaagaaaaucacuuaggaaa

SEQ ID NO: 3887209 - RNA, 17 nt, Human
ugaagaaauuauaaaga

SEQ ID NO: 3887210 - RNA, 20 nt, Human
ugaagaaauuauaaagauaa

SEQ ID NO: 3887211 - RNA, 20 nt, Human
ugaagaacaguaacugccau

SEQ ID NO: 3887212 - RNA, 15 nt, Human
ugaagaacugcaggc

SEQ ID NO: 3887213 - RNA, 16 nt, Human
ugaagaacugcaggcc

SEQ ID NO: 3887214 - RNA, 12 nt, Human
ugaagaagccug

SEQ ID NO: 3887215 - RNA, 11 nt, Human
ugaagaaggug

SEQ ID NO: 3887216 - RNA, 18 nt, Human
ugaagaagguggaccuuu

SEQ ID NO: 3887217 - RNA, 20 nt, Human
ugaagaauacuucucauuuu

SEQ ID NO: 3887218 - RNA, 16 nt, Human
ugaagaauagaaacaa

SEQ ID NO: 3887219 - RNA, 18 nt, Human
ugaagaauagaaacaagc

SEQ ID NO: 3887220 - RNA, 22 nt, Human
ugaagaaugcacaagaauggau

SEQ ID NO: 3887221 - RNA, 15 nt, Human
ugaagaauggcgcca

SEQ ID NO: 3887222 - RNA, 23 nt, Human
ugaagaauguuagaguaaugaaa

SEQ ID NO: 3887223 - RNA, 17 nt, Human
ugaagaauuaagauaca

SEQ ID NO: 3887224 - RNA, 20 nt, Human
ugaagacaaaaauacucuaa

SEQ ID NO: 3887225 - RNA, 23 nt, Human
ugaagacaaugacuuacuguaca

SEQ ID NO: 3887226 - RNA, 20 nt, Human
ugaagacaauuugauacaua

SEQ ID NO: 3887227 - RNA, 14 nt, Human
ugaagacagaacca

SEQ ID NO: 3887228 - RNA, 13 nt, Human
ugaagacagaagu

SEQ ID NO: 3887229 - RNA, 13 nt, Human
ugaagacagagcu

SEQ ID NO: 3887230 - RNA, 16 nt, Human
ugaagacagagcuaca

SEQ ID NO: 3887231 - RNA, 15 nt, Human
ugaagacagcccgau

SEQ ID NO: 3887232 - RNA, 14 nt, Human
ugaagacaggacag

SEQ ID NO: 3887233 - RNA, 15 nt, Human
ugaagaccuaaccag

SEQ ID NO: 3887234 - RNA, 23 nt, Human
ugaagaccuaaccagggccagaa

SEQ ID NO: 3887235 - RNA, 22 nt, Human
ugaagaccuuuuucugcacuau

SEQ ID NO: 3887236 - RNA, 20 nt, Human
ugaagacucauucuucugua

SEQ ID NO: 3887237 - RNA, 15 nt, Human
ugaagacuggaagcu

SEQ ID NO: 3887238 - RNA, 19 nt, Human
ugaagagaagcaauuuugg

SEQ ID NO: 3887239 - RNA, 12 nt, Human
ugaagagacaga

SEQ ID NO: 3887240 - RNA, 23 nt, Human
ugaagagacagagacaaguaauu

SEQ ID NO: 3887241 - RNA, 17 nt, Human
ugaagagacaguuauuu

SEQ ID NO: 3887242 - RNA, 23 nt, Human
ugaagagcaagagagcagcaagg

SEQ ID NO: 3887243 - RNA, 18 nt, Human
ugaagagcuguugauggg

SEQ ID NO: 3887244 - RNA, 17 nt, Human
ugaagaggaggggaaga

SEQ ID NO: 3887245 - RNA, 18 nt, Human
ugaagaggaucggaggcu

SEQ ID NO: 3887246 - RNA, 16 nt, Human
ugaagaggaugcugug

SEQ ID NO: 3887247 - RNA, 16 nt, Human
ugaagaggcgggccag

SEQ ID NO: 3887248 - RNA, 18 nt, Human
ugaagaggggcagcccuu

SEQ ID NO: 3887249 - RNA, 20 nt, Human
ugaagaggggcagcccuugc

SEQ ID NO: 3887250 - RNA, 16 nt, Human
ugaagaggugagagua

SEQ ID NO: 3887251 - RNA, 13 nt, Human
ugaagaguaguuu

SEQ ID NO: 3887252 - RNA, 22 nt, Human
ugaagagugacuaguacaaauu

SEQ ID NO: 3887253 - RNA, 18 nt, Human
ugaagagugagagggcau

SEQ ID NO: 3887254 - RNA, 22 nt, Human
ugaagaguugccccgucucugu

SEQ ID NO: 3887255 - RNA, 18 nt, Human
ugaagauaccaucagcaa

SEQ ID NO: 3887256 - RNA, 15 nt, Human
ugaagauacugaaau

SEQ ID NO: 3887257 - RNA, 16 nt, Human
ugaagauacugaaaua

SEQ ID NO: 3887258 - RNA, 18 nt, Human
ugaagauacugaaauaaa

SEQ ID NO: 3887259 - RNA, 12 nt, Human
ugaagauacuuu

SEQ ID NO: 3887260 - RNA, 14 nt, Human
ugaagauagaagaa

SEQ ID NO: 3887261 - RNA, 23 nt, Human
ugaagauauaacuauugcccagg

SEQ ID NO: 3887262 - RNA, 22 nt, Human
ugaagaucauauacgugaaaau

SEQ ID NO: 3887263 - RNA, 21 nt, Human
ugaagaugcagcaaaauguga

SEQ ID NO: 3887264 - RNA, 15 nt, Human
ugaagaugcagcuca

SEQ ID NO: 3887265 - RNA, 21 nt, Human
ugaagaugcugaaacaggaga

SEQ ID NO: 3887266 - RNA, 16 nt, Human
ugaagaugggaacgca

SEQ ID NO: 3887267 - RNA, 20 nt, Human
ugaagaugucaucccauugu

SEQ ID NO: 3887268 - RNA, 15 nt, Human
ugaagauguugagaa

SEQ ID NO: 3887269 - RNA, 15 nt, Human
ugaagauguuugcaa

SEQ ID NO: 3887270 - RNA, 17 nt, Human
ugaagauguuugcaaua

SEQ ID NO: 3887271 - RNA, 18 nt, Human
ugaagauucuccugugcu

SEQ ID NO: 3887272 - RNA, 22 nt, Human
ugaagauuguuuaucuagaugu

SEQ ID NO: 3887273 - RNA, 24 nt, Human
ugaagauuguuuaucuagauguaa

SEQ ID NO: 3887274 - RNA, 15 nt, Human
ugaagcaaacacauu

SEQ ID NO: 3887275 - RNA, 18 nt, Human
ugaagcaaagcaccagcu

SEQ ID NO: 3887276 - RNA, 15 nt, Human
ugaagcaaaucagaa

SEQ ID NO: 3887277 - RNA, 20 nt, Human
ugaagcaaaugucaugcugc

SEQ ID NO: 3887278 - RNA, 23 nt, Human
ugaagcaaaugucaugcugccuu

SEQ ID NO: 3887279 - RNA, 20 nt, Human
ugaagcaaggcgguggacuu

SEQ ID NO: 3887280 - RNA, 17 nt, Human
ugaagcaccaagcucaa

SEQ ID NO: 3887281 - RNA, 12 nt, Human
ugaagcagagug

SEQ ID NO: 3887282 - RNA, 17 nt, Human
ugaagcagaguggcagu

SEQ ID NO: 3887283 - RNA, 19 nt, Human
ugaagcagaugcaaagagg

SEQ ID NO: 3887284 - RNA, 15 nt, Human
ugaagcagccucucc

SEQ ID NO: 3887285 - RNA, 17 nt, Human
ugaagcagcuuuaaaca

SEQ ID NO: 3887286 - RNA, 19 nt, Human
ugaagcagcuuuaaacaaa

SEQ ID NO: 3887287 - RNA, 19 nt, Human
ugaagcagguucccaagcu

SEQ ID NO: 3887288 - RNA, 20 nt, Human
ugaagcagguucccaagcuc

SEQ ID NO: 3887289 - RNA, 14 nt, Human
ugaagcaguauuuu

SEQ ID NO: 3887290 - RNA, 17 nt, Human
ugaagcaguugugucag

SEQ ID NO: 3887291 - RNA, 21 nt, Human
ugaagcauucuccccagugua

SEQ ID NO: 3887292 - RNA, 22 nt, Human
ugaagccaaguggggugcuggg

SEQ ID NO: 3887293 - RNA, 20 nt, Human
ugaagccacagcccaggccu

SEQ ID NO: 3887294 - RNA, 20 nt, Human
ugaagccacugaagcuggga

SEQ ID NO: 3887295 - RNA, 16 nt, Human
ugaagccagccuucuu

SEQ ID NO: 3887296 - RNA, 21 nt, Human
ugaagccagccuucuuccauc

SEQ ID NO: 3887297 - RNA, 11 nt, Human
ugaagccagcu

SEQ ID NO: 3887298 - RNA, 18 nt, Human
ugaagccgacucuggccc

SEQ ID NO: 3887299 - RNA, 14 nt, Human
gauauaaauucugu

SEQ ID NO: 3887300 - RNA, 18 nt, Human
gauauaaauuuuuaagag

SEQ ID NO: 3887301 - RNA, 14 nt, Human
gauauaagugcugu

SEQ ID NO: 3887302 - RNA, 19 nt, Human
gauauaagugcuguauaaa

SEQ ID NO: 3887303 - RNA, 16 nt, Human
gauauaaucuuucaaa

SEQ ID NO: 3887304 - RNA, 14 nt, Human
gauauacuuugugg

SEQ ID NO: 3887305 - RNA, 21 nt, Human
gauauagagucauuguaaugu

SEQ ID NO: 3887306 - RNA, 15 nt, Human
gauauauaaguguac

SEQ ID NO: 3887307 - RNA, 14 nt, Human
gauauauacauagc

SEQ ID NO: 3887308 - RNA, 19 nt, Human
gauauauaggcuauuuucu

SEQ ID NO: 3887309 - RNA, 16 nt, Human
gauauauggauaaugc

SEQ ID NO: 3887310 - RNA, 19 nt, Human
gauauauuuaaaaauauuu

SEQ ID NO: 3887311 - RNA, 15 nt, Human
gauauauuuuucaca

SEQ ID NO: 3887312 - RNA, 19 nt, Human
gauaucacagucuaauuuu

SEQ ID NO: 3887313 - RNA, 22 nt, Human
gauaucccuaugcugccuaggc

SEQ ID NO: 3887314 - RNA, 23 nt, Human
gauaucccuaugcugccuaggcu

SEQ ID NO: 3887315 - RNA, 21 nt, Human
gauaucccugauccuaacuga

SEQ ID NO: 3887316 - RNA, 16 nt, Human
gauauccuuaucagag

SEQ ID NO: 3887317 - RNA, 23 nt, Human
gauaucgacuuguuuuugcacau

SEQ ID NO: 3887318 - RNA, 23 nt, Human
gauaucuauaaaauagauauaaa

SEQ ID NO: 3887319 - RNA, 17 nt, Human
gauaucuguuagaugcu

SEQ ID NO: 3887320 - RNA, 22 nt, Human
gauaucuuuucuuuagagaacu

SEQ ID NO: 3887321 - RNA, 15 nt, Human
gauaucuuuuuauug

SEQ ID NO: 3887322 - RNA, 16 nt, Human
gauaucuuuuuauuga

SEQ ID NO: 3887323 - RNA, 17 nt, Human
gauaugaauauauggca

SEQ ID NO: 3887324 - RNA, 22 nt, Human
gauaugauucaaaugucuauaa

SEQ ID NO: 3887325 - RNA, 24 nt, Human
gauaugauucaaaugucuauaaac

SEQ ID NO: 3887326 - RNA, 14 nt, Human
gauaugauuuaaaa

SEQ ID NO: 3887327 - RNA, 18 nt, Human
gauaugcaguuuuccuua

SEQ ID NO: 3887328 - RNA, 17 nt, Human
gauaugcauauuuguuu

SEQ ID NO: 3887329 - RNA, 16 nt, Human
gauaugcuuaguaaug

SEQ ID NO: 3887330 - RNA, 19 nt, Human
gauauggagaauugcugaa

SEQ ID NO: 3887331 - RNA, 14 nt, Human
gauauggcagaaga

SEQ ID NO: 3887332 - RNA, 15 nt, Human
gauauggcagaagac

SEQ ID NO: 3887333 - RNA, 13 nt, Human
gauaugggacuga

SEQ ID NO: 3887334 - RNA, 17 nt, Human
gauauggguaguauuuu

SEQ ID NO: 3887335 - RNA, 18 nt, Human
gauauguauggguagggu

SEQ ID NO: 3887336 - RNA, 13 nt, Human
gauaugugaacag

SEQ ID NO: 3887337 - RNA, 12 nt, Human
gauauuacuuua

SEQ ID NO: 3887338 - RNA, 15 nt, Human
gauauucagauguau

SEQ ID NO: 3887339 - RNA, 22 nt, Human
gauauuccuauugugcaaugua

SEQ ID NO: 3887340 - RNA, 21 nt, Human
gauauucuaagaaauaucugu

SEQ ID NO: 3887341 - RNA, 16 nt, Human
gauauugaauguuaaa

SEQ ID NO: 3887342 - RNA, 23 nt, Human
gauauugaggccaagaauauugc

SEQ ID NO: 3887343 - RNA, 24 nt, Human
gauauugcugaagaaucuacuuaa

SEQ ID NO: 3887344 - RNA, 14 nt, Human
gauauuguacauaa

SEQ ID NO: 3887345 - RNA, 17 nt, Human
gauauuguacauaaaag

SEQ ID NO: 3887346 - RNA, 20 nt, Human
gauauugugaacauuuguga

SEQ ID NO: 3887347 - RNA, 21 nt, Human
gauauugugaacauuugugau

SEQ ID NO: 3887348 - RNA, 16 nt, Human
gauauugugaaguaca

SEQ ID NO: 3887349 - RNA, 13 nt, Human
gauauuguucaaa

SEQ ID NO: 3887350 - RNA, 22 nt, Human
gauauuuaggagugugugacau

SEQ ID NO: 3887351 - RNA, 13 nt, Human
gauauuuauauau

SEQ ID NO: 3887352 - RNA, 16 nt, Human
gauauuuauauauauu

SEQ ID NO: 3887353 - RNA, 16 nt, Human
gauauuucagaaauac

SEQ ID NO: 3887354 - RNA, 17 nt, Human
gauauuucagaaauaca

SEQ ID NO: 3887355 - RNA, 15 nt, Human
gauauuucuagcuua

SEQ ID NO: 3887356 - RNA, 19 nt, Human
gauauuuggcuuaaauaua

SEQ ID NO: 3887357 - RNA, 14 nt, Human
gauauuuucucuag

SEQ ID NO: 3887358 - RNA, 20 nt, Human
gauauuuucuuccaagcaaa

SEQ ID NO: 3887359 - RNA, 22 nt, Human
gauauuuuuaaagaucuguaag

SEQ ID NO: 3887360 - RNA, 18 nt, Human
gauauuuuucauaaacaa

SEQ ID NO: 3887361 - RNA, 16 nt, Human
gauauuuuuucugaau

SEQ ID NO: 3887362 - RNA, 20 nt, Human
gaucaaaagguuaauaaagu

SEQ ID NO: 3887363 - RNA, 21 nt, Human
gaucaaaaucuguagagcagg

SEQ ID NO: 3887364 - RNA, 16 nt, Human
gaucaaauacuuuaaa

SEQ ID NO: 3887365 - RNA, 17 nt, Human
gaucaaauacuuuaaag

SEQ ID NO: 3887366 - RNA, 19 nt, Human
gaucaaauacuuuaaagga

SEQ ID NO: 3887367 - RNA, 23 nt, Human
gaucaaauucauuuuuuucacug

SEQ ID NO: 3887368 - RNA, 20 nt, Human
gaucaacaucuuuucuugcc

SEQ ID NO: 3887369 - RNA, 21 nt, Human
gaucaaccccuucgcuccugu

SEQ ID NO: 3887370 - RNA, 20 nt, Human
gaucaagcaugaaaggcuuu

SEQ ID NO: 3887371 - RNA, 21 nt, Human
gaucaaguuauuuuuaauuug

SEQ ID NO: 3887372 - RNA, 14 nt, Human
gaucaauaaaaugu

SEQ ID NO: 3887373 - RNA, 19 nt, Human
gaucaauaaaaugugauuu

SEQ ID NO: 3887374 - RNA, 19 nt, Human
gaucaauauuuuuauauca

SEQ ID NO: 3887375 - RNA, 18 nt, Human
gaucaaugacagagccuu

SEQ ID NO: 3887376 - RNA, 20 nt, Human
gaucaauuauaguuucugag

SEQ ID NO: 3887377 - RNA, 21 nt, Human
gaucaauuauaguuucugagg

SEQ ID NO: 3887378 - RNA, 13 nt, Human
gaucacaaaaaca

SEQ ID NO: 3887379 - RNA, 13 nt, Human
gaucacaaaugac

SEQ ID NO: 3887380 - RNA, 20 nt, Human
gaucacaaaugacuuuauua

SEQ ID NO: 3887381 - RNA, 16 nt, Human
gaucacaacgugcauu

SEQ ID NO: 3887382 - RNA, 17 nt, Human
gaucacaacgugcauug

SEQ ID NO: 3887383 - RNA, 12 nt, Human
gaucacaagaug

SEQ ID NO: 3887384 - RNA, 13 nt, Human
gaucacagcugcu

SEQ ID NO: 3887385 - RNA, 15 nt, Human
gaucaccagaauaaa

SEQ ID NO: 3887386 - RNA, 18 nt, Human
gaucacgauguaaauuau

SEQ ID NO: 3887387 - RNA, 15 nt, Human
gaucacgccuggcua

SEQ ID NO: 3887388 - RNA, 13 nt, Human
gaucacgcucccc

SEQ ID NO: 3887389 - RNA, 14 nt, Human
gaucacgcuccccg

SEQ ID NO: 3887390 - RNA, 12 nt, Human
gaucacggcuca

SEQ ID NO: 3887391 - RNA, 20 nt, Human
gaucacggcucacugcagcc

SEQ ID NO: 3887392 - RNA, 18 nt, Human
gaucacugaaauaaaagc

SEQ ID NO: 3887393 - RNA, 13 nt, Human
gaucacugccaca

SEQ ID NO: 3887394 - RNA, 21 nt, Human
gaucacuguuuagauuugcca

SEQ ID NO: 3887395 - RNA, 14 nt, Human
gaucacuuucugaa

SEQ ID NO: 3887396 - RNA, 15 nt, Human
gaucacuuugcucug

SEQ ID NO: 3887397 - RNA, 14 nt, Human
gaucagaaauacag

SEQ ID NO: 3887398 - RNA, 11 nt, Human
gaucagaacag

SEQ ID NO: 3887399 - RNA, 15 nt, Human
gaucagaacagcaga

SEQ ID NO: 3887400 - RNA, 21 nt, Human
gaucagacagaucuggaaugu

SEQ ID NO: 3887401 - RNA, 16 nt, Human
gaucagagcaggaccu

SEQ ID NO: 3887402 - RNA, 17 nt, Human
gaucagaugacuagaaa

SEQ ID NO: 3887403 - RNA, 17 nt, Human
gaucagaugcuccaaga

SEQ ID NO: 3887404 - RNA, 23 nt, Human
gaucagauugcaugugacucuga

SEQ ID NO: 3887405 - RNA, 19 nt, Human
gaucagcaaaccggggccu

SEQ ID NO: 3887406 - RNA, 14 nt, Human
gaucagcaucugug

SEQ ID NO: 3887407 - RNA, 15 nt, Human
gaucagccagaagcc

SEQ ID NO: 3887408 - RNA, 12 nt, Human
gaucagccuggg

SEQ ID NO: 3887409 - RNA, 16 nt, Human
gaucagcuguuuguca

SEQ ID NO: 3887410 - RNA, 20 nt, Human
gaucagcuuucaaagcauuu

SEQ ID NO: 3887411 - RNA, 16 nt, Human
gaucaggcacagguca

SEQ ID NO: 3887412 - RNA, 17 nt, Human
gaucaggcacaggucag

SEQ ID NO: 3887413 - RNA, 14 nt, Human
gaucaggcucugcc

SEQ ID NO: 3887414 - RNA, 23 nt, Human
gaucaguaaaauuauacugugug

SEQ ID NO: 3887415 - RNA, 17 nt, Human
gaucaguauuuaacuaa

SEQ ID NO: 3887416 - RNA, 13 nt, Human
gaucaguggacag

SEQ ID NO: 3887417 - RNA, 14 nt, Human
gaucaguuaacuau

SEQ ID NO: 3887418 - RNA, 23 nt, Human
gaucauagauuucugauuuuaug

SEQ ID NO: 3887419 - RNA, 14 nt, Human
gaucauaguuuuau

SEQ ID NO: 3887420 - RNA, 15 nt, Human
gaucauaguuuuauu

SEQ ID NO: 3887421 - RNA, 16 nt, Human
gaucauaguuuuauuu

SEQ ID NO: 3887422 - RNA, 19 nt, Human
gaucauaguuuuauuuaua

SEQ ID NO: 3887423 - RNA, 15 nt, Human
gaucaucaacaagau

SEQ ID NO: 3887424 - RNA, 13 nt, Human
gaucauccacugu

SEQ ID NO: 3887425 - RNA, 17 nt, Human
gaucauccacugugcca

SEQ ID NO: 3887426 - RNA, 19 nt, Human
gaucauccacugugccaug

SEQ ID NO: 3887427 - RNA, 23 nt, Human
gaucaucccaucuaagcugcagc

SEQ ID NO: 3887428 - RNA, 21 nt, Human
gaucaucgccagaggugcuuc

SEQ ID NO: 3887429 - RNA, 14 nt, Human
gaucaugcauagag

SEQ ID NO: 3887430 - RNA, 12 nt, Human
gaucaugcauug

SEQ ID NO: 3887431 - RNA, 14 nt, Human
gaucauggcucacu

SEQ ID NO: 3887432 - RNA, 21 nt, Human
gaucauggcucacugcagccu

SEQ ID NO: 3887433 - RNA, 14 nt, Human
gaucaugguguaau

SEQ ID NO: 3887434 - RNA, 23 nt, Human
gaucaugguguaauaagacauaa

SEQ ID NO: 3887435 - RNA, 19 nt, Human
gaucauguuguuaaaauua

SEQ ID NO: 3887436 - RNA, 21 nt, Human
gaucauguuguuaaaauuaug

SEQ ID NO: 3887437 - RNA, 18 nt, Human
gaucauguuuuggugaaa

SEQ ID NO: 3887438 - RNA, 14 nt, Human
gaucauugugaaau

SEQ ID NO: 3887439 - RNA, 13 nt, Human
gauccaaaagaag

SEQ ID NO: 3887440 - RNA, 19 nt, Human
gauccaaaagaagccccca

SEQ ID NO: 3887441 - RNA, 20 nt, Human
gauccaaauugugcuucucc

SEQ ID NO: 3887442 - RNA, 20 nt, Human
gauccaacuaaugccuuacu

SEQ ID NO: 3887443 - RNA, 19 nt, Human
gauccaagcuggucccacu

SEQ ID NO: 3887444 - RNA, 15 nt, Human
gauuacauaaucugu

SEQ ID NO: 3887445 - RNA, 14 nt, Human
gauuacaugcaugu

SEQ ID NO: 3887446 - RNA, 14 nt, Human
gauuacauuuuaaa

SEQ ID NO: 3887447 - RNA, 22 nt, Human
gauuaccuaguagucauuucau

SEQ ID NO: 3887448 - RNA, 12 nt, Human
gauuacucuuug

SEQ ID NO: 3887449 - RNA, 18 nt, Human
gauuacuucucuauaaaa

SEQ ID NO: 3887450 - RNA, 21 nt, Human
gauuagaaaugaccaauauua

SEQ ID NO: 3887451 - RNA, 14 nt, Human
gauuagaaggcaag

SEQ ID NO: 3887452 - RNA, 17 nt, Human
gauuagaaugaaaauug

SEQ ID NO: 3887453 - RNA, 15 nt, Human
gauuagaauucugua

SEQ ID NO: 3887454 - RNA, 16 nt, Human
gauuagacagaacacc

SEQ ID NO: 3887455 - RNA, 18 nt, Human
gauuagagaguguugaaa

SEQ ID NO: 3887456 - RNA, 19 nt, Human
gauuagcaaggucauuucu

SEQ ID NO: 3887457 - RNA, 19 nt, Human
gauuagcaaguuacaguga

SEQ ID NO: 3887458 - RNA, 23 nt, Human
gauuagcaggccaaggucugagc

SEQ ID NO: 3887459 - RNA, 15 nt, Human
gauuagcuuuguguu

SEQ ID NO: 3887460 - RNA, 17 nt, Human
gauuagcuuuguguuug

SEQ ID NO: 3887461 - RNA, 14 nt, Human
gauuaguaagucuu

SEQ ID NO: 3887462 - RNA, 19 nt, Human
gauuauaaaauuaaucaca

SEQ ID NO: 3887463 - RNA, 14 nt, Human
gauuauagauucua

SEQ ID NO: 3887464 - RNA, 22 nt, Human
gauuauagauucuaaagauucu

SEQ ID NO: 3887465 - RNA, 14 nt, Human
gauuauauuaugaa

SEQ ID NO: 3887466 - RNA, 17 nt, Human
gauuauauugagacaaa

SEQ ID NO: 3887467 - RNA, 18 nt, Human
gauuauauugagacaaaa

SEQ ID NO: 3887468 - RNA, 12 nt, Human
gauuauccugag

SEQ ID NO: 3887469 - RNA, 20 nt, Human
gauuaucguuuucuuaaagu

SEQ ID NO: 3887470 - RNA, 16 nt, Human
gauuaucuauuugugu

SEQ ID NO: 3887471 - RNA, 14 nt, Human
gauuaugggucaca

SEQ ID NO: 3887472 - RNA, 16 nt, Human
gauuaugggucacagg

SEQ ID NO: 3887473 - RNA, 15 nt, Human
gauuaugguuuugug

SEQ ID NO: 3887474 - RNA, 22 nt, Human
gauuauucacugauuugacaua

SEQ ID NO: 3887475 - RNA, 14 nt, Human
gauuauucaguguc

SEQ ID NO: 3887476 - RNA, 15 nt, Human
gauuauucaguguca

SEQ ID NO: 3887477 - RNA, 15 nt, Human
gauuauucauuuaaa

SEQ ID NO: 3887478 - RNA, 21 nt, Human
gauuauucauuuaaaaugauu

SEQ ID NO: 3887479 - RNA, 22 nt, Human
gauuauucauuuaaaaugauua

SEQ ID NO: 3887480 - RNA, 21 nt, Human
gauuauugaguuccaguugaa

SEQ ID NO: 3887481 - RNA, 17 nt, Human
gauuauuguauuuauuc

SEQ ID NO: 3887482 - RNA, 14 nt, Human
gauuauuuaauaac

SEQ ID NO: 3887483 - RNA, 15 nt, Human
gauuauuuaauaaca

SEQ ID NO: 3887484 - RNA, 21 nt, Human
gauuauuuaauaacauuaccu

SEQ ID NO: 3887485 - RNA, 23 nt, Human
gauuauuuaauaacauuaccuua

SEQ ID NO: 3887486 - RNA, 21 nt, Human
gauuauuuacaagaagaacuc

SEQ ID NO: 3887487 - RNA, 14 nt, Human
gauuauuucacuuu

SEQ ID NO: 3887488 - RNA, 14 nt, Human
gauuauuugcaugu

SEQ ID NO: 3887489 - RNA, 18 nt, Human
gauuauuugcauguuaug

SEQ ID NO: 3887490 - RNA, 18 nt, Human
gauuauuugggagggaaa

SEQ ID NO: 3887491 - RNA, 21 nt, Human
gauuauuuguuauuuguacag

SEQ ID NO: 3887492 - RNA, 11 nt, Human
gauuauuuugg

SEQ ID NO: 3887493 - RNA, 16 nt, Human
gauuauuuuuucagac

SEQ ID NO: 3887494 - RNA, 13 nt, Human
gauucaaaauauu

SEQ ID NO: 3887495 - RNA, 17 nt, Human
gauucaagccauuccaa

SEQ ID NO: 3887496 - RNA, 21 nt, Human
gauucaauauugaauuuuucc

SEQ ID NO: 3887497 - RNA, 22 nt, Human
gauucacaaugaaaugcucucc

SEQ ID NO: 3887498 - RNA, 18 nt, Human
gauucacaccccaccugc

SEQ ID NO: 3887499 - RNA, 12 nt, Human
gauucacacugu

SEQ ID NO: 3887500 - RNA, 22 nt, Human
gauucacauguuuucaaaugga

SEQ ID NO: 3887501 - RNA, 19 nt, Human
gauucaccuccuaaaacaa

SEQ ID NO: 3887502 - RNA, 15 nt, Human
gauucaccuguaaaa

SEQ ID NO: 3887503 - RNA, 16 nt, Human
gauucaccuguaaaac

SEQ ID NO: 3887504 - RNA, 20 nt, Human
gauucaccuguaaaacuuua

SEQ ID NO: 3887505 - RNA, 22 nt, Human
gauucaccuguaaaacuuuauu

SEQ ID NO: 3887506 - RNA, 12 nt, Human
gauucagaaauu

SEQ ID NO: 3887507 - RNA, 14 nt, Human
gauucagacagcug

SEQ ID NO: 3887508 - RNA, 17 nt, Human
gauucagacagcugccu

SEQ ID NO: 3887509 - RNA, 14 nt, Human
gauucagauuucuc

SEQ ID NO: 3887510 - RNA, 12 nt, Human
gauucagccuuc

SEQ ID NO: 3887511 - RNA, 22 nt, Human
gauucaggaaaaggccuggggu

SEQ ID NO: 3887512 - RNA, 13 nt, Human
gauucaggcugcu

SEQ ID NO: 3887513 - RNA, 11 nt, Human
gauucagucuu

SEQ ID NO: 3887514 - RNA, 13 nt, Human
gauucagucuugc

SEQ ID NO: 3887515 - RNA, 17 nt, Human
gauucagucuugccuua

SEQ ID NO: 3887516 - RNA, 23 nt, Human
gauucagucuugccuuacacaaa

SEQ ID NO: 3887517 - RNA, 16 nt, Human
gauucauaguaacuuc

SEQ ID NO: 3887518 - RNA, 12 nt, Human
gauucauauuua

SEQ ID NO: 3887519 - RNA, 22 nt, Human
gauucaucucucagaagggagg

SEQ ID NO: 3887520 - RNA, 17 nt, Human
gauucaugauuuauaaa

SEQ ID NO: 3887521 - RNA, 18 nt, Human
gauucauguuauauuuaa

SEQ ID NO: 3887522 - RNA, 20 nt, Human
gauucauucucauaauuccu

SEQ ID NO: 3887523 - RNA, 22 nt, Human
gauuccaaccccaacuccagua

SEQ ID NO: 3887524 - RNA, 20 nt, Human
gauuccaaguucucaccucu

SEQ ID NO: 3887525 - RNA, 23 nt, Human
gauuccagcacaaccuucaagcu

SEQ ID NO: 3887526 - RNA, 14 nt, Human
gauuccagccauca

SEQ ID NO: 3887527 - RNA, 18 nt, Human
gauuccagcccacauugg

SEQ ID NO: 3887528 - RNA, 17 nt, Human
gauuccagguggcauca

SEQ ID NO: 3887529 - RNA, 19 nt, Human
gauuccaucuccuugucuu

SEQ ID NO: 3887530 - RNA, 15 nt, Human
gauuccaugcuaagc

SEQ ID NO: 3887531 - RNA, 15 nt, Human
gauucccaagcucug

SEQ ID NO: 3887532 - RNA, 19 nt, Human
gauucccaagcucugcucc

SEQ ID NO: 3887533 - RNA, 20 nt, Human
gauucccaagcucugcuccu

SEQ ID NO: 3887534 - RNA, 16 nt, Human
gauucccaccaagguc

SEQ ID NO: 3887535 - RNA, 21 nt, Human
gauucccagagacaggaaaau

SEQ ID NO: 3887536 - RNA, 13 nt, Human
gauucccagagca

SEQ ID NO: 3887537 - RNA, 13 nt, Human
gauucccauugaa

SEQ ID NO: 3887538 - RNA, 14 nt, Human
gauucccauugaaa

SEQ ID NO: 3887539 - RNA, 16 nt, Human
gauucccauugaaaau

SEQ ID NO: 3887540 - RNA, 22 nt, Human
gauuccccauugccuccuccuu

SEQ ID NO: 3887541 - RNA, 21 nt, Human
gauuccccuaaccucauuccc

SEQ ID NO: 3887542 - RNA, 14 nt, Human
gauuccccuguguc

SEQ ID NO: 3887543 - RNA, 21 nt, Human
gauucccuccugcuacucugu

SEQ ID NO: 3887544 - RNA, 17 nt, Human
gauucccucucccaggc

SEQ ID NO: 3887545 - RNA, 15 nt, Human
gauuccggauccuaa

SEQ ID NO: 3887546 - RNA, 22 nt, Human
gauuccggauccuaagcaucua

SEQ ID NO: 3887547 - RNA, 13 nt, Human
gauuccugaccca

SEQ ID NO: 3887548 - RNA, 15 nt, Human
gauuccugacccagg

SEQ ID NO: 3887549 - RNA, 16 nt, Human
gauuccuguuucaagu

SEQ ID NO: 3887550 - RNA, 18 nt, Human
gauuccuuagacucuuuu

SEQ ID NO: 3887551 - RNA, 13 nt, Human
gauuccuuccugu

SEQ ID NO: 3887552 - RNA, 21 nt, Human
gauuccuuuaacaacauguuu

SEQ ID NO: 3887553 - RNA, 20 nt, Human
gauuccuuucccuuuagcac

SEQ ID NO: 3887554 - RNA, 16 nt, Human
gauucgaaugacacug

SEQ ID NO: 3887555 - RNA, 18 nt, Human
gauucgcccaaagccaga

SEQ ID NO: 3887556 - RNA, 17 nt, Human
gauucgguaucccccca

SEQ ID NO: 3887557 - RNA, 18 nt, Human
gauucguggucuuuuccu

SEQ ID NO: 3887558 - RNA, 13 nt, Human
gauucuaaagauu

SEQ ID NO: 3887559 - RNA, 15 nt, Human
gauucuaaagauucu

SEQ ID NO: 3887560 - RNA, 20 nt, Human
gauucuaaagauucuauagu

SEQ ID NO: 3887561 - RNA, 13 nt, Human
gauucuaaauaca

SEQ ID NO: 3887562 - RNA, 14 nt, Human
gauucuaaauacau

SEQ ID NO: 3887563 - RNA, 21 nt, Human
gauucuagaucagaugcucca

SEQ ID NO: 3887564 - RNA, 17 nt, Human
gauucuauaguucuaga

SEQ ID NO: 3887565 - RNA, 19 nt, Human
gauucuauaguucuagaca

SEQ ID NO: 3887566 - RNA, 11 nt, Human
gauucucagau

SEQ ID NO: 3887567 - RNA, 22 nt, Human
gauucucagggucucugcugcc

SEQ ID NO: 3887568 - RNA, 16 nt, Human
gauucucaugccucag

SEQ ID NO: 3887569 - RNA, 21 nt, Human
gauucuccugccucagccucc

SEQ ID NO: 3887570 - RNA, 14 nt, Human
gauucuccugugcu

SEQ ID NO: 3887571 - RNA, 16 nt, Human
gauucuccugugcuag

SEQ ID NO: 3887572 - RNA, 11 nt, Human
gauucuccuuc

SEQ ID NO: 3887573 - RNA, 12 nt, Human
gauucuccuuca

SEQ ID NO: 3887574 - RNA, 17 nt, Human
gauucuccuucagcccu

SEQ ID NO: 3887575 - RNA, 15 nt, Human
gauucucugugucua

SEQ ID NO: 3887576 - RNA, 23 nt, Human
gauucucugugucuaagauucua

SEQ ID NO: 3887577 - RNA, 15 nt, Human
gauucucuugccuca

SEQ ID NO: 3887578 - RNA, 12 nt, Human
gauucugaaucu

SEQ ID NO: 3887579 - RNA, 21 nt, Human
gauucugaccuuaaaugcaac

SEQ ID NO: 3887580 - RNA, 21 nt, Human
gauucugcaguaaaucuuuua

SEQ ID NO: 3887581 - RNA, 19 nt, Human
gauucuggacagucagcuc

SEQ ID NO: 3887582 - RNA, 19 nt, Human
gauucuggauaaagccacu

SEQ ID NO: 3887583 - RNA, 22 nt, Human
gauucuggauaaagccacugaa

SEQ ID NO: 3887584 - RNA, 20 nt, Human
gauucuggcuuuaagccuuc

SEQ ID NO: 3887585 - RNA, 15 nt, Human
gauucugggaggaag

SEQ ID NO: 3887586 - RNA, 22 nt, Human
gauucugguuccagggucccuc

SEQ ID NO: 3887587 - RNA, 15 nt, Human
gauucuuaaaguuga

SEQ ID NO: 3887588 - RNA, 23 nt, Human
gauucuucagcaaaaauauuuua

SEQ ID NO: 3887589 - RNA, 17 nt, Human
gcagcaauuuaaauguu

SEQ ID NO: 3887590 - RNA, 14 nt, Human
gcagcacagagagg

SEQ ID NO: 3887591 - RNA, 15 nt, Human
gcagcacagcugaga

SEQ ID NO: 3887592 - RNA, 17 nt, Human
gcagcacccuauaaauc

SEQ ID NO: 3887593 - RNA, 12 nt, Human
gcagcaccuccu

SEQ ID NO: 3887594 - RNA, 15 nt, Human
gcagcaccuccucag

SEQ ID NO: 3887595 - RNA, 16 nt, Human
gcagcaccuccucagc

SEQ ID NO: 3887596 - RNA, 18 nt, Human
gcagcaccuccucagccu

SEQ ID NO: 3887597 - RNA, 17 nt, Human
gcagcaccugcccuacc

SEQ ID NO: 3887598 - RNA, 19 nt, Human
gcagcacggacaauaaacc

SEQ ID NO: 3887599 - RNA, 16 nt, Human
gcagcacucacacagg

SEQ ID NO: 3887600 - RNA, 15 nt, Human
gcagcagaagggggu

SEQ ID NO: 3887601 - RNA, 15 nt, Human
gcagcagcaggugau

SEQ ID NO: 3887602 - RNA, 14 nt, Human
gcagcagccagccc

SEQ ID NO: 3887603 - RNA, 23 nt, Human
gcagcagccagcccugccuggag

SEQ ID NO: 3887604 - RNA, 14 nt, Human
gcagcagccaucau

SEQ ID NO: 3887605 - RNA, 22 nt, Human
gcagcagccaucauaggaaggg

SEQ ID NO: 3887606 - RNA, 21 nt, Human
gcagcagcccaagcuucccuc

SEQ ID NO: 3887607 - RNA, 14 nt, Human
gcagcagcccugcc

SEQ ID NO: 3887608 - RNA, 23 nt, Human
gcagcagccucgccccuggcaga

SEQ ID NO: 3887609 - RNA, 19 nt, Human
gcagcagggaugcccugga

SEQ ID NO: 3887610 - RNA, 12 nt, Human
gcagcagggcag

SEQ ID NO: 3887611 - RNA, 17 nt, Human
gcagcagggcuacccug

SEQ ID NO: 3887612 - RNA, 13 nt, Human
gcagcagggguug

SEQ ID NO: 3887613 - RNA, 14 nt, Human
gcagcagggguugg

SEQ ID NO: 3887614 - RNA, 18 nt, Human
gcagcaggugcugcuacc

SEQ ID NO: 3887615 - RNA, 19 nt, Human
gcagcaggugcugcuaccc

SEQ ID NO: 3887616 - RNA, 21 nt, Human
gcagcagugaaaacaagugcu

SEQ ID NO: 3887617 - RNA, 22 nt, Human
gcagcagugugaggccagggca

SEQ ID NO: 3887618 - RNA, 17 nt, Human
gcagcauauucaggaag

SEQ ID NO: 3887619 - RNA, 12 nt, Human
gcagcaucuucu

SEQ ID NO: 3887620 - RNA, 17 nt, Human
gcagcaugaccugugac

SEQ ID NO: 3887621 - RNA, 15 nt, Human
gcagcauggucccug

SEQ ID NO: 3887622 - RNA, 13 nt, Human
gcagcauguauag

SEQ ID NO: 3887623 - RNA, 22 nt, Human
gcagcauguugcugaggaguga

SEQ ID NO: 3887624 - RNA, 13 nt, Human
gcagcauuucacu

SEQ ID NO: 3887625 - RNA, 14 nt, Human
gcagccaaccuaag

SEQ ID NO: 3887626 - RNA, 22 nt, Human
gcagccaaggccgaagcucugg

SEQ ID NO: 3887627 - RNA, 19 nt, Human
gcagccacacuucucagga

SEQ ID NO: 3887628 - RNA, 15 nt, Human
gcagccacauuccug

SEQ ID NO: 3887629 - RNA, 13 nt, Human
gcagccaccagcg

SEQ ID NO: 3887630 - RNA, 20 nt, Human
gcagccacccugaggagucu

SEQ ID NO: 3887631 - RNA, 12 nt, Human
gcagccagaggc

SEQ ID NO: 3887632 - RNA, 13 nt, Human
gcagccagcaucu

SEQ ID NO: 3887633 - RNA, 16 nt, Human
gcagccagcccagccc

SEQ ID NO: 3887634 - RNA, 17 nt, Human
gcagccagcccagccca

SEQ ID NO: 3887635 - RNA, 16 nt, Human
gcagccagcccugccu

SEQ ID NO: 3887636 - RNA, 22 nt, Human
gcagccagcccugccuggagga

SEQ ID NO: 3887637 - RNA, 15 nt, Human
gcagccagcucucag

SEQ ID NO: 3887638 - RNA, 13 nt, Human
gcagccaggccac

SEQ ID NO: 3887639 - RNA, 16 nt, Human
gcagccaggccacaag

SEQ ID NO: 3887640 - RNA, 12 nt, Human
gcagccaggcug

SEQ ID NO: 3887641 - RNA, 14 nt, Human
gcagccagggagag

SEQ ID NO: 3887642 - RNA, 16 nt, Human
gcagccagggagagcc

SEQ ID NO: 3887643 - RNA, 21 nt, Human
gcagccagggagagcccagga

SEQ ID NO: 3887644 - RNA, 13 nt, Human
gcagccagugaga

SEQ ID NO: 3887645 - RNA, 16 nt, Human
gcagccagugcccuga

SEQ ID NO: 3887646 - RNA, 13 nt, Human
gcagcccacccug

SEQ ID NO: 3887647 - RNA, 13 nt, Human
gcagcccagagac

SEQ ID NO: 3887648 - RNA, 18 nt, Human
gcagcccagagacuuugu

SEQ ID NO: 3887649 - RNA, 15 nt, Human
gcagcccaugcccac

SEQ ID NO: 3887650 - RNA, 18 nt, Human
gcagcccaugcccaccug

SEQ ID NO: 3887651 - RNA, 22 nt, Human
gcagcccaugcccaccugccca

SEQ ID NO: 3887652 - RNA, 22 nt, Human
gcagccccaaauugucaccugc

SEQ ID NO: 3887653 - RNA, 13 nt, Human
gcagccccagccu

SEQ ID NO: 3887654 - RNA, 17 nt, Human
gcagccccaucugugca

SEQ ID NO: 3887655 - RNA, 18 nt, Human
gcagccccauucugccug

SEQ ID NO: 3887656 - RNA, 19 nt, Human
gcagcccccagcucccacc

SEQ ID NO: 3887657 - RNA, 18 nt, Human
gcagcccguguggccccu

SEQ ID NO: 3887658 - RNA, 24 nt, Human
gcagcccuaaggaucucucaggag

SEQ ID NO: 3887659 - RNA, 18 nt, Human
gcagcccuagagccugcc

SEQ ID NO: 3887660 - RNA, 19 nt, Human
gcagcccucaauugugaaa

SEQ ID NO: 3887661 - RNA, 22 nt, Human
gcagcccugccccacaccuccu

SEQ ID NO: 3887662 - RNA, 14 nt, Human
gcagcccugcuuug

SEQ ID NO: 3887663 - RNA, 24 nt, Human
gcagcccugcuuugggcugcccug

SEQ ID NO: 3887664 - RNA, 16 nt, Human
gcagcccuggagucau

SEQ ID NO: 3887665 - RNA, 19 nt, Human
gcagcccuggcagggggca

SEQ ID NO: 3887666 - RNA, 20 nt, Human
gcagccgccuuaagcugauc

SEQ ID NO: 3887667 - RNA, 18 nt, Human
gcagccgccuucacagca

SEQ ID NO: 3887668 - RNA, 14 nt, Human
gcagccgccuuccu

SEQ ID NO: 3887669 - RNA, 16 nt, Human
gcagccgccuuccuug

SEQ ID NO: 3887670 - RNA, 16 nt, Human
gcagccgcugagcgag

SEQ ID NO: 3887671 - RNA, 18 nt, Human
gcagccggcacagggucu

SEQ ID NO: 3887672 - RNA, 15 nt, Human
gcagccgugccuuca

SEQ ID NO: 3887673 - RNA, 22 nt, Human
gcagccguuugagaagaaaaca

SEQ ID NO: 3887674 - RNA, 22 nt, Human
gcagccucaaccuccugggcua

SEQ ID NO: 3887675 - RNA, 19 nt, Human
gcagccucacaguccuuac

SEQ ID NO: 3887676 - RNA, 23 nt, Human
gcagccucagagacaucagcccu

SEQ ID NO: 3887677 - RNA, 21 nt, Human
gcagccucaggacugggagcc

SEQ ID NO: 3887678 - RNA, 21 nt, Human
gcagccucccauccagggccc

SEQ ID NO: 3887679 - RNA, 14 nt, Human
gcagccucccucug

SEQ ID NO: 3887680 - RNA, 16 nt, Human
gcagccucccucugac

SEQ ID NO: 3887681 - RNA, 14 nt, Human
gcagccuccuccug

SEQ ID NO: 3887682 - RNA, 16 nt, Human
gcagccucgccccugg

SEQ ID NO: 3887683 - RNA, 19 nt, Human
gcagccucgccccuggcag

SEQ ID NO: 3887684 - RNA, 14 nt, Human
gcagccucugaagu

SEQ ID NO: 3887685 - RNA, 19 nt, Human
gcagccucugucaggccuu

SEQ ID NO: 3887686 - RNA, 16 nt, Human
gcagccugcaggaccu

SEQ ID NO: 3887687 - RNA, 14 nt, Human
gcagccugccugga

SEQ ID NO: 3887688 - RNA, 15 nt, Human
gcagccugccuggag

SEQ ID NO: 3887689 - RNA, 24 nt, Human
gcagccugccuugcccacuccugc

SEQ ID NO: 3887690 - RNA, 23 nt, Human
gcagccugcgccaccgcccagag

SEQ ID NO: 3887691 - RNA, 19 nt, Human
gcagccugcguggcugacc

SEQ ID NO: 3887692 - RNA, 16 nt, Human
gcagccugcucuagug

SEQ ID NO: 3887693 - RNA, 23 nt, Human
gcagccugcuucccaccucccug

SEQ ID NO: 3887694 - RNA, 18 nt, Human
gcagccuggacauagaga

SEQ ID NO: 3887695 - RNA, 20 nt, Human
gcagccuggagacccacccc

SEQ ID NO: 3887696 - RNA, 12 nt, Human
gcagccuggcuc

SEQ ID NO: 3887697 - RNA, 19 nt, Human
gcagccuggcucccaggac

SEQ ID NO: 3887698 - RNA, 19 nt, Human
gcagccuggcuccccuggg

SEQ ID NO: 3887699 - RNA, 17 nt, Human
gcagccuuugccucccc

SEQ ID NO: 3887700 - RNA, 20 nt, Human
gcagcgaccaccccugccuc

SEQ ID NO: 3887701 - RNA, 17 nt, Human
gcagcgaccgcccccuc

SEQ ID NO: 3887702 - RNA, 18 nt, Human
gcagcgaccgcccccucc

SEQ ID NO: 3887703 - RNA, 22 nt, Human
gcagcgaccgcccccuccucua

SEQ ID NO: 3887704 - RNA, 22 nt, Human
gcagcgagcuaugaucgcgcca

SEQ ID NO: 3887705 - RNA, 13 nt, Human
gcagcgccaggcu

SEQ ID NO: 3887706 - RNA, 19 nt, Human
gcagcgcccuuccucucca

SEQ ID NO: 3887707 - RNA, 21 nt, Human
gcagcgcccuuccucuccacc

SEQ ID NO: 3887708 - RNA, 22 nt, Human
gcagcgggagccucccugccuc

SEQ ID NO: 3887709 - RNA, 21 nt, Human
gcagcggggcgaagcccaggc

SEQ ID NO: 3887710 - RNA, 21 nt, Human
gcagcuaguccuagugaaccu

SEQ ID NO: 3887711 - RNA, 14 nt, Human
gcagcuaguuuucu

SEQ ID NO: 3887712 - RNA, 18 nt, Human
gcagcucaagagauccca

SEQ ID NO: 3887713 - RNA, 17 nt, Human
gcagcucaccucucccu

SEQ ID NO: 3887714 - RNA, 18 nt, Human
gcagcucagagagggugg

SEQ ID NO: 3887715 - RNA, 19 nt, Human
gcagcucagguuguagugg

SEQ ID NO: 3887716 - RNA, 20 nt, Human
gcagcucauaagagccacag

SEQ ID NO: 3887717 - RNA, 23 nt, Human
gcagcucauagaguccccccucc

SEQ ID NO: 3887718 - RNA, 14 nt, Human
gcagcucaucucug

SEQ ID NO: 3887719 - RNA, 15 nt, Human
gcagcucccauucua

SEQ ID NO: 3887720 - RNA, 21 nt, Human
gcagcucccuggcuucugugg

SEQ ID NO: 3887721 - RNA, 20 nt, Human
gcagcuccuuccuagccuug

SEQ ID NO: 3887722 - RNA, 14 nt, Human
gcagcucuccaguc

SEQ ID NO: 3887723 - RNA, 23 nt, Human
gcagcucuuccuggacaggccag

SEQ ID NO: 3887724 - RNA, 18 nt, Human
gcagcugaaauaugcugg

SEQ ID NO: 3887725 - RNA, 15 nt, Human
gcagcugagcagggc

SEQ ID NO: 3887726 - RNA, 18 nt, Human
gcagcugagcagggccgg

SEQ ID NO: 3887727 - RNA, 14 nt, Human
gcagcugauuuuaa

SEQ ID NO: 3887728 - RNA, 16 nt, Human
gcagcugccuccccuc

SEQ ID NO: 3887729 - RNA, 18 nt, Human
gcagcugccuccccuccu

SEQ ID NO: 3887730 - RNA, 15 nt, Human
gcagcuggacagagg

SEQ ID NO: 3887731 - RNA, 14 nt, Human
gcagcugggcccaa

SEQ ID NO: 3887732 - RNA, 19 nt, Human
gcagcugggcccaacccug

SEQ ID NO: 3887733 - RNA, 22 nt, Human
gcagggcacagggccuggccca

SEQ ID NO: 3887734 - RNA, 12 nt, Human
gcagggcagccc

SEQ ID NO: 3887735 - RNA, 15 nt, Human
gcagggcaggaccag

SEQ ID NO: 3887736 - RNA, 16 nt, Human
gcagggccauggcuca

SEQ ID NO: 3887737 - RNA, 16 nt, Human
gcagggccucacacgg

SEQ ID NO: 3887738 - RNA, 18 nt, Human
gcagggccuugcccagag

SEQ ID NO: 3887739 - RNA, 19 nt, Human
gcagggccuugcccagaga

SEQ ID NO: 3887740 - RNA, 21 nt, Human
gcagggccuugcccagagaug

SEQ ID NO: 3887741 - RNA, 21 nt, Human
gcagggcgggcagagggcugg

SEQ ID NO: 3887742 - RNA, 17 nt, Human
gcagggcuacccugagc

SEQ ID NO: 3887743 - RNA, 21 nt, Human
gcagggcuacccugagcugag

SEQ ID NO: 3887744 - RNA, 12 nt, Human
gcagggcucucc

SEQ ID NO: 3887745 - RNA, 12 nt, Human
gcagggcucuga

SEQ ID NO: 3887746 - RNA, 13 nt, Human
gcagggcuggccc

SEQ ID NO: 3887747 - RNA, 14 nt, Human
gcagggcugugcac

SEQ ID NO: 3887748 - RNA, 13 nt, Human
gcagggcugugcu

SEQ ID NO: 3887749 - RNA, 19 nt, Human
gcaggggagggucagccag

SEQ ID NO: 3887750 - RNA, 21 nt, Human
gcaggggagggucagccaggg

SEQ ID NO: 3887751 - RNA, 15 nt, Human
gcaggggccuccaug

SEQ ID NO: 3887752 - RNA, 14 nt, Human
gcaggggccuggag

SEQ ID NO: 3887753 - RNA, 19 nt, Human
gcaggggcguggagggcgu

SEQ ID NO: 3887754 - RNA, 16 nt, Human
gcaggggcucuggaga

SEQ ID NO: 3887755 - RNA, 20 nt, Human
gcaggggugacggcccucau

SEQ ID NO: 3887756 - RNA, 18 nt, Human
gcagggguggcugccuca

SEQ ID NO: 3887757 - RNA, 15 nt, Human
gcagggguugcagug

SEQ ID NO: 3887758 - RNA, 17 nt, Human
gcagggucuagaaggcu

SEQ ID NO: 3887759 - RNA, 14 nt, Human
gcagggucugggca

SEQ ID NO: 3887760 - RNA, 19 nt, Human
gcagggucuguuuggacug

SEQ ID NO: 3887761 - RNA, 23 nt, Human
gcagggucuuuucaucugggaaa

SEQ ID NO: 3887762 - RNA, 15 nt, Human
gcagggugggaugga

SEQ ID NO: 3887763 - RNA, 14 nt, Human
gcagguaccacuga

SEQ ID NO: 3887764 - RNA, 12 nt, Human
gcaggucccuaa

SEQ ID NO: 3887765 - RNA, 15 nt, Human
gcaggucccuaauaa

SEQ ID NO: 3887766 - RNA, 16 nt, Human
gcaggucccuaauaaa

SEQ ID NO: 3887767 - RNA, 19 nt, Human
gcaggucccuaauaaagcu

SEQ ID NO: 3887768 - RNA, 20 nt, Human
gcaggugaaacccagucacu

SEQ ID NO: 3887769 - RNA, 16 nt, Human
gcaggugacagugagg

SEQ ID NO: 3887770 - RNA, 19 nt, Human
gcaggugaccuucugggaa

SEQ ID NO: 3887771 - RNA, 21 nt, Human
gcaggugccccucucuccauc

SEQ ID NO: 3887772 - RNA, 15 nt, Human
gcaggugccuccagg

SEQ ID NO: 3887773 - RNA, 21 nt, Human
gcaggugcugcuacccucccu

SEQ ID NO: 3887774 - RNA, 18 nt, Human
gcaggugcuggagcacug

SEQ ID NO: 3887775 - RNA, 19 nt, Human
gcaggugcuggagcacugg

SEQ ID NO: 3887776 - RNA, 20 nt, Human
gcaggugcuggagcacuggg

SEQ ID NO: 3887777 - RNA, 20 nt, Human
gcagguggaucuauuucaug

SEQ ID NO: 3887778 - RNA, 21 nt, Human
gcagguggccaaguuccucua

SEQ ID NO: 3887779 - RNA, 17 nt, Human
gcaggugggcuggacuu

SEQ ID NO: 3887780 - RNA, 20 nt, Human
gcaggugguggcacugagcc

SEQ ID NO: 3887781 - RNA, 21 nt, Human
gcaggugguggcacugagccc

SEQ ID NO: 3887782 - RNA, 23 nt, Human
gcaggugguggcacugagccccc

SEQ ID NO: 3887783 - RNA, 13 nt, Human
gcagguuaaaugu

SEQ ID NO: 3887784 - RNA, 13 nt, Human
gcagguuagagaa

SEQ ID NO: 3887785 - RNA, 13 nt, Human
gcagguucccaag

SEQ ID NO: 3887786 - RNA, 19 nt, Human
gcagguucugccugcuuug

SEQ ID NO: 3887787 - RNA, 22 nt, Human
gcagguucuucuuccugaagcu

SEQ ID NO: 3887788 - RNA, 13 nt, Human
gcagguucuuguu

SEQ ID NO: 3887789 - RNA, 23 nt, Human
gcagguucuuguuggugcacagc

SEQ ID NO: 3887790 - RNA, 15 nt, Human
gcagguuggacccca

SEQ ID NO: 3887791 - RNA, 14 nt, Human
gcaguaaagagaaa

SEQ ID NO: 3887792 - RNA, 13 nt, Human
gcaguacauggga

SEQ ID NO: 3887793 - RNA, 14 nt, Human
gcaguaccugaggg

SEQ ID NO: 3887794 - RNA, 21 nt, Human
gcaguagaaauaauaugcauu

SEQ ID NO: 3887795 - RNA, 17 nt, Human
gcaguagaacuccaggc

SEQ ID NO: 3887796 - RNA, 22 nt, Human
gcaguagaaggucggaggcuug

SEQ ID NO: 3887797 - RNA, 13 nt, Human
gcaguagacauuu

SEQ ID NO: 3887798 - RNA, 21 nt, Human
gcaguagaggcuauggacagg

SEQ ID NO: 3887799 - RNA, 20 nt, Human
gcaguagauuuucuuuaaaa

SEQ ID NO: 3887800 - RNA, 17 nt, Human
gcaguagucucugugcu

SEQ ID NO: 3887801 - RNA, 22 nt, Human
gcaguaucggcacuguacaaaa

SEQ ID NO: 3887802 - RNA, 13 nt, Human
gcaguauugagca

SEQ ID NO: 3887803 - RNA, 16 nt, Human
gcaguauuuugugucc

SEQ ID NO: 3887804 - RNA, 17 nt, Human
gcaguauuuuguguccu

SEQ ID NO: 3887805 - RNA, 22 nt, Human
gcagucacucuagucaaugaca

SEQ ID NO: 3887806 - RNA, 13 nt, Human
gcagucacugaau

SEQ ID NO: 3887807 - RNA, 21 nt, Human
gcagucauggagaaccaccua

SEQ ID NO: 3887808 - RNA, 19 nt, Human
gcaguccacuucugacagc

SEQ ID NO: 3887809 - RNA, 22 nt, Human
gcaguccacuucugacagccuc

SEQ ID NO: 3887810 - RNA, 16 nt, Human
gcaguccauuucuacc

SEQ ID NO: 3887811 - RNA, 14 nt, Human
gcaguccccuuccc

SEQ ID NO: 3887812 - RNA, 18 nt, Human
gcaguccugccucagccu

SEQ ID NO: 3887813 - RNA, 13 nt, Human
gcaguccuggagc

SEQ ID NO: 3887814 - RNA, 20 nt, Human
gcagucgggggcuggccuag

SEQ ID NO: 3887815 - RNA, 23 nt, Human
gcagucgggggcuggccuaggag

SEQ ID NO: 3887816 - RNA, 15 nt, Human
gcagucgucgcacag

SEQ ID NO: 3887817 - RNA, 20 nt, Human
gcagucgucgcacagucucu

SEQ ID NO: 3887818 - RNA, 16 nt, Human
gcagucuacccaccuc

SEQ ID NO: 3887819 - RNA, 21 nt, Human
gcagucuccucuuuaaaacaa

SEQ ID NO: 3887820 - RNA, 18 nt, Human
gcagucucggguggcuag

SEQ ID NO: 3887821 - RNA, 17 nt, Human
gcagucucuauaccaau

SEQ ID NO: 3887822 - RNA, 18 nt, Human
gcagucucuauaccaaua

SEQ ID NO: 3887823 - RNA, 20 nt, Human
gcagucucuauaccaauaaa

SEQ ID NO: 3887824 - RNA, 13 nt, Human
gcagucucugccu

SEQ ID NO: 3887825 - RNA, 12 nt, Human
gcagucuggagg

SEQ ID NO: 3887826 - RNA, 17 nt, Human
gcagucuguccaggcuc

SEQ ID NO: 3887827 - RNA, 18 nt, Human
gcagucuuaugcuuccag

SEQ ID NO: 3887828 - RNA, 19 nt, Human
gcagucuuaugcuuccaga

SEQ ID NO: 3887829 - RNA, 22 nt, Human
gcagucuuaugcuuccagaaac

SEQ ID NO: 3887830 - RNA, 18 nt, Human
gcagugaaagacaagcug

SEQ ID NO: 3887831 - RNA, 20 nt, Human
gcagugagaaaaagcuccug

SEQ ID NO: 3887832 - RNA, 23 nt, Human
gcagugagaaaaagcuccugucc

SEQ ID NO: 3887833 - RNA, 21 nt, Human
gcagugagccgcaucuucucc

SEQ ID NO: 3887834 - RNA, 22 nt, Human
gcagugagggguauaucugggc

SEQ ID NO: 3887835 - RNA, 15 nt, Human
gcagugagugagccu

SEQ ID NO: 3887836 - RNA, 21 nt, Human
gcagugagugagccuggcucu

SEQ ID NO: 3887837 - RNA, 22 nt, Human
gcagugauauggcagaagacac

SEQ ID NO: 3887838 - RNA, 13 nt, Human
gcagugaugucac

SEQ ID NO: 3887839 - RNA, 14 nt, Human
gcagugauuaaggu

SEQ ID NO: 3887840 - RNA, 14 nt, Human
gcagugauuuuuau

SEQ ID NO: 3887841 - RNA, 17 nt, Human
gcagugccucuggucug

SEQ ID NO: 3887842 - RNA, 13 nt, Human
gcagugccuugca

SEQ ID NO: 3887843 - RNA, 23 nt, Human
gcagugccuuggggaauuuccuc

SEQ ID NO: 3887844 - RNA, 17 nt, Human
gcagugcucgcuguugc

SEQ ID NO: 3887845 - RNA, 23 nt, Human
gcagugcuuccaaggauggacca

SEQ ID NO: 3887846 - RNA, 17 nt, Human
gcagugcuuggcccagg

SEQ ID NO: 3887847 - RNA, 15 nt, Human
gcaguggacaccagg

SEQ ID NO: 3887848 - RNA, 14 nt, Human
gcaguggacucaga

SEQ ID NO: 3887849 - RNA, 14 nt, Human
gcaguggagaggga

SEQ ID NO: 3887850 - RNA, 16 nt, Human
gcaguggagcccagga

SEQ ID NO: 3887851 - RNA, 17 nt, Human
gcaguggagcccaggag

SEQ ID NO: 3887852 - RNA, 21 nt, Human
gcaguggccccuuaggccagu

SEQ ID NO: 3887853 - RNA, 12 nt, Human
gcaguggccuua

SEQ ID NO: 3887854 - RNA, 16 nt, Human
gcaguggcucacgccu

SEQ ID NO: 3887855 - RNA, 17 nt, Human
gcagugggaaaaaugua

SEQ ID NO: 3887856 - RNA, 15 nt, Human
gcaguggggcugggg

SEQ ID NO: 3887857 - RNA, 11 nt, Human
gcagugggucc

SEQ ID NO: 3887858 - RNA, 19 nt, Human
gcagugggucccacuuccc

SEQ ID NO: 3887859 - RNA, 21 nt, Human
gcagugggucccacuuccccu

SEQ ID NO: 3887860 - RNA, 18 nt, Human
gcagugguaagcucuggc

SEQ ID NO: 3887861 - RNA, 14 nt, Human
gcaguggugcgauc

SEQ ID NO: 3887862 - RNA, 16 nt, Human
gcaguggugcgaucuc

SEQ ID NO: 3887863 - RNA, 21 nt, Human
gcaguggugguuuucuguucu

SEQ ID NO: 3887864 - RNA, 14 nt, Human
gcaguguagauuuu

SEQ ID NO: 3887865 - RNA, 11 nt, Human
gcagugucuuc

SEQ ID NO: 3887866 - RNA, 14 nt, Human
gcagugucuuccau

SEQ ID NO: 3887867 - RNA, 15 nt, Human
gcagugucuuccaua

SEQ ID NO: 3887868 - RNA, 20 nt, Human
gcagugucuuccauaaugua

SEQ ID NO: 3887869 - RNA, 19 nt, Human
gcagugugaaguacaauaa

SEQ ID NO: 3887870 - RNA, 15 nt, Human
gcagugugaggccag

SEQ ID NO: 3887871 - RNA, 20 nt, Human
gcagugugcacuaaggggcc

SEQ ID NO: 3887872 - RNA, 16 nt, Human
gcaguguggccaggcu

SEQ ID NO: 3887873 - RNA, 18 nt, Human
gcagugugucuccugcau

SEQ ID NO: 3887874 - RNA, 13 nt, Human
gcaguguuagcuu

SEQ ID NO: 3887875 - RNA, 14 nt, Human
gcaguguuagcuua

SEQ ID NO: 3887876 - RNA, 17 nt, Human
gcaguguucgcuuggcu

SEQ ID NO: 3887877 - RNA, 18 nt, Human
gcaguuacaugcauacuu

SEQ ID NO: 3887878 - RNA, 20 nt, Human
gcaucauuauuuauguauug

SEQ ID NO: 3887879 - RNA, 17 nt, Human
gcaucauuccaggcccg

SEQ ID NO: 3887880 - RNA, 16 nt, Human
gcauccaccuccuucu

SEQ ID NO: 3887881 - RNA, 22 nt, Human
gcauccacuucuuucagcagac

SEQ ID NO: 3887882 - RNA, 23 nt, Human
gcauccacuucuuucagcagacu

SEQ ID NO: 3887883 - RNA, 18 nt, Human
gcauccagcagucucugc

SEQ ID NO: 3887884 - RNA, 17 nt, Human
gcauccauguguggacu

SEQ ID NO: 3887885 - RNA, 16 nt, Human
gcauccauuccucagg

SEQ ID NO: 3887886 - RNA, 17 nt, Human
gcauccauucuccugag

SEQ ID NO: 3887887 - RNA, 19 nt, Human
gcauccauucuccugagga

SEQ ID NO: 3887888 - RNA, 21 nt, Human
gcaucccagcaccugccuccu

SEQ ID NO: 3887889 - RNA, 13 nt, Human
gcaucccagggga

SEQ ID NO: 3887890 - RNA, 14 nt, Human
gcaucccaggggac

SEQ ID NO: 3887891 - RNA, 15 nt, Human
gcaucccaggggacc

SEQ ID NO: 3887892 - RNA, 16 nt, Human
gcaucccaggggacca

SEQ ID NO: 3887893 - RNA, 19 nt, Human
gcaucccaggggaccacac

SEQ ID NO: 3887894 - RNA, 12 nt, Human
gcaucccccaaa

SEQ ID NO: 3887895 - RNA, 16 nt, Human
gcaucccccaaaguuc

SEQ ID NO: 3887896 - RNA, 20 nt, Human
gcaucccccaaaguucacaa

SEQ ID NO: 3887897 - RNA, 13 nt, Human
gcauccccugccu

SEQ ID NO: 3887898 - RNA, 16 nt, Human
gcauccccugccucca

SEQ ID NO: 3887899 - RNA, 13 nt, Human
gcaucccggagga

SEQ ID NO: 3887900 - RNA, 18 nt, Human
gcaucccuaccgacccag

SEQ ID NO: 3887901 - RNA, 21 nt, Human
gcaucccuaccgacccagggu

SEQ ID NO: 3887902 - RNA, 21 nt, Human
gcaucccucacccauccuaga

SEQ ID NO: 3887903 - RNA, 18 nt, Human
gcaucccugaggagccag

SEQ ID NO: 3887904 - RNA, 22 nt, Human
gcaucccuugaccaggccuggg

SEQ ID NO: 3887905 - RNA, 22 nt, Human
gcaucccuuuuucauaaauuau

SEQ ID NO: 3887906 - RNA, 17 nt, Human
gcauccgcaggugcugg

SEQ ID NO: 3887907 - RNA, 15 nt, Human
gcauccuaagaaaua

SEQ ID NO: 3887908 - RNA, 11 nt, Human
gcauccuaguc

SEQ ID NO: 3887909 - RNA, 23 nt, Human
gcauccuagucucuaucauuaaa

SEQ ID NO: 3887910 - RNA, 21 nt, Human
gcauccucaguuccugcagca

SEQ ID NO: 3887911 - RNA, 15 nt, Human
gcauccuccagcccc

SEQ ID NO: 3887912 - RNA, 14 nt, Human
gcauccucuggagc

SEQ ID NO: 3887913 - RNA, 22 nt, Human
gcauccugagccccgcccucuu

SEQ ID NO: 3887914 - RNA, 14 nt, Human
gcauccuggcaccc

SEQ ID NO: 3887915 - RNA, 22 nt, Human
gcaucggacaagacccccagca

SEQ ID NO: 3887916 - RNA, 14 nt, Human
gcaucggccuaggg

SEQ ID NO: 3887917 - RNA, 17 nt, Human
gcaucggggagccggga

SEQ ID NO: 3887918 - RNA, 12 nt, Human
gcaucuaaacuu

SEQ ID NO: 3887919 - RNA, 19 nt, Human
gcaucuaaacuuuaauaug

SEQ ID NO: 3887920 - RNA, 20 nt, Human
gcaucuaaacuuuaauaugu

SEQ ID NO: 3887921 - RNA, 15 nt, Human
gcaucuaagcccaug

SEQ ID NO: 3887922 - RNA, 19 nt, Human
gcaucuaaguuauaagacu

SEQ ID NO: 3887923 - RNA, 21 nt, Human
gcaucuacuugccagaaccaa

SEQ ID NO: 3887924 - RNA, 23 nt, Human
gcaucuagaggcuuccuucauuu

SEQ ID NO: 3887925 - RNA, 16 nt, Human
gcaucuagguaauuuu

SEQ ID NO: 3887926 - RNA, 22 nt, Human
gcaucuaguuccccuguuuauu

SEQ ID NO: 3887927 - RNA, 20 nt, Human
gcaucuaucuggugauuucu

SEQ ID NO: 3887928 - RNA, 14 nt, Human
gcaucucagcccac

SEQ ID NO: 3887929 - RNA, 18 nt, Human
gcaucuccaccugcuccc

SEQ ID NO: 3887930 - RNA, 12 nt, Human
gcaucuccagga

SEQ ID NO: 3887931 - RNA, 13 nt, Human
gcaucuccaggaa

SEQ ID NO: 3887932 - RNA, 15 nt, Human
gcaucuccugugcau

SEQ ID NO: 3887933 - RNA, 16 nt, Human
gcaucucugggcugga

SEQ ID NO: 3887934 - RNA, 20 nt, Human
gcaucucugggcuggaugag

SEQ ID NO: 3887935 - RNA, 14 nt, Human
gcaucucuguacuu

SEQ ID NO: 3887936 - RNA, 21 nt, Human
gcaucucuugaggccaggagu

SEQ ID NO: 3887937 - RNA, 16 nt, Human
gcaucugaaaauugau

SEQ ID NO: 3887938 - RNA, 14 nt, Human
gcaucugacacaaa

SEQ ID NO: 3887939 - RNA, 16 nt, Human
gcaucugacacaaaaa

SEQ ID NO: 3887940 - RNA, 20 nt, Human
gcaucugaccucuaccuuca

SEQ ID NO: 3887941 - RNA, 17 nt, Human
gcaucugacucacaaga

SEQ ID NO: 3887942 - RNA, 19 nt, Human
gcaucugacucacaagaag

SEQ ID NO: 3887943 - RNA, 12 nt, Human
gcaucugcaccc

SEQ ID NO: 3887944 - RNA, 12 nt, Human
gcaucugccccu

SEQ ID NO: 3887945 - RNA, 18 nt, Human
gcaucugccccuccccca

SEQ ID NO: 3887946 - RNA, 18 nt, Human
gcaucugcuaauaaaacc

SEQ ID NO: 3887947 - RNA, 14 nt, Human
gcaucugggccuug

SEQ ID NO: 3887948 - RNA, 21 nt, Human
gcaucugggccuuggccugga

SEQ ID NO: 3887949 - RNA, 12 nt, Human
gcaucuggggcc

SEQ ID NO: 3887950 - RNA, 11 nt, Human
gcaucuguaua

SEQ ID NO: 3887951 - RNA, 14 nt, Human
gcaucugugauggg

SEQ ID NO: 3887952 - RNA, 16 nt, Human
gcaucuuauagcacuu

SEQ ID NO: 3887953 - RNA, 21 nt, Human
gcaucuuccagaagugugauu

SEQ ID NO: 3887954 - RNA, 23 nt, Human
gcaucuugccuccaggugcagag

SEQ ID NO: 3887955 - RNA, 22 nt, Human
gcaucuuggggggguggccgcu

SEQ ID NO: 3887956 - RNA, 22 nt, Human
gcaucuugguccaggaaaugug

SEQ ID NO: 3887957 - RNA, 20 nt, Human
gcaucuuguggcuuugcaac

SEQ ID NO: 3887958 - RNA, 13 nt, Human
gcaucuuugaugu

SEQ ID NO: 3887959 - RNA, 15 nt, Human
gcaucuuugaugugu

SEQ ID NO: 3887960 - RNA, 15 nt, Human
gcaucuuugccucuc

SEQ ID NO: 3887961 - RNA, 16 nt, Human
gcaucuuuggggaggu

SEQ ID NO: 3887962 - RNA, 18 nt, Human
gcaucuuuuuuucauuuu

SEQ ID NO: 3887963 - RNA, 14 nt, Human
gcaugaaaggcuuu

SEQ ID NO: 3887964 - RNA, 14 nt, Human
gcaugaaauaaaau

SEQ ID NO: 3887965 - RNA, 15 nt, Human
gcaugaaauaaaaua

SEQ ID NO: 3887966 - RNA, 18 nt, Human
gcaugaaauaaaauauau

SEQ ID NO: 3887967 - RNA, 15 nt, Human
gcaugaaaugugaau

SEQ ID NO: 3887968 - RNA, 12 nt, Human
gcaugaaauuuu

SEQ ID NO: 3887969 - RNA, 17 nt, Human
gcaugaacaaguuuuaa

SEQ ID NO: 3887970 - RNA, 15 nt, Human
gcaugaacagugcac

SEQ ID NO: 3887971 - RNA, 14 nt, Human
gcaugaagagaagc

SEQ ID NO: 3887972 - RNA, 15 nt, Human
gcaugaagagcaaaa

SEQ ID NO: 3887973 - RNA, 18 nt, Human
gcaugaagagcaaaaaua

SEQ ID NO: 3887974 - RNA, 18 nt, Human
gcaugaaguaauaugcac

SEQ ID NO: 3887975 - RNA, 20 nt, Human
gcaugaaguaauaugcacac

SEQ ID NO: 3887976 - RNA, 22 nt, Human
gcaugaaguaauaugcacacau

SEQ ID NO: 3887977 - RNA, 23 nt, Human
gcaugaaguaauaugcacacauu

SEQ ID NO: 3887978 - RNA, 15 nt, Human
gcaugaauuuguaau

SEQ ID NO: 3887979 - RNA, 18 nt, Human
gcaugacaagccccaggc

SEQ ID NO: 3887980 - RNA, 19 nt, Human
gcaugacaagccccaggca

SEQ ID NO: 3887981 - RNA, 14 nt, Human
gcaugacagccucu

SEQ ID NO: 3887982 - RNA, 15 nt, Human
gcaugacagccugca

SEQ ID NO: 3887983 - RNA, 18 nt, Human
gcaugacagccugcagca

SEQ ID NO: 3887984 - RNA, 20 nt, Human
gcaugacauaacagugcagg

SEQ ID NO: 3887985 - RNA, 16 nt, Human
gcaugaccugugacca

SEQ ID NO: 3887986 - RNA, 17 nt, Human
gcaugaccugugaccag

SEQ ID NO: 3887987 - RNA, 22 nt, Human
gcaugaccugugaccagcacug

SEQ ID NO: 3887988 - RNA, 21 nt, Human
gcaugacuuguagcauauucu

SEQ ID NO: 3887989 - RNA, 22 nt, Human
gcaugagcauuggauacagcag

SEQ ID NO: 3887990 - RNA, 20 nt, Human
gcaugagggaucacagggcc

SEQ ID NO: 3887991 - RNA, 21 nt, Human
gcaugagggaucacagggccc

SEQ ID NO: 3887992 - RNA, 23 nt, Human
gcaugauccaagcaagacugagg

SEQ ID NO: 3887993 - RNA, 18 nt, Human
gcaugaucugaaaaauac

SEQ ID NO: 3887994 - RNA, 18 nt, Human
gcaugauguuugcccaaa

SEQ ID NO: 3887995 - RNA, 21 nt, Human
gcaugcaaaugagcucugaaa

SEQ ID NO: 3887996 - RNA, 14 nt, Human
gcaugcaccacggg

SEQ ID NO: 3887997 - RNA, 15 nt, Human
gcaugcaccacgggc

SEQ ID NO: 3887998 - RNA, 13 nt, Human
gcaugcagaaagg

SEQ ID NO: 3887999 - RNA, 18 nt, Human
gcaugcagaaagggagca

SEQ ID NO: 3888000 - RNA, 13 nt, Human
gcaugcagcagcu

SEQ ID NO: 3888001 - RNA, 22 nt, Human
gcaugcagcagcuugcugcacc

SEQ ID NO: 3888002 - RNA, 21 nt, Human
gcaugcaucccacugcugacu

SEQ ID NO: 3888003 - RNA, 14 nt, Human
gcaugcaugcaaau

SEQ ID NO: 3888004 - RNA, 14 nt, Human
gcaugcauuuugca

SEQ ID NO: 3888005 - RNA, 18 nt, Human
gcaugccaacaagaaugc

SEQ ID NO: 3888006 - RNA, 20 nt, Human
gcaugcccccucgugccagu

SEQ ID NO: 3888007 - RNA, 14 nt, Human
gcaugccccggcca

SEQ ID NO: 3888008 - RNA, 20 nt, Human
gcaugccccggccaccucug

SEQ ID NO: 3888009 - RNA, 11 nt, Human
gcaugccucug

SEQ ID NO: 3888010 - RNA, 15 nt, Human
gcaugccuggauggg

SEQ ID NO: 3888011 - RNA, 15 nt, Human
gcaugccuucaaauc

SEQ ID NO: 3888012 - RNA, 16 nt, Human
gcaugccuuccagcac

SEQ ID NO: 3888013 - RNA, 15 nt, Human
gcaugcggcccagcc

SEQ ID NO: 3888014 - RNA, 17 nt, Human
gcaugcggcccagcccg

SEQ ID NO: 3888015 - RNA, 15 nt, Human
gcaugcucucugcag

SEQ ID NO: 3888016 - RNA, 21 nt, Human
gcaugcucucugcagccagcc

SEQ ID NO: 3888017 - RNA, 22 nt, Human
gcaugcucucugcagccagccc

SEQ ID NO: 3888018 - RNA, 16 nt, Human
gcaugcugcuggacag

SEQ ID NO: 3888019 - RNA, 15 nt, Human
gcaugcuggggcaag

SEQ ID NO: 3888020 - RNA, 21 nt, Human
gcaugcuguauuaugaaaucg

SEQ ID NO: 3888021 - RNA, 14 nt, Human
gcaugcuuaaauuu

SEQ ID NO: 3888022 - RNA, 19 nt, Human
gcauggaaaaguuucccag

SEQ ID NO: 3888023 - RNA, 22 nt, Human
gcauugagaacugcauauguuu

SEQ ID NO: 3888024 - RNA, 16 nt, Human
gcauugagcuugcaug

SEQ ID NO: 3888025 - RNA, 10 nt, Human
gcauugagua

SEQ ID NO: 3888026 - RNA, 15 nt, Human
gcauugaguauuguu

SEQ ID NO: 3888027 - RNA, 17 nt, Human
gcauugaguauuguuua

SEQ ID NO: 3888028 - RNA, 17 nt, Human
gcauugauauugugaac

SEQ ID NO: 3888029 - RNA, 18 nt, Human
gcauugauauugugaaca

SEQ ID NO: 3888030 - RNA, 23 nt, Human
gcauugccaguaacacaggccac

SEQ ID NO: 3888031 - RNA, 17 nt, Human
gcauugccauguggaag

SEQ ID NO: 3888032 - RNA, 21 nt, Human
gcauugccucggcuggcuccc

SEQ ID NO: 3888033 - RNA, 12 nt, Human
gcauugccuggc

SEQ ID NO: 3888034 - RNA, 14 nt, Human
gcauugcuagauaa

SEQ ID NO: 3888035 - RNA, 18 nt, Human
gcauugcuagauaaaagc

SEQ ID NO: 3888036 - RNA, 12 nt, Human
gcauugcuguua

SEQ ID NO: 3888037 - RNA, 12 nt, Human
gcauugcuuucu

SEQ ID NO: 3888038 - RNA, 20 nt, Human
gcauugcuuuuauuuugaaa

SEQ ID NO: 3888039 - RNA, 21 nt, Human
gcauuggaaacccuauuuccc

SEQ ID NO: 3888040 - RNA, 12 nt, Human
gcauuggauauu

SEQ ID NO: 3888041 - RNA, 18 nt, Human
gcauuggauauuuuuuac

SEQ ID NO: 3888042 - RNA, 19 nt, Human
gcauuggggauguuuuucu

SEQ ID NO: 3888043 - RNA, 12 nt, Human
gcauuguaagcg

SEQ ID NO: 3888044 - RNA, 20 nt, Human
gcauuguauagauauaauga

SEQ ID NO: 3888045 - RNA, 21 nt, Human
gcauuguauagauauaaugaa

SEQ ID NO: 3888046 - RNA, 16 nt, Human
gcauugucccugugcc

SEQ ID NO: 3888047 - RNA, 17 nt, Human
gcauugugaacugacag

SEQ ID NO: 3888048 - RNA, 15 nt, Human
gcauugugggaaggg

SEQ ID NO: 3888049 - RNA, 16 nt, Human
gcauugugggaagggg

SEQ ID NO: 3888050 - RNA, 17 nt, Human
gcauuguuugcuuauug

SEQ ID NO: 3888051 - RNA, 18 nt, Human
gcauuguuugcuuauugu

SEQ ID NO: 3888052 - RNA, 21 nt, Human
gcauuguuugcuuauuguucc

SEQ ID NO: 3888053 - RNA, 23 nt, Human
gcauuguuugcuuauuguuccaa

SEQ ID NO: 3888054 - RNA, 18 nt, Human
gcauuuaaaacagacacu

SEQ ID NO: 3888055 - RNA, 19 nt, Human
gcauuuaauguagccaugg

SEQ ID NO: 3888056 - RNA, 17 nt, Human
gcauuuacugugucuuu

SEQ ID NO: 3888057 - RNA, 18 nt, Human
gcauuuacugugucuuug

SEQ ID NO: 3888058 - RNA, 15 nt, Human
gcauuuacuuugugu

SEQ ID NO: 3888059 - RNA, 18 nt, Human
gcauuuagggaguauucu

SEQ ID NO: 3888060 - RNA, 19 nt, Human
gcauuucacaaaacagccu

SEQ ID NO: 3888061 - RNA, 22 nt, Human
gcauuucacaaaacagccuuug

SEQ ID NO: 3888062 - RNA, 21 nt, Human
gcauuuccaacaccacagaca

SEQ ID NO: 3888063 - RNA, 13 nt, Human
gcauuuccugggu

SEQ ID NO: 3888064 - RNA, 22 nt, Human
gcauuucgguugagaauggaaa

SEQ ID NO: 3888065 - RNA, 12 nt, Human
gcauuucugaag

SEQ ID NO: 3888066 - RNA, 20 nt, Human
gcauuucuugauguugcuua

SEQ ID NO: 3888067 - RNA, 10 nt, Human
gcauuugaau

SEQ ID NO: 3888068 - RNA, 16 nt, Human
gcauuugagaaaugca

SEQ ID NO: 3888069 - RNA, 19 nt, Human
gcauuugaggucuguucuu

SEQ ID NO: 3888070 - RNA, 20 nt, Human
gcauuugaggucuguucuuu

SEQ ID NO: 3888071 - RNA, 23 nt, Human
gcauuugcucuuucaucucugcu

SEQ ID NO: 3888072 - RNA, 17 nt, Human
gcauuugcugaauacag

SEQ ID NO: 3888073 - RNA, 14 nt, Human
gcauuugcuuuugu

SEQ ID NO: 3888074 - RNA, 16 nt, Human
gcauuuggguccagga

SEQ ID NO: 3888075 - RNA, 19 nt, Human
gcauuuggguccaggagga

SEQ ID NO: 3888076 - RNA, 21 nt, Human
gcauuuggugguuucagaaau

SEQ ID NO: 3888077 - RNA, 12 nt, Human
gcauuuguauuu

SEQ ID NO: 3888078 - RNA, 13 nt, Human
gcauuugucaaug

SEQ ID NO: 3888079 - RNA, 19 nt, Human
gcauuuguguguuacaaug

SEQ ID NO: 3888080 - RNA, 19 nt, Human
gcauuuguuuauguaauuu

SEQ ID NO: 3888081 - RNA, 16 nt, Human
gcauuuguuugaacug

SEQ ID NO: 3888082 - RNA, 15 nt, Human
gcauuuuaaaaauga

SEQ ID NO: 3888083 - RNA, 17 nt, Human
gcauuuuaaaaaugaaa

SEQ ID NO: 3888084 - RNA, 12 nt, Human
gcauuuuaccau

SEQ ID NO: 3888085 - RNA, 14 nt, Human
gcauuuucccagau

SEQ ID NO: 3888086 - RNA, 20 nt, Human
gcauuuuccuccaucgcagu

SEQ ID NO: 3888087 - RNA, 15 nt, Human
gcauuuuccucugcu

SEQ ID NO: 3888088 - RNA, 23 nt, Human
gcauuuucugaaacuaaugaaag

SEQ ID NO: 3888089 - RNA, 14 nt, Human
gcauuuugcuauug

SEQ ID NO: 3888090 - RNA, 12 nt, Human
gcauuuuguaau

SEQ ID NO: 3888091 - RNA, 14 nt, Human
gcauuuuguauuug

SEQ ID NO: 3888092 - RNA, 23 nt, Human
gcauuuuguuugguauuguauuu

SEQ ID NO: 3888093 - RNA, 19 nt, Human
gcauuuuuauuucagauuu

SEQ ID NO: 3888094 - RNA, 20 nt, Human
gcauuuuucaauauauugaa

SEQ ID NO: 3888095 - RNA, 21 nt, Human
gcauuuuugauuuaugcaugg

SEQ ID NO: 3888096 - RNA, 14 nt, Human
gcauuuuuguaaau

SEQ ID NO: 3888097 - RNA, 20 nt, Human
gccaaaaaccuuagcucccu

SEQ ID NO: 3888098 - RNA, 19 nt, Human
gccaaaaaggauacauaau

SEQ ID NO: 3888099 - RNA, 17 nt, Human
gccaaaaagugaaauaa

SEQ ID NO: 3888100 - RNA, 14 nt, Human
gccaaaagcugcuc

SEQ ID NO: 3888101 - RNA, 13 nt, Human
gccaaaaggaaaa

SEQ ID NO: 3888102 - RNA, 23 nt, Human
gccaaaaggaaaaagcuccaugu

SEQ ID NO: 3888103 - RNA, 17 nt, Human
gccaaaauauuuggaau

SEQ ID NO: 3888104 - RNA, 13 nt, Human
gccaaacacacag

SEQ ID NO: 3888105 - RNA, 18 nt, Human
gccaaaccaggacccugu

SEQ ID NO: 3888106 - RNA, 21 nt, Human
gccaaaccaggacccugucca

SEQ ID NO: 3888107 - RNA, 15 nt, Human
gccaaacccugucug

SEQ ID NO: 3888108 - RNA, 18 nt, Human
gccaaacccuugucagug

SEQ ID NO: 3888109 - RNA, 16 nt, Human
gccaaaccucuguuca

SEQ ID NO: 3888110 - RNA, 19 nt, Human
gccaaaccucuguucagug

SEQ ID NO: 3888111 - RNA, 19 nt, Human
gccaaacucaccugccccu

SEQ ID NO: 3888112 - RNA, 12 nt, Human
gccaaacugcug

SEQ ID NO: 3888113 - RNA, 14 nt, Human
gccaaacugcugga

SEQ ID NO: 3888114 - RNA, 22 nt, Human
gccaaagaaaugaacauuccaa

SEQ ID NO: 3888115 - RNA, 16 nt, Human
gccaaagaagcagacc

SEQ ID NO: 3888116 - RNA, 12 nt, Human
gccaaagacaaa

SEQ ID NO: 3888117 - RNA, 14 nt, Human
gccaaagacaaaua

SEQ ID NO: 3888118 - RNA, 13 nt, Human
gccaaagccaaag

SEQ ID NO: 3888119 - RNA, 22 nt, Human
gccaaagcuaggccuggccaga

SEQ ID NO: 3888120 - RNA, 20 nt, Human
gccaaaggaagcacaugccu

SEQ ID NO: 3888121 - RNA, 17 nt, Human
gccaaaggaugugauau

SEQ ID NO: 3888122 - RNA, 16 nt, Human
gccaaauaaugucucu

SEQ ID NO: 3888123 - RNA, 15 nt, Human
gccaaauagcaaaga

SEQ ID NO: 3888124 - RNA, 16 nt, Human
gccaaauauauucucu

SEQ ID NO: 3888125 - RNA, 19 nt, Human
gccaaauccgcucucuucc

SEQ ID NO: 3888126 - RNA, 22 nt, Human
gccaaauccgcucucuuccugc

SEQ ID NO: 3888127 - RNA, 23 nt, Human
gccaaauccgcucucuuccugcc

SEQ ID NO: 3888128 - RNA, 16 nt, Human
gccaaauguaauugaa

SEQ ID NO: 3888129 - RNA, 13 nt, Human
gccaaauuuauca

SEQ ID NO: 3888130 - RNA, 19 nt, Human
gccaaauuuaucaaagcau

SEQ ID NO: 3888131 - RNA, 18 nt, Human
gccaacaaagcuguugau

SEQ ID NO: 3888132 - RNA, 16 nt, Human
gccaacaacuucucca

SEQ ID NO: 3888133 - RNA, 14 nt, Human
gccaacaagaaugc

SEQ ID NO: 3888134 - RNA, 20 nt, Human
gccaacaccacagaaauggg

SEQ ID NO: 3888135 - RNA, 14 nt, Human
gccaacaccaggga

SEQ ID NO: 3888136 - RNA, 17 nt, Human
gccaacagaagcuucca

SEQ ID NO: 3888137 - RNA, 14 nt, Human
gccaacagcuacaa

SEQ ID NO: 3888138 - RNA, 17 nt, Human
gccaacagcuacaacag

SEQ ID NO: 3888139 - RNA, 18 nt, Human
gccaacagcuacaacagc

SEQ ID NO: 3888140 - RNA, 22 nt, Human
gccaacagguggcaggaccagg

SEQ ID NO: 3888141 - RNA, 20 nt, Human
gccaacaucgugaaacccug

SEQ ID NO: 3888142 - RNA, 22 nt, Human
gccaacaucgugaaacccuguc

SEQ ID NO: 3888143 - RNA, 13 nt, Human
gccaaccauaccu

SEQ ID NO: 3888144 - RNA, 23 nt, Human
gccaaccauaccuuccuucccug

SEQ ID NO: 3888145 - RNA, 23 nt, Human
gccaacccuucuccucuuguaaa

SEQ ID NO: 3888146 - RNA, 14 nt, Human
gccaaccucgcucc

SEQ ID NO: 3888147 - RNA, 16 nt, Human
gccaaccuguaauaaa

SEQ ID NO: 3888148 - RNA, 21 nt, Human
gccaaccuguaauaaauauga

SEQ ID NO: 3888149 - RNA, 13 nt, Human
gccaacuccucac

SEQ ID NO: 3888150 - RNA, 14 nt, Human
gccaacuccucaca

SEQ ID NO: 3888151 - RNA, 12 nt, Human
gccaacuguugu

SEQ ID NO: 3888152 - RNA, 19 nt, Human
gccaacuucuucagagcug

SEQ ID NO: 3888153 - RNA, 21 nt, Human
gccaacuugagggcccagagc

SEQ ID NO: 3888154 - RNA, 22 nt, Human
gccaacuugagggcccagagca

SEQ ID NO: 3888155 - RNA, 14 nt, Human
gccaacuuggcuuu

SEQ ID NO: 3888156 - RNA, 13 nt, Human
gccaacuuguaaa

SEQ ID NO: 3888157 - RNA, 20 nt, Human
gccaagaaaagggcugacau

SEQ ID NO: 3888158 - RNA, 15 nt, Human
gccaagaaacgucuu

SEQ ID NO: 3888159 - RNA, 21 nt, Human
gccaagaaacgucuucuaaac

SEQ ID NO: 3888160 - RNA, 15 nt, Human
gccaagaauuagauu

SEQ ID NO: 3888161 - RNA, 17 nt, Human
gccaagacaaaucaaca

SEQ ID NO: 3888162 - RNA, 20 nt, Human
gccaagacugcuguggccag

SEQ ID NO: 3888163 - RNA, 22 nt, Human
gccaagacuuggcaacagaagc

SEQ ID NO: 3888164 - RNA, 16 nt, Human
gccaagagcagaggca

SEQ ID NO: 3888165 - RNA, 18 nt, Human
gccaagagcccgucugcu

SEQ ID NO: 3888166 - RNA, 14 nt, Human
gccaagaguggccc

SEQ ID NO: 3888167 - RNA, 18 nt, Human
gccaagauaggaccuugg

SEQ ID NO: 3888168 - RNA, 15 nt, Human
gcccugagguguggg

SEQ ID NO: 3888169 - RNA, 22 nt, Human
gcccugaggugugggggcugca

SEQ ID NO: 3888170 - RNA, 23 nt, Human
gcccugaggugugggggcugcag

SEQ ID NO: 3888171 - RNA, 13 nt, Human
gcccugaucccag

SEQ ID NO: 3888172 - RNA, 15 nt, Human
gcccugaucccagag

SEQ ID NO: 3888173 - RNA, 19 nt, Human
gcccugauugcgcaaaacu

SEQ ID NO: 3888174 - RNA, 14 nt, Human
gcccugauuugcug

SEQ ID NO: 3888175 - RNA, 14 nt, Human
gcccugcaaaagga

SEQ ID NO: 3888176 - RNA, 16 nt, Human
gcccugcacuguccug

SEQ ID NO: 3888177 - RNA, 13 nt, Human
gcccugcagaccc

SEQ ID NO: 3888178 - RNA, 15 nt, Human
gcccugcagacccug

SEQ ID NO: 3888179 - RNA, 16 nt, Human
gcccugcagacccugc

SEQ ID NO: 3888180 - RNA, 17 nt, Human
gcccugcagacccugcc

SEQ ID NO: 3888181 - RNA, 20 nt, Human
gcccugcagacccugcccuu

SEQ ID NO: 3888182 - RNA, 14 nt, Human
gcccugcagccagc

SEQ ID NO: 3888183 - RNA, 15 nt, Human
gcccugcagccagcu

SEQ ID NO: 3888184 - RNA, 13 nt, Human
gcccugcaguguu

SEQ ID NO: 3888185 - RNA, 23 nt, Human
gcccugcaugggccagccccucc

SEQ ID NO: 3888186 - RNA, 14 nt, Human
gcccugcauguagu

SEQ ID NO: 3888187 - RNA, 15 nt, Human
gcccugcauuuucau

SEQ ID NO: 3888188 - RNA, 16 nt, Human
gcccugccaccugucu

SEQ ID NO: 3888189 - RNA, 17 nt, Human
gcccugccaccugucug

SEQ ID NO: 3888190 - RNA, 18 nt, Human
gcccugccaccugucugu

SEQ ID NO: 3888191 - RNA, 20 nt, Human
gcccugcccacaccuccugg

SEQ ID NO: 3888192 - RNA, 14 nt, Human
gcccugcccaccug

SEQ ID NO: 3888193 - RNA, 21 nt, Human
gcccugcccaccuggccucug

SEQ ID NO: 3888194 - RNA, 15 nt, Human
gcccugccccacacc

SEQ ID NO: 3888195 - RNA, 16 nt, Human
gcccugcccuagcucc

SEQ ID NO: 3888196 - RNA, 17 nt, Human
gcccugcccuagcucca

SEQ ID NO: 3888197 - RNA, 18 nt, Human
gcccugcccuagcuccac

SEQ ID NO: 3888198 - RNA, 13 nt, Human
gcccugcccugcc

SEQ ID NO: 3888199 - RNA, 17 nt, Human
gcccugcccugccaccu

SEQ ID NO: 3888200 - RNA, 12 nt, Human
gcccugcccugg

SEQ ID NO: 3888201 - RNA, 20 nt, Human
gcccugcccuucagcauccu

SEQ ID NO: 3888202 - RNA, 12 nt, Human
gcccugccuccu

SEQ ID NO: 3888203 - RNA, 12 nt, Human
gcccugccugag

SEQ ID NO: 3888204 - RNA, 14 nt, Human
gcccugccugaggg

SEQ ID NO: 3888205 - RNA, 16 nt, Human
gcccugccugagggcc

SEQ ID NO: 3888206 - RNA, 19 nt, Human
gcccugccugagggccccu

SEQ ID NO: 3888207 - RNA, 20 nt, Human
gcccugccugagggccccuc

SEQ ID NO: 3888208 - RNA, 22 nt, Human
gcccugccugagggccccucug

SEQ ID NO: 3888209 - RNA, 19 nt, Human
gcccugccuggaggaccug

SEQ ID NO: 3888210 - RNA, 21 nt, Human
gcccugccuggaggaccugag

SEQ ID NO: 3888211 - RNA, 22 nt, Human
gcccugcuccucccuggcugcc

SEQ ID NO: 3888212 - RNA, 15 nt, Human
gcccugcuccugcag

SEQ ID NO: 3888213 - RNA, 18 nt, Human
gcccugcugagucccagg

SEQ ID NO: 3888214 - RNA, 23 nt, Human
gcccugcugagucccaggcugag

SEQ ID NO: 3888215 - RNA, 13 nt, Human
gcccugcugcccu

SEQ ID NO: 3888216 - RNA, 21 nt, Human
gcccugcugccgccucccagc

SEQ ID NO: 3888217 - RNA, 23 nt, Human
gcccugcugccgccucccagccu

SEQ ID NO: 3888218 - RNA, 23 nt, Human
gcccugcuggccgccucaccccc

SEQ ID NO: 3888219 - RNA, 13 nt, Human
gcccugcugggga

SEQ ID NO: 3888220 - RNA, 12 nt, Human
gcccugcuguuu

SEQ ID NO: 3888221 - RNA, 19 nt, Human
gcccugcuuccugcuugcc

SEQ ID NO: 3888222 - RNA, 16 nt, Human
gcccugcuuucagaua

SEQ ID NO: 3888223 - RNA, 22 nt, Human
gcccuggacugugugcucagga

SEQ ID NO: 3888224 - RNA, 15 nt, Human
gcccuggagcagcca

SEQ ID NO: 3888225 - RNA, 19 nt, Human
gcccuggagccaacugcug

SEQ ID NO: 3888226 - RNA, 21 nt, Human
gcccuggagccaacugcugcu

SEQ ID NO: 3888227 - RNA, 14 nt, Human
gcccuggaggcggu

SEQ ID NO: 3888228 - RNA, 15 nt, Human
gcccuggaggcggug

SEQ ID NO: 3888229 - RNA, 18 nt, Human
gcccuggaggugccagca

SEQ ID NO: 3888230 - RNA, 20 nt, Human
gcccuggaggugccagcaaa

SEQ ID NO: 3888231 - RNA, 13 nt, Human
gcccuggaggugg

SEQ ID NO: 3888232 - RNA, 20 nt, Human
gcccuggagguggcugagcc

SEQ ID NO: 3888233 - RNA, 20 nt, Human
gcccuggaugcccaggaauc

SEQ ID NO: 3888234 - RNA, 18 nt, Human
gcccuggauuucagaaag

SEQ ID NO: 3888235 - RNA, 12 nt, Human
gcccuggcagga

SEQ ID NO: 3888236 - RNA, 15 nt, Human
gcccuggcaggcagg

SEQ ID NO: 3888237 - RNA, 16 nt, Human
gcccuggcaggcaggg

SEQ ID NO: 3888238 - RNA, 13 nt, Human
gcccuggccagag

SEQ ID NO: 3888239 - RNA, 13 nt, Human
gcccuggcccuga

SEQ ID NO: 3888240 - RNA, 17 nt, Human
gcccuggcccugaggug

SEQ ID NO: 3888241 - RNA, 18 nt, Human
gcccuggcccugaggugu

SEQ ID NO: 3888242 - RNA, 16 nt, Human
gcccuggccuccccug

SEQ ID NO: 3888243 - RNA, 14 nt, Human
gcccuggccugcug

SEQ ID NO: 3888244 - RNA, 12 nt, Human
gcccuggcucug

SEQ ID NO: 3888245 - RNA, 17 nt, Human
gcccuggcucugcuguc

SEQ ID NO: 3888246 - RNA, 15 nt, Human
gcccuggcugaagga

SEQ ID NO: 3888247 - RNA, 18 nt, Human
gcccuggcugaaggacug

SEQ ID NO: 3888248 - RNA, 20 nt, Human
gcccuggcugaaggacugug

SEQ ID NO: 3888249 - RNA, 11 nt, Human
gcccuggcugc

SEQ ID NO: 3888250 - RNA, 15 nt, Human
gcccuggcugcugcc

SEQ ID NO: 3888251 - RNA, 19 nt, Human
gcccuggcugcugccccca

SEQ ID NO: 3888252 - RNA, 15 nt, Human
gcccuggcuguucug

SEQ ID NO: 3888253 - RNA, 23 nt, Human
gcccugggaaaccccuucucugu

SEQ ID NO: 3888254 - RNA, 11 nt, Human
gcccugggagg

SEQ ID NO: 3888255 - RNA, 14 nt, Human
gcccugggaggcag

SEQ ID NO: 3888256 - RNA, 14 nt, Human
gcccugggaggcuc

SEQ ID NO: 3888257 - RNA, 15 nt, Human
gcccugggaggcucu

SEQ ID NO: 3888258 - RNA, 15 nt, Human
gcccugggccccacc

SEQ ID NO: 3888259 - RNA, 22 nt, Human
gcccugggccccaccaccuagg

SEQ ID NO: 3888260 - RNA, 13 nt, Human
gcccugggccugc

SEQ ID NO: 3888261 - RNA, 20 nt, Human
gcccugggccugccucacca

SEQ ID NO: 3888262 - RNA, 22 nt, Human
gcccugggccugccucaccacg

SEQ ID NO: 3888263 - RNA, 15 nt, Human
gcccugggcucggag

SEQ ID NO: 3888264 - RNA, 19 nt, Human
gcccugggcucggaggcug

SEQ ID NO: 3888265 - RNA, 21 nt, Human
gcccugggcucggaggcugcc

SEQ ID NO: 3888266 - RNA, 11 nt, Human
gcccugggcug

SEQ ID NO: 3888267 - RNA, 12 nt, Human
gcccugggcugg

SEQ ID NO: 3888268 - RNA, 14 nt, Human
gcccugggcuggaa

SEQ ID NO: 3888269 - RNA, 19 nt, Human
gcccuggggcugaucucag

SEQ ID NO: 3888270 - RNA, 13 nt, Human
gcccugguccagg

SEQ ID NO: 3888271 - RNA, 23 nt, Human
gcccugguccagggaagcuggcc

SEQ ID NO: 3888272 - RNA, 18 nt, Human
gcccugguccuuccaggc

SEQ ID NO: 3888273 - RNA, 15 nt, Human
gcccuggugcugcca

SEQ ID NO: 3888274 - RNA, 21 nt, Human
gcccuggugcugccacacuuc

SEQ ID NO: 3888275 - RNA, 13 nt, Human
gcccugguggaga

SEQ ID NO: 3888276 - RNA, 21 nt, Human
gcccugguggagaaagcacug

SEQ ID NO: 3888277 - RNA, 20 nt, Human
gcccugguggcagugggagc

SEQ ID NO: 3888278 - RNA, 21 nt, Human
gcccugguggcagugggagcu

SEQ ID NO: 3888279 - RNA, 22 nt, Human
gcccugguggcagugggagcug

SEQ ID NO: 3888280 - RNA, 14 nt, Human
gcccugguuuccug

SEQ ID NO: 3888281 - RNA, 18 nt, Human
gcccugguuuccugcccu

SEQ ID NO: 3888282 - RNA, 19 nt, Human
gcccugguuuccugcccug

SEQ ID NO: 3888283 - RNA, 20 nt, Human
gcccugguuuccugcccugg

SEQ ID NO: 3888284 - RNA, 23 nt, Human
gcccugguuuccugcccugggag

SEQ ID NO: 3888285 - RNA, 17 nt, Human
gcccugucccucccacc

SEQ ID NO: 3888286 - RNA, 20 nt, Human
gcccugucccucccaccucu

SEQ ID NO: 3888287 - RNA, 13 nt, Human
gcccuguccuggu

SEQ ID NO: 3888288 - RNA, 11 nt, Human
gcccugucugu

SEQ ID NO: 3888289 - RNA, 21 nt, Human
gcccugugcaaccucuuggcc

SEQ ID NO: 3888290 - RNA, 20 nt, Human
gcccugugccccuugacaac

SEQ ID NO: 3888291 - RNA, 16 nt, Human
gcccuguggaagggac

SEQ ID NO: 3888292 - RNA, 17 nt, Human
gcccuguggaagggacu

SEQ ID NO: 3888293 - RNA, 18 nt, Human
gcccugugggaccccagg

SEQ ID NO: 3888294 - RNA, 14 nt, Human
gcccugugugcagg

SEQ ID NO: 3888295 - RNA, 19 nt, Human
gcccuguugacacaggucu

SEQ ID NO: 3888296 - RNA, 21 nt, Human
gcccuguugacacaggucuuu

SEQ ID NO: 3888297 - RNA, 16 nt, Human
gcccuguugugccaca

SEQ ID NO: 3888298 - RNA, 20 nt, Human
gcccuguugugccacagagu

SEQ ID NO: 3888299 - RNA, 20 nt, Human
gcccuuacacuuacuguugu

SEQ ID NO: 3888300 - RNA, 16 nt, Human
gcccuuaccugccagg

SEQ ID NO: 3888301 - RNA, 22 nt, Human
gcccuuaccugccaggaagcca

SEQ ID NO: 3888302 - RNA, 14 nt, Human
gcccuuaccuuccc

SEQ ID NO: 3888303 - RNA, 19 nt, Human
gcccuuacuucuugcccug

SEQ ID NO: 3888304 - RNA, 22 nt, Human
gcccuuagcagggaaacagcua

SEQ ID NO: 3888305 - RNA, 15 nt, Human
gcccuuaguccccca

SEQ ID NO: 3888306 - RNA, 18 nt, Human
gcccuuagucccccaacu

SEQ ID NO: 3888307 - RNA, 18 nt, Human
gcccuuaucugugcucag

SEQ ID NO: 3888308 - RNA, 20 nt, Human
gcccuuaucugugcucagga

SEQ ID NO: 3888309 - RNA, 15 nt, Human
gcccuucaccccagu

SEQ ID NO: 3888310 - RNA, 21 nt, Human
gcccuucaccccaguggccac

SEQ ID NO: 3888311 - RNA, 19 nt, Human
gcccuucacugccuuugcu

SEQ ID NO: 3888312 - RNA, 20 nt, Human
gcccuucacugccuuugcuc

SEQ ID NO: 3888313 - RNA, 22 nt, Human
gccucaguccuccccucacagc

SEQ ID NO: 3888314 - RNA, 23 nt, Human
gccucaguccuccccucacagcc

SEQ ID NO: 3888315 - RNA, 22 nt, Human
gccucagucucccuucucccau

SEQ ID NO: 3888316 - RNA, 12 nt, Human
gccucagugcca

SEQ ID NO: 3888317 - RNA, 14 nt, Human
gccucaguguauuu

SEQ ID NO: 3888318 - RNA, 22 nt, Human
gccucauauuuaaagacaggga

SEQ ID NO: 3888319 - RNA, 21 nt, Human
gccucaucaucagagccuuuc

SEQ ID NO: 3888320 - RNA, 19 nt, Human
gccucauccgaggcagggu

SEQ ID NO: 3888321 - RNA, 16 nt, Human
gccucauguggcugga

SEQ ID NO: 3888322 - RNA, 21 nt, Human
gccucauuuagagaggaaaag

SEQ ID NO: 3888323 - RNA, 19 nt, Human
gccucauuuuuuuccuugc

SEQ ID NO: 3888324 - RNA, 21 nt, Human
gccucauuuuuuuccuugcaa

SEQ ID NO: 3888325 - RNA, 21 nt, Human
gccuccaaccccucgcccagu

SEQ ID NO: 3888326 - RNA, 12 nt, Human
gccuccacagcg

SEQ ID NO: 3888327 - RNA, 14 nt, Human
gccuccacagcgag

SEQ ID NO: 3888328 - RNA, 22 nt, Human
gccuccacagcgagggcagcug

SEQ ID NO: 3888329 - RNA, 23 nt, Human
gccuccacagcgagggcagcugc

SEQ ID NO: 3888330 - RNA, 18 nt, Human
gccuccaccaccacuggc

SEQ ID NO: 3888331 - RNA, 20 nt, Human
gccuccaccaccacuggcca

SEQ ID NO: 3888332 - RNA, 16 nt, Human
gccuccacccucugag

SEQ ID NO: 3888333 - RNA, 19 nt, Human
gccuccacccucugagcuu

SEQ ID NO: 3888334 - RNA, 18 nt, Human
gccuccaccgcugccuaa

SEQ ID NO: 3888335 - RNA, 12 nt, Human
gccuccacuccc

SEQ ID NO: 3888336 - RNA, 14 nt, Human
gccuccacucccac

SEQ ID NO: 3888337 - RNA, 15 nt, Human
gccuccacucccacu

SEQ ID NO: 3888338 - RNA, 18 nt, Human
gccuccacucccacuucc

SEQ ID NO: 3888339 - RNA, 14 nt, Human
gccuccagccucug

SEQ ID NO: 3888340 - RNA, 16 nt, Human
gccuccagccugccca

SEQ ID NO: 3888341 - RNA, 18 nt, Human
gccuccagccugcccaag

SEQ ID NO: 3888342 - RNA, 15 nt, Human
gccuccagcucagca

SEQ ID NO: 3888343 - RNA, 21 nt, Human
gccuccaggccacauggggcu

SEQ ID NO: 3888344 - RNA, 22 nt, Human
gccuccaggccacauggggcug

SEQ ID NO: 3888345 - RNA, 14 nt, Human
gccuccaggcccgu

SEQ ID NO: 3888346 - RNA, 14 nt, Human
gccuccagggcugg

SEQ ID NO: 3888347 - RNA, 16 nt, Human
gccuccagggcuggac

SEQ ID NO: 3888348 - RNA, 19 nt, Human
gccuccagggcuggacuga

SEQ ID NO: 3888349 - RNA, 22 nt, Human
gccuccagggcuggacugaggc

SEQ ID NO: 3888350 - RNA, 23 nt, Human
gccuccagggcuggacugaggcc

SEQ ID NO: 3888351 - RNA, 16 nt, Human
gccuccaggugcagag

SEQ ID NO: 3888352 - RNA, 17 nt, Human
gccuccaggugcagagg

SEQ ID NO: 3888353 - RNA, 15 nt, Human
gccuccauccugagg

SEQ ID NO: 3888354 - RNA, 16 nt, Human
gccuccauccugaggc

SEQ ID NO: 3888355 - RNA, 16 nt, Human
gccuccauggugccuc

SEQ ID NO: 3888356 - RNA, 18 nt, Human
gccuccauggugccucug

SEQ ID NO: 3888357 - RNA, 19 nt, Human
gccuccauggugccucugg

SEQ ID NO: 3888358 - RNA, 17 nt, Human
gccuccauuccuggagc

SEQ ID NO: 3888359 - RNA, 18 nt, Human
gccuccauuccuggagcc

SEQ ID NO: 3888360 - RNA, 16 nt, Human
gccuccauucugacca

SEQ ID NO: 3888361 - RNA, 23 nt, Human
gccucccaacaguggggaagagu

SEQ ID NO: 3888362 - RNA, 18 nt, Human
gccucccaacucacccca

SEQ ID NO: 3888363 - RNA, 20 nt, Human
gccucccaaggagaacaaau

SEQ ID NO: 3888364 - RNA, 14 nt, Human
gccucccacagugc

SEQ ID NO: 3888365 - RNA, 16 nt, Human
gccucccacagugcug

SEQ ID NO: 3888366 - RNA, 18 nt, Human
gccucccacccgaugcug

SEQ ID NO: 3888367 - RNA, 23 nt, Human
gccucccacccgaugcugcuuuc

SEQ ID NO: 3888368 - RNA, 10 nt, Human
gccucccagc

SEQ ID NO: 3888369 - RNA, 14 nt, Human
gccucccaucaccc

SEQ ID NO: 3888370 - RNA, 18 nt, Human
gccuccccaccuccaggc

SEQ ID NO: 3888371 - RNA, 19 nt, Human
gccuccccacggccgcucc

SEQ ID NO: 3888372 - RNA, 22 nt, Human
gccuccccacggccgcuccagg

SEQ ID NO: 3888373 - RNA, 18 nt, Human
gccuccccauuucccauc

SEQ ID NO: 3888374 - RNA, 11 nt, Human
gccucccccac

SEQ ID NO: 3888375 - RNA, 13 nt, Human
gccucccccacuu

SEQ ID NO: 3888376 - RNA, 21 nt, Human
gccucccccuagccauuuuua

SEQ ID NO: 3888377 - RNA, 11 nt, Human
gccuccccucc

SEQ ID NO: 3888378 - RNA, 13 nt, Human
gccuccccuccuc

SEQ ID NO: 3888379 - RNA, 14 nt, Human
gccuccccuccucu

SEQ ID NO: 3888380 - RNA, 19 nt, Human
gccuccccucuccuuccug

SEQ ID NO: 3888381 - RNA, 16 nt, Human
gccuccccugccacca

SEQ ID NO: 3888382 - RNA, 19 nt, Human
gccucccgaauagcuggga

SEQ ID NO: 3888383 - RNA, 19 nt, Human
gccucccgaguagcuggga

SEQ ID NO: 3888384 - RNA, 21 nt, Human
gccucccgaguagcugggacu

SEQ ID NO: 3888385 - RNA, 17 nt, Human
gccucccucacccugag

SEQ ID NO: 3888386 - RNA, 15 nt, Human
gccucccuccacccc

SEQ ID NO: 3888387 - RNA, 17 nt, Human
gccucccuccaccccag

SEQ ID NO: 3888388 - RNA, 19 nt, Human
gccucccuccccagugcaa

SEQ ID NO: 3888389 - RNA, 23 nt, Human
gccucccuccgcggcgggcccug

SEQ ID NO: 3888390 - RNA, 16 nt, Human
gccucccuccugcccc

SEQ ID NO: 3888391 - RNA, 22 nt, Human
gccucccucucucuucugcucc

SEQ ID NO: 3888392 - RNA, 14 nt, Human
gccucccucugacc

SEQ ID NO: 3888393 - RNA, 20 nt, Human
gccucccucugaccugcagg

SEQ ID NO: 3888394 - RNA, 21 nt, Human
gccucccucugaccugcaggc

SEQ ID NO: 3888395 - RNA, 18 nt, Human
gccucccugaagccuuug

SEQ ID NO: 3888396 - RNA, 19 nt, Human
gccucccugacccugcaga

SEQ ID NO: 3888397 - RNA, 16 nt, Human
gccucccugccucagg

SEQ ID NO: 3888398 - RNA, 13 nt, Human
gccucccugguga

SEQ ID NO: 3888399 - RNA, 13 nt, Human
gccucccugucca

SEQ ID NO: 3888400 - RNA, 15 nt, Human
gccucccuucaugca

SEQ ID NO: 3888401 - RNA, 18 nt, Human
gccucccuucaugcaugg

SEQ ID NO: 3888402 - RNA, 20 nt, Human
gccucccuucaugcauggaa

SEQ ID NO: 3888403 - RNA, 16 nt, Human
gccuccgagagggaga

SEQ ID NO: 3888404 - RNA, 14 nt, Human
gccuccggaagcug

SEQ ID NO: 3888405 - RNA, 17 nt, Human
gccuccggcgucagccu

SEQ ID NO: 3888406 - RNA, 15 nt, Human
gccuccgggaccccc

SEQ ID NO: 3888407 - RNA, 20 nt, Human
gccuccgucacuaccuggcu

SEQ ID NO: 3888408 - RNA, 20 nt, Human
gccuccuacagcccaccugg

SEQ ID NO: 3888409 - RNA, 21 nt, Human
gccuccucacccccagcuuug

SEQ ID NO: 3888410 - RNA, 15 nt, Human
gccuccucaucccgu

SEQ ID NO: 3888411 - RNA, 20 nt, Human
gccuccucccucccucuccg

SEQ ID NO: 3888412 - RNA, 13 nt, Human
gccuccuccugac

SEQ ID NO: 3888413 - RNA, 16 nt, Human
gccuccuccuucccaa

SEQ ID NO: 3888414 - RNA, 15 nt, Human
gccuccucguuccuu

SEQ ID NO: 3888415 - RNA, 19 nt, Human
gccuccucguuccuuucuc

SEQ ID NO: 3888416 - RNA, 16 nt, Human
gccuccucuaacaggg

SEQ ID NO: 3888417 - RNA, 13 nt, Human
gccuccucugucc

SEQ ID NO: 3888418 - RNA, 19 nt, Human
gccuccucugucugcccuu

SEQ ID NO: 3888419 - RNA, 21 nt, Human
gccuccucuucaccccggcag

SEQ ID NO: 3888420 - RNA, 21 nt, Human
gccuccugacacaccugcagc

SEQ ID NO: 3888421 - RNA, 16 nt, Human
gccuccugaccugagg

SEQ ID NO: 3888422 - RNA, 16 nt, Human
gccuccugaguagcug

SEQ ID NO: 3888423 - RNA, 12 nt, Human
gccuccugccca

SEQ ID NO: 3888424 - RNA, 18 nt, Human
gccuccugcccuuaccug

SEQ ID NO: 3888425 - RNA, 17 nt, Human
gccuccugccggcuccu

SEQ ID NO: 3888426 - RNA, 12 nt, Human
gccuccugccuc

SEQ ID NO: 3888427 - RNA, 13 nt, Human
gccuccugccucu

SEQ ID NO: 3888428 - RNA, 17 nt, Human
gccuccugccugccccu

SEQ ID NO: 3888429 - RNA, 14 nt, Human
gccuccuggguuca

SEQ ID NO: 3888430 - RNA, 17 nt, Human
gccuccuguggccugcc

SEQ ID NO: 3888431 - RNA, 18 nt, Human
gccuccuguggggaaagg

SEQ ID NO: 3888432 - RNA, 23 nt, Human
gccuccugugugugcgccuacag

SEQ ID NO: 3888433 - RNA, 16 nt, Human
gccuccuuccaccucc

SEQ ID NO: 3888434 - RNA, 20 nt, Human
gccuccuuccaccucccucc

SEQ ID NO: 3888435 - RNA, 18 nt, Human
gccuccuucugagcuccu

SEQ ID NO: 3888436 - RNA, 21 nt, Human
gccuccuucugagcuccuguc

SEQ ID NO: 3888437 - RNA, 20 nt, Human
gccuccuuugugaggaagcc

SEQ ID NO: 3888438 - RNA, 21 nt, Human
gccuccuuugugaggaagccg

SEQ ID NO: 3888439 - RNA, 22 nt, Human
gccuccuuugugaggaagccgc

SEQ ID NO: 3888440 - RNA, 15 nt, Human
gccucgaacuccugg

SEQ ID NO: 3888441 - RNA, 16 nt, Human
gccucgaacuggcugc

SEQ ID NO: 3888442 - RNA, 22 nt, Human
gccucgaacuggcugcaaaggg

SEQ ID NO: 3888443 - RNA, 18 nt, Human
gccucgcaacccgugcca

SEQ ID NO: 3888444 - RNA, 23 nt, Human
gccucgcaacccgugccaagucc

SEQ ID NO: 3888445 - RNA, 18 nt, Human
gccucgcaggccucccug

SEQ ID NO: 3888446 - RNA, 15 nt, Human
gccucgcccaccgca

SEQ ID NO: 3888447 - RNA, 16 nt, Human
gccucgcccaccgcau

SEQ ID NO: 3888448 - RNA, 13 nt, Human
gccucgccccugg

SEQ ID NO: 3888449 - RNA, 19 nt, Human
gccucgcuccccacucugc

SEQ ID NO: 3888450 - RNA, 20 nt, Human
gccucgcuccccacucugcu

SEQ ID NO: 3888451 - RNA, 20 nt, Human
gccucggacuuagcugggag

SEQ ID NO: 3888452 - RNA, 14 nt, Human
gccucggagccuca

SEQ ID NO: 3888453 - RNA, 18 nt, Human
gccucggccccucccaca

SEQ ID NO: 3888454 - RNA, 17 nt, Human
gccucggccucccaaag

SEQ ID NO: 3888455 - RNA, 14 nt, Human
gccucggcuccugc

SEQ ID NO: 3888456 - RNA, 15 nt, Human
gccucggcuccugcu

SEQ ID NO: 3888457 - RNA, 16 nt, Human
gccucggcuccugcug

SEQ ID NO: 3888458 - RNA, 17 nt, Human
gccucggcuggcucccc

SEQ ID NO: 3888459 - RNA, 18 nt, Human
gccucggcuuuucucagc

SEQ ID NO: 3888460 - RNA, 21 nt, Human
gccucgggacaccugcccugc

SEQ ID NO: 3888461 - RNA, 22 nt, Human
gccucgggacaccugcccugcc

SEQ ID NO: 3888462 - RNA, 17 nt, Human
gccucuaaccccaggcc

SEQ ID NO: 3888463 - RNA, 18 nt, Human
gccucuaaccccaggccc

SEQ ID NO: 3888464 - RNA, 23 nt, Human
gccucuaccugacacucccuugg

SEQ ID NO: 3888465 - RNA, 15 nt, Human
gccucuacugggaag

SEQ ID NO: 3888466 - RNA, 17 nt, Human
gccucuacugggaaggc

SEQ ID NO: 3888467 - RNA, 22 nt, Human
gccucuagagcagacuacagcu

SEQ ID NO: 3888468 - RNA, 15 nt, Human
gccucucacacacau

SEQ ID NO: 3888469 - RNA, 23 nt, Human
gccucucaccuguacucuuccga

SEQ ID NO: 3888470 - RNA, 22 nt, Human
gccucucagugcccuccagccc

SEQ ID NO: 3888471 - RNA, 19 nt, Human
gccucucaucaacugaaug

SEQ ID NO: 3888472 - RNA, 12 nt, Human
gccucucauccc

SEQ ID NO: 3888473 - RNA, 19 nt, Human
gccucucauuccagaggaa

SEQ ID NO: 3888474 - RNA, 21 nt, Human
gccucucauuccagaggaagg

SEQ ID NO: 3888475 - RNA, 14 nt, Human
gccucucccaggca

SEQ ID NO: 3888476 - RNA, 20 nt, Human
gccucuccccagguccagcu

SEQ ID NO: 3888477 - RNA, 13 nt, Human
gccucuccccuga

SEQ ID NO: 3888478 - RNA, 13 nt, Human
gccucucccguca

SEQ ID NO: 3888479 - RNA, 21 nt, Human
gccucucccuaggagaagagu

SEQ ID NO: 3888480 - RNA, 14 nt, Human
gccucucccuccuc

SEQ ID NO: 3888481 - RNA, 18 nt, Human
gccucucccugcugcucc

SEQ ID NO: 3888482 - RNA, 15 nt, Human
gccucucccuggccc

SEQ ID NO: 3888483 - RNA, 19 nt, Human
gccucuccgccccugagcc

SEQ ID NO: 3888484 - RNA, 22 nt, Human
gccucuccgccccugagcccac

SEQ ID NO: 3888485 - RNA, 16 nt, Human
gccucuccuuuguaua

SEQ ID NO: 3888486 - RNA, 16 nt, Human
gccucucucccagucu

SEQ ID NO: 3888487 - RNA, 13 nt, Human
gccucucucccuc

SEQ ID NO: 3888488 - RNA, 14 nt, Human
gccucucugcaggu

SEQ ID NO: 3888489 - RNA, 19 nt, Human
gccucucugcaggucccua

SEQ ID NO: 3888490 - RNA, 21 nt, Human
gccucucugcaggucccuaau

SEQ ID NO: 3888491 - RNA, 12 nt, Human
gccucucuggcc

SEQ ID NO: 3888492 - RNA, 13 nt, Human
gccucucuggccu

SEQ ID NO: 3888493 - RNA, 18 nt, Human
gccucucuggccucccac

SEQ ID NO: 3888494 - RNA, 23 nt, Human
gccucucuggccucccacccgau

SEQ ID NO: 3888495 - RNA, 21 nt, Human
gccucucuuccuaucccaucc

SEQ ID NO: 3888496 - RNA, 19 nt, Human
gccucucuugguuuccuuc

SEQ ID NO: 3888497 - RNA, 18 nt, Human
gccucugaaguuggacag

SEQ ID NO: 3888498 - RNA, 14 nt, Human
gccucugaccccuc

SEQ ID NO: 3888499 - RNA, 15 nt, Human
gccucugaccccucc

SEQ ID NO: 3888500 - RNA, 16 nt, Human
gccucugaccccuccu

SEQ ID NO: 3888501 - RNA, 18 nt, Human
gccucugaccccuccuca

SEQ ID NO: 3888502 - RNA, 20 nt, Human
gccucugaccccuccucacu

SEQ ID NO: 3888503 - RNA, 22 nt, Human
gccucugaccccuccucacugg

SEQ ID NO: 3888504 - RNA, 19 nt, Human
gccucugagaagcucugaa

SEQ ID NO: 3888505 - RNA, 14 nt, Human
gccucugagagcau

SEQ ID NO: 3888506 - RNA, 15 nt, Human
gccucugagauuugg

SEQ ID NO: 3888507 - RNA, 18 nt, Human
gccucugauaugggacug

SEQ ID NO: 3888508 - RNA, 19 nt, Human
gccucugauaugggacuga

SEQ ID NO: 3888509 - RNA, 15 nt, Human
gccucugcacucccc

SEQ ID NO: 3888510 - RNA, 16 nt, Human
gccucugcacuccccu

SEQ ID NO: 3888511 - RNA, 18 nt, Human
gccucugcacuccccugc

SEQ ID NO: 3888512 - RNA, 19 nt, Human
gccucugcacuccccugcu

SEQ ID NO: 3888513 - RNA, 23 nt, Human
gccucugccaaaggaugugauau

SEQ ID NO: 3888514 - RNA, 19 nt, Human
gccucugccacacucugac

SEQ ID NO: 3888515 - RNA, 12 nt, Human
gccucugccucu

SEQ ID NO: 3888516 - RNA, 13 nt, Human
gccucugccucug

SEQ ID NO: 3888517 - RNA, 12 nt, Human
gccucugccugu

SEQ ID NO: 3888518 - RNA, 13 nt, Human
gccucugccuguc

SEQ ID NO: 3888519 - RNA, 15 nt, Human
gccucugccuuagag

SEQ ID NO: 3888520 - RNA, 19 nt, Human
gccucugcggagcacacug

SEQ ID NO: 3888521 - RNA, 18 nt, Human
gccucugcugauccuccc

SEQ ID NO: 3888522 - RNA, 19 nt, Human
gccucugcugauccuccca

SEQ ID NO: 3888523 - RNA, 11 nt, Human
gccucugcugc

SEQ ID NO: 3888524 - RNA, 23 nt, Human
gccucuggcuagaggccagcccc

SEQ ID NO: 3888525 - RNA, 12 nt, Human
gccucugggacu

SEQ ID NO: 3888526 - RNA, 14 nt, Human
gccucugggacugg

SEQ ID NO: 3888527 - RNA, 13 nt, Human
gccucugggccuc

SEQ ID NO: 3888528 - RNA, 22 nt, Human
gccucugggucagugguccaca

SEQ ID NO: 3888529 - RNA, 22 nt, Human
gccucugucccggaagagucau

SEQ ID NO: 3888530 - RNA, 17 nt, Human
gccucugucuagcaugc

SEQ ID NO: 3888531 - RNA, 22 nt, Human
gccucugucuagcaugccaaca

SEQ ID NO: 3888532 - RNA, 18 nt, Human
gccucugucuucuggacu

SEQ ID NO: 3888533 - RNA, 19 nt, Human
gccucugucuucuggacug

SEQ ID NO: 3888534 - RNA, 12 nt, Human
gccucugugcug

SEQ ID NO: 3888535 - RNA, 16 nt, Human
gccucugugucacugg

SEQ ID NO: 3888536 - RNA, 19 nt, Human
gccucugugucacuggcug

SEQ ID NO: 3888537 - RNA, 15 nt, Human
gccucuguguccuuc

SEQ ID NO: 3888538 - RNA, 18 nt, Human
gccucuguguccuucccu

SEQ ID NO: 3888539 - RNA, 19 nt, Human
gccucuuaaagcugccugu

SEQ ID NO: 3888540 - RNA, 22 nt, Human
gccucuuaaagcugccuguagu

SEQ ID NO: 3888541 - RNA, 17 nt, Human
gccucuuacuaauguaa

SEQ ID NO: 3888542 - RNA, 19 nt, Human
gccucuuagacuucugcuu

SEQ ID NO: 3888543 - RNA, 17 nt, Human
gccucuuaugggcuggg

SEQ ID NO: 3888544 - RNA, 17 nt, Human
gccucuucaaauuagaa

SEQ ID NO: 3888545 - RNA, 14 nt, Human
gccucuucccccug

SEQ ID NO: 3888546 - RNA, 12 nt, Human
gccucuuccucc

SEQ ID NO: 3888547 - RNA, 12 nt, Human
gccucuucucua

SEQ ID NO: 3888548 - RNA, 22 nt, Human
gccucuugaccaggcugccucc

SEQ ID NO: 3888549 - RNA, 20 nt, Human
gccucuugagcaguggcugg

SEQ ID NO: 3888550 - RNA, 19 nt, Human
gccucuuggaccucugcuc

SEQ ID NO: 3888551 - RNA, 20 nt, Human
gccucuuggaccucugcucu

SEQ ID NO: 3888552 - RNA, 21 nt, Human
gccucuuggaccucugcucug

SEQ ID NO: 3888553 - RNA, 20 nt, Human
gccucuuggagaccuuaccc

SEQ ID NO: 3888554 - RNA, 18 nt, Human
gccucuuguaaagacugg

SEQ ID NO: 3888555 - RNA, 23 nt, Human
gccucuuguaucccuagugcucc

SEQ ID NO: 3888556 - RNA, 12 nt, Human
gccucuuucccu

SEQ ID NO: 3888557 - RNA, 17 nt, Human
gccucuuucccuuccag

SEQ ID NO: 3888558 - RNA, 19 nt, Human
gccucuuugucuaaaacaa

SEQ ID NO: 3888559 - RNA, 18 nt, Human
gccucuuuuaccugcugc

SEQ ID NO: 3888560 - RNA, 12 nt, Human
gccucuuuucuc

SEQ ID NO: 3888561 - RNA, 16 nt, Human
gccugaaauccugguu

SEQ ID NO: 3888562 - RNA, 14 nt, Human
gccugaacauccuu

SEQ ID NO: 3888563 - RNA, 21 nt, Human
gccugaacauccuuccuuccc

SEQ ID NO: 3888564 - RNA, 15 nt, Human
gccugaaccuuccau

SEQ ID NO: 3888565 - RNA, 17 nt, Human
gccugaacuccugccau

SEQ ID NO: 3888566 - RNA, 20 nt, Human
gccugaagaguccucugaau

SEQ ID NO: 3888567 - RNA, 16 nt, Human
gccugaagccagcugc

SEQ ID NO: 3888568 - RNA, 17 nt, Human
gccugaaggggcgucug

SEQ ID NO: 3888569 - RNA, 15 nt, Human
gccugaagucacaca

SEQ ID NO: 3888570 - RNA, 16 nt, Human
gccugaagucacacag

SEQ ID NO: 3888571 - RNA, 22 nt, Human
gccugaagucacacagugaguc

SEQ ID NO: 3888572 - RNA, 18 nt, Human
gccugaaguuggagugag

SEQ ID NO: 3888573 - RNA, 12 nt, Human
gccugaauaaag

SEQ ID NO: 3888574 - RNA, 16 nt, Human
gccugaauaaagagcc

SEQ ID NO: 3888575 - RNA, 23 nt, Human
gccugaauaaagagcccuaaguu

SEQ ID NO: 3888576 - RNA, 18 nt, Human
gccugaaucaugagccug

SEQ ID NO: 3888577 - RNA, 21 nt, Human
gccugaaucaugagccugcug

SEQ ID NO: 3888578 - RNA, 22 nt, Human
gccugaaugcuuauagguggcc

SEQ ID NO: 3888579 - RNA, 21 nt, Human
gccugacaaccacuggucugu

SEQ ID NO: 3888580 - RNA, 13 nt, Human
gccugacagaaac

SEQ ID NO: 3888581 - RNA, 17 nt, Human
gccugacagccagaacu

SEQ ID NO: 3888582 - RNA, 17 nt, Human
gccugacccucaucuuu

SEQ ID NO: 3888583 - RNA, 13 nt, Human
gccugaccuugag

SEQ ID NO: 3888584 - RNA, 19 nt, Human
gccugacuagggagccaug

SEQ ID NO: 3888585 - RNA, 14 nt, Human
gccugacuccccca

SEQ ID NO: 3888586 - RNA, 17 nt, Human
gccugacugccaagcca

SEQ ID NO: 3888587 - RNA, 14 nt, Human
gccugacugcucag

SEQ ID NO: 3888588 - RNA, 13 nt, Human
gccugagacccag

SEQ ID NO: 3888589 - RNA, 14 nt, Human
gccugagacccagg

SEQ ID NO: 3888590 - RNA, 13 nt, Human
gccugagaggcag

SEQ ID NO: 3888591 - RNA, 15 nt, Human
gccugagaggcaggc

SEQ ID NO: 3888592 - RNA, 19 nt, Human
gccugagaggcaggcauag

SEQ ID NO: 3888593 - RNA, 22 nt, Human
gccugagaggcaggcauagagg

SEQ ID NO: 3888594 - RNA, 16 nt, Human
gccugagaggggaagc

SEQ ID NO: 3888595 - RNA, 13 nt, Human
gccugagaguauu

SEQ ID NO: 3888596 - RNA, 18 nt, Human
gccugagauuucaucugc

SEQ ID NO: 3888597 - RNA, 22 nt, Human
gccugagcaacagagugagacc

SEQ ID NO: 3888598 - RNA, 17 nt, Human
gccugagcaccucccag

SEQ ID NO: 3888599 - RNA, 18 nt, Human
gccugagcaccucccagc

SEQ ID NO: 3888600 - RNA, 19 nt, Human
gccugagcaccucccagcc

SEQ ID NO: 3888601 - RNA, 18 nt, Human
gccugagcaguccuuggc

SEQ ID NO: 3888602 - RNA, 13 nt, Human
gcuccuguggccc

SEQ ID NO: 3888603 - RNA, 18 nt, Human
gcuccuguuagcuccuca

SEQ ID NO: 3888604 - RNA, 21 nt, Human
gcuccuuaggguuuucucucu

SEQ ID NO: 3888605 - RNA, 22 nt, Human
gcuccuuaggguuuucucucua

SEQ ID NO: 3888606 - RNA, 18 nt, Human
gcuccuucccaucgcugu

SEQ ID NO: 3888607 - RNA, 14 nt, Human
gcuccuuccuggag

SEQ ID NO: 3888608 - RNA, 13 nt, Human
gcuccuucugucc

SEQ ID NO: 3888609 - RNA, 21 nt, Human
gcuccuucuguccuacucugu

SEQ ID NO: 3888610 - RNA, 13 nt, Human
gcuccuugggagg

SEQ ID NO: 3888611 - RNA, 16 nt, Human
gcuccuugggaggaag

SEQ ID NO: 3888612 - RNA, 19 nt, Human
gcuccuugggaggaagcag

SEQ ID NO: 3888613 - RNA, 22 nt, Human
gcuccuugggaggaagcagaau

SEQ ID NO: 3888614 - RNA, 23 nt, Human
gcuccuugggaggaagcagaaua

SEQ ID NO: 3888615 - RNA, 14 nt, Human
gcuccuugggaggc

SEQ ID NO: 3888616 - RNA, 22 nt, Human
gcuccuugggaggccccacugg

SEQ ID NO: 3888617 - RNA, 14 nt, Human
gcuccuugggcccu

SEQ ID NO: 3888618 - RNA, 14 nt, Human
gcuccuuucuccag

SEQ ID NO: 3888619 - RNA, 12 nt, Human
gcuccuuucuga

SEQ ID NO: 3888620 - RNA, 18 nt, Human
gcuccuuuuucucccucu

SEQ ID NO: 3888621 - RNA, 20 nt, Human
gcuccuuuuucucccucugg

SEQ ID NO: 3888622 - RNA, 14 nt, Human
gcucgaaaacaauu

SEQ ID NO: 3888623 - RNA, 16 nt, Human
gcucgaaucucugugc

SEQ ID NO: 3888624 - RNA, 19 nt, Human
gcucgaaucucugugccuu

SEQ ID NO: 3888625 - RNA, 21 nt, Human
gcucgagcaguccugccucag

SEQ ID NO: 3888626 - RNA, 17 nt, Human
gcucgaugcagacaggg

SEQ ID NO: 3888627 - RNA, 20 nt, Human
gcucgauguggucacagcug

SEQ ID NO: 3888628 - RNA, 16 nt, Human
gcucgcaccccccugu

SEQ ID NO: 3888629 - RNA, 21 nt, Human
gcucgcaccccccuguucuaa

SEQ ID NO: 3888630 - RNA, 20 nt, Human
gcucgcccuccuuucugugc

SEQ ID NO: 3888631 - RNA, 17 nt, Human
gcucgccuucccuccug

SEQ ID NO: 3888632 - RNA, 21 nt, Human
gcucgccuucccuccugcuuu

SEQ ID NO: 3888633 - RNA, 22 nt, Human
gcucgccuucccuccugcuuug

SEQ ID NO: 3888634 - RNA, 13 nt, Human
gcucgcucccugc

SEQ ID NO: 3888635 - RNA, 13 nt, Human
gcucgcuguugcu

SEQ ID NO: 3888636 - RNA, 19 nt, Human
gcucggaggccccaaagga

SEQ ID NO: 3888637 - RNA, 14 nt, Human
gcucggccugcccc

SEQ ID NO: 3888638 - RNA, 13 nt, Human
gcucgggcccagg

SEQ ID NO: 3888639 - RNA, 14 nt, Human
gcucgggcccaggc

SEQ ID NO: 3888640 - RNA, 16 nt, Human
gcucggggugcacagg

SEQ ID NO: 3888641 - RNA, 19 nt, Human
gcucggggugcacaggagg

SEQ ID NO: 3888642 - RNA, 21 nt, Human
gcucggggugcacaggagggg

SEQ ID NO: 3888643 - RNA, 18 nt, Human
gcucgguggacccaggga

SEQ ID NO: 3888644 - RNA, 19 nt, Human
gcucguccccaagugaccu

SEQ ID NO: 3888645 - RNA, 14 nt, Human
gcucuaaaagguaa

SEQ ID NO: 3888646 - RNA, 20 nt, Human
gcucuaaaagguaaugugug

SEQ ID NO: 3888647 - RNA, 23 nt, Human
gcucuaaaagguaauguguggau

SEQ ID NO: 3888648 - RNA, 15 nt, Human
gcucuaacagcccuc

SEQ ID NO: 3888649 - RNA, 15 nt, Human
gcucuaacgccugag

SEQ ID NO: 3888650 - RNA, 21 nt, Human
gcucuaacgccugagcccagg

SEQ ID NO: 3888651 - RNA, 22 nt, Human
gcucuaacgccugagcccaggg

SEQ ID NO: 3888652 - RNA, 15 nt, Human
gcucuaagucucaac

SEQ ID NO: 3888653 - RNA, 18 nt, Human
gcucuaauguuugcauau

SEQ ID NO: 3888654 - RNA, 16 nt, Human
gcucuacaucuucugc

SEQ ID NO: 3888655 - RNA, 15 nt, Human
gcucuacccagggcc

SEQ ID NO: 3888656 - RNA, 19 nt, Human
gcucuacccagggccugca

SEQ ID NO: 3888657 - RNA, 19 nt, Human
gcucuacugaggugcuaug

SEQ ID NO: 3888658 - RNA, 23 nt, Human
gcucuacuuccccauggcccuga

SEQ ID NO: 3888659 - RNA, 19 nt, Human
gcucuagacaacccugcaa

SEQ ID NO: 3888660 - RNA, 14 nt, Human
gcucuagaugagcu

SEQ ID NO: 3888661 - RNA, 18 nt, Human
gcucuagaugagcugggc

SEQ ID NO: 3888662 - RNA, 23 nt, Human
gcucuagauugagagaagagaca

SEQ ID NO: 3888663 - RNA, 23 nt, Human
gcucuaggguugcuggagccuga

SEQ ID NO: 3888664 - RNA, 19 nt, Human
gcucuagguacgaugacag

SEQ ID NO: 3888665 - RNA, 14 nt, Human
gcucuagguggggc

SEQ ID NO: 3888666 - RNA, 12 nt, Human
gcucuagugccu

SEQ ID NO: 3888667 - RNA, 14 nt, Human
gcucuagugggaag

SEQ ID NO: 3888668 - RNA, 19 nt, Human
gcucuaucuugcucuguaa

SEQ ID NO: 3888669 - RNA, 13 nt, Human
gcucuaugagucu

SEQ ID NO: 3888670 - RNA, 18 nt, Human
gcucuaugggcagaucua

SEQ ID NO: 3888671 - RNA, 16 nt, Human
gcucuauguuuacaaa

SEQ ID NO: 3888672 - RNA, 18 nt, Human
gcucuauuaugaauguga

SEQ ID NO: 3888673 - RNA, 18 nt, Human
gcucucaaguuaucaggg

SEQ ID NO: 3888674 - RNA, 19 nt, Human
gcucucaccuugguuccug

SEQ ID NO: 3888675 - RNA, 21 nt, Human
gcucucacggccacacagcug

SEQ ID NO: 3888676 - RNA, 10 nt, Human
gcucucagcc

SEQ ID NO: 3888677 - RNA, 21 nt, Human
gcucucaggccagcugcuugg

SEQ ID NO: 3888678 - RNA, 17 nt, Human
gcucuccaaaccacuuu

SEQ ID NO: 3888679 - RNA, 17 nt, Human
gcucuccaccucagccu

SEQ ID NO: 3888680 - RNA, 18 nt, Human
gcucuccaccucagccuu

SEQ ID NO: 3888681 - RNA, 19 nt, Human
gcucuccaccucagccuug

SEQ ID NO: 3888682 - RNA, 21 nt, Human
gcucuccaccucagccuugga

SEQ ID NO: 3888683 - RNA, 20 nt, Human
gcucuccagucaggaggcau

SEQ ID NO: 3888684 - RNA, 19 nt, Human
gcucuccauucaauuucag

SEQ ID NO: 3888685 - RNA, 17 nt, Human
gcucucccauuuccuga

SEQ ID NO: 3888686 - RNA, 14 nt, Human
gcucucccucuucu

SEQ ID NO: 3888687 - RNA, 22 nt, Human
gcucuccggggccauuugcaau

SEQ ID NO: 3888688 - RNA, 13 nt, Human
gcucuccucuucu

SEQ ID NO: 3888689 - RNA, 19 nt, Human
gcucuccucuugccacugc

SEQ ID NO: 3888690 - RNA, 22 nt, Human
gcucuccucuugccacugccuc

SEQ ID NO: 3888691 - RNA, 15 nt, Human
gcucuccuggcuucc

SEQ ID NO: 3888692 - RNA, 17 nt, Human
gcucuccuggcuuccca

SEQ ID NO: 3888693 - RNA, 21 nt, Human
gcucucggaacugcaugcugc

SEQ ID NO: 3888694 - RNA, 13 nt, Human
gcucucuacccag

SEQ ID NO: 3888695 - RNA, 17 nt, Human
gcucucuacccagccca

SEQ ID NO: 3888696 - RNA, 15 nt, Human
gcucucuaggccucu

SEQ ID NO: 3888697 - RNA, 14 nt, Human
gcucucugcagcca

SEQ ID NO: 3888698 - RNA, 19 nt, Human
gcucucugcagccagccca

SEQ ID NO: 3888699 - RNA, 20 nt, Human
gcucucugcagccagcccag

SEQ ID NO: 3888700 - RNA, 21 nt, Human
gcucucugcagccagcccagc

SEQ ID NO: 3888701 - RNA, 15 nt, Human
gcucucugcccugug

SEQ ID NO: 3888702 - RNA, 18 nt, Human
gcucucugcccuguguac

SEQ ID NO: 3888703 - RNA, 13 nt, Human
gcucucuggccuu

SEQ ID NO: 3888704 - RNA, 19 nt, Human
gcucucuggccuucggccu

SEQ ID NO: 3888705 - RNA, 20 nt, Human
gcucucuggccuucggccuc

SEQ ID NO: 3888706 - RNA, 14 nt, Human
gcucucuuccugcc

SEQ ID NO: 3888707 - RNA, 20 nt, Human
gcucucuuccugccccucuu

SEQ ID NO: 3888708 - RNA, 22 nt, Human
gcucucuuuuucuccaggguca

SEQ ID NO: 3888709 - RNA, 17 nt, Human
gcucugaaagccagcug

SEQ ID NO: 3888710 - RNA, 17 nt, Human
gcucugaaaucuccuuu

SEQ ID NO: 3888711 - RNA, 19 nt, Human
gcucugaagcaaggcggug

SEQ ID NO: 3888712 - RNA, 20 nt, Human
gcucugacagaaagcagaua

SEQ ID NO: 3888713 - RNA, 21 nt, Human
gcucugaccacuugaggccug

SEQ ID NO: 3888714 - RNA, 15 nt, Human
gcucugacccaguga

SEQ ID NO: 3888715 - RNA, 15 nt, Human
gcucugagaggcccu

SEQ ID NO: 3888716 - RNA, 20 nt, Human
gcucugagaggcccuggauc

SEQ ID NO: 3888717 - RNA, 21 nt, Human
gcucugagagucuagauucuc

SEQ ID NO: 3888718 - RNA, 13 nt, Human
gcucugagccagu

SEQ ID NO: 3888719 - RNA, 16 nt, Human
gcucugagccaguuca

SEQ ID NO: 3888720 - RNA, 14 nt, Human
gcucugagcuguca

SEQ ID NO: 3888721 - RNA, 9 nt, Human
gcucugagg

SEQ ID NO: 3888722 - RNA, 18 nt, Human
gcucugaggacugcacca

SEQ ID NO: 3888723 - RNA, 20 nt, Human
gcucugaggcgccccaaccc

SEQ ID NO: 3888724 - RNA, 20 nt, Human
gcucugaggcuuccagagag

SEQ ID NO: 3888725 - RNA, 21 nt, Human
gcucugaggcuuccagagagu

SEQ ID NO: 3888726 - RNA, 17 nt, Human
gcucugagggaaagggc

SEQ ID NO: 3888727 - RNA, 23 nt, Human
gcucugaucauccacugugccau

SEQ ID NO: 3888728 - RNA, 22 nt, Human
gcucugaucccucuacagagcu

SEQ ID NO: 3888729 - RNA, 13 nt, Human
gcucugaugaaaa

SEQ ID NO: 3888730 - RNA, 16 nt, Human
gcucugaugcaucaga

SEQ ID NO: 3888731 - RNA, 18 nt, Human
gcucugcaauuccccucu

SEQ ID NO: 3888732 - RNA, 17 nt, Human
gcucugcaccccucugc

SEQ ID NO: 3888733 - RNA, 15 nt, Human
gcucugcagcccagg

SEQ ID NO: 3888734 - RNA, 18 nt, Human
gcucugcagcccagggac

SEQ ID NO: 3888735 - RNA, 19 nt, Human
gcucugcagcccagggacc

SEQ ID NO: 3888736 - RNA, 15 nt, Human
gcucugcaggcaccu

SEQ ID NO: 3888737 - RNA, 16 nt, Human
gcucugcaggcaccuu

SEQ ID NO: 3888738 - RNA, 16 nt, Human
gcucugcaugcggccc

SEQ ID NO: 3888739 - RNA, 19 nt, Human
gcucugcaugcggcccagc

SEQ ID NO: 3888740 - RNA, 20 nt, Human
gcucugcaugcggcccagcc

SEQ ID NO: 3888741 - RNA, 22 nt, Human
gcucugcaugcggcccagcccg

SEQ ID NO: 3888742 - RNA, 22 nt, Human
gcucugccaacuucuucagagc

SEQ ID NO: 3888743 - RNA, 22 nt, Human
gcucugccacccuaccuguuca

SEQ ID NO: 3888744 - RNA, 23 nt, Human
gcucugccacccuaccuguucag

SEQ ID NO: 3888745 - RNA, 13 nt, Human
gcucugccagucc

SEQ ID NO: 3888746 - RNA, 22 nt, Human
gcugcaggaaucuuuaaaagau

SEQ ID NO: 3888747 - RNA, 20 nt, Human
gcugcaggcuuugccauugu

SEQ ID NO: 3888748 - RNA, 17 nt, Human
gcugcagggcuuuaaaa

SEQ ID NO: 3888749 - RNA, 12 nt, Human
gcugcaggggcu

SEQ ID NO: 3888750 - RNA, 13 nt, Human
gcugcaggggcuc

SEQ ID NO: 3888751 - RNA, 21 nt, Human
gcugcaggggcucuggagaga

SEQ ID NO: 3888752 - RNA, 16 nt, Human
gcugcaguaggggagg

SEQ ID NO: 3888753 - RNA, 20 nt, Human
gcugcagugacgugcaccug

SEQ ID NO: 3888754 - RNA, 21 nt, Human
gcugcaguucuacucaggcug

SEQ ID NO: 3888755 - RNA, 18 nt, Human
gcugcaguugccagucac

SEQ ID NO: 3888756 - RNA, 20 nt, Human
gcugcaguugccagucaccc

SEQ ID NO: 3888757 - RNA, 21 nt, Human
gcugcaguuuugcuaucuggg

SEQ ID NO: 3888758 - RNA, 16 nt, Human
gcugcauacccgggca

SEQ ID NO: 3888759 - RNA, 13 nt, Human
gcugcauagaagg

SEQ ID NO: 3888760 - RNA, 22 nt, Human
gcugcaucuuauagcacuuuga

SEQ ID NO: 3888761 - RNA, 13 nt, Human
gcugcaugauguu

SEQ ID NO: 3888762 - RNA, 19 nt, Human
gcugcaugauguuugccca

SEQ ID NO: 3888763 - RNA, 14 nt, Human
gcugcaugccuggu

SEQ ID NO: 3888764 - RNA, 13 nt, Human
gcugccaaaugcg

SEQ ID NO: 3888765 - RNA, 14 nt, Human
gcugccaagcccca

SEQ ID NO: 3888766 - RNA, 16 nt, Human
gcugccaaggccagag

SEQ ID NO: 3888767 - RNA, 17 nt, Human
gcugccaaggccagagu

SEQ ID NO: 3888768 - RNA, 22 nt, Human
gcugccaaggccagaguggccu

SEQ ID NO: 3888769 - RNA, 14 nt, Human
gcugccaauauccu

SEQ ID NO: 3888770 - RNA, 16 nt, Human
gcugccaauauccuaa

SEQ ID NO: 3888771 - RNA, 20 nt, Human
gcugccaauauccuaauaaa

SEQ ID NO: 3888772 - RNA, 15 nt, Human
gcugccaaugggagc

SEQ ID NO: 3888773 - RNA, 16 nt, Human
gcugccacaccugagc

SEQ ID NO: 3888774 - RNA, 14 nt, Human
gcugccacccaccu

SEQ ID NO: 3888775 - RNA, 21 nt, Human
gcugccacccaccucccugcc

SEQ ID NO: 3888776 - RNA, 12 nt, Human
gcugccaccugc

SEQ ID NO: 3888777 - RNA, 19 nt, Human
gcugccagccgagauagcc

SEQ ID NO: 3888778 - RNA, 21 nt, Human
gcugccagccgagauagccaa

SEQ ID NO: 3888779 - RNA, 16 nt, Human
gcugccagccuugagc

SEQ ID NO: 3888780 - RNA, 23 nt, Human
gcugccagccuugagcccuggcu

SEQ ID NO: 3888781 - RNA, 14 nt, Human
gcugccagugccug

SEQ ID NO: 3888782 - RNA, 17 nt, Human
gcugccauccagguuca

SEQ ID NO: 3888783 - RNA, 18 nt, Human
gcugccauuugauuuuuc

SEQ ID NO: 3888784 - RNA, 18 nt, Human
gcugcccacuguuucucu

SEQ ID NO: 3888785 - RNA, 18 nt, Human
gcugcccaggggagcccu

SEQ ID NO: 3888786 - RNA, 17 nt, Human
gcugcccaucauguggc

SEQ ID NO: 3888787 - RNA, 21 nt, Human
gcugcccaucauguggcccca

SEQ ID NO: 3888788 - RNA, 16 nt, Human
gcugccccaaccugcu

SEQ ID NO: 3888789 - RNA, 19 nt, Human
gcugccccacagguguguu

SEQ ID NO: 3888790 - RNA, 23 nt, Human
gcugccccaucuccccucagcuc

SEQ ID NO: 3888791 - RNA, 19 nt, Human
gcugccccaugaagccaca

SEQ ID NO: 3888792 - RNA, 21 nt, Human
gcugccccaugaagccacagc

SEQ ID NO: 3888793 - RNA, 23 nt, Human
gcugccccauuuauccaccucca

SEQ ID NO: 3888794 - RNA, 14 nt, Human
gcugcccccgcuca

SEQ ID NO: 3888795 - RNA, 21 nt, Human
gcugcccccgcucaugggccc

SEQ ID NO: 3888796 - RNA, 18 nt, Human
gcugcccccggcccccug

SEQ ID NO: 3888797 - RNA, 20 nt, Human
gcugcccccggcccccuggu

SEQ ID NO: 3888798 - RNA, 16 nt, Human
gcugccccggccccuc

SEQ ID NO: 3888799 - RNA, 18 nt, Human
gcugccccucccugccag

SEQ ID NO: 3888800 - RNA, 16 nt, Human
gcugccccucucuggg

SEQ ID NO: 3888801 - RNA, 13 nt, Human
gcugcccgcuccc

SEQ ID NO: 3888802 - RNA, 14 nt, Human
gcugcccgcuccca

SEQ ID NO: 3888803 - RNA, 19 nt, Human
gcugcccgcucccaguguc

SEQ ID NO: 3888804 - RNA, 19 nt, Human
gcugcccggcgcccucugu

SEQ ID NO: 3888805 - RNA, 16 nt, Human
gcugcccgucuucagc

SEQ ID NO: 3888806 - RNA, 20 nt, Human
gcugcccgucuucagccuag

SEQ ID NO: 3888807 - RNA, 21 nt, Human
gcugcccuaaauaacccuuca

SEQ ID NO: 3888808 - RNA, 16 nt, Human
gcugcccuaggcuccg

SEQ ID NO: 3888809 - RNA, 18 nt, Human
gcugcccuaugggccugc

SEQ ID NO: 3888810 - RNA, 21 nt, Human
gcugcccuccuuguccaccca

SEQ ID NO: 3888811 - RNA, 15 nt, Human
gcugcccucuccugg

SEQ ID NO: 3888812 - RNA, 12 nt, Human
gcugcccugaga

SEQ ID NO: 3888813 - RNA, 22 nt, Human
gcugcccugagaagcugcucca

SEQ ID NO: 3888814 - RNA, 19 nt, Human
gcugcccuggugcugccac

SEQ ID NO: 3888815 - RNA, 12 nt, Human
gcugcccuguga

SEQ ID NO: 3888816 - RNA, 13 nt, Human
gcugcccuugggc

SEQ ID NO: 3888817 - RNA, 17 nt, Human
gcugccgaccagagccc

SEQ ID NO: 3888818 - RNA, 15 nt, Human
gcugccgcaccccag

SEQ ID NO: 3888819 - RNA, 18 nt, Human
gcugccgcaccccagagu

SEQ ID NO: 3888820 - RNA, 15 nt, Human
gcugccgggccugau

SEQ ID NO: 3888821 - RNA, 17 nt, Human
gcugccuagcaagcugg

SEQ ID NO: 3888822 - RNA, 19 nt, Human
gcugccuagcaagcuggcc

SEQ ID NO: 3888823 - RNA, 18 nt, Human
gcugccuauugauuuaag

SEQ ID NO: 3888824 - RNA, 13 nt, Human
gcugccucaugcu

SEQ ID NO: 3888825 - RNA, 17 nt, Human
gcugccuccacucccac

SEQ ID NO: 3888826 - RNA, 22 nt, Human
gcugccucccaacaguggggaa

SEQ ID NO: 3888827 - RNA, 15 nt, Human
gcugccuccccaacc

SEQ ID NO: 3888828 - RNA, 20 nt, Human
gcugccucggauccccuucc

SEQ ID NO: 3888829 - RNA, 21 nt, Human
gcugccucggauccccuuccu

SEQ ID NO: 3888830 - RNA, 22 nt, Human
gcugccucggauccccuuccua

SEQ ID NO: 3888831 - RNA, 13 nt, Human
gcugccugaaucc

SEQ ID NO: 3888832 - RNA, 21 nt, Human
gcugccugagucgugaccugc

SEQ ID NO: 3888833 - RNA, 14 nt, Human
gcugccugcccaca

SEQ ID NO: 3888834 - RNA, 19 nt, Human
gcugccugcccgcacagca

SEQ ID NO: 3888835 - RNA, 13 nt, Human
gcugccugcccgu

SEQ ID NO: 3888836 - RNA, 22 nt, Human
gcugccugccgguaaacacgcc

SEQ ID NO: 3888837 - RNA, 13 nt, Human
gcugccugccugu

SEQ ID NO: 3888838 - RNA, 21 nt, Human
gcugccugcgcccaccccgcu

SEQ ID NO: 3888839 - RNA, 21 nt, Human
gcugccugcuuuucacugcug

SEQ ID NO: 3888840 - RNA, 20 nt, Human
gcugccuggaagagcagccc

SEQ ID NO: 3888841 - RNA, 13 nt, Human
gcugccugggauc

SEQ ID NO: 3888842 - RNA, 20 nt, Human
gcugccugggaucccucauc

SEQ ID NO: 3888843 - RNA, 19 nt, Human
gcugccugggcuguuggca

SEQ ID NO: 3888844 - RNA, 14 nt, Human
gcugccugucccca

SEQ ID NO: 3888845 - RNA, 12 nt, Human
gcugccuguuca

SEQ ID NO: 3888846 - RNA, 17 nt, Human
gcugccuguucagcucc

SEQ ID NO: 3888847 - RNA, 20 nt, Human
gcugccuguucagcuccagc

SEQ ID NO: 3888848 - RNA, 15 nt, Human
gcugccuuagaaccu

SEQ ID NO: 3888849 - RNA, 12 nt, Human
gcugccuuagcu

SEQ ID NO: 3888850 - RNA, 14 nt, Human
gcugccuuagcuuc

SEQ ID NO: 3888851 - RNA, 19 nt, Human
gcugccuuauucagggaag

SEQ ID NO: 3888852 - RNA, 21 nt, Human
gcugccuuauucagggaagga

SEQ ID NO: 3888853 - RNA, 15 nt, Human
gcugccuucccuagc

SEQ ID NO: 3888854 - RNA, 20 nt, Human
gcugccuucgguacccacca

SEQ ID NO: 3888855 - RNA, 19 nt, Human
gcugccuucugacggcccu

SEQ ID NO: 3888856 - RNA, 22 nt, Human
gcugccuucugacggcccugca

SEQ ID NO: 3888857 - RNA, 23 nt, Human
gcugccuucugacggcccugcaa

SEQ ID NO: 3888858 - RNA, 14 nt, Human
gcugccuuggcuca

SEQ ID NO: 3888859 - RNA, 17 nt, Human
gcugccuuggcucagac

SEQ ID NO: 3888860 - RNA, 19 nt, Human
gcugccuuggcucagacau

SEQ ID NO: 3888861 - RNA, 20 nt, Human
gcugccuuuggacuuguccc

SEQ ID NO: 3888862 - RNA, 15 nt, Human
gcugcggagcaagag

SEQ ID NO: 3888863 - RNA, 16 nt, Human
gcugcggagcaagagg

SEQ ID NO: 3888864 - RNA, 15 nt, Human
gcugcggcacccuug

SEQ ID NO: 3888865 - RNA, 15 nt, Human
gcugcggccccuccc

SEQ ID NO: 3888866 - RNA, 14 nt, Human
gcugcgguccaccc

SEQ ID NO: 3888867 - RNA, 15 nt, Human
gcugcgguccaccca

SEQ ID NO: 3888868 - RNA, 22 nt, Human
gcugcgguccacccaggagccc

SEQ ID NO: 3888869 - RNA, 22 nt, Human
gcugcgucuggaggggccccug

SEQ ID NO: 3888870 - RNA, 16 nt, Human
gcugcguuuccugugc

SEQ ID NO: 3888871 - RNA, 18 nt, Human
gcugcuaaaucuccuauu

SEQ ID NO: 3888872 - RNA, 22 nt, Human
gcugcuaauauuuuccuccuga

SEQ ID NO: 3888873 - RNA, 23 nt, Human
gcugcuaauauuuuccuccugag

SEQ ID NO: 3888874 - RNA, 15 nt, Human
gcugcuaaucuucag

SEQ ID NO: 3888875 - RNA, 16 nt, Human
gcugcuacaaagaaga

SEQ ID NO: 3888876 - RNA, 17 nt, Human
gcugcuacaaagaagac

SEQ ID NO: 3888877 - RNA, 19 nt, Human
gcugcuacaaagaagacau

SEQ ID NO: 3888878 - RNA, 12 nt, Human
gcugcuacccag

SEQ ID NO: 3888879 - RNA, 18 nt, Human
gcugcuacccucccugcu

SEQ ID NO: 3888880 - RNA, 19 nt, Human
gcugcuacccucccugcug

SEQ ID NO: 3888881 - RNA, 14 nt, Human
gcugcuagaacuuu

SEQ ID NO: 3888882 - RNA, 19 nt, Human
gcugcuagaacuuuuuuaa

SEQ ID NO: 3888883 - RNA, 19 nt, Human
gcugcuagagugacucacu

SEQ ID NO: 3888884 - RNA, 19 nt, Human
gcugcuagcacuuggagcc

SEQ ID NO: 3888885 - RNA, 22 nt, Human
gcugcuauccccaucucccugc

SEQ ID NO: 3888886 - RNA, 18 nt, Human
gcugcuauuuauuuuccu

SEQ ID NO: 3888887 - RNA, 19 nt, Human
gcugcuauuuauuuuccua

SEQ ID NO: 3888888 - RNA, 20 nt, Human
gcugcucagggaaaagcagc

SEQ ID NO: 3888889 - RNA, 19 nt, Human
gcugcucaucugauuuuug

SEQ ID NO: 3888890 - RNA, 19 nt, Human
gcugggguggggaccucag

SEQ ID NO: 3888891 - RNA, 22 nt, Human
gcugggguggggaccucaggcc

SEQ ID NO: 3888892 - RNA, 14 nt, Human
gcugggguuaucug

SEQ ID NO: 3888893 - RNA, 14 nt, Human
gcugggucaggcag

SEQ ID NO: 3888894 - RNA, 18 nt, Human
gcugggucgcccuggacu

SEQ ID NO: 3888895 - RNA, 19 nt, Human
gcugggucgcccuggacug

SEQ ID NO: 3888896 - RNA, 22 nt, Human
gcugggugcgaccccaucugcc

SEQ ID NO: 3888897 - RNA, 23 nt, Human
gcuggguggcaccagcagccugg

SEQ ID NO: 3888898 - RNA, 15 nt, Human
gcuggguggcacugc

SEQ ID NO: 3888899 - RNA, 21 nt, Human
gcuggguggcccauccccccu

SEQ ID NO: 3888900 - RNA, 17 nt, Human
gcugggugguacccucu

SEQ ID NO: 3888901 - RNA, 16 nt, Human
gcuggguucauuugug

SEQ ID NO: 3888902 - RNA, 17 nt, Human
gcuggguucuacccagg

SEQ ID NO: 3888903 - RNA, 15 nt, Human
gcuggguuggaaaac

SEQ ID NO: 3888904 - RNA, 17 nt, Human
gcuggguuggcgcaccc

SEQ ID NO: 3888905 - RNA, 21 nt, Human
gcuggguuggcgcacccuccc

SEQ ID NO: 3888906 - RNA, 15 nt, Human
gcugguaaacuauuu

SEQ ID NO: 3888907 - RNA, 16 nt, Human
gcugguaacaguucau

SEQ ID NO: 3888908 - RNA, 22 nt, Human
gcugguaacaguucauguuugc

SEQ ID NO: 3888909 - RNA, 23 nt, Human
gcugguaagggccaagucccacc

SEQ ID NO: 3888910 - RNA, 23 nt, Human
gcugguaauuuguaucugaagga

SEQ ID NO: 3888911 - RNA, 17 nt, Human
gcugguagagauggagg

SEQ ID NO: 3888912 - RNA, 23 nt, Human
gcugguagagauggaggaggagg

SEQ ID NO: 3888913 - RNA, 13 nt, Human
gcugguagcucag

SEQ ID NO: 3888914 - RNA, 19 nt, Human
gcugguaggcuccugccag

SEQ ID NO: 3888915 - RNA, 13 nt, Human
gcugguaguuagu

SEQ ID NO: 3888916 - RNA, 15 nt, Human
gcugguaucucagaa

SEQ ID NO: 3888917 - RNA, 18 nt, Human
gcugguaucucagaaagu

SEQ ID NO: 3888918 - RNA, 22 nt, Human
gcuggucaaacaaacucucuga

SEQ ID NO: 3888919 - RNA, 15 nt, Human
gcuggucacagccuc

SEQ ID NO: 3888920 - RNA, 18 nt, Human
gcuggucacagccuccuc

SEQ ID NO: 3888921 - RNA, 13 nt, Human
gcuggucacugcc

SEQ ID NO: 3888922 - RNA, 14 nt, Human
gcuggucacuucuu

SEQ ID NO: 3888923 - RNA, 22 nt, Human
gcuggucacuucuucuguccaa

SEQ ID NO: 3888924 - RNA, 22 nt, Human
gcuggucauguguuugaacuuc

SEQ ID NO: 3888925 - RNA, 19 nt, Human
gcugguccagggcuaguga

SEQ ID NO: 3888926 - RNA, 15 nt, Human
gcuggucccacucag

SEQ ID NO: 3888927 - RNA, 23 nt, Human
gcuggucccagccagcaguucag

SEQ ID NO: 3888928 - RNA, 20 nt, Human
gcugguccuauggccucaug

SEQ ID NO: 3888929 - RNA, 17 nt, Human
gcugguccuuucuuccg

SEQ ID NO: 3888930 - RNA, 22 nt, Human
gcuggucguaaacaucucagag

SEQ ID NO: 3888931 - RNA, 18 nt, Human
gcuggucuagucacgcau

SEQ ID NO: 3888932 - RNA, 19 nt, Human
gcuggucucaaacuccuga

SEQ ID NO: 3888933 - RNA, 20 nt, Human
gcuggugcagagcugaagau

SEQ ID NO: 3888934 - RNA, 17 nt, Human
gcuggugcauuacagag

SEQ ID NO: 3888935 - RNA, 20 nt, Human
gcuggugcauuacagagagg

SEQ ID NO: 3888936 - RNA, 13 nt, Human
gcuggugcccgga

SEQ ID NO: 3888937 - RNA, 24 nt, Human
gcuggugcccugcuuucagauacu

SEQ ID NO: 3888938 - RNA, 17 nt, Human
gcuggugcuguggccag

SEQ ID NO: 3888939 - RNA, 16 nt, Human
gcugguggacccaggg

SEQ ID NO: 3888940 - RNA, 14 nt, Human
gcugguggcagagu

SEQ ID NO: 3888941 - RNA, 13 nt, Human
gcugguggcccag

SEQ ID NO: 3888942 - RNA, 17 nt, Human
gcugguggcuaauggug

SEQ ID NO: 3888943 - RNA, 13 nt, Human
gcuggugggaggg

SEQ ID NO: 3888944 - RNA, 19 nt, Human
gcuggugggcaccaagagc

SEQ ID NO: 3888945 - RNA, 18 nt, Human
gcuggugggugccuaggc

SEQ ID NO: 3888946 - RNA, 12 nt, Human
gcugguguagcu

SEQ ID NO: 3888947 - RNA, 15 nt, Human
gcugguguagcuaca

SEQ ID NO: 3888948 - RNA, 17 nt, Human
gcugguguagcuacaga

SEQ ID NO: 3888949 - RNA, 21 nt, Human
gcugguguagcuacagagaaa

SEQ ID NO: 3888950 - RNA, 15 nt, Human
gcuggugucaccuga

SEQ ID NO: 3888951 - RNA, 16 nt, Human
gcuggugucaccugaa

SEQ ID NO: 3888952 - RNA, 18 nt, Human
gcuggugucaccugaaga

SEQ ID NO: 3888953 - RNA, 19 nt, Human
gcugguguccugaccaccc

SEQ ID NO: 3888954 - RNA, 15 nt, Human
gcuggugugguacag

SEQ ID NO: 3888955 - RNA, 20 nt, Human
gcuggugugguacagagaag

SEQ ID NO: 3888956 - RNA, 22 nt, Human
gcuggugugguacagagaagcc

SEQ ID NO: 3888957 - RNA, 23 nt, Human
gcuggugugguacagagaagcca

SEQ ID NO: 3888958 - RNA, 14 nt, Human
gcugguguuaacag

SEQ ID NO: 3888959 - RNA, 17 nt, Human
gcugguguuaacagaag

SEQ ID NO: 3888960 - RNA, 12 nt, Human
gcugguucugua

SEQ ID NO: 3888961 - RNA, 13 nt, Human
gcugguugcugug

SEQ ID NO: 3888962 - RNA, 16 nt, Human
gcugguugcugugugg

SEQ ID NO: 3888963 - RNA, 14 nt, Human
gcugguuuuccuaa

SEQ ID NO: 3888964 - RNA, 23 nt, Human
gcugguuuuccuaaaugcaguga

SEQ ID NO: 3888965 - RNA, 17 nt, Human
gcugguuuuggcaucuc

SEQ ID NO: 3888966 - RNA, 15 nt, Human
gcugguuuuucaguu

SEQ ID NO: 3888967 - RNA, 15 nt, Human
gcuguaaaacgcugu

SEQ ID NO: 3888968 - RNA, 12 nt, Human
gcuguaaaagca

SEQ ID NO: 3888969 - RNA, 19 nt, Human
gcuguaaauuuggcuucug

SEQ ID NO: 3888970 - RNA, 22 nt, Human
gcuguaaauuuggcuucuguug

SEQ ID NO: 3888971 - RNA, 16 nt, Human
gcuguaacuuaaaaua

SEQ ID NO: 3888972 - RNA, 16 nt, Human
gcuguaagaugucugu

SEQ ID NO: 3888973 - RNA, 17 nt, Human
gcuguaaggcaugaagg

SEQ ID NO: 3888974 - RNA, 18 nt, Human
gcuguaaggcaugaagga

SEQ ID NO: 3888975 - RNA, 13 nt, Human
gcuguaaggcucu

SEQ ID NO: 3888976 - RNA, 17 nt, Human
gcuguaaggcucuagau

SEQ ID NO: 3888977 - RNA, 19 nt, Human
gcuguaauguuaauauuga

SEQ ID NO: 3888978 - RNA, 16 nt, Human
gcuguacaaauauaag

SEQ ID NO: 3888979 - RNA, 12 nt, Human
gcuguacacugc

SEQ ID NO: 3888980 - RNA, 16 nt, Human
gcuguacacugcacga

SEQ ID NO: 3888981 - RNA, 17 nt, Human
gcuguacauacuuuuug

SEQ ID NO: 3888982 - RNA, 23 nt, Human
gcuguacugcucaggcugcagcu

SEQ ID NO: 3888983 - RNA, 20 nt, Human
gcuguacuucgucuucuaau

SEQ ID NO: 3888984 - RNA, 13 nt, Human
gcuguagaaggag

SEQ ID NO: 3888985 - RNA, 16 nt, Human
gcuguaguaggcauuu

SEQ ID NO: 3888986 - RNA, 18 nt, Human
gcuguauaaaaucagcca

SEQ ID NO: 3888987 - RNA, 15 nt, Human
gcuguauaaguuauu

SEQ ID NO: 3888988 - RNA, 15 nt, Human
gcuguauagcugcuu

SEQ ID NO: 3888989 - RNA, 23 nt, Human
gcuguaucccaugagccucagca

SEQ ID NO: 3888990 - RNA, 21 nt, Human
gcuguauuuuaaaagaaugau

SEQ ID NO: 3888991 - RNA, 18 nt, Human
gcugucaaguuccuuugg

SEQ ID NO: 3888992 - RNA, 20 nt, Human
gcugucaaugggaccugugg

SEQ ID NO: 3888993 - RNA, 22 nt, Human
gcugucaauuacaggaaguacu

SEQ ID NO: 3888994 - RNA, 23 nt, Human
gcugucaauuacaggaaguacug

SEQ ID NO: 3888995 - RNA, 13 nt, Human
gcugucacaggcg

SEQ ID NO: 3888996 - RNA, 16 nt, Human
gcugucaccaaggaaa

SEQ ID NO: 3888997 - RNA, 22 nt, Human
gcugucaccucucccacgggac

SEQ ID NO: 3888998 - RNA, 18 nt, Human
gcugucaucaauuaaagg

SEQ ID NO: 3888999 - RNA, 13 nt, Human
gcugucaucucag

SEQ ID NO: 3889000 - RNA, 15 nt, Human
gcugucaucugugca

SEQ ID NO: 3889001 - RNA, 15 nt, Human
gcugucauugcuucu

SEQ ID NO: 3889002 - RNA, 16 nt, Human
gcugucauugcuucuu

SEQ ID NO: 3889003 - RNA, 18 nt, Human
gcuguccagaaagguuug

SEQ ID NO: 3889004 - RNA, 15 nt, Human
gcuguccagacagcc

SEQ ID NO: 3889005 - RNA, 14 nt, Human
gcuguccagugccc

SEQ ID NO: 3889006 - RNA, 20 nt, Human
gcugucccauagucccugcc

SEQ ID NO: 3889007 - RNA, 21 nt, Human
gcugucccauagucccugcca

SEQ ID NO: 3889008 - RNA, 14 nt, Human
gcuguccccccacu

SEQ ID NO: 3889009 - RNA, 15 nt, Human
gcuguccccucuugc

SEQ ID NO: 3889010 - RNA, 17 nt, Human
gcuguccccucuugccc

SEQ ID NO: 3889011 - RNA, 18 nt, Human
gcuguccccucuugcccc

SEQ ID NO: 3889012 - RNA, 20 nt, Human
gcuguccccucuugccccaa

SEQ ID NO: 3889013 - RNA, 14 nt, Human
gcugucccggaggc

SEQ ID NO: 3889014 - RNA, 15 nt, Human
gcugucccugucacc

SEQ ID NO: 3889015 - RNA, 19 nt, Human
gcugucccuuacgugaguc

SEQ ID NO: 3889016 - RNA, 14 nt, Human
gcuguccuaggcca

SEQ ID NO: 3889017 - RNA, 13 nt, Human
gcuguccucaggu

SEQ ID NO: 3889018 - RNA, 15 nt, Human
gcuguccucccucca

SEQ ID NO: 3889019 - RNA, 14 nt, Human
gcuguccugaucug

SEQ ID NO: 3889020 - RNA, 15 nt, Human
gcuguccuggagggg

SEQ ID NO: 3889021 - RNA, 22 nt, Human
gcugucgauguaggcauucugg

SEQ ID NO: 3889022 - RNA, 18 nt, Human
gcugucggcgcugcccca

SEQ ID NO: 3889023 - RNA, 20 nt, Human
gcugucuacacuaagagaga

SEQ ID NO: 3889024 - RNA, 14 nt, Human
gcugucucugcucg

SEQ ID NO: 3889025 - RNA, 14 nt, Human
gcugucugcagccu

SEQ ID NO: 3889026 - RNA, 15 nt, Human
gcugucuggcacagc

SEQ ID NO: 3889027 - RNA, 13 nt, Human
gcugucuggccag

SEQ ID NO: 3889028 - RNA, 17 nt, Human
gcugucugggugcuacu

SEQ ID NO: 3889029 - RNA, 13 nt, Human
gcugucuucugga

SEQ ID NO: 3889030 - RNA, 23 nt, Human
gcugucuuguugcggauggaugg

SEQ ID NO: 3889031 - RNA, 16 nt, Human
gcugucuuucuugcuc

SEQ ID NO: 3889032 - RNA, 20 nt, Human
gcugucuuucuugcucccug

SEQ ID NO: 3889033 - RNA, 20 nt, Human
gcugugaacccuggggccug

SEQ ID NO: 3889034 - RNA, 22 nt, Human
gcugugaacccuggggccugac

SEQ ID NO: 3889035 - RNA, 20 nt, Human
gcugugaauuuguguaagga

SEQ ID NO: 3889036 - RNA, 22 nt, Human
gcugugacaauggcaacaauuu

SEQ ID NO: 3889037 - RNA, 22 nt, Human
gcugugaccauuuauaauguua

SEQ ID NO: 3889038 - RNA, 17 nt, Human
gcugugaccugcugagc

SEQ ID NO: 3889039 - RNA, 20 nt, Human
gcugugaccugcugagcucu

SEQ ID NO: 3889040 - RNA, 22 nt, Human
gcugugaccugcugagcucuga

SEQ ID NO: 3889041 - RNA, 16 nt, Human
gcugugacuucuccag

SEQ ID NO: 3889042 - RNA, 18 nt, Human
gcugugagacagugggaa

SEQ ID NO: 3889043 - RNA, 20 nt, Human
gcugugagacagugggaaau

SEQ ID NO: 3889044 - RNA, 23 nt, Human
gcugugagacagugggaaauauu

SEQ ID NO: 3889045 - RNA, 16 nt, Human
gcugugagccccuggu

SEQ ID NO: 3889046 - RNA, 22 nt, Human
gcugugaggccccuggacaagc

SEQ ID NO: 3889047 - RNA, 13 nt, Human
gcugugaggcugu

SEQ ID NO: 3889048 - RNA, 16 nt, Human
gcugugaggcuguccu

SEQ ID NO: 3889049 - RNA, 22 nt, Human
gcugugagucuuugguucuaag

SEQ ID NO: 3889050 - RNA, 18 nt, Human
gcugugaguguaagugug

SEQ ID NO: 3889051 - RNA, 19 nt, Human
gcugugaguucucccugua

SEQ ID NO: 3889052 - RNA, 20 nt, Human
gcugugauacgaugcuucaa

SEQ ID NO: 3889053 - RNA, 19 nt, Human
gcugugcaacggucuccug

SEQ ID NO: 3889054 - RNA, 19 nt, Human
gcugugcacaaaguggcau

SEQ ID NO: 3889055 - RNA, 18 nt, Human
gcugugcagcgcagcugg

SEQ ID NO: 3889056 - RNA, 20 nt, Human
gcugugcagcgcagcuggac

SEQ ID NO: 3889057 - RNA, 19 nt, Human
gcugugccacaggcuuagg

SEQ ID NO: 3889058 - RNA, 20 nt, Human
gcugugccacaggcuuaggg

SEQ ID NO: 3889059 - RNA, 12 nt, Human
gcugugccaccc

SEQ ID NO: 3889060 - RNA, 15 nt, Human
gcugugccacccugg

SEQ ID NO: 3889061 - RNA, 18 nt, Human
gcugugccacccugggcu

SEQ ID NO: 3889062 - RNA, 16 nt, Human
gcugugcccucuugau

SEQ ID NO: 3889063 - RNA, 17 nt, Human
gcugugcgcccagggcu

SEQ ID NO: 3889064 - RNA, 18 nt, Human
gcugugcgcccagggcug

SEQ ID NO: 3889065 - RNA, 21 nt, Human
gcugugcgcugacaaccaccg

SEQ ID NO: 3889066 - RNA, 18 nt, Human
gcugugcggaucucugga

SEQ ID NO: 3889067 - RNA, 16 nt, Human
gcugugcgugugugug

SEQ ID NO: 3889068 - RNA, 16 nt, Human
gcugugcuaugaauuu

SEQ ID NO: 3889069 - RNA, 13 nt, Human
gcugugcucugga

SEQ ID NO: 3889070 - RNA, 15 nt, Human
gcugugcucuggaca

SEQ ID NO: 3889071 - RNA, 18 nt, Human
gcugugcucuggacaggc

SEQ ID NO: 3889072 - RNA, 20 nt, Human
gcuguggagacaaugucugc

SEQ ID NO: 3889073 - RNA, 23 nt, Human
gcuguggaggauugcuaucugga

SEQ ID NO: 3889074 - RNA, 15 nt, Human
gcuguggccaggagg

SEQ ID NO: 3889075 - RNA, 20 nt, Human
gcuguggccaggaggugcca

SEQ ID NO: 3889076 - RNA, 17 nt, Human
gcuguggccagggugag

SEQ ID NO: 3889077 - RNA, 19 nt, Human
gcuguggccuaaccugccg

SEQ ID NO: 3889078 - RNA, 13 nt, Human
gcuguggcuggug

SEQ ID NO: 3889079 - RNA, 14 nt, Human
gcugugggaacgag

SEQ ID NO: 3889080 - RNA, 13 nt, Human
gcugugggcaggu

SEQ ID NO: 3889081 - RNA, 14 nt, Human
gcugugggcaggug

SEQ ID NO: 3889082 - RNA, 12 nt, Human
gcugugggcucc

SEQ ID NO: 3889083 - RNA, 13 nt, Human
gcugugggcuccc

SEQ ID NO: 3889084 - RNA, 14 nt, Human
gcugugggcucccu

SEQ ID NO: 3889085 - RNA, 16 nt, Human
gcuguggggcugguag

SEQ ID NO: 3889086 - RNA, 22 nt, Human
gcuguggggcugguagcucagg

SEQ ID NO: 3889087 - RNA, 18 nt, Human
gcuguggguacagagagg

SEQ ID NO: 3889088 - RNA, 13 nt, Human
gcuguggucucuu

SEQ ID NO: 3889089 - RNA, 13 nt, Human
gcugugguuccug

SEQ ID NO: 3889090 - RNA, 11 nt, Human
gcuguguaaag

SEQ ID NO: 3889091 - RNA, 12 nt, Human
gcuguguaaagu

SEQ ID NO: 3889092 - RNA, 19 nt, Human
gcuguguccuugcaccugc

SEQ ID NO: 3889093 - RNA, 15 nt, Human
gcugugucuaaacug

SEQ ID NO: 3889094 - RNA, 16 nt, Human
gcugugucuaaacugc

SEQ ID NO: 3889095 - RNA, 13 nt, Human
gcugugugcaguc

SEQ ID NO: 3889096 - RNA, 16 nt, Human
gcugugugcucuccaa

SEQ ID NO: 3889097 - RNA, 20 nt, Human
gcugugugucccaggcaggg

SEQ ID NO: 3889098 - RNA, 23 nt, Human
gcugugugucccaggcagggaga

SEQ ID NO: 3889099 - RNA, 18 nt, Human
gcuguguguuaguuccca

SEQ ID NO: 3889100 - RNA, 18 nt, Human
gcuguguuaaauaaaccu

SEQ ID NO: 3889101 - RNA, 17 nt, Human
gcuguguuugcuccccu

SEQ ID NO: 3889102 - RNA, 12 nt, Human
gcuguuaaacug

SEQ ID NO: 3889103 - RNA, 13 nt, Human
gcuguuaaacugu

SEQ ID NO: 3889104 - RNA, 22 nt, Human
gcuguuaaacuguuagcacugu

SEQ ID NO: 3889105 - RNA, 15 nt, Human
gcuguuaaauacagg

SEQ ID NO: 3889106 - RNA, 18 nt, Human
gcuguuaauagaucuuag

SEQ ID NO: 3889107 - RNA, 17 nt, Human
gcuguuacaguuuucuu

SEQ ID NO: 3889108 - RNA, 18 nt, Human
gcuguuaccauucacaau

SEQ ID NO: 3889109 - RNA, 19 nt, Human
gcuguuaugucuguuuaag

SEQ ID NO: 3889110 - RNA, 23 nt, Human
gcuguuauuuagguauuuuucuu

SEQ ID NO: 3889111 - RNA, 16 nt, Human
gcuguucacagccaga

SEQ ID NO: 3889112 - RNA, 21 nt, Human
gcuguuccuguucaguaauaa

SEQ ID NO: 3889113 - RNA, 15 nt, Human
gcuguucuacuuuuu

SEQ ID NO: 3889114 - RNA, 13 nt, Human
gcuguucugcacu

SEQ ID NO: 3889115 - RNA, 14 nt, Human
gcuguucugcacug

SEQ ID NO: 3889116 - RNA, 13 nt, Human
gcuguucuuccug

SEQ ID NO: 3889117 - RNA, 12 nt, Human
gcuguucuucug

SEQ ID NO: 3889118 - RNA, 20 nt, Human
gcuguugaaagcaaaaaugc

SEQ ID NO: 3889119 - RNA, 16 nt, Human
gcuguugaagucucag

SEQ ID NO: 3889120 - RNA, 15 nt, Human
gcuguugaccaggca

SEQ ID NO: 3889121 - RNA, 16 nt, Human
gcuguugagcuguuuu

SEQ ID NO: 3889122 - RNA, 15 nt, Human
gcuguugauugcuaa

SEQ ID NO: 3889123 - RNA, 19 nt, Human
gcuguugauugcuaaaugu

SEQ ID NO: 3889124 - RNA, 20 nt, Human
gcuguugauugcuaaaugua

SEQ ID NO: 3889125 - RNA, 15 nt, Human
gcuguugccucaucu

SEQ ID NO: 3889126 - RNA, 12 nt, Human
gcuguugcugaa

SEQ ID NO: 3889127 - RNA, 19 nt, Human
gcuguugcugaauaggcga

SEQ ID NO: 3889128 - RNA, 12 nt, Human
gcuguugcuuga

SEQ ID NO: 3889129 - RNA, 22 nt, Human
gcuguuggcacucacagaccug

SEQ ID NO: 3889130 - RNA, 15 nt, Human
gcuguuggcuggggg

SEQ ID NO: 3889131 - RNA, 22 nt, Human
gcuguuggcugggggccucagu

SEQ ID NO: 3889132 - RNA, 17 nt, Human
gcuguugucucuucucc

SEQ ID NO: 3889133 - RNA, 14 nt, Human
gcuguuguuaugau

SEQ ID NO: 3889134 - RNA, 15 nt, Human
gcuguuguuaugaug

SEQ ID NO: 3889135 - RNA, 19 nt, Human
gcuguuuaucccuuaagaa

SEQ ID NO: 3889136 - RNA, 15 nt, Human
gcuguuuauggccuc

SEQ ID NO: 3889137 - RNA, 22 nt, Human
gcuguuuauggccucagcugcc

SEQ ID NO: 3889138 - RNA, 23 nt, Human
gcuguuuauggccucagcugccu

SEQ ID NO: 3889139 - RNA, 19 nt, Human
gcuguuugagauucucaaa

SEQ ID NO: 3889140 - RNA, 14 nt, Human
gcuguuugcuucac

SEQ ID NO: 3889141 - RNA, 12 nt, Human
gcuguuuggaaa

SEQ ID NO: 3889142 - RNA, 16 nt, Human
gcuguuugguuuuaaa

SEQ ID NO: 3889143 - RNA, 19 nt, Human
gcuguuugguuuuaaaaua

SEQ ID NO: 3889144 - RNA, 18 nt, Human
gcuguuuuccucccuucu

SEQ ID NO: 3889145 - RNA, 13 nt, Human
gcuguuuuguuau

SEQ ID NO: 3889146 - RNA, 16 nt, Human
gcuguuuuguuauaua

SEQ ID NO: 3889147 - RNA, 19 nt, Human
gcuguuuuguuauauaauu

SEQ ID NO: 3889148 - RNA, 23 nt, Human
gcuguuuuguuauauaauuuaga

SEQ ID NO: 3889149 - RNA, 19 nt, Human
gcuguuuuguugacauucu

SEQ ID NO: 3889150 - RNA, 18 nt, Human
gcuuaaaacuuugaaguu

SEQ ID NO: 3889151 - RNA, 20 nt, Human
gcuuaaaagaaaauguucac

SEQ ID NO: 3889152 - RNA, 22 nt, Human
gcuuaaaauaaacaguugugaa

SEQ ID NO: 3889153 - RNA, 13 nt, Human
gcuuaaaauacaa

SEQ ID NO: 3889154 - RNA, 22 nt, Human
gcuuaaacccauauuguaaaac

SEQ ID NO: 3889155 - RNA, 16 nt, Human
gcuuaaaggugucuuc

SEQ ID NO: 3889156 - RNA, 21 nt, Human
gcuuaaaguugguauuaauaa

SEQ ID NO: 3889157 - RNA, 23 nt, Human
gcuuaaauauaguuccuaagaag

SEQ ID NO: 3889158 - RNA, 14 nt, Human
gcuuaaaugugaau

SEQ ID NO: 3889159 - RNA, 16 nt, Human
gcuuaaauuucuuaug

SEQ ID NO: 3889160 - RNA, 18 nt, Human
gcuuaagccacugccucu

SEQ ID NO: 3889161 - RNA, 12 nt, Human
gcuuaaugaaaa

SEQ ID NO: 3889162 - RNA, 16 nt, Human
gcuuaaugcuacaugu

SEQ ID NO: 3889163 - RNA, 16 nt, Human
gcuuaaugcuucuuuc

SEQ ID NO: 3889164 - RNA, 18 nt, Human
gcuuaauggaguucuugu

SEQ ID NO: 3889165 - RNA, 17 nt, Human
gcuuaauguuuauuccu

SEQ ID NO: 3889166 - RNA, 13 nt, Human
gcuuaauuccaau

SEQ ID NO: 3889167 - RNA, 12 nt, Human
gcuuaauuucua

SEQ ID NO: 3889168 - RNA, 18 nt, Human
gcuuaauuucuaaagaua

SEQ ID NO: 3889169 - RNA, 19 nt, Human
gcuuacaauucccugcugu

SEQ ID NO: 3889170 - RNA, 19 nt, Human
gcuuacaauuuuuuuaauu

SEQ ID NO: 3889171 - RNA, 13 nt, Human
gcuuaccuccuca

SEQ ID NO: 3889172 - RNA, 22 nt, Human
gcuuaccugaccucuugcuguc

SEQ ID NO: 3889173 - RNA, 12 nt, Human
gcuuaccuggcc

SEQ ID NO: 3889174 - RNA, 22 nt, Human
gcuuacguaguucuaccggcuu

SEQ ID NO: 3889175 - RNA, 11 nt, Human
gcuuacucugu

SEQ ID NO: 3889176 - RNA, 21 nt, Human
gcuuacugauauauuuuacaa

SEQ ID NO: 3889177 - RNA, 20 nt, Human
gcuuacuuuggaauacauuu

SEQ ID NO: 3889178 - RNA, 21 nt, Human
gcuuagacccucaugcugcca

SEQ ID NO: 3889179 - RNA, 19 nt, Human
gcuuagaccucagccugug

SEQ ID NO: 3889180 - RNA, 21 nt, Human
guuguggccuuugcgcuccug

SEQ ID NO: 3889181 - RNA, 18 nt, Human
guuguggguaguggggaa

SEQ ID NO: 3889182 - RNA, 15 nt, Human
guugugggugggaga

SEQ ID NO: 3889183 - RNA, 16 nt, Human
guugugggugggagag

SEQ ID NO: 3889184 - RNA, 17 nt, Human
guuguguaagagaaugu

SEQ ID NO: 3889185 - RNA, 12 nt, Human
guuguguguggg

SEQ ID NO: 3889186 - RNA, 14 nt, Human
guugugugugggag

SEQ ID NO: 3889187 - RNA, 23 nt, Human
guuguuaaaauuaugaaucugau

SEQ ID NO: 3889188 - RNA, 16 nt, Human
guuguuaaugaaaaug

SEQ ID NO: 3889189 - RNA, 17 nt, Human
guuguuaaugaaaaugu

SEQ ID NO: 3889190 - RNA, 19 nt, Human
guuguuaaugaaaauguca

SEQ ID NO: 3889191 - RNA, 11 nt, Human
guuguuagaga

SEQ ID NO: 3889192 - RNA, 14 nt, Human
guuguuaucuguuu

SEQ ID NO: 3889193 - RNA, 15 nt, Human
guuguuaugaugugc

SEQ ID NO: 3889194 - RNA, 14 nt, Human
guuguucuguuaac

SEQ ID NO: 3889195 - RNA, 18 nt, Human
guuguugcuucuugugaa

SEQ ID NO: 3889196 - RNA, 16 nt, Human
guuguuguuaaauauc

SEQ ID NO: 3889197 - RNA, 16 nt, Human
guuguuuauaauaaaa

SEQ ID NO: 3889198 - RNA, 13 nt, Human
guuguuucuguuc

SEQ ID NO: 3889199 - RNA, 20 nt, Human
guuguuucuuaauuuggaaa

SEQ ID NO: 3889200 - RNA, 15 nt, Human
guuguuucuuucuag

SEQ ID NO: 3889201 - RNA, 20 nt, Human
guuguuugauucagacagcu

SEQ ID NO: 3889202 - RNA, 13 nt, Human
guuguuuguaaau

SEQ ID NO: 3889203 - RNA, 15 nt, Human
guuguuuguaaauaa

SEQ ID NO: 3889204 - RNA, 21 nt, Human
guuguuuuuguauauugguuu

SEQ ID NO: 3889205 - RNA, 19 nt, Human
guuguuuuuugaaaacaug

SEQ ID NO: 3889206 - RNA, 21 nt, Human
guuuaaaauaaaaugaaaauu

SEQ ID NO: 3889207 - RNA, 19 nt, Human
guuuaaaauguaauuuaaa

SEQ ID NO: 3889208 - RNA, 15 nt, Human
guuuaaagaaagugu

SEQ ID NO: 3889209 - RNA, 18 nt, Human
guuuaaagagucuagauu

SEQ ID NO: 3889210 - RNA, 19 nt, Human
guuuaaaguguauuauaac

SEQ ID NO: 3889211 - RNA, 21 nt, Human
guuuaaaguguauuauaacag

SEQ ID NO: 3889212 - RNA, 20 nt, Human
guuuaaaguucuguguauuu

SEQ ID NO: 3889213 - RNA, 21 nt, Human
guuuaaaguucuguguauuua

SEQ ID NO: 3889214 - RNA, 13 nt, Human
guuuaaauaaagu

SEQ ID NO: 3889215 - RNA, 14 nt, Human
guuuaaauaaagua

SEQ ID NO: 3889216 - RNA, 14 nt, Human
guuuaaauauuuca

SEQ ID NO: 3889217 - RNA, 11 nt, Human
guuuaaaugaa

SEQ ID NO: 3889218 - RNA, 23 nt, Human
guuuaaaugaacaagagaagcau

SEQ ID NO: 3889219 - RNA, 13 nt, Human
guuuaaaugguca

SEQ ID NO: 3889220 - RNA, 21 nt, Human
guuuaacaaaauguaugugag

SEQ ID NO: 3889221 - RNA, 13 nt, Human
guuuaacauaaag

SEQ ID NO: 3889222 - RNA, 15 nt, Human
guuuaacauaaaggu

SEQ ID NO: 3889223 - RNA, 14 nt, Human
guuuaacucagauc

SEQ ID NO: 3889224 - RNA, 19 nt, Human
guuuaacucagaucacuac

SEQ ID NO: 3889225 - RNA, 17 nt, Human
guuuaagaccagccugg

SEQ ID NO: 3889226 - RNA, 12 nt, Human
guuuaagauuua

SEQ ID NO: 3889227 - RNA, 23 nt, Human
guuuaaggaauaugggagaaaua

SEQ ID NO: 3889228 - RNA, 15 nt, Human
guuuaaguagauuuc

SEQ ID NO: 3889229 - RNA, 21 nt, Human
guuuaagugacugauggcuaa

SEQ ID NO: 3889230 - RNA, 22 nt, Human
guuuaauaaagcgaaaaacuca

SEQ ID NO: 3889231 - RNA, 20 nt, Human
guuuaauacucauccuugua

SEQ ID NO: 3889232 - RNA, 17 nt, Human
guuuaauagagaaggaa

SEQ ID NO: 3889233 - RNA, 18 nt, Human
guuuaauauuaaagccau

SEQ ID NO: 3889234 - RNA, 19 nt, Human
guuuaauauuaaagccaug

SEQ ID NO: 3889235 - RNA, 20 nt, Human
guuuaauauuaaagccaugu

SEQ ID NO: 3889236 - RNA, 21 nt, Human
guuuaauauuaccuaaugaaa

SEQ ID NO: 3889237 - RNA, 19 nt, Human
guuuaauccccaguaaaau

SEQ ID NO: 3889238 - RNA, 18 nt, Human
guuuaaugaaugcuuaaa

SEQ ID NO: 3889239 - RNA, 20 nt, Human
guuuaaugguaguuuuacag

SEQ ID NO: 3889240 - RNA, 18 nt, Human
guuuaaugugaacuugua

SEQ ID NO: 3889241 - RNA, 20 nt, Human
guuuaauguucugugauaca

SEQ ID NO: 3889242 - RNA, 19 nt, Human
guuuaauuuuauaaacaaa

SEQ ID NO: 3889243 - RNA, 20 nt, Human
guuuacaaaaauuucuguaa

SEQ ID NO: 3889244 - RNA, 18 nt, Human
guuuacaaguguauauca

SEQ ID NO: 3889245 - RNA, 23 nt, Human
guuuacaaguguauaucagaaaa

SEQ ID NO: 3889246 - RNA, 18 nt, Human
guuuacaauuuacaaagu

SEQ ID NO: 3889247 - RNA, 21 nt, Human
guuuacacacgugcaauuugu

SEQ ID NO: 3889248 - RNA, 14 nt, Human
guuuacagaaaaau

SEQ ID NO: 3889249 - RNA, 18 nt, Human
guuuacaggcccugcucc

SEQ ID NO: 3889250 - RNA, 18 nt, Human
guuuacagggagccuccu

SEQ ID NO: 3889251 - RNA, 17 nt, Human
guuuacagguggacaca

SEQ ID NO: 3889252 - RNA, 13 nt, Human
guuuacaguaaau

SEQ ID NO: 3889253 - RNA, 21 nt, Human
guuuacagucuauuugagacu

SEQ ID NO: 3889254 - RNA, 22 nt, Human
guuuacauagucugaagugaag

SEQ ID NO: 3889255 - RNA, 15 nt, Human
guuuacauuuaaagc

SEQ ID NO: 3889256 - RNA, 22 nt, Human
guuuacauuuuauggugccuag

SEQ ID NO: 3889257 - RNA, 21 nt, Human
guuuacauuuuuauuuaugaa

SEQ ID NO: 3889258 - RNA, 22 nt, Human
guuuacauuuuuauuuaugaag

SEQ ID NO: 3889259 - RNA, 13 nt, Human
guuuaccauuugu

SEQ ID NO: 3889260 - RNA, 16 nt, Human
guuuaccauuuguaau

SEQ ID NO: 3889261 - RNA, 18 nt, Human
guuuaccauuuguaauaa

SEQ ID NO: 3889262 - RNA, 21 nt, Human
guuuaccauuuguaauaaagu

SEQ ID NO: 3889263 - RNA, 13 nt, Human
guuuaccuagaag

SEQ ID NO: 3889264 - RNA, 16 nt, Human
guuuaccugugaaaua

SEQ ID NO: 3889265 - RNA, 12 nt, Human
guuuaccuugua

SEQ ID NO: 3889266 - RNA, 13 nt, Human
guuuaccuuucuc

SEQ ID NO: 3889267 - RNA, 22 nt, Human
guuuacuagggaucccucaucu

SEQ ID NO: 3889268 - RNA, 17 nt, Human
guuuacuaugccugugu

SEQ ID NO: 3889269 - RNA, 18 nt, Human
guuuacuuaucuuaugcc

SEQ ID NO: 3889270 - RNA, 14 nt, Human
guuuacuuuaacuu

SEQ ID NO: 3889271 - RNA, 13 nt, Human
guuuacuuucaaa

SEQ ID NO: 3889272 - RNA, 14 nt, Human
guuuacuuucaaau

SEQ ID NO: 3889273 - RNA, 19 nt, Human
guuuacuuuucagggcauc

SEQ ID NO: 3889274 - RNA, 13 nt, Human
guuuagaaagcuu

SEQ ID NO: 3889275 - RNA, 17 nt, Human
guuuagaaagcuugccc

SEQ ID NO: 3889276 - RNA, 12 nt, Human
guuuagaacagg

SEQ ID NO: 3889277 - RNA, 22 nt, Human
guuuagaagcugagacacaaag

SEQ ID NO: 3889278 - RNA, 14 nt, Human
guuuagaauugaag

SEQ ID NO: 3889279 - RNA, 12 nt, Human
guuuagaccaag

SEQ ID NO: 3889280 - RNA, 20 nt, Human
guuuagaccaaggaacaaaa

SEQ ID NO: 3889281 - RNA, 19 nt, Human
guuuagagaaugagaaaug

SEQ ID NO: 3889282 - RNA, 14 nt, Human
guuuagauaauaca

SEQ ID NO: 3889283 - RNA, 15 nt, Human
guuuagauaauacac

SEQ ID NO: 3889284 - RNA, 12 nt, Human
guuuagauuugc

SEQ ID NO: 3889285 - RNA, 17 nt, Human
guuuagauuuuguguuu

SEQ ID NO: 3889286 - RNA, 12 nt, Human
guuuagcaaaua

SEQ ID NO: 3889287 - RNA, 17 nt, Human
guuuagcagcagccuuu

SEQ ID NO: 3889288 - RNA, 12 nt, Human
guuuagcucuga

SEQ ID NO: 3889289 - RNA, 14 nt, Human
guuuagcucugaga

SEQ ID NO: 3889290 - RNA, 15 nt, Human
guuuagcucugagaa

SEQ ID NO: 3889291 - RNA, 16 nt, Human
guuuagcucugagaac

SEQ ID NO: 3889292 - RNA, 22 nt, Human
guuuaggcuauuuguaaaucug

SEQ ID NO: 3889293 - RNA, 18 nt, Human
guuuaggcugguggccca

SEQ ID NO: 3889294 - RNA, 16 nt, Human
guuuagggaacaauuu

SEQ ID NO: 3889295 - RNA, 18 nt, Human
guuuaguaaggcugugua

SEQ ID NO: 3889296 - RNA, 16 nt, Human
guuuaguaaucauauu

SEQ ID NO: 3889297 - RNA, 14 nt, Human
guuuagucuugucu

SEQ ID NO: 3889298 - RNA, 22 nt, Human
guuuagugcaucuuugccucuc

SEQ ID NO: 3889299 - RNA, 13 nt, Human
guuuaguguaaaa

SEQ ID NO: 3889300 - RNA, 16 nt, Human
guuuaguguaaaaaug

SEQ ID NO: 3889301 - RNA, 20 nt, Human
guuuaguguaaaaaugagaa

SEQ ID NO: 3889302 - RNA, 15 nt, Human
guuuaguuugcauuu

SEQ ID NO: 3889303 - RNA, 14 nt, Human
guuuauaauaaaaa

SEQ ID NO: 3889304 - RNA, 19 nt, Human
guuuauacacuguguaaau

SEQ ID NO: 3889305 - RNA, 20 nt, Human
guuuauagcaaacuuggaau

SEQ ID NO: 3889306 - RNA, 21 nt, Human
guuuauauuuuuucaguuguu

SEQ ID NO: 3889307 - RNA, 16 nt, Human
guuuaucagauacauc

SEQ ID NO: 3889308 - RNA, 15 nt, Human
guuuaucagcaaaaa

SEQ ID NO: 3889309 - RNA, 16 nt, Human
guuuaucaugaagccu

SEQ ID NO: 3889310 - RNA, 17 nt, Human
guuuaucaugaagccug

SEQ ID NO: 3889311 - RNA, 15 nt, Human
guuuaucauucaagu

SEQ ID NO: 3889312 - RNA, 17 nt, Human
guuuaucauucaagugu

SEQ ID NO: 3889313 - RNA, 22 nt, Human
guuuauccuuucauauaguuag

SEQ ID NO: 3889314 - RNA, 12 nt, Human
guuuaugaaaau

SEQ ID NO: 3889315 - RNA, 17 nt, Human
guuuaugacaguaauug

SEQ ID NO: 3889316 - RNA, 21 nt, Human
guuuaugagaugcugguuuuc

SEQ ID NO: 3889317 - RNA, 13 nt, Human
guuuauggccuca

SEQ ID NO: 3889318 - RNA, 15 nt, Human
guuuauggccucagc

SEQ ID NO: 3889319 - RNA, 18 nt, Human
guuuauggccucagcugc

SEQ ID NO: 3889320 - RNA, 23 nt, Human
guuuauggccucagcugccucac

SEQ ID NO: 3889321 - RNA, 18 nt, Human
guuuauguaaauguuugu

SEQ ID NO: 3889322 - RNA, 13 nt, Human
guuuaugucuaaa

SEQ ID NO: 3889323 - RNA, 23 nt, Human
guuuaugugcuauuaauauuugu

SEQ ID NO: 3889324 - RNA, 16 nt, Human
guuuaugugugugugu

SEQ ID NO: 3889325 - RNA, 21 nt, Human
guuuuagauuuucugguucua

SEQ ID NO: 3889326 - RNA, 21 nt, Human
guuuuagcuccuugacuccuu

SEQ ID NO: 3889327 - RNA, 23 nt, Human
guuuuaggucuagccuaugugga

SEQ ID NO: 3889328 - RNA, 14 nt, Human
guuuuaguugcaga

SEQ ID NO: 3889329 - RNA, 21 nt, Human
guuuuaguugcagaaacauuu

SEQ ID NO: 3889330 - RNA, 14 nt, Human
guuuuauaaaauag

SEQ ID NO: 3889331 - RNA, 16 nt, Human
guuuuauaauccuuaa

SEQ ID NO: 3889332 - RNA, 22 nt, Human
guuuuauaauuuugugaagcaa

SEQ ID NO: 3889333 - RNA, 23 nt, Human
guuuuauacuguacuuaauaaau

SEQ ID NO: 3889334 - RNA, 12 nt, Human
guuuuauauauu

SEQ ID NO: 3889335 - RNA, 20 nt, Human
guuuuaucacauguauguuu

SEQ ID NO: 3889336 - RNA, 14 nt, Human
guuuuaucaugaca

SEQ ID NO: 3889337 - RNA, 14 nt, Human
guuuuauucauugg

SEQ ID NO: 3889338 - RNA, 14 nt, Human
guuuuauuccugua

SEQ ID NO: 3889339 - RNA, 20 nt, Human
guuuuauuccuguauguugu

SEQ ID NO: 3889340 - RNA, 13 nt, Human
guuuuauuguguu

SEQ ID NO: 3889341 - RNA, 14 nt, Human
guuuuauuuuaugu

SEQ ID NO: 3889342 - RNA, 21 nt, Human
guuuuauuuucuaaaguacug

SEQ ID NO: 3889343 - RNA, 21 nt, Human
guuuuauuuuuuauuguuuuc

SEQ ID NO: 3889344 - RNA, 14 nt, Human
guuuucaaauggag

SEQ ID NO: 3889345 - RNA, 23 nt, Human
guuuucaaauuggacuuucaaaa

SEQ ID NO: 3889346 - RNA, 23 nt, Human
guuuucaacucuucccugaacuu

SEQ ID NO: 3889347 - RNA, 11 nt, Human
guuuucacucu

SEQ ID NO: 3889348 - RNA, 12 nt, Human
guuuucacucuu

SEQ ID NO: 3889349 - RNA, 22 nt, Human
guuuucaggugcucaaaaugca

SEQ ID NO: 3889350 - RNA, 16 nt, Human
guuuucaguguacaug

SEQ ID NO: 3889351 - RNA, 17 nt, Human
guuuucauauuuuucaa

SEQ ID NO: 3889352 - RNA, 19 nt, Human
guuuucauccauaacugaa

SEQ ID NO: 3889353 - RNA, 20 nt, Human
guuuucauccauaacugaac

SEQ ID NO: 3889354 - RNA, 21 nt, Human
guuuucauccauaacugaaca

SEQ ID NO: 3889355 - RNA, 22 nt, Human
guuuucauggugaaaauguacu

SEQ ID NO: 3889356 - RNA, 23 nt, Human
guuuucauggugaaaauguacug

SEQ ID NO: 3889357 - RNA, 16 nt, Human
guuuucauguaaauaa

SEQ ID NO: 3889358 - RNA, 22 nt, Human
guuuucauuuacucuaaaaacu

SEQ ID NO: 3889359 - RNA, 16 nt, Human
guuuucauuugguuca

SEQ ID NO: 3889360 - RNA, 15 nt, Human
guuuuccaugaaaac

SEQ ID NO: 3889361 - RNA, 18 nt, Human
guuuuccaugaaaacguu

SEQ ID NO: 3889362 - RNA, 19 nt, Human
guuuuccaugaguccccug

SEQ ID NO: 3889363 - RNA, 23 nt, Human
guuuucccgagcaaagucuaaag

SEQ ID NO: 3889364 - RNA, 20 nt, Human
guuuucccuugaggaaacaa

SEQ ID NO: 3889365 - RNA, 21 nt, Human
guuuuccgcauucuuuguaca

SEQ ID NO: 3889366 - RNA, 17 nt, Human
guuuuccuaaaugcagu

SEQ ID NO: 3889367 - RNA, 16 nt, Human
guuuuccuaaauguau

SEQ ID NO: 3889368 - RNA, 17 nt, Human
guuuuccuaugcuuuga

SEQ ID NO: 3889369 - RNA, 14 nt, Human
guuuuccucccuuc

SEQ ID NO: 3889370 - RNA, 13 nt, Human
guuuuccugaaga

SEQ ID NO: 3889371 - RNA, 18 nt, Human
guuuuccuguauaggaau

SEQ ID NO: 3889372 - RNA, 17 nt, Human
guuuuccuuucucaccg

SEQ ID NO: 3889373 - RNA, 17 nt, Human
guuuucgaagcucagcc

SEQ ID NO: 3889374 - RNA, 14 nt, Human
guuuucuaaauuua

SEQ ID NO: 3889375 - RNA, 14 nt, Human
guuuucuaauugcu

SEQ ID NO: 3889376 - RNA, 16 nt, Human
guuuucuccucccagg

SEQ ID NO: 3889377 - RNA, 20 nt, Human
guuuucuccugccugugcug

SEQ ID NO: 3889378 - RNA, 19 nt, Human
guuuucucucggcucccca

SEQ ID NO: 3889379 - RNA, 14 nt, Human
guuuucucugaaca

SEQ ID NO: 3889380 - RNA, 16 nt, Human
guuuucugagaaagac

SEQ ID NO: 3889381 - RNA, 17 nt, Human
guuuucugagaaagacu

SEQ ID NO: 3889382 - RNA, 14 nt, Human
guuuucugagcccg

SEQ ID NO: 3889383 - RNA, 16 nt, Human
guuuucugggugucca

SEQ ID NO: 3889384 - RNA, 15 nt, Human
guuuucuguucuuuc

SEQ ID NO: 3889385 - RNA, 16 nt, Human
guuuucuguucuuucu

SEQ ID NO: 3889386 - RNA, 14 nt, Human
guuuucuguuucua

SEQ ID NO: 3889387 - RNA, 16 nt, Human
guuuucuuaacuuaaa

SEQ ID NO: 3889388 - RNA, 22 nt, Human
guuuucuuaaggugaggccugu

SEQ ID NO: 3889389 - RNA, 12 nt, Human
guuuucuuccca

SEQ ID NO: 3889390 - RNA, 15 nt, Human
guuuucuucccauca

SEQ ID NO: 3889391 - RNA, 20 nt, Human
guuuucuucccaucacugga

SEQ ID NO: 3889392 - RNA, 23 nt, Human
guuuucuugauaauuuuccuuua

SEQ ID NO: 3889393 - RNA, 17 nt, Human
guuuucuuuaugucuuu

SEQ ID NO: 3889394 - RNA, 18 nt, Human
guuuucuuuccuccuuuc

SEQ ID NO: 3889395 - RNA, 15 nt, Human
guuuucuuucuuuaa

SEQ ID NO: 3889396 - RNA, 17 nt, Human
guuuucuuucuuuaaau

SEQ ID NO: 3889397 - RNA, 14 nt, Human
guuuucuuugaaug

SEQ ID NO: 3889398 - RNA, 13 nt, Human
guuuugaaaagcu

SEQ ID NO: 3889399 - RNA, 22 nt, Human
guuuugaacuaauaaaagcaua

SEQ ID NO: 3889400 - RNA, 18 nt, Human
guuuugaauauuacuccu

SEQ ID NO: 3889401 - RNA, 18 nt, Human
guuuugacaucagccagc

SEQ ID NO: 3889402 - RNA, 16 nt, Human
guuuugacggaugauu

SEQ ID NO: 3889403 - RNA, 12 nt, Human
guuuugagcccu

SEQ ID NO: 3889404 - RNA, 22 nt, Human
guuuugaguagauauuacuuua

SEQ ID NO: 3889405 - RNA, 14 nt, Human
guuuugauaaagua

SEQ ID NO: 3889406 - RNA, 20 nt, Human
guuuugauaaaguaguaaaa

SEQ ID NO: 3889407 - RNA, 16 nt, Human
guuuugauaugaguau

SEQ ID NO: 3889408 - RNA, 22 nt, Human
guuuugauguuuguggccucag

SEQ ID NO: 3889409 - RNA, 13 nt, Human
guuuugauugaga

SEQ ID NO: 3889410 - RNA, 19 nt, Human
guuuugauugagaguaacu

SEQ ID NO: 3889411 - RNA, 21 nt, Human
guuuugccauguuggccaggc

SEQ ID NO: 3889412 - RNA, 20 nt, Human
guuuuggcaaacgcuaaaga

SEQ ID NO: 3889413 - RNA, 20 nt, Human
guuuuggcugaaauucuccu

SEQ ID NO: 3889414 - RNA, 15 nt, Human
guuuuggguauguuu

SEQ ID NO: 3889415 - RNA, 16 nt, Human
guuuugguccacuuuu

SEQ ID NO: 3889416 - RNA, 14 nt, Human
guuuugguuuuuuu

SEQ ID NO: 3889417 - RNA, 13 nt, Human
guuuuguaaaaga

SEQ ID NO: 3889418 - RNA, 14 nt, Human
guuuuguaaaagaa

SEQ ID NO: 3889419 - RNA, 16 nt, Human
guuuuguaaacauuua

SEQ ID NO: 3889420 - RNA, 13 nt, Human
guuuuguaaaguc

SEQ ID NO: 3889421 - RNA, 13 nt, Human
guuuuguaagaaa

SEQ ID NO: 3889422 - RNA, 16 nt, Human
guuuuguaagaugcug

SEQ ID NO: 3889423 - RNA, 17 nt, Human
guuuuguaagaugcugg

SEQ ID NO: 3889424 - RNA, 18 nt, Human
guuuuguagguacuuuug

SEQ ID NO: 3889425 - RNA, 22 nt, Human
guuuuguauacaaauauauugu

SEQ ID NO: 3889426 - RNA, 15 nt, Human
guuuuguauucucug

SEQ ID NO: 3889427 - RNA, 17 nt, Human
guuuugucaaacuguag

SEQ ID NO: 3889428 - RNA, 19 nt, Human
guuuugugaaauuuuucau

SEQ ID NO: 3889429 - RNA, 22 nt, Human
guuuugugaaauuuuucauauu

SEQ ID NO: 3889430 - RNA, 14 nt, Human
guuuugugucucuu

SEQ ID NO: 3889431 - RNA, 16 nt, Human
guuuuguuccccuccu

SEQ ID NO: 3889432 - RNA, 21 nt, Human
guuuuguuccccuccuccacu

SEQ ID NO: 3889433 - RNA, 22 nt, Human
guuuuguuccccuccuccacuc

SEQ ID NO: 3889434 - RNA, 14 nt, Human
guuuuguugacauu

SEQ ID NO: 3889435 - RNA, 17 nt, Human
guuuuguugacauucug

SEQ ID NO: 3889436 - RNA, 18 nt, Human
guuuuguugcacugaagu

SEQ ID NO: 3889437 - RNA, 14 nt, Human
guuuuguuuacaga

SEQ ID NO: 3889438 - RNA, 19 nt, Human
guuuuguuuccuuucacug

SEQ ID NO: 3889439 - RNA, 20 nt, Human
guuuuguuucgcucuuugag

SEQ ID NO: 3889440 - RNA, 15 nt, Human
guuuuguuugucucu

SEQ ID NO: 3889441 - RNA, 17 nt, Human
guuuuguuuuaaaauua

SEQ ID NO: 3889442 - RNA, 12 nt, Human
guuuuguuuugg

SEQ ID NO: 3889443 - RNA, 20 nt, Human
guuuuguuuuuuaguuccca

SEQ ID NO: 3889444 - RNA, 14 nt, Human
guuuuuaaaaauua

SEQ ID NO: 3889445 - RNA, 15 nt, Human
guuuuuaaaaauuag

SEQ ID NO: 3889446 - RNA, 13 nt, Human
guuuuuaaaaguu

SEQ ID NO: 3889447 - RNA, 15 nt, Human
guuuuuaaaaguuuc

SEQ ID NO: 3889448 - RNA, 16 nt, Human
guuuuuaaaaguuuca

SEQ ID NO: 3889449 - RNA, 15 nt, Human
guuuuuaaaaucuua

SEQ ID NO: 3889450 - RNA, 15 nt, Human
guuuuuaaacuguac

SEQ ID NO: 3889451 - RNA, 16 nt, Human
guuuuuaaacuguaca

SEQ ID NO: 3889452 - RNA, 18 nt, Human
guuuuuaaacuguacagu

SEQ ID NO: 3889453 - RNA, 19 nt, Human
guuuuuaaauuuuguaaug

SEQ ID NO: 3889454 - RNA, 20 nt, Human
guuuuuaaauuuuguaauga

SEQ ID NO: 3889455 - RNA, 21 nt, Human
guuuuuaacucuacuguguaa

SEQ ID NO: 3889456 - RNA, 19 nt, Human
guuuuuaauaaaagaaaau

SEQ ID NO: 3889457 - RNA, 20 nt, Human
guuuuuaauagcuauggaau

SEQ ID NO: 3889458 - RNA, 18 nt, Human
guuuuuaauauaaagccu

SEQ ID NO: 3889459 - RNA, 20 nt, Human
guuuuuacccauauccccuc

SEQ ID NO: 3889460 - RNA, 21 nt, Human
guuuuuaccuaccacaguguc

SEQ ID NO: 3889461 - RNA, 20 nt, Human
guuuuuaccugucacauugc

SEQ ID NO: 3889462 - RNA, 21 nt, Human
guuuuuaccugucacauugca

SEQ ID NO: 3889463 - RNA, 14 nt, Human
guuuuuacugcucu

SEQ ID NO: 3889464 - RNA, 20 nt, Human
guuuuuaugauaucccugau

SEQ ID NO: 3889465 - RNA, 23 nt, Human
guuuuuauggcuuuugugcauua

SEQ ID NO: 3889466 - RNA, 13 nt, Human
guuuuuauuaaaa

SEQ ID NO: 3889467 - RNA, 16 nt, Human
guuuuuauuaaaacau

SEQ ID NO: 3889468 - RNA, 14 nt, Human
guuuuuauuaaaag

SEQ ID NO: 3889469 - RNA, 17 nt, Human
guuuuuauuucuccuuu

SEQ ID NO: 3889470 - RNA, 14 nt, Human
uaaaaauauugugu

SEQ ID NO: 3889471 - RNA, 21 nt, Human
uaaaaauauuguguugugaau

SEQ ID NO: 3889472 - RNA, 15 nt, Human
uaaaaaucauaguac

SEQ ID NO: 3889473 - RNA, 20 nt, Human
uaaaaaucucaaauuucuaa

SEQ ID NO: 3889474 - RNA, 21 nt, Human
uaaaaaucucaaauuucuaaa

SEQ ID NO: 3889475 - RNA, 14 nt, Human
uaaaaaugaaauua

SEQ ID NO: 3889476 - RNA, 13 nt, Human
uaaaaaugacaga

SEQ ID NO: 3889477 - RNA, 16 nt, Human
uaaaaaugauuucagu

SEQ ID NO: 3889478 - RNA, 11 nt, Human
uaaaaaugcaa

SEQ ID NO: 3889479 - RNA, 20 nt, Human
uaaaaaugcaaauccuaugu

SEQ ID NO: 3889480 - RNA, 23 nt, Human
uaaaaauggaaaaauaaacacua

SEQ ID NO: 3889481 - RNA, 17 nt, Human
uaaaaaugggacuucuu

SEQ ID NO: 3889482 - RNA, 15 nt, Human
uaaaaaugguaaaau

SEQ ID NO: 3889483 - RNA, 18 nt, Human
uaaaaaugguaaaauugc

SEQ ID NO: 3889484 - RNA, 12 nt, Human
uaaaaauggugg

SEQ ID NO: 3889485 - RNA, 13 nt, Human
uaaaaaugguggc

SEQ ID NO: 3889486 - RNA, 21 nt, Human
uaaaaauguaaauauucuaua

SEQ ID NO: 3889487 - RNA, 13 nt, Human
uaaaaaugucuua

SEQ ID NO: 3889488 - RNA, 23 nt, Human
uaaaaaugucuugcuguugacau

SEQ ID NO: 3889489 - RNA, 17 nt, Human
uaaaaauuacuguguua

SEQ ID NO: 3889490 - RNA, 14 nt, Human
uaaaaauuccagaa

SEQ ID NO: 3889491 - RNA, 21 nt, Human
uaaaaauucuagauuaccaug

SEQ ID NO: 3889492 - RNA, 14 nt, Human
uaaaaauucugaau

SEQ ID NO: 3889493 - RNA, 19 nt, Human
uaaaaauuuacuacaauau

SEQ ID NO: 3889494 - RNA, 12 nt, Human
uaaaacaaaaaa

SEQ ID NO: 3889495 - RNA, 17 nt, Human
uaaaacaaaacaaaaca

SEQ ID NO: 3889496 - RNA, 20 nt, Human
uaaaacaaaacaaaacaaca

SEQ ID NO: 3889497 - RNA, 15 nt, Human
uaaaacaaaauuuga

SEQ ID NO: 3889498 - RNA, 21 nt, Human
uaaaacaaaauuugacuaauu

SEQ ID NO: 3889499 - RNA, 18 nt, Human
uaaaacaaacaauaccug

SEQ ID NO: 3889500 - RNA, 14 nt, Human
uaaaacaaagggca

SEQ ID NO: 3889501 - RNA, 17 nt, Human
uaaaacaagaaaguuuc

SEQ ID NO: 3889502 - RNA, 20 nt, Human
uaaaacaagaaaguuucccc

SEQ ID NO: 3889503 - RNA, 16 nt, Human
uaaaacaaugucaagg

SEQ ID NO: 3889504 - RNA, 23 nt, Human
uaaaacacaacaucuuuuucuac

SEQ ID NO: 3889505 - RNA, 12 nt, Human
uaaaacacagag

SEQ ID NO: 3889506 - RNA, 19 nt, Human
uaaaacacuucauugaaaa

SEQ ID NO: 3889507 - RNA, 13 nt, Human
uaaaacacuucug

SEQ ID NO: 3889508 - RNA, 18 nt, Human
uaaaacacuucuguccug

SEQ ID NO: 3889509 - RNA, 11 nt, Human
uaaaacacuug

SEQ ID NO: 3889510 - RNA, 17 nt, Human
uaaaacagacacuggca

SEQ ID NO: 3889511 - RNA, 18 nt, Human
uaaaacagacacuggcau

SEQ ID NO: 3889512 - RNA, 19 nt, Human
uaaaacagaguaaucuugu

SEQ ID NO: 3889513 - RNA, 23 nt, Human
uaaaacagcugucucuaacuuau

SEQ ID NO: 3889514 - RNA, 21 nt, Human
uaaaacagguagaauuaucua

SEQ ID NO: 3889515 - RNA, 22 nt, Human
uaaaacagguagaauuaucuaa

SEQ ID NO: 3889516 - RNA, 13 nt, Human
uaaaacaguauuu

SEQ ID NO: 3889517 - RNA, 22 nt, Human
uaaaacaguuggcaugcauccc

SEQ ID NO: 3889518 - RNA, 14 nt, Human
uaaaacauagcaaa

SEQ ID NO: 3889519 - RNA, 15 nt, Human
uaaaacauagcaaau

SEQ ID NO: 3889520 - RNA, 20 nt, Human
uaaaacaucauuccuuuuua

SEQ ID NO: 3889521 - RNA, 12 nt, Human
uaaaacaucuuu

SEQ ID NO: 3889522 - RNA, 14 nt, Human
uaaaacauguaaua

SEQ ID NO: 3889523 - RNA, 16 nt, Human
uaaaacauuaaaauau

SEQ ID NO: 3889524 - RNA, 20 nt, Human
uaaaacauuggauuauccug

SEQ ID NO: 3889525 - RNA, 20 nt, Human
uaaaacauuuauuuugacau

SEQ ID NO: 3889526 - RNA, 15 nt, Human
uaaaacauuuucaca

SEQ ID NO: 3889527 - RNA, 14 nt, Human
uaaaaccacagcag

SEQ ID NO: 3889528 - RNA, 15 nt, Human
uaaaaccacagcagu

SEQ ID NO: 3889529 - RNA, 13 nt, Human
uaaaacccaagug

SEQ ID NO: 3889530 - RNA, 17 nt, Human
uaaaacccguugauuac

SEQ ID NO: 3889531 - RNA, 13 nt, Human
uaaaaccuggaga

SEQ ID NO: 3889532 - RNA, 11 nt, Human
uaaaaccuuuc

SEQ ID NO: 3889533 - RNA, 20 nt, Human
uaaaaccuuucaaauuucac

SEQ ID NO: 3889534 - RNA, 15 nt, Human
uaaaacuaaauagca

SEQ ID NO: 3889535 - RNA, 20 nt, Human
uaaaacuaaauagcauguau

SEQ ID NO: 3889536 - RNA, 17 nt, Human
uaaaacuacuuagcacu

SEQ ID NO: 3889537 - RNA, 22 nt, Human
uaaaacuauauucauuuccacu

SEQ ID NO: 3889538 - RNA, 17 nt, Human
uaaaacucacugugauc

SEQ ID NO: 3889539 - RNA, 14 nt, Human
uaaaacucuuuuaa

SEQ ID NO: 3889540 - RNA, 18 nt, Human
uaaaacugaagucugaaa

SEQ ID NO: 3889541 - RNA, 18 nt, Human
uaaaacugaugugaaacu

SEQ ID NO: 3889542 - RNA, 12 nt, Human
uaaaacugcuuu

SEQ ID NO: 3889543 - RNA, 18 nt, Human
uaaaacuggaccuguaua

SEQ ID NO: 3889544 - RNA, 19 nt, Human
uaaaacuggcaucugacac

SEQ ID NO: 3889545 - RNA, 16 nt, Human
uaaaacuggccugacu

SEQ ID NO: 3889546 - RNA, 17 nt, Human
uaaaacuggcuuuggcu

SEQ ID NO: 3889547 - RNA, 20 nt, Human
uaaaacuguacuuugauuca

SEQ ID NO: 3889548 - RNA, 22 nt, Human
uaaaacuucuuaaauaucuuuu

SEQ ID NO: 3889549 - RNA, 13 nt, Human
uaaaacuugcugc

SEQ ID NO: 3889550 - RNA, 13 nt, Human
uaaaacuuuauuu

SEQ ID NO: 3889551 - RNA, 17 nt, Human
uaaaacuuuccucgccu

SEQ ID NO: 3889552 - RNA, 21 nt, Human
uaaaacuuugaaguuagcuuu

SEQ ID NO: 3889553 - RNA, 16 nt, Human
uaaaacuuugcugcca

SEQ ID NO: 3889554 - RNA, 17 nt, Human
uaaaagaaaauaaaaaa

SEQ ID NO: 3889555 - RNA, 13 nt, Human
uaaaagaaacacu

SEQ ID NO: 3889556 - RNA, 16 nt, Human
uaaaagaaacccugca

SEQ ID NO: 3889557 - RNA, 13 nt, Human
uaaaagaaacuuu

SEQ ID NO: 3889558 - RNA, 19 nt, Human
uaaaagaaagaaagaaaaa

SEQ ID NO: 3889559 - RNA, 20 nt, Human
uaaaagaaaggguucuguaa

SEQ ID NO: 3889560 - RNA, 23 nt, Human
uaaaagaaaggguucuguaaaau

SEQ ID NO: 3889561 - RNA, 16 nt, Human
uaaaagaaauaaacca

SEQ ID NO: 3889562 - RNA, 20 nt, Human
uaaaagaaaugcacaauguc

SEQ ID NO: 3889563 - RNA, 17 nt, Human
uaaaagaacaguaaaca

SEQ ID NO: 3889564 - RNA, 22 nt, Human
uaaaagaagaaauaguucugug

SEQ ID NO: 3889565 - RNA, 13 nt, Human
uaaaagaauauuu

SEQ ID NO: 3889566 - RNA, 16 nt, Human
uaaaagaauauuuuaa

SEQ ID NO: 3889567 - RNA, 12 nt, Human
uaaaagaaugau

SEQ ID NO: 3889568 - RNA, 20 nt, Human
uaaaagaaugggcaguuaca

SEQ ID NO: 3889569 - RNA, 12 nt, Human
uaaaagacaaau

SEQ ID NO: 3889570 - RNA, 23 nt, Human
uaaaagacaguguauguagaagc

SEQ ID NO: 3889571 - RNA, 16 nt, Human
uaaaagacucauccgu

SEQ ID NO: 3889572 - RNA, 22 nt, Human
uaaaagagaccacccauaucau

SEQ ID NO: 3889573 - RNA, 23 nt, Human
uaaaagagaccacccauaucaug

SEQ ID NO: 3889574 - RNA, 16 nt, Human
uaaaagagagagagag

SEQ ID NO: 3889575 - RNA, 17 nt, Human
uaaaagauaaauauuau

SEQ ID NO: 3889576 - RNA, 21 nt, Human
uaaaagauacaguuacucaga

SEQ ID NO: 3889577 - RNA, 12 nt, Human
uaaaagauauaa

SEQ ID NO: 3889578 - RNA, 21 nt, Human
uaaaagauauaagugcuguau

SEQ ID NO: 3889579 - RNA, 22 nt, Human
uaaaagauauaagugcuguaua

SEQ ID NO: 3889580 - RNA, 17 nt, Human
uaaaagaugaaagagca

SEQ ID NO: 3889581 - RNA, 22 nt, Human
uaaaagaugaaguuuuauacac

SEQ ID NO: 3889582 - RNA, 16 nt, Human
uaaaagaugcaaugua

SEQ ID NO: 3889583 - RNA, 15 nt, Human
uaaaagaugcuuuua

SEQ ID NO: 3889584 - RNA, 12 nt, Human
uaaaagauucau

SEQ ID NO: 3889585 - RNA, 19 nt, Human
uaaaagauucauuuuuaau

SEQ ID NO: 3889586 - RNA, 20 nt, Human
uaaaagauucauuuuuaauc

SEQ ID NO: 3889587 - RNA, 14 nt, Human
uaaaagauugagaa

SEQ ID NO: 3889588 - RNA, 16 nt, Human
uaaaagcaaaaaagaa

SEQ ID NO: 3889589 - RNA, 20 nt, Human
uaaaagcaaaaaagaaaacc

SEQ ID NO: 3889590 - RNA, 22 nt, Human
uaaaagcaaaaaagaaaaccuu

SEQ ID NO: 3889591 - RNA, 23 nt, Human
uaaaagcaaaaaagaaaaccuuu

SEQ ID NO: 3889592 - RNA, 21 nt, Human
uaaaagcaaaauaaaaacuau

SEQ ID NO: 3889593 - RNA, 21 nt, Human
uaaaagcaaaucauuuguuua

SEQ ID NO: 3889594 - RNA, 19 nt, Human
uaaaagcaacaucagcuug

SEQ ID NO: 3889595 - RNA, 11 nt, Human
uaaaagcacac

SEQ ID NO: 3889596 - RNA, 22 nt, Human
uaaaagcagaaaauaaaggaag

SEQ ID NO: 3889597 - RNA, 20 nt, Human
uaaaagcagcaucugcuaau

SEQ ID NO: 3889598 - RNA, 21 nt, Human
uaaaagcaggcuucuaugaaa

SEQ ID NO: 3889599 - RNA, 15 nt, Human
uaaaagcauaaaugc

SEQ ID NO: 3889600 - RNA, 14 nt, Human
uaaaagcauuuugu

SEQ ID NO: 3889601 - RNA, 17 nt, Human
uaaaagcauuuuguaau

SEQ ID NO: 3889602 - RNA, 18 nt, Human
uaaaagcauuuuguaaua

SEQ ID NO: 3889603 - RNA, 14 nt, Human
uaaaagcauuuuuu

SEQ ID NO: 3889604 - RNA, 18 nt, Human
uaaaagccaucauguaaa

SEQ ID NO: 3889605 - RNA, 21 nt, Human
uaaaagccuuggccucagagg

SEQ ID NO: 3889606 - RNA, 15 nt, Human
uaaaagcuuucaugu

SEQ ID NO: 3889607 - RNA, 14 nt, Human
uaaaaggaaaagca

SEQ ID NO: 3889608 - RNA, 15 nt, Human
uaaaaggaaagaaaa

SEQ ID NO: 3889609 - RNA, 12 nt, Human
uaaaaggagcca

SEQ ID NO: 3889610 - RNA, 18 nt, Human
uaaaaggauaguauuuuu

SEQ ID NO: 3889611 - RNA, 18 nt, Human
uaaaaggcaaauguguac

SEQ ID NO: 3889612 - RNA, 19 nt, Human
uaaaaggcaaauguguaca

SEQ ID NO: 3889613 - RNA, 17 nt, Human
uaaaagggacugagaaa

SEQ ID NO: 3889614 - RNA, 21 nt, Human
uaaaagggauuacccaagcaa

SEQ ID NO: 3889615 - RNA, 20 nt, Human
uaagagcaccuuccucacuu

SEQ ID NO: 3889616 - RNA, 22 nt, Human
uaagagcaguccauuucuacca

SEQ ID NO: 3889617 - RNA, 22 nt, Human
uaagagccauuuaggggccacu

SEQ ID NO: 3889618 - RNA, 18 nt, Human
uaagagcuagcgcugccg

SEQ ID NO: 3889619 - RNA, 14 nt, Human
uaagagcucaggau

SEQ ID NO: 3889620 - RNA, 17 nt, Human
uaagagcuggugucuga

SEQ ID NO: 3889621 - RNA, 18 nt, Human
uaagaggaaaguacauuu

SEQ ID NO: 3889622 - RNA, 17 nt, Human
uaagaggcagaaaauug

SEQ ID NO: 3889623 - RNA, 23 nt, Human
uaagaggcagaaaauugcacaau

SEQ ID NO: 3889624 - RNA, 15 nt, Human
uaagaggcagcguga

SEQ ID NO: 3889625 - RNA, 14 nt, Human
uaagaggcugauaa

SEQ ID NO: 3889626 - RNA, 16 nt, Human
uaagaggcugcccucc

SEQ ID NO: 3889627 - RNA, 20 nt, Human
uaagaggcugcccuccugug

SEQ ID NO: 3889628 - RNA, 23 nt, Human
uaagagggauuagggagagaaga

SEQ ID NO: 3889629 - RNA, 14 nt, Human
uaagagugcugggc

SEQ ID NO: 3889630 - RNA, 12 nt, Human
uaagaguguaga

SEQ ID NO: 3889631 - RNA, 22 nt, Human
uaagaguguagaagcauuccuu

SEQ ID NO: 3889632 - RNA, 23 nt, Human
uaagaguguagaagcauuccuuc

SEQ ID NO: 3889633 - RNA, 16 nt, Human
uaagauaaaugugcug

SEQ ID NO: 3889634 - RNA, 17 nt, Human
uaagauaaaugugcuga

SEQ ID NO: 3889635 - RNA, 12 nt, Human
uaagauaauuau

SEQ ID NO: 3889636 - RNA, 12 nt, Human
uaagauacuguu

SEQ ID NO: 3889637 - RNA, 15 nt, Human
uaagauaguguaacu

SEQ ID NO: 3889638 - RNA, 16 nt, Human
uaagauaguguaacuu

SEQ ID NO: 3889639 - RNA, 20 nt, Human
uaagauaguguaacuugcuu

SEQ ID NO: 3889640 - RNA, 19 nt, Human
uaagauaugggacauuuuu

SEQ ID NO: 3889641 - RNA, 14 nt, Human
uaagauauuuuuca

SEQ ID NO: 3889642 - RNA, 19 nt, Human
uaagauauuuuucaugauu

SEQ ID NO: 3889643 - RNA, 13 nt, Human
uaagaucacuguu

SEQ ID NO: 3889644 - RNA, 14 nt, Human
uaagaucacuguuu

SEQ ID NO: 3889645 - RNA, 23 nt, Human
uaagauccuagauccuaaggguc

SEQ ID NO: 3889646 - RNA, 16 nt, Human
uaagaucgguuaacaa

SEQ ID NO: 3889647 - RNA, 17 nt, Human
uaagaucgguuaacaaa

SEQ ID NO: 3889648 - RNA, 13 nt, Human
uaagaucucagug

SEQ ID NO: 3889649 - RNA, 11 nt, Human
uaagaugcugg

SEQ ID NO: 3889650 - RNA, 18 nt, Human
uaagauggaagcuuccag

SEQ ID NO: 3889651 - RNA, 17 nt, Human
uaagauggauucucaga

SEQ ID NO: 3889652 - RNA, 22 nt, Human
uaagauggauucucagauauuu

SEQ ID NO: 3889653 - RNA, 19 nt, Human
uaagaugucuguuugcuga

SEQ ID NO: 3889654 - RNA, 22 nt, Human
uaagauguuauauuuuucuuaa

SEQ ID NO: 3889655 - RNA, 17 nt, Human
uaagauuaagagcaaau

SEQ ID NO: 3889656 - RNA, 15 nt, Human
uaagauuagaaugaa

SEQ ID NO: 3889657 - RNA, 20 nt, Human
uaagauuauagauucuaaag

SEQ ID NO: 3889658 - RNA, 21 nt, Human
uaagauuauagauucuaaaga

SEQ ID NO: 3889659 - RNA, 16 nt, Human
uaagauuccuuuucuu

SEQ ID NO: 3889660 - RNA, 12 nt, Human
uaagauucuaac

SEQ ID NO: 3889661 - RNA, 13 nt, Human
uaagauucuaaug

SEQ ID NO: 3889662 - RNA, 11 nt, Human
uaagauucuag

SEQ ID NO: 3889663 - RNA, 17 nt, Human
uaagauucugauuuuag

SEQ ID NO: 3889664 - RNA, 19 nt, Human
uaagauuguuauuaaaugu

SEQ ID NO: 3889665 - RNA, 20 nt, Human
uaagauuguuauuaaaugua

SEQ ID NO: 3889666 - RNA, 17 nt, Human
uaagauuuaauuugcca

SEQ ID NO: 3889667 - RNA, 19 nt, Human
uaagauuuagagaugaauu

SEQ ID NO: 3889668 - RNA, 16 nt, Human
uaagauuuauuuuguu

SEQ ID NO: 3889669 - RNA, 19 nt, Human
uaagauuuguuuuuaaacu

SEQ ID NO: 3889670 - RNA, 22 nt, Human
uaagauuuguuuuuaaacugua

SEQ ID NO: 3889671 - RNA, 13 nt, Human
uaagauuuugaaa

SEQ ID NO: 3889672 - RNA, 18 nt, Human
uaagauuuuucucaaagu

SEQ ID NO: 3889673 - RNA, 23 nt, Human
uaagcaaagggagcacuggguug

SEQ ID NO: 3889674 - RNA, 14 nt, Human
uaagcaaauguuaa

SEQ ID NO: 3889675 - RNA, 20 nt, Human
uaagcaaauuucaaaagaca

SEQ ID NO: 3889676 - RNA, 18 nt, Human
uaagcaacaauuuucaga

SEQ ID NO: 3889677 - RNA, 14 nt, Human
uaagcaagaaggca

SEQ ID NO: 3889678 - RNA, 17 nt, Human
uaagcacuacauaaacu

SEQ ID NO: 3889679 - RNA, 17 nt, Human
uaagcacucuuaaagca

SEQ ID NO: 3889680 - RNA, 14 nt, Human
uaagcacugaaaaa

SEQ ID NO: 3889681 - RNA, 14 nt, Human
uaagcacugugcua

SEQ ID NO: 3889682 - RNA, 16 nt, Human
uaagcacuuuuuaaaa

SEQ ID NO: 3889683 - RNA, 21 nt, Human
uaagcagaaagugccuuucag

SEQ ID NO: 3889684 - RNA, 17 nt, Human
uaagcagaauuggaaaa

SEQ ID NO: 3889685 - RNA, 22 nt, Human
uaagcagauggaaugcuguguu

SEQ ID NO: 3889686 - RNA, 12 nt, Human
uaagcagcucuu

SEQ ID NO: 3889687 - RNA, 23 nt, Human
uaagcaggaggaggugccaacag

SEQ ID NO: 3889688 - RNA, 21 nt, Human
uaagcagguggaucuauuuca

SEQ ID NO: 3889689 - RNA, 15 nt, Human
uaagcaguaaaaacu

SEQ ID NO: 3889690 - RNA, 21 nt, Human
uaagcaguauauuaguauuau

SEQ ID NO: 3889691 - RNA, 17 nt, Human
uaagcauacuuuguaaa

SEQ ID NO: 3889692 - RNA, 15 nt, Human
uaagcaucaaacucu

SEQ ID NO: 3889693 - RNA, 13 nt, Human
uaagcaucacaaa

SEQ ID NO: 3889694 - RNA, 19 nt, Human
uaagcaucauuauuuaugu

SEQ ID NO: 3889695 - RNA, 20 nt, Human
uaagcaucauuauuuaugua

SEQ ID NO: 3889696 - RNA, 17 nt, Human
uaagcaucuaaggacaa

SEQ ID NO: 3889697 - RNA, 15 nt, Human
uaagcaugcacaaau

SEQ ID NO: 3889698 - RNA, 19 nt, Human
uaagcauuaccacucaggc

SEQ ID NO: 3889699 - RNA, 20 nt, Human
uaagcauuacucuuguaaga

SEQ ID NO: 3889700 - RNA, 18 nt, Human
uaagcauuccaacuaucu

SEQ ID NO: 3889701 - RNA, 22 nt, Human
uaagcauugaauggcuauguuu

SEQ ID NO: 3889702 - RNA, 18 nt, Human
uaagcauuguuugcuuau

SEQ ID NO: 3889703 - RNA, 16 nt, Human
uaagccaaaacaaugu

SEQ ID NO: 3889704 - RNA, 21 nt, Human
uaagccaaaauuaagguguuu

SEQ ID NO: 3889705 - RNA, 11 nt, Human
uaagccaaaga

SEQ ID NO: 3889706 - RNA, 19 nt, Human
uaagccaauuuuucugcac

SEQ ID NO: 3889707 - RNA, 18 nt, Human
uaagccacugccucuccc

SEQ ID NO: 3889708 - RNA, 19 nt, Human
uaagccacuuaaaauguuc

SEQ ID NO: 3889709 - RNA, 21 nt, Human
uaagccagacaucaacagaua

SEQ ID NO: 3889710 - RNA, 22 nt, Human
uaagccagcaccggaccagccu

SEQ ID NO: 3889711 - RNA, 22 nt, Human
uaagccagcugcccccagagcc

SEQ ID NO: 3889712 - RNA, 19 nt, Human
uaagccaguguugccuaag

SEQ ID NO: 3889713 - RNA, 19 nt, Human
uaagccauucugacucaua

SEQ ID NO: 3889714 - RNA, 22 nt, Human
uaagccccagcaagcaauccua

SEQ ID NO: 3889715 - RNA, 16 nt, Human
uaagcccuaagguccu

SEQ ID NO: 3889716 - RNA, 19 nt, Human
uaagcccucuuccaucaug

SEQ ID NO: 3889717 - RNA, 15 nt, Human
uaagcccuggccccc

SEQ ID NO: 3889718 - RNA, 11 nt, Human
uaagcccuguc

SEQ ID NO: 3889719 - RNA, 21 nt, Human
uaagccuccauuuaguucuuu

SEQ ID NO: 3889720 - RNA, 20 nt, Human
uaagccuguggcuguggaga

SEQ ID NO: 3889721 - RNA, 14 nt, Human
uaagccuuuggaaa

SEQ ID NO: 3889722 - RNA, 21 nt, Human
uaagccuuuggaaacagcucg

SEQ ID NO: 3889723 - RNA, 16 nt, Human
uaagcuaacccccuuc

SEQ ID NO: 3889724 - RNA, 15 nt, Human
uaagcuacuagcaaa

SEQ ID NO: 3889725 - RNA, 18 nt, Human
uaagcuacuagcaaaaua

SEQ ID NO: 3889726 - RNA, 18 nt, Human
uaagcuacugccauccug

SEQ ID NO: 3889727 - RNA, 22 nt, Human
uaagcuaggaaaagaaaucuau

SEQ ID NO: 3889728 - RNA, 19 nt, Human
uaagcuauuugauguaaua

SEQ ID NO: 3889729 - RNA, 21 nt, Human
uaagcuauuugauguaauacu

SEQ ID NO: 3889730 - RNA, 23 nt, Human
uaagcuauuugauguaauacuuc

SEQ ID NO: 3889731 - RNA, 16 nt, Human
uaagcuauuuuucuaa

SEQ ID NO: 3889732 - RNA, 22 nt, Human
uaagcucacguccugagaaagc

SEQ ID NO: 3889733 - RNA, 16 nt, Human
uaagcucugagcuguc

SEQ ID NO: 3889734 - RNA, 23 nt, Human
uaagcugcaaaucugauggccuu

SEQ ID NO: 3889735 - RNA, 12 nt, Human
uaagcugcagcu

SEQ ID NO: 3889736 - RNA, 16 nt, Human
uaagcugcagcuuccu

SEQ ID NO: 3889737 - RNA, 16 nt, Human
uaagcugcucuauugu

SEQ ID NO: 3889738 - RNA, 12 nt, Human
uaagcugcuuuu

SEQ ID NO: 3889739 - RNA, 16 nt, Human
uaagcuggagugcagu

SEQ ID NO: 3889740 - RNA, 17 nt, Human
uaagcuguguccuaguu

SEQ ID NO: 3889741 - RNA, 16 nt, Human
uaagcuuaaaaaaaac

SEQ ID NO: 3889742 - RNA, 18 nt, Human
uaagcuuauuuaauuaaa

SEQ ID NO: 3889743 - RNA, 17 nt, Human
uaagcuuccaggaaaaa

SEQ ID NO: 3889744 - RNA, 22 nt, Human
uaagcuuccaggaaaaaggaca

SEQ ID NO: 3889745 - RNA, 23 nt, Human
uaagcuuccaggcugcauagaag

SEQ ID NO: 3889746 - RNA, 23 nt, Human
uaagcuuccauuuuaauuuuaaa

SEQ ID NO: 3889747 - RNA, 18 nt, Human
uaagcuuugccagcugcu

SEQ ID NO: 3889748 - RNA, 16 nt, Human
uaagcuuuucuuuucu

SEQ ID NO: 3889749 - RNA, 18 nt, Human
uaaggaaaacuaccugua

SEQ ID NO: 3889750 - RNA, 16 nt, Human
uaaggaaaaguuuaau

SEQ ID NO: 3889751 - RNA, 19 nt, Human
uaaggaaaaguuuaauauu

SEQ ID NO: 3889752 - RNA, 17 nt, Human
uaaggaaacucuuaucu

SEQ ID NO: 3889753 - RNA, 19 nt, Human
uaaggaaacucuuaucuca

SEQ ID NO: 3889754 - RNA, 14 nt, Human
uaaggaaacugggu

SEQ ID NO: 3889755 - RNA, 18 nt, Human
uaaggaaagcaauaaaug

SEQ ID NO: 3889756 - RNA, 14 nt, Human
uaaggaaccaacaa

SEQ ID NO: 3889757 - RNA, 14 nt, Human
uaaggaagaaacag

SEQ ID NO: 3889758 - RNA, 13 nt, Human
uaaggaagacaau

SEQ ID NO: 3889759 - RNA, 21 nt, Human
uaaguuacacauuuuucagau

SEQ ID NO: 3889760 - RNA, 13 nt, Human
uaaguuaucuuug

SEQ ID NO: 3889761 - RNA, 14 nt, Human
uaaguuauugcagu

SEQ ID NO: 3889762 - RNA, 17 nt, Human
uaaguuauuuuuguaca

SEQ ID NO: 3889763 - RNA, 19 nt, Human
uaaguucaaauucuucuga

SEQ ID NO: 3889764 - RNA, 13 nt, Human
uaaguucauacau

SEQ ID NO: 3889765 - RNA, 22 nt, Human
uaaguucauauuccauauuuau

SEQ ID NO: 3889766 - RNA, 14 nt, Human
uaaguuccacugag

SEQ ID NO: 3889767 - RNA, 17 nt, Human
uaaguuccacugagcuc

SEQ ID NO: 3889768 - RNA, 19 nt, Human
uaaguuccacugagcucca

SEQ ID NO: 3889769 - RNA, 20 nt, Human
uaaguucuggaugcauuucu

SEQ ID NO: 3889770 - RNA, 14 nt, Human
uaaguucuuagaua

SEQ ID NO: 3889771 - RNA, 20 nt, Human
uaaguucuuagauaucuuuu

SEQ ID NO: 3889772 - RNA, 21 nt, Human
uaaguucuuaugaggagggga

SEQ ID NO: 3889773 - RNA, 20 nt, Human
uaaguugagauaguuuucau

SEQ ID NO: 3889774 - RNA, 21 nt, Human
uaaguugagauaguuuucauc

SEQ ID NO: 3889775 - RNA, 12 nt, Human
uaaguuggaaac

SEQ ID NO: 3889776 - RNA, 15 nt, Human
uaaguuggaaacacu

SEQ ID NO: 3889777 - RNA, 18 nt, Human
uaaguuggaaacacuaaa

SEQ ID NO: 3889778 - RNA, 21 nt, Human
uaaguuggaaacacuaaaugu

SEQ ID NO: 3889779 - RNA, 16 nt, Human
uaaguuggcuucuguu

SEQ ID NO: 3889780 - RNA, 20 nt, Human
uaaguuggcuucuguuucua

SEQ ID NO: 3889781 - RNA, 16 nt, Human
uaaguuguuauuucag

SEQ ID NO: 3889782 - RNA, 17 nt, Human
uaaguuuaugucuaaag

SEQ ID NO: 3889783 - RNA, 17 nt, Human
uaaguuuauuucuuaaa

SEQ ID NO: 3889784 - RNA, 20 nt, Human
uaaguuucaaacuuacuauu

SEQ ID NO: 3889785 - RNA, 18 nt, Human
uaaguuucaggugacaug

SEQ ID NO: 3889786 - RNA, 17 nt, Human
uaaguuucaguugauuu

SEQ ID NO: 3889787 - RNA, 21 nt, Human
uaaguuuccuuccagcccaga

SEQ ID NO: 3889788 - RNA, 14 nt, Human
uaaguuucuaagau

SEQ ID NO: 3889789 - RNA, 23 nt, Human
uaaguuucuaagauucuaaaggu

SEQ ID NO: 3889790 - RNA, 13 nt, Human
uaaguuucucagc

SEQ ID NO: 3889791 - RNA, 18 nt, Human
uaaguuucucagcuccca

SEQ ID NO: 3889792 - RNA, 14 nt, Human
uaaguuucugggac

SEQ ID NO: 3889793 - RNA, 20 nt, Human
uaaguuugcacucaaaucuu

SEQ ID NO: 3889794 - RNA, 20 nt, Human
uaaguuuuuauggcuuuugu

SEQ ID NO: 3889795 - RNA, 20 nt, Human
uaauaaaaaauggaaagaau

SEQ ID NO: 3889796 - RNA, 19 nt, Human
uaauaaaaagcuuuuuccu

SEQ ID NO: 3889797 - RNA, 23 nt, Human
uaauaaaaagcuuuuuccuccug

SEQ ID NO: 3889798 - RNA, 21 nt, Human
uaauaaaaaggaguauacaaa

SEQ ID NO: 3889799 - RNA, 13 nt, Human
uaauaaaaaggca

SEQ ID NO: 3889800 - RNA, 14 nt, Human
uaauaaaaaugaca

SEQ ID NO: 3889801 - RNA, 21 nt, Human
uaauaaaaaugacagacugaa

SEQ ID NO: 3889802 - RNA, 13 nt, Human
uaauaaaacugau

SEQ ID NO: 3889803 - RNA, 11 nt, Human
uaauaaaagaa

SEQ ID NO: 3889804 - RNA, 14 nt, Human
uaauaaaagaaaau

SEQ ID NO: 3889805 - RNA, 12 nt, Human
uaauaaaauauc

SEQ ID NO: 3889806 - RNA, 16 nt, Human
uaauaaaauaucauuc

SEQ ID NO: 3889807 - RNA, 17 nt, Human
uaauaaaauauuuucug

SEQ ID NO: 3889808 - RNA, 12 nt, Human
uaauaaaaucac

SEQ ID NO: 3889809 - RNA, 15 nt, Human
uaauaaaauucaaca

SEQ ID NO: 3889810 - RNA, 18 nt, Human
uaauaaacacucuugaaa

SEQ ID NO: 3889811 - RNA, 22 nt, Human
uaauaaacauccuucaagaacu

SEQ ID NO: 3889812 - RNA, 13 nt, Human
uaauaaacauucu

SEQ ID NO: 3889813 - RNA, 19 nt, Human
uaauaaacuuuuuuuugag

SEQ ID NO: 3889814 - RNA, 14 nt, Human
uaauaaagaugcuc

SEQ ID NO: 3889815 - RNA, 14 nt, Human
uaauaaaguauaua

SEQ ID NO: 3889816 - RNA, 15 nt, Human
uaauaaaguauucca

SEQ ID NO: 3889817 - RNA, 16 nt, Human
uaauaaaguguuuuca

SEQ ID NO: 3889818 - RNA, 19 nt, Human
uaauaaaguguuuucagag

SEQ ID NO: 3889819 - RNA, 20 nt, Human
uaauaaaguguuuucagagc

SEQ ID NO: 3889820 - RNA, 16 nt, Human
uaauaaauacauacgg

SEQ ID NO: 3889821 - RNA, 13 nt, Human
uaauaaauauguu

SEQ ID NO: 3889822 - RNA, 12 nt, Human
uaauaaauauuu

SEQ ID NO: 3889823 - RNA, 15 nt, Human
uaauaaauauuuaug

SEQ ID NO: 3889824 - RNA, 18 nt, Human
uaauaaaugcccucuucu

SEQ ID NO: 3889825 - RNA, 16 nt, Human
uaauaaauuauuuauu

SEQ ID NO: 3889826 - RNA, 16 nt, Human
uaauaaauugcaugcu

SEQ ID NO: 3889827 - RNA, 20 nt, Human
uaauaacauuaccuuacugu

SEQ ID NO: 3889828 - RNA, 20 nt, Human
uaauaacucggauuccagcc

SEQ ID NO: 3889829 - RNA, 13 nt, Human
uaauaacugugua

SEQ ID NO: 3889830 - RNA, 12 nt, Human
uaauaagacaua

SEQ ID NO: 3889831 - RNA, 14 nt, Human
uaauaagacauaac

SEQ ID NO: 3889832 - RNA, 18 nt, Human
uaauaagcuaaagaggcu

SEQ ID NO: 3889833 - RNA, 20 nt, Human
uaauaagcuaguugaauacu

SEQ ID NO: 3889834 - RNA, 21 nt, Human
uaauaagcuaguugaauacuu

SEQ ID NO: 3889835 - RNA, 18 nt, Human
uaauaaggaaaaguuuaa

SEQ ID NO: 3889836 - RNA, 14 nt, Human
uaauaagggaaaaa

SEQ ID NO: 3889837 - RNA, 14 nt, Human
uaauaagguuuuaa

SEQ ID NO: 3889838 - RNA, 11 nt, Human
uaauaauaaau

SEQ ID NO: 3889839 - RNA, 13 nt, Human
uaauaauaccuca

SEQ ID NO: 3889840 - RNA, 16 nt, Human
uaauaauauacuugug

SEQ ID NO: 3889841 - RNA, 21 nt, Human
uaauaauauacuuguggacua

SEQ ID NO: 3889842 - RNA, 13 nt, Human
uaauaauauaugu

SEQ ID NO: 3889843 - RNA, 19 nt, Human
uaauaauauuguuuuucuu

SEQ ID NO: 3889844 - RNA, 19 nt, Human
uaauaaucaagagccuuaa

SEQ ID NO: 3889845 - RNA, 23 nt, Human
uaauaaucuuauuagggagaaaa

SEQ ID NO: 3889846 - RNA, 12 nt, Human
uaauaaucuugu

SEQ ID NO: 3889847 - RNA, 13 nt, Human
uaauaauggguuu

SEQ ID NO: 3889848 - RNA, 14 nt, Human
uaauaauguuucaa

SEQ ID NO: 3889849 - RNA, 20 nt, Human
uaauaauuauaugcuauuuc

SEQ ID NO: 3889850 - RNA, 20 nt, Human
uaauaauugcucauaagcaa

SEQ ID NO: 3889851 - RNA, 13 nt, Human
uaauaauuucuaa

SEQ ID NO: 3889852 - RNA, 14 nt, Human
uaauaauuucuaau

SEQ ID NO: 3889853 - RNA, 22 nt, Human
uaauaauuuuaggcacccaucc

SEQ ID NO: 3889854 - RNA, 16 nt, Human
uaauaauuuuuuaauu

SEQ ID NO: 3889855 - RNA, 18 nt, Human
uaauacaaaaggcuccau

SEQ ID NO: 3889856 - RNA, 20 nt, Human
uaauacaagguauaauaaaa

SEQ ID NO: 3889857 - RNA, 21 nt, Human
uaauacaagguauaauaaaau

SEQ ID NO: 3889858 - RNA, 20 nt, Human
uaauacaaugaugcuauuug

SEQ ID NO: 3889859 - RNA, 14 nt, Human
uaauacacaaaauc

SEQ ID NO: 3889860 - RNA, 17 nt, Human
uaauacacaaaaucaaa

SEQ ID NO: 3889861 - RNA, 21 nt, Human
uaauacagcaacaauuuauga

SEQ ID NO: 3889862 - RNA, 23 nt, Human
uaauacagcagugucaucagaag

SEQ ID NO: 3889863 - RNA, 13 nt, Human
uaauacauuaaag

SEQ ID NO: 3889864 - RNA, 13 nt, Human
uaauaccucccuu

SEQ ID NO: 3889865 - RNA, 13 nt, Human
uaauaccucugug

SEQ ID NO: 3889866 - RNA, 14 nt, Human
uaauaccucugugu

SEQ ID NO: 3889867 - RNA, 14 nt, Human
uaauacuaccuuga

SEQ ID NO: 3889868 - RNA, 22 nt, Human
uaauacuaguugugaccuuagu

SEQ ID NO: 3889869 - RNA, 18 nt, Human
uaauacucaaaugaguaa

SEQ ID NO: 3889870 - RNA, 20 nt, Human
uaauacucaaaugaguaaca

SEQ ID NO: 3889871 - RNA, 14 nt, Human
uaauacucuauuuu

SEQ ID NO: 3889872 - RNA, 15 nt, Human
uaauacugaaccacu

SEQ ID NO: 3889873 - RNA, 14 nt, Human
uaauacuguauuug

SEQ ID NO: 3889874 - RNA, 13 nt, Human
uaauacuuuguau

SEQ ID NO: 3889875 - RNA, 20 nt, Human
uaauagaauaaaggcaguuu

SEQ ID NO: 3889876 - RNA, 18 nt, Human
uaauagacaauuuauuau

SEQ ID NO: 3889877 - RNA, 21 nt, Human
uaauagagcaaaauugaugug

SEQ ID NO: 3889878 - RNA, 21 nt, Human
uaauagauguuugauagauuu

SEQ ID NO: 3889879 - RNA, 22 nt, Human
uaauagauuuuuucagacuugu

SEQ ID NO: 3889880 - RNA, 15 nt, Human
uaauagcaaagaauu

SEQ ID NO: 3889881 - RNA, 15 nt, Human
uaauagcagccuuuc

SEQ ID NO: 3889882 - RNA, 19 nt, Human
uaauagcgucauaacuaga

SEQ ID NO: 3889883 - RNA, 21 nt, Human
uaauagcgucauaacuagaac

SEQ ID NO: 3889884 - RNA, 13 nt, Human
uaauaguguuaau

SEQ ID NO: 3889885 - RNA, 15 nt, Human
uaauaguguuaauca

SEQ ID NO: 3889886 - RNA, 20 nt, Human
uaauaguguuaaucaauuua

SEQ ID NO: 3889887 - RNA, 12 nt, Human
uaauauaaaaaa

SEQ ID NO: 3889888 - RNA, 15 nt, Human
uaauauaaaaaauuu

SEQ ID NO: 3889889 - RNA, 19 nt, Human
uaauauaaaguuggaugcg

SEQ ID NO: 3889890 - RNA, 13 nt, Human
uaauauaaaugca

SEQ ID NO: 3889891 - RNA, 22 nt, Human
uaauauaaaugcaaauaacaaa

SEQ ID NO: 3889892 - RNA, 13 nt, Human
uaauauaaauuca

SEQ ID NO: 3889893 - RNA, 18 nt, Human
uaauauaagaagcuuuca

SEQ ID NO: 3889894 - RNA, 22 nt, Human
uaauauaagaagcuuucaguau

SEQ ID NO: 3889895 - RNA, 18 nt, Human
uaauauaauacacaaaau

SEQ ID NO: 3889896 - RNA, 16 nt, Human
uaauauacuauauuua

SEQ ID NO: 3889897 - RNA, 14 nt, Human
uaauauauauauau

SEQ ID NO: 3889898 - RNA, 16 nt, Human
uaauauauguuuuaaa

SEQ ID NO: 3889899 - RNA, 15 nt, Human
uaauauauuaaaauu

SEQ ID NO: 3889900 - RNA, 16 nt, Human
uaauauauuaaaauuc

SEQ ID NO: 3889901 - RNA, 17 nt, Human
uaauauauuuaaaaaua

SEQ ID NO: 3889902 - RNA, 20 nt, Human
uaauauauuuguguauuuaa

SEQ ID NO: 3889903 - RNA, 17 nt, Human
uaauauauuuucuguuu

SEQ ID NO: 3889904 - RNA, 15 nt, Human
uaauaucaauagaag

SEQ ID NO: 3889905 - RNA, 18 nt, Human
uaaugaaaaugaauaucu

SEQ ID NO: 3889906 - RNA, 13 nt, Human
uaaugaaaauguc

SEQ ID NO: 3889907 - RNA, 14 nt, Human
uaaugaaaauguca

SEQ ID NO: 3889908 - RNA, 16 nt, Human
uaaugaaacaaagagu

SEQ ID NO: 3889909 - RNA, 19 nt, Human
uaaugaaagacuguacaaa

SEQ ID NO: 3889910 - RNA, 23 nt, Human
uaaugaaagacuguacaaaguag

SEQ ID NO: 3889911 - RNA, 22 nt, Human
uaaugaaagugaugacauauuu

SEQ ID NO: 3889912 - RNA, 23 nt, Human
uaaugaaauaaaucauguuaauc

SEQ ID NO: 3889913 - RNA, 19 nt, Human
uaaugaaauaucuguauuu

SEQ ID NO: 3889914 - RNA, 14 nt, Human
uaaugaacaaaauu

SEQ ID NO: 3889915 - RNA, 16 nt, Human
uaaugaaccgcugaau

SEQ ID NO: 3889916 - RNA, 13 nt, Human
uaaugaaguuuga

SEQ ID NO: 3889917 - RNA, 17 nt, Human
uaaugaaguuugaaugu

SEQ ID NO: 3889918 - RNA, 20 nt, Human
uaaugaauaccuuagugcag

SEQ ID NO: 3889919 - RNA, 18 nt, Human
uaaugaaucuaagcagca

SEQ ID NO: 3889920 - RNA, 23 nt, Human
uaaugaaugcuuaaagaauucaa

SEQ ID NO: 3889921 - RNA, 15 nt, Human
uaaugaauggacuca

SEQ ID NO: 3889922 - RNA, 15 nt, Human
uaaugacagagccag

SEQ ID NO: 3889923 - RNA, 14 nt, Human
uaaugacauucaau

SEQ ID NO: 3889924 - RNA, 16 nt, Human
uaaugaccaugaaaga

SEQ ID NO: 3889925 - RNA, 14 nt, Human
uaaugagacuuuaa

SEQ ID NO: 3889926 - RNA, 18 nt, Human
uaaugagcuauuaaaacu

SEQ ID NO: 3889927 - RNA, 19 nt, Human
uaaugagcuauuaaaacuc

SEQ ID NO: 3889928 - RNA, 14 nt, Human
uaaugauaaaacac

SEQ ID NO: 3889929 - RNA, 22 nt, Human
uaaugauaacuggaaacuucag

SEQ ID NO: 3889930 - RNA, 13 nt, Human
uaaugauauacug

SEQ ID NO: 3889931 - RNA, 19 nt, Human
uaaugaucgaaaaaauaau

SEQ ID NO: 3889932 - RNA, 14 nt, Human
uaaugauggcccau

SEQ ID NO: 3889933 - RNA, 18 nt, Human
uaaugauuccuauaaauc

SEQ ID NO: 3889934 - RNA, 12 nt, Human
uaaugauuguuu

SEQ ID NO: 3889935 - RNA, 21 nt, Human
uaaugcaaaauuuuuuuaauc

SEQ ID NO: 3889936 - RNA, 14 nt, Human
uaaugcacuuucua

SEQ ID NO: 3889937 - RNA, 15 nt, Human
uaaugcauacagaaa

SEQ ID NO: 3889938 - RNA, 16 nt, Human
uaaugcauguuaggaa

SEQ ID NO: 3889939 - RNA, 18 nt, Human
uaaugcauucuucucugu

SEQ ID NO: 3889940 - RNA, 19 nt, Human
uaaugccauuuuaaggaaa

SEQ ID NO: 3889941 - RNA, 12 nt, Human
uaaugcccagac

SEQ ID NO: 3889942 - RNA, 22 nt, Human
uaaugccggugagaauaagaga

SEQ ID NO: 3889943 - RNA, 20 nt, Human
uaaugccugcuuuuuggaaa

SEQ ID NO: 3889944 - RNA, 15 nt, Human
uaaugccuuacucuu

SEQ ID NO: 3889945 - RNA, 19 nt, Human
uaaugcgcaggcuggcccu

SEQ ID NO: 3889946 - RNA, 22 nt, Human
uaaugcgcaggcuggcccugcc

SEQ ID NO: 3889947 - RNA, 17 nt, Human
uaaugcgccaauaaacc

SEQ ID NO: 3889948 - RNA, 21 nt, Human
uaaugcuaaauguaagaauca

SEQ ID NO: 3889949 - RNA, 22 nt, Human
uaaugcuaaucuugugaaaaua

SEQ ID NO: 3889950 - RNA, 16 nt, Human
uaaugcuacgugugau

SEQ ID NO: 3889951 - RNA, 15 nt, Human
uaaugcuacugucuc

SEQ ID NO: 3889952 - RNA, 14 nt, Human
uaaugcuguugccu

SEQ ID NO: 3889953 - RNA, 17 nt, Human
uaaugcuguugccucau

SEQ ID NO: 3889954 - RNA, 20 nt, Human
uaaugcuuagagaauguucu

SEQ ID NO: 3889955 - RNA, 11 nt, Human
uaaugcuuugg

SEQ ID NO: 3889956 - RNA, 16 nt, Human
uaaugcuuugguucug

SEQ ID NO: 3889957 - RNA, 19 nt, Human
uaauggacacuuuucaccu

SEQ ID NO: 3889958 - RNA, 17 nt, Human
uaauggacagauuaaua

SEQ ID NO: 3889959 - RNA, 13 nt, Human
uaauggaugaaau

SEQ ID NO: 3889960 - RNA, 15 nt, Human
uaauggaugaaauca

SEQ ID NO: 3889961 - RNA, 17 nt, Human
uaauggaugaaaucaua

SEQ ID NO: 3889962 - RNA, 21 nt, Human
uaauggcaguuauauuuugca

SEQ ID NO: 3889963 - RNA, 16 nt, Human
uaauggccaugguacc

SEQ ID NO: 3889964 - RNA, 21 nt, Human
uaauggcugauaauuuuaaau

SEQ ID NO: 3889965 - RNA, 18 nt, Human
uaaugggguccuggccau

SEQ ID NO: 3889966 - RNA, 17 nt, Human
uaaugguaccagauaaa

SEQ ID NO: 3889967 - RNA, 19 nt, Human
uaaugguaccagauaaaau

SEQ ID NO: 3889968 - RNA, 13 nt, Human
uaauggucuaaaa

SEQ ID NO: 3889969 - RNA, 21 nt, Human
uaauggucuaaaaauaaacca

SEQ ID NO: 3889970 - RNA, 19 nt, Human
uaaugguguagaacacuaa

SEQ ID NO: 3889971 - RNA, 15 nt, Human
uaaugguuucaaaga

SEQ ID NO: 3889972 - RNA, 14 nt, Human
uaauguaaaauguu

SEQ ID NO: 3889973 - RNA, 17 nt, Human
uaauguaaaauguugaa

SEQ ID NO: 3889974 - RNA, 15 nt, Human
uaauguacaucuggc

SEQ ID NO: 3889975 - RNA, 18 nt, Human
uaauguacugauuucagu

SEQ ID NO: 3889976 - RNA, 13 nt, Human
uaauguauauaaa

SEQ ID NO: 3889977 - RNA, 13 nt, Human
uaauguaucaaac

SEQ ID NO: 3889978 - RNA, 16 nt, Human
uaauguauguuaccaa

SEQ ID NO: 3889979 - RNA, 16 nt, Human
uaauguauucauauuu

SEQ ID NO: 3889980 - RNA, 21 nt, Human
uaauguauuuguucauguuug

SEQ ID NO: 3889981 - RNA, 15 nt, Human
uaaugucaccaccuu

SEQ ID NO: 3889982 - RNA, 21 nt, Human
uaaugucaccaccuucccagc

SEQ ID NO: 3889983 - RNA, 20 nt, Human
uaaugucauaaagugagaaa

SEQ ID NO: 3889984 - RNA, 11 nt, Human
uaaugucucug

SEQ ID NO: 3889985 - RNA, 21 nt, Human
uaaugucuucauuucauugua

SEQ ID NO: 3889986 - RNA, 15 nt, Human
uaaugucuugagcuc

SEQ ID NO: 3889987 - RNA, 20 nt, Human
uaaugugaaacuggauuaaa

SEQ ID NO: 3889988 - RNA, 11 nt, Human
uaaugugaacu

SEQ ID NO: 3889989 - RNA, 13 nt, Human
uaaugugaacuag

SEQ ID NO: 3889990 - RNA, 22 nt, Human
uaaugugaacuuguagcuguaa

SEQ ID NO: 3889991 - RNA, 20 nt, Human
uaaugugaguuuggucugga

SEQ ID NO: 3889992 - RNA, 13 nt, Human
uaaugugauauua

SEQ ID NO: 3889993 - RNA, 21 nt, Human
uaaugugaugauguaauugac

SEQ ID NO: 3889994 - RNA, 16 nt, Human
uaaugugcuguguaaa

SEQ ID NO: 3889995 - RNA, 21 nt, Human
uaaugugcuguguaaaguuag

SEQ ID NO: 3889996 - RNA, 16 nt, Human
uaaugugguuauuucu

SEQ ID NO: 3889997 - RNA, 19 nt, Human
uaauguguauuacaaauau

SEQ ID NO: 3889998 - RNA, 13 nt, Human
uaaugugugaaaa

SEQ ID NO: 3889999 - RNA, 15 nt, Human
uaauguguggauugc

SEQ ID NO: 3890000 - RNA, 18 nt, Human
uaaugugugguggccuca

SEQ ID NO: 3890001 - RNA, 12 nt, Human
uaauguguguau

SEQ ID NO: 3890002 - RNA, 23 nt, Human
uaauguguuuuagaguaagaaau

SEQ ID NO: 3890003 - RNA, 17 nt, Human
uaauguuaauauugauu

SEQ ID NO: 3890004 - RNA, 15 nt, Human
uaauguuaauucagc

SEQ ID NO: 3890005 - RNA, 14 nt, Human
uaauguuacugauc

SEQ ID NO: 3890006 - RNA, 21 nt, Human
uaauguuacugaucaugcauu

SEQ ID NO: 3890007 - RNA, 20 nt, Human
uaauguucugaauaauuucu

SEQ ID NO: 3890008 - RNA, 15 nt, Human
uaauguucugugaua

SEQ ID NO: 3890009 - RNA, 18 nt, Human
uaauguucugugauacag

SEQ ID NO: 3890010 - RNA, 23 nt, Human
uaauguucuuaugcaaaauggaa

SEQ ID NO: 3890011 - RNA, 16 nt, Human
uaauguugaacaaaau

SEQ ID NO: 3890012 - RNA, 17 nt, Human
uaauguugauuucuagu

SEQ ID NO: 3890013 - RNA, 21 nt, Human
uaauguuggacaccuuuaggu

SEQ ID NO: 3890014 - RNA, 14 nt, Human
uaauguugugaaua

SEQ ID NO: 3890015 - RNA, 16 nt, Human
uaauguugugaauaau

SEQ ID NO: 3890016 - RNA, 19 nt, Human
uaauguugugaauaauuac

SEQ ID NO: 3890017 - RNA, 21 nt, Human
uaauguugugaauaauuacag

SEQ ID NO: 3890018 - RNA, 16 nt, Human
uaauguuuaagcagaa

SEQ ID NO: 3890019 - RNA, 16 nt, Human
uaauguuuaugagcca

SEQ ID NO: 3890020 - RNA, 17 nt, Human
uaauguuuauuaaaugc

SEQ ID NO: 3890021 - RNA, 17 nt, Human
uaauguuucuaucugau

SEQ ID NO: 3890022 - RNA, 14 nt, Human
uaauguuugcauau

SEQ ID NO: 3890023 - RNA, 15 nt, Human
uaauguuugcauaua

SEQ ID NO: 3890024 - RNA, 16 nt, Human
uaauguuugcauauaa

SEQ ID NO: 3890025 - RNA, 18 nt, Human
uaauuaaaaacuaguagu

SEQ ID NO: 3890026 - RNA, 19 nt, Human
uaauuaaaaacuaguaguu

SEQ ID NO: 3890027 - RNA, 15 nt, Human
uaauuaaaacacuuu

SEQ ID NO: 3890028 - RNA, 18 nt, Human
uaauuaaaagcaaaucau

SEQ ID NO: 3890029 - RNA, 19 nt, Human
uaauuaaaagcaaaucauu

SEQ ID NO: 3890030 - RNA, 14 nt, Human
uaauuaaacuguua

SEQ ID NO: 3890031 - RNA, 22 nt, Human
uaauuaaauaaaucauuaauac

SEQ ID NO: 3890032 - RNA, 13 nt, Human
uaauuaaaugcuc

SEQ ID NO: 3890033 - RNA, 14 nt, Human
uaauuaaauuaugg

SEQ ID NO: 3890034 - RNA, 23 nt, Human
uaauuaaauuuugaguucuacau

SEQ ID NO: 3890035 - RNA, 17 nt, Human
uaauuaaguaaacuaau

SEQ ID NO: 3890036 - RNA, 17 nt, Human
uaauuaaguacuaugua

SEQ ID NO: 3890037 - RNA, 11 nt, Human
uaauuaauuuc

SEQ ID NO: 3890038 - RNA, 19 nt, Human
uaauuaauuugauuaacaa

SEQ ID NO: 3890039 - RNA, 21 nt, Human
uaauuaauuugauuaacaaau

SEQ ID NO: 3890040 - RNA, 20 nt, Human
uaauuaauuuggagcacaaa

SEQ ID NO: 3890041 - RNA, 18 nt, Human
uaauuacaauauuucuga

SEQ ID NO: 3890042 - RNA, 17 nt, Human
uaauuacauauuugcau

SEQ ID NO: 3890043 - RNA, 16 nt, Human
uaauuacugccuugaa

SEQ ID NO: 3890044 - RNA, 17 nt, Human
uaauuacugccuugaaa

SEQ ID NO: 3890045 - RNA, 13 nt, Human
uaauuacuuaaaa

SEQ ID NO: 3890046 - RNA, 22 nt, Human
uaauuagagcagaugaccccuc

SEQ ID NO: 3890047 - RNA, 14 nt, Human
uaauuagauccauu

SEQ ID NO: 3890048 - RNA, 20 nt, Human
uaauuagauccauuaauuua

SEQ ID NO: 3890049 - RNA, 16 nt, Human
uaauuagcaucucagg

SEQ ID NO: 3890050 - RNA, 17 nt, Human
uaauuucccuucuugca

SEQ ID NO: 3890051 - RNA, 13 nt, Human
uaauuucuaaugu

SEQ ID NO: 3890052 - RNA, 13 nt, Human
uaauuucuccucc

SEQ ID NO: 3890053 - RNA, 17 nt, Human
uaauuucuucaaaaugu

SEQ ID NO: 3890054 - RNA, 22 nt, Human
uaauuucuucaaaauguauaua

SEQ ID NO: 3890055 - RNA, 17 nt, Human
uaauuucuuugccuguu

SEQ ID NO: 3890056 - RNA, 23 nt, Human
uaauuucuuugccuguucaguua

SEQ ID NO: 3890057 - RNA, 16 nt, Human
uaauuugacuagaaaa

SEQ ID NO: 3890058 - RNA, 12 nt, Human
uaauuugauauc

SEQ ID NO: 3890059 - RNA, 19 nt, Human
uaauuugauaucacagucu

SEQ ID NO: 3890060 - RNA, 17 nt, Human
uaauuugaugaaagcug

SEQ ID NO: 3890061 - RNA, 24 nt, Human
uaauuugaugaaagcugauuacug

SEQ ID NO: 3890062 - RNA, 14 nt, Human
uaauuugauguuua

SEQ ID NO: 3890063 - RNA, 14 nt, Human
uaauuugauuaaca

SEQ ID NO: 3890064 - RNA, 18 nt, Human
uaauuugauuaacaaaua

SEQ ID NO: 3890065 - RNA, 17 nt, Human
uaauuuggaccauuuuc

SEQ ID NO: 3890066 - RNA, 20 nt, Human
uaauuuggaccauuuuccug

SEQ ID NO: 3890067 - RNA, 23 nt, Human
uaauuuggaucucuucuuaaugu

SEQ ID NO: 3890068 - RNA, 22 nt, Human
uaauuuggggaaaccuagagaa

SEQ ID NO: 3890069 - RNA, 17 nt, Human
uaauuugguuuucacau

SEQ ID NO: 3890070 - RNA, 14 nt, Human
uaauuugugauaca

SEQ ID NO: 3890071 - RNA, 17 nt, Human
uaauuuguggugauuug

SEQ ID NO: 3890072 - RNA, 14 nt, Human
uaauuuguguaaua

SEQ ID NO: 3890073 - RNA, 22 nt, Human
uaauuuguuggggcuuuacaua

SEQ ID NO: 3890074 - RNA, 12 nt, Human
uaauuuguuucc

SEQ ID NO: 3890075 - RNA, 17 nt, Human
uaauuuuaaaaauggug

SEQ ID NO: 3890076 - RNA, 12 nt, Human
uaauuuuaaagu

SEQ ID NO: 3890077 - RNA, 14 nt, Human
uaauuuuaaccaaa

SEQ ID NO: 3890078 - RNA, 23 nt, Human
uaauuuuaaccaaaacaugucuc

SEQ ID NO: 3890079 - RNA, 19 nt, Human
uaauuuuaagauuccuuuu

SEQ ID NO: 3890080 - RNA, 14 nt, Human
uaauuuuacacauu

SEQ ID NO: 3890081 - RNA, 19 nt, Human
uaauuuuacacgcuuuugu

SEQ ID NO: 3890082 - RNA, 22 nt, Human
uaauuuuacauguuuauaaauc

SEQ ID NO: 3890083 - RNA, 19 nt, Human
uaauuuuagugacagcucu

SEQ ID NO: 3890084 - RNA, 16 nt, Human
uaauuuuaguuuuuca

SEQ ID NO: 3890085 - RNA, 23 nt, Human
uaauuuuaguuuuucauuaaaua

SEQ ID NO: 3890086 - RNA, 18 nt, Human
uaauuuuaugaaugucuu

SEQ ID NO: 3890087 - RNA, 13 nt, Human
uaauuuucucaaa

SEQ ID NO: 3890088 - RNA, 19 nt, Human
uaauuuucucaaaagcauu

SEQ ID NO: 3890089 - RNA, 23 nt, Human
uaauuuucuugaugacuggaauu

SEQ ID NO: 3890090 - RNA, 13 nt, Human
uaauuuugaaaaa

SEQ ID NO: 3890091 - RNA, 17 nt, Human
uaauuuugaaaaacugc

SEQ ID NO: 3890092 - RNA, 17 nt, Human
uaauuuugaaaagaugu

SEQ ID NO: 3890093 - RNA, 18 nt, Human
uaauuuugaagugcuguu

SEQ ID NO: 3890094 - RNA, 15 nt, Human
uaauuuugaauaaau

SEQ ID NO: 3890095 - RNA, 12 nt, Human
uaauuuugacac

SEQ ID NO: 3890096 - RNA, 21 nt, Human
uaauuuugacacuauaucugu

SEQ ID NO: 3890097 - RNA, 17 nt, Human
uaauuuugacacugaaa

SEQ ID NO: 3890098 - RNA, 20 nt, Human
uaauuuugauagugggacca

SEQ ID NO: 3890099 - RNA, 14 nt, Human
uaauuuugguugua

SEQ ID NO: 3890100 - RNA, 17 nt, Human
uaauuuugguuguauuc

SEQ ID NO: 3890101 - RNA, 14 nt, Human
uaauuuuguaucuu

SEQ ID NO: 3890102 - RNA, 11 nt, Human
uaauuuugucu

SEQ ID NO: 3890103 - RNA, 19 nt, Human
uaauuuuguguaagaaaua

SEQ ID NO: 3890104 - RNA, 20 nt, Human
uaauuuuguguaagaaauac

SEQ ID NO: 3890105 - RNA, 15 nt, Human
uaauuuuuaaaugca

SEQ ID NO: 3890106 - RNA, 18 nt, Human
uaauuuuuacccuaaugu

SEQ ID NO: 3890107 - RNA, 20 nt, Human
uaauuuuuacccuaaugucu

SEQ ID NO: 3890108 - RNA, 16 nt, Human
uaauuuuuauauuuga

SEQ ID NO: 3890109 - RNA, 17 nt, Human
uaauuuuuauauuugaa

SEQ ID NO: 3890110 - RNA, 19 nt, Human
uaauuuuuauauuugaaau

SEQ ID NO: 3890111 - RNA, 21 nt, Human
uaauuuuuauauuugaaauau

SEQ ID NO: 3890112 - RNA, 22 nt, Human
uaauuuuuauuaauuuuaguuu

SEQ ID NO: 3890113 - RNA, 23 nt, Human
uaauuuuuauucauaagccaauu

SEQ ID NO: 3890114 - RNA, 16 nt, Human
uaauuuuuauuucuuc

SEQ ID NO: 3890115 - RNA, 17 nt, Human
uaauuuuuauuucuucc

SEQ ID NO: 3890116 - RNA, 22 nt, Human
uaauuuuucagcucucuguaua

SEQ ID NO: 3890117 - RNA, 14 nt, Human
uaauuuuuccaacu

SEQ ID NO: 3890118 - RNA, 11 nt, Human
uaauuuuuccu

SEQ ID NO: 3890119 - RNA, 21 nt, Human
uaauuuuugauacuaagcauu

SEQ ID NO: 3890120 - RNA, 23 nt, Human
uaauuuuugauacuaagcauuga

SEQ ID NO: 3890121 - RNA, 14 nt, Human
uaauuuuugcuuuu

SEQ ID NO: 3890122 - RNA, 15 nt, Human
uaauuuuugcuuuua

SEQ ID NO: 3890123 - RNA, 14 nt, Human
uaauuuuuguaauu

SEQ ID NO: 3890124 - RNA, 21 nt, Human
uaauuuuuguauuauuuuugu

SEQ ID NO: 3890125 - RNA, 17 nt, Human
uaauuuuuuuaaccaaa

SEQ ID NO: 3890126 - RNA, 21 nt, Human
uaauuuuuuuaaccaaaggug

SEQ ID NO: 3890127 - RNA, 22 nt, Human
uaauuuuuuuaaccaaagguga

SEQ ID NO: 3890128 - RNA, 17 nt, Human
uaauuuuuuuauguuuu

SEQ ID NO: 3890129 - RNA, 17 nt, Human
uaauuuuuuuauuguuu

SEQ ID NO: 3890130 - RNA, 17 nt, Human
uaauuuuuuuuaaaaua

SEQ ID NO: 3890131 - RNA, 15 nt, Human
uacaaaaacacagca

SEQ ID NO: 3890132 - RNA, 15 nt, Human
uacaaaaauaaauuu

SEQ ID NO: 3890133 - RNA, 22 nt, Human
uacaaaaauaaauuuauaugaa

SEQ ID NO: 3890134 - RNA, 18 nt, Human
uacaaaaaucagccagac

SEQ ID NO: 3890135 - RNA, 20 nt, Human
uacaaaaccacaguguacca

SEQ ID NO: 3890136 - RNA, 23 nt, Human
uacaaaaccacaguguaccauua

SEQ ID NO: 3890137 - RNA, 19 nt, Human
uacaaaacgcgcagaugug

SEQ ID NO: 3890138 - RNA, 23 nt, Human
uacaaaagaggagcacuuccaaa

SEQ ID NO: 3890139 - RNA, 15 nt, Human
uacaaaagcauguga

SEQ ID NO: 3890140 - RNA, 18 nt, Human
uacaaaagggacaugaaa

SEQ ID NO: 3890141 - RNA, 15 nt, Human
uacaaaauaaaaaca

SEQ ID NO: 3890142 - RNA, 12 nt, Human
uacaaaauguaa

SEQ ID NO: 3890143 - RNA, 23 nt, Human
uacaaaauguaacuguuaccauu

SEQ ID NO: 3890144 - RNA, 14 nt, Human
uacaaaauuaagca

SEQ ID NO: 3890145 - RNA, 16 nt, Human
uacaaacaaaauuucu

SEQ ID NO: 3890146 - RNA, 18 nt, Human
uacaaacaaaauuucuau

SEQ ID NO: 3890147 - RNA, 14 nt, Human
uacaaacaagcaua

SEQ ID NO: 3890148 - RNA, 20 nt, Human
uacaaacaaucucuuaaauu

SEQ ID NO: 3890149 - RNA, 16 nt, Human
uacaaacauuuaagcu

SEQ ID NO: 3890150 - RNA, 13 nt, Human
uacaaaccuacca

SEQ ID NO: 3890151 - RNA, 19 nt, Human
uacaaacucccacuuguca

SEQ ID NO: 3890152 - RNA, 15 nt, Human
uacaaacugaagagu

SEQ ID NO: 3890153 - RNA, 14 nt, Human
uacaaacugcaaua

SEQ ID NO: 3890154 - RNA, 17 nt, Human
uacaaagaaauaacaag

SEQ ID NO: 3890155 - RNA, 13 nt, Human
uacaaagaagaca

SEQ ID NO: 3890156 - RNA, 18 nt, Human
uacaaagaagacauguuu

SEQ ID NO: 3890157 - RNA, 23 nt, Human
uacaaagcacuagagaaugcaca

SEQ ID NO: 3890158 - RNA, 13 nt, Human
uacaaaggaaaaa

SEQ ID NO: 3890159 - RNA, 14 nt, Human
uacaaaggaaaaag

SEQ ID NO: 3890160 - RNA, 14 nt, Human
uacaaagguuuaaa

SEQ ID NO: 3890161 - RNA, 19 nt, Human
uacaaagguuuaaaugaac

SEQ ID NO: 3890162 - RNA, 20 nt, Human
uacaaagguuuaaaugaaca

SEQ ID NO: 3890163 - RNA, 14 nt, Human
uacaaaguagaagu

SEQ ID NO: 3890164 - RNA, 14 nt, Human
uacaaaguauuaag

SEQ ID NO: 3890165 - RNA, 15 nt, Human
uacaaaguauuaagc

SEQ ID NO: 3890166 - RNA, 16 nt, Human
uacaaaguauuaagca

SEQ ID NO: 3890167 - RNA, 19 nt, Human
uacaaaguauuaagcauau

SEQ ID NO: 3890168 - RNA, 13 nt, Human
uacaaagugaugu

SEQ ID NO: 3890169 - RNA, 17 nt, Human
uacaaaguguauuuuau

SEQ ID NO: 3890170 - RNA, 19 nt, Human
uacaaaguguguauuaaaa

SEQ ID NO: 3890171 - RNA, 23 nt, Human
uacaaauacucuuaggaagagaa

SEQ ID NO: 3890172 - RNA, 16 nt, Human
uacaaauauaaaucuu

SEQ ID NO: 3890173 - RNA, 16 nt, Human
uacaaauauaagaaua

SEQ ID NO: 3890174 - RNA, 17 nt, Human
uacaaauauaagauuuu

SEQ ID NO: 3890175 - RNA, 21 nt, Human
uacaaaucagaagucaucuug

SEQ ID NO: 3890176 - RNA, 13 nt, Human
uacaaaugauugc

SEQ ID NO: 3890177 - RNA, 19 nt, Human
uacaaaugauugcuuuuaa

SEQ ID NO: 3890178 - RNA, 21 nt, Human
uacaaaugauugcuuuuaaaa

SEQ ID NO: 3890179 - RNA, 17 nt, Human
uacaaaugcaucuuuga

SEQ ID NO: 3890180 - RNA, 23 nt, Human
uacaaaugccuccaaaguauugu

SEQ ID NO: 3890181 - RNA, 13 nt, Human
uacaaaugccuua

SEQ ID NO: 3890182 - RNA, 13 nt, Human
uacaaauggauuu

SEQ ID NO: 3890183 - RNA, 12 nt, Human
uacaaaugucuu

SEQ ID NO: 3890184 - RNA, 18 nt, Human
uacaaauguuaaaaugug

SEQ ID NO: 3890185 - RNA, 15 nt, Human
uacaaauuaaaaaga

SEQ ID NO: 3890186 - RNA, 13 nt, Human
uacaaauuagaaa

SEQ ID NO: 3890187 - RNA, 14 nt, Human
uacaaauuagaaaa

SEQ ID NO: 3890188 - RNA, 16 nt, Human
uacaaauuauaaugua

SEQ ID NO: 3890189 - RNA, 19 nt, Human
uacaaauugcuugaaagaa

SEQ ID NO: 3890190 - RNA, 16 nt, Human
uacaaauuuguuauuu

SEQ ID NO: 3890191 - RNA, 23 nt, Human
uacaacaaaggcaaguuaagaga

SEQ ID NO: 3890192 - RNA, 19 nt, Human
uacaacaagaguuuauuuc

SEQ ID NO: 3890193 - RNA, 18 nt, Human
uacaacacuuuaaugggu

SEQ ID NO: 3890194 - RNA, 13 nt, Human
uacaacagugcua

SEQ ID NO: 3890195 - RNA, 23 nt, Human
uagaaaaucaagcagguuagaga

SEQ ID NO: 3890196 - RNA, 20 nt, Human
uagaaaaugugacccuccaa

SEQ ID NO: 3890197 - RNA, 24 nt, Human
uagaaaauguguccuaucuaucuu

SEQ ID NO: 3890198 - RNA, 16 nt, Human
uagaaaauuagacugu

SEQ ID NO: 3890199 - RNA, 23 nt, Human
uagaaaauuuguuauuuugcaac

SEQ ID NO: 3890200 - RNA, 17 nt, Human
uagaaacaaacaucuaa

SEQ ID NO: 3890201 - RNA, 13 nt, Human
uagaaacaacacu

SEQ ID NO: 3890202 - RNA, 17 nt, Human
uagaaacaacacuguag

SEQ ID NO: 3890203 - RNA, 19 nt, Human
uagaaacaacacuguagua

SEQ ID NO: 3890204 - RNA, 16 nt, Human
uagaaacacauaauua

SEQ ID NO: 3890205 - RNA, 21 nt, Human
uagaaacacauaauuaacacu

SEQ ID NO: 3890206 - RNA, 13 nt, Human
uagaaacaugaca

SEQ ID NO: 3890207 - RNA, 14 nt, Human
uagaaacaugacac

SEQ ID NO: 3890208 - RNA, 16 nt, Human
uagaaacaugacacug

SEQ ID NO: 3890209 - RNA, 17 nt, Human
uagaaacaugacacuga

SEQ ID NO: 3890210 - RNA, 19 nt, Human
uagaaacaugacacugacc

SEQ ID NO: 3890211 - RNA, 15 nt, Human
uagaaacccaagcuc

SEQ ID NO: 3890212 - RNA, 15 nt, Human
uagaaacuuccaaau

SEQ ID NO: 3890213 - RNA, 17 nt, Human
uagaaagacagagcugg

SEQ ID NO: 3890214 - RNA, 17 nt, Human
uagaaagaccaggccaa

SEQ ID NO: 3890215 - RNA, 18 nt, Human
uagaaagagauacagagg

SEQ ID NO: 3890216 - RNA, 13 nt, Human
uagaaagcauuug

SEQ ID NO: 3890217 - RNA, 17 nt, Human
uagaaagcauuugaaug

SEQ ID NO: 3890218 - RNA, 22 nt, Human
uagaaagcauuugaaugcauuu

SEQ ID NO: 3890219 - RNA, 23 nt, Human
uagaaagccuguuccccucacug

SEQ ID NO: 3890220 - RNA, 13 nt, Human
uagaaaggccuuu

SEQ ID NO: 3890221 - RNA, 16 nt, Human
uagaaaggccuuuaaa

SEQ ID NO: 3890222 - RNA, 22 nt, Human
uagaaaggggcaguuuaaagca

SEQ ID NO: 3890223 - RNA, 17 nt, Human
uagaaagugaauaaaaa

SEQ ID NO: 3890224 - RNA, 21 nt, Human
uagaaagugaauaaaaauuaa

SEQ ID NO: 3890225 - RNA, 17 nt, Human
uagaaagugccagaaag

SEQ ID NO: 3890226 - RNA, 16 nt, Human
uagaaaguguucuguu

SEQ ID NO: 3890227 - RNA, 19 nt, Human
uagaaaguguucuguuaca

SEQ ID NO: 3890228 - RNA, 21 nt, Human
uagaaaguguucuguuacaaa

SEQ ID NO: 3890229 - RNA, 16 nt, Human
uagaaauaaauagcua

SEQ ID NO: 3890230 - RNA, 22 nt, Human
uagaaauaagugguuauuucuc

SEQ ID NO: 3890231 - RNA, 15 nt, Human
uagaaauaauaugca

SEQ ID NO: 3890232 - RNA, 21 nt, Human
uagaaauaucugaaaauguau

SEQ ID NO: 3890233 - RNA, 14 nt, Human
uagaaauauuuuaa

SEQ ID NO: 3890234 - RNA, 21 nt, Human
uagaaauggaaauuuugcuau

SEQ ID NO: 3890235 - RNA, 19 nt, Human
uagaaauggggaacuacug

SEQ ID NO: 3890236 - RNA, 23 nt, Human
uagaaaugguuguauuagauguu

SEQ ID NO: 3890237 - RNA, 18 nt, Human
uagaaauguaaacugcca

SEQ ID NO: 3890238 - RNA, 19 nt, Human
uagaaauguaaacugccau

SEQ ID NO: 3890239 - RNA, 19 nt, Human
uagaaauguaacuuuugua

SEQ ID NO: 3890240 - RNA, 16 nt, Human
uagaaauguagguccu

SEQ ID NO: 3890241 - RNA, 15 nt, Human
uagaaauguuugcug

SEQ ID NO: 3890242 - RNA, 18 nt, Human
uagaaauuagcuguguga

SEQ ID NO: 3890243 - RNA, 14 nt, Human
uagaaauucuuuau

SEQ ID NO: 3890244 - RNA, 18 nt, Human
uagaaauuuuguaagaag

SEQ ID NO: 3890245 - RNA, 22 nt, Human
uagaaauuuuguaagaaggcaa

SEQ ID NO: 3890246 - RNA, 19 nt, Human
uagaaauuuuucagaugcu

SEQ ID NO: 3890247 - RNA, 20 nt, Human
uagaacaaaggacagaguau

SEQ ID NO: 3890248 - RNA, 17 nt, Human
uagaacaacauauacaa

SEQ ID NO: 3890249 - RNA, 15 nt, Human
uagaacacaggcaaa

SEQ ID NO: 3890250 - RNA, 16 nt, Human
uagaacacuaacucac

SEQ ID NO: 3890251 - RNA, 16 nt, Human
uagaacacuaauucau

SEQ ID NO: 3890252 - RNA, 12 nt, Human
uagaacacuauu

SEQ ID NO: 3890253 - RNA, 13 nt, Human
uagaacacuauuu

SEQ ID NO: 3890254 - RNA, 17 nt, Human
uagaacacuauuuucag

SEQ ID NO: 3890255 - RNA, 13 nt, Human
uagaacagaaaac

SEQ ID NO: 3890256 - RNA, 14 nt, Human
uagaacagaaaaca

SEQ ID NO: 3890257 - RNA, 21 nt, Human
uagaacagaaaacaacaaaaa

SEQ ID NO: 3890258 - RNA, 23 nt, Human
uagaacagaaaacaacaaaaaau

SEQ ID NO: 3890259 - RNA, 17 nt, Human
uagaacagauaaucagu

SEQ ID NO: 3890260 - RNA, 13 nt, Human
uagaacagguuuu

SEQ ID NO: 3890261 - RNA, 17 nt, Human
uagaacauaaagcaaau

SEQ ID NO: 3890262 - RNA, 14 nt, Human
uagaacaucccugc

SEQ ID NO: 3890263 - RNA, 17 nt, Human
uagaaccaagaagggcu

SEQ ID NO: 3890264 - RNA, 12 nt, Human
uagaaccaggca

SEQ ID NO: 3890265 - RNA, 23 nt, Human
uagaaccaggcaacuugggaacu

SEQ ID NO: 3890266 - RNA, 22 nt, Human
uagaacccggcaggcuagaacc

SEQ ID NO: 3890267 - RNA, 16 nt, Human
uagaacccuugcacag

SEQ ID NO: 3890268 - RNA, 16 nt, Human
uagaaccuagaagggc

SEQ ID NO: 3890269 - RNA, 23 nt, Human
uagaaccuagaagggcuagaacc

SEQ ID NO: 3890270 - RNA, 21 nt, Human
uagaaccucgagguuucucaa

SEQ ID NO: 3890271 - RNA, 23 nt, Human
uagaaccuggaagggcuagaacc

SEQ ID NO: 3890272 - RNA, 19 nt, Human
uagaacucaguuuuaacua

SEQ ID NO: 3890273 - RNA, 17 nt, Human
uagaacucccuuucaac

SEQ ID NO: 3890274 - RNA, 18 nt, Human
uagaacucccuuucaaca

SEQ ID NO: 3890275 - RNA, 13 nt, Human
uagaacugaauuu

SEQ ID NO: 3890276 - RNA, 22 nt, Human
uagaacugaauuuugucuuuau

SEQ ID NO: 3890277 - RNA, 20 nt, Human
uagaacuggguaaaugcaaa

SEQ ID NO: 3890278 - RNA, 15 nt, Human
uagaacuucauggau

SEQ ID NO: 3890279 - RNA, 16 nt, Human
uagaacuugacccccu

SEQ ID NO: 3890280 - RNA, 14 nt, Human
uagaacuuuguaua

SEQ ID NO: 3890281 - RNA, 19 nt, Human
uagaacuuuuuuaaauaaa

SEQ ID NO: 3890282 - RNA, 20 nt, Human
uagaacuuuuuuaaauaaac

SEQ ID NO: 3890283 - RNA, 16 nt, Human
uagaagaaagauguuu

SEQ ID NO: 3890284 - RNA, 12 nt, Human
uagaagaaauga

SEQ ID NO: 3890285 - RNA, 17 nt, Human
uagaagaaaugaaauuu

SEQ ID NO: 3890286 - RNA, 16 nt, Human
uagaagaauauuguau

SEQ ID NO: 3890287 - RNA, 17 nt, Human
uagaagaauauuguauu

SEQ ID NO: 3890288 - RNA, 14 nt, Human
uagaagaaugcaug

SEQ ID NO: 3890289 - RNA, 16 nt, Human
uagaagaaugcaugcu

SEQ ID NO: 3890290 - RNA, 20 nt, Human
uagaagacaauugacaacag

SEQ ID NO: 3890291 - RNA, 14 nt, Human
uagaagagagaggu

SEQ ID NO: 3890292 - RNA, 17 nt, Human
uagaagagucuauuguc

SEQ ID NO: 3890293 - RNA, 21 nt, Human
uagaagcacuacaccuugccu

SEQ ID NO: 3890294 - RNA, 20 nt, Human
uagaagcauuccuucuuuga

SEQ ID NO: 3890295 - RNA, 17 nt, Human
uagaagcuggaggacua

SEQ ID NO: 3890296 - RNA, 21 nt, Human
uagaaggaaaaccuagaaaac

SEQ ID NO: 3890297 - RNA, 13 nt, Human
uagaaggaaacua

SEQ ID NO: 3890298 - RNA, 17 nt, Human
uagaaggauguacauuu

SEQ ID NO: 3890299 - RNA, 21 nt, Human
uagaaggauguacauuuccaa

SEQ ID NO: 3890300 - RNA, 18 nt, Human
uagaaggcuguggugagg

SEQ ID NO: 3890301 - RNA, 23 nt, Human
uagaaggcuguggugagggaaga

SEQ ID NO: 3890302 - RNA, 22 nt, Human
uagaagggccaguccugccugg

SEQ ID NO: 3890303 - RNA, 16 nt, Human
uagaaggguuauauuu

SEQ ID NO: 3890304 - RNA, 16 nt, Human
uagaaggucggaggcu

SEQ ID NO: 3890305 - RNA, 21 nt, Human
uagaaggucggaggcuuggga

SEQ ID NO: 3890306 - RNA, 20 nt, Human
uagaaguaggaagugaaaau

SEQ ID NO: 3890307 - RNA, 16 nt, Human
uagaagucacacagua

SEQ ID NO: 3890308 - RNA, 23 nt, Human
uagaagucacauuccugaacagg

SEQ ID NO: 3890309 - RNA, 16 nt, Human
uagaagucuuagaugu

SEQ ID NO: 3890310 - RNA, 15 nt, Human
uagaagucuucauga

SEQ ID NO: 3890311 - RNA, 20 nt, Human
uagaagugagcaaaaaagag

SEQ ID NO: 3890312 - RNA, 17 nt, Human
uagaagugcauuucuga

SEQ ID NO: 3890313 - RNA, 18 nt, Human
uagaagugcauuucugaa

SEQ ID NO: 3890314 - RNA, 20 nt, Human
uagaaguggaccaggacagg

SEQ ID NO: 3890315 - RNA, 16 nt, Human
uagaagugggccagga

SEQ ID NO: 3890316 - RNA, 16 nt, Human
uagaaguuuggcugcu

SEQ ID NO: 3890317 - RNA, 21 nt, Human
uagaaguuuguccauuuguaa

SEQ ID NO: 3890318 - RNA, 13 nt, Human
uagaaguuuuugu

SEQ ID NO: 3890319 - RNA, 16 nt, Human
uagaaguuuuuguacu

SEQ ID NO: 3890320 - RNA, 18 nt, Human
uagaauaagaauuugcau

SEQ ID NO: 3890321 - RNA, 21 nt, Human
uagaauaaugugggaagaaac

SEQ ID NO: 3890322 - RNA, 20 nt, Human
uagaauagcauguuguagau

SEQ ID NO: 3890323 - RNA, 21 nt, Human
uagaauagccuguggccuuug

SEQ ID NO: 3890324 - RNA, 15 nt, Human
uagaauauaauuauc

SEQ ID NO: 3890325 - RNA, 19 nt, Human
uagaauauaggucucuucu

SEQ ID NO: 3890326 - RNA, 22 nt, Human
uagaauauaggucucuucuccc

SEQ ID NO: 3890327 - RNA, 19 nt, Human
uagaauauuuauuaccucu

SEQ ID NO: 3890328 - RNA, 21 nt, Human
uagaaucagccuaggggucag

SEQ ID NO: 3890329 - RNA, 15 nt, Human
uagaauccaaacuug

SEQ ID NO: 3890330 - RNA, 15 nt, Human
uagaaucccuguguu

SEQ ID NO: 3890331 - RNA, 20 nt, Human
uagaaucccuguguuaauuu

SEQ ID NO: 3890332 - RNA, 16 nt, Human
uagaaucuauuuucua

SEQ ID NO: 3890333 - RNA, 22 nt, Human
uagaaucuauuuucuauguacu

SEQ ID NO: 3890334 - RNA, 12 nt, Human
uagaaucuggag

SEQ ID NO: 3890335 - RNA, 13 nt, Human
uagaaucugugua

SEQ ID NO: 3890336 - RNA, 20 nt, Human
uagaaugaaaauuguauguu

SEQ ID NO: 3890337 - RNA, 19 nt, Human
uagaaugaccuuguaaugu

SEQ ID NO: 3890338 - RNA, 21 nt, Human
uagaaugaccuuguaauguaa

SEQ ID NO: 3890339 - RNA, 17 nt, Human
uagagccuguaaacuuu

SEQ ID NO: 3890340 - RNA, 16 nt, Human
uagagcuagucuuuca

SEQ ID NO: 3890341 - RNA, 14 nt, Human
uagagcuccucccu

SEQ ID NO: 3890342 - RNA, 23 nt, Human
uagagcugacacaaaccugccug

SEQ ID NO: 3890343 - RNA, 15 nt, Human
uagagcugauccaga

SEQ ID NO: 3890344 - RNA, 19 nt, Human
uagagcugauccagagcac

SEQ ID NO: 3890345 - RNA, 15 nt, Human
uagagcuucuggcac

SEQ ID NO: 3890346 - RNA, 17 nt, Human
uagagcuuucaaguaca

SEQ ID NO: 3890347 - RNA, 18 nt, Human
uagaggaaaaaaaugacu

SEQ ID NO: 3890348 - RNA, 15 nt, Human
uagaggaagcagcca

SEQ ID NO: 3890349 - RNA, 19 nt, Human
uagaggagaaacuggaacu

SEQ ID NO: 3890350 - RNA, 19 nt, Human
uagaggcagggaggggacu

SEQ ID NO: 3890351 - RNA, 18 nt, Human
uagaggccagccccaccc

SEQ ID NO: 3890352 - RNA, 20 nt, Human
uagaggccagccccacccag

SEQ ID NO: 3890353 - RNA, 12 nt, Human
uagaggccugag

SEQ ID NO: 3890354 - RNA, 16 nt, Human
uagaggcuuccuucau

SEQ ID NO: 3890355 - RNA, 18 nt, Human
uagaggcuuccuucauuu

SEQ ID NO: 3890356 - RNA, 23 nt, Human
uagaggcuucuccgccagccucc

SEQ ID NO: 3890357 - RNA, 15 nt, Human
uagagggaccucucc

SEQ ID NO: 3890358 - RNA, 21 nt, Human
uagagggacggccaagaaugu

SEQ ID NO: 3890359 - RNA, 13 nt, Human
uagagggaggggc

SEQ ID NO: 3890360 - RNA, 20 nt, Human
uagagggagguguuuaaaga

SEQ ID NO: 3890361 - RNA, 13 nt, Human
uagaggguuccug

SEQ ID NO: 3890362 - RNA, 16 nt, Human
uagagguauaauugug

SEQ ID NO: 3890363 - RNA, 19 nt, Human
uagagguccucuggagccc

SEQ ID NO: 3890364 - RNA, 20 nt, Human
uagagguccucuggagcccu

SEQ ID NO: 3890365 - RNA, 17 nt, Human
uagaggugagaaauuua

SEQ ID NO: 3890366 - RNA, 16 nt, Human
uagaggugagggaagc

SEQ ID NO: 3890367 - RNA, 16 nt, Human
uagaggugcaugccua

SEQ ID NO: 3890368 - RNA, 14 nt, Human
uagagguucaaaga

SEQ ID NO: 3890369 - RNA, 16 nt, Human
uagagguuuuguuguu

SEQ ID NO: 3890370 - RNA, 19 nt, Human
uagagguuuuguuguuuua

SEQ ID NO: 3890371 - RNA, 12 nt, Human
uagaguaaugaa

SEQ ID NO: 3890372 - RNA, 17 nt, Human
uagaguaaugaaaugga

SEQ ID NO: 3890373 - RNA, 17 nt, Human
uagaguagaagucucuu

SEQ ID NO: 3890374 - RNA, 14 nt, Human
uagagucagccuuc

SEQ ID NO: 3890375 - RNA, 21 nt, Human
uagagucauuguaauguugug

SEQ ID NO: 3890376 - RNA, 19 nt, Human
uagaguccaacguggggca

SEQ ID NO: 3890377 - RNA, 16 nt, Human
uagaguccaagguuua

SEQ ID NO: 3890378 - RNA, 20 nt, Human
uagagucccagguuggcucu

SEQ ID NO: 3890379 - RNA, 14 nt, Human
uagaguccucacuc

SEQ ID NO: 3890380 - RNA, 12 nt, Human
uagagugggagc

SEQ ID NO: 3890381 - RNA, 17 nt, Human
uagaguguagacugugg

SEQ ID NO: 3890382 - RNA, 18 nt, Human
uagaguguuguugagaau

SEQ ID NO: 3890383 - RNA, 17 nt, Human
uagaguuaacaaugaua

SEQ ID NO: 3890384 - RNA, 15 nt, Human
uagaguuaagaagcu

SEQ ID NO: 3890385 - RNA, 16 nt, Human
uagaguuaagaagcug

SEQ ID NO: 3890386 - RNA, 17 nt, Human
uagaguuaagaagcugu

SEQ ID NO: 3890387 - RNA, 16 nt, Human
uagaguuagacuguug

SEQ ID NO: 3890388 - RNA, 17 nt, Human
uagaguuagacuguugg

SEQ ID NO: 3890389 - RNA, 14 nt, Human
uagaguugauacua

SEQ ID NO: 3890390 - RNA, 16 nt, Human
uagaguugcugagagg

SEQ ID NO: 3890391 - RNA, 17 nt, Human
uagaguuuacagcucug

SEQ ID NO: 3890392 - RNA, 17 nt, Human
uagaguuugcuauuaga

SEQ ID NO: 3890393 - RNA, 15 nt, Human
uagauaaaaagaugg

SEQ ID NO: 3890394 - RNA, 21 nt, Human
uagauaaaacaucuuugaaau

SEQ ID NO: 3890395 - RNA, 15 nt, Human
uagauaaacucagaa

SEQ ID NO: 3890396 - RNA, 23 nt, Human
uagauaacaagaccucagugccu

SEQ ID NO: 3890397 - RNA, 16 nt, Human
uagauaacucuuugga

SEQ ID NO: 3890398 - RNA, 15 nt, Human
uagauaauauuguuu

SEQ ID NO: 3890399 - RNA, 12 nt, Human
uagauacaauca

SEQ ID NO: 3890400 - RNA, 21 nt, Human
uagauacaaucagcugcuuug

SEQ ID NO: 3890401 - RNA, 21 nt, Human
uagauacaccucaacuaaauc

SEQ ID NO: 3890402 - RNA, 18 nt, Human
uagauacaugcuuuuuaa

SEQ ID NO: 3890403 - RNA, 21 nt, Human
uagauagaaauaaauagcuau

SEQ ID NO: 3890404 - RNA, 20 nt, Human
uagauagcagccuggcuccc

SEQ ID NO: 3890405 - RNA, 23 nt, Human
uagauagcccuguccugguggua

SEQ ID NO: 3890406 - RNA, 22 nt, Human
uagauagcugcauguggcuuuu

SEQ ID NO: 3890407 - RNA, 20 nt, Human
uagauaggaagaaagaagac

SEQ ID NO: 3890408 - RNA, 23 nt, Human
uagauagggcugggcaaggaaaa

SEQ ID NO: 3890409 - RNA, 19 nt, Human
uagauauagagucauugua

SEQ ID NO: 3890410 - RNA, 19 nt, Human
uagauauaugcucugcaug

SEQ ID NO: 3890411 - RNA, 20 nt, Human
uagauaucaugcaaauuuca

SEQ ID NO: 3890412 - RNA, 23 nt, Human
uagauaucgacuuguuuuugcac

SEQ ID NO: 3890413 - RNA, 19 nt, Human
uagauaucuuuuuauugau

SEQ ID NO: 3890414 - RNA, 22 nt, Human
uagauaucuuuuuauugaugug

SEQ ID NO: 3890415 - RNA, 14 nt, Human
uagauauuauucau

SEQ ID NO: 3890416 - RNA, 12 nt, Human
uagauauuuggc

SEQ ID NO: 3890417 - RNA, 20 nt, Human
uagauauuuucacaauguca

SEQ ID NO: 3890418 - RNA, 13 nt, Human
uagaucaaauacu

SEQ ID NO: 3890419 - RNA, 18 nt, Human
uagaucaaauaguugcau

SEQ ID NO: 3890420 - RNA, 22 nt, Human
uagaucaacucauguuaauuga

SEQ ID NO: 3890421 - RNA, 16 nt, Human
uagaucaccagaauaa

SEQ ID NO: 3890422 - RNA, 16 nt, Human
uagaucacgagaucaa

SEQ ID NO: 3890423 - RNA, 18 nt, Human
uagauccacacacagagg

SEQ ID NO: 3890424 - RNA, 15 nt, Human
uagauccauuuccau

SEQ ID NO: 3890425 - RNA, 18 nt, Human
uagauccauuuccauugc

SEQ ID NO: 3890426 - RNA, 15 nt, Human
uagaucccccagacu

SEQ ID NO: 3890427 - RNA, 13 nt, Human
uagaucuccagcg

SEQ ID NO: 3890428 - RNA, 12 nt, Human
uagaucuucuga

SEQ ID NO: 3890429 - RNA, 13 nt, Human
uagaucuucugaa

SEQ ID NO: 3890430 - RNA, 16 nt, Human
uagaucuucugaaaug

SEQ ID NO: 3890431 - RNA, 17 nt, Human
uagaugaaaaagcaugu

SEQ ID NO: 3890432 - RNA, 19 nt, Human
uagaugaaaaagcauguac

SEQ ID NO: 3890433 - RNA, 22 nt, Human
uagaugaaaaagcauguacagu

SEQ ID NO: 3890434 - RNA, 23 nt, Human
uagaugaaaaagcauguacagug

SEQ ID NO: 3890435 - RNA, 20 nt, Human
uagaugaaugucaguuguua

SEQ ID NO: 3890436 - RNA, 19 nt, Human
uagaugacauugacuauuu

SEQ ID NO: 3890437 - RNA, 21 nt, Human
uagaugagauuguuuuaucau

SEQ ID NO: 3890438 - RNA, 19 nt, Human
uagaugauuuuuugaaagu

SEQ ID NO: 3890439 - RNA, 19 nt, Human
uagaugcaagauauuuaua

SEQ ID NO: 3890440 - RNA, 19 nt, Human
uagaugcaguucugaagaa

SEQ ID NO: 3890441 - RNA, 21 nt, Human
uagaugcauuuggguccagga

SEQ ID NO: 3890442 - RNA, 15 nt, Human
uagaugcccugcuag

SEQ ID NO: 3890443 - RNA, 19 nt, Human
uagaugcgcagccccaucu

SEQ ID NO: 3890444 - RNA, 22 nt, Human
uagaugcucuaugugcuuguaa

SEQ ID NO: 3890445 - RNA, 14 nt, Human
uagaugcugacugu

SEQ ID NO: 3890446 - RNA, 13 nt, Human
uagaugcuggccc

SEQ ID NO: 3890447 - RNA, 14 nt, Human
uagaugcuggccca

SEQ ID NO: 3890448 - RNA, 20 nt, Human
uagaugcuuuccuaaaucag

SEQ ID NO: 3890449 - RNA, 20 nt, Human
uagauggcaagcauguaacu

SEQ ID NO: 3890450 - RNA, 13 nt, Human
uagaugggaauga

SEQ ID NO: 3890451 - RNA, 15 nt, Human
uagaugggaaugaag

SEQ ID NO: 3890452 - RNA, 16 nt, Human
uagaugggucuggcug

SEQ ID NO: 3890453 - RNA, 20 nt, Human
uagaugggucuggcugagcu

SEQ ID NO: 3890454 - RNA, 15 nt, Human
uagauggugaaauuu

SEQ ID NO: 3890455 - RNA, 14 nt, Human
uagauggugcugag

SEQ ID NO: 3890456 - RNA, 17 nt, Human
uagaugguuacacuguu

SEQ ID NO: 3890457 - RNA, 19 nt, Human
uagaugguuugagccugag

SEQ ID NO: 3890458 - RNA, 13 nt, Human
uagauguaaauuu

SEQ ID NO: 3890459 - RNA, 12 nt, Human
uagauguauaua

SEQ ID NO: 3890460 - RNA, 16 nt, Human
uagauguaugcacaca

SEQ ID NO: 3890461 - RNA, 20 nt, Human
uagauguauguacuucaugc

SEQ ID NO: 3890462 - RNA, 21 nt, Human
uagaugucccuuucuuggcca

SEQ ID NO: 3890463 - RNA, 12 nt, Human
uagaugucuuuu

SEQ ID NO: 3890464 - RNA, 14 nt, Human
uagaugucuuuuau

SEQ ID NO: 3890465 - RNA, 17 nt, Human
uagaugucuuuuauagu

SEQ ID NO: 3890466 - RNA, 13 nt, Human
uagaugugauuua

SEQ ID NO: 3890467 - RNA, 16 nt, Human
uagaugugcugcuuug

SEQ ID NO: 3890468 - RNA, 11 nt, Human
uagaugugugg

SEQ ID NO: 3890469 - RNA, 22 nt, Human
uagauguucagauugcuuugau

SEQ ID NO: 3890470 - RNA, 18 nt, Human
uagauguuccaguaaucu

SEQ ID NO: 3890471 - RNA, 19 nt, Human
uagauguucucuaucauuu

SEQ ID NO: 3890472 - RNA, 11 nt, Human
uagauguugcu

SEQ ID NO: 3890473 - RNA, 20 nt, Human
uagauguuuauucuucuaga

SEQ ID NO: 3890474 - RNA, 12 nt, Human
uagauguuuccu

SEQ ID NO: 3890475 - RNA, 16 nt, Human
uagauuaaaaauuaua

SEQ ID NO: 3890476 - RNA, 14 nt, Human
uagauuaaauaaaa

SEQ ID NO: 3890477 - RNA, 15 nt, Human
uagauuaaauauaga

SEQ ID NO: 3890478 - RNA, 17 nt, Human
uagauuaauggcacuga

SEQ ID NO: 3890479 - RNA, 15 nt, Human
uagauuagaauucug

SEQ ID NO: 3890480 - RNA, 15 nt, Human
uagauuagcucugga

SEQ ID NO: 3890481 - RNA, 15 nt, Human
uagauuauaucaaag

SEQ ID NO: 3890482 - RNA, 19 nt, Human
uagauuauaucaaaguauu

SEQ ID NO: 3890483 - RNA, 17 nt, Human
uagauuauggagcuuuu

SEQ ID NO: 3890484 - RNA, 15 nt, Human
uagcauuuuaaacaa

SEQ ID NO: 3890485 - RNA, 16 nt, Human
uagcauuuugcuaaau

SEQ ID NO: 3890486 - RNA, 14 nt, Human
uagccaaaaauguc

SEQ ID NO: 3890487 - RNA, 16 nt, Human
uagccaaaaugugagu

SEQ ID NO: 3890488 - RNA, 23 nt, Human
uagccaaaaugugagugguugaa

SEQ ID NO: 3890489 - RNA, 20 nt, Human
uagccaacggccccagcuuc

SEQ ID NO: 3890490 - RNA, 13 nt, Human
uagccaaggccaa

SEQ ID NO: 3890491 - RNA, 14 nt, Human
uagccaaggccaaa

SEQ ID NO: 3890492 - RNA, 21 nt, Human
uagccaaggccaaaggaagca

SEQ ID NO: 3890493 - RNA, 20 nt, Human
uagccaaggugggcugagcc

SEQ ID NO: 3890494 - RNA, 18 nt, Human
uagccaauauuuuucuua

SEQ ID NO: 3890495 - RNA, 14 nt, Human
uagccacaccagga

SEQ ID NO: 3890496 - RNA, 17 nt, Human
uagccacaccaggauag

SEQ ID NO: 3890497 - RNA, 21 nt, Human
uagccacauuuggaauacuuu

SEQ ID NO: 3890498 - RNA, 16 nt, Human
uagccaccaucuuugc

SEQ ID NO: 3890499 - RNA, 19 nt, Human
uagccaccccagaaauggu

SEQ ID NO: 3890500 - RNA, 14 nt, Human
uagccaccugaguu

SEQ ID NO: 3890501 - RNA, 21 nt, Human
uagccacuaaccuugccuggu

SEQ ID NO: 3890502 - RNA, 22 nt, Human
uagccacuuaccuucaauaaag

SEQ ID NO: 3890503 - RNA, 21 nt, Human
uagccacuuuggucccgugca

SEQ ID NO: 3890504 - RNA, 15 nt, Human
uagccagaggagaga

SEQ ID NO: 3890505 - RNA, 18 nt, Human
uagccagcacacagggca

SEQ ID NO: 3890506 - RNA, 20 nt, Human
uagccagcacacagggcagu

SEQ ID NO: 3890507 - RNA, 18 nt, Human
uagccagccccucuuccc

SEQ ID NO: 3890508 - RNA, 23 nt, Human
uagccagccggggcgaguggcac

SEQ ID NO: 3890509 - RNA, 15 nt, Human
uagccagcugcuccc

SEQ ID NO: 3890510 - RNA, 18 nt, Human
uagccagcugcuccccag

SEQ ID NO: 3890511 - RNA, 13 nt, Human
uagccagcuguca

SEQ ID NO: 3890512 - RNA, 13 nt, Human
uagccaggaucau

SEQ ID NO: 3890513 - RNA, 22 nt, Human
uagccaggguguggcccugcca

SEQ ID NO: 3890514 - RNA, 16 nt, Human
uagccaguugaauuua

SEQ ID NO: 3890515 - RNA, 17 nt, Human
uagccauauuuguaaaa

SEQ ID NO: 3890516 - RNA, 20 nt, Human
uagccauauuuguaaaauga

SEQ ID NO: 3890517 - RNA, 13 nt, Human
uagccaugggacc

SEQ ID NO: 3890518 - RNA, 16 nt, Human
uagccauuuuuacugu

SEQ ID NO: 3890519 - RNA, 17 nt, Human
uagccauuuuuacuguu

SEQ ID NO: 3890520 - RNA, 14 nt, Human
uagcccacccugcu

SEQ ID NO: 3890521 - RNA, 15 nt, Human
uagcccacccugcug

SEQ ID NO: 3890522 - RNA, 15 nt, Human
uagcccacucugcuc

SEQ ID NO: 3890523 - RNA, 15 nt, Human
uagcccaggagagag

SEQ ID NO: 3890524 - RNA, 21 nt, Human
uagcccaggauauauuuuauu

SEQ ID NO: 3890525 - RNA, 14 nt, Human
uagcccaggcugga

SEQ ID NO: 3890526 - RNA, 19 nt, Human
uagcccaggcuggagugca

SEQ ID NO: 3890527 - RNA, 15 nt, Human
uagcccaucccugcc

SEQ ID NO: 3890528 - RNA, 20 nt, Human
uagccccaagaaggcugggg

SEQ ID NO: 3890529 - RNA, 22 nt, Human
uagccccaagaaggcuggggcu

SEQ ID NO: 3890530 - RNA, 17 nt, Human
uagccccagugacagcu

SEQ ID NO: 3890531 - RNA, 15 nt, Human
uagcccccucuuccc

SEQ ID NO: 3890532 - RNA, 15 nt, Human
uagcccccuggccuc

SEQ ID NO: 3890533 - RNA, 14 nt, Human
uagccccucccaag

SEQ ID NO: 3890534 - RNA, 23 nt, Human
uagccccucuccccgcaguguuu

SEQ ID NO: 3890535 - RNA, 12 nt, Human
uagcccgccugc

SEQ ID NO: 3890536 - RNA, 14 nt, Human
uagcccgccugcca

SEQ ID NO: 3890537 - RNA, 15 nt, Human
uagcccgccugccag

SEQ ID NO: 3890538 - RNA, 16 nt, Human
uagcccucccacuuug

SEQ ID NO: 3890539 - RNA, 17 nt, Human
uagcccucccacuuugc

SEQ ID NO: 3890540 - RNA, 18 nt, Human
uagcccuccuuuuuccaa

SEQ ID NO: 3890541 - RNA, 22 nt, Human
uagcccucucccucuaggcucu

SEQ ID NO: 3890542 - RNA, 14 nt, Human
uagcccugaacauu

SEQ ID NO: 3890543 - RNA, 13 nt, Human
uagcccuguccug

SEQ ID NO: 3890544 - RNA, 14 nt, Human
uagccgaccucagc

SEQ ID NO: 3890545 - RNA, 15 nt, Human
uagccgagagccugc

SEQ ID NO: 3890546 - RNA, 18 nt, Human
uagccgagagccugcucc

SEQ ID NO: 3890547 - RNA, 14 nt, Human
uagccuaagauaua

SEQ ID NO: 3890548 - RNA, 19 nt, Human
uagccuaagauauacuugu

SEQ ID NO: 3890549 - RNA, 20 nt, Human
uagccuauguggauuuuuuc

SEQ ID NO: 3890550 - RNA, 21 nt, Human
uagccuauuuaccugcaggcu

SEQ ID NO: 3890551 - RNA, 18 nt, Human
uagccucacuuuuaauga

SEQ ID NO: 3890552 - RNA, 22 nt, Human
uagccucaggggucugagcucc

SEQ ID NO: 3890553 - RNA, 15 nt, Human
uagccugaguagaaa

SEQ ID NO: 3890554 - RNA, 14 nt, Human
uagccugcacuuug

SEQ ID NO: 3890555 - RNA, 20 nt, Human
uagccugccucuucucuacu

SEQ ID NO: 3890556 - RNA, 12 nt, Human
uagccugcuggu

SEQ ID NO: 3890557 - RNA, 17 nt, Human
uagccuggaccucugac

SEQ ID NO: 3890558 - RNA, 22 nt, Human
uagccuggaccucugacagcag

SEQ ID NO: 3890559 - RNA, 22 nt, Human
uagccuggauauuauucuugua

SEQ ID NO: 3890560 - RNA, 11 nt, Human
uagccuggcua

SEQ ID NO: 3890561 - RNA, 14 nt, Human
uagccugggguggg

SEQ ID NO: 3890562 - RNA, 11 nt, Human
uagccuguccu

SEQ ID NO: 3890563 - RNA, 13 nt, Human
uagccuguccugu

SEQ ID NO: 3890564 - RNA, 14 nt, Human
uagccuguggcagu

SEQ ID NO: 3890565 - RNA, 13 nt, Human
uagccuguggccc

SEQ ID NO: 3890566 - RNA, 16 nt, Human
uagccuguggcccugu

SEQ ID NO: 3890567 - RNA, 15 nt, Human
uagccuguuucuucc

SEQ ID NO: 3890568 - RNA, 20 nt, Human
uagccuuagaagucacacag

SEQ ID NO: 3890569 - RNA, 16 nt, Human
uagccuuauccucuga

SEQ ID NO: 3890570 - RNA, 17 nt, Human
uagccuuauccucugau

SEQ ID NO: 3890571 - RNA, 18 nt, Human
uagccuuauccucugauc

SEQ ID NO: 3890572 - RNA, 13 nt, Human
uagccuuccucca

SEQ ID NO: 3890573 - RNA, 23 nt, Human
uagccuuccuccacauccuuucu

SEQ ID NO: 3890574 - RNA, 13 nt, Human
uagccuucucugu

SEQ ID NO: 3890575 - RNA, 13 nt, Human
uagccuugcuugu

SEQ ID NO: 3890576 - RNA, 18 nt, Human
uagccuuuaccugugaag

SEQ ID NO: 3890577 - RNA, 22 nt, Human
uagccuuuuuuccccagacuug

SEQ ID NO: 3890578 - RNA, 23 nt, Human
uagccuuuuuuccccagacuugu

SEQ ID NO: 3890579 - RNA, 23 nt, Human
uagcgacauugcagucugcuucu

SEQ ID NO: 3890580 - RNA, 17 nt, Human
uagcgaucucuccuggc

SEQ ID NO: 3890581 - RNA, 17 nt, Human
uagcgugcucacugacc

SEQ ID NO: 3890582 - RNA, 18 nt, Human
uagcguguguagauagua

SEQ ID NO: 3890583 - RNA, 23 nt, Human
uagcguuggaauuaaaacaaugu

SEQ ID NO: 3890584 - RNA, 20 nt, Human
uagcuaaacggauuccaaag

SEQ ID NO: 3890585 - RNA, 23 nt, Human
uagcuaacauuuuaaauaaaaga

SEQ ID NO: 3890586 - RNA, 17 nt, Human
uagcuaacuguaaauca

SEQ ID NO: 3890587 - RNA, 19 nt, Human
uagcuaagcggaccagccu

SEQ ID NO: 3890588 - RNA, 15 nt, Human
uagcuaaguacacaa

SEQ ID NO: 3890589 - RNA, 19 nt, Human
uagcuaauaacaugugaaa

SEQ ID NO: 3890590 - RNA, 24 nt, Human
uagcuaauaaugagcuauuaaaac

SEQ ID NO: 3890591 - RNA, 15 nt, Human
uagcuaauaauguua

SEQ ID NO: 3890592 - RNA, 12 nt, Human
uagcuaauguaa

SEQ ID NO: 3890593 - RNA, 19 nt, Human
uagcuaauguaauaacugu

SEQ ID NO: 3890594 - RNA, 13 nt, Human
uagcuacagagaa

SEQ ID NO: 3890595 - RNA, 15 nt, Human
uagcuacaggaagca

SEQ ID NO: 3890596 - RNA, 20 nt, Human
uagcuacaggaagcacccca

SEQ ID NO: 3890597 - RNA, 15 nt, Human
uagcuacagugcaua

SEQ ID NO: 3890598 - RNA, 20 nt, Human
uagcuacccaaaagagaaaa

SEQ ID NO: 3890599 - RNA, 19 nt, Human
uagcuagaaauaugauuuu

SEQ ID NO: 3890600 - RNA, 14 nt, Human
uagcuagaaguggg

SEQ ID NO: 3890601 - RNA, 20 nt, Human
uagcuagaagugggccagga

SEQ ID NO: 3890602 - RNA, 15 nt, Human
uagcuagacugguga

SEQ ID NO: 3890603 - RNA, 22 nt, Human
uagcuagacuggugacugauuc

SEQ ID NO: 3890604 - RNA, 13 nt, Human
uagcuagaggaac

SEQ ID NO: 3890605 - RNA, 21 nt, Human
uagcuauauccauguacugua

SEQ ID NO: 3890606 - RNA, 15 nt, Human
uagcuauaucuauau

SEQ ID NO: 3890607 - RNA, 17 nt, Human
uagcuauaucuauauau

SEQ ID NO: 3890608 - RNA, 17 nt, Human
uagcuaucaagaggcug

SEQ ID NO: 3890609 - RNA, 14 nt, Human
uagcuauuacugga

SEQ ID NO: 3890610 - RNA, 15 nt, Human
uagcuauuacuggau

SEQ ID NO: 3890611 - RNA, 13 nt, Human
uagcuauuacugu

SEQ ID NO: 3890612 - RNA, 14 nt, Human
uagcuauuacuguc

SEQ ID NO: 3890613 - RNA, 19 nt, Human
uagcuauuuuuauggaauu

SEQ ID NO: 3890614 - RNA, 15 nt, Human
uagcucaaugagcau

SEQ ID NO: 3890615 - RNA, 18 nt, Human
uagcucaaugagcauguu

SEQ ID NO: 3890616 - RNA, 17 nt, Human
uagcucagccccagccc

SEQ ID NO: 3890617 - RNA, 12 nt, Human
uagcucaguuua

SEQ ID NO: 3890618 - RNA, 20 nt, Human
uagcuccccuccucuccccu

SEQ ID NO: 3890619 - RNA, 11 nt, Human
uagcuccuccc

SEQ ID NO: 3890620 - RNA, 12 nt, Human
uagcuccucccc

SEQ ID NO: 3890621 - RNA, 17 nt, Human
uagcucuaauguuugca

SEQ ID NO: 3890622 - RNA, 18 nt, Human
uagcucuaauguuugcau

SEQ ID NO: 3890623 - RNA, 19 nt, Human
uagcucuaauguuugcaua

SEQ ID NO: 3890624 - RNA, 20 nt, Human
uagcucuaauguuugcauau

SEQ ID NO: 3890625 - RNA, 17 nt, Human
uagcucuauguuuacaa

SEQ ID NO: 3890626 - RNA, 13 nt, Human
uagcucucuaggc

SEQ ID NO: 3890627 - RNA, 23 nt, Human
uagcucuuguugagccgugggca

SEQ ID NO: 3890628 - RNA, 13 nt, Human
uagcucuuuccuu

SEQ ID NO: 3890629 - RNA, 18 nt, Human
uagcucuuugucagggag

SEQ ID NO: 3890630 - RNA, 19 nt, Human
uaggcauuuuuaccaucac

SEQ ID NO: 3890631 - RNA, 15 nt, Human
uaggccaaagacaaa

SEQ ID NO: 3890632 - RNA, 19 nt, Human
uaggccaaauuuguagugc

SEQ ID NO: 3890633 - RNA, 21 nt, Human
uaggccaagguguccuacaga

SEQ ID NO: 3890634 - RNA, 22 nt, Human
uaggccaagguguccuacagaa

SEQ ID NO: 3890635 - RNA, 14 nt, Human
uaggccagagccca

SEQ ID NO: 3890636 - RNA, 16 nt, Human
uaggccagagcccacu

SEQ ID NO: 3890637 - RNA, 14 nt, Human
uaggccaugaaaaa

SEQ ID NO: 3890638 - RNA, 20 nt, Human
uaggccaugaaaaaaaugau

SEQ ID NO: 3890639 - RNA, 22 nt, Human
uaggccucaacuccucccauag

SEQ ID NO: 3890640 - RNA, 16 nt, Human
uaggccucagccagag

SEQ ID NO: 3890641 - RNA, 22 nt, Human
uaggccucucaccucugugccu

SEQ ID NO: 3890642 - RNA, 15 nt, Human
uaggccuggccagau

SEQ ID NO: 3890643 - RNA, 19 nt, Human
uaggccugggugcuggcug

SEQ ID NO: 3890644 - RNA, 20 nt, Human
uaggccugggugcuggcugc

SEQ ID NO: 3890645 - RNA, 23 nt, Human
uaggccuuccucucuccagaugu

SEQ ID NO: 3890646 - RNA, 16 nt, Human
uaggccuucuugugau

SEQ ID NO: 3890647 - RNA, 20 nt, Human
uaggccuugcggcuccucag

SEQ ID NO: 3890648 - RNA, 16 nt, Human
uaggccuuuuaacauu

SEQ ID NO: 3890649 - RNA, 14 nt, Human
uaggcgagugccag

SEQ ID NO: 3890650 - RNA, 15 nt, Human
uaggcuacaauuuuc

SEQ ID NO: 3890651 - RNA, 20 nt, Human
uaggcuacaauuuucuccca

SEQ ID NO: 3890652 - RNA, 12 nt, Human
uaggcuacagag

SEQ ID NO: 3890653 - RNA, 15 nt, Human
uaggcuagggugggg

SEQ ID NO: 3890654 - RNA, 16 nt, Human
uaggcuauuaaaaaag

SEQ ID NO: 3890655 - RNA, 15 nt, Human
uaggcuauucacaac

SEQ ID NO: 3890656 - RNA, 20 nt, Human
uaggcuauuuguaaaucugc

SEQ ID NO: 3890657 - RNA, 17 nt, Human
uaggcucauuuacuguu

SEQ ID NO: 3890658 - RNA, 20 nt, Human
uaggcucauuuacuguuuua

SEQ ID NO: 3890659 - RNA, 18 nt, Human
uaggcucugcacagaugg

SEQ ID NO: 3890660 - RNA, 15 nt, Human
uaggcucugccuucg

SEQ ID NO: 3890661 - RNA, 12 nt, Human
uaggcuggagaa

SEQ ID NO: 3890662 - RNA, 11 nt, Human
uaggcugggug

SEQ ID NO: 3890663 - RNA, 17 nt, Human
uaggcugggugcccaca

SEQ ID NO: 3890664 - RNA, 18 nt, Human
uagggaaaacauuccauc

SEQ ID NO: 3890665 - RNA, 13 nt, Human
uagggaacaauuu

SEQ ID NO: 3890666 - RNA, 13 nt, Human
uagggaacucugg

SEQ ID NO: 3890667 - RNA, 15 nt, Human
uagggaacucugggg

SEQ ID NO: 3890668 - RNA, 14 nt, Human
uagggaagagaaac

SEQ ID NO: 3890669 - RNA, 17 nt, Human
uagggaaggccaccugc

SEQ ID NO: 3890670 - RNA, 22 nt, Human
uagggaauaaaauccuaagaca

SEQ ID NO: 3890671 - RNA, 21 nt, Human
uagggaauggcacagcccaaa

SEQ ID NO: 3890672 - RNA, 20 nt, Human
uagggacaggaccccagcuc

SEQ ID NO: 3890673 - RNA, 18 nt, Human
uagggaccucagagguuu

SEQ ID NO: 3890674 - RNA, 15 nt, Human
uagggaccuggggaa

SEQ ID NO: 3890675 - RNA, 18 nt, Human
uagggaccuggggaagca

SEQ ID NO: 3890676 - RNA, 19 nt, Human
uagggacuacccauagaca

SEQ ID NO: 3890677 - RNA, 20 nt, Human
uagggacuacccauagacau

SEQ ID NO: 3890678 - RNA, 20 nt, Human
uagggacucaauuucucccc

SEQ ID NO: 3890679 - RNA, 14 nt, Human
uagggacugaccag

SEQ ID NO: 3890680 - RNA, 15 nt, Human
uagggacugaccagc

SEQ ID NO: 3890681 - RNA, 13 nt, Human
uagggacuuaaaa

SEQ ID NO: 3890682 - RNA, 16 nt, Human
uagggagaaauguugu

SEQ ID NO: 3890683 - RNA, 15 nt, Human
uagggagagaagaua

SEQ ID NO: 3890684 - RNA, 12 nt, Human
uagggagaguca

SEQ ID NO: 3890685 - RNA, 23 nt, Human
uagggauagucaccuuuuaaauc

SEQ ID NO: 3890686 - RNA, 14 nt, Human
uagggaugaguacc

SEQ ID NO: 3890687 - RNA, 15 nt, Human
uagggcaccaggggu

SEQ ID NO: 3890688 - RNA, 16 nt, Human
uagggcacugggcugu

SEQ ID NO: 3890689 - RNA, 19 nt, Human
uagggcaguaacauugggu

SEQ ID NO: 3890690 - RNA, 15 nt, Human
uagggccaggcaggu

SEQ ID NO: 3890691 - RNA, 17 nt, Human
uagggcccaugggaggg

SEQ ID NO: 3890692 - RNA, 14 nt, Human
uagggcccuggagg

SEQ ID NO: 3890693 - RNA, 14 nt, Human
uagggcugggaaac

SEQ ID NO: 3890694 - RNA, 11 nt, Human
uagggcugggu

SEQ ID NO: 3890695 - RNA, 14 nt, Human
uagggcuguaaaau

SEQ ID NO: 3890696 - RNA, 15 nt, Human
uaggggaagaauaau

SEQ ID NO: 3890697 - RNA, 21 nt, Human
uaggggaggggcuccuuucca

SEQ ID NO: 3890698 - RNA, 23 nt, Human
uaggggcuuauaauaaaggacug

SEQ ID NO: 3890699 - RNA, 16 nt, Human
uagggggcuggaggag

SEQ ID NO: 3890700 - RNA, 16 nt, Human
uagggguaauauauug

SEQ ID NO: 3890701 - RNA, 17 nt, Human
uagggguaccacugaau

SEQ ID NO: 3890702 - RNA, 17 nt, Human
uaggggucaggcuccau

SEQ ID NO: 3890703 - RNA, 13 nt, Human
uagggguugcuaa

SEQ ID NO: 3890704 - RNA, 18 nt, Human
uaggguaaggugccuucu

SEQ ID NO: 3890705 - RNA, 19 nt, Human
uaggguaagugagagaggg

SEQ ID NO: 3890706 - RNA, 15 nt, Human
uaggguacauggugc

SEQ ID NO: 3890707 - RNA, 19 nt, Human
uaggguacauggugcuggg

SEQ ID NO: 3890708 - RNA, 16 nt, Human
uaggguacauuuauaa

SEQ ID NO: 3890709 - RNA, 18 nt, Human
uaggguacauuuauaauu

SEQ ID NO: 3890710 - RNA, 22 nt, Human
uaggguacauuuauaauugcau

SEQ ID NO: 3890711 - RNA, 16 nt, Human
uaggguacuaaauuua

SEQ ID NO: 3890712 - RNA, 19 nt, Human
uaggguacuaaauuuaaau

SEQ ID NO: 3890713 - RNA, 13 nt, Human
uaggguccugggg

SEQ ID NO: 3890714 - RNA, 22 nt, Human
uagggucuggaacaccaggcug

SEQ ID NO: 3890715 - RNA, 17 nt, Human
uaggguuauaauaaugu

SEQ ID NO: 3890716 - RNA, 22 nt, Human
uaggguuauaauaauguuaaca

SEQ ID NO: 3890717 - RNA, 19 nt, Human
uaggguuugugacagggcg

SEQ ID NO: 3890718 - RNA, 14 nt, Human
uagguaaaauguau

SEQ ID NO: 3890719 - RNA, 16 nt, Human
uagguaaaauguauuu

SEQ ID NO: 3890720 - RNA, 14 nt, Human
uagguacacagcuc

SEQ ID NO: 3890721 - RNA, 13 nt, Human
uagguacuuuugg

SEQ ID NO: 3890722 - RNA, 16 nt, Human
uagguaguaccaaaau

SEQ ID NO: 3890723 - RNA, 15 nt, Human
uagguaugaauaagu

SEQ ID NO: 3890724 - RNA, 14 nt, Human
uagguauuucaaaa

SEQ ID NO: 3890725 - RNA, 18 nt, Human
uaggucaagaagaagaug

SEQ ID NO: 3890726 - RNA, 20 nt, Human
uaggucacuggcucuccaag

SEQ ID NO: 3890727 - RNA, 21 nt, Human
uaggucacuggcucuccaagu

SEQ ID NO: 3890728 - RNA, 18 nt, Human
uaggucaguacccaccug

SEQ ID NO: 3890729 - RNA, 23 nt, Human
uaggucaguacccaccugagcuu

SEQ ID NO: 3890730 - RNA, 15 nt, Human
uaggucucaauaccu

SEQ ID NO: 3890731 - RNA, 12 nt, Human
uaggucuccagu

SEQ ID NO: 3890732 - RNA, 19 nt, Human
uaggucucuucucccagaa

SEQ ID NO: 3890733 - RNA, 20 nt, Human
uaggucucuucucccagaau

SEQ ID NO: 3890734 - RNA, 14 nt, Human
uaggucugaaauuu

SEQ ID NO: 3890735 - RNA, 22 nt, Human
uaggucugaaauuuuucuucuu

SEQ ID NO: 3890736 - RNA, 15 nt, Human
uaggugagaaaaaaa

SEQ ID NO: 3890737 - RNA, 21 nt, Human
uaggugauccacucgccuuca

SEQ ID NO: 3890738 - RNA, 15 nt, Human
uaggugauccaugua

SEQ ID NO: 3890739 - RNA, 21 nt, Human
uaggugaucucauuuaauccu

SEQ ID NO: 3890740 - RNA, 18 nt, Human
uaggugcuacaaaaacac

SEQ ID NO: 3890741 - RNA, 16 nt, Human
uagguggaucaccuga

SEQ ID NO: 3890742 - RNA, 20 nt, Human
uagguggguugaaagccaag

SEQ ID NO: 3890743 - RNA, 16 nt, Human
uaggugucauuuccau

SEQ ID NO: 3890744 - RNA, 13 nt, Human
uagguguggggga

SEQ ID NO: 3890745 - RNA, 17 nt, Human
uaggugugggggaagca

SEQ ID NO: 3890746 - RNA, 13 nt, Human
uagguuaaaaaaa

SEQ ID NO: 3890747 - RNA, 18 nt, Human
uagguuaacuauguacaa

SEQ ID NO: 3890748 - RNA, 19 nt, Human
uagguuaacuauguacaau

SEQ ID NO: 3890749 - RNA, 20 nt, Human
uagguuauuaugauuagcuu

SEQ ID NO: 3890750 - RNA, 20 nt, Human
uagguucccuguucuuccuc

SEQ ID NO: 3890751 - RNA, 21 nt, Human
uagguucuaaaguucuaagau

SEQ ID NO: 3890752 - RNA, 22 nt, Human
uagguucuaaaguucuaagauu

SEQ ID NO: 3890753 - RNA, 18 nt, Human
uagguucuuugcugcauu

SEQ ID NO: 3890754 - RNA, 12 nt, Human
uagguugcacac

SEQ ID NO: 3890755 - RNA, 13 nt, Human
uagguugcacacu

SEQ ID NO: 3890756 - RNA, 17 nt, Human
uagguugcacacuuugg

SEQ ID NO: 3890757 - RNA, 20 nt, Human
uagguugccaauaauacacu

SEQ ID NO: 3890758 - RNA, 13 nt, Human
uagguugggacac

SEQ ID NO: 3890759 - RNA, 18 nt, Human
uagguuuaacauaaaggu

SEQ ID NO: 3890760 - RNA, 17 nt, Human
uagguuuaacucagauc

SEQ ID NO: 3890761 - RNA, 21 nt, Human
uagguuuaacucagaucacua

SEQ ID NO: 3890762 - RNA, 17 nt, Human
uagguuuaugacaguaa

SEQ ID NO: 3890763 - RNA, 20 nt, Human
uagguuuaugacaguaauug

SEQ ID NO: 3890764 - RNA, 21 nt, Human
uagguuuaugacaguaauugu

SEQ ID NO: 3890765 - RNA, 11 nt, Human
uagguuucaaa

SEQ ID NO: 3890766 - RNA, 14 nt, Human
uagguuucaaagau

SEQ ID NO: 3890767 - RNA, 20 nt, Human
uagguuucuaaaaagucaga

SEQ ID NO: 3890768 - RNA, 16 nt, Human
uagguuuuguuugcua

SEQ ID NO: 3890769 - RNA, 23 nt, Human
uagguuuuguuugcuaucuuaau

SEQ ID NO: 3890770 - RNA, 15 nt, Human
uagguuuuuauuagu

SEQ ID NO: 3890771 - RNA, 15 nt, Human
uagguuuuuguuugu

SEQ ID NO: 3890772 - RNA, 16 nt, Human
uaguaaaaauaaaauu

SEQ ID NO: 3890773 - RNA, 15 nt, Human
uaguaaaaauacaaa

SEQ ID NO: 3890774 - RNA, 13 nt, Human
uaguaaaaauuaa

SEQ ID NO: 3890775 - RNA, 13 nt, Human
uaugaauacuuug

SEQ ID NO: 3890776 - RNA, 23 nt, Human
uaugaaucagugggcaggauaaa

SEQ ID NO: 3890777 - RNA, 20 nt, Human
uaugaaucuaugccaaagau

SEQ ID NO: 3890778 - RNA, 12 nt, Human
uaugaaucuauu

SEQ ID NO: 3890779 - RNA, 20 nt, Human
uaugaaucuauuugugggug

SEQ ID NO: 3890780 - RNA, 19 nt, Human
uaugaaugcccccagcugg

SEQ ID NO: 3890781 - RNA, 17 nt, Human
uaugaaugugaagccuu

SEQ ID NO: 3890782 - RNA, 18 nt, Human
uaugaaugugaagccuuc

SEQ ID NO: 3890783 - RNA, 15 nt, Human
uaugaauuguacaga

SEQ ID NO: 3890784 - RNA, 17 nt, Human
uaugaauuuaaauauaa

SEQ ID NO: 3890785 - RNA, 19 nt, Human
uaugaauuuaaauauaauu

SEQ ID NO: 3890786 - RNA, 23 nt, Human
uaugaauuuaaauauaauucugu

SEQ ID NO: 3890787 - RNA, 16 nt, Human
uaugacagcugucccu

SEQ ID NO: 3890788 - RNA, 20 nt, Human
uaugacagcugucccuguca

SEQ ID NO: 3890789 - RNA, 17 nt, Human
uaugacaguaauugugu

SEQ ID NO: 3890790 - RNA, 19 nt, Human
uaugacaucacuuguacaa

SEQ ID NO: 3890791 - RNA, 20 nt, Human
uaugacaucacuuguacaaa

SEQ ID NO: 3890792 - RNA, 24 nt, Human
uaugacaucacuuguacaaaauaa

SEQ ID NO: 3890793 - RNA, 21 nt, Human
uaugacauuggauagaacaug

SEQ ID NO: 3890794 - RNA, 18 nt, Human
uaugaccuucuaggaagc

SEQ ID NO: 3890795 - RNA, 15 nt, Human
uaugacgcugauaca

SEQ ID NO: 3890796 - RNA, 16 nt, Human
uaugacgcugauacau

SEQ ID NO: 3890797 - RNA, 18 nt, Human
uaugacgcugauacauaa

SEQ ID NO: 3890798 - RNA, 22 nt, Human
uaugacgcugauacauaacuaa

SEQ ID NO: 3890799 - RNA, 16 nt, Human
uaugacggaagaacau

SEQ ID NO: 3890800 - RNA, 15 nt, Human
uaugacuaaagagag

SEQ ID NO: 3890801 - RNA, 16 nt, Human
uaugacuauguaaacu

SEQ ID NO: 3890802 - RNA, 18 nt, Human
uaugacuauguaaacuac

SEQ ID NO: 3890803 - RNA, 18 nt, Human
uaugacugcuccccagcc

SEQ ID NO: 3890804 - RNA, 22 nt, Human
uaugacuuuuuauaaaauggcu

SEQ ID NO: 3890805 - RNA, 21 nt, Human
uaugagaaacuggcaaagcag

SEQ ID NO: 3890806 - RNA, 14 nt, Human
uaugagaagaauag

SEQ ID NO: 3890807 - RNA, 14 nt, Human
uaugagauugguuu

SEQ ID NO: 3890808 - RNA, 20 nt, Human
uaugagauugguuuuccugu

SEQ ID NO: 3890809 - RNA, 18 nt, Human
uaugagcauccugagccc

SEQ ID NO: 3890810 - RNA, 14 nt, Human
uaugagcucuucau

SEQ ID NO: 3890811 - RNA, 16 nt, Human
uaugagcucuucaugu

SEQ ID NO: 3890812 - RNA, 15 nt, Human
uaugagcuuccaagg

SEQ ID NO: 3890813 - RNA, 18 nt, Human
uaugagcuugcucauuaa

SEQ ID NO: 3890814 - RNA, 13 nt, Human
uaugaggaaaggu

SEQ ID NO: 3890815 - RNA, 18 nt, Human
uaugaggagugaacauuu

SEQ ID NO: 3890816 - RNA, 22 nt, Human
uaugaggcaaccacaggcagca

SEQ ID NO: 3890817 - RNA, 13 nt, Human
uaugaggcauuug

SEQ ID NO: 3890818 - RNA, 15 nt, Human
uaugaggcauuuguu

SEQ ID NO: 3890819 - RNA, 14 nt, Human
uaugaguagccagg

SEQ ID NO: 3890820 - RNA, 23 nt, Human
uaugaguauacaauauauaaaaa

SEQ ID NO: 3890821 - RNA, 15 nt, Human
uaugagucaaugugc

SEQ ID NO: 3890822 - RNA, 16 nt, Human
uaugagucaaugugca

SEQ ID NO: 3890823 - RNA, 21 nt, Human
uaugaguuuuugauagcuuua

SEQ ID NO: 3890824 - RNA, 16 nt, Human
uaugauaaaaaauuuu

SEQ ID NO: 3890825 - RNA, 20 nt, Human
uaugauaaaaaauuuuguaa

SEQ ID NO: 3890826 - RNA, 16 nt, Human
uaugauaauagauucu

SEQ ID NO: 3890827 - RNA, 24 nt, Human
uaugauagguuauuuugauguaaa

SEQ ID NO: 3890828 - RNA, 16 nt, Human
uaugauauuccauagu

SEQ ID NO: 3890829 - RNA, 22 nt, Human
uaugauauuuucugugccugaa

SEQ ID NO: 3890830 - RNA, 13 nt, Human
uaugaucaaaugu

SEQ ID NO: 3890831 - RNA, 16 nt, Human
uaugaucaaauguuua

SEQ ID NO: 3890832 - RNA, 18 nt, Human
uaugaucaaauguuuaau

SEQ ID NO: 3890833 - RNA, 22 nt, Human
uaugaucaaauguuuaaucaua

SEQ ID NO: 3890834 - RNA, 14 nt, Human
uaugaucacggcuc

SEQ ID NO: 3890835 - RNA, 21 nt, Human
uaugaucacggcucacugcag

SEQ ID NO: 3890836 - RNA, 14 nt, Human
uaugaucaguguug

SEQ ID NO: 3890837 - RNA, 20 nt, Human
uaugauccagcagauuauuc

SEQ ID NO: 3890838 - RNA, 15 nt, Human
uaugaucuguuuugu

SEQ ID NO: 3890839 - RNA, 22 nt, Human
uaugaucuugaguauaagaaau

SEQ ID NO: 3890840 - RNA, 14 nt, Human
uaugaugacuguuu

SEQ ID NO: 3890841 - RNA, 17 nt, Human
uaugauguaaucucucu

SEQ ID NO: 3890842 - RNA, 19 nt, Human
uaugauguauacugccacu

SEQ ID NO: 3890843 - RNA, 13 nt, Human
uaugauguauauu

SEQ ID NO: 3890844 - RNA, 15 nt, Human
uaugauguguuguga

SEQ ID NO: 3890845 - RNA, 20 nt, Human
uaugauguuaguuuuccuua

SEQ ID NO: 3890846 - RNA, 12 nt, Human
uaugauuaaaaa

SEQ ID NO: 3890847 - RNA, 14 nt, Human
uaugauuaaaaaua

SEQ ID NO: 3890848 - RNA, 21 nt, Human
uaugauuagcuuugucacugu

SEQ ID NO: 3890849 - RNA, 21 nt, Human
uaugauucaaaugucuauaaa

SEQ ID NO: 3890850 - RNA, 19 nt, Human
uaugauucugcuuuuacca

SEQ ID NO: 3890851 - RNA, 20 nt, Human
uaugauugccuuuuuauaac

SEQ ID NO: 3890852 - RNA, 23 nt, Human
uaugauugccuuuuuauaacuuu

SEQ ID NO: 3890853 - RNA, 18 nt, Human
uaugauuuaaaacaugua

SEQ ID NO: 3890854 - RNA, 14 nt, Human
uaugauuuauaguu

SEQ ID NO: 3890855 - RNA, 21 nt, Human
uaugauuucacuagaaaagcu

SEQ ID NO: 3890856 - RNA, 15 nt, Human
uaugauuuggaaaau

SEQ ID NO: 3890857 - RNA, 19 nt, Human
uaugauuuucauaacuuau

SEQ ID NO: 3890858 - RNA, 20 nt, Human
uaugauuuuuuaaaagaaau

SEQ ID NO: 3890859 - RNA, 22 nt, Human
uaugcaaaaguucugacuugac

SEQ ID NO: 3890860 - RNA, 14 nt, Human
uaugcaaaauggaa

SEQ ID NO: 3890861 - RNA, 16 nt, Human
uaugcaaacaggguaa

SEQ ID NO: 3890862 - RNA, 21 nt, Human
uaugcaaacauaacaaaauca

SEQ ID NO: 3890863 - RNA, 14 nt, Human
uaugcaaauauuuu

SEQ ID NO: 3890864 - RNA, 15 nt, Human
uaugcaaauucccag

SEQ ID NO: 3890865 - RNA, 16 nt, Human
uaugcaagcaguuuca

SEQ ID NO: 3890866 - RNA, 17 nt, Human
uaugcaagcaguuucaa

SEQ ID NO: 3890867 - RNA, 18 nt, Human
uaugcaagcaguuucaau

SEQ ID NO: 3890868 - RNA, 17 nt, Human
uaugcaauggauuuuca

SEQ ID NO: 3890869 - RNA, 16 nt, Human
uaugcaauuuccuuuu

SEQ ID NO: 3890870 - RNA, 16 nt, Human
uaugcacacacauaua

SEQ ID NO: 3890871 - RNA, 15 nt, Human
uaugcacaugaacuu

SEQ ID NO: 3890872 - RNA, 19 nt, Human
uaugcaccuugugucugua

SEQ ID NO: 3890873 - RNA, 16 nt, Human
uaugcacuaaauauga

SEQ ID NO: 3890874 - RNA, 19 nt, Human
uaugcacuuauaauuuucc

SEQ ID NO: 3890875 - RNA, 22 nt, Human
uaugcacuuauaauuuuccuaa

SEQ ID NO: 3890876 - RNA, 14 nt, Human
uaugcagugcugcu

SEQ ID NO: 3890877 - RNA, 17 nt, Human
uaugcaguuuuucagag

SEQ ID NO: 3890878 - RNA, 23 nt, Human
uaugcauaacugacaaaucaagu

SEQ ID NO: 3890879 - RNA, 20 nt, Human
uaugcauauauauaugugug

SEQ ID NO: 3890880 - RNA, 15 nt, Human
uaugcauauuuguuu

SEQ ID NO: 3890881 - RNA, 20 nt, Human
uaugcauggugccccaggac

SEQ ID NO: 3890882 - RNA, 21 nt, Human
uaugcauggugccccaggacc

SEQ ID NO: 3890883 - RNA, 22 nt, Human
uaugcauggugccccaggacca

SEQ ID NO: 3890884 - RNA, 16 nt, Human
uaugcaugugaagaaa

SEQ ID NO: 3890885 - RNA, 16 nt, Human
uaugcauuauaucaaa

SEQ ID NO: 3890886 - RNA, 19 nt, Human
uaugcauucacauuuagaa

SEQ ID NO: 3890887 - RNA, 22 nt, Human
uaugcauucacauuuagaaaag

SEQ ID NO: 3890888 - RNA, 23 nt, Human
uaugcauucacauuuagaaaagu

SEQ ID NO: 3890889 - RNA, 11 nt, Human
uaugcauuuga

SEQ ID NO: 3890890 - RNA, 21 nt, Human
uaugccaccaacuuacaaaaa

SEQ ID NO: 3890891 - RNA, 14 nt, Human
uaugccacuuccuu

SEQ ID NO: 3890892 - RNA, 13 nt, Human
uaugccauagaaa

SEQ ID NO: 3890893 - RNA, 14 nt, Human
uaugccauuuguuu

SEQ ID NO: 3890894 - RNA, 12 nt, Human
uaugcccaguuu

SEQ ID NO: 3890895 - RNA, 20 nt, Human
uaugcccaguuucugccucu

SEQ ID NO: 3890896 - RNA, 19 nt, Human
uaugccccauucaacaucu

SEQ ID NO: 3890897 - RNA, 20 nt, Human
uaugccgaaugcccucaggg

SEQ ID NO: 3890898 - RNA, 15 nt, Human
uaugccggaugugcu

SEQ ID NO: 3890899 - RNA, 23 nt, Human
uaugccggaugugcuuuucucca

SEQ ID NO: 3890900 - RNA, 15 nt, Human
uaugccucuccuuug

SEQ ID NO: 3890901 - RNA, 19 nt, Human
uaugccucuccuuuguaua

SEQ ID NO: 3890902 - RNA, 16 nt, Human
uaugccucuguauuua

SEQ ID NO: 3890903 - RNA, 12 nt, Human
uaugccuguacu

SEQ ID NO: 3890904 - RNA, 22 nt, Human
uaugccuguacucgcuugugca

SEQ ID NO: 3890905 - RNA, 14 nt, Human
uaugccuuguauaa

SEQ ID NO: 3890906 - RNA, 16 nt, Human
uaugccuuguuucaua

SEQ ID NO: 3890907 - RNA, 14 nt, Human
uaugcuaagaauuu

SEQ ID NO: 3890908 - RNA, 13 nt, Human
uaugcuaaucagg

SEQ ID NO: 3890909 - RNA, 17 nt, Human
uaugcuaccaccagcug

SEQ ID NO: 3890910 - RNA, 22 nt, Human
uaugcuauuucuauauuuucau

SEQ ID NO: 3890911 - RNA, 16 nt, Human
uaugcucaggggcccu

SEQ ID NO: 3890912 - RNA, 18 nt, Human
uaugcucuacccuugugu

SEQ ID NO: 3890913 - RNA, 18 nt, Human
uaugcucucacuguuugu

SEQ ID NO: 3890914 - RNA, 19 nt, Human
uaugcucugcauguuacau

SEQ ID NO: 3890915 - RNA, 16 nt, Human
uaugcucuuuuuuacu

SEQ ID NO: 3890916 - RNA, 20 nt, Human
uaugcucuuuuuuacucauu

SEQ ID NO: 3890917 - RNA, 15 nt, Human
uaugcugaucaucgc

SEQ ID NO: 3890918 - RNA, 22 nt, Human
uaugcugcuuuuauaucuguau

SEQ ID NO: 3890919 - RNA, 22 nt, Human
uaugugaaaggauaugaaucug

SEQ ID NO: 3890920 - RNA, 16 nt, Human
uaugugagugccuuuu

SEQ ID NO: 3890921 - RNA, 23 nt, Human
uaugugagugccuuuugcagaag

SEQ ID NO: 3890922 - RNA, 13 nt, Human
uaugugauuacaa

SEQ ID NO: 3890923 - RNA, 16 nt, Human
uaugugauuuuaacuc

SEQ ID NO: 3890924 - RNA, 19 nt, Human
uaugugauuuuaacucugu

SEQ ID NO: 3890925 - RNA, 21 nt, Human
uaugugauuuuaacucugucu

SEQ ID NO: 3890926 - RNA, 20 nt, Human
uaugugcacaucuguuuugu

SEQ ID NO: 3890927 - RNA, 12 nt, Human
uaugugcacugu

SEQ ID NO: 3890928 - RNA, 21 nt, Human
uaugugcacugucacuuugcu

SEQ ID NO: 3890929 - RNA, 19 nt, Human
uaugugccagauuuaugca

SEQ ID NO: 3890930 - RNA, 23 nt, Human
uaugugccagauuuaugcauauu

SEQ ID NO: 3890931 - RNA, 19 nt, Human
uaugugggggucugugugu

SEQ ID NO: 3890932 - RNA, 18 nt, Human
uaugugguuuuagauuuu

SEQ ID NO: 3890933 - RNA, 15 nt, Human
uaugugguuuuguaa

SEQ ID NO: 3890934 - RNA, 14 nt, Human
uauguguaaaaugu

SEQ ID NO: 3890935 - RNA, 14 nt, Human
uauguguaaauaca

SEQ ID NO: 3890936 - RNA, 14 nt, Human
uauguguauauaua

SEQ ID NO: 3890937 - RNA, 20 nt, Human
uauguguaugcacaguaaaa

SEQ ID NO: 3890938 - RNA, 12 nt, Human
uauguguaugug

SEQ ID NO: 3890939 - RNA, 18 nt, Human
uauguguaugugccauuu

SEQ ID NO: 3890940 - RNA, 15 nt, Human
uaugugugaggagcu

SEQ ID NO: 3890941 - RNA, 18 nt, Human
uaugugugcaugugugua

SEQ ID NO: 3890942 - RNA, 19 nt, Human
uauguguguauauguaugu

SEQ ID NO: 3890943 - RNA, 21 nt, Human
uauguguguaugggugugugu

SEQ ID NO: 3890944 - RNA, 23 nt, Human
uauguguguguguuguguguggg

SEQ ID NO: 3890945 - RNA, 17 nt, Human
uauguguguuuaaauaa

SEQ ID NO: 3890946 - RNA, 20 nt, Human
uauguguguuuaaauaaagu

SEQ ID NO: 3890947 - RNA, 13 nt, Human
uauguguucuauu

SEQ ID NO: 3890948 - RNA, 13 nt, Human
uauguguuuagaa

SEQ ID NO: 3890949 - RNA, 14 nt, Human
uauguuaaagagaa

SEQ ID NO: 3890950 - RNA, 22 nt, Human
uauguuaagcagcuaaauuuuc

SEQ ID NO: 3890951 - RNA, 19 nt, Human
uauguuagugcaaauuguc

SEQ ID NO: 3890952 - RNA, 19 nt, Human
uauguuauauauaaauaua

SEQ ID NO: 3890953 - RNA, 21 nt, Human
uauguuauauauaaauauauu

SEQ ID NO: 3890954 - RNA, 14 nt, Human
uauguuauaucaac

SEQ ID NO: 3890955 - RNA, 16 nt, Human
uauguucaaagucaaa

SEQ ID NO: 3890956 - RNA, 14 nt, Human
uauguucauuuguu

SEQ ID NO: 3890957 - RNA, 17 nt, Human
uauguucauuuguuugu

SEQ ID NO: 3890958 - RNA, 15 nt, Human
uauguuccauuaaac

SEQ ID NO: 3890959 - RNA, 17 nt, Human
uauguugaagccuuugu

SEQ ID NO: 3890960 - RNA, 13 nt, Human
uauguugacauuu

SEQ ID NO: 3890961 - RNA, 15 nt, Human
uauguugaugaaaaa

SEQ ID NO: 3890962 - RNA, 16 nt, Human
uauguugucaaagaga

SEQ ID NO: 3890963 - RNA, 21 nt, Human
uauguuguccaauuguugaca

SEQ ID NO: 3890964 - RNA, 16 nt, Human
uauguugugaagaugu

SEQ ID NO: 3890965 - RNA, 18 nt, Human
uauguuuaccuuuuaauu

SEQ ID NO: 3890966 - RNA, 18 nt, Human
uauguuuauuuacuaauu

SEQ ID NO: 3890967 - RNA, 14 nt, Human
uauguuuccuuguu

SEQ ID NO: 3890968 - RNA, 12 nt, Human
uauguuugaaua

SEQ ID NO: 3890969 - RNA, 16 nt, Human
uauguuugaauaugga

SEQ ID NO: 3890970 - RNA, 22 nt, Human
uauguuugccacuuugcaaagg

SEQ ID NO: 3890971 - RNA, 20 nt, Human
uauguuugucuuuuaaugcu

SEQ ID NO: 3890972 - RNA, 14 nt, Human
uauguuuuagcaug

SEQ ID NO: 3890973 - RNA, 16 nt, Human
uauguuuuagcaugug

SEQ ID NO: 3890974 - RNA, 21 nt, Human
uauguuuucaggcuagaugua

SEQ ID NO: 3890975 - RNA, 18 nt, Human
uauguuuucgaaaaucaa

SEQ ID NO: 3890976 - RNA, 12 nt, Human
uauguuuugguc

SEQ ID NO: 3890977 - RNA, 13 nt, Human
uauguuuuucagu

SEQ ID NO: 3890978 - RNA, 14 nt, Human
uauguuuuucaguu

SEQ ID NO: 3890979 - RNA, 20 nt, Human
uauguuuuucaguucaaagu

SEQ ID NO: 3890980 - RNA, 15 nt, Human
uauguuuuucugugu

SEQ ID NO: 3890981 - RNA, 23 nt, Human
uauuaaaaaaaacaaaaagaaca

SEQ ID NO: 3890982 - RNA, 13 nt, Human
uauuaaaaaacaa

SEQ ID NO: 3890983 - RNA, 13 nt, Human
uauuaaaaagucu

SEQ ID NO: 3890984 - RNA, 14 nt, Human
uauuaaaaagucuu

SEQ ID NO: 3890985 - RNA, 15 nt, Human
uauuaaaaagucuuu

SEQ ID NO: 3890986 - RNA, 12 nt, Human
uauuaaaaauau

SEQ ID NO: 3890987 - RNA, 18 nt, Human
uauuaaaaauauaaaacu

SEQ ID NO: 3890988 - RNA, 19 nt, Human
uauuaaaaauauaaaacug

SEQ ID NO: 3890989 - RNA, 22 nt, Human
uauuaaaaauauaaaacugcgu

SEQ ID NO: 3890990 - RNA, 20 nt, Human
uauuaaaaauauggaacuuc

SEQ ID NO: 3890991 - RNA, 18 nt, Human
uauuaaaacauuggauua

SEQ ID NO: 3890992 - RNA, 22 nt, Human
uauuaaaacucagccugggaca

SEQ ID NO: 3890993 - RNA, 17 nt, Human
uauuaaaagaaaggguu

SEQ ID NO: 3890994 - RNA, 13 nt, Human
uauuaaaagacuc

SEQ ID NO: 3890995 - RNA, 18 nt, Human
uauuaaaagacucauccg

SEQ ID NO: 3890996 - RNA, 14 nt, Human
uauuaaaagucaca

SEQ ID NO: 3890997 - RNA, 22 nt, Human
uauuaaaagucacaauguucuu

SEQ ID NO: 3890998 - RNA, 20 nt, Human
uauuaaaauaagcacugugc

SEQ ID NO: 3890999 - RNA, 17 nt, Human
uauuaaaauauuucagg

SEQ ID NO: 3891000 - RNA, 10 nt, Human
uauuaaaauu

SEQ ID NO: 3891001 - RNA, 19 nt, Human
uauuaaaauuccaaauuca

SEQ ID NO: 3891002 - RNA, 14 nt, Human
uauuaaaauucuga

SEQ ID NO: 3891003 - RNA, 15 nt, Human
uauuaaaauucugaa

SEQ ID NO: 3891004 - RNA, 17 nt, Human
uauuaaacaaaguuuca

SEQ ID NO: 3891005 - RNA, 18 nt, Human
uauuaaacaaaguuucag

SEQ ID NO: 3891006 - RNA, 20 nt, Human
uauuaaacagauuuuuacaa

SEQ ID NO: 3891007 - RNA, 17 nt, Human
uauuaaacaugcuguac

SEQ ID NO: 3891008 - RNA, 19 nt, Human
uauuaaacaugcuguacau

SEQ ID NO: 3891009 - RNA, 17 nt, Human
uauuaaaccauaagaug

SEQ ID NO: 3891010 - RNA, 18 nt, Human
uauuaaagaaaaaaaugu

SEQ ID NO: 3891011 - RNA, 20 nt, Human
uauuaaagaaaaaaauguau

SEQ ID NO: 3891012 - RNA, 14 nt, Human
uauuaaagccaugu

SEQ ID NO: 3891013 - RNA, 15 nt, Human
uauuaaaguuucaaa

SEQ ID NO: 3891014 - RNA, 21 nt, Human
uauuaaaguuucaaaaaucug

SEQ ID NO: 3891015 - RNA, 22 nt, Human
uauuaaaguuucaaaaaucuga

SEQ ID NO: 3891016 - RNA, 15 nt, Human
uauuaaauaaaauca

SEQ ID NO: 3891017 - RNA, 17 nt, Human
uauuaaauacagacacu

SEQ ID NO: 3891018 - RNA, 21 nt, Human
uauuaaauacagacacuaagu

SEQ ID NO: 3891019 - RNA, 17 nt, Human
uauuaaauggaaacuga

SEQ ID NO: 3891020 - RNA, 18 nt, Human
uauuaaauggaaacugaa

SEQ ID NO: 3891021 - RNA, 19 nt, Human
uauuaaauggaaacugaaa

SEQ ID NO: 3891022 - RNA, 12 nt, Human
uauuaaauuaca

SEQ ID NO: 3891023 - RNA, 12 nt, Human
uauuaaauuaug

SEQ ID NO: 3891024 - RNA, 20 nt, Human
uauuaaauuuuuuaaaaagc

SEQ ID NO: 3891025 - RNA, 22 nt, Human
uauuaaauuuuuuaaaaagcaa

SEQ ID NO: 3891026 - RNA, 20 nt, Human
uauuaaauuuuuuguugaca

SEQ ID NO: 3891027 - RNA, 17 nt, Human
uauuaaauuuuuuugua

SEQ ID NO: 3891028 - RNA, 18 nt, Human
uauuaaauuuuuuuguau

SEQ ID NO: 3891029 - RNA, 21 nt, Human
uauuaaauuuuuuuguaugaa

SEQ ID NO: 3891030 - RNA, 13 nt, Human
uauuaacaaaagu

SEQ ID NO: 3891031 - RNA, 18 nt, Human
uauuaacaaaaguucccu

SEQ ID NO: 3891032 - RNA, 14 nt, Human
uauuaacaauuaau

SEQ ID NO: 3891033 - RNA, 15 nt, Human
uauuaacgaugucca

SEQ ID NO: 3891034 - RNA, 16 nt, Human
uauuaacuacauuuau

SEQ ID NO: 3891035 - RNA, 18 nt, Human
uauuaacuacauuuauga

SEQ ID NO: 3891036 - RNA, 12 nt, Human
uauuaagaaagg

SEQ ID NO: 3891037 - RNA, 23 nt, Human
uauuaagaaaggaagcauuguaa

SEQ ID NO: 3891038 - RNA, 24 nt, Human
uauuaagaaaggaagcauuguaaa

SEQ ID NO: 3891039 - RNA, 14 nt, Human
uauuaagagugaaa

SEQ ID NO: 3891040 - RNA, 13 nt, Human
uauuaagauggau

SEQ ID NO: 3891041 - RNA, 18 nt, Human
uauuaagauggauucuca

SEQ ID NO: 3891042 - RNA, 18 nt, Human
uauuaagauuauaauugu

SEQ ID NO: 3891043 - RNA, 14 nt, Human
uauuaagcaguaaa

SEQ ID NO: 3891044 - RNA, 16 nt, Human
uauuaagcauauauuu

SEQ ID NO: 3891045 - RNA, 16 nt, Human
uauuaaggauguagcu

SEQ ID NO: 3891046 - RNA, 16 nt, Human
uauuaaguaacuuauu

SEQ ID NO: 3891047 - RNA, 16 nt, Human
uauuaauaaaaagaca

SEQ ID NO: 3891048 - RNA, 19 nt, Human
uauuaauaaacauucuauc

SEQ ID NO: 3891049 - RNA, 17 nt, Human
uauuaauaaauagagca

SEQ ID NO: 3891050 - RNA, 18 nt, Human
uauuaauauauauuaucu

SEQ ID NO: 3891051 - RNA, 13 nt, Human
uauuaauauuuaa

SEQ ID NO: 3891052 - RNA, 12 nt, Human
uauuaaucacug

SEQ ID NO: 3891053 - RNA, 16 nt, Human
uauuaaucacugugua

SEQ ID NO: 3891054 - RNA, 17 nt, Human
uauuaaucacuguguau

SEQ ID NO: 3891055 - RNA, 14 nt, Human
uauuaaucuuagug

SEQ ID NO: 3891056 - RNA, 17 nt, Human
uauuaaucuuaguguau

SEQ ID NO: 3891057 - RNA, 22 nt, Human
uauuaaucuuggauagcuaaua

SEQ ID NO: 3891058 - RNA, 13 nt, Human
uauuaaugaaaau

SEQ ID NO: 3891059 - RNA, 14 nt, Human
uauuaaugcacuuu

SEQ ID NO: 3891060 - RNA, 17 nt, Human
uauuaaugcacuuucua

SEQ ID NO: 3891061 - RNA, 14 nt, Human
uauuaaugcuaagg

SEQ ID NO: 3891062 - RNA, 18 nt, Human
uauuaauguuuucaaaag

SEQ ID NO: 3891063 - RNA, 11 nt, Human
uauuacaaaua

SEQ ID NO: 3891064 - RNA, 13 nt, Human
uauuacaauauuu

SEQ ID NO: 3891065 - RNA, 21 nt, Human
uauucagcucauggacuucug

SEQ ID NO: 3891066 - RNA, 17 nt, Human
uauucagcuucauuugu

SEQ ID NO: 3891067 - RNA, 16 nt, Human
uauucaggaagcucag

SEQ ID NO: 3891068 - RNA, 12 nt, Human
uauucaggacuu

SEQ ID NO: 3891069 - RNA, 16 nt, Human
uauucaggagaguaga

SEQ ID NO: 3891070 - RNA, 15 nt, Human
uauucaggcuuuagg

SEQ ID NO: 3891071 - RNA, 20 nt, Human
uauucagggaaggaggagcc

SEQ ID NO: 3891072 - RNA, 19 nt, Human
uauucaggggaaacuugau

SEQ ID NO: 3891073 - RNA, 22 nt, Human
uauucagugcuguggccugggc

SEQ ID NO: 3891074 - RNA, 18 nt, Human
uauucaguggcuaacuug

SEQ ID NO: 3891075 - RNA, 15 nt, Human
uauucagugucacug

SEQ ID NO: 3891076 - RNA, 16 nt, Human
uauucaguuaagaaaa

SEQ ID NO: 3891077 - RNA, 17 nt, Human
uauucaguucccagaau

SEQ ID NO: 3891078 - RNA, 18 nt, Human
uauucaguugguaagcuu

SEQ ID NO: 3891079 - RNA, 20 nt, Human
uauucauaagccaauuuuuc

SEQ ID NO: 3891080 - RNA, 23 nt, Human
uauucauaagccaauuuuucugc

SEQ ID NO: 3891081 - RNA, 16 nt, Human
uauucauaguuuaauu

SEQ ID NO: 3891082 - RNA, 16 nt, Human
uauucauaugcauauu

SEQ ID NO: 3891083 - RNA, 13 nt, Human
uauucauauuugu

SEQ ID NO: 3891084 - RNA, 22 nt, Human
uauucauauuuguacuuucugu

SEQ ID NO: 3891085 - RNA, 18 nt, Human
uauucauuaaauguuuga

SEQ ID NO: 3891086 - RNA, 22 nt, Human
uauucauuauuugucaaauugu

SEQ ID NO: 3891087 - RNA, 23 nt, Human
uauucauucauggaccacuguuu

SEQ ID NO: 3891088 - RNA, 19 nt, Human
uauucauucugcauugcua

SEQ ID NO: 3891089 - RNA, 22 nt, Human
uauucauucugugaucauuuau

SEQ ID NO: 3891090 - RNA, 20 nt, Human
uauucauugaagucagaugu

SEQ ID NO: 3891091 - RNA, 18 nt, Human
uauucauuguggucauag

SEQ ID NO: 3891092 - RNA, 19 nt, Human
uauucauuuaaaaugauua

SEQ ID NO: 3891093 - RNA, 12 nt, Human
uauucauuuagu

SEQ ID NO: 3891094 - RNA, 21 nt, Human
uauuccaaaaagguugcuguu

SEQ ID NO: 3891095 - RNA, 16 nt, Human
uauuccaaaccaaauu

SEQ ID NO: 3891096 - RNA, 17 nt, Human
uauuccaagacaugucu

SEQ ID NO: 3891097 - RNA, 17 nt, Human
uauuccaagcuuccaua

SEQ ID NO: 3891098 - RNA, 15 nt, Human
uauuccaccuuaaau

SEQ ID NO: 3891099 - RNA, 20 nt, Human
uauuccaccuuaaauuaaac

SEQ ID NO: 3891100 - RNA, 22 nt, Human
uauuccaccuuaaauuaaacaa

SEQ ID NO: 3891101 - RNA, 16 nt, Human
uauuccagaaugcugu

SEQ ID NO: 3891102 - RNA, 23 nt, Human
uauuccagaaugcuguacaucua

SEQ ID NO: 3891103 - RNA, 18 nt, Human
uauuccagcucauucauu

SEQ ID NO: 3891104 - RNA, 18 nt, Human
uauuccauauauuagcau

SEQ ID NO: 3891105 - RNA, 19 nt, Human
uauuccauauuagaaaacu

SEQ ID NO: 3891106 - RNA, 22 nt, Human
uauuccaugaauguaucaggaa

SEQ ID NO: 3891107 - RNA, 20 nt, Human
uauucccaagcccaugaguc

SEQ ID NO: 3891108 - RNA, 22 nt, Human
uauucccaagcccaugaguccu

SEQ ID NO: 3891109 - RNA, 13 nt, Human
uauuccuccuggg

SEQ ID NO: 3891110 - RNA, 19 nt, Human
uauuccugcauuugugaaa

SEQ ID NO: 3891111 - RNA, 14 nt, Human
uauuccuucuggcc

SEQ ID NO: 3891112 - RNA, 22 nt, Human
uauuccuugauacuaaaaguuc

SEQ ID NO: 3891113 - RNA, 19 nt, Human
uauuccuuucccuuccucu

SEQ ID NO: 3891114 - RNA, 20 nt, Human
uauuccuuuuguguacagug

SEQ ID NO: 3891115 - RNA, 22 nt, Human
uauucgauacugcgacuuucug

SEQ ID NO: 3891116 - RNA, 17 nt, Human
uauucgcuugagaaaaa

SEQ ID NO: 3891117 - RNA, 23 nt, Human
uauucuaacuuuuauuuuuauca

SEQ ID NO: 3891118 - RNA, 19 nt, Human
uauucuaagaaauaucugu

SEQ ID NO: 3891119 - RNA, 21 nt, Human
uauucuaagacuuacucuaag

SEQ ID NO: 3891120 - RNA, 22 nt, Human
uauucuaagacuuacucuaaga

SEQ ID NO: 3891121 - RNA, 20 nt, Human
uauucuauuacauuuucagu

SEQ ID NO: 3891122 - RNA, 14 nt, Human
uauucuauuuucau

SEQ ID NO: 3891123 - RNA, 17 nt, Human
uauucucaaacacaguu

SEQ ID NO: 3891124 - RNA, 22 nt, Human
uauucucaaacacaguuacacu

SEQ ID NO: 3891125 - RNA, 14 nt, Human
uauucucaaagcag

SEQ ID NO: 3891126 - RNA, 15 nt, Human
uauucucaccaggaa

SEQ ID NO: 3891127 - RNA, 13 nt, Human
uauucucacucca

SEQ ID NO: 3891128 - RNA, 14 nt, Human
uauucucacuccac

SEQ ID NO: 3891129 - RNA, 15 nt, Human
uauucucagcagagu

SEQ ID NO: 3891130 - RNA, 17 nt, Human
uauucucagcagagugc

SEQ ID NO: 3891131 - RNA, 16 nt, Human
uauucuccuccucccu

SEQ ID NO: 3891132 - RNA, 18 nt, Human
uauucucuccuguaccuc

SEQ ID NO: 3891133 - RNA, 14 nt, Human
uauucucuuuuauc

SEQ ID NO: 3891134 - RNA, 16 nt, Human
uauucugaagcaacau

SEQ ID NO: 3891135 - RNA, 17 nt, Human
uauucugggaauguaua

SEQ ID NO: 3891136 - RNA, 19 nt, Human
uauucuguagauucugugg

SEQ ID NO: 3891137 - RNA, 22 nt, Human
uauucuguagauucuguggaac

SEQ ID NO: 3891138 - RNA, 13 nt, Human
uauucugucccua

SEQ ID NO: 3891139 - RNA, 15 nt, Human
uauucugucccuagg

SEQ ID NO: 3891140 - RNA, 21 nt, Human
uauucuguguugcauuauuca

SEQ ID NO: 3891141 - RNA, 13 nt, Human
uauucuuaaaaug

SEQ ID NO: 3891142 - RNA, 15 nt, Human
uauucuuaaaaugca

SEQ ID NO: 3891143 - RNA, 15 nt, Human
uauucuuauaaaaau

SEQ ID NO: 3891144 - RNA, 17 nt, Human
uauucuuauucaaagaa

SEQ ID NO: 3891145 - RNA, 14 nt, Human
uauucuucauaaca

SEQ ID NO: 3891146 - RNA, 18 nt, Human
uauucuucuagaguucag

SEQ ID NO: 3891147 - RNA, 18 nt, Human
uauucuugaaagaagaau

SEQ ID NO: 3891148 - RNA, 23 nt, Human
uauucuugaucaguaguuugcau

SEQ ID NO: 3891149 - RNA, 16 nt, Human
uauucuugauguaaaa

SEQ ID NO: 3891150 - RNA, 14 nt, Human
uauucuugguuuuc

SEQ ID NO: 3891151 - RNA, 12 nt, Human
uauucuugugaa

SEQ ID NO: 3891152 - RNA, 22 nt, Human
uauucuugugaauauguacaua

SEQ ID NO: 3891153 - RNA, 10 nt, Human
uauucuuuga

SEQ ID NO: 3891154 - RNA, 24 nt, Human
uauucuuugauguuaacacauuuu

SEQ ID NO: 3891155 - RNA, 22 nt, Human
uauucuuugcacuuuuucuuaa

SEQ ID NO: 3891156 - RNA, 12 nt, Human
uauucuuuucca

SEQ ID NO: 3891157 - RNA, 18 nt, Human
uauucuuuucugcaaaau

SEQ ID NO: 3891158 - RNA, 13 nt, Human
uauugaaaaaaau

SEQ ID NO: 3891159 - RNA, 14 nt, Human
uauugaaaauugaa

SEQ ID NO: 3891160 - RNA, 14 nt, Human
uauugaaagaauua

SEQ ID NO: 3891161 - RNA, 13 nt, Human
uauugaaauauua

SEQ ID NO: 3891162 - RNA, 17 nt, Human
uauugaagacaauuuga

SEQ ID NO: 3891163 - RNA, 19 nt, Human
uauugaagcauuuuauaaa

SEQ ID NO: 3891164 - RNA, 16 nt, Human
uauugaaguuucagcu

SEQ ID NO: 3891165 - RNA, 17 nt, Human
uauugaauacuuacauu

SEQ ID NO: 3891166 - RNA, 14 nt, Human
uauugaauauugug

SEQ ID NO: 3891167 - RNA, 20 nt, Human
uauugaaucaguuuccaauu

SEQ ID NO: 3891168 - RNA, 16 nt, Human
uauugaaucuauuuaa

SEQ ID NO: 3891169 - RNA, 14 nt, Human
uauugaauguuaaa

SEQ ID NO: 3891170 - RNA, 19 nt, Human
uauugaauucauuucacug

SEQ ID NO: 3891171 - RNA, 15 nt, Human
uauugaauugagaug

SEQ ID NO: 3891172 - RNA, 13 nt, Human
uauugaauuuuuc

SEQ ID NO: 3891173 - RNA, 15 nt, Human
uauugaauuuuuccu

SEQ ID NO: 3891174 - RNA, 13 nt, Human
uauugacaauaau

SEQ ID NO: 3891175 - RNA, 17 nt, Human
uauugacaauaauuuca

SEQ ID NO: 3891176 - RNA, 18 nt, Human
uauugacaauaauuucag

SEQ ID NO: 3891177 - RNA, 16 nt, Human
uauugacacagaaaau

SEQ ID NO: 3891178 - RNA, 20 nt, Human
uauugacacagaaaauguug

SEQ ID NO: 3891179 - RNA, 17 nt, Human
uauugacaucagcauca

SEQ ID NO: 3891180 - RNA, 18 nt, Human
uauugacaucagcaucac

SEQ ID NO: 3891181 - RNA, 14 nt, Human
uauugacucugggu

SEQ ID NO: 3891182 - RNA, 19 nt, Human
uauugacuucaaugauagu

SEQ ID NO: 3891183 - RNA, 14 nt, Human
uauugacuuguaua

SEQ ID NO: 3891184 - RNA, 15 nt, Human
uauugagaaagagca

SEQ ID NO: 3891185 - RNA, 14 nt, Human
uauugagacaaaaa

SEQ ID NO: 3891186 - RNA, 17 nt, Human
uauugaggaaaaauaug

SEQ ID NO: 3891187 - RNA, 22 nt, Human
uauugaggaaaaauaugugaag

SEQ ID NO: 3891188 - RNA, 18 nt, Human
uauugaggccaagaauau

SEQ ID NO: 3891189 - RNA, 19 nt, Human
uauugaggccaagaauauu

SEQ ID NO: 3891190 - RNA, 23 nt, Human
uauugaggcuuuguguuguaauu

SEQ ID NO: 3891191 - RNA, 22 nt, Human
uauugaguuuguagguaaaaug

SEQ ID NO: 3891192 - RNA, 19 nt, Human
uauugauaagaucuuuuau

SEQ ID NO: 3891193 - RNA, 23 nt, Human
uauugauaagaucuuuuauuuug

SEQ ID NO: 3891194 - RNA, 14 nt, Human
uauugauaaguuca

SEQ ID NO: 3891195 - RNA, 14 nt, Human
uauugauaguacuc

SEQ ID NO: 3891196 - RNA, 12 nt, Human
uauugaugaaaa

SEQ ID NO: 3891197 - RNA, 13 nt, Human
uauugaugaaaag

SEQ ID NO: 3891198 - RNA, 22 nt, Human
uauugauguacagucugucaug

SEQ ID NO: 3891199 - RNA, 14 nt, Human
uauugaugugcaaa

SEQ ID NO: 3891200 - RNA, 14 nt, Human
uauugauugcuuuu

SEQ ID NO: 3891201 - RNA, 18 nt, Human
uauugauugggaaaacau

SEQ ID NO: 3891202 - RNA, 19 nt, Human
uauugauugggaaaacauu

SEQ ID NO: 3891203 - RNA, 23 nt, Human
uauugcacaugucuuaaugaagu

SEQ ID NO: 3891204 - RNA, 22 nt, Human
uauugcagcgauuaauaacagg

SEQ ID NO: 3891205 - RNA, 15 nt, Human
uauugcaucuguaua

SEQ ID NO: 3891206 - RNA, 21 nt, Human
uauugcaucuguauaaguaag

SEQ ID NO: 3891207 - RNA, 13 nt, Human
uauugcauuuaua

SEQ ID NO: 3891208 - RNA, 22 nt, Human
uauugccaaaacccagcugcac

SEQ ID NO: 3891209 - RNA, 16 nt, Human
uauuuacauaugaaau

SEQ ID NO: 3891210 - RNA, 17 nt, Human
uauuuacauaugaaauu

SEQ ID NO: 3891211 - RNA, 21 nt, Human
uauuuacauaugaaauuuaau

SEQ ID NO: 3891212 - RNA, 14 nt, Human
uauuuacauuuaau

SEQ ID NO: 3891213 - RNA, 18 nt, Human
uauuuaccaaaaauuuug

SEQ ID NO: 3891214 - RNA, 17 nt, Human
uauuuaccugcaggcug

SEQ ID NO: 3891215 - RNA, 15 nt, Human
uauuuacgcuuugau

SEQ ID NO: 3891216 - RNA, 19 nt, Human
uauuuacgcuuugauucau

SEQ ID NO: 3891217 - RNA, 22 nt, Human
uauuuacgcuuugauucauagu

SEQ ID NO: 3891218 - RNA, 16 nt, Human
uauuuacugagcuucu

SEQ ID NO: 3891219 - RNA, 23 nt, Human
uauuuacugagcuucucugugaa

SEQ ID NO: 3891220 - RNA, 18 nt, Human
uauuuacuucuuauacau

SEQ ID NO: 3891221 - RNA, 18 nt, Human
uauuuagauauaacacua

SEQ ID NO: 3891222 - RNA, 21 nt, Human
uauuuagaugauaaagagaca

SEQ ID NO: 3891223 - RNA, 14 nt, Human
uauuuagauucacu

SEQ ID NO: 3891224 - RNA, 19 nt, Human
uauuuagauuguuaaaaua

SEQ ID NO: 3891225 - RNA, 20 nt, Human
uauuuagcaccagggaaggg

SEQ ID NO: 3891226 - RNA, 11 nt, Human
uauuuagcaug

SEQ ID NO: 3891227 - RNA, 19 nt, Human
uauuuagcuugggaaaggu

SEQ ID NO: 3891228 - RNA, 17 nt, Human
uauuuaggcagauugaa

SEQ ID NO: 3891229 - RNA, 20 nt, Human
uauuuaguuauaguuucaga

SEQ ID NO: 3891230 - RNA, 22 nt, Human
uauuuaguuguaaaccaaguga

SEQ ID NO: 3891231 - RNA, 14 nt, Human
uauuuauaagcaga

SEQ ID NO: 3891232 - RNA, 17 nt, Human
uauuuauaauacauuuc

SEQ ID NO: 3891233 - RNA, 22 nt, Human
uauuuauaauagcaacuuuugu

SEQ ID NO: 3891234 - RNA, 16 nt, Human
uauuuauagucauuua

SEQ ID NO: 3891235 - RNA, 13 nt, Human
uauuuauauaaau

SEQ ID NO: 3891236 - RNA, 13 nt, Human
uauuuauauauuu

SEQ ID NO: 3891237 - RNA, 17 nt, Human
uauuuauauguacauga

SEQ ID NO: 3891238 - RNA, 15 nt, Human
uauuuauauguacug

SEQ ID NO: 3891239 - RNA, 17 nt, Human
uauuuauauguaugugu

SEQ ID NO: 3891240 - RNA, 17 nt, Human
uauuuauauuuauugac

SEQ ID NO: 3891241 - RNA, 18 nt, Human
uauuuauauuuauugacu

SEQ ID NO: 3891242 - RNA, 21 nt, Human
uauuuauauuuuuauuuuauu

SEQ ID NO: 3891243 - RNA, 13 nt, Human
uauuuaucaguga

SEQ ID NO: 3891244 - RNA, 21 nt, Human
uauuuaucuguaguaaacuau

SEQ ID NO: 3891245 - RNA, 13 nt, Human
uauuuaugaaagu

SEQ ID NO: 3891246 - RNA, 14 nt, Human
uauuuaugaagaaa

SEQ ID NO: 3891247 - RNA, 15 nt, Human
uauuuaugaagaaaa

SEQ ID NO: 3891248 - RNA, 19 nt, Human
uauuuaugaaguuuaaaac

SEQ ID NO: 3891249 - RNA, 13 nt, Human
uauuuaugccuug

SEQ ID NO: 3891250 - RNA, 17 nt, Human
uauuuaugggauccugg

SEQ ID NO: 3891251 - RNA, 15 nt, Human
uauuuauguacuuuu

SEQ ID NO: 3891252 - RNA, 12 nt, Human
uauuuauguauu

SEQ ID NO: 3891253 - RNA, 14 nt, Human
uauuuaugugugag

SEQ ID NO: 3891254 - RNA, 15 nt, Human
uauuuauguuaaaag

SEQ ID NO: 3891255 - RNA, 23 nt, Human
uauuuauuaaacagauuuuuaca

SEQ ID NO: 3891256 - RNA, 22 nt, Human
uauuuauuaaaugcccagcccc

SEQ ID NO: 3891257 - RNA, 15 nt, Human
uauuuauuaaauuuu

SEQ ID NO: 3891258 - RNA, 13 nt, Human
uauuuauuaagau

SEQ ID NO: 3891259 - RNA, 13 nt, Human
uauuuauuacaua

SEQ ID NO: 3891260 - RNA, 13 nt, Human
uauuuauuaccuc

SEQ ID NO: 3891261 - RNA, 13 nt, Human
uauuuauuacugu

SEQ ID NO: 3891262 - RNA, 14 nt, Human
uauuuauuauuuau

SEQ ID NO: 3891263 - RNA, 12 nt, Human
uauuuauucaau

SEQ ID NO: 3891264 - RNA, 18 nt, Human
uauuuauucaauaaagua

SEQ ID NO: 3891265 - RNA, 21 nt, Human
uauuuauucagcuucauuugu

SEQ ID NO: 3891266 - RNA, 23 nt, Human
uauuuauucauuauuugucaaau

SEQ ID NO: 3891267 - RNA, 20 nt, Human
uauuuauuccauauucaugu

SEQ ID NO: 3891268 - RNA, 17 nt, Human
uauuuauugcuacuucc

SEQ ID NO: 3891269 - RNA, 13 nt, Human
uauuuauugcuuu

SEQ ID NO: 3891270 - RNA, 15 nt, Human
uauuuauuuaaaaga

SEQ ID NO: 3891271 - RNA, 14 nt, Human
uauuuauuuaaauu

SEQ ID NO: 3891272 - RNA, 16 nt, Human
uauuuauuuaagcuua

SEQ ID NO: 3891273 - RNA, 21 nt, Human
uauuuauuuaauaacaauugu

SEQ ID NO: 3891274 - RNA, 14 nt, Human
uauuuauuuaguau

SEQ ID NO: 3891275 - RNA, 11 nt, Human
uauuuauuuau

SEQ ID NO: 3891276 - RNA, 14 nt, Human
uauuuauuuaugga

SEQ ID NO: 3891277 - RNA, 17 nt, Human
uauuuauuuuccucccc

SEQ ID NO: 3891278 - RNA, 13 nt, Human
uauuuauuuucuu

SEQ ID NO: 3891279 - RNA, 12 nt, Human
uauuuauuuugu

SEQ ID NO: 3891280 - RNA, 16 nt, Human
uauuuauuuuguaauu

SEQ ID NO: 3891281 - RNA, 22 nt, Human
uauuuauuuuuuuuaauuguau

SEQ ID NO: 3891282 - RNA, 15 nt, Human
uauuucaaaaauuug

SEQ ID NO: 3891283 - RNA, 16 nt, Human
uauuucaaaaauuugg

SEQ ID NO: 3891284 - RNA, 22 nt, Human
uauuucaaaaauuuggaauucu

SEQ ID NO: 3891285 - RNA, 20 nt, Human
uauuucaaaauauacauuca

SEQ ID NO: 3891286 - RNA, 22 nt, Human
uauuucaauuuccaagagcuga

SEQ ID NO: 3891287 - RNA, 13 nt, Human
uauuucagaaaua

SEQ ID NO: 3891288 - RNA, 14 nt, Human
uauuucagaaguuu

SEQ ID NO: 3891289 - RNA, 21 nt, Human
uauuucaggcauuggauauuu

SEQ ID NO: 3891290 - RNA, 21 nt, Human
uauuucaguacuucagcaaga

SEQ ID NO: 3891291 - RNA, 13 nt, Human
uauuucagugaau

SEQ ID NO: 3891292 - RNA, 17 nt, Human
uauuucaguguuaccug

SEQ ID NO: 3891293 - RNA, 20 nt, Human
uauuucaucacaagaacaca

SEQ ID NO: 3891294 - RNA, 20 nt, Human
uauuucaucagaacagcugu

SEQ ID NO: 3891295 - RNA, 20 nt, Human
uauuucaucauauuauacag

SEQ ID NO: 3891296 - RNA, 23 nt, Human
uauuucaucaugauaauucagca

SEQ ID NO: 3891297 - RNA, 17 nt, Human
uauuucauguggcugua

SEQ ID NO: 3891298 - RNA, 12 nt, Human
uauuucauuucu

SEQ ID NO: 3891299 - RNA, 18 nt, Human
uauuucauuuuuugcauc

SEQ ID NO: 3891300 - RNA, 18 nt, Human
uauuucccaugauuucau

SEQ ID NO: 3891301 - RNA, 21 nt, Human
uauuucccaugauuucaugua

SEQ ID NO: 3891302 - RNA, 21 nt, Human
uauuucccauuugugccagag

SEQ ID NO: 3891303 - RNA, 21 nt, Human
uauuuccccaacauguaauaa

SEQ ID NO: 3891304 - RNA, 21 nt, Human
uauuuccccaggggaaaauga

SEQ ID NO: 3891305 - RNA, 20 nt, Human
uauuucccccuuucuuccuc

SEQ ID NO: 3891306 - RNA, 15 nt, Human
uauuucccuaaaaua

SEQ ID NO: 3891307 - RNA, 17 nt, Human
uauuucccuacauuaaa

SEQ ID NO: 3891308 - RNA, 15 nt, Human
uauuucccuccccug

SEQ ID NO: 3891309 - RNA, 18 nt, Human
uauuucccucucauuuug

SEQ ID NO: 3891310 - RNA, 16 nt, Human
uauuuccuaugaugua

SEQ ID NO: 3891311 - RNA, 17 nt, Human
uauuuccuaugauguau

SEQ ID NO: 3891312 - RNA, 18 nt, Human
uauuuccuggauguuugg

SEQ ID NO: 3891313 - RNA, 11 nt, Human
uauuucuacug

SEQ ID NO: 3891314 - RNA, 17 nt, Human
uauuucuagcuuuuuaa

SEQ ID NO: 3891315 - RNA, 16 nt, Human
uauuucuaggaagaau

SEQ ID NO: 3891316 - RNA, 16 nt, Human
uauuucuauauuuuca

SEQ ID NO: 3891317 - RNA, 17 nt, Human
uauuucuauauuuucau

SEQ ID NO: 3891318 - RNA, 21 nt, Human
uauuucuaugaaauauuaugu

SEQ ID NO: 3891319 - RNA, 22 nt, Human
uauuucuaugaaauauuauguu

SEQ ID NO: 3891320 - RNA, 16 nt, Human
uauuucuaugagaaaa

SEQ ID NO: 3891321 - RNA, 11 nt, Human
uauuucuccuu

SEQ ID NO: 3891322 - RNA, 14 nt, Human
uauuucugcaaaca

SEQ ID NO: 3891323 - RNA, 15 nt, Human
uauuucugcuuucuu

SEQ ID NO: 3891324 - RNA, 17 nt, Human
uauuucugggucuuuug

SEQ ID NO: 3891325 - RNA, 22 nt, Human
uauuucugggucuuuugcuacu

SEQ ID NO: 3891326 - RNA, 15 nt, Human
uauuucuguauauaa

SEQ ID NO: 3891327 - RNA, 16 nt, Human
uauuucuuaaacacuu

SEQ ID NO: 3891328 - RNA, 23 nt, Human
uauuucuuacaggcacaaaauga

SEQ ID NO: 3891329 - RNA, 18 nt, Human
uauuucuuauacgcuuuu

SEQ ID NO: 3891330 - RNA, 16 nt, Human
uauuucuuauauaugu

SEQ ID NO: 3891331 - RNA, 19 nt, Human
uauuucuuauauaugugaa

SEQ ID NO: 3891332 - RNA, 19 nt, Human
uauuucuucguucuuuuua

SEQ ID NO: 3891333 - RNA, 13 nt, Human
uauuucuuguuug

SEQ ID NO: 3891334 - RNA, 14 nt, Human
uauuucuuguuugu

SEQ ID NO: 3891335 - RNA, 13 nt, Human
uauuucuuuguua

SEQ ID NO: 3891336 - RNA, 14 nt, Human
uauuucuuuguuau

SEQ ID NO: 3891337 - RNA, 20 nt, Human
uauuugaaaacagaaauugg

SEQ ID NO: 3891338 - RNA, 19 nt, Human
uauuugaaaacauauaaag

SEQ ID NO: 3891339 - RNA, 18 nt, Human
uauuugaaacacugguuu

SEQ ID NO: 3891340 - RNA, 15 nt, Human
uauuugaaagugccu

SEQ ID NO: 3891341 - RNA, 16 nt, Human
uauuugaacaaugaag

SEQ ID NO: 3891342 - RNA, 18 nt, Human
uauuugaacaaugaaguu

SEQ ID NO: 3891343 - RNA, 16 nt, Human
uauuugaaucuugucu

SEQ ID NO: 3891344 - RNA, 18 nt, Human
uauuugaaucuugucuca

SEQ ID NO: 3891345 - RNA, 15 nt, Human
uauuugaaugacuaa

SEQ ID NO: 3891346 - RNA, 21 nt, Human
uauuugaaugauuuuucuuua

SEQ ID NO: 3891347 - RNA, 23 nt, Human
uauuugaauuaaaacuucuuaaa

SEQ ID NO: 3891348 - RNA, 17 nt, Human
uauuugaauuauuucug

SEQ ID NO: 3891349 - RNA, 12 nt, Human
uauuugaauuuu

SEQ ID NO: 3891350 - RNA, 18 nt, Human
uauuugaauuuuaaaucu

SEQ ID NO: 3891351 - RNA, 14 nt, Human
uauuugagaauaua

SEQ ID NO: 3891352 - RNA, 19 nt, Human
uauuugagggguuucagaa

SEQ ID NO: 3891353 - RNA, 17 nt, Human
uauuugauucaaaauau

SEQ ID NO: 3891354 - RNA, 21 nt, Human
uauuugauucaaaauauuuaa

SEQ ID NO: 3891355 - RNA, 19 nt, Human
uggggugagaauugggcgg

SEQ ID NO: 3891356 - RNA, 18 nt, Human
uggggugcugggaggagg

SEQ ID NO: 3891357 - RNA, 17 nt, Human
ugggguggccugugugg

SEQ ID NO: 3891358 - RNA, 20 nt, Human
ugggguggccuguguggcca

SEQ ID NO: 3891359 - RNA, 18 nt, Human
ugggguggcugcagccuc

SEQ ID NO: 3891360 - RNA, 13 nt, Human
uggggugggagag

SEQ ID NO: 3891361 - RNA, 20 nt, Human
uggggugggccucugguuug

SEQ ID NO: 3891362 - RNA, 22 nt, Human
ugggguggggggaugguaagag

SEQ ID NO: 3891363 - RNA, 22 nt, Human
ugggguggggggggugcugggc

SEQ ID NO: 3891364 - RNA, 13 nt, Human
uggggugugcugg

SEQ ID NO: 3891365 - RNA, 21 nt, Human
ugggguguguuccaacugccc

SEQ ID NO: 3891366 - RNA, 16 nt, Human
ugggguguuugggagg

SEQ ID NO: 3891367 - RNA, 22 nt, Human
ugggguucagccccuccucugc

SEQ ID NO: 3891368 - RNA, 20 nt, Human
ugggguucguggaaagggug

SEQ ID NO: 3891369 - RNA, 16 nt, Human
ugggguugcaaccacu

SEQ ID NO: 3891370 - RNA, 21 nt, Human
ugggguuggcugggcccagaa

SEQ ID NO: 3891371 - RNA, 13 nt, Human
ugggguuuccugg

SEQ ID NO: 3891372 - RNA, 15 nt, Human
ugggguuuccuggca

SEQ ID NO: 3891373 - RNA, 17 nt, Human
ugggguuuccuggcacu

SEQ ID NO: 3891374 - RNA, 12 nt, Human
ugggguuuugua

SEQ ID NO: 3891375 - RNA, 15 nt, Human
uggguaaaauacuuu

SEQ ID NO: 3891376 - RNA, 24 nt, Human
uggguaaaauuagaugcauguuga

SEQ ID NO: 3891377 - RNA, 18 nt, Human
uggguaaaugcaaaguuc

SEQ ID NO: 3891378 - RNA, 20 nt, Human
uggguaaaugcaaaguucug

SEQ ID NO: 3891379 - RNA, 12 nt, Human
uggguaaauuca

SEQ ID NO: 3891380 - RNA, 16 nt, Human
uggguaacuagggaag

SEQ ID NO: 3891381 - RNA, 22 nt, Human
uggguaauccaggcacagcuga

SEQ ID NO: 3891382 - RNA, 18 nt, Human
uggguaaugaaacaaaga

SEQ ID NO: 3891383 - RNA, 20 nt, Human
uggguaauuuagauuguaaa

SEQ ID NO: 3891384 - RNA, 15 nt, Human
uggguacccccagga

SEQ ID NO: 3891385 - RNA, 15 nt, Human
uggguaccuauuuuc

SEQ ID NO: 3891386 - RNA, 21 nt, Human
uggguaccuauuuucauugua

SEQ ID NO: 3891387 - RNA, 23 nt, Human
uggguacuuguggacacagcucu

SEQ ID NO: 3891388 - RNA, 22 nt, Human
uggguagcugccacuugaacaa

SEQ ID NO: 3891389 - RNA, 21 nt, Human
uggguagcuucugaccucagc

SEQ ID NO: 3891390 - RNA, 17 nt, Human
uggguagggcucugaca

SEQ ID NO: 3891391 - RNA, 14 nt, Human
uggguauagauguu

SEQ ID NO: 3891392 - RNA, 17 nt, Human
uggguaucaaacagcuc

SEQ ID NO: 3891393 - RNA, 14 nt, Human
uggguaucaagaca

SEQ ID NO: 3891394 - RNA, 12 nt, Human
ugggucacagga

SEQ ID NO: 3891395 - RNA, 13 nt, Human
ugggucacaggaa

SEQ ID NO: 3891396 - RNA, 16 nt, Human
uggguccaaauaaaaa

SEQ ID NO: 3891397 - RNA, 17 nt, Human
uggguccaggccuacuc

SEQ ID NO: 3891398 - RNA, 18 nt, Human
uggguccaggccuacucc

SEQ ID NO: 3891399 - RNA, 21 nt, Human
uggguccaggggaugggaggu

SEQ ID NO: 3891400 - RNA, 19 nt, Human
uggguccaggggccccucc

SEQ ID NO: 3891401 - RNA, 17 nt, Human
ugggucccacuuccccu

SEQ ID NO: 3891402 - RNA, 22 nt, Human
ugggucccacuuccccuccuac

SEQ ID NO: 3891403 - RNA, 16 nt, Human
uggguccgauaauauc

SEQ ID NO: 3891404 - RNA, 18 nt, Human
uggguccuuuucagaagu

SEQ ID NO: 3891405 - RNA, 23 nt, Human
ugggucuaagggguugguugagg

SEQ ID NO: 3891406 - RNA, 14 nt, Human
ugggucuauuccag

SEQ ID NO: 3891407 - RNA, 20 nt, Human
ugggucucgcuuuguugccc

SEQ ID NO: 3891408 - RNA, 15 nt, Human
ugggucuggcugagc

SEQ ID NO: 3891409 - RNA, 19 nt, Human
ugggucugugucucuuuuc

SEQ ID NO: 3891410 - RNA, 13 nt, Human
ugggucugugugu

SEQ ID NO: 3891411 - RNA, 15 nt, Human
ugggucuguuuuccu

SEQ ID NO: 3891412 - RNA, 21 nt, Human
ugggucuguuuuccuuucuca

SEQ ID NO: 3891413 - RNA, 22 nt, Human
ugggucuguuuuccuuucucac

SEQ ID NO: 3891414 - RNA, 11 nt, Human
ugggucuucca

SEQ ID NO: 3891415 - RNA, 22 nt, Human
ugggucuuguuuuuuuuuucca

SEQ ID NO: 3891416 - RNA, 18 nt, Human
ugggugaaagaaaucaug

SEQ ID NO: 3891417 - RNA, 15 nt, Human
ugggugaaggcuggc

SEQ ID NO: 3891418 - RNA, 16 nt, Human
ugggugaaggcuggca

SEQ ID NO: 3891419 - RNA, 14 nt, Human
ugggugacagagca

SEQ ID NO: 3891420 - RNA, 18 nt, Human
ugggugagaugcuggaga

SEQ ID NO: 3891421 - RNA, 22 nt, Human
ugggugaggaucccugaaggcc

SEQ ID NO: 3891422 - RNA, 20 nt, Human
ugggugauuccuaagccacu

SEQ ID NO: 3891423 - RNA, 14 nt, Human
ugggugcaggagcg

SEQ ID NO: 3891424 - RNA, 20 nt, Human
ugggugcaggagcgcucccu

SEQ ID NO: 3891425 - RNA, 17 nt, Human
ugggugcccaagcucag

SEQ ID NO: 3891426 - RNA, 21 nt, Human
ugggugccuaggccugggcag

SEQ ID NO: 3891427 - RNA, 23 nt, Human
ugggugccuaggccugggcagug

SEQ ID NO: 3891428 - RNA, 14 nt, Human
ugggugcuggcugc

SEQ ID NO: 3891429 - RNA, 18 nt, Human
ugggugcuggcugcccag

SEQ ID NO: 3891430 - RNA, 19 nt, Human
ugggugcuuggaggaagga

SEQ ID NO: 3891431 - RNA, 22 nt, Human
ugggugcuuggaggaaggaaac

SEQ ID NO: 3891432 - RNA, 21 nt, Human
uggguggcccauccccccuca

SEQ ID NO: 3891433 - RNA, 23 nt, Human
uggguggcuacucugugccagag

SEQ ID NO: 3891434 - RNA, 14 nt, Human
uggguggcucacuc

SEQ ID NO: 3891435 - RNA, 20 nt, Human
uggguggcuuaaaaaaaacu

SEQ ID NO: 3891436 - RNA, 12 nt, Human
ugggugggagag

SEQ ID NO: 3891437 - RNA, 20 nt, Human
uggguggggaggaaauagaa

SEQ ID NO: 3891438 - RNA, 21 nt, Human
uggguggggggcuucauacac

SEQ ID NO: 3891439 - RNA, 20 nt, Human
uggguggggugaggaccacu

SEQ ID NO: 3891440 - RNA, 14 nt, Human
uggguggguggugg

SEQ ID NO: 3891441 - RNA, 16 nt, Human
uggguggguggugggg

SEQ ID NO: 3891442 - RNA, 22 nt, Human
ugggugguacccucuggagggg

SEQ ID NO: 3891443 - RNA, 20 nt, Human
uggguguauuuauuuuccuc

SEQ ID NO: 3891444 - RNA, 21 nt, Human
ugggugucaagagggucugag

SEQ ID NO: 3891445 - RNA, 13 nt, Human
uggguguccugcc

SEQ ID NO: 3891446 - RNA, 23 nt, Human
uggguguccugccugucugcccc

SEQ ID NO: 3891447 - RNA, 17 nt, Human
ugggugucuccuuaagc

SEQ ID NO: 3891448 - RNA, 14 nt, Human
ugggugugugacuc

SEQ ID NO: 3891449 - RNA, 15 nt, Human
uggguuagaccuaca

SEQ ID NO: 3891450 - RNA, 14 nt, Human
uggguuagacugcc

SEQ ID NO: 3891451 - RNA, 15 nt, Human
uggguuagacugcca

SEQ ID NO: 3891452 - RNA, 19 nt, Human
uggguuagacugccagcuc

SEQ ID NO: 3891453 - RNA, 18 nt, Human
uggguuagggaaaacauu

SEQ ID NO: 3891454 - RNA, 15 nt, Human
uggguuauucuggag

SEQ ID NO: 3891455 - RNA, 17 nt, Human
uggguuauucuggaguu

SEQ ID NO: 3891456 - RNA, 23 nt, Human
uggguucaagcgauucuucugcu

SEQ ID NO: 3891457 - RNA, 16 nt, Human
uggguucacugcaacc

SEQ ID NO: 3891458 - RNA, 16 nt, Human
uggguucaugaugcag

SEQ ID NO: 3891459 - RNA, 13 nt, Human
uggguucauuauu

SEQ ID NO: 3891460 - RNA, 20 nt, Human
uggguucccuuuccuuccau

SEQ ID NO: 3891461 - RNA, 21 nt, Human
uggguuccuuccucugagccu

SEQ ID NO: 3891462 - RNA, 22 nt, Human
uggguucugccugccagcugca

SEQ ID NO: 3891463 - RNA, 16 nt, Human
uggguugcagacagga

SEQ ID NO: 3891464 - RNA, 19 nt, Human
uggguugcguccugacggc

SEQ ID NO: 3891465 - RNA, 15 nt, Human
uggguuggugcacag

SEQ ID NO: 3891466 - RNA, 20 nt, Human
uggguuuggaccccagcugg

SEQ ID NO: 3891467 - RNA, 21 nt, Human
uggguuuggaccccagcuggg

SEQ ID NO: 3891468 - RNA, 21 nt, Human
uggguuuuuuuuuuuaaaaaa

SEQ ID NO: 3891469 - RNA, 15 nt, Human
ugguaaaacucacug

SEQ ID NO: 3891470 - RNA, 20 nt, Human
ugguaaaacucacugugauc

SEQ ID NO: 3891471 - RNA, 13 nt, Human
ugguaaagauauu

SEQ ID NO: 3891472 - RNA, 17 nt, Human
ugguaaagauauuauuc

SEQ ID NO: 3891473 - RNA, 17 nt, Human
ugguaaaguccuuuucu

SEQ ID NO: 3891474 - RNA, 19 nt, Human
ugguaaaugccacacaccu

SEQ ID NO: 3891475 - RNA, 19 nt, Human
ugguaaauuuccccaacag

SEQ ID NO: 3891476 - RNA, 21 nt, Human
ugguaacauccuuucuauuga

SEQ ID NO: 3891477 - RNA, 13 nt, Human
ugguaacuguuaa

SEQ ID NO: 3891478 - RNA, 12 nt, Human
ugguaagagaaa

SEQ ID NO: 3891479 - RNA, 14 nt, Human
ugguaagagaaugu

SEQ ID NO: 3891480 - RNA, 23 nt, Human
ugguaagagaauguuauagugaa

SEQ ID NO: 3891481 - RNA, 20 nt, Human
ugguaagagacagaauguau

SEQ ID NO: 3891482 - RNA, 18 nt, Human
ugguaagauuguuauuaa

SEQ ID NO: 3891483 - RNA, 18 nt, Human
ugguaagcaacauggcuu

SEQ ID NO: 3891484 - RNA, 19 nt, Human
ugguaagcaacauggcuuu

SEQ ID NO: 3891485 - RNA, 13 nt, Human
ugguaagcucugg

SEQ ID NO: 3891486 - RNA, 13 nt, Human
ugguaagcuucca

SEQ ID NO: 3891487 - RNA, 14 nt, Human
ugguaauauugacu

SEQ ID NO: 3891488 - RNA, 16 nt, Human
ugguaaucauauuaga

SEQ ID NO: 3891489 - RNA, 21 nt, Human
ugguaauccccuaaaauaaca

SEQ ID NO: 3891490 - RNA, 17 nt, Human
ugguaaucuuuaccugu

SEQ ID NO: 3891491 - RNA, 22 nt, Human
ugguaaucuuuaccuguauaca

SEQ ID NO: 3891492 - RNA, 23 nt, Human
ugguaaucuuuaccuguauacag

SEQ ID NO: 3891493 - RNA, 17 nt, Human
ugguaauucuuauucuu

SEQ ID NO: 3891494 - RNA, 23 nt, Human
ugguaauuuauaguuuauacagu

SEQ ID NO: 3891495 - RNA, 22 nt, Human
ugguaauuuguaucugaaggag

SEQ ID NO: 3891496 - RNA, 14 nt, Human
ugguacaaaaauaa

SEQ ID NO: 3891497 - RNA, 19 nt, Human
ugguacaaaaauaaauuua

SEQ ID NO: 3891498 - RNA, 16 nt, Human
uguccagugcccauuc

SEQ ID NO: 3891499 - RNA, 17 nt, Human
uguccaguucccagaag

SEQ ID NO: 3891500 - RNA, 12 nt, Human
uguccaucugcc

SEQ ID NO: 3891501 - RNA, 13 nt, Human
uguccaucugccc

SEQ ID NO: 3891502 - RNA, 14 nt, Human
uguccaucugcccg

SEQ ID NO: 3891503 - RNA, 17 nt, Human
uguccaucugcccgccu

SEQ ID NO: 3891504 - RNA, 18 nt, Human
uguccaugcgcucagggc

SEQ ID NO: 3891505 - RNA, 12 nt, Human
uguccaugugug

SEQ ID NO: 3891506 - RNA, 15 nt, Human
uguccauugacaugu

SEQ ID NO: 3891507 - RNA, 17 nt, Human
uguccauuguccaaucc

SEQ ID NO: 3891508 - RNA, 15 nt, Human
uguccauuuugugaa

SEQ ID NO: 3891509 - RNA, 18 nt, Human
uguccauuuugugaagcc

SEQ ID NO: 3891510 - RNA, 22 nt, Human
uguccauuuugugaagcccugu

SEQ ID NO: 3891511 - RNA, 16 nt, Human
uguccauuuuuacaag

SEQ ID NO: 3891512 - RNA, 23 nt, Human
ugucccaaaaagaaaggagggga

SEQ ID NO: 3891513 - RNA, 12 nt, Human
ugucccacagcu

SEQ ID NO: 3891514 - RNA, 13 nt, Human
ugucccaccagcu

SEQ ID NO: 3891515 - RNA, 18 nt, Human
ugucccacccccaccccc

SEQ ID NO: 3891516 - RNA, 12 nt, Human
ugucccaccuca

SEQ ID NO: 3891517 - RNA, 12 nt, Human
ugucccaccucu

SEQ ID NO: 3891518 - RNA, 21 nt, Human
ugucccacgugucuuccacuu

SEQ ID NO: 3891519 - RNA, 15 nt, Human
ugucccacuaucugg

SEQ ID NO: 3891520 - RNA, 16 nt, Human
ugucccacuaucuggg

SEQ ID NO: 3891521 - RNA, 20 nt, Human
ugucccagaggcugccccac

SEQ ID NO: 3891522 - RNA, 19 nt, Human
ugucccauagucccugcca

SEQ ID NO: 3891523 - RNA, 21 nt, Human
ugucccaucggagugcggacc

SEQ ID NO: 3891524 - RNA, 19 nt, Human
ugucccaugacccaccccu

SEQ ID NO: 3891525 - RNA, 17 nt, Human
ugucccaugaucccugu

SEQ ID NO: 3891526 - RNA, 18 nt, Human
ugucccaugaucccugug

SEQ ID NO: 3891527 - RNA, 22 nt, Human
ugucccauggacacuccagugc

SEQ ID NO: 3891528 - RNA, 19 nt, Human
ugucccaugugagcugcug

SEQ ID NO: 3891529 - RNA, 14 nt, Human
ugucccauucccug

SEQ ID NO: 3891530 - RNA, 14 nt, Human
uguccccaaauccg

SEQ ID NO: 3891531 - RNA, 13 nt, Human
uguccccaacagc

SEQ ID NO: 3891532 - RNA, 14 nt, Human
uguccccaacagcg

SEQ ID NO: 3891533 - RNA, 12 nt, Human
uguccccacacu

SEQ ID NO: 3891534 - RNA, 16 nt, Human
uguccccaccaucugc

SEQ ID NO: 3891535 - RNA, 18 nt, Human
uguccccacccuccacuc

SEQ ID NO: 3891536 - RNA, 14 nt, Human
uguccccagcccac

SEQ ID NO: 3891537 - RNA, 9 nt, Human
uguccccca

SEQ ID NO: 3891538 - RNA, 16 nt, Human
ugucccccagcucugg

SEQ ID NO: 3891539 - RNA, 15 nt, Human
uguccccccacuccc

SEQ ID NO: 3891540 - RNA, 19 nt, Human
uguccccccacucccucac

SEQ ID NO: 3891541 - RNA, 20 nt, Human
ugucccccuaauauuaggga

SEQ ID NO: 3891542 - RNA, 22 nt, Human
ugucccccuuuagaucucugaa

SEQ ID NO: 3891543 - RNA, 16 nt, Human
uguccccgacccuugc

SEQ ID NO: 3891544 - RNA, 17 nt, Human
uguccccgcacugggcu

SEQ ID NO: 3891545 - RNA, 16 nt, Human
uguccccgcagcccug

SEQ ID NO: 3891546 - RNA, 18 nt, Human
uguccccgcugcugugca

SEQ ID NO: 3891547 - RNA, 18 nt, Human
uguccccggggcccaggg

SEQ ID NO: 3891548 - RNA, 23 nt, Human
uguccccuauggggaugguccac

SEQ ID NO: 3891549 - RNA, 14 nt, Human
uguccccucagcuc

SEQ ID NO: 3891550 - RNA, 18 nt, Human
uguccccuccacugucac

SEQ ID NO: 3891551 - RNA, 16 nt, Human
uguccccucccagagc

SEQ ID NO: 3891552 - RNA, 11 nt, Human
uguccccucuu

SEQ ID NO: 3891553 - RNA, 14 nt, Human
uguccccucuugcc

SEQ ID NO: 3891554 - RNA, 21 nt, Human
uguccccucuugccccaaccc

SEQ ID NO: 3891555 - RNA, 15 nt, Human
uguccccugacaggg

SEQ ID NO: 3891556 - RNA, 16 nt, Human
uguccccuucucucau

SEQ ID NO: 3891557 - RNA, 21 nt, Human
uguccccuuggcagguccugg

SEQ ID NO: 3891558 - RNA, 21 nt, Human
ugucccgggguccuguggcag

SEQ ID NO: 3891559 - RNA, 22 nt, Human
ugucccuaauuuaacccagcuc

SEQ ID NO: 3891560 - RNA, 22 nt, Human
ugucccuaccgagucucuucuc

SEQ ID NO: 3891561 - RNA, 14 nt, Human
ugucccucccaccu

SEQ ID NO: 3891562 - RNA, 15 nt, Human
ugucccucccaccuc

SEQ ID NO: 3891563 - RNA, 16 nt, Human
ugucccucccaccucu

SEQ ID NO: 3891564 - RNA, 22 nt, Human
ugucccugcacuugcagacucu

SEQ ID NO: 3891565 - RNA, 23 nt, Human
ugucccugcacuugcagacucua

SEQ ID NO: 3891566 - RNA, 16 nt, Human
ugucccuggcuuccuu

SEQ ID NO: 3891567 - RNA, 20 nt, Human
ugucccugggccagggucug

SEQ ID NO: 3891568 - RNA, 16 nt, Human
ugucccugucaccaag

SEQ ID NO: 3891569 - RNA, 21 nt, Human
ugucccugucaccaagcucac

SEQ ID NO: 3891570 - RNA, 13 nt, Human
ugucccuguuaga

SEQ ID NO: 3891571 - RNA, 16 nt, Human
ugucccuuaaacaaaa

SEQ ID NO: 3891572 - RNA, 18 nt, Human
ugucccuucugucccuca

SEQ ID NO: 3891573 - RNA, 12 nt, Human
ugucccuugcug

SEQ ID NO: 3891574 - RNA, 23 nt, Human
ugucccuugcuugccugcagggc

SEQ ID NO: 3891575 - RNA, 17 nt, Human
ugucccuuucuuggcca

SEQ ID NO: 3891576 - RNA, 12 nt, Human
ugucccuuuucc

SEQ ID NO: 3891577 - RNA, 14 nt, Human
uguccgagcuuuga

SEQ ID NO: 3891578 - RNA, 15 nt, Human
uguccgcuggguggu

SEQ ID NO: 3891579 - RNA, 16 nt, Human
uguccguaguaucaga

SEQ ID NO: 3891580 - RNA, 19 nt, Human
uguccuaaggaaccuuccu

SEQ ID NO: 3891581 - RNA, 14 nt, Human
uguccuaauucuuc

SEQ ID NO: 3891582 - RNA, 19 nt, Human
uguccuaauucuucugucc

SEQ ID NO: 3891583 - RNA, 14 nt, Human
uguccuacacuuga

SEQ ID NO: 3891584 - RNA, 13 nt, Human
uguccuacagaaa

SEQ ID NO: 3891585 - RNA, 15 nt, Human
uguccuacagaaaaa

SEQ ID NO: 3891586 - RNA, 18 nt, Human
uguccuacagaaaaaccu

SEQ ID NO: 3891587 - RNA, 17 nt, Human
uguccuacucuguguca

SEQ ID NO: 3891588 - RNA, 14 nt, Human
uguccuagcacaga

SEQ ID NO: 3891589 - RNA, 18 nt, Human
uguccuagcacagauggc

SEQ ID NO: 3891590 - RNA, 21 nt, Human
uguccuagcacagauggccag

SEQ ID NO: 3891591 - RNA, 20 nt, Human
uguccuaucuaucuuccaaa

SEQ ID NO: 3891592 - RNA, 20 nt, Human
uguccuaucuccagcggccc

SEQ ID NO: 3891593 - RNA, 14 nt, Human
uguccuaugcaaua

SEQ ID NO: 3891594 - RNA, 15 nt, Human
uguccuaugcaauaa

SEQ ID NO: 3891595 - RNA, 22 nt, Human
uguccuaugggagucaagugug

SEQ ID NO: 3891596 - RNA, 15 nt, Human
uguccuauuauauuc

SEQ ID NO: 3891597 - RNA, 16 nt, Human
uguccucacugcccca

SEQ ID NO: 3891598 - RNA, 19 nt, Human
uguccucacugcucccuga

SEQ ID NO: 3891599 - RNA, 14 nt, Human
uguccucagcagcu

SEQ ID NO: 3891600 - RNA, 21 nt, Human
uguccucagccccgcguggaa

SEQ ID NO: 3891601 - RNA, 12 nt, Human
uguccucagccu

SEQ ID NO: 3891602 - RNA, 14 nt, Human
uguccucagcuucu

SEQ ID NO: 3891603 - RNA, 20 nt, Human
uguccucaguccauuuauau

SEQ ID NO: 3891604 - RNA, 17 nt, Human
uguccuccagaagccuc

SEQ ID NO: 3891605 - RNA, 23 nt, Human
uguccuccagaagccucuggcua

SEQ ID NO: 3891606 - RNA, 18 nt, Human
uguccucccauccccugg

SEQ ID NO: 3891607 - RNA, 22 nt, Human
uguccucccauccccuggacug

SEQ ID NO: 3891608 - RNA, 17 nt, Human
uguccuccccucaagga

SEQ ID NO: 3891609 - RNA, 13 nt, Human
uguccucccucca

SEQ ID NO: 3891610 - RNA, 10 nt, Human
uguccuccuc

SEQ ID NO: 3891611 - RNA, 16 nt, Human
uguccucuuucagaaa

SEQ ID NO: 3891612 - RNA, 23 nt, Human
uguccucuuucagaaaacagaaa

SEQ ID NO: 3891613 - RNA, 14 nt, Human
uguccucuuucagc

SEQ ID NO: 3891614 - RNA, 19 nt, Human
uguccucuuucagcuccug

SEQ ID NO: 3891615 - RNA, 21 nt, Human
uguccucuuucagcuccugac

SEQ ID NO: 3891616 - RNA, 14 nt, Human
uguccugaccaccc

SEQ ID NO: 3891617 - RNA, 16 nt, Human
uguccugagcucagcg

SEQ ID NO: 3891618 - RNA, 15 nt, Human
uguccugaugcuuuu

SEQ ID NO: 3891619 - RNA, 18 nt, Human
uguccugaugcuuuuguc

SEQ ID NO: 3891620 - RNA, 20 nt, Human
uguccugauggucagcuccc

SEQ ID NO: 3891621 - RNA, 18 nt, Human
uguccugcagcaaacacu

SEQ ID NO: 3891622 - RNA, 24 nt, Human
uguccugccacccagccccagcca

SEQ ID NO: 3891623 - RNA, 19 nt, Human
uguccugccugucugaagc

SEQ ID NO: 3891624 - RNA, 16 nt, Human
uguccugccugucugc

SEQ ID NO: 3891625 - RNA, 17 nt, Human
uguccugccugucugcc

SEQ ID NO: 3891626 - RNA, 19 nt, Human
uguccugccugucugcccc

SEQ ID NO: 3891627 - RNA, 16 nt, Human
uguccugccuguggcc

SEQ ID NO: 3891628 - RNA, 14 nt, Human
uguccugcuccaca

SEQ ID NO: 3891629 - RNA, 18 nt, Human
uguccugcuccacagugu

SEQ ID NO: 3891630 - RNA, 12 nt, Human
uguccugcuggu

SEQ ID NO: 3891631 - RNA, 14 nt, Human
uguccugggccugc

SEQ ID NO: 3891632 - RNA, 15 nt, Human
uguccugggccugca

SEQ ID NO: 3891633 - RNA, 16 nt, Human
uguccugggcgcccug

SEQ ID NO: 3891634 - RNA, 18 nt, Human
uguccugggcgcccugga

SEQ ID NO: 3891635 - RNA, 13 nt, Human
uguccugggcugg

SEQ ID NO: 3891636 - RNA, 13 nt, Human
uguccugguguca

SEQ ID NO: 3891637 - RNA, 23 nt, Human
uguccuguaaacacucagcuguu

SEQ ID NO: 3891638 - RNA, 20 nt, Human
uguccuguagagguuuuguu

SEQ ID NO: 3891639 - RNA, 15 nt, Human
uguccugugagaugu

SEQ ID NO: 3891640 - RNA, 23 nt, Human
uguccugugagauguguaucagu

SEQ ID NO: 3891641 - RNA, 19 nt, Human
uguccugugucaguuuaug

SEQ ID NO: 3891642 - RNA, 19 nt, Human
uguccuguugauuaauuuc

SEQ ID NO: 3891643 - RNA, 11 nt, Human
uguccuuagca

SEQ ID NO: 3891644 - RNA, 22 nt, Human
ugugaaggauuauggaaaaaua

SEQ ID NO: 3891645 - RNA, 15 nt, Human
ugugaaggcagagaa

SEQ ID NO: 3891646 - RNA, 23 nt, Human
ugugaaggugauuuaagggccca

SEQ ID NO: 3891647 - RNA, 13 nt, Human
ugugaaguuagaa

SEQ ID NO: 3891648 - RNA, 21 nt, Human
ugugaauaaagagggugggug

SEQ ID NO: 3891649 - RNA, 21 nt, Human
ugugaauaccugcucacguca

SEQ ID NO: 3891650 - RNA, 21 nt, Human
ugugaauacugcuugaauaaa

SEQ ID NO: 3891651 - RNA, 21 nt, Human
ugugaauauuuccauauggau

SEQ ID NO: 3891652 - RNA, 23 nt, Human
ugugaauauuuccauauggauuu

SEQ ID NO: 3891653 - RNA, 14 nt, Human
ugugaaugaacacu

SEQ ID NO: 3891654 - RNA, 14 nt, Human
ugugaaugcagguu

SEQ ID NO: 3891655 - RNA, 17 nt, Human
ugugaaugccacugccu

SEQ ID NO: 3891656 - RNA, 15 nt, Human
ugugaauggauugga

SEQ ID NO: 3891657 - RNA, 22 nt, Human
ugugaauggauuggauuauuua

SEQ ID NO: 3891658 - RNA, 15 nt, Human
ugugaaugugggcac

SEQ ID NO: 3891659 - RNA, 16 nt, Human
ugugaauuacuaacuu

SEQ ID NO: 3891660 - RNA, 19 nt, Human
ugugaauuaggcuguaacu

SEQ ID NO: 3891661 - RNA, 23 nt, Human
ugugaauuaggcuguaacuacuu

SEQ ID NO: 3891662 - RNA, 15 nt, Human
ugugaauuauugaca

SEQ ID NO: 3891663 - RNA, 15 nt, Human
ugugaauugacuacc

SEQ ID NO: 3891664 - RNA, 22 nt, Human
ugugaauuuucuaaaagcuuuc

SEQ ID NO: 3891665 - RNA, 14 nt, Human
ugugaauuuuuaag

SEQ ID NO: 3891666 - RNA, 15 nt, Human
ugugaauuuuuauug

SEQ ID NO: 3891667 - RNA, 17 nt, Human
ugugaauuuuuauuguu

SEQ ID NO: 3891668 - RNA, 12 nt, Human
ugugacaaaaaa

SEQ ID NO: 3891669 - RNA, 16 nt, Human
ugugacaaaaaauuaa

SEQ ID NO: 3891670 - RNA, 19 nt, Human
ugugacaacugucuaacuu

SEQ ID NO: 3891671 - RNA, 22 nt, Human
ugugacaauaauauuguuguau

SEQ ID NO: 3891672 - RNA, 15 nt, Human
ugugacaauucuguu

SEQ ID NO: 3891673 - RNA, 19 nt, Human
ugugacacacuacaccaca

SEQ ID NO: 3891674 - RNA, 21 nt, Human
ugugacacacuacaccacaca

SEQ ID NO: 3891675 - RNA, 23 nt, Human
ugugacacacuacaccacacaca

SEQ ID NO: 3891676 - RNA, 22 nt, Human
ugugacacauaugcaccuugug

SEQ ID NO: 3891677 - RNA, 23 nt, Human
ugugacagcucuuuuugugaagu

SEQ ID NO: 3891678 - RNA, 13 nt, Human
ugugacaguguug

SEQ ID NO: 3891679 - RNA, 23 nt, Human
ugugacaucucuauuccccaccc

SEQ ID NO: 3891680 - RNA, 17 nt, Human
ugugacaugcgggcugg

SEQ ID NO: 3891681 - RNA, 14 nt, Human
ugugacauuccuuc

SEQ ID NO: 3891682 - RNA, 19 nt, Human
ugugacauuugucauuuuc

SEQ ID NO: 3891683 - RNA, 20 nt, Human
ugugacauuugucauuuuca

SEQ ID NO: 3891684 - RNA, 18 nt, Human
ugugacauuuuacauuaa

SEQ ID NO: 3891685 - RNA, 17 nt, Human
ugugaccaaaaguuaca

SEQ ID NO: 3891686 - RNA, 15 nt, Human
ugugaccaacugugu

SEQ ID NO: 3891687 - RNA, 16 nt, Human
ugugaccaacuguguu

SEQ ID NO: 3891688 - RNA, 15 nt, Human
ugugaccaaguauaa

SEQ ID NO: 3891689 - RNA, 19 nt, Human
ugugaccaaguauaaacuu

SEQ ID NO: 3891690 - RNA, 13 nt, Human
ugugaccaaguua

SEQ ID NO: 3891691 - RNA, 15 nt, Human
ugugaccaaugucuu

SEQ ID NO: 3891692 - RNA, 16 nt, Human
ugugaccaaugucuug

SEQ ID NO: 3891693 - RNA, 17 nt, Human
ugugaccagcacugucu

SEQ ID NO: 3891694 - RNA, 19 nt, Human
ugugaccagucugacccuu

SEQ ID NO: 3891695 - RNA, 14 nt, Human
ugugacccacuucu

SEQ ID NO: 3891696 - RNA, 12 nt, Human
ugugaccccucc

SEQ ID NO: 3891697 - RNA, 18 nt, Human
ugugaccccuccuggggc

SEQ ID NO: 3891698 - RNA, 17 nt, Human
ugugacccucaauucau

SEQ ID NO: 3891699 - RNA, 14 nt, Human
ugugacccucugaa

SEQ ID NO: 3891700 - RNA, 12 nt, Human
ugugaccuagca

SEQ ID NO: 3891701 - RNA, 13 nt, Human
ugugaccucacgu

SEQ ID NO: 3891702 - RNA, 14 nt, Human
ugugaccucaggca

SEQ ID NO: 3891703 - RNA, 21 nt, Human
ugugaccucaggcacuagccu

SEQ ID NO: 3891704 - RNA, 14 nt, Human
ugugaccugaaguu

SEQ ID NO: 3891705 - RNA, 16 nt, Human
ugugaccugaaguuca

SEQ ID NO: 3891706 - RNA, 13 nt, Human
ugugaccugaggg

SEQ ID NO: 3891707 - RNA, 15 nt, Human
ugugaccugcugagc

SEQ ID NO: 3891708 - RNA, 18 nt, Human
ugugaccugcugagcucu

SEQ ID NO: 3891709 - RNA, 18 nt, Human
ugugaccuuaguguuucu

SEQ ID NO: 3891710 - RNA, 19 nt, Human
ugugaccuuaguguuucug

SEQ ID NO: 3891711 - RNA, 19 nt, Human
ugugaccuugagaagauuc

SEQ ID NO: 3891712 - RNA, 15 nt, Human
ugugacuaauuguau

SEQ ID NO: 3891713 - RNA, 17 nt, Human
ugugacuaauuguauaa

SEQ ID NO: 3891714 - RNA, 14 nt, Human
ugugacuagugcug

SEQ ID NO: 3891715 - RNA, 16 nt, Human
ugugacuagugcugaa

SEQ ID NO: 3891716 - RNA, 22 nt, Human
ugugacuauauagagauguuuu

SEQ ID NO: 3891717 - RNA, 15 nt, Human
ugugacucuggcuug

SEQ ID NO: 3891718 - RNA, 20 nt, Human
ugugacucuggcuuggccua

SEQ ID NO: 3891719 - RNA, 15 nt, Human
ugugacucuuuccaa

SEQ ID NO: 3891720 - RNA, 23 nt, Human
ugugacucuuuuuagggccaggc

SEQ ID NO: 3891721 - RNA, 18 nt, Human
ugugacuggcuaaagcuc

SEQ ID NO: 3891722 - RNA, 13 nt, Human
ugugacuggucag

SEQ ID NO: 3891723 - RNA, 18 nt, Human
ugugacuucagcucuguu

SEQ ID NO: 3891724 - RNA, 18 nt, Human
ugugacuuccuuggaaau

SEQ ID NO: 3891725 - RNA, 23 nt, Human
ugugacuuuugcuuuaauuccau

SEQ ID NO: 3891726 - RNA, 18 nt, Human
ugugagaaacaucucaau

SEQ ID NO: 3891727 - RNA, 21 nt, Human
ugugagaagugaaugcuggga

SEQ ID NO: 3891728 - RNA, 23 nt, Human
ugugagaagugaaugcugggacu

SEQ ID NO: 3891729 - RNA, 24 nt, Human
ugugagaagugaaugcugggacuc

SEQ ID NO: 3891730 - RNA, 19 nt, Human
ugugagacucgagaacuuu

SEQ ID NO: 3891731 - RNA, 13 nt, Human
ugugagagaaagu

SEQ ID NO: 3891732 - RNA, 16 nt, Human
ugugagagguuugacu

SEQ ID NO: 3891733 - RNA, 14 nt, Human
ugugagauguaauu

SEQ ID NO: 3891734 - RNA, 19 nt, Human
ugugagcaagcauuuaugu

SEQ ID NO: 3891735 - RNA, 17 nt, Human
ugugagccaccacgccc

SEQ ID NO: 3891736 - RNA, 14 nt, Human
ugugagccagucua

SEQ ID NO: 3891737 - RNA, 15 nt, Human
ugugagcccagcugg

SEQ ID NO: 3891738 - RNA, 14 nt, Human
ugugagccccuggu

SEQ ID NO: 3891739 - RNA, 14 nt, Human
ugugagccuuggcu

SEQ ID NO: 3891740 - RNA, 23 nt, Human
ugugagcucccaggugcagccag

SEQ ID NO: 3891741 - RNA, 20 nt, Human
ugugagcugcaccagguaga

SEQ ID NO: 3891742 - RNA, 16 nt, Human
ugugagcugcugccau

SEQ ID NO: 3891743 - RNA, 22 nt, Human
ugugaggaaagucauuggcuuu

SEQ ID NO: 3891744 - RNA, 11 nt, Human
ugugaggaagc

SEQ ID NO: 3891745 - RNA, 12 nt, Human
ugugaggaagcc

SEQ ID NO: 3891746 - RNA, 13 nt, Human
ugugaggaagccg

SEQ ID NO: 3891747 - RNA, 18 nt, Human
ugugaggaagccgcuggg

SEQ ID NO: 3891748 - RNA, 18 nt, Human
ugugaggagcugcuggcu

SEQ ID NO: 3891749 - RNA, 12 nt, Human
ugugaggcagga

SEQ ID NO: 3891750 - RNA, 14 nt, Human
ugugaggcaggaga

SEQ ID NO: 3891751 - RNA, 23 nt, Human
ugugaggcccaugguugagaaau

SEQ ID NO: 3891752 - RNA, 14 nt, Human
ugugaggccccugg

SEQ ID NO: 3891753 - RNA, 14 nt, Human
ugugagggaaagag

SEQ ID NO: 3891754 - RNA, 18 nt, Human
ugugaggggcucucucau

SEQ ID NO: 3891755 - RNA, 15 nt, Human
ugugagggugcugac

SEQ ID NO: 3891756 - RNA, 21 nt, Human
ugugaggugcagagugcccag

SEQ ID NO: 3891757 - RNA, 20 nt, Human
ugugagguuucccaauggug

SEQ ID NO: 3891758 - RNA, 12 nt, Human
ugugaguaaaua

SEQ ID NO: 3891759 - RNA, 14 nt, Human
ugugaguaaauauu

SEQ ID NO: 3891760 - RNA, 15 nt, Human
ugugaguaaauauug

SEQ ID NO: 3891761 - RNA, 22 nt, Human
ugugaguaaaucagauguugaa

SEQ ID NO: 3891762 - RNA, 15 nt, Human
ugugaguaagagcug

SEQ ID NO: 3891763 - RNA, 16 nt, Human
ugugaguaaucugaga

SEQ ID NO: 3891764 - RNA, 19 nt, Human
ugugaguaaucugagaaac

SEQ ID NO: 3891765 - RNA, 18 nt, Human
ugugaguacuacaguccu

SEQ ID NO: 3891766 - RNA, 23 nt, Human
ugugaguacuacaguccucccau

SEQ ID NO: 3891767 - RNA, 21 nt, Human
ugugagucaauacauagugcu

SEQ ID NO: 3891768 - RNA, 21 nt, Human
ugugagucuuugguucuaagg

SEQ ID NO: 3891769 - RNA, 19 nt, Human
ugugagugccuuuugcaga

SEQ ID NO: 3891770 - RNA, 20 nt, Human
ugugagugugaauauaaaug

SEQ ID NO: 3891771 - RNA, 12 nt, Human
ugugagugugac

SEQ ID NO: 3891772 - RNA, 19 nt, Human
ugugaguguguguuugugc

SEQ ID NO: 3891773 - RNA, 17 nt, Human
ugugaguguuuggggga

SEQ ID NO: 3891774 - RNA, 17 nt, Human
ugugaguguuuuuaucu

SEQ ID NO: 3891775 - RNA, 16 nt, Human
ugugaguucucccugu

SEQ ID NO: 3891776 - RNA, 21 nt, Human
ugugaguuuaguaaggcugug

SEQ ID NO: 3891777 - RNA, 18 nt, Human
ugugauaaggaucagaac

SEQ ID NO: 3891778 - RNA, 22 nt, Human
ugugauacccauagcuuccaug

SEQ ID NO: 3891779 - RNA, 13 nt, Human
ugugauauaagug

SEQ ID NO: 3891780 - RNA, 16 nt, Human
ugugauauauaagugu

SEQ ID NO: 3891781 - RNA, 17 nt, Human
ugugauauauguauuaa

SEQ ID NO: 3891782 - RNA, 14 nt, Human
ugugauauucuaag

SEQ ID NO: 3891783 - RNA, 13 nt, Human
ugugauauuucag

SEQ ID NO: 3891784 - RNA, 20 nt, Human
ugugauauuucagaaauaca

SEQ ID NO: 3891785 - RNA, 17 nt, Human
ugugaucacgccuggcu

SEQ ID NO: 3891786 - RNA, 18 nt, Human
ugugaucacgccuggcua

SEQ ID NO: 3891787 - RNA, 21 nt, Human
ugugauccuuuuauguuauuu

SEQ ID NO: 3891788 - RNA, 18 nt, Human
ugugaucugggucucuaa

SEQ ID NO: 3891789 - RNA, 15 nt, Human
uuaauuuuggaauuu

SEQ ID NO: 3891790 - RNA, 13 nt, Human
uuaauuuuguauu

SEQ ID NO: 3891791 - RNA, 15 nt, Human
uuaauuuuguauuuu

SEQ ID NO: 3891792 - RNA, 23 nt, Human
uuaauuuugucugccccaaguuu

SEQ ID NO: 3891793 - RNA, 19 nt, Human
uuaauuuuuacauggagaa

SEQ ID NO: 3891794 - RNA, 13 nt, Human
uuaauuuuuccua

SEQ ID NO: 3891795 - RNA, 15 nt, Human
uuaauuuuugauacu

SEQ ID NO: 3891796 - RNA, 17 nt, Human
uuaauuuuuuuaaccaa

SEQ ID NO: 3891797 - RNA, 23 nt, Human
uuaauuuuuuuaaccaaagguga

SEQ ID NO: 3891798 - RNA, 19 nt, Human
uuaauuuuuuugagacaga

SEQ ID NO: 3891799 - RNA, 14 nt, Human
uuacaaaaacacuu

SEQ ID NO: 3891800 - RNA, 18 nt, Human
uuacaaaaauauaaaaua

SEQ ID NO: 3891801 - RNA, 17 nt, Human
uuacaaaacuacaugag

SEQ ID NO: 3891802 - RNA, 13 nt, Human
uuacaaaagaugu

SEQ ID NO: 3891803 - RNA, 13 nt, Human
uuacaaacugaag

SEQ ID NO: 3891804 - RNA, 13 nt, Human
uuacaaacugcaa

SEQ ID NO: 3891805 - RNA, 21 nt, Human
uuacaaacugcaauagagacu

SEQ ID NO: 3891806 - RNA, 18 nt, Human
uuacaaagcccuuuuaua

SEQ ID NO: 3891807 - RNA, 16 nt, Human
uuacaaaguguguauu

SEQ ID NO: 3891808 - RNA, 22 nt, Human
uuacaaaguguguauuaaaaaa

SEQ ID NO: 3891809 - RNA, 21 nt, Human
uuacaaaguuaaaauuguuau

SEQ ID NO: 3891810 - RNA, 21 nt, Human
uuacaaaugaaaaauuccacu

SEQ ID NO: 3891811 - RNA, 14 nt, Human
uuacaaaugauugc

SEQ ID NO: 3891812 - RNA, 19 nt, Human
uuacaaaugauugcuuuua

SEQ ID NO: 3891813 - RNA, 23 nt, Human
uuacaaaugauugcuuuuaaaau

SEQ ID NO: 3891814 - RNA, 11 nt, Human
uuacaaauguu

SEQ ID NO: 3891815 - RNA, 23 nt, Human
uuacaaauuauaauguauucaua

SEQ ID NO: 3891816 - RNA, 24 nt, Human
uuacaaauuauaauguauucauau

SEQ ID NO: 3891817 - RNA, 16 nt, Human
uuacaacagauuugug

SEQ ID NO: 3891818 - RNA, 19 nt, Human
uuacaacagauuugugaac

SEQ ID NO: 3891819 - RNA, 16 nt, Human
uuacaacggagucaaa

SEQ ID NO: 3891820 - RNA, 20 nt, Human
uuacaagaaguuuauucuca

SEQ ID NO: 3891821 - RNA, 17 nt, Human
uuacaagcccccccuuc

SEQ ID NO: 3891822 - RNA, 19 nt, Human
uuacaagcccccccuucca

SEQ ID NO: 3891823 - RNA, 20 nt, Human
uuacaagcccccccuuccac

SEQ ID NO: 3891824 - RNA, 18 nt, Human
uuacaagggaagauuuau

SEQ ID NO: 3891825 - RNA, 20 nt, Human
uuacaaguaacaaaaauaaa

SEQ ID NO: 3891826 - RNA, 16 nt, Human
uuacaaguguauauca

SEQ ID NO: 3891827 - RNA, 15 nt, Human
uuacaaguuauagua

SEQ ID NO: 3891828 - RNA, 19 nt, Human
uuacaaguuauaguacuag

SEQ ID NO: 3891829 - RNA, 23 nt, Human
uuacaauaaaaucuugaaaaugc

SEQ ID NO: 3891830 - RNA, 20 nt, Human
uuacaauaggugcuuauucu

SEQ ID NO: 3891831 - RNA, 23 nt, Human
uuacaaucccaccuuuccucaaa

SEQ ID NO: 3891832 - RNA, 14 nt, Human
uuacaauggaaaca

SEQ ID NO: 3891833 - RNA, 15 nt, Human
uuacaauguaacuuu

SEQ ID NO: 3891834 - RNA, 13 nt, Human
uuacaauguaauu

SEQ ID NO: 3891835 - RNA, 17 nt, Human
uuacaauguaauuauuu

SEQ ID NO: 3891836 - RNA, 19 nt, Human
uuacaauguaauuauuuau

SEQ ID NO: 3891837 - RNA, 21 nt, Human
uuacaauguaauuauuuaugu

SEQ ID NO: 3891838 - RNA, 14 nt, Human
uuacaauguauuaa

SEQ ID NO: 3891839 - RNA, 16 nt, Human
uuacaauguucauccc

SEQ ID NO: 3891840 - RNA, 19 nt, Human
uuacaauucccugcugucg

SEQ ID NO: 3891841 - RNA, 13 nt, Human
uuacaauugaaau

SEQ ID NO: 3891842 - RNA, 15 nt, Human
uuacaauugaaauga

SEQ ID NO: 3891843 - RNA, 17 nt, Human
uuacaauugaaaugacu

SEQ ID NO: 3891844 - RNA, 18 nt, Human
uuacaauuuacaaagugu

SEQ ID NO: 3891845 - RNA, 19 nt, Human
uuacaauuuguucauccua

SEQ ID NO: 3891846 - RNA, 13 nt, Human
uuacaauuuuauc

SEQ ID NO: 3891847 - RNA, 21 nt, Human
uuacaauuuuuuuaauuuugu

SEQ ID NO: 3891848 - RNA, 18 nt, Human
uuacacaaaacaaaugcc

SEQ ID NO: 3891849 - RNA, 21 nt, Human
uuacacaaaacaaaugccaca

SEQ ID NO: 3891850 - RNA, 16 nt, Human
uuacacaauucuuacc

SEQ ID NO: 3891851 - RNA, 16 nt, Human
uuacacacacagaugu

SEQ ID NO: 3891852 - RNA, 16 nt, Human
uuacacagaaacacug

SEQ ID NO: 3891853 - RNA, 18 nt, Human
uuacacagaaacacugcc

SEQ ID NO: 3891854 - RNA, 20 nt, Human
uuacacagaaacacugccuu

SEQ ID NO: 3891855 - RNA, 20 nt, Human
uuacacagaaaugcugcugg

SEQ ID NO: 3891856 - RNA, 17 nt, Human
uuacacauuaagcaaau

SEQ ID NO: 3891857 - RNA, 17 nt, Human
uuacacauuuuucagau

SEQ ID NO: 3891858 - RNA, 22 nt, Human
uuacaccucguuagggaagaga

SEQ ID NO: 3891859 - RNA, 17 nt, Human
uuacacugccuguauac

SEQ ID NO: 3891860 - RNA, 19 nt, Human
uuacacugccuguauacuu

SEQ ID NO: 3891861 - RNA, 22 nt, Human
uuacacuggcaaugguaguuuc

SEQ ID NO: 3891862 - RNA, 13 nt, Human
uuacacugggaga

SEQ ID NO: 3891863 - RNA, 21 nt, Human
uuacacuguaccauauagcaa

SEQ ID NO: 3891864 - RNA, 13 nt, Human
uuacacuguuaga

SEQ ID NO: 3891865 - RNA, 22 nt, Human
uuacacuguuauuuucagcaug

SEQ ID NO: 3891866 - RNA, 13 nt, Human
uuacacuuuaugc

SEQ ID NO: 3891867 - RNA, 18 nt, Human
uuacagaaaaagacuuua

SEQ ID NO: 3891868 - RNA, 14 nt, Human
uuacagaaaguggu

SEQ ID NO: 3891869 - RNA, 21 nt, Human
uuacagaaaguggugcucagu

SEQ ID NO: 3891870 - RNA, 16 nt, Human
uuacagaaauacuaua

SEQ ID NO: 3891871 - RNA, 15 nt, Human
uuacagaaauggacu

SEQ ID NO: 3891872 - RNA, 19 nt, Human
uuacagaaauggacuggag

SEQ ID NO: 3891873 - RNA, 17 nt, Human
uuacagagaggagaaac

SEQ ID NO: 3891874 - RNA, 18 nt, Human
uuacagagaggagaaaca

SEQ ID NO: 3891875 - RNA, 22 nt, Human
uuacagagaggagaaacacauc

SEQ ID NO: 3891876 - RNA, 16 nt, Human
uuacagagaugucucu

SEQ ID NO: 3891877 - RNA, 15 nt, Human
uuacagaggacagua

SEQ ID NO: 3891878 - RNA, 20 nt, Human
uuacagaugaauguauuuau

SEQ ID NO: 3891879 - RNA, 15 nt, Human
uuacagcaaauccuu

SEQ ID NO: 3891880 - RNA, 20 nt, Human
uuacagcaaguagauaaaua

SEQ ID NO: 3891881 - RNA, 23 nt, Human
uuacagccaagugccaaaugcuc

SEQ ID NO: 3891882 - RNA, 14 nt, Human
uuacagccucugac

SEQ ID NO: 3891883 - RNA, 20 nt, Human
uuacagccugggcaauaaag

SEQ ID NO: 3891884 - RNA, 17 nt, Human
uuacagcucugacuuua

SEQ ID NO: 3891885 - RNA, 15 nt, Human
uuacagcuuuacaca

SEQ ID NO: 3891886 - RNA, 22 nt, Human
uuacagcuuuacacacacagau

SEQ ID NO: 3891887 - RNA, 15 nt, Human
uuacaggaacuucau

SEQ ID NO: 3891888 - RNA, 18 nt, Human
uuacaggaaguacuggag

SEQ ID NO: 3891889 - RNA, 17 nt, Human
uuacaggcacaaaauga

SEQ ID NO: 3891890 - RNA, 18 nt, Human
uuacaggcaccgagaaug

SEQ ID NO: 3891891 - RNA, 16 nt, Human
uuacaggcacuaaagu

SEQ ID NO: 3891892 - RNA, 20 nt, Human
uuacaggcaugagccacugc

SEQ ID NO: 3891893 - RNA, 11 nt, Human
uuacaggcccu

SEQ ID NO: 3891894 - RNA, 14 nt, Human
uuacagggagccuc

SEQ ID NO: 3891895 - RNA, 16 nt, Human
uuacagggagccuccu

SEQ ID NO: 3891896 - RNA, 18 nt, Human
uuacagguggacacacaa

SEQ ID NO: 3891897 - RNA, 14 nt, Human
uuacaggugugaac

SEQ ID NO: 3891898 - RNA, 14 nt, Human
uuacaguaauguca

SEQ ID NO: 3891899 - RNA, 17 nt, Human
uuacaguaaugucauaa

SEQ ID NO: 3891900 - RNA, 17 nt, Human
uuacaguaggagcccag

SEQ ID NO: 3891901 - RNA, 13 nt, Human
uuacaguauaauu

SEQ ID NO: 3891902 - RNA, 17 nt, Human
uuacaguauaauuaaca

SEQ ID NO: 3891903 - RNA, 20 nt, Human
uuacagucucagcaacaaca

SEQ ID NO: 3891904 - RNA, 19 nt, Human
uuacagugaaaauguaagc

SEQ ID NO: 3891905 - RNA, 17 nt, Human
uuacaguggggaaugaa

SEQ ID NO: 3891906 - RNA, 14 nt, Human
uuacaguuacuuuu

SEQ ID NO: 3891907 - RNA, 14 nt, Human
uuacaguucugugg

SEQ ID NO: 3891908 - RNA, 18 nt, Human
uuacaguuucaaaaacug

SEQ ID NO: 3891909 - RNA, 18 nt, Human
uuacauaaacaucagguu

SEQ ID NO: 3891910 - RNA, 14 nt, Human
uuacauacugcugu

SEQ ID NO: 3891911 - RNA, 21 nt, Human
uuacauacuuuaucaaugugu

SEQ ID NO: 3891912 - RNA, 24 nt, Human
uuacauacuuuaucaaugugucuu

SEQ ID NO: 3891913 - RNA, 20 nt, Human
uuacauaguguaggcuuuac

SEQ ID NO: 3891914 - RNA, 19 nt, Human
uuacauauguauacaugug

SEQ ID NO: 3891915 - RNA, 18 nt, Human
uuacaucaaggcuucaaa

SEQ ID NO: 3891916 - RNA, 21 nt, Human
uuacaucuguuuuaaauuuau

SEQ ID NO: 3891917 - RNA, 14 nt, Human
uuacaugaaguauu

SEQ ID NO: 3891918 - RNA, 12 nt, Human
uuacaugcauac

SEQ ID NO: 3891919 - RNA, 18 nt, Human
uuacaugcauacuucaaa

SEQ ID NO: 3891920 - RNA, 21 nt, Human
uuacaugcauacuucaaaagu

SEQ ID NO: 3891921 - RNA, 14 nt, Human
uuacaugcuuauuc

SEQ ID NO: 3891922 - RNA, 23 nt, Human
uuacauggagaaaaccaaaauga

SEQ ID NO: 3891923 - RNA, 12 nt, Human
uuacauggcucu

SEQ ID NO: 3891924 - RNA, 22 nt, Human
uuacauggcuggagcuagaauu

SEQ ID NO: 3891925 - RNA, 23 nt, Human
uuacauggcuggagcuagaauuu

SEQ ID NO: 3891926 - RNA, 16 nt, Human
uuacauguaauuugau

SEQ ID NO: 3891927 - RNA, 20 nt, Human
uuacauguaauuugaugagg

SEQ ID NO: 3891928 - RNA, 17 nt, Human
uuacauguauuauuuca

SEQ ID NO: 3891929 - RNA, 18 nt, Human
uuacauguuuucuuugcu

SEQ ID NO: 3891930 - RNA, 21 nt, Human
uuacauuccuugauaauguug

SEQ ID NO: 3891931 - RNA, 13 nt, Human
uuacauucugaau

SEQ ID NO: 3891932 - RNA, 23 nt, Human
uuacauugccguggcaucuuaaa

SEQ ID NO: 3891933 - RNA, 17 nt, Human
uucagaauuaaacuuuu

SEQ ID NO: 3891934 - RNA, 13 nt, Human
uucagaauuuagu

SEQ ID NO: 3891935 - RNA, 20 nt, Human
uucagacaagcaacagguuu

SEQ ID NO: 3891936 - RNA, 14 nt, Human
uucagacagcugcc

SEQ ID NO: 3891937 - RNA, 15 nt, Human
uucagacagcugccu

SEQ ID NO: 3891938 - RNA, 13 nt, Human
uucagacucagac

SEQ ID NO: 3891939 - RNA, 19 nt, Human
uucagacuuugcuucccau

SEQ ID NO: 3891940 - RNA, 21 nt, Human
uucagagacagcugauacuuc

SEQ ID NO: 3891941 - RNA, 15 nt, Human
uucagagacucaggg

SEQ ID NO: 3891942 - RNA, 22 nt, Human
uucagagagcagugcuuuuggc

SEQ ID NO: 3891943 - RNA, 13 nt, Human
uucagagagcugg

SEQ ID NO: 3891944 - RNA, 20 nt, Human
uucagagagggcagaggggu

SEQ ID NO: 3891945 - RNA, 22 nt, Human
uucagagccuccuuucuggcuu

SEQ ID NO: 3891946 - RNA, 14 nt, Human
uucagagcugcccu

SEQ ID NO: 3891947 - RNA, 15 nt, Human
uucagagcugcccuc

SEQ ID NO: 3891948 - RNA, 17 nt, Human
uucagagcugcccucuc

SEQ ID NO: 3891949 - RNA, 18 nt, Human
uucagagcugcccucucc

SEQ ID NO: 3891950 - RNA, 19 nt, Human
uucagagcugcccucuccu

SEQ ID NO: 3891951 - RNA, 23 nt, Human
uucagagcugcccucuccugggc

SEQ ID NO: 3891952 - RNA, 22 nt, Human
uucagaggauaaauaucaaugg

SEQ ID NO: 3891953 - RNA, 12 nt, Human
uucagaggcuca

SEQ ID NO: 3891954 - RNA, 23 nt, Human
uucagaguucuuuuugaaguauu

SEQ ID NO: 3891955 - RNA, 20 nt, Human
uucagauacuggauuguacu

SEQ ID NO: 3891956 - RNA, 15 nt, Human
uucagauauauauca

SEQ ID NO: 3891957 - RNA, 18 nt, Human
uucagauaugauucaaau

SEQ ID NO: 3891958 - RNA, 19 nt, Human
uucagauaugauucaaaug

SEQ ID NO: 3891959 - RNA, 18 nt, Human
uucagaucacugaauuua

SEQ ID NO: 3891960 - RNA, 13 nt, Human
uucagaucuuaau

SEQ ID NO: 3891961 - RNA, 21 nt, Human
uucagaucuuaauauaaauuc

SEQ ID NO: 3891962 - RNA, 13 nt, Human
uucagaugccacu

SEQ ID NO: 3891963 - RNA, 13 nt, Human
uucagauguaaug

SEQ ID NO: 3891964 - RNA, 18 nt, Human
uucagauguaauguuuuc

SEQ ID NO: 3891965 - RNA, 14 nt, Human
uucagaugucuucu

SEQ ID NO: 3891966 - RNA, 17 nt, Human
uucagaugucuucugcc

SEQ ID NO: 3891967 - RNA, 17 nt, Human
uucagauguggagccag

SEQ ID NO: 3891968 - RNA, 18 nt, Human
uucagauguggagccagg

SEQ ID NO: 3891969 - RNA, 21 nt, Human
uucagauucccagagcaaaau

SEQ ID NO: 3891970 - RNA, 22 nt, Human
uucagauucccagagcaaaaua

SEQ ID NO: 3891971 - RNA, 14 nt, Human
uucagauugcuuug

SEQ ID NO: 3891972 - RNA, 22 nt, Human
uucagauuguggaauguuggau

SEQ ID NO: 3891973 - RNA, 15 nt, Human
uucagauuugcacaa

SEQ ID NO: 3891974 - RNA, 15 nt, Human
uucagcaaacuuguu

SEQ ID NO: 3891975 - RNA, 14 nt, Human
uucagcaagagaga

SEQ ID NO: 3891976 - RNA, 21 nt, Human
uucagcaauauuuaaggagau

SEQ ID NO: 3891977 - RNA, 17 nt, Human
uucagcacuagccaaac

SEQ ID NO: 3891978 - RNA, 19 nt, Human
uucagcacuugucucauuu

SEQ ID NO: 3891979 - RNA, 21 nt, Human
uucagcacuugucucauuuua

SEQ ID NO: 3891980 - RNA, 17 nt, Human
uucagcagcaaauuuuc

SEQ ID NO: 3891981 - RNA, 12 nt, Human
uucagcaggcag

SEQ ID NO: 3891982 - RNA, 17 nt, Human
uucagcaggcccaagua

SEQ ID NO: 3891983 - RNA, 19 nt, Human
uucagcauccgcaggugcu

SEQ ID NO: 3891984 - RNA, 17 nt, Human
uucagcauuaagcuguu

SEQ ID NO: 3891985 - RNA, 22 nt, Human
uucagcauuaagcuguuccugu

SEQ ID NO: 3891986 - RNA, 13 nt, Human
uucagcauucuua

SEQ ID NO: 3891987 - RNA, 10 nt, Human
uucagccaag

SEQ ID NO: 3891988 - RNA, 19 nt, Human
uucagccaagaauucuuaa

SEQ ID NO: 3891989 - RNA, 17 nt, Human
uucagccacugagggac

SEQ ID NO: 3891990 - RNA, 14 nt, Human
uucagccccuccuc

SEQ ID NO: 3891991 - RNA, 15 nt, Human
uucagccccuccucu

SEQ ID NO: 3891992 - RNA, 16 nt, Human
uucagccccuccucug

SEQ ID NO: 3891993 - RNA, 17 nt, Human
uucagccccuccucugc

SEQ ID NO: 3891994 - RNA, 23 nt, Human
uucagccccuccucugccaccuc

SEQ ID NO: 3891995 - RNA, 12 nt, Human
uucagcccucac

SEQ ID NO: 3891996 - RNA, 23 nt, Human
uucagccuaguggcuuguccuca

SEQ ID NO: 3891997 - RNA, 16 nt, Human
uucagcguuuugcaag

SEQ ID NO: 3891998 - RNA, 20 nt, Human
uucagcuaagcuaggaauga

SEQ ID NO: 3891999 - RNA, 20 nt, Human
uucagcuaggaacaaaucuu

SEQ ID NO: 3892000 - RNA, 12 nt, Human
uucagcuccagc

SEQ ID NO: 3892001 - RNA, 22 nt, Human
uucagcuccagcucaccagccc

SEQ ID NO: 3892002 - RNA, 23 nt, Human
uucagcuccagcucaccagcccc

SEQ ID NO: 3892003 - RNA, 12 nt, Human
uucagcuccuga

SEQ ID NO: 3892004 - RNA, 14 nt, Human
uucagcuccugacc

SEQ ID NO: 3892005 - RNA, 17 nt, Human
uucagcucucuguauaa

SEQ ID NO: 3892006 - RNA, 17 nt, Human
uucagcugacuuuucug

SEQ ID NO: 3892007 - RNA, 18 nt, Human
uucagcugcauacaguuu

SEQ ID NO: 3892008 - RNA, 23 nt, Human
uucagcugccaguguccugagcc

SEQ ID NO: 3892009 - RNA, 23 nt, Human
uucagcugcccccgcucaugggc

SEQ ID NO: 3892010 - RNA, 16 nt, Human
uucagcugcuucucuu

SEQ ID NO: 3892011 - RNA, 21 nt, Human
uucagcugguugagguuucaa

SEQ ID NO: 3892012 - RNA, 16 nt, Human
uucagcuguccucccu

SEQ ID NO: 3892013 - RNA, 13 nt, Human
uucagcuugggga

SEQ ID NO: 3892014 - RNA, 18 nt, Human
uucaggaaaagccucugu

SEQ ID NO: 3892015 - RNA, 20 nt, Human
uucaggaaaagccucugugu

SEQ ID NO: 3892016 - RNA, 19 nt, Human
uucaggaaaaggccugggg

SEQ ID NO: 3892017 - RNA, 13 nt, Human
uucaggaaaauug

SEQ ID NO: 3892018 - RNA, 22 nt, Human
uucaggaaccucgaguacugug

SEQ ID NO: 3892019 - RNA, 19 nt, Human
uucaggaagcucagggccu

SEQ ID NO: 3892020 - RNA, 17 nt, Human
uucaggaagggaugcag

SEQ ID NO: 3892021 - RNA, 22 nt, Human
uucaggaagggaugcaggcucc

SEQ ID NO: 3892022 - RNA, 21 nt, Human
uucaggacuuaacggcuccag

SEQ ID NO: 3892023 - RNA, 21 nt, Human
uucaggagaaccuaacaugcu

SEQ ID NO: 3892024 - RNA, 16 nt, Human
uucaggagcagccuca

SEQ ID NO: 3892025 - RNA, 18 nt, Human
uucaggagcgcaagauag

SEQ ID NO: 3892026 - RNA, 19 nt, Human
uucaggagcgcaagauaga

SEQ ID NO: 3892027 - RNA, 20 nt, Human
uucaggaggaauacugaaca

SEQ ID NO: 3892028 - RNA, 14 nt, Human
uucaggaucuauuu

SEQ ID NO: 3892029 - RNA, 16 nt, Human
uucaggcauauuuuaa

SEQ ID NO: 3892030 - RNA, 20 nt, Human
uucaggcgauucuccugccu

SEQ ID NO: 3892031 - RNA, 21 nt, Human
uucaggcuuccugcaauuuuc

SEQ ID NO: 3892032 - RNA, 22 nt, Human
uucaggcuuccugcaauuuucu

SEQ ID NO: 3892033 - RNA, 23 nt, Human
uucagggaaccguuauuauaauu

SEQ ID NO: 3892034 - RNA, 20 nt, Human
uucagggcagauuuuaguuu

SEQ ID NO: 3892035 - RNA, 13 nt, Human
uucagggccuggu

SEQ ID NO: 3892036 - RNA, 17 nt, Human
uucaggggaaacuugau

SEQ ID NO: 3892037 - RNA, 20 nt, Human
uucaggggacucagcccuga

SEQ ID NO: 3892038 - RNA, 23 nt, Human
uucaggggacucagcccugaggu

SEQ ID NO: 3892039 - RNA, 23 nt, Human
uucaggggcugcccgcucccagu

SEQ ID NO: 3892040 - RNA, 21 nt, Human
uucagggggguugugaggccu

SEQ ID NO: 3892041 - RNA, 23 nt, Human
uucaggguaaauaggaaucauuc

SEQ ID NO: 3892042 - RNA, 16 nt, Human
uucagggugaugccag

SEQ ID NO: 3892043 - RNA, 14 nt, Human
uucagguacuaaau

SEQ ID NO: 3892044 - RNA, 14 nt, Human
uucagguccaggcu

SEQ ID NO: 3892045 - RNA, 19 nt, Human
uucaggugacaugugaaac

SEQ ID NO: 3892046 - RNA, 23 nt, Human
uucaggugacaugugaaaccuuu

SEQ ID NO: 3892047 - RNA, 21 nt, Human
uucagguuaucgaaauaacaa

SEQ ID NO: 3892048 - RNA, 22 nt, Human
uucagguuaucgaaauaacaau

SEQ ID NO: 3892049 - RNA, 16 nt, Human
uucagguuuuaguuuu

SEQ ID NO: 3892050 - RNA, 19 nt, Human
uucagguuuuguaaagaug

SEQ ID NO: 3892051 - RNA, 13 nt, Human
uucagguuuuucc

SEQ ID NO: 3892052 - RNA, 16 nt, Human
uucagguuuuuccuuu

SEQ ID NO: 3892053 - RNA, 15 nt, Human
uucaguaacugucag

SEQ ID NO: 3892054 - RNA, 23 nt, Human
uucaguaagucucauagguuaaa

SEQ ID NO: 3892055 - RNA, 20 nt, Human
uucaguaaguuaucuuugaa

SEQ ID NO: 3892056 - RNA, 21 nt, Human
uucaguacccucucagcucca

SEQ ID NO: 3892057 - RNA, 15 nt, Human
uucaguaccuggagg

SEQ ID NO: 3892058 - RNA, 23 nt, Human
uucaguaccuggaggaggagcag

SEQ ID NO: 3892059 - RNA, 19 nt, Human
uucaguacuuuuuuaaaua

SEQ ID NO: 3892060 - RNA, 14 nt, Human
uucaguaggaacug

SEQ ID NO: 3892061 - RNA, 17 nt, Human
uucaguauguugucaaa

SEQ ID NO: 3892062 - RNA, 17 nt, Human
uucaguauguuuuacac

SEQ ID NO: 3892063 - RNA, 22 nt, Human
uucaguauguuuuacacuguac

SEQ ID NO: 3892064 - RNA, 17 nt, Human
uucaguauuauauguac

SEQ ID NO: 3892065 - RNA, 21 nt, Human
uucaguauuuuggagaaauua

SEQ ID NO: 3892066 - RNA, 17 nt, Human
uucagucacauggcaug

SEQ ID NO: 3892067 - RNA, 21 nt, Human
uucagucauauaaaagcuaug

SEQ ID NO: 3892068 - RNA, 18 nt, Human
uucaguccugcuccagaa

SEQ ID NO: 3892069 - RNA, 24 nt, Human
uucagucucuauaccaauaaagug

SEQ ID NO: 3892070 - RNA, 23 nt, Human
uucagugcauuaucuacuugugu

SEQ ID NO: 3892071 - RNA, 16 nt, Human
uucagugccaaaaaca

SEQ ID NO: 3892072 - RNA, 19 nt, Human
uucagugccuuauggaaca

SEQ ID NO: 3892073 - RNA, 17 nt, Human
uucaguggcagggcuca

SEQ ID NO: 3892074 - RNA, 16 nt, Human
uucaguguaauuucuu

SEQ ID NO: 3892075 - RNA, 24 nt, Human
uucaguguaguuaauuuaucuaaa

SEQ ID NO: 3892076 - RNA, 23 nt, Human
uuccagcaauucuccugccucag

SEQ ID NO: 3892077 - RNA, 23 nt, Human
uuccagcaggagggacagucuca

SEQ ID NO: 3892078 - RNA, 15 nt, Human
uuccagcauucccag

SEQ ID NO: 3892079 - RNA, 20 nt, Human
uuccagcauucccagguagg

SEQ ID NO: 3892080 - RNA, 17 nt, Human
uuccagccccucugguc

SEQ ID NO: 3892081 - RNA, 20 nt, Human
uuccagccccucuggucgcu

SEQ ID NO: 3892082 - RNA, 21 nt, Human
uuccagccggcauggcuggga

SEQ ID NO: 3892083 - RNA, 12 nt, Human
uuccagccugcc

SEQ ID NO: 3892084 - RNA, 12 nt, Human
uuccagcugcug

SEQ ID NO: 3892085 - RNA, 15 nt, Human
uuccagcugcugucu

SEQ ID NO: 3892086 - RNA, 22 nt, Human
uuccagcugcugucuucuggac

SEQ ID NO: 3892087 - RNA, 17 nt, Human
uuccagcugucccccca

SEQ ID NO: 3892088 - RNA, 17 nt, Human
uuccaggaaaaaggaca

SEQ ID NO: 3892089 - RNA, 24 nt, Human
uuccaggaaacuccacaucugccu

SEQ ID NO: 3892090 - RNA, 16 nt, Human
uuccaggacuguuuca

SEQ ID NO: 3892091 - RNA, 23 nt, Human
uuccaggacuguuucaaacaugc

SEQ ID NO: 3892092 - RNA, 17 nt, Human
uuccaggcccgaagcau

SEQ ID NO: 3892093 - RNA, 20 nt, Human
uuccaggcuauguauaaaau

SEQ ID NO: 3892094 - RNA, 16 nt, Human
uuccaggcugcauaga

SEQ ID NO: 3892095 - RNA, 21 nt, Human
uuccaggcugcauagaaggag

SEQ ID NO: 3892096 - RNA, 14 nt, Human
uuccaggcuucugc

SEQ ID NO: 3892097 - RNA, 20 nt, Human
uuccaggcuucugcuggggc

SEQ ID NO: 3892098 - RNA, 14 nt, Human
uuccagggcaauca

SEQ ID NO: 3892099 - RNA, 14 nt, Human
uuccaggggaaccu

SEQ ID NO: 3892100 - RNA, 15 nt, Human
uuccaggggaaccug

SEQ ID NO: 3892101 - RNA, 21 nt, Human
uuccaggggugggacacccug

SEQ ID NO: 3892102 - RNA, 18 nt, Human
uuccagggucccucugug

SEQ ID NO: 3892103 - RNA, 22 nt, Human
uuccagguagcugaaaggggaa

SEQ ID NO: 3892104 - RNA, 15 nt, Human
uuccaggugggguga

SEQ ID NO: 3892105 - RNA, 17 nt, Human
uuccagguuuaagcugu

SEQ ID NO: 3892106 - RNA, 21 nt, Human
uuccaguaaggaaugauauug

SEQ ID NO: 3892107 - RNA, 15 nt, Human
uuccagucaggauga

SEQ ID NO: 3892108 - RNA, 14 nt, Human
uuccagucucaaaa

SEQ ID NO: 3892109 - RNA, 20 nt, Human
uuccagucuccaccaggaac

SEQ ID NO: 3892110 - RNA, 17 nt, Human
uuccagucuuccugaca

SEQ ID NO: 3892111 - RNA, 20 nt, Human
uuccagucuuccugacacuu

SEQ ID NO: 3892112 - RNA, 22 nt, Human
uuccagugaaaucaguuacucu

SEQ ID NO: 3892113 - RNA, 21 nt, Human
uuccagugagcuuaucaugcu

SEQ ID NO: 3892114 - RNA, 20 nt, Human
uuccagugaggcucugcccu

SEQ ID NO: 3892115 - RNA, 16 nt, Human
uuccaguggccuggcu

SEQ ID NO: 3892116 - RNA, 17 nt, Human
uuccaguggccuggcuc

SEQ ID NO: 3892117 - RNA, 11 nt, Human
uuccaguuccc

SEQ ID NO: 3892118 - RNA, 20 nt, Human
uuccaguuuauuccagagcu

SEQ ID NO: 3892119 - RNA, 18 nt, Human
uuccauaaagaagauguu

SEQ ID NO: 3892120 - RNA, 19 nt, Human
uuccauaaggaauguagcu

SEQ ID NO: 3892121 - RNA, 19 nt, Human
uuccauaaucuggacuccu

SEQ ID NO: 3892122 - RNA, 18 nt, Human
uuccauaauuaugacagu

SEQ ID NO: 3892123 - RNA, 17 nt, Human
uuccauagcaacaggaa

SEQ ID NO: 3892124 - RNA, 16 nt, Human
uuccauagcugcugcc

SEQ ID NO: 3892125 - RNA, 22 nt, Human
uuccauaguauauuaaaaaugg

SEQ ID NO: 3892126 - RNA, 23 nt, Human
uuccauaguauauuaaaaauggu

SEQ ID NO: 3892127 - RNA, 22 nt, Human
uuccauaguuuagguacucaaa

SEQ ID NO: 3892128 - RNA, 23 nt, Human
uuccauaguuuugaugacuggca

SEQ ID NO: 3892129 - RNA, 16 nt, Human
uuccauauuagaaaac

SEQ ID NO: 3892130 - RNA, 18 nt, Human
uuccauauuagaaaacuu

SEQ ID NO: 3892131 - RNA, 21 nt, Human
uuccauauuagaaaacuuugu

SEQ ID NO: 3892132 - RNA, 15 nt, Human
uuccauauucaugua

SEQ ID NO: 3892133 - RNA, 12 nt, Human
uuccauauuugg

SEQ ID NO: 3892134 - RNA, 18 nt, Human
uuccauauuuuuuuccuu

SEQ ID NO: 3892135 - RNA, 12 nt, Human
uuccaucauguc

SEQ ID NO: 3892136 - RNA, 14 nt, Human
uuccaucauguccc

SEQ ID NO: 3892137 - RNA, 17 nt, Human
uuccauccauaaaucca

SEQ ID NO: 3892138 - RNA, 23 nt, Human
uuccaucccaaccagugccaagg

SEQ ID NO: 3892139 - RNA, 13 nt, Human
uuccaucccagag

SEQ ID NO: 3892140 - RNA, 15 nt, Human
uuccaucccuacccc

SEQ ID NO: 3892141 - RNA, 18 nt, Human
uuccauccuuuacguguu

SEQ ID NO: 3892142 - RNA, 22 nt, Human
uuccaucuccuauaaucuguca

SEQ ID NO: 3892143 - RNA, 14 nt, Human
uuccaucucugacu

SEQ ID NO: 3892144 - RNA, 18 nt, Human
uuccaucuuuacaaaacu

SEQ ID NO: 3892145 - RNA, 13 nt, Human
uuccaugaaaacg

SEQ ID NO: 3892146 - RNA, 24 nt, Human
uuccaugaaaaugcaacaacaugu

SEQ ID NO: 3892147 - RNA, 20 nt, Human
uuccaugaaguuugaacuuc

SEQ ID NO: 3892148 - RNA, 12 nt, Human
uuccaugaaugu

SEQ ID NO: 3892149 - RNA, 15 nt, Human
uuccaugaauguauc

SEQ ID NO: 3892150 - RNA, 20 nt, Human
uuccaugaauguaucaggaa

SEQ ID NO: 3892151 - RNA, 17 nt, Human
uuccaugaauguuccug

SEQ ID NO: 3892152 - RNA, 13 nt, Human
uuccaugacaaua

SEQ ID NO: 3892153 - RNA, 18 nt, Human
uuccaugacugcauuuua

SEQ ID NO: 3892154 - RNA, 19 nt, Human
uuccaugacugcuugcccu

SEQ ID NO: 3892155 - RNA, 18 nt, Human
uuccaugauucuauuuau

SEQ ID NO: 3892156 - RNA, 15 nt, Human
uuccaugccugaggg

SEQ ID NO: 3892157 - RNA, 19 nt, Human
uuccauggcaggaaggcuu

SEQ ID NO: 3892158 - RNA, 17 nt, Human
uuccauggcccucauua

SEQ ID NO: 3892159 - RNA, 22 nt, Human
uuccauggccguguagaagcau

SEQ ID NO: 3892160 - RNA, 19 nt, Human
uuccaugggauacaaccuc

SEQ ID NO: 3892161 - RNA, 12 nt, Human
uuccauggggua

SEQ ID NO: 3892162 - RNA, 17 nt, Human
uuccauguaucuuuuga

SEQ ID NO: 3892163 - RNA, 14 nt, Human
uuccauguggagaa

SEQ ID NO: 3892164 - RNA, 13 nt, Human
uuccauguugcug

SEQ ID NO: 3892165 - RNA, 13 nt, Human
uuccauuacaagu

SEQ ID NO: 3892166 - RNA, 16 nt, Human
uuccauuccagaauau

SEQ ID NO: 3892167 - RNA, 13 nt, Human
uuccauucuggaa

SEQ ID NO: 3892168 - RNA, 17 nt, Human
uuccauuggaucucauu

SEQ ID NO: 3892169 - RNA, 19 nt, Human
uuccauugguccaagauuc

SEQ ID NO: 3892170 - RNA, 17 nt, Human
uuccauuguuugaaaca

SEQ ID NO: 3892171 - RNA, 21 nt, Human
uuccauuguuuggagacauuc

SEQ ID NO: 3892172 - RNA, 19 nt, Human
uuccauuuacuuaagacuu

SEQ ID NO: 3892173 - RNA, 19 nt, Human
uuccauuuaucuuucuaca

SEQ ID NO: 3892174 - RNA, 22 nt, Human
uuccauuugaggauuuagaagu

SEQ ID NO: 3892175 - RNA, 18 nt, Human
uuccauuugcauuuguuu

SEQ ID NO: 3892176 - RNA, 14 nt, Human
uuccauuugugugu

SEQ ID NO: 3892177 - RNA, 18 nt, Human
uuccauuuucccccacua

SEQ ID NO: 3892178 - RNA, 13 nt, Human
uucccaacacaaa

SEQ ID NO: 3892179 - RNA, 15 nt, Human
uucccaacacaaaga

SEQ ID NO: 3892180 - RNA, 19 nt, Human
uucccaacacuucagacug

SEQ ID NO: 3892181 - RNA, 21 nt, Human
uucccaaccccuuaagcccug

SEQ ID NO: 3892182 - RNA, 15 nt, Human
uucccaacucuagcu

SEQ ID NO: 3892183 - RNA, 20 nt, Human
uucccaacuucucuugcuuu

SEQ ID NO: 3892184 - RNA, 19 nt, Human
uucccaacuugccuuugaa

SEQ ID NO: 3892185 - RNA, 21 nt, Human
uucccaagaaaggaaaccuuu

SEQ ID NO: 3892186 - RNA, 20 nt, Human
uucccaagagcaucaugccu

SEQ ID NO: 3892187 - RNA, 11 nt, Human
uucccaagcuc

SEQ ID NO: 3892188 - RNA, 15 nt, Human
uucccaagcucugcu

SEQ ID NO: 3892189 - RNA, 16 nt, Human
uucccaagcucugcuc

SEQ ID NO: 3892190 - RNA, 13 nt, Human
uucccaagggcug

SEQ ID NO: 3892191 - RNA, 16 nt, Human
uucccaagggcugccg

SEQ ID NO: 3892192 - RNA, 23 nt, Human
uucccaauagcaacguagcuucu

SEQ ID NO: 3892193 - RNA, 16 nt, Human
uucccaaucagcacug

SEQ ID NO: 3892194 - RNA, 12 nt, Human
uucccaauggug

SEQ ID NO: 3892195 - RNA, 19 nt, Human
uucccaaugguguuuuucu

SEQ ID NO: 3892196 - RNA, 22 nt, Human
uucccaaugguguuuuucuugu

SEQ ID NO: 3892197 - RNA, 18 nt, Human
uucccacaggacauuucu

SEQ ID NO: 3892198 - RNA, 13 nt, Human
uucccacauuugu

SEQ ID NO: 3892199 - RNA, 15 nt, Human
uucccaccaaggucu

SEQ ID NO: 3892200 - RNA, 14 nt, Human
uucccacccagccu

SEQ ID NO: 3892201 - RNA, 11 nt, Human
uucccacccug

SEQ ID NO: 3892202 - RNA, 22 nt, Human
uucccaccgcccucccucccca

SEQ ID NO: 3892203 - RNA, 22 nt, Human
uucccaccucucucacuccuug

SEQ ID NO: 3892204 - RNA, 14 nt, Human
uucccacgaggaau

SEQ ID NO: 3892205 - RNA, 20 nt, Human
uucccacggccuuucuagcc

SEQ ID NO: 3892206 - RNA, 14 nt, Human
uucccacuccaagc

SEQ ID NO: 3892207 - RNA, 20 nt, Human
uucccacugcacccccuccu

SEQ ID NO: 3892208 - RNA, 23 nt, Human
uucccacugguccaucugguuuu

SEQ ID NO: 3892209 - RNA, 20 nt, Human
uucccacuuaaaaauuaaau

SEQ ID NO: 3892210 - RNA, 20 nt, Human
uucccacuuucccaccccac

SEQ ID NO: 3892211 - RNA, 13 nt, Human
uucccagaaucaa

SEQ ID NO: 3892212 - RNA, 18 nt, Human
uucccagagcaaaauaau

SEQ ID NO: 3892213 - RNA, 23 nt, Human
uucccagagcaaaauaauuuuaa

SEQ ID NO: 3892214 - RNA, 19 nt, Human
uucccagagucaucugauu

SEQ ID NO: 3892215 - RNA, 21 nt, Human
uucccagcuacaccuuucucc

SEQ ID NO: 3892216 - RNA, 18 nt, Human
uucccagcucuacccugc

SEQ ID NO: 3892217 - RNA, 16 nt, Human
uucccagcucucccuc

SEQ ID NO: 3892218 - RNA, 19 nt, Human
uucccagcugccccucccu

SEQ ID NO: 3892219 - RNA, 20 nt, Human
uucccagcugccccucccug

SEQ ID NO: 3892220 - RNA, 14 nt, Human
uucccuugagcccu

SEQ ID NO: 3892221 - RNA, 17 nt, Human
uucccuugaugaagaag

SEQ ID NO: 3892222 - RNA, 20 nt, Human
uucccuugcuuuucccucuu

SEQ ID NO: 3892223 - RNA, 16 nt, Human
uucccuuguaaacaga

SEQ ID NO: 3892224 - RNA, 23 nt, Human
uucccuuuagcacguuuaaaguu

SEQ ID NO: 3892225 - RNA, 15 nt, Human
uucccuuuccccagc

SEQ ID NO: 3892226 - RNA, 13 nt, Human
uucccuuuccuga

SEQ ID NO: 3892227 - RNA, 15 nt, Human
uucccuuuccuucca

SEQ ID NO: 3892228 - RNA, 19 nt, Human
uucccuuugacgccauccc

SEQ ID NO: 3892229 - RNA, 20 nt, Human
uucccuuugacgccauccca

SEQ ID NO: 3892230 - RNA, 21 nt, Human
uucccuuugacgccaucccag

SEQ ID NO: 3892231 - RNA, 18 nt, Human
uucccuuugccacacugu

SEQ ID NO: 3892232 - RNA, 17 nt, Human
uucccuuugcuccaccc

SEQ ID NO: 3892233 - RNA, 17 nt, Human
uucccuuuggagaugcu

SEQ ID NO: 3892234 - RNA, 17 nt, Human
uucccuuugucuuucaa

SEQ ID NO: 3892235 - RNA, 17 nt, Human
uucccuuuuacauacug

SEQ ID NO: 3892236 - RNA, 18 nt, Human
uucccuuuuacauacugc

SEQ ID NO: 3892237 - RNA, 19 nt, Human
uucccuuuuacauacugcu

SEQ ID NO: 3892238 - RNA, 19 nt, Human
uucccuuuuuuggcugcug

SEQ ID NO: 3892239 - RNA, 20 nt, Human
uucccuuuuuuggcugcuga

SEQ ID NO: 3892240 - RNA, 23 nt, Human
uuccgaaaaauccucuuccucug

SEQ ID NO: 3892241 - RNA, 20 nt, Human
uuccgaaaccaaagaagaaa

SEQ ID NO: 3892242 - RNA, 23 nt, Human
uuccgacaaccgaugcuccagcc

SEQ ID NO: 3892243 - RNA, 22 nt, Human
uuccgacucuuucugagugccu

SEQ ID NO: 3892244 - RNA, 18 nt, Human
uuccgcauucuuuguaca

SEQ ID NO: 3892245 - RNA, 15 nt, Human
uuccgccacuggggc

SEQ ID NO: 3892246 - RNA, 14 nt, Human
uuccgccccugccu

SEQ ID NO: 3892247 - RNA, 18 nt, Human
uuccgccccugccugcca

SEQ ID NO: 3892248 - RNA, 13 nt, Human
uuccgcuuggagc

SEQ ID NO: 3892249 - RNA, 22 nt, Human
uuccggauccuaagcaucuaag

SEQ ID NO: 3892250 - RNA, 23 nt, Human
uuccggauuggcuuguguguuuc

SEQ ID NO: 3892251 - RNA, 17 nt, Human
uuccggccccuccccuc

SEQ ID NO: 3892252 - RNA, 14 nt, Human
uuccggcuccugug

SEQ ID NO: 3892253 - RNA, 21 nt, Human
uuccgguagggaggcagccuc

SEQ ID NO: 3892254 - RNA, 21 nt, Human
uuccguaauaacacccuuccu

SEQ ID NO: 3892255 - RNA, 21 nt, Human
uuccgucaacguuguacugua

SEQ ID NO: 3892256 - RNA, 19 nt, Human
uuccgucacaucccacccc

SEQ ID NO: 3892257 - RNA, 21 nt, Human
uuccgucaccacgacuggcca

SEQ ID NO: 3892258 - RNA, 17 nt, Human
uuccgucagaaagugua

SEQ ID NO: 3892259 - RNA, 17 nt, Human
uuccgugaaaacggagc

SEQ ID NO: 3892260 - RNA, 14 nt, Human
uuccguugucugug

SEQ ID NO: 3892261 - RNA, 17 nt, Human
uuccguuugcuuuuguu

SEQ ID NO: 3892262 - RNA, 13 nt, Human
uuccuaaaaugcu

SEQ ID NO: 3892263 - RNA, 18 nt, Human
uuccuaaauauuaugaga

SEQ ID NO: 3892264 - RNA, 14 nt, Human
uuccuaaaugcagu

SEQ ID NO: 3892265 - RNA, 12 nt, Human
uuccuaaauuuu

SEQ ID NO: 3892266 - RNA, 18 nt, Human
uuccuaaauuuuccuguc

SEQ ID NO: 3892267 - RNA, 21 nt, Human
uuccuaaauuuuccuguccuc

SEQ ID NO: 3892268 - RNA, 14 nt, Human
uuccuaacuuuuca

SEQ ID NO: 3892269 - RNA, 22 nt, Human
uuccuaagccacuugaaauguu

SEQ ID NO: 3892270 - RNA, 17 nt, Human
uuccuaagccuguggcu

SEQ ID NO: 3892271 - RNA, 14 nt, Human
uuccuaaggcugca

SEQ ID NO: 3892272 - RNA, 19 nt, Human
uuccuaauaaaguucugua

SEQ ID NO: 3892273 - RNA, 19 nt, Human
uuccuaauaucaaaugcag

SEQ ID NO: 3892274 - RNA, 17 nt, Human
uuccuaaucagaaauuu

SEQ ID NO: 3892275 - RNA, 13 nt, Human
uuccuaauccucu

SEQ ID NO: 3892276 - RNA, 15 nt, Human
uuccuaauccucuag

SEQ ID NO: 3892277 - RNA, 16 nt, Human
uuccuaauccucuagg

SEQ ID NO: 3892278 - RNA, 18 nt, Human
uuccuaauuccacagcug

SEQ ID NO: 3892279 - RNA, 18 nt, Human
uuccuaauuucccuucuu

SEQ ID NO: 3892280 - RNA, 16 nt, Human
uuccuacaaagauguu

SEQ ID NO: 3892281 - RNA, 14 nt, Human
uuccuacacaggac

SEQ ID NO: 3892282 - RNA, 17 nt, Human
uuccuacacaggacagg

SEQ ID NO: 3892283 - RNA, 18 nt, Human
uuccuacagauagucaaa

SEQ ID NO: 3892284 - RNA, 12 nt, Human
uuccuacagccc

SEQ ID NO: 3892285 - RNA, 18 nt, Human
uuccuacaggcagucucu

SEQ ID NO: 3892286 - RNA, 16 nt, Human
uuccuacccaaccacu

SEQ ID NO: 3892287 - RNA, 23 nt, Human
uuccuacccacaccucugccaga

SEQ ID NO: 3892288 - RNA, 16 nt, Human
uuccuaccucccugca

SEQ ID NO: 3892289 - RNA, 21 nt, Human
uuccuacucuucucucugcuc

SEQ ID NO: 3892290 - RNA, 18 nt, Human
uuccuagauaaaaagaug

SEQ ID NO: 3892291 - RNA, 19 nt, Human
uuccuagauggcagucacu

SEQ ID NO: 3892292 - RNA, 17 nt, Human
uuccuagcacacacuuu

SEQ ID NO: 3892293 - RNA, 19 nt, Human
uuccuagcacacacuuuug

SEQ ID NO: 3892294 - RNA, 14 nt, Human
uuccuagccaccgc

SEQ ID NO: 3892295 - RNA, 18 nt, Human
uuccuagcugugugaaua

SEQ ID NO: 3892296 - RNA, 21 nt, Human
uuccuaguucaucccuucucu

SEQ ID NO: 3892297 - RNA, 22 nt, Human
uuccuaguucaucccuucucuu

SEQ ID NO: 3892298 - RNA, 20 nt, Human
uuccuaguucuguagaaaug

SEQ ID NO: 3892299 - RNA, 13 nt, Human
uuccuauacgcag

SEQ ID NO: 3892300 - RNA, 21 nt, Human
uuccuauauaguuuauugaca

SEQ ID NO: 3892301 - RNA, 22 nt, Human
uuccuauauaguuuauugacaa

SEQ ID NO: 3892302 - RNA, 14 nt, Human
uuccuauauccugu

SEQ ID NO: 3892303 - RNA, 15 nt, Human
uuccuaucccauccc

SEQ ID NO: 3892304 - RNA, 14 nt, Human
uuccuaugauguau

SEQ ID NO: 3892305 - RNA, 20 nt, Human
uuccuauggcuggccacugc

SEQ ID NO: 3892306 - RNA, 14 nt, Human
uuccuauguaacug

SEQ ID NO: 3892307 - RNA, 21 nt, Human
uuccuauuccaagcuuccaua

SEQ ID NO: 3892308 - RNA, 20 nt, Human
uuccuauugucauuaaaggu

SEQ ID NO: 3892309 - RNA, 14 nt, Human
uuccuauugugauu

SEQ ID NO: 3892310 - RNA, 13 nt, Human
uuccuauuucaga

SEQ ID NO: 3892311 - RNA, 15 nt, Human
uuccuauuucagaag

SEQ ID NO: 3892312 - RNA, 16 nt, Human
uuccuauuucagaagu

SEQ ID NO: 3892313 - RNA, 19 nt, Human
uuccuauuuguuuucaugg

SEQ ID NO: 3892314 - RNA, 19 nt, Human
uuccucaaaauaaagaagu

SEQ ID NO: 3892315 - RNA, 20 nt, Human
uuccucaaaauaaagaagua

SEQ ID NO: 3892316 - RNA, 17 nt, Human
uuccucaaauguugaca

SEQ ID NO: 3892317 - RNA, 14 nt, Human
uuccucaaauuuuu

SEQ ID NO: 3892318 - RNA, 22 nt, Human
uuccucaaauuuuuugacuuuu

SEQ ID NO: 3892319 - RNA, 14 nt, Human
uuccucagacucua

SEQ ID NO: 3892320 - RNA, 16 nt, Human
uuccucagcuuaucuc

SEQ ID NO: 3892321 - RNA, 22 nt, Human
uuccucaggcaaggucuggccu

SEQ ID NO: 3892322 - RNA, 23 nt, Human
uuccucaguuuaauccuucuagu

SEQ ID NO: 3892323 - RNA, 14 nt, Human
uuccucaugaauua

SEQ ID NO: 3892324 - RNA, 14 nt, Human
uuccucauuaaauu

SEQ ID NO: 3892325 - RNA, 14 nt, Human
uuccuccacauccu

SEQ ID NO: 3892326 - RNA, 23 nt, Human
uuccuccacauccuuucuaaaca

SEQ ID NO: 3892327 - RNA, 17 nt, Human
uuccuccagcugcacca

SEQ ID NO: 3892328 - RNA, 23 nt, Human
uuccuccaucuccaagaaugcug

SEQ ID NO: 3892329 - RNA, 11 nt, Human
uuccuccccag

SEQ ID NO: 3892330 - RNA, 21 nt, Human
uuccuccccauuagagucagc

SEQ ID NO: 3892331 - RNA, 12 nt, Human
uuccucccuccc

SEQ ID NO: 3892332 - RNA, 21 nt, Human
uuccucccucccucuuucccu

SEQ ID NO: 3892333 - RNA, 15 nt, Human
uuccuccucccuccu

SEQ ID NO: 3892334 - RNA, 20 nt, Human
uuccuccugacaccccacuu

SEQ ID NO: 3892335 - RNA, 15 nt, Human
uuccuccugcucaua

SEQ ID NO: 3892336 - RNA, 11 nt, Human
uuccuccuggg

SEQ ID NO: 3892337 - RNA, 21 nt, Human
uuccuccugggcccucucugc

SEQ ID NO: 3892338 - RNA, 11 nt, Human
uuccuccuuuc

SEQ ID NO: 3892339 - RNA, 14 nt, Human
uuccucgcccuggg

SEQ ID NO: 3892340 - RNA, 17 nt, Human
uuccucgccucucccac

SEQ ID NO: 3892341 - RNA, 22 nt, Human
uuccucuaacuuggcucacacu

SEQ ID NO: 3892342 - RNA, 17 nt, Human
uuccucuagaagccaag

SEQ ID NO: 3892343 - RNA, 17 nt, Human
uuccucuaguucuuugu

SEQ ID NO: 3892344 - RNA, 23 nt, Human
uuccucuauugauguacagucug

SEQ ID NO: 3892345 - RNA, 16 nt, Human
uuccucuccacugccu

SEQ ID NO: 3892346 - RNA, 15 nt, Human
uuccucucuauauuu

SEQ ID NO: 3892347 - RNA, 15 nt, Human
uuccucucuccagau

SEQ ID NO: 3892348 - RNA, 18 nt, Human
uuccucucugguggcucu

SEQ ID NO: 3892349 - RNA, 13 nt, Human
uuccucugaggcu

SEQ ID NO: 3892350 - RNA, 17 nt, Human
uuccucugcagcugacc

SEQ ID NO: 3892351 - RNA, 15 nt, Human
uuccucugccugccc

SEQ ID NO: 3892352 - RNA, 19 nt, Human
uuccucugcuaaauugaug

SEQ ID NO: 3892353 - RNA, 12 nt, Human
uuccucugggaa

SEQ ID NO: 3892354 - RNA, 22 nt, Human
uuccucuguucaaagcugccug

SEQ ID NO: 3892355 - RNA, 21 nt, Human
uuccucuguuucuccuucuga

SEQ ID NO: 3892356 - RNA, 16 nt, Human
uuccucuuccccuugc

SEQ ID NO: 3892357 - RNA, 18 nt, Human
uuccucuuccccuugccc

SEQ ID NO: 3892358 - RNA, 13 nt, Human
uuccucuugaacc

SEQ ID NO: 3892359 - RNA, 22 nt, Human
uuccucuugacccugcacccuc

SEQ ID NO: 3892360 - RNA, 13 nt, Human
uuccucuuuccau

SEQ ID NO: 3892361 - RNA, 19 nt, Human
uuccucuuuuccuucccaa

SEQ ID NO: 3892362 - RNA, 14 nt, Human
uuccugaacaggau

SEQ ID NO: 3892363 - RNA, 15 nt, Human
uuccugaacaggaua

SEQ ID NO: 3892364 - RNA, 15 nt, Human
uuccugaagaaccag

SEQ ID NO: 3892365 - RNA, 16 nt, Human
uucgaagcucagccca

SEQ ID NO: 3892366 - RNA, 15 nt, Human
uucgaaugacacugu

SEQ ID NO: 3892367 - RNA, 21 nt, Human
uucgacuguuguuaucuguuu

SEQ ID NO: 3892368 - RNA, 18 nt, Human
uucgagaccaaccugacc

SEQ ID NO: 3892369 - RNA, 15 nt, Human
uucgagaccagccug

SEQ ID NO: 3892370 - RNA, 17 nt, Human
uucgagaccagccuggc

SEQ ID NO: 3892371 - RNA, 17 nt, Human
uucgaggacuacaacca

SEQ ID NO: 3892372 - RNA, 11 nt, Human
uucgaggccug

SEQ ID NO: 3892373 - RNA, 15 nt, Human
uucgaggccugaagc

SEQ ID NO: 3892374 - RNA, 20 nt, Human
uucgauaaacaacaaggugg

SEQ ID NO: 3892375 - RNA, 20 nt, Human
uucgauacaccgggccugga

SEQ ID NO: 3892376 - RNA, 23 nt, Human
uucgauacccaggaccaagccac

SEQ ID NO: 3892377 - RNA, 20 nt, Human
uucgaugguacgugacccuc

SEQ ID NO: 3892378 - RNA, 23 nt, Human
uucgcaccuaccaucagggacag

SEQ ID NO: 3892379 - RNA, 14 nt, Human
uucgcagccacccu

SEQ ID NO: 3892380 - RNA, 20 nt, Human
uucgcaucaaaagacaauuc

SEQ ID NO: 3892381 - RNA, 14 nt, Human
uucgcauggucaca

SEQ ID NO: 3892382 - RNA, 18 nt, Human
uucgcauggucacacacu

SEQ ID NO: 3892383 - RNA, 14 nt, Human
uucgccguggcugc

SEQ ID NO: 3892384 - RNA, 15 nt, Human
uucgccuggagcccu

SEQ ID NO: 3892385 - RNA, 21 nt, Human
uucgccuuaauacuuuuuuau

SEQ ID NO: 3892386 - RNA, 16 nt, Human
uucgccuuuccucucu

SEQ ID NO: 3892387 - RNA, 15 nt, Human
uucgcgcucugcuca

SEQ ID NO: 3892388 - RNA, 19 nt, Human
uucgcggguaacugggguu

SEQ ID NO: 3892389 - RNA, 22 nt, Human
uucgcggguaacugggguugag

SEQ ID NO: 3892390 - RNA, 15 nt, Human
uucgcuccugugucu

SEQ ID NO: 3892391 - RNA, 12 nt, Human
uucgcugcaacc

SEQ ID NO: 3892392 - RNA, 14 nt, Human
uucgcuugagaaaa

SEQ ID NO: 3892393 - RNA, 21 nt, Human
uucggcauugguucccuuugc

SEQ ID NO: 3892394 - RNA, 16 nt, Human
uucggccagagcugaa

SEQ ID NO: 3892395 - RNA, 14 nt, Human
uucggccuccaucc

SEQ ID NO: 3892396 - RNA, 22 nt, Human
uucggcgccuuaaggauguucu

SEQ ID NO: 3892397 - RNA, 18 nt, Human
uucgggccaaggaccuga

SEQ ID NO: 3892398 - RNA, 17 nt, Human
uucggggaacuccugga

SEQ ID NO: 3892399 - RNA, 15 nt, Human
uucgguacccaccac

SEQ ID NO: 3892400 - RNA, 22 nt, Human
uucguacaguucuucgggaaga

SEQ ID NO: 3892401 - RNA, 19 nt, Human
uucguagcuuucccaaaua

SEQ ID NO: 3892402 - RNA, 16 nt, Human
uucguccacagcuucc

SEQ ID NO: 3892403 - RNA, 12 nt, Human
uucgucuguugu

SEQ ID NO: 3892404 - RNA, 14 nt, Human
uucgucuucacucu

SEQ ID NO: 3892405 - RNA, 14 nt, Human
uucgucuucuaauu

SEQ ID NO: 3892406 - RNA, 20 nt, Human
uucguuaguaaucuguauaa

SEQ ID NO: 3892407 - RNA, 17 nt, Human
uucguuuguuuguuuca

SEQ ID NO: 3892408 - RNA, 18 nt, Human
uucguuuguuuguuuugu

SEQ ID NO: 3892409 - RNA, 22 nt, Human
uucguuuugguuaaguuggcuu

SEQ ID NO: 3892410 - RNA, 17 nt, Human
uucuaaaaagauuagca

SEQ ID NO: 3892411 - RNA, 20 nt, Human
uucuaaaaagucagauguuu

SEQ ID NO: 3892412 - RNA, 18 nt, Human
uucuaaaaauugugauca

SEQ ID NO: 3892413 - RNA, 19 nt, Human
uucuaaaacuaaauagcau

SEQ ID NO: 3892414 - RNA, 12 nt, Human
uucuaaaacugu

SEQ ID NO: 3892415 - RNA, 14 nt, Human
uucuaaaagaauau

SEQ ID NO: 3892416 - RNA, 21 nt, Human
uucuaaaaucuuauaguucua

SEQ ID NO: 3892417 - RNA, 14 nt, Human
uucuaaaaugccuu

SEQ ID NO: 3892418 - RNA, 20 nt, Human
uucuaaaaugugauguucua

SEQ ID NO: 3892419 - RNA, 18 nt, Human
uucuaaacccaauccaaa

SEQ ID NO: 3892420 - RNA, 23 nt, Human
uucuaaacccaauccaaauggcg

SEQ ID NO: 3892421 - RNA, 20 nt, Human
uucuaaacuaggcuccuuca

SEQ ID NO: 3892422 - RNA, 15 nt, Human
uucuaaacuggagac

SEQ ID NO: 3892423 - RNA, 20 nt, Human
uucuaaagagcacuuacugu

SEQ ID NO: 3892424 - RNA, 13 nt, Human
uucuaaagauaau

SEQ ID NO: 3892425 - RNA, 12 nt, Human
uucuaaagauuc

SEQ ID NO: 3892426 - RNA, 16 nt, Human
uucuaaagauucuaua

SEQ ID NO: 3892427 - RNA, 18 nt, Human
uucuaaagccuuaagucu

SEQ ID NO: 3892428 - RNA, 16 nt, Human
uucuaaaggaguuuau

SEQ ID NO: 3892429 - RNA, 19 nt, Human
uucuaaaggaguuuauguu

SEQ ID NO: 3892430 - RNA, 18 nt, Human
uucuaaaggcuaccuuug

SEQ ID NO: 3892431 - RNA, 19 nt, Human
uucuaaaggcuaccuuugu

SEQ ID NO: 3892432 - RNA, 21 nt, Human
uucuaaaggcuaccuuuguau

SEQ ID NO: 3892433 - RNA, 16 nt, Human
uucuaaagguccacag

SEQ ID NO: 3892434 - RNA, 22 nt, Human
uucuaaagguguugucccuucu

SEQ ID NO: 3892435 - RNA, 13 nt, Human
uucuaaaguacug

SEQ ID NO: 3892436 - RNA, 20 nt, Human
uucuaaaguucuaagauucu

SEQ ID NO: 3892437 - RNA, 22 nt, Human
uucuaaauaaaauauaauuguu

SEQ ID NO: 3892438 - RNA, 23 nt, Human
uucuaaauaaaauauaauuguuu

SEQ ID NO: 3892439 - RNA, 19 nt, Human
uucuaaaucuccaaaauaa

SEQ ID NO: 3892440 - RNA, 21 nt, Human
uucuaaaucuccaaaauaaaa

SEQ ID NO: 3892441 - RNA, 12 nt, Human
uucuaaaugaau

SEQ ID NO: 3892442 - RNA, 15 nt, Human
uucuaaaugaauguu

SEQ ID NO: 3892443 - RNA, 20 nt, Human
uucuaaaugcauauccugag

SEQ ID NO: 3892444 - RNA, 19 nt, Human
uucuaacaaaaaaauauau

SEQ ID NO: 3892445 - RNA, 19 nt, Human
uucuaaccaagaggcuggu

SEQ ID NO: 3892446 - RNA, 24 nt, Human
uucuaaccuugaaugcugccagug

SEQ ID NO: 3892447 - RNA, 16 nt, Human
uucuaaccuuuacaug

SEQ ID NO: 3892448 - RNA, 23 nt, Human
uucuaacuacaaagguuuaaaug

SEQ ID NO: 3892449 - RNA, 16 nt, Human
uucuaagacucaaaug

SEQ ID NO: 3892450 - RNA, 17 nt, Human
uucuaagacuuuacuua

SEQ ID NO: 3892451 - RNA, 13 nt, Human
uucuaagagaagu

SEQ ID NO: 3892452 - RNA, 18 nt, Human
uucuaagagaaguuauuu

SEQ ID NO: 3892453 - RNA, 20 nt, Human
uucuaagaugugauauucua

SEQ ID NO: 3892454 - RNA, 23 nt, Human
uucuaagaugugauauucuaaga

SEQ ID NO: 3892455 - RNA, 15 nt, Human
uucuaagauucuaaa

SEQ ID NO: 3892456 - RNA, 17 nt, Human
uucuaagcauaaaagau

SEQ ID NO: 3892457 - RNA, 15 nt, Human
uucuaaggccuagga

SEQ ID NO: 3892458 - RNA, 17 nt, Human
uucuaaggccuaggauu

SEQ ID NO: 3892459 - RNA, 19 nt, Human
uucuaaggccuaggauucu

SEQ ID NO: 3892460 - RNA, 22 nt, Human
uucuaaggccuaggauucuaaa

SEQ ID NO: 3892461 - RNA, 17 nt, Human
uucuaaggcucugagag

SEQ ID NO: 3892462 - RNA, 23 nt, Human
uucuaagguccgguguucuaaga

SEQ ID NO: 3892463 - RNA, 17 nt, Human
uucuaaguaaaaccaca

SEQ ID NO: 3892464 - RNA, 23 nt, Human
uucuaagucaaacacuugugacu

SEQ ID NO: 3892465 - RNA, 18 nt, Human
uucuaagucauucauaaa

SEQ ID NO: 3892466 - RNA, 15 nt, Human
uucuaagucuuucca

SEQ ID NO: 3892467 - RNA, 22 nt, Human
uucuaagugaaauuucuagccu

SEQ ID NO: 3892468 - RNA, 13 nt, Human
uucuaaguuucua

SEQ ID NO: 3892469 - RNA, 16 nt, Human
uucuaaguuucuaaga

SEQ ID NO: 3892470 - RNA, 17 nt, Human
uucuaaguuucuaagau

SEQ ID NO: 3892471 - RNA, 20 nt, Human
uucuaaguuucuaagauucu

SEQ ID NO: 3892472 - RNA, 19 nt, Human
uucuaauaauuucuaaugu

SEQ ID NO: 3892473 - RNA, 18 nt, Human
uucuaauauuuauugcuu

SEQ ID NO: 3892474 - RNA, 13 nt, Human
uucuaaucugcua

SEQ ID NO: 3892475 - RNA, 13 nt, Human
uucuaaucuuuua

SEQ ID NO: 3892476 - RNA, 16 nt, Human
uucuaaugauggccca

SEQ ID NO: 3892477 - RNA, 23 nt, Human
uucuaaugugugaaucagagcac

SEQ ID NO: 3892478 - RNA, 16 nt, Human
uucuaauuauguagcu

SEQ ID NO: 3892479 - RNA, 17 nt, Human
uucuaauuccuguuugu

SEQ ID NO: 3892480 - RNA, 13 nt, Human
uucuaauugcuua

SEQ ID NO: 3892481 - RNA, 14 nt, Human
uucuaauugcuuau

SEQ ID NO: 3892482 - RNA, 17 nt, Human
uucuaauuggcaugaag

SEQ ID NO: 3892483 - RNA, 21 nt, Human
uucuaauuucaaaaauauaac

SEQ ID NO: 3892484 - RNA, 17 nt, Human
uucuacaaucuauuuau

SEQ ID NO: 3892485 - RNA, 12 nt, Human
uucuacaauuaa

SEQ ID NO: 3892486 - RNA, 19 nt, Human
uucuacacagugggaacuc

SEQ ID NO: 3892487 - RNA, 11 nt, Human
uucuacacucu

SEQ ID NO: 3892488 - RNA, 15 nt, Human
uucuacagcaaauuu

SEQ ID NO: 3892489 - RNA, 16 nt, Human
uucuacagcaaauuua

SEQ ID NO: 3892490 - RNA, 20 nt, Human
uucuacagcaaauuuauaau

SEQ ID NO: 3892491 - RNA, 21 nt, Human
uucuacagcaaauuuauaauu

SEQ ID NO: 3892492 - RNA, 17 nt, Human
uucuacaguauuaugua

SEQ ID NO: 3892493 - RNA, 21 nt, Human
uucuacagugguuuuauacug

SEQ ID NO: 3892494 - RNA, 17 nt, Human
uucuacauuucuuagac

SEQ ID NO: 3892495 - RNA, 16 nt, Human
uucuaccaaggcauau

SEQ ID NO: 3892496 - RNA, 21 nt, Human
uucuaccacacagcagcaguu

SEQ ID NO: 3892497 - RNA, 16 nt, Human
uucuacccguuccaaa

SEQ ID NO: 3892498 - RNA, 17 nt, Human
uucuacccguuccaaaa

SEQ ID NO: 3892499 - RNA, 21 nt, Human
uucuacccuagccauuccugg

SEQ ID NO: 3892500 - RNA, 13 nt, Human
uucuaccucccag

SEQ ID NO: 3892501 - RNA, 11 nt, Human
uucuaccugcc

SEQ ID NO: 3892502 - RNA, 18 nt, Human
uucuaccuugaggucuuu

SEQ ID NO: 3892503 - RNA, 19 nt, Human
uucuaccuugaggucuuuu

SEQ ID NO: 3892504 - RNA, 14 nt, Human
uucuacguuucuuu

SEQ ID NO: 3892505 - RNA, 19 nt, Human
uucuacucacuuuucccac

SEQ ID NO: 3892506 - RNA, 22 nt, Human
uucuacucgaguuacagacaaa

SEQ ID NO: 3892507 - RNA, 14 nt, Human
uucuacucucccau

SEQ ID NO: 3892508 - RNA, 19 nt, Human
uucuacucucccauggcuu

SEQ ID NO: 3892509 - RNA, 13 nt, Human
uugcaguggaaga

SEQ ID NO: 3892510 - RNA, 14 nt, Human
uugcauaaaauugg

SEQ ID NO: 3892511 - RNA, 20 nt, Human
uugcauaauaagcuaaagag

SEQ ID NO: 3892512 - RNA, 14 nt, Human
uugcauagaauaaa

SEQ ID NO: 3892513 - RNA, 17 nt, Human
uugcauaguucuagugc

SEQ ID NO: 3892514 - RNA, 16 nt, Human
uugcauaugagccgug

SEQ ID NO: 3892515 - RNA, 14 nt, Human
uugcaucagaaaug

SEQ ID NO: 3892516 - RNA, 15 nt, Human
uugcaucaguauuaa

SEQ ID NO: 3892517 - RNA, 21 nt, Human
uugcaucaguauuaauacuaa

SEQ ID NO: 3892518 - RNA, 21 nt, Human
uugcauccuuccuauaacuug

SEQ ID NO: 3892519 - RNA, 20 nt, Human
uugcaucuagguaauuuuua

SEQ ID NO: 3892520 - RNA, 20 nt, Human
uugcaucucccagauaaugu

SEQ ID NO: 3892521 - RNA, 14 nt, Human
uugcaucugaaaau

SEQ ID NO: 3892522 - RNA, 17 nt, Human
uugcaucugaaauagga

SEQ ID NO: 3892523 - RNA, 21 nt, Human
uugcaucuggguagcuguaag

SEQ ID NO: 3892524 - RNA, 23 nt, Human
uugcaucuguauaaguaagaaaa

SEQ ID NO: 3892525 - RNA, 18 nt, Human
uugcaugaagagaagcaa

SEQ ID NO: 3892526 - RNA, 12 nt, Human
uugcaugaggcu

SEQ ID NO: 3892527 - RNA, 13 nt, Human
uugcaugcaugca

SEQ ID NO: 3892528 - RNA, 17 nt, Human
uugcaugcaugcaaaug

SEQ ID NO: 3892529 - RNA, 15 nt, Human
uugcaugcugcuuua

SEQ ID NO: 3892530 - RNA, 21 nt, Human
uugcauggaaaucagccaagu

SEQ ID NO: 3892531 - RNA, 20 nt, Human
uugcauggcuccagaaaugu

SEQ ID NO: 3892532 - RNA, 16 nt, Human
uugcauggguuuugua

SEQ ID NO: 3892533 - RNA, 20 nt, Human
uugcaugugaaaaucaaaua

SEQ ID NO: 3892534 - RNA, 15 nt, Human
uugcaugugacucug

SEQ ID NO: 3892535 - RNA, 16 nt, Human
uugcaugugacucuga

SEQ ID NO: 3892536 - RNA, 17 nt, Human
uugcaugugacucugaa

SEQ ID NO: 3892537 - RNA, 15 nt, Human
uugcauguggaucaa

SEQ ID NO: 3892538 - RNA, 13 nt, Human
uugcauguuugaa

SEQ ID NO: 3892539 - RNA, 13 nt, Human
uugcauuaugcaa

SEQ ID NO: 3892540 - RNA, 16 nt, Human
uugcauuauucauuua

SEQ ID NO: 3892541 - RNA, 17 nt, Human
uugcauuauucauuuag

SEQ ID NO: 3892542 - RNA, 17 nt, Human
uugcauuccuuugucuu

SEQ ID NO: 3892543 - RNA, 12 nt, Human
uugcauucuauu

SEQ ID NO: 3892544 - RNA, 15 nt, Human
uugcauucuauugcc

SEQ ID NO: 3892545 - RNA, 16 nt, Human
uugcauucuauugccu

SEQ ID NO: 3892546 - RNA, 17 nt, Human
uugcauucuauugccuu

SEQ ID NO: 3892547 - RNA, 12 nt, Human
uugcauucuccc

SEQ ID NO: 3892548 - RNA, 22 nt, Human
uugcauugaacacaaacuguaa

SEQ ID NO: 3892549 - RNA, 20 nt, Human
uugcauuuaaaacagacacu

SEQ ID NO: 3892550 - RNA, 22 nt, Human
uugcauuuaaaacagacacugg

SEQ ID NO: 3892551 - RNA, 13 nt, Human
uugcauuucagaa

SEQ ID NO: 3892552 - RNA, 20 nt, Human
uugcauuucagaaagccuuu

SEQ ID NO: 3892553 - RNA, 12 nt, Human
uugcauuuggaa

SEQ ID NO: 3892554 - RNA, 21 nt, Human
uugcauuuggauugggguccc

SEQ ID NO: 3892555 - RNA, 18 nt, Human
uugcauuuguuuuguuua

SEQ ID NO: 3892556 - RNA, 22 nt, Human
uugcauuuguuuuguuuacaga

SEQ ID NO: 3892557 - RNA, 17 nt, Human
uugcauuuuaaaaauga

SEQ ID NO: 3892558 - RNA, 15 nt, Human
uugccaaaaaggggu

SEQ ID NO: 3892559 - RNA, 18 nt, Human
uugccaaaacccagcugc

SEQ ID NO: 3892560 - RNA, 21 nt, Human
uugccaaaacccagcugcacc

SEQ ID NO: 3892561 - RNA, 13 nt, Human
uugccaaaauaau

SEQ ID NO: 3892562 - RNA, 19 nt, Human
uugccaaaauaaugucuug

SEQ ID NO: 3892563 - RNA, 19 nt, Human
uugccaaaauucauuucua

SEQ ID NO: 3892564 - RNA, 13 nt, Human
uugccaaacauua

SEQ ID NO: 3892565 - RNA, 15 nt, Human
uugccaaacauuaau

SEQ ID NO: 3892566 - RNA, 21 nt, Human
uugccaaaguacagaauuuga

SEQ ID NO: 3892567 - RNA, 18 nt, Human
uugccaaauauguccugg

SEQ ID NO: 3892568 - RNA, 16 nt, Human
uugccaacauugccua

SEQ ID NO: 3892569 - RNA, 21 nt, Human
uugccaaccuguaauaaauau

SEQ ID NO: 3892570 - RNA, 16 nt, Human
uugccaagacaaauca

SEQ ID NO: 3892571 - RNA, 17 nt, Human
uugccaagacaaaucaa

SEQ ID NO: 3892572 - RNA, 21 nt, Human
uugccaaugaggucugaaaug

SEQ ID NO: 3892573 - RNA, 23 nt, Human
uugccaauuugcacauuaaauga

SEQ ID NO: 3892574 - RNA, 14 nt, Human
uugccaauuuuccu

SEQ ID NO: 3892575 - RNA, 14 nt, Human
uugccacagcuuuu

SEQ ID NO: 3892576 - RNA, 15 nt, Human
uugccacaggccucc

SEQ ID NO: 3892577 - RNA, 16 nt, Human
uugccacaggccuccc

SEQ ID NO: 3892578 - RNA, 18 nt, Human
uugccaccaccucugugg

SEQ ID NO: 3892579 - RNA, 13 nt, Human
uugccaccaggag

SEQ ID NO: 3892580 - RNA, 16 nt, Human
uugccaccaggagaac

SEQ ID NO: 3892581 - RNA, 17 nt, Human
uugccaccccacccucc

SEQ ID NO: 3892582 - RNA, 19 nt, Human
uugccaccccacccucccu

SEQ ID NO: 3892583 - RNA, 22 nt, Human
uugccaccccacccucccugga

SEQ ID NO: 3892584 - RNA, 16 nt, Human
uugccacccucaugcu

SEQ ID NO: 3892585 - RNA, 22 nt, Human
uugccacugagagaucugcugu

SEQ ID NO: 3892586 - RNA, 20 nt, Human
uugccagaaagcauaaaauu

SEQ ID NO: 3892587 - RNA, 14 nt, Human
uugccagagaugga

SEQ ID NO: 3892588 - RNA, 18 nt, Human
uugccagcugacaucuug

SEQ ID NO: 3892589 - RNA, 22 nt, Human
uugccagcugcugagccgcaga

SEQ ID NO: 3892590 - RNA, 12 nt, Human
uugccagcuuuu

SEQ ID NO: 3892591 - RNA, 18 nt, Human
uugccagcuuuuccuccc

SEQ ID NO: 3892592 - RNA, 22 nt, Human
uugccagcuuuuccucccuugg

SEQ ID NO: 3892593 - RNA, 12 nt, Human
uugccaggcuag

SEQ ID NO: 3892594 - RNA, 13 nt, Human
uugccagucaccc

SEQ ID NO: 3892595 - RNA, 13 nt, Human
uugccagugucuu

SEQ ID NO: 3892596 - RNA, 18 nt, Human
uugccagugucuuucuuu

SEQ ID NO: 3892597 - RNA, 22 nt, Human
uugccauacuuugucugaaaaa

SEQ ID NO: 3892598 - RNA, 23 nt, Human
uugccauccccuauggaccagaa

SEQ ID NO: 3892599 - RNA, 16 nt, Human
uugccaucccucccuc

SEQ ID NO: 3892600 - RNA, 22 nt, Human
uugccaucccucccuccaccuc

SEQ ID NO: 3892601 - RNA, 23 nt, Human
uugccaucccucccuccaccucc

SEQ ID NO: 3892602 - RNA, 21 nt, Human
uugccauccuaaaagccaccc

SEQ ID NO: 3892603 - RNA, 20 nt, Human
uugccauggaguugugauca

SEQ ID NO: 3892604 - RNA, 22 nt, Human
uugccaugggcuucacuguaua

SEQ ID NO: 3892605 - RNA, 16 nt, Human
uugccauguuggccag

SEQ ID NO: 3892606 - RNA, 17 nt, Human
uugccauuggacaguug

SEQ ID NO: 3892607 - RNA, 18 nt, Human
uugccauuggacaguugu

SEQ ID NO: 3892608 - RNA, 19 nt, Human
uugcccaaccucagcaacc

SEQ ID NO: 3892609 - RNA, 18 nt, Human
uugcccacaccgagggcg

SEQ ID NO: 3892610 - RNA, 13 nt, Human
uugcccacgcugg

SEQ ID NO: 3892611 - RNA, 17 nt, Human
uugcccacuccugcucu

SEQ ID NO: 3892612 - RNA, 12 nt, Human
uugcccagagau

SEQ ID NO: 3892613 - RNA, 16 nt, Human
uugcccagagaugccu

SEQ ID NO: 3892614 - RNA, 11 nt, Human
uugcccaggca

SEQ ID NO: 3892615 - RNA, 13 nt, Human
uugcccaggcagg

SEQ ID NO: 3892616 - RNA, 14 nt, Human
uugcccaggcaggu

SEQ ID NO: 3892617 - RNA, 20 nt, Human
uugcccaugcugggcucccg

SEQ ID NO: 3892618 - RNA, 16 nt, Human
uugccccaacccccag

SEQ ID NO: 3892619 - RNA, 17 nt, Human
uugccccaacccccagc

SEQ ID NO: 3892620 - RNA, 17 nt, Human
uugccccaacccuucuu

SEQ ID NO: 3892621 - RNA, 15 nt, Human
uugcccccagggcac

SEQ ID NO: 3892622 - RNA, 22 nt, Human
uugcccccagggcacuucacag

SEQ ID NO: 3892623 - RNA, 14 nt, Human
uugccccccuggcc

SEQ ID NO: 3892624 - RNA, 23 nt, Human
uugccccggccccggccccagcc

SEQ ID NO: 3892625 - RNA, 17 nt, Human
uugcccggauucuggga

SEQ ID NO: 3892626 - RNA, 14 nt, Human
uugcccuaagcaga

SEQ ID NO: 3892627 - RNA, 15 nt, Human
uugcccuaagcagaa

SEQ ID NO: 3892628 - RNA, 16 nt, Human
uugcccuaagcagaaa

SEQ ID NO: 3892629 - RNA, 19 nt, Human
uugcccuaagcagaaagug

SEQ ID NO: 3892630 - RNA, 15 nt, Human
uugcccucccauccc

SEQ ID NO: 3892631 - RNA, 15 nt, Human
uugcccugaccuccc

SEQ ID NO: 3892632 - RNA, 23 nt, Human
uugcccugguuucacuggcccaa

SEQ ID NO: 3892633 - RNA, 11 nt, Human
uugcccuuccc

SEQ ID NO: 3892634 - RNA, 22 nt, Human
uugccgcgucgcccucccaggc

SEQ ID NO: 3892635 - RNA, 13 nt, Human
uugccgucuaccu

SEQ ID NO: 3892636 - RNA, 21 nt, Human
uugccguugccaagaacugaa

SEQ ID NO: 3892637 - RNA, 13 nt, Human
uugccuaaaucca

SEQ ID NO: 3892638 - RNA, 14 nt, Human
uugccuaaauccau

SEQ ID NO: 3892639 - RNA, 22 nt, Human
uugccuaaauccauuuggaaau

SEQ ID NO: 3892640 - RNA, 18 nt, Human
uugccuaaauuuaaugcu

SEQ ID NO: 3892641 - RNA, 19 nt, Human
uugccucagcuuccccagu

SEQ ID NO: 3892642 - RNA, 21 nt, Human
uugccucagucccccaacaga

SEQ ID NO: 3892643 - RNA, 12 nt, Human
uugccuccaggu

SEQ ID NO: 3892644 - RNA, 17 nt, Human
uugccuccccauuuccc

SEQ ID NO: 3892645 - RNA, 15 nt, Human
uugccuccuguguaa

SEQ ID NO: 3892646 - RNA, 20 nt, Human
uugccucggcuccugcugca

SEQ ID NO: 3892647 - RNA, 12 nt, Human
uugccucuacuu

SEQ ID NO: 3892648 - RNA, 19 nt, Human
uugccucucgguugaaacc

SEQ ID NO: 3892649 - RNA, 19 nt, Human
uugccucugugcugugugu

SEQ ID NO: 3892650 - RNA, 17 nt, Human
uugccucuuccagucuu

SEQ ID NO: 3892651 - RNA, 19 nt, Human
uugccucuuccagucuucc

SEQ ID NO: 3892652 - RNA, 16 nt, Human
uugccugauauaaaug

SEQ ID NO: 3892653 - RNA, 20 nt, Human
uugccugaugacaauaaagc

SEQ ID NO: 3892654 - RNA, 18 nt, Human
uuggagaguuuccugaaa

SEQ ID NO: 3892655 - RNA, 21 nt, Human
uuggagcacaaaauucaaagc

SEQ ID NO: 3892656 - RNA, 20 nt, Human
uuggagccccaggggacaag

SEQ ID NO: 3892657 - RNA, 20 nt, Human
uuggagcgagcaucccccaa

SEQ ID NO: 3892658 - RNA, 16 nt, Human
uuggagcuauucaaga

SEQ ID NO: 3892659 - RNA, 17 nt, Human
uuggaggccuuucaucc

SEQ ID NO: 3892660 - RNA, 17 nt, Human
uuggagggucccaagcu

SEQ ID NO: 3892661 - RNA, 21 nt, Human
uuggagggucccaagcugggc

SEQ ID NO: 3892662 - RNA, 18 nt, Human
uuggaggugcuuaagcag

SEQ ID NO: 3892663 - RNA, 13 nt, Human
uuggagucacucu

SEQ ID NO: 3892664 - RNA, 21 nt, Human
uuggagucacucuuaugcugu

SEQ ID NO: 3892665 - RNA, 15 nt, Human
uuggagucacugcca

SEQ ID NO: 3892666 - RNA, 20 nt, Human
uuggagugaguguggcuccc

SEQ ID NO: 3892667 - RNA, 16 nt, Human
uuggaguguuauguau

SEQ ID NO: 3892668 - RNA, 19 nt, Human
uuggaguguuccccuucca

SEQ ID NO: 3892669 - RNA, 22 nt, Human
uuggaguguuccccuuccacug

SEQ ID NO: 3892670 - RNA, 14 nt, Human
uuggaguguuucua

SEQ ID NO: 3892671 - RNA, 13 nt, Human
uuggaguuaaaau

SEQ ID NO: 3892672 - RNA, 18 nt, Human
uuggaguucauucauauu

SEQ ID NO: 3892673 - RNA, 21 nt, Human
uuggaguucauucauauuaca

SEQ ID NO: 3892674 - RNA, 16 nt, Human
uuggauaaacaacauu

SEQ ID NO: 3892675 - RNA, 19 nt, Human
uuggauacuuggauuuagu

SEQ ID NO: 3892676 - RNA, 19 nt, Human
uuggauauguaaaacauuu

SEQ ID NO: 3892677 - RNA, 13 nt, Human
uuggauccaagga

SEQ ID NO: 3892678 - RNA, 23 nt, Human
uuggaugcagugcucgcuguugc

SEQ ID NO: 3892679 - RNA, 20 nt, Human
uuggaugggagugagacaga

SEQ ID NO: 3892680 - RNA, 16 nt, Human
uuggauguugagaggu

SEQ ID NO: 3892681 - RNA, 15 nt, Human
uuggauuauccugag

SEQ ID NO: 3892682 - RNA, 13 nt, Human
uuggauuauucau

SEQ ID NO: 3892683 - RNA, 21 nt, Human
uuggauuauucuuucuccuuu

SEQ ID NO: 3892684 - RNA, 19 nt, Human
uuggauuauuuaauaacau

SEQ ID NO: 3892685 - RNA, 21 nt, Human
uuggauuauuuaauaacauua

SEQ ID NO: 3892686 - RNA, 22 nt, Human
uuggauucccuuaaacaaaagu

SEQ ID NO: 3892687 - RNA, 15 nt, Human
uuggauucugagagc

SEQ ID NO: 3892688 - RNA, 20 nt, Human
uuggauucuuuccauuugca

SEQ ID NO: 3892689 - RNA, 14 nt, Human
uuggauuggggucc

SEQ ID NO: 3892690 - RNA, 18 nt, Human
uuggauuguauauugugu

SEQ ID NO: 3892691 - RNA, 14 nt, Human
uuggauuguccccg

SEQ ID NO: 3892692 - RNA, 15 nt, Human
uuggauuguccccga

SEQ ID NO: 3892693 - RNA, 22 nt, Human
uuggauuuccuaauacugucau

SEQ ID NO: 3892694 - RNA, 22 nt, Human
uuggauuugacauugcguuuga

SEQ ID NO: 3892695 - RNA, 14 nt, Human
uuggauuuggagag

SEQ ID NO: 3892696 - RNA, 14 nt, Human
uuggauuuguuuaa

SEQ ID NO: 3892697 - RNA, 13 nt, Human
uuggauuuuaugu

SEQ ID NO: 3892698 - RNA, 20 nt, Human
uuggauuuuauguugacauu

SEQ ID NO: 3892699 - RNA, 24 nt, Human
uuggauuuuauguugacauuuguu

SEQ ID NO: 3892700 - RNA, 23 nt, Human
uuggauuuuuaauuaaaaacuag

SEQ ID NO: 3892701 - RNA, 23 nt, Human
uuggcaaacucuccaccacacgu

SEQ ID NO: 3892702 - RNA, 15 nt, Human
uuggcaacagaagca

SEQ ID NO: 3892703 - RNA, 13 nt, Human
uuggcaaggaaag

SEQ ID NO: 3892704 - RNA, 18 nt, Human
uuggcaauaaauuuugaa

SEQ ID NO: 3892705 - RNA, 20 nt, Human
uuggcaauaaauuuugaaaa

SEQ ID NO: 3892706 - RNA, 16 nt, Human
uuggcaauaguuugca

SEQ ID NO: 3892707 - RNA, 12 nt, Human
uuggcaauuuug

SEQ ID NO: 3892708 - RNA, 14 nt, Human
uuggcaauuuugug

SEQ ID NO: 3892709 - RNA, 11 nt, Human
uuggcaccaaa

SEQ ID NO: 3892710 - RNA, 23 nt, Human
uuggcaccaaagaugcagccgcc

SEQ ID NO: 3892711 - RNA, 21 nt, Human
uuggcaccagacacccaggac

SEQ ID NO: 3892712 - RNA, 17 nt, Human
uuggcaccgaagcccag

SEQ ID NO: 3892713 - RNA, 22 nt, Human
uuggcacucacagaccuggagc

SEQ ID NO: 3892714 - RNA, 20 nt, Human
uuggcacuugccauuccaaa

SEQ ID NO: 3892715 - RNA, 13 nt, Human
uuggcagaugcag

SEQ ID NO: 3892716 - RNA, 12 nt, Human
uuggcagcaggu

SEQ ID NO: 3892717 - RNA, 14 nt, Human
uuggcagccuugug

SEQ ID NO: 3892718 - RNA, 21 nt, Human
uuggcagggguggaggagagc

SEQ ID NO: 3892719 - RNA, 16 nt, Human
uuggcagguccuggcc

SEQ ID NO: 3892720 - RNA, 14 nt, Human
uuggcaguuuggua

SEQ ID NO: 3892721 - RNA, 15 nt, Human
uuggcaguuugguau

SEQ ID NO: 3892722 - RNA, 20 nt, Human
uuggcauaacauaaaucugu

SEQ ID NO: 3892723 - RNA, 22 nt, Human
uuggcauaacauaaaucuguga

SEQ ID NO: 3892724 - RNA, 16 nt, Human
uuggcauagcucuggg

SEQ ID NO: 3892725 - RNA, 21 nt, Human
uuggcaucacagggcagagcc

SEQ ID NO: 3892726 - RNA, 15 nt, Human
uuggcaucagcuggc

SEQ ID NO: 3892727 - RNA, 13 nt, Human
uuggcaucccugg

SEQ ID NO: 3892728 - RNA, 15 nt, Human
uuggcaucccugggc

SEQ ID NO: 3892729 - RNA, 22 nt, Human
uuggcauggaaauuuaaagcag

SEQ ID NO: 3892730 - RNA, 19 nt, Human
uuggcauggauuucugucu

SEQ ID NO: 3892731 - RNA, 16 nt, Human
uuggcauguguauguu

SEQ ID NO: 3892732 - RNA, 12 nt, Human
uuggcauuugca

SEQ ID NO: 3892733 - RNA, 24 nt, Human
uuggccaaagccaaagcuaggccu

SEQ ID NO: 3892734 - RNA, 22 nt, Human
uuggccaaugcaccuaaagaaa

SEQ ID NO: 3892735 - RNA, 15 nt, Human
uuggccacagccagg

SEQ ID NO: 3892736 - RNA, 20 nt, Human
uuggccaccaggugccuuuc

SEQ ID NO: 3892737 - RNA, 22 nt, Human
uuggccacuccgagaggugggc

SEQ ID NO: 3892738 - RNA, 22 nt, Human
uuggccagccaacucugggaau

SEQ ID NO: 3892739 - RNA, 13 nt, Human
uuggccaugcaga

SEQ ID NO: 3892740 - RNA, 14 nt, Human
uuggcccaggaguu

SEQ ID NO: 3892741 - RNA, 15 nt, Human
uuggcccaggaguuu

SEQ ID NO: 3892742 - RNA, 21 nt, Human
uuggcccagggggcuuccuga

SEQ ID NO: 3892743 - RNA, 21 nt, Human
uuggccccccgaccuuguaga

SEQ ID NO: 3892744 - RNA, 14 nt, Human
uuggcccuuuccuu

SEQ ID NO: 3892745 - RNA, 21 nt, Human
uuggccggcugugcucagaga

SEQ ID NO: 3892746 - RNA, 13 nt, Human
uuggccuccggcc

SEQ ID NO: 3892747 - RNA, 11 nt, Human
uuggccugagu

SEQ ID NO: 3892748 - RNA, 21 nt, Human
uuggccugcuaaggucuugga

SEQ ID NO: 3892749 - RNA, 12 nt, Human
uuggccugcugu

SEQ ID NO: 3892750 - RNA, 14 nt, Human
uuggccugcuguga

SEQ ID NO: 3892751 - RNA, 23 nt, Human
uuggccugucuuuggauuguuaa

SEQ ID NO: 3892752 - RNA, 22 nt, Human
uuggccuucagaaccauccaua

SEQ ID NO: 3892753 - RNA, 18 nt, Human
uuggcgaaucucaaaauu

SEQ ID NO: 3892754 - RNA, 15 nt, Human
uuggcgcacccuccc

SEQ ID NO: 3892755 - RNA, 17 nt, Human
uuggcgcuauuacaaau

SEQ ID NO: 3892756 - RNA, 19 nt, Human
uuggcguagcagaguuaaa

SEQ ID NO: 3892757 - RNA, 17 nt, Human
uuggcguaggcuacaga

SEQ ID NO: 3892758 - RNA, 18 nt, Human
uuggcuagagguucaaag

SEQ ID NO: 3892759 - RNA, 22 nt, Human
uuggcuagagguucaaagauau

SEQ ID NO: 3892760 - RNA, 17 nt, Human
uuggcucaauaaagauu

SEQ ID NO: 3892761 - RNA, 14 nt, Human
uuggcucagacaug

SEQ ID NO: 3892762 - RNA, 22 nt, Human
uuggcucccauucacucuucca

SEQ ID NO: 3892763 - RNA, 22 nt, Human
uuggcucgaaucucugugccuu

SEQ ID NO: 3892764 - RNA, 13 nt, Human
uuggcucugccag

SEQ ID NO: 3892765 - RNA, 16 nt, Human
uuggcucugccagucc

SEQ ID NO: 3892766 - RNA, 22 nt, Human
uuggcucuggagacagccccag

SEQ ID NO: 3892767 - RNA, 23 nt, Human
uuggcugagauaugaacauauug

SEQ ID NO: 3892768 - RNA, 16 nt, Human
uuggcugcugaaggcu

SEQ ID NO: 3892769 - RNA, 20 nt, Human
uuggcuggaugaaauuuucu

SEQ ID NO: 3892770 - RNA, 21 nt, Human
uuggcugggggccucagugcc

SEQ ID NO: 3892771 - RNA, 22 nt, Human
uuggcuggugugguacagagaa

SEQ ID NO: 3892772 - RNA, 23 nt, Human
uuggcuggugugguacagagaag

SEQ ID NO: 3892773 - RNA, 16 nt, Human
uuggcuuaaucauuuu

SEQ ID NO: 3892774 - RNA, 16 nt, Human
uuggcuuaccugaccu

SEQ ID NO: 3892775 - RNA, 14 nt, Human
uuggcuuauaauuc

SEQ ID NO: 3892776 - RNA, 17 nt, Human
uuggcuuccuuucuugg

SEQ ID NO: 3892777 - RNA, 16 nt, Human
uuggcuugccauuuuu

SEQ ID NO: 3892778 - RNA, 18 nt, Human
uuggcuuguagaauuguu

SEQ ID NO: 3892779 - RNA, 17 nt, Human
uuggcuuuaaacacccu

SEQ ID NO: 3892780 - RNA, 22 nt, Human
uuggcuuuaaacacccuucaca

SEQ ID NO: 3892781 - RNA, 21 nt, Human
uuggcuuuauccucuuuagag

SEQ ID NO: 3892782 - RNA, 21 nt, Human
uuggcuuucaugaggaggcag

SEQ ID NO: 3892783 - RNA, 16 nt, Human
uuggcuuuguuuggau

SEQ ID NO: 3892784 - RNA, 15 nt, Human
uuggcuuuucugauc

SEQ ID NO: 3892785 - RNA, 16 nt, Human
uugggaaaacauguua

SEQ ID NO: 3892786 - RNA, 17 nt, Human
uugggaaaacauuugcu

SEQ ID NO: 3892787 - RNA, 19 nt, Human
uugggaaacuugucacuug

SEQ ID NO: 3892788 - RNA, 21 nt, Human
uugggaaacuugucacuugca

SEQ ID NO: 3892789 - RNA, 17 nt, Human
uugggaagagcuuagaa

SEQ ID NO: 3892790 - RNA, 18 nt, Human
uugggaagagcuuagaaa

SEQ ID NO: 3892791 - RNA, 23 nt, Human
uugggaaugaggaaaauucuuaa

SEQ ID NO: 3892792 - RNA, 14 nt, Human
uugggacaccaggg

SEQ ID NO: 3892793 - RNA, 22 nt, Human
uugggacccaguggcagggcac

SEQ ID NO: 3892794 - RNA, 14 nt, Human
uugggaccccuggu

SEQ ID NO: 3892795 - RNA, 18 nt, Human
uugggacuggggcugaag

SEQ ID NO: 3892796 - RNA, 15 nt, Human
uugggagagggcgca

SEQ ID NO: 3892797 - RNA, 15 nt, Human
uuuaucccuuaagaa

SEQ ID NO: 3892798 - RNA, 16 nt, Human
uuuaucccuuaagaau

SEQ ID NO: 3892799 - RNA, 18 nt, Human
uuuauccugaaauuucag

SEQ ID NO: 3892800 - RNA, 19 nt, Human
uuuauccugaaauuucaga

SEQ ID NO: 3892801 - RNA, 16 nt, Human
uuuaucgcagaccuuu

SEQ ID NO: 3892802 - RNA, 21 nt, Human
uuuaucgcccuggcaggcagg

SEQ ID NO: 3892803 - RNA, 16 nt, Human
uuuaucuagauguaaa

SEQ ID NO: 3892804 - RNA, 20 nt, Human
uuuaucuagauguaaauuuu

SEQ ID NO: 3892805 - RNA, 20 nt, Human
uuuaucuauaauuuaccuaa

SEQ ID NO: 3892806 - RNA, 20 nt, Human
uuuaucuauucugagaaaac

SEQ ID NO: 3892807 - RNA, 13 nt, Human
uuuaucuauugua

SEQ ID NO: 3892808 - RNA, 16 nt, Human
uuuaucugaauuuuua

SEQ ID NO: 3892809 - RNA, 15 nt, Human
uuuaucuguucauau

SEQ ID NO: 3892810 - RNA, 13 nt, Human
uuuaucuguuuaa

SEQ ID NO: 3892811 - RNA, 14 nt, Human
uuuaucuugucucu

SEQ ID NO: 3892812 - RNA, 12 nt, Human
uuuaucuuugau

SEQ ID NO: 3892813 - RNA, 14 nt, Human
uuuaugaaaguauu

SEQ ID NO: 3892814 - RNA, 21 nt, Human
uuuaugaaaugguuaagaauu

SEQ ID NO: 3892815 - RNA, 13 nt, Human
uuuaugaagaaaa

SEQ ID NO: 3892816 - RNA, 19 nt, Human
uuuaugaagaaaaaauaca

SEQ ID NO: 3892817 - RNA, 15 nt, Human
uuuaugaaguuuaaa

SEQ ID NO: 3892818 - RNA, 20 nt, Human
uuuaugaaugaaaaaacagu

SEQ ID NO: 3892819 - RNA, 16 nt, Human
uuuaugaauuaaagua

SEQ ID NO: 3892820 - RNA, 14 nt, Human
uuuaugacaguaau

SEQ ID NO: 3892821 - RNA, 17 nt, Human
uuuaugagccagacaaa

SEQ ID NO: 3892822 - RNA, 20 nt, Human
uuuaugagcucauguagcaa

SEQ ID NO: 3892823 - RNA, 14 nt, Human
uuuaugauguauau

SEQ ID NO: 3892824 - RNA, 14 nt, Human
uuuaugauuuaaua

SEQ ID NO: 3892825 - RNA, 18 nt, Human
uuuaugauuuaauaaaau

SEQ ID NO: 3892826 - RNA, 19 nt, Human
uuuaugauuuacucauuau

SEQ ID NO: 3892827 - RNA, 14 nt, Human
uuuaugauuuucau

SEQ ID NO: 3892828 - RNA, 18 nt, Human
uuuaugcaaaagguuuau

SEQ ID NO: 3892829 - RNA, 15 nt, Human
uuuaugcaaggaagg

SEQ ID NO: 3892830 - RNA, 18 nt, Human
uuuaugcaaggucuugca

SEQ ID NO: 3892831 - RNA, 14 nt, Human
uuuaugcagugcug

SEQ ID NO: 3892832 - RNA, 17 nt, Human
uuuaugcagugcugcuu

SEQ ID NO: 3892833 - RNA, 18 nt, Human
uuuaugccggaugugcuu

SEQ ID NO: 3892834 - RNA, 19 nt, Human
uuuaugccuucuuauugcu

SEQ ID NO: 3892835 - RNA, 20 nt, Human
uuuaugccuuuuauuucuua

SEQ ID NO: 3892836 - RNA, 20 nt, Human
uuuaugcucuuuuuuacuca

SEQ ID NO: 3892837 - RNA, 21 nt, Human
uuuaugcugaaacagaauacu

SEQ ID NO: 3892838 - RNA, 15 nt, Human
uuuaugcuuuaaaca

SEQ ID NO: 3892839 - RNA, 14 nt, Human
uuuauggcuuuugu

SEQ ID NO: 3892840 - RNA, 24 nt, Human
uuuauggcuuuugugcauuaucua

SEQ ID NO: 3892841 - RNA, 18 nt, Human
uuuaugggcauugacaaa

SEQ ID NO: 3892842 - RNA, 22 nt, Human
uuuaugggucagaguuccgacu

SEQ ID NO: 3892843 - RNA, 23 nt, Human
uuuaugguaacugcuuucuguuc

SEQ ID NO: 3892844 - RNA, 21 nt, Human
uuuaugguccuaaaagcaaaa

SEQ ID NO: 3892845 - RNA, 19 nt, Human
uuuaugguuauguuuuucu

SEQ ID NO: 3892846 - RNA, 19 nt, Human
uuuauguaaaauuuugccu

SEQ ID NO: 3892847 - RNA, 13 nt, Human
uuuauguaaugaa

SEQ ID NO: 3892848 - RNA, 20 nt, Human
uuuauguaaugaaguaaagc

SEQ ID NO: 3892849 - RNA, 19 nt, Human
uuuauguaguaauugacau

SEQ ID NO: 3892850 - RNA, 16 nt, Human
uuuauguauguuuaca

SEQ ID NO: 3892851 - RNA, 22 nt, Human
uuuauguauguuuacacuguca

SEQ ID NO: 3892852 - RNA, 15 nt, Human
uuuaugugaaacaug

SEQ ID NO: 3892853 - RNA, 13 nt, Human
uuuaugugaauuu

SEQ ID NO: 3892854 - RNA, 17 nt, Human
uuuauguuaaaagauuu

SEQ ID NO: 3892855 - RNA, 14 nt, Human
uuuauguuauauau

SEQ ID NO: 3892856 - RNA, 17 nt, Human
uuuauguuauauauaaa

SEQ ID NO: 3892857 - RNA, 13 nt, Human
uuuauguuauuua

SEQ ID NO: 3892858 - RNA, 15 nt, Human
uuuauguugacauuu

SEQ ID NO: 3892859 - RNA, 22 nt, Human
uuuauguugacauuuguuuggu

SEQ ID NO: 3892860 - RNA, 14 nt, Human
uuuauguuuagaua

SEQ ID NO: 3892861 - RNA, 12 nt, Human
uuuauguuugaa

SEQ ID NO: 3892862 - RNA, 13 nt, Human
uuuauguuuuggu

SEQ ID NO: 3892863 - RNA, 18 nt, Human
uuuauuaaaaacugagug

SEQ ID NO: 3892864 - RNA, 16 nt, Human
uuuauuaaaaucuuaa

SEQ ID NO: 3892865 - RNA, 21 nt, Human
uuuauuaaaaugauuguaaaa

SEQ ID NO: 3892866 - RNA, 22 nt, Human
uuuauuaaaaugauuguaaaau

SEQ ID NO: 3892867 - RNA, 17 nt, Human
uuuauuaaacagauuuu

SEQ ID NO: 3892868 - RNA, 22 nt, Human
uuuauuaaacagauuuuuacaa

SEQ ID NO: 3892869 - RNA, 11 nt, Human
uuuauuaaaga

SEQ ID NO: 3892870 - RNA, 13 nt, Human
uuuauuaaagaaa

SEQ ID NO: 3892871 - RNA, 15 nt, Human
uuuauuaaauacaaa

SEQ ID NO: 3892872 - RNA, 19 nt, Human
uuuauuaaauaguuaauau

SEQ ID NO: 3892873 - RNA, 19 nt, Human
uuuauuaaauguagaaagu

SEQ ID NO: 3892874 - RNA, 20 nt, Human
uuuauuaaauuuguugacaa

SEQ ID NO: 3892875 - RNA, 18 nt, Human
uuuauuaacaaauuaugu

SEQ ID NO: 3892876 - RNA, 17 nt, Human
uuuauuaacuuaauaau

SEQ ID NO: 3892877 - RNA, 14 nt, Human
uuuauuaagauuau

SEQ ID NO: 3892878 - RNA, 12 nt, Human
uuuauuaauguu

SEQ ID NO: 3892879 - RNA, 17 nt, Human
uuuauuaauugcuuuga

SEQ ID NO: 3892880 - RNA, 18 nt, Human
uuuauuacaguauaauua

SEQ ID NO: 3892881 - RNA, 19 nt, Human
uuuauuacguaugucuggu

SEQ ID NO: 3892882 - RNA, 16 nt, Human
uuuauuacuguaagaa

SEQ ID NO: 3892883 - RNA, 19 nt, Human
uuuauuauaaacuguaugc

SEQ ID NO: 3892884 - RNA, 13 nt, Human
uuuauuaugaaac

SEQ ID NO: 3892885 - RNA, 13 nt, Human
uuuauuaugcaug

SEQ ID NO: 3892886 - RNA, 18 nt, Human
uuuauuaugcuguauuuu

SEQ ID NO: 3892887 - RNA, 17 nt, Human
uuuauuauguaaauccc

SEQ ID NO: 3892888 - RNA, 16 nt, Human
uuuauuauuuauuuau

SEQ ID NO: 3892889 - RNA, 13 nt, Human
uuuauuauuucua

SEQ ID NO: 3892890 - RNA, 17 nt, Human
uuuauuauuuucaccug

SEQ ID NO: 3892891 - RNA, 20 nt, Human
uuuauucaagguaaaauucu

SEQ ID NO: 3892892 - RNA, 17 nt, Human
uuuauucaaguuauugu

SEQ ID NO: 3892893 - RNA, 21 nt, Human
uuuauucagcuucauuugugu

SEQ ID NO: 3892894 - RNA, 22 nt, Human
uuuauucagcuucauuuguguc

SEQ ID NO: 3892895 - RNA, 14 nt, Human
uuuauucauaugca

SEQ ID NO: 3892896 - RNA, 16 nt, Human
uuuauucauaugcaua

SEQ ID NO: 3892897 - RNA, 16 nt, Human
uuuauucauuagcugu

SEQ ID NO: 3892898 - RNA, 18 nt, Human
uuuauucauuagcuguga

SEQ ID NO: 3892899 - RNA, 18 nt, Human
uuuauuccagaaugcugu

SEQ ID NO: 3892900 - RNA, 19 nt, Human
uuuauuccagaaugcugua

SEQ ID NO: 3892901 - RNA, 14 nt, Human
uuuauucucauuug

SEQ ID NO: 3892902 - RNA, 14 nt, Human
uuuauucuucuaga

SEQ ID NO: 3892903 - RNA, 12 nt, Human
uuuauucuugau

SEQ ID NO: 3892904 - RNA, 20 nt, Human
uuuauugaauucauuucacu

SEQ ID NO: 3892905 - RNA, 12 nt, Human
uuuauugacaau

SEQ ID NO: 3892906 - RNA, 14 nt, Human
uuuauugacacaga

SEQ ID NO: 3892907 - RNA, 14 nt, Human
uuuauugagaauuu

SEQ ID NO: 3892908 - RNA, 18 nt, Human
uuuauugaggaaaaauau

SEQ ID NO: 3892909 - RNA, 23 nt, Human
uuuauugcuaguauuugaauuaa

SEQ ID NO: 3892910 - RNA, 16 nt, Human
uuuauuggcugagaua

SEQ ID NO: 3892911 - RNA, 21 nt, Human
uuuauuggcuuuucugaucca

SEQ ID NO: 3892912 - RNA, 15 nt, Human
uuuauugguuuugca

SEQ ID NO: 3892913 - RNA, 13 nt, Human
uuuauuguauaaa

SEQ ID NO: 3892914 - RNA, 14 nt, Human
uuuauugucaaagu

SEQ ID NO: 3892915 - RNA, 16 nt, Human
uuuauugucaaagugg

SEQ ID NO: 3892916 - RNA, 13 nt, Human
uuuauugugaucu

SEQ ID NO: 3892917 - RNA, 17 nt, Human
uuuauuguguuugucau

SEQ ID NO: 3892918 - RNA, 22 nt, Human
uuuauuguguuugucauuagcc

SEQ ID NO: 3892919 - RNA, 17 nt, Human
uuuauuguguuuuuaau

SEQ ID NO: 3892920 - RNA, 15 nt, Human
uuuauuguuaauaca

SEQ ID NO: 3892921 - RNA, 15 nt, Human
uuuauuuaaagcauu

SEQ ID NO: 3892922 - RNA, 15 nt, Human
uuuauuuaaaugucu

SEQ ID NO: 3892923 - RNA, 16 nt, Human
uuuauuuacaaauguu

SEQ ID NO: 3892924 - RNA, 19 nt, Human
uuuauuuauauguacuguu

SEQ ID NO: 3892925 - RNA, 22 nt, Human
uuuauuuauccagaaaacugug

SEQ ID NO: 3892926 - RNA, 15 nt, Human
uuuauuuauguacuu

SEQ ID NO: 3892927 - RNA, 14 nt, Human
uuuauuucaaugua

SEQ ID NO: 3892928 - RNA, 15 nt, Human
uuuauuucaauguaa

SEQ ID NO: 3892929 - RNA, 16 nt, Human
uuuauuucagcaaacu

SEQ ID NO: 3892930 - RNA, 17 nt, Human
uuuauuucauugguuaa

SEQ ID NO: 3892931 - RNA, 12 nt, Human
uuuauuuccacu

SEQ ID NO: 3892932 - RNA, 14 nt, Human
uuuauuucuacugu

SEQ ID NO: 3892933 - RNA, 21 nt, Human
uuuauuucuacugucaaauga

SEQ ID NO: 3892934 - RNA, 13 nt, Human
uuuauuucuuuua

SEQ ID NO: 3892935 - RNA, 16 nt, Human
uuuauuugcaacauuu

SEQ ID NO: 3892936 - RNA, 21 nt, Human
uuuauuuuaaaacagaagaau

SEQ ID NO: 3892937 - RNA, 13 nt, Human
uuuauuuuacaca

SEQ ID NO: 3892938 - RNA, 21 nt, Human
uuuauuuuacacagaaacacu

SEQ ID NO: 3892939 - RNA, 19 nt, Human
uuuauuuuacagcucauua

SEQ ID NO: 3892940 - RNA, 14 nt, Human
uuuauuuuacuauu

SEQ ID NO: 3892941 - RNA, 17 nt, Human
uuuauuuuacuauugga

SEQ ID NO: 3892942 - RNA, 15 nt, Human
uuuauuuuagcaguu

SEQ ID NO: 3892943 - RNA, 11 nt, Human
uuuauuuuaua

SEQ ID NO: 3892944 - RNA, 14 nt, Human
uuuauuuugacaua

SEQ ID NO: 3892945 - RNA, 18 nt, Human
uuuauuuugagauguaaa

SEQ ID NO: 3892946 - RNA, 16 nt, Human
uuuauuuuguguuuag

SEQ ID NO: 3892947 - RNA, 20 nt, Human
uuuauuuuguguuuaggaac

SEQ ID NO: 3892948 - RNA, 18 nt, Human
uuuauuuuuaaauuaugu

SEQ ID NO: 3892949 - RNA, 16 nt, Human
uuuauuuuuagaauuu

SEQ ID NO: 3892950 - RNA, 15 nt, Human
uuuauuuuucuaaaa

SEQ ID NO: 3892951 - RNA, 13 nt, Human
uuuauuuuucugu

SEQ ID NO: 3892952 - RNA, 15 nt, Human
uuuauuuuucuguua

SEQ ID NO: 3892953 - RNA, 15 nt, Human
uuuauuuuugcaugg

SEQ ID NO: 3892954 - RNA, 16 nt, Human
uuuauuuuuuagugca

SEQ ID NO: 3892955 - RNA, 16 nt, Human
uuuauuuuuugggaaa

SEQ ID NO: 3892956 - RNA, 13 nt, Human
uuuauuuuuuggu

SEQ ID NO: 3892957 - RNA, 15 nt, Human
uuuauuuuuuuaagu

SEQ ID NO: 3892958 - RNA, 21 nt, Human
uuuauuuuuuuuaauuguauu

SEQ ID NO: 3892959 - RNA, 15 nt, Human
uuucaaaaacacagu

SEQ ID NO: 3892960 - RNA, 18 nt, Human
uuucaaaaauauaacuua

SEQ ID NO: 3892961 - RNA, 21 nt, Human
uuucaaaaauauaacuuaaaa

SEQ ID NO: 3892962 - RNA, 13 nt, Human
uuucaaaaaucug

SEQ ID NO: 3892963 - RNA, 21 nt, Human
uuucaaaaaucugaagauugu

SEQ ID NO: 3892964 - RNA, 13 nt, Human
uuucaaaagacau

SEQ ID NO: 3892965 - RNA, 12 nt, Human
uuucaaaagcau

SEQ ID NO: 3892966 - RNA, 20 nt, Human
uuucaaaagguauuauacau

SEQ ID NO: 3892967 - RNA, 21 nt, Human
uuucaaaagguauuauacaug

SEQ ID NO: 3892968 - RNA, 17 nt, Human
uuucaaaauaaaaauga

SEQ ID NO: 3892969 - RNA, 11 nt, Human
uuucaaaauag

SEQ ID NO: 3892970 - RNA, 19 nt, Human
uuucaaaauagaaaaguua

SEQ ID NO: 3892971 - RNA, 21 nt, Human
uuucaaaauccaaaaagaaau

SEQ ID NO: 3892972 - RNA, 22 nt, Human
uuucaaacaaucaaguugacuc

SEQ ID NO: 3892973 - RNA, 15 nt, Human
uuucaaaccagcuuc

SEQ ID NO: 3892974 - RNA, 20 nt, Human
uuucaaaccaguauacaaga

SEQ ID NO: 3892975 - RNA, 14 nt, Human
uuucaaagaaggaa

SEQ ID NO: 3892976 - RNA, 14 nt, Human
uuucaaagaugcug

SEQ ID NO: 3892977 - RNA, 21 nt, Human
uuucaaaguuuuguuguacuu

SEQ ID NO: 3892978 - RNA, 13 nt, Human
uuucaaauaucac

SEQ ID NO: 3892979 - RNA, 20 nt, Human
uuucaaauuggacuuucaaa

SEQ ID NO: 3892980 - RNA, 20 nt, Human
uuucaacagugaagacagaa

SEQ ID NO: 3892981 - RNA, 17 nt, Human
uuucaacaguuucaaaa

SEQ ID NO: 3892982 - RNA, 21 nt, Human
uuucaacgcagcccugcuuug

SEQ ID NO: 3892983 - RNA, 18 nt, Human
uuucaacucauugcauca

SEQ ID NO: 3892984 - RNA, 22 nt, Human
uuucaagaaaaaauaaauggaa

SEQ ID NO: 3892985 - RNA, 12 nt, Human
uuucaagaauga

SEQ ID NO: 3892986 - RNA, 23 nt, Human
uuucaagaggagcccccacccug

SEQ ID NO: 3892987 - RNA, 13 nt, Human
uuucaagcaucuc

SEQ ID NO: 3892988 - RNA, 22 nt, Human
uuucaagccugccuaggaauuc

SEQ ID NO: 3892989 - RNA, 20 nt, Human
uuucaagcgucacuuuauuu

SEQ ID NO: 3892990 - RNA, 18 nt, Human
uuucaagcuuauuuugga

SEQ ID NO: 3892991 - RNA, 15 nt, Human
uuucaaggcacucua

SEQ ID NO: 3892992 - RNA, 19 nt, Human
uuucaaggcacucuagauu

SEQ ID NO: 3892993 - RNA, 16 nt, Human
uuucaagguucuaacc

SEQ ID NO: 3892994 - RNA, 15 nt, Human
uuucaaguauuuaag

SEQ ID NO: 3892995 - RNA, 16 nt, Human
uuucaaguauuuaagc

SEQ ID NO: 3892996 - RNA, 21 nt, Human
uuucaagugaaucuaaaagcu

SEQ ID NO: 3892997 - RNA, 17 nt, Human
uuucaaguuuuaaaguu

SEQ ID NO: 3892998 - RNA, 20 nt, Human
uuucaauaaagcauuuauaa

SEQ ID NO: 3892999 - RNA, 18 nt, Human
uuucaauaaaguuugauc

SEQ ID NO: 3893000 - RNA, 14 nt, Human
uuucaauagccacu

SEQ ID NO: 3893001 - RNA, 19 nt, Human
uuucaauaggaaaaacuga

SEQ ID NO: 3893002 - RNA, 20 nt, Human
uuucaauaggaaaaacugau

SEQ ID NO: 3893003 - RNA, 19 nt, Human
uuucaauauauugaacuuu

SEQ ID NO: 3893004 - RNA, 17 nt, Human
uuucaauauuuuccuuc

SEQ ID NO: 3893005 - RNA, 23 nt, Human
uuucaaucucguauagaagucuu

SEQ ID NO: 3893006 - RNA, 19 nt, Human
uuucaauguguauaaauug

SEQ ID NO: 3893007 - RNA, 12 nt, Human
uuucaauuaaac

SEQ ID NO: 3893008 - RNA, 19 nt, Human
uuucaauuaaacggauuau

SEQ ID NO: 3893009 - RNA, 22 nt, Human
uuucaauuccaccugcaaucaa

SEQ ID NO: 3893010 - RNA, 19 nt, Human
uuucaauuuccaagagcug

SEQ ID NO: 3893011 - RNA, 15 nt, Human
uuucaauuuuaaaca

SEQ ID NO: 3893012 - RNA, 18 nt, Human
uuucaauuuuaaacauau

SEQ ID NO: 3893013 - RNA, 12 nt, Human
uuucacaaauaa

SEQ ID NO: 3893014 - RNA, 18 nt, Human
uuucacaaauauuaaaaa

SEQ ID NO: 3893015 - RNA, 22 nt, Human
uuucacaaauauuaaaaagucu

SEQ ID NO: 3893016 - RNA, 13 nt, Human
uuucacaacagau

SEQ ID NO: 3893017 - RNA, 16 nt, Human
uuucacaaccuucugu

SEQ ID NO: 3893018 - RNA, 17 nt, Human
uuucacaaggucuuuaa

SEQ ID NO: 3893019 - RNA, 16 nt, Human
uuucacacaaacaagg

SEQ ID NO: 3893020 - RNA, 13 nt, Human
uuucacagcuccu

SEQ ID NO: 3893021 - RNA, 14 nt, Human
uuucacauagaugu

SEQ ID NO: 3893022 - RNA, 22 nt, Human
uuucacauagcccacuuacauu

SEQ ID NO: 3893023 - RNA, 15 nt, Human
uuucacauaucuagu

SEQ ID NO: 3893024 - RNA, 14 nt, Human
uuucacauuggaaa

SEQ ID NO: 3893025 - RNA, 19 nt, Human
uuucacauuggaaacaagu

SEQ ID NO: 3893026 - RNA, 19 nt, Human
uuucacauuguuugcugcu

SEQ ID NO: 3893027 - RNA, 13 nt, Human
uuucacauuuucc

SEQ ID NO: 3893028 - RNA, 15 nt, Human
uuucaccacauucgu

SEQ ID NO: 3893029 - RNA, 17 nt, Human
uuucaccagauuugcua

SEQ ID NO: 3893030 - RNA, 15 nt, Human
uuucaccccucccuu

SEQ ID NO: 3893031 - RNA, 22 nt, Human
uuucacccuuaacccaaggagc

SEQ ID NO: 3893032 - RNA, 20 nt, Human
uuucaccuacuuuguaagug

SEQ ID NO: 3893033 - RNA, 21 nt, Human
uuucaccuuuucaggaaaaua

SEQ ID NO: 3893034 - RNA, 15 nt, Human
uuucacgauucauuu

SEQ ID NO: 3893035 - RNA, 14 nt, Human
uuucacggaaacuc

SEQ ID NO: 3893036 - RNA, 14 nt, Human
uuucacggaaguuu

SEQ ID NO: 3893037 - RNA, 23 nt, Human
uuucacggaaguuuucaaugaug

SEQ ID NO: 3893038 - RNA, 21 nt, Human
uuucacgucauaggaaguuag

SEQ ID NO: 3893039 - RNA, 16 nt, Human
uuucacuacucagcau

SEQ ID NO: 3893040 - RNA, 15 nt, Human
uuucacuagaaaagc

SEQ ID NO: 3893041 - RNA, 23 nt, Human
uuucacuccggagugagaagcuu

SEQ ID NO: 3893042 - RNA, 14 nt, Human
uuucacucuaaguc

SEQ ID NO: 3893043 - RNA, 20 nt, Human
uuucacucuaagucauguau

SEQ ID NO: 3893044 - RNA, 23 nt, Human
uuucacucuaagucauguauguu

SEQ ID NO: 3893045 - RNA, 23 nt, Human
uuucacugacuuuuuuugugggg

SEQ ID NO: 3893046 - RNA, 17 nt, Human
uuucacugcuggcugcc

SEQ ID NO: 3893047 - RNA, 18 nt, Human
uuucacugcuggcugccu

SEQ ID NO: 3893048 - RNA, 18 nt, Human
uuucacuggaguuacauu

SEQ ID NO: 3893049 - RNA, 19 nt, Human
uuucacuggaguuacauua

SEQ ID NO: 3893050 - RNA, 24 nt, Human
uuucacuguagaaugauuucaugc

SEQ ID NO: 3893051 - RNA, 13 nt, Human
uuucacugucugu

SEQ ID NO: 3893052 - RNA, 18 nt, Human
uuucacuuguguuuuaaa

SEQ ID NO: 3893053 - RNA, 12 nt, Human
uuucacuuuaga

SEQ ID NO: 3893054 - RNA, 16 nt, Human
uuucagaaaacagaaa

SEQ ID NO: 3893055 - RNA, 19 nt, Human
uuucagaaaacagaaaaaa

SEQ ID NO: 3893056 - RNA, 22 nt, Human
uuucagaaaauauuauguguuu

SEQ ID NO: 3893057 - RNA, 16 nt, Human
uuucagaaaaugaaaa

SEQ ID NO: 3893058 - RNA, 15 nt, Human
uuucagaaagccuuu

SEQ ID NO: 3893059 - RNA, 14 nt, Human
uuucagaaauauaa

SEQ ID NO: 3893060 - RNA, 21 nt, Human
uuucagaaauauaacacauuu

SEQ ID NO: 3893061 - RNA, 22 nt, Human
uuucagaaauauaacacauuuu

SEQ ID NO: 3893062 - RNA, 20 nt, Human
uuucagaaccucuuccccag

SEQ ID NO: 3893063 - RNA, 21 nt, Human
uuucagaagugagcuuugcug

SEQ ID NO: 3893064 - RNA, 21 nt, Human
uuucagaaguuuaaauauuaa

SEQ ID NO: 3893065 - RNA, 21 nt, Human
uuucagacucccauuccugaa

SEQ ID NO: 3893066 - RNA, 15 nt, Human
uuucagacuugucaa

SEQ ID NO: 3893067 - RNA, 12 nt, Human
uuucagagauuu

SEQ ID NO: 3893068 - RNA, 13 nt, Human
uuucagagccucc

SEQ ID NO: 3893069 - RNA, 22 nt, Human
uuucagaguucuuuuugaagua

SEQ ID NO: 3893070 - RNA, 23 nt, Human
uuucagaguucuuuuugaaguau

SEQ ID NO: 3893071 - RNA, 18 nt, Human
uuucagauauaaaagacu

SEQ ID NO: 3893072 - RNA, 23 nt, Human
uuucagauaucuuggacaaauca

SEQ ID NO: 3893073 - RNA, 14 nt, Human
uuucagaugcuucu

SEQ ID NO: 3893074 - RNA, 18 nt, Human
uuucagauguaauguuuu

SEQ ID NO: 3893075 - RNA, 20 nt, Human
uuucagaugucuucugccug

SEQ ID NO: 3893076 - RNA, 22 nt, Human
uuucagaugucuucugccuguu

SEQ ID NO: 3893077 - RNA, 22 nt, Human
uuucagauuugcacaaaaagau

SEQ ID NO: 3893078 - RNA, 18 nt, Human
uuucagauuuugauaacu

SEQ ID NO: 3893079 - RNA, 21 nt, Human
uuucagcaauauuuaaggaga

SEQ ID NO: 3893080 - RNA, 13 nt, Human
uuucagcaggcag

SEQ ID NO: 3893081 - RNA, 18 nt, Human
uuucagcauuaagcuguu

SEQ ID NO: 3893082 - RNA, 17 nt, Human
uuucagccaagaauucu

SEQ ID NO: 3893083 - RNA, 14 nt, Human
uuucagccuaagag

SEQ ID NO: 3893084 - RNA, 15 nt, Human
uuucagcuaggaaca

SEQ ID NO: 3893085 - RNA, 16 nt, Human
uuucagcuaucaguag

SEQ ID NO: 3893086 - RNA, 15 nt, Human
uuucagcugucuuuu

SEQ ID NO: 3893087 - RNA, 11 nt, Human
uuucuaagaga

SEQ ID NO: 3893088 - RNA, 16 nt, Human
uuucuaagagaaguua

SEQ ID NO: 3893089 - RNA, 14 nt, Human
uuucuaagagagcu

SEQ ID NO: 3893090 - RNA, 15 nt, Human
uuucuaagauucuaa

SEQ ID NO: 3893091 - RNA, 17 nt, Human
uuucuaagauucuaaag

SEQ ID NO: 3893092 - RNA, 19 nt, Human
uuucuaagcauaaaagaug

SEQ ID NO: 3893093 - RNA, 21 nt, Human
uuucuaauaaacuuggauucu

SEQ ID NO: 3893094 - RNA, 23 nt, Human
uuucuaaugaggagagaaaauau

SEQ ID NO: 3893095 - RNA, 14 nt, Human
uuucuaauguuucu

SEQ ID NO: 3893096 - RNA, 18 nt, Human
uuucuaauuauguagcuc

SEQ ID NO: 3893097 - RNA, 19 nt, Human
uuucuaauuauguagcucu

SEQ ID NO: 3893098 - RNA, 22 nt, Human
uuucuacaaugugaacuuuauu

SEQ ID NO: 3893099 - RNA, 21 nt, Human
uuucuacaauuaauaguuugu

SEQ ID NO: 3893100 - RNA, 17 nt, Human
uuucuacagcaaauuua

SEQ ID NO: 3893101 - RNA, 16 nt, Human
uuucuaccauuucaga

SEQ ID NO: 3893102 - RNA, 18 nt, Human
uuucuacccagcgagccc

SEQ ID NO: 3893103 - RNA, 14 nt, Human
uuucuaccucccag

SEQ ID NO: 3893104 - RNA, 15 nt, Human
uuucuaccucccaga

SEQ ID NO: 3893105 - RNA, 22 nt, Human
uuucuacucucuuuuaauauuu

SEQ ID NO: 3893106 - RNA, 15 nt, Human
uuucuacucugaacu

SEQ ID NO: 3893107 - RNA, 17 nt, Human
uuucuacucugaacuaa

SEQ ID NO: 3893108 - RNA, 20 nt, Human
uuucuacugucaaaugaugu

SEQ ID NO: 3893109 - RNA, 22 nt, Human
uuucuacuuugaagucauacca

SEQ ID NO: 3893110 - RNA, 19 nt, Human
uuucuagaaguuucccuuc

SEQ ID NO: 3893111 - RNA, 23 nt, Human
uuucuagaaguuucccuuccucc

SEQ ID NO: 3893112 - RNA, 21 nt, Human
uuucuagaauuauuuuucacu

SEQ ID NO: 3893113 - RNA, 18 nt, Human
uuucuagacacuuuuucu

SEQ ID NO: 3893114 - RNA, 13 nt, Human
uuucuagaccaau

SEQ ID NO: 3893115 - RNA, 16 nt, Human
uuucuagacuugugcu

SEQ ID NO: 3893116 - RNA, 16 nt, Human
uuucuagauacaauaa

SEQ ID NO: 3893117 - RNA, 23 nt, Human
uuucuagauacaauaaauugcua

SEQ ID NO: 3893118 - RNA, 15 nt, Human
uuucuagccagagga

SEQ ID NO: 3893119 - RNA, 19 nt, Human
uuucuagcccgaauacaaa

SEQ ID NO: 3893120 - RNA, 21 nt, Human
uuucuagcuaauggaaaauga

SEQ ID NO: 3893121 - RNA, 20 nt, Human
uuucuagcuagaaauaugau

SEQ ID NO: 3893122 - RNA, 19 nt, Human
uuucuagcuguugagcugu

SEQ ID NO: 3893123 - RNA, 18 nt, Human
uuucuagcuuuuuaauua

SEQ ID NO: 3893124 - RNA, 16 nt, Human
uuucuaggaagaauuu

SEQ ID NO: 3893125 - RNA, 17 nt, Human
uuucuaggacugaauua

SEQ ID NO: 3893126 - RNA, 21 nt, Human
uuucuaggacugaauuaugaa

SEQ ID NO: 3893127 - RNA, 22 nt, Human
uuucuaggacugaauuaugaaa

SEQ ID NO: 3893128 - RNA, 20 nt, Human
uuucuaggccuacaugcuuu

SEQ ID NO: 3893129 - RNA, 14 nt, Human
uuucuagggaaaug

SEQ ID NO: 3893130 - RNA, 20 nt, Human
uuucuaguacacuuuuauga

SEQ ID NO: 3893131 - RNA, 20 nt, Human
uuucuaguggucuuuguaag

SEQ ID NO: 3893132 - RNA, 20 nt, Human
uuucuaguguaucaaaaugc

SEQ ID NO: 3893133 - RNA, 14 nt, Human
uuucuaguuauuua

SEQ ID NO: 3893134 - RNA, 13 nt, Human
uuucuaguugaaa

SEQ ID NO: 3893135 - RNA, 19 nt, Human
uuucuaguuugcucauacu

SEQ ID NO: 3893136 - RNA, 13 nt, Human
uuucuauacaaau

SEQ ID NO: 3893137 - RNA, 14 nt, Human
uuucuaucacauau

SEQ ID NO: 3893138 - RNA, 17 nt, Human
uuucuaucguucucucu

SEQ ID NO: 3893139 - RNA, 20 nt, Human
uuucuaucguucucucuuug

SEQ ID NO: 3893140 - RNA, 20 nt, Human
uuucuaugaaauauuauguu

SEQ ID NO: 3893141 - RNA, 21 nt, Human
uuucuaugacacaugcaaggu

SEQ ID NO: 3893142 - RNA, 13 nt, Human
uuucuauguacua

SEQ ID NO: 3893143 - RNA, 23 nt, Human
uuucuauguacuaguacugugua

SEQ ID NO: 3893144 - RNA, 14 nt, Human
uuucuauuaaaaga

SEQ ID NO: 3893145 - RNA, 18 nt, Human
uuucuauuaaaagacuca

SEQ ID NO: 3893146 - RNA, 19 nt, Human
uuucuauuaaaagacucau

SEQ ID NO: 3893147 - RNA, 22 nt, Human
uuucuauuaaauuaaauuuugu

SEQ ID NO: 3893148 - RNA, 20 nt, Human
uuucuauuauggaaaacugu

SEQ ID NO: 3893149 - RNA, 14 nt, Human
uuucuauuccuucu

SEQ ID NO: 3893150 - RNA, 16 nt, Human
uuucuauuguacagaa

SEQ ID NO: 3893151 - RNA, 13 nt, Human
uuucuauuguuac

SEQ ID NO: 3893152 - RNA, 16 nt, Human
uuucuauuucacugga

SEQ ID NO: 3893153 - RNA, 21 nt, Human
uuucuauuuucccucgcuggg

SEQ ID NO: 3893154 - RNA, 13 nt, Human
uuucuauuuuuau

SEQ ID NO: 3893155 - RNA, 13 nt, Human
uuucucaaaagca

SEQ ID NO: 3893156 - RNA, 16 nt, Human
uuucucaaaagcauuu

SEQ ID NO: 3893157 - RNA, 14 nt, Human
uuucucaaagaaau

SEQ ID NO: 3893158 - RNA, 16 nt, Human
uuucucaaagaaauuu

SEQ ID NO: 3893159 - RNA, 22 nt, Human
uuucucaaagccccauuaacug

SEQ ID NO: 3893160 - RNA, 14 nt, Human
uuucucaaaguuuu

SEQ ID NO: 3893161 - RNA, 16 nt, Human
uuucucaaaguuuuga

SEQ ID NO: 3893162 - RNA, 23 nt, Human
uuucucaccgcagucgucgcaca

SEQ ID NO: 3893163 - RNA, 20 nt, Human
uuucucagauccuuguuuca

SEQ ID NO: 3893164 - RNA, 23 nt, Human
uuucucagauccuuguuucaaac

SEQ ID NO: 3893165 - RNA, 14 nt, Human
uuucucagcuccca

SEQ ID NO: 3893166 - RNA, 20 nt, Human
uuucucauccacauacccug

SEQ ID NO: 3893167 - RNA, 22 nt, Human
uuucucauuugccaauaauaau

SEQ ID NO: 3893168 - RNA, 11 nt, Human
uuucuccagcu

SEQ ID NO: 3893169 - RNA, 12 nt, Human
uuucuccagcug

SEQ ID NO: 3893170 - RNA, 15 nt, Human
uuucuccagggucag

SEQ ID NO: 3893171 - RNA, 12 nt, Human
uuucucccagcu

SEQ ID NO: 3893172 - RNA, 23 nt, Human
uuucuccccaaugagacuugccu

SEQ ID NO: 3893173 - RNA, 12 nt, Human
uuucuccccagg

SEQ ID NO: 3893174 - RNA, 13 nt, Human
uuucucccccugg

SEQ ID NO: 3893175 - RNA, 12 nt, Human
uuucuccccgcu

SEQ ID NO: 3893176 - RNA, 16 nt, Human
uuucuccccugccccc

SEQ ID NO: 3893177 - RNA, 21 nt, Human
uuucucccucucacugucuga

SEQ ID NO: 3893178 - RNA, 14 nt, Human
uuucucccuggauu

SEQ ID NO: 3893179 - RNA, 20 nt, Human
uuucucccuggauuuuuacc

SEQ ID NO: 3893180 - RNA, 22 nt, Human
uuucucccuggauuuuuaccag

SEQ ID NO: 3893181 - RNA, 23 nt, Human
uuucucccuggauuuuuaccagu

SEQ ID NO: 3893182 - RNA, 14 nt, Human
uuucuccuccaugg

SEQ ID NO: 3893183 - RNA, 15 nt, Human
uuucuccucccagga

SEQ ID NO: 3893184 - RNA, 15 nt, Human
uuucuccucccuucc

SEQ ID NO: 3893185 - RNA, 20 nt, Human
uuucuccuuagucuucucau

SEQ ID NO: 3893186 - RNA, 18 nt, Human
uuucuccuuuaauuguaa

SEQ ID NO: 3893187 - RNA, 22 nt, Human
uuucucgcuguccuuucuagag

SEQ ID NO: 3893188 - RNA, 15 nt, Human
uuucucuaauaauaa

SEQ ID NO: 3893189 - RNA, 21 nt, Human
uuucucuaauaauaaauaguu

SEQ ID NO: 3893190 - RNA, 14 nt, Human
uuucucucaacacc

SEQ ID NO: 3893191 - RNA, 16 nt, Human
uuucucuccucacaca

SEQ ID NO: 3893192 - RNA, 16 nt, Human
uuucucuccuguccuc

SEQ ID NO: 3893193 - RNA, 19 nt, Human
uuucucucuauuucccccu

SEQ ID NO: 3893194 - RNA, 13 nt, Human
uuucucucuuccc

SEQ ID NO: 3893195 - RNA, 21 nt, Human
uuucucucuuuauacagcugu

SEQ ID NO: 3893196 - RNA, 20 nt, Human
uuucucugauuugcaaaaaa

SEQ ID NO: 3893197 - RNA, 21 nt, Human
uuucucugcagaaacuacuga

SEQ ID NO: 3893198 - RNA, 11 nt, Human
uuucucugcca

SEQ ID NO: 3893199 - RNA, 18 nt, Human
uuucucugcuucagcuug

SEQ ID NO: 3893200 - RNA, 15 nt, Human
uuucucuguacuuuu

SEQ ID NO: 3893201 - RNA, 18 nt, Human
uuucucuguguuuguucc

SEQ ID NO: 3893202 - RNA, 13 nt, Human
uuucucuuagaaa

SEQ ID NO: 3893203 - RNA, 12 nt, Human
uuucucuucaua

SEQ ID NO: 3893204 - RNA, 16 nt, Human
uuucucuucauacuuu

SEQ ID NO: 3893205 - RNA, 19 nt, Human
uuucucuucuccccuucca

SEQ ID NO: 3893206 - RNA, 17 nt, Human
uuucucuugagcuggcc

SEQ ID NO: 3893207 - RNA, 12 nt, Human
uuucucuugggc

SEQ ID NO: 3893208 - RNA, 17 nt, Human
uuucucuuuccaugaca

SEQ ID NO: 3893209 - RNA, 14 nt, Human
uuucucuuucguua

SEQ ID NO: 3893210 - RNA, 12 nt, Human
uuucucuuucuu

SEQ ID NO: 3893211 - RNA, 14 nt, Human
uuucucuuucuuua

SEQ ID NO: 3893212 - RNA, 13 nt, Human
uuucucuuugaaa

SEQ ID NO: 3893213 - RNA, 14 nt, Human
uuucucuuugaaac

SEQ ID NO: 3893214 - RNA, 22 nt, Human
uuucucuuugauuauuugcaug

SEQ ID NO: 3893215 - RNA, 15 nt, Human
uuucucuuuuuaguu

SEQ ID NO: 3893216 - RNA, 14 nt, Human
uuucugaaaagaaa

SEQ ID NO: 3893217 - RNA, 13 nt, Human
uuucugaaaauua

SEQ ID NO: 3893218 - RNA, 19 nt, Human
uuucugaaaauuaacacug

SEQ ID NO: 3893219 - RNA, 20 nt, Human
uuucugaaaauuaacacugc

SEQ ID NO: 3893220 - RNA, 18 nt, Human
uuucugaaacuaaugaaa

SEQ ID NO: 3893221 - RNA, 16 nt, Human
uuucugaacagcuggu

SEQ ID NO: 3893222 - RNA, 19 nt, Human
uuucugaacagcuggugua

SEQ ID NO: 3893223 - RNA, 15 nt, Human
uuucugaagcuuuac

SEQ ID NO: 3893224 - RNA, 18 nt, Human
uuucugaagcuuuaccag

SEQ ID NO: 3893225 - RNA, 17 nt, Human
uuucugaaggcuuugug

SEQ ID NO: 3893226 - RNA, 20 nt, Human
uuucugaccaaucacugagu

SEQ ID NO: 3893227 - RNA, 12 nt, Human
uuucugagaaaa

SEQ ID NO: 3893228 - RNA, 15 nt, Human
uuucugagaaaagaa

SEQ ID NO: 3893229 - RNA, 15 nt, Human
uuucugagaaagacu

SEQ ID NO: 3893230 - RNA, 22 nt, Human
uuucugagaaagacuauucaaa

SEQ ID NO: 3893231 - RNA, 19 nt, Human
uuucugagaagguccuuaa

SEQ ID NO: 3893232 - RNA, 12 nt, Human
uuugauguaaua

SEQ ID NO: 3893233 - RNA, 15 nt, Human
uuugaugucaugugu

SEQ ID NO: 3893234 - RNA, 19 nt, Human
uuugaugugacaauaauau

SEQ ID NO: 3893235 - RNA, 14 nt, Human
uuugauguuaacac

SEQ ID NO: 3893236 - RNA, 16 nt, Human
uuugauguuaacacau

SEQ ID NO: 3893237 - RNA, 18 nt, Human
uuugauuaaauucuugca

SEQ ID NO: 3893238 - RNA, 22 nt, Human
uuugauuaguuuucuuguugcu

SEQ ID NO: 3893239 - RNA, 16 nt, Human
uuugauuauuguauuu

SEQ ID NO: 3893240 - RNA, 17 nt, Human
uuugauuauuuaagacu

SEQ ID NO: 3893241 - RNA, 14 nt, Human
uuugauuauuugca

SEQ ID NO: 3893242 - RNA, 16 nt, Human
uuugauuauuugcaug

SEQ ID NO: 3893243 - RNA, 22 nt, Human
uuugauucaaaauauuuaaaaa

SEQ ID NO: 3893244 - RNA, 19 nt, Human
uuugauucacauguuuuca

SEQ ID NO: 3893245 - RNA, 13 nt, Human
uuugauucuccuu

SEQ ID NO: 3893246 - RNA, 14 nt, Human
uuugauucuccuuc

SEQ ID NO: 3893247 - RNA, 16 nt, Human
uuugauucuccuucag

SEQ ID NO: 3893248 - RNA, 15 nt, Human
uuugauucugugugu

SEQ ID NO: 3893249 - RNA, 21 nt, Human
uuugauugaauaaugccacca

SEQ ID NO: 3893250 - RNA, 21 nt, Human
uuugauugagaguaacuuaag

SEQ ID NO: 3893251 - RNA, 15 nt, Human
uuugauugauuugaa

SEQ ID NO: 3893252 - RNA, 18 nt, Human
uuugauuuccaaguaaua

SEQ ID NO: 3893253 - RNA, 14 nt, Human
uuugauuugucacu

SEQ ID NO: 3893254 - RNA, 18 nt, Human
uuugauuuuuucaaauuu

SEQ ID NO: 3893255 - RNA, 17 nt, Human
uuugcaaaguacuguaa

SEQ ID NO: 3893256 - RNA, 19 nt, Human
uuugcaaaguauuguaaau

SEQ ID NO: 3893257 - RNA, 14 nt, Human
uuugcaaagugcaa

SEQ ID NO: 3893258 - RNA, 17 nt, Human
uuugcaaauauaaacau

SEQ ID NO: 3893259 - RNA, 14 nt, Human
uuugcaaccaggaa

SEQ ID NO: 3893260 - RNA, 20 nt, Human
uuugcaagggaaaagucucu

SEQ ID NO: 3893261 - RNA, 21 nt, Human
uuugcaagggaaaagucucuu

SEQ ID NO: 3893262 - RNA, 17 nt, Human
uuugcaagucauggcug

SEQ ID NO: 3893263 - RNA, 13 nt, Human
uuugcaagugaag

SEQ ID NO: 3893264 - RNA, 21 nt, Human
uuugcaagugaagguuuacaa

SEQ ID NO: 3893265 - RNA, 22 nt, Human
uuugcaagugaagguuuacaau

SEQ ID NO: 3893266 - RNA, 14 nt, Human
uuugcaagugcugg

SEQ ID NO: 3893267 - RNA, 13 nt, Human
uuugcaauaaugc

SEQ ID NO: 3893268 - RNA, 14 nt, Human
uuugcaauaaugca

SEQ ID NO: 3893269 - RNA, 17 nt, Human
uuugcacaaaaagauac

SEQ ID NO: 3893270 - RNA, 12 nt, Human
uuugcacagcuc

SEQ ID NO: 3893271 - RNA, 20 nt, Human
uuugcacccacugaaaggaa

SEQ ID NO: 3893272 - RNA, 18 nt, Human
uuugcaccccaugcuguu

SEQ ID NO: 3893273 - RNA, 20 nt, Human
uuugcaccccaugcuguuga

SEQ ID NO: 3893274 - RNA, 15 nt, Human
uuugcaccccuccca

SEQ ID NO: 3893275 - RNA, 13 nt, Human
uuugcaccugucc

SEQ ID NO: 3893276 - RNA, 17 nt, Human
uuugcacgacgcccucu

SEQ ID NO: 3893277 - RNA, 20 nt, Human
uuugcacuaaaucagagaca

SEQ ID NO: 3893278 - RNA, 21 nt, Human
uuugcacuaaaucagagacaa

SEQ ID NO: 3893279 - RNA, 16 nt, Human
uuugcacucaaaucuu

SEQ ID NO: 3893280 - RNA, 17 nt, Human
uuugcacuguaugcugg

SEQ ID NO: 3893281 - RNA, 14 nt, Human
uuugcagacaggca

SEQ ID NO: 3893282 - RNA, 11 nt, Human
uuugcagagua

SEQ ID NO: 3893283 - RNA, 16 nt, Human
uuugcagcgacuggca

SEQ ID NO: 3893284 - RNA, 21 nt, Human
uuugcagcugagagaaaauaa

SEQ ID NO: 3893285 - RNA, 15 nt, Human
uuugcagcuuccaau

SEQ ID NO: 3893286 - RNA, 16 nt, Human
uuugcaggcaugcaug

SEQ ID NO: 3893287 - RNA, 14 nt, Human
uuugcagggcagcc

SEQ ID NO: 3893288 - RNA, 16 nt, Human
uuugcagggcagcccc

SEQ ID NO: 3893289 - RNA, 10 nt, Human
uuugcaguaa

SEQ ID NO: 3893290 - RNA, 21 nt, Human
uuugcaguagagucaucucca

SEQ ID NO: 3893291 - RNA, 17 nt, Human
uuugcaguucuuuggcu

SEQ ID NO: 3893292 - RNA, 16 nt, Human
uuugcauaacaauucc

SEQ ID NO: 3893293 - RNA, 22 nt, Human
uuugcauaacaauuccucuacu

SEQ ID NO: 3893294 - RNA, 18 nt, Human
uuugcauaacguauaaaa

SEQ ID NO: 3893295 - RNA, 19 nt, Human
uuugcauaauaaaugcuuc

SEQ ID NO: 3893296 - RNA, 22 nt, Human
uuugcauacuuaccuagugaaa

SEQ ID NO: 3893297 - RNA, 14 nt, Human
uuugcaucugaaau

SEQ ID NO: 3893298 - RNA, 13 nt, Human
uuugcaugcaugc

SEQ ID NO: 3893299 - RNA, 20 nt, Human
uuugcauggcacuugcaucu

SEQ ID NO: 3893300 - RNA, 18 nt, Human
uuugcauguuauguuuaa

SEQ ID NO: 3893301 - RNA, 14 nt, Human
uuugcauguuccac

SEQ ID NO: 3893302 - RNA, 13 nt, Human
uuugcauucaaau

SEQ ID NO: 3893303 - RNA, 13 nt, Human
uuugcauucuccc

SEQ ID NO: 3893304 - RNA, 18 nt, Human
uuugcauucuuauucauc

SEQ ID NO: 3893305 - RNA, 19 nt, Human
uuugcauugaacacaaacu

SEQ ID NO: 3893306 - RNA, 21 nt, Human
uuugcauuucagaaagccuuu

SEQ ID NO: 3893307 - RNA, 21 nt, Human
uuugcauuuguuuauguaauu

SEQ ID NO: 3893308 - RNA, 19 nt, Human
uuugccaaaauaaugucuu

SEQ ID NO: 3893309 - RNA, 23 nt, Human
uuugccaaaauaaugucuuguua

SEQ ID NO: 3893310 - RNA, 23 nt, Human
uuugccaaaauucauuucuaauu

SEQ ID NO: 3893311 - RNA, 14 nt, Human
uuugccaacauugc

SEQ ID NO: 3893312 - RNA, 15 nt, Human
uuugccacagcuuuu

SEQ ID NO: 3893313 - RNA, 18 nt, Human
uuugccacagcuuuugca

SEQ ID NO: 3893314 - RNA, 18 nt, Human
uuugccacccucaugcug

SEQ ID NO: 3893315 - RNA, 20 nt, Human
uuugccagcugcugcuggau

SEQ ID NO: 3893316 - RNA, 14 nt, Human
uuugccauugugaa

SEQ ID NO: 3893317 - RNA, 11 nt, Human
uuugccauuug

SEQ ID NO: 3893318 - RNA, 21 nt, Human
uuugcccaaaauuuauuuuau

SEQ ID NO: 3893319 - RNA, 18 nt, Human
uuugcccaacaccagccc

SEQ ID NO: 3893320 - RNA, 23 nt, Human
uuugcccaacaccagccccugcc

SEQ ID NO: 3893321 - RNA, 21 nt, Human
uuugcccugcugcccuccccc

SEQ ID NO: 3893322 - RNA, 13 nt, Human
uuugcccuuuacu

SEQ ID NO: 3893323 - RNA, 22 nt, Human
uuugccuaauacauuaaagcag

SEQ ID NO: 3893324 - RNA, 14 nt, Human
uuugccugagggcg

SEQ ID NO: 3893325 - RNA, 13 nt, Human
uuugccuguaaca

SEQ ID NO: 3893326 - RNA, 14 nt, Human
uuugccuguaacaa

SEQ ID NO: 3893327 - RNA, 12 nt, Human
uuugccugugcc

SEQ ID NO: 3893328 - RNA, 19 nt, Human
uuugccuguucaguuacag

SEQ ID NO: 3893329 - RNA, 20 nt, Human
uuugccuguucaguuacaga

SEQ ID NO: 3893330 - RNA, 22 nt, Human
uuugccuuccuuucuccaggac

SEQ ID NO: 3893331 - RNA, 21 nt, Human
uuugccuugggcugcuccuca

SEQ ID NO: 3893332 - RNA, 22 nt, Human
uuugcgaauauuuuguaaauua

SEQ ID NO: 3893333 - RNA, 21 nt, Human
uuugcgcacaacuuaaaaagu

SEQ ID NO: 3893334 - RNA, 21 nt, Human
uuugcgcuccuggcccagccu

SEQ ID NO: 3893335 - RNA, 22 nt, Human
uuugcggccaguauuagacugg

SEQ ID NO: 3893336 - RNA, 22 nt, Human
uuugcuaacuagcuuggaaacu

SEQ ID NO: 3893337 - RNA, 21 nt, Human
uuugcuaaguaaaucucuucu

SEQ ID NO: 3893338 - RNA, 14 nt, Human
uuugcuaauuuuua

SEQ ID NO: 3893339 - RNA, 24 nt, Human
uuugcuacuguacauaaacaauga

SEQ ID NO: 3893340 - RNA, 19 nt, Human
uuugcuagacucuagacaa

SEQ ID NO: 3893341 - RNA, 24 nt, Human
uuugcuagcaguaaaagaugaagu

SEQ ID NO: 3893342 - RNA, 18 nt, Human
uuugcuaucuuaauuuug

SEQ ID NO: 3893343 - RNA, 19 nt, Human
uuugcuaucuuaauuuugg

SEQ ID NO: 3893344 - RNA, 13 nt, Human
uuugcuauugaca

SEQ ID NO: 3893345 - RNA, 23 nt, Human
uuugcuauugacaagucauuuua

SEQ ID NO: 3893346 - RNA, 17 nt, Human
uuugcucauauuuccca

SEQ ID NO: 3893347 - RNA, 21 nt, Human
uuugcuccccuuccccuuccu

SEQ ID NO: 3893348 - RNA, 22 nt, Human
uuugcuccccuuccccuuccuu

SEQ ID NO: 3893349 - RNA, 14 nt, Human
uuugcuccgaagcu

SEQ ID NO: 3893350 - RNA, 20 nt, Human
uuugcucucccgguucuucc

SEQ ID NO: 3893351 - RNA, 23 nt, Human
uuugcucuuguuuuuauuaauuu

SEQ ID NO: 3893352 - RNA, 18 nt, Human
uuugcugaacauuggaga

SEQ ID NO: 3893353 - RNA, 19 nt, Human
uuugcugauggucuggucu

SEQ ID NO: 3893354 - RNA, 19 nt, Human
uuugcugcacuuuuuacuu

SEQ ID NO: 3893355 - RNA, 15 nt, Human
uuugcugccaaaugc

SEQ ID NO: 3893356 - RNA, 20 nt, Human
uuugcugcuaauauuuuccu

SEQ ID NO: 3893357 - RNA, 22 nt, Human
uuugcugcugcccauguuucaa

SEQ ID NO: 3893358 - RNA, 13 nt, Human
uuugcugcuucug

SEQ ID NO: 3893359 - RNA, 15 nt, Human
uuugcuggaauaagu

SEQ ID NO: 3893360 - RNA, 20 nt, Human
uuugcuggagcucugcccau

SEQ ID NO: 3893361 - RNA, 22 nt, Human
uuugcuguaauguuaauauuga

SEQ ID NO: 3893362 - RNA, 15 nt, Human
uuugcugugaacaau

SEQ ID NO: 3893363 - RNA, 19 nt, Human
uuugcuuauuguuccaaga

SEQ ID NO: 3893364 - RNA, 18 nt, Human
uuugcuuuaauauaaaug

SEQ ID NO: 3893365 - RNA, 12 nt, Human
uuugcuuuaauu

SEQ ID NO: 3893366 - RNA, 17 nt, Human
uuugcuuuaauuuuagc

SEQ ID NO: 3893367 - RNA, 19 nt, Human
uuugcuuucgguuccaguu

SEQ ID NO: 3893368 - RNA, 15 nt, Human
uuugcuuugcuuucu

SEQ ID NO: 3893369 - RNA, 18 nt, Human
uuugcuuugcuuucugcu

SEQ ID NO: 3893370 - RNA, 16 nt, Human
uuugcuuugugauuuu

SEQ ID NO: 3893371 - RNA, 22 nt, Human
uuugcuuuuccuuuguuuuuau

SEQ ID NO: 3893372 - RNA, 15 nt, Human
uuuggaaaaauguuu

SEQ ID NO: 3893373 - RNA, 14 nt, Human
uuuggaaaagaaua

SEQ ID NO: 3893374 - RNA, 16 nt, Human
uuuggaaacuaauaaa

SEQ ID NO: 3893375 - RNA, 18 nt, Human
uuuggaaacuaauaaaau

SEQ ID NO: 3893376 - RNA, 14 nt, Human
agcugccuguaguu

SEQ ID NO: 3893377 - RNA, 19 nt, Human
agcugccuguaguuaggaa

SEQ ID NO: 3893378 - RNA, 20 nt, Human
agcugccuguaguuaggaaa

SEQ ID NO: 3893379 - RNA, 14 nt, Human
agcugccuguucag

SEQ ID NO: 3893380 - RNA, 16 nt, Human
agcugccuguucagcu

SEQ ID NO: 3893381 - RNA, 22 nt, Human
agcugccuguucagcuccagcu

SEQ ID NO: 3893382 - RNA, 20 nt, Human
agcugccuuagcuucaggaa

SEQ ID NO: 3893383 - RNA, 10 nt, Human
agcugccuuc

SEQ ID NO: 3893384 - RNA, 19 nt, Human
agcugccuucccuagcuuu

SEQ ID NO: 3893385 - RNA, 14 nt, Human
agcugccuuggcuc

SEQ ID NO: 3893386 - RNA, 20 nt, Human
agcugccuuggcucagacau

SEQ ID NO: 3893387 - RNA, 17 nt, Human
agcugcgcuugcuuuuc

SEQ ID NO: 3893388 - RNA, 13 nt, Human
agcugcgguccac

SEQ ID NO: 3893389 - RNA, 22 nt, Human
agcugcuaaaucuccuauuuuu

SEQ ID NO: 3893390 - RNA, 20 nt, Human
agcugcuacaaagaagacau

SEQ ID NO: 3893391 - RNA, 21 nt, Human
agcugcuacaaagaagacaug

SEQ ID NO: 3893392 - RNA, 22 nt, Human
agcugcuacaaagaagacaugu

SEQ ID NO: 3893393 - RNA, 21 nt, Human
agcugcuauccccaucucccu

SEQ ID NO: 3893394 - RNA, 23 nt, Human
agcugcuauccccaucucccugc

SEQ ID NO: 3893395 - RNA, 19 nt, Human
agcugcuauuuauuuuccu

SEQ ID NO: 3893396 - RNA, 19 nt, Human
agcugcucagaucccacuu

SEQ ID NO: 3893397 - RNA, 15 nt, Human
agcugcuccaggccu

SEQ ID NO: 3893398 - RNA, 18 nt, Human
agcugcuccaggccugca

SEQ ID NO: 3893399 - RNA, 17 nt, Human
agcugcuccccagcagc

SEQ ID NO: 3893400 - RNA, 19 nt, Human
agcugcuccccucccuccu

SEQ ID NO: 3893401 - RNA, 17 nt, Human
agcugcucccuggcauu

SEQ ID NO: 3893402 - RNA, 22 nt, Human
agcugcuccgaggacccaggaa

SEQ ID NO: 3893403 - RNA, 18 nt, Human
agcugcuccuagagggag

SEQ ID NO: 3893404 - RNA, 19 nt, Human
agcugcuccuagagggagg

SEQ ID NO: 3893405 - RNA, 14 nt, Human
agcugcucuauugu

SEQ ID NO: 3893406 - RNA, 16 nt, Human
agcugcucugagccac

SEQ ID NO: 3893407 - RNA, 14 nt, Human
agcugcucugccca

SEQ ID NO: 3893408 - RNA, 15 nt, Human
agcugcucugcccag

SEQ ID NO: 3893409 - RNA, 16 nt, Human
agcugcucugcccaga

SEQ ID NO: 3893410 - RNA, 18 nt, Human
agcugcucugcccagagc

SEQ ID NO: 3893411 - RNA, 15 nt, Human
agcugcugaaacaac

SEQ ID NO: 3893412 - RNA, 17 nt, Human
agcugcugaccaauugu

SEQ ID NO: 3893413 - RNA, 21 nt, Human
agcugcugaccaauugugcug

SEQ ID NO: 3893414 - RNA, 23 nt, Human
agcugcugaccaauugugcugcc

SEQ ID NO: 3893415 - RNA, 19 nt, Human
agcugcugagauccuggac

SEQ ID NO: 3893416 - RNA, 21 nt, Human
agcugcugagauccuggacug

SEQ ID NO: 3893417 - RNA, 16 nt, Human
agcugcugagccgcag

SEQ ID NO: 3893418 - RNA, 12 nt, Human
agcugcugccau

SEQ ID NO: 3893419 - RNA, 13 nt, Human
agcugcugcucug

SEQ ID NO: 3893420 - RNA, 18 nt, Human
agcugcugucuucuggac

SEQ ID NO: 3893421 - RNA, 12 nt, Human
agcugcuucucc

SEQ ID NO: 3893422 - RNA, 23 nt, Human
agcugcuucucccacuuggccaa

SEQ ID NO: 3893423 - RNA, 16 nt, Human
agcugcuugggcuuca

SEQ ID NO: 3893424 - RNA, 13 nt, Human
agcugcuuuguua

SEQ ID NO: 3893425 - RNA, 16 nt, Human
agcugcuuuguuaccu

SEQ ID NO: 3893426 - RNA, 17 nt, Human
agcugcuuuguuaccuu

SEQ ID NO: 3893427 - RNA, 21 nt, Human
agcugcuuuugucuaugggac

SEQ ID NO: 3893428 - RNA, 22 nt, Human
agcugcuuuugucuaugggacu

SEQ ID NO: 3893429 - RNA, 24 nt, Human
agcugcuuuugucuaugggacuca

SEQ ID NO: 3893430 - RNA, 12 nt, Human
agcuggaagcac

SEQ ID NO: 3893431 - RNA, 18 nt, Human
agcuggacagaggggacu

SEQ ID NO: 3893432 - RNA, 23 nt, Human
agcuggacagaggggacucuggg

SEQ ID NO: 3893433 - RNA, 15 nt, Human
agcuggaccaguggu

SEQ ID NO: 3893434 - RNA, 15 nt, Human
agcuggaccucacca

SEQ ID NO: 3893435 - RNA, 16 nt, Human
agcuggaccucaccaa

SEQ ID NO: 3893436 - RNA, 16 nt, Human
agcuggacucugcauc

SEQ ID NO: 3893437 - RNA, 15 nt, Human
agcuggagaggagcc

SEQ ID NO: 3893438 - RNA, 17 nt, Human
agcuggagaggagcccu

SEQ ID NO: 3893439 - RNA, 19 nt, Human
agcuggagaggagcccugc

SEQ ID NO: 3893440 - RNA, 22 nt, Human
agcuggagaugaggccagacca

SEQ ID NO: 3893441 - RNA, 23 nt, Human
agcuggagaugaggccagaccau

SEQ ID NO: 3893442 - RNA, 17 nt, Human
agcuggagccuggugcc

SEQ ID NO: 3893443 - RNA, 20 nt, Human
agcuggaggacuagaaccug

SEQ ID NO: 3893444 - RNA, 21 nt, Human
agcuggaggcaggggcuuccu

SEQ ID NO: 3893445 - RNA, 15 nt, Human
agcuggagugcagug

SEQ ID NO: 3893446 - RNA, 19 nt, Human
agcuggagugcaguggcau

SEQ ID NO: 3893447 - RNA, 22 nt, Human
agcuggaucuccauucucucag

SEQ ID NO: 3893448 - RNA, 15 nt, Human
agcuggcauuacagc

SEQ ID NO: 3893449 - RNA, 21 nt, Human
agcuggcauuacagcuggaga

SEQ ID NO: 3893450 - RNA, 13 nt, Human
agcuggccccgcc

SEQ ID NO: 3893451 - RNA, 14 nt, Human
agcuggccccgccg

SEQ ID NO: 3893452 - RNA, 15 nt, Human
agcuggccccgccgc

SEQ ID NO: 3893453 - RNA, 18 nt, Human
agcuggccgggagccuga

SEQ ID NO: 3893454 - RNA, 12 nt, Human
agcuggcuccag

SEQ ID NO: 3893455 - RNA, 13 nt, Human
agcuggcucugag

SEQ ID NO: 3893456 - RNA, 14 nt, Human
agcuggcucugagc

SEQ ID NO: 3893457 - RNA, 19 nt, Human
agcuggcucugagcgccuc

SEQ ID NO: 3893458 - RNA, 14 nt, Human
agcuggcucuguga

SEQ ID NO: 3893459 - RNA, 20 nt, Human
agcuggcucugugagggugc

SEQ ID NO: 3893460 - RNA, 22 nt, Human
agcuggcucugugagggugcug

SEQ ID NO: 3893461 - RNA, 14 nt, Human
agcuggcuggggug

SEQ ID NO: 3893462 - RNA, 20 nt, Human
agcuggcugggguggccugu

SEQ ID NO: 3893463 - RNA, 15 nt, Human
agcugggaccacagg

SEQ ID NO: 3893464 - RNA, 18 nt, Human
agcugggaccacaggugc

SEQ ID NO: 3893465 - RNA, 16 nt, Human
agcugggacuacaggc

SEQ ID NO: 3893466 - RNA, 15 nt, Human
agcugggaggaaaag

SEQ ID NO: 3893467 - RNA, 23 nt, Human
agcugggaggcaagaggggugga

SEQ ID NO: 3893468 - RNA, 14 nt, Human
agcugggaggcaug

SEQ ID NO: 3893469 - RNA, 16 nt, Human
agcugggaggcauggc

SEQ ID NO: 3893470 - RNA, 14 nt, Human
agcugggaucugac

SEQ ID NO: 3893471 - RNA, 19 nt, Human
agcugggaucugacugcac

SEQ ID NO: 3893472 - RNA, 23 nt, Human
agcugggaugauuggagggggga

SEQ ID NO: 3893473 - RNA, 22 nt, Human
agcugggauuacaggcuccugc

SEQ ID NO: 3893474 - RNA, 16 nt, Human
agcugggcagaaggcc

SEQ ID NO: 3893475 - RNA, 21 nt, Human
agcugggcaugguaccagccc

SEQ ID NO: 3893476 - RNA, 12 nt, Human
agcugggcccaa

SEQ ID NO: 3893477 - RNA, 22 nt, Human
agcugggccccagcccacccuc

SEQ ID NO: 3893478 - RNA, 15 nt, Human
agcugggcucugcca

SEQ ID NO: 3893479 - RNA, 22 nt, Human
agcugggcucugccacccuacc

SEQ ID NO: 3893480 - RNA, 20 nt, Human
agcuggggaagcuucuuaaa

SEQ ID NO: 3893481 - RNA, 18 nt, Human
agcuggggaggagcuuug

SEQ ID NO: 3893482 - RNA, 22 nt, Human
agcuggggaucccuccccccca

SEQ ID NO: 3893483 - RNA, 17 nt, Human
agcuggggccaggcugg

SEQ ID NO: 3893484 - RNA, 18 nt, Human
agcuggggcguggggagg

SEQ ID NO: 3893485 - RNA, 14 nt, Human
agcuggggugcagg

SEQ ID NO: 3893486 - RNA, 22 nt, Human
agcugggguggggaccucaggc

SEQ ID NO: 3893487 - RNA, 23 nt, Human
agcugggguggggaccucaggcc

SEQ ID NO: 3893488 - RNA, 14 nt, Human
agcugggucaggca

SEQ ID NO: 3893489 - RNA, 17 nt, Human
agcugggucaggcaggg

SEQ ID NO: 3893490 - RNA, 18 nt, Human
agcuggguggcacugcca

SEQ ID NO: 3893491 - RNA, 14 nt, Human
agcuggguuggaaa

SEQ ID NO: 3893492 - RNA, 13 nt, Human
agcugguaacauc

SEQ ID NO: 3893493 - RNA, 15 nt, Human
agcuggucccacuca

SEQ ID NO: 3893494 - RNA, 18 nt, Human
agcuggugagugaugcgg

SEQ ID NO: 3893495 - RNA, 13 nt, Human
agcuggugcauua

SEQ ID NO: 3893496 - RNA, 18 nt, Human
agcuggugcauuacagag

SEQ ID NO: 3893497 - RNA, 17 nt, Human
agcugguggaacauaug

SEQ ID NO: 3893498 - RNA, 15 nt, Human
agcugguggacccag

SEQ ID NO: 3893499 - RNA, 16 nt, Human
agcugguggcagaguc

SEQ ID NO: 3893500 - RNA, 20 nt, Human
agcugguguagcuacagaga

SEQ ID NO: 3893501 - RNA, 23 nt, Human
agcugguguagcuacagagaaac

SEQ ID NO: 3893502 - RNA, 19 nt, Human
agcugguuccugcuagaaa

SEQ ID NO: 3893503 - RNA, 16 nt, Human
agcugguugagguuuc

SEQ ID NO: 3893504 - RNA, 16 nt, Human
agcucccacaagccug

SEQ ID NO: 3893505 - RNA, 14 nt, Human
agcucccaccuccc

SEQ ID NO: 3893506 - RNA, 18 nt, Human
agcucccacuucugccag

SEQ ID NO: 3893507 - RNA, 23 nt, Human
agcucccaggaccacaggcucag

SEQ ID NO: 3893508 - RNA, 13 nt, Human
agcucccaggcau

SEQ ID NO: 3893509 - RNA, 13 nt, Human
agcucccaggccg

SEQ ID NO: 3893510 - RNA, 21 nt, Human
agcucccaggccgagaagcca

SEQ ID NO: 3893511 - RNA, 21 nt, Human
agcucccaggugcagccagag

SEQ ID NO: 3893512 - RNA, 13 nt, Human
agcucccauucua

SEQ ID NO: 3893513 - RNA, 23 nt, Human
agcucccauuucuacucucccau

SEQ ID NO: 3893514 - RNA, 20 nt, Human
agcuccccaccaccccagcu

SEQ ID NO: 3893515 - RNA, 18 nt, Human
agcuccccagaguccucu

SEQ ID NO: 3893516 - RNA, 15 nt, Human
agcuccccccaccuc

SEQ ID NO: 3893517 - RNA, 19 nt, Human
agcucccccgggaggggcc

SEQ ID NO: 3893518 - RNA, 13 nt, Human
agcucccccuguc

SEQ ID NO: 3893519 - RNA, 14 nt, Human
agcucccccugucc

SEQ ID NO: 3893520 - RNA, 21 nt, Human
agcucccccuguccccucagc

SEQ ID NO: 3893521 - RNA, 18 nt, Human
agcuccccuccccaacug

SEQ ID NO: 3893522 - RNA, 14 nt, Human
agcucccucccgca

SEQ ID NO: 3893523 - RNA, 14 nt, Human
agcucccugcccca

SEQ ID NO: 3893524 - RNA, 20 nt, Human
agcucccuggcuucuguggg

SEQ ID NO: 3893525 - RNA, 16 nt, Human
agcucccugugccccc

SEQ ID NO: 3893526 - RNA, 19 nt, Human
agcucccugugcccccagg

SEQ ID NO: 3893527 - RNA, 14 nt, Human
agcucccuucucug

SEQ ID NO: 3893528 - RNA, 20 nt, Human
agcuccgcuuucuacccagc

SEQ ID NO: 3893529 - RNA, 16 nt, Human
agcuccucacucaccu

SEQ ID NO: 3893530 - RNA, 12 nt, Human
agcuccucccac

SEQ ID NO: 3893531 - RNA, 22 nt, Human
agcuccuccgugcuuccucagu

SEQ ID NO: 3893532 - RNA, 13 nt, Human
agcuccuccuccc

SEQ ID NO: 3893533 - RNA, 14 nt, Human
agcuccuccucccu

SEQ ID NO: 3893534 - RNA, 17 nt, Human
agcuccuccucccugca

SEQ ID NO: 3893535 - RNA, 21 nt, Human
agcuccuccucccugcaucug

SEQ ID NO: 3893536 - RNA, 22 nt, Human
agcuccuccuugucuuggcagc

SEQ ID NO: 3893537 - RNA, 17 nt, Human
agcuccucgagggcagg

SEQ ID NO: 3893538 - RNA, 20 nt, Human
agcuccucgagggcagggac

SEQ ID NO: 3893539 - RNA, 16 nt, Human
agcuccucuccccagc

SEQ ID NO: 3893540 - RNA, 19 nt, Human
agcuccucuccccagccca

SEQ ID NO: 3893541 - RNA, 22 nt, Human
agcuccucuccccagcccagag

SEQ ID NO: 3893542 - RNA, 16 nt, Human
agcuccucuccuggag

SEQ ID NO: 3893543 - RNA, 17 nt, Human
agcuccucuccuggagg

SEQ ID NO: 3893544 - RNA, 20 nt, Human
agcuccucugggcaggaccu

SEQ ID NO: 3893545 - RNA, 18 nt, Human
agcuccucugucucgagc

SEQ ID NO: 3893546 - RNA, 10 nt, Human
agcuccugac

SEQ ID NO: 3893547 - RNA, 18 nt, Human
agcuccugacacugcugg

SEQ ID NO: 3893548 - RNA, 16 nt, Human
agcuccugaccaguug

SEQ ID NO: 3893549 - RNA, 13 nt, Human
agcuccuggggcg

SEQ ID NO: 3893550 - RNA, 20 nt, Human
agcuccuggucuugagaugu

SEQ ID NO: 3893551 - RNA, 14 nt, Human
agcuccuguccccu

SEQ ID NO: 3893552 - RNA, 21 nt, Human
agcuccuguccucccaucccc

SEQ ID NO: 3893553 - RNA, 15 nt, Human
agcuccuguggcccc

SEQ ID NO: 3893554 - RNA, 17 nt, Human
agcuccuuaaggcucuu

SEQ ID NO: 3893555 - RNA, 15 nt, Human
agcuccuucuguccu

SEQ ID NO: 3893556 - RNA, 16 nt, Human
agcuccuucuguccua

SEQ ID NO: 3893557 - RNA, 21 nt, Human
agcuccuugagggcaagagcc

SEQ ID NO: 3893558 - RNA, 17 nt, Human
agcuccuugggaggaag

SEQ ID NO: 3893559 - RNA, 19 nt, Human
agcuccuugggaggaagca

SEQ ID NO: 3893560 - RNA, 20 nt, Human
agcuccuugggaggaagcag

SEQ ID NO: 3893561 - RNA, 23 nt, Human
agcuccuugggaggaagcagaau

SEQ ID NO: 3893562 - RNA, 19 nt, Human
agcuccuugggaggcccca

SEQ ID NO: 3893563 - RNA, 22 nt, Human
agcuccuugggaggccccacug

SEQ ID NO: 3893564 - RNA, 19 nt, Human
agcuccuuuuccagagcau

SEQ ID NO: 3893565 - RNA, 17 nt, Human
agcucgaauuaagaaua

SEQ ID NO: 3893566 - RNA, 19 nt, Human
agcucgcaccccccuguuc

SEQ ID NO: 3893567 - RNA, 22 nt, Human
agcucgcaccccccuguucuaa

SEQ ID NO: 3893568 - RNA, 17 nt, Human
agcucgguggacccagg

SEQ ID NO: 3893569 - RNA, 18 nt, Human
agcucgguggacccaggg

SEQ ID NO: 3893570 - RNA, 20 nt, Human
agcucgguggacccagggau

SEQ ID NO: 3893571 - RNA, 20 nt, Human
agcucguguauccuggggcu

SEQ ID NO: 3893572 - RNA, 17 nt, Human
agcucuacccagggccu

SEQ ID NO: 3893573 - RNA, 20 nt, Human
agcucuacccagggccugca

SEQ ID NO: 3893574 - RNA, 17 nt, Human
agcucuagacaacccug

SEQ ID NO: 3893575 - RNA, 20 nt, Human
agcucuauuaagauuuccaa

SEQ ID NO: 3893576 - RNA, 12 nt, Human
agcucucagcca

SEQ ID NO: 3893577 - RNA, 17 nt, Human
agcucucaguugcagcc

SEQ ID NO: 3893578 - RNA, 13 nt, Human
agcucuccccuca

SEQ ID NO: 3893579 - RNA, 20 nt, Human
agcucucccucuggcccugc

SEQ ID NO: 3893580 - RNA, 17 nt, Human
agcucucggaacugcau

SEQ ID NO: 3893581 - RNA, 22 nt, Human
agcucucuaggccucuccaguu

SEQ ID NO: 3893582 - RNA, 18 nt, Human
agcucucuguauaaacau

SEQ ID NO: 3893583 - RNA, 16 nt, Human
agcucucuugccgagg

SEQ ID NO: 3893584 - RNA, 21 nt, Human
agcucucuugccgaggagcca

SEQ ID NO: 3893585 - RNA, 15 nt, Human
agcucugaaagagaa

SEQ ID NO: 3893586 - RNA, 22 nt, Human
agcucugaaagagaaacacgua

SEQ ID NO: 3893587 - RNA, 21 nt, Human
agcucugaagaacucucugga

SEQ ID NO: 3893588 - RNA, 13 nt, Human
agcucugagaggc

SEQ ID NO: 3893589 - RNA, 20 nt, Human
agcucugagaggcccuggau

SEQ ID NO: 3893590 - RNA, 21 nt, Human
agcucugagaggcccuggauc

SEQ ID NO: 3893591 - RNA, 23 nt, Human
agcucugagaggcccuggaucag

SEQ ID NO: 3893592 - RNA, 16 nt, Human
agcucugagcugucaa

SEQ ID NO: 3893593 - RNA, 20 nt, Human
agcucugaggacugcaccau

SEQ ID NO: 3893594 - RNA, 20 nt, Human
agcucugcaggcuuaauaaa

SEQ ID NO: 3893595 - RNA, 14 nt, Human
agcucugccgucuc

SEQ ID NO: 3893596 - RNA, 17 nt, Human
agcucugccgucucugg

SEQ ID NO: 3893597 - RNA, 18 nt, Human
agcucugccgucucugga

SEQ ID NO: 3893598 - RNA, 15 nt, Human
agcucugcuugccga

SEQ ID NO: 3893599 - RNA, 21 nt, Human
agcucugcuugccgaaacugg

SEQ ID NO: 3893600 - RNA, 23 nt, Human
agcucugcuugccgaaacuggaa

SEQ ID NO: 3893601 - RNA, 16 nt, Human
agcucuggagccaccu

SEQ ID NO: 3893602 - RNA, 12 nt, Human
agcucuggaggg

SEQ ID NO: 3893603 - RNA, 18 nt, Human
agcucuggaggggagggg

SEQ ID NO: 3893604 - RNA, 20 nt, Human
agcucuggaggggaggggga

SEQ ID NO: 3893605 - RNA, 12 nt, Human
agcucuggcuca

SEQ ID NO: 3893606 - RNA, 15 nt, Human
agcucuggcucacag

SEQ ID NO: 3893607 - RNA, 20 nt, Human
agcucuggcucacagacugg

SEQ ID NO: 3893608 - RNA, 16 nt, Human
agcucuggcugaaccc

SEQ ID NO: 3893609 - RNA, 21 nt, Human
agcucuggcugaacccugugc

SEQ ID NO: 3893610 - RNA, 12 nt, Human
agcucuggucca

SEQ ID NO: 3893611 - RNA, 17 nt, Human
agcucuggugacaccag

SEQ ID NO: 3893612 - RNA, 21 nt, Human
agcucuggugacaccagccuu

SEQ ID NO: 3893613 - RNA, 12 nt, Human
agcucuguauca

SEQ ID NO: 3893614 - RNA, 21 nt, Human
agcucuguccugggagugagc

SEQ ID NO: 3893615 - RNA, 15 nt, Human
agcucuguucuuccu

SEQ ID NO: 3893616 - RNA, 22 nt, Human
agcucuguucuuccucagccag

SEQ ID NO: 3893617 - RNA, 15 nt, Human
agcucuguuucgguu

SEQ ID NO: 3893618 - RNA, 18 nt, Human
agcucuuacucuuuccua

SEQ ID NO: 3893619 - RNA, 16 nt, Human
agcucuucaggccucc

SEQ ID NO: 3893620 - RNA, 19 nt, Human
agcucuuccuaucccucuc

SEQ ID NO: 3893621 - RNA, 15 nt, Human
agcucuucuccaggc

SEQ ID NO: 3893622 - RNA, 16 nt, Human
agcucuugcccuuccc

SEQ ID NO: 3893623 - RNA, 18 nt, Human
agcucuugcccuucccug

SEQ ID NO: 3893624 - RNA, 19 nt, Human
agcucuugcccuucccugu

SEQ ID NO: 3893625 - RNA, 22 nt, Human
agcucuugcccuucccuguccc

SEQ ID NO: 3893626 - RNA, 15 nt, Human
agcucuugcuaauca

SEQ ID NO: 3893627 - RNA, 19 nt, Human
agcucuugcuaaucagugu

SEQ ID NO: 3893628 - RNA, 23 nt, Human
agcucuugcuaaucagugucuca

SEQ ID NO: 3893629 - RNA, 15 nt, Human
agcucuuggagcugu

SEQ ID NO: 3893630 - RNA, 12 nt, Human
agcucuugugag

SEQ ID NO: 3893631 - RNA, 13 nt, Human
agcucuugugagg

SEQ ID NO: 3893632 - RNA, 17 nt, Human
agcucuuuccuccuucc

SEQ ID NO: 3893633 - RNA, 22 nt, Human
agcucuuuccuccuuccaugga

SEQ ID NO: 3893634 - RNA, 23 nt, Human
agcucuuuccuccuuccauggaa

SEQ ID NO: 3893635 - RNA, 15 nt, Human
agcucuuugucaggg

SEQ ID NO: 3893636 - RNA, 17 nt, Human
agcucuuugucagggag

SEQ ID NO: 3893637 - RNA, 11 nt, Human
agcucuuuuaa

SEQ ID NO: 3893638 - RNA, 13 nt, Human
agauucuuaauuc

SEQ ID NO: 3893639 - RNA, 12 nt, Human
agauucuugcau

SEQ ID NO: 3893640 - RNA, 21 nt, Human
agauucuuuccugaggcuggg

SEQ ID NO: 3893641 - RNA, 11 nt, Human
agauucuuuua

SEQ ID NO: 3893642 - RNA, 12 nt, Human
agauucuuuuaa

SEQ ID NO: 3893643 - RNA, 14 nt, Human
agauugaaaaucuu

SEQ ID NO: 3893644 - RNA, 13 nt, Human
agauugaccugga

SEQ ID NO: 3893645 - RNA, 17 nt, Human
agauugagaaggagaga

SEQ ID NO: 3893646 - RNA, 20 nt, Human
agauugagaccuacaggcug

SEQ ID NO: 3893647 - RNA, 20 nt, Human
agcaaaugucuuccuggauu

SEQ ID NO: 3893648 - RNA, 15 nt, Human
agcaaaugugaccug

SEQ ID NO: 3893649 - RNA, 16 nt, Human
agcaaauguggcuccu

SEQ ID NO: 3893650 - RNA, 13 nt, Human
agcaaauguuaca

SEQ ID NO: 3893651 - RNA, 15 nt, Human
agcaaauguuacaua

SEQ ID NO: 3893652 - RNA, 19 nt, Human
agcaaauguuacauagugu

SEQ ID NO: 3893653 - RNA, 14 nt, Human
agcaaauguuucug

SEQ ID NO: 3893654 - RNA, 19 nt, Human
agcaaauuaauuggcagca

SEQ ID NO: 3893655 - RNA, 20 nt, Human
agcaaauuuauaauuuuaag

SEQ ID NO: 3893656 - RNA, 14 nt, Human
agcaaauuucaaaa

SEQ ID NO: 3893657 - RNA, 24 nt, Human
agcaaauuucaaaagacauguugu

SEQ ID NO: 3893658 - RNA, 15 nt, Human
agcaaauuuucagca

SEQ ID NO: 3893659 - RNA, 23 nt, Human
agcaacaacaauugguaaaacuc

SEQ ID NO: 3893660 - RNA, 18 nt, Human
agcaacaauaaauagaca

SEQ ID NO: 3893661 - RNA, 18 nt, Human
agcaacacaaagcuuuug

SEQ ID NO: 3893662 - RNA, 20 nt, Human
agcaacacaagcuggaagca

SEQ ID NO: 3893663 - RNA, 13 nt, Human
agcaacacaaugu

SEQ ID NO: 3893664 - RNA, 11 nt, Human
agcaacacaga

SEQ ID NO: 3893665 - RNA, 15 nt, Human
agcaacacagaggaa

SEQ ID NO: 3893666 - RNA, 17 nt, Human
agcaacacagccugggc

SEQ ID NO: 3893667 - RNA, 18 nt, Human
agcaacacagccugggcc

SEQ ID NO: 3893668 - RNA, 21 nt, Human
agcaacacagccugggcccca

SEQ ID NO: 3893669 - RNA, 21 nt, Human
agcaacaggaaucaagagcug

SEQ ID NO: 3893670 - RNA, 23 nt, Human
agcaacaggaaucaagagcugcc

SEQ ID NO: 3893671 - RNA, 19 nt, Human
agcaacagguuuuauaauu

SEQ ID NO: 3893672 - RNA, 15 nt, Human
agcaacaucagcuug

SEQ ID NO: 3893673 - RNA, 15 nt, Human
agcaacaugcuucau

SEQ ID NO: 3893674 - RNA, 13 nt, Human
agcaacauggcuu

SEQ ID NO: 3893675 - RNA, 14 nt, Human
agcaacauggcuuu

SEQ ID NO: 3893676 - RNA, 15 nt, Human
agcaacauucauagu

SEQ ID NO: 3893677 - RNA, 22 nt, Human
agcaacauuuuacccacacaca

SEQ ID NO: 3893678 - RNA, 14 nt, Human
agcaaccccaggcu

SEQ ID NO: 3893679 - RNA, 21 nt, Human
agcaaccguggcccuuccugg

SEQ ID NO: 3893680 - RNA, 22 nt, Human
agcaaccguggcccuuccugga

SEQ ID NO: 3893681 - RNA, 15 nt, Human
agcaaccuacccagc

SEQ ID NO: 3893682 - RNA, 13 nt, Human
agcaaccucccaa

SEQ ID NO: 3893683 - RNA, 19 nt, Human
agcaaccuggguccaaaua

SEQ ID NO: 3893684 - RNA, 23 nt, Human
agcaaccuuucaccuuuguguau

SEQ ID NO: 3893685 - RNA, 19 nt, Human
agcaacgaucacaaaugac

SEQ ID NO: 3893686 - RNA, 20 nt, Human
agcaacgaucacaaaugacu

SEQ ID NO: 3893687 - RNA, 22 nt, Human
agcaacgaucacaaaugacuuu

SEQ ID NO: 3893688 - RNA, 23 nt, Human
agcaacgcaggcccccaggugcc

SEQ ID NO: 3893689 - RNA, 18 nt, Human
agcaacgcuauuccagcu

SEQ ID NO: 3893690 - RNA, 23 nt, Human
agcaacgcuauuccagcuguccc

SEQ ID NO: 3893691 - RNA, 13 nt, Human
agcaacggcacag

SEQ ID NO: 3893692 - RNA, 20 nt, Human
agcaacguagcuucuaccau

SEQ ID NO: 3893693 - RNA, 16 nt, Human
agcaacuaucagacua

SEQ ID NO: 3893694 - RNA, 12 nt, Human
agcaacugaaua

SEQ ID NO: 3893695 - RNA, 13 nt, Human
agcaacugaauaa

SEQ ID NO: 3893696 - RNA, 14 nt, Human
agcaacugaauaaa

SEQ ID NO: 3893697 - RNA, 15 nt, Human
agcaacugaauaaau

SEQ ID NO: 3893698 - RNA, 19 nt, Human
agcaacugaauaaauaccu

SEQ ID NO: 3893699 - RNA, 19 nt, Human
agcaacugcuguuggaagg

SEQ ID NO: 3893700 - RNA, 12 nt, Human
agcaacugggac

SEQ ID NO: 3893701 - RNA, 13 nt, Human
agcaacugucuau

SEQ ID NO: 3893702 - RNA, 16 nt, Human
agcaacugucuauuuc

SEQ ID NO: 3893703 - RNA, 21 nt, Human
agcaacugucuauuucugcug

SEQ ID NO: 3893704 - RNA, 13 nt, Human
agcaacuguuaug

SEQ ID NO: 3893705 - RNA, 21 nt, Human
agcaacuucuucuccaucccu

SEQ ID NO: 3893706 - RNA, 15 nt, Human
agcaacuugucuuuu

SEQ ID NO: 3893707 - RNA, 23 nt, Human
agcaacuugucuuuuucuggacu

SEQ ID NO: 3893708 - RNA, 17 nt, Human
agcaagaccccaucuca

SEQ ID NO: 3893709 - RNA, 17 nt, Human
agcaagacgcugugcug

SEQ ID NO: 3893710 - RNA, 16 nt, Human
agcaagacuguugcuc

SEQ ID NO: 3893711 - RNA, 12 nt, Human
agcaagagagau

SEQ ID NO: 3893712 - RNA, 15 nt, Human
agcaagagagauguu

SEQ ID NO: 3893713 - RNA, 17 nt, Human
agcaagagcuggcaaag

SEQ ID NO: 3893714 - RNA, 23 nt, Human
agcaagagcuggcaaagguggcu

SEQ ID NO: 3893715 - RNA, 12 nt, Human
agcaagaggagg

SEQ ID NO: 3893716 - RNA, 18 nt, Human
agcaagcauucagaagaa

SEQ ID NO: 3893717 - RNA, 11 nt, Human
agcaagcuccc

SEQ ID NO: 3893718 - RNA, 20 nt, Human
agcaagcucccaagggaugg

SEQ ID NO: 3893719 - RNA, 17 nt, Human
agcaagcugauuaaaug

SEQ ID NO: 3893720 - RNA, 22 nt, Human
agcaagcuuuuacaacagugcu

SEQ ID NO: 3893721 - RNA, 23 nt, Human
agcaagcuuuuuuauuuuuuaua

SEQ ID NO: 3893722 - RNA, 19 nt, Human
agcaaggagauuuacaacu

SEQ ID NO: 3893723 - RNA, 17 nt, Human
agcaaggaggcuggcug

SEQ ID NO: 3893724 - RNA, 13 nt, Human
agcaaggcaccug

SEQ ID NO: 3893725 - RNA, 17 nt, Human
agcaaggcccgagcagc

SEQ ID NO: 3893726 - RNA, 19 nt, Human
agcaaggcccgagcagcug

SEQ ID NO: 3893727 - RNA, 15 nt, Human
agcaaggcccugcug

SEQ ID NO: 3893728 - RNA, 17 nt, Human
agcaaggcccugcugcc

SEQ ID NO: 3893729 - RNA, 18 nt, Human
agcaaggcccugcugccc

SEQ ID NO: 3893730 - RNA, 21 nt, Human
agcaaggcgguggacuugaac

SEQ ID NO: 3893731 - RNA, 15 nt, Human
agcaaggggcucugc

SEQ ID NO: 3893732 - RNA, 18 nt, Human
agcaagggggugauguag

SEQ ID NO: 3893733 - RNA, 16 nt, Human
agcaagggugauggga

SEQ ID NO: 3893734 - RNA, 22 nt, Human
agcaagggugaugggaaagcau

SEQ ID NO: 3893735 - RNA, 23 nt, Human
agcaaggugcucacaccccauug

SEQ ID NO: 3893736 - RNA, 20 nt, Human
agcaagguggguggaaacua

SEQ ID NO: 3893737 - RNA, 18 nt, Human
agcaaguaaaaaggcuaa

SEQ ID NO: 3893738 - RNA, 22 nt, Human
agcaaguaaaaaggcuaaaugg

SEQ ID NO: 3893739 - RNA, 15 nt, Human
agcaaguagauaaau

SEQ ID NO: 3893740 - RNA, 14 nt, Human
agcaagucaggguu

SEQ ID NO: 3893741 - RNA, 14 nt, Human
agcaagucugcagg

SEQ ID NO: 3893742 - RNA, 23 nt, Human
agcaagugagacccugucucaaa

SEQ ID NO: 3893743 - RNA, 17 nt, Human
agcaagugagagagaug

SEQ ID NO: 3893744 - RNA, 18 nt, Human
agcaagugagagagaugg

SEQ ID NO: 3893745 - RNA, 24 nt, Human
agcaagugagagagaugggagcuc

SEQ ID NO: 3893746 - RNA, 16 nt, Human
agcaagugagagcugg

SEQ ID NO: 3893747 - RNA, 13 nt, Human
agcaagugguccu

SEQ ID NO: 3893748 - RNA, 23 nt, Human
agcaagugugaauacugcuugaa

SEQ ID NO: 3893749 - RNA, 17 nt, Human
agcaaguucuagagaag

SEQ ID NO: 3893750 - RNA, 21 nt, Human
agcaaguucuagagaagaggc

SEQ ID NO: 3893751 - RNA, 14 nt, Human
agcaauaaaugaau

SEQ ID NO: 3893752 - RNA, 16 nt, Human
agcaauaauuucugua

SEQ ID NO: 3893753 - RNA, 22 nt, Human
agcaauauauuaccagcaagaa

SEQ ID NO: 3893754 - RNA, 21 nt, Human
agcaauauuguauauuuuuau

SEQ ID NO: 3893755 - RNA, 22 nt, Human
agcaaucaagguuauaauuuuu

SEQ ID NO: 3893756 - RNA, 17 nt, Human
agcaauccauguuaguu

SEQ ID NO: 3893757 - RNA, 22 nt, Human
agcaauccauguuaguuuuuac

SEQ ID NO: 3893758 - RNA, 15 nt, Human
agcaauccucccacu

SEQ ID NO: 3893759 - RNA, 23 nt, Human
agcaauccucucaccucagccuc

SEQ ID NO: 3893760 - RNA, 15 nt, Human
agcaaucucuucauu

SEQ ID NO: 3893761 - RNA, 16 nt, Human
agcaaucugacccuau

SEQ ID NO: 3893762 - RNA, 15 nt, Human
agcaaugccugccca

SEQ ID NO: 3893763 - RNA, 21 nt, Human
agcaaugcugaugaaucacug

SEQ ID NO: 3893764 - RNA, 21 nt, Human
agcaauggacgguccgcagaa

SEQ ID NO: 3893765 - RNA, 16 nt, Human
agcaauggauauuugu

SEQ ID NO: 3893766 - RNA, 23 nt, Human
agcaauggugucaguauccaggc

SEQ ID NO: 3893767 - RNA, 14 nt, Human
agcaaugucugugc

SEQ ID NO: 3893768 - RNA, 14 nt, Human
agcaauuccaaccu

SEQ ID NO: 3893769 - RNA, 15 nt, Human
agcaauuccaaccuu

SEQ ID NO: 3893770 - RNA, 21 nt, Human
agcacaccaaucuuacuuugu

SEQ ID NO: 3893771 - RNA, 18 nt, Human
agcacacucauccccuca

SEQ ID NO: 3893772 - RNA, 20 nt, Human
agcacacucauccccucacu

SEQ ID NO: 3893773 - RNA, 15 nt, Human
agcacagaaaacuag

SEQ ID NO: 3893774 - RNA, 19 nt, Human
agcacagaaacagaggaga

SEQ ID NO: 3893775 - RNA, 16 nt, Human
agcacagaaggaggag

SEQ ID NO: 3893776 - RNA, 14 nt, Human
agcacagaauauuu

SEQ ID NO: 3893777 - RNA, 12 nt, Human
agcacagacccu

SEQ ID NO: 3893778 - RNA, 19 nt, Human
agcacagacccugcccugu

SEQ ID NO: 3893779 - RNA, 17 nt, Human
agcacagagaagacaaa

SEQ ID NO: 3893780 - RNA, 23 nt, Human
agcacagagagggggccaccucc

SEQ ID NO: 3893781 - RNA, 17 nt, Human
agcacagagagucugga

SEQ ID NO: 3893782 - RNA, 18 nt, Human
agcacagaggccuccugu

SEQ ID NO: 3893783 - RNA, 15 nt, Human
agcacagauggccag

SEQ ID NO: 3893784 - RNA, 20 nt, Human
agcacagauggccagccccu

SEQ ID NO: 3893785 - RNA, 19 nt, Human
agcacagcaaggaggcugg

SEQ ID NO: 3893786 - RNA, 10 nt, Human
agcacagcag

SEQ ID NO: 3893787 - RNA, 23 nt, Human
agcacagcagccuggggcuggcc

SEQ ID NO: 3893788 - RNA, 13 nt, Human
agcacagccaaca

SEQ ID NO: 3893789 - RNA, 12 nt, Human
agcacagcccuu

SEQ ID NO: 3893790 - RNA, 18 nt, Human
agcacagcucccugccaa

SEQ ID NO: 3893791 - RNA, 16 nt, Human
agcacagcuuagauuu

SEQ ID NO: 3893792 - RNA, 20 nt, Human
agcacagcuugaccugaggc

SEQ ID NO: 3893793 - RNA, 16 nt, Human
agcacaggcuaauuuu

SEQ ID NO: 3893794 - RNA, 12 nt, Human
agcacaggcuga

SEQ ID NO: 3893795 - RNA, 22 nt, Human
agcacaggcugagugcaggccc

SEQ ID NO: 3893796 - RNA, 21 nt, Human
agcacaggucccaccuccagc

SEQ ID NO: 3893797 - RNA, 19 nt, Human
agcacagugguggcagggc

SEQ ID NO: 3893798 - RNA, 16 nt, Human
agcacaguguuaaaug

SEQ ID NO: 3893799 - RNA, 18 nt, Human
agcacaguguuaaaugaa

SEQ ID NO: 3893800 - RNA, 19 nt, Human
agcacaguguuaaaugaaa

SEQ ID NO: 3893801 - RNA, 15 nt, Human
agcacaucucaacag

SEQ ID NO: 3893802 - RNA, 16 nt, Human
agcacaucucaacagg

SEQ ID NO: 3893803 - RNA, 23 nt, Human
agcacaugcccuaaugucuguau

SEQ ID NO: 3893804 - RNA, 16 nt, Human
agcacaugccucucuc

SEQ ID NO: 3893805 - RNA, 20 nt, Human
agcacaugcuggccagccug

SEQ ID NO: 3893806 - RNA, 16 nt, Human
agcacaugugcugccc

SEQ ID NO: 3893807 - RNA, 17 nt, Human
agcaccaaaauaagaaa

SEQ ID NO: 3893808 - RNA, 22 nt, Human
agcaccaaaucaaaaucucucc

SEQ ID NO: 3893809 - RNA, 22 nt, Human
agcaccaccaaacacaguguau

SEQ ID NO: 3893810 - RNA, 15 nt, Human
agcaccacccuccuu

SEQ ID NO: 3893811 - RNA, 14 nt, Human
agcaccagaaugua

SEQ ID NO: 3893812 - RNA, 17 nt, Human
agcaccagcuucuccag

SEQ ID NO: 3893813 - RNA, 18 nt, Human
agcaccagcuucuccagg

SEQ ID NO: 3893814 - RNA, 21 nt, Human
agcaccagcuucuccaggcuc

SEQ ID NO: 3893815 - RNA, 14 nt, Human
agcaccaggcacga

SEQ ID NO: 3893816 - RNA, 14 nt, Human
agcacccauuucaa

SEQ ID NO: 3893817 - RNA, 14 nt, Human
agcaccccaaggcu

SEQ ID NO: 3893818 - RNA, 14 nt, Human
agcaccccucucug

SEQ ID NO: 3893819 - RNA, 16 nt, Human
agcaccccucucugca

SEQ ID NO: 3893820 - RNA, 14 nt, Human
agcaccccuuccau

SEQ ID NO: 3893821 - RNA, 15 nt, Human
agcacccgggcucag

SEQ ID NO: 3893822 - RNA, 24 nt, Human
agcacccuauaaaucaacaccuua

SEQ ID NO: 3893823 - RNA, 16 nt, Human
agcaccgaauauugag

SEQ ID NO: 3893824 - RNA, 18 nt, Human
agcaccgaauauugagca

SEQ ID NO: 3893825 - RNA, 16 nt, Human
agcaccgccucuuccc

SEQ ID NO: 3893826 - RNA, 21 nt, Human
agcaccgcuuuuguucucgca

SEQ ID NO: 3893827 - RNA, 19 nt, Human
agcaccggaccagccuggc

SEQ ID NO: 3893828 - RNA, 19 nt, Human
agcaccgugucaagcugcu

SEQ ID NO: 3893829 - RNA, 22 nt, Human
agcaccgugucaagcugcucug

SEQ ID NO: 3893830 - RNA, 16 nt, Human
agcaccguucugugca

SEQ ID NO: 3893831 - RNA, 17 nt, Human
agcaccguucugugcac

SEQ ID NO: 3893832 - RNA, 14 nt, Human
agcaccuacagugu

SEQ ID NO: 3893833 - RNA, 19 nt, Human
agcaccuacaguguacagu

SEQ ID NO: 3893834 - RNA, 21 nt, Human
agcaccuacaguguacagucu

SEQ ID NO: 3893835 - RNA, 15 nt, Human
agcaccuacuuacau

SEQ ID NO: 3893836 - RNA, 14 nt, Human
agcaccucagccug

SEQ ID NO: 3893837 - RNA, 20 nt, Human
agcaccuccagccugaacag

SEQ ID NO: 3893838 - RNA, 16 nt, Human
agcaccuccaggccug

SEQ ID NO: 3893839 - RNA, 17 nt, Human
agcaccuccaggccugu

SEQ ID NO: 3893840 - RNA, 14 nt, Human
agcaccucccagcc

SEQ ID NO: 3893841 - RNA, 15 nt, Human
agcaccuccucagcc

SEQ ID NO: 3893842 - RNA, 16 nt, Human
agcaccugaacaguuu

SEQ ID NO: 3893843 - RNA, 22 nt, Human
agcaccugcccuaccugcccca

SEQ ID NO: 3893844 - RNA, 15 nt, Human
agcaccugccgaccu

SEQ ID NO: 3893845 - RNA, 20 nt, Human
agcaccugccgaccucgucc

SEQ ID NO: 3893846 - RNA, 22 nt, Human
agcaccugccgaccucguccuc

SEQ ID NO: 3893847 - RNA, 14 nt, Human
agcaccugccuccu

SEQ ID NO: 3893848 - RNA, 18 nt, Human
agcaccugccuccucguu

SEQ ID NO: 3893849 - RNA, 20 nt, Human
agcaccugcuucaugcucag

SEQ ID NO: 3893850 - RNA, 19 nt, Human
agcaccuuagacagucccu

SEQ ID NO: 3893851 - RNA, 20 nt, Human
agcaccuuagacagucccug

SEQ ID NO: 3893852 - RNA, 21 nt, Human
agcaccuuagacagucccugc

SEQ ID NO: 3893853 - RNA, 23 nt, Human
agcaccuuagacagucccugcca

SEQ ID NO: 3893854 - RNA, 19 nt, Human
agcaccuuccucacuucca

SEQ ID NO: 3893855 - RNA, 13 nt, Human
agcacgauuucug

SEQ ID NO: 3893856 - RNA, 21 nt, Human
agcacgauuucuguuuagaua

SEQ ID NO: 3893857 - RNA, 13 nt, Human
agcacggacaaua

SEQ ID NO: 3893858 - RNA, 17 nt, Human
agcacggacucuuacug

SEQ ID NO: 3893859 - RNA, 23 nt, Human
agcacuaaagcaguggacaccag

SEQ ID NO: 3893860 - RNA, 20 nt, Human
agcacuaaggugugcucuga

SEQ ID NO: 3893861 - RNA, 17 nt, Human
agcacuacucugugcca

SEQ ID NO: 3893862 - RNA, 14 nt, Human
agcacuacugggug

SEQ ID NO: 3893863 - RNA, 15 nt, Human
agcacuacugggugu

SEQ ID NO: 3893864 - RNA, 17 nt, Human
agcacuacuggguguca

SEQ ID NO: 3893865 - RNA, 19 nt, Human
agcacuacugggugucauu

SEQ ID NO: 3893866 - RNA, 20 nt, Human
agcacuacugggugucauuu

SEQ ID NO: 3893867 - RNA, 22 nt, Human
agcacuacugggugucauuuca

SEQ ID NO: 3893868 - RNA, 15 nt, Human
agcacucaggcucuc

SEQ ID NO: 3893869 - RNA, 17 nt, Human
agcacucaggcucucca

SEQ ID NO: 3893870 - RNA, 18 nt, Human
agcacucauuuucuauaa

SEQ ID NO: 3893871 - RNA, 21 nt, Human
agcacuccucgguacucccau

SEQ ID NO: 3893872 - RNA, 20 nt, Human
agcacuccugcuuaaucuuc

SEQ ID NO: 3893873 - RNA, 20 nt, Human
agcacucgcuagcaguggca

SEQ ID NO: 3893874 - RNA, 23 nt, Human
agcacucgcuagcaguggcaggc

SEQ ID NO: 3893875 - RNA, 19 nt, Human
agcacucugaguuuaccau

SEQ ID NO: 3893876 - RNA, 18 nt, Human
agcacugaaccugggaaa

SEQ ID NO: 3893877 - RNA, 13 nt, Human
agcacugacagau

SEQ ID NO: 3893878 - RNA, 23 nt, Human
agcacugacuagggaaaugauca

SEQ ID NO: 3893879 - RNA, 17 nt, Human
agcacugagcaaguuga

SEQ ID NO: 3893880 - RNA, 13 nt, Human
agcacugauuuca

SEQ ID NO: 3893881 - RNA, 12 nt, Human
agcacugccagg

SEQ ID NO: 3893882 - RNA, 13 nt, Human
agcacugccagga

SEQ ID NO: 3893883 - RNA, 17 nt, Human
agcacugccaggaggga

SEQ ID NO: 3893884 - RNA, 12 nt, Human
agcacugcccaa

SEQ ID NO: 3893885 - RNA, 13 nt, Human
agcaggaccucug

SEQ ID NO: 3893886 - RNA, 18 nt, Human
agcaggacuccaggccca

SEQ ID NO: 3893887 - RNA, 19 nt, Human
agcaggacuccaggcccaa

SEQ ID NO: 3893888 - RNA, 23 nt, Human
agcaggacuccaggcccaaggcu

SEQ ID NO: 3893889 - RNA, 16 nt, Human
agcaggacugaugucu

SEQ ID NO: 3893890 - RNA, 19 nt, Human
agcaggacugaugucuccu

SEQ ID NO: 3893891 - RNA, 22 nt, Human
agcaggagacgacaggcgagag

SEQ ID NO: 3893892 - RNA, 14 nt, Human
agcaggagaggaga

SEQ ID NO: 3893893 - RNA, 23 nt, Human
agcaggagauugagaaggagaga

SEQ ID NO: 3893894 - RNA, 14 nt, Human
agcaggaggccagg

SEQ ID NO: 3893895 - RNA, 15 nt, Human
agcaggaggccaggc

SEQ ID NO: 3893896 - RNA, 15 nt, Human
agcaggaggccccug

SEQ ID NO: 3893897 - RNA, 16 nt, Human
agcaggaggccccugg

SEQ ID NO: 3893898 - RNA, 16 nt, Human
agcaggaggccuagga

SEQ ID NO: 3893899 - RNA, 18 nt, Human
agcaggagggacagucuc

SEQ ID NO: 3893900 - RNA, 20 nt, Human
agcaggaguggugcagacag

SEQ ID NO: 3893901 - RNA, 21 nt, Human
agcaggauuuuuuuguagaga

SEQ ID NO: 3893902 - RNA, 16 nt, Human
agcaggcagccagcau

SEQ ID NO: 3893903 - RNA, 18 nt, Human
agcaggccaaggucugag

SEQ ID NO: 3893904 - RNA, 22 nt, Human
agcaggccaaggucugagccac

SEQ ID NO: 3893905 - RNA, 19 nt, Human
agcaggccagguccagaga

SEQ ID NO: 3893906 - RNA, 13 nt, Human
agcaggcccaccu

SEQ ID NO: 3893907 - RNA, 12 nt, Human
agcaggccuugc

SEQ ID NO: 3893908 - RNA, 21 nt, Human
agcaggccuuuugauauuaaa

SEQ ID NO: 3893909 - RNA, 17 nt, Human
agcaggcgcugugcuau

SEQ ID NO: 3893910 - RNA, 21 nt, Human
agcaggcgguggggagagaug

SEQ ID NO: 3893911 - RNA, 16 nt, Human
agcaggcuacugucag

SEQ ID NO: 3893912 - RNA, 17 nt, Human
agcaggcucgggcuccc

SEQ ID NO: 3893913 - RNA, 21 nt, Human
agcaggcucucaggccagcug

SEQ ID NO: 3893914 - RNA, 20 nt, Human
agcaggcugccagugccugg

SEQ ID NO: 3893915 - RNA, 16 nt, Human
agcaggcuggcagcuc

SEQ ID NO: 3893916 - RNA, 17 nt, Human
agcaggcuggcagcucu

SEQ ID NO: 3893917 - RNA, 22 nt, Human
agcaggcuucuaugaaagacuc

SEQ ID NO: 3893918 - RNA, 15 nt, Human
agcagggaaacagcu

SEQ ID NO: 3893919 - RNA, 12 nt, Human
agcagggaaggc

SEQ ID NO: 3893920 - RNA, 19 nt, Human
agcagggauuaaccucugc

SEQ ID NO: 3893921 - RNA, 14 nt, Human
agcagggcucagcg

SEQ ID NO: 3893922 - RNA, 15 nt, Human
agcagggcucagcgg

SEQ ID NO: 3893923 - RNA, 16 nt, Human
agcaggggcuacaaga

SEQ ID NO: 3893924 - RNA, 18 nt, Human
agcagggucuuuucaucu

SEQ ID NO: 3893925 - RNA, 22 nt, Human
agcagggucuuuucaucuggga

SEQ ID NO: 3893926 - RNA, 19 nt, Human
agcagggugggcuuguggg

SEQ ID NO: 3893927 - RNA, 17 nt, Human
agcaggguguugggaua

SEQ ID NO: 3893928 - RNA, 23 nt, Human
agcaggugauuggaccaggccau

SEQ ID NO: 3893929 - RNA, 16 nt, Human
agcaggugcugcuacc

SEQ ID NO: 3893930 - RNA, 16 nt, Human
agcagguggcaucucu

SEQ ID NO: 3893931 - RNA, 17 nt, Human
agcaggugguccugaga

SEQ ID NO: 3893932 - RNA, 18 nt, Human
agcaggugguccugagac

SEQ ID NO: 3893933 - RNA, 18 nt, Human
agcaggugugagggcagu

SEQ ID NO: 3893934 - RNA, 14 nt, Human
agcagguuaaaugu

SEQ ID NO: 3893935 - RNA, 15 nt, Human
agcagguuaaauguu

SEQ ID NO: 3893936 - RNA, 16 nt, Human
agcagguuaaauguuu

SEQ ID NO: 3893937 - RNA, 14 nt, Human
agcagguuagagaa

SEQ ID NO: 3893938 - RNA, 23 nt, Human
agcagguucccaagcucagaggc

SEQ ID NO: 3893939 - RNA, 20 nt, Human
agcagguugaggggcuccug

SEQ ID NO: 3893940 - RNA, 22 nt, Human
agcagguugaggggcuccugga

SEQ ID NO: 3893941 - RNA, 18 nt, Human
agcagguugauaaaucau

SEQ ID NO: 3893942 - RNA, 14 nt, Human
agcagguuucaagg

SEQ ID NO: 3893943 - RNA, 17 nt, Human
agcagguuuuucuccuc

SEQ ID NO: 3893944 - RNA, 13 nt, Human
agcaguaaaauag

SEQ ID NO: 3893945 - RNA, 20 nt, Human
agcaguaaauuugcuagcag

SEQ ID NO: 3893946 - RNA, 14 nt, Human
agcaguagacauuu

SEQ ID NO: 3893947 - RNA, 23 nt, Human
agcaguagacauuuuaacaagaa

SEQ ID NO: 3893948 - RNA, 16 nt, Human
agcaguauauuaguau

SEQ ID NO: 3893949 - RNA, 13 nt, Human
agcaguauuuugg

SEQ ID NO: 3893950 - RNA, 16 nt, Human
agcaguccccuucccu

SEQ ID NO: 3893951 - RNA, 17 nt, Human
agcagucgugccugugu

SEQ ID NO: 3893952 - RNA, 19 nt, Human
agcagucgugccugugucc

SEQ ID NO: 3893953 - RNA, 21 nt, Human
agcagucuacccaccucagcc

SEQ ID NO: 3893954 - RNA, 15 nt, Human
agcagucucugccuu

SEQ ID NO: 3893955 - RNA, 20 nt, Human
agcagucucugccuugccuu

SEQ ID NO: 3893956 - RNA, 21 nt, Human
agcagugagaaaaagcuccug

SEQ ID NO: 3893957 - RNA, 16 nt, Human
agcagugagagcagau

SEQ ID NO: 3893958 - RNA, 13 nt, Human
agcagugagcaga

SEQ ID NO: 3893959 - RNA, 22 nt, Human
agcagugagccgcaucuucucc

SEQ ID NO: 3893960 - RNA, 17 nt, Human
agcagugcaugcugucc

SEQ ID NO: 3893961 - RNA, 16 nt, Human
agcagugcccaggugg

SEQ ID NO: 3893962 - RNA, 23 nt, Human
agcagugcccagguggcugugga

SEQ ID NO: 3893963 - RNA, 16 nt, Human
agcagugccuuccaua

SEQ ID NO: 3893964 - RNA, 16 nt, Human
agcgggucugcuccca

SEQ ID NO: 3893965 - RNA, 19 nt, Human
agcgguaccaaugcagaac

SEQ ID NO: 3893966 - RNA, 22 nt, Human
agcggucucaggcuggugggag

SEQ ID NO: 3893967 - RNA, 23 nt, Human
agcggucucaggcuggugggagg

SEQ ID NO: 3893968 - RNA, 15 nt, Human
agcgguggcccuguc

SEQ ID NO: 3893969 - RNA, 19 nt, Human
agcgguuuggggagcagag

SEQ ID NO: 3893970 - RNA, 22 nt, Human
agcgguuuggggagcagagaca

SEQ ID NO: 3893971 - RNA, 13 nt, Human
agcguaaaauggu

SEQ ID NO: 3893972 - RNA, 18 nt, Human
agcguacucaucaucaac

SEQ ID NO: 3893973 - RNA, 23 nt, Human
agcguagcuaagugaaaagguca

SEQ ID NO: 3893974 - RNA, 17 nt, Human
agcguagugcagcaggg

SEQ ID NO: 3893975 - RNA, 23 nt, Human
agcgucaggguuggugugcugag

SEQ ID NO: 3893976 - RNA, 13 nt, Human
agcgucccagucu

SEQ ID NO: 3893977 - RNA, 16 nt, Human
agcgucccagucucug

SEQ ID NO: 3893978 - RNA, 18 nt, Human
agcgucccagucucuggc

SEQ ID NO: 3893979 - RNA, 15 nt, Human
agcguccuccucugu

SEQ ID NO: 3893980 - RNA, 19 nt, Human
agcguccuccucugugacc

SEQ ID NO: 3893981 - RNA, 15 nt, Human
agcgugagccacugc

SEQ ID NO: 3893982 - RNA, 20 nt, Human
agcgugcuccagccuggcuc

SEQ ID NO: 3893983 - RNA, 13 nt, Human
agcguggacuggu

SEQ ID NO: 3893984 - RNA, 21 nt, Human
agcguggcgcaguggcccuga

SEQ ID NO: 3893985 - RNA, 24 nt, Human
agcguggcgcaguggcccugagca

SEQ ID NO: 3893986 - RNA, 17 nt, Human
agcguggcugugcucuc

SEQ ID NO: 3893987 - RNA, 20 nt, Human
agcgugguggacaugcacag

SEQ ID NO: 3893988 - RNA, 23 nt, Human
agcgugguggacaugcacagcua

SEQ ID NO: 3893989 - RNA, 18 nt, Human
agcguguuuacaugugua

SEQ ID NO: 3893990 - RNA, 12 nt, Human
agcguucuugua

SEQ ID NO: 3893991 - RNA, 14 nt, Human
agcguugcaugucg

SEQ ID NO: 3893992 - RNA, 21 nt, Human
agcguuugaggggcuggccuu

SEQ ID NO: 3893993 - RNA, 22 nt, Human
agcguuugcccaaaucugccua

SEQ ID NO: 3893994 - RNA, 22 nt, Human
agcguuuugcaagguaaaauuu

SEQ ID NO: 3893995 - RNA, 19 nt, Human
agcguuuuuuaaauguaua

SEQ ID NO: 3893996 - RNA, 20 nt, Human
agcguuuuuuaaauguauac

SEQ ID NO: 3893997 - RNA, 18 nt, Human
agcuaaacuccuuccugg

SEQ ID NO: 3893998 - RNA, 23 nt, Human
agcuaaacuccuuccuggccuga

SEQ ID NO: 3893999 - RNA, 13 nt, Human
agcuaaagaggcu

SEQ ID NO: 3894000 - RNA, 15 nt, Human
agcuaaagaggcuga

SEQ ID NO: 3894001 - RNA, 16 nt, Human
agcuaacacacagcuc

SEQ ID NO: 3894002 - RNA, 18 nt, Human
agcuaacacacagcuccc

SEQ ID NO: 3894003 - RNA, 16 nt, Human
agcuaacagggaaggc

SEQ ID NO: 3894004 - RNA, 20 nt, Human
agcuaacagggaaggcaggc

SEQ ID NO: 3894005 - RNA, 22 nt, Human
agcuaacauuuuaaauaaaaga

SEQ ID NO: 3894006 - RNA, 19 nt, Human
agcuaacccagguccccuc

SEQ ID NO: 3894007 - RNA, 15 nt, Human
agcuaaccuuauccu

SEQ ID NO: 3894008 - RNA, 16 nt, Human
agcuaacuguaaauca

SEQ ID NO: 3894009 - RNA, 17 nt, Human adenovirus A
agccccuuaccaacacc

SEQ ID NO: 3894010 - RNA, 12 nt, Human adenovirus A
agccgucaaaau

SEQ ID NO: 3894011 - RNA, 15 nt, Human adenovirus A
agccugaaaaauaaa

SEQ ID NO: 3894012 - RNA, 12 nt, Human adenovirus A
agccuggauaaa

SEQ ID NO: 3894013 - RNA, 15 nt, Human adenovirus A
agcgacgagcaauua

SEQ ID NO: 3894014 - RNA, 17 nt, Human adenovirus A
agcgaucccauagcuca

SEQ ID NO: 3894015 - RNA, 13 nt, Human adenovirus A
agcgcacuggcau

SEQ ID NO: 3894016 - RNA, 15 nt, Human adenovirus A
agcgccagaggacca

SEQ ID NO: 3894017 - RNA, 17 nt, Human adenovirus A
agcgccgagccacagcc

SEQ ID NO: 3894018 - RNA, 17 nt, Human adenovirus A
agcggcauuccccaucc

SEQ ID NO: 3894019 - RNA, 18 nt, Human adenovirus A
agcggggaggaagcugag

SEQ ID NO: 3894020 - RNA, 14 nt, Human adenovirus A
agcggucuuaaaaa

SEQ ID NO: 3894021 - RNA, 18 nt, Human adenovirus A
agcgucuucguacuuaaa

SEQ ID NO: 3894022 - RNA, 21 nt, Human adenovirus A
agcguuucagcgccaacaaaa

SEQ ID NO: 3894023 - RNA, 16 nt, Human adenovirus A
agcuaaaucugccacu

SEQ ID NO: 3894024 - RNA, 19 nt, Human adenovirus A
agcuaagcgucugcauauc

SEQ ID NO: 3894025 - RNA, 23 nt, Human adenovirus A
agcuaugaugcgggcagccaggc

SEQ ID NO: 3894026 - RNA, 20 nt, Human adenovirus A
agcucaguuauauuuucuau

SEQ ID NO: 3894027 - RNA, 20 nt, Human adenovirus A
agcucaugugaaggcgccag

SEQ ID NO: 3894028 - RNA, 18 nt, Human adenovirus A
agcucauuggaguacaag

SEQ ID NO: 3894029 - RNA, 13 nt, Human adenovirus A
agcugaaaacaac

SEQ ID NO: 3894030 - RNA, 18 nt, Human adenovirus A
agcugaaaacaacugcac

SEQ ID NO: 3894031 - RNA, 13 nt, Human adenovirus A
agcugacggccau

SEQ ID NO: 3894032 - RNA, 19 nt, Human adenovirus A
agcugccguucguccucuu

SEQ ID NO: 3894033 - RNA, 17 nt, Human adenovirus A
agcuggcgggagggcau

SEQ ID NO: 3894034 - RNA, 18 nt, Human adenovirus A
agcuggguugguguugcu

SEQ ID NO: 3894035 - RNA, 14 nt, Human adenovirus A
agcuuagccuuaau

SEQ ID NO: 3894036 - RNA, 16 nt, Human adenovirus A
agcuuagccuuaauaa

SEQ ID NO: 3894037 - RNA, 19 nt, Human adenovirus A
agcuucagaugacuggaca

SEQ ID NO: 3894038 - RNA, 20 nt, Human adenovirus A
agcuucagaugacuggacag

SEQ ID NO: 3894039 - RNA, 21 nt, Human adenovirus A
agcuucuccagacaacuucau

SEQ ID NO: 3894040 - RNA, 22 nt, Human adenovirus A
agcuugaaacucuaacugcuca

SEQ ID NO: 3894041 - RNA, 17 nt, Human adenovirus A
aggaaaacaaacaacga

SEQ ID NO: 3894042 - RNA, 21 nt, Human adenovirus A
aggaaagacagccaagaccag

SEQ ID NO: 3894043 - RNA, 20 nt, Human adenovirus A
aggaacuccgcgcaaggagc

SEQ ID NO: 3894044 - RNA, 13 nt, Human adenovirus A
aggaagacagcau

SEQ ID NO: 3894045 - RNA, 15 nt, Human adenovirus A
aggaaugucuucacu

SEQ ID NO: 3894046 - RNA, 23 nt, Human adenovirus A
aggacacggaguguaccuugauc

SEQ ID NO: 3894047 - RNA, 15 nt, Human adenovirus A
aggaccccaaggcau

SEQ ID NO: 3894048 - RNA, 18 nt, Human adenovirus A
aggaggacuuugagccag

SEQ ID NO: 3894049 - RNA, 17 nt, Human adenovirus A
aggagguauuccuccuu

SEQ ID NO: 3894050 - RNA, 23 nt, Human adenovirus A
aggauccagaggaggaggaggaa

SEQ ID NO: 3894051 - RNA, 14 nt, Human adenovirus A
aggauguugggccc

SEQ ID NO: 3894052 - RNA, 17 nt, Human adenovirus A
aggauugggaguucaaa

SEQ ID NO: 3894053 - RNA, 12 nt, Human adenovirus A
aggcaaagaaca

SEQ ID NO: 3894054 - RNA, 12 nt, Human adenovirus A
aggcaacagaug

SEQ ID NO: 3894055 - RNA, 16 nt, Human adenovirus A
aggcaauuucugccau

SEQ ID NO: 3894056 - RNA, 14 nt, Human adenovirus A
aggcauuaaauggu

SEQ ID NO: 3894057 - RNA, 14 nt, Human adenovirus A
aggcgcuccuaaug

SEQ ID NO: 3894058 - RNA, 15 nt, Human adenovirus A
aggcggucugccauu

SEQ ID NO: 3894059 - RNA, 16 nt, Human adenovirus A
aggcugucacuuugca

SEQ ID NO: 3894060 - RNA, 21 nt, Human adenovirus A
agggagauguccuguuuaaac

SEQ ID NO: 3894061 - RNA, 22 nt, Human adenovirus A
agggcaaccacggccucagcag

SEQ ID NO: 3894062 - RNA, 12 nt, Human adenovirus A
aggggcucuuuu

SEQ ID NO: 3894063 - RNA, 19 nt, Human adenovirus A
agguaauuuucauucuucc

SEQ ID NO: 3894064 - RNA, 20 nt, Human adenovirus A
aggucgaggacuuggaagaa

SEQ ID NO: 3894065 - RNA, 14 nt, Human adenovirus A
agguggcuggacug

SEQ ID NO: 3894066 - RNA, 15 nt, Human adenovirus A
agguggcuggacugc

SEQ ID NO: 3894067 - RNA, 18 nt, Human adenovirus A
agguuccguuccuguugc

SEQ ID NO: 3894068 - RNA, 17 nt, Human adenovirus A
agguuuuuacauuccag

SEQ ID NO: 3894069 - RNA, 20 nt, Human adenovirus A
agguuuuuugggaugaaaaa

SEQ ID NO: 3894070 - RNA, 12 nt, Human adenovirus A
aguaaaaaaagc

SEQ ID NO: 3894071 - RNA, 22 nt, Human adenovirus A
aguaaaucuuccgccaaaggua

SEQ ID NO: 3894072 - RNA, 14 nt, Human adenovirus A
aguaggcuaacugu

SEQ ID NO: 3894073 - RNA, 22 nt, Human adenovirus A
aguaugcugaagaaacagaaga

SEQ ID NO: 3894074 - RNA, 21 nt, Human adenovirus A
aguauggugacgguucuucuc

SEQ ID NO: 3894075 - RNA, 14 nt, Human adenovirus A
aguauuuuguaaag

SEQ ID NO: 3894076 - RNA, 12 nt, Human adenovirus A
agucagcugcaa

SEQ ID NO: 3894077 - RNA, 17 nt, Human adenovirus A
aguccaagcaaguacaa

SEQ ID NO: 3894078 - RNA, 14 nt, Human adenovirus A
aguccaauuucguu

SEQ ID NO: 3894079 - RNA, 23 nt, Human adenovirus A
aguccguuuucuucuugagccca

SEQ ID NO: 3894080 - RNA, 18 nt, Human adenovirus A
agucgcaauuagggccag

SEQ ID NO: 3894081 - RNA, 19 nt, Human adenovirus A
agugaauggaacaccagca

SEQ ID NO: 3894082 - RNA, 22 nt, Human adenovirus A
agugaccgggacgcgugugcca

SEQ ID NO: 3894083 - RNA, 23 nt, Human adenovirus A
agugcccucacacuuaacacaag

SEQ ID NO: 3894084 - RNA, 19 nt, Human adenovirus A
agugcuggaaagugacauu

SEQ ID NO: 3894085 - RNA, 23 nt, Human adenovirus A
agugguauuccgcgguccuccuc

SEQ ID NO: 3894086 - RNA, 22 nt, Human adenovirus A
aguguacgcagacgaugacauu

SEQ ID NO: 3894087 - RNA, 15 nt, Human adenovirus A
aguguacuuggugga

SEQ ID NO: 3894088 - RNA, 17 nt, Human adenovirus A
aguguauggaaaaaacg

SEQ ID NO: 3894089 - RNA, 21 nt, Human adenovirus A
agugucauuuacugcagccug

SEQ ID NO: 3894090 - RNA, 12 nt, Human adenovirus A
agugucccaaca

SEQ ID NO: 3894091 - RNA, 20 nt, Human adenovirus A
aguguuuguuugaaaaaugu

SEQ ID NO: 3894092 - RNA, 18 nt, Human adenovirus A
aguuaauugauuuacaaa

SEQ ID NO: 3894093 - RNA, 17 nt, Human adenovirus A
aguuauauuuucuaugc

SEQ ID NO: 3894094 - RNA, 19 nt, Human adenovirus A
aguucaugcuaaaagcuuc

SEQ ID NO: 3894095 - RNA, 18 nt, Human adenovirus A
aguucuaaugcaaguugu

SEQ ID NO: 3894096 - RNA, 16 nt, Human adenovirus A
aguucuguuucaugua

SEQ ID NO: 3894097 - RNA, 13 nt, Human adenovirus A
aguugacuggcau

SEQ ID NO: 3894098 - RNA, 15 nt, Human adenovirus A
aguuuaaaggcauua

SEQ ID NO: 3894099 - RNA, 22 nt, Human adenovirus A
aguuuaacgaggugcagcugcc

SEQ ID NO: 3894100 - RNA, 14 nt, Human adenovirus A
aguuucuccuucua

SEQ ID NO: 3894101 - RNA, 19 nt, Human adenovirus A
aguuuucuuuuuucuuaca

SEQ ID NO: 3894102 - RNA, 22 nt, Human adenovirus A
auaaaacuaccugauaacaaga

SEQ ID NO: 3894103 - RNA, 14 nt, Human adenovirus A
auaaaauuucuaga

SEQ ID NO: 3894104 - RNA, 14 nt, Human adenovirus A
auaaacaucucaua

SEQ ID NO: 3894105 - RNA, 21 nt, Human adenovirus A
auaaagcgcagaguauccaca

SEQ ID NO: 3894106 - RNA, 21 nt, Human adenovirus A
auaaagcguucuguggauggg

SEQ ID NO: 3894107 - RNA, 14 nt, Human adenovirus A
auaacacagcuucu

SEQ ID NO: 3894108 - RNA, 14 nt, Human adenovirus A
auaaccaaucuaca

SEQ ID NO: 3894109 - RNA, 16 nt, Human adenovirus A
auaagcauuagagucg

SEQ ID NO: 3894110 - RNA, 20 nt, Human adenovirus A
auaauguaauugaaguaagc

SEQ ID NO: 3894111 - RNA, 13 nt, Human adenovirus A
auacaauguggcc

SEQ ID NO: 3894112 - RNA, 23 nt, Human adenovirus A
auacacucauguauuuuuucaaa

SEQ ID NO: 3894113 - RNA, 19 nt, Human adenovirus A
auacauaauuuuaaaguaa

SEQ ID NO: 3894114 - RNA, 22 nt, Human adenovirus A
auacauauaugggcucuuuuag

SEQ ID NO: 3894115 - RNA, 21 nt, Human adenovirus A
auaccacuuggcagcugccgu

SEQ ID NO: 3894116 - RNA, 17 nt, Human adenovirus A
auaccuuaaaaacuguu

SEQ ID NO: 3894117 - RNA, 21 nt, Human adenovirus A
auacgcgugguuaaacugccu

SEQ ID NO: 3894118 - RNA, 13 nt, Human adenovirus A
auacuaaagaaac

SEQ ID NO: 3894119 - RNA, 20 nt, Human adenovirus A
auacuaaauaucgcagcugg

SEQ ID NO: 3894120 - RNA, 13 nt, Human adenovirus A
auagaaaguuugg

SEQ ID NO: 3894121 - RNA, 16 nt, Human adenovirus A
auagcaacaacgcugg

SEQ ID NO: 3894122 - RNA, 18 nt, Human adenovirus A
auagcugaaccccagggu

SEQ ID NO: 3894123 - RNA, 15 nt, Human adenovirus A
auaggcauugggaau

SEQ ID NO: 3894124 - RNA, 16 nt, Human adenovirus A
auaggccaaacagcug

SEQ ID NO: 3894125 - RNA, 19 nt, Human adenovirus A
uuuguagcugaaaacaacu

SEQ ID NO: 3894126 - RNA, 15 nt, Human adenovirus A
uuuguauucugcuaa

SEQ ID NO: 3894127 - RNA, 16 nt, Human adenovirus A
uuuuaccuaaaccaca

SEQ ID NO: 3894128 - RNA, 14 nt, Human adenovirus A
uuuucuuagaugca

SEQ ID NO: 3894129 - RNA, 12 nt, Human adenovirus A
ccaguuaaugcu

SEQ ID NO: 3894130 - RNA, 19 nt, Human adenovirus A
ccaguuucaauugcagaac

SEQ ID NO: 3894131 - RNA, 20 nt, Human adenovirus A
ccaguuucaauugcagaacu

SEQ ID NO: 3894132 - RNA, 11 nt, Human adenovirus A
ccauaguucuu

SEQ ID NO: 3894133 - RNA, 20 nt, Human adenovirus A
ccauaucugaucgcucuuca

SEQ ID NO: 3894134 - RNA, 23 nt, Human adenovirus A
ccauccgugcguuaccacccuag

SEQ ID NO: 3894135 - RNA, 22 nt, Human adenovirus A
ccaucuugcuuguuuaaacauu

SEQ ID NO: 3894136 - RNA, 11 nt, Human adenovirus A
ccaugagcccg

SEQ ID NO: 3894137 - RNA, 16 nt, Human adenovirus A
ccaugcaaagccagcc

SEQ ID NO: 3894138 - RNA, 13 nt, Human adenovirus A
ccauggcuuccau

SEQ ID NO: 3894139 - RNA, 20 nt, Human adenovirus A
ccaugggaauagugcucuaa

SEQ ID NO: 3894140 - RNA, 12 nt, Human adenovirus A
ccauugacaaag

SEQ ID NO: 3894141 - RNA, 19 nt, Human adenovirus A
ccauugggagucagacccg

SEQ ID NO: 3894142 - RNA, 19 nt, Human adenovirus A
ccauuguaaaugcuuuguu

SEQ ID NO: 3894143 - RNA, 19 nt, Human adenovirus A
ccauuugaucagaaaaaac

SEQ ID NO: 3894144 - RNA, 21 nt, Human adenovirus A
ccauuuugguuucgccaagua

SEQ ID NO: 3894145 - RNA, 14 nt, Human adenovirus A
cccaacccuuccca

SEQ ID NO: 3894146 - RNA, 14 nt, Human adenovirus A
cccaacuuaacgca

SEQ ID NO: 3894147 - RNA, 13 nt, Human adenovirus A
cccaagggugcag

SEQ ID NO: 3894148 - RNA, 18 nt, Human adenovirus A
cccaaucaaauuacacac

SEQ ID NO: 3894149 - RNA, 14 nt, Human adenovirus A
cccacagccagugg

SEQ ID NO: 3894150 - RNA, 22 nt, Human adenovirus A
cccagggcaaccacggccucag

SEQ ID NO: 3894151 - RNA, 13 nt, Human adenovirus A
cccccguuaccaa

SEQ ID NO: 3894152 - RNA, 22 nt, Human adenovirus A
cccgcgguuuuggcggccaugc

SEQ ID NO: 3894153 - RNA, 23 nt, Human adenovirus A
cccgcgguuuuggcggccaugca

SEQ ID NO: 3894154 - RNA, 19 nt, Human adenovirus A
cccggauccguuccaacca

SEQ ID NO: 3894155 - RNA, 23 nt, Human adenovirus A
cccggcguaaccaaauacugcua

SEQ ID NO: 3894156 - RNA, 14 nt, Human adenovirus A
cccuacgugccucc

SEQ ID NO: 3894157 - RNA, 21 nt, Human adenovirus A
cccuccuggauuuuacacugg

SEQ ID NO: 3894158 - RNA, 20 nt, Human adenovirus A
cccucuuggccagcugcccu

SEQ ID NO: 3894159 - RNA, 17 nt, Human adenovirus A
cccugucaacagcauug

SEQ ID NO: 3894160 - RNA, 13 nt, Human adenovirus A
ccgaaagaccacu

SEQ ID NO: 3894161 - RNA, 13 nt, Human adenovirus A
ccgacaacacugu

SEQ ID NO: 3894162 - RNA, 14 nt, Human adenovirus A
ccgccgccaaaccg

SEQ ID NO: 3894163 - RNA, 17 nt, Human adenovirus A
ccgcggcgucagcagac

SEQ ID NO: 3894164 - RNA, 20 nt, Human adenovirus A
ccgcuacaccacguaaucaa

SEQ ID NO: 3894165 - RNA, 14 nt, Human adenovirus A
ccggcuuguugaau

SEQ ID NO: 3894166 - RNA, 21 nt, Human adenovirus A
ccguacaaggcauuggaaagc

SEQ ID NO: 3894167 - RNA, 21 nt, Human adenovirus A
ccguacaugggcaccuggaac

SEQ ID NO: 3894168 - RNA, 14 nt, Human adenovirus A
ccguuccuguugca

SEQ ID NO: 3894169 - RNA, 16 nt, Human adenovirus A
ccuaaauauuguauuu

SEQ ID NO: 3894170 - RNA, 21 nt, Human adenovirus A
ccuaauggagugucacugccg

SEQ ID NO: 3894171 - RNA, 20 nt, Human adenovirus A
ccuacacuuacgaauggaac

SEQ ID NO: 3894172 - RNA, 20 nt, Human adenovirus A
ccuacccuucuuuauguuuu

SEQ ID NO: 3894173 - RNA, 22 nt, Human adenovirus A
ccuacuuuguauacucuggaac

SEQ ID NO: 3894174 - RNA, 23 nt, Human adenovirus A
ccuaggcaacguuggcagcgacg

SEQ ID NO: 3894175 - RNA, 15 nt, Human adenovirus A
ccuauagaggcuggc

SEQ ID NO: 3894176 - RNA, 23 nt, Human adenovirus A
ccuccccuguggagccacugcua

SEQ ID NO: 3894177 - RNA, 12 nt, Human adenovirus A
ccuccuggaggu

SEQ ID NO: 3894178 - RNA, 17 nt, Human adenovirus A
ccucgaccugcaugucc

SEQ ID NO: 3894179 - RNA, 22 nt, Human adenovirus A
ccugacgccuucauacccaacu

SEQ ID NO: 3894180 - RNA, 12 nt, Human adenovirus A
ccugacgcucug

SEQ ID NO: 3894181 - RNA, 21 nt, Human adenovirus A
ccugauaacaagaacaccuac

SEQ ID NO: 3894182 - RNA, 22 nt, Human adenovirus A
ccugaugcuuuucgccagcagc

SEQ ID NO: 3894183 - RNA, 20 nt, Human adenovirus A
ccugauuucuaacuuguuuc

SEQ ID NO: 3894184 - RNA, 17 nt, Human adenovirus A
ccugccggucgagcgcg

SEQ ID NO: 3894185 - RNA, 19 nt, Human adenovirus A
ccugccggucgagcgcgga

SEQ ID NO: 3894186 - RNA, 16 nt, Human adenovirus A
ccugcgacaaaugcga

SEQ ID NO: 3894187 - RNA, 16 nt, Human adenovirus A
ccuggagcuguccaug

SEQ ID NO: 3894188 - RNA, 20 nt, Human adenovirus A
ccuggcaaacggguggaaaa

SEQ ID NO: 3894189 - RNA, 14 nt, Human adenovirus A
ccugguaaaacaag

SEQ ID NO: 3894190 - RNA, 20 nt, Human adenovirus A
ccugucuuaaaaucuccuga

SEQ ID NO: 3894191 - RNA, 15 nt, Human adenovirus A
ccugugcaaacugca

SEQ ID NO: 3894192 - RNA, 11 nt, Human adenovirus A
ccuguggagcc

SEQ ID NO: 3894193 - RNA, 12 nt, Human adenovirus A
ccuguggagcca

SEQ ID NO: 3894194 - RNA, 15 nt, Human adenovirus A
ccuuauccuuccagu

SEQ ID NO: 3894195 - RNA, 13 nt, Human adenovirus A
ccuugcaggcuuc

SEQ ID NO: 3894196 - RNA, 15 nt, Human adenovirus A
ccuuugcucaggcgc

SEQ ID NO: 3894197 - RNA, 23 nt, Human adenovirus A
cgaaaaaaaucacuuccgcauau

SEQ ID NO: 3894198 - RNA, 16 nt, Human adenovirus A
cgaaagaccacuaaaa

SEQ ID NO: 3894199 - RNA, 10 nt, Human adenovirus A
cgacaaaugc

SEQ ID NO: 3894200 - RNA, 12 nt, Human adenovirus A
cgacaacacugu

SEQ ID NO: 3894201 - RNA, 16 nt, Human adenovirus A
cgaccgccgccaaacc

SEQ ID NO: 3894202 - RNA, 18 nt, Human adenovirus A
cgacgcaaaaaaggggca

SEQ ID NO: 3894203 - RNA, 15 nt, Human adenovirus A
cgacgggccaggcgc

SEQ ID NO: 3894204 - RNA, 16 nt, Human adenovirus A
cgacgggccaggcgca

SEQ ID NO: 3894205 - RNA, 18 nt, Human adenovirus A
cgacguugcaagaggaga

SEQ ID NO: 3894206 - RNA, 16 nt, Human adenovirus A
cgagaacggagagggu

SEQ ID NO: 3894207 - RNA, 12 nt, Human adenovirus A
cgagccagcuga

SEQ ID NO: 3894208 - RNA, 15 nt, Human adenovirus A
cgagcuaaccgcagc

SEQ ID NO: 3894209 - RNA, 19 nt, Human adenovirus A
cgagcucccggaggaagcg

SEQ ID NO: 3894210 - RNA, 20 nt, Human adenovirus A
cgagcucccggaggaagcgg

SEQ ID NO: 3894211 - RNA, 14 nt, Human adenovirus A
cgaggucaagaaca

SEQ ID NO: 3894212 - RNA, 14 nt, Human adenovirus A
cgauguuauugacu

SEQ ID NO: 3894213 - RNA, 13 nt, Human adenovirus A
cgauuccaaggaa

SEQ ID NO: 3894214 - RNA, 15 nt, Human adenovirus A
cgauuuuccaaaugu

SEQ ID NO: 3894215 - RNA, 22 nt, Human adenovirus A
cgcaauuagggccagcauugcc

SEQ ID NO: 3894216 - RNA, 16 nt, Human adenovirus A
cgcacggccaaugccc

SEQ ID NO: 3894217 - RNA, 21 nt, Human adenovirus A
cgcagaccuacgguggcagcc

SEQ ID NO: 3894218 - RNA, 20 nt, Human adenovirus A
cgcagacgaugacauuuugg

SEQ ID NO: 3894219 - RNA, 15 nt, Human adenovirus A
cgcagcaacgcucaa

SEQ ID NO: 3894220 - RNA, 19 nt, Human adenovirus A
cgcagccgcgcagaugagc

SEQ ID NO: 3894221 - RNA, 17 nt, Human adenovirus A
cgcaggagaaaauaaca

SEQ ID NO: 3894222 - RNA, 19 nt, Human adenovirus A
cgcaguccugaugcuuuuc

SEQ ID NO: 3894223 - RNA, 23 nt, Human adenovirus A
cgcaguggucuuacaugcacauc

SEQ ID NO: 3894224 - RNA, 23 nt, Human adenovirus A
cgcaugcguaucucacuuaaguc

SEQ ID NO: 3894225 - RNA, 16 nt, Human adenovirus A
cgccauccgcaggcag

SEQ ID NO: 3894226 - RNA, 18 nt, Human adenovirus A
cgcccacucuccugagcg

SEQ ID NO: 3894227 - RNA, 20 nt, Human adenovirus A
cgcccuuacagaucacggga

SEQ ID NO: 3894228 - RNA, 14 nt, Human adenovirus A
cgcgaaacuggggg

SEQ ID NO: 3894229 - RNA, 16 nt, Human adenovirus A
cgcgcacugggccagg

SEQ ID NO: 3894230 - RNA, 14 nt, Human adenovirus A
cgcgcggccagagc

SEQ ID NO: 3894231 - RNA, 18 nt, Human adenovirus A
cgcgugccaggcauuucc

SEQ ID NO: 3894232 - RNA, 12 nt, Human adenovirus A
cgcuccauccaa

SEQ ID NO: 3894233 - RNA, 13 nt, Human adenovirus A
cgcucucaccgcu

SEQ ID NO: 3894234 - RNA, 22 nt, Human adenovirus A
cgcucuggcaggggaagguguu

SEQ ID NO: 3894235 - RNA, 12 nt, Human adenovirus A
cgcugcagcuuc

SEQ ID NO: 3894236 - RNA, 16 nt, Human adenovirus A
cgcuggggcacagcuu

SEQ ID NO: 3894237 - RNA, 16 nt, Human adenovirus A
cgcuuuugccagacua

SEQ ID NO: 3894238 - RNA, 14 nt, Human adenovirus A
cggaaaucugaaaa

SEQ ID NO: 3894239 - RNA, 17 nt, Human adenovirus A
cggacagagcauucaug

SEQ ID NO: 3894240 - RNA, 18 nt, Human adenovirus A
cggacgcuggcaaugaca

SEQ ID NO: 3894241 - RNA, 16 nt, Human adenovirus A
cggaggaaagggcuga

SEQ ID NO: 3894242 - RNA, 21 nt, Human adenovirus A
cggaguucccacagaacauac

SEQ ID NO: 3894243 - RNA, 22 nt, Human adenovirus A
cggcaccuuuuaccuaaaccac

SEQ ID NO: 3894244 - RNA, 21 nt, Human adenovirus A
cggccuguuuuguuguauguu

SEQ ID NO: 3894245 - RNA, 18 nt, Human adenovirus A
cggcgauugauaucuuga

SEQ ID NO: 3894246 - RNA, 14 nt, Human adenovirus A
cuuaagcagugaaa

SEQ ID NO: 3894247 - RNA, 22 nt, Human adenovirus A
cuuaaggcgggguauguuuaga

SEQ ID NO: 3894248 - RNA, 18 nt, Human adenovirus A
cuuaagucuuuacaauaa

SEQ ID NO: 3894249 - RNA, 20 nt, Human adenovirus A
cuuaaugaacaaugcuauua

SEQ ID NO: 3894250 - RNA, 22 nt, Human adenovirus A
cuuaauuucaugguuugcuaac

SEQ ID NO: 3894251 - RNA, 12 nt, Human adenovirus A
cuuaauuucuag

SEQ ID NO: 3894252 - RNA, 14 nt, Human adenovirus A
cuuacauuuaauaa

SEQ ID NO: 3894253 - RNA, 16 nt, Human adenovirus A
cuuaccaaagccaugg

SEQ ID NO: 3894254 - RNA, 19 nt, Human adenovirus A
cuuacuacgacuugcuaac

SEQ ID NO: 3894255 - RNA, 18 nt, Human adenovirus A
cuuaguaacagcauauga

SEQ ID NO: 3894256 - RNA, 15 nt, Human adenovirus A
cuuaguuguaaauuc

SEQ ID NO: 3894257 - RNA, 20 nt, Human adenovirus A
cuucaaaguaccuuacaaac

SEQ ID NO: 3894258 - RNA, 18 nt, Human adenovirus A
cuucagcguccaugaaug

SEQ ID NO: 3894259 - RNA, 17 nt, Human adenovirus A
cuucauacccaacuuug

SEQ ID NO: 3894260 - RNA, 13 nt, Human adenovirus A
cuucaucuuuucu

SEQ ID NO: 3894261 - RNA, 15 nt, Human adenovirus A
cuuccaucaccuuug

SEQ ID NO: 3894262 - RNA, 12 nt, Human adenovirus A
cuuccuccugga

SEQ ID NO: 3894263 - RNA, 23 nt, Human adenovirus A
cuucguaaaagucuacugcaaaa

SEQ ID NO: 3894264 - RNA, 14 nt, Human adenovirus A
cuucuacuuuagaa

SEQ ID NO: 3894265 - RNA, 22 nt, Human adenovirus A
cuucucccugugcuucggcaag

SEQ ID NO: 3894266 - RNA, 10 nt, Human adenovirus A
cuucugccua

SEQ ID NO: 3894267 - RNA, 19 nt, Human adenovirus A
cuugagccuggauaaagcg

SEQ ID NO: 3894268 - RNA, 17 nt, Human adenovirus A
cuugcacaaauggaccc

SEQ ID NO: 3894269 - RNA, 18 nt, Human adenovirus A
cuugccgaaugcgcauac

SEQ ID NO: 3894270 - RNA, 17 nt, Human adenovirus A
cuugcuuccagacaaaa

SEQ ID NO: 3894271 - RNA, 19 nt, Human adenovirus A
cuuggaagaaugggaggag

SEQ ID NO: 3894272 - RNA, 21 nt, Human adenovirus A
cuuggaagaaugggaggagga

SEQ ID NO: 3894273 - RNA, 19 nt, Human adenovirus A
cuuggaauaaaauuucuag

SEQ ID NO: 3894274 - RNA, 20 nt, Human adenovirus A
cuuggaauaaaauuucuaga

SEQ ID NO: 3894275 - RNA, 22 nt, Human adenovirus A
cuuggcuucgaaugcugugaca

SEQ ID NO: 3894276 - RNA, 17 nt, Human adenovirus A
cuuggugguucugccuc

SEQ ID NO: 3894277 - RNA, 16 nt, Human adenovirus A
cuugucaacuacauaa

SEQ ID NO: 3894278 - RNA, 16 nt, Human adenovirus A
cuuguuuaaacauucg

SEQ ID NO: 3894279 - RNA, 21 nt, Human adenovirus A
cuuuaacggcgcgcaguccug

SEQ ID NO: 3894280 - RNA, 15 nt, Human adenovirus A
cuuuaagggcuggcg

SEQ ID NO: 3894281 - RNA, 22 nt, Human adenovirus A
cuuuaagggcuggcgcuuccau

SEQ ID NO: 3894282 - RNA, 16 nt, Human adenovirus A
cuuuaauaaaaacacu

SEQ ID NO: 3894283 - RNA, 14 nt, Human adenovirus A
cuuuaauguuucag

SEQ ID NO: 3894284 - RNA, 14 nt, Human adenovirus A
cuuucagcccauga

SEQ ID NO: 3894285 - RNA, 17 nt, Human adenovirus A
cuuuccaccucuaccuc

SEQ ID NO: 3894286 - RNA, 22 nt, Human adenovirus A
cuuucuaagguguguaaacaca

SEQ ID NO: 3894287 - RNA, 18 nt, Human adenovirus A
cuuugaauaguucaucuu

SEQ ID NO: 3894288 - RNA, 15 nt, Human adenovirus A
cuuugacaacauugc

SEQ ID NO: 3894289 - RNA, 18 nt, Human adenovirus A
cuuuggacuucugccuac

SEQ ID NO: 3894290 - RNA, 16 nt, Human adenovirus A
cuuuggaggcagcugg

SEQ ID NO: 3894291 - RNA, 21 nt, Human adenovirus A
cuuuguagaagcuuauguaca

SEQ ID NO: 3894292 - RNA, 14 nt, Human adenovirus A
cuuugugacuuccc

SEQ ID NO: 3894293 - RNA, 14 nt, Human adenovirus A
cuuuucaaacuuua

SEQ ID NO: 3894294 - RNA, 17 nt, Human adenovirus A
cuuuucuagaacaaaaa

SEQ ID NO: 3894295 - RNA, 16 nt, Human adenovirus A
cuuuucuuacauuacc

SEQ ID NO: 3894296 - RNA, 21 nt, Human adenovirus A
cuuuucuucguugagccaugu

SEQ ID NO: 3894297 - RNA, 20 nt, Human adenovirus A
cuuuuuuuuuccauaguucu

SEQ ID NO: 3894298 - RNA, 14 nt, Human adenovirus A
gaaacucccuuagu

SEQ ID NO: 3894299 - RNA, 14 nt, Human adenovirus A
gaaagaucacagcc

SEQ ID NO: 3894300 - RNA, 18 nt, Human adenovirus A
gaaagaucacagccagau

SEQ ID NO: 3894301 - RNA, 16 nt, Human adenovirus A
gaaagcagaugggaaa

SEQ ID NO: 3894302 - RNA, 21 nt, Human adenovirus A
gaaagcuuagccuuaauaacc

SEQ ID NO: 3894303 - RNA, 19 nt, Human adenovirus A
gaaaugcgagacugcaggu

SEQ ID NO: 3894304 - RNA, 17 nt, Human adenovirus A
gaacaaacagugccugu

SEQ ID NO: 3894305 - RNA, 22 nt, Human adenovirus A
gaacaaacgguuacagaggaac

SEQ ID NO: 3894306 - RNA, 23 nt, Human adenovirus A
gaacaaacgguuacagaggaacg

SEQ ID NO: 3894307 - RNA, 16 nt, Human adenovirus A
gaacacuuagagggag

SEQ ID NO: 3894308 - RNA, 17 nt, Human adenovirus A
gaacaucgcaaaacacg

SEQ ID NO: 3894309 - RNA, 15 nt, Human adenovirus A
gaaccgucugcauga

SEQ ID NO: 3894310 - RNA, 16 nt, Human adenovirus A
gaaccuuucaagaaag

SEQ ID NO: 3894311 - RNA, 16 nt, Human adenovirus A
gaacgacgaagucaca

SEQ ID NO: 3894312 - RNA, 23 nt, Human adenovirus A
gaacgcauauugcgcuauguaca

SEQ ID NO: 3894313 - RNA, 21 nt, Human adenovirus A
gaacggaacuacucagaacaa

SEQ ID NO: 3894314 - RNA, 21 nt, Human adenovirus A
gaacggucgauuucggcggcg

SEQ ID NO: 3894315 - RNA, 20 nt, Human adenovirus A
gaacguaacuuucaaaaaag

SEQ ID NO: 3894316 - RNA, 19 nt, Human adenovirus A
gaacuauuucuuguucuuc

SEQ ID NO: 3894317 - RNA, 16 nt, Human adenovirus A
gaacucgagugcaugc

SEQ ID NO: 3894318 - RNA, 17 nt, Human adenovirus A
gaacucgagugcaugca

SEQ ID NO: 3894319 - RNA, 13 nt, Human adenovirus A
gaacuugggcuac

SEQ ID NO: 3894320 - RNA, 17 nt, Human adenovirus A
gaagauuucugcuguca

SEQ ID NO: 3894321 - RNA, 13 nt, Human adenovirus A
gaagcacuggcaa

SEQ ID NO: 3894322 - RNA, 18 nt, Human adenovirus A
gaagccauguuaagaaau

SEQ ID NO: 3894323 - RNA, 15 nt, Human adenovirus A
gaaggaaaugauggc

SEQ ID NO: 3894324 - RNA, 17 nt, Human adenovirus A
gaaggguggggugcugc

SEQ ID NO: 3894325 - RNA, 19 nt, Human adenovirus A
gaagugccucaaagugaag

SEQ ID NO: 3894326 - RNA, 16 nt, Human adenovirus A
gaaucggcaacagcag

SEQ ID NO: 3894327 - RNA, 12 nt, Human adenovirus A
gaaugcucugga

SEQ ID NO: 3894328 - RNA, 20 nt, Human adenovirus A
gaaugggaggaaagacagcc

SEQ ID NO: 3894329 - RNA, 21 nt, Human adenovirus A
gaauuauucccgcagccaaca

SEQ ID NO: 3894330 - RNA, 22 nt, Human adenovirus A
gaauucgcaggcggucugccau

SEQ ID NO: 3894331 - RNA, 13 nt, Human adenovirus A
gaauuugaaaaca

SEQ ID NO: 3894332 - RNA, 12 nt, Human adenovirus A
gacaaaaagacu

SEQ ID NO: 3894333 - RNA, 19 nt, Human adenovirus A
gacaacauccuuuuucuac

SEQ ID NO: 3894334 - RNA, 17 nt, Human adenovirus A
gacaccauugaaaccag

SEQ ID NO: 3894335 - RNA, 18 nt, Human adenovirus A
gacacggcacgcggccgu

SEQ ID NO: 3894336 - RNA, 20 nt, Human adenovirus A
gacagagcgcggcugcgaca

SEQ ID NO: 3894337 - RNA, 17 nt, Human adenovirus A
gacagcuuuuauaugcg

SEQ ID NO: 3894338 - RNA, 24 nt, Human adenovirus A
gacagcuuuuauaugcgcauggcu

SEQ ID NO: 3894339 - RNA, 15 nt, Human adenovirus A
gacauaauuuuccca

SEQ ID NO: 3894340 - RNA, 22 nt, Human adenovirus A
gaccaaacgcaaguucaaagaa

SEQ ID NO: 3894341 - RNA, 18 nt, Human adenovirus A
gaccaauuaacaguuugc

SEQ ID NO: 3894342 - RNA, 15 nt, Human adenovirus A
gaccacagguggugg

SEQ ID NO: 3894343 - RNA, 12 nt, Human adenovirus A
gaccccaaggca

SEQ ID NO: 3894344 - RNA, 20 nt, Human adenovirus A
gacgaagcgucagcucguug

SEQ ID NO: 3894345 - RNA, 18 nt, Human adenovirus A
gacgagcaauuaacuaag

SEQ ID NO: 3894346 - RNA, 14 nt, Human adenovirus A
gacgcagugaguga

SEQ ID NO: 3894347 - RNA, 21 nt, Human adenovirus A
gacgccaacaggaucaaaaaa

SEQ ID NO: 3894348 - RNA, 18 nt, Human adenovirus A
gacgggagcaggaacaga

SEQ ID NO: 3894349 - RNA, 12 nt, Human adenovirus A
gacuaaaacaaa

SEQ ID NO: 3894350 - RNA, 15 nt, Human adenovirus A
gacucggcauaauac

SEQ ID NO: 3894351 - RNA, 21 nt, Human adenovirus A
gacugcagguuuagggccggu

SEQ ID NO: 3894352 - RNA, 16 nt, Human adenovirus A
gacugcugcgugagga

SEQ ID NO: 3894353 - RNA, 16 nt, Human adenovirus A
gacuggcugcuuugcg

SEQ ID NO: 3894354 - RNA, 13 nt, Human adenovirus A
gacugucaguguc

SEQ ID NO: 3894355 - RNA, 23 nt, Human adenovirus A
gacuguccagggcuuuuggcuuc

SEQ ID NO: 3894356 - RNA, 21 nt, Human adenovirus A
gacuuauuuuugauucaaaca

SEQ ID NO: 3894357 - RNA, 22 nt, Human adenovirus A
gagacgggccgcagcugcggcc

SEQ ID NO: 3894358 - RNA, 21 nt, Human adenovirus A
gagaucggcacgagccagcug

SEQ ID NO: 3894359 - RNA, 17 nt, Human adenovirus A
gagauuacgugcgagac

SEQ ID NO: 3894360 - RNA, 14 nt, Human adenovirus A
gagcagcaaaugcc

SEQ ID NO: 3894361 - RNA, 16 nt, Human adenovirus A
gagccguccagcagug

SEQ ID NO: 3894362 - RNA, 13 nt, Human adenovirus A
uaaccgcccccac

SEQ ID NO: 3894363 - RNA, 23 nt, Human adenovirus A
uaaccugggauacuaccgcugcu

SEQ ID NO: 3894364 - RNA, 13 nt, Human adenovirus A
uaaccuugcaaaa

SEQ ID NO: 3894365 - RNA, 17 nt, Human adenovirus A
uaacgaggugcagcugc

SEQ ID NO: 3894366 - RNA, 19 nt, Human adenovirus A
uaacgcuaccaccuaagaa

SEQ ID NO: 3894367 - RNA, 15 nt, Human adenovirus A
uaacuccgggagugu

SEQ ID NO: 3894368 - RNA, 13 nt, Human adenovirus A
uaagacuuacccc

SEQ ID NO: 3894369 - RNA, 21 nt, Human adenovirus A
uaagagcaaagguaucucuga

SEQ ID NO: 3894370 - RNA, 14 nt, Human adenovirus A
uaagauuguaauuu

SEQ ID NO: 3894371 - RNA, 22 nt, Human adenovirus A
uaaggcggcguccuuucucugu

SEQ ID NO: 3894372 - RNA, 13 nt, Human adenovirus A
uaaguuuaaaggc

SEQ ID NO: 3894373 - RNA, 13 nt, Human adenovirus A
uaauacuggcuaa

SEQ ID NO: 3894374 - RNA, 13 nt, Human adenovirus A
uaaucacaacaca

SEQ ID NO: 3894375 - RNA, 16 nt, Human adenovirus A
uaaucacaacacagca

SEQ ID NO: 3894376 - RNA, 16 nt, Human adenovirus A
uaauccuaggcaaaga

SEQ ID NO: 3894377 - RNA, 14 nt, Human adenovirus A
uaaugaaaacaaug

SEQ ID NO: 3894378 - RNA, 20 nt, Human adenovirus A
uaaugaggcuuuucauccag

SEQ ID NO: 3894379 - RNA, 13 nt, Human adenovirus A
uaaugcagcuuca

SEQ ID NO: 3894380 - RNA, 23 nt, Human adenovirus A
uaauggagcggcugacagagcgc

SEQ ID NO: 3894381 - RNA, 17 nt, Human adenovirus A
uaauuaagcgagcccaa

SEQ ID NO: 3894382 - RNA, 18 nt, Human adenovirus A
uaauugauuuacaaaccg

SEQ ID NO: 3894383 - RNA, 18 nt, Human adenovirus A
uaauuuuagauguuaauu

SEQ ID NO: 3894384 - RNA, 18 nt, Human adenovirus A
uacaaaaaguaacaacag

SEQ ID NO: 3894385 - RNA, 22 nt, Human adenovirus A
uacaaacuggaacuuaacaacu

SEQ ID NO: 3894386 - RNA, 13 nt, Human adenovirus A
uacaaaucuuuca

SEQ ID NO: 3894387 - RNA, 14 nt, Human adenovirus A
uacaaaucuuucaa

SEQ ID NO: 3894388 - RNA, 18 nt, Human adenovirus A
uacaaaugcuuagucauu

SEQ ID NO: 3894389 - RNA, 21 nt, Human adenovirus A
uacaacauuggauaccaaggu

SEQ ID NO: 3894390 - RNA, 19 nt, Human adenovirus A
uacaacugcuccccucaac

SEQ ID NO: 3894391 - RNA, 19 nt, Human adenovirus A
uacaagcacgccaaagcca

SEQ ID NO: 3894392 - RNA, 23 nt, Human adenovirus A
uacaaggaccgcauguauucuuu

SEQ ID NO: 3894393 - RNA, 11 nt, Human adenovirus A
uacaaggcauu

SEQ ID NO: 3894394 - RNA, 21 nt, Human adenovirus A
uacagaaaaaaauugccaacc

SEQ ID NO: 3894395 - RNA, 19 nt, Human adenovirus A
uacagccccuuugaagagc

SEQ ID NO: 3894396 - RNA, 15 nt, Human adenovirus A
uacauaauccagcaa

SEQ ID NO: 3894397 - RNA, 19 nt, Human adenovirus A
uacauccuuccauugugcc

SEQ ID NO: 3894398 - RNA, 21 nt, Human adenovirus A
uacauccuuccauugugccca

SEQ ID NO: 3894399 - RNA, 17 nt, Human adenovirus A
uacaucuuuuacuaaaa

SEQ ID NO: 3894400 - RNA, 18 nt, Human adenovirus A
uacauuaggcuccacacc

SEQ ID NO: 3894401 - RNA, 22 nt, Human adenovirus A
uaccaaauuauugcuuuccucu

SEQ ID NO: 3894402 - RNA, 15 nt, Human adenovirus A
uaccaacaccucaca

SEQ ID NO: 3894403 - RNA, 21 nt, Human adenovirus A
uaccaagguuuuuacauucca

SEQ ID NO: 3894404 - RNA, 12 nt, Human adenovirus A
uaccaaugaggc

SEQ ID NO: 3894405 - RNA, 22 nt, Human adenovirus A
uacccggcgauugauaucuuga

SEQ ID NO: 3894406 - RNA, 15 nt, Human adenovirus A
uaccgccugaagaag

SEQ ID NO: 3894407 - RNA, 23 nt, Human adenovirus A
uacgcagggaaaaauucuagccc

SEQ ID NO: 3894408 - RNA, 16 nt, Human adenovirus A
uacgguggcagccaag

SEQ ID NO: 3894409 - RNA, 18 nt, Human adenovirus A
uacuaaagaaacaaacua

SEQ ID NO: 3894410 - RNA, 16 nt, Human adenovirus A
uacuaacaccaaacuc

SEQ ID NO: 3894411 - RNA, 22 nt, Human adenovirus A
uacuaccgucaucucuacagcc

SEQ ID NO: 3894412 - RNA, 23 nt, Human adenovirus A
uacugaaaaauagugacguaaau

SEQ ID NO: 3894413 - RNA, 16 nt, Human adenovirus A
uacugcagccugucuu

SEQ ID NO: 3894414 - RNA, 16 nt, Human adenovirus A
uacugccaguucaugc

SEQ ID NO: 3894415 - RNA, 23 nt, Human adenovirus A
uacuucaccgcgcaagcuuucau

SEQ ID NO: 3894416 - RNA, 17 nt, Human adenovirus A
uacuuguaacuguggaa

SEQ ID NO: 3894417 - RNA, 24 nt, Human adenovirus A
uagaagccauguuaagaaaugaca

SEQ ID NO: 3894418 - RNA, 17 nt, Human adenovirus A
uagaaucggcaacagca

SEQ ID NO: 3894419 - RNA, 15 nt, Human adenovirus A
uagagcguucuggga

SEQ ID NO: 3894420 - RNA, 12 nt, Human adenovirus A
uagaugugcugu

SEQ ID NO: 3894421 - RNA, 12 nt, Human adenovirus A
uagcaaagccau

SEQ ID NO: 3894422 - RNA, 15 nt, Human adenovirus A
uagcagccuuuauuu

SEQ ID NO: 3894423 - RNA, 16 nt, Human adenovirus A
uagcccaauugcaugc

SEQ ID NO: 3894424 - RNA, 17 nt, Human adenovirus A
uagccgcagcaccugga

SEQ ID NO: 3894425 - RNA, 18 nt, Human adenovirus A
uagccugcuuucagcacu

SEQ ID NO: 3894426 - RNA, 17 nt, Human adenovirus A
uagcugcaguuugucau

SEQ ID NO: 3894427 - RNA, 19 nt, Human adenovirus A
uaggcagcagcagcaacac

SEQ ID NO: 3894428 - RNA, 17 nt, Human adenovirus A
uagggaugcaaugcuua

SEQ ID NO: 3894429 - RNA, 20 nt, Human adenovirus A
uaggggaugguuuaacauuc

SEQ ID NO: 3894430 - RNA, 11 nt, Human adenovirus A
uagucauauag

SEQ ID NO: 3894431 - RNA, 15 nt, Human adenovirus A
uaguccaguauaagg

SEQ ID NO: 3894432 - RNA, 13 nt, Human adenovirus A
uaguccguuuucu

SEQ ID NO: 3894433 - RNA, 16 nt, Human adenovirus A
uagucgcgcacugggc

SEQ ID NO: 3894434 - RNA, 11 nt, Human adenovirus A
uaguucaucuu

SEQ ID NO: 3894435 - RNA, 14 nt, Human adenovirus A
uaguuccguaaaga

SEQ ID NO: 3894436 - RNA, 21 nt, Human adenovirus A
uaguugcagcagaauuacugc

SEQ ID NO: 3894437 - RNA, 12 nt, Human adenovirus A
uaguuucuccac

SEQ ID NO: 3894438 - RNA, 11 nt, Human adenovirus A
uauacaaacuu

SEQ ID NO: 3894439 - RNA, 18 nt, Human adenovirus A
uauaguacugcuuccagg

SEQ ID NO: 3894440 - RNA, 21 nt, Human adenovirus A
uaucgcaccucguccuuuuug

SEQ ID NO: 3894441 - RNA, 12 nt, Human adenovirus A
uaucgcagcugg

SEQ ID NO: 3894442 - RNA, 15 nt, Human adenovirus A
uaugagucaaaguau

SEQ ID NO: 3894443 - RNA, 21 nt, Human adenovirus A
uaugcauagcuuacaaagggc

SEQ ID NO: 3894444 - RNA, 15 nt, Human adenovirus A
uauggauguuggaag

SEQ ID NO: 3894445 - RNA, 17 nt, Human adenovirus A
uauugccaccuuuuguu

SEQ ID NO: 3894446 - RNA, 22 nt, Human adenovirus A
ucaaacagccgaaagaccacua

SEQ ID NO: 3894447 - RNA, 18 nt, Human adenovirus A
ucaaacauuaugcuggaa

SEQ ID NO: 3894448 - RNA, 18 nt, Human adenovirus A
ucaaacgccgacgcugcu

SEQ ID NO: 3894449 - RNA, 20 nt, Human adenovirus A
ucaaacugccugacugaacc

SEQ ID NO: 3894450 - RNA, 16 nt, Human adenovirus A
ucaaaggcaggcauua

SEQ ID NO: 3894451 - RNA, 15 nt, Human adenovirus A
ucaacgugucaguuu

SEQ ID NO: 3894452 - RNA, 10 nt, Human adenovirus A
ucaauguuuu

SEQ ID NO: 3894453 - RNA, 13 nt, Human adenovirus A
ucacacuuaacac

SEQ ID NO: 3894454 - RNA, 16 nt, Human adenovirus A
ucacagccagaucaaa

SEQ ID NO: 3894455 - RNA, 18 nt, Human adenovirus A
ucacagcuuauucgccag

SEQ ID NO: 3894456 - RNA, 22 nt, Human adenovirus A
ucaccaugggaauagugcucua

SEQ ID NO: 3894457 - RNA, 12 nt, Human adenovirus A
ucaccuccaggu

SEQ ID NO: 3894458 - RNA, 13 nt, Human adenovirus A
ucacgccguagac

SEQ ID NO: 3894459 - RNA, 13 nt, Human adenovirus A
ucagccagagccg

SEQ ID NO: 3894460 - RNA, 22 nt, Human adenovirus A
ucagccagagccgcaaguagga

SEQ ID NO: 3894461 - RNA, 18 nt, Human adenovirus A
ucaggaagauuauacaaa

SEQ ID NO: 3894462 - RNA, 18 nt, Human adenovirus A
ucaguacacuuuaaaugc

SEQ ID NO: 3894463 - RNA, 16 nt, Human adenovirus A
ucaguguccaucagcc

SEQ ID NO: 3894464 - RNA, 21 nt, Human adenovirus A
ucauaagacaaagccucugua

SEQ ID NO: 3894465 - RNA, 12 nt, Human adenovirus A
ucauaagcugug

SEQ ID NO: 3894466 - RNA, 21 nt, Human adenovirus A
ucauaccuuaaaaacuguuca

SEQ ID NO: 3894467 - RNA, 19 nt, Human adenovirus A
ucauauugugagccacagu

SEQ ID NO: 3894468 - RNA, 14 nt, Human adenovirus A
ucaucaaacugccu

SEQ ID NO: 3894469 - RNA, 23 nt, Human adenovirus A
ucaucaacauuaaccuaugcaac

SEQ ID NO: 3894470 - RNA, 16 nt, Human adenovirus A
ucauccacaucuacaa

SEQ ID NO: 3894471 - RNA, 15 nt, Human adenovirus A
ucauccgcccaaacu

SEQ ID NO: 3894472 - RNA, 15 nt, Human adenovirus A
ucauccucagcuccg

SEQ ID NO: 3894473 - RNA, 16 nt, Human adenovirus A
ucaucucuacagcccc

SEQ ID NO: 3894474 - RNA, 12 nt, Human adenovirus A
ucaugaaacucu

SEQ ID NO: 3894475 - RNA, 16 nt, Human adenovirus A
ucauggagaaggacaa

SEQ ID NO: 3894476 - RNA, 23 nt, Human adenovirus A
ucauguaaaaugggaaaugaggc

SEQ ID NO: 3894477 - RNA, 22 nt, Human adenovirus A
ucauugguaccuucgaaaugca

SEQ ID NO: 3894478 - RNA, 20 nt, Human adenovirus A
uccaaauguucaacaacagc

SEQ ID NO: 3894479 - RNA, 15 nt, Human adenovirus A
agauuauacaaacuu

SEQ ID NO: 3894480 - RNA, 15 nt, Human adenovirus A
agauucuucuuccca

SEQ ID NO: 3894481 - RNA, 17 nt, Human adenovirus A
agcaaaacgcugggcuc

SEQ ID NO: 3894482 - RNA, 17 nt, Human adenovirus A
agcaaaccacugcaaug

SEQ ID NO: 3894483 - RNA, 13 nt, Human adenovirus A
agcaacuuuuuaa

SEQ ID NO: 3894484 - RNA, 19 nt, Human adenovirus A
agcaacuuuuuaaccacug

SEQ ID NO: 3894485 - RNA, 12 nt, Human adenovirus A
agcaagcggcac

SEQ ID NO: 3894486 - RNA, 21 nt, Human adenovirus A
agcacgccaaagccacaccuc

SEQ ID NO: 3894487 - RNA, 21 nt, Human adenovirus A
agcauucaugcugauguuugu

SEQ ID NO: 3894488 - RNA, 19 nt, Human adenovirus A
agccaaaccggccagaugc

SEQ ID NO: 3894489 - RNA, 23 nt, Human adenovirus A
agccaacuuaguaacagcauaug

SEQ ID NO: 3894490 - RNA, 14 nt, Human adenovirus A
agccauggaugaau

SEQ ID NO: 3894491 - RNA, 17 nt, Human adenovirus A
agcccaauugcaugcua

SEQ ID NO: 3894492 - RNA, 20 nt, Human adenovirus A
agcccgcgaaaaaaaucacu

SEQ ID NO: 3894493 - RNA, 15 nt, Human adenovirus A
agccgcagcaccugg

SEQ ID NO: 3894494 - RNA, 16 nt, Human adenovirus A
agccguagacgagguc

SEQ ID NO: 3894495 - RNA, 18 nt, Human adenovirus A
agccuucauuccuucaga

SEQ ID NO: 3894496 - RNA, 20 nt, Human adenovirus A
agccuucuggcguuacagcu

SEQ ID NO: 3894497 - RNA, 19 nt, Human adenovirus A
agcgacacuaucaccgccg

SEQ ID NO: 3894498 - RNA, 16 nt, Human adenovirus A
agcggcugacagagcg

SEQ ID NO: 3894499 - RNA, 16 nt, Human adenovirus A
agcgguaugucggccu

SEQ ID NO: 3894500 - RNA, 12 nt, Human adenovirus A
agcuaaaacaag

SEQ ID NO: 3894501 - RNA, 14 nt, Human adenovirus A
agcuauaaaaagag

SEQ ID NO: 3894502 - RNA, 15 nt, Human adenovirus A
agcugacggccauug

SEQ ID NO: 3894503 - RNA, 16 nt, Human adenovirus A
agcugagcaaugcuac

SEQ ID NO: 3894504 - RNA, 18 nt, Human adenovirus A
agcugaugcuacuaccca

SEQ ID NO: 3894505 - RNA, 23 nt, Human adenovirus A
agcugccaccgucaauucuucuu

SEQ ID NO: 3894506 - RNA, 15 nt, Human adenovirus A
agcuuaccacucaga

SEQ ID NO: 3894507 - RNA, 22 nt, Human adenovirus A
agcuucuaaaagagccacagcu

SEQ ID NO: 3894508 - RNA, 17 nt, Human adenovirus A
agcuucuacuuuagaag

SEQ ID NO: 3894509 - RNA, 16 nt, Human adenovirus A
aggaaaugauggcuuu

SEQ ID NO: 3894510 - RNA, 14 nt, Human adenovirus A
aggaagaacaucca

SEQ ID NO: 3894511 - RNA, 18 nt, Human adenovirus A
aggaagcaggugaugaag

SEQ ID NO: 3894512 - RNA, 16 nt, Human adenovirus A
aggaagguuccaagga

SEQ ID NO: 3894513 - RNA, 23 nt, Human adenovirus A
aggaauaucaacugcuaugugca

SEQ ID NO: 3894514 - RNA, 15 nt, Human adenovirus A
aggacaauccaagga

SEQ ID NO: 3894515 - RNA, 18 nt, Human adenovirus A
aggacacuggcaguuuag

SEQ ID NO: 3894516 - RNA, 23 nt, Human adenovirus A
aggagaaaauaacacauaagcau

SEQ ID NO: 3894517 - RNA, 13 nt, Human adenovirus A
aggagcagaaauc

SEQ ID NO: 3894518 - RNA, 15 nt, Human adenovirus A
aggagcuaaaacaag

SEQ ID NO: 3894519 - RNA, 18 nt, Human adenovirus A
aggagcuaaaacaagguc

SEQ ID NO: 3894520 - RNA, 15 nt, Human adenovirus A
aggagcugagaagug

SEQ ID NO: 3894521 - RNA, 14 nt, Human adenovirus A
aggaggaagaacau

SEQ ID NO: 3894522 - RNA, 17 nt, Human adenovirus A
aggagguggcuggacug

SEQ ID NO: 3894523 - RNA, 14 nt, Human adenovirus A
aggcauuuccaggu

SEQ ID NO: 3894524 - RNA, 21 nt, Human adenovirus A
aggccuaauggagugucacug

SEQ ID NO: 3894525 - RNA, 23 nt, Human adenovirus A
aggcgaucguucaacuuugucca

SEQ ID NO: 3894526 - RNA, 14 nt, Human adenovirus A
aggcgcucagugcg

SEQ ID NO: 3894527 - RNA, 19 nt, Human adenovirus A
aggcgcuccauccaaaacu

SEQ ID NO: 3894528 - RNA, 20 nt, Human adenovirus A
aggcguagaugugcugugga

SEQ ID NO: 3894529 - RNA, 12 nt, Human adenovirus A
aggcuggagcuu

SEQ ID NO: 3894530 - RNA, 22 nt, Human adenovirus A
agggcacaauaguuuaauguuu

SEQ ID NO: 3894531 - RNA, 21 nt, Human adenovirus A
agggcguacaguuuuggagcc

SEQ ID NO: 3894532 - RNA, 19 nt, Human adenovirus A
aggggaagguguugagccc

SEQ ID NO: 3894533 - RNA, 20 nt, Human adenovirus A
aggggaagguguugagcccg

SEQ ID NO: 3894534 - RNA, 14 nt, Human adenovirus A
agggguacuggauc

SEQ ID NO: 3894535 - RNA, 22 nt, Human adenovirus A
aggggucuauccuucaguggua

SEQ ID NO: 3894536 - RNA, 13 nt, Human adenovirus A
aggguacagugga

SEQ ID NO: 3894537 - RNA, 19 nt, Human adenovirus A
agggucggugauggaaacg

SEQ ID NO: 3894538 - RNA, 14 nt, Human adenovirus A
aggguuugcauuua

SEQ ID NO: 3894539 - RNA, 23 nt, Human adenovirus A
agguaaugguagaggaaaagcug

SEQ ID NO: 3894540 - RNA, 16 nt, Human adenovirus A
agguauuccuccuuau

SEQ ID NO: 3894541 - RNA, 22 nt, Human adenovirus A
aggugacaugauaugaaguuuu

SEQ ID NO: 3894542 - RNA, 24 nt, Human adenovirus A
aggugcaagaaggccauguacuug

SEQ ID NO: 3894543 - RNA, 19 nt, Human adenovirus A
agguguaaccagcugggca

SEQ ID NO: 3894544 - RNA, 16 nt, Human adenovirus A
agguuagccugaaaaa

SEQ ID NO: 3894545 - RNA, 14 nt, Human adenovirus A
agguuuaauguuua

SEQ ID NO: 3894546 - RNA, 22 nt, Human adenovirus A
agguuuaggucgggaugaaaaa

SEQ ID NO: 3894547 - RNA, 24 nt, Human adenovirus A
aguaacaacacgggcuggggacug

SEQ ID NO: 3894548 - RNA, 17 nt, Human adenovirus A
aguaagcgccagucgcc

SEQ ID NO: 3894549 - RNA, 14 nt, Human adenovirus A
aguacaaauuuuuc

SEQ ID NO: 3894550 - RNA, 18 nt, Human adenovirus A
aguacgucagaauguggu

SEQ ID NO: 3894551 - RNA, 13 nt, Human adenovirus A
aguagccuugcag

SEQ ID NO: 3894552 - RNA, 15 nt, Human adenovirus A
agucaacuaaaaauu

SEQ ID NO: 3894553 - RNA, 14 nt, Human adenovirus A
agucaccaccagcg

SEQ ID NO: 3894554 - RNA, 21 nt, Human adenovirus A
agucacucaagcggcauuccc

SEQ ID NO: 3894555 - RNA, 23 nt, Human adenovirus A
agucagacccgacggaguguuuc

SEQ ID NO: 3894556 - RNA, 14 nt, Human adenovirus A
agucauauagcuca

SEQ ID NO: 3894557 - RNA, 20 nt, Human adenovirus A
agucccauuacaguaauaaa

SEQ ID NO: 3894558 - RNA, 17 nt, Human adenovirus A
agucgcaauuagggcca

SEQ ID NO: 3894559 - RNA, 15 nt, Human adenovirus A
agucgcacuuuuuaa

SEQ ID NO: 3894560 - RNA, 19 nt, Human adenovirus A
agucgccgugguugguggg

SEQ ID NO: 3894561 - RNA, 17 nt, Human adenovirus A
agucucaaaagcagcca

SEQ ID NO: 3894562 - RNA, 23 nt, Human adenovirus A
agucuugaaugcucuggacaugg

SEQ ID NO: 3894563 - RNA, 21 nt, Human adenovirus A
agugaauggaacaccagcauu

SEQ ID NO: 3894564 - RNA, 20 nt, Human adenovirus A
agugaggacacugaaggcau

SEQ ID NO: 3894565 - RNA, 24 nt, Human adenovirus A
agugccucaaagugaaguguauca

SEQ ID NO: 3894566 - RNA, 17 nt, Human adenovirus A
agugcuggaaagugaca

SEQ ID NO: 3894567 - RNA, 22 nt, Human adenovirus A
agugcuuucaacaaaaaaaaag

SEQ ID NO: 3894568 - RNA, 15 nt, Human adenovirus A
aguggcugcaagguc

SEQ ID NO: 3894569 - RNA, 12 nt, Human adenovirus A
aguguuucagcu

SEQ ID NO: 3894570 - RNA, 23 nt, Human adenovirus A
aguucuucuucgcuuucggaauc

SEQ ID NO: 3894571 - RNA, 11 nt, Human adenovirus A
aguugacuggc

SEQ ID NO: 3894572 - RNA, 11 nt, Human adenovirus A
aguuucuggag

SEQ ID NO: 3894573 - RNA, 16 nt, Human adenovirus A
auaaaacugauuuacc

SEQ ID NO: 3894574 - RNA, 18 nt, Human adenovirus A
gcaggaaaucugggagga

SEQ ID NO: 3894575 - RNA, 23 nt, Human adenovirus A
gcaggacuuuccggagaaagaau

SEQ ID NO: 3894576 - RNA, 16 nt, Human adenovirus A
gcaggaguugcaggau

SEQ ID NO: 3894577 - RNA, 17 nt, Human adenovirus A
gcaggcuggaggugcag

SEQ ID NO: 3894578 - RNA, 14 nt, Human adenovirus A
gcaguauggcagcu

SEQ ID NO: 3894579 - RNA, 11 nt, Human adenovirus A
gcauaaugaaa

SEQ ID NO: 3894580 - RNA, 20 nt, Human adenovirus A
gcauacccgaggacgcacug

SEQ ID NO: 3894581 - RNA, 15 nt, Human adenovirus A
gcauaugaacaaacg

SEQ ID NO: 3894582 - RNA, 19 nt, Human adenovirus A
gcaucuauaguaaaaaugc

SEQ ID NO: 3894583 - RNA, 14 nt, Human adenovirus A
gcauuaaagcaaac

SEQ ID NO: 3894584 - RNA, 15 nt, Human adenovirus A
gcauuaagccagaua

SEQ ID NO: 3894585 - RNA, 16 nt, Human adenovirus A
gcauucaccagccaca

SEQ ID NO: 3894586 - RNA, 19 nt, Human adenovirus A
gcauugcgauaaacuggau

SEQ ID NO: 3894587 - RNA, 14 nt, Human adenovirus A
gcauuucccaagau

SEQ ID NO: 3894588 - RNA, 13 nt, Human adenovirus A
gccaaacagcugu

SEQ ID NO: 3894589 - RNA, 16 nt, Human adenovirus A
gccaacaaaaaccccu

SEQ ID NO: 3894590 - RNA, 15 nt, Human adenovirus A
gccacagccccuagc

SEQ ID NO: 3894591 - RNA, 19 nt, Human adenovirus A
gccagauguaaaaguacgu

SEQ ID NO: 3894592 - RNA, 16 nt, Human adenovirus A
gccagcaagugccucc

SEQ ID NO: 3894593 - RNA, 18 nt, Human adenovirus A
gccauaauguaacccuuc

SEQ ID NO: 3894594 - RNA, 20 nt, Human adenovirus A
gccauccgcaaagaugaggc

SEQ ID NO: 3894595 - RNA, 22 nt, Human adenovirus A
gccaucuugcuuguuuaaacau

SEQ ID NO: 3894596 - RNA, 21 nt, Human adenovirus A
gccaugaacggggaauacuuu

SEQ ID NO: 3894597 - RNA, 15 nt, Human adenovirus A
gccauguugugcaua

SEQ ID NO: 3894598 - RNA, 14 nt, Human adenovirus A
gccauuuuggaagc

SEQ ID NO: 3894599 - RNA, 23 nt, Human adenovirus A
gcccaaacuuacaagcacgccaa

SEQ ID NO: 3894600 - RNA, 20 nt, Human adenovirus A
gcccagacguaggguacagu

SEQ ID NO: 3894601 - RNA, 14 nt, Human adenovirus A
gcccagcaugacca

SEQ ID NO: 3894602 - RNA, 23 nt, Human adenovirus A
gccccauccguggcaggccaucu

SEQ ID NO: 3894603 - RNA, 13 nt, Human adenovirus A
gcccgccuggcag

SEQ ID NO: 3894604 - RNA, 13 nt, Human adenovirus A
gcccugcuccgac

SEQ ID NO: 3894605 - RNA, 12 nt, Human adenovirus A
gccgcagcugcg

SEQ ID NO: 3894606 - RNA, 17 nt, Human adenovirus A
gccggaccccacaugau

SEQ ID NO: 3894607 - RNA, 14 nt, Human adenovirus A
gccuaauggagugu

SEQ ID NO: 3894608 - RNA, 14 nt, Human adenovirus A
gccuccgcugugcu

SEQ ID NO: 3894609 - RNA, 13 nt, Human adenovirus A
gccuccuucccau

SEQ ID NO: 3894610 - RNA, 14 nt, Human adenovirus A
gccucuucuucuuc

SEQ ID NO: 3894611 - RNA, 23 nt, Human adenovirus A
gccuucaaaacguguaccugccu

SEQ ID NO: 3894612 - RNA, 17 nt, Human adenovirus A
gccuucauuccuucaga

SEQ ID NO: 3894613 - RNA, 17 nt, Human adenovirus A
gcgaacaggagcugacg

SEQ ID NO: 3894614 - RNA, 17 nt, Human adenovirus A
gcgaacgggcagccugu

SEQ ID NO: 3894615 - RNA, 22 nt, Human adenovirus A
gcgaagaguuuuuacuuaaaaa

SEQ ID NO: 3894616 - RNA, 19 nt, Human adenovirus A
gcgacauuuagaccacugu

SEQ ID NO: 3894617 - RNA, 13 nt, Human adenovirus A
gcgaccucagccc

SEQ ID NO: 3894618 - RNA, 15 nt, Human adenovirus A
gcgagcccaacccau

SEQ ID NO: 3894619 - RNA, 14 nt, Human adenovirus A
gcgagcugccaccg

SEQ ID NO: 3894620 - RNA, 13 nt, Human adenovirus A
gcgaguaggaaga

SEQ ID NO: 3894621 - RNA, 16 nt, Human adenovirus A
gcgagucaccaucacu

SEQ ID NO: 3894622 - RNA, 18 nt, Human adenovirus A
gcgauacaacggccagcc

SEQ ID NO: 3894623 - RNA, 21 nt, Human adenovirus A
gcgcaaauuugaaccccaaga

SEQ ID NO: 3894624 - RNA, 20 nt, Human adenovirus A
gcgcagaccuacgguggcag

SEQ ID NO: 3894625 - RNA, 19 nt, Human adenovirus A
gcgcagaugagcuucuugc

SEQ ID NO: 3894626 - RNA, 21 nt, Human adenovirus A
gcgcccauaacaucaggagca

SEQ ID NO: 3894627 - RNA, 15 nt, Human adenovirus A
gcgcccuccaccgcc

SEQ ID NO: 3894628 - RNA, 19 nt, Human adenovirus A
gcgcggacgagcucccgga

SEQ ID NO: 3894629 - RNA, 15 nt, Human adenovirus A
gcgcucaaaggcagg

SEQ ID NO: 3894630 - RNA, 15 nt, Human adenovirus A
gcgcucagugcgagg

SEQ ID NO: 3894631 - RNA, 13 nt, Human adenovirus A
gcgcuccauccaa

SEQ ID NO: 3894632 - RNA, 20 nt, Human adenovirus A
gcgcuuuggaggcagcugga

SEQ ID NO: 3894633 - RNA, 16 nt, Human adenovirus A
gcggccacuaaagacc

SEQ ID NO: 3894634 - RNA, 16 nt, Human adenovirus A
gcggccauuggagccg

SEQ ID NO: 3894635 - RNA, 21 nt, Human adenovirus A
gcggccauuggagccguuccc

SEQ ID NO: 3894636 - RNA, 22 nt, Human adenovirus A
gcggcgagaaugggaggaaaga

SEQ ID NO: 3894637 - RNA, 14 nt, Human adenovirus A
gcggcguccuuucu

SEQ ID NO: 3894638 - RNA, 14 nt, Human adenovirus A
gcgggaagcggggg

SEQ ID NO: 3894639 - RNA, 15 nt, Human adenovirus A
gcggugguggagaag

SEQ ID NO: 3894640 - RNA, 20 nt, Human adenovirus A
gcgguuuaagaaaucuuuua

SEQ ID NO: 3894641 - RNA, 13 nt, Human adenovirus A
gcguacagccugg

SEQ ID NO: 3894642 - RNA, 20 nt, Human adenovirus A
gcgugaaguauuccaugagc

SEQ ID NO: 3894643 - RNA, 12 nt, Human adenovirus A
gcguggucagga

SEQ ID NO: 3894644 - RNA, 15 nt, Human adenovirus A
gcguguuagacaugg

SEQ ID NO: 3894645 - RNA, 12 nt, Human adenovirus A
gcguuuggaaac

SEQ ID NO: 3894646 - RNA, 20 nt, Human adenovirus A
gcuaaacgaccgccuuuucu

SEQ ID NO: 3894647 - RNA, 23 nt, Human adenovirus A
gcuaaccaggcauggccaucaua

SEQ ID NO: 3894648 - RNA, 17 nt, Human adenovirus A
cagcuucuaaaagagcc

SEQ ID NO: 3894649 - RNA, 19 nt, Human adenovirus A
caggaaaaaaaagaaaguu

SEQ ID NO: 3894650 - RNA, 14 nt, Human adenovirus A
caggacgcagaagc

SEQ ID NO: 3894651 - RNA, 23 nt, Human adenovirus A
caggaugaauuucagcgggguga

SEQ ID NO: 3894652 - RNA, 16 nt, Human adenovirus A
caggcauggccaucau

SEQ ID NO: 3894653 - RNA, 22 nt, Human adenovirus A
caggcuaaacgaccgccuuuuc

SEQ ID NO: 3894654 - RNA, 14 nt, Human adenovirus A
cagggauauguuuc

SEQ ID NO: 3894655 - RNA, 12 nt, Human adenovirus A
caggggccagcu

SEQ ID NO: 3894656 - RNA, 23 nt, Human adenovirus A
cagguauaaaggucgcacugagc

SEQ ID NO: 3894657 - RNA, 14 nt, Human adenovirus A
caguaauugaugag

SEQ ID NO: 3894658 - RNA, 16 nt, Human adenovirus A
caguacuucauauuug

SEQ ID NO: 3894659 - RNA, 14 nt, Human adenovirus A
cagucaaccgcgcu

SEQ ID NO: 3894660 - RNA, 20 nt, Human adenovirus A
cagucaaugcuucugaaaca

SEQ ID NO: 3894661 - RNA, 16 nt, Human adenovirus A
caguccugaugcuuuu

SEQ ID NO: 3894662 - RNA, 17 nt, Human adenovirus A
cagucgccgcagagagc

SEQ ID NO: 3894663 - RNA, 22 nt, Human adenovirus A
cagucuugaaugcucuggacau

SEQ ID NO: 3894664 - RNA, 18 nt, Human adenovirus A
cagugaagcaaaccacau

SEQ ID NO: 3894665 - RNA, 20 nt, Human adenovirus A
cagugagugaaucuguggau

SEQ ID NO: 3894666 - RNA, 18 nt, Human adenovirus A
cagugccagaagcacugg

SEQ ID NO: 3894667 - RNA, 20 nt, Human adenovirus A
cagugccagaagcacuggca

SEQ ID NO: 3894668 - RNA, 14 nt, Human adenovirus A
caguggacaaaaac

SEQ ID NO: 3894669 - RNA, 16 nt, Human adenovirus A
cagugucauuuacugc

SEQ ID NO: 3894670 - RNA, 12 nt, Human adenovirus A
caguguccauca

SEQ ID NO: 3894671 - RNA, 17 nt, Human adenovirus A
caguguuuucagcaauu

SEQ ID NO: 3894672 - RNA, 17 nt, Human adenovirus A
caguuacaacuugcuuc

SEQ ID NO: 3894673 - RNA, 22 nt, Human adenovirus A
caguuuuggagccaaaaaaaca

SEQ ID NO: 3894674 - RNA, 20 nt, Human adenovirus A
cauaacaucaggagcagaaa

SEQ ID NO: 3894675 - RNA, 21 nt, Human adenovirus A
cauaacaucaggagcagaaau

SEQ ID NO: 3894676 - RNA, 16 nt, Human adenovirus A
cauacaucaccucuuu

SEQ ID NO: 3894677 - RNA, 16 nt, Human adenovirus A
cauaccuuaaaaacug

SEQ ID NO: 3894678 - RNA, 20 nt, Human adenovirus A
cauauuaggcauaaugcagc

SEQ ID NO: 3894679 - RNA, 16 nt, Human adenovirus A
caucacucuauuucaa

SEQ ID NO: 3894680 - RNA, 19 nt, Human adenovirus A
caucagaaauuuguugcug

SEQ ID NO: 3894681 - RNA, 22 nt, Human adenovirus A
caucagacguacccuuuguuac

SEQ ID NO: 3894682 - RNA, 17 nt, Human adenovirus A
cauccgaggugacauga

SEQ ID NO: 3894683 - RNA, 23 nt, Human adenovirus A
caucuacagcgacaaagcacuau

SEQ ID NO: 3894684 - RNA, 17 nt, Human adenovirus A
caucuuaguaauggagu

SEQ ID NO: 3894685 - RNA, 16 nt, Human adenovirus A
caucuuuuacuaaaau

SEQ ID NO: 3894686 - RNA, 15 nt, Human adenovirus A
caugaagauuucugc

SEQ ID NO: 3894687 - RNA, 18 nt, Human adenovirus A
caugcgcgcggccagagc

SEQ ID NO: 3894688 - RNA, 22 nt, Human adenovirus A
caugcgggggaugaaggaagcg

SEQ ID NO: 3894689 - RNA, 16 nt, Human adenovirus A
caugcuaaaagcuucu

SEQ ID NO: 3894690 - RNA, 16 nt, Human adenovirus A
caugcucuagacauga

SEQ ID NO: 3894691 - RNA, 13 nt, Human adenovirus A
cauggaaaaacuu

SEQ ID NO: 3894692 - RNA, 17 nt, Human adenovirus A
cauggaaaaacuuggaa

SEQ ID NO: 3894693 - RNA, 21 nt, Human adenovirus A
cauggcuuccaugccuuuuuc

SEQ ID NO: 3894694 - RNA, 15 nt, Human adenovirus A
caugguaagcucuug

SEQ ID NO: 3894695 - RNA, 21 nt, Human adenovirus A
cauguaucagcagccaacuua

SEQ ID NO: 3894696 - RNA, 14 nt, Human adenovirus A
caugucaaugcagc

SEQ ID NO: 3894697 - RNA, 21 nt, Human adenovirus A
caugucgcauaaugaaaacaa

SEQ ID NO: 3894698 - RNA, 14 nt, Human adenovirus A
cauuaaagcaaacc

SEQ ID NO: 3894699 - RNA, 21 nt, Human adenovirus A
cauuaagaacacggugaaugu

SEQ ID NO: 3894700 - RNA, 21 nt, Human adenovirus A
cauuaauaauaaaaccauuuu

SEQ ID NO: 3894701 - RNA, 16 nt, Human adenovirus A
cauuauguaaagucag

SEQ ID NO: 3894702 - RNA, 12 nt, Human adenovirus A
cauucaccagcc

SEQ ID NO: 3894703 - RNA, 19 nt, Human adenovirus A
cauuccccauccaaaacca

SEQ ID NO: 3894704 - RNA, 22 nt, Human adenovirus A
cauuccuucagaauaaaacaag

SEQ ID NO: 3894705 - RNA, 15 nt, Human adenovirus A
cauucuugagccugg

SEQ ID NO: 3894706 - RNA, 16 nt, Human adenovirus A
cauucuuuucauuuuc

SEQ ID NO: 3894707 - RNA, 14 nt, Human adenovirus A
cauugacaaggaag

SEQ ID NO: 3894708 - RNA, 13 nt, Human adenovirus A
cauugcgcaaaau

SEQ ID NO: 3894709 - RNA, 22 nt, Human adenovirus A
cauuggucaagcgcagguagac

SEQ ID NO: 3894710 - RNA, 20 nt, Human adenovirus A
cauuguaacugaaaauggaa

SEQ ID NO: 3894711 - RNA, 21 nt, Human adenovirus A
cauuuacaguacaaauacagu

SEQ ID NO: 3894712 - RNA, 21 nt, Human adenovirus A
cauuuauaguggcacaacaca

SEQ ID NO: 3894713 - RNA, 19 nt, Human adenovirus A
ccaaaauuuucaacagaaa

SEQ ID NO: 3894714 - RNA, 23 nt, Human adenovirus A
ccaaaguucgccuacacaacaca

SEQ ID NO: 3894715 - RNA, 19 nt, Human adenovirus A
ccaaauauugcgcaggggu

SEQ ID NO: 3894716 - RNA, 17 nt, Human adenovirus A
ccaaaugaauuugaaau

SEQ ID NO: 3894717 - RNA, 18 nt, Human adenovirus A
ccaacuuaacgcaguagu

SEQ ID NO: 3894718 - RNA, 15 nt, Human adenovirus A
ccaagcaaguacaaa

SEQ ID NO: 3894719 - RNA, 20 nt, Human adenovirus A
ccaagcauauaaaacugauu

SEQ ID NO: 3894720 - RNA, 21 nt, Human adenovirus A
ccaaggaaaacuuuuguauuc

SEQ ID NO: 3894721 - RNA, 21 nt, Human adenovirus A
cgcccagacguaggguacagu

SEQ ID NO: 3894722 - RNA, 17 nt, Human adenovirus A
cgcccgcgccacggaca

SEQ ID NO: 3894723 - RNA, 12 nt, Human adenovirus A
cgccuuaauuuu

SEQ ID NO: 3894724 - RNA, 13 nt, Human adenovirus A
cgccuuuucuaga

SEQ ID NO: 3894725 - RNA, 21 nt, Human adenovirus A
cgcgcuuuggaggcagcugga

SEQ ID NO: 3894726 - RNA, 18 nt, Human adenovirus A
cgcggagacgggccgcag

SEQ ID NO: 3894727 - RNA, 15 nt, Human adenovirus A
cgcucauuugcgccc

SEQ ID NO: 3894728 - RNA, 23 nt, Human adenovirus A
cgcugccgacguugcaagaggag

SEQ ID NO: 3894729 - RNA, 13 nt, Human adenovirus A
cggaagaaaagcg

SEQ ID NO: 3894730 - RNA, 20 nt, Human adenovirus A
cggacaccuacuucacccug

SEQ ID NO: 3894731 - RNA, 19 nt, Human adenovirus A
cggacgagcucccggagga

SEQ ID NO: 3894732 - RNA, 13 nt, Human adenovirus A
cggcaacagcagc

SEQ ID NO: 3894733 - RNA, 19 nt, Human adenovirus A
cggcacaacagacugggga

SEQ ID NO: 3894734 - RNA, 22 nt, Human adenovirus A
cggcaggauccgcuaugagcac

SEQ ID NO: 3894735 - RNA, 14 nt, Human adenovirus A
cggccauaggcaug

SEQ ID NO: 3894736 - RNA, 13 nt, Human adenovirus A
cggccucagcagc

SEQ ID NO: 3894737 - RNA, 19 nt, Human adenovirus A
cggcgagaaugggaggaaa

SEQ ID NO: 3894738 - RNA, 20 nt, Human adenovirus A
cggcgguguaugccaacaaa

SEQ ID NO: 3894739 - RNA, 20 nt, Human adenovirus A
cggcuugagcaaaaauguuu

SEQ ID NO: 3894740 - RNA, 17 nt, Human adenovirus A
cgggacccugccgcugc

SEQ ID NO: 3894741 - RNA, 17 nt, Human adenovirus A
cgggagggacaagcuua

SEQ ID NO: 3894742 - RNA, 17 nt, Human adenovirus A
cgggaguguacacuaau

SEQ ID NO: 3894743 - RNA, 21 nt, Human adenovirus A
cgggcccauguaucagcagcc

SEQ ID NO: 3894744 - RNA, 22 nt, Human adenovirus A
cgggguugauuuuacagagagc

SEQ ID NO: 3894745 - RNA, 19 nt, Human adenovirus A
cggguaagagcaggcugga

SEQ ID NO: 3894746 - RNA, 19 nt, Human adenovirus A
cggucaggaugccucggag

SEQ ID NO: 3894747 - RNA, 22 nt, Human adenovirus A
cgguccuccucguacaggaauu

SEQ ID NO: 3894748 - RNA, 16 nt, Human adenovirus A
cggucgaccuguggca

SEQ ID NO: 3894749 - RNA, 17 nt, Human adenovirus A
cggucgaccuguggcac

SEQ ID NO: 3894750 - RNA, 15 nt, Human adenovirus A
cggugcacuuuucca

SEQ ID NO: 3894751 - RNA, 15 nt, Human adenovirus A
cguaaaaucuacaaa

SEQ ID NO: 3894752 - RNA, 12 nt, Human adenovirus A
cguacagccaga

SEQ ID NO: 3894753 - RNA, 22 nt, Human adenovirus A
cguaccuuuuguuagaugcagc

SEQ ID NO: 3894754 - RNA, 15 nt, Human adenovirus A
cguaggguacagugg

SEQ ID NO: 3894755 - RNA, 16 nt, Human adenovirus A
cguauuauggcuuuaa

SEQ ID NO: 3894756 - RNA, 17 nt, Human adenovirus A
cguauuuuuccuuugga

SEQ ID NO: 3894757 - RNA, 21 nt, Human adenovirus A
cgucaagacccacugcgucag

SEQ ID NO: 3894758 - RNA, 11 nt, Human adenovirus A
cgucacuuuga

SEQ ID NO: 3894759 - RNA, 13 nt, Human adenovirus A
cgucccaaaagca

SEQ ID NO: 3894760 - RNA, 14 nt, Human adenovirus A
cgucuuauuuuccu

SEQ ID NO: 3894761 - RNA, 22 nt, Human adenovirus A
cgucuucguacuuaaaaaaaca

SEQ ID NO: 3894762 - RNA, 23 nt, Human adenovirus A
cgugaauauuaaaaagcucugua

SEQ ID NO: 3894763 - RNA, 15 nt, Human adenovirus A
cguggaauuaaaagg

SEQ ID NO: 3894764 - RNA, 20 nt, Human adenovirus A
cgugguacgcauucaccagc

SEQ ID NO: 3894765 - RNA, 13 nt, Human adenovirus A
cguuaguaacaac

SEQ ID NO: 3894766 - RNA, 13 nt, Human adenovirus A
cguucuguggaug

SEQ ID NO: 3894767 - RNA, 22 nt, Human adenovirus A
cguucuuugguuugcaauacug

SEQ ID NO: 3894768 - RNA, 14 nt, Human adenovirus A
cguugcaagaggag

SEQ ID NO: 3894769 - RNA, 13 nt, Human adenovirus A
cguuuucugcagc

SEQ ID NO: 3894770 - RNA, 22 nt, Human adenovirus A
cuaaaagagccacagcucugau

SEQ ID NO: 3894771 - RNA, 21 nt, Human adenovirus A
cuaaacgaccgccuuuucuag

SEQ ID NO: 3894772 - RNA, 22 nt, Human adenovirus A
cuaaacgagggagauguccugu

SEQ ID NO: 3894773 - RNA, 18 nt, Human adenovirus A
cuaaccuggaucccgcgg

SEQ ID NO: 3894774 - RNA, 14 nt, Human adenovirus A
cuaacucugauuac

SEQ ID NO: 3894775 - RNA, 17 nt, Human adenovirus A
uucagaugacuggacag

SEQ ID NO: 3894776 - RNA, 23 nt, Human adenovirus A
uucagguuuuuggagguaucugu

SEQ ID NO: 3894777 - RNA, 21 nt, Human adenovirus A
uucauauauguaucuggacau

SEQ ID NO: 3894778 - RNA, 19 nt, Human adenovirus A
uucaucuuaguaauggagu

SEQ ID NO: 3894779 - RNA, 17 nt, Human adenovirus A
uuccacggugcacuuuu

SEQ ID NO: 3894780 - RNA, 22 nt, Human adenovirus A
uuccacggugcacuuuuccaau

SEQ ID NO: 3894781 - RNA, 19 nt, Human adenovirus A
uuccagacaaaaaaaauac

SEQ ID NO: 3894782 - RNA, 20 nt, Human adenovirus A
uuccagcgccaccugccauu

SEQ ID NO: 3894783 - RNA, 17 nt, Human adenovirus A
uucgagaucuaggcugu

SEQ ID NO: 3894784 - RNA, 19 nt, Human adenovirus A
uucgagaucuaggcugugg

SEQ ID NO: 3894785 - RNA, 20 nt, Human adenovirus A
uucgcaggcggucugccauu

SEQ ID NO: 3894786 - RNA, 23 nt, Human adenovirus A
uucuaccaaggaaaacuuuugua

SEQ ID NO: 3894787 - RNA, 13 nt, Human adenovirus A
uucuaccuccauu

SEQ ID NO: 3894788 - RNA, 22 nt, Human adenovirus A
uucuuccucgaccacagguggu

SEQ ID NO: 3894789 - RNA, 15 nt, Human adenovirus A
uucuucgacuuuugc

SEQ ID NO: 3894790 - RNA, 14 nt, Human adenovirus A
uucuuuagaaacuu

SEQ ID NO: 3894791 - RNA, 12 nt, Human adenovirus A
uugacuguuuua

SEQ ID NO: 3894792 - RNA, 14 nt, Human adenovirus A
uugauuuaggaggu

SEQ ID NO: 3894793 - RNA, 19 nt, Human adenovirus A
uugcaacgcaccuugcagg

SEQ ID NO: 3894794 - RNA, 14 nt, Human adenovirus A
uugcgagcugccac

SEQ ID NO: 3894795 - RNA, 19 nt, Human adenovirus A
uugcgccaccuuggcuuuc

SEQ ID NO: 3894796 - RNA, 13 nt, Human adenovirus A
uuggccagcugcc

SEQ ID NO: 3894797 - RNA, 17 nt, Human adenovirus A
uuggcuucgaaugcugu

SEQ ID NO: 3894798 - RNA, 23 nt, Human adenovirus A
uuguacggacaacauccuuuuuc

SEQ ID NO: 3894799 - RNA, 14 nt, Human adenovirus A
uuguauaaaaucau

SEQ ID NO: 3894800 - RNA, 11 nt, Human adenovirus A
uuguuaucuag

SEQ ID NO: 3894801 - RNA, 21 nt, Human adenovirus A
uuuaaucgccccgcugcaauu

SEQ ID NO: 3894802 - RNA, 21 nt, Human adenovirus A
uuuacaguacaaauacaguuu

SEQ ID NO: 3894803 - RNA, 19 nt, Human adenovirus A
uuuaccaaugaauuaaaua

SEQ ID NO: 3894804 - RNA, 15 nt, Human adenovirus A
uuuaccaggcaaaga

SEQ ID NO: 3894805 - RNA, 23 nt, Human adenovirus A
uuuagagggcgaacaguguuuuc

SEQ ID NO: 3894806 - RNA, 19 nt, Human adenovirus A
uuuauaaccaaucuacaaa

SEQ ID NO: 3894807 - RNA, 18 nt, Human adenovirus A
uuuauuaaaaaucaaaug

SEQ ID NO: 3894808 - RNA, 15 nt, Human adenovirus A
uuuauuugaaguuuu

SEQ ID NO: 3894809 - RNA, 18 nt, Human adenovirus A
uuucaaaauaaacaucuc

SEQ ID NO: 3894810 - RNA, 15 nt, Human adenovirus A
uuucaaacguccagg

SEQ ID NO: 3894811 - RNA, 12 nt, Human adenovirus A
uuucaagaaagg

SEQ ID NO: 3894812 - RNA, 13 nt, Human adenovirus A
uuucaaucauuuc

SEQ ID NO: 3894813 - RNA, 20 nt, Human adenovirus A
uuucaauugcagaacuaucu

SEQ ID NO: 3894814 - RNA, 20 nt, Human adenovirus A
uuuccuguuacauaccuggc

SEQ ID NO: 3894815 - RNA, 11 nt, Human adenovirus A
uuucugccauu

SEQ ID NO: 3894816 - RNA, 23 nt, Human adenovirus A
uuugaaccugaaagaaaguucaa

SEQ ID NO: 3894817 - RNA, 20 nt, Human adenovirus A
uuugacccauuugacacauc

SEQ ID NO: 3894818 - RNA, 15 nt, Human adenovirus A
uuugaccggucaggc

SEQ ID NO: 3894819 - RNA, 12 nt, Human adenovirus A
uuugcauuuacu

SEQ ID NO: 3894820 - RNA, 13 nt, Human adenovirus A
uuugcauuuccca

SEQ ID NO: 3894821 - RNA, 19 nt, Human adenovirus A
uuugcgguguaccugauuu

SEQ ID NO: 3894822 - RNA, 17 nt, Human adenovirus A
uuuguaccgcgaagcca

SEQ ID NO: 3894823 - RNA, 14 nt, Human adenovirus A
uuuguguagagucu

SEQ ID NO: 3894824 - RNA, 21 nt, Human adenovirus A
uuuuaaauuguuccuguucua

SEQ ID NO: 3894825 - RNA, 16 nt, Human adenovirus A
uuuuucccacuuuaua

SEQ ID NO: 3894826 - RNA, 13 nt, Human adenovirus A
uuuuugaguacuc

SEQ ID NO: 3894827 - RNA, 12 nt, Human adenovirus A
uuuuuucuucuu

SEQ ID NO: 3894828 - RNA, 22 nt, Human adenovirus A
gccagccaagcguagccgcagc

SEQ ID NO: 3894829 - RNA, 18 nt, Human adenovirus A
gccagcucacggugucag

SEQ ID NO: 3894830 - RNA, 19 nt, Human adenovirus A
gccaggcauuuccaggugg

SEQ ID NO: 3894831 - RNA, 20 nt, Human adenovirus A
gccauccgcaggcaguacuu

SEQ ID NO: 3894832 - RNA, 15 nt, Human adenovirus A
gccaugcaaagccag

SEQ ID NO: 3894833 - RNA, 20 nt, Human adenovirus A
gccaugcgcgcggccagagc

SEQ ID NO: 3894834 - RNA, 22 nt, Human adenovirus A
gccaugcuaugcaggcagccgu

SEQ ID NO: 3894835 - RNA, 12 nt, Human adenovirus A
gcccagcuguuc

SEQ ID NO: 3894836 - RNA, 19 nt, Human adenovirus A
gcccauugagacaagugug

SEQ ID NO: 3894837 - RNA, 22 nt, Human adenovirus A
gccccacuaugcgggagggaca

SEQ ID NO: 3894838 - RNA, 18 nt, Human adenovirus A
gccccccuccccugugga

SEQ ID NO: 3894839 - RNA, 23 nt, Human adenovirus A
gccccccuccccuguggagccac

SEQ ID NO: 3894840 - RNA, 23 nt, Human adenovirus A
gcccccuaaacggcaagccaacg

SEQ ID NO: 3894841 - RNA, 15 nt, Human adenovirus A
gcccuauccgucucc

SEQ ID NO: 3894842 - RNA, 18 nt, Human adenovirus A
gccgcagcugcggccgca

SEQ ID NO: 3894843 - RNA, 19 nt, Human adenovirus A
gccgccuuagacaugacag

SEQ ID NO: 3894844 - RNA, 19 nt, Human adenovirus A
gccggcgaacgggcagccu

SEQ ID NO: 3894845 - RNA, 16 nt, Human adenovirus A
gccggucgcgagcugc

SEQ ID NO: 3894846 - RNA, 21 nt, Human adenovirus A
gccgucaaaauuuucucccca

SEQ ID NO: 3894847 - RNA, 17 nt, Human adenovirus A
gccguggcuagcuugcg

SEQ ID NO: 3894848 - RNA, 16 nt, Human adenovirus A
gccuacccuucuuuau

SEQ ID NO: 3894849 - RNA, 18 nt, Human adenovirus A
gccuaugugauaacccug

SEQ ID NO: 3894850 - RNA, 23 nt, Human adenovirus A
gccuccuauguuagcgccagagg

SEQ ID NO: 3894851 - RNA, 19 nt, Human adenovirus A
gccucgcaccagaaagcag

SEQ ID NO: 3894852 - RNA, 14 nt, Human adenovirus A
gccugaagaagaac

SEQ ID NO: 3894853 - RNA, 22 nt, Human adenovirus A
gccuguugaauuuggguaaggg

SEQ ID NO: 3894854 - RNA, 22 nt, Human adenovirus A
gccuuaaauaaggcugcuagga

SEQ ID NO: 3894855 - RNA, 17 nt, Human adenovirus A
gcgacagaguugcuuuu

SEQ ID NO: 3894856 - RNA, 13 nt, Human adenovirus A
gcgacggcggcgc

SEQ ID NO: 3894857 - RNA, 14 nt, Human adenovirus A
gcgacucagugacc

SEQ ID NO: 3894858 - RNA, 15 nt, Human adenovirus A
gcgagcgcauagaaa

SEQ ID NO: 3894859 - RNA, 16 nt, Human adenovirus A
gcgccaggauguuggg

SEQ ID NO: 3894860 - RNA, 22 nt, Human adenovirus A
gcgcgcccggcucccacgccgc

SEQ ID NO: 3894861 - RNA, 19 nt, Human adenovirus A
gcgcuggcucaacgagagc

SEQ ID NO: 3894862 - RNA, 13 nt, Human adenovirus A
gcggcacaacaga

SEQ ID NO: 3894863 - RNA, 22 nt, Human adenovirus A
gcggcauuccccauccaaaacc

SEQ ID NO: 3894864 - RNA, 14 nt, Human adenovirus A
gcggccuguuuugu

SEQ ID NO: 3894865 - RNA, 18 nt, Human adenovirus A
gcggcguaguaugcgcag

SEQ ID NO: 3894866 - RNA, 17 nt, Human adenovirus A
gcggguaagagcaggcu

SEQ ID NO: 3894867 - RNA, 18 nt, Human adenovirus A
gcggucuuaaaaauuuug

SEQ ID NO: 3894868 - RNA, 15 nt, Human adenovirus A
gcgguggaacugcag

SEQ ID NO: 3894869 - RNA, 12 nt, Human adenovirus A
gcguacagccag

SEQ ID NO: 3894870 - RNA, 17 nt, Human adenovirus A
gcgucagcucguugaug

SEQ ID NO: 3894871 - RNA, 15 nt, Human adenovirus A
gcgugccaggcauuu

SEQ ID NO: 3894872 - RNA, 18 nt, Human adenovirus A
gcuaaauguaacugagga

SEQ ID NO: 3894873 - RNA, 17 nt, Human adenovirus A
gcuaacgccaccagcgu

SEQ ID NO: 3894874 - RNA, 17 nt, Human adenovirus A
gcuacaaaguccucagg

SEQ ID NO: 3894875 - RNA, 20 nt, Human adenovirus A
gcuaguucuuacuuugacau

SEQ ID NO: 3894876 - RNA, 15 nt, Human adenovirus A
gcuauguacagcaau

SEQ ID NO: 3894877 - RNA, 16 nt, Human adenovirus A
gcuauguacagcaauc

SEQ ID NO: 3894878 - RNA, 15 nt, Human adenovirus A
gcucaaagaaacagc

SEQ ID NO: 3894879 - RNA, 17 nt, Human adenovirus A
gcucaacgagagcgcuu

SEQ ID NO: 3894880 - RNA, 13 nt, Human adenovirus A
gcucagcuggaag

SEQ ID NO: 3894881 - RNA, 17 nt, Human adenovirus A
gcucaguuauauuuucu

SEQ ID NO: 3894882 - RNA, 13 nt, Human adenovirus A
gcucccgccauug

SEQ ID NO: 3894883 - RNA, 18 nt, Human adenovirus A
gcuccgacaacagcugcu

SEQ ID NO: 3894884 - RNA, 14 nt, Human adenovirus A
gcuccugcauuaau

SEQ ID NO: 3894885 - RNA, 20 nt, Human adenovirus A
gcucgcugguccccagaugu

SEQ ID NO: 3894886 - RNA, 23 nt, Human adenovirus A
gcugaagaggaggguuugcauuu

SEQ ID NO: 3894887 - RNA, 24 nt, Human adenovirus A
gcugacauaauuuucccagaaagg

SEQ ID NO: 3894888 - RNA, 16 nt, Human adenovirus A
gcugacauacacugua

SEQ ID NO: 3894889 - RNA, 13 nt, Human adenovirus A
gcugauuaugcau

SEQ ID NO: 3894890 - RNA, 18 nt, Human adenovirus A
gcugcaaggucauuagau

SEQ ID NO: 3894891 - RNA, 23 nt, Human adenovirus A
gcugcaauuucuuucauuaggcu

SEQ ID NO: 3894892 - RNA, 19 nt, Human adenovirus A
gcugcaguuugucauuacu

SEQ ID NO: 3894893 - RNA, 17 nt, Human adenovirus A
uaaaggucgcacugagc

SEQ ID NO: 3894894 - RNA, 15 nt, Human adenovirus A
uaaaguaaauuaaau

SEQ ID NO: 3894895 - RNA, 17 nt, Human adenovirus A
uaaaguaaauuaaaugg

SEQ ID NO: 3894896 - RNA, 22 nt, Human adenovirus A
uaaagucagacuauuacacuca

SEQ ID NO: 3894897 - RNA, 22 nt, Human adenovirus A
uaaauacugguauuuaaaaucu

SEQ ID NO: 3894898 - RNA, 22 nt, Human adenovirus A
uaaauauaucuuuuaacaacaa

SEQ ID NO: 3894899 - RNA, 20 nt, Human adenovirus A
uaaaugcggaagaagaacgc

SEQ ID NO: 3894900 - RNA, 16 nt, Human adenovirus A
uaaauggauacucuuu

SEQ ID NO: 3894901 - RNA, 21 nt, Human adenovirus A
uaaauggcgaccucuaacaaa

SEQ ID NO: 3894902 - RNA, 13 nt, Human adenovirus A
uaacaacagucag

SEQ ID NO: 3894903 - RNA, 20 nt, Human adenovirus A
uaacaguuugcgugccuggc

SEQ ID NO: 3894904 - RNA, 20 nt, Human adenovirus A
uaacauguuuaugcgcugua

SEQ ID NO: 3894905 - RNA, 14 nt, Human adenovirus A
uaacauuagcaguc

SEQ ID NO: 3894906 - RNA, 17 nt, Human adenovirus A
uaaccuguccuuaagac

SEQ ID NO: 3894907 - RNA, 12 nt, Human adenovirus A
uaaccuuuccac

SEQ ID NO: 3894908 - RNA, 18 nt, Human adenovirus A
uaacuuuauauugcauuu

SEQ ID NO: 3894909 - RNA, 18 nt, Human adenovirus A
uaagaggagacaacuuua

SEQ ID NO: 3894910 - RNA, 16 nt, Human adenovirus A
uaagcgauuuuccaaa

SEQ ID NO: 3894911 - RNA, 12 nt, Human adenovirus A
uaagcuugcaua

SEQ ID NO: 3894912 - RNA, 19 nt, Human adenovirus A
uaagggcgcccuccaccgc

SEQ ID NO: 3894913 - RNA, 11 nt, Human adenovirus A
uaagggcuggc

SEQ ID NO: 3894914 - RNA, 16 nt, Human adenovirus A
uaaguguucgcaacaa

SEQ ID NO: 3894915 - RNA, 17 nt, Human adenovirus A
uaaguuuaaaggcauua

SEQ ID NO: 3894916 - RNA, 22 nt, Human adenovirus A
uaauaaagcuaaaucugccacu

SEQ ID NO: 3894917 - RNA, 22 nt, Human adenovirus A
uaauaauugaguaacuucaaca

SEQ ID NO: 3894918 - RNA, 23 nt, Human adenovirus A
uaauaucauuaaauaauauuuug

SEQ ID NO: 3894919 - RNA, 20 nt, Human adenovirus A
uaaucaagacggucagcaag

SEQ ID NO: 3894920 - RNA, 23 nt, Human adenovirus A
uaaugaugauacucgacaucguu

SEQ ID NO: 3894921 - RNA, 14 nt, Human adenovirus A
uaaugcaucuuugg

SEQ ID NO: 3894922 - RNA, 20 nt, Human adenovirus A
uaauggaguuguagacauag

SEQ ID NO: 3894923 - RNA, 20 nt, Human adenovirus A
uaauugaguaacuucaacau

SEQ ID NO: 3894924 - RNA, 22 nt, Human adenovirus A
uaauuuuccagcgccaccugcc

SEQ ID NO: 3894925 - RNA, 20 nt, Human adenovirus A
uacaaagccaggcacagcag

SEQ ID NO: 3894926 - RNA, 15 nt, Human adenovirus A
uacaaaucuuucaau

SEQ ID NO: 3894927 - RNA, 14 nt, Human adenovirus A
uacaacaguacagg

SEQ ID NO: 3894928 - RNA, 17 nt, Human adenovirus A
uacaacuugcacaaaug

SEQ ID NO: 3894929 - RNA, 22 nt, Human adenovirus A
uacaaguuccggaguucccaca

SEQ ID NO: 3894930 - RNA, 12 nt, Human adenovirus A
uacacauaaaga

SEQ ID NO: 3894931 - RNA, 20 nt, Human adenovirus A
uacacuggcuggcuuuugga

SEQ ID NO: 3894932 - RNA, 13 nt, Human adenovirus A
uacagauuuaagg

SEQ ID NO: 3894933 - RNA, 14 nt, Human adenovirus A
uacauaccuggcaa

SEQ ID NO: 3894934 - RNA, 22 nt, Human adenovirus A
uaccgcucgucaagccuaccug

SEQ ID NO: 3894935 - RNA, 18 nt, Human adenovirus A
uaccgugggacaacuuuu

SEQ ID NO: 3894936 - RNA, 18 nt, Human adenovirus A
uaccuacuccuacaaggc

SEQ ID NO: 3894937 - RNA, 15 nt, Human adenovirus A
uaccucaaaagcgaa

SEQ ID NO: 3894938 - RNA, 16 nt, Human adenovirus A
uaccucacuuacauua

SEQ ID NO: 3894939 - RNA, 20 nt, Human adenovirus A
uaccugagcggcaagaacaa

SEQ ID NO: 3894940 - RNA, 16 nt, Human adenovirus A
uacgcuugugcagccu

SEQ ID NO: 3894941 - RNA, 19 nt, Human adenovirus A
uacggagggaagaaacagu

SEQ ID NO: 3894942 - RNA, 13 nt, Human adenovirus A
uacggcugucaug

SEQ ID NO: 3894943 - RNA, 17 nt, Human adenovirus A
uacgguggcagccaagc

SEQ ID NO: 3894944 - RNA, 16 nt, Human adenovirus A
uacucaucagagggaa

SEQ ID NO: 3894945 - RNA, 19 nt, Human adenovirus A
uacugcccugguuccccaa

SEQ ID NO: 3894946 - RNA, 22 nt, Human adenovirus A
uacuucaccgcgcaagcuuuca

SEQ ID NO: 3894947 - RNA, 12 nt, Human adenovirus A
uacuugaacaac

SEQ ID NO: 3894948 - RNA, 14 nt, Human adenovirus A
uacuuuacaaaugc

SEQ ID NO: 3894949 - RNA, 20 nt, Human adenovirus A
uagaaucggcaacagcagca

SEQ ID NO: 3894950 - RNA, 15 nt, Human adenovirus A
uagacgaacaaacuu

SEQ ID NO: 3894951 - RNA, 19 nt, Human adenovirus A
uagagcaaacuacauugca

SEQ ID NO: 3894952 - RNA, 17 nt, Human adenovirus A
uagauacaagcgacaga

SEQ ID NO: 3894953 - RNA, 16 nt, Human adenovirus A
uagcaaagccauccgc

SEQ ID NO: 3894954 - RNA, 12 nt, Human adenovirus A
uagcgccagagg

SEQ ID NO: 3894955 - RNA, 14 nt, Human adenovirus A
uagcguccacacag

SEQ ID NO: 3894956 - RNA, 15 nt, Human adenovirus A
uaggcaauuucugcc

SEQ ID NO: 3894957 - RNA, 23 nt, Human adenovirus A
uaguagagacaaugaaacuuuua

SEQ ID NO: 3894958 - RNA, 14 nt, Human adenovirus A
uaguccaagcaagu

SEQ ID NO: 3894959 - RNA, 17 nt, Human adenovirus A
uaguccguuuucuucuu

SEQ ID NO: 3894960 - RNA, 17 nt, Human adenovirus A
uaguugccacgcuuuga

SEQ ID NO: 3894961 - RNA, 20 nt, Human adenovirus A
uaugaacacuuagagggagg

SEQ ID NO: 3894962 - RNA, 15 nt, Human adenovirus A
uaugcccagcaugac

SEQ ID NO: 3894963 - RNA, 21 nt, Human adenovirus A
uaugcgggagggacaagcuua

SEQ ID NO: 3894964 - RNA, 19 nt, Human adenovirus A
uaugcgugagggugccacc

SEQ ID NO: 3894965 - RNA, 20 nt, Human adenovirus A
uauggagugugcuauuaaag

SEQ ID NO: 3894966 - RNA, 20 nt, Human adenovirus A
uauguacauaauccagcaag

SEQ ID NO: 3894967 - RNA, 22 nt, Human adenovirus A
uauuauugaagggaauggcuau

SEQ ID NO: 3894968 - RNA, 15 nt, Human adenovirus A
uauugauaaaacggu

SEQ ID NO: 3894969 - RNA, 13 nt, Human adenovirus A
uauugguggaaaa

SEQ ID NO: 3894970 - RNA, 14 nt, Human adenovirus A
uauuuuuucaaaau

SEQ ID NO: 3894971 - RNA, 22 nt, Human adenovirus A
ucaaaaaagcaaaguacaacca

SEQ ID NO: 3894972 - RNA, 20 nt, Human adenovirus A
ucaaaauaaucaauuuugca

SEQ ID NO: 3894973 - RNA, 22 nt, Human adenovirus A
ucaaagaagagcugcugcaggc

SEQ ID NO: 3894974 - RNA, 15 nt, Human adenovirus A
ucaaauggcucuucg

SEQ ID NO: 3894975 - RNA, 16 nt, Human adenovirus A
ucaacagaaaguugua

SEQ ID NO: 3894976 - RNA, 17 nt, Human adenovirus A
ucaacauaguagagaca

SEQ ID NO: 3894977 - RNA, 14 nt, Human adenovirus A
ucaacccaaacugu

SEQ ID NO: 3894978 - RNA, 18 nt, Human adenovirus A
ucaacgacuaaaacaaau

SEQ ID NO: 3894979 - RNA, 14 nt, Human adenovirus A
ucaagaaaaaccac

SEQ ID NO: 3894980 - RNA, 15 nt, Human adenovirus A
ucaagaaaggcaucu

SEQ ID NO: 3894981 - RNA, 16 nt, Human adenovirus A
ucaagacggucagcaa

SEQ ID NO: 3894982 - RNA, 20 nt, Human adenovirus A
ucaagccuaccugacacuac

SEQ ID NO: 3894983 - RNA, 20 nt, Human adenovirus A
ucaauaccacuuggcagcug

SEQ ID NO: 3894984 - RNA, 20 nt, Human adenovirus A
ucaaugcuucugaaacaaau

SEQ ID NO: 3894985 - RNA, 16 nt, Human adenovirus A
ucacacuuaacacaag

SEQ ID NO: 3894986 - RNA, 16 nt, Human adenovirus A
ucacaucaaccccuac

SEQ ID NO: 3894987 - RNA, 13 nt, Human adenovirus A
ucaccaaaguaau

SEQ ID NO: 3894988 - RNA, 21 nt, Human adenovirus A
ucaccaugggaauagugcucu

SEQ ID NO: 3894989 - RNA, 13 nt, Human adenovirus A
ucaccgcuacacc

SEQ ID NO: 3894990 - RNA, 17 nt, Human adenovirus A
ucaccuuugugugcuac

SEQ ID NO: 3894991 - RNA, 15 nt, Human adenovirus A
ucagaagccagcagc

SEQ ID NO: 3894992 - RNA, 16 nt, Human adenovirus A
ucagaagccagcagca

SEQ ID NO: 3894993 - RNA, 17 nt, Human adenovirus A
ucagaagccagcagcaa

SEQ ID NO: 3894994 - RNA, 15 nt, Human adenovirus A
ucagaugacuggaca

SEQ ID NO: 3894995 - RNA, 11 nt, Human adenovirus A
ucagccagagc

SEQ ID NO: 3894996 - RNA, 14 nt, Human adenovirus A
ucagcgccaacaaa

SEQ ID NO: 3894997 - RNA, 18 nt, Human adenovirus A
ucagcgccgagccacagc

SEQ ID NO: 3894998 - RNA, 16 nt, Human adenovirus A
ucagcuaacaaugcag

SEQ ID NO: 3894999 - RNA, 11 nt, Human adenovirus A
ucagcugcaaa

SEQ ID NO: 3895000 - RNA, 12 nt, Human adenovirus A
ucagcugcaaac

SEQ ID NO: 3895001 - RNA, 21 nt, Human adenovirus A
ucauaagcugugaaaaugcgu

SEQ ID NO: 3895002 - RNA, 23 nt, Human adenovirus A
ucauacauaauuuuaaaguaaau

SEQ ID NO: 3895003 - RNA, 17 nt, Human adenovirus A
ucaugguuugcuaacag

SEQ ID NO: 3895004 - RNA, 21 nt, Human adenovirus A
ucauguggucaggucuaucaa

SEQ ID NO: 3895005 - RNA, 13 nt, Human adenovirus A
ucauuccuucaga

SEQ ID NO: 3895006 - RNA, 11 nt, Human adenovirus A
uccaaaaccag

SEQ ID NO: 3895007 - RNA, 15 nt, Human adenovirus A
uccaaauggacgagg

SEQ ID NO: 3895008 - RNA, 15 nt, Human adenovirus A
uccaacugauuuuca

SEQ ID NO: 3895009 - RNA, 14 nt, Human adenovirus A
uccaagaucuuugu

SEQ ID NO: 3895010 - RNA, 10 nt, Human adenovirus A
augcaaagcc

SEQ ID NO: 3895011 - RNA, 13 nt, Human adenovirus A
augcauaauuaaa

SEQ ID NO: 3895012 - RNA, 14 nt, Human adenovirus A
augcauaauuaaac

SEQ ID NO: 3895013 - RNA, 19 nt, Human adenovirus A
augcccugcaaaaagaaaa

SEQ ID NO: 3895014 - RNA, 13 nt, Human adenovirus A
augccgcaguggu

SEQ ID NO: 3895015 - RNA, 21 nt, Human adenovirus A
augccuaaugugagugcuuac

SEQ ID NO: 3895016 - RNA, 18 nt, Human adenovirus A
augcugauguuuguaaaa

SEQ ID NO: 3895017 - RNA, 13 nt, Human adenovirus A
augcuuggaagaa

SEQ ID NO: 3895018 - RNA, 16 nt, Human adenovirus A
augcuuuucgccagca

SEQ ID NO: 3895019 - RNA, 19 nt, Human adenovirus A
augcuuuucgccagcagcc

SEQ ID NO: 3895020 - RNA, 21 nt, Human adenovirus A
auggaacaauugcuucugagu

SEQ ID NO: 3895021 - RNA, 12 nt, Human adenovirus A
auggaaccccaa

SEQ ID NO: 3895022 - RNA, 20 nt, Human adenovirus A
auggaccuacuuacuggggu

SEQ ID NO: 3895023 - RNA, 18 nt, Human adenovirus A
auggagugcuggaaagug

SEQ ID NO: 3895024 - RNA, 17 nt, Human adenovirus A
auggaguuggaaacugu

SEQ ID NO: 3895025 - RNA, 19 nt, Human adenovirus A
auggcagcggcgccacccu

SEQ ID NO: 3895026 - RNA, 14 nt, Human adenovirus A
auggcgaccagugu

SEQ ID NO: 3895027 - RNA, 19 nt, Human adenovirus A
auggggucaugaaaguaaa

SEQ ID NO: 3895028 - RNA, 12 nt, Human adenovirus A
auggucuucaag

SEQ ID NO: 3895029 - RNA, 22 nt, Human adenovirus A
auguaaaggaggcgcuggcuca

SEQ ID NO: 3895030 - RNA, 16 nt, Human adenovirus A
auguauucagcuucag

SEQ ID NO: 3895031 - RNA, 23 nt, Human adenovirus A
auguauucuuucuuuagaaacuu

SEQ ID NO: 3895032 - RNA, 16 nt, Human adenovirus A
augucgcauaaugaaa

SEQ ID NO: 3895033 - RNA, 22 nt, Human adenovirus A
augucggccugacgcucuggca

SEQ ID NO: 3895034 - RNA, 22 nt, Human adenovirus A
augucuaugggggcgcuaacgg

SEQ ID NO: 3895035 - RNA, 13 nt, Human adenovirus A
augugcuguggaa

SEQ ID NO: 3895036 - RNA, 15 nt, Human adenovirus A
auguggagcuuucaa

SEQ ID NO: 3895037 - RNA, 13 nt, Human adenovirus A
augugguccaggg

SEQ ID NO: 3895038 - RNA, 22 nt, Human adenovirus A
auguuaauuaucccuuugaugc

SEQ ID NO: 3895039 - RNA, 18 nt, Human adenovirus A
auguuagguuugcuggag

SEQ ID NO: 3895040 - RNA, 20 nt, Human adenovirus A
auuaaacaacaaaacacuga

SEQ ID NO: 3895041 - RNA, 14 nt, Human adenovirus A
auuaacaguuugcg

SEQ ID NO: 3895042 - RNA, 20 nt, Human adenovirus A
auuacaugaagauuucugcu

SEQ ID NO: 3895043 - RNA, 18 nt, Human adenovirus A
auuacuaccgucaucucu

SEQ ID NO: 3895044 - RNA, 14 nt, Human adenovirus A
auuacugccaguuc

SEQ ID NO: 3895045 - RNA, 15 nt, Human adenovirus A
auuacuugaacaacu

SEQ ID NO: 3895046 - RNA, 15 nt, Human adenovirus A
auuaggcuccacacc

SEQ ID NO: 3895047 - RNA, 13 nt, Human adenovirus A
auuaggcuuucuu

SEQ ID NO: 3895048 - RNA, 23 nt, Human adenovirus A
auuaguaccgaaaaagguuuaau

SEQ ID NO: 3895049 - RNA, 14 nt, Human adenovirus A
auuaugguucagcu

SEQ ID NO: 3895050 - RNA, 20 nt, Human adenovirus A
auucaggugccgcaaaaauu

SEQ ID NO: 3895051 - RNA, 21 nt, Human adenovirus A
auucaggugccgcaaaaauuu

SEQ ID NO: 3895052 - RNA, 18 nt, Human adenovirus A
auuccuccuuauccuucc

SEQ ID NO: 3895053 - RNA, 20 nt, Human adenovirus A
auugaaaacguuaaagcugg

SEQ ID NO: 3895054 - RNA, 20 nt, Human adenovirus A
auugaaccgguugaaacaga

SEQ ID NO: 3895055 - RNA, 15 nt, Human adenovirus A
auugaguugcacaua

SEQ ID NO: 3895056 - RNA, 22 nt, Human adenovirus A
auugauaaaacgguuaagcugg

SEQ ID NO: 3895057 - RNA, 18 nt, Human adenovirus A
auugauacacaccucauu

SEQ ID NO: 3895058 - RNA, 18 nt, Human adenovirus A
auugcaacgcaaucagaa

SEQ ID NO: 3895059 - RNA, 20 nt, Human adenovirus A
auugcaacgcaaucagaaug

SEQ ID NO: 3895060 - RNA, 13 nt, Human adenovirus A
auugcgcaggggu

SEQ ID NO: 3895061 - RNA, 16 nt, Human adenovirus A
auuggaguacaagcuu

SEQ ID NO: 3895062 - RNA, 18 nt, Human adenovirus A
auuggcuucagcauuuug

SEQ ID NO: 3895063 - RNA, 13 nt, Human adenovirus A
auuguaaaugcuu

SEQ ID NO: 3895064 - RNA, 17 nt, Human adenovirus A
auuguagccugcuuuca

SEQ ID NO: 3895065 - RNA, 13 nt, Human adenovirus A
auuuaaaaaccau

SEQ ID NO: 3895066 - RNA, 18 nt, Human adenovirus A
auuuaaaauuccauaauu

SEQ ID NO: 3895067 - RNA, 21 nt, Human adenovirus A
auuuagaggcuggagcuuuac

SEQ ID NO: 3895068 - RNA, 23 nt, Human adenovirus A
auuuauaaauguuagguuugcug

SEQ ID NO: 3895069 - RNA, 21 nt, Human adenovirus A
auuuauaguggcacaacacau

SEQ ID NO: 3895070 - RNA, 17 nt, Human adenovirus A
auuucaugguuugcuaa

SEQ ID NO: 3895071 - RNA, 23 nt, Human adenovirus A
auuucgauaaacaaaagcaaagc

SEQ ID NO: 3895072 - RNA, 14 nt, Human adenovirus A
auuucucuuuucuu

SEQ ID NO: 3895073 - RNA, 16 nt, Human adenovirus A
auuucucuuuucuuua

SEQ ID NO: 3895074 - RNA, 18 nt, Human adenovirus A
auuugauucaagaggaag

SEQ ID NO: 3895075 - RNA, 17 nt, Human adenovirus A
auuugcgcacugaaaaa

SEQ ID NO: 3895076 - RNA, 13 nt, Human adenovirus A
auuugcugaaaaa

SEQ ID NO: 3895077 - RNA, 21 nt, Human adenovirus A
auuuguuccuuuucacauuca

SEQ ID NO: 3895078 - RNA, 13 nt, Human adenovirus A
auuuuaaaguaaa

SEQ ID NO: 3895079 - RNA, 20 nt, Human adenovirus A
auuuuaaaguaaauuaaaug

SEQ ID NO: 3895080 - RNA, 24 nt, Human adenovirus A
auuuuauccuacaaaaaguaacaa

SEQ ID NO: 3895081 - RNA, 13 nt, Human adenovirus A
auuuuuugggaac

SEQ ID NO: 3895082 - RNA, 13 nt, Human adenovirus A
caaaaaaaaagcg

SEQ ID NO: 3895083 - RNA, 21 nt, Human adenovirus A
caaaaacaccuuuuguuaauu

SEQ ID NO: 3895084 - RNA, 18 nt, Human adenovirus A
caaaacacugagcuccau

SEQ ID NO: 3895085 - RNA, 16 nt, Human adenovirus A
caaaagguugaggaau

SEQ ID NO: 3895086 - RNA, 22 nt, Human adenovirus A
caaaaguaauaucauuaaauaa

SEQ ID NO: 3895087 - RNA, 17 nt, Human adenovirus A
caaaauaaacaucucau

SEQ ID NO: 3895088 - RNA, 21 nt, Human adenovirus A
caaacaacgaaggccaaacca

SEQ ID NO: 3895089 - RNA, 15 nt, Human adenovirus A
caaacagccgaaaga

SEQ ID NO: 3895090 - RNA, 21 nt, Human adenovirus A
caaacccccaggaugauuuac

SEQ ID NO: 3895091 - RNA, 13 nt, Human adenovirus A
caaaccugacaga

SEQ ID NO: 3895092 - RNA, 16 nt, Human adenovirus A
caaacggguggaaaaa

SEQ ID NO: 3895093 - RNA, 23 nt, Human adenovirus A
caaacguuuuccggguuuugugu

SEQ ID NO: 3895094 - RNA, 17 nt, Human adenovirus A
caaacuggaacuuaaca

SEQ ID NO: 3895095 - RNA, 20 nt, Human adenovirus A
caaagccacuuuagccccag

SEQ ID NO: 3895096 - RNA, 20 nt, Human adenovirus A
caaagggggcgcacacuaau

SEQ ID NO: 3895097 - RNA, 20 nt, Human adenovirus A
caaaggugcuucccacauac

SEQ ID NO: 3895098 - RNA, 21 nt, Human adenovirus A
caaaggugcuucccacauaca

SEQ ID NO: 3895099 - RNA, 14 nt, Human adenovirus A
caaaguaccuuaca

SEQ ID NO: 3895100 - RNA, 13 nt, Human adenovirus A
cagcaagugccuc

SEQ ID NO: 3895101 - RNA, 15 nt, Human adenovirus A
cagcaauuacuugaa

SEQ ID NO: 3895102 - RNA, 17 nt, Human adenovirus A
cagcagcaacacuccau

SEQ ID NO: 3895103 - RNA, 16 nt, Human adenovirus A
cagcauaaaagcuuca

SEQ ID NO: 3895104 - RNA, 20 nt, Human adenovirus A
cagcauguccccgaaagccg

SEQ ID NO: 3895105 - RNA, 19 nt, Human adenovirus A
cagcauuaguucuuuucuu

SEQ ID NO: 3895106 - RNA, 19 nt, Human adenovirus A
cagccaaaacucagguagc

SEQ ID NO: 3895107 - RNA, 16 nt, Human adenovirus A
cagccaacaucaugaa

SEQ ID NO: 3895108 - RNA, 21 nt, Human adenovirus A
cagccagauguaaaaguacgu

SEQ ID NO: 3895109 - RNA, 21 nt, Human adenovirus A
cagccgaaagaccacuaaaag

SEQ ID NO: 3895110 - RNA, 17 nt, Human adenovirus A
cagcgacaaagcacuau

SEQ ID NO: 3895111 - RNA, 22 nt, Human adenovirus A
cagcgaccggcgaucaucgcgg

SEQ ID NO: 3895112 - RNA, 22 nt, Human adenovirus A
cagcgacgcaaaaaaggggcac

SEQ ID NO: 3895113 - RNA, 19 nt, Human adenovirus A
cagcgcacuggcauaagga

SEQ ID NO: 3895114 - RNA, 15 nt, Human adenovirus A
cagcgccaacaaaaa

SEQ ID NO: 3895115 - RNA, 17 nt, Human adenovirus A
cagcgccaccugccauu

SEQ ID NO: 3895116 - RNA, 16 nt, Human adenovirus A
cagcuaacaaugcagc

SEQ ID NO: 3895117 - RNA, 13 nt, Human adenovirus A
cagcuaacgccac

SEQ ID NO: 3895118 - RNA, 18 nt, Human adenovirus A
cagcuaacgccaccagcg

SEQ ID NO: 3895119 - RNA, 17 nt, Human adenovirus A
cagcugauuucagcuuc

SEQ ID NO: 3895120 - RNA, 17 nt, Human adenovirus A
cagcugccguucguccu

SEQ ID NO: 3895121 - RNA, 22 nt, Human adenovirus A
cagcuuuuauaugcgcauggcu

SEQ ID NO: 3895122 - RNA, 17 nt, Human adenovirus A
caggaaaaucccccucc

SEQ ID NO: 3895123 - RNA, 17 nt, Human adenovirus A
caggaaaucugggagga

SEQ ID NO: 3895124 - RNA, 16 nt, Human adenovirus A
caggaagagccucaau

SEQ ID NO: 3895125 - RNA, 13 nt, Human adenovirus A
caggaguugcagg

SEQ ID NO: 3895126 - RNA, 20 nt, Human adenovirus A
caggauccgcuaugagcaca

SEQ ID NO: 3895127 - RNA, 19 nt, Human adenovirus A
caggcgcggcgguguaugc

SEQ ID NO: 3895128 - RNA, 16 nt, Human adenovirus A
caggcuggaggugcag

SEQ ID NO: 3895129 - RNA, 22 nt, Human adenovirus A
cagggcauacgcuugugcagcc

SEQ ID NO: 3895130 - RNA, 21 nt, Human adenovirus A
caggggaagguguugagcccg

SEQ ID NO: 3895131 - RNA, 23 nt, Human adenovirus A
caggggugguggguuuggaugga

SEQ ID NO: 3895132 - RNA, 16 nt, Human adenovirus A
cagguauuacuaaaag

SEQ ID NO: 3895133 - RNA, 18 nt, Human adenovirus A
ccaguuuacuaacaccaa

SEQ ID NO: 3895134 - RNA, 21 nt, Human adenovirus A
ccaucuugcuuguuuaaacau

SEQ ID NO: 3895135 - RNA, 19 nt, Human adenovirus A
ccauggaucguauuauggc

SEQ ID NO: 3895136 - RNA, 21 nt, Human adenovirus A
ccaugguaaaaaggaagcagg

SEQ ID NO: 3895137 - RNA, 11 nt, Human adenovirus A
ccauguugcua

SEQ ID NO: 3895138 - RNA, 17 nt, Human adenovirus A
ccauuauuauggcaauu

SEQ ID NO: 3895139 - RNA, 18 nt, Human adenovirus A
ccauugugcccacgccug

SEQ ID NO: 3895140 - RNA, 17 nt, Human adenovirus A
ccauugugcuaaaugua

SEQ ID NO: 3895141 - RNA, 14 nt, Human adenovirus A
ccauuugacacauc

SEQ ID NO: 3895142 - RNA, 12 nt, Human adenovirus A
cccaacccuucc

SEQ ID NO: 3895143 - RNA, 16 nt, Human adenovirus A
cccaacugucaaaccu

SEQ ID NO: 3895144 - RNA, 17 nt, Human adenovirus A
cccaacuuaacgcagua

SEQ ID NO: 3895145 - RNA, 19 nt, Human adenovirus A
cccaacuuugacgcaguga

SEQ ID NO: 3895146 - RNA, 19 nt, Human adenovirus A
cccagcgguuuugcgccac

SEQ ID NO: 3895147 - RNA, 18 nt, Human adenovirus A
cccagcugacauacacug

SEQ ID NO: 3895148 - RNA, 12 nt, Human adenovirus A
ccccaaaagccc

SEQ ID NO: 3895149 - RNA, 17 nt, Human adenovirus A
ccccagcggcaguacgu

SEQ ID NO: 3895150 - RNA, 19 nt, Human adenovirus A
ccccgcgacacggcacgcg

SEQ ID NO: 3895151 - RNA, 21 nt, Human adenovirus A
ccccuaaacggcaagccaacg

SEQ ID NO: 3895152 - RNA, 16 nt, Human adenovirus A
ccccuccuucgcuguc

SEQ ID NO: 3895153 - RNA, 17 nt, Human adenovirus A
cccgcauguauggagga

SEQ ID NO: 3895154 - RNA, 12 nt, Human adenovirus A
cccgccuggcag

SEQ ID NO: 3895155 - RNA, 22 nt, Human adenovirus A
cccgcgaaaaaaaucacuuccg

SEQ ID NO: 3895156 - RNA, 15 nt, Human adenovirus A
cccguuccgcaagca

SEQ ID NO: 3895157 - RNA, 15 nt, Human adenovirus A
cccuccccuguggag

SEQ ID NO: 3895158 - RNA, 21 nt, Human adenovirus A
cccucccucuuggccagcugc

SEQ ID NO: 3895159 - RNA, 13 nt, Human adenovirus A
cccuccuaccacu

SEQ ID NO: 3895160 - RNA, 15 nt, Human adenovirus A
cccuuuaccaacacc

SEQ ID NO: 3895161 - RNA, 16 nt, Human adenovirus A
ccgacuaacaggugaa

SEQ ID NO: 3895162 - RNA, 13 nt, Human adenovirus A
ccgaggaauuuga

SEQ ID NO: 3895163 - RNA, 13 nt, Human adenovirus A
ccgaggugacaug

SEQ ID NO: 3895164 - RNA, 22 nt, Human adenovirus A
ccgcacguucaauaguggcugc

SEQ ID NO: 3895165 - RNA, 15 nt, Human adenovirus A
ccgcagucagugacc

SEQ ID NO: 3895166 - RNA, 20 nt, Human adenovirus A
ccgcaguggucuuacaugca

SEQ ID NO: 3895167 - RNA, 15 nt, Human adenovirus A
ccgcccaggcaggcg

SEQ ID NO: 3895168 - RNA, 13 nt, Human adenovirus A
ccgcgagcagcgg

SEQ ID NO: 3895169 - RNA, 14 nt, Human adenovirus A
ccgcgaucagccau

SEQ ID NO: 3895170 - RNA, 14 nt, Human adenovirus A
ccgcugcucagcuc

SEQ ID NO: 3895171 - RNA, 20 nt, Human adenovirus A
agcaauuacuugaacaacuu

SEQ ID NO: 3895172 - RNA, 14 nt, Human adenovirus A
agcacacugggaaa

SEQ ID NO: 3895173 - RNA, 12 nt, Human adenovirus A
agcaccccuucc

SEQ ID NO: 3895174 - RNA, 15 nt, Human adenovirus A
agcacuaaaaucccu

SEQ ID NO: 3895175 - RNA, 15 nt, Human adenovirus A
agcagaauuacugcc

SEQ ID NO: 3895176 - RNA, 23 nt, Human adenovirus A
agcagcggcuugagcaaaaaugu

SEQ ID NO: 3895177 - RNA, 16 nt, Human adenovirus A
agcauaugaacaaacg

SEQ ID NO: 3895178 - RNA, 13 nt, Human adenovirus A
agcaucccagcug

SEQ ID NO: 3895179 - RNA, 22 nt, Human adenovirus A
agcaucccagcugacauacacu

SEQ ID NO: 3895180 - RNA, 23 nt, Human adenovirus A
agcaucccagcugacauacacug

SEQ ID NO: 3895181 - RNA, 14 nt, Human adenovirus A
agcauuggaauuua

SEQ ID NO: 3895182 - RNA, 13 nt, Human adenovirus A
agccaaaaaaaca

SEQ ID NO: 3895183 - RNA, 17 nt, Human adenovirus A
agccaacauccagugcg

SEQ ID NO: 3895184 - RNA, 15 nt, Human adenovirus A
agccauccgcaaaga

SEQ ID NO: 3895185 - RNA, 19 nt, Human adenovirus A
agccaugcuaugcaggcag

SEQ ID NO: 3895186 - RNA, 22 nt, Human adenovirus A
agccauggaugaauugcagccu

SEQ ID NO: 3895187 - RNA, 17 nt, Human adenovirus A
agccgcaaguaggacca

SEQ ID NO: 3895188 - RNA, 19 nt, Human adenovirus A
agccgcagcaccuggagcg

SEQ ID NO: 3895189 - RNA, 15 nt, Human adenovirus A
agccgccauggaaau

SEQ ID NO: 3895190 - RNA, 16 nt, Human adenovirus A
agccuggagcugucca

SEQ ID NO: 3895191 - RNA, 21 nt, Human adenovirus A
agccuucauuccuucagaaua

SEQ ID NO: 3895192 - RNA, 15 nt, Human adenovirus A
agcgaacaggagcug

SEQ ID NO: 3895193 - RNA, 15 nt, Human adenovirus A
agcgacagaguugcu

SEQ ID NO: 3895194 - RNA, 16 nt, Human adenovirus A
agcgaugacucagcug

SEQ ID NO: 3895195 - RNA, 16 nt, Human adenovirus A
agcgcaacagcgcaug

SEQ ID NO: 3895196 - RNA, 15 nt, Human adenovirus A
agcgcacuggcauaa

SEQ ID NO: 3895197 - RNA, 15 nt, Human adenovirus A
agcgcgcgacuggcu

SEQ ID NO: 3895198 - RNA, 22 nt, Human adenovirus A
agcggcaagaacaauuucauca

SEQ ID NO: 3895199 - RNA, 13 nt, Human adenovirus A
agcggccacggcc

SEQ ID NO: 3895200 - RNA, 19 nt, Human adenovirus A
agcggccacggccggaugc

SEQ ID NO: 3895201 - RNA, 16 nt, Human adenovirus A
agcggccacuaaagac

SEQ ID NO: 3895202 - RNA, 22 nt, Human adenovirus A
agcggcuugagcaaaaauguuu

SEQ ID NO: 3895203 - RNA, 14 nt, Human adenovirus A
agcgguuauugauu

SEQ ID NO: 3895204 - RNA, 15 nt, Human adenovirus A
agcuaaaucugccac

SEQ ID NO: 3895205 - RNA, 13 nt, Human adenovirus A
agcuaauaccugu

SEQ ID NO: 3895206 - RNA, 12 nt, Human adenovirus A
agcuaugaugcg

SEQ ID NO: 3895207 - RNA, 20 nt, Human adenovirus A
agcuauugcaaaccuagcug

SEQ ID NO: 3895208 - RNA, 22 nt, Human adenovirus A
agcucugauuucgauaaacaaa

SEQ ID NO: 3895209 - RNA, 19 nt, Human adenovirus A
agcugaacgggggcgccuu

SEQ ID NO: 3895210 - RNA, 23 nt, Human adenovirus A
agcugcagagcuagcugacauaa

SEQ ID NO: 3895211 - RNA, 21 nt, Human adenovirus A
agcugccaccucuagaaacug

SEQ ID NO: 3895212 - RNA, 21 nt, Human adenovirus A
agcugccuccuuugccagaac

SEQ ID NO: 3895213 - RNA, 16 nt, Human adenovirus A
agcugcugcaggccuu

SEQ ID NO: 3895214 - RNA, 16 nt, Human adenovirus A
auaaaagcauacuuac

SEQ ID NO: 3895215 - RNA, 16 nt, Human adenovirus A
auaaaaggcuggaagu

SEQ ID NO: 3895216 - RNA, 17 nt, Human adenovirus A
auaaacaaaagcaaagc

SEQ ID NO: 3895217 - RNA, 18 nt, Human adenovirus A
auaaagcuggguuggugu

SEQ ID NO: 3895218 - RNA, 16 nt, Human adenovirus A
auaagaaagaggcagc

SEQ ID NO: 3895219 - RNA, 21 nt, Human adenovirus A
auaaggagacguuuuugccca

SEQ ID NO: 3895220 - RNA, 18 nt, Human adenovirus A
auaauuaaacccuuuagc

SEQ ID NO: 3895221 - RNA, 16 nt, Human adenovirus A
auacaacggccagcca

SEQ ID NO: 3895222 - RNA, 16 nt, Human adenovirus A
auacaguuuugaacaa

SEQ ID NO: 3895223 - RNA, 14 nt, Human adenovirus A
auaccaaaaacacc

SEQ ID NO: 3895224 - RNA, 15 nt, Human adenovirus A
auacucuuuaacauu

SEQ ID NO: 3895225 - RNA, 16 nt, Human adenovirus A
auacugcuagaacaag

SEQ ID NO: 3895226 - RNA, 15 nt, Human adenovirus A
auagaaaaagcuaca

SEQ ID NO: 3895227 - RNA, 14 nt, Human adenovirus A
auagaacuggaagg

SEQ ID NO: 3895228 - RNA, 15 nt, Human adenovirus A
auagcaacaacgcug

SEQ ID NO: 3895229 - RNA, 18 nt, Human adenovirus A
auaggaggaguuaaauaa

SEQ ID NO: 3895230 - RNA, 15 nt, Human adenovirus A
auagguauugauaaa

SEQ ID NO: 3895231 - RNA, 17 nt, Human adenovirus A
auaguucaucuuaguaa

SEQ ID NO: 3895232 - RNA, 17 nt, Human adenovirus A
auauaguacugcuucca

SEQ ID NO: 3895233 - RNA, 13 nt, Human adenovirus A
auaucaauguuuu

SEQ ID NO: 3895234 - RNA, 15 nt, Human adenovirus A
auaucacucuucgcu

SEQ ID NO: 3895235 - RNA, 16 nt, Human adenovirus A
auaucucauuugcaag

SEQ ID NO: 3895236 - RNA, 13 nt, Human adenovirus A
auaugcauuuaca

SEQ ID NO: 3895237 - RNA, 13 nt, Human adenovirus A
auaugggcgcaga

SEQ ID NO: 3895238 - RNA, 15 nt, Human adenovirus A
auauguaucuggaca

SEQ ID NO: 3895239 - RNA, 17 nt, Human adenovirus A
auauuaaaaagcucugu

SEQ ID NO: 3895240 - RNA, 22 nt, Human adenovirus A
auauuguagccugcuuucagca

SEQ ID NO: 3895241 - RNA, 14 nt, Human adenovirus A
aucagaagccagca

SEQ ID NO: 3895242 - RNA, 13 nt, Human adenovirus A
aucagccaugugc

SEQ ID NO: 3895243 - RNA, 14 nt, Human adenovirus A
aucaucaaacugcc

SEQ ID NO: 3895244 - RNA, 12 nt, Human adenovirus A
aucauuaaauaa

SEQ ID NO: 3895245 - RNA, 14 nt, Human adenovirus A
aucauuaagaacac

SEQ ID NO: 3895246 - RNA, 13 nt, Human adenovirus A
auccauuauuaug

SEQ ID NO: 3895247 - RNA, 20 nt, Human adenovirus A
auccauuuccaccaaaugcu

SEQ ID NO: 3895248 - RNA, 22 nt, Human adenovirus A
aucccgcgguuuuggcggccau

SEQ ID NO: 3895249 - RNA, 13 nt, Human adenovirus A
auccuagcguaca

SEQ ID NO: 3895250 - RNA, 14 nt, Human adenovirus A
aucggcggcgcgga

SEQ ID NO: 3895251 - RNA, 16 nt, Human adenovirus A
aucggcggcgcggacg

SEQ ID NO: 3895252 - RNA, 14 nt, Human adenovirus A
aucguucaacuuug

SEQ ID NO: 3895253 - RNA, 19 nt, Human adenovirus A
aucucacuuaagucuuuac

SEQ ID NO: 3895254 - RNA, 20 nt, Human adenovirus A
aucucacuuaagucuuuaca

SEQ ID NO: 3895255 - RNA, 13 nt, Human adenovirus A
aucuccauuccau

SEQ ID NO: 3895256 - RNA, 14 nt, Human adenovirus A
aucuguaaguuugu

SEQ ID NO: 3895257 - RNA, 15 nt, Human adenovirus A
aucugugucuuuacc

SEQ ID NO: 3895258 - RNA, 13 nt, Human adenovirus A
aucuguuuggcuc

SEQ ID NO: 3895259 - RNA, 18 nt, Human adenovirus A
aucuucaucuuuucuaga

SEQ ID NO: 3895260 - RNA, 20 nt, Human adenovirus A
augaaaaagucagcugcaaa

SEQ ID NO: 3895261 - RNA, 15 nt, Human adenovirus A
augaacaaaaucacc

SEQ ID NO: 3895262 - RNA, 14 nt, Human adenovirus A
augaaggaaugccu

SEQ ID NO: 3895263 - RNA, 17 nt, Human adenovirus A
augacaaugaauaagcc

SEQ ID NO: 3895264 - RNA, 21 nt, Human adenovirus A
augacaaugaauaagccaccg

SEQ ID NO: 3895265 - RNA, 21 nt, Human adenovirus A
augaccaaacgcaaguucaaa

SEQ ID NO: 3895266 - RNA, 21 nt, Human adenovirus A
augaccguuugcuaaccccaa

SEQ ID NO: 3895267 - RNA, 19 nt, Human adenovirus A
augacuaacgcuggggcac

SEQ ID NO: 3895268 - RNA, 14 nt, Human adenovirus A
augacuggacagcg

SEQ ID NO: 3895269 - RNA, 23 nt, Human adenovirus A
augaggaagcaauaaaacaagga

SEQ ID NO: 3895270 - RNA, 15 nt, Human adenovirus A
augaugccgcagugg

SEQ ID NO: 3895271 - RNA, 12 nt, Human adenovirus A
augcaaggcgcc

SEQ ID NO: 3895272 - RNA, 20 nt, Human adenovirus A
augcaguguaaccagaucua

SEQ ID NO: 3895273 - RNA, 14 nt, Human adenovirus A
augccaacaaaacu

SEQ ID NO: 3895274 - RNA, 22 nt, Human adenovirus A
augccagacacgcaucuugugu

SEQ ID NO: 3895275 - RNA, 15 nt, Human adenovirus A
augccaguuuacuga

SEQ ID NO: 3895276 - RNA, 19 nt, Human adenovirus A
augccaguuuacugacaga

SEQ ID NO: 3895277 - RNA, 14 nt, Human adenovirus A
augcccgccuggca

SEQ ID NO: 3895278 - RNA, 18 nt, Human adenovirus A
augcccugcaaaaagaaa

SEQ ID NO: 3895279 - RNA, 13 nt, Human adenovirus A
augccggcagcgg

SEQ ID NO: 3895280 - RNA, 18 nt, Human adenovirus A
augccuuuuucccaagcu

SEQ ID NO: 3895281 - RNA, 22 nt, Human adenovirus A
augcgacguuuuguuaccugug

SEQ ID NO: 3895282 - RNA, 19 nt, Human adenovirus A
augcgggagggacaagcuu

SEQ ID NO: 3895283 - RNA, 10 nt, Human adenovirus A
augcuggaac

SEQ ID NO: 3895284 - RNA, 17 nt, Human adenovirus A
augcuuagucauuacaa

SEQ ID NO: 3895285 - RNA, 20 nt, Human adenovirus A
auggaaagccgguuguaagc

SEQ ID NO: 3895286 - RNA, 15 nt, Human adenovirus A
auggacucaaauaaa

SEQ ID NO: 3895287 - RNA, 17 nt, Human adenovirus A
auggagcggcugacaga

SEQ ID NO: 3895288 - RNA, 18 nt, Human adenovirus A
auggaguuuagaaggaaa

SEQ ID NO: 3895289 - RNA, 20 nt, Human adenovirus A
auggcagcggcgccacccua

SEQ ID NO: 3895290 - RNA, 21 nt, Human adenovirus A
auggcuaugauuaaugucuaa

SEQ ID NO: 3895291 - RNA, 21 nt, Human adenovirus A
augggaggaaagacagccaag

SEQ ID NO: 3895292 - RNA, 14 nt, Human adenovirus A
augggcaccuggaa

SEQ ID NO: 3895293 - RNA, 21 nt, Human adenovirus A
augggcaccuggaacgagauc

SEQ ID NO: 3895294 - RNA, 16 nt, Human adenovirus A
augguaaaaaggaagc

SEQ ID NO: 3895295 - RNA, 13 nt, Human adenovirus A
augguagaggaaa

SEQ ID NO: 3895296 - RNA, 20 nt, Human adenovirus A
auggucuucaagaaaaacca

SEQ ID NO: 3895297 - RNA, 19 nt, Human adenovirus A
auggugacgguucuucuca

SEQ ID NO: 3895298 - RNA, 14 nt, Human adenovirus A
auguaucagcagcc

SEQ ID NO: 3895299 - RNA, 21 nt, Human adenovirus A
auguaugcccagcaugaccaa

SEQ ID NO: 3895300 - RNA, 15 nt, Human adenovirus A
augugaugaaaguag

SEQ ID NO: 3895301 - RNA, 21 nt, Human adenovirus A
augugcaaauauaaaagcaca

SEQ ID NO: 3895302 - RNA, 17 nt, Human adenovirus A
augugugcgcugugguu

SEQ ID NO: 3895303 - RNA, 19 nt, Human adenovirus A
auguuaauuaucccuuuga

SEQ ID NO: 3895304 - RNA, 20 nt, Human adenovirus A
auguucccaaauauccagga

SEQ ID NO: 3895305 - RNA, 15 nt, Human adenovirus A
auguucgaagcuaau

SEQ ID NO: 3895306 - RNA, 13 nt, Human adenovirus A
auuaaaagggaag

SEQ ID NO: 3895307 - RNA, 16 nt, Human adenovirus A
auuaacuuugaugaaa

SEQ ID NO: 3895308 - RNA, 21 nt, Human adenovirus A
auuacacucaggccauaaaga

SEQ ID NO: 3895309 - RNA, 15 nt, Human adenovirus A
auuaccgagcuccau

SEQ ID NO: 3895310 - RNA, 14 nt, Human adenovirus A
auuaucgcucuuuu

SEQ ID NO: 3895311 - RNA, 14 nt, Human adenovirus A
auuauuugaacaca

SEQ ID NO: 3895312 - RNA, 16 nt, Human adenovirus A
auucagcuaacaaugc

SEQ ID NO: 3895313 - RNA, 22 nt, Human adenovirus A
auucauauauguaucuggacau

SEQ ID NO: 3895314 - RNA, 13 nt, Human adenovirus A
auucaucaacauu

SEQ ID NO: 3895315 - RNA, 14 nt, Human adenovirus A
auucaucauuuguc

SEQ ID NO: 3895316 - RNA, 14 nt, Human adenovirus A
auuccauaauuaaa

SEQ ID NO: 3895317 - RNA, 20 nt, Human adenovirus A
auuccaugagcccggggacu

SEQ ID NO: 3895318 - RNA, 22 nt, Human adenovirus A
auucgcgugccaggcauuucca

SEQ ID NO: 3895319 - RNA, 15 nt, Human adenovirus A
auucuugagccugga

SEQ ID NO: 3895320 - RNA, 13 nt, Human adenovirus A
auugauacuuguu

SEQ ID NO: 3895321 - RNA, 23 nt, Human adenovirus A
auugcccccuuuaccaacaccaa

SEQ ID NO: 3895322 - RNA, 16 nt, Human adenovirus A
auugguggaaaaagau

SEQ ID NO: 3895323 - RNA, 14 nt, Human adenovirus A
auugguuccuaaua

SEQ ID NO: 3895324 - RNA, 22 nt, Human adenovirus A
auuguaagcgauuuuccaaaug

SEQ ID NO: 3895325 - RNA, 16 nt, Human adenovirus A
auuguagccugcuuuc

SEQ ID NO: 3895326 - RNA, 15 nt, Human adenovirus A
auugugggacuggga

SEQ ID NO: 3895327 - RNA, 16 nt, Human adenovirus A
auuguuaacacugccg

SEQ ID NO: 3895328 - RNA, 22 nt, Human adenovirus A
caaacuauauaaaucagccuuu

SEQ ID NO: 3895329 - RNA, 15 nt, Human adenovirus A
caaacuuacaagcac

SEQ ID NO: 3895330 - RNA, 16 nt, Human adenovirus A
caaagccacaccucca

SEQ ID NO: 3895331 - RNA, 14 nt, Human adenovirus A
caaagccaggcaca

SEQ ID NO: 3895332 - RNA, 21 nt, Human adenovirus A
caaaguaauauuguagccugc

SEQ ID NO: 3895333 - RNA, 13 nt, Human adenovirus A
caaagugaagugu

SEQ ID NO: 3895334 - RNA, 13 nt, Human adenovirus A
caaauccaaaagc

SEQ ID NO: 3895335 - RNA, 16 nt, Human adenovirus A
caaauccaaaagcaac

SEQ ID NO: 3895336 - RNA, 16 nt, Human adenovirus A
caaaugcccugcaaaa

SEQ ID NO: 3895337 - RNA, 19 nt, Human adenovirus A
caaaugcuuagucauuaca

SEQ ID NO: 3895338 - RNA, 15 nt, Human adenovirus A
caaauuugcauuucc

SEQ ID NO: 3895339 - RNA, 20 nt, Human adenovirus A
caacaacagcuucuaaaaga

SEQ ID NO: 3895340 - RNA, 22 nt, Human adenovirus A
caacaagaugaguaaagauauu

SEQ ID NO: 3895341 - RNA, 21 nt, Human adenovirus A
caacaagucuucugacauugc

SEQ ID NO: 3895342 - RNA, 19 nt, Human adenovirus A
caacaauggcauagaaagu

SEQ ID NO: 3895343 - RNA, 15 nt, Human adenovirus A
caacacaaaaaaaac

SEQ ID NO: 3895344 - RNA, 13 nt, Human adenovirus A
caacacagcacua

SEQ ID NO: 3895345 - RNA, 16 nt, Human adenovirus A
caacaccucacaaggu

SEQ ID NO: 3895346 - RNA, 21 nt, Human adenovirus A
caacagcggggaggaagcuga

SEQ ID NO: 3895347 - RNA, 12 nt, Human adenovirus A
caacaguacagg

SEQ ID NO: 3895348 - RNA, 20 nt, Human adenovirus A
caacccaaacuguacaagga

SEQ ID NO: 3895349 - RNA, 13 nt, Human adenovirus A
caaccucacugcu

SEQ ID NO: 3895350 - RNA, 13 nt, Human adenovirus A
caacgaaggccaa

SEQ ID NO: 3895351 - RNA, 21 nt, Human adenovirus A
caacggcaggaaaucugggag

SEQ ID NO: 3895352 - RNA, 22 nt, Human adenovirus A
caacugagacuucccacagcca

SEQ ID NO: 3895353 - RNA, 14 nt, Human adenovirus A
caacugcacuugaa

SEQ ID NO: 3895354 - RNA, 18 nt, Human adenovirus A
caacugucaaaccugaca

SEQ ID NO: 3895355 - RNA, 17 nt, Human adenovirus A
caacuugcuuccagaca

SEQ ID NO: 3895356 - RNA, 20 nt, Human adenovirus A
caagacguuccauggcuucg

SEQ ID NO: 3895357 - RNA, 20 nt, Human adenovirus A
caagacuauucuagcaaaau

SEQ ID NO: 3895358 - RNA, 15 nt, Human adenovirus A
caagaggaagaaaga

SEQ ID NO: 3895359 - RNA, 16 nt, Human adenovirus A
caagaggagaaggagg

SEQ ID NO: 3895360 - RNA, 18 nt, Human adenovirus A
caagcacgccaaagccac

SEQ ID NO: 3895361 - RNA, 18 nt, Human adenovirus A
caagcauuuuuuguugcu

SEQ ID NO: 3895362 - RNA, 22 nt, Human adenovirus A
caagcauuuuuuguugcuccag

SEQ ID NO: 3895363 - RNA, 14 nt, Human adenovirus A
caagccgcaggacu

SEQ ID NO: 3895364 - RNA, 15 nt, Human adenovirus A
caagccgcucucacc

SEQ ID NO: 3895365 - RNA, 19 nt, Human adenovirus A
caagccgcucucaccgcua

SEQ ID NO: 3895366 - RNA, 14 nt, Human adenovirus A
caagccuguaaaau

SEQ ID NO: 3895367 - RNA, 16 nt, Human adenovirus A
caagcggcgaaggccu

SEQ ID NO: 3895368 - RNA, 14 nt, Human adenovirus A
caagcuucccaacu

SEQ ID NO: 3895369 - RNA, 18 nt, Human adenovirus A
caaggaccgcauguauuc

SEQ ID NO: 3895370 - RNA, 15 nt, Human adenovirus A
caaggucaacuuaca

SEQ ID NO: 3895371 - RNA, 18 nt, Human adenovirus A
caagguuuuuacauucca

SEQ ID NO: 3895372 - RNA, 20 nt, Human adenovirus A
caaguugacuucgcacaggc

SEQ ID NO: 3895373 - RNA, 21 nt, Human adenovirus A
caaguugacuucgcacaggcg

SEQ ID NO: 3895374 - RNA, 19 nt, Human adenovirus A
caauaguggcugcaagguc

SEQ ID NO: 3895375 - RNA, 22 nt, Human adenovirus A
caaugacaaugaauaagccacc

SEQ ID NO: 3895376 - RNA, 16 nt, Human adenovirus A
caaugcagcuguggag

SEQ ID NO: 3895377 - RNA, 21 nt, Human adenovirus A
caauuuacauuuuaacuguga

SEQ ID NO: 3895378 - RNA, 21 nt, Human adenovirus A
caauuucuuccuccuggaggu

SEQ ID NO: 3895379 - RNA, 15 nt, Human adenovirus A
cacaaaauaccccua

SEQ ID NO: 3895380 - RNA, 17 nt, Human adenovirus A
cacaaauggacccauau

SEQ ID NO: 3895381 - RNA, 14 nt, Human adenovirus A
cacaaggaaaugag

SEQ ID NO: 3895382 - RNA, 14 nt, Human adenovirus A
cacaaguacaucca

SEQ ID NO: 3895383 - RNA, 17 nt, Human adenovirus A
cacaccaaacuggccau

SEQ ID NO: 3895384 - RNA, 14 nt, Human adenovirus A
cacacgcagcaacc

SEQ ID NO: 3895385 - RNA, 20 nt, Human adenovirus A
cacagaacauacaacuugca

SEQ ID NO: 3895386 - RNA, 15 nt, Human adenovirus A
cacagcacuaacaug

SEQ ID NO: 3895387 - RNA, 12 nt, Human adenovirus A
cacagccagugg

SEQ ID NO: 3895388 - RNA, 12 nt, Human adenovirus A
cacagcuuccag

SEQ ID NO: 3895389 - RNA, 14 nt, Human adenovirus A
cacaggauccacuu

SEQ ID NO: 3895390 - RNA, 13 nt, Human adenovirus A
cacaguaaucuuu

SEQ ID NO: 3895391 - RNA, 21 nt, Human adenovirus A
cacauugcgcaaaauugagga

SEQ ID NO: 3895392 - RNA, 15 nt, Human adenovirus A
cacccaagggugcag

SEQ ID NO: 3895393 - RNA, 16 nt, Human adenovirus A
cacccucccagacugc

SEQ ID NO: 3895394 - RNA, 21 nt, Human adenovirus A
caccgccaugcgcgcggccag

SEQ ID NO: 3895395 - RNA, 20 nt, Human adenovirus A
caccgucaauucuucuucca

SEQ ID NO: 3895396 - RNA, 16 nt, Human adenovirus A
caccucgcuccaauuu

SEQ ID NO: 3895397 - RNA, 20 nt, Human adenovirus A
caccucuagaaacugugccc

SEQ ID NO: 3895398 - RNA, 15 nt, Human adenovirus A
caccuuuuaccuaaa

SEQ ID NO: 3895399 - RNA, 17 nt, Human adenovirus A
cacgagccagcugaacg

SEQ ID NO: 3895400 - RNA, 22 nt, Human adenovirus A
cacgcaucuuguguuuaagccu

SEQ ID NO: 3895401 - RNA, 16 nt, Human adenovirus A
cacgccaaagccacac

SEQ ID NO: 3895402 - RNA, 12 nt, Human adenovirus A
cacgccguagac

SEQ ID NO: 3895403 - RNA, 13 nt, Human adenovirus A
cacggccucagca

SEQ ID NO: 3895404 - RNA, 16 nt, Human adenovirus A
cacuaccgucagugaa

SEQ ID NO: 3895405 - RNA, 15 nt, Human adenovirus A
cacuacgcccacuuc

SEQ ID NO: 3895406 - RNA, 16 nt, Human adenovirus A
cacuagucccauuaca

SEQ ID NO: 3895407 - RNA, 20 nt, Human adenovirus A
cacuagucccauuacaguaa

SEQ ID NO: 3895408 - RNA, 14 nt, Human adenovirus A
cacugaaaaaccaa

SEQ ID NO: 3895409 - RNA, 23 nt, Human adenovirus A
acgcaguuacaacuugcuuccag

SEQ ID NO: 3895410 - RNA, 17 nt, Human adenovirus A
acgccuuacauguggag

SEQ ID NO: 3895411 - RNA, 13 nt, Human adenovirus A
acgcuuugcuuga

SEQ ID NO: 3895412 - RNA, 23 nt, Human adenovirus A
acgcuuuuuugaguacucagccg

SEQ ID NO: 3895413 - RNA, 14 nt, Human adenovirus A
acggagacaaaauu

SEQ ID NO: 3895414 - RNA, 18 nt, Human adenovirus A
acguagucauauagcuca

SEQ ID NO: 3895415 - RNA, 21 nt, Human adenovirus A
acgucaccaccucaaaaucua

SEQ ID NO: 3895416 - RNA, 16 nt, Human adenovirus A
acgucgcuaaauggau

SEQ ID NO: 3895417 - RNA, 21 nt, Human adenovirus A
acguucccgcccuuacagauc
